(19) United States
(12) Patent Application Publication
(10) Pub. No.: US 2026/0022371 A1
(43) Pub. Date: Jan. 22, 2026

(54) PREPARATION OF LONG READ NUCLEIC ACID LIBRARIES

(71) Applicant: Illumina, Inc., San Diego, CA (US)

(72) Inventors: Heather Meinholz, Cottage Grove, WI (US); Daniel Gerhardt, Madison, WI (US); Joshua Burgess, Sun Prairie, WI (US); Leigh Graham Monahan, Stanmore (AU); Jennifer Dennin, Mt. Horeb, WI (US); Stephen Paul Bruinsma, Madison, WI (US); M. Maggie O'Meara, Madison, WI (US); Aaron Earl Darling, Hornsby (AU); Johnathan Parker, Dane, WI (US); Stewart MacArthur, Cambridge (GB); Denise Raterman, Madison, WI (US); Feng Chen, Castro Valley, CA (US); Susan C. Verity, Cambridge (GB); Andrew Slatter, Cambridge (GB); Esther Musgrave-Brown, Cambridge (GB); Tina Huang, Los Altos, CA (US); Tiffany Truong, San Francisco, CA (US); Brian Hawks, San Diego, CA (US); David Tse, San Diego, CA (US)

(21) Appl. No.: 18/867,214

(22) PCT Filed: May 25, 2023
(86) PCT No.: PCT/US2023/067465

§ 371 Date: Nov. 19, 2024

Related U.S. Application Data
(60) Provisional application No. 63/365,361, filed on May 26, 2022.
(60) Provisional application No. 63/366,222, filed on Jun. 10, 2022.
(60) Provisional application No. 63/366,516, filed on Jun. 16, 2022.
(60) Provisional application No. 63/366,896, filed on Jun. 23, 2022.
(60) Provisional application No. 63/373,685, filed on Aug. 26, 2022.
(60) Provisional application No. 63/483,213, filed on Feb. 3, 2023.

(51) Int. Cl. C12N 15/10; C12Q 1/6806; C12Q 1/6809; C12Q 1/6853; C12Q 1/686; C12Q 1/6874

(52) U.S. Cl. CPC C12N 15/1093; C12N 15/1031; C12Q 1/6806; C12Q 1/6809; C12Q 1/6853; C12Q 1/686; C12Q 1/6874

(57) ABSTRACT

Some embodiments of the methods and compositions provided herein relate to obtaining long read information from short reads of a target nucleic acid. Some embodiments include steps to selectively generate, mark, and amplify long nucleic acid fragments. Some embodiments include enriching for certain sequences in the long fragments with selection probes directed to an American College of Medical Genetics (ACMG) panel of genes. Some embodiments also include fragmenting the long nucleic acid fragments into shorter fragments for sequencing, and informatically reconstructing a sequence of the target nucleic acid.

### RELATED APPLICATIONS

[0001] This application claims priority to U.S. Prov. App. No. 63/483,213 filed Feb. 3, 2023; U.S. Prov. App. No. 63/373,685 filed Aug. 26, 2022; U.S. Prov. App. No. 63/366,896 filed Jun. 23, 2022; U.S. Prov. App. No. 63/366,516 filed Jun. 16, 2022; U.S. Prov. App. No. 63/366,222 filed Jun. 10, 2022; and U.S. Prov. App. No. 63/365,361 filed May 26, 2022, which are each entitled “PREPARATION OF LONG READ NUCLEIC ACID LIBRARIES” and which are each incorporated by reference herein in its entirety.

### REFERENCE TO SEQUENCE LISTING

[0002] The present application is being filed along with a Sequence Listing in electronic format. The Sequence Listing is provided as a file entitled ILLINC736WO2, created May 21, 2023, which is approximately 108,861,273 bytes in size. The information in the electronic format of the Sequence Listing is incorporated herein by reference in its entirety.

### FIELD OF THE INVENTION

[0003] Some embodiments of the methods and compositions provided herein relate to obtaining long read information from short reads of a target nucleic acid. Some embodiments include steps to selectively generate, mark, and amplify long nucleic acid fragments. Some embodiments include enriching for certain sequences in the long fragments with selection probes directed to an American College of Medical Genetics (ACMG) panel of genes. Some embodiments also include fragmenting the long nucleic acid fragments into shorter fragments for sequencing, and informatically reconstructing a sequence of the target nucleic acid.

### BACKGROUND OF THE INVENTION

[0004] Current protocols for next-generation sequencing (NGS) of nucleic acid samples routinely employ a sample preparation process that converts DNA or RNA into a library of fragmented, sequenceable templates. Sample preparation methods often require multiple steps, material transfers, and expensive instruments to effect fragmentation, and therefore are often difficult, tedious, expensive, and inefficient.

[0005] In one approach, nucleic acid fragment libraries may be prepared using a transposome-based method where two transposon end sequences, one linked to a tag sequence, and a transposase form a transposome complex. The transposome complexes are used to fragment and tag target nucleic acids in solution to generate a sequencer-ready tagmented library. The transposome complexes may be immobilized on a solid surface, such as through a biotin molecule appended at the 5′ end of one of the two end sequences. Use of immobilized transposomes can provide advantages over solution-phase approaches by reducing hands-on and overall library preparation time, cost, and reagent requirements, lowering sample input requirements, and enabling the use of unpurified or degraded samples as a starting point for library preparation. However, certain portions of a genome may be underrepresented in libraries prepared using such transposomes.

### SUMMARY OF THE INVENTION

[0006] Some embodiments of the methods and compositions provided herein a method for preparing a nucleic acid library, comprising: (a) obtaining a plurality of transposomes comprising transposon adaptors, wherein the plurality of transposomes is immobilized on a solid support; (b) contacting a plurality of nucleic acid fragments with the plurality of transposomes to obtain a plurality of polynucleotides; (c) amplifying the plurality of polynucleotides to obtain amplified polynucleotides; and (d) adding library adapters to each end of the amplified polynucleotides, thereby obtaining the nucleic acid library.

[0007] In some embodiments, the solid support comprises a bead. In some embodiments, the plurality of the transposomes is immobilized on the bead at a density such that an average length of the plurality of polynucleotides is greater than about 1 kbp, 2 kbp, 5 kbp, 10 kbp, 15 kbp, 20 kbp, or 40 kbp; and/or wherein the average length of the plurality of polynucleotides is in a range from about 1 kbp to about 40 kbp, 1 kbp to about 30 kbp, 1 kbp to about 20 kbp, 5 kbp to about 20 kbp, 5 kbp to about 15 kbp, or 7 kbp to about 12 kbp. In some embodiments, the number of transposomes immobilized on the bead is no more than about 100 transposomes, 50 transposomes, 40 transposomes, 30 transposomes, 20 transposomes, or 10 transposomes. In some embodiments, the number of transposomes immobilized on the bead is no more than about 30 transposomes. In some embodiments, the plurality of the transposomes immobilized on the bead comprise a total activity such that an average length of the plurality of polynucleotides greater than about 1 kbp, 2 kbp, 5 kbp, 10 kbp, 15 kbp, 20 kbp, or 40 kbp; and/or wherein the average length of the plurality of polynucleotides is in a range from about 1 kbp to about 40 kbp, 1 kbp to about 30 kbp, 1 kbp to about 20 kbp, 5 kbp to about 20 kbp, 5 kbp to about 15 kbp, or 7 kbp to about 12 kbp. In some embodiments, the plurality of the transposomes immobilized on the bead comprise an activity in a range from about 0.05 AU/μl to about 0.25 0.05 AU/μl. In some embodiments, the plurality of the transposomes immobilized on the bead comprise an activity of about 0.075 AU/μl. In some embodiments, the transposon adapters comprise the same sequence. In some embodiments, the transposomes of the plurality of transposomes are the same. In some embodiments, the transposomes of the plurality of transposomes are B15 transposomes. In some embodiments, the transposon adapters comprise the nucleotide sequence: SEQ ID NO:01 (GTCTCGTGGGCTCGG).

[0008] In some embodiments, the step (c) comprises a mutagenesis PCR, such that mutations are introduced into amplified polynucleotides. In some embodiments, the mutagenesis PCR comprises amplifying the plurality of polynucleotides with a low bias DNA polymerase, and/or with a nucleotide analogue. In some embodiments, the nucleotide analogue comprises dPTP, and/or 8-oxo-dGTP. In some embodiments, the low bias DNA polymerase is a Thermococcal polymerase, or a functional derivative thereof. In some embodiments, the Thermococcal polymerase is derived from a Thermococcal strain selected from the group consisting of T. kodakarensis, T. siculi, T. celer and T. sp KS-1. In some embodiments, the mutagenesis PCR comprises no more than 12 cycles, 10 cycles, 9 cycles, 8 cycles, 7 cycles, 6 cycles, 5 cycles, 4 cycles, 3 cycles, or 2 cycles. In some embodiments, the mutagenesis PCR comprises no more than 6 cycles.

[0009] In some embodiments, a first end of a polynucleotide of the plurality of polynucleotides is capable of annealing to a second end of the polynucleotide of the plurality of polynucleotides; and/or, wherein a first end of an amplified polynucleotide is capable of annealing to a second end of the amplified polynucleotide. In some embodiments, step (c) further comprises a suppression PCR. In some embodiments, the suppression PCR comprises use of a single amplification primer. In some embodiments, the amplified polynucleotides have an average length greater than about 1 kbp, 2 kbp, 3 kbp, 4 kbp, 5 kbp, 10 kbp, 15 kbp, or 20 kbp. In some embodiments, the suppression PCR comprises no more than 16 cycles, 14 cycles, 10 cycles, 9 cycles, 8 cycles, 7 cycles, 6 cycles, 5 cycles, 4 cycles, 3 cycles, or 2 cycles. In some embodiments, the suppression PCR comprises no more than 6 cycles.

[0010] Some embodiments also include enriching for target nucleic acids in the amplified polynucleotides. Some embodiments also include enriching for target nucleic acids in the plurality of polynucleotides. In some embodiments, the enriching for target nucleic acids in the amplified polynucleotides is performed after performing the mutagenesis PCR, and before performing the suppression PCR. In some embodiments, the enriching for target nucleic acids in the amplified polynucleotides is performed after performing the suppression PCR. Some embodiments also include amplifying the target nucleic acids.

[0011] In some embodiments, step (d) comprises contacting the amplified polynucleotides with an additional plurality of transposomes comprising the library adapters. In some embodiments, the library adapters comprise (i) indexes, (ii) bridge amplification primer binding sites, and/or (iii) sequencing primer binding sites. Some embodiments also include enriching for target polynucleotides in the nucleic acid library.

[0012] In some embodiments, the enriching comprises hybridizing a plurality of selection probes with the amplified polynucleotides, the plurality of polynucleotides, and/or the nucleic acid library, wherein the selection probes of the plurality of selection probes comprise different nucleotide sequences from one another. In some embodiments, an average distance between two adjacent nucleotide sequences of the selection probes on a reference sequence of a genome is in a range from about 300 consecutive nucleotides to about 7,000 consecutive nucleotides; optionally, wherein the range is from about 500 consecutive nucleotides to about 5,000 consecutive nucleotides; optionally, wherein the range is from about 750 consecutive nucleotides to about 2,500 consecutive nucleotides; optionally, wherein the range is from about 750 consecutive nucleotides to about 1,500 consecutive nucleotides; and optionally, wherein the range is from about 900 consecutive nucleotides to about 1,200 consecutive nucleotides. In some embodiments, an average distance between two adjacent nucleotide sequences of the selection probes on a reference sequence of a genome is about 750, 1000, 1500, or 2000 consecutive nucleotides. In some embodiments, an average number of sites in a genome that each selection probe of the plurality of selection probes is capable of hybridizing to is no more than 50 different sites in the genome, to no more than 40 different sites in the genome, to no more than 30 different sites in the genome, to no more than 20 different sites in the genome. In some embodiments, each selection probe of the plurality of selection probes is capable of hybridizing to no more than 50 different sites in a genome, to no more than 40 different sites in a genome, to no more than 30 different sites in a genome, to no more than 20 different sites in a genome. In some embodiments, a selection probe capable of hybridizing to a site in the genome comprises at least 50, 60, 70, or 80 consecutive nucleotides complementary to at least 90% of a nucleotide sequence at the site in the genome.

[0013] In some embodiments, the plurality of selection probes comprise at least 50, 100, 200, 500, 1000, 5000 different selection probes. In some embodiments, each selection probe of the plurality of selection probes comprises a nucleotide sequence capable of hybridizing to a gene selected from TABLE 1A; and/or a nucleotide sequence within, no more than 10 kbp 5′ or no more than 10 kbp 3′ of a gene selected from TABLE 1A. In some embodiments, each selection probe of the plurality of selection probes comprises a nucleotide sequence having at least 90%, 95%, or 100% sequence identity to any one of SEQ ID NOs:02-111831. In some embodiments, each selection probe of the plurality of selection probes comprises a nucleotide sequence having at least 90%, 95%, or 100% sequence identity to any one of SEQ ID NOs:02-14449. In some embodiments, each selection probe of the plurality of selection probes comprises a nucleotide sequence having at least 90%, 95%, or 100% sequence identity to any one of SEQ ID NOs:02-6936. In some embodiments, the plurality of selection probes is attached to a substrate. In some embodiments, the substrate comprises a plurality of beads; optionally wherein the beads are magnetic.

[0014] Some embodiments also include amplifying the target polynucleotides. In some embodiments, an amount of the plurality of nucleic acid fragments is less than about 100 ng, 50 ng, 30 ng, 20 ng, 10 ng, 5 ng, or 1 ng. In some embodiments, the plurality of nucleic acid fragments is mammalian. In some embodiments, the plurality of nucleic acid fragments is human. In some embodiments, a plurality of nucleic acid fragments comprises genomic DNA.

[0015] Some embodiments of the methods and compositions provided herein a method for preparing a nucleic acid library, comprising: (a) obtaining a plurality of transposomes comprising transposon adaptors, wherein the plurality of transposomes is immobilized on a bead, wherein the transposomes of the plurality of transposomes are the same; (b) contacting a plurality of nucleic acid fragments with the plurality of transposomes to obtain a plurality of polynucleotides, wherein the plurality of the transposomes immobilized on the bead comprise a total activity such that an average length of the plurality of polynucleotides greater than about 1 kbp, 2 kbp, 5 kbp, 10 kbp, 15 kbp, 20 kbp, or 40 kbp; (c) amplifying the plurality of polynucleotides to obtain amplified polynucleotides by: (i) performing a mutagenesis PCR, such that mutations are introduced into amplified polynucleotides, and (ii) performing a suppression PCR; and (d) adding library adapters to each end of the amplified polynucleotides by contacting the amplified polynucleotides with an additional plurality of transposomes, thereby obtaining the nucleic acid library.

[0016] Some embodiments also include enriching for target nucleic acids in the amplified polynucleotides, and/or enriching for target nucleic acids in the nucleic acid library. In some embodiments, enriching for target nucleic acids in the amplified polynucleotides is performed prior to performing the suppression PCR. In some embodiments, enriching for target nucleic acids in the amplified polynucleotides is performed after performing the suppression PCR. In some embodiments, the enriching comprises hybridizing a plurality of selection probes with the amplified polynucleotides and/or the nucleic acid library.

[0017] In some embodiments, the enriching comprises hybridizing a plurality of selection probes with the amplified polynucleotides, the plurality of polynucleotides, and/or the nucleic acid library, wherein the selection probes of the plurality of selection probes comprise different nucleotide sequences from one another. In some embodiments, an average distance between two adjacent nucleotide sequences of the selection probes on a reference sequence of a genome is in a range from about 300 consecutive nucleotides to about 7,000 consecutive nucleotides; optionally, wherein the range is from about 500 consecutive nucleotides to about 5,000 consecutive nucleotides; optionally, wherein the range is from about 750 consecutive nucleotides to about 2,500 consecutive nucleotides; optionally, wherein the range is from about 750 consecutive nucleotides to about 1,500 consecutive nucleotides; and optionally, wherein the range is from about 900 consecutive nucleotides to about 1,200 consecutive nucleotides. In some embodiments, an average distance between two adjacent nucleotide sequences of the selection probes on a reference sequence of a genome is about 750, 1000, 1500, or 2000 consecutive nucleotides. In some embodiments, an average number of sites in a genome that each selection probe of the plurality of selection probes is capable of hybridizing to is no more than 50 different sites in the genome, to no more than 40 different sites in the genome, to no more than 30 different sites in the genome, to no more than 20 different sites in the genome. In some embodiments, each selection probe of the plurality of selection probes is capable of hybridizing to no more than 50 different sites in a genome, to no more than 40 different sites in a genome, to no more than 30 different sites in a genome, to no more than 20 different sites in a genome. In some embodiments, a selection probe capable of hybridizing to a site in the genome comprises at least 50, 60, 70, or 80 consecutive nucleotides complementary to at least 90% of a nucleotide sequence at the site in the genome.

[0018] In some embodiments, the plurality of selection probes comprise at least 50, 100, 200, 500, 1000, 5000 different selection probes. In some embodiments, each selection probe of the plurality of selection probes comprises a nucleotide sequence capable of hybridizing to a gene selected from TABLE 1A; and/or a nucleotide sequence within, no more than 10 kbp 5′ or no more than 10 kbp 3′ of a gene selected from TABLE 1A. In some embodiments, each selection probe of the plurality of selection probes comprises a nucleotide sequence having at least 90%, 95%, or 100% sequence identity to any one of SEQ ID NOs:02-111831. In some embodiments, each selection probe of the plurality of selection probes comprises a nucleotide sequence having at least 90%, 95%, or 100% sequence identity to any one of SEQ ID NOs:02-14449. In some embodiments, each selection probe of the plurality of selection probes comprises a nucleotide sequence having at least 90%, 95%, or 100% sequence identity to any one of SEQ ID NOs:02-6936. In some embodiments, the plurality of selection probes is attached to a substrate; optionally, wherein the substrate comprises a plurality of beads; optionally wherein the beads are magnetic.

[0019] Some embodiments of the methods and compositions provided herein a method for determining a sequence of a target nucleic acid, comprising: performing any one of the foregoing methods; sequencing the nucleic acid library to obtain sequence reads, and assembling sequence reads to obtain the sequence of a target nucleic acid. In some embodiments, the assembling comprises comparing the sequence reads to a reference sequence. In some embodiments, the comparing comprises determining mutations introduced into the amplified polynucleotides during the mutagenesis PCR. In some embodiments, the reference sequence is obtained from the same nucleic acid sample as the plurality of nucleic acid fragments.

[0020] Some embodiments of the methods and compositions provided herein a kit comprising: a first bead-linked transposomes (BLT-1) reagent, wherein the BLT-1 transposomes comprises a first adaptor sequence; a mutagenesis reagent comprising a first primer, dPTPs, dNTPs, and a polymerase; a second bead-linked transposomes (BLT-2) reagent, wherein the BLT-2 transposomes comprise the first adaptor and a second adaptor, an amplification reagent comprising a first primer, a second primer, dNTPs, and a polymerase; wherein BLT-1 has a lower transposome density as compared to BLT-2; and wherein the first primer hybridizes to the first adaptor sequence and the second primer hybridizes to the second adaptor sequence. In some embodiments, BLT-2 has more than 10, 20, 50, 100, or 1000 times the transposome density as compared to BLT-1. In some embodiments, the first adaptor is B15 and the second adaptor is A14.

[0021] Some embodiments of the methods and compositions provided herein a system for preparing a nucleic acid library, comprising: (a) a first plurality of transposomes comprising transposon adaptors for tagmenting a plurality of nucleic acid fragments, wherein the first plurality of transposomes is immobilized on a first plurality of beads at a first density; (b) reagents for amplifying the plurality of polynucleotides to obtain amplified polynucleotides, wherein the amplifying comprising a mutagenesis PCR and/or a suppression PCR, wherein: (i) the first reagent for performing mutagenesis PCR comprise a low bias DNA polymerase and/or a nucleotide analogue; optionally, wherein the nucleotide analogue comprises dPTP, and/or 8-oxo-dGTP; and/or the low bias DNA polymerase is a Thermococcal polymerase, or a functional derivative thereof, optionally, wherein the Thermococcal polymerase is derived from a Thermococcal strain selected from the group consisting of T. kodakarensis, T. siculi, T. celer and T. sp KS-1, and (ii) the first reagents for performing suppression PCR comprise amplification primers having the same nucleotide sequence capable of hybridizing to the transposon adaptors; (c) a plurality of selection probes for enriching for target polynucleotides in the amplified polynucleotides; and (d) a second plurality of transposomes comprising library adaptors for adding library adaptors to each end of the amplified polynucleotides, wherein the second plurality of transposomes is immobilized on a second plurality of beads at a second density, wherein the first density is less than the second density.

[0022] Some embodiments of the methods and compositions provided herein a system for preparing a nucleic acid library, comprising: (a) a first plurality of transposomes for tagmenting a plurality of nucleic acid fragments to obtain a plurality of polynucleotides, wherein the first plurality of transposomes comprises transposon adaptors, wherein the first plurality of transposomes is immobilized on a solid support, optionally, wherein the solid support comprises a first plurality of beads; wherein: the first plurality of the transposomes is immobilized on the first plurality of beads at a density such that on contacting the first plurality of transposomes with the plurality of nucleic acid fragments the plurality of polynucleotides has an average length of the plurality of polynucleotides is greater than about 1 kbp, 2 kbp, 5 kbp, 10 kbp, 15 kbp, 20 kbp, or 40 kbp; and/or wherein the average length of the plurality of polynucleotides is in a range from about 1 kbp to about 40 kbp, 1 kbp to about 30 kbp, 1 kbp to about 20 kbp, 5 kbp to about 20 kbp, 5 kbp to about 15 kbp, or 7 kbp to about 12 kbp; the number of transposomes immobilized on the bead is no more than about 100 transposomes, 50 transposomes, 40 transposomes, 30 transposomes, 20 transposomes, or 10 transposomes, optionally, wherein the number of transposomes immobilized on the bead is no more than about 30 transposomes; the plurality of the transposomes immobilized on the bead comprise a total activity such that on contacting the first plurality of transposomes with the plurality of nucleic acid fragments the plurality of polynucleotides has an average length greater than about 1 kbp, 2 kbp, 5 kbp, 10 kbp, 15 kbp, 20 kbp, or 40 kbp; and/or wherein the average length of the plurality of polynucleotides is in a range from about 1 kbp to about 40 kbp, 1 kbp to about 30 kbp, 1 kbp to about 20 kbp, 5 kbp to about 20 kbp, 5 kbp to about 15 kbp, or 7 kbp to about 12 kbp; and/or the plurality of the transposomes immobilized on the bead comprise an activity in a range from about 0.05 AU/μl to about 0.25 0.05 AU/μl, optionally, wherein the plurality of the transposomes immobilized on the bead comprise an activity of about 0.075 AU/μl; (b) first reagents for amplifying the plurality of polynucleotides to obtain amplified polynucleotides; and (c) second reagents for adding library adaptors to each end of the amplified polynucleotides. In some embodiments, the transposon adapters comprise the same sequence, optionally, wherein the transposon adapters comprise the nucleotide sequence: SEQ ID NO: 01 (GTCTCGTGGGCTCGG); and/or wherein the transposomes of the plurality of transposomes are the same, optionally, wherein the transposomes of the plurality of transposomes are B15 transposomes.

[0023] In some embodiments, the first reagents comprise reagents for performing mutagenesis PCR comprising a low bias DNA polymerase and/or a nucleotide analogue; optionally, wherein: the nucleotide analogue comprises dPTP, and/or 8-oxo-dGTP; and/or the low bias DNA polymerase is a Thermococcal polymerase, or a functional derivative thereof, optionally, wherein the Thermococcal polymerase is derived from a Thermococcal strain selected from the group consisting of T. kodakarensis, T. siculi. T. celer and T. sp KS-1. In some embodiments, the first reagents comprise reagents for performing suppression PCR comprising amplification primers having the same nucleotide sequence; optionally, wherein the amplification primers are capable of hybridizing to the transposon adaptors.

[0024] In some embodiments, the second reagents comprise a second plurality of transposomes comprising the library adaptors; and optionally, wherein the second plurality of transposomes has an activity such that on contacting the second plurality of transposomes with the amplified polynucleotides a library of nucleic acids is obtained and comprises the library adaptors and having an average length less than about 1 kb, 900 bp, 800, bp, 700 bp, 600 bp, 500 bp, 400 bp, 300 bp, 200 bp, or 100 bp. In some embodiments, the first plurality of the transposomes is immobilized on the beads at a density less than a density at which the second plurality of transposomes are immobilized on the second plurality of beads.

[0025] Some embodiments also include third reagents for enriching for target polynucleotides in the amplified polynucleotides, comprising a plurality of selection probes; optionally, wherein the plurality of selection probes is attached to a third plurality of beads. In some embodiments, an average distance between two adjacent nucleotide sequences of the selection probes on a reference sequence of a genome is in a range from about 300 consecutive nucleotides to about 7,000 consecutive nucleotides; optionally, wherein the range is from about 500 consecutive nucleotides to about 5,000 consecutive nucleotides; optionally, wherein the range is from about 750 consecutive nucleotides to about 2,500 consecutive nucleotides; optionally, wherein the range is from about 750 consecutive nucleotides to about 1,500 consecutive nucleotides; and optionally, wherein the range is from about 900 consecutive nucleotides to about 1,200 consecutive nucleotides, and optionally, wherein an average distance between two adjacent nucleotide sequences of the selection probes on a reference sequence of a genome is about 750, 1000, 1500, or 2000 consecutive nucleotides. In some embodiments, an average number of sites in a genome that each selection probe of the plurality of selection probes is capable of hybridizing to is no more than 50 different sites in the genome, to no more than 40 different sites in the genome, to no more than 30 different sites in the genome, to no more than 20 different sites in the genome. In some embodiments, each selection probe of the plurality of selection probes is capable of hybridizing to no more than 50 different sites in a genome, to no more than 40 different sites in a genome, to no more than 30 different sites in a genome, to no more than 20 different sites in a genome; and optionally, wherein a selection probe capable of hybridizing to a site in the genome comprises at least 50, 60, 70, or 80 consecutive nucleotides complementary to at least 90% of a nucleotide sequence at the site in the genome. In some embodiments, the plurality of selection probes comprise at least 50, 100, 200, 500, 1000, 5000 different selection probes. In some embodiments, each selection probe of the plurality of selection probes comprises a nucleotide sequence capable of hybridizing to a gene selected from TABLE 1A; and/or a nucleotide sequence within, no more than 10 kbp 5′ or no more than 10 kbp 3′ of a gene selected from TABLE 1A. In some embodiments, each selection probe of the plurality of selection probes comprises a nucleotide sequence having at least 90%, 95%, or 100% sequence identity to any one of SEQ ID NOs:02-111831. In some embodiments, each selection probe of the plurality of selection probes comprises a nucleotide sequence having at least 90%, 95%, or 100% sequence identity to any one of SEQ ID NOs:02-14449. In some embodiments, each selection probe of the plurality of selection probes comprises a nucleotide sequence having at least 90%, 95%, or 100% sequence identity to any one of SEQ ID NOs:02-6936.

[0026] In some embodiments, the plurality of nucleic acid fragments is mammalian. In some embodiments, the plurality of nucleic acid fragments is human. In some embodiments, the plurality of nucleic acid fragments comprises genomic DNA.

[0027] Some embodiments of the methods and compositions provided herein a kit comprising: a plurality of at least 50, 100, 1000, 2000, 3000, 4000, 5000, 10000, 20000, 30000, or 40000 selection probes, wherein the selection probes are different from one another, and comprise a nucleotide sequence having at least 90%, 95%, or 100% sequence identity to any one of SEQ ID NOs:02-111831; and optionally: (i) a first plurality of transposomes comprising transposon adaptors for tagmenting a plurality of nucleic acid fragments, wherein the first plurality of transposomes is immobilized on a first plurality of beads at a first density; and (ii) a second plurality of transposomes comprising library adaptors for adding library adaptors to each end of the amplified polynucleotides, wherein the second plurality of transposomes is immobilized on a second plurality of beads at a second density, wherein the first density is less than the second density. In some embodiments, each selection probe of the plurality of selection probes comprises a nucleotide sequence having at least 90%, 95%, or 100% sequence identity to any one of SEQ ID NOs:02-14449, or to any one of SEQ ID NOs:02-6936.

### BRIEF DESCRIPTION OF THE DRAWINGS

[0028] FIG. 1 depicts an example embodiment of a workflow which includes: fragmenting long input DNA by high molecular weight (HMW) fragmentation and adding adapters, such as by tagmentation using low density bead linked transposomes (BLTs); long range PCR mutagenesis to introduce a signature into long fragments; further library preparation steps, such as additional tagmentation to obtain small fragments with adapters; sequencing and assembly of sequencing reads.

[0029] FIG. 2 depicts an example embodiment of a workflow which includes a long-read (iLR) pathway, and a reference pathway. The long-read pathway includes steps for: tagmentation; mutagenesis; bottlenecking (suppression) PCR. Both the long-read pathway and reference pathway share steps including: standard library preparation, such as tagmentation; sequencing; and assembly of sequencing reads.

[0030] FIG. 3A is a graph which relates to a purified bottlenecking PCR product run on an Agilent Bioanalyzer using a High Sensitivity DNA Kit.

[0031] FIG. 3B is a graph which relates to a purified final library prep product run on an Agilent Bioanalyzer using a High Sensitivity DNA Kit.

[0032] FIG. 4A depicts a graph of results using transposomes in solution at various concentration.

[0033] FIG. 4B depicts a graph of results for size distribution using BLTs.

[0034] FIG. 4C depicts graphs for a Staphylococcus aureus 4 Mb genome view, with samples at 4 million reads, GC content: 32.9%, size: 2.8 Mb. A: Nextera XT (soluble transposomes); B: Flex (BLT): 1 ng; C: Flex (BLT): 100 ng; D: Flex (BLT): colony direct.

[0035] FIG. 5 depicts a schematic for workflow steps including HMW fragmentation; and mutagenesis and suppression PCR in which smaller products form hairpins.

[0036] FIGS. 6A-6C depict graphs related to activity and fragment length. FIG. 6A is a graph of actual activity units (AU)/μl and median AU/μl versus build AU/μl for soluble transposomes (TSM), and BLTs having various densities/activities of transposomes: BLT at low density (BLT-LR) at 0.075 AU/μl, and TDER-BLT comprising A14 and B15 TSMs at 0.1 AU/μl, 0.2 AU/μl, and 0.5 AU/μl. In FIG. 6A, “TDER-BLR” is “TDER-BLT”. FIG. 6B is a graph of fragment size. FIG. 6C is a graph for average size for soluble TSM, and BLTs containing A14 and B15 TSMs, or B15 TSM only.

[0037] FIGS. 7A-7C depict graphs related to mutagenesis PCR for soluble TSM, and BLTs containing A14 and B15 TSMs, or B15 TSM only. FIG. 7A is a graph of mean yield (ng/μl). FIG. 7B is a graph for average size. FIG. 7C is a graph for mean average size.

[0038] FIGS. 8A-8C depict graphs related to bottleneck (suppression) PCR for soluble TSM, and BLTs containing A14 and B15 TSMs, or B15 TSM only. FIG. 8A is a graph of mean yield (ng/μl). FIG. 8B is a graph for size distribution. FIG. 8C is a graph for mean average size.

[0039] FIG. 9 depicts a graph for a sequencing metric (GC coverage) for soluble TSM, and BLTs containing A14 and B15 TSMs, or B15 TSM only.

[0040] FIGS. 10A and 10B depict graphs for a N50 sequencing metric for soluble TSM, and BLTs containing A14 and B15 TSMs, or B15 TSM only. N50 is the length of the shortest contig for which longer and equal length contigs cover at least 50% of the assembly. FIG. 10A depicts a graph for N50. FIG. 10B depicts a graph for N50 by regions.

[0041] FIG. 11 depicts a graph for a sequencing metric (fraction of bases with no coverage, left panel; and fraction of bases with <10× coverage, right panel) for soluble TSM, and BLTs containing A14 and B15 TSMs, or B15 TSM only.

[0042] FIG. 12 depict graphs of various BLT activities (Build AU/μl), and product average size (lower panel), total yield (middle panel), or fluorescent resonance energy transfer (FRET) (upper panel).

[0043] FIG. 13 depicts graphs of various BLT activities (Build AU/μl), and sequencing metrics including SLR coverage depth (lower panels), total bases (middle panels), or N50 (upper panels).

[0044] FIG. 14 depicts graphs of various BLT activities (Build AU/μl), and sequencing metrics including percent duplicated reads (lower panels), fraction of bases with <10× coverage (middle panels), or fraction of bases with no coverage (upper panels).

[0045] FIG. 15 depicts graphs of various BLT activities (AU/μl), and sequencing metrics including SLR coverage depth (lower panel), total bases (lower middle panel), redundancy (upper middle panel), or N50 (upper panel) with three different operators.

[0046] FIG. 16 depicts graphs of tagmentation yield (left panel) or tagmentation fragment length (right panel) for various amounts of input DNA.

[0047] FIG. 17 depicts graphs for various amounts of input DNA and mutagenesis yield (upper left panel), bottleneck yield (middle left panel), library yield (lower left panel), mutagenesis fragment length (upper right panel), bottleneck fragment length (middle right panel), and library fragment length (lower right panel).

[0048] FIG. 18 depicts graphs for various amounts of input DNA and sequencing metrics including: total bases (upper left panel), insert size (middle left panel), percent duplicated reads (lower left panel), total bases (upper right panel), insert size (middle right panel), and library fragment length (lower right panel). The right panels show the same data as the left panels, but without the 1000 ng data point.

[0049] FIG. 19 depicts graphs for various amounts of input DNA and sequencing metrics including: number of MQ0 reads (upper left panel), error rate (upper middle left panel), redundancy (lower middle left panel), N50 (lower left panel), number of MQ0 reads (upper right panel), error rate (upper middle right panel), redundancy (lower middle right panel), N50 (lower right panel). The right panels show the same data as the left panels, but without the 1000 ng data point.

[0050] FIG. 20 depicts graphs for various amounts of input DNA and sequencing metrics including: mode coverage (upper left panel), fraction of bases with no coverage (middle left panel), fraction of bases with <10× coverage (lower left panel), mode coverage (upper right panel), fraction of bases with no coverage (middle right panel), fraction of bases with <10× coverage (lower right panel). The right panels show the same data as the left panels, but without the 1000 ng data point.

[0051] FIG. 21 depicts a graph for various amounts of input DNA and sequencing metric (GC bias).

[0052] FIG. 22 depicts graphs for various input DNAs subjected to shearing for different periods of time, control input DNA, and HMW input DNA, and fragment size.

[0053] FIG. 23 depicts graphs for various input DNAs subjected to shearing for different periods of time, control input DNA, and HMW input DNA, and tagmentation yield (left panel) or tagmentation fragment length (right panel).

[0054] FIG. 24A depicts graphs for various input DNAs subjected to shearing for different periods of time, control input DNA, and HMW input DNA, and mutagenesis yield (left panel) or normalization yield (right panel).

[0055] FIG. 24B depicts graphs for various input DNAs subjected to shearing for different periods of time, control input DNA, and HMW input DNA, and bottleneck PCR yield (left panel) or post-bottleneck fragment length (right panel).

[0056] FIG. 25 depicts graphs for various input DNAs subjected to shearing for different periods of time, and HMW input DNA, and sequencing metrics: N50 (left panels) or redundancy (right panels).

[0057] FIG. 26 depicts graphs for various input DNAs subjected to shearing for different periods of time, and HMW input DNA, and sequencing metrics: SLR coverage (upper left panel), fraction with no coverage (middle left panel), fraction with <10× coverage (lower left panel), insert size (upper right panel), percent duplicated reads (upper middle right panel), insertion per 100 kb (lower middle right panel), or MQ0 (lower right panel).

[0058] FIG. 27 depicts graphs for various input DNAs subjected to shearing for different periods of time, and HMW input DNA, and a sequencing metric (GC bias).

[0059] FIG. 28 depicts an example overview for enrichment of ‘long fragments’ or ‘short fragments’ in a workflow.

[0060] FIG. 29 depicts an example timeline for enrichment of ‘long fragments’ or ‘short fragments’ in a workflow.

[0061] FIG. 30 depicts selection of probes with higher specificity in long fragments.

[0062] FIG. 31 depicts design of probes in regions adjacent to problematic regions of the genome.

[0063] FIG. 32 depicts embodiments including an example work flow for whole genome sequencing (WGS) with optional enrichment steps, and parallel standard short read (SR) library preparation.

[0064] FIG. 33 depicts use of 80mer probes with long fragments in problematic target regions, compared to use of probes with short fragments (upper panel); use of 80mer probes with flanked long difficult regions, compared to use of probes with short fragments (middle panel); and use of 80mer probes with long fragments in regions with infrequent probe coverage, compared to use of probes with short fragments (lower panel).

[0065] FIG. 34 depicts results of sequencing coverage for a targeted region using a method with long fragments and enrichment (ICLR with enrichment).

[0066] FIG. 35 depicts results of sequencing coverage for a targeted a 722 kb region in the MHC locus using a method with long fragments and enrichment.

[0067] FIG. 36 depicts results of sequencing coverage for a targeted a 426 kb region in the MHC locus that covered HLA-A, HLA-G, HLA-F using a method with long fragments and enrichment.

[0068] FIG. 37A depicts a graph for SNV precision and recall for methods which included (i) on market long reads; (ii) PCR free (tagmentation to provide short fragments); (iii) long fragments with enrichment using an MHC selection probe panel (ICLR-MHC enrichment); and (iv) long fragments without enrichment (ICLR-WGS).

[0069] FIG. 37B depicts a graph for Indel precision and recall for methods which included (i) on market long reads; (ii) PCR free (tagmentation to provide short fragments); (iii) long fragments with enrichment using an MHC selection probe panel (ICLR-MHC enrichment); and (iv) long fragments without enrichment (ICLR-WGS).

[0070] FIG. 38 depicts a graph for coverage in ACMG genes using methods which included long fragments with enrichment using an ACMG selection probe panel (enrichment) or long fragments without enrichment (WGS).

[0071] FIG. 39 depicts results of sequencing coverage for a TNNT2, a 22 kb gene which was fully phased in one phase block, using a method with long fragments and enrichment with an ACMG panel of selection probes.

[0072] FIG. 40A depicts results of sequencing coverage for APOB which was fully phased in one phase block, using a method with long fragments and enrichment with an ACMG panel of selection probes.

[0073] FIG. 40B depicts results of sequencing coverage for TMEM127 which was fully phased in one phase block, using a method with long fragments and enrichment with an ACMG panel of selection probes.

[0074] FIG. 41 depicts results of sequencing coverage for MSH6 using a method with long fragments and enrichment with an ACMG panel of selection probes (ICLR with enrichment), and a method with long fragments without enrichment (ICLR WGS).

[0075] FIG. 42A depicts a graph for SNV precision and recall for methods which included (i) on market long reads; (ii) PCR free (tagmentation to provide short fragments); (iii) long fragments with enrichment using an ACMG selection probe panel (ICLR-ACMG enrichment); and (iv) long fragments without enrichment (ICLR-WGS).

[0076] FIG. 42B depicts a graph for Indel precision and recall for methods which included (i) on market long reads; (ii) PCR free (tagmentation to provide short fragments); (iii) long fragments with enrichment using an ACMG selection probe panel (ICLR-ACMG enrichment); and (iv) long fragments without enrichment (ICLR-WGS).

[0077] FIG. 43A depicts a graph for SNV precision and recall for methods which included (i) on market long reads; (ii) PCR free (tagmentation to provide short fragments); (iii) long fragments with enrichment using a PGX selection probe panel (ICLR-PGX enrichment); and (iv) long fragments without enrichment (ICLR-WGS).

[0078] FIG. 43B depicts a graph for Indel precision and recall for methods which included (i) on market long reads; (ii) PCR free (tagmentation to provide short fragments); (iii) long fragments with enrichment using a PGX selection probe panel (ICLR-PGX enrichment); and (iv) long fragments without enrichment (ICLR-WGS).

[0079] FIG. 44A depicts three graphs comparing use of a first selection probe panel (SYD-C2-CMRG-230 bp) and a second selection probe panel (SYD-C2-CMRG-1 kb) for (i) total mutations in bases in region (upper left panel), (ii) percentage DUP mutant reads (upper right panel); and (iii) percentage on target unique mapped reads (lower panel).

[0080] FIG. 44B depicts a graph of normalized coverage between use of a first selection probe panel (SYD-C2-CMRG-230 bp) and a second selection probe panel (SYD-C2-CMRG-1 kb).

[0081] FIG. 44C depicts a comparison between results of sequencing coverage for HBG1 using a method (i) with long fragments and enrichment with an CMRG panel of selection probes (ICLR with enrichment); (ii) with long fragments without enrichment (ICLR WGS); and (iii) tagmentation with short reads (PCR free short read).

[0082] FIG. 45A depicts a graph for SNV precision and recall for methods which included (i) on market long reads; (ii) PCR free (tagmentation to provide short fragments); (iii) long fragments with enrichment using a CMRG selection probe panel (ICLR-CMRG enrichment); and (iv) long fragments without enrichment (ICLR-WGS).

[0083] FIG. 45B depicts a graph for Indel precision and recall for methods which included (i) on market long reads; (ii) PCR free (tagmentation to provide short fragments); (iii) long fragments with enrichment using a CMRG selection probe panel (ICLR-CMRG enrichment); and (iv) long fragments without enrichment (ICLR-WGS).

### DETAILED DESCRIPTION

[0084] Some embodiments of the methods and compositions provided herein relate to obtaining long read information from short reads of a target nucleic acid. Some embodiments include steps to selectively generate, mark, and amplify long nucleic acid fragments. Some embodiments include enriching for certain sequences in the long fragments with selection probes directed to an American College of Medical Genetics (ACMG) panel of genes. Some embodiments also include fragmenting the long nucleic acid fragments into shorter fragments for sequencing, and informatically reconstructing a sequence of the target nucleic acid.

[0085] Prior fragmentation methods typically generated a very wide distribution of fragment sizes such that even when aiming for large fragments, inevitably short fragments were included. Such short fragments are ‘wasted’ space, giving very little new information. Some embodiments provided herein preserve long (about 2,000-40,000 bp) fragments, mark them, and carry them through into a short-read portion of a workflow so they can then be reconstructed into their parent long fragments informatically. Shorter fragments are generally much less desirable, and may take up valuable sequencing space and informatics volume if they are included. Use of long fragments enables the use of a smaller number of selection probes to enrich for target sequences in the long fragments.

[0086] In prior short read library preps, most size selection was done by a combination of (1) initial fragmentation and (2) Solid-Phase Reversible Immobilization (SPRI)-based size selection. However, SPRI size selection primarily works on fragments smaller than about 60 Gbp in length. In contrast, suppression (“bottlenecking” or “bottleneck”) PCR acts on larger fragments. Suppression PCR entails appending complementary sequences on 5′ and 3′ ends of the same DNA molecule, such that during a PCR annealing step, there is a direct competition between annealing of a primer and annealing of opposite ends of the same DNA fragment. When the PCR primer anneals, extension proceeds as normal, and the fragment is amplified. When opposite ends anneal, for example by forming a hairpin, there is no templated 3′ hydroxyl to extend, and so amplification does not occur. A key to suppression PCR and size selection is that for shorter fragments, the opposite ends of the same fragment are closer together and therefore more likely to find each other and anneal. Under optimized conditions, this leads to preferential amplification of longer fragments. Aspects of suppression PCR useful with embodiments provided herein are described in Dai, Z-M, et al (2006) J. of Biotech 128:435-443; and Rand K. N. et al., (2005) N.A. Res. 33:e127 which are incorporated by reference in their entireties.

[0087] In some embodiments provided herein, complementary 5′ and 3′ ends are achieved by an initial tagmentation step with B15 transposomes only. Typically, tagmentation would be performed with a combination of A14 and B15 transposomes so that the different sequences can be used for read 1 and read 2 primers during subsequent sequencing. However, because the initial tagmentation in certain embodiments provided herein is used to provide a landing spot for PCR, different sequences for read 1 and read 2 primers do not need to be added at this stage. In contrast to SPRI size selection, it was observed that by adding cycles of suppression PCR, the number of smaller fragments under 2000 bp in length can be dramatically reduced.

[0088] In some embodiments provided herein a workflow includes: fragmenting long input DNA by high molecular weight (HMW) fragmentation and adding adapters, such as by tagmentation using low density bead linked transposomes (BLTs); long range PCR mutagenesis to introduce a signature into long fragments, further library preparation steps, such as additional tagmentation to obtain small fragments with adapters; sequencing and assembly of sequencing reads (FIG. 1). In some embodiments provided herein a workflow includes a long-read (“iLR” or “ILR”) pathway, and a reference pathway. The long-read pathway includes steps for: tagmentation; mutagenesis; bottlenecking (suppression) PCR. Both the long-read pathway and reference pathway share steps including: standard library preparation, such as tagmentation; sequencing; and assembly of sequencing reads (FIG. 2).

[0089] Certain aspects useful with embodiments of the methods and compositions provided herein are disclosed in U.S. Pat. Nos. 9,040,256; 9,683,230; and U.S. 2021/0010008 which are each incorporated by reference in its entirety.

### Definitions

[0090] As used herein, the term “nucleic acid” refers to a polynucleotide sequence, or fragment thereof. A nucleic acid can comprise nucleotides. A nucleic acid can be exogenous or endogenous to a cell. A nucleic acid can exist in a cell-free environment. A nucleic acid can be a gene or fragment thereof. A nucleic acid can be DNA. A nucleic acid can be RNA. A nucleic acid can comprise one or more analogs (e.g., altered backbone, sugar, or nucleobase). Some non-limiting examples of analogs include: 5-bromouracil, peptide nucleic acid, xeno nucleic acid, morpholinos, locked nucleic acids, glycol nucleic acids, threose nucleic acids, dideoxynucleotides, cordycepin, 7-deaza-GTP, fluorophores (e.g., rhodamine or fluorescein linked to the sugar), thiol containing nucleotides, biotin linked nucleotides, fluorescent base analogs, CpG islands, methyl-7-guanosine, methylated nucleotides, inosine, thiouridine, pseudouridine, dihydrouridine, queuosine, and wyosine. “Nucleic acid”, “polynucleotide, “target polynucleotide”, and “target nucleic acid” can be used interchangeably. As used herein, “kbp” can refer to kilobase pairs and relates to a length of a double-stranded nucleic acid. The length of a nucleic acid may also be referred to in terms of a number of nucleotides, such as consecutive nucleotides.

[0091] As used herein “transposome” includes a complex comprising of at least one transposase enzyme and a transposon recognition sequence, such as a transposon adapter. In some such systems, the transposase binds to a transposon recognition sequence to form a functional complex that is capable of catalyzing a transposition reaction. In some aspects, the transposon recognition sequence is a double-stranded transposon end sequence. The transposase, or integrase, binds to a transposase recognition site in a target nucleic acid and inserts the transposon recognition sequence into a target nucleic acid. In some such insertion events, one strand of the transposon recognition sequence (or end sequence) is transferred into the target nucleic acid, resulting also in a cleavage event. Exemplary transposition procedures and systems that can be readily adapted for use with the transposases of the present disclosure are described, for example, in WO10/048605, U.S. 2012/0301925, U.S. 2012/13470087, or U.S. 2013/0143774, each of which is incorporated herein by reference in its entirety.

[0092] In some embodiments, the transposome complex is a dimer of two molecules of a transposase. In some embodiments, the transposome complex is a homodimer, wherein two molecules of a transposase are each bound to first and second transposons of the same type (e.g., the sequences of the two transposons bound to each monomer are the same, forming a “homodimer”). In some embodiments, the compositions and methods described herein employ two populations of transposome complexes. In some embodiments, the transposases in each population are the same. In some embodiments, the transposome complexes in each population are homodimers, wherein the first population has a first adaptor sequence in each monomer and the second population has a different adaptor sequence in each monomer.

[0093] As used herein “solid surface,” “solid support,” and other grammatical equivalents refer to any material that is appropriate for or can be modified to be appropriate for the attachment of the transposome complexes. As will be appreciated by those in the art, the number of possible substrates is multitude. Possible substrates include, but are not limited to, glass and modified or functionalized glass, plastics (including acrylics, polystyrene and copolymers of styrene and other materials, polypropylene, polyethylene, polybutylene, polyurethanes, TEFLON, etc), polysaccharides, nylon or nitrocellulose, ceramics, resins, silica or silica-based materials including silicon and modified silicon, carbon, metals, inorganic glasses, plastics, optical fiber bundles, beads, paramagnetic beads, and a variety of other polymers. In some such embodiments, the transposome complex is immobilized on the solid support via the linker. In some further embodiments, the solid support comprises or is a tube, a well of a plate, a slide, a bead, or a flowcell, or a combination thereof. In some further embodiment, the solid support comprises or is a bead. In one embodiment, the bead is a paramagnetic bead. In some of the methods and compositions presented herein, transposome complexes are immobilized to a solid support. In one embodiment, the solid support is a bead. Suitable bead compositions include, but are not limited to, plastics, ceramics, glass, polystyrene, methylstyrene, acrylic polymers, paramagnetic materials, thoria sol, carbon graphite, titanium dioxide, latex or cross-linked dextrans such as Sepharose, cellulose, nylon, cross-linked micelles and TEFLON, as well as any other materials outlined herein for solid supports.

[0094] As used herein, “tagmentation: includes to the modification of DNA by a transposome complex comprising transposase enzyme complexed with adaptors comprising transposon end sequence. Tagmentation results in the simultaneous fragmentation of the DNA and ligation of the adaptors to the 5′ ends of both strands of duplex fragments. Following a purification step to remove the transposase enzyme, additional sequences can be added to the ends of the adapted fragments, for example by PCR, ligation, or any other suitable methodology known to those of skill in the art.

### Certain Methods for Preparing Nucleic Acid Libraries

[0095] Some embodiments of the methods and compositions providing herein include preparing a nucleic acid library. Some such embodiments include (a) obtaining a plurality of transposomes comprising transposon adaptors, wherein the plurality of transposomes is immobilized on a solid support; (b) contacting a plurality of nucleic acid fragments with the plurality of transposomes to obtain a plurality of polynucleotides; (c) amplifying the plurality of polynucleotides to obtain amplified polynucleotides; and (d) adding library adapters to each end of the amplified polynucleotides, thereby obtaining the nucleic acid library. In some embodiments, an amount of the plurality of nucleic acid fragments is less than about 100 ng, 50 ng, 30 ng, 20 ng, 10 ng, 5 ng, or 1 ng.

[0096] Some embodiments include an initial tagmentation step which fragments the plurality of nucleic acids fragments and adds an adaptor to each end of the products of the tagmentation. The initial tagmentation is limited such that the products of the tagmentation are longer than a tagmentation where the activity of transposomes is not limited.

[0097] Certain aspects useful with embodiments of the methods and compositions provided herein are disclosed in U.S. Pat. Nos. 9,115,396; 9,080,211; 9,040,256; U.S. patent application publication 2014/0194324, each of which is incorporated herein by reference in its entirety.

[0098] In some embodiments, the solid support comprises a bead. In some such embodiments, the transposomes are bead-linked transposomes (BLTs). In some embodiments, the activity of the transposomes on the beads is such that a tagmentation reaction with the BLT's and the plurality of nucleic acid fragments results in long polynucleotides, such as polynucleotides an having average length of the plurality of polynucleotides greater than about 1 kbp, 2 kbp, 5 kbp, 10 kbp, 15 kbp, 20 kbp, or 40 kbp; and/or wherein the average length of the plurality of polynucleotides is in a range from about 1 kbp to about 40 kbp, 1 kbp to about 30 kbp, 1 kbp to about 20 kbp, 5 kbp to about 20 kbp, 5 kbp to about 15 kbp, or 7 kbp to about 12 kbp. For example, the transposomes can be bound at a low density on the beads; and/or have a low tagmentation activity. In some embodiments, the number of transposomes immobilized on the bead is no more than about 100 transposomes, 50 transposomes, 40 transposomes, 30 transposomes, 20 transposomes, or 10 transposomes. In some embodiments, the number of transposomes immobilized on the bead is no more than about 30 transposomes. In some embodiments, the plurality of the transposomes immobilized on the bead comprise a total activity such that an average length of the plurality of polynucleotides greater than about 1 kbp, 2 kbp, 5 kbp, 10 kbp, 15 kbp, 20 kbp, or 40 kbp; and/or wherein the average length of the plurality of polynucleotides is in a range from about 1 kbp to about 40 kbp, 1 kbp to about 30 kbp, 1 kbp to about 20 kbp, 5 kbp to about 20 kbp, 5 kbp to about 15 kbp, or 7 kbp to about 12 kbp. In some embodiments, the plurality of the transposomes immobilized on the bead comprise a tagmentation activity in a range from about 0.05 AU/μl to about 0.25 AU/μl. In some embodiments, the plurality of the transposomes immobilized on the bead comprise a tagmentation activity of about 0.075 AU/μl.

[0099] In some embodiments, the transposomes on the beads are the same. For example, in some embodiments, the transposon adapters comprise the same sequence. In some embodiments, the transposomes of the plurality of transposomes are B15 transposomes. In some embodiments, the transposon adapters comprise the nucleotide sequence: SEQ ID NO:01 (GTCTCGTGGGCTCGG).

[0100] Some embodiments also include steps to add a signature to the products of the initial tagmentation. For example, a signature can be added into the sequence of the library products by steps that include limited mutagenesis. In some embodiments, step (c) comprises a mutagenesis PCR, such that mutations are introduced into amplified polynucleotides. In some embodiments, the mutagenesis PCR comprises amplifying the plurality of polynucleotides with a low bias DNA polymerase, and/or with a nucleotide analogue. In some embodiments, the nucleotide analogue comprises dPTP (such as, 6H,8H-3,4-Dihydro-pyrimido(4,5-c)(1,2) oxazin-7-one-8-β-D-2′-deoxy-ribofuranoside-5′-triphosphate), and/or 8-oxo-dGTP. dP contains the bicyclic pyrimidine analog 3,4-dihydro-8H-pyrimido-[4,5-C][1,2]oxazin-7-one. In some embodiments, the low bias DNA polymerase is a Thermococcal polymerase, or a functional derivative thereof. In some embodiments, the Thermococcal polymerase is derived from a Thermococcal strain selected from the group consisting of T. kodakarensis, T. siculi, T. celer and T. sp KS-1. In some embodiments, the mutagenesis PCR comprises no more than 12 cycles, 10 cycles, 9 cycles, 8 cycles, 7 cycles, 6 cycles, 5 cycles, 4 cycles, 3 cycles, or 2 cycles. In some embodiments, the mutagenesis PCR comprises no more than 6 cycles.

[0101] Some embodiments also include a bottlenecking or suppression PCR step to enrich for longer polynucleotides. For example, shorter amplified polynucleotides form hairpins, while longer amplified polynucleotides may be further amplified. In other words, the bottlenecking or suppression PCR can be biased against the amplification of shorter nucleic acids in a mixture of nucleic acids of different lengths. Some such embodiments can enrich for longer fragments. In some such embodiments, a first end of a polynucleotide of the plurality of polynucleotides is capable of annealing to a second end of the polynucleotide of the plurality of polynucleotides; and/or, wherein a first end of an amplified polynucleotide is capable of annealing to a second end of the amplified polynucleotide. In some embodiments, the suppression PCR comprises use of a single amplification primer. In some embodiments, the amplified polynucleotides have an average length greater than about 1 kbp, 2 kbp, 3 kbp, 4 kbp, 5 kbp, 10 kbp, 15 kbp, or 20 kbp. In some embodiments, the suppression PCR comprises no more than 16 cycles, 14 cycles, 10 cycles, 9 cycles, 8 cycles, 7 cycles, 6 cycles, 5 cycles, 4 cycles, 3 cycles, or 2 cycles. In some embodiments, the suppression PCR comprises no more than 6 cycles.

[0102] Detailed descriptions of certain embodiments of suppression PCR are found in, e.g., U.S. Pat. No. 5,565,340 and Siebert et al., Nucleic Acids Res., 23(6):1087-1088 (1995). Briefly, the inverted repeat sequences function as suppression tails by competing with the suppression PCR primer for complementary binding. The inverted repeats tend to anneal each other, thereby preventing PCR primer binding. Since shorter amplicons undergo inverted repeat annealing more often than longer amplicons, the suppression PCR favors generating long amplicons.

[0103] Some embodiments also include enriching for target nucleic acids in the amplified polynucleotides, such as products of the suppression PCR. In some embodiments, the enriching comprises hybridizing a plurality of selection probes with the amplified polynucleotides. In some embodiments, the plurality of selection probes lack sequences capable of hybridizing to a repetitive genomic DNA element. In some embodiments, the repetitive genomic DNA element is selected from a tandem repeat, an Alu repeat, a short interspersed nuclear element (SINE), a long interspersed nuclear element (LINE), an integrated viral sequence, a viral long terminal repeat (LTR), and a transposon. Some embodiments also include amplifying the target nucleic acids.

[0104] Some embodiments also include preparing a library of shorter fragments from the products of the suppression PCR, and/or the enrichment. For example, the products of the suppression PCR, and/or the enrichment can undergo an additional tagmentation. In some embodiments, step (d) comprises contacting the amplified polynucleotides with an additional plurality of transposomes. In some embodiments, the additional plurality of transposomes comprise transposon adapters comprising (i) indexes, (ii) bridge amplification primer binding sites, and/or (iii) sequencing primer binding sites. An example of a bridge amplification primer binding site includes a sequence capable of binding a capture probe on a surface, wherein the capture probe comprises a primer extended during bridge amplification on the surface.

[0105] Some embodiments also include enriching for target polynucleotides in the library of nucleic acids. In some embodiments, the enriching comprises hybridizing a plurality of selection probes with the library of nucleic acids, wherein the plurality of selection probes is capable of specifically hybridizing with the target polynucleotides. Some embodiments also include amplifying the target polynucleotides.

[0106] Some embodiments include methods for preparing a nucleic acid library, comprising: (a) obtaining a plurality of transposomes comprising transposon adaptors, wherein the plurality of transposomes is immobilized on a bead, and wherein the transposomes of the plurality of transposomes are the same; (b) contacting a plurality of nucleic acid fragments with the plurality of transposomes to obtain a plurality of polynucleotides, wherein the plurality of the transposomes immobilized on the bead comprise a total activity such that an average length of the plurality of polynucleotides greater than about 1 kbp, 2 kbp, 5 kbp, 10 kbp, 15 kbp, 20 kbp, or 40 kbp; and/or wherein the average length of the plurality of polynucleotides is in a range from about 1 kbp to about 40 kbp, 1 kbp to about 30 kbp, 1 kbp to about 20 kbp, 5 kbp to about 20 kbp, 5 kbp to about 15 kbp, or 7 kbp to about 12 kbp; (c) amplifying the plurality of polynucleotides to obtain amplified polynucleotides by: (i) performing a mutagenesis PCR, such that mutations are introduced into amplified polynucleotides, and (ii) performing a suppression PCR; and (d) adding library adapters to each end of the amplified polynucleotides by contacting the amplified polynucleotides with an additional plurality of transposomes, thereby obtaining the nucleic acid library. An example embodiment of a workflow is depicted in FIG. 32 which includes whole genome sequencing (WGS) which includes: fragmenting genomic DNA into long fragments by limited tagmentation; land-marking or adding a signature to the long fragments; amplifying the long fragments with a bias against shorter fragments; tagmenting products prior to sequencing. Optional steps include enrichment of the amplified long fragments with a panel of selection probes, such as capture probes with certain sequences. A parallel workflow includes tagmenting the genomic DNA to form a library of short fragments, such as a standard short read (SR) library, and sequencing the library of short fragments.

[0107] Some embodiments also include enriching for target nucleic acids in the amplified polynucleotides. In some embodiments, the enriching comprises hybridizing a plurality of selection probes with the amplified polynucleotides, wherein the plurality of selection probes is capable of specifically hybridizing with the target nucleic acids. In some embodiments, the plurality of selection probes lack sequences capable of hybridizing to a repetitive genomic DNA element. In some embodiments, the repetitive genomic DNA element is selected from a tandem repeat, an Alu repeat, a short interspersed nuclear element (SINE), a long interspersed nuclear element (LINE), an integrated viral sequence, a viral long terminal repeat (LTR), and a transposon. Some embodiments also include amplifying the target nucleic acids.

[0108] Some embodiments also include enriching for target polynucleotides in the library of nucleic acids. In some embodiments, the enriching comprises hybridizing a plurality of selection probes with the library of nucleic acids, wherein the plurality of selection probes is capable of specifically hybridizing with the target polynucleotides. Some embodiments also include amplifying the target polynucleotides.

[0109] Some embodiments also include methods for determining a sequence of a target nucleic acid, comprising preparing a nucleic acid library by any one of the embodiments above, sequencing the library of nucleic acids to obtain sequence reads; and assembling sequence reads to obtain the sequence of a target nucleic acid. In some embodiments, the assembling comprises comparing the sequence reads to a reference sequence. In some embodiments, the reference sequence is obtained from the same nucleic acid sample as the plurality of nucleic acid fragments.

### Target Enrichment

[0110] Certain embodiments provided herein include enriching for target nucleic acids during preparation of a nucleic acid library. FIG. 32 shows an example work flow which includes steps for whole genome sequencing (WGS) with additional enrichment steps. In some embodiments, the nucleic acid library is prepared from a nucleic acids sample with bead-linked transposomes to generate long tagmented polynucleotides. The polynucleotides are marked with methods, such as mutagenesis amplification. In an optional step, suppression/bottlenecking PCR is performed where amplification is biased against shorter self-annealing nucleic acids. Target nucleic acids can then be enriched for in the amplified nucleic acids using selection probes. Additional steps can include a further tagmentation step to generate shorter library nucleic, sequencing the library nucleic acids, and comparing the generated sequence with a reference sequence obtained from the same nucleic acid sample.

[0111] Enrichment efficiency is increased compared to conventional library preparation methods because hybridization of selection probes is to long tagmented polynucleotides. For example, specificity, such as percentage hybridization to target, directly affects the amount of sequencing needed to achieve target coverage depth. High specificity hybridization to target can be difficult to achieve in long repetitive regions and pseudogenes. However, long fragment hybridization has several advantages over short fragment. As shown in FIG. 33, long fragment hybridization allows removal of ineffective probes; allows strategic placement of probes, such as adjacent to problematic genomic regions; and allows the use of fewer probes to cover a region previously covered by many probes. Targeted enrichments can achieve cost-effective human whole genome coverage. For example, genomic regions that may have been typically underrepresented in conventional nucleic acid libraries can be targeted with selection probes. Some embodiments provided herein include the use of certain panels of selection probes, such panels a Major Histocompatibility Complex (MHC) panel directed to the MHC region; an American College of Medical Genetics and Genomics (ACMG) panel directed to genes for which specific mutations are known to be causative of disorders that are clinically actionable; a pharmacogenetic (PGX) panel directed to genes commonly targeted by pharmacogenetic testing assays; a challenging medically relevant gene (CMRG) panel directed to medically relevant autosomal genes that may be under-represented in certain tests due to repeats or polymorphic complexities; and a comprehensive genome wide (dark) panel directed to genomic regions typically underrepresented in sequencing reads.

### Major Histocompatibility Complex (MHC) Panel

[0112] Some embodiments provided herein relate to targeting the MHC region of the human genome. Some such embodiments include generation and/or use of a selection probe panel to target the MHC region. The MHC region is a large locus located on the short arm of human chromosome 6 (6p21.1-6p21.3), and contains highly polymorphic genes that code for cell surface proteins essential for the adaptive immune system. The region is challenging to obtain sequence information due to the presence of a high level of repetitive sequences, sequence homology, pseudogenes, and a wide variety of alleles in the population. Precise genotyping and phasing of the MHC region is challenging but highly clinically desirable for applications such as organ transplantation and drug discovery.

### American College of Medical Genetics (ACMG) Panel

[0113] Some embodiments provided herein relate to targeting a panel of genes, such as an American College of Medical Genetics (ACMG) panel of genes. Some such embodiments include generation and/or use of a selection probe panel to target the ACMG genes. A selection probe panel was generated from a list of genes compiled by ACMG for which specific mutations are known to be causative of disorders that are clinically actionable. Miller D. T., et al., Genet Med. 2022 July; 24(7):1407-1414. doi: 10.1016/j.gim.2022.04.006.

[0114] A selection probe panel was designed to precisely call variants and phase in these genes. The panel included 78 unique genes in ACMG SF v3.1, and targeted full genes. The panel size was about 6.8 Mbp. The ACMG genes include those listed in TABLE 1A.

TABLE 1A
ACMG genes

ACTA2, ACTC1, ACVRL1, APC, APOB, ATP7B, BAG3, BMPR1A, BRCA1, BRCA2,
BTD, CACNA1S, CASQ2, COL3A1, DES, DSC2, DSG2, DSP, ENG, FBN1, FLNC, GAA,
GLA, HFE, HNF1A, KCNH2, KCNQ1, LDLR, LMNA, MAX, MEN1, MLH1, MSH2,
MSH6, MUTYH, MYBPC3, MYH11, MYH7, MYL2, MYL3, NF2, OTC, PALB2, PCSK9,
PKP2, PMS2, PRKAG2, PTEN, RB1, RBM20, RET, RPE65, RYR1, RYR2, SCN5A,
SDHAF2, SDHB, SDHC, SDHD, SMAD3, SMAD4, STK11, TGFBR1, TGFBR2,
TMEM127, TMEM43, TNNC1, TNNI3, TNNT2, TP53, TPM1, TRDN, TSC1, TSC2, TTN,
TTR, VHL, WT1

### Pharmacogenetic (PGX) Panel

[0115] Some embodiments provided herein relate to targeting a panel of genes, such as a panel of pharmacogenetic (PGX) genes. Some such embodiments include generation and/or use of a selection probe panel to target the PGX genes. A selection probe panel was generated for genes commonly targeted by pharmacogenetic testing assays. Kalman L. V. et al., Clin Pharmacol Ther. 2016 February; 99(2):172-185. doi: 10.1002/cpt.280. Genetic variation is known to influence the way individual respond to therapeutics. Accurately detecting functional haplotypes, such as haplotypes associated with protein activity levels (“star alleles”) in clinically actionable pharmacogenetic genes is crucial to implementation of personalized medicine. The panel was generated to achieve highly accurate genotyping and star allele calling in such genes. The panel included 98 genes that are important in pharmacogenetics, targeting full genes. The panel size was about 8.1 Mbp. The genes include those listed in TABLE 1B.

TABLE 1B
PGX genes

ABCB1, ABCG2, ABL1, ACE, ADH1A, ADH1B, ADH1C, ADRA2A, ADRB1, ADRB2,
AHR, ALDH1A1, ALK, ALOX5, ANKK1, ASL, BCHE, BCR, BRAF, BRCA1,
CACNA1S, CFTR, COMT, CYP1A1, CYP1A2, CYP2A13, CYP2A6, CYP2B6,
CYP2C18, CYP2C19, CYP2C8, CYP2C9, CYP2D6, CYP2E1, CYP2J2, CYP3A4,
CYP3A5, CYP3A7, CYP4F2, DPYD, DRD2, EGFR, ERBB2, F2, F5, G6PD, GRIK4,
GRK4, GRK5, GSTM1, GSTP1, HLA-A, HLA-B, HLA-C, HLA-DPB1, HLA-DQA1,
HLA-DQB1, HLA-DRA, HLA-DRB1, HMGCR, HTR2A, HTR2C, IFNL3, IFNL4,
KCNH2, KCNJ11, KIT, KRAS, MTHFR, NAT1, NAT2, NQO1, NR1I2, NRAS, NUDT15,
OPRM1, P2RY1, P2RY12, PTGIS, PTGS2, RYR1, SCN5A, SLC15A2, SLC19A1,
SLC22A1, SLC22A2, SLCO1B1, SLCO2B1, SULT1A1, TPMT, TYMS, UGT1A1,
UGT1A4, UGT2B15, UGT2B17, UGT2B7, VDR, VKORC1

### Challenging Medically Relevant Gene (CMRG) Panel

[0116] Some embodiments provided herein relate to targeting a panel of genes, such as a panel of challenging medically relevant genes (CMRG). Some such embodiments include generation and/or use of a selection probe panel to target the CMRG. The repetitive nature and complexity of some medically relevant genes poses a challenge for their accurate analysis in a clinical setting (Wagner J., et al., (2022) Nat Biotechnol. 40:672-680). The Genome in a Bottle (GIAB) Consortium has provided variant benchmark sets, but these exclude nearly four hundred medically relevant genes due to their repetitiveness or polymorphic complexity. Multiple regions of the genome are not fully resolved in existing benchmarks due to repetitive sequence, segmental duplications, and complex variants, such as multiple nearby SNVs, INDELs, and/or SVs. Goldfeder R L et al. Genome Med. 8, 1-12 (2016).

[0117] About 5175 gene symbols have been previously identified from the following sources: (1) 4,773 potentially medically-relevant genes from the databases OMIM, HGMD, and Clin Var which includes both commonly tested and rarely tested genes (Mandelker D et al. Genet. Med 18, 1282-1289 (2016). (2) The COSMIC gene census contains 723 gene symbols found in tumors (Tate J G et al. Nucleic Acids Res. 47, D941-D947 (2019)). (3) A focused list of “High Priority Clinical Genes” that are commonly tested for clinical inherited diseases (Wagner J., et al., (2022) Nat Biotechnol. 40:672-680).

[0118] 5,027 have unique coordinates on the primary assembly of GRCh38 and valid ENSEMBL annotations, and 4,697 are autosomal. 70% of these genes are specific to the list from OMIM, HGMD, and ClinVar, which includes genes associated with disease in a small number of studies and are currently tested more frequently in research studies than in high-throughput clinical laboratories. 395 genes included 90% or less on GRCh37 or GRCh38. Many of the 395 medically relevant genes were not covered well by the v4.2.1 small variant benchmark due to SVs, complex variants, and segmental duplications. A CMRG benchmark for 273 of the 395 genes has been previously created. (Wagner J., et al., (2022) Nat Biotechnol. 40:672-680). To be included in the CMRG benchmark, the entire gene including 20 kb flanking sequence on each side and any overlapping segmental duplications needed to have exactly one fully aligned contig from each haplotype with no breaks on GRCh37 and GRCh38. The total size of 391 of the CMRG gene panel is about 22.5 Mbp. The smallest gene is about 66 bp (SNORD64), the largest gene is about 1 Mbp (PTPRN2). CMRG genes include those listed in TABLE 1C.

TABLE 1C
CMRG genes

A4GALT, ABCG8, ABO, ABR, ADAMTS10, ADAMTSL2, AFP, AGL, AGRN,
ALOXE3, ANKRD11, ANO7, APOBEC1, APOBEC3H, APOC1, APOC2, APOC4,
ARHGEF10, ASIP, ATPAF2, AXIN1, B3GAT3, BAX, BFSP2, BLOC1S3, BRAF, BSG,
BTRC, C1R, C3, CABIN1, CALR3, CANT1, CASP10, CBR3, CBS, CCL3L1, CD247,
CD320, CD4, CD55, CDH15, CDH17, CEL, CFC1, CFC1B, CFD, CFHR1, CFHR3, CHL1,
CHMP1A, CHRNA4, CLCN7, CLIP2, CNR2, COL18A1, COL6A1, COL6A2, COX14,
COX6B1, CR1, CREB3L3, CRYAA, CTDP1, CYB5R3, CYP2G1P, CYP4F12, CYP4F3,
D2HGDH, DAXX, DAZL, DCLRE1C, DEAF1, DGCR6, DIP2C, DLGAP2, DMPK,
DNAAF4, DNMT3L, DOK7, DPP6, DPY19L2, DRD4, DSPP, DUX4, DUX4L1, ECHS1,
EEF1A2, EHMT1, EIF2B5, EIF4E, ELANE, ELOA3, ENO3, ESPN, ESRRA, ETFB,
ETHE1, EXTL2, F7, FAM20C, FAT1, FCGR1A, FCGR2B, FCGR3A, FGF3, FGFRL1,
FKBP8, FLAD1, FLG, FLT4, FOXN1, FSCN2, FTCD, FUT1, FUT3, FXN, G6PC3, GAK,
GALNT9, GALR1, GALT, GCGR, GCSH, GDF3, GIP, GIPC3, GNPTG, GOLGA3,
GP1BA, GP6, GPI, GPIHBP1, GRIN1, GRK1, GSTM1, GTF2I, GTF2IRD2, GUSB,
GYPA, GYPB, GYPE, H19, HBG1, HBM, HCN2, HCN3, HEATR2, HES7, HLA-B, HLA-
DQB1, HLA-DRB1, HMGCL, HMX1, HNF1A, HOMER2, HOXB8, HPD, HSD11B2,
HYAL1, HYDIN, IFITM3, IFNL3, IGHA1, IGHG1, IGHG2, IGHM, IGHV3-21, IGKC,
IGKV1-5, IKBKB, IKZF1, IMPA1, INPP5D, INPP5E, INSL3, INSR, JAG2, KANSL1,
KATNAL2, KCNE1, KCNJ18, KCNV2, KDM2B, KIR2DL1, KIR2DL3, KIR3DL1,
KISS1, KISS1R, KLF11, KLF14, KLK4, KMT2C, KNG1, KRTAP1-1, LAMB1, LBR,
LCE3B, LHFPL5, LIPN, LIX1, LMF1, LMNB2, LPA, LRIG2, LRPAP1, LZTFL1, MAFA,
MAN1B1, MAP2K3, MARVELD2, MASP2, MBOAT7, MC1R, MDK, MEST, MLC1,
MLPH, MOGS, MPG, MRC1, MST1R, MUC1, MUC16, MUC3A, MUC4, MUC5B,
MUSK, MYO9B, MYOT, MYT1, NACA, NAIP, NAPRT, NBEAP1, NCF1, NCF1C,
NCR3, NDUFA6, NDUFAF1, NDUFB1, NDUFV3, NFKBIL1, NLRP12, NLRP2, NLRP7,
NOD1, NOTCH2, NPM1, NPPA, NSMF, NUTM2B, NUTM2D, OCLN, OPRL1, OR12D2,
OR4F5, OR51A2, ORC6, P2RX2, P2RX5, PADI4, PAPSS2, PCBP1, PCCB, PCDHA10,
PCMT1, PDE4DIP, PDE6B, PDLIM3, PDPK1, PDSS1, PEX5, PGAM5, PGAP6, PHKG2,
PIGV, PKD1, PKN3, PLA2G10, PLTP, PMS2, PNKP, POLG2, PPIA, PPIP5K1, PRG4,
PRKCG, PRODH, PROZ, PRSS2, PSPH, PTEN, PTK6, PTPRC, PTPRN2, PTPRQ, PXDN,
RFX2, RGPD3, RHCE, RHOA, RNF212, RNF213, RPIA, RPL22, RPN1, RPS17,
RXYLT1, SAR1B, SBK3, SDHA, SEC63, SEMG1, SERPINF2, SH2B1, SHANK2,
SHANK3, SIGLEC16, SIRT3, SLC17A5, SLC22A1, SLC22A12, SLC26A9, SLC27A4,
SLC27A5, SLC29A4, SLC5A11, SLC6A18, SLC6A3, SMG1, SMN1, SMN2, SMOC2,
SNORD64, SNTG2, SOHLH1, SPATA31C1, SPI1, SPRN, SRGAP2, SRR, SSTR5,
STK11, STXBP2, SULT1A1, SUZ12, TAPBP, TAS2R46, TBXA2R, TCF3, TERT, TFPT,
THBS2, TJP2, TM4SF19, TMC6, TMEM114, TNNI3, TNNT1, TNNT3, TPCN2, TPO,
TRAPPC10, TRBV9, TRMT1, TRPM4, TTC37, TTLL1, TUBGCP6, TWIST2, TYK2,
TYMS, U2AF1, UGT2A1, UGT2A2, UGT2B17, UGT2B28, UNKL, USP8, UTP4,
UVSSA, VANGL1, VKORC1, VPS53, ZAN, ZNF141, ZNF407, ZNF419, ZNF469,
ZNF479

### Certain Selection Probes

[0119] Some embodiments include enriching for target nucleic acids in the amplified polynucleotides, such as products of mutagenesis PCR, and/or products of suppression PCR. In some such embodiments, the enriching comprises hybridizing a plurality of selection probes with the amplified polynucleotides, wherein the selection probes of the plurality of selection probes comprise different nucleotide sequences from one another. In some embodiments, the plurality of selection probes comprise at least 50, 100, 200, 500, 1000, 5000, or 10000 different selection probes.

[0120] In some embodiments, the selection probes are designed such that an average distance between two adjacent nucleotide sequences of the selection probes on a reference sequence of a genome, such as a human genome, is in a range from about 300 consecutive nucleotides to about 7,000 consecutive nucleotides; a range from about 500 consecutive nucleotides to about 5,000 consecutive nucleotides; a range from about 750 consecutive nucleotides to about 2,500 consecutive nucleotides; a range from about 750 consecutive nucleotides to about 1,500 consecutive nucleotides; a range from about 900 consecutive nucleotides to about 1,200 consecutive nucleotides. In some embodiments, an average distance between two adjacent nucleotide sequences of the selection probes on a reference sequence of a genome is about 750, 1000, 1500, or 2000 consecutive nucleotides.

[0121] In some embodiments, the selection probes are designed such that an average number of sites in a genome, such as a human genome, that each selection probe of the plurality of selection probes is capable of hybridizing to is no more than 100 different sites in the genome, no more than 50 different sites in the genome, no more than 40 different sites in the genome, no more than 30 different sites in the genome, no more than 20 different sites in the genome, no more than 10 different sites in the genome, or no more than 5 different sites in the genome, or any number between any of the foregoing number of different sites. In some embodiments, each selection probe of the plurality of selection probes is capable of hybridizing to no more than 100 different sites in the genome, no more than 50 different sites in a genome, no more than 40 different sites in a genome, no more than 30 different sites in a genome, no more than 20 different sites in a genome, or no more than 10 different sites in a genome, or any number between any of the foregoing number of different sites. In some embodiments, a selection probe capable of hybridizing to a site in the genome comprises at least 50, 60, 70, or 80 consecutive nucleotides complementary to at least 80%, 90%, 95%, 96%, 98%, or 100% of a nucleotide sequence at the site in the genome. In some embodiments, a selection probe capable of hybridizing to a site in the genome comprises at least 50 consecutive nucleotides complementary to at least 90% of a nucleotide sequence at the site in the genome.

[0122] In some embodiments, the plurality of selection probes lack sequences capable of hybridizing to a repetitive genomic DNA element. In some embodiments, the repetitive genomic DNA element is selected from a tandem repeat, an Alu repeat, a short interspersed nuclear element (SINE), a long interspersed nuclear element (LINE), an integrated viral sequence, a viral long terminal repeat (LTR), and a transposon.

[0123] In some embodiments, the selection probes target a plurality of selected genes, such as a panel including American College of Medical Genetics (ACMG) genes, such as the genes listed in TABLE 1A. In some such embodiments, each selection probe of the plurality of selection probes comprises a nucleotide sequence capable of hybridizing to a gene selected from TABLE 1A; and/or a nucleotide sequence within, no more than 10 kbp 5′ or no more than 10 kbp 3′ of a gene selected from TABLE 1A. In some embodiments, each selection probe of the plurality of selection probes comprises a nucleotide sequence having at least 90%, 95%, or 100% sequence identity to any one of SEQ ID NOs:02-111831. In some embodiments, each selection probe of the plurality of selection probes comprises a nucleotide sequence having at least 90%, 95%, or 100% sequence identity to any one of SEQ ID NOs:02-14449. In some embodiments, each selection probe of the plurality of selection probes comprises a nucleotide sequence having at least 90%, 95%, or 100% sequence identity to any one of SEQ ID NOs:02-6936.

### Certain Compositions, Kits and Systems

[0124] Some embodiments of the methods and composition provided herein include kits and systems for preparing a nucleic acid library. Some embodiments include a kit comprising: a first bead-linked transposomes (BLT-1) reagent, wherein the BLT-1 transposomes comprises a first adaptor sequence; a mutagenesis reagent comprising a first primer, dPTPs, dNTPs, and a polymerase; a second bead-linked transposomes (BLT-2) reagent, wherein the BLT-2 transposomes comprise the first adaptor and a second adaptor; an amplification reagent comprising a first primer, a second primer, dNTPs, and a polymerase; wherein BLT-1 has a lower transposome density as compared to BLT-2, and wherein the first primer hybridizes to the first adaptor sequence and the second primer hybridizes to the second adaptor sequence. In some embodiments, BLT-2 has more than 10, 20, 50, 100, or 1000 times the transposome density as compared to BLT-1. In some embodiments, the first adaptor is B15 and the second adaptor is A14. Some embodiments include population of oligonucleotides, wherein the oligonucleotides comprise at least 10, 100, 1000, 10000 different nucleotide sequences selected from any one of SEQ ID NOs. 02-111831.

[0125] Some embodiments include system for preparing a nucleic acid library, comprising: (a) a first plurality of transposomes comprising transposon adaptors for tagmenting a plurality of nucleic acid fragments, wherein the first plurality of transposomes is immobilized on a first plurality of beads at a first density; (b) reagents for amplifying the plurality of polynucleotides to obtain amplified polynucleotides, wherein the amplifying comprising a mutagenesis PCR and/or a suppression PCR, wherein: (i) the first reagent for performing mutagenesis PCR comprise a low bias DNA polymerase and/or a nucleotide analogue; optionally, wherein the nucleotide analogue comprises dPTP, and/or 8-oxo-dGTP; and/or the low bias DNA polymerase is a Thermococcal polymerase, or a functional derivative thereof, optionally, wherein the Thermococcal polymerase is derived from a Thermococcal strain selected from the group consisting of T. kodakarensis, T. siculi, T. celer and T. sp KS-1, and (ii) the first reagents for performing suppression PCR comprise amplification primers having the same nucleotide sequence capable of hybridizing to the transposon adaptors; (c) a plurality of selection probes for enriching for target polynucleotides in the amplified polynucleotides; and (d) a second plurality of transposomes comprising library adaptors for adding library adaptors to each end of the amplified polynucleotides, wherein the second plurality of transposomes is immobilized on a second plurality of beads at a second density, wherein the first density is less than the second density.

[0126] Some embodiments include a system for preparing a nucleic acid library, comprising: (a) a first plurality of transposomes for tagmenting a plurality of nucleic acid fragments to obtain a plurality of polynucleotides; (b) first reagents for amplifying the plurality of polynucleotides to obtain amplified polynucleotides; and (c) second reagents for adding library adaptors to each end of the amplified polynucleotides. In some embodiments, the first plurality of transposomes comprises transposon adaptors, wherein the first plurality of transposomes is immobilized on a solid support. In some embodiments, the solid support comprises a first plurality of beads.

[0127] In some embodiments, the first plurality of the transposomes is immobilized on the first plurality of beads at a density such that on contacting the first plurality of transposomes with the plurality of nucleic acid fragments the plurality of polynucleotides has an average length of the plurality of polynucleotides is greater than about 1 kbp, 2 kbp, 5 kbp, 10 kbp, 15 kbp, 20 kbp, or 40 kbp. In some embodiments, the average length of the plurality of polynucleotides is in a range from about 1 kbp to about 40 kbp, 1 kbp to about 30 kbp, 1 kbp to about 20 kbp, 5 kbp to about 20 kbp, 5 kbp to about 15 kbp, or 7 kbp to about 12 kbp.

[0128] In some embodiments, the number of transposomes immobilized on the bead is no more than about 100 transposomes, 50 transposomes, 40 transposomes, 30 transposomes, 20 transposomes, or 10 transposomes. In some embodiments, the number of transposomes immobilized on the bead is no more than about 30 transposomes.

[0129] In some embodiments, the first plurality of the transposomes immobilized on the bead comprise a total activity such that on contacting the first plurality of transposomes with the plurality of nucleic acid fragments the plurality of polynucleotides has an average length greater than about 1 kbp, 2 kbp, 5 kbp, 10 kbp, 15 kbp, 20 kbp, or 40 kbp. In some embodiments, the average length of the plurality of polynucleotides is in a range from about 1 kbp to about 40 kbp, 1 kbp to about 30 kbp, 1 kbp to about 20 kbp, 5 kbp to about 20 kbp, 5 kbp to about 15 kbp, or 7 kbp to about 12 kbp.

[0130] In some embodiments, the first plurality of the transposomes immobilized on the bead comprise an activity in a range from about 0.05 AU/μl to about 0.25 0.05 AU/μl. In some embodiments, the first plurality of the transposomes immobilized on the bead comprise an activity of about 0.075 AU/μl.

[0131] In some embodiments, the transposon adapters comprise the same sequence. In some embodiments, the transposon adapters comprise the nucleotide sequence: SEQ ID NO:01 (GTCTCGTGGGCTCGG)

[0132] In some embodiments, the transposomes of the plurality of transposomes are the same. In some embodiments, the transposomes of the plurality of transposomes are B15 transposomes.

[0133] In some embodiments, the first reagents comprise reagents for performing mutagenesis PCR comprising a low bias DNA polymerase and/or a nucleotide analogue. In some embodiments, the nucleotide analogue comprises dPTP, and/or 8-oxo-dGTP. In some embodiments, the low bias DNA polymerase is a Thermococcal polymerase, or a functional derivative thereof. In some embodiments, the Thermococcal polymerase is derived from a Thermococcal strain selected from the group consisting of T. kodakarensis, T. siculi, T. celer and T. sp KS-1.

[0134] In some embodiments, the first reagents comprise reagents for performing suppression PCR comprising amplification primers having the same nucleotide sequence. In some embodiments, the amplification primers are capable of hybridizing to the transposon adaptors.

[0135] In some embodiments, the second reagents comprise a second plurality of transposomes comprising the library adaptors. In some embodiments, the second plurality of transposomes has an activity such that on contacting the second plurality of transposomes with the amplified polynucleotides a library of nucleic acids is obtained and comprises the library adaptors and having an average length less than about 1 kb, 900 bp, 800, bp, 700 bp, 600 bp, 500 bp, 400 bp, 300 bp, 200 bp, or 100 bp.

[0136] In some embodiments, the first plurality of the transposomes is immobilized on the beads at a density less than a density at which the second plurality of transposomes are immobilized on the second plurality of beads.

[0137] Some embodiments also include third reagents for enriching for target polynucleotides in the amplified polynucleotides, comprising a plurality of selection probes. In some embodiments, the plurality of selection probes is attached to a third plurality of beads.

[0138] In some embodiments, an average distance between two adjacent nucleotide sequences of the selection probes on a reference sequence of a genome is in a range from about 300 consecutive nucleotides to about 7,000 consecutive nucleotides. In some embodiments, the range is from about 500 consecutive nucleotides to about 5,000 consecutive nucleotides. In some embodiments, the range is from about 750 consecutive nucleotides to about 2,500 consecutive nucleotides. In some embodiments, the range is from about 750 consecutive nucleotides to about 1,500 consecutive nucleotides. In some embodiments, the range is from about 900 consecutive nucleotides to about 1,200 consecutive nucleotides. In some embodiments, an average distance between two adjacent nucleotide sequences of the selection probes on a reference sequence of a genome is about 750, 1000, 1500, or 2000 consecutive nucleotides.

[0139] In some embodiments, an average number of sites in a genome that each selection probe of the plurality of selection probes is capable of hybridizing to is no more than 50 different sites in the genome, to no more than 40 different sites in the genome, to no more than 30 different sites in the genome, to no more than 20 different sites in the genome. In some embodiments, each selection probe of the plurality of selection probes is capable of hybridizing to no more than 50 different sites in a genome, to no more than 40 different sites in a genome, to no more than 30 different sites in a genome, to no more than 20 different sites in a genome. In some embodiments, a selection probe capable of hybridizing to a site in the genome comprises at least 50, 60, 70, or 80 consecutive nucleotides complementary to at least 90% of a nucleotide sequence at the site in the genome.

[0140] In some embodiments, the plurality of selection probes lack sequences capable of hybridizing to a repetitive genomic DNA element; In some embodiments, the repetitive genomic DNA element is selected from a tandem repeat, an Alu repeat, a short interspersed nuclear element (SINE), a long interspersed nuclear element (LINE), an integrated viral sequence, a viral long terminal repeat (LTR), and a transposon.

[0141] In some embodiments, the plurality of selection probes comprise at least 50, 100, 200, 500, 1000, 5000 different selection probes.

[0142] In some embodiments, each selection probe of the plurality of selection probes comprises a nucleotide sequence capable of hybridizing to a gene selected from TABLE 1A; and/or a nucleotide sequence within, no more than 10 kbp 5′ or no more than 10 kbp 3′ of a gene selected from TABLE 1A. In some embodiments, each selection probe of the plurality of selection probes comprises a nucleotide sequence having at least 90%, 95%, or 100% sequence identity to any one of SEQ ID NOs:02-111831. In some embodiments, each selection probe of the plurality of selection probes comprises a nucleotide sequence having at least 90%, 95%, or 100% sequence identity to any one of SEQ ID NOs:02-14449. In some embodiments, each selection probe of the plurality of selection probes comprises a nucleotide sequence having at least 90%, 95%, or 100% sequence identity to any one of SEQ ID NOs:02-6936.

[0143] In some embodiments, the plurality of nucleic acid fragments is mammalian. In some embodiments, the plurality of nucleic acid fragments is human. In some embodiments, the plurality of nucleic acid fragments comprises genomic DNA.

[0144] Some embodiments include a kit comprising a plurality of selection probes. In some embodiments the plurality of selection probes comprise at least 50, 100, 1000, 2000, 3000, 4000, 5000, 10000, 20000, 30000, or 40000 or any number between any one of the foregoing numbers of different nucleotide sequences.

[0145] In some embodiments, each selection probe of the plurality of selection probes comprises a nucleotide sequence capable of hybridizing to a gene selected from TABLE 1A; and/or a nucleotide sequence within, no more than 10 kbp 5′ or no more than 10 kbp 3′ of a gene selected from TABLE 1A. In some embodiments, each selection probe of the plurality of selection probes comprises a nucleotide sequence having at least 90%, 95%, or 100% sequence identity to any one of SEQ ID NOs:02-111831. In some embodiments, each selection probe of the plurality of selection probes comprises a nucleotide sequence having at least 90%, 95%, or 100% sequence identity to any one of SEQ ID NOs:02-14449. In some embodiments, each selection probe of the plurality of selection probes comprises a nucleotide sequence having at least 90%, 95%, or 100% sequence identity to any one of SEQ ID NOs:02-6936.

### EXAMPLES

### Example 1—Generation of Nucleic Acid Library

[0146] The following describes the preparation of human genome libraries for sequencing with (1) low-density bead-linked transposomes; (2) random mutagenesis; and (3) bottlenecking (suppression) amplification. The workflow included uniquely encoding long DNA templates with steps including highly uniform random mutagenesis and amplification. The long DNA templates were then fragmented and sequenced on a standard short-read (SR) platform. Reads from prepared libraries were used to accurately reconstruct and decode the original long template sequences using an unmutated reference data set which was generated in parallel.

[0147] Unmutated reference data: to reconstruct accurate long read sequences from mutated short reads, an additional unmutated reference data set was used. This was generated from the same genomic starting material as the sample to be mutated, using standard methods for short-read library preparation and sequencing. Paired end reads were generated at a minimum length of 2×150 nucleotides for the unmutated data set, with a recommended 60× genome coverage for isolated bacterial genomes and 40× for pure human cell cultures.

[0148] Input DNA requirements: the workflow was found to be compatible with genomic DNA samples of relatively poor quality, containing unwanted low molecular weight fragments. These low molecular weight fragments were actively excluded by certain steps in the workflow; and the presence of some higher molecular weight material (>20 kb) was included to generate long templates for sequencing. To quantify input DNA for library preparation, a fluorometric-based method such as the Qubit dsDNA HS Assay Kit (Thermo Scientific) was used. Concentrations of input DNA between 12.5 and 50 ng/μl was used.

[0149] The following outlines a workflow which included: high molecular weight tagmentation; mutagenesis PCR; library normalization; bottlenecking (suppression) PCR; library preparation; fragment analysis of products; and sequencing.

### Reagents, Materials and Thermocycler Parameters

| | |
|---|---|
| BLT Long Range | BLT-LR |
| Long Range PCR Mix | LPM |
| Long Range Marking Mix | LMM |
| Long Range Primer Mix 1 | LRP1 |
| Long Range Primer Mix 2 | LRP2 |
| Library Reducing Beads | LRB |
| Binding Buffer | IBB |
| Wash Buffer 1 | IWB1 |
| Stop Tagment Buffer 2 | ST2 |
| Illumina Purification Bead | IPB |
| PWI (water) | |
| Resuspension Buffer | RSB |
| Ethyl Alcohol, Pure | |
| Enrich BL Transposome, Lg-LT | eBLT-L |
| Enhanced PCR Mix | EPM |
| Tagmentation Buffer 1 | TB1 |
| Tagmentation Wash Buffer | TWB |
| Nextera DNA UD Index Plate | |

Tagmentation parameters

| Step | Temperature | Time |
|---|---|---|
| 1 | 55° C. | 5 minutes |
| 2 | 10° C. | hold |

Mutagenesis PCR parameters

| Step | Temperature | Time | |
|---|---|---|---|
| 1 | 68° C. | 3 | minutes |

| | |
|---|---|
| 2 | PCR cycles (12 cycles) |

| | | |
|---|---|---|
| 98° C. | 10 | seconds |
| 68° C. | 10 | minutes |

| | | |
|---|---|---|
| 3 | 4° C. | hold |

Bottlenecking PCR parameters

| | | |
|---|---|---|
| Step | Temperature | Time |

| | |
|---|---|
| 1 | PCR cycles (14 or 16 cycles) |

| | | |
|---|---|---|
| 98° C. | 10 | seconds |
| 68° C. | 10 | minutes |

| | | |
|---|---|---|
| 3 | 4° C. | hold |

Index PCR parameters

| | | |
|---|---|---|
| Step | Temperature | Time |

| 1 | 68° | C. | 3 | minutes |
|---|---|---|---|---|
| 2 | 98° | C. | 3 | minutes |
| 3 | PCR cycles (6 cycles) | | | |
| | 98° | C. | 45 | seconds |
| | 62° | C. | 30 | seconds |
| | 68° | C. | 2 | minute |
| 4 | 68° | C. | 1 | minutes |

| | | | |
|---|---|---|---|
| 5 | 4° | C. | hold |

### High Molecular Weight Tagmentation

[0150] This step used low density bead-linked transposomes (BLT-LR) to generate long DNA fragments tagged with adapter sequences.

| | |
|---|---|
| 1 | Label a Biorad PCR plate. |
| 2 | Label a 1.7 ml tube and add the following components in order: BLT-LR; and |
| | TB1. |
| 3 | Vortex to mix thoroughly, then briefly pulse centrifuge. |
| 4 | Add 20 μl of mastermix to wells. |
| 5 | Add 30 μl input DNA (50 ng total). |
| 6 | Use a pipette to gently mix then briefly pulse centrifuge. |
| 7 | Place tubes in a thermocycler with a heated lid set to 80° C. and run the Tagment. |
| 8 | Remove from the thermocycler and add 10 μl of ST2. |
| 9 | Use a pipette set at half of the total rxn volume to gently mix. |
| 10 | Incubate at room temperature for 2 min. |
| 11 | Place the tubes on a magnetic stand or plate for 3 min or until the solution is |
| | clear. Remove and discard the clear supernatant. Note: If beads become |
| | disturbed during aspiration, redisperse solution into the tube. Maintain tube on |
| | the magnet to let the beads settle. |
| 12 | Remove tubes from the magnet and add 100 μl TWB. Gently pipette mix until |
| | beads are fully resuspended. |
| 13 | Place the tubes on a magnetic stand or plate and incubate for at least 2 min, or |
| | until clear. While samples are incubating, proceed to the next step. Note: Keep |
| | pellets in TWB to help prevent any chance of over-drying the beads. |

### Mutagenesis PCR

[0151] In this step, long templates were uniquely encoded via random incorporation of the mutagenic nucleotide analogue dPTP during PCR.

| | |
|---|---|
| 14 | Label a 1.7 ml tube and combine the following to prepare mutagenesis master |
| | mix: LMM; LPM; LRP1; and RSB. |
| 15 | Use a pipette to mix thoroughly, then briefly pulse centrifuge. |
| 16 | Remove TWB from each well. |
| 17 | Add 50 μl of master mix to beads. |
| 18 | Gently pipette mix to resuspend beads |
| 19 | Place in preprogrammed thermal cycler and run the Mutagenesis PCR program. |
| 20 | Remove from thermocycler. |
| 21 | Vortex IPB to resuspend the beads. |
| 22 | Add 30 μl of IPB beads to each well. |
| 23 | Mix the total reaction volume by gently pipetting at least 10 times and incubate |
| | for 2 minutes at room temperature. |
| 24 | Place on the magnetic stand and wait until the liquid is clear (~5 minutes). |
| 25 | Remove and discard all supernatant. |
| 26 | Wash beads as follows: a. keep on the magnetic stand and add 180 μl fresh 80% |
| | EtOH to each well; b. wait 30 seconds; and c. remove and discard all |
| | supernatant |
| 27 | Briefly spin for 10 seconds and return plate to magnet. |
| 28 | With a 20 μl pipette, remove all residual EtOH. |
| 29 | Dry on magnet for 2 minutes. |
| 30 | Remove from the magnetic stand and add 25 μl RSB to each well. |
| 31 | Pipette mix and incubate at room temperature for 2 minutes. |
| 32 | Place on the magnetic stand and wait until the liquid is clear (~2 minutes). |
| 33 | Transfer 10 μl supernatant to a new plate and leave remaining supernatant with |
| | SPRI beads |

### Library Normalization

| | |
|---|---|
| 34 | In a new 2 ml tube, combine the following to prepare normalization master mix: |
| | Binding Buffer (IBB); and LRB |
| 35 | Vortex normalization master mix until homogenous immediately prior to use. |
| 36 | Pipette 10 μL of prepared mastermix into each well containing 10 μL of DNA. |
| 37 | Seal plate with microseal and put on bioshake for 30 minutes at 1800 rpm. |
| 38 | Remove plate from bioshake and place on plate magnet for 1 minute. Removing |
| | and replacing plate on magnet may help to condense beads. |
| 39 | Gently remove supernatant, taking care not to disturb beads. |
| 40 | Remove plate from magnet. |
| 41 | Immediately add 150 μL of IWB1 to each well. |
| 42 | Using a p200 pipette set to 140 μL, pipette mix each well at least 10 times. |
| 43 | Place on plate magnet for 1 minute. |
| 44 | Gently remove supernatant, taking care not to disturb beads. |
| 45 | Repeat steps 41-44 for a total of two washes. Remove plate from magnet. |
| 46 | Immediately add 150 μL of 80% EtOH to each well. |
| 47 | Using a p200 pipette set to 140 μL, pipette mix each well at least 10 times. |
| 48 | Place on plate magnet for 1 minute. |
| 49 | Gently remove supernatant, taking care not to disturb beads. |
| 50 | Briefly spin down plate and use a p20 to remove excess liquid. |
| 51 | Allow to dry for 2 minutes. |
| 52 | Add 80 μL of RSB to each sample well. |
| 53 | Using a pipette set to 50 μL, pipette mix each sample at least 10 times. |
| 54 | Allow to incubate for 10 minutes. |
| 55 | Place on plate magnet for 1 minute. |
| 56 | Transfer 70 μL of supernatant to new well. |
| 57 | If performing 165 pg input, go to step 62 for next |
| | If performing 55 pg input, dilute 20 ul of eluted material in 40 μl of RSB in |
| | adjacent well. Mix well, then use 2 μl as stated in step 62. |
| | [Optional] Measure DNA on Qubit using 10 μL of DNA diluted in 190 μL of |
| | Qubit buffer. |

### Bottlenecking (Suppression) PCR

[0152] In this step a defined quantity of the purified mutagenesis product was amplified to create many copies of each unique template. The amount of starting material in the bottlenecking PCR determined the number of long templates available for sequencing, and was controlled through careful dilution of the mutagenesis sample. The following protocol was used to generate between about 10× to about 30× long-read coverage of the human genome (see below). For arbitrary samples, a simple calculator or look up table was provided to guide users on sample dilution and indicate the number of enrichment cycles required for a particular genome size or sample type.

| | |
|---|---|
| 58 | Combine the following volumes to prepare enrichment master mix: LPM; and |
| | LRP2. |
| 59 | Use a pipette to mix thoroughly, then briefly pulse centrifuge. |
| 60 | Add 48 μl of master mix to a new Bio-Rad plate. Place tubes on ice. |
| 61 | Add 2 μl of DNA to each well. |
| 62 | Gently pipette mix the 50 μl reaction and briefly pulse centrifuge. |
| 63 | Place in preprogrammed thermal cycler and run the Bottlenecking PCR program. |
| 64 | Note: Perform 16 enrichment cycles for 10x genome coverage or 14 cycles for |
| | 30x. |
| 65 | Remove from thermocycler. |
| 66 | Vortex IPB to resuspend the beads. |
| 67 | Add 30 ul of IPB beads to each well. |
| 68 | Mix the total reaction volume by gently pipetting at least 10 times and incubate |
| | for 2 minutes at room temperature. |
| 69 | Place on the magnetic stand and wait until the liquid is clear (~5 minutes). |
| 70 | Remove and discard all supernatant. |
| 71 | Wash beads as follows: a. keep on the magnetic stand and add 180 μl fresh 80% |
| | EtOH to each well; b. wait 30 seconds; and c. remove and discard all supernatant. |
| 72 | Briefly spin for 10 seconds and return plate to magnet. |
| 73 | With a 20 μl pipette, remove all residual EtOH. |
| 74 | Dry on magnet for 2 minutes. |
| 75 | Remove from the magnetic stand and add 25 μl RSB to each well. |
| 76 | Pipette mix and Incubate at room temperature for 2 minutes. |
| 77 | Place on the magnetic stand and wait until the liquid is clear (~2 minutes). |
| 78 | Transfer 24 μl supernatant to a new plate. |
| 79 | Keep on ice for same day use or store at −20° C. (safe stopping point). |
| 80 | Determine the concentration of each purified bottlenecking PCR product with the |
| | Qubit dsDNA HS Assay Kit. Use 1-2 μl of sample DNA per measurement. |

### Library Preparation

[0153] In this step the long, mutated DNA templates were fragmented and adapters were attached to create a library of short, overlapping fragments that are ready for sequencing. 50 ng of each purified enrichment product can be used as input DNA for internal library preparation. A small amount of bottlenecking PCR product was reserved for subsequent analysis of template size.

| | |
|---|---|
| 81 | Bring TB1 and eBLT-L to room temperature and vortex to mix. |
| 82 | Make a dilution using RSB and 50 ng worth of purified bottlenecking product |
| | into each well with a final volume of 30 μl. |
| 83 | Vortex eBLT-L vigorously for 10 seconds, then visually check the beads for |
| | complete resuspension. Repeat as necessary. |
| 84 | Prepare a tagmentation master mix: eBLT-L; TB1. |
| 85 | Vortex the tagmentation master mix thoroughly to make sure the eBLT-L |
| | beads are evenly resuspended in the buffer. |
| 86 | Using fresh tips, transfer 20 μl of tagmentation master mix to each tube |
| | containing 30 μl of DNA. |
| 87 | Pipette mix the 50 μl reaction mix to resuspend. |
| 88 | Place in preprogrammed thermal cycler and run the Tagment program. |
| 89 | Remove from thermocycler and add 10 μl of ST2 to each tagmentation |
| | reaction. |
| 90 | Use a pipette set at half of the total rxn volume to gently mix. |
| 91 | Incubate at RT for 5 minutes. |
| 92 | Place the tubes on a magnetic stand or plate for 3 min or until the solution is |
| | clear. Remove and discard the clear supernatant. Note: If beads become |
| | disturbed during aspiration, redisperse solution into the tube. Maintain tube on |
| | the magnet to let the beads settle. |
| 93 | Remove tubes from the magnet and add 100 μl TWB. Gently pipette mix until |
| | beads are fully resuspended. |
| 94 | Place the tubes on a magnetic stand or plate for 3 min or until the solution is |
| | clear. Remove and discard the clear supernatant. |
| 95 | Remove tubes from the magnet and add 100 μl TWB. Gently pipette mix until |
| | beads are fully resuspended (total of 2 washes). |
| 96 | Place the tubes on a magnetic stand or plate and incubate for at least 3 min, or |
| | until clear. While samples are incubating, proceed to the next step. Note: Keep |
| | pellets in TWB to help prevent any chance of over drying the beads. |
| 97 | Prepare a index PCR master mix: EPM; RSB. |
| 98 | Use a pipette to mix thoroughly, then briefly pulse centrifuge, |
| 99 | Carefully remove the second TWB wash from the samples while on the |
| | magnet. Use a pipette with P10 or P20 tips to remove excess liquid from the |
| | tube. Any remaining foam on the tube walls does not adversely affect the |
| | library. |
| 100 | Remove tubes from the magnet and proceed immediately to the next step to |
| | prevent excessive drying of the beads. |
| 101 | Add 46 μl of the PCR master mix to each sample. Gently pipette mix to ensure |
| | the beads are thoroughly resuspended. |
| 102 | To each sample, add 4 μl Nextera DNA UD Index. Use a unique combination |
| | of indexes for each sample. |
| 103 | Using a pipette set to 40 μl, pipette mix a minimum of 10 times to mix the |
| | entire reaction volume. |
| 104 | Place in preprogrammed thermal cycler and run the Index PCR program. |
| 105 | Clean up PCR reaction using IPB beads as follows: |
| 106 | Place plate on the magnetic stand and wait until the liquid is clear (~5 |
| | minutes) |
| 107 | Transfer 45 μL of supernatant to a new plate. |
| 108 | Add 55 μL RSB to bring volume to 100 uL. |
| 109 | Perform a double-sided bead purification as follows: |
| 110 | Add 30 μL of IPB beads to the sample. |
| 111 | Mix the total reaction volume by gently pipetting at least 10 times and |
| | incubate for 2 minutes at room temperature. |
| 112 | Place on the magnetic stand and wait until the liquid is clear (~5 minutes). |
| 113 | Transfer 127 μl of the clear supernatant in new wells. Discard the remaining |
| | beads. |
| 114 | Add 20 μl of IPB beads to the sample. |
| 115 | Mix the total reaction volume by gently pipetting at least 10 times and |
| | incubate for 2 minutes at room temperature. |
| 116 | Place on the magnetic stand and wait until the liquid is clear (~5 minutes). |
| 117 | Remove and discard all supernatant. |
| 118 | Wash beads as follows: a. keep on the magnetic stand and add 180 μl fresh |
| | 80% EtOH to each well; b. wait 30 seconds; and c. remove and discard all |
| | supernatant. |
| 119 | Briefly spin for 10 seconds and return plate to magnet. |
| 120 | With a 20 μl pipette, remove all residual EtOH. |
| 121 | Dry on magnet for 2 minutes. |
| 122 | Remove from the magnetic stand and add 30 μl RSB to each well. |
| 123 | Pipette mix and incubate at room temperature for 2 minutes. |
| 124 | Place on the magnetic stand and wait until the liquid is clear (~2 minutes). |
| 125 | Transfer 28 μl to a new plate. |
| 126 | Determine the concentration of each purified enrichment product with the |
| | Qubit dsDNA HS Assay Kit. Use 1-2 μl of sample DNA per measurement. |
| 127 | Keep on ice for same day use or store at −20° c. (SAFE STOPPING POINT). |

[0154] Libraries were quantified, normalized and sequenced using standard workflows for libraries. Example additional considerations for quality control, sample index selection and sequencing are provided below.

### Fragment Analysis of Products

| | |
|---|---|
| 128 | Run purified library prep product on appropriate |
| | instrument for fragment analysis. |
| 129 | Record the average fragment length for the |
| | purified library prep product. |

[0155] DNA fragment length: assessing the fragment length profile of the purified bottlenecking PCR product was performed to evaluate the size distribution of long templates as well as to evaluate the final short-read library. To assess the fragment size of the purified bottlenecking PCR product, the following products from Agilent Technologies® were used: Bioanalyzer 2100, TapeStation 4200, and Fragment Analyzer 5300; or equivalent technologies from other providers.

Purified Bottlenecking Product

| | | | Expected |
|---|---|---|---|
| | | | average |
| | | Recommended | fragment |
| Instrumentation | Kit | Region (bp) | length (bp) |
| Bioanalyzer 2100 | High Sensitivity | 3,000-10,000 | 7,000-8,000 |
| | DNA | | |
| Fragment Analyzer | DNF-464 HS Large | 3,000-49,000 | 7,000-8,000 |
| 5300 | Fragment | | |

[0156] The peak template length after bottlenecking PCR was expected to be around 7,000-8,000 bp, with virtually no products below ˜3,000 bp. FIG. 3A illustrates purified bottlenecking PCR product run on an Agilent® Bioanalyzer using a High Sensitivity DNA Kit.

Final Library

| | | | Expected |
|---|---|---|---|
| | | | average fragment |
| Instrumentation | Kit | Region (bp) | length (bp) |
| TapeStation | High Sensitivity | 150-1,500 | 800-900 |
| 4200 | D5000 | | |
| Bioanalyzer | High Sensitivity | 150-1,500 | 800-900 |
| 2100 | DNA | | |

[0157] The peak template length after bottlenecking PCR was expected to be around 800-900 bp. FIG. 3B illustrates purified final library prep product run on an Agilent® Bioanalyzer using a High Sensitivity DNA Kit.

### Sequencing

[0158] The final library or library pool was sequenced on a NGS instrument, generating 2×150 nt paired end reads. The aim was to produce at least 400 Gbp of sequence data for mutated samples targeting 10× long-read coverage of the human genome, or at least 1200 Gbp for 30× coverage. This was in addition to the unmutated reference data that was also required for long read reconstruction.

### Example 2—Effects of Immobilizing Transposomes on Beads at Low Densities

[0159] This example illustrates improved long read coverage by changing initial tagmentation from soluble transposomes to low density bead-linked transposomes (BLT-LR); and changing from an A14/B15 mixture of BLT-LRs to B15 BLT-LR only. Nucleic acid libraries were generated and sequenced with a protocol substantially similar to that of Example 1. Different amounts of input DNA were tested. A protocol using bead-linked transposomes was compared with a protocol using transposomes in solution. As shown in FIGS. 4A-4C, a switch from low concentration soluble transposomes to low-density BLT (BLT-LR) provided increased robustness to changes in transposome: input DNA ratio, and a more uniform coverage with BLT vs. soluble.

[0160] FIG. 5 outlines steps of high molecular weight tagmentation followed by mutagenesis and suppression PCR to enrich for longer fragments.

[0161] Protocols were compared that included (i) soluble transposome (TSM) (0.4 AU/ul); (2) BLT-LR made with A14/B15 (0.1 AU/ul build); or (3) BLT-LR made with B15 only (0.075 AU/ul build). Quality control and sequencing metrics were compared for each protocol.

[0162] As shown in FIGS. 6A-6C, soluble TSM had a greater activity than BLT-LR and soluble TSM created longer fragments than BLT-LRs. A14/B15 could not be melted off of the beads due to 5′ attachment of TDE1. In mutagenesis PCR, A14/B15 BLT provided a lower yield than B15 only (FIGS. 7A-7C). The yield with soluble (MTE) yield was also lower and may have been accounted for because only 50% tag product was taken into PCR; 100% used for BLTs. Fragment sizes of BLT-LR were smaller than with soluble TSM. Average sizes of products were 1-48 kb (FIG. 7B). There were larger fragment lengths with soluble TSM (FIGS. 7B and 7C). In bottleneck (suppression) PCR, yields and fragment sizes were more similar, while BLT-LRs still produced smallest products of ˜8 kb in length (FIG. 8A). Average sizes were 1-48 kb (FIGS. 8B and 8C).

[0163] In a sequencing metrics comparison, GC bias was comparable between soluble and BLT-LR with A14/B15 BLT slightly worse (FIG. 9) A higher N50 was achieved with soluble TSM, slightly higher N50 with B15-only compared to A14/B15, slightly higher N50 (350) with eBLT-L compared to BLT (FIGS. 10A and 10B). Sequencing redundancy, SLR depth, and error rate achieved using with A14/B15 BLT or B15 only BLT were measured. Fraction of bases with no coverage achieved using with A14/B15 BLT or B15 only BLT is depicted in FIG. 11.

[0164] BLT-LRs had better coverage than soluble transposomes (fraction of bases with <0/10× coverage). BLT-LRs created shorter fragments, which generated lower N50s in workflow. N50s were still above Skb mark so this decrease in performance was acceptable when paired with better coverage metrics and a more robust tagmentation reaction. B15-only TSM BLTs gave a better yield and lower redundancy than A14/B15 BLTs. The change to B15 BLT-LRs created a more efficient mutagenesis suppression PCR.

### Example 3—Effects of BLT Activity on Fragment Size

[0165] BLT-LR activity was investigated for high molecular weight tagmentation. BLT-LR activity should provide: tagment large fragments to provide for mutagenesis PCR; maximize fragment size, ideally >8 kb; yield >4 ng post-high molecular weight (HMW) tagmentation; reproducibility; ease in QC tested; and good sequence quality. A goal was to maximize fragment size while maintaining good yield and downstream sequencing metrics.

[0166] BLT-LRs having different levels of activity were compared. As transposome activity (AU/ul) decreased, yield decreased and average fragment size increased (FIG. 12).

[0167] BLT-LRs were compared with builds/activities of 0.0025, 0.005, 0.025, 0.05, 0.1, 0.15 AU/ul. N50s were compared. “N50” was the length of the shortest contig for which longer and equal length contigs cover at least 50% of the assembly. Lower build activity maximized N50s but sequencing metrics started to drop at 0.025 AU/ul (FIGS. 13 and 14). There was no apparent cliff-edge on high activity side, but N50s continued to decline, and at 0.075 AU/ul, were well above cliff edge while maximizing N50.

[0168] Results were compared from studies with three different operators testing activities from 0.05 AU/ul to 0.25 AU/ul. Consistent performance between operators was found for BLT-LR activities from 0.05 AU/ul to 0.25 AU/ul (FIG. 15). A BLT-LR activity of 0.075 AU/ul was chosen for BLT-LR which balanced fragment size and yield. It was found that a fluctuation of +/−100% in activity would still provide good sequencing metrics.

### Example 4—Effects of Quantity of Input DNA

[0169] Changing the amount of input DNA used in the initial HMW tagmentation reaction could impact any of the following: amount of DNA tagmented (test BLT-LR saturation); fragment sizes after initial HMW tagmentation (and downstream); biases in what is tagmented/amplified; sequencing metrics including percent duplicates, redundancy, N50, GC bias. Effects of input DNA quantity were tested for a protocol substantially similar to the workflow of Example 1 for amounts: 1 ng, 3, ng, 5 ng, 10 ng, 20 ng, 30 ng, 50 ng, 100 ng, 300 ng, and 1000 ng. Yield and fragment size plateaued after 20-30 ng of input DNA (FIG. 16). Yields reached maximum around 20 ng of DNA input, fragment sizes were unaffected by increased DNA input (FIG. 17).

[0170] Sequencing was performed for input DNAs of 1 ng, 10 ng, 20 ng and 1000 ng to determine cliff edges for metrics. A workflow with 1 ng input DNA provided slightly higher insert sizes and percent duplicated reads compared to workflows performed with higher amounts of input DNA (FIG. 18). Minimal differences were observed in error rates, read quality, redundancy, or N50s (FIG. 19). Similar coverage across all DNA input amounts were observed with all points within normal variation with a slight decrease in mode coverage as fraction with <0/10× increased (FIG. 20). A very slight increase in GC bias between 60-80% was observed in higher inputs, but well within normal variation (FIG. 21).

[0171] In sum, similar sequencing metrics were observed for input DNA amounts of 1 ng to 1000 ng. Inputs as low as 1 ng were found to work within the workflow. BLT-LR saturated at about 30 ng input; input above 30 ng did not bias coverage. DNA input amounts less than 10 ng resulted in low yields in the workflow. There was a slight increase in percent duplicated reads for 1 ng DNA input.

### Example 5—Effects of Quality of Input DNA

[0172] Effects of input DNA quality was tested for a protocol substantially similar to the workflow of Example 1. Preliminary data indicated that vortexing and up to 3 freeze/thaw cycles for input DNA were tolerated; and FFPE DNA was not suitable, or was too degraded, to be used as input DNA. Input DNA was prepared by shearing for 1, 3, 10, 30 and 60 seconds, and compared to control BLT-LR tagmented DNA and HMW DNA.

[0173] Input DNA was sheared for 1, 3, 10, 30 and 60 seconds. There was a noticeable change in size distribution profile after even 1 second, while Control BLT-LR and HMW DNA gave similar size profiles (FIG. 22). In the tagmentation step of the workflow, 1 second sheared DNA had similar fragment size and yield to control, and >1 second shearing quickly reduced size and yield (FIG. 23). In the mutagenesis step of the workflow, mutagenesis PCR yield sharply reduced at >1 second shearing (FIG. 24A). In the bottlenecking PCR step of the workflow, yield also sharply reduced at >1 second shearing (FIG. 24B). For sequencing metrics, N50s declined and redundancy increased at >3 seconds shearing (FIG. 25). Coverage metrics declined >3 seconds shearing (FIG. 26). GC bias correlated with post-tagmentation sizes (FIG. 27).

[0174] In sum, HMW DNA gave better yields and larger fragment lengths coming out of initial Tagmentation but did not result in final higher N50. Highly sheared DNA (30s or longer) did not amplify well in either PCR step which resulted in not enough DNA to continue with library prep. N50s and coverage/redundancy metrics worsened with DNA sheared >3 seconds. GC bias was impacted by fragment sizes. PCR steps were not suitable for highly degraded DNA, but tolerated mild shearing (1-3 sec) reasonably well.

[0175] BLT-LRs were investigated to create large fragment sizes suitable for the workflow outlined in Example 1. B15-only transposomes improved mutagenesis PCR small fragment suppression and overall yield. The workflow gave improved coverage of low MapQ regions of the genome. The workflow was robust to changes in DNA input amount. The workflow tolerated mildly sheared DNA, DNA that has been through freeze/thaw, and DNA that had been vortexed.

### Example 6—Enriching for Long Fragments

[0176] A workflow was performed, as described in Example 1, with an added enrichment step. The workflow included: high molecular weight tagmentation; mutagenesis PCR; library normalization; bottlenecking (suppression) PCR; library preparation; fragment analysis of products; and sequencing. FIG. 32 depicts an example workflow which includes enrichment for long fragments. The additional enrichment step for long fragment enrichment of certain fragments was performed on the products of the bottlenecking (suppression) PCR, and prior to the library preparation step. The fragments that were products of the suppression PCR, are referred to as ‘long fragments’ to differentiate them from fragments that are the products of the library preparation step and referred to in Example 7 as ‘short fragments’.

[0177] An example overview and timeline for long fragment enrichment in the workflow is depicted in FIG. 28 and FIG. 29, respectively. The enrichment step included hybridizing the products with selection probes, capturing the products hybridized to the selection probes with bead-linked capture probes, and amplifying the captured products. An example protocol is described below in the following. However, it should be realized that other protocols using similar enrichment for long fragments are contemplated.

### Hybridization

Bring DNA libraries (HYB Plate), EHB2, and probes to RT.
Vortex and briefly spin down EHB2 and probes before use.
NOTE: Vortex EHB2 thoroughly and allow enough time to bring up to RT.
Ensure that crystals are fully dissolved. Heat tube in hands if needed.
Preheat NHB2 to 50° C. for 5 m and vortex for 30 sec, ensure solution is clear and free from
precipitate.
NOTE: Vortex NHB2 thoroughly and allow enough time to thaw to RT and get up to 50° C.
prior to use.
Ensure that crystals are fully dissolved. Use while warm to avoid precipitates from reforming.
Prepare Hyb Master Mix and add 17.5 uL to HYB plate wells. (or add components
individually in order: Library, NHB2, Probes, EHB2)
Pipette mix. Seal HYB plate with Microseal ‘B’.
Centrifuge HYB plate briefly at 280 × g for 30 sec.
Place plate on a thermal cycler and run the LCE HYB program overnight. (holds at 58° C.)

| | | |
|---|---|---|
| Program name: LCE HYB | Rnx volume: 25μ | Lid: 100° C. |

| Step | Temp | Duration | | Cycles |
|---|---|---|---|---|
| Heat denature | 98° C. | 5 | min | 1 |
| Ramp down | 96° C. | −2° | C./min | 19 |
| | 58° C. | | | |
| Hybridize | 58° C. | 30 | mm | 1 |

### Capture

Bring SMB3, EEW, EE1, HP3, ET2, and RSB to RT.
Vortex and briefly spin down ET2, EE1 and HP3 before use.
Vortex EEW and SMB3 thoroughly.
Leave the thermal cycler running at 58 C.
Remove the HYB plate from the thermal cycler.
Centrifuge HYB plate at 280 × g for 30 sec.
Vortex SMB3 thoroughly for 1 min before use.
Add 75 μL of SMB3 to each sample.
Pipette mix 20x
Seal HYB wash plate with Microseal ‘B’
Incubate plate on thermal cycler running at 58° C. for 15 min.
Centrifuge HYB wash plate briefly at 280 × g for 30 sec.
Place on a magnetic stand for 2 min.
While on the magnetic stand, use a pipettor set to 100 μL to carefully
remove and discard the supernatant.

### Post-Hybridization Wash

Vortex EEW thoroughly for 1 min before use.
Vortex and briefly spin down EEl and HP3 before use.

| | |
|---|---|
| PERFORM | Remove the HYB plate from the magnetic stand and |
| 2X | add 100 μL of EEW to each sample. |
| | Pipette mix to fully resuspend the beads. |
| | Seal HYB wash plate with Microseal ‘B’ |
| | Incubate in a thermal cycler at 58° C. for 10 min. |
| | Place HYB plate on a magnetic stand for 2 min. |
| | While on the magnetic stand, use a pipettor to |
| | carefully remove and discard the supernatant. |

Use a P20 pipettor to remove any residual supernatant from the final
pellet.
Remove HYB plate from magnet.
Add 100 μL EEW to each well.
Pipette mix to fully resuspend the beads.
Transfer 100 μl of resuspended bead solution to a new PCR plate.
Seal HYB wash plate with Microseal ‘B’
Place on the thermal cycler at 58° C. for 5 min.
Turn off thermal cycler at 58° C.
Remove from thermalcycler and place on magnetic stand for 2 min or
until the solution is clear.
Prepare EE1 + HP3 Elution Mix.
Set pipette to 100 μL and discard all supernatant from each well.
Centrifuge at 280 × g for 30 sec then return to magnet for 10 sec.
Use a P20 pipettor to remove any residual supernatant.
Immediately proceed to Elution to prevent excessive drying of beads.

### Elution

Vortex and briefly spin down ET2 before use.
Vortex EE1 + HP3 Elution Mix to mix well.
Remove the HYB plate from the magnetic stand and add 23 μL of
EE1 + HP3 Elution Mix.
Pipette mix to fully resuspend the beads.
Incubate at RT for 2 min.
Centrifuge at 280 × g for 30 sec.
Place on a magnetic stand for 2 min.
Add 4 μL of ET2 to a new 96-well PCR plate to wells
corresponding to sample layout.
Label the plate, “ELU plate”.
Carefully transfer 21 μL of eluate from the HYB wash plate to
corresponding wells of ET2 in the ELU plate.
Set pipette to 20 μL and gently pipette mix each well 10 times.
Centrifuge at 280 × g for 30 sec.

### Enriched Library PCR

Bring MM reagents to RT.
Prepare RED Master Mix. Mix and spin.
Briefly spin down ELU plate to collect condensation if
needed.
Pipette mix.
Seal ELU plate with Microseal ‘B’
Briefly spin down plate to collect droplets.
Place plate on a thermal cycler and run the SYD_EN PCR
program.
(# cycles depends on Probe Panel used)
(same PCR conditions as Bottleneck PCR)

Enrichment PCR

| | | |
|---|---|---|
| Step | Temperature | Time |

| | |
|---|---|
| 1 | PCR cycles (depend on panel) |

| | | |
|---|---|---|
| 98° C. | 10 | s |
| 68° C. | 10 | min |

| | | |
|---|---|---|
| 3 | 4° C. | Hold |

### PCR Clean Up

Bring IPB and RSB to RT for at least 30 min.
Prepare fresh 80% EtOH wash solution as follows. Vortex to mix well.
Remove ELU plate from thermocycler. Briefly spin down PCR plate to
collect droplets.
Vortex IPB to resuspend the beads.
Add 30 ul of IPB beads to each well.
Mix the total reaction volume by gently pipetting at least 10 times
and incubate for 2 minutes at room temperature.
Place on the magnetic stand and wait until the liquid is clear
(~5 minutes)
Remove and discard all supernatant
Wash beads as follows: a. Keep on the magnetic stand and add 180 μl
fresh 80% EtOH to each well; b. Wait 30 seconds; and c. Remove and
discard all supernatant
Repeat wash for a total of 2 washes.
Briefly spin for 10 seconds and return plate to magnet.
With a 20 μl pipette, remove all residual EtOH.
Dry on magnet for 2 minutes.
Remove from the magnetic stand and add 25 μl RSB to each well.
Pipette mix and incubate at room temperature for 2 minutes.
Place on the magnetic stand and wait until the liquid is clear
(~2 minutes).
Transfer 24 μl supernatant to a new plate.
Keep on ice for same day use or store at −20° c. (SAFE STOPPING
POINT).
Determine the concentration of each purified recovery product with
the Qubit dsDNA HS Assay Kit. Use 1-2 μl of sample DNA per
measurement.
Proceed with 50 ng to BLT prep (next tab)

### Example 7—Enriching for Short Fragments

[0178] A workflow was performed as described in Example 1, and included an enrichment step for short fragments. The workflow included: high molecular weight tagmentation; mutagenesis PCR; library normalization; bottlenecking (suppression) PCR; library preparation; fragment analysis of products; and sequencing. The additional enrichment step for short fragment enrichment of certain fragments was performed on the products of the library preparation step. An example overview and timeline for short fragment enrichment in the workflow are depicted in FIG. 28 and FIG. 29, respectively. Of course, other workflows for such short fragment enrichment are also contemplated.

[0179] The enrichment step included hybridizing the products with selection probes, capturing the products hybridized to the selection probes with bead-linked capture probes, and amplifying the captured products. The enrichment step was substantially the same as that performed in Example 6.

### Example 8—Selection of Probes for Under-Represented Genomic Regions

[0180] This example relates to the generation and use of selection probes to enrich for regions of the genome including those which are typically under-represented in whole genome sequencing methods. Such regions of the genome may provide sequencing data that are systematically impacted by lower quality—such as elevated error rates, low mapping quality or depth anomalies—may fail to deliver consistently accurate variant calls even for SNVs and indels. Many of the reference characteristics that cause these systematic errors are well known, such as, highly repetitive regions have poor mapping quality and homopolymers are known to result in low base accuracy. This knowledge has been used to classify the genome into ‘easy’ and ‘difficult’ regions (Krusche P, et al. Nat Biotechnol 2019; 37:555-560). Though these classifications can be helpful, they are not a perfect representation of the actual performance within these regions. For example, a large segmental duplication may be comprised of regions of high and low similarity, leading to very different variant calling accuracy.

[0181] Selection probes for use to enrich for targets in long fragments were identified by methods which included: selecting target regions of the genome; designing a probe set within the target regions; and identifying suitable probes within the probe set to generate a panel of selection probes. Briefly, for a panel that was focused on under-represented regions of the genome, target regions included those with low mappability (non-unique) portions of protein-coding regions, including introns and untranslated regions (UTRs). Such regions included those having a low mapping quality score (MAPQ) score, less than 50, in the HG38 reference sequence of the human genome; and those represented in the RefSeq database which includes non-redundant, well-annotated set of sequences, including genomic DNA and transcripts. MAPQ scores quantify the probability that a sequencing read is misplaced in a reference sequence (Li H, et al. (2008) Genome Research 18:1851-8). More regions of interest included certain groups of genes and regions of the genome. Examples included: (i) protein coding regions with low mappability, e.g., low mappability RefSeq sequences; (ii) CMRG genes, e.g., Wagner J., et al., (2022) Nat Biotechnol. 40:672-680; (iii) deCODE Icelandic dark matter regions; (iv) regions with short tandem repeats (STR), e.g., Stevanovski I., et al., Sci Adv. 2022 March; 8(9): eabm5386; (v) MHC locus; (vi) ACMG genes; (vii) regions reported in Wenger A. M., et al., (2019) Nat Biotechnol. 37:1155-1162; and (viii) PGX genes.

[0182] Probe sets were designed to hybridize within such target regions using software tools including DESIGNSTUDIO (Illumina, Inc., San Diego). Probes were designed to hybridize to target regions having about 1 kb+/−0.2 kb between corresponding sequences in the linear reference sequence. A 400 bp window centered around the 1 kb target spacing was searched. Within the 400 bp window, probes were identified using several parameters including GC bias (e.g. <25% to <75%) and uniqueness or hits in the genome. Suitable probes were predicted to hybridize or to hit less than 20 other regions of the reference genome. A hit was at least 80 consecutive bps of the 120 bp probes match >90%. 198,451 probes were identified. As depicted in FIG. 30, selection probes were identified having increased specificity for a target fragment.

[0183] In an example selection process for a fixed panel, probes were selected using the following steps: (1) Target regions were selected based on several inputs, including focusing on low mappability (non-unique) portions of protein-coding regions (including introns and UTRs), and certain identified groups of genes and genomic regions including: ACMG genes, CMRG genes, PGX genes, MHC locus, deCODE Icelandic dark matter regions. (2) Probes were designed to capture the above regions, aiming for about 1000 bp spacing between probes with the following sub-steps (2A)-(2D). (2A) To select better probes, 500 bp spacing was initially used. This provided two opportunities to find good probes for each region, which was useful to maximize the power of the data in a limited time. (2B) To achieve 1000 bp spacing, the algorithm jumped from one probe to the next in 1000 bp increments, but allowed a window of +/−200 bp to find the ‘best’ probe. (2C) There were multiple parameters within that window to find the ‘best’ probe. Mostly these were typical parameters such as GC content. However, a primary parameter for the panel was number of hits in the genome (minimize this number), and requirements on this parameter were relaxed to permit selection of probes in all regions. (2D) Probes were manufactured as double stranded DNA 80-mers or 120-mers. (3) At least 2 probes were selected per region, even for ‘small’ regions (e.g. 1000 bp, where 1 probe may target based on the above). (4) After probe selection was complete, additional rounds of selection were performed, based on the following sub-steps (4A)-(4D). (4A) Discarding region types that did not belong in the panel, for example, regions that were not low mappability portions of protein-coding regions. (4B) Discarding regions that were identified as “failed to cover” using the following sub-steps. (4B) (i). Regions that “failed to cover” included those that neither of the two panel designs covered at least half of the region 5×. This was calculated from the median of many samples, each with mean coverage in the 30× range. (4B) (ii) There were two designs for this panel which provided a choice of which probes to keep. ‘Panel A’ was kept as a default, because it had more replicates and typically saw better coverage overall, and slightly more probes were in this panel. ‘Panel B’ was kept if panel B gave at least 20% better coverage (calculated by fraction of bases covered >10×). (4C) To be even more rigorous about probes that hit multiple times in the genome, all probes were discarded that hit at least 20 times elsewhere in the genome. A hit included at least 50 consecutive bps of the 120 bp probes match >90%. This resulted in some gaps larger than desired. If there was a gap >1.5 kb or a region with a single probe, the other panel was examined probes from the other panel were added to cover those gaps. (4D) Any corrections that were needed were then made to align probes with coordinates of genomic sequences.

[0184] Additional “spike in” probes were identified in target regions using the following steps. Gaps between probes were identified in the remaining target regions that were larger than 1.5 kb, and target regions were identified that had gaps of larger than 1.5 kb between the first or last remaining probe and the target region start or stop location on the chromosome. For each identified 1.5 kb gap, unselected probes which targeted the region from panel A or panel B were identified and selected to fill the gap, making sure that such selected probes did not bind excessively (more than 20 times) in other parts of the genome. Separately, target regions were identified that were left with a single probe after going through the previous selection criteria. Targets could be left with a single probe because all the other probes assigned to that target region were liable to bind to >20 other places in the genome and had been removed, or because many target regions only had one probe from each uber panel A and uber panel B and only one of the panel batches to use for those targets had been picked. For these single-probe targets, unpicked probes were added that hit that same target from the non-picked panel, provided that those probes were also not labeled to bind excessively in other parts of the genome and that those probes had also met the same coverage criteria in the previous steps. Initial probe panels including ‘Uber A’ and ‘Uber B’ were generated. Probes within these panels were excluded with criteria that included having at least 20 hits in the genome, to generate a ‘final’ panel. TABLE 2A summarizes steps used to generate different batches of selections probes using steps described above.

TABLE 2A

| Step included | Batch | | | | |
|---|---|---|---|---|---|
| in batch | | | Uber A and | First | Second |
| generation | Final | Spike-in | Uber B | order | order |
| (1) | Yes | Yes | Yes | Yes | Yes |
| (2A) | Yes | Yes | Yes | Yes | Yes |
| (2B) | Yes | Yes | Yes | Yes | Yes |
| (2C) | Yes | Yes | Yes | Yes | Yes |
| (2D) | Yes | Yes | Yes | Yes | Yes |
| (3) | Yes | Yes | Yes | Yes | Yes |
| (4A) | Yes | Yes | No | No | No |
| (4B)(i) | Yes | Yes | No | No | No |
| (4B)(ii) | Yes | Yes | No | No | No |
| (4C) | Yes | No | No | No | No |
| (4D) | Yes | Yes | No | No | No |

[0185] TABLE 2B lists certain probes generated by the foregoing methods.

TABLE 2B

| | Characteristic | | |
|---|---|---|---|
| | | Approx spacing | |
| Batch | Size (bases) | in genome (kb) | No of probes |
| Final | 120 | 1 kb | 39953 |
| Uber A | 120 | 1 kb | 81325 |
| Spike-in | 120 | 1 kb | 1491 |

[0186] A series of selection probe panels were developed using methods substantially similar to the foregoing methods. Panels included: (1a) uber A; (1b) uber B; (2) intermediate/dev; and (3) final. Panels (1)-(3) were progressive iterations of a selection probe panel. The panels were used to prepare libraries with a method with long fragments with enrichment, and substantially similar to the WGS with enrichment workflow depicted in FIG. 32. A control included a library prepared with a method with long fragments, without enrichment, substantially similar to the WGS workflow depicted in FIG. 32. TABLE 2C lists certain metrics for data obtained using each method/panel which show that in methods that included enrichment, compared to methods without enrichment, median coverage levels and N50 values were much greater despite a smaller number of paired end reads.

TABLE 2C

| | With enrichment | | | | | Without |
|---|---|---|---|---|---|---|
| | Panel | Panel | Panel | Panel | Panel | enrichment |
| Metric | (1a) | (1a) | (1b) | (2) | (3) | None |
| Level of input reads | Low | High | High | Low | Low | High |
| (# paired end reads) | 1.0E+09 | ~5E+09 | ~3E+09 | 6.0E+08 | 5.9E+08 | 5.4E+09 |
| target region size (Mbp) | 76 | 76 | | 40 | 40 | N/A |
| median coverage | 32.2 | 72.2 | 67.5 | 34.4 | 41.9 | 27.3 |
| percent bases with no coverage | 5.2% | 2.3% | 3.7% | 2.3% | 2.4% | 2.0% |
| percent bases with less than | 20.1% | | | 15.3% | 12.3% | 11.5% |
| 10x coverage | | | | | | |
| N50 (bp) | 6089 | 4198 | 4192 | 6677 | 7116 | 7054 |
| percent reads on target | 72% | | | 85% | 85% | N/A |
| f-measure non-SNP type 2 | 0.737 | 0.784 | 0.732 | 0.841 | 0.841 | 0.881 |
| f-measure SNP type 2 | 0.885 | 0.902 | 0.882 | 0.905 | 0.911 | 0.947 |
| precision non-SNP type 2 | 0.841 | 0.878 | 0.847 | 0.848 | 0.869 | 0.889 |
| precision SNP type 2 | 0.923 | 0.92 | 0.892 | 0.952 | 0.947 | 0.96 |
| sensitivity non-SNP type 2 | 0.656 | 0.709 | 0.644 | 0.834 | 0.814 | 0.874 |
| sensitivity SNP type 2 | 0.849 | 0.884 | 0.872 | 0.863 | 0.879 | 0.934 |

[0187] The data in TABLE 2C show that in methods that included enrichment, compared to methods without enrichment, median coverage levels and N50 values were much greater despite a smaller number of input paired end reads.

### Example 9—Major Histocompatibility Complex (MHC) Panel

[0188] The MHC region is a large locus located on the short arm of human chromosome 6 (6p21.1-6p21.3), and contains highly polymorphic genes that code for cell surface proteins essential for the adaptive immune system. The region is challenging to obtain sequence information due to presence of high level of repetitive sequences, sequence homology, pseudogenes, and a wide variety of alleles in the population. Precise genotyping and phasing of the MHC region is challenging but highly clinically desirable for applications like organ transplantation and drug discovery.

[0189] Panels of selection probes were prepared which targeted approximately 5 Mbp of the MHC region. A first panel of selection probes was designed such that probes were spaced about 230 bp from one another on the HG38 reference sequence of the MHC region. Probe sequences were designed to hybridize within the target region using software tools, DESIGNSTUDIO (Illumina, Inc., San Diego). Potential probe sequences were evaluated by several criteria including number of hits within the genome, and percentage GC content. Probes having more than about 20 hits within the genome were discarded. A second panel of selection probes was prepared such that probes would be spaced about 1 kb from one another on a reference sequence of the MHC. The second panel was prepared by removing probes from the first panel. Probes included 80-mers and 120-mers. A batch of clinical probes was designed by a method including: targeting a 1 kb window in a reference sequence; identifying potential probes within the 1 kb using software tools, DESIGNSTUDIO (Illumina, Inc., San Diego); selecting a probe within the 1 kb based on criteria including less than 20 hits within the reference genome, and GC content. A hit included probes having at least 90% sequence identity along the full length of the probe with a target complement in the reference sequence. TABLE 3A lists probes generated by the foregoing methods.

TABLE 3A

| | Oligo characteristic | | | |
|---|---|---|---|---|
| | | Approx spacing | | |
| Batch | Size (bases) | in genome | | No of probes |
| Clinical | 120 | 1 | kb | 4966 |
| Final design | 120 | 1 | kb | 5153 |
| Final design | 80 | 1 | kb | 5155 |
| Input4_120_designs | 120 | 230 | bp | 21608 |
| Input4_120_designs | 80 | 230 | bp | 21608 |

[0190] The panels were used to prepare libraries with a method with long fragments and enrichment, and substantially similar to the WGS with enrichment workflow depicted in FIG. 32. Use of the MHC probe panel generated highly specific and efficient enrichment over the target region, with 98.3% long-reads on-target. FIG. 34 depicts an example of coverage for the targeted region. TABLE 3B lists certain sequencing metrics.

TABLE 3B

| Parameter | MHC panel |
|---|---|
| Read N50 | 5932 |
| Error Rate | 0.71% |
| Mean Coverage | 43.05 |
| %0 Coverage | 1.06% |
| % Low Coverage (1-3X) | 0.64% |
| % On Target Reads | 98.3% |

[0191] Use of the MHC selection probe panel resolved haplotype in polymorphic genes. Phasing worked well with use of the MHC probe panel in methods with long fragments and enrichment (e.g. WGS with enrichment workflow depicted in FIG. 32), and was comparable to such methods without enrichment (e.g. WGS without workflow depicted in FIG. 32). TABLE 3C lists certain sequencing metrics. As depicted in FIG. 35, a 722 kb region in the MHC locus was analyzed, and a 580 kb region was encapsulated in one phase block. As depicted in FIG. 36, a 426 kb region in the MHC locus that covered HLA-A, HLA-G, HLA-F, was fully phased.

TABLE 3C

| Parameter | MHC panel |
|---|---|
| % Biallelic Het SNVs Phased | 95.88% |
| Block N50 | 274,215 |
| Switch Error Rate | 0.14% |

[0192] Use of the MHC selection probe panel achieved accurate variant calling in the MHC region. FIG. 37A depicts a graph for SNV precision vs SNV recall for sequence information obtained from nucleic acid libraries prepared by (1) on market long read kits; (2) short read (SR) PCR-free sequencing methods, such as those including simple tagmentation of gDNA; (3) method with long fragments and enrichment, such as the WGS with enrichment workflow depicted in FIG. 32 (ICLR-MHC enrichment); and (4) method with long fragments without enrichment, such as the WGS workflow depicted in FIG. 32 (ICLR-WGS). Use of the MHC panel with long fragment with enrichment methods achieved levels of SNV precision greater than methods without enrichment.

[0193] FIG. 37B depicts a graph for INDEL precision vs INDEL recall for sequence information obtained from nucleic acid libraries prepared by (1) on market long read kits; (2) PCR-free methods; (3) method with long fragments and enrichment, such as the WGS with enrichment workflow depicted in FIG. 32 (ICLR-MHC enrichment); and (4) method with long fragments without enrichment, such as the WGS workflow depicted in FIG. 32 (ICLR-WGS). Use of the MHC panel with long fragment with enrichment methods achieved levels of indel precision greater than methods without enrichment.

### Example 10—American College of Medical Genetics (ACMG) Panel

[0194] A selection probe panel was generated from a list of genes compiled by ACMG for which specific mutations are known to be causative of disorders that are clinically actionable. The panel was designed to precisely call variants and phase in these genes. The panel included 78 unique genes in ACMG SF v3.1, and targeted full genes. The panel size was about 6.8 Mbp. The ACMG genes included those listed in TABLE 1A.

[0195] Panels of selection probes were prepared which targeted the ACMG genes. A first panel of selection probes was designed such that probes were spaced about 230 bp from one another on the HG38 reference sequence of the ACMG genes. Probe sequences were designed to hybridize within the target region using software tools, DESIGNSTUDIO (Illumina, Inc., San Diego). Potential probe sequences were evaluated by several criteria including number of hits within the genome, and percentage GC content. Probes having more than about 20 hits within the genome were discarded. A second panel of selection probes was prepared such that probes would be spaced about 1 kb from one another on a reference sequence of the ACMG genes. The second panel was prepared by removing probes from the first panel. Probes included 80-mers and 120-mers. A batch of clinical probes was designed by a method including: targeting a 1 kb window in a reference sequence; identifying potential probes within the 1 kb using software tools, DESIGNSTUDIO (Illumina, Inc., San Diego); selecting a probe within the 1 kb based on criteria including less than 20 hits within the reference genome, and GC content. A hit included probes having at least 90% sequence identity along the full length of the probe with a target complement in the reference sequence. TABLE 4A lists probes generated by the foregoing methods.

TABLE 4A

| | Characteristic | | | | |
|---|---|---|---|---|---|
| | | Approx | | | |
| | Size | spacing in | | No of | |
| Batch | (bases) | genome | | probes | SEQ ID NOs. |
| Clinical 1 kb | 120 | 1 | kb | 6935 | 02-6936 |
| 120mer_1 kb_Optimized- | 120 | 1 | kb | 7513 | 6936-14449 |
| Final | | | | | |
| 80mer_1 kb_Optimized- | 80 | 1 | kb | 7520 | 14450-21969 |
| Final | | | | | |
| Clinical 230 bp | 120 | 230 | bp | 29954 | 21970-51923 |
| ACMG_120mer_designs | 120 | 230 | bp | 29954 | 51924-81877 |
| ACMG_80mer_designs | 80 | 230 | bp | 29954 | 81878-111831 |

[0196] Use of the ACMG selection probe panel was highly effective and achieved comparable coverage performance with long read whole genome sequencing methods without the use of the panel (FIG. 38). TABLE 4B lists certain sequencing metrics.

TABLE 4B

| Parameter | ACMG panel |
|---|---|
| Read N50 | 7497 |
| Error Rate | 0.26% |
| Mean Coverage | 59.47 |
| %0 Coverage | 0.04% |
| % Low Coverage (1-3X) | 0.22% |
| % On Target Reads | 87.4% |

[0197] 99.5% of heterozygous SNVs were phased using the ACMG panel. For example, as depicted in FIG. 39, TNNT2, a 22 kb gene was fully phased in one phase block. TABLE 4C lists certain sequencing metrics. Phasing metrics were in target genes only, hence a shorter block N50.

TABLE 4C

| Parameter | ACMG panel |
|---|---|
| % Biallelic Het SNVs Phased | 99.5% |
| Block N50 | 85841 |
| Switch Error Rate | 0.17% |

[0198] 99% of heterozygous SNVs were phased using the ACMG panel. For example, as depicted in FIG. 40A for APOB and in FIG. 40B for TMEM127, genes were fully phased in one phase block.

[0199] Use of the ACMG panel covered and phased highly repetitive MSH6 (70.76% contains repeat elements), and enrichment achieved comparable coverage and phasing compared to long read whole genome sequencing methods without the use of the panel (FIG. 41). 27 kb was fully encapsulated in one phase block. Use of the ACMG panel covered and phased highly repetitive NF2 (45% contains repeat elements), and enrichment achieved comparable coverage and phasing compared to long read whole genome sequencing methods without the use of the panel. 99 kb was fully encapsulated in one phase block.

[0200] Use of the ACMG selection probe panel achieved highly accurate variant calling in the ACMG. FIG. 42A depicts a graph for SNV precision vs SNV recall for sequence information obtained from nucleic acid libraries prepared by (1) on market long read kits; (2) PCR-free methods; (3) method with long fragments and enrichment, such as the WGS with enrichment workflow depicted in FIG. 32 (ICLR-ACMG enrichment); and (4) method with long fragments without enrichment, such as the WGS workflow depicted in FIG. 32 (ICLR-WGS). Use of the ACMG panel with long fragment with enrichment methods achieved levels of SNV precision greater than methods without enrichment. FIG. 42B depicts a graph for INDEL precision vs INDEL recall for sequence information obtained from nucleic acid libraries prepared by (1) on market long read kits; (2) PCR-free methods; (3) method with long fragments and enrichment, such as the WGS with enrichment workflow depicted in FIG. 32 (ICLR-ACMG enrichment); and (4) method with long fragments without enrichment, such as the WGS workflow depicted in FIG. 32 (ICLR-WGS). Use of the ACMG panel with long fragment with enrichment methods achieved levels of indel precision and indel recall greater than methods without enrichment.

### Example 11—Pharmacogenetic (PGX) Panel

[0201] A selection probe panel was generated for genes commonly targeted by pharmacogenetic testing assays. Genetic variation is known to influence the way individual respond to therapeutics. Accurately detecting functional haplotypes (“star alleles”) in clinically actionable pharmacogenetic genes is crucial to implementation of personalized medicine. The panel was generated to achieve highly accurate genotyping and star allele calling in such genes. The panel included 98 genes that are important in pharmacogenetics, targeting full genes. The panel size was about 8.1 Mbp. The genes included those listed in TABLE 1B.

[0202] Panels of selection probes were prepared which targeted the PGX genes. A first panel of selection probes was designed such that probes were spaced about 230 bp from one another on the HG38 reference sequence of the PGX genes. Probe sequences were designed to hybridize within the target region using software tools, DESIGNSTUDIO (Illumina, Inc., San Diego). Potential probe sequences were evaluated by several criteria including number of hits within the genome, and percentage GC content. Probes having more than about 20 hits within the genome were discarded. A second panel of selection probes was prepared such that probes would be spaced about 1 kb from one another on a reference sequence of the PGX genes. The second panel was prepared by removing probes from the first panel. Probes included 80-mers and 120-mers. A batch of clinical probes was designed by a method including: targeting a 1 kb window in a reference sequence; identifying potential probes within the 1 kb using software tools, DESIGNSTUDIO (Illumina, Inc., San Diego); selecting a probe within the 1 kb based on criteria including less than 20 hits within the reference genome, and GC content. A hit included probes having at least 90% sequence identity along the full length of the probe with a target complement in the reference sequence. TABLE 5A lists probes generated by the foregoing methods.

TABLE 5A

| | Characteristic | | | |
|---|---|---|---|---|
| | | Approx spacing | | |
| Batch | Size (bases) | in genome | | No of probes |
| Clinical 1 kb | 120 | 1 | kb | 8153 |
| PGX_80mer_1 kb | 80 | 1 | kb | 8693 |
| PGX_80mer_230 bp | 80 | 230 | bp | 35205 |
| PGX_80mer_230 bp_v1 | 80 | 230 | bp | 33089 |

[0203] TABLE 5B lists certain sequencing metrics for methods with long fragments and enrichment with the PGX panel, and shows highly effective target region coverage.

TABLE 5B

| Parameter | PGx panel |
|---|---|
| Read N50 | 7279 |
| Mean Coverage | 57.17 |
| %0 Coverage | 0.12% |
| % Low Coverage (1-3X) | 0.32% |
| % On Target Reads | 88.3% |

[0204] Star Alleles are a nomenclature system used to describe allelic variation. In the case of PGX genes, star alleles describe haplotype patterns associated with protein-level interactions, with *1 usually referring to the wild-type or “fully-functional” haplotype. TABLE 5C lists star alleles called by methods which include long fragments, and enrichment (ICLR PGX enrichment) which were 100% concordant with on market long read methods.

TABLE 5C

| Gene | ICLR PGx Enrichment | On-market Long Reads |
|---|---|---|
| CYP2C19 | *1.002, *1.002 | *1.002, *1.002 |
| CYP2C8 | *1.001, *1.004 | *1.001, *1.004 |
| CYP2C9 | *1.001, *1.001 | *1.001, *1.001 |
| CYP2E1 | *1.002, *7.002 | |
| CYP2J2 | *1.001, *1.001 | *1.001, *1.001 |
| CYP3A4 | *1.002, *1.002 | *1.002, *1.002 |
| CYP3A5 | *3.001, *3.001 | *3.001, *3.001 |
| CYP3A7 | *1.001, *1.001 | *1.001, *1.001 |
| CYP4F2 | *1.001, *4.1001 or | *1.001, *4.1001 or |
| | *2.001, *3.001 | *2.001, *3.001 |
| NUDT15 | *1.001, *1.001 | *1.001, *1.001 |
| SLCO1B1 | *1.002, *1.002 | *1.002, *1.002 |
| TPMT | *1.001, *1.001 | *1.001, *1.001 |
| UGT1A1 | *1, *1 | *1, *1 |

[0205] Use of the PGX selection probe panel achieved highly accurate variant calling in the PGX genes. FIG. 43A depicts a graph for SNV precision vs SNV recall for sequence information obtained from nucleic acid libraries prepared by (1) on market long read kits; (2) PCR-free methods; (3) method with long fragments and enrichment, such as the WGS with enrichment workflow depicted in FIG. 32 (ICLR-PGX enrichment); and (4) method with long fragments without enrichment, such as the WGS workflow depicted in FIG. 32 (ICLR-WGS). Use of the PGX panel with long fragment with enrichment methods achieved levels of SNV precision and indel recall greater than methods without enrichment. FIG. 43B depicts a graph for INDEL precision vs INDEL recall for sequence information obtained from nucleic acid libraries prepared by (1) on market long read kits; (2) PCR-free methods; (3) method with long fragments and enrichment, such as the WGS with enrichment workflow depicted in FIG. 32 (ICLR-PGX enrichment); and (4) method with long fragments without enrichment, such as the WGS workflow depicted in FIG. 32 (ICLR-WGS). Use of the PGX panel with long fragment with enrichment methods achieved levels of indel precision and indel recall greater than methods without enrichment.

### Example 12—Challenging Medically Relevant Genes (CMRG) Panel

[0206] A selection probe panel was generated for genes that are medically relevant autosomal genes that are excluded from the GiaB v4.2.1 variant benchmark due to repeats or polymorphic complexities (Wagner J., et al., (2022) Nat Biotechnol. 40:672-680). These genes have <90% bases included in the benchmark and pose a challenge for their accurate analysis in a clinical setting. The selection probe panel was generated to rescue coverage gap in these genes. The panel targeted 389 genes, with a panel size of 22.5 Mbp. The average overlap with repeat: 36.6%, and the average overlap with segdup was 19.7%. The genes include those listed in TABLE 1C.

[0207] Panels of selection probes were prepared which targeted the CMRG genes. A first panel of selection probes was designed such that probes were spaced about 230 bp from one another on the HG38 reference sequence of the CMRG genes. Probe sequences were designed to hybridize within the target region using software tools, DESIGNSTUDIO (Illumina, Inc., San Diego). Potential probe sequences were evaluated by several criteria including number of hits within the genome, and percentage GC content. Probes having more than about 20 hits within the genome were discarded. A second panel of selection probes was prepared such that probes would be spaced about 1 kb from one another on a reference sequence of the CMRG genes. The second panel was prepared by removing probes from the first panel. Probes included 80-mers and 120-mers. A batch of clinical probes was designed by a method including: targeting a 1 kb window in a reference sequence; identifying potential probes within the 1 kb using software tools, DESIGNSTUDIO (Illumina, Inc., San Diego); selecting a probe within the 1 kb based on criteria including less than 20 hits within the reference genome, and GC content. A hit included probes having at least 90% sequence identity along the full length of the probe with a target complement in the reference sequence. TABLE 6A lists probes generated by the foregoing methods.

TABLE 6A

| | Characteristic | | | |
|---|---|---|---|---|
| | | Approx spacing | | |
| Batch | Size (bases) | in genome | | No of probes |
| Clinical | 120 | 1 | kb | 22545 |
| CMG_80mer_1 kb | 80 | 1 | kb | 21333 |
| CMG_80mer_230 bp | 80 | 230 | bp | 96721 |

[0208] Methods using long fragments with enrichment with either the first selection panel (230 bp spacing), or the second selection panel were compared. As depicted in FIG. 44A, use of the second selection probe panel (SYD-C2-CMRG-1 kb) compared to use of the first selection probe panel (SYD-C2-CMRG-230 bp), resulted in increased identification in sequence data for (i) total mutations in bases in region; (ii) percentage DUP mutant reads; and (iii) percentage on target unique mapped reads. FIG. 44B compares normalized coverage between use of the first selection probe panel (SYD-C2-CMRG-230 bp) and the second selection probe panel (SYD-C2-CMRG-1 kb).

[0209] Coverage of certain genes, including CFC1, HBG1, OR51A2, RGPD3, and CYP4F3 was compared using methods with long fragment and enrichment (ICLR with enrichment), methods with long fragments without enrichment (ICLR WGS), and PCR free short reads (SR). FIG. 44C depicts an example with respect to HBG1 and shows that enrichment with the CMRG panel rescued a SR coverage dip in the gene. With regard to other genes, for CFC1, enrichment with the CMRG panel increased coverage in the gene. For HBG1, enrichment with the CMRG panel rescued a SR coverage dip in the gene. For OR51A2, enrichment with the CMRG panel rescued a SR coverage gap in the gene. For the RGPD3 gene, enrichment with the CMRG panel rescued an SR coverage dip in the gene. For the CYP4F3 gene, enrichment with the CMRG panel resolved SVs missed by SR in the gene.

[0210] TABLE 6B lists certain metrics which shows that methods with long fragments and enrichment with the CMRG panel achieved highly effective target region coverage.

TABLE 6B

| Parameter | CMRG panel |
|---|---|
| Read N50 | 6432 |
| Mean Coverage | 47.68 |
| %0 Coverage | 2.74% |
| % Low Coverage (1-3X) | 0.92% |
| % On Target Reads | 80.5% |

[0211] Use of the CMRG selection probe panel achieved highly accurate variant calling in the CMRG genes. FIG. 45A depicts a graph for SNV precision vs SNV recall for sequence information obtained from nucleic acid libraries prepared by (1) on market long read kits; (2) PCR-free methods; (3) method with long fragments and enrichment, such as the WGS with enrichment workflow depicted in FIG. 32 (ICLR-CMRG enrichment); and (4) method with long fragments without enrichment, such as the WGS workflow depicted in FIG. 32 (ICLR-WGS). FIG. 45B depicts a graph for INDEL precision vs INDEL recall for sequence information obtained from nucleic acid libraries prepared by (1) on market long read kits; (2) PCR-free methods; (3) method with long fragments and enrichment, such as the WGS with enrichment workflow depicted in FIG. 32 (ICLR-CMRG enrichment); and (4) method with long fragments without enrichment, such as the WGS workflow depicted in FIG. 32 (ICLR-WGS).

[0212] The term “comprising” as used herein is synonymous with “including,” “containing,” or “characterized by,” and is inclusive or open-ended and does not exclude additional, unrecited elements or method steps.

[0213] The above description discloses several methods and materials of the present invention. This invention is susceptible to modifications in the methods and materials, as well as alterations in the fabrication methods and equipment. Such modifications will become apparent to those skilled in the art from a consideration of this disclosure or practice of the invention disclosed herein. Consequently, it is not intended that this invention be limited to the specific embodiments disclosed herein, but that it cover all modifications and alternatives coming within the true scope and spirit of the invention.

[0214] All references cited herein, including but not limited to published and unpublished applications, patents, and literature references, are incorporated herein by reference in their entirety and are hereby made a part of this specification. To the extent publications and patents or patent applications incorporated by reference contradict the disclosure contained in the specification, the specification is intended to supersede and/or take precedence over any such contradictory material.

The application's sequence listing, which the Patent Office published only in electronic form, follows.

SEQUENCE LISTING (111831 sequences)

SEQ ID NO: 1 - DNA, 15 bp, synthetic construct
  source 1..15: mol_type = other DNA
gtctcgtgggctcgg

SEQ ID NO: 2 - DNA, 120 bp, synthetic construct
  source 1..120: mol_type = other DNA
taattgtgtcatgttcttggcaggaccgccagagggagccatggatttagaaattcttcagtaagcacattcgtttttctcacctgtaactcttcgaccacattattgagcaaactgaaa

SEQ ID NO: 3 - DNA, 120 bp, synthetic construct
  source 1..120: mol_type = other DNA
tgtatatatgaataaatgacgcttacttgaaaacctaattgacacttttaatgcttctagagaagttgccctttgcagtgtacatgaagaagagaacagggctctctgactcttgcctcc

SEQ ID NO: 4 - DNA, 120 bp, synthetic construct
  source 1..120: mol_type = other DNA
tgccagtcacagcaagcaacctttctcctctctctctcttcgtccccaccagaagatactttgaatttaaattttagaaataaggaaagttttttcttccaatagtctctgtctaggacg

SEQ ID NO: 5 - DNA, 120 bp, synthetic construct
  source 1..120: mol_type = other DNA
tgctgagattacaggtgtgagtcactgtgccctgcaggatttttttcttcttttttttgagataggatctcactctgtcacctaggctggagtaggatcttggcccactgcagcctccat

SEQ ID NO: 6 - DNA, 120 bp, synthetic construct
  source 1..120: mol_type = other DNA
catcaccccctaaaaaggttcaacacattatgagtcagcatctcccaaaacttgtgaatcaattacagccaagccacaaaaggttaagtcattgagatgggaagttcctcttctgattat

SEQ ID NO: 7 - DNA, 120 bp, synthetic construct
  source 1..120: mol_type = other DNA
cagtgactattttagaactacaaaacagccatggctactatggacccataaaatagcggcttgtgcagaatatctccactgcataaagatcaatgaattcagacagactgcattcattgg

SEQ ID NO: 8 - DNA, 120 bp, synthetic construct
  source 1..120: mol_type = other DNA
agatgggaaatccagagtctgagaccagatctttgcagagacaagttgcctaccttatgttaaagaagcatctagattttcctgtctgtatcaacccaaatgcacatttttctagatatg

SEQ ID NO: 9 - DNA, 120 bp, synthetic construct
  source 1..120: mol_type = other DNA
taaggaaacatctgagaagtagggaaataaaatagctattacagagttggagttctgccaaaacattcccacaaaatcaaacctgcatcttgccaaaggcctaaaacttccttagcagtg

SEQ ID NO: 10 - DNA, 120 bp, synthetic construct
  source 1..120: mol_type = other DNA
aaattaggatggtctctgaaaatgggaaggtatggttaccatgaatgctgggatatttttaataactgttttgttgggcagtgatggcttgggaggaggggttgactatactcagaaaaa

SEQ ID NO: 11 - DNA, 120 bp, synthetic construct
  source 1..120: mol_type = other DNA
acttccaaaatccacttccagacacctaagctgcaccaaaaatacagcccagtgaaagaaaacccctacaacaaatcagaaccagaaagaaatctgagtttccagtgcctaaatacaaat

SEQ ID NO: 12 - DNA, 120 bp, synthetic construct
  source 1..120: mol_type = other DNA
tacatagagggagtgatgattttatggtaggcacactgtttataaatcaagttcttgagggaggtgagtggaaataggaattgaagtatggagacaaggttgacaggcctatgtcttaca

SEQ ID NO: 13 - DNA, 120 bp, synthetic construct
  source 1..120: mol_type = other DNA
tatgggagttcccataggtctctcatccagtttcatttttgccaaatgttatcatcttattgtcctaggtttttcttggttctctatactatctcattacatcggggcccagagtttcac

SEQ ID NO: 14 - DNA, 120 bp, synthetic construct
  source 1..120: mol_type = other DNA
tggactgtggacatgtgagaaaaatcccaaaatgagtggctttattttacagccatgaccagctgttcactcatgttactatgtcagatctgtttgattaatggtgcccacacatataca

SEQ ID NO: 15 - DNA, 120 bp, synthetic construct
  source 1..120: mol_type = other DNA
ggcagcactctgtagatttagattaggccatgtaactactggcaaatagccgtataatattgatgtctggtaaggaaaatgattttctgctggtgccgaaaaattgggctgtagaaattg

SEQ ID NO: 16 - DNA, 120 bp, synthetic construct
  source 1..120: mol_type = other DNA
attagctattattattgtcggatgctccataatgaggaagttagttctagaggtgagacagacactttttcagacaaaagtgcagaggtaaactcttacccagaagactctgacaccctg

SEQ ID NO: 17 - DNA, 120 bp, synthetic construct
  source 1..120: mol_type = other DNA
cacttaagacacggtacacaagtcttatcttaggaaagggatcagaaaactgtaaagctacatgcccatgatcctgtaatggccaactaggaaagtggaataaacttgtatcactccttt

SEQ ID NO: 18 - DNA, 120 bp, synthetic construct
  source 1..120: mol_type = other DNA
cgtgactccctacccacttctacccaactaattttggttaagggtgcctcctctgtttatccatactactttgtgtttgcctctctcgtagcactcactatattgttctataataatatg

SEQ ID NO: 19 - DNA, 120 bp, synthetic construct
  source 1..120: mol_type = other DNA
gacttccatattggacagcacaggagtaataagttttaaatttggctgcaactgaaattgcctaaggggcttaaaaaatcccaatgcacaggctacactctagatcaattaaatcagagc

SEQ ID NO: 20 - DNA, 120 bp, synthetic construct
  source 1..120: mol_type = other DNA
gatacaatcctcaatgattcttattcataacaaaatttgggaatcactcagacaaacagctgaaggaggcagaaccacatgacatccagtttgaccctgattctctgagtgtggatgaca

SEQ ID NO: 21 - DNA, 120 bp, synthetic construct
  source 1..120: mol_type = other DNA
tagcactcatgggttatgtctacagagaaatagatttccttcaccttcacctagaaacataagttaaagtttctaacaacctagcaacacagaggacagattgccttatgggatagtgag

SEQ ID NO: 22 - DNA, 120 bp, synthetic construct
  source 1..120: mol_type = other DNA
gattggccaccactcagccccatctgttgttgtaatgctagttcagagttgccagatcttccactttttatgagaaggtagaaattgtaacctttgtgcaaaaatcccttcatttaaaat

SEQ ID NO: 23 - DNA, 120 bp, synthetic construct
  source 1..120: mol_type = other DNA
gcttttgagcagcataggtttggagcaaatgcctactaatgtcttagtgtaaatttatttccagagattctcagaggggaatggaacttacatttatttaatgcctaccatgtccccaag

SEQ ID NO: 24 - DNA, 120 bp, synthetic construct
  source 1..120: mol_type = other DNA
tcctagagtcattctgtgcttttgagcacctgtaccaaaagatgtgctagacagaggaatgaggataaaatttgaattcttggccacaggattgaggttagtagtggaggaagagtataa

SEQ ID NO: 25 - DNA, 120 bp, synthetic construct
  source 1..120: mol_type = other DNA
aaatacatgggaaactaatgatagacaaaaggttatatagtaaagtctgttatgtagatttccctgtgccatcttcaggcaagcaagggcctaaggtcatccctggtgatcaacctttgt

SEQ ID NO: 26 - DNA, 120 bp, synthetic construct
  source 1..120: mol_type = other DNA
gaatgctccaatcactccagtgatttcatcagcacacttacttgatgtaagctcttatattttctcacatttgcagtatattcaccattaggttgtaaacttttggaggcagccagtgtg

SEQ ID NO: 27 - DNA, 120 bp, synthetic construct
  source 1..120: mol_type = other DNA
gggcctagagatctgcatttaaacaagagccacacagaagcacttggacagagggtaagaagggaatgtgatactgaagtctcaaaaatacagaagaatagtaaggaatgatcttcatca

SEQ ID NO: 28 - DNA, 120 bp, synthetic construct
  source 1..120: mol_type = other DNA
cagacatactttagcccctagaaaagaaagtgaacaggaagagaccctcgagatatctttggatgcatcaagaattttaaaagctgcaacttggaattcaaagcattcacttccttttcc

SEQ ID NO: 29 - DNA, 120 bp, synthetic construct
  source 1..120: mol_type = other DNA
ggtttaaaactcataatggagcaattaaaaccatgtttgttttcctgaatccatgacaacaataactttatcccaaaaccagctgtgaatgttggtaacacgggcactctgctgacctga

SEQ ID NO: 30 - DNA, 120 bp, synthetic construct
  source 1..120: mol_type = other DNA
aacccccaccccgcaatactacacagagatgaaaaatgtgtttaggtagaagatcctcctaaataagaaggaagggtctggaaagctgttatctgggttgtattacaactttgtgttttt

SEQ ID NO: 31 - DNA, 120 bp, synthetic construct
  source 1..120: mol_type = other DNA
aattcaggatatgatacctaaagaaaggttttactgtacttggatcaaggcacctaccaactttttctctactcataggcaaagtcactaccctgtttaaggaggtctttggacgtttcc

SEQ ID NO: 32 - DNA, 120 bp, synthetic construct
  source 1..120: mol_type = other DNA
cagatggcacaaataatagacattttcccgaataatggcgtctgattttcaagcaatgcttagccaattgtagatttgggcagaaaaagtttgtaccaagcatttgagctggaaaaggca

SEQ ID NO: 33 - DNA, 120 bp, synthetic construct
  source 1..120: mol_type = other DNA
ctggccatttaaaatgaaatgaaacaaggtcctcaattgctaacgattaaggggagaggagtgtaaattcagctattgtcttgtcttcaggcagcaggaaattaagggattggtaactgt

SEQ ID NO: 34 - DNA, 120 bp, synthetic construct
  source 1..120: mol_type = other DNA
atgttttatttttctattttaatttttcctgggccttgcctcccaatcctctcaccttccctttcttctgtgtgacctatagattcagaaattcctttctgggataatttctggcactgc

SEQ ID NO: 35 - DNA, 120 bp, synthetic construct
  source 1..120: mol_type = other DNA
aggtatcactgattttttaatagactcactactcactccatgtggtttaaataagggatgaagccttccaattccctgcaaagcttccacgctgagccaatgttgcaacaactcttcaga

SEQ ID NO: 36 - DNA, 120 bp, synthetic construct
  source 1..120: mol_type = other DNA
agaggacccagaaatataccctgactaacgtgggtggaatttcatttggcttgactctttggtgaaaaaaaaaaaaatcaggctctcaaggactcaatttggtgaaccaatgccaaatag

SEQ ID NO: 37 - DNA, 120 bp, synthetic construct
  source 1..120: mol_type = other DNA
cgctctaaatcctaaatgctagatcactgtaatactgtacagatcagccacttgctggcttgtgactctgggccatttacttcacctctcaaaaggcatatttaaagtgaggaaaataat

SEQ ID NO: 38 - DNA, 120 bp, synthetic construct
  source 1..120: mol_type = other DNA
tgtcaccaaaatctgatgtctctttcaagtttgaggcaaggtcaaatgacccagccactgaatcttatgtcccatcccgattaggacccaaccatacattactattatcaattagttata

SEQ ID NO: 39 - DNA, 120 bp, synthetic construct
  source 1..120: mol_type = other DNA
ggctcaaaccaatgctgatgtttgtagagaagttgcattgtgcttgagatccttatatctggtgaaggtaatttttgcccacattccccagattcctttagattagcagcaaaatgtatg

SEQ ID NO: 40 - DNA, 120 bp, synthetic construct
  source 1..120: mol_type = other DNA
cacacgtatgtttattgcagcattattcacaatagcaaagacttggaaccaacccaaatgtccaacaatgatagactggattaagaaaatgtggcacatatacaccatggaatactatgc

SEQ ID NO: 41 - DNA, 120 bp, synthetic construct
  source 1..120: mol_type = other DNA
ctgaagatgtctaggtgtctgggtcaccctgagagggggagtttattaaaatgaatcctctcttctacaaattcatgctaaattgttccacgtctaatggtaatttctccaaaaagcctt

SEQ ID NO: 42 - DNA, 120 bp, synthetic construct
  source 1..120: mol_type = other DNA
taatagaagatatagttcttacgttcaaagagcttccaagctatttatggagcttgacagatgcagaaaaaggcaacgctaatttgcaaagtctgtagtttcagaagatggccagctgag

SEQ ID NO: 43 - DNA, 120 bp, synthetic construct
  source 1..120: mol_type = other DNA
actccaaatgccaaatcagtttcactccctcctcaaaagtgctgagaaagttctaaatttggaaaggtcacaaagggataaagtgagtcagaggaggctttggtttgccttatatgaaaa

SEQ ID NO: 44 - DNA, 120 bp, synthetic construct
  source 1..120: mol_type = other DNA
cccaggctttagagtcaagcaaatcttgatacctttacttgacacatgaacttgatcgagttacctctatgtgaatcaggaaagttattctttccctgtaggtgtgggtatgagaattaa

SEQ ID NO: 45 - DNA, 120 bp, synthetic construct
  source 1..120: mol_type = other DNA
gctgtaataataatataactggccaaagtggtaaaagtggggttaattggtccttatctgtttgaggtaaacaaccgaactgatgagtggtttccctgagcaaagactcttgctacttca

SEQ ID NO: 46 - DNA, 120 bp, synthetic construct
  source 1..120: mol_type = other DNA
accatgaatgctttgggcttaactgcaacatagatagtgttttcttaggaagaaaacctttttcctggcctcattatgtcttctcgccttgaaaatgtggcactttccctttttctggtt

SEQ ID NO: 47 - DNA, 120 bp, synthetic construct
  source 1..120: mol_type = other DNA
aagaaatttcagaaagaactttgataaacccattgaatgacttggaaattccaaggggatttcaaagccaggtggaggaatgcctgcttagtgtctttcctcagtgcaaaggctgataaa

SEQ ID NO: 48 - DNA, 120 bp, synthetic construct
  source 1..120: mol_type = other DNA
atgattccttttcagttattttctggaaagtttaaaaaatatggtattcttcatggagaagccaagatgttaggctgcaggcagtgcttatgctctctagcctagtgaggaggaaagcag

SEQ ID NO: 49 - DNA, 120 bp, synthetic construct
  source 1..120: mol_type = other DNA
aagtagagagaaagcgctgccatgccttaagccaacctttccagaagtataatgcccttgccactagtagtttgggaaacaatttttattggcatgcaggcaaatattttgtttcaatag

SEQ ID NO: 50 - DNA, 120 bp, synthetic construct
  source 1..120: mol_type = other DNA
gtagtgcaggaaggaagaagtataggaaggaagtagtggaggaaggaagtagtacaggaaaagtggttgtaagccatttaacttactttttttcatctgaactgtgacccccaaattatc

SEQ ID NO: 51 - DNA, 120 bp, synthetic construct
  source 1..120: mol_type = other DNA
aaaagaaaaaaaaaaagactgacttccactgagtgagtgagaattatgccagcagacggcctttggacttgaactataactttttcatgggtctccagcctgttggccaatgctaaagtt

SEQ ID NO: 52 - DNA, 120 bp, synthetic construct
  source 1..120: mol_type = other DNA
aaagtaacccagaattttctaagattatttgaccatgaaacatatgtctccccacaaagcacatattcctatctccttgaacttgaggataattagacgtacgtgggcagagggtagggg

SEQ ID NO: 53 - DNA, 120 bp, synthetic construct
  source 1..120: mol_type = other DNA
tgcagagcttggtggacgatgccaaaggaatactgaaacctttagtgtgtccagtctggaactgcatccaaattcaggttcagtaatgatgtcattatccaaacataccttctgtaaaat

SEQ ID NO: 54 - DNA, 120 bp, synthetic construct
  source 1..120: mol_type = other DNA
tcccatcctcctgaccaccggggcttttcgtgagctcgtctctgatctcgcgcaagagtgacacacaggtgttcaaagacgcttctggggagtgagggaagcggtttacgagtgacttgg

SEQ ID NO: 55 - DNA, 120 bp, synthetic construct
  source 1..120: mol_type = other DNA
ttcaacttcatattgcaagtggagactttaacattggcagggttcaagtctcaagcctcaaatttggagcataaaataagcctcaggcatgttcagaaacctaaatgtttggacaatacc

SEQ ID NO: 56 - DNA, 120 bp, synthetic construct
  source 1..120: mol_type = other DNA
caggaagaggaaaacagtagaaaaaagttctgctagaaatatgagatcaagggcttattttgaacactagaagaagatcttttagggctgggttcagccgtgtccattctaactcaactc

SEQ ID NO: 57 - DNA, 120 bp, synthetic construct
  source 1..120: mol_type = other DNA
taggtttagccccatttctgtgatttgtctgaggttctatttaatctattccacttttttatgtagttactgggtcaatgctaaccctagaatctgaggccattctggttgcagtgggag

SEQ ID NO: 58 - DNA, 120 bp, synthetic construct
  source 1..120: mol_type = other DNA
tggcagatccagttttcaaacctagatatgtctgactctggaacccaaattcctattgtatgtgatgctgcattttgaagtgacttctccttagacattataacttaaacgtggcccctt

SEQ ID NO: 59 - DNA, 120 bp, synthetic construct
  source 1..120: mol_type = other DNA
tatttacgctcagggggagcaataatctgcagaaagaaaacaaaaacttccagtgaactctgaagttccaagcaagggagcaaataacacattgggaggattcacagaaaaaaaccatta

SEQ ID NO: 60 - DNA, 120 bp, synthetic construct
  source 1..120: mol_type = other DNA
gcctcacagttaatccacaatacaatgccaagaaaggagcaactgtgcttagcacctgtttcaagtaaacacctcctgaaactctcagatgtatgaagatgtattggaaaaggaaaagat

SEQ ID NO: 61 - DNA, 120 bp, synthetic construct
  source 1..120: mol_type = other DNA
cggcaaagcccgcttccaatcttggctaagagatgctagcaatgggcattgatccagataaaattagattccttacacacaaagaataaaaatgcgcatcaggaatactaaatctgaagc

SEQ ID NO: 62 - DNA, 120 bp, synthetic construct
  source 1..120: mol_type = other DNA
gagtccttctgacccatacccaccataactccctatgagaagaaaaaatgagaaaatcatgctctcaccatgtcaggaatataatcagtgtcttgtccatttatatctaactgcccaagt

SEQ ID NO: 63 - DNA, 120 bp, synthetic construct
  source 1..120: mol_type = other DNA
gaggaatgtggatttggtcctggttggttgggagaggtgatattgttagaagttttaaacaggactgaaaagagaggacaaggaagaaaatgaagtgtataaggcagagaagacactaaa

SEQ ID NO: 64 - DNA, 120 bp, synthetic construct
  source 1..120: mol_type = other DNA
ggggagccacaaaattccccttcttagagcccctgcgaggtcctgcgaggaccaacgcccaggacaaaacaagttagaaccaaatcaaaaagtgtgggctttaaaaaaaaaaaaaaaaag

SEQ ID NO: 65 - DNA, 120 bp, synthetic construct
  source 1..120: mol_type = other DNA
agtcggcgagctgggcaataaggaaacggtttattaggagggagtggtggagctgggccaggcaggaagacgctggaataagaaacatttttgctccagcccccatcccagtcccgggag

SEQ ID NO: 66 - DNA, 120 bp, synthetic construct
  source 1..120: mol_type = other DNA
actatgtagacacttagatatatatattttttctcatgtaatcctggccgcaacctagtggaagaggggttactatccccttcctacagaaaaggaaacagacatgaatatgggacttgt

SEQ ID NO: 67 - DNA, 120 bp, synthetic construct
  source 1..120: mol_type = other DNA
ttaaaaacaaacaaaaacgctgtcttcatttaaacaaatctgagtagggcacccgttaataacaacagtagtgggcaatttgtacacgtccaccgagacccatgtctttttcttcctttg

SEQ ID NO: 68 - DNA, 120 bp, synthetic construct
  source 1..120: mol_type = other DNA
taaaaaatgcatgtttcttgctgattccaggactgaatcagagtctggagtgagggtgaaaccagtgaatatgcttttctcagtgagcacttcaggtgattctgatgcgtgataaagtag

SEQ ID NO: 69 - DNA, 120 bp, synthetic construct
  source 1..120: mol_type = other DNA
cctggattggggactatcatagaccagaattactccccctaacactctccaacaaacttctggaaaagttcaaccctagtcagccatggaaggtcaaacattcagtgtctaagtgtgttt

SEQ ID NO: 70 - DNA, 120 bp, synthetic construct
  source 1..120: mol_type = other DNA
tgcgtgactcctgcctgttctatccagaccccaatctaaacaatcttgattcctgttcctggcttggcaggaccctgaatggcaggaagcgaagacaggagcctgtttatgtttgaggca

SEQ ID NO: 71 - DNA, 120 bp, synthetic construct
  source 1..120: mol_type = other DNA
taggagccaggaggggacaaaagcctgcttttcagagtgtcagctgctctgaggggagggttctgagggaaggatgactgaggatgaaagtaagagaccaaagcttcaaggtgtttgtct

SEQ ID NO: 72 - DNA, 120 bp, synthetic construct
  source 1..120: mol_type = other DNA
gatgaggaccaagggctctcatgagcctggaggggtgagggagtttttggctactggaatcacaggcggtgccaggcctgggtcagaattggaattctgctgggcagggagtgggctgga

SEQ ID NO: 73 - DNA, 120 bp, synthetic construct
  source 1..120: mol_type = other DNA
gattacaggtgcaagccactaagccaggcccagacccaacctctgactccagctctgtctctgacctaagccacatcaacccccacccccagacctagcttagcagtgacccagtccatt

SEQ ID NO: 74 - DNA, 120 bp, synthetic construct
  source 1..120: mol_type = other DNA
cctggcaccccttccatgctgcccaccagctggttcagctgagtgaccttttaaggtataaaccttaaaaacagataacagggtctgtgagtctggctgtgaaatcttgggtacatgata

SEQ ID NO: 75 - DNA, 120 bp, synthetic construct
  source 1..120: mol_type = other DNA
aaatagcttccagttgttgagataatctaagtatttagaacagtatctagagctaaatattagtggctgttattgttgtagatagaatgagtgcctgacatcatattgtccccattttac

SEQ ID NO: 76 - DNA, 120 bp, synthetic construct
  source 1..120: mol_type = other DNA
tgggtaaaaagataagtgcagctcagaggtcaagagcacatgctttggtgttagactgtgggcttaaatcctagccctgtcacttactatctgttgatcttagacaagtttcttaaactc

SEQ ID NO: 77 - DNA, 120 bp, synthetic construct
  source 1..120: mol_type = other DNA
gcatgtaaagtgtttacagcagaatatctggcacatgccatgtgcaaaacaaatggcagtcattaacattagttagaaacacatttattgcattatactgtccctctcaggggtagcgtg

SEQ ID NO: 78 - DNA, 120 bp, synthetic construct
  source 1..120: mol_type = other DNA
tacaaagacacacacacgtatatcaacacatacaagcgtgaatatccttctgaacatacactcacagaaatatacacatgcgcatatatgccagactgttggccccgtgaggacaaagaa

SEQ ID NO: 79 - DNA, 120 bp, synthetic construct
  source 1..120: mol_type = other DNA
ggtacccaaacccctctgcccgactcaccgcgctgcggatcaagaagacactacaaaaaattagcaacagtccagagaagcctaaagtgattcaatagcccaggagcacctgattccttt

SEQ ID NO: 80 - DNA, 120 bp, synthetic construct
  source 1..120: mol_type = other DNA
ggacctttgtttcttatctacatattggaagatttggtcctgatgtcctttgaggcttctttagctctagttctctgacacttcagcctatatcacagctaacttcttcagtctcatcta

SEQ ID NO: 81 - DNA, 120 bp, synthetic construct
  source 1..120: mol_type = other DNA
tgtctcaggagaattcaatggctctagagagacacacagaaagtttggcatttggaaatttcaaggatgtatgtatgctcacgtatggagcaggttgtcctggtccctgggtgcagggaa

SEQ ID NO: 82 - DNA, 120 bp, synthetic construct
  source 1..120: mol_type = other DNA
gagagggtatttgaatgtggaatgaaatttattccaattcttaaacctttctgcttgtataaaaggtgtatgacacttaagataattcacctgaccttggagtacttgggagggaaagtt

SEQ ID NO: 83 - DNA, 120 bp, synthetic construct
  source 1..120: mol_type = other DNA
tttggtgctgttttggtaaccttcagtcactaagcttctcagtggtaaaatgatatctttatgaatacagtttgtattgtaaaattgtacttttgggggcggtcttatagctgttttagg

SEQ ID NO: 84 - DNA, 120 bp, synthetic construct
  source 1..120: mol_type = other DNA
ttcatacattgaacaaaaagcaccaagcactgttatagatgcgagggaaagagcagtgcaggagaatcttggttcttgtcttcatgggatttatattccactttggaaaacaatgatgag

SEQ ID NO: 85 - DNA, 120 bp, synthetic construct
  source 1..120: mol_type = other DNA
cttagggtagctgagttgttgagtcatcacagtttttctgatttattttgcctttactaatatgcccactccttggcattacctcttatttgctaatgcccatacgataaccccaaactc

SEQ ID NO: 86 - DNA, 120 bp, synthetic construct
  source 1..120: mol_type = other DNA
ttataggctgctggtcaccacaaaatctgaatctgcctttggccacaggttaagtgagaaatgttaatttctctctcctctaatgttgtgacttcagttagtgtcgaacctagaagtact

SEQ ID NO: 87 - DNA, 120 bp, synthetic construct
  source 1..120: mol_type = other DNA
agtaagtttctttctcctgtaagcaagtcctgaggctgtataacactccaaattaaaaggctatttcaaaatggtttccctactgtagtgcagtgggaacttcgagagcagaatctaaag

SEQ ID NO: 88 - DNA, 120 bp, synthetic construct
  source 1..120: mol_type = other DNA
agttaaatgacttttccagcgttatcaagctacaaagtgaaagattcagaacttgaacctaagtcttcaatctccatatgctggagccttctaaagtatctcagtagagtagcgaagagc

SEQ ID NO: 89 - DNA, 120 bp, synthetic construct
  source 1..120: mol_type = other DNA
ccatgactaaactccaaactgtctctgttccactgtcagcagtagaaagacatggaatgttcttgagcaaaagtgtgaagaactattttggtgtttgctgattagagaggatattggtga

SEQ ID NO: 90 - DNA, 120 bp, synthetic construct
  source 1..120: mol_type = other DNA
ttgttgatatctgtaggcataactctattctatgtctaaggtcttcggtaaagagagacgattaagtttatcagtaaagcaccagagtcaattaaggcgactgaaaggagcactaatttt

SEQ ID NO: 91 - DNA, 120 bp, synthetic construct
  source 1..120: mol_type = other DNA
ctgagtcaagagtaataggcttacaattgtgtcttagggtactaagaagttcttttgaggaccttttaaaaggtattctttgttttgaaagactgttttccttctggaagttctaggcct

SEQ ID NO: 92 - DNA, 120 bp, synthetic construct
  source 1..120: mol_type = other DNA
ttaactcctctattctgtacttctgttcccgttttatacagcaggaaattgaaacactgagaggttaagtaactaaagttacagagctagagtgacaggagtaaagcttcaactcaggca

SEQ ID NO: 93 - DNA, 120 bp, synthetic construct
  source 1..120: mol_type = other DNA
agtgttaaggggagtctgctgagaaaagctgtttttgaagccagaaggggtttttgtttttataatgccatttgacagagtggaataacagtatctaaggaaacgggtagaggacaacaa

SEQ ID NO: 94 - DNA, 120 bp, synthetic construct
  source 1..120: mol_type = other DNA
ggccgaaaagacaactgcagaggaataagaaaccttgcagcaaatgctggggtagaagcccatttacaagaagccatagtttataaatgcagcctgaacagcagaaaaaaaattactgtt

SEQ ID NO: 95 - DNA, 120 bp, synthetic construct
  source 1..120: mol_type = other DNA
tcactgacaaattattcaaaaaatgaaaaggcaatcctacttggttgtggatttttatctacaatataagaatgctttaaaaaatacctggtgactaagcaaatggagaagcagcagttt

SEQ ID NO: 96 - DNA, 120 bp, synthetic construct
  source 1..120: mol_type = other DNA
tgttctcttcaattttgatctcccttctcccccttttcttgtattagaatctgaaacctacctatgcagcacataaaatgggatagagtattatggttcagaaaagatgggtaatagttt

SEQ ID NO: 97 - DNA, 120 bp, synthetic construct
  source 1..120: mol_type = other DNA
atctatccattttactttatgtccatctagtttgtgatgctaactctgctctatagtattctatagtacctatcactgttcctccagtgaaggccgtaagttttctccaaatcccgttaa

SEQ ID NO: 98 - DNA, 120 bp, synthetic construct
  source 1..120: mol_type = other DNA
gagaggaattaggatccacctcttaaaggagtagggtcaaagaatttatgatatattttaagatcattacatcgaccagtgaaacagtttcactggatttatccctaggagagggatcac

SEQ ID NO: 99 - DNA, 120 bp, synthetic construct
  source 1..120: mol_type = other DNA
agcaacacagccttattaaatttctctttgtatcttttagactcgttataacaccagttctgtgggcgctttgttgaaacttgatctgtcattgtcttaccagtcattgaacttagggcc

SEQ ID NO: 100 - DNA, 120 bp, synthetic construct
  source 1..120: mol_type = other DNA
ctagagacatcaggaaggttttgtgtaagaaactgagctgggccttaaaggatgaggatatattataacagcagaggaaaaaaggatgtggtattcagaaaggggaggaggtataaacaa

SEQ ID NO: 101 - DNA, 120 bp, synthetic construct
  source 1..120: mol_type = other DNA
gtagtggaaagtatgtgttgatgtttttgtttgttttggtaaacaccaataaaataaatgaaaccctaaaaagtttaaaggaataaaaggcaaacagaacatcagtgagaaaagatacct

SEQ ID NO: 102 - DNA, 120 bp, synthetic construct
  source 1..120: mol_type = other DNA
atgcaggaaagaagagtcacaagtatcatcacttacagattatatgattgcatacccagaaaatccactggaaaccctattggaattcatagaatcatttgataaggtggccacacaagg

SEQ ID NO: 103 - DNA, 120 bp, synthetic construct
  source 1..120: mol_type = other DNA
ttaagttttattagagcatgggcatgcccatctatttatgtgtttggggctgcttttgtgctacagctacaaagtcaagtagttgcaacagaaatcatacgacccacaaagccttataat

SEQ ID NO: 104 - DNA, 120 bp, synthetic construct
  source 1..120: mol_type = other DNA
atgtagcgagtgacacatataaatgatcttatattgcactctactcgcattcctggaataaactcagctttgttctgctgtagtttctttactgtatgttattgtattctgcttcctgat

SEQ ID NO: 105 - DNA, 120 bp, synthetic construct
  source 1..120: mol_type = other DNA
cacgcctggtccaattttttaatagttgtagaactattaaggtttttctgttgcttcttgaatcaattccccctccctagaatctttaatatgtttggaggttgttttctttttcctgtc

SEQ ID NO: 106 - DNA, 120 bp, synthetic construct
  source 1..120: mol_type = other DNA
caaatagaaactttcccatttgtttgaagtaccctaagaatctcctttattactcctagtctagtaacggacatcattactttagagaactctacttggccctctgtgtgtcttacaccc

SEQ ID NO: 107 - DNA, 120 bp, synthetic construct
  source 1..120: mol_type = other DNA
agaatggtaccctgactgtaggactatatccagtgtttccacattaagtatgctgttggccttggggttgatagatcatgttaaagaaatgttcttttttattcagtattttcaacaaga

SEQ ID NO: 108 - DNA, 120 bp, synthetic construct
  source 1..120: mol_type = other DNA
attcctgtaataaagggtacttttagcagtctctgctcatcttgcccatccggctctttttgtggttgtgtaaggttataacttctgtgtctcagtaaacttgtgcatgcccattttttt

SEQ ID NO: 109 - DNA, 120 bp, synthetic construct
  source 1..120: mol_type = other DNA
tcccctgatttcctttggtagagtcttccaattgctgaactccaatattgtcgtgactagccagtgttacaacctgtctgccttattttgtgtaatggatttcatattacagaggcattt

SEQ ID NO: 110 - DNA, 120 bp, synthetic construct
  source 1..120: mol_type = other DNA
gaatttcaaaatcctttttaaccttataggtccaagggtagccaaggatggctgcagcttcatatgatcagttgttaaagcaagttgaggcactgaagatggagaactcaaatcttcgac

SEQ ID NO: 111 - DNA, 120 bp, synthetic construct
  source 1..120: mol_type = other DNA
gcatttcaaggtttcccttattctccagacttttgtgtgtcactgaggtaactgtttctgcttctcttttaccctttatattcagtatcatcacagctcaacctttgctcatgtgtccta

SEQ ID NO: 112 - DNA, 120 bp, synthetic construct
  source 1..120: mol_type = other DNA
caatgtaacttacccttagatccatctccacactgaagtggaatgtctctcagagtgacaatagaagtcacaccctcaaatttctacagtggaatatctagttgatcatttatatgtgtg

SEQ ID NO: 113 - DNA, 120 bp, synthetic construct
  source 1..120: mol_type = other DNA
aaataagtctgaggcagaggggtggaaatagaggaagtggatatgggtgtagatgagataaaactgaccatgaattgataattattgatgtgggatatgaaggtacatggggctttgtta

SEQ ID NO: 114 - DNA, 120 bp, synthetic construct
  source 1..120: mol_type = other DNA
agtcaccgcacccagcctacctagagctctttaattgactttaaaatactgagtatagcaacaaggtaaatatggcattttagagataaaaagctgaaagatggcatggtgtaggaagaa

SEQ ID NO: 115 - DNA, 120 bp, synthetic construct
  source 1..120: mol_type = other DNA
aatcaagggcctcttctaggttgtatgcagtatgcagcccccaagaaatctgtcccactcaaaaactagaaaacactggataaaatacaaaaatcatacttttaaggacactggaggact

SEQ ID NO: 116 - DNA, 120 bp, synthetic construct
  source 1..120: mol_type = other DNA
agtgctaccagagaataaggctgaactggaaaggcaaagtgaaatatcccatattcctgcaatgtttaggaaagacctattagagggagacctacctagtatatcaaacatgactggttt

SEQ ID NO: 117 - DNA, 120 bp, synthetic construct
  source 1..120: mol_type = other DNA
aactaagaactcttgttcatcaaaagactcgagtgtgcttctagaagaaaacataggataatcttatctatgtggccttgggtgggcaaaatttcttaggacacacaaaagactaaacat

SEQ ID NO: 118 - DNA, 120 bp, synthetic construct
  source 1..120: mol_type = other DNA
tagtggttacctctaggaaatgaagattggtaaaaggagcttgagggaaccctctggggtgctagaaatgtattttcacctagatagtgattacatgggtgtgaaaattcactggatatt

SEQ ID NO: 119 - DNA, 120 bp, synthetic construct
  source 1..120: mol_type = other DNA
gtttaaaaagtatgacacaacaagtaaaaaagaaattgcttgtaatttcagtctccatagaataacactgttaacattttaatgattctgctttcagcatcagcttcacctgagaacttg

SEQ ID NO: 120 - DNA, 120 bp, synthetic construct
  source 1..120: mol_type = other DNA
agtagcaatggatggaaagagaattggaatcctggaaaaatcacaggtagtctccaatgagagttcttaaatggaagagatggtgccctgaagtttatagtagacattttgatgggcata

SEQ ID NO: 121 - DNA, 120 bp, synthetic construct
  source 1..120: mol_type = other DNA
ttataggggaacgttccatttagttacaaagttgcaaatgttcaaatattttgtcttgcattcaggaaacctgattggccaaagaactatgctaggagctagaatggaatgcctcagtaa

SEQ ID NO: 122 - DNA, 120 bp, synthetic construct
  source 1..120: mol_type = other DNA
ggctctttgtaaagcttgttgctattctgccagtcactaaatagggctttagtattctatatgccatagacttgagcctactgtttcattggaagaagtattgtcttcttcattcaggat

SEQ ID NO: 123 - DNA, 120 bp, synthetic construct
  source 1..120: mol_type = other DNA
ttcatgttggccaagctggttatcacttaaatactttgactactctgtacattgagtaatacacataattattatatttatacgtagttaaaatgtgtaacttgccagatactttggccc

SEQ ID NO: 124 - DNA, 120 bp, synthetic construct
  source 1..120: mol_type = other DNA
ctgtacagtagcgtagaacacagtcctgtacagtagcgtagaacacagtcctgtacagtagcgtagaacacagtcttatacagtagtgtagaacacagtcctatacagtagtgtagaaca

SEQ ID NO: 125 - DNA, 120 bp, synthetic construct
  source 1..120: mol_type = other DNA
gtttcatacattgatcctagactattgaaacaccatcttgaaaaataaggagtgaacttgggtccataatcttccatctctttttcccctttgagctctattaagaggcagagggcatgc

SEQ ID NO: 126 - DNA, 120 bp, synthetic construct
  source 1..120: mol_type = other DNA
ctgtagtcgttggacactgtgagtcagtagtatgccagaattaatttttgctccctattgatagaatatcatactctttgtgctgtttaaaggaagatgatgctatttggactgtgtctt

SEQ ID NO: 127 - DNA, 120 bp, synthetic construct
  source 1..120: mol_type = other DNA
cctcaagataaatgctagaagttggttaagccaggacttaaacccagcttgtagctttataagctgggttttgaacctcagttttctagttagtaaagtgatcatgagaataacgacctc

SEQ ID NO: 128 - DNA, 120 bp, synthetic construct
  source 1..120: mol_type = other DNA
caactcttatttcataagttcatttattaggaagtaatggaggaaatagtagcatcaccatctattttattctttttcccaccttggacctggtaggtcctgcaggtcctcactagggaa

SEQ ID NO: 129 - DNA, 120 bp, synthetic construct
  source 1..120: mol_type = other DNA
tggacccatgcagttcacacccatattcaagggtcaactgagtaaaaaatgttaaaaagacaagtgtcaagttcagaaaattatatgcagcccaacaactgacaaagcactatcattttt

SEQ ID NO: 130 - DNA, 120 bp, synthetic construct
  source 1..120: mol_type = other DNA
gtacctcttgagttttatccctgtaacactcttactgtgcatttatgtttataatgctcaggtatacagtttcttagtacagattgctatggagaacaccatcatttggtgttcagattc

SEQ ID NO: 131 - DNA, 120 bp, synthetic construct
  source 1..120: mol_type = other DNA
acctcagggttcaactaggcaactagttttttaactccgtgtattgaattgccaaacatactctatagaaatatttatcaccatctgcctattttttgtactgtgttgcaggaatcatgc

SEQ ID NO: 132 - DNA, 120 bp, synthetic construct
  source 1..120: mol_type = other DNA
gattaggtttccatgagccaagtcttagatattccatgaatcataaccttttagtcagtgtaacacagggatttcaactttttgttaagaaatgactcaacatggtggaggcttatgcct

SEQ ID NO: 133 - DNA, 120 bp, synthetic construct
  source 1..120: mol_type = other DNA
tctgtggcaccaattactccttcaggatcaagacatctggcaaagccttttagtttgtcagcagcatcccttctcttctttgatttactgtcatcagattcactgtcagataaagatttt

SEQ ID NO: 134 - DNA, 120 bp, synthetic construct
  source 1..120: mol_type = other DNA
tactactactttgagagaccaaaatagacaaaaaggtaaaaactgaaagagagaaaaccgttttgaaaacatgtagctagccaggtttcctgagtggacgttggctgacaggaggtggaa

SEQ ID NO: 135 - DNA, 120 bp, synthetic construct
  source 1..120: mol_type = other DNA
atttgggtatgcctaagggaatgcattctgcatatgaatgtcatctgtatgttgcaaagggaaaagggtgagaactaatctaactacaactgacaacacaatttggagttcttggaccag

SEQ ID NO: 136 - DNA, 120 bp, synthetic construct
  source 1..120: mol_type = other DNA
ccagaaggcaattggaatatgaagcaaggcaaatcagagttgcgatggaagaacaactaggtacctgccaggatatggaaaaacgagcacaggtaagttacttgtttctaagtgataaaa

SEQ ID NO: 137 - DNA, 120 bp, synthetic construct
  source 1..120: mol_type = other DNA
tgactgactaatgttttaaagccctgaagaggccttgccaattgccttatctgtttcaaaactagcgtgggttgttgttttcttttttaacttttgggacaaattgggaggaaaacattt

SEQ ID NO: 138 - DNA, 120 bp, synthetic construct
  source 1..120: mol_type = other DNA
catgtgcatgtatgtgtacatgttagttataatacgtgtatatatcattttttcttaccttccctcttgcccctatcccagtcagaaagattcgtgacttaaatgtcaaaagtaaaactt

SEQ ID NO: 139 - DNA, 120 bp, synthetic construct
  source 1..120: mol_type = other DNA
catcactacacatcagggaaatgtaatataaagtaaggtactattttttttttgcctatcagctgcccgaaactttataatttttgatgacatgcagtattagcaagggtgtgaaagtaa

SEQ ID NO: 140 - DNA, 120 bp, synthetic construct
  source 1..120: mol_type = other DNA
aacaagaacggccctggaagaggagatctcaggagggtctgaggctatgagaaaaaatatgggatctcatttgcaaggggaaggagtaaataagaattccaaataaaataagaatagaat

SEQ ID NO: 141 - DNA, 120 bp, synthetic construct
  source 1..120: mol_type = other DNA
atctattgtgaagatgttgtaataatcacagtatgataatagcacaggaataaatttaggcaaatgatagagactagaaagaggtacaggaatatttacaacctttatatgacagaagtt

SEQ ID NO: 142 - DNA, 120 bp, synthetic construct
  source 1..120: mol_type = other DNA
taatagagcttactactgggatgtgggaattggtggggtgaaggtgtaagtacacctctatattgccataattgatgatactgtttaatgtagtttatctcctccctagttgatggacac

SEQ ID NO: 143 - DNA, 120 bp, synthetic construct
  source 1..120: mol_type = other DNA
ataccgcactagttcctcatcgatgagtaatgtcatctcttatcacataacaagtttatatatgctggatatttctggactttcttctgttagtccactttagcttctccatgcctgcac

SEQ ID NO: 144 - DNA, 120 bp, synthetic construct
  source 1..120: mol_type = other DNA
aagtatccagcagtcttcctgaaatattttattatatcatcgccggtttaagattctatacactgtcatattgttcgcaaataatgacagtttgtttatcctttccagtccttacagcgt

SEQ ID NO: 145 - DNA, 120 bp, synthetic construct
  source 1..120: mol_type = other DNA
tcatgtcagaaaccatccacctcactggacatcaagacatagacatgacctcagtatttagtgagatactggcaatatggaaatgtagtgtaaaacggagaggagtgggagatataattt

SEQ ID NO: 146 - DNA, 120 bp, synthetic construct
  source 1..120: mol_type = other DNA
agccaccgtgcccggcagcgaacacaacttgagttttctgttctttgtttatcataagactggatgatagcagtaaacatttttactatggtagtaagaaaagcatgaaggcattgtatt

SEQ ID NO: 147 - DNA, 120 bp, synthetic construct
  source 1..120: mol_type = other DNA
caacatacaatttgatatatgacttgtatttccagttttactaagcagatctagacatctgttgaataaagtccagtgtattacaaaaaattgaactgacccagggccgggcacagtggc

SEQ ID NO: 148 - DNA, 120 bp, synthetic construct
  source 1..120: mol_type = other DNA
gaattgataatacacatttacctgtgtttactccagaaaccccattaaagtgatagtaaaaggatacaatgaaagaggcattaagaccagggaaggtgaccacagtaaaatccgtggagc

SEQ ID NO: 149 - DNA, 120 bp, synthetic construct
  source 1..120: mol_type = other DNA
ccacctagatcaccctatagggtaatatagttgacaaaatccattcttcaggcatagagcttcatttaactttttcatagatagcccgctcttaaatatgagtggacactaactaccaga

SEQ ID NO: 150 - DNA, 120 bp, synthetic construct
  source 1..120: mol_type = other DNA
ttagaatggctcacaactcactgaaagtgctatacttaggattaacagttttattataaggatacagatcaagaatggccaaatgaagagacatatggggcaaggcctaaggaaggggtg

SEQ ID NO: 151 - DNA, 120 bp, synthetic construct
  source 1..120: mol_type = other DNA
gatgaagggacatcctgagataaatggtaaagaaagcaaccagtccatattgaaactattgagaggattccaggagagattaagtccaagaagatgaaatcagcagaatacctgcggttt

SEQ ID NO: 152 - DNA, 120 bp, synthetic construct
  source 1..120: mol_type = other DNA
tggcccttggaaagggccaggaaaaaaagcagtatttttttgctccttttcagttctgttggtattgatgtatgtagcattctacttattatgacctttttggctttctactgaagtttt

SEQ ID NO: 153 - DNA, 120 bp, synthetic construct
  source 1..120: mol_type = other DNA
gaggcaaccagtgctgtgactttcttgtgtgttcttccagacatagtttatttattaacaagcaagtacattgggtggaatgggagctgtgaggacaatgcagtgtgtcttaaaagataa

SEQ ID NO: 154 - DNA, 120 bp, synthetic construct
  source 1..120: mol_type = other DNA
ataatagtgaacaaccacttcttttgtcttcagtgtatcgaagcgtgcaggcaggcctgtagcctaggatcagtgaaagaataaaaaaaagtaattaggaaagaggagggaggaaagaaa

SEQ ID NO: 155 - DNA, 120 bp, synthetic construct
  source 1..120: mol_type = other DNA
ttttttatcatattctttttgttctactttcctccttatttttggtgcttcatccacaccatgattcgttgacacgctaaaacaagccacactccctcctaccctgggtcctctgcatgt

SEQ ID NO: 156 - DNA, 120 bp, synthetic construct
  source 1..120: mol_type = other DNA
atttgcagctccattaaatgtcagaatcatgtgtccttgcagaaaagatagttatttgttctacttgggttatgttcctgatagtaatgtgagcgcagctggtagaggatggcattcctg

SEQ ID NO: 157 - DNA, 120 bp, synthetic construct
  source 1..120: mol_type = other DNA
cctgaatgcatatttccagaagcattcagtaccaatgtgctgtcatttctctttattatatcagcaataatgctgtaaggattttctagatctatttctatagctatagattgtgtgttt

SEQ ID NO: 158 - DNA, 120 bp, synthetic construct
  source 1..120: mol_type = other DNA
gaaaatgtgggtagcgtttttataatcatgatgtaggtgggagacccataaagaaaggattgatagatttcacgttacagcatgagacttcagtatgccaggaaatcatagcgagattcc

SEQ ID NO: 159 - DNA, 120 bp, synthetic construct
  source 1..120: mol_type = other DNA
gtttaaacctttcagtggctactcacctcccatatattagaatccagattcttcatgttgcttactcttccaagagtatctcacaatatttgcccacatttctcaccactccctcaactt

SEQ ID NO: 160 - DNA, 120 bp, synthetic construct
  source 1..120: mol_type = other DNA
atgtataatgtgtgtatatgcatagagaaatgtgtgggagaatgttctttaaactgttatcaatagttatctctgagtgttgggatttttgtgggttttacttattcttttgtgtgtcgt

SEQ ID NO: 161 - DNA, 120 bp, synthetic construct
  source 1..120: mol_type = other DNA
accaccacgtgggaatgtattctaccgcttctctcacctggtttcctgcccacaatcattctctttgaaaaatccttcattggcttcccttgattcttagaaaaatgataaccatttatt

SEQ ID NO: 162 - DNA, 120 bp, synthetic construct
  source 1..120: mol_type = other DNA
tatccctgctaaagaaagggtttcttgatctgtttttaatctctcatggaagttaaatggaaggaaaagcttaggagtaaattatacaggccagatccctgcttgcttagcatataacta

SEQ ID NO: 163 - DNA, 120 bp, synthetic construct
  source 1..120: mol_type = other DNA
aagcttttctatttgaaatttagaaccaggtctctggtaatagccagtatataataataaagctcaattaaaagtgggaaaaagatggaatgatagaaaaacccactctactgccactgg

SEQ ID NO: 164 - DNA, 120 bp, synthetic construct
  source 1..120: mol_type = other DNA
tagatttcagtatctgagaatattcaagaagtagaatcagtcaagcttagggattggatatgagtgtttagggggaaggagaagtcgagaattactcgcaggtttctgttaggcagctag

SEQ ID NO: 165 - DNA, 120 bp, synthetic construct
  source 1..120: mol_type = other DNA
ctgatcttgtcaaatgcaattccttgggccttctttcctactatattatattggagtgagttgaagttaaatggaaggttaaaaagtagaagagagcagtcaggcgtgatggctcacgcc

SEQ ID NO: 166 - DNA, 120 bp, synthetic construct
  source 1..120: mol_type = other DNA
tgcagggcaaagctgttaaaagctagcaagagaattatgaaagtgataaccacaagaaatccaacctgaaatacatgctggatttgctagtcatttcaaggaagcagtatcttacttgcg

SEQ ID NO: 167 - DNA, 120 bp, synthetic construct
  source 1..120: mol_type = other DNA
agttggctcaggtctagccttaataaaacgcccaagaaagactctcatggaccaagttctaggctcatagagaatacgagtatgtgtacctcttggtatctcctaataataaatacatct

SEQ ID NO: 168 - DNA, 120 bp, synthetic construct
  source 1..120: mol_type = other DNA
tcatctagattgtgtgtgtagtgtgggtgagaatgtcttattcatttatattcctggtgactaatatactacctggaaagtagcaggggctcaggcaatatttgttgcttggttgcatgt

SEQ ID NO: 169 - DNA, 120 bp, synthetic construct
  source 1..120: mol_type = other DNA
aaaaaaatcaccaaaagtgaaatttatgcacaaaaggaagttataaggtgtgttggttccagaattctccccttgtaccctctagagtaggaggtgccatctcacagtcctcaaaaccta

SEQ ID NO: 170 - DNA, 120 bp, synthetic construct
  source 1..120: mol_type = other DNA
cagcttgacagcaacatctttgaaatgacatgagatacttaatgatttaacccaacctttatctctaaccatacaccttgtgttctgtccacattacattggaacactccacgctctccg

SEQ ID NO: 171 - DNA, 120 bp, synthetic construct
  source 1..120: mol_type = other DNA
aattataccatctataatgtgcttaatttttagggttcaactacacgaatggaccatgaaacagccagtgttttgagttctagtagcacacactctgcacctcgaaggctgacaagtcat

SEQ ID NO: 172 - DNA, 120 bp, synthetic construct
  source 1..120: mol_type = other DNA
tatttcatgctgataagtgagctttcttagagtatctttcttagatgttagcaaatattttaggatttgggaataatgtttgaaaagaaaatagttactttaagccggatgtggtggctc

SEQ ID NO: 173 - DNA, 120 bp, synthetic construct
  source 1..120: mol_type = other DNA
tcaaatagcttaactataatagtatcacagcttgctcctaagaggtggagccaaaatttgaacctagctccgatgaaaacccatttatccgcagtcctatactgccttcctaaaactttc

SEQ ID NO: 174 - DNA, 120 bp, synthetic construct
  source 1..120: mol_type = other DNA
attttgtttctaaactcatttggcccacaggtggaaatggtgtattcattgttgtcaatgcttggtactcatgataaggatgatatgtcgcgaactttgctagctatgtctagctcccaa

SEQ ID NO: 175 - DNA, 120 bp, synthetic construct
  source 1..120: mol_type = other DNA
gggccttagtagagctagaaagaacttgagcaattatgttgcccatctttcacttcatagctgaagctcatttcatagatgaaagtgactttacgtaagttcctatagccattagtgtcc

SEQ ID NO: 176 - DNA, 120 bp, synthetic construct
  source 1..120: mol_type = other DNA
ctggggtgaggggaactagtaagattttactgggagaacattgccttcctggattgtttctttggctatccacagttacgtaatgacccacattttgtactcctgatatttgttctcaaa

SEQ ID NO: 177 - DNA, 120 bp, synthetic construct
  source 1..120: mol_type = other DNA
tgattttatttttcagtgccagctcctgttgaacatcagatctgtcctgctgtgtgtgttctaatgaaactttcatttgatgaagagcatagacatgcaatgaatgaactaggtaagaca

SEQ ID NO: 178 - DNA, 120 bp, synthetic construct
  source 1..120: mol_type = other DNA
ggatctctctagtcatgccacaagcaagaaccatacgcttaattcccattttagtgtaattgtgcccttgctttttgtgccgtttatgttacattatgttccagccaccactttatattc

SEQ ID NO: 179 - DNA, 120 bp, synthetic construct
  source 1..120: mol_type = other DNA
aatgattaagacctggtcctggctttcagggaactcacagtttatttgcattagtgtttcacaaaatacctaaatcataatgatcacccagaggcactcgtcaaactggattttctggca

SEQ ID NO: 180 - DNA, 120 bp, synthetic construct
  source 1..120: mol_type = other DNA
gtattgatcctctgctttaaaatactcgacatcttggggatctcattagtataccaggccaagtcttaaggtcttccctgtcaatttcatgggtcaaaattctcagttcttttacaggct

SEQ ID NO: 181 - DNA, 120 bp, synthetic construct
  source 1..120: mol_type = other DNA
attatttcctcagcctttttcttatggagcctaatcccaggtctaagttaagtccacctattatatcaccctgtggttctacatagttcatctatctttgctccaatctgtacgctcttc

SEQ ID NO: 182 - DNA, 120 bp, synthetic construct
  source 1..120: mol_type = other DNA
atgttcacgaagaactagtgttagaaaatagccttcttcactgttggcaaggtgcagtgtatatgcagtaaatagaaaataattatttcgctcagcaagataaggggctgggggtggaga

SEQ ID NO: 183 - DNA, 120 bp, synthetic construct
  source 1..120: mol_type = other DNA
tagtagccaaaaataaagcttggcttcaagttgtctttttaatgatcctctattctgtatttaatttacaggctacgctatgctctatgaaaggctgcatgagagcacttgtggcccaac

SEQ ID NO: 184 - DNA, 120 bp, synthetic construct
  source 1..120: mol_type = other DNA
taatttgcaggttattgcgagtgttttgaggaatttgtcttggcgagcagatgtaaatagtaaaaagacgttgcgagaagttggaagtgtgaaagcattgatggaatgtgctttagaagt

SEQ ID NO: 185 - DNA, 120 bp, synthetic construct
  source 1..120: mol_type = other DNA
accaattaagaatcactggtataagtgtacctttgtgctctccaaacctcaatcccctcaaattttgatggtcaacttatcaagaggtgatcagagccaagggtgaggaatcatcaaata

SEQ ID NO: 186 - DNA, 120 bp, synthetic construct
  source 1..120: mol_type = other DNA
tggggttgggagtagaagagaaggggaggattatgagagggtaggaaacttttggggatgatataaatgtttgttatcttgattggactggcagttttatgggtgtatacatgtatgaaa

SEQ ID NO: 187 - DNA, 120 bp, synthetic construct
  source 1..120: mol_type = other DNA
ccagcactctgtactccgttcacttaaagctgttggtcccttactcttgtcttctacatattctctactggatccttcttttttatgtttcagttctctagaagaagcccaatgttttga

SEQ ID NO: 188 - DNA, 120 bp, synthetic construct
  source 1..120: mol_type = other DNA
tacttcccctgccagcagcaactggattctcttctctgggaatgtacaggtctaatcctcctaaagagctgttctcctccatgaaatatttgattgatttgattaaattcagggtgtaat

SEQ ID NO: 189 - DNA, 120 bp, synthetic construct
  source 1..120: mol_type = other DNA
gagccaccacacccagcacatggcaagttttgaccaaatacctttaattgtgtatcagagtgtttctgtggccattacaatttgacagttgactttgataattgtatgttagggagttcc

SEQ ID NO: 190 - DNA, 120 bp, synthetic construct
  source 1..120: mol_type = other DNA
gatgacccatattctgtttcttactaggaatcaaccctcaaaagcgtattgagtgccttatggaatttgtcagcacattgcactgagaataaagctgatatatgtgctgtagatggtgca

SEQ ID NO: 191 - DNA, 120 bp, synthetic construct
  source 1..120: mol_type = other DNA
agctaacagccattcatccaatctgctagagttgtaaaacccaagagagtgcttcagatacagggcacacattttcagaactcggatgctgtattatatcaacaaaaatacaactgtctt

SEQ ID NO: 192 - DNA, 120 bp, synthetic construct
  source 1..120: mol_type = other DNA
cttgccattcagttttaaagcccactaaagctgaatatgctgtcattaatcttcagtttgcctgcgttaaacaagctgttgctctttcatgtccagagttcattatgctgattctcactc

SEQ ID NO: 193 - DNA, 120 bp, synthetic construct
  source 1..120: mol_type = other DNA
cttaaaatctcatagtttgacaatagtcagtaatgcatgtggaactttgtggaatctctcagcaagaaatcctaaagaccaggaagcattatgggacatgggggcagttagcatgctcaa

SEQ ID NO: 194 - DNA, 120 bp, synthetic construct
  source 1..120: mol_type = other DNA
gcaaagacaatcaaggaatcaaagtacaacttatcctgtttatactgagagcactgatgataaacacctcaagttccaaccacattttggacagcaggaatgtgtttctccatacaggtc

SEQ ID NO: 195 - DNA, 120 bp, synthetic construct
  source 1..120: mol_type = other DNA
gaagatgaaataggatgtaatcagacgacacaggaagcagattctgctaataccctgcaaatagcagaaataaaagaaaagattggaactaggtcagctgaagatcctgtgagcgaagtt

SEQ ID NO: 196 - DNA, 120 bp, synthetic construct
  source 1..120: mol_type = other DNA
attcctacagaaggcagaagtacagatgaggctcaaggaggaaaaacctcatctgtaaccatacctgaattggatgacaataaagcagaggaaggtgatattcttgcagaatgcattaat

SEQ ID NO: 197 - DNA, 120 bp, synthetic construct
  source 1..120: mol_type = other DNA
tctctcagttctcttagtattgactctgaagatgacctgttgcaggaatgtataagctccgcaatgccaaaaaagaaaaagccttcaagactcaagggtgataatgaaaaacatagtccc

SEQ ID NO: 198 - DNA, 120 bp, synthetic construct
  source 1..120: mol_type = other DNA
agtactgcttcaactaagtcctcaggttctggaaaaatgtcatatacatctccaggtagacagatgagccaacagaaccttaccaaacaaacaggtttatccaagaatgccagtagtatt

SEQ ID NO: 199 - DNA, 120 bp, synthetic construct
  source 1..120: mol_type = other DNA
gaaaaggcaaatccaaacattaaagattcaaaagataatcaggcaaaacaaaatgtgggtaatggcagtgttcccatgcgtaccgtgggtttggaaaatcgcctgaactcctttattcag

SEQ ID NO: 200 - DNA, 120 bp, synthetic construct
  source 1..120: mol_type = other DNA
ccgatgaacaagtttacccagcctgctttgctttactgcatgaatgaaactgatggttcaatttcagaagtaatgattaacagttatgtggtcacatgatgtgcatagagatagctacag

SEQ ID NO: 201 - DNA, 120 bp, synthetic construct
  source 1..120: mol_type = other DNA
gcctgttaaggaaactttatttgtggtaggtacagttctggggtacatgttaagtgtccccttatacagtggagggaagtcttccttcctgaaggaaaataaactgacacttattaacta

SEQ ID NO: 202 - DNA, 120 bp, synthetic construct
  source 1..120: mol_type = other DNA
cctcttgcttcctctaaaagttttaaactctctgcctgggaaaatacctgatagcccggcatgtggagttacaaagaaagggctgttatccaaaggccggtgaattttgttcactttgat

SEQ ID NO: 203 - DNA, 120 bp, synthetic construct
  source 1..120: mol_type = other DNA
aagcggtagtggaggaagttgccatggctaatttttccatctttccctggatggaagggttggataacgtgtcaagagccccaaaattgtagaagtgagattaaaaatataaatgatagc

SEQ ID NO: 204 - DNA, 120 bp, synthetic construct
  source 1..120: mol_type = other DNA
gacagctatgtgaggatattggtcagtttttatgccagttggtgctctctgctgggtctctagtgttgtgttccttttcttctcatttcctcaggtttttatagcaaataacttaatctc

SEQ ID NO: 205 - DNA, 120 bp, synthetic construct
  source 1..120: mol_type = other DNA
gagttcttactaaatgcttctgtgctttgcactcgtactgcctttaccatttcaccactgaaactactgttttaaaagttatctgtgacctccgaatcaccaaatccaatgacgtttcct

SEQ ID NO: 206 - DNA, 120 bp, synthetic construct
  source 1..120: mol_type = other DNA
ccaaagaaagagagaaggccacttctcctagccttttcccaagaatcctaagctctagtttgattaaacaaacatagatcatgctgccaaacctgtaacaatatctttgtctagagggat

SEQ ID NO: 207 - DNA, 120 bp, synthetic construct
  source 1..120: mol_type = other DNA
ttttctaactacctctctctcaacaacccagtcttgaaatctttcagaaatcttggttcttctcccactgtcaatcacgtgtcagatcttgaatatatcttgtttagttaggcccccaag

SEQ ID NO: 208 - DNA, 120 bp, synthetic construct
  source 1..120: mol_type = other DNA
gcatatctgttggagctactgcaagaaacaggtatgttatatgtaacaactattgaaatagagttgtggttccccttggggatgggagatgtttggaaatactatatggggacatttttg

SEQ ID NO: 209 - DNA, 120 bp, synthetic construct
  source 1..120: mol_type = other DNA
gagttgaggtaccccttggggatgggagatgtttagaaatttaagaacgcctcattccttcatcagttatttttgaatcctgaattatgtacattgtactcctaccactaaagcatgtat

SEQ ID NO: 210 - DNA, 120 bp, synthetic construct
  source 1..120: mol_type = other DNA
ggtccttttaatggctgcaggaaaagattcccttttcatatctgacgtaggttatttgtaccttttccttttccttattagtttcaccagagatcagtagtctttccagagaaccgtatt

SEQ ID NO: 211 - DNA, 120 bp, synthetic construct
  source 1..120: mol_type = other DNA
aggctatgctattagatgcatagaaatgtgtaatagctatatcttctcagtgactcaacattatcaagtttcctcttttattctggtagtacttgcacattaaagtctagtttgagatga

SEQ ID NO: 212 - DNA, 120 bp, synthetic construct
  source 1..120: mol_type = other DNA
tttggctgcttttgagatttttatctttggctttggctttctgttttactaagctgtgattaggcatcggattctttgggctgtgtgaatatatggattggtgtcttatcagtcctggaa

SEQ ID NO: 213 - DNA, 120 bp, synthetic construct
  source 1..120: mol_type = other DNA
taaagttaggttagttcctaggactttgcaaagccctaagggaaggagacagaggatattttgtatgaccggagaagcaaaaaatacttgtatgtgagtagtgccttagggtaggaatta

SEQ ID NO: 214 - DNA, 120 bp, synthetic construct
  source 1..120: mol_type = other DNA
gcgtttgaattctgagattaaatctgttgaatatggaagccaaacagatacattagaaattcttctaggcaaactaagctatggtagtctacataaattggtgttcttctgtgatggagg

SEQ ID NO: 215 - DNA, 120 bp, synthetic construct
  source 1..120: mol_type = other DNA
caggtaacagagggagagaagagtaaggggtttgagagtttgaaagagactggttattgttgcatctaaagagaacagtgtaaagatgaaagtaacggatggtgaaaaatgatgagagca

SEQ ID NO: 216 - DNA, 120 bp, synthetic construct
  source 1..120: mol_type = other DNA
gtacataggatgtgagaggaaaaaaagacccccccattgagaaagcggcacagaaagtggtgtcatctgatttcaactaagataaatcggtgaagatgacatttattgaagagtttgaag

SEQ ID NO: 217 - DNA, 120 bp, synthetic construct
  source 1..120: mol_type = other DNA
gggtaggtaaaaggaggacaggagaaggctagagagagagattctgttcctgaggcctgaagtgcctcaacattattaaaaaaaaagaggactataataagcattatagtagtgaagagc

SEQ ID NO: 218 - DNA, 120 bp, synthetic construct
  source 1..120: mol_type = other DNA
gtccagggtttaatgattagaaatgagaacaaaattcagatgaaaaaaagagcagagtttcaggaagtcagaggatgaggagctatctggggaatagtctgatcttttaacggctccctt

SEQ ID NO: 219 - DNA, 120 bp, synthetic construct
  source 1..120: mol_type = other DNA
aggagtgtgaagagccaaggccataaaggaccttacatatagtgctaatgagcttagacttttactttgtcactgtttgggtgctttgaaaggtagaaaatactaatcttgaagggtctt

SEQ ID NO: 220 - DNA, 120 bp, synthetic construct
  source 1..120: mol_type = other DNA
gcagaccttcttcagaaaaagattaggaaaaagcccttaccgtagtatatgaggtacagactggttcaggatcaagatccttattaatagcctgtgtctatttgaaatgggagagttccc

SEQ ID NO: 221 - DNA, 120 bp, synthetic construct
  source 1..120: mol_type = other DNA
atcttgcagtttatatctaaactgctggtggtaatcagaaattattttcttcgtcgcaatggcctggcttttaattatttcctgagcagtggcagaaagctctgcaatcttctctttccc

SEQ ID NO: 222 - DNA, 120 bp, synthetic construct
  source 1..120: mol_type = other DNA
aaactggaatctggggaagttcagaaaatcaatgagtgagtcaatcagatgcttgactttcatatggaattcttgagtaactcgtaccaagccatcaaacacgttatccttgagtccctg

SEQ ID NO: 223 - DNA, 120 bp, synthetic construct
  source 1..120: mol_type = other DNA
gtcttctcctctggtaatgtcacccttgatttggccctggcagagcttgtaaatgacatgagaggaatttgatgtatctcatctagcaattctattgtggggaagaattttaaagtttta

SEQ ID NO: 224 - DNA, 120 bp, synthetic construct
  source 1..120: mol_type = other DNA
ctcataactctcattgaaaatatacagtatctaggagaggaggcaggatatttcttaccatttagttcatattctaggaactgtacggttgagctgcatgtggaatccaggactgtttca

SEQ ID NO: 225 - DNA, 120 bp, synthetic construct
  source 1..120: mol_type = other DNA
catttagtttcagcccaggaataatgaatttatcagccaaaacttttacagggatggagaatgaatagccattggggtttttggtgtacacaaaggcagttgaaacacgaagatgctgtc

SEQ ID NO: 226 - DNA, 120 bp, synthetic construct
  source 1..120: mol_type = other DNA
agaaatcataggtaatattgcccatggcaggaataaaaatatggcttatggtacacaattccttgaaatctggaagagaaagcttgagatttctagggacatgaaggactggcagctcta

SEQ ID NO: 227 - DNA, 120 bp, synthetic construct
  source 1..120: mol_type = other DNA
tagcagttagaacactgtggcccacatgctgggaatcgacttgtgattgaatttcaagtttagaaaagttgagggagccagattcataaaccaagttttggtttactcttaggtgtttgc

SEQ ID NO: 228 - DNA, 120 bp, synthetic construct
  source 1..120: mol_type = other DNA
ttcagcatctggtcaatggttctgatgatctttactttcatttctacaaagtcaattgtaaaggaaggaatgtggaaggtgttaaggatggtaaattctggtgtggaaaacctggatggg

SEQ ID NO: 229 - DNA, 120 bp, synthetic construct
  source 1..120: mol_type = other DNA
atagtctccttcaacttgtattggtgggccaactctactaatttatccattaaaacctggatttgttggtctacttcatacctctcgattaactcatggactttggctctgaaggcattg

SEQ ID NO: 230 - DNA, 120 bp, synthetic construct
  source 1..120: mol_type = other DNA
aaagcaacaattgtaaattcttggggcttctcaacggcatctctcatctctaaagcatcaatgatattgatgggctcactgagtaaaagtggcactttaattggggagtctagtagagtt

SEQ ID NO: 231 - DNA, 120 bp, synthetic construct
  source 1..120: mol_type = other DNA
gactgtttgtgtggtcaaatttcatttcagcatatgagcccatcatgtcatttgagagcttaagtccttcttgactgaccttgaagttgaaaatgtttttgctgtcgacacccagaatca

SEQ ID NO: 232 - DNA, 120 bp, synthetic construct
  source 1..120: mol_type = other DNA
ctatgttgaaagtctttcaataataaagccccatttttctgggccaattgtgcaatagactcctccatctgtaatgcaaagataaaatctgatagcaaaaggcattcctccaggaagcct

SEQ ID NO: 233 - DNA, 120 bp, synthetic construct
  source 1..120: mol_type = other DNA
caaagctcttctaagggccactccttatcattaccatcccacctaagtcatagccaatttgtctcattcttacagttacatagtcccttgcacctttctcaaagagcatgtcataatttt

SEQ ID NO: 234 - DNA, 120 bp, synthetic construct
  source 1..120: mol_type = other DNA
aaattatgaatcttcgttgccagtcactgatcactgtccatatttataaaaggaatgtctaacatagtcagcctcctagctggtgtcctgaagcttcctttgataccactaggcaaagaa

SEQ ID NO: 235 - DNA, 120 bp, synthetic construct
  source 1..120: mol_type = other DNA
tctgtgattttgaccaaatgatttaacccctctgagctaccatttccttatccatgaaacaggaaaactcacagtgacctcgcagtttattgtgaggaccgagataatttctttaaagca

SEQ ID NO: 236 - DNA, 120 bp, synthetic construct
  source 1..120: mol_type = other DNA
agacgttttgccctcagtagattcatcattaactctgaggattgttccgaggtcaacatcaaaatccggaatttggacttcactggacaaggtcatactctgccgattatatttgaatgt

SEQ ID NO: 237 - DNA, 120 bp, synthetic construct
  source 1..120: mol_type = other DNA
cattttatatccttcgtaaaacaatgtttaccaaacactatttccccagcgtgccctgctcctccagtgctttctatcatgggattttcttcctagtttaattctgtgatatgctatccc

SEQ ID NO: 238 - DNA, 120 bp, synthetic construct
  source 1..120: mol_type = other DNA
tacttatctgatattccaaatattaacttgtttggttgttcactgtaacttccatgaaggcagagactccattgttcactgttctagccccaggtcttagaataggcctgccgcttattg

SEQ ID NO: 239 - DNA, 120 bp, synthetic construct
  source 1..120: mol_type = other DNA
acctccgttttggtggtagagaccaaatgtaatgtgttgctggtgaagaacaaaaatacctgagttattgccaagtcatgaatcaaaatggacatcacaaattctcagggtgcaaatacc

SEQ ID NO: 240 - DNA, 120 bp, synthetic construct
  source 1..120: mol_type = other DNA
agtacatgtaagaaagttcaacattggcctggttttttctaaggatgctttctttgaaatagcacattttcctccaagtattgtttctccaagttgggggtgccacaagaccaagctttg

SEQ ID NO: 241 - DNA, 120 bp, synthetic construct
  source 1..120: mol_type = other DNA
tcctttgcctaaatgactctgacacagtcctcagttatcaggtcaagtacacttgcttcagaatgcattccctgactagcacaggctacatgatataaaatttcatggtactctaatact

SEQ ID NO: 242 - DNA, 120 bp, synthetic construct
  source 1..120: mol_type = other DNA
ttatgtagtaagtctaggctagaattaaaataggtaacccggaatctttcctttctactcctctcctgcttcctcaggacctgaatgatctcaatcaactgtttagcctggcaaaattct

SEQ ID NO: 243 - DNA, 120 bp, synthetic construct
  source 1..120: mol_type = other DNA
ttctttgagcccttcctgatgacctctccaatctgtagacccaacaagggagagcaaataaaagtaagtctttttaaagtcggttttgttaattacaacctcccatacattggagagtaa

SEQ ID NO: 244 - DNA, 120 bp, synthetic construct
  source 1..120: mol_type = other DNA
atttctaaatgttaacatttccatgtgatccaagagtcatcttcagtgaaattcaaggcaaacctccatctctgaagaaagtacaagcatcttttcgggcttgtgcagctgggatcgtaa

SEQ ID NO: 245 - DNA, 120 bp, synthetic construct
  source 1..120: mol_type = other DNA
aatgtgcatacaagtcacatgaggtcttgctaaaatgcgcttctgattcagtagattgtgggtgaagcatgagaagctgtatttctgaccagaccacactttgggtagcaaaaaattcaa

SEQ ID NO: 246 - DNA, 120 bp, synthetic construct
  source 1..120: mol_type = other DNA
ggatactggcccttaccccagcaggtctggttgataaaaaccatagttatcccttcagttagatagtattttgaggacttccatgcttagaaaagaattgtttttgcattgagacccaaa

SEQ ID NO: 247 - DNA, 120 bp, synthetic construct
  source 1..120: mol_type = other DNA
aacctcaaactcttcacacttacctcgatgaggtcagctgaagcaaatccaaaggcagtgagggtagttttcagcatgctttctttaggaaggtagttatttggatcaaatataagattc

SEQ ID NO: 248 - DNA, 120 bp, synthetic construct
  source 1..120: mol_type = other DNA
tttcttaagcacaggtctaatttctctgtaatcgttcttcaaatgctggtattgaatcttcttgccagtgtttcctagagcactatcaagtaagggttcccagaaaaagcctgtggaatg

SEQ ID NO: 249 - DNA, 120 bp, synthetic construct
  source 1..120: mol_type = other DNA
cagtagatgaaatctagagtctcattcccctagtaccttccaaatccttgttaataaactttcactttcagacctcttcttgtggactttaccttgtctttaggctccattttccgcaga

SEQ ID NO: 250 - DNA, 120 bp, synthetic construct
  source 1..120: mol_type = other DNA
ttaattaaagtaaaaagtttctgcacagtaaaacaaataatcaacagggtggtaacctgcagaatgggagaaaatatttgcaaactattcatccaatggggtactaatatccggaatgta

SEQ ID NO: 251 - DNA, 120 bp, synthetic construct
  source 1..120: mol_type = other DNA
caaacaaacaaaaaaattcagaggaaaaaactgctaactaatattgaactgaagttaataatatgcaagctgtaatacttaggggaaagtgtgttgatgtttgcaatttactttgaaatg

SEQ ID NO: 252 - DNA, 120 bp, synthetic construct
  source 1..120: mol_type = other DNA
aaagacatggataaagttatacagaccaccttcagggcacataaaatattgctcatggtgtgtcctctgccaggagagcccttaatcacctcattcactattcaaatctaacttcaaaac

SEQ ID NO: 253 - DNA, 120 bp, synthetic construct
  source 1..120: mol_type = other DNA
aagtgtcaaaggaactctagctttcttcatctcaaccatatctttgtctactggaagctggaaattgtggagtatcagcacaggggaaaagggaaagaaactatcctgtattcaatgcct

SEQ ID NO: 254 - DNA, 120 bp, synthetic construct
  source 1..120: mol_type = other DNA
aatgcctaagtagctttgggaacttcttttcctttatgccattgcaacttgacatcatgaaatgagtttgctttctcactagaggtagccagaacaccagtgtctgtatcacttgttagt

SEQ ID NO: 255 - DNA, 120 bp, synthetic construct
  source 1..120: mol_type = other DNA
gaaagagattggagacgagcattttgatcagtccctgtatcttctgttaaaagcatttaccttcaaggtagaagggagcaggagtcctgtaccactagataaactcagagaaagaagata

SEQ ID NO: 256 - DNA, 120 bp, synthetic construct
  source 1..120: mol_type = other DNA
agtgcattatcctcttctgactgtggcactcatggtcatcagactccctgttttcaaccctaaggacaatgaccaggaacagcgcccagcatgacagtgattgcccaagttattcatgtt

SEQ ID NO: 257 - DNA, 120 bp, synthetic construct
  source 1..120: mol_type = other DNA
tctgtctcacagtgaaacctgaaattcgtaaaagagaccagcaacagatcccattatttttggtgtttaaaatacacacaggatttactgtgtacaccataacccagcaaacacaggtga

SEQ ID NO: 258 - DNA, 120 bp, synthetic construct
  source 1..120: mol_type = other DNA
tacggacacccgagtggttgttccatttgtttctgcacactcatacaatcctctgtaaacatgggtgagtgcaaacagagtcatacaaagattttgccattgtttgttttatacaagtgg

SEQ ID NO: 259 - DNA, 120 bp, synthetic construct
  source 1..120: mol_type = other DNA
cttctgtatttggagaagaccaaggaccaaaaaataaaccactctttcctcctgccaccatacccctctccctcatatacagttaagtcttggagaaaataaagcataggaaagaaagaa

SEQ ID NO: 260 - DNA, 120 bp, synthetic construct
  source 1..120: mol_type = other DNA
agccagtgcctctgggaccccacaccaaagaccaccaagcactagtcttgactagttctttaaataagaattcacttgtttaaacaaagcatctcagttttataatctcaagaagtttaa

SEQ ID NO: 261 - DNA, 120 bp, synthetic construct
  source 1..120: mol_type = other DNA
gccatccttcgtttccacagcaaatgtctccttaatgtcacccaaaaaactggttatatctattagggcctatttagagctttgcatatagctggagtttcaacggattcctacttatta

SEQ ID NO: 262 - DNA, 120 bp, synthetic construct
  source 1..120: mol_type = other DNA
aaatacgtcagccacatagcagaaatagctctcccaaggacagccaattctgggcagagaggggcagtggcatagagaattaaaaatggtaattcaactcaaattattttttaattgact

SEQ ID NO: 263 - DNA, 120 bp, synthetic construct
  source 1..120: mol_type = other DNA
cgatttcttcacaaaggttaaagtcagtatttcctcaccctcacatgcttcgaatcaatgactagtcactgataaacaggacagtgatgtttcttcaaagtgtgcacaggccagcggaga

SEQ ID NO: 264 - DNA, 120 bp, synthetic construct
  source 1..120: mol_type = other DNA
aaatcagcttcctcacacatcaaggtaatctgcaaagggaaactgacagtcagcctaagtggctgcttaaagcatttctttgcacatacgttccttgttttttttttaaaacaaagatgc

SEQ ID NO: 265 - DNA, 120 bp, synthetic construct
  source 1..120: mol_type = other DNA
agaaccttgaaatatgataacggactatgccaccagcatgtctctggaacctatgatcaggcaaggttctaaagtacgtagtctgtgtcaatggagatgtcacaatgtctatttcccttt

SEQ ID NO: 266 - DNA, 120 bp, synthetic construct
  source 1..120: mol_type = other DNA
taaaaatcaacagaattagattctttagataatgatcagcctagtcagaaaacaacattccccaagcaagcataaagagaggacacaattactgacggacagcggaaatgtgctgcgggc

SEQ ID NO: 267 - DNA, 120 bp, synthetic construct
  source 1..120: mol_type = other DNA
gctctgaggccctcactccagctggtcagcaacaacactctattgagaagccaacactccatggagaagggggctttaagcaaaaaagaactctcctcaacttgaagaagagtgtggcaa

SEQ ID NO: 268 - DNA, 120 bp, synthetic construct
  source 1..120: mol_type = other DNA
ctggaaagcaggaacgcaacagcatctgagccattctagaaacaaggctttttttttttctaagcctggtgaaggcctctcatccatcttttaataacattcagtatcaaaacctcaaga

SEQ ID NO: 269 - DNA, 120 bp, synthetic construct
  source 1..120: mol_type = other DNA
acagtccttctctagcagatgatctcgcctccagggcttcatgacatctttagaagaggaatgagagccaggtcccaggacagggtcaggagacaggtatggtcaactttgtgtggcaga

SEQ ID NO: 270 - DNA, 120 bp, synthetic construct
  source 1..120: mol_type = other DNA
gccatttctttccatgatcatttgtgtaactcagagtgaaacttgggcaggattaatgttcaggataaggttctgaaacaccaataattgtgcctagcatgtagcagatgccccataatt

SEQ ID NO: 271 - DNA, 120 bp, synthetic construct
  source 1..120: mol_type = other DNA
tggccaccttgtgcgaaggcagcacctctgcaaagactttgttgatgccaacctaagacaaaaggaaggcaatgcctagtgttggcaaaaggtatcagatagcagcagaaacctcaagtt

SEQ ID NO: 272 - DNA, 120 bp, synthetic construct
  source 1..120: mol_type = other DNA
taacataaaggttagaaaatgtctatctcagcccttaggtcacatacttttttttccattgcaaagactgggaaacggttagagaaccctggaactcctttttttccaggatgcatgcgc

SEQ ID NO: 273 - DNA, 120 bp, synthetic construct
  source 1..120: mol_type = other DNA
tctggtttgatagccgaggggcgggtggatttacaaagacttagaaaaagggaaaaaagagagagaatgtgagagaaagacatatttggctggagcattcaaaaggtgtcatgtatttta

SEQ ID NO: 274 - DNA, 120 bp, synthetic construct
  source 1..120: mol_type = other DNA
gaaaacaggcctgaaattaagagaggaaggcttttgtttgtcttcttttcttttataaaggaggactcttttgcctgatatctgcagaaaactgtatttctgagagagcggaaggaaggc

SEQ ID NO: 275 - DNA, 120 bp, synthetic construct
  source 1..120: mol_type = other DNA
acaatttcactaccaacacttaggaaaaacactagtcacagattttgagtgttttccaccctttattctggtggctggcaagctaccttgagaataaaaaaggccattcttcaaaagcag

SEQ ID NO: 276 - DNA, 120 bp, synthetic construct
  source 1..120: mol_type = other DNA
tgtaattatttctccctcctttggtaaagatattatagctgtaagttgaatgagactattttaaacagcctaaaatccttccctgggtgggtgcctcatgacagtgaacaggttaccgac

SEQ ID NO: 277 - DNA, 120 bp, synthetic construct
  source 1..120: mol_type = other DNA
taaaagttgtcagggcaatattctgtgtgacgcgttctgctgcccctatattcagactgaaattaagagaaaacaaaatagaacctttcctgtggagagaccaaaagaaggcaatgcttc

SEQ ID NO: 278 - DNA, 120 bp, synthetic construct
  source 1..120: mol_type = other DNA
gtccagtaattcctgaagtgtataattttacccatttaaggccagcaggttgctcttctcagaccatgtcccacaagcagggttctcccttacaagcaaacaataattcagctttttgtt

SEQ ID NO: 279 - DNA, 120 bp, synthetic construct
  source 1..120: mol_type = other DNA
atgttgataaagcgttccattatatgactggtggctactctgttgctactgttgttattcccagttatacttgacttcctattctatgtaattaacactgctgtcttgagtggctctcag

SEQ ID NO: 280 - DNA, 120 bp, synthetic construct
  source 1..120: mol_type = other DNA
aagcagactctggagatggaccacacagatccagatcctggtttcctcatacacaaaatggagatgataatgcatagctcataaattgtggcaaggattgaatgaggcaatacacatata

SEQ ID NO: 281 - DNA, 120 bp, synthetic construct
  source 1..120: mol_type = other DNA
taccatgagcccttctctacaatgacttttgtacagcagagagatgacagtatcttaaaggaacatgcagtacctcatttgccagcatcctccctgatattgcagataaaaacaaaagaa

SEQ ID NO: 282 - DNA, 120 bp, synthetic construct
  source 1..120: mol_type = other DNA
cacaaacaccgaaaatgtcacagctgccaactgagaatcacagatgtaatatagcttttattcctcaagcagatatgtttttttgaggggtggcctgtattttcctttctttttctgagg

SEQ ID NO: 283 - DNA, 120 bp, synthetic construct
  source 1..120: mol_type = other DNA
atccactaaaccggtcagccagctgctgaatgggtgcctatgaaaataaaacaccaagaccatgggaaattacaacctatgaagaaataaaacaccacaagcatggataaagattgggat

SEQ ID NO: 284 - DNA, 120 bp, synthetic construct
  source 1..120: mol_type = other DNA
gaaatggacaacaagcaagatagaatcaggtattaaatattaataagtgctgtgatgaaaaaaacaaggataatgtgactggagggcttcttagagtggcagagggaggaggagacatgg

SEQ ID NO: 285 - DNA, 120 bp, synthetic construct
  source 1..120: mol_type = other DNA
cacgtagggtttgtgtgttgcagtgactgtgagttacacattgaaaaaagaaaaaaaatcaaagaaacagacaagggggaaatactggtgagagactgaaatgaggacttaacacaagca

SEQ ID NO: 286 - DNA, 120 bp, synthetic construct
  source 1..120: mol_type = other DNA
tgtggctacttcctgtgattacgtgagatgcttagtatggcacctgtacacagtaagtgcccaatgaatgctggtgatttttattatcacctaattgacattttcatattgattggcctc

SEQ ID NO: 287 - DNA, 120 bp, synthetic construct
  source 1..120: mol_type = other DNA
gaagctactattcctctccaagtgctgagcgataggaaccctcttaattaaaagacagtggtttgtttcatagcacttcatctttaagagtttctgccaggaatctgtttacttcacttg

SEQ ID NO: 288 - DNA, 120 bp, synthetic construct
  source 1..120: mol_type = other DNA
atatttttggggaaaaagtgggggaaggtgaagaagaatacagacaggccgagtctgagcctttaccagtcaaccaagaaaaacactccaaccagcaggtagtctctgggatctagacgt

SEQ ID NO: 289 - DNA, 120 bp, synthetic construct
  source 1..120: mol_type = other DNA
agtcaaaaccaacacagctgccagcggcttggctccctgtctgaacgttttcacttctcagaaactttcatgcaattaatttataagagaagaaaaaaaaaagaagccaaggcatgtgac

SEQ ID NO: 290 - DNA, 120 bp, synthetic construct
  source 1..120: mol_type = other DNA
ccatattattaaatatgcattaagagtcagtgtgtgtaaaggttaagaaaatagactctggatccaccagcctgggttacatcccaattccattactgaatacctgtgtgaccttgggcc

SEQ ID NO: 291 - DNA, 120 bp, synthetic construct
  source 1..120: mol_type = other DNA
ctgtgccactaaagtccgggaattacatttcagactggaaacaaacatcagtcttcccactgaccattttcttttaggttcaatctaatttcttttagggcctgagttccattctcttgt

SEQ ID NO: 292 - DNA, 120 bp, synthetic construct
  source 1..120: mol_type = other DNA
gcatgtgagacctttaaaacccagtgcttacaacacaaatgtcctctaataagagaatggtgaaaagttggggaaaaaaatcacgactcatttgtactgtagacagcacaaggcattcca

SEQ ID NO: 293 - DNA, 120 bp, synthetic construct
  source 1..120: mol_type = other DNA
aattataacttcctgaaagacaaggaccatatctccaccttttaagatagaacactcaagagtggcatgggctcaagggtgatccagttgttgcttccagcaacaaacgtaaattaacct

SEQ ID NO: 294 - DNA, 120 bp, synthetic construct
  source 1..120: mol_type = other DNA
ttctatctttaaacaattatttaaaatagagtccatgagaacagtgatcactggctgtctcaatgaacaccatagtttggaatcgggggtcatggctgacagctgtggtctcatgttagc

SEQ ID NO: 295 - DNA, 120 bp, synthetic construct
  source 1..120: mol_type = other DNA
gggaagcatgaaagccaatttccttgtcattaaaaagagaggggtggggaaaaaggaggaaggtacttggttaaaatatgcattggcagaaagcacttttcagctttggaaattagaaag

SEQ ID NO: 296 - DNA, 120 bp, synthetic construct
  source 1..120: mol_type = other DNA
cttttacaagtaataccagcctaattatattagcaaaaaatggcccagagatgcaagaatggaggacagacattagcaatagtccccaaataaggtcagcatggatgccacaccacactt

SEQ ID NO: 297 - DNA, 120 bp, synthetic construct
  source 1..120: mol_type = other DNA
aaaaaaaaaaaaaaaactctccaaggccgggcacagtggctcacatctgtaatcctagcactttgggaagcccaggcaggtggatcacctaaggtgtcaggagtttgagaccggcctggc

SEQ ID NO: 298 - DNA, 120 bp, synthetic construct
  source 1..120: mol_type = other DNA
aattttttaatgaattacttacctcaataattttgataatatcccgtggaccgataatttccgggtcaaacttaacaagggctttgctggtggcaagggcaacggaggcataagtgatgc

SEQ ID NO: 299 - DNA, 120 bp, synthetic construct
  source 1..120: mol_type = other DNA
agacccaaggaaaaaatgggactgcaaggaccaccaggaaaacttaggagcttatctgttggcaggtgactgccaacagaattttaaaaatcaagtatccaaatatttcaatggtacttc

SEQ ID NO: 300 - DNA, 120 bp, synthetic construct
  source 1..120: mol_type = other DNA
attcacataaaatctgaatatgtgatgacaatgcaactattgatacagcatggtttttttaaaaaaagaacactacagacacagcatgctgccatgccgacgtagaccctgctctgcacg

SEQ ID NO: 301 - DNA, 120 bp, synthetic construct
  source 1..120: mol_type = other DNA
tgggtaaagcagcatcattcaattctctgtgagttcttctaagtctccctttgcttacacaaaaagagctgtacaaaaagtacagaagtgctttcaaacatagcatgttctaggcatcag

SEQ ID NO: 302 - DNA, 120 bp, synthetic construct
  source 1..120: mol_type = other DNA
cacagtcaatataaccgaacaaagaaacacatcttcccagaatcctctagaacagcagttttcaaacactgtttgaaaatgaggctgcacatgaggcttgcttggaaagccttcgacaat

SEQ ID NO: 303 - DNA, 120 bp, synthetic construct
  source 1..120: mol_type = other DNA
attcaagtcaggaacagaaacataggctataggagattataggctaattttatgagcagtcagaccatggataacaagggatctcctattaacacctccatctgctaacagtcactctag

SEQ ID NO: 304 - DNA, 120 bp, synthetic construct
  source 1..120: mol_type = other DNA
gcacagatgtaggtgtaccatctgtagtttgcaccatggaattcccagcactgtggtttccaagagggttagtagaacagctttctaggataaaatgtcagaaaatattcaaattagaag

SEQ ID NO: 305 - DNA, 120 bp, synthetic construct
  source 1..120: mol_type = other DNA
ctgttctattgtgttttccttattgatttttgttttaaagaaactccttcctgaaacttgatacaaaagacaaagcacaaaatggggccaggccactccacatgaatgcccactcccttc

SEQ ID NO: 306 - DNA, 120 bp, synthetic construct
  source 1..120: mol_type = other DNA
gtggtctcattgcctccatggacactgtactgtgacaccacaccagtcttctaaaatataatctgacttcgtgcttcctctgattaaaacccatgatggtggctgagcatagtggctcac

SEQ ID NO: 307 - DNA, 120 bp, synthetic construct
  source 1..120: mol_type = other DNA
tgaaaagcaaaatctagacacttggagattatatttcctctatcttaacaaatttaacatgcaaggaaagtttgcaggattttgttccactgttgacatgggaggcagggagcagggctc

SEQ ID NO: 308 - DNA, 120 bp, synthetic construct
  source 1..120: mol_type = other DNA
gccaatattttcttcaatattcaagacgcaagacttacaatgcattccatctattctcagttggagggtgaccacatggcttccttggtgccccaaggtctcagaattattaaaattctg

SEQ ID NO: 309 - DNA, 120 bp, synthetic construct
  source 1..120: mol_type = other DNA
ctgaaatacaaaccccagaatagtcaacaccttacttctatatctctttctaggggtgtctgtctgattatcttagcagaggttaaatgtgcttaacacccttcaggtacacgctccaaa

SEQ ID NO: 310 - DNA, 120 bp, synthetic construct
  source 1..120: mol_type = other DNA
tacattctgagaaatgagtcatcattgtgacttcatcgttgtgtgaccatcatagagtcacttacacacacctagctgatgtagcctaccaaacacctgagctgtatggtgtagcctgtt

SEQ ID NO: 311 - DNA, 120 bp, synthetic construct
  source 1..120: mol_type = other DNA
actaaagcatcatgactgtatagtaaggatgacatggtataacaatattaacagacaaatgactagccacctcggacacctacctggaaacgtctacgtcaaaagacatttcaggcagat

SEQ ID NO: 312 - DNA, 120 bp, synthetic construct
  source 1..120: mol_type = other DNA
agcatgtgtttgttatctgttgctacatgacaaaccaactttagtacattactagcaacagctcacaatttttcaattcggacagggcttggcagggaaagcttgtctcttctccacata

SEQ ID NO: 313 - DNA, 120 bp, synthetic construct
  source 1..120: mol_type = other DNA
cctcaaccatctagtttgttggaaaaacaaatccctcatgataacccagtttacattttttggtcctcgctccaactacaactttacaaaccccaaaccataacagcagcccttaatttc

SEQ ID NO: 314 - DNA, 120 bp, synthetic construct
  source 1..120: mol_type = other DNA
tgctttgttagaaagtggctgtgatcacaaatcaaaaaatactaactcatgtacaagtgaaggaccactggccactttggaggtctcttgatcactcttggattcccatcaaccttaaat

SEQ ID NO: 315 - DNA, 120 bp, synthetic construct
  source 1..120: mol_type = other DNA
gggggttggtctctaaaacccccactgaggaagaatcaatgtcccatattaacctctatgaacattaagtatacagggggataaacgtaaatatcagtagagaaaattcaggttatcttt

SEQ ID NO: 316 - DNA, 120 bp, synthetic construct
  source 1..120: mol_type = other DNA
cacagggcacatgtatgcttttaattcagttcttcaattaagatgatctttggaggaaaaaactctcctgatgagttttaaaaaacaaacacaggtttagatacaagaaagctccggctg

SEQ ID NO: 317 - DNA, 120 bp, synthetic construct
  source 1..120: mol_type = other DNA
ctggctggcatctggcaggtgcccctcagggacaatgcttccaggaaggaacaggcagcaatctttgctgttctgtagcctctgctggtgatactcaggcaaacagggtctggagtggac

SEQ ID NO: 318 - DNA, 120 bp, synthetic construct
  source 1..120: mol_type = other DNA
agagagaaaggtcaggttacccacaaagggaagctcatcagacttaacagcagatctctctgcagaaaccctacaagccagaagagaataggggccaatattcgacattcttaaagaaaa

SEQ ID NO: 319 - DNA, 120 bp, synthetic construct
  source 1..120: mol_type = other DNA
cataattggaagtgaaacactcctcagcaaatgcaaaagaacagaaataataacaaacagtctctcagatcacagtgcaatcaaattagaactcaggattaagaaactcactcaaaactg

SEQ ID NO: 320 - DNA, 120 bp, synthetic construct
  source 1..120: mol_type = other DNA
tgcaaaaattctcaataaaatactggcaaaccgaatccagcagcacatcaaaaagcttatccaccatgatcaagtcggcttcatccctaggatgcagcaaggctggttcaacacatgcat

SEQ ID NO: 321 - DNA, 120 bp, synthetic construct
  source 1..120: mol_type = other DNA
cctaacttcaaactatactacaaggctatagtaaccaaaacagcatggtactggtaccaaaacagagatatagaccaatggaacagaacatgggcctcagaaataacaccacacatctac

SEQ ID NO: 322 - DNA, 120 bp, synthetic construct
  source 1..120: mol_type = other DNA
ttggaaccaacccaaatgcccattaatgatagactggataaagaaaatgtggcacatatacaccatggaatactatggagccataaaaaaggatgagttcatgttctttgcagggacatg

SEQ ID NO: 323 - DNA, 120 bp, synthetic construct
  source 1..120: mol_type = other DNA
acaaactataagacagggtatcgtctccaaggagcacttcacaatattatcttagaaaacccattcacaatctcgtgctacacagctttataatcaaccgtttcagagaatgtgctgctt

SEQ ID NO: 324 - DNA, 120 bp, synthetic construct
  source 1..120: mol_type = other DNA
atcacaccacttcatttattgtttttcctttattttagaagggatatatctgtgccagccaagtcatcctgatttcaactaggcaaaaataaaaccgaacccaccctggcacaatggctc

SEQ ID NO: 325 - DNA, 120 bp, synthetic construct
  source 1..120: mol_type = other DNA
aacaaacaaaaaaaaacagcagccaagcttggccaaagaagtcaacagagtcatgagtaaggaggcttaagcagttgtttctggaaacaaagggtaattctgtatacagctggaacaact

SEQ ID NO: 326 - DNA, 120 bp, synthetic construct
  source 1..120: mol_type = other DNA
caaggacttgtcatcagacggacctgggattaaatttttcaggaaacctaagctctcactcagctttctcgtctgttaaaggtggactgatgatacctactaaagttgttaaaatgatta

SEQ ID NO: 327 - DNA, 120 bp, synthetic construct
  source 1..120: mol_type = other DNA
agttgcaactgtgctcagatagattactgggttatcacagtcctgtccagaccttcagacaacacatcaaacatatctcagagttggaaattcttctgaaaaagcataattttggcagaa

SEQ ID NO: 328 - DNA, 120 bp, synthetic construct
  source 1..120: mol_type = other DNA
ccttcctttgtatctaactagtaaatgccttcaaaagttgttttttattttcgtctgactaggtcaatgaagaagaccctgtacacaccaccagtctgctcagaaatgctgctaaaaggc

SEQ ID NO: 329 - DNA, 120 bp, synthetic construct
  source 1..120: mol_type = other DNA
atgagcacaacatgtaatcacttgccagagtgcagcagtttccttttggccatgtgcactcctagaaacccagtctagaggcaggagagatatgccacttccttttattaccaaactgct

SEQ ID NO: 330 - DNA, 120 bp, synthetic construct
  source 1..120: mol_type = other DNA
gcaaccaactcctccaaaatgtgtctgggtttgtttcttatctcctaagtgctcagccaaaaaacaaagaacctgcctcaatttccaagaaatgtcattcaaacccattttcatcaaagg

SEQ ID NO: 331 - DNA, 120 bp, synthetic construct
  source 1..120: mol_type = other DNA
gagtttctgaggagagaactcacagaatcatatttgtgatctggaaacagtttgggcagaaacaagaatgaagacccaggagaggagggattacaaggggcagaaaatttaatagtagaa

SEQ ID NO: 332 - DNA, 120 bp, synthetic construct
  source 1..120: mol_type = other DNA
taggtcttcaaggatttccttgcactagattattctgtcttccatatgtacaaatttcacgagccattttccagaagaaaattcatcttctttacctcctattcgccttcccagtctgtg

SEQ ID NO: 333 - DNA, 120 bp, synthetic construct
  source 1..120: mol_type = other DNA
tcagcttattaacaggagacaggcacaaacacacacatacctaagtaagctcactgaaggagtgctcttaaataaactgcacttggctgaacagtcttgagtgaaaaacgattatgatag

SEQ ID NO: 334 - DNA, 120 bp, synthetic construct
  source 1..120: mol_type = other DNA
gacattaacattcagactatatcaccacctatagcctacaattcccaactctatacttacagacccaaatgcctcatcaccatctcctcggtgtttcatatgcatcgcaaacttaacttg

SEQ ID NO: 335 - DNA, 120 bp, synthetic construct
  source 1..120: mol_type = other DNA
cacctccatgaaatctttgctcaaacgtcaacttctcaatgatttcccccaaatgatcccatctaaatttcatacactcccaattccctatcatccttccctgtcttatttttcttgaga

SEQ ID NO: 336 - DNA, 120 bp, synthetic construct
  source 1..120: mol_type = other DNA
tggctccctcctccctcacttactcattcatttatcccttcaagccagggatctaagctcaaatacaggcatctctcagagatatccatgggtttggttctagatcatcacaataaagca

SEQ ID NO: 337 - DNA, 120 bp, synthetic construct
  source 1..120: mol_type = other DNA
gtgtcaccagagcttccgagagaaggtggatagctggagttttacatagtaaaatcttcccattttaagatgttgaaaactggccaaagttctagccaatggaatataaggcaaagttgt

SEQ ID NO: 338 - DNA, 120 bp, synthetic construct
  source 1..120: mol_type = other DNA
gacagcttataactaggcctttctactttaaccaatcaattattctctttgttttgcttccctgaacacttacaaagtctttccctcattccccctagatggagccctgaactatgtagt

SEQ ID NO: 339 - DNA, 120 bp, synthetic construct
  source 1..120: mol_type = other DNA
catcactcttcatctagttcatcatctatcctccacaaagcattagggcacagacacaactgacccacgttctctgccattttataaataaaaacagaatgggcttttctctagttccca

SEQ ID NO: 340 - DNA, 120 bp, synthetic construct
  source 1..120: mol_type = other DNA
tactcaggacagttgagtttggatagcctagtttctctactgagaagacaattccataaagaataagggtagaagacccaacttacagttctttttcaggcttttcagccacctttggtc

SEQ ID NO: 341 - DNA, 120 bp, synthetic construct
  source 1..120: mol_type = other DNA
ttcattaaataatcataccaggtggtatgaccaagtgtcaagtaagttttgacaataaaaaatcgctgagaaagtcaggcaggcctggctaggactcaatcctagatctgcctcttataa

SEQ ID NO: 342 - DNA, 120 bp, synthetic construct
  source 1..120: mol_type = other DNA
aagctctatgtcaggaacttgggacaagaccaagtatatatttcttcttatcacatgactgccgtaggactctcacactttatggtttctcaacctaggctacttctctgaaatctgaat

SEQ ID NO: 343 - DNA, 120 bp, synthetic construct
  source 1..120: mol_type = other DNA
tttttcagtgacgcttcacggggcacaaaagttttcccttaactcctacgctatacatttgtttatccctttttttttcctatctccaactaggatgtaaattcatgagggcaaggtctc

SEQ ID NO: 344 - DNA, 120 bp, synthetic construct
  source 1..120: mol_type = other DNA
aagagagagagaaaaaaagtagcaaacagaacgtccaccactaggaaaccatgaataaactatgatgcgtccaaactgtgcagaggttgcactgaattagacagttagtgaaacaatctc

SEQ ID NO: 345 - DNA, 120 bp, synthetic construct
  source 1..120: mol_type = other DNA
gggaacaaaactcactttccgactggccccttctctggctgtgatctgtctctcctgctcaggcatcgtcccgcacggacaccgaattcttctctgatctggctcagagcaaaaggtcac

SEQ ID NO: 346 - DNA, 120 bp, synthetic construct
  source 1..120: mol_type = other DNA
caccactacgtggaacgacccgcgcgtgccctctgagggccccaaggtgagccgggcccgcggcccgccctggtcggtggcgccacctcgacggcaggcggcggggagtgggctgggccg

SEQ ID NO: 347 - DNA, 120 bp, synthetic construct
  source 1..120: mol_type = other DNA
ctgagactgtcttacagttggccattgccttaccacattgcctcacactggagagaaagagaatgatacgtgtatatttataatggcattcgcttcctgccttgttatggtattaaaata

SEQ ID NO: 348 - DNA, 120 bp, synthetic construct
  source 1..120: mol_type = other DNA
gaggttgcttggattttgatgatgggactgatgaactcaagaaaagagttccctttaccaagtgaatgacttgagacttgtcagcatggcaccaaaacttaaggagaaaactaacattca

SEQ ID NO: 349 - DNA, 120 bp, synthetic construct
  source 1..120: mol_type = other DNA
ttagtaagaaaatggaaagaaaagactagacctttgtattttatttcgtcttctactgccgtcttgcagttgatcttccgccttctcctgaagtagttaggacaactccctgttttcaca

SEQ ID NO: 350 - DNA, 120 bp, synthetic construct
  source 1..120: mol_type = other DNA
aagtagagagacccatttattttgcttaaggttcagcagagcctcctgaattttcttaaagatgagatcgttttgctctttccagatctattgcaagctgttatgcctcttagcagaggc

SEQ ID NO: 351 - DNA, 120 bp, synthetic construct
  source 1..120: mol_type = other DNA
atatatatatgtgccagatatgagtgggtgcttttggtaaccttatctctaaatcctcaccagctctttgaactagaaactatgaagtgtcttacacatgggacagcagatttggagagg

SEQ ID NO: 352 - DNA, 120 bp, synthetic construct
  source 1..120: mol_type = other DNA
gcactgtgaaaagagtctcttaaaaattttttttcgtgtggctggcagcaagatcagacaccgtatacgtgaaggttcttattcactgtcaattcagaaaagcctagaatcgcagagtgc

SEQ ID NO: 353 - DNA, 120 bp, synthetic construct
  source 1..120: mol_type = other DNA
gttttggagacgttagtgacacatggatgttatcacagtgtacagctgtgacaggagtagcagaaaggttagcatctacctggccttaccatcagacaaacctgggttctagagatctta

SEQ ID NO: 354 - DNA, 120 bp, synthetic construct
  source 1..120: mol_type = other DNA
ttccttgactctgtctaaattcagagtttgcttcctgggatggaaatttcagatagtttccatctgtgatttgtgactttggcttgattaaagcaggtggctccgctcttttttttttcc

SEQ ID NO: 355 - DNA, 120 bp, synthetic construct
  source 1..120: mol_type = other DNA
gagttgtctttggctctttgcttccaggctgtgaaactttagataaagtcttaagcagagaaagtgacatccttgctaattagtcctcttaagactctcagataaaggggcttctaattc

SEQ ID NO: 356 - DNA, 120 bp, synthetic construct
  source 1..120: mol_type = other DNA
atattttagtaacaggcatattagataaagcctccagtagcctgtgacttatgatagtttatagagtatgtggttggcacacacctcttgtcttaccaggagtctttggacaaagcctaa

SEQ ID NO: 357 - DNA, 120 bp, synthetic construct
  source 1..120: mol_type = other DNA
tctgtgttcttgcatcttttttctttgttttagaagttttgaagtgttcacttgacccatgtgaaggctcttctggcctaaaaacccagttaatacagtctgtgtcctacttaatacccc

SEQ ID NO: 358 - DNA, 120 bp, synthetic construct
  source 1..120: mol_type = other DNA
ctcttcatctgggacatgaaactttggggtgctctgagttctggcagttctgatatgatttgagtgtagttaggagtagtcgtttttagatttctgtgacattaacttttccttgtttgg

SEQ ID NO: 359 - DNA, 120 bp, synthetic construct
  source 1..120: mol_type = other DNA
attaatatagtgagataagcagtgagagtcaggactgagcccctgggctcttctttcctaattggattttgtataatatgtgttcctgatgtctttagccgagataaggataatgagctc

SEQ ID NO: 360 - DNA, 120 bp, synthetic construct
  source 1..120: mol_type = other DNA
tgctgttgtgaccctaatgatagtggatgggaacattagaatgtggcatcagcattcctggcatagacctcattacgggtgggagtttcatttttcattggaattattcattcatgtaga

SEQ ID NO: 361 - DNA, 120 bp, synthetic construct
  source 1..120: mol_type = other DNA
ctggaaaggttgaatattggctccagcaagcagtctctgctgtcacagtcttgtgtgcagacagagttgtttttccttcctccctctctctcctgtcttattccccttctctttttcaat

SEQ ID NO: 362 - DNA, 120 bp, synthetic construct
  source 1..120: mol_type = other DNA
ttcctttgacactttggagtctgaaaagcataattttgtgcgtatttagggagaaactcacatttattgccagtcttccgggcatccctcttgatatgcccttataaaacctcacaacat

SEQ ID NO: 363 - DNA, 120 bp, synthetic construct
  source 1..120: mol_type = other DNA
atagaaacatcacagaattaatggtctgttctctcaaagtgcagagcagccctcagtatctgtccttacttttgattgattccgcagcagtagagattgtcccctgcaagctcatagatt

SEQ ID NO: 364 - DNA, 120 bp, synthetic construct
  source 1..120: mol_type = other DNA
tcacccagaaaagaaacctgtcttaccagtttggagaattgggacctttcctttgcttaacagatacttttggctttctcctgatgcccctaattcctaaactgttggccaaatagcaac

SEQ ID NO: 365 - DNA, 120 bp, synthetic construct
  source 1..120: mol_type = other DNA
ttccatgctccttattcacactgggctttctattcagaagcacagagatagctgtgcattattttgttcagttcaatgcttatggataaatcttaaccgcttgtggagctatgttgacag

SEQ ID NO: 366 - DNA, 120 bp, synthetic construct
  source 1..120: mol_type = other DNA
atggttttgctgcaagaaatcaaagtgacacataaatgcgagacatcttcacaaatttaggctaacaaagcacttagaagaggaaatgctctcaatttcgaggtgaatagaaggtggccc

SEQ ID NO: 367 - DNA, 120 bp, synthetic construct
  source 1..120: mol_type = other DNA
cagtcttaaccgcacattttgaaaattgaaaattacagataggaggtcttacaatatggattgccctgaggaggtgcacagcagaaggcgtggtcaggatgccaagccaggggagtcatt

SEQ ID NO: 368 - DNA, 120 bp, synthetic construct
  source 1..120: mol_type = other DNA
aagcctactcatccttctcatctcatgatgcctcatatgagtcccttaatgagaactcccaacttgtatgagttcaacatgtcattattcggggcatttcagaagtgttcattttatctc

SEQ ID NO: 369 - DNA, 120 bp, synthetic construct
  source 1..120: mol_type = other DNA
ttcagcaatcctaggagggtcccatttgtagagagagggatattttctccacatcattcccatgtgtttctcatcatcagtgaaatgatatttcatcctgttcttaccattaaccgtgtt

SEQ ID NO: 370 - DNA, 120 bp, synthetic construct
  source 1..120: mol_type = other DNA
aggttagcacagaggcgctgtgtcattgctgaatgttaggctacagcacagctatcctgaagcaaaattgttctggagttaaccatttagagcatcttggctaatcctaaaaaaatacat

SEQ ID NO: 371 - DNA, 120 bp, synthetic construct
  source 1..120: mol_type = other DNA
tctaatctgtactagctacaaacaatttctgtgactttcagtcagttattaaaaatatatttttgtgtccttttttcagcagcccatgacccatcgagaaactgcacctgtttcccagcc

SEQ ID NO: 372 - DNA, 120 bp, synthetic construct
  source 1..120: mol_type = other DNA
ctctgccctgtaaaaatcagactcggaaccgatgtgtgctttagggaattttaagttgcatgcatttcagagactttaagtcagttggtttttattagctgcttggtatgcagtaacttg

SEQ ID NO: 373 - DNA, 120 bp, synthetic construct
  source 1..120: mol_type = other DNA
tctggaatccttaaatgggaaaggcgctcacctccccgccccggagcggcgaggctgatatttgtgatttggctccggacgctgtggggaggaacaggggagaacaaaatgagtttcggg

SEQ ID NO: 374 - DNA, 120 bp, synthetic construct
  source 1..120: mol_type = other DNA
tctgatctaggaatggggtgagtgtatgaaaggccgattgaaatgtagaatgcgtttttagtagaaccagactcagttcttgtttaatttttcctccattttccgtggagcccactttaa

SEQ ID NO: 375 - DNA, 120 bp, synthetic construct
  source 1..120: mol_type = other DNA
taattaaggtgcagaatattataagaacttcaaatggagacctgatctggtgcttgtggtggtgggagaatctgggaaagataccttaaaattgctttgttggaacccaggcagattgtg

SEQ ID NO: 376 - DNA, 120 bp, synthetic construct
  source 1..120: mol_type = other DNA
tccacccccaccccctaactctaaatcaagttctcatcccacctggactaatgttatgattttcttgccttcacttttctcctttatctaatcttatgtatttctgcctaaattaatctg

SEQ ID NO: 377 - DNA, 120 bp, synthetic construct
  source 1..120: mol_type = other DNA
atcttagaattgatgaatagtgtttctctccctaatcaaagctcttggatgtgcctggaaatccccagtagtgttttttgaaaagaacactagttaggggcatagggagatcagatgatc

SEQ ID NO: 378 - DNA, 120 bp, synthetic construct
  source 1..120: mol_type = other DNA
taactcaagttagcttaaaggagggaaaagcttctccccactaacccccatgatattgaaaggtctagaaatagacatggctggacctaagtgctcaaatgatataattaattgaggttg

SEQ ID NO: 379 - DNA, 120 bp, synthetic construct
  source 1..120: mol_type = other DNA
aattatctagttgtagttatgttaagatctacaaaaaggaagtccagggaatgttacaagactgataagggaagctgggctgttcaggatgcgggtactttggaaggctttcctgagaaa

SEQ ID NO: 380 - DNA, 120 bp, synthetic construct
  source 1..120: mol_type = other DNA
ctttcttacctccttttttgagcattaatttttttttctttagcctttgggtaaagtatcaaaatgttgagaagatagactctcaattttgaaggtgagaaatctgtaggagacttggat

SEQ ID NO: 381 - DNA, 120 bp, synthetic construct
  source 1..120: mol_type = other DNA
ctagaaagtttaaaattacacgtcatattggacagtactgcctttgactttcctttccctggttctttgcccatcagaatgctttaaaatctagtataaatccttggccaggtgctgtgg

SEQ ID NO: 382 - DNA, 120 bp, synthetic construct
  source 1..120: mol_type = other DNA
tcacctgtgccccaagattgccactgttgaaagtatagagctagaaaaaattttcttttctgttgccttctttctttttttctgtccccatttcctaaaatggggtcatacgatacatcc

SEQ ID NO: 383 - DNA, 120 bp, synthetic construct
  source 1..120: mol_type = other DNA
gtacacatgcatgctttgtacaaagtaaatgttcagatatttgtatctgttcatggcaaaggcgtccagaatatgctactgcaacataaaaattatttggaaacctggtggctcatgctt

SEQ ID NO: 384 - DNA, 120 bp, synthetic construct
  source 1..120: mol_type = other DNA
ttgttcttttctagttccagttcccctagtaagatggtacacatgccccaaattcggacagcccccttgggtcacatttttctgtgaattattctacatatgtgaatcaaatctgtcatt

SEQ ID NO: 385 - DNA, 120 bp, synthetic construct
  source 1..120: mol_type = other DNA
ctgtgaggactaaatgaatgatgagtgcagttcagtgcttaacactgtgcttgccactgtagtagcttaatgaatgttagtgaagatgagtatttctgagagaaataagcaggacagttc

SEQ ID NO: 386 - DNA, 120 bp, synthetic construct
  source 1..120: mol_type = other DNA
actagcagaagatggaatggagtatctgattacctaggcagtattaattacgcagcaggctggtttatctgtacctatttgagcaaaggataaggaaaattagaaatcccagtgtggatg

SEQ ID NO: 387 - DNA, 120 bp, synthetic construct
  source 1..120: mol_type = other DNA
ttggacaccaaatcccattctctttttctccgtatgaggctgtcacagtactatagatgaccatttgatcttctcagtggcctgtttccaaatgcattctgattctcaatactattttag

SEQ ID NO: 388 - DNA, 120 bp, synthetic construct
  source 1..120: mol_type = other DNA
ggaggaggagaattttaagatgaggatgtgtactaggcacagagttgacttttaacaattaacctctcttttaatatttaaaacgtggtagagattttccacatttaaattttccacagt

SEQ ID NO: 389 - DNA, 120 bp, synthetic construct
  source 1..120: mol_type = other DNA
gtgcaaataagttgagtaaagctaagttcatcctgagcgtctgaacctggaatataaggaacttgaaatttgtaggggtgggggtatctgaatagaaatagaaagttctgaaaatttggc

SEQ ID NO: 390 - DNA, 120 bp, synthetic construct
  source 1..120: mol_type = other DNA
attaaatatacattaagggagcttcagtgatactaaaagagtgtgatgctgttgtaaatttgccattgctttcctttttgtcaatattcaaggattgtcttggaccatgggccaagcctg

SEQ ID NO: 391 - DNA, 120 bp, synthetic construct
  source 1..120: mol_type = other DNA
caacgggtaaaatacttcccgtgaaaggaagaacaatactaagttcatttttagtgttctttttagtgctggagaccccagccaatggactaagagaagctgaagcgaaaaagttgtaaa

SEQ ID NO: 392 - DNA, 120 bp, synthetic construct
  source 1..120: mol_type = other DNA
ctcccactgctctccaactcctgacaccttccattgtctctctttttctatttgccttcttgttcttaaggattcttaaatgttttaagcagcctctgttccccttcttagactaatgtt

SEQ ID NO: 393 - DNA, 120 bp, synthetic construct
  source 1..120: mol_type = other DNA
cttccataatttcagttctaccctgatcatcacttcccactttactggctcatgccttctagtgccaacaattcttttatctcactgagacttagaacccattgaccctattatctttgc

SEQ ID NO: 394 - DNA, 120 bp, synthetic construct
  source 1..120: mol_type = other DNA
ccaggaggcagaggttgcagtgagtcaagatggtgccattgcactccagcctgggtaacaagagcgaaactcaaaaaaaaaaaaaaaattaaattgacaaatgtacgtatttagggggta

SEQ ID NO: 395 - DNA, 120 bp, synthetic construct
  source 1..120: mol_type = other DNA
tttctttatccattcctctgttattagatgtcccgtttgtctaacccatatctaggctgtttgaatagcagtaaacatggggatgcagatgtgccttcaacagaatgatttcctttcctc

SEQ ID NO: 396 - DNA, 120 bp, synthetic construct
  source 1..120: mol_type = other DNA
gagacaggatctccttgtcacccaggccagaatgcagtagtgcgatcctaactcattataaccttgaactcctggcctcaaggtatcctcccaccttggcctcccgaacgctgggattac

SEQ ID NO: 397 - DNA, 120 bp, synthetic construct
  source 1..120: mol_type = other DNA
gagccaccacgcctggctaaggatttataatagatttaaagcattctgatgggcaaagaaccagggaaaggaaagtcaaaggcagtactgtccaatatgacatgtaattttaaactttct

SEQ ID NO: 398 - DNA, 120 bp, synthetic construct
  source 1..120: mol_type = other DNA
gagtgcagtggcgcgatctgggctcactgcaacccccgcctcccaggttcaagtgattcttctgcctcagcctcctaagtagctgggattacaggcatgagccaccacgcctaatttttg

SEQ ID NO: 399 - DNA, 120 bp, synthetic construct
  source 1..120: mol_type = other DNA
gcctgtgctttttgttttgcagccaagaaatcattgccaaattcagtatcatgaagcttctctatgtttccttctagttttatggtttcaggtcttatgtttaggtctttaatcaatttt

SEQ ID NO: 400 - DNA, 120 bp, synthetic construct
  source 1..120: mol_type = other DNA
cctttttgtgttgtttattgttaatgtatagaaatgcaacttatttttgtgtgttgactttgtatcctcctgctttgcttagtttattataatagttctaacagtttttttgtgaaaccc

SEQ ID NO: 401 - DNA, 120 bp, synthetic construct
  source 1..120: mol_type = other DNA
aaatctggctaaggatttgtcaattttattgatcttatttaagatctttttaaatgtaggcatttactgctataaacttccctcttagcacggcttttctgtatcccttaagttttggaa

SEQ ID NO: 402 - DNA, 120 bp, synthetic construct
  source 1..120: mol_type = other DNA
cactaattaccactaagttcaggagagtccttaaaactgcacagcagtagttcctagttcatttattctcccagtgtgacctaaatgatcatttagacctgctccttctcaatccttcaa

SEQ ID NO: 403 - DNA, 120 bp, synthetic construct
  source 1..120: mol_type = other DNA
gacttatgttccacctggatgtctaataggcaaatgaaatgcagctttctctaaagggaacttattcttcctccagtaacttaatgggccatgcttagaatggctctttttgtccaagaa

SEQ ID NO: 404 - DNA, 120 bp, synthetic construct
  source 1..120: mol_type = other DNA
acacagagccaagccatgtcagtcagtatcataaattggttcaaccatagaggaagagaatttgactaaatacatattttagggaaaagggaagtactgtgggctcagcggtttgatctt

SEQ ID NO: 405 - DNA, 120 bp, synthetic construct
  source 1..120: mol_type = other DNA
ccagttctgttttcaaattcctttccaccatggctttttccattattaaaaaaaatggcataactcttcctctgacccttctcttaccatgatgcacttgccttgtagtgggaaaacctc

SEQ ID NO: 406 - DNA, 120 bp, synthetic construct
  source 1..120: mol_type = other DNA
gctgggcacggtggctcacgcctgtaatcctagcactttgggaggccgaggagggcagatcatgaggtcaggagatcgagaccatcctggctaacacagcgaaaccccgtctccactaaa

SEQ ID NO: 407 - DNA, 120 bp, synthetic construct
  source 1..120: mol_type = other DNA
tccaaagaatggaataaagcctcaggggcccccaaagtggtgattccaaatattggttttagtgttaagaaaatgaatggccatagcctttggagaacaaatcctttcatggtttttcag

SEQ ID NO: 408 - DNA, 120 bp, synthetic construct
  source 1..120: mol_type = other DNA
gaaacacacgcacagaaaagtagaaattcactaagtgatgtctgattttagcaataattattcaaagagatacatgaactaatgaagaaaaaaaaaaagccctgtccatctcattaagag

SEQ ID NO: 409 - DNA, 120 bp, synthetic construct
  source 1..120: mol_type = other DNA
actctgttcagtgattcacattctgtttaatagcccactgctttgtttctttctggtaagtcttctgccttaatgcagtcttctctagctactatgtgtccttttttcatcctcctgatc

SEQ ID NO: 410 - DNA, 120 bp, synthetic construct
  source 1..120: mol_type = other DNA
ggccattatcctgctaccacagttggtttttagtcagctacataattttgaactgttaattttatctattttttttttatgacagttgtggttagaggtgaggcttggattggtcctggc

SEQ ID NO: 411 - DNA, 120 bp, synthetic construct
  source 1..120: mol_type = other DNA
atggcttttaagatttttgtcaaaggtgagaacgttcagtacattctttgatacctgcctagcaactatttttaggtttctattcctttccagattttcagattcacatatttcctttat

SEQ ID NO: 412 - DNA, 120 bp, synthetic construct
  source 1..120: mol_type = other DNA
cccttccccatagtagggagggagggaattaggcagttttcctaacagggccccgaagagtaccattttaacttaaatactcttaaaagttgctacttattttttttaaggctttcttta

SEQ ID NO: 413 - DNA, 120 bp, synthetic construct
  source 1..120: mol_type = other DNA
ccatgtcaccgagactgagttactgtattttcttagcagaatattgtcccagtgagctttttccaaaagagaaaaggtacagccaataaaagtttgtggttgggtattgggagttggtgt

SEQ ID NO: 414 - DNA, 120 bp, synthetic construct
  source 1..120: mol_type = other DNA
aaaaaggtccaaaaaggttgagttgtggttccctgtaatgtcaagaaatctgttaatgcatgagacccggaagatgtttgaaagtgactagtgagaattgggttggttgctgtaggatat

SEQ ID NO: 415 - DNA, 120 bp, synthetic construct
  source 1..120: mol_type = other DNA
tcatgtgagtggggaatccgacttgttttattgcatgtgagctgagcactgtgccttgtgtcagtagtcagtggtgttcctttagtccttgttatgttaataaaaaagctttggtttttg

SEQ ID NO: 416 - DNA, 120 bp, synthetic construct
  source 1..120: mol_type = other DNA
aaaattagtggccaacaattaaaaattgggagagttttcaaaagaaaatgcagatttctgactcatcttgaaaaatggtaagatgggcagcacagggcctgtattcccaattgcagccct

SEQ ID NO: 417 - DNA, 120 bp, synthetic construct
  source 1..120: mol_type = other DNA
gtgagaataaaattagtagtgccgctgtgaggaaaataatcttcacgtacttacgtatgatgagaaacttcctaagtgtctagagatggcaagaaactttgtatgttttgcatgacagta

SEQ ID NO: 418 - DNA, 120 bp, synthetic construct
  source 1..120: mol_type = other DNA
attacccctgtttttggttcattcctatcagtaaacaatctctggtagagacttggtaagaaaactcaaccattcccttaaaaaaagtcagcctctaccccttccttagccagatgcttc

SEQ ID NO: 419 - DNA, 120 bp, synthetic construct
  source 1..120: mol_type = other DNA
ggtcatttaaccagttgaggttcaagtagctctcagatcagctggtgcaagcttgagggagaaaaaaaaaaaaccatccttacagatacttctcattcattaacctcgaatgttagcttt

SEQ ID NO: 420 - DNA, 120 bp, synthetic construct
  source 1..120: mol_type = other DNA
tttggtcttttgtgacctatctcttgacagtggaatcacactgtttatatcagtatagctttgggtacattttaatacttggtaaagcaaatttttctgactttttcaaaagtcgaggat

SEQ ID NO: 421 - DNA, 120 bp, synthetic construct
  source 1..120: mol_type = other DNA
atggcagttttatccctgtctctccccacatgtctgtggtttcatatctagatgtctccctttttataaggatggtatagtcatataggattaggccctaccctgataatctcattttaa

SEQ ID NO: 422 - DNA, 120 bp, synthetic construct
  source 1..120: mol_type = other DNA
ggatattctgtgtaatcattcttcagttatcaaattcagggagtttaacattgaggcggcactttgatctgcagtctgtattccagttttgtcagttggcccaactgaggtgtttttttt

SEQ ID NO: 423 - DNA, 120 bp, synthetic construct
  source 1..120: mol_type = other DNA
gcccttatgttttctgaggttcatgttgtcccagattttgatagcgggagtctcttcattccggctctcgtgtcctttggatatggccttgtcattttttcttccctttaaaaaaaaata

SEQ ID NO: 424 - DNA, 120 bp, synthetic construct
  source 1..120: mol_type = other DNA
tgccaccatgcccagtccccatctttcttatgtattccgtttaatctgttttgacagtgcatacgcttctgtaatctctatcaagatactgttctatagttgtggttttttttccttttg

SEQ ID NO: 425 - DNA, 120 bp, synthetic construct
  source 1..120: mol_type = other DNA
ttggaattttgcctcaatttatggtcaaactttgtctggttttcagtttccagaatttccatctctcacctgctacccaaatcaggatggctaccaaacctgcccatcttcagtaatctt

SEQ ID NO: 426 - DNA, 120 bp, synthetic construct
  source 1..120: mol_type = other DNA
ctctgtagtattccttccttcctgcccctggtaaccactatagtactttctgtctaatatgaatttgcctgttcgaggtgcctcatataggtggaattgcatatttgtgcctggcatatt

SEQ ID NO: 427 - DNA, 120 bp, synthetic construct
  source 1..120: mol_type = other DNA
catccttggcaacatttgttattatttttttattatagccactcaggtgggtctgaagtattttgtcgtgttttttatttgtgtttccttgttactgatatcgttcagcatatttccatg

SEQ ID NO: 428 - DNA, 120 bp, synthetic construct
  source 1..120: mol_type = other DNA
atttcctgcaaattggcagctacaccaagaggtgtgatcagattctgatgttcaagggcttttgtctatcttacaggcagtcagtatgctattatattaggagacacacaatgtgtggtt

SEQ ID NO: 429 - DNA, 120 bp, synthetic construct
  source 1..120: mol_type = other DNA
taggaatgggattaccagcatattcctacagtgctgtatgccttttagttctccagggaataggaaagacaagatacatgcttgttctctccttttactggcagtttttaaaaacagact

SEQ ID NO: 430 - DNA, 120 bp, synthetic construct
  source 1..120: mol_type = other DNA
tagtcgacaggtaactatttagcgctcacctctattcctatgtcagtatccctctatctacatgggttctctcaaactcattttctagtagatatctctagaagggcttatgggaacaat

SEQ ID NO: 431 - DNA, 120 bp, synthetic construct
  source 1..120: mol_type = other DNA
gcgtgagctaccatgcctagccccttccccattttcttataataacttctatgagatttggatctgaaaactttgccatgggtcagttttattggaagttcattttcctgaatgtttgga

SEQ ID NO: 432 - DNA, 120 bp, synthetic construct
  source 1..120: mol_type = other DNA
tggaagaagcaaatcagtctttacctctctcaaggctggagatttgcaggcactggttttatctgtaactggagatgagagttcaggccaaacactggtttaaaaatctgtatatgaaat

SEQ ID NO: 433 - DNA, 120 bp, synthetic construct
  source 1..120: mol_type = other DNA
agggtccagttggggttgacgaaccactctttatgggaacagcacccaagatacaccagacactggtggaaaattctaacaggaattaacttgttaagggaaagataataataatatgag

SEQ ID NO: 434 - DNA, 120 bp, synthetic construct
  source 1..120: mol_type = other DNA
aaaaaccctggacctgatggcttcactggtgaattctaccaaacatttaaggaaaaactaataccattcttcaagttttcaaaaacaaaaaaaactggagaaagagaaccctttccaact

SEQ ID NO: 435 - DNA, 120 bp, synthetic construct
  source 1..120: mol_type = other DNA
cagttacatatgctagaatcatagtttgaatgattcagactgtgtacctgtgatctgacatacctggattggagttccatctctgccacccactttatttgactccatagagaaattact

SEQ ID NO: 436 - DNA, 120 bp, synthetic construct
  source 1..120: mol_type = other DNA
ccttggaattaccggtagggtaacagtctccaggcataccatgggttcttcagttatgagtggcatagcttatgtacatgttaactgtgaataataaacgatttttccaacttactgcaa

SEQ ID NO: 437 - DNA, 120 bp, synthetic construct
  source 1..120: mol_type = other DNA
ctctcattatccatctctccatccttgactgtttctagttcgattgtaacactgatcaaatctccttcaagttcaaaacaaaccagcaaaaccttcccttgatactgccattacctcaga

SEQ ID NO: 438 - DNA, 120 bp, synthetic construct
  source 1..120: mol_type = other DNA
cattttgtgctgctcccttgctaaaagtgaataacaatatgatcatgttgttacctctctcttgccaaaacgttgacttgatgataaggggatcactgtgacatcatcattacccacaga

SEQ ID NO: 439 - DNA, 120 bp, synthetic construct
  source 1..120: mol_type = other DNA
atactcacggatctgtacaaccattatcacagtcatgggcaattggttcaggatttgggaagaaaacgtatggcattaggattaaaagtacaatgtttagagtctggctgatctgggttt

SEQ ID NO: 440 - DNA, 120 bp, synthetic construct
  source 1..120: mol_type = other DNA
ttcctaaagaatggtagatgcatttcaaacatcctgacatcttggctgctgaggattctgtatggaaaagcactatgaggtctttaatgcttggttggaaggagaactaaaatgagcagt

SEQ ID NO: 441 - DNA, 120 bp, synthetic construct
  source 1..120: mol_type = other DNA
tgtcccacacctggccttttggaggaaatattgctagacttatttctcctgtttgaaatcactagttggcatattcgtgtacaagggatggattttacatgggtgctcttaattgaaaat

SEQ ID NO: 442 - DNA, 120 bp, synthetic construct
  source 1..120: mol_type = other DNA
tgaatagtgaacacccttgtgtctttcactaactcagtggctcacttgctaacgtttgcctcatttgctttctctgtttataaagacatatatactttttttattcccctgagccatttg

SEQ ID NO: 443 - DNA, 120 bp, synthetic construct
  source 1..120: mol_type = other DNA
tcctttactttaggataagccactaccccacctccatctaccacccggcagtggtcttttatgaaatctcatcatatttttccttttcttatataagcagtcccacaatttgctggttat

SEQ ID NO: 444 - DNA, 120 bp, synthetic construct
  source 1..120: mol_type = other DNA
tttgagatgtgtttacttttttagctccacccatctttgttttttcctaggttgactcattcaggtatgtcatctctcccttctccttaaagtggcctttaaagaaaaaagttgcaggcc

SEQ ID NO: 445 - DNA, 120 bp, synthetic construct
  source 1..120: mol_type = other DNA
aagttgtagaacaagaatgagaatgtgcaagtgtttttatgcttcattgttgggaaggataaattgcaaaagaacatagagctgggtgattttctggggttcagtctgttgcgggtgcca

SEQ ID NO: 446 - DNA, 120 bp, synthetic construct
  source 1..120: mol_type = other DNA
actagaaattgacattggtacattttatgtgtttagtgctgtgctgtttaaacatatatgtagttgatttgtgaaccactgtggcatcaagacacaaatgctgccaccaccaagctctcc

SEQ ID NO: 447 - DNA, 120 bp, synthetic construct
  source 1..120: mol_type = other DNA
ttttagctgtgccagtaggtgtgcagcatagtttggtttgcgtttccctgatgtctagtaatgttgaccatatcttttcatgcgcgtatttgccgtctatatatcctcttcaataaaatg

SEQ ID NO: 448 - DNA, 120 bp, synthetic construct
  source 1..120: mol_type = other DNA
tctcttcaatgccatttgtcattaacttatttagaagtgtattgattacctcctataggccaggcactgtactgtgtatcagacactagggacacaagcactagtaaaatgctatggcta

SEQ ID NO: 449 - DNA, 120 bp, synthetic construct
  source 1..120: mol_type = other DNA
ctgtgactgttttagaacactttatcacctcccacaatcactgccttctacctcctcatctaggcaaccactgcttattttctgtctctaaatttgcttttcctaaacatttatgcgttg

SEQ ID NO: 450 - DNA, 120 bp, synthetic construct
  source 1..120: mol_type = other DNA
gctaacggtgctgccattagccaaaaagtgactgccggtacataaacagattttgtgctggtggttgatggcttttatattgatcttattctcttgatgtgccactggaataaacattta

SEQ ID NO: 451 - DNA, 120 bp, synthetic construct
  source 1..120: mol_type = other DNA
acgcaacccattcatgagttgaccctccctttctagttaggtggttacatgtttattataggggtgcatggtatactatcctaaagtaactgttcatttgagttatttacagctaaaacc

SEQ ID NO: 452 - DNA, 120 bp, synthetic construct
  source 1..120: mol_type = other DNA
tcagtgggtgacattctgaaaccttatagataactgttatgatatccataatcagtgcttgtccttggattctgcatgggtagtgagctttaaagtatcttgttggtttaagatttaacc

SEQ ID NO: 453 - DNA, 120 bp, synthetic construct
  source 1..120: mol_type = other DNA
cctaacctttattcacacaacttccagtgtgtacaatgtgacttgcagagctgtactgtggagcatatcctttcctgtgtcttttgtttacctctgagtaatgaagtcaaatcttacttg

SEQ ID NO: 454 - DNA, 120 bp, synthetic construct
  source 1..120: mol_type = other DNA
accaactctttatttttgccttccctcatttctctgagcgacagcctgagagttttatagtcatatgaggactctgaaaaatgttagagacctggctaagttgtaggtaactagtgcatt

SEQ ID NO: 455 - DNA, 120 bp, synthetic construct
  source 1..120: mol_type = other DNA
gggtaaggtgttaatagcagtactaatatacggtagtttagacctattccacaggcatagaccaaccagtgcaattaattcttcaacctcacaagtcctaatgttctaggtagaagtgtg

SEQ ID NO: 456 - DNA, 120 bp, synthetic construct
  source 1..120: mol_type = other DNA
gctaccagacccagcccaggataagattttttaacatgttagaataatagatctttggaaatagaatttaaagaggtaggagctgccatcatgccagaaataggaggaaagaagccatcc

SEQ ID NO: 457 - DNA, 120 bp, synthetic construct
  source 1..120: mol_type = other DNA
tctctaaaatgatctctctcaacttcctatctcagttgtggcattttctctaagcttcaggcccatattttcatctgtttacagatggctcagcttagtgcctcagacttcccattatct

SEQ ID NO: 458 - DNA, 120 bp, synthetic construct
  source 1..120: mol_type = other DNA
gaatttgaaaatacaggtgaccatgtcagaaaacaaaggtgtattggcatcacctggaaagactacaccaatgttatgagaggagagaattgtcaggcaggcttcacagaagagataata

SEQ ID NO: 459 - DNA, 120 bp, synthetic construct
  source 1..120: mol_type = other DNA
tttgtatggcttgaatttagaataggagagagagtttgagggacaaggctggaaaggaccttatgaagaattttgaatgccatggcaaggagtctagactttattttgtgaaaaatgggc

SEQ ID NO: 460 - DNA, 120 bp, synthetic construct
  source 1..120: mol_type = other DNA
gttgcttctagtcagagtcctgtaactgagaagcacaggtagaacataggaggttatgtgagctgagctttgaaagatgagtaaaatttagatgggtaaaggatatttctggaaaagtgc

SEQ ID NO: 461 - DNA, 120 bp, synthetic construct
  source 1..120: mol_type = other DNA
cgcttaaggaatggggacctgtgaaaaattcattcagtagaattcgatggttccatattaacagataggcattattatggtactgtccattagagaaatattgtacagtaaggcagtaag

SEQ ID NO: 462 - DNA, 120 bp, synthetic construct
  source 1..120: mol_type = other DNA
ctgctgtggtctgccccttttaccagtgagactccctcatgccccattagatctactctgtcactgaccctgcagattggtggctgattatgatcactaaaagaaatatctaacaggtgc

SEQ ID NO: 463 - DNA, 120 bp, synthetic construct
  source 1..120: mol_type = other DNA
aaaaaaattaaccacacacccacttgcttctgtagagaaacctagaactcctggtctcagaaatgtcatccaggtctcgctttcaggctttttgattattctgcaactccagaaaaagag

SEQ ID NO: 464 - DNA, 120 bp, synthetic construct
  source 1..120: mol_type = other DNA
gtatgtgtgtgtataaagattatgtaagcagcctattaataagttcctatataaaattttaaacactatgcaccaaagccttttagtccctcttccccacccttcaccccattgccctcc

SEQ ID NO: 465 - DNA, 120 bp, synthetic construct
  source 1..120: mol_type = other DNA
cagtaggaacacatttgtttattctcccagccttagttagagctgcttgtatattttcaaaagcttcttgcacctctgtctcctgatggtctgtaatttttccagcaacccaggatttaa

SEQ ID NO: 466 - DNA, 120 bp, synthetic construct
  source 1..120: mol_type = other DNA
acactggcttgtcaggattggtcagtgaatcaaataggtagtaagtataagcttctagaactacactctccgatatggttgtcattagccacttgtattttgactactgagtagccacat

SEQ ID NO: 467 - DNA, 120 bp, synthetic construct
  source 1..120: mol_type = other DNA
cagcttgcaagctagccagctctgcccagtgagggtgtaattcactagattggctacttaaacccattttaacatttcctagtctttagaactagtcctttaatttagctcaaagttttg

SEQ ID NO: 468 - DNA, 120 bp, synthetic construct
  source 1..120: mol_type = other DNA
gaatcatgtctcttttatttaccgttggatagtcactacatggcacataaccaagtcatcattaagtcatttttgagtgaacattgctcaagatctgcaaagcagctgtgatgtgtgcgg

SEQ ID NO: 469 - DNA, 120 bp, synthetic construct
  source 1..120: mol_type = other DNA
tcttcacaaagccatatgaggagggtattgttattatgtgcactttacacaagaggaaacttaggcacagagagaaacttatccaagcctctagctaataaatgtgatagaattggggct

SEQ ID NO: 470 - DNA, 120 bp, synthetic construct
  source 1..120: mol_type = other DNA
taaaatagtaatgccaactgtggagatggcactgtaaaccaaaaggcacaatgactaaagaaactactgaaaatttaacaattatctcttcattatccttccttattggggaacctgccc

SEQ ID NO: 471 - DNA, 120 bp, synthetic construct
  source 1..120: mol_type = other DNA
aacacttcctgctccaagatttgctatgatgagttttccaaatgttaacgacctggaaaagctcattgtctttaagacgtatcccttctgagtcttgtgatttggtggtttcttcatcca

SEQ ID NO: 472 - DNA, 120 bp, synthetic construct
  source 1..120: mol_type = other DNA
gagtatttactttctgtaaaggaagttcacatgtggcagctttctcctgagtatctaatttgcaattgcctaactgctcagtgacatccactactgtctgttctttgtgtttggcattag

SEQ ID NO: 473 - DNA, 120 bp, synthetic construct
  source 1..120: mol_type = other DNA
ggcccacgttatcttaagggtgaattcttttaaactgtccatgtcgtaggtatgtccagatttacacatgccattccagagaatagcaaattaaggaaagttcctcagtttattgtgact

SEQ ID NO: 474 - DNA, 120 bp, synthetic construct
  source 1..120: mol_type = other DNA
ttatcccaaaacttaatgacatgaaaccctaatttacaagaattcaggagtagcctagctggatgtggttctaatctttatgtttcacaaggttgcagtcaggaagtcagcaggggctac

SEQ ID NO: 475 - DNA, 120 bp, synthetic construct
  source 1..120: mol_type = other DNA
aaacctctcagcaaactaggaagggaacttccttaatgtgataaagactttcattaaatttataattaatttaggaacagttgacataccttatattgaagctttctgtacgtaatatga

SEQ ID NO: 476 - DNA, 120 bp, synthetic construct
  source 1..120: mol_type = other DNA
cagttccaacctgtattgttcaaaaaaaccaaaacctcccttagacctagaatcccacttctgcaaatccagcctacagttttatcagcccaaacaacaacaaaagcatctcttcaagtt

SEQ ID NO: 477 - DNA, 120 bp, synthetic construct
  source 1..120: mol_type = other DNA
tttctttgaaataaaaggcaagttgatgtgtgtttaaactagaaatcccaggaaaaaatcagaaaggtacctgggcttaaagaaaaatgctaaacggggctgggcgccatgactcacacc

SEQ ID NO: 478 - DNA, 120 bp, synthetic construct
  source 1..120: mol_type = other DNA
tttcttaagcccttttaatttatatctcaaacttgaggatatccatgaaaacagcggaaactttttcctcaccggatcttgacacaagtcagggatggaagtgagcaaaaggaagtggtg

SEQ ID NO: 479 - DNA, 120 bp, synthetic construct
  source 1..120: mol_type = other DNA
tgcaggtacaaccagtggatttgatgacaggaaatggaatgcaagaaggaaagagggagttgtcaagaatgacttgagattttaggcctggttacatcagtgtagcgatattctaaaaat

SEQ ID NO: 480 - DNA, 120 bp, synthetic construct
  source 1..120: mol_type = other DNA
ggttgtaacagaaaaattgactctctctgacctaaaaaatggaatttattggctcttaagagttccaaagtaattgaggcttcagacaaggttgcttgagtggctcatcgatgtctcccg

SEQ ID NO: 481 - DNA, 120 bp, synthetic construct
  source 1..120: mol_type = other DNA
gtcctccaaggacaactccgaggccttgacttactcactgctgaaaaaggaggactctgtatattcttaaatgaagagtgttgtttttacctaaatcaatctggcctagtgtatgacaac

SEQ ID NO: 482 - DNA, 120 bp, synthetic construct
  source 1..120: mol_type = other DNA
cacagacgcacatgaaactaggcaagaatcagtgtttctctacaaattgagttgacaaaaagaaattatcttcccctgcccccacaaaaaaagaaccagtatttctcaacaaggagagta

SEQ ID NO: 483 - DNA, 120 bp, synthetic construct
  source 1..120: mol_type = other DNA
tcattactttcctgccagcgccttaacatgcagtaacaagtggaatttgggctttgtcagcagcaaacctgccacttactggttgtgttaagttgggcaagtttctttcttttttttttt

SEQ ID NO: 484 - DNA, 120 bp, synthetic construct
  source 1..120: mol_type = other DNA
gaaacagaagagtgacacctaggtctcttaaatagacagctgacagacattacgaatctcttcgaagtacagatatgccaaagattgctgtgtagtacaatctagttgtaattgtgagac

SEQ ID NO: 485 - DNA, 120 bp, synthetic construct
  source 1..120: mol_type = other DNA
ttttcttcagggtttatgtttagatttgcgggatattgttttctacactgatgtaaataactgcgagtggtgttgctccagttgtacaagtgtgtattcctctaaggattgatggggagg

SEQ ID NO: 486 - DNA, 120 bp, synthetic construct
  source 1..120: mol_type = other DNA
ttttgctatgtgattgtagaaacagttaatatgagacaaaggagaagtgctcagttattaataattacatctgtttgttgaaatgtttactgagatgtaatattactaactcttttgagt

SEQ ID NO: 487 - DNA, 120 bp, synthetic construct
  source 1..120: mol_type = other DNA
ttgatctcttcactcctgtcaaaatcactcattcccatttcaataactgttcatgccacagatgtgggaatcttctttgacgcctcactttcccttaccctacatttaatccattgctaa

SEQ ID NO: 488 - DNA, 120 bp, synthetic construct
  source 1..120: mol_type = other DNA
cacttaataaacatttagggaataaattaataattcaacggcaagaacactgtttccataggactccagcattggaagggataacgtagattatttagtctagggccaggcggtggtggc

SEQ ID NO: 489 - DNA, 120 bp, synthetic construct
  source 1..120: mol_type = other DNA
tttcttgcagattgaattgttatggatagcacctgttagtgacttcctttgccaggttggcaagtgtgttgtaaacatggatgagaggaggaaacttctatttagcacctactatgtacc

SEQ ID NO: 490 - DNA, 120 bp, synthetic construct
  source 1..120: mol_type = other DNA
attaaaaaaaaaaaaaaagatgttgttggtgaataagtgagtaaattaataagtgaaaatttggggaggggtggagacctagcaagggaggcaggaccaaagccagggtttctggcatgg

SEQ ID NO: 491 - DNA, 120 bp, synthetic construct
  source 1..120: mol_type = other DNA
ggagagattatgtttcatgtcatccatattagaagttcagtttcatcttaataaagtcaaatttgcaatattttaggaaataatttctttaagatactgcttttttccctccgctcccct

SEQ ID NO: 492 - DNA, 120 bp, synthetic construct
  source 1..120: mol_type = other DNA
cagccagaaaggactattgagattgtttaatatacttcccttgttgtacatatggctaatctgaggtcaggagaggttgcagcctattaactaaattatttgaagtttgaaattatagtg

SEQ ID NO: 493 - DNA, 120 bp, synthetic construct
  source 1..120: mol_type = other DNA
ctttcaactcatccctgtttgaatagttaggcccagcctactagggcagcttttaggaaagaagcaaagatgaaacacgtgccaaataattttttaacttggctgtgatggaaacatttt

SEQ ID NO: 494 - DNA, 120 bp, synthetic construct
  source 1..120: mol_type = other DNA
ccatgctaagaatacagagccttcagcaaaagccacttttacttgtgaaacaccaaattatttagtacaatacctttacttcaatatctgttacatgccttgttgatcagcatcaaccaa

SEQ ID NO: 495 - DNA, 120 bp, synthetic construct
  source 1..120: mol_type = other DNA
taggtggtagatgtttgctgtacattcagttattgagtagtgtcaaggctgacatgtctgtaattttcttgacatttcccttgtggttcccaagtggttactattatctgcatttgaggc

SEQ ID NO: 496 - DNA, 120 bp, synthetic construct
  source 1..120: mol_type = other DNA
tgttgccagcaagggaaggaggagaagaataagagtatctgttgctgggtaccacatttgttgacctgacatcatacatatgctaaaatgctcatgttgctatgaaattttcagttcctt

SEQ ID NO: 497 - DNA, 120 bp, synthetic construct
  source 1..120: mol_type = other DNA
gtatttattcatctttattgtctttctccgtcgaagactgtaagctttaatagatatgggactgtgttttgtttactcttctagtcacccagggcttaaaacagtggctaccaccgtgta

SEQ ID NO: 498 - DNA, 120 bp, synthetic construct
  source 1..120: mol_type = other DNA
atacattattttatactatgccgattgaattagtgaatctagaccttaaaaacagagataagcaggcatttggttccctcctgcccacaacatacagagcagctgcatttcagcgctcaa

SEQ ID NO: 499 - DNA, 120 bp, synthetic construct
  source 1..120: mol_type = other DNA
atagaaaaaggacaagaagcatatacatcaaacggataatggtggttatgtttaaggagtgggaaggggattagatgggcccaaagaggactttttggtttacttgtggggctcaatttt

SEQ ID NO: 500 - DNA, 120 bp, synthetic construct
  source 1..120: mol_type = other DNA
tatcaactgatgaccaaggctgtttcctctctacccccatgcacttctccctcacccacgtcacccttggattatcgtgggtaattttgaaataatatttcagttaagtataagacacct

SEQ ID NO: 501 - DNA, 120 bp, synthetic construct
  source 1..120: mol_type = other DNA
caccgcgcctggccaagcatatgatttttaatgcaataactatattcatgtttctagaagcttttttttgccattcagtgacattatggatgacactgcatgtcagtatgtgtcggacat

SEQ ID NO: 502 - DNA, 120 bp, synthetic construct
  source 1..120: mol_type = other DNA
cctggtttctatttaattaatgatgcagactgttgttgcagaattcattaggctaccattgctgattatctcatatgtatagtgcatcagtagcccattggtctcaccaaccgtttgcca

SEQ ID NO: 503 - DNA, 120 bp, synthetic construct
  source 1..120: mol_type = other DNA
ccttggtgacaacagcggagttggagaaaaatgaaaacaattgacatacattttggaggttgagccaaaagactttggtaagaccaggtttgaggcaaatcaagagttcatttaagacaa

SEQ ID NO: 504 - DNA, 120 bp, synthetic construct
  source 1..120: mol_type = other DNA
ctacctataacctcttgatttgaattaggcaggaattattatccccattttctatagatagctgaggttcagagagtaacttatctgtgcccgtaactgcgacttgaacccttcacttct

SEQ ID NO: 505 - DNA, 120 bp, synthetic construct
  source 1..120: mol_type = other DNA
cagatccaacggaagccttgacattatattacggaatttatttctgaaaggagagtggtgtggggggcgcggggatgagtaatatatgtatgtacacaaacttccagctttttttttttt

SEQ ID NO: 506 - DNA, 120 bp, synthetic construct
  source 1..120: mol_type = other DNA
gattggtccccatgctctcatgatttccttacttaagcaattaaaggccaaagcaagatgcttagtaactccttttccacatagaggcacaaataaaggaaagctggtcacaagttttga

SEQ ID NO: 507 - DNA, 120 bp, synthetic construct
  source 1..120: mol_type = other DNA
cttagcaccagaggataccttgccttttttaaagtgctattgctcagggcactgtccagatgatgctattaataacacatgcatgtaagtattttatgcagcccttcttaagagttagga

SEQ ID NO: 508 - DNA, 120 bp, synthetic construct
  source 1..120: mol_type = other DNA
acttcttgtctgtagtacctgcctgatgtaatgggctgtctgttagtagcttagtaacccagagtaaaactgaatcatccattttaacagaattctgccccacacttaacattttctcct

SEQ ID NO: 509 - DNA, 120 bp, synthetic construct
  source 1..120: mol_type = other DNA
agcatcgatttcccccaggagaaacatgcctggtgtacacatcgctgtatgttcacatcagtaaatatattggaggaatacctactgtctagattctgtcctgtattcatatgtagaatt

SEQ ID NO: 510 - DNA, 120 bp, synthetic construct
  source 1..120: mol_type = other DNA
taatagtttatgagcatcctgatggctctgggttataaacctgatctcttcaaaattctgcatagtgattttgtcccaggagatccttccagtgtttctgaaaaccagctccagatagaa

SEQ ID NO: 511 - DNA, 120 bp, synthetic construct
  source 1..120: mol_type = other DNA
cacacatactatacattttttaatcacttaaaaaattgaagaaagagctatggttagggtactgagcccagcagtaataaccagtgttcaacaggcccctagtgtaggcctgtcctaagc

SEQ ID NO: 512 - DNA, 120 bp, synthetic construct
  source 1..120: mol_type = other DNA
gaaggcctgaggtgtaaaacttcaaggttccaaacggtgttgtaattcgaagtaaaggcatcagtgtaggctatgtcgggatatcaaataagtgtttacatgacagatggttttcaattg

SEQ ID NO: 513 - DNA, 120 bp, synthetic construct
  source 1..120: mol_type = other DNA
gtggacagttatatattactttaggacgtaattatcatgggagatattgaaaggaaataagagttcaaggagaaataagagttctagtgtaaaatttctcattgctaaaagaagcatttg

SEQ ID NO: 514 - DNA, 120 bp, synthetic construct
  source 1..120: mol_type = other DNA
aaattcataatctcgacaaacccaatttttgcctacccagatacatagttaacctgagtaagacagacgtgagatgaggcaggtgttgcttattcttagtgaagccacaatgggtcttta

SEQ ID NO: 515 - DNA, 120 bp, synthetic construct
  source 1..120: mol_type = other DNA
cacctgtctttcagccatctctcttacaagggctttcatcttcctgggatataattcacctaggttagaatataggaactcataaggaatacaaacgcatcgtaagatctcttcgtacat

SEQ ID NO: 516 - DNA, 120 bp, synthetic construct
  source 1..120: mol_type = other DNA
ccagccttttctttggactacgacaccctccactttttagtctgatcttaaatctcatccacatctcagtaccacagtgagattatatgtaccagaccagtttatgattgtaattaccta

SEQ ID NO: 517 - DNA, 120 bp, synthetic construct
  source 1..120: mol_type = other DNA
tgtcaggtccgttttttgatggcagcattcgatggctggttttgctcatttctatggctgtctgcataattgctatgatcatcttctccagctgcttttgttacaagtaagaagatattt

SEQ ID NO: 518 - DNA, 120 bp, synthetic construct
  source 1..120: mol_type = other DNA
tttaagccactcagtttgggagtgatttgctaacacagtattggataatccagtgtccgactttctgaaaattgactttcaagcagtcttcttggtgttattgtcaccctcaactttact

SEQ ID NO: 519 - DNA, 120 bp, synthetic construct
  source 1..120: mol_type = other DNA
tgtttcttaaggaaatctgttcagcccaagagataaaacctaaaaatactgctgttagggcccagtgaaatggtccaggcagattatcttacagtgaagcttgtaatcagtaaaccctac

SEQ ID NO: 520 - DNA, 120 bp, synthetic construct
  source 1..120: mol_type = other DNA
aagatgagtgaacatgaagacataggaatgaatagagaatagtgagctgtgggacaacttcagatggcctaatatagatataattggagttcccagaagagaggagggacgaaaaacata

SEQ ID NO: 521 - DNA, 120 bp, synthetic construct
  source 1..120: mol_type = other DNA
aatgttaaatgaaacaagaaggaaaaaaggcagagtatctacagaggcacaaagttaaggatgacagcagaccttctgttggaaacagtgcagtcaagaagatagcgaaccaacatcttt

SEQ ID NO: 522 - DNA, 120 bp, synthetic construct
  source 1..120: mol_type = other DNA
acgccagttcctggttgtttcctctggcatcttcttttgtagctcctttaatccttcagactgcttagatcctatgatctgcccccataacacttactaattttatcttgcattttttta

SEQ ID NO: 523 - DNA, 120 bp, synthetic construct
  source 1..120: mol_type = other DNA
cactttcagcactctccatgtatttaattccaagttttaggtccaagttttcatttgataccatattccttctgcctgaagaatttctttaacctcttggagtgcaggtctgctggctgt

SEQ ID NO: 524 - DNA, 120 bp, synthetic construct
  source 1..120: mol_type = other DNA
gtctgacacttggcctcttgattgcctgccctcttggcagtgagtgattattccttgctttttaatgggtctcataagtttatttggatgttgtacatcatgttaagaatagcagagatt

SEQ ID NO: 525 - DNA, 120 bp, synthetic construct
  source 1..120: mol_type = other DNA
catcagttttaaaaagaacaacagacattgaaataaagacatactcctgaaaatgggcatacctcctcttaggctgttgataggcaggaggtgttcagtctagtacgagtcgatttgggt

SEQ ID NO: 526 - DNA, 120 bp, synthetic construct
  source 1..120: mol_type = other DNA
aactgtaaggaggatgtgaggatggaagtatttctgttttgggaagccgcagggtgttaaatgatcagttaaattgtcatattccccagtgtaaggtcaatagttaaagcctaagactga

SEQ ID NO: 527 - DNA, 120 bp, synthetic construct
  source 1..120: mol_type = other DNA
agaagcaagatgcagaacggcatcagtgtctctccagattaccagagaaaccagaagtagttttgtttctaaggaaacagggaaataattctcttctaaggaagtgaacttgatagctta

SEQ ID NO: 528 - DNA, 120 bp, synthetic construct
  source 1..120: mol_type = other DNA
tgctgtgataatcatggactgagaagattgttgaaacacaattgtcaacatttggtatacagattatataatgaacgcctacaaatcaatgaggagaagagttcagggaacacttcaatt

SEQ ID NO: 529 - DNA, 120 bp, synthetic construct
  source 1..120: mol_type = other DNA
accagtcacaaagttctggtagtgggtctggactacctttattggtaagttaaacgttcctatagacatgaatggtgtgttgatttagaatgtgtcctcatgatggtggacagtataatt

SEQ ID NO: 530 - DNA, 120 bp, synthetic construct
  source 1..120: mol_type = other DNA
cgtagaaaatcccaagaatggtacaataaaactactgcagccagtaaatgactttatcaggttgcagaatacagagtcattgtacaaataccattgaatttataggctctagcaacaaac

SEQ ID NO: 531 - DNA, 120 bp, synthetic construct
  source 1..120: mol_type = other DNA
caaaaagatgcccaagtaattcaattggaaaaaggcagtccatttaacagatggtgcaggaaatatcaggaatccatttaccaagaagttaatctcagtccttacctcctcactctatac

SEQ ID NO: 532 - DNA, 120 bp, synthetic construct
  source 1..120: mol_type = other DNA
ccaccacgcctggccaaaaagtgagaatttttttacgttattaaaatattctgtatcttaattgtggtattggtgattacatgatatagatttgtccaaggcttgttgaacttttctcaa

SEQ ID NO: 533 - DNA, 120 bp, synthetic construct
  source 1..120: mol_type = other DNA
aaaagttgagataagtcaaacgaggtttgtgggtgggtggtcaaagcaaataatgggaccaggccagatcaggcagggtcttatagatgggatttttaagatctttaactgttatttgga

SEQ ID NO: 534 - DNA, 120 bp, synthetic construct
  source 1..120: mol_type = other DNA
ggtgggtacacactgattcagtcaatttcatttttgacaaggctagtgaggtacaggtggaagcctccatatgtgctttgaaaatgtgtgagttcaactatatacatttggctaaaggaa

SEQ ID NO: 535 - DNA, 120 bp, synthetic construct
  source 1..120: mol_type = other DNA
tcaacgagccagactgaaaaggcagctgtgatgagtcactgatgggcaaatgggagttggcttaattaggagctaactcttagttgaacattcttaattttataaaagtgtccacttttt

SEQ ID NO: 536 - DNA, 120 bp, synthetic construct
  source 1..120: mol_type = other DNA
gtttttctcagtatccagaatgagcattacttctccctagcctatctctgatgataactaaccttttaaactcatcaactggacaggtttcatagcggcagacattaaaggtacaggttc

SEQ ID NO: 537 - DNA, 120 bp, synthetic construct
  source 1..120: mol_type = other DNA
atgatggattcctagagaagggcctgctgaggcagtgagtttatacatattaaactatggtatgttgcatattatttctttcagcagtgtgcctcagtttacacacccgtaagcagtaga

SEQ ID NO: 538 - DNA, 120 bp, synthetic construct
  source 1..120: mol_type = other DNA
tggattaagagtgctgccccaaccctgctgaggatgtcatgtagtatgtagcatgtatttaaagaaaaatctgaaaaatgctaaattccacaatgcatctggccccaaggagaaaaagaa

SEQ ID NO: 539 - DNA, 120 bp, synthetic construct
  source 1..120: mol_type = other DNA
ttactaactgtagtcctccccgttgtgctataaaataccaaatacttattcattcttctattttgtctctacttattaaacatccccccccatctgctgctacccttcccaacctctggt

SEQ ID NO: 540 - DNA, 120 bp, synthetic construct
  source 1..120: mol_type = other DNA
tgccctttgtcgatggactctatcacagttgtgatgacatccctggtggaggtagaggaaatagttggacataaataagagaaaaacatacatctactattaagagtgaatcatagtgtc

SEQ ID NO: 541 - DNA, 120 bp, synthetic construct
  source 1..120: mol_type = other DNA
gatactgcttattttatgatagtttgtcctgtgtccttagtgatgtgtgtgtgtctccatgcacatgcacgccgggattcctctgctgccatttgaattagaagaaaataatttatatgc

SEQ ID NO: 542 - DNA, 120 bp, synthetic construct
  source 1..120: mol_type = other DNA
ttccctaacttgtgaagacaatgaaaaatcaggcagaaatatttagtatctagtcagtatctgtagctacactgtataactgttcttcaataaaatggttcatattttatagatgccttg

SEQ ID NO: 543 - DNA, 120 bp, synthetic construct
  source 1..120: mol_type = other DNA
cctgcctcggcctcccaaagttcatttgtcatcttaataaaaatataaagacaggcaaagtttattggaaatgttcaaatggtgtgtggaagcaaaaaattacagccagtatatgagacc

SEQ ID NO: 544 - DNA, 120 bp, synthetic construct
  source 1..120: mol_type = other DNA
ggtgtgttcctaagaaccaaaatccagcacagcatcctgtgaagccacgtgtaatgatggtcccataaggaaagtatgtgaatatggctcttgtaaaggattaactattgtaattttagc

SEQ ID NO: 545 - DNA, 120 bp, synthetic construct
  source 1..120: mol_type = other DNA
tgagatttttgtaatgattaagttagtgtatatacatatgttcctgagatgtacacttcaactaccagaaacccagtatggagcacaggtaggtacacgcttgccctgtggagatagaga

SEQ ID NO: 546 - DNA, 120 bp, synthetic construct
  source 1..120: mol_type = other DNA
gaaaaactaaggttcttggaaaacattgccatattgctactcacaaagcttttcattttcattcctgctagcagttcatgagcttagagcgatgggatgcatttacctggccttaagatg

SEQ ID NO: 547 - DNA, 120 bp, synthetic construct
  source 1..120: mol_type = other DNA
cacctcgatgctgggatccagatggcggcttatttcaagtgcagtggcacatacaaaaaatatttttggaagggagcaaggactagggctgaaaggttcattcataatctttttttcttt

SEQ ID NO: 548 - DNA, 120 bp, synthetic construct
  source 1..120: mol_type = other DNA
ttagaatccagatgatgacatctgttgctctactgtatgactgaaatgcaggtcagtgttgaaaaacataaaaaattggaagtctccactgaaagacctacactgctgtgggagggattt

SEQ ID NO: 549 - DNA, 120 bp, synthetic construct
  source 1..120: mol_type = other DNA
cacccagattcataaactgctaacattgcacaattgctttgtcattctgtgtgtgtgtgtacaggaatcacagagactcatcttgtaatgtttgtaatgtccatgtatcgtgtatgcaca

SEQ ID NO: 550 - DNA, 120 bp, synthetic construct
  source 1..120: mol_type = other DNA
gaagctgtatggtttcagcaacagggagcaaaggaaaaaaatcacctcaaagaaagcaacagcttccttcctggtgggatctgtcattttatagatatgaaatattcatgccagaggtct

SEQ ID NO: 551 - DNA, 120 bp, synthetic construct
  source 1..120: mol_type = other DNA
ataattttgtgctcatggcagatttccaagggagacttcaagcagaaaatctttaagggacccttgcatagccagaagtccttttcaggctgatgtacataaaatatttagtagccagga

SEQ ID NO: 552 - DNA, 120 bp, synthetic construct
  source 1..120: mol_type = other DNA
actcctggtgacagtgaaagcccacagcctctggcaactgtattaacatgaacttcaatctgttaaaggaaagccaccaggaaaacagcactgtaatttaacgatgtggaaaaatgtatg

SEQ ID NO: 553 - DNA, 120 bp, synthetic construct
  source 1..120: mol_type = other DNA
ttcattcaacaaatatttaaaatgtgccaagaactgtgctactcaagcaccaggtaatgagtgataaaccaaacccatgcaaaaggaccccatatagcacaggtacatgcaggcacctta

SEQ ID NO: 554 - DNA, 120 bp, synthetic construct
  source 1..120: mol_type = other DNA
catatgggaaaaagagttagagggaaaaagtcttccctcagtatatttaatatgtgcagttctcaaatccttacccatcccttacagatggagtcttttggcacaggtatgtgggcagag

SEQ ID NO: 555 - DNA, 120 bp, synthetic construct
  source 1..120: mol_type = other DNA
agataattcatccagtcaaaaaaatacatgttatcctggttagagactcagcagggaaaggctacatgctgagctggaatccatatactcaggggaataaaaatcagaagagactgtgga

SEQ ID NO: 556 - DNA, 120 bp, synthetic construct
  source 1..120: mol_type = other DNA
tttacctatccaaagatattttctcactaacatgttggcactaacagcagctcaacgccatctgaacacataacatactgaatcctaactattaaccaccttcatgctcttgagaagggg

SEQ ID NO: 557 - DNA, 120 bp, synthetic construct
  source 1..120: mol_type = other DNA
tttaataagaggcttggatggctagaaactcaaagttattggctgaagtttgatgtttatccagacttggtacctcaagtactcactatgaccccatcaacagaggggtctatgttgatt

SEQ ID NO: 558 - DNA, 120 bp, synthetic construct
  source 1..120: mol_type = other DNA
tgcaataaaaagaaaattgccaaggcctaaaattcacctggcttcaaagagactgcgatagagaaaaaaatcaggaagctaaaaatacacggatggccttttagaaagtggtcaccctcc

SEQ ID NO: 559 - DNA, 120 bp, synthetic construct
  source 1..120: mol_type = other DNA
ctatggtgacatttagtattttcagaatgtcattactttgaccacatactttccatcattgctattctgcatggaggaaaaaatccaaagcactagaatttctttttaaagaggggaaga

SEQ ID NO: 560 - DNA, 120 bp, synthetic construct
  source 1..120: mol_type = other DNA
cagcctgggatgttctgaaatgcctggtagtgcacacttgaaaaaggaagaaaagcagactgggaacatagcacttagggagctgagaaagcagccagctcaggcctgacaggtaagtgt

SEQ ID NO: 561 - DNA, 120 bp, synthetic construct
  source 1..120: mol_type = other DNA
tgcagtgagctgagattgcgccactgcactccagactggccaacagaatcagacaaaaaattagctagttgttgtggcacatgcctgtaatcctagccacttgggaggccaaggcacaag

SEQ ID NO: 562 - DNA, 120 bp, synthetic construct
  source 1..120: mol_type = other DNA
caaagtctttagattctcatctgcttaaagtcccagctcttccacttatcagctaagatctgaacccgagacgggaatccaaattacacagcctctctaaatctcttagttttatcattc

SEQ ID NO: 563 - DNA, 120 bp, synthetic construct
  source 1..120: mol_type = other DNA
gctactcgggaggctgaggcaggagaatggcgtgaacccgggaggcggagcttgcagtgagcggagatcacgccactgcactccagcctgggcaactgagcgagactccgtctcaaaaca

SEQ ID NO: 564 - DNA, 120 bp, synthetic construct
  source 1..120: mol_type = other DNA
attatgactggtcatggacatgagaataaagaataatgagactggggagaaatttgaggaagaacgctcagaaacaattctgactgaaactcagattgtagggaaggccttatgtgttgc

SEQ ID NO: 565 - DNA, 120 bp, synthetic construct
  source 1..120: mol_type = other DNA
tcctccaaatttaatccattagcaagtcctctcttcaaacccatcccaaaccaaccttgtttttaaccatctccacaccaccaattaccacaaggataaaatctgaattccttaccacca

SEQ ID NO: 566 - DNA, 120 bp, synthetic construct
  source 1..120: mol_type = other DNA
ctggtctcgaactcctgacctcaagtgatttgcctgccttggcttcccaaagtgctgggattataggcacgagccaccacacacgaccaacattggcctatcttttaaaaaataaaccaa

SEQ ID NO: 567 - DNA, 120 bp, synthetic construct
  source 1..120: mol_type = other DNA
cgacagaacctgaatcctaccagggacttagttagtcttatttactgttgcattcctagtgcccagaacacagtaggctcccaataaatagccactgaataaaagttaaaaccaacaaaa

SEQ ID NO: 568 - DNA, 120 bp, synthetic construct
  source 1..120: mol_type = other DNA
gagccactgcatctggactgcatattaatatgaagagcttttcttcaacaacagtgaacagttttctacaaaggtatatgcaagtgggcccacttcttgttcttatgaatcttttctttc

SEQ ID NO: 569 - DNA, 120 bp, synthetic construct
  source 1..120: mol_type = other DNA
ggattcctgccgactattaaataaatccctagctcatatgctaacattgctaggagcagattaggtcctattagttataaaagagacccattttcccagcatcaccagcttatctgaaca

SEQ ID NO: 570 - DNA, 120 bp, synthetic construct
  source 1..120: mol_type = other DNA
tttcaaaggcccttctgaagaactaagcaaactaaggaaagaccatttagttttaaacaggagaaatgtatttaactaaatcctaaacacagcaggctatctgcaagcagcagcagcagc

SEQ ID NO: 571 - DNA, 120 bp, synthetic construct
  source 1..120: mol_type = other DNA
aaacaaaagaatcatcatcaagtgaactggaacacatccagagaactaattttgttagaaagattttagagttgagccacacaatctgcatcttctgcgtcctccatgcactcgtctgct

SEQ ID NO: 572 - DNA, 120 bp, synthetic construct
  source 1..120: mol_type = other DNA
ccagctgcctcacttgttgttttaggacttaggctccacctcaccagtgtagtcccagcaggtagataggagttaatagttgactatctcagctcaccaccctccaaacctttttttttt

SEQ ID NO: 573 - DNA, 120 bp, synthetic construct
  source 1..120: mol_type = other DNA
ccgtgcctcgcctcatgtggttttatgcagcagatgcaaggtattctgtaaaggttcttggtatacctgttttcataacaacatgagtagtctcttcagtaattagattagttaaagtga

SEQ ID NO: 574 - DNA, 120 bp, synthetic construct
  source 1..120: mol_type = other DNA
ctgagaggtaactagcctacacagaaagttatgctacagatatacatggcttaaaaccaagactcaaccctctgatagttacaaaacactgaaatcaggatgttactaaaggtcagtgca

SEQ ID NO: 575 - DNA, 120 bp, synthetic construct
  source 1..120: mol_type = other DNA
gatcaagagccattgaaacagacacaggtaagagctttcagagcaaattgctggtctggacatgggattatgagatgaaaacatttatagccatcactgtgcacttactcattgtatcta

SEQ ID NO: 576 - DNA, 120 bp, synthetic construct
  source 1..120: mol_type = other DNA
ttgacaatacctacataaaactctttccagaatgttgttaagtcttagtcattagggagatacatatggatacactcacaaattcttctggggtcaggccagacaccaccatggacattc

SEQ ID NO: 577 - DNA, 120 bp, synthetic construct
  source 1..120: mol_type = other DNA
tggtggaaatccaaagtagcttagtttcctaaaaaggaaatatggcattatgtagcaaacaccttaacacgtatttacactttcagtcaacaatgctagttttagaaatatatcctaggg

SEQ ID NO: 578 - DNA, 120 bp, synthetic construct
  source 1..120: mol_type = other DNA
ggcataagccaccaagcctggctaattttgtatttttagtagagacagggtttctccatattggtcaggttggtcctgaactcctgccctcaggtgatctgcccgcctcggcctcccaaa

SEQ ID NO: 579 - DNA, 120 bp, synthetic construct
  source 1..120: mol_type = other DNA
atgccatggtatcaggaattaagcatagctaagtagaatgtatgagattcctaaaatgaccctaatgaacatggccaaataccacatttgatgccaaacagtgtcttttatgataacgtg

SEQ ID NO: 580 - DNA, 120 bp, synthetic construct
  source 1..120: mol_type = other DNA
gaaagataaatggaaggagaaaaccatcgccaccaattgtgaaaggacaaatcatacttgctgggcagccaaagcataaatgaaacagctcatgtcagagagatcagaaatgactggcaa

SEQ ID NO: 581 - DNA, 120 bp, synthetic construct
  source 1..120: mol_type = other DNA
ggccctccagtaaggaaaagaatagtactggactacatagtccagtactggactgctatacagccctgtgttaatagtggtgtaaatacacatctctgaaagatattctaaatgttttct

SEQ ID NO: 582 - DNA, 120 bp, synthetic construct
  source 1..120: mol_type = other DNA
cactcctggttctttatttttactggtagaactatctgcagacacctcaaacttgtcagcagaaaggccttctggattctggcttatagggtattcactacttttctgtgaagttaatac

SEQ ID NO: 583 - DNA, 120 bp, synthetic construct
  source 1..120: mol_type = other DNA
cttaaaggcagaagtacttatttatttatttttatttatttattttttttgagatggagtttgctcttgttgcccaggctgcagtgcaatggcatgatcttggctcaccacaacctctct

SEQ ID NO: 584 - DNA, 120 bp, synthetic construct
  source 1..120: mol_type = other DNA
tgtcttttctggacctgtgagtttctaggattgttaagaactctgttgaaagtaagtaggatctaactatgaagagaggtatcatcctccccacccccaatacagggtgataattgataa

SEQ ID NO: 585 - DNA, 120 bp, synthetic construct
  source 1..120: mol_type = other DNA
cccagagaagcacactttgtgagaaccaatgggaaggagcctgagcagctggaacctattccctatgaattcatggcataataggtgttaaaaaaaaaaaaaaaagacctttggactgta

SEQ ID NO: 586 - DNA, 120 bp, synthetic construct
  source 1..120: mol_type = other DNA
gagtttcagttagactcacaccagatttagggagaaaaaggctcaaaacttatgttggtattaagttgtgatatccaaaacaattcagaaattaagcatttcagttacagatctccagaa

SEQ ID NO: 587 - DNA, 120 bp, synthetic construct
  source 1..120: mol_type = other DNA
tccaattaaaaactcaaatttccatctcactttccttcatttatgccattattcctcagctcagtgctcacttcttataggaagtcagctctgatcaactgcatctgcctggttactcca

SEQ ID NO: 588 - DNA, 120 bp, synthetic construct
  source 1..120: mol_type = other DNA
catgctgttctaacacagcttctagttcagccatttcctgctggagctttatcaggttatgttgcatggtatccctctgcttcaaaaacgataaatggcaccaagaaaatgaaatacttt

SEQ ID NO: 589 - DNA, 120 bp, synthetic construct
  source 1..120: mol_type = other DNA
tgtgtccacctagagatcattagcaaggacctgtgagagggaaggatccaacagaaagagccctgagaaagcctgtaaggatagttactgtttttaaaataatgagttctttttgcttat

SEQ ID NO: 590 - DNA, 120 bp, synthetic construct
  source 1..120: mol_type = other DNA
tcagtcaacctggaatgaaagcacatagatatctgaccaaaatgcttcacaggctgtattagtcactactgtcacaaccatcacatctaacctctacgtggccattacataaatcagaaa

SEQ ID NO: 591 - DNA, 120 bp, synthetic construct
  source 1..120: mol_type = other DNA
tggctaattctaataagactcctgaaatgtgcagcagagcagccggaactggtctggagggaagcagagtgtatatctgacccttgtttgttcacattcattacatataaatatatatat

SEQ ID NO: 592 - DNA, 120 bp, synthetic construct
  source 1..120: mol_type = other DNA
tgggtatattgacagagtcccaaacccacattcaaaaaggatcataggaattgcaaagagagaaaaggcctcctaaatcttttcatcaatttagttgccatggcaatcctgaagaagtgg

SEQ ID NO: 593 - DNA, 120 bp, synthetic construct
  source 1..120: mol_type = other DNA
ttttaatgatccagtaaaagctagattataatgcacagaattatctggatttcttgtttttgagacagggtctcaccatatcacccaggatggagtgcagtggcaccatcatggctcacc

SEQ ID NO: 594 - DNA, 120 bp, synthetic construct
  source 1..120: mol_type = other DNA
atctgacttcagaaagttcataaaaaaacatcattcacttactagcagctaaaagggtatttaagatttaggtgggaaaaagaagccacagcaggatgaatcgagggggtctgaacagct

SEQ ID NO: 595 - DNA, 120 bp, synthetic construct
  source 1..120: mol_type = other DNA
actattctgcctttagtacataaacatttcatattacattatcaaatggtcatatatatggtaaagcttttatttatttcataggtgaccaaattattggccttgaccattaggtccaga

SEQ ID NO: 596 - DNA, 120 bp, synthetic construct
  source 1..120: mol_type = other DNA
tgcgcgtgtgcgtgtgtgtgaaataaaaggtagtatgagttccatcaaggtgcttacagtctaatttaaggagacaatgaaccacaaacaattgtgccattaattcaaagagatgatgtc

SEQ ID NO: 597 - DNA, 120 bp, synthetic construct
  source 1..120: mol_type = other DNA
ctgagatgcctttgccaatattacctggttactgcagtcatttaagctattcttcaatgataataaattctcctctgtgttcttagacagacactcggtagcaacggtgctatgcctagt

SEQ ID NO: 598 - DNA, 120 bp, synthetic construct
  source 1..120: mol_type = other DNA
gatagacaaaacctagagcctcctttgatactacatttggcattatcaactggcttatctttctgaccaaccacaggaaagcctgcagtgatattaactgtctgtacaggcttgatatta

SEQ ID NO: 599 - DNA, 120 bp, synthetic construct
  source 1..120: mol_type = other DNA
attaggtgggcttagatttctactgactactagttcaagcgcatgaatatgcctggtagaagacttcctcctcagcctattctttttaggtgcttttgaattgtggatatttaattcgag

SEQ ID NO: 600 - DNA, 120 bp, synthetic construct
  source 1..120: mol_type = other DNA
acattcattctgtctttagtgagtaataaactgctgttctcatgctgtaatgagctggcatgagtatttgtgccacatggctccacatgcaagtttgaaacagaactaccctgatacttt

SEQ ID NO: 601 - DNA, 120 bp, synthetic construct
  source 1..120: mol_type = other DNA
cagaccataccacgacatttgacagagaatgatactctaactctgccaagagattttgtgggttgtaaaggtcccaaatggtcttcagaataatctaattacagtactgtatctacccac

SEQ ID NO: 602 - DNA, 120 bp, synthetic construct
  source 1..120: mol_type = other DNA
caacaaacaaaaagggtatttcctccactataaaatgagagaactaaactagatgatctctaaggtttcttccaataccatgattctagtctggagaaacaccagcctacttgagggagg

SEQ ID NO: 603 - DNA, 120 bp, synthetic construct
  source 1..120: mol_type = other DNA
agtgctcctaaatatcaactactataactatttttacaatgcctgttgtctaggaatttatgatcataaggggggaaaacagtaagtgttatgataaatagatggtggtgcctgggagct

SEQ ID NO: 604 - DNA, 120 bp, synthetic construct
  source 1..120: mol_type = other DNA
ttttaaaaatagagacagggttcccctatgttggccaggctggtcttaaactcgtggactcaaccaatccttctgcctcggtcttccaaagcgttaggattacaggcacgagccatcctg

SEQ ID NO: 605 - DNA, 120 bp, synthetic construct
  source 1..120: mol_type = other DNA
atccagcaattattattaaatacttaaaaaacctgagacccttacccaattcaatgtagacagacgtcttttgaggttgtatccgctgctttgtcctcagagttctcacagttccaaggt

SEQ ID NO: 606 - DNA, 120 bp, synthetic construct
  source 1..120: mol_type = other DNA
atatatatatatatatatatatatgtaatcccagcactttgggatatatgtgtatatatgttttttttttttgagacagaatcttgctctgttgccaggctagagtgcagtggcgtgatc

SEQ ID NO: 607 - DNA, 120 bp, synthetic construct
  source 1..120: mol_type = other DNA
gtaacaacagagcaaatcactacattttctttaacaattacaccttttaagttcaagtaattttccctttttttaaaagatagggtctcagtcacctgcgctggagtccagtggcacagt

SEQ ID NO: 608 - DNA, 120 bp, synthetic construct
  source 1..120: mol_type = other DNA
agatcttgctttgccgcccacgctgaagtgcagtggagtgatcatagctcactgtagtctacatctcctggactcaagtgatccttctgtctcagcttcccaagtagctgggactacagg

SEQ ID NO: 609 - DNA, 120 bp, synthetic construct
  source 1..120: mol_type = other DNA
ataggtacattcacctcacctggctgtaaggtctctctcttgattatatcaggtaccctgaccttctctgaactctaactgattagaacacttgtctaaccacttaatataccatctttc

SEQ ID NO: 610 - DNA, 120 bp, synthetic construct
  source 1..120: mol_type = other DNA
gactaaaaggtcttatcaccacgtcatagaaagtaattgtgcaaacttcctgagttttcatggacagcacttgagtgtcattcttgggatattcaacacttacactccaaacctgtgtca

SEQ ID NO: 611 - DNA, 120 bp, synthetic construct
  source 1..120: mol_type = other DNA
agcaatcacaccctgctgagcttactgttcttaacatctgaaccctgcccaatccctcacttagttctgcctctcaaggatttctgtcaaattatgattatacttctttgaaaacacata

SEQ ID NO: 612 - DNA, 120 bp, synthetic construct
  source 1..120: mol_type = other DNA
actgtggttgcttccaacctagcatcattaccaaattatataccttttggttatatcattcttacataaaggacactgtgaaggccctttcttctggttgagaagtttcagcatgcaaaa

SEQ ID NO: 613 - DNA, 120 bp, synthetic construct
  source 1..120: mol_type = other DNA
cctgcaaaataaaacataaaggacataatatactggtgaagggggtgactaggtagggagtaaatagcagacactgacaatgaagagacccaggaaagaaaagattaaggggctaaaaaa

SEQ ID NO: 614 - DNA, 120 bp, synthetic construct
  source 1..120: mol_type = other DNA
cactccaccctgggcaacagaggaagactctgtctcaaaaaaaaaaaaaaaaaaaaaaaaaaggccaggagcggtggctcacgcctgtaatcccaacactttgggagaggtcaggagttc

SEQ ID NO: 615 - DNA, 120 bp, synthetic construct
  source 1..120: mol_type = other DNA
atcaagaaggcatcaagcattactccagcaaatagtacaattgaacaattcagagcaggggtagggaggaaattcccttatgatagtactgcagaatatagtacagtagagtgacaagct

SEQ ID NO: 616 - DNA, 120 bp, synthetic construct
  source 1..120: mol_type = other DNA
aaaaaaaaaaaaaaaagtagctgttgaaaaatttaagttacatttattgctcacattctatctctttgaacaatgtggttctagatcttcaaaaaagtattacaggctgggtgcggtggc

SEQ ID NO: 617 - DNA, 120 bp, synthetic construct
  source 1..120: mol_type = other DNA
agaactttaggcttgcttgggtcaataaagttgttttatttttagcaattagagtttatccgtagaaaatacaattaatacaacaaaagcatgggggtatcgctcccaggctcccagctt

SEQ ID NO: 618 - DNA, 120 bp, synthetic construct
  source 1..120: mol_type = other DNA
cacacatatatctttatgactggttctttcctgactatcacaatcctgactatcacaagcttgaaaccaagcttctcactcttctccagttgccaactctaatcctctcaatctcaacag

SEQ ID NO: 619 - DNA, 120 bp, synthetic construct
  source 1..120: mol_type = other DNA
cgcgcccgtcctctattttcttttatttgtacatttgctcgtattattatctctgcctataagcctataatttccttcttccacaagttctcaaagcaactatattcataacttaatctc

SEQ ID NO: 620 - DNA, 120 bp, synthetic construct
  source 1..120: mol_type = other DNA
acagggaggcaggggttgtagggtaagagggaagtatactttgcatcatatacctttttgtgctaataaactttttaccaagtacatagtttgtacctggtaccaggttatgtaccaggt

SEQ ID NO: 621 - DNA, 120 bp, synthetic construct
  source 1..120: mol_type = other DNA
ctgggttatgaaggacaaaaacaaaagctaataatggagccacataacacattcaaacttacttgcaaaatatgtggtcacactttgtggagacaggttccttgatcaactccagactag

SEQ ID NO: 622 - DNA, 120 bp, synthetic construct
  source 1..120: mol_type = other DNA
ccagccccaagtgtcttctgatctataggtgtctcttactttttctcccttgtcatttatttttaaaattaggtcatttgacctgtggagtttcccccattctggattttgctgattgta

SEQ ID NO: 623 - DNA, 120 bp, synthetic construct
  source 1..120: mol_type = other DNA
atacggaattaaagaatacatgggaataagtgcattaaagagaaaaattaagcagggtaaggggaaacaggtagttcaatatctatgtgggggtgagatgtacatggggggagtcaggaa

SEQ ID NO: 624 - DNA, 120 bp, synthetic construct
  source 1..120: mol_type = other DNA
gcctggcatcaagcaatcttcctgcttcggcttcccaaagtgctgggattacaggtgtgagctactatacccggcctttagctttcttctgaatgtgaacctttttttttttttttggag

SEQ ID NO: 625 - DNA, 120 bp, synthetic construct
  source 1..120: mol_type = other DNA
ctgccagactccttgggctattgcaagaataaaattaaatgctacttgggaaaatgcttcacaacctgagatgacttgggaaaaatgcttcacaacctgagataacttgtaccaacattg

SEQ ID NO: 626 - DNA, 120 bp, synthetic construct
  source 1..120: mol_type = other DNA
gcaaattgtgctatactgtactatattaaaaggaagtgaaatatgatccctatcctagaactttccatacaaatgaatgtaaaacaccataaaaattaatcttaaggccgggcgcggtgg

SEQ ID NO: 627 - DNA, 120 bp, synthetic construct
  source 1..120: mol_type = other DNA
atgtatccaaatgccacactattgaggattttcctgatcactgattgtcatgagtaagttttgtgctttttcaaaagcagttttttcctacaatgtcatttcctgcttctctggctctga

SEQ ID NO: 628 - DNA, 120 bp, synthetic construct
  source 1..120: mol_type = other DNA
catagaatgtcagctagtaatcagtgttatggagaagcagcaggaatagaagataaagtgtgtgctgggggtgtggtaattttaaataggggtgtctggaaatgaaaaggtggtatttca

SEQ ID NO: 629 - DNA, 120 bp, synthetic construct
  source 1..120: mol_type = other DNA
cctcatccatgattttattttgccatttcaagtgatggagcttgttttagagctggaagaaaagccaaaatgccagttaatctaaactagattcctgccccagtgcagaaccaatcaaga

SEQ ID NO: 630 - DNA, 120 bp, synthetic construct
  source 1..120: mol_type = other DNA
cctttctccaagaaagagaaagctacagaggagtgactgaccgggtaggtggtggtagccttagctttctccaatgtttctggttgttttctttttcttgcataaaaccaaaatcaacaa

SEQ ID NO: 631 - DNA, 120 bp, synthetic construct
  source 1..120: mol_type = other DNA
agtttcggtaaatataagtaataaggattgttgggggggtggagggaaataattatttccagcatgcgttgcggaatgaaaggtcttcgccacagtgttccttagaaactgtagtcttat

SEQ ID NO: 632 - DNA, 120 bp, synthetic construct
  source 1..120: mol_type = other DNA
acactaagagggtttggagaagttcaagggaggaatcctgcaaagaagaggggcgactttttccgtgtctccggacagctaatcgttttagtgacaggatgagagagcccttcgtgttct

SEQ ID NO: 633 - DNA, 120 bp, synthetic construct
  source 1..120: mol_type = other DNA
ctgtcaaaacggaccaattagctctctgtaaaatggaccaatcaacaggatgtgggtggggtcagataagggaataaaagcaggctgccccgctgggtgccagtggctcacacctgtaat

SEQ ID NO: 634 - DNA, 120 bp, synthetic construct
  source 1..120: mol_type = other DNA
cgataactggaagactaggatgaaatctgcaagttaaaaaatgacactacccatatatccttctcatcccattctccttttttcgagaccccgttaaagagatcttggttagggaccttt

SEQ ID NO: 635 - DNA, 120 bp, synthetic construct
  source 1..120: mol_type = other DNA
ggcaggaagtgtttcttaaagttggaaagtggtatttcagaatatccgcttttggcagactgagtcagtcacttcattttcctgattttttgcctaaggtcctggtgaattgacaaagat

SEQ ID NO: 636 - DNA, 120 bp, synthetic construct
  source 1..120: mol_type = other DNA
taacactgtgagatcggcaaaacagacatattagacctattttacagattaaagaactgaagctcaaaggtgaactgacctgctcacagttttatgtctagtaatgggccagagctgtgt

SEQ ID NO: 637 - DNA, 120 bp, synthetic construct
  source 1..120: mol_type = other DNA
ataataataataaaaacaatgagacatgcaagagatgtcgggagaagcaccagaagattccattgaaatcttgctccccagaagggtgggaacagtagggacagaaaactgctgtggttc

SEQ ID NO: 638 - DNA, 120 bp, synthetic construct
  source 1..120: mol_type = other DNA
taatatgggatagaggtgagatccaaacctaagcagccctggctctaaaacccactgaacaaagctgcctctccaactagcatcagaaagaactaggtgagaatcctacttctatcactt

SEQ ID NO: 639 - DNA, 120 bp, synthetic construct
  source 1..120: mol_type = other DNA
ggcattctgatgcctgcagttctcctgtctggctttgaataactctgggtagtgctttaaatctaagctgacataccagtgggatgtgaactgtccttgcaaatgttttgagcccttcct

SEQ ID NO: 640 - DNA, 120 bp, synthetic construct
  source 1..120: mol_type = other DNA
aagaaaatagttgtctctatgtccttatttctaatcttcctgctcaaccatgaactgcactaaacacactcagacccatctaacctaaaattgagaaagggaggttctcactcctggaga

SEQ ID NO: 641 - DNA, 120 bp, synthetic construct
  source 1..120: mol_type = other DNA
acgcgttgctgtggcggtagctcaccaatccaatgcatgcacccgctcctttattaggctatagggccagtggctgcgacagggacctgatacaacagtgcgttaaataaggagcttatt

SEQ ID NO: 642 - DNA, 120 bp, synthetic construct
  source 1..120: mol_type = other DNA
tcaaaagaagacatttatgcagccaacagacacatggaaaaatgctcatcatcactggccatcagagacatgcaaatcaaaaccacaatgagataccatctcacaccagttagaatgtca

SEQ ID NO: 643 - DNA, 120 bp, synthetic construct
  source 1..120: mol_type = other DNA
aaaaagaataaaagaggtccctttttctgggagattgatgtaggggagcgagcgtgtgagttggaagggaggcattgaggatcagccatttaaagcagcatacaaggatgttcaaggctc

SEQ ID NO: 644 - DNA, 120 bp, synthetic construct
  source 1..120: mol_type = other DNA
tggtaaagtagcctgaaagccagtggtacaaccccctccccacaaccttcaccacctctagcccctccaatgaaaagcactaattgcctatatacaacccctttttgtttgaaatatcta

SEQ ID NO: 645 - DNA, 120 bp, synthetic construct
  source 1..120: mol_type = other DNA
cttgttcttttttatgattgcacatcttttgttctaacgtttggtccttcaccttggttcctgacacaaggattcctaaatcccttggaattttctgcatgataggagcgtcctttgttc

SEQ ID NO: 646 - DNA, 120 bp, synthetic construct
  source 1..120: mol_type = other DNA
ttccctcctctgaactgctgcatttcctgtctgcatcatgtttgccctaatcagacatcgccttatttcatcatcctttaaaaaatgctttatttctctggcagatttcattggaatcag

SEQ ID NO: 647 - DNA, 120 bp, synthetic construct
  source 1..120: mol_type = other DNA
ggcgacagaccgaaaaaaaaaatttagcataaaaatgtgaaattatgtaaatatgccaaaataggaacctggaggtgcttggaatccagactttgggagcccagcagtgcaaggatctct

SEQ ID NO: 648 - DNA, 120 bp, synthetic construct
  source 1..120: mol_type = other DNA
tccatggattgctgggctaaatcatataagactgtaaaatgcctaacccaggatttggcatcaagtaagcaaattgtaaatggtagctgctgttctgcctatgactatttagtcttgtgc

SEQ ID NO: 649 - DNA, 120 bp, synthetic construct
  source 1..120: mol_type = other DNA
ttcatgttcactaacttaccaaatgtgatttattagtgactttttttttgaagatggagtggaggaatccttgcgccttctgcagcattctgctgccgttatggaacagtgcatctatgg

SEQ ID NO: 650 - DNA, 120 bp, synthetic construct
  source 1..120: mol_type = other DNA
ctgcctttgtggatgcgtgggccgccagcttcagtcctgcttttctttctgatggcccttgttatttatgcataaatatttaactacacatttaaatgtcttactgcatggctagaatta

SEQ ID NO: 651 - DNA, 120 bp, synthetic construct
  source 1..120: mol_type = other DNA
ttttaaattacttccatccccatgttgttttgtagtagaattgtttcctaaagaaaacaactccttgattatggctcaccctgttggagttgtgggcactctgtaacatctttggttgtg

SEQ ID NO: 652 - DNA, 120 bp, synthetic construct
  source 1..120: mol_type = other DNA
ccctcctcattttagatgggaaccatgagggccccgtcgtttaccccgcatcactgttgaagatctcatcctcactggaagactccttgtcctgcagcctcatggcttttttttttttta

SEQ ID NO: 653 - DNA, 120 bp, synthetic construct
  source 1..120: mol_type = other DNA
ctggcctttctagttagaattctgtgaggtttgtataaaaggaatagagtgggggcccaaaaaccagtaagatgagaaagtactgtttgctcagttctaggatccatgaaataaataata

SEQ ID NO: 654 - DNA, 120 bp, synthetic construct
  source 1..120: mol_type = other DNA
tcaggggcctgacattgaggattcttttttatcttcctctgatgctcttctataagaatgactctgttttggaagaaaacgcaattaagattttccatcacaacaaccactatctccaaa

SEQ ID NO: 655 - DNA, 120 bp, synthetic construct
  source 1..120: mol_type = other DNA
ctggaaagaaagagagtggtctacttgatgatatgaagcatgatcaatcagtatcaatactagctttagggtgaaggcatagccaaattggaaactgtggacaaatttcagaaactgcac

SEQ ID NO: 656 - DNA, 120 bp, synthetic construct
  source 1..120: mol_type = other DNA
attcaaacatgaatattcacctcacccagtcctctgggaggtccataagtccctgttttgggaagaatgaagctgagctctagctaaaaaaaaacaactccatttggggatctaaaaatt

SEQ ID NO: 657 - DNA, 120 bp, synthetic construct
  source 1..120: mol_type = other DNA
aaaaccaaaagaggattttcagtgtgttccagaaatgttcctattataaatacatctttgtgctaaaagttttttttccctatatgtaagatttgtttcaggctagatgcagtggctcat

SEQ ID NO: 658 - DNA, 120 bp, synthetic construct
  source 1..120: mol_type = other DNA
acacttccactccacctacaagtggagggtagaactgcatttattcatccttttccaacacatctagcaagacgtagtagagacgcaagagaaatttgttaatgtataaaaggagaactc

SEQ ID NO: 659 - DNA, 120 bp, synthetic construct
  source 1..120: mol_type = other DNA
ttagatcacttcagaagacgcatgtttggtttgtgattactttgtaaaaacagtgtagtaggtactcactaaaggaaatttagaaaataataagcttaaggctgggcgtggtgcctcatg

SEQ ID NO: 660 - DNA, 120 bp, synthetic construct
  source 1..120: mol_type = other DNA
aatatatgggaataagtgtattaaagagaaaaaataagcagggtaaggggaaacaggtagtgtaatatgtatagggggtaggtgtacatggggggagtcaggaaaggtttcactgaggtg

SEQ ID NO: 661 - DNA, 120 bp, synthetic construct
  source 1..120: mol_type = other DNA
tgagccactacacttagccctaaatgtgaacttttgaaatggattttttgggtaaagtccaggcaggacatcaaagaacaagtatcctggtagtgcgacaagaatgtggttcttttcatt

SEQ ID NO: 662 - DNA, 120 bp, synthetic construct
  source 1..120: mol_type = other DNA
ccctgccagtctccttgggctattgcaagaataaaattaaatgctacttgggaaaatacttcacaacctgagatgacttgtaccaatgtgggtattattactgggaccaaatgtgacttt

SEQ ID NO: 663 - DNA, 120 bp, synthetic construct
  source 1..120: mol_type = other DNA
aaattgtgctatactgggtactgtattaaaaggaagtgaaatatggtccccatcctagaagtttccatacatatgagtctaaaaaaccattaaaaattaatcttaaggcctggcgcggag

SEQ ID NO: 664 - DNA, 120 bp, synthetic construct
  source 1..120: mol_type = other DNA
caaaaatctctgctgccctggagtttacattctgtgggactagagataaaggatagatacattacatagaaggtcagctagtaataagtgttatggagaagcagcaggaatggaggataa

SEQ ID NO: 665 - DNA, 120 bp, synthetic construct
  source 1..120: mol_type = other DNA
gacttgctaaaggctttgatgatttgcagtattcttatttaaatgtacagagccagcttcagaggaaggttcttccaaagacctatcccctccatgacaccaaccatccatgattttttt

SEQ ID NO: 666 - DNA, 120 bp, synthetic construct
  source 1..120: mol_type = other DNA
gtctgcttgtggatttcatttctgccttttagtttttactttttctttctttggaggcagaaattgggcataagacaatatgaggggtggtctcctcccttattcccccactttgagact

SEQ ID NO: 667 - DNA, 120 bp, synthetic construct
  source 1..120: mol_type = other DNA
atttttctctgtgtggtttgaactccaccatgtagtcttcctacaggaagggtgaagtccttctccactcttgctatatagtattgtctaatgattgaggcttttaggacccagaaatta

SEQ ID NO: 668 - DNA, 120 bp, synthetic construct
  source 1..120: mol_type = other DNA
ccttttgtcctacctcagtgacttgatgtatacactggaacagtcctcagtctgaggaaggtcagttgaagtccttactgtaaaagtccaaattttaaggaaaatgagttccgcaatgag

SEQ ID NO: 669 - DNA, 120 bp, synthetic construct
  source 1..120: mol_type = other DNA
gaaatgccagggtgaaagggatagccaattggactaaagtacaagtgccactccagttatttggcagagtgcccagtaaaggtccaccacaataccaccacacatctgctcggggatgaa

SEQ ID NO: 670 - DNA, 120 bp, synthetic construct
  source 1..120: mol_type = other DNA
gactgtggcccatgactctggagggggtggcactttcttgattctggtgtgacgagtccatccttttttgctgtacgaacagcagtcttggtggttagcaacacaaggtagggtccttcc

SEQ ID NO: 671 - DNA, 120 bp, synthetic construct
  source 1..120: mol_type = other DNA
caactttctgacttattacaaatatttatttctttaaacaaccagttaatttgtttcaggacaagaatttaccatataatactctttttatataaattccgccccccctttttttccttt

SEQ ID NO: 672 - DNA, 120 bp, synthetic construct
  source 1..120: mol_type = other DNA
aagacaaaacaccacgctcacaccacaaacacaccacaaaacaaagaaccggtaaaaagggcgcacacacagttttgcagtttgcaccaaaccaaaatcagagtatccagaaatccaagc

SEQ ID NO: 673 - DNA, 120 bp, synthetic construct
  source 1..120: mol_type = other DNA
cattcatgatttattttgccatttcaagtgatggagctggttttagagctagaagaaaaccaaaatgccagttaatctaaactagattcctgccccagtgcagaaccaatcaagacaggg

SEQ ID NO: 674 - DNA, 120 bp, synthetic construct
  source 1..120: mol_type = other DNA
gtaattagacaatataaattctgtattttttcacatattgcttccaaccctttgggtcttttcctttctccaagaaagagaaagctacaggggagtgactgaccgggtaagtggtgagct

SEQ ID NO: 675 - DNA, 120 bp, synthetic construct
  source 1..120: mol_type = other DNA
aatgttgacgttggccaggacctttgcaaacaagccaggccaaaaagtttcaatatttacactggctgctttaataagggcattgatcttatcctccgtaaaggtcacctcatagtcctg

SEQ ID NO: 676 - DNA, 120 bp, synthetic construct
  source 1..120: mol_type = other DNA
cctgggactcttaagggtcagcgagaagagaacacacactccagctcccgctttattcggtcagatactgacggttgggatgcctgacaaggaatttcctttcgccacactgagaaatac

SEQ ID NO: 677 - DNA, 120 bp, synthetic construct
  source 1..120: mol_type = other DNA
attttccagcgcttctgagttttacctcagtcacataataaggaatgcatccctgtgtaagtgcattttggtcttctgttttgcagacttatttaccaagcattggaggaatatcgtagg

SEQ ID NO: 678 - DNA, 120 bp, synthetic construct
  source 1..120: mol_type = other DNA
ccaccatggatgtcagaaaagtcttttaagattgggtagaaatgagccactggaaattctaattttcatttgaaagttcacattttgtcattgacaacaaactgttttccttgcagcaac

SEQ ID NO: 679 - DNA, 120 bp, synthetic construct
  source 1..120: mol_type = other DNA
aatggtagaggatgaatagctcacaatacaaatttgtcatttccctttaagagagaattcccattttatgtgagagtccacatgttcctcatacccatagtttgccacatcttgagtact

SEQ ID NO: 680 - DNA, 120 bp, synthetic construct
  source 1..120: mol_type = other DNA
ggcaaacctgtgttaaaatcttagctcattcattaattgtgtcatgctgggcaaatcagtctctctggcctctttttcctcactcgaaaaatggagacgatgaaaataatgtctcatagg

SEQ ID NO: 681 - DNA, 120 bp, synthetic construct
  source 1..120: mol_type = other DNA
caatgctctctggctctttattaaacatattgttacctctacccacaacctactttttccctactttttgtctagctaatttgcgtgctcgtctttcagatcttggcttatttctgcttc

SEQ ID NO: 682 - DNA, 120 bp, synthetic construct
  source 1..120: mol_type = other DNA
ctagtgtgatatgttataagagcatgtaccaagtgcatgaaaagtgagcagccatctctggttggtcagaaaaagctccataaagcagtttttgctgaatcttgaaagatatacctaagg

SEQ ID NO: 683 - DNA, 120 bp, synthetic construct
  source 1..120: mol_type = other DNA
gtattccttaggggaaataaagggctgggccgaagtaaagggatgggtctggctagttatctgcagcaggagaatgtccttaaggcacaggtcgctcatgatagtttgtggtttaagaac

SEQ ID NO: 684 - DNA, 120 bp, synthetic construct
  source 1..120: mol_type = other DNA
gattataggaccaaccgaagcaactattttctaagagtaataataagtgactcaggtgccaaatttgtagttaccatcaactattggaaccatatgagtacttaatgccctggagagtca

SEQ ID NO: 685 - DNA, 120 bp, synthetic construct
  source 1..120: mol_type = other DNA
ctggaggaggtagtttctaaatggaagcctgaaagagttgttccaggtcaagaaaagcaaagaaggggaaacagcttgtacaaagtcctagaggttaaagaaaacattctttcaggatat

SEQ ID NO: 686 - DNA, 120 bp, synthetic construct
  source 1..120: mol_type = other DNA
tcccaatagtagacataaaagtcttcgcacagtgaaaactaaaatggatcaagcagatgatgtttcctgtccacttctaaattcttgtcttagtgaaaggtatgatgaagctattatatt

SEQ ID NO: 687 - DNA, 120 bp, synthetic construct
  source 1..120: mol_type = other DNA
ccttaatgatcagggcatttctataaaaaataaactattttctttcctcccagggtcgtcagacaccaaaacatatttctgaaagtctaggagctgaggtggatcctgatatgtcttggt

SEQ ID NO: 688 - DNA, 120 bp, synthetic construct
  source 1..120: mol_type = other DNA
gagattgtgccactgcactccagcctgggtgacagggaggctgaggtgggaggatcacgaggtcaggagatcgagaccatcctggctaacgtggtgaaaccctgtctctattaaaataga

SEQ ID NO: 689 - DNA, 120 bp, synthetic construct
  source 1..120: mol_type = other DNA
aagtgattcgtttgtctcagccacattttttttgtctaagaagatactgggccagatcattgtttctcaaattgcagattatgacctgttcatagttgtgaaacttattttgtgagtcgt

SEQ ID NO: 690 - DNA, 120 bp, synthetic construct
  source 1..120: mol_type = other DNA
ggtcctatatgtgattttaacttcctgtgaaactctgctgtctctctgttaaagttgcatatatacaatatataccgtagtcccctattcatggggtatacattccaatatcccccagtg

SEQ ID NO: 691 - DNA, 120 bp, synthetic construct
  source 1..120: mol_type = other DNA
ttgcagtaaatggcttggtgtcattcatttcaggggatcccttactgaagttttcgtttaggctctatgctttctggcgtaatatgtagctgtcaatcaaaacaacctgttcatgttttc

SEQ ID NO: 692 - DNA, 120 bp, synthetic construct
  source 1..120: mol_type = other DNA
caccatgcccagcctgaactactctttttaattggcaccattgaaggattgctcctcttttcttaaagagaaaatatattacctttcctttcttgactactgaagtagtattttatctca

SEQ ID NO: 693 - DNA, 120 bp, synthetic construct
  source 1..120: mol_type = other DNA
catttgtatctgaagtggaaccaaatgatactgatccattagattcaaatgtagcaaatcagaagccctttgagagtggaagtgacaaaatctccaaggaagttgtaccgtctttggcct

SEQ ID NO: 694 - DNA, 120 bp, synthetic construct
  source 1..120: mol_type = other DNA
ctcacagaaggaggactccttatgtccaaatttaattgataatggaagctggccagccaccaccacacagaattctgtagctttgaagaatgcaggtttaatatccactttgaaaaagaa

SEQ ID NO: 695 - DNA, 120 bp, synthetic construct
  source 1..120: mol_type = other DNA
cattccagccaacaacttgagacagtttttgactcataaacattcagagcttggctagctaattcctgctttaatttaaaaagtgtttattatatgcaaattggacaactcatataaata

SEQ ID NO: 696 - DNA, 120 bp, synthetic construct
  source 1..120: mol_type = other DNA
gatcactgatgaaatgcaattaagaactggttagtagaaaattcagagggtcaagaaatttaacagagcagttgaactcatttgcctttatcgttgagattagatcatctttcaggctgt

SEQ ID NO: 697 - DNA, 120 bp, synthetic construct
  source 1..120: mol_type = other DNA
actacagttatttattaccccagaagctgattctctgtcatgcctgcaggaaggacagtgtgaaaatgatccaaaaagcaaaaaagtttcagatataaaagaagaggtcttggctgcagc

SEQ ID NO: 698 - DNA, 120 bp, synthetic construct
  source 1..120: mol_type = other DNA
tgattacatgaacaaatgggcaggactcttaggtccaatttcaaatcacagttttggaggtagcttcagaacagcttcaaataaggaaatcaagctctctgaacataacattaagaagag

SEQ ID NO: 699 - DNA, 120 bp, synthetic construct
  source 1..120: mol_type = other DNA
gggcttttattctgctcatggcacaaaactgaatgtttctactgaagctctgcaaaaagctgtgaaactgtttagtgatattgagaatattagtgaggaaacttctgcagaggtacatcc

SEQ ID NO: 700 - DNA, 120 bp, synthetic construct
  source 1..120: mol_type = other DNA
caaagaccctaaagtacagagaggcctgtaaagaccttgaattagcatgtgagaccattgagatcacagctgccccaaagtgtaaagaaatgcagaattctctcaataatgataaaaacc

SEQ ID NO: 701 - DNA, 120 bp, synthetic construct
  source 1..120: mol_type = other DNA
agtatagggaagcttcataagtcagtctcatctgcaaatacttgtgggatttttagcacagcaagtggaaaatctgtccaggtatcagatgcttcattacaaaacgcaagacaagtgttt

SEQ ID NO: 702 - DNA, 120 bp, synthetic construct
  source 1..120: mol_type = other DNA
aactgccaagtcatgccacacattctctttttacatgtcccgaaaatgaggaaatggttttgtcaaattcaagaattggaaaaagaagaggagagccccttatcttagtgggtaagtgtt

SEQ ID NO: 703 - DNA, 120 bp, synthetic construct
  source 1..120: mol_type = other DNA
taaagcacttagcagtgaacttgacatatagtaggcagagagcattcagtaagtgttggcttgctccctttttttcatttaggaagtgatctaaaaacagtattgttagtaaatggtatc

SEQ ID NO: 704 - DNA, 120 bp, synthetic construct
  source 1..120: mol_type = other DNA
ttattagaactcttcctgtctagaccccatgtattacagagagacaccgaagttagtctcctcattcaaaaagtgccttttgcccctaagtcattctggtggatacagatttacttaatc

SEQ ID NO: 705 - DNA, 120 bp, synthetic construct
  source 1..120: mol_type = other DNA
aggccttattgccagtaaacctagagttatatttagtgtcagtttttcaaaaagtagcttatctgtggtatctggtagcatctgtttatcctatttaggatttatcctgtttagaccctg

SEQ ID NO: 706 - DNA, 120 bp, synthetic construct
  source 1..120: mol_type = other DNA
gaaagctgtcaagcttacagagccagatacaagcttcccaaaaattctgattttcatctaaaagcttgaatttttccccggcaataagtattgtcacttatttttcttgtaggtgacaag

SEQ ID NO: 707 - DNA, 120 bp, synthetic construct
  source 1..120: mol_type = other DNA
tttgtggttacatagtagttgatcatctggctgtgtcagtgtttcctagtttatttaaccaatttccaactagtggacttattgaagatttaattaggttccagttacatactgagaatg

SEQ ID NO: 708 - DNA, 120 bp, synthetic construct
  source 1..120: mol_type = other DNA
ggaagccaaaaacataaaggatttagtaagcatgagaaagctaaaacctgacactagagcaaacagagatgctttcccctaaaaaacctgaaaaagattcaaattggcagcaacaggtac

SEQ ID NO: 709 - DNA, 120 bp, synthetic construct
  source 1..120: mol_type = other DNA
taaaagggcccactgagtgagcacacaagtaaaaatgacccacagtaaggcacatccttgtgaatttttagaataatagaggcagacaggaaccttaaattcattagaggaccaagaagt

SEQ ID NO: 710 - DNA, 120 bp, synthetic construct
  source 1..120: mol_type = other DNA
aaataacaaagtaactaaatttctcaaagcatgcagaaggaaactgaatgaaagctggtggtggggacagcagagaaccaacgattttacactcaggtctcaaaagactaggaattggtg

SEQ ID NO: 711 - DNA, 120 bp, synthetic construct
  source 1..120: mol_type = other DNA
tagacagctaagttttcactagtggaagtttccatttaatcaagctactgtgtagcttgcagtcaacaagttctatctttgtaccaagtgcttcaaaacagccttttggtccctcactct

SEQ ID NO: 712 - DNA, 120 bp, synthetic construct
  source 1..120: mol_type = other DNA
cactctttgcaatgaatcttgctgctgctcactctttagtgagcactacctttatgagctgtaacactcaccacgaaggtctgcggcttcactcctgaagtcagcaagaccacgaaccca

SEQ ID NO: 713 - DNA, 120 bp, synthetic construct
  source 1..120: mol_type = other DNA
aggcctaatgttaccttttcaaaaacacctgattgtggaattgttgaagtcactgagttgtatttctggaatgtgttttttagcaggctgcacatacacatatgtagaaagccaggtgat

SEQ ID NO: 714 - DNA, 120 bp, synthetic construct
  source 1..120: mol_type = other DNA
taatctcaacagtccattttcttctcttaaagcccaactcattagaattgtccctcctcttttcacttatctctttgagtactctcctgaacccagtctagtcagtcctttcagtagaac

SEQ ID NO: 715 - DNA, 120 bp, synthetic construct
  source 1..120: mol_type = other DNA
aaactgtcatagctattaggaaagttgagtagaatgagtttgcgtgcatcccacatgcatctgggaggtcattaacaactttattgagaacagtttctgtagagtagtgggagaaatgag

SEQ ID NO: 716 - DNA, 120 bp, synthetic construct
  source 1..120: mol_type = other DNA
ttctccccattgcagcacaactaaggaacgtcaagagatacagaatccaaattttaccgcacctggtcaagaatttctgtctaaatctcatttgtatgaacatctgactttggaaaaatc

SEQ ID NO: 717 - DNA, 120 bp, synthetic construct
  source 1..120: mol_type = other DNA
agatttaattacaagtcttcagaatgccagagatatacaggatatgcgaattaagaagaaacaaaggcaacgcgtctttccacagccaggcagtctgtatcttgcaaaaacatccactct

SEQ ID NO: 718 - DNA, 120 bp, synthetic construct
  source 1..120: mol_type = other DNA
agcatagagagggttaagtaactgccccaaagtcacttaactagtaagtggaagtgctatgattccaaagcaaagagtctgactccagagtcaaactctgaacaaacaaaaagacacttt

SEQ ID NO: 719 - DNA, 120 bp, synthetic construct
  source 1..120: mol_type = other DNA
tggctgatggtggatggctcataccctccaatgatggaaaggctggaaaagaagaattttataggtactctatgcaaaaagattgtgtgttaacttttatgtattccctcatccctcttt

SEQ ID NO: 720 - DNA, 120 bp, synthetic construct
  source 1..120: mol_type = other DNA
aagttaaatttgaaatggccttatggtagattcctcccccgacacacacttacttcatgttttctttcattatatattttaatggatacaaaatataaataaacactaaaagttaaacag

SEQ ID NO: 721 - DNA, 120 bp, synthetic construct
  source 1..120: mol_type = other DNA
agatgcgatttttaatctaataagtagttaggaaggcttcactgagtcagctacatttgataaatgacctaaagtaaaaggagggagcataggactatcctagcaaaagacccccagcct

SEQ ID NO: 722 - DNA, 120 bp, synthetic construct
  source 1..120: mol_type = other DNA
agttggatatggaagtctatacacaggtaaagtataggccaaataaatcaattcacaagtcatcggcatatagatggacttgaaggccatgaaaaagagactgagaaagagcagccagaa

SEQ ID NO: 723 - DNA, 120 bp, synthetic construct
  source 1..120: mol_type = other DNA
gtatgaatgagaaaggaggagttagagatttgagaacagaggggacaggatcaaagagagcaccaagactaagaaaggcagttctcaggcgtgatttctaaaaaaatctctttcataaga

SEQ ID NO: 724 - DNA, 120 bp, synthetic construct
  source 1..120: mol_type = other DNA
cattgagcgcaaatatatctgaaacttctagcaataaaactagtagtgcagatacccaaaaagtggccattattgaacttacagatgggtggtatgctgttaaggcccagttagatcctc

SEQ ID NO: 725 - DNA, 120 bp, synthetic construct
  source 1..120: mol_type = other DNA
gcataatttggaaactcaagtaatataagacatataaccaaaaaaaagcagttgctagcacaaccctccccatcctcattcatggtcccaagaggcaatcgtttccagtctgtttgacta

SEQ ID NO: 726 - DNA, 120 bp, synthetic construct
  source 1..120: mol_type = other DNA
ctcattctgtaaattattcttacctcttttctgtgttagaaaccccatttcctggtttccatgtcatctttctagagtttttcccccaattttaagggcccacaactctcagaggcttgt

SEQ ID NO: 727 - DNA, 120 bp, synthetic construct
  source 1..120: mol_type = other DNA
agaaacacatagtccttcattgagttctggaaaattttctttaagtggttcttttataatttccctccatttttttctctagttttttctggaactcctgatgtttggacactaggcctc

SEQ ID NO: 728 - DNA, 120 bp, synthetic construct
  source 1..120: mol_type = other DNA
gaataatccagtagtagtgagtaaccctagctctcagactgttttctaagtactgttttctcttaaaaggatgcaaggtgtcttgaagaaatggctgattccagattcagaggaggaaat

SEQ ID NO: 729 - DNA, 120 bp, synthetic construct
  source 1..120: mol_type = other DNA
cagagccagagccagacccagcctcagaaaaacaacaaaaactaggtaaaaggagaaaaaaatcaagcatttatctttcttctcttatatgatctatattttgggaccctcaagtagatg

SEQ ID NO: 730 - DNA, 120 bp, synthetic construct
  source 1..120: mol_type = other DNA
tccagaaaataaagtctcctgcatttttttttttaatgctgcagcaagaatagggtcctgggttcttttttagtatgagggagagacagccacctggctacttgggataggaaagaaaat

SEQ ID NO: 731 - DNA, 120 bp, synthetic construct
  source 1..120: mol_type = other DNA
aggctgctttgtcatttacttgttccacaaattcttagcttccaaaattttggtgatacctcatttcctattctctctagttgcctttgtccatgtagattttttgaggaagcttgggta

SEQ ID NO: 732 - DNA, 120 bp, synthetic construct
  source 1..120: mol_type = other DNA
tgtgtaacacattattacagtggatggagaagacatcatctggattatacatatttcgcaatgaaagagaggaagaaaaggaagcagcaaaatatgtggaggcccaacaaaagagactag

SEQ ID NO: 733 - DNA, 120 bp, synthetic construct
  source 1..120: mol_type = other DNA
tctatagttatctgcagaaatattgctccttatgctttatttgcttaaaattatcactagatcatactattttcataaataaatgaatatgaaatcattcacaggcatacctcagagata

SEQ ID NO: 734 - DNA, 120 bp, synthetic construct
  source 1..120: mol_type = other DNA
caaaacaaaggggccacagtccccatgcaagtccgaaacctagccaggcaatcaatgaatcttttttttttttttgagacagggtcttgctctgttgtccaggctagagtgcagtggaga

SEQ ID NO: 735 - DNA, 120 bp, synthetic construct
  source 1..120: mol_type = other DNA
catcctggcacttccatacatcctctgaaatctaggcagaggctcccacagctgaactcttgtcttctacatacccacaggcccagcatcacatggaggccaccaaggcttagggcttgc

SEQ ID NO: 736 - DNA, 120 bp, synthetic construct
  source 1..120: mol_type = other DNA
tgagactgggtaatttgtaaaggaaaaaggtttaattgattcacagttccacatggctggggaggcctcaggaaacttacaatcatagtggaagatgaaggagaagcaagtaccttcttc

SEQ ID NO: 737 - DNA, 120 bp, synthetic construct
  source 1..120: mol_type = other DNA
attactgtaattaaactctgtatgactttttttttttttaaacatgagtacactggtttcaaaatttcctggaaaacttatagcaggccaggtgtcatgggtcacatctgtaatcccaac

SEQ ID NO: 738 - DNA, 120 bp, synthetic construct
  source 1..120: mol_type = other DNA
atcacaggaaggagtatgttgaaatgctgcatttctcaaaagggatgtgtacatttctgggattttcagtgatgtgccagacgagtgtggtggtatgttttcaactatataccgagtaga

SEQ ID NO: 739 - DNA, 120 bp, synthetic construct
  source 1..120: mol_type = other DNA
taaacaatatttcatcagtaatgtaagcagtgctatactgagtagaattccctcctgttccgaaatgttacaatttgggttctccctgtgagaagtgagtccggttttaaaacctgtgag

SEQ ID NO: 740 - DNA, 120 bp, synthetic construct
  source 1..120: mol_type = other DNA
tgttttaaattgtatctactatttcaaagttaatggaattatactcctggggctaagaatgagggttctagggccaacctctactacctatgtggcttgtgcaaattagttgtccccttt

SEQ ID NO: 741 - DNA, 120 bp, synthetic construct
  source 1..120: mol_type = other DNA
gttttctgtaggtttcagatgaaattttatttcagatttaccagccacgggagccccttcacttcagcaaatttttagatccagactttcagccatcttgttctgaggtggacctaatag

SEQ ID NO: 742 - DNA, 120 bp, synthetic construct
  source 1..120: mol_type = other DNA
atttaatgactgttatgtgctagacagtgttttaagtgctgggtacatagcgattaacaaaacagataagaatccctaccctcatagagcttacattatgaggttgggggagggagatta

SEQ ID NO: 743 - DNA, 120 bp, synthetic construct
  source 1..120: mol_type = other DNA
caggatggtctgaacattgggaaaaatggaattgccacttagaaggaaagactgcaagaaaagcaagtatgtggggaagttcaggagctcagttttagacagttaagttttagatgctta

SEQ ID NO: 744 - DNA, 120 bp, synthetic construct
  source 1..120: mol_type = other DNA
gttctcagatactgtgtggtatggtatctagaggctctgttgaaattggccttagctagcaggagagactgttcatctgtaatcacaggaaaaaagtaaagtacgtaggtatagatacca

SEQ ID NO: 745 - DNA, 120 bp, synthetic construct
  source 1..120: mol_type = other DNA
agattctgggggaaatggagttattggaaataaaagtcttgggtatgtccattgcagtgagttaccagtggaaaatagaggacatgatcatttaggaagaaaacaaggaacttgggagca

SEQ ID NO: 746 - DNA, 120 bp, synthetic construct
  source 1..120: mol_type = other DNA
tgggaggtatcaattaaagatgatgaaatgcctgatttggaaaacagagtcttggaccagattgggtttctagactaaatacagtgtgggaatacacaatacacaacctactagcctatg

SEQ ID NO: 747 - DNA, 120 bp, synthetic construct
  source 1..120: mol_type = other DNA
aaaagcccacatttgaggttgcctatatagaactggcaggaaagtatatagaagcaggcaatcacagaaaagctgaagacacttttcaaaaagtgttgtgcatgaaaccagtggtagaag

SEQ ID NO: 748 - DNA, 120 bp, synthetic construct
  source 1..120: mol_type = other DNA
cagtgtgagggctggatatttgagtttctattcatgatacagtatgtatccctggaagatgtctctggttctagatcatttttcccagttcagtgagtaacgccgtgtatttatttgcta

SEQ ID NO: 749 - DNA, 120 bp, synthetic construct
  source 1..120: mol_type = other DNA
aacgctgacgtatgctgccttccctctctgtttcggctacctaaaaggaaagggccccctatcctgtaatcacgtgaattgcttcaccttttcaatcacttagaagattcaccctcctta

SEQ ID NO: 750 - DNA, 120 bp, synthetic construct
  source 1..120: mol_type = other DNA
gttacaacatacatgtatgacttacagcagtctactagtatcaatattctaccactctaagtgaagtgtgagaattttgctttcattttgattttggagggaaagggattggatagtgac

SEQ ID NO: 751 - DNA, 120 bp, synthetic construct
  source 1..120: mol_type = other DNA
tgtaacatcctggaacctttccttatgtcagtcagtcctggtcacctgtttggtccctggcagttttttctcatttctgttcagaagaagaaaaaggtaaagattcttcagatttaggaa

SEQ ID NO: 752 - DNA, 120 bp, synthetic construct
  source 1..120: mol_type = other DNA
tcttctttgttttgcatagatgctcttttgttctccccctcttgatgaatttgtcctattcattattcagctcaagtattacctccctagtcagatgcttacagtctgggttagatcctc

SEQ ID NO: 753 - DNA, 120 bp, synthetic construct
  source 1..120: mol_type = other DNA
ggatctgcacccgcaccatggcatccactccaggtggaatcggtgacagtggttttataaattgctaagtcctttattgtttcagtgacattttctaaaaggaattaaaagctttgaaga

SEQ ID NO: 754 - DNA, 120 bp, synthetic construct
  source 1..120: mol_type = other DNA
tggcaagactaccactgaagtgatgatgtgtctttctcagtacatcatatcaaggggttaatgatactgatcttaatcacttgattaaggtgataatctgctgggtttctcctctgtaca

SEQ ID NO: 755 - DNA, 120 bp, synthetic construct
  source 1..120: mol_type = other DNA
gattccctcatgtctagttggatttgtttgttggttggtttattgggtatgtgaagtatcactgtggttctagggagtcagacctgtacaaaaagatatacttcatgtcacttcctcctt

SEQ ID NO: 756 - DNA, 120 bp, synthetic construct
  source 1..120: mol_type = other DNA
acgaatgttacaatttactggcaataaagttttggatagaccttaatgaggacattattaagcctcatatgttaattgctgcaagcaacctccagtggcgaccagaatccaaatcaggcc

SEQ ID NO: 757 - DNA, 120 bp, synthetic construct
  source 1..120: mol_type = other DNA
tcaaatgccaagttagtaaaactaggattcatacttaggccatcgaatgcagaacccagactaggaactgctatgcaatgctgcttcccagtaaaatttgagatttcatgagttggtaac

SEQ ID NO: 758 - DNA, 120 bp, synthetic construct
  source 1..120: mol_type = other DNA
ctttccttcagatacacatactttttctctgttcccctctccctatcagctagattcccctaaatcactgatactggttttgtaattttgcatcggcatgtttgacaattggtatcacat

SEQ ID NO: 759 - DNA, 120 bp, synthetic construct
  source 1..120: mol_type = other DNA
tgattttgtagatgaggagactgtggcatagagagaggttaagcaattgcctaataaggtcacaaagctagaaaagtaggtattagaacccagatagtgtgtgttctcaagatggcttta

SEQ ID NO: 760 - DNA, 120 bp, synthetic construct
  source 1..120: mol_type = other DNA
cgttgtactacatctctgatcaaagaacaggagagttcccaggccagtacggaagaatgtgagaaaaataagcaggacacaattacaactaaaaaatatatctaagcatttgcaaaggcg

SEQ ID NO: 761 - DNA, 120 bp, synthetic construct
  source 1..120: mol_type = other DNA
aatggtcatccaaactcaaacttgagaaaatatcttgctttcaaattggcactgattctgcctgctttatttttagcgctatcacaggacccagagcctatgcccttttaaacttaccac

SEQ ID NO: 762 - DNA, 120 bp, synthetic construct
  source 1..120: mol_type = other DNA
tgcgttttctaggcatttacttacacgctttgtggtttacgctctcataaccttgtggttttatagtccttaaattattgtagcgcacgttacttaaatccagaagcagatgtgtacccc

SEQ ID NO: 763 - DNA, 120 bp, synthetic construct
  source 1..120: mol_type = other DNA
taagcaaaaagaacagtgataagtggacagtaaagagatgagaggggagtgggtcatgggtagtgaaatgagtgagaagcactggaagtgaaacgatttctaaacccagacattttcaaa

SEQ ID NO: 764 - DNA, 120 bp, synthetic construct
  source 1..120: mol_type = other DNA
agacaaaggggctaaagcccccatgcaagttcaaaatctggcagggcagtcaaatattaaagctccaaaatgatctttggatcattttgacttcgtatctcacagccagatcatgctgat

SEQ ID NO: 765 - DNA, 120 bp, synthetic construct
  source 1..120: mol_type = other DNA
actagtctctttgcatagcaagagtgacctttactccaactctgaataagttcctcatctccatcagaaaccacttcagcctgaattttattgtccatatcactatcagcattttggtca

SEQ ID NO: 766 - DNA, 120 bp, synthetic construct
  source 1..120: mol_type = other DNA
gatgtgaaatcatctttgcactttgagtagtccttgacacaatgcctcctgtccttgttgaagaagtacagacttccccttccatcatgtattatttatatcagtaccttttgtgacagt

SEQ ID NO: 767 - DNA, 120 bp, synthetic construct
  source 1..120: mol_type = other DNA
agtgttcaattgttaacttgggcttgatgattcagcagaaagaaatgatttgagttctggctcactggattaacagggccaaggagcaagtcctttgcaatccaattgtaattacagcca

SEQ ID NO: 768 - DNA, 120 bp, synthetic construct
  source 1..120: mol_type = other DNA
tgatatcagtaataactcattaataaaaaagcttgataataaaaactcccagtgcctgatgccagctgacagacactgggagttttcccaggtaccctgtgacctagagaaagcttggat

SEQ ID NO: 769 - DNA, 120 bp, synthetic construct
  source 1..120: mol_type = other DNA
aaaaaaaagaaatcatagtatttctccgtatgatggaattccatactcgggggagtgtcccacagggtaggcaagcagctatcacccatgtaatatggtactagtgttgaaatattttct

SEQ ID NO: 770 - DNA, 120 bp, synthetic construct
  source 1..120: mol_type = other DNA
agtttctacatatatatcaaggtggaggtcatcatcatttgatctccaaagtattgtaccaatttatactcccaacatttgtgtatgagagctaccctttctccatagtctcaactgtgg

SEQ ID NO: 771 - DNA, 120 bp, synthetic construct
  source 1..120: mol_type = other DNA
atagttcattctcatcccagtgatacataatttcccctctgtggaatgtcaagctcgcatatttatgggagtatttctgtactctctgttcttttcctatcctaacaccaatcccacact

SEQ ID NO: 772 - DNA, 120 bp, synthetic construct
  source 1..120: mol_type = other DNA
cttctagaaactatttgggcctgttttgagggtggagaatgggagggaatgattgtttgataactatttcttctatgattgttggcatggtttagttttttcttttatccgaagttttgg

SEQ ID NO: 773 - DNA, 120 bp, synthetic construct
  source 1..120: mol_type = other DNA
gcatctcacaaggctacagtgaagttgtcagctgacctcatggtctcatctgaggctgagttttcttccaaattcaactgatcgttgaaagaatgaatttccttgcagttgtagtattca

SEQ ID NO: 774 - DNA, 120 bp, synthetic construct
  source 1..120: mol_type = other DNA
taccttctcctcttctcctcctttcctccccttctcccctttttccctttcatcttttaattctcttggtctattttgtgcttttatttaatataagcagttttttttcactcgtggcag

SEQ ID NO: 775 - DNA, 120 bp, synthetic construct
  source 1..120: mol_type = other DNA
tgaattttgagctcttgtttaccttgttcttcaacccaggacactcagtcttcaagaagagagtatgtggataggcttttccaggcatcttaggactgataacatctcaaaatcactttg

SEQ ID NO: 776 - DNA, 120 bp, synthetic construct
  source 1..120: mol_type = other DNA
taaggttcctagctatatgcacagatctcactccaacctccacatcttgtctttctgtccttcatggtctttaaaatctaaaccccttggatatcaagattgggacatgttccagtatca

SEQ ID NO: 777 - DNA, 120 bp, synthetic construct
  source 1..120: mol_type = other DNA
tcataagtttattgctatttgtgtatcttccttggtgagatgtctgttcagatcttttgcttattttattttatttatgtatttttttttcgagtctcactctgtcacccaggctggagt

SEQ ID NO: 778 - DNA, 120 bp, synthetic construct
  source 1..120: mol_type = other DNA
tattctgttccatctatttgtctgttctttggccaattgataaaatatcatgttgtcttgattactacagttttataatgtcttgaagttggtagtgtgagttttctgacttcattcttc

SEQ ID NO: 779 - DNA, 120 bp, synthetic construct
  source 1..120: mol_type = other DNA
gcatatgaaccttgtatcctacaacattggtataataacttattagttccagatattttttattaattcattccaattttctacatcgatgacaatttcatctgtgaacaaaggcggttt

SEQ ID NO: 780 - DNA, 120 bp, synthetic construct
  source 1..120: mol_type = other DNA
tccataagtgtcagctggctgagaaataaagagagacagtacaaagagaggaattttacagctgggccgccaggggtgacatcacatatcagcaggaccatgatgcctgcctgagtctca

SEQ ID NO: 781 - DNA, 120 bp, synthetic construct
  source 1..120: mol_type = other DNA
ctgcagataaatcaacacacttgctttttctgttttcgttctctcttgtctcttggcttattagatggtgcctgcccacattgtgagggtggctcatctttacctagtgcacttagactc

SEQ ID NO: 782 - DNA, 120 bp, synthetic construct
  source 1..120: mol_type = other DNA
ggctaatttttgtatttttagtagagatggggtttcaccatgttggccaggctggtctcaaactcctgacctcaggtgatccacctgtctcagcctcccaaagtgctgggattacaggcg

SEQ ID NO: 783 - DNA, 120 bp, synthetic construct
  source 1..120: mol_type = other DNA
acccctttatcattttgtgacccactttttaatcctgataactttccttggtctaaagtcagctctgtctgaaatttatgtagctattcttgctttctcttaatgactatgttagtctgt

SEQ ID NO: 784 - DNA, 120 bp, synthetic construct
  source 1..120: mol_type = other DNA
tctgagttttggtgttttaattgaacattttatgtgattttgtcacatgattttgtctgaaagtatcttatttctctgcttttgaaggttaattttgtaggatgtttatatggtttggct

SEQ ID NO: 785 - DNA, 120 bp, synthetic construct
  source 1..120: mol_type = other DNA
tataccttgtaattttttgttggaagttggactcgatgtactaagtaaaggaacagcagtaaaaaggcatttaattgaaatgtggtgggagggaatgtgttctattgtctttagggatct

SEQ ID NO: 786 - DNA, 120 bp, synthetic construct
  source 1..120: mol_type = other DNA
gcctggcccagttttaattttttattttgcatataagttcaaagccttccaaagtgtttgtttatgatttattttcttgttaaaatctgttcttgttcattgcctgtttataagtgttgt

SEQ ID NO: 787 - DNA, 120 bp, synthetic construct
  source 1..120: mol_type = other DNA
gacttggaaccgtctgtcagaggaaaaaaggcatgcaaatagttactcatttgaccaaagcagaagaaaaccaaaatgtccaatgcctccaggaagaaaggcaaagatagagatactaat

SEQ ID NO: 788 - DNA, 120 bp, synthetic construct
  source 1..120: mol_type = other DNA
tgcctcttggcctctgcatgagagaaggtggcctttgatgtgttatttccagcactgtggtttactttagctttttaaattgtttctttcataatttctactatcatccagcgtcagtgt

SEQ ID NO: 789 - DNA, 120 bp, synthetic construct
  source 1..120: mol_type = other DNA
tgactgacagtggaaaagctttatgtgtgtgtattttccttgctgcctggtcaaggtctccaatcaatagtttaagactttttcacagttcattttcgaccaccgaagatttcctttaac

SEQ ID NO: 790 - DNA, 120 bp, synthetic construct
  source 1..120: mol_type = other DNA
cagggggaatgggcagcgtcactttttacatccagtcatattgtatgaaattgcaacaaattcaaaaagatgccatcgtgggagtgtggtgagtaaaaaacagctttcatgaaactcaaa

SEQ ID NO: 791 - DNA, 120 bp, synthetic construct
  source 1..120: mol_type = other DNA
catattagcttgataacttattcacagttgctggtgagttcaggcttaaatcatcagctgtcactcacaagtgtttacccttgaactttccgaatgagacatcaaacgtcttggtagtgg

SEQ ID NO: 792 - DNA, 120 bp, synthetic construct
  source 1..120: mol_type = other DNA
tagatttccatgtaattgagactgatttttcctattagatggaaagaaccttcctgatcaggactggtgttgggggaatgttttccttatgaaatcagaagcagagcttctgtagggccg

SEQ ID NO: 793 - DNA, 120 bp, synthetic construct
  source 1..120: mol_type = other DNA
aggccctatttactttttcctgagaaggtatgtgtgatgccaaagagagaaaagcagcatttgctaatttgggtaaaatgtttctttgggaagggcaaattgatgtacagttgtccctca

SEQ ID NO: 794 - DNA, 120 bp, synthetic construct
  source 1..120: mol_type = other DNA
tcctggcctcagtttccatacctcttagtgaggcctttgcgttatacttcagaaatattgtcagtatgactttgaagatgaaagtttgcccccaaaatcactctctgttatcattgtgaa

SEQ ID NO: 795 - DNA, 120 bp, synthetic construct
  source 1..120: mol_type = other DNA
attactaaccaaagaaatgcagggagaattgtaattcattaggttttgatggccaggaaagccaagctgtgttattagggtcatgacaatcacagacattacggatggctgacctgtagt

SEQ ID NO: 796 - DNA, 120 bp, synthetic construct
  source 1..120: mol_type = other DNA
ctctcatacagagcagattgctctttaccccttgatcagtggttgggtaatcccaggcttcctaccaccctctgaaaaagcatccaggtagttaacctgagttgagttagtcagttgaat

SEQ ID NO: 797 - DNA, 120 bp, synthetic construct
  source 1..120: mol_type = other DNA
gcaacattttaaaattttagtctataatatatatacaaaggctatgtgtatggggtgggggggtgtttgggggcagggggtgtgtatgtgtgtataacatgatgttgaaagggaacttga

SEQ ID NO: 798 - DNA, 120 bp, synthetic construct
  source 1..120: mol_type = other DNA
tatttagggatctttactgacatcccaagtatcagttacctttacgtcattcacacatatgatacacacctcatttatgtctatgctgaagtcagtgtaaaaaaaccccaggctgtgccc

SEQ ID NO: 799 - DNA, 120 bp, synthetic construct
  source 1..120: mol_type = other DNA
gcagtcacttgggattgtaaccttcattcctcagaaggaaggggttcttgatctcattgagatctaccagaaaattgctgaagccatttatcaagaatgcaacttacttcctagatagga

SEQ ID NO: 800 - DNA, 120 bp, synthetic construct
  source 1..120: mol_type = other DNA
agtgtgcaatgagatgatactgtactggaaggaacatacattggtatagtatttctggaaagcagtttggcagtgtgtgttaagaacttaaaagtttaatttttaggccaggtgctgtgg

SEQ ID NO: 801 - DNA, 120 bp, synthetic construct
  source 1..120: mol_type = other DNA
aggaaaaaaatttaaaagtttgcaatgcattccagaaataagtgtctcaaactttgctaatttgaattgttcatgccttctctgcctgccttctccaccttcctccctggggctggtgtt

SEQ ID NO: 802 - DNA, 120 bp, synthetic construct
  source 1..120: mol_type = other DNA
tcctgctacagagtaacttcctgatggttgccaaaagaatgaacagaagaatgaatgaatgcagcggttcttcctgccatctgataacagactattctttgatgttttcattttcaggat

SEQ ID NO: 803 - DNA, 120 bp, synthetic construct
  source 1..120: mol_type = other DNA
aaatggaatccctcaaaggatatgtacattttaaattatattaaagagtaccaaatttcccgcttaaaaaactttgatttcactttacagccccagtcatacagtatgagtgcctctttt

SEQ ID NO: 804 - DNA, 120 bp, synthetic construct
  source 1..120: mol_type = other DNA
cttctctctcactaatgagattgagcatcttttgagatgtttgtgggtcacttttctttgtccttctgtgaatcacctgtttatatcctttgcacattttcagtagtggttgcttttttc

SEQ ID NO: 805 - DNA, 120 bp, synthetic construct
  source 1..120: mol_type = other DNA
catggaaaatcccaaaagtcaccttataattgcccaggtggccaaaaatccagtgggtctcattggtgcagagaatgcaacaggtgaaacggacccatcccatagtaagtttttaaaaat

SEQ ID NO: 806 - DNA, 120 bp, synthetic construct
  source 1..120: mol_type = other DNA
aagtaggagaggcagattccctcagtgtcttcctcttaaacctcaatcatcgagacattagggggtattttctgttcacatttatctttttcaagccacatcttcctctaacaaatctct

SEQ ID NO: 807 - DNA, 120 bp, synthetic construct
  source 1..120: mol_type = other DNA
cttaaacatcacacgattttataaagcaagaaaaatgaaatgatctccctattcccccacggtgtaggcctccagatccttttctggcttttaggcaggacaattaacaatgtggattct

SEQ ID NO: 808 - DNA, 120 bp, synthetic construct
  source 1..120: mol_type = other DNA
ggttgtgattatgtttttgtcgattgtgatcctgaaactcaggaagcaaatggcaatcttgaccacaacatggagacaggaaatcaaatgcatttttggctaaaccagacttgggggaag

SEQ ID NO: 809 - DNA, 120 bp, synthetic construct
  source 1..120: mol_type = other DNA
ttcagtctttcattccctaacctccctttgaatgttagttacctattcccacataacaaagtgccccaaaacttaatggcataaaacaagcatggacattgttagttcacccagttctgt

SEQ ID NO: 810 - DNA, 120 bp, synthetic construct
  source 1..120: mol_type = other DNA
aactgccatgagccctaaagaaggtttgctacagctattttacagatggggaaaactgacagagagatattaatgaattgcccacatgcaaatatgtgctgagtcttggatttgcatctt

SEQ ID NO: 811 - DNA, 120 bp, synthetic construct
  source 1..120: mol_type = other DNA
atatattaactcgtaactggggagtctaagaataaattctcttcagccattgctgaatctaggggctcaaatggtgtctctggacacagtatcacactctactctgcactcttctttatc

SEQ ID NO: 812 - DNA, 120 bp, synthetic construct
  source 1..120: mol_type = other DNA
tggttcttccagaacattctgcaagctcatggaccagttcatttgagaagaaatagaggagttaggggagagagaagcttcttaatgaaaataaccttggtagctagtctcaagattagc

SEQ ID NO: 813 - DNA, 120 bp, synthetic construct
  source 1..120: mol_type = other DNA
cccacatccaagttaaaattcatccaacactcaatctcccagctatcctgactgctcctatacaggtatctctcccactatatatatatcaagtgctattagtggctattatttgttggg

SEQ ID NO: 814 - DNA, 120 bp, synthetic construct
  source 1..120: mol_type = other DNA
gttgatccgactatggatgtcttgcaactctcaaaaaatcacgtgtgaaagttaagcattagttccgtgtaaaatactgtgctagaaattgtggaggatgcaaagtcacataagactgtt

SEQ ID NO: 815 - DNA, 120 bp, synthetic construct
  source 1..120: mol_type = other DNA
aagacatcagacacgtcaaagccacaggaggaaaagcccctacattcatgcacaacagaaaggctttgttttcagtaaacacgcacatcttcaaagaatggttgcaatccaaattgttta

SEQ ID NO: 816 - DNA, 120 bp, synthetic construct
  source 1..120: mol_type = other DNA
ctgtgcctctcaaggcctaaggtcctctctctgtaaaagaggggactacatgagatgatttcagctcaaatatccttggagactctcattgttttctagttgtaaattatgctttttcta

SEQ ID NO: 817 - DNA, 120 bp, synthetic construct
  source 1..120: mol_type = other DNA
tctccctccgggctggaggctagccaccccctcccaactcattcatttgtttaatatgtttagattttcttaatcagtgttgtgattatctattgctaagtgcataagtgtcacttcatt

SEQ ID NO: 818 - DNA, 120 bp, synthetic construct
  source 1..120: mol_type = other DNA
ggtgagtgatggactgttcgagggcaccttccacaggaatctttgtcagtttctctaggcatgaatcttgcaaacaatataaaagtcttcaagcaacactgaaaaaaaaaaaagagtacc

SEQ ID NO: 819 - DNA, 120 bp, synthetic construct
  source 1..120: mol_type = other DNA
ctaccttatccctttagttttccctgactcttctgggaaaacgaactgctctccaatctgtattcaatgcattcctctagaatagcttattgagtacttactatgtcactctctttctgc

SEQ ID NO: 820 - DNA, 120 bp, synthetic construct
  source 1..120: mol_type = other DNA
atgcagtcttcccttcaatctccaacagtgctgtgagatcagtaggatgactttccttttatcctatgataggtcatcctactaatgactgtcctatcatttcatagataggacatctga

SEQ ID NO: 821 - DNA, 120 bp, synthetic construct
  source 1..120: mol_type = other DNA
aaaactgaccttttccacttctgattcgactccagacacaggtctagtcttgtttcagaaccctctgcttttcatttcatttgaatccatgttaaaacacaatagcctacatatccaatg

SEQ ID NO: 822 - DNA, 120 bp, synthetic construct
  source 1..120: mol_type = other DNA
aaggtcaggtagattttctcctaagagttttatagttttgcattttacatttagttctgtgatccattttgttaattattgggaaggatgtaagatctgtgtctagattcactttttgca

SEQ ID NO: 823 - DNA, 120 bp, synthetic construct
  source 1..120: mol_type = other DNA
gaccacctgtgctcaagcaatcctcccacctcacccgcctgagcagctggaactataggtgtgtgccaccatgcctggctaatttttgtattttttgtagatacagggtttcatcatctt

SEQ ID NO: 824 - DNA, 120 bp, synthetic construct
  source 1..120: mol_type = other DNA
ttcctttattatcctttaaacatctatgggctctgctctgtattgaagtctcttctcatttctgatattagttgtgtccttttttttccccctttagcttggctagagttttactgatgt

SEQ ID NO: 825 - DNA, 120 bp, synthetic construct
  source 1..120: mol_type = other DNA
gattctgagaaattttgccagttttatcacggctcttatgaagcagctagttttcggaggtcattcctcttgccattttcactgacatcatttagcaaaagctttttgaccatttgggct

SEQ ID NO: 826 - DNA, 120 bp, synthetic construct
  source 1..120: mol_type = other DNA
caaaatacatgtttgttgcccagttttatatctggactacccacactgtaagggtaccacaaaaagagaaggaacaggaacaaaggaaaggctaccaagcattcccatggaaaagttgaa

SEQ ID NO: 827 - DNA, 120 bp, synthetic construct
  source 1..120: mol_type = other DNA
cttctattatctaatcttgtacgtgtttccaattagctctcttgtatattttcatcatctttccatgctcaggattgctaagtgccaatatatctactctatcccagagcgcccctccac

SEQ ID NO: 828 - DNA, 120 bp, synthetic construct
  source 1..120: mol_type = other DNA
gaagtggttaagctggggggcagactctcacagatggattacaaaagtaatgaaatagttttcttagtggggtggcattcgcaagaactaccttaatgtttttggtaacagcatcattta

SEQ ID NO: 829 - DNA, 120 bp, synthetic construct
  source 1..120: mol_type = other DNA
acagttacagtaaaagcagaaccacacaaatctttatttaaaagccgaaatatcagccttctctctctcttttgctatttgaaaggtagtcttcaatttggcaggcaactgcttctctct

SEQ ID NO: 830 - DNA, 120 bp, synthetic construct
  source 1..120: mol_type = other DNA
gttacaatagtgttgcttgtgtaagcaggttagagtgcacagtgtccccaattgttcctggcactgcaaaaccaaattaaacaattccacaaagaattctgacatcaatgtgttttcctc

SEQ ID NO: 831 - DNA, 120 bp, synthetic construct
  source 1..120: mol_type = other DNA
caggcccagagaagaatgattccccaaggtctcacaacttatccgtatccatctgaattcacagaaaaaactgggctagaataagaaaaacaccacatatcgtgaatattctttcaggat

SEQ ID NO: 832 - DNA, 120 bp, synthetic construct
  source 1..120: mol_type = other DNA
gcctccatatatcctctacccagtcgttacacctttcttcttccacaatggtaactactatcctgacttatggggtagtaatttccttgctttcaacttggagtcataaacactatagtt

SEQ ID NO: 833 - DNA, 120 bp, synthetic construct
  source 1..120: mol_type = other DNA
ccacaaaaagtaatttttccccctttgtaaagttcccattttgtcaagggtcaaagagaacaactgatgtccttccaagtttggcagcagtggctgaaggctgtccgtatttttaattaa

SEQ ID NO: 834 - DNA, 120 bp, synthetic construct
  source 1..120: mol_type = other DNA
agaatagttagaatatgcttcattgagaagatgaaactggagctaagatttgaaacaggtgacgaatttagtcatgggatgtttggggacagagtgttcaggcagagtaaacagccagaa

SEQ ID NO: 835 - DNA, 120 bp, synthetic construct
  source 1..120: mol_type = other DNA
aggaaacgatcagttgtgccaaaagctgatctatcaagtaaaatgagagctaagtagtagttaacacagtagaagtcattggtggttttgatgggaacagttttgctatgtgtaggggtg

SEQ ID NO: 836 - DNA, 120 bp, synthetic construct
  source 1..120: mol_type = other DNA
tcaaaagataaaagctctaggttaagggaagagaatatagaaccaacttaccattttcatctactgcaagcacacttgctccttttcccaaaagttcctgaaccaccattgttagcccat

SEQ ID NO: 837 - DNA, 120 bp, synthetic construct
  source 1..120: mol_type = other DNA
gatactgacagtactcacgtttgcaaggctgcgttggttgcattgatgaggtttctatctgttatcttttccagtattaacaaggcactagtttcatgaccctataattgtggcagataa

SEQ ID NO: 838 - DNA, 120 bp, synthetic construct
  source 1..120: mol_type = other DNA
attcaggcaatccaactccacagccagtgttcttaaccactatgttataaggccatggtaaagtagactcctcaatagtcagggcaaactaaaacattgtatccctaaatgaaaatgtgg

SEQ ID NO: 839 - DNA, 120 bp, synthetic construct
  source 1..120: mol_type = other DNA
tcaacttttaataatgggttttctgtaaattctctcacaccagccagtagttaaaatttatttcttattgaaaataaaacctttttggggggtagggcccagacgggatctcactctgtc

SEQ ID NO: 840 - DNA, 120 bp, synthetic construct
  source 1..120: mol_type = other DNA
aattcaaaggagatactggcaaaaatcacaggtacatgtaagtgtttaaaggaaaaatgtaaaagtctctccctcatcccatctcccagatcccctctctggaatataaccattggtagc

SEQ ID NO: 841 - DNA, 120 bp, synthetic construct
  source 1..120: mol_type = other DNA
ccaccacggccaacattttgtttttattttaggaagtatttttgtaggacaatttcctaccaaagtgatattgctgtggtaaaggagaagtatccagccttggtattcttgggggattgg

SEQ ID NO: 842 - DNA, 120 bp, synthetic construct
  source 1..120: mol_type = other DNA
tcagttcttttctctaatctagtagttttcaagtggattttgcccatcagcagatattgtatgtggcaatgcctacagacatttttgtttatcacaactgaaggtggggcagtgcaactg

SEQ ID NO: 843 - DNA, 120 bp, synthetic construct
  source 1..120: mol_type = other DNA
tgcatatagccaacacacattaaattccttccagctcaaattcagcatcaccacaattttgctacaggctgaaaatcagacacatttgttatgatctttaaatggcaaccaggcatgcag

SEQ ID NO: 844 - DNA, 120 bp, synthetic construct
  source 1..120: mol_type = other DNA
tttttatggtgctatcagtactcagctgaaggataaccaacagtataacaggacaaacctcaagaacccaaaatgttctaacggcaaaagaatacaactcccaactttggcataaggact

SEQ ID NO: 845 - DNA, 120 bp, synthetic construct
  source 1..120: mol_type = other DNA
acctcaaaaatacttcatggcttatctcagaacacctttgacaactagtgtcttggctttagcatgacaaaggacaggagtgagcctacgtactaagtattattagtacgtgagcctata

SEQ ID NO: 846 - DNA, 120 bp, synthetic construct
  source 1..120: mol_type = other DNA
acataacctagttcagttctaggtaatatgaggtcataaaagctttttgaaaggaaagagcatatttctgcttacccctctatgcaacgctgtccttccccacttatctttggcatctac

SEQ ID NO: 847 - DNA, 120 bp, synthetic construct
  source 1..120: mol_type = other DNA
gactactgagatgccgataagtctagaggctgctgggaaatacttttatctttaataatgaaaagcccccattccttcctgattttagatgcaatccttaaaagcagcagcaataatccc

SEQ ID NO: 848 - DNA, 120 bp, synthetic construct
  source 1..120: mol_type = other DNA
tattaaatactaatagttattaaacttgtggcttaaatcacctctcctaccctagtccaatctgtatgctgcactctgccagcagctctcacagcttagcaacaaaaaacagggtcgtaa

SEQ ID NO: 849 - DNA, 120 bp, synthetic construct
  source 1..120: mol_type = other DNA
ccccacttgaacatctgatagctttgaagggcggctctgggagtaacagtgggtgttatcaatagtcttctaaaatgtaagcttcccaaaggactagaaaaaaaatccaagacatatatt

SEQ ID NO: 850 - DNA, 120 bp, synthetic construct
  source 1..120: mol_type = other DNA
tgtgggacaggctggagcatgagggaggttttaagccaggcacaaagttagtttcaaacactagttaataaatctatttttatttcctttttcacacagaagctggtagtctaggaccta

SEQ ID NO: 851 - DNA, 120 bp, synthetic construct
  source 1..120: mol_type = other DNA
ttcagtgctccacatcaactgcaaagacagctagcaacttgagtcagtgcttgaatattcggatttctcaaattaaactgaccatacccaccccataatgtgccatagctaaaaaagaag

SEQ ID NO: 852 - DNA, 120 bp, synthetic construct
  source 1..120: mol_type = other DNA
agcagcaagagataaacttgctctgggcctcactgatctctttataatgaatctgtgtagaaacttgactacttaagcttgactatctcaaagattaaagtgactgtaggtcacggaatt

SEQ ID NO: 853 - DNA, 120 bp, synthetic construct
  source 1..120: mol_type = other DNA
aatcaaggccagtctccttaagcctcagatcagtatgttttcactgtaccaagttgtcccgaatgggagagtttcgtgtaagaaattaaagtaacttctgaaaacctcctagagatagat

SEQ ID NO: 854 - DNA, 120 bp, synthetic construct
  source 1..120: mol_type = other DNA
ttactatgcatgtctgggagaggtgatggtgtttccaaggactcaaagggcaaagaagtagaaagcttcaagaatgctttcttagttatttagaacatgataggaagtatcagtagggag

SEQ ID NO: 855 - DNA, 120 bp, synthetic construct
  source 1..120: mol_type = other DNA
aacacaaataggttattagatattttcagtaaaccagcagccatcaagtcggctatgaaggcagtactcacagccaagtgtaaagggcttattgttgctctattatctgaatcactcagc

SEQ ID NO: 856 - DNA, 120 bp, synthetic construct
  source 1..120: mol_type = other DNA
taaaaacgtcctctgcagaagtggagtctcccttgttaggaggggttgtgaaataaatgtgccttttggaattccctaaatatatgggggagatattcctttcacagggacttttatttc

SEQ ID NO: 857 - DNA, 120 bp, synthetic construct
  source 1..120: mol_type = other DNA
gtctgtcagacagctttttttttcatatgtgaaggctatcttttacacagtctctatctataccaccacctattctactaaacaatgttggataggattaaacttttcgtggtggtgagt

SEQ ID NO: 858 - DNA, 120 bp, synthetic construct
  source 1..120: mol_type = other DNA
tcatcagggatattggcctaaaattctcaaggctttggtatcaggatgatgctggcctcataaaatgagttagggaggattccctctttttctattgtttggaatagtttcagaaggaat

SEQ ID NO: 859 - DNA, 120 bp, synthetic construct
  source 1..120: mol_type = other DNA
ggatgtgaaggacctcttcaggcagaactacaaaccactgctcaatgaaataaaagaggacataaacaaatggaagaacattccatgctcatggacaggaagaatcaatattgtgaaaat

SEQ ID NO: 860 - DNA, 120 bp, synthetic construct
  source 1..120: mol_type = other DNA
agacactatctcacgccagttagaatggccatcattaaaaagtcaggaaacaacagatgctggagaggatgtggagaaataggcatgcttttacactgtcagtgggagtgtaaattagtt

SEQ ID NO: 861 - DNA, 120 bp, synthetic construct
  source 1..120: mol_type = other DNA
acagcagaaaaaaaaagcactgaaatagcactggtaccagtgatcttgggccataaaagtgaaatagcctctgtttattcatttgatacatggagaagccagctaaataatctaaagtgt

SEQ ID NO: 862 - DNA, 120 bp, synthetic construct
  source 1..120: mol_type = other DNA
tctaaggtaataagactggtgttttgttttgtttcacaaactaattctgaggacatgtcaggaaaaggaagtgtttcagtcagtgtgtaaactctgtacacagccttccttggtgccgaa

SEQ ID NO: 863 - DNA, 120 bp, synthetic construct
  source 1..120: mol_type = other DNA
tgcatttcaaactatttaaatttctcctactcttaccctaccactcatgaaccctactattttgagttctgaggcaagttcagactgattcaaattcatgtgtcccatggctagtcagag

SEQ ID NO: 864 - DNA, 120 bp, synthetic construct
  source 1..120: mol_type = other DNA
tgagggacataaaataatctacatacacacagagcaatataactgttgatgatggttatctcaggagagctggtatgaggggaatttcttccttataatcaggaaaaacagccctcaacc

SEQ ID NO: 865 - DNA, 120 bp, synthetic construct
  source 1..120: mol_type = other DNA
gtggcttatattttccactaggctcccatggaacaaatcattgaatcaataaatgatggcactcgacaggctctctgggattttgatacttaataaagataggaaacagaggctcccatt

SEQ ID NO: 866 - DNA, 120 bp, synthetic construct
  source 1..120: mol_type = other DNA
aatgtgggagacaatctctcagcggaatctggatcatgctgagctgtacccaataaccagtctgtgaaagtagtggtaaaggactacagatggtgataaaaggtataacttattttaagc

SEQ ID NO: 867 - DNA, 120 bp, synthetic construct
  source 1..120: mol_type = other DNA
ttgatggggttgtttgaaaaacccctagaattttagccacaatccaacataaaaaaagttacttataaaaatggttttgaaattaaagagtttatactaaattaacatttgtgaagaatc

SEQ ID NO: 868 - DNA, 120 bp, synthetic construct
  source 1..120: mol_type = other DNA
agtcaggtggaaaaaaacataaaagtgatattaagatgctcttttggcagataggacaagaagggacctttatctttcttccaccagatcagctagtaaggctggtgctgagaataggta

SEQ ID NO: 869 - DNA, 120 bp, synthetic construct
  source 1..120: mol_type = other DNA
tctcaaactgttgacacacacagttttgcttatactgtcatctctttcaaaccaattccaactgccttcaattctttcctgtatggttctaatgcactctgtgtcaattcctactctaag

SEQ ID NO: 870 - DNA, 120 bp, synthetic construct
  source 1..120: mol_type = other DNA
gagtttcttgaaaaaacataggttctatggggctttacatttccatagtcataatttttggagggggggaagtgatagcaagtatagaggcatttataaggccaaggctgtggttggtag

SEQ ID NO: 871 - DNA, 120 bp, synthetic construct
  source 1..120: mol_type = other DNA
cagaggccatgagttttagctgaagtttgttgctcgtatgaaccaactgcctaatttttccctggtggtactatttaaaacttagtccaaaatcttccaatctcaaactttcctcttcct

SEQ ID NO: 872 - DNA, 120 bp, synthetic construct
  source 1..120: mol_type = other DNA
ccaccacgccagacctgaacccaacacgttctaaaaggggttattaaattatccatactggacccatctgcattaatttttaaaaagcaggatagagaccatctaaaaattttgaggggt

SEQ ID NO: 873 - DNA, 120 bp, synthetic construct
  source 1..120: mol_type = other DNA
gtaatttggttaaagtttgatggtgggcataacttattagccagctatttttctccaaaagtcaggtttctcaccttcagcactactgtcattatggactttgctggggaaacgtgagaa

SEQ ID NO: 874 - DNA, 120 bp, synthetic construct
  source 1..120: mol_type = other DNA
tgctatgtgcaaaggggtatttccattcttatcctcacagtcgattacagctcctgcaatataggacttactgtcagacactggaccatataaagatcaggtcaaacgtactacatgaaa

SEQ ID NO: 875 - DNA, 120 bp, synthetic construct
  source 1..120: mol_type = other DNA
gagagcagtcatgtgtagtggggttttcccatctttactctggggggggaagaaaaaaattactcactctactatatccataatgtgtaaaccttagttttactttgaataccctcttgc

SEQ ID NO: 876 - DNA, 120 bp, synthetic construct
  source 1..120: mol_type = other DNA
cagatctcctacttaccacaagcaagatttttggacaagttgcctaacttctttgtgccttcagttcctcaactgaaaatgaggataataccatctacatcttactggtctgttgtacag

SEQ ID NO: 877 - DNA, 120 bp, synthetic construct
  source 1..120: mol_type = other DNA
gagccaccatgcctggccagctatagccaatttttacagacataaggaaaaacatagattccattgataagaaggataagaaaaacaagaggaaaactaactaaacaacccccacaactc

SEQ ID NO: 878 - DNA, 120 bp, synthetic construct
  source 1..120: mol_type = other DNA
caaaacaagcatttggtgtattttgcttagctgaccaaaatctattcttaaagaacaatgtgggtgggaaaacgtgtgcatataaatgaagcaatcagtgcagtaaggctcatgtcaagc

SEQ ID NO: 879 - DNA, 120 bp, synthetic construct
  source 1..120: mol_type = other DNA
catgccaaaatggcagtgcataaaacaggaagcccaatctctaccttttaaagacagcatcatgtgaaccaaaaaatgcatagtagctgacgacacaggtaaagttccgtaatttccata

SEQ ID NO: 880 - DNA, 120 bp, synthetic construct
  source 1..120: mol_type = other DNA
aaaatagcaatgctcaaaatctggattgcatgtgctctcttataaaattatatagtgaaagcatatttatttgggtacagaatattcattcatttgaggcaaggtctcacctgtcgccca

SEQ ID NO: 881 - DNA, 120 bp, synthetic construct
  source 1..120: mol_type = other DNA
aatgaaccaccttatcagttttgacaaatgtatataacataaacccctgccaaaatacaaaacattaccatcatcacataacgtcccttcatgcccctttcccagttgatccctcctcac

SEQ ID NO: 882 - DNA, 120 bp, synthetic construct
  source 1..120: mol_type = other DNA
agccttgtttttctatttctaataaataagggaatagtttatatgattagtgtgtagtaaagaatctgacctctcccaaagagaggtctgtcctttgcccctggcttcagggaggtaggt

SEQ ID NO: 883 - DNA, 120 bp, synthetic construct
  source 1..120: mol_type = other DNA
ctctcgtcctttcagtagctctgttgccatgatctccacttcctctggttccatttggcaggcatctgccagggcctggcctgttgccatgatgaagtttgcatcagctgccaaggtgcc

SEQ ID NO: 884 - DNA, 120 bp, synthetic construct
  source 1..120: mol_type = other DNA
tgcacattaaagtgaaagtgtgttggggaacacagcagtatccttattgccactagcccccagcatccttggggctcctactgtcacacagcagtctaggacatactagactacaagatc

SEQ ID NO: 885 - DNA, 120 bp, synthetic construct
  source 1..120: mol_type = other DNA
tatctaatgcacagccaaggctgagaaccattctaggtctttccagcccatggtgatccataccccctctgcactctcaggacactaaatatctgttattatttggtgttttttgtttat

SEQ ID NO: 886 - DNA, 120 bp, synthetic construct
  source 1..120: mol_type = other DNA
cctgtctagaacagaagctttgcctgagcctagcccctaagttatgattgctgagaagttctccccctcatcctgctgttttttatgacacttacgtaatcacagattatatttagtcta

SEQ ID NO: 887 - DNA, 120 bp, synthetic construct
  source 1..120: mol_type = other DNA
tggacatctcacatgatctctgtgggccactatttcctcatgaataacccaaaaagacctaactaggtgtcattaaagaccttccagcaataaagtgttataagaaacatgagacagagc

SEQ ID NO: 888 - DNA, 120 bp, synthetic construct
  source 1..120: mol_type = other DNA
tcttgaccccatgggtggaaatttcatgcccttcccaggcttccaggttgagaagtgttcttactcagtacagtcttctagattggtgatctttattgattggatatgtcatatatatat

SEQ ID NO: 889 - DNA, 120 bp, synthetic construct
  source 1..120: mol_type = other DNA
gcaggataacgcccttgtaatacacattttgccttgaatacacacaatgccttgaaatatgcattaaagtgtttttggatgatggaacatcattttggagttactctcaaatggttcaga

SEQ ID NO: 890 - DNA, 120 bp, synthetic construct
  source 1..120: mol_type = other DNA
gttcttatctaacttgtctctcccttgaacaaatcctattttctttggtcctatcatccagagatgaagcgccctggttctttttttgaggttgaaacatcttcaatcatggactaccca

SEQ ID NO: 891 - DNA, 120 bp, synthetic construct
  source 1..120: mol_type = other DNA
aggagaaaggcaaaagttacccagatcacaccaactgcacttgacaaggccacccagttctttctgaacctttcagacagccagtcatttactaagaaacattggctgagttttgtggca

SEQ ID NO: 892 - DNA, 120 bp, synthetic construct
  source 1..120: mol_type = other DNA
gaaacaggggagcatttccttattttccaactgtgtttaggaagtgggagcccagctcccttttaaaagaagagacaatgttaggattaactgttgtctacaaaatgggtaccccaaaat

SEQ ID NO: 893 - DNA, 120 bp, synthetic construct
  source 1..120: mol_type = other DNA
ttctgctggtcagaggaccgcactttgatttggggtctagagtgtctggtgaggtatatagcttcctactcctaggagtgttcaagcaggagctggatgacaatttctcaataaagtcaa

SEQ ID NO: 894 - DNA, 120 bp, synthetic construct
  source 1..120: mol_type = other DNA
tctggccttgctaaattccttttgatgagtgctaaccaaaacaaaaaaaaaaagtaagaacttttggcagcctctctggagtatgaaaaagcacccaggaaacaaagccacactcaggat

SEQ ID NO: 895 - DNA, 120 bp, synthetic construct
  source 1..120: mol_type = other DNA
tgctctgtagataacctccctccacctctccagctgggaagaagtgtctcctctagtcacattcagccagactacataacttcccactcctttgtgtctaataactgtctcatttcagct

SEQ ID NO: 896 - DNA, 120 bp, synthetic construct
  source 1..120: mol_type = other DNA
acttccccaaaattcccttcattgcgggccacatcagacctgaagccaaaaaaaacgggattattttctagatcaggtaaagttcttcttagcaagccaaagaaaagagggagggtagac

SEQ ID NO: 897 - DNA, 120 bp, synthetic construct
  source 1..120: mol_type = other DNA
ctctattgccacaaactcaatgtggctactccccatcactcccaccctgcacacggctgttctaagccaggcaagcctctaatcttgtgccagccttagatacacgaaatactctggaag

SEQ ID NO: 898 - DNA, 120 bp, synthetic construct
  source 1..120: mol_type = other DNA
ttcatgagaagcccttgttctgcagccctgggtcaaaagaagtcattgttttatcttccaattatccacaggtagactgatccctggcatactggtcttctcattaaacaacagattttc

SEQ ID NO: 899 - DNA, 120 bp, synthetic construct
  source 1..120: mol_type = other DNA
cagacctcagattttaagaagtaactatttttagtttgggctgtttattttggctgtttagatttctctgttctggctgtgctggtgagaagtgctgctgtcaaaccatggaggcttttg

SEQ ID NO: 900 - DNA, 120 bp, synthetic construct
  source 1..120: mol_type = other DNA
cagtttagtttgttcgcaacacagcagccacagtgattgttttagaactaaagtctgttcacacttaaaccctccaaagggttctcatctccctcagaataaaatccaagatcataacca

SEQ ID NO: 901 - DNA, 120 bp, synthetic construct
  source 1..120: mol_type = other DNA
caacacgaggagactccatctctatatttcaaaaacatattttttaaaaaagaagtaggactctaatcctcccactgccctgtttaaaaacctttagtgacttcccactgcctgctccat

SEQ ID NO: 902 - DNA, 120 bp, synthetic construct
  source 1..120: mol_type = other DNA
ggactgttcttcagaaacttcagagcaggcgagaatgtaagagaagctccaaggaagaggcgcccagagtctttctgtcattgtcaattctggctgcatgaagatctgcctgccctgtgt

SEQ ID NO: 903 - DNA, 120 bp, synthetic construct
  source 1..120: mol_type = other DNA
ctccttaaatctacttccttgtaagttttcccagggatctcttacccttttattagaaagtggatgaaattctacctcttccacaaaaccttccaggtagtttgggaggatctgatggct

SEQ ID NO: 904 - DNA, 120 bp, synthetic construct
  source 1..120: mol_type = other DNA
atcacagcccattcccatgggtgctatagactagactgtgggtctgaagggcttcctttctctgggcatcatgaggttccacaagaagacccactctaccaacttgtattgcttcagttt

SEQ ID NO: 905 - DNA, 120 bp, synthetic construct
  source 1..120: mol_type = other DNA
ctaatcaatcagtattaacaatctgccctgtgggcagagaggcatacacctatgggggactgcgtgcattttgtcagagacccctggtcaggcctactttggagtgaccagtcaacatac

SEQ ID NO: 906 - DNA, 120 bp, synthetic construct
  source 1..120: mol_type = other DNA
tttagggtacatgtgcacattgtggcagttactccttttatctgtgtctcagattgggtccctgagcaacatgtttgaaggaaagtagtggatggctaggtcttttttttttttgtttgc

SEQ ID NO: 907 - DNA, 120 bp, synthetic construct
  source 1..120: mol_type = other DNA
aatgcccagtttactatggaaagcaaagcttgactctgctataatgtggaatgcacgtggtgtttccacagagtcaaaagcgacatcaaatgccaactggaactgttatgcttctagaac

SEQ ID NO: 908 - DNA, 120 bp, synthetic construct
  source 1..120: mol_type = other DNA
gggatggatgtcactgaggaaactggatctggacttgccacatattagccttaaaactctgtgcattcagttgaagcaaattcactttgagtctcaataatgtgttgtgttgcttgtgta

SEQ ID NO: 909 - DNA, 120 bp, synthetic construct
  source 1..120: mol_type = other DNA
ggctttctgcaaacttatgtgtttggtgtggtgaagacctatttttcaaaataaaatattctcatatggaaatctgtgcattcgaagacatctgttttcacaatgtggggctccttgtgc

SEQ ID NO: 910 - DNA, 120 bp, synthetic construct
  source 1..120: mol_type = other DNA
gctcaggagagcacttactgaggcaatagccttccagaaatctctatatttcactcaactccttgcagtggcctaaatgcatttcctatctctgctcgcagttgttgaaatgtgaggact

SEQ ID NO: 911 - DNA, 120 bp, synthetic construct
  source 1..120: mol_type = other DNA
aaactccacaaacttcttgacctcgaggaagccaccatctccctctactcaattccttcaatagttgaggccccgaaataaggtactgtcctgatttcacaccacagcctgctctgagcc

SEQ ID NO: 912 - DNA, 120 bp, synthetic construct
  source 1..120: mol_type = other DNA
aagaaaaaataaaaagaaaaatgcctgaggcttcaagacatgggctgtactctgtggatgggggagccacaggctggctgggctttactttccagccctccatccagatacttgtgggcc

SEQ ID NO: 913 - DNA, 120 bp, synthetic construct
  source 1..120: mol_type = other DNA
tggcctgtgtatagtttaaaggtgtaaaattatgaagccgataaaaactatagcttcccttgctctctcccccttgacctgtctaaagctcttctctcagaaaggaaccaataaacaggt

SEQ ID NO: 914 - DNA, 120 bp, synthetic construct
  source 1..120: mol_type = other DNA
tgttgaaataaaaggaccctgtgatcctctcctgggctaggattttaaaaatagtaacttcacagagaagcttcttccagcatggaaaaaagcaatcagaatttcttgagcttcacccag

SEQ ID NO: 915 - DNA, 120 bp, synthetic construct
  source 1..120: mol_type = other DNA
attaattcagcctggttctgcttgtcctcttcttggtccagataaatgggatttctgcagcagtcactggctatttgcatttatgagatgtttgtggtttatccacggttgtttcttatc

SEQ ID NO: 916 - DNA, 120 bp, synthetic construct
  source 1..120: mol_type = other DNA
acaatgactataacaatgaaaaagaagttgcggtttcccctcaatgagcatatactggagagcctgttagcgttcagctcacttaatcatccctacagcctaaggaacagggaatattat

SEQ ID NO: 917 - DNA, 120 bp, synthetic construct
  source 1..120: mol_type = other DNA
ttaacgttggttgatagtgaatgggtggagtgtggctttgtactgggtttatacgagattcatagagtggaagcatggtttgcccaagatggctccaactctttagaaatgtctgaactc

SEQ ID NO: 918 - DNA, 120 bp, synthetic construct
  source 1..120: mol_type = other DNA
tctaggctcactgaccttactgggcttttaattcctcccagctgtagccaaacaaccctgtgagtctctaatctttttggcacaaagaattatcctacagctgtacctgcatttgctatg

SEQ ID NO: 919 - DNA, 120 bp, synthetic construct
  source 1..120: mol_type = other DNA
tcgaaaaacaaaacaaaacccctatcccagtgatctagaagcttattgctgctctctatggacaagaaattggactgtgggctcaccatttccctgttctcttcctaacccccgggcttc

SEQ ID NO: 920 - DNA, 120 bp, synthetic construct
  source 1..120: mol_type = other DNA
cagaaacaaagactaatcagacaaagtaggtgcagctgcagtgaaggagacccataagcaagtgttacaatggagagaagcacaggtgataggggagcccagagaaggacattgcactca

SEQ ID NO: 921 - DNA, 120 bp, synthetic construct
  source 1..120: mol_type = other DNA
ttcttcctttctcttttccaccacccccactccctgccctgccatagactatggtaagaaaaaaaacagagaaatgagttcaaagtggggaagtgattcttttttcacagaaggaggtta

SEQ ID NO: 922 - DNA, 120 bp, synthetic construct
  source 1..120: mol_type = other DNA
tcatatttaacaggaagaggattttattactcttaattctactgaagttcattaagtctgctactctctcattcctatacacctccctcctggtagagaagggtcctgccacctacctga

SEQ ID NO: 923 - DNA, 120 bp, synthetic construct
  source 1..120: mol_type = other DNA
atttagttcttcagctgagactgctctgctgagttccagacctatttttctgtctgctaccttgacatatccattgggatgtctcaaaggcacatcaaactcaccatgcccaagacaaag

SEQ ID NO: 924 - DNA, 120 bp, synthetic construct
  source 1..120: mol_type = other DNA
agtttagaatccttggaccatgagaggtagtgtatattggaccccatacctatataaggcactgataggattttgatttttcacttgagacatttttcctttctcccagggcctctagca

SEQ ID NO: 925 - DNA, 120 bp, synthetic construct
  source 1..120: mol_type = other DNA
taggctttccaagacctcctcagaagctgagcagatgccagcccatgttttctgtaaagcctgcagaactgtgagccaaccaaacctcttttctttataaattacccagtctcaggtgca

SEQ ID NO: 926 - DNA, 120 bp, synthetic construct
  source 1..120: mol_type = other DNA
gaaaattgggtatgttgctttgccacttgaggtctccgttttacccccgtgaaaggagctgattaggtcatataatccagcactcatggtccataatttttagaaaaatgatgtcaatat

SEQ ID NO: 927 - DNA, 120 bp, synthetic construct
  source 1..120: mol_type = other DNA
gcagaagtggtcatactcatccacaactgttccctgcagcactgtttgtatcgccaaagaggggaaaaattaactacattatggcatattcatcctgtggaatgttttacatccaaagat

SEQ ID NO: 928 - DNA, 120 bp, synthetic construct
  source 1..120: mol_type = other DNA
ggcagatactcacatgaactggatgattttgttcaagcctgcaatttcatacaggctctctgtgtcagagccaccttcatccaaagacagttttcctggagacaggagagaaagagtcag

SEQ ID NO: 929 - DNA, 120 bp, synthetic construct
  source 1..120: mol_type = other DNA
cacattaggggttaatgacaaggcagtccattgcctaactgaatcagccacggagcctcaaattggccatactgccccaacccttcaaactaccttagaaatttagttttgtacagacca

SEQ ID NO: 930 - DNA, 120 bp, synthetic construct
  source 1..120: mol_type = other DNA
tgtgaaaaataaagataaatgtttcctatgcaagtttacagactcccagaattctatctatagactgcctggaaggaagcttctggaatgggatgataccaatggggaagaaggctgatg

SEQ ID NO: 931 - DNA, 120 bp, synthetic construct
  source 1..120: mol_type = other DNA
tgacctaatttccctccaaccaagagtgtctcctatctgcctccctcacttgatctccctcatagactctatctccagttgatttatttaaagccaagatttttcaaatgaacaacgtct

SEQ ID NO: 932 - DNA, 120 bp, synthetic construct
  source 1..120: mol_type = other DNA
tatctaataatagttatatgggaaagcagtcttgcagaggcaaggaaaaagactcaaagggcccttcgttcctcaaaaagtgtgaaattctaagccatcagaattgagtcactcacagcc

SEQ ID NO: 933 - DNA, 120 bp, synthetic construct
  source 1..120: mol_type = other DNA
cactctcctttgttcccctggatgatgctttcttgtctctaaaatcctgtacttctgatgacatcctgcatctccttttatcttaggatgttttacagtctccttttgtgttcagagatt

SEQ ID NO: 934 - DNA, 120 bp, synthetic construct
  source 1..120: mol_type = other DNA
cacagaagttgatgtgagagtccagcagcctctatcaagccaggcagtgaagagatttacaaaaagtgtaaaatagcgtcaccactcttctcaccaaatattactggttttggaaaaatc

SEQ ID NO: 935 - DNA, 120 bp, synthetic construct
  source 1..120: mol_type = other DNA
cctaggggagagacggcaaatacgggtgcatcaactaacaaatgatctgatcatgcttatctggggaatttcacttaaaaggattctgacatcaagttcatactcagtgaaaagagtatg

SEQ ID NO: 936 - DNA, 120 bp, synthetic construct
  source 1..120: mol_type = other DNA
ttaatttactcaaatttccattatcctttgaagtctacctcaaattcctttgcctccaaatacttctaacggcagaactccctgggacacattgcgtatgaaacaacaatgcgctgtgag

SEQ ID NO: 937 - DNA, 120 bp, synthetic construct
  source 1..120: mol_type = other DNA
aacttatgaacatccagaaactgctggccagtggaaacatccatatcatttccaaatttgtgtgatgtgaggaggataatggaatttatagcatctagcaggggaaggagatttgacctg

SEQ ID NO: 938 - DNA, 120 bp, synthetic construct
  source 1..120: mol_type = other DNA
tatatacacacacatacagatctatcctgattggtgctctctggagttacacaagggggtctgtacccccacaacccagcccccatcaccattagtctgcaacactcacacccatggaag

SEQ ID NO: 939 - DNA, 120 bp, synthetic construct
  source 1..120: mol_type = other DNA
cttcattccttctattaatttgtgatcccaaagctttccccttcttccagaaaatggtaatgtgatgattaaaatgcaaagccatgccattctgtgaaagggcctgttgatggagactgt

SEQ ID NO: 940 - DNA, 120 bp, synthetic construct
  source 1..120: mol_type = other DNA
tgaatacatcacagctattcttatgagacacgtgggcccttggtgaaggtctgttttctgcctacactgtgttctattggtttccattatgttctattggttttcacagagctgttgttt

SEQ ID NO: 941 - DNA, 120 bp, synthetic construct
  source 1..120: mol_type = other DNA
aacttgaaggtcactttatcactgagaccttcctggctctcaccccccaactgtctatcttcttagcctgatttgtttttgtttttagctgttgtcaaaacttgactcgctatatatttg

SEQ ID NO: 942 - DNA, 120 bp, synthetic construct
  source 1..120: mol_type = other DNA
agcacacaggaggctctcaggctatgtttgttgaataaatgaacaatggaaagtcacaatttctgctcaccttcgaaccaggtgcagccttgggatctgcattcctaagaagagacactg

SEQ ID NO: 943 - DNA, 120 bp, synthetic construct
  source 1..120: mol_type = other DNA
ataactgaaagcaccagaatagctgcagtgatccctctccatcccagagggatatgtgctcaggatccatggaaagttggttcacaggaaaaaataagtcatttcttgcacacctcagtt

SEQ ID NO: 944 - DNA, 120 bp, synthetic construct
  source 1..120: mol_type = other DNA
gtcttgggtaatgaggataataatagctaagctttagtaagcacccgcttatgagcccggccctattctggccacatgcatacatttaatcctcactgaaactttataaggtaagtactt

SEQ ID NO: 945 - DNA, 120 bp, synthetic construct
  source 1..120: mol_type = other DNA
atggcccttgccatgacagctacattggtcctcaattcaagtgtcttcagaaagtgaagatgtaagctactctttgcaacattaactcctaacaagtccaaaaaaaaaaaagtacaagaa

SEQ ID NO: 946 - DNA, 120 bp, synthetic construct
  source 1..120: mol_type = other DNA
ctgttagtgctgggaggtcagagaaggaagggaatgaacatttattgagcaactcttgtgtgccaggtcagacacgaggttgttgcactcatggatataacagtcctgaaaagaaagata

SEQ ID NO: 947 - DNA, 120 bp, synthetic construct
  source 1..120: mol_type = other DNA
ccagaacttggaaataaagcaaagaaaggatgccatatctttgtaatatcatgttggagcattttataacaggcctggccaaggattatctaattatccaggtcagggtttctcaacctc

SEQ ID NO: 948 - DNA, 120 bp, synthetic construct
  source 1..120: mol_type = other DNA
ctaacctctctgcgctgtggtttactcctctgtacaaatgagaaaaataaaagtacctgcctcatgggcattcagtgtgataacacatataaggcattagaacagtgactgacaatatgc

SEQ ID NO: 949 - DNA, 120 bp, synthetic construct
  source 1..120: mol_type = other DNA
cagccagtttggcatgtgccaaagtgaggaaacctctgtcataaaatgcttggacctgcaaatccaattacccatcagtggacacaggcacctgtatcaccacacatctgaagttgaact

SEQ ID NO: 950 - DNA, 120 bp, synthetic construct
  source 1..120: mol_type = other DNA
cacttacaaatcataaattcaaagataaaattaattaaaatctcaatactttgaccacagagcattcaaccccaaatgtggggcccttctgagtgggagtcctctgggactgcataggtg

SEQ ID NO: 951 - DNA, 120 bp, synthetic construct
  source 1..120: mol_type = other DNA
ttggaaacatttctgattaggtttccgacttgcagggaactcataatactgtctctatgaactctaggcctaacccaaggttttgcaactccagcccacaaactaaagaaaaacatacac

SEQ ID NO: 952 - DNA, 120 bp, synthetic construct
  source 1..120: mol_type = other DNA
atttaatcccactctccttccacactcaggagctcagagtgttttcccctcatagcaagcacacatttagaatcccagcttcccatcagctcaagatagattcccatggaaaccagcata

SEQ ID NO: 953 - DNA, 120 bp, synthetic construct
  source 1..120: mol_type = other DNA
attcctggataaaactctcccatgaaggcaaacttagtggacacaagtttcttatgaattacatttggggaagagaaattagcattcaacctctgtggctcactagctgaccttactaag

SEQ ID NO: 954 - DNA, 120 bp, synthetic construct
  source 1..120: mol_type = other DNA
tacccagataaatggcatgggagggtaagggttgatgcagggtaaggttgagaactcactgagtaggactgggaaggagagatggagagatgaatgctgaatttccagagccatgtgcac

SEQ ID NO: 955 - DNA, 120 bp, synthetic construct
  source 1..120: mol_type = other DNA
agttttctcaaagaggccatcgcatctttttttggtccctatcctattctaaaatgaggctggtgcttcaaaaacctagtggcaccccatgataatgtggatttgggcacacatgggaac

SEQ ID NO: 956 - DNA, 120 bp, synthetic construct
  source 1..120: mol_type = other DNA
tgattcaggagaatgctgagaatcaaggagggaaaatctgaggagcagacctaagacagaaaatttggaagaatatatccactgtcacataccagtttctgcccttggagtagataaaac

SEQ ID NO: 957 - DNA, 120 bp, synthetic construct
  source 1..120: mol_type = other DNA
tagctgtattgtcttaccttcccatgagcaaggtatgaataatccagtttttccacgtctttgtcaggacttcgtagcataaccatttttcattttagtcattttgacgggtatgtagtg

SEQ ID NO: 958 - DNA, 120 bp, synthetic construct
  source 1..120: mol_type = other DNA
ctctatatgtctgttcctctgccaacaccacatagtcttgattgcagtagctaggatcaagtatatctgaaagcaggtagactatctcttttcactttattctttatttttctaaattgc

SEQ ID NO: 959 - DNA, 120 bp, synthetic construct
  source 1..120: mol_type = other DNA
ctagaatctgtgtcttctccttcagagttcctcttctgaatatcttaaggtttttctttgcatatttattcttccctcccagaccttttcatctgttcccagcctctttctttctctctg

SEQ ID NO: 960 - DNA, 120 bp, synthetic construct
  source 1..120: mol_type = other DNA
ttaactctgagaattaaacagagaacttaactctgatctctcctaggtacgcactaccatgttttatttggttttaggtagatccaaatgtgtgcctctcgtaggcatgtaaagcatggc

SEQ ID NO: 961 - DNA, 120 bp, synthetic construct
  source 1..120: mol_type = other DNA
agacttttcatataggattgcaattttctcctgttgacgtacaactgtttctctgctggttttgtttgtttggtcagttacctctcagatagtccatcctagtgaatggggttgtctctt

SEQ ID NO: 962 - DNA, 120 bp, synthetic construct
  source 1..120: mol_type = other DNA
ggaatcagagacccgtattattgacttgtccacaagcctgtgctgtgactccagtgtaaaaagtggacaataccaatatctattcaatgggactgttttgatgattaactgaaataatgc

SEQ ID NO: 963 - DNA, 120 bp, synthetic construct
  source 1..120: mol_type = other DNA
tccttgaagtctgcatttaaatgtcagttcctcaaaaggcattccctgactcccaatctcaatttttccctttttacccttgatcatcacactccatgcttttcctttgcaaccatttca

SEQ ID NO: 964 - DNA, 120 bp, synthetic construct
  source 1..120: mol_type = other DNA
ctacaagttgagaatcagtcagacctggtaagtcttccttggttttggagagaaaagggagagagatcaaagaagagggaggaggcaaaatagtttgagggtctcccatgaggaaacaaa

SEQ ID NO: 965 - DNA, 120 bp, synthetic construct
  source 1..120: mol_type = other DNA
gagaggctgttgattgtttttattggcattttggactatcacgttggtcaatgccaaggaaaagacccaagggaagatgctatgtattttttccaccccacaattctgagaggctatata

SEQ ID NO: 966 - DNA, 120 bp, synthetic construct
  source 1..120: mol_type = other DNA
aaaaatattattgcaatggaatttttaaagagtgaatttgactgacatggggcaaggccatgccctttaccaatttttctcaacagaattctgtgccccagagcctgtgaaaatgcagtc

SEQ ID NO: 967 - DNA, 120 bp, synthetic construct
  source 1..120: mol_type = other DNA
aatgagcactaaagctaagctgacaattatgcaaaaatactctgcaccaacctgtaaagctcaaactgccgcagagtagggctgctgagtaaagaaaaatcttgtgatttggaatcagat

SEQ ID NO: 968 - DNA, 120 bp, synthetic construct
  source 1..120: mol_type = other DNA
ataggtgaaaggaaaaatttaactgtaatcaactcaatccatgcttttacaactagcatttctgttcttttaccgtctcactccaaggatcccctgtattaccgatatgtgcccagcaac

SEQ ID NO: 969 - DNA, 120 bp, synthetic construct
  source 1..120: mol_type = other DNA
gcaatccctttcagctgctccttggcatactggaagggacatgtcatttgaaacaaataggtttgggttcaaactctgcttcacaatctaatgttttatagctttgtgagtttaggcaat

SEQ ID NO: 970 - DNA, 120 bp, synthetic construct
  source 1..120: mol_type = other DNA
agaggtgtttgggttatgtgggtgggccccttataaacagatgaatagatgaatgccctcattcaagggtaagtgagttttaatgagaacaaattagtttctgagggaacaggttgttta

SEQ ID NO: 971 - DNA, 120 bp, synthetic construct
  source 1..120: mol_type = other DNA
taacatcccagcgactctccaaattagagctatactgacagttccaacaccattctgaagaatgaatgatccaaaggtcaaacaggtaacaacatgattctggtcatctggaaaactttc

SEQ ID NO: 972 - DNA, 120 bp, synthetic construct
  source 1..120: mol_type = other DNA
agatgattttacacatagattttgtaggtcagtgtaaagaggtgaatctgtgtgacttactcaggatagtgggtaaatagaagagaagttcaggtgctcggctctcagttttcccaagca

SEQ ID NO: 973 - DNA, 120 bp, synthetic construct
  source 1..120: mol_type = other DNA
tttttgtgccaagactccagataccctgactgagcaagggacctatttcaccctaaatgaatgaaccaagctttactgttcagaatctggaaagtattgcttgttccttatccatacatt

SEQ ID NO: 974 - DNA, 120 bp, synthetic construct
  source 1..120: mol_type = other DNA
acgaagtttgattttaattcaggttgttttcatgaggcttctaatctagagggaaaaatccaacccatgtctccatggggggaaagagtaaggtagaaaggattagaaggaaactggaag

SEQ ID NO: 975 - DNA, 120 bp, synthetic construct
  source 1..120: mol_type = other DNA
atgctaatggaagttggccactgtggtgtgactaaatttactatcttggtggaagctgtaagagacagcatgcaaaattgcaactccctttataatttgtgttgacaccccaatagaaaa

SEQ ID NO: 976 - DNA, 120 bp, synthetic construct
  source 1..120: mol_type = other DNA
ccatcagaatatttgctgttttgccagtaaattcctactcatttcacaaaccaactctggcccttcctctttcctctactctccctgataaacttctaagttgctgtgttgttacagcaa

SEQ ID NO: 977 - DNA, 120 bp, synthetic construct
  source 1..120: mol_type = other DNA
tggaagctgacagactatttttcttagtgcaagtgtggggtctagaggattaagaggacaaaatagatgttttgaccatgaagaaagtttaaaggcatgttcgctctttccactcatgga

SEQ ID NO: 978 - DNA, 120 bp, synthetic construct
  source 1..120: mol_type = other DNA
tgtctcttgataactgagtatggcagtttgagatggagatataatgtaagtgttggtttcatgtgctaagcagcagctaagttctatgtctcgttcttttccagcctgtgatttgctcat

SEQ ID NO: 979 - DNA, 120 bp, synthetic construct
  source 1..120: mol_type = other DNA
tacttacctcaagcacgatttctttcagttggaactgtttttgcgtgaccttatctgaagacaccggctcatggtagtagaggcaaagcaagtcatatttctttaaaacctgcttgaagt

SEQ ID NO: 980 - DNA, 120 bp, synthetic construct
  source 1..120: mol_type = other DNA
caaatcaacctcccatcccagtttcctaatatactagaaatgatggtgacacctgtacacatttcaagccctctccatagccatccaaaggcttgaatatccaagttcatagtgatatga

SEQ ID NO: 981 - DNA, 120 bp, synthetic construct
  source 1..120: mol_type = other DNA
ccccccgactctcttacacttattaggaacgtgcacattgttaaatggaaatgccaaacggcaaaacggtatgtgtagtatactgtttgtgttgcataaaaggaaatgtgtattccattg

SEQ ID NO: 982 - DNA, 120 bp, synthetic construct
  source 1..120: mol_type = other DNA
aattaagtatggctctaataatcctctgtgatcatccctttctgtccactgtttgcctgattgtatctgtccccacttgagttttatgatggtggagttgtatgagatgtatggactgag

SEQ ID NO: 983 - DNA, 120 bp, synthetic construct
  source 1..120: mol_type = other DNA
ttttaatggagatgtccagtggtaggaaatctcccacgcaaatatatggcctagtggggactagggatattcaggaatctggaaatcagaatagtctgaagatttcttctttgcaaaaac

SEQ ID NO: 984 - DNA, 120 bp, synthetic construct
  source 1..120: mol_type = other DNA
ttcgctgtgatgaggcatgtaaagtattactctagttccaggcatacagtagaatatatcagctatgcttattatcagtaccagtacttattatcagcaccagaaccagtaccagggttc

SEQ ID NO: 985 - DNA, 120 bp, synthetic construct
  source 1..120: mol_type = other DNA
acaataaaaaatttgaacaaaggattaaaagttcacagagaactggctggtttttcactggaagccaaacttcatttgtgaaaactgcccagccttgggtcagaaagtcagtcacggaac

SEQ ID NO: 986 - DNA, 120 bp, synthetic construct
  source 1..120: mol_type = other DNA
tagtggggttggggtggaggaccttaattatcagccccagcttccaccactcagtggtatacactcaaaattgaaatttaggttcagttctaaataataaagttacatttcttgcatagc

SEQ ID NO: 987 - DNA, 120 bp, synthetic construct
  source 1..120: mol_type = other DNA
tgtcacaggagagggaaatatggtgccaccttggttatctgtagagatagaaatcatagtacaaagaccacaaggaggaattcctccaaaacaacttcagttactgtttttagctgcaga

SEQ ID NO: 988 - DNA, 120 bp, synthetic construct
  source 1..120: mol_type = other DNA
tggccaaggtcgtggatgtacccttagagtgtgacttagagcaagttatttaatgtttctctcctcatctttaaaacagagatgatgaaaatgatagcatctacttcgtcgggtagttgt

SEQ ID NO: 989 - DNA, 120 bp, synthetic construct
  source 1..120: mol_type = other DNA
cagtggtagacatggcttggagccctttcaagactatggtcatgtatgtttcagaagtaatatagcctatacttcaaaaaactgtatagagaaaagggggaagtactattcagagatgtg

SEQ ID NO: 990 - DNA, 120 bp, synthetic construct
  source 1..120: mol_type = other DNA
catttgatttttacaactagtcttgatggaggttaggaagattttatcatctccattttaaagaggatggaattaagacccaaggagagcaaatgacttgcccagcatcacacgggagca

SEQ ID NO: 991 - DNA, 120 bp, synthetic construct
  source 1..120: mol_type = other DNA
gttgggcaaagtgtgtagggagacacatgcagaaggtcctcataaagactttgtctgtcttcttcctttctctcctccacccccatcaaactcttactcattttaagatttttttttttt

SEQ ID NO: 992 - DNA, 120 bp, synthetic construct
  source 1..120: mol_type = other DNA
acttcttcgtccctgtactttatcatctgtacaccggggaagatgataaaaacagcacctaacacgtcgggttgttgcaaaggttaaatatgttgatacttgttaagtgcttggaataac

SEQ ID NO: 993 - DNA, 120 bp, synthetic construct
  source 1..120: mol_type = other DNA
ctaatattcccagtgccctttgaggatatccatctagcatgcactcatgtagaaacgctgctttgcaaacctttcatcacatgttataaagaagatgtcagcctgacacagacacatcta

SEQ ID NO: 994 - DNA, 120 bp, synthetic construct
  source 1..120: mol_type = other DNA
taaggtcatctacataaagctcctagcacagttcctcaatactgttagttctttaagaagaactgtattattttcctggaggtatgatcttcttccttggggtggtggggttaggtgttt

SEQ ID NO: 995 - DNA, 120 bp, synthetic construct
  source 1..120: mol_type = other DNA
tgtggaaaacccactgaaaccacactagctttttcttgagaggtggagacaagggctagatcatgttgaaaagtgaaaaagacaagagagtgctcagataattcagaacataaatttggt

SEQ ID NO: 996 - DNA, 120 bp, synthetic construct
  source 1..120: mol_type = other DNA
gcaaaatcaattttcctgcacttcactctccactggtgttgaaaagagtgaaaccagagaaaagttgtccaagttccaaaaacaaagttacccatccatttacagggtcatcttgcactt

SEQ ID NO: 997 - DNA, 120 bp, synthetic construct
  source 1..120: mol_type = other DNA
atggactaatacaataagatttccatttgagtttctcttttaggttctgcataccaataaaactactgacatcagctggtctaaaaggctgagcaaggagctgacttatggaagaatgca

SEQ ID NO: 998 - DNA, 120 bp, synthetic construct
  source 1..120: mol_type = other DNA
ttcaagaatttaccactggcagatagagtcagtgatacaccagattatggaggcttctgaatgctgtggacagatcctgaaactatatccaaatggatggcagacaggaatcattgaggt

SEQ ID NO: 999 - DNA, 120 bp, synthetic construct
  source 1..120: mol_type = other DNA
cgctgttaattctgtgaagcaggcttcatttctgtgtgccctgctagaacgcatttggaattggctttagaattaagaatccatatttgttttctagaaggctgctcataatacggctgt

SEQ ID NO: 1000 - DNA, 120 bp, synthetic construct
  source 1..120: mol_type = other DNA
aggctccatgaatttattcccctgcagggtttgcagaaaatgttgtaaacttggatcaatggctcttaagttgaaagaggctggaaagagacctgtatataaagtaactgagtgcaagat

SEQ ID NO: 1001 - DNA, 120 bp, synthetic construct
  source 1..120: mol_type = other DNA
gggaatgacagatcagcactgggtctccttttgccctgcctcagcttgacattctttgagtatttaaaataaataaatagctttccaatgtacacacagcaaatattaccaggcaccagt

SEQ ID NO: 1002 - DNA, 120 bp, synthetic construct
  source 1..120: mol_type = other DNA
tcattaaatgaaaagaaaggagagaatgagttccaatgaaaccagacactgaacttcctttctgaacatctgcctctaatgtgtcaacagggagtatttctgtagcagtgtgggatatgt

SEQ ID NO: 1003 - DNA, 120 bp, synthetic construct
  source 1..120: mol_type = other DNA
gaaagagaaacataggcaaatgtaagtgtggaatcctggattggattctgggccaggaaaaagagacgtttttcttttgcagtaaaggacattgatgggacaactggccaatttgaataa

SEQ ID NO: 1004 - DNA, 120 bp, synthetic construct
  source 1..120: mol_type = other DNA
aaaaagatgcatgaaatgctttgaaaaatgctccacagcctttgttatttatgaacttctgtacataaggtgtgggttgggggtttatctccaaggccctctatctaacactgtttgagc

SEQ ID NO: 1005 - DNA, 120 bp, synthetic construct
  source 1..120: mol_type = other DNA
ttcaaatactcatctagacatccacctcagccaaataaacttggtttgagtttggggacttaatctaagaagcactcctctttgggactatactcatctctacaaggcaaagagagtttg

SEQ ID NO: 1006 - DNA, 120 bp, synthetic construct
  source 1..120: mol_type = other DNA
tgctggagctacactaagtggtatcaagcatttctctcccagaagttctatgcatagagtgttcatccttggctaagttacttaactattgagtccaattccttgatctgtaaaattggg

SEQ ID NO: 1007 - DNA, 120 bp, synthetic construct
  source 1..120: mol_type = other DNA
ggaaatttaattctacaatcaccatcactctactgcatttgccagggctggatgggaagcaaatgccaatggagcatatttactatcctgtgttgtatggatttaatggaaccaatgttg

SEQ ID NO: 1008 - DNA, 120 bp, synthetic construct
  source 1..120: mol_type = other DNA
gagaaattccagcatcctactcagagatcaagaaaacaggccatgttgacagctatagtcagtcaagggagattttattgtcaggttaattttaagagagggagatgtggagttttttct

SEQ ID NO: 1009 - DNA, 120 bp, synthetic construct
  source 1..120: mol_type = other DNA
ttcagtaagtatttagtggggcctactgaacccaaggcattattccaggaggagatctggttcatgggtattagcattatataagaatgaattatattattaagaaccaaatgggtccat

SEQ ID NO: 1010 - DNA, 120 bp, synthetic construct
  source 1..120: mol_type = other DNA
tttacttttgaactttctgtctttccatcttctctttcccacaataaactttaaattctaaagggcaggaatctgctttgctcaatgttgtgtccctggcactaagaagagtgcctggca

SEQ ID NO: 1011 - DNA, 120 bp, synthetic construct
  source 1..120: mol_type = other DNA
tgtcctacagaatttgaataaagcatctctctgaatttttaatcatagcctgacctcacctttttcatggaccacaggcatgaagctatacagttgcactaggaggcacttctacaaaca

SEQ ID NO: 1012 - DNA, 120 bp, synthetic construct
  source 1..120: mol_type = other DNA
gtttagattatgttacttggattatagagcactcttctggatcataggcttgaagactgggccatgtctacagaagtggttcatcatatacatgaactgaatgcaatctcatcccaccac

SEQ ID NO: 1013 - DNA, 120 bp, synthetic construct
  source 1..120: mol_type = other DNA
agacctttcattctaactcactgctacttataatcatgccctctagagagagtgcagtttgccagaataaatgagccctaagtaagaaggaaattcgtctcacagtgtaaagtaacctca

SEQ ID NO: 1014 - DNA, 120 bp, synthetic construct
  source 1..120: mol_type = other DNA
aagtcatgagaatacttgcacatactgatacacactcacactaacttgtcctcataaaagtaagcaggtagtcagaaaagatatcctgtaacatcatagctggggtcgagaattgggtgg

SEQ ID NO: 1015 - DNA, 120 bp, synthetic construct
  source 1..120: mol_type = other DNA
ccaataacattcaaacctgtataactccttctctttatagcttttggtgaagaaatgggttcaggagacctctccctgctctttcatcctaaagtgggttaactgcgcaagaattttaca

SEQ ID NO: 1016 - DNA, 120 bp, synthetic construct
  source 1..120: mol_type = other DNA
caatggatattgtcctcccatttgtcactatccacatatacaagtgaagtctcttgtccaaggtgaccatcaagaatttgaagagatcatcatttaaaatcttgataaggaatttcatgt

SEQ ID NO: 1017 - DNA, 120 bp, synthetic construct
  source 1..120: mol_type = other DNA
aaaagagggttaagttggggcatgggagacagaaaatgaatgggttgttgatgaggtgactaaggatgctagtgggaagactggttaaagaaatgggtttgcaaacaatttcagaatatt

SEQ ID NO: 1018 - DNA, 120 bp, synthetic construct
  source 1..120: mol_type = other DNA
ccttaatattcttgcagctttcctgactgttttgtacaatttttgcacatgtactccactgtgttaggctcaggaagaattctaacttctattctacccagcaaaagaggtgctgaagac

SEQ ID NO: 1019 - DNA, 120 bp, synthetic construct
  source 1..120: mol_type = other DNA
agttattgattcaggaatgggcaagtaactggcccaataaggacagatttgctgaaggctttgggaaaagttctttactcttaaaagggcaatgggaagccaaatttgtttttctgtcat

SEQ ID NO: 1020 - DNA, 120 bp, synthetic construct
  source 1..120: mol_type = other DNA
tggagcaaaaccaaggagatttcaatagacgtctatgtataactggtaacagaattagcatattactactacatggcccccaacagtttctagggtggcttaaagatcactttcccagta

SEQ ID NO: 1021 - DNA, 120 bp, synthetic construct
  source 1..120: mol_type = other DNA
ttgagaactgctctcttgtcccctgtgggactccctttgcttcctgtccacatgtttatatgaaaaggtgagtaaaggaaaagtcactgagcattattctctagacttagtttttcttgt

SEQ ID NO: 1022 - DNA, 120 bp, synthetic construct
  source 1..120: mol_type = other DNA
gtgtcctgctgttggattttgtcttgagcaaaaccgcagtaagaagactactgcaattgttgaggcacaacttgatagaggccaaaataaggcaaatggaaaagaaatgaagatgaagga

SEQ ID NO: 1023 - DNA, 120 bp, synthetic construct
  source 1..120: mol_type = other DNA
tgtgcccagccattaaactgtttttgactctagggaaagagtttaacatattttgctcccatactcaagggagaaaaatatccctcaatgtgtctccagggaaagagacatcccaagcat

SEQ ID NO: 1024 - DNA, 120 bp, synthetic construct
  source 1..120: mol_type = other DNA
aaccatacctcacctatgtcctcccctctcatccttggtgataatgcccaactggggtttaaccttaaatttaaaaagcactgttaccctggaattattactattaatgctgtcttttgt

SEQ ID NO: 1025 - DNA, 120 bp, synthetic construct
  source 1..120: mol_type = other DNA
ttcttctcctcacaaagaggggtgtaaaggggaaaatcagttgcctgattcaagataatttcctctataagctccagattgtgaaacgttgaactgaccatggctgtgctttttacatta

SEQ ID NO: 1026 - DNA, 120 bp, synthetic construct
  source 1..120: mol_type = other DNA
taaatgtgtgtatgaggggaggggtagatatacaatgaaatgtcttcagttatattcagcccatggacacaaaagaaaagaaacacccattttccttgttcccttaatttcctctcctcc

SEQ ID NO: 1027 - DNA, 120 bp, synthetic construct
  source 1..120: mol_type = other DNA
gtttcttatatatgccctcataacttcagagacggcacagctctaatgaacactcacttctagttcactcacaggcattttctggatacaaacaagtcctcaaaaagaattttggtcgtc

SEQ ID NO: 1028 - DNA, 120 bp, synthetic construct
  source 1..120: mol_type = other DNA
aaagggagagaatgcatagttgctcacatatctcagtgtcagtcacctaacatggatcagtgctttatttgagattacaaaactagaaaatgacggagtcaaggctaggaccaatattct

SEQ ID NO: 1029 - DNA, 120 bp, synthetic construct
  source 1..120: mol_type = other DNA
ggacatgaggaacagttgtaaagtttccaggtctacaataactttctggaaccctctcagtgaactgtttcttgtaaaagttttccctaagataaaagctcaatcccattgtttccacac

SEQ ID NO: 1030 - DNA, 120 bp, synthetic construct
  source 1..120: mol_type = other DNA
tatgacagctgtaagctcataaggcctttgggagtatgaagcaaaatagatattcaaactactcagagcagtccctacaagataggaggtactatagcactagttttactaacgctggca

SEQ ID NO: 1031 - DNA, 120 bp, synthetic construct
  source 1..120: mol_type = other DNA
cctggaggtagcaagaataaataaaatcttattttctatgcaaaacagtgcttttaaattaaaattattcacctagaatgtctacagatactttcttcagagtcctttttgttaagtaat

SEQ ID NO: 1032 - DNA, 120 bp, synthetic construct
  source 1..120: mol_type = other DNA
cagcaaaggtaactaaggtagaaaaacagagaaagggctaattttcagccacaagtttttacaggaactgacttctcaggagagccaaatttatttcaagtggatgtgaaataagttatg

SEQ ID NO: 1033 - DNA, 120 bp, synthetic construct
  source 1..120: mol_type = other DNA
aatccacgtgctgtattaagtgtgaaaagatatgcctgatccagaggcaatgagctaaaagaatcatctgtacaatctaacaatgcttttgaggatggatctggagggcttaaaatacac

SEQ ID NO: 1034 - DNA, 120 bp, synthetic construct
  source 1..120: mol_type = other DNA
ggaaaaatcttaggaccactaaaaggcctcttgaccactaggcggcaaaaactaattttgaactacttgcctactcggtagcaggcctctttcaatagacattttaaatatcttggcttt

SEQ ID NO: 1035 - DNA, 120 bp, synthetic construct
  source 1..120: mol_type = other DNA
atagtcctaacagagtaacaaaaatcacctttcagcaaaacctaaggaaacttcacgtcatctaacttgtttttcagctgttgaaggaggatgttcccatcttggtcagtcctatgcgga

SEQ ID NO: 1036 - DNA, 120 bp, synthetic construct
  source 1..120: mol_type = other DNA
taatgattgtgaatcaccaggatttttcactatttaatttatttttatctcttttttagggccctcctggtattcctgggagaaatggtgaccctggtattccaggacaaccagggtccc

SEQ ID NO: 1037 - DNA, 120 bp, synthetic construct
  source 1..120: mol_type = other DNA
agcgcataataggaaaaattggggggaactaacattgaacacagtggaaagatttgtgcatcccacaagaaaatgcttctgtaggatatctaacgtctaaatctacagaaagacacgata

SEQ ID NO: 1038 - DNA, 120 bp, synthetic construct
  source 1..120: mol_type = other DNA
ctgcactgagtttggctgccaagcgagaaattgcttcttcaccagtgcaatataaccctaacattgcagggattttcatagcattatgtactagtttttccagatttttaattcccttcc

SEQ ID NO: 1039 - DNA, 120 bp, synthetic construct
  source 1..120: mol_type = other DNA
tattctactcactagggatctccaggataccaaggaccccctggtgaacctgggcaagctggtccttcagtaagtaacaattaaatttatatttagtaagtcgataattccatatggaac

SEQ ID NO: 1040 - DNA, 120 bp, synthetic construct
  source 1..120: mol_type = other DNA
attttcagggccctccaggacctcctggtgctataggtccatctggtcctgctggaaaagatgtaagtttttaaaacttaaataagaatacagcaaaatttaacttggtgtattctaaac

SEQ ID NO: 1041 - DNA, 120 bp, synthetic construct
  source 1..120: mol_type = other DNA
agctgggatacctggattccctggtatgaaaggacacagagtaagtagagtttctaagttgtttacaaggtattccactgggctatgtttacttgcctaaccaattttactggacaatta

SEQ ID NO: 1042 - DNA, 120 bp, synthetic construct
  source 1..120: mol_type = other DNA
atggtcttccaggcgaaaatggagctcctggacccatggtaattatgtttcttatgtataattttcagttttattattaacctcattgttacctaaaactggctttgctcccaccccaac

SEQ ID NO: 1043 - DNA, 120 bp, synthetic construct
  source 1..120: mol_type = other DNA
agacatggcactttaaagagtcctacaaaatggataaaatagatgttacctccattttgtagactggagtacaaaagcccagggaaaagtagcctgcactaagtcacagaattcatggca

SEQ ID NO: 1044 - DNA, 120 bp, synthetic construct
  source 1..120: mol_type = other DNA
aggtcctcctgtaagtatcatagttgagagggagtaagcatagtttcatgcttactccatgaaagcatagtttcatgcttactccatgaaagcatgtgcttcaatatggctatcagtgaa

SEQ ID NO: 1045 - DNA, 120 bp, synthetic construct
  source 1..120: mol_type = other DNA
aagaatggtgccaaaggagagcccggaccacgtggtgaacgcgtaagttttactgcaacagatctggttatttcttgaaaaaatgcaacataattagaaagtaaacaggtaaaaactttg

SEQ ID NO: 1046 - DNA, 120 bp, synthetic construct
  source 1..120: mol_type = other DNA
cgtcctctctttgtaaccaaaatattgttgctatctaggttagtgaaggctattttaatttttttaaaatttctttcactacttagggtcctgctggagagcgtggtgctccaggccctg

SEQ ID NO: 1047 - DNA, 120 bp, synthetic construct
  source 1..120: mol_type = other DNA
cgaggtcagcctggtgtcatgggcttccccggtcctaaaggaaatgatgtgagttccttcattaatttcttcaataaatatttgactggaaggcttttattttccatatggagtaaagaa

SEQ ID NO: 1048 - DNA, 120 bp, synthetic construct
  source 1..120: mol_type = other DNA
ggagatgaaaatagggtggaggtggggcaggaagaatgcttcaaaaattacataatctctgacaccatgttgttacagtttaccaaagcaatgatgaaacttgctgacctagttatctag

SEQ ID NO: 1049 - DNA, 120 bp, synthetic construct
  source 1..120: mol_type = other DNA
attctttctagggcttgcctggtacaggtggtcctccaggagaaaatggaaaacctggggaaccagtaagttacgtttcattattcaaaactcagaaacaaaaagaatacacactgtttg

SEQ ID NO: 1050 - DNA, 120 bp, synthetic construct
  source 1..120: mol_type = other DNA
tcccgaaggaggaaaggtaactccacagcattccattcacctaggtttaaaaaatgcatttgatttccttctgatcatttattatttctcacttattttcagggtgctgctggtcctcct

SEQ ID NO: 1051 - DNA, 120 bp, synthetic construct
  source 1..120: mol_type = other DNA
gctatggagacatgacacaagggagtcttatggtgattgcacatttgagtatcttgattgaggtggtagtcaggcacatctacacatgggataaaattctatagagctacatatacacac

SEQ ID NO: 1052 - DNA, 120 bp, synthetic construct
  source 1..120: mol_type = other DNA
ttcaaaattaaaaaatatttttatttcctctagggtcctactggtcctattggtcctcctggcccagctggccagcctggagataaggtaacccttaatactacctggatataaaaagaa

SEQ ID NO: 1053 - DNA, 120 bp, synthetic construct
  source 1..120: mol_type = other DNA
acctgctggtttccctggtgctcctgtaagtgtgaatatttatacatacatgtcccatagcccaggatctctatcttgctgaaaaattacaaaagtatagtcaagtttggtttctagtct

SEQ ID NO: 1054 - DNA, 120 bp, synthetic construct
  source 1..120: mol_type = other DNA
tcatagagttcctggttttcaaaggcttaatgcttttcccaaattttgattttggtgctattcttacataatttccttccatttcatatagggtcctcctggtccccaaggtgtcaaagg

SEQ ID NO: 1055 - DNA, 120 bp, synthetic construct
  source 1..120: mol_type = other DNA
cagggtgtcaaggtgagtatagtcattttccactacactcttccttcctttggtagccttcagagatcacttaaccatatcaaggatgaaaagtttttctgtcactggagtaaattagcc

SEQ ID NO: 1056 - DNA, 120 bp, synthetic construct
  source 1..120: mol_type = other DNA
gataacaccattttaattgatttcttaagttgaaacaaaatgtttttcattcctttgtatacagggtgaaagtgggaaaccaggagctaacggtctcagtggagaacgtggtccccctgg

SEQ ID NO: 1057 - DNA, 120 bp, synthetic construct
  source 1..120: mol_type = other DNA
taatcagggaaaccctggatcagatggtcttccaggccgagatggatctcctggtggcaaggtataataaacacatgtgcaattgatttgtgttatcaaaataagtgatcatcatgttta

SEQ ID NO: 1058 - DNA, 120 bp, synthetic construct
  source 1..120: mol_type = other DNA
ctttggagccaaggatagaaacatcagttgttagggatccatgcaatgatcagtccaaaatgaaaacaaccacagaaacaaatctcatttcctatctgaagtgtctgttgatgggggatt

SEQ ID NO: 1059 - DNA, 120 bp, synthetic construct
  source 1..120: mol_type = other DNA
attggaccaccagggcctcgaggtaacagaggtgaaagaggatctgaggtaagacatcacttatacgtatgtgtatttaatttgctacaatcttccaattttcagaaacacagcgcatta

SEQ ID NO: 1060 - DNA, 120 bp, synthetic construct
  source 1..120: mol_type = other DNA
aaactgcagagacctgaaattctgccatcctgaactcaagagtggtatgtttggtagtctttcatcttcatggcaataggattacagagaaagctgcttagattagaatgggaacgaaaa

SEQ ID NO: 1061 - DNA, 120 bp, synthetic construct
  source 1..120: mol_type = other DNA
ttcccattcttttttgtgactattcaggagaatactgggttgaccctaaccaaggatgcaaattggatgctatcaaggtattctgtaatatggaaactggggaaacatgcataagtgcca

SEQ ID NO: 1062 - DNA, 120 bp, synthetic construct
  source 1..120: mol_type = other DNA
gaaaactcacttctaatattagcgaatttcattgtgagagacctatcctctttttaataaaccatttataaacctgttagcaatggccggaaccaggcctcctgaggatgcactggtcta

SEQ ID NO: 1063 - DNA, 120 bp, synthetic construct
  source 1..120: mol_type = other DNA
gaatcctagcccatctgcagagcaatgactgtgctcaccagtaaaagataacctttctttctgaaatagtcaaatacgaaattagaaaagccctccctattttaactacctcaactggtc

SEQ ID NO: 1064 - DNA, 120 bp, synthetic construct
  source 1..120: mol_type = other DNA
ctggacttctcactggccgacgcggtgaaccaggagtttctgaccacgcgcaccaacgagaaggtggagctgcaggagctcaatgaccgcttcgccaactacatcgagaaggtgcgcttc

SEQ ID NO: 1065 - DNA, 120 bp, synthetic construct
  source 1..120: mol_type = other DNA
agtgagcacagtcaccctcctgccaccaaagtcataaatattaattgagcagctatattggccaggctggagctgggaaccagaaacacagaggtggataaaatagacacagtttctaac

SEQ ID NO: 1066 - DNA, 120 bp, synthetic construct
  source 1..120: mol_type = other DNA
gagatggacatgtctaagccagacctcactgccgccctcagggacatccgggctcagtatgagaccatcgcggctaagaacatttctgaagctgaggagtggtacaagtcgaaggtgggt

SEQ ID NO: 1067 - DNA, 120 bp, synthetic construct
  source 1..120: mol_type = other DNA
gtgaggggccaggcaggagcccgagtgggaggtgcggggtgctgggtggtccatttctgtccccaggaggctcgagattactgattacctcaacaagacctggaaacaattttttttttt

SEQ ID NO: 1068 - DNA, 120 bp, synthetic construct
  source 1..120: mol_type = other DNA
cacagacgtcatgctcagagcaacccacctctagacacagaaaacaacatacaactggaaagggacaccagggaaccttgtgggataacagaaatgttctatatcttttttttttttttt

SEQ ID NO: 1069 - DNA, 120 bp, synthetic construct
  source 1..120: mol_type = other DNA
atcctagtgtcgtgccagcagttcacagttgaaataatgatccttccagaagagactattcctgggacagctctagctggccttcgaccccattccttgagcagtatgggtggtgggagt

SEQ ID NO: 1070 - DNA, 120 bp, synthetic construct
  source 1..120: mol_type = other DNA
gagagcagagaaacacacgataatgatgcattaggaaagcaagtcggagtccttggcagcttctcctttcctagatcaaaccttttctatcttcgatgtacatttccatcaggaaaaaaa

SEQ ID NO: 1071 - DNA, 120 bp, synthetic construct
  source 1..120: mol_type = other DNA
ggccctgaaatcttaaagggagataggtactgtaaggtcctctaaagagtgtcttgagactgggctttggggttctatcttgaagaaggggagtcccaggagacaaatgtgtgcagggct

SEQ ID NO: 1072 - DNA, 120 bp, synthetic construct
  source 1..120: mol_type = other DNA
ttgtccccgtggtctcttactttcctttccccagcccagggtggacttagaaagcaggggctacaagagggaatccccgaaggtgctggaggtgggagcaggagattgagaaggagagaa

SEQ ID NO: 1073 - DNA, 120 bp, synthetic construct
  source 1..120: mol_type = other DNA
gaccgctctgttaggttgcatggagaatgcgatgcattgtgcaaagattaactgtgattgtgtctactacaggagaaataaggagcagcttagcttgctaaaaagtgaacacatttaatt

SEQ ID NO: 1074 - DNA, 120 bp, synthetic construct
  source 1..120: mol_type = other DNA
cttttggataaatcccttttacttgatttcattggtaattctgcatcacatcttgtgtatattgacaccctctgctcctttcacctctggctttctgagcctctcattccctattggtta

SEQ ID NO: 1075 - DNA, 120 bp, synthetic construct
  source 1..120: mol_type = other DNA
tgaatcctaacaaaataagtaaacagaaaagatgtggctagcagaaactccacaattctaacctctcagctatgcccagattttctgtagggatacaaaggtacagtcacaaagggaaga

SEQ ID NO: 1076 - DNA, 120 bp, synthetic construct
  source 1..120: mol_type = other DNA
ggtttcctgttacagaatgttctcccagcctaacatggaaaaagctcgtagatgtatgccactttctttgctttgtggtttctcaagatattttttgaagcaaggcctgacttacaacat

SEQ ID NO: 1077 - DNA, 120 bp, synthetic construct
  source 1..120: mol_type = other DNA
cagagttgtataggcatgcaattgtgaacacctttcttggtccttagtgtcctacatgaaagaaaagaaacacacacacaaacctgtagatgaaaactttacagccatgtgctctagaca

SEQ ID NO: 1078 - DNA, 120 bp, synthetic construct
  source 1..120: mol_type = other DNA
gagtggctgattcatcttgcactttctcatagaagcacagtccttctagtctctgttttaaaaggctacatatgactgcactgggaaggcatcaaatgactacagtacaaacaaagtatt

SEQ ID NO: 1079 - DNA, 120 bp, synthetic construct
  source 1..120: mol_type = other DNA
cctgccttttcagttaagcatcaagatttatcacactgacttctggctagggatgaataagatgtaacttgctgaataccacaaatgagagacctggaagctactatgagccatgaaatt

SEQ ID NO: 1080 - DNA, 120 bp, synthetic construct
  source 1..120: mol_type = other DNA
agtgacttacaatggccctaggaaacaagttctgttattatcccccattttaaaatgatgaaaatggacaaagcaaaagcaagcaacttaaccaataccccatggcctcacagcctttag

SEQ ID NO: 1081 - DNA, 120 bp, synthetic construct
  source 1..120: mol_type = other DNA
aatgcctggctagaaatctccctttgcacagtgaaaaggtcacattacaagaataaaataatagcaagaatgcagtctacacactttagatgttcaggaaaacaacagtttccaagcacc

SEQ ID NO: 1082 - DNA, 120 bp, synthetic construct
  source 1..120: mol_type = other DNA
gacttattagaacacactcatctcttcatgcatgcttctgctagtgtcctaaatttgggctccaaattatccaaaaattcaagcccatcttcttcttgtcgttcactgcaacaacctaca

SEQ ID NO: 1083 - DNA, 120 bp, synthetic construct
  source 1..120: mol_type = other DNA
ctccctgagcagaagcgcccacagtttgggttgtgaagccattcgcagaatactgaaatgaaaacaatttgcattagggataatacagagaggaacacaaaattatgaaaaagaacaaca

SEQ ID NO: 1084 - DNA, 120 bp, synthetic construct
  source 1..120: mol_type = other DNA
gttggagaaatgaccacttgctagcattgctatttcatatatttggcctcaggctgtttcctaacccatattagagccagaaagaatctattaaagttcttcccacgatgatcaaggctt

SEQ ID NO: 1085 - DNA, 120 bp, synthetic construct
  source 1..120: mol_type = other DNA
ctactgcactccagcctgggctctgtctcaaaaaacaaaaagtgtcttgaaagttactttaaagggtattatttgaattcaagaaaggacttaagacttacaaaagagcaatgctatgcc

SEQ ID NO: 1086 - DNA, 120 bp, synthetic construct
  source 1..120: mol_type = other DNA
tcaaaaattgtgccaaataaacataaatacttgtgacttactgtcagagactaattctgacaacttaaaacacccctgacagtgactacattagcaggtcatgagtcacacagctgcagc

SEQ ID NO: 1087 - DNA, 120 bp, synthetic construct
  source 1..120: mol_type = other DNA
acagggaagaaccagcgtttttgacactaagcttaactgacttcaaagcctctttagggtatattcttcttaaaacttgggtgtttcccaagcttataagtgattactcagacaagtaca

SEQ ID NO: 1088 - DNA, 120 bp, synthetic construct
  source 1..120: mol_type = other DNA
accagtaacaaatgaggactcccttatgacccaggaaactataaagaaatctatgccagtgagaggtacacaagttaggaaatgactgcattagaccaagtctaagagagagaaagagag

SEQ ID NO: 1089 - DNA, 120 bp, synthetic construct
  source 1..120: mol_type = other DNA
gttttggctgatttgtgagaagaggaaggaagagagtatgaatgaggacacttctggtatatttaaaagcacaaggaaattcaaggagatggaaacgcacgttatacacacccgtgatct

SEQ ID NO: 1090 - DNA, 120 bp, synthetic construct
  source 1..120: mol_type = other DNA
ctctaaatcattcattctttctgtttaaaaagaaggcttttgacattacaggtggaaaacagaatttaaaaaccctgtgccatccactgcctggggctgtgtcttatatgaagctgccaa

SEQ ID NO: 1091 - DNA, 120 bp, synthetic construct
  source 1..120: mol_type = other DNA
tcatgtatctggcatatgtttctattcattagagcagaataatttctgtccctcaacttctcctgttctcatgctatgtggtgttaccttgctctctctgaaaattgggactgctggttg

SEQ ID NO: 1092 - DNA, 120 bp, synthetic construct
  source 1..120: mol_type = other DNA
actgattcacagttctctcacacagagtaacacaatgactcccaccctcttcaaaagaaatgaatgcgaacagcctcattacacatttattctatatcacaatgatgataagcagtgccc

SEQ ID NO: 1093 - DNA, 120 bp, synthetic construct
  source 1..120: mol_type = other DNA
acccccaagtatattgttagcttcctgtaaaaagttagagctgttttccaggactgcactgtgtaagtatgttttccaggactgcactatgtaagtatgttctcactttcctacaaagtg

SEQ ID NO: 1094 - DNA, 120 bp, synthetic construct
  source 1..120: mol_type = other DNA
agaatggtaagtaccttatgccactgctacttcttgtttctgggtcatatgctttatatccattgcttgttgttcccacttctgcattttctttcatgcgaacagtctgtattggagggt

SEQ ID NO: 1095 - DNA, 120 bp, synthetic construct
  source 1..120: mol_type = other DNA
gcctgatatgtagttgtaatgagaattagtgaaaccatgccctagaagacagaaattttttcaggtcttggacttcacacaaatttccttctgagaataccaaggattaggggaggggtt

SEQ ID NO: 1096 - DNA, 120 bp, synthetic construct
  source 1..120: mol_type = other DNA
aaattcagtaagtaaataaaggctccttgacccaaacacagaaaaactgggctaggaaaagtctggcactgtcccaggggcatcaaagctgtgctagtttttgaaccatttaaagatatt

SEQ ID NO: 1097 - DNA, 120 bp, synthetic construct
  source 1..120: mol_type = other DNA
aagtacgagtaaatgttggcaagtggtcatttacatcatcaatgttaatgatacaagttgaagttgtctgtagaccaaaatactgaccatccatgtcttgtacttttattttcaactggt

SEQ ID NO: 1098 - DNA, 120 bp, synthetic construct
  source 1..120: mol_type = other DNA
tgctttccggactgagcattaggagacttgggttctatttccaactccaaaaataagagacacaatcttgggcaattggaaaattcactttgtctaggtttcttcttctataagatggtg

SEQ ID NO: 1099 - DNA, 120 bp, synthetic construct
  source 1..120: mol_type = other DNA
agtacaaaaggtcattgttgaggattcagagtccacattaccaaaaacatttaggaaacaagctactccttatcaagtattcatgtagtatcaaggaataatatccacagtgatctgtaa

SEQ ID NO: 1100 - DNA, 120 bp, synthetic construct
  source 1..120: mol_type = other DNA
aaagagacagaatatagatttaaaacaatcttggaggtaaaaacatgctttaggaagtgatgtgattcaggggggccaagagacatcaaatacaatttggagaccatgactccaaggtga

SEQ ID NO: 1101 - DNA, 120 bp, synthetic construct
  source 1..120: mol_type = other DNA
tctagacaaggtctccaaaactgcattctgacttttagttaaaacagaccattttcacagggctgagaaaatgtttgtattattctcagtgactttcataatcgtgcccagaatactggc

SEQ ID NO: 1102 - DNA, 120 bp, synthetic construct
  source 1..120: mol_type = other DNA
tcccaaacagccttgaagacttctttattttgctttgtttgaaaggttcaggtgcatggattttaaatacaactttctggatctttctgaacttgggatcctgtaggattacccaggtac

SEQ ID NO: 1103 - DNA, 120 bp, synthetic construct
  source 1..120: mol_type = other DNA
ttgtttcaagtcaattatgtgctattagggagtagccagagcattggtgacaaactcagaaagcagaaaaggttacgtgaattgcaaatgagagacaaaatggccaagcatcatcattgc

SEQ ID NO: 1104 - DNA, 120 bp, synthetic construct
  source 1..120: mol_type = other DNA
agaactgagggaaaataaaccaaagtcatagactgaatgtagtagccaccagtaatggaagaaggcaagaaggcttgctggggtttctactgaaagttaaaacaagacagagaaaaagag

SEQ ID NO: 1105 - DNA, 120 bp, synthetic construct
  source 1..120: mol_type = other DNA
ccaaggagttttctagcatcgaacaaggaattggagcccatcttctcttggcgcgccttagaactttttctttagtatgtcttttctttaggacctcaattcataagacaggaaaaaata

SEQ ID NO: 1106 - DNA, 120 bp, synthetic construct
  source 1..120: mol_type = other DNA
tgaaaaggaatgacaacccgaatgaaccatgtgacacagcccttttccttctaaacactgtgaagttgcctcatggttttcattcgtctttaagccaaactataccatatcctttctgat

SEQ ID NO: 1107 - DNA, 120 bp, synthetic construct
  source 1..120: mol_type = other DNA
agaatgacaccacaaatattacaaatgataatatactacattagttttatctactggtcccaacagagttatcattctaaaaattacactaattttaaaataccacagcaaatcaggatt

SEQ ID NO: 1108 - DNA, 120 bp, synthetic construct
  source 1..120: mol_type = other DNA
tcttcagctttgtttactatattgtaaaacgtatgtaataacttcactgattaactcagtgggtacagtgacgatccaacaacagcctaggtgggagagtgctgaaaactatcaggaagg

SEQ ID NO: 1109 - DNA, 120 bp, synthetic construct
  source 1..120: mol_type = other DNA
gagcagtgaacaaagccaagtccttgcctcacgaagattacatgataataagaagcaaaagaaatacacaaatgcacaaatgtcacataatgccaaggcagcgagagataaatgtcacga

SEQ ID NO: 1110 - DNA, 120 bp, synthetic construct
  source 1..120: mol_type = other DNA
gctcaaagaagtgggtgtgggccagattttgaacggcattagcaaagcacatggatcttttttcctaacgagaatgagaaaccaaagatttacttggagcaaataaattaaataagcagc

SEQ ID NO: 1111 - DNA, 120 bp, synthetic construct
  source 1..120: mol_type = other DNA
aacaagaagagacttaagtaaggaagcagaaataaccatgaaaatatggttagtcttcatacccataaacaaaaccagtcagataatacaagaaatttccactttgggaggccgaggtgg

SEQ ID NO: 1112 - DNA, 120 bp, synthetic construct
  source 1..120: mol_type = other DNA
cgtaaagtccctaaaagttgtaactttttattatacccaccaataatttatgagtcaaccacatacttgcctacatcgcacgttgttgaacttttgggtgtctgccaagtgtgaaatggc

SEQ ID NO: 1113 - DNA, 120 bp, synthetic construct
  source 1..120: mol_type = other DNA
ggaacttcatggattaaggaaggggagcagtgagaaagaaaaaacaaacagctttcagacttcctacttgaggaacaggcatatggtactgacatatattgaaatacaggacactaaaag

SEQ ID NO: 1114 - DNA, 120 bp, synthetic construct
  source 1..120: mol_type = other DNA
gctacaatcattcttacttaataatttcttacacttagtatttacgcatttctcacacttgagactcacaaccacaacagccacgtgaggttggcagggctttgcacagatgtgcacaga

SEQ ID NO: 1115 - DNA, 120 bp, synthetic construct
  source 1..120: mol_type = other DNA
aataacagtaacaattaccaattcatgattgtaaaatgtggaactctactgcgaagtgagagcggaagagaaggggaaattatacgaatatttcagcccccagttcacttctcccagaag

SEQ ID NO: 1116 - DNA, 120 bp, synthetic construct
  source 1..120: mol_type = other DNA
caaaagacaccgatcggcccctccttgttgtctatttaagacttaagacttcatttctctaagaaagccacgggtgggaactccctctcgccgccacccttttacctgcgcaaggtgttt

SEQ ID NO: 1117 - DNA, 120 bp, synthetic construct
  source 1..120: mol_type = other DNA
attccccagctcctctagccgccgacacaagccagtgaactggggaaaccaggaacatacttgtattcttagagtgcaaaaagttggctaaaaattttttaaaaaggtgtaatttacaaa

SEQ ID NO: 1118 - DNA, 120 bp, synthetic construct
  source 1..120: mol_type = other DNA
gacgtcgtttttagcctctgggctggcaaaacaactaatcctgtcaccttgatgtttccttgtttaaggagaatcccaagctaatgtaacacctagcttactttgagagttacatattct

SEQ ID NO: 1119 - DNA, 120 bp, synthetic construct
  source 1..120: mol_type = other DNA
gctttcctcagcagtgcagggagacacaccagaaggtagctgtgtcacccacatagctatcaaacatttaggccagctgtatcaaaatgggaaaaagaaataattttctgaataaaatca

SEQ ID NO: 1120 - DNA, 120 bp, synthetic construct
  source 1..120: mol_type = other DNA
tcctcttccaagtgcatactggtttgttggcaatctttgtcattccttctcttgtaggtgcattcattactccaatcctccatctgcgcatggcattctctcttttgtctctttatatca

SEQ ID NO: 1121 - DNA, 120 bp, synthetic construct
  source 1..120: mol_type = other DNA
gaagaaaggaaggaaggaactttaactgaaagcataaaggacttttagatctatttgagcaatttttaatcacagcttttttcccttgtctttcactctgacacagatttcaatagcttt

SEQ ID NO: 1122 - DNA, 120 bp, synthetic construct
  source 1..120: mol_type = other DNA
cactaagtaaatgaaaagatgggctttgggtgagatggtcaggaaagagtcaagaaagaagagataggatttgagtgattaagtataattgcgcccagttaaaaagagaggcaacaggca

SEQ ID NO: 1123 - DNA, 120 bp, synthetic construct
  source 1..120: mol_type = other DNA
gagaaactgggcaagggtcctagctcagtcatcatcttcttttaaaaccattaatcatatcatttcttgtttcagttatcgccttcctttgctttctcagtattctggggttcctttcac

SEQ ID NO: 1124 - DNA, 120 bp, synthetic construct
  source 1..120: mol_type = other DNA
tgctaaacctctcctgatttccccgcaaggaagtaatcttgccttttctgagttccccagaactatttttatagccgtcagttatacaattaaggtttcctacctcatagtagtttgatc

SEQ ID NO: 1125 - DNA, 120 bp, synthetic construct
  source 1..120: mol_type = other DNA
ctggtagttcctgcagtttgccttactgacaggccagtgccatctaatggtaaaaaaggacagtctgaagctcttggttttcttaaactgcccagtgaaaagaaatcattttcttcattt

SEQ ID NO: 1126 - DNA, 120 bp, synthetic construct
  source 1..120: mol_type = other DNA
cagcatctgttgtttcctggctttttaatgatcgccattctaactggtgtgagatggtatctcattgtggttttgatttgcattcccctaatgaccagtgatgatgagctttttttcatg

SEQ ID NO: 1127 - DNA, 120 bp, synthetic construct
  source 1..120: mol_type = other DNA
ctgaattgcctgatttagaacacatcttttcacacatctgtctgtaactaggggctcattatccagtttatgaattatccaggctctcctcttcttccctttcctatgctaccatgtgat

SEQ ID NO: 1128 - DNA, 120 bp, synthetic construct
  source 1..120: mol_type = other DNA
actgtcttttcttcctcctgtccccaaaataagattaagaagagaaaagtgcagtaggtgaattccaacataaatctgacccacgtcagatttatcagagcagatcaccaaactcactgg

SEQ ID NO: 1129 - DNA, 120 bp, synthetic construct
  source 1..120: mol_type = other DNA
aaacactgctttggatacaggaactagcagcttacttttcctcgtcagtcttaaagtcatgttgcaggtgacatttttctgtcaccaagttcctggtgagaaaaaaagtcacagatttag

SEQ ID NO: 1130 - DNA, 120 bp, synthetic construct
  source 1..120: mol_type = other DNA
aactgcccctagtggagaacgattggtctaaattaagaatgtgttctgtgagatagaggatcttaaggaaccagatccaaattatttagaaagcagtggctgagatcttaactgctcagt

SEQ ID NO: 1131 - DNA, 120 bp, synthetic construct
  source 1..120: mol_type = other DNA
agtctggtctctatacatttgttcttgccactttatggcctgttctccatacagtagcaccagcgagctttttcaaacataaactggttgtatcatttccaaacataaaagcttccagtg

SEQ ID NO: 1132 - DNA, 120 bp, synthetic construct
  source 1..120: mol_type = other DNA
catgagctaggcagggtctacctgagagtacaaagtagagttttatgaacactgaagatgagagaaaatgccaataagctagacaattgaaaatgtctgccacagtatgtattactctcc

SEQ ID NO: 1133 - DNA, 120 bp, synthetic construct
  source 1..120: mol_type = other DNA
ttctacaatcttgctcctcaaaatttggtctgagaacccacaacattgctatcatctgaaaccttgttagaaatgcaaagtgtaaggctgacctctagacctactgaattggaatcttcc

SEQ ID NO: 1134 - DNA, 120 bp, synthetic construct
  source 1..120: mol_type = other DNA
ttttcataccatgccacctttgaaaatacataaatttggggagcaccactttggttagagacatctctggccattgctagctgggcaagttaatagtagacagaatgaagaagagatcat

SEQ ID NO: 1135 - DNA, 120 bp, synthetic construct
  source 1..120: mol_type = other DNA
tgacaaagtgacgatataatttatagtgtgagcacacttttgaggatgaaagggttgttaacagatggaatgcctcacagcaggtgtcaacctagactcttctgagcaaatgcagacata

SEQ ID NO: 1136 - DNA, 120 bp, synthetic construct
  source 1..120: mol_type = other DNA
aaatttaagagtaagcataactgtatttagaacagtactaggtcatgatgaagtcccaagtgtgacagtgcctatgaagaaccaaagaaaagagttggtgggactgaggatgctgaggaa

SEQ ID NO: 1137 - DNA, 120 bp, synthetic construct
  source 1..120: mol_type = other DNA
cagaggagcttatccaggggtattcagtgcagcagtttttgacaatgtaaatatccaccaataggtgaatgttaaaaccatttatggtacatgaaagaatgtccatgacgaggtgctgaa

SEQ ID NO: 1138 - DNA, 120 bp, synthetic construct
  source 1..120: mol_type = other DNA
atgacacataataaattttggcaatattctattgttataggtcttaagcacaagaaatgaaaataagctgcttcctaaacatcctcatttagtgcggcaaaagcgcgcctggatcaccgc

SEQ ID NO: 1139 - DNA, 120 bp, synthetic construct
  source 1..120: mol_type = other DNA
tccagtttttcaagccaaaaatgtaccacacactatcagttctattccaaaaatatattccaaatctgctgcttctcttcaactccactgccattcccctagtccaagtcatgtcatctc

SEQ ID NO: 1140 - DNA, 120 bp, synthetic construct
  source 1..120: mol_type = other DNA
gtggctggttagctttggccctacagctttggctatagtttgctgacctgtaagttgtattatttttactgtaatatttattcacaacattgttcaacacagtgctcttcatgaggaccc

SEQ ID NO: 1141 - DNA, 120 bp, synthetic construct
  source 1..120: mol_type = other DNA
aaaacatttctcagtttgcagttctctaatgaaacattaggaggctcctccacggctagtacgtaggaggcagtgaggaaagggatgaaaataggaatcctagttagagaataaaagtat

SEQ ID NO: 1142 - DNA, 120 bp, synthetic construct
  source 1..120: mol_type = other DNA
aacctatttaatccacatagaaaccctgtgaggcagattcacttattatcctcatcttacacataaagaacccgaaggtcaaagcgaataagtgcatgtccaacacagtcagtaagtgac

SEQ ID NO: 1143 - DNA, 120 bp, synthetic construct
  source 1..120: mol_type = other DNA
tgcaggaacacagcagctacactttgacagtagaagcaagagatggcaatggagaagttacagacaaacctgtaaaacaagctcaagttcagattcgtattttggatgtcaatgacaata

SEQ ID NO: 1144 - DNA, 120 bp, synthetic construct
  source 1..120: mol_type = other DNA
tgtgcctaagaatcacctcataaaactgcatgccaaaaatgtaggttcctggtctcatcaacaaaaagtttcattgggcaggtttcaggaacttgtctttttagcaaaaatccacttgtg

SEQ ID NO: 1145 - DNA, 120 bp, synthetic construct
  source 1..120: mol_type = other DNA
aatttataggtatgaccacgccagatacctgagatagaaaagccaattatacacgcaaggagaaacagtcagatattgatgaatgacagaggtgctagcatagaattgtcatgtgccaca

SEQ ID NO: 1146 - DNA, 120 bp, synthetic construct
  source 1..120: mol_type = other DNA
atgaattgcttccaaattataagggcagcaatcggattccatcgaaaggaatttagacaaaaaagatatacaagtagcaaatacccacgtgaaaaggtgccaacatcattactcattagg

SEQ ID NO: 1147 - DNA, 120 bp, synthetic construct
  source 1..120: mol_type = other DNA
ttacatgattccatttacttgaaatttctagaaaaggtgaaacaatggggatagaaagcagactgggattgcttggagtggtgagtctgagtggggactgactacaaacacatgtaaagg

SEQ ID NO: 1148 - DNA, 120 bp, synthetic construct
  source 1..120: mol_type = other DNA
tctagtctttttctcctgtgtccttgtctcaacatcatagtgatccatatttttaaagggtgcagaagttgtgatccatccagagcccaatagagaggaaaactgactgacttattttgg

SEQ ID NO: 1149 - DNA, 120 bp, synthetic construct
  source 1..120: mol_type = other DNA
gctaatgtgtaatatatagctatattagagggacagagctcacagagctaccactacttattttcactaaaataaacccatagaacacattttaaggaatactgatttatactgaatgcc

SEQ ID NO: 1150 - DNA, 120 bp, synthetic construct
  source 1..120: mol_type = other DNA
agaatccaccttcttcaaccacctgtgtgtgaggaggaagttagtttactcaccactgaaacagttctggctagagatggctaaaaagcaacaaaggaaaagttcaggaaaaaactttta

SEQ ID NO: 1151 - DNA, 120 bp, synthetic construct
  source 1..120: mol_type = other DNA
gtgtaccagtgcttcctaaaacattgtatttaagtgcatcgccaagtgtagcaagaatgaaaatgtggaagaagctcctcagcaacctttttccttttagtgaatcgccttttcatggaa

SEQ ID NO: 1152 - DNA, 120 bp, synthetic construct
  source 1..120: mol_type = other DNA
acatgtaagcagctatgctacttgaatgatgtctagcttttacaacagagaacagaagatttcttaaatgagattaagcaaacacattgtgaaatgtaatccctatttctaagactctgc

SEQ ID NO: 1153 - DNA, 120 bp, synthetic construct
  source 1..120: mol_type = other DNA
tggctccttccacactaattctccttgctttgagggaagaaacccagaaacgattttatcggcattgtttccacttttaaccagttctgcctgaaagaaaattattaccccaataatcaa

SEQ ID NO: 1154 - DNA, 120 bp, synthetic construct
  source 1..120: mol_type = other DNA
ggatctctgtggattctgtcacatctgaaattaaacttgcaaaacttcctgattttgaatctagatatgttcaaaatggcacatacactgtaaagattgtggccatatcagaaggtaagt

SEQ ID NO: 1155 - DNA, 120 bp, synthetic construct
  source 1..120: mol_type = other DNA
gtggccctttcagtttctccgtcattgacaaaccacctggcatggcagaaaaatggaaaatagcacgccaagaaagtaagcaaaatcactggactacatagaaatctaaatattaagcat

SEQ ID NO: 1156 - DNA, 120 bp, synthetic construct
  source 1..120: mol_type = other DNA
agtccaattaacaaattaaacaccatcaatatttcaaactgtatttacagatttaatatatttagtttccttatatatttcagtgatctgaattaacaaaacctcccagccaggtgcggt

SEQ ID NO: 1157 - DNA, 120 bp, synthetic construct
  source 1..120: mol_type = other DNA
ttcagtagaaatgttaactcaccacttgtttgtcactgtattcccagtgtatagaacagttcctagctttcctagacccacacacattggttacagctaatcatcatgaaagtaggtgtc

SEQ ID NO: 1158 - DNA, 120 bp, synthetic construct
  source 1..120: mol_type = other DNA
tgtagtaagcgctcaaaaaagatgtgttgcatgactttgggttatgggcacaaggttttttacaaacccagtttattccaatcaatcctgctttgtacattcaacttatcagagctccgc

SEQ ID NO: 1159 - DNA, 120 bp, synthetic construct
  source 1..120: mol_type = other DNA
gtatcttttgctcagggattccttgcactgctttctcatctcagattccctggagcctaatgtggtacttggcacataatagacacttgatgaatgtttgttaaaattgttgaattgcca

SEQ ID NO: 1160 - DNA, 120 bp, synthetic construct
  source 1..120: mol_type = other DNA
agcaaagagttcaaatgacagcatattttgtgtttgttgctggggcagaattgagatagttttactctgttttgacacttcccatgttgtagagaatgtagagcaaggttcaggaagagc

SEQ ID NO: 1161 - DNA, 120 bp, synthetic construct
  source 1..120: mol_type = other DNA
gacttacataagttattcaactcaaaatactttttctaactggcctcagtggaaatagcttataccttcctatgcccacttgactcagatccttctaccaaggatgaaggattccctcca

SEQ ID NO: 1162 - DNA, 120 bp, synthetic construct
  source 1..120: mol_type = other DNA
ctgtatgagagtacttggctttgctattatgagggtccaccaaaaaatgatgagaaaagttccaggaagatgatcagatgcaataaggaagctcatgctagaattgaggaattagaagca

SEQ ID NO: 1163 - DNA, 120 bp, synthetic construct
  source 1..120: mol_type = other DNA
tggggtactactaaagtgatgcttgaagggaaattgtagcaaaaatggctatattagaagatggttctcaaatcagtgacctaagcttccaccctcagaagttagaagagcaaattaaac

SEQ ID NO: 1164 - DNA, 120 bp, synthetic construct
  source 1..120: mol_type = other DNA
ttttcattttagaaagcggcctcttacactgaggaagatgaaaatcacacagccaaagattgccttctggtttattctcaggaagaaactgaatcgctgaatgcttctattggttgttgc

SEQ ID NO: 1165 - DNA, 120 bp, synthetic construct
  source 1..120: mol_type = other DNA
acagcattcttactcctaaacagcagtcagccacaaactgacccagagtttaattagcagtgactaatttcatgtttccaatgtacctgatttttcatgagccttacagacacacagaga

SEQ ID NO: 1166 - DNA, 120 bp, synthetic construct
  source 1..120: mol_type = other DNA
attggaccattgatgataagaatacacattgtatgtttctgtgcacatgacagtgtgtgtgtgtgcacgtacatactgtatagtcttaaaaatagcattatactggccaggggtggtggc

SEQ ID NO: 1167 - DNA, 120 bp, synthetic construct
  source 1..120: mol_type = other DNA
gtatgcaacaggtatatcactagtatatgaaaatgtaaatatcacttgtgtactcaaacaaaagttggtcttaagcttccaccttgagcagccttggaaacctaacctgcctcttttagc

SEQ ID NO: 1168 - DNA, 120 bp, synthetic construct
  source 1..120: mol_type = other DNA
gcgcggcgtgatcaccgaccagaactcggacggctactggtgggtacctgcccggagagcgcgggctgcggggctcgcgggacagggagggaccgtcctcctctggacgactgggagact

SEQ ID NO: 1169 - DNA, 120 bp, synthetic construct
  source 1..120: mol_type = other DNA
ctccagggagttttgttttgcaagcagttttgaaggcagggactactcgagttgcaacctgttttctgcttagattcatttatttatttatggggcatcctgaaaatctattttcgcttt

SEQ ID NO: 1170 - DNA, 120 bp, synthetic construct
  source 1..120: mol_type = other DNA
gctctgtttttccaacttaaagcctacttacaaacttgtcaagtctcacatctctctgggaaggggaaagagacccaagtgaaaaattacctgactttgaggaaggatgttttttcttct

SEQ ID NO: 1171 - DNA, 120 bp, synthetic construct
  source 1..120: mol_type = other DNA
ttcctttgaaaatgactttaaaacatctctctctctctctgtcctttccacgaacagcacttacccgtttttaggacagtattagatctcattgtatcctaattccctctttttcccccg

SEQ ID NO: 1172 - DNA, 120 bp, synthetic construct
  source 1..120: mol_type = other DNA
gtctgagaaaacaggcccagagctcgagtgactcatagcgtagatagtctaaacacttttctgggaaattattgcaaagcaagatttagtttagcttaatatacggcaggtaacatttac

SEQ ID NO: 1173 - DNA, 120 bp, synthetic construct
  source 1..120: mol_type = other DNA
tacagctttcaacagtcatttttttctctaaatatgggcataatttcattgttcaggtaatggaagtgtcttggaaagggaaaaactgctgatgcccctgatgcctcagtgctgacttct

SEQ ID NO: 1174 - DNA, 120 bp, synthetic construct
  source 1..120: mol_type = other DNA
taaagtgtatcactctctgtgaattgtctcagttatttttgagtcttgtagggaacctgaggaactcctgaaatgcctcacacttaatacccaatccatttcttccttttcctctttctc

SEQ ID NO: 1175 - DNA, 120 bp, synthetic construct
  source 1..120: mol_type = other DNA
ccactttactaagccaaacaaacattcattaagtaccttctgtgtgccgaaccttatttatgttgttaggttaagtgtttgtaggagtccaagatgactaagacatgggactttgctctc

SEQ ID NO: 1176 - DNA, 120 bp, synthetic construct
  source 1..120: mol_type = other DNA
tcctgagtttttcctaggtaattattctgtgaacctgaaaacagagagacatatgagtctttctggcatatgtacaagagcctgtgttgactgaatgaacaaaagaagaggagagagagg

SEQ ID NO: 1177 - DNA, 120 bp, synthetic construct
  source 1..120: mol_type = other DNA
acatgacatctgccatcttctgtgccactgaaatgggatttaaaaatcgaacttcatggcttgttaatttaattcctaacatgatttgaaaatctttcaacccctaacacccatatgtag

SEQ ID NO: 1178 - DNA, 120 bp, synthetic construct
  source 1..120: mol_type = other DNA
aaggtatatacctagttccttttctcgcctcggtctgtttccaaagggaattcttggccacacctaagactgaagttggattcttacagatgaaagatagaagtagaccttgttttaagg

SEQ ID NO: 1179 - DNA, 120 bp, synthetic construct
  source 1..120: mol_type = other DNA
gggggagggaattaaaaaacagagcaaacccaccaatgttttaagccaatgtttggttgccttacctcctttatcctggatgtaattcgtttctaactgtggtataactaatcagtctag

SEQ ID NO: 1180 - DNA, 120 bp, synthetic construct
  source 1..120: mol_type = other DNA
aaaaagaaatgctttcccatggtgagacagtgcagccaggtgcttcgggagaattcccacattactgtgatcttatcccatctatgcataatgcaaccattgtttgtcaaacattttttt

SEQ ID NO: 1181 - DNA, 120 bp, synthetic construct
  source 1..120: mol_type = other DNA
atgaagcaggagtgaagctgaaatagctgtgtgtcattgtcattgccagaagtgtgtttttataactcagagagatatatttctggattggatcctggacctgggaggggaaaacttgct

SEQ ID NO: 1182 - DNA, 120 bp, synthetic construct
  source 1..120: mol_type = other DNA
tctttcacgtagtgtttagagacacgctttttcagaacagactacagagagatgtgtgtcttcttaacctatttgtaatgttggtttaacaatgagaaccagctttcagacagttccccg

SEQ ID NO: 1183 - DNA, 120 bp, synthetic construct
  source 1..120: mol_type = other DNA
ttcttcatccagttaaaaaaagaatgtcacgttagtccatgttcagagatatttggggctcagcaaactagcttggctccagttctagttgtttcgagtgtctgatttgaaacatactcc

SEQ ID NO: 1184 - DNA, 120 bp, synthetic construct
  source 1..120: mol_type = other DNA
attatgttctcataaggtataggaaaaactctgtgcataagaggccccatctgtaccactgtaccataatggtacagtgtccttgtcacaatgagattcccattatatgagacttgtgtg

SEQ ID NO: 1185 - DNA, 120 bp, synthetic construct
  source 1..120: mol_type = other DNA
ttagagttggaaacaaagactataaggcagaaaaatgtagtctgaatttgttctactactacctggggcccagggtactaggaaaactcccaggacaaaacgcaagagaaaatgaaagtt

SEQ ID NO: 1186 - DNA, 120 bp, synthetic construct
  source 1..120: mol_type = other DNA
ttgaccaccggaaagatctgttgtgggagtttatgtgctaaataacttcattgttctatgtgagtggcaactgacctcatctgttttactcataggtacttgaaaaaaagcccattgtgg

SEQ ID NO: 1187 - DNA, 120 bp, synthetic construct
  source 1..120: mol_type = other DNA
aacagtcacaggaagacatagcggagctgatggggcttaactacatcttaaggatccacaatgatgggcaaaacagccttccaatcaaattagtttgaaatgtcatatctcctaaagttt

SEQ ID NO: 1188 - DNA, 120 bp, synthetic construct
  source 1..120: mol_type = other DNA
gtggcttagaacaatgtgttttatgttcttgctgcaatcccagattggaatgtttgcccttggcatgtccaagagatgacacaggtgatttggaaatttacatgtactcatgcaaaagaa

SEQ ID NO: 1189 - DNA, 120 bp, synthetic construct
  source 1..120: mol_type = other DNA
acctttaaaaaatattctggcttcaaaaatactccatatttacatctttggttctatctgaagtaaagccgtgatggtgtgcgtaagtgaaacaggtgcaaaggggcaacaacaaagggc

SEQ ID NO: 1190 - DNA, 120 bp, synthetic construct
  source 1..120: mol_type = other DNA
ctagtaattctttctttctatggagggatctgaggccagtatctgaagaaaaggaggcttagaagggccactcttttctatacaatccacaaggggatttatatctacctgctttttgtt

SEQ ID NO: 1191 - DNA, 120 bp, synthetic construct
  source 1..120: mol_type = other DNA
acagtgattttcctattgggctggggtgtgacttatggcactttgaatttttggggagaaggtaggaaaagcttgatttctctaacagtccattttcccccttatagtccaaaactaatt

SEQ ID NO: 1192 - DNA, 120 bp, synthetic construct
  source 1..120: mol_type = other DNA
ggggaatgattggtctattaataatttaatcagccacttgcaattcagccttctttgaaatggtcgtgaaaaatccttccttcctgaaaacttctccgtgtggaggccattatccttagc

SEQ ID NO: 1193 - DNA, 120 bp, synthetic construct
  source 1..120: mol_type = other DNA
acttaaagccgtgccaactttattttctattttgggatcaataccctacaccaggggttggcaaactcttttcaggaaaggaccagacaatcagtattttagactttcaggccatttggt

SEQ ID NO: 1194 - DNA, 120 bp, synthetic construct
  source 1..120: mol_type = other DNA
ttcaaaatgttgcataaatcctcttcattgattttgagtgcagagtagcatagatttgcaaccttgccatcagtcctacaaatagtttcccgctgccacatacctaaatactttctgcac

SEQ ID NO: 1195 - DNA, 120 bp, synthetic construct
  source 1..120: mol_type = other DNA
tacagctgaagcctcgtaacccagactacagaagcaataaacccattattctcagagctctctgtgactacaaacaagatcaggtgtgtactcatttagaatgatacaaaagttttccct

SEQ ID NO: 1196 - DNA, 120 bp, synthetic construct
  source 1..120: mol_type = other DNA
aagagggcaggtgtttatacctgaagcttagacacacgatgccttgccataataaacaccttctaaaaaaaggaaccttgtgaaggtcaccttcactttgtcttgcaattttatgttgaa

SEQ ID NO: 1197 - DNA, 120 bp, synthetic construct
  source 1..120: mol_type = other DNA
gagtaaatgaatccaaatccatgaactgttttcaaagttatacctctacctgttactttatcagtgactgttgtaggtttttgtgcagtggtgtgagcgtgtccaggtttcccatttggg

SEQ ID NO: 1198 - DNA, 120 bp, synthetic construct
  source 1..120: mol_type = other DNA
ccagacaggtcggcttgggacatctttctctttgtatcaaccatccataccattttaaaaagaagggagtttgcataaaactggtttcagaaccatttctctgaatgctatatagccagt

SEQ ID NO: 1199 - DNA, 120 bp, synthetic construct
  source 1..120: mol_type = other DNA
taatttggcttcttgcagagaacaacctatgatatgggttagacagggggaatgatctttatttgtagacatgacactgacatgaagagatttggttggtgagatacgatctcaaagcca

SEQ ID NO: 1200 - DNA, 120 bp, synthetic construct
  source 1..120: mol_type = other DNA
tctctactaaaaagtacaaaaattagctgggtgtggtggcgtgcgcctgtaatctcagctactcaggaggctgaggcaggagaatcgcttgaacccaggagatggaggttgcagtgagct

SEQ ID NO: 1201 - DNA, 120 bp, synthetic construct
  source 1..120: mol_type = other DNA
tggtttggagagcatgttaattccgctagcctcgcatgttaattccactattctgaactataatgttatcttagaactaagttatgctctaagggccagaacttgagaattcttcagcga

SEQ ID NO: 1202 - DNA, 120 bp, synthetic construct
  source 1..120: mol_type = other DNA
aataaaaaatgacttgaacttgaagaagtcgttgttggccactatgaagacagaactacagaaagcccagcagatccactctcagacttcacagcagtatccactttatgatctggactt

SEQ ID NO: 1203 - DNA, 120 bp, synthetic construct
  source 1..120: mol_type = other DNA
ctaaacgccgccaggattccttagaatccatgaaatttggagattccaacacagtcatgcggtttttgaatgagcagaaggtataagccaactttttgttccatagctgttttgagatta

SEQ ID NO: 1204 - DNA, 120 bp, synthetic construct
  source 1..120: mol_type = other DNA
cattggcagtatccatttgaatggctggtttctattctttgactggtggtaggtgctgcattctccatttagcatacaaagatgtactgcttggtttaataatggtgtttgtttgtttgt

SEQ ID NO: 1205 - DNA, 120 bp, synthetic construct
  source 1..120: mol_type = other DNA
tacctgtcagatggtttaggggaaacagcctggagagatgagaatgggatacatttttggccctttgttttgctgtactttcttttgctgattttggaatgaacacactaaagaagagaa

SEQ ID NO: 1206 - DNA, 120 bp, synthetic construct
  source 1..120: mol_type = other DNA
gtttttcttttgacataatctctgatttcattccacagctgaaaaataccaagatcgaagttttggaagaggagctcagactggcccgagatgccaactcggaaaactgtaataagaaca

SEQ ID NO: 1207 - DNA, 120 bp, synthetic construct
  source 1..120: mol_type = other DNA
atgaactgagtaaggtaagaaacaattatgatgaggagatcattagcttaaaaaatcagtttgagaccgagatcaacatcaccaagaccaccatccaccagctcaccatgcagaaggaag

SEQ ID NO: 1208 - DNA, 120 bp, synthetic construct
  source 1..120: mol_type = other DNA
gaaagtgtcaaacaagctcacttgaggaatgagcatttccagaaggcgatagaagataaaagcagaagcttaaatgaaagcaaaatagaaattgagaggctgcagtctctcacagagaac

SEQ ID NO: 1209 - DNA, 120 bp, synthetic construct
  source 1..120: mol_type = other DNA
gctgtaacaggtgagatgtaggtgtagcaggtatgataacctgaaacaaaactccccacattttttcaaagcataattattgttaagagtaagacaggtctgcaacttacagttccttct

SEQ ID NO: 1210 - DNA, 120 bp, synthetic construct
  source 1..120: mol_type = other DNA
ggacctcattgacttcgatgaccgtcagcagatatatgcagcagaaaaagctatcactggttttgatgatccattttcaggcaagacagtatctgtttcagaagccatcaagaaaaattt

SEQ ID NO: 1211 - DNA, 120 bp, synthetic construct
  source 1..120: mol_type = other DNA
gacatagcatataagaggggctatttcaatgaggaactcagtgagattctctcagatccaagtgatgataccaaaggattttttgaccccaacactgaagaaaatcttacctatctgcaa

SEQ ID NO: 1212 - DNA, 120 bp, synthetic construct
  source 1..120: mol_type = other DNA
gtcaggaatttaaccataaggagcagctctttttcagacaccctggaagaatcgagccccattgcagccatctttgacacagaaaacctggagaaaatctccattacagaaggtatagag

SEQ ID NO: 1213 - DNA, 120 bp, synthetic construct
  source 1..120: mol_type = other DNA
taaaaattaaatggatcactgatattttagtcattctgcttctcatctaaatatttccatattctgtattaggagaaaattaccctcccagcaccagcccccctctcaaacccccaaccc

SEQ ID NO: 1214 - DNA, 120 bp, synthetic construct
  source 1..120: mol_type = other DNA
tgtttcaagttctcccttcctgcccagctcagttcaccagtgctggatccaggttcaaatgacagggacttgggtttttacaacagcgtggcaagtggtctgtctcctgggcagccatat

SEQ ID NO: 1215 - DNA, 120 bp, synthetic construct
  source 1..120: mol_type = other DNA
attgctccaagcctcattccctccacattcctgactcctgtgtggctatgggccaagcagtctttccttgagcctctgacatccgattctgtgtcatggggttatcagccctgccttctt

SEQ ID NO: 1216 - DNA, 120 bp, synthetic construct
  source 1..120: mol_type = other DNA
gatggtgaagtgttgtgactggcaaatacagaaagccaggagtgtgtgtcctttgtccgcctctcttccctcaggtctcctgttctttgagattacactggtgaccatactacatggatg

SEQ ID NO: 1217 - DNA, 120 bp, synthetic construct
  source 1..120: mol_type = other DNA
aatatcggctagaattaagagttcccacccctgagtcctcacagtggaaagaaagacatggacctgtctggggcagaggaggaggacagggccacatccttgtcagtgtccctgagcaat

SEQ ID NO: 1218 - DNA, 120 bp, synthetic construct
  source 1..120: mol_type = other DNA
cttttttttttttttaaactaatatttatcaaggaggcaccagctgccaggctgtgtgaagagcttccacacagcacctcattggctgcccagaagcaccctgtggcgcagagtcctttc

SEQ ID NO: 1219 - DNA, 120 bp, synthetic construct
  source 1..120: mol_type = other DNA
ccagcaccaaggactgaccacaacccaggggtcccaagtcacagccattcccctgccctgctccctcttcatttttgttagatgtcatcatcctacaccacttaaaagttcttttttttg

SEQ ID NO: 1220 - DNA, 120 bp, synthetic construct
  source 1..120: mol_type = other DNA
tcattgcactccagccttggtgacagagcgagacctcgtctctaaaacaagaaaaagaaggccagttgcagtggctcacgcctgtaatccccgcactttgggaggctgaggtaggcagat

SEQ ID NO: 1221 - DNA, 120 bp, synthetic construct
  source 1..120: mol_type = other DNA
tggagacagcgaagaggttgaggtgttctcgtaaatcagtggtgaaaattcaaatcatctttgggaaagtgggttggcaacatgtattgaaacttcattcattttgacccagtaattcca

SEQ ID NO: 1222 - DNA, 120 bp, synthetic construct
  source 1..120: mol_type = other DNA
agtgatcatattgtataggcttttttttttttctttgagatggagtctctctctgtcacccaagctggagtacagtggtgcgatctcagctcactgcaagctctgcctcccgggttcaca

SEQ ID NO: 1223 - DNA, 120 bp, synthetic construct
  source 1..120: mol_type = other DNA
tttactaagcacttactatgtaccacatcttactgtgccacgtgattggcctgtcagactgcctttaattctcaccacgtggtaggtaccattatcaattccattatacaagtgggaaaa

SEQ ID NO: 1224 - DNA, 120 bp, synthetic construct
  source 1..120: mol_type = other DNA
ttcacctttccaggaaacttccctgatccagaggttgggagtttgggttttgtgtcccgggagctgcgcacaactcacccagatctgcatgttgtggttggcgtcgatgagccaggacac

SEQ ID NO: 1225 - DNA, 120 bp, synthetic construct
  source 1..120: mol_type = other DNA
caagtgcctagcatgatagggctttggcacatagtagatgcacaatagatcgtatgaaaatgctggggttttaggtcagaacctggcatattccacatgcttcaatctgatatttggtgg

SEQ ID NO: 1226 - DNA, 120 bp, synthetic construct
  source 1..120: mol_type = other DNA
agaaactagacatgcatcaagtcatttgaaacaatagaagacagaattttatttaataagaaacaaaggagccagacagatctcctggttggacagggatggggagtctgggtggcttca

SEQ ID NO: 1227 - DNA, 120 bp, synthetic construct
  source 1..120: mol_type = other DNA
agatattgaggactgccagatggcaacagtagacaagacaccctagaatggcccatctagaaggaagtagataccttctctgtagggattcaacaagggggcaaagtgatgggcatcttg

SEQ ID NO: 1228 - DNA, 120 bp, synthetic construct
  source 1..120: mol_type = other DNA
tatgtcgtgtaactttttcaaagacaatgaaaagattatcatataaaatattgagttcagttgtcccactggacagagaggcaaactgagcctatgcagaggatcagagttggccagggc

SEQ ID NO: 1229 - DNA, 120 bp, synthetic construct
  source 1..120: mol_type = other DNA
ttctagcctgggcaacagagtgagactccatctaaaaaaaaaaaaaaaaaaaaggccgggcatggtggttcacacctgtaatcccagcactctgggaggctgaggcaggtggatcacctg

SEQ ID NO: 1230 - DNA, 120 bp, synthetic construct
  source 1..120: mol_type = other DNA
agacgtacccactgcattaaaatttttaattgttcaatgatgtatacatttagaatgtttttataacaacagcaatacctacctaccacgtaaatagggcctattaaatcccagcagtgt

SEQ ID NO: 1231 - DNA, 120 bp, synthetic construct
  source 1..120: mol_type = other DNA
gagggaaccaagaccctgagaggtgaagtcatttgcctttgatgacacaggaagtcagccaggggctgggattcgtgcccaggtaggcctgtgctctcacatttttcttttcttttcact

SEQ ID NO: 1232 - DNA, 120 bp, synthetic construct
  source 1..120: mol_type = other DNA
ttctaaccttattcccaagaagaaaaagaacacagcaatctacaagccagtgtctattgaaagaatgacctcaaagactttctgaactagtggcatgtgaacaggtgagtgctgagacta

SEQ ID NO: 1233 - DNA, 120 bp, synthetic construct
  source 1..120: mol_type = other DNA
ttgctctgtcgcctaggctagagtgcagcgatctctgctcaccgcaacctccacctcccgggttcaagcgattctcctgcctcagcctcccgagcagctgggactacaggtgtgcgccac

SEQ ID NO: 1234 - DNA, 120 bp, synthetic construct
  source 1..120: mol_type = other DNA
ctggcagtttttaaaaatattacgctttctaggctgggcgtggtgccagagcggggcctgcattccctggaccatgtcctccctctcaactgcacctctctcccagattgccctacagtc

SEQ ID NO: 1235 - DNA, 120 bp, synthetic construct
  source 1..120: mol_type = other DNA
gcgtttctatttttgtaccaatgtcccacagatgccattgttgcccagcagttggtggcaggaaggggggatttcggtgaggaggccctgagtgctagtagccacttatagaaagtcgct

SEQ ID NO: 1236 - DNA, 120 bp, synthetic construct
  source 1..120: mol_type = other DNA
ataactctgtcctcaagagcttggcagagaacaaaccaacacctccgaacgaccagacataaacagcaaggaacatcatcagcccacttgggaatagccaatcaccaaatgcttataaga

SEQ ID NO: 1237 - DNA, 120 bp, synthetic construct
  source 1..120: mol_type = other DNA
ctctaatatttgcaaggcctgagacaagaatacaaatggcagcctctggccccagtgctttctccttctcatcactgtggttctgacagccagcaagggtgctcatgtgtccacatgtgg

SEQ ID NO: 1238 - DNA, 120 bp, synthetic construct
  source 1..120: mol_type = other DNA
gcagggagacaagaagcagcaggaggaggaaggcccagctccatgaggctggacctcagcttgccctgctgaaaatgaattcacagccctgccccattaatcttttttttgttgttgttt

SEQ ID NO: 1239 - DNA, 120 bp, synthetic construct
  source 1..120: mol_type = other DNA
attcaactgatacgaagacattctgtaaacggtaacaaccctggcaaaatggggatgttcacagaggagaaatggaacccagagagaaataataataacaataaccgtagccaccatacg

SEQ ID NO: 1240 - DNA, 120 bp, synthetic construct
  source 1..120: mol_type = other DNA
gggggatcccagtcacccagaggaggcacagggacctgaacattaaaacaaacaatgcgaactaacagaggcagtcgtattttgaatatcattaccaaatttgaaaaaaaaaaatgacaa

SEQ ID NO: 1241 - DNA, 120 bp, synthetic construct
  source 1..120: mol_type = other DNA
ttaatacatgtgagatgcttaattcctggcatagagtcggccctagcacagtctctagcacatagcgcttaacaaaggtgttgttattattcaggacagacgtatcagacaaactgatgg

SEQ ID NO: 1242 - DNA, 120 bp, synthetic construct
  source 1..120: mol_type = other DNA
tgacaatgactcctactttccaaacgtctcctagggacttgacatgagctaacggctttcctgcatcatcacagccaccttatgaggtggatatcattatattcgttccatggattaaaa

SEQ ID NO: 1243 - DNA, 120 bp, synthetic construct
  source 1..120: mol_type = other DNA
ctcgacttactgcaacctctgcctcctgggttcaagtgattctcctgcctcagcctcccgagcagctaggattacaggcatgcaccaccatgcctggctaattttttgtatttttagtaa

SEQ ID NO: 1244 - DNA, 120 bp, synthetic construct
  source 1..120: mol_type = other DNA
agtggcattttggttaaaagcaagctccctggagccaggctgacctggtttgcctctcaggcccaatgcttaccagctatgtggctctggtgaatgatttcacctcttggggcttcaata

SEQ ID NO: 1245 - DNA, 120 bp, synthetic construct
  source 1..120: mol_type = other DNA
aggtgtgagccaccatgagtgagccagcatgcctggccggcagctttctcttaattacaattatttgactgacttcagtcactgtagaattgactgttctaaggggtggggtgaagtggc

SEQ ID NO: 1246 - DNA, 120 bp, synthetic construct
  source 1..120: mol_type = other DNA
attcacaggctgagtgtgtcagtttgatggggtaacccctgttgagtgcctggtactaagtaggtgccccagacacagaagctgtgaatattatttcatcatactaggacagatactttt

SEQ ID NO: 1247 - DNA, 120 bp, synthetic construct
  source 1..120: mol_type = other DNA
agtcagtggggatatgtgggctcttcccctaaacacacctcgctcctgcctctgccatgccctttcccagaccaacactcatcctttgtttgaccacctggccttttttttttaattttg

SEQ ID NO: 1248 - DNA, 120 bp, synthetic construct
  source 1..120: mol_type = other DNA
ggaacaagcattttgtttctaacaccacaaacatccatttgtggaactggctggtcagggctgcctctgacctgctgggtgacccacatcaagtccccccaccattctgggactctgttt

SEQ ID NO: 1249 - DNA, 120 bp, synthetic construct
  source 1..120: mol_type = other DNA
agtatctcctttgtagggcttttgcaagcgttaagtctgacagtacacataccacgcttagagcagcgtctagcatactgtaagtgctgaataaatgtcagttgttatattatctcttta

SEQ ID NO: 1250 - DNA, 120 bp, synthetic construct
  source 1..120: mol_type = other DNA
agtaagccatctaccaccatactaacggtacctgtatcaataaaggagttccgaggtgattttttcccttttctctattttttttgaggggcaagctgaggcagctatatggttaatttt

SEQ ID NO: 1251 - DNA, 120 bp, synthetic construct
  source 1..120: mol_type = other DNA
taatttattaacagtctttgctcatggacacttagatgatttccagttatcgggtttttgttacaggtacccacggaccacgcatctttacagagttggacgaataactttagaaggctg

SEQ ID NO: 1252 - DNA, 120 bp, synthetic construct
  source 1..120: mol_type = other DNA
gttaattattcagcagcatatcactgcctttgatcctttaaaaccaggccctaaatgtctgcatggacctttctctaacgaccaagaggaagagagtgttactgcagcgacaaatacgag

SEQ ID NO: 1253 - DNA, 120 bp, synthetic construct
  source 1..120: mol_type = other DNA
ttaaagtgaaagagtcagcccagtttgcccgaggctttctttcaacactgaaagtcctgcataaccatttagttccagcaaactgggagggttggtgaccctccagagccccaaggatgg

SEQ ID NO: 1254 - DNA, 120 bp, synthetic construct
  source 1..120: mol_type = other DNA
acctctatcacatggttccataggtgcagcgttagaaggaaattttgagttatattttaatctcttacccaaggtacaaaccccctttgtaacagccattcagctcattctgttgagcac

SEQ ID NO: 1255 - DNA, 120 bp, synthetic construct
  source 1..120: mol_type = other DNA
attttcttctagtggttatacatttggtactttcataagccataagtaagagacccaggataatttaaatccaggagactttatttagcctccggaatggcccctccaaccccaaatcca

SEQ ID NO: 1256 - DNA, 120 bp, synthetic construct
  source 1..120: mol_type = other DNA
caagaatcaacacatatgacaaggtagcttagctacacacatgagaagcctgagaaagtggttgttttgaactagggtagtcacctgtaccttgctttggtaatacaaagaatagtgctt

SEQ ID NO: 1257 - DNA, 120 bp, synthetic construct
  source 1..120: mol_type = other DNA
gacttatctcatttcttaaatgacagcagatgggttgcagcaccaatacgaagaaccagactatttcaatttgattcattgacgtaaaaccatcttctcctaaggacacacctatgagcc

SEQ ID NO: 1258 - DNA, 120 bp, synthetic construct
  source 1..120: mol_type = other DNA
tgagaactacattgaggtcctctgtttggcctctaattcccagttccctgaatgtattgatttccttctactgcctatcaagaccctgtcttggatatttatttatctcttcattcccaa

SEQ ID NO: 1259 - DNA, 120 bp, synthetic construct
  source 1..120: mol_type = other DNA
tttcccccaatcttgccagagtccaatacatttcctttcctctttatcttgcaacatgaaatatgtagaaacaatacaatggatgaagtgataaatgctcatcctgtgggtgtgtgcgca

SEQ ID NO: 1260 - DNA, 120 bp, synthetic construct
  source 1..120: mol_type = other DNA
actaggtggacacccgagtccagattaattcagcaggaaaaaagatccaaactttgaaaacttaacactaaacttttaaatcactgggtaaaataaaaataggccttcccggccgggtac

SEQ ID NO: 1261 - DNA, 120 bp, synthetic construct
  source 1..120: mol_type = other DNA
gattacaaaaagcatggttctcctctgctaggacaggtaattttgagttcagtatacttaattatattacgaatgaaagaatctccaaccatgaccaggaagagcactgcttacccttgg

SEQ ID NO: 1262 - DNA, 120 bp, synthetic construct
  source 1..120: mol_type = other DNA
caggttggaaagttgctggtaagacatttcttaactgccatagtccattttcaggcatacgttcatttgaatgtagatagattggccttctcttcacttagcgaataaccacttcctatg

SEQ ID NO: 1263 - DNA, 120 bp, synthetic construct
  source 1..120: mol_type = other DNA
cttattttaaattgaggacgaagtgtgcaatagagagcaacagaaaccactggcaccaagctccatgtcaaacaaagaatgaagaacgaagcatatttacttcattggagagaacacccc

SEQ ID NO: 1264 - DNA, 120 bp, synthetic construct
  source 1..120: mol_type = other DNA
ccaaaatagcattaaagtctgaaaactactccttaaaagtggattgaaacccaccactctgtcctctaaaatcaaaggtttcagcatccagcttgcactgttcatgttagctgtggcctt

SEQ ID NO: 1265 - DNA, 120 bp, synthetic construct
  source 1..120: mol_type = other DNA
caaactagatgacagagatgattttgataaatgaaaacacaccaaatatgtcttcatctgcatgaaagtgaacccctgcaatgcagagcctgcacccgggaagcagtaattctttgagtt

SEQ ID NO: 1266 - DNA, 120 bp, synthetic construct
  source 1..120: mol_type = other DNA
atgagtatttgttgcttcaataacacatttacagcttcagaaagcaagcagtgttttgcttcataggacctgatagccatgcatcttgagagtgaggaaaagttacttgccaacacactg

SEQ ID NO: 1267 - DNA, 120 bp, synthetic construct
  source 1..120: mol_type = other DNA
ggcaaagaggggttaaaattccccaaagctctctttgtatcatttaaaagaaaattagaaggataactcggaaaaggccaaataaggccaacaacgcttcacatacatgtacaggtgtgc

SEQ ID NO: 1268 - DNA, 120 bp, synthetic construct
  source 1..120: mol_type = other DNA
cccacatctcaataaaaccctctgctttgaccaggcctcttttctcaacgcctcaacttctaagttgcattctcaactccaatgttatttcaaaataccaagagatgaaatgttgtgttc

SEQ ID NO: 1269 - DNA, 120 bp, synthetic construct
  source 1..120: mol_type = other DNA
ggccacccttctggcttcctccttctcagtgactgtggtgcaactatctgcactattcatttgatatttagttatatataccaagtaagtggaagaatttgaaccttatgggaaaaaaca

SEQ ID NO: 1270 - DNA, 120 bp, synthetic construct
  source 1..120: mol_type = other DNA
attaaaccaaaaaaattttgcaaaggataacttctggttgagaagggatttctgcccagagcttttctggttcttaattctgtgtgatatttatgtctcagggaagctcctacagggcag

SEQ ID NO: 1271 - DNA, 120 bp, synthetic construct
  source 1..120: mol_type = other DNA
tccacttgaggataagccatcagaaatagacacttacctacacaggaagtcccagttatatctggagtgtacccagttttacaaatgcaatgatatgatcctctgtcattgacacattcc

SEQ ID NO: 1272 - DNA, 120 bp, synthetic construct
  source 1..120: mol_type = other DNA
cagctgggtgtatctgacctttacaagtctactctgaagtgcaatttagcacactcttattggtctccagaagtgagttttttcggctatcttattgctacatcctccaaagaatcataa

SEQ ID NO: 1273 - DNA, 120 bp, synthetic construct
  source 1..120: mol_type = other DNA
gacacatgttttgtagcacctctgtgaagcagtacccttcccgattgtctggaagggacattatatggcaaaggggatgtcaggaaattttaagagcaaacaaaatattaaaaatttggt

SEQ ID NO: 1274 - DNA, 120 bp, synthetic construct
  source 1..120: mol_type = other DNA
ttcatttcctatttcccagacaccaaactcccctcctgaaaagcaaccaattctggggccgatttctaatgtatccttccagagctggattatgcatataaaagcaaatacatacataat

SEQ ID NO: 1275 - DNA, 120 bp, synthetic construct
  source 1..120: mol_type = other DNA
cttgagctccccaaatgattccaaagtgcagcagaggttgagaattactgatccaggaggatccagtgtgtgacaattaatctacatattttctgattctgtgcttttagaatctgttct

SEQ ID NO: 1276 - DNA, 120 bp, synthetic construct
  source 1..120: mol_type = other DNA
cgggtccacagatgcacatatatgtgccaatgaggttcttgcattccatttgtttttcagtacagtcatgttttccctcttcacactcatcctcatctgtaaaaaatgtacaatcacaaa

SEQ ID NO: 1277 - DNA, 120 bp, synthetic construct
  source 1..120: mol_type = other DNA
agccatcgtgcctggctgtccctttatgttttatactcctttgttgaagcatgatttctaattcttgttgactaattgaactaaaagggcctcatgtaattataatataatggatatatc

SEQ ID NO: 1278 - DNA, 120 bp, synthetic construct
  source 1..120: mol_type = other DNA
ttcatattgggttttttgaacgtggggaaatgtctttttctttctattcccatatcttgtagaaatactggcgtgttgtgagcatgcgatgcacagtgagacctaataaaggatgtgcag

SEQ ID NO: 1279 - DNA, 120 bp, synthetic construct
  source 1..120: mol_type = other DNA
ctaagaacacgagtgagagcccagatcatgacttagtcacaacctttaaagatttaccacaactctgacaatgggcatttgatagatcatatctgatgaagagctctctttgctaccaac

SEQ ID NO: 1280 - DNA, 120 bp, synthetic construct
  source 1..120: mol_type = other DNA
caaaacctccaatcacattcttgcaggttccatttccacaaggattgccaacagaacattcatcagtatctgcaagaaaccaggaatgtgtccaaaacatgatgaattgagataatacct

SEQ ID NO: 1281 - DNA, 120 bp, synthetic construct
  source 1..120: mol_type = other DNA
gatggtttacattaggaagaggaaaggctagaaaaaaatatgtttaggttatgaccgctctaaaacacaggcggagagaacaaatctttgaccagagacctaaaatgtgtgtgtgtgtgt

SEQ ID NO: 1282 - DNA, 120 bp, synthetic construct
  source 1..120: mol_type = other DNA
aatttcacaaagactttcattatgatgttgtcctttctagtatctcttctgatatgtccagtgtctgccttcaccattaggctgtaaggtccatgaaaggaaggaacttgtctttgtggt

SEQ ID NO: 1283 - DNA, 120 bp, synthetic construct
  source 1..120: mol_type = other DNA
ttctaattagacttacaattaaattaaattgtgttactgtctttaaggcctacagtcttacttacatcatggccagtctgcaccctgcatggcccagagagaaatgcagatgacagacat

SEQ ID NO: 1284 - DNA, 120 bp, synthetic construct
  source 1..120: mol_type = other DNA
ggaagaggagggcagggctgtgggtgggtgggaacagaatagtctttctttgaaagaatatatttcaatattgattattgctttgatgactccaacaaagaagatgggatctacttccta

SEQ ID NO: 1285 - DNA, 120 bp, synthetic construct
  source 1..120: mol_type = other DNA
taatattggtgtattaaaattctcattctcttttcctttaatagctgacttcgtcccagaccccagctctatctcccccacaccactccaccccgaaaaaaaaaaatcttggcattagac

SEQ ID NO: 1286 - DNA, 120 bp, synthetic construct
  source 1..120: mol_type = other DNA
ttgtcacagtaaggctggttgggcagatattattgttgtttaaaatgaggaaattgagcttccaaaagattaaatgacttgctctagactaaatatggcagggctgggaccccaaactca

SEQ ID NO: 1287 - DNA, 120 bp, synthetic construct
  source 1..120: mol_type = other DNA
ctctgggtgaatgaaaactctccatcttcctgttcacaaagaaacagagctttgccatgtttgaaaaataagaccaccacaaataaacatgcagcattgaaagcccaaagccttcaaaga

SEQ ID NO: 1288 - DNA, 120 bp, synthetic construct
  source 1..120: mol_type = other DNA
ccagctcatgccagttggcctgactttattgttaatagtgcccttttctactttcaaaattggcttgggttggtcaataaaacatacgattacctatggaaaaatatgcccactctattc

SEQ ID NO: 1289 - DNA, 120 bp, synthetic construct
  source 1..120: mol_type = other DNA
cttcttgaaaatcctttcaaccctacttatttatgaaattctagcaattaatgtccttcacttaatgatatgacatatttgttgaggttaaaggaaggcccttgggaggctgaggaagga

SEQ ID NO: 1290 - DNA, 120 bp, synthetic construct
  source 1..120: mol_type = other DNA
gttttgacaggtacctggtgcacattttctgggttctagaagacattcattgatatctgcaaagaaaagggaaaaataaggaagaggttcccactggcatgacttccatcaaacaattaa

SEQ ID NO: 1291 - DNA, 120 bp, synthetic construct
  source 1..120: mol_type = other DNA
ctggcactggaaagaccccactgtattaatgcattggccatttctgcaaagattcccatttccacttgcacattcatcaacatctgcagaaaaatccccaacaatcctttaatatattcc

SEQ ID NO: 1292 - DNA, 120 bp, synthetic construct
  source 1..120: mol_type = other DNA
gatgctaattacaaagaacacatataaaactgacttcctttgctgatgcacaattttgcacacgcacctatacagtcattgttgtgagaaaggatgaaaccatgattgcagcggcagttg

SEQ ID NO: 1293 - DNA, 120 bp, synthetic construct
  source 1..120: mol_type = other DNA
aggcaccatgaagagggacaaggatgaaatgagagagagagagagtggaaggtaacaacggagaatagcaaaatgtaatgattagagctaggattccctttcttttcacattttggacat

SEQ ID NO: 1294 - DNA, 120 bp, synthetic construct
  source 1..120: mol_type = other DNA
cacatggtttggtcatcatttgttttaaaaccagtgtggcaaaggcaataaaagcttccaactgtgtcaatgcactgcccatgactgcatatattggggatttcttgacattcattacga

SEQ ID NO: 1295 - DNA, 120 bp, synthetic construct
  source 1..120: mol_type = other DNA
tttaaagctctatgtttagagtaaatgtactttgaagagcactgtgccattctgattttcctactgtcacagaagaaagcaaatggagtgtcatctttgctgcagatgctgtagggcaga

SEQ ID NO: 1296 - DNA, 120 bp, synthetic construct
  source 1..120: mol_type = other DNA
taactatccagcttctgctgtcagactagcatcctgagctcagatatctaattattctctcagctctctcagcaataatgtgggtgctatggccaggtgtgatttgggatttgaaataat

SEQ ID NO: 1297 - DNA, 120 bp, synthetic construct
  source 1..120: mol_type = other DNA
ccacgttcccctgtgttgtttcattcacaaatgcataaaatatccaggaaaccccccgtgaaatgaaccgtgagcaaaataacacattcttcctgactaatatacaatgatttgctttgc

SEQ ID NO: 1298 - DNA, 120 bp, synthetic construct
  source 1..120: mol_type = other DNA
cttaactcatatattcttcagcttaactatctgaaaataaatccagatatctgaagcttcatgaagacaaactcttgggtaggcatgtccagcctgtggggcactacataccattgcact

SEQ ID NO: 1299 - DNA, 120 bp, synthetic construct
  source 1..120: mol_type = other DNA
tgcaaggcttgatttatgaccacatatggactctaatgatgctcacatctaaaaaaaagtcatgaaacttggctgctagggccagcacttgacatgggtatagattaatatcctaggaag

SEQ ID NO: 1300 - DNA, 120 bp, synthetic construct
  source 1..120: mol_type = other DNA
aagttactacatgtccatgctatatcatggggcaaaatacatgtttccctcttccctgctccagtggaacaatctaatttacagactaagtccaataaaggggatggcctataacacagg

SEQ ID NO: 1301 - DNA, 120 bp, synthetic construct
  source 1..120: mol_type = other DNA
agtaagggacatgtgcccacttggacacagtaactgaaagcctggtgacaggaacttaacaagtatgtggttaggactataactttacttgtggtatataagttgtcttcagtatagaca

SEQ ID NO: 1302 - DNA, 120 bp, synthetic construct
  source 1..120: mol_type = other DNA
gatatgataaagtcatgatgccacttaccttcacaaaccaacaacttgtcattatagaagaatcccactggacattcacatcggaagctgccaaccatgttgatacacactccattttca

SEQ ID NO: 1303 - DNA, 120 bp, synthetic construct
  source 1..120: mol_type = other DNA
gagtggtcccatctctgtcttacccactctgaactcctgaccactgaagtgccctctaggataagagtagtaatagtagtaataatggtaatagtattaatagtgacagtatctcatttg

SEQ ID NO: 1304 - DNA, 120 bp, synthetic construct
  source 1..120: mol_type = other DNA
tcatgctggaatttggtaacaataagcatatagctaaataacagatgtccagttttcaagagctagaagcaaactaagccatgagtcaggactgtgttctggtcccagctctgttattaa

SEQ ID NO: 1305 - DNA, 120 bp, synthetic construct
  source 1..120: mol_type = other DNA
aactcagagaatgcaatagctttccatctacttttatgttatttggttttaaaccacaagggcattgcctgcactggctgagtgctgtgtaatacttctgattcttgcacaagcatctct

SEQ ID NO: 1306 - DNA, 120 bp, synthetic construct
  source 1..120: mol_type = other DNA
gtgcctctctctactctgcatttagagatctagggtttgaggaacacgtataaaagccattttctcggtagattataggagaccatagcaaatctagccacattcttgacatcagatcta

SEQ ID NO: 1307 - DNA, 120 bp, synthetic construct
  source 1..120: mol_type = other DNA
aatgcacaccaggtgtgcataagcttcagattttttaccaacaggtaagtaccacctaaagttgtaaagaccattattcaagatcaagggtcagcaaactttttaataaagggacagaga

SEQ ID NO: 1308 - DNA, 120 bp, synthetic construct
  source 1..120: mol_type = other DNA
ctgctagaaagtttggggctaaaattattgcttatttcaggcaagtgtgtagaattcccggcttgaattttgtgtattagtcctgctcctggctctttcttattcttgtttgccatttgc

SEQ ID NO: 1309 - DNA, 120 bp, synthetic construct
  source 1..120: mol_type = other DNA
attaactgttgtttgggattttccaacatacattttagagaaaactcccaaccacccacccgtggtggtgaaaaaatgccaagttatgatttataggggaagagtctcctaacaagacag

SEQ ID NO: 1310 - DNA, 120 bp, synthetic construct
  source 1..120: mol_type = other DNA
aatatcaaatatcccttaggaagacaagtacgcttcttatgctcacaaaatctatgatagggtatatagtatcccgaagccattaacagctggcttcatgaatctgcattggtaaggcag

SEQ ID NO: 1311 - DNA, 120 bp, synthetic construct
  source 1..120: mol_type = other DNA
ctccttggcacagccctggtagctcctggcactcatcaatatctatcaaaatcaaaacaaaggcattcctttagcattgtaaataaacccaaggaaattcaagttgtgtgtgctttaaga

SEQ ID NO: 1312 - DNA, 120 bp, synthetic construct
  source 1..120: mol_type = other DNA
tgtatatattccagttctaactctggtccagatctggtgtggtgtggatatctattgttttgctactgtcattaatctacaaagctgactccccaaattaagtgtcttagtttgccccct

SEQ ID NO: 1313 - DNA, 120 bp, synthetic construct
  source 1..120: mol_type = other DNA
gccttccaaactagtcaatagatgagaagaggagagataatcaatgtgtccctggaacgtaagcaacatggtgaaagtaccctagtctggaaaatctttaaagtaatgctatctgctttt

SEQ ID NO: 1314 - DNA, 120 bp, synthetic construct
  source 1..120: mol_type = other DNA
tagtggagttatcacctgagccagtgtaggcagacatcaccataaaagaacagggcccaatctagagctccaaacaagaattttaaagctactagttataactacatctagaaatgcagt

SEQ ID NO: 1315 - DNA, 120 bp, synthetic construct
  source 1..120: mol_type = other DNA
attccagatatttaggacatgggttttggcaaattccactctgtacaattccttttgtctgttttgaacactcatgaaatactcaagaatagacaaacggcttctgtgaggagggactgg

SEQ ID NO: 1316 - DNA, 120 bp, synthetic construct
  source 1..120: mol_type = other DNA
cagggaggttgtggcaagttccaaagacacagatgttcggaagggagcactcatcaatatcttggggggagggagaaaaaagcaaaaaacttaacttatatttttctaaaaaaaacctgc

SEQ ID NO: 1317 - DNA, 120 bp, synthetic construct
  source 1..120: mol_type = other DNA
atttgtgtcaccagaggtggcacagtacctgttttccttggatatttggagtaacaaaagtaaacaaggtattaggcacatgatcaagagcataatctggtttcttgactccaaggagtt

SEQ ID NO: 1318 - DNA, 120 bp, synthetic construct
  source 1..120: mol_type = other DNA
agccagaaagaaacacacgttactcttcctcggttaggggctttctaattcctcaggtctatcaactttccagtgcagcaatgttttggcataacttcaatttgacacatttaaagtcat

SEQ ID NO: 1319 - DNA, 120 bp, synthetic construct
  source 1..120: mol_type = other DNA
gacgataatgatgatgatgatggcctgttggagagaaatacatactgttcttctaatctagaacatctaatcccttctccttacatagttccctacagcaagcttatccttgtgttggta

SEQ ID NO: 1320 - DNA, 120 bp, synthetic construct
  source 1..120: mol_type = other DNA
ttgaagcttcctgctgtattggtacatacagcatgtttgccacagttgtgtgctccaatttcacattcattgatgtctggaaaaatgagcagtgatttagaaaaaggctcagcacaaatg

SEQ ID NO: 1321 - DNA, 120 bp, synthetic construct
  source 1..120: mol_type = other DNA
gaagcccaattaaatgatttgaaagtgtttgcaaacatgctatctgccaagtgttccatctgaagctctgaaatggtcctgggatctttggcttcttcataacttctagagcaaacacaa

SEQ ID NO: 1322 - DNA, 120 bp, synthetic construct
  source 1..120: mol_type = other DNA
agtatcaaagcctccagatgttatagaatcaaggaattttctaagtggaaagaactcgtaattccattctcccaatctcagtttctcagaagaagacaaagaagttgggccctacaagtc

SEQ ID NO: 1323 - DNA, 120 bp, synthetic construct
  source 1..120: mol_type = other DNA
atgtgggtgtgtgtgcatgcatgcaccaactatcattcattaattgtttctgtggcagacttggactgtaattcatcataaaagcaaacagaaggggaaagtgagccataaggaaaacaa

SEQ ID NO: 1324 - DNA, 120 bp, synthetic construct
  source 1..120: mol_type = other DNA
taattatgtagaacaagcagcagaagccttacattgggtcatagaaaaattgtaatccagcccacttaagccaaggatagaagagctgtgttctgcgtttcaagcaaatgtgttctctct

SEQ ID NO: 1325 - DNA, 120 bp, synthetic construct
  source 1..120: mol_type = other DNA
aaatgtttctttgacttcaaatctatgttcatgtgattgactcaaaggctgctgttcttaacgtaaagctggtgtcacttcatgcaactgtagtgcacagctctgttaccatggtcttag

SEQ ID NO: 1326 - DNA, 120 bp, synthetic construct
  source 1..120: mol_type = other DNA
ctgtgccatttatcagaatggacccctagacaggcttcatgtaaggagtagcatagtgaaaatgaaaacattccagcttcatgcttcttctcataatttggctagcatctgttatttttg

SEQ ID NO: 1327 - DNA, 120 bp, synthetic construct
  source 1..120: mol_type = other DNA
atattttattgttctacttgaacaaacacacctgtacagccagtttttccttttttgccggagtagcccatatcacagtggcagataaatgagcctttcgtgttttcacaggtcccactt

SEQ ID NO: 1328 - DNA, 120 bp, synthetic construct
  source 1..120: mol_type = other DNA
cagagtaaaggacaggagagagctacacagaagaaagcaatgccagagatttgctaagagtcttctgcaagtattcagatgagtagtgaccagcacattcatataaggaaacaaactact

SEQ ID NO: 1329 - DNA, 120 bp, synthetic construct
  source 1..120: mol_type = other DNA
agggttaagtggacaaaagtaatggataggcataaaagaaatgtccatctggagctgacgaatggccagtcagtcctcataacatatctgacaagagtaccatttaatagccacaagaaa

SEQ ID NO: 1330 - DNA, 120 bp, synthetic construct
  source 1..120: mol_type = other DNA
cagtaaaataattttggttcctaaatccaaattctcttcttaagccaagccaaaatcaaagcctatgttattacccactttgtttctcacctctacctggctcacagctctcgcagccag

SEQ ID NO: 1331 - DNA, 120 bp, synthetic construct
  source 1..120: mol_type = other DNA
tgcaaatcccggctgacagctacattcatagctgccttcagagtttgtgcagaaggtttcacaaccaccattcattatgctgcattcatcaatgtctaaaagaaatgaaaataatatcac

SEQ ID NO: 1332 - DNA, 120 bp, synthetic construct
  source 1..120: mol_type = other DNA
gctgaccacaaagcaaaattcttgtcccacaaaaacccatctttaaggagagccaggcatagcctcaattgcagtgtaagatatgaacattccatggtcttctttccaatagttattttt

SEQ ID NO: 1333 - DNA, 120 bp, synthetic construct
  source 1..120: mol_type = other DNA
tttcttctcctgcactaccctgctctccttacttcctgacaagtaccttctgagagaatttgctcacagtaagaaataccacttttgcaagaatctccatttcaaactttgtttctagga

SEQ ID NO: 1334 - DNA, 120 bp, synthetic construct
  source 1..120: mol_type = other DNA
tggggcaaaataagtttatgagcaagcagtcaggaggtctcaatgcccaccattttaaatcatgaaggttggaagttcttgatttaaggtcttggcagtatacatttccaagaatgtgtg

SEQ ID NO: 1335 - DNA, 120 bp, synthetic construct
  source 1..120: mol_type = other DNA
gaactgggagattaaatctccagaacaccaagtccttcttcagcaatgaattaccatagcttttggaagcaaaattaaagttcctttgagtttacgtaactgacatttaagagggccacc

SEQ ID NO: 1336 - DNA, 120 bp, synthetic construct
  source 1..120: mol_type = other DNA
gaaaaatgcaaagaaaagccattcactttacttctcaaatatttctttcacctaaacacgtgcttaagggcacattcttcaaggtacttgtgggatacctctagccccaaacccaaattc

SEQ ID NO: 1337 - DNA, 120 bp, synthetic construct
  source 1..120: mol_type = other DNA
acctacaatagtcttcactgagcctacacttcaaagtaatgtggtttcagatgcaaagtacaggtaagcatcatttccagagtcatgaactcagaaaccagtgatccaagggatatactc

SEQ ID NO: 1338 - DNA, 120 bp, synthetic construct
  source 1..120: mol_type = other DNA
gcatccaaagtcattccactgggacactgacacttgaatgaccccctagtgttaacacacaggccatttttacacactcctgggaacacttcacattcatctatatctaaaaagaaaaaa

SEQ ID NO: 1339 - DNA, 120 bp, synthetic construct
  source 1..120: mol_type = other DNA
tttgggttttttgttttgttttggccacttgtacaacaaaatatgctgctgaggtcagataagttattaacagcgggtctggaccagagaaaggccaaaggattcagtcatcatttggaa

SEQ ID NO: 1340 - DNA, 120 bp, synthetic construct
  source 1..120: mol_type = other DNA
actccaaaagacacagacgtgccctatagatcatgttaaagtgatagctaagagggaaactgaaggtagctttctctcttgctgttcacctgaaaataggaatcacactatagaattact

SEQ ID NO: 1341 - DNA, 120 bp, synthetic construct
  source 1..120: mol_type = other DNA
tgcagatggtttttgttggatccaaagtactttcagaagaacattcacaaataaaagagcctgggctgttcttgcagactccattaatgcaaggacttgattcgcattcatcaatgtctg

SEQ ID NO: 1342 - DNA, 120 bp, synthetic construct
  source 1..120: mol_type = other DNA
gtagcatttatgattgtcatggggaatttagcttcatgattcagggacctcaggaaaactgcttgcttttagctgaataatatgcctgtctgaagcaaaacccaactttaagagagcagg

SEQ ID NO: 1343 - DNA, 120 bp, synthetic construct
  source 1..120: mol_type = other DNA
gtaatgaccttaggagctacaggaggaaaaaaatcgatttcactggaaagagaacactctgtctctttttctcactgtaagatattctgagtccaatctttctcccacaagttcctgaga

SEQ ID NO: 1344 - DNA, 120 bp, synthetic construct
  source 1..120: mol_type = other DNA
ctcagttaattgttgtcactgctctctattgccattttataatactgagcacttaacagttcagaatccttcagaatgcagatggagaatggttcaactagcccatcatcccgagtggta

SEQ ID NO: 1345 - DNA, 120 bp, synthetic construct
  source 1..120: mol_type = other DNA
accatcttggggataattttgtttctcagtgctagctgttttttcagtacaattggttcttaacatttcctcatttctctctgcaaattctctagcctcctctcacaagagcaacaacag

SEQ ID NO: 1346 - DNA, 120 bp, synthetic construct
  source 1..120: mol_type = other DNA
gcagcccttttcctctgttagtttcttctcccataaatttggaatgacaactcccatttcacctggtggctgtacagaattaacattacatgtttaatgattgaacgtgtactgtgcaca

SEQ ID NO: 1347 - DNA, 120 bp, synthetic construct
  source 1..120: mol_type = other DNA
aaaggcaaataactatatgcaccaaggttcctggattctaaatcttggctcttccaatcattcaacatgtgaacaagtcacctgtactcttgtgtgccagctttcatgatacttgtctgt

SEQ ID NO: 1348 - DNA, 120 bp, synthetic construct
  source 1..120: mol_type = other DNA
tataagccacctcaaatccttttgaaaagtaggtgaggaaaattcagaaataagcaaaatacacaaataactaaatcccctgattaagtaatttggctgcctgttgatggaggaagagaa

SEQ ID NO: 1349 - DNA, 120 bp, synthetic construct
  source 1..120: mol_type = other DNA
gcaaggtgcatgtattgcaaacagcttgagtattattgaggtaggagagtttatacgagaggcacaaatgcaatgcctattccaaataattatgaggcttagataagtacctgtgactag

SEQ ID NO: 1350 - DNA, 120 bp, synthetic construct
  source 1..120: mol_type = other DNA
tatgtagatgttggtcaactaagctgtgttatctttaccaccaggaagacagtctcctgctatgccctatccttttccaattcaaatggcttactgagtacctttcttaaaaataatctg

SEQ ID NO: 1351 - DNA, 120 bp, synthetic construct
  source 1..120: mol_type = other DNA
aatggctgctaaaagacaaagggttttgtgaaatgtataaccagggtagctcttccagggctctcagaaatctagggtaatagtaaactacaggaagactttccttttggtattcatcac

SEQ ID NO: 1352 - DNA, 120 bp, synthetic construct
  source 1..120: mol_type = other DNA
ggtcaactttttattcaaattgtgacacacagcaaaacgtggagactacaacctgaaaggtaacacaaagggtttttaataagaacggagatgtaaggtagatccaaagggaggtaacct

SEQ ID NO: 1353 - DNA, 120 bp, synthetic construct
  source 1..120: mol_type = other DNA
aaaccaccttcctccttcaaatttgaaacacccaactgttttctcttgctgggaagacaggtttgcacaatattaagagccattgatgtgaaggtcatagagaatgtaggtaaacaacca

SEQ ID NO: 1354 - DNA, 120 bp, synthetic construct
  source 1..120: mol_type = other DNA
agtttcagtcaggtttcccaaaccaaaattcaaggtactttaagtggggagaatcagtaaagaaaggtagtacctctaaacaacataaggaggagaaaaggcacgtgaagaacatgatct

SEQ ID NO: 1355 - DNA, 120 bp, synthetic construct
  source 1..120: mol_type = other DNA
gctgtggcagtgaacctttaagatcccttaaacattggggatggttctttaaattcatcactatgttattttatttgatattaaagctgtcttgggaggcacttgctcttttagacacag

SEQ ID NO: 1356 - DNA, 120 bp, synthetic construct
  source 1..120: mol_type = other DNA
caacatatgctatttttttaaacaatcaccttaattctgcctgaaaaccgtcaatcacatctctaaaatgtccatcttccttataccaattctggtttacgtgcagggttactgctgata

SEQ ID NO: 1357 - DNA, 120 bp, synthetic construct
  source 1..120: mol_type = other DNA
tttttctctcttcctcaatttcagaatgtcatggggttccccattgccctataagacaaatttaaagcttgtcattcaaagttctcctctactgtgtttctgcccatccttctatcccct

SEQ ID NO: 1358 - DNA, 120 bp, synthetic construct
  source 1..120: mol_type = other DNA
acagagtatttgcctgttttttttttctgtctttactgaattaatgatacagttcattttgtgcttaatttagagatagagatggagatagatgtttgggctccctgacagtgatcattg

SEQ ID NO: 1359 - DNA, 120 bp, synthetic construct
  source 1..120: mol_type = other DNA
tttatgacactgtctttcagaatgacaataggtggaactaagttcaaaaaagccacgggactgtattagtctcttccggcatgggttatttaaactccatggaactcctttgaagccaac

SEQ ID NO: 1360 - DNA, 120 bp, synthetic construct
  source 1..120: mol_type = other DNA
aaccctgagttagatgttcccacttctactcagctctggatgacctctagaaggggtgttcatatcatcaggaaattaaatagtttgggaaagtaagaactcatcatttctgacaaatca

SEQ ID NO: 1361 - DNA, 120 bp, synthetic construct
  source 1..120: mol_type = other DNA
agcgtccattttgacagagatagcggaccaactggcagtaatcagtaacgtttactggcagcacccctagaagaacattaagccccattaaaattattttaactatggtatctttcatca

SEQ ID NO: 1362 - DNA, 120 bp, synthetic construct
  source 1..120: mol_type = other DNA
ttcacaggtcaactggagaaaagaaaaagaaccaactgactggattcccatttttaatacctgcagcagcaaccactctggaacaataattcaaatccaaaaccatgttcctcccaaaac

SEQ ID NO: 1363 - DNA, 120 bp, synthetic construct
  source 1..120: mol_type = other DNA
tgggtcgggtatgaatgctgcatagtgaccctctgaatgaggacatcctgacttcatcatctgcttccctatgattctacatttttaggatgattactatttttcacagtgtcaggtctt

SEQ ID NO: 1364 - DNA, 120 bp, synthetic construct
  source 1..120: mol_type = other DNA
cactaagactgtgtagtctgtgaagtcagggatcatctctaactcatgactagttcccactctcagccttgccctgcaaattgcacataacaggaattcattaactatgtgttaatttta

SEQ ID NO: 1365 - DNA, 120 bp, synthetic construct
  source 1..120: mol_type = other DNA
atgagactacaataatgaatgagatttcctaatgagattgatcaaccagtaaaagagcaagatgtgaacacacatatggcactcatgccatagtgatagtaccagccagaaccacaggag

SEQ ID NO: 1366 - DNA, 120 bp, synthetic construct
  source 1..120: mol_type = other DNA
gccagctaagtaaaaagcagtacctgaaaacagtactctttgtacagacccctttttttttcctgtgcattttctagggaaatttccctggacgtcatctcttatatttcctggagacta

SEQ ID NO: 1367 - DNA, 120 bp, synthetic construct
  source 1..120: mol_type = other DNA
ttacggaaagagtttgtggcataggaaaacctaacttctccatatgcctttgagatattaccacgaaacagtgaaggcaggtaagcaaaatgcaaaacacttttactgcctgacatgtgc

SEQ ID NO: 1368 - DNA, 120 bp, synthetic construct
  source 1..120: mol_type = other DNA
catagccaaaaatccatccctgggtttcctgtaagtctgaatattaaatttcaagttttctcaaagagggtcatacctgtaattgttatcatctacatcattcttaagaacacaaagccc

SEQ ID NO: 1369 - DNA, 120 bp, synthetic construct
  source 1..120: mol_type = other DNA
cagcatgggctatctttcagagcaaaactagggcctacagttgccaatgacaaaagcttaatgggctaatgtctattattttgcaaatcaactatgataccatgttattgcccatctggc

SEQ ID NO: 1370 - DNA, 120 bp, synthetic construct
  source 1..120: mol_type = other DNA
ggttttctattggtgagacctactcattccaaacaactgtcttacgaacaagccttggatttgtttatactgtcaggggctatttgtattttctcatcactacggataattttgggggtc

SEQ ID NO: 1371 - DNA, 120 bp, synthetic construct
  source 1..120: mol_type = other DNA
aatctattttttaaacaatagaacccctgatttaattgatacctgacatggaagtctaacactcacagcagataaagtgaaattgctatgcctagaatgtgtgtgggagtgtggggggac

SEQ ID NO: 1372 - DNA, 120 bp, synthetic construct
  source 1..120: mol_type = other DNA
tcgtcagtagaaggactcagatgttaacactagtcaaatcatgtccctggaaacagccatcattaaaaagtaaaaaccgcatggagaacagtcaattcaaaggtagatgctgcttctttc

SEQ ID NO: 1373 - DNA, 120 bp, synthetic construct
  source 1..120: mol_type = other DNA
ctcctgggagtattacaatggccaggctgacaccgttaaaactgggaaaggcttacaacccccaataagaacatttattctacaggctaagtactctcttcatttataagacaaaataga

SEQ ID NO: 1374 - DNA, 120 bp, synthetic construct
  source 1..120: mol_type = other DNA
aagaacaataatgatgagagtttgcatgtgctgagtgctagacatagtcaaaatgctttatgtgtacccaatcatctaatccttataatgcaggtaggactgtgggcctgattctatacc

SEQ ID NO: 1375 - DNA, 120 bp, synthetic construct
  source 1..120: mol_type = other DNA
catctattacttggctatctagaagctccatccaagattgtggacttgacaagagaaacctgatcctgacagttaacctgatcctgactgcctagatactaatacaatgagagaaaaaaa

SEQ ID NO: 1376 - DNA, 120 bp, synthetic construct
  source 1..120: mol_type = other DNA
gaaaatggagtctgaattctggaactggaaagaacccccacatagcatcttgttcaaccccctcatttgaaagctgaagtaactcagagatggtaattgacttatctaagatcacacaaa

SEQ ID NO: 1377 - DNA, 120 bp, synthetic construct
  source 1..120: mol_type = other DNA
aattctgcaagaggaagatctcatggaaagcaactcgaataatggcattctcagatctgagagcgtgagggttagcatcttgtgaatttgctaaagccaatttgatggaattggtttttc

SEQ ID NO: 1378 - DNA, 120 bp, synthetic construct
  source 1..120: mol_type = other DNA
aataactttcatctaggaaagaggacaatgtaatatggctcagcaagcaccagagtgtgagttaaagaggtaaatttgagcagtcttgtctgaatggcctcagacagggtacttaataca

SEQ ID NO: 1379 - DNA, 120 bp, synthetic construct
  source 1..120: mol_type = other DNA
cccctctcacgaagaaattatgactgtaattggaagtcaggcctcatttcggcaaagagcagtagcagtagtggtgactataaacacatcctctgtatatatatttgtagaagttcaatc

SEQ ID NO: 1380 - DNA, 120 bp, synthetic construct
  source 1..120: mol_type = other DNA
tttcccaccttccatgtttcctaatgtagaggagagtgcattaacttttgcgggttttagcacatatgcagcaaagtataaagatacgtttaaaaggccattattcacggcctcattttt

SEQ ID NO: 1381 - DNA, 120 bp, synthetic construct
  source 1..120: mol_type = other DNA
tgtcttcaatataagcttccagaaagcagggactttgtccattttcttcactgttgtataaccagcacctaaggactaacttgggttcttatgtgtaagcccaaatattaaccttccagg

SEQ ID NO: 1382 - DNA, 120 bp, synthetic construct
  source 1..120: mol_type = other DNA
gacaatgggtcactgatgggcagctgaggcagttaaaagtctagctctctggtcactgtcaacaagttcatgggtattagctaactttgtaatcccaagatgaacaaattcttcaaaact

SEQ ID NO: 1383 - DNA, 120 bp, synthetic construct
  source 1..120: mol_type = other DNA
acgttcctaatgccttagttggatatcatgcagtcagcgaaattgtgaagttatgtagctgacactacttttccattctcttcaacttcattggagaatggctctccagagcaaataaga

SEQ ID NO: 1384 - DNA, 120 bp, synthetic construct
  source 1..120: mol_type = other DNA
taatataaagagtgaggacactggtctgaaatcattgtaacccctaggcaaaaggaccatcttaaagcaaaacagggataagctaagtccacaagagaatttccaatcagagcagtctac

SEQ ID NO: 1385 - DNA, 120 bp, synthetic construct
  source 1..120: mol_type = other DNA
aaatgccgagtccccagttccccagctccctccctccatgccagtgttatgtcccactcacaggatgcaagataattttagattttagtagtcacatattaattttaatgtgtattatga

SEQ ID NO: 1386 - DNA, 120 bp, synthetic construct
  source 1..120: mol_type = other DNA
tcagcactgcagtaatttggaacaaaatctctttaaaatgcaggaactatgtggacaaagtgaaataccaaagtcatctttatttttttggctcaattctcccaaacaaatacctatagg

SEQ ID NO: 1387 - DNA, 120 bp, synthetic construct
  source 1..120: mol_type = other DNA
ctgtattaacatggttttcaaatgtcattccgatttggcggcatgtgcttttcgtcctgtacttcatttagattgccaaggttatgctgtttttagtccaatactccaaccgcagaaaga

SEQ ID NO: 1388 - DNA, 120 bp, synthetic construct
  source 1..120: mol_type = other DNA
aatgacaaacaaaagaatgagatatcaatttatccatgacatagagggtcacagcacacttatttctcccaggtaggttggcctggggaacattaggctcctaatgtgtggaatttcaat

SEQ ID NO: 1389 - DNA, 120 bp, synthetic construct
  source 1..120: mol_type = other DNA
ggcctatttagcatcagtaacaccaaaagtcaactcttgattcattccagaattgcactatcacggagatcgtctgaaattcttccgggactcctgattttataaaatataaagtagtgc

SEQ ID NO: 1390 - DNA, 120 bp, synthetic construct
  source 1..120: mol_type = other DNA
tcaaaactgcagaaacaaggtgatttgttgtacaccttttaatctaacatgcagactaagcaattcaccaaaatccaggccatagttctgtgggacccaattatgtgtggcagcaattca

SEQ ID NO: 1391 - DNA, 120 bp, synthetic construct
  source 1..120: mol_type = other DNA
cactgaatattgtgtacgtggagggtgaaggcatatgttggtaaagaggcaataaaaataaattgatataaaatatcaatcgattgcagtgcactaatatgaggtacccagagcagtcaa

SEQ ID NO: 1392 - DNA, 120 bp, synthetic construct
  source 1..120: mol_type = other DNA
gatatgatgaggagtctggatctggctcaaagctcaataaaaagccactgaaaataaaagccactgttatttgagaagtgtgctcctttaagggctcaggagttgaaatggaaagggttt

SEQ ID NO: 1393 - DNA, 120 bp, synthetic construct
  source 1..120: mol_type = other DNA
ctgagttcattctacaggaaatggagacacaccacattcacattccatgatagcatcaattctgagagatctggtggaaaacttaaagcagggacaaaagttcagccattattaaccaca

SEQ ID NO: 1394 - DNA, 120 bp, synthetic construct
  source 1..120: mol_type = other DNA
tattcatcctgctctttggaattaatagttatttcccagacaccccaggtacacatgatgtgaagagttaaatcttaatactatcccatgggcagataggccactctagttctagctaag

SEQ ID NO: 1395 - DNA, 120 bp, synthetic construct
  source 1..120: mol_type = other DNA
ctatacataaatcacatctgcaagttcgatgaatctgaacacaattaagtgagcaatcacatattctcttccagaaatctggaattgggattgacgagcactggtgttcacctctgcagc

SEQ ID NO: 1396 - DNA, 120 bp, synthetic construct
  source 1..120: mol_type = other DNA
ctttgtcaaatttaccacctcaacagcttctttattgcccctcctctgaaattcaattgctactgctttagtgtagaccctcatttccctttgccctgctggagtgaacctaacttcagt

SEQ ID NO: 1397 - DNA, 120 bp, synthetic construct
  source 1..120: mol_type = other DNA
aatgacgtcaatgacccacaatctgcaagacacaccttttaatccattctgaagagctaagagatttgttctaagttatctctactcccttgcctggccttttgttaaaaacaacagttg

SEQ ID NO: 1398 - DNA, 120 bp, synthetic construct
  source 1..120: mol_type = other DNA
tggctggcctgatgacatttttgagcagtggaatcaccaccagctaccatatacctccaaattcattcctgacataagaaaaattaacccctatttgtttaagtcactgtggttgggttt

SEQ ID NO: 1399 - DNA, 120 bp, synthetic construct
  source 1..120: mol_type = other DNA
gcaaagaactatgtaaatgcctaggtaggttcccgggagacagtaaaaggtaagtattgcattcacagtgacattcaacctttaaatagggtaacggtactgacactttatgcaaatgca

SEQ ID NO: 1400 - DNA, 120 bp, synthetic construct
  source 1..120: mol_type = other DNA
gcagtcgagattgaagcaacgttcaaatcagtttcaggaccttgttctcatactcctaaatcttgagctaacaaagccttcagtgcagtgttggagtgttgtttgcaagaaatgaaaatt

SEQ ID NO: 1401 - DNA, 120 bp, synthetic construct
  source 1..120: mol_type = other DNA
gaccctgcctttaaaagccttcttatccttcaagaccaaacttaaacactgcattttgggaaaagcctgtccagcttcatatatcaaaatgaacatcttcatcttctgagctcctatggt

SEQ ID NO: 1402 - DNA, 120 bp, synthetic construct
  source 1..120: mol_type = other DNA
aatagttgttggaaagaaggatttaagaaccaagcttcaaccatggcagattcgaaatccagccaatgccagccaaatatgagctcgaaagcattcataagaagaggctaaggtttacaa

SEQ ID NO: 1403 - DNA, 120 bp, synthetic construct
  source 1..120: mol_type = other DNA
tttggtaacctatgtgaattcctgactttgaggatcagaaaggtttttagagaacagctcgtcacttcatagatgaaaaaaactgagattggggtggtgcaatgatttgcccaaggtcac

SEQ ID NO: 1404 - DNA, 120 bp, synthetic construct
  source 1..120: mol_type = other DNA
gtttagttttagaccttggtaattccaggagagagggtttaaattattagacctattccaagccaggatataaaaccctttctaaacaggtactcccccaagtatggtgaagggaagcat

SEQ ID NO: 1405 - DNA, 120 bp, synthetic construct
  source 1..120: mol_type = other DNA
tggctagtacagcctgtttcctttcttaacaaattgtagccacaaatatattatgtctaaagaattttgagaccccttcgaaagggagcttgatccaatcctcaaggctccaggcacttt

SEQ ID NO: 1406 - DNA, 120 bp, synthetic construct
  source 1..120: mol_type = other DNA
ggtaaggattaaatgtgataatacgtaacaaatgcttgccttactgggtgctcaaagagcagttgctagtatcatttaggagaggatgagagagtcaaatgttattctctgaggtttggg

SEQ ID NO: 1407 - DNA, 120 bp, synthetic construct
  source 1..120: mol_type = other DNA
taccttctgctacagggacacctagattctagagtatgtgtttttgtagcctgggcagagtcagagcaatcacctactaaggccctacaatgaatgttaatgctttaaacatttatatta

SEQ ID NO: 1408 - DNA, 120 bp, synthetic construct
  source 1..120: mol_type = other DNA
ttggcagaccgtaggccacaaagaggccatggattactgtgatatatctacttcagggaaactttacaattctgaaagagcatgtaacacagtaacccacagtttttctttgctttaata

SEQ ID NO: 1409 - DNA, 120 bp, synthetic construct
  source 1..120: mol_type = other DNA
gaaactaaggaagcaacactggagaggaaggtgagagaaaatgaaggggttaggtaaataaattaattaatgagtatcatatgaaggagattgcctcttgtaaatcagctgtcctgcagg

SEQ ID NO: 1410 - DNA, 120 bp, synthetic construct
  source 1..120: mol_type = other DNA
attatttgttggacagcaccccttgcaaccagatcaataaaacaaacttattagaatcaactgctgggacaggaaagcatttctgtgatacaaagccaatgcggttttgtgtgtgctttg

SEQ ID NO: 1411 - DNA, 120 bp, synthetic construct
  source 1..120: mol_type = other DNA
ctctcacctcccctattcctccccagacccagcaaagtgcatggtgtatagtaagtgcatcatacatattaaatagatacatgaaaagttccctttctccagagagaaataaagctagaa

SEQ ID NO: 1412 - DNA, 120 bp, synthetic construct
  source 1..120: mol_type = other DNA
ttaggtcaaatattagtcactttctttggaggctgaccaaatgcctccacccttcattgcagagtttgctgtaatcatctgtagtaagaatagcagaatcacactaatatgtgctgaagg

SEQ ID NO: 1413 - DNA, 120 bp, synthetic construct
  source 1..120: mol_type = other DNA
tttcatcatagatagagaaacactgttgtgtaccatccttccttccccctaactgagaccagtttaaaaaaaataaattggctcacttctcaacttttctgtgagccaggattaccctga

SEQ ID NO: 1414 - DNA, 120 bp, synthetic construct
  source 1..120: mol_type = other DNA
aagtggagaggcattccatgttcacagaatggaaaaatcaatactgttaacatttcttcacaaattgacctgtagattaaaggtaatctttatcaaaatctcaatgcaatgttttgtgga

SEQ ID NO: 1415 - DNA, 120 bp, synthetic construct
  source 1..120: mol_type = other DNA
catcatttcacatccactagaatggttataatgaaaaagaaagacagtaaaatagttgtgagaatatggagaaactagaaccctcactcattgtttaatgggaatgtaaaatggtacagc

SEQ ID NO: 1416 - DNA, 120 bp, synthetic construct
  source 1..120: mol_type = other DNA
tgcctctgctactgtaaatgttgggaaaactttgaaaaaaaaaaaagggaggtgtgaaatgagatactcacgtaacttcagaaccttagggtgagaagattatggagacagtcatcctca

SEQ ID NO: 1417 - DNA, 120 bp, synthetic construct
  source 1..120: mol_type = other DNA
gtacaaaatgtgaaatgaatcttggaattcatccatccaccactgatagcatttatcactggtttaaactaggtatagcagaacaatggcaccctggtagatctgtcttaggcctacaac

SEQ ID NO: 1418 - DNA, 120 bp, synthetic construct
  source 1..120: mol_type = other DNA
ggggcaagaggaggtcagaaaaagaaaaggccaaccaagttttcaataaaggggagaattaaaattagattttccaagactgtcacaaaatcactgaagaagctccagaccagaaacagt

SEQ ID NO: 1419 - DNA, 120 bp, synthetic construct
  source 1..120: mol_type = other DNA
agctcatgggaggctttgtctggtccactaaggagtttgagcattatccgaaaacaggaggctaagaaagcgtttcaactaagaaagaaatctttctttgagatctatcttttgggattg

SEQ ID NO: 1420 - DNA, 120 bp, synthetic construct
  source 1..120: mol_type = other DNA
gagaagtgattcttctgtgaatggctaatggaagctttctcatctgacaaatcagtaagaatgtcaaatggaaggagcagcatggatgaagcatggcactgcaaacatatactgtagatt

SEQ ID NO: 1421 - DNA, 120 bp, synthetic construct
  source 1..120: mol_type = other DNA
gctctagcatggactttagagtcttgcaactcgtattaaatgttaaagtctccacactccaaataatgctctggcaaggaaatggtaaaccagctttagagctccgctcaattctttatg

SEQ ID NO: 1422 - DNA, 120 bp, synthetic construct
  source 1..120: mol_type = other DNA
ggtgaactacctgccgtttccctgacaacgttgtcttcttcttccaggtcgtatcctttcttgcaagtcatttcatttttcatcaactcttacatattcttttaggctctacaaatcctt

SEQ ID NO: 1423 - DNA, 120 bp, synthetic construct
  source 1..120: mol_type = other DNA
ttattttcaggtctagccagtacctcctgtgagcacttgctgtacagaaataactaggtcacaatagtgttctcaagattctgaatccctaattacaattcccccatgataaaggcatga

SEQ ID NO: 1424 - DNA, 120 bp, synthetic construct
  source 1..120: mol_type = other DNA
aattcatttttagttcattcattaaaagggagaaagtggaaagaaaaatcaaatctgcatgggaagaagcacaaagcagctacatccacatggctgttcccaagcctgtccacagggata

SEQ ID NO: 1425 - DNA, 120 bp, synthetic construct
  source 1..120: mol_type = other DNA
gcaggcagggcaaatgcaatttgaggcacagagatttcaccacgagcactgaatcttgcttgtatgtcataacaaatatctggatgtagcaattagagcagagaataagaagtttttcct

SEQ ID NO: 1426 - DNA, 120 bp, synthetic construct
  source 1..120: mol_type = other DNA
agaagaatatacagtcatcatgcatgcactaggaccattcatccctgacagtcagacaagcgtgacatttgtatttcttggggcaactgaagaacacctttttaaagtttgccatttcct

SEQ ID NO: 1427 - DNA, 120 bp, synthetic construct
  source 1..120: mol_type = other DNA
aaactccctgttctcaaggggctcatgctctcagaggagataattctaaatttccagtagtttttatatgacagaaactgcaaatctcctgatacgtgcagcaagaaaacaaagaggtca

SEQ ID NO: 1428 - DNA, 120 bp, synthetic construct
  source 1..120: mol_type = other DNA
acaaatacttgctgggctactgcgtgtcaggcattagacctaaaatgttgaacagaacagaaatagtctctcccgtgtggagtataaaattactaataaactagcaaagacccatgtttc

SEQ ID NO: 1429 - DNA, 120 bp, synthetic construct
  source 1..120: mol_type = other DNA
aatgttttgatttttctaactttagtcctctgggactaacacttttagtcctttgcaacaaaagaagaatggcacatggttccatgagtaaaagcatcccccactcccatccaacctgac

SEQ ID NO: 1430 - DNA, 120 bp, synthetic construct
  source 1..120: mol_type = other DNA
aaggccaccaatccagcaagtagcaagatttatcctcagagcgtgagttcgtgatcagttttctaggaatggctaggcaattagaaaaacacaactcctcctaattagatattttaaatg

SEQ ID NO: 1431 - DNA, 120 bp, synthetic construct
  source 1..120: mol_type = other DNA
gtaaaggtcaacaatgcctcctaggagagggcaggcaacaagataagggctctctaaggacagagatagaaatggatctatcttataaactcaaccattagaacattctttatttcctga

SEQ ID NO: 1432 - DNA, 120 bp, synthetic construct
  source 1..120: mol_type = other DNA
taaacttgaccttgaaagaaaaggatctaaccagtatagaaaagggagctctagctctaagaatatctcatactcctagttctagaagtagtacccccagtggctgataagaaccagaac

SEQ ID NO: 1433 - DNA, 120 bp, synthetic construct
  source 1..120: mol_type = other DNA
tcgtcgggaccatgaagccccatgtatttgtccaacatatgttcataaaccaaaaacagcatagactctctagagaccataactactgggaacataaacattaagtgttctgaagtactc

SEQ ID NO: 1434 - DNA, 120 bp, synthetic construct
  source 1..120: mol_type = other DNA
cctgagaaattaggctcagctctgaggccccagttcttttttttaatggtttacttttcaaatatcaatgcagcctctctttgattttctaagatgctgctttctgaagagctggagaag

SEQ ID NO: 1435 - DNA, 120 bp, synthetic construct
  source 1..120: mol_type = other DNA
ctcagtgtatacagttacccagccacaaaaaaacgagtgtgtgtgtcaaaagatgcaattcctggaactattctaggaaaatctagtttattcagtgatccaccagctgccacaaatgtt

SEQ ID NO: 1436 - DNA, 120 bp, synthetic construct
  source 1..120: mol_type = other DNA
accttcctgaaaaacaccaggagaaaaaaagcacaggaaaatcagctcctgattccatgaagctctctaaacaggtcttgagataaggtaaagtttttactttctttttcgaagcaggtg

SEQ ID NO: 1437 - DNA, 120 bp, synthetic construct
  source 1..120: mol_type = other DNA
cacagaacaaatgcaccaggatttagaagagtccacgtgcatgctaatattctgaggatacatgatgagcagcttcagatggagaaatgagagaaaacttcttgctatttgcatttatgc

SEQ ID NO: 1438 - DNA, 120 bp, synthetic construct
  source 1..120: mol_type = other DNA
cccacccccatctccaagttcaggtctatctccatcattcttttctcttttgacatgaccctgaaaagtctcatccactcatatgattcactgtgtttaatacaaaggcatttaacaaga

SEQ ID NO: 1439 - DNA, 120 bp, synthetic construct
  source 1..120: mol_type = other DNA
acccccaaaggcgtatttcacactcatagtgggtctctgaggtagttattaatgtataaaagttccaaggtctcccagggacatagatctttatcctgagaagtacttgtaactgacatt

SEQ ID NO: 1440 - DNA, 120 bp, synthetic construct
  source 1..120: mol_type = other DNA
gactttcataagagcagcaaacagtgaagactctacaaatggaaatagaattctggaatcaaaaagactcctctctcccatgtggtgtgggaaatgacacccatgtttttcttctcccat

SEQ ID NO: 1441 - DNA, 120 bp, synthetic construct
  source 1..120: mol_type = other DNA
tctgtgcaagttgtaaagagaagcagtttaaggagggactcctaaaggatatcaacatgcaatgtaaaggtctattatgcattacacatcaataccatgcagtggtcccattaatagaga

SEQ ID NO: 1442 - DNA, 120 bp, synthetic construct
  source 1..120: mol_type = other DNA
caggaagtagccatgcagacccaatgtctgtgcaaattagtaacagctttaggtaccagcatgtctttacgtaaatgattttaaaaaccattacctctttcacactggggtccagtaaat

SEQ ID NO: 1443 - DNA, 120 bp, synthetic construct
  source 1..120: mol_type = other DNA
ttatatattttctatacatttttccatacattaccctatagcagccatgaagttgagccactcatactttccctcaagagaatctcctgcaagtttagctggcagaccacttccagctgc

SEQ ID NO: 1444 - DNA, 120 bp, synthetic construct
  source 1..120: mol_type = other DNA
ctatatacccttagaggaactactgaggtccctgtgttccagttccctcatctgccagagggtaacatttatgtcctctaatacaaagagttgttgtcatattaaatgagttaacacaca

SEQ ID NO: 1445 - DNA, 120 bp, synthetic construct
  source 1..120: mol_type = other DNA
aatcctaataaatatatacacaaaagcaaaaattagaaacgccctgaataacgcccaccattgaggattcattaaataaacagtcaaacatccaggtaatagagtactaggcaaccatta

SEQ ID NO: 1446 - DNA, 120 bp, synthetic construct
  source 1..120: mol_type = other DNA
cagtgagtccctatgtatcctttctggcatagacagtgatcgtcactgcagctacctccattcatacagcgaatattgcagtgttgtacttgaaaaaaaagaagaagaattcacttttgc

SEQ ID NO: 1447 - DNA, 120 bp, synthetic construct
  source 1..120: mol_type = other DNA
cagtaatttaggaatgctaatagcactttcaaaatcctaggctatttcctagtccaaagcttgattgaattaaccactaatccttgttgatacctgcctacacatggaggccaggattgg

SEQ ID NO: 1448 - DNA, 120 bp, synthetic construct
  source 1..120: mol_type = other DNA
ccccaaacctgaaatcctatctatctccaaaacccatttcaaatattgcttccttccgctaatcttttctgatatctcccaaaccaaatgtgagccctctctcctttccaattacttcat

SEQ ID NO: 1449 - DNA, 120 bp, synthetic construct
  source 1..120: mol_type = other DNA
agcataaaatattctttctttaaaaaataaaagcactcattcagacttgtgaaacaagaagacatcaaggaaccatatgcatgaatccttgggggaagccaggaggaggcaggctcagca

SEQ ID NO: 1450 - DNA, 120 bp, synthetic construct
  source 1..120: mol_type = other DNA
cattaggtttggaatgattctaaagacctgccatcatcttggcaggcacaactggcaggaagaacactgggagcaatttgcacataagcatttgtatgacgaacatgtgattttaattta

SEQ ID NO: 1451 - DNA, 120 bp, synthetic construct
  source 1..120: mol_type = other DNA
ggttttgtctgcgactggtcctgctgacactctcattgaattgaagtaaattaaatgagaaaatgtgatcaaactataaggggtttgaaaagtgtaaagggccccaaattgatatacagg

SEQ ID NO: 1452 - DNA, 120 bp, synthetic construct
  source 1..120: mol_type = other DNA
ctggtgagaatgcaaaatggtacatacggcgactccaaaaacagtttgacagttcttaaaatgctaaacatgaaactatcatacaacttagaaattgcatttctgtgtatttatcccaga

SEQ ID NO: 1453 - DNA, 120 bp, synthetic construct
  source 1..120: mol_type = other DNA
gtgggttggtcatctcgggagttcagccccattttctgtctgtctctcatacttgctccccatgtgatgccttccaccatgggatggccctctatagacattggtgccatgctctggact

SEQ ID NO: 1454 - DNA, 120 bp, synthetic construct
  source 1..120: mol_type = other DNA
aggtcactaagagatcattttctattctcagagtcacaggacactcaagtcaaaaaccacctgaaagaacaacacttcttccattctgttcatattcaagtgggaaaactaagcctctct

SEQ ID NO: 1455 - DNA, 120 bp, synthetic construct
  source 1..120: mol_type = other DNA
catctcatgatttctactcgatagagaagtcattatcagttcacattatcattgaagaccttcccaacttaatacccagttttgccatctggctatatttcttcccccagaggagtgcaa

SEQ ID NO: 1456 - DNA, 120 bp, synthetic construct
  source 1..120: mol_type = other DNA
accaattatgactcacttgcccaaacccccaaaagaaaaacaacagaacaagcaagaaaaggttctgaagaatgaactgtggatattcatctggcatcacagaaagtggcaacattctga

SEQ ID NO: 1457 - DNA, 120 bp, synthetic construct
  source 1..120: mol_type = other DNA
acggtggttctcaacctctctttgcttagtccacagcactcaatccatcagaagcccaggacaggctatgaagagaaaaccaaacaaacaaattaaatcctgcatctaaacatatttata

SEQ ID NO: 1458 - DNA, 120 bp, synthetic construct
  source 1..120: mol_type = other DNA
tccattgaccactgtcagccaagtgagaaggtgaactaagtgattcttaatgtcccttcagctctaaatttccccattatactactggagttttctgaaaactggacattatttcatagg

SEQ ID NO: 1459 - DNA, 120 bp, synthetic construct
  source 1..120: mol_type = other DNA
gaggaagagatggccaaataaaaggaaaaaaaattcctgagttataaaagcaagatgaatcctggcagacagataaagcaaactcatgagactcaatgctgggttggtagcttgggacac

SEQ ID NO: 1460 - DNA, 120 bp, synthetic construct
  source 1..120: mol_type = other DNA
ctaagcattgatgctagctgctagcgatcaggggctaataaggaaggtcaaatgttttgcaatcaatttcacaaactaggagcaattccaaagcttactggtataaacactgtaaaccca

SEQ ID NO: 1461 - DNA, 120 bp, synthetic construct
  source 1..120: mol_type = other DNA
agatagtccaatccctaccaaatcctggaatagtgtcagagcactcctgagcctttgcagggtgccctgtggttgacataacaaggttttattttttttttttactacaatcatacattg

SEQ ID NO: 1462 - DNA, 120 bp, synthetic construct
  source 1..120: mol_type = other DNA
agaggtacaaacatggtagatggtgttacatgagaagaacaaaaaacagaaatgtttcaacctagttaccttaagagatgagaacccggggaagcagagagagagttctcttgctttctt

SEQ ID NO: 1463 - DNA, 120 bp, synthetic construct
  source 1..120: mol_type = other DNA
aatggagatttgaactcaagaagcctcctgattctagagtacgctctcctaaccttatgttaagtcaaaagtgtacttagaggacaagatgatatttcatccagtagtattcatggtgac

SEQ ID NO: 1464 - DNA, 120 bp, synthetic construct
  source 1..120: mol_type = other DNA
gtataaatctggaggggatcaaaaggtacatgccctcacacaacaaaggacacccaacttcccatgtaatgtgtcccatgttaatatcttaacatcctactgttccaaggttaaaataac

SEQ ID NO: 1465 - DNA, 120 bp, synthetic construct
  source 1..120: mol_type = other DNA
gacacgggcaattctggcttcctcctttgaggatgcaagccagccaaccactctaacttactttgtgcagtttgggatttttttttattttttagatgaaagtaatctgaaaaggaacag

SEQ ID NO: 1466 - DNA, 120 bp, synthetic construct
  source 1..120: mol_type = other DNA
agacaacataaaaacattgctgagcaatcatttcaaataggaagcactatgggaattcttaggaagggagagtgagactatcatggctggaatgatccagctccagatattccttacaga

SEQ ID NO: 1467 - DNA, 120 bp, synthetic construct
  source 1..120: mol_type = other DNA
cagtataaagggagggggaggaagtggaaaatcctgacaaatcctatctcagccaggcaatgaagggttacagcaacaatggaaaatcatgttgatactataaacccttaatattatgtg

SEQ ID NO: 1468 - DNA, 120 bp, synthetic construct
  source 1..120: mol_type = other DNA
ggttgctaaggggagtcactagttttatttcatcccactgatgaaattccccttaaattctccaactccattagcaaatcccttgtccaaatcctggtgatttcattgttggaccaatat

SEQ ID NO: 1469 - DNA, 120 bp, synthetic construct
  source 1..120: mol_type = other DNA
caccaccccctttactcccagagtaataaattgttcttcaggcacagaaacaatgtctattatgcctagactatcctggagtctatttagaagcacacaagataatattgactaaaggca

SEQ ID NO: 1470 - DNA, 120 bp, synthetic construct
  source 1..120: mol_type = other DNA
aaaaaaaagaatttgaagctcaaaaagccatgggatgcactctacaggaaactagacaattgaaccatgaagaccagaggcacagatgtttaaagtacatcatgtgtgcagcaagtcagc

SEQ ID NO: 1471 - DNA, 120 bp, synthetic construct
  source 1..120: mol_type = other DNA
gttccgaatgctgtcagcccccaattgacaaacaggtagagctccaaaatttcatttctatattagtatttagaacttggaatggcctgtccaatagaaacaatgttaataggtggtggt

SEQ ID NO: 1472 - DNA, 120 bp, synthetic construct
  source 1..120: mol_type = other DNA
gaatttcacctctcctaaaactggaaattaccagcgttttttttgtgtgtgtatgcaagttccttaaatatagcaagttcagatttatctttacaatcccagcacctaacacaatacttg

SEQ ID NO: 1473 - DNA, 120 bp, synthetic construct
  source 1..120: mol_type = other DNA
ttaggaacattcactcctatagattggcacttctgtttctgaaatagtttctgcatttcccaacagagaatgagtattctgtcctgcaccctccggtaaaaacattagtcagctcttaac

SEQ ID NO: 1474 - DNA, 120 bp, synthetic construct
  source 1..120: mol_type = other DNA
ataattaagcagagcaggtgctaaatgccagcacaaagtttcaacatgacaacttctgaagtggtgatgatgatgtcaaaacagacagaaatacatccacctcgcatacctaaagggctt

SEQ ID NO: 1475 - DNA, 120 bp, synthetic construct
  source 1..120: mol_type = other DNA
agtctccctagaaataaaatatcagctgaactaaatagtgtgcttagtgacatattttggatttacaccctggcttctcatctcatcatggaccagtaacaggagtttgtggactggcat

SEQ ID NO: 1476 - DNA, 120 bp, synthetic construct
  source 1..120: mol_type = other DNA
gacttcactacacctgtgcaaacaattaacatgtcggtccaggggatggatccccttgggcatcacaggtcctttttgacatgattcattttcataaagacattttatctttctttatga

SEQ ID NO: 1477 - DNA, 120 bp, synthetic construct
  source 1..120: mol_type = other DNA
tggcatgtagggtgcagcgtataggaactctacgaaagctatgcctaaattaagataatgtatgttttgttccactctcacggatgttcaatagtttaagacctctccgaaagtcaactc

SEQ ID NO: 1478 - DNA, 120 bp, synthetic construct
  source 1..120: mol_type = other DNA
agcgcaccaccttgccatgaaacaattctaactcccagggtatctctgcactgctgccaaagagaatggttttcaacccagtctttccatttactaaaatttaaattcttttcacaaagt

SEQ ID NO: 1479 - DNA, 120 bp, synthetic construct
  source 1..120: mol_type = other DNA
tgcctacatctcctcagacattaaccccatcagaaagggagagaaagatattccaaatggcagttctgcctagaatcattggaaaaaaagataataatatcaacaagcccaagacagggt

SEQ ID NO: 1480 - DNA, 120 bp, synthetic construct
  source 1..120: mol_type = other DNA
caggatgcatcaaactttacatagtaccatatacacaggtgcataccagacaatggattaacctgcttttccactgcattcctctaaatgttttcatacgaatcttttctggcatccaag

SEQ ID NO: 1481 - DNA, 120 bp, synthetic construct
  source 1..120: mol_type = other DNA
tgaatgtaagtatgactgatggtctaggaattcataatccttcaaaatgttgaactaaaccacttgtttaatggagcagttctcccactctgagcctgcttgctgtctggaatacatctc

SEQ ID NO: 1482 - DNA, 120 bp, synthetic construct
  source 1..120: mol_type = other DNA
gcatcctcagtagagaactaagccaactgaacttgatcaagttagaattaaaacttaaagtatctgattagccttctcaaagatctattgcctcacagtggtagctggtctccaaagatg

SEQ ID NO: 1483 - DNA, 120 bp, synthetic construct
  source 1..120: mol_type = other DNA
cctttattttctctttatggtgctacaatgacttcgtgtatggtaagtttgaatatatatggaggtgggagcattctaggtcctcctcgcctttgtctttcacaaccaactagtcaagta

SEQ ID NO: 1484 - DNA, 120 bp, synthetic construct
  source 1..120: mol_type = other DNA
atagactttcactgtaaagtcacttctgatcaatcccattcccacaatgatgcttcccttggcttgtaacagcatctgccatcaataaatgttgagtctttccacatagcaatggtggga

SEQ ID NO: 1485 - DNA, 120 bp, synthetic construct
  source 1..120: mol_type = other DNA
cgttaagttttgtctttagaacttaacctctgcatacctcggctctcacatctgtgaagggaagcttatgaaagcacccagcttgtagagtggctatgaggattcaatgaattatcatat

SEQ ID NO: 1486 - DNA, 120 bp, synthetic construct
  source 1..120: mol_type = other DNA
aatgtaaaccatacccctgcaggagtctttccccatatttaattattagcccatctgacttcaggtgaagtcttaaagtcccctttataaagtaaaatggactttataaagtctacagaa

SEQ ID NO: 1487 - DNA, 120 bp, synthetic construct
  source 1..120: mol_type = other DNA
aatttactctaagaaaacacagcagaagctgggaagaaacttgaggatgcctaaatttccactgtggaacaacttttgctgcccagtggggagagaataaaaaaaaaaaagaacacctgc

SEQ ID NO: 1488 - DNA, 120 bp, synthetic construct
  source 1..120: mol_type = other DNA
cacaggtatgcagaagaaagttggtaatagcaaaagactcaatgtaatctaaagagccatcactagggaactgttccagtgacataatgaggttctatacaacaagaaaatggggtaggg

SEQ ID NO: 1489 - DNA, 120 bp, synthetic construct
  source 1..120: mol_type = other DNA
gaaatgagacaaatgtctgaccaggcctcacacctctctgcagatcttcagccacagaattaaatccccacgtcctttatatacaggagcaatcctatcagaatagatattaagatatta

SEQ ID NO: 1490 - DNA, 120 bp, synthetic construct
  source 1..120: mol_type = other DNA
cagaaccacttgccctgttctgcttccaatgtagacatctaaaggaagcattgcccagaaaacccaatccgtaattttaataagcataatttacggaagagtcaactactgtgtgatttc

SEQ ID NO: 1491 - DNA, 120 bp, synthetic construct
  source 1..120: mol_type = other DNA
caaagtacccatatccccagcggtcctaagccccgggcgagctctctgggtttattttttttagcggcacgaattgcgcgcgatgcgcgctctgaacgccccactcctcagcctgccctc

SEQ ID NO: 1492 - DNA, 120 bp, synthetic construct
  source 1..120: mol_type = other DNA
agcgcatgtaccgcaagttccatccgcgccccaacttccgccaaatgaagctggagaacgtgtccgtggccctcgagttcctcgagcgcgagcacatcaagctcgtgtccataggtcagt

SEQ ID NO: 1493 - DNA, 120 bp, synthetic construct
  source 1..120: mol_type = other DNA
aggggagtttcatgtggggccaggtgggccccacacaggatgttccctgagatttctccagatgacttgatgtctgtcagccccactctcccttggggccatctctaggcctcctgatat

SEQ ID NO: 1494 - DNA, 120 bp, synthetic construct
  source 1..120: mol_type = other DNA
tttagtggtggaaaggggctatccatggggccaccttctgagtattgtctcagcaccgaaatcgagcatctgggcacctcagggggtgtcagaaagactccccacttctctttccaggag

SEQ ID NO: 1495 - DNA, 120 bp, synthetic construct
  source 1..120: mol_type = other DNA
cagtaaacaagactgtcttccacccccttccagcctcctgaaagcagtgctttgggaagctgatagatttcagaacttcattgccctttacaagtaagctgaattccaaagatctatcta

SEQ ID NO: 1496 - DNA, 120 bp, synthetic construct
  source 1..120: mol_type = other DNA
gacggcttcgtgatatatccatagtgtcaaagcttctcaaacttcattctctagcatgtgcagtttgctgtatgtcaatcatagctcagtagaactgttaacaaaacaaaaaggctctgc

SEQ ID NO: 1497 - DNA, 120 bp, synthetic construct
  source 1..120: mol_type = other DNA
tacctgatgagtgtgccagattccgcagaggcaggaagaggtttaaaacccctcattttacagacaaggacactatggcccagagagggctggtgacttatccaagatcacacagcttat

SEQ ID NO: 1498 - DNA, 120 bp, synthetic construct
  source 1..120: mol_type = other DNA
cagaggagaagtcattctctcctcacaggccctttaatgcctcagtttccccaagtgagcagttagaaggaatagggagtctcataccctaagactggtgtggaaagcgtttggagttct

SEQ ID NO: 1499 - DNA, 120 bp, synthetic construct
  source 1..120: mol_type = other DNA
attggagaggcttccaatctttttccttcctaataggctaaggtggttcccaacaatgacaaggatcgcacctatgctgtctcctatgtgcccaaggtcgctgggttacacaaggtatct

SEQ ID NO: 1500 - DNA, 120 bp, synthetic construct
  source 1..120: mol_type = other DNA
aagggcccttcactgctccccacggtagcccttaccaaagccagaggcttgcaaggggcaggaggaagagctggggcgggggtctgcagagaccccctccctgagtcctccatcccaccc

SEQ ID NO: 1501 - DNA, 120 bp, synthetic construct
  source 1..120: mol_type = other DNA
ctgatgtccacacgttgcctgtgttgtatggcaggcttcgagttctatgaagtagcccttgttctgtggcattgctggatgttttgtggcatgacttagatcctaaggttgctttggtgc

SEQ ID NO: 1502 - DNA, 120 bp, synthetic construct
  source 1..120: mol_type = other DNA
agctccctctctgcccagcccctttgaggtacaggtgagcccagaggcaggagtgcaaaaggtccgggcctggggtcctggtttggagactggccaggtgggcaagtcagccgattttgt

SEQ ID NO: 1503 - DNA, 120 bp, synthetic construct
  source 1..120: mol_type = other DNA
attgtttcattgaataagacactggtttcccaagtcagtttctcagactggtgtccattgacccctagaggttaatgaacatattcttgaggatctaagagggtgattcttctttgaaag

SEQ ID NO: 1504 - DNA, 120 bp, synthetic construct
  source 1..120: mol_type = other DNA
ggctgacattgacttcgacatcatcaagaatgacaacgacaccttcaccgtcaagtacacgccaccaggggcgggccgctacaccatcatggtgctgtttgccaaccaggtacctaagct

SEQ ID NO: 1505 - DNA, 120 bp, synthetic construct
  source 1..120: mol_type = other DNA
catggtggatctgagcttcagagcccatattcaccaccaggatgttgtaggaccttgccttatatccagttctgacctaccattgtacccaacagggcaacatggcagtgacagtgactt

SEQ ID NO: 1506 - DNA, 120 bp, synthetic construct
  source 1..120: mol_type = other DNA
ggcttgaatcccaggtccactaactggggcaaattgcttcatctcgctgcctcaatgtcatcacctgggattgttataagcactcagtccacagtagcagccacagttggaggtgatgag

SEQ ID NO: 1507 - DNA, 120 bp, synthetic construct
  source 1..120: mol_type = other DNA
ttctttcatgtgcttaaggggtaccctgatccaaaaagctaaaactctgctctggacgggggcacggggaaagctttggggtagaggatgacaagagtcagaagacagtaagtgggaatg

SEQ ID NO: 1508 - DNA, 120 bp, synthetic construct
  source 1..120: mol_type = other DNA
tggcctagccatcgagggtccctcggaagccaagatgtcctgcaaggacaacaaggatggtagctgcaccgtggagtacatccccttcactcctggagactatgacgtcaacatcacctt

SEQ ID NO: 1509 - DNA, 120 bp, synthetic construct
  source 1..120: mol_type = other DNA
tgaaaacattttattttcacattttattaatttaggaaggccttctcttccaggcctgggacccacatgagtgaggtttgcccagcctcagtctgcagtcaagttcatttattcttgtgt

SEQ ID NO: 1510 - DNA, 120 bp, synthetic construct
  source 1..120: mol_type = other DNA
agcccaagaaggccaacatccgggacaatggggatggcacgtacactgtgtcctacctgccggacatgagtggccggtacaccatcaccatcaagtatggcggtgatgagatcccctact

SEQ ID NO: 1511 - DNA, 120 bp, synthetic construct
  source 1..120: mol_type = other DNA
agtgctgtcagctgtctctggaggaacccgctgtgctctccaccatccccagctccatctccccagaggctgccctgcaggaggatgaacacccaaattatcacccagcatttcaggttc

SEQ ID NO: 1512 - DNA, 120 bp, synthetic construct
  source 1..120: mol_type = other DNA
ctgtgtcttaatgatgaaaacaaaggcccagagagaggaagtgagctctacccagggtcacacagcaagttgggcagagccagaactcaggtgcaagccatctgtccccagttcagggct

SEQ ID NO: 1513 - DNA, 120 bp, synthetic construct
  source 1..120: mol_type = other DNA
gaggggtcatattttgataaatgtaaaaacactctgttctccacggcagctaagaagcagtcagccactccttgtgcctgaaaacacattgcctcatttagtctttgaagtcatttgttt

SEQ ID NO: 1514 - DNA, 120 bp, synthetic construct
  source 1..120: mol_type = other DNA
aggatgctctgcctaacacccactttccacagggatctccttcacccccaaggaggtcggggagcacgtggtgagcgtgcgcaagagtggcaagcatgtcaccaacagccccttcaagat

SEQ ID NO: 1515 - DNA, 120 bp, synthetic construct
  source 1..120: mol_type = other DNA
tattgaaggcccaagcaaggtggacatcaactgtgaggacatggaggacgggacatgcaaagtcacctactgccccaccgagcccggcacctacatcatcaacatcaagtttgctgacaa

SEQ ID NO: 1516 - DNA, 120 bp, synthetic construct
  source 1..120: mol_type = other DNA
ctgtccattgctgtggagggtcctagcaaagcggagattgcatttgaggatcgcaaagatggctcctgcggcgtctcctatgtcgtccaggaaccaggtgggcgtccacactggcagtgg

SEQ ID NO: 1517 - DNA, 120 bp, synthetic construct
  source 1..120: mol_type = other DNA
tgtaagaatgctagatgacaacatttataagaatgagagcataaaatctatacaaactaagagtaaaccagtttgcacagagggtgtgagaggctcctctaaagggaatgcctatgggct

SEQ ID NO: 1518 - DNA, 120 bp, synthetic construct
  source 1..120: mol_type = other DNA
aggctaagccaccaaccctttatccacagacaagcacaccatccgcttcatcccccacgagaatggcgtccactccatcgatgtcaagttcaacggtgcccacatccctggaagtccctt

SEQ ID NO: 1519 - DNA, 120 bp, synthetic construct
  source 1..120: mol_type = other DNA
attgagcaagcttcccctcttgaggctgtctgtaggatgagttgggtgggtgttcctttgtaaagtggctcttaccctgtgagttagcctgagttcccagacaaagcctgcaaggatgag

SEQ ID NO: 1520 - DNA, 120 bp, synthetic construct
  source 1..120: mol_type = other DNA
gtgtacaatgtcacctacactgtcaaggagaaaggggactacatcctcattgtcaagtggggtgacgaaagtgtccctggaagccccttcaaagtcaaggtcccttgaatcccaaaagtg

SEQ ID NO: 1521 - DNA, 120 bp, synthetic construct
  source 1..120: mol_type = other DNA
tctagtcctcccggtctttatctgagttcagcttagagatgaacggggagccgccctcctgtgctgggcttggggctggaggctgcatcttcccgtttctagggtttcctttcccctttt

SEQ ID NO: 1522 - DNA, 120 bp, synthetic construct
  source 1..120: mol_type = other DNA
ttatcctttgtaataaaccagcaactgtaagaaacgcactttcctgagttctgtgaccctgaagagggagtcctgggaacctctgaatttataactagttgatcgaaagtacaagtgaca

SEQ ID NO: 1523 - DNA, 120 bp, synthetic construct
  source 1..120: mol_type = other DNA
acttgttaaccttaccagcagaataatgaaagcgaacccccatatctcatctgcacgcgacatccttgttgtgtctgtacccgaggctccaggtgcagccactgttacagagactgtgtt

SEQ ID NO: 1524 - DNA, 120 bp, synthetic construct
  source 1..120: mol_type = other DNA
tgttgctacatccctgcaaagcaggggctgcagggagcccagatggggcagccctggtgcttcttcccacccagctaccccagctacaagctggagaacctgagctcctctgaaatgggc

SEQ ID NO: 1525 - DNA, 120 bp, synthetic construct
  source 1..120: mol_type = other DNA
accaagcccctgcttgtcatttaactcaggaaaactctcaggaacgacagcacttggatttgccttaatcttaagagaagttgccttcggaaatgcgtttttctttttttgctcattcat

SEQ ID NO: 1526 - DNA, 120 bp, synthetic construct
  source 1..120: mol_type = other DNA
agctgtgcagatgcaggggacaggggtggcctctctgagctgacctctgagtagagagacccaagagaagtttctcaaagcatcttatcaagctaggtatggtggttcatgtctgcaatt

SEQ ID NO: 1527 - DNA, 120 bp, synthetic construct
  source 1..120: mol_type = other DNA
tgtgttttctgggaaatgagtcctatgggctgatgcctctcccaactctggccttctgtgctcctaaggagggttctggggccctgcctggaggtgggctggcaccacatatctttccgt

SEQ ID NO: 1528 - DNA, 120 bp, synthetic construct
  source 1..120: mol_type = other DNA
tgagggtccccagaaatggccgggtgctactcagggttctgtcagatgtaggttacttgaactgccttaaagcaaaaggccaggggcatgataaactgatgtcacctggtcctggaaagt

SEQ ID NO: 1529 - DNA, 120 bp, synthetic construct
  source 1..120: mol_type = other DNA
acatttttttaattataaaagaaaagtgattactgtagaacacttgggaaactctagaggtttaaagaaaaggtaaaggtaaagcttccattccggcgcgcccctcatcagccagctggt

SEQ ID NO: 1530 - DNA, 120 bp, synthetic construct
  source 1..120: mol_type = other DNA
tcgttttcccagggttgaggccccttggccccgcatcagtgccttgtggagaaagagctgctcattgacctccagggtgcaggtctctcagatttgcaaatgtgggcgtccactaagagt

SEQ ID NO: 1531 - DNA, 120 bp, synthetic construct
  source 1..120: mol_type = other DNA
cagaaactgggttttacaaggaagtacaaggatgggcctgggagaaggtttgggggcctgaggctatagtttggcccagcaaagaatcagtgagaggatggggttttgggcttaggtaaa

SEQ ID NO: 1532 - DNA, 120 bp, synthetic construct
  source 1..120: mol_type = other DNA
cgctggtgaaggctcgggggacacgcccatttgtgatctcccgctcgacctttgctggccacggccgatacgccggccactggacgggggacgtgtggagctcctgggagcagctcgcct

SEQ ID NO: 1533 - DNA, 120 bp, synthetic construct
  source 1..120: mol_type = other DNA
agttcctaacaacagccctgcacatcagtgtgttgagggaggattcccagagagtgaggtgattagttaactatttgcagaagtcaatttatttttcttgcataccatagaaacataagt

SEQ ID NO: 1534 - DNA, 120 bp, synthetic construct
  source 1..120: mol_type = other DNA
tcttaattttagcctcgttggaactgatgccaacttgctttcaatagcataaaaaagctttgcttctatgtggtttccattgcctctcgttcctctgtgctgttacacgtctgtatccat

SEQ ID NO: 1535 - DNA, 120 bp, synthetic construct
  source 1..120: mol_type = other DNA
tgtttcattcctttacgtttctctcgttaaggatattccctatctggtgagtcatgttctcacactttcctttagttcttcagacacggtttcgctgagctctttgaacacatttaaagt

SEQ ID NO: 1536 - DNA, 120 bp, synthetic construct
  source 1..120: mol_type = other DNA
ggagaatcctccgtagagctgcttgcacatgtacattcatctttttgtcagatgttaattcaagttgcctttggttgtgggactgggaggatcttttctctttgttgatactttttcgta

SEQ ID NO: 1537 - DNA, 120 bp, synthetic construct
  source 1..120: mol_type = other DNA
cactcagtagccaggagggtccctacctacagtgagccctgagtctgcgcctgaagtcacagttcagcccgtctgtgccaggcctcctaggcctccacgtggagccccgggagatggaga

SEQ ID NO: 1538 - DNA, 120 bp, synthetic construct
  source 1..120: mol_type = other DNA
atgccatcatgagtccctgttctcatgggtgttcctgccccagctgtctgctgacacctccacattctctgccttttcatctctctctgctcggcccagaacacgatcgtgaatgagctg

SEQ ID NO: 1539 - DNA, 120 bp, synthetic construct
  source 1..120: mol_type = other DNA
ccatttgtgctctctcttttccaggtcctggacatctgtgtctcgctgttgatgggagagcagtttctcgtcagctggtgttagccgggcggagtgtgttagtctctccagagggaggct

SEQ ID NO: 1540 - DNA, 120 bp, synthetic construct
  source 1..120: mol_type = other DNA
gaaactggtaaggtttataagaactctgtagcatgtttgcaattttttggtaaatagaaaacttgtaaacaatagttctgttgtttaggtaaaaggagcaatcaaggccgtgcgtggtgg

SEQ ID NO: 1541 - DNA, 120 bp, synthetic construct
  source 1..120: mol_type = other DNA
gagttgcccatttgataggaagctctaggatgtttgatctgaatggggtttggattcaaacttgatgacaactgggtgacatgccatctttgctattaccacattttctctttatatata

SEQ ID NO: 1542 - DNA, 120 bp, synthetic construct
  source 1..120: mol_type = other DNA
gctaaagatatgtgaggtcttttgctacaaggaggaaaggaagaatgaggcagcttaacagcatggtgagtattttaggaacagataatgttcttaatggggcagtagttcatggcaaaa

SEQ ID NO: 1543 - DNA, 120 bp, synthetic construct
  source 1..120: mol_type = other DNA
caccgtgcctggcctatacatccttcttaatacatttcagtcttaatgatgtttagctcttggtagttaaatatgctacacattttgataattgggagagaatctcaacaaggggggtgg

SEQ ID NO: 1544 - DNA, 120 bp, synthetic construct
  source 1..120: mol_type = other DNA
ttttaatgacatctgcattgtattttctagctgaagcaaaacagtgcctgtgggatttatgtgacttcttaaccttgaagtccattcatagaaccctagcttccttttcacagggaggag

SEQ ID NO: 1545 - DNA, 120 bp, synthetic construct
  source 1..120: mol_type = other DNA
tcttaaagttacctagatgacccatatggagaaaccactttccacagcatcctgctctaagtactctcacataaagcctcctcccaggaactttacctgtatttaccttgaatgtcaaaa

SEQ ID NO: 1546 - DNA, 120 bp, synthetic construct
  source 1..120: mol_type = other DNA
gaaacttacactctagtggggagacatggtaacaagtcaacaaatacttccaaatagtgtggagctctgagaagaaaattaaacaggttaatgtgatgaagaatgaatggacagagggct

SEQ ID NO: 1547 - DNA, 120 bp, synthetic construct
  source 1..120: mol_type = other DNA
agtaagtaacgttggactttgaaggagaccttggtttcctttgttgtcaagttctatctatcagtacagttctattggattctgggctcactatctcaccttttgaaagggccacatata

SEQ ID NO: 1548 - DNA, 120 bp, synthetic construct
  source 1..120: mol_type = other DNA
catggcctcaaagttctttcctttgtggctaaatctctggaatgaaacattaccatctgccaaattttccaaactgtcacagtaacaaccatcaaattttagcagatctactccccagtc

SEQ ID NO: 1549 - DNA, 120 bp, synthetic construct
  source 1..120: mol_type = other DNA
tgctaagtcaatactgccaccattgatatctgatcaatttccctcatcccccacccttcttgtttaagtacatgaagctttagcaagaagctccctacccttgatgtcttcttaaatatt

SEQ ID NO: 1550 - DNA, 120 bp, synthetic construct
  source 1..120: mol_type = other DNA
ccggccatgagggctgtttctaaacaagcttctgtacagaagtgcttacagtcctctgaatgaacaagaacattatctataaactcacataattagctagctggcgaatcccatgaggaa

SEQ ID NO: 1551 - DNA, 120 bp, synthetic construct
  source 1..120: mol_type = other DNA
aagatcccattcacaagaacaactgaacaacctaaaatgcctagagataaatttaagatacgtgcaaggcccatatgttaaaactatgatgctcctaaatgatttgaataaatggagaaa

SEQ ID NO: 1552 - DNA, 120 bp, synthetic construct
  source 1..120: mol_type = other DNA
aggaaaggactttctcagcatgaccccaaagtcagaaatcagaaaggaaaaactgatgtgtttgattacataaatatcaaaaccaacacataggaagaaccactgtatttgcaaggtatg

SEQ ID NO: 1553 - DNA, 120 bp, synthetic construct
  source 1..120: mol_type = other DNA
tcagatgcaaataccaataaaaaaaaatccgtgatgggcaaaattgccacacatactgtaccacagggtcacatgaaacttacaaggccaatttcttctgtgatgtctgaccaacatcct

SEQ ID NO: 1554 - DNA, 120 bp, synthetic construct
  source 1..120: mol_type = other DNA
caaaaggagaaaaaatggcacgaatcttagttccccattcctcctacccaccctagatgttctaacggttagcacccggcagaggaagagcagaagttcacaagaagggtctgaatagaa

SEQ ID NO: 1555 - DNA, 120 bp, synthetic construct
  source 1..120: mol_type = other DNA
tcccccaactagaatgcttttaaataaatctcgtagttcctcacttgagctgagctaagcctggggctccttgaacctggaactcgggtttatttccaatgtcagctgtgcagttttttc

SEQ ID NO: 1556 - DNA, 120 bp, synthetic construct
  source 1..120: mol_type = other DNA
tgcattagaggttgaataataaaatttcatgttgagcagaaatattcattgtttacaagtgtaaatgagtcccagccatgtgttgcactgttcaagccccaagggagagagcagggaaac

SEQ ID NO: 1557 - DNA, 120 bp, synthetic construct
  source 1..120: mol_type = other DNA
atgtctctaaactttgccacatgtcacctagtagacaaactcctggttaagaagctcgggttgaaaaaaataaacaagtagtgctggggagtagaggccaagaagtaggtaatgggctca

SEQ ID NO: 1558 - DNA, 120 bp, synthetic construct
  source 1..120: mol_type = other DNA
aaaaaaaactgaaggaattattcctcaggatttgggtctaatttgccctgagcaccaactcctgagttcaactaccatggctagacacaccttaacattttctagaatccaccagcttta

SEQ ID NO: 1559 - DNA, 120 bp, synthetic construct
  source 1..120: mol_type = other DNA
gcttttcatcttttcatgcatcttgaaggaaacagctggaagtctgaggtcttgtgggagcagggaagagggaaggaatttgcttcctgagatcatttggtccttggggatggtggaaat

SEQ ID NO: 1560 - DNA, 120 bp, synthetic construct
  source 1..120: mol_type = other DNA
tagcaataatcactgaagctacctatcttacaagtccgcttcttataacaatgcctcctaggttgacccaggtgaaactgaccatctgtattcaatcattttcaatgcacataaagggca

SEQ ID NO: 1561 - DNA, 120 bp, synthetic construct
  source 1..120: mol_type = other DNA
tggagtcatcagtggaattgctgtttttgtcgtcatcttgttcattggaattttgttcataatattaaggaagaggcagggttcaagtgagtaggaacaagggggaagtctcttagtacc

SEQ ID NO: 1562 - DNA, 120 bp, synthetic construct
  source 1..120: mol_type = other DNA
gtgaggagaccagttagaaagccaataagcatttccagatgagagataatggttcttgaaatccaatagtgcccaggtctaaattgagatgggtgaatgaggaaaataaggaagagagaa

SEQ ID NO: 1563 - DNA, 120 bp, synthetic construct
  source 1..120: mol_type = other DNA
tgaaaggggttgtgaagaggtgttttttctaattggcatgaaggtgtcatacagatttgcaaagtttaatggtgccttcatttgggatgctactctagtattccagacctgaagaatcac

SEQ ID NO: 1564 - DNA, 120 bp, synthetic construct
  source 1..120: mol_type = other DNA
cttccatggagccactggggttccggtgcacattaaaaaaaaaatctaaccaggacattcaggaattgctagattctgggaaatcagttcaccatgttcaaaagagtctttttttttttt

SEQ ID NO: 1565 - DNA, 120 bp, synthetic construct
  source 1..120: mol_type = other DNA
ggtaagcatttgttttatattggttttatttcacctgggctgagatttcaagaaacaccccagtcttcacagtaacacatttcactaacacatttactaaacatcagcaactgtggcctg

SEQ ID NO: 1566 - DNA, 120 bp, synthetic construct
  source 1..120: mol_type = other DNA
tgaaaatttgagaaaacaaacaagaaactacttaccagctatttgaattgctggaatcacaggccattgctgagctgcctgaactgggaacacaacagaaggaaaacaaaccactctgat

SEQ ID NO: 1567 - DNA, 120 bp, synthetic construct
  source 1..120: mol_type = other DNA
tgctcctctgcagagtcccaaatcccatgagcccaggcctttagcccagtccttgggcaagggggacatttcccaggggggtccaagatgggagaaaaagcaggtgagttcacaactcaa

SEQ ID NO: 1568 - DNA, 120 bp, synthetic construct
  source 1..120: mol_type = other DNA
tatttctcttttgttttataaatttataaatggcaaaaggctctgataaggtctgtgatcattaacttgtaggaatggtggcctggaaagatctgggccaacccacctcccacctagtgg

SEQ ID NO: 1569 - DNA, 120 bp, synthetic construct
  source 1..120: mol_type = other DNA
agtgcttcccgcctgccccgattgggttttctttaatgctaacagcatgctatttactttccatttaaatttgagatgttgctataaattatcaaccagctccttgttcctgcagagttt

SEQ ID NO: 1570 - DNA, 120 bp, synthetic construct
  source 1..120: mol_type = other DNA
tactgttgttcactttctctggttccctgtcaagacttgtgatcatctgatttgtttgttttctatctcctgccatgaaaatagaagctcttcaaggacaaggcccgtgttgccttattt

SEQ ID NO: 1571 - DNA, 120 bp, synthetic construct
  source 1..120: mol_type = other DNA
ttcctgctgtttaagttgaccatcaactcacttccatacagtgctttggagttcacaaagggcttacaaaatgcgctaagctcattttttcctcctccccatctctgaagtctgaaatat

SEQ ID NO: 1572 - DNA, 120 bp, synthetic construct
  source 1..120: mol_type = other DNA
cttctcccagaaaagggaaagacatgccctcttggttctctgactcctaactggcatttaaaattcacttttttgttgtggattttttgcccaactctactaggaattgtttaaaagtgg

SEQ ID NO: 1573 - DNA, 120 bp, synthetic construct
  source 1..120: mol_type = other DNA
aaatgggcacaccgtctacttcctagggttataagatgtaagtggccagtcctcagcacggtgcctggctcacagtaaatcctcaagaaacatgagttctcagacttttttttttttttt

SEQ ID NO: 1574 - DNA, 120 bp, synthetic construct
  source 1..120: mol_type = other DNA
atatcatgtatgcatatatagtatatattatgtaatttacaaagtacacaaggacaacagagaaaactgtccttctcactcccatccccagcaccccgttctcctctggaaggaaccaga

SEQ ID NO: 1575 - DNA, 120 bp, synthetic construct
  source 1..120: mol_type = other DNA
cctatctgtgacatattggtaatataagttcaggagagggagagagaaagaggcagggattgagacagagcaggagaggaggagagaaaatttatatggctcaggcagtctgatcccttc

SEQ ID NO: 1576 - DNA, 120 bp, synthetic construct
  source 1..120: mol_type = other DNA
aatttgcatcattttattccttgtccaaggtcacaggacaagcagagtcccacccacctgaaaggattcagttctaagacagcctttagggcaaaaagtcacaaagttgatctatctatc

SEQ ID NO: 1577 - DNA, 120 bp, synthetic construct
  source 1..120: mol_type = other DNA
caacctgcatttattacctattctgcgccaggcactctgtgggacgggagtagacttggtcctgaacatccaaagatgaatgaaatgggtccctgctttctttttctttttttagataga

SEQ ID NO: 1578 - DNA, 120 bp, synthetic construct
  source 1..120: mol_type = other DNA
attactcagggaatggtgggttttcttctccaggcctcataccccaccaaatcccaagggcactgtcaccttccaacctccatctatgtgtgacattttttgacatttcttttattaatt

SEQ ID NO: 1579 - DNA, 120 bp, synthetic construct
  source 1..120: mol_type = other DNA
cttttcatattggcactgagagattgatggatctcattctttataagggctgctggctgttatttgtttaactggccacctactgaaggacttttagggattttgcaatctgcgaataca

SEQ ID NO: 1580 - DNA, 120 bp, synthetic construct
  source 1..120: mol_type = other DNA
gcaaactgtggcccaaatagctttccctgggggatttttaacttttaaggagaaattggagaatttgagatgcagagtcaatatatgactgtagtattaggactctttcagtaacagggg

SEQ ID NO: 1581 - DNA, 120 bp, synthetic construct
  source 1..120: mol_type = other DNA
taaagtggtaccagctgatgaaggctggctgggtctcttcctctagctaacatttgcattttaagcctgattttcaagtctggaaagctgaatataattctgaatacactgaggacatat

SEQ ID NO: 1582 - DNA, 120 bp, synthetic construct
  source 1..120: mol_type = other DNA
agcaaccccttccatggatgctcacccaattcgattctctctacaatcctatggctcttttgctcactttatgaatggagagactgaggtcagacagactgtcaattgcccaaggtcaca

SEQ ID NO: 1583 - DNA, 120 bp, synthetic construct
  source 1..120: mol_type = other DNA
ttcatcccatccagtacattcaactccactccatccactgtactccatctactacattcaactctactccatccactcccctccatccattccatccaacttcatcccatctactacatt

SEQ ID NO: 1584 - DNA, 120 bp, synthetic construct
  source 1..120: mol_type = other DNA
ttcatttcaattcaactaaattcagttaaattcagttcagttgtcttctactgagcacctactgcatgtcaggtatagcactaggcagtgggaggaatggagctaataaatgcagtccca

SEQ ID NO: 1585 - DNA, 120 bp, synthetic construct
  source 1..120: mol_type = other DNA
aggcaggcactaagcataatacatcaattctgtggtacctcagaaggtgaagggtctatgggcaaattacagcagggtaagggggactgatgttttctaagtttttgttttatgaagaaa

SEQ ID NO: 1586 - DNA, 120 bp, synthetic construct
  source 1..120: mol_type = other DNA
cctagtgcgtgtctgggtgtgtatcggttgtgcatgcatttgtgtgcatgcctgtgtttctctgaaactcttagggccatatgaatttctaaaatctattcagattttagaaaggtaatc

SEQ ID NO: 1587 - DNA, 120 bp, synthetic construct
  source 1..120: mol_type = other DNA
aacttactacacagcacctgagtttagtacagtagcacctgtgcttagtacatagcacctgtgtttagtatagtagcacctgtgcttagtacatagcgcctgcatttagtacagtagcac

SEQ ID NO: 1588 - DNA, 120 bp, synthetic construct
  source 1..120: mol_type = other DNA
tgtgagccagaagcgactcttgcatgtgtttggtttggcttggctcagggttgaacattctttgaatttgttgccaacatttcaaaatcaggaattttcacatagaaatccagatttctg

SEQ ID NO: 1589 - DNA, 120 bp, synthetic construct
  source 1..120: mol_type = other DNA
tccactgatgtaggaggcccacccatattttcagggtaatctccttcactcaaagccaactgattgtggcattaaccacatctacaaagcacctgcattcacagcagcgcctagattagt

SEQ ID NO: 1590 - DNA, 120 bp, synthetic construct
  source 1..120: mol_type = other DNA
ttctgtcaccaatgtacccaccgggccactccttcctgccccaactccttccagctagtgacccacatgccatttgtactgaccccatcacctactcacacaggcatttcctgggtggct

SEQ ID NO: 1591 - DNA, 120 bp, synthetic construct
  source 1..120: mol_type = other DNA
accaaggtgggaagtagagaaaggcattctctgagagcaggagccaaacaagagagctgggagcagggaaaaccctaggcccctgtctcttcccgagggaatgtggccgctgagcccaac

SEQ ID NO: 1592 - DNA, 120 bp, synthetic construct
  source 1..120: mol_type = other DNA
ccctcaagatgaccctgtgacagccactgccaagggcaaggatgggcaggacggtgagaccagggagtgtcactcacagaagggacccgggaccctgtccctagatactctggtatgcag

SEQ ID NO: 1593 - DNA, 120 bp, synthetic construct
  source 1..120: mol_type = other DNA
ccagcctgctctccacgtcgccccggggccgccgacccgggctggagagggggatgttgaggaggctgggggtgggggcggggcatcgagggagctcctggtactggcggccccgactgt

SEQ ID NO: 1594 - DNA, 120 bp, synthetic construct
  source 1..120: mol_type = other DNA
tgggaaaacccttccctgcccccaatgtgattttgccccaggcaaagactgagtttgggacttttgtaggctgctctatgataccatttgacagacagggaaactgagacagagaagcat

SEQ ID NO: 1595 - DNA, 120 bp, synthetic construct
  source 1..120: mol_type = other DNA
cccaaaccccaggtcccaaacaccctcttagccaatcactgcacccttataagcaatgttcttcaaaccaaagatcagaacacagtagtgaatcaaaaccagcatttttttttttttttt

SEQ ID NO: 1596 - DNA, 120 bp, synthetic construct
  source 1..120: mol_type = other DNA
cccttgggctctagacctccatgttcttatttgtaaggcatagagaccattcccgccctgggctgtcacaaggatttaaccccatcgcctatgtgacatatacctcccaccccaaaaggg

SEQ ID NO: 1597 - DNA, 120 bp, synthetic construct
  source 1..120: mol_type = other DNA
cagccaatgagcatgacgcagatggagaagatcttctctgagttggtgttgggagagacgttgccgaagcccacactggtgaggctgctgaaggtgaagtagagcgccgtcacatacttg

SEQ ID NO: 1598 - DNA, 120 bp, synthetic construct
  source 1..120: mol_type = other DNA
tagggcactttggtgacgctacaaaataatggccccttgggatggacgaattagaaaaaaaggtgtcctgtgtggccctctgcaacctgcgaggagcttgtgtggagagaaggagcatag

SEQ ID NO: 1599 - DNA, 120 bp, synthetic construct
  source 1..120: mol_type = other DNA
aaaaagcttccatcagaatgcccacccctcagccaagcgaccacagcaaatggccacccccaggtttgggcatcatggttcccaaaatgccacacagcacaggactggctccaaacagtt

SEQ ID NO: 1600 - DNA, 120 bp, synthetic construct
  source 1..120: mol_type = other DNA
aagactccccttcatactcaagctgggcttgcccaagacaccttcacagatggcgctgctgggagaacatctccttagaggaaataactagaagtcaagacgggtcatagtcaaagattt

SEQ ID NO: 1601 - DNA, 120 bp, synthetic construct
  source 1..120: mol_type = other DNA
atctcattcctgtcatctccccactttgcattttgagctccaggactgtgggccatggcaggcacaggagcggggaagtcccagcaacggaaactctgtaagcccagcctgggagggaat

SEQ ID NO: 1602 - DNA, 120 bp, synthetic construct
  source 1..120: mol_type = other DNA
ttacatgagccaacccaggcagctgctgtggaaggggcaggagggaacagcttgggacaggagtcctccacattatcccaggcttctcactcactgcagagatctgcactcctgacccac

SEQ ID NO: 1603 - DNA, 120 bp, synthetic construct
  source 1..120: mol_type = other DNA
ttgtgggttcgctcctttatcttaggtgctatgatctcacggtcactggtgggcgaagccaagaaggggtcgcccttgaggtccacaaagttgagggtgatttggggaatcttgctaatg

SEQ ID NO: 1604 - DNA, 120 bp, synthetic construct
  source 1..120: mol_type = other DNA
aatgtaatgggatgaatggacatttaatagcgcaacaagccacttaatggaattaaataagtgcttaatgggatttccatctcccaggcacccaggacgtagtgaaaaggtcagaagccg

SEQ ID NO: 1605 - DNA, 120 bp, synthetic construct
  source 1..120: mol_type = other DNA
tagggccagttttactgacactgtcattttagagtgtaagaaaccaagaggtgagcacttttgtcatgatgctgagggaaagattaaaattaagccaaagagggcatcctgacagaggaa

SEQ ID NO: 1606 - DNA, 120 bp, synthetic construct
  source 1..120: mol_type = other DNA
ttaagcccacagactttaggcctacgatctctgggttcatagcccggatctgctgcttaatcacttatgcttttttcctaaattatttaacatccttgtgcctcattttttccatctata

SEQ ID NO: 1607 - DNA, 120 bp, synthetic construct
  source 1..120: mol_type = other DNA
ccaacccgtgctgatttctgaaggagccccttttaggccaagcactcagttccacctaaggcccagctcagaacctcctgcccacaggaagtccttaatgaaaccagaaggcagttaaca

SEQ ID NO: 1608 - DNA, 120 bp, synthetic construct
  source 1..120: mol_type = other DNA
cctaagtcctccaccagggagcttgcctcagagaagtctagagtctggagccaagatggactcaaacttcagaatgggctggagactgtccccaacacagggccccagaaattccaacct

SEQ ID NO: 1609 - DNA, 120 bp, synthetic construct
  source 1..120: mol_type = other DNA
tgcaacacagggtgatcctgcccaccccctagggccgtaggggtgaaatggcctaagatatgtgaagctcagagcctggcttgaggtcaccataagcttgagacagaagagaggcagaca

SEQ ID NO: 1610 - DNA, 120 bp, synthetic construct
  source 1..120: mol_type = other DNA
attcccagagtggcaggtacagcgccatcctgctaccacagaaggtgtccatcacttctcagaacacaacgccggcttgctttcatttggtgccaatccacacccagcagtctacctggg

SEQ ID NO: 1611 - DNA, 120 bp, synthetic construct
  source 1..120: mol_type = other DNA
atttatagggtcttgggggccgctgtagtcatctagacccacccaaatccactgcatgtggcatgcctgagccatctctgccccggaccacagcaatgcctcagaagatctctgtcctct

SEQ ID NO: 1612 - DNA, 120 bp, synthetic construct
  source 1..120: mol_type = other DNA
aatttgcccatttcaagcccgtggtgccctccagcccaagtctggacagcagatggagcaaccatgggaattaaggtgccttttgatgaagcaaaattcaacctggtcatcagttttcat

SEQ ID NO: 1613 - DNA, 120 bp, synthetic construct
  source 1..120: mol_type = other DNA
atacgtcttttacaatagcaacaaaaactcttaagtgtccaggaattgaccaagaaggcacaagaaccctgttggagtcggggcaaaagggaacaaaaccttaaactagcaagaaataca

SEQ ID NO: 1614 - DNA, 120 bp, synthetic construct
  source 1..120: mol_type = other DNA
tggaatacactgaatgtttaacagtatgcattggtatctctagagtacacaagcaactcctgcaaatcaacaaggacaaaagacggcgacgtcaaaattaaaatgagcaaaggacatgag

SEQ ID NO: 1615 - DNA, 120 bp, synthetic construct
  source 1..120: mol_type = other DNA
acggttgcctatggggagggtaatgagactggagagtgagataaaagggaaaaggaaaaaaatgaaagagaaaggaaaaagcaataacacaaatgctgtggtttcaattatttgggggag

SEQ ID NO: 1616 - DNA, 120 bp, synthetic construct
  source 1..120: mol_type = other DNA
ctgttaaactccctcacactaaagggctaaatactttctgtctctatactgggagggggcaatgagagagaacgtgtttttaaggaaaaaggagcactctaaacgcagaagttctctaag

SEQ ID NO: 1617 - DNA, 120 bp, synthetic construct
  source 1..120: mol_type = other DNA
cctgatagcttcagtgccacaggaaaagttctcctgtgtctaagccccatcctctgggatcgctctggtctgcctcctatctcaagacaagaaaacccacttatacaccaatccctgtcc

SEQ ID NO: 1618 - DNA, 120 bp, synthetic construct
  source 1..120: mol_type = other DNA
gggaagaagacaggaggaggcaccagagaggagataaagaccaagggacagagagtaagccaggcaggcagaagacaaaggcaaggagatgtggggagtgagagaggagccgagaaggtg

SEQ ID NO: 1619 - DNA, 120 bp, synthetic construct
  source 1..120: mol_type = other DNA
gttatcccagaagtagaaacaggcccagggaagtcaaccaacttgtccagtagtgtataatttccagcattgtcttagacacaaacccaggacttatgggttcatattcttttcagtaca

SEQ ID NO: 1620 - DNA, 120 bp, synthetic construct
  source 1..120: mol_type = other DNA
ctcatctgtcctgcccatctccaagagcctagtgcctgccaggctcacaagggttgagtcaatgcttatgggacacacgctaggaagcagcaaggtttgcacgcgttccagagccgcctc

SEQ ID NO: 1621 - DNA, 120 bp, synthetic construct
  source 1..120: mol_type = other DNA
caggtgcagggtcgctgcatcacctcggcccgcgagtagccgcacagctcgcagaagccgtcgttgcagtagatgacggcgcagttctccacccgagcgttggcgatgatgaacttacgg

SEQ ID NO: 1622 - DNA, 120 bp, synthetic construct
  source 1..120: mol_type = other DNA
tgaggggtgggtgtgccagagaggatgagggaagttacacgttgaacacctaaggacgctgcatctcattaggtcctctgacaaccccataaggtaggtgttattatcctccttttatag

SEQ ID NO: 1623 - DNA, 120 bp, synthetic construct
  source 1..120: mol_type = other DNA
ccagcttcatagaagaaaaaccaccccttgtcctctctcccaggctggggaaagaagagcaagtttcttcgaaggcatgccccaccccaccacacacccttcactgagatcctggaatac

SEQ ID NO: 1624 - DNA, 120 bp, synthetic construct
  source 1..120: mol_type = other DNA
ccccccatccacactcggaagagctcggcccgcccccagagccccctccccgctcagccccctcccccactcactctggccctcaaacttgcggatgatggtgtccaggaaggtgttctg

SEQ ID NO: 1625 - DNA, 120 bp, synthetic construct
  source 1..120: mol_type = other DNA
gggccgagaggaagcgctggggttggggccgcctgccaggcgcccggcggggcagcgcgggcctggccaagaagtgccccttctcgctggagctggcggagggcggcccggcgggcggcg

SEQ ID NO: 1626 - DNA, 120 bp, synthetic construct
  source 1..120: mol_type = other DNA
attaactaattgaaccaagctcatgaaaacctggcttgatgcagagagcggagaggcacgtttgcagctctcactaagaggcagctgtgctcccggagaaagcagcgctggtagcagagg

SEQ ID NO: 1627 - DNA, 120 bp, synthetic construct
  source 1..120: mol_type = other DNA
ccgtgtggaggaagaggaggaagagggctcgccacgccccagaggaagtctctgcttgcacttgtgttttcttcctcatttggattgtttaggtctcggaagtttgctcagcaagagtct

SEQ ID NO: 1628 - DNA, 120 bp, synthetic construct
  source 1..120: mol_type = other DNA
acatccaggtggcatctactctggttgctgagatgcttggagatcctggttgtggccaaggagagggatttgaggggggacctgcagtgcatggagactgcccctgtaggctctcaaacc

SEQ ID NO: 1629 - DNA, 120 bp, synthetic construct
  source 1..120: mol_type = other DNA
ctgtggctgggctgccttggccagggtcctgggccttctgagtctgcgtctcattctctgtggcaggctcctggtgctggcaccttcagtgcagggtgcctcggttggagggaacattca

SEQ ID NO: 1630 - DNA, 120 bp, synthetic construct
  source 1..120: mol_type = other DNA
gacattccaaactggcttttggcccctgcgatatcttgctgtgattcaagactctgtccacgggcaagaacaacaaggctgggacaatctcatctcaggcatctgtgggaggagacagct

SEQ ID NO: 1631 - DNA, 120 bp, synthetic construct
  source 1..120: mol_type = other DNA
ccatgatgggacccaggtgtcttcccacttctcgaccatctcctgggaagttctaatgtttggttcagggtgtggggtccatctgagcaggcatggtgcttccagaaggatccaggttaa

SEQ ID NO: 1632 - DNA, 120 bp, synthetic construct
  source 1..120: mol_type = other DNA
ttctctgctgccttccaaaatcatactctggggcgcactgaaagggtgctctgagtagctctccccggctcctggctgaacttgctccaggcagagatttgaagagattcagaaagcagg

SEQ ID NO: 1633 - DNA, 120 bp, synthetic construct
  source 1..120: mol_type = other DNA
ttgggtacctaaagaaagcgcctggaattctttaccctgagagcgaagaaacttttctatgacttgaatgctagatgcgtggaggagatttatgtgtttgaccacataagaaagaagcaa

SEQ ID NO: 1634 - DNA, 120 bp, synthetic construct
  source 1..120: mol_type = other DNA
taaaaatatagcagctattcttcatctgataaaggggaggatgcaagtctggatgtatattaaaaacgaaagcaatggaagcctccaaatcttaaaagtttacctcaaaagggtggcggg

SEQ ID NO: 1635 - DNA, 120 bp, synthetic construct
  source 1..120: mol_type = other DNA
ttttttttttttgagatggagtctcactctgtcacccaggctggagtgcagtgatgagatcttggctcactgcaagctctgcctcccaggttcacaccattctcctgcctcagcctccca

SEQ ID NO: 1636 - DNA, 120 bp, synthetic construct
  source 1..120: mol_type = other DNA
ggccaaggtgggtggatcatggggtcaggagtttgagaccagcttggccaaggtggtgaaaccccatctctactaaaaatacaaaaattagctgggtgtggtggtacgcacctgtggtcc

SEQ ID NO: 1637 - DNA, 120 bp, synthetic construct
  source 1..120: mol_type = other DNA
catctcacgccagtcagaatggcctttgtttaaaaagtctcaaaacaacagatgctggagaggcagtagagaaaggggaacacttacaccctgttgacgggagtgtaaatgagtccagcc

SEQ ID NO: 1638 - DNA, 120 bp, synthetic construct
  source 1..120: mol_type = other DNA
acagatgtaagttagaagaggttacgcaaaaatcctccatccctgcatttgaatgaggactatcagtatgcatccaggatgacgtttacttaaatatctctgtttcctggaaaggcccag

SEQ ID NO: 1639 - DNA, 120 bp, synthetic construct
  source 1..120: mol_type = other DNA
acacatgacctgatttcctcagtaagtcaatgaccaagaaataacggagagaaggaggaaagaatcacctatccaccaattgtgacatatggccttagttaggtcctcaataaatgatga

SEQ ID NO: 1640 - DNA, 120 bp, synthetic construct
  source 1..120: mol_type = other DNA
gccaaaacctgcggctgggtcagaggactggtttagtaagaatttttttttttttaaatgtggttatctgctagccagaaaaggtgtgtggtttcgcagtctttcagacaaactgaattt

SEQ ID NO: 1641 - DNA, 120 bp, synthetic construct
  source 1..120: mol_type = other DNA
atctgatgccccccttttcttcagccttggagaggatggcttctcaggccgcctcgcagcagatttgtagtctggttgctgtcgttcctgaaatagcctctgaagctctgtccgggaagg

SEQ ID NO: 1642 - DNA, 120 bp, synthetic construct
  source 1..120: mol_type = other DNA
tagtcccaatacagctgggatgcattgctgctccttccgccatcccagcagctgtccagagatgagacccagccccactgtgtctttctgggattcacaagaatccttccctgggctgag

SEQ ID NO: 1643 - DNA, 120 bp, synthetic construct
  source 1..120: mol_type = other DNA
ctaatccctacctgccagtgggtgacacagaaggcaggaatgcagaaggcctttcagaagttctcactggcctgcaaggtagaggctgttttctgctgaggatacatttgccccctctat

SEQ ID NO: 1644 - DNA, 120 bp, synthetic construct
  source 1..120: mol_type = other DNA
ggcccggacagcagataacaagccttcgtcgtggtcacccctgggtgtgggctgtgggttttaatcttttcatttttgctcatctgaattttctaattaaaaatatattgctttttaaaa

SEQ ID NO: 1645 - DNA, 120 bp, synthetic construct
  source 1..120: mol_type = other DNA
tccttcaggggctgttagccacatgcttagaccgcaccgagaaaatgcagtccctccagagctcctaaccttccatgggccacaggccccttcccagaagtttttttattttttattttt

SEQ ID NO: 1646 - DNA, 120 bp, synthetic construct
  source 1..120: mol_type = other DNA
gggacgtttttgagttttcctgaggctttgcctagggagtgtcgctgaggaagctggaacagtgaccttcgttgttgggggaggagatgcaggcaggctgtggcccagctgccccatttt

SEQ ID NO: 1647 - DNA, 120 bp, synthetic construct
  source 1..120: mol_type = other DNA
ctgtcctcatgagaacagggctgagctccatgttccttagcctcccttggcctcagtcatcctatctggaaacagggatcataatagttttagtttatagagagcgagggcctggcccct

SEQ ID NO: 1648 - DNA, 120 bp, synthetic construct
  source 1..120: mol_type = other DNA
ttaaagggctgttagccacgtgcttagactgtgcccggaaaatgcactgtctctcctgggctcccaacctttcacaggccacaggcccattcccagaagtttattttttatttttcgaga

SEQ ID NO: 1649 - DNA, 120 bp, synthetic construct
  source 1..120: mol_type = other DNA
gtctttaattttagccaatctaacaggtgtgtcggggccctccctggcattcctggtgactcactgtgtggggtcatcttttcagctgcttagttgttgtccacatatcttctttggtaa

SEQ ID NO: 1650 - DNA, 120 bp, synthetic construct
  source 1..120: mol_type = other DNA
gctgctttttccaaagaggtgcgtaggaggtttcattcatatttatatgttttcttgaaaaggggaggggcatcaagtgagacaaatgattatatacttgcgagactttagttagagccc

SEQ ID NO: 1651 - DNA, 120 bp, synthetic construct
  source 1..120: mol_type = other DNA
aacttgttcccttatggattgtgttttttggtgctctcagaaatctttccctaaaccaagggcacagattttctgttttcttccagaaattttgtagtgtcaggtttcacactgaggtgg

SEQ ID NO: 1652 - DNA, 120 bp, synthetic construct
  source 1..120: mol_type = other DNA
atgtatatatgggtgtgtgtgcacctatgtgtataagtgtatgtgcacatgcgtataggtgtgtgtgttttatgtatgggtgtgtgtgcacctttgtgtgtatatgtgcatgtctatgtg

SEQ ID NO: 1653 - DNA, 120 bp, synthetic construct
  source 1..120: mol_type = other DNA
ttaattctgatgtcatttattgctgttcctatatttgtataataaatggaagaaaatagtggttgggggcttgctggggactcagggagggttggggacctccagggcttccattcgacc

SEQ ID NO: 1654 - DNA, 120 bp, synthetic construct
  source 1..120: mol_type = other DNA
ctctccacacatcacccagtgtggagtggttttttgtctttctttcgaaacaggctttcctcactgagggctcaccatggggctgtgctggggacactggatgtgtccagggtccgtcaa

SEQ ID NO: 1655 - DNA, 120 bp, synthetic construct
  source 1..120: mol_type = other DNA
gtgcagctgtctctgcctttggctgttgtggctagaggctccttcctgaaagcctgatacttagaatggatttaaaaacaaattcaaatgtgtgttgcttatgaaaatcacaaaattaag

SEQ ID NO: 1656 - DNA, 120 bp, synthetic construct
  source 1..120: mol_type = other DNA
acttaaaagcaaaagatgtaccttttacagtgttcctggaacactcacaaacattgatcatatactagactgcaaaaacttcaagacattctaaaattaagaacctatgctggatatctc

SEQ ID NO: 1657 - DNA, 120 bp, synthetic construct
  source 1..120: mol_type = other DNA
agatggcttattctttgggaaaaaatgttaagtcaaaattaggaagaagtggagacaatctcagtatgtgtgagatgaatctgaaccctcatcagaacgtccacagctgacggtgaacac

SEQ ID NO: 1658 - DNA, 120 bp, synthetic construct
  source 1..120: mol_type = other DNA
ggccaaaaaacgtagaaggctaaataaagtaccgttcagggtgaaggggaaggaagaaatgtgatgcctaagtgggagtctatgattccactatgttatgtattagtccattttcaaatt

SEQ ID NO: 1659 - DNA, 120 bp, synthetic construct
  source 1..120: mol_type = other DNA
atgctgatgcaagaggtgggttcccatagtcttgagcagctctgcccctctggctttgcagggtacagcctccctcctggctgctttcacaggctggcattgagtgtctgcagcttttcc

SEQ ID NO: 1660 - DNA, 120 bp, synthetic construct
  source 1..120: mol_type = other DNA
gagaccacctcagcctggatttcattgtccatatcattatcagaattttggtcaagcccttcaacaagtttctaggaagttccagactctcccacattttcttgtcatcttctgagccct

SEQ ID NO: 1661 - DNA, 120 bp, synthetic construct
  source 1..120: mol_type = other DNA
tggtctcttctgcagtgaactgatgcgatgtgtgatgtcactagttctcatccaaagcagatgacaattccagttactcctcaccagacataagaaaatgcttttagtagatcagttttt

SEQ ID NO: 1662 - DNA, 120 bp, synthetic construct
  source 1..120: mol_type = other DNA
atacttgcctatgtgtgtctgtgcaaatacttggtaaaattgagagggtactagacaactcatttgtatcttcttaccttttgacacatggcagacatgtctcacatctgttcttcctcc

SEQ ID NO: 1663 - DNA, 120 bp, synthetic construct
  source 1..120: mol_type = other DNA
aagatcctgagagcaatgcggggggtgtgagtgatgagggacaacatcagtcctctcttggcttctgtactttaaaaaaatcattttgttttgaagcaattttagacctacagaaaagtt

SEQ ID NO: 1664 - DNA, 120 bp, synthetic construct
  source 1..120: mol_type = other DNA
aatttggattcttctccaggaagagctgtcccctttgttctggttatgtatccagtggcttatgtatatcagcatggtttcatagatacttcttttgtgttatgggctataagccaatgc

SEQ ID NO: 1665 - DNA, 120 bp, synthetic construct
  source 1..120: mol_type = other DNA
cattcatctgtgacatgtttagatttatctgttaggttggtattccattttgggtgtcccccgattctgattgtttttagttacttatctgggggtctgtgtgaagggaatgtaaagctg

SEQ ID NO: 1666 - DNA, 120 bp, synthetic construct
  source 1..120: mol_type = other DNA
cttttgggtatatacccagaagtggaatttctggattatatggtaattatagttttaatttcttgaggaaccactatgccgttttccacagtagctaccacatcctcaccaacacttgta

SEQ ID NO: 1667 - DNA, 120 bp, synthetic construct
  source 1..120: mol_type = other DNA
gttaatttttgtatatggtgtgaagtaagggtccagcttccctcttgcatgtggatttccagttttcccagcaccatttgttgaaaagacagtccttttctcattgaatagtcttggaac

SEQ ID NO: 1668 - DNA, 120 bp, synthetic construct
  source 1..120: mol_type = other DNA
cttctattcctagtttgttgagagtttttaataaggatgttgaattttgtcaaatgctttttgtatcaattgagatcatgtgatcatgtgagtgttatttcttcattctgttaatatgct

SEQ ID NO: 1669 - DNA, 120 bp, synthetic construct
  source 1..120: mol_type = other DNA
tatgtggcatggagagagaatctgagagcttgggggagggaaagtgcagtgctttgggactgtccatcgagctcagtgattccctgttgccacagaaagcagaaccaggctaaattcagc

SEQ ID NO: 1670 - DNA, 120 bp, synthetic construct
  source 1..120: mol_type = other DNA
aggctcctttgcctatggaaaggagaaggaattctgggtatgactttgtcttgtgctactactgagtgccagcttagcctctgtagtataccacaccaggtaggtttctaaggtctttga

SEQ ID NO: 1671 - DNA, 120 bp, synthetic construct
  source 1..120: mol_type = other DNA
aagaaccacagtgttactgggcttgggatgctgcctaatgcagatacggcttagatcacaacacccaagtccctttgaatacctggaaagctttaccaagaaagatgggtacaaacaagc

SEQ ID NO: 1672 - DNA, 120 bp, synthetic construct
  source 1..120: mol_type = other DNA
ggatgaaaagaagaactgataaataatgactacaacaacttttgcggtacaataggcagtacaataagatatagagacaaaaaaacttaaaaagcggagagacaaaagttgaagtgtaga

SEQ ID NO: 1673 - DNA, 120 bp, synthetic construct
  source 1..120: mol_type = other DNA
gattttttagtgatcgccattctaactggcatgagatggtatctccttgtggttttgatttgcatttctctgatgaccagtaatgattagcttttttttccatatgtttcttggccacat

SEQ ID NO: 1674 - DNA, 120 bp, synthetic construct
  source 1..120: mol_type = other DNA
gcagtggtttgttgttctccttgaagaggtccttcacatcccttgtaagttgtattcctaggtattttcttctctttgtagcaattatgaatggggattcactcatgatttggctctctg

SEQ ID NO: 1675 - DNA, 120 bp, synthetic construct
  source 1..120: mol_type = other DNA
gttggtctattcagggattcgactttttcctggtttagtcttggagggtgtatgtgtccaggaatttatccattttttctagattttctagtttatttgcatggaggtgtttttagtatt

SEQ ID NO: 1676 - DNA, 120 bp, synthetic construct
  source 1..120: mol_type = other DNA
tgtattgggtgcatttatttaggatagttagctcttcttgttgcattgatccctttaccattatgtaatgctcttctttgtctttttttatctttcttagtttgaagtctgttttatcaa

SEQ ID NO: 1677 - DNA, 120 bp, synthetic construct
  source 1..120: mol_type = other DNA
ctgcagagagatttgctgttagtctgatgcacttctctttgtaggtaacctgacctttctctctggctgcccttaacgttttgtccttcatttaaaccttggagaatctgacaattatat

SEQ ID NO: 1678 - DNA, 120 bp, synthetic construct
  source 1..120: mol_type = other DNA
attgctgcctactccttcctctggaagctttgtcccagaagggcaccagcctgatgccaaccagagctctcctgtttgaggtgtctgttgacccctgttgggaggtcttgcctgctcagg

SEQ ID NO: 1679 - DNA, 120 bp, synthetic construct
  source 1..120: mol_type = other DNA
ccccacctgcttctgtgtgccctccgtgggctgcacccactgcctaatcagtcccaatgagatgaacttggtacctcagtcagaaatgcagaaatcacccagtgttgatctcactgacag

SEQ ID NO: 1680 - DNA, 120 bp, synthetic construct
  source 1..120: mol_type = other DNA
cattttggaaactatacagacatacacatagtaattaaacaatatgctcctgaatgaccagagggtcaaggaagaaattaagaaggaaattgaaaattttattgaaataaattacaatgg

SEQ ID NO: 1681 - DNA, 120 bp, synthetic construct
  source 1..120: mol_type = other DNA
tataaaaatcctgtgggatacagcaaaagcagtattaagagggaagtttctagttaaaagcacctgcatcaataaagagaaaaacttcaagtaaacaacctaatgatcttaaagaacaag

SEQ ID NO: 1682 - DNA, 120 bp, synthetic construct
  source 1..120: mol_type = other DNA
aactgtcaaaaacctaggtatagaaggaacatacctcaacataataaaagccatatatgacagacccacagctagtaacatactgaatggggaaaaactgaaggcctttcctctaagacc

SEQ ID NO: 1683 - DNA, 120 bp, synthetic construct
  source 1..120: mol_type = other DNA
atctctcaccatataaaaaaaacaaatcaaagtgaattcaagaattaaatctaagacttcaaactatgaaactactaaaaagacattggagaaactctccaggacattggagtgggcaaa

SEQ ID NO: 1684 - DNA, 120 bp, synthetic construct
  source 1..120: mol_type = other DNA
cagcagagaaggatccgcactcctgtgtttattgcagcactattcacaatagccaagatttgggagcaaactgagtgtccatcaacagatgaatggataaagaaaatgctgtgtatacac

SEQ ID NO: 1685 - DNA, 120 bp, synthetic construct
  source 1..120: mol_type = other DNA
attgatttctaagcttatcccattatcgttggagaagatcctttgtatgactggcatctttttgagtactttgagacttaattcgtggcctgatctctcctgggaacatttccacgtgca

SEQ ID NO: 1686 - DNA, 120 bp, synthetic construct
  source 1..120: mol_type = other DNA
actgcggcactgttcaccggagcctgtgccttcaatgtcgtattcaagaaatcatcctcaaatccaaagtctttctattttctcctatgtgttcctattgctttaggtcttacatttata

SEQ ID NO: 1687 - DNA, 120 bp, synthetic construct
  source 1..120: mol_type = other DNA
tcccagctggtcacttgtctttgactttgcttatggtgctttttgctatgagaaatttcgcatgtttatatcatcaaatttatcatgcttctttctactgactccggattcagggccaca

SEQ ID NO: 1688 - DNA, 120 bp, synthetic construct
  source 1..120: mol_type = other DNA
acaggggcaatggaggaagaacaaaggactctgtgttgagccctcctgagaggttttggaactggccttgacttggtgatgtggggttatgagttttattccacacacgtatgtgggagt

SEQ ID NO: 1689 - DNA, 120 bp, synthetic construct
  source 1..120: mol_type = other DNA
aggcttttatttgctgtttcatgaaactgaaaatttaagtttttaatatcacatattatttcatgaagagtggcttcggactttggggtagggtctggtaggatcccagggccccttccc

SEQ ID NO: 1690 - DNA, 120 bp, synthetic construct
  source 1..120: mol_type = other DNA
acagacccactgccagggctgcctctctctttagatatgtcctggcatctgactttggtttcctggtgtttaaaggctaattgggatcggtcgtggtgcctcaggcctgtcaatccagta

SEQ ID NO: 1691 - DNA, 120 bp, synthetic construct
  source 1..120: mol_type = other DNA
ccctcttgccctgcctctccccgagacgtcaccctttctcttttccccattggtggtggttttatgtgttcatttacggtttattttctctctccctgtgtctgttatctgtctctgcac

SEQ ID NO: 1692 - DNA, 120 bp, synthetic construct
  source 1..120: mol_type = other DNA
ctgttgttgaataattcaatgccccatgccaggcctgttgcaaaattagccacttcctccctccaggcccatgagtgactcctggatttggtgaaagccaggcctagtggaattgtggcc

SEQ ID NO: 1693 - DNA, 120 bp, synthetic construct
  source 1..120: mol_type = other DNA
actcacctgagccctctttgctcttcttggctgttccctgatatggccacgcagagactatctctaagtgtcagttctggactcagctggaaaggtttcatgacctcaagggacccatgg

SEQ ID NO: 1694 - DNA, 120 bp, synthetic construct
  source 1..120: mol_type = other DNA
ctgagttccatccatccctgcaggttgggttctcctctctcctctgggatctgcacaggttgccattctctctgcctagactgggcctccacctctgagaagccctcccttattgcccct

SEQ ID NO: 1695 - DNA, 120 bp, synthetic construct
  source 1..120: mol_type = other DNA
atgttattttattttagatttgaggagtacacatacttgtctgttacgtgcgtaatggtggggtttgggcttctcgtgcgcccatcagccggatattggacgttatactcaataggtaat

SEQ ID NO: 1696 - DNA, 120 bp, synthetic construct
  source 1..120: mol_type = other DNA
tgacttgaggcaggtcccttaacctctctgagcttcctcctctcctgtgaacaaaggatgggtccacttctcaggcttctcatgaagtttagaggcgacaggaggaggtgggctttaaat

SEQ ID NO: 1697 - DNA, 120 bp, synthetic construct
  source 1..120: mol_type = other DNA
gtgacactcgggatggcatggcagggccctcaagcacggctgtgttcaccccccaggctgctcctggaaaggagggatcagggcccaggctccacgctccgcactgaggtgtggtcgagg

SEQ ID NO: 1698 - DNA, 120 bp, synthetic construct
  source 1..120: mol_type = other DNA
cacttccagattcacccggaggcctgcatggaggaggcggcactgagacttcattcaccgagcttgagggtttaccctaacattcattcacaccatcagtcattcagcaaacacttcaca

SEQ ID NO: 1699 - DNA, 120 bp, synthetic construct
  source 1..120: mol_type = other DNA
tcacccattgttgtgtcccttgggctgggatcccatggctttcaagaactttttaaagaaatgagactcagctgccgcggaacaagccacaggtaaagagtataagacagcgtgaggcat

SEQ ID NO: 1700 - DNA, 120 bp, synthetic construct
  source 1..120: mol_type = other DNA
ctgttgtttaagaattcaaaatctaccaatagtgatcataagtaatgtattaaatacttacatagtacagcaggtgttggcccccccccacaacattggtttccatccctggaagctgca

SEQ ID NO: 1701 - DNA, 120 bp, synthetic construct
  source 1..120: mol_type = other DNA
ccccagtaggggtctttgaacattgctcgatctcattcaccagccacggggaacattttgaaccctctgatgcttgctctatgaatgttgtttgctttaaaaaaagttttttttttattg

SEQ ID NO: 1702 - DNA, 120 bp, synthetic construct
  source 1..120: mol_type = other DNA
cacgtgtctttgcacgtgaagtaggtggctctctttaaggttcctcaactttattgggaaacatctcagggttacaaaacgccccccatgggctaaagaggctgtcactcactgtgtgtg

SEQ ID NO: 1703 - DNA, 120 bp, synthetic construct
  source 1..120: mol_type = other DNA
gcgcgtggtatttgcagccagtcaccaagttttcaagccctcacctgcggcctgtgagtgcccaccctgcacatggtgctaaccagcatccatcactgctttcttttttaatttaattta

SEQ ID NO: 1704 - DNA, 120 bp, synthetic construct
  source 1..120: mol_type = other DNA
agtggggttatctcagcttccacattgcatcacggtgcccctgtgaagggcagaggagctgcaggtaattctgttcgctcgcctctgccttggaggaagtttacagtttttttttttttt

SEQ ID NO: 1705 - DNA, 120 bp, synthetic construct
  source 1..120: mol_type = other DNA
tgtctaatctcacttccctgctcactgcaaatcaaaacaaacagacgtccaggaggattaagtgtggcagtcatggcggagggagccctggtagggtggagagagccaacagttgcacca

SEQ ID NO: 1706 - DNA, 120 bp, synthetic construct
  source 1..120: mol_type = other DNA
tgatcagacttgtgctttgggtcgaatgtcccagtgggggagtaacctcagggagcagaggaagggtcatggtggtggggatgaagcagcagcattggggcttagagattaaatgaagga

SEQ ID NO: 1707 - DNA, 120 bp, synthetic construct
  source 1..120: mol_type = other DNA
tcgctgaggatccacgggggtccctggagtctccggagcccgtgggaatccccctagaggcgggaggaaggccgggcgggccctggagggtacgtttgcagtggcagcagctccctatct

SEQ ID NO: 1708 - DNA, 120 bp, synthetic construct
  source 1..120: mol_type = other DNA
agcatgtgttggtgcttcgtcccttcccgtggcgggacggcatccctcgtgcggacctacctctagtgtgtgcttaccagctaatggatgactgggttttcgaagcactgtctgttccta

SEQ ID NO: 1709 - DNA, 120 bp, synthetic construct
  source 1..120: mol_type = other DNA
ctattctgtcccactggtctcctggacttttcctttaccagggccctactgacttggtggtcccggtactaaaatcaatttcatgatgtcactttgtgcctcggcagggctttctttttc

SEQ ID NO: 1710 - DNA, 120 bp, synthetic construct
  source 1..120: mol_type = other DNA
actttcctggcgtctgcgaaagctgttaatttctgctacagcctgtggtcctgctacttctcgtgactgtggtcgtagaagtttttccctctgtcctttgcatcttttgcgtttccagat

SEQ ID NO: 1711 - DNA, 120 bp, synthetic construct
  source 1..120: mol_type = other DNA
tataggcacattgtagtgtgcgcctgtgagcatgtattgtatgtttatgcatggctgtgttgtgtgtatttatgtatagctatgtgtcgctgcgtgtgtgtacctatgtgtatgtacgtg

SEQ ID NO: 1712 - DNA, 120 bp, synthetic construct
  source 1..120: mol_type = other DNA
aaacagcagctggggaggactttctaagacaaaaacctgatcattccagaagctccctgtgacgtttaggctacattccccaaggtggtgccacgttcaggcccatcacctgtaacacta

SEQ ID NO: 1713 - DNA, 120 bp, synthetic construct
  source 1..120: mol_type = other DNA
cacgatgtttaaatgttgggggaaaaaatggatcaaagcgatgtgttcccagggagcccctgttttctcgtttcttttcgtacgcccagctttgcagtgccagaaagctgttatctcagc

SEQ ID NO: 1714 - DNA, 120 bp, synthetic construct
  source 1..120: mol_type = other DNA
cacagcttttgtcaaactccacacaaagagagaggcactcaaaagcacaacacaaacacggctagtccgcgcctttggtggtgaacataccagggaattgtcctgcaatgcctgtggtta

SEQ ID NO: 1715 - DNA, 120 bp, synthetic construct
  source 1..120: mol_type = other DNA
gctaagaccggtccccaccacccaggccactctgaggcttcagaacgcggtcgtcttctccctggcagggttgtttccgcctgcatttgttcagccagcaaatctttattaagcacctac

SEQ ID NO: 1716 - DNA, 120 bp, synthetic construct
  source 1..120: mol_type = other DNA
ggtgttaagggattctagaaatttcctgctgtgccaggctgcagcagagactccggccccaccaggcttcctgtacttggtgataaacacaccatccgcactgcctgcggctcttacagg

SEQ ID NO: 1717 - DNA, 120 bp, synthetic construct
  source 1..120: mol_type = other DNA
ccatggcagatttgagtcctgccatggagaccatgcagcccacagggcctaagatttctactacctgaccttccaggaaaggtttgccacgctatttatttagcaggataattttggaaa

SEQ ID NO: 1718 - DNA, 120 bp, synthetic construct
  source 1..120: mol_type = other DNA
tgaaccactgcactcagcctgctttgtttttatcctgagtcatttgagagtaagttggaggcagtatgaccgtttctccgtataaagcccgtgtatatcctctggaatgaggaccttcaa

SEQ ID NO: 1719 - DNA, 120 bp, synthetic construct
  source 1..120: mol_type = other DNA
ttgtcatatatatcaagtttgttcagaacaagatggggtggggtggggggcagtgaggggcctggggcaggaggtagaggaaactgcaagattttttaaaccttctccaaaaacacgtaa

SEQ ID NO: 1720 - DNA, 120 bp, synthetic construct
  source 1..120: mol_type = other DNA
tagagggcattacattcagatgagttctaattatgttcttggcttcccaggtcacacagagtgaaaaccagaggccctggccgtgcaccattgaagtgtgtcatcatgtgactttgcagg

SEQ ID NO: 1721 - DNA, 120 bp, synthetic construct
  source 1..120: mol_type = other DNA
tttttaggtgaagccaatccctgttgggctgagaaaagtcctgggcggctgtgagctggtggtgagttttccagacttggtcatggtcaaggtagttgaagtcgggggttgaaaaacaca

SEQ ID NO: 1722 - DNA, 120 bp, synthetic construct
  source 1..120: mol_type = other DNA
tcatctcaggctcaggtgttttgagtttttttttttttttaaatgaggacatctgttagaccacttaggagttctagaacctttggaaaaccccctctcatcccgggagtttgtaagaat

SEQ ID NO: 1723 - DNA, 120 bp, synthetic construct
  source 1..120: mol_type = other DNA
tgtatatttttaactatttaagaaactggctaactcatcaacccttgacgtggtccgtcattttcatgttagccagtctaagaggtgtgcgtggcatcctgctgtggttttaactttcat

SEQ ID NO: 1724 - DNA, 120 bp, synthetic construct
  source 1..120: mol_type = other DNA
ggacactctactgtgatccgttgatctgtccttttgccagtcacacactgggattgttacagccctataatacggttaaaataagttagggtaatttagccaactttgttttgctatttc

SEQ ID NO: 1725 - DNA, 120 bp, synthetic construct
  source 1..120: mol_type = other DNA
atcattgttcaccgtcaagggtgatgttggctctgggtttccatagatgtctttaccaggttaaggaaacgtcccctctaatactatagctgagagcttttaatatgaatgggtgttaaa

SEQ ID NO: 1726 - DNA, 120 bp, synthetic construct
  source 1..120: mol_type = other DNA
tcaggtgattgataatagtggtattcaggtgattgcttcttgagtgggctttggtattttgtgtatttgaaagaatatgttcatttcatctgggtgttaattgtattggcataaagtttt

SEQ ID NO: 1727 - DNA, 120 bp, synthetic construct
  source 1..120: mol_type = other DNA
gaagcttcgttcttgggtgcattagcatttaggattgttatgtcctcttgagaagtcaacacatttgtcattatgaaactgcctctttatccctggccactttctttgctctgaaatctg

SEQ ID NO: 1728 - DNA, 120 bp, synthetic construct
  source 1..120: mol_type = other DNA
tctggcttaccgtttttattaatctgccttaacttctacttagtgcctataccacaaacaataagctgactccatttccatcttttataagttcagacccccacaaccttgggtggacta

SEQ ID NO: 1729 - DNA, 120 bp, synthetic construct
  source 1..120: mol_type = other DNA
tgaaaagtttcttaaggcggtttcataggtgcgtgtggggctgttggatacagtgacccacttcaaggtgacatcttcttcttgcatctcagatagcaccaggtttgtgtgtttatgcgt

SEQ ID NO: 1730 - DNA, 120 bp, synthetic construct
  source 1..120: mol_type = other DNA
tttgggcctcgagagggacggaccccagaactggaccccaatgtgcaggtctgggtgtggatgtatctgtatgtctttgcggagctcagatgagagatgctcagagttgtctgtagagaa

SEQ ID NO: 1731 - DNA, 120 bp, synthetic construct
  source 1..120: mol_type = other DNA
gctgagctcagtgggcttggtggggtcatagctgcctctccctctaaatagattaactaaaaagtattgttgactgactcatgcatttcttaggttttcttattttctaatttcttcttt

SEQ ID NO: 1732 - DNA, 120 bp, synthetic construct
  source 1..120: mol_type = other DNA
tctcctttgatggaggatctgtccagtttgttgctggttttaacaattaggttgtcttcttagaataatcatgtgagttgtaagagttgtgtctatgttctggatatgagtccttcacca

SEQ ID NO: 1733 - DNA, 120 bp, synthetic construct
  source 1..120: mol_type = other DNA
cttagtaataccgagttttctgatccacgaacacggtcttgctccccggtgtcttagatatttttcaacaccactcatcaggattgtgtaatttttagtggtgtgaaacttgctagattt

SEQ ID NO: 1734 - DNA, 120 bp, synthetic construct
  source 1..120: mol_type = other DNA
tgtcatgatgcgttttaaaacacctttttggatgtgactgacttcggttgtgtgtagaacttccacgcccacgctcacgagggcgtcacctgccatgtgttggctgttgtgtctggtttt

SEQ ID NO: 1735 - DNA, 120 bp, synthetic construct
  source 1..120: mol_type = other DNA
ctcaatcccttaaaacattcctgaaagggggggaaaacaactgtttaaattcaccgcctgttattaaaatctctagatttgcagaatcagagtgaggtactcagcagtcagaaaacagac

SEQ ID NO: 1736 - DNA, 120 bp, synthetic construct
  source 1..120: mol_type = other DNA
tttttgactgttcagagccctgagtgcctcccatatgcccacattttcctgcccctgggccttttcttctggtcatcggcctggagtgcctccactggcacattgagttctgccttcaga

SEQ ID NO: 1737 - DNA, 120 bp, synthetic construct
  source 1..120: mol_type = other DNA
aagtcaacagagtcaaatagcaaatataaggacagaaagagtcaaatcaaatgcctccaacttcacaccaaatgtaaatcgcctgaattcctctttgaaagacagagaaggccgtgccgt

SEQ ID NO: 1738 - DNA, 120 bp, synthetic construct
  source 1..120: mol_type = other DNA
ggactgtgctttaaaaccagcactatcacttcgaaccctagtaatggagttgttttgttcccttatgtctgcggaacacttacaaaaccaatcattcatgtggctacaaacaaatctaac

SEQ ID NO: 1739 - DNA, 120 bp, synthetic construct
  source 1..120: mol_type = other DNA
gctcagcaagaggggtcacttgagccttggcctgcagggaggttttgctcaaggagtgtcccttgagcaaaatattgcactttcgttgctctctgaaagcctaccaggcagtcttcccag

SEQ ID NO: 1740 - DNA, 120 bp, synthetic construct
  source 1..120: mol_type = other DNA
gtgtgtggcttccgctggtttcctgggtgtgtcttcctgcagggccaggacccccagagtgttccagtgacttcagagaggggcagccagaccaggaggagctccagaggtgccctgtgg

SEQ ID NO: 1741 - DNA, 120 bp, synthetic construct
  source 1..120: mol_type = other DNA
tgaagtttctcagcaggattttgggcacaaggtgggtagtgagctggtctcagcactgagcttgcaggtggagaaggcgggcccctgactttagggcgctctgggtgggatgaggacaga

SEQ ID NO: 1742 - DNA, 120 bp, synthetic construct
  source 1..120: mol_type = other DNA
cagagggccccactcaaggtcacgggctgcacgttccatggggcctggggaagcagccgagcagaaggatgcagcccgactaaggctgcctcagggtggcaccccagcggtgcccacact

SEQ ID NO: 1743 - DNA, 120 bp, synthetic construct
  source 1..120: mol_type = other DNA
gataatagaagagtaatatcagagacactaaagtcctcgcgataagggtctgcgaggcttcctttatgttttgcaaaaaaatctatatatttcatccagagagacaggatgtgagcgcag

SEQ ID NO: 1744 - DNA, 120 bp, synthetic construct
  source 1..120: mol_type = other DNA
tgccattttgcaattgacaaatggcttgtgcttagctatttcgttgaatgctgaactaacaatagtcagtgaagattaagaactaaaggctcaaggacagctacagatgaccacagctgg

SEQ ID NO: 1745 - DNA, 120 bp, synthetic construct
  source 1..120: mol_type = other DNA
gcgcccatcatctactttctacctctgtgaatctgatgactgtagcgacctcacgtgagtggaagcagatagtatttgtccttgtgtaactggatcatttcactgagagtaatgtcttca

SEQ ID NO: 1746 - DNA, 120 bp, synthetic construct
  source 1..120: mol_type = other DNA
agaaaagcatacagtcgaacgagtgggtccgatgtggagtgcagtggcatcagccaaggctccgaggcgtttcttcccacttcacatgtcttttctgttgtttctgcgaaggtgtctcag

SEQ ID NO: 1747 - DNA, 120 bp, synthetic construct
  source 1..120: mol_type = other DNA
cttgagcaaggtgggcaagggagaagtaccaaatgtgtgcaggttctggggaggagcttgaggcccctttagttcacctttggaacttaggaccaagtctgcaaatacagatgaacccag

SEQ ID NO: 1748 - DNA, 120 bp, synthetic construct
  source 1..120: mol_type = other DNA
gttacttatctatttcagggtataacataagacacacctatcatttcagacctgcctaggacatgcctggagaaggtatttaagtaattttaaaagtgcatcaaaacaaggtcaggcgcg

SEQ ID NO: 1749 - DNA, 120 bp, synthetic construct
  source 1..120: mol_type = other DNA
agtttctcagaagcaaagaccgacgagacagagctcctgctaccagagagccctaggccggctcattggaatagtcatttatttgttccttcattcgttcattcagcatgtccatgttga

SEQ ID NO: 1750 - DNA, 120 bp, synthetic construct
  source 1..120: mol_type = other DNA
gctgcactttaagtgtcacaatgggctgcacttcacatgaaagctgcattttggcaataagtccccaccaagcccactgagcctggccctgctgcatccacactatacagctgaggaaac

SEQ ID NO: 1751 - DNA, 120 bp, synthetic construct
  source 1..120: mol_type = other DNA
cagcacaggagcattggcagccctcagcagcctctgcactcagacgctgatcatggtgttgggggtagggggttggtccctcacagattcccatgagcctcacagcccagcatagcttca

SEQ ID NO: 1752 - DNA, 120 bp, synthetic construct
  source 1..120: mol_type = other DNA
gacatatacccagcctccccacccagagtggacgcctgggaggggcaggggcagggacacccatgccatcggccagccctaggcccggcgtgaacagctgagcccagcctggctccctca

SEQ ID NO: 1753 - DNA, 120 bp, synthetic construct
  source 1..120: mol_type = other DNA
acaggtccccacgctcagtgttgagtcctttggcatcaccatcttgaagttctgaatggtctcatccttgaacttgagatttgagagggaaatcggaggggtcactggagcgtgtgttgg

SEQ ID NO: 1754 - DNA, 120 bp, synthetic construct
  source 1..120: mol_type = other DNA
tttttagggggcaggcctagcttgccagtgtccctctgggagctggtggctgccttcaaatcctccagtgaaagtcggcgtttatatatgcatggagctcaagggctgcttctaggggga

SEQ ID NO: 1755 - DNA, 120 bp, synthetic construct
  source 1..120: mol_type = other DNA
agacactcagcagtggctcctgacgtaggccaagtcagcaggttttctggaagcttccaaagtgctgcaatgctcagggatggcaggggcatgctgacacagctcctgggttggggcagg

SEQ ID NO: 1756 - DNA, 120 bp, synthetic construct
  source 1..120: mol_type = other DNA
aggacacttgctgttggctttagggtccacccaggtgatccaggaggagctcatcttgattgaatcttcaaagagcctatttccaaatatcgcattctgtgggtccaggtgaatatgaat

SEQ ID NO: 1757 - DNA, 120 bp, synthetic construct
  source 1..120: mol_type = other DNA
acctaaatttagaattgaaagtaaagaagctggaaccccattcctacatttcagccgccttttgaagtcgagtctgactgcctgctgttcactctctcctcacctggagcctccagaaat

SEQ ID NO: 1758 - DNA, 120 bp, synthetic construct
  source 1..120: mol_type = other DNA
gtgaattggtgttcgtttatttactttctcctgctgaaaggaagcaggtttattttggggtgtgtgtctgcttttgcttttaccctgagagtttgccagcctgctggcttgttcccccac

SEQ ID NO: 1759 - DNA, 120 bp, synthetic construct
  source 1..120: mol_type = other DNA
cagctgtctgcctggccactttctaatggggagccctcagcacagtgactgcccagcctcagtttcctccttcgtagatgatcttgacctgagagtgccagctggggtgtgacacctctg

SEQ ID NO: 1760 - DNA, 120 bp, synthetic construct
  source 1..120: mol_type = other DNA
tgctcacctgaccccaactccactctgacttccaggccagccccactccattccaccttcatcatgcagtttctgtattagatttttaaataatcaaaatatggtattttcatttaaaaa

SEQ ID NO: 1761 - DNA, 120 bp, synthetic construct
  source 1..120: mol_type = other DNA
atgaataggaggttgctggatgaacaagtaggaatcagcatgttcatactgaaggggtgagtgtccccccaaaaaatctggattagacagactctggagccctcttgctccaggttgcag

SEQ ID NO: 1762 - DNA, 120 bp, synthetic construct
  source 1..120: mol_type = other DNA
gtgtgcacccacatacacagagccgggtggtccactgaaagggcctggcagtaaacagcttcctgtgcacattgtgtgtgtggcaggggcatgggggcatgtgtgtgtctcttaaggaca

SEQ ID NO: 1763 - DNA, 120 bp, synthetic construct
  source 1..120: mol_type = other DNA
gccttctattgtcccaccacacgtcctggacggatggctctcccaccaagaagaaggcttgagctgcatcttgtactctcagaaaagaggaaaataaaacatctggtgccctggagtggc

SEQ ID NO: 1764 - DNA, 120 bp, synthetic construct
  source 1..120: mol_type = other DNA
tatgggtatgtgtatatgtatcacatgggtgtgtatgtactgtatgtgtgcgtgcatactgtgtatacatattgtatgtgcatatgttgtatttagtatgtgtgctgtgttgtgtgcaca

SEQ ID NO: 1765 - DNA, 120 bp, synthetic construct
  source 1..120: mol_type = other DNA
tgtgtgtgttagtgtgcatatctattgtgtgtgtgtgtgcatcacacatgcacgtgcaccacgtgatctcctctgtagacacggagttccctagcttcagggtgggtcctttgcatccca

SEQ ID NO: 1766 - DNA, 120 bp, synthetic construct
  source 1..120: mol_type = other DNA
tggctctgtcactccaggctctccaggacccaccagagaatgggactgctctgttaacgtaagcaaggacttggcacaggagtcacttgagaattgcgtccctgtgggtctctcttgttg

SEQ ID NO: 1767 - DNA, 120 bp, synthetic construct
  source 1..120: mol_type = other DNA
gatagtgtcccctcctcccacccttcccttgtggtgctgccatggggtctctctgaaatgctggcttcagagctgcacccatgtgccatcagaggctcccccaactgcaaggtggtatag

SEQ ID NO: 1768 - DNA, 120 bp, synthetic construct
  source 1..120: mol_type = other DNA
caccatgcatttggcttggtacagcctgtgtcagggagtcagcatcgttcgggacactgggccatacacccgatgctaggttcctgccatcccaatgtcccccgacttgggggtatgtag

SEQ ID NO: 1769 - DNA, 120 bp, synthetic construct
  source 1..120: mol_type = other DNA
tccaggaaccgctaatctgttgtcttgttttttttaggtaaagaaaaaaaagttcaagctggacaaagacaatggggtgactcctggagagaagatgctcacagtcccccatatcacgtg

SEQ ID NO: 1770 - DNA, 120 bp, synthetic construct
  source 1..120: mol_type = other DNA
aacttctcttgcatgtgacttcagtgcccacttctggggactgtgatcccaaactgccaaattctctagcagctctcttaaaaccaaatgtgaaggattctggctttttctgtcctctga

SEQ ID NO: 1771 - DNA, 120 bp, synthetic construct
  source 1..120: mol_type = other DNA
ttaccctttggtcatttctgcatccatctctccctctcggacctcttcccagtgcctgggactaacccgaatgtctcagcttaccagcagttgtaaggatgctgtcacatcttatgcatg

SEQ ID NO: 1772 - DNA, 120 bp, synthetic construct
  source 1..120: mol_type = other DNA
gaatgttaatgaggggcaagtgcggagaaagtcaggcgccttttgtggaatgctcctccacggagaagatttctctttcctgctggagtttgttctttcctaacttgataagtcagccca

SEQ ID NO: 1773 - DNA, 120 bp, synthetic construct
  source 1..120: mol_type = other DNA
ctttgtctttcaccactgacccttcccaagctggtaccatgcctaacccatggtgggtacacgataaaaatgcagggctgtgccaccagggttttgtcttgacaaagggactggaggcag

SEQ ID NO: 1774 - DNA, 120 bp, synthetic construct
  source 1..120: mol_type = other DNA
tgcctcctgccgtttcctgggcctttgttgcccagtattttggttttgtcttttaaacaatcctctttttgttgatgctgcatacattgagatatttactcacagacttgcagttttctg

SEQ ID NO: 1775 - DNA, 120 bp, synthetic construct
  source 1..120: mol_type = other DNA
acatgcatattttgtaccctctatcctgtcatttcatcatctgcagttcttggagagtctaattctgttcactgtagttttttctgactcttgctcatgatggctcatttcattgtgggt

SEQ ID NO: 1776 - DNA, 120 bp, synthetic construct
  source 1..120: mol_type = other DNA
attattatattatataaaatgagggagatggatgataccaagtgttggtaaagatgtgtcggaggtggaactctcatatgctcccggtgagaatgcaaagtccaaagcgatgcaaccatt

SEQ ID NO: 1777 - DNA, 120 bp, synthetic construct
  source 1..120: mol_type = other DNA
ggtagtagtaggagggaaaaggacaaaagggcacaaaaaaacttttggggcagtggatatgttcattatcataatcatggcgatggtttcatcatgtgtcaaaagttaccaaattgcaca

SEQ ID NO: 1778 - DNA, 120 bp, synthetic construct
  source 1..120: mol_type = other DNA
ctctcatcactgatgcaggacatccctgatatctgatcctagaaataacagtacatctttcagaagagtatgaaatctgccatcatgtgggggcaaatacaatggtttacaaaacaaagt

SEQ ID NO: 1779 - DNA, 120 bp, synthetic construct
  source 1..120: mol_type = other DNA
cagtcttgtgtctctgtctgctgccaaattggcctcaggctctatcaataccagatctgaataggggctattctttcttttagtgtccttaatgttgtattactttccaatattcacact

SEQ ID NO: 1780 - DNA, 120 bp, synthetic construct
  source 1..120: mol_type = other DNA
taaagaccagggcttcaactgcaaaccttgtgggacacaattcagcccgtgacacaggaataggcttgttaatttcagtgatgtagccaggttgtttttctcgttttgtctgaccttgaa

SEQ ID NO: 1781 - DNA, 120 bp, synthetic construct
  source 1..120: mol_type = other DNA
ggaacatttctagtctctttctctgttatgacactgatattttttaaagatacagtcctgccacttcttgggggagtctgatgtttcctcaggttagatccacgttgtgtactctgtaag

SEQ ID NO: 1782 - DNA, 120 bp, synthetic construct
  source 1..120: mol_type = other DNA
attaaatcatagtgctgagtggagtttcacggtatggacatataccccagtttatttaaccattccctcatccaaggacatgtgggtcattcccagtttgggctattacaaatcagagta

SEQ ID NO: 1783 - DNA, 120 bp, synthetic construct
  source 1..120: mol_type = other DNA
gatgagattcaatgtttcctttttatggattacacttctgatgtcaggtctaagaagtctttggccctggaccccaaatatcttctgctatagcttttttctaacagccttgtggagata

SEQ ID NO: 1784 - DNA, 120 bp, synthetic construct
  source 1..120: mol_type = other DNA
tcagcctcccaagtaggtgggattacgggcacgcaccaccaagcccggctaatttttgtatttttagtagtgacggggtttcgccatgttagccaggctggtctcgaactcctgacctca

SEQ ID NO: 1785 - DNA, 120 bp, synthetic construct
  source 1..120: mol_type = other DNA
aagtgctgggattacaggtgtgagccacagcacctggccgataactatctttttgaagaactgaccaattatttccaaagtgggtgcctcattttacattctcaccaccagcatatgagc

SEQ ID NO: 1786 - DNA, 120 bp, synthetic construct
  source 1..120: mol_type = other DNA
cctttgcattttcatatgaagttgaacatcagcttattattctacaaagaaaccagctgagattctggtaaggattgtgttgagtttgtagatcagcacgattccgggagtgttgccatc

SEQ ID NO: 1787 - DNA, 120 bp, synthetic construct
  source 1..120: mol_type = other DNA
actggaccagcacaaatttatgtcatctccaaatagttctacttctttctttcagtctggattctttttcttcccaaattatcctggatggaacactcaataaatgttgaatagaagtgg

SEQ ID NO: 1788 - DNA, 120 bp, synthetic construct
  source 1..120: mol_type = other DNA
ccttgtaaaagagacctcagtgagctcctttttttcttccgtcatatgaggacacaagaagacaactgttcatgaaccagaaagcgagtcctctccagatgctgaatctgccagtgcctt

SEQ ID NO: 1789 - DNA, 120 bp, synthetic construct
  source 1..120: mol_type = other DNA
tttgctttaatttgtaaaactgtcattcatttctgattttagtaatttgagttttctctctccccctttgcctcatgcacttccctctctgtctttcctcctccccctctttcttcctcc

SEQ ID NO: 1790 - DNA, 120 bp, synthetic construct
  source 1..120: mol_type = other DNA
tcatgtgcacttgaaaatactgtatattcaatgttggttgttgggcgaagtgctctataattaccttttgagtctagttggtttatggtgttgctcatatcttctgtttccttattgatc

SEQ ID NO: 1791 - DNA, 120 bp, synthetic construct
  source 1..120: mol_type = other DNA
acaccagaacaggggagggtattaagcagagtgccacatagcctcacctcccaccatttcatccaagaatagtagttgggtaatagttcaataactcactctgaataattgatagaacaa

SEQ ID NO: 1792 - DNA, 120 bp, synthetic construct
  source 1..120: mol_type = other DNA
cttcctcctttactgccttctgcaggttgaatagatatgttctagagtaccattctaattcctttgttagtttatttcccccatttttaaagtgtaatctggaggttacaataagcagct

SEQ ID NO: 1793 - DNA, 120 bp, synthetic construct
  source 1..120: mol_type = other DNA
atatcgtagaaactctggattctagttcttctccctaaccagggatgatttctgttactcatttatttgtttgctcgcttgtgtatgccttctctgcatggattctgcagagtctgtgtt

SEQ ID NO: 1794 - DNA, 120 bp, synthetic construct
  source 1..120: mol_type = other DNA
acaaaaggagctactgagagaaatcttcctctcacccatatctcttccatcctaattccccctacccattataggtaaccagtttcagtgttttctagtttatagtttgtgtgtgtttgc

SEQ ID NO: 1795 - DNA, 120 bp, synthetic construct
  source 1..120: mol_type = other DNA
ctttttcaatatgattttagattgtttggggccctgggaaaattccatttacattttaaaatcagtttttacatttctgcaaataaaaaggcccttgggattttgataagggttgcattg

SEQ ID NO: 1796 - DNA, 120 bp, synthetic construct
  source 1..120: mol_type = other DNA
aattcaacagtgacgccatctgtgtagcattttcttcattggaaggtttttggttactgattcaaactttctacttgttatgggtctgctcataatttcaatttctgttttggtctgtat

SEQ ID NO: 1797 - DNA, 120 bp, synthetic construct
  source 1..120: mol_type = other DNA
tctggttacgtaaggtataatattaggttatggatccttcttctttttcagtgtgggcattcacagctataatttttcctctgagcacttctttcactacatcccataagtctgagtatg

SEQ ID NO: 1798 - DNA, 120 bp, synthetic construct
  source 1..120: mol_type = other DNA
cgattagtgatgttaaatgtcttttcatatatgtgtttgccatttttataacttctttgcaaaaatgtctactcagttccactgcccattttttaattgggttatctattttcttgttat

SEQ ID NO: 1799 - DNA, 120 bp, synthetic construct
  source 1..120: mol_type = other DNA
caggaccatactgtttgatcaatagttttgtaaaataaaccagaaagtatgaagtctccctttgtttttcagaacagaattttcagaatttcgttggctacttaaggttcttgctattcc

SEQ ID NO: 1800 - DNA, 120 bp, synthetic construct
  source 1..120: mol_type = other DNA
tggttttcatctttcagtctgttagtatcacattgattgctacatgtatattaaataagatttgcatgccagaaattaattccacatagacatgatatataatctttttgatgtattgtt

SEQ ID NO: 1801 - DNA, 120 bp, synthetic construct
  source 1..120: mol_type = other DNA
tagcacagtggctgaactaatttgtattcctgccaacagtgtataagcgttcccttttctctgcagccttcccagcaacttttatttttttgactttttaataattgccattctgactgg

SEQ ID NO: 1802 - DNA, 120 bp, synthetic construct
  source 1..120: mol_type = other DNA
gatatttttaagtttctgttttcatttcttctttgactctacccattactgaaagtacgttattgaagtccctaagtattattgtagaactgtctttctcactccaattctgtcagtata

SEQ ID NO: 1803 - DNA, 120 bp, synthetic construct
  source 1..120: mol_type = other DNA
cttttgccttacattttttaaatacaacatttcctcccttactgcctttttttgtgtttgatgattttctgatagtgtaccattatgattctctattcgattgtctgtatgtgtgtatgt

SEQ ID NO: 1804 - DNA, 120 bp, synthetic construct
  source 1..120: mol_type = other DNA
acctcctttgagtaaataccaaggatgtgattgctgaactgcatggtaagaatatgtttaattttataagaaaccactgatttcgatatactctggattcttcgggggatatgtatacac

SEQ ID NO: 1805 - DNA, 120 bp, synthetic construct
  source 1..120: mol_type = other DNA
tccatggacatttgggttgcattgatgttttaactgttgtaaataatgccactacaatcgtgggtatacaaatatatctttgagactgcttttaatccttctgggtgtatacacagaggt

SEQ ID NO: 1806 - DNA, 120 bp, synthetic construct
  source 1..120: mol_type = other DNA
gctgtgtttatttttttaatagtagtcatctgagtgtatgtaaggttgtggttttgacttgtatttcctaatgactagagatgttaaacaacttttcacgtactattatccatttgtata

SEQ ID NO: 1807 - DNA, 120 bp, synthetic construct
  source 1..120: mol_type = other DNA
acatcattaggatttttattgggattaccttggatttgtagattgttttgtgtggtactgacaccttaacaatattggccttccaatccatgaacataggaggtgttttccctttatgtc

SEQ ID NO: 1808 - DNA, 120 bp, synthetic construct
  source 1..120: mol_type = other DNA
cctttctttttgagacagggtctccatctgtcatccaggcaggagtacagtggcacaatcacagttcactgtagcctcaacctcatgggctcaagtgatcctcctgcctcagcctcctga

SEQ ID NO: 1809 - DNA, 120 bp, synthetic construct
  source 1..120: mol_type = other DNA
tctgttccattggtttatttctataccagtaccataactttgaaatataattcaaaataagcatgtgtaatatctttcactttgttcttattgctcaagtatgctttagatctttaaggt

SEQ ID NO: 1810 - DNA, 120 bp, synthetic construct
  source 1..120: mol_type = other DNA
ctggcaccatttgttgaaaagagaatccatttgccattgaatggacatggcatgcttgtcagaaatcatgcgttcatatatgaaaggatttatttgggagctctctattctttttgatgc

SEQ ID NO: 1811 - DNA, 120 bp, synthetic construct
  source 1..120: mol_type = other DNA
tttaagcctgaataactccctctggcatatcttgtaaggcaagagtagttgctgataaactccttcaacttttgtttacctgaggaagtcttgtatctgtttcatatctgaaggacagct

SEQ ID NO: 1812 - DNA, 120 bp, synthetic construct
  source 1..120: mol_type = other DNA
cagcagtggcaaacattacaaaggtccttggtggccaaggctgagtgtcctgatgctgtcgtgtaaatagagttgtgttaataatatccctttcagattgtttgtgattaatgtatagaa

SEQ ID NO: 1813 - DNA, 120 bp, synthetic construct
  source 1..120: mol_type = other DNA
cctttgagtcaatacccggtagtggattgtcaaactgtatgatagtctacttttagtttttttgacaaaacaccacagtattttccataatgactcactaatttatagtcccacaaatag

SEQ ID NO: 1814 - DNA, 120 bp, synthetic construct
  source 1..120: mol_type = other DNA
tggtctatatgtctgttttatgcccattgcatgctaatttggttaccattgttttgtatacaagggggattgcttccgagaccccctgtatataccaaaagccatgtatattcaagtccc

SEQ ID NO: 1815 - DNA, 120 bp, synthetic construct
  source 1..120: mol_type = other DNA
ggaatcaccacactgtcttctacaatggttgaactagtttacagtcccaccaacagtgtaaaagcgttcctatttctccacatcttctccagcacctgttgtttcctgaatttttaatga

SEQ ID NO: 1816 - DNA, 120 bp, synthetic construct
  source 1..120: mol_type = other DNA
ggatggcattgaatttataaattaccttgggcagtatggccattttcatgatactgattctccctatccatgagcatggaatgttcttccatttgtttgtatcctcttttattttgttca

SEQ ID NO: 1817 - DNA, 120 bp, synthetic construct
  source 1..120: mol_type = other DNA
gaatagtttcagaaggcatagtaccagctcctccttgtacctctggtagaattcggctgtgaatccgtctggtcctggactttttttggttggtagactattaattattgcctaaatttc

SEQ ID NO: 1818 - DNA, 120 bp, synthetic construct
  source 1..120: mol_type = other DNA
ttgttaacttccggtcttgttgatttgtctaatgttaacagtggggtgttaaagtctcccattattattgtgtgggagtctgtctctttgtagatctctaaggacttgctttatgaatct

SEQ ID NO: 1819 - DNA, 120 bp, synthetic construct
  source 1..120: mol_type = other DNA
gggaagttctcctggataatatcctgccttgctaggttggggaagttctcctggataatatcctgaagagtgttttccaacttggttccattctccctgtcattttcatgtacaccagtc

SEQ ID NO: 1820 - DNA, 120 bp, synthetic construct
  source 1..120: mol_type = other DNA
aaagctgtgagacagggacatttaagtctgcagaggtttctgctgccttttgttcggctatgctctgtccccagaggtggagtctacagaggcaggcaggcctccttgagctgtggtgga

SEQ ID NO: 1821 - DNA, 120 bp, synthetic construct
  source 1..120: mol_type = other DNA
tgttaaatatagtcaaccaactcttatcaaacattataaattatttattctaactagctgtgtatttttacccactaaccaacctctcttcaccctccagacatacctttcacagccttt

SEQ ID NO: 1822 - DNA, 120 bp, synthetic construct
  source 1..120: mol_type = other DNA
tccccaatgtctccttcattaatagtgatgttatagtttcatgcctcatgtttaagtctttaacccatcttgagttgattttagtatagcaagagatagaaacggtttcatttttcacat

SEQ ID NO: 1823 - DNA, 120 bp, synthetic construct
  source 1..120: mol_type = other DNA
tcagctggttctttattggtatatagaaataagcctgatttttaaatcctgtaactgtaatcaatttattgatcagactgaagagttttgatttttgtatttcatggtatgagttgtaat

SEQ ID NO: 1824 - DNA, 120 bp, synthetic construct
  source 1..120: mol_type = other DNA
ctgaaaaatctgttagtctgcaggttgttcccttgtaagtgtctacaacctcttttatcgctggttttatgattctctctttgtcttgggatgggcaatttgctataatgtgctgtggaa

SEQ ID NO: 1825 - DNA, 120 bp, synthetic construct
  source 1..120: mol_type = other DNA
ttctgggtgcctgcagtagtgtgatctccatggaatttttttcagctgtaaacagcaccagtagtgtctgggagttcctctgtagtttaggatgcagttgttggtggaggctgtggtaaa

SEQ ID NO: 1826 - DNA, 120 bp, synthetic construct
  source 1..120: mol_type = other DNA
acttacctttctgcacatcgaggagtctcttcatgatcccagccagtcccatagaagcagactgcctgactcccctcttatcccttgcattgggtttttcttattacttctcagttgaat

SEQ ID NO: 1827 - DNA, 120 bp, synthetic construct
  source 1..120: mol_type = other DNA
tgcccaggacagtctcaaactcctgggctcaagcaatccacccgcctcatcctttcaaagtgctgaaattacaagcatgagccatcatgtccacacctactaatttttgtttgttgattt

SEQ ID NO: 1828 - DNA, 120 bp, synthetic construct
  source 1..120: mol_type = other DNA
ttgggaggttatatatgtccaggaatttatctctttcctctaggttttctaattgttgacatatagttgttcataatggtctctaataatcttttgtatttctgtggtgtccattgtaag

SEQ ID NO: 1829 - DNA, 120 bp, synthetic construct
  source 1..120: mol_type = other DNA
ggtatatcctggagaatgtgctgtgtgctaacgaagcagcagttcaaatctaatatttccttgttgatatttttccatccaaatgaattgtccaatgctgagtatgaaatgttgccatcc

SEQ ID NO: 1830 - DNA, 120 bp, synthetic construct
  source 1..120: mol_type = other DNA
gacagtttgatgaaaatgtgcctcagagaggcccttttagggttgaatctatttagggatttgtgagcttcctttatctgttagtctctttctctcccaaactttggcagttttcaggta

SEQ ID NO: 1831 - DNA, 120 bp, synthetic construct
  source 1..120: mol_type = other DNA
gaatttggctcactttgctacccacaggcaatttgaaggtattctttctcctaatactgctaacagcatgggtcatgtggttttatttgcacttactgattttatgcttttaggggagga

SEQ ID NO: 1832 - DNA, 120 bp, synthetic construct
  source 1..120: mol_type = other DNA
catttcctaagtaagcatcatcctcatttctatacgttttctctgattactggaaattcctcaagtgttgaccattttgattcctgggccccttaagagtccattagcattggaatggag

SEQ ID NO: 1833 - DNA, 120 bp, synthetic construct
  source 1..120: mol_type = other DNA
ttccggaagtcatctttgactgtgtcacatcactgtcatgcttgaggcaaatctattctgcacacctttgatccaatgtgagatccaacatgttccataatttgcatcaaacatcctcat

SEQ ID NO: 1834 - DNA, 120 bp, synthetic construct
  source 1..120: mol_type = other DNA
gtcatgcacattcctgaagactctcttggtaacaaatgatggaaccccaactcaaacaagcttaagcacaaaagggacattttttggctcacacagctggacccagctgtttcagacaca

SEQ ID NO: 1835 - DNA, 120 bp, synthetic construct
  source 1..120: mol_type = other DNA
ctaggataagatgtgcaaggtcgtgggccagagagcaaggcacagatacaggagacttccacaaattattgtttcttgacttggaaaagtatcatgcaaaatagaaaacacagacacaat

SEQ ID NO: 1836 - DNA, 120 bp, synthetic construct
  source 1..120: mol_type = other DNA
aacacacaagccagcagacaataacctctcctcttgaattggaaaaacaaatctgtggaggccttctctgccccttgttataggggccccatatgccgttcccaggattaaaccaaaaag

SEQ ID NO: 1837 - DNA, 120 bp, synthetic construct
  source 1..120: mol_type = other DNA
ccctgattgctagtcaggcgcaacacctttccacatgctcatcagccttttggattcctcttttgtgatgtgctactttgtctattgcccattttctattaagtcatttatatttttcct

SEQ ID NO: 1838 - DNA, 120 bp, synthetic construct
  source 1..120: mol_type = other DNA
atctaggatcgatcattacatttattgtcatctctgatcggtgacgggcttctcagtcttgttcttcattaacttgacacttttgaagaataccagtcaggtgtcattgtccctcagttt

SEQ ID NO: 1839 - DNA, 120 bp, synthetic construct
  source 1..120: mol_type = other DNA
ctatgtgaagcaaatttacctactagattagagtgtttaggacagacttttgctttaaccatagagtgtccagtcaaaacagtgtttttgaaagcaacatatgccagctcctcctcctcc

SEQ ID NO: 1840 - DNA, 120 bp, synthetic construct
  source 1..120: mol_type = other DNA
gccattttgcattcccaccagtaacatatgagagttctacatgttccacatcctcaagagtggttggtattgtcaggttttgaattttttttttaatttatggaatttcattgtgattct

SEQ ID NO: 1841 - DNA, 120 bp, synthetic construct
  source 1..120: mol_type = other DNA
agctgggggagcctgaattgctacaacttcttgggaaagcaatctagcaacatttattaaaattactaaggacacaccctctcaccctgctccagtatgtcagcttttaagaataaagat

SEQ ID NO: 1842 - DNA, 120 bp, synthetic construct
  source 1..120: mol_type = other DNA
tactctgtcaatgtatgagtgtgacaatgtatggtggtgggagctgttgtcccttaccaggcctgtgcctgtcacctctgttttattcttgacccaagtgtcagttgtgaacatgggaag

SEQ ID NO: 1843 - DNA, 120 bp, synthetic construct
  source 1..120: mol_type = other DNA
gattccccttgataaatgtctttgtgtcaagatctgtgagtgacactcgcggcccttctgagggtcacttgtggaaactctccttctctctaccaacatttttctaaagggtgttttgtt

SEQ ID NO: 1844 - DNA, 120 bp, synthetic construct
  source 1..120: mol_type = other DNA
gcaccagaaggcagaatgatggcttacactgtggccaaggcctgtaccaagtcctggatatgatggacctccaaagtgatcagtgttagtttagtggctcatgttgtgtgcaatacaggt

SEQ ID NO: 1845 - DNA, 120 bp, synthetic construct
  source 1..120: mol_type = other DNA
ggggcagagtgggtgggaggcagttaccaaaaaacatttccatttttcttcagcattctactgatgttaaatgtattaccatgctgggccagttccagaattcaaattaaaaacataaat

SEQ ID NO: 1846 - DNA, 120 bp, synthetic construct
  source 1..120: mol_type = other DNA
tccattcatctttccaacgtctgctcagtaaaccccccaggacacacttaggctgtacggctgtgtcctcctttggctctcaaagccctcagtaccagttccctaagcctttcgaatggt

SEQ ID NO: 1847 - DNA, 120 bp, synthetic construct
  source 1..120: mol_type = other DNA
atatttctctccctgtaaactttggtgggaaaggacagaaaggacattctgggaaccagtgtccagaaggatgagtgaggggcttgtcaagaacagatgagaccattttgtctttctaga

SEQ ID NO: 1848 - DNA, 120 bp, synthetic construct
  source 1..120: mol_type = other DNA
attaaccacaggcctaactgctagcagcaaggaccagctttgcccacatttgaactttatgcggtgggaatgatgcaactcatacacctttgtgtccaatgtccctcactcaatttgatg

SEQ ID NO: 1849 - DNA, 120 bp, synthetic construct
  source 1..120: mol_type = other DNA
ggcattttccgtcgtttccttttcagccatgatggtgaatgtctagcagcatcaaatggtgattttaatttgcagtaacctgttgactaatgaagttgagtccctttccatgttatcatt

SEQ ID NO: 1850 - DNA, 120 bp, synthetic construct
  source 1..120: mol_type = other DNA
atggcatcatgtgtcccttgtttatttaggttgactttcatatcttttaccttgccctgtagttttcagtgtggtggtcatgaacagcttgtcagattcattccttgtcagctaatggtt

SEQ ID NO: 1851 - DNA, 120 bp, synthetic construct
  source 1..120: mol_type = other DNA
ttcagactcagtggctttcagatggttagtataggctgaaattccaagagcattaaccagacacctactatgtgtatttcttgtgttggggttaggagatactgctgttggctgagacac

SEQ ID NO: 1852 - DNA, 120 bp, synthetic construct
  source 1..120: mol_type = other DNA
agggccaattcaagggatttttcaaaggttaattttgactctgcctgacttatctcctaagtctttggcactgagcatttatacaagatcagactgcactgcaccctaagtataaacctt

SEQ ID NO: 1853 - DNA, 120 bp, synthetic construct
  source 1..120: mol_type = other DNA
cttatcaaaccacatggcctgaattttgattgggaaagcatccctgtaggtgtcaggtgatggaaggactctgggtaaatggaagcactgagaccagatatgataggaccttgcccagtg

SEQ ID NO: 1854 - DNA, 120 bp, synthetic construct
  source 1..120: mol_type = other DNA
tattacttgggctaaagagaagctaaacgtgaccagcctacccaccttgctactgctgatgaccaccctgactcatgtcccttgtctgcataggtgttttcctataaatgtttaattcct

SEQ ID NO: 1855 - DNA, 120 bp, synthetic construct
  source 1..120: mol_type = other DNA
ctttttgcaaaataatttgaaaagtttgttgaaccttaaacctttcctgatgactccttccttctgaacttaactcgttaaagttgctccaatcccagcccagtgccagaccagcttcct

SEQ ID NO: 1856 - DNA, 120 bp, synthetic construct
  source 1..120: mol_type = other DNA
ttcaagggttgtgctacaaaaatcatacaacagtctttacacacatggtaaaaccaattcagagtacaaaaggggtgaaaaataacactctccccacccaaccctaattcccaagtttcc

SEQ ID NO: 1857 - DNA, 120 bp, synthetic construct
  source 1..120: mol_type = other DNA
ttcatttcttagtaagtgttcagccccagtgtgcaccacttaaaaggaagacactggtatgttctggagatggatctgtattaagacatctagcaaatctccttttcattaacagctgca

SEQ ID NO: 1858 - DNA, 120 bp, synthetic construct
  source 1..120: mol_type = other DNA
ctttaagagatcctccctttccccccatttccagcaggattaaaatgttcatttatgttgtgatagatactgccaaataagggctgtaccatttacatcactttgactgcacaaatgcac

SEQ ID NO: 1859 - DNA, 120 bp, synthetic construct
  source 1..120: mol_type = other DNA
gccaataatgggaagctcattttcacaaatgcagtcaaccaggggaattcatggcatggcctaagatctaaacactcttaagatttaaacacaggattagctcttgagttagacaggaag

SEQ ID NO: 1860 - DNA, 120 bp, synthetic construct
  source 1..120: mol_type = other DNA
aagattatttaggatgcataggatcccagattagattttttttaaatcagccgttctctgtattcttgtccagatgctgtggacagtgatgatgggaaaatagtccctgctgcacactag

SEQ ID NO: 1861 - DNA, 120 bp, synthetic construct
  source 1..120: mol_type = other DNA
cccccaattccctcccaccctaccctgtccttagcccctgacaactactaacctattcttcatttctttatcattccaagaaaattatataaatggaaccacatagcaaatcaccttttt

SEQ ID NO: 1862 - DNA, 120 bp, synthetic construct
  source 1..120: mol_type = other DNA
ctaccatctaggtggggagaaaacacaccggccataatgaacacacgtttaggctgaagaataatcttcaaatgatactactacttacacttcctgtttgccaggcaaatatagacatca

SEQ ID NO: 1863 - DNA, 120 bp, synthetic construct
  source 1..120: mol_type = other DNA
ttcttaatgtgtaactgtgtgtttatttgtggtaaagggtttactggctggctccttctatcacattcaaggagcatgagggtataggctggctgtttctattcagtgttttatcttcag

SEQ ID NO: 1864 - DNA, 120 bp, synthetic construct
  source 1..120: mol_type = other DNA
tgttaaagcatagagcttagttcagagtaaacatttctaaaaaagaggtagaagcccctacctactgactggcatcacaaacactgccctgaaatgccaactcatttcaaatactgctct

SEQ ID NO: 1865 - DNA, 120 bp, synthetic construct
  source 1..120: mol_type = other DNA
gttcttttggcaaaaagactatgctccagaactttctggctgagttctccttctattcctcctattccactgttaggtgttggaaaagcaatatatttgatgctttctccatgtcccata

SEQ ID NO: 1866 - DNA, 120 bp, synthetic construct
  source 1..120: mol_type = other DNA
gatgtgtttccatgggtctccttcacatagaattgtcacctgaacgagaagcccttatccagaagcccagtgcaactcccatctcacaggccaccagcaagttgctcacatccagacagg

SEQ ID NO: 1867 - DNA, 120 bp, synthetic construct
  source 1..120: mol_type = other DNA
agtatgctcacttgggcttatcagcagagccagggtaccccaacccctgactaggatattgtggatacctatgcccagagcccctccactgccaagtttccacaattgttttgaaataat

SEQ ID NO: 1868 - DNA, 120 bp, synthetic construct
  source 1..120: mol_type = other DNA
taaaaattgggacctgtccttgccagccaggtctcagggagctcagggttcagtgttggaatgggtctgggcccagatttcaagccagtaaccagcaaatcatggggagactgagaagag

SEQ ID NO: 1869 - DNA, 120 bp, synthetic construct
  source 1..120: mol_type = other DNA
actctggaaaatctaagcacgtcacacacacagcttccatgggggtcttcctctcgtgtctggggaacttccccgtagaggtttcaataactgccatcctttgctgatcctctgtgtagg

SEQ ID NO: 1870 - DNA, 120 bp, synthetic construct
  source 1..120: mol_type = other DNA
agcttgcacaggaagaacagaatgaatgatgtggaaatctgttagcagtggtgtcttctagattctcaaggatccgggtattttaggaacaaaacaagccagcaggtgcagaggtcacaa

SEQ ID NO: 1871 - DNA, 120 bp, synthetic construct
  source 1..120: mol_type = other DNA
cacacatatgtgcatgttcatatatgtgtcagaatgcgtatttgtcagtgtatgtgtgtcagtgcacataggtataggggctgtctctcagaattcctgagggctttccatttgatccca

SEQ ID NO: 1872 - DNA, 120 bp, synthetic construct
  source 1..120: mol_type = other DNA
tctgatgttgacagcctctttgttttttcatctcagcctattcaaggccatttttcagcttgcttggctttgcattaaagttggggggatttctctatcctgaggttatgaaatacctca

SEQ ID NO: 1873 - DNA, 120 bp, synthetic construct
  source 1..120: mol_type = other DNA
attccaatcaattatctactcagtggacagacatcctttcaaagtttagagacctgtgggtcttgcttaatcctgcagctgcctttctggtagttcagatgcttggcttctttccatccc

SEQ ID NO: 1874 - DNA, 120 bp, synthetic construct
  source 1..120: mol_type = other DNA
cttttcggaggagcagggattcttccataaatgaggccacatttaaattgcaaacaagagcttcgcccagccgtaggaaaggctctgggagaaaggcttttagttccgcagacagagcag

SEQ ID NO: 1875 - DNA, 120 bp, synthetic construct
  source 1..120: mol_type = other DNA
atttttggctatcatgactatgggagaattactaatatcaactaggtagagaccaggcagggtgctaaacatcttacaatataaatgacagcccctcacaacaaagatacatcctgtccc

SEQ ID NO: 1876 - DNA, 120 bp, synthetic construct
  source 1..120: mol_type = other DNA
cttgggcaaattttcatctgtttgttaaccctcctgcaaactggcaatcttcctacctttttcttaatgatttgtggtgctttctggtatattttagctgttgttccctcctcagcttta

SEQ ID NO: 1877 - DNA, 120 bp, synthetic construct
  source 1..120: mol_type = other DNA
ccaactggaagtttgagtggagtcctgttgaacttaacagatttggaaaatcctgacgtcattctaatgccaagttgccctgttcaagaaaataaaatgtctctgcatatggaaagatct

SEQ ID NO: 1878 - DNA, 120 bp, synthetic construct
  source 1..120: mol_type = other DNA
tggcttgctaagtggtgtactccactaccccaaaatcacacataggcgttaaactttatcacatcatttttttctgcctctattgagggaaccatatggtttttctcctgtagcctctta

SEQ ID NO: 1879 - DNA, 120 bp, synthetic construct
  source 1..120: mol_type = other DNA
ctattctacctggatgaattattctctttcataaccagaacagtgctgtgggaaggcactcttactctcaattttatataaaaggctatttgacctgctcagggaccacagtggggtact

SEQ ID NO: 1880 - DNA, 120 bp, synthetic construct
  source 1..120: mol_type = other DNA
agagaaccgcgccgaagaacccccggggacaaccgcgccgaagaacccccggggagaaccgcgccgaaaagccccgggtgccccgaggagaacggcgccgaggagtccccggggagaact

SEQ ID NO: 1881 - DNA, 120 bp, synthetic construct
  source 1..120: mol_type = other DNA
ctagaagttcacaccctgaggcttccctggcaaggctgggggccgtttggcccttccatgtggactgcaaaaacagtgttggaatgcaggactctgggtatgttctcgaaagttgttaca

SEQ ID NO: 1882 - DNA, 120 bp, synthetic construct
  source 1..120: mol_type = other DNA
taatgtcactgtcttgaaattcttgatagttactatctttgaacttgtgttttagaagtgaagtctgaggggaaaatggagcttggaacttcagctcccaagtggctttcccaccttcct

SEQ ID NO: 1883 - DNA, 120 bp, synthetic construct
  source 1..120: mol_type = other DNA
gagcttatttggtcttacacttaacaaaactgtgggttctaattgtgggcctggatggggacatatcttacaagtagttgattcatttatatagattttcatgttctgggcttgcctcca

SEQ ID NO: 1884 - DNA, 120 bp, synthetic construct
  source 1..120: mol_type = other DNA
tgaagagaattaggctcaaaacgtccactcggcttttctcttgattccaaggtatttagagtgggggtgggggattaggggaggaagttgctgagctaattcttttgcatttgccagcac

SEQ ID NO: 1885 - DNA, 120 bp, synthetic construct
  source 1..120: mol_type = other DNA
acctgcattccactggggcttcccttccaacttgatggtttcaggtacatgggcctgttgtcaactctgttcccactgagcccatgagacggctattcctttgagacatgtttacttgac

SEQ ID NO: 1886 - DNA, 120 bp, synthetic construct
  source 1..120: mol_type = other DNA
ggaagttgtttctgattatctcttgagtcctgggagaggtgttaacaaaaagccccatccctgtcgctctggtggttatagtttgttttacgcattaaaaggccctggatcggtatttgt

SEQ ID NO: 1887 - DNA, 120 bp, synthetic construct
  source 1..120: mol_type = other DNA
gtggagagggtgcgtgatgggtgggagaaactgacagttggaatgtgatttaggaaatgtaacgggtgaccttttctccccaagagaacaccaaatccatttccttgggacatggataag

SEQ ID NO: 1888 - DNA, 120 bp, synthetic construct
  source 1..120: mol_type = other DNA
ctttgtttatctcccaattagtcctgtagcacttagtatgtcaggcatggttctgagggcttcatccacactaccacccactgtagagatgggaaaactgaggcatagcaaggtcaaggg

SEQ ID NO: 1889 - DNA, 120 bp, synthetic construct
  source 1..120: mol_type = other DNA
ctttctctgcttggagtgcaatctttttttggaagccctgctggaaaatctgaatcttgtgagccatcagctgtttataatcagagaagcatatgtttaaaagagctgaggggccttata

SEQ ID NO: 1890 - DNA, 120 bp, synthetic construct
  source 1..120: mol_type = other DNA
agttccagaacattttcagtgcccctaaaagcaaccctgcattctttagccgtcactccccacttcccttctctcattccccagccccagtcagccacggctctgctttctatctccacg

SEQ ID NO: 1891 - DNA, 120 bp, synthetic construct
  source 1..120: mol_type = other DNA
aagaattttatagttttggctcttacacttaggtctttcatccgctttcagttagtttaacatatggtgtgaggtaggggtctaactttattctttgtcatgtggatagacagttatccc

SEQ ID NO: 1892 - DNA, 120 bp, synthetic construct
  source 1..120: mol_type = other DNA
gagctatttcccagtcagacctcacaatcggtaaactgtgcttaaactaagtgaggtatcttaaggctttaccaccagggaaatagaactttggcagcttacaaaggagttttatttttc

SEQ ID NO: 1893 - DNA, 120 bp, synthetic construct
  source 1..120: mol_type = other DNA
aaatgttagacactcttctctcttaggtggtttgaggagacttaggggcttccatattccccttggaacatgaagaaggggctggctaaggcccccatccctgctcaggcctacaggaga

SEQ ID NO: 1894 - DNA, 120 bp, synthetic construct
  source 1..120: mol_type = other DNA
attattccagctatattacgttgggaagagctacagaaatggtttcttctcccccagattccagaacaagtcacagccattgtagattttgattaatcgccatccccattatttcttcac

SEQ ID NO: 1895 - DNA, 120 bp, synthetic construct
  source 1..120: mol_type = other DNA
gtaggggtaggagagcatcttgagggtggctgcagcatcgtcgtcatctttccaatggtggcatcccttccccaagcaagggaatgatgcagacagaggtgcctttcagaaagaatggag

SEQ ID NO: 1896 - DNA, 120 bp, synthetic construct
  source 1..120: mol_type = other DNA
cctgctggggtcccctgggacccatccttccaagcccctgccagccttggaacctgtgactccccaggtggtcaaacacagaaggacctcttgggggaaggggaaccagcaaagggggta

SEQ ID NO: 1897 - DNA, 120 bp, synthetic construct
  source 1..120: mol_type = other DNA
ttaggacacgcagcttcagttctgcagggcctggtggaattccattccctgcctcccagaaatcttatcttgagggccgctcagctacagtaggccccaagccccagagactccagattc

SEQ ID NO: 1898 - DNA, 120 bp, synthetic construct
  source 1..120: mol_type = other DNA
aggaacgttcctgtcccaatcctcccatccccatattcaggaaagttccccaggcccgtatgaactggcttcttaattttgttttaaacacaagctttcagaagagcagaaacggaaaga

SEQ ID NO: 1899 - DNA, 120 bp, synthetic construct
  source 1..120: mol_type = other DNA
atcccgggtcattactgggcctgtaagggccttcatgtctgcaccctccctgccatgcaccttaaggtcaggaagtccattcaaatgcagattcctgggctattccaagagttactgaat

SEQ ID NO: 1900 - DNA, 120 bp, synthetic construct
  source 1..120: mol_type = other DNA
aaaaaaaaccattatcaccccctgcacacaaatcccagagttcagagaacacagatcaaaataagaagtcagagaatcctctccagctgaaaaccctcatttgttatcacccaaatgctg

SEQ ID NO: 1901 - DNA, 120 bp, synthetic construct
  source 1..120: mol_type = other DNA
acctaggagtccatgctacctgtggggttcatagtgtgtccctctcagccaatgggaagtcgtgcccttggatcatttggggcaaatggtcctcgttttcttcattatatggtgttgagt

SEQ ID NO: 1902 - DNA, 120 bp, synthetic construct
  source 1..120: mol_type = other DNA
atcagcaaattgctgtctccagctcgcaagaggggcaggtccagggatgtgtttcacccccaaggtgtgagtggaatcagcaaattgtatcaagaaatatttctagggatttacattccg

SEQ ID NO: 1903 - DNA, 120 bp, synthetic construct
  source 1..120: mol_type = other DNA
accgagagtgcttcccttctcacgtggttgggagtcatgacctgtttagtaaataggctatggcagcctcttggaacttagtgaggtggctaagctgcccctagatagctgtgccctgtg

SEQ ID NO: 1904 - DNA, 120 bp, synthetic construct
  source 1..120: mol_type = other DNA
ggtgtccccatctgtaaagtgggatgtgacaatacccttcttgctgaatgggcagggagagaggagctgttaggtgagaccaggtggtacttggcagctgtggcacgtggaagccctaca

SEQ ID NO: 1905 - DNA, 120 bp, synthetic construct
  source 1..120: mol_type = other DNA
gaagcttctggccatcgtatggagctggaacaaggcactggaaggtaccaggcctcagcgttctcaactgtgaaatgggaacacggtggtctctgtcacagggtagagatgactgatcca

SEQ ID NO: 1906 - DNA, 120 bp, synthetic construct
  source 1..120: mol_type = other DNA
ccagaaatgttcccagcttttttgagttcgtgagtggctggtggatacttagtggtttggctttcgggttcctgccttccaaaacaggagaggcaacttggcctgctttttcctcagaag

SEQ ID NO: 1907 - DNA, 120 bp, synthetic construct
  source 1..120: mol_type = other DNA
agagaaaaaggggatgacccattcctagcagggaggaatagtagtttatattttcccccaaaattttatttttctgcattggcctgaataggagctgactttaatacgggggaaatagtg

SEQ ID NO: 1908 - DNA, 120 bp, synthetic construct
  source 1..120: mol_type = other DNA
aggaacatggggtagtgtccctgggggaaatcctaccccagactcgaggaataaagaggaggaggaggttgcctgagcttaacagaatgatggctgtctgacatgaggctcacaactggc

SEQ ID NO: 1909 - DNA, 120 bp, synthetic construct
  source 1..120: mol_type = other DNA
acttaatctattattacacagaaacttctgtgcagtcaggggtttgaagtccccagaagtgtttgcctgatttggggcagatagcggggtgattaatgctcgtgataaggtgttgattgg

SEQ ID NO: 1910 - DNA, 120 bp, synthetic construct
  source 1..120: mol_type = other DNA
cacacctatacaatgggggtaataaagtccccacattgtagcactgccaggtggattaaatgaaagaagatagtgaagtccttaaagtgagatgtgttggcatttactccacaaatactg

SEQ ID NO: 1911 - DNA, 120 bp, synthetic construct
  source 1..120: mol_type = other DNA
caggaggcaggtggactttgtccctaggcatccagtgcagaggtgagacctgtatggccacagagtctccctatccaggccccattaccctgggggaggcggattatggtatgaactgct

SEQ ID NO: 1912 - DNA, 120 bp, synthetic construct
  source 1..120: mol_type = other DNA
gtggaagacagtggtgggtaactcactcagctagagcgtctgatcacaccactgcagcggctgctcacagccttcaccatcaggaccacaattctgagggccctttggatgaagccatct

SEQ ID NO: 1913 - DNA, 120 bp, synthetic construct
  source 1..120: mol_type = other DNA
gcagttgcgtgagcaggaacaatcgccccagtgtgcaaggcacaagcggccttttcttcctcaccgggccggcgcacacagctcccagcctggcttcccttgaacaaacatatttattgt

SEQ ID NO: 1914 - DNA, 120 bp, synthetic construct
  source 1..120: mol_type = other DNA
actcattctagttgcaaagatacaggtagagcatagggaccccaaagagtagcaggggacccccgaggttgctgctggcagctcctagggagacagtcgggcacggtgggcaccttgaga

SEQ ID NO: 1915 - DNA, 120 bp, synthetic construct
  source 1..120: mol_type = other DNA
ggactggagagtaggagcaggtctcgggggtagcttcctgaagagatgagtcaggtcccaggcacattcagtgccagccagggaggtgagaggtaatcctggaagctgctatgtagacag

SEQ ID NO: 1916 - DNA, 120 bp, synthetic construct
  source 1..120: mol_type = other DNA
tctcctctcataaggaccccagtcaggtgggattagggctcacccttatacccccattctgctttaattacttcttataagaccccatctccagacacacagtcacagtcagaggcagga

SEQ ID NO: 1917 - DNA, 120 bp, synthetic construct
  source 1..120: mol_type = other DNA
aggaagcctttcctaaccagcagtccaggggattagaggactgggaccagttgaaactccattctaagtcttggggacctaatgggattaaaggcgaccgagcttgggccgtatctggga

SEQ ID NO: 1918 - DNA, 120 bp, synthetic construct
  source 1..120: mol_type = other DNA
tagatttcagaagtgctacttgaaaataaaagtctcctaattatatttatgatcccaacgtgagtgaatttgactccgttcacggcgaagaagctttgtgtaaaatgccgggaagccttc

SEQ ID NO: 1919 - DNA, 120 bp, synthetic construct
  source 1..120: mol_type = other DNA
agacgtgttatcatgaagccgggagatcaaggaaggctctctgagggaggtgacatttgtaccaagcaaggaaagaggcagaagatccttcttccaggctaagcgccatgtgagaatgca

SEQ ID NO: 1920 - DNA, 120 bp, synthetic construct
  source 1..120: mol_type = other DNA
tttttattacgcaaaaaaggacatttcgtagaacaacattactctaatgaaataccaccatttcattctagaaaggctgaggactccatctcagaccaggggctggtggtgtcctggttt

SEQ ID NO: 1921 - DNA, 120 bp, synthetic construct
  source 1..120: mol_type = other DNA
tggctctccaaatatacttagataaggaaacagagtctatttaaggaacaatgttaagcaaacaatagtacaggtgttcaaagatatggaatgagtgacagatggggcgagggaccccga

SEQ ID NO: 1922 - DNA, 120 bp, synthetic construct
  source 1..120: mol_type = other DNA
agatatttgctctttctttttgttttattatccagacttgcaaggccctgtgtgccccctcggggctgcacacgtgtacgcacaaacgcatgcccagtgtgacccctgtccacacctggt

SEQ ID NO: 1923 - DNA, 120 bp, synthetic construct
  source 1..120: mol_type = other DNA
tgaatcaatcaggggcagaaatgcctggcaggggaatgtttaccgatttggttttctggggctgaggatgctcggtgtttgtccaggctctgtcctgctggctcctctaaagctttgcaa

SEQ ID NO: 1924 - DNA, 120 bp, synthetic construct
  source 1..120: mol_type = other DNA
caatgacatcggatgcctgtttagtcagcggactgcctcagaaaggaatctcacaggcagcgggttcttctggtagggtgggatatttcagcgggaggtaaacaggtgttgtcacagaac

SEQ ID NO: 1925 - DNA, 120 bp, synthetic construct
  source 1..120: mol_type = other DNA
accttactaggccctggggataaaaaagaggacaaaagagatgagaccttcatcctagagcttaggatgtgaactgcgtccttctttaaatggaaatttctaaattacggtgtaccgaat

SEQ ID NO: 1926 - DNA, 120 bp, synthetic construct
  source 1..120: mol_type = other DNA
tattgctggtataaagaaatgccattgatttgggggggttgatctcacacctgacaaccatgtcatactttctatcagctctattgattgatcttttgatcctgctgattgtctaagtgg

SEQ ID NO: 1927 - DNA, 120 bp, synthetic construct
  source 1..120: mol_type = other DNA
cagccctattatcagcatctcacattagtatgcatttgtcacaaggaaacaacagtgctacatgactgttaactgagtccatgcttgatgcagatttcctcagtttccctactgtctttt

SEQ ID NO: 1928 - DNA, 120 bp, synthetic construct
  source 1..120: mol_type = other DNA
acgccttagaaagaaattaccggatggtgacaaagccccaatttattagtcttctccaatggggactgtgcaaaggacattaattactttaatgggacttattttgcttcgttgcccaaa

SEQ ID NO: 1929 - DNA, 120 bp, synthetic construct
  source 1..120: mol_type = other DNA
agctgggcgtccacgtggaggtgtggggcccgggtgggacaagcctggcaaccaggacccagcatgaaactgcaggtgcaggagccccagccagcctggaatgtgggggctcagaggcca

SEQ ID NO: 1930 - DNA, 120 bp, synthetic construct
  source 1..120: mol_type = other DNA
ggctctgcctggtgccaactgtgtgaccctgggcacgctgctgagcctctctgggccccagttcccttattcgtacaacgggaatgatcgaggagttaacatgtgtttaaaagcaccgag

SEQ ID NO: 1931 - DNA, 120 bp, synthetic construct
  source 1..120: mol_type = other DNA
tgctcacaaatcacttttctagacgaagaccagtaagaagcccatgtcattcttctgagacattaggggttttctctcccttgttttaatcaaccagttcccaataagtcatttcagtca

SEQ ID NO: 1932 - DNA, 120 bp, synthetic construct
  source 1..120: mol_type = other DNA
catgaaaactttatcctcatccacacctttctttctccaactagcatgggaatcagtttagggtcctcccacaccctcatccaaaccctcatctcccaccccccacttgcagagaaagcc

SEQ ID NO: 1933 - DNA, 120 bp, synthetic construct
  source 1..120: mol_type = other DNA
ggaagacacacacattcagactacagcaccttgctcctggggaaacagaggaaactggttcctttctttcggttctgggttatgtcaaaatgagttccctttgctgaatctgtttcagcc

SEQ ID NO: 1934 - DNA, 120 bp, synthetic construct
  source 1..120: mol_type = other DNA
acctgccacctgggagtgatctgggacagtcagatgcaccttttgaagtatacacctcagtggcttttggtatattcagagtcatgcaacttcacgactctctaactttagagcattttc

SEQ ID NO: 1935 - DNA, 120 bp, synthetic construct
  source 1..120: mol_type = other DNA
atcatcctccagaaggaaaaagctagagttgggcccccacctcatgcaatctataaaaactgactccaggtggatctaggaattaaatgttaaaagcaaaccttaaaactcttactggat

SEQ ID NO: 1936 - DNA, 120 bp, synthetic construct
  source 1..120: mol_type = other DNA
gccttcacttttaaagacttgtggttaattgggcccacctggacaattcaatatgatttccccatctcagtgttcatgaccttaattacagatacaaagtcccttttccatataacgtaa

SEQ ID NO: 1937 - DNA, 120 bp, synthetic construct
  source 1..120: mol_type = other DNA
ggacacatatagtttcaataatattatattaaaaaagaaagcaagggagagaggaacacaggattcaggttgatggttacccaggataggggagacaaggatacagttggggtggagctg

SEQ ID NO: 1938 - DNA, 120 bp, synthetic construct
  source 1..120: mol_type = other DNA
ttaagacaaagatgcaaaattcagcggaggaagactcctctttcaacacacggtacaggagcagttggtcattcataggccaaataaataaattaaaaccctgacctaagtctcacactt

SEQ ID NO: 1939 - DNA, 120 bp, synthetic construct
  source 1..120: mol_type = other DNA
aaaatttatagaagctttattcctaactagctgaaagctgagaacaatctatgtatcattcaacaggggaacaggcaaacagtggtgcatccctaccctgaaacactacccagcagtaga

SEQ ID NO: 1940 - DNA, 120 bp, synthetic construct
  source 1..120: mol_type = other DNA
gagttgcaaagagcgacaccccagcatgtgggaaggaagggagcgagctcttatttccttattttctttccatctccactcccaggcaaagctgataaattcttccttattccagagtta

SEQ ID NO: 1941 - DNA, 120 bp, synthetic construct
  source 1..120: mol_type = other DNA
tggggagctcatctcattcatctacaaattattaacaataacttgttcattaatgaatgaacaggtgagatacaggtcagtgggtgcatgaatgagtgaggagatgaatgaagcgggtct

SEQ ID NO: 1942 - DNA, 120 bp, synthetic construct
  source 1..120: mol_type = other DNA
cgaaatgtctgtcctcacctgggtccgtgcacataggccgtagggtggaaccctagccagggacccgcccttctcctcccagcacttccctgcccctcttccgtatcactaccaggaaag

SEQ ID NO: 1943 - DNA, 120 bp, synthetic construct
  source 1..120: mol_type = other DNA
ttgtcaaatagttttctgttacagttcatactgtttgcgttcctttaaagacgtctttgcccatcccaggtcgtgaaaatattatccaactttcttcgacaggcccgattgcctcatagt

SEQ ID NO: 1944 - DNA, 120 bp, synthetic construct
  source 1..120: mol_type = other DNA
acatactatatccccaagtcaagttagggcttctttatctgtctctccaatgctcagtgcttttctgtgtagcagtcttacacatctttaaacagatttattttagagctgggtacgatg

SEQ ID NO: 1945 - DNA, 120 bp, synthetic construct
  source 1..120: mol_type = other DNA
tgtttgggcacagtgctacatgcagcttgctggtggtggttaggatatttgcacgtatgttcacgagagagattaacctgtgattttttttttctttcttgaaatatccttgtcagattt

SEQ ID NO: 1946 - DNA, 120 bp, synthetic construct
  source 1..120: mol_type = other DNA
ttgtagggagcagtgttctgtatatgtcaagttgctaatcaggctgttcaaatttgtctctgacttgacaaagctttgactgcttttctatcagttactgacgaggtgtgttcaaatctc

SEQ ID NO: 1947 - DNA, 120 bp, synthetic construct
  source 1..120: mol_type = other DNA
aattacatgtggcatcatgctcaaagtccgacatcttgtgatctgccccttccagcctctgtccaattccttgtcccaaaattaatgctgtaagttttaggatattgatatgacattacc

SEQ ID NO: 1948 - DNA, 120 bp, synthetic construct
  source 1..120: mol_type = other DNA
ggaaggagctgcaagtatttaaggctgttggaagtaccacacctttagatctgtatgatctctcttttcccttgccttttagtctttcgtgtataaaattgtagatgctcgagggtatta

SEQ ID NO: 1949 - DNA, 120 bp, synthetic construct
  source 1..120: mol_type = other DNA
tcttccagtcttttttctatgcacagacacatcatcccctttgtttccttttgtgatgctgtttctaaaaggatctttatttctagaagaaactttaggaggcaaaaacagcgcagcccc

SEQ ID NO: 1950 - DNA, 120 bp, synthetic construct
  source 1..120: mol_type = other DNA
gggacattcctcggatgaaggcggtggtggggggtactgagtcctggcttggaaatacatgtgtaggtgtgggaaccccgtatcctctgtggtgggtgatccagaaggcaaaaatcacaa

SEQ ID NO: 1951 - DNA, 120 bp, synthetic construct
  source 1..120: mol_type = other DNA
ctgcatccccccagggaagggggtggttcatgactcaactgaaccaagttgtgtcaaagctcccagcagtgcctgggacctcttgcagtcaaaataaaagccatggcaaatgccactgct

SEQ ID NO: 1952 - DNA, 120 bp, synthetic construct
  source 1..120: mol_type = other DNA
atgttgttggagcattcgttgaatacctgggagttgcagctctctgtaagtttgatgtggctgaaccaagaaaaaaagcacacgatttctacagatattatgatgccgtcaaagattttg

SEQ ID NO: 1953 - DNA, 120 bp, synthetic construct
  source 1..120: mol_type = other DNA
tgctcctgcagacgtgcacacactcaggtacataatacttccttgcccacaacaggcctgtttggaagcactcgcatctgcagaggctgctaacacacacacctacacccacctggtcac

SEQ ID NO: 1954 - DNA, 120 bp, synthetic construct
  source 1..120: mol_type = other DNA
tcccatcttgcagaaaggagcttagaatctccattatacagaaaggagaaacagagctcagcaactcatcttacagaaaggaggatcaaggcttagcatcccatcttatagaagagagag

SEQ ID NO: 1955 - DNA, 120 bp, synthetic construct
  source 1..120: mol_type = other DNA
agagacagggctcagcattttatcttacagaagagagaagaaggacttagcattcccatattacaggagaaactgagacctgaggatgttattactagcctgtacataagtacggttttt

SEQ ID NO: 1956 - DNA, 120 bp, synthetic construct
  source 1..120: mol_type = other DNA
tgggagcaaggccacaaatgtggcttggggtttcctgatatcatgagatgctttgttttctctgttgtggtttcaagatgtcacctgagtcccacttataggcttagagctggcaacaag

SEQ ID NO: 1957 - DNA, 120 bp, synthetic construct
  source 1..120: mol_type = other DNA
agacactgcctggtgccaggccccaccgcacgggtctcccccagactggcctggagctggagaccctgactgtggggagctaatgtgttcccatggagctagcaccatcctcccgggcct

SEQ ID NO: 1958 - DNA, 120 bp, synthetic construct
  source 1..120: mol_type = other DNA
tccaaagtacattttacaaaggaatattcaggtttcataagaacctacctgggtccctttaaattccagggcgttgaggttaggctctaggtgtggaaacatgaacccagggcaactttg

SEQ ID NO: 1959 - DNA, 120 bp, synthetic construct
  source 1..120: mol_type = other DNA
actgccctttgaagtctctgtggtttgaagcgggctgttatcttgccgaacagcaagtccgtctacatggactttatctgaaagtagctgagaggctaaaaatagaggagtttcagttgg

SEQ ID NO: 1960 - DNA, 120 bp, synthetic construct
  source 1..120: mol_type = other DNA
gtacagcagggccgggtaccctgtgttgttggcatggccaggagtttctagacatcaaggaaagccgtggtagagacagggagtggcacccagttccccagcctccactcctgcttccat

SEQ ID NO: 1961 - DNA, 120 bp, synthetic construct
  source 1..120: mol_type = other DNA
tggagggcttggtggcacagcctggctcgagttttctccgttatcagtgcagccatcgggaccgtaaataccccaagcgcaatcctgctgacttcgggaagtaggggcaggaaatccagc

SEQ ID NO: 1962 - DNA, 120 bp, synthetic construct
  source 1..120: mol_type = other DNA
tcacaaaagctgcctcatgccctttctgttttcatcttagattattgtcttctttatcctggagaggactcttatttgctcaaatgcccacataaatcctcttttacagatggggaaacc

SEQ ID NO: 1963 - DNA, 120 bp, synthetic construct
  source 1..120: mol_type = other DNA
gccagtatttatgtgtgagatacatacatgacataattttcctgtcttgtatggtcttcatcaggctttggtgtcaaatgtatgtgagcctcacagactaacttaagaagtgttccctct

SEQ ID NO: 1964 - DNA, 120 bp, synthetic construct
  source 1..120: mol_type = other DNA
tgtgccttctgtacttgaaaacaaggtatattctgacattgttgggtgcagtgttatgttcatatccactggaacaagcttgttagttggtctgttcaaatcttctatattctcattgga

SEQ ID NO: 1965 - DNA, 120 bp, synthetic construct
  source 1..120: mol_type = other DNA
tggggtatgatatgaagtaaagtctagatttgttttgttttattcttacttatggatatccaattgccccagaacatttgttgaaaataccccatttcctcctttgaattatcatggctt

SEQ ID NO: 1966 - DNA, 120 bp, synthetic construct
  source 1..120: mol_type = other DNA
tgtctagtgagatggtcctgtggtttttattccttattctactgatttggtataatacattaattttcaggtgttaaaccaatctcacatttctggaatatatcctacctgggcatgata

SEQ ID NO: 1967 - DNA, 120 bp, synthetic construct
  source 1..120: mol_type = other DNA
ggctgcctttaagatctttcctttgactctagtctgcattttcactaggatatgttaataggtttctttttttctgcctgagctaccttactcagtggtttggtgtctttcatcagttct

SEQ ID NO: 1968 - DNA, 120 bp, synthetic construct
  source 1..120: mol_type = other DNA
gactaacttgtgaacatgactttccaggacagaacttgttctccttctcttagcagtaatgcagttttctttacaatcttctcagggagtaggagatttttcattggccctcacaatgaa

SEQ ID NO: 1969 - DNA, 120 bp, synthetic construct
  source 1..120: mol_type = other DNA
ccgtaaataggcaaaggcgggggctctgactgatcaaagggctccctttagaagccgtcattagtttgctattctgggaactggttattttaaggttagtgtattttttctttcctgagg

SEQ ID NO: 1970 - DNA, 120 bp, synthetic construct
  source 1..120: mol_type = other DNA
agagcagacgctcttctgtcttactaggaggtgggaattaatgaaagtaacaactcctggaagggactctagcactgcctgtgaaaactagaaacccgtcatcactcctaggaaagaaaa

SEQ ID NO: 1971 - DNA, 120 bp, synthetic construct
  source 1..120: mol_type = other DNA
tctcactttgtcactcttggttacccatgggaccctgaaccccataggaggggctcatcactcagggtcctcatccaggtgtggcccatccacacccagcatccagctgtgcacacaggg

SEQ ID NO: 1972 - DNA, 120 bp, synthetic construct
  source 1..120: mol_type = other DNA
agaggaaatttaagtctttttaaaaattcagctcaagtgtgtgtcaacttctgtgagtgcaactgcttcagagagaggctgggataggacagcaggcggcaggggcgtgtcaggtgcccg

SEQ ID NO: 1973 - DNA, 120 bp, synthetic construct
  source 1..120: mol_type = other DNA
aagagaaactctctccctcaggtcagacccaggcctttcaagaagaggttgcagggtgtgcgggctgccaggaaaaggtctgtgcgggtgagggagcgcatcctatggatatctagagga

SEQ ID NO: 1974 - DNA, 120 bp, synthetic construct
  source 1..120: mol_type = other DNA
cctatctctaaaaataaaagtaagaagtattttttttttaactgaggcccttctggagggatggagggaccagaagtcacaaggagcagaaaggaaaaaagcaaaggaatccttctgaag

SEQ ID NO: 1975 - DNA, 120 bp, synthetic construct
  source 1..120: mol_type = other DNA
ctggagctgtatttggacttggcaggcaaccaaaaccccagtgcttagagatcaagtggaaaagaaaagaggaagaagatgggggagtgagagagatgggaaggcagtgagggaagcctt

SEQ ID NO: 1976 - DNA, 120 bp, synthetic construct
  source 1..120: mol_type = other DNA
tctctttccctaaaggtgaagttctggagcaaaaagagcctgagctgtgagccgaggggctcctcctcctccaaactgacacccagtcacagagcaattgctaaagacacagtcatgctt

SEQ ID NO: 1977 - DNA, 120 bp, synthetic construct
  source 1..120: mol_type = other DNA
cacgtgtgaaaccattggcttatggcgcaatgcacttcctcccggcatgcatgaaaacataaatgtaaataccaaaatacacagggactattcggacaccacctgaaatcattccatgtc

SEQ ID NO: 1978 - DNA, 120 bp, synthetic construct
  source 1..120: mol_type = other DNA
tacccaccacccttgctccggagctcgagggccctttccccactagcatctgaccgccttcttgtatgtcttgaaggttctttgccttctctgtgcagcagggccctttacagtgtagtc

SEQ ID NO: 1979 - DNA, 120 bp, synthetic construct
  source 1..120: mol_type = other DNA
acctcaaaaacagctgtagaggggtttgcggcagcagcagcagacgtttttaaactaattcattggtgatggcaaaattatgccgagttccctgaaaaaaaaaaaaaatacccactctat

SEQ ID NO: 1980 - DNA, 120 bp, synthetic construct
  source 1..120: mol_type = other DNA
caaataccctcctctgcatttttcccttgtgtttgatttgccaggagcagaatttctgggttggaatcgggaacatttagaggagcttctcagtagagttgtacagagtggaaatgagtc

SEQ ID NO: 1981 - DNA, 120 bp, synthetic construct
  source 1..120: mol_type = other DNA
agcagctgtggccgtgaaggttccaagcttgaagtggaaagggttttgatgccaaggtccaacgcccagcttatcattgtgtaaatctgggcaccacacatagcctctctgtgactcagt

SEQ ID NO: 1982 - DNA, 120 bp, synthetic construct
  source 1..120: mol_type = other DNA
cttcctctgtgcttacacatccctggtgctgccgccttctcttgcaaagacgtgagtcctatgggaccaaggccctgccttcacagtctcctttaatatttatcacctcctaaaggcctc

SEQ ID NO: 1983 - DNA, 120 bp, synthetic construct
  source 1..120: mol_type = other DNA
caatgtctattaattaagccccctggagactccaggagctgggggccttggctcagtgccctctcataaagttctgctctctggggaccgtggctctggcagccaccctgcctctcagga

SEQ ID NO: 1984 - DNA, 120 bp, synthetic construct
  source 1..120: mol_type = other DNA
atggggcttggaggatgtggcagagttcccatggtgtgtgtagaatgatattccctccagaccacggtgccttctgggctctggagaatgcacctgtgttcccaggagctttaggggtac

SEQ ID NO: 1985 - DNA, 120 bp, synthetic construct
  source 1..120: mol_type = other DNA
tgtctgtgggtttgtggagagcatcactgaaatttctaacttgacagagtggttccagggctcatatagaagcataaagaggtgaaaatagctgatatttctaaaggcaaaagctaacga

SEQ ID NO: 1986 - DNA, 120 bp, synthetic construct
  source 1..120: mol_type = other DNA
cgacattttgcaagtgaaaactcaaatctatgagaaaagcactcgccccgcagtaggaaagcaggcaaagaactagaaagacaatttacaaaaggatctgaaggtcctcactgcactcat

SEQ ID NO: 1987 - DNA, 120 bp, synthetic construct
  source 1..120: mol_type = other DNA
ggtggtgcccaaaacatcaccttacagaaaatgcccggaaacgtgtctctggagggtggacttagagatatgtttttgaaacagattttttcatatttttcaaaatttctcccgtaagtg

SEQ ID NO: 1988 - DNA, 120 bp, synthetic construct
  source 1..120: mol_type = other DNA
gtaaatgggacgatgaaggggcagtgtttaaatggctgctttagcccgtttggaagtctgctaattattctcttgaggaaagaaatgcaggttcattattataatgagctttgggcaaaa

SEQ ID NO: 1989 - DNA, 120 bp, synthetic construct
  source 1..120: mol_type = other DNA
cctccgagggaggggcatttgaaaatagcattcagagttgctattaataggctctgatgcagaactgagcagagaagaaaacaaaagaggaccataatatctccacagagaactatcatt

SEQ ID NO: 1990 - DNA, 120 bp, synthetic construct
  source 1..120: mol_type = other DNA
tgtttcttcaccaaaagagaaattcatttctaaatgtcactttcaggttaaggaaaataaaatgtgggacgctggactcatcgtgggtttttgcggtcttctctcagctttgtgtggtag

SEQ ID NO: 1991 - DNA, 120 bp, synthetic construct
  source 1..120: mol_type = other DNA
ttttatggcattatattcttaactttatctcttcagagttctaggaaatgtttttagcagtcctgtttttaatatcccagagcacacgcttgctctctgaccgtggtcatggcattccgc

SEQ ID NO: 1992 - DNA, 120 bp, synthetic construct
  source 1..120: mol_type = other DNA
ctggctcattgtccctgttacaacccagatttcccttatcgcaactggtcctagcctgtgacctcctggggtggggaatcatctctgcaaacacagctcctccacccttatcagtgcttt

SEQ ID NO: 1993 - DNA, 120 bp, synthetic construct
  source 1..120: mol_type = other DNA
caaactttctgtttcaaggaacagaaacacccctgaaacttgtctaagaaggaaatgtgtcaactcacatacatgaaaagcctgagtccctcctcaaagtcctcccctccctccttctct

SEQ ID NO: 1994 - DNA, 120 bp, synthetic construct
  source 1..120: mol_type = other DNA
tatttttagtcggtggtgggctgtcactccggaggccagtgactgcgtcatcagtgccttttgatcttgttgccgcaagatacacaggaggcagctgctcactgcttgtggaaagaatga

SEQ ID NO: 1995 - DNA, 120 bp, synthetic construct
  source 1..120: mol_type = other DNA
tgaatgaatggatggatggggagatggagggaagggaaggctggataaagagacggctgggtgggtgagctgatggagaaatgatggataggtggatgggtagattgagaaatgatggat

SEQ ID NO: 1996 - DNA, 120 bp, synthetic construct
  source 1..120: mol_type = other DNA
ctgtagatccaaacacctgatctcagctcaggatcgccactccagtgccccatcccagagcctttgagagtggggacagggtgtcctgttgtagttgccaagcccaagaaagatgaggca

SEQ ID NO: 1997 - DNA, 120 bp, synthetic construct
  source 1..120: mol_type = other DNA
agttcctgctgcagtgtggaaaagacaaacaggcgagtgaagtggataaagattcaggttgtgggagggagacttgaagggcaagttggccaagactaaaaagtggagtcaagctcagtg

SEQ ID NO: 1998 - DNA, 120 bp, synthetic construct
  source 1..120: mol_type = other DNA
ttcaagggttaacggtgcaagctcctcacggcaccagtgcgcttgcctttgacatgaaaatgtttttgcagcaggctcggatgccagcatttttgtggttgcagtcagatgtttttaact

SEQ ID NO: 1999 - DNA, 120 bp, synthetic construct
  source 1..120: mol_type = other DNA
ctaaaacccactatcctggcaaaaaagtggcaggattgtctgaaaaacacatggccagccaccctgcaccctgagttccacaacatctaaacccagtgtctgctggccctcagagtggga

SEQ ID NO: 2000 - DNA, 120 bp, synthetic construct
  source 1..120: mol_type = other DNA
tccttgaattcctgaggtaaaccttatgtgatcttgactcaagtccagctgctgatgcatttttaggttttagcatctgtgttcatacctgatttgggcctagaattttcttgtgtttgc

SEQ ID NO: 2001 - DNA, 120 bp, synthetic construct
  source 1..120: mol_type = other DNA
ttatggagttttcctttggtgcctaataggatcatttctgtgacctttttgtatatgtgtggaggcggtggagtcttttctgttaattgtgttaaacttgttagtggagttctgcgactc

SEQ ID NO: 2002 - DNA, 120 bp, synthetic construct
  source 1..120: mol_type = other DNA
atatggtgagaatggtgcccatggggtcacgccagccacacacactttctcgagaagtttcaagtggagccacagggccattgtgtgtcctgaatcattgctctggctgagggagtctgg

SEQ ID NO: 2003 - DNA, 120 bp, synthetic construct
  source 1..120: mol_type = other DNA
ggacagatattaggccattatggcagaatgcaagtgtttagttagaactgtgctaagtgcgtaaagagagctaaaggctacataataagttgtgagcctacctagggtattagcagaggt

SEQ ID NO: 2004 - DNA, 120 bp, synthetic construct
  source 1..120: mol_type = other DNA
taaaatttttccaagtcactgcaggaaaaaagtatagaatttgctttctatcccttttcttagaaggttctggagaatgcactccagcaaaacgtgggaggaaaccagggaaaaggaagg

SEQ ID NO: 2005 - DNA, 120 bp, synthetic construct
  source 1..120: mol_type = other DNA
taaggcctggaggcttgtgcttatccatcatatagcaggcctgccctttccacagcacaaacaccttgacacacaccgtcacacacacccatattcgacacacacattcacacaaacaca

SEQ ID NO: 2006 - DNA, 120 bp, synthetic construct
  source 1..120: mol_type = other DNA
attttctgaatgtctgctatgtactagactctgggaacacaggggaaagtatgtggacctgcccatgaggaagtcagtacagtggggccatgaacaataaacagacaattaattatcctt

SEQ ID NO: 2007 - DNA, 120 bp, synthetic construct
  source 1..120: mol_type = other DNA
agaacctctccgagggagtgctattgtttttcatgtcagctgcattttaaggctacatttcacgtcagctgtgacttggaaggaaagagggcccggcctttgaaaaatgaagaaattgag

SEQ ID NO: 2008 - DNA, 120 bp, synthetic construct
  source 1..120: mol_type = other DNA
gcaaacactcagcttaattcagggttctgttgattaaaaaaaaaaagtggggtcgggggggcgggggagagcggctatggagacaagtggctgttttgccagagggaaaattccacatgt

SEQ ID NO: 2009 - DNA, 120 bp, synthetic construct
  source 1..120: mol_type = other DNA
gaatcccactaaggtgacagtaaaggcatgaaaaacatggaaacatgtaaatcaactagggtaaagtggtcaggagaaaagaggagaccaaaaatatgttgacaaaggtttggaagctgg

SEQ ID NO: 2010 - DNA, 120 bp, synthetic construct
  source 1..120: mol_type = other DNA
agaattttcaacatgagtgaaagaagttctagcattacagctgctcagcatgcctacagtgcaaacagtcctgctaagactccaggaagaaatcccagaagaaaaaaaaaatgaaggtga

SEQ ID NO: 2011 - DNA, 120 bp, synthetic construct
  source 1..120: mol_type = other DNA
ctatgacctgaatgatatcttagatgatctccaaggccccgggatctaagtccctgttaagtcccctgttaaaggacctaggtcctcccaatggcctgcaaaccacacccagtctagtca

SEQ ID NO: 2012 - DNA, 120 bp, synthetic construct
  source 1..120: mol_type = other DNA
agacacaagaagctctccaggtctctgggtccctctggtactctgtgccctgaaccaccacccttaggcccagatctattcctgatccttctctagacttcagtcagtttcctcttgatg

SEQ ID NO: 2013 - DNA, 120 bp, synthetic construct
  source 1..120: mol_type = other DNA
gagctccgaccgcacagggtcatggggagcaagaggaaccaggatacccacaagctgctcgctcagacgggctctgcgactccacaactcaccttcccctactgcaagatcagggagatg

SEQ ID NO: 2014 - DNA, 120 bp, synthetic construct
  source 1..120: mol_type = other DNA
ctctccaagcttctcccctcataggatcccagagccccttgggacctctgtgaagactgcatagatgtgagggagtctcagccttagggtgggcacctgggcgcagctgtcaggccccaa

SEQ ID NO: 2015 - DNA, 120 bp, synthetic construct
  source 1..120: mol_type = other DNA
tgggcagagcaggaggaaatcccttgttctccggagctggagagccagaaagagccctgcagcctgggcctcatcatcacacctcgccctcaaggcctccaggcacagcatccactgcca

SEQ ID NO: 2016 - DNA, 120 bp, synthetic construct
  source 1..120: mol_type = other DNA
ggcccccaagtctctgccacctccctggggttctgctcccatattcctcacacccagcacagaacccagcatgtctcctgtagacacctgcatataaaccctgactcacacacacacaca

SEQ ID NO: 2017 - DNA, 120 bp, synthetic construct
  source 1..120: mol_type = other DNA
gcagaaggtaaagatgagaccaagaggcagatgggtggaagagttgaaagcagccaagtgtcaccaaggcatttctgagggagagggacacgactagtggctcaaatctttagaaatgag

SEQ ID NO: 2018 - DNA, 120 bp, synthetic construct
  source 1..120: mol_type = other DNA
gagcccctcccttcaggcccagggagtggcctggggcccaggagagcccgctccgcgctcacagcctccgttcccagacacgcccgggcctgagcccccaggctgcactgtgccacagaa

SEQ ID NO: 2019 - DNA, 120 bp, synthetic construct
  source 1..120: mol_type = other DNA
caaattcaggaatatttagggtatacctgctgcacgccaagggcagtttcaggaaggggacctacttctgagaagcaaacaccaccagtagggaccaggcagacagaggtggggatggaa

SEQ ID NO: 2020 - DNA, 120 bp, synthetic construct
  source 1..120: mol_type = other DNA
tgactccctccatgacctctgtccccaccctgaagttgacatgaatgtccgcacggagcagcctctgcaggtctgtgaggctgtggatgtgacagctctggctctggcacaaacgtcagc

SEQ ID NO: 2021 - DNA, 120 bp, synthetic construct
  source 1..120: mol_type = other DNA
cctgcaaaagtaagtctgtaggtcagaaatcaatcccaggcgattcaaagatttagggggtaaaacacaaatcaaaaaagtattaggaaaaaagattttggcgttggaatggaggaggcc

SEQ ID NO: 2022 - DNA, 120 bp, synthetic construct
  source 1..120: mol_type = other DNA
tggcaaaacaccaagcaaggagatcaataaaccgggacatttcagggagtggtgaaggcttacaggaacatggggagagatgagacgaggaggccgcccaggattttgagctaaggttac

SEQ ID NO: 2023 - DNA, 120 bp, synthetic construct
  source 1..120: mol_type = other DNA
aacaacctaatggaaagtgaagggaattgtacaagtgtgtacaagggtgcagggtggttcctgccttcttgcacgcacagtctcccacactcatacagccacaggttcgtacgaggtaca

SEQ ID NO: 2024 - DNA, 120 bp, synthetic construct
  source 1..120: mol_type = other DNA
gcggggatcaaggccgggcaggttctgcaaaaatttcccttgaaagactctttttcaagattttcttttgaaaacaaattcataaccacatcaaacaggaatccccgttgccttgggttt

SEQ ID NO: 2025 - DNA, 120 bp, synthetic construct
  source 1..120: mol_type = other DNA
tcgccaaaaaaaaccaaacgtgccagcgagatgaaggcgccctgcccgcagagtggtggggtgggactcttcagggacacgtgctgtgacaagtgcttgagtcagagctaagactctggg

SEQ ID NO: 2026 - DNA, 120 bp, synthetic construct
  source 1..120: mol_type = other DNA
cctttcctccatagtctgggcctcacatcaggtttatctgggaaaaataaaacatggggctccctctggcctggaccgtcagacctcggatgtacacctgcccttgtgttcaggacagtt

SEQ ID NO: 2027 - DNA, 120 bp, synthetic construct
  source 1..120: mol_type = other DNA
gtgcttagggccagtggttgacgttgctgtggctgagtcatcttcgtgcctctctctggagccatacgtttccctgaagcagctctgctgttcagcccttatcgcgtgctgatctgtttg

SEQ ID NO: 2028 - DNA, 120 bp, synthetic construct
  source 1..120: mol_type = other DNA
agaatgtgggtgcagatggtgtctgggaaaatagtggtgtccccgctaggttaaagacatggcataatggttcctgggggatgacaaaaaaacccacccccacccccttgcagaaagcat

SEQ ID NO: 2029 - DNA, 120 bp, synthetic construct
  source 1..120: mol_type = other DNA
cgcagagaagtgacggttcctacacaggacaggggttccttctgggcattacatcgcatagaaatcaataatttgtggtgatttggatctgtgttttaatgagtttcacagtgtgatttt

SEQ ID NO: 2030 - DNA, 120 bp, synthetic construct
  source 1..120: mol_type = other DNA
gcaggtaaggcttgctccaggcgccagaataggttgagagggagcccccggggggcccttgggaatttatttttttgggtacaaataatcactccatccctgggagacttgtggggtaat

SEQ ID NO: 2031 - DNA, 120 bp, synthetic construct
  source 1..120: mol_type = other DNA
ctgtccaagcggcgatttttcctctgggtgaaatggattagattttagatttccacaagaggctggttagtgcatgatcctgagttagagctttttaggtggctttaaattagttgcaga

SEQ ID NO: 2032 - DNA, 120 bp, synthetic construct
  source 1..120: mol_type = other DNA
gcaaacattctgccactcagttttacaaaagaaagagaggcactggattaatgtgtatctcactcaccaatcaacctcttccttaagagaaaatgttaaggaagtcttaggcaaggcctt

SEQ ID NO: 2033 - DNA, 120 bp, synthetic construct
  source 1..120: mol_type = other DNA
tccttgtacaactgttttcagtagcacagggaaagaaaacatcgaaagcattcaccacctcatttgtgtgctgggggaaaaagcagaaatgtgtattctctttttttgtttcgatgacct

SEQ ID NO: 2034 - DNA, 120 bp, synthetic construct
  source 1..120: mol_type = other DNA
gcctaatttgcttttcctgaaattcaaatggtctaatatgaaaaacgccaaccttgcttgaaagaataagaaagaggtgcggtttcgttgggccgttgatgtttggaacaggactggttt

SEQ ID NO: 2035 - DNA, 120 bp, synthetic construct
  source 1..120: mol_type = other DNA
atttggagaataatagtcaggggagagcttgaggtccagggaaaggttttgtttttcttcagggaaaggtttttattgttctttatccctccttaaaggaccttcaggtgttactgacat

SEQ ID NO: 2036 - DNA, 120 bp, synthetic construct
  source 1..120: mol_type = other DNA
gaaactgagtcccagaaggatttagtcagttacccaagttgttctagttaaatggcctggaaagccagtgaagcccaggattgtctatctaacccccttactactctaactttcagggaa

SEQ ID NO: 2037 - DNA, 120 bp, synthetic construct
  source 1..120: mol_type = other DNA
ttcctatcagaagcaagtcattaaaagtccagtgccactccaggggagacgaattaggctctgccttctgaaaggattatcacagaagatgcggtcctatattctttttttaaaattatt

SEQ ID NO: 2038 - DNA, 120 bp, synthetic construct
  source 1..120: mol_type = other DNA
aaaaggcagatttttttttcttcttggtattgttaccttattatagtaataataagtgcatagtgcatgctgagataagcaatcataatttgttattgcggccgggcatggtggctccag

SEQ ID NO: 2039 - DNA, 120 bp, synthetic construct
  source 1..120: mol_type = other DNA
ttcaataagactttgatctcttttccaaggtgtaaatatattttgggaaattttccagttactttgttctcattttaatgtaataatctaagtcttggttttctaaggaaaagttttctc

SEQ ID NO: 2040 - DNA, 120 bp, synthetic construct
  source 1..120: mol_type = other DNA
gaagttctaatatttttttcccataccccagagagtccatattttggaatcaacaacactagcctttgttgacaagtgtctctcttgggttccttctttgtgtcctccactgaattttgg

SEQ ID NO: 2041 - DNA, 120 bp, synthetic construct
  source 1..120: mol_type = other DNA
ctttttgatgatggcggctggaaaagtggccagtggattttgatgtattcaatcatgaattaggaggtggggagagaatgaattattggagctttccttaaagccattaaatggctctat

SEQ ID NO: 2042 - DNA, 120 bp, synthetic construct
  source 1..120: mol_type = other DNA
ccagctttggcctcccaaagtgttgggattacaggcgtgagccactgagcccgccccatatgtatgtatatatatatttttttaaaatgggagaccaggcatggtggctcatgcctagaa

SEQ ID NO: 2043 - DNA, 120 bp, synthetic construct
  source 1..120: mol_type = other DNA
agtgggtctttcctttgagtgacagttcaatcctgtctcttctgtagtgtctgtcacctgcaaatccggggacttcagctgtgggggccgtgtcaaccgctgcattcctcagttctggag

SEQ ID NO: 2044 - DNA, 120 bp, synthetic construct
  source 1..120: mol_type = other DNA
gcattttggatttcggatttttaccactgagtgtggagtcctaattaggaaaaaaaccaggctgaccgaaccaaaggaaagcaataaaagaaggcagatagggtcaggcacggtggctca

SEQ ID NO: 2045 - DNA, 120 bp, synthetic construct
  source 1..120: mol_type = other DNA
ttttagagaagggatactcaacccaaaataaggacagcaattctataaattgtgctaccatcttgcaggtctcagtttaacagctttacacctattagcgcaccagtgctcatagcagtg

SEQ ID NO: 2046 - DNA, 120 bp, synthetic construct
  source 1..120: mol_type = other DNA
tgtgatttttttcatctctaaatttcctacatccatatggccaccatgaggccccaggctggccgatggttgctgttagcttattgggaaatcactgtttggaaggtgctggttgttttt

SEQ ID NO: 2047 - DNA, 120 bp, synthetic construct
  source 1..120: mol_type = other DNA
tctttttctctggttgtctcttcttgagaaaatcaacacactctgtcctgttttccagctgtggccacctgtcgccctgacgaattccagtgctctgatggaaactgcatccatggcagc

SEQ ID NO: 2048 - DNA, 120 bp, synthetic construct
  source 1..120: mol_type = other DNA
atgtgaataaactattatatgaatgagtgccaagcaaactgaggctcagacacacctgaccttcctccttcctctctctggctctcacagtgacactctgcgagggacccaacaagttca

SEQ ID NO: 2049 - DNA, 120 bp, synthetic construct
  source 1..120: mol_type = other DNA
ttctcaacatggctgttgggtgaacacaaccacgcacagaacgcaaaccaatacacgtggctgtgggcccagaaaatgttatttatggacacaaaaattggaatttcatataactgtttt

SEQ ID NO: 2050 - DNA, 120 bp, synthetic construct
  source 1..120: mol_type = other DNA
aaacatgtaacataaaatttaccttctcaaaccttattaagtgcacagttctgtgccattagcaaattcacactgttgtacaacatcacaaccaccatctccagaacttttttttttttt

SEQ ID NO: 2051 - DNA, 120 bp, synthetic construct
  source 1..120: mol_type = other DNA
ctgttaagtgtgcttgaaagcagttaggagggtttcatgagattccacctgcatggaaaactatcattggctggccagagtttcttgcctctggggattagtaattaagaaatttcaggc

SEQ ID NO: 2052 - DNA, 120 bp, synthetic construct
  source 1..120: mol_type = other DNA
aaaaaaagaaaagaaatttcagctgacacagcttcacactcttggttgggttcccgtggtgaatgatgaggtcaggtgatgactggggatgacacctggctgtttccttgattacatctc

SEQ ID NO: 2053 - DNA, 120 bp, synthetic construct
  source 1..120: mol_type = other DNA
ttttttagagacagggtgctgctctatcttccagcctgtagtgcagtgcagcctccatcatagctcgctgcagccttgacctcctgggttcacgtgatcgtcccgcctaagcctctggag

SEQ ID NO: 2054 - DNA, 120 bp, synthetic construct
  source 1..120: mol_type = other DNA
tggctgtggactggatccacagcaacatctactggaccgactctgtcctgggcactgtctctgttgcggataccaagggcgtgaagaggaaaacgttattcagggagaacggctccaagc

SEQ ID NO: 2055 - DNA, 120 bp, synthetic construct
  source 1..120: mol_type = other DNA
cgcacactgtccttgcagctacaatcaggaggtgaatgttgggtttccagcagagaacactggagaaggcacacttggtgtctggaagggaaaagcagggaagagagcatcatcagatgc

SEQ ID NO: 2056 - DNA, 120 bp, synthetic construct
  source 1..120: mol_type = other DNA
tgtgtttggccacataactgccaggccagagggaaagagactctcagactgtctccactcagatacaaatgtgtgtgttgtgtgcgtgtgttctggtctcatatttgtttgttttgagac

SEQ ID NO: 2057 - DNA, 120 bp, synthetic construct
  source 1..120: mol_type = other DNA
ctctgggactggcatcagcacgtgacctctccttatccacttgtgtgtctagatctcctcagtggccgcctctactgggttgactccaaacttcactccatctcaagcatcgatgtcaac

SEQ ID NO: 2058 - DNA, 120 bp, synthetic construct
  source 1..120: mol_type = other DNA
tttttttttctaagagacaggatctcactctgtccccaggcaggagtgcagtgctgtgatcatagctcactgcagccttaacctcctgggctcaagtgatcttcccacctcagcctccca

SEQ ID NO: 2059 - DNA, 120 bp, synthetic construct
  source 1..120: mol_type = other DNA
gaaaccctgctctaaggaaatggcgctattttataaccccacgttcctggcatgattaccaacagccaaaagtggagtccccccaagtgtgttcgtccatttgcattgcagtaaaggaat

SEQ ID NO: 2060 - DNA, 120 bp, synthetic construct
  source 1..120: mol_type = other DNA
tcatgaggtcagcagttcgagaccagccaggccaacatggtgaaaccccatctctactaaaaatacaaaaattagccaggcgtggtggcacatgcctgtagtcccagctacttgagaggc

SEQ ID NO: 2061 - DNA, 120 bp, synthetic construct
  source 1..120: mol_type = other DNA
agtattttggacagatatcatcaacgaagccattttcagtgccaaccgcctcacaggttccgatgtcaacttgttggctgaaaacctactgtccccagaggatatggttctcttccacaa

SEQ ID NO: 2062 - DNA, 120 bp, synthetic construct
  source 1..120: mol_type = other DNA
ccccctttgttgacttttctcatcctctgagaaagtctcagttgaggccagcacctccctcaagtgaattgaatctcccttttgaacaacaacaaataacaatatgacccagacgtggtg

SEQ ID NO: 2063 - DNA, 120 bp, synthetic construct
  source 1..120: mol_type = other DNA
tttttttttttttttttttttgagacggagtcttgctctgtcgcccaggctggagtgcagtgccatgatctcagctcactgcaagctccacttcccaggctcacgccattctccagcctc

SEQ ID NO: 2064 - DNA, 120 bp, synthetic construct
  source 1..120: mol_type = other DNA
aggccaggactaaggcaaggagagggagggattcctcagtactcagcttttcacagaggctccaaaaggctaaggaatccagtaacgttttaacacaattttacaatttttttttttgag

SEQ ID NO: 2065 - DNA, 120 bp, synthetic construct
  source 1..120: mol_type = other DNA
ctggcctacagtttattctttggtggctcacacctgtaatctcagcactttgggaggccaaggtgggagaatggcttgagcccaggagttcaagtccagcctgggcaacatagcaagacc

SEQ ID NO: 2066 - DNA, 120 bp, synthetic construct
  source 1..120: mol_type = other DNA
aaataaagttttattggagccagtggaccagtgaggccgaatcttgcaggtgtaagatcacagtctatccttgaaaattttgatattttgttcattgggtggtttttcattaatttaaat

SEQ ID NO: 2067 - DNA, 120 bp, synthetic construct
  source 1..120: mol_type = other DNA
accagagggcgcccaaactgctttgagctgctgggaaatggtgctcctagacttttagcaaacaaacaaaaaaaaatggcacatcggcaaatttcagaccattctttttttttttttttt

SEQ ID NO: 2068 - DNA, 120 bp, synthetic construct
  source 1..120: mol_type = other DNA
gaccaaaatatgctcattttaataaaatgcacaagtaggttgacaagaatttcacctgcaaccttgtcaaccacctagaataaaagcctctgcagccctcccctaaagactcatcaatgt

SEQ ID NO: 2069 - DNA, 120 bp, synthetic construct
  source 1..120: mol_type = other DNA
cagggggctgtgtggagaggcgcgctctccctgcctcacccatgctcatcctaactcggttaccatcacatctcttttttctttttttcttaaattttaagaaaaaagaaatttaatttt

SEQ ID NO: 2070 - DNA, 120 bp, synthetic construct
  source 1..120: mol_type = other DNA
tcttcctttgcctgggggtcttccttctatggaagaactggcggcttaagaacatcaacagcatcaactttgacaaccccgtctatcagaagaccacagaggatgaggtccacatttgcc

SEQ ID NO: 2071 - DNA, 120 bp, synthetic construct
  source 1..120: mol_type = other DNA
ttgaggcaggagaatcacctgagctcagagttcaagaccagcctgggcagcacagcaagaccccatctctgcaaaaaataaaaatttagcccagtgtggtgatgagcgcctagttccagc

SEQ ID NO: 2072 - DNA, 120 bp, synthetic construct
  source 1..120: mol_type = other DNA
ttgttttattcaaagacagagaagaccaaagcattgcctgccagagctttgttttatatatttattcatctgggaggcagaacaggcttcggacagtgcccatgcaatggcttgggttgg

SEQ ID NO: 2073 - DNA, 120 bp, synthetic construct
  source 1..120: mol_type = other DNA
cacttccattcccgtggtctccttgcactttctcagttcagagttgtacactgtgtacatttggcatttgtgttattattttgcactgttttctgtcgtgtgtgttgggatgggatccca

SEQ ID NO: 2074 - DNA, 120 bp, synthetic construct
  source 1..120: mol_type = other DNA
atttcagaaatacaactataaaaaaataaataaatcctccagtctggatcgtttgacgggacttcaggttctttctgaaatcgccgtgttactgttgcactgatgtccggagagacagtg

SEQ ID NO: 2075 - DNA, 120 bp, synthetic construct
  source 1..120: mol_type = other DNA
gcaggaaaagtcttaaaggcctggggtgacttaaccgtttggggtgagggccttgagctttggatatgacaggagggaggagagaccaggatggactgggaacccaggcttccttcaggc

SEQ ID NO: 2076 - DNA, 120 bp, synthetic construct
  source 1..120: mol_type = other DNA
tcgaggtcagacttgaagaagaacttccataaagagttttataatagtgggtgggtgagccacagtggtaaggtgtccttttctggagtgacttgaaaaacaaaaatctgaactagtttg

SEQ ID NO: 2077 - DNA, 120 bp, synthetic construct
  source 1..120: mol_type = other DNA
gagaaagtttttgctttgtggaccaggtgactatctttcacataaatagaaatagcaaacagttgcataggtcttattgtgtgctaggcatttttgtggggccaccagctggctgagcct

SEQ ID NO: 2078 - DNA, 120 bp, synthetic construct
  source 1..120: mol_type = other DNA
ggatgtgccaggcactggaggagatttattctgacccatcataggtcacttgaagtcacttctaggtctagactcgctgaaataaggtcattctaaacaaacagcaaataattctaaaaa

SEQ ID NO: 2079 - DNA, 120 bp, synthetic construct
  source 1..120: mol_type = other DNA
taaagaggtcatctcccccatcttcatacttctctcaggatgccttctctatctgtcctagttagctgagccttctctcccatgtataatgagattttcccattttcttttctttccttt

SEQ ID NO: 2080 - DNA, 120 bp, synthetic construct
  source 1..120: mol_type = other DNA
ttttccttaataaccctttcttgtgggaagtctgtgttgctatctaaccaccgtcctttctgctaagagtccagacagttttctctcctttgatagaatgcactcaacacattaattaat

SEQ ID NO: 2081 - DNA, 120 bp, synthetic construct
  source 1..120: mol_type = other DNA
ttttattgattaatttatttgtttgtttgtttattttgagccagggtcttgctctgtcgtccaggctataatactgcggcatgatcttgactcactgaaacttcgaactcccaggctcaa

SEQ ID NO: 2082 - DNA, 120 bp, synthetic construct
  source 1..120: mol_type = other DNA
gtgcaaggtactaacgagattctgcaatgcaagatgcagtctggcacagatgaattgacagcatacagtatagaattagaatgtcagagctggactagaagttgaatgaatgaatgagta

SEQ ID NO: 2083 - DNA, 120 bp, synthetic construct
  source 1..120: mol_type = other DNA
gtttctgggagacactgttcagaggacaggctgaggaaacaggcatttgagtccaactgacctgggtctgaagggaaataataatatctaccttgtaaggatttaaaacatttcatctat

SEQ ID NO: 2084 - DNA, 120 bp, synthetic construct
  source 1..120: mol_type = other DNA
agtagtcaagtagataatgtactttctggtagtgatcatcactgcaaagaaagataagccaggatatgggggcagaaaggtttgaggtggctaatttagaaaggatggtcatgctatctg

SEQ ID NO: 2085 - DNA, 120 bp, synthetic construct
  source 1..120: mol_type = other DNA
atggactttctttcagggctttggcctgtgctatcatcatctgctattccctgacccttcacctggctaatgtttgttcatcttgcaggactcaatttatatgtcaattttttttttttt

SEQ ID NO: 2086 - DNA, 120 bp, synthetic construct
  source 1..120: mol_type = other DNA
ctggatatcccttacaattcatcatgctctattgtaactgtatgtttacacttctgtttccccagtacacgggaagctctttgagaacagggattggatctagtctactcctgtattctc

SEQ ID NO: 2087 - DNA, 120 bp, synthetic construct
  source 1..120: mol_type = other DNA
ttctgagaggccttcctgaccatgctgatggtcttacatatacccccaagtctgctgtggcactcagtatttacccatttgttagcacttagctcctagtgctttctttttttttgatgg

SEQ ID NO: 2088 - DNA, 120 bp, synthetic construct
  source 1..120: mol_type = other DNA
ctgagagtgatgctgagtctagtctcagcttttatgttgctttgcttttgacctctgacccaacacatgcctcctttccctctgaagtcttgattttctccctggcttttctccaccttc

SEQ ID NO: 2089 - DNA, 120 bp, synthetic construct
  source 1..120: mol_type = other DNA
ttggaggcactcatcacacattaattactttatccatgaagatgaaagctgtctttggcacccagatggtactgagtaaatatctgtgaatgaatgaatgatgtggaatgtctcctctgg

SEQ ID NO: 2090 - DNA, 120 bp, synthetic construct
  source 1..120: mol_type = other DNA
tcatcatctattcccttgtagtagaagggatggaggttggaaagaccttagaaatcttccagtctggttctcttgttttgaaggtgtgaaagctgaggctcatagaaggggagcaatttt

SEQ ID NO: 2091 - DNA, 120 bp, synthetic construct
  source 1..120: mol_type = other DNA
atgggaaagacttctcacatatgtatgttaggggtacaagatctgtggtcaaaatgggctgtgtgatcccagacaaatcacttaccttttctgagccccagtggtaactcaggataccct

SEQ ID NO: 2092 - DNA, 120 bp, synthetic construct
  source 1..120: mol_type = other DNA
aaaaaaaagaaaaatgcccatgtgtcaccccagatcaattactaatcaaaatatccaagactttgggcatttgcagttttgaaagcccccttcctccaagcaatgttgatgcccagtgag

SEQ ID NO: 2093 - DNA, 120 bp, synthetic construct
  source 1..120: mol_type = other DNA
tttagctgagcctggatgatgagtaggagttgatcagagggtaaagtaaatgccatgtctggaaaaattagtcagaaagcaatgagagaggttgagattgctggaatttagataaggcta

SEQ ID NO: 2094 - DNA, 120 bp, synthetic construct
  source 1..120: mol_type = other DNA
ttgggagacatgaactccatctgagatatccaaggagtgatgatgagttatggatgcttaggaatcactcctggtctgggaatacttggggtcgtcttctaagaattctcaagagtggaa

SEQ ID NO: 2095 - DNA, 120 bp, synthetic construct
  source 1..120: mol_type = other DNA
cttgaattaactcttgggagaaaaatcacagaaatcaggaaaggggggccatggggagggggcagtgagtcacgtttccatgtgtatttttcaaactttccgatgggagtttggaaaaca

SEQ ID NO: 2096 - DNA, 120 bp, synthetic construct
  source 1..120: mol_type = other DNA
ctgccctttcgaagcctctagtggagtcactcctttccttccccgaacccggcctcagttcctgggacatcctggctccattcttcagcacaccctccctcatcatatccacactccttg

SEQ ID NO: 2097 - DNA, 120 bp, synthetic construct
  source 1..120: mol_type = other DNA
gctcagttagccccaacatctctttcctttcctccaacaggaaacacaccttccacctctaaaccttagctccaccaagctccaaggggagagaagagagggcatatgggaatgttttgc

SEQ ID NO: 2098 - DNA, 120 bp, synthetic construct
  source 1..120: mol_type = other DNA
tttgcaaaaagatcattttgtatttcttaaagagggcctccccacaaaattgtgtgcactttaggtaggatgaacaactgtccctattttagcattaaaagtcccttatctggccaggca

SEQ ID NO: 2099 - DNA, 120 bp, synthetic construct
  source 1..120: mol_type = other DNA
caatcagttagcctgcctaagcctctgtctcctcagctgtaatatgcagataatggtgcttgcctgtgcacctcaaagaaatttgagaaggctaaggtagtaaccttgattgtgaaaagc

SEQ ID NO: 2100 - DNA, 120 bp, synthetic construct
  source 1..120: mol_type = other DNA
agctccctaagtagagaagctctgcctctgtcatttagtagattgtgctttttgggtgagatttcatttgagtgagggggatctctgactttacaaatagctgtcattcacttgctccat

SEQ ID NO: 2101 - DNA, 120 bp, synthetic construct
  source 1..120: mol_type = other DNA
gatatttttgattgtcataactgggaatggaagtgctactggcctaaagtcgggagaggctagggatgttacaaaccatctcagagtacaaagaaccttctctgacaacagagaattatc

SEQ ID NO: 2102 - DNA, 120 bp, synthetic construct
  source 1..120: mol_type = other DNA
cggcctagttttaggaaagtcagcctcatctgcaaagcagggaaataatttccaacccatgaggttgttgtatggacccagttgagaatgtatgaaaacatgcaacaactataaagattg

SEQ ID NO: 2103 - DNA, 120 bp, synthetic construct
  source 1..120: mol_type = other DNA
ttttacagatgatgaaactaacgctggaaaaacttgtccagagtcactgacctgaaaagtggcagggccagatgcatttgtttatccaagaaaccctgagagggctgggcatggtggctg

SEQ ID NO: 2104 - DNA, 120 bp, synthetic construct
  source 1..120: mol_type = other DNA
gcagacttatgacatctggagtccagagttaggattgaatattcaggataaagtttcactttgaagttcagatttaggattgaggccattttgatggtggtcgcagggaacctttagaaa

SEQ ID NO: 2105 - DNA, 120 bp, synthetic construct
  source 1..120: mol_type = other DNA
gcttcagaacccagaactgagggcctgtccagccctgctttccttgtgtttgagggaagccctgatatcttggagctgtacaaggtagcaacataatttgatttccctggttgctcatcg

SEQ ID NO: 2106 - DNA, 120 bp, synthetic construct
  source 1..120: mol_type = other DNA
gaaatctgggacctagtgtcttggcaacgtaatgaatgcatgcacagctctggtatctgttttaaattatccattaaaataagtacagttctgggggaaaaaaataagttgactgggtgc

SEQ ID NO: 2107 - DNA, 120 bp, synthetic construct
  source 1..120: mol_type = other DNA
cgccgcacctacaccagccaacccagatcccgaggtccgacagcgcccggcccagatccccacgcctgccaggagcaagccgagagccagccggccggcgcactccgactccgagcagtc

SEQ ID NO: 2108 - DNA, 120 bp, synthetic construct
  source 1..120: mol_type = other DNA
acacatcggagtggcagaaagggtcctgttagaactttgttagcgggcttggcactgtgctagctttgcccaagctggctctgaacacatgatgcccactaagacataactctcaagttg

SEQ ID NO: 2109 - DNA, 120 bp, synthetic construct
  source 1..120: mol_type = other DNA
cactaagggtgcttggagatccgtaaagggctgttggctttgacttcttctctctcttttatcatctactccaaacttctgctcttcctagaaccctttgctaggtgtggttttgttgcc

SEQ ID NO: 2110 - DNA, 120 bp, synthetic construct
  source 1..120: mol_type = other DNA
acagctaatgtttttgtattattttgtagagatggggttttgccatgttgcccacagtcttgaactcctgggttcattctgctgaaagagaccacacctgtccttttctttatttttatt

SEQ ID NO: 2111 - DNA, 120 bp, synthetic construct
  source 1..120: mol_type = other DNA
tcccaccaaagcctagagagaaggtgttgtctggtttaatgtttaattagagctcagagttcagggccagatttggagttgggatggaaagttgtttttaagaccctgtagcaatttttg

SEQ ID NO: 2112 - DNA, 120 bp, synthetic construct
  source 1..120: mol_type = other DNA
tctggacacatagctctctctggacaggtaacatgcacaagtaattagaatccagagttgagttcagagttatggattgggctgcaggatagtgccagggtctgtgccttcccatgtgaa

SEQ ID NO: 2113 - DNA, 120 bp, synthetic construct
  source 1..120: mol_type = other DNA
attaggttaatggggttggagacctttgaggatgcatgggccctgggctttatctgagggtatctcctggtgttacctctccaaccctccaccaccaaatccattctttttttttttttt

SEQ ID NO: 2114 - DNA, 120 bp, synthetic construct
  source 1..120: mol_type = other DNA
attcaaagggaaagaagaagggtgcagctaaacctggggggtgagaagtacttaaaaagcccaagagaaacaaaagagagaataattcctcactaggaccccctattgccttcccactat

SEQ ID NO: 2115 - DNA, 120 bp, synthetic construct
  source 1..120: mol_type = other DNA
tatttccccgtgaaagtttgttagaaatggttaaattgtgacattaccctcttggcaaatgttttgttttcattgctactaggaaagggcaactcgttttcgatgcctctcccttctgga

SEQ ID NO: 2116 - DNA, 120 bp, synthetic construct
  source 1..120: mol_type = other DNA
tcaggacattctactatcttcttaggccatccctccctcctccaggcactacttcttttgctctatccccaagccccacccctgcatttttgtgacaacaccggaatgatttctagagag

SEQ ID NO: 2117 - DNA, 120 bp, synthetic construct
  source 1..120: mol_type = other DNA
gacagaggcagacacgcttcccagactgtcttactgggtctctctgtgttattctctgcagtgtctgtgtgtatcgtgccattttctatgttttgcaccaatctgctgtgagtgtcctca

SEQ ID NO: 2118 - DNA, 120 bp, synthetic construct
  source 1..120: mol_type = other DNA
ttgcagggagccgagatcgcgccactctactctagcctgggcaacacagtgagactctgtctcaaaaataataataataggggctgggcgcggtggctcatgactgtaatcccagcattt

SEQ ID NO: 2119 - DNA, 120 bp, synthetic construct
  source 1..120: mol_type = other DNA
catttgcaagtgccaactctcatttctaccttattcttttcctctctgttcccctccccaccccctctcttccctctttctgagatcagatttgccagtgatgggaagagttagaaacag

SEQ ID NO: 2120 - DNA, 120 bp, synthetic construct
  source 1..120: mol_type = other DNA
tctctgctcgtggtttttctcatctgcagggtgtgtcttagtcctttaatctcctctctttgcagtgctagtcaaaacctccaccagggaaagacaaataacccccttactgtttttttt

SEQ ID NO: 2121 - DNA, 120 bp, synthetic construct
  source 1..120: mol_type = other DNA
tttcctcatctataaaagggagagggttgagctgaatcaactctaagctccttctagttctctaaattctgagagcctcctagtacagccagcagcagccattagccttcagggtagaga

SEQ ID NO: 2122 - DNA, 120 bp, synthetic construct
  source 1..120: mol_type = other DNA
ccctgggtctgctgctttctctcaccctatatttgtgaagcaattgtaacatctagaaagttcttgggttctctggaggtttttaagaaaataggacctttctatttctccagtccacta

SEQ ID NO: 2123 - DNA, 120 bp, synthetic construct
  source 1..120: mol_type = other DNA
tgtcacctgatttcagagccattcacctgtcctagagtcattttacccactgaggtcacatcttatcctaatttggctgccaatgggatctaccacagtgaatttaaaataatccaggag

SEQ ID NO: 2124 - DNA, 120 bp, synthetic construct
  source 1..120: mol_type = other DNA
atttctctggggaaaaggaggactggagttgatcatttattgaggccatcagaagcggatggctaattacatatgggacatgtgttaataatgctttgtgtatatagagtggcctttact

SEQ ID NO: 2125 - DNA, 120 bp, synthetic construct
  source 1..120: mol_type = other DNA
taataaataaaagctaagaatcaaagaagcagtttattcctaatttcacagtctcatctgttcatagtggggccaggattagagtcagtggccaagcttccatcctgggttctttccctt

SEQ ID NO: 2126 - DNA, 120 bp, synthetic construct
  source 1..120: mol_type = other DNA
tacttcaggcttcagcagtactgatctttccaaagaccccagaacacacatgccttcatacctctgtgcctgtacatgcttgtttctgcccttgaaatcatgacagtagctctctgtagg

SEQ ID NO: 2127 - DNA, 120 bp, synthetic construct
  source 1..120: mol_type = other DNA
aggaactaattctgattttggtttctgtgtccttcctccaacccttccaggagctgcgtgagaccaagcgccgtcatgagacccgactggtggagattgacaatgggaagcagcgtgagt

SEQ ID NO: 2128 - DNA, 120 bp, synthetic construct
  source 1..120: mol_type = other DNA
ttttcccattcgaaaatggaggctgttcttaatctccctaactcagagttgccacaggactctgcaatgtgaggtgttaaaagcatcagtatttttctagttggctgtgctatttgtgac

SEQ ID NO: 2129 - DNA, 120 bp, synthetic construct
  source 1..120: mol_type = other DNA
catctgtaaaatggggatgaatactgatccctaagtctttgagttgtcaggaagatgaaagataaggtatccgtgtgcctggtgctgcgtatgtgtccacagatcatggctattatcccc

SEQ ID NO: 2130 - DNA, 120 bp, synthetic construct
  source 1..120: mol_type = other DNA
gccaaaaatcttttcattaaagaatgttttggaactttactcgctggcctggcctttcttctctctcctccctataccttgaacagggaacccaggtgtctgggtgccctactctggtaa

SEQ ID NO: 2131 - DNA, 120 bp, synthetic construct
  source 1..120: mol_type = other DNA
caagcttgctcccgttctctcttcttttcctcttaagctcagagtagctagaacagagtcagagtcactgctctggttctctgtccccaagtcttcctgagccttctccccttttatgtc

SEQ ID NO: 2132 - DNA, 120 bp, synthetic construct
  source 1..120: mol_type = other DNA
aagcaaaaaaaaaaaaaagcatctatctcatctatctcaatcctaatttctcctcccttccttttccctgcttccaggaaactccacatctgccttaaaaccaaagagggcttcctctag

SEQ ID NO: 2133 - DNA, 120 bp, synthetic construct
  source 1..120: mol_type = other DNA
tagctcatgagctgaagaaagacttttattcacactgagatatgagggaaaatgggaggttatagtctgggaggaagcagttgttttttgagagtggtggtagatgatattaaaggagtg

SEQ ID NO: 2134 - DNA, 120 bp, synthetic construct
  source 1..120: mol_type = other DNA
ttctctaaggttgggactgtctacctggagtgaggtagtcagtcccaaggagctttttgaccatgcttttcatggttttgtttattcatgtctgctttcccatgaaaattcattttttct

SEQ ID NO: 2135 - DNA, 120 bp, synthetic construct
  source 1..120: mol_type = other DNA
gataatttgagagagagaatcactgggagaatctaatttggattgggaagttagggaaggcttcttacagaaagtgacatttaagctgaatctgtaggtggaataggggtggctaactta

SEQ ID NO: 2136 - DNA, 120 bp, synthetic construct
  source 1..120: mol_type = other DNA
ccatcctctttacagaccttccctatggatttcctctgagcttttgcatttctaatgtggaatttctctgcttactgccttgtacttttgatccagctgaactaaactaactcaaatgtg

SEQ ID NO: 2137 - DNA, 120 bp, synthetic construct
  source 1..120: mol_type = other DNA
catctgtctgcccactgcgatattttcagatacttcagtttgtaaacacatactgactacctactgtttctccaaagcacagttctgatcatttctttcctcatctcaaaaaccttcagg

SEQ ID NO: 2138 - DNA, 120 bp, synthetic construct
  source 1..120: mol_type = other DNA
ataaacaattgtggaattgactacctagcaaagggaatggttctctttcctttgtttctgtaatctgcaagcacggggaacatcttgacaatctgtgctttttgtttccttccctagtca

SEQ ID NO: 2139 - DNA, 120 bp, synthetic construct
  source 1..120: mol_type = other DNA
acccttaaccctttgccctataagctgatctaatttctcgctcatttattgaggactattgtccaaacctgttaagtctgtatcgtgatggttacaaattttccaacttcaccactcctt

SEQ ID NO: 2140 - DNA, 120 bp, synthetic construct
  source 1..120: mol_type = other DNA
gcctgtgggctatgaattttcaatccttgactcaagtcctcaatagttatgttacagttggtaccatatcagctaacaatttattgaacagtgtgctgaaagcttaccatgcattctctc

SEQ ID NO: 2141 - DNA, 120 bp, synthetic construct
  source 1..120: mol_type = other DNA
caaatatttgttgaatcagtgattgagttaagctaggaaatctcttcagagaatgtatatctccttggttctataccgagaaaatagcagcccctaacctcctggcctgtaggaagtcct

SEQ ID NO: 2142 - DNA, 120 bp, synthetic construct
  source 1..120: mol_type = other DNA
tgttttgtttgtttggaatggaaaaaaacagtgccacaaagaaatctttgctcttctcatgacctccggcaacttcctgaaactcctccactttagaaaactaatgtaagctggtgggta

SEQ ID NO: 2143 - DNA, 120 bp, synthetic construct
  source 1..120: mol_type = other DNA
cagaggaacagaactgcacattgtctcattcattctgtcttaacaataacctctcattcttgccttcctgggcagggtgtcttgtgatgaatgtggatggggaagataataaagaattag

SEQ ID NO: 2144 - DNA, 120 bp, synthetic construct
  source 1..120: mol_type = other DNA
aggaagtgtcagcgccgcttctggggcaatgtcacataggaagagaggagcctttaaagggcctttcattggaagcaatctaaattaaatatcaacagtagagaatgtttaaaaaaaatt

SEQ ID NO: 2145 - DNA, 120 bp, synthetic construct
  source 1..120: mol_type = other DNA
tacattaaaaatatagatgatgatatgcatagatagaaccagaaagatacatgtagtagttatttctggacgatggggttaaaagtgattttataaactttctgggctgggcacggtgtc

SEQ ID NO: 2146 - DNA, 120 bp, synthetic construct
  source 1..120: mol_type = other DNA
gtgaacttttaaacatttcttagacttcccaataatgtattttgctttgtgcctaggaggtggttacttctaggtgcagaaaacacttgttatgaacaaagcctactggctctgacccat

SEQ ID NO: 2147 - DNA, 120 bp, synthetic construct
  source 1..120: mol_type = other DNA
gcctcccgagtagctgggactacaggcatacaggcgggagccaccacacccggctaatttttgtatttttagtagagattgggttttaccatgttggccaagttggtctcgaactcctga

SEQ ID NO: 2148 - DNA, 120 bp, synthetic construct
  source 1..120: mol_type = other DNA
aaatatttttccttttaatttttaagtctagtttgtatgtttccttacctttcagtgaggacaccatatctaggcctttgtctcctgggcatttttcctggccaggtgctgttggcacct

SEQ ID NO: 2149 - DNA, 120 bp, synthetic construct
  source 1..120: mol_type = other DNA
ttcctagtcatttcccatattcatgtgccttacccatcccccacccctgccatctctaagcgtaattcttgctatttgtacctgttgcatttgttttattcttattggtttctgatttgt

SEQ ID NO: 2150 - DNA, 120 bp, synthetic construct
  source 1..120: mol_type = other DNA
cacctaagagtcccaagtaaactccttataaggctgagaggcaatcgctgatatccctgctttgaacttgaccctcttacaagatttacatactctttaatgatggaatgataaaagtgg

SEQ ID NO: 2151 - DNA, 120 bp, synthetic construct
  source 1..120: mol_type = other DNA
ctcagcaggactgggtctctgtattcttttattagctttctacagattctgatgcacacattttgggtttgaagatccatgatatagaagatagtttcccactttgctggtaattggcac

SEQ ID NO: 2152 - DNA, 120 bp, synthetic construct
  source 1..120: mol_type = other DNA
agggtcagtagtgttgcgttcggcacgattctatcttaggagctgggaaagggagtggataaccaggtgactctttttctttcttttaaaaaatgtgctgttaagttttgtatcagctaa

SEQ ID NO: 2153 - DNA, 120 bp, synthetic construct
  source 1..120: mol_type = other DNA
attctcacggcgagtcagtgcagctcctcttatgtttaccgcaattaaggtgagcatgagagcagcctgcctctcttctgttctcccagccatggaagcaggctccattaaaaatgtgtt

SEQ ID NO: 2154 - DNA, 120 bp, synthetic construct
  source 1..120: mol_type = other DNA
tatattcaacaagtgggaggagaggttcccctcaacttttgagggagtgggggatcattggaaaggcctggaatctagtgggaatttggtgttttgacatgaatgctctctgactttgtt

SEQ ID NO: 2155 - DNA, 120 bp, synthetic construct
  source 1..120: mol_type = other DNA
caaagctgtcttactgcctatgtgtaaatgggtttgcttctacacaagttgattaatagtctggcttaagcatctggtttaaccattggtttgaaagtataggggaggaaaaaaccacga

SEQ ID NO: 2156 - DNA, 120 bp, synthetic construct
  source 1..120: mol_type = other DNA
gtgaactcatagcaagcactattttttctcagttcttaagaaaggagacctcctttctaggttatataatctagatcattctgtgaggataaggtggaggcagggatctagcatttgcag

SEQ ID NO: 2157 - DNA, 120 bp, synthetic construct
  source 1..120: mol_type = other DNA
gcctttggctgctaaaaatgctggtaggatcataatgcatgcagcttctgcagagacttctttggaatacctcagtaagtctgacttcatgttatatctatactgagtaagatggaaacc

SEQ ID NO: 2158 - DNA, 120 bp, synthetic construct
  source 1..120: mol_type = other DNA
agtctgtgtgtgtataccatgacagagggagaagctgaaataaaatgtgccccgagaagaattagggctgggaggatggaacagcaagaatgatcctaaatcaagtataataattttttg

SEQ ID NO: 2159 - DNA, 120 bp, synthetic construct
  source 1..120: mol_type = other DNA
atgaattgatatggctgttatttcctctgatgtagattggaccatgtggaggtagggagaatagaatgtcatgttctttcactgaagccatgccgtgagcaactctatccaaatagaatg

SEQ ID NO: 2160 - DNA, 120 bp, synthetic construct
  source 1..120: mol_type = other DNA
gctgaggggagagcaaaggaaatgagataagtctgcataggagacttcagctgtaatagttaacaacaacaaagacctgaagtgtatatggctaattctaagctaggtcttagatacgtg

SEQ ID NO: 2161 - DNA, 120 bp, synthetic construct
  source 1..120: mol_type = other DNA
attgcttcattatcttctggcttccaatgtcattgttaataaggctgataatagtaaccagagttcattgaggactgtcatgctcaatggtaaggcagctatagttgagagctggagagt

SEQ ID NO: 2162 - DNA, 120 bp, synthetic construct
  source 1..120: mol_type = other DNA
taactgcatgctgttctctgttccaagtttcaaactccaccaaaatctgcctgccctttttcagtcagctgaaccctcaggaagctgtttttttgtattttgttcagtgtacagctgtca

SEQ ID NO: 2163 - DNA, 120 bp, synthetic construct
  source 1..120: mol_type = other DNA
actgtgctgtactacctggcagtgccattgtgattcttaattctctgtatgtttttttcttctgtctctctttttctatccccatcctgtccttctttagcggcttggaatctttattct

SEQ ID NO: 2164 - DNA, 120 bp, synthetic construct
  source 1..120: mol_type = other DNA
tttgttttatgtgtctcccagattggagtgcagtgacacgatcatggttcactgttgcctcgactttccaggctcaagtgatcatcctcagcctcctgagtagctgtgactacaggcatc

SEQ ID NO: 2165 - DNA, 120 bp, synthetic construct
  source 1..120: mol_type = other DNA
atggttcgtttccatctcttaatccttcttcttatactttgagagattctcttagtatttatcttctaatcctcttgtttttatttttgtaatcctatttttagttttcctccctgacta

SEQ ID NO: 2166 - DNA, 120 bp, synthetic construct
  source 1..120: mol_type = other DNA
gatttgagtaggggacttaaaggtctgattcttatataagtttgcaaccaacaaacttggttcagacgcattccactttgtggaggttccctgtatctctaatcctggagccttttattg

SEQ ID NO: 2167 - DNA, 120 bp, synthetic construct
  source 1..120: mol_type = other DNA
tttccaaaagttaattagttggcatcttttcattcatagttgtgatggttcacaccttaatctgagtgaactttttctctgccacctaggatggtcctggtcttgtgtacgtccactcac

SEQ ID NO: 2168 - DNA, 120 bp, synthetic construct
  source 1..120: mol_type = other DNA
accaaacttttattacctgctgcactgtgtaaacatttagtacctacatttaaatgagttgtttaggcagagctggctaattgcattgagaaggcagcccaacatttatgtctggacccc

SEQ ID NO: 2169 - DNA, 120 bp, synthetic construct
  source 1..120: mol_type = other DNA
cccttccatttgctttgggagaagtaggacccatatctgaagtatgaattcctatagcccaaggaaacagaacaaatccatgggcttaggcactggaaaaagtaaattagtctgcttaaa

SEQ ID NO: 2170 - DNA, 120 bp, synthetic construct
  source 1..120: mol_type = other DNA
tcaaagtaaaagattttcttatatcagccacagactgggcagagttgtcatttggtaattagaatgaatggcttctgctttcaggcctgctagtgacttgctaagagaccttgggtaaat

SEQ ID NO: 2171 - DNA, 120 bp, synthetic construct
  source 1..120: mol_type = other DNA
tgaaatgagctctgtctatcctggattttgagtgcccagtgtggaacctcatgccgtggggcatgcgaatgcagagtaagatttagtttcattggtttagtgtcattctttgcttcttca

SEQ ID NO: 2172 - DNA, 120 bp, synthetic construct
  source 1..120: mol_type = other DNA
ttggaatgagatccctgggtccaaagagaagctgttcttcggacttagttggataatgtaactgctcaaatgtaaaagatgagattcttttctgcccctccccatacttttttttcctgt

SEQ ID NO: 2173 - DNA, 120 bp, synthetic construct
  source 1..120: mol_type = other DNA
cagacaggagtctgtaaagaagggaagtgtgttgaaaggagggcaaaatactgactttgggagtcaaaaggggatgcagtgtagaaagatagtcacaatatattgtgatcatatcaaagc

SEQ ID NO: 2174 - DNA, 120 bp, synthetic construct
  source 1..120: mol_type = other DNA
actagctggcatctgaaccctgccctgctcataaccacagtaggtggccattaatccaacgaaaaattgtttagctcacttgtagtaaaagaaatgctaatcaaaagagtggcactattt

SEQ ID NO: 2175 - DNA, 120 bp, synthetic construct
  source 1..120: mol_type = other DNA
ggtaaatgtacaaatacattttttaaaaggcattgatcatattgctaactaaaaagcaaaaagaatgctctacatagtgcagcacgtgggtctaggccatgccctgacccagcaagtgac

SEQ ID NO: 2176 - DNA, 120 bp, synthetic construct
  source 1..120: mol_type = other DNA
agaggtagaaaggatttaaaaggtggattccagtgtgcagttatcaccctataatcgtatctgctttcatcttgttgtgattatgtgtgctggtgtccaaattcaggatatctggaagct

SEQ ID NO: 2177 - DNA, 120 bp, synthetic construct
  source 1..120: mol_type = other DNA
cctgcagagcagggctactccacagggattgtgctgagagtagtctataaattcttaaagcagtttatcagtatctattaaaagccttaacaatgtttattccctttaaccgaataattc

SEQ ID NO: 2178 - DNA, 120 bp, synthetic construct
  source 1..120: mol_type = other DNA
cttttgtccctggcctctaaatgtcacctggccactgtccctcacctagtgctcaaccttggaaacccttttcctctgtgtctctttttaaagaaatttaataaattcttattgtctgtt

SEQ ID NO: 2179 - DNA, 120 bp, synthetic construct
  source 1..120: mol_type = other DNA
ggacttagtgtacatcctatatgtatatatatttttaatcgatttctatgcagatgtttctgcacacctgtccgtgatttgtccctccttcccacttgataactgtgtggcccacagaat

SEQ ID NO: 2180 - DNA, 120 bp, synthetic construct
  source 1..120: mol_type = other DNA
gagactgtaatcatgacaactattatagagtggattaaatgattaagctcaaatctgagatggcttatgtgttagaaaaagggaaataaaataagtcctctcacctttgttacccaccct

SEQ ID NO: 2181 - DNA, 120 bp, synthetic construct
  source 1..120: mol_type = other DNA
gggctttaaataacactgctgggaaaaccatgcctcctctagccacatggaggatggggggggacgtgtgattgcaccagtggtctctgaattggtgtggctacatttgtagatgtgtgc

SEQ ID NO: 2182 - DNA, 120 bp, synthetic construct
  source 1..120: mol_type = other DNA
ctactcttactaagccctacttccaccagtgtaaacatggcctgctgctaccatctaggtcactgccttattttctcatctgtgtcattgtaaccttccttttttgtttaaaaaaatttt

SEQ ID NO: 2183 - DNA, 120 bp, synthetic construct
  source 1..120: mol_type = other DNA
gacacatattgtcatctttgatagatacctctgtaactgctccccagtgtggttgtgtaagatgaatcgatccatagtcagaccttttcctttttgccaatttgatgggtgtgaagtggt

SEQ ID NO: 2184 - DNA, 120 bp, synthetic construct
  source 1..120: mol_type = other DNA
caaatctatttgtcttttctgtcattcaggggtttgtttttgggggagggtaggtgaggattaacttaaggaatctctaccattttttgagggaagcagacaaaaggaggcacacattaa

SEQ ID NO: 2185 - DNA, 120 bp, synthetic construct
  source 1..120: mol_type = other DNA
tctaagttagtttccattttatttttcttgccttgtattgttgggtaagatccccacatagtgctgactaaaggtagtagagggcattcgtctcttgctcctgattataatgggaaggct

SEQ ID NO: 2186 - DNA, 120 bp, synthetic construct
  source 1..120: mol_type = other DNA
tgtacctggcccccgcactagcccctttttttttttcagtccttaaaaggtttgtatagatcagagattatctgtttctttgtaggtttgatactacttgcctgagaaaccatctaggtc

SEQ ID NO: 2187 - DNA, 120 bp, synthetic construct
  source 1..120: mol_type = other DNA
agaaaatgaaaaacaatcatatcactattaatattttggtatgggtacaatttttgctatttatatacatcacaggtacaaatacactttttaaaaagtttgagaccaggtgtggtggct

SEQ ID NO: 2188 - DNA, 120 bp, synthetic construct
  source 1..120: mol_type = other DNA
tttgtgtgtatctctgattccttatactaaattcttagaagtgcctttcatggagcaaaggatgtgttatgttttcaaggaccaccggggtgattaactggcaccttttcttctctttgc

SEQ ID NO: 2189 - DNA, 120 bp, synthetic construct
  source 1..120: mol_type = other DNA
gttgtcttttctcaccaagagtattaacactactaagtctttcaccttaacttatgactcaggatttattcacgtcctgcccactctaggctcacaggaataaaatcaagtgctagacac

SEQ ID NO: 2190 - DNA, 120 bp, synthetic construct
  source 1..120: mol_type = other DNA
ggtattgtgagattaattgcagtaataattaatgtggttaatagaagggattgcttcagtctgaactggctttttaccaagaaggagggatctgagttgggccccaaagggtaggtaaag

SEQ ID NO: 2191 - DNA, 120 bp, synthetic construct
  source 1..120: mol_type = other DNA
tataatatgatttaagacaccattgcaactggtagaaaacttgacccaaactggcttttgaagcaaaagaggcaatctgttgactcaaactgcagagtccaggaattaggctggtcctat

SEQ ID NO: 2192 - DNA, 120 bp, synthetic construct
  source 1..120: mol_type = other DNA
ggattttcagttatatgagacaatgtgagttggacttactattacctgcaactgaaagcaacctaatacagtcatgtcacttaatgacgaggatacaccctgagaaaagcagtcaggtga

SEQ ID NO: 2193 - DNA, 120 bp, synthetic construct
  source 1..120: mol_type = other DNA
caagaacaaaaccaggcagggcagggacagggcgctcatcattagcccagcttaatggaaactttcccttgccctctgctccccctgaggaaatacagcgcttacaaaataacaataaga

SEQ ID NO: 2194 - DNA, 120 bp, synthetic construct
  source 1..120: mol_type = other DNA
agtacacagagttcccacagacccattagtcagttttccctattaacatcttccactaataggtggcatttgccataatgaatgaaccaattttgatacattactaaagaaagtccatac

SEQ ID NO: 2195 - DNA, 120 bp, synthetic construct
  source 1..120: mol_type = other DNA
aacagaagtggggagttatgctccatatgtttgaaggcagagcacctgcataaactacccggaattctacatgggagatgtttattctcaatttattcaaccatttctttcactatggac

SEQ ID NO: 2196 - DNA, 120 bp, synthetic construct
  source 1..120: mol_type = other DNA
ccatctcctgaactcctctggcattcagagcccagacgtgcatttgtgctaaatgcctaacctcatctctaagcttcttcaaggcaaggcccagcctttataagctgcctagattgcccc

SEQ ID NO: 2197 - DNA, 120 bp, synthetic construct
  source 1..120: mol_type = other DNA
ttggatccttgatttttcttcttcttcttctctagcctttaatttactggaaaaaattaatagcagagaccgtgctacataattttgcccagagcaggctgtgggtatacaagagcccca

SEQ ID NO: 2198 - DNA, 120 bp, synthetic construct
  source 1..120: mol_type = other DNA
cctctgcgcccagcttcattccacattttaacaaaactaaaaaatggctgcactacccaggacatctgatggcagacacatctaagatttgacagtatttattgagtattaaatgccagg

SEQ ID NO: 2199 - DNA, 120 bp, synthetic construct
  source 1..120: mol_type = other DNA
agcagtgtagacattgacaaactcttttttcctacctgggtttcctcttcaggctagagaaacagttttgaagaaaggaatgctctagtttcatgttcccagaggcttttgagaatgcat

SEQ ID NO: 2200 - DNA, 120 bp, synthetic construct
  source 1..120: mol_type = other DNA
gcataaaacacacatgatactatcagaaacagaattctgcttacttcagtcccagttcagggctctggctcctattgtctactcagtcttgttttttaaacctgtctcagctaagatgac

SEQ ID NO: 2201 - DNA, 120 bp, synthetic construct
  source 1..120: mol_type = other DNA
atgggatcttgctttcccagcatttttcttttccttaatgtaatcatggcctttggaggcttgatcatgtttcaaattgacaagacccatctgccccagctcccattaaacaaaaaaaga

SEQ ID NO: 2202 - DNA, 120 bp, synthetic construct
  source 1..120: mol_type = other DNA
acttgcaagacaattcttcggcagtatgtacaacatactttttatttccatggaatggaatcaaacacgaactgagactacagagtatacactagaaatcagcaaatgccaggaacggag

SEQ ID NO: 2203 - DNA, 120 bp, synthetic construct
  source 1..120: mol_type = other DNA
ggtttaaaaattcctgttggggacagggaatccctgaagggaatacattaaaaaatatacagtggaaatggggaaggagaacgagagctgttgtccaagagcttctacgtaaaaataaaa

SEQ ID NO: 2204 - DNA, 120 bp, synthetic construct
  source 1..120: mol_type = other DNA
ttattttattttatttgaggttttctaacccaggtggttacttgcatttccttttacttgcatcttccatgagggaggaagagaagtgaattccccaggaacaaagaacttgatcagctc

SEQ ID NO: 2205 - DNA, 120 bp, synthetic construct
  source 1..120: mol_type = other DNA
ggtgtgtgtggtttttccttcgcatatactggatatattctgtggctttgtctaggatttgggcccgggatgcctgtggcaatatgagaaaaagcacaggggacaaaataaaaacccaat

SEQ ID NO: 2206 - DNA, 120 bp, synthetic construct
  source 1..120: mol_type = other DNA
attaaaatactacttaaatgaaagctttaggtcactaattctgctagggcctggcttgagacaggaatgggtacaatgtgtttcatcaagacccaagattccagccaaactctgaaacca

SEQ ID NO: 2207 - DNA, 120 bp, synthetic construct
  source 1..120: mol_type = other DNA
agatgcgtttctttagttgagtcagtcagcttatgcagaaggaatgagagttcctagcctagcaatggatacttcagacactgtttcccatttctacaaagggaccttattagggtttat

SEQ ID NO: 2208 - DNA, 120 bp, synthetic construct
  source 1..120: mol_type = other DNA
tttaaagcacaaaatacagaaataccccaaatttgcatgtgcatgtagtccaggaaagaaaaagcaaaaggctgaagctaaaaatgctagactcacctgcaatcctcccctcccatcttt

SEQ ID NO: 2209 - DNA, 120 bp, synthetic construct
  source 1..120: mol_type = other DNA
gtaaactaataggaagttgagtcaggatttgaatccaagcctccaggacactcatactttgggaacacaggggaagctatggaactaatttaaaaagatcaatagaattgcagggacact

SEQ ID NO: 2210 - DNA, 120 bp, synthetic construct
  source 1..120: mol_type = other DNA
cctcagacccaaaagacttggattctaaatagaaccgtttaaggccccaaatgactcctgaagttgttagcactgatgcttcagacgaagtccaaggttattaaatctcatttaaagcaa

SEQ ID NO: 2211 - DNA, 120 bp, synthetic construct
  source 1..120: mol_type = other DNA
gtgcacttggtagcttgaaatgaaggtgtggcatttctgcatcaaactttgacgatgaaggacaggagtacacaatttccaaaagaggaaatagagctagtaaataaacatgtggaaaag

SEQ ID NO: 2212 - DNA, 120 bp, synthetic construct
  source 1..120: mol_type = other DNA
gtgactcatgctaaatttctgttgggcagcatttgtcatagccaaagggaaggctgtagttgtgttagaggaaggagggattcatgttttttcttcttcccatttttctaaagtttttgc

SEQ ID NO: 2213 - DNA, 120 bp, synthetic construct
  source 1..120: mol_type = other DNA
gtctcaggtatgtctttatcagcagcatgaaaatggactaaatgcagtaaattggtaccagtagagtagggcactgctgaaaagatacctgaaaatgtggaagcaactttggaactaggt

SEQ ID NO: 2214 - DNA, 120 bp, synthetic construct
  source 1..120: mol_type = other DNA
ggacctctgctacggcagtgcagacaggaaatgtggggtcagagcccccacacagtctctactggggccctctctagtggagctgtgagaagagtgccaccatcctgcagaccccagaat

SEQ ID NO: 2215 - DNA, 120 bp, synthetic construct
  source 1..120: mol_type = other DNA
aatacaagggtgtatagtaactggaaggttaatgtcaggaaggaggcgaaaaagcaggtaggtaagctgggtatcttatttacagaacatggaataccagtccttacctaaatgggcaat

SEQ ID NO: 2216 - DNA, 120 bp, synthetic construct
  source 1..120: mol_type = other DNA
ttatatagttgagcacataatattgactgttgctgttttctttaatggctgagcaagcctgctgtttcctctggctctctctctccaccacaatttactaactgagaacctactatgtgc

SEQ ID NO: 2217 - DNA, 120 bp, synthetic construct
  source 1..120: mol_type = other DNA
agccgtggtatgacacactgccaagattaataggcctatccaggggaagctcccaggacaatgacaagatacaagtatttaagcaagatttctttaaaatatccttaaactgcttacaca

SEQ ID NO: 2218 - DNA, 120 bp, synthetic construct
  source 1..120: mol_type = other DNA
aatgagcctatttcctttagttcaaataccacacttaaaaaaacgccaggtttagtgagaactgataagtctaagggaccaaaatattctgttcgactcacggcacctatgaaacagcgc

SEQ ID NO: 2219 - DNA, 120 bp, synthetic construct
  source 1..120: mol_type = other DNA
ctatgacccacctctcccaatgtattcaaacttaagaatgcctaagaatcatctgactgcttgttataaatacagattcccaggtttccatccagaaaggctgattcagtagtgaatcgt

SEQ ID NO: 2220 - DNA, 120 bp, synthetic construct
  source 1..120: mol_type = other DNA
tcacatgaacatgtctcttcactcaagtcttttgtcccacagcttaaaatgctctttatacgccttggaaataacaattattggggctggaaaatcaatggtgcccaggttgtttttcac

SEQ ID NO: 2221 - DNA, 120 bp, synthetic construct
  source 1..120: mol_type = other DNA
aagagttaagtcactggtgcttctttaatgtgaaaccatcaccatgagtcccaagcccactaaaaggcactagtttaagaccttctcaccaaatcatacaacagaagctaaaacctctat

SEQ ID NO: 2222 - DNA, 120 bp, synthetic construct
  source 1..120: mol_type = other DNA
tcccatgacaaccatggttctccatagcatatctctctttttggggcagatgcctggagcacttctaaagttgtcctaatcttgttaagtctggattcactgtaaaatgaatgtttactg

SEQ ID NO: 2223 - DNA, 120 bp, synthetic construct
  source 1..120: mol_type = other DNA
aatccctgctgccatgtccatccctgagctactagtggagtcaattttaaatctctcagagacaatggcaaggatgtatttttctcttccccaagcttgatttgaaagaacaagttaaaa

SEQ ID NO: 2224 - DNA, 120 bp, synthetic construct
  source 1..120: mol_type = other DNA
gctatgttggcaagaagtcatctaggctaaggaggtctgttcaaaattgagggaaatctcttaaaattatttccttccaacttactgcagagagactgcatctttgttcaaggcatcaca

SEQ ID NO: 2225 - DNA, 120 bp, synthetic construct
  source 1..120: mol_type = other DNA
caacttttaccctaacacaggcacatttaggaactaactctggcatttgttatcactgtaagcatcactgtcaacactctaagcagagaaaaagtacatgcattgtgcagcacttttgcc

SEQ ID NO: 2226 - DNA, 120 bp, synthetic construct
  source 1..120: mol_type = other DNA
acaaagtgtcaaaccaacttcctttgcctacccccaaaatcaaaaggaaaaatcctaggcaccttaacagcaaactaaaaacatctagacaaaacaatgagattagcattccaggaaagc

SEQ ID NO: 2227 - DNA, 120 bp, synthetic construct
  source 1..120: mol_type = other DNA
aactgagatggcttgcctttaccctgtggttatcaagttcttataccagaggtatcaaagtgacatcctgcaaattctaacaagcccccaaacagttgttccacacatcattttaaaaat

SEQ ID NO: 2228 - DNA, 120 bp, synthetic construct
  source 1..120: mol_type = other DNA
gcgattaccgcatgtggcttcagcttcacacaattatacagatatggtttaaaacctacttgttcctaaataaatcttctgaccactttgccctgaaataatactaccagaccagaatgc

SEQ ID NO: 2229 - DNA, 120 bp, synthetic construct
  source 1..120: mol_type = other DNA
ggagccggaggggagcgaaccgggaacgcgacggaggcactcctggccccgaggggaaggggaaggaggcggcggcagcccggccccctcccgccgtcgccccgctaagagccccggccg

SEQ ID NO: 2230 - DNA, 120 bp, synthetic construct
  source 1..120: mol_type = other DNA
atacgaaggagaggaaactaggatttccaaattctggagcaggactgaagttatttggggcagggagcttggattcgcaagatatggaattctgaagtgcggaaatatactcctaggggc

SEQ ID NO: 2231 - DNA, 120 bp, synthetic construct
  source 1..120: mol_type = other DNA
cagatcagtctcttactcaccccttagcagagggcacaggccaggccccccacctaggcaaagacccctggctccagaaaaggtaagcataggttgggaacattcttagaacctctttcc

SEQ ID NO: 2232 - DNA, 120 bp, synthetic construct
  source 1..120: mol_type = other DNA
ggatgatggtggttaaacattggagatttgagactgttctgagaaaaaaaaaattaggaggagaggggagggagggaaagatgtgacaccttaatcagggtccctacctcctgggtaatg

SEQ ID NO: 2233 - DNA, 120 bp, synthetic construct
  source 1..120: mol_type = other DNA
gaaccctggacacccctcagacagccctgactgaactgattctgcacacagttgacacaaagtgagactggatgggcgataccccccaacacacaaagttctcttctcatctgcccagat

SEQ ID NO: 2234 - DNA, 120 bp, synthetic construct
  source 1..120: mol_type = other DNA
tcaatggaagggttgatggcacacaccatgaacgccacctccatcttgcggtcacagcgcatgtatgatcctttcaggtacagccagctcttagggggggatgagatcattatgtctcat

SEQ ID NO: 2235 - DNA, 120 bp, synthetic construct
  source 1..120: mol_type = other DNA
taaccctcatttatctctgcactcttttcctgctaagctgagaagcagcctctgattccttctcaatatggcacaccaggatgggattgccagtcaaccgggcttggtgcaaagctcttt

SEQ ID NO: 2236 - DNA, 120 bp, synthetic construct
  source 1..120: mol_type = other DNA
cagtttcccaactgcaaagaggaaaataacacctgccgaacctcacaaggcttacagttcttaaaagggttctgtaaaccatggagggttttgaagaagtgggtcatggataagattccc

SEQ ID NO: 2237 - DNA, 120 bp, synthetic construct
  source 1..120: mol_type = other DNA
aacaatatgagaaaaacagatacttttaaacactgccagagagtaaatgtgttcagccgctttagctgggtatcagtgtctgttaacatataaagatgcctactctgtgtgcagcactcg

SEQ ID NO: 2238 - DNA, 120 bp, synthetic construct
  source 1..120: mol_type = other DNA
ttaccgctctcccccgagaccttttaagggttgtttggagtgtaagtggaggaatatacgtagtgttgtcttaatggtaccgttaactaagtaaggaagccacttaatttaaaattatgt

SEQ ID NO: 2239 - DNA, 120 bp, synthetic construct
  source 1..120: mol_type = other DNA
tggcagactggcttttgtttctactgtgttagaatgaattgacaggacaactgggcctattattgtactgtgccagaatactgtaaaacaaaactaaacatactagcttggtggcttgta

SEQ ID NO: 2240 - DNA, 120 bp, synthetic construct
  source 1..120: mol_type = other DNA
ccagcctattatcttatttctgaataaagaattgtctgtgtggggaatagataactctttctcatgcagcccctgctagaaaatttgttttctctagcagttggtctgtgcttataggct

SEQ ID NO: 2241 - DNA, 120 bp, synthetic construct
  source 1..120: mol_type = other DNA
agtaaaacctcaaagtagcaggatgtttgtgcgcttcatggaagagtcaggacctttctctgttctggaaactaggcttttgcagatgggattttttcactgaaaaattcaacaccaaca

SEQ ID NO: 2242 - DNA, 120 bp, synthetic construct
  source 1..120: mol_type = other DNA
gatgcctgttagttggatgtttatgtgagtttggaatgcagggtagagatttagggatgaatatttggtagttgtctgcattttaatggtattaaaagccacgagaaggatgggcatggt

SEQ ID NO: 2243 - DNA, 120 bp, synthetic construct
  source 1..120: mol_type = other DNA
aattctggagatggatcatgatgatagttaacacagcagtgtgaatatagttaatggcacagaactgtacatttaaaaatggttaagatggaaaattttctgttacatatattttactgc

SEQ ID NO: 2244 - DNA, 120 bp, synthetic construct
  source 1..120: mol_type = other DNA
gcacccagccttggagatttttaataaagaagcttgtcaattaaacaaacaacaaaaagccctgagactgaatgagataatcaagagagtatgtgtagatagagaagaggtccaaggaag

SEQ ID NO: 2245 - DNA, 120 bp, synthetic construct
  source 1..120: mol_type = other DNA
gtgaaaggttcactactagtaaactgcagtcctttgaggatttagccagtatttctacctatggctttcgaggtgaggtaagctaaagattcaagaaatgtgtaaaatatcctcctgtga

SEQ ID NO: 2246 - DNA, 120 bp, synthetic construct
  source 1..120: mol_type = other DNA
agacaaggaagcatggtaaatgatactgagattgggagactacatggaaaaagacttgttcccttcaacagatagacagcagggaaaaaagaatagagaaaggagtaaagaacctgtaga

SEQ ID NO: 2247 - DNA, 120 bp, synthetic construct
  source 1..120: mol_type = other DNA
tctctgtaatttagatcaatttacatcaaactagggtggtctcatgtgttgtcttgctcacagtgaccactagattattccaagaagggacaatttccaagacttggtttacactgagac

SEQ ID NO: 2248 - DNA, 120 bp, synthetic construct
  source 1..120: mol_type = other DNA
ttttaatgatgcacattagctcaattacataaaccagggaaatccagctaggacctggtgatttctgagcctgacccatgtgactttcaatgaactgaacttgccacagctgtatttact

SEQ ID NO: 2249 - DNA, 120 bp, synthetic construct
  source 1..120: mol_type = other DNA
gatttaacatattacaagtgcctagcaaggtgtctgttacacgtaggtattttaagtaaatggtagctgctgatgtaatttctgcccctttgcccttcagttggggtattgctttggacc

SEQ ID NO: 2250 - DNA, 120 bp, synthetic construct
  source 1..120: mol_type = other DNA
ttcagattacacaacattaatgctaagggcgtttgactctgtgtgaattctaattgccctagatctagacgggctgatactattagaatcccctgtcactaactgaagacagagttgtaa

SEQ ID NO: 2251 - DNA, 120 bp, synthetic construct
  source 1..120: mol_type = other DNA
tctctactggatattaatttgttatattttctcattagagcaagttactcagatggaaaactgaaagcccctcctaaaccatgtgctggcaatcaagggacccagatcacggtaagaatg

SEQ ID NO: 2252 - DNA, 120 bp, synthetic construct
  source 1..120: mol_type = other DNA
aaatgaagcaaagaatacttgccctcttgacttaaagggtgtctgatgagacatatgactgtatcattagctgggagaaagtccatcgtgctgcctatgtatagtgcctcaagttggtct

SEQ ID NO: 2253 - DNA, 120 bp, synthetic construct
  source 1..120: mol_type = other DNA
tatccctggccccagtcagtgcttagaactgtgctgttggtaaatataattggattcactatcttaagacctcgcttttgccaggacatcttgggttttattttcaagtacttctatgaa

SEQ ID NO: 2254 - DNA, 120 bp, synthetic construct
  source 1..120: mol_type = other DNA
gttatatccatgatagacttacgctgctggtacagatggtacaggtggcttcagtataggctctccgaacccacatatcattgattatgatagggatatgttaactatttttcagtgtat

SEQ ID NO: 2255 - DNA, 120 bp, synthetic construct
  source 1..120: mol_type = other DNA
gttacttaataaatgcattttgctagacacaatccttcggttcacgagctctgtagagaaaagagaaataaccgccaaccaagaaaagattgggagatactagaataagacccaggggca

SEQ ID NO: 2256 - DNA, 120 bp, synthetic construct
  source 1..120: mol_type = other DNA
aaaaggggatttttaatagtttgctggtggagataaggttatgatgtttcagtctcagccatgagacaataaatccttgtgtcttctgctgtttgtttatcagcaaggagagacagtagc

SEQ ID NO: 2257 - DNA, 120 bp, synthetic construct
  source 1..120: mol_type = other DNA
tcctcatagttgctcccctctgcatgtaaaaatcaccatttccatcatagattcctagcggtctcaggactttataaagcccaaagtgcctatgtcataatatgaggaaaaatactgaga

SEQ ID NO: 2258 - DNA, 120 bp, synthetic construct
  source 1..120: mol_type = other DNA
caaagaagaaatgatgcctgctctcagctgactttgcagttggaaagacacatgaaataattacgccattcattagcagattgtgctagatgcctcactggaaaaataaaggacatgatg

SEQ ID NO: 2259 - DNA, 120 bp, synthetic construct
  source 1..120: mol_type = other DNA
tttctgatccataggtttgattaaacatggagaaacctcatggcaaagtttggttttattgggaagcatgtataatttttgtcctaagtctgtgctcagccctcccacatgtgctcattg

SEQ ID NO: 2260 - DNA, 120 bp, synthetic construct
  source 1..120: mol_type = other DNA
aaatgtttttcattagtttttttcctaaccatgaagaataactgctttgtaacacacatgctggctataaagcagacaaaaaattcactgtaggtgctgcctgactggcctctgtccgtg

SEQ ID NO: 2261 - DNA, 120 bp, synthetic construct
  source 1..120: mol_type = other DNA
cctcttcaaaccagcctcatttcctaaattaccttgaatatgcattgacacttgtactgcctgaaattctggaaaactcagtatggctactccaccgtcagaacttcctgagcaaagtta

SEQ ID NO: 2262 - DNA, 120 bp, synthetic construct
  source 1..120: mol_type = other DNA
ctttgaaagagatgagcatgctaatagtacaatcagagtgaatcccatacaccactggcaaaaggatgttctgtcccttcttacaggtacaaggcacagttttccttcatttattcacta

SEQ ID NO: 2263 - DNA, 120 bp, synthetic construct
  source 1..120: mol_type = other DNA
aaccccatagtaggtatttgaaatacagaataaatgtgaggtacccctgctctaaaggagtttatagtccagagctgacttatggaggatttctttctattatttctgggtctgctacta

SEQ ID NO: 2264 - DNA, 120 bp, synthetic construct
  source 1..120: mol_type = other DNA
atactggcaaagctttacattgcaaacctccattatcacagagcaagcaatgaaagatggactcagagctgaggcgataaattgatagctagcatagcctctaaactgacttttatgact

SEQ ID NO: 2265 - DNA, 120 bp, synthetic construct
  source 1..120: mol_type = other DNA
tggatagttttaacattttcttctttgaacctagttataaaggtattgtgctgttgttcctaggcttagagtcataaggcctgagctcacttcctcactttgcctccatctggaacctta

SEQ ID NO: 2266 - DNA, 120 bp, synthetic construct
  source 1..120: mol_type = other DNA
attaaattatgctggatcctagaagcaaaaactggaactgtgaaaccctacttcacagaaaacttaaaattcccaagcagatgaatgcttctcggaaggacactgacagttacctacctg

SEQ ID NO: 2267 - DNA, 120 bp, synthetic construct
  source 1..120: mol_type = other DNA
attaaagagtttagatttcaatttggtgggaatggatgggatcttatttgcattttatgaagagctccctggttgcaatatcagaatggattggagaggagcaagatggaagcctacagt

SEQ ID NO: 2268 - DNA, 120 bp, synthetic construct
  source 1..120: mol_type = other DNA
agttttctggacttattacaaagatttaaaaagataccaataaatagccaaataaagagatatacagggctagatctggaagggtctggagcgcaggagcttctgtccccatctacttgg

SEQ ID NO: 2269 - DNA, 120 bp, synthetic construct
  source 1..120: mol_type = other DNA
gaattatatccctctagctatcaattttcgaaggaatgaatggtgtcctagtaatttccagtggtgtttaattacgttttcccttctctttctccttctcttattccctccctctccatc

SEQ ID NO: 2270 - DNA, 120 bp, synthetic construct
  source 1..120: mol_type = other DNA
cgggcagaattgcttctataacaatgataattatacctcatactagcttctttcttagtactgctccatttggggacctgtatatctatacttcttattctgagtctctccactatatat

SEQ ID NO: 2271 - DNA, 120 bp, synthetic construct
  source 1..120: mol_type = other DNA
gaagcctaacatatctggaggattatttttcatcctacttaaagctgctttcacttttttcaggaaaaaacacacgttctgaatctaatttataaaactccctggccgggtgctgtggct

SEQ ID NO: 2272 - DNA, 120 bp, synthetic construct
  source 1..120: mol_type = other DNA
ttaccacagagtagacaaatattttcaagcccaaaatcaagtggtatcacttttctgctgagaatgtttcagtggtttcctttgctcttgggataaaacttaaatccctcaccctaccct

SEQ ID NO: 2273 - DNA, 120 bp, synthetic construct
  source 1..120: mol_type = other DNA
gggttcattcacagctctgtagaaccagcacagagaagttgcttgctcctccaaaatgcaacccacaaaatttggctaagtttaaaaacaagaataataatgatctgcacttccttttct

SEQ ID NO: 2274 - DNA, 120 bp, synthetic construct
  source 1..120: mol_type = other DNA
atccctgttacttcaaaactaaaataatggttttaggaattaaaaggtgaggctagtcacctccaagggatgaactgactcagggattgaggtatataacagtgaactggtccaaacaac

SEQ ID NO: 2275 - DNA, 120 bp, synthetic construct
  source 1..120: mol_type = other DNA
aacccatctgcttttgattcagtggcttctttaattttgtcggtctcagtcaccatttgtctaagcaaattcaggcaggcttcaccttgcctttctacatttgttcccttttcttagcat

SEQ ID NO: 2276 - DNA, 120 bp, synthetic construct
  source 1..120: mol_type = other DNA
cagaaatttgttcaccattttgggcatgattttcgtgcttttgtaaaatgtgcttcactgcagcccttactgggctgtggtgatgaacacttaagatactgtgtgtgtgctttataatct

SEQ ID NO: 2277 - DNA, 120 bp, synthetic construct
  source 1..120: mol_type = other DNA
tcttgctctttggtgaacagtcctgggtctgaatgtatatatccatggtttgtcactaggtgacaggtttttttggaacaagaaatcagttcagtgaacatttgtcaagtatcttctctg

SEQ ID NO: 2278 - DNA, 120 bp, synthetic construct
  source 1..120: mol_type = other DNA
tgtggtgccaaagcttaaaaaaaaagtatagtaaaaacataatgtataggcttattgctgtgctatgacccatgccccgttttctccaacctctcttgtcctcactcttcctttttgctg

SEQ ID NO: 2279 - DNA, 120 bp, synthetic construct
  source 1..120: mol_type = other DNA
cctcatatgagttgattggtggcctggcatactggatgagaagctctaggtcatatatttaagagagttattgctgggtcataaaatgacagattgttttccagaggggtcatattgatt

SEQ ID NO: 2280 - DNA, 120 bp, synthetic construct
  source 1..120: mol_type = other DNA
tagcccacctggaattgattttcacagatactacattttttactagttatagattggccccttcgtagagcaagtccgatagctgccatttttatggcagcatgtgctcacttagtgtct

SEQ ID NO: 2281 - DNA, 120 bp, synthetic construct
  source 1..120: mol_type = other DNA
taaacaacagattttcaatgtagacaaaacaatcttctattagaaggtgtcatctatgacttacatagttaaagaggaaaagtcactgcctggcttcaaagcttcaaaagacaggttgac

SEQ ID NO: 2282 - DNA, 120 bp, synthetic construct
  source 1..120: mol_type = other DNA
gtaaaatgctatcaaacaacatgacaagctacagagaaatctttcatgaaaggaaaaatcaattgatgcagcaaacttcactgttgtcttatttcaagaaattgcaacagcttcctcagc

SEQ ID NO: 2283 - DNA, 120 bp, synthetic construct
  source 1..120: mol_type = other DNA
gtcagtttgtttggatttaccacatattatttgatcataattctttcctgtagatgttttatggtctgcctaaacctttagtggggcctttgatggcttagtcctttcaggcttaagaca

SEQ ID NO: 2284 - DNA, 120 bp, synthetic construct
  source 1..120: mol_type = other DNA
gttaattcctcatactttatctgtggggaattacttgaagcctgggttgacaatgaaattctgcagagagaatttgcatttgattctactggaggaacagtcagccccgatatcagttta

SEQ ID NO: 2285 - DNA, 120 bp, synthetic construct
  source 1..120: mol_type = other DNA
ttgggagggcacaggctttggagtcagacacatgtggtttcaaatccaagttcgaccatttcccatttatttgactgtagacaagttacattcctaaactatgtctcagatttctcatct

SEQ ID NO: 2286 - DNA, 120 bp, synthetic construct
  source 1..120: mol_type = other DNA
cacagttgtattcatgttctttcatttcacagatacaatccaggccagtcccagatttgcagctgttaataaatgtgaatggttttccagtaagggggtagaaaaacatagggagagaac

SEQ ID NO: 2287 - DNA, 120 bp, synthetic construct
  source 1..120: mol_type = other DNA
ccacagccaggcagaactatttctgtctcatccatgtttcagggattacttctcccattttgtcccaactggttgtatctcaagcatgaattcagcttttccttaaagtcacttcatttt

SEQ ID NO: 2288 - DNA, 120 bp, synthetic construct
  source 1..120: mol_type = other DNA
aaactgtcaaaaactttttcaatgctgaattttagttctgagttaaaaatcatactacctgtttatatggtttcatatccacttttttcatgtgatatactctacaaaaagcctgctgag

SEQ ID NO: 2289 - DNA, 120 bp, synthetic construct
  source 1..120: mol_type = other DNA
tgcgcccggctgccttttatttctttctcttgactgactgcactggctagagcctccaatacaatgttgaatagaagtggtaagaatgggccaggcatggtggctcatgcctctaatcct

SEQ ID NO: 2290 - DNA, 120 bp, synthetic construct
  source 1..120: mol_type = other DNA
gaagaaatttgtcgcatttaatctaaatttttaaatttactgacataaagttatttataatatttcttattcttttattatctatggatctcttggtgacataacctctctcattcctaa

SEQ ID NO: 2291 - DNA, 120 bp, synthetic construct
  source 1..120: mol_type = other DNA
ttctgatctcattgagttgaatgttctaggtatatcaagttgatagtgatgcccaagtctcctgtatctttactgattttctgcctgttctgttattgagaaaggggtattgaaacttcc

SEQ ID NO: 2292 - DNA, 120 bp, synthetic construct
  source 1..120: mol_type = other DNA
tgatttacctgaaatgtcattcaatttaacttactctccatcctcacccgcccagctttggttatgaggcagtagaaagaaatgatctgcctgtggttttctagaaatacgaaagttgag

SEQ ID NO: 2293 - DNA, 120 bp, synthetic construct
  source 1..120: mol_type = other DNA
ccctgcaggccattataaatgagattatgccatttgctcccatttcttcttattctttcatttttggggctctccatcttgatgtgttctttggatcgtgaacagatccaaagaaaaggt

SEQ ID NO: 2294 - DNA, 120 bp, synthetic construct
  source 1..120: mol_type = other DNA
cagcttgacacaaaaagggtgcctggattcctaatgtttcattgtcacttttcccagtcagatgataatgcttttcaaatcaacatatattttgggggaggttggaagggagagttgaaa

SEQ ID NO: 2295 - DNA, 120 bp, synthetic construct
  source 1..120: mol_type = other DNA
attgtctataaagccttgcgctcacacattctgcctcctaaacatttcacagaagatggaaatatcctgcagcttgctaacctgcctgatctatacaaagtctttgagaggtgttaaata

SEQ ID NO: 2296 - DNA, 120 bp, synthetic construct
  source 1..120: mol_type = other DNA
tacatgtagcgctcattacaaacacggccagaatctcttattaacaaacagcagccaggagtgagatttaaaatagactgggggtttaggagacccttttatgacacgtaattctgctcc

SEQ ID NO: 2297 - DNA, 120 bp, synthetic construct
  source 1..120: mol_type = other DNA
gaaggagactggcccaggtgggtggggttagatgaccaaaggcttttagtgtggtgttgagctgttgaaattttatgctgtagccaatgaaaagtctgaaatgttttttttttttttttt

SEQ ID NO: 2298 - DNA, 120 bp, synthetic construct
  source 1..120: mol_type = other DNA
catagtccctgcacatataataggtgcttcataaacaatttaatgaatgaataaattactgagaaaacactggaagtttttgggttagcattgtgttaggtgcttgatatggtctggctg

SEQ ID NO: 2299 - DNA, 120 bp, synthetic construct
  source 1..120: mol_type = other DNA
tttggagctgggtaacaggcagaggtcagagcagtttagagggctcagaagaagaccagaaaatgtgggaaagtttggaacttcctagagacttgttcaatggctttgaccaaaatcctg

SEQ ID NO: 2300 - DNA, 120 bp, synthetic construct
  source 1..120: mol_type = other DNA
cagaatggtagatccacagacagcttgcaccatgtgcctggaaaagctgtagacacttaacgccatctcatgaaagcaaccaggcagtgtgctgtaccctgcaaagccacaggggcagag

SEQ ID NO: 2301 - DNA, 120 bp, synthetic construct
  source 1..120: mol_type = other DNA
tgaattttgaatcttttgtaaaagatcttcttctggttcgtcagtatagagttgaagtttataagaatagagctggaaataaggcatccaaggagaatgattggtatttggcatataagg

SEQ ID NO: 2302 - DNA, 120 bp, synthetic construct
  source 1..120: mol_type = other DNA
cctcccgagtagctgggattacaggtgcatgctgcaacacccggctaatttttgtatttttagtagagatggggtttcaccatgttggccaggacggtctcgatctcctgacctcgtgat

SEQ ID NO: 2303 - DNA, 120 bp, synthetic construct
  source 1..120: mol_type = other DNA
agagactgctggagacatggggaaactgagacaggtaagcaaattgagtctagtgatagaggagattccaggcctaggaaaggctctttaattgacatgatactgtttcatttaaggaaa

SEQ ID NO: 2304 - DNA, 120 bp, synthetic construct
  source 1..120: mol_type = other DNA
aaggtatgtatctcccaaagattctttttgtggtcctcaagtaccataagcaccgctggagataacacatgtgatgggcatttttagcatagattgtatctaagcaactttccacaagta

SEQ ID NO: 2305 - DNA, 120 bp, synthetic construct
  source 1..120: mol_type = other DNA
cttttccacaaaagacatttatcaggacctcaaccggttgttgaaaggcaaaaagggagagcagatgaatagtgctgtattgccagaaatggagaatcaggtacatggattataaatgtg

SEQ ID NO: 2306 - DNA, 120 bp, synthetic construct
  source 1..120: mol_type = other DNA
cattctaattttgatggacatttgggtaattttcatttttggctgttataaatactgctgcaattacagttaattttcacagtttttttttttttttttttttttttttttttttgaggt

SEQ ID NO: 2307 - DNA, 120 bp, synthetic construct
  source 1..120: mol_type = other DNA
actgtctgcggtaatcaagtttttagaactcttatcagatgattccaactttggacagtttgaactgactacttttgacttcagccagtatatgaaattggatattgcagcagtcagagc

SEQ ID NO: 2308 - DNA, 120 bp, synthetic construct
  source 1..120: mol_type = other DNA
ctgggactacgagtgtgtctcattgtgccttgctctcgaattgctttttttttttttttctggtttcaagctatctatgtggtattagtcctcactttatgaataattttgtatactact

SEQ ID NO: 2309 - DNA, 120 bp, synthetic construct
  source 1..120: mol_type = other DNA
gccttgctgaataagtgtaaaacccctcaaggacaaagacttgttaaccagtggattaagcagcctctcatggataagaacagaatagaggagaggtatgttattagtttatactttcgt

SEQ ID NO: 2310 - DNA, 120 bp, synthetic construct
  source 1..120: mol_type = other DNA
ggggaggttgaggcaggataattgcttgagcccaggagtttgagaccagtctgggcaacaaaatgacaccccatttctaccaaaaaaaaaattgtttaaaattagctgggcatggtggca

SEQ ID NO: 2311 - DNA, 120 bp, synthetic construct
  source 1..120: mol_type = other DNA
acctgccctgggagcaacagtgttagtttcttgaacatccttccaagcagagtctgggcctacacaagcaaaacaagtatgtctattctctctcctctttaatttttttaaaggaagtga

SEQ ID NO: 2312 - DNA, 120 bp, synthetic construct
  source 1..120: mol_type = other DNA
tgtttcttataattattcctctttctcaactctgtctgctgtggtacctcatgcttcctagtttaagccttcttgggagttctcaggagaaatctgttatctcccttactaagcatttgg

SEQ ID NO: 2313 - DNA, 120 bp, synthetic construct
  source 1..120: mol_type = other DNA
gctggagaaggtcacacaatgctgataggtcccattgtgctttcatgctttctagttttcaatgataactggttgttacttttattgtctgactcattatagtgaccaactcccgatttt

SEQ ID NO: 2314 - DNA, 120 bp, synthetic construct
  source 1..120: mol_type = other DNA
atgaatctataaatggacaaaagaaaaagcttaaaaggataaagagcaacactccaagtgcatgtataaacataaggactcttgggacttaacctttttaaaaatctttaggcctagcac

SEQ ID NO: 2315 - DNA, 120 bp, synthetic construct
  source 1..120: mol_type = other DNA
ttccagtcagctcttaaaatgaaagcctagaaatggtagggttaaagaggggacagaatgttgattttaaaatacctagaatttggccaggtgcagtggctgtaacccagcactttggga

SEQ ID NO: 2316 - DNA, 120 bp, synthetic construct
  source 1..120: mol_type = other DNA
tgcacccagtccttaatgctactttataggtgaaaattgtgaaataacttaaatttcattttaattaaagttaatttttgggaaattaacgaaaggttgacattttattcttttgaatat

SEQ ID NO: 2317 - DNA, 120 bp, synthetic construct
  source 1..120: mol_type = other DNA
ccgtgcccggcctgtttgagtatcttttaaaaccagtaaggacaaactagaggtgtcagctctcttcatgggctttggagaaacaagacaaaaaggaaagagatgtttcgccgggcgcgg

SEQ ID NO: 2318 - DNA, 120 bp, synthetic construct
  source 1..120: mol_type = other DNA
acatcatatagtataaaattcagtagaaaatcagtttttcagaggtacaaaattggctgactttgcacagactcctttcatttcacaggtagggatgcacagccacctcttccaccgacg

SEQ ID NO: 2319 - DNA, 120 bp, synthetic construct
  source 1..120: mol_type = other DNA
attaagatacctaagggatttctgtgattgttaggattcaaatttctgtgagcataagaatcaagctgtgtgcataataattgcatgggatttcacagctgggccccattcccagggatt

SEQ ID NO: 2320 - DNA, 120 bp, synthetic construct
  source 1..120: mol_type = other DNA
gaggtttagtttactgtcacatcgtttataaacataaggaagatcgttgctcatctgatagcattccgaaccttgagtcatctgtaatgcctatggcctccagaaaagcttctctaatac

SEQ ID NO: 2321 - DNA, 120 bp, synthetic construct
  source 1..120: mol_type = other DNA
ctgtggttacactgaaaaaaatgaaaagtcactgatttccaataacttacagaagcagtatgaactacatattctgtcgttcttgaaacaagctgagattttattgactttgggaagcag

SEQ ID NO: 2322 - DNA, 120 bp, synthetic construct
  source 1..120: mol_type = other DNA
tcaagttaatttatttcagattgaatttagtggaagcttttgtagaagatgcagaattgaggcagactttacaagaagatttacttcgtcgattcccagatcttaaccgacttgccaaga

SEQ ID NO: 2323 - DNA, 120 bp, synthetic construct
  source 1..120: mol_type = other DNA
ccaagagacatgagacagcttagaaatttttgctttttggaaatgaatgttagagttactggtttgtgattaaggcctattgcactgacagaggcagtgaaaaagggtttgattgccaag

SEQ ID NO: 2324 - DNA, 120 bp, synthetic construct
  source 1..120: mol_type = other DNA
tagtgtagtcaaagcttctctttagactgataaaacttagagcacctgcatttacttccaacaaagcagaattaaagaaaatgagacttggccgggtacgtttgtaatcccagcactttg

SEQ ID NO: 2325 - DNA, 120 bp, synthetic construct
  source 1..120: mol_type = other DNA
tcaaaaaaaagaaaatgagtctatactttgctgttttcatactctcttagtgtggtgtaggcagccatgtatcccccttgtgcctctatttctccattctgtgaatgagtgtcttccact

SEQ ID NO: 2326 - DNA, 120 bp, synthetic construct
  source 1..120: mol_type = other DNA
tggccgggcagaggggctcctctcttcccagtaggggcggccgggcagaggcgcccctcacctcccggatggggcggctggccgggcggggggctgacccccccacatccttcccggacg

SEQ ID NO: 2327 - DNA, 120 bp, synthetic construct
  source 1..120: mol_type = other DNA
tattccagtaggaccagctagaaacagaaggtgattgaccagtattagggatggaatcagggtacaattatggagacaggctatctaaacaattcactctcaccatttaaatcagctgtt

SEQ ID NO: 2328 - DNA, 120 bp, synthetic construct
  source 1..120: mol_type = other DNA
ctcccgacctgaggtgatccacacacctctgcctcccaaagtgctgggattacaggtgtgagccactgcgcccagccttggtatagtctttaacgaaagttcactgatcttgaaaatttt

SEQ ID NO: 2329 - DNA, 120 bp, synthetic construct
  source 1..120: mol_type = other DNA
tgctgggataaatttgagccattgtgctcgtctaagctgggattctttgaatgagttcttagaggcttcctgaaactttgtgcaacattttgtgtatgtgtatattttctggggaaagga

SEQ ID NO: 2330 - DNA, 120 bp, synthetic construct
  source 1..120: mol_type = other DNA
tcagagagacagtagagggcagcagccgtttagaaagtagattcacattgagtgattacggctcttttaaatctttctccactaagagatagctaatttccgaaaaggtatacttggcct

SEQ ID NO: 2331 - DNA, 120 bp, synthetic construct
  source 1..120: mol_type = other DNA
tatgcttctatgcgtgttttcctgtctttaatgtccttgtccatgtgatgaacccctactcatttttccaagattgaactcaaatgtcaccttttctgtgagcttctctgctcttctcat

SEQ ID NO: 2332 - DNA, 120 bp, synthetic construct
  source 1..120: mol_type = other DNA
acacacgctcttcaaatacctaccttattttcctgtatgtgttatgaaccatacccattcacatctggtattacaactttgccacccatttcagacagtattcctttgaccattctgcag

SEQ ID NO: 2333 - DNA, 120 bp, synthetic construct
  source 1..120: mol_type = other DNA
ggcgtgagcctccatgccggccggctttttggcaatttaaatagttacagttacctattataattgatatttagctaacatctatttttattttaatattccaggaaattattatgcaga

SEQ ID NO: 2334 - DNA, 120 bp, synthetic construct
  source 1..120: mol_type = other DNA
ttttggacttctgttgtgcccatgaacattgtacccaataggtggtaatttttcaattctcatccctctctctgcctctgcccttttggagttcccagtatctgttaattctctctgtat

SEQ ID NO: 2335 - DNA, 120 bp, synthetic construct
  source 1..120: mol_type = other DNA
atatgtgtgtatatatacacgtatatgtgtatatatatacgtatatatgtgtatatatacatatatacgtatatatatacacacacacatatatatacacatatgcaggcacacatatat

SEQ ID NO: 2336 - DNA, 120 bp, synthetic construct
  source 1..120: mol_type = other DNA
taagactgtagggctttctaaagcctgtgatcactagtggagaatgtagctttacaaagtctagttggaaattggcaactgggggttagtacaagttacaaggaagggatggaatttaag

SEQ ID NO: 2337 - DNA, 120 bp, synthetic construct
  source 1..120: mol_type = other DNA
aaaccagtgccacctctgaattttgctaccacaattcccttatttaccaatagtgcatgagctaatttggaataaagaactaggcattgtagcacaacagacattatgtgggcaaagtgt

SEQ ID NO: 2338 - DNA, 120 bp, synthetic construct
  source 1..120: mol_type = other DNA
catgagccatcatgtccggcctccccatcatgtacccttaaataccatcaagcacagttccattgtgtaaaaacttggcttgatttaacctgttaattggaacactgtcattaatggaaa

SEQ ID NO: 2339 - DNA, 120 bp, synthetic construct
  source 1..120: mol_type = other DNA
catgccgggccacttctgtttcttttccatgtagagttctttgcaggaggaggttagaataggtgtgcatctcctaaatagttgtcgaatataactaaaaagttaaccaggactctaaat

SEQ ID NO: 2340 - DNA, 120 bp, synthetic construct
  source 1..120: mol_type = other DNA
agccaccatgccgagcctgaatatagtgtttttaagttgcaggactttaaaaataatattttgaaatttttctaagttaaattccctgttaaaatggtcatgcaggaatatacgcttgca

SEQ ID NO: 2341 - DNA, 120 bp, synthetic construct
  source 1..120: mol_type = other DNA
attgtttcctctagtgctgctattagtggaatgattttaggtgttcaactttcagatcaatgggagacagaaatattgttctgagacatctggaagccgaatgtgttttattcctgcctg

SEQ ID NO: 2342 - DNA, 120 bp, synthetic construct
  source 1..120: mol_type = other DNA
agtagggctggggaatttgcatttctaacacacaagtttgttgatgctgtttgtctggggtccacgcttgcctaacttctgatgtgatttatttctgccagtttctttttttgttgttgt

SEQ ID NO: 2343 - DNA, 120 bp, synthetic construct
  source 1..120: mol_type = other DNA
ctctgcttgacagcaaataagcctaacgttccctaacaaatgatgatgtcccattaatgatttgatgacttcctgtttgtagtttttatttagagtgcttgtgggtagtttttcataacg

SEQ ID NO: 2344 - DNA, 120 bp, synthetic construct
  source 1..120: mol_type = other DNA
acataaggattgttttagtaaggcttgttatgcatacccaaaacaagtgccatctccagtaatttaagagtctatggtgatcaagagtagttctcttcctgctagaagaggggtgggaga

SEQ ID NO: 2345 - DNA, 120 bp, synthetic construct
  source 1..120: mol_type = other DNA
aaaggattttattataaatgctgggaagagcctggatttgaggaaggtaagcagtgcagttaggtggatgtagactagaagaggtcatttgttctcatttcattgttgcccctatgacat

SEQ ID NO: 2346 - DNA, 120 bp, synthetic construct
  source 1..120: mol_type = other DNA
aagagatagacaaagtctgagcactcctgggaagggggaggaagggaataactgttgtgtaaatcatcagcagtgtctactaagataccatctgtaaccataggcttctatgttttataa

SEQ ID NO: 2347 - DNA, 120 bp, synthetic construct
  source 1..120: mol_type = other DNA
ttttggccatcttttgatactagttttcagatgcatattgttatttcatttattattggaaaagtagtaactttaaacaaatttttattgaaaatgctgacagaggccgagtgtagtagc

SEQ ID NO: 2348 - DNA, 120 bp, synthetic construct
  source 1..120: mol_type = other DNA
gtgtaaaagtgttcctatttctccacatcgtctccagcacctgtcgtttcctgactttttaatgatcgccattctaactggtgtgagatggtatctcattgtggttttgatttgcatttc

SEQ ID NO: 2349 - DNA, 120 bp, synthetic construct
  source 1..120: mol_type = other DNA
ttttagcagaactcatactgctctgacatctaaactgatgtcttagccttcatagtgtctctgactagatcctattcagacgtgttatagcaaattagtaaagtttattttggtgccaaa

SEQ ID NO: 2350 - DNA, 120 bp, synthetic construct
  source 1..120: mol_type = other DNA
gtgaaatgaccaccaccatctagtttgaaaatatttcatcacaaccaaaagaaaacctcatatctattagcggtctctcctgtttccccagacaccggcaaccactaatgtactttttgt

SEQ ID NO: 2351 - DNA, 120 bp, synthetic construct
  source 1..120: mol_type = other DNA
gatctgctgggttactgagaaggatgtgggtttctccatctagttctatttttggttaatatgttaggcacagagctgttgtttttttgtggtgaattgaatcttcatcattctttaggg

SEQ ID NO: 2352 - DNA, 120 bp, synthetic construct
  source 1..120: mol_type = other DNA
ctctccctttgctcttccccaatcctatctcatcacacacactggtttggaagatagccacttttttttttccaatgtgtttacttatcttatcagagtcaaaagcctatcagtatcttc

SEQ ID NO: 2353 - DNA, 120 bp, synthetic construct
  source 1..120: mol_type = other DNA
agttttcttctctccagatttgggattatttttaggaattctcaagagttttgttgacttaccaactaggtttcttgaagatggtgagtgaggataggaacttggcctggtttggctcac

SEQ ID NO: 2354 - DNA, 120 bp, synthetic construct
  source 1..120: mol_type = other DNA
ccttgcatagtttgcttctggtatgttaaagtgtgctctctctaagtgggtagtaattaggaacaatttatctcaacctcatttattgaatgttttaaatcaagagaacggactctgtta

SEQ ID NO: 2355 - DNA, 120 bp, synthetic construct
  source 1..120: mol_type = other DNA
gtatgagccacgatgccagtccaattcttgtgtagttttttaatcagctgaatttaacattcaaattcttcttttaaatcttccaataggcagttatctttataaagatcctatataatc

SEQ ID NO: 2356 - DNA, 120 bp, synthetic construct
  source 1..120: mol_type = other DNA
aattattttataagttccctgtccccaagatgatgacttcacatctctgtcaaacagaaatcgcccaacaggcccttgtatgatgtcatttaaacaagccctattttaaatgtcacctcc

SEQ ID NO: 2357 - DNA, 120 bp, synthetic construct
  source 1..120: mol_type = other DNA
taatcccaatactttaggaggatcacttcagcccaggagttcaagactagcctgtgccacatagaccacatttctaccaaaaatcaaaaggaaaaaacttgctgggtgtggtgatgcaca

SEQ ID NO: 2358 - DNA, 120 bp, synthetic construct
  source 1..120: mol_type = other DNA
aagcgaggtctgtctaattgtttgctactactaacatttgatggccacgcttcagcaagtacatttgtagattctctctctctgtctctcttaatttgtggtctagagatcatattggtt

SEQ ID NO: 2359 - DNA, 120 bp, synthetic construct
  source 1..120: mol_type = other DNA
tatactctatgttagttccaaagaaatacctttggttaagaaaagaattctcatgcataactcctcgagggtggggttacaccttaatccatcctcaggtgctcatggtaattggggcaa

SEQ ID NO: 2360 - DNA, 120 bp, synthetic construct
  source 1..120: mol_type = other DNA
cagctgtcgcaacaccatttgttaaatagtccgtctgttctccattgactgaagtggtactttgggtctattttaaagactctacttttacctcgtctcaccattcttttgtctacacaa

SEQ ID NO: 2361 - DNA, 120 bp, synthetic construct
  source 1..120: mol_type = other DNA
ttttataggtgaagaagctaagactttacttttcctcagttagacagctagtgctggtgggtgcctaaacttagatcttccattgccaaatctaggtgtgttgtttttccagcacactag

SEQ ID NO: 2362 - DNA, 120 bp, synthetic construct
  source 1..120: mol_type = other DNA
gttctgggattacaggattacagatgctgtgcccggcccaacctctaattttaattttctcttcaaattgttcaataagatttagtttcaagacattttcctggccgggcatggtggctt

SEQ ID NO: 2363 - DNA, 120 bp, synthetic construct
  source 1..120: mol_type = other DNA
acctcaggtgatccacctgcctcggcctcccaaagtgctgggattacaggcaccctgcctgtgtttgtgttttaaaaggggtaatagcttcagtcttttttttctttctctgagacggag

SEQ ID NO: 2364 - DNA, 120 bp, synthetic construct
  source 1..120: mol_type = other DNA
gttactcttgcacatagaaacaaaaaatggcagaaaagcacaaaacttactatagttgtaacagggaaaggaaacactagggcctacaacgtactaatgtcttgggtcatctatgggctc

SEQ ID NO: 2365 - DNA, 120 bp, synthetic construct
  source 1..120: mol_type = other DNA
cagtaggcagtagttgattagatcccaatttagaggttggagttggggaatagctatagaggacactattggggcgaattgagaaagtttaatatgagacaatatggtgttagtgtcaga

SEQ ID NO: 2366 - DNA, 120 bp, synthetic construct
  source 1..120: mol_type = other DNA
ttacaagttttaaagtagttatagcaagtacttcactcatgtttaattcttaaaggcttctattgctatataatagggtagtctgaattcttcaaaagtgtactgaggccaggtgcagta

SEQ ID NO: 2367 - DNA, 120 bp, synthetic construct
  source 1..120: mol_type = other DNA
gcatgtgatactgatgaggaaagaaagccaaactgtcttacggtcagttcgtacaatataccaggccttgatggtcacatttcaacttgctacctttttgcttacatttttcttatggtg

SEQ ID NO: 2368 - DNA, 120 bp, synthetic construct
  source 1..120: mol_type = other DNA
tgctcacgtgtcaaatggagcacctgttccatatgtacgaccagccattttggagaaaggacaaggaagaattatattaaaagcatccaggcatgcttgtgttgaagttcaagatgaaat

SEQ ID NO: 2369 - DNA, 120 bp, synthetic construct
  source 1..120: mol_type = other DNA
ctctgtccacatctttgggcaggctgtggttctgcctttatatgctatgtcagtgtaaacctacgcgattaatcatcagtgtacagtttaggactaacaatccatttattagtagcagaa

SEQ ID NO: 2370 - DNA, 120 bp, synthetic construct
  source 1..120: mol_type = other DNA
tttaagtccctaatgatgggaattctatttctgtagtgatttttctggtcatacgaccgtaaggtcatgggtgtttttctctgaattcctcttgagatgcctgtaacttgaaccacgttt

SEQ ID NO: 2371 - DNA, 120 bp, synthetic construct
  source 1..120: mol_type = other DNA
aattgggaagaggaacttctacctacgatggatttgggttagcatgggctatatcagaatacattgcaacaaagattggtgctttttgcatgtttgcaacccattttcatgaacttactg

SEQ ID NO: 2372 - DNA, 120 bp, synthetic construct
  source 1..120: mol_type = other DNA
aaacaggttcatttaaagctgggggttccagaaatcttgaaatagtagttatcacatgcagagtgacttatctgttgttgtttcatcctttcaggaaagtttgtcattcgtgggcttggg

SEQ ID NO: 2373 - DNA, 120 bp, synthetic construct
  source 1..120: mol_type = other DNA
tcctcccctcccttaccttcccatgaaatgagaaagcctcagagatagtggcttgattaatttttctttagattaagatatttgtctaagcctttaaggtttatctattgagcttttttg

SEQ ID NO: 2374 - DNA, 120 bp, synthetic construct
  source 1..120: mol_type = other DNA
ggcatatgacaaatatttattcaagaaagctatatgtggacgggatgtttcagttctcatgggagaagtggattttatggtgcctttgagtaatgggtcatatttgggcgttcacacaga

SEQ ID NO: 2375 - DNA, 120 bp, synthetic construct
  source 1..120: mol_type = other DNA
gtatggcaggctgccatcctaaatatgaagtggtctttgtatttgcactttaatgtgttgaaatcatagctttcagtgatccaggattaggcagactcttttatgcaatctcttgtttcc

SEQ ID NO: 2376 - DNA, 120 bp, synthetic construct
  source 1..120: mol_type = other DNA
tgtggaatttgagatgcattgtagttcttcgcagtgtgacttcaaatattttggaagaaacaaatagctcagagacctcgtaaaatatcttaaactggagggctccatggagatcattgc

SEQ ID NO: 2377 - DNA, 120 bp, synthetic construct
  source 1..120: mol_type = other DNA
atttgaaattaacaacttctattaaaaggcaccacaagtgaaaagacatgaatcgtaatggaagaacatactggtacgttataaaatatcaaagagttgggcatggtgtcccatgcttgt

SEQ ID NO: 2378 - DNA, 120 bp, synthetic construct
  source 1..120: mol_type = other DNA
tttaaaaaaatccagacacttcacccaagaggaaatctaagtggtccataaacatgaaaaggtctttaatcaccagtcagaaaaatgaaaatgaaaaccatgccaggccacctcccacca

SEQ ID NO: 2379 - DNA, 120 bp, synthetic construct
  source 1..120: mol_type = other DNA
gaagcatgtttaacgtggaaatcagctcatggttttagttgttagggctacaagaaattgggggagacttcattccaagaaaacatgtagtctgtcaggctgttttcattcctctaaaag

SEQ ID NO: 2380 - DNA, 120 bp, synthetic construct
  source 1..120: mol_type = other DNA
ggaaatctctgattgtctttctggactcagtgtgtttgggttaaggagatagggtgcggctggagaaaatgatgaaaatgttcagaatgttacatgtatttttacactgaaactggaagt

SEQ ID NO: 2381 - DNA, 120 bp, synthetic construct
  source 1..120: mol_type = other DNA
tcaattccagtgtgtttcattgctaaacatcaggctcagccaaagcaatcacgaaaatgactccacgttgaatctttaacatcacaatgtggattaacaatttggcaacatttggctggg

SEQ ID NO: 2382 - DNA, 120 bp, synthetic construct
  source 1..120: mol_type = other DNA
tgtaccctgtttggatgaaagattgtgtttaaatgaaaagagagatgatgagccagaagtgtggcaaatgagttaaaataaattgtcagcagtgtttgaagcaggttgctgagggctggt

SEQ ID NO: 2383 - DNA, 120 bp, synthetic construct
  source 1..120: mol_type = other DNA
gttggatgaaagcaacacttccaagccttttccagcttaacgaacataagtctaggttttggggagagcctatcttagtgagagtgaacaaataaagtaggctgtatctttcagaattgg

SEQ ID NO: 2384 - DNA, 120 bp, synthetic construct
  source 1..120: mol_type = other DNA
ctcggctcactgcaagctccgcctcccgggttcacgccattctcctgcctcagcctcccaagtagctggcactacaggcgcccgccactacgcccggctaattttttgtatttttagtag

SEQ ID NO: 2385 - DNA, 120 bp, synthetic construct
  source 1..120: mol_type = other DNA
attgtgaaagtggctacctctgggacagtgaacagggcagcattgagaagggagctgccatttttcatcataagcctcatgatgatcctatttgattttttttaaagatttgtgttcata

SEQ ID NO: 2386 - DNA, 120 bp, synthetic construct
  source 1..120: mol_type = other DNA
ttcatatttatttccgctcaaagcttcatttggcctctggtcttccttctctttctctcacagcttttttggactctatcctgtaatcgcttttccactgaatccaactaaacactcagt

SEQ ID NO: 2387 - DNA, 120 bp, synthetic construct
  source 1..120: mol_type = other DNA
ttggtaccttgtttatagactttcagaagaccgtaatacttactaagagaatccttttctcctctactcccaccagtttctcccttggcatgagaaccgacaaaccagaacataaatgag

SEQ ID NO: 2388 - DNA, 120 bp, synthetic construct
  source 1..120: mol_type = other DNA
caagcagtcttcatctcatgtagctgtgacagtccttggatgatccgagctgggaggggcttcaaacaactgtatcaagttcaaacccttgatttaaatgtgaggaaaccaccgacccaa

SEQ ID NO: 2389 - DNA, 120 bp, synthetic construct
  source 1..120: mol_type = other DNA
atgggagtaggggtggctcagaactaccatgtcttcttgggatgcattaccctcccagcaccttgacatgctcagcaacctgtaagctccctgaaactttgcttgggaattttttttttt

SEQ ID NO: 2390 - DNA, 120 bp, synthetic construct
  source 1..120: mol_type = other DNA
cctcagacctttaacctcatttgtagaaggagggtgacaatcgaatcgatgtaatttacctatctactaataatcagaactcttttgctttcaggtgagagaaatgcaacccataccacc

SEQ ID NO: 2391 - DNA, 120 bp, synthetic construct
  source 1..120: mol_type = other DNA
tggtatctgaccactgtctacatcttatcagcctgatctgccttcagcaagagtcctattgggttggtctaacaggattcccctctccccgatgttttctctcagttattttccattcac

SEQ ID NO: 2392 - DNA, 120 bp, synthetic construct
  source 1..120: mol_type = other DNA
aaagaggatctccttgtactaaggtatgaagagctaagttcctttgctcatcaaaggccagaagtggggaaatgattttaatgtcttgtaagagattgccgaattggagcacaatttgca

SEQ ID NO: 2393 - DNA, 120 bp, synthetic construct
  source 1..120: mol_type = other DNA
aaaatctattgcacacttggtttgtggtctacactctgcatggatgatctaatttcatctgtacacaaccggtaatgctcacagacaagaacaaggaggctcagaaaaggaaagttattc

SEQ ID NO: 2394 - DNA, 120 bp, synthetic construct
  source 1..120: mol_type = other DNA
acagagatttagaaagctaaaaggactcacccaaactcacacacttgagaagtggcagagttgggtcttctgtctctaaatctaccacaccaaacaactcaactggcagcattttctcag

SEQ ID NO: 2395 - DNA, 120 bp, synthetic construct
  source 1..120: mol_type = other DNA
tgttttatcaaataaagtgtaatcctggcagttggcttcaactgaggcttgaagagaggcccggggtgtttaatctcctgacattttccctgtacctcttttatgacacttttcactttt

SEQ ID NO: 2396 - DNA, 120 bp, synthetic construct
  source 1..120: mol_type = other DNA
gggaccctcatctagatcagtctgaatagaaagaactaccagactcttaaagtcagcctagcaccaagtagacactaaaacattgatttttgtgatgttgtttcccagaaacattgagtc

SEQ ID NO: 2397 - DNA, 120 bp, synthetic construct
  source 1..120: mol_type = other DNA
aaaatctcaggaatcctcctcatttctatttgtatggctttcaatcgttgacatgattttttcacatatgtcatcttctggggatggattcgtataaccctgcttcacttgcttccctgt

SEQ ID NO: 2398 - DNA, 120 bp, synthetic construct
  source 1..120: mol_type = other DNA
tttgtattcaaagagtatctttgaatgctgaacttagaaccactctagaaaatgtatgctaacaatgcgatttatgatgaacacttgtctttgttcccctggggccctgggccacattgt

SEQ ID NO: 2399 - DNA, 120 bp, synthetic construct
  source 1..120: mol_type = other DNA
tgattctcacaaaacctttatgaaatatgtgctgacattttaagctctcacttatagtgagaaaagcaatcttcagcaaggtgatgacttgtccaagggaagacatggtcgcccttgttc

SEQ ID NO: 2400 - DNA, 120 bp, synthetic construct
  source 1..120: mol_type = other DNA
gccttcagggaaaggagtcaaagaggaatacccaggagacaactagactttagaattcttggggccagaaacttgattccacctctagtgctttcttttagatttctttctctctttact

SEQ ID NO: 2401 - DNA, 120 bp, synthetic construct
  source 1..120: mol_type = other DNA
cagagaccctgtcacataaacattaaatcaacactggagactgagcatttgttagaaatgtaagcgggaatggcagaaaacttgtttttaagggaaagcatgttacggcttatgttcagc

SEQ ID NO: 2402 - DNA, 120 bp, synthetic construct
  source 1..120: mol_type = other DNA
ggggtgcatttaacagtccaagttaaagagaaaataaaggccattaaagaccaaacattgagcactgagtgaaaaagttttattgccaaacaggaaacctgattcaggccagggtcttgg

SEQ ID NO: 2403 - DNA, 120 bp, synthetic construct
  source 1..120: mol_type = other DNA
tcactgcgctagccccagaccacctgctccagagttctggttatggtaatgaaataaaccttgatttttattccttaaaactacccttcaatgggttttctgttcattacagttgaatgc

SEQ ID NO: 2404 - DNA, 120 bp, synthetic construct
  source 1..120: mol_type = other DNA
ctgccagagcatggcagagtaaatgtgtgagttgaagggagcaacctcatgaggttttgctttgtgtcttaattacagccatttgtggaattaggcttttaatataaatatttgtgtgcc

SEQ ID NO: 2405 - DNA, 120 bp, synthetic construct
  source 1..120: mol_type = other DNA
gtagtttaaattcacttacatttaaatagctgtgtgtggcttgtggctgcctattggactgtgcagttctggagaatggtactttacttgtccttggggaagcagaaacaaatgaaaacg

SEQ ID NO: 2406 - DNA, 120 bp, synthetic construct
  source 1..120: mol_type = other DNA
ttgcactcactcttaagagagagacatgaacttttaccaacggaagccagtattattttgaacctctgttagagtggcttgaatctgtatcctaacttgtatccctaatgtgtgacccat

SEQ ID NO: 2407 - DNA, 120 bp, synthetic construct
  source 1..120: mol_type = other DNA
ttcctctctctcagtcttatcatccccatccaggcaaatcattgattctgtggacctactctttcgggtgtccctcaaatctctccacgtctctgtgttctcactagcactaccttggtc

SEQ ID NO: 2408 - DNA, 120 bp, synthetic construct
  source 1..120: mol_type = other DNA
aagctaacaggaaggcctctttccagaaacactgtaagccagtgtttctcagattgctgggtgtaattcataggcagatcatgaaatcagtttaatagctttgaccagcattaacctatt

SEQ ID NO: 2409 - DNA, 120 bp, synthetic construct
  source 1..120: mol_type = other DNA
agctaaatgactgccagatccaaaactagaattcagacctcctagtttctaagtggacgctctttctacaccaccataatgtgagtgttctgtgtttacagggtgtattcaagtccatga

SEQ ID NO: 2410 - DNA, 120 bp, synthetic construct
  source 1..120: mol_type = other DNA
cgcctcttctggactcagatgccctaggctggctgtctggctgtgctttccagacagtgtgtatgtggaattgtgctttttgttttttaagaatgtaaaaagttacagtaagatcgaacc

SEQ ID NO: 2411 - DNA, 120 bp, synthetic construct
  source 1..120: mol_type = other DNA
agggtctcattttcctgccccttgaaaccatgcttaccattcctttagaagattgctcaagctgcctccaattgcctctttccaaaaccaaagcataggaaaacaagtaaaaacagctga

SEQ ID NO: 2412 - DNA, 120 bp, synthetic construct
  source 1..120: mol_type = other DNA
gtttaaaaaccaatcccaactcaaatcagaaattacccaaaatagctggagagtcactgagatctcaggtaagctttcccttcctgccatgaactagaaggggaaagaagagtttgacat

SEQ ID NO: 2413 - DNA, 120 bp, synthetic construct
  source 1..120: mol_type = other DNA
cccggcaaccccatgatctcttaaagggggaaaagttgaactgatcaacagtagttaagaaaaaaaaaatccacaccaacaaataaatatcttgtctgagaagactcagatattcctggt

SEQ ID NO: 2414 - DNA, 120 bp, synthetic construct
  source 1..120: mol_type = other DNA
tttaaaaaaattttttttgtttcattttattggataaagattaagaaagcgccagcagtgactgagagaagcaaaccacgcccggcggccccgcggcctggagagggtccccggcgcggg

SEQ ID NO: 2415 - DNA, 120 bp, synthetic construct
  source 1..120: mol_type = other DNA
ctgctgcacaggtgcaaaccactgagctacccacaaagccaacaagggacacctgctctcccactcctccaaatttttttttaaaaactgtcatctttattttagttcataaatacatta

SEQ ID NO: 2416 - DNA, 120 bp, synthetic construct
  source 1..120: mol_type = other DNA
tcaaaagtcaactgcagctcctcttctttcctcaagttatttggaattgtgagtgaatccgagccgaacaactgttgactacgagtttttctccaaaagcctggtttttaaatgtaacct

SEQ ID NO: 2417 - DNA, 120 bp, synthetic construct
  source 1..120: mol_type = other DNA
gcccgagtgtggtgttgatcttacgcttaatgactcaggtgaggggaaaatcttatgatgttacccatgttgaggaagatggattatgtccctagatttacagaaagtgaaaaaaaccaa

SEQ ID NO: 2418 - DNA, 120 bp, synthetic construct
  source 1..120: mol_type = other DNA
gtgcatagatcggtatacagaacactgcatctactcactgagggaacacaaagtctcttatagaaggataactctgttaaattcctaaggtaattgaaaatcctgggcctggaaaaccaa

SEQ ID NO: 2419 - DNA, 120 bp, synthetic construct
  source 1..120: mol_type = other DNA
atgtgtcagcccagagctagagggggaggctaaataagctctgattagaagtgaatttgaagatttgattaaacaactgagaacgagtctcaatcttaaaactggtacttaattaacaac

SEQ ID NO: 2420 - DNA, 120 bp, synthetic construct
  source 1..120: mol_type = other DNA
ggaatctaaaagggagttcttaaagacaatagatgagacaaagccatttccagtgtcggcccatttaataaactggttccacctggattttctcttcattgtggtgaaagccaccaccta

SEQ ID NO: 2421 - DNA, 120 bp, synthetic construct
  source 1..120: mol_type = other DNA
tgaagctggtaagaccaacatccacctattcattccttcagcaaacatttactgtggacagcatcaggttggcagtatcatgcaaggctcagaaatatggtggaaaaccagacagatgca

SEQ ID NO: 2422 - DNA, 120 bp, synthetic construct
  source 1..120: mol_type = other DNA
acacatgattaaaatgcagattccatggcaggtcccgctcagaggtttatttagtgggtcagaaaatgggcccaggaatttcattttaacaaatgtctccagataaatctgatgtaaatg

SEQ ID NO: 2423 - DNA, 120 bp, synthetic construct
  source 1..120: mol_type = other DNA
ttcaaatttcactgggcatgctgtctttttatttcctaaacctggcaaccctactcatgactccacttgtcagcttggtacactcctctgagaagcttctcccaatattcccatctcatt

SEQ ID NO: 2424 - DNA, 120 bp, synthetic construct
  source 1..120: mol_type = other DNA
agagatttgaaactagaggaaggagcttgcaatgtgataaagcagcaaatgtacaagagtttggaagaaggagaggtaggttgcttttggcaagagcagcaattctcaattctggctgca

SEQ ID NO: 2425 - DNA, 120 bp, synthetic construct
  source 1..120: mol_type = other DNA
aacattgactatcctggagcacacattctagtaacaataagcaaacaaacaaatttgtaaatagcataaaaaaaaaaaaccctggggagcactgcagtagagaggctcttgggccacctg

SEQ ID NO: 2426 - DNA, 120 bp, synthetic construct
  source 1..120: mol_type = other DNA
caggctctggcgcctccacctgctaaggaggtgacatggacacattccttaccttctcggaccctcgcttctccctctaaaaatggcccaatgccctacttatttatttattttttattt

SEQ ID NO: 2427 - DNA, 120 bp, synthetic construct
  source 1..120: mol_type = other DNA
tccttgctagcagggctgacttcaaccaccccccactctgtgctttatctctgggattaaggttttctctcctcaccagaaatcattcagcaaaatgagttattaaaagccggttaacca

SEQ ID NO: 2428 - DNA, 120 bp, synthetic construct
  source 1..120: mol_type = other DNA
acctcaattcctctatcacacaggaggagattttaaaaggaagtctctggtggtttgtaaagcaacaaatcctgctctcaagtggatagttccaagccctctcaatgaattcagttttat

SEQ ID NO: 2429 - DNA, 120 bp, synthetic construct
  source 1..120: mol_type = other DNA
tgcgatagaaggagatggaagctgaggttcagagacgttaatgaccttgaaggtcagggtcacagaaaatggcacaaccgggattgcaactcagttctgcccaatttcaaatctaccttc

SEQ ID NO: 2430 - DNA, 120 bp, synthetic construct
  source 1..120: mol_type = other DNA
aaccagatgagggatgtttggtctttttagtggtttggacgatgttcttgttttggtctgtgtttggacatgattatggggtgaatggtcttgtttttctctcactccatcttggtcata

SEQ ID NO: 2431 - DNA, 120 bp, synthetic construct
  source 1..120: mol_type = other DNA
tcaacagtgatctaaaagacaaagtcccctaccctcaagaagcttacatttcagtatgggagatggaataataaactacaaacaattacgtggcctgtgagaaagtggcaagtactacaa

SEQ ID NO: 2432 - DNA, 120 bp, synthetic construct
  source 1..120: mol_type = other DNA
agacagggaaactgaatccaggataaataatgtagcttgcatgacaccaatcttcctcaagtctgagccagaatttatatctcccatttctcaacctcatctctcaagcctataatcttt

SEQ ID NO: 2433 - DNA, 120 bp, synthetic construct
  source 1..120: mol_type = other DNA
acagaggaaacactaaatatgcttcttcagctccttatcaaggttaggcctccacaaagggtggagcagggaagagaaggcctcaccgggcagacctatcttggagaagatacaagcaat

SEQ ID NO: 2434 - DNA, 120 bp, synthetic construct
  source 1..120: mol_type = other DNA
cctgcactcttagagtttgtggttcagttattccagtttcagcacttacattcattcaaatgctttgtggaagcaagctggcttttagtcaccagcaatagcaatttctgaaaatcacca

SEQ ID NO: 2435 - DNA, 120 bp, synthetic construct
  source 1..120: mol_type = other DNA
caaagcttggtttctgagccctgatcaggaggctgtgtttatatttatcctgctaactgcaggggactgtttattcccagagaaataacctcctgggcaggataggggcagccaaggaac

SEQ ID NO: 2436 - DNA, 120 bp, synthetic construct
  source 1..120: mol_type = other DNA
agcaagaaagacatgggaaactgacaggttttcatcactggctagtgaaaacacattttatacttctgggccaacaaatacttgggtcaattcacacattggcttgagaatgagttcttt

SEQ ID NO: 2437 - DNA, 120 bp, synthetic construct
  source 1..120: mol_type = other DNA
tcactataattctggagatctgtaaaaggatgtttaacatgtttaaagtctttgtttcccatccttctgccaaggattgagacatcgcccacccagcttcaatcctcatagctacttctg

SEQ ID NO: 2438 - DNA, 120 bp, synthetic construct
  source 1..120: mol_type = other DNA
caaatgttctataagaagtatctgttattcgagtgaattaaagaccactcgttttgtcattatttttaaaggcagagtctcaccgtctgggtggggagggaagtcatacacaagagagga

SEQ ID NO: 2439 - DNA, 120 bp, synthetic construct
  source 1..120: mol_type = other DNA
tcatggaatataaagccgagactgaattgcacttaacttcttttttttttttttctcaaataatttgctcagggctggggcagccagtatcatctacatgctctctccctcagggaggaa

SEQ ID NO: 2440 - DNA, 120 bp, synthetic construct
  source 1..120: mol_type = other DNA
attacctcaatttacctactctccctcttaagatcctatttaaatgatggtaaaaggacataaaggtgtaaactagcaataacacagggaatgggcagagggtttacagtggaagggccc

SEQ ID NO: 2441 - DNA, 120 bp, synthetic construct
  source 1..120: mol_type = other DNA
aggtatcttcttcagtgatgataacattgctttagccagggttaagaaccagtggtctataggctggcaaatcccaaatttgtatctcaaacccaacctgtcccttgagttctagactgg

SEQ ID NO: 2442 - DNA, 120 bp, synthetic construct
  source 1..120: mol_type = other DNA
catcaagaaaaaggactccagaaatctactaggggtccctctttgttactcgcaaaggtctgaataacaatctgtgcaggtacagggtaaaacctagaaaaaaataagaccaaggaaaac

SEQ ID NO: 2443 - DNA, 120 bp, synthetic construct
  source 1..120: mol_type = other DNA
gcagatccaaggagctctataaacacaaaggaaactacacaaaggcacatcaaaatcaacttgttgaaagtcaggaatgaagagaaatcttaacagcagccaaagaaaggaggcacaatt

SEQ ID NO: 2444 - DNA, 120 bp, synthetic construct
  source 1..120: mol_type = other DNA
tgaacagcaatgagtggtcttagaaatcagatcatgttatgcctcttttgtctccctgctttttttaacctaagttttgcctcaggatctaatcatgcttcttctcaaaatcctcccgtg

SEQ ID NO: 2445 - DNA, 120 bp, synthetic construct
  source 1..120: mol_type = other DNA
ggtcaggaactgagatagaatttatcagcgtgctggctccgagtctgcagctaggatgccctttagccacaaacagctataaaagaataagctttatggaaaaacattaaaaaagaaata

SEQ ID NO: 2446 - DNA, 120 bp, synthetic construct
  source 1..120: mol_type = other DNA
cccatgaccctgtgaggtagacctcattgcaagagtatatagctcttcagtccaatgtgacgaattctgctctttgtttaaagtgtgaacaccagtagctataaaataaaattataacgc

SEQ ID NO: 2447 - DNA, 120 bp, synthetic construct
  source 1..120: mol_type = other DNA
tctggggtcagagaactcagctcagggtttagctttgccacttacatgtgaactcagccagattatctattaataaaaatataagcccacattaaagtgcttatgaaataccagggccag

SEQ ID NO: 2448 - DNA, 120 bp, synthetic construct
  source 1..120: mol_type = other DNA
aaagtttaggaaaaaaagaggaatcaggacaactctttatatggatgacatttattgatatgaagactcatggagcagtgtaccaaggagcaggaacagcttgtgaggggaacagtcaag

SEQ ID NO: 2449 - DNA, 120 bp, synthetic construct
  source 1..120: mol_type = other DNA
tcttctcagaagctttcctgtaaaggagggcagagaaatgggaaagtagcaggagggtgatgcagggtctattaagaaggaagaatatacatgtttgcataccgatggagtataaattaa

SEQ ID NO: 2450 - DNA, 120 bp, synthetic construct
  source 1..120: mol_type = other DNA
caaaaactttgaaggtaatgcagttactagtaatagcaaggacatacatagatagaaccaaatgacctgctggggtgggatggaaagaaatatggttatagatgagatggttaaggagcc

SEQ ID NO: 2451 - DNA, 120 bp, synthetic construct
  source 1..120: mol_type = other DNA
agctgctgggttcctgacattggttacaagttacatctctctttaaatataatggggtatgttgctgcttacaggagctttggaatgaatccctttgagaagcaaagccttcttttacaa

SEQ ID NO: 2452 - DNA, 120 bp, synthetic construct
  source 1..120: mol_type = other DNA
tttcctggtttgtggaattgcatttcattactgattaaacttccgtcaaatgtgtgaagcaacctccagtttctaaggaatgtgtcctgggcaggtgaagagaaaaggcagaaccactgg

SEQ ID NO: 2453 - DNA, 120 bp, synthetic construct
  source 1..120: mol_type = other DNA
ctgccatgatggttattatcatgttattaattgtaacagtgacaagcactactaagatgtagcttctgaggtggagaaagaagaaactacgttttctgcatacctactatgtgctgggcc

SEQ ID NO: 2454 - DNA, 120 bp, synthetic construct
  source 1..120: mol_type = other DNA
atctgtgaaatgggatataattttctttgctgtcctaggatttttgggagcttactgagtaaacacagataaaaacacagtgaactggcaaacatgacatgtggcagggaggggagtcaa

SEQ ID NO: 2455 - DNA, 120 bp, synthetic construct
  source 1..120: mol_type = other DNA
tttagagtcgacactaaactatactggaaggaaggatatgagccaatagtcttcccagatataagaacatctgagctaagaaggggctcaaaggaccttgggcattcccttcttttagta

SEQ ID NO: 2456 - DNA, 120 bp, synthetic construct
  source 1..120: mol_type = other DNA
aaagtcagtggaactggacggaaaaaatggaagggccagaaaacttggggaggactccagagctgggggtgacacaggaatagaccaacggccttttgttgtttccaagatcctctgaat

SEQ ID NO: 2457 - DNA, 120 bp, synthetic construct
  source 1..120: mol_type = other DNA
tttgctataatgggctgattgttggcttttgttgacaaaatggtctacatgcctggggaaagttatgaaggatctttgtggtgcttccagctagaatactctaggagtgtacctttgctc

SEQ ID NO: 2458 - DNA, 120 bp, synthetic construct
  source 1..120: mol_type = other DNA
ctgctctccacccagagtttcaaatttaaggagatattttcttcctaaatgtccttcaaagctgtcacagcatcatctttcaataaaaaatagttgatgagactgggcatggtggctggt

SEQ ID NO: 2459 - DNA, 120 bp, synthetic construct
  source 1..120: mol_type = other DNA
tgctaaaagaacacaagacagttatctttatctttaggagttcatacaatcacaggaagtgcagacaacatgccaaaggccacacatgcatctatgatgagtgatgcttgtcttagatgt

SEQ ID NO: 2460 - DNA, 120 bp, synthetic construct
  source 1..120: mol_type = other DNA
tccagctgcccatgttggaatatgccttaatctctgccatgcagagtaagctttaacctttcaaaatacagcctgatacatacaatcatgttacggaatgaatggaaggaaagatttcca

SEQ ID NO: 2461 - DNA, 120 bp, synthetic construct
  source 1..120: mol_type = other DNA
aaacacgaatcaagaaagagaatatagctcctttccacttgactaaagaacagtcaatcctgccagtagactaaaggctggggcatggaacaatttcccaacacactgacttgattttgt

SEQ ID NO: 2462 - DNA, 120 bp, synthetic construct
  source 1..120: mol_type = other DNA
tgaaggagtattgacacagcattcttcataaggttgagaaaacgtgaactgtttatatccaaaaaaagagagaagagatgatggaaagaataggggaactatccctgctcccagctaccc

SEQ ID NO: 2463 - DNA, 120 bp, synthetic construct
  source 1..120: mol_type = other DNA
aaagaagaaagcgggggagactatgaaaagaaataaaagcgccgagggtggagggagaaggggcttttgagatcatcctggagaggaaactgaggcctgggggttgtgggtggaaaacag

SEQ ID NO: 2464 - DNA, 120 bp, synthetic construct
  source 1..120: mol_type = other DNA
aggtgcgggctgtgcgggcagtcctgctcccgcccccggggctgagctggcggcgtcggcttcagagcctcggagccgagccgagtccggggaagcgctcctttctcagctccagccgaa

SEQ ID NO: 2465 - DNA, 120 bp, synthetic construct
  source 1..120: mol_type = other DNA
cccgcttactatggactgcgggaagcaagaccctggtgatgatatgatggcagaaaataaaaataataatggtgactgtacttagatatcccaggtgggtgagcggtggcaaaaagcaga

SEQ ID NO: 2466 - DNA, 120 bp, synthetic construct
  source 1..120: mol_type = other DNA
ctcttttctggagcacagcagaaggtgtatacaaacacaaatttttgttattgcagactattgttattattgccaaaacagtcaactctttctccaaggctttggctcccctggactctc

SEQ ID NO: 2467 - DNA, 120 bp, synthetic construct
  source 1..120: mol_type = other DNA
ctttacttgtgctgtggcccctactacagcactatcttctctcttctctccagctctttacaaaaaccagctcaactcaagttagacattttttccagaaagtttttcctttgtaggatg

SEQ ID NO: 2468 - DNA, 120 bp, synthetic construct
  source 1..120: mol_type = other DNA
cactgtactccagcctgggtgacggagaaagactctgtctcaaaaaaaaaaaaaaaaaaaaaaaaaaaaaaaaaaagatatgaattgagataatctttatccaaaaaatggaaacaaatt

SEQ ID NO: 2469 - DNA, 120 bp, synthetic construct
  source 1..120: mol_type = other DNA
cttctccccccattctcctggaattaggtttttataaaaccttttatgttttaagtcatttggcaaatgtttcctcacaccatgtttcacagagctggtaactgggaagaagtgaaccag

SEQ ID NO: 2470 - DNA, 120 bp, synthetic construct
  source 1..120: mol_type = other DNA
gtgtctgatttacaatggtttgacttgcaattttttggttctacaatggtgtaaaaccattgcacttttgacttaatgtgtagtagtcaataaattacattaagatactcaacactttag

SEQ ID NO: 2471 - DNA, 120 bp, synthetic construct
  source 1..120: mol_type = other DNA
cctctcagcctctcaatacaactttagggcatagattaaccgaccctgtgaaacccaaaggttagttttttccttctaaaatgagagtcggatatataatatatgtggactctggcttga

SEQ ID NO: 2472 - DNA, 120 bp, synthetic construct
  source 1..120: mol_type = other DNA
agatttcctactcttcttccctcttctctgtctttagttcatcactctcttttttcccctattagaatatcagcacatgtttgagtttggcttctcaatgagacttctagttcccaccca

SEQ ID NO: 2473 - DNA, 120 bp, synthetic construct
  source 1..120: mol_type = other DNA
gaatgagtcaggactctatgaatattgaactgatcgttttagagagttagaatatttgttttagctaggcaactctaaaaaggggatgagacccagaggaggaaagaatggaaggtggca

SEQ ID NO: 2474 - DNA, 120 bp, synthetic construct
  source 1..120: mol_type = other DNA
gtgctattaaggatcctaactcatttaaaattgcctatatattaatgactgggtaggagggagggtgggagtaccattaggggctgttggaatagcagataaagaaactaaggccctgaa

SEQ ID NO: 2475 - DNA, 120 bp, synthetic construct
  source 1..120: mol_type = other DNA
atcaaaagttacacaagtcaatgaaaaatgaccatggtgacaatggctgtgaagaaagactatgttgtttcaggagatgcatatagggatatttgacttaggcagggctgagacaggtag

SEQ ID NO: 2476 - DNA, 120 bp, synthetic construct
  source 1..120: mol_type = other DNA
agaattcctaagaaaaaggggaagccatggtgttctaagcagagggtgatggactcaccagctacttctgcctcacccaaggtctcattgtgcatcaggagaaggctgttcagagccttg

SEQ ID NO: 2477 - DNA, 120 bp, synthetic construct
  source 1..120: mol_type = other DNA
ccttgtgtcaggcagaactggaaatgtaaagtgaaaaagtgagacggtgtactcaaagaggagtcctgcacctgaaatcttagagatccagcaagggcagcagccattagaggttataat

SEQ ID NO: 2478 - DNA, 120 bp, synthetic construct
  source 1..120: mol_type = other DNA
agaaaggtgccgtaaatagacgtggagaagtgtggcagcttgttggtgcaaaatatctggggagttctcaccaaatctgcctagaaagtaaagaagttcctcagatgggtaaagatgagg

SEQ ID NO: 2479 - DNA, 120 bp, synthetic construct
  source 1..120: mol_type = other DNA
ataaaagttcaaatggactataccctgtagcatctcaaggacaagctctaattctgagaagggcaagaggtaaaagtactgcccagtcctttttaaattggaggctgagcttggtgaggt

SEQ ID NO: 2480 - DNA, 120 bp, synthetic construct
  source 1..120: mol_type = other DNA
gaggaaacctctttcagcccatataacagcatggtggtgcaggatacggaaggcatatttagagtcagtataaatattgatgcgtagtccctttgcaagagtgagggcccgagttaaggc

SEQ ID NO: 2481 - DNA, 120 bp, synthetic construct
  source 1..120: mol_type = other DNA
agcatgtgtgttttcatgaagaattatgccgaggtaggtaatggatggagaagaaatttgagctttggagggggatacctaatatcccttggagaataaatattaaaggagcaggagggt

SEQ ID NO: 2482 - DNA, 120 bp, synthetic construct
  source 1..120: mol_type = other DNA
taagggggcaagggaaacaggcccttgaaaagaaggtaatgtggagtgggtagcccccgtatcagttaaaaaggggatggacttaccctccactgtgagttacctgaagctcggcgtcta

SEQ ID NO: 2483 - DNA, 120 bp, synthetic construct
  source 1..120: mol_type = other DNA
gaagttaggatgacatttaaatcactccaggttaaattgtaggacagagttagatattggaattcctgtatatatttagcgggatctgatgagaaagagcctaaatgctggctgatttca

SEQ ID NO: 2484 - DNA, 120 bp, synthetic construct
  source 1..120: mol_type = other DNA
tgttttcctgagtccgtgaccagcaccagagttttgggttcatggataaagcacgtctcctctgtctctaccagaaaaagaaaggaaccaaaattaaggaagaaagagattgaagggtgg

SEQ ID NO: 2485 - DNA, 120 bp, synthetic construct
  source 1..120: mol_type = other DNA
ttcctggaatccccttccctctttttactggaaaactgtaaccataataggtccattgtctgttgtgtacagcaaatcaatacaccaagatactgggatgcagcagagataagagattta

SEQ ID NO: 2486 - DNA, 120 bp, synthetic construct
  source 1..120: mol_type = other DNA
gatagtcacatagtacctggcccatggtggatgctcaagggatgatgaaaggagaggtcacatgttatatgctcccatttttgtgaaatttccagagtaaacaaatgtgtagagacagaa

SEQ ID NO: 2487 - DNA, 120 bp, synthetic construct
  source 1..120: mol_type = other DNA
ggtgtcatctctaatacatccatctgtctaccttgctagagaccaaacttggactaatccctgcaaaagaaaaaccagcaaggagaaaaggcatcattaggaatgtagtttgtgacaaaa

SEQ ID NO: 2488 - DNA, 120 bp, synthetic construct
  source 1..120: mol_type = other DNA
aaatctccgctcatattacacaaagataatttcaaccccattatagacacatgatgttattatttgtggtaagccaacattttcatggcacatgcgatgttgccagtgacagagcaggag

SEQ ID NO: 2489 - DNA, 120 bp, synthetic construct
  source 1..120: mol_type = other DNA
cacatcacctccctgttctctagagagaagtgccctgtttcttaagcaaagtgctaaacagagatagttaaataaattttcaagtaagtaagagagggcttcggtagttccctaatgtag

SEQ ID NO: 2490 - DNA, 120 bp, synthetic construct
  source 1..120: mol_type = other DNA
ggattcaagtgtgagagaaatggcagctccccatgagggaaggggcatgttttctctttcttaccagctgtattctcctgatccaaaatcattattcatcatcaaaataaaattccagag

SEQ ID NO: 2491 - DNA, 120 bp, synthetic construct
  source 1..120: mol_type = other DNA
cgctggcatctgcttggcttctggggaggcctcaggaaacttacagtcatggcagaaggtgaagggggagccaacacttcacgtggccaagcgggagccagagagagtgagggggaggtg

SEQ ID NO: 2492 - DNA, 120 bp, synthetic construct
  source 1..120: mol_type = other DNA
atctgagcacaaattccttttttattgtcccatttgactgaacaagatctcgtacatgccaagactgaaacctttactgtcccagggcctccagcagaatgtccctcactagtttggaat

SEQ ID NO: 2493 - DNA, 120 bp, synthetic construct
  source 1..120: mol_type = other DNA
acacacacacacacagagctatcatgaggcttgccctctactacatacacctaagagtgcccctctgtaatatttcatcattttaatcaaatgttcactctttcacaacatgtataagtg

SEQ ID NO: 2494 - DNA, 120 bp, synthetic construct
  source 1..120: mol_type = other DNA
aaagggtatgtggtcttctctgtagaaggtggcacaaagcaggcacacagtgccacaaaaaggcctcgctcttgattgactcatcaatgctgtgtgacatgtgaggagtgaggatgtgtg

SEQ ID NO: 2495 - DNA, 120 bp, synthetic construct
  source 1..120: mol_type = other DNA
gctgctgtgaattttaattcaattcagtctggctggcttactgaatcaatgttgggaaaacatagcgctctcctgggaggagaggtgtttggtataaatagaaggtattatcattaagag

SEQ ID NO: 2496 - DNA, 120 bp, synthetic construct
  source 1..120: mol_type = other DNA
ttttttttttccaggacacagagatgccagagaaatgcggtcagttcttcctcctcctcgttcttaacaacacttattaaataactactactattaactggggacctgctgggcaatcat

SEQ ID NO: 2497 - DNA, 120 bp, synthetic construct
  source 1..120: mol_type = other DNA
tccctcctgcctgtctgtccctacccacctatcttgagtcaaccattgagcaaactacagattagttgcattttctagaatggaatagtatgtggtcttttttagtgtcgcttttaaaat

SEQ ID NO: 2498 - DNA, 120 bp, synthetic construct
  source 1..120: mol_type = other DNA
caaggttaaccctataggagaggaatagcttttcctcacccattgctaggttcacagctgaggtcccgataacaaaagatagatcaacaagagatctatcagatcaacaagagaaaagat

SEQ ID NO: 2499 - DNA, 120 bp, synthetic construct
  source 1..120: mol_type = other DNA
ttatctcatgctgggttaaaaccatagatgccaggctcatctccttgcctctagactcttatctttaagcattgctgcacagtatgggccagattcattctcttctgttacaataaccat

SEQ ID NO: 2500 - DNA, 120 bp, synthetic construct
  source 1..120: mol_type = other DNA
agagaactgaagcacagagaggttgctcccttcaaggacacatgggagcaaatggcaaccaaacgtggaaagtgggtccattttaaaaagaattatagaaaaacactacataaaatttac

SEQ ID NO: 2501 - DNA, 120 bp, synthetic construct
  source 1..120: mol_type = other DNA
aatccctccacagaagcttgaattttccttctgttctctcctttgctctgtacttctcagcaaaaagcatcacctataaatgtgaaggctgattaattctaagtctggggctagtgttaa

SEQ ID NO: 2502 - DNA, 120 bp, synthetic construct
  source 1..120: mol_type = other DNA
gaataaaaacactgcactttataatgctagcactgtttccacccaaatctgccatcgtccttcttccaaccaattgccctccctaaatcctttctagatagacattccgtagtcacacca

SEQ ID NO: 2503 - DNA, 120 bp, synthetic construct
  source 1..120: mol_type = other DNA
tctatagctccagatctcatgacccagccaaaaatatggtctatgagcaacccagcctaacaagagggtcatccaatttgcttggaatgttaatcccaatttcttgcaatggtaaaaata

SEQ ID NO: 2504 - DNA, 120 bp, synthetic construct
  source 1..120: mol_type = other DNA
ccacctagtcccaagttgcattctttgggtttcattatggtagtatcccacttccaggtatctaagtctatgtcaagtattaattgctgagcaataaaccatccccaaacatagtagctc

SEQ ID NO: 2505 - DNA, 120 bp, synthetic construct
  source 1..120: mol_type = other DNA
aaaaaaaaaaaaaagtcagggtgaattatattccctcatgtgatcacagaaggcagagaagagggaacccgacatctcagtctttcaggaaacattaagtgacagaaaatgtgaacctga

SEQ ID NO: 2506 - DNA, 120 bp, synthetic construct
  source 1..120: mol_type = other DNA
taagacggtgccatggaatagaattttccactataaaatttttcactctataccaaacctagaagtttttctcctactgccaaaacctcacagtaaggtgaggatagacccctccaccat

SEQ ID NO: 2507 - DNA, 120 bp, synthetic construct
  source 1..120: mol_type = other DNA
ttgaacccaaaaggaggagattcctcctggacaaaataaaactttctgtccatatatagaagatcgtaagtggcactggctcagcacaaggcttcaggttcctcaatttggaacattgaa

SEQ ID NO: 2508 - DNA, 120 bp, synthetic construct
  source 1..120: mol_type = other DNA
aaaaaaaaatagttctaatctgatccttgggctgtgtttaaaatgcaaattcccctgggagggtcacagtactttaagtttctggtgatttaccttgcagtgtgaatgagtcccagacct

SEQ ID NO: 2509 - DNA, 120 bp, synthetic construct
  source 1..120: mol_type = other DNA
ttctctctgttgaggtcaagatatgtaccggtaaccagcagagagatttagtagatgggagtgggggaagctgctgtaataaagagaccctacaataaatcagtggcttaaagaagatca

SEQ ID NO: 2510 - DNA, 120 bp, synthetic construct
  source 1..120: mol_type = other DNA
tactcttgtgctggccataacttgtcatttcttctccattcaagacagcttagctggacataagtgagacaaagtaacacgacagagataaccttcaacagactcagtcaaagaaaatga

SEQ ID NO: 2511 - DNA, 120 bp, synthetic construct
  source 1..120: mol_type = other DNA
tgtgcctgagatgccaaacattgctggagagaatcttatatttgggccaattcacttaatgtttattaccctaaacctcaaatgtgcaggcaacaccatggggcagtttttgccttgcat

SEQ ID NO: 2512 - DNA, 120 bp, synthetic construct
  source 1..120: mol_type = other DNA
gtttgttccttggccagcatctgggagccaatttattcagccctgaggtttgttttgttaaggactttaaaatgtattaagaaatgcgcgaagagctttgtcatcacttttccctttcta

SEQ ID NO: 2513 - DNA, 120 bp, synthetic construct
  source 1..120: mol_type = other DNA
caaaataaaataaaagaagaggtcagagtcatgcaggctaaagccagccatttgacagtggaggcagagatggcagcaacacatctctctgtaagccaaggaatgccaaaggcaccagaa

SEQ ID NO: 2514 - DNA, 120 bp, synthetic construct
  source 1..120: mol_type = other DNA
ttcacaaaccttcagagttgactagagaatatctgactctatgaatgttacatctgtgaatgctgaggctatggcaatgaatgaggtatcctgatacattccagcacatctgcatcctac

SEQ ID NO: 2515 - DNA, 120 bp, synthetic construct
  source 1..120: mol_type = other DNA
gccagaatcagggaactggagcttgtttttgtgtatataggggaaaaaatcttggagttacatagatcatgcaggatctattccatggaaagtaatgcagctattacaatgccaacgtat

SEQ ID NO: 2516 - DNA, 120 bp, synthetic construct
  source 1..120: mol_type = other DNA
gcattataatcatatcatgggaaatggggtatccatcaactcaagcatttatgctttgtgttacatacaatccaattatacttttagttatttctaaatgtacaattaaattgttatcga

SEQ ID NO: 2517 - DNA, 120 bp, synthetic construct
  source 1..120: mol_type = other DNA
tttcaccatgttggtcttgaactcctgacctcaagtgatctgtcaagtgatctgtctgcctcagcctcccaaagtgctgggtttataggtgtgagccactgcgtccagcctcactgtagc

SEQ ID NO: 2518 - DNA, 120 bp, synthetic construct
  source 1..120: mol_type = other DNA
tattgattctttcaattcacgaacatgaaatagctttactttttttggtgttcttttcaatttctttcatcagtgttttatagttttcattgtagagatttttcatttctttggttaatt

SEQ ID NO: 2519 - DNA, 120 bp, synthetic construct
  source 1..120: mol_type = other DNA
ccacagaaaaattgcaagaatggtgtaccattacaatcaatacccaaatttctttcacctagttggattgactaggatcattttgccacatgtgctgtctccatgtggttctatatatgt

SEQ ID NO: 2520 - DNA, 120 bp, synthetic construct
  source 1..120: mol_type = other DNA
ctggccaacaggatgtgagagggaaggtggagatgagcccggaactggggagattcccaaaagtctcagctacaacccaaaagtgacaaagtgtaaggggagtgatatcatttagatctg

SEQ ID NO: 2521 - DNA, 120 bp, synthetic construct
  source 1..120: mol_type = other DNA
tgaccgccatcctggatggcaggtgcagcccctgttcatgcctatgttccagcatatttattaattgttccctctttcacttttccagtttgagcaatattttgttttgttttgtagaga

SEQ ID NO: 2522 - DNA, 120 bp, synthetic construct
  source 1..120: mol_type = other DNA
attctgaacatatcctgaccatgtttgcctttgggaccagtaaagccctttttccgtaccctcattgcccctactcctatgtctattaaaatctacccacttggctgggcatggtggtga

SEQ ID NO: 2523 - DNA, 120 bp, synthetic construct
  source 1..120: mol_type = other DNA
tcattatctaaaggagaacaaaaaggagacatgtaaacaaagagtcaccaaacaatgcaataagcaccataaaacagcaaggccaagtgcacagatggaggaacccattctgtctcatgg

SEQ ID NO: 2524 - DNA, 120 bp, synthetic construct
  source 1..120: mol_type = other DNA
tgtttacacaaatggaaaatgtcagtgtttaatctgtaaagggagcccagattgcaaagctccaaaaagaaacatctaaaggtgagcatccttcctctaggtgtgggacattacaatgtc

SEQ ID NO: 2525 - DNA, 120 bp, synthetic construct
  source 1..120: mol_type = other DNA
gggtatctctggggatgttccctggacatgtctgggtgtttaaagatgcttggtgcttctggtgtggatcactggctgaagtcatttctaagatcctgttagctctaaaatgaccatgtt

SEQ ID NO: 2526 - DNA, 120 bp, synthetic construct
  source 1..120: mol_type = other DNA
atcaaaagctctacttctaccttaagggccatagccactccgttatcattctggaccatagtaaccagagcattctgacctttagagctgccctatgtgaccattctctgttttagacag

SEQ ID NO: 2527 - DNA, 120 bp, synthetic construct
  source 1..120: mol_type = other DNA
agagctgcctccattccagcactgggatgtggttggtaatgtgagattctcactatccaatgccgcaatcagagccatatgcggctatttaaacctcaatttaaatgaattaaaattaaa

SEQ ID NO: 2528 - DNA, 120 bp, synthetic construct
  source 1..120: mol_type = other DNA
caagcatcaccatcaccaaaaataaaactgccttggtatccttgctgtagtccatgaagcttctgtattagaattacttggaaggaagaggcttgtttaaaatgcagattttggctgggc

SEQ ID NO: 2529 - DNA, 120 bp, synthetic construct
  source 1..120: mol_type = other DNA
tttgataaagagtggacagtcgtgcagatgtggacaaagggggtaatacactaatttattactattccaatgataataaactggcgggaacttagcagggcctgttcagaatattctctg

SEQ ID NO: 2530 - DNA, 120 bp, synthetic construct
  source 1..120: mol_type = other DNA
tgtgtatgtgaatgtgcacatgagacacacatatatgttttttgttcctgcgatttctgggcaccatgtgcagtaaccaaagcagaatattcatcctgtgaatctgaacagcattaatga

SEQ ID NO: 2531 - DNA, 120 bp, synthetic construct
  source 1..120: mol_type = other DNA
tcttctcatggctttaaatatcatctttaggctgatgactctcaagtgtatatgcctagcccagatcacttttctaaaatgagagcttggatattcagctgcctactcacgtctccactt

SEQ ID NO: 2532 - DNA, 120 bp, synthetic construct
  source 1..120: mol_type = other DNA
ctctcccagtggattcttcatatgatctctcccaacaagatgaccacactgatttggggctggaattatcccattaaaaactttgttagaatagagagctgtggatattggatatgtata

SEQ ID NO: 2533 - DNA, 120 bp, synthetic construct
  source 1..120: mol_type = other DNA
acacataaaactaactattacagatcacatggaagggttgacaaccatgactcagcagtaggagccttttttccagagtgttgctactaacctttctcaaccttaatgatttctgtgtct

SEQ ID NO: 2534 - DNA, 120 bp, synthetic construct
  source 1..120: mol_type = other DNA
cgtgaggcaggtggggaacccaagatgggtcaactacactaggtcaagttactggtaagcctcagttttcttacatataaggtaggataatctacttcttaaagttattgtaaggattaa

SEQ ID NO: 2535 - DNA, 120 bp, synthetic construct
  source 1..120: mol_type = other DNA
cttcatttttttcgcagagggcaaccccatatattgaataatttctctttccttcctggtttgaaatgctgcctttcgtgcacgttacattcctataacttctgcatttgggcctatttc

SEQ ID NO: 2536 - DNA, 120 bp, synthetic construct
  source 1..120: mol_type = other DNA
tccactctcctctcatcagccagagcgatgctcttaaaatgtaagtctgatcatgtcctcttctgtgcaaaacctgtagtggttcccaaagtcccacagaagccccaaaagcctacctga

SEQ ID NO: 2537 - DNA, 120 bp, synthetic construct
  source 1..120: mol_type = other DNA
attctgaccattgatgttcttgtttttccaaacaacattgttctctgtgccttcaagagtgctcgtttgatggtacagcattttttaaaagagtgccctactattgcctccaggccttct

SEQ ID NO: 2538 - DNA, 120 bp, synthetic construct
  source 1..120: mol_type = other DNA
ttaaattctccaaagccaacagtcacccaaggcatgtggatatgaaaagtagagaagtctaaatctgttatcagttcttcaacaatgcaggatgcatcactacccttcctttgggacaaa

SEQ ID NO: 2539 - DNA, 120 bp, synthetic construct
  source 1..120: mol_type = other DNA
aggaaagatccattgtctaattatgaatctcagcatcctagaattatggggagaagccagttctcaattcgttttaacagagcttctctctgtagcagttccagccaaataagccaactc

SEQ ID NO: 2540 - DNA, 120 bp, synthetic construct
  source 1..120: mol_type = other DNA
ccacttaatcactgtgcattcattcatccaatagtaattgagcacctactctgccctaggcattgggcttagccttggccacacagcagtgagcaacaatggatattctttttttgtttt

SEQ ID NO: 2541 - DNA, 120 bp, synthetic construct
  source 1..120: mol_type = other DNA
gcaatccaagagagcacaaactagaaatcacaatgtctcatatgacctagccttggaattcaattcgcactatgtcatttctgtaacgtcctgttggttacacagatcgactctactcaa

SEQ ID NO: 2542 - DNA, 120 bp, synthetic construct
  source 1..120: mol_type = other DNA
gaaaaaaaaaaaaagaatggaaaaggaggcagagttttaagtgttactacaaatgaagaattgacactacccccaatagactgggacccggaggctgggataagatggattgaaactcac

SEQ ID NO: 2543 - DNA, 120 bp, synthetic construct
  source 1..120: mol_type = other DNA
gttaaccatgatgagattctggatttatactgccctcgtcatttccaatactttcacaaacattatcatgagggcgtgtatagcaaaggttagcactgttatgcatgggttgaaatccca

SEQ ID NO: 2544 - DNA, 120 bp, synthetic construct
  source 1..120: mol_type = other DNA
accacagattaggtggctcacaatgacagaaacttattttctctcagccgtggagaccagaggttcaaaattaaggtgtctgcaggtctggttctttccatgcccgtcttctagctcctg

SEQ ID NO: 2545 - DNA, 120 bp, synthetic construct
  source 1..120: mol_type = other DNA
tgctgacaagacagcagcctgcaaatccaagtgggtccccagttccccaaatatccctcgaactgagggctaaaatctggccatctgaaatccatgtctttttgttcttatttttatttt

SEQ ID NO: 2546 - DNA, 120 bp, synthetic construct
  source 1..120: mol_type = other DNA
gcatgaaggtggaaatgtgaaacccactttgatgtggtagttaccattgcggcgcattaacgctgatgtgattcaaaagaccatataatttttatgctgctattaaacctgccacaagct

SEQ ID NO: 2547 - DNA, 120 bp, synthetic construct
  source 1..120: mol_type = other DNA
ggaatcttcaatcctatggaagttggattggatgtagggcagaaaagggcaactgtctacaaccagcttgcatgaacaccttggagtctgggttattataaacttatcctacttattgaa

SEQ ID NO: 2548 - DNA, 120 bp, synthetic construct
  source 1..120: mol_type = other DNA
atggtggtggtgacggcagagcgaggactcactttgtccaacgactacatattacagatgtcaggttcacgactatgccaaaggtcatgttgaggtccagaaggagtgggtggatgagca

SEQ ID NO: 2549 - DNA, 120 bp, synthetic construct
  source 1..120: mol_type = other DNA
aaatcaaaggcagaaccaaaagaagtaagtactccaaaggaaaggacatggactgaagggctctggtggtcggaggaggtagggaaatacactattctatgtcttcttggaaattgacaa

SEQ ID NO: 2550 - DNA, 120 bp, synthetic construct
  source 1..120: mol_type = other DNA
ataaaatgtttttctaaaatgttttgtttgaccaaagtagttggcatgaaaaaaaaaacttttgttgtgccagtctctccccatgcaatcccacctgtccttggaggccaacgccagtgc

SEQ ID NO: 2551 - DNA, 120 bp, synthetic construct
  source 1..120: mol_type = other DNA
acctggcctgtcagtaatttgattattttttaagatcaactggatgaccaggtgctctcagagactacatttttgtagcctgaagtcagtatttatggtttccgtataaggaggctttgg

SEQ ID NO: 2552 - DNA, 120 bp, synthetic construct
  source 1..120: mol_type = other DNA
tgaatacccacatatgtgcacatgtgcacatttctttcttctctgctttcaaacagcagagtttgagaaatggaaaccaaggaactgctttggttcttgattttcactctgtcctcctac

SEQ ID NO: 2553 - DNA, 120 bp, synthetic construct
  source 1..120: mol_type = other DNA
ggtaactttgtagcctagagcaaggccaggttgtgatagtcctgaaacttcaccattagtgcttctagaggcacatcttcaccccagactgtaaatgcacacccatagtcagacaaaata

SEQ ID NO: 2554 - DNA, 120 bp, synthetic construct
  source 1..120: mol_type = other DNA
agtgtatacacatagccctagacacactctgcttgtgtctaattaaattcaagtacctttttcatcaggtttgacttcccagttagctaaacagtcttcccataaggagaagcagtcaca

SEQ ID NO: 2555 - DNA, 120 bp, synthetic construct
  source 1..120: mol_type = other DNA
ggttgttatcttaaaatgctgcacataatagaaataattaaatttctttgtcagttgaacactttcatagatttaaccatggctattttaagttgtcgtcatccacagctattttatttt

SEQ ID NO: 2556 - DNA, 120 bp, synthetic construct
  source 1..120: mol_type = other DNA
gagacattcagacagctgctagagtctcctcagtaattgcctaaaatttagtccacagcctccatatgacctctgataataagcaaataacaccaaaactccttctgggagaaaatatat

SEQ ID NO: 2557 - DNA, 120 bp, synthetic construct
  source 1..120: mol_type = other DNA
aactaacaatagcagatttattggcgaaaaggaatacaaatttattagcgtgcatatgggagagaaccacagagtgattatccctaccatgcaatggggttctgaagcttgtatgtcatc

SEQ ID NO: 2558 - DNA, 120 bp, synthetic construct
  source 1..120: mol_type = other DNA
gtttttgcatttctgactaacgatgaaccaatggctccactgagacctgctgatctctgccacctggtcatgtggccccacccagaaataggctccctggcctgccaaactatccttaaa

SEQ ID NO: 2559 - DNA, 120 bp, synthetic construct
  source 1..120: mol_type = other DNA
aggtggaaacaaggctaggtgattaaaggaaagggagagtctaaaaacagggttagtaaaaacaaggttaggcattacaaaactgcctttgcaaaaatcataactgaggaaattatgaca

SEQ ID NO: 2560 - DNA, 120 bp, synthetic construct
  source 1..120: mol_type = other DNA
caacactccctacttcctgagcccatacctgccaaataatccttaaaaacgctgatccctgaatgctcagggagactgatttgagtaataataaaactccagtcttccacacagacggct

SEQ ID NO: 2561 - DNA, 120 bp, synthetic construct
  source 1..120: mol_type = other DNA
aaatgagcacatgtcacatgtttagttaactcattaatgaaggaaccagcaaaatggtaaggctagttcaaagagaattaaagagagtgaagcctttatagcggctaaaggaaagaatgt

SEQ ID NO: 2562 - DNA, 120 bp, synthetic construct
  source 1..120: mol_type = other DNA
agataatccttgggtatgtttactagacaaagcccagtagcaccctgagaagaaaggtagtaatcccttttccctatttccaagttttggaaatctttccttaatgtgcttttggtcacc

SEQ ID NO: 2563 - DNA, 120 bp, synthetic construct
  source 1..120: mol_type = other DNA
cagagacccatgccaaaagtccaagagtgctcaggtgagatccttaagatagtaggggtaaacttaacttttgaaaacatggagctttcaaagcagcctattgggcttagagaatttaaa

SEQ ID NO: 2564 - DNA, 120 bp, synthetic construct
  source 1..120: mol_type = other DNA
ctccatttataatgctgtctcctctctgtaccaggaagagaaagatgactaaatcacaggaaattcttattgtaactgaggagcttagtggcttagcctcaaacttttttttcggctggg

SEQ ID NO: 2565 - DNA, 120 bp, synthetic construct
  source 1..120: mol_type = other DNA
tcacatctcattattattttggcttctttctacaagcaaggagcagcaggcccttttacattaccattagtgaaggcacttgagttaaatccgcacaacgaatcttactcttgcctgtaa

SEQ ID NO: 2566 - DNA, 120 bp, synthetic construct
  source 1..120: mol_type = other DNA
ggcacctgccactgtgcccaggtaattttttttttgtactttttagtagagtcagggtttcaccatgttggctaggctggtctcgaacacatgacctcaggtgatccacccaccttggcc

SEQ ID NO: 2567 - DNA, 120 bp, synthetic construct
  source 1..120: mol_type = other DNA
aaataggcgggaacgtcattggtggcagtgattcattacaaagtgctggcaaagaaatggcttaaagaagaagaactggttgactacaaatctcgtgcctatgactagatctatgaataa

SEQ ID NO: 2568 - DNA, 120 bp, synthetic construct
  source 1..120: mol_type = other DNA
cacacccggcctagaggttctgtttctttacaggagcctcgggccatgtacgttctgcttggggataaaaggagaaaaaggaactcttaaaattattgttggggctgggctcagtagctc

SEQ ID NO: 2569 - DNA, 120 bp, synthetic construct
  source 1..120: mol_type = other DNA
cagcacttagaattcctgaggacatccaggcccactgcctggttcattttccctacctcttgccttcttttttcctggtttaggaaagatacaaaattcttgtgtgcagcctcttttgga

SEQ ID NO: 2570 - DNA, 120 bp, synthetic construct
  source 1..120: mol_type = other DNA
cctctttggtggtttcccatgaccagccaagggaaatacccaacaatcattctcagtgtgcacagatttaccttcagcttttttggttatattgtcattattattttctttgtccagtgg

SEQ ID NO: 2571 - DNA, 120 bp, synthetic construct
  source 1..120: mol_type = other DNA
ctaagtaaagatctgtcctcactaatgagattaggcatcatccaattcatagggagcctaaataagacaaaaagttggcgaaaaagtgaatttgctctcttgtctggggctcagacatcc

SEQ ID NO: 2572 - DNA, 120 bp, synthetic construct
  source 1..120: mol_type = other DNA
cttagtagtggaagagcacactgcaccaaactggttgtccagcaagaggggactgaattaataatctgtgatctgtctataccgagtaataccaagaaactgttgaaaaaaataaggcat

SEQ ID NO: 2573 - DNA, 120 bp, synthetic construct
  source 1..120: mol_type = other DNA
ttttaaaatgagaaaatctaaaaagcaaagcataaaaacaatatacacaacagtttctaggatggaaaagttcactgggttgcccaggtcaaaacttatctatagcagccgggcacggtg

SEQ ID NO: 2574 - DNA, 120 bp, synthetic construct
  source 1..120: mol_type = other DNA
ggactgcagtgaggtggttaccaggctggagccagcaagctcactgaggaactttgtgcattggacacgtggttgtcagtcatgcaacaagagcaaacaaacatacgggcaaaaatggaa

SEQ ID NO: 2575 - DNA, 120 bp, synthetic construct
  source 1..120: mol_type = other DNA
tccagttcattatcacagaggcagattatgaaaggttgatttagcacttagacacaataaattgatacctaagtagcacagcagtcaaggactttaaaatagctattatggctgggcatg

SEQ ID NO: 2576 - DNA, 120 bp, synthetic construct
  source 1..120: mol_type = other DNA
gtttcaccatcttggccagactggtcttgaactcctgacctcatgatccacccgccttggcctcccaacgtgctgggattacaggcgtgagccaccgtgcccagctgaaaatttttttta

SEQ ID NO: 2577 - DNA, 120 bp, synthetic construct
  source 1..120: mol_type = other DNA
ccatactatgatgtctaactcaacattaaaatggaaaaaaaatttggccaggcccaatggcttgtgctacttggccaagaaagttctatatcttgattgaagttgtgggcagcacgccat

SEQ ID NO: 2578 - DNA, 120 bp, synthetic construct
  source 1..120: mol_type = other DNA
aaataatggtgtaagctgtctctccctctctctctctctgtctctctgcctcggatgcctggcagggaagggccccctgtccagtggacacgtgacccacgtgagcttacttatcattgg

SEQ ID NO: 2579 - DNA, 120 bp, synthetic construct
  source 1..120: mol_type = other DNA
agaattatttggcaaccactagatgccaggtttgtaagctgagaagaaagaatgaacaaagaggaaatagttgaagatataggagaaaagggatagcagacaaggtccctgagaaagcga

SEQ ID NO: 2580 - DNA, 120 bp, synthetic construct
  source 1..120: mol_type = other DNA
gatggtggttaggctggatttggaactgaaattctctttagcttctgtctgctcctctttagctcacagacaaagcatttaagatttctttgacaacctgcgtttcagtaaattccacat

SEQ ID NO: 2581 - DNA, 120 bp, synthetic construct
  source 1..120: mol_type = other DNA
agggcacagaacaggggcaatggtgttttatcttttctataaaaataaaaaacacatatacacttaggaactggtgtcactcctgaggcaggatagggaggagggacctttacaatttta

SEQ ID NO: 2582 - DNA, 120 bp, synthetic construct
  source 1..120: mol_type = other DNA
catcagcaacaaactcccatctcttccatttgtttctctaaaagtccatttgtctttcctcaaatgtccatgtgtctttcccatagaagcctttctctcgctctcttttccttattaggt

SEQ ID NO: 2583 - DNA, 120 bp, synthetic construct
  source 1..120: mol_type = other DNA
cttaatccattcactggttaacaaattttcaagccaatggggaaaacagcaaattacaaggggagaaagagatgatttcaggcagaagccttccttcaacttcattgtgacggatgacaa

SEQ ID NO: 2584 - DNA, 120 bp, synthetic construct
  source 1..120: mol_type = other DNA
aagaagtccagaatctgccattctgcatgccttcttggatgtcatgagagcattagagttgcctcacaatccaggtattttcttaattacaaaagactttaaaccacccctctgtctttt

SEQ ID NO: 2585 - DNA, 120 bp, synthetic construct
  source 1..120: mol_type = other DNA
atagaaatagaacattcccatcaacacagacttttactagacagcattcctctagaaacacccaagtgtttttatttttttgcacacatcatgctgtcttgccctgccaggtctttgctc

SEQ ID NO: 2586 - DNA, 120 bp, synthetic construct
  source 1..120: mol_type = other DNA
gagtactgttggtccttagtatctccaatttagcaacctcagtgaagagagaaattctctctcaattatctacttagtggtctccaggatgatcctgtttggccttgatttggttgtgtg

SEQ ID NO: 2587 - DNA, 120 bp, synthetic construct
  source 1..120: mol_type = other DNA
aaaaaaactggcctcactctggaaagaacgcttgtagaatttgccagctctggtcaaggacctacaagctgttgtaaccttcctgtttttcatgcatttaaaaaattagctgggcatagt

SEQ ID NO: 2588 - DNA, 120 bp, synthetic construct
  source 1..120: mol_type = other DNA
cttttccaaaatatataaatggaaacataaggtatgaaggttttgagtttagcttctttcatttagcataagacaattgatacatgtccatgatgctctatacatcaatagtcattcctt

SEQ ID NO: 2589 - DNA, 120 bp, synthetic construct
  source 1..120: mol_type = other DNA
ctactccagaggcagagcagccccaagggctgctggttgcccatttttatggttatttctcgattacatgctaaataagtggtggattattcatgcctcccctttttggaccatataggg

SEQ ID NO: 2590 - DNA, 120 bp, synthetic construct
  source 1..120: mol_type = other DNA
cgtctctccatttgtggcttttctttttgttctttcaacagtgtcttttgaagagaagttcttcaagttcttttgaagagaagtccaagttattgattttttcttttacgagctgtactt

SEQ ID NO: 2591 - DNA, 120 bp, synthetic construct
  source 1..120: mol_type = other DNA
cagctggtatgggtagttttgttgtatgcaaaacccaaaggagaaactccatgggaaacttagcatctcacaaggccttagatttcatctacagaatggaaagagaacagtcttgtgaca

SEQ ID NO: 2592 - DNA, 120 bp, synthetic construct
  source 1..120: mol_type = other DNA
gcctcagcctactgtgtaggtgggattacaggcatgcgccaccatgcccagctaattttgtattttagtagagatggggtttctccatgttggtcaggctggtctcaaattcccgacctc

SEQ ID NO: 2593 - DNA, 120 bp, synthetic construct
  source 1..120: mol_type = other DNA
ttcctggatttctgccctcttaatttgttcttggcccttgtcaggaatttaatacttgcatgcagcttcttcagctccagttgacaccatctgttttttggggttttggtattttgtttt

SEQ ID NO: 2594 - DNA, 120 bp, synthetic construct
  source 1..120: mol_type = other DNA
ctccatttttctgtaagggaccacaggcttacaggggctccctgattagaatccacaccagtgttcacgatttatccagaggtagttctagtatagggtgaaggaaatcaaaatatttta

SEQ ID NO: 2595 - DNA, 120 bp, synthetic construct
  source 1..120: mol_type = other DNA
ttgtgaggactgcagtaacgcatgaaaaacagaacagagcctggcatgtagtaagcccttgataagtgtcaactattatttgccttatctttacctatctcagtttttgtccttctcttc

SEQ ID NO: 2596 - DNA, 120 bp, synthetic construct
  source 1..120: mol_type = other DNA
acttgtgagagcaaatatttaatgccaatgaaacaagcttattctggaagcgtatcctagagcatccatacattcatcaagagtacaggaagatgccaggattcaaggcattcaaagacc

SEQ ID NO: 2597 - DNA, 120 bp, synthetic construct
  source 1..120: mol_type = other DNA
gcgtttgctactatcagcagtggggtataaaccttagaagaaatggatatcactggatccattttccacacaatctttactgaagatttgtaagaactgacagggagttacaacatgctc

SEQ ID NO: 2598 - DNA, 120 bp, synthetic construct
  source 1..120: mol_type = other DNA
ttctcaataattacatattacagaaaatctgctttgtgagttatacaatttggctggtagtgaaaggtgaccagctgagttctgattaccgtgtcccacaccaccacactaaaggccagg

SEQ ID NO: 2599 - DNA, 120 bp, synthetic construct
  source 1..120: mol_type = other DNA
attgttaacatcccacagtgaagatgtaaatcatggggtattttgcaccatctggtctcagtgatgtacaggacaatgaaagaggcagtaactctgcaacattttgtgatttgtgattgg

SEQ ID NO: 2600 - DNA, 120 bp, synthetic construct
  source 1..120: mol_type = other DNA
cccaaacccctatcatttctgtaatctctgaatggtattaaaacttcagccatctgacccctcctttgagtctcatactgtgtgtatagctcctatgatcatatgcacattaagtttgta

SEQ ID NO: 2601 - DNA, 120 bp, synthetic construct
  source 1..120: mol_type = other DNA
cccagctacttgggaggctgaagcatgagaatcacttgaacccaggaggtggaggttgcagtgagccgagattgtgccactgcactccagcctgggcgacatggcaagactctgtctcaa

SEQ ID NO: 2602 - DNA, 120 bp, synthetic construct
  source 1..120: mol_type = other DNA
atttcaagatggctattcagaagggcggaaatacacaaagagcttaaaagccatctccttatgagaaagatttgcatctgcagcaagaatctgcattgatgccaccaggctgtttctgaa

SEQ ID NO: 2603 - DNA, 120 bp, synthetic construct
  source 1..120: mol_type = other DNA
atactgggtaccagcatgaacattccctccagtgtcccatctgatgttttgggtgagttctcctgaattagaacctcccactctttgattgaaggtccaaacgttgtttgaactattttt

SEQ ID NO: 2604 - DNA, 120 bp, synthetic construct
  source 1..120: mol_type = other DNA
taacctcaagatggcatataaccttccatttgtggagagttcttagcatgagagagagagagaaaaataagatggtatctgagcttctgtactcattaggaggttgggtcttcatgctga

SEQ ID NO: 2605 - DNA, 120 bp, synthetic construct
  source 1..120: mol_type = other DNA
agattctttttgagagttctatgggaagaagtcatcttcactaaaagttgatatttagtactgggagcagtggttcactgctacaatcccaacacttggcgaagaattgatagcggcagg

SEQ ID NO: 2606 - DNA, 120 bp, synthetic construct
  source 1..120: mol_type = other DNA
gcctttttgaaagcggaaaatcttcccaaattggctcctctaagacttgttcttctattttcttccacatctgcttctccttccttttgtcattttcaataccacatgaagcttagaaga

SEQ ID NO: 2607 - DNA, 120 bp, synthetic construct
  source 1..120: mol_type = other DNA
tttttaaaaatttcgatgccctgccttccagttgtgcctgcttttcacatttaaatatttgaccctgaagactacaaatgcttcccttgccctattcactaaagggttccaccctaaagt

SEQ ID NO: 2608 - DNA, 120 bp, synthetic construct
  source 1..120: mol_type = other DNA
aagaagcagaagttgctatgcttcctgcacagcctgcagaaccatgagccaattaaacctcttttctttataaattacctagtctcaggtatttctttatagcccataatggactaattg

SEQ ID NO: 2609 - DNA, 120 bp, synthetic construct
  source 1..120: mol_type = other DNA
ggccaaggcagggagatcatgaggtcaggagttcgagaccagcctggccaacatgatgaaaccccgtctctactaaaaatacaaaaattagctgggtgtggtggcacatgcctataatcc

SEQ ID NO: 2610 - DNA, 120 bp, synthetic construct
  source 1..120: mol_type = other DNA
tgtgcgacatggagtcaacagagattattttggagctttaagatttaatgaccaccctgctggatttcaaacttgcatgaggcctgtagcccctttcttttgacccatttctcccttttg

SEQ ID NO: 2611 - DNA, 120 bp, synthetic construct
  source 1..120: mol_type = other DNA
accagacagctttaaggaactaggattgacattaggaagccaataaacacccttggaaaaactggccccatactttaaatttacagttcacatggttgccttgaagtaaataaagaatgt

SEQ ID NO: 2612 - DNA, 120 bp, synthetic construct
  source 1..120: mol_type = other DNA
aggtaaggtaaggtaagttagttccagcaaagccaacttaaaagagcctgtatggccattactattcttgttgtaccttatcaggcaacatataatactaaaacttgcttttgaggcaga

SEQ ID NO: 2613 - DNA, 120 bp, synthetic construct
  source 1..120: mol_type = other DNA
ataataattttgcctcaggttcctctttttaggttgacatatctgttaatctaccttttgtgagttgacttgtcagaaggggacggggaagttttttttggcccacatgtggcgaatgtg

SEQ ID NO: 2614 - DNA, 120 bp, synthetic construct
  source 1..120: mol_type = other DNA
cattccgtcatcatttcacaacacagaccaaacaagaacattgcccaaaccacaaaaatgaacaaaagtccctgtttctgtctcataggagtgagtggtgcttctttttcaattacagct

SEQ ID NO: 2615 - DNA, 120 bp, synthetic construct
  source 1..120: mol_type = other DNA
atgagccattgagccctgccaaaaagattcttaatagaattacacccactttctgacagtatctaatccagagcaaagcctgtttctttgatcactcctcaaaatcacataacagaagcc

SEQ ID NO: 2616 - DNA, 120 bp, synthetic construct
  source 1..120: mol_type = other DNA
agtataaaaatacatctgagctttgtgtacatgtgaagctatttggtccattgtagctaaaagtttgaattttgggctaatgttttgtttatttatagggtcgtgcactatcgcccagac

SEQ ID NO: 2617 - DNA, 120 bp, synthetic construct
  source 1..120: mol_type = other DNA
tctcctggagacagtattccttgttgctatgcctctataatgccccatatctgcctacgagcagaaggaaataattattttcttctctatggcagtgttttggttttcattccttactga

SEQ ID NO: 2618 - DNA, 120 bp, synthetic construct
  source 1..120: mol_type = other DNA
gattcttctgcctcagcctcccaagtagctgggattacaggtgcgtaccaccatgcccggctgattttttttgtgtttttaatacagacggggtttcaccatgttggccaagctggtctt

SEQ ID NO: 2619 - DNA, 120 bp, synthetic construct
  source 1..120: mol_type = other DNA
cttttaaacttgcaggttttctactttcctaccttccagaaactcctcctacccatggaatctgccagcagttggattcttgactatctttaggacttttcctaatctcaccttctccat

SEQ ID NO: 2620 - DNA, 120 bp, synthetic construct
  source 1..120: mol_type = other DNA
catttaattaggggctctcaattcggttgctcattataatcacttactgaggtttttaaaaaacaccttgcccgagcctcaacctaagaccagttattaatacatcagagtctctggagg

SEQ ID NO: 2621 - DNA, 120 bp, synthetic construct
  source 1..120: mol_type = other DNA
acaacaagataaggggaaaagactttgagtctccaggggttacaacttaggggaaggcaaataaatggcagataaagataagttaggaaagcttgttaattagattcttctggagccatc

SEQ ID NO: 2622 - DNA, 120 bp, synthetic construct
  source 1..120: mol_type = other DNA
taccaaaataaattacttactgctctcaaaaagcaaaccgtttgctggcagacttgatcatataccaatgactggaggaaggggaaagtgagctttatggtcaaagacgttcaatggcaa

SEQ ID NO: 2623 - DNA, 120 bp, synthetic construct
  source 1..120: mol_type = other DNA
aaaaataaaagaaagaaagaaagaattcggggcgagtccacagagtaaaatgaaagcaagtttattagagaagtaaagaaacaaaagaatggctactccataggcagaacagctccaaag

SEQ ID NO: 2624 - DNA, 120 bp, synthetic construct
  source 1..120: mol_type = other DNA
agctatgatcctaagttagatgcacagacaaaaaggctaaaacacaccaaaatgttaacaggtactgggaacagggtacttgagttgttgagaatgggatgcttcattttcacttcttcc

SEQ ID NO: 2625 - DNA, 120 bp, synthetic construct
  source 1..120: mol_type = other DNA
ttaattttttttagagatggggacacgggttttgtgaagggtctgctaatgggctatctggaaagtcagaacacaggtctcttgtttttgagtcttgatctgggtaggtctgcagtctgc

SEQ ID NO: 2626 - DNA, 120 bp, synthetic construct
  source 1..120: mol_type = other DNA
tagtttagattaatggatacagcaaagcaagggtttagaggcaaggatattgaagagtcttggggagtgaactgtcctttgatatttcctattaaataactgaacactggccgggtgtga

SEQ ID NO: 2627 - DNA, 120 bp, synthetic construct
  source 1..120: mol_type = other DNA
attaaagaaaaaaatgcttcatgacactcgttgaagatagttaggcaaactttattaaaggagggactaggaagatagctatagaaaccactgcaatgggctgctgaagttggggagaga

SEQ ID NO: 2628 - DNA, 120 bp, synthetic construct
  source 1..120: mol_type = other DNA
agagatgaaggcatagctcaaagagggtagttagggcatgattgcttgtctcattttagagtctctctgggagtgataatttaaaagaactcacctcctaaaataaaagtgatcagggtc

SEQ ID NO: 2629 - DNA, 120 bp, synthetic construct
  source 1..120: mol_type = other DNA
tcaaaagtgaggctggaatcccaatgcaaaggtctgattccaaaatagggtcgccaaatttagcaaaactattgcgctggacataagctaaaaaaaagtatacctttccacaaaagatgg

SEQ ID NO: 2630 - DNA, 120 bp, synthetic construct
  source 1..120: mol_type = other DNA
tgatctgcaagatcctcatacccctgaattttcaaggcccgaaggagcaaacggctgatatctgctcttcctcaaacctctcgctgcccaccaccctcctggcccctctgctcacttcca

SEQ ID NO: 2631 - DNA, 120 bp, synthetic construct
  source 1..120: mol_type = other DNA
gcgaatgggagaaaggaagtcaggagttcagagaaaacttattgcttctgcagccctctcaatctcctgaagctcaaaataccctgcattccaaggtgccatactttggggcatcatgtt

SEQ ID NO: 2632 - DNA, 120 bp, synthetic construct
  source 1..120: mol_type = other DNA
tggtattctgtcacagtagcataaaatggactaagacatagtggcctaaaataataatatttattgttgtgcataattctgtaggttggctttacggttcctctggtctcaggttggttt

SEQ ID NO: 2633 - DNA, 120 bp, synthetic construct
  source 1..120: mol_type = other DNA
cttgccataagggctaaatatacacaggcattgttcttgagtgttgagtgtacagtggtaaacaagcctttaacacctgaagtgcagtggagaagagcaatacataaataactaagcaaa

SEQ ID NO: 2634 - DNA, 120 bp, synthetic construct
  source 1..120: mol_type = other DNA
taccatgaatgaggaaagtgaaggcataaaataagactggagaagtaacagggaccagcagtaaggcgtttggattgtattccttatgtgatgggtgggaatccactgggaagttctaat

SEQ ID NO: 2635 - DNA, 120 bp, synthetic construct
  source 1..120: mol_type = other DNA
cagaattcatgacataatggattggtgggggtagtccagcaaggtaagggcttgaaaacgtcttgatgagctgttagtcttgataggtaaactgtttagttagtttacaaacttctcttt

SEQ ID NO: 2636 - DNA, 120 bp, synthetic construct
  source 1..120: mol_type = other DNA
ctgcttaacttctcattttctccttatattgaaggggttggcccagaggataagggatgttggggaaaagcttttcctctatcctcttaagttcaagtactggatatttgcaaattgaag

SEQ ID NO: 2637 - DNA, 120 bp, synthetic construct
  source 1..120: mol_type = other DNA
ttagacgcctggcagcagttttcacttcatctcattccatcctcccaatacctccataagcaaatattagtgaatccccatttatcagattaggagaccaaggctcaagtgcaaaaaatt

SEQ ID NO: 2638 - DNA, 120 bp, synthetic construct
  source 1..120: mol_type = other DNA
ccaaaggcagagtgcaagtgctatttctttccacctgacttgcacaaagtttctcccctcctttttcctgagaattgagaaagttaaaataagcaaggaatgagaaatctgaaacattcc

SEQ ID NO: 2639 - DNA, 120 bp, synthetic construct
  source 1..120: mol_type = other DNA
ggactttgtagtttagctttgtctttacacacagctagatttgagctttcaaaacactgtttcaggtaaatttatcctaaactccaccctctccctcccttttgtagtttggtgagacac

SEQ ID NO: 2640 - DNA, 120 bp, synthetic construct
  source 1..120: mol_type = other DNA
agtaggccagaggttcccaaacacctagtatatttactaccttagtactttcctgccacatctcctaggccaaaacaactccattgattgttatgcaatttactaagtgtagccatttga

SEQ ID NO: 2641 - DNA, 120 bp, synthetic construct
  source 1..120: mol_type = other DNA
tgtcttttaatgaagtttgtgggaggcatctaactgtagcctccaaaatttggcccataggtactactgtccttatcaaagacgaggaaacaagttcagaaaagtattaattgctccgag

SEQ ID NO: 2642 - DNA, 120 bp, synthetic construct
  source 1..120: mol_type = other DNA
aaattttaaaaagggcaaattttggcaatttcacatagttcaacctagtataaggtggttgtaataactaaatgagataaaatggtgttaaattggaagtattatagtatttctgttaac

SEQ ID NO: 2643 - DNA, 120 bp, synthetic construct
  source 1..120: mol_type = other DNA
ccttctggcagaacagtctccaagaacaaggcaaacaactaattttacataggtttttaccaatgtacagctgttgattgtgactggtttccggcaatctggatttcacaatctggataa

SEQ ID NO: 2644 - DNA, 120 bp, synthetic construct
  source 1..120: mol_type = other DNA
gcatcgctaacgaatgctattacaatattcatttagcgtttaccaagtgcctactctatacaaatcttgagaatacaacgtgaaggtgaactgctgactaaagtttggtccctttcgctc

SEQ ID NO: 2645 - DNA, 120 bp, synthetic construct
  source 1..120: mol_type = other DNA
agcggcggggcgcttggaacccggcgaggggaggctcgcacagggggttgggggggtgcacggcctggccctgggctcggaggaggcggggccgcagagttggcttgaatgagtgcaggg

SEQ ID NO: 2646 - DNA, 120 bp, synthetic construct
  source 1..120: mol_type = other DNA
gtatgtggaaattcgtgtcgagtggaaaatattttattttatgaaatagtgtaatttttatggggcaccactgggcttttagaggccttaatcgggcgctggacaaagatgtgtggacgt

SEQ ID NO: 2647 - DNA, 120 bp, synthetic construct
  source 1..120: mol_type = other DNA
gagatttttctaagtgtaattatagtgttacccttgtttaagcgaccctttcccgcagtttaaatatatatagttgtgcattagtagaatatgcttgtggggaacagagccagcatccgc

SEQ ID NO: 2648 - DNA, 120 bp, synthetic construct
  source 1..120: mol_type = other DNA
cacctggccgtgagccaccgtgtctgtccgagcatcttttaatgtttgtcatttagatttcttcttgtgctgaagtgtttgtcttttgctgtttcttttttttttcctagttctttgtca

SEQ ID NO: 2649 - DNA, 120 bp, synthetic construct
  source 1..120: mol_type = other DNA
accccaagaataccggacatttaagactcacttaaagctttaaaagcacttgcaaaatcctaaaatcataatttaaggtgtttttggagggcaggagcaatggtggcaggcagtgttttg

SEQ ID NO: 2650 - DNA, 120 bp, synthetic construct
  source 1..120: mol_type = other DNA
ggcctttcaaagtgctgggattacaggcgtgagccaccgtgcccagcctttttctttttctttttctttttttttttttttttgagacggagtcttgctctgttacccaggctggagtgt

SEQ ID NO: 2651 - DNA, 120 bp, synthetic construct
  source 1..120: mol_type = other DNA
ttaaaacaatttatactgtattttacacatgacaaagttctaaggtaacagcccttttctaagactaaagttacagtcctccctttgtatctgagggggattggttgcaggacccccctg

SEQ ID NO: 2652 - DNA, 120 bp, synthetic construct
  source 1..120: mol_type = other DNA
tagatcctgtttctgatatgtacataccatattgtataggtgctactaatttggagagcatatacagtgagtccatgcctttttcctgccatcagcattataccaaaattctgccatggt

SEQ ID NO: 2653 - DNA, 120 bp, synthetic construct
  source 1..120: mol_type = other DNA
ttcaaactactcactaatgaacacatctgagttgagtttcacaccaaactcctggaaccataactttcttttcccagatctagtcttgtttatcacagacatcaacagcctggcatgttt

SEQ ID NO: 2654 - DNA, 120 bp, synthetic construct
  source 1..120: mol_type = other DNA
ggattgggggcattttgtctaaaattaaatgtaaatggtgatctgacatacaggtggaaagagaattgggaagttttgttctctcttctaccaacttgccacataatcttggccaagcaa

SEQ ID NO: 2655 - DNA, 120 bp, synthetic construct
  source 1..120: mol_type = other DNA
gatctctcattgaaccagatgatatatgaagtctcttttaggaccaatttcgagatttaaaaaatttggcagaattactttttttttttgcagcggagtccagctttatcacccaggctg

SEQ ID NO: 2656 - DNA, 120 bp, synthetic construct
  source 1..120: mol_type = other DNA
cccagccctaaagttgtattttgatggaacgaactgttttgagaaataaattttaacgcgttgagtctgaactgggctgccctttcaaaatgtgaaggccccttaaagtagcacattggt

SEQ ID NO: 2657 - DNA, 120 bp, synthetic construct
  source 1..120: mol_type = other DNA
cccaggtcattagaagacagactaagtagtcctgggtgaacccatagggcaccttcaaggaggtaaaattggtgattttagtttcaccagtagtttttccctgaatatttattccttttg

SEQ ID NO: 2658 - DNA, 120 bp, synthetic construct
  source 1..120: mol_type = other DNA
ttcaagcctactggcagggtaagcaagaggtagtaccattttggtaagaagtagagagctagggacagtaaagatggagtaatatatatatgagggtatagtcaggccctagaaattaat

SEQ ID NO: 2659 - DNA, 120 bp, synthetic construct
  source 1..120: mol_type = other DNA
tatgtgaatgtgctaggcctgagatgagacagccaattgtggaagagcaaacactagaaccagtataagttgcttactgctttcttatgctattaatgagcatatcgcctcctgatattt

SEQ ID NO: 2660 - DNA, 120 bp, synthetic construct
  source 1..120: mol_type = other DNA
cgtaacagataagagtgaagaagataatgaaattgagagtgaagaggaagtacagcctaagacacaaggatctaggcgaagtagccgccaaataaaaaaacgaagggtcatatcagattc

SEQ ID NO: 2661 - DNA, 120 bp, synthetic construct
  source 1..120: mol_type = other DNA
tgatccctctgagaactacagtaagtatcttcttagcctcaaagaaaaagaggaagattcttctggccatactcgtgcatatggtgtgtgctttgttgatacttcactgggaaagttttt

SEQ ID NO: 2662 - DNA, 120 bp, synthetic construct
  source 1..120: mol_type = other DNA
cttgagaggctactcagtaaaattcataatgttgggtctcccctgaagagtcagaaccacccagacagcagggctataatgtatgaagaaactacatacagcaagaagaagattattgat

SEQ ID NO: 2663 - DNA, 120 bp, synthetic construct
  source 1..120: mol_type = other DNA
actggcagtctgctgtagagtgtatcgcagtgttgggtaagactttgaacaagcttgttctcaggctttgataagtagtgctgtttgccagctgtatattatccctaaaaataagtaata

SEQ ID NO: 2664 - DNA, 120 bp, synthetic construct
  source 1..120: mol_type = other DNA
tagtgtgctgcatttggttactgggtaatttaaaattcttcctcagcacaggtgttcaaaaaccagtcttcagagattgttttcatatcagtgtgccaactttggcacattctgctaagt

SEQ ID NO: 2665 - DNA, 120 bp, synthetic construct
  source 1..120: mol_type = other DNA
tcttagagcttaaaggatcacgccatccttgcattacgaagactttttttggagatgattttattcctaatgacattctaataggctgtgaggaagaggagcaggaaaatggcaaagcct

SEQ ID NO: 2666 - DNA, 120 bp, synthetic construct
  source 1..120: mol_type = other DNA
ccccgctgctctcctgcattatagtatacttctgttcacctagtttgctagagagaggcagtatagtgtgtatagtgatttccaaactttttctttaaatcagaatcacctgaaagaatg

SEQ ID NO: 2667 - DNA, 120 bp, synthetic construct
  source 1..120: mol_type = other DNA
gaaagtacattttttgttgaattaagtgaaactgccagcatactcatgcatgcaacagcacattctctggtgcttgtggatgaattaggtaagacattaaacttctcatttgaagactat

SEQ ID NO: 2668 - DNA, 120 bp, synthetic construct
  source 1..120: mol_type = other DNA
gctagcacatgtatcgctaatatttttctttcttaaggcatgcatggtagaaaatgaatgtgaagaccccagccaggagactattacgttcctctataaattcattaagggagcttgtcc

SEQ ID NO: 2669 - DNA, 120 bp, synthetic construct
  source 1..120: mol_type = other DNA
tcacaaaactgagttacaagaatacttttgttttacagtgcatcccttcctaggaagtctcattaaaacactcactttttctaggggtgattttgaatgctgcacagggaagggaaggaa

SEQ ID NO: 2670 - DNA, 120 bp, synthetic construct
  source 1..120: mol_type = other DNA
atgacctttggctttaagaggaccaaaacaaaattctttgtggctccagcccagattaattctgaaaaggaactttaatggagtaagtgattttcctgtcatctgtgtcttcggagggaa

SEQ ID NO: 2671 - DNA, 120 bp, synthetic construct
  source 1..120: mol_type = other DNA
tatttataggtatagcagactccaacatacctttcattgtcacattaacaccagatgctaaaaataagcctccaaaccggttgttaaaaatctgattgccttctagtgttgcagttgcgt

SEQ ID NO: 2672 - DNA, 120 bp, synthetic construct
  source 1..120: mol_type = other DNA
acatcgctacggttgattcccctcccaaacctgaagaaaaggattcatttctaggacgaagattaccagctgcttcctccaaacagcctttcctgatccgtctcccaattagaactgata

SEQ ID NO: 2673 - DNA, 120 bp, synthetic construct
  source 1..120: mol_type = other DNA
aaaaaaaaaaaaagaactgatggctccacaattcatatcccacaaaactcagtacaggcatttcacacacctgtgacactggagagtcctcatcatttttttcctttccctctaccctgc

SEQ ID NO: 2674 - DNA, 120 bp, synthetic construct
  source 1..120: mol_type = other DNA
cccatatacttgatatgtcagcttgatgtgagagaaggtgtggacaacctggaggaagggtcaaggggttcaaataggcctgtggatatagcctcaaaagccaacatccttggctattcc

SEQ ID NO: 2675 - DNA, 120 bp, synthetic construct
  source 1..120: mol_type = other DNA
aaagaagggaacactgctgtgaagcagagctcctttgcagacacccctgaagcacccttgttaccccaacatcctaccagagctgctgggaaacaagggtgctgctgggatcagcaccaa

SEQ ID NO: 2676 - DNA, 120 bp, synthetic construct
  source 1..120: mol_type = other DNA
atgtaattgtgtgtagctgtggctaagtttctggccttaattttctcagggtggtactactggcttgtctctgagccataatgaaaacctaatagttttagccagctagaatgtatactg

SEQ ID NO: 2677 - DNA, 120 bp, synthetic construct
  source 1..120: mol_type = other DNA
ttcctcatgatggcctgaaacaaaaagacccagccaaagcagtcagtcacaatgaggccaaattttgaggccttccaagggtgatagctatctccctctcatccaccattcacatggggt

SEQ ID NO: 2678 - DNA, 120 bp, synthetic construct
  source 1..120: mol_type = other DNA
gctaagcctctgtatcaaactctccccccaaacctttgactttaccacctcattttcatcaaaagagcttgcctcctccttcagaaaaaaaaaaaccaacttcaaatctacctccatttg

SEQ ID NO: 2679 - DNA, 120 bp, synthetic construct
  source 1..120: mol_type = other DNA
agtcaacctctgtccccattccattctctctagtaatcctttattgcccttcaacagaatctccttctggccaaagttcggtttatttaaaaacaaatagagctggacatgctggctcag

SEQ ID NO: 2680 - DNA, 120 bp, synthetic construct
  source 1..120: mol_type = other DNA
cggcctcccaaagtgctgggatacaggcatgagccacggcgcctggtgacaccccattatattcttttattttctttcttttctctttttttctccctccctctttccttccttcctttt

SEQ ID NO: 2681 - DNA, 120 bp, synthetic construct
  source 1..120: mol_type = other DNA
tgactgaatttagttgcttaaacacctcaagtgtgtctgcccaccttggggcctcacacaatccatttcctctgtttggactcttttatgcttttacctaacaccttatcatttttcaag

SEQ ID NO: 2682 - DNA, 120 bp, synthetic construct
  source 1..120: mol_type = other DNA
tcagttgagagaagctgaagattaactataaacaatgagtaacaaaggagcactggaaggcagaggtggatgggaatcgtagtgtttacggagggactagtctccaataggaattttttt

SEQ ID NO: 2683 - DNA, 120 bp, synthetic construct
  source 1..120: mol_type = other DNA
ctgatggaggcatggcgggagatgtagtctggagctcataacggttagtagtaatagttgtgattcagttcagtggagtggattgagcgttgtgatccaaaggaaggtaggacgtattgg

SEQ ID NO: 2684 - DNA, 120 bp, synthetic construct
  source 1..120: mol_type = other DNA
gacacacttgtcacacatacatccaacagtagggaggggtttccccaacttccctccaggctcctggcacggggctggcatccggttgtacctgcaacacaggttatcttacgagtgaat

SEQ ID NO: 2685 - DNA, 120 bp, synthetic construct
  source 1..120: mol_type = other DNA
gaagaatgagggtacagcacctggtctggggataaagacgggctccttggtggtggccgctctgtcactaaagccaaccatattctggctgaagacgcggaagtagtagccattgccaat

SEQ ID NO: 2686 - DNA, 120 bp, synthetic construct
  source 1..120: mol_type = other DNA
ggaaaagcttaaccctgaacctggatcactccaagggccggccgccaccccagcctctggtacctcagatcaggccagccctgagacatcagtccactggatgggaacaacacactatag

SEQ ID NO: 2687 - DNA, 120 bp, synthetic construct
  source 1..120: mol_type = other DNA
gagacactcctggaagagagcttgggtactgtggcttttactttccctgttccagaactaagggactgacatacaccaagagagccctttctgcactttttttttttttgagacgttgtc

SEQ ID NO: 2688 - DNA, 120 bp, synthetic construct
  source 1..120: mol_type = other DNA
gctttactctgcatttgtttttcactaggcaagcttttttacttctgaaaacaggacagatatttctctgggtgtcctcaactttcggcaaaagtgggcctaaaaaacttgactacaggt

SEQ ID NO: 2689 - DNA, 120 bp, synthetic construct
  source 1..120: mol_type = other DNA
aaaaaaaactaaaactaaaactacagaaaacatgggaatttcctggcacgtatgattaggtgagttgactaagaactgaacaaaccaggaatcagtccctaaaacgagaggcctggaccc

SEQ ID NO: 2690 - DNA, 120 bp, synthetic construct
  source 1..120: mol_type = other DNA
ctcagggccttgagtaacgttgctcgtccccttcccactccaactaaccgccacaggctgcccccaccacccccagatccaaagagatctttctagaatgcatttctttcttcttttcct

SEQ ID NO: 2691 - DNA, 120 bp, synthetic construct
  source 1..120: mol_type = other DNA
tcagatgagctatcatgaggacccctcaagaccccagccttcagaagaaccaacagtgccaggcaggagcaagaccccggcagctacactggcagaaaagtgtctcagaaactactcctg

SEQ ID NO: 2692 - DNA, 120 bp, synthetic construct
  source 1..120: mol_type = other DNA
tgctcaagagcctgggcccctggttattggttttttagatttgtattgaggtatagtttatgctcagatctgacagtaggctgagttctgacagatgaatacacccatgcaattattaat

SEQ ID NO: 2693 - DNA, 120 bp, synthetic construct
  source 1..120: mol_type = other DNA
tgtaataataacagtcacacatgtgacagcacttgacaggtctgatacatcatgtcacctcatctttataactatcctatgaggtggcactatcagggttcccattttagagaagaggaa

SEQ ID NO: 2694 - DNA, 120 bp, synthetic construct
  source 1..120: mol_type = other DNA
gggtcccaggaggccctcaccttgtcctggcttgttggtattctgatttttaaaaatgcctttttttttctatattatctaattttccagctttttaatgtgccttcagaggtaggcagc

SEQ ID NO: 2695 - DNA, 120 bp, synthetic construct
  source 1..120: mol_type = other DNA
ccgtatgaccctctcagtaccctctggagcggtcacctcagcatcgtcattttagagatgagaaggatgaggtttaggctgtcaaaggcccaaggtcacagaggccttgagcccaggttt

SEQ ID NO: 2696 - DNA, 120 bp, synthetic construct
  source 1..120: mol_type = other DNA
gaacttacttgctgtagaacagaaggggccgttgaagtgttcccgacgggaggaagtgagcccgagacaaaaggagagagagagagggaccggcaggagcaaaaggatgggaaattaggc

SEQ ID NO: 2697 - DNA, 120 bp, synthetic construct
  source 1..120: mol_type = other DNA
tctactgctgggtgctctgtgaccttgcgctagttccttaaaccctctgtgcctcggtttcctcagtaacatggaaatggtaatagtccttccatcatagtgttgtttcgagaattaaat

SEQ ID NO: 2698 - DNA, 120 bp, synthetic construct
  source 1..120: mol_type = other DNA
gggtagttaacccaagccctcctgctttgtttgcctgagagaaagattagccaggctcttttctttgcctgtgtgtggctctccaggcttagcgggcctcttcccttttcttttgggtgt

SEQ ID NO: 2699 - DNA, 120 bp, synthetic construct
  source 1..120: mol_type = other DNA
gtgggggtgggagaaagggtaggtggcacatgagaggtatggccaccttccctcaaagacctggaccccacccatgggcctttacttcctccctattttccgcacttgcactccctgtgt

SEQ ID NO: 2700 - DNA, 120 bp, synthetic construct
  source 1..120: mol_type = other DNA
tgtgaggatgactgttgacgggacataatgtctgcagagccctttaactccttccacactgggatcatcccctcgacagacaaggaaaccaactcagagaggtgcagtgttgtgctcagg

SEQ ID NO: 2701 - DNA, 120 bp, synthetic construct
  source 1..120: mol_type = other DNA
gtgagattgaagttggagcagtcaaatttgtccttggtggacacctcacagcggtagctgccagtgaaggcaggctgggcatcggtgatgtgcagctcgaacagatagacctgtgtgcat

SEQ ID NO: 2702 - DNA, 120 bp, synthetic construct
  source 1..120: mol_type = other DNA
acaaaacacaaaaaacgaaggcttaaggttctaggcctatgtctaagtgaccttggagcagccacttaacctctcaagctttggtttccgtgtctgtataatgaggaattgttctggtta

SEQ ID NO: 2703 - DNA, 120 bp, synthetic construct
  source 1..120: mol_type = other DNA
ccatcctgtggccgcatcacgaagaggccaatggggtcatcgggggctccaggggtaggaccattgagagctgctgagcttgaccctgtgagcaaaggctttttctgtttgtttgagatg

SEQ ID NO: 2704 - DNA, 120 bp, synthetic construct
  source 1..120: mol_type = other DNA
ccaaacctcagggaaggctgatcaggatcttacctgcctctatgaccttgaggtcgaacttgaccttggaggagccagcaatgactgcgtaagatccctggtcggcagggcccacttccc

SEQ ID NO: 2705 - DNA, 120 bp, synthetic construct
  source 1..120: mol_type = other DNA
tcagaatgggttgaccccgggtgcttcctgtcttggctgtgtcccctctctgcgtccctgaccttgggtttaccttcacctctcatcagagggatgggaaaaagaaaccgagaatcaaaa

SEQ ID NO: 2706 - DNA, 120 bp, synthetic construct
  source 1..120: mol_type = other DNA
gtctgcacaatccattgatagaactggaggatgtgtctgtgtttcctgttgggtttttctcatctcttacatcatacaaacttcaatttttaccttgaatacaggggtagtaggggtggt

SEQ ID NO: 2707 - DNA, 120 bp, synthetic construct
  source 1..120: mol_type = other DNA
ctgctgtggtctttgatttagaataggaaaaaaacgccaaaaaccaagcaggggattttgtcttctgactttattcatagcccatggggcagagttgaagagagaacatactgtttttct

SEQ ID NO: 2708 - DNA, 120 bp, synthetic construct
  source 1..120: mol_type = other DNA
aagacaggtcttattttaggacatcaaagaagagagcagacttttgctccccacgcaagggttggataagaagccataaggatgaacacaactcagtgaccaattctttagtcaaaagga

SEQ ID NO: 2709 - DNA, 120 bp, synthetic construct
  source 1..120: mol_type = other DNA
aaacaaaaaaaaatctgatgagctgggaagtagtccctaacctccacatcagtgctctaggcactctctttttggctcttggaagagtctatttgctaactggaaaagcttaatggataa

SEQ ID NO: 2710 - DNA, 120 bp, synthetic construct
  source 1..120: mol_type = other DNA
gctttaagtattttggtagtgacagcaaagctgagattctccaaaaatgaagatggacacaaatgagggttggtttggcctctccatgaggtgaagtcagatccacatggcctaacttca

SEQ ID NO: 2711 - DNA, 120 bp, synthetic construct
  source 1..120: mol_type = other DNA
gggtcaagagatgaggtctatttgtcatcctgatcttggtttcaatgaaagctttgcacaaagatatccaagcctccagattttgcaagaatctcgtggaaatgtgcaagggtttaaaaa

SEQ ID NO: 2712 - DNA, 120 bp, synthetic construct
  source 1..120: mol_type = other DNA
gccactgcacccggctcagttttttaaatggaaaggaaaatgtctgtcctttagagctacttttaagaacctcctataaatcccatgattgcatactggttcagggaagtaaaagcattt

SEQ ID NO: 2713 - DNA, 120 bp, synthetic construct
  source 1..120: mol_type = other DNA
taataaaaagaaaagaaatcactgggcctgagaaagggaagcagagacagcagtggggtagggagtcagagtggctgtatccccatcgctcagcccagccactcaggagaggcaggggga

SEQ ID NO: 2714 - DNA, 120 bp, synthetic construct
  source 1..120: mol_type = other DNA
atgattaaaactgttaaaagatcaagtcattggtattaaaggtagtaagaggctcagcacatggctgtggtggtatgagaatgaagcggggaaaatatctaggacccgagggataaaggt

SEQ ID NO: 2715 - DNA, 120 bp, synthetic construct
  source 1..120: mol_type = other DNA
tctaggaagaagctagggcttctcagagatgaactgaggagtcattagatatacatggaattctaaagcgccaagattagttgagacctctcacctagcgctggggagagatgaaaacaa

SEQ ID NO: 2716 - DNA, 120 bp, synthetic construct
  source 1..120: mol_type = other DNA
cacgtttcatgatcatttctgcttttgagttaagtaggaagtaaggtccccagctgagagagaatggggaggagcgatcataagttcaaagaaaaagtgaaaagcagcagagagtgagaa

SEQ ID NO: 2717 - DNA, 120 bp, synthetic construct
  source 1..120: mol_type = other DNA
gacatttttggttgtcacattgcagggtggtgggggactactgcagccggtgggtagaggccagaaatgtaagcacctgctacttttcagggatctttttccttctgatggggaatgtcg

SEQ ID NO: 2718 - DNA, 120 bp, synthetic construct
  source 1..120: mol_type = other DNA
gaataaagtatcaatgcatgccacagcatggatgagcctggaattcttgccaagtgaaagaagacacatagcagacaacatagtgtgtgattccgttgatatcaagtgtccagaatagat

SEQ ID NO: 2719 - DNA, 120 bp, synthetic construct
  source 1..120: mol_type = other DNA
tactgaaaaagctactagaagagaatgggtgagaatccttagaatccaatggtaagaaatgtgctgtgatcatatgcctcattcgacccataattaagaaggcttccagtgtgtgtacca

SEQ ID NO: 2720 - DNA, 120 bp, synthetic construct
  source 1..120: mol_type = other DNA
ctccaaaaaaaagaggtgcttccacaagtgtcagtgccacccaggctgagcgagtgacttgtcccttgctttctctgtcctggagtcgcctggagaatgatgcctgttcaccctacacca

SEQ ID NO: 2721 - DNA, 120 bp, synthetic construct
  source 1..120: mol_type = other DNA
cgccttaaaagatgccccctccttggagtcatgcctcaggggtattgccctcatcatctaatgggtgaaactgaggcttggagaagattagaagactcatctgtagttacacagccagga

SEQ ID NO: 2722 - DNA, 120 bp, synthetic construct
  source 1..120: mol_type = other DNA
ctttacctcttgtagctgcatgaggtctgcttccaagctcttggctttcttctcattctctttggctgtggcaaagatctcatctctggaggcacgggcatcttccagctctctttgaaa

SEQ ID NO: 2723 - DNA, 120 bp, synthetic construct
  source 1..120: mol_type = other DNA
gtttcaaaaaaaaataaagaaaacgaagtttccacaccaaccatgagagtggtgataggaatgaaaaaggccacccgacctccctctgctggcctccccggcagcacgcacctgtctctg

SEQ ID NO: 2724 - DNA, 120 bp, synthetic construct
  source 1..120: mol_type = other DNA
atgtattgaggtgcaggtgtaagcagtgtaggttagctatgggagtaatttatataatcatctggcgttctgacttctacatcaaccttatgcagagccagaaatcagctgacttgtttt

SEQ ID NO: 2725 - DNA, 120 bp, synthetic construct
  source 1..120: mol_type = other DNA
attataaattgtaacatccaaaagccaaacttccagtattcagcaaagacagggacctctaaatggcacagtcaacacaaaaatcccacactatgtgtgccactgcactacactctatgt

SEQ ID NO: 2726 - DNA, 120 bp, synthetic construct
  source 1..120: mol_type = other DNA
gatcctgtctcaaaataagtatctgataaagttcatataatacagtgtcaatgactgaatccaggtggtggccttaaaggtgttcaccgtacaattctgtcaactttgctgtgtacttgg

SEQ ID NO: 2727 - DNA, 120 bp, synthetic construct
  source 1..120: mol_type = other DNA
tgtccaaatcaacaaccaggtcgtccagctcctgctgaagcctgttcttggtcttttccagtttatcataagcggccgccttctcctcgtactgctgggtgaggttctcgatctccttct

SEQ ID NO: 2728 - DNA, 120 bp, synthetic construct
  source 1..120: mol_type = other DNA
agtgaaagaagaccaaagacaaaaagaccatgtcattcagcagcttaaaacccctcaacagcttcacattgcccagagtaaggatcaacatacatgtaataggttctcaaaagccctaca

SEQ ID NO: 2729 - DNA, 120 bp, synthetic construct
  source 1..120: mol_type = other DNA
ctggccagaaggtttttttaatatttaattgaacagggagatcatcgcctctcctccaggaacgcaactagaggaaaggacttgccttgcagcaagagagacctcagcgagccgggaaga

SEQ ID NO: 2730 - DNA, 120 bp, synthetic construct
  source 1..120: mol_type = other DNA
atgggttgcaatctggaatcccacaagcggtatccaacctgctgacatgtcccctttgaccctttcactacttttaaaaaaatgagttgccgacattttaataaatgtcacataaaaatc

SEQ ID NO: 2731 - DNA, 120 bp, synthetic construct
  source 1..120: mol_type = other DNA
ttcacaggtgtcgtgtgattgacactgctacttctgtcctagttaagggaaacttattttatggaaccagctcctgtaggcatgtgagttgccctacaggaaaaaaaaagtgtgttgggg

SEQ ID NO: 2732 - DNA, 120 bp, synthetic construct
  source 1..120: mol_type = other DNA
gctgggaatgggcttggcttctagctcctgttcacgtctaatgaaccccaagcatggggagggtcagtgattctgtctggggcctcactcttccaaccataatttttttttttttttttt

SEQ ID NO: 2733 - DNA, 120 bp, synthetic construct
  source 1..120: mol_type = other DNA
ttgggtatttctgtagagcagtgcaacaacggaccaatacactagtgatagaaccaaatgcaaattccccaaaatttttaggcaatgctgcacccacttaatctagcagaaccaaaagct

SEQ ID NO: 2734 - DNA, 120 bp, synthetic construct
  source 1..120: mol_type = other DNA
acacctttgcttatccctgaagggcagtatattgataggccccacccatcctataggccttcagtcctgtagaggccagaaagtggggtctaggaccagactgtttgggtgcaaatcatg

SEQ ID NO: 2735 - DNA, 120 bp, synthetic construct
  source 1..120: mol_type = other DNA
tatgtaacttgttttttgtctttatgcagaccctgacctgtagtaatttgaggctgctgatgtcactcttatgtgtcatcaccaaaaagcatcaccaaaaagcattaccctcttgaactg

SEQ ID NO: 2736 - DNA, 120 bp, synthetic construct
  source 1..120: mol_type = other DNA
tcttctgtatcaaaggccaagcggcaagggagcagaacgctgtgctctatgtgcatgtgacactgcacaaaacccaaagtgggggaagtaaaccccagggtatatggtgttggcacagct

SEQ ID NO: 2737 - DNA, 120 bp, synthetic construct
  source 1..120: mol_type = other DNA
tataggcgtgagcccgaccctaaaggtgatttttttttatgtctgcttttctatagttttcaaattgttctctgagtatatccaagcttaccaatgaggatggttttgaatgcagcctga

SEQ ID NO: 2738 - DNA, 120 bp, synthetic construct
  source 1..120: mol_type = other DNA
tacaatgtggccaaaaacttttctgggaccagacagttatgttgcagagacatcaaacaccttctatccatgtccccaggtctgcttcttgacatgccagactatatgagattaacatag

SEQ ID NO: 2739 - DNA, 120 bp, synthetic construct
  source 1..120: mol_type = other DNA
aaggtattgcttgaaaagaacttagcaccgagtgagcaggtaaataatcattcatagtggctgctgcagtattagcattagtgtaaatccagctaagagccaggaagagggaaaaaccag

SEQ ID NO: 2740 - DNA, 120 bp, synthetic construct
  source 1..120: mol_type = other DNA
caggcattttacccggaggagatgaacacatcccccaatcagtaaccatcatagtcacggtctggaccattatctcccgatgaacagcaccttatattgtcataatattattattagttg

SEQ ID NO: 2741 - DNA, 120 bp, synthetic construct
  source 1..120: mol_type = other DNA
tcatagattcatgcttgtttttcagcttggtaagattcttggccttttcttcctcttctgcaagatttgtcgttaagtcactaatcctctcctcaaggagttttcgttcctttttgggga

SEQ ID NO: 2742 - DNA, 120 bp, synthetic construct
  source 1..120: mol_type = other DNA
tcctggttttctaagggcttttctgctttgagaactgaaagtcccaaatccccaaaatctccctgatcctggtaagcctgttgtttttaatgcagaaacttgattccacttttttttttt

SEQ ID NO: 2743 - DNA, 120 bp, synthetic construct
  source 1..120: mol_type = other DNA
aaaaaaaaataaagacctgggtaagctgctctgcttcatggaacctcaacctcctcatctataaaatgagcacagtaggtaccatggtggttttaaaatctatccacaagttctttgcga

SEQ ID NO: 2744 - DNA, 120 bp, synthetic construct
  source 1..120: mol_type = other DNA
ctgcatctcctcctcctgccgtgtcacctgcagcagtggcttcacctgcacacacacggttagcccatcatttgtttttgtggcaaagggatatgttgtcataataaattcgatcagtgg

SEQ ID NO: 2745 - DNA, 120 bp, synthetic construct
  source 1..120: mol_type = other DNA
tcttccccactttagaaccatcccaacagagaactactgctgaaaagtgatatttccttccaaggacaaaagggagaaaaaaaatctttcatatcccacccacctccctatcaaagtcat

SEQ ID NO: 2746 - DNA, 120 bp, synthetic construct
  source 1..120: mol_type = other DNA
ccctgctatgtactccagcagcttgcttcatgcacttatcacagtttgccattatgtatctgtctctgtgattatctgtttattgtttactccccaccaattcggctagaatattcatgg

SEQ ID NO: 2747 - DNA, 120 bp, synthetic construct
  source 1..120: mol_type = other DNA
cattcttgaaccatcaaaattacagaactggagaacagagtggtttccatggctacggaggaagtgggtgtggctataaatgggccacacgagggattccagtgcggatggaaatattaa

SEQ ID NO: 2748 - DNA, 120 bp, synthetic construct
  source 1..120: mol_type = other DNA
aacttaaatcatctacaggacagagcctttttcagtggacaaggaagacccagggctcacaacatgccctggacttagctgagatccaaacaccactcagaaaacacaactatgtgcatc

SEQ ID NO: 2749 - DNA, 120 bp, synthetic construct
  source 1..120: mol_type = other DNA
taattctgtcttccctgcttggctgccatcttggacacaggaaaactttaagaataaaattgccccagttatccaggaaggacagcaacagggaacttagtaacgaaacttgacaagtta

SEQ ID NO: 2750 - DNA, 120 bp, synthetic construct
  source 1..120: mol_type = other DNA
aaaactcgttcccttcctgcactcgtaacttggtacatttatttaaagtagaagcatttcttccccttcaagaaaaggctgtcattcagtcaatgatgcatcttaaacaggtggcctctt

SEQ ID NO: 2751 - DNA, 120 bp, synthetic construct
  source 1..120: mol_type = other DNA
caccaccattgtctccactatcttctcctgcctggacaaccacagaaaccacccacctggtctctctctctggtcttgcctctcccctcaatccctttgtcctttttattttttgagata

SEQ ID NO: 2752 - DNA, 120 bp, synthetic construct
  source 1..120: mol_type = other DNA
acaaccaaaaatgtctgtagcatgtccatatagaggacacaatcgccccaagctgaagatgcctgcaccagattatgagaaacccacagggaagggctacaatttttctaacactgctcc

SEQ ID NO: 2753 - DNA, 120 bp, synthetic construct
  source 1..120: mol_type = other DNA
atatcacagggaaggagacagacagagatcacagatgttaagtatggaatatcttgagtagtgaggtgtgcgtagaaaaataaaaatagggtaaagcggagagagagtgaagagggtgct

SEQ ID NO: 2754 - DNA, 120 bp, synthetic construct
  source 1..120: mol_type = other DNA
cctccaaggttctttttctaccagcccagcaggtcctgcacatgccaagcccaacccacaggccatggatggcaccatttcttcaccttctactcagattctgtgtaacaatcttttttt

SEQ ID NO: 2755 - DNA, 120 bp, synthetic construct
  source 1..120: mol_type = other DNA
ctgtgccaagaataaaacctgctgtggacactgatggccagggacaaacagcaaaccccctcccctcatcatcactccagcagctcttcacagggatcatctattcactggttctcaaag

SEQ ID NO: 2756 - DNA, 120 bp, synthetic construct
  source 1..120: mol_type = other DNA
agtacctgtgagttatacactattaagagatttcatgacggcagatgccctcctgccgacatgcaaaactcccccctcatcatcttcccaatcatcctggtttagaaattaagcatggca

SEQ ID NO: 2757 - DNA, 120 bp, synthetic construct
  source 1..120: mol_type = other DNA
ctgatgaagtagggaaaagaaaagtgttgtctctatatgcttaaaggaacatatacccccttgaatataggctaggagttgggaaacttttggtgaaggcccagatagtagatatttttg

SEQ ID NO: 2758 - DNA, 120 bp, synthetic construct
  source 1..120: mol_type = other DNA
atgatgatgatgatgatgaatacaactatcatagatttccctggccagagcaggctggcaatagcaaactcaagaccgtgacatgggagatttttgttgaagccaggtgtggatgtatta

SEQ ID NO: 2759 - DNA, 120 bp, synthetic construct
  source 1..120: mol_type = other DNA
actgtatttgcccacatataaagatgagtttatgacccccatgcttccaaatctaccttcaaattaccctgtgcccaatggaccagtaacagggatggaaggcagaacataatgtttgct

SEQ ID NO: 2760 - DNA, 120 bp, synthetic construct
  source 1..120: mol_type = other DNA
ggaaggaaggcagaaattaaagaaaatacctttgatatgaaaatgtgggttaatggaaattgtaagagttcacaaggattcagcttacagcctttcaggactgggtgatggattgggtgg

SEQ ID NO: 2761 - DNA, 120 bp, synthetic construct
  source 1..120: mol_type = other DNA
ccctcacacaccttaaagatgcttatctcctccatctgcacaaccatctatggatggacaaacctcgtaaggcacgctactgcatgtacagatgtggaaacattttacagatgtgaaaac

SEQ ID NO: 2762 - DNA, 120 bp, synthetic construct
  source 1..120: mol_type = other DNA
tccagaaaccaatgcatttcctgttggatttctgtctcttataccctcaatgatccacccttaactagacagcctcctaccctacagtagccatctacatgcctttctccaaaatcatga

SEQ ID NO: 2763 - DNA, 120 bp, synthetic construct
  source 1..120: mol_type = other DNA
taagtgataagtacatcattacctgttcttttgtctgagctttctgtaccacatctcgcccaaccttgatacgaggagtgaggatggatctggtgaaatctgtcacattaattcccatga

SEQ ID NO: 2764 - DNA, 120 bp, synthetic construct
  source 1..120: mol_type = other DNA
cgagctggtcccttaacatgaaaatagcattacatgctgctttgcatgtgcaaggcagagtaaatagagtgattttaggatttttttttccccatctcttggcaagagcactttttcatt

SEQ ID NO: 2765 - DNA, 120 bp, synthetic construct
  source 1..120: mol_type = other DNA
taaacccagtaagcggttgcaacaggtttgatcaaggtgggctctagggagcgggaaaaagcaacacaatatacagcctgggctgggaaataagaaacctaagttttgctctcagctcag

SEQ ID NO: 2766 - DNA, 120 bp, synthetic construct
  source 1..120: mol_type = other DNA
atccctgcgctctgattcaataactttccacatagggtcttgagcactgaaaagtttgaaaaagtgagtgataagaacctagtccaactgttgttaaaatcccagataccttcaccttga

SEQ ID NO: 2767 - DNA, 120 bp, synthetic construct
  source 1..120: mol_type = other DNA
gataatgattatccttaattgagggaagttcttagaaggtgcatgtgggagcttccatggggctggtggcattgtcttatttaaaatggattctagttacacagacgtgttcagtttata

SEQ ID NO: 2768 - DNA, 120 bp, synthetic construct
  source 1..120: mol_type = other DNA
atgatgattaatgcaaattcttggcttagcttaactcaggtacaaatcacccagagttctggcttcaaatcagtcactatgttccaggaacaaagcctagagatcccagacttctctggt

SEQ ID NO: 2769 - DNA, 120 bp, synthetic construct
  source 1..120: mol_type = other DNA
ggcctacccatatttaaactttaggaaccaatttctaaaaattttgaaggttgtagtggccgatctctcctgtgggctcaggaaccattggtttgcactttctggtatagttaaatgtaa

SEQ ID NO: 2770 - DNA, 120 bp, synthetic construct
  source 1..120: mol_type = other DNA
tagtacctgcttcgtgaagtttaggtcttgtaagatgctgagcaagggcctggcctagtaggtgataaagagtggaagccacctatattaggttgaatgttggtctttctaaaatatgtc

SEQ ID NO: 2771 - DNA, 120 bp, synthetic construct
  source 1..120: mol_type = other DNA
tggggttggtgtacatttaggactaagttggttcctatgagagttcgtcatttgcacgccatcgtctgaatgcttgctctgtgtaccatctgctccattatttgcttaatcattttcttt

SEQ ID NO: 2772 - DNA, 120 bp, synthetic construct
  source 1..120: mol_type = other DNA
gagccaccatgcccagcaaaacaatttaaatggtctcattgttttctttcacaaggacagacaatgatttaataaaccctctattaatcaacctattttagtttgttccagtttttttct

SEQ ID NO: 2773 - DNA, 120 bp, synthetic construct
  source 1..120: mol_type = other DNA
ctctgttctttggacataaacccaaagaatataagggctggaacccagctatgttgctgtcaacaaactgcatcctatagagaaacaatgtagtcgagagagatagaagacaagaaatta

SEQ ID NO: 2774 - DNA, 120 bp, synthetic construct
  source 1..120: mol_type = other DNA
attctgagttagtcactttccctttggtttaagccagctcgggttacttgcaaccctagttatacagccacttttctacaacacaaacaaaccacctagaataaaattcattttcctcct

SEQ ID NO: 2775 - DNA, 120 bp, synthetic construct
  source 1..120: mol_type = other DNA
ttctcctgtcacatcccttctccaactctaccttactccataatacctgcttttatctcttttagctgctttttatctggcagttaccactatctctctgtacaataggcttgctatata

SEQ ID NO: 2776 - DNA, 120 bp, synthetic construct
  source 1..120: mol_type = other DNA
aggcaaagcacaatcgctgtaataggcgatttctggatatgtcaagtttagatagtatctagtgacttcctgctatggtaggcaaaaatgcagctttcttatactacctttcctttcctc

SEQ ID NO: 2777 - DNA, 120 bp, synthetic construct
  source 1..120: mol_type = other DNA
ctgtaactgctaatataccatgtttgctggtacataaaaaatccattcagcattccccctttaccaaaaattgctccacctcatagcctatgttcctgaaagccagccattaaggaaact

SEQ ID NO: 2778 - DNA, 120 bp, synthetic construct
  source 1..120: mol_type = other DNA
ggcaagtaaggcaaatgtctttctccctttccttgaaggcgtagattgtgtctagttggacttgatgctctctggtctaatgagacatgaatcattaatgatctaatgtctaattggagt

SEQ ID NO: 2779 - DNA, 120 bp, synthetic construct
  source 1..120: mol_type = other DNA
aggctccaggaagaaggtaatggtaacgagatgttcccctaacagccatcaccagcaaatcttctttaaaatgagctgtcttcagacatgacagaatacaaataatgacaccatctatga

SEQ ID NO: 2780 - DNA, 120 bp, synthetic construct
  source 1..120: mol_type = other DNA
aagtagaaacgtagaaaacattgagttaacgcaatagccaccacctatgagatgctcactttgggcccagtaccgtaccaagggctgtgcatattattatgcatattatttcatttaacc

SEQ ID NO: 2781 - DNA, 120 bp, synthetic construct
  source 1..120: mol_type = other DNA
atacgatagacactacgtagccagcccttactctgcacctcgcatggtgcctagagctttatatgagttcattcactctattctcacatttctatgaggcaggtaccattcattatcatc

SEQ ID NO: 2782 - DNA, 120 bp, synthetic construct
  source 1..120: mol_type = other DNA
cccattttaaagctgggaaaactaaggctaaaagagatcaagtgacttgtccaacgtgacgttgctcctgagaggtagggccctaagcagaaagaaggtttttccatattcaggggctag

SEQ ID NO: 2783 - DNA, 120 bp, synthetic construct
  source 1..120: mol_type = other DNA
tgatgccaatccttgtctatatcccttatgactcttccaatgtctcacctgccactcatggaggtaaaaatctgtttgtaattagccaggcttagaacctaacctttatgactttagatt

SEQ ID NO: 2784 - DNA, 120 bp, synthetic construct
  source 1..120: mol_type = other DNA
cctggaatgcagaggcaatttttccttcatcttttctcactaaaatatctttctgaccctcctacggagacaaccgcttcttttgcacaataaaaccattgttgtctacctatcatcaac

SEQ ID NO: 2785 - DNA, 120 bp, synthetic construct
  source 1..120: mol_type = other DNA
tttgcttgtagaagctgcttttccagctctccctaaaattcattcacatctagttattggagaaagcaacctaggtcctgacagttctaccttggatggatgttgtcacaaaactctgcc

SEQ ID NO: 2786 - DNA, 120 bp, synthetic construct
  source 1..120: mol_type = other DNA
gctatttgtttctgttttgatttgtccacacatcctcctttttgtagctcccagagaaagatgaagcaaaagcctcatccgcatacaaatctcagctacaagtggaatcaccacagctga

SEQ ID NO: 2787 - DNA, 120 bp, synthetic construct
  source 1..120: mol_type = other DNA
tctcagttactcacgtaggcaaaagatgggccttgctgtggttgaacaacacagtataaaacaaatgtcagcgttatttccatcacatggacatcaggggctggagaatatatgactttg

SEQ ID NO: 2788 - DNA, 120 bp, synthetic construct
  source 1..120: mol_type = other DNA
agtatccagtgagacaatgtctgagatgtgtttacgcatgcagccaaaacaagcagcacatagtaggcccttgataacgatgagttgttagaaagtattatctcctgtgtttactcttta

SEQ ID NO: 2789 - DNA, 120 bp, synthetic construct
  source 1..120: mol_type = other DNA
tgagttcttgcaatgatgttctgtttgtatctcggttgggctgcaagctggagaccggttggctaaatcatggcctctgattgggaactgccactcaccgtgatacttgtgtctttcttg

SEQ ID NO: 2790 - DNA, 120 bp, synthetic construct
  source 1..120: mol_type = other DNA
tagcattgctagaaatggaaagaccaggcacaaggcagccttcaagaaaggatgtaagtgcctctggagtaccaggacctaaagtttaagaagctcccttatggaaagaaaaatttacca

SEQ ID NO: 2791 - DNA, 120 bp, synthetic construct
  source 1..120: mol_type = other DNA
tctctgtgctgaaccagtgccaccaaagctagtacagtctctgctcttcttcctaattaggaaataaagaaattaattttctctgccaaaggcccattaataacttggctcatggcttaa

SEQ ID NO: 2792 - DNA, 120 bp, synthetic construct
  source 1..120: mol_type = other DNA
catatattccaggaggctttacttgccccaatcaatgaaccaagccactcagtcattcacacctaagtatgaattacttcaatcaggctaacgtcagaaccttgcttgacttcattctaa

SEQ ID NO: 2793 - DNA, 120 bp, synthetic construct
  source 1..120: mol_type = other DNA
tccaagttctgttgagaaaaataaattgccctgggaggttctgccaaagaaaacatcccaagctccaggctcgtgggcgtctgaaggttgatgtgcttagagctggttctagaaacattc

SEQ ID NO: 2794 - DNA, 120 bp, synthetic construct
  source 1..120: mol_type = other DNA
ctgccagttacctgggtgaccttaggcaagtcatttagcctctccatacctcagtttctttaccccattataaaatgggtataataaaaacacttaccttgtatgatttttttttttttt

SEQ ID NO: 2795 - DNA, 120 bp, synthetic construct
  source 1..120: mol_type = other DNA
tgtttcaataaaactttatctggaacagacagacaagggcctgatttgacccactggttaaactttgtccttccttggcttgagtcccttagcacgttctcatccatttcatttatttat

SEQ ID NO: 2796 - DNA, 120 bp, synthetic construct
  source 1..120: mol_type = other DNA
gctctatctccagccaggcccatggcctctaattaaactgattatactggatggattacatgctagacaaaatacaactcaggcctaaaaattacatttattcagctttcagtttccttc

SEQ ID NO: 2797 - DNA, 120 bp, synthetic construct
  source 1..120: mol_type = other DNA
caaaataaaattgaatacagagactgaagatgttggtggttctgggctgactggatgcatttgcaaataaaagtctgatcgttttgggatttccttcctaacaatggctaaggcctcctt

SEQ ID NO: 2798 - DNA, 120 bp, synthetic construct
  source 1..120: mol_type = other DNA
aacaaacaaacaaacaaactgcaagatggatactggattgcaggaaggatttttaaaaaatagtgagcactttcactacaatagcagctgatccttacaaagtgctcaccatggggcagt

SEQ ID NO: 2799 - DNA, 120 bp, synthetic construct
  source 1..120: mol_type = other DNA
acttgccactttttaagagctcaattaagtgaacttttaagtgaactttgtgctcatcacaaagttcttttggatagcaccgttttagatgaaacagcacctgctgatggcatgggtgct

SEQ ID NO: 2800 - DNA, 120 bp, synthetic construct
  source 1..120: mol_type = other DNA
tatgctggtttgcccctgtgttttccactcaacggtattatctataaagagcgttctctctcagcataaatagatcagcctcactctttgtagtggctacctggaaatgctatattttat

SEQ ID NO: 2801 - DNA, 120 bp, synthetic construct
  source 1..120: mol_type = other DNA
tatcacaaatgtttagtgagcatctacatggtgccaggtataaagagaggcacttggaaccatgaacaaatcaaagatctctgcactcatggatcttttctttcataggttggatctcga

SEQ ID NO: 2802 - DNA, 120 bp, synthetic construct
  source 1..120: mol_type = other DNA
cctacaaatccctttcctctactagatgacagagtcagtctctcttgtttaccaccagagaaacccaaaagatacagaggtcatcaaagaactagatgtgattaagcagacattatccat

SEQ ID NO: 2803 - DNA, 120 bp, synthetic construct
  source 1..120: mol_type = other DNA
ggattatagatggatgtttgggtggcctggttgaacgaaatcctcaagacaaaaggcctaaagactagtcagctctggggtttcaattctggtgtgtttatataatggcacatttaaaaa

SEQ ID NO: 2804 - DNA, 120 bp, synthetic construct
  source 1..120: mol_type = other DNA
aataggcagccattgaaaagaaccaggcagagctttgtggatggacacagaaaaatatccaaaatatattaagctaaaaataaaagatgaggtagcatagtgttataccttttgtgtttt

SEQ ID NO: 2805 - DNA, 120 bp, synthetic construct
  source 1..120: mol_type = other DNA
acctgtgattttatttagaataagggtcttgcagatgtaattaagggaaggatgttgagatgaggtcatcctggcttggagtgagacctaaatcaatggtgtccctatttataagagaaa

SEQ ID NO: 2806 - DNA, 120 bp, synthetic construct
  source 1..120: mol_type = other DNA
atctctccattatactctggagacagacagatacccgtgcctttagcttccacccagggggagaaattcactcgaggacagagcaaaatgggaaaccagtttaattttttttttttttct

SEQ ID NO: 2807 - DNA, 120 bp, synthetic construct
  source 1..120: mol_type = other DNA
tttagtacattcacaatgttacgtaactaccacctttatctagttctaaaatattctgtcacccccaaatgaaaccctctacccgttaagcagccactcccccataagcccttgcaaccg

SEQ ID NO: 2808 - DNA, 120 bp, synthetic construct
  source 1..120: mol_type = other DNA
aacatgagtgtcacatggcctagtggttcccatggtccacaggttctctccattttagtaattatcatcattgtgatccttacttaataaatgtctcaaaacattctggcggaaaaaggt

SEQ ID NO: 2809 - DNA, 120 bp, synthetic construct
  source 1..120: mol_type = other DNA
agtagatttgtgaattcgtggctgccaggagctgcgggtaggaatatggagtgacaaaaaaatgtgcacaagatttctttgggggatgatagaaatataaaattatattgcagcaatggc

SEQ ID NO: 2810 - DNA, 120 bp, synthetic construct
  source 1..120: mol_type = other DNA
tgcttttgagaagttcatgacccagggtgggagtcagatgggcaaagaaatgaccgtaagagatgagcagtgctacgatggatgtgaacccaagtgctatagacgtcaggttttttgttt

SEQ ID NO: 2811 - DNA, 120 bp, synthetic construct
  source 1..120: mol_type = other DNA
agagttggttaggatgacatgctgagtaagaagagatactttgagagcctttgctgcaacccaacaggtgttttccaaacctacaggaagccctggtattgtaaaagcagaactgggctg

SEQ ID NO: 2812 - DNA, 120 bp, synthetic construct
  source 1..120: mol_type = other DNA
ttccccactctctggacctcctctacttagcagctacttgtgggatgattcaattcgtatttacacatacgcacagtaggctgtgtctagggcaacatctaataatcaatattgttagaa

SEQ ID NO: 2813 - DNA, 120 bp, synthetic construct
  source 1..120: mol_type = other DNA
cctcaccagggaaatcgacaaaaatccagacctttcaagggcatgaagatgattgaaagagactggattcagaaagagcttaaaattgttttacccacagcacatttaagagcttggtaa

SEQ ID NO: 2814 - DNA, 120 bp, synthetic construct
  source 1..120: mol_type = other DNA
tgtcttaagcttaaagaggaattagccaagagccccaagctgataaaggctggctgttatttctttttttaatcccctgagtgtggccatttgttgctaatgaggtgaggacaaaacatt

SEQ ID NO: 2815 - DNA, 120 bp, synthetic construct
  source 1..120: mol_type = other DNA
agtcaggataatccaagtgtatatttggctctgacacttaacaaatctgcagcaagttctccactcctctgagtctgttttcccagctgtaaaagggagctaataatagctcttgcggct

SEQ ID NO: 2816 - DNA, 120 bp, synthetic construct
  source 1..120: mol_type = other DNA
ttcccatgagaagatggtaggctgagtgcatgcatttagctctcttccttcctaaaccttactaaaataactgtaaaagactttccaaaaatacatgaaccagtttagccgggcatggtg

SEQ ID NO: 2817 - DNA, 120 bp, synthetic construct
  source 1..120: mol_type = other DNA
agtgtaaaaatacatgaggcagtttaaaaagaactagagaggggagaacagcaaagccatcttggaagacagaaaatgggataagcgttgaaaagtaccaagaaaaagtccagacaccgt

SEQ ID NO: 2818 - DNA, 120 bp, synthetic construct
  source 1..120: mol_type = other DNA
atttcccagaatttgtggacacacgtttatagattaattgggccactaagtgtccaggataacaaataaaaatggactcatagcaagtcccatcatcctgaataggggtacaaagacagt

SEQ ID NO: 2819 - DNA, 120 bp, synthetic construct
  source 1..120: mol_type = other DNA
taatggaaactctgaacactgagtttgtcaaaactaagataaaattatactgggactctgatatgaggcatgtgtgttggaacgaggaaataggggcaaatccagagggtgaatgagcta

SEQ ID NO: 2820 - DNA, 120 bp, synthetic construct
  source 1..120: mol_type = other DNA
aaacatgacataatttatgcatatgcagatataagatacatattttaaatatcagcttctcttcccataccctcaaggggcttggcttccacttgggagggtgccatgttgtgaagtatc

SEQ ID NO: 2821 - DNA, 120 bp, synthetic construct
  source 1..120: mol_type = other DNA
acttaacagaatgagatcgtgccatttatcaatggagtcaacacactgggcctacgtgtttcttcacaaaaaccaatttcctacttgggaatggagaaaaaattaagcaggtgaacggaa

SEQ ID NO: 2822 - DNA, 120 bp, synthetic construct
  source 1..120: mol_type = other DNA
tgctaggactgaagacatgctgctgtgctcaatcatgatagtcatttcctattggagcttactatgtgtcaagtgagcatttctaagtagtttcaagagagctgactatgcaattttgtg

SEQ ID NO: 2823 - DNA, 120 bp, synthetic construct
  source 1..120: mol_type = other DNA
aaaagattcagggcaattcacagctgaatgaacgctaagaccacaggggctttgagagacttaaacactaaagaagtaaaagaagcccttaggaaaactggtgacccatcaaataaatct

SEQ ID NO: 2824 - DNA, 120 bp, synthetic construct
  source 1..120: mol_type = other DNA
attttttcagagcactgtagaaatgcttacccatctgtcgctccccctccttctcctttgctaacagaattttctttctttttggtatttagattaaaatgtgcttagtgggacctcagc

SEQ ID NO: 2825 - DNA, 120 bp, synthetic construct
  source 1..120: mol_type = other DNA
agtttcttgtactcttcgcctgacctggtacacttgtttgcattaactgcctagtccctctgtttgacttgggggtggctatttcaggggctccaaagtgttctaaatagaaggtgagaa

SEQ ID NO: 2826 - DNA, 120 bp, synthetic construct
  source 1..120: mol_type = other DNA
tagacagattgcacagaagcactcaatattctcatgttagagatggggaaactggagcttggagtcttagtggaaaccctgggcctcactgatattccaggtacgtgggaagaggagaaa

SEQ ID NO: 2827 - DNA, 120 bp, synthetic construct
  source 1..120: mol_type = other DNA
acaggtggcacagaaaatgaacagtgtgcttaagatattaactcaggaacatttaataaagaaagtgtttacagatatgtgtgcagaattaaagaaacccaaccagtgacgggagcagtt

SEQ ID NO: 2828 - DNA, 120 bp, synthetic construct
  source 1..120: mol_type = other DNA
aatggtaaattttatgtcatatgcactttaccatttaaaaaatagcagtcctctcctactgggtgaataggagcatctgaaaataatcagatcagggacggaggagtcaaggcacaaggc

SEQ ID NO: 2829 - DNA, 120 bp, synthetic construct
  source 1..120: mol_type = other DNA
attcattcattcattcattctgtacgtcccagatgccatgcaaaaggtgctgggactacattagaacattaaaaaaacacaggatcccagccctcaagggccttttagtcaagggctgga

SEQ ID NO: 2830 - DNA, 120 bp, synthetic construct
  source 1..120: mol_type = other DNA
atctgtgtcagaggctggagataaagaaatcaatgatagctcctgcccttaaagaacttaaatcagagggggagacaagtacattaaaacacgtcgtaagaacagagaatgataggaaca

SEQ ID NO: 2831 - DNA, 120 bp, synthetic construct
  source 1..120: mol_type = other DNA
ggtatgtagtaggtgctcaatcaatgttatttagtgactcttactatgctcccttcatttcacgagagggaagtcttgccaccttagagccttcaatatgctgttctctccacttggaac

SEQ ID NO: 2832 - DNA, 120 bp, synthetic construct
  source 1..120: mol_type = other DNA
aataaaatgaatttttaaaaagaaggaaggaccacactgccttttcaactccatcactagcttctgaaagaggaatatgacttccatcctctttgtttgggacatctctcccagtgccgt

SEQ ID NO: 2833 - DNA, 120 bp, synthetic construct
  source 1..120: mol_type = other DNA
cttttaagagcaaaaagactagaaacaacctaaatacctgtcaatagcagacaggcttaatcattatggttcatccctatagcagaagactgtgcagtggccctctctctactaccatgg

SEQ ID NO: 2834 - DNA, 120 bp, synthetic construct
  source 1..120: mol_type = other DNA
gaacctgtgaatcatgtttgcctccagggaagagggctgctttttgtgatacatacttatttttaaatattctcctgaggtctttgcatagattatccttgtattactggaggaggttct

SEQ ID NO: 2835 - DNA, 120 bp, synthetic construct
  source 1..120: mol_type = other DNA
catctcacagggactgctactcgcactctgcattctgcagtgtcaggtcctctgctttttcgagcaatgccagaaacagatttctttttttgatatattaagttaactcaatttaaaaac

SEQ ID NO: 2836 - DNA, 120 bp, synthetic construct
  source 1..120: mol_type = other DNA
cacaaacggtcttcagcagtttaggtagactgctggacattgctgagcccagaacctgcatctctaagattaggaggaaagctcctctggcttctatagactcttctagatccaagagca

SEQ ID NO: 2837 - DNA, 120 bp, synthetic construct
  source 1..120: mol_type = other DNA
cagatcaataatttttccatacaaacagtgccacagacaagagacttcccctacttaagaaagtaaagatacattttgcaacactgcacctcagcttccttccctaaaaggggcaaacat

SEQ ID NO: 2838 - DNA, 120 bp, synthetic construct
  source 1..120: mol_type = other DNA
atgctcacaaagagacaaagaatgcaccgcatctctggttaaggactaatttttctgttttgtgttcactatgctttctgaactctccaagtgttccatagtgaacgtgtcttagtttcc

SEQ ID NO: 2839 - DNA, 120 bp, synthetic construct
  source 1..120: mol_type = other DNA
cccacaacatcacactccaagccccaatcatctagtccaagcagtccaacagaactttctatgataatgggaacattctgcacttatgctacccagtacaccagccactagccacaggtg

SEQ ID NO: 2840 - DNA, 120 bp, synthetic construct
  source 1..120: mol_type = other DNA
acagagaacgatgccaatgaaatctgttgagagtttatcatacgtcttggcacttggcacatgtgatgacatgggattgtcacacctcctgtctgtaatgagggtgattattcccatttt

SEQ ID NO: 2841 - DNA, 120 bp, synthetic construct
  source 1..120: mol_type = other DNA
tcagaaagggatgtgtgtcatcgcctaaaataccaaaagtcagacaacccaaatgtccaccaacatacagctggatacataagccatgctatttccacactgtgaaatactacccagtgc

SEQ ID NO: 2842 - DNA, 120 bp, synthetic construct
  source 1..120: mol_type = other DNA
aaagaaattatgcaataaaataaatgagtctcaaaagcatcatgctcagtgaaacaaatcagaaaggccacacgctctattactccttcaatacgaaaaactattaggctggtgcaaacg

SEQ ID NO: 2843 - DNA, 120 bp, synthetic construct
  source 1..120: mol_type = other DNA
atccaaccaaacaactaaaaaaatcattatggaccccatgaacatgtatgattatttgtcaattaagaaataaattttttaagttgaaaaaactcactcaagctgtacacttaaaaaaac

SEQ ID NO: 2844 - DNA, 120 bp, synthetic construct
  source 1..120: mol_type = other DNA
ttgttccttagggtaactaaattaagaaggggaagtctctcttgatggaagattaggtcattaaatgtcctgtctacatgggaagcccatggatggtagattcacgttatctgtcgttat

SEQ ID NO: 2845 - DNA, 120 bp, synthetic construct
  source 1..120: mol_type = other DNA
tctgctgggagacctgatatcgtagctgatgaaaaaaaagtggcggctaggtgcggtggctcacacctgtaatcctagcactttgttggggctgaggtaggaggattgcttgaggtccgg

SEQ ID NO: 2846 - DNA, 120 bp, synthetic construct
  source 1..120: mol_type = other DNA
aagaaaggaagaaagaaagggtcttggcaagttggcaagttctaccagtaattgctaaaaccattaggccaatggggctcacatttcctggtgcattagcttctgagtcagtaggactgg

SEQ ID NO: 2847 - DNA, 120 bp, synthetic construct
  source 1..120: mol_type = other DNA
caccacgctcggccagtactctctttctttaacaaataaaatacaaacaaaaaggaggggaacccatagattaaaaaataattgaaagaaaagaggctggcagtagcccacatgtataat

SEQ ID NO: 2848 - DNA, 120 bp, synthetic construct
  source 1..120: mol_type = other DNA
ctataccctttctcacttccggtgactctaagccacttcgctcattcctaaccaatagcatttactactgttggatgttttaattatgtttatttctggacagccatagtcacagaagtg

SEQ ID NO: 2849 - DNA, 120 bp, synthetic construct
  source 1..120: mol_type = other DNA
aacacatccttgagcaaaagaaggtggtcacaaaaagcacaggttctgtgactattgaactgaggtccaaaaccaggcagaattaatctacggtgatagaactcagataaggaatgaatg

SEQ ID NO: 2850 - DNA, 120 bp, synthetic construct
  source 1..120: mol_type = other DNA
tcagaaaaaatagcaaaagctacaacagaaaaataaaaggacacgcacgcctccattgcctgggaccctgtctaacctcagacttaaaaacacaaacaagatcaagtgcaaagattcagt

SEQ ID NO: 2851 - DNA, 120 bp, synthetic construct
  source 1..120: mol_type = other DNA
actgcttccagttgagaaccacagctttagaataaaaacaagggctgtcttgggaaaggcagttaaagctgagagcagctctcacttagtcaaactcaactcggaataccaactgcagaa

SEQ ID NO: 2852 - DNA, 120 bp, synthetic construct
  source 1..120: mol_type = other DNA
atgtttggatgaaaacaaatgactctgtcacctttggcattagcgatgtttgacacatctgagtgtgtcagccttgtttacagtcctgtcctgaccaacaactgcttcattctttttttt

SEQ ID NO: 2853 - DNA, 120 bp, synthetic construct
  source 1..120: mol_type = other DNA
ggattttactgccaagccattggctaaagattttggaccagagacaaaaacccaaatgtttttggagatcaggtaagtaatacagagtgacccagaccagatgttagagtattgcttata

SEQ ID NO: 2854 - DNA, 120 bp, synthetic construct
  source 1..120: mol_type = other DNA
ctggaaggtaaatgcaagacccccacttgtaaaatttggagtcaggagtacaatccagaatctaatcctagttttctgctaagagtaaatggacacccgattaattcttagcagaaagtc

SEQ ID NO: 2855 - DNA, 120 bp, synthetic construct
  source 1..120: mol_type = other DNA
taaattcatataattagacaaaaagtccaaggatgaaagagtggcattatctattattcccattttcctgctaagcctatcggggtcttgaaaggtaaatgcaaggccctcccttgcaaa

SEQ ID NO: 2856 - DNA, 120 bp, synthetic construct
  source 1..120: mol_type = other DNA
tggatcacatacaaggtttctttcaaattcttgcctgcctttctctaaattcagtctttcctccattgtgtggccagggttaaaagttgaaaggtcaggagtggaaggagaagacctaga

SEQ ID NO: 2857 - DNA, 120 bp, synthetic construct
  source 1..120: mol_type = other DNA
gctaaacccttcatacacattagctcatcaaatcctcccatgagggtaatctgtgaaactctggagttagaaagacctagatttgtagaatcttcttttccttactggttagctgagcta

SEQ ID NO: 2858 - DNA, 120 bp, synthetic construct
  source 1..120: mol_type = other DNA
tttatgttttcttcaaaggacacggtgataaacatttactttgttggaagcatttagtcccaccagaaacctgaccccaacaagtttgtgtccatggtaaagaagaaagatagtggggtc

SEQ ID NO: 2859 - DNA, 120 bp, synthetic construct
  source 1..120: mol_type = other DNA
attatcaacacaactgtgcaatacggtcaaatccacaaggagcctcactttgcccttctgtgtgatagcaagtgacttttcagtgaagttcagctgtaaattttttggtgcctagaataa

SEQ ID NO: 2860 - DNA, 120 bp, synthetic construct
  source 1..120: mol_type = other DNA
tgggatgtccattttaggtttgagttacaagattgcaggacaaaattaggtggaagggaactggaaactagcagttggggggaaactgggatatactggttgtatataaattagggtctt

SEQ ID NO: 2861 - DNA, 120 bp, synthetic construct
  source 1..120: mol_type = other DNA
tagaaggtagcatcccctccgccctgccctgcttcatctgatatcctgacccaattctactttctgatcctcactaaacacttgaattctccttataatttcttaccaaatatgtgtaaa

SEQ ID NO: 2862 - DNA, 120 bp, synthetic construct
  source 1..120: mol_type = other DNA
acttcagtctggagctgggacaggtcagcatccatcttcttcttctggttgatgaggctggtgttctgggttgggggagggttgggcagagcaggaaaagcattgagcatctatgcatag

SEQ ID NO: 2863 - DNA, 120 bp, synthetic construct
  source 1..120: mol_type = other DNA
atggatacgaagtgacttcaagagtggtgtaagtggttcaaagaagcagaaggtggaggaaaagagaatctaagagaaaataaaaataagcctaagagaaagtgattcaggccctcacag

SEQ ID NO: 2864 - DNA, 120 bp, synthetic construct
  source 1..120: mol_type = other DNA
ctgcaggtttttgttctcccgcttgaaggtctccagatgttccagggactcctcataggcgttcttgagtttgaagagctctgtgctgagggagcgagcctccttctgcgaggactccag

SEQ ID NO: 2865 - DNA, 120 bp, synthetic construct
  source 1..120: mol_type = other DNA
accccaatctcaacatcatcccttggcctcatctatgtccaaacccccagtggacctgtcatggtttactgtttgctgataacaaagaatgccaatacagcagtgaactatttaagaaaa

SEQ ID NO: 2866 - DNA, 120 bp, synthetic construct
  source 1..120: mol_type = other DNA
gtagatggcatgtggcagggtttgggctgtgatttctttttagaattcttggagaactgttggtccacagccagccttattgctgggaagggaagtgatttgatgcaaggctagtcagtg

SEQ ID NO: 2867 - DNA, 120 bp, synthetic construct
  source 1..120: mol_type = other DNA
aggcgagggcctgacagtctacatgctctttattggaaggaaagtggttgaaacttgctcttaaagatggacaaagagacctgtgttctggggatattttaagcagtttagtcataaaaa

SEQ ID NO: 2868 - DNA, 120 bp, synthetic construct
  source 1..120: mol_type = other DNA
aaatggtaatgatacaggtaaagagtaggatttcattagaaaaacagcttctgggggtgatgtaggatccctggaagtgtaacacctgcggtgagattgaaatccaacaagaatgtaatg

SEQ ID NO: 2869 - DNA, 120 bp, synthetic construct
  source 1..120: mol_type = other DNA
tttgtgttcaggacttgggaaaccttccccagagtgggccaaatgttattaggggactgtgagattgcctagatataggggatgctgaatcaatattttatagataaaggaataaatgac

SEQ ID NO: 2870 - DNA, 120 bp, synthetic construct
  source 1..120: mol_type = other DNA
tgatcataccagtgagattagatacataattcagaattgatcaccacctctgacttttcattccccagctcctttctagaaagatatcagaaaagttaacatcctctaaccctacccccc

SEQ ID NO: 2871 - DNA, 120 bp, synthetic construct
  source 1..120: mol_type = other DNA
ttgctgatgccaagcacttatgtatgatggcttaatgaaatggacagctttattccctgtctagaggaaattgaggctcaaagatgatgcatggtctgcccaaggtcacaaaataattaa

SEQ ID NO: 2872 - DNA, 120 bp, synthetic construct
  source 1..120: mol_type = other DNA
tctctgtgtttgaagatctgctgagctttttttcctgacactgcccctgaaccagcctgggcctcagagaagcgggaaacctcctcttgagatctctcacctacgttccagcagcttttt

SEQ ID NO: 2873 - DNA, 120 bp, synthetic construct
  source 1..120: mol_type = other DNA
gtaggaggagtctgtgagaacactggactgaagttctgggttctgatcctggctttgtcactgattagcttgtaatcttagcaagtcagttagtaataatcatttgtttcattttcttct

SEQ ID NO: 2874 - DNA, 120 bp, synthetic construct
  source 1..120: mol_type = other DNA
gcaagttggtcatcagcttgttcagattttcctgtggccaaaaatgcaatagagaaaagtaaagaaaatgccagaaagagatgcaggaagaagagaggagaagaaggaaggaaaagagag

SEQ ID NO: 2875 - DNA, 120 bp, synthetic construct
  source 1..120: mol_type = other DNA
aaggtagtaggctcagctctgagtacagttatctactgactggaaccggttcaaggtggaggattttgtctgatgacagaaggacctttgtgaaagtctgggaatatggattctatcgat

SEQ ID NO: 2876 - DNA, 120 bp, synthetic construct
  source 1..120: mol_type = other DNA
atatatcacctgcaaggtggaggagagacccatattgagcagggttgttgggaagagtgaacttgaaaactctcatcccaccatgccagtctccctaccctgcccacccattatcatctg

SEQ ID NO: 2877 - DNA, 120 bp, synthetic construct
  source 1..120: mol_type = other DNA
aaaacttgtctccttaatccctgtgggttctgagactcccatacccagtggggagctccaaaacaaaggatgtaagatgcagggaactccaaaacaaaggatgtaagatgcaagagcaga

SEQ ID NO: 2878 - DNA, 120 bp, synthetic construct
  source 1..120: mol_type = other DNA
ctgctttcagctggaaaataactctggatttttccagaagatctgtgaacaggtggggagaagaaggagagaaagaaaagttagggtttgggcacaaggaaaattaatgataaatgtagc

SEQ ID NO: 2879 - DNA, 120 bp, synthetic construct
  source 1..120: mol_type = other DNA
ctgttttgggaaaagttggtagggctggaagaatgggaaatgtttctgaagggaaagaaaatgcagaggtgaagacatggcgataatgagcttctggataaacgcgtgatgagttggaga

SEQ ID NO: 2880 - DNA, 120 bp, synthetic construct
  source 1..120: mol_type = other DNA
attttgggagttagagaaagatcccaggagagaaagaagagaaaggaaaacctctgcatgcactcaatctgagtaatgccagtccccagagtgttggaattgaaccaaggatgttgggac

SEQ ID NO: 2881 - DNA, 120 bp, synthetic construct
  source 1..120: mol_type = other DNA
tgatagccaagatattctctccagcacatggcagaaactagagttccataggctggctttggggctctaatgcccagtcttactagattttcaacactctagcttcagcttttcttacct

SEQ ID NO: 2882 - DNA, 120 bp, synthetic construct
  source 1..120: mol_type = other DNA
atacacacttcctagaatccttctccaccattctttctccctccctgcaaaggaacctcctcgttcacagacgtgatcatacacccacatctcccacttgatatttctgtatcagtcagt

SEQ ID NO: 2883 - DNA, 120 bp, synthetic construct
  source 1..120: mol_type = other DNA
tagaataagctccctccctgggtagtcagcagtgccgatctttgggcctaaatcttggctcaacttcttccttcatgcacttttccttccttgcccttccctgttcttcctttcttgccc

SEQ ID NO: 2884 - DNA, 120 bp, synthetic construct
  source 1..120: mol_type = other DNA
ttgctcatacagaagctttggcaaattagcaaaagtgccccttctaccaaactcactaccgcaccacctgagttgaaaaaaaaaaaaattattaccagacactttactgccagttctgga

SEQ ID NO: 2885 - DNA, 120 bp, synthetic construct
  source 1..120: mol_type = other DNA
catggaggaaaaagaccctgctttcgtctgatcactgagcctctgtatttcgaagagagggctgagaacccaaggtcaaacatcatctagatttgaaagcctgggattcaaatcttaacc

SEQ ID NO: 2886 - DNA, 120 bp, synthetic construct
  source 1..120: mol_type = other DNA
acacacacacacacgaccttacccttaagtttctccccaaacattgtgaggaacacagtaaagttaattggacccggagcctccttgatcatttcatcaatttcttcatttttcacgttc

SEQ ID NO: 2887 - DNA, 120 bp, synthetic construct
  source 1..120: mol_type = other DNA
tcattttttaagccaatgtatgttttaagtataaaaagctacactcactacaaatgtgaatacttccctgtagaattgtgcagtgcgcagtctgcacagctgtgtatggttgccctgagt

SEQ ID NO: 2888 - DNA, 120 bp, synthetic construct
  source 1..120: mol_type = other DNA
cttggcaggagtggattctgggatcttcaaagatcattgtaggacctcagattaaaagtcaacaattgaagataatccaacagtttcttcaaaacgtcaggcctcgtgttatcatatgac

SEQ ID NO: 2889 - DNA, 120 bp, synthetic construct
  source 1..120: mol_type = other DNA
tataaagttctgagaatctccctgactgtcagctgagatagattactggtcccattttatagatagggcaggctagggagtggagaggccagatgagacaccagtttttagctttttaaa

SEQ ID NO: 2890 - DNA, 120 bp, synthetic construct
  source 1..120: mol_type = other DNA
tggttctcttcataaggtccattgccatcaaatgcgatggggtttcaaatggggctagtggttaataatcaaagactgtaaaatgtaaaacccagaagatactgcttttcacctctcaga

SEQ ID NO: 2891 - DNA, 120 bp, synthetic construct
  source 1..120: mol_type = other DNA
tagtttcttttaaaaattcacacatccgttcaggccgaatttgggattgtttggaggatagaggcatctaatgaaaggtccctgctgggaatatggaacaaaaagaaggttctccctcgt

SEQ ID NO: 2892 - DNA, 120 bp, synthetic construct
  source 1..120: mol_type = other DNA
cccacttcaggagggggacacctaacccaacagcacagaaagaaaggttttaaatttgcaagttcaaaaggtgaaaacaaaaacattctttttcccagctgcctgaacaagagaaaagaa

SEQ ID NO: 2893 - DNA, 120 bp, synthetic construct
  source 1..120: mol_type = other DNA
cttgtcaattttgagaaaaaaaatggcagggagaggagactgctaaaatgctctgttttatcagcctggatctggcctcagggtctttgcacctgtgtgccctctacctggaatgtcttt

SEQ ID NO: 2894 - DNA, 120 bp, synthetic construct
  source 1..120: mol_type = other DNA
gagcagagtgttctctaactcttccagagaaagggagactccctttcccagtctgctaagtaacaggtgccttcccaggcactggcactactgctagaccaaggtctgctaagcaacggg

SEQ ID NO: 2895 - DNA, 120 bp, synthetic construct
  source 1..120: mol_type = other DNA
tttcacctgcctgtttggtatctacaaatggacaccagcaaactgaattcagaatttctggtaaatgtactcttggtaaatttaggcccaagcctctctaatcaagagtctgtagaatcc

SEQ ID NO: 2896 - DNA, 120 bp, synthetic construct
  source 1..120: mol_type = other DNA
tttccacaataacatctattgtggcagcctgttatcttttaatgaactgtgaaaggcagagtgtggcctagagtaagactttagaatttgtgggagctgcaaacgtgaagcaaatttgca

SEQ ID NO: 2897 - DNA, 120 bp, synthetic construct
  source 1..120: mol_type = other DNA
caatcaacaaaaccagactcagctgtgacatggattttggaactattacacggggagttgaaaacactatgatggatatatctgtagactctagttcataggtcaacaaacgttttctgc

SEQ ID NO: 2898 - DNA, 120 bp, synthetic construct
  source 1..120: mol_type = other DNA
ggaatcagtgcctgggcttgctacagtatatcatctaagatgtcttcttcgaaatggaaaaattacagaacaggcaaagaaacaggaaagtttggtcacttcacaggagaaaaaagcaag

SEQ ID NO: 2899 - DNA, 120 bp, synthetic construct
  source 1..120: mol_type = other DNA
catcacatacaagggaaccataataagattatacctgagtttttaccagaataaaatggagggctgaagatagtgtgacaacttacttgaaggactgaaagaaaaatgttcaatccagaa

SEQ ID NO: 2900 - DNA, 120 bp, synthetic construct
  source 1..120: mol_type = other DNA
agtgctggggttgcaggcatgggccaccatgcccagctaatcaagtggaatttattccccaaaagcaaggatgattcaatatacaaaaatcaatcaatgtaatatgccacattaatataa

SEQ ID NO: 2901 - DNA, 120 bp, synthetic construct
  source 1..120: mol_type = other DNA
aatttactataaagctatattaattaaaacagcatggtattggcataatgacagacatacagaccaatggaatagagaacccagaaataaaccctctcatatatggtcaaatgattttca

SEQ ID NO: 2902 - DNA, 120 bp, synthetic construct
  source 1..120: mol_type = other DNA
agataacacttcatacccaccaagatggttaattaaaaagaaacgagcagaacagaaaataacatgtattggagaggacatgaagaaattggaatgtcgtgccttgctggtaggaatgtc

SEQ ID NO: 2903 - DNA, 120 bp, synthetic construct
  source 1..120: mol_type = other DNA
atacattgggtatcttcctctttcataaattcttcctcttgtaaactttatgtgggcagatttttttgtctgtcttgcttattgctgtattcccagcacctgaaacatgtctggcactcg

SEQ ID NO: 2904 - DNA, 120 bp, synthetic construct
  source 1..120: mol_type = other DNA
ctagaaacgttcctggaatccaccgaccctccccacagtgttccctctctaatccccacaacagtctcaaccctacagtggaggaaatgagtggcgagaggttaagcaatttgccaagat

SEQ ID NO: 2905 - DNA, 120 bp, synthetic construct
  source 1..120: mol_type = other DNA
tggtggcttgcgagggtgtgtgtgtcccgaagggaaaacactgtgcgtgtgataagttgcacacctcccaacacacactcctcgttttacaaaaatcagcagctgagggcagaggacaag

SEQ ID NO: 2906 - DNA, 120 bp, synthetic construct
  source 1..120: mol_type = other DNA
aacactggggcaagctgggtgagggatgttatttaactggaatggctatggtttgcagaaccagagcttccaaattacttagcaaagcatgtttgctttttaattaacatgtgcttgaaa

SEQ ID NO: 2907 - DNA, 120 bp, synthetic construct
  source 1..120: mol_type = other DNA
cggtgtggtcttttataaagcagtcttggcgttcaatgaatgaggtccaccaggcagataagcaaaaggaaacagcatgagtaacaacctgaaagcatgggcctggaagccactgatgtc

SEQ ID NO: 2908 - DNA, 120 bp, synthetic construct
  source 1..120: mol_type = other DNA
catgaaacgtgcctgcctatacttaattcattatgctcggctgggtgggaggcctggcgagcagggttttttttttcccctgagctcagacattcctcactttattattctccacatttc

SEQ ID NO: 2909 - DNA, 120 bp, synthetic construct
  source 1..120: mol_type = other DNA
tgaaaacaggtatggacatccagaggtttggggacactcagaatctcaggatcccagatactccaacaaagagctgaggcatcttctcccttgtgccccaccaccccctagccctgacct

SEQ ID NO: 2910 - DNA, 120 bp, synthetic construct
  source 1..120: mol_type = other DNA
gaagatgcatagattgggcttctggaaaatatacaagataggacattttttcaaaactttcttgggtattgtgataagttgggccttagggcttggaaatgcccaagtgcttccaatctc

SEQ ID NO: 2911 - DNA, 120 bp, synthetic construct
  source 1..120: mol_type = other DNA
ctttgagcactacagtccactttcccacagctgcactgatttccttccttcttgtggcctggcaaaattttcatccaatgcctgacttcttcaagatcccacctgacttctttctatctc

SEQ ID NO: 2912 - DNA, 120 bp, synthetic construct
  source 1..120: mol_type = other DNA
cacagacacagacacacatatacaacacacatacaaacacaagcccacattcacttacagacacagatccacaggcatacatgcacaactgtggacctatgcacacatacacacgcacat

SEQ ID NO: 2913 - DNA, 120 bp, synthetic construct
  source 1..120: mol_type = other DNA
cggtaaactgtgaaagagcagattacgactccttcccctgaattagatctgaggctggagtggactgaaccagaaggccttgaaatctgtccttgatgttgctgaggatgttttcaaaac

SEQ ID NO: 2914 - DNA, 120 bp, synthetic construct
  source 1..120: mol_type = other DNA
acgtgggtgtgcaaatacctgttcaaaccctgctttcaagtattttaggtacatgcccagaagtacaattgctggtcatctggtcattctattttgtgggaaaatgctatagcgttttcc

SEQ ID NO: 2915 - DNA, 120 bp, synthetic construct
  source 1..120: mol_type = other DNA
tttatatattctaaatattatcttctctcctttaaatctttgctcaactatttcctgcccagataatccttgacctcattatttaacatgtcacccacctcccggcttacacacacacat

SEQ ID NO: 2916 - DNA, 120 bp, synthetic construct
  source 1..120: mol_type = other DNA
aaagcctttgatctcccccacatttctatatctggggcccccagcctctctgcagggctttgctctctcttcacatcaagcctgcgtgaatcatctcctcgaggaagcctcccctctcta

SEQ ID NO: 2917 - DNA, 120 bp, synthetic construct
  source 1..120: mol_type = other DNA
aagagagggaggaagggaaataagtcagaaaggaaggccggcaagaagccatttattcatgaggcccatggggtggggacagagctgctgtcacaggtaagcacagcctgagaggggcca

SEQ ID NO: 2918 - DNA, 120 bp, synthetic construct
  source 1..120: mol_type = other DNA
gatgtcatcccccttctgtgagctgcaccagcatgcttgctttactctcctcctaagtaacatttctgttgtctgccattgaggctccctaattatgtaactctctccatttcaccaatg

SEQ ID NO: 2919 - DNA, 120 bp, synthetic construct
  source 1..120: mol_type = other DNA
gggtcaggagcagctaggccaatcagagaccttccctgggacttttgaacccttggtgggggcttgggcctcactcctttttttttttttagctttaaaattttattcatttatgtattt

SEQ ID NO: 2920 - DNA, 120 bp, synthetic construct
  source 1..120: mol_type = other DNA
ggaaccccagcccaatcctgcaacccctgggttcaagacccctgctcaccttcaatctgctcaggtgtgaactcaatctgaaaagagaccccaaagactcagatgcccggcttaaaaggt

SEQ ID NO: 2921 - DNA, 120 bp, synthetic construct
  source 1..120: mol_type = other DNA
aagaggggacttgctgttctgtttcacagctgaggaaaccacgcctcagagcagcgaagaacttggcaactaaaatggagcagagttgggatttgaacccttgcctcaaaggacatggta

SEQ ID NO: 2922 - DNA, 120 bp, synthetic construct
  source 1..120: mol_type = other DNA
tgactccaggattccccaaggatgagaagtccaggaagaagggcaagggagagtccatttccaaaaccactaaaaagacagtccagactcaaaccccagtctagactccaccttagttct

SEQ ID NO: 2923 - DNA, 120 bp, synthetic construct
  source 1..120: mol_type = other DNA
gcatttgtctctgtgggtctgggtctttatgtgtgcgtggtgtgtctatgtgtctatgtgagtgtgtctgcgggtgttgcttctgtgtgtttatgtctgggtgtttacatgtgtctgtat

SEQ ID NO: 2924 - DNA, 120 bp, synthetic construct
  source 1..120: mol_type = other DNA
gttctgcctctcatctggagggcagaacacccacatctggaaatctgacaacatccgggactggcgggggggcaagtttttcacttttcttccaaatgtttggcaacagtattgagaaag

SEQ ID NO: 2925 - DNA, 120 bp, synthetic construct
  source 1..120: mol_type = other DNA
ttctttcatcctcacacaattaccaccccttggaaaccacccaacgttggcccaaatgggggtaagccagtgacaagagcatcctgggcctcagtgtccaggtctgtgatctgggatggg

SEQ ID NO: 2926 - DNA, 120 bp, synthetic construct
  source 1..120: mol_type = other DNA
cagctacattttcccaggacctggtacaccacaggcattcaataaatgctggatgaacaaatgttccaaatatctcagtttacccacctctcacagaggtactggaaccccttgctaaac

SEQ ID NO: 2927 - DNA, 120 bp, synthetic construct
  source 1..120: mol_type = other DNA
aagagctgcccagcaattctgactagagatggcacgaggcaggtacaaggaccagcagaaggagataaatttctacaccatcccatggccctggagcctcagatgaaagtctgactccta

SEQ ID NO: 2928 - DNA, 120 bp, synthetic construct
  source 1..120: mol_type = other DNA
ccaaaccctgtactctcccaccagcagcttcccaaagagcaaatatttattgtccttggaagaaaaaaaaagactccccttttaggatcggggtctgggagctgctattgaggtttgcag

SEQ ID NO: 2929 - DNA, 120 bp, synthetic construct
  source 1..120: mol_type = other DNA
tctgttgaatggccaattcagtcaaaaatgcaagtaaatttagcaggagaaaaaaaaacccgtcagtcagacgaggagtctgaattgagtggttgtttgagtggatggaccgactgtctc

SEQ ID NO: 2930 - DNA, 120 bp, synthetic construct
  source 1..120: mol_type = other DNA
tatccacactcctttgtacacatatacttttgcacacatgtatacacacattcacatgcctttgcatacacatccatgcactctcccacatacacctaatgcaccacatcttttagctca

SEQ ID NO: 2931 - DNA, 120 bp, synthetic construct
  source 1..120: mol_type = other DNA
gaggtaaatacctctgtgccccaaaggtctggagctcggttggatgagaaactgttctgggaggacagtggaatgttaggagacactggagcatcatcctcccatccaaagctgatgagg

SEQ ID NO: 2932 - DNA, 120 bp, synthetic construct
  source 1..120: mol_type = other DNA
gctttctgagaagatgccgtcaggcagattccatctcataacgtttcctggaggaaaacgttccgacaatgagcgttccaacaatgaagggatctgtctctgatcctggggcctgctcat

SEQ ID NO: 2933 - DNA, 120 bp, synthetic construct
  source 1..120: mol_type = other DNA
gagacttgctctggatgagcggggtgacctctggcatgccattgcccttctctggatgtcgctttcccatacacggttttataaacttccctgagtgcttcccctctccagccagttcag

SEQ ID NO: 2934 - DNA, 120 bp, synthetic construct
  source 1..120: mol_type = other DNA
tgatattttgagtttaagaaaactttgcagtcggcaggagctcttaaaggttataaatagcagcagcgggagcccatgcagggagaggcggaaacacgtgtcaaacacgcctgggagggg

SEQ ID NO: 2935 - DNA, 120 bp, synthetic construct
  source 1..120: mol_type = other DNA
ctgatctaagagaaatcagttttgatggcctcgtggccatggaaggaacccttcaacctccaccacctccctggatttcccaactgctccacaatgtgcatggggcaagaactgttacga

SEQ ID NO: 2936 - DNA, 120 bp, synthetic construct
  source 1..120: mol_type = other DNA
ggccagtccattctgctctttggtcccgtttcctccacctggaggccaggtatcaccgagcctgcctccctgactaacttgtgaaacaaaaagtactttggaaactctaatgagtggtac

SEQ ID NO: 2937 - DNA, 120 bp, synthetic construct
  source 1..120: mol_type = other DNA
ggcttggtaaaaaataattaattttcttttcaagtggaagctctgactcaggtcttttcttgtccccagcagcactatccttgcttaggcctgagccacagaagctgctcagggactatc

SEQ ID NO: 2938 - DNA, 120 bp, synthetic construct
  source 1..120: mol_type = other DNA
tggagatagagctcagtctgggatcagggctaagcttggatgcagcctgactttggggctagtgttgggatgaagcactggggaaatataaggactcagaaatagatgtgagccattagt

SEQ ID NO: 2939 - DNA, 120 bp, synthetic construct
  source 1..120: mol_type = other DNA
ctagttttatctctcagtccttccaatccctccattaatgttcttttctcatcaccaagggggaaagcagggtggaagatcagtggtcacagaaccataaaacttagagacacttagaaa

SEQ ID NO: 2940 - DNA, 120 bp, synthetic construct
  source 1..120: mol_type = other DNA
aggagagtggatgtgtgaagaagaccaggagtctagcagacagttcctgttagggagagtcatttttggaggaaactgtctcaaatagcacagcccttgaacaccagaaaaagaaatgag

SEQ ID NO: 2941 - DNA, 120 bp, synthetic construct
  source 1..120: mol_type = other DNA
attcgcccatgatgaaagagggctcgcttctcggctcagggtctctattcgccagcgggggccggatgatcaagggaaaaaaaatttaaaagcccgtgctttccagaagagaatgaagcg

SEQ ID NO: 2942 - DNA, 120 bp, synthetic construct
  source 1..120: mol_type = other DNA
gggcagaaccggaagggccaactaggcccaaaacctcatgttaaagatgattgctgctttttttcataggacttttgggttttggcatttcctgaaggttattttcattcattgttattg

SEQ ID NO: 2943 - DNA, 120 bp, synthetic construct
  source 1..120: mol_type = other DNA
agaacaaacccatttatctagtaaatggcaaggtggggttttgaaccaagctcacagcccgtacagtactgcttctcaagtaatttaagttcttgctgctaaaagtgtggtttgtggacc

SEQ ID NO: 2944 - DNA, 120 bp, synthetic construct
  source 1..120: mol_type = other DNA
tcttcccaggaaaagcaggacatcagcatttctcatcctacctagagctacttgttgctgaggttaaaacctgtgtgagtgcaattgaaagttggagctctctttttttttcttttgaga

SEQ ID NO: 2945 - DNA, 120 bp, synthetic construct
  source 1..120: mol_type = other DNA
agtgaagctctgtcctgtcacaaaacaaaacattgaccacagacctctgaggtggtggatgtccctcctgtcctggttgtatcattatacattgtatattaatgtatcgaaatactacag

SEQ ID NO: 2946 - DNA, 120 bp, synthetic construct
  source 1..120: mol_type = other DNA
caggaaaatatgacacatacactggaaaaaagctggcagcagcaactgcctgtgagacaaggggccaaattaatgaaaaaggcttcaaactggcctatatatatattcacagtactatat

SEQ ID NO: 2947 - DNA, 120 bp, synthetic construct
  source 1..120: mol_type = other DNA
aaaccaggaacctcagttcagtatttggcaccatgggctaatcaactaggtatgaccttggttatgacagtggaaccagggtttggagggcataaattcatggaagatatgatgttaaag

SEQ ID NO: 2948 - DNA, 120 bp, synthetic construct
  source 1..120: mol_type = other DNA
atgattagtgagtgagatactgtttttattgagagccttgatttttataaagagtaaaaatatggctgcattaagggtacaaacagaaaagtgtcttaatgtctaaggagggcatattag

SEQ ID NO: 2949 - DNA, 120 bp, synthetic construct
  source 1..120: mol_type = other DNA
aaaaattaatacagttcttcacaaagtcttcaaaaatgaaaaagaggagaaaatacttacaaacgaattttatgagactggtattaccctgttgccaaaaaccaggaaaagacattacaa

SEQ ID NO: 2950 - DNA, 120 bp, synthetic construct
  source 1..120: mol_type = other DNA
atatagaccctgaggaatccactaccaaagtattggaactaataaattattagtttagtaaggttataggatacaagatcattacacaaaacttagttgtaaatgtatccacttggaatg

SEQ ID NO: 2951 - DNA, 120 bp, synthetic construct
  source 1..120: mol_type = other DNA
taacgttgtcaaattggcagtattttggaaattgatctacacgtttgacataatccctgtcagaatcccagtttatttcattgtagaaattgacaagtctccaggcgtagtggctcatgc

SEQ ID NO: 2952 - DNA, 120 bp, synthetic construct
  source 1..120: mol_type = other DNA
agtacctggactacaggcgcctgtcacaacgcccggctaatttttgtatttttagtagagatagggttccactatgttggccaggctagtctcgaactcctgacctcgtgatccacctgc

SEQ ID NO: 2953 - DNA, 120 bp, synthetic construct
  source 1..120: mol_type = other DNA
tgtctatattaaaaatacagaaattaggctgggtgtggtggctcatgcctgtaatcctagcactttgggaggctgaggcaggtggactgcttgaggacaggagttcaagactaccttggc

SEQ ID NO: 2954 - DNA, 120 bp, synthetic construct
  source 1..120: mol_type = other DNA
atatgcaaatctaggataggcatatctacagagacaaagtagatcagtggttgttcagggctgggaaaaatgggtggggtagagggtgtgatagctgaaatatacaaggttttatttatg

SEQ ID NO: 2955 - DNA, 120 bp, synthetic construct
  source 1..120: mol_type = other DNA
tactatttgatagatgttagatgttgtgagagggtaagagagactagcctataaggaaagggattttagttttttgggggtttttttttttgagacggagtctcgctctgtcgcccaggt

SEQ ID NO: 2956 - DNA, 120 bp, synthetic construct
  source 1..120: mol_type = other DNA
gagcagtagtagaaagtgcatcggctttgaaagaagacagacctgggcttgaattctagctaaaatacttctactttggacaagttacatagctctctggaccttattttctcattggta

SEQ ID NO: 2957 - DNA, 120 bp, synthetic construct
  source 1..120: mol_type = other DNA
tacaagtggacgtaagttgtccataacagaaggaactttctaaaggggaagacagatagaacaattctggcattttcagtaaaatcttaaatcctaggctccctaggaccaggcaaacca

SEQ ID NO: 2958 - DNA, 120 bp, synthetic construct
  source 1..120: mol_type = other DNA
tctgcctttgtgtgggacaaagggctagggactagcagttactttgtgctaggtaccatgctaaatgctttaaatgcacactacctcatttgatataacagggactcatttattcattca

SEQ ID NO: 2959 - DNA, 120 bp, synthetic construct
  source 1..120: mol_type = other DNA
agagaatagggagaatagatgggcacaccctttaacttaatatcgaccagtaaagcctgcagttgcttatttgaacctcacattgaggctgacatgtaagttgagcaaatcttaactcaa

SEQ ID NO: 2960 - DNA, 120 bp, synthetic construct
  source 1..120: mol_type = other DNA
cctctttccactaccctatgctacccaaataggaagcgtaaaagagaagtaggagagaaaaagttagaaacctggagagaacttaggtatttggtaaacaggaaaaagaaagtggaaaga

SEQ ID NO: 2961 - DNA, 120 bp, synthetic construct
  source 1..120: mol_type = other DNA
ttctgagactctttcatgtatggattttgaaaagttagttaactgttcagacgacattgtttctttgacttttacaatccgcttccctctcactgacagttcagttttggaagaccctgt

SEQ ID NO: 2962 - DNA, 120 bp, synthetic construct
  source 1..120: mol_type = other DNA
ttcatatttcctgctttggtaggaagtcatctcaagacttgagtgtataggcatgaggaagtctgctagaggacaggaagaatattgcttaaagaataagagctacagccctgatggaag

SEQ ID NO: 2963 - DNA, 120 bp, synthetic construct
  source 1..120: mol_type = other DNA
aaatgttacctatctatgttgtcatgggctgggagtgtgggaacaggaagtgtctcatgccagaagcactgtgaattttctcctttaatcattgccttcattttctttgaaccttattca

SEQ ID NO: 2964 - DNA, 120 bp, synthetic construct
  source 1..120: mol_type = other DNA
gtggtgccagactgcatcatttttaaagacagccttttctcttccaactcttttgccactgttctcttttttgcttctttgccaaatttggaccgagctttgaaaacttcatataaactt

SEQ ID NO: 2965 - DNA, 120 bp, synthetic construct
  source 1..120: mol_type = other DNA
ccagggcaggagtaaccagttggttgatacttagtcaggggttgtgtttcgtaatctgctagttgtacttgatgtttaggcatttgaaatttaaccttgtgccttatttgtgctgaattt

SEQ ID NO: 2966 - DNA, 120 bp, synthetic construct
  source 1..120: mol_type = other DNA
gaaagatgccagaaactgcaagcataaggcctttttttcccctaaaaaactgtaattcatttggttttgaaagacttaccagagtttaaaagctccattttgtggcttcccaaggtgctg

SEQ ID NO: 2967 - DNA, 120 bp, synthetic construct
  source 1..120: mol_type = other DNA
gagatgattggagaactgggagaagaaaattacttgctgtagttgattatggcagaaactgacagggcaagagattacagttgggattttttgcaaagaggagctttcaagtttgtgaca

SEQ ID NO: 2968 - DNA, 120 bp, synthetic construct
  source 1..120: mol_type = other DNA
tgaaacggcattcttcgtgtggctgataatttagcccaccagacccctatgaaagggaatattgcttctctcttagctttttccacattttagtattctctttaaagccaacatttctcc

SEQ ID NO: 2969 - DNA, 120 bp, synthetic construct
  source 1..120: mol_type = other DNA
aaaatgataaaccctaacaaaaaggccctcaagtggcacgagtgcagggcctgaaagcgttacgtgccatcagttatccaaaaagaacattttttaaccagaaaataaacatgagactca

SEQ ID NO: 2970 - DNA, 120 bp, synthetic construct
  source 1..120: mol_type = other DNA
ccaagcactctcttagggtttttaaatgaatcaatgcacttaatccttagatcaatctgctaagacgagttctgtttattatcccctttgcaaagcacaaggaagttcagtcacttgccc

SEQ ID NO: 2971 - DNA, 120 bp, synthetic construct
  source 1..120: mol_type = other DNA
cttgtttttaaagaagtagaaacccaaattaggaagactgagcaaacctcatgcatttggggaagggcttgttggaaagtggaacctgatgtaggtagcaacatgttgaggttagattta

SEQ ID NO: 2972 - DNA, 120 bp, synthetic construct
  source 1..120: mol_type = other DNA
aagatgacttgcagtttcctgtagaaagcatgacttttaaaaaaagacttatttccttctctcctgcatctaactctcacttgctctttaaagccttctctgacctaggtcttgcctgtt

SEQ ID NO: 2973 - DNA, 120 bp, synthetic construct
  source 1..120: mol_type = other DNA
agtgaagtctgcctgtaggaattaaaacttttggtgaattaaaaagctttttgtcctattgtcagactgggaaatggatgtgcccattactcagccttaaaaacgaggaaggagatcatc

SEQ ID NO: 2974 - DNA, 120 bp, synthetic construct
  source 1..120: mol_type = other DNA
gacggatgcttctgcaattgagtggtctcatttttcccatgtctgtcgaaagattactctttcatgaccaccatttctatgatgcatctcatatgatcctaatgcactcgagtttgtatt

SEQ ID NO: 2975 - DNA, 120 bp, synthetic construct
  source 1..120: mol_type = other DNA
catgggtttgtaaaggaagctttaaaattatttaggaattcagtcctcatcagctgtcttagtgtcatccccacgttttggaacctgagagtggagagtgcagagaaaaggttttattaa

SEQ ID NO: 2976 - DNA, 120 bp, synthetic construct
  source 1..120: mol_type = other DNA
agtgttcgaattgtgttcacatatgtacacagtaatctaaataatcacatgggaatccctgctggttgtaagttcaatggtaattcccaatgatcatgagcatctaagtgccactggggg

SEQ ID NO: 2977 - DNA, 120 bp, synthetic construct
  source 1..120: mol_type = other DNA
ggacagtgtccaagactgctgagtgatacatttctagtttttaactattctgtggccctgagaacatttatgccttaatcctagctctgctcacttcttggggctattgattaatttgtt

SEQ ID NO: 2978 - DNA, 120 bp, synthetic construct
  source 1..120: mol_type = other DNA
gcccctttggttctgtaatggaaaaaaggcttcagaacagaactatacttgagtgatgaaaattggtgtcagatgaaattgtgaaggtgtgatggtgaagaatggatacaagtagctacc

SEQ ID NO: 2979 - DNA, 120 bp, synthetic construct
  source 1..120: mol_type = other DNA
aggtttcagtaatgtaaaagatggcagtaggggcattaattacatgatttcccagagatagttgggtagtctgtcacatagccctcctgtaattaatttcagcctcagtatattgtggtc

SEQ ID NO: 2980 - DNA, 120 bp, synthetic construct
  source 1..120: mol_type = other DNA
atttcagtgtccccctgccacgtcatgcagttgtcttgcttctgtgtctggaacatcccaagttgcaccattctaagaaaattaagtgcaatgaaatatgttaattcaacattatggctt

SEQ ID NO: 2981 - DNA, 120 bp, synthetic construct
  source 1..120: mol_type = other DNA
tttaaaccataaactcaaccatgtggtacaacctttctattagccaggaaaaatgaatttatggtctccaattttagccaaacatggcctttaggtcagaaaggcccaggtcctcactcc

SEQ ID NO: 2982 - DNA, 120 bp, synthetic construct
  source 1..120: mol_type = other DNA
tcagagagcacagggttgggggtaaggtcacagatcaacaggatcccaaggcagaagaatttttcttagtacagaacaaaatgaaaagtctcccgtgtctacttctttctacacagacac

SEQ ID NO: 2983 - DNA, 120 bp, synthetic construct
  source 1..120: mol_type = other DNA
gaggtggaggttgtagcgagccgagatcacgccactgcactccagcctgggcaccattgagcactgagtgaacgagactccgtctgcaatcccggcacctcgggaggccgaggctggcgg

SEQ ID NO: 2984 - DNA, 120 bp, synthetic construct
  source 1..120: mol_type = other DNA
cttttatgctttgatcaagaatattagtaagaggaaaaatgtgtcctttcaatcagtatcaccccgacagtgatgaagcagtcattggcactttgattaaatccgagcacttcctggcct

SEQ ID NO: 2985 - DNA, 120 bp, synthetic construct
  source 1..120: mol_type = other DNA
ctagcttgagggaggtctttgggtagcaaccactgcctttcactaaaggctagtttcatttatatgatcacatttgtctaagttcttcagtaagtcatactggttccttccattatattc

SEQ ID NO: 2986 - DNA, 120 bp, synthetic construct
  source 1..120: mol_type = other DNA
tgtgatagttgccctggtgagagaatattaggttcacacttcaggtggttggttggatgggggctgactgatttaaaaatatccaggagataaaaagttgattagatggtgctatactct

SEQ ID NO: 2987 - DNA, 120 bp, synthetic construct
  source 1..120: mol_type = other DNA
aacaacaataaggcaacatttcaaacccataagattggcagggattactagattgggtaactgcattgttggtgctcatttacctgccaaagggattgtgaaattggcataacctctgta

SEQ ID NO: 2988 - DNA, 120 bp, synthetic construct
  source 1..120: mol_type = other DNA
acccctttctccagaaaaaggcaaaaacaaaacaaaacaaaacaaaacaaaagacaaaaaatatataaaagccagctgtggtggcatatgcctgtaatcccagctactcaggaggctgag

SEQ ID NO: 2989 - DNA, 120 bp, synthetic construct
  source 1..120: mol_type = other DNA
tttgcatttccttgattgctattgggactgaacgtcttttcataaacttactgtccatttgtatttctttgttctgtgaatcaaccgtttatgacttgcctactactgtattgtttgttt

SEQ ID NO: 2990 - DNA, 120 bp, synthetic construct
  source 1..120: mol_type = other DNA
cataaaacgatgaggagcagccatctccatccctggagtggtatgactttcttttgtattcaccagctaccacaacttcaggatttttttcttcccttgttgtttaaagagacatttaag

SEQ ID NO: 2991 - DNA, 120 bp, synthetic construct
  source 1..120: mol_type = other DNA
acagctgccttgcagggagtactgttaaagcttagtacagttacgacttactgcatcacatctctgagcctcccagaaatagagagataccaaggcctttcatttataatttctaagtta

SEQ ID NO: 2992 - DNA, 120 bp, synthetic construct
  source 1..120: mol_type = other DNA
gtgtctgtagttttaggccgcttcatttggagaacacaccagaagtcttaacttgaggctctttgagaatgagagaacataacgaaataatgagatttggtggtatatagaaacagcagc

SEQ ID NO: 2993 - DNA, 120 bp, synthetic construct
  source 1..120: mol_type = other DNA
gatataatcagctttgtattttcattcaaggataacaaactagcaaggttgaaatcttgacttgtcatcggaattgaattgctccctggagctgggagggaatgagattggtccagctct

SEQ ID NO: 2994 - DNA, 120 bp, synthetic construct
  source 1..120: mol_type = other DNA
atgcagctttctgagttgctcctccaatagaatggtgccttatttacacgccctctctctgtgtgactatctccctgggtgtagctttttaaaaatagctttactgttttgtaaaaatga

SEQ ID NO: 2995 - DNA, 120 bp, synthetic construct
  source 1..120: mol_type = other DNA
ccagccaatatattctttaaaacaagagttgttgggacaaaggatgtgagcattttgcattttgccaggtaccaccaaattgttctccaaaaaggctgtacctgtttatacatgcctgtc

SEQ ID NO: 2996 - DNA, 120 bp, synthetic construct
  source 1..120: mol_type = other DNA
caacacttggcgttctctcaggctgggtttttaaaaattcattgagagcatttggagattggagagagaaggaagaggacaaggtcatagggagacttgagttaaaatatttcagtatga

SEQ ID NO: 2997 - DNA, 120 bp, synthetic construct
  source 1..120: mol_type = other DNA
tctatttttggacttcaattagatcataggtaattaagtgtcacttgagccttgggggacttggacctggttctgctctcagcagaaacctgtttgaatgctctgagtgtaagatttgat

SEQ ID NO: 2998 - DNA, 120 bp, synthetic construct
  source 1..120: mol_type = other DNA
gccttccaagtagctggggagtatcactgtgcctggctgaaaaggtttcttattagggaatatttctacatcagtcagactaatggatactgttttttgtgtgtgtttcctatattgagc

SEQ ID NO: 2999 - DNA, 120 bp, synthetic construct
  source 1..120: mol_type = other DNA
tctgactgctggccaggaccgctgtcaggggcagagcataagtacggcttttagacaactttgttgatgaatagaattctttttgatatgtatttcccatcatgcaattattaaaaattt

SEQ ID NO: 3000 - DNA, 120 bp, synthetic construct
  source 1..120: mol_type = other DNA
agggcatctccttgttattcatagagtcctttaattcccaggctttgagggtgtggttgttgattttcgaagtctttacagaacagtattggcatcaataaccccactatgactaatagg

SEQ ID NO: 3001 - DNA, 120 bp, synthetic construct
  source 1..120: mol_type = other DNA
gagcatctgctttgtgttagatttcatgggggaaacaaagatgtagaaaatccagtcttagcattcaaggaagtcaagtaactactcacctgctataataaataagtgccgtggaagaga

SEQ ID NO: 3002 - DNA, 120 bp, synthetic construct
  source 1..120: mol_type = other DNA
acataaaagaagtagtcttggtagttatgcatgacagccatgctgtcaaaacagaaatgttagtttattttaaatgatccattgattctttgtgtacgccctggcatggtgcagagcctg

SEQ ID NO: 3003 - DNA, 120 bp, synthetic construct
  source 1..120: mol_type = other DNA
cagcttcactctctcttgcttatggtggatctactctgaacctccacatatttgtgatttgtaccacccagtgaagcactaatatttgatgtgatttcttgagtaattggctgttgttag

SEQ ID NO: 3004 - DNA, 120 bp, synthetic construct
  source 1..120: mol_type = other DNA
agtatttcatacatataaaaggataagtgtaacatatgaattataaagaataacaaaagtgaatagctgtgtacccacaaccccactttaagaaatagcacagtcctggccgggtgcggt

SEQ ID NO: 3005 - DNA, 120 bp, synthetic construct
  source 1..120: mol_type = other DNA
actgcacccagccacttctatactgttttaacaggctgttatgaaaacttttgtatctgcctcctggtgcacataggcaatagtttctttggagtcttgagtatactgggctaggtgggg

SEQ ID NO: 3006 - DNA, 120 bp, synthetic construct
  source 1..120: mol_type = other DNA
atatacacaggagtagaagtacagggcttggtatatgtttaaatttcaaaattatgacacattgttttctaaagaaggtgaatcgatttttacagacccaacagtagtgggtgaagtttg

SEQ ID NO: 3007 - DNA, 120 bp, synthetic construct
  source 1..120: mol_type = other DNA
agtaaatttgtggatattaacctttttgtctgcttctgtggccacagattctccagctatgtatcgggaaccatgatctatttatgaggagaaggaaagccgattctttggaagttcagc

SEQ ID NO: 3008 - DNA, 120 bp, synthetic construct
  source 1..120: mol_type = other DNA
aataagtaaataaataagaaggaggaggagagctttctttgacctttttcttagcagagcaaagcttagaagtaagaaatctgaaagtgtcagggaatatgcagtctgtgggccctggca

SEQ ID NO: 3009 - DNA, 120 bp, synthetic construct
  source 1..120: mol_type = other DNA
aagtaattaaatgtgctttaattatttaaggcagaaaatagtgcagtggtcacttctgggttctgctttttgaactcagttagtaccctgggatcacagaggaatggcactgtcttgtgc

SEQ ID NO: 3010 - DNA, 120 bp, synthetic construct
  source 1..120: mol_type = other DNA
cccctccaccaaaaaaaaagaatgcctttttctatccgggtcaagactcaacaggtttttattgtttgttcatttgttcattcaccactagactgtttttcaagtggcacagctttcaac

SEQ ID NO: 3011 - DNA, 120 bp, synthetic construct
  source 1..120: mol_type = other DNA
tttggggctgaccatcctttgctgtaggaactagatcccagtagcagcacctcaccctccatttgtaacaatccaaaacatcttcagacattgccacatgtctctttttttttttttttt

SEQ ID NO: 3012 - DNA, 120 bp, synthetic construct
  source 1..120: mol_type = other DNA
tggttctaaccactgatttaaagggaaagaacagagtttaagttgtttttctccacgtgaagcataagcctgagctgaggtgggtactcagagaaggtgctcttgttactccccatgggt

SEQ ID NO: 3013 - DNA, 120 bp, synthetic construct
  source 1..120: mol_type = other DNA
ccaccagttttcctgctcttccagtttagatttaccaactcaaacaaaagtcctcaggaatgttgtccttgcttggaagttctgatttcatgtaaatatccctgtctcactgtccttttt

SEQ ID NO: 3014 - DNA, 120 bp, synthetic construct
  source 1..120: mol_type = other DNA
ttaatgctgagctgaatgtaatcttcaactatcagtatataccatatatcataattatagttctgggaagggattggctgtacacctcagagtgaattactgccgtgcaagaacgagcag

SEQ ID NO: 3015 - DNA, 120 bp, synthetic construct
  source 1..120: mol_type = other DNA
gtgcccagcctatatgtgttgtttttaaaatatacactggagcaaagcttatacactgctgtaactgctctttcctcttagcagtcaatcctgaaggagatcatccatatcagcttttta

SEQ ID NO: 3016 - DNA, 120 bp, synthetic construct
  source 1..120: mol_type = other DNA
taataaacaatactgtctgtgacttagtagggcaaatagtaggagaagccgggaagctagattggggtcctctttagatgaccctttgtgctgggatgaaagtccaaaaaaaaaaaaaac

SEQ ID NO: 3017 - DNA, 120 bp, synthetic construct
  source 1..120: mol_type = other DNA
gcagcagcctgtcattactcctgcaaaggtttgctctgctcttacaccctggaggaagaatttccttaatcagaaattaaggacaacagatcagcattcattctgaacgaataaaaataa

SEQ ID NO: 3018 - DNA, 120 bp, synthetic construct
  source 1..120: mol_type = other DNA
acaaacatcaaaatgacatcaaaggtaggttttcatgttcccattttataagtgagaactcagatttagagagtttagtgaactccaccagcatcccacagctgatgcagaggggttgaa

SEQ ID NO: 3019 - DNA, 120 bp, synthetic construct
  source 1..120: mol_type = other DNA
ctatactaaccatggcaatccctatggagtgtttttggtatttgtattgcatggtttttctggccatgccttgtagttggacactttgtgggtggtttccagattttcaccatcatagat

SEQ ID NO: 3020 - DNA, 120 bp, synthetic construct
  source 1..120: mol_type = other DNA
aggaagcttgtttcacgtatgttttttttttgtacagaacgaaaagctgtccatgagagctggtatttgtagagccccctatgagaatttaccaagggcttttctactctttctttttct

SEQ ID NO: 3021 - DNA, 120 bp, synthetic construct
  source 1..120: mol_type = other DNA
cagaagggtcctctcataccaaataatgctctgctcttaactgatagcccaggaccaggttaacacctataaaataggtgttattaagataagactgtccattgagtttaggtgatactg

SEQ ID NO: 3022 - DNA, 120 bp, synthetic construct
  source 1..120: mol_type = other DNA
aggcctatccaagcattttgcagatggcacttatggcattgttgatatcacagggtatgtttttgtttttcttcattttattttgctggtttagcctcaagcccaaggcagaagacctat

SEQ ID NO: 3023 - DNA, 120 bp, synthetic construct
  source 1..120: mol_type = other DNA
ctgatagatcttattaaaaggtacacttgagctgtcagtggttccaagaatccatgacatgaaccctgttttgtatgcgacactttcatttagcgggctcctgtttcttcagctttcata

SEQ ID NO: 3024 - DNA, 120 bp, synthetic construct
  source 1..120: mol_type = other DNA
tctagaatgcctggggatgagatgcaaaagctgatagtgaatggaacagtttccaatgtccaaaagcttgctaatctgggatcaaaccagcctgtgttgatgttagttttgctttgtttt

SEQ ID NO: 3025 - DNA, 120 bp, synthetic construct
  source 1..120: mol_type = other DNA
tataaaaaaggatgaattcttactctctcttgaggcacagtgtcctcacctgcaaaaggtggataaaaatagtctttgcccccaggagtgttgtgaggaataaatgagagaatgtgtgtg

SEQ ID NO: 3026 - DNA, 120 bp, synthetic construct
  source 1..120: mol_type = other DNA
aacaaagtcatcacttttgtgcctgtggtctcccaaggagcacaggatttccaaggaaattgacggatgagaaatcatgggggtggtggagcttagaaagcttatttcattagtaaatgg

SEQ ID NO: 3027 - DNA, 120 bp, synthetic construct
  source 1..120: mol_type = other DNA
cttagttttcttgcttgtttctggtagctctagatagaagactgtatcggcctcttctaaaagtcaacaagccaatcctgtttttggttaagagactttacctggtcaagcagttgttct

SEQ ID NO: 3028 - DNA, 120 bp, synthetic construct
  source 1..120: mol_type = other DNA
caatatgtagtagtggagaggaagtgtaacatgattttagggctcacatttcaattccactgcatttttatgggacaagcagagacccagcgcctggagttattaggttagtatctaaaa

SEQ ID NO: 3029 - DNA, 120 bp, synthetic construct
  source 1..120: mol_type = other DNA
accaggttcttttagccagcctcttctgtctttttaagtagacagatgtgtctcctgaatctgaacttgtttagattgggtggatgtgtctgtttttgtcacaccacacacaatttgggg

SEQ ID NO: 3030 - DNA, 120 bp, synthetic construct
  source 1..120: mol_type = other DNA
accttgtctagattcagtgaaagttttgaaggacagtgcatgacagacgtcactggtcaggttcaccagagcttggctcacttgtcttcagaaggattcaaaggcagttgaccagacttg

SEQ ID NO: 3031 - DNA, 120 bp, synthetic construct
  source 1..120: mol_type = other DNA
ctgtggctctctctcctgcccagtggctgtggtgccttcctacttctgtgtgggcagactgatttccctctctacctttacttgtggctgaggcgaagctcctgctcttgcaagataaga

SEQ ID NO: 3032 - DNA, 120 bp, synthetic construct
  source 1..120: mol_type = other DNA
ctcaaagtggctgttcttttcagaaacctgagcggagatactgggctcacatgctttcatttaaaccctctctcatttttgccccagtagttatctggcagctaaatctcttcctccttt

SEQ ID NO: 3033 - DNA, 120 bp, synthetic construct
  source 1..120: mol_type = other DNA
gccacagacagcacaccacagaggtggctcagggaccttggtagatgggaatgtgagaatctattaaaataggcagggatctccggtcctctgtcaagaggcaatgctgacggctttttc

SEQ ID NO: 3034 - DNA, 120 bp, synthetic construct
  source 1..120: mol_type = other DNA
cttatgtgcaattgccttgaactacgaccctgtagagatttctctcatggcgttctagttctctgacctgagtctttgttttaagaagtatttgtcttcctttgtctaatgtgggattcc

SEQ ID NO: 3035 - DNA, 120 bp, synthetic construct
  source 1..120: mol_type = other DNA
gccctttcttttctccatggctgatgctgctgtggccagccagggcccttgagatccttccagtttggctgttatgcaaagcaggtgatttgtcttaatcagataaaagatagaggctat

SEQ ID NO: 3036 - DNA, 120 bp, synthetic construct
  source 1..120: mol_type = other DNA
gagttactttcctcctgacctgtaaatttgttctttaacaatggctgcaggtgggagcatatggtggtttataaaaacgctgtcgggctttgtttccttctttagctgccgtgtctactt

SEQ ID NO: 3037 - DNA, 120 bp, synthetic construct
  source 1..120: mol_type = other DNA
acataacacttcatgagtggctgtgtcttgtaattttggggacaggtttctctctttccctctcttttttttgtcaaaagcccagagactgacaaccagctgcagtgtctaagtgttcct

SEQ ID NO: 3038 - DNA, 120 bp, synthetic construct
  source 1..120: mol_type = other DNA
aggtataacagactaaacgttcttgacatctttcgtttgtgtacattctaaacgagcaagtggctgaaggaaattaggggaagtaatttacacagggccttcagcttatatttgggcttg

SEQ ID NO: 3039 - DNA, 120 bp, synthetic construct
  source 1..120: mol_type = other DNA
agtataaggtaaaaaaagcccagaatgactgtggggtttaccaattagtgccagagttagatcagataacaacctggagaaaagtttaaagaactaggttcaaggcctagcaccaccctt

SEQ ID NO: 3040 - DNA, 120 bp, synthetic construct
  source 1..120: mol_type = other DNA
ggcccttgttatgtaacataccacgtgagtttactactccagaataataggaaatatgtggttagaatttgatggtgccacaaaataggaatcgcagttttgaagtgagcggtcatatcg

SEQ ID NO: 3041 - DNA, 120 bp, synthetic construct
  source 1..120: mol_type = other DNA
cacttcacttcagaaaaccatacaagagatgggaccaaaagttgaatggggtcatgatgttttccttggccaacagtggaatttgtttcctagtttatttttagtaattgagtaacgtaa

SEQ ID NO: 3042 - DNA, 120 bp, synthetic construct
  source 1..120: mol_type = other DNA
caaacttcatgagtgtgggggaagacatagacaaagagaatcgctaatttcgttcactttattaaattttcaggtgaagaattgaggctcgagatggcaaataaccttcccaaggccatt

SEQ ID NO: 3043 - DNA, 120 bp, synthetic construct
  source 1..120: mol_type = other DNA
gtgtaccaaggagatttcttgtttactctgatttacttcttgtacactttggtacaagaaaagcaagcattttacaggagactcgaataatgcatttggccctggttctggtgcttgtga

SEQ ID NO: 3044 - DNA, 120 bp, synthetic construct
  source 1..120: mol_type = other DNA
gatatatagcatctacctctctaccgcttttgtccccaagaaccctgacaacttattctgtccaaaaggagtttgtggcaagaaagaaccaaagtatcagtgtagtccactattactgta

SEQ ID NO: 3045 - DNA, 120 bp, synthetic construct
  source 1..120: mol_type = other DNA
aaagtgcactgttttctctcctccgtgcctggcctatgtcttttcttatcatcagaacttggtcaggatgttgaaaatccatcatgacaaatctttcaatattcatcccagaaatctgct

SEQ ID NO: 3046 - DNA, 120 bp, synthetic construct
  source 1..120: mol_type = other DNA
tacagacagcaaagagtatatagctgtgctgcctccttttctcccagtgataaacccatgggcattttacaaaaatggataatgacagtgcagtacatgaaagtgcagcagagaaataaa

SEQ ID NO: 3047 - DNA, 120 bp, synthetic construct
  source 1..120: mol_type = other DNA
actagatctcatgttaagtgatcttactgcaaaaccaaacagcaaacaaaaacacaaaggggcacaaggaaactctggggtgggggaaggttatctgctaacatttattggagatgtgat

SEQ ID NO: 3048 - DNA, 120 bp, synthetic construct
  source 1..120: mol_type = other DNA
ttctcttaaataaagcctgtagccttgtgagcattcagaagtaagaggatacaacaaaatcccgcagaggctgagaataggggatgatattgaatcctttaagtatagcagtttggagac

SEQ ID NO: 3049 - DNA, 120 bp, synthetic construct
  source 1..120: mol_type = other DNA
atcaaattgctgactatgatggagatattgggcacagttgtgtaagcattttactaggatttcagtagaaggaagaaaatgaagggctgtctagaaactgctttagccagcaaaatgtct

SEQ ID NO: 3050 - DNA, 120 bp, synthetic construct
  source 1..120: mol_type = other DNA
gaaacaacaaattgagtgaatttgtgcttttcccacctataagcttatcaccattgcaaaaagacctccataaatcccaacagatgattaactcttcatcccaagtagcacaggctctct

SEQ ID NO: 3051 - DNA, 120 bp, synthetic construct
  source 1..120: mol_type = other DNA
aaatagcacattggcccctctttccccatagaggaggccagctttaatcaggcataagctggaagggaaaaggtgttaacctgcagcaaatttcttaaggtttttttaaaatcactatta

SEQ ID NO: 3052 - DNA, 120 bp, synthetic construct
  source 1..120: mol_type = other DNA
caaatttcaacgcattaacactttgcagagacacatgaggttatatgtgatttgctgtgctttatcaagaataagaagataaagcatttgctgtgctttatcaagaggccgaggcaggcg

SEQ ID NO: 3053 - DNA, 120 bp, synthetic construct
  source 1..120: mol_type = other DNA
gtgctgggatcacaggagtgagccaccgtgcccggccaagattttatttttataccccttttcttttctctgtgtattttctatcaagtcaaaaatgaaggccaggcgcagtggctcatg

SEQ ID NO: 3054 - DNA, 120 bp, synthetic construct
  source 1..120: mol_type = other DNA
aaagtctttgtattcccatgaggatgcatgatgaatgtgtagctaaaacactagggcttcatcattgatctaagtgaaagttgtagtgccccatgttgtaacagagtagcattttcccag

SEQ ID NO: 3055 - DNA, 120 bp, synthetic construct
  source 1..120: mol_type = other DNA
ggggatttgtctgcctctagcaaccacaaagaaaaaatcatttttactgggagcagcaatgcaagcctgtgaatgagatttccagttctcataaaagctgcaagcagaaaaattagcttc

SEQ ID NO: 3056 - DNA, 120 bp, synthetic construct
  source 1..120: mol_type = other DNA
ccaggaaataaagcaggaggaaaaactggctctgactatccatggactcttccaaattgtgcctggaattctaggctgttaaggatattttttttcctcaagctattatctctgcagttt

SEQ ID NO: 3057 - DNA, 120 bp, synthetic construct
  source 1..120: mol_type = other DNA
aaagctggctgctgtaagagatcatgttgatatctgacagatggtagggaaaaaatgaataaaccagtcagcaattctcaaattctgctccctttcaacactagtattccatgagttggg

SEQ ID NO: 3058 - DNA, 120 bp, synthetic construct
  source 1..120: mol_type = other DNA
acagtccttggcaattctgttccaagcctgagtttcagagctacgttcacattcctacttatctcaggagacagaatcaaattctccacccaactctgaccatagtaattgtttatgtaa

SEQ ID NO: 3059 - DNA, 120 bp, synthetic construct
  source 1..120: mol_type = other DNA
gccaagcacagagaggttaataactgccttagttctaccagcaaaggtactcggatcccttatatttccaaggaatgaattctatttatactctttttaccaaagcaggcagggatctat

SEQ ID NO: 3060 - DNA, 120 bp, synthetic construct
  source 1..120: mol_type = other DNA
taaataagtggatgatacagtatgttggaagatgataagtactctcagcaaggagaagaatgtgtctggaactgagggaaaaacaagtgcaccaatattgggactttggctttttgggga

SEQ ID NO: 3061 - DNA, 120 bp, synthetic construct
  source 1..120: mol_type = other DNA
tagatgcaaaggcaaacaggtgtgatgtcctagacactgtgtgaagaaagcttatcaagtagaaaatgaagatcaactttgttgaatactgctaagtgaaggaagagggctcagaaatgg

SEQ ID NO: 3062 - DNA, 120 bp, synthetic construct
  source 1..120: mol_type = other DNA
cattagacttaatctgcactgtagaccaagtggacataatagatatttacagaacatttcacccaacaggtgcagagtacacattcttttccttagcacatggaacattatcaaggatac

SEQ ID NO: 3063 - DNA, 120 bp, synthetic construct
  source 1..120: mol_type = other DNA
ctatctcgtatgttttctatggttcacctatccatcttcctcaggtctttactcaaaagtcccacaatcattgtggcttccttgaccatactacttaaaattgcaacttgggtcctgtaa

SEQ ID NO: 3064 - DNA, 120 bp, synthetic construct
  source 1..120: mol_type = other DNA
catagcaagtaggactgtttgggcatttcatattctttgatcctacctggcacctagcacataagatttgcaagggatcttacaactctaggcaaactgtcttctttttcagatgaagaa

SEQ ID NO: 3065 - DNA, 120 bp, synthetic construct
  source 1..120: mol_type = other DNA
tttgagtcaaattctcctttgtggatctgaaactcctcattccccaattcaccgtgcaattaatgatttcttccctgtttatgggaaacagatgggattagcaaattgtgactgttgctt

SEQ ID NO: 3066 - DNA, 120 bp, synthetic construct
  source 1..120: mol_type = other DNA
atgcctcgttattgccaggtcttgaataagagggtggagaaatgggcacacatgtgaaggagagttaattacttgagcacaaaattttatctacttccctcaattcctcattttgctttg

SEQ ID NO: 3067 - DNA, 120 bp, synthetic construct
  source 1..120: mol_type = other DNA
gtcaatatgctaacatagtgcagatgttcctgattggtaaaagggaagaacaggttattaatttatgtgggttattcagggacactggctgagagtgattctaccatcttcaacatgtga

SEQ ID NO: 3068 - DNA, 120 bp, synthetic construct
  source 1..120: mol_type = other DNA
ggtataaacgtgctcttttctgggcttgctctccacacaattctcactgcaagtccttagttagaggagctctacatagatgctgagcaaaacagtctgcttacagttttttttttttgt

SEQ ID NO: 3069 - DNA, 120 bp, synthetic construct
  source 1..120: mol_type = other DNA
aagcacaatcaatgaagggaaaaggcagaagcaggaaaatgaaaggagtttctgctttgtggagaaaatgacagattaggcactgaacatattgcattaaagtttgaacctctgagtgca

SEQ ID NO: 3070 - DNA, 120 bp, synthetic construct
  source 1..120: mol_type = other DNA
aagtttaacattttaaggtgcaaagggattggaggatgattaaatgacattgctggccctttcaaatcaaaagaatcatgcatgcctgacactgattgacggtgttgcttcttcattgct

SEQ ID NO: 3071 - DNA, 120 bp, synthetic construct
  source 1..120: mol_type = other DNA
gatgtgttcaggaacagaagggaagccattaatgttctaaaatcttcaaacaaatacattttgaacctgatttttttttaaaaaagcaccttacagattggtcctcagtctcacccacca

SEQ ID NO: 3072 - DNA, 120 bp, synthetic construct
  source 1..120: mol_type = other DNA
gaagaattccaattttccacatccttgtcaacacttgttatcttttgtcattttgataatagtcatcctaacaggtgtgaagtgatattgcactgtggttttaatttgcatttccctaat

SEQ ID NO: 3073 - DNA, 120 bp, synthetic construct
  source 1..120: mol_type = other DNA
cagccacctcaaggcgctatgttagcttttttctgcataatcaggctctcatctctcttctgaattttgctcaatttcttttacctagatgtactgtaactggtaagggagtgtatgtta

SEQ ID NO: 3074 - DNA, 120 bp, synthetic construct
  source 1..120: mol_type = other DNA
cttttcatgcctaatgctcagcgtactactgaaaagtgcataatagcttcccagtcatttgtcttctaatatagtacttagtaatgcagcttcaggaaccacgtgtatgaaaggctccat

SEQ ID NO: 3075 - DNA, 120 bp, synthetic construct
  source 1..120: mol_type = other DNA
agtaatgttggttgaatcaagttatgatctaacccaatctcaagacaagcactgactcaattttggctatctctgtggttttcctaaacaggttacactgacccactgaacttccattag

SEQ ID NO: 3076 - DNA, 120 bp, synthetic construct
  source 1..120: mol_type = other DNA
aagcaacaacagaaactaagggttggaaaggatttatttatagcaaccatccttttcatggagagagtgaccatcactctctcaaaatggtcattgagccctgcataaatcatcccatca

SEQ ID NO: 3077 - DNA, 120 bp, synthetic construct
  source 1..120: mol_type = other DNA
gccattaaacttccagggcaagctggtatatgtgggaaactttaaatttgagtaatttggattttgcaaaagtctttttgctaccattgttggctaatgccaaagattgtctgcagagct

SEQ ID NO: 3078 - DNA, 120 bp, synthetic construct
  source 1..120: mol_type = other DNA
ttgcccacaggtgctttaacctccaaggggctttttgtgcctacagggatattccgcactctttgtcctttgtttacagtccaatttcataaccttatgaatttgtcaaacatttagcat

SEQ ID NO: 3079 - DNA, 120 bp, synthetic construct
  source 1..120: mol_type = other DNA
aagtcagggatacaggttaagtggattactggccacttaattttggttggttagtgggaacgggttgctaaattcaaggtgacttaaactcaagttgctggccactagacaataattttt

SEQ ID NO: 3080 - DNA, 120 bp, synthetic construct
  source 1..120: mol_type = other DNA
ttttgaaaaaggaaagtagtttctgggggggggcagggcagaggtaagaagtaattggtacgtgaaggaagtgaggaagtgttagggaccattatggaaatgtattctttttttgttttt

SEQ ID NO: 3081 - DNA, 120 bp, synthetic construct
  source 1..120: mol_type = other DNA
ttcaaatgcttttgaaatggccatgatcaaaattacactccgtcattgtcccctgaacgtttaggcaggccagaggatgagagagagcagccgtatttttatcttttaaattgattctgt

SEQ ID NO: 3082 - DNA, 120 bp, synthetic construct
  source 1..120: mol_type = other DNA
gccaaccgctggactccttttctagttcacttatatatgagaccacaaatgctgctgaggcctgtttattcatggtacagtttctactatttctaggactgtttggcttacaaattatgt

SEQ ID NO: 3083 - DNA, 120 bp, synthetic construct
  source 1..120: mol_type = other DNA
agccaaccaggcatactcccatgaaattacaccacagaggttccagggataccagcttgacattataaacagaaaaattaaatgcatgcttatcttttgactgctttgcttcaggagttt

SEQ ID NO: 3084 - DNA, 120 bp, synthetic construct
  source 1..120: mol_type = other DNA
taatctattagtattagttcttcacttagttccgatacacacccaagtctgggaaccattgtcttagggcatcaaataagtaagggtagttgcttctctaacgagaagggccttaacaga

SEQ ID NO: 3085 - DNA, 120 bp, synthetic construct
  source 1..120: mol_type = other DNA
ctcatgctataaaatatagcgcgcttagatagttcaaagcagtggtttacaaatctctatccccactgaccctggtgtggagaagcttccatcagaagtggtagaataagaaaaataagg

SEQ ID NO: 3086 - DNA, 120 bp, synthetic construct
  source 1..120: mol_type = other DNA
cttccatggctgccacactgggacttgcaattccacagtgaaaatgtatcttttttctgttggatgatgtgaaagaaaattagccatatggcaggtcattaatgtttctccgtatatctt

SEQ ID NO: 3087 - DNA, 120 bp, synthetic construct
  source 1..120: mol_type = other DNA
tggggctcaaatttagccattctagtcctcccaaattaggaacttgaataactttgaaagattcctcttgtttggtttgccacagccaatctacattatattgcccctggaaatcctaac

SEQ ID NO: 3088 - DNA, 120 bp, synthetic construct
  source 1..120: mol_type = other DNA
aacagtattattgagcatctttgtcaacttcgtataatgggaacatgctctgagccactatgctacactgttccaggtattctgtatttcccctttctcataccaaagaatttcagctcc

SEQ ID NO: 3089 - DNA, 120 bp, synthetic construct
  source 1..120: mol_type = other DNA
ttccatttaagtatagcacaggtgaggccacagaatttaggttacgttaccagccctactattaaatagctatctggcctcttgagagtccaatttcccatctctacaataagagatagt

SEQ ID NO: 3090 - DNA, 120 bp, synthetic construct
  source 1..120: mol_type = other DNA
ttttatttatatatattctttcacatggaaaaataaatgttccagcaccattactaaatatcaaccttaggccaggcacaccaccacaggcacaccaccgtggggatttgtgtacaggtg

SEQ ID NO: 3091 - DNA, 120 bp, synthetic construct
  source 1..120: mol_type = other DNA
ttattcagcgtgaactgaaataagggtcagatccgatatgtgcttaaagcggcttttattcactttatgggaagggtgagtacactctctatacaaagctagtttgaagaaaggctctgt

SEQ ID NO: 3092 - DNA, 120 bp, synthetic construct
  source 1..120: mol_type = other DNA
tagaagaagaaactatggtagacaatcatgtgcaaataaacacaatttcacaaataaacctagacatgcctgtcacaggttgggtttcttgggaagcagactcagagtttagtgtgcagg

SEQ ID NO: 3093 - DNA, 120 bp, synthetic construct
  source 1..120: mol_type = other DNA
gatgttgagaagaattaaaagagacagaagcagaggatggaggtggggagccttgatgctcttaatcagctttgacttaagaaacaagtagtaaacatcagaggcttcagagaaaacagt

SEQ ID NO: 3094 - DNA, 120 bp, synthetic construct
  source 1..120: mol_type = other DNA
ccatgaagttatttaaccagcgtgtttatgtatgctagaatggtaccaagctgttgctgacaaatgatccattggaagcagcgcatggaggcaatgtattaattacagacacttggataa

SEQ ID NO: 3095 - DNA, 120 bp, synthetic construct
  source 1..120: mol_type = other DNA
cacactttgagaagcaatgttctggaggaataccctgaaagccaaatgcacaggggttttgtcagcaaagcaacaaatctactttggtggagaaagggattaagcaagtacaattaatat

SEQ ID NO: 3096 - DNA, 120 bp, synthetic construct
  source 1..120: mol_type = other DNA
tagaaactcaaaatgtcctgaacctagagcttgggtgggaggtaaaacaaaattgtagtacaaaggcagtaattttgaggtaagaaagtatgaaggaatgtagttttgaatctgtatgtg

SEQ ID NO: 3097 - DNA, 120 bp, synthetic construct
  source 1..120: mol_type = other DNA
aagaaaacaaatatgactgccacatataatagtcaaaaagtggtcttatccccatctctttagactgctaaagttgctgcctctgactggacatttttacactgcttgcccagaaagcca

SEQ ID NO: 3098 - DNA, 120 bp, synthetic construct
  source 1..120: mol_type = other DNA
aaagtaatgtattaagagacattaagcggctcccagaatcttttgggaaaggaagtgcagtgaataattcttggacaccatatagccagggacaacacaggcagaaaaattgcccaatga

SEQ ID NO: 3099 - DNA, 120 bp, synthetic construct
  source 1..120: mol_type = other DNA
atgtcaattgccttgttatctaggccagtacttctgaagccttaatgtgcatttaaattacctagggggtcttgttaaggtgcagatttgaattctgtaggtctaagatggagcttgaga

SEQ ID NO: 3100 - DNA, 120 bp, synthetic construct
  source 1..120: mol_type = other DNA
tggagattgaaaaaaagagaatagtatgcagccaccacacagcctgtacagttcatagaagcataacattttcaagtgggatgagaccttagagactatccacgctaaattcctattcta

SEQ ID NO: 3101 - DNA, 120 bp, synthetic construct
  source 1..120: mol_type = other DNA
ctactctagggaataatttccacgcatgcaacttgatttaaaatgaggatgaaataagaaaggaaagccacaatgtcgccctccagttctgagatgcctgtaatgactgatgtaaggtat

SEQ ID NO: 3102 - DNA, 120 bp, synthetic construct
  source 1..120: mol_type = other DNA
acacaatccatagacaattaaaaacaaagcaaaaatgagaggggctcccaggaacccattaagaagtttacagtgtcttttacctggtagacattcttatgccaaagtttgccctggcta

SEQ ID NO: 3103 - DNA, 120 bp, synthetic construct
  source 1..120: mol_type = other DNA
tgaaatataagacctgcacttttgatataggctaggaacacatgtacagtgtggttgaagtgtaagaacaaggacctgagagaccacaaaactaccttttaagagtagagtcatccagat

SEQ ID NO: 3104 - DNA, 120 bp, synthetic construct
  source 1..120: mol_type = other DNA
ctagccattggaactgtgagtccattaaacctctttttctttataaatttcccagtctcgggtatgtctttatcagcagcgtgaaaaaggactaagacagagctttttccctatgttttc

SEQ ID NO: 3105 - DNA, 120 bp, synthetic construct
  source 1..120: mol_type = other DNA
caaaaataataatttttaaaaagagtagagtcagagaaaaccagggttccaacccagttctgcactatctgtcatctcaaggattgatttcctcaactataaatgataataataaaagct

SEQ ID NO: 3106 - DNA, 120 bp, synthetic construct
  source 1..120: mol_type = other DNA
acattttaactgtaaccctgcaaagctgaaacctaattcaccttctctaggtccctaagcagactgtcgctaatgtttatccatttctttctttctttgttgtgtcatcaggctgtcatg

SEQ ID NO: 3107 - DNA, 120 bp, synthetic construct
  source 1..120: mol_type = other DNA
gaagtaagtcccaaatggcaattgttccagaagtcaagattgctgctgcacagtgatctttcacgtcaccttccaggaacctgatagcatacaaagaagatataattcagattacatatc

SEQ ID NO: 3108 - DNA, 120 bp, synthetic construct
  source 1..120: mol_type = other DNA
ccctgggcaaattatttaactttatcagtacaatagggatgattttaagagcacatacttgacaggactgtggtgaggttaaatgaaacagttcctataaaaggcttagcgcagtgcctg

SEQ ID NO: 3109 - DNA, 120 bp, synthetic construct
  source 1..120: mol_type = other DNA
ggtgcccacctctccactcttgtgctctcaaacagtgcaagcttcatgtattgtattttgtgcactgaacaacagtcactagttttcccttctaatttccataaaattagaaataagtgg

SEQ ID NO: 3110 - DNA, 120 bp, synthetic construct
  source 1..120: mol_type = other DNA
gaccctgcagaagtgtcacagctagctaagtgcatagggatagagaatgtcttttagaacatgcacttatcaaataaactttgcataaggtccaaaaaaacatgtattgtaactgtgtgc

SEQ ID NO: 3111 - DNA, 120 bp, synthetic construct
  source 1..120: mol_type = other DNA
caccatgtgctgccaaaatatttaccttaggggaaaaaacagggcttgaataaacactattaaaaacctatataaccccatactagtagagatcaggatgcagggaatctggggtttgac

SEQ ID NO: 3112 - DNA, 120 bp, synthetic construct
  source 1..120: mol_type = other DNA
atgaatctgattcatccatttccttccccttagatagtactacatttcatgccattcatttggggaaatattggcaaagagagaatgaggacacacatgtgcagggagtgctcaaattag

SEQ ID NO: 3113 - DNA, 120 bp, synthetic construct
  source 1..120: mol_type = other DNA
ctatctctaaaagggaaaaaaactgaggatttaaaaatgttaaatgctatacagttaagaagaggctgacaaactatggcccaccaggtaaatctaacccaacacaatttttttttttga

SEQ ID NO: 3114 - DNA, 120 bp, synthetic construct
  source 1..120: mol_type = other DNA
ttattagaacacagctacatctatccatttgcatacagtctatggctgatttggggccacaatggcagagttgagtatgtaaaacagagattgtaaggccagcacagctgaaagtatttg

SEQ ID NO: 3115 - DNA, 120 bp, synthetic construct
  source 1..120: mol_type = other DNA
gggattacaggcgtgagccaccatgcccagcctagttattattattattattatttttttttgagatggagttttgctcttgtcactcaggctggagtgcagtggcacactctcggctca

SEQ ID NO: 3116 - DNA, 120 bp, synthetic construct
  source 1..120: mol_type = other DNA
gctgagcctgctgccattgtctctgctcatggcttcaacagtgaatactcaagtagttattcattactcctagacaactactttcccactgtaactagattgtgagtcaaggctttttat

SEQ ID NO: 3117 - DNA, 120 bp, synthetic construct
  source 1..120: mol_type = other DNA
tatttctgggattattggatcatttaatcatccttcctaaggctacttaaacatggcaatgtggctgggagtcaagtctgataacaggcataatagttctcagttcaaatccacagctag

SEQ ID NO: 3118 - DNA, 120 bp, synthetic construct
  source 1..120: mol_type = other DNA
ggttccatcatctcattcaacctggtattgaaatcaggcacatggtatagcagtatcatgattttgtgacacttcttgttatgtctaaattttccatggaagacaacggccaggaaacca

SEQ ID NO: 3119 - DNA, 120 bp, synthetic construct
  source 1..120: mol_type = other DNA
ggcacgagccactgcacctgacctgctccccagctttattgaggatttgtgacattgataactgctttgtcatgatactctatttttttgtttttggagcttagggtctcgctccattgc

SEQ ID NO: 3120 - DNA, 120 bp, synthetic construct
  source 1..120: mol_type = other DNA
ttatgtgcatatgcaaagttttcctcctatcagggacaccagatgggtgtcctacagagtttcatacatggtctgtatttagtaattgttctttcctcaaatcccaaatcactttgacct

SEQ ID NO: 3121 - DNA, 120 bp, synthetic construct
  source 1..120: mol_type = other DNA
gtaacagcttttgacagacaatatgattaatacacctttgagtaactaccctaaacatggagctaaggcaggcaccaagaatagatatgagacatggtacctgtcttcaaaaacgagaga

SEQ ID NO: 3122 - DNA, 120 bp, synthetic construct
  source 1..120: mol_type = other DNA
tcagaaagaaatcccttcccaatctcaaattcctttgtgacctcttatatacgaaatgccaaaggactacttatagaaaaagggtacaactgagagatgggaaggaaaaagggaggaaag

SEQ ID NO: 3123 - DNA, 120 bp, synthetic construct
  source 1..120: mol_type = other DNA
ctgggtatggttctccctatagtcagaaaagagatggctggggactcctgtgatggtttccctatcacaaatctgttaatttggttcctgtgatcacacttttttcttttctttttttga

SEQ ID NO: 3124 - DNA, 120 bp, synthetic construct
  source 1..120: mol_type = other DNA
acattatagctagaatttagggttcttttttttattttttgctctctcctttttaggacttttcccctccctttctagcagctgcgatcaccctgaactctgtcctttggttctctaagc

SEQ ID NO: 3125 - DNA, 120 bp, synthetic construct
  source 1..120: mol_type = other DNA
aataacaatgttgttcataatagtagtaccaagcagagcttcttgcatcccttggacctcagcaaaagttagtatagtctcctcagggggcatcaaaaattggttttctttgcctctgta

SEQ ID NO: 3126 - DNA, 120 bp, synthetic construct
  source 1..120: mol_type = other DNA
gctgtaagttcagtttgcaacattttgaatttaaggtgtccccaatacgtctaataaataggcctgcaggtctagagctcaagaaagagctcagaggtagaaatgtatgtttgcaagtag

SEQ ID NO: 3127 - DNA, 120 bp, synthetic construct
  source 1..120: mol_type = other DNA
aggccaagcacagcttttatatttccagacttcagtagtacttgcttttcactttcatcatcagaggaacaaaacaatgccctaagccaaatataaggaaaaatggggtgatgtgaggag

SEQ ID NO: 3128 - DNA, 120 bp, synthetic construct
  source 1..120: mol_type = other DNA
gacagagacaaagatgaaggaaaaacaaatcactccttgggaattacatacctgatctctctgatttccaaatttcccaaagctacacacacgagattatacacatcaggcactggaact

SEQ ID NO: 3129 - DNA, 120 bp, synthetic construct
  source 1..120: mol_type = other DNA
agcaaaataatgccttggtgaagggcaaggagtacaaatatcagcaagtgtcaaagtcagaatagacataaaattctaagctcctccaacaggtctagtgtaaaaacccgtctctaggct

SEQ ID NO: 3130 - DNA, 120 bp, synthetic construct
  source 1..120: mol_type = other DNA
cactcacatctacggaacaggaacctgaaggattctgacacaatggcaacagttctgttaaagtggcactcgagtgctgttttatgcaaagcataagtatgcaaagtgatgaattataat

SEQ ID NO: 3131 - DNA, 120 bp, synthetic construct
  source 1..120: mol_type = other DNA
tcctcggagggagtaacattgaaacaacatacattatactatctactattatgaccatgggagcactatgtatcaaaccacagagcgtggccaaagcagtatttccaagaaaatttggaa

SEQ ID NO: 3132 - DNA, 120 bp, synthetic construct
  source 1..120: mol_type = other DNA
attccgaaacagagcataggtattactatgcatcctttatagaaaaggaatctggggctcagaggttacacaatttgtccaaggtgacatagccagtaactgggaaaaactttatgtgga

SEQ ID NO: 3133 - DNA, 120 bp, synthetic construct
  source 1..120: mol_type = other DNA
tcattaaagttttcatatgtaagacacgagacactggaagagaatattcttctgacctttaactctgaaaccaattgtaggttgcctgggtttatgctatcagaagcaggaagctctgct

SEQ ID NO: 3134 - DNA, 120 bp, synthetic construct
  source 1..120: mol_type = other DNA
tatttaaaggagtataaagtaatatggatgaagaaaggcccgtctttgtatgctggctttgcgagtttggccttttgggatgtgattttcctggtagaacaataaggtcctcttctaagt

SEQ ID NO: 3135 - DNA, 120 bp, synthetic construct
  source 1..120: mol_type = other DNA
attacttttcccatccatgactcagaaacttgggcgaagggttcaaacaacggtcatgagttagttgattaattagcagctatttttctgcactacccaaaacagtgtattgctagccag

SEQ ID NO: 3136 - DNA, 120 bp, synthetic construct
  source 1..120: mol_type = other DNA
cattctttcctacctctaaaactgtgatttcaacaggctgccagagtatgttctacaaaatgctggctcttctcactatggaaaacttagtccccttttgaagcaaagagtaatttactg

SEQ ID NO: 3137 - DNA, 120 bp, synthetic construct
  source 1..120: mol_type = other DNA
cacagcttatagaccaagtccatgtccaatggtacagagcagcctgctacctatttttgcacataaagttgtttttttgttttaggaacttggctgtaaagtgcatataaaggtgcgttg

SEQ ID NO: 3138 - DNA, 120 bp, synthetic construct
  source 1..120: mol_type = other DNA
ggtgagccaccaagcccaacatagagtcttcctctagtacacattccattttacttcaaaaacactttctatgttagctgtgaagcttctacccaaagaattgtattgaacctgaatatg

SEQ ID NO: 3139 - DNA, 120 bp, synthetic construct
  source 1..120: mol_type = other DNA
cacttgaataaataatttttcgtgctgatatttgtgtgaggtgacttcttccttggacctgttaacaatcgacaggctagaagttggcaaaagtggttcacaatgatctgatgctggggt

SEQ ID NO: 3140 - DNA, 120 bp, synthetic construct
  source 1..120: mol_type = other DNA
ctgtagtcgccctggtgaaattaggtcttcttaggaatgtatcaacacctttttctggttgggcagttggtggaattaatacactgtcttcattaatttctgtaactggttctggagaat

SEQ ID NO: 3141 - DNA, 120 bp, synthetic construct
  source 1..120: mol_type = other DNA
gtagtaaggtcactgttacctttaggaggaatgtgttcaaggtgttgactacttctactatctgatggagtatgtaaaggaactgtacatactccatactgtacatatttttaaaagttc

SEQ ID NO: 3142 - DNA, 120 bp, synthetic construct
  source 1..120: mol_type = other DNA
gccaaaatatacctgggaaatgaataataaagcaggcataagtgaatggtctagatttacctgagtgttttagctgcggtgagagatcctgctgagacaaacaatcttgttcttctactg

SEQ ID NO: 3143 - DNA, 120 bp, synthetic construct
  source 1..120: mol_type = other DNA
caggaactgccatcctcagtcactcaacaaatgaatcttctatttatccgttaatggtccaggtatctctagtacctggaataataattgatacccactatgtgtcaattagtgctccag

SEQ ID NO: 3144 - DNA, 120 bp, synthetic construct
  source 1..120: mol_type = other DNA
agccactgcactccagcctgggagatagagcggagagtctgtctcaaaaacaaacaaaacaaaacctatgtgcaaaacatgctactagacaagttgccaaccgtaaggaattttcttttt

SEQ ID NO: 3145 - DNA, 120 bp, synthetic construct
  source 1..120: mol_type = other DNA
gcaagggtgtcgatacagctttatctacaaactgttacacattgtattaatgcgctgctactgtaatgaaatttgttctttaaacgccaccacgtgagcaccacgctatttccacatttt

SEQ ID NO: 3146 - DNA, 120 bp, synthetic construct
  source 1..120: mol_type = other DNA
ccactgctgctgctgctgctgctgctcctgggtcccgcgggcgcccgtgcgcaggaggacgaggacggcgactacgaggagctggtgctagccttgcgttccgaggaggacggcctggcc

SEQ ID NO: 3147 - DNA, 120 bp, synthetic construct
  source 1..120: mol_type = other DNA
cagcttggagtcagatgtggggttgaatcttggcttcctctcactagctgtggtgcttgacaagtcacttatccttgagcctccattgcctaatctttaaaagggaggtgacaatcgtcc

SEQ ID NO: 3148 - DNA, 120 bp, synthetic construct
  source 1..120: mol_type = other DNA
ctgcacagagtactctcccaattcattcaatttttatttagcggaaggcattttcagatgggtctttgaagcattagtaggagttcagcgatgatggtgtcatgagaattttattctagg

SEQ ID NO: 3149 - DNA, 120 bp, synthetic construct
  source 1..120: mol_type = other DNA
ccagtgaaggttcttaagcaggtatgtctgcctgagagcagttggagcagacaagagctaaaaaccaaacaaatcaccatagatagtggctgctataatttgtttgtcccctccaaatct

SEQ ID NO: 3150 - DNA, 120 bp, synthetic construct
  source 1..120: mol_type = other DNA
caggtacagaggaaaacctgttgtcgagtgtggcccgtagttcccatttttgcctgaatggcacatttgaaagtgttatataaccatgtgaataataatagttggcctatatgagttctt

SEQ ID NO: 3151 - DNA, 120 bp, synthetic construct
  source 1..120: mol_type = other DNA
tgcttcaaatcttaaaaaaacgtttttatttgtgcttctgcaccaccttctagcccacctcgtttcctggcctctaacttgatgagagcgtgtgtcattttcacactgattctccacatg

SEQ ID NO: 3152 - DNA, 120 bp, synthetic construct
  source 1..120: mol_type = other DNA
taaggactaaatgaggtcgtgaagcattcagcagatgctaggtacggaaactcgctgaagtgggggcaggttaagaagcctctggggatacgaaggcatccagggactagttgtggcagg

SEQ ID NO: 3153 - DNA, 120 bp, synthetic construct
  source 1..120: mol_type = other DNA
acaaatgcaaaagtcttgccttaaatgatcctcttttccttcttttctcttgttttccttttctcaccatttggaatggcccagcaggctgcacttaccttggaaggagggttcatctga

SEQ ID NO: 3154 - DNA, 120 bp, synthetic construct
  source 1..120: mol_type = other DNA
ttcttctatgagctttgtcgttcttgtctgtaaaatgggcacataaccctgtccctgtccttctcacaggttgctgtgagactccaatgagttgaaggatgtgcagatgcttttggaagt

SEQ ID NO: 3155 - DNA, 120 bp, synthetic construct
  source 1..120: mol_type = other DNA
gggttaaatcagttattgctgtagcatgcatttctctgtcaggtattgagtgaggtgctgtgattttagccctgcatttttcttttcttaccattcaataataacgttttgagcacccac

SEQ ID NO: 3156 - DNA, 120 bp, synthetic construct
  source 1..120: mol_type = other DNA
tttccagcctctcactggaaggaagcccaaggatgttcctgtgggggcttttaccaggcccacctgccctctgctggccatgcttgcagcctcctgaccctgtcccagcaggacagtggg

SEQ ID NO: 3157 - DNA, 120 bp, synthetic construct
  source 1..120: mol_type = other DNA
ctgaaattcatgtgggatctcagagcagccactgaattgctctgtagggggctaaatagtggcccccacagatacacacacccagacagagcctgtgagccagaccttatttggagaaaa

SEQ ID NO: 3158 - DNA, 120 bp, synthetic construct
  source 1..120: mol_type = other DNA
gcaggtggccagacatcactgttattctcctttgagtctttaaatcttgttgtctttcttgcagactcggtgagctgtgaaaggctataataggggctttattttacactttgatactat

SEQ ID NO: 3159 - DNA, 120 bp, synthetic construct
  source 1..120: mol_type = other DNA
ccatcagttgtgggaagggcgttcatccatccagccacctgctgatttgttatagggtggagggggggtctttctcatgtggtccttgtgttcgtcgagcaggccagcaagtgtgacagt

SEQ ID NO: 3160 - DNA, 120 bp, synthetic construct
  source 1..120: mol_type = other DNA
agttctgccctgagactttcctacagagtacaggttttgatgttcagttttaaaggcaagaatcaataaccttctgccccatcaggtgaccccttgtgcctgtcccacccctttattgac

SEQ ID NO: 3161 - DNA, 120 bp, synthetic construct
  source 1..120: mol_type = other DNA
caaaaataaataagtaaataactagcagctgtaaatgtggctgttgttcttcacctccacactcagtgccactccactccctccctccgtggtgtgaggggcctcactagctgtctccta

SEQ ID NO: 3162 - DNA, 120 bp, synthetic construct
  source 1..120: mol_type = other DNA
atgttagtcacatctaaaaaatattttcgcagcagcatttccactggcttttgaccaaacatcaggccacaaagttgatccccaaaattaaccatcactctgtgcctgtaagggaggggc

SEQ ID NO: 3163 - DNA, 120 bp, synthetic construct
  source 1..120: mol_type = other DNA
atactctttgggcctccctgttgtccagctctctccgcggctccatgactgacaacttgagcaaggctaatgtgaatgggagcggttgagggctcagacctctcacccgaggaacatcca

SEQ ID NO: 3164 - DNA, 120 bp, synthetic construct
  source 1..120: mol_type = other DNA
ttggaggagggacatttgatcgggagcttgatggatgaataggagttcacctggccgataagacagcaactaccaaggcttagaggtgtgagaggaggctgtcttacctcactgagtaag

SEQ ID NO: 3165 - DNA, 120 bp, synthetic construct
  source 1..120: mol_type = other DNA
acgccaccttaaataggattaaatgagaatggggctctgaaagggctgtgcaatattttcataacgtgtttttatagagacagttgagtatgttctttaagccctcctctctcctaccat

SEQ ID NO: 3166 - DNA, 120 bp, synthetic construct
  source 1..120: mol_type = other DNA
ctggatccttgctttggcctcctggatttctctctatctccattttgaaaccactctgtgtttggaagaacttttgagtattcagagctgcccactggcagaacagtcttccttgggcag

SEQ ID NO: 3167 - DNA, 120 bp, synthetic construct
  source 1..120: mol_type = other DNA
tgaggaaatgatgagtgctaagcacttagcttagtgccgggacaatataaattctagctatcgttactattgttttcatcacccgttgctttaaaatccagcctctggtataggcaacta

SEQ ID NO: 3168 - DNA, 120 bp, synthetic construct
  source 1..120: mol_type = other DNA
tttttttctttgagttgtttctaggtttcctagctcttgcctcagaccttaaagagagagggtctgatggggatgggcactggagacggagcatcccagcatttcacatctgagctggct

SEQ ID NO: 3169 - DNA, 120 bp, synthetic construct
  source 1..120: mol_type = other DNA
tagaaacctgagtgtataactctccttaaaagccagtaggagctcctcaaaaggcagccctaaggagtccactcttaaatgaactcagagtcagttttaaaatgcaagtctgtgttgatt

SEQ ID NO: 3170 - DNA, 120 bp, synthetic construct
  source 1..120: mol_type = other DNA
atggagttgccattaagtgggatggggcaggctatggggccatcagtttcagagggatgagtttggcactggcatggtaggcatctgtctatctccacggccctcaaaccaggcatgaag

SEQ ID NO: 3171 - DNA, 120 bp, synthetic construct
  source 1..120: mol_type = other DNA
ctcatttttacgggtaacagtgaggctgggaaggggaacacagaccaggaagctcggtgagtgatggcagaacgatgcctgcaggcatggaactttttccgttatcacccaggcctgatt

SEQ ID NO: 3172 - DNA, 120 bp, synthetic construct
  source 1..120: mol_type = other DNA
ttttcttgagttaaaataatggcttgaagaagatcatatgagatctagtggctctgtgatatttcttaaatggtgggcaaggctgggctggctgataatgtaactcattaacatgagccg

SEQ ID NO: 3173 - DNA, 120 bp, synthetic construct
  source 1..120: mol_type = other DNA
accataagccctaataacaaagaccactatttgtcgagcctgtggccggtatctactggtggcaaacttgcaaaggtcttctggaagactcataaaattatgttctatttgttttctgga

SEQ ID NO: 3174 - DNA, 120 bp, synthetic construct
  source 1..120: mol_type = other DNA
tccatgaagtcaggccactcggtgaccagacaattaggcagcaagctctgcaaggcggggaccatatctgtttttgttttctttttaaaccactagcacagtgctaataaataaatagtt

SEQ ID NO: 3175 - DNA, 120 bp, synthetic construct
  source 1..120: mol_type = other DNA
gcagggaggagcagtcaaatcagcacttattagtaacccctggacttttcagaatcacttggtaataactgaagggcaaataaatccatcaaagtgatgggtctctaatattcaaaactg

SEQ ID NO: 3176 - DNA, 120 bp, synthetic construct
  source 1..120: mol_type = other DNA
tgaaaacaggaacacagatgtggaatgacatgcattggaccttctattatcaaaagggaataagatgcggaagagataagacagagaaaaaactgtgaaagcaagactttctcatcaggc

SEQ ID NO: 3177 - DNA, 120 bp, synthetic construct
  source 1..120: mol_type = other DNA
gtgtaacaggcagaggctgtagtttcaatgagaaggtcagtactcgggactgtgtcaggaatgatggaaaccaaatcagggagagtttctttggctacaaaatgaaaaaaaaaacaaaac

SEQ ID NO: 3178 - DNA, 120 bp, synthetic construct
  source 1..120: mol_type = other DNA
aaaagaggatactctgtgctcagtatattgaaaatcttttcagagtgtaatttggcagaaatgtcaagaacttaaaacattttcatcttcttcaattcggtaattccatgtctaggaata

SEQ ID NO: 3179 - DNA, 120 bp, synthetic construct
  source 1..120: mol_type = other DNA
gccactgcgcctggcctactattttaaaaagagaaataaactattttaaatgtacttttctactatgtatataacttcttggttataagttttgagtttggctttttttttttgtactaa

SEQ ID NO: 3180 - DNA, 120 bp, synthetic construct
  source 1..120: mol_type = other DNA
ggctaaggacatgaatagacaattctcaaaagaagatatacaaatggcataagaaaaattttttgatacgcctcatacatatgaaaaaatgctcaacatcactaattatcatggaaatgc

SEQ ID NO: 3181 - DNA, 120 bp, synthetic construct
  source 1..120: mol_type = other DNA
gcatgcatcttttgcttttgctgatccccacagcttctgaatacgtgttgtgtttatcagcaattaacaaatactgcctaattttattgtgtgccttcatctgtgttcatgtggcatctt

SEQ ID NO: 3182 - DNA, 120 bp, synthetic construct
  source 1..120: mol_type = other DNA
tatcttgctgaagcctcttttctctgttatccttaaagtgaagtttatcaacagaatcctctaatataaaccatgtggctacagctataccttcccgacatttaggggactgcagaacct

SEQ ID NO: 3183 - DNA, 120 bp, synthetic construct
  source 1..120: mol_type = other DNA
gtggtgcttaagagagccacagagagaacattctgaaagacaactatatggattagaaagacttcattggatggtgtgactgagggtgccacccagtgaaaaatatcaacaatattactt

SEQ ID NO: 3184 - DNA, 120 bp, synthetic construct
  source 1..120: mol_type = other DNA
gatggaactagtctaaaggtattttctttaaactcttattaagttttcaagtcaattactagataaaaacctgtttattcagtacttttaaatgcaatcttggggccgggtgtggtggct

SEQ ID NO: 3185 - DNA, 120 bp, synthetic construct
  source 1..120: mol_type = other DNA
agacagcaacagacaacggcaggctttccgtctctaccatgctgtgttttgatggaaaggtaactgtccactgtattttttgttttcaggtgagaagaaacatgaaaagcaattgaggga

SEQ ID NO: 3186 - DNA, 120 bp, synthetic construct
  source 1..120: mol_type = other DNA
gcatttttctaatgatcagtgatgttgagctttttttcacgtttgttaaccacatgtacgtcttcttttgagaagagtctgttcatgtcctttgtccactttttaatggggttgtttttt

SEQ ID NO: 3187 - DNA, 120 bp, synthetic construct
  source 1..120: mol_type = other DNA
cgaatgttgaaccaaccttgcatcctggggatgaaacccacttgatggtggtggataagctttttgatatgctgctagattcagtctgccagtattttactaaggatttttgtatctatg

SEQ ID NO: 3188 - DNA, 120 bp, synthetic construct
  source 1..120: mol_type = other DNA
ttgagtgaatttcttaatcttgagttctaatttggttgcaccgttgtctgagagatggtttcttatgatttcggttcttttgcatttgctaaggagtgttttacttctgattatgtgaac

SEQ ID NO: 3189 - DNA, 120 bp, synthetic construct
  source 1..120: mol_type = other DNA
ggataatcttctcatggagtatcctactggggttctctccatttcctgaatttgaatgttggcctgtcttgataggttggggtaattctactggatgatatactaaagtatgttttccaa

SEQ ID NO: 3190 - DNA, 120 bp, synthetic construct
  source 1..120: mol_type = other DNA
aagaagcagtctggctgtagagcaggtgtgctctgttggggaggacccttcctcatctggactgcccagactctctagagtaggcaagctggaacagctcagttgactgaaccacagaga

SEQ ID NO: 3191 - DNA, 120 bp, synthetic construct
  source 1..120: mol_type = other DNA
tcagaatcattttggccatttcaccattggtcaatgaatgaacaagtagagccttgttatcaatgttagaaacttctttagtattcacttcttccagctaactgacagattgtgaaggtc

SEQ ID NO: 3192 - DNA, 120 bp, synthetic construct
  source 1..120: mol_type = other DNA
taaacattttttaaatgagaatttcagctgggagatgagcagaacagttgtcatgtaataacaaaatctttgcagtcatcatccaattgagtctccctgcagcaagcatgagccacttgg

SEQ ID NO: 3193 - DNA, 120 bp, synthetic construct
  source 1..120: mol_type = other DNA
gctcaacctacattgctgtatatctgccactcacttccacggtaacatggaatctgtgttcacccagaaagctaactgagctgagaaaaaatcttaaagggagatgtctttcattatttc

SEQ ID NO: 3194 - DNA, 120 bp, synthetic construct
  source 1..120: mol_type = other DNA
ctttctgtaacccacttataagtttggatgtatattcagtcaaatccatgttaacttgatcgcagtccttgcatttgttattcctggttgtagctgtaaactatcgtgggcacagtcggt

SEQ ID NO: 3195 - DNA, 120 bp, synthetic construct
  source 1..120: mol_type = other DNA
aattaaaatttgtctttcattaatttgcagaacattctgttagactatttgctctcctctgagaagaatccttcccctgtagccatccaaggaggagactactggacaccactcctgtat

SEQ ID NO: 3196 - DNA, 120 bp, synthetic construct
  source 1..120: mol_type = other DNA
ctaccaaatattgctagggcgaacaatgcatttgcagaagaaccaatctgcaaattatggcctccaatctctacaaggaactcaatgttgctagtaaacttgttgtctcttaaacaccag

SEQ ID NO: 3197 - DNA, 120 bp, synthetic construct
  source 1..120: mol_type = other DNA
tgtttgctcagcttggggacagcatggcaaaatttcactaattccgatttgctgagggaaatgagaatgcctgaagtaggatgacctttagaatttgctccataaggaaaataagcaatg

SEQ ID NO: 3198 - DNA, 120 bp, synthetic construct
  source 1..120: mol_type = other DNA
gctccctttttaaatggggttatttagtttttgcttgctgaattttttaagttccttacagattctggatttaaacctttaccagatacatactttgtgaacattttctcccattctgta

SEQ ID NO: 3199 - DNA, 120 bp, synthetic construct
  source 1..120: mol_type = other DNA
ttatcaaatatttactttaaggctagtcctttttgtgtccattttaatgaagtctttccctgtttcaggtcatgaagatattcttccatgtaattgtttagcatctttattgttttacct

SEQ ID NO: 3200 - DNA, 120 bp, synthetic construct
  source 1..120: mol_type = other DNA
ttaggaacctatttatttcagcttgggttctttgccacgtaaggtacacggtcattaattgctcagtgctatctcagttacgatcacatggccaatggacttgatattttctggtactat

SEQ ID NO: 3201 - DNA, 120 bp, synthetic construct
  source 1..120: mol_type = other DNA
acccccccccccccatttaattttcttttatgttagctgggaattaaaaagagggcttctatagtttagcaaagtaagagaaatggttttgggaaacctagcataggaaaatggggaata

SEQ ID NO: 3202 - DNA, 120 bp, synthetic construct
  source 1..120: mol_type = other DNA
tattctccaacttcttaacaacactattgggaaaatggtagtttgtttcttgtgggggacacattgggctgataaaacgtgagcctgaaataattcatggctgtctttgttaccctatgg

SEQ ID NO: 3203 - DNA, 120 bp, synthetic construct
  source 1..120: mol_type = other DNA
ccaggatagcaccagggttctaaatttaccagctggtttccacaaataccacgatactcagagaaggaggggaggttacattctcttagttttcatatcagtatggaaataaatatgtat

SEQ ID NO: 3204 - DNA, 120 bp, synthetic construct
  source 1..120: mol_type = other DNA
gagtctttttagtttactttctaaagagtgtgtccagaacaactgtatagcttagatacgtaacttactagccatgttgagctggagaaggggaggagatactgtttatagggaccaact

SEQ ID NO: 3205 - DNA, 120 bp, synthetic construct
  source 1..120: mol_type = other DNA
ttctgaagcatcttagtaagacaaaacaggatatttatctcttgaattaccttgtcatctggctggtaatctgcaatggttcctctgacataatggaccagtgagtcaatgagtccgtca

SEQ ID NO: 3206 - DNA, 120 bp, synthetic construct
  source 1..120: mol_type = other DNA
atgtcaatacctcagtcaacaagaatgacaaaaaatagggccttcaggttttaagaacttgagaatcacctctattcccaactttaattgctaagaactgtccctataaaatgtatcaga

SEQ ID NO: 3207 - DNA, 120 bp, synthetic construct
  source 1..120: mol_type = other DNA
atataatataagtgatttccaaaaggccttctgcctcaaaatactgctttcagtgcatatttgtcaaagaaacaaaggtgcctaagcattacatcaagaactaaaggtggctgggtgtgg

SEQ ID NO: 3208 - DNA, 120 bp, synthetic construct
  source 1..120: mol_type = other DNA
ccttattttatacatgaaaaactagaagccaaaagtttccgttacttttcctggtgacagcaaattagtggtaaagtcaggaaaagagggctgttctttattctacacccagggtggccc

SEQ ID NO: 3209 - DNA, 120 bp, synthetic construct
  source 1..120: mol_type = other DNA
aagcctaagtctgagtaaatatctgcagacctttaagaaaactaaaactgcatactgttatatactgaaatttaaaaacaggtccttaggggttgaaggcaaggggccagggccttagga

SEQ ID NO: 3210 - DNA, 120 bp, synthetic construct
  source 1..120: mol_type = other DNA
ggttaaagtaaaaggctacagttagtttccaggacatgagaatggccgggaacaataacgtctgagtgcatcttttcaagacacttcaccaccatacaaaataaataactttaggaggca

SEQ ID NO: 3211 - DNA, 120 bp, synthetic construct
  source 1..120: mol_type = other DNA
ctggcctgggaccagtcttgaagttctaatcagcactctgagatagtgatcacctcaatggttttaaaaaattatgcacgcatcaccaacaagtatagacttcctaatactgtgtaatgt

SEQ ID NO: 3212 - DNA, 120 bp, synthetic construct
  source 1..120: mol_type = other DNA
tacggggataagaaaaattaatggaaaaaagctatgttgtcatctgttccacaccaagaaactagaaggtggtagaggagaaaatctatccttaaaaatcctttagctctggccaggcac

SEQ ID NO: 3213 - DNA, 120 bp, synthetic construct
  source 1..120: mol_type = other DNA
tacaacttttaatctggaccaatctggtaaagatatgaataggacagtggaaaatgatagtctgaagaacagggacctttgtaaggtggtcaactggttgtagatgggctgcttcagcat

SEQ ID NO: 3214 - DNA, 120 bp, synthetic construct
  source 1..120: mol_type = other DNA
ctgaggctgaagttgatgattcagttgtctttctatttttgggaaagccaatctctggggtgaactatctagatactttcatcaagtttccattttgtttgcactatctcatctagcatt

SEQ ID NO: 3215 - DNA, 120 bp, synthetic construct
  source 1..120: mol_type = other DNA
tatgttttaaaatgtgtaatgacaaattctggggaggccttcacaaagcagactgcacctttatcttaaggtggcaattttataagcctgtctcgtaagtggacggtcaagaaactatag

SEQ ID NO: 3216 - DNA, 120 bp, synthetic construct
  source 1..120: mol_type = other DNA
ttggcagcaatttcagacttctcccgaataataaacattggttttattgatgctacatccaggggttttccaatcagtgatgtagaaaacagagttaatagtcaggtcacaccaatgccc

SEQ ID NO: 3217 - DNA, 120 bp, synthetic construct
  source 1..120: mol_type = other DNA
catggaattatgctgaaatgccaagaatcactctcacttgctggctccaacacactggagtgtacaatttattttcctctcctatcttggattttcccactcattaagctagtgtagtat

SEQ ID NO: 3218 - DNA, 120 bp, synthetic construct
  source 1..120: mol_type = other DNA
tcttactagaacgagtcaacatctgtcttaagatttttaagagtgagctgtagacataaatgagcaactactcagcagatacctctatgtcctggaaatcaatgctacgtgactgcaggt

SEQ ID NO: 3219 - DNA, 120 bp, synthetic construct
  source 1..120: mol_type = other DNA
tctgaaaaatgtgtgccaaccagggcattgctacaaccaaccaatgtatagcttctactcatcaatcataaggggagactacaggaagagatttgtaactaacatcgttgcctttagatt

SEQ ID NO: 3220 - DNA, 120 bp, synthetic construct
  source 1..120: mol_type = other DNA
acaaaatcagtaacagtggtgacttggctatgaactcccgtttgaaccctcaggaacaagcactagcttttgctggggaagctggaaaatgtttcatagaacatttatgaacattatgaa

SEQ ID NO: 3221 - DNA, 120 bp, synthetic construct
  source 1..120: mol_type = other DNA
ctaatacatctgccatactaagaactctgttttatgtggtaaggcaatgggagctggagagaaactttaagacgtgaaatatgtttaagcaggtgagcgatggatcaaagtgcactagaa

SEQ ID NO: 3222 - DNA, 120 bp, synthetic construct
  source 1..120: mol_type = other DNA
aacaaaccatcaaacaaactgtgtaactagaaaagaaccaaaggcagaatatatcctgacttccttggggctacctaattttttattgcatcttctatcagggcagggtacaggtagcat

SEQ ID NO: 3223 - DNA, 120 bp, synthetic construct
  source 1..120: mol_type = other DNA
cttcaacatttttaaagagtcatatttttttctcccttagatacacatgggaaaatatcttccctgcctccttccccactaactgtaactttcacctgacattgtgcctcccagtaagag

SEQ ID NO: 3224 - DNA, 120 bp, synthetic construct
  source 1..120: mol_type = other DNA
gggttacactaactcactaatgcccaggaaaaggagaagaggggcagaaagagaagggatgactcttccctttctaccctatccttctcactgcccaggcaacaattcctacttcttttt

SEQ ID NO: 3225 - DNA, 120 bp, synthetic construct
  source 1..120: mol_type = other DNA
tctccttaagaggccctggaagagggacagataaaactcagaaggtggttgaaaacaatttaaagacaagtctgaggctgagttttggttactaagctacaaaagcaagttagaaagaag

SEQ ID NO: 3226 - DNA, 120 bp, synthetic construct
  source 1..120: mol_type = other DNA
cccagctctatcactagagggaataaaaattagcttatctcttatcagaaagtagatgagggcttttaccctgaaattaaagtgttagactagatgagcagtttccaaatgagcccagtg

SEQ ID NO: 3227 - DNA, 120 bp, synthetic construct
  source 1..120: mol_type = other DNA
tgccttaacacataggcagcaaaacttacaagttttatgattaaataaatccctatcttcagtgaaaaagaatgaggaggcagagatgaggacaatgaccgctcggacaaggacaagaaa

SEQ ID NO: 3228 - DNA, 120 bp, synthetic construct
  source 1..120: mol_type = other DNA
ttctcaaagactatacaaatgagtcatcacgtgcctcaaaagtaggtggggtgacagcaaaacactcagatacaactaggttcaaacctgggctttgttctttaccatttaggcaacctt

SEQ ID NO: 3229 - DNA, 120 bp, synthetic construct
  source 1..120: mol_type = other DNA
tctaaatgaccggcagctagtttctttctgcctctttgccttgctagtgatgctcactttgccaggaataactttcatcctctttcaaaacaccaatccaaagcctattccttttttaag

SEQ ID NO: 3230 - DNA, 120 bp, synthetic construct
  source 1..120: mol_type = other DNA
tccatgtgacacacttgaacacgtaaccccaaatctaaaatgaatgttgaattttttaaaatgtgatattttaagacataaagcgagtagagataacataatgacaaaatctttatagaa

SEQ ID NO: 3231 - DNA, 120 bp, synthetic construct
  source 1..120: mol_type = other DNA
ggcagggagagtgcttattctggaacatcaacaaatcatcttctcttttatcatacgactgttcatttaaatgaaagtagccccttctcttcatgcttagaggacatattactaacactg

SEQ ID NO: 3232 - DNA, 120 bp, synthetic construct
  source 1..120: mol_type = other DNA
aaaaaggaattcgaatgtggctcaaatctggagtctaagccagcaggtaacaatgttcctttaaagccttctctagcataacaatgagcccatcaatcatttgctccaggaaacttaaga

SEQ ID NO: 3233 - DNA, 120 bp, synthetic construct
  source 1..120: mol_type = other DNA
atattccttctatccaaatacgtaagaaagcgcatgctattagagaaagggcacaaccaggaatgggaaacaaattgatctaagaaggggccaaataatcctaatctaagcagggagatt

SEQ ID NO: 3234 - DNA, 120 bp, synthetic construct
  source 1..120: mol_type = other DNA
aattaatagattgcaagaaccttaagaagaaagtactcttgattcctttaaggcttcactggacgtaataaggagtaaatacttccacttgctggctcccttctgaggagacatttgcag

SEQ ID NO: 3235 - DNA, 120 bp, synthetic construct
  source 1..120: mol_type = other DNA
gaaaggccttgactggcaaaatagcactgtgggatatatacccgtgtcttctgggtacgatctgttattctgctactgtggcacagtgcctgtttttaggtttttaagaaaatataagtt

SEQ ID NO: 3236 - DNA, 120 bp, synthetic construct
  source 1..120: mol_type = other DNA
aagcagctggaaccagggaggtttgatgagtttcccaattatactgaatcctcggggtatttttccctcctttgggaaaaggaaaaaagaaatagactaccatgaatgtttcagaacttc

SEQ ID NO: 3237 - DNA, 120 bp, synthetic construct
  source 1..120: mol_type = other DNA
atacagttccctcattagtcaaatgggaattactgtgtaagatgagcagttacatgtcaggcacacagtagttactcaacacaaggtagcaactaccatcacctttaacaatgttaactg

SEQ ID NO: 3238 - DNA, 120 bp, synthetic construct
  source 1..120: mol_type = other DNA
accaagacagtatctctgagtagggagggaaagatgtgggtagattccaaatacttttagaagtagcattaacaggacctgaagactgagtgactatgagaggtaaggaaaaaagaaggt

SEQ ID NO: 3239 - DNA, 120 bp, synthetic construct
  source 1..120: mol_type = other DNA
gagatagtagaaatctagcccaacttgggaaacagaataaaaattccagtaatttgtactacaaaatcgaagcatacgtaatgatgcccagtttttaaaaactgggaataggccctggtg

SEQ ID NO: 3240 - DNA, 120 bp, synthetic construct
  source 1..120: mol_type = other DNA
tccttattcattcttcctacggaacaaataggcaaagggtcagtgagaaatgctccataattatacaacttttgaaacggcaaagtctagatgtagggataggtcttttaaagcaatatc

SEQ ID NO: 3241 - DNA, 120 bp, synthetic construct
  source 1..120: mol_type = other DNA
atgctttggaaagactagataaaggtgaaaagcttaagagagctctgtaattagtgatggatagaattaatgtaagagactaggatttgaactcagatgaattagttccattaagttctc

SEQ ID NO: 3242 - DNA, 120 bp, synthetic construct
  source 1..120: mol_type = other DNA
aaaaggatttaagggaacagctcctcatgttcacacaggcctaggaacaatgactattcttatcagccagccagaaaaatctcaaaaattcctgctacattagatagagttctcagaagt

SEQ ID NO: 3243 - DNA, 120 bp, synthetic construct
  source 1..120: mol_type = other DNA
gcaaagtagaaattcacaaatctatgaagctcagtgaactcccaagcacaaaaaactaagagaaactacactaaagcacatgtgaccaaactgatcaacaccagtaagaaagagaaaatc

SEQ ID NO: 3244 - DNA, 120 bp, synthetic construct
  source 1..120: mol_type = other DNA
gcgtgagccaccacgccgtggccaactttcagtactaatatttagaaactgttaacctggaattctaaagccagtgaaaatacctttcaaaagcaaagatgaaattctttttcagacata

SEQ ID NO: 3245 - DNA, 120 bp, synthetic construct
  source 1..120: mol_type = other DNA
ttaccaaagctcactaaaaaagccactgatagtctaaacagccccacagcagttcaagaaactgaatttgcagctaagaaccttctcacacataaaaatcttcaggctgagacgtcttca

SEQ ID NO: 3246 - DNA, 120 bp, synthetic construct
  source 1..120: mol_type = other DNA
tacaggtagcataatatttaagggtgaaagaaagactgaatacttttgccctgggatcagaaacaggataatatgcccacgctcaccacttcttttcaagattgtaggagaggttctagc

SEQ ID NO: 3247 - DNA, 120 bp, synthetic construct
  source 1..120: mol_type = other DNA
ccttttcagcaaagatacaaagacaatttagcagtgaaataaaagtctttgcaacaaatgacacctgaacaattaaatttacatataccaaaaaaaggaacttcagtccacatcttacaa

SEQ ID NO: 3248 - DNA, 120 bp, synthetic construct
  source 1..120: mol_type = other DNA
tggtagtgcaccggtaggcccagctacttgggaggctgaggtgggaagatcacttgagcccgagaggtggaggttgcaatgagccaaaattgtgccactgcactccagcctgggcaacag

SEQ ID NO: 3249 - DNA, 120 bp, synthetic construct
  source 1..120: mol_type = other DNA
agaaagaaagcagatcactggttgttttgggaggctgttcgtaggttgagggctggagggattatatggattacacaggggcacaagaaaacgctggaggtaatggatatatttgttatc

SEQ ID NO: 3250 - DNA, 120 bp, synthetic construct
  source 1..120: mol_type = other DNA
ggatggttctaaatggagaggttggggagacaggaaaagaagagggaaatttgtgtagtgacttactttctacatttccgaattgcaggaaatatttttggtaatgagtggctgttttct

SEQ ID NO: 3251 - DNA, 120 bp, synthetic construct
  source 1..120: mol_type = other DNA
cagcacccaagatcacaaggcagagggactactggatagaaattcttcagctttgatcagatagaagacattggacgatgtcattcgattgaattataccatataccaaagaaagaagct

SEQ ID NO: 3252 - DNA, 120 bp, synthetic construct
  source 1..120: mol_type = other DNA
taatgcgcctcatgaccaaaaactaataccccctgcttctgaaacacgtgttcaaacacagaagggttacctcataagtataaagggtattaaaagtgaagcagaaaatctctggcatct

SEQ ID NO: 3253 - DNA, 120 bp, synthetic construct
  source 1..120: mol_type = other DNA
aggcttttaatccttctctaaacactgccaccttcttcacaagccaccttctttgacttttccaggaagcttatcatactacctaattctcacccattcttcaagactcaattcaagtat

SEQ ID NO: 3254 - DNA, 120 bp, synthetic construct
  source 1..120: mol_type = other DNA
tttaaatgatatcagtataaatttaaaaatgtaagagaaagcagtgtaaactaccactggtcagaatacgagacattacagggggagaaaaaaacccagtaacttggccgggcggtggtg

SEQ ID NO: 3255 - DNA, 120 bp, synthetic construct
  source 1..120: mol_type = other DNA
accatgcccggccctgctcttgtgttctttaaatttctgtagacactaatatgtatcacacaacctagcacttgatgatatatcctatttttcactgctcctctcctagaccatcataca

SEQ ID NO: 3256 - DNA, 120 bp, synthetic construct
  source 1..120: mol_type = other DNA
acaggcaccaccttgggcatctatcttcctcattacacaaaatacgtctggctccctctccttttcacagagagccaaattttcctttcataatcagagaaaaaaagttgatttctatga

SEQ ID NO: 3257 - DNA, 120 bp, synthetic construct
  source 1..120: mol_type = other DNA
aagaaggaaagagagagagaatgaatatggataaatatcttgcattaaggaaagtaaagaggttccaggtggtttgggtattggtatgtgggtatgtttggggatggtggtgatgaatgg

SEQ ID NO: 3258 - DNA, 120 bp, synthetic construct
  source 1..120: mol_type = other DNA
agggacacagagatggagggagagaatgccagttgttggaggatgtcagataataattttgttactgttaaaatcattttgctaaaactgtggctatcacaaatcctaggctatggtagg

SEQ ID NO: 3259 - DNA, 120 bp, synthetic construct
  source 1..120: mol_type = other DNA
aagcattttttccttttatttcatgggatgatgaagaaaatacgcatgcaattctccaattcttggcctactttggagtttagagcagattttcatatggctgaggggtagggtcccttc

SEQ ID NO: 3260 - DNA, 120 bp, synthetic construct
  source 1..120: mol_type = other DNA
tgtgccagcctgcacatgagagaaataaagtttaaagggggcataaatcaaatttcaactttgctgaggactaattactctgggactattacccaacatgtccgtttctctgaatcagat

SEQ ID NO: 3261 - DNA, 120 bp, synthetic construct
  source 1..120: mol_type = other DNA
ggcctccaacaaaatcattttcaaccaagtgtaggttgtagacatactcaggaacactgctggttcggtgaagatttcctgcaatcaagcaaatattaaaataactcagaatacaagtag

SEQ ID NO: 3262 - DNA, 120 bp, synthetic construct
  source 1..120: mol_type = other DNA
agactataaaattcagtttcccgagtcacagaactctgttcccaaggcaggaattcggaagcttcttgtaataagcaggtgtaggcaataaatataatggtgactcagcactactagata

SEQ ID NO: 3263 - DNA, 120 bp, synthetic construct
  source 1..120: mol_type = other DNA
aaaagtctaaatccatcctaaattatgtttgtacacgtgtccttatttcctatagccaaacaatctgcctgataaacaattttcaggcctcaaggagtcttgtgaggaggcagtggcagg

SEQ ID NO: 3264 - DNA, 120 bp, synthetic construct
  source 1..120: mol_type = other DNA
gttactctataataaaacggcaggtgatgaaagcaggcaattttaggaattcaagaaaaactctgtaaatcagcccctttagcccatcatcacctggaatatacccttgccctaattcca

SEQ ID NO: 3265 - DNA, 120 bp, synthetic construct
  source 1..120: mol_type = other DNA
acatgaaagatgtgactccagatattcagcctgcaagttggcacaatcgatggtttttctggataaatagccaatctcaaacaacaaatactgcagactaatttgcctaggcagtcatga

SEQ ID NO: 3266 - DNA, 120 bp, synthetic construct
  source 1..120: mol_type = other DNA
catataaaatcaagctgaccttcctttgaattaggtcaaagactcattccagaaggatcctccctatacctggaggaaaggaatgtcataaagggaagaatttgaacaaagaagccttgc

SEQ ID NO: 3267 - DNA, 120 bp, synthetic construct
  source 1..120: mol_type = other DNA
gaagccgtcacaggacaatgtaattttctccctttcccaatctgagtgttcattggaatgatatgattcctaagcagctgttatggaaaaagaagctttgtgtttggtcaccaatacaaa

SEQ ID NO: 3268 - DNA, 120 bp, synthetic construct
  source 1..120: mol_type = other DNA
tacagtaatctctggcttgcaacagctctcgttctccacaaatcttaaaagatttaacttctcccattacagtaaagttgaggacatgttattccaggtaagacatgggatcttgccact

SEQ ID NO: 3269 - DNA, 120 bp, synthetic construct
  source 1..120: mol_type = other DNA
tttgtgaccagttagctcacataatcaaccatgagaaacaacttggtgtatcaggtatatgctagaaagtactggctatgagttcttaaaacgttgaatatgccagggacagaacagctc

SEQ ID NO: 3270 - DNA, 120 bp, synthetic construct
  source 1..120: mol_type = other DNA
tgctttaaaatacttactacaggttttctttgtaatgactttcaagtcattatatttcccctgcctctcacgtgccagggttaacccctcccaactgattcataactgctaacccaactt

SEQ ID NO: 3271 - DNA, 120 bp, synthetic construct
  source 1..120: mol_type = other DNA
agggtagtggccccagggatgaagtttgagaagttgcaggcattagatcacgaagaacttggaatgctgtgttcaataattttactcttgcagataacagtaagaaactgaaggaattta

SEQ ID NO: 3272 - DNA, 120 bp, synthetic construct
  source 1..120: mol_type = other DNA
gtaatcaagatccaataagcttgatgctcacccacacccaccccataaatagcttactgagagattcagaaaaaataatccattaagcttctaatgaaggttttcatccacaaattctgg

SEQ ID NO: 3273 - DNA, 120 bp, synthetic construct
  source 1..120: mol_type = other DNA
ctactagtcaggggagccaggtggctcactctaatagaaaaataaagttttctcctaatttattgtctattcccacttgcattgctgccttttactgctaatttacttcctcaggagaag

SEQ ID NO: 3274 - DNA, 120 bp, synthetic construct
  source 1..120: mol_type = other DNA
ccctttcctgatccctcctactttctgaacgattagtcaccttgctccccagaattgcttcattcctgggattcctttttgtcaaaggaagaatttatgcagaatttgaacaatgtctaa

SEQ ID NO: 3275 - DNA, 120 bp, synthetic construct
  source 1..120: mol_type = other DNA
aagacaaagggttaaagactcttgcaagatacttatcaacaaatcagccacatttatctcatctctgctttcagcaggttatccgctgtctcaaccttacaggtttgtcaacaactcaga

SEQ ID NO: 3276 - DNA, 120 bp, synthetic construct
  source 1..120: mol_type = other DNA
cttactactttttatttggtaatgtatttttctagcggttggcttccttcttcaaactttttgctttaaagcaagcagagtctttgtgtttaattcagcacctgcacagcgcccggcatg

SEQ ID NO: 3277 - DNA, 120 bp, synthetic construct
  source 1..120: mol_type = other DNA
acatcttctctttacctttcaagtatgttaatattgactacgtcatcctttaggattcttttacacacacagtacagcctcccagactctgctgtttgaaatctctggtctggcctgtta

SEQ ID NO: 3278 - DNA, 120 bp, synthetic construct
  source 1..120: mol_type = other DNA
aaccttcaaattaagtccgcaccagtgaggggcgcggaccggcggagtagaaaaagaaaggggtgaaatcttgaagtgagttagttaacattgatagatatgtacaatatttaatataca

SEQ ID NO: 3279 - DNA, 120 bp, synthetic construct
  source 1..120: mol_type = other DNA
ataggccatggaccactactggtctgtgtccggagtgttggaatccctgttctagagactgcttgcaatccttgactagtggtacctccttccatctccaaaaccagcaagacagcctct

SEQ ID NO: 3280 - DNA, 120 bp, synthetic construct
  source 1..120: mol_type = other DNA
gggcatctttacttccattttcagccaagttcaaacaggacaaggttccatgaaaactatttgaaaagacagacagggattcttatattcccagaaccattcaaggccagtaactggaat

SEQ ID NO: 3281 - DNA, 120 bp, synthetic construct
  source 1..120: mol_type = other DNA
aaaggttagtgaagactctgtctttcaaaacataaaaatctgcgataaaaccaattattccatacagtgactacggtcagttctgagaaatgacacccaggttggcgatgtgtctcatgg

SEQ ID NO: 3282 - DNA, 120 bp, synthetic construct
  source 1..120: mol_type = other DNA
ccttctttcttcctgcagcaccctgagggctcgccatgtgccaagcacagtcagaaggctggggtgacagcaggttggagaaggacagacaatcaacaagtcaacagagaaccaagacag

SEQ ID NO: 3283 - DNA, 120 bp, synthetic construct
  source 1..120: mol_type = other DNA
ggtctttatccaagaaacactgtggctagaagtcagactctgggccctcttctaattaaactctgcccttgagtcatttcatctaatctcatggctgtaaattacacctgaagctcacac

SEQ ID NO: 3284 - DNA, 120 bp, synthetic construct
  source 1..120: mol_type = other DNA
gtctcaaaaacagacaaagaaaaatgctgtttgaatctcttgactgtgcttactggcatctaatgcgtgtcatttatttgtggtgatgcctatttctccccactgtctgctccacagggg

SEQ ID NO: 3285 - DNA, 120 bp, synthetic construct
  source 1..120: mol_type = other DNA
atactgcttaacagaggtaacaaaagagcaataattatgagttcaaggtcacagagaacgcagacgacacagatgctcagctacgacgctgcacgtagctctctgtgtaaaatgacccct

SEQ ID NO: 3286 - DNA, 120 bp, synthetic construct
  source 1..120: mol_type = other DNA
acacctgaaagagaggaaactcacaaaatgctttttggaggaactttttaatcttttataaaattaaaaaaaactggtctatatgacctgaaagattattcccagctctaaaaagacaag

SEQ ID NO: 3287 - DNA, 120 bp, synthetic construct
  source 1..120: mol_type = other DNA
tcctcagcctgccacgccaatgactcccactttttctgaatcctttccttaaggataacagtatcacaaaaatgctatttttcctccttctaatacagaatttgaaacactgggttaggt

SEQ ID NO: 3288 - DNA, 120 bp, synthetic construct
  source 1..120: mol_type = other DNA
atcctttaatcttgaagtgtggtccatctgggaccctaagtggtctgtgattacctgggccaacttgaaatgtcacagatgagaggttatctttgccgaatggctaaaaaatacaagacc

SEQ ID NO: 3289 - DNA, 120 bp, synthetic construct
  source 1..120: mol_type = other DNA
tttgctgaagacaagactttggttttacatgatactatcacacctgacctttgtgaagtagtcagggtaaaacattccagtttggccgaggagagagaaataccaaattctgcagtgact

SEQ ID NO: 3290 - DNA, 120 bp, synthetic construct
  source 1..120: mol_type = other DNA
cgcttgtggaatggtgatggtaacagtaacaaccccataggtttttgaggattaaaggaactaatacacatacattatttcaacagtgcctggcagattctaggcactgaataaatggta

SEQ ID NO: 3291 - DNA, 120 bp, synthetic construct
  source 1..120: mol_type = other DNA
agcatctcgaagttatacttctcgtccgtggcatgctggtccactatgaagatatcctcattcagtttggttattataaatcccaggttaaactgaccaatgatttccatttctgcaaac

SEQ ID NO: 3292 - DNA, 120 bp, synthetic construct
  source 1..120: mol_type = other DNA
attaaatactaacttagtcaatctggacaaaagacagacaccaccgctaaccttcacacgagaaattgacactgtcattctcagtcccacacaattaaatccggtgaaaatggattttcc

SEQ ID NO: 3293 - DNA, 120 bp, synthetic construct
  source 1..120: mol_type = other DNA
ccccaaatcctatctttgagggtctgtttcctggtaccaattccagatcaggcagagtgcaatcaatcaagagacaaaaaccacaccagtgattttaacagggacttttttttttaagac

SEQ ID NO: 3294 - DNA, 120 bp, synthetic construct
  source 1..120: mol_type = other DNA
ccaggaattgtctgaatatgccctggttcccagtacatagataatctgctcaaaagctggtgctggcctaaaagacccaagtcttccatgtgtttggagtctgtgtcctgccacagagaa

SEQ ID NO: 3295 - DNA, 120 bp, synthetic construct
  source 1..120: mol_type = other DNA
aaagaatttcttcttttttaaaacgctttgtgtttggggttgcgagattagttggctgaggcaaaactcgaaatttacatccggtatcttcctggtttgaatggcagtccacatctgaaa

SEQ ID NO: 3296 - DNA, 120 bp, synthetic construct
  source 1..120: mol_type = other DNA
tcaccagaatggtaaaattaaaaaaacaacaaatgctcacaaagatcaggatcaagaggaatgcctgaatacctctggtaggaatgaacctggtacagctgctttgaaaagttctctggg

SEQ ID NO: 3297 - DNA, 120 bp, synthetic construct
  source 1..120: mol_type = other DNA
gactataatggaacactgtatagcgaacgaataaatgaattttgccacatgacttgggtgaatctcacaaacaaaataatgagagaaagaaacaaatcacagaaaaggacagactgaata

SEQ ID NO: 3298 - DNA, 120 bp, synthetic construct
  source 1..120: mol_type = other DNA
catccagcagtggctgctgactgacatttagcttgttgacatcactatcaaacattcctatcaaagaggtctttaaaactgccaacaaaagcttttcctcttgtagcaaaatttgccttt

SEQ ID NO: 3299 - DNA, 120 bp, synthetic construct
  source 1..120: mol_type = other DNA
attggtacatctagaacacaatacagaaaaagccttaaaatgatcatattcactgacccagtaattctactcccggcaatttatattcagaataattaaagatgtaggctgagtgcagtg

SEQ ID NO: 3300 - DNA, 120 bp, synthetic construct
  source 1..120: mol_type = other DNA
agttgtactgaaatgccaatggaacttacctgaatcaacagaaatgttaagaacaacaaatggatactggtgtcgattatacatgtggtagacctcattcacgagtctgcagacctgcac

SEQ ID NO: 3301 - DNA, 120 bp, synthetic construct
  source 1..120: mol_type = other DNA
tataattaataattatgaatccatcacactataggttaaaaaatttagaagttcaaccacatctggcagattacaagcaaactctaaagcatcattgaaaaacaggggctgggagcggtg

SEQ ID NO: 3302 - DNA, 120 bp, synthetic construct
  source 1..120: mol_type = other DNA
actggtaatatgtgtttatatatttatgtatctatacacacaacacatataatgtatatatgcagatacaaacacactcacgtatatgcaatttaaaaaactatacagaggccaggcgcg

SEQ ID NO: 3303 - DNA, 120 bp, synthetic construct
  source 1..120: mol_type = other DNA
atactgtatgtcaaaaatgcctttgtgataacctaacctactgaatgtcccatctcagccttgcctcagaatacttacatagtctataggcaaaataacctattttataataaaatgttg

SEQ ID NO: 3304 - DNA, 120 bp, synthetic construct
  source 1..120: mol_type = other DNA
gcacattcttaaagtgaaatgaaaacaaaacaccaggtgacatgctgataaggatcactattgcagttcacgggtatctgtgctccaaatcttgatgagtcatcaaagaaccaaaccttc

SEQ ID NO: 3305 - DNA, 120 bp, synthetic construct
  source 1..120: mol_type = other DNA
aaaacatggtttgaattaagcaactgactcctttgtataaatcatctttcttagccacagcattgctcacagttttataaaggacataaaaaactattatccctagccaggcgtggtggc

SEQ ID NO: 3306 - DNA, 120 bp, synthetic construct
  source 1..120: mol_type = other DNA
tacctacttattcagaacccacacattgcccacaataacttatatttttttcagagagagagtgaaaagacgcagtatacgagtgtctctggaagaataaaatgaaacacattcagctct

SEQ ID NO: 3307 - DNA, 120 bp, synthetic construct
  source 1..120: mol_type = other DNA
aaaaaaaaatcaattctaagattttattctccattctactggaagggacaatggaaacccgctataatcactagagcaataagaggcgttgaagtaaccggccatcactacctgcttctg

SEQ ID NO: 3308 - DNA, 120 bp, synthetic construct
  source 1..120: mol_type = other DNA
ttcactgaaacaatctctatgaacaaacagaaacaacctaagcaagcatcattgaggagttgattaattatggtatagccatagcgcagcagaatgacaacaaataaggcagtgtgcacc

SEQ ID NO: 3309 - DNA, 120 bp, synthetic construct
  source 1..120: mol_type = other DNA
taaaaaaagtttttagctgcatatgtttaagtaactttttagattatgaaaaacacacatacaaaatgggaaggcacaaagaagacagcaaaaactgcatgagatctcacatccaaggat

SEQ ID NO: 3310 - DNA, 120 bp, synthetic construct
  source 1..120: mol_type = other DNA
ccaggcatggtggctcaggcctgtaatcccagcactttgagaggccaaggtgggcagatcacctgaggtcaggaattcgagaccagcctggccagcctggacaacatggtgaaaccccgt

SEQ ID NO: 3311 - DNA, 120 bp, synthetic construct
  source 1..120: mol_type = other DNA
ttcctttgaaattccttatggcgcacaggtagtgtggaaaataactgctgcacgctgactgtggtccctctggggcgggggtagggggttttctggataattttcccattgtgatcaaac

SEQ ID NO: 3312 - DNA, 120 bp, synthetic construct
  source 1..120: mol_type = other DNA
tgacttagattggcagcgagacaaaacagaattcagaagctagaagttgagatgttgagatagaaaactgaaaataataatgattccaattaattttcagagaggtttctctaaggggtc

SEQ ID NO: 3313 - DNA, 120 bp, synthetic construct
  source 1..120: mol_type = other DNA
aaaaaaaaaaaagagaatgggttctggaatcagacttcctggatcctattttatcagctttataatctcaaaaaaaggaaatttcctatcccctaatttcctcatttgtaaaatagagaa

SEQ ID NO: 3314 - DNA, 120 bp, synthetic construct
  source 1..120: mol_type = other DNA
cccagctgttctgcaaattaaatatttctgtgcaattcttagcataacacctgcctggcacaccgtaagaacacaataaaagctgttattattattactacctagctaagtactaggcac

SEQ ID NO: 3315 - DNA, 120 bp, synthetic construct
  source 1..120: mol_type = other DNA
ccctcaaagctcttgctgtactagctttaagagttttataaaggttttatctccccttattccctgctccaatacatcctccactctatcaccagagctatttttgaaatcacaaatctg

SEQ ID NO: 3316 - DNA, 120 bp, synthetic construct
  source 1..120: mol_type = other DNA
ctctgtctaaaccgctctcctcttcctcctctgcccaaacaatgtctgctcaaagaatgtatcccgtgtgttcattaacttagcaatttccagcaaacagtttaattgataacttgttaa

SEQ ID NO: 3317 - DNA, 120 bp, synthetic construct
  source 1..120: mol_type = other DNA
cacatcctaacaggtagaaacgtattgcatttttaaaaactgcgcagctatgcaaataaggatgtgtctggacgctctaccgtccccaaaataaccttaattttttaaaaaggccaggca

SEQ ID NO: 3318 - DNA, 120 bp, synthetic construct
  source 1..120: mol_type = other DNA
ctcctccacactttgagagacctcagcttttaaaacccagcagcggctatttcagaagtcatgtcctttccagatccaaacttaaataatgagaaatttgccatttcaaaataactgaga

SEQ ID NO: 3319 - DNA, 120 bp, synthetic construct
  source 1..120: mol_type = other DNA
caagctcccatctcccacccaatcgttcgggcagcttggatccacgtaacatcttgtcattctaaatatgtcagatttaacttggaaaacaaaaaaaaagaattccactcttaaaaaatt

SEQ ID NO: 3320 - DNA, 120 bp, synthetic construct
  source 1..120: mol_type = other DNA
ttgttgatcagatgcaggcgctccctgagttccactccaaaagttcacttgtaatccagttattagtaacacggaatgttttcctcaacaaatcgtgttgtatacactgtatcataagga

SEQ ID NO: 3321 - DNA, 120 bp, synthetic construct
  source 1..120: mol_type = other DNA
accacctcggaaaaatcactgctgtactggaatttctcttggtgttctcatttagcgaataagacatgtttcttgcaggtggtgaagattcctttagggtaggtatttttgggttacaga

SEQ ID NO: 3322 - DNA, 120 bp, synthetic construct
  source 1..120: mol_type = other DNA
gcagaatgtccgacagggaaataatacccacaatactatctgcttcatttaccaccaccagccgatggacctgcaaagagaaaagcaggacacgtgaaaattaacatttaaaaaaggttt

SEQ ID NO: 3323 - DNA, 120 bp, synthetic construct
  source 1..120: mol_type = other DNA
atatattaagaatcgcatccaagaggataaatgagctataatgaagtgggatagactacgtccatctctagttttctactctgaaatctctgatgagtgacggcagagcgttttgaggtg

SEQ ID NO: 3324 - DNA, 120 bp, synthetic construct
  source 1..120: mol_type = other DNA
acagtgatacccctgatagaaaacagggacataggaaggagataggaagagggggaaatccagtttttgtattttgtctcaaataatactgtttgggtgatgtttctgtcataggttgct

SEQ ID NO: 3325 - DNA, 120 bp, synthetic construct
  source 1..120: mol_type = other DNA
tatcttaccagtttattggattcacctatgataccaggacttttccattcaattcaattcaacaaacttttagagatcgcctatatgccaagtagtgtgccaggttctgggacaggaggg

SEQ ID NO: 3326 - DNA, 120 bp, synthetic construct
  source 1..120: mol_type = other DNA
atgttacaaggtctaccttccttacgaagcaacattgttaaactttgacagtatatcctgccaaagactgccccccaatttttaccctctaatgctctctaccatgcatggatgaaatct

SEQ ID NO: 3327 - DNA, 120 bp, synthetic construct
  source 1..120: mol_type = other DNA
tggacatatgaaaataaaccaattaaactttttttacgatcctgcgtgccccttggtgctgaatttattcaccatacccaagttttcattttccccacgtatctcctgtgccaggtcatc

SEQ ID NO: 3328 - DNA, 120 bp, synthetic construct
  source 1..120: mol_type = other DNA
ggagggatatggcaggagagaaaagtctaggatcatgtttgagtataacaaaataaggtctacggtttcaaaaatccaccttttataaagggtatagttgattccatcctcctggtgtac

SEQ ID NO: 3329 - DNA, 120 bp, synthetic construct
  source 1..120: mol_type = other DNA
gttcctattaaacttcaactactaaagcggctgcattcccagatgtccagtctgataaacaatgcggatgcatccctaatccctttttcctagattatcgcctttattaaacttcagact

SEQ ID NO: 3330 - DNA, 120 bp, synthetic construct
  source 1..120: mol_type = other DNA
aggaacttgaggattcttttgtgggtaagtatataaagtgcattcccactgatagggtcaataacgggcaatctgtggattttatttttgatcaaggagtatacagcatcgaagaggctg

SEQ ID NO: 3331 - DNA, 120 bp, synthetic construct
  source 1..120: mol_type = other DNA
atttagtgattttatttgaaagacgatgaaacctaaatccttagaaaagcaaacagatacatcgtattggcaagagagcaaaggctgtagcagcaagctctctgcattggtgagtgggca

SEQ ID NO: 3332 - DNA, 120 bp, synthetic construct
  source 1..120: mol_type = other DNA
acaatgtgacagtaagtgtttataaaatcaggaaaaacaaagaaatctgataaaagagcaataccagcagaggtcactagaatgctaccaggttcaccttactctcaagaaatgaagcaa

SEQ ID NO: 3333 - DNA, 120 bp, synthetic construct
  source 1..120: mol_type = other DNA
gtaaacatacttaaaccttggtctatcagtacttgtacagtagaactggacaagaagctggtgttacacaatcactgcacaacagactgtacagatcccatgccaaatttgtttagcttg

SEQ ID NO: 3334 - DNA, 120 bp, synthetic construct
  source 1..120: mol_type = other DNA
cacattcctggccctaggataaggccttgcctgctgaaggtgtcctatacatgtctataaacagaagggacaatacttatattgttcagctttagtacagtagcatactatcaaaattaa

SEQ ID NO: 3335 - DNA, 120 bp, synthetic construct
  source 1..120: mol_type = other DNA
atatgggatttgctgcatttcacagaaatctatctattcaaaaatcacactcatgctgattttgctagttcaaaagcagagatatgaccactataaggaaagcccgtgttcacttgcatt

SEQ ID NO: 3336 - DNA, 120 bp, synthetic construct
  source 1..120: mol_type = other DNA
ttctgctttaaaatcacaaagtacatataattcttgttctgcaattgctggggtaactgaattaagctctaccacctcaacaggcccgcagagataagcaaaacttacagaacgtctagc

SEQ ID NO: 3337 - DNA, 120 bp, synthetic construct
  source 1..120: mol_type = other DNA
cgatggcatttagatagctgtaagttacacaacagttttaacagtataacaatggtctggcagagacatcagtcatgtttacagcatctaatttgccctgtcaaaaaggtgtgcactagc

SEQ ID NO: 3338 - DNA, 120 bp, synthetic construct
  source 1..120: mol_type = other DNA
gcgctgctcggacaccgttggctaccaaagcaaagaaggcctttttaacctgaagaaaaagaggagaaacaaaacatactttcaaagtccaggaagaaaaataccttttttttttgagac

SEQ ID NO: 3339 - DNA, 120 bp, synthetic construct
  source 1..120: mol_type = other DNA
aaagttgcagctcctaatacaagggctattataaaaccactggtggcaccaaacactgagaaaatattttttctaacacagctagtgtcaagaatcacaaagtattcatattgcttgtgc

SEQ ID NO: 3340 - DNA, 120 bp, synthetic construct
  source 1..120: mol_type = other DNA
tcctttattgtgatatattttgccttatgtggaactgctcatgcatgtacctagttcacctacacaagaatatagggactactggtgcgttgagggagctcatcaattatttcacgcatt

SEQ ID NO: 3341 - DNA, 120 bp, synthetic construct
  source 1..120: mol_type = other DNA
ctattgaaaacctatgccagaaagttctgagtttggcataatgaaacagttgaaaacaactatccaagttgtacaaaagacaggaaacactatttgagggccctggagtgcatcaacacg

SEQ ID NO: 3342 - DNA, 120 bp, synthetic construct
  source 1..120: mol_type = other DNA
agaaccgtaggagggaacaaagagcacaggagagggcagagatgtaggtgaacataaatcaatactgcataaagccagagtaatgatatcctgtgggattcataacttatatagaagcaa

SEQ ID NO: 3343 - DNA, 120 bp, synthetic construct
  source 1..120: mol_type = other DNA
tccttcagtggacacatttctagaagcttctggcagagactattgtatccagcttcaagacataaatgactgagcacagtggacatctacacacaaaaatctctggtcaaatagtgtaat

SEQ ID NO: 3344 - DNA, 120 bp, synthetic construct
  source 1..120: mol_type = other DNA
aggtttatagagagaaaagccccagtgaagcagcagttcaatggcaaagagaacgttaagaatttaacgtgcaaagtggtatctcttctgcaacagaagataaaacaaccaaggctcacg

SEQ ID NO: 3345 - DNA, 120 bp, synthetic construct
  source 1..120: mol_type = other DNA
gacggcacagggtgttccaattaaccaataaacaggatacaaagaggactaacacaatctagttctaatttgcaggaagaaaccgctcagggatcttgagtacctttgaaaatttctttc

SEQ ID NO: 3346 - DNA, 120 bp, synthetic construct
  source 1..120: mol_type = other DNA
aaattgaaaaaacaatgggaaaagaatattaaagatcaactcgggggtctcagagctgctcactgaagttccggagaaaagcaagcactgggaagaaaatgattgaggaaagaatgcaag

SEQ ID NO: 3347 - DNA, 120 bp, synthetic construct
  source 1..120: mol_type = other DNA
cttgccattctccctccctgttctcagcccgttttcatctttttagaatattcacatgctctcatctcttctgtccttgatgccatatcaagtgatcctatgtataaattttgcctactg

SEQ ID NO: 3348 - DNA, 120 bp, synthetic construct
  source 1..120: mol_type = other DNA
atgagatgtggttcatgctgacaggtgctctccgcaactattgtgggctttagtttcctcgaatcactattactttacctcttccactttgaagatcattttccttgataatgaacaaag

SEQ ID NO: 3349 - DNA, 120 bp, synthetic construct
  source 1..120: mol_type = other DNA
atatccataaatccatactgaaatagatgactgaataaacaaacagatggagaagggacaaatctcccttgcagaaaaatcccaactaactcacgtagctgctcagccctcacggaggtg

SEQ ID NO: 3350 - DNA, 120 bp, synthetic construct
  source 1..120: mol_type = other DNA
cctaatgcttccccccaccaatcctagggtgtgaggattccattatgaagttttatttatttttgggcctctcataattctcgaggtgtcatcttttggaatcactaactgatgtggttt

SEQ ID NO: 3351 - DNA, 120 bp, synthetic construct
  source 1..120: mol_type = other DNA
ccagctgatgctgaagctgctagtctgggaatcagactttgagaacactgccttagaggtctttatttgtcctttcagttaccagttaatttagatccagttaacatttgcttatgttct

SEQ ID NO: 3352 - DNA, 120 bp, synthetic construct
  source 1..120: mol_type = other DNA
gctgcagaaaccgaagaagtatgtatgggaataggtgctagtaacgttaggacaaagacgagaaatttaacactagtttggtgggactgattgctatgagtggtcttatgagaaattgtt

SEQ ID NO: 3353 - DNA, 120 bp, synthetic construct
  source 1..120: mol_type = other DNA
cttctgtgtggccttaggacccagcaaggttgatattaggggtgctgtaggaagcctccaccaaaaggaaatttacagagcagacattgagggttttgagggaagattaaccccaaaaca

SEQ ID NO: 3354 - DNA, 120 bp, synthetic construct
  source 1..120: mol_type = other DNA
tccctagagcagttacggctctgatgacgtcgtatcctcagagtaacgtggtcattttgagtactgttctgcagcttactttttcttttcctaatcaatgaatcaatgaatatactcttg

SEQ ID NO: 3355 - DNA, 120 bp, synthetic construct
  source 1..120: mol_type = other DNA
tttttaagttggtagaaatgccggtggtcagaaaatctggtattttaaaaagtaaaccttctgggggatgggcgtgaggctgaaataggttgagccagtagttcctttattttgggaatt

SEQ ID NO: 3356 - DNA, 120 bp, synthetic construct
  source 1..120: mol_type = other DNA
tcatgcttcctcctgggagtgcatccttcataaacccatgaattcttggtttagcatttacttctgaggaactcgactgaggacaatcctacttggaaaatatttatgtagaaacaatac

SEQ ID NO: 3357 - DNA, 120 bp, synthetic construct
  source 1..120: mol_type = other DNA
taaagaattccctcaatcggatgaagagcatatacgtaaacctatcactaacagacttaatggtaaaatacgaaatgttttcccagtatgatcaagggccaggcaaggatgctcactctc

SEQ ID NO: 3358 - DNA, 120 bp, synthetic construct
  source 1..120: mol_type = other DNA
aactcaggaggtgaaagacctctagagtgaaaactataaaacactgatgaaagaattgaagcagaccaggtgtggtagcacgcgcctgtaatcctagcactttgggaggctgaggcaggc

SEQ ID NO: 3359 - DNA, 120 bp, synthetic construct
  source 1..120: mol_type = other DNA
ggaacaaaagcaaaaatggacaaatgggattatatcaaactaaaaagcttctatcctgcaaaggaaataatcaacagagtgaagagacaacctacagaatgagagaaaatatttgcaaac

SEQ ID NO: 3360 - DNA, 120 bp, synthetic construct
  source 1..120: mol_type = other DNA
actcattgttagcagacagaaatttaaaaaaattttaaaggtactatttacataaatgctgtatggaaatacggacttacacagggaacagagagcactgaaaatggtaacaatgtggac

SEQ ID NO: 3361 - DNA, 120 bp, synthetic construct
  source 1..120: mol_type = other DNA
aatttaaacaaaaataatgacaatgtattgtggggttgatagcacactgataaggaaaaggcaacaccgtccaaccaatcatggaaatctaggagtcacccttgccaatgtcctcttgtc

SEQ ID NO: 3362 - DNA, 120 bp, synthetic construct
  source 1..120: mol_type = other DNA
gaccactctcaagtctattttcattctgacctctctttgggatattacaatttataatgcagagttttgtcactgcaactgcctcctggatatttctctctcaaatgtctccctcctgat

SEQ ID NO: 3363 - DNA, 120 bp, synthetic construct
  source 1..120: mol_type = other DNA
agtctataaatatttattgcatattgtctagtgtgcattcctcccaaagctgatcctgagaccatggaaagttaggggaggaaaaattcaaaagaaagggtgcccagtaagcaggttata

SEQ ID NO: 3364 - DNA, 120 bp, synthetic construct
  source 1..120: mol_type = other DNA
tcatgcctactgagtgtggaattggcgcaaaacaaaagccaaagatcagggcagtcaagcatacattcagccagtatttaagttacaaattgcctgccaaatctaacatcctaaaattca

SEQ ID NO: 3365 - DNA, 120 bp, synthetic construct
  source 1..120: mol_type = other DNA
tatccagggtgcctaaaatcaacgtgactcatcaccttaatcacctgagtgaagtcatatttgtcaggtttctccaagtagaggtactctttccctcctcctttatgtactgtaatcttt

SEQ ID NO: 3366 - DNA, 120 bp, synthetic construct
  source 1..120: mol_type = other DNA
acacatacacacacaccccaacaatgtattaacaaaagtctccacattattcagatttccttattttttccttaatgccctgtgtctgtctcacgatcccgtccaggattccacatgatg

SEQ ID NO: 3367 - DNA, 120 bp, synthetic construct
  source 1..120: mol_type = other DNA
taaaaccagttaaaaataattttaaaaacaaaaataaaatttataataaaatttctttaaaaaatttttttaaattaaattttatggctgggtgcagtggctcacgcctgtaatcccagc

SEQ ID NO: 3368 - DNA, 120 bp, synthetic construct
  source 1..120: mol_type = other DNA
acgattataggtggcaccatctgtgttagttacattatggtgaagtctcacattgtacttggaggaagaaataaattgaaacagagtgaaaatgagtgtaatttggagttatacaacaac

SEQ ID NO: 3369 - DNA, 120 bp, synthetic construct
  source 1..120: mol_type = other DNA
atataccctgtatcattcaaggttctagaactcgaactctaacctacctttccagcctcatctcctatcacatcccctaggaatctcatctctaggatcatttcaacatatccttttcaa

SEQ ID NO: 3370 - DNA, 120 bp, synthetic construct
  source 1..120: mol_type = other DNA
tttgagaggggcaagtacggatctgagatgactatattgtgttcctgacctcagagaggaaatgtcagcaaatgaagcacgcaggtttaaaagaacactggtgaatctagatttaataac

SEQ ID NO: 3371 - DNA, 120 bp, synthetic construct
  source 1..120: mol_type = other DNA
aggatagtgactcaaaatggatttcaacgtgtcctatttataaaaataacaactgctaaaataatccactactaaccagacagttaccatcaatctgcccgtcccaggttctctccccac

SEQ ID NO: 3372 - DNA, 120 bp, synthetic construct
  source 1..120: mol_type = other DNA
gacagagcgagtcttcatttcaaaacaaacaaacaaacattttagtgtgggctgggcgcggtggcttacggctgtaatcccagcactttgggagaccgaggcaggcggatcacgaggtca

SEQ ID NO: 3373 - DNA, 120 bp, synthetic construct
  source 1..120: mol_type = other DNA
tgtaaccatcagtcttctagggacttggtgattcaagtgaaataaatcagtaagtgatgaggaaactgaaatatcaattaagtggtaaagagatggaggccaggttagtgagcacagact

SEQ ID NO: 3374 - DNA, 120 bp, synthetic construct
  source 1..120: mol_type = other DNA
gtcccttcttgcagggtgttcctagtttaatccttatctgtacttgtgaaatggaaggtttatgccttgctagagagcttttaggtataaggcttgtcaactctaaaatcacactgcaga

SEQ ID NO: 3375 - DNA, 120 bp, synthetic construct
  source 1..120: mol_type = other DNA
agctacctgcggcactctaagactgggcagatggaagaaagacagttggggttgacgcagtatcttctacaataacgcctgaaataacttaaactttgttttcagaaattattatttgta

SEQ ID NO: 3376 - DNA, 120 bp, synthetic construct
  source 1..120: mol_type = other DNA
atgtgctctgtactactttatcctggaggtgaccagaagccacacaggggctcacacaggaggctgaaaaaatcagggctgcgtggacgctcagtcagaggagaaaagaggcagagcagt

SEQ ID NO: 3377 - DNA, 120 bp, synthetic construct
  source 1..120: mol_type = other DNA
ccgtgtggatccagagggaacctcgagacagaagccgtgtggatccagagggaacccccagagaggagctgtgcagatccagagagaaccccgagaaaggagctgttttttgttcctgca

SEQ ID NO: 3378 - DNA, 120 bp, synthetic construct
  source 1..120: mol_type = other DNA
acctgataccaagttaaacccctctctcttttatcacgaccactgactattatattttaaaacacatattcaagggaaaatagtggataggaagcaggactggaatgcagctcccactca

SEQ ID NO: 3379 - DNA, 120 bp, synthetic construct
  source 1..120: mol_type = other DNA
gaagtgggtgagggtgttgatgaaacaaggctgtctcaggaattgatgcattgaaggtggatggtggctatttggaatgcattgaaccattctctctaccatttcatatgtttggaaatt

SEQ ID NO: 3380 - DNA, 120 bp, synthetic construct
  source 1..120: mol_type = other DNA
ggtggtgggtgcctgtaatcccagctactcaggagcctgaggcaggagaatcgcttgaaccgaggaggcggaggctgcagtcagccgagatcatgccactgcactctagcctgggcaata

SEQ ID NO: 3381 - DNA, 120 bp, synthetic construct
  source 1..120: mol_type = other DNA
aaatggttttgcatagaattctaggaactattaatacataattaaagcatctaccacagccaatgattcctttctcagggaagaaaacccagtgatgaagctggagaacggtgatggcca

SEQ ID NO: 3382 - DNA, 120 bp, synthetic construct
  source 1..120: mol_type = other DNA
acctgcaccaggaattatacagctgctgcccccgctggctgtcatgaggtatacttttagctacttaaagaagtttcctcatatccctggtttattaacgatttttaaaaaggaacatat

SEQ ID NO: 3383 - DNA, 120 bp, synthetic construct
  source 1..120: mol_type = other DNA
aagactgatcgcttgttttcttctttgtgtgctatcttcctctggctttgatttcaagatcaagctagccttacggaaggagctgggaagtgctccatattttcctatgttctaaaataa

SEQ ID NO: 3384 - DNA, 120 bp, synthetic construct
  source 1..120: mol_type = other DNA
atctttctgttgtgcgtcctctgacagtttctactatggcgtgccattgtttttacactgtgtgacagcactgacaagaattactactgcaaatcaaaacacaaaaaaaccattggcaga

SEQ ID NO: 3385 - DNA, 120 bp, synthetic construct
  source 1..120: mol_type = other DNA
ggttggggacccctgctctagtggatatcatgcccatgttatttaatccacatataatcctcctggctaggtactattattatttccaagttacatatgaagaaaccaaagctttaagaa

SEQ ID NO: 3386 - DNA, 120 bp, synthetic construct
  source 1..120: mol_type = other DNA
ggcagcatattaaacagattaaaaagtgactaaaatttagccaaaaggttcccagactagttcccttcccccaaaatcgctcttcccttttcatatcagagatgaacctggctctgttcc

SEQ ID NO: 3387 - DNA, 120 bp, synthetic construct
  source 1..120: mol_type = other DNA
tgacaaatgtttactgaaaaccaagtttcactcatcccagtggcctcaagacctggcaaatattaagatttcagtctccatcctcacagagcttacaatgtaatggcaaataaatgggag

SEQ ID NO: 3388 - DNA, 120 bp, synthetic construct
  source 1..120: mol_type = other DNA
cttcagagatactgaaatgtgtacctagaccctacagaatagggcaatatgttacatatggcgccagctccagaggaacaactttaattacagggatttcatacaattgtaactactcat

SEQ ID NO: 3389 - DNA, 120 bp, synthetic construct
  source 1..120: mol_type = other DNA
tttatttgtaaagagtgattattggttgctttggggtctgatttttaagcgagagagaaaaagcaaaagatcaccaagtgccggccccctggttttatagagaaaactcttaacgacagc

SEQ ID NO: 3390 - DNA, 120 bp, synthetic construct
  source 1..120: mol_type = other DNA
aaaagcattcatgagttgtgtttaggtgcttacaaagtactttgtgcttggtcctggccagtaagttagttcaaggcagttaatatagataaacacaaacacagcaaagacgtggtcggt

SEQ ID NO: 3391 - DNA, 120 bp, synthetic construct
  source 1..120: mol_type = other DNA
cataacccaggccaaagacgacccaactaggcagggtagaactcaatctttcttcctaacctcaccagtgcttccaagatgtttctaacaaatatagtatcagttataacttattaggaa

SEQ ID NO: 3392 - DNA, 120 bp, synthetic construct
  source 1..120: mol_type = other DNA
tctgcctccttaagaatctagaaaagtttgacagggttattcgtgggattcggtgtgctttaaaggaatgacagcaatatagataaaaatagatgggtgaagaggggaaattcctctctt

SEQ ID NO: 3393 - DNA, 120 bp, synthetic construct
  source 1..120: mol_type = other DNA
gttctttcccgactctgagctcatcacatttcattttacatattaattttgcgtaagagcaagctcatcccgttcaaatgttaacagcttcaaaataagatcctggtgaaagctcgtcac

SEQ ID NO: 3394 - DNA, 120 bp, synthetic construct
  source 1..120: mol_type = other DNA
gcaggggacgcgggcagcgggggccgggggcggagcgggagcgctgcccccacccgcccgaggccgccgccgccgccgcaggtggcgcggccgcggcccgcgtgcccctccgcgagtggg

SEQ ID NO: 3395 - DNA, 120 bp, synthetic construct
  source 1..120: mol_type = other DNA
ggggagagaaaaagaaaacaaaactaagatgtttcatggtaaaaagctacagcagataccatacttcatagtgaaagactgttttccctatgaagttcagaaaccaggccagggtgtctg

SEQ ID NO: 3396 - DNA, 120 bp, synthetic construct
  source 1..120: mol_type = other DNA
caaaccccaacctaagccttgcgttttacacaaaaattagctcacattggatcgtgaacttaaaactatgaaactttttggagaaaatatttgggaactggggcaaggcaaaagttagac

SEQ ID NO: 3397 - DNA, 120 bp, synthetic construct
  source 1..120: mol_type = other DNA
tgaatattcatagcagcttttttgcaacagtgcaaacgaaataacagatgtcgttcaatggatgaatggtgaagcgggctgtggtaggtccatctataccgtaaaatactactcagcaag

SEQ ID NO: 3398 - DNA, 120 bp, synthetic construct
  source 1..120: mol_type = other DNA
ctcacccatttaaagtgtgcagcccagtgatttttggaatattcagaattgtgcaactatctaagtttacattttcatcatcccaaagagacagcttgtacccattagcagtcacgtccc

SEQ ID NO: 3399 - DNA, 120 bp, synthetic construct
  source 1..120: mol_type = other DNA
gggcaacaaatggcagtatgtacgtcaggaggaccgcaaaagtggttcacagactgaaaagacctataaaccatcactacagaagttggtagagagtagaaattctaacaattaatgttt

SEQ ID NO: 3400 - DNA, 120 bp, synthetic construct
  source 1..120: mol_type = other DNA
tctagtgtggtgggagggaacagagggacccaagttggactttatggagagaatgcctgagaaacatggagccatcacaagtgtgacttcttggttggtaaaaaatgctaaattattatc

SEQ ID NO: 3401 - DNA, 120 bp, synthetic construct
  source 1..120: mol_type = other DNA
acactgccatcatctccactggagttttctacaccaacgcagatgcacttcatctaaaactgtgccccagtcctctgggtcttgccgtcttggtttcttttgagacaacccacttgtctc

SEQ ID NO: 3402 - DNA, 120 bp, synthetic construct
  source 1..120: mol_type = other DNA
aagggtttctgagcattctggcctccttgtttcttcctcctttccttggccagttcttactatttttaaagattcagatcaatctttctctgaaagcctttcccgattcttttctttcag

SEQ ID NO: 3403 - DNA, 120 bp, synthetic construct
  source 1..120: mol_type = other DNA
attaacattttgaaggaaaaaaagtgactgtgccaagaaatgatggcagggtagtttttattgtaatagattctatctgaggaccaaagttcgctggcagtatgagatcctggcatggat

SEQ ID NO: 3404 - DNA, 120 bp, synthetic construct
  source 1..120: mol_type = other DNA
acccgggcaacaaactgagaccaccccactccccaaaaagaagtgtattaattctgctgattgcttttaatcaatatatttggagagaaggttttgttcattttgacagctttctgaata

SEQ ID NO: 3405 - DNA, 120 bp, synthetic construct
  source 1..120: mol_type = other DNA
gcagccaagtcacaaactttgaaatatgttgtatttatattagaatgcaatgtacagaatgatatagtgtcacaaggcagtctctgttttctattctctgctccctcccctgcaactgac

SEQ ID NO: 3406 - DNA, 120 bp, synthetic construct
  source 1..120: mol_type = other DNA
ataaatgttaaagagaaaattaaaaaaataaaatatagagaaaatttttttatcactccaaaagtttgctcatgctcctttgtggttcaccccttcttcaaggcaaccactgatctactt

SEQ ID NO: 3407 - DNA, 120 bp, synthetic construct
  source 1..120: mol_type = other DNA
ttacttctagccaacagtattcagcacaggtgatgggacaccacttccattattaagcttctgtctatatacataagactgtggcttgtctttctagcagatcactatcttgctggcttt

SEQ ID NO: 3408 - DNA, 120 bp, synthetic construct
  source 1..120: mol_type = other DNA
ggcaagggttgaggttcatattttccatactgaaatccaattgttccacattgcttgttgaaaagattttgctgcctcactggattcccttggtacctttatttaaaatcaattgaccat

SEQ ID NO: 3409 - DNA, 120 bp, synthetic construct
  source 1..120: mol_type = other DNA
aacagcctaggtaacatttgggtattcaatgagatacaggcccggccctcagaaggttatattctaattaggtgacagttataattggggaaatcagatttctgcatatgtcacactgta

SEQ ID NO: 3410 - DNA, 120 bp, synthetic construct
  source 1..120: mol_type = other DNA
cagctatgcctcccaaactttggacaggtgtcattctatcatatccccatacaacctacacagttatttaaattgacttaaacccccaagtcttcccttaggcaacaattccatgaaatc

SEQ ID NO: 3411 - DNA, 120 bp, synthetic construct
  source 1..120: mol_type = other DNA
tgggatatgagttaaaggaatgttcttgtcactaaatgtgctcaaatttcccttcacccgaagagcaagtagccagtgtctgtactaagttagacctgagggaaggaatgattattttat

SEQ ID NO: 3412 - DNA, 120 bp, synthetic construct
  source 1..120: mol_type = other DNA
tagaagaaaaatggtaatggttaatgatttttctgctgagaagtgggcaattacgcaaactttacctctagggaatggtttgcatgttaagattggaaccagagcaggggaaggggttat

SEQ ID NO: 3413 - DNA, 120 bp, synthetic construct
  source 1..120: mol_type = other DNA
ccacgatgagcttgacaatttccccatacttagagatttctctggggagattagtggtgttattaagaaatgctttttagttattgtgtaacaaaatgtgttcctatttggaagatctgc

SEQ ID NO: 3414 - DNA, 120 bp, synthetic construct
  source 1..120: mol_type = other DNA
aacatatggcaacagaccgggtgctgaagcagatctgagaattccaccgaattcttctaacccagacatgaaaaagctttgcagcaatgtaaaaggagttctttttcacaaagatggatt

SEQ ID NO: 3415 - DNA, 120 bp, synthetic construct
  source 1..120: mol_type = other DNA
tgatttgataactactgaactgccgtacagcaagacctcaagctcagaaataactcaggcgctaatgaaagttaaaggaaatatccctttcctccttttctctgaacttaatgccctaga

SEQ ID NO: 3416 - DNA, 120 bp, synthetic construct
  source 1..120: mol_type = other DNA
ttttgaaatagtcatacagtgttcattggctgatcatagatatgccaaccaggaaagcctttcttccatttaactttgtcttcaaagaaacgtgtctacaggatgtcccatggtgaagga

SEQ ID NO: 3417 - DNA, 120 bp, synthetic construct
  source 1..120: mol_type = other DNA
ttacttgttatttcttgggtattctttcagaaagaaacagcaatagttttgtattcttgaaggacaccacatcagagaaatgaaagggtacgccatctctggacagccctacactgccat

SEQ ID NO: 3418 - DNA, 120 bp, synthetic construct
  source 1..120: mol_type = other DNA
gccagcacttagtaagagctcagtaaattattatcacaccccacatagcctacactttgagtcaggccatctcaaacatactacccaaatctggtgaaaattcatttagttatttctctg

SEQ ID NO: 3419 - DNA, 120 bp, synthetic construct
  source 1..120: mol_type = other DNA
aatattctcaaagtcaaattgtgtgaccatagtgtatataaaatgaagacagcaaacatcgcctatggaagaagacataggttgggctcaaagcttgcacctttcctctctcggtagttc

SEQ ID NO: 3420 - DNA, 120 bp, synthetic construct
  source 1..120: mol_type = other DNA
cataaataaataaataaataaataaataaataaataaataagaataatagggctgggtgcagtggctcatgcatgtaatcccagcactttgggaggctgaggcgggcggatcatgaggtc

SEQ ID NO: 3421 - DNA, 120 bp, synthetic construct
  source 1..120: mol_type = other DNA
aaatttgtgtttgttttatccaggccatagattcctgctctactgctctttttgcctcctgcttctgtttctcagaaaaatagaaaattgactttgctttgttcaggggagtccatggca

SEQ ID NO: 3422 - DNA, 120 bp, synthetic construct
  source 1..120: mol_type = other DNA
ttaattgttagacataataaaagtgaaagggcagattcaagtccaggaacgtggacagatcttaagaaggaaaatctcctttctttcaatctcccagcttctcaaacccgtagctgagtc

SEQ ID NO: 3423 - DNA, 120 bp, synthetic construct
  source 1..120: mol_type = other DNA
ctccagatgtatgtgttttgaaaaatcaaatgcaaagtaagtaatggcttaatcagaccgaaccaccataattgaatagcctgaccaattcgtgaaagaactagccatgggcctttcact

SEQ ID NO: 3424 - DNA, 120 bp, synthetic construct
  source 1..120: mol_type = other DNA
cagagtcttgatttggttgacttaaggcatgggaaataaaatggacaaagagaatcattttcctaacctctgcttctccacatcagacttctaaatccacgtccgtgccatttctatttg

SEQ ID NO: 3425 - DNA, 120 bp, synthetic construct
  source 1..120: mol_type = other DNA
tccaccttcactttatgttactccaaatctcctcaatcagcccaaaagcagagtgtgtaattctataacgctctgaaggcaaggagtataatcttcaagtcctaactctgctggattatt

SEQ ID NO: 3426 - DNA, 120 bp, synthetic construct
  source 1..120: mol_type = other DNA
attggatgttccaacaagcaactggctagcagtataaagggaagctctggcacagattagtcacagattggcaaactttctgaaaaaagcccagatagaaatatttcggctttgtgagcc

SEQ ID NO: 3427 - DNA, 120 bp, synthetic construct
  source 1..120: mol_type = other DNA
tacactactggacatttccatttttcaccctacacttgcatccctgtgaccaaaatgatgctaatccaaggccatgcaatctgtgcatctgtaggagtaggtatttcatctgttagtttt

SEQ ID NO: 3428 - DNA, 120 bp, synthetic construct
  source 1..120: mol_type = other DNA
ctgaatggcaaaagacagtccatttttaaaaacaacccaaagctcttgagtttattatccatggctcaattcactgagctatgctacctcccctcacaccggatgaaacaagtattagtt

SEQ ID NO: 3429 - DNA, 120 bp, synthetic construct
  source 1..120: mol_type = other DNA
catgataaacatcctgcacaccaatctcttcttagagtttgtatctgaggggatgcaaaccgcaacaatctactttacaggaagattattctcagagctgtcaaccatctaaaaatagcc

SEQ ID NO: 3430 - DNA, 120 bp, synthetic construct
  source 1..120: mol_type = other DNA
attaaacagacaagactcaaatctgctggatacatgaatcagctggcaaaagaagagcatagagaattcagactatagaatatgtcctcgattcattttaatgggctctggtgcacccag

SEQ ID NO: 3431 - DNA, 120 bp, synthetic construct
  source 1..120: mol_type = other DNA
taaatcaaaagtgaattcctaggagaaaaagatggggagcatgggagtgactgctgtggaaggaaattggaaaagcgctgatcatcctaacacctttgcagtagaagttttcaaaccaat

SEQ ID NO: 3432 - DNA, 120 bp, synthetic construct
  source 1..120: mol_type = other DNA
tccatccacttttccatggcaaaacctttggaatcacccctgatttgtctccttccccttcaattaatcaaccactaccttccaaattcctttcaattttaccttcaaaattgccctcta

SEQ ID NO: 3433 - DNA, 120 bp, synthetic construct
  source 1..120: mol_type = other DNA
cagggctcacatatttgtcatcctattacccatgctagcagttttaggcacataagttgcttaataggtatttgctgaataaatacatgataaaatgagtgctgttggccgcgcgtggtt

SEQ ID NO: 3434 - DNA, 120 bp, synthetic construct
  source 1..120: mol_type = other DNA
cttgaaatacaccctttcaaaatgtaagtggggagccttgggccatcagcctgattttcagaagctcaaatgacataaaaattggagtcttgaccagatcattcctctttttggtttatg

SEQ ID NO: 3435 - DNA, 120 bp, synthetic construct
  source 1..120: mol_type = other DNA
gtcaaaccactgtctcttcttaaatggggttattctaatccatgatccctagtcaaagcctaattttcttttctagaaggttctcccttccctctcccttaatgtaaacactgacagtac

SEQ ID NO: 3436 - DNA, 120 bp, synthetic construct
  source 1..120: mol_type = other DNA
cttgtattcttataagaaggaaattgggatgcaaagaaagacaaagggaagatggctatgtgagaacgggacagagactggagtaacactgtcacaagctgaagctggagaaggcaagga

SEQ ID NO: 3437 - DNA, 120 bp, synthetic construct
  source 1..120: mol_type = other DNA
actgtagtatcccaagcaaggtaaattcaaataaagctttcaatgaatgatttttaagaagctgaggggaaaaaaacctcctcctggtcatgtcccagatgttaccatttttcattttgt

SEQ ID NO: 3438 - DNA, 120 bp, synthetic construct
  source 1..120: mol_type = other DNA
ctggtgcccaaaacctcaaatggcaagaagccaaattattctgaatgttgaggaaaagctttaaaaaccaatttctagtctcttagaatcagctgtttccagaaacgcctcactatccac

SEQ ID NO: 3439 - DNA, 120 bp, synthetic construct
  source 1..120: mol_type = other DNA
ctcagtcggtggcactttgttataacagcctgaggagactgatgcaatgcatggattgtgttctaagagaagcagaatctggctttgggtctgatatctcaaatctctttttcttttttt

SEQ ID NO: 3440 - DNA, 120 bp, synthetic construct
  source 1..120: mol_type = other DNA
gtgtcaccaaactcataaagccttttcactgtcctgtatgttaccacttaatgacaaactgtttaacgttcaaaccaaacataaaagtatgtaagtcccctctccccaccaagatctacc

SEQ ID NO: 3441 - DNA, 120 bp, synthetic construct
  source 1..120: mol_type = other DNA
agaaaaaaaagaaaagtagaatattttcccccaaaggtcttgagaagaaaaccctgctttgaggtggggtggggaggaaggagagggaagaggaagagtgggaaggtcctgatgtggttt

SEQ ID NO: 3442 - DNA, 120 bp, synthetic construct
  source 1..120: mol_type = other DNA
atgacagggatcctcgttcctttcatctccaagatggagcggtaagtgaagaaagccaactgcagagccatctgtatcgaatgataccatttgtagttttgaaaaaaggaaagaaagtat

SEQ ID NO: 3443 - DNA, 120 bp, synthetic construct
  source 1..120: mol_type = other DNA
acattcttcagggatgaagcttagtcactgttgtgcaagggatgttcacagcccatgaaaactccttgctagttctttgggtacagaacgttcatctttcaagtaaacagtttaaagaga

SEQ ID NO: 3444 - DNA, 120 bp, synthetic construct
  source 1..120: mol_type = other DNA
ggaagggtagaccaacaaagaagtgacttctactcaggtttatgctattcaatcagtagagaaacaactgtcttatgagtcaggtaaggtgggtagtaagaatgattcctaagctttttt

SEQ ID NO: 3445 - DNA, 120 bp, synthetic construct
  source 1..120: mol_type = other DNA
tcagaagccccaagctctaggtctggttttaccactaagttgccatgggctctgggacaaatccaccccttgccttggtaaaaataaaccaggtagaccagatgcctatctggtgcaatc

SEQ ID NO: 3446 - DNA, 120 bp, synthetic construct
  source 1..120: mol_type = other DNA
gtgtgacacaagttcaggccaggcaggtgacccagaacccagcctctgatgtctgcttaggactctgttttctcaaggagcaaacccactgcttcaatgttttggccctttctcaggtgc

SEQ ID NO: 3447 - DNA, 120 bp, synthetic construct
  source 1..120: mol_type = other DNA
accaacacccctatcccatgctcagcttctctttgagaactgctgtggtagacaaatatttcagcttcagcacccctttacactcttgaaaaatagggtgtttaacatataatgagttta

SEQ ID NO: 3448 - DNA, 120 bp, synthetic construct
  source 1..120: mol_type = other DNA
ggtggttggacatgttttggaaccattcatttaatccaatctccctatttcacagataggaaacttctaaagtaattgttagttcccattctttatggtcatgtggtccgagtgcctcca

SEQ ID NO: 3449 - DNA, 120 bp, synthetic construct
  source 1..120: mol_type = other DNA
tacccaataacattctgcacctagttatgaaatagttggctctagcatatgggtatttacatgggaactaacaaaacaaaacagaaatggtggtgcaggggaaggaaaggagaatctcac

SEQ ID NO: 3450 - DNA, 120 bp, synthetic construct
  source 1..120: mol_type = other DNA
gcatgtctgaacatgttcttaggtcaggactagagttcgagatttcagaaatgtcattctaaccttgatctcttcgagatgcctgtttataacacagcatcgttcatgccaattgtctgg

SEQ ID NO: 3451 - DNA, 120 bp, synthetic construct
  source 1..120: mol_type = other DNA
aatgaagtggaaaatcagtgtgataaccaaatcaagatcacgcctcgctgggaccctgtcacactaaagcttccagagcatagtcgtttttaaaatctgtaatagtacctggagtttttt

SEQ ID NO: 3452 - DNA, 120 bp, synthetic construct
  source 1..120: mol_type = other DNA
aacaaaagtattggttgcatcctttcaaagacgatctggaatctcaaacctagggtttacctctgcccctcgatggcaacaacaattctgggagttcagggccatgataaaaaatgacag

SEQ ID NO: 3453 - DNA, 120 bp, synthetic construct
  source 1..120: mol_type = other DNA
tggggcctggtgcactgtcccagctcaagaaagatttgtggagcttgctttgtacatagtgctcaacaagtagacaaatctaactttaaatcttaagctctttaaaatacgccgttaaga

SEQ ID NO: 3454 - DNA, 120 bp, synthetic construct
  source 1..120: mol_type = other DNA
tacaacctagcgatgccactcttagaagatatgaaaccttgttcacacaaaatcctgaatgcaatgttttcagtggctctattcatagttgccccaaactggagacaattcaaacatcct

SEQ ID NO: 3455 - DNA, 120 bp, synthetic construct
  source 1..120: mol_type = other DNA
tcctgaggacaggggtctttggtatatctctgcatatccctgaaaggtgtggacaggtcaatgagtcttctctacagcggctcttggcacaggtccgaacatgcagaaagcctgatgatg

SEQ ID NO: 3456 - DNA, 120 bp, synthetic construct
  source 1..120: mol_type = other DNA
tccactctttttaaacatttatttttgattttgttaaaatgcacacaacctaaaattgaccatcttcaagcgcacagttcagcagcattaaccacactgctgtgcagcccccaccaccac

SEQ ID NO: 3457 - DNA, 120 bp, synthetic construct
  source 1..120: mol_type = other DNA
tctaagtcatggctcaaacctgtttcctcttatgtgaccataaaatcacaccgcctgtcaccttgatctttgggactcttctgtcttccttctgaataaagctacttgataaacacccat

SEQ ID NO: 3458 - DNA, 120 bp, synthetic construct
  source 1..120: mol_type = other DNA
tgttctatttcaccccaaccaaatacctcctcctcctcccttctccttattcgttaaaattcagcgcatgatactggcaagcttcagccgcagctcacagcactttcagaggaaaacgtg

SEQ ID NO: 3459 - DNA, 120 bp, synthetic construct
  source 1..120: mol_type = other DNA
tgaaaagtaggtttcagatccatcggaaggcagggtcaggccaaacctctcctctcaagtcagataaaaacgatcacaccagggaggagaggcctgaaaaggggcagctgaagggaaaaa

SEQ ID NO: 3460 - DNA, 120 bp, synthetic construct
  source 1..120: mol_type = other DNA
agacatcagagcccagaaaatgccacagaaatcgagcctctctccaccctgccttccaacctcatccacccagtggctcaaggctgccaggataaagaaggacgggtgtaacgggtcaag

SEQ ID NO: 3461 - DNA, 120 bp, synthetic construct
  source 1..120: mol_type = other DNA
cctacagaattgtgaactgaaatcaacctcctttcttcataatttgcccaaactcagatatttatagtgacacaaatggactaacacaatctcccaaaccaactccctgacccttgtcac

SEQ ID NO: 3462 - DNA, 120 bp, synthetic construct
  source 1..120: mol_type = other DNA
tgccaacattttgctgcatacaagattaatgaaatagttccactgaaatctggtgatggagttctcggcaatgtggtttttgtcctgtcatctcataggaaacaggtctttgaataagtc

SEQ ID NO: 3463 - DNA, 120 bp, synthetic construct
  source 1..120: mol_type = other DNA
gaacagaaacactaaattagccaccttctccctccagtctctacctgtgctgtccaagaggcagccactggcctcacatagctatttctttataaaattcaagttcagctccttagttgc

SEQ ID NO: 3464 - DNA, 120 bp, synthetic construct
  source 1..120: mol_type = other DNA
agttcgattggagggtggtgttctgcagaatgctttctaagaaagaagcaaaggttaaaagtttaattttcagaaaaagttgctggggtagcccagttgcatcttccacatcctttacat

SEQ ID NO: 3465 - DNA, 120 bp, synthetic construct
  source 1..120: mol_type = other DNA
ttaggatggaggcattcatagtcccaagaatcccaagttaaaatactctcaggagaaacaccaagtcctgttattggataataagactctagcatgaattaatgatcagagtgaaggcct

SEQ ID NO: 3466 - DNA, 120 bp, synthetic construct
  source 1..120: mol_type = other DNA
ggtcttattctttctaactaatcttcatgattctagcatcatatgttttgcctggctgtgtattttgtgacccagagctgcacattttgtattcttttgcttcaggcttctcttgctcag

SEQ ID NO: 3467 - DNA, 120 bp, synthetic construct
  source 1..120: mol_type = other DNA
caacgggaataaaacagccatgaacgaaatgaggtttctttggtgtgtcagatactatcttctataggagacaccactgaaattaccagccaaatgctgaacacatttttgacgattagc

SEQ ID NO: 3468 - DNA, 120 bp, synthetic construct
  source 1..120: mol_type = other DNA
tgagtcttgctcatcagggttaagatgaaacgacaggtatgtgaaaccatgttgtaccctgcaaagcatgttgaaaatgcttcccggagtaaaaggttaggtaacacaacttcagtgtga

SEQ ID NO: 3469 - DNA, 120 bp, synthetic construct
  source 1..120: mol_type = other DNA
tgatggtttttatagaatttcaagctgaaatcttctgactttcttccaaggaatgtattcaaaggaaagatgcaaacccattttggctgtctcccagactaggcgttagctgtggcagta

SEQ ID NO: 3470 - DNA, 120 bp, synthetic construct
  source 1..120: mol_type = other DNA
tccaaacctccaattgcttcttaccctaaactctccatgcagccagctactgtgaggtattgtgaaaggaaagtcggatgaatcttattatttcttttttggcttactagactctgaaag

SEQ ID NO: 3471 - DNA, 120 bp, synthetic construct
  source 1..120: mol_type = other DNA
gacactgtgacactgtcacagtgcatgacattgagtgacgtgtgtgacactgacacgtgatattgagtgatatgacattttatgatggtatgtgatattgtgacaatgaacaatgtgtga

SEQ ID NO: 3472 - DNA, 120 bp, synthetic construct
  source 1..120: mol_type = other DNA
actgagtgaagtgtgagacattgtgatattggatgtttcttacactgtgacacggagtgatgtgaagtgatatgtgtaacattgacagtgatgtgtgatgctgtgagtgatgtgtgacat

SEQ ID NO: 3473 - DNA, 120 bp, synthetic construct
  source 1..120: mol_type = other DNA
aagagtgctaggcttacaaagtactaacagtgctaggcatatggtaccagcagtactagccctagagtattgcgagtgctaggaatacagtactaacatgctagggttagagtactaaga

SEQ ID NO: 3474 - DNA, 120 bp, synthetic construct
  source 1..120: mol_type = other DNA
agttaagcaacctgtagatatttatcaaatgtgttgaaggaacgaggaagagaacaggctctccatcacagaagtgtttaaactacttgttagggttactctcggatatgcaggttcctg

SEQ ID NO: 3475 - DNA, 120 bp, synthetic construct
  source 1..120: mol_type = other DNA
gaagaaggaattctgagcctgacatcttagaaaatggatatgcagtttgcagatctacatccctcacactgtcttctgggaatggcgagaattgtggactttgtttccttttgctctgat

SEQ ID NO: 3476 - DNA, 120 bp, synthetic construct
  source 1..120: mol_type = other DNA
acgtatgcatcaaaatcacctacaagtcttatgaaaaatgcaaatttcctggatctcaccccagatcaaatatatcacaatttgggggttcaagtccaagaaccggcacatacccccaaa

SEQ ID NO: 3477 - DNA, 120 bp, synthetic construct
  source 1..120: mol_type = other DNA
caacagagcgagactccatctcaaaaaaataataaataagaaaaaataaataagaatatgtgatgttaaattctacccaattaaaagcaatttttttttttttttgagatggagtttcgc

SEQ ID NO: 3478 - DNA, 120 bp, synthetic construct
  source 1..120: mol_type = other DNA
tctctttgataagtgctggagatttgcctaatacaagtttaagaagtttaaacatttacaactatacacaaatcaggaagttcacaggctgatgtcagccccatgggtcagatgtggtgc

SEQ ID NO: 3479 - DNA, 120 bp, synthetic construct
  source 1..120: mol_type = other DNA
aggcttagacataatcaacctaagaatgggacttcatataaactcattctgcaaagaacggggaccagtgaaattagcagtcagtgttttgaattcctgaaaggaaacagcgtctgaaac

SEQ ID NO: 3480 - DNA, 120 bp, synthetic construct
  source 1..120: mol_type = other DNA
actatgcctgccaactgggatgaaaaagctttggatctggctaagtttctgtgaaccaggtaataaatctgttcttggtgtgctgaaaatagtggggtttttcagcctataaagttgatg

SEQ ID NO: 3481 - DNA, 120 bp, synthetic construct
  source 1..120: mol_type = other DNA
acaaacaaaaaaacccaggttttttttgcatcctggggactctgtgagctattcactgcttttaatacatttttgggatccactacaaccagccagaatgaatctctgggcccgtagctg

SEQ ID NO: 3482 - DNA, 120 bp, synthetic construct
  source 1..120: mol_type = other DNA
gaccacaaggaaaggtagtggaagcccagatggacacagagagaaagaacacagacttgctggtctgggacaagcattgttgttcaagccagttcgcgtttgagtttctgttacttccag

SEQ ID NO: 3483 - DNA, 120 bp, synthetic construct
  source 1..120: mol_type = other DNA
ggatggagagggatggagcggggtaataagggcagaaggaacagaaggagatggagcaggcagaggggatggagggaatggaggagaatgaagaacagaggggggtgaaaaaggacagac

SEQ ID NO: 3484 - DNA, 120 bp, synthetic construct
  source 1..120: mol_type = other DNA
gtgagcctgtaacccgtatttctcattagttggctctctcatttacccccagagacattctttacaatgcaggtgtagactcagatgtgaccaagactttgctatcttataaaaggggtt

SEQ ID NO: 3485 - DNA, 120 bp, synthetic construct
  source 1..120: mol_type = other DNA
aatgtcagtttagaatcagtgttctgtcacctccaataccctttccctaatgcccagttgccctggtaaaagccataagtccctttggggaagaacgggagagaggttaatagtatacat

SEQ ID NO: 3486 - DNA, 120 bp, synthetic construct
  source 1..120: mol_type = other DNA
ttccagctgatctactgttctgtgtaagagcaagtacttgtcataaatcctgcccttacggcaaatcaaccttgataaactccacggtaaatcctgcccttaggcatattcctacacctt

SEQ ID NO: 3487 - DNA, 120 bp, synthetic construct
  source 1..120: mol_type = other DNA
atattactcagccttaaaaaagagggggatcctgccacccgccacccacacacacgaaggacatctgtgtggacatgatgcttgagggaaacaggccagtcacaaacaaatactgtctga

SEQ ID NO: 3488 - DNA, 120 bp, synthetic construct
  source 1..120: mol_type = other DNA
ctttgattttctttgatttttctatcctagggatgaaggtgatctatttttagtgtagaggctggtataaggagttgctatagcgacagctggtggttacaaaccaggtcctgctacagt

SEQ ID NO: 3489 - DNA, 120 bp, synthetic construct
  source 1..120: mol_type = other DNA
tggggtgctggctacacaagggtgttcagtttgtgcaaattcgtcatctatgatctgtgctcttctccatatgcttacactttagcaaactttgccttaaacatttttagaagttagcac

SEQ ID NO: 3490 - DNA, 120 bp, synthetic construct
  source 1..120: mol_type = other DNA
acacacagcagcaccagagactgccttggccctcagggaacgttcatgttgatttacgctgagagcacctggactttgcctatttttttcttctcaatcgctaaaagacaaattattacc

SEQ ID NO: 3491 - DNA, 120 bp, synthetic construct
  source 1..120: mol_type = other DNA
attttaaaaatacacccccttttgaatctcctttctccctgcttcattatttaccccttcaggctctgaaatctttccctttcgtcttcggacactttcagacgctgcagtcctggaatt

SEQ ID NO: 3492 - DNA, 120 bp, synthetic construct
  source 1..120: mol_type = other DNA
tcagctgtgagtgatggaggacatggcaggtggtaatgcctacacaataatgggaatgcatacgtgaaatggtgaagatggtaaatttgtattatgtacatctgaccacaattaaaatcc

SEQ ID NO: 3493 - DNA, 120 bp, synthetic construct
  source 1..120: mol_type = other DNA
actgccctgtaattgcagagggtgaaagcgctactacagtcattgctctttgatctgattagcataatcctttcctaatcttccctctacatttttattattgttgccacataccctttg

SEQ ID NO: 3494 - DNA, 120 bp, synthetic construct
  source 1..120: mol_type = other DNA
ctaggtgggcttcctgtggagaggagggaggagaagtcaatgacagggatttcatgaccctcacagaagctttctcagggagaagaggcctcatctaagatttttgtttgtcttttgaga

SEQ ID NO: 3495 - DNA, 120 bp, synthetic construct
  source 1..120: mol_type = other DNA
agggtggttttctagacagtgatcgttcagctgggtcttgagaaatgggtaaggtttagacaggcacaggcttgggagggagggcttggtcaacactcttggactgtttttcctcactca

SEQ ID NO: 3496 - DNA, 120 bp, synthetic construct
  source 1..120: mol_type = other DNA
attctacagtagataagtgtttattactttattacttaaataaaagtcatctttttagaccgtgttagtgagtctcccgtctaggattccatccctcctctccctgctcagggctgggtg

SEQ ID NO: 3497 - DNA, 120 bp, synthetic construct
  source 1..120: mol_type = other DNA
tgattcttaataaatgaaatctgacatctaattttgagtgggcaggtcttaaccaggtgtggagctaagaaagctttggaatcgacctgtgtggctgcagacagacaagggcaaaaccca

SEQ ID NO: 3498 - DNA, 120 bp, synthetic construct
  source 1..120: mol_type = other DNA
cctctaaactgcatgtttcatttttaacagctgaaaacaacagtgcccatccactcttacttttcccctgagccacagtttttgcataaatgaatgacaatccaatccatcactagcctc

SEQ ID NO: 3499 - DNA, 120 bp, synthetic construct
  source 1..120: mol_type = other DNA
cttccccaagatcctgtcgccaatggtagaaccaggactggagttctaatctccttgactcctaagccaaaccgctgatcaagtaaaacctaaaacatttataatttgtatatgttttgc

SEQ ID NO: 3500 - DNA, 120 bp, synthetic construct
  source 1..120: mol_type = other DNA
ttgggttgggctgcttttcatgccttttctctcacctctttcatttacagagctcagtgccactggagttgttggcccagtcactgcagatgcctgatgagataaagatggctccacact

SEQ ID NO: 3501 - DNA, 120 bp, synthetic construct
  source 1..120: mol_type = other DNA
ctccggtgtagctggagctggttctagcatttcagatcccatcgactggtagagcaactgctcacgtgattggacctgacctattaaagatgtgtaagtgtgctcttcctgcctagggga

SEQ ID NO: 3502 - DNA, 120 bp, synthetic construct
  source 1..120: mol_type = other DNA
ctccctcatcactccccaaagaggggacttttctctcctttgaaagattttagctcttctattctatatgtgaatgtcgcccttaccacagagaagactgggaaccccaaaaagataggg

SEQ ID NO: 3503 - DNA, 120 bp, synthetic construct
  source 1..120: mol_type = other DNA
aacaagccgcgaaatctaccgccagctaggtcccctgatatactgatggattatttctgctgttaaatatggtagcccaaacttaactgtgattaaattctggaagtaggtaagtttagg

SEQ ID NO: 3504 - DNA, 120 bp, synthetic construct
  source 1..120: mol_type = other DNA
aaatggtcattcattcaacaggtagttattaaacctctagtaagcgtgcagggcagttgttgattgaagggatgaggtgctacaaataattcggagaaattcctgtcctctaagaaccat

SEQ ID NO: 3505 - DNA, 120 bp, synthetic construct
  source 1..120: mol_type = other DNA
ccctgctcagagttccttctaacagaatgcttttcacactcagaattcttttttaaagggaggggctgaaaaaggaaggaaagaatggctcccaaataggaaccgtattttctaatgtat

SEQ ID NO: 3506 - DNA, 120 bp, synthetic construct
  source 1..120: mol_type = other DNA
cctacctttgacaactcgaaaaagaaaacagtgtggaagaatactaccacaaggcatttcatactgttagcatgcttcattgttttctggcttttggtttaattttctccccagctagac

SEQ ID NO: 3507 - DNA, 120 bp, synthetic construct
  source 1..120: mol_type = other DNA
caattatatcaaaaccaaatttttgaaaagaccccaagctttccgtctcatcaaagccactttgcatgttatgtgaagctgcaaatagtctccttgaagctgtcactggggacccatatg

SEQ ID NO: 3508 - DNA, 120 bp, synthetic construct
  source 1..120: mol_type = other DNA
cacagagaagtactaaaaaggtgaaaaacgatagcaataattatttttagcatgccgaaatgcagcacccaaagagtaagaaatccctggatctccttaaaatctggaaggggcatcgca

SEQ ID NO: 3509 - DNA, 120 bp, synthetic construct
  source 1..120: mol_type = other DNA
gctcaaagccccagcatttcacgtcctgaatgaggaatgaagggattttctcagtaacaatttactctttttaaccacacatactaagaaaactttattcgcagcaaattgtgatggggc

SEQ ID NO: 3510 - DNA, 120 bp, synthetic construct
  source 1..120: mol_type = other DNA
taccacttgattgttcactctttcagattggctttatcccaaatgtcagatgttactacattcacggacatcactcacctcaaattcttttctgtttatagcatcactctcagtggggct

SEQ ID NO: 3511 - DNA, 120 bp, synthetic construct
  source 1..120: mol_type = other DNA
tagcagacaaaaatcagcaaggtacattctcaaaaactccctttggcaaaagctaaaataaaaataaaaaaggttgcaaaactccgtcatcagcagcggcaaggaggaaagaacatccgt

SEQ ID NO: 3512 - DNA, 120 bp, synthetic construct
  source 1..120: mol_type = other DNA
ggccaaaaggtacaagaaaagatgctaaactttactagggaactgcaaatcaaaacagcaatggtagaccacttcacatcctctaggacaaccacactgaaaaaaaaaaaaaaaaggaaa

SEQ ID NO: 3513 - DNA, 120 bp, synthetic construct
  source 1..120: mol_type = other DNA
ggaaaatatggattaattctacaatctggatttctaatgatgactaagtatgctcatgctattgtctaatggctattttcatgtcttttgaggattgcctaggcatgtcttttgccatac

SEQ ID NO: 3514 - DNA, 120 bp, synthetic construct
  source 1..120: mol_type = other DNA
ctagaagcaatgacaccccaggagtgacatgcacacgtaaacactatttgccactaaaagtgacaagggctctttagagcaatggctaattccagggctggggtgaggaatgtacaagat

SEQ ID NO: 3515 - DNA, 120 bp, synthetic construct
  source 1..120: mol_type = other DNA
atatcaatcctaaaactagcaagtgaaagtttgatgagaaagaagacatttacacaatcccaaagtaggtccccctgaagccctgactggtgacaagggggaaagtaagccctttattaa

SEQ ID NO: 3516 - DNA, 120 bp, synthetic construct
  source 1..120: mol_type = other DNA
aacacacagtgagagatcgtgagaaatgagatatgggcagatctggtgaaatgctaacatcgggcaatctgggtgaaaaggatatgagaactctttgtattatttttgtgactttatgtt

SEQ ID NO: 3517 - DNA, 120 bp, synthetic construct
  source 1..120: mol_type = other DNA
ggcagacttgggcaagccagagtcaatcttttttgtcgggtacagggtaaagctcacagtaattctggatcatggcaacatctggggacagacccagggccctttgtacaactcacaggg

SEQ ID NO: 3518 - DNA, 120 bp, synthetic construct
  source 1..120: mol_type = other DNA
tggccacctgcttttataaatacttattggaacacagctgcaccattagtttatactttgtctatggcttcgtagttgcaaaagagaccacgtggccttcgaagtctaagacatttacca

SEQ ID NO: 3519 - DNA, 120 bp, synthetic construct
  source 1..120: mol_type = other DNA
aaactctagtctggcgtctcagctctttcctcacctttataaccacgcagccacataatcagaactgtgacgtccgtgtattaaactccatctgcttttagtacggagagtaaccctctt

SEQ ID NO: 3520 - DNA, 120 bp, synthetic construct
  source 1..120: mol_type = other DNA
atcgaaaataaagtacctagtcagggtcaatattgcttcgtaaaagggcttttgttgatgtgttgtatgtgctggattatgccatcagatggatttgttactgtgggctgcagtcaaaac

SEQ ID NO: 3521 - DNA, 120 bp, synthetic construct
  source 1..120: mol_type = other DNA
tttttaaagagacaagaaggcaataggaagttatcacgagagaacacagactgcaaagagacttaaaataacagctatatttcagggctctggcagattgctcaaggcaaacagaatcca

SEQ ID NO: 3522 - DNA, 120 bp, synthetic construct
  source 1..120: mol_type = other DNA
cgacctactctctcacccagactttttctacgagtgaactcagatgtaaacagacattcagaaaataaaggtgaaaaggcatctaatattgaggccacattgtcttgaatgagggagaga

SEQ ID NO: 3523 - DNA, 120 bp, synthetic construct
  source 1..120: mol_type = other DNA
aaggagatgtgtcaggataaagttaggatggcttcgtggcatgaacagaaaaaaataactgaaaggaggctaagccacaaggatgcttatcacctacaataacgaacagttagtaggtag

SEQ ID NO: 3524 - DNA, 120 bp, synthetic construct
  source 1..120: mol_type = other DNA
caaactatccatgaaaactgctaacctctgagccttcaggtagactgacttgatttgatagataactgtcctgcatggcatgaccggactcatgtcagttaactctttctttactgtgac

SEQ ID NO: 3525 - DNA, 120 bp, synthetic construct
  source 1..120: mol_type = other DNA
gattgccatgtgttcagaattggactcaaaccccactgaagctcactgctaaacactgaggggtgggggacacaagagaggtccatctgcaaccctaagaagcatcctttacagagcaga

SEQ ID NO: 3526 - DNA, 120 bp, synthetic construct
  source 1..120: mol_type = other DNA
ggacagaacatgcagcctcactgctttcctccttgtgcgtctctacaggagttggtgtctaaaagggacaaaggcacactccaggtggagaggggcacaaatgaagttaaaaccaagtta

SEQ ID NO: 3527 - DNA, 120 bp, synthetic construct
  source 1..120: mol_type = other DNA
ggatgctttttcattttgctatttgtcctttaagctaacaaacactcaactccagctctgatttgctgacacctgagctgagggcctagggacctgctacccccgcccagtactttctga

SEQ ID NO: 3528 - DNA, 120 bp, synthetic construct
  source 1..120: mol_type = other DNA
tattttaaaactctatctaattgcacctgaaataaattcttcatcttgtctaattccccaattagccctggcctgataacttgattttcattcctgtgtgacccctggcactcctgaccc

SEQ ID NO: 3529 - DNA, 120 bp, synthetic construct
  source 1..120: mol_type = other DNA
aactcatctttctccaactctgtccgtacctacggcctgtgttgttccattcagcacatcaatcgtggagaaggcaggacatatccattccttgatagtcctatgtcatgggttgaattg

SEQ ID NO: 3530 - DNA, 120 bp, synthetic construct
  source 1..120: mol_type = other DNA
ttagatatcagtgcatgtgagtgaggctcaaagagtaccagctaattgttaaatcctgtggcaagtcactctgtgacgtgagtcattactcactgacttttttgaaaccaaatgtttctg

SEQ ID NO: 3531 - DNA, 120 bp, synthetic construct
  source 1..120: mol_type = other DNA
tgcagggagcaatgatgctatctggttttaccaaagggctgtgtcagctgtgctgggcaggcagctttctacagtgttttactgcatttaagagtcacaagaagaaactaacccaggcag

SEQ ID NO: 3532 - DNA, 120 bp, synthetic construct
  source 1..120: mol_type = other DNA
ggctcttaatctcctttgactgctgtcactttaagaaaagaaaaagagacagacacacacagaggaaggccacaggatgatgaaggcagaggctgaagttacgcatctacgagccaagga

SEQ ID NO: 3533 - DNA, 120 bp, synthetic construct
  source 1..120: mol_type = other DNA
actgtgggcttatgacctcacacatttaccattgcagaaattatgccaaagcatgatcaaattatctgcccacaatgtataggttgcttacaaaaataaccagccctcctctgttcctta

SEQ ID NO: 3534 - DNA, 120 bp, synthetic construct
  source 1..120: mol_type = other DNA
acgtttatattgttgttttgtttcattttctatttggagtgggaagctgtatggaagtggtcatcttgatgtcatcaatgataattgcctctgtcccttcacagtttctggacccggtcg

SEQ ID NO: 3535 - DNA, 120 bp, synthetic construct
  source 1..120: mol_type = other DNA
caatatagcaaagctctgagaatcaagcctgcaaactttgagagaaggcaagaaaggctgtggatatttatatcacaaacaaacatattttttgcaccttctagaaaggcctgacatccc

SEQ ID NO: 3536 - DNA, 120 bp, synthetic construct
  source 1..120: mol_type = other DNA
cttattattggcagttcatgaacacacagacatgcactttcctttcctcatctccaaaggcaagatcaccctaaaccaacttgcaaaatcttttgaagctaaagattcactgttctggaa

SEQ ID NO: 3537 - DNA, 120 bp, synthetic construct
  source 1..120: mol_type = other DNA
tacctgaggagcctgtcaacactttagattctatgtttgtcatgtaggccataaattataggacagaaagatgagatgcaaatagaacatgaggagaagtgggcattaccttgagacaga

SEQ ID NO: 3538 - DNA, 120 bp, synthetic construct
  source 1..120: mol_type = other DNA
ccccaaatccttccaacacattgtttgcttgttaaaaaagtggtcgtgtgaatataaaagaagagggacgaaaactggattcagaaaggctggaaatgtatcccttaatgccttttgtcc

SEQ ID NO: 3539 - DNA, 120 bp, synthetic construct
  source 1..120: mol_type = other DNA
ctgtaacaggctctgccttctccatagtacctgacaagccagaagagtgaacctggggattttctaccaaggacattgaagggccttggaaatactcaacagaaaaaggcagccgaaagg

SEQ ID NO: 3540 - DNA, 120 bp, synthetic construct
  source 1..120: mol_type = other DNA
gagtcctgctctcttagctgggtgctttaaagactccagtacctcccccctctctcttgctcccttgcgtgtgagctctgcataccccggctttccttcgccttcctccatgagtggaag

SEQ ID NO: 3541 - DNA, 120 bp, synthetic construct
  source 1..120: mol_type = other DNA
acccgcaacttctgttccacatctcgccaccgccccaaagctcaggtctgggagcttgacatttttttcaagatgtattcatttttaattaccaataagtgaagctagtctcaaaaaatt

SEQ ID NO: 3542 - DNA, 120 bp, synthetic construct
  source 1..120: mol_type = other DNA
ggcctgatttccttcctctgtacagcactttgatccctcatctctagacgatgtttatacaaggagatggggaaagaaaggggcaccttaaggctaaagtgcacaaacttaaaggaaatt

SEQ ID NO: 3543 - DNA, 120 bp, synthetic construct
  source 1..120: mol_type = other DNA
catattatcatcgacggcgctcaaatgaaaataccttatcctcagatcacaaacactaatgaacctacggaactctttcttaaacactcacatttcctccttccatttccccagcaaatc

SEQ ID NO: 3544 - DNA, 120 bp, synthetic construct
  source 1..120: mol_type = other DNA
cctggagctccatcctgagacctcagtcctaggtgatgatgaatttttcacctccaagctgcttcagcatttgaaagactgaggttgccaacagaagtcaggagaaaagttcacaaagcc

SEQ ID NO: 3545 - DNA, 120 bp, synthetic construct
  source 1..120: mol_type = other DNA
agccccaaacctctgagactcacttcaccaatgatttaaaattctagtcatggcttaaaaaattatcagaccccataactttaagccaaggcacagagctcatagcagactttgagaaat

SEQ ID NO: 3546 - DNA, 120 bp, synthetic construct
  source 1..120: mol_type = other DNA
gcatttagattctctgtttatagaatatcccagttagccactattccacctaactatgggaatcaggacaaatcctgagaataaatttacaaacaagagagtcttcaggcagggggtggt

SEQ ID NO: 3547 - DNA, 120 bp, synthetic construct
  source 1..120: mol_type = other DNA
gaagttgagccatgagcccctggagaaccagtcatgaaaggccagtttaaccatatttgatgagcaagggggaccccaggattatcctgaatggggttccattctgtattctgaatccag

SEQ ID NO: 3548 - DNA, 120 bp, synthetic construct
  source 1..120: mol_type = other DNA
gacaccaatttgattcagttgtgtgtaattcaaatgcttaaagaggagatttgctttttccagcatgggaactcctgccttcatcccaggctagccggcacccagaacccatcccagacc

SEQ ID NO: 3549 - DNA, 120 bp, synthetic construct
  source 1..120: mol_type = other DNA
agggtgacactggggtggcggctgaggcaaaactattagcagagtctaatgacatcgtggccaaaacagagtctaaaatagatttggggaaagtagctcaccacacacttactgtgtctg

SEQ ID NO: 3550 - DNA, 120 bp, synthetic construct
  source 1..120: mol_type = other DNA
ggaagagattaggacacaggcacctacaagacagagaccacacatagagacacagggagaagacagctaccaacccaaagagaggggccccagaaaaaccaaccctgctgatattttgat

SEQ ID NO: 3551 - DNA, 120 bp, synthetic construct
  source 1..120: mol_type = other DNA
tgtcctttgatgtacagaagtctttgatttatctaatttgccttttgttgcctgtgcttttggtgttgtattcaagaaatcactgccaaattcagtgtcatgaagcttttcccgtatgtt

SEQ ID NO: 3552 - DNA, 120 bp, synthetic construct
  source 1..120: mol_type = other DNA
taggatgtgttttcatttatttgcgtgtcttctttcatttccacctttcatttccttctgtagtgttctgtgcacttaacctttctttaacccattcccttctctccacgtccttgccct

SEQ ID NO: 3553 - DNA, 120 bp, synthetic construct
  source 1..120: mol_type = other DNA
tcttatcgcccattttaatgagcacattcctctctggtttcaaattctcattaccctctaacatttgttcagcaccagcagtttccacatgcagaagctttttcacaaatcctcacttgc

SEQ ID NO: 3554 - DNA, 120 bp, synthetic construct
  source 1..120: mol_type = other DNA
tgttggagataaaaaggtgaattttcaggatttggactgataaagtcacctgtcagaaaagcatcaggaccaaagagaaaagccctaaatctgagagaattcctgagatgtaagctgacc

SEQ ID NO: 3555 - DNA, 120 bp, synthetic construct
  source 1..120: mol_type = other DNA
acttatcccaatatttccccataggataatagactttctaatgtttgcaatcaactaatttgtgtattcttgaaggatgggggcagttttactcacatcttagccctgacagcaggtgct

SEQ ID NO: 3556 - DNA, 120 bp, synthetic construct
  source 1..120: mol_type = other DNA
caattcttggtactgatgggcggcaggaggtgaccagagccaggtcaattggagcctttgaaaaacattcatgttatataaccactctcagaaaaataaggaacaaatattgaatcactg

SEQ ID NO: 3557 - DNA, 120 bp, synthetic construct
  source 1..120: mol_type = other DNA
ttcagaggcttctgcaaagacactggctgtcccccttataattagagagctgtctttatcccgttcccaaggtgaaagccaagatgattcatgacttgtgcacggcagttctaaagagga

SEQ ID NO: 3558 - DNA, 120 bp, synthetic construct
  source 1..120: mol_type = other DNA
tgattgcagcatcgactgcctgagcttctagtccgtctgcccagtggattcgggactttccagttccgaccaacgcatgagtcaattctttcaaacaaatctcatatatatatatatata

SEQ ID NO: 3559 - DNA, 120 bp, synthetic construct
  source 1..120: mol_type = other DNA
cagcccttcatttctaggactgtcttcagctctgacattatgattctaccaagacagggtgtgaaaaggccagctctggggttctggggaggttttattggctcgcaaataaaatgccaa

SEQ ID NO: 3560 - DNA, 120 bp, synthetic construct
  source 1..120: mol_type = other DNA
cagcatctggccacggctcttcacactgacagtcccaacttgtcagtggattatgaaatcaatttagtggattgcacaaccaccaaaaactgaattacaataagaatgtatctcatggtt

SEQ ID NO: 3561 - DNA, 120 bp, synthetic construct
  source 1..120: mol_type = other DNA
gctgtacccagcctgaataaaatgtacttcctattgtgttgtgggtgaaaaagtctgaaaaattctgcattagataagctttgaaatcatgcaggtagatttcagggaacagagaagagc

SEQ ID NO: 3562 - DNA, 120 bp, synthetic construct
  source 1..120: mol_type = other DNA
ccccctccagaacctcacaccggccaaaatccctcacgggtgggctaacaacactcacaacaaccacactgctagctcttttaaaattttactttttagtctttttataagtttaattct

SEQ ID NO: 3563 - DNA, 120 bp, synthetic construct
  source 1..120: mol_type = other DNA
aaaaaaaaaaagaaagtcgcctcccatctctggtcgtcagtttcctcctctgagacaggaggtgtctagactcaacccctccagctcctccaaggccttcccaaaacaaattctgttcca

SEQ ID NO: 3564 - DNA, 120 bp, synthetic construct
  source 1..120: mol_type = other DNA
ttgagtttcttggttggggactcaaggctgcaaaccacggcgctaatgaacctaaacaagggaatttgctaggttttcttatttttggtgttttgttgccaacaaactcattctgttcta

SEQ ID NO: 3565 - DNA, 120 bp, synthetic construct
  source 1..120: mol_type = other DNA
cctctactcctctttaatccccccgtgccagcattcctcaaaaaagggggctcaggactcccacaaggttaaagttatcatagacatatatatgatatatatataagcaatatgatatat

SEQ ID NO: 3566 - DNA, 120 bp, synthetic construct
  source 1..120: mol_type = other DNA
cctcgagtgtcctgaccctttttctctcacccatttatatcctactcattcttcaaaaactagctgattcccacaaatttacaccaacttttctgagcagtccagttgaaaatgatatcc

SEQ ID NO: 3567 - DNA, 120 bp, synthetic construct
  source 1..120: mol_type = other DNA
ttacagagaattaatacaataaaaacttggtccatacttcatatttccagcataagttcccagaagtgtggctgctgcttgcaggtcagtgcatttattatttctgccacgtgcagacag

SEQ ID NO: 3568 - DNA, 120 bp, synthetic construct
  source 1..120: mol_type = other DNA
atggctgtgatgcctgggactcatttggaaaacatgagttatcactttaaaatgcttcactgagtttagaggcaatatactatgattactgaacccagggacactacagattcttccttc

SEQ ID NO: 3569 - DNA, 120 bp, synthetic construct
  source 1..120: mol_type = other DNA
gctggtaccaggagtgagtgactaaatgaagaaattactaattaacaaatgcttgggtggacaatccttcaaaatttaggatcaatgggaggagacagaaggagtcttgggaggattttt

SEQ ID NO: 3570 - DNA, 120 bp, synthetic construct
  source 1..120: mol_type = other DNA
gcctatattaagaatcctggaatactccatgtgctttttcatgcagcgggagtggaattttcaggaagcagctgtgctgtgggtgacggtcatactttattctctaaaactctccagttt

SEQ ID NO: 3571 - DNA, 120 bp, synthetic construct
  source 1..120: mol_type = other DNA
ccgcagtgcctcggcatttgggaccattgaaaaatactctggattctttttttttcttttgcaattgcacaaggatttacttatctctcttcatgggtgaaactgatttggggggaaact

SEQ ID NO: 3572 - DNA, 120 bp, synthetic construct
  source 1..120: mol_type = other DNA
aagctcatctttgaagagctacccatttcctgccaaagttgtggcgggaaggccttaggtactagaaaaccttggggaatggcaattaaaggattatcattcttacttatttgtttggat

SEQ ID NO: 3573 - DNA, 120 bp, synthetic construct
  source 1..120: mol_type = other DNA
ttaccaggcagatggcagactccctaaaagcagacattaaacaataaaatgccaccacataccttgcccacaaaataaaatcaaaacaaacacctaagtctggctttgcttttcttctgc

SEQ ID NO: 3574 - DNA, 120 bp, synthetic construct
  source 1..120: mol_type = other DNA
aagaaggaacaccccccagttcttgggcatcaggtgcttgtgattccattctatttttctcttaactcataattcagtaattgaggctagagctttgccatctcacattaaaccctttta

SEQ ID NO: 3575 - DNA, 120 bp, synthetic construct
  source 1..120: mol_type = other DNA
aagaaaaagatctatagtttgaaagagcgctgtgaaggagttggataaatccaagatggattccattagttaacagctgagctgaaagaagaacacaaaattagaagccgcagttccagg

SEQ ID NO: 3576 - DNA, 120 bp, synthetic construct
  source 1..120: mol_type = other DNA
ttacggaaggcgattgtaaggaaaaaaaaaaaaaaggacatggcttactcaaagtgccatgcatcaatgtcacagaagggcgacaagagggatgctgggtgagctccgaatctagtactt

SEQ ID NO: 3577 - DNA, 120 bp, synthetic construct
  source 1..120: mol_type = other DNA
caagaaaaagttatgtaaggagaaaacatacagcttccgtggagagaaggaacattttgctcagccttggggtatctgatttaataagaggctcttggagaacaaagccacaattcagca

SEQ ID NO: 3578 - DNA, 120 bp, synthetic construct
  source 1..120: mol_type = other DNA
cattaaataaaacttgctcaggacttgaacttctcagcagtggaggaattgcttccaaagatattgagtgatctgttgctgcaggtattcaagaaaaggaggcttcttccacgagcctgt

SEQ ID NO: 3579 - DNA, 120 bp, synthetic construct
  source 1..120: mol_type = other DNA
tgagcaggccattttaagcggaaactgttttttgttttttttttgtccgtagaatgagccatgtgttatgggatgttcctcaaggtccctttcagaccagagcattaatattctgtgtca

SEQ ID NO: 3580 - DNA, 120 bp, synthetic construct
  source 1..120: mol_type = other DNA
ggttatcaccagggccctctcctggaactcatgttttgagtctattttaagtgctgagtattttacatatcctctctcaacctgcacaaaatactgtccattttatcgataaggaaattg

SEQ ID NO: 3581 - DNA, 120 bp, synthetic construct
  source 1..120: mol_type = other DNA
ttcaaagaatgacaaatggcaaatgtgacaggaaaatctcaaatgatgcatggtactgcctgagctgtgtaagtggcctagaaaactagacatgcatgagcacacatgtgtaaaaggcgt

SEQ ID NO: 3582 - DNA, 120 bp, synthetic construct
  source 1..120: mol_type = other DNA
ccatccaggtagaactaatagttctaaaactgcaggattgcaaagacatttggagtcattaagaccttgtgtcctgattttaatggagtctaaacaaaaacaaaccaacccccgcaaagg

SEQ ID NO: 3583 - DNA, 120 bp, synthetic construct
  source 1..120: mol_type = other DNA
ggaacctttttctaaaaaatggtgcatgccaaaaggagctgatgggcttagcataaattcaagagggacaggcttaagcatctgtcagagcttcactccttccaagaacttctctgacct

SEQ ID NO: 3584 - DNA, 120 bp, synthetic construct
  source 1..120: mol_type = other DNA
gctgtcgtttagcatgcacaaggctccccaatttaattgaaatcaacataaaccacactgcacaaaaccattttttttctacaaattgccctctataacaatgcccctaagcaagtcctc

SEQ ID NO: 3585 - DNA, 120 bp, synthetic construct
  source 1..120: mol_type = other DNA
cctccacgtcacactccctccctccccacaaaaggttgcccaatgaatccacaacacagaatgttcagccctgattcaaaaatgaaacaaacaagaaaacaacctccagcgactaatcag

SEQ ID NO: 3586 - DNA, 120 bp, synthetic construct
  source 1..120: mol_type = other DNA
gctggaaaggaggtaaagtccacccctggctaaatcattcgtctacctggagagaaaattagaacctctggggagttttcaaaaactagatcccaattaagaactactgaatcaaaattg

SEQ ID NO: 3587 - DNA, 120 bp, synthetic construct
  source 1..120: mol_type = other DNA
ggcatgccgtaaatcgcccttggttcagaatattcataatattctatgacttggaaagcttcttagctggaagcttcgtaattggttcaggtcaaagatcccagttcagcttgtgttttg

SEQ ID NO: 3588 - DNA, 120 bp, synthetic construct
  source 1..120: mol_type = other DNA
ctctgattatgaagactttgagtatatgattcgtaccctcaatgataccttaaaatgatgtgaggatgggagtctttttgtataataaatgctcccaaccctgacatagagccagacacc

SEQ ID NO: 3589 - DNA, 120 bp, synthetic construct
  source 1..120: mol_type = other DNA
ctttccatttccagctcttcataaggaggaaattccctctcaccttcccttcctctctctttcctttatgaggtgaaaatgtaccctaatcattgaaaaagaaaagagctagggatttgt

SEQ ID NO: 3590 - DNA, 120 bp, synthetic construct
  source 1..120: mol_type = other DNA
gggtttattaaatgtccctcaggtgattctaacatgcagccaaaataggtaggtagacctagagaaaggaacacagtgggttccaggacgctcattttacataaagagaaatatgctttt

SEQ ID NO: 3591 - DNA, 120 bp, synthetic construct
  source 1..120: mol_type = other DNA
ggtgacactgctataaaggctagcaaagcaaacttaggagagaaaggaagaaattttcatagtcttagaagcctacaaactgaccgtggctttgtctcatctcttcttccctccttttaa

SEQ ID NO: 3592 - DNA, 120 bp, synthetic construct
  source 1..120: mol_type = other DNA
tgaaacttaaaaacatttcgttacgtgaaagaagtcataaaagaccaaatatcatacaattccttccggggaccctgcagcgggggagggcataagaggacggggttgacggggggaagc

SEQ ID NO: 3593 - DNA, 120 bp, synthetic construct
  source 1..120: mol_type = other DNA
gggcgggggggggttgtgatgagagggaggagcgtggtcccttctttcactatttattctacacatgttgtgctctctcacctggagtgacttcgagtcatccaatgtcactaaaaatcc

SEQ ID NO: 3594 - DNA, 120 bp, synthetic construct
  source 1..120: mol_type = other DNA
ttcgttacgtgaaagaagtcataaaagacttcttttaggtgaaggagtttccctcacttaattctcccaagaggtggcccattaaagtggtttctggtcatcacaccttagtgagttaat

SEQ ID NO: 3595 - DNA, 120 bp, synthetic construct
  source 1..120: mol_type = other DNA
gaataaatctgagtctttgccccacagagtttgtggacaccagttcacaccaaggagacctgcttgttgggggcgaagcagaagctccgacttctgggcagtgttcacagtgccttccca

SEQ ID NO: 3596 - DNA, 120 bp, synthetic construct
  source 1..120: mol_type = other DNA
tagtttggagaaataacacttcccctgtgattaacacattcagaaaggggcaaaggggaggttggcacgaggcaagcccagaatccaactggcataaaaaataagtccttaatgaggaaa

SEQ ID NO: 3597 - DNA, 120 bp, synthetic construct
  source 1..120: mol_type = other DNA
aatttggtgatcatgatttgtcttaaactgactcccacttctaagggaatgagaaagtacacccaagatgacctgagccacaatttttggtaaattaagtcctgtaaccaggtacaggtg

SEQ ID NO: 3598 - DNA, 120 bp, synthetic construct
  source 1..120: mol_type = other DNA
acaggtacagagggttaggatttggacacatcttttaggagacacacaattcaactcataacagggtgcccttagaaaggttttatgttcatttgtttttagggtcagggtcttgctgtt

SEQ ID NO: 3599 - DNA, 120 bp, synthetic construct
  source 1..120: mol_type = other DNA
acaatgaatattcatgaccgcttcccatatcctgagttttgtcttcggccgtgtctttggagcattccttcccctatagcatgatttctcttttatgttttgtctgtcatctcttcccca

SEQ ID NO: 3600 - DNA, 120 bp, synthetic construct
  source 1..120: mol_type = other DNA
accgtcggcgctcgcagggcgttgagagtgcttcacacaaacggagagaaatggttgatattagtatagtcatggttaatataaaccttaaatacctttttaaagattagaagctgagct

SEQ ID NO: 3601 - DNA, 120 bp, synthetic construct
  source 1..120: mol_type = other DNA
atttaatctctgttccctctccctccacagtggtgcctttatttctagaagcaacgaaggaaacacagtagactcagagccagaagaggaagaggaggccagctcccactgctgcagcac

SEQ ID NO: 3602 - DNA, 120 bp, synthetic construct
  source 1..120: mol_type = other DNA
attgagcaaccttgtactcagtgcctgttcggaatgagaatagcaatgtctacagttccaatgctttcgccacaccttactcatgtcttgtatttaaatccggtctgatgatttacataa

SEQ ID NO: 3603 - DNA, 120 bp, synthetic construct
  source 1..120: mol_type = other DNA
ttacattttacattacgtttgtaatcagaaaagtagactttcaaaagaagacatcatctaagttacttgttaggagtggcagattcatctccccggagctggtgacagtagggaggcatt

SEQ ID NO: 3604 - DNA, 120 bp, synthetic construct
  source 1..120: mol_type = other DNA
aggtagggatggtagtgatagtaggtagggatggtagtgatagtagtgatggtaggtaatgatgatggtagtgatggtaggttgggatggtagtgatggtagggatggtagggatggtag

SEQ ID NO: 3605 - DNA, 120 bp, synthetic construct
  source 1..120: mol_type = other DNA
gttgtgatagtagtgatggtaggtagtgatgggtagtgatggtaggtagtgatagtaagtagcggtggtagcatggggatgctgccgtgaagcagaggaggcttcacaattctgattgtg

SEQ ID NO: 3606 - DNA, 120 bp, synthetic construct
  source 1..120: mol_type = other DNA
gaagacaggctgcaccatcacgcggctacagctgttgttctgaatttcaaatctggtggcttcattgttgttttcccaaaagtttcatgaattatgtcaccaaaaaactcactgatttat

SEQ ID NO: 3607 - DNA, 120 bp, synthetic construct
  source 1..120: mol_type = other DNA
gttctcaaatgagaagcccttccccatgagcgaatcacaaagttattttaggtaggtcatacgaaatagaaagagatacgaaacgtagaacagacaataactcagtgcctggcaaacagt

SEQ ID NO: 3608 - DNA, 120 bp, synthetic construct
  source 1..120: mol_type = other DNA
gagccaggatgggactcatttccttctcaggtgaagacgttgttagtggagaaaatgaatcttgggctaatgagctgatcagaaccttgagctgcaagagggctccggctctcttcaact

SEQ ID NO: 3609 - DNA, 120 bp, synthetic construct
  source 1..120: mol_type = other DNA
gcgtgtgcatgtggatgagtgtttggacgtgtagataaagtgagtattcttctggttatctttgtatctttgtaaaatgaatccccctcttataaccaccatagggcttcataaatgcca

SEQ ID NO: 3610 - DNA, 120 bp, synthetic construct
  source 1..120: mol_type = other DNA
ccctgatgtctagtgttattctgggtacacagcagtgtccacacagcagataccagcttaactgtgtggccgagatggtacagtgaagaatattcctcttggccaagcatccaaagggag

SEQ ID NO: 3611 - DNA, 120 bp, synthetic construct
  source 1..120: mol_type = other DNA
caatattaagaagtgggcttgggggtggttaggtcatgaggacagggccctcagaaatgggttactactcttagaaaagagctggaaggaaccagtgaggcctacttttgtccatgtgaa

SEQ ID NO: 3612 - DNA, 120 bp, synthetic construct
  source 1..120: mol_type = other DNA
aagttcttagtcaagaatctccgtgcctcagtttctccatgtccctattagtctctgtgtctagatggacaggagaccaaaggatggagggtgacaagaaacaccaagtcctgctgtatt

SEQ ID NO: 3613 - DNA, 120 bp, synthetic construct
  source 1..120: mol_type = other DNA
taatggaaagacgcctgtccagaaggtttctcctggaaggagggatcaaatctgtctaagctccgaagtaaccctgctcagctaataggttatttcctcatcttagaaaggaagaaatga

SEQ ID NO: 3614 - DNA, 120 bp, synthetic construct
  source 1..120: mol_type = other DNA
catctaacttttcttaatggcctggtagggaaatatcacaaaacaaacacacacaactcaaagaaaaaagaaacgtcgcccatgccagagttcagcgtggctctgacattacattggtgc

SEQ ID NO: 3615 - DNA, 120 bp, synthetic construct
  source 1..120: mol_type = other DNA
ctccatctcaaaaaaagaaagtaaaccctacgagggcagcagcctcatgtgccctccactgctacatcctcagtgtagaccacagacctgtaggggggcatgtggtaagcaccccattgt

SEQ ID NO: 3616 - DNA, 120 bp, synthetic construct
  source 1..120: mol_type = other DNA
gcagctgggtcgacacagcaagattccagaaaagagaggagaaagtcggtttcagaaaaggggaaaaaagtcaaaatgacaggtttgtcagaaaaataacttacattctgaaaactcagc

SEQ ID NO: 3617 - DNA, 120 bp, synthetic construct
  source 1..120: mol_type = other DNA
tatttctctaaaaaatcacattagaaatgagcctccaaggagcttgacttgaacctggaactttctaaaatgcagagtatctatgcatctctatctacatgcatgcctcccttcccccca

SEQ ID NO: 3618 - DNA, 120 bp, synthetic construct
  source 1..120: mol_type = other DNA
acacaccacactccacacaccaccttccacacataccactgcagacactgggatgtttttgccaagcagagaggctgcaggcagagaggcatgggctgtgccataggggaaaagtgggtg

SEQ ID NO: 3619 - DNA, 120 bp, synthetic construct
  source 1..120: mol_type = other DNA
agcatactcaagtttgctacatggcatatcatggcaaacctacatagggtatcatttaattctcatggccacctgcaggcaggtattcttattgctgtttcactaacaaagcaacttagg

SEQ ID NO: 3620 - DNA, 120 bp, synthetic construct
  source 1..120: mol_type = other DNA
aaaaaaaaaaagacttcatataaatgcatctatagtcagcctataaaaatggttggaaagcaacagcccactcctctccacgcattttctcgggttgcatgctgccttccggcaccatct

SEQ ID NO: 3621 - DNA, 120 bp, synthetic construct
  source 1..120: mol_type = other DNA
ggaaggtgactgaagctactggctccttggagctttaagcagtatggagattatttttatttttgtttatgcataccttgtgtcactttcggtatccaggtgtcataaagatacgtgtca

SEQ ID NO: 3622 - DNA, 120 bp, synthetic construct
  source 1..120: mol_type = other DNA
ggggagttttcagaaacttctcagatcaaggaaagctcagaaaatccagtgtctcctgaggagaagccagaccctggccaggtgtctctggagtctgtcacagaacagattcaggaaaaa

SEQ ID NO: 3623 - DNA, 120 bp, synthetic construct
  source 1..120: mol_type = other DNA
tgttctctaaaagccccatatttattttctggagtcaaggtgcaaagtccccatgagttccccattagacagcaaatgccccaaggagaagaggacaaaaagcatattaacctgatgaac

SEQ ID NO: 3624 - DNA, 120 bp, synthetic construct
  source 1..120: mol_type = other DNA
aggagacctattgaacaaatttgcaaattattcagccaaagcctaatgagggattaaaaaggaaatctcgttcaaattacaatcaaagaatcacctgcaggacgggcatggtagctcatg

SEQ ID NO: 3625 - DNA, 120 bp, synthetic construct
  source 1..120: mol_type = other DNA
tctgaaaatgttctctttgaggtatgtggctcccacaagatttgtaaaaaacgggttcactcagatttttctaaattgggtcgtcgagttaactaagcatttccattctcaaagacggcc

SEQ ID NO: 3626 - DNA, 120 bp, synthetic construct
  source 1..120: mol_type = other DNA
ttcaccactgagtggccaaagctagaggcacagactcaccagctgagcataaccttcaggtgaaggtgacaaaggccactggagggcagaccatcatttaacaaggaatagaaccaaata

SEQ ID NO: 3627 - DNA, 120 bp, synthetic construct
  source 1..120: mol_type = other DNA
tggtatcgctgcccagcatttccctctgtctttgaaaatactctattacctatgccccaaggtcatgtcagaaatctcaaaatacacctaacatgcaaagcagagtggtgaggagacaag

SEQ ID NO: 3628 - DNA, 120 bp, synthetic construct
  source 1..120: mol_type = other DNA
cagggcttcctgattccgagtgtagtgttcattctaatctccattatttaagaagcaaaaacaacaaactgagaaagaagaaccagagactggaacctatgaaagtggagaagaggccgg

SEQ ID NO: 3629 - DNA, 120 bp, synthetic construct
  source 1..120: mol_type = other DNA
ggccatagccaagcagagatatcaaaaacctgacaagacacaacagagacttttctcagcaggttgggctagaatggttgtgaaccttacactgtcttttctacattaaggataataaga

SEQ ID NO: 3630 - DNA, 120 bp, synthetic construct
  source 1..120: mol_type = other DNA
tcctaatctatatgttaatcacatctgcaaaaaccccatctcaaagaaggtcccattcacaggtatggggtgcagagggtgtgggacttcgaccttttttttggagaatccaattccatc

SEQ ID NO: 3631 - DNA, 120 bp, synthetic construct
  source 1..120: mol_type = other DNA
gattaaattattttcaaagtaggtagtggaagaaagagatgagtgagattccaattaaccattccaaggcagggctaaaatacagttccaccaaatcaccttcttctactggggaagctc

SEQ ID NO: 3632 - DNA, 120 bp, synthetic construct
  source 1..120: mol_type = other DNA
ctgcttctgtttatgttaattcagtactcgagctgggaaatcatgatccaggatttaactctttgcattcatcagtaggctgctcctctgcagtatgtagagcctcgtttatataagaat

SEQ ID NO: 3633 - DNA, 120 bp, synthetic construct
  source 1..120: mol_type = other DNA
cctcaggcattctgattcagtaagtctgggctacgaagcagaattttatattctaaacaaacactgggagcttctacataagctagtccatgaaccacactttgttaaacattgccctaa

SEQ ID NO: 3634 - DNA, 120 bp, synthetic construct
  source 1..120: mol_type = other DNA
attggcttgaaacagttccagagacacacgacatggcagccagccttgattaaagcatgtctatggggtctatgaactttagcactaatagggaagctgctttttcttagaccgacataa

SEQ ID NO: 3635 - DNA, 120 bp, synthetic construct
  source 1..120: mol_type = other DNA
ttttgccaaagtacttgagttggtttccttgacaccagcccgtttcccatcactccactctgtacacttttccaggctgattcccatggaatgctgttttctttacctttaatggcttct

SEQ ID NO: 3636 - DNA, 120 bp, synthetic construct
  source 1..120: mol_type = other DNA
aaaacatgattcattgtctacctgaaatctagattcaactaggcatcttgtatttttagttactacagctggcaaccctatgtccaggtccttcctgatccagtctcaaagcatttccta

SEQ ID NO: 3637 - DNA, 120 bp, synthetic construct
  source 1..120: mol_type = other DNA
tatgtatatgatgtatatgtatatgtatatgatgtatatgtatatgatgtatatgtatatgtatatgatgtatatgtatatgtatatgatgtatatgtatatgatgtatatgtatatgta

SEQ ID NO: 3638 - DNA, 120 bp, synthetic construct
  source 1..120: mol_type = other DNA
ttaactcacgaacatggttttaaatgtcttacatgagagatgtaaacaagaatgtttcattttcaaatagaacacttattcctgcataatcgagtcaccaccgtgggggccacacagcag

SEQ ID NO: 3639 - DNA, 120 bp, synthetic construct
  source 1..120: mol_type = other DNA
ccgggttactcgtggctgaggtctcccgctgggtgacaaagttttcttccttttgcaaagctaagaaacattttccaccctctcggctcctcccacagattcccagaggtaatctgaaag

SEQ ID NO: 3640 - DNA, 120 bp, synthetic construct
  source 1..120: mol_type = other DNA
cgacacaatagcaggttgctctttgtgctaagactgacaccatgaggacacagatttgggggaagggggaatctctaggcaaaggctgttacagtcaaatctctgcgaacgattgtgatc

SEQ ID NO: 3641 - DNA, 120 bp, synthetic construct
  source 1..120: mol_type = other DNA
catcctgcagaagaagccccgccaccagcagcttctgccatctctctcctcctttttcttcagccacaggctcccagacatgacagccatcatcaaagagatcgttagcagaaacaaaag

SEQ ID NO: 3642 - DNA, 120 bp, synthetic construct
  source 1..120: mol_type = other DNA
gattagcgagctcggtaatccggtctcctaaatgaacaaaaaagtagacgctttttgaggttgagcatatttcgattaaatcttggcttaggccctagatcaagggtttagatcagaata

SEQ ID NO: 3643 - DNA, 120 bp, synthetic construct
  source 1..120: mol_type = other DNA
aatggggaaagtattgacaggaattgagagctattggtaggccagtgtataaggtatgtgaaaacagaattaagttattggtctgaagtgactgaagcatttaggctctatcaaggccta

SEQ ID NO: 3644 - DNA, 120 bp, synthetic construct
  source 1..120: mol_type = other DNA
gaaagtcagtgaagtgcttgcttttttgataattgcactcccaataattttgatattccaacgtacttggtttgcttgttttcacgttaatgttttctgtttattggagtgggaaggcat

SEQ ID NO: 3645 - DNA, 120 bp, synthetic construct
  source 1..120: mol_type = other DNA
ttgatattgtgtgtgacttcagagtttgtaaagagaattgtagaagtgttgcatgcatatgacaattttctgcttaattgaaatgtgaggcctctgccatactacaaggatttagcttcc

SEQ ID NO: 3646 - DNA, 120 bp, synthetic construct
  source 1..120: mol_type = other DNA
cagagagaataatgttgaggttagactaaccttaaattggtaaggctttgctgagcaaactgataactgtaagtcttttatagggtgcattactgccacatatacgttcttccataggtg

SEQ ID NO: 3647 - DNA, 120 bp, synthetic construct
  source 1..120: mol_type = other DNA
gattttagggaggcagtgtgggctctggagccagactgcttgttttgtaatcctggatcttccatttagtagctggatgactttgagtaggttatttagattttctcaatctattttatc

SEQ ID NO: 3648 - DNA, 120 bp, synthetic construct
  source 1..120: mol_type = other DNA
ggctgtactgatttcccagatgtaccacagcactcttagtagtgaagcacttgacttctagtgagtggattttttgtgtgtgtgttttatattgcagagtgaatacactctgtctgatac

SEQ ID NO: 3649 - DNA, 120 bp, synthetic construct
  source 1..120: mol_type = other DNA
agccactgcgcccggcctcagatactcttttaattagatgcgtttaaaaatttaacccaccattgctggcatgaatagatgtatttttagagtgattcataaatatcgtatacatgttta

SEQ ID NO: 3650 - DNA, 120 bp, synthetic construct
  source 1..120: mol_type = other DNA
ggaaaatgttatcctgattttatagacgagatagtgagtttagaaaggcagtatggtggaatggagcatagatttggagttggctagacctaaagtccagattaaatctctgctcaaggc

SEQ ID NO: 3651 - DNA, 120 bp, synthetic construct
  source 1..120: mol_type = other DNA
gtacctttgcccccaggtgtgatatttaagaaggtcaacttactaaatcagtgatggagttagtcctaacatctgggtgttctgactgctgctaggccagtattctttatatgataataa

SEQ ID NO: 3652 - DNA, 120 bp, synthetic construct
  source 1..120: mol_type = other DNA
ttaagtggatttaagataacctaaacattagagaggattttcatggttttgattcatgaaatcataatgttatacaaacctaactgaagtgttagagccttgaagatttttcccccgaat

SEQ ID NO: 3653 - DNA, 120 bp, synthetic construct
  source 1..120: mol_type = other DNA
tcttgtggggtgctaatgaaaacagggatggcaaaaatattttgtttgtgagtgtatgcatttatgctttttgacaacctaagaaacactcttacatctgagtatctttcatggactagc

SEQ ID NO: 3654 - DNA, 120 bp, synthetic construct
  source 1..120: mol_type = other DNA
cgttacctattctgtttacttaatagtatttaaagggtgtgagaggtgttatgtgtttctgtcccttgtttttattcctatccctcccatctaactgttggtactcttatcttcccaggt

SEQ ID NO: 3655 - DNA, 120 bp, synthetic construct
  source 1..120: mol_type = other DNA
tcacatgcatttctagtttatgtttttcttcgactaaaattctgcagcacttaggcaaagctatttttaccagttggaaaaaaagtaagtcatttccaaccaattttcctggcttgtagt

SEQ ID NO: 3656 - DNA, 120 bp, synthetic construct
  source 1..120: mol_type = other DNA
tgtgtgtattttaacagcaggagagttctgaaacaggaaaccagtcttatcatattcatccagagacctaggaagaaggtaattgtttggtatactcgttaaaaccagttggttgggcaa

SEQ ID NO: 3657 - DNA, 120 bp, synthetic construct
  source 1..120: mol_type = other DNA
atactgttctctggtctgtttttttcacaaatacactttttatttgtcgccaggtacttatttttaaagctatagaggtaatatttcatcaggtgagggtaactaccatggtttgtttgc

SEQ ID NO: 3658 - DNA, 120 bp, synthetic construct
  source 1..120: mol_type = other DNA
ggcccagagattgagtgatttacctgaggttataggctttagattgcatagctggaagtagaaccttgttcttctatattaaatgacaatattcattaagtacttagcacaggatttggt

SEQ ID NO: 3659 - DNA, 120 bp, synthetic construct
  source 1..120: mol_type = other DNA
tgcagaagctctttaggacaaattgttcttaaataatgaacagttggcactttttcaactggaaaattcaaggaactgctctttctgctttctgctcaatatgaatcttcaatttagaaa

SEQ ID NO: 3660 - DNA, 120 bp, synthetic construct
  source 1..120: mol_type = other DNA
ctgacttcattaattctttcaccctggctactggtttagctcagtgttttatgagccaggcagcttcagactttgcttttgatgctctttgttcattacctctaaagctgtattatcact

SEQ ID NO: 3661 - DNA, 120 bp, synthetic construct
  source 1..120: mol_type = other DNA
attaaaacaaatttagcatgtttacacaaaggtggggggaaactgtctaatatatctgagatctgttggagctggggtgaccatccaacttaggcaagatagctagtaccatgtatgcat

SEQ ID NO: 3662 - DNA, 120 bp, synthetic construct
  source 1..120: mol_type = other DNA
taggtacctttattagccccattctgcttaggaagcaacagaaagagtatgtattttgcctaaggttgcacaataagttaagctggggttccaattctagcaagttggttctagagtgta

SEQ ID NO: 3663 - DNA, 120 bp, synthetic construct
  source 1..120: mol_type = other DNA
cttaaaaagattgaattcctggactccatttaaaggagtaaatagctcacgaacaagacttgctgctctgcaaagtcttccatgttgatcctggtctttgactccttatctgtctgatta

SEQ ID NO: 3664 - DNA, 120 bp, synthetic construct
  source 1..120: mol_type = other DNA
ttaagaggtgattagataatggtatctctatccttatgaatggattaatgctgtttgaatggtagtggatgagttatcttgggagtttggcctcctccgtctcacatgcttccttacctt

SEQ ID NO: 3665 - DNA, 120 bp, synthetic construct
  source 1..120: mol_type = other DNA
accaagggtgtggtccaggaaccatttgctgaagagattaatattcctagaggagacccaagggctatttatcaagacagtggaaaaagaccccagaggcattttggagatctttgaggc

SEQ ID NO: 3666 - DNA, 120 bp, synthetic construct
  source 1..120: mol_type = other DNA
aattccagagtattggtagctataaccactttgggttccctgccattgcttctggtgcctcattttttctgacgtcttccattttcttacatttgtcttctaaggtggagttaagattac

SEQ ID NO: 3667 - DNA, 120 bp, synthetic construct
  source 1..120: mol_type = other DNA
aatgcccggatcacattaaaatgtttccaattagctcaaaaatgtcctttatggctggtttggctaaaacagtatccaggccagcattgcacctatgaaattggctgttaggaatcttgt

SEQ ID NO: 3668 - DNA, 120 bp, synthetic construct
  source 1..120: mol_type = other DNA
atgctcagattatcacagctagtcatttggacctttataccacctcctatgtccatttgatataggccattaatctctataagccttcctccttctcttggaatgaaaaggtatcctagg

SEQ ID NO: 3669 - DNA, 120 bp, synthetic construct
  source 1..120: mol_type = other DNA
cttcctaccaagaagtgcagtaaaagtgcagtgtccaaatagcccttgtaacaaaacctttctctttctcctgggtgccaatttgacatttaatcagttttgtttctagcagtgttcaat

SEQ ID NO: 3670 - DNA, 120 bp, synthetic construct
  source 1..120: mol_type = other DNA
tgactgggctggtgtgaaaggtctgtcagaaaatcatgagattagattgaggtacctcaaaaaatgagagctggtatgatgagtgggtaagaatcataaaagcgtagagtgttgatgatt

SEQ ID NO: 3671 - DNA, 120 bp, synthetic construct
  source 1..120: mol_type = other DNA
ttgcggtctagaaaggttaagtgacttgtccaaattacacaactagttagagacatagccagctcttaaatctgacttccagattttcactgtgtcttcttttttctgtaacgtgttgcc

SEQ ID NO: 3672 - DNA, 120 bp, synthetic construct
  source 1..120: mol_type = other DNA
tagaccaaattttaaggtaccactgtgcatatgtataccaactacctgaagaagtatttggttggtacaagagatatagaaaggaatcgctgggtgtaccaaggctaatcagttttataa

SEQ ID NO: 3673 - DNA, 120 bp, synthetic construct
  source 1..120: mol_type = other DNA
agcagtacagtcaccagacgtgtatcctctcctatggtacagaagtgtttattgggtctctttatggcctgcatgatatatcccacaagatgacctacttcacattattttaattctgta

SEQ ID NO: 3674 - DNA, 120 bp, synthetic construct
  source 1..120: mol_type = other DNA
ttggccaataaagctttgatagcctctattgcccaggcccctcctcttcttttatgagagaaaggatgaacagtgaccagaaataaaggtattgtttttttctatcaactaaaatggaaa

SEQ ID NO: 3675 - DNA, 120 bp, synthetic construct
  source 1..120: mol_type = other DNA
gaaagccacatctcatagaagctaactattcccaaattgtttttttcttcttttcctcttactactgctgttttcctcctttcttgctgctaagctcttgtcctgacatgctggtaatat

SEQ ID NO: 3676 - DNA, 120 bp, synthetic construct
  source 1..120: mol_type = other DNA
ttgactattttggcttttgttgccattgcttttggtgttttagtcatgaagtccttgcccatgcctatgtcctgaatggtattgcctaggtttgcttctagggtttttatggttttaggt

SEQ ID NO: 3677 - DNA, 120 bp, synthetic construct
  source 1..120: mol_type = other DNA
tctcttgcctgattgccctggccagaacttccaacactgtgttgaataggagtggtgagagagggcgtccctgtcttgtgccagttttcaaagggaatgcttccagtttttgcccattca

SEQ ID NO: 3678 - DNA, 120 bp, synthetic construct
  source 1..120: mol_type = other DNA
gtcctatctccttcaattctgctctgatcttagttatttcttgccttctgctagcttttgaatttgtttgctcttgcatctctagttgttttaattgtgatattagggtgttgattttag

SEQ ID NO: 3679 - DNA, 120 bp, synthetic construct
  source 1..120: mol_type = other DNA
aattggggcatttaccccatttacatttaaggttaatattgttatgtgtgaatttgatcctgtcattgtgatgttagctggttattttgcccattagttgatgtagtttcttcctagcat

SEQ ID NO: 3680 - DNA, 120 bp, synthetic construct
  source 1..120: mol_type = other DNA
gtttgttactactgaccttctgaagcctacttctgtcaactcgtcaaagtcattcttcatccagctttgttccattgctggtgaggagctgtgatcctttggaggagaagaggcactctg

SEQ ID NO: 3681 - DNA, 120 bp, synthetic construct
  source 1..120: mol_type = other DNA
ccttgtgcttcctgggtgaggcaatgccccgccctgcttcagctcaccctccgtgggctgcacccactttccaaccagtcccagtgagaagaaccaggtacctcagttggaaatgcagaa

SEQ ID NO: 3682 - DNA, 120 bp, synthetic construct
  source 1..120: mol_type = other DNA
gtgatttttgaaaaagatttatttattgtcttgttcactgtgagctttttcccccatgtataagcagctgtgtaatagattcaagagcaccccctcgcccctttttttttgagacagagt

SEQ ID NO: 3683 - DNA, 120 bp, synthetic construct
  source 1..120: mol_type = other DNA
gttaacttccccaagcattacttttagtaagtagtgagactgaaggttgagttctggtctgtcagattccgaagttgtttccttaggaaccatattatcttgtgtacaactcttgggcta

SEQ ID NO: 3684 - DNA, 120 bp, synthetic construct
  source 1..120: mol_type = other DNA
aatcgcctaggagggattaggaatatgaatagcatctaacttgttggcagtagaattgaaggtagaaggtggtaaaacatcaccttgaaagttctgcattcagcctagaattctgtatcc

SEQ ID NO: 3685 - DNA, 120 bp, synthetic construct
  source 1..120: mol_type = other DNA
atctctatgtatttgactattctaggtacctcgtataagcggaatcacgtgatatctttttgtaactggcttatttcactaactatcttcgaggttcatccatgttgtagcagttgttag

SEQ ID NO: 3686 - DNA, 120 bp, synthetic construct
  source 1..120: mol_type = other DNA
cccttattggatatgttatttgcaaatattttctcccataaagaatgggttactttttcactctgttgattgtttcctttgctgtgcaggagctatttagcttgaaaaaatccaacttgt

SEQ ID NO: 3687 - DNA, 120 bp, synthetic construct
  source 1..120: mol_type = other DNA
gttatttttcctgagctcgcctcctcccacctggatttttttttttatttctaccagaaacattgttgggattttggtagggattgtattagtctgtagattgcattgaatagtactgac

SEQ ID NO: 3688 - DNA, 120 bp, synthetic construct
  source 1..120: mol_type = other DNA
atcccaggaataaattttacttggtcttcgtgtataatccatttaataagctgtggaattcagtttgttggttctgtgttgaggactttatatcaatgttcctaagggctactggtctat

SEQ ID NO: 3689 - DNA, 120 bp, synthetic construct
  source 1..120: mol_type = other DNA
ttcccttgtgatttcttctgcgtttaaccgtgtattttttaatttccacagttggtgaattttctactttttcttcagttattgattttattgattttcagtggcatcctgttgtgatag

SEQ ID NO: 3690 - DNA, 120 bp, synthetic construct
  source 1..120: mol_type = other DNA
ccattgggggtcacatttaatgccctaaagttataacactgcaatttcaatttataccaatttactttcaatagcatacaaaaattcagctcataagattcagtccctgctcccttccag

SEQ ID NO: 3691 - DNA, 120 bp, synthetic construct
  source 1..120: mol_type = other DNA
tgatgatggtgttccacaggtgtcttaggctcttgtcttcaattttccttcagttttttttttctgttcctcagacacgtggtattttcagctgttctgccttccaagtttactgattct

SEQ ID NO: 3692 - DNA, 120 bp, synthetic construct
  source 1..120: mol_type = other DNA
ggcacaaagagctgaaattgactcaaactaactgatttaccattcaagtctttccttagaaactgaaaacctgaatagactccagagttccagaatcacagattctgcttacagtcgtct

SEQ ID NO: 3693 - DNA, 120 bp, synthetic construct
  source 1..120: mol_type = other DNA
agtagccccacattcttgtgcttgtttcttttttctgctctctttccttgcccaggtaagaggtctgcccataagggatattttgcagcatgtgaagctttttaaaaagttaggcttatt

SEQ ID NO: 3694 - DNA, 120 bp, synthetic construct
  source 1..120: mol_type = other DNA
tctaggaataatctctgactctcctgtaccttgtcctcactaggattcggtatccacggcaaaaagatctattaatagttggtatcaggcctgtacatgtgttaagagaaagatgaggaa

SEQ ID NO: 3695 - DNA, 120 bp, synthetic construct
  source 1..120: mol_type = other DNA
gctttcaataaagagaactgtcatgtacccactactccttacttactgaatcatcttcttttggatagagaagataaaagtgaaaagggaatttaagagttcctgcctttttccttgtct

SEQ ID NO: 3696 - DNA, 120 bp, synthetic construct
  source 1..120: mol_type = other DNA
ctgatctgtatcatatctaactacgccagtatttccttccttgtctgacgtgaactctaaaattatgtgaacactttctccctgtttcctggcatttccactcaaacttgttcctcattc

SEQ ID NO: 3697 - DNA, 120 bp, synthetic construct
  source 1..120: mol_type = other DNA
cctcatgcccatttgtagtcagtccccaaacctggtttcaggcaatctctgatctgctttctatatgctttgcctatactaggattacatataaatacagtcatatagcatgtattcctt

SEQ ID NO: 3698 - DNA, 120 bp, synthetic construct
  source 1..120: mol_type = other DNA
actggaatggctcaaaaagggcttacaggaattggcaaagacatagattaactggaactcttatgcatgttggttagagcacaaaatgatatgatttcttgggagaaatatttggcagtt

SEQ ID NO: 3699 - DNA, 120 bp, synthetic construct
  source 1..120: mol_type = other DNA
tgaaatgtttggagcttgcctgtgttgatgggattaaggcagggatgatttatgtgtaaatttatgcgttagtaacagcagtaaccgctgtagttacactagggttctaagagcaaatgt

SEQ ID NO: 3700 - DNA, 120 bp, synthetic construct
  source 1..120: mol_type = other DNA
taatttttcttttcgtttattttaggattggtgggagctgtccaatgtccttaggctgttttccaaatgagataccaaaagctagttctccatcgggtttctcaggctgctagaagcatt

SEQ ID NO: 3701 - DNA, 120 bp, synthetic construct
  source 1..120: mol_type = other DNA
ctcaacatgtttaagcacatttggcattatatcaattttatcttttccaggtgccttctaatctgtcccagtctggactaattgttcttcctggcttgctgtatggctgtctactcaaga

SEQ ID NO: 3702 - DNA, 120 bp, synthetic construct
  source 1..120: mol_type = other DNA
tgttaattcctcggcttcatggtcttctagcccttcttttgcctatcttatggggttgaggattaaacagtttatatacctgaggtgcttaggatatgtctgtcatatagtaagtgcttg

SEQ ID NO: 3703 - DNA, 120 bp, synthetic construct
  source 1..120: mol_type = other DNA
ctgctttaaatgacttggcatctagcccatatttgagcccataaccgtgtggtaatttgaagtgtaattcacagtagagcttctgttaaagcactaatagcatcttccatggaggtatac

SEQ ID NO: 3704 - DNA, 120 bp, synthetic construct
  source 1..120: mol_type = other DNA
caatgaagagaacattggaaacactaattttaccttataaagaaggtttcataaaggaaggcaagtttgagctggggtgaaaaggaccagtaagggttgactttcaagccaaggagagga

SEQ ID NO: 3705 - DNA, 120 bp, synthetic construct
  source 1..120: mol_type = other DNA
tgaacaaggtcacacaggtacatatggtagccgaccatccactgtttatgccaatattccctttacgttttgcttttttgcttgttcgttttaacctctccaaattttactgacttcaga

SEQ ID NO: 3706 - DNA, 120 bp, synthetic construct
  source 1..120: mol_type = other DNA
aactgtcagtaggtataggtggaaggagggcatttatcagagattttaatttaagaagaaagtcttcatccttatcctaccaacccccattccctgagcatatttatcattactagtccc

SEQ ID NO: 3707 - DNA, 120 bp, synthetic construct
  source 1..120: mol_type = other DNA
cctgagaaagtaggggaagtttagagaactgaagctgcacaaaactaatgtttattttctgttgtgttgtcctgagaccagcttcttagattgtgtttcctagtcctacatctctgattc

SEQ ID NO: 3708 - DNA, 120 bp, synthetic construct
  source 1..120: mol_type = other DNA
ctgagagactgttgaaaaaggtgatcgttggcttttcaacagggagtaaggtctggtttaaaaaaaaattagtaagcatttggccaagtagattaacaacattcagtttttctttactgt

SEQ ID NO: 3709 - DNA, 120 bp, synthetic construct
  source 1..120: mol_type = other DNA
tctcatggcttaacactttaaaccatgagaaaactgaagagttgagaagcttggcagatgctgctgtgatagtcaaaaagaaagtgggtgccatgagctactattgatgtatttgccatt

SEQ ID NO: 3710 - DNA, 120 bp, synthetic construct
  source 1..120: mol_type = other DNA
tattccttttgcattgagagtcctgacgaaatgtccatgtgacagttcattttgggtttagctctacctctaatatgtgacctatgctaccagtccgtatagcgtaaattcccagaatat

SEQ ID NO: 3711 - DNA, 120 bp, synthetic construct
  source 1..120: mol_type = other DNA
ccagtagagcttcagatcttgttcatcttgtgttcctccctccccaccctcagtccctggaaaacaggttttaaagatagttgctaatccttatttcttctaaatttttaaatcagttgc

SEQ ID NO: 3712 - DNA, 120 bp, synthetic construct
  source 1..120: mol_type = other DNA
gatagcactggcatgaattatagagctgaggatctaaagatttttactttgatttatcccattatcatctgcagggaaacaattgcttttactgattaaaaatgcaggctgggcacagcg

SEQ ID NO: 3713 - DNA, 120 bp, synthetic construct
  source 1..120: mol_type = other DNA
atcctgtaaacagcagtatcaggctgtagaatttgtcttctgaaagcagggaacttatatatagcaaagaacttcatagtgctcccatttcttgacaaaacctctcgagaagctcttgat

SEQ ID NO: 3714 - DNA, 120 bp, synthetic construct
  source 1..120: mol_type = other DNA
ggaacaaatagtttttgtaatggtctaggcttttccaacttaactgtgctctcacatgtggtctctttttctccctctttcctccttcttatacactctcacccacacacatatgcatac

SEQ ID NO: 3715 - DNA, 120 bp, synthetic construct
  source 1..120: mol_type = other DNA
ggagtatcctcgtgttcttaccttctttatccctgtgtttatttaaaaaggcaaaaaaaatggagcagatgctgttggttgaccatattttactgaacagtagcatttgtgtttaggttg

SEQ ID NO: 3716 - DNA, 120 bp, synthetic construct
  source 1..120: mol_type = other DNA
tccccctttcttttttgaagggagatgaggcagtcatattttggtaaagaatttgtagactttgcagaggtctcttcaaaataatctggctcagagtcttgacatatcctcagcagacat

SEQ ID NO: 3717 - DNA, 120 bp, synthetic construct
  source 1..120: mol_type = other DNA
ttaggaactcttgtgtacatgagttcattgagcttattcttaataaagacaaatcttctagaaataatagttgtatctttaaatgatctcaaggaaaatgtttggtttctctggggaatg

SEQ ID NO: 3718 - DNA, 120 bp, synthetic construct
  source 1..120: mol_type = other DNA
cccaactcaaagtagcttaaataaaaggagacattttttgacttacataacctaaaagctctggcctggatctaggtgctcaacagatctcaagagtatctctcttattctctctccctc

SEQ ID NO: 3719 - DNA, 120 bp, synthetic construct
  source 1..120: mol_type = other DNA
aacccaggacagctgagtacaagttttacccttatattcacattgaggtccagatcctggttttgaatgagataattacgtgcagtcggactgttttctgatcctaaaaatagagacaat

SEQ ID NO: 3720 - DNA, 120 bp, synthetic construct
  source 1..120: mol_type = other DNA
tcaaaatgtattaagtaaaagctgaaagaaatgaagaataattggtagaaaagcaatgataggaatccttaatgtacttcaaaaggcacgaagtaagaaggtacagtcatgtaccacata

SEQ ID NO: 3721 - DNA, 120 bp, synthetic construct
  source 1..120: mol_type = other DNA
aaagccagtcaaggataaaagaaaagagggaaactaaaagtgagacattaagtatgagaaaggagataaaactaaagtgtggaggtgatgttaaaaattatattcaggtctgtgctaatc

SEQ ID NO: 3722 - DNA, 120 bp, synthetic construct
  source 1..120: mol_type = other DNA
ctcacttctcttttctgtaaccctattatattactgctgtctctcagctgtgtttcattcctcaagcagaaagaagatgggaggatcatatagtagttgactagaagctgtggagtttga

SEQ ID NO: 3723 - DNA, 120 bp, synthetic construct
  source 1..120: mol_type = other DNA
ctctttttgagataggcctatatttagggacaagagaagagacaaccaataagggttgaaagaaaccttgagagagtaagtcctatgacagaagcagggaagtttcagaatgattgcaga

SEQ ID NO: 3724 - DNA, 120 bp, synthetic construct
  source 1..120: mol_type = other DNA
aatcagcctcataatcaatttctctggattaaggagtaagagcgtctcaagatttgctgtttatagagagggaggctaatagtttgagagagatacagaatctagggagagtgtgggttt

SEQ ID NO: 3725 - DNA, 120 bp, synthetic construct
  source 1..120: mol_type = other DNA
tctgaaatggccagcagctacagctgtacctatctactgtacatatcaagcaagtcactttattcttataatgtctatgacttctttctttgaaagcgcttccatcatcactgttggcac

SEQ ID NO: 3726 - DNA, 120 bp, synthetic construct
  source 1..120: mol_type = other DNA
gtgttcaagggtcagctgtgtaaataattttcctcaaaattaaagtggaaaaggagagttactactagtagaaagtagaactgtacccttgggcaggggtgtgtgtgtgtagttaaagat

SEQ ID NO: 3727 - DNA, 120 bp, synthetic construct
  source 1..120: mol_type = other DNA
aatgaggaggtcacattggagactctgaaacagatacatgtgagcctcccaactttttaatatttgttaatctagaagtgttgaattttgggtgctgacaaggcagcaggtagataagaa

SEQ ID NO: 3728 - DNA, 120 bp, synthetic construct
  source 1..120: mol_type = other DNA
gcatgcttttgtgtaactgcatctggtgtttgatcctcatgagagccctgttaaggaagggtacatattattgtcctcattttccttcgaaaacacatcagagtttgtattttgactgtc

SEQ ID NO: 3729 - DNA, 120 bp, synthetic construct
  source 1..120: mol_type = other DNA
tgcatgtagtacaaggatagctttacctgtgttagaagattgtttcacacatttacatcaactgcatagtcctgtttttgttgggccctaatgccagcatcactttttgctactgctgtt

SEQ ID NO: 3730 - DNA, 120 bp, synthetic construct
  source 1..120: mol_type = other DNA
gaagccaaattatatttatgaaagaaatattctgtgttataaccaccaaatacagcccaattctgactagatgatggaagaacctgtcccatcagaggtccagcatgaggtccagcagag

SEQ ID NO: 3731 - DNA, 120 bp, synthetic construct
  source 1..120: mol_type = other DNA
ttctagtttcctcttatgtactatgatttaatactgtagtaaagttttaataaaatatgagctatatgtaattaagtgggaggttgtggggctaggcacgaggctcacacgtgtaacccc

SEQ ID NO: 3732 - DNA, 120 bp, synthetic construct
  source 1..120: mol_type = other DNA
agcagaaggaaaaagctggacaagaatgtagtgtcagagaataggtatggaacgtgtgagtgactgttagaggatcttgaatggggataacagacttgatttcataaatactgagatgtc

SEQ ID NO: 3733 - DNA, 120 bp, synthetic construct
  source 1..120: mol_type = other DNA
caacctgagatttgggagggaaagatatccaaactatatcactaggtctggatcttgttatttattttttggaacatagtcatatatatccaaggatatatattgtagaagtccacagaa

SEQ ID NO: 3734 - DNA, 120 bp, synthetic construct
  source 1..120: mol_type = other DNA
actttgagtcaaggaagtgaaatttattgatagattgttggtgtaatatttatcctgtttgtggtagcttttttgaataataagtgtcttagaagaccatgttggagtagcctgcatgct

SEQ ID NO: 3735 - DNA, 120 bp, synthetic construct
  source 1..120: mol_type = other DNA
ctcttgtgaacatgtagtgatttgtattttgtgatctttgccgcatgctagagacttaagaatactatagcaaatatctgtcttctttacatttaaaaatttttcgtgactactccctgt

SEQ ID NO: 3736 - DNA, 120 bp, synthetic construct
  source 1..120: mol_type = other DNA
ctgcaggtgttttgcttactctggcattggtgagacattataagggtaaataatcctgtttgaaggaaaaggccttatggcattgtaacatgagaggaatttttcttaacaaggatggtt

SEQ ID NO: 3737 - DNA, 120 bp, synthetic construct
  source 1..120: mol_type = other DNA
tgagactaaggtgcaacatttttagatagtaatgaagaaaaggactaactttgtagtgttgctgccttgttaaacatactagatagcatattgccaatctttaaacattctcaatgatag

SEQ ID NO: 3738 - DNA, 120 bp, synthetic construct
  source 1..120: mol_type = other DNA
aactggagcttctcatgtttgtattgctgtagaagtaaacatgtatttgccatgcgtcatcagggaagttgcactcaccgtccaagaacttttgttaaagtaaatcttggaataggtagc

SEQ ID NO: 3739 - DNA, 120 bp, synthetic construct
  source 1..120: mol_type = other DNA
ctgggatatgaagtaggaatgggagaggaaagaaatagatgggaactcagtcatttgggaatgattcatatggaatgtttttactgcttccactcctgtctgccttccaatttattctca

SEQ ID NO: 3740 - DNA, 120 bp, synthetic construct
  source 1..120: mol_type = other DNA
accatttttttcttcccccttcctatttcttattctacctgattttcccctgttcattcaccacactcgtttctttctcttttttactctctcttaatttttcattcaatttttataaca

SEQ ID NO: 3741 - DNA, 120 bp, synthetic construct
  source 1..120: mol_type = other DNA
agagtacagatgcaaaagcccttagacaagagaatgagcttggtatatctgaagagtggataagtcattttgactgaaacagagtggacaagaaaaccagtccaagtgtaaagacactag

SEQ ID NO: 3742 - DNA, 120 bp, synthetic construct
  source 1..120: mol_type = other DNA
gggccttagctacctccccttggaaatggaaatacctaacatgtaaggttgttttgacagttattttcactaggcatgtaaaggcacttgactctctgttatagaccactgtattatgtt

SEQ ID NO: 3743 - DNA, 120 bp, synthetic construct
  source 1..120: mol_type = other DNA
atccagaggctagcagttcaacttctgtaacaccagatgttagtgacaatgaacctgatcattatagatattctgacaccactgactctgatccagagaatgaaccttttgatgaagatc

SEQ ID NO: 3744 - DNA, 120 bp, synthetic construct
  source 1..120: mol_type = other DNA
tcaaggccagtgctaaaattcagatgctgttagtacctacatcagtcaacaacttacacttattttactagttttcaatcataatacctgctgtggatgcttcatgtgctgcctgcaagc

SEQ ID NO: 3745 - DNA, 120 bp, synthetic construct
  source 1..120: mol_type = other DNA
tggtgctgaaattgttcactagctgtggtctgacctagttaatttacaaatacagattgaataggacctactagagcagcatttatagagtttgatggcaaatagattaggcagaacttc

SEQ ID NO: 3746 - DNA, 120 bp, synthetic construct
  source 1..120: mol_type = other DNA
tggaaggggtggaactgtgcactaaagtgggggctttaactgtagtatttggcagagttgccttctacctgccagttcaaaagttcaacctgttttcatatagaatatatatactaaaaa

SEQ ID NO: 3747 - DNA, 120 bp, synthetic construct
  source 1..120: mol_type = other DNA
atatcatgtcctttgtacgttgtaatatgagctggcttggttcagtaaatgccatcaccatttccattgagaatttaaaactcaccagtgtttaatatgcaggcttccaaaggcttatga

SEQ ID NO: 3748 - DNA, 120 bp, synthetic construct
  source 1..120: mol_type = other DNA
gtttgctttggtggtagtactctggttgttaagctaggtattttgagactacttccccatcacaacaacaataaaataatcactcataatcctatcacctggagacatagccatcgttaa

SEQ ID NO: 3749 - DNA, 120 bp, synthetic construct
  source 1..120: mol_type = other DNA
tgtgtggaatgaagtgaggcttgtagtcatggttctagtgtttcagtttgccaagtctgtttactgcagtgaaattcatcaaatgtttcagtgtggttttctgtagcctatcatttactg

SEQ ID NO: 3750 - DNA, 120 bp, synthetic construct
  source 1..120: mol_type = other DNA
gaaaaataaaaatacaaaaatggtgtctgtgggagagtttttcaccggagaattggagtactccggtggtcgtctgactttctgttttggttcacgcgatgcaacagttgggaagtattt

SEQ ID NO: 3751 - DNA, 120 bp, synthetic construct
  source 1..120: mol_type = other DNA
tctatcaccaaatcctttcaccctcacccatttctttccactcggtatacactaacaattcacggcagaaaagattgaagtgggatttaggaaatggcccctggaaggctattaaaaatt

SEQ ID NO: 3752 - DNA, 120 bp, synthetic construct
  source 1..120: mol_type = other DNA
tggattatagagttagactgttgggctcacatagtggtttacctcttaccggctgagacctcaggtaagttctttaacttctccaatttgacagacatctgtaaatgtctacttttacag

SEQ ID NO: 3753 - DNA, 120 bp, synthetic construct
  source 1..120: mol_type = other DNA
aggcttgagtttgaagaaacagaagaacctgattttactgcattatgtcagaaattaaagataccagatcatgtcagagagagagcttggttaacttgggagaaagtttcatctgtggat

SEQ ID NO: 3754 - DNA, 120 bp, synthetic construct
  source 1..120: mol_type = other DNA
cctttcattttttctttgcgtaagtatagatgtatatgtttaataaaaggagcaaataattactagagttttatatgtactggggcaatagtataagaattttacatagccgggcatggt

SEQ ID NO: 3755 - DNA, 120 bp, synthetic construct
  source 1..120: mol_type = other DNA
gacttgggtattataatccccaggcatctaatgtatattttaactgacttgggtacctcatgtacaaagctgtttttgtgcatatacaattaaatgggatcagagctccttcacttttct

SEQ ID NO: 3756 - DNA, 120 bp, synthetic construct
  source 1..120: mol_type = other DNA
agggagaatgtgatacagtgtgttctaagaagcaaatgtaatgacagaataaatgtgtttccagtgcagctattctagtggcagttgtctctcttctttgaaacaagaggaggaatattg

SEQ ID NO: 3757 - DNA, 120 bp, synthetic construct
  source 1..120: mol_type = other DNA
ttggctaaggtgatgttcatattgtgacttaaggtgaatcagctgttagaattttggtttactttctgcatcttgattggtagtatggtagaatggaaaatgccttggacctcaaggcag

SEQ ID NO: 3758 - DNA, 120 bp, synthetic construct
  source 1..120: mol_type = other DNA
aggttgtttttgttccttatctggcttgttcttgttgtgagggtgggagcaatactctttgcagctttctgcattctaggaagaagtggaattttacactaccatttgctttctttacag

SEQ ID NO: 3759 - DNA, 120 bp, synthetic construct
  source 1..120: mol_type = other DNA
agtaaagtccaaactttctcagtatttgtagttcttcatggtctgtgctttaaccttccttccagtcttattttttatttccattgttggcccccaatgcctgtgttctcttcccttcca

SEQ ID NO: 3760 - DNA, 120 bp, synthetic construct
  source 1..120: mol_type = other DNA
gatagggattatgttggatctagatcaatttgcggaatattgcattcttaacaacatgaagtcttcagatgcatgcatatggaatgtcttttcgtttaagtctttctttcaccagtgttt

SEQ ID NO: 3761 - DNA, 120 bp, synthetic construct
  source 1..120: mol_type = other DNA
atccatgagcatggaatgtttttccatttgttcgtgtcatctctgatttatttgagctgtgttttgtaattcttgtagagagctttcacctccctagttagctgtattcctagatatttt

SEQ ID NO: 3762 - DNA, 120 bp, synthetic construct
  source 1..120: mol_type = other DNA
tgtttttttactttattttccatataaaaaggggtttatttagatgttagaatcatctagtgattcagaaagattggacatgaatccacccaggcccagggctgagctgcagagcagccg

SEQ ID NO: 3763 - DNA, 120 bp, synthetic construct
  source 1..120: mol_type = other DNA
gtcctggtcgtccctatcgatgacccttcgtcaatacctcaggtctaaaatgctttcctccgagcccgagttcctcctgtcgggcaaactccgccctgtctgtgccttgctgcttggcca

SEQ ID NO: 3764 - DNA, 120 bp, synthetic construct
  source 1..120: mol_type = other DNA
ggccctctgcctgaacttctgaactgctcagactccttggccttttccgccaaaaacttactaatctacagttcgatgctctcgtcactgtccactgaactcctgtcgtcagacagggag

SEQ ID NO: 3765 - DNA, 120 bp, synthetic construct
  source 1..120: mol_type = other DNA
agcaaactccccgactatgccttgagggtcaaaacgtctggatttcctgatcgatgctgtcgtcgctgtccacggagctactgtcgccgtcagagcgggaaggcacgttcagggagtaga

SEQ ID NO: 3766 - DNA, 120 bp, synthetic construct
  source 1..120: mol_type = other DNA
tggactggggagcaacccctggagtagcgttcctgagaaacattctagcagaaggggagggacgcgcagagggacgacgctttatttctctgccagcttcatatactcaaaaggttggca

SEQ ID NO: 3767 - DNA, 120 bp, synthetic construct
  source 1..120: mol_type = other DNA
atgagataaagtctgcaaatgcttctttgcagtttaaaaaggacgacgactataaacccaggatcaggacgacgttacgcatagatttattcttgacctgaccaacgagctcttgaaatt

SEQ ID NO: 3768 - DNA, 120 bp, synthetic construct
  source 1..120: mol_type = other DNA
atgcaataattttctttctgtgtctgcttatttcacttagcataatggcctccatgtccacctgtgttgtggcaagtgacaggatcacctttctttttatggctgaataatattccattg

SEQ ID NO: 3769 - DNA, 120 bp, synthetic construct
  source 1..120: mol_type = other DNA
tctgtaaggttagtagtaatttttttttatttcattcccgattttggttaatttgagccttctctcttttatcttggtcagtctaactagaagtttctcaatgttggtgatttaaagttt

SEQ ID NO: 3770 - DNA, 120 bp, synthetic construct
  source 1..120: mol_type = other DNA
ttaaccttatagatactatgaatcttataattgtttgttactgttttaactgccagctttcatgatagcatgcattttgggggatactaacatttttcttgtcatttttttcacctttct

SEQ ID NO: 3771 - DNA, 120 bp, synthetic construct
  source 1..120: mol_type = other DNA
cagtaattttggaataggcattagattcacatggttcaagattcaaacgaaagaaaagtataaacagtaaaaagtctcctcattcctttccctaagccacccacttctcttcagaggcaa

SEQ ID NO: 3772 - DNA, 120 bp, synthetic construct
  source 1..120: mol_type = other DNA
taacctgcccctacttctccctgaacttctctatccattgcactctattccttttctagcatagtatatggtttacctatttatactgctttttggttactgtctttttccctctgctcc

SEQ ID NO: 3773 - DNA, 120 bp, synthetic construct
  source 1..120: mol_type = other DNA
ttaaggtgaagtgggctatttcaaatattcaacagtttacatataaaaaagttattttaagagctaagcgtctgtatccactgatagcaatgcaacacctagtttatgatgacttgaaag

SEQ ID NO: 3774 - DNA, 120 bp, synthetic construct
  source 1..120: mol_type = other DNA
tttattgaaggagtttggtccagctgatgttggtgtatcccttgcaatattcttcatcctcatctttgcttctggaggcctttcctctgattcactatcttcatcttcattaaaagctgc

SEQ ID NO: 3775 - DNA, 120 bp, synthetic construct
  source 1..120: mol_type = other DNA
ttcacccacattgaatctgtgtttcagaaactgtctaccaaactttgtttattaagtaattattttccctagttttattcaagatatacaaagctgccaactagtgcttttcatcagcat

SEQ ID NO: 3776 - DNA, 120 bp, synthetic construct
  source 1..120: mol_type = other DNA
tgaacatggaaacagcacatcaagatttgtggaatgcagcaaaacagttccaataggagatttcatagtgataaacaccaacatgaaggaaacagtaggaccccagataagtaacctaac

SEQ ID NO: 3777 - DNA, 120 bp, synthetic construct
  source 1..120: mol_type = other DNA
atggatcaatctattcatggattaattggttttcctgagagtggcatcagtggctttatcccaagctaacatcttagcatgctcagttctctcaccatgcgataccctgcaccacctcag

SEQ ID NO: 3778 - DNA, 120 bp, synthetic construct
  source 1..120: mol_type = other DNA
cagaaagacaaatactgcatgatctcatttatatgtaaaatctttaaaaagtcaaatacatacaaacagtaaaaaggtggttagcaggggtggggagcctggggagaatgtggagatgtt

SEQ ID NO: 3779 - DNA, 120 bp, synthetic construct
  source 1..120: mol_type = other DNA
gccctttgagtatggtggcagttttctttcctatatggttatacctttttggatggatcatttttgggctttgagctcaataatctaagcagagagcttgaccagaaacttagttctagg

SEQ ID NO: 3780 - DNA, 120 bp, synthetic construct
  source 1..120: mol_type = other DNA
ccaggtacatgtttttctggaaatagaatcaactttcttacccacaaaggcattgtgtaactgggtgactgattcacatggtgttcacccctgcatgttgtttcaaaaatgtgattgagt

SEQ ID NO: 3781 - DNA, 120 bp, synthetic construct
  source 1..120: mol_type = other DNA
aagttttgtgggtacatatcaagtgtacacatttatgggacatatgaaatgccctgatgcaagcatgcagttctgttactctaaatcttgactcaactctatttttacttgttaaattct

SEQ ID NO: 3782 - DNA, 120 bp, synthetic construct
  source 1..120: mol_type = other DNA
aggatgtgagggcatttaaaaaagctactgaaaaaagttgcatggaggtatactgaaggagaaaaattgcaacagtgtcagatgctgcatagaggtctttctggattttgcatccatgtt

SEQ ID NO: 3783 - DNA, 120 bp, synthetic construct
  source 1..120: mol_type = other DNA
ggaataagtgtgatatgctgagaagaatgtatattctgttgattttggatggagagttctgtagatgtctattaggtccgcttggtgcagagctgagttcaattcctggatatccttgtt

SEQ ID NO: 3784 - DNA, 120 bp, synthetic construct
  source 1..120: mol_type = other DNA
ttccttcatttcaactttggtgaatctgacaattatgtgtcctggagttgctcttctcgaggagtatctttgtggcattctctgtatttcctgaatttgaatgttggcctgccttgctag

SEQ ID NO: 3785 - DNA, 120 bp, synthetic construct
  source 1..120: mol_type = other DNA
ggggtcagggacccacttgaggaggcagtctgtccattctcagatctcaaacttcatgctgggagaaccactacgctcttcaaagctgtcagacagggacatttaagtctgcagaggttt

SEQ ID NO: 3786 - DNA, 120 bp, synthetic construct
  source 1..120: mol_type = other DNA
ttccttgaaatatacttcttatggaagtcaaaacacaagctgcatctgaaataaaggttacattttgctcataggaaagttcttcaggtccttaaaaatcagaacctacttgtagaacat

SEQ ID NO: 3787 - DNA, 120 bp, synthetic construct
  source 1..120: mol_type = other DNA
agatatagaactttttgatcactccagaaagttctttcattcccctttgcagtcatttcccaacacctcccctctgttccgcaggcaactacagatctactttttgactttaaagattgg

SEQ ID NO: 3788 - DNA, 120 bp, synthetic construct
  source 1..120: mol_type = other DNA
ggggtggtatatattgtggggaaaaatgtgttctaaagataatgaaaaagtactctagtgataatgatagccatcaatcattaagaactgactgtatactatatactacgccaaaggctt

SEQ ID NO: 3789 - DNA, 120 bp, synthetic construct
  source 1..120: mol_type = other DNA
tggaccaaatagtgaactgccattctctcatggagccgttatgaaagtgtatttatgctgtatttctttaagaggtagcagtttgtgtcctggaaaaattttcattgtgtctctcactat

SEQ ID NO: 3790 - DNA, 120 bp, synthetic construct
  source 1..120: mol_type = other DNA
tccagcccatttttttgagtgagggctataactcattggttgctggacagcctatggatgggtcaggtgactatcttttgtttcagttagctgctttggtataattccttatacaaaatt

SEQ ID NO: 3791 - DNA, 120 bp, synthetic construct
  source 1..120: mol_type = other DNA
ccagtaatatgcattctgaatgcttcctggaaaattaaccgttttattatcctttcatgtcttccatttgttttcaaaaactttaagcttatctcccattttagccttctttgccagaaa

SEQ ID NO: 3792 - DNA, 120 bp, synthetic construct
  source 1..120: mol_type = other DNA
gaccactaaaacttcacaactgtggtggaggatgagaaaaattagagaaaaaactcaaaggcctagggcttttgaaggactgtcttttcttgcccctggttttaattgtaatatggtagc

SEQ ID NO: 3793 - DNA, 120 bp, synthetic construct
  source 1..120: mol_type = other DNA
aagggtgaagggtaactatagtggtgattttggtcagagaaaaaaccatagaaggcaatgtccgaatagggtttacaggaaaaatagaaattcaccaagcaaaatgagtgggaactggga

SEQ ID NO: 3794 - DNA, 120 bp, synthetic construct
  source 1..120: mol_type = other DNA
tgcatgctctaacagtatgcccatgtagagctccagagttttttcttggaaacagaatgagtagtacatgagattttctgcctcattggagtagtattgaagataattaatataaaggga

SEQ ID NO: 3795 - DNA, 120 bp, synthetic construct
  source 1..120: mol_type = other DNA
ctttggactaaattccccaatttttattgagtaatgtactcctccctcattctctgcttggcttattaactgttagcaagttcctataattctggtactagaaacaaccttggaaatgct

SEQ ID NO: 3796 - DNA, 120 bp, synthetic construct
  source 1..120: mol_type = other DNA
agctggagacttcaacaccccactttcagcattggacagatcttccagacagaaaatcaacaaagaaacatcagacttaatctgcactatatagaccatatgaatctaatagatatttac

SEQ ID NO: 3797 - DNA, 120 bp, synthetic construct
  source 1..120: mol_type = other DNA
tgtactcagtaatgggattgctgggtccaagggtagttctgcttttagctctttgcggaattgtcagactgctttctacaatgtttgaactaatttacactcccaaccaagagtgtataa

SEQ ID NO: 3798 - DNA, 120 bp, synthetic construct
  source 1..120: mol_type = other DNA
gagtcttttccccattgcttgcttttgtcagctttgtcaaaaagatcagctggtcctaggtgtgcaaccttatttctgggtgctctattctgttccattggtttacattattctgaaaaa

SEQ ID NO: 3799 - DNA, 120 bp, synthetic construct
  source 1..120: mol_type = other DNA
agtagaagaaaagaaagatcgagcagaaataaatgaaattgcaatgaaaaaattgcaaaagatcaatgaaacaaagtgtttttttaaaaagttaaacaaaattgacaagcctttagctag

SEQ ID NO: 3800 - DNA, 120 bp, synthetic construct
  source 1..120: mol_type = other DNA
gatagagtagtcagacaaaagatataaagggaatccagattggaaagaaagaagtcaagttatccttgtttgcagctgatacaatcttatatttggaagaacctaaagactccacaagaa

SEQ ID NO: 3801 - DNA, 120 bp, synthetic construct
  source 1..120: mol_type = other DNA
taaaaagcttctacacagcaaaggatacaatgaatgaagtgaagagacaacccacagaatggaaaaaatatttgcaaactacccctctgacaagcaattaataaccagaatatataagga

SEQ ID NO: 3802 - DNA, 120 bp, synthetic construct
  source 1..120: mol_type = other DNA
gatgggtagttgagtgcattcacgaatataattttctaaaactaggttcatattacagtgctacctttaaaatataaaaattaatttcactgaaattttatagaagagagaaatggaagg

SEQ ID NO: 3803 - DNA, 120 bp, synthetic construct
  source 1..120: mol_type = other DNA
acttgaaggacagctttgtcatgtattctattcttgagtcatattttgtttccctcaggacaatattttctggcattgaacattgctgttgagaaagctgagactagcgtaattccgctc

SEQ ID NO: 3804 - DNA, 120 bp, synthetic construct
  source 1..120: mol_type = other DNA
taatcactgtgcttttccccctcgtattgctgggactgtatatgtgtaaccctgatttgatgttctgttttctctgatttaatgtgagtgaatatcccttcactctgcacttaatctgtg

SEQ ID NO: 3805 - DNA, 120 bp, synthetic construct
  source 1..120: mol_type = other DNA
gtctcgctcagtcagtctctcatttgatattggtaccagcactttaatacctaataaaatgaaagcaaaagaatgtacttgagagagattctttcatctgacttcaccgtttttacctag

SEQ ID NO: 3806 - DNA, 120 bp, synthetic construct
  source 1..120: mol_type = other DNA
tcccatgttgctcaaagaaccatatagtaagtatttaatttatgccccttttactttctcattcagcagttgcttattgaatgtctagtgggtaccaaacatggttctaaggctgacagg

SEQ ID NO: 3807 - DNA, 120 bp, synthetic construct
  source 1..120: mol_type = other DNA
ctccatgtacttatcatgtaacttcaacagataatttacagttaatctgtagccccattgcctgctcagttcccccagctgtattattttgaagcacatctttgcataccatttcatcct

SEQ ID NO: 3808 - DNA, 120 bp, synthetic construct
  source 1..120: mol_type = other DNA
gattgtcttgagttttccacagtgtggtttttgctgatcatattctgtggtatagtttaacatgttcttctgtcctctcaatttcttgtaagttgttgattggatctagaggcaatacat

SEQ ID NO: 3809 - DNA, 120 bp, synthetic construct
  source 1..120: mol_type = other DNA
atacccattaatggttcacctcgaacacccaggcgaggtcagaacaggagtgcacggatagcaaaacaactagaaaatgatacaagaattattgaagttctctgtaaagaacatgaatgt

SEQ ID NO: 3810 - DNA, 120 bp, synthetic construct
  source 1..120: mol_type = other DNA
tctcatagtttgttttattgtccacaatcactaacaccagatagcagtaaaaaatgttacatctttgaaatttctctgttaactttgggaaggagtgagagtgtggtcctaaaatctagt

SEQ ID NO: 3811 - DNA, 120 bp, synthetic construct
  source 1..120: mol_type = other DNA
gactgtggagggaggataattgtctaactttcttagatcaatttactgtgtatcacattttttttttgcccaagaagaatctagccaagtagaattgtggtgaaactaacttttgtatag

SEQ ID NO: 3812 - DNA, 120 bp, synthetic construct
  source 1..120: mol_type = other DNA
gtgcagtgatgtatgatagtatggtctgatcagtgaactctaagtaattcattaaggttgggatacagggcagaacaattaaaatatggtactgaagaggcaagaagggaccaaatgtta

SEQ ID NO: 3813 - DNA, 120 bp, synthetic construct
  source 1..120: mol_type = other DNA
ggagtgaaccaaagggtttagaaaacattggtagaatatgtaatcaagaggatttgcaacaatgtttgaaaaaatattttatattgataagcataaaagattaaaagcaggctgggcgcg

SEQ ID NO: 3814 - DNA, 120 bp, synthetic construct
  source 1..120: mol_type = other DNA
taatactgaacaacttggttatcaataccaccagggagaaagcatctgactttcacttttaaaaaaagacttaatgattggtatacctctttgtcataaacataatggaaagagacccac

SEQ ID NO: 3815 - DNA, 120 bp, synthetic construct
  source 1..120: mol_type = other DNA
ctccaaaatatttcctgagtgcatctacttttctccatttctgctctcacaactcttgtccaagacattgttctctttctcttggattttttgcagtagcctactacctgatcttgctcc

SEQ ID NO: 3816 - DNA, 120 bp, synthetic construct
  source 1..120: mol_type = other DNA
tatactttggacaagataatgagatgacacagaagggactataaagcaatgtctgaactgaattttgaaacatgcaaaggcctgtgtcacaggataaagattttagggagtgggaacagc

SEQ ID NO: 3817 - DNA, 120 bp, synthetic construct
  source 1..120: mol_type = other DNA
tattagcagctctgtattgattgactataaaatgagagtaggaagtcacaggagaggagagtgggtactagatatgaagggccttatatgccatactcacaaatttggagtgtagcatgt

SEQ ID NO: 3818 - DNA, 120 bp, synthetic construct
  source 1..120: mol_type = other DNA
ggagtgcagagattgaagcgaagaaagctgagggagggagggagtttcattaagagcaagtatttctctaacagtgtcaaatgcttcaaggaaggtcaagtattagaacaaatgagaaaa

SEQ ID NO: 3819 - DNA, 120 bp, synthetic construct
  source 1..120: mol_type = other DNA
aaaccacagtcttatttgagggaatgtagagacaagtgggaggcagtgtatttgaagatacatttaacttgggagatggaaaacatttcattttttctttttttctcccttcattgctta

SEQ ID NO: 3820 - DNA, 120 bp, synthetic construct
  source 1..120: mol_type = other DNA
gaaagaaagagagagaatgaaactatcatctatattgcttgcttgctccttcactccttacttaaactcagatgaggattgggacccactgaaatgctcatccactaaaattggacatag

SEQ ID NO: 3821 - DNA, 120 bp, synthetic construct
  source 1..120: mol_type = other DNA
caccttccctccatgtaaaatcttagaagctatgaacattttaatggacattttggcaacaattcttttatgacaggaaatgcttgtttgttatatgtttctaagtttgtgtgctgtttt

SEQ ID NO: 3822 - DNA, 120 bp, synthetic construct
  source 1..120: mol_type = other DNA
ttgaatagccccactccaaatgatacatgtattggaacttcttttgcaacaatttccctatcttgtatttctgaaaatgtaatcaaatgatttagctaattcataactctttcaaagcac

SEQ ID NO: 3823 - DNA, 120 bp, synthetic construct
  source 1..120: mol_type = other DNA
cctcctaaagaactgcacagtgaatccaaaagaaagtatactgaaaagagtgaaggatataggatacatctttaaagagaaatttgctaaagctgtgggacagggttgtgtcgaaattgg

SEQ ID NO: 3824 - DNA, 120 bp, synthetic construct
  source 1..120: mol_type = other DNA
aagttgctctgaatgagtcagtgagtcgagtggcaagtgaatgtgaaggcctacaatattacctatgacatgactgtacactatcgtagactttataaatactacacttaggctaaacta

SEQ ID NO: 3825 - DNA, 120 bp, synthetic construct
  source 1..120: mol_type = other DNA
ggagttaaggaaatccaggtactggacctaccctcttgttaatttacttgggaatgttaatcaccacttaatacttaagttgtgagttttagacaagctagcttttgtgttgtcttggcg

SEQ ID NO: 3826 - DNA, 120 bp, synthetic construct
  source 1..120: mol_type = other DNA
tgtggtgtgtttctttggtcgggggagagggatagtgtgaggttaaggagaaggaatgcttattttagatcactatatactgaagaatgtaattggtcattataagccatttaagaggct

SEQ ID NO: 3827 - DNA, 120 bp, synthetic construct
  source 1..120: mol_type = other DNA
agcctttgatttttacaaagtgatcgaaagttttatcaaagcagaaggcaacttgacaagagaaatgataaaacatttagaacgatgtgaacatcgaatcatggaatcccttgcatggct

SEQ ID NO: 3828 - DNA, 120 bp, synthetic construct
  source 1..120: mol_type = other DNA
tccttttttatggctgcatagtatatatgtgccacatattccatggtatatatgtgccacattttcttactccagtctattattgttggacatttgggttgcttccaagtctttgctatt

SEQ ID NO: 3829 - DNA, 120 bp, synthetic construct
  source 1..120: mol_type = other DNA
aaagtggcaacttgaggttatgctcttcaaatcaacatagttggataatactttgtgaatcatcagttttgtaaattaatggtttcttttgaaactgtgttgcatgctaagtatatatct

SEQ ID NO: 3830 - DNA, 120 bp, synthetic construct
  source 1..120: mol_type = other DNA
gagtggtagtggataactttgtgaagataagttatgccacacaaacaggatactgtgtatttttcctgtgagaataattgacattatagagaagggatatggcatagatacatttgcgtt

SEQ ID NO: 3831 - DNA, 120 bp, synthetic construct
  source 1..120: mol_type = other DNA
aaatcaaagtatgtcagatgctttattccctatatgatctgtctttcctggactattctggactcttcctattgatctctcatttgctaccttgagaccatttctctcacagcagccaga

SEQ ID NO: 3832 - DNA, 120 bp, synthetic construct
  source 1..120: mol_type = other DNA
atgatgttcaggatacagttctaaaattatccagcatagaaagaaggtcaaagaaaccaaatgctggtttatagaataggagctttaggccaggtgtgtggtgcacacctaatcccagca

SEQ ID NO: 3833 - DNA, 120 bp, synthetic construct
  source 1..120: mol_type = other DNA
cctcctctttccatatgaggccagatttttctttgtatacttcaacctaaacagcatattgcaacaaagtaaatgtagaagcggataggaaaattcagctctttgctgttatgccagata

SEQ ID NO: 3834 - DNA, 120 bp, synthetic construct
  source 1..120: mol_type = other DNA
gtttttgcctgtccctgagtcttgaaatgctttcctctgcctttttcttgaccagattttaaggtccattttgcctttcctgatcatcctagtctatagtcattcttccctcatttagtc

SEQ ID NO: 3835 - DNA, 120 bp, synthetic construct
  source 1..120: mol_type = other DNA
agagagagaacattacaaagtctgagtgagtgcttgctcactcagacttttcagataggagctgaaaagttttagcaacaatgaagtcactggtgacagtgacaaggactgttaaatgaa

SEQ ID NO: 3836 - DNA, 120 bp, synthetic construct
  source 1..120: mol_type = other DNA
gtaggaggttgtagtcaaagagttgtttcaccttagaatttctggagacagaacatttctgggtagtttactgtattttaagaaatgatcttgggagtgcatgaggatcctggccaagga

SEQ ID NO: 3837 - DNA, 120 bp, synthetic construct
  source 1..120: mol_type = other DNA
ccctctctttatccctcgtaatattgtttgctctgaaaactacttgtgcctgatactagtgaagccattccagctttcttcccattaatatcaacatggcatattttccccattctttat

SEQ ID NO: 3838 - DNA, 120 bp, synthetic construct
  source 1..120: mol_type = other DNA
ccgcacccagccaacaaaaaacatttcttgtgtgcatgtctactagtgatgaattcttccagcttttatgtctggaaaaaaacattttacctttatttttaaaaggtcttttgctgggta

SEQ ID NO: 3839 - DNA, 120 bp, synthetic construct
  source 1..120: mol_type = other DNA
taatcaatagccgattttccttcactatccaggcattgctcttctgagtactctactgaatatcccatatatgacaaggtttttccactctggctagttgaaagcagaactcttcctgac

SEQ ID NO: 3840 - DNA, 120 bp, synthetic construct
  source 1..120: mol_type = other DNA
tggattctgtcatactctttttctgtggtcaccaaatattagcaaatttcttcattcagttacacaagtacttggccaacatacttttacataagaaaatacttaggatgggctggcaag

SEQ ID NO: 3841 - DNA, 120 bp, synthetic construct
  source 1..120: mol_type = other DNA
gctgccatctggtgggtacccctctgggacgaagcttccagaggaaggaacaggcagcaatctttgctcttctgcaacctccactggtgataccaggcaaacagggtctggagtggacct

SEQ ID NO: 3842 - DNA, 120 bp, synthetic construct
  source 1..120: mol_type = other DNA
gcacaaacaaatggcaaaacattccatgctcatggatgggaaaaattatagcgtgaaaatggccatactgcccacagtaatttatagattcaatgctatccccatcaagctacctttggc

SEQ ID NO: 3843 - DNA, 120 bp, synthetic construct
  source 1..120: mol_type = other DNA
gatgctggagaggctgtggagtaataggaatggttttatactgttggtggcagtgtaaattagttcaaccattgtggaagacagtgtggcgattcctcaaggatctagagccagaaataa

SEQ ID NO: 3844 - DNA, 120 bp, synthetic construct
  source 1..120: mol_type = other DNA
gctgagagctacaactcaggaaggcaagtgaattgtaagataacgattaagccacatttaacactttttaaaagcatgggccaggacaatgaagcagtatgatgccatatatacttttac

SEQ ID NO: 3845 - DNA, 120 bp, synthetic construct
  source 1..120: mol_type = other DNA
tgcctaggagctaataagtaacaagaaagggaaaagtaacatttgttgactagctcctttgtgcagtgcactgtgactattggtctggcttattcctcaggaagaaggattaaaagaaga

SEQ ID NO: 3846 - DNA, 120 bp, synthetic construct
  source 1..120: mol_type = other DNA
ttaactcataacttctcacaactctatgaaatagattctgtcatcactgtttcacagatggagaaactttcctgtgtccacaaaactggttggtgacagagccagaattttaactcaggc

SEQ ID NO: 3847 - DNA, 120 bp, synthetic construct
  source 1..120: mol_type = other DNA
gttcagggggaaaaggcatcatgggactccagcattgttaagtatgggcagtgttcactgttatattacagttggaatttgttatgttgctttagttatgaatcatgtcagtaattaccc

SEQ ID NO: 3848 - DNA, 120 bp, synthetic construct
  source 1..120: mol_type = other DNA
ttgaacccacatattttaacggggtcttctgaaaataaacgtttgcacatttcagttccaatgaagaacaaatggcctggggaagggatggagagtggtaaagaaatcccttgtagaaaa

SEQ ID NO: 3849 - DNA, 120 bp, synthetic construct
  source 1..120: mol_type = other DNA
aactatttctcatttataatgagataatggaactcagtgtatcggaagagcagactgaacacacacttctacctcctttctccccgcaaaccctacagaagtgacaaaaaagacacatat

SEQ ID NO: 3850 - DNA, 120 bp, synthetic construct
  source 1..120: mol_type = other DNA
gggtttcctgatggtgccaaagagagaagcagaacagaaattgaagtaaaccgagacttctgtaacagacctaaagaaaaagaaataggaaaggcagttcttcctaggaggaaaatacaa

SEQ ID NO: 3851 - DNA, 120 bp, synthetic construct
  source 1..120: mol_type = other DNA
ccacaaaagggaaatcataagacctaataaaaaaactgtcacaccagagcagagagaaaaatgcaaaaaatcctacgatgcaacaagcccagaaaatgtttgttccacatgagaaatcag

SEQ ID NO: 3852 - DNA, 120 bp, synthetic construct
  source 1..120: mol_type = other DNA
acatgtttcccaaagtcgtaactatacaaaaaggtataatctgaaaaatgtcatattctttgatattccttctatcccatttccaaccccacccttgttttttggtttatctttcctgtg

SEQ ID NO: 3853 - DNA, 120 bp, synthetic construct
  source 1..120: mol_type = other DNA
ttaatttgttatgtgacattgtgtctgttgtttagtcttacagttcctcagtttccccagcctaaggtgtagttacatcagatgaccatcaggccctttctgttctaagttgtgaatgtt

SEQ ID NO: 3854 - DNA, 120 bp, synthetic construct
  source 1..120: mol_type = other DNA
tacttggttcatcaggtgtccaaaattgtaggaccaaaaagcaattgcttcagattcttgataactatgtaccattcatgaaccaaatgtttctcggatgggaatatgaagtttgctcca

SEQ ID NO: 3855 - DNA, 120 bp, synthetic construct
  source 1..120: mol_type = other DNA
gagatctttaagctgaggagagttctgagaaatctcaaagttatacaattctccacccctttcccccagatcagtagattggtagttgcttctcaactcagtatgtttaagaaagagtgt

SEQ ID NO: 3856 - DNA, 120 bp, synthetic construct
  source 1..120: mol_type = other DNA
tgaacttcccaatatttggcttaaaatggccagaagagtgaaggaaaagaaaatatttacagtcatgcatcacgtaatagcattttggtcaatgaccgcataaacgatggtggtctcata

SEQ ID NO: 3857 - DNA, 120 bp, synthetic construct
  source 1..120: mol_type = other DNA
ccatgtgttaatttcttttggaggtggaaaaatagtttgtccaaaaagacacttttcacagttgaaggaacttgaaagttctgtcccagtgagtcctaatggttttatttcaggcagcag

SEQ ID NO: 3858 - DNA, 120 bp, synthetic construct
  source 1..120: mol_type = other DNA
gcacttcctccgatcacagttaaccacacgccagtgcaaacaatctttgcatttcttttggttcttagagtctttgacttaaatgggtagacaattgccagaaatcgatctacactaata

SEQ ID NO: 3859 - DNA, 120 bp, synthetic construct
  source 1..120: mol_type = other DNA
aaaggcttcctagatttgtaatatgacatcacaggaagaagaggctgggtttggacaaagaaactttcagcccagtttgtttgcacttcctttaatctgataatgtgtctgctgggaata

SEQ ID NO: 3860 - DNA, 120 bp, synthetic construct
  source 1..120: mol_type = other DNA
acttggcaaaattttaggttcatagtcttatcttccttcttcctcccagctcttcccttaaccccttaatatgacattaactatatattgaaatatatttcagattttgtctccatctaa

SEQ ID NO: 3861 - DNA, 120 bp, synthetic construct
  source 1..120: mol_type = other DNA
tgtgtgtgttcttattagaaggctggtagaagctgagtgagcattaatgaaaaaaggagtggttaataagcttgtattctcattggaaaaaattttctgttagtagttatgtcttactgt

SEQ ID NO: 3862 - DNA, 120 bp, synthetic construct
  source 1..120: mol_type = other DNA
ggttctttgtagatgattctcacatgtttgctgatgaatgaatcataaacttgaattttgttgccagttgtttctactgaggaagagccatagcagagggactgtttgaacaggaagaag

SEQ ID NO: 3863 - DNA, 120 bp, synthetic construct
  source 1..120: mol_type = other DNA
gcacctgggggaagggtgctatgggtggctattggtgcagcttcagcagacttaaacgttcctgcctgctggctctgaagagagcagcagatctcccaggacattgctcgagctctgcta

SEQ ID NO: 3864 - DNA, 120 bp, synthetic construct
  source 1..120: mol_type = other DNA
ttcaggatattatccaggagaatttccccaacctagcacgacaggccaacattccaattcaggaaatacagagaacaccacaaagatactcctcaagaagagcaaccccaagacacataa

SEQ ID NO: 3865 - DNA, 120 bp, synthetic construct
  source 1..120: mol_type = other DNA
ccactgtcaatatttgacagatcaatgagacagaaaattaacaaggatattcaggacttgaactcagctctgcaccaagcagacctaatagacatctacagaactctccaccccaaatca

SEQ ID NO: 3866 - DNA, 120 bp, synthetic construct
  source 1..120: mol_type = other DNA
cagaggtacaaggaggagctggtactattccttctgaaactattccaagcaatagaagaaaagagagtcctccttaactcattttataagccaagaatcatcctgataccataacctgcc

SEQ ID NO: 3867 - DNA, 120 bp, synthetic construct
  source 1..120: mol_type = other DNA
gccataccactcaaagtaatttatagattcaatgctatccctatcgagctaccattgacttcctttataaaattagaaaaaactactttaaatttcatatggaaccaaaaaagcccatat

SEQ ID NO: 3868 - DNA, 120 bp, synthetic construct
  source 1..120: mol_type = other DNA
agacagtgtggcgattcctcaaggatctagaaccagaaataccatttgacccagcaagcccattactgggtatatacccaaaggattataaataattctaatataaagacacatgcacac

SEQ ID NO: 3869 - DNA, 120 bp, synthetic construct
  source 1..120: mol_type = other DNA
aatgaaatatagtgaatttcattatgtaatgcatcggtttttaaaatttaatgacatctgattctgattctttgaatactttcactgcttaagctgctgggttgggtttttgtttttgtt

SEQ ID NO: 3870 - DNA, 120 bp, synthetic construct
  source 1..120: mol_type = other DNA
taaacttacttcagtcattttgcatgcagcaaatgtttgccatggtgaaatgtgacttccatctcttaatttacacttatgcaaaaagcagttttctcatttgggattcttttgatgctc

SEQ ID NO: 3871 - DNA, 120 bp, synthetic construct
  source 1..120: mol_type = other DNA
cgaactctcttgttgcttcttcatctccaactcttagaatcatatcacgtcttttctatggagtctccttaatctcatcagttccttttctgtacttccacagtacttagtttgcctttt

SEQ ID NO: 3872 - DNA, 120 bp, synthetic construct
  source 1..120: mol_type = other DNA
aactgggtcctcacaagaagtacccaacccagttccttatacatgtttgtataatgaaagaatacaacttagtgagtgcatgcataaaggataatagaaagcactgtgacctagagatcc

SEQ ID NO: 3873 - DNA, 120 bp, synthetic construct
  source 1..120: mol_type = other DNA
tagctgattattgctggagcaggaactcgaatcctagtttcttgacttctagtcaaatgttctcgtagtaacaggtagctttcaccctttttttcttactgatgttgtgctagttcgttc

SEQ ID NO: 3874 - DNA, 120 bp, synthetic construct
  source 1..120: mol_type = other DNA
actggggagcacacttcaacacgagtcatcttctaccaaacctcacctccagcactggggagcacatttcaacacgagtcatcttctaccaaacctcacctccagcattggggagcacat

SEQ ID NO: 3875 - DNA, 120 bp, synthetic construct
  source 1..120: mol_type = other DNA
acttattgacttgtatcttttacctattactgaggggtagaagttaaaaaggattggtctctcaggatgctcctggaagctgcatgcttgtggctataaagctattctctgatatacctg

SEQ ID NO: 3876 - DNA, 120 bp, synthetic construct
  source 1..120: mol_type = other DNA
tcagtgcatgtttttacaagtttgttcacctgtagatactgtgggttatatcacctagcagtttcatttctaagaaaaaaatcccctcctaatttgcattctccacaccttcacccaaac

SEQ ID NO: 3877 - DNA, 120 bp, synthetic construct
  source 1..120: mol_type = other DNA
caagtctgttagaacaaactaacaaaaaataacaacccattcaaaaaggtgggagatgcatctaaacaagcatatcattttgtccttaacttaaaagtggttctcagttttaggtaccca

SEQ ID NO: 3878 - DNA, 120 bp, synthetic construct
  source 1..120: mol_type = other DNA
aactggtcatatggtgataagttctctgaagaaaaataatttaggaggaaaaagggggtgggcttttactgttctacatagggaggtcaaagaaggccttgctaataaggggacatttga

SEQ ID NO: 3879 - DNA, 120 bp, synthetic construct
  source 1..120: mol_type = other DNA
gactgaactttcttctcctgaatttaatttccctgatagcagggacatctgacagcctatgtcaactgtcttccttgacttctgtcaattatttgtcctaactatgcttgagtaagcgta

SEQ ID NO: 3880 - DNA, 120 bp, synthetic construct
  source 1..120: mol_type = other DNA
atcttttggaaaactttcagttaaactagacaaataaggactttggcttattcagatttattccattcatcatctttgaattagtttcttcttgagaagaagcatatcttacaacttttg

SEQ ID NO: 3881 - DNA, 120 bp, synthetic construct
  source 1..120: mol_type = other DNA
gagttgtatggttattttgcattttctttgataaaagactgcaaaagtattttccagagtggttgaatcattttaaatttccgccagcaatatacgagtgagtgatccagtttctctgca

SEQ ID NO: 3882 - DNA, 120 bp, synthetic construct
  source 1..120: mol_type = other DNA
gattaggtcctggatggaactgaggttaactgaggataattttaagatttgtactatgggtgattaggtggttgataacacaattaaccaaagtaggtattgaaagaccatctcatagct

SEQ ID NO: 3883 - DNA, 120 bp, synthetic construct
  source 1..120: mol_type = other DNA
cagtgaaatttatactaatcttgctgacagtgagagcctggtttccttcacaagactaagtagcaaaacagagtgaagcgttgttcagagagcaattaggctgacagttaatttgagtag

SEQ ID NO: 3884 - DNA, 120 bp, synthetic construct
  source 1..120: mol_type = other DNA
gaactgtctgcacaaggatataaatacccagtgtcagagattattggggtgatcttggaggctggctgccatagttatgacttagtgtcaattagaaaacaaatcctattatcagttttc

SEQ ID NO: 3885 - DNA, 120 bp, synthetic construct
  source 1..120: mol_type = other DNA
ggtactactatgaatgtgctatttctcttagcatctctagatgaatggatcagtgaatgaatgatagatggaattgtggccagtggaactaattgtaggggtaaacagcaacctagaaac

SEQ ID NO: 3886 - DNA, 120 bp, synthetic construct
  source 1..120: mol_type = other DNA
ctttttgggtatatcaaaatcttgggagtaaaagggaaacctggcatgcatgtttaataaagcttccttggggactctgatatatgctgcctcccaaataaattacaagccatatcagga

SEQ ID NO: 3887 - DNA, 120 bp, synthetic construct
  source 1..120: mol_type = other DNA
gtagggaagaaaaaaagaatcctgcagacattctaaggatgacctaggccattgatagtctaagcttgaaattaatcattagattttctgaactcttattacactggatctgttcagtct

SEQ ID NO: 3888 - DNA, 120 bp, synthetic construct
  source 1..120: mol_type = other DNA
gaattcacccttcttgtgtttttctattcagtcgtaacccactccttctacatctacaaaatttggtgaggcatctttgactttcatcatattcagacatgctagcttcaagaactttcc

SEQ ID NO: 3889 - DNA, 120 bp, synthetic construct
  source 1..120: mol_type = other DNA
tgtcatctcccttggagctgcctcccagagctggtatatcagacatcctcaagtaaacctggacccaattttagaaatcttggctaattttgagttaggaagtcctttctttaaacaata

SEQ ID NO: 3890 - DNA, 120 bp, synthetic construct
  source 1..120: mol_type = other DNA
tttagtgttcagggcaccaagggtacatttcatactaagattgtgcaagtgagagtaaatgcctccttaaattttccatcttaggcacctccgttgcttttagacctggctatgttttat

SEQ ID NO: 3891 - DNA, 120 bp, synthetic construct
  source 1..120: mol_type = other DNA
ttttttttttaatttcacagatcaatagagttaactcctgagttatatgcatacaaccccaaagttgtttgctgtctggagctgtgcctacacccgcctggcatattcttgagacattgg

SEQ ID NO: 3892 - DNA, 120 bp, synthetic construct
  source 1..120: mol_type = other DNA
tgcctcttctcaccagaccctgagcaccgtgtaagtaggaacaaagtattatttcaaagacccaagtctgaaacggtttatctgtttatacttaatggctaaggtatacatgtacacgta

SEQ ID NO: 3893 - DNA, 120 bp, synthetic construct
  source 1..120: mol_type = other DNA
taacatattagctctatgaggacatctaggaggcagcaagagtagaagtatggaaaccagtttgtaggatgcttttgcagtgggacagaaaagagataagaattgctttgactctagcaa

SEQ ID NO: 3894 - DNA, 120 bp, synthetic construct
  source 1..120: mol_type = other DNA
gatttgaacccatgtactgtggctccagagtttgtgctcctacctactgcactatagttttcccgtgatcatgacatactcatcatcataaaccaatatctatatatctgtgtgaccatt

SEQ ID NO: 3895 - DNA, 120 bp, synthetic construct
  source 1..120: mol_type = other DNA
gttcaagtggctacttgaagtcacttcatgtgatgtatcatgtaatcctgcaaaatgagtgctgtattcctgtttttcaagtaatgaaactgaggttcagagagcaaaacgtttcattgc

SEQ ID NO: 3896 - DNA, 120 bp, synthetic construct
  source 1..120: mol_type = other DNA
gccgttttagtggggttttatgagagagagttaatgtctgcattcatttggcatctttaaccaatgttgtttatcttctgcagattccatttaatttagtttgttgtagttttagtcatc

SEQ ID NO: 3897 - DNA, 120 bp, synthetic construct
  source 1..120: mol_type = other DNA
tcacttcccttgttagctgtattcctaggtattttattcattttgtagcaattgtgaattggagttcattcatgatttggctctttgcttgcttattgttggtgtataggaatgctagcg

SEQ ID NO: 3898 - DNA, 120 bp, synthetic construct
  source 1..120: mol_type = other DNA
agctttggggtttgtttgctctttgaactggttttagtatcaatattgtactagcttcataaaatgagatgaggaatgtttctagtttttccattccaggaagaaaatctgagtaaaagt

SEQ ID NO: 3899 - DNA, 120 bp, synthetic construct
  source 1..120: mol_type = other DNA
catataggattcacctttatttgatcttattaaacaatcaaaggaccgagaaggaccaactgatcaccttgaatctgcttgtcctcttaatcttcctctccagaataatcacactgcagc

SEQ ID NO: 3900 - DNA, 120 bp, synthetic construct
  source 1..120: mol_type = other DNA
cagcccataaggtaacagatactgctgtcagcctgttaactataaaataggaattagagaaataagataacttgcctaaggtcaatagaattcaaacccaagctatctaatcccaaagtc

SEQ ID NO: 3901 - DNA, 120 bp, synthetic construct
  source 1..120: mol_type = other DNA
gaaagggacagggcaaggcaaaaagcgaggaaaccaatttggagactatttctgtagttcagatgagggatgtaggtgacttggtctaaggtatggtattagaaatagaaatggagagat

SEQ ID NO: 3902 - DNA, 120 bp, synthetic construct
  source 1..120: mol_type = other DNA
ttaaatatatctaggtatctttctcctgtaagatctccaaagaaaaaaggttcaactacgcgtgtaaattctactgcaaatgcagagacacaagcaacctcagccttccagacccagaag

SEQ ID NO: 3903 - DNA, 120 bp, synthetic construct
  source 1..120: mol_type = other DNA
aagcttggagacgccagaaaccacagggccccaaagagggagtcacagccctggctcaaggagctcccaattctgggctccccgaagggccgcagctcttctctcttctttacccacaac

SEQ ID NO: 3904 - DNA, 120 bp, synthetic construct
  source 1..120: mol_type = other DNA
gtacatacaaaagtagtgtgttgttgcctactgcagacacatttcctggatattttcaggacatttaagaaggccagtaaccaggtcatgtagcattctctgagtgtgtatatatggtgg

SEQ ID NO: 3905 - DNA, 120 bp, synthetic construct
  source 1..120: mol_type = other DNA
gtgggaatgaccagtggtgagtgattattaatagaattgaaacaaaccctattgggtttgtctaattttacagtgtcttatgacctttcctccactacttcccacctctgccccaatttc

SEQ ID NO: 3906 - DNA, 120 bp, synthetic construct
  source 1..120: mol_type = other DNA
aacagtaaaaatgactaatttttcttattcccacagtgtatcggctagcctatctccggctaaatacactttgtgaacgccttctgtctgagcacccagaattagaacatatcatctgga

SEQ ID NO: 3907 - DNA, 120 bp, synthetic construct
  source 1..120: mol_type = other DNA
accataatcaattttagaatttgtatcacaccagaaagaaactccataccctcaagcagtcaccccctattcccctaccccctcagcccaaggcaatactaatctattttctctctatgg

SEQ ID NO: 3908 - DNA, 120 bp, synthetic construct
  source 1..120: mol_type = other DNA
tgtcgcccaggctagagtgcagtggcacgatctcggctcacggcaatcttcgccttctgggttcaagcaattcttctgcctcagcctcctgagtagctgggattacaggtgtgtgccacc

SEQ ID NO: 3909 - DNA, 120 bp, synthetic construct
  source 1..120: mol_type = other DNA
aagctattcttatgtcaggactacactgtacacttggctgtaggatgccaagcaaaaatgattatttggcattcttggcaatagtaggtaagagcaagaatgttgcagaagcaatgagta

SEQ ID NO: 3910 - DNA, 120 bp, synthetic construct
  source 1..120: mol_type = other DNA
atgatgtgttccatgtatggcatatgcaaagtgaagaatatagaccttaaattcaaaatcattgtaacagcatacaaggatcttcctcatgctgttcaggaggtaggtaattttccatag

SEQ ID NO: 3911 - DNA, 120 bp, synthetic construct
  source 1..120: mol_type = other DNA
ctcttcttggatggccagctcttccatctgctgctgcctggctatttctctcaatcattctgtgacatttcacttctagaagagcagctataatccaagcctaagaagtaattttattta

SEQ ID NO: 3912 - DNA, 120 bp, synthetic construct
  source 1..120: mol_type = other DNA
aacggcgcaccacgagactatatcccacacctggctcagagggtcctacgcccacggaatctcgctgattgctagcacagcagtctgtgatcaaactgcaaggcggcagcgaggctgggg

SEQ ID NO: 3913 - DNA, 120 bp, synthetic construct
  source 1..120: mol_type = other DNA
aaaaagaataaaaagaaatgagcaaagcctccaagaaatatgggactatgtgaaaagaccaaatctacgtctgattggtgtacctgaaagtgatgtggagaatggaaccaagttggaaaa

SEQ ID NO: 3914 - DNA, 120 bp, synthetic construct
  source 1..120: mol_type = other DNA
taactatcctaaatgtttatgcacccaatacaggagcacccagattcataaagcaagtcctgagtgacctacaaagagacttagactcccacacattaataatgggagactttaacaccc

SEQ ID NO: 3915 - DNA, 120 bp, synthetic construct
  source 1..120: mol_type = other DNA
aaaccaggaagaagttgaatctctgaatagaccaataacaggctctgaaattgtggcaataatcaatagtttaccaaccaaaaagagtccaggaccagatggattcacagccgaattcta

SEQ ID NO: 3916 - DNA, 120 bp, synthetic construct
  source 1..120: mol_type = other DNA
caagagatgtgaaggacctcttcaaggagaactacaaaccactgctcaaggaaataaaagaggacacaaacaaatggaagaacattccatgctcatgggtaggaagaatcaatatcgtga

SEQ ID NO: 3917 - DNA, 120 bp, synthetic construct
  source 1..120: mol_type = other DNA
ccactatgagatatcatctcacaccagttagaatggcaatcattaaaaagtcaggaaacaacaggtgctggagaggatgtggagaaataggaacacttttacactgttggtgggactgta

SEQ ID NO: 3918 - DNA, 120 bp, synthetic construct
  source 1..120: mol_type = other DNA
gatttttttccttttgcttgttatattaaatgtagattactgtcaattaagtctttagaggtccatccctaatcctgctggcggcctctttaccacctcaccttgggcaggtctctatct

SEQ ID NO: 3919 - DNA, 120 bp, synthetic construct
  source 1..120: mol_type = other DNA
taaccttgaaacttgcctttgccctccctaaatatgggcaatggcagaatatgttcttgcagacctataacttttgctttaaaactaagagactaggtgagtatatgattagacgggcac

SEQ ID NO: 3920 - DNA, 120 bp, synthetic construct
  source 1..120: mol_type = other DNA
gtctgacttgaatacgaagttggggggttccgatagtgcctcttccttacagtttgatccactgccagaactactcacaaaactctggaaaatattctacttactattatcagttcatca

SEQ ID NO: 3921 - DNA, 120 bp, synthetic construct
  source 1..120: mol_type = other DNA
acatttattctaggctgcaaatccacaaccctagttggccttccattaaagtcactaattcagcagtcccatattcaatatgcattactgttaatatgttgcaccatctccattcccctg

SEQ ID NO: 3922 - DNA, 120 bp, synthetic construct
  source 1..120: mol_type = other DNA
ctcagctgtcagactttacaaaggagctatgggaccttataaggacagttggaactggctaggtatcacatagtggtcttcaaacatttttgcttgccataacctctaaaataattggga

SEQ ID NO: 3923 - DNA, 120 bp, synthetic construct
  source 1..120: mol_type = other DNA
agatggtcatctggggaatccagagtctcagcactgctcctggcttataccaatttctttcatgccaagtttatttggaagttgtgagaatggctcaaaataatagatatgagtgtagtg

SEQ ID NO: 3924 - DNA, 120 bp, synthetic construct
  source 1..120: mol_type = other DNA
tgggttgtcttaggtagttatggtagtgagtgtaacatttcccagtatctgctgccagatccattgataggaaaaggaactgggattttgaaagaagacaaatattcaggagataggtgt

SEQ ID NO: 3925 - DNA, 120 bp, synthetic construct
  source 1..120: mol_type = other DNA
ggcagaattttaacccctgaggctaaggcatttctttaggatgctcttcagcttttcttaaagaattacatttagaaaagatcatcatacaatgctggattgcccagaatggaagggcat

SEQ ID NO: 3926 - DNA, 120 bp, synthetic construct
  source 1..120: mol_type = other DNA
tgacatgagcataatatatatggcagccacttgccaacttacccagtaccatcaatgctgttaacagttcttcatcctttttccagcttctactcgaacacgaatgcaaaagcagaaaat

SEQ ID NO: 3927 - DNA, 120 bp, synthetic construct
  source 1..120: mol_type = other DNA
actgaatttataaagtacccatctagtacttgaaaaagtaaagtgttctgccagatcttaggtatagaggaccctaacacagtatatcccaagtgcactttctaatgtttctgggtcctg

SEQ ID NO: 3928 - DNA, 120 bp, synthetic construct
  source 1..120: mol_type = other DNA
atctcatccattcctagcctttaaggggctctatatgctagagatttccaaatttatttcttcagccctgatcttttcacagaggtcaaggcttttatagccaacagaactcttgattcc

SEQ ID NO: 3929 - DNA, 120 bp, synthetic construct
  source 1..120: mol_type = other DNA
accaagctaaaatcatcactgtgtattgtatcattctccttcaaaagtgtaacagcatccatctatgactatttcccaccatctgaaattgcctttcttgttacctgtctccccatccct

SEQ ID NO: 3930 - DNA, 120 bp, synthetic construct
  source 1..120: mol_type = other DNA
gcatatctcagtaggctgtatttatattgggcggggatcttaaatgaaatgcagtctcttaggtcacgtcaaaatcaagcagcctaaatgacactaaaaaattttgtctgcatggcagag

SEQ ID NO: 3931 - DNA, 120 bp, synthetic construct
  source 1..120: mol_type = other DNA
cagcagatgagggcacttcttcattcctataaaatcttaacctttctctgtgtaaattagtggacaattattttagaagcactaaaacattgacttccttgtgtgagcaagagaggaaac

SEQ ID NO: 3932 - DNA, 120 bp, synthetic construct
  source 1..120: mol_type = other DNA
cccaggactcatctgtcatctctcagatctaaaactagctcttctttattgtttggcgtcagaagttttaagggctaaaccactaattctcatccttggctgaacatcaaattacttgtg

SEQ ID NO: 3933 - DNA, 120 bp, synthetic construct
  source 1..120: mol_type = other DNA
gaaggtgggggagagagaccaaagaaacaaagactgtggttgtctaatggccagaacagatgctataggtgcttgccatgtttgaatgtttttttgttggataaaatagcaaacttatca

SEQ ID NO: 3934 - DNA, 120 bp, synthetic construct
  source 1..120: mol_type = other DNA
aactagaactctcattcactgctcatggacatgaaaaacggtacagccactttgaactacagtttgacagtttcttaaaaaaaaaaaaatactcttaacatataatccagtaatcatgct

SEQ ID NO: 3935 - DNA, 120 bp, synthetic construct
  source 1..120: mol_type = other DNA
aagtcacctcaccaataaagagcagaccaagacaataatatgaatgataattaggttgtttataagctatttgtggtctagggtgggctttcctatgagactttatccgagtaactgctt

SEQ ID NO: 3936 - DNA, 120 bp, synthetic construct
  source 1..120: mol_type = other DNA
aagctatctatgtggtatcagccagctgaataatggaacatttgggccagaatagcatatactgagaccagggtaccaaaggtgtccaatttaagtgactcaaaaagaggaaatggtaaa

SEQ ID NO: 3937 - DNA, 120 bp, synthetic construct
  source 1..120: mol_type = other DNA
caataatctcaactgggaaaatgctttaaagaaatcatgacttccaagtctctggtaagagagacccaacagattggtgttttctggcttactgtaatgcactctgggccaaagaataat

SEQ ID NO: 3938 - DNA, 120 bp, synthetic construct
  source 1..120: mol_type = other DNA
tactaaattaaggacaggacttggaaagagttcctgtgattctaagaattcaataaattggcatagggtggtggtactggttataggggaattctgtccatagaaaacaaggcccccatt

SEQ ID NO: 3939 - DNA, 120 bp, synthetic construct
  source 1..120: mol_type = other DNA
tcttcaaacctgtctcacgtcactgcctcatagctttgacttcagcacatttctctctgacttccaggcttgcttatccaatttgcttattagacatttccatttggatgtctaatagac

SEQ ID NO: 3940 - DNA, 120 bp, synthetic construct
  source 1..120: mol_type = other DNA
ttgtcaccatctgacatactatatatcctattcatttattgatcacctatctcccctcaccagaaattcccatgagagcagagattttggattgttttgttcatttgcagtaccccagtg

SEQ ID NO: 3941 - DNA, 120 bp, synthetic construct
  source 1..120: mol_type = other DNA
tccatcaccgtggctcatcactgtgatgctcaagaatggactaggaaaagtgcatggattttgtctgaccatgaaacattctgtgttgtaagtgcccaatatgttattgccttgatataa

SEQ ID NO: 3942 - DNA, 120 bp, synthetic construct
  source 1..120: mol_type = other DNA
cttgttacttcattttttaaaaaatattaaatatttcctctacccagactttcttttagtttaaggtacgaggcagacacctgggttccatttctccaggaggccggcagctggaagcaa

SEQ ID NO: 3943 - DNA, 120 bp, synthetic construct
  source 1..120: mol_type = other DNA
gtcacagtggctttgagggtgcaatattctctggtttcctcttactcgacatttacacagaatttgatatggttgataatgctctccttaggacactttgtcacttgcttgcatttttct

SEQ ID NO: 3944 - DNA, 120 bp, synthetic construct
  source 1..120: mol_type = other DNA
aaaggctagctgaatccggctactagaacactgtcatgtccacctcaagctaacttttcatgcaaggtacttaatagagtgtacgaagtataaagagcagggatttcatcaattttacca

SEQ ID NO: 3945 - DNA, 120 bp, synthetic construct
  source 1..120: mol_type = other DNA
ctgtctcaaaaaaaaaaaaattatcacttgggtatctaatgggaagctcaaactcctttgactttcaaagtccagagcaagcctgttgttctctatcttcctcacctcagtgccattaag

SEQ ID NO: 3946 - DNA, 120 bp, synthetic construct
  source 1..120: mol_type = other DNA
tatgaaaattcactcatttctacaatatcatcctcgttatcttccaatgacgaacgaaaatgctcacatctgaaggaaaaaagcagtatgtcaggtcctagcttcccagccaggacagat

SEQ ID NO: 3947 - DNA, 120 bp, synthetic construct
  source 1..120: mol_type = other DNA
ggttgatgtgatatagagagagtgagcaaacgctgcacagcttgatcttactaaagaggaacttgagactaaaatgctgtgttgagtgtgtgactcactgcagtaggatttaaatatctg

SEQ ID NO: 3948 - DNA, 120 bp, synthetic construct
  source 1..120: mol_type = other DNA
tctaggagaataatgcaaatgcttccagagttagctacagacataatgaacacacaggacaggatatggcactactctactggtactcatgaaagtaccaattcctcaaaataactgagc

SEQ ID NO: 3949 - DNA, 120 bp, synthetic construct
  source 1..120: mol_type = other DNA
agttcccttttgtagaagcccatcagagagaaataaattatgatagtgcacctaacaaaatcctcattatcaaagtaaagccctgagctctttcccagattttcaggccatcccccaaat

SEQ ID NO: 3950 - DNA, 120 bp, synthetic construct
  source 1..120: mol_type = other DNA
gatctggaagtaatttcttttccatcagaataagccaccatacagattgaaggaaaatggtaaactcttttaacccaggggaagtccccatcttgattttgctacagcagacaatggtac

SEQ ID NO: 3951 - DNA, 120 bp, synthetic construct
  source 1..120: mol_type = other DNA
tcactggcttaattctctctaagcacataacgtggtgtcttactgaatataatctatgggtcactttactgactgaggaagactcaacaacacagagcaaaggttgtgtaagaccccact

SEQ ID NO: 3952 - DNA, 120 bp, synthetic construct
  source 1..120: mol_type = other DNA
attcttataatcagctttaccatcttttcaaagaaaaaaaaagatgagggggaacaggatacaggcagcaatcctctcacggtttgtggttttgtgtacgtgaaataagttccttggcag

SEQ ID NO: 3953 - DNA, 120 bp, synthetic construct
  source 1..120: mol_type = other DNA
tttagcactttgcagtgacctactaggcaaagacttctacattttttggaatcatttctgtgtcctttggggtaatgttctatgaaaaatgtcagtgactggagcacaacagcatccttc

SEQ ID NO: 3954 - DNA, 120 bp, synthetic construct
  source 1..120: mol_type = other DNA
aaacagcaaagatgacagatccacagcagggattcccaatcctggttttgtaagagcccaagtattataccaactacctcagaagtcaaagaattctcagaaattcaaggaaaagttagc

SEQ ID NO: 3955 - DNA, 120 bp, synthetic construct
  source 1..120: mol_type = other DNA
ataactgcagtttaagaagacagaaatgcaatagataactcccaatgtccagttaagcaacttggcactcacacagcttccattcccattacctgcttctctgctactttttctttctcc

SEQ ID NO: 3956 - DNA, 120 bp, synthetic construct
  source 1..120: mol_type = other DNA
gcagcattcatttctacaatgactgcaaccctggtttaaaagaaaagatagtgaaacgtttttgctctacactactatcaggaaatgaaaagtggaaaggcagtgatctgaccatgcttg

SEQ ID NO: 3957 - DNA, 120 bp, synthetic construct
  source 1..120: mol_type = other DNA
acaaagtaggttaagaatcaaaaatgaaaaaaaaaggaagaggcagcctacccgtaggagaggcaagcattaagttaaccaacatccttccagaacatgtgggccagaattgcagtaaga

SEQ ID NO: 3958 - DNA, 120 bp, synthetic construct
  source 1..120: mol_type = other DNA
ctaaacttttcatcctgccaacaaatctatgtttttaatacattgatatctttgccagcgaagacttaaaaatacacgcacacaaactgacagtggacgtaccctctggacacggatgcc

SEQ ID NO: 3959 - DNA, 120 bp, synthetic construct
  source 1..120: mol_type = other DNA
ttgtttgtttgacagattagtagagatatgacagggcactaaaccatgattagttgtcccattgcccagctggctataagcattatgaccccaggtaaagacttctccttctgaaaataa

SEQ ID NO: 3960 - DNA, 120 bp, synthetic construct
  source 1..120: mol_type = other DNA
tataattggtgtctgataattttaatgcctgatatttagtaatccgttcttgctgtctgttgtttcttctggttcccattcatggtaccttgtttccttgcatagcaagccccccttatc

SEQ ID NO: 3961 - DNA, 120 bp, synthetic construct
  source 1..120: mol_type = other DNA
tccttttttcctccttgcttcactcagagcaaggaatttttctagtcaatcccttatgaagtggctaatccctactactaatgccaactacagccatcagtcactctttagtgtaagaat

SEQ ID NO: 3962 - DNA, 120 bp, synthetic construct
  source 1..120: mol_type = other DNA
agcctgtactggctgaaaaggaaaaaatatatgttgaaatgacaaattaaaaagtgaattttctctgccccttcagttctgtagaagagggcgaacactggttttgggaggaacacactg

SEQ ID NO: 3963 - DNA, 120 bp, synthetic construct
  source 1..120: mol_type = other DNA
tactggctgtacttcaacacataaatgttgcagggtcacaattaaccccctaacagcatacattaagatcacgagcacccacactcctataagaggaagttataaatttgtttgaaagag

SEQ ID NO: 3964 - DNA, 120 bp, synthetic construct
  source 1..120: mol_type = other DNA
tttctatcttttctgaataatcttcatggcactattgaatgctgtagctaaaaagagctcaaaagatagttttctgagaaacccgaagaaaccccagagaggagctgcagtgggttgaat

SEQ ID NO: 3965 - DNA, 120 bp, synthetic construct
  source 1..120: mol_type = other DNA
cacttggtttactgaaaaaagagcaacttgcccaaggccacaatagagctaaggatggaattttgttacgttagcttttagttaagcttctactttaaattaccccaccacccaatatca

SEQ ID NO: 3966 - DNA, 120 bp, synthetic construct
  source 1..120: mol_type = other DNA
gtataaaaacctatggtacccagcccgtaactctactggctactgggattccaatgcgtgtgttttctttaatgaaacctccagtctgtaagttttatgaaatgatgctacaagtcaaga

SEQ ID NO: 3967 - DNA, 120 bp, synthetic construct
  source 1..120: mol_type = other DNA
actgcaggtgataattaacccagactggctttcttttactacttttctcacatctagtccacctccccttccttcaagacctggcatctgtttgagaaatgtcaagtagtgaaattttaa

SEQ ID NO: 3968 - DNA, 120 bp, synthetic construct
  source 1..120: mol_type = other DNA
tatctgttggcatctcagtgattacactgtgagcccctcaaagatagatagtatctcattgattttcctatcggtgaccaataggtgcttcatgaagtatgtttcatgcaacagaacaca

SEQ ID NO: 3969 - DNA, 120 bp, synthetic construct
  source 1..120: mol_type = other DNA
atcaaatatgtagcaatgcactaaatgttcttgccttaataaccatgcccacatcacctactttctaccaggtaaaagtaacagcaggagcagctctagcagaagctatgcaatatgtct

SEQ ID NO: 3970 - DNA, 120 bp, synthetic construct
  source 1..120: mol_type = other DNA
ctaggccccctttcgttcctagcagaagggaaatcttcctaatgtgctaaaatcatgaaaaaccgatcctgggcttttgagtaggaaataacctcttttcagtgtcttttatcaatttca

SEQ ID NO: 3971 - DNA, 120 bp, synthetic construct
  source 1..120: mol_type = other DNA
tttgggaccctccactgtatttcagggctagatactttaagtttttcttgtgtacattctcaacagttctattttatactgactggctgggagcattccctccaaaaacttttgtacctg

SEQ ID NO: 3972 - DNA, 120 bp, synthetic construct
  source 1..120: mol_type = other DNA
atgtgttatggataccaacatatgcatggctagactttgatgggaattttttcgtggggaagttttggtggagggaataccaaagataaaaggtcccatgtaactctgtcaatgaattgg

SEQ ID NO: 3973 - DNA, 120 bp, synthetic construct
  source 1..120: mol_type = other DNA
atcagtgtattaaaatggcaaaaatgtgctttctacttatggtctaaatctgcttacaaatgtccccccttttctgcataggagggcaatgtttcttgtagagccaaggcagaagctggc

SEQ ID NO: 3974 - DNA, 120 bp, synthetic construct
  source 1..120: mol_type = other DNA
tcctgccactgatctctgtctttaaaggttccaaatgggacactcggtggccagtagttcaagtctgtacaaaagtaatgtttcaaagccaaatatatatcaagtaaggtaatctgtcac

SEQ ID NO: 3975 - DNA, 120 bp, synthetic construct
  source 1..120: mol_type = other DNA
ccaaatttcaacaagagtgatgagtcagatcttcagtacaaagcaaagcggtatttaattgaaaagattactgagcttgacaacttcagtcttttcagccacacacggcaaaagtgtcat

SEQ ID NO: 3976 - DNA, 120 bp, synthetic construct
  source 1..120: mol_type = other DNA
ccatccactcctttgaagtaaaatctccaagtagaactctcttttagtctttaacaagagtccttaatgtcactctgtaaccccaataattcctggtctccaatctaccttttcctggac

SEQ ID NO: 3977 - DNA, 120 bp, synthetic construct
  source 1..120: mol_type = other DNA
gtcagagggacatttagaagcaattgcaaaaactgtggagacaacgtacagtttttctcagcacaatttacatagatgtctggctagctcttccttgtaaaagtccagtgtcttcatttg

SEQ ID NO: 3978 - DNA, 120 bp, synthetic construct
  source 1..120: mol_type = other DNA
ctcttctattccagcccccaaatatctgtatcagcacatcatataagattacaaagcacagagtaatgacattgttagaaactcttcacagtagccccaggagtcacgaaactgacttaa

SEQ ID NO: 3979 - DNA, 120 bp, synthetic construct
  source 1..120: mol_type = other DNA
ggggtactagatttatgggacgggagcctaggggtcgaggccacagaaatgaaaacatcggcaacatatgcagtgcagcgagtgggttaggagggagaaacttcaggcaggacgctccct

SEQ ID NO: 3980 - DNA, 120 bp, synthetic construct
  source 1..120: mol_type = other DNA
cactgcacttctgttggcctttgtagatttaagtaaaatgcaccacaactttgcagtgtgcaataatttcttccactgcactacacttaaattgacctgagtgggttttggttaaatgct

SEQ ID NO: 3981 - DNA, 120 bp, synthetic construct
  source 1..120: mol_type = other DNA
ctaaaaatttagactctgagagagtataggttagtatttcaggagttaaagttcccatcaccacatctcccaagtttacctacatctgtacctgtgcactctattccttcccattactgg

SEQ ID NO: 3982 - DNA, 120 bp, synthetic construct
  source 1..120: mol_type = other DNA
tcaccaatgacctcagaattgctaaatcagtggttacttttccattatctcacctgaactatcagcagcattagaagcatttgcttacagctgccatcttgaagcattcatcttcttctg

SEQ ID NO: 3983 - DNA, 120 bp, synthetic construct
  source 1..120: mol_type = other DNA
taggcacatatacacttactgtggcaatagtgaaagaatgacaaaataccaagaggtgatcagagaaggctttccaaaacagattactttagcattaagttttcagtgtgggctgggtgc

SEQ ID NO: 3984 - DNA, 120 bp, synthetic construct
  source 1..120: mol_type = other DNA
cccagaccaatgtcatggagttttcccctacgttatagtagttttatagtttcaggtcttaagttttaagtctttaatccatttttagttgatttttgtatttggtgtgagaaaaaggtt

SEQ ID NO: 3985 - DNA, 120 bp, synthetic construct
  source 1..120: mol_type = other DNA
agcccaaatttattttctttgccatatcttgaaatagtcttgcaaagctgacttgtggggaaaatctgtattttaaagagaatcttccttctccctcctttttcctgttccaggagagaa

SEQ ID NO: 3986 - DNA, 120 bp, synthetic construct
  source 1..120: mol_type = other DNA
ggcaggacaccagctgtccttgaattcagtgttaacagtggcatgggcttaaagagagaggagaacatggatttgagaaaattttagaagttgaaattagcaagactggatataaagagt

SEQ ID NO: 3987 - DNA, 120 bp, synthetic construct
  source 1..120: mol_type = other DNA
ggcacgttgtttgcatattaagtaggaaaaatatactaaataaaatgtaacaaatagaaactagcaatacttttaaaaatatattgtacaattaccaagattgggttcctttcagtgatg

SEQ ID NO: 3988 - DNA, 120 bp, synthetic construct
  source 1..120: mol_type = other DNA
gcaagatgacttcctagatggtattgtgtccttccaccaggaggcatttaatgttgggttgtttctttctgtgatattggtagttgttagtgctcaatacctagatccattaactcaaca

SEQ ID NO: 3989 - DNA, 120 bp, synthetic construct
  source 1..120: mol_type = other DNA
ggcaaagctaaaagggcactgtagcactccctctggggtttcaggggttgcaggcacacccccctgcaaatgctgccgcagggcctgcacagagttcactcctgccagtacccaaaagca

SEQ ID NO: 3990 - DNA, 120 bp, synthetic construct
  source 1..120: mol_type = other DNA
atttctaggcttccggagaaaaattgaaaaagggtcttctttcttttgttaatgaccttttaaatggctggtcctgcacagggagttaaggccaggctatcacagtagacaaaggaaata

SEQ ID NO: 3991 - DNA, 120 bp, synthetic construct
  source 1..120: mol_type = other DNA
atctgcagatttgtgttttggttggacaaatccacatcttcacttgatgactgacagtaggaatcacctccccatacatacagataaagatgtgatcctgaccccagttcaaaaacagta

SEQ ID NO: 3992 - DNA, 120 bp, synthetic construct
  source 1..120: mol_type = other DNA
tatttacttttcacctcagttcacttctatttctgatctctttccacaagattgacagggctttcttttggacttctctttgattaggatttagcttttccttggctcactcggggtttc

SEQ ID NO: 3993 - DNA, 120 bp, synthetic construct
  source 1..120: mol_type = other DNA
gcattgctctaagtccttacatatgacctattttaagcctcacaataactccatgagatgagcactgtgtcactgtcctcattttagaaaagagaggcttaaagaggctgagtaacttgt

SEQ ID NO: 3994 - DNA, 120 bp, synthetic construct
  source 1..120: mol_type = other DNA
cattttggaaaaagaataaacgaaaacctacccatatttgcttttgtgtttcagaccttttttagccaggcatttaagactggctgagtgtaacctttgcccttggcatttgggggcaaa

SEQ ID NO: 3995 - DNA, 120 bp, synthetic construct
  source 1..120: mol_type = other DNA
aaagctgccaagccaaacccagttttttccgtaattttcctctgactcaaaaatggtattctcagtccttgttaggcccatttttatttctccacaccatccattcaacactttcacagt

SEQ ID NO: 3996 - DNA, 120 bp, synthetic construct
  source 1..120: mol_type = other DNA
acttccctgttttataagccaacttactttccttttctcttccttaagttagtttgtcttgagtttctgaacttgcaagtggtagaatccagattgtcacctgtctcctcctcctctttg

SEQ ID NO: 3997 - DNA, 120 bp, synthetic construct
  source 1..120: mol_type = other DNA
gacaattataaatcaagaaaaagagaccagaaacaaagatgcttagattatccctcagacaaagccttgatcagtttaccagttcagcttcatggagggaagaaatggagcagagcatcc

SEQ ID NO: 3998 - DNA, 120 bp, synthetic construct
  source 1..120: mol_type = other DNA
gagaagagctatggccctttgggcatcccagacttaggggctccctgaaccaaggctgtgacaacctctttggggttctgcagtttctggcatctccaaacttccaggtgccaccacgtt

SEQ ID NO: 3999 - DNA, 120 bp, synthetic construct
  source 1..120: mol_type = other DNA
agaaagagcctgggtctctgatgactgtagagttgccataccatacttttgtcttctataagtcaccgttcgtgtgttctctgcacactgtaagtgaacctatcttttttgttttttttc

SEQ ID NO: 4000 - DNA, 120 bp, synthetic construct
  source 1..120: mol_type = other DNA
tgaattcagtttgctaaaattttatttataggatttgcatctatatttatacataagcttacattcaatttttccttcttatattttcttgcctggttctaagtggggaaatgagtcttc

SEQ ID NO: 4001 - DNA, 120 bp, synthetic construct
  source 1..120: mol_type = other DNA
tatgagtgggttgaaagtaatctagtacccatgataagtcaataccagtttttttcagcaattgtctgtttggatttgttagttgtcctttggtttcgtcattgtctatcctgtatcagt

SEQ ID NO: 4002 - DNA, 120 bp, synthetic construct
  source 1..120: mol_type = other DNA
gcatgcataactgatatgacaaactctaaagttaattgtaatattctgttacactgaactgtgtctctcagtattcaggcccttgtgtagtctgctcctcttgaatctgggcttgtcttt

SEQ ID NO: 4003 - DNA, 120 bp, synthetic construct
  source 1..120: mol_type = other DNA
gaaatcttgtccctcatactaaattacataccattcttatgctttaattccagtttctcccatgcttgccaatattccatgctgtagtctttttatggttctatattccctttaaacatc

SEQ ID NO: 4004 - DNA, 120 bp, synthetic construct
  source 1..120: mol_type = other DNA
gagaggatctaaacaacacagtcaaacaacaagttctaactgacatgtatggaatacccccaccaaatgagaatagaagacacagttttttttcaggctacatagaaccttcccagtaga

SEQ ID NO: 4005 - DNA, 120 bp, synthetic construct
  source 1..120: mol_type = other DNA
actaaatccaatagtgtgtaaaagaattctacgccatgaccaatttggacttattctaggaatgtaagattggttcaacattcaaaattaaacattggtatatcggcctaaggaaaagat

SEQ ID NO: 4006 - DNA, 120 bp, synthetic construct
  source 1..120: mol_type = other DNA
gaagaagaccttcaagatctagggctaggcaaaaagtttttagactatatcagctgggtttcctcaaagttaaaaactttgctctgcaaaagtctatgggaggaggatgaaaagatcaac

SEQ ID NO: 4007 - DNA, 120 bp, synthetic construct
  source 1..120: mol_type = other DNA
atgtgctactaactaacaagtagtaaaacgacccttctcggttctggtgttttttcagctgagtcagttatattaagaatcatcttctctgccggactcactcctataatcacaacactt

SEQ ID NO: 4008 - DNA, 120 bp, synthetic construct
  source 1..120: mol_type = other DNA
tgtgggcacggtttcacttttgatgttgacatcttcaaatggagactagtggcttcacaagttaggacagtcactgcatcaaccaggactaatttgataatattcctcaagctcattata

SEQ ID NO: 4009 - DNA, 120 bp, synthetic construct
  source 1..120: mol_type = other DNA
ttttttaatgatttcttacctgaagggagaaggaacctaattatagtagtgtcatacagggtaaaggtggacaaggttaatataatacagcagatgtggcttgaaactgggcagtggagg

SEQ ID NO: 4010 - DNA, 120 bp, synthetic construct
  source 1..120: mol_type = other DNA
agatctctgtactacaaacctctttctaagagatacatataatgtctagcactactggtgctactggtgtaaaaatcttcctttatttgccatggtcccttattatcatcatggcccctt

SEQ ID NO: 4011 - DNA, 120 bp, synthetic construct
  source 1..120: mol_type = other DNA
ctgcaacttggagttatcagtaactttgtcctgtgtcctttctttaggcaagagaaaataaaaacaaatgcgcactgcagtttatcttagaattgagtattgtgaggggaaaaaggggcc

SEQ ID NO: 4012 - DNA, 120 bp, synthetic construct
  source 1..120: mol_type = other DNA
gcatcagcctttaatttctgtaggcttcaggtaacattccatctattaggctatatttcacaggtatgcttgcaactgggaacgtgagaaatgtattcttgaaatttcatgtggctcatc

SEQ ID NO: 4013 - DNA, 120 bp, synthetic construct
  source 1..120: mol_type = other DNA
agaaaactttgtatggtttaagtggcttcaaaagcatcatttacataacattaaccacatgactggtgggtagagttgtttctgtccattagattccttcctcagggagccacttatccc

SEQ ID NO: 4014 - DNA, 120 bp, synthetic construct
  source 1..120: mol_type = other DNA
agagaggggatgactgcctcgtgatcttgtacagtccactgcttactgtttgaagtcttgagactaggagactcatatttctgctaccagataattaagatacagcatcttaattatcct

SEQ ID NO: 4015 - DNA, 120 bp, synthetic construct
  source 1..120: mol_type = other DNA
gatgagatgggatttagctaacaggagagagaaggatggtaggaacggccaaatgtgcttcagaaatagcagaagtagggcaaaagatgtggctcagaaatagcaataaatacataaata

SEQ ID NO: 4016 - DNA, 120 bp, synthetic construct
  source 1..120: mol_type = other DNA
aaatgggtgcagtggattccataactgcatagtgaggctataacttagcaaccatgaatagttaatacataaaggtttctcaatcttcagacatggaatggtgggtgggtcaccaagact

SEQ ID NO: 4017 - DNA, 120 bp, synthetic construct
  source 1..120: mol_type = other DNA
catgcgacagtcctgtgtggaatgaaatttagggaaaggtcagggctaaccagaaggatataactctttgtgctgcccaagagaaagatgtcactcataagtgatgattatttttgtcat

SEQ ID NO: 4018 - DNA, 120 bp, synthetic construct
  source 1..120: mol_type = other DNA
ggcaagaagtatcaactttcctctcagatatgtgaactcagagaggaagccaaagtttggctgactggtttctaggagtacagagtgaaaacgttgcttgtatttatttaaaatggctaa

SEQ ID NO: 4019 - DNA, 120 bp, synthetic construct
  source 1..120: mol_type = other DNA
ttcagggggccgaggcaggaggattgcttgagcccaggaattggaggctaggctgggcaacatggcagagccctgtctctacacaaagaatacaaaaatttgccaggcatggtggcatgt

SEQ ID NO: 4020 - DNA, 120 bp, synthetic construct
  source 1..120: mol_type = other DNA
tgaatggcacaaagtaggcctctaaaaatgtttcttcctccaagagcccgaagcaaacaggggattttcaagaataatttctgtttggctatgggatatgttatgttacctttctgcctt

SEQ ID NO: 4021 - DNA, 120 bp, synthetic construct
  source 1..120: mol_type = other DNA
cagaggccatgtcatgacatgaccttaagtataaggagagtggaggataaacaaggtttgaaatgtttgaagctggaagatagtctatggagcattcttgcaattgtcagtaagtagaaa

SEQ ID NO: 4022 - DNA, 120 bp, synthetic construct
  source 1..120: mol_type = other DNA
agctcttttatattctggatttgaagtatggttgaaaggtctaggcttgattgccaaaagaaatgcacagtcaagttagagtgtacaaaacataggtctctcagacattatggctggctc

SEQ ID NO: 4023 - DNA, 120 bp, synthetic construct
  source 1..120: mol_type = other DNA
attgtgggactacaaaagatgacagcaaaaagcagcacatgattaaatatcaaaatggaaggtaaagggaaaaagaattctggacaaaagagagagagagctgtggagcttgaaggggga

SEQ ID NO: 4024 - DNA, 120 bp, synthetic construct
  source 1..120: mol_type = other DNA
gtcaaagatatcacatcctctcctctcacctttccttctcccttcccttcctccttctgagacacaaacggaaatagtatattagctatgaccatgaatatcgtatttactagtgatttt

SEQ ID NO: 4025 - DNA, 120 bp, synthetic construct
  source 1..120: mol_type = other DNA
tggctcacattcttcagataaagtttcttttctttctcaatgagattttgtttttttttgtttttaactcaacaatcatgtattgagcctgtccggggccagtctgggccagtccagaga

SEQ ID NO: 4026 - DNA, 120 bp, synthetic construct
  source 1..120: mol_type = other DNA
gagttggagactgcactacttttcatccatcatacactttttgggcactcgcttgttggtgctgggcactgtgttagactccagaaagacagataattgtttagtaaaggaaaaaaaaat

SEQ ID NO: 4027 - DNA, 120 bp, synthetic construct
  source 1..120: mol_type = other DNA
agcgtatccagtttagtttatgaaaaacaccatctgtatcacctggtgggcaaagccagccctcattgtcagaccaatcagctaactttgaattgctttctgacagaaaaatagtttact

SEQ ID NO: 4028 - DNA, 120 bp, synthetic construct
  source 1..120: mol_type = other DNA
gctcctttaggggtgccttctgagaaagcaaaaggagttttactttcatgggactctcctgtcttagctctaaattttcttattgtcccattgtttggtgcaagttcttttttttttttt

SEQ ID NO: 4029 - DNA, 120 bp, synthetic construct
  source 1..120: mol_type = other DNA
catgtcttgtgttttgccttgtgttataattctttaactacatgtctcaaggccctttgaagagagagagtcaattccatctctatacttcccagctgtctagctcaatatctggtacag

SEQ ID NO: 4030 - DNA, 120 bp, synthetic construct
  source 1..120: mol_type = other DNA
ttgtatttcaggaaatgggtaggaagatcaaacatacattttacaatatcacaatggcataccttcagatagcatttcgaaggtgctgcctggtgcttaaaggtcagtagacccgagttc

SEQ ID NO: 4031 - DNA, 120 bp, synthetic construct
  source 1..120: mol_type = other DNA
cagtgtgagggttttccaaagcaaaccagctgagctggaccaaagaactgagaaaacagggactgtgtaaattgttttattactcaatgcataaagaattatgcctctggaaaagtgtgg

SEQ ID NO: 4032 - DNA, 120 bp, synthetic construct
  source 1..120: mol_type = other DNA
cctctatcctgctaagaaacaaagccagccttttatagagccaagaagctggctctttaccgcatgtttttttcaacatcctctataaaaaaccctttgtggtgtttattggatgacctc

SEQ ID NO: 4033 - DNA, 120 bp, synthetic construct
  source 1..120: mol_type = other DNA
tacttaaattttgggttaaacttttggaggaaaccccttattttacttttgaaaattaacatagttatctgggggcgtgaaggggagcacagcagcaacaacggaagccttcagtgttca

SEQ ID NO: 4034 - DNA, 120 bp, synthetic construct
  source 1..120: mol_type = other DNA
actaaaaatacaaaaaattagcctggcgcagtggtggatgcctgtaatcccagctacacgggaggctgaggcaggagaattgcttgaacccgggaggtggaggttgcagtgaactgagat

SEQ ID NO: 4035 - DNA, 120 bp, synthetic construct
  source 1..120: mol_type = other DNA
tggcacccaagcctctattcttgtcagctccagtgggcagatgggtaagtatggaggggcacttccccaatgagctttgtagtcatttaactttaataggctcattgaccgatgcacaca

SEQ ID NO: 4036 - DNA, 120 bp, synthetic construct
  source 1..120: mol_type = other DNA
cctgtgcagatatttttttctgcactttttcccactagcatatcatttaatcttcctggggtgaccattgtgggtaagttatactttagactagggatggtgcatattatttctctgcag

SEQ ID NO: 4037 - DNA, 120 bp, synthetic construct
  source 1..120: mol_type = other DNA
tgctgaggaatgagtaaagaaagaagaagcaaaatcagactttagtggcagcttgacttgaccctggaattcagagtaccattcattcctcagtgggatgttgctttgggcagctgaatt

SEQ ID NO: 4038 - DNA, 120 bp, synthetic construct
  source 1..120: mol_type = other DNA
tcatgattgatttgagcaagcaggctgtacgtgacaggggctgcatgcactggtggtcagagagaaacagaacagggcagggagtttcacaatgttcttctatacaatgtctggaatctg

SEQ ID NO: 4039 - DNA, 120 bp, synthetic construct
  source 1..120: mol_type = other DNA
gggtgaccacagtgggcaagtattacaatttcctcagttttttgcataaagaatctgaggctcagaaagctgaataaggaacttaggtcctttaattctagcttctctgcccttatcatt

SEQ ID NO: 4040 - DNA, 120 bp, synthetic construct
  source 1..120: mol_type = other DNA
cacctgagggcaggcgtgcaacccagcccttcatggattgttttacttttcttatttacttcaggaaacatctctgttcctcttgagcatattttctctctttaattatggagtgttttt

SEQ ID NO: 4041 - DNA, 120 bp, synthetic construct
  source 1..120: mol_type = other DNA
acagaatgcacagcctgaaagaactaaaacagaagggggaaaatgtcacaaaaagtctgatctttgtagaggcaaaggaaagcacatttatggaattgttaaagtgtcaggcctctgagc

SEQ ID NO: 4042 - DNA, 120 bp, synthetic construct
  source 1..120: mol_type = other DNA
gaaagctgtggacatttgacaagatgtttttgcaagttgcacctgacaactccctaacaaataccagctgatgtaaggatgactttgccccagtagggttttattatttctttgcttttg

SEQ ID NO: 4043 - DNA, 120 bp, synthetic construct
  source 1..120: mol_type = other DNA
gaggaccacgtcagagcatttttcagagagctgaaggttgcatcttaaatctaaagtggttgcttgtcgacactagctatttttgatgaaaatttccttatcatgcattgcataccctag

SEQ ID NO: 4044 - DNA, 120 bp, synthetic construct
  source 1..120: mol_type = other DNA
cttctccatacccttccctctctgttttagcaaaggatggtttttaagcttgaagtcaaagctacctatttgagatctgctctcaagaattattcattccctggctatctcccttgtata

SEQ ID NO: 4045 - DNA, 120 bp, synthetic construct
  source 1..120: mol_type = other DNA
cgtttcatttgtacttccaattgcctgctctttccacaactccctctgaatgtttgtgttgggaatcagaacatgagaacctcaagtatagcactttggtatgctgaatactttgcactg

SEQ ID NO: 4046 - DNA, 120 bp, synthetic construct
  source 1..120: mol_type = other DNA
tttgtttttccttatctcctttctcttctcttcaggaatggtactagatattttgaactaaaatagctcagattggggggaaatggcccagcgactgtatttcatctttctggtcccaag

SEQ ID NO: 4047 - DNA, 120 bp, synthetic construct
  source 1..120: mol_type = other DNA
agtttaataagtgtaggaaagtgaatgatgcgcacctctgcgaaactgacaacactaaataaatacacgcaagtacagcaaaatttacccttatggaacacagcagaggttttctgctgc

SEQ ID NO: 4048 - DNA, 120 bp, synthetic construct
  source 1..120: mol_type = other DNA
tttgaaactgcatttgcataagtccatctgagcaaacatttttatggagttatgaggtgtggtttgcatcagccatctttgagaaaatatagtggagctactgtgctcggctgcaaaaca

SEQ ID NO: 4049 - DNA, 120 bp, synthetic construct
  source 1..120: mol_type = other DNA
agttttaaagcactcattagaatgaaaacagagccactcaattccgtgtgaaatgttgaagttagctgtcagatggaaccacgaagtataccactagccatggaggaaagaaaccaaaca

SEQ ID NO: 4050 - DNA, 120 bp, synthetic construct
  source 1..120: mol_type = other DNA
tctgagaggattaagcctttaccccaacagggaagaaaaggggggggtgctattttcttagcagcctgaatgattcttttgcttatctagaaagctttccaaagttttatcagaaaaaga

SEQ ID NO: 4051 - DNA, 120 bp, synthetic construct
  source 1..120: mol_type = other DNA
taaaatgatccatattacagaatcatggcaaagatggtaattagtggtttgcagaaaggagcacacggcagttccctttctgtttaaagaacctggctggatcttgagaatatgcgtgtt

SEQ ID NO: 4052 - DNA, 120 bp, synthetic construct
  source 1..120: mol_type = other DNA
aatactttttggttttgcaacttgtctgtggactccttcccgaatatgtttttaagttttgttaggcctgcccttcaacctgccctccagtgtcaggagtagactaggtaatatatattt

SEQ ID NO: 4053 - DNA, 120 bp, synthetic construct
  source 1..120: mol_type = other DNA
ggccagtgctgcatcctcctgcgctggcaatagcagagttgtggagaaactttatttggtatttgaaatgatcaatattttaaccttctgcataaaaagagagagaagtctgtgattaaa

SEQ ID NO: 4054 - DNA, 120 bp, synthetic construct
  source 1..120: mol_type = other DNA
agaatccctgtatttctgtcttatattttctgctaagccaccattttgtcatcctgggaatggaggagagagaaatggaggcattcataaattaaccgtgtatgtaccagccttagtcta

SEQ ID NO: 4055 - DNA, 120 bp, synthetic construct
  source 1..120: mol_type = other DNA
ccactgcaccagccatttcttctttttaatctaccaagtatacccacctctttctactttccaatactgaagattacaggctagttgtcttggagaatgaaccatgatatggctgtgact

SEQ ID NO: 4056 - DNA, 120 bp, synthetic construct
  source 1..120: mol_type = other DNA
agtagtgaaaaggagcaggagcaggcatgatctatgttctggattcagctttgccactactaaccctgagcatcagtgttcttatctgttaaaggaagcagtaataataaagtgaataac

SEQ ID NO: 4057 - DNA, 120 bp, synthetic construct
  source 1..120: mol_type = other DNA
ttaagaaaccatggtctgtaacaaccagactgaacagaatccataaactggggaaggattgtgccttttgatctgcgacagggtttacagtaaaaatcctttaaaccatgagtttctcag

SEQ ID NO: 4058 - DNA, 120 bp, synthetic construct
  source 1..120: mol_type = other DNA
agtaccaaaatggttgcattgcctcaaaaggaaacttcatacctactaagcagttgcttcccattcccacctctccccagtccctggaaaccaatctgctttccatccctatggatttgc

SEQ ID NO: 4059 - DNA, 120 bp, synthetic construct
  source 1..120: mol_type = other DNA
cttctgttgatgaatcttccttcaatagtttttcatttggcaagtaattatgaccatggaagtcgggacacaagatgaaaaagacaacaaaactgcagaacttcaaactgaaagaaaccc

SEQ ID NO: 4060 - DNA, 120 bp, synthetic construct
  source 1..120: mol_type = other DNA
ctcacctttgctatcctcatcacctagcagagcccctggcacatagtgtgttgaatatctgggaatgaggaacttaactgcaactgaactttcaatctaactgacttggtgatgagaaat

SEQ ID NO: 4061 - DNA, 120 bp, synthetic construct
  source 1..120: mol_type = other DNA
gtggaaatgaccactaggaacactccttaaaacctgcttgcatcaatgctttcaatgatacatttctgcatctcaaaaaaaagtttctaagccctaagctagcatctgcctatttcaagc

SEQ ID NO: 4062 - DNA, 120 bp, synthetic construct
  source 1..120: mol_type = other DNA
tctgacaaattatataatttactcatttattatgttcttactgtctattatggctcctttcaccctgcccccaccacataagctctccaatggcaggagagttgtactcagtgatttacc

SEQ ID NO: 4063 - DNA, 120 bp, synthetic construct
  source 1..120: mol_type = other DNA
tctcaagaatatattactaagggcaaaaatcagggtgtggaaggtatatacagttggctgccttctctgtaagaaagcagggtgagaggaaggtgaatatgtattcatatttgcttcagt

SEQ ID NO: 4064 - DNA, 120 bp, synthetic construct
  source 1..120: mol_type = other DNA
agattatgtgtaaagtgccaaactgggtcaggcagttccttgagaacatcactgccctttctcaaagaaatttcctcggtctaaaatgtagagaattgaatcagatggctttcattcaca

SEQ ID NO: 4065 - DNA, 120 bp, synthetic construct
  source 1..120: mol_type = other DNA
gaagggggacgatctccgtgtactgctatggaatgatctccagggcgtactattaaatgaaaaagcagagtgcagaaaaagcggatggcatgctatctattatttaagaaatatacatgt

SEQ ID NO: 4066 - DNA, 120 bp, synthetic construct
  source 1..120: mol_type = other DNA
aacaatttgggcattaaaaataataactatagtggatttacatacatcaaatatattaacatgtgcaaaatctataagttaaaaaaattcagtagtttcggccgggcttggtggctcatg

SEQ ID NO: 4067 - DNA, 120 bp, synthetic construct
  source 1..120: mol_type = other DNA
gcaggaacatgtacaaatgatatcgggcagatgaatcaggtaatcagaaaatgggacatgctgcaggcctggtttccttaacaaataaattttaagaatcaaaatagcaggaggggttat

SEQ ID NO: 4068 - DNA, 120 bp, synthetic construct
  source 1..120: mol_type = other DNA
agaaaaaaataaaaaacaaaaatcacctggccagcaagtaggaggctgagatcctaactcacatctgtctggctccaaagctcacagtctttccatcttaccttacagaatttatgtctc

SEQ ID NO: 4069 - DNA, 120 bp, synthetic construct
  source 1..120: mol_type = other DNA
agggaagctaagccagagggagccctgatttacgaactgtccggatttaactgaggctacagcacttttattaatagaacatgctgcatttcctttttataaaaatatgaagatcactgc

SEQ ID NO: 4070 - DNA, 120 bp, synthetic construct
  source 1..120: mol_type = other DNA
ggaaaaaaaaaactgaacaagtgtcgttcctgcccagagagtttgcgatgagtgatgagagtgccagagaaaccttttagaaaccctcttaaattccctctttgaaatctttttcatgtc

SEQ ID NO: 4071 - DNA, 120 bp, synthetic construct
  source 1..120: mol_type = other DNA
gcaagagttgtacattgacacagttcttaagcacacagtgactaaaaggtactctactggcttttggagaaggcttagaacttggtcaatcgacaaactcctgattaaaggttgctgaat

SEQ ID NO: 4072 - DNA, 120 bp, synthetic construct
  source 1..120: mol_type = other DNA
agaaccatccctgttacaggtttcctttgggatgctcttgacgcaggaaatatggcttattctcataaatactttgagatgtacttcagtttctccaaactttatgcataacaacacgac

SEQ ID NO: 4073 - DNA, 120 bp, synthetic construct
  source 1..120: mol_type = other DNA
cagtacccacctcataggtctattattgggaatgagtatttgtatattgctcagaacagtgtctaccaaagtattatgcattgtgcgctcgtgaaacaaacacctctccagctcaagatt

SEQ ID NO: 4074 - DNA, 120 bp, synthetic construct
  source 1..120: mol_type = other DNA
ctaggttgtaccgtggacttgtacttgagtttttcaaataaagcttgacacatacttagtatagagcagtagaaagcagggaggaaaaactcgtcatgggtccactatctaaaatcaact

SEQ ID NO: 4075 - DNA, 120 bp, synthetic construct
  source 1..120: mol_type = other DNA
tgcccagcatccaaatggcttttcaaaaaatttgtataaatgtttactcctgctagctgtgcttaagtgtttatttccggccagcctcaccagcaccaggaattatgagaatactcttaa

SEQ ID NO: 4076 - DNA, 120 bp, synthetic construct
  source 1..120: mol_type = other DNA
gcatcaggaaacctgcatattaacaagctggtaataagtgcaggcgttaagattgatcactgcttaagtcttcaagatcacatacaaggtctggtgtttttgaggctgtcgatgtactat

SEQ ID NO: 4077 - DNA, 120 bp, synthetic construct
  source 1..120: mol_type = other DNA
ttatttaatccccaaacaaccttatggaacagataacaattgttatgtccactttatagcagaggaactgggatataaagaagtcaaccaacttccagcgggtaaggtatgtgggcaagc

SEQ ID NO: 4078 - DNA, 120 bp, synthetic construct
  source 1..120: mol_type = other DNA
cggcgctgacagataagtgccctgcatctcacagagagagaaaaatagatatttggaagtggtatcttttattgcctataaagttaaacaatgcacgaaacaattataaccaaggcagag

SEQ ID NO: 4079 - DNA, 120 bp, synthetic construct
  source 1..120: mol_type = other DNA
cggaagatcttagatagttggtgtgttcgatgggcatgtatctcatgttacttgtcttcatgttgtagacatctctctaaaaataatgataccaaccaggctggtaaaatggctttctga

SEQ ID NO: 4080 - DNA, 120 bp, synthetic construct
  source 1..120: mol_type = other DNA
gcttctctgagacttggagatttggtttccacatctggaatataaaggtgttgagcctgatgaccttgaaagatttttctaggtctaaattttattacagaagcagtgggcaataggaga

SEQ ID NO: 4081 - DNA, 120 bp, synthetic construct
  source 1..120: mol_type = other DNA
aataattatcatagttcctgttattgcagttcttaagctgggcacatcatgtaagcccctatgttttggtttcctgcttatggtgtctgcctcatggggttgttttgaaaatcaggtgtg

SEQ ID NO: 4082 - DNA, 120 bp, synthetic construct
  source 1..120: mol_type = other DNA
ttctctcgtgtgctcccctctccccactcatttccatttacttctctttcttttccacttctttcttcttcagtctgtctcttattctctctctgtatttttgcgtaattacagacatga

SEQ ID NO: 4083 - DNA, 120 bp, synthetic construct
  source 1..120: mol_type = other DNA
tttatatttaagtacatgaaaccctaaactgtaaggtatttgtaaaggcagtattggttgaggcatgctctctgctaatcttttctgccttcaggtcactggcttgaagtgtcagtgacc

SEQ ID NO: 4084 - DNA, 120 bp, synthetic construct
  source 1..120: mol_type = other DNA
ttagattgaggttatgtgtgttggaagaagattcccaaagaggggatgtgcccttctcagagcatcacttaattgcttgcttaaggtggtgttaactgtaaagttaaaagctgctatttt

SEQ ID NO: 4085 - DNA, 120 bp, synthetic construct
  source 1..120: mol_type = other DNA
tccgcattagagcgattggagctggtaattggttttcattaattttgtgtgcaagaggagattggtaatgttttctcgtaaatgctaggtcaggtttgcattttgagagtggttccagtt

SEQ ID NO: 4086 - DNA, 120 bp, synthetic construct
  source 1..120: mol_type = other DNA
acagcttaatttccaccctctttaactaaagaagtatgtgctacaaaacactgtagaagttcaggccagtttccactcataatgggaaattgcatgcaaaattcaggcatgctgttccta

SEQ ID NO: 4087 - DNA, 120 bp, synthetic construct
  source 1..120: mol_type = other DNA
caggaaaagatgtccaacttcaggtttagaaggcacagagggagttctaccgttggtatatggtataggtatttttaatgcctagaaagggaatggctggaaggaacatgaaaaataaag

SEQ ID NO: 4088 - DNA, 120 bp, synthetic construct
  source 1..120: mol_type = other DNA
cccacccccacacaatttagcacagaatgccagtaattcagtctgaagcccagttaaaactctctgattttaatgtgctttttaaaaatggaaattacacatggtagcgcacgcctgtag

SEQ ID NO: 4089 - DNA, 120 bp, synthetic construct
  source 1..120: mol_type = other DNA
agttaattagtaacacatattatagaacaaatgtttgaaacagaaatctcgtgattttgcgtaacaaaccaggagttgagctggaagtctctgttctcccactgcgttgctgtgtgacct

SEQ ID NO: 4090 - DNA, 120 bp, synthetic construct
  source 1..120: mol_type = other DNA
atctcacatagtgtgactatttatgcattttactcaagaaatgttcatgtgtttaatgctatggttctggcctggactctactgggttcaaagtctagcacatgcatcatacttgtttgt

SEQ ID NO: 4091 - DNA, 120 bp, synthetic construct
  source 1..120: mol_type = other DNA
tggccggagctcaggggcaggtgcctgcttttgatgggagaaaatatcagtaacagtttaattggtgttttacagttccatcatgtataactattttatatctttgttggaaatccacac

SEQ ID NO: 4092 - DNA, 120 bp, synthetic construct
  source 1..120: mol_type = other DNA
gtccctcttcccccagctcctgctaacctctaggctactttctgtctctatgaatttgcctattttaggtatctcatataagtaaaaccatacaatatttgtcctttttgtctggcttat

SEQ ID NO: 4093 - DNA, 120 bp, synthetic construct
  source 1..120: mol_type = other DNA
cttcagaactgtaagaagtaaatgtgcgtgttcaagcaacctggtctatggcaatttgttatagcacctcgaattgactaagaaaatatgataattctgtggttagcttttgaggaactg

SEQ ID NO: 4094 - DNA, 120 bp, synthetic construct
  source 1..120: mol_type = other DNA
tggattgttaattactagtgtgtaaaaatgcaactgattttatgagttgatattgtatcctgcatctttgctatttgtttatgagctataaccattgtgtgtgtgtgtgtaacttgaggg

SEQ ID NO: 4095 - DNA, 120 bp, synthetic construct
  source 1..120: mol_type = other DNA
cataccagagacatagtttagattacagggcctctgtggagtttttggtaaaatatcattattgactcacaattatcctcactcttggtaaactgactgcttttatatggtccttagccc

SEQ ID NO: 4096 - DNA, 120 bp, synthetic construct
  source 1..120: mol_type = other DNA
gcatggccttggaaaccttccagaattgtaagtgaaagctgatattctctccacagaagaaaatatagcaaaatgggaatctaaccatttcattggaacaggagattggactcaagttac

SEQ ID NO: 4097 - DNA, 120 bp, synthetic construct
  source 1..120: mol_type = other DNA
agcccagagtacgaaatctacaaccaactcctcttctggttaaacaaaggaggtgatgtattgaagagaggcccaagagaaatgattcatttcatcagaaatgtttggagaaacagatga

SEQ ID NO: 4098 - DNA, 120 bp, synthetic construct
  source 1..120: mol_type = other DNA
cacagcttaaagcacactctggagagggtttcgtccaactctgggggaccttttttgctttttatgttactagatatagtaaagtctgcaactcttacttttacagcttgatgaattctc

SEQ ID NO: 4099 - DNA, 120 bp, synthetic construct
  source 1..120: mol_type = other DNA
gagttttcaatccctgcctttaaatatggttttgtttcttagtttggggcctcctgcatgactgagggtgcttagtaatttccttggttcactcttcagtgtgtattgagcactaactat

SEQ ID NO: 4100 - DNA, 120 bp, synthetic construct
  source 1..120: mol_type = other DNA
gtgtcattttgatggccattccttcagctttatgccatgctccatagacagcctagggtacccctctctgtcccacttttagttcctcagtgatacagattgctaaaggcaactcaattg

SEQ ID NO: 4101 - DNA, 120 bp, synthetic construct
  source 1..120: mol_type = other DNA
tcttgtgcgttggggccattatgaagcgaaataaggatgtcttgatcacacgcactgccgtatcatcaccgtttatcctatcattgaggtggctactaaatgacttgcgggtgggaagta

SEQ ID NO: 4102 - DNA, 120 bp, synthetic construct
  source 1..120: mol_type = other DNA
cttcagatttagataataggatacagagacctagaggtttcatccaagtttcagccttgggccagttagggagtgtggaattggcaaccttttatgactgttaagcaaaatctttgcaga

SEQ ID NO: 4103 - DNA, 120 bp, synthetic construct
  source 1..120: mol_type = other DNA
tagtgttaagttacagtgccttgctggttgggagcttgccttttgaaaagttcaggtccagccctcctttgccttatcttgggaaatgactttctgctaaaataatttcggtttgtacat

SEQ ID NO: 4104 - DNA, 120 bp, synthetic construct
  source 1..120: mol_type = other DNA
ctaaaaaatacataaatgaagttgaaagcatgtgaagtttatgattggctttgtgatcggaaggatgtgtcatgctttcccctgggtgttgggaaccttctgaaagaactgctgtcggaa

SEQ ID NO: 4105 - DNA, 120 bp, synthetic construct
  source 1..120: mol_type = other DNA
atttagccctatacaattttatcacacatgtaggttcatgtttccagcactacagtcgagatactaaatagttccatcacaaggatctcttgctttgccttttacaaccacatccacctc

SEQ ID NO: 4106 - DNA, 120 bp, synthetic construct
  source 1..120: mol_type = other DNA
ataaattaaaacagaccactggcttttacaatgtatccaggactgtgtaagaggaaagggagaggaggggattcagatggtttggtgacagttcttgtctttaagacatgtgtcatctta

SEQ ID NO: 4107 - DNA, 120 bp, synthetic construct
  source 1..120: mol_type = other DNA
cacgatgctggttctttctgtggattgggtcattttgatggagtgcagtgaaagttcacataatgtgtttgacgcctggaacagataatttttcacattactgtcctctatatgacaaca

SEQ ID NO: 4108 - DNA, 120 bp, synthetic construct
  source 1..120: mol_type = other DNA
gcctcccttttcattctctttctgatatccgccaggaaatgcaacggttctgtttaagcagcattcattgagtgactacattgaactccaaaggaagcttgaataaattctagagtttct

SEQ ID NO: 4109 - DNA, 120 bp, synthetic construct
  source 1..120: mol_type = other DNA
tttattgcctgccattctgctgatttatttcctagagaaagttaaacatttttaaaacacagaatgaatggttttaaaaggcaaagagcatagatctgaagccttaaaaatattactcag

SEQ ID NO: 4110 - DNA, 120 bp, synthetic construct
  source 1..120: mol_type = other DNA
aaggcggaattatttttgtatttcaggggaaacaagaaacaataaagaattttttgaaagtctgttcattgtttcccattctggaaggtggtgttggggcattgaggatcctggggttcc

SEQ ID NO: 4111 - DNA, 120 bp, synthetic construct
  source 1..120: mol_type = other DNA
cctgaccctgggaggagggaccatctcttacttttctgtctgtaggcagaaatgttttcactaaaggccctggcacatcttaaacatgattttaaagatcagtgataatttctttttttt

SEQ ID NO: 4112 - DNA, 120 bp, synthetic construct
  source 1..120: mol_type = other DNA
atctggaaatgtagccaagactgcaaattatgatgacaataatcagacacttctgtagcatatactgtgtgctcgcacttgcctgagcacttcccatgtgattgctatttaatcctctca

SEQ ID NO: 4113 - DNA, 120 bp, synthetic construct
  source 1..120: mol_type = other DNA
ggctgggaggaggggacaaaaagaatgtggaatcagctatgagactgaagttttgaaatgaactgagctgagtcttagaaatctaaatgagactggataattgcaagtgactgaaaagtc

SEQ ID NO: 4114 - DNA, 120 bp, synthetic construct
  source 1..120: mol_type = other DNA
aaaagctactgcaatttaatagctactgccatagtctgagcatgacatgaggaggttggctagaatatttcaatctttattgattgaggccaataaaaactgatctagaggctgggtgcg

SEQ ID NO: 4115 - DNA, 120 bp, synthetic construct
  source 1..120: mol_type = other DNA
cagtttccttgctgttaagtaaggaacatggcttgagtgatatcctgagtcctctccactctcattttaggtgcaatacgattataaccctgactaggataaatcactagggaacaaaga

SEQ ID NO: 4116 - DNA, 120 bp, synthetic construct
  source 1..120: mol_type = other DNA
gtagctagaaatgtaaccatatctgcagttcttggaggtcaatgaaaaggttgtgtaaaggagtattgtttggcagatgtctctagtaccattgctgcaacaaataaagctggcttagca

SEQ ID NO: 4117 - DNA, 120 bp, synthetic construct
  source 1..120: mol_type = other DNA
gctcaggccatcaaatgtcagttttcctttgctgcattgtacttatgtacatatcttagccctccactagactaaagtcttttttgttaagtcctgataggttaggtttatgctgtagcc

SEQ ID NO: 4118 - DNA, 120 bp, synthetic construct
  source 1..120: mol_type = other DNA
aggatttgggattggggtgatctgggtgatctaatattgcaagttattatgtcctaacttggagtcagtgtacaagaaacaatgatcagagttcagaagacagtgggtatttcagtatgc

SEQ ID NO: 4119 - DNA, 120 bp, synthetic construct
  source 1..120: mol_type = other DNA
ggtgtttaataaatgatgaggctggtgaaggtggtctgcagtgacagccttcatatttaattcactacaccctcattctttcctattctttagaagtactgttgggaccttcaaatctca

SEQ ID NO: 4120 - DNA, 120 bp, synthetic construct
  source 1..120: mol_type = other DNA
cacattacattttataagcaatatataaattcataattacagacattcaggcatcttagtttttccttagaagaccaagtactcagaggagggctccatgcttccccacctctgcccaac

SEQ ID NO: 4121 - DNA, 120 bp, synthetic construct
  source 1..120: mol_type = other DNA
agtgggcacccttcacagaggtcttggtctcttgcatttccccttccattaattgatactcattgatttcactttctaaacatgtgattgtgtgtccttcttattgacttgacaaattcc

SEQ ID NO: 4122 - DNA, 120 bp, synthetic construct
  source 1..120: mol_type = other DNA
tggaaagtgacattcttctatctactttctagtccacattttgcagtgcaaccgcgggactggaacatagccatgggccagaagtcttggcatcatcctggactctcatctttcttttct

SEQ ID NO: 4123 - DNA, 120 bp, synthetic construct
  source 1..120: mol_type = other DNA
tgaaagtgtctccctatttctcatggaacatcttaatgtagctgggtacttggatctctctgcaccttctcatttcaccaagctataaaatgaaggcctataaataggtgtgataagcag

SEQ ID NO: 4124 - DNA, 120 bp, synthetic construct
  source 1..120: mol_type = other DNA
ttttttccaccactctcaaactcagatcttgccccagaattagtcactgttatcagcttgtttgtatgcttctatttgtgccccaggtaaccttggaggatagagtgatgatactaatta

SEQ ID NO: 4125 - DNA, 120 bp, synthetic construct
  source 1..120: mol_type = other DNA
catcccagcaaccctataaggtaggaggtgggtactgttttgttaataacagctttgatgagatgtaagtcacatatcatgaaattcaccatttaaaaatatacaagtaaacggttatat

SEQ ID NO: 4126 - DNA, 120 bp, synthetic construct
  source 1..120: mol_type = other DNA
ttgtattctgaagtcaatacttagccatcaaaagagacaaacaaatcccgtctgccagtgtgtgtgcagaacccgtttgtctctgtggcagtggtaaaacaaatgaccaaacaaaacaaa

SEQ ID NO: 4127 - DNA, 120 bp, synthetic construct
  source 1..120: mol_type = other DNA
tgggggacctgtaggtcaataacgcctgtttcggtgcttgttccctgaaggatgttttaaaagtcccagataaattcacattactattattaggaatcctatgtttctcagttacttcta

SEQ ID NO: 4128 - DNA, 120 bp, synthetic construct
  source 1..120: mol_type = other DNA
ggatcatgatcaagtgatggccctctaagctactcagtgtctttgtctgtgaggtgggactaacacccgcttctttggtttttgaggattaaatgacattgtagaaaaactacaaagttt

SEQ ID NO: 4129 - DNA, 120 bp, synthetic construct
  source 1..120: mol_type = other DNA
atgtgtacataattcattttttcagtttttgggtttctgattcacgcacggtttattctggtgtttggtgtcaggtgtgggctgcaattgtatctttttccaaatgactctccagttgtc

SEQ ID NO: 4130 - DNA, 120 bp, synthetic construct
  source 1..120: mol_type = other DNA
tcttctcaggcagtacaatctaagggtttagaggttacctctcagagtccaggaaagggaaaaagccacactttttttttggataaggttgattctttactagacaggtagactttggta

SEQ ID NO: 4131 - DNA, 120 bp, synthetic construct
  source 1..120: mol_type = other DNA
agtaaaccttgcacttttttcaaatcccaacaactttccaactccaggtgaggttcacaccctcttatttaccctttcctttgatgcattgatcaacccacagtttcacaattatttgac

SEQ ID NO: 4132 - DNA, 120 bp, synthetic construct
  source 1..120: mol_type = other DNA
gttgcttagaacacattcaagatggtttcctcggacttctgttctcctgactgtgcattaacatagcaatgccaaggcaaagtttctatggcaaaggtttaagaacatgcaaattgaatg

SEQ ID NO: 4133 - DNA, 120 bp, synthetic construct
  source 1..120: mol_type = other DNA
actcaatgaagagagaagctaaaattgtgttttggatttccacaagttcagtaatgttctatccataggttcttacacctgtaccctgggtcacaaattccctttgccatatcccatttc

SEQ ID NO: 4134 - DNA, 120 bp, synthetic construct
  source 1..120: mol_type = other DNA
ctcagttcctccatgctctttcctatgagaattattttttatgaaaatgggcatcccttctccagcttcctctcagattccttttaaggatttaggggaaatgtttcctttctccttcag

SEQ ID NO: 4135 - DNA, 120 bp, synthetic construct
  source 1..120: mol_type = other DNA
acaatgccctttcagaaaatggagtttctttactacttacttgaagttgttcttgggatctctttctgcccttcttgctccagagctggttcatggtgtctcaattcagttcatccccgt

SEQ ID NO: 4136 - DNA, 120 bp, synthetic construct
  source 1..120: mol_type = other DNA
aagagactagaacatggaaaatcaggtccacaaatactgctatgtcagtagagaaatggcccctcaagattggctctgggcactcatacacatttgtaacttttaagtcatttactttca

SEQ ID NO: 4137 - DNA, 120 bp, synthetic construct
  source 1..120: mol_type = other DNA
atgtattttttttatgtggaaaggaacatatcatgcatactgtctagccaccatacttaacttcgttttgacaatgtgtctctgaagagattgtagcctgtctgcacacaagcctgtacc

SEQ ID NO: 4138 - DNA, 120 bp, synthetic construct
  source 1..120: mol_type = other DNA
tacaaatgccatttgcacacaatatacccagtttgcactgaattccattccttgcttctttttcccttcttagtcacacactatctgtgcgtgtcaagacactgttgtataaaactgctg

SEQ ID NO: 4139 - DNA, 120 bp, synthetic construct
  source 1..120: mol_type = other DNA
actaccagcaccccaggaacaagtggctaccttttgagtcactcttcagcctctgacgatctttaacaatgttgacctctctgaagatagattagtttgcctttttttttttgagtttaa

SEQ ID NO: 4140 - DNA, 120 bp, synthetic construct
  source 1..120: mol_type = other DNA
ctagattcttgtcatcattaatcatcatctatatgccaggcactatgtgaggcattgggaatagtaaggagcagaagcagatgtggtttctgcttttgtgccagcattaattaagcaaac

SEQ ID NO: 4141 - DNA, 120 bp, synthetic construct
  source 1..120: mol_type = other DNA
tttaggaagatatttgagcaggagatcatgaaaattttgcaagaatctgcaatctggaagagtgttgattcaatatacattcattaggtgcccactctgggttactgtgtctcgcactgt

SEQ ID NO: 4142 - DNA, 120 bp, synthetic construct
  source 1..120: mol_type = other DNA
tgggttgaggtggagtaatgttgaccttggaaggttaggatgcttttgtttctgatgagaccatctagtgtaggtcaaaaggactgtgtcggagatagaaaacaacattttttttaagtt

SEQ ID NO: 4143 - DNA, 120 bp, synthetic construct
  source 1..120: mol_type = other DNA
gtggatacaggtaaaataagaaatcatctgtagaggtgacgtagaaagcacagataatagagaaataacaggtatctgcctctgtcatctttcctgagctccagatgtcagtatttaggg

SEQ ID NO: 4144 - DNA, 120 bp, synthetic construct
  source 1..120: mol_type = other DNA
agtggactgaaagttgagacaccaggttcagcctgaccccagtgagtgctccacccttttttgtagattaaatgaacccagaagttagttcatgatgtagttcctgtaaaaaataataaa

SEQ ID NO: 4145 - DNA, 120 bp, synthetic construct
  source 1..120: mol_type = other DNA
ctctcagagcacctcaagcctggcagggttccgaaaacctcagggtttaatcactcccctgtttaaggaactcagacacaatgtattttacaaattatttttgaaaggtttatatgaagt

SEQ ID NO: 4146 - DNA, 120 bp, synthetic construct
  source 1..120: mol_type = other DNA
tgaaaggtgaaggtgggttgatatataaaataaaagaacttggaggaaagttaatacctttgaacattggttcccaaagtgtggtcctgcaccagcagcaatatccacctagcaacttga

SEQ ID NO: 4147 - DNA, 120 bp, synthetic construct
  source 1..120: mol_type = other DNA
cttccagggctctattgctactcctgtccccactagcttttgtgtaccttcttgtctgtttgataaattctctggattaaattctccaagggatttggagtggtttctcttttctttatt

SEQ ID NO: 4148 - DNA, 120 bp, synthetic construct
  source 1..120: mol_type = other DNA
tctcattacgaaacattctttattacaacatttagtatggctgtaccttaagtagagcctcctggaatagatttaaaaggttgctcaactggtaagacccacaaatggagagctgccact

SEQ ID NO: 4149 - DNA, 120 bp, synthetic construct
  source 1..120: mol_type = other DNA
ctcactaaaaataacctccacctgcttgtgtattactggtatttgcatcatcatttgggagaaaagttgagcattgattttaaaaactctttttttgggggggggggtcattctggcagg

SEQ ID NO: 4150 - DNA, 120 bp, synthetic construct
  source 1..120: mol_type = other DNA
agaatgtgggaacattttagctaaaatgcaagttaaaactgtgaaacatataaataagcatttggtatgcttttcagtttccacaacagtagtcaagccagtgagccctgtggggagggc

SEQ ID NO: 4151 - DNA, 120 bp, synthetic construct
  source 1..120: mol_type = other DNA
ctctcaaggagcttactaattgggaagatgtaatctgagaacatgaaaaagacagttacatcctatgaccaacatcatgcttgctgggaaaaccttagaagcattcccaattacagtcag

SEQ ID NO: 4152 - DNA, 120 bp, synthetic construct
  source 1..120: mol_type = other DNA
aaaaatttttaagacaacacaaagcaactaccaacctcagcatgaaaggtggaaactatcgttgtatagggggaaattgccaaacccaaaatcctgattgatcttatcactgccatcagc

SEQ ID NO: 4153 - DNA, 120 bp, synthetic construct
  source 1..120: mol_type = other DNA
gaaaggcaaggccttctctaagggcccctctttaccacaggaatgaattttaagagactgtgagataaagtgacaaacataaaaagccatgtttattcatctccacagcatcatttcaca

SEQ ID NO: 4154 - DNA, 120 bp, synthetic construct
  source 1..120: mol_type = other DNA
tgaccctacattgactcatcataagacccaaagtctgtcctttacactggggttcactcttagtggtgtacgttctgtgggtctggacaaacgcatgatgacgtgtatccatcattattg

SEQ ID NO: 4155 - DNA, 120 bp, synthetic construct
  source 1..120: mol_type = other DNA
attgttctacacagtggaagttcatttggatttactcatcatgcatctgtcactttctttgctcttcattcctttttgtgtttccagtcttccatctgggatcactttctttctgcctga

SEQ ID NO: 4156 - DNA, 120 bp, synthetic construct
  source 1..120: mol_type = other DNA
ggttttaatcactgtgatcactggtaactacgatgggtctaggtgtacattccttaacatttactttgcttgggattctctggtcttttgaccacttagtgtctttcaatagtcctggaa

SEQ ID NO: 4157 - DNA, 120 bp, synthetic construct
  source 1..120: mol_type = other DNA
ggcactcaaatcatcctcgagtctctttaggttaaagctttctccctaaatcagcctggtagggatgtgctatcattcagctcttcagtgtttttatggttacttactcagagttgtttt

SEQ ID NO: 4158 - DNA, 120 bp, synthetic construct
  source 1..120: mol_type = other DNA
catatcccagatttggatggaaacctctgatgctataatcaacatgaggaaaagcctgtaaatcatttacagattcagaaaacacttaatggacttctcctctgtggaaagcaccatgct

SEQ ID NO: 4159 - DNA, 120 bp, synthetic construct
  source 1..120: mol_type = other DNA
agcttccttgactatgaggattccttcctagtgtggttcagagcacagattccacctgcttttattttgctttctaattgcttattattctcccaagcacacactgtttttctttgctct

SEQ ID NO: 4160 - DNA, 120 bp, synthetic construct
  source 1..120: mol_type = other DNA
ggacaagcaataaagtgcaagataaacaaggtaattttatagtgataaagataggataagggaggaggtcagagagtaaaccatatgtcctgctttagaggagtccacacgcccatacaa

SEQ ID NO: 4161 - DNA, 120 bp, synthetic construct
  source 1..120: mol_type = other DNA
tcagacctcatcttttctggcatagcttttctattttcctccattgcaaagatagagtagtcagccctggttttaaagagaaatcgctgtttagagagaatttcaccttgaattgccact

SEQ ID NO: 4162 - DNA, 120 bp, synthetic construct
  source 1..120: mol_type = other DNA
cttctcccttcttgggaaaggggctgtgttagacactttcatctgaggggttcattggaagacactataagctacatgggtcaatattagcccagctgaattccatcatctttttttttt

SEQ ID NO: 4163 - DNA, 120 bp, synthetic construct
  source 1..120: mol_type = other DNA
aaatgaatagtaaatatcactttttaatggcagcatagtatgtccttaagttcctgtgtacttggcacttgggcgacttaagccacaaggactcagtaacggttgaaggtcacacagtga

SEQ ID NO: 4164 - DNA, 120 bp, synthetic construct
  source 1..120: mol_type = other DNA
atggggatagtgatcttaatttgttttaagacttgtgaaaatcaagagaatgtgtgaagcaggtagcataattagccttgtgcacccagacttactgcctaccacatgttccccactcct

SEQ ID NO: 4165 - DNA, 120 bp, synthetic construct
  source 1..120: mol_type = other DNA
gccccatctcctccaaggggctaagttaaaataggagaatctagtaagcctcaatcactaagtcatttataagctcactggggagttttgaccttttaaaaggaatataccctattgact

SEQ ID NO: 4166 - DNA, 120 bp, synthetic construct
  source 1..120: mol_type = other DNA
tagagcaaaggagaactcacttttcctcctgaaaggtattgcagttaccactgggtaggtgaaatgatgggtcatctccgttcatctcctgttccacaaaaataaagaagggcaagtgtt

SEQ ID NO: 4167 - DNA, 120 bp, synthetic construct
  source 1..120: mol_type = other DNA
tttaaagaaaagtcgcaaggctactggaaaacagattgagttatcaccagatctgggagaatggaaggggatgcattcagaatcccaaaactttataaatgatgggcatctcttaagggt

SEQ ID NO: 4168 - DNA, 120 bp, synthetic construct
  source 1..120: mol_type = other DNA
taaccacaggtttagtttgtggtattctaagaaaatatctagaatggcacatgcaaatgtgatgaagatgggcctgtgtatctaaccgttgtgaggttgtcttttagctctactctgcag

SEQ ID NO: 4169 - DNA, 120 bp, synthetic construct
  source 1..120: mol_type = other DNA
ggctgaccccccccacctccctcccagacggggcggctggccgggcgggggggctgacccccccacctccctcccggacggggtggctggccgggcagaggggctcctcacttcccagta

SEQ ID NO: 4170 - DNA, 120 bp, synthetic construct
  source 1..120: mol_type = other DNA
ttcttatggccacagctttgtaagatagaggcaaaagccaaaagtaatgcacatataatattctctgccttgggcgacatctgtgttgtgttggctgtagtcagaaagatatgtgtctta

SEQ ID NO: 4171 - DNA, 120 bp, synthetic construct
  source 1..120: mol_type = other DNA
agtcaatctctggaggtgggactcaagccccagttctttttaaaacttcccaagtaattcctaagtgccaccaagtttgagatctagtgatacagatgactttatcaacaaccttttttt

SEQ ID NO: 4172 - DNA, 120 bp, synthetic construct
  source 1..120: mol_type = other DNA
cctcagatctgtctctgcaccatggccagatcatcctaacttttctgtgtcatgaataactgccttaagaaaacacccaccatcctaaaatcataaggcataaagaaaccttaaatgttg

SEQ ID NO: 4173 - DNA, 120 bp, synthetic construct
  source 1..120: mol_type = other DNA
gtccgtgttcaaagactgaatctaatccacattctctgtagagcttcatctttcaaagcattgtagcaatacacagggaacattaagccaagaaaacgaagggagaacacacagctatta

SEQ ID NO: 4174 - DNA, 120 bp, synthetic construct
  source 1..120: mol_type = other DNA
aaccaattaatttttgcccattgtggattttcttaataattgcatctccgacaaaccaactcctgtcctaaatggatttgagccacatttcactctgaaagctgtgggtccatctgggaa

SEQ ID NO: 4175 - DNA, 120 bp, synthetic construct
  source 1..120: mol_type = other DNA
ccaggtcttctgatttctagcttcctgattttgcactccattgcgctattctcagtcttcagtgtgttagaggaaacttggtaggttatgcatttgttcttaaggagaaattttgttgat

SEQ ID NO: 4176 - DNA, 120 bp, synthetic construct
  source 1..120: mol_type = other DNA
ggtctcagtcttcttactatagactggaaatggtcatatttgacttagctgtccatatggctgttctggagatgagacagctaatgaagtgagaacactcattaacacaccaactgaaaa

SEQ ID NO: 4177 - DNA, 120 bp, synthetic construct
  source 1..120: mol_type = other DNA
tctgaccttcagcgttgcatttatttggccacacctttatagtgtggtcatacctagaaaatattttcttgcctggtcatcagccctctcacctcgattactttctatattttagcacaa

SEQ ID NO: 4178 - DNA, 120 bp, synthetic construct
  source 1..120: mol_type = other DNA
gcatcttctgagttggctttattctcaagcaggctgtcattaagtgatggcttaacaacaatttagcaaccatggcatgacagagaatcatgcctgatagctctaacaaagtatccgaga

SEQ ID NO: 4179 - DNA, 120 bp, synthetic construct
  source 1..120: mol_type = other DNA
tgtatttagattgtcctttttgagctgtttgtgggtttttctccacagaattgggtactcataaaagaggtgtccatattgcctcaaagccaccagattctgatgagccataccccttat

SEQ ID NO: 4180 - DNA, 120 bp, synthetic construct
  source 1..120: mol_type = other DNA
agcatagcagggctgctggctggggaaggtggtgtctttttaacaacttataggcaatttttgatttttcatgcaaatgggaaagaataacaaaggcattttatctggctctcaaatgtg

SEQ ID NO: 4181 - DNA, 120 bp, synthetic construct
  source 1..120: mol_type = other DNA
tcctagcataaaactccaaaagtctttggaatcggataaatatctttttgtatgctaataagctgacaaatgtctggcagccccttaggtatctttaggatggggtctggttactggaaa

SEQ ID NO: 4182 - DNA, 120 bp, synthetic construct
  source 1..120: mol_type = other DNA
aggtggggggagcacgtaaccaagggagatttatcgtattggaatgctctctgtcttaagcttggtgctgtgtactcttttttgaatgtcctaaatgttacataataaagtagaaatttg

SEQ ID NO: 4183 - DNA, 120 bp, synthetic construct
  source 1..120: mol_type = other DNA
tcgggcagtgtgacctatgaagggcactacagccacacagggcaggatggtcaagctgccttttccaaagatttttacggacccaactcccaaggttcacatgtggccagcggatttcca

SEQ ID NO: 4184 - DNA, 120 bp, synthetic construct
  source 1..120: mol_type = other DNA
ggggtaacagaattttgccatcagtattcttgactaaaatcacaggtattaggacccataggaatttcagaaatgtatcaggaccagtcccttgcttgaaggtgagtcagaaattcttac

SEQ ID NO: 4185 - DNA, 120 bp, synthetic construct
  source 1..120: mol_type = other DNA
gtgctcaaggattttgtctctcatgaaccttttctaaggctttgtaagtcactgtgagtctacctgccagattctcccaactggatatgaaataggtggggtcttcctgggggaaaggag

SEQ ID NO: 4186 - DNA, 120 bp, synthetic construct
  source 1..120: mol_type = other DNA
tggaatttctgggtcacatgctaattctttgtttaacttattaaggagccggtttccctttctcgccctctccagtgctggcatccggtgtatacttggttcggcagagggaacattgtg

SEQ ID NO: 4187 - DNA, 120 bp, synthetic construct
  source 1..120: mol_type = other DNA
aggatgttaacactttttttagtggagagttggctggcttttgaggtctagacccatttatacctggtacccttcaattttccactctgggaattacacttctctagtttccaagatgac

SEQ ID NO: 4188 - DNA, 120 bp, synthetic construct
  source 1..120: mol_type = other DNA
ttgaggaactggtttgtgctgtatgatgtttttgtttgtttttagttttgctgtctctgcaacatacattttcgtcctccaaagctcctaagcttcatctctcctttttcaccaacggtg

SEQ ID NO: 4189 - DNA, 120 bp, synthetic construct
  source 1..120: mol_type = other DNA
acaataatgcctttggaagataaagtaaacaactggatttccatccagcttgtgtaatttattgttttgattattcctcgaatctcagaacatcccatgcagctctgcagcccaggcttc

SEQ ID NO: 4190 - DNA, 120 bp, synthetic construct
  source 1..120: mol_type = other DNA
ggacagagagctaacattttgggagctaggaggggacagagagccccagtcattgtaggatgataataaaaacaacagccaacatttatatagtactcaatatgttcttagcatttttgt

SEQ ID NO: 4191 - DNA, 120 bp, synthetic construct
  source 1..120: mol_type = other DNA
gcactttgtatgtctgattccatttacatgcatcttttcagaaacacttttttttgagtaaaaccaggaacagccaggatcctgccactgtctgatcatatcactaatgtctgtggagcg

SEQ ID NO: 4192 - DNA, 120 bp, synthetic construct
  source 1..120: mol_type = other DNA
acatcgtttttattatttatttctcgccaagaccctgcacattggggaacttgtataaataaggaaatggaggctcaggaaaatagaaatgtctgtggaaggccagaggtgtaagtcaca

SEQ ID NO: 4193 - DNA, 120 bp, synthetic construct
  source 1..120: mol_type = other DNA
tgaaagcatcaataaaggcaactgtgtctaccctccaagttaagccaagatccatagctacggaatttgcaaccatttgctatctgcatgataggttcaaaatcaacatcttgctctctg

SEQ ID NO: 4194 - DNA, 120 bp, synthetic construct
  source 1..120: mol_type = other DNA
cgtgtggctccttggcactcagcagacagagcccatcaacaccttgacctgcccttctcccctacagtatgtcttttaaaatttatttttggtaacttttaatatatttcaaacttacag

SEQ ID NO: 4195 - DNA, 120 bp, synthetic construct
  source 1..120: mol_type = other DNA
ttatcctggttcttggggtttagcttgtcaaggcatctgggaggagtggaattttagaacttagagccacataagcatatatattttttacatccggaaaggactttagacctataggtc

SEQ ID NO: 4196 - DNA, 120 bp, synthetic construct
  source 1..120: mol_type = other DNA
gctccctccctttttccctcatgattcagatctcccacagggcatagggcaaataatagccatgtttatgtaaagtgtaatgagaatagaatagagtgaaaacagctactattctacatc

SEQ ID NO: 4197 - DNA, 120 bp, synthetic construct
  source 1..120: mol_type = other DNA
gatgtctttttaaaatttgactggaaattttaattgagacccattcacttagtgcctttggtaacgacatcttcagcatgaatgcttctcttctttggtgactggcagctgcgaggttgt

SEQ ID NO: 4198 - DNA, 120 bp, synthetic construct
  source 1..120: mol_type = other DNA
ggtgccggaccccaaggtttgaccagaatagctcctcttttatttgttgaatacattgggataaaccagttttgtttgaagaaaggactccaagctaaaaatatttcgaaaaccactgcc

SEQ ID NO: 4199 - DNA, 120 bp, synthetic construct
  source 1..120: mol_type = other DNA
tttacagatactcaacctcccactagcaacatatggatatgtgcatttcctcatatcctccacagccctcgttgttactgcttataaaaaacattattatgaaatggtggtgcatgcctg

SEQ ID NO: 4200 - DNA, 120 bp, synthetic construct
  source 1..120: mol_type = other DNA
tgaggtgctcattcacatagaaagggtaattggcacccaaaataaaaatctatggacttgaatctcttcactgtgttgtcaacccccctgagctaattataatcttatcctctaagcctc

SEQ ID NO: 4201 - DNA, 120 bp, synthetic construct
  source 1..120: mol_type = other DNA
tatcagagcagttaaataaagaagaaagatgctgtggaaacataatcgggaagttttcctttttctttaactcacaacaacatggccttccttcaagcctaggggtttgtgagttcctga

SEQ ID NO: 4202 - DNA, 120 bp, synthetic construct
  source 1..120: mol_type = other DNA
atggtccagtattatcaagaaaaatctgctgtgatcaatggtgagaagttgctcattcggatgtccaagagatacaaggaattgcagctcaaggtaaagcattatcttgctcattcagtc

SEQ ID NO: 4203 - DNA, 120 bp, synthetic construct
  source 1..120: mol_type = other DNA
tgcatcataaggcatgcttacctcaactttcctagatgatagcaagctctttccaaaattagttgtctcaaatttatactcctactagtagtgtattagagttttcggccgggcgtggtg

SEQ ID NO: 4204 - DNA, 120 bp, synthetic construct
  source 1..120: mol_type = other DNA
ctctgatgggctgtttcttttcaggtcatctgcccatgcttttcttttgcattgtgtcttcttattggtttgcaggagttctcttaactggagcacgtagtctatttggatttcttgtaa

SEQ ID NO: 4205 - DNA, 120 bp, synthetic construct
  source 1..120: mol_type = other DNA
cttttcagtctcgtaatcactgtaccctgtgaagtgtgtagggtgtataatagcagtaattataagagtacaacaataacaataatgtatacctttaattgagtcccggtactctggggc

SEQ ID NO: 4206 - DNA, 120 bp, synthetic construct
  source 1..120: mol_type = other DNA
tgtatgtctcaactacatagtaatgcatgctttatggtccctatgttgatatgaatcagctgccactctgtctgcacgtaacagaaattcatctccattaagcctgttggcttaagcaaa

SEQ ID NO: 4207 - DNA, 120 bp, synthetic construct
  source 1..120: mol_type = other DNA
cagttgggaagatgattgagagtcttctctatgtgctgatagttacaaagcaatacaagacatggttctcagttgggaagagttcactctccaactgggagacaaattattcttgtgcaa

SEQ ID NO: 4208 - DNA, 120 bp, synthetic construct
  source 1..120: mol_type = other DNA
caagatgtgttaactctgagcactgtagttggtcccttgtggggctgttgagcggaatcattgtcatcacagaatggatgtaaagataacaatgtctgacgtttgcttcaaaataatata

SEQ ID NO: 4209 - DNA, 120 bp, synthetic construct
  source 1..120: mol_type = other DNA
tttgtttcacctgccttctttatgcctttacccacagaatacagaagctggccaaagaggaaggtggagagaattttcttagggctttccgaagtcaattctcttatttgaaaatctttg

SEQ ID NO: 4210 - DNA, 120 bp, synthetic construct
  source 1..120: mol_type = other DNA
ttttacaacagaaagctccccatccaactcccatggggaattttatgttctgaagaattgccatatacatttatgccagtctgggggcacattctttagcctttgtctattctagcttgg

SEQ ID NO: 4211 - DNA, 120 bp, synthetic construct
  source 1..120: mol_type = other DNA
cactcataccatgctaggccagctagatcacatctctggacctgagattcccatctgtcaaatgagatacgtgatgctttttaacatttgtatggctcttattgcatgatttagctgggc

SEQ ID NO: 4212 - DNA, 120 bp, synthetic construct
  source 1..120: mol_type = other DNA
aaagcatggaaaggaacttggagttaaaatacctggtgtcaggtcctgattcttttcactatctgtgtgaccttgaagtgttccttaacccaatacaactccaagagtcaccaactgcat

SEQ ID NO: 4213 - DNA, 120 bp, synthetic construct
  source 1..120: mol_type = other DNA
acaaaatgctgagcttcccttcagctcctcaccctttgttggaaaataatataggaaaaggtctgttaatatttggccctttggggcaagtctacaccctattaaaacagcctaaaagta

SEQ ID NO: 4214 - DNA, 120 bp, synthetic construct
  source 1..120: mol_type = other DNA
attcttttttttaacctctgagcgtgccctccccaatagttagcatcccttttccatgcataaattgagctgagaaataaatgagaaaactggaggctaagaggttggcttcattctgat

SEQ ID NO: 4215 - DNA, 120 bp, synthetic construct
  source 1..120: mol_type = other DNA
aagaaggagctgatgatagaaaagaaaacacaatggcagagaatgaggtaatgatcaatttcttccccaggtaaggcgaggcaggccctgaaggagaataatcataataatataatgagg

SEQ ID NO: 4216 - DNA, 120 bp, synthetic construct
  source 1..120: mol_type = other DNA
cttggcttacacttccttcttgccagagccttctatatttaagtaggggtaggataagtgaggtttggcaatatgcataaggagcctaatttttaaaatcctccacacataccttctagt

SEQ ID NO: 4217 - DNA, 120 bp, synthetic construct
  source 1..120: mol_type = other DNA
gccaagattcttgatagaagcagaagccagggcaaaagtgaaaaagaaagactgttttgaagaacctggagataatcggcatggctgcatctttagggcatattagggataatgttttta

SEQ ID NO: 4218 - DNA, 120 bp, synthetic construct
  source 1..120: mol_type = other DNA
tctactgttttaccaccctgctctcatcggtttgtataacattgctcatttaaggtgacactatgtgtcagccaaagagcccctgatggaaaaagaatctcagaaagccccaagaatttc

SEQ ID NO: 4219 - DNA, 120 bp, synthetic construct
  source 1..120: mol_type = other DNA
ttcttgtttgtaaaatggatgtgatcacaaggctgttgtagtactgtaaagaggtcatgctcattaaaatatcctgagctctctggagaaagtttctgtggttgagaagccagtgtgcgt

SEQ ID NO: 4220 - DNA, 120 bp, synthetic construct
  source 1..120: mol_type = other DNA
gagagaaatgctaatccagtgatttcttaaatgaacagaagagcttgagtattaagtgctaagaaggagatgaaggtacgcaatgctgtgagtgcctgtgataaatctgagccttctcag

SEQ ID NO: 4221 - DNA, 120 bp, synthetic construct
  source 1..120: mol_type = other DNA
aaaggtatttgtagttgctttatactcaggctagtgcagtagacttcagcaaagctttcagtggaatcttccacagcaaacactggaaacaaaggactttaggatttgaaccatgtatcc

SEQ ID NO: 4222 - DNA, 120 bp, synthetic construct
  source 1..120: mol_type = other DNA
gataaaggaaatgctgtatgtgaaacctatctgagagctgggacctgcattcaatatcattctttttttcttctccctgtcactgctcactgttgatttggtttgctctgttcttccttt

SEQ ID NO: 4223 - DNA, 120 bp, synthetic construct
  source 1..120: mol_type = other DNA
gtatattgagcacccattatctactggggcttgaaattctttgcgtcactttaaatatggtggattaagcattaagggcctattccaaactttgagcatcaccctaaagatgagttggtg

SEQ ID NO: 4224 - DNA, 120 bp, synthetic construct
  source 1..120: mol_type = other DNA
aagtatgagcatgtgcaggctggaatgaacataagtaaggtttcaactagcattaaagtgggtgcagaaagtgatttagcaacaaaggcaagcctctaaaagcctggctaaactgttagt

SEQ ID NO: 4225 - DNA, 120 bp, synthetic construct
  source 1..120: mol_type = other DNA
agcctttaagattctcactgtgaaaataattagggatttgctttacagaaagcctgtagcacaccagaggttgaagtgagagtcaggggcagaaaatacagaggaaaggcttaaaaatga

SEQ ID NO: 4226 - DNA, 120 bp, synthetic construct
  source 1..120: mol_type = other DNA
ttattttaagtgtatgatgcaataacctagatttgcaaggggcggctgtaaactttcttgcaatttcagtctcccgtaatagaccagatactccgtgaaaacagccttgaataacagtgc

SEQ ID NO: 4227 - DNA, 120 bp, synthetic construct
  source 1..120: mol_type = other DNA
agtgtggaggctcgtcctttccatccaacttgctctttttttcccttctcctttaaaaaaatctcttactatttctttcctccaggtgtaccatttttatagtcagatctggagagcaaa

SEQ ID NO: 4228 - DNA, 120 bp, synthetic construct
  source 1..120: mol_type = other DNA
aggtaggtgctgtttttatccttatttaacagataaaaaatctgaaatgcagagtcacacagctaataactggcaaaaaccagagtcaggttcaaatcccagtcatctgactctagagcc

SEQ ID NO: 4229 - DNA, 120 bp, synthetic construct
  source 1..120: mol_type = other DNA
ttcagttcggggcctttacagattgtatttgttaatagtcttcagttagctttgagattcattatctcattggtccccgaaggaagagtatggtatgaggttctgcatttgacaggtgag

SEQ ID NO: 4230 - DNA, 120 bp, synthetic construct
  source 1..120: mol_type = other DNA
atactggtaaggtcttagtggcttccagtgggaggtacttaataagggttgtctattattattattcactcatgaaatatttaagacctattatggctcctctcaccggggctgcataac

SEQ ID NO: 4231 - DNA, 120 bp, synthetic construct
  source 1..120: mol_type = other DNA
ggagaggttggggttcaagtgagaaagccaacatttaggcagttattaacagcttctgtgatgaaatatttaacacgtgtctccaaaccagtatttttgagcaacaggcaaaatgatagg

SEQ ID NO: 4232 - DNA, 120 bp, synthetic construct
  source 1..120: mol_type = other DNA
gataagtggctattttgaaatgaaaaaaaagttctaatgacaagtctaggctgcttccttctgacagggtctcctaggcacttagctcagtgtcctgggaggtgggaggaggaaagtgaa

SEQ ID NO: 4233 - DNA, 120 bp, synthetic construct
  source 1..120: mol_type = other DNA
aaacaaaaacgagagaattcttcgagagtcccggtcacagcagctgcagagagaggtacagtgtgaagaaatgaaatccaacaagtgaaatatcagaaatgtcagaaatcaccttcattg

SEQ ID NO: 4234 - DNA, 120 bp, synthetic construct
  source 1..120: mol_type = other DNA
gctttgttctttttaactgttcatccatacagcaaatacttatcacaggcatgctaggtaccagacactattctagggaccagggatactggaacaacaacagtaaagtggacaaaaatc

SEQ ID NO: 4235 - DNA, 120 bp, synthetic construct
  source 1..120: mol_type = other DNA
attgagacccagagaagctatataattcatccaagtccacacagatggtgagttattgggcctaggatcaaatcgcctgattctgaatcactttcctctttttactctactatacttgtc

SEQ ID NO: 4236 - DNA, 120 bp, synthetic construct
  source 1..120: mol_type = other DNA
ttttctctcatccagcatttgcagtagtattgtgcagcccttcagggggccacatagttcaaggtcacctcggaagttaggaagagttcagacttgccagggcctctaattctaattcat

SEQ ID NO: 4237 - DNA, 120 bp, synthetic construct
  source 1..120: mol_type = other DNA
gtttattctgtgtcaaacgctgtactgaatgctttttgttgcctctcttcgacttcacagcaaccttatgttgttgttactgttattcccctcccttcacagatgtcagagatatttgat

SEQ ID NO: 4238 - DNA, 120 bp, synthetic construct
  source 1..120: mol_type = other DNA
gtactttctacattttctacaggagacatgtattacttgcaagctaacataatgaggtacttagcataagttctgtagccccagtggggatctctgaaccaggaaaagggtaacccccac

SEQ ID NO: 4239 - DNA, 120 bp, synthetic construct
  source 1..120: mol_type = other DNA
tgtcagggtttttctattctggacaatgaatttggtacagagtcactgtaattaaatataaaaacagaagcatcttcctccagctaaagcagcagttggcgcgggcttaggttgaatgct

SEQ ID NO: 4240 - DNA, 120 bp, synthetic construct
  source 1..120: mol_type = other DNA
cagagagattagttcaaggctaacattttatatcaggtaactgaggcacacaaagggaacaaatgaagaacataaaatgatcagtgtaaacctgaaagcacgcagtcattggcaagggac

SEQ ID NO: 4241 - DNA, 120 bp, synthetic construct
  source 1..120: mol_type = other DNA
agctagggagagcccctgggagggagagagataaggcgctatctgccttcaatcagaaccttcggtttaaaatcatctaagagtctatacttgtgtgtacatacgtatttatttttattt

SEQ ID NO: 4242 - DNA, 120 bp, synthetic construct
  source 1..120: mol_type = other DNA
gtgcgttcctcccccagctctgccgtcctggccagccgagggattcggaggctcttttgaaaagattgcttttccctcgtgcgtttttgccgccctgtctttaaacacctaaaaaccgtg

SEQ ID NO: 4243 - DNA, 120 bp, synthetic construct
  source 1..120: mol_type = other DNA
ttaagtgtccctcaaactggccctgacttgatcccctccaagcgcttgtgtatgaaccaagtttccctctaagagggaaggagccctggccatcctccctcactccttacaaagggcttt

SEQ ID NO: 4244 - DNA, 120 bp, synthetic construct
  source 1..120: mol_type = other DNA
agaacctccatctaaaagttacattcatttaaaagttgctcttaaaggtttctggcatttcattgctcaacacagatacagctgtccccgttgcttggatgaggaaactgagtctcagct

SEQ ID NO: 4245 - DNA, 120 bp, synthetic construct
  source 1..120: mol_type = other DNA
tgtgaagaaaatgggatgcgatcacctagcggggagctaatagccttttagccagtggaggagaaaaccaattaaaaattatgatatctgttaaaatggaacctggggtgccaaggggaa

SEQ ID NO: 4246 - DNA, 120 bp, synthetic construct
  source 1..120: mol_type = other DNA
caggttatgctccctccccgttctctgctgtgccctctatctccccactcctctgcaattatttttcagcagagtgacttaatagtaacaataacagtaacaataatagtaacaacagca

SEQ ID NO: 4247 - DNA, 120 bp, synthetic construct
  source 1..120: mol_type = other DNA
accaagctgtttccagttcccttgtgtgcctgtgactccagaggattctcgcccttgtgttcctgagagggaaaaaggaaacatgtatttcctagaatttaagtaatgactggggagatg

SEQ ID NO: 4248 - DNA, 120 bp, synthetic construct
  source 1..120: mol_type = other DNA
gggcccagcagctgagggggacagagggggaaacagggtagcaaataattatggtttactcttttttaattgtgaaatttgtgtaacataagtttaaccatttataagtgaaccatttgg

SEQ ID NO: 4249 - DNA, 120 bp, synthetic construct
  source 1..120: mol_type = other DNA
aaactgttttccacagtggttgaattgtgttacattcccaagggttacaatctatccacattctcaccaccacgcattattctctgttattctctggttcatgtctcactctggccgtgc

SEQ ID NO: 4250 - DNA, 120 bp, synthetic construct
  source 1..120: mol_type = other DNA
gtcaggagctcattctgtggatactcctgcatagacatcacgtggactcaaagggcatgaggacctcggctgagaggagcttacacatcagtgcaaacctctcattttacacagggagaa

SEQ ID NO: 4251 - DNA, 120 bp, synthetic construct
  source 1..120: mol_type = other DNA
ccaggccttgccctaggaaagaaattaattataacctaattggcagtttcctttgcatagaagccggaagcaactgccagtgaggctggtgattaactctgcagcagctgggaaattgca

SEQ ID NO: 4252 - DNA, 120 bp, synthetic construct
  source 1..120: mol_type = other DNA
gctgtccatcatctgcagagaccagtgttttcttgatggttttacagagagatgcttaaacccagtgaactaagaatgggacaggctgtcagatttttctcaaaggaggtattgacttgt

SEQ ID NO: 4253 - DNA, 120 bp, synthetic construct
  source 1..120: mol_type = other DNA
gccagccactgatctgtgaacttcatgtgcattaattccttctagctcccaacactcctgtgtggtgggagctctgagtctcagtgggtacagaggagaaactgagatacaaatatatgt

SEQ ID NO: 4254 - DNA, 120 bp, synthetic construct
  source 1..120: mol_type = other DNA
cttagggtctaacacattcatctctccaaaagtaaggattccttgccagggaaagggctaacaagctgcctgttttcttggccagcaggcatcctccccatgagcccagggctatgggtg

SEQ ID NO: 4255 - DNA, 120 bp, synthetic construct
  source 1..120: mol_type = other DNA
agggccacatgcgtgcaccatgggcccctcccacatccaaaagcaaaattatattctgcaactgtgttggtataagacaaacacaatccaggccactttattattatttatttcttatta

SEQ ID NO: 4256 - DNA, 120 bp, synthetic construct
  source 1..120: mol_type = other DNA
tggaatgggagaaaaacttgtaattcatagatctgatcagtgttaatccagaatctgtagagaactcctcacactcaacaacagcaacaaaaaaacctgattccaaaatgagcacagggg

SEQ ID NO: 4257 - DNA, 120 bp, synthetic construct
  source 1..120: mol_type = other DNA
agaatctctctttatatacacctccaaatttgttatttacagtagagcctcccttgatccgtgttttttccctaaatgcaaagttagattatagtcccaggcaaaagcagcctccagctg

SEQ ID NO: 4258 - DNA, 120 bp, synthetic construct
  source 1..120: mol_type = other DNA
cacactcctgtttatgaaaccattgtactggctcgttgattcattgattcattcattggttcataaatttattcattcagctcacagaaagtgagttggcagatgtggcaggaaggtagg

SEQ ID NO: 4259 - DNA, 120 bp, synthetic construct
  source 1..120: mol_type = other DNA
tgcttctaattcatgcagtttttggatcatatcgttgttattgttttcttttttggaagtcccaaatttcggcccttgtgctgccatcctagggaagtttttcatggtctggagctccat

SEQ ID NO: 4260 - DNA, 120 bp, synthetic construct
  source 1..120: mol_type = other DNA
ctggtcccctctgcatccaaagatgaataatttaaacagcccagccacgtgtggaacattggaaacagtctagcacttcactctgtcaaacactagggcagactctttcctgctgagctg

SEQ ID NO: 4261 - DNA, 120 bp, synthetic construct
  source 1..120: mol_type = other DNA
ccatcactttcttagctgttatcctaacccccgagacacaaagcctcacagcatgtccagctatttcacttggtcaggcttctcgccacccagccttgctgttcttatatgtgaaatggg

SEQ ID NO: 4262 - DNA, 120 bp, synthetic construct
  source 1..120: mol_type = other DNA
tgtgtttttccatctagaagtgtctgtgacaagcgggaaccttaagacagctgtgcccagctgcagagaccacctgggaggcattttaagtgcatttaagtctgtttctgctcgcaatca

SEQ ID NO: 4263 - DNA, 120 bp, synthetic construct
  source 1..120: mol_type = other DNA
tgggagcaaactgatcaaaaagagagatcgattacatacaagtgcagtattcctaatgtgtcctttggatgttggtattgtttgggcattctagagtctatttgcaggttcttaatggat

SEQ ID NO: 4264 - DNA, 120 bp, synthetic construct
  source 1..120: mol_type = other DNA
ctgtatattattttccattttcaccgacaatgtacatgagttccaaaaactattttaaaagctttccactgtgggaaatgttggccacacacagtcagcagcatagtgcaccgtgcccct

SEQ ID NO: 4265 - DNA, 120 bp, synthetic construct
  source 1..120: mol_type = other DNA
ccttccggcttggatgattgagaataggcttgtcactgaggatactgcttcccctgtttccttttctttttctgttttaaagcagttcttttctagcccgtgtgtaactatacaaataat

SEQ ID NO: 4266 - DNA, 120 bp, synthetic construct
  source 1..120: mol_type = other DNA
gattaggaggtttcgagagagggagtaagtggggctggaaaaatcccaaggttttgatttagcaaatgacctgcaactctctggagaagcggcagttcccaaggaaagcctgacttctta

SEQ ID NO: 4267 - DNA, 120 bp, synthetic construct
  source 1..120: mol_type = other DNA
tcaccccttactggagaagttgccaccatcagagttggggagccttagacccagtgctcaacacacctccctgaggaaggggcctctaagccaagaactgaatgatgagagctaggcctg

SEQ ID NO: 4268 - DNA, 120 bp, synthetic construct
  source 1..120: mol_type = other DNA
ggacctgacttagttttaaaaggattagtcagactactgtgttaggaatggtttggggtgggaaggttcaggggcgaagctgggagacaatcagaaggctacaggagaaacctctgaaca

SEQ ID NO: 4269 - DNA, 120 bp, synthetic construct
  source 1..120: mol_type = other DNA
aggcggtcggaaatcattatgcgttaatgtcacatcataccccagatgtccactgtgtttgttttcaagtggtagaatcgtggctttctcacgttctctaaaatgaacacatattgcttc

SEQ ID NO: 4270 - DNA, 120 bp, synthetic construct
  source 1..120: mol_type = other DNA
tgtggtctacccagtgtctgtctccggccacagttcgtttctcggtcggtttagtgtccgtgtagccacccaaccgtgtggccgaccattcgcgctttcatttgtccttcgcctccgtct

SEQ ID NO: 4271 - DNA, 120 bp, synthetic construct
  source 1..120: mol_type = other DNA
atcggctgtaattctccttataagaggtctgcattgtacctgttacacaggcgaggctcagtggctcagggaaggtgacggccaggctggccagtgaccccgtgggaacttgaacccagg

SEQ ID NO: 4272 - DNA, 120 bp, synthetic construct
  source 1..120: mol_type = other DNA
cagatttctcctgggatcgccttccaaataaaccacctgcatttggggtctgtgtctggtggaaccccaggccatgagtccttcacccctttctgcctggcctggtcctgttcattcctc

SEQ ID NO: 4273 - DNA, 120 bp, synthetic construct
  source 1..120: mol_type = other DNA
atgttaaggaggcctgctatgtgtcgcctgatgctatacagggtcaggagggaaagtaaaccacgttatacctgggtaacttaaaaaaaaaaggtttttaacaagattttatggaccagg

SEQ ID NO: 4274 - DNA, 120 bp, synthetic construct
  source 1..120: mol_type = other DNA
aagcatatcatacacacagacaccccatacaatgcgtacacatgcacacacacacaggctgcctcaaattgagaagggttccttggactttcagttcagtaaatcccaacgtttgaacat

SEQ ID NO: 4275 - DNA, 120 bp, synthetic construct
  source 1..120: mol_type = other DNA
aaaataatgattagaaatagaaggcataaaagtaataaatattcattaaagaagatgaggcatgaggcatgaggcgtgatcccttctacccataggcgccagtgttgcacatcgtggtgt

SEQ ID NO: 4276 - DNA, 120 bp, synthetic construct
  source 1..120: mol_type = other DNA
ccagctgcctggctaaggtgttcccctgtgcccccctagatcgggaaagtctgtgtggaaaactgccaggcattcagtggcatcaacgtccagtacaagctgcattcctctggtgccaac

SEQ ID NO: 4277 - DNA, 120 bp, synthetic construct
  source 1..120: mol_type = other DNA
tataggtgtgttccatgcaacttttgcagcttctcgaaagacacacctctaggtccatccatgccctcttaggaacatgctgacacagctgccattcatgccattcattgtgtatctgaa

SEQ ID NO: 4278 - DNA, 120 bp, synthetic construct
  source 1..120: mol_type = other DNA
actgcgatgttgtggagacccaagacatcaacatttgccctcaggactgcctccgtaagcagggtttaatcagggcatgggaacaggtaggagatagtaggggaaacctggatcccacag

SEQ ID NO: 4279 - DNA, 120 bp, synthetic construct
  source 1..120: mol_type = other DNA
gacacgtttctgtcattgagttttctggtattatatagccctacgtccctagccacttagcattttcataaagaaaatgccaaagacatttggaacagaggaaaattttgacctcccctg

SEQ ID NO: 4280 - DNA, 120 bp, synthetic construct
  source 1..120: mol_type = other DNA
cttcagtgttcctactagcactgtccagggcgctggaagccaagcccagttctggaagtaacagaggctcagagccaagggtgtgagtgaacggtgagccacgcagcttatggtggcgtg

SEQ ID NO: 4281 - DNA, 120 bp, synthetic construct
  source 1..120: mol_type = other DNA
cactcatcagcaccaggtcttggacccatgactcaacctcagtatttgagaggatcaggttgatgtcgccctcatgtgcttattgcagtctctagagtgtggtaaacaggtttccagtgc

SEQ ID NO: 4282 - DNA, 120 bp, synthetic construct
  source 1..120: mol_type = other DNA
ctctagaggtgttgctgtgccagtgccactgaagatctaagctttaaacatttaaaaagccctttgattttgagctgacagctgtcttcactccagtctgccccattcattcctctcagc

SEQ ID NO: 4283 - DNA, 120 bp, synthetic construct
  source 1..120: mol_type = other DNA
tacagttagactctctggggaatcatgctattcattaagaataagccagaatgtcaggtgtgcagtgcactggtaacactgctttatctcaggtgctaatgtgggtcttcttggtaacta

SEQ ID NO: 4284 - DNA, 120 bp, synthetic construct
  source 1..120: mol_type = other DNA
gcaggaacattgtcaccatttctcagataaagacccaggagaccagcctggtttgttggttttccaaaccaccatgctgctcaggggcttcccagcatgcgtgtgtgggtgtgtgcgaga

SEQ ID NO: 4285 - DNA, 120 bp, synthetic construct
  source 1..120: mol_type = other DNA
gtgctatttttcctcacagctcgttcatcgggacttggcagccagaaacatcctggtagctgaggggcggaagatgaagatttcggatttcggcttgtcccgagatgtttatgaagagga

SEQ ID NO: 4286 - DNA, 120 bp, synthetic construct
  source 1..120: mol_type = other DNA
gaaggcattcttatacaagacgtgcaggctacactgtcacacactgctgccaagacagccacactgcactaaggacataaatccctcatgtgtttaagtaaaagaagtgacagtaagatt

SEQ ID NO: 4287 - DNA, 120 bp, synthetic construct
  source 1..120: mol_type = other DNA
ggccttctcctttacccctccttcctagagagttagagtaacttcaatgtctttattccatcttctctttagggtcggattccagttaaatggatggcaattgaatccctttttgatcat

SEQ ID NO: 4288 - DNA, 120 bp, synthetic construct
  source 1..120: mol_type = other DNA
aacatgtgcatcttaaatactgtgggctgtgaataagcaattggacaacagctttccgattatataagctgactgtaggctagttggaaaaggcagagaaaagcataaagaagagactga

SEQ ID NO: 4289 - DNA, 120 bp, synthetic construct
  source 1..120: mol_type = other DNA
cttcctagggggtcttataaaaatgagtgagagcagagactggtgcaatgcaagctcaagggctgagagctgtcccagcaggacacttagggaggagaaggtaattccagatggcccagg

SEQ ID NO: 4290 - DNA, 120 bp, synthetic construct
  source 1..120: mol_type = other DNA
attcattcttcttgagagttttaaggactggcacttctcacttagctgccagagcaagcatagtatccagtgagctgtttaccagtgtctttgcaagggaagtaaaaatgaatctccctt

SEQ ID NO: 4291 - DNA, 120 bp, synthetic construct
  source 1..120: mol_type = other DNA
tttatgaggtttatgttgtctcccagtttttattgttaacaattcatttaaatttcccagagccgaacgcaggccaaacaaagcatatcggggggtggccagagtcagcctgtgtgcctg

SEQ ID NO: 4292 - DNA, 120 bp, synthetic construct
  source 1..120: mol_type = other DNA
gcaccgctgtcccctttgcactatccttcctctctgtgatgctttttaaaaatgtttctggtctgaacaaaaccaaagtctgctctgaacctttttatttgtaaatgtctgactttgcat

SEQ ID NO: 4293 - DNA, 120 bp, synthetic construct
  source 1..120: mol_type = other DNA
agccattgagtgcagcagtgtgctgttgccctacactgccttagaaaaagagttaagcagttcgacaaatatacatcagattagagagtctcaagttcataaaagtcaaaattggtagtg

SEQ ID NO: 4294 - DNA, 120 bp, synthetic construct
  source 1..120: mol_type = other DNA
ccccgaggatgggcctgggctcagcattcgagatcttgagaatgattttttttaaatcatgcaacctttccttaggaagacatttggttttcatcatgattaagatgattcctagattta

SEQ ID NO: 4295 - DNA, 120 bp, synthetic construct
  source 1..120: mol_type = other DNA
gtgcgcacacacccagagggagagtttgaaaaatgcttattggacacgtaacctggctctaatttgggctgtttttcagatacactgtgataagttcttttacaaatatctatagacatg

SEQ ID NO: 4296 - DNA, 120 bp, synthetic construct
  source 1..120: mol_type = other DNA
agatgatagtccctggtttgagaaaaagtttggtttgacatttagtaattaagccttattgcatgatacttccttgactcagcaaagccacatataatataaatcaagtgtagaggactt

SEQ ID NO: 4297 - DNA, 120 bp, synthetic construct
  source 1..120: mol_type = other DNA
ttagttttccatattttaatcccatagagtgtaatctatctccctgtcccagctgagaagcagttaactaacactgctgatttgtaatttgagttgctgtatctgagttgctggtgtggc

SEQ ID NO: 4298 - DNA, 120 bp, synthetic construct
  source 1..120: mol_type = other DNA
gcatctgggtgagaaacaaagatgggttctgatgggtatgaatcaggctcttgccaaacccaagtttctttagttttgacattcagcttacagagctgtttgtgagaaagaaaaatcaat

SEQ ID NO: 4299 - DNA, 120 bp, synthetic construct
  source 1..120: mol_type = other DNA
aggaaaaaagatcagaaacgtgaagggtaagcggttaaaatttgaatagatggttcgggtaggtctctttgaacaggtggcagaggagacaaaactcttagaagatgagagaattagcaa

SEQ ID NO: 4300 - DNA, 120 bp, synthetic construct
  source 1..120: mol_type = other DNA
gatgagaagttcaagtcttgtcttattagacttgagatgtctattgggcatccaaatgcagatgtggagctggcgctagcaggtaagaaccttgagtttaagagaaagctaaaaatgtaa

SEQ ID NO: 4301 - DNA, 120 bp, synthetic construct
  source 1..120: mol_type = other DNA
tgcagtagggcaagtgatgttgaaagataaaaggtcagagtgggtcatgcatgaaacagattatggaaggagtatagtcttaagtagtggcaaagtcgagggcatgagggatatatatat

SEQ ID NO: 4302 - DNA, 120 bp, synthetic construct
  source 1..120: mol_type = other DNA
actcatctttgtgacgttactctctcttagtaggaactagggctttctggtggctcttgtttctttttctggcttctcttgtttctttttctggcttctcttgtttctaccattttctac

SEQ ID NO: 4303 - DNA, 120 bp, synthetic construct
  source 1..120: mol_type = other DNA
acactaggtaacgggctccatgagaactagaagtgtattttatgtacccactgcaacaaatagtatgatgcctgttttagtggctactcaataactattagaagaaagaggagacggatt

SEQ ID NO: 4304 - DNA, 120 bp, synthetic construct
  source 1..120: mol_type = other DNA
agctttgcatcttcatctctcagtcaccattttcttaactcaactacttattcccttttatttgcctcattgcattaatcctgtaatagggcttctagcctctgctctagactctccact

SEQ ID NO: 4305 - DNA, 120 bp, synthetic construct
  source 1..120: mol_type = other DNA
tggttaaatctgaaatctacagagaagcaggttaccttgtcaatattcaaaggaagtacatatctcctaacttcaggttggggagcctttctggcattttttttcacctcttcccagttc

SEQ ID NO: 4306 - DNA, 120 bp, synthetic construct
  source 1..120: mol_type = other DNA
cttttccaattacatttttgactctcacataactcttgctgttttagatgtgattcagattgagtgcagcagctctgtaaaaaccccgtaatttccaggaacaatgggaggtgtcccatt

SEQ ID NO: 4307 - DNA, 120 bp, synthetic construct
  source 1..120: mol_type = other DNA
tttcattttctccatcatttgcacttcttagtgaaatttcatgtgaagctgcaaaatcacccaggaaaatccaaatagcagcagatttggaaacgtgcactcaaatagggttgtggcaag

SEQ ID NO: 4308 - DNA, 120 bp, synthetic construct
  source 1..120: mol_type = other DNA
gtggtgggatctttacaatgttgtaggcaattgaaaaattttttccaaagcaattaccaatattgtaaacggttccatcattttcaatgtgggggtgagcagtggccccattgacagaga

SEQ ID NO: 4309 - DNA, 120 bp, synthetic construct
  source 1..120: mol_type = other DNA
tgtaacacaaatctctgtttgcagaaggataaattggggttccagagagatcaagtgtcttgtttaaggataaagagctagataaatcagcactagatttccacctgggacctacttggt

SEQ ID NO: 4310 - DNA, 120 bp, synthetic construct
  source 1..120: mol_type = other DNA
tgagactattttttttcttcttatttttaccagtactgcatttgtggttctggcttttagtttcacctcttggtctcccagctatactgtatctcttttgccttcccgtacagcccacac

SEQ ID NO: 4311 - DNA, 120 bp, synthetic construct
  source 1..120: mol_type = other DNA
acttccagcccaaagcctttccctttaagccttctttcacctgtcccaccttgcattgccaactacttccagaagtaattcctttcgtatttatgctttcttaaaagattttccttctta

SEQ ID NO: 4312 - DNA, 120 bp, synthetic construct
  source 1..120: mol_type = other DNA
cttcccccactgggtagacattaacaagggcattgtcagtaacctctactcctcgaaagtaagaaaaaaacctgtagaaacaaatgaatttttcagtccagtaattttcaagccatgaga

SEQ ID NO: 4313 - DNA, 120 bp, synthetic construct
  source 1..120: mol_type = other DNA
aggaagctttatctgaactccacagtaagctcttatggctacatttctgcttgacatcatccgtttctcttctattatcatgcaagttgtcctgcttcaagtcccctttcactttttctt

SEQ ID NO: 4314 - DNA, 120 bp, synthetic construct
  source 1..120: mol_type = other DNA
ctcccattttactaattataaaaccaagaattggaggtcaacatcttgccaaggttaccctcctaggcaagtcatgtctgttgaatacagggtttaaagccactcatgttggaccccaaa

SEQ ID NO: 4315 - DNA, 120 bp, synthetic construct
  source 1..120: mol_type = other DNA
tatttaaatgaaaaaacaggaatcctggctctttaaaatctagagctatatccctctgtgagtgtgagctactgcttggatgaaagtcaatctgctgtagcagaaagtccacagggttgg

SEQ ID NO: 4316 - DNA, 120 bp, synthetic construct
  source 1..120: mol_type = other DNA
tgatccttagggaattccaattaggtagcgtttttctgcattagagaaataaagtaaaggcgaatgaaagaaaatgggttcttgctataaaaagcccaaaccacctgatccctctccctg

SEQ ID NO: 4317 - DNA, 120 bp, synthetic construct
  source 1..120: mol_type = other DNA
ctaggggttgagagatgacagctttttgggtcaggtacctcatctttcattattcactcatattataccataattttttccccatcatctcatttctctaccaatccccaagacctacag

SEQ ID NO: 4318 - DNA, 120 bp, synthetic construct
  source 1..120: mol_type = other DNA
ctttgagtgactgtcactctgtcttttagtctccttcacctttctcactacagagaattagtaggattggggactccagaatgggaaagggatcttcggttgccctctcttctgacttta

SEQ ID NO: 4319 - DNA, 120 bp, synthetic construct
  source 1..120: mol_type = other DNA
tgcctcctgagacatctaattatatccttgctgccctgtcttctgaggtagggtcctatctttatctccctgacagatttgagggaaaccaaggcccgaatggtagaatcactcacccaa

SEQ ID NO: 4320 - DNA, 120 bp, synthetic construct
  source 1..120: mol_type = other DNA
gtcttgaactcctgacctcagatgatccacccatcttggcctcccaaggtgctgggattacaggtgtgagccaccacgcccggcctttttttttctttttgagacagagtctcaatctgt

SEQ ID NO: 4321 - DNA, 120 bp, synthetic construct
  source 1..120: mol_type = other DNA
taattcaggaaaagtttgagaatcaatgtggtaatgattgggctctctgtcgctgctttgcactctggctttgccatttgcctgcttcctaatttggggcaagtgatttttatttttctc

SEQ ID NO: 4322 - DNA, 120 bp, synthetic construct
  source 1..120: mol_type = other DNA
ttggagaggctgtcacttcactccctcactgatctcatccccatcctaaaagccactctcttacatcagcctgggttattttttctataacacctatcactgacattaacattacatatt

SEQ ID NO: 4323 - DNA, 120 bp, synthetic construct
  source 1..120: mol_type = other DNA
ggcagatgctcaaccaaagtctgttaaatgagtgtaaggcccagagcataaggcctgggagccagtaaagtgcctaataaaaacagcctataccattactatttttttttttgtttgttt

SEQ ID NO: 4324 - DNA, 120 bp, synthetic construct
  source 1..120: mol_type = other DNA
tattaaaacaacacgcaaaagagagaatttagagaaagatgagcttaaaaagcaatttaacttgagcaagtttccaccttccagtggatcactttgcagaccccacttgggaggcctctg

SEQ ID NO: 4325 - DNA, 120 bp, synthetic construct
  source 1..120: mol_type = other DNA
ttatttttaaaagtttttcaggtaacaagactgaattattatggggtgttttagggggaaggaggccctcggcgggggcgggggaggatgggacagggcctgagatgcggagggcatctg

SEQ ID NO: 4326 - DNA, 120 bp, synthetic construct
  source 1..120: mol_type = other DNA
acgggttagtggggagggttagggttagggaagtttctatggagtctgggtgggtctgaggtgtttgagggaggaggcacagaagaggtgttttcgtgatgttggtctagattcagtgtg

SEQ ID NO: 4327 - DNA, 120 bp, synthetic construct
  source 1..120: mol_type = other DNA
aggaaactagaagacgggttcattctcctgagtgatttccagccaaggtgaaggcagcagagaggacagagtgggctttggggaatataaaatgctccatccataggcatctcagagata

SEQ ID NO: 4328 - DNA, 120 bp, synthetic construct
  source 1..120: mol_type = other DNA
ggtcctgactcccaatttcccatttcctgacccctgacatccaattttctgatttctgacctcccattgcccgacttgatcatttcctgatctgtgatctctgatgactctgtctcccat

SEQ ID NO: 4329 - DNA, 120 bp, synthetic construct
  source 1..120: mol_type = other DNA
aaaaaaaaaaaattaaactccttagacaataagcatagactatgatctcagcccctcaaacccagacccccaaattcaaacctcagatccccaaaccaagactccaatcttcagccctcc

SEQ ID NO: 4330 - DNA, 120 bp, synthetic construct
  source 1..120: mol_type = other DNA
cctcaaccctagaactcagactccaacaccagtgaacattagacctccacctttcaccacacacacactctgaccccaacctcaaaagtccaaactcagaaccttaaatgacagactcac

SEQ ID NO: 4331 - DNA, 120 bp, synthetic construct
  source 1..120: mol_type = other DNA
cagaaaaggtcttgagggaagatctgataaagagactgaagggtctcgagggaaaatcagagcagcctgagagagagatgaaaatctcggccaggcgtggtgacttcatgcctgtaatcc

SEQ ID NO: 4332 - DNA, 120 bp, synthetic construct
  source 1..120: mol_type = other DNA
aaaaataaaaaatgaagtctctctggagtcctgtgggaaaaggaggtttggggggtttttgagggagagattgggggccctgagtaaaatgatgggggaatttaggggtctggaaaaacg

SEQ ID NO: 4333 - DNA, 120 bp, synthetic construct
  source 1..120: mol_type = other DNA
ggggtggtgcttgagaccttgggagtttgaggatgagactgagagaaagatagagactgggagagaaactgagactgagagaaacagcaaaaaagacaaagggatatatctacatggaga

SEQ ID NO: 4334 - DNA, 120 bp, synthetic construct
  source 1..120: mol_type = other DNA
tgattttttgccccaagcaactggaaggatggaagtgctgaaacagcctcattgtctggagtatcacccaaggtttgtggtctcacagccacagagaacaaggacgcagacacacaaaga

SEQ ID NO: 4335 - DNA, 120 bp, synthetic construct
  source 1..120: mol_type = other DNA
aataatttttttctacctcttgtatcagtgccatcaaccaagttaggggacagtcagtgttggctcagaaggacagggatcttaggctttactgccagtgcctagaacagagccacttac

SEQ ID NO: 4336 - DNA, 120 bp, synthetic construct
  source 1..120: mol_type = other DNA
tgagcaacctgccctccctgctggggtgactcctgtgctgtcccatgctccgggcatccatacacttggcctctttcatctctacctctgttgcccacacccttgtctaacatatacatg

SEQ ID NO: 4337 - DNA, 120 bp, synthetic construct
  source 1..120: mol_type = other DNA
ggcggggccacggcgctgggcggggcagggcctgagggacctggggaagtagggtctgagaagggggcggggcaggagaaggagccggacaggaaccccagccagtgagaacacgatggg

SEQ ID NO: 4338 - DNA, 120 bp, synthetic construct
  source 1..120: mol_type = other DNA
ggcagagccggtcagtgtgatgccactttggttgtgctctccactttgaggcactgctcctctcactactgatctaggccccaggatgcagatacaacaattgttttgttttgtcttgtt

SEQ ID NO: 4339 - DNA, 120 bp, synthetic construct
  source 1..120: mol_type = other DNA
aggatggagagaaaagtgcaggaaggggaagtataaactcagtcctggtgttaataaggactgaattatcatagactgaatctcatattggggatagagtcagagaggacaagaatagat

SEQ ID NO: 4340 - DNA, 120 bp, synthetic construct
  source 1..120: mol_type = other DNA
tgtacgccactcccactggctttcatctccacacaggggtctcaaacaatgactcttaagttgattctgggccacagatgtgcttggttagatctctgaaatgttttttttttttttttt

SEQ ID NO: 4341 - DNA, 120 bp, synthetic construct
  source 1..120: mol_type = other DNA
taaaatttcatcttgattcctgtgtctctcactggtcgtttcagtctgccttctgacctcttacctcactactccagtatctccttccttacattgctgataccttatcccaactcatgt

SEQ ID NO: 4342 - DNA, 120 bp, synthetic construct
  source 1..120: mol_type = other DNA
agcatttctaagtctctgaccatacaccttggggttctcaggatcctgactccctgaaaaggtcaacttttgaccttttagtcctcatttcccaagaccctaaccccagagcttctagat

SEQ ID NO: 4343 - DNA, 120 bp, synthetic construct
  source 1..120: mol_type = other DNA
ccttcatttcagagctacgggagcatccaagggagcactttccattagggtttccaggatgcaatctccacaggagcctccaatatctgtcccttttctcttgttatcattggttctgtg

SEQ ID NO: 4344 - DNA, 120 bp, synthetic construct
  source 1..120: mol_type = other DNA
tgatccagtcctttcccaatcaccccaagctctccgaatgtccattcagtggtgtttatgtttatttcataattgtaacagatgctcagtgacttctcaaatgaccttcttattggtctc

SEQ ID NO: 4345 - DNA, 120 bp, synthetic construct
  source 1..120: mol_type = other DNA
ttttaatatttacaaatttagacaattttttaaaaggagtgagagaggtggggagctgccctagaagctgggaacctcgttgtttaacagatggagaaactgagcacagagaggcaaagg

SEQ ID NO: 4346 - DNA, 120 bp, synthetic construct
  source 1..120: mol_type = other DNA
tttgttcctccgtgaggaaaaggggataacaccctgatatctgatagcattgttcattgttgtgaaggtaagatgaatggatataggcaagatgcttagtccagtcctgattaaacagta

SEQ ID NO: 4347 - DNA, 120 bp, synthetic construct
  source 1..120: mol_type = other DNA
agatgtgagccactacggctggccctggataattccttaattctgagaatgctaagccctcacccatctgagtgtcaaccctggagtcaaggcgagggatggggagcagggctgctggat

SEQ ID NO: 4348 - DNA, 120 bp, synthetic construct
  source 1..120: mol_type = other DNA
gcagaaagagagagaaagaaaaggtggggatggaaagagagagagatgcagaaagagacagggagacaggagaaagtggcagacaggaaaagacagacatagttagttatacagacaagg

SEQ ID NO: 4349 - DNA, 120 bp, synthetic construct
  source 1..120: mol_type = other DNA
tggtaagaggtgagaatctggaggtcgttggagtcgtctaagtaagggatcctgaaattataggtgagcagttacacgtcctgagttcagaggtcaaggactccagacccaggagtttgg

SEQ ID NO: 4350 - DNA, 120 bp, synthetic construct
  source 1..120: mol_type = other DNA
cattgatgtcaaagcccttgctagggtcccaggatcctagggtcagaagccagggatctcaaaacttattctaaaatttcatagaactgcaacattatatcaaaggtcagaaacgccgaa

SEQ ID NO: 4351 - DNA, 120 bp, synthetic construct
  source 1..120: mol_type = other DNA
cccttcattctaatcaaccctgatcttgacccttaaccccagaccataactctgaccagttcactgagctggctttttccttctgtgtctctgccagtatccctgttttctgagaattct

SEQ ID NO: 4352 - DNA, 120 bp, synthetic construct
  source 1..120: mol_type = other DNA
cagccaactgtccatccatccatccaataaccatctgcccatccaacaaccatttatacaaccatccttcccttcttccctctatctgtcatccatttatttatgcttgcccctacttac

SEQ ID NO: 4353 - DNA, 120 bp, synthetic construct
  source 1..120: mol_type = other DNA
tggtctgcataatgctagccatggcaacagcagagaacccaggcagaagggatgagacacagagattagtggggagaaaaattcctgtgatcatggatgcaaatgtgaggaaagatggag

SEQ ID NO: 4354 - DNA, 120 bp, synthetic construct
  source 1..120: mol_type = other DNA
agatgtggtggcacatgcctgtaattccagctacttagggggctgaggcaggagactcgcttgaacacgggagatggaggttgcagtgagccaagattgcgcccttgcactccagcctgg

SEQ ID NO: 4355 - DNA, 120 bp, synthetic construct
  source 1..120: mol_type = other DNA
gggattccattcacagaaagttcaagaacaggcagagcggatctgtggtgtgctcagttgggaaattggttactatgaaagaataactcagagacattgttagttactttgaatgcaaat

SEQ ID NO: 4356 - DNA, 120 bp, synthetic construct
  source 1..120: mol_type = other DNA
aaaaaaaaaaaaaagattctgagaacaaagaatcttgtatgcacagttttagggcaaattcattggctggcaaggagtacctaggttcatcttggcaactggtccttggagaggtcaacg

SEQ ID NO: 4357 - DNA, 120 bp, synthetic construct
  source 1..120: mol_type = other DNA
tcaaaaaaaaaaaaaaaagcattgaagttgagctgcctggttactggttacagaatgacagagtagattgttagatggatgtagggaggttttggaagttaccccaagtgattccagtgt

SEQ ID NO: 4358 - DNA, 120 bp, synthetic construct
  source 1..120: mol_type = other DNA
accgagagattctatcatgtctccaatgaaccccattattttcctgggatgccctaatgtccccaagaatatataattgggtaccctagtatctatatggagaactctattatccttgag

SEQ ID NO: 4359 - DNA, 120 bp, synthetic construct
  source 1..120: mol_type = other DNA
cttgcagtgtacaaaacagtgccgcacaatgaagaattgtccttttccaagtgcatttagcacctatacgagaaatgcatgtgggaaatgctgacttagggggacccccatataacccag

SEQ ID NO: 4360 - DNA, 120 bp, synthetic construct
  source 1..120: mol_type = other DNA
ctggggatccccaaagccatgatataagccaatatagactagggaccccaacatttgggctcactcatataaacacaataccctcaatgtaatacctactctaatatattactgggaaca

SEQ ID NO: 4361 - DNA, 120 bp, synthetic construct
  source 1..120: mol_type = other DNA
tttcaccactctatgccttctctcctatggaggtgctatggttttccatcagtagaatgggggtaaaaattatacctacctgatatggaggatgaagtgagttaatctgtgtagacctta

SEQ ID NO: 4362 - DNA, 120 bp, synthetic construct
  source 1..120: mol_type = other DNA
ccctggtatttttcttctcctcctcctcctctttatgcatttctcctattccattttctccttttccttctcatcctgtttcatctcacccttctccttctctgtcatctcattctctct

SEQ ID NO: 4363 - DNA, 120 bp, synthetic construct
  source 1..120: mol_type = other DNA
ttgaaggagctatgtagataacaccctgtacccaccacctggaatctactatcaatgttgtagatattggctttatcacatattcacctacctgtccattaatctaaggtgggtttgtac

SEQ ID NO: 4364 - DNA, 120 bp, synthetic construct
  source 1..120: mol_type = other DNA
cctggctaaagctttatgttaaatggagaattaaaaacgtatacaagaatggaatagtataatgaactgccatgcccctgtcacacagcttcaactgtcacccactcacagccaatcttg

SEQ ID NO: 4365 - DNA, 120 bp, synthetic construct
  source 1..120: mol_type = other DNA
agtgctgggattacagtgtgaggcagcatgctcaaccttatttatttaattatttattttaatttattaagacagagtcttgctctgtcacccaggctggtgcgcagtggtgccaaccgt

SEQ ID NO: 4366 - DNA, 120 bp, synthetic construct
  source 1..120: mol_type = other DNA
taaataaacaaaattaaataaacccagagtctcagaccccttcccatgcctgccaaatcagaatctgtattttgacaggatcccaggggcttcctgtgtatattaaatctggagagggct

SEQ ID NO: 4367 - DNA, 120 bp, synthetic construct
  source 1..120: mol_type = other DNA
tctctgggttttgaatgagtatgcttgggagagaaatgcgaagggcattcccagtgcggggtgtgatgtgtgcagagacagatgacaggttgctctgggaaagttggaggaggttggcct

SEQ ID NO: 4368 - DNA, 120 bp, synthetic construct
  source 1..120: mol_type = other DNA
atgcagggaggctttaagaagaatcccgtggatatttcaaacccaccccaggggacccagacacacctagggccacagatgcgttcacatggatggcagggttactcttaagaactctga

SEQ ID NO: 4369 - DNA, 120 bp, synthetic construct
  source 1..120: mol_type = other DNA
aaatgctaagcactttactatgtgctaggtgtggttttaggtgctgggaatataacaaacaaaagcagaaacaaaacaggcagaaatgtcctgcccttggaatttacattctaatggcac

SEQ ID NO: 4370 - DNA, 120 bp, synthetic construct
  source 1..120: mol_type = other DNA
ttcttctcccacattcccaaaactccagagatacatgcatcaatcctcctctatttatgcatccaaccacccattcattccctcctctatacatccatccacctttctttttattattat

SEQ ID NO: 4371 - DNA, 120 bp, synthetic construct
  source 1..120: mol_type = other DNA
catcttttcattcattcatacagcagtccatctaccattccatctgttcatctatccacctacccatttatgtattaatctatctttccttccgtaggtccaataatcatctcctcccac

SEQ ID NO: 4372 - DNA, 120 bp, synthetic construct
  source 1..120: mol_type = other DNA
aacttttcatacacaaacctatccagccatgtggccaaccatccccccaccctcatggctattcactaatttatctatttatccacatattcatttacttcctcatgcatctatcaaccc

SEQ ID NO: 4373 - DNA, 120 bp, synthetic construct
  source 1..120: mol_type = other DNA
cacagtgaagaaccgagactttgtcctgtaggtgatgggcatctttggcgatgaggatgtgaaacagatcttgaagatgattgagcctgaggtcttcactgaggaagaagaggaggagga

SEQ ID NO: 4374 - DNA, 120 bp, synthetic construct
  source 1..120: mol_type = other DNA
tgacccctgacgctggccacttttactgtctaaaccccaacctcaacatctcctgactctgatcactgaggaccctcaacctctaaacccgtgcttgacccctgaccctagtgatacatt

SEQ ID NO: 4375 - DNA, 120 bp, synthetic construct
  source 1..120: mol_type = other DNA
acagttagacaatgcgtgtttatatgggtatttgggtggatggctataagccagataaatgaatgggtatgtgaattgatggatagaagaagtgggtaaaaaatggctggctggatagat

SEQ ID NO: 4376 - DNA, 120 bp, synthetic construct
  source 1..120: mol_type = other DNA
tttaattcttcagacatggtttcctttagttctttgaacatatttgcaaaattgatttaaaagataaatgtttgatagaatgaataaatgaacaaatacatgaacatacaaagaaataaa

SEQ ID NO: 4377 - DNA, 120 bp, synthetic construct
  source 1..120: mol_type = other DNA
atgagaggattaccatgctgagggattagacaagcagctatcattaatgttgggccaatgtgttattttgcaaactgtatattagccacatctaacaaggacagatttcctgacgttggt

SEQ ID NO: 4378 - DNA, 120 bp, synthetic construct
  source 1..120: mol_type = other DNA
ctggtatcttgcagttgtacagtttattattcctattgaaatttttaggaagcccttgtgggctggatattagggtgaacagaacagagagattcttgggcgaatagaaaaaagtttgcc

SEQ ID NO: 4379 - DNA, 120 bp, synthetic construct
  source 1..120: mol_type = other DNA
ggagagccaagcctactctgaagggttgtgctgtggcttcagtgagctcatgcgaataataataattatggtagcagtattgagcactcattgtcaaataaatctcattcacacagtaaa

SEQ ID NO: 4380 - DNA, 120 bp, synthetic construct
  source 1..120: mol_type = other DNA
aacatggcaaagatctctgccctagaggagcctgccttgggtgcacgcctcagtctccttatgagggaaacagggacccttcctcccacagtggctgtaggaattttttttttttatttt

SEQ ID NO: 4381 - DNA, 120 bp, synthetic construct
  source 1..120: mol_type = other DNA
tttccaccagctcactcattcaacaaacactccctctcaactgtggttctggccctgtaatgagtaatgctggggacacaatagtgaccccaatagtgacagcccagagtggtcagagct

SEQ ID NO: 4382 - DNA, 120 bp, synthetic construct
  source 1..120: mol_type = other DNA
gttagctgctgttatattatcattcaacaaatatgtagtgttagcttaccatatgcaaagcagtagcaatatgacagtcaaaaatccctgtctggccaggcaaagtggcttacatctata

SEQ ID NO: 4383 - DNA, 120 bp, synthetic construct
  source 1..120: mol_type = other DNA
atggagttgctgtagtttacaggcctctgacaggaccagggctaatgggccgagggatcagagctgaaccggactgaggagccgcagggcagggcagggcagggcagagggctgagcccc

SEQ ID NO: 4384 - DNA, 120 bp, synthetic construct
  source 1..120: mol_type = other DNA
tgcagctttggtgaggaaccgcctgaagaaaaccgggtgcacctgggacacgccatcatgtccttctatgccgccttgatcgacctgctcggacgctgtgcaccagagatgcatgtgaga

SEQ ID NO: 4385 - DNA, 120 bp, synthetic construct
  source 1..120: mol_type = other DNA
agcagcagcagctgcttttgtttttcttgggattgtggacatatcataatccccaataccatcatcaagatagaaaatgaaaacgaagaaacactgaattccgatgaagggtgagtagga

SEQ ID NO: 4386 - DNA, 120 bp, synthetic construct
  source 1..120: mol_type = other DNA
agaatgtattacaggaagaaagatgagggttagagaggagataagcgtgcagaccattgatatttacagaagagccaaatctgtaatggggttcattaatctcatcgaccagttgtgtgt

SEQ ID NO: 4387 - DNA, 120 bp, synthetic construct
  source 1..120: mol_type = other DNA
cagcgtccccgtagaaatctcttagcatccttatttgcatactaggattcccagaacattcactttgcttcattgatgcctctagcgttccctaattagcatttaatttgcttaacagtg

SEQ ID NO: 4388 - DNA, 120 bp, synthetic construct
  source 1..120: mol_type = other DNA
aagcacagattgctgcatccatatgcccatttactcactacatacccatggattaatattagcacgcttatttgtgtaaagcaataccagacacaaccagctctagtttaatgcccattt

SEQ ID NO: 4389 - DNA, 120 bp, synthetic construct
  source 1..120: mol_type = other DNA
tgatttgagcatacaattgggactgacatttgggtttcaaggagagggaccataattcaggtttggggttcagggaggagggctgatgattgcagtgtgtgagtttgaggtcctgggggt

SEQ ID NO: 4390 - DNA, 120 bp, synthetic construct
  source 1..120: mol_type = other DNA
agagtgggtttgattccttggctgtagtaagacttctcggagactcaagtgtctaatgggataaggagattgggtttgggaggctctgttacagagcaggtaagagacttgagttggaat

SEQ ID NO: 4391 - DNA, 120 bp, synthetic construct
  source 1..120: mol_type = other DNA
tgaaactcggtttctccatctgtagatgggaataataacagcgtttaccaccatggggtaatgagatgagcaccagcaagcaatgtttccgttattcgtatcttctttatcaccataatt

SEQ ID NO: 4392 - DNA, 120 bp, synthetic construct
  source 1..120: mol_type = other DNA
gtacagcagtgaagatgacaaatgacccctgctctcctgcaactactcctatgttggattcaggcaattagcatcataaataactaaatcgtttagtgttagaaggtgatcagtgttatg

SEQ ID NO: 4393 - DNA, 120 bp, synthetic construct
  source 1..120: mol_type = other DNA
agaactgggcagatttctggatctattttgaaggctgaggctgctggggtgccccccagtgcctcttacaggccactaagaattacagctaggccctacaatcccctccagtttccctta

SEQ ID NO: 4394 - DNA, 120 bp, synthetic construct
  source 1..120: mol_type = other DNA
catttattgcagattaactcagtgccatgtattcaagtttagaatgaaaagcacttatggtgggtgaggaagggcatgttccatgaccttaacccattccagtttgttttccccattgtc

SEQ ID NO: 4395 - DNA, 120 bp, synthetic construct
  source 1..120: mol_type = other DNA
atcctgctccctttgatcaaccagtacttcaccaaccactgcctctatttcttgtccactccggctaaagtgctgggcagcggtggccacgcctctaacaaggagaaggaaatgatcacc

SEQ ID NO: 4396 - DNA, 120 bp, synthetic construct
  source 1..120: mol_type = other DNA
agtctctctctttggtaagtggctccacaccttcggtcttcctccctaatctttctcttccccaccctgaagaaatagctcccaggttctgccttaatttgaacaacctttgttgttttc

SEQ ID NO: 4397 - DNA, 120 bp, synthetic construct
  source 1..120: mol_type = other DNA
tgggtgtttgaatgtgtggatttcttgctgtaagcaaagcatgcagtcagtaccttggcaggtggcaaatgagttaatgaggacgcgagctcagcagctctaacaaaagaccctaagtgg

SEQ ID NO: 4398 - DNA, 120 bp, synthetic construct
  source 1..120: mol_type = other DNA
ggtaacctcatcccttaatgttcatcagctggctttcctagaataggaaccttctcttgtgtaaccacggtatcattatcatacctaacctaaccatatttaaatttccctcattaccca

SEQ ID NO: 4399 - DNA, 120 bp, synthetic construct
  source 1..120: mol_type = other DNA
aaaaagatagcctaaaattgcagcaatattgcagttctgtttgcatttttctggaggaagtacccctcactttcattatagagggccatgagtcctctccacggaagaaacaacatctag

SEQ ID NO: 4400 - DNA, 120 bp, synthetic construct
  source 1..120: mol_type = other DNA
tgtcttaaaaaacaaaacaagtggcacacatggatgaatggcagctctgtcccaaagggttctgggaggagccgtttctatggagatggggctgggacccaggaccccaaagagggggac

SEQ ID NO: 4401 - DNA, 120 bp, synthetic construct
  source 1..120: mol_type = other DNA
tagcaaaaccccatccatggaatttggagctatggaatttattttagtgatggtgacatttgagggcatcatcaagcttggagacatagggtgaggggtatttgagcataagaggattga

SEQ ID NO: 4402 - DNA, 120 bp, synthetic construct
  source 1..120: mol_type = other DNA
gctcccttggcagatggtctgaaagggagacccatggtcccctcggagttgggaggagtcagagtgtaggttttttcagcatcaaaagaccaggggtcagctgggcaccgtggctcacag

SEQ ID NO: 4403 - DNA, 120 bp, synthetic construct
  source 1..120: mol_type = other DNA
tcaaaaaaaaaaaaaaagttaggtaacaggtgaggcgtctgttgttgggggtcagaggtcagggatttgtgccaggctggggtcacaggatagggactgggtcttaggttcaggttaggg

SEQ ID NO: 4404 - DNA, 120 bp, synthetic construct
  source 1..120: mol_type = other DNA
agctgtgagccaatgcagctggccagtgtgattttttttaaatcattctcctaatgctggacatttagattgtgtcgatttctttgtcactatgcacaacaccgtaaggaatagtttgct

SEQ ID NO: 4405 - DNA, 120 bp, synthetic construct
  source 1..120: mol_type = other DNA
aaattgtggtttattcatacaacagaagactccacggcagtgggagtgaacaagttgtttctatgcacaatgtgattggctttcacaaatgttaggtggaatgaaagaagccagaaaacc

SEQ ID NO: 4406 - DNA, 120 bp, synthetic construct
  source 1..120: mol_type = other DNA
tgaaagaaaaaattttaaaaagtttttagcctagaagttagaatatggatgatttttcaggaggaggaagggggagtggctgggaggggccatgatagtacttccagggaccagaaatgt

SEQ ID NO: 4407 - DNA, 120 bp, synthetic construct
  source 1..120: mol_type = other DNA
acagagaaaaaaaatttttttaatgttcatctgcatggccagatgaccctagaaaccccatccctctgactggatgtctcctggtccccatctcctcctccaagatctctctctgggcag

SEQ ID NO: 4408 - DNA, 120 bp, synthetic construct
  source 1..120: mol_type = other DNA
cctctccattttcctcttctccaagcctctctctcctcccatttccctcctcctcctcctccccattttccccctcttccatttctttcttcctctccccattaccccatttcctgcttt

SEQ ID NO: 4409 - DNA, 120 bp, synthetic construct
  source 1..120: mol_type = other DNA
tgtctccttgtctttttcagtctctcagtgtctttttcttgcaacttctcttgtcgcttgaactctttgtggacctgcatctttgtttcattcttgagaacttggttttgggatgtgaag

SEQ ID NO: 4410 - DNA, 120 bp, synthetic construct
  source 1..120: mol_type = other DNA
cataactccccaggatccatgaaccccaagcccgggactgtacccaaacctctgaggtctcaactgtcctggagaccaaaatacccgggctgtagaacctcttaagcttgctgggatatc

SEQ ID NO: 4411 - DNA, 120 bp, synthetic construct
  source 1..120: mol_type = other DNA
aaccttcaccttcagggaaaggtatgcctccttcctctgcaagcaaaagaagcaagtcagaaagtaaccacaatattagtgaaggtttgagcatttaccaaagaccaggcattgaagaaa

SEQ ID NO: 4412 - DNA, 120 bp, synthetic construct
  source 1..120: mol_type = other DNA
aggatggaaacttaggtctggaggcggagtcaggaccctgactctgttggtggagacaaggttttccttctgccgtgtgagtcttaacctgaatatggacttcgacacagctgggcagtt

SEQ ID NO: 4413 - DNA, 120 bp, synthetic construct
  source 1..120: mol_type = other DNA
ccacatcaaggggtatagaaatgccagctcctggcttgagtagaaccaaagtagggcgcaggatgtgggaaaagagaaaaaaaaatccagaccaacagggacatgggggcagtgacagga

SEQ ID NO: 4414 - DNA, 120 bp, synthetic construct
  source 1..120: mol_type = other DNA
agcggggatatctatatcctctcacttaaccgccacactgtgagacggattattgcatctcctttgtgtggataagggaatgaaggcacagggatttatttttcattttgtttatttatt

SEQ ID NO: 4415 - DNA, 120 bp, synthetic construct
  source 1..120: mol_type = other DNA
agccttctttggtctctttatctctctggtgagcttccacacagatctcattggccagaaattctgacataaggccatctcgggctgcaaggtgatgaagaatttgagcatcccattttg

SEQ ID NO: 4416 - DNA, 120 bp, synthetic construct
  source 1..120: mol_type = other DNA
gaacaaaataaacaaacaaaacaactcccagaatggattttactggacagcatggacaacatgaccatttcttacctgtcatcatggccacacagataaaagtcctcatcggccatgcat

SEQ ID NO: 4417 - DNA, 120 bp, synthetic construct
  source 1..120: mol_type = other DNA
tgagcagaaggataaaaggagcctgccagttgaagaaaaagagaaaaatgttctacgtagggagaatagtatatgccaaggccaggcagcaagaaagagctagtaaacatgcaattcacc

SEQ ID NO: 4418 - DNA, 120 bp, synthetic construct
  source 1..120: mol_type = other DNA
atctagcagtagatccaacagctactataattgagaagtagtgatgaacataactgatatttaaagacatctttgagccattgtgagtgagtctctcttcctggaccaaaagagcagaat

SEQ ID NO: 4419 - DNA, 120 bp, synthetic construct
  source 1..120: mol_type = other DNA
tccccttgtatacctgccttgcaatttctcactcatccttcaatcacgatcacccctgcatgcacaccttggcacactcttaaatccccttctctcacatcccttgggatggctgttttc

SEQ ID NO: 4420 - DNA, 120 bp, synthetic construct
  source 1..120: mol_type = other DNA
acaataagggaggcaaaatgtcatagacttgaagaatgagttgcattatgaattccagacagtggaaccaaaaacttgagaatttaaggggaacttggcagtgggagatttaggagctct

SEQ ID NO: 4421 - DNA, 120 bp, synthetic construct
  source 1..120: mol_type = other DNA
atcagccactgagaatacatgggcctgtgaacaagtctcttaccttccctaagcttcactttccccatgtgtgaagcagaagctagagaacatggtaaagatctctttccagctggatat

SEQ ID NO: 4422 - DNA, 120 bp, synthetic construct
  source 1..120: mol_type = other DNA
tgtcccctcccttccacctaggagagaaggtcatggcggatgatgaattcacacaagacctgttccgattcctacaattgctctgtgaggggcacaataatggtgaggaggaggggtgtg

SEQ ID NO: 4423 - DNA, 120 bp, synthetic construct
  source 1..120: mol_type = other DNA
tacccaatgccatttcctataacaaacatgtacagtctcaagattgtggttataacctttagcaggtgattaggaaaccacagactacccggaaatcaactttcgtgacaagaattggag

SEQ ID NO: 4424 - DNA, 120 bp, synthetic construct
  source 1..120: mol_type = other DNA
gcatgtcttgaggagtcagtgctattcaaagcagacaaaaggtttgtctctcacttatttgcacatgtctataacaggtgttgtcagttgccagaattttttttacaggagctgtgtatc

SEQ ID NO: 4425 - DNA, 120 bp, synthetic construct
  source 1..120: mol_type = other DNA
taataaacccccaactacccatcactcagctttaacagtttgctttcacagaacaatgttttttaaatagtgggaaccaacccatcagacagacgttcatgaatcagtttcacgcagagg

SEQ ID NO: 4426 - DNA, 120 bp, synthetic construct
  source 1..120: mol_type = other DNA
cccaaggccggggactgttttttttttttttactactgtatccccagagcctagaatactgcatgacacatagtaagaacgcaacaaatttgttgtagcaaagaggatgtgacaatctta

SEQ ID NO: 4427 - DNA, 120 bp, synthetic construct
  source 1..120: mol_type = other DNA
ttacaggcgtgagccacccggccagtatttttagacaaatgaataaatgatcatccatctttctctgtcacatagtaagtacttgatagttattaaataaattgatgatgatatgctttc

SEQ ID NO: 4428 - DNA, 120 bp, synthetic construct
  source 1..120: mol_type = other DNA
agcgacttctactggtactactcgggcaaggatgtcattgaagagcagggcaagaggaacttctccaaagccatgtcggtggctaagcaggtgttcaacagcctcactgagtacatccag

SEQ ID NO: 4429 - DNA, 120 bp, synthetic construct
  source 1..120: mol_type = other DNA
gggctaattcatccgccaccatctagtctaggttgcaaaagctagaaatccagtgcaaagtggtggcttaagaaaaataaagaatttatcagttcatattacagatccagggcttagagt

SEQ ID NO: 4430 - DNA, 120 bp, synthetic construct
  source 1..120: mol_type = other DNA
aagaaagaaattaccactttgtgagccaaaagtgatcacatgttggcaattttatgtgactcaacctaacataaataggggccatgaggcaaaactttgtattggaggtttctatgggcc

SEQ ID NO: 4431 - DNA, 120 bp, synthetic construct
  source 1..120: mol_type = other DNA
ggaacagtaaagaggttcagagaagcctgagaatggccccctgagacccgggagaccctaatcctcaaccccatctgacatcgtgtcaggatccatgggttgatgaagaagccataatag

SEQ ID NO: 4432 - DNA, 120 bp, synthetic construct
  source 1..120: mol_type = other DNA
ctctgagttcaaatccattctccccactttactggctatgtaactttgagtgcatgactttctctatgtctcagtttctcttcctaaaagtagagtcacacacttccctttttgtgtgat

SEQ ID NO: 4433 - DNA, 120 bp, synthetic construct
  source 1..120: mol_type = other DNA
cataacattatcattattgtgaataggcatcagttattccatcaataaacattggctggctttcttctctgtgtagggcctgtagtgacactattgacgcatcaatgaccaagatagaca

SEQ ID NO: 4434 - DNA, 120 bp, synthetic construct
  source 1..120: mol_type = other DNA
acctcgcctagccaatttccctttactttgaaacacttcagcgtgtatctcctgagaacaaattcattctcctacctaagcacaggacaattatgctaatcaggaaattaacattggcac

SEQ ID NO: 4435 - DNA, 120 bp, synthetic construct
  source 1..120: mol_type = other DNA
ttactgttgttaacttggatggcttggttaactcggtgttcaccaggggctccacaatgaagttactgttattccctttggaatcaataagtgtctcatgaggatatactttgaggctat

SEQ ID NO: 4436 - DNA, 120 bp, synthetic construct
  source 1..120: mol_type = other DNA
cctccaccttcatgaagagctcatagttaccatattctcactctgtgccctgcgtataaatgaatttgctcatttagtccttacagcaaccctacatggtaaaacatttttgttttgttt

SEQ ID NO: 4437 - DNA, 120 bp, synthetic construct
  source 1..120: mol_type = other DNA
agaagcaaaaagcatttgcaggagctaaagtacacatgattcacaattgaaaatgagtaatgatctctcctgactggggctgcacagatcacagggtttaatgtcacctacctgacattt

SEQ ID NO: 4438 - DNA, 120 bp, synthetic construct
  source 1..120: mol_type = other DNA
gtctcaaaaaaacatttatcaaaatacagcaaggcgtgaagtgagaagtcttactcctgctcttttccaatccactcttccccacatctaccatggtaaagccctttcgttagtttcttt

SEQ ID NO: 4439 - DNA, 120 bp, synthetic construct
  source 1..120: mol_type = other DNA
tcccaagttcttcatggttgccagagttcttgacagtttacaaatcacatcttcattgatgaagtactttgtagatttcaaaacatctactatagcttggaaggccctttctggtgtttg

SEQ ID NO: 4440 - DNA, 120 bp, synthetic construct
  source 1..120: mol_type = other DNA
aacaagggccacccattgcaattggctgatactttttaaaatcatctttcatctcttgcttcccctctattatcttttctttttccttgcaatttatctcctggagatccagtcctgcag

SEQ ID NO: 4441 - DNA, 120 bp, synthetic construct
  source 1..120: mol_type = other DNA
gcctggccataatcaatctaaaaaatgattagctcgacatttttcattcttttttcacactaagtctatcagtggatagtgctgtcctagttgtagagcttcccatagtctggacctgac

SEQ ID NO: 4442 - DNA, 120 bp, synthetic construct
  source 1..120: mol_type = other DNA
acagcgaagctgagagttgaaagataccatatgactcagcgaggctgtggtgtcccaggcaaaggggacagtaaatggaaaggctgaaaaatgggaacaagagggacagagagcagcctg

SEQ ID NO: 4443 - DNA, 120 bp, synthetic construct
  source 1..120: mol_type = other DNA
gtgacagagcaagactctgtctcaaaaaataaaaataattttttaaaaaaatagtccaggtgtggtggctcacacctgtaatcctagcactttgggaggcccaggcaggcagatcacctg

SEQ ID NO: 4444 - DNA, 120 bp, synthetic construct
  source 1..120: mol_type = other DNA
ttcataccccagagcaacatttctcacactgcatgttgctacccgtctggaggtaatgaaattaatttagcaatgcgtaactcgtgaccagcatctttagaaataaaatagaacactgca

SEQ ID NO: 4445 - DNA, 120 bp, synthetic construct
  source 1..120: mol_type = other DNA
aaaaaaaagagagagaattgaggctctccaggtcaccccactgacctccctgcccgcccccaggccatggacagccagaagcagttcagcggtccagaaatccagttcctgctttcgtgc

SEQ ID NO: 4446 - DNA, 120 bp, synthetic construct
  source 1..120: mol_type = other DNA
ctgaagtcctagcatatgtgtaccccaacttattctgggcccacacgtgggtgcacacctcttgcacacacaccctgaggatgccaatgagccctctcagaaccctggcatgcttcattt

SEQ ID NO: 4447 - DNA, 120 bp, synthetic construct
  source 1..120: mol_type = other DNA
ccactcattctttgcacgtgctgggggagctctgccctcctctcttcctctgaccctgcgtgctccccatacaaacactctttgccttagtgctattcctccaaacacccgcttccttct

SEQ ID NO: 4448 - DNA, 120 bp, synthetic construct
  source 1..120: mol_type = other DNA
tgagttttatggaaactgcttgtatggggcctggccttattgaagcatttacaggagtacccacagtgagtgctctctataaagctctctctataggtttgctattgataatcaaaacaa

SEQ ID NO: 4449 - DNA, 120 bp, synthetic construct
  source 1..120: mol_type = other DNA
cctcgcttcaggtgaaggagtccaagcgccagttcatcttcgacgtggtgaacgagggcggcgaggctgagaagatggagctcttcgtgagtttctgcgaggacaccatcttcgagatgc

SEQ ID NO: 4450 - DNA, 120 bp, synthetic construct
  source 1..120: mol_type = other DNA
cggacagagtgcagggccggacagagtgcagggcccggagaggtagagaaaatgatacctgcagagccagagagagtaagaaacccagagaccaaattagagggcaggaaagaccaaaac

SEQ ID NO: 4451 - DNA, 120 bp, synthetic construct
  source 1..120: mol_type = other DNA
tgagcctcagtttcccctctgtaaaacgggaatcataatctgcctctttctggtggagggaagtgtaaaacttagattacccaggggaaataagagagaaaggagatgagaggagcaggc

SEQ ID NO: 4452 - DNA, 120 bp, synthetic construct
  source 1..120: mol_type = other DNA
agccccataagggcaagtcctgattatctcatcatcccatgtacccagtaccatccaaacctgggccaggcacagggcgggcccttggtgaatggttttgaatgaatgaactcatgcatt

SEQ ID NO: 4453 - DNA, 120 bp, synthetic construct
  source 1..120: mol_type = other DNA
agggaatcatgtggaacgaaggtggttccgtcagaatttgtgggaagaatgagggatggagggaaaggtggagagaaagagggagagatggaagatgttcctggccgtgcgagggggctc

SEQ ID NO: 4454 - DNA, 120 bp, synthetic construct
  source 1..120: mol_type = other DNA
catctgtaaagtgcgcataacagtagtgcccacttcacaggggtgtactgagaattaaacaagctcatgcaaataaagttcttagcccagatgttggtataagcaagcactcaacaaata

SEQ ID NO: 4455 - DNA, 120 bp, synthetic construct
  source 1..120: mol_type = other DNA
aattaataaataaataggaggttgtaggaaagatattgagagcccaggtactttgattgcaggtaaatgatgggatgaattctccagggaagaggctgatctgtgagcgctttctctctt

SEQ ID NO: 4456 - DNA, 120 bp, synthetic construct
  source 1..120: mol_type = other DNA
tgtttagctgctactaattttcatgttagtgttaatattagtgggcagtctctttagggctccactatcaagatgaaccaactctgtcttcagttctgtgccactcagttcaataggcta

SEQ ID NO: 4457 - DNA, 120 bp, synthetic construct
  source 1..120: mol_type = other DNA
acgacattcagattgggaacggacacggcttatagctgaggaaccaggttctggaccactgtcttgatactttgctattgaactagagttctttgggcttaaaactttcatacatgctat

SEQ ID NO: 4458 - DNA, 120 bp, synthetic construct
  source 1..120: mol_type = other DNA
gacaaaaaaaaaaaaacctagggtttcagtccctgcaggccctgcctcattctccccaagtcttactctttctttccataaaagaggcacatttcccatgcattacagcatctgtgtggg

SEQ ID NO: 4459 - DNA, 120 bp, synthetic construct
  source 1..120: mol_type = other DNA
aacaagtaggaattggaagtgcaatgaatcaaagcacttcaaataattgcaaatccgtgaattcataatcaatcatcgctccaccctctcaaaaaacaaaactcgtggctgggcacagtg

SEQ ID NO: 4460 - DNA, 120 bp, synthetic construct
  source 1..120: mol_type = other DNA
aaaaaaaggaaaaagaaaaacagtggagtttcagccaaccctgtcgtggctgacagctctgatccctctggccctaacatcttatactcacgctttctctctctctctctgcaggtcttt

SEQ ID NO: 4461 - DNA, 120 bp, synthetic construct
  source 1..120: mol_type = other DNA
aggcaggagaatcacttgaacccgggcggcagaggctgcagtgagccgagatcgcgccattgcattccagcctgggtgacagagcgagactccgtctcaaaaaaagagagaaatactagt

SEQ ID NO: 4462 - DNA, 120 bp, synthetic construct
  source 1..120: mol_type = other DNA
acctgggatcccgtgttaaacaaaacagtgattctgaccttcaagttggaaagatagatgatgaacccaagtacagtatgtcagtggtgataaatgctgtagaaaaaaacaaagtgggct

SEQ ID NO: 4463 - DNA, 120 bp, synthetic construct
  source 1..120: mol_type = other DNA
caggagaatggcttgaatccaggaggtggaggctgcagtgagccaagatcgcaccactgcactccagcctgggcgacagaatgagaatccatctcaacaacaacaacaacaaaaacacaa

SEQ ID NO: 4464 - DNA, 120 bp, synthetic construct
  source 1..120: mol_type = other DNA
tatatggtgatgtccctcttgggacactacaacaacttcttctttgctgcccatctcctggacatcgccatgggggtcaagacgctgcgcaccatcctgtcctctgtcacccacaatggg

SEQ ID NO: 4465 - DNA, 120 bp, synthetic construct
  source 1..120: mol_type = other DNA
caacaagagcgaggatgaggatgaacctgacatgaagtgtgatgacatgatgacggtgagcccctcccctagcactctgggacccttccttctcgcatctgttgaaggagttaataatgg

SEQ ID NO: 4466 - DNA, 120 bp, synthetic construct
  source 1..120: mol_type = other DNA
tactcaacctcctccctatgccctgggggcctcacctgtaaaatgagtgtgtaatagtagttgcttttaggactaataggtgctccctggctatcgaagacttaaaagacttagaccatt

SEQ ID NO: 4467 - DNA, 120 bp, synthetic construct
  source 1..120: mol_type = other DNA
agtttcacccaaggtatacccagcgttcaatgcacatttatattttctcttctattctaataatggtgatcataacccaaattgatgcgaacttactagagacacaggccacaatccaca

SEQ ID NO: 4468 - DNA, 120 bp, synthetic construct
  source 1..120: mol_type = other DNA
aaaaaaaaaaaacatatgtaaagttgttcccaaatgccaggtagaccatgctccctccccacccccactcagacccttcttgtggctccccagcccactgtagataaagtcgaatcaccc

SEQ ID NO: 4469 - DNA, 120 bp, synthetic construct
  source 1..120: mol_type = other DNA
ctgtctcagtcgttaccatgtcttcagccctgcctatcccggggccttggctggtactcagtgaatgtcgaatgaatgagtgaccagtgtgctcccctccctcagtgttacctgtttcac

SEQ ID NO: 4470 - DNA, 120 bp, synthetic construct
  source 1..120: mol_type = other DNA
taaaggcctaatactatcttcttaggaagcgagattaggggtgagattagggaaatgggggatggagggcaagccctggaggtaggtagctggagaggggggagtctgaaccaggtcaga

SEQ ID NO: 4471 - DNA, 120 bp, synthetic construct
  source 1..120: mol_type = other DNA
ctctactataaatgaaaaataaaataaggtaagggtggttctgacttgtctcctgtggtcctctcaccctcaggtttttcctgatgtatttgataaacaaggatgagacagaacacacgg

SEQ ID NO: 4472 - DNA, 120 bp, synthetic construct
  source 1..120: mol_type = other DNA
tgtctccaccactacaggcctgtggaaggaagagataagtcagttcatttattcattcatatgttcattgattcattaattcacaaagtagttaatagagactgtgccagccccatgctg

SEQ ID NO: 4473 - DNA, 120 bp, synthetic construct
  source 1..120: mol_type = other DNA
aacccacagaataaaaatccatgagaccatgctggtataaagaaagaagaatggagaagacacagctcttctttagagtagaatgccaactaacacacgcagaaggaaacatagaatcag

SEQ ID NO: 4474 - DNA, 120 bp, synthetic construct
  source 1..120: mol_type = other DNA
cctcggcctcccaaagtgctgggattacaggcgtgagccaccgcgcccgaccggtgggatacttcttattacaaagaaaaacagaggctgggtgcggtgacccctgcctataagcccagc

SEQ ID NO: 4475 - DNA, 120 bp, synthetic construct
  source 1..120: mol_type = other DNA
tggccaactggtgaaattgagtaggggtatgaattagaaggttgtgatgtttcagtgttgttttcttgattttgacagctgtgctgtggtttgtaacattatgtccttgctttgattcag

SEQ ID NO: 4476 - DNA, 120 bp, synthetic construct
  source 1..120: mol_type = other DNA
tgggagtgtgagttttaaattatgtcaaaatagttaaaatagttatttttaatagttaaaaatttttaataagataaaaatctaaaataaaaatgcagccagggctgggcacggtggctc

SEQ ID NO: 4477 - DNA, 120 bp, synthetic construct
  source 1..120: mol_type = other DNA
atgcctataatcccagcactttgggaggccgaggcaggtggatcaccgaggtcaggagttcgagaccagcctggccaacatggtgaaatgccatctctactaaaaaatatagtattagcc

SEQ ID NO: 4478 - DNA, 120 bp, synthetic construct
  source 1..120: mol_type = other DNA
ggtagggtctctcagctcctgtagcagctagggaaaaaaagtgtgtgtctcagtgcctggaagatacctccactgtcactacgaacatggctcccttaaagacagcaaggagctgggcac

SEQ ID NO: 4479 - DNA, 120 bp, synthetic construct
  source 1..120: mol_type = other DNA
cctgtaatcctagcactttgtgaggccaaggaaggcagattggctgagctcaggagtttgagactagcctgggcaacatggtgaaaccctgtctctactaaaaatacaaaaaaattagct

SEQ ID NO: 4480 - DNA, 120 bp, synthetic construct
  source 1..120: mol_type = other DNA
ctagcggggtccgggcagagtgacagcgggcagcggggactcgcgggcggggcgagggggtgccccctgaggatgcgggaggagcgggcatcaccaagtgtgtgcaggtgtgcgtgttgg

SEQ ID NO: 4481 - DNA, 120 bp, synthetic construct
  source 1..120: mol_type = other DNA
agtcttgatgtatttgggtactaaacatatgaaaacagcgaatttgcaaaggaacgttgtaaacgactgtctctttctcttttgtgcattaaacggactgggagaaagctttgggaagga

SEQ ID NO: 4482 - DNA, 120 bp, synthetic construct
  source 1..120: mol_type = other DNA
aataaaacatccgtaggttgctgtgctgacgacaaatgaccttgaaggaggtgacacagtggagcagggggatttttttttttttggtatagcattaacatctaaaaggaaaacatgcct

SEQ ID NO: 4483 - DNA, 120 bp, synthetic construct
  source 1..120: mol_type = other DNA
aatgatcattgattcagtggctcccccatctgttggaaacctgcccacttgggtctgtttatctttgagagagattgaaaatatgtttttgtaaactctggatatgctgggacacttatt

SEQ ID NO: 4484 - DNA, 120 bp, synthetic construct
  source 1..120: mol_type = other DNA
aaacgcttagggcactaatttatttgacattcaattgtatttgtactttggcttcagataagtgtttttatcacggctgaattacccaagaaaggactccagcagcactgggtgactgtg

SEQ ID NO: 4485 - DNA, 120 bp, synthetic construct
  source 1..120: mol_type = other DNA
tctctgtccctattcccttagattccttctcaagctctactaccctgactttcctttttgaagctactcttttgactttggggacatggtaccttctgggtaattttttacatttctgat

SEQ ID NO: 4486 - DNA, 120 bp, synthetic construct
  source 1..120: mol_type = other DNA
attttacctttctccgaccatttatcactaataattaataaaatgtatggaactgattgggaaactcaagcaatggtcagagaatgctctgaccctgatgctctgtgggtgagttgggac

SEQ ID NO: 4487 - DNA, 120 bp, synthetic construct
  source 1..120: mol_type = other DNA
atgttaacaataagagaagcttgcagacaggcatttagaaggagctaggagaagaattctctcatgtcagtagccctcttagggactacttaggttcggatccatttagtaactgaactc

SEQ ID NO: 4488 - DNA, 120 bp, synthetic construct
  source 1..120: mol_type = other DNA
gcttacaggaaaaatgatatccttagtcttgagtcaattgggatattgttaaaatgaagccgaacagcacactgaggtgatagccactagaagttgtattctcttcttttccacagcagg

SEQ ID NO: 4489 - DNA, 120 bp, synthetic construct
  source 1..120: mol_type = other DNA
ctgctgttggcaactttatttcttgtaggtgcattgatatgtaattgtctggcaggtctgttctaagcattgcatgtgtattttctcatgaaatccctagaaaatccctcagaggtagct

SEQ ID NO: 4490 - DNA, 120 bp, synthetic construct
  source 1..120: mol_type = other DNA
ggggagtgggctaagggatgaaaatatgttttaaagtgcttgtttttttaaggacaatattttcaagaactgtacttcaggagcatgtcacagttatgagcctgtaggcaagaacagggt

SEQ ID NO: 4491 - DNA, 120 bp, synthetic construct
  source 1..120: mol_type = other DNA
ggacttatatccacgcttgtcctgcctttaaagagcttattctgtctctatgggtgggatagggaataaggaaaacgcaaatattctactacacagtggacataacaatcagaaaaccgt

SEQ ID NO: 4492 - DNA, 120 bp, synthetic construct
  source 1..120: mol_type = other DNA
tcttctcaagcaaattcatctcagccttcctgatgggctgatatctctgtatgtcctttggagtctcctttgaacctgctgtgataccacactggttctttagtgaagaaattaaataaa

SEQ ID NO: 4493 - DNA, 120 bp, synthetic construct
  source 1..120: mol_type = other DNA
aaagctgagcttcagatggtgttggtcatatggaaatcaggaggaaggggaggtttcaggggaaggcagtgggatttattttggatgtatttattttgagatatgttatggactgaatta

SEQ ID NO: 4494 - DNA, 120 bp, synthetic construct
  source 1..120: mol_type = other DNA
gcacctgtgaggactagagactgcatctgtgaagactggagcactgcacctgtgaggactggagcattgcatctgtgagccaaggagcactagggctgagagaggcatggaacaggttcc

SEQ ID NO: 4495 - DNA, 120 bp, synthetic construct
  source 1..120: mol_type = other DNA
agcttgaaaggggaggaagggtaaaagttagggatgcttttcttttctcatgaaagagaccataatctaaggttgtagaggagaagtggtgattgatgttgcaagttcctaagtacaaga

SEQ ID NO: 4496 - DNA, 120 bp, synthetic construct
  source 1..120: mol_type = other DNA
aaagctttcaacaaatgtctgcacttaacaacagagcatatatcttcatctcttttgtgttctgaatgagcacctataacactttctcaaaaggaatcttccttggaggcggggcgtggt

SEQ ID NO: 4497 - DNA, 120 bp, synthetic construct
  source 1..120: mol_type = other DNA
ctctgcataacttagcagtacagcttccaagaagggccctgatattgtggataaatggagtctatttttaaggttagataaatccagcctatttttgtgggcagggaaaaattattgctg

SEQ ID NO: 4498 - DNA, 120 bp, synthetic construct
  source 1..120: mol_type = other DNA
gcaccccctcccaagagttacctgcctttccaaaggttactactctatggacttctagaaaaataaattaattcggcttgtttttccactttgtgcaaatggaatgacaatgcaatatgc

SEQ ID NO: 4499 - DNA, 120 bp, synthetic construct
  source 1..120: mol_type = other DNA
ttgtttatagtttgaggtagagatcagtccctccacctatggatgtccaattgatccaggactagttatttaaaaggctaccttttcatcactgcattgcagtggtacctgggtagtaag

SEQ ID NO: 4500 - DNA, 120 bp, synthetic construct
  source 1..120: mol_type = other DNA
attttttgcttctcagttttcatttcttgttattgcctcattgtacttcccaggatctttgtaaatgctgactagaagacatgatagcagatctttgatcctttccctcagtttcaggga

SEQ ID NO: 4501 - DNA, 120 bp, synthetic construct
  source 1..120: mol_type = other DNA
ttattctttaacagtcagaattcatgtagatttacttatatgttgcactgtctagtgcctttccgttgtcctgcttgccatgctgtcatctgggatcattttgctgctgtctgaagaagt

SEQ ID NO: 4502 - DNA, 120 bp, synthetic construct
  source 1..120: mol_type = other DNA
aaacattaattttattctggtaggtaggtagcatccaggcacatcattgtcatctcattgaggcttatttgtctccatattgcccttcctagtaggtataactcttctgaggtctcatgt

SEQ ID NO: 4503 - DNA, 120 bp, synthetic construct
  source 1..120: mol_type = other DNA
tcatacacttcctccttagtgccaccatccctagcccatgggagccactgttttgttctccatctctgtaattttgtcattttgacaatgtaattgtattagtccgttcttgcactgctg

SEQ ID NO: 4504 - DNA, 120 bp, synthetic construct
  source 1..120: mol_type = other DNA
gtaagttatgtttggttggttgtaagctatgtttagtttttaaagaattgcagtattttccagggtggctgcagttttagattcccatcagcaatgtttgggagatccagtttctccaca

SEQ ID NO: 4505 - DNA, 120 bp, synthetic construct
  source 1..120: mol_type = other DNA
tttgtcttccaatgcgtgaacactgtagcaggtgtttttgatttggcttactgtaacattgtggaagagttcttcctgactaaactcttttctgttaacatcctgcgctttaattattgc

SEQ ID NO: 4506 - DNA, 120 bp, synthetic construct
  source 1..120: mol_type = other DNA
ttaagtggttttgctgactccattttctggcttttggtgtataaaatgaacttccctttactgtttttagatctccccgtactgtggcctttaactgacatttttcttccaacctgctcc

SEQ ID NO: 4507 - DNA, 120 bp, synthetic construct
  source 1..120: mol_type = other DNA
aaaacagggcacagcaagttggacatttatagcttatacagtgagtacagagaggacttttgtattggacttaattattaatgcctgtcatccagatgactgaaagtagttcatgaaaat

SEQ ID NO: 4508 - DNA, 120 bp, synthetic construct
  source 1..120: mol_type = other DNA
agctgggcctacaggtgcatgtccctgggcccagctaatttttaaataagtatatcaaaccatcctccaacagcttaattggaccagttttatgataggatgaataacagaaaacaatta

SEQ ID NO: 4509 - DNA, 120 bp, synthetic construct
  source 1..120: mol_type = other DNA
ggaagtgcgtgctgatgggtccacggtcggccatggcaggcctggaaaaaacactataaactcttactctgtgttggggattccactgggaactggccccctggcccccaggcttcaggt

SEQ ID NO: 4510 - DNA, 120 bp, synthetic construct
  source 1..120: mol_type = other DNA
cattagagattttttctttagtgcaccaaccagcaagggggaagtgaatgccaaaaggagctgtgggaggttttctagaatgtcagttataaagctacttgttgcacacataaaatggat

SEQ ID NO: 4511 - DNA, 120 bp, synthetic construct
  source 1..120: mol_type = other DNA
ctggccatgtgtggctgttgaatacttgaaatttggcccctctgagttgagatgtgctgcaggggtaagatgcataccagatttcaaagacctatcatggcaaaaagaatataaaatatc

SEQ ID NO: 4512 - DNA, 120 bp, synthetic construct
  source 1..120: mol_type = other DNA
aactattgttatattattaaacggtagaggggccatcctgggcaagagttgatttgcaggttaggttgatgagtcaccgattttgaagctggtgtatgtctaggtagaaatactgaacat

SEQ ID NO: 4513 - DNA, 120 bp, synthetic construct
  source 1..120: mol_type = other DNA
gagactatatcccacacctggctcagagggtcctacgcccacggaatcgcgctgattgctagcacagcagtctgagatcaaactgcaaggcggcaacgaggctgggggaggggcgcccgc

SEQ ID NO: 4514 - DNA, 120 bp, synthetic construct
  source 1..120: mol_type = other DNA
aaatgagcaaagcctccaagaaatatgggactatgtgaaaagaccaaatctacgtctgattggtgtacctgaaagtgatgtggagaatggaaccaagttggaaaacactctgcaggatat

SEQ ID NO: 4515 - DNA, 120 bp, synthetic construct
  source 1..120: mol_type = other DNA
ttatgcacccaatacaggagcacccagattcataaagcaagtcctgagtgacctacaaagagacttagactcccacacattaataatgggagactttaacaccccactgtcaacattaga

SEQ ID NO: 4516 - DNA, 120 bp, synthetic construct
  source 1..120: mol_type = other DNA
atctctgaatagaccaataacaggctctgaaattgtggcaataatcaatagtttaccaaccaaaaagagtccaggaccagatggattcacagccgaattctaccagaggtacaaggagga

SEQ ID NO: 4517 - DNA, 120 bp, synthetic construct
  source 1..120: mol_type = other DNA
cttcaaggagaactacaaaccactgctcaaggaaataaaagaggacacaaacaaatggaagaacattccatgctcatgggtaggaagaatcaatatcgtgaaaatggccatactgcccaa

SEQ ID NO: 4518 - DNA, 120 bp, synthetic construct
  source 1..120: mol_type = other DNA
tctcacaccagttagaacggcagtcattaaaaagtcaggaaacaacaggtgctggagaggatgtggagaaataggaacacttttacactgttggtgggactgtaaactagttcaaccatt

SEQ ID NO: 4519 - DNA, 120 bp, synthetic construct
  source 1..120: mol_type = other DNA
tggaaagatggttttattggcttttatcaggaacctcgcccttcccaggagacttacctcatttatatggataggaggcagccattccagcctaaagaaacaaaacctttactcatgaaa

SEQ ID NO: 4520 - DNA, 120 bp, synthetic construct
  source 1..120: mol_type = other DNA
gttaacccacgaagccttggctaagcagatgtgtgtgggctgagtgcttgttagtttctgtgagtttcttctatatgtaacaagtgttaaattggaccctgctagtgttaagattcttta

SEQ ID NO: 4521 - DNA, 120 bp, synthetic construct
  source 1..120: mol_type = other DNA
taaaacaaaaaacatgggagggctaagctccttttttgataaattgcagaatgcctctttattccacagtcatctctcctctctgcttgtgttggtgtatgagcttgtttccagatggtt

SEQ ID NO: 4522 - DNA, 120 bp, synthetic construct
  source 1..120: mol_type = other DNA
ttccttggtgccttcactgttcccagtgtcactggttagggaatagtcctttgcttttggccaggcatttcttgaatgtgctagtccctttttaattctctaaaaggagaattaaattaa

SEQ ID NO: 4523 - DNA, 120 bp, synthetic construct
  source 1..120: mol_type = other DNA
agagtgtaattgggtgcacgtgtgtgtttaatctatttgattagattgctttcctaatatcaagaaccaagagcatttgaggtgaactgccccattacttgatctcagttggaggggcct

SEQ ID NO: 4524 - DNA, 120 bp, synthetic construct
  source 1..120: mol_type = other DNA
cttatgcttttaaatgagatagagctgatactaatggacaagttggtgctatccccggaggaacatgaactgcctgtatttgagtatgtatatgtctgcagctctcggattatagtgtta

SEQ ID NO: 4525 - DNA, 120 bp, synthetic construct
  source 1..120: mol_type = other DNA
gccagatgcaccaagacatgtttcttttctttgcagcccacagagatgtcaataagcagaaaatggcattcgtatatcttgttagaaaccaagtgcatggaagttgaatttatcagtgga

SEQ ID NO: 4526 - DNA, 120 bp, synthetic construct
  source 1..120: mol_type = other DNA
tgcaagggcttggctacctgtgcttttctttcctttttctactttccttgcaagactaaaccatatttacaagttccttcaacaaatgtgtaaatgtgtattggatgcctcctggaagtt

SEQ ID NO: 4527 - DNA, 120 bp, synthetic construct
  source 1..120: mol_type = other DNA
cagttggtgggagtatatagtgaatttttaagtaatctctggtatttcagaagattattcttagatagtctgcagagatgagtttataaggctggtgtggtcggctgaataagggcctgt

SEQ ID NO: 4528 - DNA, 120 bp, synthetic construct
  source 1..120: mol_type = other DNA
actaataaaggaaactaatataggaatataggaaactggcatatactttgggtgtccttggttataaatgactgaatgactgactgtcctccctgaccttcaggtgaagtgtagtctggc

SEQ ID NO: 4529 - DNA, 120 bp, synthetic construct
  source 1..120: mol_type = other DNA
tttgataccagggttcttggctgagaagatgggaatatgcagagaagagcagagagtcaacaggggatgggttaaaaatggagagatgttttgatagccatatgttcattatttctttta

SEQ ID NO: 4530 - DNA, 120 bp, synthetic construct
  source 1..120: mol_type = other DNA
agccaccgtgtctggccaaagatagtcttattattatttcaaaatctaattcaacttgcttccttcacagcatttcttggataaatcccacatagcagaattgccttctccctccacatg

SEQ ID NO: 4531 - DNA, 120 bp, synthetic construct
  source 1..120: mol_type = other DNA
aaattggatcttaatgagcagctagagtattggcaggcgtgggatcccagaggccagagagattaatcgattcttttgcttagtgaagttaacagtgatgcttttcctgtaattgagata

SEQ ID NO: 4532 - DNA, 120 bp, synthetic construct
  source 1..120: mol_type = other DNA
cacccactaggtaatgaaatccttataagcaaaaaccatagtatcgtttctgtttttttgggacgggcagggaggatactgtttctccatgcaatctttgaatgcgaacatgcttaataa

SEQ ID NO: 4533 - DNA, 120 bp, synthetic construct
  source 1..120: mol_type = other DNA
agtgtaacatttcactgggatcgtgtctgaaagcactctgtagctgaaaagtgctatacaaagccaaagggttatttatcataattttagctgacagcagcactgccgacatctctttct

SEQ ID NO: 4534 - DNA, 120 bp, synthetic construct
  source 1..120: mol_type = other DNA
ggtggcggataacaagactggaaactttgagtacacaggaccacactggtttcagttctaattttcctaagtggctttgctgagggaggcaatatacattggtatatattggtatatatt

SEQ ID NO: 4535 - DNA, 120 bp, synthetic construct
  source 1..120: mol_type = other DNA
ttaaataagagagaatgctgctctgtaagtctggcctctgggtctctggtatatttacaaagatttaaacgtaatacctattcctgtttctcaggcatcctcatgacaccatcttccagt

SEQ ID NO: 4536 - DNA, 120 bp, synthetic construct
  source 1..120: mol_type = other DNA
tgtgtgtgtgtgtgtggtgagacactcaagatgtactgtcttagcaaatttcaggggtacaatccagtattattaacatgctgtccattattcacaaaaggcaagatgaagaaacaatct

SEQ ID NO: 4537 - DNA, 120 bp, synthetic construct
  source 1..120: mol_type = other DNA
cattggttgcaagatgaatccaaggggagggcataatgtacaaggaaaaatgataaattaaaaatcctacactgtactaggagattgttccataccacatgccgcatggcagatcaatag

SEQ ID NO: 4538 - DNA, 120 bp, synthetic construct
  source 1..120: mol_type = other DNA
atttaaaggggcagttgctgagcaaatagaagccagggcaagaaaggatttatgtgcttgggattcttgaggggttttccagagtcagtccccaattctgatgtttttatacgcaacact

SEQ ID NO: 4539 - DNA, 120 bp, synthetic construct
  source 1..120: mol_type = other DNA
taatagtacaaggcagaatcagttaaatgccacatgggtggcagacagttttataaacaccacccaaacctttatttgtacaaaagcaaaagcaagcaacctcatcgttaggagaggagt

SEQ ID NO: 4540 - DNA, 120 bp, synthetic construct
  source 1..120: mol_type = other DNA
acttactgctcatttagtaaagtagtaaagtcacagtgggagcccgggaatcaggaaataaacactcagatgttttccttctagttttgatcagctgccctgagagaatgagattttaaa

SEQ ID NO: 4541 - DNA, 120 bp, synthetic construct
  source 1..120: mol_type = other DNA
tcaattctttgaacacctgttagctagcattccaacttggttggtttctgtcatttgcaaccgagaattctgtctcttttgtctggttgtctctctgtggtcaccatgcctttatcagtc

SEQ ID NO: 4542 - DNA, 120 bp, synthetic construct
  source 1..120: mol_type = other DNA
atcgcttaaatgtgctgtgccttttacaattatgtggctttgcaggtgctgttcccttgcctttttttctttgcccggcaaattctactggtttgtcagtcacttctcctttctgatagc

SEQ ID NO: 4543 - DNA, 120 bp, synthetic construct
  source 1..120: mol_type = other DNA
taaatgaattgcattgcatgttagaagatcgtaagtactctgggggaaaatgagagtagaacaggataagggggtgatggagggaatgagtggtgattttaaatgtagttatcaggctgg

SEQ ID NO: 4544 - DNA, 120 bp, synthetic construct
  source 1..120: mol_type = other DNA
tagtgtggacttctggagagagggctgaaactgtccttgaaaaaatggatttctcagtgtgatgtgtatacagtgtccctttttcagacatggcaccttcgtccatttgggctgctataa

SEQ ID NO: 4545 - DNA, 120 bp, synthetic construct
  source 1..120: mol_type = other DNA
aaacattgtaggttctcacttctctgcagctttagttttaccaagttgcttttacatttaccttgctctattataggtaatagatgtgaagcttccgattcctggctcagagttggtgac

SEQ ID NO: 4546 - DNA, 120 bp, synthetic construct
  source 1..120: mol_type = other DNA
tgttttggggtactggctcctaagagcagctgggtgtgtgattagacaaggaactgcttcactagtttattttcattgtgagcacacttcaatatcactctttacatgaacatgagcaaa

SEQ ID NO: 4547 - DNA, 120 bp, synthetic construct
  source 1..120: mol_type = other DNA
ttgacttttgtgtgtgacattagctgtctgttttggaaaatctaagagcaatatctgattatctatgctttccatccctaaaaccaccaacacatagaggctactgaatctcccgaaggg

SEQ ID NO: 4548 - DNA, 120 bp, synthetic construct
  source 1..120: mol_type = other DNA
ctcctgctgtggactgaaacattctctttggttaattcaaactgaaatattctatttggcatcaactaacatttgcatatttctgggggaccagccactttgctgcaaggtgcttgtatt

SEQ ID NO: 4549 - DNA, 120 bp, synthetic construct
  source 1..120: mol_type = other DNA
tggcaaaagaaaatatccagtggaaatctttgccatctttgggattctctttagtttttgctcatttttgcctatcctgcaagggtaacagaaagctctgagatttggaggtcagacaaa

SEQ ID NO: 4550 - DNA, 120 bp, synthetic construct
  source 1..120: mol_type = other DNA
gctaatggctctccccttccaggcaaatttctaggattaaacgacttgatgcttttttgctctgatccaggcccacctttccagcccacatatagtaataattatggttttatgttttta

SEQ ID NO: 4551 - DNA, 120 bp, synthetic construct
  source 1..120: mol_type = other DNA
gcacaattcctggcccagggagtgggtacatcatcaatgtgtgaggaacagactgccatgaaatagtgtaaaaaatccacatagtacacttgtgagaaaagagataagaaccagaatttt

SEQ ID NO: 4552 - DNA, 120 bp, synthetic construct
  source 1..120: mol_type = other DNA
ctactcttccatttacctcactccaggaaatccttttagaaatcatactcttgagggaagaagacctaggggatagagcatgactccactgagaaatttaatttaggaaaataatggggg

SEQ ID NO: 4553 - DNA, 120 bp, synthetic construct
  source 1..120: mol_type = other DNA
aacccttaagaaccccagatcagcttgattccaacacaaaggagtaatcaaggcggttgcaaaggaaacaatggcaagtgttttgtgaagcatttttttaagagagtgtgatggaaaatt

SEQ ID NO: 4554 - DNA, 120 bp, synthetic construct
  source 1..120: mol_type = other DNA
acttgcccaaccacttacctaccttgcatggactgttgctatccaaggggagccgagacagctgggagatttgttcctgtcctttcttcatttaaggatttactctgtgccagaaactgt

SEQ ID NO: 4555 - DNA, 120 bp, synthetic construct
  source 1..120: mol_type = other DNA
taatttggaggatggacaagttaggtaaagggactcattttttttctctttgattgtctgcctcaattgggtatttctggattcctgaaatgaggcttcatgccctggactgagatactg

SEQ ID NO: 4556 - DNA, 120 bp, synthetic construct
  source 1..120: mol_type = other DNA
caactccatactagattctgtgcttggtactggggaaacacaagtacaatttttcatggttactaccttcaagggtaggctcagtagctattcagaaatagtctatagtcaagtgcacag

SEQ ID NO: 4557 - DNA, 120 bp, synthetic construct
  source 1..120: mol_type = other DNA
cacctggatgggaaggtcttggtattgataccacatctctgccttgaccttcaatcactgcatctcatctctgatcacttttcttcagctttggtctttagttacaacattcatgcaatt

SEQ ID NO: 4558 - DNA, 120 bp, synthetic construct
  source 1..120: mol_type = other DNA
tttctaagtgatcaataaatggtgacgataaaatgtgcagagtcaagatgggtatgatcttggtttccgtccagctcttccactaagtagctttgtggcctaaggaaagtctcttaagtt

SEQ ID NO: 4559 - DNA, 120 bp, synthetic construct
  source 1..120: mol_type = other DNA
aatcatttcctaggattttccccaaattattagaagacattgctggaccattgtcattagccattgaggagctgtagagaaagagggagatgtaatagaggcagagatccgaattctagt

SEQ ID NO: 4560 - DNA, 120 bp, synthetic construct
  source 1..120: mol_type = other DNA
agacttaacagaagtacaatgtttcctttgcaaaagatgagtgttaaaagggaacatgcagaaaaatgatggcttacatgggatgaataaagacttagcaaactctggccagccatggtg

SEQ ID NO: 4561 - DNA, 120 bp, synthetic construct
  source 1..120: mol_type = other DNA
ctgcaacaaaaaactcaggaaacaatacttaccctaagatgctttctcatttattctgctttatttgcttctatcctatttttatttaaaaatactgatgagagctgagtgctgtggctc

SEQ ID NO: 4562 - DNA, 120 bp, synthetic construct
  source 1..120: mol_type = other DNA
atctccccaccttttccccctggcaagccaattctactttctgatggttctaattttgggaatcacacatatgttgacttatgacaatgactgctattcatgcagcaggtgagtttttaa

SEQ ID NO: 4563 - DNA, 120 bp, synthetic construct
  source 1..120: mol_type = other DNA
gagtttggtgtgctgcctgtgactctcatccacagaggggaaagaactaagcaaagggatgacttaacaaaagctgttttgctaaaaaaaaaaaaaaagcagacttatagatccttactg

SEQ ID NO: 4564 - DNA, 120 bp, synthetic construct
  source 1..120: mol_type = other DNA
cccttcatccttcctaggtatttctcccagaaaaccactggcagttctaattctgtcttggagtcagctccttgaaggatctgaacatgtacctgtgtaaagacttatggaaagaatttt

SEQ ID NO: 4565 - DNA, 120 bp, synthetic construct
  source 1..120: mol_type = other DNA
ggggcggctggcctggcggggggctgaccccccccacctccctcccggacggggtggctgccgggcggagacgctcctcacttcccagacggggcggctgccgggcggagggtctcctca

SEQ ID NO: 4566 - DNA, 120 bp, synthetic construct
  source 1..120: mol_type = other DNA
tggaaagaatttttaaatcccttcagaaagttgttcaatttccctctgccagtgatagcaaagaaggtggtatagctagagtagggtgaataagggagtgagtggtaagagatcagagag

SEQ ID NO: 4567 - DNA, 120 bp, synthetic construct
  source 1..120: mol_type = other DNA
tggaaatcaagagaggagaaactgacattcggatgcatttttctggagatgtacacttagtctagagaatgttgctgagagttctagaagcaattttgacagattgaagagtctgcagga

SEQ ID NO: 4568 - DNA, 120 bp, synthetic construct
  source 1..120: mol_type = other DNA
ctgtgtttgggattggttccctagagaactacataactaggaaaagagtgaactgaaaatagaccaatagcctggctattacagggccttatgtccccttaaaaatcatctcactaggtt

SEQ ID NO: 4569 - DNA, 120 bp, synthetic construct
  source 1..120: mol_type = other DNA
tggcccagatatttgaactattggacagggccgttaaaaatagctatgattaataagttgaaggagttcatggaaaaggttaatactaggcttgaagtgatggggaatttcaggagaggt

SEQ ID NO: 4570 - DNA, 120 bp, synthetic construct
  source 1..120: mol_type = other DNA
agaggtcaataaaaggcatccaaaccaaacacaaagaatggcaaaaaatgacaaaactgaacatcacatctgagatatgtgaggaaaatatgaaacccatgcagtgggactcacagaagg

SEQ ID NO: 4571 - DNA, 120 bp, synthetic construct
  source 1..120: mol_type = other DNA
atgcacaagaagaaaacatatagatactgtatggtcaagattggattgtcattccaattagacattcccccagttgtttgtcaggagtaggagaagagagcaacttgtataagaagtggg

SEQ ID NO: 4572 - DNA, 120 bp, synthetic construct
  source 1..120: mol_type = other DNA
ggtcccctggcttggcacacattactgagagagtccctcccttagaaagaacaaccactgatttctgggtgttcagttattttttttaatcagtgtatttgtccatgttcatgctgttaa

SEQ ID NO: 4573 - DNA, 120 bp, synthetic construct
  source 1..120: mol_type = other DNA
cggcccccctcgttggttttaactgtgtgtattttacaatgagttttcacttgtagcttattgaaggtctgtcattgtgatagatttgtcttttgtacagcttttgctttcacacatggc

SEQ ID NO: 4574 - DNA, 120 bp, synthetic construct
  source 1..120: mol_type = other DNA
gctgtgtatgggaaggggaatattggcaagagggagaaggttttcctgttcaagcatactacaatgggaaagcaaagttatgtttcttagtacatcaacagttataggttggtggttaaa

SEQ ID NO: 4575 - DNA, 120 bp, synthetic construct
  source 1..120: mol_type = other DNA
taattttccgtaaattggtagcaaatgatgtttctcgaaggggagtcccctagaagaatgggttatctttgaaagcagtgcttctgtttatctgtacagataagatgtgcgacgtggcat

SEQ ID NO: 4576 - DNA, 120 bp, synthetic construct
  source 1..120: mol_type = other DNA
ccaccatgcccatcctggatatattttaaaatgcaccctgaaggtgttttattactgattttgttgttgttcttgttcatttagttctgctagaaagaaccatggcctaggagacaagag

SEQ ID NO: 4577 - DNA, 120 bp, synthetic construct
  source 1..120: mol_type = other DNA
aaagtgagatcatagtcttacatgatattaagtagggagtgagtggtagagaggaaagatcctgttcctgagaagaagataccatgacaatatctctgtgagaggtacttggtgtctatc

SEQ ID NO: 4578 - DNA, 120 bp, synthetic construct
  source 1..120: mol_type = other DNA
gcagaacacacaacactgatgccccaattgggggtgtctgaaataccccagcacaaaatccatttactcacagaacttatttatgttctccttataaaattggagacaataaaggcttaa

SEQ ID NO: 4579 - DNA, 120 bp, synthetic construct
  source 1..120: mol_type = other DNA
tcgtaaatgatggttgaattttttcaaattccttttcagacaacttgttttgatccagtcctctgagatcttcctaatgaggcgtcccccaaattgcctatcatctcatgtttatggggt

SEQ ID NO: 4580 - DNA, 120 bp, synthetic construct
  source 1..120: mol_type = other DNA
gacaaaaaggggaatgctgtatttttggtaatatcccaatgccctatctaaaggaaagtcaaacaaggctggaagctggggctttgaattaagaaaatggcctcatgctccatttatcta

SEQ ID NO: 4581 - DNA, 120 bp, synthetic construct
  source 1..120: mol_type = other DNA
ccaacctaaaatacatcacccaactcaaataccccctgtctgaccagtgttggggaaaaagaacaaaaaccaaaatctcccaacccagtaaactactctgtaaaggtagtagaaaaagaa

SEQ ID NO: 4582 - DNA, 120 bp, synthetic construct
  source 1..120: mol_type = other DNA
aagtctagtaataaagtaaatacgagtgaaacatgcatccaactcgagaactggatcttgggtatcccctattccaccctcagacgtcccctaacctgaattttgtgtttataatttcct

SEQ ID NO: 4583 - DNA, 120 bp, synthetic construct
  source 1..120: mol_type = other DNA
ttgaacattcctattgtatctcctggcgccatatgcaagagtttttctgatgggtactcctagagatggaattactgggctgttttgttttcctatgtatgcctctgaaaacatcttgtt

SEQ ID NO: 4584 - DNA, 120 bp, synthetic construct
  source 1..120: mol_type = other DNA
gcttggagtaaacaattcccactgctttgcaggatgcgctccttcttatagcactttgttgtactgccagctgtttttcttgactagttcaattgtgacaatgtaaaccttttaaaaatg

SEQ ID NO: 4585 - DNA, 120 bp, synthetic construct
  source 1..120: mol_type = other DNA
tcactaagagatgtctgccaacctcatggtgaatacatcatgtaaaatcagctcctggattagaagagccatttcttaacatttgtacattctcctcatggtatacctggcacattatcc

SEQ ID NO: 4586 - DNA, 120 bp, synthetic construct
  source 1..120: mol_type = other DNA
gtgcatgtggtatggttattgtaaacacaagtttattgaaaaaggcagcatgggagaatagaaagattttgggttttgaagccagctagacttgcatttcaatcctgtttctggctgtgt

SEQ ID NO: 4587 - DNA, 120 bp, synthetic construct
  source 1..120: mol_type = other DNA
accataggtagcattccaactctgaggggaagaatacaagacagtagcagaaaaattgtcaaattccattaagagtggaatgaaggcttttttcttctgtgaagtgtgatgaagtttccc

SEQ ID NO: 4588 - DNA, 120 bp, synthetic construct
  source 1..120: mol_type = other DNA
aatatcattgatgggatgaattcagaggatggaagattcttggaaaacaagtttctagatagggctgggatggaatcttttctgtttttgtatccccggtgcttaacctaatacctggca

SEQ ID NO: 4589 - DNA, 120 bp, synthetic construct
  source 1..120: mol_type = other DNA
ttttctcatctgctgggtgaggatataagtacttgaaaaggtatacggtatttagccagtgctaacttagccattgtttttgttgttgtgtgtaatgatgcagacgtcatgatgactgct

SEQ ID NO: 4590 - DNA, 120 bp, synthetic construct
  source 1..120: mol_type = other DNA
tgttgtttcttgactttttaataatcgccattctgattggcatgagatagtatctcattgtggttttgatttgcatttctctaatcatcagtgatgttgagctttttttcacgtttgttg

SEQ ID NO: 4591 - DNA, 120 bp, synthetic construct
  source 1..120: mol_type = other DNA
ggctttattaatggatgtaggacagataaaaggaacaagttggtaggggatcaaacagaagacagggtcttccctagaaagtctttaactgaaacctaaactgttctgtgtgtgtgtgtt

SEQ ID NO: 4592 - DNA, 120 bp, synthetic construct
  source 1..120: mol_type = other DNA
tgcaaggcttgaaggactattggctgaggaaagtcggttgcagcttattttcagtttttggttggtcagtgaaacactccaaacctgcttacctagctttctaaaaacaatgtagatttt

SEQ ID NO: 4593 - DNA, 120 bp, synthetic construct
  source 1..120: mol_type = other DNA
atgaatgggaatggctaggattgttactgattcttgcccctaaaaagagaagttgaattcagaatctcttagaaggcataaaaatttaccatcaccatggcattgaggaaggcaacacag

SEQ ID NO: 4594 - DNA, 120 bp, synthetic construct
  source 1..120: mol_type = other DNA
gaatgaaatgcttaagtgaatatagtaatatgtagaatgtggtggggcattgtgaaaggaacacagagtcacagagatcaagggttcaatcctcccatgatcacatttagctgtgtaacc

SEQ ID NO: 4595 - DNA, 120 bp, synthetic construct
  source 1..120: mol_type = other DNA
ataaagaaaatgtgatatatacacacaatgaaatattcgtcagctgtaaaaaagaatgaaatgctttcatttgcagaaacatgggtgaaactggaggtcattatgttaagtgaaagaagc

SEQ ID NO: 4596 - DNA, 120 bp, synthetic construct
  source 1..120: mol_type = other DNA
cccttcccatcttcagctgtagcattttgagacattgtgcctttttgtctaaaatattctatttgatgaacggttaaactaatagtctgtgagctcctttagggcaagaatcacgtccag

SEQ ID NO: 4597 - DNA, 120 bp, synthetic construct
  source 1..120: mol_type = other DNA
ttggtacaggatgaagtatagtctatggggcgtttatctaaggaagaagaggtgatcaaatagacaggagagatgtgttacatgtgtgtagaaaaaggctccgtatcattacatagatga

SEQ ID NO: 4598 - DNA, 120 bp, synthetic construct
  source 1..120: mol_type = other DNA
tgatgggcagtgtatccctgggtgtctgagtgtatattcatcctgctaattgagttgtccattttactaatgtcttctgacagcctttcattgatctttatagttcttttctgggaaggt

SEQ ID NO: 4599 - DNA, 120 bp, synthetic construct
  source 1..120: mol_type = other DNA
cacatgagtatttcaaattgtgaaattacaagtgggtctctttccatgcatactagaagacagcagttattttggcagacagtgcttttcatacattcacccctttactcatttatggat

SEQ ID NO: 4600 - DNA, 120 bp, synthetic construct
  source 1..120: mol_type = other DNA
tttattggccatctgcttgtcagaaagcctcttcctcatgaataaccttagtctctaatctcaaggagctgaaaaatggttaaatagggctgggtgtggccctatttaacattttccaca

SEQ ID NO: 4601 - DNA, 120 bp, synthetic construct
  source 1..120: mol_type = other DNA
gatgcacacatctgggcgtacatctcattaggttaaggtgagtaattccttgaggactattcctttgacctcttcttataaagtgttatttacttgagcatacccagttctcttaagttc

SEQ ID NO: 4602 - DNA, 120 bp, synthetic construct
  source 1..120: mol_type = other DNA
tgaggcttctcacacactttagccagagggcacttggtgagcttcaaatgaaaggtcacggcaacctcttacctttttgatagacatagggtttctttagttatgtttataaatacaatc

SEQ ID NO: 4603 - DNA, 120 bp, synthetic construct
  source 1..120: mol_type = other DNA
ttgcccaggcttgcatttattcattttatttatattcctggaataagattacagatagggcaggaacaagagtgaggtaaagtggtggatgtcctggagatgactgaaaatcagtaacgc

SEQ ID NO: 4604 - DNA, 120 bp, synthetic construct
  source 1..120: mol_type = other DNA
atgcctgaattccatgttggcaattgggtacaataaagcatttgcaattctagtgacaaattgtactgcagtgcagaaggtctcatcgagcttagatcattcgttgccttacatattggt

SEQ ID NO: 4605 - DNA, 120 bp, synthetic construct
  source 1..120: mol_type = other DNA
ctgagtagtatctctgggaatgatggtgaggctatcctttcgtttgcaataacttttagactcggtgaatataatagcatgatcattcttgcctatagaacagagaggtaagcaaagcag

SEQ ID NO: 4606 - DNA, 120 bp, synthetic construct
  source 1..120: mol_type = other DNA
tttccaagccttctgttgttctatactctctcttttcctgcctttcgccgagaggaatatccgtgtttcctgaggatgggggtgaaaaaatgtctatccaataatgcttgaattataatt

SEQ ID NO: 4607 - DNA, 120 bp, synthetic construct
  source 1..120: mol_type = other DNA
atgtcatctaatcagactctaatttactttcccccaaatatcaagagatcattctgaatttgtcttgctcatgatatggatgggttactctgtgtgattgccttttttttttcttcttct

SEQ ID NO: 4608 - DNA, 120 bp, synthetic construct
  source 1..120: mol_type = other DNA
ccaggtggtctgggtaacggcaggtgctaacagaagactggctaattataaaatacgactaagcggaaacagctttgtagcttaaaaaaagtatgtatttcatttcactctcatcacaag

SEQ ID NO: 4609 - DNA, 120 bp, synthetic construct
  source 1..120: mol_type = other DNA
atgcctttgatttatttaatctcacttctgtatactcatttccttactatgtgttagaaaccctctcagcccagtgtcttaggtaaccgttctgttgaaattttggctgatcgccacttg

SEQ ID NO: 4610 - DNA, 120 bp, synthetic construct
  source 1..120: mol_type = other DNA
ttttatcattaacctagttttcatcaagggaacagtgtgcaaactgggtaccacctgtgagaagcatcatttaagaggccagaggtgagatcctagaaaattatgtcaccttgcttgttt

SEQ ID NO: 4611 - DNA, 120 bp, synthetic construct
  source 1..120: mol_type = other DNA
attgttagtaatattgagattgctttgagaatacacactctgacaataaactgaggatgcttgttggaaagagtagctgggtcaggtgagtctttcaccttggagtgactgatctctttc

SEQ ID NO: 4612 - DNA, 120 bp, synthetic construct
  source 1..120: mol_type = other DNA
tatgataacactcaatggagtgagtggccattgcctacttggtttttgtttccccttagacctaatctgagatttgccaatctcatgttctaatatcccgactgctttttcaaataggag

SEQ ID NO: 4613 - DNA, 120 bp, synthetic construct
  source 1..120: mol_type = other DNA
accattgatgtgaactctttgggatctacagcatcatccttaatgcctgtgtcataccttgtatatcattttgaatggcttttggagcttaaagtatctctgatttcaagcagagtgccc

SEQ ID NO: 4614 - DNA, 120 bp, synthetic construct
  source 1..120: mol_type = other DNA
gcttgggatcacagtgaaaatactgatattttgatacagttggtaaccttccatttgtgttttattgctgtgtgtctggtaaagacgttctctaagtttgtgtgaaagtgtagtagaagg

SEQ ID NO: 4615 - DNA, 120 bp, synthetic construct
  source 1..120: mol_type = other DNA
gctggcaaaaatctttgcatgggtcctccttctggactggctactacacgatcaagtcaactgtctgctttggaatggcaatatgtcatgacatatcaaattttatcttaaaactttttt

SEQ ID NO: 4616 - DNA, 120 bp, synthetic construct
  source 1..120: mol_type = other DNA
ctgtcagtgacatgtgccaaggacatcttacttcctctaatttttggcttgtcttttccattctctttccggagttctttgaaaaggcattcttatagtaggagaatttgtctgtcattt

SEQ ID NO: 4617 - DNA, 120 bp, synthetic construct
  source 1..120: mol_type = other DNA
gagaaggaagcagaggagaagaactggtatttattgatgtctatgaataccaactgttccactgaactctttatctgcgttatttcatgtaatgccccagcatctctgagatggaattct

SEQ ID NO: 4618 - DNA, 120 bp, synthetic construct
  source 1..120: mol_type = other DNA
cttcatttccagtacacaacttggctttatagcccttggacactttcccaacttttgatctttcagtgcaacccttctttttctgcttagtctttctggttggctcagattgaaaaaaac

SEQ ID NO: 4619 - DNA, 120 bp, synthetic construct
  source 1..120: mol_type = other DNA
cctgtgaaaatcactgctgcacaatggctgctgagtgtcttaataggtctaatgactgtgctgcatgaatgtaaagtaggttctgtatgcaaagggttaagaaactggatgatatagtta

SEQ ID NO: 4620 - DNA, 120 bp, synthetic construct
  source 1..120: mol_type = other DNA
ggggcttctttttaatcatataccctgcctcaccttcccttcctggaaattgtcaccatcttactcttatttcttactctcctgctttcctttatttttgccacaggaatcatgaatata

SEQ ID NO: 4621 - DNA, 120 bp, synthetic construct
  source 1..120: mol_type = other DNA
cttttgatagtagcttaggaaagacacgggcatggaaccactgagcacctaatgaaggaaagagtattgaaatggtaatatgacgtattcaggttaggagaaagagaattctcaggtagt

SEQ ID NO: 4622 - DNA, 120 bp, synthetic construct
  source 1..120: mol_type = other DNA
cccaattatgagatgagaagatgctgactcaggtttctctgctctacatggtgcaagtttttaagtttcctcaaattacggaatacaattgacaagagaagaactacttttcgggagcca

SEQ ID NO: 4623 - DNA, 120 bp, synthetic construct
  source 1..120: mol_type = other DNA
ccatatatctaaaacagaactcattatctttcctgcacgtgctactttgcctctcacattctctatttctagcaccttcactcctggtcattagattggcagcccttggattcaaaagaa

SEQ ID NO: 4624 - DNA, 120 bp, synthetic construct
  source 1..120: mol_type = other DNA
taggccagatgctttggtttacatttgtgttttttcaactttgattcccaagattgaaagatttattctggctgaggattctgggcgttccttctaatggatcagcagaagcagaacaag

SEQ ID NO: 4625 - DNA, 120 bp, synthetic construct
  source 1..120: mol_type = other DNA
gccactgagcctggcccacatagagttgtaaatcatgaaactgttctggacagaaagcagatggcagaatcacaatcttctgtgtccagagattatttgagattattttaagaacctaag

SEQ ID NO: 4626 - DNA, 120 bp, synthetic construct
  source 1..120: mol_type = other DNA
tgaccctttgcagcacaggcttggggcgtgacctcaggatgtgactgcaccaaaccttactattttatagaaaatggggataataattctgatctaacaatttggatgattaaatgagat

SEQ ID NO: 4627 - DNA, 120 bp, synthetic construct
  source 1..120: mol_type = other DNA
gtgtgcaaattatctctttgagattctgcatcttgtatatgtcttttggatatagatacccatgtcgtggatggaatatgtccccacaaaattcacatggcgaattccaagccctgatgt

SEQ ID NO: 4628 - DNA, 120 bp, synthetic construct
  source 1..120: mol_type = other DNA
taattccttatcagatacagttgtctctctgtgtgttccttatctttggattcaattaactgcagattgaaactatttgggaaaaaaaccaatacaaataacgacacaacaataaaaaat

SEQ ID NO: 4629 - DNA, 120 bp, synthetic construct
  source 1..120: mol_type = other DNA
gcgtgttccgattgaggctggataaaagaacggcacaatcaaaccgtgcagtgcagtctgtgaacaaattgtctccagctcgaaatgatgaaaagaatattttaacaacttttgacttca

SEQ ID NO: 4630 - DNA, 120 bp, synthetic construct
  source 1..120: mol_type = other DNA
gaaaccacacattctactagtaggccaattaattagccttaaggcattgcctttacacaggagtcaaaagattatgggagacattaatcatcttaaaattccagaaaggaaggtagaggg

SEQ ID NO: 4631 - DNA, 120 bp, synthetic construct
  source 1..120: mol_type = other DNA
aatatcttgaatgcttttgagtgactccttctaacttgtcacaatggtgatgttcagtgattaaaatgtggaatcctgagggagttcattgcatgtcacaaatcagtacttctactcccc

SEQ ID NO: 4632 - DNA, 120 bp, synthetic construct
  source 1..120: mol_type = other DNA
gattttttggctgtcgcagttctatcaggcacaaagtcaagaatattaatgaattcattatttataacccctttgttggacccaccgtactatacatgagtgagaaacagcggcaaggag

SEQ ID NO: 4633 - DNA, 120 bp, synthetic construct
  source 1..120: mol_type = other DNA
gcatatattgaaggagtgtggattagtggttaacaagtatcatatttggcatcaaattggcataggctctagtctggtcattgtatacccttgggttagctatttgtccccttttgacct

SEQ ID NO: 4634 - DNA, 120 bp, synthetic construct
  source 1..120: mol_type = other DNA
tgcaagtctgggccagtatcacattattttaataactatggctttacaataagtcttgatgagaagtactctaccttgctttcatttttaagatgttcctaactattccgggcactttgc

SEQ ID NO: 4635 - DNA, 120 bp, synthetic construct
  source 1..120: mol_type = other DNA
tggaagggattgcatagggtgcttgaagaagtggtgaatgtctgaactgcagtggagggaataggaagcaaaatgaatagaggtagtgaacagctacagtgtacttaaaattacattttt

SEQ ID NO: 4636 - DNA, 120 bp, synthetic construct
  source 1..120: mol_type = other DNA
ccatgcactttggagtttttgatagaatggtttccagaaagcactgtagatgagtcagttctggtcagactgcctgaaaatgaaatgaaccacttgttctcagctgtgataaatacagtt

SEQ ID NO: 4637 - DNA, 120 bp, synthetic construct
  source 1..120: mol_type = other DNA
cactcaatactaaccatcacacattcattggtgaaaaatcagcaatataaaacagcatatggttgcataaattctcaggattctttcaactgtggatctatgaaaactaattttatatct

SEQ ID NO: 4638 - DNA, 120 bp, synthetic construct
  source 1..120: mol_type = other DNA
agtaggaaaactgcagattctggggggattacttttgccattctcgggcatatttttaataatggtgagcaaattgatactttgggttgatacccctctttcttctctggccaaataaga

SEQ ID NO: 4639 - DNA, 120 bp, synthetic construct
  source 1..120: mol_type = other DNA
gaaattaattattggcccctagtttcagtgcttagagtaatttagggaagcccattacacaaactggcattagcatcctccccacctccttttatcatcgtcattatcatcattactgag

SEQ ID NO: 4640 - DNA, 120 bp, synthetic construct
  source 1..120: mol_type = other DNA
ggtaggcatgtgtgcctgatatgcctatgaatatatttttgtgtctgatgatagtctcccatttctttgtcattcatttcttattgcagtctctttttctacctctttttgagtctgagc

SEQ ID NO: 4641 - DNA, 120 bp, synthetic construct
  source 1..120: mol_type = other DNA
taaatggacaatttgatgatttttgagaaatgtatacacacatgttaccaagctcctaatcaagaatatctccatcctcctagaacgtttcctcttgccctattccgtgcagtctccacc

SEQ ID NO: 4642 - DNA, 120 bp, synthetic construct
  source 1..120: mol_type = other DNA
gaaaatgctccattccgcattccttagctctggttctggtttcagacttcactttatattggcggggttttaaagctagaggagtctttacctacttactcttatgtacagatctgaata

SEQ ID NO: 4643 - DNA, 120 bp, synthetic construct
  source 1..120: mol_type = other DNA
cacatcacctatgcctgaggccagtcctggattgccccagaagaaacaatttctttactccaaagaaatccaaaggagttaaaaagtgagagcccaaatccaatctgtgctcagggagca

SEQ ID NO: 4644 - DNA, 120 bp, synthetic construct
  source 1..120: mol_type = other DNA
gtcctgaataccctgaaactcggccgaacatgagcctgagctgctccctcgaaaacacttttatctcttgttactttaggtaccatttattaattgaaactgaaattgttcttagtgaag

SEQ ID NO: 4645 - DNA, 120 bp, synthetic construct
  source 1..120: mol_type = other DNA
aggtattttattttagcaaaatggactgagacaccactagtagaatagctatcctctaaaacaattttcatccttttcagcctggcacataactgcaaaacaatagtattaggttggtgc

SEQ ID NO: 4646 - DNA, 120 bp, synthetic construct
  source 1..120: mol_type = other DNA
acatcaggctaatgtgggctgctgagtgattgccttctgtgtgggtttatgtgtgtgttttcctctgctgaagcattctatagtctacattacataaaataagatgttccatgtgatttc

SEQ ID NO: 4647 - DNA, 120 bp, synthetic construct
  source 1..120: mol_type = other DNA
taacaggtctttacaaattgcatatgacatatagatatatatgtcttatttacatatattaaagccttattctgatactatagttatggtacagtgtaaaatctgcatatatgtgtgtgt

SEQ ID NO: 4648 - DNA, 120 bp, synthetic construct
  source 1..120: mol_type = other DNA
ctgttttttttcttgagtactcctgaaatctctccttggatctggaggtcaaattaatatagcaatccctggccaattttggatgtctcatttcttgtatctctcatgcatggctctggg

SEQ ID NO: 4649 - DNA, 120 bp, synthetic construct
  source 1..120: mol_type = other DNA
gttttcccagctagtacgtggtacagctgggatgagaacagagcttttcctctatttagtctaggacatttcctaccattgcaccaatttttaaaacaaaccactgaatcatctactttc

SEQ ID NO: 4650 - DNA, 120 bp, synthetic construct
  source 1..120: mol_type = other DNA
cgttgtggacatgtgttctggatattagcaaatccagttgcccaccaacatttttaacggcttcatggtgttctgtaatattcatccctctattaatgaacatttaagttgttcccagta

SEQ ID NO: 4651 - DNA, 120 bp, synthetic construct
  source 1..120: mol_type = other DNA
ttgttttgtattttagtagtgaggctgaactttctccatggttgagtgtatttcttcttttgtgagtttcctacttaatacattatttgcctgcttttctaatgggagcgcctcttctca

SEQ ID NO: 4652 - DNA, 120 bp, synthetic construct
  source 1..120: mol_type = other DNA
aagattctactcattgcagaagggcatagaggaccagagcaggcatcacatggagagaggaaggaaatgaggaggaggtcccaggctctttaacagtcagctctcacaggaatgaatcca

SEQ ID NO: 4653 - DNA, 120 bp, synthetic construct
  source 1..120: mol_type = other DNA
gcaggatctgagtgagatacagtagtcccgtcctttattctcaaggaatacataaaacatgaaaggagagattaactctgggattatgtggcaacgctccaggcatataggaaaaaaaca

SEQ ID NO: 4654 - DNA, 120 bp, synthetic construct
  source 1..120: mol_type = other DNA
gttcatagatgaaagtttaggttcaatattacatctgcatctctatgaattcagtcttttcaacctatgtctgtgtttcaatagttatattgaattcagtattcacccttgaatattgag

SEQ ID NO: 4655 - DNA, 120 bp, synthetic construct
  source 1..120: mol_type = other DNA
tttgggaaattttacttttggatatcagctagttgttaccaaagtgctttaggtggtggctaaaaatgtcagtttgcctgactttgaatcttgactgcacatcgcataacagctgtgtga

SEQ ID NO: 4656 - DNA, 120 bp, synthetic construct
  source 1..120: mol_type = other DNA
tatggttgaggaaatgcaggctaggagaggttggacaactgacccaagatgctataggttttcagcttgctttctttctggcatactttgccatcaaggcttttaatataattttttgct

SEQ ID NO: 4657 - DNA, 120 bp, synthetic construct
  source 1..120: mol_type = other DNA
gagaggagcatttttccagaaccctcttgcccccggagacgtctacttaagtcttattaaccagagtttggtcaaatgcctgttcctgaaataattactaacaaagtaaaaataacctct

SEQ ID NO: 4658 - DNA, 120 bp, synthetic construct
  source 1..120: mol_type = other DNA
tgtttctcgggagacacctgactgatacacctacgtttcactctgtattatccatcttgcatgcatcatctctgatcctcacaaaaccttttcagagtagattattttacagttgaggaa

SEQ ID NO: 4659 - DNA, 120 bp, synthetic construct
  source 1..120: mol_type = other DNA
agctaggttcatacctagttctttgtttagagtgcttgtattctatttagtaagaagggacatggttttacctctttatcaagggctcactgaggtagtatattctgggtggtggtcaac

SEQ ID NO: 4660 - DNA, 120 bp, synthetic construct
  source 1..120: mol_type = other DNA
ggggccagtggacttgttggtgcatattaaatgggttagagagacacgttcttaatgttatggctcttcaaacatactccaaacctctcctatttgaccagccagaatcttatgttatta

SEQ ID NO: 4661 - DNA, 120 bp, synthetic construct
  source 1..120: mol_type = other DNA
tcttctttttttaaggttatgtaatagagggagagaactcactagtcctgggccataaaaactctgggcaaaggatgtgtgacttctcttctgtcaactagaaattatatggccacacca

SEQ ID NO: 4662 - DNA, 120 bp, synthetic construct
  source 1..120: mol_type = other DNA
tgtgcagggggtctatgccccaacccccatgtcgttcaaaggtcaactctattagtaatggtaatagctattagtaatagctaacatttatttagcttataatgtccaggtactgttcta

SEQ ID NO: 4663 - DNA, 120 bp, synthetic construct
  source 1..120: mol_type = other DNA
gggaaataaaagaggaaggcagatataagattaaaatatcaaatttattaccgacagagagcttgttcttgggaactgtccccaagaggaagaaagttgaggatgcccacctgtattcgt

SEQ ID NO: 4664 - DNA, 120 bp, synthetic construct
  source 1..120: mol_type = other DNA
ctctgagaatgttacatgatatgagtagcaagtctgtttattcagaaaaacacctcagatctcaaaccaatttagagagctcagaaagcagtacttggagagacacttccgagagatagc

SEQ ID NO: 4665 - DNA, 120 bp, synthetic construct
  source 1..120: mol_type = other DNA
caatgtgtacatagatggaagtatcatgttgcacagtttttatttgtgaagtatgtctttgtcgtgaaagcagccgtagtctatgctacagggatgggcgtggctgtgttttgataaaaa

SEQ ID NO: 4666 - DNA, 120 bp, synthetic construct
  source 1..120: mol_type = other DNA
cctatgcacaacactaaagatttgctgtacatgtgataaacaacatagcatgctgattaagaacatgaactctgaggttagaccacctgagtttgaatctctgcagcttccttctgtatg

SEQ ID NO: 4667 - DNA, 120 bp, synthetic construct
  source 1..120: mol_type = other DNA
agtattatagtttttcaccttttgggtttcattatgtttgcaccaatgagacttgtcctttaatattacttgaatgaaggacgtcggttaaaggtctgtgcccaaaggctggtttcctgc

SEQ ID NO: 4668 - DNA, 120 bp, synthetic construct
  source 1..120: mol_type = other DNA
tatctttttaccaaatgcagacttagcccttcccctgatagttgtcttaatagaagtcagttgtatactgggaatgtttttatttttaaaatgatactcctggctgggtattgcggctca

SEQ ID NO: 4669 - DNA, 120 bp, synthetic construct
  source 1..120: mol_type = other DNA
ccatcttttagctcttgtttgctagatgtatatggggctatgatggagagcccagcattagcagtagagggtagacatggcttattaaaataaatgtcaagccttgcttggattttgttt

SEQ ID NO: 4670 - DNA, 120 bp, synthetic construct
  source 1..120: mol_type = other DNA
tctccaaagtgatgtcttttgtatgctaatgaactgattgatggcttgcagaacctaggtagcttcagaattacttctggtcacctaaaggacccaggcaggaaaagagggttgagattt

SEQ ID NO: 4671 - DNA, 120 bp, synthetic construct
  source 1..120: mol_type = other DNA
tgctttttccttcttgcagtttctccttgcacaagctcagctacatcagttgaacaaaactttgtgttattttggggagaggagacatttatgatgtggatgatcattttaggtggatag

SEQ ID NO: 4672 - DNA, 120 bp, synthetic construct
  source 1..120: mol_type = other DNA
cctcgaatcttcctctatcatcccccactactcctttatcaaccctttggctgtgtctagactgaattcataatatttcccagaatgtgcttttggctactagcaaattttggcatttca

SEQ ID NO: 4673 - DNA, 120 bp, synthetic construct
  source 1..120: mol_type = other DNA
ctttgtcttggttagttttatggtttctgtaaaccatgggaatgtttctcaaagtggttcccagatattagcctcagttaatctgaatttgtggcacagttccttctgtcgtcactggca

SEQ ID NO: 4674 - DNA, 120 bp, synthetic construct
  source 1..120: mol_type = other DNA
caaaaaacatggaagtgagcaggcagcaaactgctgcagtttgctttgggcagtcagcaagagaaaaagaacttagattgagtgtaagcaatttaagatagagttttccataatggaaac

SEQ ID NO: 4675 - DNA, 120 bp, synthetic construct
  source 1..120: mol_type = other DNA
tgagaaaagactaatacaagtagtatcctttgttagtagtatcctttgattaatagtatctgttatttactacagtgttccttgaggatcttatagttcagagaaggaaattattgatga

SEQ ID NO: 4676 - DNA, 120 bp, synthetic construct
  source 1..120: mol_type = other DNA
taaccaacacatccaggtcaataatagacctgtgggtcaccttagatctgtaagagatttgccatggacctttgcagttagtggcttgactttgttttgaattgcatagtgaaatattct

SEQ ID NO: 4677 - DNA, 120 bp, synthetic construct
  source 1..120: mol_type = other DNA
atatgtgtatatatttgctattattattccttttgaaaatgcttctgaacttatgcaggtggagtgcccaggcttttgaagcagggttgtttgtctggggtaatacccgaggcttgttgc

SEQ ID NO: 4678 - DNA, 120 bp, synthetic construct
  source 1..120: mol_type = other DNA
gtgaggttgccgtcgtctaaggcagctagtagccctcttttgccagaagagttataattattagggatatttggagttcatttcttgtccagcttttcaacactacataattctctaatg

SEQ ID NO: 4679 - DNA, 120 bp, synthetic construct
  source 1..120: mol_type = other DNA
tcactatatttaaatatctctaaatggagaatgtgatatagtgatatgtggaactatatctgtcacagggtaaatctcaaaattggggttcagcccaggaggccaagtgggttcttggct

SEQ ID NO: 4680 - DNA, 120 bp, synthetic construct
  source 1..120: mol_type = other DNA
aatgctgtatttagggggatatacctaagttattcacaaagctagccctagaacctcctagctcctagaccaggacaattttaggataactaaatgcaaggacagtagaaagcagaaaga

SEQ ID NO: 4681 - DNA, 120 bp, synthetic construct
  source 1..120: mol_type = other DNA
ttatggaagcttcttgatgttggcattcctttccccaggctatagcgtgggaccctatctggggagggtcttaaaaaccacagtcagaaaggttaggcaagattagagtcctgccttggg

SEQ ID NO: 4682 - DNA, 120 bp, synthetic construct
  source 1..120: mol_type = other DNA
gtatttagaaatttagaaaataaatcatctttccacattcagtgcatctttgcttccagtctgattttgatacgggagttcagaagaaagtacctgggcagatagtgagggtaggggcat

SEQ ID NO: 4683 - DNA, 120 bp, synthetic construct
  source 1..120: mol_type = other DNA
ctgtaagtttatgtttgtcagggcccaggaagagtaagaatacagggtgagaacgcgtagggaaatgctcatttccattaaagcatataaatagagggaggttagagctgtcaaaaacaa

SEQ ID NO: 4684 - DNA, 120 bp, synthetic construct
  source 1..120: mol_type = other DNA
ctggactgttttctttcttttctcggttgttttgtcctgtctctgccaacagcattattgaattagctgggggttgccagtgcttcctttccctttcccatttcttttcatggggtcttg

SEQ ID NO: 4685 - DNA, 120 bp, synthetic construct
  source 1..120: mol_type = other DNA
tttaaattacacagactttcgtagagtgcccactctccctttctcacctattcattgtggaaagattcctgtcagggctaatctttaataagagaggcagttacagtaactatagggcga

SEQ ID NO: 4686 - DNA, 120 bp, synthetic construct
  source 1..120: mol_type = other DNA
gctatttgactaagtcatgttttgctaaaagtatcttcaacatgaactctggggttattttcttgttttttatttcccctcatcagtcatcacccagagattcccaggctggaaattcct

SEQ ID NO: 4687 - DNA, 120 bp, synthetic construct
  source 1..120: mol_type = other DNA
atattactcatagtaaatgccattttacattttccttcaagatttgtcttgcttaacagtgctgtctgtcttccatgagtcatactgacccagtacaaggtcctcgtgggtgatcagatc

SEQ ID NO: 4688 - DNA, 120 bp, synthetic construct
  source 1..120: mol_type = other DNA
gcatttccttggtattttagagcttaaagatagtctctcatttaaagggatatcgtccaatgtttaagtcttgtcctcgtgtctaatctcaagtgtgtcctggcagtcctccctttacta

SEQ ID NO: 4689 - DNA, 120 bp, synthetic construct
  source 1..120: mol_type = other DNA
taatggcaattctaaactgccttctcactcaacttccaggtagcattctacctggttgactattttttctctttgtaatctgtttagatcggttggcccctgactttctttctaccttag

SEQ ID NO: 4690 - DNA, 120 bp, synthetic construct
  source 1..120: mol_type = other DNA
catcagagaggtcatttacgaccatcctgtaatatatccaccttgatccttcagccctgtcgttagaattcctggcttttatcacgagctgacattacattttgtaactattcatttact

SEQ ID NO: 4691 - DNA, 120 bp, synthetic construct
  source 1..120: mol_type = other DNA
aaaggacttcagaacctggttctgatttggcttcagtgggctctttttgtacaaccacaagatttctgcaatgcagatactttgtgtatctcactttatctgagcaacttttacgttttc

SEQ ID NO: 4692 - DNA, 120 bp, synthetic construct
  source 1..120: mol_type = other DNA
aatctgagtctggtataggtctttgagaatgtctaccacttgtttattgtggtctcattctttagagaggaggaggatggttttcagcattctaaaatatgcaagcaacggacaccaatc

SEQ ID NO: 4693 - DNA, 120 bp, synthetic construct
  source 1..120: mol_type = other DNA
cactagacaatagatgggatctatcacgatactgaaatggattttccatgtgatcatatgggcacattgatcctgactatatcagttcttctgtgattggcactcgattgattgcaggat

SEQ ID NO: 4694 - DNA, 120 bp, synthetic construct
  source 1..120: mol_type = other DNA
ctgctcctcttaattattccgtttcctggattttagggtaacatggaaacttgtgaaagcggtaattgaagaggaagacactctgctggcttctgagccaataactttgttttatcaagt

SEQ ID NO: 4695 - DNA, 120 bp, synthetic construct
  source 1..120: mol_type = other DNA
gccattgaccgtcgcttctgtgccagatgctgtgctatatgataggtataagttgataaataaaactaacatgaacctccctttgctatttcattgagataatgcatagtacctgggagt

SEQ ID NO: 4696 - DNA, 120 bp, synthetic construct
  source 1..120: mol_type = other DNA
cctgggaatctggcattcattactgtttgcttgacagtgccacttatcaagataaggaactatgggggatggcaaaatttggggtaatagacctattaaaatgtgatcattattggtggc

SEQ ID NO: 4697 - DNA, 120 bp, synthetic construct
  source 1..120: mol_type = other DNA
cctgtcatttcctctacttaatagaaggctacagataggcttatacagtaaacatgtgaaaggtacagttgacttctctgcttgaatttgcacatggggggaattcgttctcttcttttg

SEQ ID NO: 4698 - DNA, 120 bp, synthetic construct
  source 1..120: mol_type = other DNA
gattcaaatgtaggagcatgacaatttgtccagggatagcaaagatgcttattccactgggacagttatattgtgggatgagtgaaggcaggtcacaagtgttttacaaaggaataaaac

SEQ ID NO: 4699 - DNA, 120 bp, synthetic construct
  source 1..120: mol_type = other DNA
gtaagcacttatcaccatgcctgcaacataactggaacttgataaatgcaacgcatatctagaatttgatcatttctctctacttccactgctaccattctgttttgagccaccatctcc

SEQ ID NO: 4700 - DNA, 120 bp, synthetic construct
  source 1..120: mol_type = other DNA
tcattaagccactggtttccgtggagtttaagctgatgtgctggagagataaccacaggataagatacatatagtgagctttctgagttgatgctaattatggaaaaattctcaggacat

SEQ ID NO: 4701 - DNA, 120 bp, synthetic construct
  source 1..120: mol_type = other DNA
gctctcacacagatcctaatgctattggaacccatagaaatggacagaattgggtctaagtaactgcaaagaagtgatttctgtctgcaagtaacatcactgtcatggtttatgaattct

SEQ ID NO: 4702 - DNA, 120 bp, synthetic construct
  source 1..120: mol_type = other DNA
gctacagttccttatttggccaatcctcagtatgatgatttggggaaggcaacatttcttcactattgagaaagatctcatgttgagctttgtttttgaactgcaatgtccaaagtgggc

SEQ ID NO: 4703 - DNA, 120 bp, synthetic construct
  source 1..120: mol_type = other DNA
ttatgggagcacaaaacaaaagaattaatagcctggtgggtccaatctcaacacagccttgaaaggatgcctgggttgagatttgaaagatgggtaagtattaactagagaagagagaaa

SEQ ID NO: 4704 - DNA, 120 bp, synthetic construct
  source 1..120: mol_type = other DNA
aatagaaaacattaagctatttatcaaaacctctcaaatgcctactctgcatgctgtcagaccacagtgattctggagaggaagtgtgctctgagatgaatgatggggttaattaaaggc

SEQ ID NO: 4705 - DNA, 120 bp, synthetic construct
  source 1..120: mol_type = other DNA
gagaagagaagaaaagaaactcgtatatttcttaggatccatatattttctgggtccctttctgggccctagatcctcatctaacaagctctcaagtgtggctcatattgagagcttctt

SEQ ID NO: 4706 - DNA, 120 bp, synthetic construct
  source 1..120: mol_type = other DNA
agagtaagagtgtagttacttacccaagagtgtagtttgcatgttagagttagttccatagggtaggtgagacaaaatagtaaaagcctctggggatttgataaggcattgaacacacca

SEQ ID NO: 4707 - DNA, 120 bp, synthetic construct
  source 1..120: mol_type = other DNA
aaaaaaaacaacttgccgtctgcttttgagtctttattcccatcacctctgccctgccatactaccttggtgaagggcttctagaatatacttgtgtgtcctttttctctctaattagaa

SEQ ID NO: 4708 - DNA, 120 bp, synthetic construct
  source 1..120: mol_type = other DNA
tttttaaaatgcactaaaataatgttcttcaagatatgatttggactgtgcagtcatgtcacgtctcacttatttttccctctctttctccccctttgcaggatgatgaagtggttctgc

SEQ ID NO: 4709 - DNA, 120 bp, synthetic construct
  source 1..120: mol_type = other DNA
ttcatctctttgaatctccacatgcaaccagaaagagctatgaagagggtaaaactcacagccacagacaatacagtatctaagacaaactaagtggcaagttattcctacgtatggtgt

SEQ ID NO: 4710 - DNA, 120 bp, synthetic construct
  source 1..120: mol_type = other DNA
agtggggagaaccacagaacaaggagctctagagctgtaaagctgaaaaaaaggctacactctctcttctccctaagagtataagaaaaagcatttcaatttttgtctggacatttgatg

SEQ ID NO: 4711 - DNA, 120 bp, synthetic construct
  source 1..120: mol_type = other DNA
caaggaactgagatggaatgatggttttaggggagagtgtcttatggaatggctctgtcctctgacaaggttaagtaagtatgactaccaaaaatgggagagtgggtatagtttataaaa

SEQ ID NO: 4712 - DNA, 120 bp, synthetic construct
  source 1..120: mol_type = other DNA
aacaaaaaagtttaaaaagtaaaaaaaaattaaaaaataggaaagaggtgtctagaacaaagatataaagaaaatattttcatacagctgtgtttgtattttaagctaagtgttattaca

SEQ ID NO: 4713 - DNA, 120 bp, synthetic construct
  source 1..120: mol_type = other DNA
tatcatgccaaagggtacatttctcaatgaagacaaagtagtttcatggccccaataacagatacaacttttacaaagtagaaacctcagaagttgcaaagagaaacgtagaaacatacc

SEQ ID NO: 4714 - DNA, 120 bp, synthetic construct
  source 1..120: mol_type = other DNA
accatgaattagcctaatcaaggataaagggagtacaaatatttgattattagaagttacatatgagttggaaggggataatgatcacaaaaggaaattaagtcataagggaccatttgt

SEQ ID NO: 4715 - DNA, 120 bp, synthetic construct
  source 1..120: mol_type = other DNA
atgtccagcatgccctctgcaatacatgcctgtgttggaggtatgagccaatgtgattagacactgaagatcagacatggagaggtaaaactatttctagatgtagatgatttgattata

SEQ ID NO: 4716 - DNA, 120 bp, synthetic construct
  source 1..120: mol_type = other DNA
acctttttaaaaggaaacacccacagtctgtatgaatttgattctcgtgtggatagtatagacttaagcactgaacatggtctgagcaggtttgctttgctgcttaccagcgattatagt

SEQ ID NO: 4717 - DNA, 120 bp, synthetic construct
  source 1..120: mol_type = other DNA
gcaacaccaggatttcataggagcacagttttatacagatgaggaccattgttttatgcagatgtgacaattgaatcaatagtcatgcagtgctgcccctacaaaagggacattcattaa

SEQ ID NO: 4718 - DNA, 120 bp, synthetic construct
  source 1..120: mol_type = other DNA
tcaatgtagaataagtgattagatacttgaacagagttccgatagaacagaagagttgaaagaaaatatttaacagttttcttggcagattgttgaattggacctgaatggaactgcttg

SEQ ID NO: 4719 - DNA, 120 bp, synthetic construct
  source 1..120: mol_type = other DNA
agatgaaacttgttggaaaaaacctacctggagttcacctcttgcacacagtttcatctcaaacactgcaaaaagattggcagatattttaatccacctaacctgtcagcttcagccaaa

SEQ ID NO: 4720 - DNA, 120 bp, synthetic construct
  source 1..120: mol_type = other DNA
caactgttgaaaaatgtgcaagccattcttaactcttgggctgtgatttggtccatggccatgatgtgcttagcccagctctaacatatggaaagtattatattgctaaagggaaagcta

SEQ ID NO: 4721 - DNA, 120 bp, synthetic construct
  source 1..120: mol_type = other DNA
tttggcgtttctcaaattatgaaagcacctgcaggcagagacagcctctcagtcatcttgtatctcaggtacataatacagttttgaaggaagtagagcctcaataaatgtgcattgatt

SEQ ID NO: 4722 - DNA, 120 bp, synthetic construct
  source 1..120: mol_type = other DNA
aaaaaaaaaaaaaatagtgtccagtctcatccaggtcactgcaaatgctgttaattcattcctttttatggctgcatagtaatccactatatatacatatatataatatataaaatatat

SEQ ID NO: 4723 - DNA, 120 bp, synthetic construct
  source 1..120: mol_type = other DNA
ctttatcatggtagattatctttttgatatgttgttggattcagttagtattttgttgaggattttagcatctatgttcatcaaggatatcagtctgtagttttcttttttgggtatgtc

SEQ ID NO: 4724 - DNA, 120 bp, synthetic construct
  source 1..120: mol_type = other DNA
ggattgcttgatataatttcagttttcttaaatttattgagccttgttttatgccctatcatatggtctatcttggagaaagttccatgcgcttttaatagaatgcagttgttggatgaa

SEQ ID NO: 4725 - DNA, 120 bp, synthetic construct
  source 1..120: mol_type = other DNA
cctcaattattccccaaatatgttttccaaggttttagatttctcctcttcctcaggaacactgattattcttaggtttggttgtttaacataatcccagacttcttggaggctttgttc

SEQ ID NO: 4726 - DNA, 120 bp, synthetic construct
  source 1..120: mol_type = other DNA
tcagctgtggatacaagtgtctgtcctggtgcaggtggtgcgagtgtgcaatggactccataagggttctttgctttggtggctgaatgctctacttttgtgctagttggctgcctgcca

SEQ ID NO: 4727 - DNA, 120 bp, synthetic construct
  source 1..120: mol_type = other DNA
acacagccaaaccatatcatactttatataaaggatacatttttgtaagcatgcttatacataattaaaaaattcagatactttacagaaaaatcattaaaatcgataaataattattga

SEQ ID NO: 4728 - DNA, 120 bp, synthetic construct
  source 1..120: mol_type = other DNA
tggttggcaagggctggaggaagtaggtgggaatttactgcagagacttgcaaatgtttttattccataaaatagatggaagtgtcctattttgtgattgtggtgatgattagatgattg

SEQ ID NO: 4729 - DNA, 120 bp, synthetic construct
  source 1..120: mol_type = other DNA
actaatgtttaagaaggtcataattgggacccagcaaattcaatccaagaaatatacctggcctaggccaactcttgcacttgggctcatgaaaacatgcacatacgtattcatgtcaat

SEQ ID NO: 4730 - DNA, 120 bp, synthetic construct
  source 1..120: mol_type = other DNA
aggaaaatcctaagaaagtacacattaatgataaacattaaattcattagtggctcctacttcagaacaggcagaatgaaatcaggcctgggtacctacttagctttgactgtgtgtgtg

SEQ ID NO: 4731 - DNA, 120 bp, synthetic construct
  source 1..120: mol_type = other DNA
taattctgataccagatatgtgggggcttatctccacacaccaagcaattctccagcaatactaagtgttctgtaatttaactcaattttgacatcatcatctacctggagatagcatca

SEQ ID NO: 4732 - DNA, 120 bp, synthetic construct
  source 1..120: mol_type = other DNA
tcccatgttcatggagagactgactgtgcttggcattccttttctaattttcctagacacagccactcagtattttaaaaatgcatttttccaggtagctactaccaatcagtagtacct

SEQ ID NO: 4733 - DNA, 120 bp, synthetic construct
  source 1..120: mol_type = other DNA
tcagaaggaggaaggattactttttgcagtaattttgatcataatgcagtgaaaaatctgatctagattggtacaaaagggaaggggcccagaaaatttggagacaaagctgtggtagtc

SEQ ID NO: 4734 - DNA, 120 bp, synthetic construct
  source 1..120: mol_type = other DNA
gagttttggatttgaggacattgttgagatgaggaaggcagaagtcatagagaaaggcagacttattaagagtcctgttttgattgtgtttgttaggttggtggtatctgagtgaagatg

SEQ ID NO: 4735 - DNA, 120 bp, synthetic construct
  source 1..120: mol_type = other DNA
ggagggaaagaacaagaccaagccttgagctgatccatgaatttatatatttataaggaaaggtgatctttatgctccactataacaaactgcaggaacagataagctgtccactcttca

SEQ ID NO: 4736 - DNA, 120 bp, synthetic construct
  source 1..120: mol_type = other DNA
agatgcagttcctgaactcaggagggcggagtttcatgcatggactctagtaatccaaggatggcctgcaagactccattctttgatgttatatccaaaattatttatcagcatatagat

SEQ ID NO: 4737 - DNA, 120 bp, synthetic construct
  source 1..120: mol_type = other DNA
tataaggtggggcctttgaacaggaaacaactatcaaagctctgcaatagagaaaattctcaatactgtaaagataattttgatgtgctggacttctgggccagaagaggtttcctgaga

SEQ ID NO: 4738 - DNA, 120 bp, synthetic construct
  source 1..120: mol_type = other DNA
tcttctaagctactgcattcccttattctattaacatggctatcttgggactataccgtacttccttttgcaacccagttgacatgcaggtatacgtaaatttggtatttgcctgctttc

SEQ ID NO: 4739 - DNA, 120 bp, synthetic construct
  source 1..120: mol_type = other DNA
ttaccagtcactgtaggaaagtgtttgtccttacaattgcaaaccttccaagcactgtagttgataagagttcaaacagtcacgtaaccccttttctaaatacagagcttcctgctacaa

SEQ ID NO: 4740 - DNA, 120 bp, synthetic construct
  source 1..120: mol_type = other DNA
tagttgtattggtaaactggtgtccctgaattatacaggatattcctctcactacagagtgagctaagcatatccttcagaagttaccttcattttaggttggctcttacaggcttagga

SEQ ID NO: 4741 - DNA, 120 bp, synthetic construct
  source 1..120: mol_type = other DNA
ttctttgattagtggtgaggctgacctttccctgttcataccctttgcccattcttcgagtatttgtcttttttggcatatagctgccatttatacacgtggtcacaaaccacatgatat

SEQ ID NO: 4742 - DNA, 120 bp, synthetic construct
  source 1..120: mol_type = other DNA
gaaagagctacacaaatgtaaattgctcttaaagaggaaaatctctgattattctgaatctctgtacgtaaactcagtgcccagaagatgcatatatgagctgtcacttgggccgtctgt

SEQ ID NO: 4743 - DNA, 120 bp, synthetic construct
  source 1..120: mol_type = other DNA
ttttgctcacgtgcacaaggaaacatacataagagtatttgttgcagtattgatgggagaaagaattggaaatagcagcagactgcagaagaaattgagctatagtcatgcagcggatga

SEQ ID NO: 4744 - DNA, 120 bp, synthetic construct
  source 1..120: mol_type = other DNA
gtggcattaaaaaaccacagaagtagatttgttaaggatgtaaccaaaaagagctagaaggaactttagaaataattttacgtcgtctgctggtttcatcttgaagaatttggggcatga

SEQ ID NO: 4745 - DNA, 120 bp, synthetic construct
  source 1..120: mol_type = other DNA
cacatagctgctgagtagcagaaccaggattctaatccagttccttctaactacagcatgacaaattgtgcttagcatgaactaagcactttgctcagttgtgaattcacagatgttctt

SEQ ID NO: 4746 - DNA, 120 bp, synthetic construct
  source 1..120: mol_type = other DNA
gtctatgaagtagctgccctttcaccactgtacgttcttaataaacttgcttttgctttgcactgcgcactcaccttgaattatttcttgcatgaaatctaagaatcctcccttggatct

SEQ ID NO: 4747 - DNA, 120 bp, synthetic construct
  source 1..120: mol_type = other DNA
acacagagtgctgattggtgtatttacaatcccttagctagacataaaggttctccaagtccccactagattagctagatacggagcactgataggtgcatttacaaaccttgagctaga

SEQ ID NO: 4748 - DNA, 120 bp, synthetic construct
  source 1..120: mol_type = other DNA
gtagctactttatgttcacctgtcttaggtaaacagctgatttacctgtgaacatgtaattgactattatcctacttgatccttttcttttgcaacttgtggattaccataccctacctc

SEQ ID NO: 4749 - DNA, 120 bp, synthetic construct
  source 1..120: mol_type = other DNA
ggtctattgtgccttcagatataaactgatgacagtgtgaagtcattacagtgagacatttaaaacctaaacatttagaacatgaagtttgagtatgatatgacatgcaatgacctgaga

SEQ ID NO: 4750 - DNA, 120 bp, synthetic construct
  source 1..120: mol_type = other DNA
actgtggactgtcttcttgtaatcttgtggccatgtacttcaaatgatgaattttacaaaaagttaagtgtcccgcacttgcagtaataatctggagctttttatagcgtactcccttgg

SEQ ID NO: 4751 - DNA, 120 bp, synthetic construct
  source 1..120: mol_type = other DNA
accacaagccaaggaatgtagaaagcctttagaagctgaaaacagtgaggaaacagattctccctggcgagcttccagaaagaatcaatcttgatcatatttttactttagcctaattac

SEQ ID NO: 4752 - DNA, 120 bp, synthetic construct
  source 1..120: mol_type = other DNA
gagctatttaaggtggttagtattacaggtgcatcgtaaattgaagaaggttgagcagttaaatgcttgaagatgagaatgttcttttgaggagagatgaaggctttcctgaagtccgtg

SEQ ID NO: 4753 - DNA, 120 bp, synthetic construct
  source 1..120: mol_type = other DNA
tgtcctttgtcgaatttctaagccatcccttaactccaagcttctacctgtatgtgaacgaattgggtgtatatttcctacaaggctgcactctgaaataatgcagataaattctgtgca

SEQ ID NO: 4754 - DNA, 120 bp, synthetic construct
  source 1..120: mol_type = other DNA
cccttctactaaaattgtttccttaaatatctctggtgatatcttagtttcagatccaaaggctctgacttcctcaccctatttgacccacatactgtgatgtgtttgctctcgacagat

SEQ ID NO: 4755 - DNA, 120 bp, synthetic construct
  source 1..120: mol_type = other DNA
tacctccccacctccacaaaaggctgatgattgtgcttcaaagtaaatggaagtggaccgaggagtatttatttatttcctgagctgaaatcagtgttgtccatctcatttaaaatgcaa

SEQ ID NO: 4756 - DNA, 120 bp, synthetic construct
  source 1..120: mol_type = other DNA
ctttggaattgaaggaagctccttcagaactttcttttgtatttaactgtgctaggaacaaattctcagtctttgtttatctgcaaatgtctattttgccttcatcttttgaaagatggg

SEQ ID NO: 4757 - DNA, 120 bp, synthetic construct
  source 1..120: mol_type = other DNA
cctgctaaatgcctttgtcaaggcactcagagagtttctcaagactatgttttccccacagaatgggttacactttcctgggcttttactgtctgtgtcataattttttgttaaaactgg

SEQ ID NO: 4758 - DNA, 120 bp, synthetic construct
  source 1..120: mol_type = other DNA
taaagattaataggactctgaagtacctccagatcacctgctgttaagtcagagtcacatctcacaaatacagctctagtttcagttccatataacattccttggcctcatatccaaagg

SEQ ID NO: 4759 - DNA, 120 bp, synthetic construct
  source 1..120: mol_type = other DNA
acagatttcttaacttggagcccaacttcccagaacatgattccgatatacttctgtgactagaatttatgtgttttaaacacaacttaggaaagtgggccaaggatgttggtagaggat

SEQ ID NO: 4760 - DNA, 120 bp, synthetic construct
  source 1..120: mol_type = other DNA
ttttgacttttgtgaaactctagacaagtcggaatctgttggttgccctcatctatgtgtttgtgtgaattatttttccttcttcaaggagggcatgagacaaggaactatggctgttgt

SEQ ID NO: 4761 - DNA, 120 bp, synthetic construct
  source 1..120: mol_type = other DNA
tcaattcatagcagaagtctcttttctgctttgtctttgagtggtttgcttgcaaagttccaggtaattgtatgcacatcaacaatggctccctctcaagatatatgtgagctgatgtga

SEQ ID NO: 4762 - DNA, 120 bp, synthetic construct
  source 1..120: mol_type = other DNA
cagcagatgggcgcctaagcaaaaacaaacctgcctcaacttcagaccatctgctctgttttaaagtatactgttttcacatctcttggtggaagaacagcttttctcttaatttatatc

SEQ ID NO: 4763 - DNA, 120 bp, synthetic construct
  source 1..120: mol_type = other DNA
gcagaacacgttgattaatcttcagcaggaatatggtgtatctagattctgtggcagtcatgccaatgaagtagaaatatctttgctggcagacagtgatctccaggatatatcagtaaa

SEQ ID NO: 4764 - DNA, 120 bp, synthetic construct
  source 1..120: mol_type = other DNA
aaatcggtgttgtctccatatgaaaagtattattaccctcctgcaagcttgctttaggcactattctgggtagaatagacagacacagatgtttagacagactgaatctctttctctgat

SEQ ID NO: 4765 - DNA, 120 bp, synthetic construct
  source 1..120: mol_type = other DNA
agagaaagcatggtgaagatgactcagaacaaaatgggtggcgtttgtaagacacagggaattgcctttgaagattgttggcgtgtttatttatgctaactcccacgatctgaaaaaata

SEQ ID NO: 4766 - DNA, 120 bp, synthetic construct
  source 1..120: mol_type = other DNA
taaattccagagtagaagagagtccttttcctagcctttgaacttttatatgaggattttagaaagaaagcccttgtctggccaactgcagactttaaatgcagttagctgtgccagatt

SEQ ID NO: 4767 - DNA, 120 bp, synthetic construct
  source 1..120: mol_type = other DNA
catactggatcctgcttgtctaagcgaaagcatacatgattaataacttacggttctaactcaccaatcagttctttttcattatttattatgatttattggaaaacatttccataaact

SEQ ID NO: 4768 - DNA, 120 bp, synthetic construct
  source 1..120: mol_type = other DNA
ctctgtttatcctgttcacacgagtgatagtaataatccttactatagatgaccacaggaattatagatacagctcccagggcaatgcgtatcagagtaagctgtgtctccttacatttt

SEQ ID NO: 4769 - DNA, 120 bp, synthetic construct
  source 1..120: mol_type = other DNA
ctagcatatttgtggtgtcttgaaaactaaaaaaatatatccaagcttgatgtgatctgtgtcactaggcctcgtgcttatgtctgttgtttaaaaccgacctttctttgagcgtttctg

SEQ ID NO: 4770 - DNA, 120 bp, synthetic construct
  source 1..120: mol_type = other DNA
accttctcagttatgcttaagttatgaaagagtaaaacaattctcaatttagtttcatttctacctgaaataacccctcctgatttttaaacatccctgagtcatatcaactttgatatg

SEQ ID NO: 4771 - DNA, 120 bp, synthetic construct
  source 1..120: mol_type = other DNA
gtaccgtatattagggaaaaatgaaagtttctctcatactgctgagtatttttgattatacccagaaatgatattcattcctagcttgccacaggtgatgccagttaatgagcacagccc

SEQ ID NO: 4772 - DNA, 120 bp, synthetic construct
  source 1..120: mol_type = other DNA
ttagcttttattcttattaaaatcatgtcaatagtaaataggccaagacctgtctatctcagtagctgcccacagaagctttcagatcttgaggatggagacagtacacaggcaacgaga

SEQ ID NO: 4773 - DNA, 120 bp, synthetic construct
  source 1..120: mol_type = other DNA
ggcgttgctttggtttaatgccatgagtccaatatatggcttgtatattctgttgaggacagcgtattttaaaatacacgttgagtgtcctttctgtctttcgggtgaattatttctggg

SEQ ID NO: 4774 - DNA, 120 bp, synthetic construct
  source 1..120: mol_type = other DNA
ttacaatgacttaattattaacagaggtatagatcagactcagacatgtccagcttttatgaaaaatggagctgtagaatgtggagtagtaaaaaacttgtgttggctgggcacggtggc

SEQ ID NO: 4775 - DNA, 120 bp, synthetic construct
  source 1..120: mol_type = other DNA
tgttgtgggaatcaaataatataagtaaagtgtgtagaacaatcgtggcatgcaagaagcactatgagtatgctgtcatcattgtgatggtctctgcattgagtatgcctgagtaagctc

SEQ ID NO: 4776 - DNA, 120 bp, synthetic construct
  source 1..120: mol_type = other DNA
ccggtgtgccattatgtgggctaccctatcatggatgtgctgagctcgagtaagatgttattgacaagatcaaatggaagtcagaacaatctagttgaaaaatgactgaaaagtctactt

SEQ ID NO: 4777 - DNA, 120 bp, synthetic construct
  source 1..120: mol_type = other DNA
tttttaaaaaatcaggacacaaaatgtccagaggaagagaagattcagatttagttgatccaagctctaggtgagatttctgtagttctctttgccctgttctgtgtttgcttggttcac

SEQ ID NO: 4778 - DNA, 120 bp, synthetic construct
  source 1..120: mol_type = other DNA
tgtctcattcgtacagtgttcattcaacaaaaatagattgagttgcttttgtgcattctggagctagggggacaggtatgaataacaatgcctccttgctcttgagaatcttagcaatct

SEQ ID NO: 4779 - DNA, 120 bp, synthetic construct
  source 1..120: mol_type = other DNA
agcaaaaacaacaattaacactccttcctgcatttttttggtgtgttttcttcaaagcactgaacaccttctgaagactatgtattcgcggtctgtttattgccttcctatccccattag

SEQ ID NO: 4780 - DNA, 120 bp, synthetic construct
  source 1..120: mol_type = other DNA
catacaacctctttagtgattgttgcagtcacacattctgagaagatacacttttttgcaagtaatccctgaagtgtgagagaagggcaaagaccagcaggatctacataacttgaggat

SEQ ID NO: 4781 - DNA, 120 bp, synthetic construct
  source 1..120: mol_type = other DNA
ctggtgttaattgcatttgttcactctattgatatatgatgagtaaccacgttctagattctgtgtagagtaaatagtgagagcgagctgaattgctacagaggcctcttccagaatagg

SEQ ID NO: 4782 - DNA, 120 bp, synthetic construct
  source 1..120: mol_type = other DNA
tgcacgctgtccctccagcagaccgttcctaatttaactgctatcctgtgacctcagttcttacaaaggaatctaaaactgtaacctttctttatttctggctccaattagttctttata

SEQ ID NO: 4783 - DNA, 120 bp, synthetic construct
  source 1..120: mol_type = other DNA
tgagattttgattgggatgcactgacttgttagaatgtgtaaaaatttttctgtattcctctgtgtacctgccagtttttcatagtatatagatctaaaatgtaagactttattatatga

SEQ ID NO: 4784 - DNA, 120 bp, synthetic construct
  source 1..120: mol_type = other DNA
tactgagtcggcttcattgtatgacagatctaaaaaaactgggagagttctgcctaatactgcaaaaccagagtaaagttaggaaattgggctaatgtttaattaagtcaatcactggcc

SEQ ID NO: 4785 - DNA, 120 bp, synthetic construct
  source 1..120: mol_type = other DNA
tgtggatttcatttaattctgtcctaaatgacagtttgacgacatacttaacaaatccctaggcaccaaggatttggggttttgttgggaagaaaacatctaggccagaaacgatgtact

SEQ ID NO: 4786 - DNA, 120 bp, synthetic construct
  source 1..120: mol_type = other DNA
cagaagcttagcagaaagcagatcaaaagctcagcagtatagtaagatgtgactatcgattctatgaaacaatactaataatgtctcatgaggcctaatcttgtgctggggggccaaaaa

SEQ ID NO: 4787 - DNA, 120 bp, synthetic construct
  source 1..120: mol_type = other DNA
tgcgagtaactggattcccaaactgtgatggatttggagctacaatagtgagattcaagattactgtcaatcctaaggaatattaatacttataaaaccacactgggttaccatagtaaa

SEQ ID NO: 4788 - DNA, 120 bp, synthetic construct
  source 1..120: mol_type = other DNA
taagactgtcttacagaaagagtaaaagctataggatggtaaagttgtatgtgtggtaaagttgaatctaaagaaagctggtataactatgttaatatctgagaaaagggctgggcgctg

SEQ ID NO: 4789 - DNA, 120 bp, synthetic construct
  source 1..120: mol_type = other DNA
cagtttaccaaccctaacactagaagtgggaaatatcaactgtcttatatttattaaatgaaatgaatttataattaaagccttctcacaaagaagtccaggcccagatggcctcactgg

SEQ ID NO: 4790 - DNA, 120 bp, synthetic construct
  source 1..120: mol_type = other DNA
caaaatcccagcaggttttcttttagtgtgcatgaaagttggaaaagccagttctaaatgaagaagagcaagattatcaaatacaactttgaagaaaagaacaaggttagagtctttgac

SEQ ID NO: 4791 - DNA, 120 bp, synthetic construct
  source 1..120: mol_type = other DNA
gaagatttgcgtgtgatacatttatatgtcatttgttttctagtatgtaaaatgcagataataagattacatgtaaaatgtatggctcaaagcctgccacatggtaactgctttaactta

SEQ ID NO: 4792 - DNA, 120 bp, synthetic construct
  source 1..120: mol_type = other DNA
agagaataaatataaaaattcgcccttttagaggtagaaaagtgcacaattgcactgtgctggacatgccttttttgcttctgtttgccccaggatctaaaggaatggattcatcactcc

SEQ ID NO: 4793 - DNA, 120 bp, synthetic construct
  source 1..120: mol_type = other DNA
acatgaagggtgtgaagcaagccacaattcccacaggacaccaattatacattctatagatgggaggtgagttaaggaaacttacctttgagattgagtatgtctctcaatgttgaaatt

SEQ ID NO: 4794 - DNA, 120 bp, synthetic construct
  source 1..120: mol_type = other DNA
agccttatataatctgaagcagtgaaggtgaatgaccatgtagaaaaacgcagttacaggattctggaggctaattcttagagcccacattgtcacaagttgtgcaaaaagttacattgc

SEQ ID NO: 4795 - DNA, 120 bp, synthetic construct
  source 1..120: mol_type = other DNA
tacaacatagccctctgtcttttcccatccttgcatcccttcacttccattacactatttctgtgccatatctggattggtattgaccaaccactcaagctgcttttacttactttgtaa

SEQ ID NO: 4796 - DNA, 120 bp, synthetic construct
  source 1..120: mol_type = other DNA
acttctctgccccttgagttaaattagaaccggtcccttgacctttctcgtattccaagagtgaaataccccacagacatttcaagtcatacagatctcatttcagtaattaaaatgccc

SEQ ID NO: 4797 - DNA, 120 bp, synthetic construct
  source 1..120: mol_type = other DNA
tcataaatagaaccattgttaagtcagggaccttcttgtaaatccccttcggagactggtcattgttttgttttgggacagtgacctgttttaacttctgttatacttgcttgtctaggg

SEQ ID NO: 4798 - DNA, 120 bp, synthetic construct
  source 1..120: mol_type = other DNA
gatgatctgaatagagggcaggctttgtatgtcttcaagacatcagtatccatttgccctctgtagaaatcaatgtgttgcttttgatttagagaaattctctatcgagacaagctggga

SEQ ID NO: 4799 - DNA, 120 bp, synthetic construct
  source 1..120: mol_type = other DNA
tggtggtgaaatcactttgttttctcaacataatgaagtttacctgatatttcctcacaaaggagaggttaccggttggagacttatggagaatcctagcatcttgatacgtggagagga

SEQ ID NO: 4800 - DNA, 120 bp, synthetic construct
  source 1..120: mol_type = other DNA
caggttttgcttgtatttggagctccatctgatgtgtcaattccggattaatctaaacctgggacactgagttactgacatctgcagttttagcctaaagaactaaaatttccacctttg

SEQ ID NO: 4801 - DNA, 120 bp, synthetic construct
  source 1..120: mol_type = other DNA
tggctgaccactcttttttttgttaatacctactacatttttaaagtggttcaacttagatacctgacaaaatcaggctgagaaaattgtctgaaggaaaatctcccaaacctagcttaa

SEQ ID NO: 4802 - DNA, 120 bp, synthetic construct
  source 1..120: mol_type = other DNA
aggttgtcaatggaatcactgaaagtagagcagcatgttttcacagaaaaaggaagaaactaacgtcaaaacatttttaaagagttttgcttgctacggcttttctctagcatgtagttg

SEQ ID NO: 4803 - DNA, 120 bp, synthetic construct
  source 1..120: mol_type = other DNA
aaaagattgctttgaagaaaaggaagcgcgttcttgtcagtctgttgaattttgtggttaaatccatcatgtttaataaaactgaaccaggtgcattgtgggacaccctaacctggacct

SEQ ID NO: 4804 - DNA, 120 bp, synthetic construct
  source 1..120: mol_type = other DNA
gacaatgttaaactggcctttgcaggcacctttatcttcaactgaggccaggattctcatggattgttacagtccttcggtgaccctgttgtgtgattcactacttattttattttttaa

SEQ ID NO: 4805 - DNA, 120 bp, synthetic construct
  source 1..120: mol_type = other DNA
aggcacaggtcagtatcatcactcttattctgaaaatttttaaagacctccttttcctgcaaaaagaattacaaacttctcgtcataatattttgtaccttccatggtctttccctgatc

SEQ ID NO: 4806 - DNA, 120 bp, synthetic construct
  source 1..120: mol_type = other DNA
atccttcaattacactaatagaaaaaaactactggaggctttcctattaaaaaggctttataaggcagggaagactagagagagggaatgttgtattccgagatggggcagcatgaaagc

SEQ ID NO: 4807 - DNA, 120 bp, synthetic construct
  source 1..120: mol_type = other DNA
ccgcatgcaggtaggcacctggaatacaatggtgactaaggtaccatggttcccacccagtggaaaccataatataatgggaaagagattattattaagtacattatgagtaaataacta

SEQ ID NO: 4808 - DNA, 120 bp, synthetic construct
  source 1..120: mol_type = other DNA
ttctttttcttcttcaccaggtttctcttttaccacatctgctcctcctttcacccagttattcactaggcttctcttgggcacagttttcttattctttgcctcatgtatatatgcaca

SEQ ID NO: 4809 - DNA, 120 bp, synthetic construct
  source 1..120: mol_type = other DNA
cggcctcattccattcttataagagctttattaaattataaaagcaatacatattctatacgatttggaagttgcagaagaaaaattctgatcacactaataggaaaaaactgttggagg

SEQ ID NO: 4810 - DNA, 120 bp, synthetic construct
  source 1..120: mol_type = other DNA
gaaaacaattccacattctacagcaatcaaaacacatgaactgcatgagctaataaatgtgagggtttcttttaagacaactactctctatacataatagttgggttaagagcctcaact

SEQ ID NO: 4811 - DNA, 120 bp, synthetic construct
  source 1..120: mol_type = other DNA
gcagatgttaagcacaatttatatttaaagtctataaacataggggattatcgtgggctacctgtcttgaggtcagactgacatttctgctgtggctaaaaacaagtttagggaccctgg

SEQ ID NO: 4812 - DNA, 120 bp, synthetic construct
  source 1..120: mol_type = other DNA
ttaaaaatctgggctttgtgcagaagcatccagattttcaggaaaacagtgagaacagtagggatagatggatgccaaattacaggtcagaataagactctgctggtacaactataaacc

SEQ ID NO: 4813 - DNA, 120 bp, synthetic construct
  source 1..120: mol_type = other DNA
ataaagaccaagtagaaaaaagaatggaaggaaatagttcaacttttattaagttgttcccttcaagagtgagatcaagctatcctctcactccactccccctcttaaaagtatttaccc

SEQ ID NO: 4814 - DNA, 120 bp, synthetic construct
  source 1..120: mol_type = other DNA
cttacaaaatattgcttggtaattcacttattcactcatgcaaaatgaatttgtggtgagggcctataataggctagcaggagctggagaaacctcagtaaacaaaacataccaagtccc

SEQ ID NO: 4815 - DNA, 120 bp, synthetic construct
  source 1..120: mol_type = other DNA
ttgtgtgttgggaatcattggcaaagaaaatagattttaattaagaggaactttttcatgtttcacatatccgtatatctgcaggggaggcttgttggtggaccatacaccctgcctcta

SEQ ID NO: 4816 - DNA, 120 bp, synthetic construct
  source 1..120: mol_type = other DNA
ggcattgtaaactttatatgaatattcacatgaaaaatcccaggcatcacagtgtgtgatgattgaaacaaaaatctgaaatagggcatgtggcaatttagcagataccgggttatagaa

SEQ ID NO: 4817 - DNA, 120 bp, synthetic construct
  source 1..120: mol_type = other DNA
aggatggcatcattatgcactgaaaaatggaaaattcagacctcacagggccaggacttctaacatctattctacaactaactacctgagaaagtcatctaattctctgaactctggctt

SEQ ID NO: 4818 - DNA, 120 bp, synthetic construct
  source 1..120: mol_type = other DNA
tatggtgtggattcaaagacttatttggaggactcagtgaaaaggatctagagaaactgaaagatcaagaagtgagttcgtgaaaggactttgggataggcagagggagttgaaataatc

SEQ ID NO: 4819 - DNA, 120 bp, synthetic construct
  source 1..120: mol_type = other DNA
ctaagattaaactaatagtgcatggggtacactaatacaactattacaatgctaaattgatgaaagctggttgagagggttggttttcaccctgtcctctgagaacatgccttgtggaca

SEQ ID NO: 4820 - DNA, 120 bp, synthetic construct
  source 1..120: mol_type = other DNA
atcactccagtaagcccaaatgttttcaatctgtggattggattgtttgcactggaaatgtagatttccaactgattttctactgatcaggttacttaatgaaacaggccaagtttttcg

SEQ ID NO: 4821 - DNA, 120 bp, synthetic construct
  source 1..120: mol_type = other DNA
tatcgtgtcccttccatttctgagatgttgcacttctatcgtgtaatgtcttgttactcttggatcagcagtcttgattgacaacccctgcaactactctgcattccaatctagattttt

SEQ ID NO: 4822 - DNA, 120 bp, synthetic construct
  source 1..120: mol_type = other DNA
gatttggaaattgcctttttaactccgtcacctattttattactgctgtaaactccttattacctaaaatcaaggtcgttggtttggcgccagcctttgtctgtggacctatcagtcatt

SEQ ID NO: 4823 - DNA, 120 bp, synthetic construct
  source 1..120: mol_type = other DNA
acatgagctttcacttggacacagatatgagcacgggtattttgaattattttcagagtttggttaaaatcggtgtcattcacatggatttgtatgtgtgtgtgcctgtgcacgtgcttt

SEQ ID NO: 4824 - DNA, 120 bp, synthetic construct
  source 1..120: mol_type = other DNA
ggtgacttgagaatagtatctttatgttaaagagacccgtaggatgtttaaaaggcctgtggagtacacctaaggtgactactttaggcgtgactgatcatctaaataagatggtcaaga

SEQ ID NO: 4825 - DNA, 120 bp, synthetic construct
  source 1..120: mol_type = other DNA
gaaacagatgttctctatgaacataaccaaatcagcaacgttaagtttgcattcctagaagcacttacatgttacagcttaccagagcctgaagtgatgcctccttttgcctcttgatac

SEQ ID NO: 4826 - DNA, 120 bp, synthetic construct
  source 1..120: mol_type = other DNA
gccagtagcatcatacaagatgggctactgacattcattgattcactgaagtgatccatttgttgccccctcttagctttttctcatgttatatttctattacctaccaacagaagaact

SEQ ID NO: 4827 - DNA, 120 bp, synthetic construct
  source 1..120: mol_type = other DNA
acttaagaactagagagatgtcaagcatattctgggaatagcaattattccagagtgattagggggaaaatggaggaaaaggtggaaagtagacaagagaaagatccttagtgccattcc

SEQ ID NO: 4828 - DNA, 120 bp, synthetic construct
  source 1..120: mol_type = other DNA
gtttatttggagttagagcttataagagaccatgccagagtctttggatcctcagtccctgatttgttaaatggaagacagactaagtgtttcttagagctttttcggctgtatctacag

SEQ ID NO: 4829 - DNA, 120 bp, synthetic construct
  source 1..120: mol_type = other DNA
cattgtaaggaacttgggggaggcaaaggatagctcaccccggaagcagcctttatttatttgttatcagtctgtactgggggagacatgcataatgatcatctaaaaatatactttttt

SEQ ID NO: 4830 - DNA, 120 bp, synthetic construct
  source 1..120: mol_type = other DNA
gagatagaatgagttaaagagaagcaagtctggtagttgggaagggatgtgtcagtatcccttgtcaatcatgttttaattattgctttaaaaataggcttttgcacaacagggtaacta

SEQ ID NO: 4831 - DNA, 120 bp, synthetic construct
  source 1..120: mol_type = other DNA
ttaagtcatagtttctgacagtatctggaaataaatgctacatttgcttcccaaaatgtgactcagcaggaaaaagctatgccatgtgtatgcatgacaagatttttacctccatgcccc

SEQ ID NO: 4832 - DNA, 120 bp, synthetic construct
  source 1..120: mol_type = other DNA
tattttcccttgtgcagcaacttgaatagagctattgtggcaaactgagctcctgaataaacaagtaatgcttcttgggatgctggttaggcaagtacttcttgatttgttactaggaag

SEQ ID NO: 4833 - DNA, 120 bp, synthetic construct
  source 1..120: mol_type = other DNA
ggtgactgtaactatttttcagacgattcctacatgcattttaaatacgagggtctagtcatacacgaacacaaccaaacttgattgaggacacgtccgctagtaggactgtcttttttt

SEQ ID NO: 4834 - DNA, 120 bp, synthetic construct
  source 1..120: mol_type = other DNA
gaggactatgaatgactccagtatgcttggctaagtcatctatattgagaataccttgatttcaagtgagtaactctacatacgggaagagtctctggaccaatagaataggaatctgaa

SEQ ID NO: 4835 - DNA, 120 bp, synthetic construct
  source 1..120: mol_type = other DNA
acagagaagacaaaaatctatgaaatattttacagaggttaattctaagccgatatgagtgactgaagcccagggaaaaacacaaactcaagaagccttgagtaaatggtcccgaggccg

SEQ ID NO: 4836 - DNA, 120 bp, synthetic construct
  source 1..120: mol_type = other DNA
caagagaggaactgctcagtcagttggggggcttggtatcttatttttattttacaattgaatctcatcaacaggagaaagtgtgttttgctctgtaaaaatccacgtggagagggtaaa

SEQ ID NO: 4837 - DNA, 120 bp, synthetic construct
  source 1..120: mol_type = other DNA
atgtggatataaaagggcaacttgaaggaactttgtggcgtaggatcttgcctgtgatggtgaacccagtgttggatataaaatactccaggaataaatgctgagtgccatgaagtaaaa

SEQ ID NO: 4838 - DNA, 120 bp, synthetic construct
  source 1..120: mol_type = other DNA
agggatttttattatttgttacaactgcacatgaccagagtgatctcaattttttaaggcattcatagagactggacaaagagcaaagatttctggggtcccctttcgggataccaagca

SEQ ID NO: 4839 - DNA, 120 bp, synthetic construct
  source 1..120: mol_type = other DNA
cgttccctgtggaattaggatattttaccctcttagcacataaatgtgttcactatccaggatgcttccttgagcttcagtgcccagaatgtttgagtgcagttttattatgtaagaatg

SEQ ID NO: 4840 - DNA, 120 bp, synthetic construct
  source 1..120: mol_type = other DNA
ggaaaattccaagggtgtactgtcttccaggaatgaaggacaaagatcagcctacttacttattatcaaacatgggcacagaagatgataggacttgactaaagatcaagagcatataca

SEQ ID NO: 4841 - DNA, 120 bp, synthetic construct
  source 1..120: mol_type = other DNA
caaggagagaggaaagatggatggagggagacaaagagaactcacaggtgcgtggagtaaaggaagtatttaatacaattgcttgaaagttctccaaaattgactaactatattaagcta

SEQ ID NO: 4842 - DNA, 120 bp, synthetic construct
  source 1..120: mol_type = other DNA
cacaagaaagcaggaaatgagaataagaaacctggagtaggacaaatattaagaagaccaaattctgatgtggcctcgagattctcaccccagctatacacatcctgtatataattcctc

SEQ ID NO: 4843 - DNA, 120 bp, synthetic construct
  source 1..120: mol_type = other DNA
ctggagtcaaagcataagattgccaagggcagtggggtgatcaactatgtcaaatgcagttctcccctcaaatatatccacaaatggaatgcccttgaaacaaaatgttttcattctttt

SEQ ID NO: 4844 - DNA, 120 bp, synthetic construct
  source 1..120: mol_type = other DNA
ctctcccatctctttatacgtagtttccccatactactacctaggctagtttttggtgttcgtgtctttcttaccatgtcaaactgtacattcgtggatacaggaactttggtgttttat

SEQ ID NO: 4845 - DNA, 120 bp, synthetic construct
  source 1..120: mol_type = other DNA
tcaccagcaatgaatgggaatcctctccagcatttaatgttgcagtattccaggttttggccattgtaacatatgaatagtgatacctcaagttgcaaatgttgacatatgacattgagc

SEQ ID NO: 4846 - DNA, 120 bp, synthetic construct
  source 1..120: mol_type = other DNA
tctgtgttacatttaggcctatggttcattttgacctaaatttagtggaaggtgtcaggtgtgttctagattagtttttctacacatgtgtataaagttgttccagcactgtttgttgaa

SEQ ID NO: 4847 - DNA, 120 bp, synthetic construct
  source 1..120: mol_type = other DNA
cttctgttacagtcttgagtagtagtggtgaagagaacattcttgatttggtcctgatatagaagcaacaagtttcttatgattgagtatggtgttggctgtaggcattttttgtagatg

SEQ ID NO: 4848 - DNA, 120 bp, synthetic construct
  source 1..120: mol_type = other DNA
gccccagctgttctttcatgtggcttttttggataagccaagtgctctgaagcgctgtgaatttgtctatatttctcttaagggcaaaaaagatctgtcacaatgtagatatgaattcta

SEQ ID NO: 4849 - DNA, 120 bp, synthetic construct
  source 1..120: mol_type = other DNA
tttttaaaaaaagaatgctgagatcctgccattgaattgcaggaggaggctagcactgaagtgactgatttatgatgaagctattaataggtaggcttcatttcctagttacgttgtccc

SEQ ID NO: 4850 - DNA, 120 bp, synthetic construct
  source 1..120: mol_type = other DNA
gtcttttctgggccttagattctaaagatgagctatcctagctgtcaaagtgcctgctttttaccgagaaacaagtggcttgacaactgagataagactcaaattgtgttttatagccaa

SEQ ID NO: 4851 - DNA, 120 bp, synthetic construct
  source 1..120: mol_type = other DNA
tgattagacaaccattgacgctctgcacatgccgtgtaatttacgtagggaactatgtaatagcaaagattccccgcctggcaataaataatcaaaagaagtcatcagattctctatacc

SEQ ID NO: 4852 - DNA, 120 bp, synthetic construct
  source 1..120: mol_type = other DNA
tcagaaaatacgatgagtaaaagtctttaaaaatctgataacattttctttgtggtcaagtaaaagacccttattaaaggtcaaatgtatttaaaaagctgtgtctttgtgtgagtgtgt

SEQ ID NO: 4853 - DNA, 120 bp, synthetic construct
  source 1..120: mol_type = other DNA
ttaatgtcattggtgagggtgcacataaggatttctaaaaactatccatgtgagtactttatgcagcgacagttgaaaatcactgctgtggacactggttattgatggcaaaaactgcaa

SEQ ID NO: 4854 - DNA, 120 bp, synthetic construct
  source 1..120: mol_type = other DNA
atagagaggaagacagttaacactcaggaaagaaagagggcatgtgcatcagctttggtttccaaaataatctcaaggcgttggtgcagtcatgaatttggatacttacagcaattactt

SEQ ID NO: 4855 - DNA, 120 bp, synthetic construct
  source 1..120: mol_type = other DNA
acaccgagaaagtggtggacagtttctcttttgtctatttccttccacctacctttatcattccttagcctcagttcaccagctagcaaacctgagaaataagcaataattttgtacagt

SEQ ID NO: 4856 - DNA, 120 bp, synthetic construct
  source 1..120: mol_type = other DNA
ttattgcctgtctaatggtgatgagaatagtttagaggccttcagtcgtttctgctcctgtgtcccatgcaatgattttgaaaaactttgtccattcttgaacactgtgaggttgacata

SEQ ID NO: 4857 - DNA, 120 bp, synthetic construct
  source 1..120: mol_type = other DNA
ggagtttattttcactttgattacagataatcaatatatagaaaggagatgatcttatggtcagccactggggaaagggaatgctacttgcttctcatagtccagatgtcactgagggga

SEQ ID NO: 4858 - DNA, 120 bp, synthetic construct
  source 1..120: mol_type = other DNA
cataggaaattgctttataaaactccattactattgccaattttagtttttactacatatgattttcttgccttgccctctcatttgggaggaggtgggggtctgggcatgtgagaccag

SEQ ID NO: 4859 - DNA, 120 bp, synthetic construct
  source 1..120: mol_type = other DNA
attggggggcttcccaaattaattgtctttataaacaaattcatgtgaaaatgaacttgttataacattctactgctaattttctatgctaacatctcaagtcaaaaatccaggttagga

SEQ ID NO: 4860 - DNA, 120 bp, synthetic construct
  source 1..120: mol_type = other DNA
aaagtcatgcacgatagaactgtgccatcactctgcaccttagcatggttaaagctcctaaatacacaaccttcagttaacaaggtaatgtgcaaagcaagaacagcttgtattttgatt

SEQ ID NO: 4861 - DNA, 120 bp, synthetic construct
  source 1..120: mol_type = other DNA
cacaacaggaaaatacttgagtctcatggaagacaaaaaccttctactcatggacaaagagaaagctgatgtaaaatcaacagcatttaccttccggtcttccaaggtgagacagaaaat

SEQ ID NO: 4862 - DNA, 120 bp, synthetic construct
  source 1..120: mol_type = other DNA
aggcatcttcacagtgttattcagggctcattgaaaagaaaaaaacgtattactttgttttttcactgctaggaaattcttagtattcaatcgcctttcccatattttgtatgctggccc

SEQ ID NO: 4863 - DNA, 120 bp, synthetic construct
  source 1..120: mol_type = other DNA
tttgatgaatttccttcctaatcatttttcttttgctgtgtaaacgcacacaaccttgcaacatggggatatagggatcaccaacacccctcccccatgcaattgaaatctacattttga

SEQ ID NO: 4864 - DNA, 120 bp, synthetic construct
  source 1..120: mol_type = other DNA
ccaggaaagacagtcagggtaggtctttattctccattgtgaaaatagagaggcacagctggtaaaacctcattatccttgcaaagcatctgtatctatatatttgctctgtggactctt

SEQ ID NO: 4865 - DNA, 120 bp, synthetic construct
  source 1..120: mol_type = other DNA
gaggaacacgctaccttcttcatcatgcgtaatccagcctaataaaaagaagtaaagtgttactaaagagtcagagacataaacacagatgcaggcatgcagacaatgaggaaaatgaga

SEQ ID NO: 4866 - DNA, 120 bp, synthetic construct
  source 1..120: mol_type = other DNA
atcccattactgggtatatacccaaaggaatataaatcagtctattataaagatatacatatacctgtttattgcagcactattcacaatagcaaagacatggaataaacccaaatgccc

SEQ ID NO: 4867 - DNA, 120 bp, synthetic construct
  source 1..120: mol_type = other DNA
gtctaactgtgatctctcaaaatcctccctttcctgcagaaagctgaatagagtccatctttctcatttgattctttctctagtaatcctaatcctcctggaggttgatgaatgcctgtg

SEQ ID NO: 4868 - DNA, 120 bp, synthetic construct
  source 1..120: mol_type = other DNA
acttgtgtttgtatatgattttatggtagttgtggaaggatatacactaatcatttaactcacagtattttagaaagatcaaaatggaagctgtatgagaatatgaagacagagagaaat

SEQ ID NO: 4869 - DNA, 120 bp, synthetic construct
  source 1..120: mol_type = other DNA
actcgagtgtacaggttaataacgcttccatgcttccagccacttcattcatacaggtaatttcatatgatgaagtggttgaaggcagtgaaagtgaaggtgagatttcaagagaaatat

SEQ ID NO: 4870 - DNA, 120 bp, synthetic construct
  source 1..120: mol_type = other DNA
gcaaagctactctaagactgggcataaatatattcagttgggaatggaaagaaaattcttattatctggtgagtcgaagtggtatagggggatttgattctcctgactcagtcttctctg

SEQ ID NO: 4871 - DNA, 120 bp, synthetic construct
  source 1..120: mol_type = other DNA
gtgactgtgtgtgggggggggtatcttaaagaaaagaacaaattagtgtgtgattcttgtgtaatattttacccaattttgattggtagaaaattggttttaaaatagaaggcatttctg

SEQ ID NO: 4872 - DNA, 120 bp, synthetic construct
  source 1..120: mol_type = other DNA
ttccatgttgctagttgacataaggagcatttcctcaattgtcattggggtgtctttgacagtaatgtgaacattcaccagccagtctcaaatacaggatttgagggaagaatcaacaat

SEQ ID NO: 4873 - DNA, 120 bp, synthetic construct
  source 1..120: mol_type = other DNA
cactgataaaatagtgccaattatggttttacagaagatagagaaattcagttatagttgtatgctggtcttttttaacgactgtaagaacgagaatgaacccattgaagccttctgtga

SEQ ID NO: 4874 - DNA, 120 bp, synthetic construct
  source 1..120: mol_type = other DNA
ttactcatagtcaattgataaggaaccttaattacctctacaagatcccttgacctttgccatctaaggtaacctcattgcaggagtgatatcctgttctattcattggtcccacgcaca

SEQ ID NO: 4875 - DNA, 120 bp, synthetic construct
  source 1..120: mol_type = other DNA
cacttacgaatgggattatttgaatgctcataatgggagtagtttgtcagcacagtttttatgggaaatctgaagggatttccagaaattcatcaaggatctgacatttgcaggctgttc

SEQ ID NO: 4876 - DNA, 120 bp, synthetic construct
  source 1..120: mol_type = other DNA
caggcagttaaccttgttgggttgaaacttcagttttctctcttttacatgaggagttgcttatatttttactcaaatctttcagcttccatctgttgccattatactggactttcctcc

SEQ ID NO: 4877 - DNA, 120 bp, synthetic construct
  source 1..120: mol_type = other DNA
ggcctttggtctttcattcagcaagtgttctcacttattttttctaatgtaacttcagcattttttacctcactcaagggtcatagtaattattaaaacagtcatcggccgggagcggtg

SEQ ID NO: 4878 - DNA, 120 bp, synthetic construct
  source 1..120: mol_type = other DNA
gaagaaaaaagaataagagactaaagaaaggaggtacctttggctttttcattgctgctttagggactgtacaggactttaagacatagtgagttcctgaagatcacagctatgcatggg

SEQ ID NO: 4879 - DNA, 120 bp, synthetic construct
  source 1..120: mol_type = other DNA
gtttactgacctttttttcctcctctccccttaggaaaaattggatgtaggggtgagaaaagaagtagatggcatgggaacatctgaaataaaatacggtgactcagtatgctatataca

SEQ ID NO: 4880 - DNA, 120 bp, synthetic construct
  source 1..120: mol_type = other DNA
ttagctttgcagaattatgagccagggtgagctgggttagcattctcaaggtgaacacctaatgttgtcgaaattgtggcagaagaggttgatttggctttaaagcaaatttttcttttg

SEQ ID NO: 4881 - DNA, 120 bp, synthetic construct
  source 1..120: mol_type = other DNA
tcacccagctcacctttttatctcagcttgctgttctttcatctggtctgctggtttattatctcagcatattttcccattgtgaatttccactcctattttatcgaagtcgtaacttgc

SEQ ID NO: 4882 - DNA, 120 bp, synthetic construct
  source 1..120: mol_type = other DNA
tgttgaatgaagataagcacagatgggaacaaacggttctacttatatatagtacacaactgatctgtgctgtcaaaagtctgcaaggtggtgaaccttgtgaaggatagggataggaag

SEQ ID NO: 4883 - DNA, 120 bp, synthetic construct
  source 1..120: mol_type = other DNA
aatggaatggctaatttgtatagggagctgtgcatatgattttatctgaacgtaacagcttcacagtcccctgtacctgccttttgattctatctgttgttatggctcagctgtttgagt

SEQ ID NO: 4884 - DNA, 120 bp, synthetic construct
  source 1..120: mol_type = other DNA
ccaccgtgcccagcctagttcctttttcaatgagggcagtgaagcctatatagctgcggagttttgatatgtatttttttaaagtaattctcataagaactgttcttccacctaataatt

SEQ ID NO: 4885 - DNA, 120 bp, synthetic construct
  source 1..120: mol_type = other DNA
gactgctgtagagtattcagtggcactgcagagataccatttggtaggttaatttaatactagaccaaaaactggttatttgttttgaaaactattttgtgggaaagctactatctcagt

SEQ ID NO: 4886 - DNA, 120 bp, synthetic construct
  source 1..120: mol_type = other DNA
tgaggcaccacacccggcattgatatgttttctttcagtttcccctttgatgacttctttgaccaatagattttttcagtttccaaatattcggggatttcctgagtatttttctgttac

SEQ ID NO: 4887 - DNA, 120 bp, synthetic construct
  source 1..120: mol_type = other DNA
tcaccacccttacacgggagcgtgagagcatatgggttacaaaaaataaaccacctaagaacactttgtcattgtcccatttcctcctttttcttccttcttttggattagctgagtatt

SEQ ID NO: 4888 - DNA, 120 bp, synthetic construct
  source 1..120: mol_type = other DNA
atactttgtttttttgggttgtttcagagggaagggaaatcctgccctgtcactttgtcttggccaaatgtaactcacatctagttgacatgtgcaatgcttatttccagatgagattcc

SEQ ID NO: 4889 - DNA, 120 bp, synthetic construct
  source 1..120: mol_type = other DNA
ccaggagtttatcaacagagagtaaactatattgtattctacgttctatacaacagaatgctacgcaaccagtaaaataataagacttacaaagtagcaaattgggctgagtgtggtggc

SEQ ID NO: 4890 - DNA, 120 bp, synthetic construct
  source 1..120: mol_type = other DNA
tatattatgtagtatattataatgtatagtatagtatatgttatatatactatacaatagcatatataattaatggcatatattagtatatgtattatatgctatactacataatagtat

SEQ ID NO: 4891 - DNA, 120 bp, synthetic construct
  source 1..120: mol_type = other DNA
ttcactgcatgtgaattaaatgggaaaaataattttctactgaaaagtcactcttgcattttgggcacagaaaaacttatagaggcgataaaacttgggggtaggtaggtgaattctgtt

SEQ ID NO: 4892 - DNA, 120 bp, synthetic construct
  source 1..120: mol_type = other DNA
acagtttctgacttgaatcagaatccatgatcactgcttttggagcaggaggacctttctgacatgtcccttttacagtgatgtagggagagagattaatgcctgaaatcatctataaat

SEQ ID NO: 4893 - DNA, 120 bp, synthetic construct
  source 1..120: mol_type = other DNA
gaccaaatgatatatctcatgttctaatatagtcaggagcttcgttggagactacgagggttgatgggataaatcaggcttgttcagctggattcccattcttttcaatgcatcttgtat

SEQ ID NO: 4894 - DNA, 120 bp, synthetic construct
  source 1..120: mol_type = other DNA
tttttagtctgtaagcagaatgacagttttggatgtctgattgtgattttttttttttttaacgttccagggaatgatcaacctcgtgcttgagtgcatagaccgtttgcacgtctacag

SEQ ID NO: 4895 - DNA, 120 bp, synthetic construct
  source 1..120: mol_type = other DNA
tctaatcaatgatctgctccagtcttctctctattctttatatgatctctgtttggcaacttctaagtacacctgacattgattaagcgacagttgctgtggtttaccctgcattcctgt

SEQ ID NO: 4896 - DNA, 120 bp, synthetic construct
  source 1..120: mol_type = other DNA
tttcctgaactttccatacacatcacacctctgggacgttgtctcaccttttccagaattgttgtatatccttcaagacccagttcacatgtcactgtcttttaaagttactcttgataa

SEQ ID NO: 4897 - DNA, 120 bp, synthetic construct
  source 1..120: mol_type = other DNA
tgtggtgatgtttttaacactacatcctaccttcttcacttggtataagatgaatttcttggataaactcgatgcttaagtaaagagttgcatcacctagcctggacagcagaggaaaac

SEQ ID NO: 4898 - DNA, 120 bp, synthetic construct
  source 1..120: mol_type = other DNA
actgcctatctgtcatatagggaatgaatgttatagaggatggtggccaagaagctgaagtgtccatcccaaatgttgactcatctacttcctcaaagggttttatgaactgaattctaa

SEQ ID NO: 4899 - DNA, 120 bp, synthetic construct
  source 1..120: mol_type = other DNA
gtatacagctaaatacttcagatctcaatgacattcatatatggtaaaatttgtggttaatctctttacctccactccttctcttctccagtctttactcagacctcagggagctctcac

SEQ ID NO: 4900 - DNA, 120 bp, synthetic construct
  source 1..120: mol_type = other DNA
tggagaatgacaaaggtagatttgtgagcctactgtttggaatacctcaggatcttagaaacagcgatactcatagttggaaaagcatcactgtggcatgctttcatacatcttttctga

SEQ ID NO: 4901 - DNA, 120 bp, synthetic construct
  source 1..120: mol_type = other DNA
aaaatgtttctagattttagtccaattagcccctcatttttctgtgctgcgtagggcctgttcacttagtgtttccaggctttgaatgtaaattccaagagggatgttgtttcatttcct

SEQ ID NO: 4902 - DNA, 120 bp, synthetic construct
  source 1..120: mol_type = other DNA
tattccctcctctccttgaagatttgctcatcttgctccaaattccaggttcatggactaagatagtcaaaaggctttcctttgatgttggtacattttaggggcttatttggttacatt

SEQ ID NO: 4903 - DNA, 120 bp, synthetic construct
  source 1..120: mol_type = other DNA
ggaagtttccttagttttttggctttggaatacggtcatgtgtcacttactcatgggaacagttctaaggaatacatcttgcaaacatcatggaacttacacaaacctccgtgttatagc

SEQ ID NO: 4904 - DNA, 120 bp, synthetic construct
  source 1..120: mol_type = other DNA
tataggtatgagccactacgcctggtgtaatgcccttttcttaattttgtccttttttccttttctttttgattaaagtagtagttggtagttagcttatatttaaaaaatagtccttga

SEQ ID NO: 4905 - DNA, 120 bp, synthetic construct
  source 1..120: mol_type = other DNA
ttcttacagaataaaattagttctgcttagaacttagtacttctcattcctctgctatattccacccctatcttttgtcccctgtactctgcagtctgtgagtatatctcgatggctggc

SEQ ID NO: 4906 - DNA, 120 bp, synthetic construct
  source 1..120: mol_type = other DNA
gtgagccaccacccctggcctaccagattttcaatagtgattattcttatagagacatctttctctctttaaatatcatattgtctaaacatcttgccatcctcttgtaagcaattatac

SEQ ID NO: 4907 - DNA, 120 bp, synthetic construct
  source 1..120: mol_type = other DNA
gctccctcgactggttgatcagcagattggaaagactggaagcttcttcaggtatgttttctagttttttccttgttgtgatagatcactcctatttttctttgcttcgtatcctttaag

SEQ ID NO: 4908 - DNA, 120 bp, synthetic construct
  source 1..120: mol_type = other DNA
cacataattgacctctctagtgccatagattgcctcagtgacacccaaatgaatctactgctcttccatctgtttgcacagtatttcattatttgcctttctttatcactaatgccctct

SEQ ID NO: 4909 - DNA, 120 bp, synthetic construct
  source 1..120: mol_type = other DNA
caagatggtggcatagattacaaaaatggataaatgtttagggccaagtgtccagaatcactggaaagctacagaagacatttaaaaaatgctcatgtcttctgctggacccagtggtat

SEQ ID NO: 4910 - DNA, 120 bp, synthetic construct
  source 1..120: mol_type = other DNA
tttgctctttacaaagtgcatacatatgcatcatttttttcctctctgtaataagtctgacgttgctgaacacacactctcctcatctcgttagtgccctagctgcagattcaaactgaa

SEQ ID NO: 4911 - DNA, 120 bp, synthetic construct
  source 1..120: mol_type = other DNA
gagtaaaacactgggttctctaggacagggaattgcttgtcaaaacttgtgataaatagcaaatgggaagtcattagacccaaaggatagagaagaaagggtctaatgaacagtaacacc

SEQ ID NO: 4912 - DNA, 120 bp, synthetic construct
  source 1..120: mol_type = other DNA
agtttcagttttcctgacaacgtaattggttttacctcaagcctttcccactcaatgttctatatatgcctgggaccacagtgattaagaagtcagagtgaatacctttacagacaacca

SEQ ID NO: 4913 - DNA, 120 bp, synthetic construct
  source 1..120: mol_type = other DNA
aacacagaaccagctcccggagccaggcagtttggcatcagtatccttgatcttaatcaccccactgtgttctctaaagattcttactgactatgagattatgaatggaaattaaaatat

SEQ ID NO: 4914 - DNA, 120 bp, synthetic construct
  source 1..120: mol_type = other DNA
gtaagtacagttgattgagttgatgtatttcagaatggtggcattttcttctggatgttctcagtccttgaaatacgatttgggggcaagagatagctgactaaaaactgctagtcagga

SEQ ID NO: 4915 - DNA, 120 bp, synthetic construct
  source 1..120: mol_type = other DNA
gattttattttccctttgcatagccctttagggtggcattccacaaaaatcttagttagccagaggaataaaagaggaagtcttgtctcgtaaaacccaccaaatccattaagggcttac

SEQ ID NO: 4916 - DNA, 120 bp, synthetic construct
  source 1..120: mol_type = other DNA
aatcattctatttctatcttctttgctgctatgtttaggagaagcagagctcataggttacaggtatggattttagagttggactggcctaagtccaatcccagctccaccgtttatata

SEQ ID NO: 4917 - DNA, 120 bp, synthetic construct
  source 1..120: mol_type = other DNA
ttctgcacacagtgccctatctaaaattgtgctttttgtcaatgtattgcacaacctttctccttccttccccttactttacacttgctaactacaacaactagactattctatgcacct

SEQ ID NO: 4918 - DNA, 120 bp, synthetic construct
  source 1..120: mol_type = other DNA
attttgctcaaaccctggacctaacacagtgaatggtccatttgatgtactcagcgatgcatgaatgaataaatgaaagagacccccagaaaaccagaaccatgattgttaacagcaaga

SEQ ID NO: 4919 - DNA, 120 bp, synthetic construct
  source 1..120: mol_type = other DNA
ttgactcatcattcaactcttgctatttgttttgggtagacccaattctccttggtaggaagagcaaactaagcttccagttagctcaagctagacgtttctatagttcctactttctca

SEQ ID NO: 4920 - DNA, 120 bp, synthetic construct
  source 1..120: mol_type = other DNA
actagctagaccatgtcttctctacagcaaactgctgcttacttcatttgcatgtttttcttttttcatgatgttggtttcgtaagaagacactcctgttaaccaggggtgctttatgct

SEQ ID NO: 4921 - DNA, 120 bp, synthetic construct
  source 1..120: mol_type = other DNA
gaattctcctctgatcagtgttgtccattcagcatttctctacctcttacgactatcatcactgctccacaaaggagcatattggtaattcttccctgttgatctttgtttcatttgcct

SEQ ID NO: 4922 - DNA, 120 bp, synthetic construct
  source 1..120: mol_type = other DNA
tttgtccagtattattactcctacttgaaatagaggtggaagagagactttccttctcccagagcagaatcacactcctgtatccttcatgaatagagaactaggttccatctaaatcca

SEQ ID NO: 4923 - DNA, 120 bp, synthetic construct
  source 1..120: mol_type = other DNA
ttattttgtttaaacagaatgtgagaaccaacagtccatttatattcattcacttattcatttggcaaacacgagatgaccttccctgggtcagagtgagctgggtgacaaggaggcaaa

SEQ ID NO: 4924 - DNA, 120 bp, synthetic construct
  source 1..120: mol_type = other DNA
gatgggttggggagggaggagaaactggaggagaggatatagtaagaggctattcagtgaaaggagaggatgagtttaggagataaatttggacacaggattaatgaattttaacaatta

SEQ ID NO: 4925 - DNA, 120 bp, synthetic construct
  source 1..120: mol_type = other DNA
ccataatactgttatgatctgccaagcttttaaatttgagaatctaaccataagcttcacgactatagctatttcttggtcttattgaatgtatttagaatttagtggtcaaatgattgt

SEQ ID NO: 4926 - DNA, 120 bp, synthetic construct
  source 1..120: mol_type = other DNA
ttggtcttcgtcttaacttcttggtcttttttcttaatggttatattgtattccacgattggcaatctttttctgaaaaaggctagtgtcttagtcaagtaggactgttgtagcaaaata

SEQ ID NO: 4927 - DNA, 120 bp, synthetic construct
  source 1..120: mol_type = other DNA
gagcaaaagccaaataaccccattaaaaaattgtcaaaagacttgaacagacacttctcaaaagaagacagacaagcagccaacaaacatatgaaaaatagtctacccacatctccaatc

SEQ ID NO: 4928 - DNA, 120 bp, synthetic construct
  source 1..120: mol_type = other DNA
aaaaggcagccgtgtgctctatagcaatcaataatggggagaaaacaaacaaaaacatcgggatagcatgaccagtctattaaaaatgcttttccatttccatgattttattttagcaca

SEQ ID NO: 4929 - DNA, 120 bp, synthetic construct
  source 1..120: mol_type = other DNA
ttaacaaactaagaaatcttgtgtactataaacctcaaggagaatgtcatgatctccatggattgggatgcactgttgcaggattacactttcagtgccaagaagcttcataaactggcc

SEQ ID NO: 4930 - DNA, 120 bp, synthetic construct
  source 1..120: mol_type = other DNA
aactactgtaatgtttaaataactgagtcaaatgtaactggaggaatgcatttgctttgtaaaaaagtgctgctgatgcttgattctgaagggggaattcgaatcagctgacagtgactg

SEQ ID NO: 4931 - DNA, 120 bp, synthetic construct
  source 1..120: mol_type = other DNA
aagagacttgttattgcagacacgtcttgtgaaccatgtcagcaggtaaattcagacagacaatgtcacctgacaggtaccataataaaagaattaatgttcttgccctgtagctgatac

SEQ ID NO: 4932 - DNA, 120 bp, synthetic construct
  source 1..120: mol_type = other DNA
tgtggcgctaagggctttacgtgtattctctactgtttgtgtctgtgctttcctaggaaccatgatgattcacattttatagacgaaaaaactggaactggaagtggaacttagatctaa

SEQ ID NO: 4933 - DNA, 120 bp, synthetic construct
  source 1..120: mol_type = other DNA
tattcaatcctcacaagatgcttaaatttatagatgtttaccagtccattttccaggaggataaatggaggatgagcaaggtttcataactagtgccgggtcacagagctagcaaatgga

SEQ ID NO: 4934 - DNA, 120 bp, synthetic construct
  source 1..120: mol_type = other DNA
tttttggactttccttacatgtgattcccgtctctttaaagcatgagacccaatatttttctgggcgtcagtgaaggttctgctcagtataagaaatggtactatgaattgatggtggac

SEQ ID NO: 4935 - DNA, 120 bp, synthetic construct
  source 1..120: mol_type = other DNA
caagggactgccgagcttgtgaacaatgctgtgtatttaaagagtagatttaaataagagtgtattgcttaggaacaatactgtgtatttaaagagtgcattccgaagcatgaatgaact

SEQ ID NO: 4936 - DNA, 120 bp, synthetic construct
  source 1..120: mol_type = other DNA
acataaaaggtatatatatatttatggggttgaagctgtgttttgcatatttcatctaacctctgaggaatgtggttggagtcctcacagtactgtagactgctttgtacaaaggcgacc

SEQ ID NO: 4937 - DNA, 120 bp, synthetic construct
  source 1..120: mol_type = other DNA
gagtggcagtatttctcggaacaaggattgggctcataagcaaaagtttttagctatgtcttcatttcttctcttcaatttaaactttgcggtgttgctacacttcctctctgtcaatgc

SEQ ID NO: 4938 - DNA, 120 bp, synthetic construct
  source 1..120: mol_type = other DNA
ggagtttagcatttgaaaaagggactgacatgaagtacctgctgtgcctgagactctgttacttgtaaaacattaatcgtcaaaataactaaacaaggtgatggtacttggtgttctgtt

SEQ ID NO: 4939 - DNA, 120 bp, synthetic construct
  source 1..120: mol_type = other DNA
gtgttcctctccacctttattctctttattcctttattctctgcccatggtcaatggtgccaagatggtttcctcacactctttccttttttgctattaccagagggaaacaaattaaag

SEQ ID NO: 4940 - DNA, 120 bp, synthetic construct
  source 1..120: mol_type = other DNA
aatgtataaaagattttagtaagttctttttcgttgttgagattgataaacaattagcgataaggttacctgctttcttcaagttgaagtgacatcagaatctcctttaaagcagcagtc

SEQ ID NO: 4941 - DNA, 120 bp, synthetic construct
  source 1..120: mol_type = other DNA
tttgtgaattagaaaactttaatgtacaccagagataaaattgactctaacgtgcatcctctttagagtacgctttctgcttggagggcgacatggagaattcaaatttcttcctccacc

SEQ ID NO: 4942 - DNA, 120 bp, synthetic construct
  source 1..120: mol_type = other DNA
gccactgtgcctggcctctattctatgttttaagtagttttcccaacccaataaactgattccctaatgtacgaacagattacaacctgaggtgttaaaaacactgttcaaggttgtctt

SEQ ID NO: 4943 - DNA, 120 bp, synthetic construct
  source 1..120: mol_type = other DNA
tggcatcaagtactcttcccttaggggagctgctcaccttctttactgggatgcttagagtatgtttgtcatagttaatagataccatattacttggcaaatagtcacccaacaaatgtt

SEQ ID NO: 4944 - DNA, 120 bp, synthetic construct
  source 1..120: mol_type = other DNA
ctttactctggctaatgaatgctggcccagttggtgtaagagcttggggatgatttctcattttaaattatacattccttggtagtagccccatatccattaaacatcttttggttgtcc

SEQ ID NO: 4945 - DNA, 120 bp, synthetic construct
  source 1..120: mol_type = other DNA
aggcaatttacttttctctcgctcatgtttcttttctttcagttccaattgtgtgtaaaagcggaaacctgtgggcaagtgttcctagttggtttcacaggtagaatgaagactgagaaa

SEQ ID NO: 4946 - DNA, 120 bp, synthetic construct
  source 1..120: mol_type = other DNA
tgggattacaggctggattacaggcatgcccggcctcatcaattcttaaaattgaaggacatgtataaatgctaaataaaagactggaccatctattagtcagtaggaagagagatgcta

SEQ ID NO: 4947 - DNA, 120 bp, synthetic construct
  source 1..120: mol_type = other DNA
ttctttggagcaatttatacttagctacccagcatgctggattttttgaagaagaggaagttatcgttactttgggatatatttcccaggagtatggtgcaagggccctattttgtggaa

SEQ ID NO: 4948 - DNA, 120 bp, synthetic construct
  source 1..120: mol_type = other DNA
ttggaaagaagatgattttattctgtagggggctaaagagcattgaaaaatgcttagcaggaaggtgacagacttatgtctgctttcaaaagaagctctgctgtgaatgtggaaaagcag

SEQ ID NO: 4949 - DNA, 120 bp, synthetic construct
  source 1..120: mol_type = other DNA
tgcctaggacataccaggcatgtttaaggtgtttgggacacatcaaagaacaaaagagaccaaaatctttgcatttttgatcttctaattcacggagacagacaatagcccaataactca

SEQ ID NO: 4950 - DNA, 120 bp, synthetic construct
  source 1..120: mol_type = other DNA
gtgacctgataggatacaggtccacagaatgtgggctgtggaccgggactgtgtcagtcacaaattgttactggtttgtgactaaataagatattaagagcaagtgtttataaacttcta

SEQ ID NO: 4951 - DNA, 120 bp, synthetic construct
  source 1..120: mol_type = other DNA
ccagtaaaggcaaatttgctttttagtgattgctgccagttgacctcttgactttgccccttacctttgcagacggaataatgggactgaaatggaataaaggaaggaatataatttcga

SEQ ID NO: 4952 - DNA, 120 bp, synthetic construct
  source 1..120: mol_type = other DNA
cagagagtaaattctggactgtagaaatctctgtatttgcatttagcatgttgtgcctttgactattacatgtaatccagtgtcatacctaccagctgctggtggctgatttggttaatc

SEQ ID NO: 4953 - DNA, 120 bp, synthetic construct
  source 1..120: mol_type = other DNA
tcagaacagcacagcttggcagatcatgcctgccagatgaccctcaaatgtgaccagtgttaccaaaggttcagtttctggtttagtttttactattttccgaattccagatcttaattt

SEQ ID NO: 4954 - DNA, 120 bp, synthetic construct
  source 1..120: mol_type = other DNA
atcttcccaagttctaaatgttgtgaatctttatgttcagtcctgggccatttcttctcagtgtgcaagctctctgaaggtattctcaccactccactccgtgacttaattaccacacag

SEQ ID NO: 4955 - DNA, 120 bp, synthetic construct
  source 1..120: mol_type = other DNA
gataatgagttaaactttttcctgcctcactattctgttccctttgcctggaaaattcttcatttcacccttaaaggatctcctccctactcatccctcaggccttcatttaaatatcac

SEQ ID NO: 4956 - DNA, 120 bp, synthetic construct
  source 1..120: mol_type = other DNA
caactccaacatgattgccaccctatgctaacctagtctaagctaccattgtttcccacctgaaattataatatcctcccaacagatccaattgaaatacaccctagatactctcttttc

SEQ ID NO: 4957 - DNA, 120 bp, synthetic construct
  source 1..120: mol_type = other DNA
tttgtttcttgcatattctggatgaatgagtagtttgatgtcagatgaattctttgcaaatattttcttgcattctgcaggtagtctcttcactctgttgattctttctctcactgtgca

SEQ ID NO: 4958 - DNA, 120 bp, synthetic construct
  source 1..120: mol_type = other DNA
acattgattttacatgctgcaactttactgaattccatttatcaaataagagttttttgtggcatctttaggttttccttgacataagatcaaattgtcagcaaacaaggataattagac

SEQ ID NO: 4959 - DNA, 120 bp, synthetic construct
  source 1..120: mol_type = other DNA
caaacaaaatgcaatagcacctctagctattctgtactttgtagccagtgtgttcatttcaaacattaaggtgaccatgtcaatctttctatttaaaatcccttaatggggccaggcacg

SEQ ID NO: 4960 - DNA, 120 bp, synthetic construct
  source 1..120: mol_type = other DNA
aggtcaggttcacttctttcgaacatgttgtctgagttccttgactcaacaattttacttctataggtactcatcctttctgtactcccagtatagaagctttccctgtgtgtgggaatt

SEQ ID NO: 4961 - DNA, 120 bp, synthetic construct
  source 1..120: mol_type = other DNA
ccaactaatcctttcttgcttcccttattttgtgcttttctagcctttctatcagctttgcagttccaacttatagtgtgctgtttctctcaccacccttcagcagacttaaaaaaaaaa

SEQ ID NO: 4962 - DNA, 120 bp, synthetic construct
  source 1..120: mol_type = other DNA
aacaaactactgccacagactccaacatggatcaacctgaaaaactttatgccaggtggaaggagccaaacacagaagactccatattgtgtaattctattcctatgaaatgcccaaaac

SEQ ID NO: 4963 - DNA, 120 bp, synthetic construct
  source 1..120: mol_type = other DNA
attgtacttgacaggtaatttttcaacactagctcccctcctgctctccttgctttgaagtccctactatctattatttctgtctttatatctgtgtgtatccactttgcttggccccca

SEQ ID NO: 4964 - DNA, 120 bp, synthetic construct
  source 1..120: mol_type = other DNA
gtgtataagctacatcctcacccacatcttttattttttgactttttaataataaccattctgactggtgtgagatggtatctcattgtggttttagtttacatttttctgatgattggt

SEQ ID NO: 4965 - DNA, 120 bp, synthetic construct
  source 1..120: mol_type = other DNA
acataatgagaaatatttatgaagcatatagtgcaccccaaacttaccccagtatttctttttacccttaacctatagtacacggtcagatcttaatactccagtcaacccttctctgcc

SEQ ID NO: 4966 - DNA, 120 bp, synthetic construct
  source 1..120: mol_type = other DNA
ccatggataagggaggactactgtactacagagtaccttagatatggtggtaactcaataaatatttatggacttatatatttatgcacatgtggtctattatgttcactgtccgtgtga

SEQ ID NO: 4967 - DNA, 120 bp, synthetic construct
  source 1..120: mol_type = other DNA
atggagggtgctggtaaaatcttcctgtcctctggatagtgtctgaataagtgtaatctatatttgttcctgtgagttcgttttttattttattgctgatcaatccctttcaacgtgcac

SEQ ID NO: 4968 - DNA, 120 bp, synthetic construct
  source 1..120: mol_type = other DNA
ttgtgctttcaaggttgtatctcattgctactgctgctgtcttgggttattctggacatagagaagaaatgatcacacttatctctggttttgttttccaggactttgttggcattagga

SEQ ID NO: 4969 - DNA, 120 bp, synthetic construct
  source 1..120: mol_type = other DNA
tatccacattttaagatgagaaaattgaggtagatagatgctgtagtactggtttggcctgctgttctatgacctatgtttgtgatcctggttcacttaagacctcacctttctcatctg

SEQ ID NO: 4970 - DNA, 120 bp, synthetic construct
  source 1..120: mol_type = other DNA
tttttcagggtgacagctcaattatgcctttgttcagtttcttgaaagccaaaaattggaatctacctaacttccaaaagaattcattatcctctcattttcattatcctcatcctttcc

SEQ ID NO: 4971 - DNA, 120 bp, synthetic construct
  source 1..120: mol_type = other DNA
tccttgtgttgctctcacaacgcaacacagcaattatttgagagtgggtgaagatatggaaaagctgagacccttaaatgaaaactatacttggatctgctgacagtctatatactgtct

SEQ ID NO: 4972 - DNA, 120 bp, synthetic construct
  source 1..120: mol_type = other DNA
acaccaattaaaagcttgacatatatagagtgctgcatgcatgaaacatttataaaatttagtatcctttaggacattagacactgatatcgtaaagatcatatccactggatcacaaag

SEQ ID NO: 4973 - DNA, 120 bp, synthetic construct
  source 1..120: mol_type = other DNA
ataagagcaatattaatgaatttggtgggggcgggatgaaatataaacaccaatgatgccaagagcctgttttaaaaacctactaagcaggggaaaaagactctgaaaagattgacaaag

SEQ ID NO: 4974 - DNA, 120 bp, synthetic construct
  source 1..120: mol_type = other DNA
cttgatgtattcaataaggccagtgcagtgagacaagaaaaaaatcatgaggcttggaaaggaaaaacaccaaattgtcatcaatagcaggtaatattgcatagaaaactcaggagaatt

SEQ ID NO: 4975 - DNA, 120 bp, synthetic construct
  source 1..120: mol_type = other DNA
tagagatacttttgtactcatgcaaaacaaacctgaaaagaatattcattgcagcatagattgcaatagcactgaattggaaacaatttaaatttccaccaaattcccatcaatccctat

SEQ ID NO: 4976 - DNA, 120 bp, synthetic construct
  source 1..120: mol_type = other DNA
caacttcaaattcagagtaataattctctctggggataaggaggggattggaattgaggtgtaacagaaggagagcttcaagtgtattcactatttttgatacttttgcataggcctgga

SEQ ID NO: 4977 - DNA, 120 bp, synthetic construct
  source 1..120: mol_type = other DNA
tgggttaaaatcttgataagaaccagtattgttttctaccaggtttacctctgtcatttctgagtttgactctcacttccccttgctgaaagcatgtatttcctgagtgccagggtttta

SEQ ID NO: 4978 - DNA, 120 bp, synthetic construct
  source 1..120: mol_type = other DNA
tgcagctaaactcttgacacactgcatagtttgatgagcctagagttaaattattatagcaataaagaaatacgcaactgaaaaacaatccactcactccaagagcttgtggtcctcact

SEQ ID NO: 4979 - DNA, 120 bp, synthetic construct
  source 1..120: mol_type = other DNA
tttcacagaccagaaatttaaaaatgcaccaatgtgccgtgttcttcattttctctgattgggcctaatttaggatttaaatccaatgagccttgtagccagaatgcagcctgacagtga

SEQ ID NO: 4980 - DNA, 120 bp, synthetic construct
  source 1..120: mol_type = other DNA
cagcctcccatgtattattagttcctagaatagcacctgaaagcattctactgctgaatgaatatttgacggtgaaattgaatacaagatttatgcccctcttattaccagggctgctta

SEQ ID NO: 4981 - DNA, 120 bp, synthetic construct
  source 1..120: mol_type = other DNA
ttcaaagacattttaaaatccaaaagccaagtatagcttttttttccctctctctctcttgaaatgcctccttcttgagagcagtggatacttcatggtcttgtttcaaaggggctgagg

SEQ ID NO: 4982 - DNA, 120 bp, synthetic construct
  source 1..120: mol_type = other DNA
gatgattgatggcacagagaatgtgcatgttaaagaaagggggtaaaagctacttatacctgttcagtaaataaattggaggagagaaaagtctgtcggctgattctggcagaagtttct

SEQ ID NO: 4983 - DNA, 120 bp, synthetic construct
  source 1..120: mol_type = other DNA
aaagtacttcctcattccatgagatattgctagaaagtctaccattaaaaattggtttccagaaagtatcactcctctttgggaatgcatgtatccctcattagggtagcaatggctccg

SEQ ID NO: 4984 - DNA, 120 bp, synthetic construct
  source 1..120: mol_type = other DNA
ctatttaaatgtcagaagtctgtcgaatacaatgatttatagaagttgttaaaaaaaattcccacatggcttctttattaaaaaacaaaagctacagttaattgcccatacaaacagagt

SEQ ID NO: 4985 - DNA, 120 bp, synthetic construct
  source 1..120: mol_type = other DNA
gctggggggtcactgtgaataaaatggacaaactccctgctttcaaggagcttgccttgtaatgatgccagtcatagcccagattagtagtctatttttaagagaatttgtagtttattt

SEQ ID NO: 4986 - DNA, 120 bp, synthetic construct
  source 1..120: mol_type = other DNA
aacacaaagattatgtggcttttcattctgatcagttattagctaaagtgaaaggaacctaggcttgctgtctggtacttcaccactggttaccactgtggtttatggaagaacagtaat

SEQ ID NO: 4987 - DNA, 120 bp, synthetic construct
  source 1..120: mol_type = other DNA
ataaacagcctcgcatcagttcaggtttcaccactgagttactgttgcagatcattttgctctaggcatcagtagatattcaggtatttgggtattaaggtattcaggattaggtattca

SEQ ID NO: 4988 - DNA, 120 bp, synthetic construct
  source 1..120: mol_type = other DNA
agcagccttaagttcttcattgcctgaaaaccactgagggagaaccagcactaatttggctgttcttggaataaaaccctgtccatgaactgtactcagaagttatatgttctctaagtt

SEQ ID NO: 4989 - DNA, 120 bp, synthetic construct
  source 1..120: mol_type = other DNA
cctccagaacagctgatttttgctgatttggggaataagcttgtagtggaggctagtgttttacaaaatcccaccttcatcatttacacacacgtacaggcaacattgaattaattaatg

SEQ ID NO: 4990 - DNA, 120 bp, synthetic construct
  source 1..120: mol_type = other DNA
gaatcagttgctgttaggtgtgcagataccaagaagattcctgtctcaaagagtgtacagtccctgtaaccactgggaagaaagtaaacaataaaaggcttgtaagccaaaaaatggcaa

SEQ ID NO: 4991 - DNA, 120 bp, synthetic construct
  source 1..120: mol_type = other DNA
attattctagcttttacttgtaggtgtgtgatctaaagtgagttagcttttgtgtatgatgtaagcttaagatcaaggttcatttgttgcacagatgaatatccaactgtcccagcacca

SEQ ID NO: 4992 - DNA, 120 bp, synthetic construct
  source 1..120: mol_type = other DNA
aagtatagctttttatagctgtcctttatcacattgaagagattcccttctgttcttagtttgtgggtgattttatcataaatagggtcatgaattttgtccagtgcttttttccccatt

SEQ ID NO: 4993 - DNA, 120 bp, synthetic construct
  source 1..120: mol_type = other DNA
gtgactatgtcttacattaccttaggaaagcatggcattattgagtaggactatggcatcctatggagaacgttaatgttcaatcacagtatcaagagatcctggtttcacagctttgaa

SEQ ID NO: 4994 - DNA, 120 bp, synthetic construct
  source 1..120: mol_type = other DNA
tacagctcagagaatttataaccttgagtcttcaaggaaagagttaattatggtcagtatccaggaaaaggagtacagtttcccctgcacatagaaatatgcattgcaatgccagacaga

SEQ ID NO: 4995 - DNA, 120 bp, synthetic construct
  source 1..120: mol_type = other DNA
cagagctcttcatagagatgctcgagtgccttcacatggaagctgacttcccccagaatgaaaaatcgaagagtgagtacaaggatgctgtaatgcttgttacaattacttctattatat

SEQ ID NO: 4996 - DNA, 120 bp, synthetic construct
  source 1..120: mol_type = other DNA
aatgaaattcagagcatgggtaaagggattggcctcctgtaaaaggaacaacaacacttattcccctaaggttagtaggaaagaagtaaagattgaagacgctgcaaaaacctgtgtaca

SEQ ID NO: 4997 - DNA, 120 bp, synthetic construct
  source 1..120: mol_type = other DNA
gttctggaaattaactaaaggctggccaaaatccagggagtgtttatttgattaaaatgtccaaatgttgctaagaacagcaactagtgatgttttaacttgctcctgccccatcaccct

SEQ ID NO: 4998 - DNA, 120 bp, synthetic construct
  source 1..120: mol_type = other DNA
ctttcaaactttttggtcagttgctgtttgcctcagctgttattgctgcctcacaaagctgcaaggctaacaaattgcctcagatgattttcaacaaatgtccttggagaaacaactatt

SEQ ID NO: 4999 - DNA, 120 bp, synthetic construct
  source 1..120: mol_type = other DNA
gttgagagtgaaggtagtgaaattggacagtaattggggttaagagagcaagtaggggaaaagctaataagggcaagaaagtatggaaagttatatagggaagggaagaatgaaggaatc

SEQ ID NO: 5000 - DNA, 120 bp, synthetic construct
  source 1..120: mol_type = other DNA
gaagggacagattggagggggcagtgcttggaggtagaccagttgggaggctttagaaaaattgtttttttgaacaaggatggtgggaataaaaattaaaagatagatgttgagagattt

SEQ ID NO: 5001 - DNA, 120 bp, synthetic construct
  source 1..120: mol_type = other DNA
cggaagagtcttcgtttctagatacagtttggcaggtatatatggagcacttactttgtggctcaggtgcttgatactacaaggtatgcaaaataagtttgttacggattgcttggatct

SEQ ID NO: 5002 - DNA, 120 bp, synthetic construct
  source 1..120: mol_type = other DNA
agggaagattacaggcatgttttaaggaaacaatttatcggtaatctgttttttgaggaaatactaactctgagtaaaaatttgactttcctgtttgtttagtattgcagcactgagaac

SEQ ID NO: 5003 - DNA, 120 bp, synthetic construct
  source 1..120: mol_type = other DNA
gcagttattgatcgtttcattaattaagcccatgtgatagggagccatctcatgctacagccatggtgtctccactgctttacttcatctcattttaaattgttacatatgacctagctg

SEQ ID NO: 5004 - DNA, 120 bp, synthetic construct
  source 1..120: mol_type = other DNA
cttatttctgtttctcttctcttccttgcttcgtcttccctcttctctctcacccgtacatgtctactcatttcttatgcagagcagttcggatcttttttcttattgacttctttccat

SEQ ID NO: 5005 - DNA, 120 bp, synthetic construct
  source 1..120: mol_type = other DNA
caggaaagcttttgtcctcgtagtctcaaaacccttccctacaacccatgaatgcagtgaaattcaccaagtaagacattgcttttccatggttatcaaaaagataaatcatctttgtct

SEQ ID NO: 5006 - DNA, 120 bp, synthetic construct
  source 1..120: mol_type = other DNA
aaggcagctttaggtttatacctcctgaagatcagatgtaatgaaccagagtgggaagtaacctgaggaagttaaaataacctttactcccagtcaaatgataggcaagaaaggatactc

SEQ ID NO: 5007 - DNA, 120 bp, synthetic construct
  source 1..120: mol_type = other DNA
acgaacacaccatgatgttcacactgaatggtgaaatccttcttgatgattcaggctcagaactggctttcaaggactttgatgttggcgatggtaagtctactatgttttgtgtttttt

SEQ ID NO: 5008 - DNA, 120 bp, synthetic construct
  source 1..120: mol_type = other DNA
tcaaaaaaaaaaaaaaagatggaaggtgttggtgaagcaaggaagacatttactcttcagacatgcactcccaatttggtggccttggccacacagggctgtttatatttaagttagttt

SEQ ID NO: 5009 - DNA, 120 bp, synthetic construct
  source 1..120: mol_type = other DNA
ctcaaaataataataataaccttatttcaaagataagccaacacttcttttcaaaatggcttttgaatatatcctgttatatgtttgcatatggatttgcatataaaaatgtatatatat

SEQ ID NO: 5010 - DNA, 120 bp, synthetic construct
  source 1..120: mol_type = other DNA
tatacccttaatatctattttgaacacttatctccgggtggtgaaattagtgctctaaccctcccctacctgtctccctttctctgatattggttttagggatgtcaaagtattagtggg

SEQ ID NO: 5011 - DNA, 120 bp, synthetic construct
  source 1..120: mol_type = other DNA
cgcacacatacacacagacacatgctgtagatccctgtctggtcagcttagtagacaacatggccaagtatattttgacctttctatctattgcatagtttatacaactgaaatgatttg

SEQ ID NO: 5012 - DNA, 120 bp, synthetic construct
  source 1..120: mol_type = other DNA
ctatgtggcagatcctctgttaggattctcccttctctttggctttttaaaaatctcttcagagtatctttggggaaggcaaaaggattccttcaatcatcacttttaaaagaccccttg

SEQ ID NO: 5013 - DNA, 120 bp, synthetic construct
  source 1..120: mol_type = other DNA
ctgagttcatacgcggttacctcatcagaagccatttttattataagccatgctgcctaataacttagttgacacttcagcttttacccacagaggtatagtagctaatcaagctgtgat

SEQ ID NO: 5014 - DNA, 120 bp, synthetic construct
  source 1..120: mol_type = other DNA
acaaatggcataaagtagagatgccagaaacatagaactgatatagaaacagatgccatagaacatgatgaggtagtgtgtcagtatgttggagaaaagaggcctgtgacaaatggggat

SEQ ID NO: 5015 - DNA, 120 bp, synthetic construct
  source 1..120: mol_type = other DNA
tccactttggaaaactgtgtgacaggatctctgaaaatggaatattcacatacccatgacccagaaattctactccagttttttagctacactagtgtgtctcaacagcaggagatatgt

SEQ ID NO: 5016 - DNA, 120 bp, synthetic construct
  source 1..120: mol_type = other DNA
aacaggattgtgtctgtagagcttttgggactgatctagtaagaagaggagaaattgatgataaaggtataagtatgagaggagataattactcatgttcctgataaggtgaaggggggt

SEQ ID NO: 5017 - DNA, 120 bp, synthetic construct
  source 1..120: mol_type = other DNA
aagaaggccaaccagtgcctttcattctaagtctctggagaaacagaagcaaatcttctagttcatttatgatctaagcccagctcaccaatttaaaaaatcagaacttgagtcccaaat

SEQ ID NO: 5018 - DNA, 120 bp, synthetic construct
  source 1..120: mol_type = other DNA
ggaaaaaaacaataaagacaaaggaatgtcagtgaagaaacgcagatgatatctgatttacccagcatattgacggcatagggaaaaccatgcacagagtcttctctgatgtgaagcgtg

SEQ ID NO: 5019 - DNA, 120 bp, synthetic construct
  source 1..120: mol_type = other DNA
gttatttatgtttggagattaccacattctacagtgtctgctgtggatacgtatcttgtgttgtccatttcaagcttctcagctattctgcaagtaaagatcatctcagaggcccatgat

SEQ ID NO: 5020 - DNA, 120 bp, synthetic construct
  source 1..120: mol_type = other DNA
gaatctccttaattaaaaatcaacacttgtcagaggaaggaagaaatcaggactgtgaggccaacttctatagcagaggaatccaagtacaacccaattctgaaatgattcttgtgtggc

SEQ ID NO: 5021 - DNA, 120 bp, synthetic construct
  source 1..120: mol_type = other DNA
ctcccattttgtagattgtccttctcagcattcttgattcaaattctagcatccatttaactacctatagaaacttagacaaatgacttaacatcttagttgtttcctcatctgaaaaaa

SEQ ID NO: 5022 - DNA, 120 bp, synthetic construct
  source 1..120: mol_type = other DNA
aattaaggtaactggatagaagatcaagaacacaaaggacaggaaggtgggacccatattttacatgtgctgggggagaggcatgattttgtggaaatctgttttattgtgttgaaatac

SEQ ID NO: 5023 - DNA, 120 bp, synthetic construct
  source 1..120: mol_type = other DNA
agtcatttatagagtttgctgagccccaggataaagcatgggcattgggatccaccagacttggatttattttctggtcacttagtagctgtgagggcaagtgatttaaactaagatttt

SEQ ID NO: 5024 - DNA, 120 bp, synthetic construct
  source 1..120: mol_type = other DNA
cactgagcattcgtgctaagcattatacatacaagatctaactttaaaactataaccctaaggggcaggagttacagaagataggattaaagcttagagaatttaagtaacttgccaaag

SEQ ID NO: 5025 - DNA, 120 bp, synthetic construct
  source 1..120: mol_type = other DNA
agaccacgagcacgttttgccctggatctgtgttagtcatcttttactcctactttctgacacatggtagttgcttagtgagtaattatcgaataagtaaatgaatggttgaaagcttct

SEQ ID NO: 5026 - DNA, 120 bp, synthetic construct
  source 1..120: mol_type = other DNA
agctttaagagctgtcacagctgcagatacagctgcaattttttttagttttaactagaaactcatcatttactcttccttgaacacagctggatatgttcttttttcctggttggtggc

SEQ ID NO: 5027 - DNA, 120 bp, synthetic construct
  source 1..120: mol_type = other DNA
aaatttttgcctccaattcttttttttcttgagctatgtatgaggaaatctatagctcagactgtgtctggtgttagtatgtatcaagctctttagccagaaggaggagcaaggcaagtg

SEQ ID NO: 5028 - DNA, 120 bp, synthetic construct
  source 1..120: mol_type = other DNA
ctttttttttttttcttgagctatgtgtgaagaagtctatagctcagactatgtctggggtttgtgcgcatcaagctctttagctagaagaaagatcaaggcaaagggaaccacatccat

SEQ ID NO: 5029 - DNA, 120 bp, synthetic construct
  source 1..120: mol_type = other DNA
gattatgcccaggaaaagccctctcgtctgaaacaaaggttactaatttatacgctgtgattttaaatttgtagttatgtgaggaaggttacagtccagagtaaagggtctcctagtgta

SEQ ID NO: 5030 - DNA, 120 bp, synthetic construct
  source 1..120: mol_type = other DNA
tccttgctgatgatcgggatgactatgatttcttgatgcaaacgtccacggtatgaggttgcagcttttgtcgtttatttctatctgtcactcattatgttttacatctccagtaataca

SEQ ID NO: 5031 - DNA, 120 bp, synthetic construct
  source 1..120: mol_type = other DNA
gacgtttcttagtttgtagtgttagtcctttgtgcctacaatattttcattcacccaaacggttttaaaccaagaagtgaattcttaagtcattcacagacttagacacagttaggattg

SEQ ID NO: 5032 - DNA, 120 bp, synthetic construct
  source 1..120: mol_type = other DNA
aaaacaaaccaaactcaaaccaaaccttcaaaaaagtgaagaaggctatcttccttgcagaataagacaagagaagatctgaccattggcttctaccttttgtgcccatgcatcctctct

SEQ ID NO: 5033 - DNA, 120 bp, synthetic construct
  source 1..120: mol_type = other DNA
ttttttgaacccagaaaaaggtctagtttggtttgagtttttggagagaaggtgcaggtcagttcttacttggttccaacttgttgacctgtcttcattaggtgtgaaatgtagagactt

SEQ ID NO: 5034 - DNA, 120 bp, synthetic construct
  source 1..120: mol_type = other DNA
agctatttcctacaaaagctacttcataaagttggaagaagctactgttttaccagatgaacagatatcaaaggaacacaagaaacacgcgaatggaaggaaacatgactcctccaaagg

SEQ ID NO: 5035 - DNA, 120 bp, synthetic construct
  source 1..120: mol_type = other DNA
ccacagataagcaaaagcagaatgaattcaccacctctggacctgccttagaagaaatgcgtaaggcagtgctaaagctggaagcaaaaggatggtaattactatcatgaaaacatgtaa

SEQ ID NO: 5036 - DNA, 120 bp, synthetic construct
  source 1..120: mol_type = other DNA
ctgagagtgagcagaagtagccacacttagataaaatagacttaattcaaaaaatgtaaaaaagagtcaaagaaggtcattaatagaaaaggatcagttaagaagatataacaattgtga

SEQ ID NO: 5037 - DNA, 120 bp, synthetic construct
  source 1..120: mol_type = other DNA
ccaagactgacttatgaagaaatagaaaatctgagcagattaatagtgagtgaggaaattgtatcaataatgaaaagtctctatcaaagaaaagcccaggactaaatgggggaaaagttg

SEQ ID NO: 5038 - DNA, 120 bp, synthetic construct
  source 1..120: mol_type = other DNA
aatagaaaaaataattctaaatttcttatgaaatcacaaaagaccccaagcagccaaagcaatcttgagcaaaaagaataaagctggaaacatcacactaactgagtttaaaatacacaa

SEQ ID NO: 5039 - DNA, 120 bp, synthetic construct
  source 1..120: mol_type = other DNA
tgatccagaattcctgggtatatatcccaaggaaaggaaatcagtgtgtggaaggaatatctgcacttctataattatcacagcactactcacaatagccaagatagggaatcagcctaa

SEQ ID NO: 5040 - DNA, 120 bp, synthetic construct
  source 1..120: mol_type = other DNA
gccgagattacacacattgcagcagtcattgaactgataggtgagctaatgaatggacttaaagatctgaaaccatgccacctacaatagtggtatgtatggaatactccagtaacataa

SEQ ID NO: 5041 - DNA, 120 bp, synthetic construct
  source 1..120: mol_type = other DNA
tgtctacatggaagacagtgattagagccatggaagtcagaatgaaaaatgataaatgtgaaaacattctagagaagaaatgaatacgcgaaggcccgtggtgggtgatgacatgatgtg

SEQ ID NO: 5042 - DNA, 120 bp, synthetic construct
  source 1..120: mol_type = other DNA
ccaagcggacctaatagacatctacagaactctccaccccaaatcaacagaatatacattcttctcatcaccacatcgcacttactccaaaattgaccacatagttggaagtaaagcact

SEQ ID NO: 5043 - DNA, 120 bp, synthetic construct
  source 1..120: mol_type = other DNA
aactcattttatgaggccagcatcatcctgataccaaagcctggcagagacacaaccaaaaaaaagaactttagaccaatatctctgatgaacatcgatgcaaaaatcctcaataaaata

SEQ ID NO: 5044 - DNA, 120 bp, synthetic construct
  source 1..120: mol_type = other DNA
aaaactactttaaagttcatatggaaccaaaaaagagcctgcattgccaagtcaatcctaagccaaaagaacaaagctggaggcatcatgctacctgacttcaaactatactacaaggct

SEQ ID NO: 5045 - DNA, 120 bp, synthetic construct
  source 1..120: mol_type = other DNA
ccatcccattactgggtatatacccaaaggattataaatcatgctgttataaagacacatgcacacgtatgtttattgtggcattatttacaatatcaaagacttggaaccaacccaaat

SEQ ID NO: 5046 - DNA, 120 bp, synthetic construct
  source 1..120: mol_type = other DNA
gagctatgctggagattaaaattttcatcatcaagaaatcagttgtaattcatctttgagtgtgaatggaatatttgagggcagatgtagagagtgggaagagatggctgaggagagagc

SEQ ID NO: 5047 - DNA, 120 bp, synthetic construct
  source 1..120: mol_type = other DNA
tctcagaagcctgactgatatattcagtcatctattgactattgacttctactgacattttcattggccgactaatagctatcacaaattgaatgcatccatactggactgcttgctctc

SEQ ID NO: 5048 - DNA, 120 bp, synthetic construct
  source 1..120: mol_type = other DNA
agataatggttttcttatggtcccataagaggcaggcatcggtgttgtcaagatcatagataaatgaagaaacttttggcaaagcagagacctctctttctttgacaccagacagaaaga

SEQ ID NO: 5049 - DNA, 120 bp, synthetic construct
  source 1..120: mol_type = other DNA
agttgaagatgccacatgatggtttcttcattcactcttgcgttacttacaatgacaatggcgaataaaaattcagacaagtgcaactgcaatccgacttatgacttagcagagtactgt

SEQ ID NO: 5050 - DNA, 120 bp, synthetic construct
  source 1..120: mol_type = other DNA
tagattagtagttacctagggctaggagcggaacaggactgctaatgggtactaaattccttttgggatgataaaagtgttctaaactcaacttatagttatagttacacaactccatta

SEQ ID NO: 5051 - DNA, 120 bp, synthetic construct
  source 1..120: mol_type = other DNA
gccatagaaaatatatggataggaaaataaaactgaggctaagagtgacacacagtcatttataccacaccgattggtagagttggggcccacattaatttcattcttcctagcagccaa

SEQ ID NO: 5052 - DNA, 120 bp, synthetic construct
  source 1..120: mol_type = other DNA
aaaatcattcatttctaatcttactaccactctcctcccttctacagatctgttgacatcttagagttgacagagcaggaggaattgctgaaatttcactatcacactctccggctctac

SEQ ID NO: 5053 - DNA, 120 bp, synthetic construct
  source 1..120: mol_type = other DNA
atacctgaaatacaagccatcaaatacccctttccacccatatttccactcttaccaaccttagaatacttgtttaccagtagatgcacccattgtcacatagcaaggttttactttccc

SEQ ID NO: 5054 - DNA, 120 bp, synthetic construct
  source 1..120: mol_type = other DNA
gaaaaggggttggacactgtgactacttcagagacagcactgatagaaatggttatattgtagatggtgacacagagggttttaaggtcctctttgacactgtcatgtatttatatcaca

SEQ ID NO: 5055 - DNA, 120 bp, synthetic construct
  source 1..120: mol_type = other DNA
tttcatggggaaagaaccagaccatatcagttaacatccactaaagggacatttgtttgccatttttgcttatacaaattatgtttcatctcctgggaccgagcacattgctgcctatac

SEQ ID NO: 5056 - DNA, 120 bp, synthetic construct
  source 1..120: mol_type = other DNA
gatgtaaattttctggaatctacctcagagtgggcctcagagtgtgggaagttactggcgtagggatggtgttaaacaatgtaattcacagatgtcttttttgatttcttacccttacca

SEQ ID NO: 5057 - DNA, 120 bp, synthetic construct
  source 1..120: mol_type = other DNA
tgctggatggggtcagaggaaaccaggtgaaacagagttaaaaataagacccagagctcctagcataatcctcaaaatgttgagatttcaattaaaaatcatgtgtgtgaagaaccaagg

SEQ ID NO: 5058 - DNA, 120 bp, synthetic construct
  source 1..120: mol_type = other DNA
ctatccttcactcaaactgaagtctactggtgttgacattgtaccatctggtgcaccgtcaataccagtagactgtatgttaggtatgtatataaaataatactcagagcaagcactaga

SEQ ID NO: 5059 - DNA, 120 bp, synthetic construct
  source 1..120: mol_type = other DNA
ctctcagttgatagaacagctgaacagaaaaatcagctatgacacggaaaaactccacactatcatcaaataatagatctaccaaggtttgtagactactccacccaacgacaaggtaca

SEQ ID NO: 5060 - DNA, 120 bp, synthetic construct
  source 1..120: mol_type = other DNA
gggatgtgggtgtgctcatgaaaaggtaacaggagggatctttgagataaaggaattatcctctattttgactgcactaatgttgctatcctggttatgagattgtactacagttttgca

SEQ ID NO: 5061 - DNA, 120 bp, synthetic construct
  source 1..120: mol_type = other DNA
catattgtggacttgagaaagaggaagaaacgttatatgactattttgcagcttgttaagctatggatgatttgatttattctgcggtactggttggattgtgtgatggacacctgtgga

SEQ ID NO: 5062 - DNA, 120 bp, synthetic construct
  source 1..120: mol_type = other DNA
atggcaaaatggcaaaataactgtccctatgtggggagtcctgagggatagagaaatcagagaggcagttaaactgagcagaagatgaccaaaattctttctctctttttcctctttcca

SEQ ID NO: 5063 - DNA, 120 bp, synthetic construct
  source 1..120: mol_type = other DNA
gatataaagcattccctggtttagggtacctaattatgcctgttctctctgtttctcaactaaccaaaatactgctaaaatttttggaggcaagagaggagaattaaagtctgtggggca

SEQ ID NO: 5064 - DNA, 120 bp, synthetic construct
  source 1..120: mol_type = other DNA
tgcctgtagctcccagaaataaacagcagcatcagtctatgtgtatagcaacagactgagaggtagcagcatgataaagatggatggtctccatagagaactagaaatttaggtatttta

SEQ ID NO: 5065 - DNA, 120 bp, synthetic construct
  source 1..120: mol_type = other DNA
ttatacgtagtcactagtgcaaatgactcaactgaggagacagttggataagcatacctttttgaatgtccgtgaccgaactttataaggataaatgatgtcaggccttctgggaagaaa

SEQ ID NO: 5066 - DNA, 120 bp, synthetic construct
  source 1..120: mol_type = other DNA
ttggtcagattcggtccctgctgagtgtgagaatgggcaaagaagaagagaagctcatgattcgtggattagggtaaattatttaactactacaaccctttgtctcgtaaatgttttcta

SEQ ID NO: 5067 - DNA, 120 bp, synthetic construct
  source 1..120: mol_type = other DNA
tttatctattgggccttggaaaaagaaggggtagggggaacaaattttctgagaattcagcatcatgagcttgcatttcatgtggatttgggggttaaagttaacaccccatattcaaga

SEQ ID NO: 5068 - DNA, 120 bp, synthetic construct
  source 1..120: mol_type = other DNA
aataaaaagaaaaagctgcccttgtttaccttagtttgttctggcatgaaataagtcagacccatattagccttgggcatcaagttttttttctgacctatgctatctaaaagccctgtt

SEQ ID NO: 5069 - DNA, 120 bp, synthetic construct
  source 1..120: mol_type = other DNA
tttatgaggaacttggttaactatttagatgttgctctgagctttaccccatacgtccattgtcctttctagggatattatgaataacaaagtgttttaccagcaccctaatctcatgag

SEQ ID NO: 5070 - DNA, 120 bp, synthetic construct
  source 1..120: mol_type = other DNA
tttgaattataattcagttctcatcacgttaccagtccatggcacaagcatgttcttcagactccaccatcctccatgacacagacattggttggtttcacttaatttccaatccagatt

SEQ ID NO: 5071 - DNA, 120 bp, synthetic construct
  source 1..120: mol_type = other DNA
gcaggccttccagtccaggaaatcatctcatgaggtgcaaatcagggaggttgtaaatccctggaatcagtaattctactaatattaatactgataagaacatcctattatatgtgccac

SEQ ID NO: 5072 - DNA, 120 bp, synthetic construct
  source 1..120: mol_type = other DNA
aacagcagtgttggtcttggtaagtaaatgacttttatttcatctttaaggttgaaataatataatattacatttaaaaagcaaacgttttgttaaaaaatgtgcaatggacctgaatag

SEQ ID NO: 5073 - DNA, 120 bp, synthetic construct
  source 1..120: mol_type = other DNA
gcgtgagccggatctagaaaaggtgagcaatgttcctgccctgtgtgtttgtctgaattatgctttttcacggttttctcaatattttaaatataagtaaggttggtgcagaagtcattg

SEQ ID NO: 5074 - DNA, 120 bp, synthetic construct
  source 1..120: mol_type = other DNA
atgctccaaagtcaccctcttgatcagctcttccacatccatgctgtgtaaaactgaaaccttttctccacttccttaaactcttcctgtttcctttactgctttattttcaactattgg

SEQ ID NO: 5075 - DNA, 120 bp, synthetic construct
  source 1..120: mol_type = other DNA
aggagtgacggccatgttctgcgtcttgattatggtgtgttctcacagatgtctacatctctcaaagctcattgaatttatacttcaaagagatgagtttattgcacattggttctcttg

SEQ ID NO: 5076 - DNA, 120 bp, synthetic construct
  source 1..120: mol_type = other DNA
gagatggtgcaaataaaacagcaactggttctagtccgtgagtcttgagccctgggcagatatgtttgtggcatttattaaaaagaatgtctgcttagagagagctgaaaaaaaaaaagc

SEQ ID NO: 5077 - DNA, 120 bp, synthetic construct
  source 1..120: mol_type = other DNA
ttgttcagaacttccatataatcatatttgtttacttatcttccccattctactttaggggagagtgtggaggaaaatgcaaatgtcgtggtgagattgctcattcggaggcctgagtgt

SEQ ID NO: 5078 - DNA, 120 bp, synthetic construct
  source 1..120: mol_type = other DNA
ctttattgaggcacatttctaaagaaaaaaaagagttagagggcacgcaatcctgcaaaccctttgtcttttacatataaactgggcatagatgttccatgtacaccatagccggatttg

SEQ ID NO: 5079 - DNA, 120 bp, synthetic construct
  source 1..120: mol_type = other DNA
agatgcatgtgagtttctgggagttcaggagcagcaatcctgatttctctgtgttaagacatctatagctgtcaaagagcataacagcatccaaaaccaataatcttcatgctccattaa

SEQ ID NO: 5080 - DNA, 120 bp, synthetic construct
  source 1..120: mol_type = other DNA
atcttttaatgggaaacaaacccagagtttgagagtttgaaacacattgattggtgctggggtagttaagaactgtaagtatatttctaaagtgggatgagcatgaagccagggctttct

SEQ ID NO: 5081 - DNA, 120 bp, synthetic construct
  source 1..120: mol_type = other DNA
attgtaacattgatgtcacaaagttgttctaatgtttttttttcccctgtatagttgattcatgccgggaagggagaagccatcagaattaggtccattttgagatccctcattcccctg

SEQ ID NO: 5082 - DNA, 120 bp, synthetic construct
  source 1..120: mol_type = other DNA
tgtgtttgctttgggattttaattttcttttatatgacatttcagacagcttccagagaagcagaaacatgcactgctaccctccattgtcttatgtcctgccttgtgtcattggtcgca

SEQ ID NO: 5083 - DNA, 120 bp, synthetic construct
  source 1..120: mol_type = other DNA
gcatgctatatatattccttttctttcattaattatgcccctagagaaggcaggctataatagctcaagtctagaatgaaaggggtcaccatatacctgaaggtagctcatcctgtttgc

SEQ ID NO: 5084 - DNA, 120 bp, synthetic construct
  source 1..120: mol_type = other DNA
agtatattgtctacatcgggagtcacagtggtttgtgtgtgtgtttgtgaattttgtatcagtcacaatgaaagttaacttttaacaacacaatccattggtatttgttagatctctgct

SEQ ID NO: 5085 - DNA, 120 bp, synthetic construct
  source 1..120: mol_type = other DNA
agaaacaatgtctgcttggataagagcttaaaaagcaaagcatatagagcaggatcggtgagcttctccctttttccctaggcacagctacggtttaagataatagaacactgtacattt

SEQ ID NO: 5086 - DNA, 120 bp, synthetic construct
  source 1..120: mol_type = other DNA
ccatgtcttgtatcctgtatgcagttaacaagtggatgcctatataacagttaaatgaccttggctttacattcactgccttatttcctcagcaaactcccataatagcttgagggtagt

SEQ ID NO: 5087 - DNA, 120 bp, synthetic construct
  source 1..120: mol_type = other DNA
cttggtatcttcgtttgttaaggtacaaatggattgaaggctgttctgtatattgggtggcccacatggagaatctgccattatcagcttaaatgttcttttctttgaaacactgtggaa

SEQ ID NO: 5088 - DNA, 120 bp, synthetic construct
  source 1..120: mol_type = other DNA
ctgtgtatagactttctaagggctgttcacttaccaaagctcagcgggattccatagaagtttgtttactctctatttgtgggtgagtggataacaaattctattccggcttcttcttta

SEQ ID NO: 5089 - DNA, 120 bp, synthetic construct
  source 1..120: mol_type = other DNA
cctcctttctgttccaatattccctcttctttttcttcttaccatccattggaatgagggaagagacatttactaaagttaatggaggaaagtcttaggaaacagtggagtctgcatttg

SEQ ID NO: 5090 - DNA, 120 bp, synthetic construct
  source 1..120: mol_type = other DNA
aaaaaggaccacagggaaaagataagccaagatactcttaagttggaaaacatggtaataggcctggcctaaaatattattagaaacctcgagagataaagacgaggctttaaagacaac

SEQ ID NO: 5091 - DNA, 120 bp, synthetic construct
  source 1..120: mol_type = other DNA
taaccaccaaagaaatgtagacaaataagtgatcagagtagagcaattttggaacttcacttggagaagtaagttttgtggcaagccatagagaggcagagagggagcaaaaagaatcac

SEQ ID NO: 5092 - DNA, 120 bp, synthetic construct
  source 1..120: mol_type = other DNA
ttataattgttttcccacatagctgctgacaaatcattatgaaagatgctggaaatattactgcctgcctggagggtggggaaactttggtgctgcctcagaagaagaacttcatttatc

SEQ ID NO: 5093 - DNA, 120 bp, synthetic construct
  source 1..120: mol_type = other DNA
tcccagtgccctgctaaagtctccagctttgctgctatggagatttagataccgtcgctcaatgttgcattgcatatgtggcattgccttatagttgcaaaatttataatgaatagttca

SEQ ID NO: 5094 - DNA, 120 bp, synthetic construct
  source 1..120: mol_type = other DNA
gactacatggagtcaaattatgtcagtatgatggaaaaacagtcatcaatggattctgaagggaactttaacccacaacctgttgatacctcaaagtatggactctttctattgcagcag

SEQ ID NO: 5095 - DNA, 120 bp, synthetic construct
  source 1..120: mol_type = other DNA
gatgacagtcctgtgagaaaagaccctttcccccatcccccagtatttggcttatatgattgatcttttgtatctcttccgaagtaagtaaaccaaactatcacatattcacattcctac

SEQ ID NO: 5096 - DNA, 120 bp, synthetic construct
  source 1..120: mol_type = other DNA
tcaccaagagcttcaggaggaaatgatgactccgggttcagaattcaccttttaaggaaactttggttttatatgtaggtttttttggtttattttttgagtcctgctctgctgcccagg

SEQ ID NO: 5097 - DNA, 120 bp, synthetic construct
  source 1..120: mol_type = other DNA
tctatattggtttggcgaaatgaaaatcagacaccaaaggttgcttccagaggatgtgtatgctacgtaacaaataaagatcatcatgctggagatgtcatgttgagtttcaaactctgc

SEQ ID NO: 5098 - DNA, 120 bp, synthetic construct
  source 1..120: mol_type = other DNA
atgtttgcctttttttaagttggcaaatggatggatttatggagaaatatattcagactcttctaaggttcagccattaatgaagccatataagctattgtctgaaaaggtaaggatttt

SEQ ID NO: 5099 - DNA, 120 bp, synthetic construct
  source 1..120: mol_type = other DNA
ttgtttcttgttttttcttctctaggaaaaagaaatttatcgctggccaatcaaagaatctttaaaaactatgctggcttggggctggagaattgaaagaactcgggagggagacagcat

SEQ ID NO: 5100 - DNA, 120 bp, synthetic construct
  source 1..120: mol_type = other DNA
tgagctgcttacctttgaccccctcatttctcctgggagctaaatctgtcattattcttttcctgacccctcagctcactatgtatgtggtttacaccaaatattgtttattattgctat

SEQ ID NO: 5101 - DNA, 120 bp, synthetic construct
  source 1..120: mol_type = other DNA
gtttgtagcactttggcctgtaggtgggaaagaaagaatatttctataagcctcagaaatggggagcaatatacaccaaaggccacaagtctatttataacttgccattattttcaccca

SEQ ID NO: 5102 - DNA, 120 bp, synthetic construct
  source 1..120: mol_type = other DNA
ctgggtgggttttgaccccctccttggtagggatactaaagaaaacagcaaaaaacatttctgacaatttcaggcatatcccacaggttttcaacaattatttactcccaaattccaatt

SEQ ID NO: 5103 - DNA, 120 bp, synthetic construct
  source 1..120: mol_type = other DNA
tgtggtgggcaaaattatgactcccaaatatgttcacccactcctcactacaactgtatgggaactatggtgttgatagcagttatggtggtagtagtgataatgatagtatactaacaa

SEQ ID NO: 5104 - DNA, 120 bp, synthetic construct
  source 1..120: mol_type = other DNA
agatttataagcaggaaccagagctcatttctgtggtacactttcacataacatgccattgggtggaaggaggtaagtgcccaggatggttagtgaaacttccttaaaattgataaagag

SEQ ID NO: 5105 - DNA, 120 bp, synthetic construct
  source 1..120: mol_type = other DNA
aatgctctgtgcaagggccaccttcttttaagtttttccagagacattgattgcatttgcttgctccattcatagtctcatctgttcttttttgtcaccaaggaacctactttgaaatag

SEQ ID NO: 5106 - DNA, 120 bp, synthetic construct
  source 1..120: mol_type = other DNA
tcagaattttgacagctttcttttacccattttagcttacagacttctgtacttctcatcctgatatctgagttgttctatgaatgacttagacttccctccctgactctcttccccaac

SEQ ID NO: 5107 - DNA, 120 bp, synthetic construct
  source 1..120: mol_type = other DNA
atggtgaaaggtaaagctgtgatatggaaggatggtacctggcaccaagcactaggaaacagagtaacacaaattaggattggtcacagagaggaaaagagaagattccacattttattt

SEQ ID NO: 5108 - DNA, 120 bp, synthetic construct
  source 1..120: mol_type = other DNA
accattgagcactgagtgaacgagactccgtctgcaatcctggcacctccagaggccgaggctggcggatcacttgcggttaggggctggagaccggcctggccaacacagcgaaacccc

SEQ ID NO: 5109 - DNA, 120 bp, synthetic construct
  source 1..120: mol_type = other DNA
tttaagtcataccactcgtaaatggcacatccatacttctgcatacaacttgtactggctcaaatttgtattctgtagttgggaaactaacctagtggcagcagactaagtggtgaggta

SEQ ID NO: 5110 - DNA, 120 bp, synthetic construct
  source 1..120: mol_type = other DNA
tcaagcatttttttactgtttagtatgaatgggttcatgagtccgtgctggtatgtttggtaatatcctcagagttactgctcactcatttacctctccatgtagctgatttccttcagc

SEQ ID NO: 5111 - DNA, 120 bp, synthetic construct
  source 1..120: mol_type = other DNA
caaagccagcactagggaagcagacatttcctcctttgcttgcttatttattgtgtagggctaattcaacatttgtgattgttgcagtagctcctggctaaactatattggaaactgatt

SEQ ID NO: 5112 - DNA, 120 bp, synthetic construct
  source 1..120: mol_type = other DNA
agtgtggtccaattatatatctgtgtctcatctcagattcttttcaaattactatgctgtgttcttgtcctgacatactcttaggaggaggaaaccatcctctgctggtgccctatgata

SEQ ID NO: 5113 - DNA, 120 bp, synthetic construct
  source 1..120: mol_type = other DNA
gatatagaacaacacaggctgctgagctatttgtgatggtataaacccatctattcatcctactactaagtagagttcaacggtcaatggatgaacaagttcttggggagtgggtaaaat

SEQ ID NO: 5114 - DNA, 120 bp, synthetic construct
  source 1..120: mol_type = other DNA
ctacatttgaaaggatccgatatgcgtagcaactccaatatccagtcttgtttttggagaaacaagggacaggagagaaagaaagagtcatcatttggagaaaggaacaagaaagtcatt

SEQ ID NO: 5115 - DNA, 120 bp, synthetic construct
  source 1..120: mol_type = other DNA
gcaaaagtcagcttggctcttgaatatctggaagctctgcttacaaattttactaaaacctgatagctctccaatatgttctgcatgccatcgttgttattatagttgattattacctcg

SEQ ID NO: 5116 - DNA, 120 bp, synthetic construct
  source 1..120: mol_type = other DNA
gatgaatatcttgcaatgtttccagtgcagcatttacctaaaaactcttcaaatctacagatggtggcagcagaggcaaaggagaacatttcccttatgaacaagaaatcaagttctttg

SEQ ID NO: 5117 - DNA, 120 bp, synthetic construct
  source 1..120: mol_type = other DNA
cacatttctgttgtcttttcttcccattcaatatagcactcagagtctgttccaatcatttgaagatccaaagtttgtcctggggtgcacatagttagcgattcatgaattgatagatcc

SEQ ID NO: 5118 - DNA, 120 bp, synthetic construct
  source 1..120: mol_type = other DNA
agaatattgtgtaggcaactaagtagcaatgtgaccttcggtaagtcacacatttctatgtctccatttaatacccataatgcagggatgatggcatctaccctacagagcagttgctat

SEQ ID NO: 5119 - DNA, 120 bp, synthetic construct
  source 1..120: mol_type = other DNA
ctgaagctttcccctcttaacaatgctttctcatttctgtttaaaccaaagggttctttatggactcagttgtgattctgctggggatatcaggtccttttactcaaacttctgctagaa

SEQ ID NO: 5120 - DNA, 120 bp, synthetic construct
  source 1..120: mol_type = other DNA
aacgtcgtgaaattgaggacacgttgaagtctcctactcctccctgggtctgttagcctttttaaataggaactttgttctcagagggtgttgttaatctagctatcacttagttacata

SEQ ID NO: 5121 - DNA, 120 bp, synthetic construct
  source 1..120: mol_type = other DNA
cctggcacaagaaattattatatactgagcatttgctgtatcgaaggtcagtactgtcgtgtctggagtatactttgcagtagctaaatacgtgaatatgagtatagccctagtgaaagc

SEQ ID NO: 5122 - DNA, 120 bp, synthetic construct
  source 1..120: mol_type = other DNA
gaatgccacctatgtacggcaagctgtctgaggcctgaagataaacacacacacacacaataacacagttcctaactttaataaatttagaactacagccaagtagacacgtacatatag

SEQ ID NO: 5123 - DNA, 120 bp, synthetic construct
  source 1..120: mol_type = other DNA
attatctttgctcattaggggcattggtgagctgcaaaggagtgttttagtacaagacaatgagtaaatgctgaagaagtagatgccttataaattctggagaatgttggaaatgagggg

SEQ ID NO: 5124 - DNA, 120 bp, synthetic construct
  source 1..120: mol_type = other DNA
ccctacataattttcatcaatacatgaatccacattgttacagaagtgaggggtgatggccaaaacttactgtaaaagaggtcaacctcacaaacgttaccttctctgcttccctctctt

SEQ ID NO: 5125 - DNA, 120 bp, synthetic construct
  source 1..120: mol_type = other DNA
cctctgagtgattatcagttgctcaaattctgttcctactttactgtattcaaattcactggatgcttacgttacgtaaggagtgtgatcaaggttggggacgaaggagatttcaaataa

SEQ ID NO: 5126 - DNA, 120 bp, synthetic construct
  source 1..120: mol_type = other DNA
aagagcaaatgaatgaaaatggcaggctgtgccgtattttatctcaggggtaaaaacaaaacaaagccaggcccttggatttgtgtttggttacctctgacagattaaataatgagctgt

SEQ ID NO: 5127 - DNA, 120 bp, synthetic construct
  source 1..120: mol_type = other DNA
atgaaaatgtatatgcatatacaaccatttaatcatagctcaagccaagacatagaacgtttccaacatgccaggagcctcccctgtgtcatttttcaaattataaccatctccagagga

SEQ ID NO: 5128 - DNA, 120 bp, synthetic construct
  source 1..120: mol_type = other DNA
tattatgggctgtagatgctaatatgacatcctagagagaatagtgggtttggaatcagaaaacctagttgtaagtcctatttttctaacttaacagctgaatgatttggacaagggact

SEQ ID NO: 5129 - DNA, 120 bp, synthetic construct
  source 1..120: mol_type = other DNA
agccaccacgcccggccaaatctctaagtcttaagcatttaagcttcacatattccctgtactgtcttgtatttcctgtactatcttggtttaaagattttttcatgacctaaacctaag

SEQ ID NO: 5130 - DNA, 120 bp, synthetic construct
  source 1..120: mol_type = other DNA
tagcccttctattacagtctgttagaatctttcaatcatttttagaggaagcagcatctgataactaagagtccaacagtaataatgatggtggcacaggtggtgcttatcagagtgcct

SEQ ID NO: 5131 - DNA, 120 bp, synthetic construct
  source 1..120: mol_type = other DNA
aggtccggccttcaagaagcctatagtctaatagagaaggtagataagtacgcagacacttactatgagacaagtgctaagaacgtggaaattttcttacattcacgaatgacacagctt

SEQ ID NO: 5132 - DNA, 120 bp, synthetic construct
  source 1..120: mol_type = other DNA
ctgtcttatctcagaagttattatattagaaaattaatatgtttgtgttatctctaacaaggctcagattgtgcttgtgtttggtaggacacatataataaaagaaaaattggccgggtg

SEQ ID NO: 5133 - DNA, 120 bp, synthetic construct
  source 1..120: mol_type = other DNA
atgtgtcctcggtttgactgaaactcctcaccaaattagggaaccaataattttactctgttcaatatcacagactttagaaataacaaagtcattgacactctgcaatttctctctatt

SEQ ID NO: 5134 - DNA, 120 bp, synthetic construct
  source 1..120: mol_type = other DNA
gcaatcacagaaatttcatattcccaatacacagtttcagtcaacccacagaatttgtctggctcctggtgctgtttcctactcttcttacatcccagagacagtccacaaatattttaa

SEQ ID NO: 5135 - DNA, 120 bp, synthetic construct
  source 1..120: mol_type = other DNA
agggaattaattctttgaaaatataaatcgtatcatatcccatcctgctcaaaacctaagaatgtcttcctaccgcactgaaaatccaagggcttgctctaaccaagctctagaacctga

SEQ ID NO: 5136 - DNA, 120 bp, synthetic construct
  source 1..120: mol_type = other DNA
cccagagctggcatctgccaatggacaggaaaataaaaaatcctaccattctgctcattttgtcttcattattaccaggaattctgagacttgaagcacaagatgagggaatattttcat

SEQ ID NO: 5137 - DNA, 120 bp, synthetic construct
  source 1..120: mol_type = other DNA
agggagaggggattattgaaaacctcggttaaaactcttttagtctggtgcagtgcttttgaatgcttcttgggcatgtcagctatttgatgagacatgctttattgcttttctacttac

SEQ ID NO: 5138 - DNA, 120 bp, synthetic construct
  source 1..120: mol_type = other DNA
agagaaccacaattcatttatatttcatttgttcctgttggaagatacgagtcctcccttatttactttctaggacagtgatgaagactggcctggagagtgttaaaagtgcactcagag

SEQ ID NO: 5139 - DNA, 120 bp, synthetic construct
  source 1..120: mol_type = other DNA
gtttttagggaagctttaatcttctgttttgggctggcattcagtagttaataaaactatacacagaatgcccaagattacgtggaaaaaatacgcatgagctgtttgaactccccactg

SEQ ID NO: 5140 - DNA, 120 bp, synthetic construct
  source 1..120: mol_type = other DNA
aagtgagattctctttttccttagtggaagatgtccaggtgtcttgttatagaattctgactagcttatatgctttgggaaccagcaagagtatttacgtggagaggtaagaatgtttaa

SEQ ID NO: 5141 - DNA, 120 bp, synthetic construct
  source 1..120: mol_type = other DNA
gagactagccaacggaatttgcaggggaataaaagagtaatgaacaggtactcatttggcctaccaaatattaaaacctataaagctacagtagttaaaataggatgacagttgtacata

SEQ ID NO: 5142 - DNA, 120 bp, synthetic construct
  source 1..120: mol_type = other DNA
tttggagaacaaggtagtcgagaatgtgtcttttagaaggcgacttttgaagcttataacttttctctatgcaacagaaaacaggtagaagctatatgaggtaggtctgtgtctagtagc

SEQ ID NO: 5143 - DNA, 120 bp, synthetic construct
  source 1..120: mol_type = other DNA
aggcaacgttctgcattaggagaatgtctagctgcctttgctggtgcttttcctgtagcatttttggaaactcatctggacaaacataatatttactccatctacaataccaagtcttca

SEQ ID NO: 5144 - DNA, 120 bp, synthetic construct
  source 1..120: mol_type = other DNA
taatgtccccaccaagttagggcatgctcaagataggctggagagaaaaagagaagtttaaatttagatccatcgtgttttagttgtgcttgagacatccaggatgagtcagaacagttt

SEQ ID NO: 5145 - DNA, 120 bp, synthetic construct
  source 1..120: mol_type = other DNA
tatcatccatttttatatgtacttctccagctctcagtttgccaactaatgtggaagatgtttgtccaaacataccgtctttggagaaactcatggaagaaatcgtggaattagccgagt

SEQ ID NO: 5146 - DNA, 120 bp, synthetic construct
  source 1..120: mol_type = other DNA
ctgatgaaaactccagaaaaatgcagcaatgacttattaatttgggtagatgattatggttgactttaacttttctcttgtatacttttccccagtgcatatatgttactttcaggggga

SEQ ID NO: 5147 - DNA, 120 bp, synthetic construct
  source 1..120: mol_type = other DNA
gcagaactcctcatcctagatgagttcaccacactggccagagatctctatgccttctaccctctcttgattagatttgtggactataacaggtatgatcaaaagtaatttagtaatttc

SEQ ID NO: 5148 - DNA, 120 bp, synthetic construct
  source 1..120: mol_type = other DNA
gcttacttgcctcctaggtttcatgtaacagttgaggagagagaataggttcccctgaggagtttgagggaatataaaccttcttctgagttttgcaatttatcctttaaaaaaatcaca

SEQ ID NO: 5149 - DNA, 120 bp, synthetic construct
  source 1..120: mol_type = other DNA
ccattttgagctgccaaaaaacaaagatgaatttttgctttttgcctgttgttttccctgttgggttacttcacttagaatgcctcatgggaaaatagggggagcccaggaaaaaattac

SEQ ID NO: 5150 - DNA, 120 bp, synthetic construct
  source 1..120: mol_type = other DNA
tggttcaaatatgcaagctgttttaaggttactggaatttgtttgaatcaggcatggtaagacatgcagacgggaaatgactgtcatgaaggaagacatttctactgacagatccctgga

SEQ ID NO: 5151 - DNA, 120 bp, synthetic construct
  source 1..120: mol_type = other DNA
aatatattacatgtggtaacatttggctgccaaatggccaaagatccaaaaatgactgctactcaggcagagcaaattagcctctactgactcaataaattctggcaacagagtagctta

SEQ ID NO: 5152 - DNA, 120 bp, synthetic construct
  source 1..120: mol_type = other DNA
cataatcccttcactcatcttaaacctcactgttcgtagcagcaaaatgtttgtcatgctgcttaccttgatggaggcttgtaaaatcagaataatgtgtgtgttgtgcctcacagatta

SEQ ID NO: 5153 - DNA, 120 bp, synthetic construct
  source 1..120: mol_type = other DNA
aaagggctcaggtgattgatttaagaaagggctcaggttagtccacttcccttcttaaatatgcccacatatgggccatgttattacatcttcatatctgatccaaatgcacagattgaa

SEQ ID NO: 5154 - DNA, 120 bp, synthetic construct
  source 1..120: mol_type = other DNA
gaaaactccaaaccaatacaatttagactaagaaaactccaaaccaatacaatttagactatattggggatgtcgctttgctgaaactaaattaccggtattggatagaagtatgtttgt

SEQ ID NO: 5155 - DNA, 120 bp, synthetic construct
  source 1..120: mol_type = other DNA
ggaatctgagggtaggacttgaaatcagcaaaagatactaagaagggaagagaaaaattattctcaaaacaggaggattttcaaaactagggagcagcagaaaatgaggaagatgaagtg

SEQ ID NO: 5156 - DNA, 120 bp, synthetic construct
  source 1..120: mol_type = other DNA
tatttatgtaaattggaggacatattctccattccacattgaatcactgaagctcgtcactgaacatgcatcgtttgacattctaaaatgagtgaattgaggggaagctgtgggagtggg

SEQ ID NO: 5157 - DNA, 120 bp, synthetic construct
  source 1..120: mol_type = other DNA
accctgtctcaaaaaacacaaaatttacatggagcgatcagtaattaaatatatatttttaagagtcgttagtctataggtgaattaggccatttttgctttactatatagaaatatctg

SEQ ID NO: 5158 - DNA, 120 bp, synthetic construct
  source 1..120: mol_type = other DNA
ctaaggagaagagaagcgtgtacagttggaataaaaacatggatggaaatcgatagaacacctactttttaatggtgggtgaaagaattgttagaagtagttttggcaatccagtgacca

SEQ ID NO: 5159 - DNA, 120 bp, synthetic construct
  source 1..120: mol_type = other DNA
caacaattactgagttagagacagagagtgctcagtacctcttaagaggagtctgggccaatctcaagaaatggtcaaataaaggtggttatgattataagcagaaagaagtttgtccat

SEQ ID NO: 5160 - DNA, 120 bp, synthetic construct
  source 1..120: mol_type = other DNA
aatgctatcctatatccttgcccataaaagtaaacatagaaatctttctacaattagactgtgaatggggaggagaagagcatgggtagccttacccattttgttttccagtttcccact

SEQ ID NO: 5161 - DNA, 120 bp, synthetic construct
  source 1..120: mol_type = other DNA
ttcatcctacataactgcagctgcgcgtcatgtcttaactggtaaacactgtaaagcccaataaataatgatgggtggactcttcctatctttagattgtaaccttgtttttagattccc

SEQ ID NO: 5162 - DNA, 120 bp, synthetic construct
  source 1..120: mol_type = other DNA
tattatctatttctcatcaagtccattcagcaaaataatcacagtgaagaagctcattgtaacttgaccatctgatctgtcacagggctcttatgacagatcatactgttgatgacttgg

SEQ ID NO: 5163 - DNA, 120 bp, synthetic construct
  source 1..120: mol_type = other DNA
agccttatccccagcagacctggaggactgagtgctgtaagagaggaaacagacacttaaacagataaatatgggatgatacggagctgttaggatataaaatgtgctgaagaaagtata

SEQ ID NO: 5164 - DNA, 120 bp, synthetic construct
  source 1..120: mol_type = other DNA
tcacttgacacaagcatcaagaagatgattgaagtggataattgtcaccacgtgtttattgatcatagagggggaagagcatcacagaaataagtgcttttccgttaaacaagttgcctc

SEQ ID NO: 5165 - DNA, 120 bp, synthetic construct
  source 1..120: mol_type = other DNA
tgaaggtagtttggggtgtaaatatttatttgtgtcattctacctcaggtggaacatcctcagagatctaaaaaggctgtatggcataaactactgtccaagcagaggaaaagggctgtt

SEQ ID NO: 5166 - DNA, 120 bp, synthetic construct
  source 1..120: mol_type = other DNA
aagccatgcccctctactccttgcacatcataccactttcctacagtattaaggctatttgtctctttgattcagactttgagatcctgtactagttttgttccattttctttcttcagc

SEQ ID NO: 5167 - DNA, 120 bp, synthetic construct
  source 1..120: mol_type = other DNA
gaattcacattatcatttctttttggttactcctatactgtcattgcccagatttcatcagtttccctttgaactacttcacattcccatccttccctccatcaccacctcttcaagtcg

SEQ ID NO: 5168 - DNA, 120 bp, synthetic construct
  source 1..120: mol_type = other DNA
agttatcctggttttataaaggaataaactgaaatttgggaaagtcgagtcacttgaccaatgttacaaagcttggaaatgactgagccaggattgaaatgcaagtcactgtgcgctatg

SEQ ID NO: 5169 - DNA, 120 bp, synthetic construct
  source 1..120: mol_type = other DNA
agcttgtgagttcagcacagaacagcagtcagtatcatcttttctaagtcatggacccatctaaatatctggcaaaagccatcttctcaacaaaatttacaagccatctcaaaacttggc

SEQ ID NO: 5170 - DNA, 120 bp, synthetic construct
  source 1..120: mol_type = other DNA
acacacacacacacaccccacaacagggaaggaggaacgttcgcattccttttattcttcattgctgtccttcacagtgcttttggatttgagtgaacatttttttttaatgtgacattt

SEQ ID NO: 5171 - DNA, 120 bp, synthetic construct
  source 1..120: mol_type = other DNA
aatgggaaagaaagcctgttttgcccccaggcctttcccattctctgcagaatttgggatgtaatttaattaaaaactcatatccacatgaatctcctcagaagagttcatttgacctct

SEQ ID NO: 5172 - DNA, 120 bp, synthetic construct
  source 1..120: mol_type = other DNA
agaagggcacacactacacctttgtggagttttttgtctgatggggaagataaagtttaagcaaatggttgtagaaaaaccctgatgaacttaatggcagagaaatgtatccctccattt

SEQ ID NO: 5173 - DNA, 120 bp, synthetic construct
  source 1..120: mol_type = other DNA
aagatggttagaaggaaaggagctcataaaaaagttggagagaaccttaagtgtgagctaacataggagctagaagctataggacttattgtgtggtcaccaaaatcatgttctgctgtg

SEQ ID NO: 5174 - DNA, 120 bp, synthetic construct
  source 1..120: mol_type = other DNA
aaacagagttgtttttattttatcatgaatcaccaaattgtttttatgtctgattgatgagctgaaacacatagtttaataaacactgggttaaaagataaaaggatagggctgggcacg

SEQ ID NO: 5175 - DNA, 120 bp, synthetic construct
  source 1..120: mol_type = other DNA
caactagcaattctcagaaccaaatgcaaattctgagaagccaggaagttagattcatcaagggtgaagatttctgccagactcttgttgagaacagtagatcaaagcaggtttgtatgt

SEQ ID NO: 5176 - DNA, 120 bp, synthetic construct
  source 1..120: mol_type = other DNA
atatcgaacttcctagcgggtagtttttggaagctgtctttcctcattttaaaaattagcatcccagttgtctggaactttcacttggccttcatggtttctcggtttaccaacagtcat

SEQ ID NO: 5177 - DNA, 120 bp, synthetic construct
  source 1..120: mol_type = other DNA
ctgtattacaaacatcacttctttctgaaacaaaagagctgatgagtggttctgcacgtcctctctattatgatgagtacagcatctgctctaaatcatgtgcttactgctccttgttga

SEQ ID NO: 5178 - DNA, 120 bp, synthetic construct
  source 1..120: mol_type = other DNA
gcttattcaccttttccttcctggcaaaagaaggactcttccttgtctagaatttagcattctgatccagaaagccaaatcctgctacaggactgtctaatataacttcccatttgctta

SEQ ID NO: 5179 - DNA, 120 bp, synthetic construct
  source 1..120: mol_type = other DNA
tgatggaggactgcagatttgccttccaaatctgttttgctaaagttctcatgagttcttattttttaaatcctggctgactaataacatgggagacagagcagcagaaactcaaaggag

SEQ ID NO: 5180 - DNA, 120 bp, synthetic construct
  source 1..120: mol_type = other DNA
gagccacctcgcccggtctaattttaactaatggtcattatatttgcctgtattcgtgcattgcaatggcagcataaaaaaaagagaaaatccttttaaggtttgcagtttggtttgaat

SEQ ID NO: 5181 - DNA, 120 bp, synthetic construct
  source 1..120: mol_type = other DNA
agatagtggcacacaacgcagtttgcttgcatgaggtaggagtccatatatccctaggactgtattgtagtttacaactattttctcaaatgctctcagcttttaaatgtcctacgtaat

SEQ ID NO: 5182 - DNA, 120 bp, synthetic construct
  source 1..120: mol_type = other DNA
ccagccctttggatgacaaactttttaagccagggacttctcattttcggtgcaatgttctgaccttatccctcttgatgtttttcaacaccagttttattacttgaaaacagacatgat

SEQ ID NO: 5183 - DNA, 120 bp, synthetic construct
  source 1..120: mol_type = other DNA
gttggaggaatatatagttcttgtatcatcatccttgcaaatttcaaaatgtaaatcatgtatatactatcagatgcagctctgatccgatggatataatggttaatggcatacaatggg

SEQ ID NO: 5184 - DNA, 120 bp, synthetic construct
  source 1..120: mol_type = other DNA
actgtctcagcaagagacaggcttttaaagtgctgggaattgccacacatttataggtgtaatgcaggacaccagatttggggatttgcgcttcctaatgagatttttttttttttagtg

SEQ ID NO: 5185 - DNA, 120 bp, synthetic construct
  source 1..120: mol_type = other DNA
ataagcaagaggaatggaatgttaacttgtcttccagccatctttctcaaatactgggcaagctgcatcttccttttggcgaatgcccagtttctaattgacagatgaattatctgatga

SEQ ID NO: 5186 - DNA, 120 bp, synthetic construct
  source 1..120: mol_type = other DNA
gcttttcatgctattgaatcatagaggggaaagagggaaggaattctgagggccagtgttctccagtactcacgctgattgccgcaatctgccaactacatttttatacaataaaattat

SEQ ID NO: 5187 - DNA, 120 bp, synthetic construct
  source 1..120: mol_type = other DNA
ttaaaaaataatctcagttgaagcttatacaggagcagattatgtacagtaaatgcaaggcagcagactcattaagagcagacactcagatggacttcctgtgtttgaatcccagcttga

SEQ ID NO: 5188 - DNA, 120 bp, synthetic construct
  source 1..120: mol_type = other DNA
ggaactatacataacacagtaagctgaaggggaaaaaaaaactattgaaagacaaagagtagggccttccaagaatagaaagaaacccatgccatggagtcttgtcagtttgatgtgaat

SEQ ID NO: 5189 - DNA, 120 bp, synthetic construct
  source 1..120: mol_type = other DNA
ccagctagacagataattcttggcagggaatttgggactgtatcaaatacttggagtacagctgtttctcaagagttgatctggggtagggttaataaccattcatgaagatctagaatt

SEQ ID NO: 5190 - DNA, 120 bp, synthetic construct
  source 1..120: mol_type = other DNA
tcttgaatacctattattttcagagaactgtactggatgtacagtatgtgtgtactggtgtggttaaaacaaagaaagcccgctctcttcatggatcttctaggaaacttcatgtttgtt

SEQ ID NO: 5191 - DNA, 120 bp, synthetic construct
  source 1..120: mol_type = other DNA
ccagaggtcaatgtagctgaggcaggtccttcagaaacaatgtaaattcctttcctgtaaccaggctgccctggtttaaaatatcttttcatctccattacaaagataaactattaggtc

SEQ ID NO: 5192 - DNA, 120 bp, synthetic construct
  source 1..120: mol_type = other DNA
taacacaaagactaaactgcaggtggtgtttatttaagagccttaggcagtttaagcagaagctgctgtgtcagagaactctattcttgaaaaggtgccttcaaggtgttattttcctga

SEQ ID NO: 5193 - DNA, 120 bp, synthetic construct
  source 1..120: mol_type = other DNA
accacaggagcgctaactatagtgtgacaaaaaaaaccctgatcaattttgttttcgcagcacgatattatcaaagatttaagaaacaaatttgccagcctcggcgagaactctctggta

SEQ ID NO: 5194 - DNA, 120 bp, synthetic construct
  source 1..120: mol_type = other DNA
cagtgatactttgcaactcgagccatttgctgagcagtatcaagttatggccatggcatgggagattattcaaaacgtgacaaacttatgcacaaatgtataaatcagaaagtgcaagtt

SEQ ID NO: 5195 - DNA, 120 bp, synthetic construct
  source 1..120: mol_type = other DNA
ttttggaaactatgttataactaaaccttagcagactgatcctataaaatgggggtgcacgagctttttctttaaggctggagagtcaatatgttcagcttcgagggttatgcaacctgt

SEQ ID NO: 5196 - DNA, 120 bp, synthetic construct
  source 1..120: mol_type = other DNA
gatgtcaaaatatctgaaaacatcaagtgtgaccttttatcatgtcaaatgaattctggtgctgaggtatgaaccactctctcaccatgcgtttaccaaactgtggctctctggttatgg

SEQ ID NO: 5197 - DNA, 120 bp, synthetic construct
  source 1..120: mol_type = other DNA
cttaactgagccctttttagaacagcattgataacaggaattgttctgctcttccagatttgtagagaagcagtattcttatttccttaaacctttgagcatgctttctatcatcttgta

SEQ ID NO: 5198 - DNA, 120 bp, synthetic construct
  source 1..120: mol_type = other DNA
ttatttaacaaacaataagatttttgttcagtggccacgtggtttctataattcccatagaaaatgcttgactacctcaaggagaaaaaggatgtgggcttctttcagagcctggccggc

SEQ ID NO: 5199 - DNA, 120 bp, synthetic construct
  source 1..120: mol_type = other DNA
gttattatagtgtccttgacctaaatgcatttgagcgacaaaacaaagctgaaggtcttgggatggtgacagaggaaggatcaggtattaatgacttacattaaaaggatcacctgtctc

SEQ ID NO: 5200 - DNA, 120 bp, synthetic construct
  source 1..120: mol_type = other DNA
caaaaataagtcatatggttactaaactgagttagctaccttcaagaacaatcactgacaccattctataacttcttaggttttctggcctaaggttctggcctgaggttcagaaggcca

SEQ ID NO: 5201 - DNA, 120 bp, synthetic construct
  source 1..120: mol_type = other DNA
gatgtacagttattagtatgtcagatatgaaggggcaacaagcatttcaattacattttcggattggttttgttgcttttcagttaaaaacctttctggtgggcccagcgtctgcaactg

SEQ ID NO: 5202 - DNA, 120 bp, synthetic construct
  source 1..120: mol_type = other DNA
aaaatcaatcatccctcttggaagggatagaaaaggctgaaaaagcaacatctgttagtgatgtcacttgcttcaacacttgaggctcagagagcatgggcttagcactgagaaaataat

SEQ ID NO: 5203 - DNA, 120 bp, synthetic construct
  source 1..120: mol_type = other DNA
gccaccacgcctggctgccccttgacttattgttctttgtccctttccgggacacaaatctcttgccaaattttgcatttattgttaagtttcaaaattgcttttgaactttttatggtt

SEQ ID NO: 5204 - DNA, 120 bp, synthetic construct
  source 1..120: mol_type = other DNA
tggaagcaatttaggagctcagtactgtgtagacagacttgtaaacaaataaattcagaacaatgctttatgcatataaaggaatttaggtggaagtacttagcggctgggatgttgcgg

SEQ ID NO: 5205 - DNA, 120 bp, synthetic construct
  source 1..120: mol_type = other DNA
ccaattcgattctcccaacagtcctatgaaatgaggagttgaggagtttgttcatctctatatcaacatgatgaaacgaaggctcagaacagtgaactgactaaagtcatatatctagca

SEQ ID NO: 5206 - DNA, 120 bp, synthetic construct
  source 1..120: mol_type = other DNA
cactattttaaaatatctgtagcatttttcagttttggcaagatgcagaatcgatcttaaggtcccctcaagatccacaatcagcataatttcctctatggcagcggggtgctttagagt

SEQ ID NO: 5207 - DNA, 120 bp, synthetic construct
  source 1..120: mol_type = other DNA
ccctaacccctcccctcttcccattgttctgcgatgtacggtgtgtccttatataagtgaaattacttgtacgtgtttcggtatacagtcaagaaaatactgtgtgtgtcgacaataaat

SEQ ID NO: 5208 - DNA, 120 bp, synthetic construct
  source 1..120: mol_type = other DNA
aacaaatttagattttggagcagctgctcgtaatgtggaagtgttttttttccccccacggacactttctgtcttgaaaatcagcttcatttgtgtggtgctgttctgtgtttgtttctt

SEQ ID NO: 5209 - DNA, 120 bp, synthetic construct
  source 1..120: mol_type = other DNA
ggacacaactcaggtttgtgagtccccggaacttctgatgatactaaggcataaataatgttttcaagccagtaataacaagagcctgttagttccaattatgcatcgttctagagacaa

SEQ ID NO: 5210 - DNA, 120 bp, synthetic construct
  source 1..120: mol_type = other DNA
cacccctgaaggcaggaactccatcttaattttatcttggctgaccccagcactttgcacagtactgaggaacaagtgattaatgaataaataatttccttcttatatcctcaaggatag

SEQ ID NO: 5211 - DNA, 120 bp, synthetic construct
  source 1..120: mol_type = other DNA
tatttacaaatttacaagcaatccaaccagtttcctcagggacagacacaaaagccatggatatcagcgagttctcactgatgcaatgttattagttttgttggagaaaatggaggccag

SEQ ID NO: 5212 - DNA, 120 bp, synthetic construct
  source 1..120: mol_type = other DNA
tgtacctccagggcctggtatatgtattaagcacttagtaaatattaaggaaggaagggcgagcaggcacaacatttaaccattctttctggtattccactaaaagtgggaagaagtttc

SEQ ID NO: 5213 - DNA, 120 bp, synthetic construct
  source 1..120: mol_type = other DNA
ctcctggcttccattattgccttagtattctcatgcatgcctagaatgataccagtacaacaacattcatgtgtcatgtcctgaataaataacaggattgactgatgacattagcaagcc

SEQ ID NO: 5214 - DNA, 120 bp, synthetic construct
  source 1..120: mol_type = other DNA
gttggccaaacaacttttggtcacctaggggttgcaggagagcacaaccccttgtaatgcttcaacttttgatttaaaccttaactatcacgggaagaaaattatttctgacttgaagaa

SEQ ID NO: 5215 - DNA, 120 bp, synthetic construct
  source 1..120: mol_type = other DNA
tggaattatgttaccatttcagactgatttcagatggggcagaatggccccttcctgagtagtccatataagaaacacatctttcttgtcatatgctgtctgtcacactttctaatacca

SEQ ID NO: 5216 - DNA, 120 bp, synthetic construct
  source 1..120: mol_type = other DNA
tatttatgaatggagcaataccagaacactaatggttcagcacttcaccaaaggtgggggcacttttataaggcgttcctggaagcaagacaagaaatttgattggtaaaagtgcaaagt

SEQ ID NO: 5217 - DNA, 120 bp, synthetic construct
  source 1..120: mol_type = other DNA
gctttcttcatgtgtttgcccatatgcagatgaagctgtcgcaggtaaactaactaactgccttcctctctcttaaatgacaaactggagactgtaatcatcagcaaattaaacatgctt

SEQ ID NO: 5218 - DNA, 120 bp, synthetic construct
  source 1..120: mol_type = other DNA
gtagagtcagaggagtgaaaagttacaaaaggttcattggtgtaaatgtgattagaccagctatgtctgctaactggcaattgtcaaagttagttagttaggattctgtcctccagagtc

SEQ ID NO: 5219 - DNA, 120 bp, synthetic construct
  source 1..120: mol_type = other DNA
tgtgcagaaggtcttgagtcttgcttggcattggagaatattccactgttgtggttctttcatattattgctatatatgttcattgtcggtacaaatactttttttttttctgagaccca

SEQ ID NO: 5220 - DNA, 120 bp, synthetic construct
  source 1..120: mol_type = other DNA
ctataaagaatattttatttgttagtgtgtttgtccataatcagtgggggtttcggacatttgggtaacagtcagctgtgtaagctgctgctttgaaaagaccacagagtcactcctttg

SEQ ID NO: 5221 - DNA, 120 bp, synthetic construct
  source 1..120: mol_type = other DNA
ctgaccagcgacctttcttctcctgcctgtctttatgatatatagcacgttctgttcaatgaataaaagcattctgtgatcctgtagttcaggaatctgccattttctaacaactataca

SEQ ID NO: 5222 - DNA, 120 bp, synthetic construct
  source 1..120: mol_type = other DNA
ctcaaattttttgacatgttcttaaaactaaaggatttgacgtcgtctgatacttttaaagaatatgaccccgatggcaagggagtcatttccaagagggacttccacaaagcgatggag

SEQ ID NO: 5223 - DNA, 120 bp, synthetic construct
  source 1..120: mol_type = other DNA
aggtaatttatctctaagtcacagcagcattctctctggacttcaggtgggtataataaatgatcattagaccaggtttcatgctagtgccagaacggtgttacctatgtgacttgaatt

SEQ ID NO: 5224 - DNA, 120 bp, synthetic construct
  source 1..120: mol_type = other DNA
tatataggttatggtttgacacatggtcacatggctccctcaattcattcaaaggtgatgggtaatcctggttttcttttccccattgactcattcaaggaacagaaggcaaaagaagaa

SEQ ID NO: 5225 - DNA, 120 bp, synthetic construct
  source 1..120: mol_type = other DNA
gaataatcgaagcctacatctttctccacgtttatagaattttatacgcacatttgaaaagttgggggaagaaagaaaggaagcttttaggtgcctgtagtgccactattctcccatagc

SEQ ID NO: 5226 - DNA, 120 bp, synthetic construct
  source 1..120: mol_type = other DNA
aagggcaaacaaaagttgaggcagcttcacacacacagatacggagaaccagaagtgccagagtcagcattctggaagaaaatcatagcatatcaacagaaacttctagtaagatgtttt

SEQ ID NO: 5227 - DNA, 120 bp, synthetic construct
  source 1..120: mol_type = other DNA
taagggaggaaaaggataggggataagcatgtagaatccacctacaagaggtactgaccagtgatgttagacctagaatttaagaacaacaaccctcataagaaagccatttgaacagca

SEQ ID NO: 5228 - DNA, 120 bp, synthetic construct
  source 1..120: mol_type = other DNA
ttaatgtccaccataacctattactttaaacccacttctctaggctttattttttcccagcccaataaattgtaccagctgttcccttagttgctgaggctcccaaattcagaaggtatc

SEQ ID NO: 5229 - DNA, 120 bp, synthetic construct
  source 1..120: mol_type = other DNA
cttcaaagcacacttaagagttaaggtcttttgttattcccacttcgcatgcagatgagcagagtgatgctacagaaaagattaagtcatttgtccatatcccacactaggaaatggagg

SEQ ID NO: 5230 - DNA, 120 bp, synthetic construct
  source 1..120: mol_type = other DNA
cagagggcttccccacagtattcccagcctaatttagctgaatatcttatttgtgactatgcctgggtgtggcataccgtattatattacattcttttgtaattgagaagagagcttagc

SEQ ID NO: 5231 - DNA, 120 bp, synthetic construct
  source 1..120: mol_type = other DNA
tgttttattatgagggaagtatctactgctattcttggcagaaatgcctcatgatttgtcacacttcacccagaaaataatgcagctttatccccagaggcctgccaagggaacaatata

SEQ ID NO: 5232 - DNA, 120 bp, synthetic construct
  source 1..120: mol_type = other DNA
tgtaggtcccattggttatttttaagcgagaaaaggaagtggcacggaaattggaatttgatgggctttatattacagaacagccttcagaagatgatattaaaggccagtgggatagac

SEQ ID NO: 5233 - DNA, 120 bp, synthetic construct
  source 1..120: mol_type = other DNA
ctctatgtattagtgaagacgctagagttgtgctttgctgctatgctcgaagtttctgtgaggataagtggtgggaaagagatttttttcttcatgggaaaaacaatgacaggtttctag

SEQ ID NO: 5234 - DNA, 120 bp, synthetic construct
  source 1..120: mol_type = other DNA
tacaagtgttttgttccctcgtgacctggcatcttgagtcgcactgcgctagtgcatctgaggacacccaaattaggcaaaagctgtgaaagaataattttaaaatggttttaaatagat

SEQ ID NO: 5235 - DNA, 120 bp, synthetic construct
  source 1..120: mol_type = other DNA
cattctgtctccttttctaatcttttctcctgtatagtggactccttttttgctaccagtgatctctcctcctgcttgtctttaattgcttttcctgttccctccattttctttttttgt

SEQ ID NO: 5236 - DNA, 120 bp, synthetic construct
  source 1..120: mol_type = other DNA
actccctctcttgaatgagagagaaatcttgttcctcagataggtattatgtaagatgctgtgaatttgtttagaccttaagcagtgtgatcacagaaggtgagccacacactagatttt

SEQ ID NO: 5237 - DNA, 120 bp, synthetic construct
  source 1..120: mol_type = other DNA
taggaaaacaaatgtatatttaaacgttgtgccgctgcctgtaaaatgaaacaccgatgggcaatccttaggatctgtgttccttatgttagaatatcatgaaacaagaactagggtgtg

SEQ ID NO: 5238 - DNA, 120 bp, synthetic construct
  source 1..120: mol_type = other DNA
acaaaatgatttatatatttatttatcaaacacataaggcttggtatgtgcacctttaaataagtggccagctccattcctgggggtggaatagctgcaagcagtctggaaggctgcagg

SEQ ID NO: 5239 - DNA, 120 bp, synthetic construct
  source 1..120: mol_type = other DNA
gagctggggagttcacagacaagtgagagaggcatataaccacctacatgcatataccagcacccacaactgtaagacaatgtggaaaataataataaaaggaattgtctacaaaatgct

SEQ ID NO: 5240 - DNA, 120 bp, synthetic construct
  source 1..120: mol_type = other DNA
ccattgatgtgaagtatcagatgtggaaactaggagtcgttttcactgacaacgtaagcctacttcattatcacaaaagaaaatgcactctgattagataagactgtgggagttctgcag

SEQ ID NO: 5241 - DNA, 120 bp, synthetic construct
  source 1..120: mol_type = other DNA
catcttgctttgtagtttttttgtcctcttgataacttgggcatggatagatccaggatggagtctttccttagacagcgttctgctattttagtaggcttttatccacctgcagtttca

SEQ ID NO: 5242 - DNA, 120 bp, synthetic construct
  source 1..120: mol_type = other DNA
accacttttgctgctttttttggctctggtaacctcaccctggggtttgtccagtagtcttctaatttaatggctttgccacttacaatgattttagacaatagcttaactagagcaagc

SEQ ID NO: 5243 - DNA, 120 bp, synthetic construct
  source 1..120: mol_type = other DNA
taactagtaggtctcagcaaacactgatttagtcagtgaataaatgaaaagcaaagaagggaagaaaaggagggagagaaagcgactggttcttttgttggctgtagagcaagggttctt

SEQ ID NO: 5244 - DNA, 120 bp, synthetic construct
  source 1..120: mol_type = other DNA
taacccataacaatagtcatgcgttctgttttctgacatgttctttccccccgttttgtcttaatagtccttcctctacctagcctggtatatgactatgtctgttcttggacactataa

SEQ ID NO: 5245 - DNA, 120 bp, synthetic construct
  source 1..120: mol_type = other DNA
gttcttaatgttaagacttcccattatcctgaagcatattgcagaagtgtgcactgatccgttcacttgctatttttcaagtgtccactgggtggcgacatattctgtgttagttatttg

SEQ ID NO: 5246 - DNA, 120 bp, synthetic construct
  source 1..120: mol_type = other DNA
caccccacctggcctcaaattttcatttgcagaaatatgtagagctttatagtcctaacaggtgaaacatgcagaaattcacagtaaccttgcacttcatttatagaaatgaatgaaacc

SEQ ID NO: 5247 - DNA, 120 bp, synthetic construct
  source 1..120: mol_type = other DNA
gcccatgtagatgtcacgtgtcaattgtatgtcctacatttctaatacctggtccttgtcacattgttttccagctcgtattaaccgttggcttattagctgttgttgtatacctataca

SEQ ID NO: 5248 - DNA, 120 bp, synthetic construct
  source 1..120: mol_type = other DNA
tcaggaaggggaacatgagacaaaatatatatcactagctggaaagagatgtatccttcagtaagctcctcacgaaaatacctacatcatttgtgttggggatgtaggtatagaggctga

SEQ ID NO: 5249 - DNA, 120 bp, synthetic construct
  source 1..120: mol_type = other DNA
gatatgctggaatatgcataacatttttctggagggatttattcataggacactgtgaacaaggattcctacaggggtaggaccatagatcacaggggaaagaaacttgtttgcttttca

SEQ ID NO: 5250 - DNA, 120 bp, synthetic construct
  source 1..120: mol_type = other DNA
agcagagcaaatcatattgttcatgtgaaaatcatctgtaattttcaacatttcctgtcacgattgccgttctgaggtgtttcacatgtgactttgtggtttccacgtgctagtgaccta

SEQ ID NO: 5251 - DNA, 120 bp, synthetic construct
  source 1..120: mol_type = other DNA
ttttttttaacttacagcaactgtaagaaaactggattcaatgcaataagactgacccgttactagtgacgactctccatcagagtcactaacatgcaacactttaccccctcctcccac

SEQ ID NO: 5252 - DNA, 120 bp, synthetic construct
  source 1..120: mol_type = other DNA
ataaacttactatcttgtctttgactgggttgagtatatgtcttagatgtttcttccctgcaagagaaaactcagttccaagacacaagccactttttcatccctagctcattcacagtg

SEQ ID NO: 5253 - DNA, 120 bp, synthetic construct
  source 1..120: mol_type = other DNA
aaccagaggctgcaggggaaggtgtcaagacttatgcactttgggaaaaatagctttccaggtgattaagatgaaaagtacactcctagggaaataaacttgcttaggtaattgttctaa

SEQ ID NO: 5254 - DNA, 120 bp, synthetic construct
  source 1..120: mol_type = other DNA
taagcctgatgtacgagtcagaataccaacatgctactcattaaaagttaatgcaacaagttggcacattctcttccctagacaaacacctctatgggaagccaaattttaacccaagac

SEQ ID NO: 5255 - DNA, 120 bp, synthetic construct
  source 1..120: mol_type = other DNA
gttttgaaaaactacagcagtagcttcaggatatttttttaagtgatggatggtctgtaagattttacttccagagattgactcagtaggtagtaccaggaacccagaatgttgccacgt

SEQ ID NO: 5256 - DNA, 120 bp, synthetic construct
  source 1..120: mol_type = other DNA
cagcagcaactaactaggttttgaattgatgggtgacacatccattaagtcagggtatctggaacagtctaagaaaatctcagaggaaggattattaatttaggccctacaggatgagta

SEQ ID NO: 5257 - DNA, 120 bp, synthetic construct
  source 1..120: mol_type = other DNA
ccagagtgaggattaggaactacagagataactcgggtttgtcgagaaaaaaaaatgggtaatgtccctccaagaagtgataccatgtcttttttccagtgctatatgttccacatgtat

SEQ ID NO: 5258 - DNA, 120 bp, synthetic construct
  source 1..120: mol_type = other DNA
caacaacaacaaaaacttctaagccctgtggttgttgagatttttaaaaatgacatacaggccaggcgcaggggctcacgcctgtaatcccagcactttgagagactgaggtgggtggat

SEQ ID NO: 5259 - DNA, 120 bp, synthetic construct
  source 1..120: mol_type = other DNA
atctgccattgctgaggcatgagtaggcagttttaccctcacaatgtaaacaaagccactgggaagttcgaactgggtggagcccactgcagctcagcaaggccactgcagccagactgc

SEQ ID NO: 5260 - DNA, 120 bp, synthetic construct
  source 1..120: mol_type = other DNA
gctgaaaaacacagcacaagaactttgtgaagcatatataagtagcaatagccgaatcaatcaagcagaagaaaggatatcagagattgaaggtgacctcaatgaaataaggtgagaaga

SEQ ID NO: 5261 - DNA, 120 bp, synthetic construct
  source 1..120: mol_type = other DNA
agcaaatggaaaacaaaacaaaacaaaaaagcagggattgcaattctagtctctgatagaacagactttaaaccaacgaagatcaaaagagacaagggcattacataatggtaaagggat

SEQ ID NO: 5262 - DNA, 120 bp, synthetic construct
  source 1..120: mol_type = other DNA
gggatatcaccaccgatcccacagatatacaaactaccatcagagaatactgtagacacctttacacaaataaactagaaaatctagaagaaatggataaactcctggacacatacaccc

SEQ ID NO: 5263 - DNA, 120 bp, synthetic construct
  source 1..120: mol_type = other DNA
caatgtgcaaaaatcacaagcattcctatacaccaataatagacaaacagccaaattgtgagtgaacacccattcacaattgctataaagagaatacctaggaatacaactttcaaggga

SEQ ID NO: 5264 - DNA, 120 bp, synthetic construct
  source 1..120: mol_type = other DNA
atcaaaaagtgggtgaaggatatgaacagacacttctcaaaagacgacatttatgcagccaacaaacatatgaaaaataggtcatcactggtcattgaagaaatgcaaatcaaaaccaca

SEQ ID NO: 5265 - DNA, 120 bp, synthetic construct
  source 1..120: mol_type = other DNA
accatttcaccaaccttatgagaatggtgctcttattttatgcatgaagtaactgagccacaataagtctaaggaacttggccaaagtgcacagctaaacagggctggaatccatctata

SEQ ID NO: 5266 - DNA, 120 bp, synthetic construct
  source 1..120: mol_type = other DNA
catctgtatatgccaagttaacaaaaggtttttcctgctgtcacttcattttaaaacactcttttcagtgagtgtatgtcccagtaactgcacatacttctgtccccaaagacagaacac

SEQ ID NO: 5267 - DNA, 120 bp, synthetic construct
  source 1..120: mol_type = other DNA
ttatataccaagactgattttagggaagttgatgtgcaggtttttttcttagcagcctcagtgctaccagatgcagattaaattctgatgatgaggctggagaggaataccagtgaatga

SEQ ID NO: 5268 - DNA, 120 bp, synthetic construct
  source 1..120: mol_type = other DNA
ttgattgtagttcctaaaatacagggtctcataaacatgcttcagatggcataaaacagcttacaactggcagggaaggatgagcaccagagtcacatgggacaattattgaatacattg

SEQ ID NO: 5269 - DNA, 120 bp, synthetic construct
  source 1..120: mol_type = other DNA
attcttaggctgcttcctagggagatgcgagtctccgtttttcttcttacagatcttaagaggactttcagatctcgtcaggcactgttggataccaacttaaaagctgcatttaaaaaa

SEQ ID NO: 5270 - DNA, 120 bp, synthetic construct
  source 1..120: mol_type = other DNA
cacacaggacaggtaggtaaattattacatgtcatcttctgaaagaaatgatagagaagctctaaatatcagaacaaaatgtgtgcattaaacagtgaggcacggaattactttcagata

SEQ ID NO: 5271 - DNA, 120 bp, synthetic construct
  source 1..120: mol_type = other DNA
gtagcacttaacagattgccatggacaccagttgcgaagggaaatagtgccttactatatgtgggttgagctatgcagaagatacgtgcatgaaaaaacatctttattttctttatgtcg

SEQ ID NO: 5272 - DNA, 120 bp, synthetic construct
  source 1..120: mol_type = other DNA
aaagcatggagatctacaaaaataggatttccacttggagaaatgtcgctgggacagttaaaccgtgtcccacactggactcaaagggaacacaggagaagagaactagatctgtcaggg

SEQ ID NO: 5273 - DNA, 120 bp, synthetic construct
  source 1..120: mol_type = other DNA
ttgttaatactcttacaggaggggaagaaaaggcaactatcagtgcctagggccagccctgggacccaggccactctcctctggaagccttttatttttgtaggactgacaatatgacct

SEQ ID NO: 5274 - DNA, 120 bp, synthetic construct
  source 1..120: mol_type = other DNA
gagatcttggatgggttggctgccatgaacttctcctccatctggatcttcagggcgtccatctccccagactcccccaggacccttttggtgaaggcaaagagaatgtccatgcaatgg

SEQ ID NO: 5275 - DNA, 120 bp, synthetic construct
  source 1..120: mol_type = other DNA
tcctgtctgtttgagtctccatgtctgcatctgtgacccagaaaaatgggtcctttgcagggttccttctcagccccctcattccttaatcttcagtgtgtacctacacaatagagctgt

SEQ ID NO: 5276 - DNA, 120 bp, synthetic construct
  source 1..120: mol_type = other DNA
aggggcatggatataaatcatggaataaagagtgaaataaacttgtcttatatggcccaagtgccctttccagactccttatataataatgtcactgactgacatgggtccagtgtttac

SEQ ID NO: 5277 - DNA, 120 bp, synthetic construct
  source 1..120: mol_type = other DNA
agtttggtggtccctcaaaactttagataagtggttttcaggggtgagggagaggggaaatgaatggggattgactattaaatgggtagagtttcctttggggaaaggaatatattctaa

SEQ ID NO: 5278 - DNA, 120 bp, synthetic construct
  source 1..120: mol_type = other DNA
aagatgttgattttctcaggactttggtcatctgtctccaccatcatggtcaccatattcaagcagatcagaaacatgatggtgacgtcaaaggcctgcttggtcacaatgtcgaatatg

SEQ ID NO: 5279 - DNA, 120 bp, synthetic construct
  source 1..120: mol_type = other DNA
gagatttgctcaggtacagagggttcctgtgggtggggagtgtcctgggatgctacatccttatcataccttcctccctatctctacgaggctgggacctctcttcatgatcagacatct

SEQ ID NO: 5280 - DNA, 120 bp, synthetic construct
  source 1..120: mol_type = other DNA
gtcaatgatgacaccaataaagaggttcagggtgaagaaagacccaaagatgatgaaaatgacaaaatagatgtacatgtagaggttgtattcccactgaggctgctcttcatactgcaa

SEQ ID NO: 5281 - DNA, 120 bp, synthetic construct
  source 1..120: mol_type = other DNA
gaagaatctcaaccttcccttgtacttaagggggttcttttgtcaatggtgtgttggtaaatggttaacagctgacgtcccagaagaaaagaaaaaaccctgattgttggtttgccaatt

SEQ ID NO: 5282 - DNA, 120 bp, synthetic construct
  source 1..120: mol_type = other DNA
tctgggctgctatgcagaaagagcccaagagacacgcttggtgtgagactgactccccagtgaagtctcatttgtgtttttggccaaatccagtcctgccccgagccttttttttttttt

SEQ ID NO: 5283 - DNA, 120 bp, synthetic construct
  source 1..120: mol_type = other DNA
cattggtcaaggctaatggtaggttaattttatggaatgtgtgataatcactgaagccaccatactcacaaaatcagtggaaaccctagaaggattgtgcgtgcttaaacattgcacatc

SEQ ID NO: 5284 - DNA, 120 bp, synthetic construct
  source 1..120: mol_type = other DNA
acttgatgggaaaggacctctcaaaacatgtccccaagactgggtttcctaacaatcccatgagtccttacatttttggagctaaattctggtttattttaggttgttgctattgggatg

SEQ ID NO: 5285 - DNA, 120 bp, synthetic construct
  source 1..120: mol_type = other DNA
atggtgcctgctgggtcagtgagagacaaacaaacatgtcttctgaagccacacagaactggtatgttttgttaaaaaaaatatcccacgcaagtaaacacaaacacacacatgtgtatt

SEQ ID NO: 5286 - DNA, 120 bp, synthetic construct
  source 1..120: mol_type = other DNA
ggcttctgggcctttactgagaggctgctatgtgtacttcacatacatgctctgtaataaccctactaaccctgcgatgttgcgatgcgccacctctattctacagatgggaaaactgaa

SEQ ID NO: 5287 - DNA, 120 bp, synthetic construct
  source 1..120: mol_type = other DNA
cttggcgtcctccctgcctcctctctgtctctgacaccctgtgtctaacccatcaggatttcctgttggctctgccttcaaaatacatctgaagtccaagtgtttctcaccacttctact

SEQ ID NO: 5288 - DNA, 120 bp, synthetic construct
  source 1..120: mol_type = other DNA
caccttcctccatgtggggaagagtttttattttgttccctaagatccccagcaccataacagtacttgcacacagtagagacccaactgcatttattgaaaaataatgcagaattcatc

SEQ ID NO: 5289 - DNA, 120 bp, synthetic construct
  source 1..120: mol_type = other DNA
aaagcccttttcagtctgcagatcctgacccctactctgttttgttcgatcccctagagaggtccctccacctgcaccctttgccttcgcttcctttgtcctcagtgagtgcaaacccag

SEQ ID NO: 5290 - DNA, 120 bp, synthetic construct
  source 1..120: mol_type = other DNA
accaggcattggtgaagtacttcttgaagccgtaggccacccacttgagcagcatctccagcacgaagacatatgtgaacatcttgtcggcatactcaagcagaaccttgatggtcttcc

SEQ ID NO: 5291 - DNA, 120 bp, synthetic construct
  source 1..120: mol_type = other DNA
catttgtagatgtggtgtttaggaacaacaggtgtagataaagtcaaatgtcctgcaattctcaggctctaggagtcaaagttttccaaatcctaggagttgtaagtctttctccacctc

SEQ ID NO: 5292 - DNA, 120 bp, synthetic construct
  source 1..120: mol_type = other DNA
ggcaggaagggggctcttctctaccaccccaccgacattgctgtcatttctcctttttcacttttcccagcctaatgaaagaaacttgtattttgttacattttcatttattttattagg

SEQ ID NO: 5293 - DNA, 120 bp, synthetic construct
  source 1..120: mol_type = other DNA
cttgcagtgcttggcatgtaagaaatatttgagagatgttacttgtgactaaacggtttctcttaggataatacaataatagcaacaattctttgcatatttatttcataactggccata

SEQ ID NO: 5294 - DNA, 120 bp, synthetic construct
  source 1..120: mol_type = other DNA
tcatgcactagagtactttaaatagcattggaattattttcttccttgagaatgtgaaagatctgtttttggggatgtgagaaattagattagctagtggttatcaatttggttgcctta

SEQ ID NO: 5295 - DNA, 120 bp, synthetic construct
  source 1..120: mol_type = other DNA
gatttatagcacactatcatcaccattggtgcatgagtggccttcttttgttaattagttaattaatcaattgaacccccctaaactaccaccaaactattttctgtttgatccaaggtt

SEQ ID NO: 5296 - DNA, 120 bp, synthetic construct
  source 1..120: mol_type = other DNA
gccactgcacccagccaatcgttatatttttattataggttggaccctctttctctcatctcaagcttttaacattgaattcaacaaacaaaaagcaccctgaatttgttgtcataattt

SEQ ID NO: 5297 - DNA, 120 bp, synthetic construct
  source 1..120: mol_type = other DNA
agatttctctttttctcaatatatcattgacgtggttttttaacaacagagcttggctgtctaccctgattagattcaccagatgcttgccaaaactcctcctcacttatgccaagctga

SEQ ID NO: 5298 - DNA, 120 bp, synthetic construct
  source 1..120: mol_type = other DNA
gctgaatacatagagctagatacaaggagggtttttagaagactgactgaacaaatgagaagtcaaggcaaaggactctggaatctgactgcttgggttcaaatgccagatctgtggttc

SEQ ID NO: 5299 - DNA, 120 bp, synthetic construct
  source 1..120: mol_type = other DNA
ctgtgaatgcccacatctaatggcagaaggttggatggttgaagagatgactgagagaaagagctacgatgatgggggtggcgaacagggcaatatggtgagcagggccgtgtgagcgag

SEQ ID NO: 5300 - DNA, 120 bp, synthetic construct
  source 1..120: mol_type = other DNA
ccaagcttattttatccccagctcattttatccccagctatcctccaaatataccaccaatccataaaagctatagatgccaatcaacatggccacatgtcatccctgcctcaaggattt

SEQ ID NO: 5301 - DNA, 120 bp, synthetic construct
  source 1..120: mol_type = other DNA
agctctacttgggacaggatgaggctgactccagctggaaagcctttccgtagcttccttctttgcttcatcctgtttctcttactttctcctgagaacacccctcaacaagtcatttgc

SEQ ID NO: 5302 - DNA, 120 bp, synthetic construct
  source 1..120: mol_type = other DNA
cagcctgtttctccttatataggctcccccatgaactgatttgaagaaaggaagacttataaaattcattcaaaggttagcatccgtgtgagagagccacttctctcccatggcattttg

SEQ ID NO: 5303 - DNA, 120 bp, synthetic construct
  source 1..120: mol_type = other DNA
acaggaccaaaacacagggatggagtatgtggagagggtgaacacatggaggtagtgggttagtcctgcatcagagtttgggaccagaatttccagaatttcccattggccctgggccct

SEQ ID NO: 5304 - DNA, 120 bp, synthetic construct
  source 1..120: mol_type = other DNA
ctgcctgctttgtgcagactctggtcccaagtgttaaaaataacaggttgcgagataagatagtgctgtccctgacacctcagtcttagggatgcttatttttaaatctcagaatgagcc

SEQ ID NO: 5305 - DNA, 120 bp, synthetic construct
  source 1..120: mol_type = other DNA
cattttattgaatgtggaaggtttggctataaaagaaaatacaaatttgaatccctctttccaagggcccagacacagtctgaattgaggatgtcgtgtcctggctcaggttcaatggga

SEQ ID NO: 5306 - DNA, 120 bp, synthetic construct
  source 1..120: mol_type = other DNA
ctaaaacacacctctaccagggaccccatacctatcagcaagctgggaatgagaattctgataaaagcggcctcagaaacatgcctttggcttaaaagtaatacatattcatgtggaata

SEQ ID NO: 5307 - DNA, 120 bp, synthetic construct
  source 1..120: mol_type = other DNA
gcctggataaggcacatgggagaagagagcagacaggtttggggaaaggctctggaatctatagcccatagtacttgccccacagcagcctgaaaaagtgaatgtaaaacctctctgtga

SEQ ID NO: 5308 - DNA, 120 bp, synthetic construct
  source 1..120: mol_type = other DNA
ggtgaatgatgtcagggctggcgctagacctcatttgcctctgtattcccaacagcatgtggcacaatgttttccatgcaataagggcttagaaaatgtttaagataaattgaaaaaaca

SEQ ID NO: 5309 - DNA, 120 bp, synthetic construct
  source 1..120: mol_type = other DNA
tggagtggtgaacagatagattggtgtgttcattggtgggtgggtgattgataagtggatgatcaatagatagatggctgtatgagcatataggtgcaagaataaatgggtacattgaat

SEQ ID NO: 5310 - DNA, 120 bp, synthetic construct
  source 1..120: mol_type = other DNA
ttaacacttactgaatgtctacgtgccaggccttgtgcttagaatggatgaactcaatcagaactcccaataaccacatgaggttggcaccgctattacctcatttgacagaagaagctg

SEQ ID NO: 5311 - DNA, 120 bp, synthetic construct
  source 1..120: mol_type = other DNA
tcatctgtgaaatggaaatgtagtaataccagccccactcctggatcctgtgagggctaaagggttcactgtggaccacaaagggctttgcaaatcatcctgatggccaccacaattgct

SEQ ID NO: 5312 - DNA, 120 bp, synthetic construct
  source 1..120: mol_type = other DNA
gaggttaagtaacttgtctggggtcatgtagctattaagtttgagaatgaggagaggaaactagtgctgctcttcagaatttagggaaacttcctctctcttctaggaacattcctgagt

SEQ ID NO: 5313 - DNA, 120 bp, synthetic construct
  source 1..120: mol_type = other DNA
atctaacaactatttgtttattgagcctcttctgtttagaagataagctgtgtgatggcagggacctttccctactgtacctggaatggtaaccagcccataggtcgtcctctagtatct

SEQ ID NO: 5314 - DNA, 120 bp, synthetic construct
  source 1..120: mol_type = other DNA
tttaaaaaaaaaaaaaaaacccaacaacttcccaggtgactctaatgtgcagctaagcttgagaagtacatacattttggtaacagacctcttccttccacaggctcatgccaggctttc

SEQ ID NO: 5315 - DNA, 120 bp, synthetic construct
  source 1..120: mol_type = other DNA
tcaatgaacgtttttagagattctgacacatagtgctaaatgatcctaggagaaaggttttaaccaagtccacaagctgcatgtgagtaactgcttccctttaactatgctaacactggg

SEQ ID NO: 5316 - DNA, 120 bp, synthetic construct
  source 1..120: mol_type = other DNA
agtttatatctgtgatttaccaaatattgttcaattgctccccaaaatggttgtaccaaatccacactcttacaagctgtgagttcccactgttccacaaccctgtcaacacacagaagt

SEQ ID NO: 5317 - DNA, 120 bp, synthetic construct
  source 1..120: mol_type = other DNA
agccactgcgtccagccttctcctactgatttataatgccacctctgttatttatcaagtcaccaaatatggattgttctatttctgtggtctcaattctgtagcacaatctgtttttcc

SEQ ID NO: 5318 - DNA, 120 bp, synthetic construct
  source 1..120: mol_type = other DNA
ttttatcatctctatcaagcagttctactatgtgacatttttaaggggatagcctgattgtgtctgcgtgtgtgtatgtctgctgactcttcctcatggtggaatatttccttctgtgtt

SEQ ID NO: 5319 - DNA, 120 bp, synthetic construct
  source 1..120: mol_type = other DNA
tttctggttcaccatttttctgaatgtatagtcatatccttacggggctactcagtttcaacccctactcacactgtcccaaggttgaatgtcttgtctctacatgctcattaaaatcca

SEQ ID NO: 5320 - DNA, 120 bp, synthetic construct
  source 1..120: mol_type = other DNA
gtgccatgagacttctacccactgagatgtagctttgccttctgtttgcacatagaaggaaagaaaagtaaaattacagcaagttgactcaaattggtgaaaaaatctgaataggccctg

SEQ ID NO: 5321 - DNA, 120 bp, synthetic construct
  source 1..120: mol_type = other DNA
aacaaatatttattgggccaattactgagtaaactgcttgagatcagctagttagtaagagctgagtcagaattcaaatctggctctgcctgatttacttactacacccagctatccatc

SEQ ID NO: 5322 - DNA, 120 bp, synthetic construct
  source 1..120: mol_type = other DNA
ctccttaatctggaaatatgagagaagaggtccatagggacaggaaacaaagatggaggtggggaaaatggggacaggagagattatcaggacaaacgtacaactgcttaagacaacagt

SEQ ID NO: 5323 - DNA, 120 bp, synthetic construct
  source 1..120: mol_type = other DNA
gagcctgatgctgccatacacattagtacatgcaaaaatgatctgggagtcttaactgaccacaagtttcctagcgtcaagagcataaagaagctgaaaaaaaaatctaacatgctctaa

SEQ ID NO: 5324 - DNA, 120 bp, synthetic construct
  source 1..120: mol_type = other DNA
caatggtactaccctaggtccaacgcaaccatgaatttggccagcttaactcacaagcaagttttaaattctcccaacttctcccctccttctttgccatctatgatagtttggttatca

SEQ ID NO: 5325 - DNA, 120 bp, synthetic construct
  source 1..120: mol_type = other DNA
aattttaatgttaccttcttgggaaggcctttcctgagtattctaatagccctcatcctcatccctccccttagcagctttctatcacatgacttattgctacctgaaaatattgatcag

SEQ ID NO: 5326 - DNA, 120 bp, synthetic construct
  source 1..120: mol_type = other DNA
aatgggtgaagtcagaattcctggtaatgaagtgcttgaacttggattcctcccgacatgtgcagtacaatgagatgattttctccttaatgagattaggaaattctattagcgctccca

SEQ ID NO: 5327 - DNA, 120 bp, synthetic construct
  source 1..120: mol_type = other DNA
acatttgctgttccttgtgtctggaacaggcttccccagatgatggtaatgaaggctttactagttgtgacatagttaactatcatccctctttatcaccattacacacaatatagacat

SEQ ID NO: 5328 - DNA, 120 bp, synthetic construct
  source 1..120: mol_type = other DNA
atttggaagaggggatgtggggttagagataatcctgtatcttctgggatgtctactcccctcaaatctatgtctctggagctgggagcctgaaacttaactgggcttggagttagagct

SEQ ID NO: 5329 - DNA, 120 bp, synthetic construct
  source 1..120: mol_type = other DNA
ttttccctatcagtaagtggacttgcacacctaccccaaaatgaggacatcatggagataaactcagacagacccagaatgttttgggaaagatcaagatccaggaaggaagataggagt

SEQ ID NO: 5330 - DNA, 120 bp, synthetic construct
  source 1..120: mol_type = other DNA
gagaatattccatcctacagggagaaagagtgtcccactcacagagcagagagcatcctatacaaagggactggtacttcatcaccagcaaaaagaaagtttctttgctgctgatccctt

SEQ ID NO: 5331 - DNA, 120 bp, synthetic construct
  source 1..120: mol_type = other DNA
atcttcctctttactcttcttatatgtactctgctaggcctaaatcaagctcccttctgcccatacgtcacaccatccccagctactatcaagttgcctctcctcacagagaggaagcac

SEQ ID NO: 5332 - DNA, 120 bp, synthetic construct
  source 1..120: mol_type = other DNA
tcagagctgttcccacacagtaacacatcagaggtgccgttcttgagcaggtaattttctgtaagagaaacatcatgctggtgaggggcactctggcccaaaagtttccgccttgcatcc

SEQ ID NO: 5333 - DNA, 120 bp, synthetic construct
  source 1..120: mol_type = other DNA
ttgggtgtacatggaagttttagaactgctgttatgaggccactgctgaactactcattgagtgtctatgttttgttttccaaagtggactgctggtgtatgtaagaggccctaacttca

SEQ ID NO: 5334 - DNA, 120 bp, synthetic construct
  source 1..120: mol_type = other DNA
gccaaatatatggcatgggtgtggaaagtgctgctttcttgagacaacacatactcagagcatgaccccctttggctagtctgaaggtgtgctaggcctaccccttttaatgtagtccat

SEQ ID NO: 5335 - DNA, 120 bp, synthetic construct
  source 1..120: mol_type = other DNA
acctggtctgtggacatagtggccaagggtaactcacccctttgaacatttctcatactgatgatagatttcacttctggcaagaatggttgcaacgaaactgcaggattctttctgaaa

SEQ ID NO: 5336 - DNA, 120 bp, synthetic construct
  source 1..120: mol_type = other DNA
ttatgaacatactatagtgggtttagaggccagaaagctcaatgtgaacatagcataactgggggctgctctggcaagataactagccctaccagggggagtccagattccttattggag

SEQ ID NO: 5337 - DNA, 120 bp, synthetic construct
  source 1..120: mol_type = other DNA
ttcctctttcactccgggtgtgtgtgggggttcccacaaacacacttcttttggtttcctcatcagaatctgacatttcaggctgaagcaattcatgtaaaacttttagctattcaaata

SEQ ID NO: 5338 - DNA, 120 bp, synthetic construct
  source 1..120: mol_type = other DNA
tgggcatcttacctgggataactgaaatagtttttagagctctcaggactctgaaagttcgaagagccgacaaattgcctagttttatattttctgatacatacctgcagaatcaaacca

SEQ ID NO: 5339 - DNA, 120 bp, synthetic construct
  source 1..120: mol_type = other DNA
tgacttgtgacatttaatcaaaggctttgcatccagggtgtgtgacatttaaccgaaggtgtctggtatttaacaaaggacattggacttgggatgtctgatgtttaaccaagtgggtct

SEQ ID NO: 5340 - DNA, 120 bp, synthetic construct
  source 1..120: mol_type = other DNA
tgtctgtctgggagagcaatcatgagttagaggaagtcttaaaagaggacttacagggtaagggtgtggaatgtctggggccatgttggtgacttggtgtgctactgcctcttttattct

SEQ ID NO: 5341 - DNA, 120 bp, synthetic construct
  source 1..120: mol_type = other DNA
actgaatggaatgtttcccttcactcaaatctcctttgatcatcctagagtcccttgttactgaaccattgcatctctaagagaatgcatttcaaagccagaatccctgtcaatcaaagc

SEQ ID NO: 5342 - DNA, 120 bp, synthetic construct
  source 1..120: mol_type = other DNA
aaatagaagcaatcagaagagaaattcctttcatttcattatcaactcttatcaatctacctccatctccacctgaaattcagccttccccactcttcaggtcgatgctcccccttggca

SEQ ID NO: 5343 - DNA, 120 bp, synthetic construct
  source 1..120: mol_type = other DNA
aatccatactgggtttggggcaagtaagtggtattgtctctcagagccagttttcccacttgtaaaatggagggctagagttggcttacaaatagtgtacctagagacagagattctgat

SEQ ID NO: 5344 - DNA, 120 bp, synthetic construct
  source 1..120: mol_type = other DNA
aatttcattcttaatcatcttggaatccaggtcaccattcgcagtgggccaggggttgaaatattggtttctcttggtggaaagggcagaggatactaaaccagaatcttaacgatgtcc

SEQ ID NO: 5345 - DNA, 120 bp, synthetic construct
  source 1..120: mol_type = other DNA
ttgctctaaacatctggctaacgaatccatcgtccaatttgtttattccatattatcgtgtaactgccatgtgtccatctgaactctctgtattctctctcggttgtcttggtggaagaa

SEQ ID NO: 5346 - DNA, 120 bp, synthetic construct
  source 1..120: mol_type = other DNA
aaatgctcaataaattattattatttcagaactttctccaatgtcatcattcctctttaggcaggacagggagaaactttctactttgccactctggagagcttcctccctagaaggcac

SEQ ID NO: 5347 - DNA, 120 bp, synthetic construct
  source 1..120: mol_type = other DNA
aagtaccagagctgtgcttcaggtctacttgtgggctcttggccttgaactgaactgcccaggacttctctgagcctgactctggctacaattcctagctgctgcttcaggctagacaaa

SEQ ID NO: 5348 - DNA, 120 bp, synthetic construct
  source 1..120: mol_type = other DNA
tcctaaaatatgcaagcaatgatgctaagagtgaatattcattgagcccttcctaggtaccagaatttgctctccgtgtccatcagcgaattcagttttcccaacaaccatatgtgatgg

SEQ ID NO: 5349 - DNA, 120 bp, synthetic construct
  source 1..120: mol_type = other DNA
ttctagattatccaggtagactcagtataatcacaggggtccttttaagcaaaagagaggcagagtgttgtgacatgaaattcaaccggtcattcctggcttgatgatgacagggaacca

SEQ ID NO: 5350 - DNA, 120 bp, synthetic construct
  source 1..120: mol_type = other DNA
tagcaagctcttgtctctctgccacttcactgctcaaaatccttgcctggttcccatggccttgaggacagcacttgcacaattgtcaatccttcttctgcacgtatgagatctcttcct

SEQ ID NO: 5351 - DNA, 120 bp, synthetic construct
  source 1..120: mol_type = other DNA
gtctttgccccacttaccattcccaaagggcgttgcacagaactttgcacatgtggaacttagatgtttgaatgagcataaaaatttaagcacagcaaaagttcaccattcaaaacatga

SEQ ID NO: 5352 - DNA, 120 bp, synthetic construct
  source 1..120: mol_type = other DNA
gctaagaattttgcatttttacaaacttcccaggtgagactgagatggccctcagattagcatttggaagcaactgccctagggtggcatgcacatgggaccttgctacacataggttct

SEQ ID NO: 5353 - DNA, 120 bp, synthetic construct
  source 1..120: mol_type = other DNA
gcctcagtcctggttatttagtccctcactaggtatctgtaatcctgatgcctcctgccttggccagaggttagtgagtgaagtctttgtcttggcctcaaaaaagtccattcagagaag

SEQ ID NO: 5354 - DNA, 120 bp, synthetic construct
  source 1..120: mol_type = other DNA
cagacgtcatttcttctgggatcctcagtagcttagcttctagaatgttctgaagaatcagaagagggtttctcaaactttcatgtgcccaagaatcccctggggatcaaatgaaaatgc

SEQ ID NO: 5355 - DNA, 120 bp, synthetic construct
  source 1..120: mol_type = other DNA
catgggcaaggcagtgagtccactattctgccgaatgagctggtgggacaaggttctacccaatctggtctggggagacaagctgaccagatagattaggaccaaaagttctgttgtggt

SEQ ID NO: 5356 - DNA, 120 bp, synthetic construct
  source 1..120: mol_type = other DNA
ttcacatgcacaaccactcacgtatccaatgcatgcatgcacacccaaagacacggcccaggctcatccccaggctcttggtcttaaaccacagtcacacactcttgtagtcacattttc

SEQ ID NO: 5357 - DNA, 120 bp, synthetic construct
  source 1..120: mol_type = other DNA
atctcaggctgcataattcctgtttttattccagaattccaaaattaaggtgattggaatatagatcaccagtgactcatttccccagagcctcatgagccaccctaaatagagccccat

SEQ ID NO: 5358 - DNA, 120 bp, synthetic construct
  source 1..120: mol_type = other DNA
ccaaataaaattctagcaataaattgaatcatactgcaaaaagaaaaatgggaagagctgatggagtatctctggctcctcacactgctccttgctcccctcctcccaaatgtgaacaaa

SEQ ID NO: 5359 - DNA, 120 bp, synthetic construct
  source 1..120: mol_type = other DNA
aaaaaaaaaaacagtctggatgacagcagcttcttacagggcaaccctctccactgtgagcaatcagttccataaattgggaagccacctcttttgcttggacttaatttctaaaaacag

SEQ ID NO: 5360 - DNA, 120 bp, synthetic construct
  source 1..120: mol_type = other DNA
agttggtttcctttttaatcctatgtgttttattttgtctcaaaatatgtgcttctgagatgggcttcgctcaactggtagagaaaggttaagaccctggcttggtccttgctcaggtgc

SEQ ID NO: 5361 - DNA, 120 bp, synthetic construct
  source 1..120: mol_type = other DNA
ttggaccatggcagtgcctccctctttccttctatcccacacatgcagccccctgctcctagatttagacattctccaaaattctgtgtgccctgagtgatgccagagtcacctcctgct

SEQ ID NO: 5362 - DNA, 120 bp, synthetic construct
  source 1..120: mol_type = other DNA
attttggtctccttggaatcggagcctctggaacacagcatgcaaataatattctttgccatgtaaatttatgcaaagcattgtgtggaagtggttcccaggcttcctagaaaatccctg

SEQ ID NO: 5363 - DNA, 120 bp, synthetic construct
  source 1..120: mol_type = other DNA
tgtgtacatggtcctaaaaatgactacacagaatacttttcttcccaaagtgatggatcccaaatcaacaagagataatgaggggatgaggaagagtcatcagtaaagagagtctgtggt

SEQ ID NO: 5364 - DNA, 120 bp, synthetic construct
  source 1..120: mol_type = other DNA
tcactgcatgtggctaccaagtgcttggaatgtggctactgtggactgagttgtgctattgtaaagtcacatccattttgcaggcttagtacaataaggaatgttgactatttcgttaat

SEQ ID NO: 5365 - DNA, 120 bp, synthetic construct
  source 1..120: mol_type = other DNA
ctcatttacatacatttacatctcatttattccaacacccaggctgaagccgaggctaattcagctgacaggaaaaccccacccgctttagctctgctgctctgctgaagtgattcccca

SEQ ID NO: 5366 - DNA, 120 bp, synthetic construct
  source 1..120: mol_type = other DNA
cccacctctagggtctcttagtgtccagagggaaataagccaatcaaccaatacactaaatttatgccacaaaagtgtccatgatgtattatagccaaatgtgcaacccttttttcttaa

SEQ ID NO: 5367 - DNA, 120 bp, synthetic construct
  source 1..120: mol_type = other DNA
cctgaaacagaagctcagcaattagacatctaataggcacctaggctccgcaagcaagtgggggctttccttgggtttccagttttgctggcaactagctgtcgctttatttaactggca

SEQ ID NO: 5368 - DNA, 120 bp, synthetic construct
  source 1..120: mol_type = other DNA
attttcactgtccttttctgcccctccagaatagtaaacagagtgaggaatggacaagagaggttgagaaactgttctatcagactctggcttcgcaaatcacaactaaattttatgttg

SEQ ID NO: 5369 - DNA, 120 bp, synthetic construct
  source 1..120: mol_type = other DNA
ctgtatggattggtttaatggtatctccctacttgtatgtaaacttcataagaacaattgttatagcttgtacaccttctagaaccttccatggcccaaaggcatgaactctgcctcaga

SEQ ID NO: 5370 - DNA, 120 bp, synthetic construct
  source 1..120: mol_type = other DNA
ggctcgatctaatggacacttctttttaaattattcattctttttctatctatccatgaacttctgagaatgcaccttaagtctctcagcagaaagaaacagggcactttccctcccccc

SEQ ID NO: 5371 - DNA, 120 bp, synthetic construct
  source 1..120: mol_type = other DNA
atgcaaggattcagtgagattaaccgtataaagcgcttagtgccatgcctggcctgcagaaagcactcagtgaatgttagctatttttagtaacattactgaggataaattcccaattcc

SEQ ID NO: 5372 - DNA, 120 bp, synthetic construct
  source 1..120: mol_type = other DNA
ttccccacttgtatgatatggtagtgatgacatgattaaaagtttaatgaggctcttttcagcacagagctggacactgtaacatagaatctgtgttccacaccctggctgtcacctgac

SEQ ID NO: 5373 - DNA, 120 bp, synthetic construct
  source 1..120: mol_type = other DNA
cagagaactctctccaatctcaccgcaaagagatctccaccccttcgagaagcacagagatcagacagaggagatgcggcccctttagggcgtcaaagggcaccgagatctctacatggt

SEQ ID NO: 5374 - DNA, 120 bp, synthetic construct
  source 1..120: mol_type = other DNA
cttccctgggctccccttctccccgttctttagtctttaatgcttttcgtggtttcacatagtatcttcagctttttgtttgtttataattgacatataattgtacgtgtttatgggggt

SEQ ID NO: 5375 - DNA, 120 bp, synthetic construct
  source 1..120: mol_type = other DNA
ccttttcttttgccattgatttccagattttaataaaatgtctcttgtgcggcatatagttgaatcttttttttaattcattatattcagccacttcatgtcttttggttggggaggtta

SEQ ID NO: 5376 - DNA, 120 bp, synthetic construct
  source 1..120: mol_type = other DNA
agatacggagggccaactgtgcttgctgttgccgttttgtaaactgttctctgtcttacaacctttttgctcctcttttccactcttgtcatcctttatatttcgttgactttttttttt

SEQ ID NO: 5377 - DNA, 120 bp, synthetic construct
  source 1..120: mol_type = other DNA
gtactgatgaggatagtcctccccatccgcattcatttctgtagaaattactcaatcatgttattttagtatagaaagtaggaatccctgccttcagtctgcatcagaatctcttagagg

SEQ ID NO: 5378 - DNA, 120 bp, synthetic construct
  source 1..120: mol_type = other DNA
cattagccactgagaccagccaattatgtcttctaataagctttctgcccctgtctttctcttatacgactctcataatgtgtatattgatctccttgatggagtccctaaggctttctt

SEQ ID NO: 5379 - DNA, 120 bp, synthetic construct
  source 1..120: mol_type = other DNA
taggaccatgttttcctctttattcatgtgcttggtaacttgtactggtgatttctacatttgaaaaatcatctgtctctcctggtctttgtactggtgattggccttcactagtcagca

SEQ ID NO: 5380 - DNA, 120 bp, synthetic construct
  source 1..120: mol_type = other DNA
ctttgttctccatggttctttgttctccctcaacctgctgcccttttctgttagcacttagattcaaacaaaacagaaacctgatccccccaaaagtccgaacattatacatacttttca

SEQ ID NO: 5381 - DNA, 120 bp, synthetic construct
  source 1..120: mol_type = other DNA
gcattcagcacctagtaagcattgagtaaatgatagcgatgatagtcgtcattattgtaaagatgtttgtggtttgttcatttcagatgcttgctctgtcaaggcacagcctattgtctc

SEQ ID NO: 5382 - DNA, 120 bp, synthetic construct
  source 1..120: mol_type = other DNA
taacgagcctagtaatgactgggatatttactactgggccacaggtactgggtatgataagcagcataatgtgaaaataggacagtttaggctgatttgagtctagaattgtatcctaga

SEQ ID NO: 5383 - DNA, 120 bp, synthetic construct
  source 1..120: mol_type = other DNA
aagtgcatacccctcctttgtagatcccgctcaggaaattatccagcatacttccacttatttgccattggccacagcttagttacttggctacgtctaaccataaggaaaaataatata

SEQ ID NO: 5384 - DNA, 120 bp, synthetic construct
  source 1..120: mol_type = other DNA
gcgacagagtgagactctttcaaaaaaataaatagggctgggcgcggtgagtcaacacctgtaatcccagcactttgggaggtcgaggcgggtggatcacctgaggccaggagatcgaga

SEQ ID NO: 5385 - DNA, 120 bp, synthetic construct
  source 1..120: mol_type = other DNA
gtacatactcagtacataattggactccaagaatgtgattctgtttacatgataatctgaaaaaggcaaaacttacagggacaaatcagtgattgccagggtgttggatgtgaagggagg

SEQ ID NO: 5386 - DNA, 120 bp, synthetic construct
  source 1..120: mol_type = other DNA
atcaccagcttcatattccctccggtgttaccatgtgctgttttctcatttccatagtttgtgacgaggtctgctgtatctttgttcctttttatgtgtcttctctttctgaatcttttc

SEQ ID NO: 5387 - DNA, 120 bp, synthetic construct
  source 1..120: mol_type = other DNA
tatatgtctcgtaattttctcataattgtatttatgcttacaattggggatgcttcttctactttactgttagtgtggggatcaagtcagtgagttgggaggtaagctcagcttgggttg

SEQ ID NO: 5388 - DNA, 120 bp, synthetic construct
  source 1..120: mol_type = other DNA
ggaaatgggacaggtcgaaattcctgtgctgatcagtggtggaattgcacctctgactagccactgcagtctcccctgggcaacataaggctggccctgtctgtattaatttaaaacaaa

SEQ ID NO: 5389 - DNA, 120 bp, synthetic construct
  source 1..120: mol_type = other DNA
ggctttttcttgttgttacagtgagtgcaatattctttccaactttctactttcttgggggaagccaaaacctctttgatcttatgttgattgtcacatgaaaacagagccctcactaga

SEQ ID NO: 5390 - DNA, 120 bp, synthetic construct
  source 1..120: mol_type = other DNA
actgactatggcataattttttctgcccactcttctcttgcagaagctaaaccagccccagaaatatttgaaaatgaagtcatggccctgctgagagactttgctaaaaacaaaaacaaa

SEQ ID NO: 5391 - DNA, 120 bp, synthetic construct
  source 1..120: mol_type = other DNA
tcagggtagtgtctcttctaggactacaggccaatgtcaaaatcagccagacatctctaaatcttttacatcatcattattaaataggcagcagcagaaatcagcatataccagctctca

SEQ ID NO: 5392 - DNA, 120 bp, synthetic construct
  source 1..120: mol_type = other DNA
aaatacagataaatgtgatataagaaagacagaagaggacacatatgcatttgtgtgcagcataaaacacctctgaagttcacacaagaatctgacttctagggaggtggctgggtggag

SEQ ID NO: 5393 - DNA, 120 bp, synthetic construct
  source 1..120: mol_type = other DNA
aaacacagagggtttccaggcaaaaaataagtgaattctacagcttggatttcatgttttcaaacacacagtgtgatctttttttacggctaactggccaccctacagttttccaccttg

SEQ ID NO: 5394 - DNA, 120 bp, synthetic construct
  source 1..120: mol_type = other DNA
gtaatacagcacgaaggttcttgttagatgctggcgccagcctctagagctgtgcgtcaaataaacttctttataaaattacccagtctgaaattctgtgatagtaccacaaaacagact

SEQ ID NO: 5395 - DNA, 120 bp, synthetic construct
  source 1..120: mol_type = other DNA
tatctgtcttcatggcacctacccatgctggacttgctgtctctgagtaaaggaatgatttaacagacctgtctacagatagtatttgtcccacttaatgattctttgaacttacacagc

SEQ ID NO: 5396 - DNA, 120 bp, synthetic construct
  source 1..120: mol_type = other DNA
ggagagactctgctatgtcttcagctgattaaatgttacctttggggtcagtgcatgaacaaagtgcctacttgcatgtgaattttcttagcaaaatccaaggggtgatttgcagatatt

SEQ ID NO: 5397 - DNA, 120 bp, synthetic construct
  source 1..120: mol_type = other DNA
ctggtgggagtgtcaactggccccactggtctagaaggcataaggtcacaggattaagagccttaagaatagtcatattctttaacccactcctagaaaaatctgtaataagaaattaga

SEQ ID NO: 5398 - DNA, 120 bp, synthetic construct
  source 1..120: mol_type = other DNA
ggataaggaatactcaacttgtatctagaaaaccaaacatgctcaggggaactcttcaatccctaataataccacatcagggagatgttcactagctacgcaccagccttgcctaggaat

SEQ ID NO: 5399 - DNA, 120 bp, synthetic construct
  source 1..120: mol_type = other DNA
ttatatatatttttacagtatttacataactaatatttatggataaaataacatgcgccagggcctagggatccagaaaggaagaagacacagccattgcccttggccctgtgcagacct

SEQ ID NO: 5400 - DNA, 120 bp, synthetic construct
  source 1..120: mol_type = other DNA
cagaagccagactcttttcctttgtcatgaatatatgcaaagattacaaaaggaaaaatggtcacaatgttaagcatggttaggaaacctctccctcacctacttgggaaacctgccaat

SEQ ID NO: 5401 - DNA, 120 bp, synthetic construct
  source 1..120: mol_type = other DNA
gatttttgagaccttattgaggttggtgtcaatccttcgggtgcaagctagagtgttgcctccattgatgttcattgcacaagagccacagatgcctgaaagagacacacatttaacaca

SEQ ID NO: 5402 - DNA, 120 bp, synthetic construct
  source 1..120: mol_type = other DNA
atacccaaaagtaaagtaaatcaacattgtcttggtcatcttaaggttgaagtgacctggatacagattattaagagatagctcttcttctttttttttcttggctgagtcttgctgtgt

SEQ ID NO: 5403 - DNA, 120 bp, synthetic construct
  source 1..120: mol_type = other DNA
cccagtcggttatcactttcataagactagaaaagacagtaagactctccttctcctgtaaatcttagaaagagtgtaagggaacccaaagatgtgtcttaagcaaatactcctagagtt

SEQ ID NO: 5404 - DNA, 120 bp, synthetic construct
  source 1..120: mol_type = other DNA
atcaggccagtcggtcttcactgcaccctgtgcaatttttgctatacctgagaaccacctgaatcaactttctttaaagtatctcttgggttttctttaacttgttttgcttaaattcac

SEQ ID NO: 5405 - DNA, 120 bp, synthetic construct
  source 1..120: mol_type = other DNA
taaccacaggatagaatgctcctgaaggaaagtaaactcagaaaccagaacttgcaccatggttagaattttggatgcatttacccaagaaaaggaattaggttgcacagcaagttcacc

SEQ ID NO: 5406 - DNA, 120 bp, synthetic construct
  source 1..120: mol_type = other DNA
gcagagagcagcacctgcatcccacaggattgctggaggtgagttaatacacacgagatctttacagcagcatctgacatataaatcatagtttaactataataatcatcatgcagaaac

SEQ ID NO: 5407 - DNA, 120 bp, synthetic construct
  source 1..120: mol_type = other DNA
tccagaggactcattctagagactcagtctgtccacattctttgcctctgtttaccagggtcttggaaattctttttcatgatctgaggctcttatatattatatctgttgccatttctg

SEQ ID NO: 5408 - DNA, 120 bp, synthetic construct
  source 1..120: mol_type = other DNA
atcaaaggtaaaaagtaatcctgcagatcatactgggacagagaaaaatattaaaaagtcaaagtcctctctttaagctgtttcatgctaaatttcctaataggtagggctcattaaaga

SEQ ID NO: 5409 - DNA, 120 bp, synthetic construct
  source 1..120: mol_type = other DNA
gccaccatgcctagcctagaaaaatacatttatctgctaatatctgctacacgccagtattttcagaaaaagaattatgctgttgtgaaaatgaaagaatatagctattttttgtgtgtg

SEQ ID NO: 5410 - DNA, 120 bp, synthetic construct
  source 1..120: mol_type = other DNA
ttgcttttttgtagagatgggggtctcattttgttgcccaggctggtctccaactcccaggctcaagcaattctcctgcttcaggccaggcacagtggctcacacctgcaatcccagcac

SEQ ID NO: 5411 - DNA, 120 bp, synthetic construct
  source 1..120: mol_type = other DNA
cagagtggacaaccttccttattcctgatcttatggggaaagtgttcaatatctcacaataaagtatgctattagctgtgattttcacagtcttcatctggctgatgaagttcccttctt

SEQ ID NO: 5412 - DNA, 120 bp, synthetic construct
  source 1..120: mol_type = other DNA
aaatccttttatatctactatgtccagcgctcttcattccttttctaagagccaagtttccacctggtattatttttcctcagcctgactaacttcctatagcatttcatgtagtactgg

SEQ ID NO: 5413 - DNA, 120 bp, synthetic construct
  source 1..120: mol_type = other DNA
cctcagcttcccaaagtgctgggattacagacatgagccaccatgcctgccctagaccttttgatgctgttccatagatcacaggagcgctttcccttttcaaaaatctttctttttctt

SEQ ID NO: 5414 - DNA, 120 bp, synthetic construct
  source 1..120: mol_type = other DNA
gcattatgtttttctgaaaagtgtggattttaaaattttacacaggcaattaatatggctgcacgcaagatgtgggcagagttcatgaacagcatttagtgctcctcctctgtgtttctc

SEQ ID NO: 5415 - DNA, 120 bp, synthetic construct
  source 1..120: mol_type = other DNA
ccttctctactgttcaggcagttgtttcttatatttttttccggagttgatcattgttatttgtaggagggttagtctgatgagagctactgtgacaaaactggaagtaaacccaaagat

SEQ ID NO: 5416 - DNA, 120 bp, synthetic construct
  source 1..120: mol_type = other DNA
tttcttttctttggctaactgtggagttccttaaaagtgaaagatgttggaaaaagagtggttttgagagatgtgatgtgaagaagaactcaacctgctgctgctgcttttgacgatgga

SEQ ID NO: 5417 - DNA, 120 bp, synthetic construct
  source 1..120: mol_type = other DNA
agccatcggatgatctcagatttttaagccttccaaggatgtgaaaagcatgtccctaaatcaaatcaagaactctccttcaatagctggctttcacagagatactcacttattaaggtc

SEQ ID NO: 5418 - DNA, 120 bp, synthetic construct
  source 1..120: mol_type = other DNA
gatatagaaaagtaaaaactcggaaggttaattgactaattacaaaaagatgcagtggtgtttattactgaggcaggagaacagggtttagagacagggagtcttcactacagcctctga

SEQ ID NO: 5419 - DNA, 120 bp, synthetic construct
  source 1..120: mol_type = other DNA
tgacaaagcaatgtaatcctaccacaattacaacagagtatttccatccaaaaaggtcttttgtgcccttgatggcaaacataagtccccttttcctacccttagcaactgatcagctat

SEQ ID NO: 5420 - DNA, 120 bp, synthetic construct
  source 1..120: mol_type = other DNA
actagggaggctgaggcaggagaatggcttgaacttgggaggtaaaggttgcagtgagctaagactgtgccactgtataccaccctgggtgacaaagtgaaactcaagctaaaaaaaaaa

SEQ ID NO: 5421 - DNA, 120 bp, synthetic construct
  source 1..120: mol_type = other DNA
tttccagagtgggtggctgctgtgcctgaggcagatagtagggtaagtgggacaatatgccttttaaaaaatggggctacttcaagtttttacttctaatttggacacttttatttttca

SEQ ID NO: 5422 - DNA, 120 bp, synthetic construct
  source 1..120: mol_type = other DNA
agtgatccacctgcctcagcgttccaaagtgttgggattacaggtgtgagcaaccgcgcctggcccctaaccgggctttaaacagaatctgggactggagcataatcccctagttctttt

SEQ ID NO: 5423 - DNA, 120 bp, synthetic construct
  source 1..120: mol_type = other DNA
gtatttcatacaatatttggtggggcaaagggggtttaccagaatgaaagaagattctgaaatcaaaatcaccagagtggtcatggttctgaaagtgatagagctttgctcatcttgagg

SEQ ID NO: 5424 - DNA, 120 bp, synthetic construct
  source 1..120: mol_type = other DNA
tagagaggaagaaagcaaaaaggactgtatgaagataagcctgagtaaaatacaaggtgcaggcttgctgaaaagtgtgattggtgatgcttgaaatccaagctctatcacttacaagct

SEQ ID NO: 5425 - DNA, 120 bp, synthetic construct
  source 1..120: mol_type = other DNA
ttgcctggaattacaaaaatgacctatgaaattagccttttctacaatgcattcttagaagaggggcttggaactctctcgttagtggggctctcacaatttaattgtttgctcagcaac

SEQ ID NO: 5426 - DNA, 120 bp, synthetic construct
  source 1..120: mol_type = other DNA
catagtaataaacaagaacagcgccaagccctctacctgtcattccatgtcaactctatgaggtccgtattattatatgacctttagagtcagaaacactgagaggatactagtgaaact

SEQ ID NO: 5427 - DNA, 120 bp, synthetic construct
  source 1..120: mol_type = other DNA
ctgccccagagcaacccggggaattcatttttagttaatcattttacttgggagggagagtgagtgtcccagtttttctctaaaatgtgaattagttgtccagagaaataccctagattt

SEQ ID NO: 5428 - DNA, 120 bp, synthetic construct
  source 1..120: mol_type = other DNA
tcattttaggagttttggaattagtgtttaaaagctgaggatcattatagtcattaagtgtatccatacagtatcattttgagttgtgcagcgctgtccactgaagggatgggtcgcccc

SEQ ID NO: 5429 - DNA, 120 bp, synthetic construct
  source 1..120: mol_type = other DNA
ctgagaaatcctaggagctgatttctggttctacatttattttggacaagtcaaggtcattgattccatgattttggtttcctcatttgtgttgcaaacggcaataacttgggcccactt

SEQ ID NO: 5430 - DNA, 120 bp, synthetic construct
  source 1..120: mol_type = other DNA
agccaggcatcagccaccgagccaggcataagccaccacgccgggccaatgtaacaacataataacataataataacaattgtggctgggcatggtggctcatgcctgtaatcccagcac

SEQ ID NO: 5431 - DNA, 120 bp, synthetic construct
  source 1..120: mol_type = other DNA
caaggccaaggagttagagaactaagctaaggacagctaggcttctatgtaataatgttcatgctccttaaacacaaagtcaccaagagtcattaactatctggccagtactcattgtat

SEQ ID NO: 5432 - DNA, 120 bp, synthetic construct
  source 1..120: mol_type = other DNA
cagagagttggccacgttgtgaagtgcgttgtttgcccacagtttggatcttatactgtaagcagcgggaaattgttaaagacttttaggcaggagaatgatgaaaccatgttattttat

SEQ ID NO: 5433 - DNA, 120 bp, synthetic construct
  source 1..120: mol_type = other DNA
agacctcggggagaccagtgataatatgttacatatatatgtggtgtattgtagtttagacaatgctttcctgtatgttttcttgtgcagtcccctcagcaaccaataaggtaggtatta

SEQ ID NO: 5434 - DNA, 120 bp, synthetic construct
  source 1..120: mol_type = other DNA
caatgtctgtattcacctcttgccttcaaagctggaaagagggaagagctgaagaaggaagtgttcgttagatttttttcctttaaatagtgggcccttctagtgtactaatatgaagct

SEQ ID NO: 5435 - DNA, 120 bp, synthetic construct
  source 1..120: mol_type = other DNA
attcattcaggatatctggagtttgactgatgttagttcctgaaatgaactagcttaatatttaggatgctctcttcacaaaccccttgtactcttaaacctttttttgtttgtttgttt

SEQ ID NO: 5436 - DNA, 120 bp, synthetic construct
  source 1..120: mol_type = other DNA
cacccctaaaaatagagaagttgatatactaaagttgatctctaaatgtgtattgatttttgattctcttatcttgcagacacgttggtcgtcattgcctccgagcccactttagccctc

SEQ ID NO: 5437 - DNA, 120 bp, synthetic construct
  source 1..120: mol_type = other DNA
attcaggaaatttaacattgatgaactcttatctgatacacagttgattttcagatttttcatttgtcccaaataatatatttcatagaaatataatcagctaggcatggtggttcatgc

SEQ ID NO: 5438 - DNA, 120 bp, synthetic construct
  source 1..120: mol_type = other DNA
ataatctatttatgtgaatattttttaaatatacttgccctgccacccaacaagaagttgtgctttcattgccagacctgtgtattgggtgggtttagaaagcagagttatcggcctggc

SEQ ID NO: 5439 - DNA, 120 bp, synthetic construct
  source 1..120: mol_type = other DNA
gcaccaccacgcctagctaatttttgtatttttaatagagatggagttttacaatgttggtcaggctagtctcaaactcctgaccttgtgatctgcctgcctcagcctcccaaagtgctg

SEQ ID NO: 5440 - DNA, 120 bp, synthetic construct
  source 1..120: mol_type = other DNA
ggccaggctggtcttgaactcctgacttcatgatccacccacctcgatctcccaaagtgctgggattacaggcttgagccactgtgcgtggcctattattttattttatttttattttta

SEQ ID NO: 5441 - DNA, 120 bp, synthetic construct
  source 1..120: mol_type = other DNA
gcctacttgatacttccctcacttttactcaaccaaaatactgctatgtagatgaggtgaacccttcagggtagagggagatgacataaggattatcttacaccttttttatgtggagat

SEQ ID NO: 5442 - DNA, 120 bp, synthetic construct
  source 1..120: mol_type = other DNA
tggcattctttttctattttcaaagcaagcaatagcagagtccttctcgctttgtatcactctgacttcttctacctcccttttctcctttcaagggacccttgtcattatatttagacc

SEQ ID NO: 5443 - DNA, 120 bp, synthetic construct
  source 1..120: mol_type = other DNA
atccgctatccttctttgtgaaaggtgacacatgcttttgcagctgagtcatttttaacagcctcttttttgtctgtagaaatttcggggtatgacagtcttcttttcatcttctctctg

SEQ ID NO: 5444 - DNA, 120 bp, synthetic construct
  source 1..120: mol_type = other DNA
acctggctaattttttgtatttttcgtagagacggggtttcgctatgttggctagactggtcttgagctcctgacctcgtgatctgcccgccctggcctcccaaagtgctgggattacag

SEQ ID NO: 5445 - DNA, 120 bp, synthetic construct
  source 1..120: mol_type = other DNA
catcactccagaaagaaacactacatttcttagccatcaccaccaatcgtttgtccctcccagctctagacaatcagttatttactttccatcttataaacttacctattccgaacattt

SEQ ID NO: 5446 - DNA, 120 bp, synthetic construct
  source 1..120: mol_type = other DNA
caccagcacaacatccatatttctactaaaatctgttcaaggcaatctgggctttttaaaaatcatggtcctaaaaattcttttagtcccttcccactgcccaatttcaaaggcacttcc

SEQ ID NO: 5447 - DNA, 120 bp, synthetic construct
  source 1..120: mol_type = other DNA
ctactacaacttcttaatacttggctgtgcatttcctcaattgcaagacagtctccaaagtacaaccatcacaatgttactatctaaaccgtaggtcccattcaaattttgccacttgtc

SEQ ID NO: 5448 - DNA, 120 bp, synthetic construct
  source 1..120: mol_type = other DNA
cagaagtggcattgataacagtttttgctgatgtctttgaagataagtccctgtaaatctgctttttgtttttttaggctaacccagcaaagcatcttgagctctgctactctcttgggt

SEQ ID NO: 5449 - DNA, 120 bp, synthetic construct
  source 1..120: mol_type = other DNA
gaacacggggctatatccagagtggcatgtcagggaaagatatctgagatacctgaagtcatattttctattacccattttttgggttttttgaaagaggcctggaagtaaatggttagt

SEQ ID NO: 5450 - DNA, 120 bp, synthetic construct
  source 1..120: mol_type = other DNA
tcccattttgtatatcagtatttctgaaagatttctggaacagtgcatatgtttcttctattagctctttcagtcatgggatttgattcatctggtcccagagccccaagtgtgtttgga

SEQ ID NO: 5451 - DNA, 120 bp, synthetic construct
  source 1..120: mol_type = other DNA
gggaggattcaaggatgaccatgtattatatgaaactgtggataaatgaaactcaggttttcttccatcagtgttatacctggagaaatagagggacccaggttgtattacagtgattgc

SEQ ID NO: 5452 - DNA, 120 bp, synthetic construct
  source 1..120: mol_type = other DNA
ccatgccagctccaactttaatgagtgtctttgacccatgtttctccttgcgaaaggagttttgagttataatcatttttttttttctcagccctatcagtgatgcagtctggtaaaggt

SEQ ID NO: 5453 - DNA, 120 bp, synthetic construct
  source 1..120: mol_type = other DNA
ggccctagtctccgcctcctttgaaactcagcacttgatttagagggaacagtaagtctcttaagtttattgttcattcatccctttaacaattaattatgagtttgcactgtgctcaga

SEQ ID NO: 5454 - DNA, 120 bp, synthetic construct
  source 1..120: mol_type = other DNA
ggagtgcagattataatcagttttctgggatctgatgtatcttttcacagtagggatatactttacaagagggtcagctagatttaaaaattatgtctggctggtgctggagacatagac

SEQ ID NO: 5455 - DNA, 120 bp, synthetic construct
  source 1..120: mol_type = other DNA
ctggccccttggtatatctttaacctcatcctagggaataagaggaaatatcttgcctagaatcggtatgaaattatatacctgagagacagaagccccactgttttaccttatgtaaag

SEQ ID NO: 5456 - DNA, 120 bp, synthetic construct
  source 1..120: mol_type = other DNA
acgatggaatcaaggtataaggatgatttgtgttgttaggaatccatatgtagttcctggtttttaacctgcttgcactgaactggtggggatgatagggtaaatctcaagattaggcta

SEQ ID NO: 5457 - DNA, 120 bp, synthetic construct
  source 1..120: mol_type = other DNA
tggcaagagaaattggatcatttgttctgaaatgaagtcagttccagcaactgtggtctttgcattcttgtggccctagtcccatccatttttcacacaacagcaagaaaaatcttttga

SEQ ID NO: 5458 - DNA, 120 bp, synthetic construct
  source 1..120: mol_type = other DNA
ccgcccgcctcggcctcccaaagtgttgggattacaggcttgagccactgcgcctggcagttgtaattattttatttgctaactttttataaatctgggtttttttgttttgttttttgt

SEQ ID NO: 5459 - DNA, 120 bp, synthetic construct
  source 1..120: mol_type = other DNA
cggccatgatagctttttaataagagatatgagaccccagaggagaaaccaacaaatacagttgtcccttattatctgttggagattggttccaggattcctcctcagataccaaaatct

SEQ ID NO: 5460 - DNA, 120 bp, synthetic construct
  source 1..120: mol_type = other DNA
aaatggtgaaggactttgactgccatgctgtagaccatgaaaagccattaaaagttcatgtgctcttttgttccagtaacaggacaagctggcctcctggataaatacaaaataagttat

SEQ ID NO: 5461 - DNA, 120 bp, synthetic construct
  source 1..120: mol_type = other DNA
aatactcaggatttttcatagtgacagaaaaagtctatttgactttttcctataaaagtctagttgaatttaggtacatgccttgagaatggcagatagctgaagttgcaataatgaatg

SEQ ID NO: 5462 - DNA, 120 bp, synthetic construct
  source 1..120: mol_type = other DNA
gtaggcaaacctgctgctcaggcaggtagcctattctctagaaaagccaaaagatttacagattcataaagtaactgatgggctttgaaaatgactgtgtttttcttctgtcatgagatg

SEQ ID NO: 5463 - DNA, 120 bp, synthetic construct
  source 1..120: mol_type = other DNA
gtattatattctttctcaggatacaaactggcagcctgtgggccatgtttggtcaacagatgtactttgtttctttgtgctgtgatgaaaagaaatggaatttgagtgcatttaggtgga

SEQ ID NO: 5464 - DNA, 120 bp, synthetic construct
  source 1..120: mol_type = other DNA
agaaatgctttactttacctcagtacgtgagtactcttgacctcaagagaggttgtggggaagcagatgggcagaatacatcatgatgagattagtgtgacaacactggaaataaaagaa

SEQ ID NO: 5465 - DNA, 120 bp, synthetic construct
  source 1..120: mol_type = other DNA
gcagccagccaaaatgatctctctcctgattatatctggcttggaatctggtaatgatcccagatctccttgacctcccagagatttgtataaaaaaaaatttttcctgattacaagaac

SEQ ID NO: 5466 - DNA, 120 bp, synthetic construct
  source 1..120: mol_type = other DNA
cagagtgtcaaagactctgaaccctcttgagtcatatcttcctcccaaatgttcatcaaactgtttgagttcaggtttacctcagtgtcttcagtaattattttcatggtgctcctaagt

SEQ ID NO: 5467 - DNA, 120 bp, synthetic construct
  source 1..120: mol_type = other DNA
cttggtgtagtttggaaaccacagttctagcaatgatcccaaactatcaaatcagggtctctgggagttgtgatgtgggtactcttttttgcttccccaaaatattttttggtgattatg

SEQ ID NO: 5468 - DNA, 120 bp, synthetic construct
  source 1..120: mol_type = other DNA
ctctaattcattttaatttaaatttttgtgtaatagagatttgaatgatttaaaatttttcctctcttcagaggtagcaacactagaagataaagataaaaaaagggccaggcgcagtgg

SEQ ID NO: 5469 - DNA, 120 bp, synthetic construct
  source 1..120: mol_type = other DNA
aaaatggtttagaattgtatgaggtgccaggggtcccagttttatgtatcatattagttgtaacttatgagcagctgtgacaagctacttggttttctcctcaggggtctctctttttgg

SEQ ID NO: 5470 - DNA, 120 bp, synthetic construct
  source 1..120: mol_type = other DNA
aatattaattggtacctatttatgtgtcaggtactgttgtagacactggggattcagttatgagctagataaccattgttgctgctttcattcttccgttcctgttgacccagagtagtg

SEQ ID NO: 5471 - DNA, 120 bp, synthetic construct
  source 1..120: mol_type = other DNA
aggcgcgagccactgcacatggcaggaatcatttaatagattggaaactgtccatgttgcctcctatgtgacctcatcgtctgctcaaaactggtttctaaaattagccaggtatggtgg

SEQ ID NO: 5472 - DNA, 120 bp, synthetic construct
  source 1..120: mol_type = other DNA
taatctttttgttgagggaagtgaagaacctaagggtccttaagtctgcttttattttttcttctagcaagtactggctgtgagtgtgggacaggattttgtgttttctgtgacagtctg

SEQ ID NO: 5473 - DNA, 120 bp, synthetic construct
  source 1..120: mol_type = other DNA
tattaaaaagaaaagtgggttttaactcaattggtagaaaaccaatttagtggcatgctaccaacaaaaaaagaaatttaaatagaatagaaaatataggctggggctgggcgtggtggc

SEQ ID NO: 5474 - DNA, 120 bp, synthetic construct
  source 1..120: mol_type = other DNA
gagtttccctctataaaaagattctgagattgactgtatctaggaaatcaggcatattatatctctcttttggagattcacagtgtgcattagtaaactgtaagaggctgggcgcagtgg

SEQ ID NO: 5475 - DNA, 120 bp, synthetic construct
  source 1..120: mol_type = other DNA
ctgtttgtcattcttatctccagcctgggaaaagttctccttatttgtttagatccttttgtattttcagatctccttggagcagtagagtacctggtagaccataatagtggaaaaggg

SEQ ID NO: 5476 - DNA, 120 bp, synthetic construct
  source 1..120: mol_type = other DNA
aacactgtcatagtagtccgggcaagatgaggtcctgaactaggaaagtagcacaaagaaaagaagattgtctcaagaactgttaaagagatacgccaataggatttggcgattgaattt

SEQ ID NO: 5477 - DNA, 120 bp, synthetic construct
  source 1..120: mol_type = other DNA
actcttgtgtccaactttgtcaaatgaagacctagtttacacctttgggcagacagtgccattatggttgaatgatgccatttataatcatagaagaccttctagcctaagtctttacaa

SEQ ID NO: 5478 - DNA, 120 bp, synthetic construct
  source 1..120: mol_type = other DNA
gtctttcaattcgatttccgtatctaatagcattttgaatgtagcctgtcaaactgaatttctgatctcccctaatctgttcctcctgcactcttgccccatctgaattaatggcatttc

SEQ ID NO: 5479 - DNA, 120 bp, synthetic construct
  source 1..120: mol_type = other DNA
gtatgactttctacgtaatgaaccttctaaaatgagggtaaatgacaggttgggttccttgagttgttctttttaagttttgcaagggacaatatgttgtcattgtggggggtagggagc

SEQ ID NO: 5480 - DNA, 120 bp, synthetic construct
  source 1..120: mol_type = other DNA
gtacagtaagtaatatttctctaacatgtcatccctcttgaaggagctgtctataatgtgctccacttcctcaacactgagtctcttttagcctgtattaattggggtcttatcccaact

SEQ ID NO: 5481 - DNA, 120 bp, synthetic construct
  source 1..120: mol_type = other DNA
aaaaggaaaatggacattattagaaaaaaaaatagtctgaattgtcactttgcaccctgtcaccagcctaggttaagacaacagtctcacgtaggctacttcggttgccttctaactagt

SEQ ID NO: 5482 - DNA, 120 bp, synthetic construct
  source 1..120: mol_type = other DNA
gcacgatctcggctcagcacgatctcagcttactgcaacctccgcctttcgggttcaagcgattctcctgcctcagcctcccaagtagctggcattacaggcatgtgccaccacgcctgg

SEQ ID NO: 5483 - DNA, 120 bp, synthetic construct
  source 1..120: mol_type = other DNA
ttcttctcagtacatatatatttactttttccttctcattcactagtatattccataagggtagggatgctgtctcacttactatactcccaacatttatgacagattctggcacatgat

SEQ ID NO: 5484 - DNA, 120 bp, synthetic construct
  source 1..120: mol_type = other DNA
ccaagttatctgtatagtcttctaatttcactgtggttttttattgatgttatgattttttctttttctttaggggccttggacaagttgttactgactatgttcatggggatgccttgc

SEQ ID NO: 5485 - DNA, 120 bp, synthetic construct
  source 1..120: mol_type = other DNA
agccaccccgcccagccaaaattgagtgtttaaattttcttctggggcttagcagttaggtaaatcagacacaaagtactggaaaacaaaaaggacttgtaataggcagaaaaataccaa

SEQ ID NO: 5486 - DNA, 120 bp, synthetic construct
  source 1..120: mol_type = other DNA
aaagtcaaaatggggatggcagtgactctggataatatgggaatccatagctatctctagtaccatcagatcctagatatacaaggctgtctagtgctaataagcttcattagatggtga

SEQ ID NO: 5487 - DNA, 120 bp, synthetic construct
  source 1..120: mol_type = other DNA
tgactggaggatggcagatcaagcaaaagatgatatgtagtttggtatgacccagcacagggagggactgattgtagaggaccttatatgccacgataagtaattgaaactttatctttt

SEQ ID NO: 5488 - DNA, 120 bp, synthetic construct
  source 1..120: mol_type = other DNA
aaaacatattatttagtttgcaaaaagaaatcttctggagccagaccaaagtaagtctgcagctagggaggtaagcaagtgcttagggtatcagttgcccctaagagtatctactaagcc

SEQ ID NO: 5489 - DNA, 120 bp, synthetic construct
  source 1..120: mol_type = other DNA
caggagaaaagcttagggctcaaaccagggagttagaatgaagattcccctaaaccaagaaccataaagagttttgccctcagagaaagggtgaattagaaaaaatgatatttgctcaca

SEQ ID NO: 5490 - DNA, 120 bp, synthetic construct
  source 1..120: mol_type = other DNA
acttgatgttatcgtctcaattcatagaatcttaaaaagtagatgtctacttaggagagttttctcctctggacacctgataatgagtgtcagggtcaattcccagtggggctgaatgtt

SEQ ID NO: 5491 - DNA, 120 bp, synthetic construct
  source 1..120: mol_type = other DNA
cagagtttgtaaattgggcataagactatgtatatgagattcatttttgaaaaaatacaagattactacataccaaggatgaaatctgttacgggatgtgtcaagcccagcctcatagag

SEQ ID NO: 5492 - DNA, 120 bp, synthetic construct
  source 1..120: mol_type = other DNA
aaaccaagcagtatgaaacagtcttgacaaaaccaatgtccttcctcttatccacccttctacccccaatgagggcagagtgttgtattttaatccctcttatatacagaaatcagattg

SEQ ID NO: 5493 - DNA, 120 bp, synthetic construct
  source 1..120: mol_type = other DNA
aaggcaatatatcagggttgtacaggagaacatcagtcaaatcaagactgggcatgcttagattttaaatattggacaatattgagattcctcttcatcaggaaggggaaatagggcagc

SEQ ID NO: 5494 - DNA, 120 bp, synthetic construct
  source 1..120: mol_type = other DNA
agatgtaaaaggcctcttaataattcaatcattcttcatttaggtcttaagttaggaaattaagaaaattgtcaaagaaaattggcttaaatatatgcataagtcagggtgggcgcggtg

SEQ ID NO: 5495 - DNA, 120 bp, synthetic construct
  source 1..120: mol_type = other DNA
agccactgcatccggtcttgactagctttaaaatacggttaaccttgttagcatagtatgtaagcaagcacatgtatcttattgaattttttgccttagtaaactaaaaattctcttgat

SEQ ID NO: 5496 - DNA, 120 bp, synthetic construct
  source 1..120: mol_type = other DNA
ggaggggaaagagaagaaatacagggtaaatggccccaaataagatggtaaaaaagaaaaccagatatggcactaatctctgacagaataaatgggttaaatctactggtcaaattatag

SEQ ID NO: 5497 - DNA, 120 bp, synthetic construct
  source 1..120: mol_type = other DNA
gatgagtatcacacagaacgacttgaggaggggctcaggatgcaagatgtatctagtactttcttcttctaccaggaagatcaaaaataatgagtaatgtgtcatctaagagagaacact

SEQ ID NO: 5498 - DNA, 120 bp, synthetic construct
  source 1..120: mol_type = other DNA
gccaacatggtgaaatcccgtctctactaaaaatacaaaaattagctgggcgtgttggtgtgcacctgtagtcccagctacttgggaggctgaggcggaagaattgcttgaacctgggag

SEQ ID NO: 5499 - DNA, 120 bp, synthetic construct
  source 1..120: mol_type = other DNA
tggccttcagtagtggtggcttctgttctttgtgttcacgttttgttttcttttgaaaaactccaaagcttgtcttttaatgcagggtgatttgtttccatgtggcaaagcagttttgaa

SEQ ID NO: 5500 - DNA, 120 bp, synthetic construct
  source 1..120: mol_type = other DNA
ttttcttctagtagttttgttgttttgcgtccaacatttaggtctttgatcaattttgagttgacttttgtatagggtgagaggcggggggagtgtctagtctcatttttctgcatatgg

SEQ ID NO: 5501 - DNA, 120 bp, synthetic construct
  source 1..120: mol_type = other DNA
agccaccgtgcccgacctacctttagtcttcttgatcaagagtatttctccatctgttttagggttcttttttttttctaaatagttttatcatttttctgagtgactcttttattacta

SEQ ID NO: 5502 - DNA, 120 bp, synthetic construct
  source 1..120: mol_type = other DNA
atatatttaaaaaattaaaaaacagaaaataacgtgttggtaaggatgtgaagcaactggaacccttgtgcaatgttggtgggaatgtgaaatactgtgagctctgtggaaaacagtatg

SEQ ID NO: 5503 - DNA, 120 bp, synthetic construct
  source 1..120: mol_type = other DNA
tttacaaatcaaaaaactgttgggcagaaagtttggggaaactaaccagaattcaagtgtaaccctggtgtgatttagagttaggggagagaacaaggaaaatcttactagggctccatt

SEQ ID NO: 5504 - DNA, 120 bp, synthetic construct
  source 1..120: mol_type = other DNA
gcataggtccaaatgattttttgcggaagccaggaaaaagttctaggaaattgttgggtatcttaagtggaagtgagtgagtcatgagctctgtaacagaagaagatgaaggtaggctaa

SEQ ID NO: 5505 - DNA, 120 bp, synthetic construct
  source 1..120: mol_type = other DNA
gtaggatattcatacatataaggtaggtttccttttggctgcaagcagaagaatacacacccactatctcccattaaaagagtactaccacagaatcgctcatagaaaaagatgtctggg

SEQ ID NO: 5506 - DNA, 120 bp, synthetic construct
  source 1..120: mol_type = other DNA
acagcaggatttttggatgacatgatcataattagaccatgcaagtaaaaaaaaaacacctaaaaatctataagggaaataaggggggagtggagaaatagaagaaatgagataagcaaa

SEQ ID NO: 5507 - DNA, 120 bp, synthetic construct
  source 1..120: mol_type = other DNA
catctcactatctgttttttttgtttttgtttttgtttttttgagacggagtctttctgttgccaggctggagtgcagtggcgcaatcttggttcactgcaacctctgcctcctgggttc

SEQ ID NO: 5508 - DNA, 120 bp, synthetic construct
  source 1..120: mol_type = other DNA
gattaaaatattcttctggccaggtcagggtctaaccactatagggtatcttcaactcaatgtacattttaaccgaaacacactcagcatctcacctaaacacgatcaatatgggcctct

SEQ ID NO: 5509 - DNA, 120 bp, synthetic construct
  source 1..120: mol_type = other DNA
tttgctttcataagtccactgctcctgctgtgaagatgggtacattcatctgtcatagcttaatgacaccaccttaaaatttgcagatgggttcatatacatcttattattcactcactc

SEQ ID NO: 5510 - DNA, 120 bp, synthetic construct
  source 1..120: mol_type = other DNA
cacctcacagggctttgtaactccccacccacttgagggttccagataactttttttttttaacaaagcaggggtgggggtgggagattcctgctgttaaaaacaaacaaagggcttaga

SEQ ID NO: 5511 - DNA, 120 bp, synthetic construct
  source 1..120: mol_type = other DNA
caacagatgtccttgaggctcattttctgccgggcactcggttcacaaggctcaagagacccctggctccagccattgtccaggttgtcactggtgtccccagctctccacttctgagga

SEQ ID NO: 5512 - DNA, 120 bp, synthetic construct
  source 1..120: mol_type = other DNA
gaggagaaatggtgcgagaaggcggtcaagagcctggtcaagaaactcaagaagacggggcagctggacgagctggagaaggccatcaccacgcagaacgtcaacaccaagtgcatcacc

SEQ ID NO: 5513 - DNA, 120 bp, synthetic construct
  source 1..120: mol_type = other DNA
agtgattgacagattccttcttcgttctttctttgccttcgggattagcatttttatcgagtatttttagactcggttgtgccagtctcccgccccctgagcatgcacgcactttggttg

SEQ ID NO: 5514 - DNA, 120 bp, synthetic construct
  source 1..120: mol_type = other DNA
accagccatggaaagtagataaggttgttaggcttaagattatcacatttttaaagcagaggaaaccttaaaagagagaggtgaaaaggcttgagtcatagacatggggttctgcctgaa

SEQ ID NO: 5515 - DNA, 120 bp, synthetic construct
  source 1..120: mol_type = other DNA
caggtatcttccttgccagtttataagaatggaatcaaagcatttgccgctgaatgagagttggtgtgtgagcgttatatgaggaataaggagctcggcacacttaaaacttagttttct

SEQ ID NO: 5516 - DNA, 120 bp, synthetic construct
  source 1..120: mol_type = other DNA
cttttactgtagcctcctcttattatctccttgacttttgccagggtactctcactttgagaaaggaaaaagatcctagtctttaacatgccttttccagatttctggggatagacctat

SEQ ID NO: 5517 - DNA, 120 bp, synthetic construct
  source 1..120: mol_type = other DNA
gttatccaaaggaagctttttggactgcagtatgatgttgggaactttttggtacatggggatagttccctataagaatgaggacgtctttatcctcttttactaaactgagtgctgcta

SEQ ID NO: 5518 - DNA, 120 bp, synthetic construct
  source 1..120: mol_type = other DNA
atttgatgcacagtacagccattattctgcgtgagctccttaatgaaataaataagaccaagcagggcttgcttcaaattggaatcagctttcattcctgttaaccttattctcccacct

SEQ ID NO: 5519 - DNA, 120 bp, synthetic construct
  source 1..120: mol_type = other DNA
gtttcgacttaacagtttgagaaataaacaaatctatagcatactatccactgttggttatctaagacccttcctataaacagcagcctgccacagtggcaactgctgtagaatgttttg

SEQ ID NO: 5520 - DNA, 120 bp, synthetic construct
  source 1..120: mol_type = other DNA
cctcttccttgcctcttccttactctgtgagtctaaatcagtgaaatttaactacaaaggaatatgaaaataatgctaggatgaagatgtggaggctgtgcctcttgagatgcagtgaac

SEQ ID NO: 5521 - DNA, 120 bp, synthetic construct
  source 1..120: mol_type = other DNA
ccaaatgtggagtaatgaatccagaaaggactttttgagtagttacaagtggctgaaagcaggcactggtgatggaaattgggtttttccttttgcttcaaatcttcctggttgtaaact

SEQ ID NO: 5522 - DNA, 120 bp, synthetic construct
  source 1..120: mol_type = other DNA
atacagacatgccacttgttgatgtaaggcttggcaggctattgaaagagaaacaattcatattcttaggcggttctgccctcccccatcaccttctctatcattattcttaaaaatttg

SEQ ID NO: 5523 - DNA, 120 bp, synthetic construct
  source 1..120: mol_type = other DNA
caggatgatagaacgcattctgtgtaaccgtttgttaccttgatttgtctttaaatactacatatggtgtgtaggccttcctctgtatttttgctcttagggcaggcatttctgtatgta

SEQ ID NO: 5524 - DNA, 120 bp, synthetic construct
  source 1..120: mol_type = other DNA
aatttctttgttgatgatcatcaatcaaggccaggctttccaattccagaccacactgcaatcagtggaaactacctaaattcagtactgcagacccatagcaggatgtatgtttattga

SEQ ID NO: 5525 - DNA, 120 bp, synthetic construct
  source 1..120: mol_type = other DNA
tggtgtagaactcactaatactgctaaaaaccctttctgacagagatgggagttaaggcttctaagttcacacccagatttccacagagaccttagagacaatcataaatattgcacaaa

SEQ ID NO: 5526 - DNA, 120 bp, synthetic construct
  source 1..120: mol_type = other DNA
taaaactggacgagatgttgaaaacatggtaaagttagcactagagcttaattaactggagtatgagttagggaacatttggctatgctgatgtctactactgaagggaaaggaggtgga

SEQ ID NO: 5527 - DNA, 120 bp, synthetic construct
  source 1..120: mol_type = other DNA
atgtgaaatataaattcaaaccaaacttggcacctgtttggagagcttcagctgatactacagtgcccctgtcgttagcctttgtggctcagctgggtcttataaatagaacacgatgca

SEQ ID NO: 5528 - DNA, 120 bp, synthetic construct
  source 1..120: mol_type = other DNA
agcgctgagagcctcctccctcaggggaaattttctaaagtttctcactgtgttctagcttcaaaaccatatgcagtttaattgcatgtttagtatctttgtgcatctctcttgttttga

SEQ ID NO: 5529 - DNA, 120 bp, synthetic construct
  source 1..120: mol_type = other DNA
ttaaaagagttacagtttttgctctgattgtttaaaaaaagaatctatcactgctactgatccaagaggtgagggttggcatggggtgggcactccagtaaatacgtaagttgtcttcct

SEQ ID NO: 5530 - DNA, 120 bp, synthetic construct
  source 1..120: mol_type = other DNA
ctgatgttcatgattactggagcccccaggttctaaaaagtgttgaattagcaagtgaacaaataaaatgagacccaaagaaactgtgatcttagcatcctgttttctgggtgaggttga

SEQ ID NO: 5531 - DNA, 120 bp, synthetic construct
  source 1..120: mol_type = other DNA
aaagtatattctttgaggattatgatcgactaggatgctcgggaatctttaaagagaagcactatcttggctatatttgccctcagttgttttaaggccagtgaggagactgagcatttc

SEQ ID NO: 5532 - DNA, 120 bp, synthetic construct
  source 1..120: mol_type = other DNA
tcctgccacttcatcagcagtagcatctaaacagcccttgaagggaatcagtatctacagcctaagaaatctgatgggacacatctctctgcattaaaatattaacagaaaaggtcaaac

SEQ ID NO: 5533 - DNA, 120 bp, synthetic construct
  source 1..120: mol_type = other DNA
agatccctgctttgatgattaccatctgcccacctgagtttcctgcatagtttcagttggaaactcttttctctttggaccctaagataccgtgtaataggattgttcttggtttcagta

SEQ ID NO: 5534 - DNA, 120 bp, synthetic construct
  source 1..120: mol_type = other DNA
ttccagtaaacatctcctccctttttactttaccttttaattttgtgtttatggtctctgtgctttgaaattgtttttgctgtgatgccagccctgcctgaaatgggtggagcaagccaa

SEQ ID NO: 5535 - DNA, 120 bp, synthetic construct
  source 1..120: mol_type = other DNA
atatacctcctccatctgctctgcctgccagatgacccttgctactttactgttttttctttgagcctcttggtgatcttgaatagcagaaaaatgagccaaatttccttcaatctatgc

SEQ ID NO: 5536 - DNA, 120 bp, synthetic construct
  source 1..120: mol_type = other DNA
gtctcgagtccgattttgccaaaaatcccaactttcctgctgagtagctcatgagacaggcatttcacctctctgaacttcaacttgggggtactcagatttccttcagaggctgtgaaa

SEQ ID NO: 5537 - DNA, 120 bp, synthetic construct
  source 1..120: mol_type = other DNA
tttattgtattgttaccatctggtttcatggagtctgtttcttttgattttaattgtgccctctggagagaaagatcctcgaaatggtggaaaaagaagataccaccttcctccctgccc

SEQ ID NO: 5538 - DNA, 120 bp, synthetic construct
  source 1..120: mol_type = other DNA
acaggaagatgagggatggatcagagggcaaactggacttggaccagcacagggtgcaagcctgatgctctaattttatattttatcagcattttcttatatgtggctttcataattaca

SEQ ID NO: 5539 - DNA, 120 bp, synthetic construct
  source 1..120: mol_type = other DNA
cttgagagtttggaatctatagtctaacttcccttcctcaccctgtctttgtaaatggtgctcatctaaccctacagttactatcttttcactcatgtctagccacttgttagaggggaa

SEQ ID NO: 5540 - DNA, 120 bp, synthetic construct
  source 1..120: mol_type = other DNA
tgatctcatttggtgcctccccctgttgatggctgaggaagccaaggctctgagaaggcacatggtttacccgaggggacacaggcaaggaatctgaacccggattgcattttctgtttt

SEQ ID NO: 5541 - DNA, 120 bp, synthetic construct
  source 1..120: mol_type = other DNA
ttctccagcagtaaaatgttacctgtctgttagggttgtaagattgagtcaacatatgtacaaggcattgcttagtgtttaccaccttgctgtgagctggtaaatggttggttggtccct

SEQ ID NO: 5542 - DNA, 120 bp, synthetic construct
  source 1..120: mol_type = other DNA
tttccatctaactggaacttgtcttggttgtagaaagaaggcgatgacattctaagaaacatcaacgaccaaagaaccccatcatatcctttattactcacgtcacttccctgacaccaa

SEQ ID NO: 5543 - DNA, 120 bp, synthetic construct
  source 1..120: mol_type = other DNA
catcaggcagtcctcagtcttttggttgcagtgtagttgttaaaaatgtgggtacttggaggctgaattcttgggtcaaatcttatctccatctctctgtcctttttttgtggttttttt

SEQ ID NO: 5544 - DNA, 120 bp, synthetic construct
  source 1..120: mol_type = other DNA
agatgacatatggagaaatcgtttataaacttaagtactggtgttaggaagagctaacacggtgagtcttcagtgtttctttaagtgctgctcactactgtcctgagagactccaagaag

SEQ ID NO: 5545 - DNA, 120 bp, synthetic construct
  source 1..120: mol_type = other DNA
gacatcaattcctcatgtcttgtaagcatcactgtcctccaaagttggagcccagctcagacagctgcatagtattttatagagaaggtgtgttgttgaaatgttgattatgcaaattga

SEQ ID NO: 5546 - DNA, 120 bp, synthetic construct
  source 1..120: mol_type = other DNA
tagtactacagtctgtgaatgatttacttagcaattaattcaaaagcatattccactctacaatggaatattttttgagccaagaaatgaagtacgtggccgggcgcagtggcttgcgcc

SEQ ID NO: 5547 - DNA, 120 bp, synthetic construct
  source 1..120: mol_type = other DNA
agcgaaagggactaattgtgtgcaaatacatacgtttggtgtttgttgggagacttgccatgtgacactgcttcttcttttcttctctttttgactatgaacacctgacactacaggaaa

SEQ ID NO: 5548 - DNA, 120 bp, synthetic construct
  source 1..120: mol_type = other DNA
gttgagactcttactgaaatgaaacccaaggatgggtgccactgaaagaaacaagaatgaatgcaaactagtttgtgttgggagttgtacttgacacagctgaatttgcctttgtcttta

SEQ ID NO: 5549 - DNA, 120 bp, synthetic construct
  source 1..120: mol_type = other DNA
gtgctcagtacacatttttgaatgcattaatttggctcttttctgtgaaggcagcttgtctgtgtgtcattcatctgcccaaatttgattgtcaacttcctttgtatggagctgtactgt

SEQ ID NO: 5550 - DNA, 120 bp, synthetic construct
  source 1..120: mol_type = other DNA
tctttctttgtgccaaactcgttgctggattgccataaacacttacttggattgattagagaggctatttgccgtattgaaggtggcagaattatttcaccttttccagaggtgttgacg

SEQ ID NO: 5551 - DNA, 120 bp, synthetic construct
  source 1..120: mol_type = other DNA
aatgtataaactgcattgcaggaatgaagccgtttccattaagaactggggtctatgtcctgggatccagttcttctcccccttttagtactgaaagctgcttcccatctgaaagctgtc

SEQ ID NO: 5552 - DNA, 120 bp, synthetic construct
  source 1..120: mol_type = other DNA
agcatgatctctaagaaatgtacatctgtcatctgtcatatctgctgaaaattgttcagggcttcctgctgccttgagaatgagggtctgaatcccaaacaagggttcaaatctcaacct

SEQ ID NO: 5553 - DNA, 120 bp, synthetic construct
  source 1..120: mol_type = other DNA
caccctctctcccacccagggctcagcacagtacctggaacagtcaagccctcaataaatgtttactgagtgcattaaaaaaaaaaaaaagattttaatgagtcatgctttaactgaaga

SEQ ID NO: 5554 - DNA, 120 bp, synthetic construct
  source 1..120: mol_type = other DNA
ccatttgattttgactattgttgaaattgagtggggaattttgggtttgttttaggttttggaagggaggattatctgaggcttgaggcttctgtgatactgacatctggtgtggaaagt

SEQ ID NO: 5555 - DNA, 120 bp, synthetic construct
  source 1..120: mol_type = other DNA
agatcaaggcatgtttgaaataggcttaattttcctcaagttggcttttgtctcacaattgagttcttgttgacgaagaccagttattattcgtcttcgtgtctctggagtctagcacct

SEQ ID NO: 5556 - DNA, 120 bp, synthetic construct
  source 1..120: mol_type = other DNA
ttcctttagggatagggtgactgtgcttgctgaacacctctaggtcgtcagtgaatgaaataattcattctgtgcttgagtgtctaagacccagggggtttaggaataattaggatactg

SEQ ID NO: 5557 - DNA, 120 bp, synthetic construct
  source 1..120: mol_type = other DNA
gttgagcagctatggtccagtgggcaggtacaccacagtcatggaagcctagttaaatcattacataatagttagctctgtatgaccaatcttttctttaaagaaattcttccttttgga

SEQ ID NO: 5558 - DNA, 120 bp, synthetic construct
  source 1..120: mol_type = other DNA
tttttagtagagacagggtttcaccatgatggccaggttggtcttgaactcctgacctcagatgatccacctgcctcagcctcccaaagtgttgggattacgggcatagccaccgcacct

SEQ ID NO: 5559 - DNA, 120 bp, synthetic construct
  source 1..120: mol_type = other DNA
aaggtttctttttggactcttaagattctcttttattgatccatacatctatcctcatgacagtcttgactactatagctttgtagtattaatcaacttttaaaatatatatatatgtgt

SEQ ID NO: 5560 - DNA, 120 bp, synthetic construct
  source 1..120: mol_type = other DNA
gagatgcttacaaaatcttgattgaattctttttcaaattgggaatgtttattacattctttggcagcatttctgccaccaggttgaggttagttgggaccaatttggcggtggagaagt

SEQ ID NO: 5561 - DNA, 120 bp, synthetic construct
  source 1..120: mol_type = other DNA
gcaaatgtgtatcaagttgcactgacaatctttgaattcctggaactcatgccatgagcacttccaggagcaccttagtgcttcattacaaagatgatgagacgtaggaaagtctttttt

SEQ ID NO: 5562 - DNA, 120 bp, synthetic construct
  source 1..120: mol_type = other DNA
taaccactgtaccctctggaagtgggtacagaagtccagagatgagagagatgtttaacaacagagagaaatccacccgaaggactttttacatctctctaacatctcctgttcagttta

SEQ ID NO: 5563 - DNA, 120 bp, synthetic construct
  source 1..120: mol_type = other DNA
agctttctgcttgatggttgtagtaaaatcccatgattagtgacaatggcatgccaggtttgaagagcaaaggtcaggaggtgagaaagcagataaatgcaatgtttatcttgaaagaag

SEQ ID NO: 5564 - DNA, 120 bp, synthetic construct
  source 1..120: mol_type = other DNA
tgtttcctttcctgctgggaagtcctccaagctcttgtgaaagagatgtggtttgtcgagcatggattttcaaactttctttatagagagctgttgttagcttaaaaatgcctggaaaca

SEQ ID NO: 5565 - DNA, 120 bp, synthetic construct
  source 1..120: mol_type = other DNA
ttagaaaaaatgcctttctctaggaggttttcatccagcatgggaacacaaaacaccagtttaaaatagctaggtaaggcttcacagtctctcaatgtgatgtgggtgtcctgagtcgtg

SEQ ID NO: 5566 - DNA, 120 bp, synthetic construct
  source 1..120: mol_type = other DNA
atctcagacttgccaaagacattcataaaattcagacccgcacacactcgggaatgggaaaaatgaattattttgtaagaagcttatagtccaaaggtagaattgcccaagagagcttct

SEQ ID NO: 5567 - DNA, 120 bp, synthetic construct
  source 1..120: mol_type = other DNA
cacccctgcttagagaaagtgcgttttctgttataaaaggaccttgaatccccatctcatatgttgggactttgtcttgcatgttttcaggcagggcatgattgtatctgtaacataata

SEQ ID NO: 5568 - DNA, 120 bp, synthetic construct
  source 1..120: mol_type = other DNA
tgtgctaggcagtttacaaatgccatctgatttcattcctgccactacagtctaaggctatattgtccgatacctatccaccaccctcatgtggctatttaaatgttgggtcattaaaat

SEQ ID NO: 5569 - DNA, 120 bp, synthetic construct
  source 1..120: mol_type = other DNA
ctcttaaacttgttttcaagccaggacttacctgactttcttaggaaagtaatcactccatagacaaggataggtttttttcacagagcaatgatgttccctgtggtccctatgtagggt

SEQ ID NO: 5570 - DNA, 120 bp, synthetic construct
  source 1..120: mol_type = other DNA
tcccagagtatccaaaaagcctggaaacaaagggaaaatagtgtgtcctgctttccaactttcggatatgctgtagaatagactgaaacaaatcactggaaaataggttgttgtcgattt

SEQ ID NO: 5571 - DNA, 120 bp, synthetic construct
  source 1..120: mol_type = other DNA
caattcagaaacctcatttcatcagtcttggagtcagggctcctgtctcttagcaaaaagctaaagcatacatcaagcatatttattgacaagcgtaaccactgtgaggttataaccagg

SEQ ID NO: 5572 - DNA, 120 bp, synthetic construct
  source 1..120: mol_type = other DNA
aatagcttaacagagacatctgtgatggcttgcatccagagtgcgtggtgtttatttttgatttgaaatatgaaaagcatttttttaagacaactgactcctctgagtcatgcccagggg

SEQ ID NO: 5573 - DNA, 120 bp, synthetic construct
  source 1..120: mol_type = other DNA
tcatgaatggataagtaaatatttaccctgtctgaggtcgaatgtgaactgtctaccaggtgttttgtttttctgtctcctccctctgtttctgcagtgcctccccctgtaaaaaaggaa

SEQ ID NO: 5574 - DNA, 120 bp, synthetic construct
  source 1..120: mol_type = other DNA
gactatcaatgaagctggggggagctgagcttctgaaacttgggaataaattttcagccttgctaatgtgttcctctgaaaaaatatcttatcaggccctcagatatccaccagttctcc

SEQ ID NO: 5575 - DNA, 120 bp, synthetic construct
  source 1..120: mol_type = other DNA
cacttagcacctcactatgggaaacataaagcaggaactaacaggactcctctctcaagaaggaatttcagtctacttggggaaagaataatagccaagcagtaactcaggtttgtttag

SEQ ID NO: 5576 - DNA, 120 bp, synthetic construct
  source 1..120: mol_type = other DNA
attgttaacgagctatattacattcttctttatcatactgagtctgaagttgatgtgtcctttatacttgtggcacatctcagtttgcactgtccacatttcaagtgctgccatgtggct

SEQ ID NO: 5577 - DNA, 120 bp, synthetic construct
  source 1..120: mol_type = other DNA
ctggaattgagcaagctcttgaatgcatgcatggattcatgcagtcactcactccacaaatattcacgtgctttgggccagaatgatttcggcaggaatatcttgtcctacatgctattg

SEQ ID NO: 5578 - DNA, 120 bp, synthetic construct
  source 1..120: mol_type = other DNA
tgagacatggaacttcatgataggaaggtgtcttggaggataactagcaagtctttcactttatagagggggaaactgagtcctcagcgatcagccacatagattctgtgttgtagagac

SEQ ID NO: 5579 - DNA, 120 bp, synthetic construct
  source 1..120: mol_type = other DNA
tgcattttctttcattctgataaactccttgagttgaacagaaatcagactccccgtaacttctgctccacagtttaaaacagcccaccatgaagccttatgtccttcaggacattctgc

SEQ ID NO: 5580 - DNA, 120 bp, synthetic construct
  source 1..120: mol_type = other DNA
gactcaaatattccccagaagagagcactttttcaacagtctgaaaagtggcagggacctttggaatgatctgttttaaccttttcattttctgaatgaggcaactgagagattcaggaa

SEQ ID NO: 5581 - DNA, 120 bp, synthetic construct
  source 1..120: mol_type = other DNA
aattactaaaggcgcgactctggctctcaaagactctgaagtccaggatcgagaagaactgtgtttacacggagttgtcaaggatcattctgccaatgataacctattatcgtgcaactc

SEQ ID NO: 5582 - DNA, 120 bp, synthetic construct
  source 1..120: mol_type = other DNA
aatattttccatattcacatcaggtatttgtaacatctctttctttactaaaaataaaaaccttctgctgaagacctcctgttactccaaccccttcccccttcttctcgctcccgtttc

SEQ ID NO: 5583 - DNA, 120 bp, synthetic construct
  source 1..120: mol_type = other DNA
tatataattattgtggaaaatttagaacacatggagaagtaaagagtgaaattgctgactgccctattaccccaacctccaccctatagagatattttctccccatccccccaagggcag

SEQ ID NO: 5584 - DNA, 120 bp, synthetic construct
  source 1..120: mol_type = other DNA
gcttattattttcaacaaatgtttttggtgggtaattttacctttgttgatcaccagctttgtttggggtgcatcatttctctcaagccgaattttctctggtaatctggccagaaggcc

SEQ ID NO: 5585 - DNA, 120 bp, synthetic construct
  source 1..120: mol_type = other DNA
cctccctggaagatgtgaaaacaccatcccattaaccctccaaagcagttggttgacttgatcagggaagatatgaaatataatttctttgaatgtgctttctctttactcttttagtgg

SEQ ID NO: 5586 - DNA, 120 bp, synthetic construct
  source 1..120: mol_type = other DNA
ctcctaagccaggtacgattccagctatgttaaaaggccctgggaaatgttaactgatcaaaaatgctgggtaagtagaattattatttcaccctgaccaacttcagtcagattagcata

SEQ ID NO: 5587 - DNA, 120 bp, synthetic construct
  source 1..120: mol_type = other DNA
aaaatcaagatttacacacaaaatctcccagtttgtaaaagttggcaaccatttaaaaattttaaaaacgctctgcaggccaagcacaacatctgtgggcagtgggcagctgcctgtttt

SEQ ID NO: 5588 - DNA, 120 bp, synthetic construct
  source 1..120: mol_type = other DNA
tgggggaataaaggcttctctaatgctgtgaggtgtcattcatgttttccattctcctgctctccgaatttaaattagggtcaatcatacaaacctcacaggcttgttcagtcaacaaag

SEQ ID NO: 5589 - DNA, 120 bp, synthetic construct
  source 1..120: mol_type = other DNA
cttaagacattcaaaaaccactgtgctaagtaacagtggagatatattgatctcaacatttcaaggagaaaagagcttgtgaaataggcttgtgatgtttgtgataagggccctgtgggg

SEQ ID NO: 5590 - DNA, 120 bp, synthetic construct
  source 1..120: mol_type = other DNA
atgaacatgtccatcactcctctaaaactttcctcctgcctctttgcaatttcaccatcttgtttgcctgctgcccccatccctaggcatccactgatctgctgttattatacattagtt

SEQ ID NO: 5591 - DNA, 120 bp, synthetic construct
  source 1..120: mol_type = other DNA
gtgttgctggggagttggaaatgtaccctcttttccatatccattgttcagtcacgttctcctgaaagaagtcttcttactgtgtgtaagaaaaatcagtaagcctctgataaatagtca

SEQ ID NO: 5592 - DNA, 120 bp, synthetic construct
  source 1..120: mol_type = other DNA
ctcctaacctctctgagcttcattgtcatcttttggaagatgaggccctgtcctacaggattaaagtatttaaatatagagtgcttaccataaaacttgcttctaggaagcaactggtca

SEQ ID NO: 5593 - DNA, 120 bp, synthetic construct
  source 1..120: mol_type = other DNA
agacacttatatggaatctcaggtcatacagagacattgtctctgtgttttatattttcctttgaggacatctccatttaagtagctgatgcctgagcggggagagaagaatgagccttt

SEQ ID NO: 5594 - DNA, 120 bp, synthetic construct
  source 1..120: mol_type = other DNA
tgacctctgatttttgaggtcagtaattctgcagcctccctcacctttctggtttaaagcaacctcctctctcaggaagttgtttgaaatcaatttaattcctttatatcccacatgaca

SEQ ID NO: 5595 - DNA, 120 bp, synthetic construct
  source 1..120: mol_type = other DNA
ggcagcctgagatctttgcttatttcctacgtcttctgaaaggtactatgaagcttaccagttgctgatgcacgctatcagctaataattccattaccattactattttctgagcaaatg

SEQ ID NO: 5596 - DNA, 120 bp, synthetic construct
  source 1..120: mol_type = other DNA
agggcacccattctttgttaccatttgggatggaaactgcttatataagcttgtaaagctttggttcagaaagcaagagaatgtgtatggaacgttagcaattgctgtcatgcaaatgct

SEQ ID NO: 5597 - DNA, 120 bp, synthetic construct
  source 1..120: mol_type = other DNA
cctgtaataagaattgtttgttttgtgaagttgaactaatagtgaggtttgccggcagataagacttgagaaattgcagttgtcaggggaggggacttttccatgtcctgcttttttttt

SEQ ID NO: 5598 - DNA, 120 bp, synthetic construct
  source 1..120: mol_type = other DNA
tcttacagtggtttaggacactagaactgatttttcctctttagctgtaattttgagacctttaacaaatttctccccatccctctgttccctttacacttttcagcctctagtatcttc

SEQ ID NO: 5599 - DNA, 120 bp, synthetic construct
  source 1..120: mol_type = other DNA
gtagtcacagaccaacccagatctttgtagcatcttttatttgtgacttgaaagttctatgatcctgctgacactcaagaaaaagcaatccccatcaacttggtgcttggagaaaaaagt

SEQ ID NO: 5600 - DNA, 120 bp, synthetic construct
  source 1..120: mol_type = other DNA
atccatagcctgatgttgaaaagttcttggtgtctgcgtgctttacagataattatcatcaggctgaactttctccagtaaccaaccttcttcttttccagaaagtacaaattctgtgcc

SEQ ID NO: 5601 - DNA, 120 bp, synthetic construct
  source 1..120: mol_type = other DNA
agaccttcagacaacttaagattcaatacaacaaagaaaaaattgtcttgctgttcttaacctaccaaagcaggcaagtagacgcacatgtgttttacacacgtcattggaagaaggctg

SEQ ID NO: 5602 - DNA, 120 bp, synthetic construct
  source 1..120: mol_type = other DNA
ccacaagcagaatttttttctgccttcccagaaggtccgatggaatgagcacttcacccaaacttgaagtcactcaagtcttgcttttattttgaaccagaaaaaaagaaaaggaaaacc

SEQ ID NO: 5603 - DNA, 120 bp, synthetic construct
  source 1..120: mol_type = other DNA
tatggagataatgatacctgcaagttaattgggaaaactggtggtggagtcagtgcatcagtcagctagtgttgcgtaacaaagcactctaaaaacccagcagcttaaatccattgttta

SEQ ID NO: 5604 - DNA, 120 bp, synthetic construct
  source 1..120: mol_type = other DNA
tgaagccaatgggaggaaacctaatttcctgccacaggaaattgttctgctagggaagaatatatttaaggattaaaaccttctgtcagaggaacttgagggagttgctagagaaagacc

SEQ ID NO: 5605 - DNA, 120 bp, synthetic construct
  source 1..120: mol_type = other DNA
gtgttccttactttgccggccactatcatagtaagcaggcagtaatagttacatgacaatactgacaatagattcctgccactttctggaatatctttctgggtagtgtctgttcaaatc

SEQ ID NO: 5606 - DNA, 120 bp, synthetic construct
  source 1..120: mol_type = other DNA
ccctctgtccccaggcaatgactgatccctgctttctgtcactagattaagattagtgtgccttttactttagtttaaattaccttataattttacacgaacagaatcatgcctggcttc

SEQ ID NO: 5607 - DNA, 120 bp, synthetic construct
  source 1..120: mol_type = other DNA
gttagtgcttgcctttttattcctttaacagtgtctttcaaagaccagaggcttaaatcttgatgcggtctgattttttttttattattattaagtgctttttggtgtggtatctgagaa

SEQ ID NO: 5608 - DNA, 120 bp, synthetic construct
  source 1..120: mol_type = other DNA
tggggagtatctgctgtgatagagaataataacgctaatttgtgggtgtttatgaagcactttcaaatggaaaccaagcttcaggaggtcggggggcagaataccccattttatagatga

SEQ ID NO: 5609 - DNA, 120 bp, synthetic construct
  source 1..120: mol_type = other DNA
atgccctgtccagtccttcagcaaagtggggtgccatggtcatacactcttggggttccttgttattttcgttcaggacactttcattgtgtgtaattgtaggtttctgtgatgatgatg

SEQ ID NO: 5610 - DNA, 120 bp, synthetic construct
  source 1..120: mol_type = other DNA
aataggtgctcattaaatatgtgttaaataagggactccattttagtggcacctcctcacctgtctaataccagacactatctgaagttttacgtccctccagaagccttctgcctccca

SEQ ID NO: 5611 - DNA, 120 bp, synthetic construct
  source 1..120: mol_type = other DNA
tgactttctaatgtgcaagggaagacctgagtgaatgaggggagacagcctttgtactttgtcactcttctttggatcactgtagtcctcatatctgtgcctaaagaactctcattgtct

SEQ ID NO: 5612 - DNA, 120 bp, synthetic construct
  source 1..120: mol_type = other DNA
gaagtgactttgagttttcactctgcagggagaaatgggctttgccgtcaaagactgcaaatgtttttagaagcccctcatttacatgcaaataacgtgtgaatcaccagcactttcaga

SEQ ID NO: 5613 - DNA, 120 bp, synthetic construct
  source 1..120: mol_type = other DNA
atgtgtgatgtctttgcaaaaggtgtctcagagccaagctgtgaaggccttttaacagaccaccttccttctgattcccagagaccccaccccctggctacctgagtgaagatggagaaa

SEQ ID NO: 5614 - DNA, 120 bp, synthetic construct
  source 1..120: mol_type = other DNA
gcttatttctctcctgctacatctccagatgtttcccatatcatttgttataggaccaaattggctccagaccagcagcttcttgaattgaaccccagctgccacatagaatgtgtactg

SEQ ID NO: 5615 - DNA, 120 bp, synthetic construct
  source 1..120: mol_type = other DNA
gtctttgtggttcaggccagcacaaaacaggggacaagcatttatccagtgcctaccatgtagcggtcatggtgtaagcatttttatatgcacagtcttacttaatttttacatgtcaca

SEQ ID NO: 5616 - DNA, 120 bp, synthetic construct
  source 1..120: mol_type = other DNA
agcaggatgctgctctggaaaagtgtccactgttttatttttgaaggctgataccatgtgagttctttttttctggaggtgagaggtgtagagaacataatagagtaagaattgggtaga

SEQ ID NO: 5617 - DNA, 120 bp, synthetic construct
  source 1..120: mol_type = other DNA
acgtgtgcagtttggtgcaaagccacggacagccatgcagactccagccccctgacatttatagacctgtttcagatatacttatttgagtgtttcatcttataattgtgtaatttttct

SEQ ID NO: 5618 - DNA, 120 bp, synthetic construct
  source 1..120: mol_type = other DNA
ctcatcatttggaatattaggagatgcttgaaaccctttagaacaggctgacctgggcagtgtgggatgtgactttgggagatctgttttaacatttttgtaaaataatatcaccatgag

SEQ ID NO: 5619 - DNA, 120 bp, synthetic construct
  source 1..120: mol_type = other DNA
tttataactttataaggcagaagcgttgtgatttttcattttacagattaggaaaccggggaacacattggtgaactcatgtgtcccagattcacagctagtgaatggagaaggtggctt

SEQ ID NO: 5620 - DNA, 120 bp, synthetic construct
  source 1..120: mol_type = other DNA
gcctatagaataaagttgtttgtgggttttgattggggaggttttctgatgacagcttcataaagattaatctggccactgtgtggaatctaaattctaggggaaattactggaggcaaa

SEQ ID NO: 5621 - DNA, 120 bp, synthetic construct
  source 1..120: mol_type = other DNA
ggacatctgattatttcctttaaagagattattatgaaattactgtacaaaaagaaagaaagcagaggacatctggtttctcctttcatttcctccccactccaggtgttagccccaggg

SEQ ID NO: 5622 - DNA, 120 bp, synthetic construct
  source 1..120: mol_type = other DNA
gcagtgcttcagactgaaaggtggtcgtttgctgtgaattgccctctagattgtgtagactaggatgatgggatgtttcttgagcttggacccaaggcagcatctcctgttgacatagtt

SEQ ID NO: 5623 - DNA, 120 bp, synthetic construct
  source 1..120: mol_type = other DNA
tgtttttaataggcatcccttaatccaagtgttgccttctgggttttattctgttttctttttcttaaacataatggaacgtctgtgccagcttggaacaggactgaaaactgaggccag

SEQ ID NO: 5624 - DNA, 120 bp, synthetic construct
  source 1..120: mol_type = other DNA
gtaactataacctcatggttatcccatttatagccgccttctttccagagtcctttttgtttctctggtactaaccagggtaaggataagtactttgggaaagaaatgagggcatattta

SEQ ID NO: 5625 - DNA, 120 bp, synthetic construct
  source 1..120: mol_type = other DNA
gggcagtggtggccagcagcactgatacattgcttgaccactctgaatgcttgggttgcacttggattttttttttttaagtttccaaatcaacatagctcacattttagtgaccacatt

SEQ ID NO: 5626 - DNA, 120 bp, synthetic construct
  source 1..120: mol_type = other DNA
cttagaaaggatcatgcacctagactccaaaaggggattgggacactctgtcctgcaggggcaaccagaccccttccagtgggcagaacagcttctgacttttctctcttgggctttaca

SEQ ID NO: 5627 - DNA, 120 bp, synthetic construct
  source 1..120: mol_type = other DNA
tttactcttctgagaaagagaaccagccccttgtagaatggcagttttgctttgaggagcccctaatggagactgtacagacaactgggacaaatacagattttctttcagaagggtttg

SEQ ID NO: 5628 - DNA, 120 bp, synthetic construct
  source 1..120: mol_type = other DNA
gttcaggccacttgatcattcccactcaaagatataatctcagaaaatctggaagccacagaggaaaatagttcatctaagggatcaagaagggaacgtctatgagaaaggcaacatatg

SEQ ID NO: 5629 - DNA, 120 bp, synthetic construct
  source 1..120: mol_type = other DNA
tcattgtcagtgacagacagccaccactaccagacctgttgttcccatttcgctttttgttttttacttcaaaaaagatacttattctgggtggcataccactgtttgattgattgattg

SEQ ID NO: 5630 - DNA, 120 bp, synthetic construct
  source 1..120: mol_type = other DNA
ccatcccctggccgagcaaagagctcattgtcagagtttacgcaactgtttgagttgcagagccaatttaaaaataatttctgtccatctggagtggatttaagagatgaaagaaaagta

SEQ ID NO: 5631 - DNA, 120 bp, synthetic construct
  source 1..120: mol_type = other DNA
gagtgcatgcctaggatgctggagagagtccacctttctcaccttttctgctcactcatgattgcgttgtcaatctggaggtgattggattaggttttctctatgcccacagatctaact

SEQ ID NO: 5632 - DNA, 120 bp, synthetic construct
  source 1..120: mol_type = other DNA
cactgagtagcagatggtagtggagaagtggtagaccacaggcaggggaaactttagaatgcagaaagtctgaaatgataatagcacaccaggtttccagagcattttgtggttgcattt

SEQ ID NO: 5633 - DNA, 120 bp, synthetic construct
  source 1..120: mol_type = other DNA
cagtaagacttcaaacgacatttattttaaactttatttgtgactgtctttagttttactgtctggagaatcagatgcacaccttcacttagctgtgaatgtcacctccacccagcccag

SEQ ID NO: 5634 - DNA, 120 bp, synthetic construct
  source 1..120: mol_type = other DNA
tggtagaagagctgtgtctagaactctgccctcttggcttcttccttagtctcattttaggcagatggctttaggatgaccctcttcaggaagttaggtcttcagctcattgttcctctc

SEQ ID NO: 5635 - DNA, 120 bp, synthetic construct
  source 1..120: mol_type = other DNA
tttcaatattggccttgggccaccgtttgtaatgaaatccagatgagcatgacttatggaaagtcagattctcattagaggatttcatcctgtaaaatcctcctcttccacttaccgtat

SEQ ID NO: 5636 - DNA, 120 bp, synthetic construct
  source 1..120: mol_type = other DNA
gtcatcaaccagcctgaatttagacaaagtgctttggggaaaagaaacgtgtggtgtgccttgtttttttccagtaattgttccatggctcgttctgcttgtaagattttccaaaataag

SEQ ID NO: 5637 - DNA, 120 bp, synthetic construct
  source 1..120: mol_type = other DNA
agtttcagcaagttactggtaccgcttctaggacagcgtctaacagcatctttgggaagatgactgtcaccaaagcagaaaaagctttctgacttgtgtaaccccctggagattttttaa

SEQ ID NO: 5638 - DNA, 120 bp, synthetic construct
  source 1..120: mol_type = other DNA
ctttatcatatgctcttttaaatgtttggtttatatattttctttaaaaatcctgggctggcacattgactgggaaacctgagtgagacccagcaactgcttctctcccttctctctcct

SEQ ID NO: 5639 - DNA, 120 bp, synthetic construct
  source 1..120: mol_type = other DNA
atctatggaagtcgtgtcttactccaggtgaagggggaaaaaaaaagcctatactttggcaggttatgaactttgaatgtgatgaaatgacacgtttggctgcatttggatggtgtctta

SEQ ID NO: 5640 - DNA, 120 bp, synthetic construct
  source 1..120: mol_type = other DNA
atgtgcttagtttgtttatttttctccatctccccttggcttcctagagtttggacatattccaggctaaatgcttttactcaagactacagaaaggtttgaagtagtgtgtgcatggca

SEQ ID NO: 5641 - DNA, 120 bp, synthetic construct
  source 1..120: mol_type = other DNA
ataatttcttaaaaccattcagacagataactatttaattttttttaagaaagttggaaaggtctctcctcccaaggacagtggctggaagagttggggcacagccagttctgaatgttg

SEQ ID NO: 5642 - DNA, 120 bp, synthetic construct
  source 1..120: mol_type = other DNA
tatccattcactaaggtcatttactttctcagcatagataccgatttttgaattgtcccttttggattgctggggaggttctgcattgatcccatgcaccttagtagtgggtgagaattt

SEQ ID NO: 5643 - DNA, 120 bp, synthetic construct
  source 1..120: mol_type = other DNA
aaaacaaaaaaacaacaaaggccgggctaatagctatttataaacacttactggacgcccactctacgccgagctctcccgcgctccttggatacttttttgcaacgagatgccaatttc

SEQ ID NO: 5644 - DNA, 120 bp, synthetic construct
  source 1..120: mol_type = other DNA
agcgcgttgggtcggctggaatgtgttgccttagggtctaagtgaaagttgtaaattgtttgtctaaatttattttctccagccaatttctgttttgtctttgtcccctactttctcttc

SEQ ID NO: 5645 - DNA, 120 bp, synthetic construct
  source 1..120: mol_type = other DNA
tcttagctaatttttgttagtaacctttgacttttgccagaattagcatccttctagtcttagtagcagcttggttactcgggtgttttaagaagtaggttcactcctttttgctggcaa

SEQ ID NO: 5646 - DNA, 120 bp, synthetic construct
  source 1..120: mol_type = other DNA
tgaggtgtgagttactgaggcctctgctagggaggttaaccctacagaatctgtagggttcattatatttaaactgcatatttcggcttgtctaaatttttgcctattttggtgaaaaca

SEQ ID NO: 5647 - DNA, 120 bp, synthetic construct
  source 1..120: mol_type = other DNA
aggttgtgtcaccttaacactattacctggtgtaattggcatccgggaacatttgtttttaactatgagagtgaatgaaaactagggtagtgcttacatatgtaaaactaagatggtagg

SEQ ID NO: 5648 - DNA, 120 bp, synthetic construct
  source 1..120: mol_type = other DNA
agccctccgcagtgattgagtcattagggtcctctgactttttcttttgaactgtttcacttgtgttagctttacattctttaatacagtgttacacacatgtacagtgtagccatctca

SEQ ID NO: 5649 - DNA, 120 bp, synthetic construct
  source 1..120: mol_type = other DNA
tgctgggctatggagtagtttcatctctgtctctggaagagctatttaaaaaaataaaaatattttttcccatctgattgcaacacacatgctgcttcagaatgggaatggagtggagga

SEQ ID NO: 5650 - DNA, 120 bp, synthetic construct
  source 1..120: mol_type = other DNA
ttgtaaagtaaagattgtagactagatcaatgctttgtaaaactaacagtacctcagacttccagagtgttttttaaaggtacagccccacccttgattctagttagtggagctggccta

SEQ ID NO: 5651 - DNA, 120 bp, synthetic construct
  source 1..120: mol_type = other DNA
ggcaggtaattccttggaaatgaataaagtgagctggccacttcgaggagaacatttatagccagtgctaaaatctgatgtttcaagtgaaaatcagatttttgggaaactcctgtcact

SEQ ID NO: 5652 - DNA, 120 bp, synthetic construct
  source 1..120: mol_type = other DNA
ctaacctttcagaattgccacttgagttttggtgttgaataaaagatgaatatccattgttttctgagaaggctgttaaaatactcctctcttccaattagctgtccatgtgagacacgt

SEQ ID NO: 5653 - DNA, 120 bp, synthetic construct
  source 1..120: mol_type = other DNA
tgtcccacctggccagatggggagattctccttggaaaatcagactgctgttttacaaatggagaaatacatgctggtacacaaaaactgatgtccacctatagtactttgttatttctt

SEQ ID NO: 5654 - DNA, 120 bp, synthetic construct
  source 1..120: mol_type = other DNA
ctagaggaaaaacaacaggcagataacaagaatcagctgtctcttcttgctaactctttacctctcataactcttgactgcatctaatacctgtatatgttagtgcctttcagataggcc

SEQ ID NO: 5655 - DNA, 120 bp, synthetic construct
  source 1..120: mol_type = other DNA
tgtcagtctaatttctgagcgatgacagcagtgcccccagttgatctgtgatgaatgtgtattatatcctaagcagaaaataagcttttgttttaagctactgatcttttgggggttggt

SEQ ID NO: 5656 - DNA, 120 bp, synthetic construct
  source 1..120: mol_type = other DNA
tcaagttgtttaagagttcaccatttgggaaaatccatgttactgactgcagtgccattgtgctatttgagttgccagtataacacgtttgtcttggaaggtctgaatttgtagctgtca

SEQ ID NO: 5657 - DNA, 120 bp, synthetic construct
  source 1..120: mol_type = other DNA
ttcaaaagtgtctgcactcttctaatttgttgtaagacaattccacagaataaaaagctatggtcagtccagaaacacttgcctggtatatgtcaggaactgtgcatggtgctgggaatt

SEQ ID NO: 5658 - DNA, 120 bp, synthetic construct
  source 1..120: mol_type = other DNA
tgcaggttatctttggttatttggaaagtgtaccttcagcatgtgtattaatgtgggcaagtgctctaagacatatgaaaaactgcttctctgcatggggtttatgagttgagacagaca

SEQ ID NO: 5659 - DNA, 120 bp, synthetic construct
  source 1..120: mol_type = other DNA
acaagcacacaaagtacaggctccagtcctgctttatcttctttattcttaagctaatggccttttcctattctctgtggggtcttgggatcagataagttagttttctacctgttgaat

SEQ ID NO: 5660 - DNA, 120 bp, synthetic construct
  source 1..120: mol_type = other DNA
aaaggaaaaacttgaacaaatggacaatatgtctattacgaatacaccaacaagtaatgatgcctgtctgagcattgtgcatagtttgatgtgccatagacaaggtggagagagtgaaac

SEQ ID NO: 5661 - DNA, 120 bp, synthetic construct
  source 1..120: mol_type = other DNA
gagccactgtgcccagtcgtgttgttttcttttttgatattgtatgtacatttaaacaaccggattacacttagtccttttataatttagaaatctgatatgtttcactgttagcaaatg

SEQ ID NO: 5662 - DNA, 120 bp, synthetic construct
  source 1..120: mol_type = other DNA
ttatttttctaggtggctggtcggaaaggatttcctcatgtgatctatgcccgtctctggaggtggcctgatcttcacaaaaatgaactaaaacatgttaaatattgtcagtatgcgttt

SEQ ID NO: 5663 - DNA, 120 bp, synthetic construct
  source 1..120: mol_type = other DNA
gttttgtcctatcctctctgtttttttgttgacctagaattagtttgtgtgagcggcaggcagtaacattaacaagaaaataacttactgctttggaaatgtagattttgaggttagggg

SEQ ID NO: 5664 - DNA, 120 bp, synthetic construct
  source 1..120: mol_type = other DNA
aaaaaggaaccactgtcatcttagaaaggtgtgctcttgttctggagggcagttagtagtagtttagcaccttttttgtttgtagaattttagaggtgggtcagaaatactaggtgacct

SEQ ID NO: 5665 - DNA, 120 bp, synthetic construct
  source 1..120: mol_type = other DNA
ctactcaagtgagcttatactctagtggaggagagaaaaagtaaataagagagtgataataccatgagataggtgctgtgtcctggttgctggtgatgataaagaacacagacctaaggt

SEQ ID NO: 5666 - DNA, 120 bp, synthetic construct
  source 1..120: mol_type = other DNA
caatacatggtccataaatcaaaatactataaaaaggtatacagtgaaaagaagtgctcccacccctgcccccattcccccctacctcaggtaatcactttttttagtttctggtgtttc

SEQ ID NO: 5667 - DNA, 120 bp, synthetic construct
  source 1..120: mol_type = other DNA
aggttctgggcagagaattaacattgttaatgcagttcagtttcagttttctttttgtcatacagcagagctaactatttcctggttggttaatggaaagatgttatgctgtatcagctg

SEQ ID NO: 5668 - DNA, 120 bp, synthetic construct
  source 1..120: mol_type = other DNA
tgtttaattttctatatagctccatcaagtatgatggtgaaggatgaatatgtgcatgactttgagggacagccatcgttgtccactgaaggacattcaattcaaaccatccagcatcca

SEQ ID NO: 5669 - DNA, 120 bp, synthetic construct
  source 1..120: mol_type = other DNA
agaggggctgctaggttcaggtttttgggggcatgatcatatgacctggttctgttacttattttcacagtaaccaaaggtttgatagtttgctgcttggcaaatgaagtagcttttttt

SEQ ID NO: 5670 - DNA, 120 bp, synthetic construct
  source 1..120: mol_type = other DNA
gaaatgcagctaattttatcctggtatttattgggtagattttaataatcgaataccgtaaatactgtaagttttagaacttgtgtcaaaatgttcccttatgtggtggcatgcgcctgt

SEQ ID NO: 5671 - DNA, 120 bp, synthetic construct
  source 1..120: mol_type = other DNA
attctgccattactagtatcagtgctgatagtgattaatttttcagttttcaacattttcttgagcctggatttttggggtcctaatcagaaaggtccagagagagaggtggatggagtg

SEQ ID NO: 5672 - DNA, 120 bp, synthetic construct
  source 1..120: mol_type = other DNA
ttctcaaggtttccctcagcgtagtattcagtgtactttggataatgttgaatctatagataactctgtgctggcatgattgggaggaataccctacagataacatgtagtttcaggtag

SEQ ID NO: 5673 - DNA, 120 bp, synthetic construct
  source 1..120: mol_type = other DNA
gcctgttcacaatgagcttgcattccagcctcccatttccaatcatcctggtaagtgtatttcaaaattgatttcctgtatttagattgatttagtggtgattgaaacgcacaaacacag

SEQ ID NO: 5674 - DNA, 120 bp, synthetic construct
  source 1..120: mol_type = other DNA
acatgccgaaaagaaaaataattcactctattcaggatctctggttaactggaatttagaaactatttgattaaattgtatgcaaaagagtaaatcgctaagtagctttcttcagttcaa

SEQ ID NO: 5675 - DNA, 120 bp, synthetic construct
  source 1..120: mol_type = other DNA
agtactccactgtgtataagtcaagcataaagaattttaagcataccggaataatacaggaagttcccccattgtactcattcctcagtttcagccattatcaagtaatgaccaatcttg

SEQ ID NO: 5676 - DNA, 120 bp, synthetic construct
  source 1..120: mol_type = other DNA
aactaaaacattatggcatcccagaaaccctcctaccccatgaattttgtctctgtcaaaacctctttccttctccccagaggtagctactgtcctgctttttatggatatcactttttt

SEQ ID NO: 5677 - DNA, 120 bp, synthetic construct
  source 1..120: mol_type = other DNA
ccaccaaaacattgggtaattgttgtcttagacaatctctgtagttttggtttaaccagtgtacctatcagttgtttgctgaagcttcttgtccatagcataatgtgataccttcacatt

SEQ ID NO: 5678 - DNA, 120 bp, synthetic construct
  source 1..120: mol_type = other DNA
gtagttaacatgacctgacttcactaaaaataccttttgctatggcataggtgggacaaatgaccttctacccaagagacagttgagaatctgtgtgtacaacaactgtgtgattagagt

SEQ ID NO: 5679 - DNA, 120 bp, synthetic construct
  source 1..120: mol_type = other DNA
ttctggaggagatcgcttttgtttgggtcaactctccaatgtccacaggacagaagccattgagagagcaaggtattgattgtatagtcagatagttactttaaaaaattgagcatagta

SEQ ID NO: 5680 - DNA, 120 bp, synthetic construct
  source 1..120: mol_type = other DNA
ttagctactgtatgatctcggcttttaaggatgtgtgtgctaaagaacataatcttggctctatcacttgctgtcatgtgactttggcaaattacctaacctctaagccattctgcctaa

SEQ ID NO: 5681 - DNA, 120 bp, synthetic construct
  source 1..120: mol_type = other DNA
ctgtgccaggcctgttacatgttttagagtaatacaaaggctcttgaaaatactgagtgaagcctccaaagttgtattcctgtaacttgaaatttgtaagaatcagactctggactttca

SEQ ID NO: 5682 - DNA, 120 bp, synthetic construct
  source 1..120: mol_type = other DNA
ccacatgtacctatcatccagctgcaacaattatcagcactttaccaatctttaatgtgtttctcccccaacttttttttcctggagtcgttgaaagccaattccaaacagcatagtcac

SEQ ID NO: 5683 - DNA, 120 bp, synthetic construct
  source 1..120: mol_type = other DNA
atttattttttcttcctgtcattgcttcaccctatgtggcaattttgccttaccctggcatctgggattcacatctcagaaccaaatcttataaatttaggaagtagggggactttgtct

SEQ ID NO: 5684 - DNA, 120 bp, synthetic construct
  source 1..120: mol_type = other DNA
ttaccaagtatattactgttctttagaagagtcttactagtcagaaagagacagttacaagtacaaccccatccacaatttcactttccatggcttcaggtatccatggtcaaccacagt

SEQ ID NO: 5685 - DNA, 120 bp, synthetic construct
  source 1..120: mol_type = other DNA
gagcattttcatgactgtggaaaaaaactccatatacccttttaactatcacccccaaatctccatttccattagctctagacaaccactattctacgctctttgtagatttgcctattc

SEQ ID NO: 5686 - DNA, 120 bp, synthetic construct
  source 1..120: mol_type = other DNA
gaaggggcagcagatgcttctaaaccactggtggactaggtcagagggtattatgaacctcatttaaatttattcccaattaacactcattgtgattccctaagtcaagtagaacttaga

SEQ ID NO: 5687 - DNA, 120 bp, synthetic construct
  source 1..120: mol_type = other DNA
tagattcaggctgaaacaatcctaattgcgattatttacaacacattggagagagcctatgtgtgacatattacttggttatttttttaaatgactcgtgggggtgggggagtgttaatg

SEQ ID NO: 5688 - DNA, 120 bp, synthetic construct
  source 1..120: mol_type = other DNA
gagctatttaccttttcaaatgtttgagtccctgctttgttctgtactgggtaatgccttccaaatgtcatagcctagaagttctgaaacgaatggactgtgagaaatttgaggaagtag

SEQ ID NO: 5689 - DNA, 120 bp, synthetic construct
  source 1..120: mol_type = other DNA
agggagtatagccacatggttcagaaattaaagtgatttaaaaacagtggacattgagcagccttgcttcagaacctgtccttgttctcctttcctgcaaattctttttgtgtaatcttc

SEQ ID NO: 5690 - DNA, 120 bp, synthetic construct
  source 1..120: mol_type = other DNA
agaggcgtgtggcagccaaagccatcatgatgttgacatgatcttcttggtgagctccaagccacctttcctaactagttttagaccaatcacaatgtacataaaagtttacatgtttta

SEQ ID NO: 5691 - DNA, 120 bp, synthetic construct
  source 1..120: mol_type = other DNA
acactggctaagaaaactgcagtggccctgcaggtttctctacagtacatgcaaattcctcccattagtttcattgtaatattgatgaatgcagatggactatatgactgtatgttctga

SEQ ID NO: 5692 - DNA, 120 bp, synthetic construct
  source 1..120: mol_type = other DNA
gcagacccacaacctttagactgaggtcttttaccgttggggcccttaaccttatcaggatggtggactacaaaatacaatcctgtttataatctgaagatatatttcacttttgttctg

SEQ ID NO: 5693 - DNA, 120 bp, synthetic construct
  source 1..120: mol_type = other DNA
agaagcctataagaggaatttcttttccttcattcatagggaaaggttttgtattttttaaaacactaaaagcagcgtcactctacctaatgtctcactgttctgcaaaggtggcaatgc

SEQ ID NO: 5694 - DNA, 120 bp, synthetic construct
  source 1..120: mol_type = other DNA
tgtgtgatgatagtcctccttatatcacctggaatgaacacagcttctactgccttgctcagaaggtcttttaaatagaccatcctagaaaccactgagtttgcttatttctgtgattta

SEQ ID NO: 5695 - DNA, 120 bp, synthetic construct
  source 1..120: mol_type = other DNA
aagacctcattccatgtttgtccagtgcctttcagtgcattatcaaagggaatccttcatggtgttgcctttattttccggggagtagatcgtgggatatagtctatctcatttttaata

SEQ ID NO: 5696 - DNA, 120 bp, synthetic construct
  source 1..120: mol_type = other DNA
agccttatccctagcagttgtcccagtgctgctaggttgcttatcttgtttatctggaatcactgtggagtgaaattttccacatcatccagaattgccttatttaagaagtaaaacgtt

SEQ ID NO: 5697 - DNA, 120 bp, synthetic construct
  source 1..120: mol_type = other DNA
ctttggtgaagacaatcatttctctctgttgatgtggatacttttcacaccgtttatttaaatgctttctcaataggtccagagccagtgttcttgttcaacctgaaagtaatggctctg

SEQ ID NO: 5698 - DNA, 120 bp, synthetic construct
  source 1..120: mol_type = other DNA
ctttttaggtccattttgattaagtgacttttggctggatcattcagagctctcttctagcctacccttggatgagtacaattaatgaaattcatattttcaaggacctgggagccttcc

SEQ ID NO: 5699 - DNA, 120 bp, synthetic construct
  source 1..120: mol_type = other DNA
cacgaactgttcagaagctgccctgaggtcaccaagtgagctaggaagaggcgtgggctcgatctctgccacatccacctcgggaaaccacaaggtctcgatgggtgattttgcctaaag

SEQ ID NO: 5700 - DNA, 120 bp, synthetic construct
  source 1..120: mol_type = other DNA
aattcttgattttcctcggcccagtccatggcgtcactgaagtggatgttcaatgagaaaataataaggatgaatgctgcagttggagttcaagagaggaggcatttttgacgccacaga

SEQ ID NO: 5701 - DNA, 120 bp, synthetic construct
  source 1..120: mol_type = other DNA
ttctttctttctttctttctttctttctttctttctttctctctttctttctctctctctctctatttccttctttctttctttctctctctctctctttctttctctctctctttcttt

SEQ ID NO: 5702 - DNA, 120 bp, synthetic construct
  source 1..120: mol_type = other DNA
tctctcctcttttctttcccaatcaggcccttcctggtgtgcagaagggaaagctgattccacagcagctgggcctgcccgacccaggaggctacatctgtcacccctctgtctgtctct

SEQ ID NO: 5703 - DNA, 120 bp, synthetic construct
  source 1..120: mol_type = other DNA
aactttagggaacaacaaacctgtctgacgggtttgagattccacatgggacaggctttctcacctccgcactgacgctaggacagctgggttgaaggggcccagtgacacccctgacat

SEQ ID NO: 5704 - DNA, 120 bp, synthetic construct
  source 1..120: mol_type = other DNA
tgagatcaggagttcgagaccagcctcaccaacgtggtgaaaccctttctctactaaaaaaaaaaaacaaaaacaaaattagccaggcatggtggcacgcacccataatcccagctactc

SEQ ID NO: 5705 - DNA, 120 bp, synthetic construct
  source 1..120: mol_type = other DNA
aactgtgaggagtctgaccacctcctctgagggccagtttctgctgcgtcccacggggacttggggaaaacttggactccccagccccagccctggcatcattttttttttttttttgag

SEQ ID NO: 5706 - DNA, 120 bp, synthetic construct
  source 1..120: mol_type = other DNA
ataaaatgaggataatcgtggtacctcctttggaagccttttgtgagaatttggtaagttctggtatgtgttaagtgtttggagtggggcttggggtatggtgaagagtttatattaaaa

SEQ ID NO: 5707 - DNA, 120 bp, synthetic construct
  source 1..120: mol_type = other DNA
tcttattttttttttcttcaacagactttgcctttatggggaaaagatgatgccataagccccaaatctcatctgcccatcatcttaacagccctggcaggagtcaacacctcttcccaa

SEQ ID NO: 5708 - DNA, 120 bp, synthetic construct
  source 1..120: mol_type = other DNA
gagattacatcactgccctccggcctgggtgacggggtaagactctgtctcaaaaaaaaaaaaaaagggccgagtgcggtggctcacgcctgtaatcccagcactttgggaggctgaggc

SEQ ID NO: 5709 - DNA, 120 bp, synthetic construct
  source 1..120: mol_type = other DNA
caggccacccatcccatggaagggctggcatggaggcagcaccagtagacatcagaggatgaatgagtgggatccagtgctgctcaatgaatacatgcgggttgttttgtttttgttttt

SEQ ID NO: 5710 - DNA, 120 bp, synthetic construct
  source 1..120: mol_type = other DNA
gtgtgagccactacacccagcctcttttttttctttttctttttgagacagggtttcgctttgccatgcaggctggagggcagtggtgcaaacagggctcacaggcagaggctgctctgc

SEQ ID NO: 5711 - DNA, 120 bp, synthetic construct
  source 1..120: mol_type = other DNA
aacttcaagtgattcttgaaggagacaattatgtgggtccatggggaggagcctttgaggtggcaggagggaaccagtcctgatgagggaagattaaaggacagtggggctggggatggt

SEQ ID NO: 5712 - DNA, 120 bp, synthetic construct
  source 1..120: mol_type = other DNA
aaaaaaaaaggacattattagagttggaaggaaatgaccataggcccagggttccacggtccagaccaccacacacaactgatgcaggatataaccgagtcattccatcccaggtaatac

SEQ ID NO: 5713 - DNA, 120 bp, synthetic construct
  source 1..120: mol_type = other DNA
gtgtgagctactgtgtccggcccaaattgtctaatttttaaaaatagtttctgggttatggatctgaataaagcgtgcaattagtgaacagtttataaacctcttgtgtgcttttaattt

SEQ ID NO: 5714 - DNA, 120 bp, synthetic construct
  source 1..120: mol_type = other DNA
acttgtagaacttacctgtaagcccaggcttcacctgaaaccccagtcccccacctggaacccaggccctcacctacactgtcagcccctccacctggaactttagaacttacctgtagc

SEQ ID NO: 5715 - DNA, 120 bp, synthetic construct
  source 1..120: mol_type = other DNA
agcctcccgagtagcttggactacaggcgcccgccaccacgcccggctaattttttgtatttttaatagagacagggtttcaccgtgttagccaggatggtctcgatctcctgaccccgt

SEQ ID NO: 5716 - DNA, 120 bp, synthetic construct
  source 1..120: mol_type = other DNA
gtggcgccatctcggcgcactgcaacctctacctcccgggttcaagcgattctcctgcctcagcctcccgagtagctgggactacaggcgcccgccaccgcgcccggctaattttttgta

SEQ ID NO: 5717 - DNA, 120 bp, synthetic construct
  source 1..120: mol_type = other DNA
ctcaaagaaaaaaaaaaggaaaacccagttccccacctagaacccaggccccgacctgaaacctgggcccctccacttgtaaccagggacccccacctagtatctgagcctctcccatct

SEQ ID NO: 5718 - DNA, 120 bp, synthetic construct
  source 1..120: mol_type = other DNA
tgatccacccgcctcggcctcccaaagtgctgggattacaggcgtgagccaccgcgcccggccaaggccccgacttttagaccactagtggaggaggtctgggacacgggtctgcggcca

SEQ ID NO: 5719 - DNA, 120 bp, synthetic construct
  source 1..120: mol_type = other DNA
ctataattgaggccctcacctgtaacttaagcccacacttgtaacctggggctctctgctataacttggggcccccacccataagccagttcccttaacagaacctgcagtttggtgagg

SEQ ID NO: 5720 - DNA, 120 bp, synthetic construct
  source 1..120: mol_type = other DNA
tcaggagttcgagaccagcctgggcaacatggtgaaactccgtctttactaaaaatacaaaaattagctgggcatggtggtgggcacctgtaatcccagctactcgagaggctgagacag

SEQ ID NO: 5721 - DNA, 120 bp, synthetic construct
  source 1..120: mol_type = other DNA
cagagccaccagggacctggagtgtagacctgggcagggagcttgctctctgccagctgcagtgggctcacctgtgagggaggatgttagaatagttcttttttaaaaaaaaaaattttt

SEQ ID NO: 5722 - DNA, 120 bp, synthetic construct
  source 1..120: mol_type = other DNA
tgaaaattcatgcgtgtttgtgtgaacaggtttctagttctctcgggcatatatcttggggtggaattgccagtacatatagcaactctatgtttaaacttttgactcttttccaaaggg

SEQ ID NO: 5723 - DNA, 120 bp, synthetic construct
  source 1..120: mol_type = other DNA
gatcttggttcactgcaagctccgcctcctgggttcacgcctttctcctgtctcagcctcccgagtagctgggattacaggtgcccgccaccacgcccagctaatttttgtatttttagt

SEQ ID NO: 5724 - DNA, 120 bp, synthetic construct
  source 1..120: mol_type = other DNA
aaatgtcctcgtatgccctcttcgcgcagacctgccaggaagagcacaagaagaaacacccggactcttctgtcaatttcgtggaattctccaagaagtgtttggagagatggaagacca

SEQ ID NO: 5725 - DNA, 120 bp, synthetic construct
  source 1..120: mol_type = other DNA
agatgaggaggaagagggtgaagatgaagaataaatggctatcctttaatgatgcctgtgcagtgggcttgttttgctaagaatgtgaattctagtacagctcagtattagcttcagtat

SEQ ID NO: 5726 - DNA, 120 bp, synthetic construct
  source 1..120: mol_type = other DNA
tccagattccaagaagttggggtgtgagccagcaatcagtacagaaaagagataccaaaataagtttgagttggggagtgttccttcaacttcagttttctggaagagatcttttttttt

SEQ ID NO: 5727 - DNA, 120 bp, synthetic construct
  source 1..120: mol_type = other DNA
ccctcgccgctccgcctcctccacacgcgcggcggccgcggcgagggggacgcgccgcccggggcccggcaccttcgggaaccccccggcccggagcctgcggcctgcgccgcctcggcc

SEQ ID NO: 5728 - DNA, 120 bp, synthetic construct
  source 1..120: mol_type = other DNA
tccgcagaccctgcaccgggcttggactcgcagccgggactgacgtgtagaacaatcgtttctgttggaagaagggtttttcccttccttttggggtttttgttgccttttttttttctt

SEQ ID NO: 5729 - DNA, 120 bp, synthetic construct
  source 1..120: mol_type = other DNA
aatgtgatttgtttatcctgtcagaggggaaccctgggctgccaaaaataactgtttgcaccggcttatcagtcagcaggagggaaacgtagcctttcctcatttgccagggatgtgacg

SEQ ID NO: 5730 - DNA, 120 bp, synthetic construct
  source 1..120: mol_type = other DNA
cgcttcttaatcagcatgcaggctgtgacatgcggaaaccaggggcacaggctctgaagtttgtactctggagctggagcagtcagggttaaatgggagcggctgggaagggtgtgtttc

SEQ ID NO: 5731 - DNA, 120 bp, synthetic construct
  source 1..120: mol_type = other DNA
aaataaataaataaatctggcttgagttttgacaaatgtatatgcagggtcaatgggaagacagacgctggagggtggaagcctgactgtgagagtgagccccctgctttcctgaacagt

SEQ ID NO: 5732 - DNA, 120 bp, synthetic construct
  source 1..120: mol_type = other DNA
acgcctgtaatcccagcactttgggaggccgaggcggtttgatcacaaggtcagaagtttgagaccagcgtggccaacatggtgaaaccctctctctactaaaaatagaaaaactagcca

SEQ ID NO: 5733 - DNA, 120 bp, synthetic construct
  source 1..120: mol_type = other DNA
tcctgtcacttccacctgttgcaaaacactgtgctttcgtatcttttctttctacctgtttggaaatgtgaaaatcactgctgccgtaggaaacgggcccagatccgggctgtggctctc

SEQ ID NO: 5734 - DNA, 120 bp, synthetic construct
  source 1..120: mol_type = other DNA
aggctggtcttgaacccctgaccttaagtaatcctctctggcctcccaaagtgctgggattacaggtgtaagccatagtactgggcctaaagttcacctttttttttttttttttttttt

SEQ ID NO: 5735 - DNA, 120 bp, synthetic construct
  source 1..120: mol_type = other DNA
gtatgatctgtttctaggcagacggaggctcctagccccacctctctgtgagcttgagtggcgtttatgactctccttcctatttcctgtcctgctaatcaacaagtcagctaaacagtc

SEQ ID NO: 5736 - DNA, 120 bp, synthetic construct
  source 1..120: mol_type = other DNA
gtgcgtccgagcatctggcctctgctgtctgaaaacagcaccttccccgccccccggccaccgcatctcctctgaatagaaggcaagtcttgcctcccaggaatggcctgtgaccttcat

SEQ ID NO: 5737 - DNA, 120 bp, synthetic construct
  source 1..120: mol_type = other DNA
cgcctggccccccagctgttttttatgctccatgcttgggcttcctgttaagaattaaaaaagaaaaaaaaaactatggagatggaatttacatactgtacaactcattcgttcacagtg

SEQ ID NO: 5738 - DNA, 120 bp, synthetic construct
  source 1..120: mol_type = other DNA
aaaaaaaaaagtgcatcacacactgtgtgtcctttagtgtctcactgtgacatcctcaaggtgcagctaggctgtggctcgagtcagagcctcactggtttttgtggctgagtcttgttg

SEQ ID NO: 5739 - DNA, 120 bp, synthetic construct
  source 1..120: mol_type = other DNA
actcaccctggctcctgccacagtctgggctccatctgtgctaccattgcagtagtctggtttctaggaagcaaaactgttactgagttacaaagctcaattaagagtgtcctttgggag

SEQ ID NO: 5740 - DNA, 120 bp, synthetic construct
  source 1..120: mol_type = other DNA
tctgtggacacccccatgggtcttacgggcacagcctccctacggggactttgcttcctaaggccctgtgcccagagcaagagccagaagtggtcctgaggctggggctgtgttccctga

SEQ ID NO: 5741 - DNA, 120 bp, synthetic construct
  source 1..120: mol_type = other DNA
gccttgtaaaggcccaagtttttaaaaacagttttggggtcccccatgtgtggcatccacaggcagggctgctgccaacctcccgcctccatctttgctgggcctgctgcctgaggccag

SEQ ID NO: 5742 - DNA, 120 bp, synthetic construct
  source 1..120: mol_type = other DNA
gggcgtcaaccaccttgactgaccacgcctttcttccctcccctcgaaatgaagctacaacatcaccacgggtctgtaccccttcgaaggggacaacatctacaagttgtttgagaacat

SEQ ID NO: 5743 - DNA, 120 bp, synthetic construct
  source 1..120: mol_type = other DNA
aacagaggctgggcaggcggggacggttggtggggtctcaggcctgtgcccagctgacaggctcctcgccggcttctcctcagggatgcttgagtacgaaccggccaagaggttctccat

SEQ ID NO: 5744 - DNA, 120 bp, synthetic construct
  source 1..120: mol_type = other DNA
gcacggcctggtcccagctcctgagtgtgtggcaggtaccctgggcccagaggagctgggtcggaaaactggaccgccctggtgccagcctgacaggcgccactgcttctgggcgtttgc

SEQ ID NO: 5745 - DNA, 120 bp, synthetic construct
  source 1..120: mol_type = other DNA
agggctgggccgtgtcataaagagttttgcagtgtatctgcagggtggatgcttgctgcgctcgggctggagcctgagggggctttctgctttactgtttcagcgggaagtggtgggcag

SEQ ID NO: 5746 - DNA, 120 bp, synthetic construct
  source 1..120: mol_type = other DNA
tgcagagctggggcaccttgtccacagggtctgccccaccagagacgggctgggcccaagctcagacctatgggtgcaattggtgcctcctcaccaaggtcttttttatctttttttttt

SEQ ID NO: 5747 - DNA, 120 bp, synthetic construct
  source 1..120: mol_type = other DNA
tgcttttttaaagctagtgacttcctgtgcacatggggtgggtgtgtggcaagttctggaagctgctgagtcagccactggtccattctcggagctggggctctgcactgggcacatgag

SEQ ID NO: 5748 - DNA, 120 bp, synthetic construct
  source 1..120: mol_type = other DNA
tctggccagcgtgctggtcatggaggcctacgtgtggcggggctctgggggggcgtgccgtcctcacagccacctctcagagtgggtgcattccgaggaccctgccctgggcctggcgcc

SEQ ID NO: 5749 - DNA, 120 bp, synthetic construct
  source 1..120: mol_type = other DNA
tctttttttttttaagaaaaaataaaaggtggatttgagctgtggctgtgaggggtgtttgggagctgctgggtggcaggggggctgtggggtcgggctcacgtcgcggccgcctttgcg

SEQ ID NO: 5750 - DNA, 120 bp, synthetic construct
  source 1..120: mol_type = other DNA
ttcagaatgaaaacgtagagtttatttgggtttttagtgacacctcaggattattatacagcagtgtcagacacagctcaaagtaatgatgactgctccccctccgccccgcgggagctg

SEQ ID NO: 5751 - DNA, 120 bp, synthetic construct
  source 1..120: mol_type = other DNA
cggctcggcggctgccgggcgaaccgcaagcggggagcggaggcggggcaggggcgtgtgtccgggcgcgggcggacgtgtccggctgcccgaggccgccccgctcgggactccccgggg

SEQ ID NO: 5752 - DNA, 120 bp, synthetic construct
  source 1..120: mol_type = other DNA
catacactattgtataattacattatttaatcaccacaagtaaactcccaggagtagtggcatttgccccactttacagatgtgcaaagtggggtacagacacgttaagtacccaataac

SEQ ID NO: 5753 - DNA, 120 bp, synthetic construct
  source 1..120: mol_type = other DNA
ccatctgagaatgctatttgcttcctttctgccatttcataactttttttctttgaaaacgtgcccccaatccaactcttctatgaatgcctcttgaatgtctcctcctttcttggtatg

SEQ ID NO: 5754 - DNA, 120 bp, synthetic construct
  source 1..120: mol_type = other DNA
aagtggtatttgagtttgaggttgctattctgtgttgttgctaaagagcaggactgatgttcaataagcagttcccactgggccatgtgtgttttggttaaacatcctttctgattggtt

SEQ ID NO: 5755 - DNA, 120 bp, synthetic construct
  source 1..120: mol_type = other DNA
ttgttgttgaaattaagagaggaattgacataaaaataatcaagaggaagataaatcttgttcctgtgaggagggccgctcatgtagggaagacccctgtcaaaaggttctaggccttag

SEQ ID NO: 5756 - DNA, 120 bp, synthetic construct
  source 1..120: mol_type = other DNA
acttcttacttatttgctgcttaatttccaaactcttaagcccatttgttcccagatacaggtgaccagtgctcagaagataactgtaggttttgataacatcggctctaccccaagatt

SEQ ID NO: 5757 - DNA, 120 bp, synthetic construct
  source 1..120: mol_type = other DNA
atagcaaattcttttcttctaaaagttacataagcacaggactgaaaatttgtattagagaaaggaaaaaaaccatcaccagccattattaacatttggcatatcctgcacccatgcttt

SEQ ID NO: 5758 - DNA, 120 bp, synthetic construct
  source 1..120: mol_type = other DNA
ctcctgcaagtctttgctcagatgacacctttttctcagtgaggcttatcctgccaccttttaaaatattgtcatcatcctacagtgctttccttctctgtaacaataccttctaacata

SEQ ID NO: 5759 - DNA, 120 bp, synthetic construct
  source 1..120: mol_type = other DNA
tcctggagctccctgatggctatccttttaaatgcttttcctgttgtttttctcaatgaaccaaacactggtgcagttgtatccctagaccatctctctttttctatttggattgatcta

SEQ ID NO: 5760 - DNA, 120 bp, synthetic construct
  source 1..120: mol_type = other DNA
ttagaagttgaacacaatacttagctctgagttttctggtaaccaaggcaagtaaggaagactgataatttgcatagatctcattgcctatcgagaattcatgaggagactgccaccttc

SEQ ID NO: 5761 - DNA, 120 bp, synthetic construct
  source 1..120: mol_type = other DNA
aggtctgttccagtgtttccttgttctcaccaccaagactgaacctccttatttttgttcatttgcttcaggaaaaccattccatctagatttcctaggtgtaaacctcactgattacat

SEQ ID NO: 5762 - DNA, 120 bp, synthetic construct
  source 1..120: mol_type = other DNA
cacataagtattttatgtagatctcatctatcatttaagttttgtcagatccagcctgctcttgccttaccatgggagaagggaaaggagggaggagttttaagggattttaggcatcag

SEQ ID NO: 5763 - DNA, 120 bp, synthetic construct
  source 1..120: mol_type = other DNA
ttggttcaattcagctgtgttcttctaggagactgcaaccacaatttaactgctttgctttggtattttgtttgacaagggagatgaatgtttcagatgagacggagtctcactgttgtc

SEQ ID NO: 5764 - DNA, 120 bp, synthetic construct
  source 1..120: mol_type = other DNA
agttgatctgtaggtcacttttggattttccatgtacatagttgtcctctgcaagtaatgatagttctgtgtctttccagtctatcttccttttgtttatttctgacttactacactcag

SEQ ID NO: 5765 - DNA, 120 bp, synthetic construct
  source 1..120: mol_type = other DNA
accacttccttctcttaccacagttccttctctaccacagttctgttttgtatgtcattcccctagcccaggatgatcagccactttcatttacgttcattattacaccttattatctgt

SEQ ID NO: 5766 - DNA, 120 bp, synthetic construct
  source 1..120: mol_type = other DNA
gtgacttcctcaggattactcagtgcctgactggcaaagataggattttaacttaagtttttctgtctctgagttccatcaacttaactaccatatccttataatacctacccactagtc

SEQ ID NO: 5767 - DNA, 120 bp, synthetic construct
  source 1..120: mol_type = other DNA
cattatatggtgttctctattttgacaagcttactttgatattactgctgcaaggtagccccaggagggttgaattgagaagaactgagtattttgaggaacaaaacctaggatagtagg

SEQ ID NO: 5768 - DNA, 120 bp, synthetic construct
  source 1..120: mol_type = other DNA
gtaacaagggttgaaaaaggaaagagtattcaagcgtatgcataaaaagactacgggtaggttgtgtagatgatgacacactaagcctgggaagacaaggtttcggtgctaatttttatt

SEQ ID NO: 5769 - DNA, 120 bp, synthetic construct
  source 1..120: mol_type = other DNA
tgcatgagggatactcaacttgtaatcttttctatgtatagccaagtttgcacatacataggttacaacaacccatcatgtcttaacctttcagtctggaggctggagttttctttttac

SEQ ID NO: 5770 - DNA, 120 bp, synthetic construct
  source 1..120: mol_type = other DNA
ctggtgaagcttttcttgataatctcttctaccgcagcagagtagaaacactttgatcattcttctcaggactcaggattttaattatctgtttaatgcctttcccttccaccctagtga

SEQ ID NO: 5771 - DNA, 120 bp, synthetic construct
  source 1..120: mol_type = other DNA
tgataataaaagctgtgagtagtgcctcttctcatcagtaatgttatgcaggagggcattaatgacttcaaggccttgttggtaagttcaggatgagacatcatacctaaccaaaacact

SEQ ID NO: 5772 - DNA, 120 bp, synthetic construct
  source 1..120: mol_type = other DNA
agaccaaggtcatgaaagacattattattataatggtgagaggtgtgtggccctagatagcatttgccatgtgagaagtaaattggaaccccaaactaaaagtcttgttaggctaggtgt

SEQ ID NO: 5773 - DNA, 120 bp, synthetic construct
  source 1..120: mol_type = other DNA
aaactttactggtctgtaaagataatagacaagtatgtgaattaagccagcaaccaagaaacagctacttgagggagaacctgacattcctgaatttgagttgagcaagtgagttgggag

SEQ ID NO: 5774 - DNA, 120 bp, synthetic construct
  source 1..120: mol_type = other DNA
actagcaattctggtaagcagtatgtgttttggagagcacttaacttcatcagagagcatggttgaaggtgtatctgtgtgtatgagaaggtgttggtgataattagaaggcttccctaa

SEQ ID NO: 5775 - DNA, 120 bp, synthetic construct
  source 1..120: mol_type = other DNA
ctcgagataggccgtttgtatgtgcaccctcttcaaaaactgggtctgtgactacaacatattgctgcaatcaggaccattgcaataaaatagaacttccaactactggtaagttgtata

SEQ ID NO: 5776 - DNA, 120 bp, synthetic construct
  source 1..120: mol_type = other DNA
cggtttaatatggaagtctgagcacatgtatttaactcttacctctttccccagatcccaaaggaatataaaaatgagggcaacctgtattaatgctagtgggattaatggtagaatgcc

SEQ ID NO: 5777 - DNA, 120 bp, synthetic construct
  source 1..120: mol_type = other DNA
caaagggcaaatggaacatttttacgatcacctaaaattcttgaaataggccaagatttttcatatacaaaggcaacagccttcttgccacaactaagttcagtgtacaagggtgcatgg

SEQ ID NO: 5778 - DNA, 120 bp, synthetic construct
  source 1..120: mol_type = other DNA
tatgatttttaaggagatgttaataggtattgttacaggttattggtattagtgacctgatgtgataagtggggaaggtcctatgatattggcggcagttggccttgtaatgatggctga

SEQ ID NO: 5779 - DNA, 120 bp, synthetic construct
  source 1..120: mol_type = other DNA
tgaagaggacccttcattagatcgcccttttatttcagagggtactacgttgaaagacttaatttatgatatgacaacgtcaggttctggctcaggtaacataattgtttctcctttttc

SEQ ID NO: 5780 - DNA, 120 bp, synthetic construct
  source 1..120: mol_type = other DNA
gaagaaactgattttattacctgaattattcttctatagaatttggccatatgtattcaataagagagctctctccttgactactaggacacacacaggctcgcactggagctcacgtcc

SEQ ID NO: 5781 - DNA, 120 bp, synthetic construct
  source 1..120: mol_type = other DNA
acttgtctgcattgcttgctagctctgtggctttgggcagttaaccaatgtctcatgcttgagttatttcatctttaaaatgaaagtgatggattctgtgcacatcattggattgttgtg

SEQ ID NO: 5782 - DNA, 120 bp, synthetic construct
  source 1..120: mol_type = other DNA
gtaatatatgcatgttgttcgggtcttatttcctgttcactgcatgtaaagctgtggagtccctgtttcccttttgaagttttctctcaaacagttctaaaggtacagaagagtagagca

SEQ ID NO: 5783 - DNA, 120 bp, synthetic construct
  source 1..120: mol_type = other DNA
tggagaaagccaagttccattagtggaaaaacagtgctccattaccaaggtaagttacttagccttgttcttcaagatactagtgttgtctatgtagccagttgtcagcaagtaaattgc

SEQ ID NO: 5784 - DNA, 120 bp, synthetic construct
  source 1..120: mol_type = other DNA
gatattctcctctagagaagaacgttcgtggttccgtgaggcagagatttatcaaactgtaatgttacgtcatgaaaacatcctgggatttatagcagcagacaataaaggtctgtaaca

SEQ ID NO: 5785 - DNA, 120 bp, synthetic construct
  source 1..120: mol_type = other DNA
gcccccacgattcctatttttactgcctctgtcagagacttgtgtttcagctccactcttgtcatccctacccctgaatcaaatgtatttcccagctttcctatttaaaaaaaaaaaaaa

SEQ ID NO: 5786 - DNA, 120 bp, synthetic construct
  source 1..120: mol_type = other DNA
tacatcctattgcatcatatgtggaggtgtatagtgtttgattaagacggggcagtgaggtatatgatgaatgtaggtagcgattatcagtggcacctgacaatgtaatacctcttaagt

SEQ ID NO: 5787 - DNA, 120 bp, synthetic construct
  source 1..120: mol_type = other DNA
attcatggtttcaaactctaccatgttggcaactctcaaatctccatttgaaagcttaaacctcacccagggtctggattttgtcacattccaagttacaaacacagcagcacaaaatgt

SEQ ID NO: 5788 - DNA, 120 bp, synthetic construct
  source 1..120: mol_type = other DNA
agaaaacatgttttaaactcgtgttttggcttacagaggaaattttggaacccacgttcctcgttgtttgagtttagtcccagcttttccagttttgctcctgacatttcagttcctatt

SEQ ID NO: 5789 - DNA, 120 bp, synthetic construct
  source 1..120: mol_type = other DNA
gtggaaggaatgataaaacttgctctgtccacggcgagcggtcttgcccatcttcacatggagattgttggtacccaaggtaattctataagcagttctattatttaagctttaaatttt

SEQ ID NO: 5790 - DNA, 120 bp, synthetic construct
  source 1..120: mol_type = other DNA
tagcagttgtccacttgcaacccaatggctcccccactccccactttacatacagcataagtgctagttcacatcttagctccatctttgtagttattattattattgattgtaacagtt

SEQ ID NO: 5791 - DNA, 120 bp, synthetic construct
  source 1..120: mol_type = other DNA
aaagaagaatggaacttgctgtattgcagacttaggactggcagtaagacatgattcagccacagataccattgatattgctccaaaccacagagtgggaacaaaaaggtatacttttga

SEQ ID NO: 5792 - DNA, 120 bp, synthetic construct
  source 1..120: mol_type = other DNA
ttatcacaagctgtcacagcattttttcaaactactgtcttggccttggagacagctggagagccagcagcattagtctattcaaattgcatgtataattttgagatttctggattccct

SEQ ID NO: 5793 - DNA, 120 bp, synthetic construct
  source 1..120: mol_type = other DNA
tcagaacccaaccccttgttatattggaatatagttctttagaatggacagctgcttgagaggctcacctaggaagctgtttctagcatgtacctgggtgtcaaacttattttttttctt

SEQ ID NO: 5794 - DNA, 120 bp, synthetic construct
  source 1..120: mol_type = other DNA
ccaactgccttattatgatcttgtaccttctgacccatcagttgaagaaatgagaaaagttgtttgtgaacagaagttaaggccaaatatcccaaacagatggcagagctgtgaagtgag

SEQ ID NO: 5795 - DNA, 120 bp, synthetic construct
  source 1..120: mol_type = other DNA
aggactcagcagaacctctgataagcaagagagcttgctacctccaacaaaatcacatctccaggcccaaataaataaaatgtatttcagcatgcttaaggaatttgcatgtgacatagt

SEQ ID NO: 5796 - DNA, 120 bp, synthetic construct
  source 1..120: mol_type = other DNA
aaacttcccaggatttctttggacccaggaaacagccatgtgggtcctttctgtgcactatgaacgcttctttcccaggacagaaaatgtgtagtctacctttattttttattaacaaaa

SEQ ID NO: 5797 - DNA, 120 bp, synthetic construct
  source 1..120: mol_type = other DNA
tcagtgtttccttatgtgtgcgtacattgcaactgcttacatgtaatttatgtaatgcattcagtgcacccttgttacttgggagaggtggtagctaaagaacattctgagtataggttt

SEQ ID NO: 5798 - DNA, 120 bp, synthetic construct
  source 1..120: mol_type = other DNA
ttgtcatttaaaaacacagttgtttatactgcccatcctaggatgctcaccttccaagattcaacgtggctaaaacatcttctggtaaattgtgcgtccatattcattttgtcagtagcc

SEQ ID NO: 5799 - DNA, 120 bp, synthetic construct
  source 1..120: mol_type = other DNA
gaagaatcgtaagtcaactgtttcttgaccatggcagtgttctggctccaaatggtagtgattccaaataatggttctgttaacactttggcagaaaatgccagctcagatattttgaga

SEQ ID NO: 5800 - DNA, 120 bp, synthetic construct
  source 1..120: mol_type = other DNA
gaatgagtcatgccatatgtagttgctgtagatggcaactagaacctttgagttacaagagtctttagaagttttctaaccctgcctagtgcaagttacaatattatagcgtgttcgggg

SEQ ID NO: 5801 - DNA, 120 bp, synthetic construct
  source 1..120: mol_type = other DNA
tagctgcagggattgtgagtttttcttgaaaaagagaaggaaagttcagttgcaaggggcgcggggcacgtttggtcccctttgtgcgagcaggaaaggcgttgtgttggccgcgttcga

SEQ ID NO: 5802 - DNA, 120 bp, synthetic construct
  source 1..120: mol_type = other DNA
ctcatctgtaaaatggccagcttgaatctgggtaattttacatcatcttcatgtttaacatcttacgtatcgtgcccctcccctcctttcccctggctcttctggtgacttggagatgac

SEQ ID NO: 5803 - DNA, 120 bp, synthetic construct
  source 1..120: mol_type = other DNA
ggcactattgcaagcaaaaagtcttgacacacatttgagtcctatggttttaataaaatcttagtgtttcgttcttggcgtttttcctgcattgcagtaccagaatgttcaattgtctct

SEQ ID NO: 5804 - DNA, 120 bp, synthetic construct
  source 1..120: mol_type = other DNA
tttaactctggatcaataaggcacctctgatatcattgcaaaaactgggcattttttcttctaccttttcaaccatatttattgagtatctcttgccaggcaggatgctcagacctggga

SEQ ID NO: 5805 - DNA, 120 bp, synthetic construct
  source 1..120: mol_type = other DNA
acctgctttgaatgtcccagtttgaggtaaatgtctcctatgagatacagacctctcacttagctggtaacaataccaagccaaagtcatatctttacgtaactctcttgcccattatac

SEQ ID NO: 5806 - DNA, 120 bp, synthetic construct
  source 1..120: mol_type = other DNA
tttaagttatgattttcagtagaacagatatgcattcgcagcaagaatgctcaccgcttcttttgcactctctactttcctggtaatattttgctccacaggtacttgttgcttgtgact

SEQ ID NO: 5807 - DNA, 120 bp, synthetic construct
  source 1..120: mol_type = other DNA
tcttgggtgtagtcagtttagtctacttatggcctcctgcttagactcttaagggttccctagcatctgtgttttgtttgtaggtttgaagctatcattattagatgagatttagcttca

SEQ ID NO: 5808 - DNA, 120 bp, synthetic construct
  source 1..120: mol_type = other DNA
tagaaggataacacctattttattgagcagtttgctagcttgatttgtaactttaaatgttttgacttatggtacatgggcctctatttgctcacttgccttgggccttcccatgttggg

SEQ ID NO: 5809 - DNA, 120 bp, synthetic construct
  source 1..120: mol_type = other DNA
taacactcggtttatacaccaggtagtcaaacatcatgcctgtcttgtgatctcaatggaaaaatgaagtgtatacctcaagtgatacagtcttggctgaatcatggaacaattatgcca

SEQ ID NO: 5810 - DNA, 120 bp, synthetic construct
  source 1..120: mol_type = other DNA
cctccttccccccattgcaaacagagactgaaatctgcattgttatttcacaaaaccaaaatatttttcctccaggtttagctaaacccttcatcattttcctactttagagccccatgc

SEQ ID NO: 5811 - DNA, 120 bp, synthetic construct
  source 1..120: mol_type = other DNA
ttctctaccacttttcttaaaatattctcagaaaagacagaatttgcaacagattggcagttttcagactgctgttttaggcaggggagtagctgccgcaacctctaattgcatttctgt

SEQ ID NO: 5812 - DNA, 120 bp, synthetic construct
  source 1..120: mol_type = other DNA
aggagaattcaaggaagagttggcttagttttatgagagtcttttgactcttcctaagccgttttaactaaagctagcagaagacagaaggcactggtagcaagtcaactaaatgagtca

SEQ ID NO: 5813 - DNA, 120 bp, synthetic construct
  source 1..120: mol_type = other DNA
tatatttgtcatctgtaaaaatcacctaattggtctctgcttatggacaccctttgttctttctctgtcaataacacaggcattgccctcagttaaatctccccccagatggcattttga

SEQ ID NO: 5814 - DNA, 120 bp, synthetic construct
  source 1..120: mol_type = other DNA
gattttgccatagctcttagcacagattctcactaattctgtttatgtgttttgtttgttgctgtttggaattcattgcttttaaaggccgaggaaacttgcttttagatccaaggcggg

SEQ ID NO: 5815 - DNA, 120 bp, synthetic construct
  source 1..120: mol_type = other DNA
atattgcaaaggtgacccctggttgtactttttggaaagccctgttaaaatgatacatgctaaggagacttaaatatgaggcctttcttacctgggtgcttaataggagtgggtttctaa

SEQ ID NO: 5816 - DNA, 120 bp, synthetic construct
  source 1..120: mol_type = other DNA
gacaggagagaatatgttaacttcttgaataactgctgcagccgtagttagccccctatgagccaagcctattggctttgttactcccaaggtataacttatttcatatatataagcaac

SEQ ID NO: 5817 - DNA, 120 bp, synthetic construct
  source 1..120: mol_type = other DNA
ccagaaagatgaaatcatctgccccagctgtaataggactgcccatccactgagacatagtaaagtatcattaattaatcttttcatcatttttctatttttagtcatgctccctcactg

SEQ ID NO: 5818 - DNA, 120 bp, synthetic construct
  source 1..120: mol_type = other DNA
tttgcccctcactagaacttcaagttgcttaacctaatcaggaatacgggcatctttacataggaagtgcacttcttcatcatatagacatagaggtcaggtattattatctttggcttc

SEQ ID NO: 5819 - DNA, 120 bp, synthetic construct
  source 1..120: mol_type = other DNA
gtgatttttccagtgggcttgattaggactgtgtggatcattgtgatgctttgttctcagtggggattttccagcaaagatgagcttcattaaacaatgactgggttcatggatttataa

SEQ ID NO: 5820 - DNA, 120 bp, synthetic construct
  source 1..120: mol_type = other DNA
tatatgtatataataatgttctggttataatgcagtttgcagtttttctagttacagctcaaggcaaagatgagaagcaacacctatgggcctgactgcctctgtccagtactaccatgc

SEQ ID NO: 5821 - DNA, 120 bp, synthetic construct
  source 1..120: mol_type = other DNA
taaaaggagttattcagcagaaaggtaatcagattatgggagccttaagtgccagtttgggctaaattctctgagtcactggcagattgtaagtaggggaatgacgtaataaaaccactg

SEQ ID NO: 5822 - DNA, 120 bp, synthetic construct
  source 1..120: mol_type = other DNA
gaggtccgttcaggtaatttcttagcacctataatcacagtgggacagattaaattacttgtacttttccattcctgtgctttggaattataggctgtttctttgtcctggaaaccagat

SEQ ID NO: 5823 - DNA, 120 bp, synthetic construct
  source 1..120: mol_type = other DNA
cactactccttgtccctaattgtcttctctccctacctcagcagtgacactacagacagccagtcatttaatacgagactcattccttaagaagttgggatagaactttaattacacaag

SEQ ID NO: 5824 - DNA, 120 bp, synthetic construct
  source 1..120: mol_type = other DNA
tgtcctaaaaacagactgtgcttgtcatttcctcccctcctcccccatggtttctcatttttgcttctctttctaagagttacatttataggcatacatttttacactggacatcacaag

SEQ ID NO: 5825 - DNA, 120 bp, synthetic construct
  source 1..120: mol_type = other DNA
gtgattaagtcatgagtggattagtcccacataaaagggctggaggtaaccagcctggatccttttgcccttccattttctgctatgtgatgacacagtactggtcctctctagaggaca

SEQ ID NO: 5826 - DNA, 120 bp, synthetic construct
  source 1..120: mol_type = other DNA
aacctgctgccattcccagcatggtgaattctcctccagtagaagtcatatagcaatgttttataattaacttttacgtgagcaaatgagctccaggagagaagattaaggaatattgct

SEQ ID NO: 5827 - DNA, 120 bp, synthetic construct
  source 1..120: mol_type = other DNA
gtgaagtaattacaaagaaccaaagcttttgtctaagaaacttattgcttccccaccccttgtatactttcttcaactcctagtagtcacacctgtgtctttgccttgtactggaatgtg

SEQ ID NO: 5828 - DNA, 120 bp, synthetic construct
  source 1..120: mol_type = other DNA
aatttctgctttagcttctcagtctgtgcccaagttatttggttgttagaaaccaagcgccttggacctcgttatattactttttaaagggatgcctttcccaaatatggtagtactctg

SEQ ID NO: 5829 - DNA, 120 bp, synthetic construct
  source 1..120: mol_type = other DNA
taatataccatttgcatttatatggcttaacttttttaactggcttcctgttcttctcagccccaaaccctacattctggtttttgactcatctcatagtccctgcagtcagtctttgcc

SEQ ID NO: 5830 - DNA, 120 bp, synthetic construct
  source 1..120: mol_type = other DNA
acacacacttcccgtatcagctctgtctccatttctgacctcatgtttgcatttaaaggcaagtaactgattcacatgaggttgccgttgttaatgttgcctctcaaactagaatataag

SEQ ID NO: 5831 - DNA, 120 bp, synthetic construct
  source 1..120: mol_type = other DNA
aataacaacaaaacagaaatggtggtgtgtcaaccagggttccagttgcaagcagatggcaccctcaaattagggagatttaaggagagtttagtaaaacaagtacttacaaaggtatgg

SEQ ID NO: 5832 - DNA, 120 bp, synthetic construct
  source 1..120: mol_type = other DNA
agcgaaagtgcgaggcaaaaggctatttgcgtttgcagtgttgattgatatcaataacatgtactcctgagatgttatacctgtttacaacacagcattatgagaatgtttgtttcccca

SEQ ID NO: 5833 - DNA, 120 bp, synthetic construct
  source 1..120: mol_type = other DNA
gtgatcagggcctctgggtttgcaatcatttaagaggtcaggctcaagagaaaagcatatggaaagaactggaagatgagaaatgcctgtaaaaaggtgaagaataggtatttaatttca

SEQ ID NO: 5834 - DNA, 120 bp, synthetic construct
  source 1..120: mol_type = other DNA
gaaataagtctaaatcttattaggctgctcatctgaccctcaaagacaatagtacagttccagaaatagacacagctaagcagtcaattcatattctcaagacctggaacctctgtctgt

SEQ ID NO: 5835 - DNA, 120 bp, synthetic construct
  source 1..120: mol_type = other DNA
aagttgggttagggtttgctatagggttaattaggtgggttttgtatcgttgtttagaggaatatctttattcctagctatgcacatgtatgcacttactttccttcccattcctttggc

SEQ ID NO: 5836 - DNA, 120 bp, synthetic construct
  source 1..120: mol_type = other DNA
caccatatgcctgtgtctatatgcagtacagttgcttgtttggcttttcttcaacattcaatggaaaggctttctcttgttgggtctacccatcaagtaacatgtattatatctcgccag

SEQ ID NO: 5837 - DNA, 120 bp, synthetic construct
  source 1..120: mol_type = other DNA
tttctgcctatatttttagctaagcatagagctcttggtctgggagacactgagaatttcaaaatagcttgttacctaaaaataaacttcctgaaatgaacttgaggcccgagagggatg

SEQ ID NO: 5838 - DNA, 120 bp, synthetic construct
  source 1..120: mol_type = other DNA
gacaataaataaaacagagttgctataggatgaagaggtggcatttgatcagagatcagaaaagtgacaggaagctaaacaaaggtaatagcaagtgaaaggcctgaggagggaatgaac

SEQ ID NO: 5839 - DNA, 120 bp, synthetic construct
  source 1..120: mol_type = other DNA
tgcagcatcacctccatctgtgagaagccacaggaagtctgtgtggctgtatggtaagcaagccttttaagaagttattctttcttttcccctttttacataatgtattctcatagtaca

SEQ ID NO: 5840 - DNA, 120 bp, synthetic construct
  source 1..120: mol_type = other DNA
aagtaacttatgtgtctcctggctagttgacaaacaagaatataaacccaaatatctctcccccttttttgggaatgagtcatttgagacccctagaccatgtaaagctagccttgatga

SEQ ID NO: 5841 - DNA, 120 bp, synthetic construct
  source 1..120: mol_type = other DNA
cctcaaagcttccttccgtggtttcttaaatatctacggtggtgtgagcacttgcttttgcaacccaaaaaggctcttttaattaagatttttgttttcctgaccagtaatacaagccca

SEQ ID NO: 5842 - DNA, 120 bp, synthetic construct
  source 1..120: mol_type = other DNA
ccgtgcccagcctccaaaattaattttatcatgttggttcttctttcagtggaaattgacaacctcttcagtggctcagagcaaatgttgcaggacaaaaaaagaagtccgtatttactt

SEQ ID NO: 5843 - DNA, 120 bp, synthetic construct
  source 1..120: mol_type = other DNA
cattcctgcctggattgtcctaacccatacccttgcccttatccctttgtcaacatattgtcctttaatgtccttgacttaagcactaaaaaagtggtattggtcaaagttgctctttct

SEQ ID NO: 5844 - DNA, 120 bp, synthetic construct
  source 1..120: mol_type = other DNA
tgtgactatttccccaggcatgctctttgaaaacagtatagctagacaggacagattttgccacttaaactaggggtgtgatgtgaggtttgcattacattcaggatggaagatttaaaa

SEQ ID NO: 5845 - DNA, 120 bp, synthetic construct
  source 1..120: mol_type = other DNA
gatgttgtttcttgtacatagtcccaggatttgtctttagggtacttgtcatcgatcccatttgagagaaacattgcaatacagagaggaaataataagccaaagtttacccctagagcc

SEQ ID NO: 5846 - DNA, 120 bp, synthetic construct
  source 1..120: mol_type = other DNA
gcactactaaactattctcctcctgaaaaggatgtaagcatatggatttccgtgtaccttctccaacactgggaatggataagtcttttaattttaccagcgtggtagtgtaaatgttag

SEQ ID NO: 5847 - DNA, 120 bp, synthetic construct
  source 1..120: mol_type = other DNA
caccttttaaaagaaggcctaggctaagccaaaggaattaatctctgacagtagaatacccaggcatgtttactagcattgaagaaacttttctctccttctgtataccagcttgtctac

SEQ ID NO: 5848 - DNA, 120 bp, synthetic construct
  source 1..120: mol_type = other DNA
tttatttctagtgctactattaatgatagttaatattcagagaaaacatactgtcgctgtgcagggagctcagccctttccaagcatgacctcatttaatcttatagccaccccatgcga

SEQ ID NO: 5849 - DNA, 120 bp, synthetic construct
  source 1..120: mol_type = other DNA
cctgagcaaatagccatgctgtttacttgccaatgacatccccactttgcaaagacatgatatggttattgatctctcactgaacctgtaagaatcaaacacaacaactcagttttattc

SEQ ID NO: 5850 - DNA, 120 bp, synthetic construct
  source 1..120: mol_type = other DNA
caaattagacacgttgttcctgttttgactcagaatcacagcaggaagcagctaaataaaactgaaacaacccacaagtgcctttcacataagtgattagggtaatcgcagttctgtact

SEQ ID NO: 5851 - DNA, 120 bp, synthetic construct
  source 1..120: mol_type = other DNA
tagaacaactatagtgatgatcgctgccttggattgcagcctactctgaatgtgtgcacctgtgctaactactttcaggtgtgttgtcttgtttcatagactcattacatttttatgatg

SEQ ID NO: 5852 - DNA, 120 bp, synthetic construct
  source 1..120: mol_type = other DNA
ggtgctccccattataaggagtcctgtgaatcaaagtggtatgtttactgtaaagaatgtggaggatgctgttcactgcattgtattgttatcttcatgaggaagccaggagacatttat

SEQ ID NO: 5853 - DNA, 120 bp, synthetic construct
  source 1..120: mol_type = other DNA
gtgaaaacagcctttttggtttgctagcctatctctggcaggaagacaaattatttttttacagtatcagacacgcggtttcctgtctatgtttaacttgctagcagaacatctcagcca

SEQ ID NO: 5854 - DNA, 120 bp, synthetic construct
  source 1..120: mol_type = other DNA
tttttcctaagtagcaaagtaaacaaagctgcactgaggccagatgtgctttctggttgtgaatatttgtactctagaacctcattctggtatgaatcagcagagtggaatctagtatgg

SEQ ID NO: 5855 - DNA, 120 bp, synthetic construct
  source 1..120: mol_type = other DNA
catccttggaggaatagcaagacactttaagaggggatattattttgttttctacaacaatttacaagcaattgctttggaacaaggtcaacggcctcattgggaataggcatcttagct

SEQ ID NO: 5856 - DNA, 120 bp, synthetic construct
  source 1..120: mol_type = other DNA
agaacaaaccatcaggagccttaaactccacttggtggaagaggaggtgagagtcctgctgtaatctttgctacacaagttatattccaagtattatatctgtgtctatcaaaacacatg

SEQ ID NO: 5857 - DNA, 120 bp, synthetic construct
  source 1..120: mol_type = other DNA
gcatatctcattctacactcctccaccagttaattgactagaaaattatcatgggccattttctcattggctagtgctgaatacagctgtaccagagctttgcaaacaattccactaaga

SEQ ID NO: 5858 - DNA, 120 bp, synthetic construct
  source 1..120: mol_type = other DNA
tggggaacatgaacagacttctggggtggccagcaaaattatattttctgacctgaccagtggttacaagagtgttgatcttatagtaattcactaagccagacacttgttttatgcact

SEQ ID NO: 5859 - DNA, 120 bp, synthetic construct
  source 1..120: mol_type = other DNA
cgcacacacacgttgctctcagcctcttttatgtcctttgttatgccgacaccagttcctaaaaggaacttaaaactgaacctccctaatccactattttaaataaaagtcacttggtta

SEQ ID NO: 5860 - DNA, 120 bp, synthetic construct
  source 1..120: mol_type = other DNA
ttccctttttgtgtgtctgtgccatggacttcttgaagtagggaagcctgtggaccccttctcactgtgatgttttttaaatgcataaaatagaacatggagtatttcaaagaaaaccaa

SEQ ID NO: 5861 - DNA, 120 bp, synthetic construct
  source 1..120: mol_type = other DNA
tcttagttggctctcaccaatatgaagtttagagatcaggtatggggttgagatcagaagtctctccaatcaggcaatgctcattgtaaataccagctttgctgttgcctaaatttatca

SEQ ID NO: 5862 - DNA, 120 bp, synthetic construct
  source 1..120: mol_type = other DNA
aaagccacatcccaaagcttccttccagccctggttgctattgttagagtttttcaccacctctttgaagtttcaagattgacagatgttattcaagaattcctccccctcaaatttttt

SEQ ID NO: 5863 - DNA, 120 bp, synthetic construct
  source 1..120: mol_type = other DNA
tcaatcattctgtaattgctttgtcccaccccatttctgccctactcttgcctgttctttgtcccaatccaagcctcccagtgtaagaatttatgtttttaaggatcaatcaccaaattt

SEQ ID NO: 5864 - DNA, 120 bp, synthetic construct
  source 1..120: mol_type = other DNA
ttttttctctttaaacacctactgtaggtgaaaactgacaaatgaataatcaaaagatccttttctgacacggagtttggttccataccacctacccatttttttcctttctattccgca

SEQ ID NO: 5865 - DNA, 120 bp, synthetic construct
  source 1..120: mol_type = other DNA
acaagatattatagttagatatctggtgctaaggactctccttgtcagcccacaggggcctgcttcagaattccaagtcaaaaaactgcagcatttccatttttaacttgttttaccttt

SEQ ID NO: 5866 - DNA, 120 bp, synthetic construct
  source 1..120: mol_type = other DNA
acaatatcgtatctacaaaaactatgcagatgctaaaatctatagatgctcaggcatgaacccacttcctgacagtacttacctaccacatccaactccttctctccttgttttgtttcc

SEQ ID NO: 5867 - DNA, 120 bp, synthetic construct
  source 1..120: mol_type = other DNA
ggacagcatttctcctcctatcttcaaatccttcccagttcagcacattttttcctcctggatcaatcctcatttctcttccagcaaatgttttttctttgtttcaagcactgttagtac

SEQ ID NO: 5868 - DNA, 120 bp, synthetic construct
  source 1..120: mol_type = other DNA
ttgtctctcaggttatctgtaaggatgttattgaaaaatgtgatgacataagtcatggggttagataaggcagctctggggtttggcacttccttattttggcatgctttgtttatggtc

SEQ ID NO: 5869 - DNA, 120 bp, synthetic construct
  source 1..120: mol_type = other DNA
gatatttgtttaggttttgaaaattctagtgaagaggttattgaggaaggccgtcttcttactgcttaagcctgcaagactgattaggagacctacttttctcctgaaaagctggcttgc

SEQ ID NO: 5870 - DNA, 120 bp, synthetic construct
  source 1..120: mol_type = other DNA
acctggattcagtgttcttaattaatccatatacgtatttgtacttccaagtccccagtaatgttcttttctgaaacaggatccagtctaggatcccgcattgatctaatgtgcatgcct

SEQ ID NO: 5871 - DNA, 120 bp, synthetic construct
  source 1..120: mol_type = other DNA
catgttttcctgagacccccgcatggggatggcacttcctatctagctgacatagttattattatctagtttcttgactgagatttcttcccccaaaacacttccaaaagttaactttgt

SEQ ID NO: 5872 - DNA, 120 bp, synthetic construct
  source 1..120: mol_type = other DNA
aaccttaaagacagattttcagcctagtcttagtttcagaggcttttcttttacattcaaaaggtcctttggaaagtacacgaagcctgaagacagatggattccctccaactgcattca

SEQ ID NO: 5873 - DNA, 120 bp, synthetic construct
  source 1..120: mol_type = other DNA
ctgccattggtaatatggatatagcaccccatcctgtactgagagagtccctagttgtattgatacttttttaagctatggaacattaacctctctgttcccagttgttaatgagctatt

SEQ ID NO: 5874 - DNA, 120 bp, synthetic construct
  source 1..120: mol_type = other DNA
ttgctccacacatcaactcatttaatctaccaaaactctttgaggcctgtactgttattaatcccattttacaataagagaactgaaggctcaggaagtgcgaaagttgtggagccagga

SEQ ID NO: 5875 - DNA, 120 bp, synthetic construct
  source 1..120: mol_type = other DNA
ctttctttgagagacaggaagtctagtgaagagccagtattttagggacaggtaatgaacaaagagattatgtaatataatgttggagttgggtggggtgggtgggatgattttagaaag

SEQ ID NO: 5876 - DNA, 120 bp, synthetic construct
  source 1..120: mol_type = other DNA
gaatttgagtactagtagtttatttgggaagagattgcaggaaatgccagtaagagaatgaggaaatgagtcaggaaagggaaggaaaccagtaaaggatatcttatcaagtgggttacc

SEQ ID NO: 5877 - DNA, 120 bp, synthetic construct
  source 1..120: mol_type = other DNA
tttatgcagttcttcacaagagagaggcccaaggtcaagcatcatttgatcaaatgtgcaaagaggaactgcattaattctattgccaactatgccccaatctgatgcctgtagctaaaa

SEQ ID NO: 5878 - DNA, 120 bp, synthetic construct
  source 1..120: mol_type = other DNA
atattttaagcaccatcatgaaaaataaataagatacacagtttggacccaaagattttgccaaagtggattaaacatcccagtctccagctgcctgaaaccctggggaaaaagttggga

SEQ ID NO: 5879 - DNA, 120 bp, synthetic construct
  source 1..120: mol_type = other DNA
ccataagtcgaagatgggaagcaggccttgtatcccttgggaatattagggagtctcacaactttccaagattttaggaaaagtaggaagtaacctatttataagtctgtttgttttggg

SEQ ID NO: 5880 - DNA, 120 bp, synthetic construct
  source 1..120: mol_type = other DNA
acacacttttgtgcaatgatttattgaggataagctctcatgagaaggaagtaagagaagcaggaagaggcatggaaggagttaagtgaacttgtatttcaagagaggtctaacctcagc

SEQ ID NO: 5881 - DNA, 120 bp, synthetic construct
  source 1..120: mol_type = other DNA
attttgaagctaaaggccaaagatcctacttactttggagaacagtgttgaatccagcccaatctctcctttcagcccaggcatgttttagtactgggatgttttctatctttttaagtg

SEQ ID NO: 5882 - DNA, 120 bp, synthetic construct
  source 1..120: mol_type = other DNA
tcaccattattcatttttctgtactgaaatttgctcaactgaaattctttaccccttaaaggataacttttcgtaccctttcctcccaggttgccccctggacaaccaccattatactgt

SEQ ID NO: 5883 - DNA, 120 bp, synthetic construct
  source 1..120: mol_type = other DNA
acaaaggtcagtaagattcaaccaagttgcctcttaggtggcagagaattctggaatattgagcttaaatctgagggaaggtcccattgtgttctatggccctgttaaattttgtttata

SEQ ID NO: 5884 - DNA, 120 bp, synthetic construct
  source 1..120: mol_type = other DNA
ggaaccaggctgtggtgggtcacaggcttctctggagttttgagcaaatcctctttgacactaaaactgtaagaatattttgcataaattctgaaatcagaatgtgctggagtgttatgt

SEQ ID NO: 5885 - DNA, 120 bp, synthetic construct
  source 1..120: mol_type = other DNA
ctactgaatcactctacaaaatgtgtggcctatagaaaatgaaaccatgctaatgcctgcatacaattctgacgggggtaatcagccctgttaaaatagaacagtgtatatgacccaact

SEQ ID NO: 5886 - DNA, 120 bp, synthetic construct
  source 1..120: mol_type = other DNA
cagaaacaacagcagcagggagtgggtgacatagagcattctatgcctttgacattgtcataggataagctgtgttagcacttcctcaggaaatgagattgatttttacaatagccaata

SEQ ID NO: 5887 - DNA, 120 bp, synthetic construct
  source 1..120: mol_type = other DNA
acacttgacttgattttctagttttctatacaaacaccaatgggttccatctttctgggctcctgattgctcaagcacagtttggcctgatgaagaggatttcaactacacaatactatc

SEQ ID NO: 5888 - DNA, 120 bp, synthetic construct
  source 1..120: mol_type = other DNA
atattagagagggactggtagtgagaatatcagctctgtttggatggtggaaggtctcattttattgagatttttaagatacatgcaaaggtttggaaatagaacctctaggcaccctcc

SEQ ID NO: 5889 - DNA, 120 bp, synthetic construct
  source 1..120: mol_type = other DNA
cataaaccctccagctctgagatcagccaatcttccctgggcactgctctctcccccagcaaaaaagccaagaattttccccaaagcttatggtgaggaacctgtgtgtgtgtgtgtggt

SEQ ID NO: 5890 - DNA, 120 bp, synthetic construct
  source 1..120: mol_type = other DNA
aaaaaacattttctcttctccacaaacctcctgcctcccattaaaatgtcactccccccaaaaaatgcagaggaagaggtaagattgcaggctatttgaaaacaggggcatgaagtttgt

SEQ ID NO: 5891 - DNA, 120 bp, synthetic construct
  source 1..120: mol_type = other DNA
aaataaaatttaaacaatagagggaaaaaaagtgtagtttgttctgcaagccacagcccaaagaagtctatttcctcccacaggatggctagagtttaggagccacgttctcctctatag

SEQ ID NO: 5892 - DNA, 120 bp, synthetic construct
  source 1..120: mol_type = other DNA
ttttctagaaaaaaaaacacaacccggggaatttatatgacaaactatcagtgtcaggatggcagagggaaagagaaagaagaggaaggccaaagacatggggagtgaataaaaagtggg

SEQ ID NO: 5893 - DNA, 120 bp, synthetic construct
  source 1..120: mol_type = other DNA
tggaaggagctacagccccaaatattgcagagccaaaaggaatgggatacatgtctaaaaagtgacaacagtcttgtccctattttaaaaacagaatattgttgctgttgcctggtttca

SEQ ID NO: 5894 - DNA, 120 bp, synthetic construct
  source 1..120: mol_type = other DNA
gagtacattatagaaaaccagtggacctccggttctgagagcagggatacttggatgaccctaaaggcagagtctctcctggggaaggtttggagaagatggtcaggatcctaccagtga

SEQ ID NO: 5895 - DNA, 120 bp, synthetic construct
  source 1..120: mol_type = other DNA
tcttcactcatgtcaggtctgagcttcaaatgccattttagagagctgtgagcttccttgtggaatttctagcaacatttcccctctacagctgggctgagtgggtttgtgatcctggca

SEQ ID NO: 5896 - DNA, 120 bp, synthetic construct
  source 1..120: mol_type = other DNA
ggttgccagcaggtagggagaggggagaacaggaagttatcatttaatgtgcacaaaggttcagtttgaaatgatgatagttttggaaacagatagtcatgatgcatgtgcttaatatca

SEQ ID NO: 5897 - DNA, 120 bp, synthetic construct
  source 1..120: mol_type = other DNA
gaagaaggaagttgcggcagtttagagaaatgtgcagctacaagaaagtattacatagattaggaaagttggtagactatatcacatttagtttagctccctccctgaactctacgagaa

SEQ ID NO: 5898 - DNA, 120 bp, synthetic construct
  source 1..120: mol_type = other DNA
ctatgcaaactgcaaaagctcccagaagcatagggtagaataaaggctgaaccaaaaagaaaccaggccatgattaagtattttaagctttcataaaaagtagaaatggggtcgggcatg

SEQ ID NO: 5899 - DNA, 120 bp, synthetic construct
  source 1..120: mol_type = other DNA
cattactgatgaggccaggcagttggagtaagaaaagtaatatgtgcaggcttcaaggagcctgtattgtttctttggctggatggtgagcacaaggatgttcatttgattatccttaaa

SEQ ID NO: 5900 - DNA, 120 bp, synthetic construct
  source 1..120: mol_type = other DNA
aacagcttgaagcaatgaaatctctctaagaagcaaaaaaggtttgggtcattaagtcctcacatggggaattattgggcaaaacctgccaggcatggtgtctaagctcctgcagcattg

SEQ ID NO: 5901 - DNA, 120 bp, synthetic construct
  source 1..120: mol_type = other DNA
atgaggggattgctaaagaaaacccctgaaggttatgtatgtaggattttattcgagagagaaatggcatgcaacgcaggaccctaacttgaaattcaagccagtggtgcagtccacgat

SEQ ID NO: 5902 - DNA, 120 bp, synthetic construct
  source 1..120: mol_type = other DNA
gaagttatgacaaaaagcacagctttggctgggcttatgataaaactcaactagaataggaaagtgataagcctcaggcagctttgatgggaaataaactcggagctcactaaggtgttg

SEQ ID NO: 5903 - DNA, 120 bp, synthetic construct
  source 1..120: mol_type = other DNA
caactctcctattaatgggcacaaactgctcttaggagatggccacaggcaagcaagtagaaactatacacaggttaaggtctctaaatatgtgagcaaatgtaatgtaaaggttaagaa

SEQ ID NO: 5904 - DNA, 120 bp, synthetic construct
  source 1..120: mol_type = other DNA
cctgccaccacgcccggctcaaaaatttacttttatttttaacatgccttcgacaaggatgcacaccaaagtgaaataattatgagattgctccttatgacagctgaagtaaaacaaagg

SEQ ID NO: 5905 - DNA, 120 bp, synthetic construct
  source 1..120: mol_type = other DNA
tgatgaactatgctgttactaaggactgtttggggtacattgatcattgttagggtaaaaagcaggtgatacagtccagtcctgtcctcacacttcacaatttttactggagacaagaat

SEQ ID NO: 5906 - DNA, 120 bp, synthetic construct
  source 1..120: mol_type = other DNA
cctgacagtccggtggaggatagcaacgctccgggttcgctgcaggtgaagccgggactgggctgtcagggttgacaccagaggataggggggtgggacccggggctgacggagacgggg

SEQ ID NO: 5907 - DNA, 120 bp, synthetic construct
  source 1..120: mol_type = other DNA
tctgtaaaccgagtctgtgatgctccaaaaagcttaggctgggctgggagcgaaggagttgggggagagggagcatttctctactgtcggggcccctcctccccctagcaaggatttggt

SEQ ID NO: 5908 - DNA, 120 bp, synthetic construct
  source 1..120: mol_type = other DNA
ctgtgtggctttcatctctccaggtttatgtagcctcatggatcagttactgtgatatttaagggagactgcttagcacagtgcctgatgtgtggtaggtacttaatacttgaaaacaag

SEQ ID NO: 5909 - DNA, 120 bp, synthetic construct
  source 1..120: mol_type = other DNA
tgtttgccattgtcatcattgtgatggtcacctgcccctatgtggtgattcactcacctaatgtttccaaatggcatggaaagtcaagacgacttctggattcatggacatctggtcact

SEQ ID NO: 5910 - DNA, 120 bp, synthetic construct
  source 1..120: mol_type = other DNA
agactgtctacttctgaccccacaagggctagcactgccctcagaaagctcagccactgtttgctgaatttaattaaaaatacatctctaataacctctttgtaaaatagcttggcagtt

SEQ ID NO: 5911 - DNA, 120 bp, synthetic construct
  source 1..120: mol_type = other DNA
ttatttttaaaaactagttttcattctgttactgtttctttttcttcagtattccagtaccagtacccggagagaacatgtcaaagttaaaaccagctcccagccaggcttcctggaacg

SEQ ID NO: 5912 - DNA, 120 bp, synthetic construct
  source 1..120: mol_type = other DNA
tctttctttttctccttttttttaatagggcctcatgatgcaacagtatatttctaaatcaatttagcagcagttacagggccatctctcagtgtcctggcttggctctccgtcctctga

SEQ ID NO: 5913 - DNA, 120 bp, synthetic construct
  source 1..120: mol_type = other DNA
ctctatttcttcctcttccagtccagcttcccctgagccaggctttctgggctgacgtgaatgttatcctttatttttttggtttctttgattctgtttgaagcttttgtctgatccaaa

SEQ ID NO: 5914 - DNA, 120 bp, synthetic construct
  source 1..120: mol_type = other DNA
agaccccactgcatctctctgtgttcagccttcccatcagctgtgttggtcccatctttgctctacttacagcttatcgtttctgacaggagtcccagggcaggttctcattgatcaggg

SEQ ID NO: 5915 - DNA, 120 bp, synthetic construct
  source 1..120: mol_type = other DNA
gcctcagtttcttcatctgaataacaggattgagttaatcctgcctcgtgggttgaaaatgtgggacatgggtttgagaccaagccctgtgctgggcaccaggaacacagagacttgtct

SEQ ID NO: 5916 - DNA, 120 bp, synthetic construct
  source 1..120: mol_type = other DNA
tagggctccccctctctgagttccacctgtcccaggaaggcactagcttatcacaggcatcccccattgactccaaagagaagcttgcaagggataaggtggcaccatgggccagagtaa

SEQ ID NO: 5917 - DNA, 120 bp, synthetic construct
  source 1..120: mol_type = other DNA
atccatggaccccacgttaagaagggcagctcaaaaggggtctcatagtcgcaccttatgacaggtgttccagtcacacacagaccctctccccaagcccgttttgatctgtcaataatt

SEQ ID NO: 5918 - DNA, 120 bp, synthetic construct
  source 1..120: mol_type = other DNA
gtggttatttaataagatcacactaccaggggtcatagccagtgaatgaggcaagaagaagaaatagcggaatgttgagtatgcctcatcaaagtgtttgaccaggagtgtttcagattc

SEQ ID NO: 5919 - DNA, 120 bp, synthetic construct
  source 1..120: mol_type = other DNA
aagaattgagtctttagtttttctgttgttgatgaacacaggtatccctggtggggcactctatacctgccctaaccaggactgctggggttttcattccagagtggccagaaagggtca

SEQ ID NO: 5920 - DNA, 120 bp, synthetic construct
  source 1..120: mol_type = other DNA
gaattaaataatacttgtaaaacacttaggacagtatcaaataaatggtgagtgataaatgtgacctgtttttgttgttacggactctgagagagggcccgattcagatcagagggtcag

SEQ ID NO: 5921 - DNA, 120 bp, synthetic construct
  source 1..120: mol_type = other DNA
gtgtttcatagagaactaaggagcaactccatgaagacctggggcctgcgggcagctggctggatggccatgttcatgggcctcaaccttatgacacggatcctctacaccttgggtagg

SEQ ID NO: 5922 - DNA, 120 bp, synthetic construct
  source 1..120: mol_type = other DNA
aggactctccctgagcctttctttggacagctgaattgtgctcagaaagaccagtgacgtggtgggcacattagcgagagatgagcatttaaacggaatcctctttcttgcctgtgtgac

SEQ ID NO: 5923 - DNA, 120 bp, synthetic construct
  source 1..120: mol_type = other DNA
acaaggcaagaatagggtaattcctcatgaatttagctggattctgggctttatcctattggaccaatagtctgtgagattcttgaggagaggccaatgcttaggctaatttatttcctc

SEQ ID NO: 5924 - DNA, 120 bp, synthetic construct
  source 1..120: mol_type = other DNA
cttatggcttggcagaatctttgtagtgtgtgggatctctgaaggccctatttaagtttttcttcgttactttgctgcttcatgtgtactttcctaccccaagaggaagttttctgaaat

SEQ ID NO: 5925 - DNA, 120 bp, synthetic construct
  source 1..120: mol_type = other DNA
tcatattcagaaaccgttttgtgcctgctgggagtaattcctttagcaattaagtatttggtagctgaataaggggtcagaacttctgaaaccagagatctgtaatcatctctattggcc

SEQ ID NO: 5926 - DNA, 120 bp, synthetic construct
  source 1..120: mol_type = other DNA
agaggtcaagggtcacgtgctcacttgtcaaacatgcggaagaggtcagacagctcctcctcagatttccctttgctgtcgtccttcatgcaccgaaccatcatgaccaggaactcatca

SEQ ID NO: 5927 - DNA, 120 bp, synthetic construct
  source 1..120: mol_type = other DNA
acatgtgtgatagggattctcaccatttttctgctcttctgtcagctgctctacctagaaaggaaagggaatctcaaggctcagactcaggtatagctgctgctgaggaaaccaacccat

SEQ ID NO: 5928 - DNA, 120 bp, synthetic construct
  source 1..120: mol_type = other DNA
agatgaaaagagaaaggcaaaaacgtccagagacaaatgcagagacatgtggctgagcgacagtgccacagaccacagacacttggaaacagagagtgagacacgatgctgaaagctgca

SEQ ID NO: 5929 - DNA, 120 bp, synthetic construct
  source 1..120: mol_type = other DNA
gcacttcctatctttcccctccacttcctgtctgccttatgcccttcctgtctccttccttctcttcttattatagtagtccctccttttctgcaattttactttgtgtggtttcagtta

SEQ ID NO: 5930 - DNA, 120 bp, synthetic construct
  source 1..120: mol_type = other DNA
tcactgtgttggccaggctggtctcaaactcctgacctcatgatccgcccgccttggcctcccaaagcgctgggattacaggcacgagccaccacacccggtaactttggtattttttat

SEQ ID NO: 5931 - DNA, 120 bp, synthetic construct
  source 1..120: mol_type = other DNA
ttcatgtacctctttgctcttacatggacttcctgtagccctaatgcacttcctgtcttccccttctacttcctgtcttcctcttgcatttctgaggaccccttactagctgcttctacc

SEQ ID NO: 5932 - DNA, 120 bp, synthetic construct
  source 1..120: mol_type = other DNA
caaatcacaattccctggccagtgcctgagctaatttaccaacatgtgatgccctgagcatgttcactaacttattttctgtttcccaacccatggccttgcatgtgctgttccctctgc

SEQ ID NO: 5933 - DNA, 120 bp, synthetic construct
  source 1..120: mol_type = other DNA
ggggcctggacttcagggtctgagggaggaggggctggggcctggacttcagggtctgagggaggaggggctgagggcctcgattccagggtctgagggaggaggggctggggactggac

SEQ ID NO: 5934 - DNA, 120 bp, synthetic construct
  source 1..120: mol_type = other DNA
tctttcccagtcccgcccgtcctcaccttcagctgcaattttctcgaggcggagatcttagattttttctgccagggtgagatggagcaaggaaggatcatggagggggattcggagacg

SEQ ID NO: 5935 - DNA, 120 bp, synthetic construct
  source 1..120: mol_type = other DNA
gccttagcccgctgctctcaccgcatcgctgctcctggaaggagagaaaccaaggaggggggttagtggtgggctgtgtcctgtctcctaagggacccctggagtcccctctgaacaaga

SEQ ID NO: 5936 - DNA, 120 bp, synthetic construct
  source 1..120: mol_type = other DNA
ggcgagaatgacctcagacacttacactttctggttatcgttgatcctgtttcggagaacattgatctgcaagaaaagtgggaaggacaaagagcaacgctggagctgactggctcaggt

SEQ ID NO: 5937 - DNA, 120 bp, synthetic construct
  source 1..120: mol_type = other DNA
agcaataataacaattagtattatctctgtaaccctcacaatcaccctctgaagtatattgtagtgttacctgtggaaatggaggcaaggaacagtggactaactcacccaatgtcacac

SEQ ID NO: 5938 - DNA, 120 bp, synthetic construct
  source 1..120: mol_type = other DNA
tgcttgaacttctcctgcaggtcgaacttctctgcctccaagttatagatgctctgccacagctccttggccttctccctgcacgggcaagggtgagaatggggaggtccagtaagaaag

SEQ ID NO: 5939 - DNA, 120 bp, synthetic construct
  source 1..120: mol_type = other DNA
gggactaagctggaaatctaagaaaatgttttgattccttcactacctagagaaaatcaatttcacatatccctcctccctcgagaatggaggacctaggaggaatggggcacaaaagtt

SEQ ID NO: 5940 - DNA, 120 bp, synthetic construct
  source 1..120: mol_type = other DNA
ctctcgtcgagccctctcttcctgatttacagcagggaggaagaaagcaaattaggggaaaggattggaaaccctgattctgggctgaagcttgtggtctttatgggtgagttcagcttt

SEQ ID NO: 5941 - DNA, 120 bp, synthetic construct
  source 1..120: mol_type = other DNA
tatgcttggatagatggccaagtcattgctccagccagagcagcatgtctgtgggaaggcaagtttgatggggagaaacaaaagcaatcaaagcagcctccacgctctgcaggagaagga

SEQ ID NO: 5942 - DNA, 120 bp, synthetic construct
  source 1..120: mol_type = other DNA
agaatgttaggtgggcagactggacacctacgatcctgtctttgagagaaacgagctcctcctcctctttcttcctgttctcaaagtgagcctcgatcagcgcctgcaactcattcaggt

SEQ ID NO: 5943 - DNA, 120 bp, synthetic construct
  source 1..120: mol_type = other DNA
ctagaagaacatagccccatccctgctagggtgcacgattggtgatggagtgttgggtggaattcagccctcactcactcccttaggaagagacgcttgtgcagtacacaacttgtacaa

SEQ ID NO: 5944 - DNA, 120 bp, synthetic construct
  source 1..120: mol_type = other DNA
atgactgcagcaatgacccaccatgaccatctatgcattgggatttcatcctacggacaccacatcctacaagtgatttcacctaagctctaggagcttcatgtgtggatatgacttctg

SEQ ID NO: 5945 - DNA, 120 bp, synthetic construct
  source 1..120: mol_type = other DNA
tccacatctcaaagaaaccaaaagagtacgactgtgtggctggatggcacactcaatatctggatcttcgtactatccagaaagtgggcaggatttttctattttcatctatttgtttgg

SEQ ID NO: 5946 - DNA, 120 bp, synthetic construct
  source 1..120: mol_type = other DNA
aaagtgtgaaagcagagggctagcgaggaaggacatggccattgtggggtctacctttaggccatcttgttcacacctctgccacctcatctgacgtgtcatttctctatataatatacc

SEQ ID NO: 5947 - DNA, 120 bp, synthetic construct
  source 1..120: mol_type = other DNA
atgctgccccatctaagaagggtccagcattataaatctaaggaaagaggctgcatctacaacagttgttctacgtacaaatatctgcccaaaaaaacagttccagcaagtggaacaatt

SEQ ID NO: 5948 - DNA, 120 bp, synthetic construct
  source 1..120: mol_type = other DNA
agctcagaatcatgacaaatcttcatgccgagataagacgtctcagatcactgagcaatttcatactcacaatcgcatttgagaaattactaaatggaatcttttggggcatatcatggc

SEQ ID NO: 5949 - DNA, 120 bp, synthetic construct
  source 1..120: mol_type = other DNA
ttctgctcacttactctttccatctttgcccaagctgtacccctttctagaaagtcctgccctctcccaaatctcttatctttccaaattctacacaggtaagacctgccttctccacac

SEQ ID NO: 5950 - DNA, 120 bp, synthetic construct
  source 1..120: mol_type = other DNA
ctgggatgctgcatttccatttgtgacactcaagacaatgtctgcagtttctcaacctttccatccactctgcccacccccactccacaggatctgttcagcactgtacaaatcttcact

SEQ ID NO: 5951 - DNA, 120 bp, synthetic construct
  source 1..120: mol_type = other DNA
aatgttgccctcgggagaaactaggcaccgtgtgtaaacgctcgttattaaagacaactgtgtactagtctttaattatgtcaatgaaaattccgattaaaaaatgttcccccagggaac

SEQ ID NO: 5952 - DNA, 120 bp, synthetic construct
  source 1..120: mol_type = other DNA
gagaagaagagacatcaaatgtgcgaggtgctataatgcgggatcaagcctcattctgctgaaaaaaagactcaaaccccagaggttctccaaataggtcttaggatgagagtggccaaa

SEQ ID NO: 5953 - DNA, 120 bp, synthetic construct
  source 1..120: mol_type = other DNA
caaagacaatagaaggcataaggcatactgaccttggggtcaaaaaatctgggcttaaaacccagattttgctgtgtggccttatttaagtcacctagcctctctgacttcagttaacca

SEQ ID NO: 5954 - DNA, 120 bp, synthetic construct
  source 1..120: mol_type = other DNA
agtgactcatccaagagtttaaactctacatctttagtggcaggtccaggactccaaccctagtctccaatggctaccatgggattctctctttctctctgctctattgtaccaatcttg

SEQ ID NO: 5955 - DNA, 120 bp, synthetic construct
  source 1..120: mol_type = other DNA
tttagttttcccatctgagaatctatcattttctttggatcttggcttacgtcgttaaataagggtttgtggtcttctgcatacaggctctgtgccattccttctttgtgtgtgccattc

SEQ ID NO: 5956 - DNA, 120 bp, synthetic construct
  source 1..120: mol_type = other DNA
ccaccatgcccggccttattgtcattattttgaatggaatgttttcttgttgtctaatttttcacagtgcttctgctggaagataaaattaatatttttctacctactacttatctgcct

SEQ ID NO: 5957 - DNA, 120 bp, synthetic construct
  source 1..120: mol_type = other DNA
taggactacaggcgcgtgccaccacacccgcctaattttttgtatttttagtagagacggggtttcaccttgttagccaggatggtttcaatctcttgtcctcgtgatctgcccgcctca

SEQ ID NO: 5958 - DNA, 120 bp, synthetic construct
  source 1..120: mol_type = other DNA
cacctggcccagctcttgaccttaattgaaattatcttaatgtttaacttattaggaaaattggtattccattatcagtctattactgtgttaaagtgttttcttttttaaggaaatggc

SEQ ID NO: 5959 - DNA, 120 bp, synthetic construct
  source 1..120: mol_type = other DNA
agaacatattgatttaaggttgtgaattacaagtttagactgaagccatgaggaaattgggagatttgatttcagatctcattaggataaggcctgggctctttgagtgggagggtaggg

SEQ ID NO: 5960 - DNA, 120 bp, synthetic construct
  source 1..120: mol_type = other DNA
aaataaaaacagagctagggacataatctaggaaaaggttgggattgaaagggtggaggatggttgtcaaaaagggagattttctgtttacttgagatctgcagagtaggtccaagtgtc

SEQ ID NO: 5961 - DNA, 120 bp, synthetic construct
  source 1..120: mol_type = other DNA
cagacacacaggtggcagcaaagttttattgtaaaataagagatcgatataaaaatgggatataaaaagggagaaggaggggaagggtggggtgaaaatgcagatgtgcttgcagaatgt

SEQ ID NO: 5962 - DNA, 120 bp, synthetic construct
  source 1..120: mol_type = other DNA
gtaataaaaggtggtttcaaggccagatgtacattatttcattaaccctcacaatgcactctgtgaggtaggtgcaaatgccagcatttcacagatatgggccttgaagttagagaaaat

SEQ ID NO: 5963 - DNA, 120 bp, synthetic construct
  source 1..120: mol_type = other DNA
attcaaatcaagatggtggccacaccccatgcaaatatgtttactgagcacctcagagtattagtgtgtattagtctcgtaatcttcccttaccccattttactttatttatcttttttg

SEQ ID NO: 5964 - DNA, 120 bp, synthetic construct
  source 1..120: mol_type = other DNA
acctccacctcccaaagtgctgggattacaggtgtgagccactgtgcccggcccttttttaaattttagagatgatgtcttgctatgttgttcaggctggactcaaactcttgggctcaa

SEQ ID NO: 5965 - DNA, 120 bp, synthetic construct
  source 1..120: mol_type = other DNA
tagccgggcgtggtggctcacacctgtaatcccagcactttgggaggccgaggcgggcggatcacatggtcagaagttcgagaccagcctggccaacatggtgaaaccctgtctctacta

SEQ ID NO: 5966 - DNA, 120 bp, synthetic construct
  source 1..120: mol_type = other DNA
tttttgaaagctggtctggtcctttaaaatatatattatggtataagttggtgttctgaagttagttagctacaaccaggagccattgtctttgaggcatcactgccccctgatggcaaa

SEQ ID NO: 5967 - DNA, 120 bp, synthetic construct
  source 1..120: mol_type = other DNA
agattaccactactcaggataggaaaagagaagcaagaggcagtaaggaaatcaggtcctacctgtcccatttaaaaaaccaggctccatctactcccaaccacccttgtcctttctgga

SEQ ID NO: 5968 - DNA, 120 bp, synthetic construct
  source 1..120: mol_type = other DNA
aaaacatcttgttgagggcaggggagtactgtaggaagaggaaggagacagagttgaaagtcagggcacaagtgaacagataaagcaactggaagacggcagcaaagaaacaaacatgcg

SEQ ID NO: 5969 - DNA, 120 bp, synthetic construct
  source 1..120: mol_type = other DNA
tattcaactttgggacaggagtcagagatcacacattaagtgggtaaactataaaaaaacactgacaggaagccaaagggtgaagaggaatcccaaagttccaaacaaaagaaatgcagg

SEQ ID NO: 5970 - DNA, 120 bp, synthetic construct
  source 1..120: mol_type = other DNA
ccatgcacttctttgaggaaaagacaatcagagagggacttccaaccttcccaccactaaatccccaagacttcctaaatgtgcaccctattcccaactcccttcctgtatttttttttt

SEQ ID NO: 5971 - DNA, 120 bp, synthetic construct
  source 1..120: mol_type = other DNA
agtgatctatcttgttgtcttgctgaccaaagtattagatcacaatgccttgcacctgcttgggctcaataaatgtgaataacacacaagcctgttatatgagaggttaagagagcgaga

SEQ ID NO: 5972 - DNA, 120 bp, synthetic construct
  source 1..120: mol_type = other DNA
tcccgagtagctgggattacaggcatgcgccactgcgcccggctaattttgtatttttagtagagacggggtttctccatattggtcaggctggtcttgaactcccaacttcaggtgatc

SEQ ID NO: 5973 - DNA, 120 bp, synthetic construct
  source 1..120: mol_type = other DNA
aggcctgaccagaatcttaacagtggctgctggtatcagtcttgaaggcctatatgtccagtgattccctaaacaatatagtacaagtacttacatacatacttgcatgtacattagcat

SEQ ID NO: 5974 - DNA, 120 bp, synthetic construct
  source 1..120: mol_type = other DNA
cagggaagccacctgcctcagcctcctaaaagtgctaggattacaggcatgagccaccacgcctggccccattaggacatgtatgtatagaatcatactggctgtgaatgtgttttattt

SEQ ID NO: 5975 - DNA, 120 bp, synthetic construct
  source 1..120: mol_type = other DNA
ggtctcgatctcctgacctcgtgatccacccgtctcggcttcccaaagtgctgggattacaggcctgagccaccgcacccggccctcattatttctttttcttgcctggttaaaacctcc

SEQ ID NO: 5976 - DNA, 120 bp, synthetic construct
  source 1..120: mol_type = other DNA
gtgatcccagctcagtgcaacttctgcctcctgggttcaagcgattctcctgcctcagactcccgagtagctgggatttcaggtgcccaccaccatgcccagctaatttttttttttttt

SEQ ID NO: 5977 - DNA, 120 bp, synthetic construct
  source 1..120: mol_type = other DNA
tctgttcctctgttttctgaagagtttgtgtaagatgggtactgtttcttcctccaacgtttaaagagagcagagaacagaggagataaatagaaaatagcactaagaggtcaggcatgg

SEQ ID NO: 5978 - DNA, 120 bp, synthetic construct
  source 1..120: mol_type = other DNA
agtcaatagagaactgtaaattacaaccacaaggatataccacattagaaagactgacaatacctaatgtccggaaggctgtggcacaaccataataactcccataccttgctagttgga

SEQ ID NO: 5979 - DNA, 120 bp, synthetic construct
  source 1..120: mol_type = other DNA
tcaaacgacccatcattgcactctttcaaaatttgattctcagacgtacccattctttttttttttcctccgggaagatgagatatactcattcttgaaaatacctccgggcttgccttc

SEQ ID NO: 5980 - DNA, 120 bp, synthetic construct
  source 1..120: mol_type = other DNA
tttcggaatggagccccagttttcactaggatgccatgggctctaaaatatacagctatgagttctcaatgtttcgagatccaaaagtctcagacctcaatgctttgtgcatcttttatt

SEQ ID NO: 5981 - DNA, 120 bp, synthetic construct
  source 1..120: mol_type = other DNA
ggagaaagggggtcgagtaactcaagtgttagaagttcgttgacttttgactggggagaaaggaaccttaaacttggggaggagaagggagtcctggagttgttacctaagaacaaagat

SEQ ID NO: 5982 - DNA, 120 bp, synthetic construct
  source 1..120: mol_type = other DNA
actgctactgcacacattcatttatatttcatccactcctctcttcttctcctttcctttacctccctgggggtggaggtgggtggatgagaggctgggagaatagagcagctgaaattg

SEQ ID NO: 5983 - DNA, 120 bp, synthetic construct
  source 1..120: mol_type = other DNA
aaaggaccaacttcttttcacaccgttggattccattctaaaagctaattaagcctagaggcccaattagaaaagaattccttgggaagttggtaacaattccaagaatgtgtgagcacc

SEQ ID NO: 5984 - DNA, 120 bp, synthetic construct
  source 1..120: mol_type = other DNA
ccttttaggacactttaggttgtctggagtttggagcccgtaggaatattgaagaagttagtgaagaaatgctatacagtcatttgttgattaatgaagggggataaggtctgagacatg

SEQ ID NO: 5985 - DNA, 120 bp, synthetic construct
  source 1..120: mol_type = other DNA
ccaagtgattccaacctacagacaaggatgagaaaactctcctaaactcttgtataatgacatcggcatgaaaatgaactcacctgaaactgaccttcccaggacattaagtcactagtt

SEQ ID NO: 5986 - DNA, 120 bp, synthetic construct
  source 1..120: mol_type = other DNA
gaggctggcctgagattacacagctgattatgggcctcagcctgactcttaaaacaatgcttgtgtatttcttaatcgtagctatcatttgagtttttaactatgtacaaggtattgtgc

SEQ ID NO: 5987 - DNA, 120 bp, synthetic construct
  source 1..120: mol_type = other DNA
aggcggtagacagacattgacagcttgacagcgccgcgttctgctggaagagctaaactatagtgcaaaacccttaacccgtcccttttttcagcagtcctcctccccttttctctcata

SEQ ID NO: 5988 - DNA, 120 bp, synthetic construct
  source 1..120: mol_type = other DNA
gggtggtaaactaattccgactcccttactcgctagtagctgtccttgaaccattagaactatatagaatatgatggataaaaacaagaactttggacccagactgtcagaacttgaatc

SEQ ID NO: 5989 - DNA, 120 bp, synthetic construct
  source 1..120: mol_type = other DNA
actgcaaaaaatatttgaccagagagttggcctaaattcaaatactcagactgtaattaataggccctattaaaccagcccttaccttggaaaaagcagccatcccttacttcctcctag

SEQ ID NO: 5990 - DNA, 120 bp, synthetic construct
  source 1..120: mol_type = other DNA
tttttttttttttttcaaatctgatttgggataatattatactatggtggggtgggcatgcccttgatttctatatagtaccatgttggggtgggggaatggggtgcatgcccttagagg

SEQ ID NO: 5991 - DNA, 120 bp, synthetic construct
  source 1..120: mol_type = other DNA
ggccctgattaaattataaaattaagcatatcttgaattctaacgagccaaacaaaaattctactaggccagtataatagggcctgcagagcctgtcatgggttcagggttttcccataa

SEQ ID NO: 5992 - DNA, 120 bp, synthetic construct
  source 1..120: mol_type = other DNA
ttttttaatgctcatctctgagttgattctgacactcagccacttgtgggaattgctgatctggacaatgcctagggatccttctagctaaaaaattgagaccctattttttggatttac

SEQ ID NO: 5993 - DNA, 120 bp, synthetic construct
  source 1..120: mol_type = other DNA
ataagaaagggggaaagaaaagaaagtgtacagtgcttttgagtacataacctagacactctatggaggctttttgttgttgtagggcttttggtttgtgtgcttggtttttttgtgtgg

SEQ ID NO: 5994 - DNA, 120 bp, synthetic construct
  source 1..120: mol_type = other DNA
accccaccaccccttagtgaacatacattcaaagtggatgaggatattttacctgattagtaaattccatctcccacttccatgcacaatatttaaacagccaccagtgcaagtgtgtat

SEQ ID NO: 5995 - DNA, 120 bp, synthetic construct
  source 1..120: mol_type = other DNA
tatacacaaatatggatgttcactgtataaatcaatgtgtaaatgtgtccgagaactccagagttgatgagggcttgtaatgcacttaaaggtagctcaccacaagacagtcttcctatc

SEQ ID NO: 5996 - DNA, 120 bp, synthetic construct
  source 1..120: mol_type = other DNA
aattattactcagattcagctttgtggtagtaaaggaaagcatggttcgtatagaccagcacagccttgtgtggtctaaaaggcattttcccttaagctcaactgttggaagtaaggatt

SEQ ID NO: 5997 - DNA, 120 bp, synthetic construct
  source 1..120: mol_type = other DNA
aaaatatcataggtcatttagtatttttctgaaacattacaccacgctataggaccctaatatacaccatgccataggaccctaatacactcagtgtagaggacagtgtcaggcctgtct

SEQ ID NO: 5998 - DNA, 120 bp, synthetic construct
  source 1..120: mol_type = other DNA
tgggttttcttgcttgtctttcttttcagaggcatgaaagtcattgagagtcgagcccaaaaagatgaagaaaaaatggaaattcaggagatccaactgaaagaggccaagcacattgct

SEQ ID NO: 5999 - DNA, 120 bp, synthetic construct
  source 1..120: mol_type = other DNA
tgatggagttcttaggtttactttgttttcctggcagcccccacctttttagtacatgtctcatcctactgctgtttttgagattgtgaatgtgtattttatccctccttccacattttg

SEQ ID NO: 6000 - DNA, 120 bp, synthetic construct
  source 1..120: mol_type = other DNA
gaaaacctaaacattttaatacctgatgatttggctactttaaggcagcccttcgtctctaggactcagttttcattttttcccatccctctcctttttctctcctccttcctttggctt

SEQ ID NO: 6001 - DNA, 120 bp, synthetic construct
  source 1..120: mol_type = other DNA
actcgggctgagtttgcggagaggtcagtaactaaattggagaaaagcattgatgacttagaaggtaagatcttaagtagtgtttttagtttaatccttatggttgaataccaacctggc

SEQ ID NO: 6002 - DNA, 120 bp, synthetic construct
  source 1..120: mol_type = other DNA
gtggaaccagataaggactacaggctgtagtcacaaattgttcttccaaaacactgcccttgcatttttttcccattgtttatagctgcagatgcctgactactccagtgtaattaaaat

SEQ ID NO: 6003 - DNA, 120 bp, synthetic construct
  source 1..120: mol_type = other DNA
attttgtaaacgctgaactagagcagtgaactagaatgagtgaccttgagcactgtccttttgggaaattaagctaaactcaagtaaaactagaaggccatgccgtttgttgtacaggaa

SEQ ID NO: 6004 - DNA, 120 bp, synthetic construct
  source 1..120: mol_type = other DNA
agagaaaatgtgtcttctcatccctcatttgtaaatgagggggtggagcagatcatctgtctctaaggtctttttcagtgctaaaatgtggtgattctttgggaaaaactttttgcatca

SEQ ID NO: 6005 - DNA, 120 bp, synthetic construct
  source 1..120: mol_type = other DNA
ttgattatttcggtggccttacttgggaggacctggctaactaatgaaaggctcatgatgaatggttctgtagctgtcccatattactaggaagttatacattgagaagggtgaaaaaga

SEQ ID NO: 6006 - DNA, 120 bp, synthetic construct
  source 1..120: mol_type = other DNA
atgtagacaaaatgccaagtctgaaagttctgctgagcagatgttcatgtaattctggaggcacatctgtgttttggaaatccttccagagactttcgcactttctataagtacactcta

SEQ ID NO: 6007 - DNA, 120 bp, synthetic construct
  source 1..120: mol_type = other DNA
caaaaaatgtggatgagcaaagaggacagagcagcagatattccaagcgagaaaacataacgagcatagcatcctcccatgtcctaccatttataagagaatgttaatgtgagaactgct

SEQ ID NO: 6008 - DNA, 120 bp, synthetic construct
  source 1..120: mol_type = other DNA
ataacactatcaaagctagacaggagtcagaatgtgtaccctgtattgtggtgactgggggaaggacagagacttaattccaaatttcaaaaaatttcagtgcagcaaaagcagtaaccc

SEQ ID NO: 6009 - DNA, 120 bp, synthetic construct
  source 1..120: mol_type = other DNA
gtttgaaatatgattaaatgtacctatgcttgggcaaaatagcttttgaaaacaggaactcatgccagaagcccctggttgtctgaaaggtatgctttactcagtctaatggtgctgttg

SEQ ID NO: 6010 - DNA, 120 bp, synthetic construct
  source 1..120: mol_type = other DNA
ttgtagagagtttagcaacacagtgtgcttagtcagcgtaggaatcctcactaaagcagaagaagttccattcaaagtgccaatgatagagtcaacaggaaggttaatgttggaaacaca

SEQ ID NO: 6011 - DNA, 120 bp, synthetic construct
  source 1..120: mol_type = other DNA
catctatcatatttgctatttctttactcagtaaattcagcaggctggaggagcagttgagcaataaactttatgcactctcctacccacaagtttagattgtcacctgaaggggctttg

SEQ ID NO: 6012 - DNA, 120 bp, synthetic construct
  source 1..120: mol_type = other DNA
agtcattcccagggatgcactgtcgagtagattaaaaattgttatccatgtcattggcactgatgaccagttacctaaaatacaagtaagacatctcacgaaggcatttaaggctaaaat

SEQ ID NO: 6013 - DNA, 120 bp, synthetic construct
  source 1..120: mol_type = other DNA
tcacagattctgccagcagcctccgtagctgttggcaagttactaaacttcactgtgtcttggagtctttatgtataacatcaaaacaacgaaaaccgcacagaaatattatgacagtta

SEQ ID NO: 6014 - DNA, 120 bp, synthetic construct
  source 1..120: mol_type = other DNA
agaaatggaaatccattgctaaaagtagaagggcccatcaatgacaggctgccttccagctgcttatcagaagtggacactgttttgacacatttatttaattgatgttgaataagctac

SEQ ID NO: 6015 - DNA, 120 bp, synthetic construct
  source 1..120: mol_type = other DNA
atctactgcagtagttccagcatccaaagaagtacttggaacatagtaggcattcagtatctgtctaatgaatcacctattaatacagagtaggaggcatttgctattgtaaggggcact

SEQ ID NO: 6016 - DNA, 120 bp, synthetic construct
  source 1..120: mol_type = other DNA
aaactggccctgatgtgtcagatattcattaatgaggatagttgacatgcatccctttcctgagaagggatctttgatgctcagaattacaatttggtaagggtaaaatctggctaaaga

SEQ ID NO: 6017 - DNA, 120 bp, synthetic construct
  source 1..120: mol_type = other DNA
gacctgtgtgtgttttctcaaagcactattttccacattgttggttaattttgggcactggcaaagaatttatacttcgttggctagaacaatgcttaggcaaatacttattgcctgcag

SEQ ID NO: 6018 - DNA, 120 bp, synthetic construct
  source 1..120: mol_type = other DNA
aaaaaaatcaagttagctgaagccctcattctacagatggagaaattttgtcctggaaatactttatgaagttcgtacatctggagatcgcaggttttcctgactgtttgtcctctggct

SEQ ID NO: 6019 - DNA, 120 bp, synthetic construct
  source 1..120: mol_type = other DNA
ggtaaatggtttcacgcatacagcctagataaagagatcagtgtctacccacacaatttattagcagattgattagattttagcctttttgacaattctaaaaagcccagaaataaaccc

SEQ ID NO: 6020 - DNA, 120 bp, synthetic construct
  source 1..120: mol_type = other DNA
attagtggggaaaggaagacactacatttgaactaaagctcaaatacatacacaatgactcttaagttgtattgtgtaaatcacttggtcttttctgcattcaacttacaagcacatatt

SEQ ID NO: 6021 - DNA, 120 bp, synthetic construct
  source 1..120: mol_type = other DNA
tcaagaaggagatgccaaaattaaagtgagggcaacaatatgaaaaaaggctagagacagcgaaggacagagatattcagggagtagaggagacgttctggaaaacttggataagattat

SEQ ID NO: 6022 - DNA, 120 bp, synthetic construct
  source 1..120: mol_type = other DNA
tgcccaaggtcacaaaactcatgagtggcagagacagaacaagaacataatccaaatctcctatatcagggcctcttgaaagagtgttgaaatttatcccatgaatagtacacctgctat

SEQ ID NO: 6023 - DNA, 120 bp, synthetic construct
  source 1..120: mol_type = other DNA
actaacccccttaaaatgagagggggtgctaaatgtgtccctctgcacttctaacaatctactctccctcagtggcgatgaaaagttacttagttgtctttgaaaataaagacaatgaag

SEQ ID NO: 6024 - DNA, 120 bp, synthetic construct
  source 1..120: mol_type = other DNA
tctctttggagtcaagggtggacttggttctatgaggttgaagacacagatgatttaaagacttgatctgttggtatttaggagactgcgtgtgtatggactctaataaatatggactct

SEQ ID NO: 6025 - DNA, 120 bp, synthetic construct
  source 1..120: mol_type = other DNA
caagagaactttgagccccaaagtatttgaaaagaacttccctgcagcaacacattttaaaaagtgttgaaagaaggcatgaagctaactttcctcaacatcaagaccctcactctttcc

SEQ ID NO: 6026 - DNA, 120 bp, synthetic construct
  source 1..120: mol_type = other DNA
aaagggcctgctggggagtgaatgcaatggtttagaggagaaacagtaaaagcctacatgacttaaaacaaaattagggtccgggacaagtaatactgattggtcaaagtagaattcaaa

SEQ ID NO: 6027 - DNA, 120 bp, synthetic construct
  source 1..120: mol_type = other DNA
agccccctaaataatgcacgtatatgtaccagctcagttactctatgttcatctctaccagcagtctattttgatttgtgcagtttcaagaaatcctcgtaagtaaacatgtggaatcct

SEQ ID NO: 6028 - DNA, 120 bp, synthetic construct
  source 1..120: mol_type = other DNA
cgccttatacacaacctttctctggagtttagcaaaaggggtgatcagagtggtgagtatgatcactggcacatattaaggagacttcagccaattttttctcctaaaacaaaatcatca

SEQ ID NO: 6029 - DNA, 120 bp, synthetic construct
  source 1..120: mol_type = other DNA
aactaaccctgctgatacatgaaaagtggggtcacattaggacaagtgcttatattaaaactgaaattcagtaattaagtgtgcaaggagcaaaatgggggtgtagaggctaggatcgtt

SEQ ID NO: 6030 - DNA, 120 bp, synthetic construct
  source 1..120: mol_type = other DNA
tctgtccctaaccttgagcaactactgagctgtaacccaatggaagaatctcatatgcatgaaaacttcccgtatggaacctttggagcttagcttcagaagaaataacgtatttgaatt

SEQ ID NO: 6031 - DNA, 120 bp, synthetic construct
  source 1..120: mol_type = other DNA
ttgcacactatgtgaggttaagatagcagtttattttcaaaaaatacatagatgtccaattgtttgagtgccattggttaaaaagtctacttattctccactaaattgcttcggaacttt

SEQ ID NO: 6032 - DNA, 120 bp, synthetic construct
  source 1..120: mol_type = other DNA
tggattcctcaagtaggtacaagaaaacgataaattcctgtgccctgaaagtatgtcacaataagaagaaatcctcatcccaacaaactatagtaacactgcagcagaacaaaggctaag

SEQ ID NO: 6033 - DNA, 120 bp, synthetic construct
  source 1..120: mol_type = other DNA
gtcaagaaagatgatgaagaagcattgagagagcatgagaaagagaaagcaacaagacagtgagaaccagacctaagatattaataatcatgataaatgtaaatagtctacgtccatcag

SEQ ID NO: 6034 - DNA, 120 bp, synthetic construct
  source 1..120: mol_type = other DNA
atttcagagtatgttctacaatgtgctacacacacacagagatgagagaccaatacatgtcataaaattagaaaaaagtaatcaagggaatcaattgtaaaatgaaactcattgtagtag

SEQ ID NO: 6035 - DNA, 120 bp, synthetic construct
  source 1..120: mol_type = other DNA
ctcattttgtaaagttaagcaaacaatgtttaaagacttgttctataactacatccgaattagactattaaattttcttgtgcagtgctagatatgggactggcatatgttgtaaagtga

SEQ ID NO: 6036 - DNA, 120 bp, synthetic construct
  source 1..120: mol_type = other DNA
aatgttgactcccagactacagcaacaaaataactatgcacacctataaaatctttttctttgatataccaacatccattgggataaatatcttgccagggccatccccctgtctagagc

SEQ ID NO: 6037 - DNA, 120 bp, synthetic construct
  source 1..120: mol_type = other DNA
gctgggagcaagatggctgtttagattcagctaatacgagcctcttccatggaaagaaacaaaagtatcaagtagatagtcagactttgaatagatggtctaagagattacactggaatt

SEQ ID NO: 6038 - DNA, 120 bp, synthetic construct
  source 1..120: mol_type = other DNA
gaaattatcaatgtccccaggagcaaagagggttggaaagggttagaaaatctatttaacgaaataatggatgaaaacacctcaagtctagcaagacacttggacatccagtcacaggag

SEQ ID NO: 6039 - DNA, 120 bp, synthetic construct
  source 1..120: mol_type = other DNA
aaagatactcctcaagaagagtaactccaagacacatagccatcagattcaccaaggttgaaatgaaagaaaaaatgttaagggcagctagagagaaaggtcaggtcacccacaaaggga

SEQ ID NO: 6040 - DNA, 120 bp, synthetic construct
  source 1..120: mol_type = other DNA
catctacagaactctccaaccaaatcagcaaaatatacattcttttcagcaccacatagcacttattccaagattgaccacatagttggaagtaaagcactcctcagcaaatgcaaaaga

SEQ ID NO: 6041 - DNA, 120 bp, synthetic construct
  source 1..120: mol_type = other DNA
ccagcatcatcctgataccaaaatctggcagagacataacagaaaaaaaaaaaaagaaaatttcaggccaatatccctgatgaacattgatgcaaaagtcctcaataaaatactgacaaa

SEQ ID NO: 6042 - DNA, 120 bp, synthetic construct
  source 1..120: mol_type = other DNA
ctttagatttcatatggaaccagaaaagagcctgtatagtcaagacaatcctaagcaaaaggaacaaagcttgaggcatcatgctacctgacctcaaactatactacaaagctacagtaa

SEQ ID NO: 6043 - DNA, 120 bp, synthetic construct
  source 1..120: mol_type = other DNA
atatgcacaactacatgctaattaactggaaaaaatattggatactgataaactcctgaaaacataaaactcaccaagatcgaatcaagaagaaataggacctgaacagaccaactgtag

SEQ ID NO: 6044 - DNA, 120 bp, synthetic construct
  source 1..120: mol_type = other DNA
aaagatggaaataatagacatgatgatttcaaaagggggaagaatagaatgtcctagccggaacaatcaaaacaagagaaagaaataaatagaatgtcccagccagaacaatgaaacagg

SEQ ID NO: 6045 - DNA, 120 bp, synthetic construct
  source 1..120: mol_type = other DNA
cttctaggaggaagtaaaccatagctttctgtggcacattctaaaatattttggccttgaatattctctacctgacagtttcacccgaaatgtgcttacttcccacttctttccaacact

SEQ ID NO: 6046 - DNA, 120 bp, synthetic construct
  source 1..120: mol_type = other DNA
tatatcctatatacatagaatttctatctgtacctggatcctgatattctagagaatctattctgggagctgtggtttatactataggagatacatccattcctaactatgctgtttttc

SEQ ID NO: 6047 - DNA, 120 bp, synthetic construct
  source 1..120: mol_type = other DNA
ggtgtgagttactatgcctggctgattctttgaatatcttggttaatctattttatctaagaaaatatgtcagctatcaaaaaagctattcatcaaagtgtcacaaaatatttatgcttt

SEQ ID NO: 6048 - DNA, 120 bp, synthetic construct
  source 1..120: mol_type = other DNA
actttaaaacgatagattcacagaacagagtgagaagtctgaatcagaagtctgaatctcttgtacagctgagttacagaggtttcctcaaatcatctctctagtagatcactcccttgg

SEQ ID NO: 6049 - DNA, 120 bp, synthetic construct
  source 1..120: mol_type = other DNA
gctaatagttctgatttcttcatgttttcttattttctattgaaatataagctttctgctagattttctacctgtccacttcctctgctattaagagaagtttgcatcttctagatttct

SEQ ID NO: 6050 - DNA, 120 bp, synthetic construct
  source 1..120: mol_type = other DNA
aaaacggcagcattttgattcagtttatactttgctcatcaatggcagaacaaactgatgcttatttgcatgggttggcttaccatccattgcttctttgacactgccgttactacacaa

SEQ ID NO: 6051 - DNA, 120 bp, synthetic construct
  source 1..120: mol_type = other DNA
ttacaaaaattttctctcattctgtaggttgcctgttcactctgatgatagttccttttgctgtgcagaagctctttactttaattagatcccatttgtcaatcttggcttttgctgcaa

SEQ ID NO: 6052 - DNA, 120 bp, synthetic construct
  source 1..120: mol_type = other DNA
ttcacaatattgattcttcctgtccatgagcatggaaggttttccatttgtttgtgtcctcttttatttccttgagcagtggtttgtagttttcattgaagaggtccttcacatcccttg

SEQ ID NO: 6053 - DNA, 120 bp, synthetic construct
  source 1..120: mol_type = other DNA
tagaattcgtctgtgaatccgtctggtcctgggcttttgttttggttggcaggctattaattactgcctcaattccagaacttgttattggtctagtcagggattcaacttcttctggtt

SEQ ID NO: 6054 - DNA, 120 bp, synthetic construct
  source 1..120: mol_type = other DNA
agttggagatgagacttaatcttatgagtggagggagtcagggctctctcatttcatttttgttatgcttggtcattctgtttatgtagtcacctatagggtcaaaatttctcctcctcc

SEQ ID NO: 6055 - DNA, 120 bp, synthetic construct
  source 1..120: mol_type = other DNA
gcggtaagaatggacacattgcatcatttactccttataacaagccttttgggaagtcattatgcctgttctgtagaacagaatatctggaatttgagcagctaagggattttctaaatg

SEQ ID NO: 6056 - DNA, 120 bp, synthetic construct
  source 1..120: mol_type = other DNA
tctccagcctaaaggctgtacttaatgtttaaaattggcattgaatccattatgaagtagcctgtagctgcattattaacgaatctgtcatgtgctgttaagaaaacaggttagttctgg

SEQ ID NO: 6057 - DNA, 120 bp, synthetic construct
  source 1..120: mol_type = other DNA
tactgtaattattttggtgttccacacaccacacccatataaggtggtaaaacttaatgaatgtgtgtattgagactctcattcaccaagccctctccctttcctctagtcctatttcct

SEQ ID NO: 6058 - DNA, 120 bp, synthetic construct
  source 1..120: mol_type = other DNA
caaaagacaggctgagtctcttgttggaggctagtgaagctggtgacttgaagttgaagccaatgcttattgaccattctgaaaattttaggtcccttaagaattatgccaaatctactc

SEQ ID NO: 6059 - DNA, 120 bp, synthetic construct
  source 1..120: mol_type = other DNA
caccacaaatttctaaccttcagaaaccaccaccttcatcagttagcacccatcaacatcgagacaatacttttaccagcaaaagtattacaacttgctggtttcagatgatcactaaca

SEQ ID NO: 6060 - DNA, 120 bp, synthetic construct
  source 1..120: mol_type = other DNA
cagtaggaaatgtgtttttaataattttcatatcatactcccaatgagtttctcatggagcagtaaagcctgaaagtatggaatcttttttggtctcttttttattcctgtaaacctcat

SEQ ID NO: 6061 - DNA, 120 bp, synthetic construct
  source 1..120: mol_type = other DNA
tatatatgtaatatattataatatgtattatatataatatatatgatatattatatatgttatatattataatatatatatatttgtactggtagatagataatgctagaaggatacttt

SEQ ID NO: 6062 - DNA, 120 bp, synthetic construct
  source 1..120: mol_type = other DNA
aattataaacagggttaggttctttctcaggacacccaggaaaaggcttttttctacatttggctgaaagacagtattagggttttatccctttgggggctgtgttgtataagaggatag

SEQ ID NO: 6063 - DNA, 120 bp, synthetic construct
  source 1..120: mol_type = other DNA
caaattatgcaccaacactgaagtaggtgggaagatgtgggactccaggtgtcatcagactaaacagatattcgtacattaggaactgatagcattcaagaataaacttccatgaactga

SEQ ID NO: 6064 - DNA, 120 bp, synthetic construct
  source 1..120: mol_type = other DNA
aaaactaagcaaaattgttaaagctgaaatggtcaagcgatatttctcaggtgttattctattcatctcttacttgttggtttgggcttggctgtggagaatggaggcaagcacatggca

SEQ ID NO: 6065 - DNA, 120 bp, synthetic construct
  source 1..120: mol_type = other DNA
tgggattctcttaatggctgaggtgggtaggatttctgtcttggaatcaaacagaggaagttcagtgactcagatgtgaattgatttcaagactcataagttttctttttccttacagga

SEQ ID NO: 6066 - DNA, 120 bp, synthetic construct
  source 1..120: mol_type = other DNA
cttacagtgtgaagctggggaagaacaaagttgatgcctttgtgggatgtcctttgttctcagtgatttttcatagtcaaagatgtttgggtcaaagtaaagagattattgccctgatac

SEQ ID NO: 6067 - DNA, 120 bp, synthetic construct
  source 1..120: mol_type = other DNA
attcatctaagtgctgggtgactatggtttttgtgcaaagctaactctctggtgggaagggaagactagttgtctagttacatctcactggttaagttctcagcacaaaaaaaaattctg

SEQ ID NO: 6068 - DNA, 120 bp, synthetic construct
  source 1..120: mol_type = other DNA
acttggaaaggtcatacttttttttaggtcaatgctaccttctaataaaatgatagcattttagggacaatctcttaatgggggtacccagggtttggtgcaaatcagacacggggcaga

SEQ ID NO: 6069 - DNA, 120 bp, synthetic construct
  source 1..120: mol_type = other DNA
gtctagggaatattcccattctcacctaatccagtgctataaaatcatgttgagcaatggagttgacaaaataatgaggaacttggagactatgtgcatgtctccctagtgagatgtaag

SEQ ID NO: 6070 - DNA, 120 bp, synthetic construct
  source 1..120: mol_type = other DNA
gtatttcttatacttctagagaccgtgaagtttgggattaaggtattagcaggtttggtctctggtttggagataatgccttgttactgtgtccttcagagagaaggaatgctgtgtcct

SEQ ID NO: 6071 - DNA, 120 bp, synthetic construct
  source 1..120: mol_type = other DNA
atggcttagacgccccatgaattgaatgtgacactagtcaggttttcgagaattttaaagaagcaaaaacaatgccagcctggacaaaaaagggacagagacatgataaaatgaagggat

SEQ ID NO: 6072 - DNA, 120 bp, synthetic construct
  source 1..120: mol_type = other DNA
gttcttttgaaaaagtttctactgcctactgtagccttcagaaatgttcatctgactcagaagcctcaaaagagagaaggatgagagcagatgttttgctgattgaatgtctgtgtccta

SEQ ID NO: 6073 - DNA, 120 bp, synthetic construct
  source 1..120: mol_type = other DNA
tattaacttcgaaaagttcatgtcatattaaccatattcttatgattgtggcaaactagtacgtaacaacagattcctcactattattccagtaagaaatattttgagagccaggcatgg

SEQ ID NO: 6074 - DNA, 120 bp, synthetic construct
  source 1..120: mol_type = other DNA
agatattgaacatcagacaacaaagaacagtgatactttagtgatgggaaacaaatgagatgtaccctgtgattgcttccgcttagtgcttggagaaagttacaaggccttagtgcagca

SEQ ID NO: 6075 - DNA, 120 bp, synthetic construct
  source 1..120: mol_type = other DNA
tttggctaacctctgcttaaggcctagtttagctgtctctttctcagaagcctttttctgatgcagcggaattgcttactccttttatgtgctaatactacttggtagatctctttatca

SEQ ID NO: 6076 - DNA, 120 bp, synthetic construct
  source 1..120: mol_type = other DNA
aacacaggacacctgcctattcccacaaagctgtccaattataaaatttggtttccgagttagttgtctacatgccatgtcctatatcaacctcatcagcattcacataacatctctcta

SEQ ID NO: 6077 - DNA, 120 bp, synthetic construct
  source 1..120: mol_type = other DNA
tggtataagagcagtaggacattataaattttataatgcaaaaggaaagaattttaaaactgaaaagatcctggaaatcatcggaatagcttttttaatgggccacaaaacaagtcctta

SEQ ID NO: 6078 - DNA, 120 bp, synthetic construct
  source 1..120: mol_type = other DNA
aattcctggaaatatgtaaccctcctagcttaaatcaggaagaattagaaacccccaacagatcaataacaagcagcgagactgaaatgataataaaaaattaccaatgaaaaaaaattc

SEQ ID NO: 6079 - DNA, 120 bp, synthetic construct
  source 1..120: mol_type = other DNA
gaggaagtcaaactgtcgctgtttgctgaggatataattatacgcccagaaaaccctagacttctcccaaaagcccctagaactgataaatgaattcagcaaagtttgaggatacaaaat

SEQ ID NO: 6080 - DNA, 120 bp, synthetic construct
  source 1..120: mol_type = other DNA
ttctgcacagcaaaaggaacagtcagcagagtaaacagacaacctacagagtgggagaaaatcttcacaatctatacatctgacaaagaaataatatccagaatctacaaggaactcaaa

SEQ ID NO: 6081 - DNA, 120 bp, synthetic construct
  source 1..120: mol_type = other DNA
ataaaataaaatacgaggaattaaaaaaacacacacacacatcaggtttcacaaactcttcagcatgtgggggagtgttgtgtgtctgtgttttcccactgagaagtccttgtcagtcta

SEQ ID NO: 6082 - DNA, 120 bp, synthetic construct
  source 1..120: mol_type = other DNA
aggtgtacctgatgcatgttgaaatttgagaaccactgtttgataaccgtagttgctttttttaagagcattcatgtaacacaaaggaatggctgtttgtcacaattctgagtcccacgt

SEQ ID NO: 6083 - DNA, 120 bp, synthetic construct
  source 1..120: mol_type = other DNA
ttagtacaggcactttggagaatagcatgaaggctcctcaaaaaaactagaattaccatattcagcaattttcagctagtttacagcaatttcacgtctgttatatccaaaggaattgaa

SEQ ID NO: 6084 - DNA, 120 bp, synthetic construct
  source 1..120: mol_type = other DNA
acaataagaatgttttgactatccctggtgagagacagaaaaaaagttctccaccaactccagagctaactctttcactgtccccagtaagatgcaagctgtcttgctcaggtaagttta

SEQ ID NO: 6085 - DNA, 120 bp, synthetic construct
  source 1..120: mol_type = other DNA
agaacggaatcgatgcttaaataatgaacttattgtgtggtttaaagtcttaaaatgatagaataatcctcacctatagaatgtcaatgtctgctgggcagttcaggatttcttcctttc

SEQ ID NO: 6086 - DNA, 120 bp, synthetic construct
  source 1..120: mol_type = other DNA
aatttttctcctctgtttatgactgctgttgtggtctgatggtaaagtgttttgtcctagagatctgtgggagcagtgtttcctccaaatacagcttaattctatgctgttggttttcct

SEQ ID NO: 6087 - DNA, 120 bp, synthetic construct
  source 1..120: mol_type = other DNA
gacctctgctatttaaagaatcaacatctcagccagaagtagtaacatgatgctgtgggtgggaatgggagctacagtttttctcttcttcctgattgtaatacttcctttgtatcactt

SEQ ID NO: 6088 - DNA, 120 bp, synthetic construct
  source 1..120: mol_type = other DNA
tttgattcaactacagttggcaagttcccaaggctgcagtaaagtaaatgggattccacttgtaagttaggagaccatatatggtgcattcttccagatcacaacatacaagggaaaaat

SEQ ID NO: 6089 - DNA, 120 bp, synthetic construct
  source 1..120: mol_type = other DNA
ctcatatgagatttaatgctgctgttaatctaacaggaagtgtagatcagacaataatgctcactggcttgtccatcgctcacatccttctgtgcaggcctaacaggccacagactaata

SEQ ID NO: 6090 - DNA, 120 bp, synthetic construct
  source 1..120: mol_type = other DNA
ttaatttaaatctcaagagtaaattgcttaatggggaaatgcagttcagataaaaatcaacctgaaatgttgcagcattattttctcctgggtttactgctctttaagacatctatttac

SEQ ID NO: 6091 - DNA, 120 bp, synthetic construct
  source 1..120: mol_type = other DNA
gcagcaataatgggcaagataagagagtgtttggaaagtcctttaaacaagattatctgtaacagggtctgtggttgatatgcctttttcatcctagttggtatgcattggctatatatt

SEQ ID NO: 6092 - DNA, 120 bp, synthetic construct
  source 1..120: mol_type = other DNA
ggccatgcaaagggcgcatccattccagacatcacaaatttctcttgaaaatatggagaagaatagaatatcaagggataaatggaccttttccactactgagtcacatatctaaccttc

SEQ ID NO: 6093 - DNA, 120 bp, synthetic construct
  source 1..120: mol_type = other DNA
ctctcaacatcttatgtaagtcgccatccctttacattctaattgcaatgatctgtaatcatttactcatttgtctccccagatagagtaagaaattcactaggcaagggactgcagcta

SEQ ID NO: 6094 - DNA, 120 bp, synthetic construct
  source 1..120: mol_type = other DNA
tctttcttaagatgttttgggttattgagtgtcaaatttgagcagcaagtaaaagaaaagggaagacgtcatacaggtgcccacaagaggcttctgaaacaccttcctctggaatataat

SEQ ID NO: 6095 - DNA, 120 bp, synthetic construct
  source 1..120: mol_type = other DNA
cattaactgggctcttattgtgtgccaggaactgttcctagcacaagaaacacatgaaatgaacctacaaaaatttctactctaaggaatatggagtctattgtcctgacagcatctaca

SEQ ID NO: 6096 - DNA, 120 bp, synthetic construct
  source 1..120: mol_type = other DNA
tgtgagtaaggtcattgataagttgaaagaagccaggtcatctatcaactttgtaacctgaacatccaattgatctttgtgagtccacttccctgcctgtagcttgggcaaaataatgaa

SEQ ID NO: 6097 - DNA, 120 bp, synthetic construct
  source 1..120: mol_type = other DNA
aaccagtgctcaggaatggcgaagacctcaccgttagttagcaagcattgatacagtaacttggtgcatagtcattcaacagatagggataatggaataagtgaataaaacactgaaaag

SEQ ID NO: 6098 - DNA, 120 bp, synthetic construct
  source 1..120: mol_type = other DNA
tttaaatgtctgtgtgggcttctggtgatggttgtggtggattaaacaagtagaaactatggaaataaatatgttgagggcagtatgacaatgaatgacagtaacctagcactgttccct

SEQ ID NO: 6099 - DNA, 120 bp, synthetic construct
  source 1..120: mol_type = other DNA
tgtctgacaaaaaactgtgttttcggtgcacagcattaaacacaggtttctgataattttaaatcaatggaccaaataaaattgtacataaagaaactgatggatccatgaaactgctaa

SEQ ID NO: 6100 - DNA, 120 bp, synthetic construct
  source 1..120: mol_type = other DNA
aaaatgagaactgctctgtccttaaagccctataaggtaatgctaggcaagttctaaagaacaattctcatgtctggtatatgaaacacagaaagttcacaaaaccgcctgatgccacga

SEQ ID NO: 6101 - DNA, 120 bp, synthetic construct
  source 1..120: mol_type = other DNA
ttccgagataacttgctgcaactctaggactaattttgtccacctctgtcactcaccaatgggagctggctaaactttctcgaaaaacaatacataaaatctatcctttcttaataaatc

SEQ ID NO: 6102 - DNA, 120 bp, synthetic construct
  source 1..120: mol_type = other DNA
attcccactttttcctgaaagtgtttccactttgggaggctggcacactgtagtccctgatctttctggtaacactttttttctcttcactagttattttgcttttccaagaagttgttc

SEQ ID NO: 6103 - DNA, 120 bp, synthetic construct
  source 1..120: mol_type = other DNA
tagaaaatctctatgtagagtctccacaagcactcaccccacttgaattccctttgcaacttctagttaatcaccttcatcttcccatgcttcagaccttgtagttatacagaactaatg

SEQ ID NO: 6104 - DNA, 120 bp, synthetic construct
  source 1..120: mol_type = other DNA
cctgaacaaggggcaaagggagtaaaattcatgtatcgctagtataaagccaacactggttccatcatactttatagtaatttccttgtctcagctgctcttacacagttgactcttgaa

SEQ ID NO: 6105 - DNA, 120 bp, synthetic construct
  source 1..120: mol_type = other DNA
gcaaatgcaattgggtttatgaccaggactgactttatctagaaatatactaacccccaaggactgaagggaaagcataaacaccagcttcaaatcttttgattatacaagaagacctgg

SEQ ID NO: 6106 - DNA, 120 bp, synthetic construct
  source 1..120: mol_type = other DNA
aatgaagatgagtacttctgaatgagtaccagacaaagaggtagcagatttggaagaagtagtaccagaaacacattggcattagagaatctgacagaggggttccagttactcaagact

SEQ ID NO: 6107 - DNA, 120 bp, synthetic construct
  source 1..120: mol_type = other DNA
taggaatggctcctctctctaacttcctagggaacccttcactaatatcatttccttgtagccatctttcgatagctcatgtctatgtccctgattacactctttgagaatggaaataat

SEQ ID NO: 6108 - DNA, 120 bp, synthetic construct
  source 1..120: mol_type = other DNA
gaacagattagagaacccagaaataagactccacacctacaactatctgatctttgacaaaactgacaggattccctattcaataaatggtgctgggataactggctagccatatgcaga

SEQ ID NO: 6109 - DNA, 120 bp, synthetic construct
  source 1..120: mol_type = other DNA
atgtcctttgcagtgacacagatggaacaagggccattatccttaggaaactaatgcagggacagaaaaccaaataccgcatgttctcacttgtaagcgggagctaaatcatgggaacat

SEQ ID NO: 6110 - DNA, 120 bp, synthetic construct
  source 1..120: mol_type = other DNA
ttccttaggatttagtgtcttccttttctacattttcccatattctatgatattcatccactcaaccttcatcactagccttgagtgcccagctaatctcttgacttcttcccttgcaaa

SEQ ID NO: 6111 - DNA, 120 bp, synthetic construct
  source 1..120: mol_type = other DNA
gtaaaactagctttcttccaaccaaacagaacatctccttgtatgtaaatcttacaaaatatccttacctgctttggacatcttttcatcttttttagtttcaggttctggggcaaaacg

SEQ ID NO: 6112 - DNA, 120 bp, synthetic construct
  source 1..120: mol_type = other DNA
atacttgagtgcaccttctgtaaaaagtagtatcagtgctattaatgcactctgacactctttggcacatatttctccccctttttgacacattcacttagcttggtagatacaccctat

SEQ ID NO: 6113 - DNA, 120 bp, synthetic construct
  source 1..120: mol_type = other DNA
tcttttcttcctaggacacagttcattagcattttgctcatcaataataggtatctatttgaaacagccttgcttcccactctgcacacggctttcactcctgtcaatcatattgtaatc

SEQ ID NO: 6114 - DNA, 120 bp, synthetic construct
  source 1..120: mol_type = other DNA
tataataatacaatatctaatttctgtaaacatttgccactgaagcccttcgttttgggctacacgtacaagcattggggaaatatggaaccaaaaagtccccatgctaagttgttgagg

SEQ ID NO: 6115 - DNA, 120 bp, synthetic construct
  source 1..120: mol_type = other DNA
tatatttaaaagcgggtcacaaaacctactcctgtaaaatatataaaggaacattagcagtgttatctctggtcaaccataggtgaatttcagtatgagggggtctggaaaacgtggtgg

SEQ ID NO: 6116 - DNA, 120 bp, synthetic construct
  source 1..120: mol_type = other DNA
atgagataagcctccctaaataagtcttaagaggaatgcttattttgcaaagattcagtctgctatactagatggtatctgatttcttctgctgcagacacaatgctttgtggtccggat

SEQ ID NO: 6117 - DNA, 120 bp, synthetic construct
  source 1..120: mol_type = other DNA
ttcctgagtattcaagtactaatattgaaataacagatctccattgattagatgacaatttggtctgccttattgaagggagcattggcgaacacttcacttttcccctgtcccagctct

SEQ ID NO: 6118 - DNA, 120 bp, synthetic construct
  source 1..120: mol_type = other DNA
gctgagtggacattaaacacataaaatgggccacagggcattctctcttttcagcacagaataaatgcatacattgtccctgccttattctgtcatcatttcattttcatggtcttttgt

SEQ ID NO: 6119 - DNA, 120 bp, synthetic construct
  source 1..120: mol_type = other DNA
ctcagtgcttggatacaatacttttgtatagctaatgcttgcagagaaaatcctggccccctcaactacttttgaaaataatacatgacctctttccatcctatcaacttgacattttgg

SEQ ID NO: 6120 - DNA, 120 bp, synthetic construct
  source 1..120: mol_type = other DNA
tgaaaggtgccttttgggataagtctctgagaccaactgtcttgattctttcttataaaagcagactacacaacacatactccttcaataaatcattgagctttcccctgcaggtttgta

SEQ ID NO: 6121 - DNA, 120 bp, synthetic construct
  source 1..120: mol_type = other DNA
aagagatatagagtcttatattctaagcatgtccttttctagtatcccatctcaaagtcccatctcacttcagtgtagcatctcattttgattgaatctggcttctaacatgttgaagca

SEQ ID NO: 6122 - DNA, 120 bp, synthetic construct
  source 1..120: mol_type = other DNA
atgcacattgatttttgcgttgttttgtttagtcaaaatcattttaaaatgcttgtatctctcccataagccatattatcaacctagtctaaatcactccatattttccacattttctcc

SEQ ID NO: 6123 - DNA, 120 bp, synthetic construct
  source 1..120: mol_type = other DNA
cctattaactgtagcaccagagaactatttacggcaactgtttttcaccttcttttcttgaatgggggttccacttcagtatctggttaattgcattgagacttgtgtaaaatccctgct

SEQ ID NO: 6124 - DNA, 120 bp, synthetic construct
  source 1..120: mol_type = other DNA
gactgttccaatatgtgtgagatggtggtgatcccctttaatgaaagagaaagcctaatgagacaacacctcctacaggtgaaagttaaagtcactttgcatgatatgattacactttgc

SEQ ID NO: 6125 - DNA, 120 bp, synthetic construct
  source 1..120: mol_type = other DNA
gcaaaattaggaaagtatgacttaaggctatagttttatacattgctacactcactaatggtggctctccatgcatccttcattcctcttactcatctttctgtcagctttcctctcccg

SEQ ID NO: 6126 - DNA, 120 bp, synthetic construct
  source 1..120: mol_type = other DNA
tctaatgctgtctccactacaaactgtaactttgaaaaaggtcttgactatttgggcttcatttgtctgtaagacaagaggattggactacagtttctaagttcctcctagctatacaat

SEQ ID NO: 6127 - DNA, 120 bp, synthetic construct
  source 1..120: mol_type = other DNA
tgcaattataagggaaagaaagagatctatcctttcagcccctttttctattcccaccatattatttgggtgaaaatacagagactgtgatggtggtgcttgtaaatggagatgccactc

SEQ ID NO: 6128 - DNA, 120 bp, synthetic construct
  source 1..120: mol_type = other DNA
tgtcccagtttaggaagtccacagacttctctgaggaatctctaactacccaaggaagtgaggaggatattaaatctgacaaaaaagtgaagagattattacatggaaactctgcacttc

SEQ ID NO: 6129 - DNA, 120 bp, synthetic construct
  source 1..120: mol_type = other DNA
gtgagtccactggtccaggaaagtcaataactgaaccagcaacaaaagttggcaagacatatcattctcctgattttttttttctttgcaacggtcatccctagaactctatatgtcctt

SEQ ID NO: 6130 - DNA, 120 bp, synthetic construct
  source 1..120: mol_type = other DNA
cattgcccaaagtgtagctttggagttaagccccaacctttcttttgagctgctttcatagtgaacaataacatgtggttcaagtattcctgtgatataagtgcagactaaaataaagac

SEQ ID NO: 6131 - DNA, 120 bp, synthetic construct
  source 1..120: mol_type = other DNA
ttttgctgaaacaaatatgtaaagtaggtatcaaggtgcctggcaaagagtagatgcaccacttttggacttcctccaaacaattaccacacctttaaaggcaaactcttcaccttctca

SEQ ID NO: 6132 - DNA, 120 bp, synthetic construct
  source 1..120: mol_type = other DNA
cttttctaatttctgcaagagagatcatgggaagaaaaagttacaaggaataagagaggaaaaaaatgcaagtctcttcatgtgttttgtatactgaggcttaagatcacagggcatctg

SEQ ID NO: 6133 - DNA, 120 bp, synthetic construct
  source 1..120: mol_type = other DNA
ccagccagacatctgactgcaatcacatgagataatcaagtgaaaacagcctactgtatcctcctgaagtcctgacctactaaatgatgaacaacatgaaatcagctgttgttttacacc

SEQ ID NO: 6134 - DNA, 120 bp, synthetic construct
  source 1..120: mol_type = other DNA
atttctgttttgaaagtattgtgtttcatatgtcaacaggacgcccaaaaaggaaacatccagcaagcagttggaaaaaacaggtgaagtgcagatcatttacaggtgctgcaaagcaac

SEQ ID NO: 6135 - DNA, 120 bp, synthetic construct
  source 1..120: mol_type = other DNA
tggacttttcttctgatggaaagaataattgtaaagaaccacctggcaagctttatctgaaagtgaaacgatatctgataatttcccagagtgtaacttataacgcacatcatcacacag

SEQ ID NO: 6136 - DNA, 120 bp, synthetic construct
  source 1..120: mol_type = other DNA
cttagctgaggggcttctcttgaaacaatctaaataaccttttcctttgactaaattctggttcaatttcataattactaggttttgaggctgtgtgcctcggctgcaagcattggagta

SEQ ID NO: 6137 - DNA, 120 bp, synthetic construct
  source 1..120: mol_type = other DNA
atacctctgggagcatcctggattataaagtagatatcaccacaaattgttcctaaaagtgaacagggtgcctatctgaatcaccaaataacatcaatgttcttcataactgccagcctg

SEQ ID NO: 6138 - DNA, 120 bp, synthetic construct
  source 1..120: mol_type = other DNA
ttctgctactcatggtataaaatttcaaaatatacttcaaaattaacttagtgaactggactaattcttcgagatttccgtgcactcgagttagtggtgcagcacaccaccaaggcacat

SEQ ID NO: 6139 - DNA, 120 bp, synthetic construct
  source 1..120: mol_type = other DNA
taccagaatttatttatctgttcacctattgaaggacatcttggttgcttcctagttttaggaaatacgaataaagctgatataaacatttgtgtgcaggtttttgcatatacataagtt

SEQ ID NO: 6140 - DNA, 120 bp, synthetic construct
  source 1..120: mol_type = other DNA
tctgtagctcaatttaggaagaattggcagcttgacaatactaagtcattgtatcaatgaatatggagtatctctcaatttatttagtttctgtttatttcttttacgtggtttccctcc

SEQ ID NO: 6141 - DNA, 120 bp, synthetic construct
  source 1..120: mol_type = other DNA
agaaactgttctttgtgttgtgcttaccagaatgacagagtgtctctcctgtggataaagaagtccaggacccctagaatcctttctcttgaaaatgatattataaaaggaggacacaag

SEQ ID NO: 6142 - DNA, 120 bp, synthetic construct
  source 1..120: mol_type = other DNA
acttgcaatcagaagacagcttgttcttcagcattgggggcaatgtggaaatgtcttgagcatggaaaacatgtcttacaagtgagaattgaacaatattagagatggaaggtcctttag

SEQ ID NO: 6143 - DNA, 120 bp, synthetic construct
  source 1..120: mol_type = other DNA
atctttgctctgaccactcagctttgtaatgtagcagcttgtaatatactttctattaaagattcttaagggaaaaagagatacaacctactgtggcttcagcataatagcaggagtgaa

SEQ ID NO: 6144 - DNA, 120 bp, synthetic construct
  source 1..120: mol_type = other DNA
aaaagaccagtgcatacacaaagaagagaagaatctgataaggtggatgaggacagtgatagatttacaaagcttgcaatagcacttgggttttgcctggtgttgtgacaacgtaaaaca

SEQ ID NO: 6145 - DNA, 120 bp, synthetic construct
  source 1..120: mol_type = other DNA
tctgaaggagtaagatcctatctctaagaaccatttccagtctcttgtccactagaggagacattataaaattaatgaaactgacaccaatgtgatgatcagaagaaagaaacaatgttt

SEQ ID NO: 6146 - DNA, 120 bp, synthetic construct
  source 1..120: mol_type = other DNA
aatgacatgagggaacgacaattaaaattattagcacacttgagctctaagagaagccacatcactttaaatgttttaagtttagtgtactgtagcatttttctcaagcagagtctggag

SEQ ID NO: 6147 - DNA, 120 bp, synthetic construct
  source 1..120: mol_type = other DNA
ctccactgtcttggttgttttctcttccttctttccaggtacagctgcaaaacaaagataaggtttaaagaagagttccagacagaaatactgcttctgctcaaaaaaagcattttggag

SEQ ID NO: 6148 - DNA, 120 bp, synthetic construct
  source 1..120: mol_type = other DNA
agaaatgtgtctgtagccaacttaacccactgatgaaacttagaaacattcattcatatcaggacatccagacatcttttgcttcctgatgagatgccgtgtagcatatacagtatcatc

SEQ ID NO: 6149 - DNA, 120 bp, synthetic construct
  source 1..120: mol_type = other DNA
attagacagtgtgaggaagaagtgatatttgaagagataatagctagaacttctccagaatttcaggcaccagcaataggactctggaagcacaagaaatctaagtagggaaaggatggc

SEQ ID NO: 6150 - DNA, 120 bp, synthetic construct
  source 1..120: mol_type = other DNA
tcctaatggataccactcagtcttgattactcctgtaggtttaagataattcttgatatctactactacaaaccttccagtttgatcttgttcaggattgtcttggctattcttagacat

SEQ ID NO: 6151 - DNA, 120 bp, synthetic construct
  source 1..120: mol_type = other DNA
agcttgcatttctgaaattaaaccaacctgactgcattttatctttcatacgtactagcagacttaatctgctaatattttgtttagacctatgcctctaggtttacaagaagtttatat

SEQ ID NO: 6152 - DNA, 120 bp, synthetic construct
  source 1..120: mol_type = other DNA
gaaagacaaaggagtgggaaagacttagatgttcctagaggaagtgtagtttgagcagaggatttccagagaggagataagggatagtctaaaaatagagaataggaccaaatgcagaaa

SEQ ID NO: 6153 - DNA, 120 bp, synthetic construct
  source 1..120: mol_type = other DNA
gaatagtggtgaggaagtgaggagtggtaagaaaatattgtgccgtttgaagtgtccctcatatgacacatattacttcggagaggtagacctacagccatagcatgataaactattatt

SEQ ID NO: 6154 - DNA, 120 bp, synthetic construct
  source 1..120: mol_type = other DNA
atgagggcagcatgaggttatttcagtggttctggtagaagacaatgaaggcttgaattagtatggcagtaatggctacaaataagagaaaatatgctcaagaaacagaaacagtaagtt

SEQ ID NO: 6155 - DNA, 120 bp, synthetic construct
  source 1..120: mol_type = other DNA
gggagagagagagaggtgtaaatcaaggaaaagaagtaattttaatcagagaaaaaacatttccaagatgaggaacaatgccagtaacaagaaagaggaggacgccacaaaatggtatgg

SEQ ID NO: 6156 - DNA, 120 bp, synthetic construct
  source 1..120: mol_type = other DNA
tccttgttctttccccaaacaaatgcaaatgtaaatgttaccttatctcatcatgaccagacaagctcaattacctccatgcaaagggcaccaatgtatacatctccagcctatcattgt

SEQ ID NO: 6157 - DNA, 120 bp, synthetic construct
  source 1..120: mol_type = other DNA
ccttgctctgaaatctatgcccaggatatttttttctaactcatttacatagcaaaaccccatctcttatttaaggcttaactctaaagtcatcttctgccgtaaacattgtcttttccc

SEQ ID NO: 6158 - DNA, 120 bp, synthetic construct
  source 1..120: mol_type = other DNA
ctgacaagcaagtctacgtaaccccaaccaaaatgtttggccatactctataaactcagtgaccattcttagttgaggactctggtgagttcactaattgatggttcaatttcaattctg

SEQ ID NO: 6159 - DNA, 120 bp, synthetic construct
  source 1..120: mol_type = other DNA
ctatttggacatcttgttgcttttagctttgtctaatttttgaacataagttggccacacttttgtcctttcaacataaatcagtgccttggccttaagtccacttactgggcccatgaa

SEQ ID NO: 6160 - DNA, 120 bp, synthetic construct
  source 1..120: mol_type = other DNA
agtggagtatgtgtgtaagggtatgtgtgcaggtttgcgtgtgtgtatgcatcagtgtatgttgaggataggcttattaaattgtctcttgatatacttccaaagacattggctacatta

SEQ ID NO: 6161 - DNA, 120 bp, synthetic construct
  source 1..120: mol_type = other DNA
tgagccaccacgcccggccatagtctacaaattttaagttacatatgaattatagagaagagcatttaaaagggcttctttgtttagcttttaatcatggttgagtctgctaaaagttgt

SEQ ID NO: 6162 - DNA, 120 bp, synthetic construct
  source 1..120: mol_type = other DNA
aagtgacatacataacctcttcttcgagctatctcaataccctgggcttcaagactgaacagactcctggctgttttataccttccaggtaaagactttagatcaatggctcttaaactt

SEQ ID NO: 6163 - DNA, 120 bp, synthetic construct
  source 1..120: mol_type = other DNA
actcatacaattacatgatctctgacctccttggcctcctcaattcagaaaactagaaactccacttctctggcaatttccaactatatttgtaccctcagaattttcctttactgccag

SEQ ID NO: 6164 - DNA, 120 bp, synthetic construct
  source 1..120: mol_type = other DNA
tcttccctccttaaacatcctacaacataaaagtaagctgctgttgagaaattcatagagaaaataggggcagactaaattacatcactgttccactaccacaccagcacatactcatcc

SEQ ID NO: 6165 - DNA, 120 bp, synthetic construct
  source 1..120: mol_type = other DNA
gtaccctagataaatgacacatttttctccctaaattctgcattcacatcagcagcatacgtgagagtttcttttgctccgtatcactaccatcaccagaataagcctattccctaattt

SEQ ID NO: 6166 - DNA, 120 bp, synthetic construct
  source 1..120: mol_type = other DNA
tgaaatcctgtccctttttcccctacctcttcatgtcttaactgaacctagattttacttctgtcagtattcatcagtctagctctttgtgtcaaccttgatgaacattcttggactctg

SEQ ID NO: 6167 - DNA, 120 bp, synthetic construct
  source 1..120: mol_type = other DNA
gaggtggaataaagtgacctgggacagtgctacccaaggttctgaaaaatagtgatccttgatgtgatcattgaaagagaaaggggtgatgtggtcacatatatttggtaaacaatgtct

SEQ ID NO: 6168 - DNA, 120 bp, synthetic construct
  source 1..120: mol_type = other DNA
tcctacagtgatttcgggtgtttcctcaggacctagagtaaacaatcccatactacaaactcaatccactttccagttatggcctttaatccagtcttaatgacaaatccccttttactt

SEQ ID NO: 6169 - DNA, 120 bp, synthetic construct
  source 1..120: mol_type = other DNA
aaacctcagcactaaataacaggcatttgttttatgtattagtagcatcaccagtacttgtttacctctaacctctcaaaaaatatataagcacattgatgtcacgcatagaactgagga

SEQ ID NO: 6170 - DNA, 120 bp, synthetic construct
  source 1..120: mol_type = other DNA
gggataagtaatattgcatattcagcacaacaaataatcataccaaaaagctggtaagccattctcaaaattagcattagcatagtctatagcagaaaattcaaatgagtaagctgccca

SEQ ID NO: 6171 - DNA, 120 bp, synthetic construct
  source 1..120: mol_type = other DNA
gatttgggctgtctcaggatattttataatctttaaaaatgaataataaatgtggattcaaacctgtagttttccgtggtttgtggtagggtgagactacagttgggcccctttgcgtgg

SEQ ID NO: 6172 - DNA, 120 bp, synthetic construct
  source 1..120: mol_type = other DNA
cacattgaggagcaagagtgtaacatttggctttcattttctaaaactgcattgatgttatgtccatgtcaagaacttggaaaaaacactgtgagatggaagcattccccaccctttact

SEQ ID NO: 6173 - DNA, 120 bp, synthetic construct
  source 1..120: mol_type = other DNA
atgagccacagcaccgcagcttattgcagttattttaaaataattctcagaaagatgaagattagcacatttcacgtggactgcctcttctaagaatcttcttacatggaagaaatagct

SEQ ID NO: 6174 - DNA, 120 bp, synthetic construct
  source 1..120: mol_type = other DNA
tgtggtataatgagcaacttatcctcttttaagacagcctttaagcagcaaaacaaaaaaatgaaacaaatggcttggccaagtgttgcaggtcaaaaagaagaagctatgacgatttag

SEQ ID NO: 6175 - DNA, 120 bp, synthetic construct
  source 1..120: mol_type = other DNA
taagttattgagcttgactgaattgttagcacacagtcttaatagtgttaaagcaacagtggatgaggctgaatagcaaccctattagacagagctcatagtgagtgtaggggggaaatt

SEQ ID NO: 6176 - DNA, 120 bp, synthetic construct
  source 1..120: mol_type = other DNA
acacatgtgaacaagtctaggaggcacaggtatacttgccaaatgaattattcaagaccgaaaggaagaaatcagttcctaattgatgccagtctatcaaaaagtaatttagtgtgtgct

SEQ ID NO: 6177 - DNA, 120 bp, synthetic construct
  source 1..120: mol_type = other DNA
tctatttcgtggtcaaaagacatcgatttcatttatagtagacgggcattcagcctagatctgataaatttattattttctattatttaggccatgaaactttctgctcccaccacttga

SEQ ID NO: 6178 - DNA, 120 bp, synthetic construct
  source 1..120: mol_type = other DNA
atatttagggaaatgcttttctcaggatattgctttgtgtctctcagtaatgggcatattaaacactaccctctgaacaataagagagtgttgatgaatttgtggtatattcatacaata

SEQ ID NO: 6179 - DNA, 120 bp, synthetic construct
  source 1..120: mol_type = other DNA
agccaacaggaaaagcacaggaggattatgaagagaacatggtcatgtaggaataaattcaacctaaagtttgggggaaatgtgggaacacagagaagatgaaacatggcatattagaac

SEQ ID NO: 6180 - DNA, 120 bp, synthetic construct
  source 1..120: mol_type = other DNA
atggctggttctcagtggatttctatctttcagaagataacctggaattcctagaattccggttgctaggaattcatcactcaatctgagtttagatgaataaaatctacctggatctgc

SEQ ID NO: 6181 - DNA, 120 bp, synthetic construct
  source 1..120: mol_type = other DNA
ttttggtgtgtggggcaacaaccttggagagctggaacctctggctactcttacatttgctatgaaagtaataaattgtctcaatctcaaaaagggatcattgcatctttactgttggaa

SEQ ID NO: 6182 - DNA, 120 bp, synthetic construct
  source 1..120: mol_type = other DNA
tatagaaccactgaaaagatctcagagacccacaggagtccttgaccactgattttggagattattgatctagtttacatgagaagttagtaagaccaacatgaggtcacaaatggcaat

SEQ ID NO: 6183 - DNA, 120 bp, synthetic construct
  source 1..120: mol_type = other DNA
agacagaatagcagtcaaaacccaactcaggatattggtaaattgtactcacaaaaggctcagtgggattttgcataaaacataccttccttcttttcatccttcttagctgctgctgaa

SEQ ID NO: 6184 - DNA, 120 bp, synthetic construct
  source 1..120: mol_type = other DNA
gctctttcaggtacatcctcttattgggtcttcatcctgaccttgttataaaaggcagcccagagcagaaaatgaagcctctgaaacattaaaataatttgcagagtataagcagcagaa

SEQ ID NO: 6185 - DNA, 120 bp, synthetic construct
  source 1..120: mol_type = other DNA
tacttctggtcctcaaattcagcttgcctggttctaatctacttaactctgttatgggattggatgactcctgaatttactgagtagacatggttctcaataactgggtttttggttttc

SEQ ID NO: 6186 - DNA, 120 bp, synthetic construct
  source 1..120: mol_type = other DNA
taatttaattatatgcctatggcattaaaataaacatatctaagaaagatctatggaggatttgcaaagacgcgaatgatatgcagttctgctttgatgtgtccctgcattggtgtgtca

SEQ ID NO: 6187 - DNA, 120 bp, synthetic construct
  source 1..120: mol_type = other DNA
catagcttttaatcattctagcttattttgctcacagacaacatcctcgagtcaaatggcatttaacaaacccatgttaccaatattttcgggggtgattctgcatgttgctgggtccaa

SEQ ID NO: 6188 - DNA, 120 bp, synthetic construct
  source 1..120: mol_type = other DNA
tactgaaacttggagccaagactagttcttgggtccttcagcagttcctctgcaaatttggcattactctcagtcatgcttgctccaattactaaataaatacttgaactgtgtattttc

SEQ ID NO: 6189 - DNA, 120 bp, synthetic construct
  source 1..120: mol_type = other DNA
tcttttgccaaaactgaattcagtctacccttgatatttacataattaattttttttctggaggaaaactgcatgcatgctagtaccatctttgtcaaacctagactaaatggtctcaat

SEQ ID NO: 6190 - DNA, 120 bp, synthetic construct
  source 1..120: mol_type = other DNA
ctcattgtcccgcgtccaacacatgccaaagaaaacagtccacaaatgcacactgatgcattgaagatactgtttccaggtaaaagtgtattttaaagaggtcattctacaatgtctacc

SEQ ID NO: 6191 - DNA, 120 bp, synthetic construct
  source 1..120: mol_type = other DNA
taactttagtggcaaatggactgctacactgtcagcagccagaattggtctttggctaatggacagcaggtaaagaataatagtattgctgagaaacctacccacatcttacatgttttt

SEQ ID NO: 6192 - DNA, 120 bp, synthetic construct
  source 1..120: mol_type = other DNA
tcctaccacacagactttatcctggttattgacaatacccagcccactgacctccacagtacagatttccatttcaatgtgaaatcatataattatttactcgtacaacttcccttccta

SEQ ID NO: 6193 - DNA, 120 bp, synthetic construct
  source 1..120: mol_type = other DNA
tgtacttataactccaggaaagcatatttcatgggcattgcttcatttcagtatgataattaccctattgagatgaaattaatcatgaagcagcctttggccatcctgtgtgaccaaggg

SEQ ID NO: 6194 - DNA, 120 bp, synthetic construct
  source 1..120: mol_type = other DNA
atacctgtcttagaggggtcctagatgtttttgcctaaagcaaagagacagtaccagctggtcactcaaggttcctttctaccttctatagcaactttctaaaatcagtgattatgaaca

SEQ ID NO: 6195 - DNA, 120 bp, synthetic construct
  source 1..120: mol_type = other DNA
tggggacccgtgctctaatgcccactttacatataaggtagagagagtgctttcctcattaaagggtgtcatagaacagtatgatctaaatatagcacttaaaaaaccagcccctttttt

SEQ ID NO: 6196 - DNA, 120 bp, synthetic construct
  source 1..120: mol_type = other DNA
gaatgctgtgtgaaaaaatgctaaataaagtgtatggtactctgagttttagagattggcaatttttaaggaggcaggatatagacaagatttaaaggaggccgggtgtagtgcctcatg

SEQ ID NO: 6197 - DNA, 120 bp, synthetic construct
  source 1..120: mol_type = other DNA
aataagatagacttttgtcttagtacattgagcgctactgcatttttgggcaggaaagttacacggcagtgttttgaagagataaaagtgtccatgattgtctgggaaagggcttctgtc

SEQ ID NO: 6198 - DNA, 120 bp, synthetic construct
  source 1..120: mol_type = other DNA
gtatctgcctagggagataaagtacatcttagtctggaaatcaaaattcccctattaaaatagcaggaatacacagctgtttcctagaaggacagtactctgatcaatgatgacaccttg

SEQ ID NO: 6199 - DNA, 120 bp, synthetic construct
  source 1..120: mol_type = other DNA
cccatggactgttctttagttcacgtttgtgtcatggttctaagagttcaaatgctttaactgtcagctcacatgctaatgctctagataaataaatgggcttctcaatattggcttccc

SEQ ID NO: 6200 - DNA, 120 bp, synthetic construct
  source 1..120: mol_type = other DNA
aggcaaacacaattggtttctgtattacatgacgaggccggaaatggctaaaggaagggtgcagtagaggttaccgtgataaattctcagaccaaaaagtttagtaattctcatctttca

SEQ ID NO: 6201 - DNA, 120 bp, synthetic construct
  source 1..120: mol_type = other DNA
gatctgtatcattactttgtaagataggccactaggcctggactaaactgcaagcattctgaccctagcccagcatgttgtcaatataacaagaattaccacttctcttcaaaataatgc

SEQ ID NO: 6202 - DNA, 120 bp, synthetic construct
  source 1..120: mol_type = other DNA
tgtttctatctctcctcctaagctgcacactcccataaaattcccatatgcatcttgtttttttcttttggctcatggcaccctctctgtgactatggacaatacatactctttctcttt

SEQ ID NO: 6203 - DNA, 120 bp, synthetic construct
  source 1..120: mol_type = other DNA
attttacgagtgatatatagcactttaaagtggaacccatagaatactagtccagatagatgctcttctccacaaaagcagctcagggtcaaataacactggagagcactgcatacaaaa

SEQ ID NO: 6204 - DNA, 120 bp, synthetic construct
  source 1..120: mol_type = other DNA
aattcattgaaacaagacacctgtccatccagaagaccagtaaggggtgatattttatgaaagtaacaactggtattcaaacaaaggggaggtggagagaggaggataaggatttgaaca

SEQ ID NO: 6205 - DNA, 120 bp, synthetic construct
  source 1..120: mol_type = other DNA
tccaagagctgtgggcagatataagagatcaaattggtaagacatttctatgcccaatcacataaagtaaaacagaacaccatgcattttctccccttttgcaagcacctagcatcagga

SEQ ID NO: 6206 - DNA, 120 bp, synthetic construct
  source 1..120: mol_type = other DNA
gagggaacctgggaaagggcagtgaagagtagcctgaggatattaaatagcaaagatacccaatacttaatctgtatttattaatattgccacatagtaagaactttccccatcccctct

SEQ ID NO: 6207 - DNA, 120 bp, synthetic construct
  source 1..120: mol_type = other DNA
tatgaatactcttctgggtctcttaatgttctgtaagcaagatgcctgatcatcattggttacatctctttatcaacagactgtaggctcagctgggaacttaccaaactcggatatgta

SEQ ID NO: 6208 - DNA, 120 bp, synthetic construct
  source 1..120: mol_type = other DNA
ttagtaatgactaaatccagagactctcagaagaggatgaagccccctactcaccattagacatctctaccagattaagagttatccattactaagtgttggttagtaaaggttcaaggg

SEQ ID NO: 6209 - DNA, 120 bp, synthetic construct
  source 1..120: mol_type = other DNA
agtgttacctcatgtttaacgagaacgtactccataggatatatagaaatatgtgagttataggaattttcacattgccatgatattctgagattcattgcttgagggaggctgtccatg

SEQ ID NO: 6210 - DNA, 120 bp, synthetic construct
  source 1..120: mol_type = other DNA
agaacttgcaggtgactgaggcaaggctcaaagccagacagtctaagcaggtagcccttaagataaacacccatgtaatgttaaaacatagttctttctatcccatatgtaaatttatat

SEQ ID NO: 6211 - DNA, 120 bp, synthetic construct
  source 1..120: mol_type = other DNA
aaacacagcaccttccatattctctatccacttgccctctcaattcttcatagcaagtatcattctcggatatcatactacatgccctttatgatttgtctccttcactggactatgaag

SEQ ID NO: 6212 - DNA, 120 bp, synthetic construct
  source 1..120: mol_type = other DNA
aaatcacaaaggtcagccaatgagaagagaaaagaggtttcttttttcctcattcccccacgtatccttgcccttttgtactgtaaattgcacaagctggcatttaaatgcacaatgtca

SEQ ID NO: 6213 - DNA, 120 bp, synthetic construct
  source 1..120: mol_type = other DNA
tatagtttgacaaagtctcatactttgagactttgcaaggtactctttcctctacactcaacccccaaccccaacataaagccactgactccattccatcttctcggtttataaagaaaa

SEQ ID NO: 6214 - DNA, 120 bp, synthetic construct
  source 1..120: mol_type = other DNA
agcttctgagatggagcacaatcatccacactggacatctctgagaataaaagaaagtgtgatgaataattatgtcaatgctacaggagaaaactggtgtgtatgtcaccttaaccttgg

SEQ ID NO: 6215 - DNA, 120 bp, synthetic construct
  source 1..120: mol_type = other DNA
tctcatgtgatggaagatgcttcctttgtttattcaatgggtggattcagcatctgcttcatactggcattatactaggtgctagatactcagtgtcgaaaaaaacagaatggactcact

SEQ ID NO: 6216 - DNA, 120 bp, synthetic construct
  source 1..120: mol_type = other DNA
acctcttttgactttttcaggaggactcagccatagaagtaattatatacagatggccaactctgcatcaataggctttgcataggtgagcgccaccattttttgcagatcaggaatatt

SEQ ID NO: 6217 - DNA, 120 bp, synthetic construct
  source 1..120: mol_type = other DNA
gatgggaaaagttatgggagatgggaaaagagagattcagagagagagccatgataatacccttcataactctgaatccaacattcctcccattggaattccaagaaaagcaatctaata

SEQ ID NO: 6218 - DNA, 120 bp, synthetic construct
  source 1..120: mol_type = other DNA
tgcactcactcaaattaccatctataaaaataaatcatcttccttttttcctttttacttaaagactatggacagcactctggcctaacttgggtcatgggcccacactcatggggaaag

SEQ ID NO: 6219 - DNA, 120 bp, synthetic construct
  source 1..120: mol_type = other DNA
accgtgagttctattggaaatggaagaaatttcgtcaaataacaaatgattacaaatggcaagcatgtgtgattaggacctcagttaatggctttgctgcatgagaaaagctgcccaggt

SEQ ID NO: 6220 - DNA, 120 bp, synthetic construct
  source 1..120: mol_type = other DNA
aaaagaaaacaagagagtgaccagagaacttaaaaggaaagaatgttgtctaagagggtgagtgaagaaagagataggctgtgaaatgctcttgagaaggagttcacctttggacatggt

SEQ ID NO: 6221 - DNA, 120 bp, synthetic construct
  source 1..120: mol_type = other DNA
gacagcccaagtggtttaccacattccgctgataggcttatatcacatgttcaagccatggtgtattttcttctttctcctcagatttgtataacatatattttcacctctacatcagca

SEQ ID NO: 6222 - DNA, 120 bp, synthetic construct
  source 1..120: mol_type = other DNA
ccactctttctctgtttgaaaacttcaaatggcagtgttcactgacttaaaagattccccatataatcttaaacatcccacattgtctacttctaacttccaccatggagtcctcattct

SEQ ID NO: 6223 - DNA, 120 bp, synthetic construct
  source 1..120: mol_type = other DNA
gtgtcttggtcaaatacctaattacataggtcggtggtgtccctgttctagatctctaatagtcactcacctaccacaaaagagaagtaatttctatacttctgccttgatttttgcgtg

SEQ ID NO: 6224 - DNA, 120 bp, synthetic construct
  source 1..120: mol_type = other DNA
ctatactggcagaatttgctgttgtttcaaaaatacgcttttgggatccctagagaggctgcagttgagggagatatcactttgatgtttttaaagctttacttgcactgaaaggaaaat

SEQ ID NO: 6225 - DNA, 120 bp, synthetic construct
  source 1..120: mol_type = other DNA
cacacctctcaagttcagaggtgatcttgtttttgtcctcagagagggtagccccaagtccccaaaataagcattaaaaagattaaaaatagtcgcatgtatactagtcctcttttcagg

SEQ ID NO: 6226 - DNA, 120 bp, synthetic construct
  source 1..120: mol_type = other DNA
ggatgcatttgttaaatcttgcccaaatacatatttgcaaaactccagaaaaaagataactttctaaaaccaagtgcttttcaaataaggagaaagatgtgggtgatcagaaaaaaagct

SEQ ID NO: 6227 - DNA, 120 bp, synthetic construct
  source 1..120: mol_type = other DNA
attctgtttatgtacatcgggcactagattgaactattaaagcaaaactagacaaaacacaaaagactttactcctcctacagccgtaatccttcccccttccccgcaaaatctacactt

SEQ ID NO: 6228 - DNA, 120 bp, synthetic construct
  source 1..120: mol_type = other DNA
cctcccttgtcaaactgtaagctccattagggcagatcttgtctgtttatccacttctgtgtactcagcacctagtacaaagcttggcatatagtaggcattttttaaatatttccttca

SEQ ID NO: 6229 - DNA, 120 bp, synthetic construct
  source 1..120: mol_type = other DNA
ttgcctcaacatttccaggatctagtctttgtggttgtgagaagacagtgctggtgaacaaagcagtctcctaacctgttgatctgccctgatgcttaataatccaaattttgattattt

SEQ ID NO: 6230 - DNA, 120 bp, synthetic construct
  source 1..120: mol_type = other DNA
taatcaaaagtaaaaatgacaagcatacaaacagaaaactggctccaagaaagacaacactagctgaatagtcctgcctagatgtgctgagcaattactcagtttggtctctgcttcggt

SEQ ID NO: 6231 - DNA, 120 bp, synthetic construct
  source 1..120: mol_type = other DNA
tcctatgtatgctcttctttttagggtcctcaccaccatcattttttccacatacattattactacttagaaaaggaaagattttcactaaaatgccgtctaacccagcctgccctcccc

SEQ ID NO: 6232 - DNA, 120 bp, synthetic construct
  source 1..120: mol_type = other DNA
actacttcttaccatgcagatataagactgaaagtttacgttttgagggggaaaagccaatatgcaaaaacagatgtcctgtgattccccataccagccattacaaacattcctgcgttt

SEQ ID NO: 6233 - DNA, 120 bp, synthetic construct
  source 1..120: mol_type = other DNA
cagctttcctaacatatattgaaaagaatatattgaatgttctctgagctatgaggtcaccagaaccatgtcaaaagttctgaaatctctgaagttcacttgggacatcagataaattat

SEQ ID NO: 6234 - DNA, 120 bp, synthetic construct
  source 1..120: mol_type = other DNA
ttagaccattaaaaaggtatcttttgatgtagctgtttttcatatctggctcttgccaacaggcatttaagcctgatgacaagtgtctggcagtgtgttggaaacataacttccacggtc

SEQ ID NO: 6235 - DNA, 120 bp, synthetic construct
  source 1..120: mol_type = other DNA
ttgtggtgatacagtattcttgtcttcgtccaaattgaattaatgctcctattatacactctgcttgtgattacagtcatacactgtgagagtcatgaataagagcagaagtccacaaaa

SEQ ID NO: 6236 - DNA, 120 bp, synthetic construct
  source 1..120: mol_type = other DNA
atgatggctgtattctggcagggatcacagaagagtgtggttgggaaagaaatcttccctacaatgagcagctctgagccacaaatatgttattagcttctgcataaattaacatcagat

SEQ ID NO: 6237 - DNA, 120 bp, synthetic construct
  source 1..120: mol_type = other DNA
tctatatccagggagggtatgtctagaatattttgtattaagaaactaaagggaaaaaaatacccataagcaagacagaaacatgttatgaagggtactgtactgcaatgaagtggattc

SEQ ID NO: 6238 - DNA, 120 bp, synthetic construct
  source 1..120: mol_type = other DNA
gatcagggtaaacctttctgaatgggcaattggaaagattattgaaaaaagtggaagagctttgggctattagggagaagacttttcagcagaggaaaaatacctgcagagatcctgaaa

SEQ ID NO: 6239 - DNA, 120 bp, synthetic construct
  source 1..120: mol_type = other DNA
cactatgttgaataggagtggtgagagagggcatccctgtcttgtgccagttttcaaagggaatgcttccagtttttgcccattcagtatgatattggctgtgggtttgtcatagatagc

SEQ ID NO: 6240 - DNA, 120 bp, synthetic construct
  source 1..120: mol_type = other DNA
acaaccccatcaaaaagtgggcaaaggacatgaacagacacttctcaaaagaagacatttatgcagccaaaaaacacatgaaaaaatgctcaccatcactggccatcagagaaatgcaaa

SEQ ID NO: 6241 - DNA, 120 bp, synthetic construct
  source 1..120: mol_type = other DNA
cagccaagatgtagtagggcagatctcctagaatctttttactggtatgaattttccatttccctgtgagtaacataggaagccagtgagaggtttaagcagagaagttatacaattctg

SEQ ID NO: 6242 - DNA, 120 bp, synthetic construct
  source 1..120: mol_type = other DNA
gccagctgaaggaactgaggtacagtcatagctcatgtcttgcagatgcagttgagaactcagtgaagctatatcattcatgaaataaatgttgtaaaggactctaggtcttatctgttt

SEQ ID NO: 6243 - DNA, 120 bp, synthetic construct
  source 1..120: mol_type = other DNA
tctcacccccatcccccacagcagctacagcaagacccacccaaggagagtctgagcccagacattcctagccctgcccccgtttgatggtccttccctacccacccaggtagcagaaga

SEQ ID NO: 6244 - DNA, 120 bp, synthetic construct
  source 1..120: mol_type = other DNA
aagcttccaagaagtctgggattatgttaaatgaccaaatctaagaataatcggttttcctgaggaataagagaattctaaaatcttgtaaaacatatttgggggaataatcaaggaaaa

SEQ ID NO: 6245 - DNA, 120 bp, synthetic construct
  source 1..120: mol_type = other DNA
atattgcaatcctaaatatatatgcacctaacactggagctcccaaagttataaaacaattactaacagacctaagaaattagatagatagcaacacaaaaatagtgggggactttaata

SEQ ID NO: 6246 - DNA, 120 bp, synthetic construct
  source 1..120: mol_type = other DNA
aatcaggaagaattagataccctaagcagaccaataacaagcagcaagactgaaatcataatttaaaaattaccaacaaaaaaaagtccaggaccagttggattcacagaattctaccag

SEQ ID NO: 6247 - DNA, 120 bp, synthetic construct
  source 1..120: mol_type = other DNA
aaggagtcgaaagacctctacaaggaaaactacaaaacactgctgaaagcaattatagacaacacaaacaaatggaaacacatcccacgcttatggatggatataatcaatcttgggaaa

SEQ ID NO: 6248 - DNA, 120 bp, synthetic construct
  source 1..120: mol_type = other DNA
tcaaaaccacaatgaaacaccaccttactcctgcaagaatggccataataaaaaaaataaaaaaacagtagtggcatgtatgtggtgattagggaacacttctacactgctggtggggat

SEQ ID NO: 6249 - DNA, 120 bp, synthetic construct
  source 1..120: mol_type = other DNA
atgagcttgtatgcactagaatatacttcattctcaggtaaaagtctacacatcttataacctgtgaggaaatgggctcaggaaagatgacgaatgtggccaacttcacaggtcatatga

SEQ ID NO: 6250 - DNA, 120 bp, synthetic construct
  source 1..120: mol_type = other DNA
aagagagaagaaaagaggagcgagacgggagaaggaaaaggagatgctatattttatttttccactcagtgcttttgcatttcagaaggcaaatgctcaaagtttactgacttggactca

SEQ ID NO: 6251 - DNA, 120 bp, synthetic construct
  source 1..120: mol_type = other DNA
ccaagactgtttactccatctatgtaaaatacacttggtcttgaagatgcagccacttttctcactcattctagagagggaaaggatgacgccatttggaattgtaacaagctggtataa

SEQ ID NO: 6252 - DNA, 120 bp, synthetic construct
  source 1..120: mol_type = other DNA
cagtcaagacagacagatgcccctatctatcttggcagctgtagagggtaagaaaaacaaaactgcttcctcttatggataggacagtgagaaaaagttaattgttttcacaaaaggtct

SEQ ID NO: 6253 - DNA, 120 bp, synthetic construct
  source 1..120: mol_type = other DNA
ggagaatgctgactaaatcaatgtgttctacatttcctttcttgggtctatgctgtgttctaaacagcctcagattcatggctgacctgctctttagttatgtttgaagctaacctttgt

SEQ ID NO: 6254 - DNA, 120 bp, synthetic construct
  source 1..120: mol_type = other DNA
tctattctcttgcctcttcaggcataggagtgataaaggcttcctactttggctagctcttggggctccaccataaccctgcaaacctttaaaagtactatattcattaaactcttttaa

SEQ ID NO: 6255 - DNA, 120 bp, synthetic construct
  source 1..120: mol_type = other DNA
tcctctgtatctatacaaattcaactaacttactctttatggctcaatgaaagacttgaggtttcacttgataaccttgcctcatttatatctcatcttcctccttttacagcctttatg

SEQ ID NO: 6256 - DNA, 120 bp, synthetic construct
  source 1..120: mol_type = other DNA
aatggaatcatatatggtaattttgcttatacaaggattttatgaaacaacttttctgccttccttggtaatcgggaagagggcgggcaacattgcctgaagttgttctgtttaaccgct

SEQ ID NO: 6257 - DNA, 120 bp, synthetic construct
  source 1..120: mol_type = other DNA
agcctgattaatactaaatatgtcctagctcctaatcaattatgttaacgaagtcataggcagcacatctgcaagccctgacaaagcccatgatctcagcattgcctgataatatagact

SEQ ID NO: 6258 - DNA, 120 bp, synthetic construct
  source 1..120: mol_type = other DNA
atgagcctctgctaggagataacttggcatcaaacacttgaataatctgactatcaaagtctccctcaagttgggaaatctgaattcgttgctttatgtccatctggaaacaacaacaga

SEQ ID NO: 6259 - DNA, 120 bp, synthetic construct
  source 1..120: mol_type = other DNA
aatctggcaccagcctcttcagagactaaattgatcaagttgtggtaaaactcccagagttgcaaggcatagccttatctatttgtccctatatttttttgcttgattcccaaagtgcta

SEQ ID NO: 6260 - DNA, 120 bp, synthetic construct
  source 1..120: mol_type = other DNA
ttccataaacttctgctgtgtgttttttatccagaaatcaacatgcaacatgggcatgtgtaacttctaaaatctcactgacaactagatattatcaaatgtcagcagacctgccttact

SEQ ID NO: 6261 - DNA, 120 bp, synthetic construct
  source 1..120: mol_type = other DNA
aggagtgaagcctctactctaggtttctactttctcggtgggtcaaagggatatatacttggaaagatctattccccaaccttgtttgagggccattcttgaaaaaataattttaaggta

SEQ ID NO: 6262 - DNA, 120 bp, synthetic construct
  source 1..120: mol_type = other DNA
aaattctgcacaactataatgctctttttattctgctctctaacatggctgatggcatggttgtaaggcagtggacacaatgggtaacaatgggaaagtaggaccacaagcaaaaaaaaa

SEQ ID NO: 6263 - DNA, 120 bp, synthetic construct
  source 1..120: mol_type = other DNA
cattcgaactctaaaggtgcccttcattttacaagctattacctgaaaatccctctgacattcaaacacagtaagttggcttcatttctgttccttgagtgatttgggctggcttatttc

SEQ ID NO: 6264 - DNA, 120 bp, synthetic construct
  source 1..120: mol_type = other DNA
aagaagttcaggagtttgtgtgaggtgggcaggcacaggatgtttttacttcaaacagacatccttataccttccatttgtgtgttgctaaatgtcaccactgtactttgcgtttctttt

SEQ ID NO: 6265 - DNA, 120 bp, synthetic construct
  source 1..120: mol_type = other DNA
ttaaactggatagtaaaggaagagcaggaccccactaaactatatggagttttgtgcaaatcacatgaacacacgtagaacattttaggctgctcatgtgactttggatttgtcctaagg

SEQ ID NO: 6266 - DNA, 120 bp, synthetic construct
  source 1..120: mol_type = other DNA
tatgtgaccctactataaggtgtttaaaacaccaacagcttaaacttcttagatcaaaggacatcctccaggccaaaatgtttccactggaacggtttctttgcttcctgattaaaagct

SEQ ID NO: 6267 - DNA, 120 bp, synthetic construct
  source 1..120: mol_type = other DNA
ccaggctttcttaggaaaacaaagcagccgggaagctcgaactgggtggagcccaccacagctcaaggaggcctgactgcctctgtaggctccacctctgggggcagggcacagacaaac

SEQ ID NO: 6268 - DNA, 120 bp, synthetic construct
  source 1..120: mol_type = other DNA
aggatattatccaggagaacttccccaatctagcaaggcaggccaacgttcagattcaggaaatacagagaaggccacaaagatactcctcgagaagagcaactccaagacacataattg

SEQ ID NO: 6269 - DNA, 120 bp, synthetic construct
  source 1..120: mol_type = other DNA
cagaaagtcaacaaggatacccaggaattgaactcagctctgcaccaagccgacctaatagacatctaaagaactctccaccccaaatcaacagaatatacatttttttcagcaccacac

SEQ ID NO: 6270 - DNA, 120 bp, synthetic construct
  source 1..120: mol_type = other DNA
tcaatagaaaaagagggaatcctccctaactcattttatgaggccagcatcattctgataccaaagccaggcagagacacaaccaaaaaagagaattttagaccaatatccttgatgaac

SEQ ID NO: 6271 - DNA, 120 bp, synthetic construct
  source 1..120: mol_type = other DNA
aagctaccaatgactttcttcacagaattggaaaaaactactttaaagttcatatggaaccaaaaaagagcctacatcgccaagtcaatcctaagccaaaagaacaaagctggaggcatc

SEQ ID NO: 6272 - DNA, 120 bp, synthetic construct
  source 1..120: mol_type = other DNA
tagaactggaaataccatttgacccagccatcccattactgggtatatacccaaaggactataaatcatgctgctataaagacacatgcacacgtatgtttattgtggcattattcacag

SEQ ID NO: 6273 - DNA, 120 bp, synthetic construct
  source 1..120: mol_type = other DNA
agacgttgaatggacttgatatatcccacagaagaggcccagtacttaaagaccagtctccatgttagctgaccaatttctgcagttctagatagagtaccaactgggatattttttaaa

SEQ ID NO: 6274 - DNA, 120 bp, synthetic construct
  source 1..120: mol_type = other DNA
tattaaacttgaagagtgttttagcgccagcagagttcactgagaacattgaaacacaaacaaaatggatgacttgccaaattcatccaactgacttacaactaggacccaagtatgcgg

SEQ ID NO: 6275 - DNA, 120 bp, synthetic construct
  source 1..120: mol_type = other DNA
ttaatcgatccctgctatgaatacagaagagatatcagttctcataaggcggttgtttaccaacgaagttttcacaatgcatattcctgaatatgggtacattgaatacgtcatagcctc

SEQ ID NO: 6276 - DNA, 120 bp, synthetic construct
  source 1..120: mol_type = other DNA
cctggttcaatttcctaatttctgagttgaagaggttataacccacttcacagggctttgtgagaaatacataagatgatccatacctagaacttagcacagtacctgacataccattag

SEQ ID NO: 6277 - DNA, 120 bp, synthetic construct
  source 1..120: mol_type = other DNA
gctcattacccaaacactgtggatggttacaatagaaagtggtttataggtgacactttttccctcaggaaagcagcatgttaatcacaaagcagaaatacagaatcaaatagggcagtg

SEQ ID NO: 6278 - DNA, 120 bp, synthetic construct
  source 1..120: mol_type = other DNA
acgccttgataaggcctgttctaaccactgtggccctctctctggaattttgtagagaatataatctgcatcatatgatttagtgcttaattagcaccttcttctatttttctcccacag

SEQ ID NO: 6279 - DNA, 120 bp, synthetic construct
  source 1..120: mol_type = other DNA
tagtcccagtgggttacctgagaaggaatttattcttgtctgacagcaagtccatgccattaatagtgacaaagctagaccaaaaaagccactttaaggaaagttctctcaaagcaaaga

SEQ ID NO: 6280 - DNA, 120 bp, synthetic construct
  source 1..120: mol_type = other DNA
tctcatttcttctctcattgtagcctaattctgtatgctgcctgcagtctactcatgcatgcagcaaacctgtctttgttaattctgagcttctgtctctagagatataaccaataactc

SEQ ID NO: 6281 - DNA, 120 bp, synthetic construct
  source 1..120: mol_type = other DNA
tgagggcaggtaccatacatattttgtttattgctatatctacatctactaggaacttactagtactgttcctagaattcagaagacaaaccacatttgcctaaattctgcagggactac

SEQ ID NO: 6282 - DNA, 120 bp, synthetic construct
  source 1..120: mol_type = other DNA
tttccgatcccataaacagactactacccatcatgcttcatgaaatgctgctttccttcattgttctgcttaaagtccttcaaagacttccctttatgccaaatatcacctctttctgat

SEQ ID NO: 6283 - DNA, 120 bp, synthetic construct
  source 1..120: mol_type = other DNA
caaagtgacctcatttgcaattccctatctatgtctgggaaacagatagatttggtataaagataatactgaagactgtggaattcggcagtcttggatttgaatctcctgtctgctgct

SEQ ID NO: 6284 - DNA, 120 bp, synthetic construct
  source 1..120: mol_type = other DNA
aaatcttggcttgcgtgaccaccgagtttatatttttcccattggttctcattacactatcagggtccactggagtcaatcagagtttttttagtttcttttgttaagcagttctgttta

SEQ ID NO: 6285 - DNA, 120 bp, synthetic construct
  source 1..120: mol_type = other DNA
ctgaaacaatgaataatgctgaattctatgtatgctgtgttttcttgatctgaaaaccgagatacctaataagtgtctcacagacaggtagcttagagagcgtggatacatcggacaaag

SEQ ID NO: 6286 - DNA, 120 bp, synthetic construct
  source 1..120: mol_type = other DNA
aattagagtgaatatgtttttatggaactatgcctaccttggagcaggatttttttcagaagtctaaagcaaagctaaatggtacctagtcttgtctaatacaagcagtgagctctgaaa

SEQ ID NO: 6287 - DNA, 120 bp, synthetic construct
  source 1..120: mol_type = other DNA
acttgggtgactctgcccagaaacccatgcaatttattaagcccagatagaagttggtgaagaaggaatatgaaaatgccaagcaagatcctgatgtgttttcttaaaaatagtctacct

SEQ ID NO: 6288 - DNA, 120 bp, synthetic construct
  source 1..120: mol_type = other DNA
ttgggacttatgtcatagtgtcagcacatttcatcagcaagcgttttcaaattagaactgcaatttgggttacttttgagggtgtgacagtacaaaggaaaaactgaatcccagagggaa

SEQ ID NO: 6289 - DNA, 120 bp, synthetic construct
  source 1..120: mol_type = other DNA
agaactaggaattatcttcaggggttggaatactctataatgttgtaggtctgaacttaggactttttagagtatgtttgcatatgcctttagaagggctctctctgtgcggtcgttaac

SEQ ID NO: 6290 - DNA, 120 bp, synthetic construct
  source 1..120: mol_type = other DNA
gccaccacacccagccctaacattgaatttttgatatatatagactgaaacttgtaagtgttgagaggttctcttcatgtagggaactcaccaggcaggcagtggtgaaatgaacaaatt

SEQ ID NO: 6291 - DNA, 120 bp, synthetic construct
  source 1..120: mol_type = other DNA
agaagaaggaaaaggggaggaggaggaaattatttaactagaataaattactgggatcaacaacattttccggagtgcaaaggttctcattgtctagttttctagagcctagatgtgtta

SEQ ID NO: 6292 - DNA, 120 bp, synthetic construct
  source 1..120: mol_type = other DNA
agaggaaattgtttccaacttggagtgttttatcaaatactcagttccagcccttctgctaattgtctctatggagcagcagaatgtcttttccaaaagactatcaggagaactaacctc

SEQ ID NO: 6293 - DNA, 120 bp, synthetic construct
  source 1..120: mol_type = other DNA
aaactcataaagttccaaaaatttagatgtattttagttgttgaaattggagcacattttcccacaggagaggtagggaatgggaaggaggctagtcctcaggtcattccatgcattgat

SEQ ID NO: 6294 - DNA, 120 bp, synthetic construct
  source 1..120: mol_type = other DNA
ctgacaatgtaatgaaacttttcagcttgtatgttgaaatattatcaaagtacagtcagccctccatttccctgggttccacattggagcattcaacaaaccacacgcctgtaatcccag

SEQ ID NO: 6295 - DNA, 120 bp, synthetic construct
  source 1..120: mol_type = other DNA
agtactttttccccaaataaacatccttcttggaataacacatgctgtccatttctctccttcttgattctcaggaagcagtgatagatgtcattcaaatgatacctagttggtgttccc

SEQ ID NO: 6296 - DNA, 120 bp, synthetic construct
  source 1..120: mol_type = other DNA
atgaaaagaatgcctcaaacatattaggtctaacttaactatgtgaatgagtattctcttgcccaaaaagctaactcaacagttagcttagttgagctaactcaactaagtcatcatata

SEQ ID NO: 6297 - DNA, 120 bp, synthetic construct
  source 1..120: mol_type = other DNA
tgtctccaagaaacaccaattacaggaatagtctctacatgttagatccccgtattctgtaaaggagtctcaggattatacagcaaactggagtcaggaatggacttaggaaaagaaaca

SEQ ID NO: 6298 - DNA, 120 bp, synthetic construct
  source 1..120: mol_type = other DNA
actttaatgtcttttacccccatttgaagtctgattttggtctttttcaacttttaatttcactgcatgtgcttcttgcccaatattctcttagaacctccggcagcctcctgctctgaa

SEQ ID NO: 6299 - DNA, 120 bp, synthetic construct
  source 1..120: mol_type = other DNA
atagtaacttagcatgtcaacaaggaggcatttgtagcatgcaggggatggatgtacaggaatttctgtgaaagacaatttccataccaaacagcccagtgaagtagtctccttttataa

SEQ ID NO: 6300 - DNA, 120 bp, synthetic construct
  source 1..120: mol_type = other DNA
tgctggttagcttgcaaaccaaaaatcatctgtggtatcgcacttaattgactacgccagcacttcccaaaacactgtttctcagatacttcagatatttacaggaagatgttgatactg

SEQ ID NO: 6301 - DNA, 120 bp, synthetic construct
  source 1..120: mol_type = other DNA
gttgacctgggctcacagctagttgctggagctctaaaaatcagcataataataaaactacctgaataaattttagcacagcaaaattaaaaccgtgcaatatctggcttcctcctatct

SEQ ID NO: 6302 - DNA, 120 bp, synthetic construct
  source 1..120: mol_type = other DNA
gacatcagcatatttgattcaatcttggaattagcgtgatccattagctactgcatcagattcagaatgtctgatgccaaagtattaaatagaatagtatccctcaagaaacatactaca

SEQ ID NO: 6303 - DNA, 120 bp, synthetic construct
  source 1..120: mol_type = other DNA
cacactgacatccacatcaattagacagcctggcccaaacttggctcacctcactcaacttctcttttcatcattgttttcttctttttcttctaccttgtctctgttgtttttaatgaa

SEQ ID NO: 6304 - DNA, 120 bp, synthetic construct
  source 1..120: mol_type = other DNA
gaactgattggctagtagtccttgaggaactgaatctcaccaacaaccatatagtgaacttgcaaatggtgcttcctcagttgaaactaaagatgagactgaagtcctagttaacacttt

SEQ ID NO: 6305 - DNA, 120 bp, synthetic construct
  source 1..120: mol_type = other DNA
gcttcaaatatctcattattttacatttagtagctaaactaaatcttaaaaatgcttctgagttttacctaaatgggtagtttcttaaaaatactgaattgaggcttctagctaattgcc

SEQ ID NO: 6306 - DNA, 120 bp, synthetic construct
  source 1..120: mol_type = other DNA
aagttgtcacctaggctttgtgttttactagaggctagaggaaagaattggctttaatgcttattgaacttggaggcagaattcatattcttctcacgttttcaagacagccaatgggca

SEQ ID NO: 6307 - DNA, 120 bp, synthetic construct
  source 1..120: mol_type = other DNA
taacagttgtattgaattcaatgttaaagtctaggcattaagacttagcaagcttgttgaaaatcagatctactctttctcaagtcattatttcaaacaggtaaagctttcagggaagac

SEQ ID NO: 6308 - DNA, 120 bp, synthetic construct
  source 1..120: mol_type = other DNA
ccacaggtacctccactaccacttgggattatgggtaatagattagacaatgttaacaaaaggagcattatgctaggctaagcaaggcactattcaaacaaggtcacaggactacattat

SEQ ID NO: 6309 - DNA, 120 bp, synthetic construct
  source 1..120: mol_type = other DNA
atattggtggctattgaattaattcttgaatgaagattcaaagccagaaagaccacaagaaaatgtcagcatatctaaccacctaaaaattcaagaatctaaacatatgcacacatgcat

SEQ ID NO: 6310 - DNA, 120 bp, synthetic construct
  source 1..120: mol_type = other DNA
aatagggaggaaaataacatggattatctggaaaacatacaataaagctctggaaggatgcatgtaaaattcacatgagtggtctactgtatgtgggtttggcatgaaatgggagccagt

SEQ ID NO: 6311 - DNA, 120 bp, synthetic construct
  source 1..120: mol_type = other DNA
gtacccaaaccaagtctgattgcaaagataagaatacccccgtcagcttttccaaatctttaattgaaataattggaaaattttaaaaaattattatgccatatgccaaaggagcccggc

SEQ ID NO: 6312 - DNA, 120 bp, synthetic construct
  source 1..120: mol_type = other DNA
caaccccatgtttaccaacccaatgtcatctacaaagaatttctccttgaactttatattctcattataactaaatgctagtagctccacaagcacaccacatgccctcatgatgccttt

SEQ ID NO: 6313 - DNA, 120 bp, synthetic construct
  source 1..120: mol_type = other DNA
caccttggacagctggttgtccattccactaaaggattttcagattgacgtgtgcaaaggcataaatgggagaattaacacaaaatcaaaagagcaaagggactgaattcggactgaaat

SEQ ID NO: 6314 - DNA, 120 bp, synthetic construct
  source 1..120: mol_type = other DNA
agggaaaacactcccttggggtcaaatcatgggagccaggttatcagagttctttacttaatcgtcctgttcttaggttgaaaatcaaaaattgtaatgccaaaatttgtaaagtactga

SEQ ID NO: 6315 - DNA, 120 bp, synthetic construct
  source 1..120: mol_type = other DNA
tcaaaactacgcagccatgtctgttccaggttctgtgcagactataaacttgttctcataagccaaaatgtgctgaccgaattctccaagcacattatctgtgatctaccttccaataat

SEQ ID NO: 6316 - DNA, 120 bp, synthetic construct
  source 1..120: mol_type = other DNA
actttggacttccagcctcaataaggtaatattaaggctaatgttaagaataatagtaataattagacttctgttgcagcccttgaaccaagttcccacctggttccctgaggactgatg

SEQ ID NO: 6317 - DNA, 120 bp, synthetic construct
  source 1..120: mol_type = other DNA
tgccgcctaccgggccatcctattgtctaggagccttcttggaaaaagttcacatatttagttatatatttaccactgggttcctgtcttttctgatttgttctgttctacaagtaaatt

SEQ ID NO: 6318 - DNA, 120 bp, synthetic construct
  source 1..120: mol_type = other DNA
tggattagcatggacctgaggggttaatgctgggaaatcagttaagaagtgactgtcacaatttaattgagagatgattgtggagaagatagcagttggagaagagagaaagtagactaa

SEQ ID NO: 6319 - DNA, 120 bp, synthetic construct
  source 1..120: mol_type = other DNA
cctggcaacaatggcttctagatgtttagcatgaataatttgggtggacagtgatgtcagtcattaggacaaagaatacagacaggtgcagacattttctgcaatagatgttaatatggg

SEQ ID NO: 6320 - DNA, 120 bp, synthetic construct
  source 1..120: mol_type = other DNA
ttatcagtccctctaaactctgactgactggcatgcatgcttgtcaagacttctttctaaatggggcctttaagtaatcctttgactccacgatgctgtttaagtaattagatctggtga

SEQ ID NO: 6321 - DNA, 120 bp, synthetic construct
  source 1..120: mol_type = other DNA
ggtgctacagactcagcaggcaccaaagaacaaaaagaagaaagaaaattggatataggatatactggaaaagccacatgttcttacgttagagataacaggcaaaaatgtggctctaca

SEQ ID NO: 6322 - DNA, 120 bp, synthetic construct
  source 1..120: mol_type = other DNA
aaaaactttaatttgaaaccatcaccctaatgtggaatcagcgttcttggaggtaacttgtactagagcactctgcttggtactcaaaactactccattgtggttaactcattctgcctg

SEQ ID NO: 6323 - DNA, 120 bp, synthetic construct
  source 1..120: mol_type = other DNA
actcccaaggctctcccgatgagttccatgcttctaaaacctttcagaatatcatattgtcccttgaaggggaaaaaaactatagagaaatagaatgtgatctagcttccaccataacga

SEQ ID NO: 6324 - DNA, 120 bp, synthetic construct
  source 1..120: mol_type = other DNA
agtcatggttcgcttagtcaatccgtactcaagagctgtgtccaacttctgtgatcaaaggaattaagaaccgaaaaaaggaaagagaacagtaaggagacattagtttcctaagtacaa

SEQ ID NO: 6325 - DNA, 120 bp, synthetic construct
  source 1..120: mol_type = other DNA
tgaaataagggaaaaattggagttatctcaaaattagagttatttggaaaagcttaaacatttaatagacagagctatgttgtcaccattttcagtgctaaaattggtcacaaactataa

SEQ ID NO: 6326 - DNA, 120 bp, synthetic construct
  source 1..120: mol_type = other DNA
tatggtgatgaagatatgaacaggtaaggcactcattcttgtccctgaaaacaattctccaaaatgtaaggaaatatctccaaatgacataggaaatgcccatcttcctgtctctctcac

SEQ ID NO: 6327 - DNA, 120 bp, synthetic construct
  source 1..120: mol_type = other DNA
attttgcagattttgtataatttggatgggcttctctgatttctttggaaagccttaaaaacaggcctgagattgcccagggcaaaaggagaaattctgcctgtgaatgacaactttggt

SEQ ID NO: 6328 - DNA, 120 bp, synthetic construct
  source 1..120: mol_type = other DNA
tgctcctcttagctcttgtgtactcagacatatcctgacaaaggaaatgagtgctaggtagtagcagtaactgaaatgagcaagggaccatcctgaaaaaaagaaataaagacaaatctc

SEQ ID NO: 6329 - DNA, 120 bp, synthetic construct
  source 1..120: mol_type = other DNA
catggcgtgccagttctgtctccttacactttagccaggaaatgatgctattcaagctcctgtccaattcagtaacatgttactaatttagactttggaaaggtatttttctcataggga

SEQ ID NO: 6330 - DNA, 120 bp, synthetic construct
  source 1..120: mol_type = other DNA
ttctggtggctggtagggaggtatgagtgaagataagggaggaaaaagtagtatctcctcttagatccttatcgctattcatctctcactccaagactaaaagcttttgaaatccaaaga

SEQ ID NO: 6331 - DNA, 120 bp, synthetic construct
  source 1..120: mol_type = other DNA
aaatattttaaatttctgttagaaatacaagggaaagttgcaagattttactacttatggaaataagatatgccaaaggtacttataaactgcaacgattggccaggtgcagtatctcac

SEQ ID NO: 6332 - DNA, 120 bp, synthetic construct
  source 1..120: mol_type = other DNA
cgtgtgctgaatgtcccataggaacatacaattactcaaagggtgtaatctctaaaacttcaccaaactccaagtgaagattcacttcattagtttttcttcctcctcatgaggccgttt

SEQ ID NO: 6333 - DNA, 120 bp, synthetic construct
  source 1..120: mol_type = other DNA
acaaatatttctggggaaagcgtactactcaccattaatgaagactataaaaaggaatactctctcccccttgaagcacctagtatgtgtatgacttaatgggcaaccactccagataca

SEQ ID NO: 6334 - DNA, 120 bp, synthetic construct
  source 1..120: mol_type = other DNA
gaatcgtaaaatatcatagctagaaaagacctggacatcagtaaatctggcagttttgttttacaggtgtgagaactgagagccactgaagtgacttgaccatagctggttaacagcaga

SEQ ID NO: 6335 - DNA, 120 bp, synthetic construct
  source 1..120: mol_type = other DNA
tggtcccatactagctgctaggagagaaaagcctgcctgagactgaaacaaatgaaacagaggaaggaaagcaggttccagaagtgaagaaagaggatttactaataacatgattaaaaa

SEQ ID NO: 6336 - DNA, 120 bp, synthetic construct
  source 1..120: mol_type = other DNA
tcctcatgcagcctgagagcgatatgcgatggtgcagttatggagatgagctttgatctagatttatttagaggagacatccaaagataaatgtatacttaacaatgttactagggctac

SEQ ID NO: 6337 - DNA, 120 bp, synthetic construct
  source 1..120: mol_type = other DNA
tagattggcttctggtgttttcctctaaggcaagagataaacctatagcccataaggccaccatggtcctaaaattaaagatcagtttctcctgtccaaaaaactaaatatgcataactc

SEQ ID NO: 6338 - DNA, 120 bp, synthetic construct
  source 1..120: mol_type = other DNA
tgtccgaattctgtattagtgattagctaaggatatacattgtaccgtcgtgaatcttagacctctgtgctttgctctcactcagaaacctaggagttacccagaaagcaaaatgtttat

SEQ ID NO: 6339 - DNA, 120 bp, synthetic construct
  source 1..120: mol_type = other DNA
caattcctttaaatctctctgcagttttataccccttagaaagtgaggtgctaacagatccatgatgtataccctggtgtgaaaaatattgcttaaaagcacacttccagatgtgcaaag

SEQ ID NO: 6340 - DNA, 120 bp, synthetic construct
  source 1..120: mol_type = other DNA
ttcaggtgatttaaagtcaattctcctaattctgagtatgtaatctttaaggacattagtgcacatgtgttgaaggacatatatcccttagactatttttgactaataaacatttctaac

SEQ ID NO: 6341 - DNA, 120 bp, synthetic construct
  source 1..120: mol_type = other DNA
ctctaaacctggatttgatggctgaagtctgtcttgagtacttgagttctcattctggatttgcaggtgtataaacccttcctttctcctcacagagctttataaacactttcatttctg

SEQ ID NO: 6342 - DNA, 120 bp, synthetic construct
  source 1..120: mol_type = other DNA
gctttcctggtagtcaaggctgaatacatgatttctgatgactaagactgaccctaaaaagtgttatctaatagatggaatcacagtgctttgttcttttcatactcattcaatggcagc

SEQ ID NO: 6343 - DNA, 120 bp, synthetic construct
  source 1..120: mol_type = other DNA
tcatcatcttcttcatcttcagatgagatgatgtcagataacaaagaaaagaagccatagatccagtccgtggtttcctccatagcatcacgtaccagttttaaaggatctgagccaatc

SEQ ID NO: 6344 - DNA, 120 bp, synthetic construct
  source 1..120: mol_type = other DNA
tctaattaggcttttactgtgactaacatagtaagtcattggaagatttgagcagaaagatgaagtgatttgacttcctttactgtgttgaagtttgaaagggtgccaggctgggaacag

SEQ ID NO: 6345 - DNA, 120 bp, synthetic construct
  source 1..120: mol_type = other DNA
agactgagaatggacctttggattggatgacgaggatgtcactcatgaccttcaaagagcaatttcagtggagtgcattcaagacaaaatagaaaaatttggaggcagtgagtatatttt

SEQ ID NO: 6346 - DNA, 120 bp, synthetic construct
  source 1..120: mol_type = other DNA
tgcctggttctaaaattgccaaagcaggctatttttatgaagttatcattgctagcttgagatcagcttctgattttctgattttcagccatgtggaccacttcttccaaaacctaaata

SEQ ID NO: 6347 - DNA, 120 bp, synthetic construct
  source 1..120: mol_type = other DNA
gtaatatttgacccttctttatttttcatatcctgagaaacattggcacacaatggttacaagcttgggttctgagttcagactgatagcattcaagttcaagcttcctacccagcgctg

SEQ ID NO: 6348 - DNA, 120 bp, synthetic construct
  source 1..120: mol_type = other DNA
tagcacctaaactctgactgcatagcgctcaaacccaaatgattaaccccaaccttaatgctacccttatgctttccttccaaggaaagaacaactaagaggtggagtctctagatttgc

SEQ ID NO: 6349 - DNA, 120 bp, synthetic construct
  source 1..120: mol_type = other DNA
ctttgtcttgaaggtaaacaaatttctttagaactttcccaatgccaaatgaaacttcagatgtgtttcctcattcccatcccaccgcctaagttgggaagaaagaaaaaacagatagga

SEQ ID NO: 6350 - DNA, 120 bp, synthetic construct
  source 1..120: mol_type = other DNA
ttttaagtccaaacagtttctcataagttgggccacttgtcctgggtatgtttggttgacttcactgatgttagaactgccgtttttaattttgtcatcacggtggaagagatttcaacc

SEQ ID NO: 6351 - DNA, 120 bp, synthetic construct
  source 1..120: mol_type = other DNA
cttttctctctcactgtctctaaatctcactcactctctctccttatgacttctggataataccaatattagactaaaatgaccagtctgtccctctcctctagagagttctatggtcta

SEQ ID NO: 6352 - DNA, 120 bp, synthetic construct
  source 1..120: mol_type = other DNA
ccaacctctctcactatccttcaacctctttctcctttcaatcttggcgccacacttcaatctctcccttctcttaatttcagttcctttccttttctggtagagacaaaggagacgcat

SEQ ID NO: 6353 - DNA, 120 bp, synthetic construct
  source 1..120: mol_type = other DNA
ttcctcttaaaaaggtggctggagctaaaagcatagtcaaggttaatgctcctttttctttatcccaaatcagtcagcatttacactctttttcatcaaatatgaaaaacccagcccagt

SEQ ID NO: 6354 - DNA, 120 bp, synthetic construct
  source 1..120: mol_type = other DNA
ttacagctacatctcattgctgcccttcttcccaatccaaagcctcctttgcgtgctcctcttgtattccccccacttaacccacaagaataagatacctctactccctccttggcaacc

SEQ ID NO: 6355 - DNA, 120 bp, synthetic construct
  source 1..120: mol_type = other DNA
ctttaataaaaatgcttctcaaagccactttacttccaaaggaagctggagtcattcactgcaaaggccatcaaaaggcatcagatcccatcactcaggacaacgcttatcctgataagg

SEQ ID NO: 6356 - DNA, 120 bp, synthetic construct
  source 1..120: mol_type = other DNA
cagcccatttgagctcctgcatggacactcctttttattaggccccagtctcattccagacaccagcccaacttgaactgcaccccaaaaacttggatagagcctaaaagctcaccaacc

SEQ ID NO: 6357 - DNA, 120 bp, synthetic construct
  source 1..120: mol_type = other DNA
ataaaatacttgcatctgcaagtattgttggatatttagatgcttttaaaccaaaggaaaaactaggatcctgatttaaaagcacttttggtgagctaattgttttattgactgcagaag

SEQ ID NO: 6358 - DNA, 120 bp, synthetic construct
  source 1..120: mol_type = other DNA
tcacctctcttactcaatatgaccctaatcaaccaattctttaccagcaaaattgtgcgacagatgtttaaacctggaatacttccagctaactggagctagacctatgtcaaataacgg

SEQ ID NO: 6359 - DNA, 120 bp, synthetic construct
  source 1..120: mol_type = other DNA
aatgttaaatttgtactttctgactgactttgggccttccctaaatgattttactctgctaaattcatagcctgacaaaccgtgcacctgcttaactgggctaagcgccaagaaaagaaa

SEQ ID NO: 6360 - DNA, 120 bp, synthetic construct
  source 1..120: mol_type = other DNA
ttaattgctccccatttcactctcacaagtatcctgtttcagctgttagatgatattgttgtcctatatgaagactttgcacactgtcaaagcactaagctggaactgtcttcccagaaa

SEQ ID NO: 6361 - DNA, 120 bp, synthetic construct
  source 1..120: mol_type = other DNA
cagattttcatttctctatgaacaaccttttcatggcttcacggcatttacctacttttctaaacttccagagagtaactgacagttgccctgactttctggccttccaaatcatttcca

SEQ ID NO: 6362 - DNA, 120 bp, synthetic construct
  source 1..120: mol_type = other DNA
ttatgactctggataaatagcccttttgctttctttgatatcacgggacttttctctacttgttagatgagaatctaactcattggtagtccagctaccaatggtatgctggcagagtca

SEQ ID NO: 6363 - DNA, 120 bp, synthetic construct
  source 1..120: mol_type = other DNA
gttccaaaataatctttcactctgtgtcccataacctgggaacactgatatgaggggtggggtcccaaggaattgggcagctctaccgttgtggttttgcagggttcagccctggaggct

SEQ ID NO: 6364 - DNA, 120 bp, synthetic construct
  source 1..120: mol_type = other DNA
tgcttccacattttctggtatccttatagcaataccccactactggtgccaattttctgtattaagctcttgcattgctataaagctcttgcattgctataaagaaatacttaagactgg

SEQ ID NO: 6365 - DNA, 120 bp, synthetic construct
  source 1..120: mol_type = other DNA
caaaataggatggccggtggcagaagcaaagagtttgtctggcaaggacacttaggaccagatgacagcagggcttaaaaatactttaaaatattttccatttgtccaaaagtgttttga

SEQ ID NO: 6366 - DNA, 120 bp, synthetic construct
  source 1..120: mol_type = other DNA
ctagcacattatcttttcctcagcatttactattctccctaaaactcgtgcgctcatataatcagtgtttctcatctcctaagtcctctgagggagaatcaacacaagtgataaaatggt

SEQ ID NO: 6367 - DNA, 120 bp, synthetic construct
  source 1..120: mol_type = other DNA
actgtatggctagaaagcctcctggatggagagaaaacatgtctcattatctgggctacacttgactcgtagaaagttaaatctagaagtaactgagagatcatctggaacaactatttc

SEQ ID NO: 6368 - DNA, 120 bp, synthetic construct
  source 1..120: mol_type = other DNA
taccagcacaactatgactctcactacaactacaaatatcactctaagaaaaggctagaaaggcaggattaacctcggaaacaaaggtggaagcaccaactcttcaataaatgcaggcat

SEQ ID NO: 6369 - DNA, 120 bp, synthetic construct
  source 1..120: mol_type = other DNA
ggagtgctttgaaatgcaatttaagacccaagtggggctacaagtgaatcaaacctttggaataatgatttgcagcaaagtaaaccaattatgagtgtttaggactggcccacctgaaag

SEQ ID NO: 6370 - DNA, 120 bp, synthetic construct
  source 1..120: mol_type = other DNA
gacaagagctagttattgatatggcagaaaaaatgagaggtaaatattaccgagcaatttgacatgggctatgcctcttgaaagttggtatctcagaattggagcagagcagctaggata

SEQ ID NO: 6371 - DNA, 120 bp, synthetic construct
  source 1..120: mol_type = other DNA
gaatgccctaaattgccaccttttctcccaggtttttgggatatgattatcataatgcaatttcagagggtgtttttgccacttagtctgtctgctgaggttgacatatgtatggttttt

SEQ ID NO: 6372 - DNA, 120 bp, synthetic construct
  source 1..120: mol_type = other DNA
attagtttcctaaagataatagcctgcagctccatccatgttcccacaaaagacatgatcttgttctttttatggctgcatagtattccatggtgtatatgtaccacattttctttattt

SEQ ID NO: 6373 - DNA, 120 bp, synthetic construct
  source 1..120: mol_type = other DNA
ttccccattgcttgtttttgtcagctttgtcgaagatcagagggtcgtaggtatggggccttatttttgtgccctatattctgttccattggtctatgtgactgtttttgtatgagtacc

SEQ ID NO: 6374 - DNA, 120 bp, synthetic construct
  source 1..120: mol_type = other DNA
tggttccatttatttgatgaatcaaatttattgatttgcatatgttgaaccaacctggcatcacagggatgaagactacttgatagtgatcgattagctttttgatgtgctgacggattt

SEQ ID NO: 6375 - DNA, 120 bp, synthetic construct
  source 1..120: mol_type = other DNA
ccccaaaaaacactttaagccttgagaaagatgggactgtgatctgagttacctagagttacaacttctcagattatagattaactcacctgcatatttttcttgttctctgcaatggct

SEQ ID NO: 6376 - DNA, 120 bp, synthetic construct
  source 1..120: mol_type = other DNA
cttcaacaaggccctaggtagggatcaagtcatctatcctttcatagcacttagcatagcacattttgcacagttaaggccccaatagttattaaatatgagaaatattagaagtgttgc

SEQ ID NO: 6377 - DNA, 120 bp, synthetic construct
  source 1..120: mol_type = other DNA
gacaaaagttacaggcaaaaccaataatcaatacatgtaccctatacattggttcagttcagaagagtgagacaactcgaaatggggggcatttccactcgaactgaggggcagatcata

SEQ ID NO: 6378 - DNA, 120 bp, synthetic construct
  source 1..120: mol_type = other DNA
gacaggtctgacttctgagaagggaaagtcataaaagtattatccagtcctttttaagttggtggctgagcttggtgaggtgtgtttttaaaagacctttagtctgttctacttttcctg

SEQ ID NO: 6379 - DNA, 120 bp, synthetic construct
  source 1..120: mol_type = other DNA
taaggtcaagttgtttggacagaaaggctacagggtgcggtcctggctcttgtgtaagaattctgaccgcactaaccatgcctaggaaggaaaggagttgttgttttgtaagggattgag

SEQ ID NO: 6380 - DNA, 120 bp, synthetic construct
  source 1..120: mol_type = other DNA
gcccttgaaaagaaggtaatgtggagtgagtagccttggtattgattaagatggggacagacttatccttcactgttagagttacccgaagctcggcatccatgatggtctagggggctt

SEQ ID NO: 6381 - DNA, 120 bp, synthetic construct
  source 1..120: mol_type = other DNA
gggactgaggggacaggtgggagggaaaggaggaagatttgggatgagttgcattgggaacagagactatagagggactgatgtgtaaaagaatgcctggatgtcaggcacctcagacca

SEQ ID NO: 6382 - DNA, 120 bp, synthetic construct
  source 1..120: mol_type = other DNA
ttgagggacagtgagagaggttggagaagagagtaagaagagtctgcttacccgatttaaaattggtgagatgttccttgggctggtcggtctgaggacctgaggtcgtaagtggatctt

SEQ ID NO: 6383 - DNA, 120 bp, synthetic construct
  source 1..120: mol_type = other DNA
cttgaaggcccctatctataaataccattacattaagggtaaggatttcaacatgaaagttttatcgggcagggctgaatgcaaaccagtccatagcatgtatctttttctgggaatgtt

SEQ ID NO: 6384 - DNA, 120 bp, synthetic construct
  source 1..120: mol_type = other DNA
tgggccaaatttgcacaaataaaactttacctagccccagcattcctcctactaaattgtcccattgtcattgaattgcaaacccactgaaacagaaaagccttgagtaatgacatgcca

SEQ ID NO: 6385 - DNA, 120 bp, synthetic construct
  source 1..120: mol_type = other DNA
agtttctaccaattctacattatggtgagttgtataattattttattatatattacaatgtaataataatagaaacagggccagtcgctgtggctcacacctgtaatcccagcactttgg

SEQ ID NO: 6386 - DNA, 120 bp, synthetic construct
  source 1..120: mol_type = other DNA
gcatgagccaccatgtccagtcccaaatctttattaagttatttaaaaggtttagaacagatcatgatagttttgcccaaacctctatctttctggactgagtatacacatctcacgaag

SEQ ID NO: 6387 - DNA, 120 bp, synthetic construct
  source 1..120: mol_type = other DNA
atctaaaggaggttaaaaaataaatgaaaaatgagacccttgtcctctaagaaccaatttgatatttactgtcgggggactcaaccttgtattactgctagagacaggcaggacgtcact

SEQ ID NO: 6388 - DNA, 120 bp, synthetic construct
  source 1..120: mol_type = other DNA
atattccatcatttcagaagccacaatggctcaaagagcacttcggtaataaaatgaggccatcttatgagtagggcttaacaaaacttaaccatgggtgaaagctgacttgtcatttgg

SEQ ID NO: 6389 - DNA, 120 bp, synthetic construct
  source 1..120: mol_type = other DNA
gcatgtgtgcacatacatgcaaacaccataggtcagtgaggcatatgccatcaacatattttaatgaaatgataatgtcagaattcagagtaactacaatttgaccagaaattaaatgca

SEQ ID NO: 6390 - DNA, 120 bp, synthetic construct
  source 1..120: mol_type = other DNA
aagcaagctcttggtaaatgggacaaagccaatttgccctgcagtggatcctgatgaaagactgactagttactaagtgaacttaccataaagagatttggaaatcgaagtgagaaatta

SEQ ID NO: 6391 - DNA, 120 bp, synthetic construct
  source 1..120: mol_type = other DNA
attctgacaaacccaaggctctgaagaattatactaaatctaccttgtctatgctctatcagtggaacaacagttttttaatctatcagtggaatgacaaatcctgcatgacagcacgtc

SEQ ID NO: 6392 - DNA, 120 bp, synthetic construct
  source 1..120: mol_type = other DNA
tgtgaacactgttgaaatgacaacaaaggatttagaatattttataaacttagtaaattaaaaaactggcctagttgtagaggattatctccaatattgaaagaagttctcctgtgagta

SEQ ID NO: 6393 - DNA, 120 bp, synthetic construct
  source 1..120: mol_type = other DNA
aaaaaacatgaagtatcaaagattgcacactacgtttaagaaaccctagctcccattactcatcccttctagttgtatactccagcaaacccaaaacctgtgtgaatcctgggactcaca

SEQ ID NO: 6394 - DNA, 120 bp, synthetic construct
  source 1..120: mol_type = other DNA
actgctttttcgtggatatgatcattggggttatataactgagaatataagccctggaggcttagagtttcatttatttgaagagcctttacattgcaaagtacacaactgatgctaaac

SEQ ID NO: 6395 - DNA, 120 bp, synthetic construct
  source 1..120: mol_type = other DNA
ttctggtagagacacacggggatatgaagtgcattcagttttgtgtccaaaaatattgaccgctctggttatacagcagttggagaggcagtagaacattcatcattcaaaatcacaaat

SEQ ID NO: 6396 - DNA, 120 bp, synthetic construct
  source 1..120: mol_type = other DNA
aacagggactatattttttaacactaaatcgaatataatggagaatcaatggtgatctttgccatggctccagttactccacatgccccattggtgctaattggtaaaaggagttccctc

SEQ ID NO: 6397 - DNA, 120 bp, synthetic construct
  source 1..120: mol_type = other DNA
cccaacaattattgaaataaaactaaaaaatgagtttgaagagcaaagaggggtaccccaactcagctgactccaggagttaccctatctcaatgtatttccttccatgtgaagggtact

SEQ ID NO: 6398 - DNA, 120 bp, synthetic construct
  source 1..120: mol_type = other DNA
gcttactgccattgtccatgttccatagattctgaaccctttgctgataatgacaactggaaattcccttggatatctactttgcaatcacttcgtaaaagttagatctttccagaaatt

SEQ ID NO: 6399 - DNA, 120 bp, synthetic construct
  source 1..120: mol_type = other DNA
gaaaaggataaagagataggtaggcagaaaatacatttacaatgcctgcgagtgctgaaatgaagaggctggacttcataacaaacaacacagcaagccagagctaaatattacagaagg

SEQ ID NO: 6400 - DNA, 120 bp, synthetic construct
  source 1..120: mol_type = other DNA
aagaaagcctgaaataattgacataacacatcagatgtgtaagatgattcatatgattcaagacggtttagtgatggcagccaacaacaaataaagatgtttttgggccaggcgtggtgg

SEQ ID NO: 6401 - DNA, 120 bp, synthetic construct
  source 1..120: mol_type = other DNA
atacatctgaccaaatatagacttctattgaacaagcatggtttttttccctttgtttcctatttgctttttttatgccataatttgttgtaccatagattttgtgtgtgtatgtgtgtg

SEQ ID NO: 6402 - DNA, 120 bp, synthetic construct
  source 1..120: mol_type = other DNA
acagattacattaatttagaagattactgggccttaacatgtggagattgtattttcagcacatggccctctgctgtatcaaacaagcgtttggataaaggttgtagtctctccgcacat

SEQ ID NO: 6403 - DNA, 120 bp, synthetic construct
  source 1..120: mol_type = other DNA
cttgtcagtcacttgcaattctatcctgatcccagcacggtcttcaaaagtgttatcttcttgccaatttcactttagccttcttaaaacattttcacgagagttgtgtttatcataaat

SEQ ID NO: 6404 - DNA, 120 bp, synthetic construct
  source 1..120: mol_type = other DNA
tgttcttctccaaactgacttgaattggttcttaaagacttcactcacgtatctcctctaaatagaatttattcctgagaatgttcccacttttgtccctagcctatgggctggtatcct

SEQ ID NO: 6405 - DNA, 120 bp, synthetic construct
  source 1..120: mol_type = other DNA
atgcttgataacatcacttatgttgcccaggaagagctttgagttactgatgactctcattccatgtcgctatgtgttcattcactctgcaatgatttactgaatgccttctatgtacca

SEQ ID NO: 6406 - DNA, 120 bp, synthetic construct
  source 1..120: mol_type = other DNA
accaagagaactgaattgagtagaacaaaaattacgctatattcacaagatatgagagggcaaaaaagaacaatgtaacagttgcccacactgtagtctgcttaagttagagggacatta

SEQ ID NO: 6407 - DNA, 120 bp, synthetic construct
  source 1..120: mol_type = other DNA
gactacaggcacgcaccactgtgcgtcaagatgaagacatcttgacataagtatggttaggcacaagtagttttctaaggaaaatattgagtaccagtgcgtggaaatatttaactatag

SEQ ID NO: 6408 - DNA, 120 bp, synthetic construct
  source 1..120: mol_type = other DNA
aatctgaggctcatattgtgtgccaacagtatcctagaaaacagactcatgatttgggaatggtcagctaatgccaaactttccatgagcaaaatcccaacttacattaaaactgggaaa

SEQ ID NO: 6409 - DNA, 120 bp, synthetic construct
  source 1..120: mol_type = other DNA
cctcaagtgattcatatacatgttaaggtttgggaggcatggctgtaggtatgtataaatcacttcctgctttaaactccccaccatatgattaacataagaatgttaccgtgggaaagt

SEQ ID NO: 6410 - DNA, 120 bp, synthetic construct
  source 1..120: mol_type = other DNA
aagatatgtaatcaacctaagtatccatccacagatgaatgaagaaagcaaatgtggtgtatgcgtctgtgtgtgtatatatgaataatggaatgtgtgtgtgtatgtgtgtgtgtgtat

SEQ ID NO: 6411 - DNA, 120 bp, synthetic construct
  source 1..120: mol_type = other DNA
tttcttttaatactcctcatcaaaggtatgtctacattctgccctttaaataacatccagtatttccaggtcaaactgatacaacttgctttcctgcaaacctaactttatgcttattcc

SEQ ID NO: 6412 - DNA, 120 bp, synthetic construct
  source 1..120: mol_type = other DNA
gaaggatacccattccaaagtagggcaaggtgtcctggtcgaagaaccagaggggtcgtttttaaaagttcagtttaaaatgcagataatatgtattatatattgcatgtaggtggctga

SEQ ID NO: 6413 - DNA, 120 bp, synthetic construct
  source 1..120: mol_type = other DNA
ataccacaaccaatattctcactactcttcatcagtagacattgtgtgagcactctcttatgcacagtttgtttaggcctgctcagtgaaattaagtattgctcaaaatccatggctcac

SEQ ID NO: 6414 - DNA, 120 bp, synthetic construct
  source 1..120: mol_type = other DNA
tggtctctttcattatgggcctgcctccaggctgctttaattttttcacagcatagtttcaaaagcaggtatcccaaaccagcaacctggatatgtctggtatttttatgatctaacctt

SEQ ID NO: 6415 - DNA, 120 bp, synthetic construct
  source 1..120: mol_type = other DNA
gctggtctggggactacacactgacaaactctgatctgggagaataaaacttattcggaattttctcaaagttgttatgtccatatagctcacatgcattcatacattttgacccaaatc

SEQ ID NO: 6416 - DNA, 120 bp, synthetic construct
  source 1..120: mol_type = other DNA
ctaggagacacccacaaggtcaccctttctccacattttccaattagatttaaacaatccagtttgagtgagcaaggtgtcttcttcatgctgaattcaacttttcaccatagaacatag

SEQ ID NO: 6417 - DNA, 120 bp, synthetic construct
  source 1..120: mol_type = other DNA
gagacggctgttctcttgaaaactaagcgggacagcattattcagtaatcaccacagtgtcctaattctttttacacttgtatatagagttcttgcgcattttggcctctagctcagtat

SEQ ID NO: 6418 - DNA, 120 bp, synthetic construct
  source 1..120: mol_type = other DNA
gtcaaaattatggtgagaggtgctactgggtactaattattttgcaatctttagggaagatcgttgcaacaaatttttccaccctgaatgccaataaagtgtgtctccttcagcttggtt

SEQ ID NO: 6419 - DNA, 120 bp, synthetic construct
  source 1..120: mol_type = other DNA
cagaccaacaagacacttcaaatcctgagggactgggcagaaactgagcagtgaaatctggtctacttaattcaagaggtagccaaaattttccggaaactgtcagaactattatttcta

SEQ ID NO: 6420 - DNA, 120 bp, synthetic construct
  source 1..120: mol_type = other DNA
tgtcatttctgcattgatcaaatgtactcttgatctccttactccttgaaaaatcattacaccttcacaataatgtcatgtgcactgcgaattaccagtgttaagaataggacattcttt

SEQ ID NO: 6421 - DNA, 120 bp, synthetic construct
  source 1..120: mol_type = other DNA
ctactcagtgggtgaggcacgagaatcacttgaacccaggaggcagaggttgcagtgagccaagactgtgccagtgcatgccgaactagacactggctcaaaagaaaaaaaaacaacaac

SEQ ID NO: 6422 - DNA, 120 bp, synthetic construct
  source 1..120: mol_type = other DNA
gtgcattgtcaataagcagaaatactttggaagaattttttttttgagtagtaaatctcaacagtgggcttaaaatattcagtaaactatgttgtaaacagatgtgctgtcatgcaggct

SEQ ID NO: 6423 - DNA, 120 bp, synthetic construct
  source 1..120: mol_type = other DNA
aaaaagagacatggctgcaattcaaattggaatcaaatgttttataatctgtccagtctttattctcactgttattttttgctcttttctttttgttttgcaatgtagcagggacctttt

SEQ ID NO: 6424 - DNA, 120 bp, synthetic construct
  source 1..120: mol_type = other DNA
aatactaagagtttttccttcttttgtttttctcaacacttcagtaacctgtgtcagggaggggagaatgatgcagcaaatgcgtagcaaagataaaactggtttgtcacaatgagttcc

SEQ ID NO: 6425 - DNA, 120 bp, synthetic construct
  source 1..120: mol_type = other DNA
tgggaactggagacagcaaaaacttaaccttgacaaatcttcctagaactttaagtaaaatggagcctgaactccgtaaagtcgacattattgtatgatgttaatgcatagttgccagat

SEQ ID NO: 6426 - DNA, 120 bp, synthetic construct
  source 1..120: mol_type = other DNA
ctgtcaataaatgcaatgttccaagccatagcactttttagaactattttttcttgcatcatgttgacttcttaggctttcaaattgttctcaggttttcccatgacctatctcaaaaac

SEQ ID NO: 6427 - DNA, 120 bp, synthetic construct
  source 1..120: mol_type = other DNA
tggttggttgggttttgccttgtattttgccaatagtgtgccttttttgtgacttccagacttttatccatgggtctgtgcattgccctcaagtgctacataatgaaaaaatccagtctt

SEQ ID NO: 6428 - DNA, 120 bp, synthetic construct
  source 1..120: mol_type = other DNA
acaacctaattgaccaacctaacagtctcacacagtaagaagacatatccaatatgactctgtggtcaggcatgggtatgaatcctagctatatcacatacagttgtgtgaattctagca

SEQ ID NO: 6429 - DNA, 120 bp, synthetic construct
  source 1..120: mol_type = other DNA
ggctcagaaaatagcctgtaccaaggcactgtacaaaggtataccttttataaaagactggaggaagacaattgtagctagggcacaaaaggtgagaattgcaaagataacatgaaactg

SEQ ID NO: 6430 - DNA, 120 bp, synthetic construct
  source 1..120: mol_type = other DNA
tcacctgggagcccaaaccctgaacagaggtagagaaacagaagattaagacgctcgtagctatcttaataacttgtgcagagctaaacaagaagtttttatacatagctttctttaagg

SEQ ID NO: 6431 - DNA, 120 bp, synthetic construct
  source 1..120: mol_type = other DNA
gctggataagatatcggccatcatgttacatgaccatagctatttatagaggtgtgagtaacaactgttaactagtggggcctttggtatagcagagaacagtttccacatgcaaaattt

SEQ ID NO: 6432 - DNA, 120 bp, synthetic construct
  source 1..120: mol_type = other DNA
aatctgttcctccgtaatatatttgtggtccatagaagtcttctgaaaagtgattactgattcttcctagtgcaaaatgcgtggctgcctctttcataagccaaagtacttgctacacag

SEQ ID NO: 6433 - DNA, 120 bp, synthetic construct
  source 1..120: mol_type = other DNA
ttctattcttaacagtgagtctgagcctctgtggtctcagagatcctttcatccccatgaccattttatacatcctcccctcaacaactgctagagttttatctttcccaacaaatatac

SEQ ID NO: 6434 - DNA, 120 bp, synthetic construct
  source 1..120: mol_type = other DNA
atatttatgaataccaagctgcttaattggtttcaaggtagactctgcccttaacgcttattgtactaatacctttgcccaggactgaattgcctctcgagagtaatactgtcacctttc

SEQ ID NO: 6435 - DNA, 120 bp, synthetic construct
  source 1..120: mol_type = other DNA
ctccgtgggcactaagatttcgtaccgtgacagttttttacctctttatgactgaatccttctattctttttaatgaaagatagaaacaggaaagccaagttcactggctccttcctacc

SEQ ID NO: 6436 - DNA, 120 bp, synthetic construct
  source 1..120: mol_type = other DNA
gaataaaccgttgttcttctagacctgctgctttagatgctgaacttcagaatcaaaaaagcagtcggaaagtctcatgtaaacgctttcatgtaaagacaaccagctttgcaggctatg

SEQ ID NO: 6437 - DNA, 120 bp, synthetic construct
  source 1..120: mol_type = other DNA
ctgacactgaactccgctagcccactctctgttttataatactggactcaagagatctcatcaagagaaacctaaatcacaactagggatagtaggtggcaatcttaagtgtgaacactt

SEQ ID NO: 6438 - DNA, 120 bp, synthetic construct
  source 1..120: mol_type = other DNA
agcagactacaagactgtgtgaatagtacaatcaactatgcgaacatatacatatacaaaacaccaagtgaaaatacgccactatccagttatcatttcagtccagtggtaccgcaggtc

SEQ ID NO: 6439 - DNA, 120 bp, synthetic construct
  source 1..120: mol_type = other DNA
ttttttaaaaaagataataaaccataaacagcaaggagatgagctttcacgaaggcgccctgccttgatgctgtctggtaagcccaatgcttccttgttatagaacgcaactgattgaaa

SEQ ID NO: 6440 - DNA, 120 bp, synthetic construct
  source 1..120: mol_type = other DNA
cacctccaaaataagtgatagctgctttctagagaaagtcccacacctaacatccttctaaaaaagggagtctgaatctgagagctgagaggagccaagaaataaagagtaactctatta

SEQ ID NO: 6441 - DNA, 120 bp, synthetic construct
  source 1..120: mol_type = other DNA
gaccgactcactgtttgagagctaaccaaaaaacatgagcaaagtgaaaaatccgacgacataaaactagcacatagacgtcattaaacagggaatcagctaggagcacactatttcaat

SEQ ID NO: 6442 - DNA, 120 bp, synthetic construct
  source 1..120: mol_type = other DNA
tgacacagacactcaagtaatctatttctttaacctgtctgaaggaagaatgttagcaaatggtgtttcagcagattcaggtctgcctcatttcttcttaccttttgggaaacctgactg

SEQ ID NO: 6443 - DNA, 120 bp, synthetic construct
  source 1..120: mol_type = other DNA
gattgtatctagcttgttctttctgcagactaaccttccacatctggatgtccttctcttgtaacttcaactgatctttctagcagagaccagaaatgtcatcattttagctgtcttcca

SEQ ID NO: 6444 - DNA, 120 bp, synthetic construct
  source 1..120: mol_type = other DNA
gtggcagaaatgccttttacagatggttcaatcaagcccccttcccatgtgttgttagcttaacaaacacaattctttaaaaacaaatcaccactctctttgcaaatgaccacttgactc

SEQ ID NO: 6445 - DNA, 120 bp, synthetic construct
  source 1..120: mol_type = other DNA
aactgagtagtcaaacacactgagagccgttttcaaccctgtctgttgaaatatacagggagtacactctgttgtaaagctatgtcactccgatttaaggaaaaagtaggtaatttacct

SEQ ID NO: 6446 - DNA, 120 bp, synthetic construct
  source 1..120: mol_type = other DNA
ataaaaagactcattttgaaatggactgctaaggaatcatcccaatttaggtgcacagaggtcacacatggtcacatatatgaagatgcaacagcctagaaggacatctgacaaacagca

SEQ ID NO: 6447 - DNA, 120 bp, synthetic construct
  source 1..120: mol_type = other DNA
gcaatggcacaaaatcccagatttatagcagagcgagggtcaggttttatcaactcatagcaatcccacatacattaccttcttctttatctttttcaatactatcttcttcagaggcca

SEQ ID NO: 6448 - DNA, 120 bp, synthetic construct
  source 1..120: mol_type = other DNA
tggtcttgcagaatccattctctcttcctgaaaagataagtatcatttatatcacaagacgaaaaatgttgcacatgttctcgagcatattgtaaagtagtttaaaggtcagccgagtgc

SEQ ID NO: 6449 - DNA, 120 bp, synthetic construct
  source 1..120: mol_type = other DNA
agcaagccaccacgcccagccgcaaaaagtaaacgtatgttgacagacttttcaaataatcatctttgttattacaccaaaatttgataagtgttagtttcttaaagttacaaagtgaaa

SEQ ID NO: 6450 - DNA, 120 bp, synthetic construct
  source 1..120: mol_type = other DNA
ttcacctctcaattcaaataactgcatgagggccagaggtcaccatcataccctggtatgcagtacatgtgccttatgcatattttctattttgccacgaagaatattacacatacatgt

SEQ ID NO: 6451 - DNA, 120 bp, synthetic construct
  source 1..120: mol_type = other DNA
agagcagcttgttagtccattttcaattattctgattcaaacccattgcattttaggtcagaattctatctggcataattaggcttctcaaagtgaggcttgcaagtgagtcactgtgcc

SEQ ID NO: 6452 - DNA, 120 bp, synthetic construct
  source 1..120: mol_type = other DNA
tatttaacaacatcagccgagacgtggagtaaggggtagaagtagcacaccctaaaatggaagagaagaacacagggggttagtgtgtggttttaggttattctggttaaaaaaaaaaaa

SEQ ID NO: 6453 - DNA, 120 bp, synthetic construct
  source 1..120: mol_type = other DNA
cacggaactctgatagcaaagaacaagcgggaccatgccagcccaagtctgaaacaattctagtacataaagaaatagccattcattttacaatcctataccttccctgtttaaaatggt

SEQ ID NO: 6454 - DNA, 120 bp, synthetic construct
  source 1..120: mol_type = other DNA
tatagaatataaccctttggttgaactttgggttatttcttctttccattacaagctgtgctgtgctgaacactgttgtatgtcttgacgtacatacagaagtgagcctgtaatcccagc

SEQ ID NO: 6455 - DNA, 120 bp, synthetic construct
  source 1..120: mol_type = other DNA
aagttcaaccaaagggatatattttatagaataactattattacaccccctgaaaaagcatgcttttagcagatcgatggttgccagaagtgggggaagagacacaaaggaacttttggg

SEQ ID NO: 6456 - DNA, 120 bp, synthetic construct
  source 1..120: mol_type = other DNA
aggtggttagtaactccatcagagatttgcattttttttccaagtttacagaaaacagcacagcaacactaagggcactccataggtttaccttaacaaagcatgtgatcctactcaact

SEQ ID NO: 6457 - DNA, 120 bp, synthetic construct
  source 1..120: mol_type = other DNA
ccctccccactgcaaccactctggcagctgcttccaattctgttagctgaattgttatcctgcctctatagttctaaagaatatgccctgtgcttttaatttcttgatttataaattata

SEQ ID NO: 6458 - DNA, 120 bp, synthetic construct
  source 1..120: mol_type = other DNA
ttaattggatgctgggacttcctgaactgatcattctaaatctctgttctgctcatattaccaagctctatcctttggttctgctttctatttacctatatctcagaaaagtatctccca

SEQ ID NO: 6459 - DNA, 120 bp, synthetic construct
  source 1..120: mol_type = other DNA
ttctcaccagaaacctggattattctctatagagaataaaacaaggagtacctggataaagtattccagaagtagttgagggcatgagtgccattccaaatgaggggattaagtgaagca

SEQ ID NO: 6460 - DNA, 120 bp, synthetic construct
  source 1..120: mol_type = other DNA
cttcaaattactgaatgccttcaaattaccgactctcaacctgtaagtctacaccagccaaaacactgcatccttcctcaaaaagctcctagaggctatgtcctattaaacaagagtaaa

SEQ ID NO: 6461 - DNA, 120 bp, synthetic construct
  source 1..120: mol_type = other DNA
aaactttacatacacattttctatacttctctacatataatctcacaataaactgctttaagctggctgaggctctgtgtggtagaggcagtgtctgtggtgaggtgagattcgctgttg

SEQ ID NO: 6462 - DNA, 120 bp, synthetic construct
  source 1..120: mol_type = other DNA
tggatccagtcactaattccggatgaattcgcacatgctccatcattggctagaagagttgggttgacaaattataaagggctgaatgtttgtggaacatccaaatgatggaatattagt

SEQ ID NO: 6463 - DNA, 120 bp, synthetic construct
  source 1..120: mol_type = other DNA
aagagtgaaagaaattgaacatcttaatttagccttacctagaccctgtggaaacccacggccacagtatacataaaggtcctccaaaataatggacagaccattcctttttcacaaagg

SEQ ID NO: 6464 - DNA, 120 bp, synthetic construct
  source 1..120: mol_type = other DNA
acatgaagaggctctaaacactgagagaatcacaaatcacaagttgactcacgtactcatttccctatccctaaggattactgaagggataacattcaaacagactcaacagaacactga

SEQ ID NO: 6465 - DNA, 120 bp, synthetic construct
  source 1..120: mol_type = other DNA
gaattaaatgcatgtttttataataccctgccaatgtgactccttgggacccacctctagggataataaaagagttacccttcttggcagacacaaaaatcaatttgcatggtgctgtag

SEQ ID NO: 6466 - DNA, 120 bp, synthetic construct
  source 1..120: mol_type = other DNA
aaaccatttcattcaaatccttacaaacatcctaccttgagacattttagtaaagaaggcaaaagaggtgcttgagagagcttatgcttccaagatggctgcagtcttatgacatgaccc

SEQ ID NO: 6467 - DNA, 120 bp, synthetic construct
  source 1..120: mol_type = other DNA
ttagctacttactaaaaacaaaaggaaaacatgaaggagccctccaagtgccgggtgctaggaaacaagactcattaatttgtcatgttagtcctttgtacttgaagcttttccatatcg

SEQ ID NO: 6468 - DNA, 120 bp, synthetic construct
  source 1..120: mol_type = other DNA
accaaggtgtttacaagcatagggccacggtctaaatcaagaaaagggcaatggatgatacttattccccttaacatcctaaatttaccttacacagcttcctgtcacaaaatccagaaa

SEQ ID NO: 6469 - DNA, 120 bp, synthetic construct
  source 1..120: mol_type = other DNA
acatctggaatttgctttaaaatatttggagggtgggagagtcagggaggaaagaatttgaaactggattcatggggttcactgcatgattcttacttcatgtgtgtgcatacttgagta

SEQ ID NO: 6470 - DNA, 120 bp, synthetic construct
  source 1..120: mol_type = other DNA
ccttcttgacagtctcatcaatggctaagagttagtatagctggttaggtcacaagtctgttaagtccaacatctagcataaactggggatcatttctctgttttagcatatacctctca

SEQ ID NO: 6471 - DNA, 120 bp, synthetic construct
  source 1..120: mol_type = other DNA
ataagcactccaggtaattcttaaagtgagacacaaattatttttgagaaacactatgataaagaaaaatccaactaaagagttaagctgaggccggatgtagtggctgaggccaggcat

SEQ ID NO: 6472 - DNA, 120 bp, synthetic construct
  source 1..120: mol_type = other DNA
cacctagcttgtttttccatttgcaaagtaaggttttattctaaaacacattagaaacacgttttggcaacaagtttttctctctggttccaaaatcctactgtcggccgcgttggtggt

SEQ ID NO: 6473 - DNA, 120 bp, synthetic construct
  source 1..120: mol_type = other DNA
agcccccctcactactctccttgcttgtattcatgctaccctacaaaattcatttgcctccaaataaccacaagagacattgagatataaacatcagaatctcactcctctgtttaaaat

SEQ ID NO: 6474 - DNA, 120 bp, synthetic construct
  source 1..120: mol_type = other DNA
aataagaataattgctaaaggcggccaacaatttttagtaattgaagagtaaggatctttgaggcttgccaagctatgaatcccaggtacaaggttccttccagaaaaccatctaccaga

SEQ ID NO: 6475 - DNA, 120 bp, synthetic construct
  source 1..120: mol_type = other DNA
tagcatataatttatcccccaaaattaatttaaagcaacagatatagccatgttaagatgcaaatgctcactcaccagctcaagggttctcagcccaggatgtacatcagaatcacctgg

SEQ ID NO: 6476 - DNA, 120 bp, synthetic construct
  source 1..120: mol_type = other DNA
tatttatcttaagtctccaatgtctaaccgtaagttacctcgtctgtaaagttagaataatgatggcatcaagctcacaaggcttgtggggattacatgagatgatgcattccattgccc

SEQ ID NO: 6477 - DNA, 120 bp, synthetic construct
  source 1..120: mol_type = other DNA
acatttttgtttgcttttaaaatatgggtccttcaaactatatttaggtacaatctgatcactagatggtaaactccatgaggacaggaaccatctgggacacctagggcctatcctggc

SEQ ID NO: 6478 - DNA, 120 bp, synthetic construct
  source 1..120: mol_type = other DNA
aataagcagttagtccagtgagtcatatagacttcctcttgcgactaatcccggttggacattttacctgaaaagaaatatctaaggcaagggtaaaattaggatctacgctagatgaga

SEQ ID NO: 6479 - DNA, 120 bp, synthetic construct
  source 1..120: mol_type = other DNA
gagcagaacaccagtgtcaatccacgtccttatcttcgaaagccaaatttaaaaagaaacctgcctccagatctagacttttttccctttcatatttgacccaaaagttgtgttctcact

SEQ ID NO: 6480 - DNA, 120 bp, synthetic construct
  source 1..120: mol_type = other DNA
ggtaggaaataactacttactatgtgagagtaaaacagctgatggtaaaacctgccaacatgtgtagtcatgtgtgattgaataggtcttagtagttggagtccctctcaaggacaaact

SEQ ID NO: 6481 - DNA, 120 bp, synthetic construct
  source 1..120: mol_type = other DNA
ttcaagctgcgtccataaattacctgaagccatatccaaaatcccatgtctgtatgaatttttttggtgatgatgggacataaagggtagaagagaaatttggtccatagcttcccacag

SEQ ID NO: 6482 - DNA, 120 bp, synthetic construct
  source 1..120: mol_type = other DNA
ctgtcctttgttactccaacacttctgggcctctactgccatcatatttacttaagagagtgacctgtgagttgtagggcagtaactactatgctttattttggactaaagcatggtttt

SEQ ID NO: 6483 - DNA, 120 bp, synthetic construct
  source 1..120: mol_type = other DNA
caaggtgtccgaatatgtaggtctacctagtatagtgccaaatatctgtacatcaaggttctcatgagcactagggtttcagatctcgtttccaccaagttcattattctgcaaacatta

SEQ ID NO: 6484 - DNA, 120 bp, synthetic construct
  source 1..120: mol_type = other DNA
aaactatcaaatactttttagcctaatttagactaacaagttcacatgcacaacactgccatcccaaacaaaagctaaggcggataagccaagtgcatccccccacttcaacattaaaca

SEQ ID NO: 6485 - DNA, 120 bp, synthetic construct
  source 1..120: mol_type = other DNA
ctttcaccaccaattaaacacccacaagtacacccagagcgagtcatgcaaatttcagcggagacaccgaatccaggcgagtccttgatccccacaggcgacctccattcattctccacg

SEQ ID NO: 6486 - DNA, 120 bp, synthetic construct
  source 1..120: mol_type = other DNA
aagtcgaactgtgggatatgaaaggcattttgaaggagtaggcatcaggttgggttttaaaggaaatgtaggttttgtgaaatactaggtcggtgcaaaagtcatcacggtttttaccat

SEQ ID NO: 6487 - DNA, 120 bp, synthetic construct
  source 1..120: mol_type = other DNA
catagggctaataataatgctagttcatggggatttggggtgaagtcagtgagtcattaagctctaagtggcacagagcctactccagttaatgttatttttgataactgttaagtgcca

SEQ ID NO: 6488 - DNA, 120 bp, synthetic construct
  source 1..120: mol_type = other DNA
tggccaaaccaacaagcaaagattcaggcttgaaggagaagtttaagattctgttgggactgggaacaccgaggccaaatcccaggtctgcagagggtaaacagacggagtttatcatca

SEQ ID NO: 6489 - DNA, 120 bp, synthetic construct
  source 1..120: mol_type = other DNA
cgcacatgggctaggtcgttatcttttatgtgtgtttgtgtctttgtcacacatgcctggcattgtgttttgcccatgagtaaatgctgaatttttgcacttgtaaagttttctacttag

SEQ ID NO: 6490 - DNA, 120 bp, synthetic construct
  source 1..120: mol_type = other DNA
tagggcagatttgtgaagtcgcaaaaaccaagaaatttgaagaggtaggtttatccagttgagctactagagagaggcacgtagactattcagagcctgagtttgctttttttaggaaca

SEQ ID NO: 6491 - DNA, 120 bp, synthetic construct
  source 1..120: mol_type = other DNA
aaaaaaaaaaaaaggaagagtttgtagtggctgatagaaacgcatgctcactcgctctctcctgttacaagttcaggccaagaaaaatcaagaaagggtttgttccacagagaacaatcc

SEQ ID NO: 6492 - DNA, 120 bp, synthetic construct
  source 1..120: mol_type = other DNA
agtattgtcaatgagacaaaggaggtgagagtgccagttgtctgaattggttgggatgttggtcagatgacatctaaaagaacacggccattttgttattatttggttagagacaaggtc

SEQ ID NO: 6493 - DNA, 120 bp, synthetic construct
  source 1..120: mol_type = other DNA
tgaggtctgtgtgaccgtaggcactgcctcctcgcctgtaaacagatggtcactgcaccttcctcttatgggatgttctggggatcatatgaggcagttctcgcagagtgctgagatcgt

SEQ ID NO: 6494 - DNA, 120 bp, synthetic construct
  source 1..120: mol_type = other DNA
tcagagccctcttctttaaggtcatcaaggattacccttccaacgaagaccttcacgaaaggctggaggttttcaaggccctcacagacaatgggagacacatcacctacttggaggaag

SEQ ID NO: 6495 - DNA, 120 bp, synthetic construct
  source 1..120: mol_type = other DNA
aaattcaatagctgttacctcgacgagtacatcgcaaggatggttcagtaagaaaagaattgagatcctgttctgataatggtcctaagttcagctccgcagtgaataaagttgaaacca

SEQ ID NO: 6496 - DNA, 120 bp, synthetic construct
  source 1..120: mol_type = other DNA
gcaagctgctcggtctctctgagcctcaggagtcccccatgtaagtcaggatagccgggcgcctccatgtggagatgtagctcagggtggatgacagcatcaatgacccacagtgacagg

SEQ ID NO: 6497 - DNA, 120 bp, synthetic construct
  source 1..120: mol_type = other DNA
gagagtccttgtcctctcgggcagctgttccagaggctgccactagagcgaggcccatgacttctaggatccagcccctgtcctctccttcctctgtcagttcaacagaatatccacacc

SEQ ID NO: 6498 - DNA, 120 bp, synthetic construct
  source 1..120: mol_type = other DNA
ctttgccgagttactctgtttactgaggtcttagcgtggtcactgactcccccacctccctgagtagtttttgctgtggctttccttcttggctgtgattggaggaagagattttgcgtt

SEQ ID NO: 6499 - DNA, 120 bp, synthetic construct
  source 1..120: mol_type = other DNA
actgggggtcctgctgcgggggctgcggtggcatttctaggcctttccaggcagttgctttgcagctgggggtgaggtttggggccctttgtaggctttagtcttttttttttttttgag

SEQ ID NO: 6500 - DNA, 120 bp, synthetic construct
  source 1..120: mol_type = other DNA
aaggctttattctcaagcaaaccttacatcttgcgagtttcaccttctggagttggcagtggaggggtgaacgctgcctcgggggtagccgttctcttgctgttggcggctctgttttgt

SEQ ID NO: 6501 - DNA, 120 bp, synthetic construct
  source 1..120: mol_type = other DNA
ctgccagaaccgtgttctctggtgattcgcagtggcgctcatccaccttccaccggagacaggtctgatttttccagacgtggtgcatcgtttaggccccagacaggaatatgcagtagg

SEQ ID NO: 6502 - DNA, 120 bp, synthetic construct
  source 1..120: mol_type = other DNA
tgtgtggagcaagcttccatccggctctgtagagtcctgtggctcccaggcggccgcagtcattttgccaggaacactcagcttagggcccaggcttttccatgggtttggacacaagtc

SEQ ID NO: 6503 - DNA, 120 bp, synthetic construct
  source 1..120: mol_type = other DNA
ccggttttcacccaacacaggagcctcttaaaaattctgtgtgagttcgtttcagccagtcttgcatggggacattgtcttccgtttcagtcctgacgttcaccctgtgcacctgcgtga

SEQ ID NO: 6504 - DNA, 120 bp, synthetic construct
  source 1..120: mol_type = other DNA
tcctgaggaattggaagtgtcacgagatgtggccctcgttgggctggcgctcattggcctcccttgtgcctgtgcaggaggagctgattaactcagtggtcatctcgcagctctcccaca

SEQ ID NO: 6505 - DNA, 120 bp, synthetic construct
  source 1..120: mol_type = other DNA
aaaaaaaaaaaaaaggtgtttgtggtagaaagtgttctcacggctgctgactcagaaccatgagcctgtgtgtaagtcctggccttctcttcaaaggtgatggcccgctccctctcccca

SEQ ID NO: 6506 - DNA, 120 bp, synthetic construct
  source 1..120: mol_type = other DNA
gggtggccctccattcctgccctgcagtccgtttaatatttgcagctgttttgttgagatttaatttacatatcatgcaatttacccattcacagtgaacagttcagtggttttcagtaa

SEQ ID NO: 6507 - DNA, 120 bp, synthetic construct
  source 1..120: mol_type = other DNA
gcctgcctctacttttcaaagcctcacagcatcacttacgtgtgactgtcagtgtcagtatcgtgtaaaatataatgtatgaatcagtttgctcaaaagctcatccttaagatgttggat

SEQ ID NO: 6508 - DNA, 120 bp, synthetic construct
  source 1..120: mol_type = other DNA
taactccccagaaactttaccaacagccctctgttgactagaagccttgctgatagcagacagtctattaatgtacagctcgtgtgttttatgtattctgtgtttttacagtgaagtaag

SEQ ID NO: 6509 - DNA, 120 bp, synthetic construct
  source 1..120: mol_type = other DNA
ccaggcactgtgtgaacccccacctccacctcttttttgtccgaggaagggatgttgcttttatgtcataatattttgagatgaggagaaactgttaatcatttaatcatcttttttttt

SEQ ID NO: 6510 - DNA, 120 bp, synthetic construct
  source 1..120: mol_type = other DNA
ctttcaatgattttttaatcatttaaaggtgttaatcatttctttaaaagaataacagtgtaaccacttacctccagagtgctgcaaagggtccctcaggccagatttcccctggctcct

SEQ ID NO: 6511 - DNA, 120 bp, synthetic construct
  source 1..120: mol_type = other DNA
tcagagtcctgttcagcctgtcgatggaagaagtggcagggctgggagctgagctccgctttctggcagttgggggcgtgtggtgctgccagaggagcgaggcgcccatcccttccatcc

SEQ ID NO: 6512 - DNA, 120 bp, synthetic construct
  source 1..120: mol_type = other DNA
aggagtctgactggaaggtgctgaagctggttctgggcaggctgcctgagtccctgcgctataaagtgctcatctttacttccccttgcagtgtggaccagctgtgctctgctctctgct

SEQ ID NO: 6513 - DNA, 120 bp, synthetic construct
  source 1..120: mol_type = other DNA
ttctccagaactgacttgcacctggccgtggttccagtgctgacagcattaatctcttaccataactacctggacaaaaccaaacaggtaggaggtcagagcaggacaggcgagcttgat

SEQ ID NO: 6514 - DNA, 120 bp, synthetic construct
  source 1..120: mol_type = other DNA
cttgtccatctgcagcgtggagatgcctgacatcatcatcaaggcgctgcctgttctggtggtgaagctcacgcacatctcagccacagccagcatggccgtcccactgctggagttcct

SEQ ID NO: 6515 - DNA, 120 bp, synthetic construct
  source 1..120: mol_type = other DNA
cactgctgggcccgcacttggtgtagaggctggagagaagatcgtgtgtgctttgtgggccacatgcaggtcctgtcggtctttctgttttgttgataaccctttagaagtgtagaagcc

SEQ ID NO: 6516 - DNA, 120 bp, synthetic construct
  source 1..120: mol_type = other DNA
atctcaggtttaatcagtacatcgtgtgtctggcccatcacgtcatagccatgtggttcatcaggtgccgcctgcccttccggaaggattttgtccctttcatcactaaggtgggctcag

SEQ ID NO: 6517 - DNA, 120 bp, synthetic construct
  source 1..120: mol_type = other DNA
gacccacacacgtttaatttgcactgacgttgtttgttttggtgtcatgcgtgaagccttacttgttctcagtcatgtttaccagacgtattatcatgcatttttgttttctgtctcttc

SEQ ID NO: 6518 - DNA, 120 bp, synthetic construct
  source 1..120: mol_type = other DNA
caccactcctggttttggccttttcgtattctctagaatggacgtttttcttcgggctttcttctcaacaaggtttattttttgttgtagctgaaagggaacaaggggcatttgtggagg

SEQ ID NO: 6519 - DNA, 120 bp, synthetic construct
  source 1..120: mol_type = other DNA
gatgagaactccgtggcccaggctgacgatagcctgaaaaacctccacctggagctcacggaaacctgtctggacatgatggctcgatacgtcttctccaacttcacggctgtcccgaag

SEQ ID NO: 6520 - DNA, 120 bp, synthetic construct
  source 1..120: mol_type = other DNA
ctgtggcactagcttgccaggctcggggggagcattcagcttgaggctggtggttttgcatcaggtaagtggtggtcaccagtcctctgccctcttcttcagggggccatggtcttcgag

SEQ ID NO: 6521 - DNA, 120 bp, synthetic construct
  source 1..120: mol_type = other DNA
ctttcctggatgtctgcgtgttaatctcctcttgggaggaaaccggtcatggcttagggtccgctctggtcccttgctagccgtaattagctttctgaaacccagtctccagagacagtc

SEQ ID NO: 6522 - DNA, 120 bp, synthetic construct
  source 1..120: mol_type = other DNA
agctggggctggcagcttcagaagcagtaggggccctgtggagcctctgcccagcatcctccgtggggagtccagcactgcgggctccaggaggctctgcggcagcctccctccctgcct

SEQ ID NO: 6523 - DNA, 120 bp, synthetic construct
  source 1..120: mol_type = other DNA
cacaggaaatgctgctttgggacctcccaccctctctccttagcgtccccagctgtgggtctggcttggagttggagggtgagcctctgctcttgggagcagtctgtttgcaaacaggga

SEQ ID NO: 6524 - DNA, 120 bp, synthetic construct
  source 1..120: mol_type = other DNA
actttgcagccatccacctgggccggccctggctgctgggcagcctgtggtctcaggggatgctgatacctctgctcacgcagtgtggggcacagctggtggcagtgctgctgcgtcaac

SEQ ID NO: 6525 - DNA, 120 bp, synthetic construct
  source 1..120: mol_type = other DNA
catcccctccctgtgcagtttcgtgttcctgcagctctaccattcccccttctttggcgacgagtcaaacaagccaatcctgctgcccaatgaggtaggcgtggcctccctctcctgcat

SEQ ID NO: 6526 - DNA, 120 bp, synthetic construct
  source 1..120: mol_type = other DNA
tgagtgtggagctccctgattttgccggccaggcacacacggggctgagggaagagagggagtcaaggatgacacccgatgtctggcctgggtggctgctggaatggatggtcttgtctg

SEQ ID NO: 6527 - DNA, 120 bp, synthetic construct
  source 1..120: mol_type = other DNA
ccaccaaggacgtggacaagcaccgctgcgacaagaagcgccacctgggcaacgactttgtgtccattgtctacaatgactccggtgaggacttcaagcttggcaccatcaaggtgagtg

SEQ ID NO: 6528 - DNA, 120 bp, synthetic construct
  source 1..120: mol_type = other DNA
tgtctagcagtgcaaccaggcagtagccgagatcagccttcagcacacgctgtgtgcggggatgaccctttctcttgtccgggcagggccagttcaactttgtccacgtgatcgtcaccc

SEQ ID NO: 6529 - DNA, 120 bp, synthetic construct
  source 1..120: mol_type = other DNA
ccctagtgaaaatagtgacatacaaaaatatacacattttaacaccatataaattactgacacgagacacacagtgagacggtgcagggagtacggtaggaactggagaggtaataactt

SEQ ID NO: 6530 - DNA, 120 bp, synthetic construct
  source 1..120: mol_type = other DNA
acaggagggtaaatgcaaacatcaccaatgccttacatttctgattcagtaggtattggtgcacatatcaagtgatatgcacagcatcattctcttttaggtggacaggacatcttcaat

SEQ ID NO: 6531 - DNA, 120 bp, synthetic construct
  source 1..120: mol_type = other DNA
ttgctcacctcttatgcctgctttaagcattttactagttgagctttccagttgtgtcatattagatattcccataaagctgctggaactcatttctacaaaggactcttgcatggagga

SEQ ID NO: 6532 - DNA, 120 bp, synthetic construct
  source 1..120: mol_type = other DNA
gtttttaaaccattcgatttcaggggatggctcgccactgatttcacaagtaaagagaacattttgtccttcattaatattttgagatctaggctgtgagatgaaggctggagcatctga

SEQ ID NO: 6533 - DNA, 120 bp, synthetic construct
  source 1..120: mol_type = other DNA
aactttgcactgctttggaaaattagcaactgtgaaggtttaggcaagtagtgccattttgtatattcactgactttattcttaaatattcctgggagcaggggctgacactatggaatc

SEQ ID NO: 6534 - DNA, 120 bp, synthetic construct
  source 1..120: mol_type = other DNA
gataccttctcatggatactcttaaaggcttgccccataaattgtaagttggttttagacgttccaccttcaccagaaatctcacaaacatattctccttgatcagattcagtgaggtta

SEQ ID NO: 6535 - DNA, 120 bp, synthetic construct
  source 1..120: mol_type = other DNA
ttcttgctgccaaagtcgtcttgatctttctggttgtggatttttcttccagtgacttttcttctaatgcagcacttttcatttctgcagatgcagagtgttcatatgaggagagacttt

SEQ ID NO: 6536 - DNA, 120 bp, synthetic construct
  source 1..120: mol_type = other DNA
cttcctcaatttctgttatttctgtcacttctctttgtcgccttgatttctttctagacttttcctcctttgacatgaagtcaagttcgcttttgtattctgagagatgctgggtggtcg

SEQ ID NO: 6537 - DNA, 120 bp, synthetic construct
  source 1..120: mol_type = other DNA
ttgttccttgccacaacagtatattcagcgtcatcatctgtagtgacactgttgattgttaattggtaaagacccttgtctgactcaaatgtgtacttcttgtcattgtcacctggtttg

SEQ ID NO: 6538 - DNA, 120 bp, synthetic construct
  source 1..120: mol_type = other DNA
gatgctgtcatgcgagatttcctctctttcactaacaaccggtcaacaaaatccatggcttcaatgctaatctctttgaatgcttcctcatcgaaagtatattcagcattcatgatattc

SEQ ID NO: 6539 - DNA, 120 bp, synthetic construct
  source 1..120: mol_type = other DNA
actgtcttctgatcaattccaaatctgtttttagcacagaccacatagaaaccagcatcttttctctctaccccattggggaaaacaagtgatgtgaaggatcttgtgacaataacttgg

SEQ ID NO: 6540 - DNA, 120 bp, synthetic construct
  source 1..120: mol_type = other DNA
gaaaagacagtttctcgaatttcttctgttgtcacagaaatccatttattctgcttcttctcacgcttctcaaggtagtaatttctaatctttgcacctccatcactggcaggtggcttc

SEQ ID NO: 6541 - DNA, 120 bp, synthetic construct
  source 1..120: mol_type = other DNA
tggacattcttcatgacaagatgagtatagtgctcagtgttttcaatagtaatgttttctgagttttgcaaaagtttctgaccatggaaccaagtcatggcaggtactggacgaccaatg

SEQ ID NO: 6542 - DNA, 120 bp, synthetic construct
  source 1..120: mol_type = other DNA
gcttggaatggtttcctgtagaacttgtcatatttcctgtgtgtgtacttgcttttctttcttaacacttgctctccaataaagctttccagggttctacttagtatagagggggaatta

SEQ ID NO: 6543 - DNA, 120 bp, synthetic construct
  source 1..120: mol_type = other DNA
acttactcaatggtgtttttggtgtgactggttcctcagatttcaagggtttgcttatgccaaactggttttctgctgaaacacggaaatggtattctacattctctttgaggcctttta

SEQ ID NO: 6544 - DNA, 120 bp, synthetic construct
  source 1..120: mol_type = other DNA
gactgatgtccttgttgtatcagtaactcttgggttttgtggctttcctggaggagctgagaataagaataagaatatactggttaaagttgctgcaaagttgaaaattagctgtgccac

SEQ ID NO: 6545 - DNA, 120 bp, synthetic construct
  source 1..120: mol_type = other DNA
aattttcccacatataaattgtaactcaatcaatttgactgatacaaaatgtccttaccaattggatccatggcaacgatgggtttggaaggacgacttggtttcccagaccctcttgca

SEQ ID NO: 6546 - DNA, 120 bp, synthetic construct
  source 1..120: mol_type = other DNA
ccgtccaattcaggtggttcccaggaaatggtaattgatgtagcatcaatttcatcaatcttaataggtcctgttggtggaccaggcttgtctatgaaagagaagaaatacaggaaatta

SEQ ID NO: 6547 - DNA, 120 bp, synthetic construct
  source 1..120: mol_type = other DNA
atattttctggcagcactctgaaatagtacatggttccttctacaagtccagaaattctgtaaagtgtcttgctgcatttggtagttactgttttgaatgctctcatagcagcttcacgc

SEQ ID NO: 6548 - DNA, 120 bp, synthetic construct
  source 1..120: mol_type = other DNA
aatgctgtgtttggtggtatccacaactcttggagcagaaggtggtccaggggtatctgtggaatttaaaaagtgagatgcagatattaggcaaataaggaaatgttgagatttgtattt

SEQ ID NO: 6549 - DNA, 120 bp, synthetic construct
  source 1..120: mol_type = other DNA
gtgttggaaaattatctgtcatatagttttgaggagcattgtatttatgtatgattcttggagctcacatgatggttctctgcatgagatgaagttggaagcttcgctgggctcactgtt

SEQ ID NO: 6550 - DNA, 120 bp, synthetic construct
  source 1..120: mol_type = other DNA
tgatggtaaccagatcaccgtgtaatcgggcatccagttcggctttgggtggagctgtcagtaggcaaaacagatatgaatgaatatctgagagtttattttcacataaattgagataat

SEQ ID NO: 6551 - DNA, 120 bp, synthetic construct
  source 1..120: mol_type = other DNA
ttggtgctgattctagaggtttgctgacaccaaatctgttctctgaactgacacggaaagaatattccatgtattttgtgagatgagtgactttaatttgagtgcgcttgacactggaat

SEQ ID NO: 6552 - DNA, 120 bp, synthetic construct
  source 1..120: mol_type = other DNA
gtgaatgtgattgacttactaccactgttgttttccacagtaagggtatatttccctgcatcatttctgttgcagttttccacagtgagggtgctgaaggaatctgttgtatggatatca

SEQ ID NO: 6553 - DNA, 120 bp, synthetic construct
  source 1..120: mol_type = other DNA
gtaatgctgttgcctgttatgttgctaggttctggaatgccaggggcatcaggaacagctgtaaaacaaaaacaaaaccccaaatcaattagatgcatttgcttggaaggttaaactttt

SEQ ID NO: 6554 - DNA, 120 bp, synthetic construct
  source 1..120: mol_type = other DNA
gctctttgtaaaaaggaaagtgaaacatttacagatcatgtacttcctaatactgctgcacagtcacacaagttcttttaagaggccatcagctgcattcaagcaaggggatgattgtgt

SEQ ID NO: 6555 - DNA, 120 bp, synthetic construct
  source 1..120: mol_type = other DNA
gatggtttcccgggtgacatcaatgtagtcaggagtgccaggtgggtctaaaaaattataaggaaggtaaatgcatcattacatttgtaaccaggtcttaatcatccatggaagaacaat

SEQ ID NO: 6556 - DNA, 120 bp, synthetic construct
  source 1..120: mol_type = other DNA
ttgttttcagttttactgaagcgaacaaattcactttctttcagtggcaagccatctttcagccaactgatggatggtttgggttttcccttataaggtaattcaaggtgcacattgtgc

SEQ ID NO: 6557 - DNA, 120 bp, synthetic construct
  source 1..120: mol_type = other DNA
gctttggcaataacagaagttctgagagccacatccaggtcaatctctggtgcctctgtagacataaaatggatacatacagtgaattttaaaagcaaaaaagagtgatttcctggaagt

SEQ ID NO: 6558 - DNA, 120 bp, synthetic construct
  source 1..120: mol_type = other DNA
agatgtattcatttcctttgataattttggtggttgtaatgatgcactcttccaaatgttcagacaccatagaccacacaacgcggcttgtctcacgcttttccacaatgtagtgagtga

SEQ ID NO: 6559 - DNA, 120 bp, synthetic construct
  source 1..120: mol_type = other DNA
agatggggtagaaagactgtgagttgtgcagggacttaagcaccttttacatgtgttttaaagtccattagttgctttattccagtgaagaaatgggatatggtagtgagaacatcatgg

SEQ ID NO: 6560 - DNA, 120 bp, synthetic construct
  source 1..120: mol_type = other DNA
gaatgaaagcaccaactcatacaatcaatcataaaaggttgaagttggaaaggcccatagatatcctgaggtctaaatctctcactttacagtcaagtcaagagggctggaaaggtattt

SEQ ID NO: 6561 - DNA, 120 bp, synthetic construct
  source 1..120: mol_type = other DNA
ataaataagtccagcactgattgttgtgactttgaagtgagttgtgcggatgaccagtttgttggctttttgccataaaatactgtttctgtctttcatttccaggtgatagcctacgac

SEQ ID NO: 6562 - DNA, 120 bp, synthetic construct
  source 1..120: mol_type = other DNA
gcttgattttcagcaaacactcggaaaaagtattcagaattctctctcagaccggaaacaacgtgatgggttgactttgccactgcacatttaacccagtttttctgtcctttttctagt

SEQ ID NO: 6563 - DNA, 120 bp, synthetic construct
  source 1..120: mol_type = other DNA
cttcctttgtttcagctggtataccaacaccaaactcattttctccagagactctgaagtaatagatagctccttcttgtaaattggtaactttgtaggagaggcggttacagttgttgg

SEQ ID NO: 6564 - DNA, 120 bp, synthetic construct
  source 1..120: mol_type = other DNA
ttttgtttacacgcacccatcttaggctatttttctctcgcctttcaattatatatccagatatttcactacctccatcactctcgggtcttgaccagcaaagtgtcatagattctttgg

SEQ ID NO: 6565 - DNA, 120 bp, synthetic construct
  source 1..120: mol_type = other DNA
ttgcagggactggttcacaagatttactgcatttaccaattccagcaatattttcagcatatacacgatactcatacatcagtccttcatcaaggccggagactttcatttgagtatcag

SEQ ID NO: 6566 - DNA, 120 bp, synthetic construct
  source 1..120: mol_type = other DNA
cacttttcactccctttagtctgcatttcaaccacataaccagtaattttgctgccaccatcactttctggtttctcccacttaattgtagctgtattacgggtcacatcaacaagagtt

SEQ ID NO: 6567 - DNA, 120 bp, synthetic construct
  source 1..120: mol_type = other DNA
tagagttgcaggttcacctacaccttcagaattgatggcacaaatacggaagttatattcagtgttttctttaagcttggtcactgtgaactgctttccttgtaatcctgttggtggagt

SEQ ID NO: 6568 - DNA, 120 bp, synthetic construct
  source 1..120: mol_type = other DNA
ccactcactgtaaattcagtttctaatacgttggtaaagctggctttcatccagcggccatcaggtagatctttcttttctacaatataacctgttattttgctaccaccatcataggca

SEQ ID NO: 6569 - DNA, 120 bp, synthetic construct
  source 1..120: mol_type = other DNA
gtttcttcaacgtttactcttgttgtctgtttaagaggctcaccatctttgacccaagaaatgttaggtcttggtcggcctataactggaatttctattttaagatcttctccagcttgg

SEQ ID NO: 6570 - DNA, 120 bp, synthetic construct
  source 1..120: mol_type = other DNA
taaaccaactttgttgagggcacagactcgtattttatactcttggtgttcagtgagttttgaaatttcaaatcgagtgactctcaggccagtctgtggagtaactatttgccattcttc

SEQ ID NO: 6571 - DNA, 120 bp, synthetic construct
  source 1..120: mol_type = other DNA
cttgaaatctgtgttctttatttcacatctagcagattcttcaatttccttatctcctcttaaccactcaatggtaggtaggggctttccatggacatcagcctcaagtctgaatgtttc

SEQ ID NO: 6572 - DNA, 120 bp, synthetic construct
  source 1..120: mol_type = other DNA
tggagggttccaagataatgtaatactttcagcactgacgtcatcaaatttaacaggtccttttggaggatcaggtttatctagagttacaatttcgatggatgctgtcttctgaccaac

SEQ ID NO: 6573 - DNA, 120 bp, synthetic construct
  source 1..120: mol_type = other DNA
tgtaagcgtatattttccactatcatatcggttgacattgtcaagaacaagagaggtgaaactgctagtgacatcaattatagctgcatctcggatttcaccatccacctttccccattt

SEQ ID NO: 6574 - DNA, 120 bp, synthetic construct
  source 1..120: mol_type = other DNA
ttcaccaacaccatatttgtttactgccattatacggaaagtatattcattgccttcaagaagcttagtaaccttgcagctgagagtctgcacattggcatcaaccacagtccaaactaa

SEQ ID NO: 6575 - DNA, 120 bp, synthetic construct
  source 1..120: mol_type = other DNA
gaatggatattgggctacagtaggctctgaattgaggtaggtactcttcccatatctgttttcagctgcaattctaaactgatattcacatccagtcttcagtctgcaagcctttattgt

SEQ ID NO: 6576 - DNA, 120 bp, synthetic construct
  source 1..120: mol_type = other DNA
aagctggtctaccttccaggaagtcttgtggcagtttgttgcaacagttgaatatgcttttcttgttgattcccgcttttcaacaatatagttcttgatttttgaacctccatcaaggag

SEQ ID NO: 6577 - DNA, 120 bp, synthetic construct
  source 1..120: mol_type = other DNA
ttccagtggctctcccactccatatttatttacagccatgacacggaatatgtattcattgcctttcaagagtttagtgacctttagctttgttacttggacttctgaggctacatttgt

SEQ ID NO: 6578 - DNA, 120 bp, synthetic construct
  source 1..120: mol_type = other DNA
cccggaactcataagcaataccatctgtaagtccacttgatttgaaaatgttgcctggtactaaagctttgctcacagtctgccagagaataccatttcgttcttttctttcaacatgat

SEQ ID NO: 6579 - DNA, 120 bp, synthetic construct
  source 1..120: mol_type = other DNA
tgaagaaatattcacacccttcagacaagccggtaactttatatgtgcatttatggcacttagtggtggctgtggaataagatttccgtgttgcttcacgtttctctacaatgtagtttg

SEQ ID NO: 6580 - DNA, 120 bp, synthetic construct
  source 1..120: mol_type = other DNA
ggcttttgggtaatttagataaaatattggcactctggaatgaacggtgttgaaaaagacaaatactaacatgctgcatctttcatcagaacagaatctgaagcctcactgggtggacca

SEQ ID NO: 6581 - DNA, 120 bp, synthetic construct
  source 1..120: mol_type = other DNA
atctgagtgatatctgatggtctaatgtcttttcctgccttggaccaacttgattttggaaggggtttgccaagaatgctaatggcattcaaaacaatggtatcccctgctttaattgtt

SEQ ID NO: 6582 - DNA, 120 bp, synthetic construct
  source 1..120: mol_type = other DNA
tgtaaaagctgtaggataagaacaaacaaaatacctgtaattggagaaccaccagttttcttggggtcagtccaagttagagatactgaatcgtgtctgacatccacaatattgggaggt

SEQ ID NO: 6583 - DNA, 120 bp, synthetic construct
  source 1..120: mol_type = other DNA
tttaacggatttttagataagctagtgagtgggacacaagagtgcactttcgatgacaataaaggaaaaatgaagatgtgtgcatagagccttaccaacatcatcccttgccacaacagt

SEQ ID NO: 6584 - DNA, 120 bp, synthetic construct
  source 1..120: mol_type = other DNA
gaaagtgtcaaagtcagttgactttatgtccagtccaatcctgtctcttagattgacatttggtttagaccaagtaatctttggaggtgggcgtccttttactggtacatatagtctcat

SEQ ID NO: 6585 - DNA, 120 bp, synthetic construct
  source 1..120: mol_type = other DNA
ttccacaataccgtaaagtacccacccagctctcctaaaaagtactcttggagttaccagctctacaccttgttaataaattaatctacctaagggagttctagtctccctcttagaata

SEQ ID NO: 6586 - DNA, 120 bp, synthetic construct
  source 1..120: mol_type = other DNA
gaaatgttcctaccatatgggtttttggcaattgctggttcagtgaagactggatcgcctactccatatttattttcagcacaaatacggaactgatactcatggccctctataagtttc

SEQ ID NO: 6587 - DNA, 120 bp, synthetic construct
  source 1..120: mol_type = other DNA
attaggaaaaatgaccatcatgaatgctgttacatctttgcctataatactcagcagaatcttaccattttctgcgaggatagtcactggatcagaaggttcagaaggtgggctaatgtt

SEQ ID NO: 6588 - DNA, 120 bp, synthetic construct
  source 1..120: mol_type = other DNA
ccaagcaacaaaaatacagtccttgttgactttggtgactcgtgcattctttggttcactaggaacacctggagatgaagacaaggaagatgtcagtttctacattaagtaacaaactag

SEQ ID NO: 6589 - DNA, 120 bp, synthetic construct
  source 1..120: mol_type = other DNA
acaggtgggatgaggctttccatacacatgggcttcaattcggagttttttcccagctttgatagttatttgctctggcataaggatctttggtggcactgaaagtaaaatgaaaagata

SEQ ID NO: 6590 - DNA, 120 bp, synthetic construct
  source 1..120: mol_type = other DNA
tctaataaacttaccacatgacataaatgaagcaaagactacttacacagttgttctttggcttcatacactccttcagcttctcttggcaaactgactccaacagcatttctggccgct

SEQ ID NO: 6591 - DNA, 120 bp, synthetic construct
  source 1..120: mol_type = other DNA
agacacaggcccaggagtgtctgtaaagaatcataaaatcagatatacatgtctcctcagcatccctattaacaaattcatttttgaagtgggagggagaagcattttagtaacccacct

SEQ ID NO: 6592 - DNA, 120 bp, synthetic construct
  source 1..120: mol_type = other DNA
ttacattaacttatttatcgaatacttctgtgcttgagattaagagttgctgtaatatcagaaaaaacaaggacatcctacctatggggtcttttgccaccaccggtcttgaaggcaagc

SEQ ID NO: 6593 - DNA, 120 bp, synthetic construct
  source 1..120: mol_type = other DNA
cagatcaagtactggtttttgtaagtcttctttcacaacaacttcctctgtcttcacccagtcactttccccaccttcattctttgtttgcactctgaactcataaatctggttttcaac

SEQ ID NO: 6594 - DNA, 120 bp, synthetic construct
  source 1..120: mol_type = other DNA
ctacaatattagctgcctttatacggaatctgtactcatttccttcaattagtccaggtaccctaaaggcacattgcctaatgagttcatctttattaatcctgttccattgtgctgtgc

SEQ ID NO: 6595 - DNA, 120 bp, synthetic construct
  source 1..120: mol_type = other DNA
cctcttataatagcagggaatctgactgtggttccagcctttaccacaagaccttcaattaatttcacatctagctccacggatggaggcactgaaaagtaaacatgaaaaaattagatt

SEQ ID NO: 6596 - DNA, 120 bp, synthetic construct
  source 1..120: mol_type = other DNA
tacaagtacttttactgagacagtttttgaaccagctggattctccactgttaaagaataaattccaccatcttcatgggcagcattacgaatttcaagcttgctaccaactggagtcac

SEQ ID NO: 6597 - DNA, 120 bp, synthetic construct
  source 1..120: mol_type = other DNA
cccatcgtttagacatagtttctctcttttccaggatgtagtttgtgatgggttttcctccatcatgtggcttattccaggttactaatgcagagtctttggtaacttctgtaacaattg

SEQ ID NO: 6598 - DNA, 120 bp, synthetic construct
  source 1..120: mol_type = other DNA
gtaattggtttggtgcaaaatgatggtttgccttgtccaacaatgttgacagcactgacacggtactcataggtatcaccttcttttaagcctttaacagtgtattttctgctaagcaag

SEQ ID NO: 6599 - DNA, 120 bp, synthetic construct
  source 1..120: mol_type = other DNA
tacttacttattggctctctgataacaagtgcctctgatgtctcaacaaatggacccatgccaatactattttcagccgcaattcggaaaaagtaggcttttccttgaatgagaccctgg

SEQ ID NO: 6600 - DNA, 120 bp, synthetic construct
  source 1..120: mol_type = other DNA
gttaatgaagtaggtttgcaacagttattggttaccatggttttagtagaggctgaagggaaaataaaaatgctttttaaaagcaatttgtgagttggacaggagggagctgggaggcaa

SEQ ID NO: 6601 - DNA, 120 bp, synthetic construct
  source 1..120: mol_type = other DNA
aagtatttacctaatacatcaacaataattgtcttctttctttctccggcttcatttttggcaagaagagaatagacgccttgatggctcctctggcagttcttgatgaccatggatgag

SEQ ID NO: 6602 - DNA, 120 bp, synthetic construct
  source 1..120: mol_type = other DNA
ttttcccattcttcttttccttcttctttatattcaacgatgtatccagttactttggatccaccatcttttagtgggggagaccactccagatctgcagatgatttagtccaatctgtc

SEQ ID NO: 6603 - DNA, 120 bp, synthetic construct
  source 1..120: mol_type = other DNA
caagatagtgtcatttgatctgctgaaacagattcaaattttatgggtcccactggagggccaggacgacctaaaatggtttaaagaaggaaccctttatcactcagatgattttaaagc

SEQ ID NO: 6604 - DNA, 120 bp, synthetic construct
  source 1..120: mol_type = other DNA
gaaaatgactggttactttctgtcccttttgaggagcatgcagagaaattgctttagcctctgataaataaaacagactgcgaggaaaattacagcgaggaaattacagacatcatctcc

SEQ ID NO: 6605 - DNA, 120 bp, synthetic construct
  source 1..120: mol_type = other DNA
agatattttaaatttagattttaaagcttacatatcggatctctggcagtggtcctctgaatggtttccacaggtgggccaataccaaaacggttttctgctcgcacacggaagaaatat

SEQ ID NO: 6606 - DNA, 120 bp, synthetic construct
  source 1..120: mol_type = other DNA
attgacagctttcactctgaatctgtacttcctgagctctttcagattaggcaccacacattcacaggtagttataagtttgtctggttcatttactcttttccagtcagtagtaccttc

SEQ ID NO: 6607 - DNA, 120 bp, synthetic construct
  source 1..120: mol_type = other DNA
tgacctcacagactatgcctgagaatcctaaatctttgttcaataatattatagaaaagctaacaacattctgttttttgttgaattcctactggaaggtctgactgtttagtgggagag

SEQ ID NO: 6608 - DNA, 120 bp, synthetic construct
  source 1..120: mol_type = other DNA
ggcgataaggatcttgaatgactactttatctgatttgcactcatcactgattccatatttattcactgccctgactcggaactcatactgaccattggggataagtttccagatctaga

SEQ ID NO: 6609 - DNA, 120 bp, synthetic construct
  source 1..120: mol_type = other DNA
ttcagattccgcaccttcatcatcttgtatgactacattaagaggtagggatggttcactttcaccaatttcattgacagctttgacacggaactcatacatttggtgttcatcaagatt

SEQ ID NO: 6610 - DNA, 120 bp, synthetic construct
  source 1..120: mol_type = other DNA
ttcatagatgagctgcagcagtgatataggatgtatttttttttttcagggggtgatggtgaaggaataagttcttctgtctcttgaggaatgggtcttcctcaaagcctttgctttctt

SEQ ID NO: 6611 - DNA, 120 bp, synthetic construct
  source 1..120: mol_type = other DNA
gctgctgcaaatttggaaccacagctatttgtagctgtaatcacatatctgccatggtcttttcgcagtgcatccttgataattagttcagatttggttccaacgttgtctattacaaca

SEQ ID NO: 6612 - DNA, 120 bp, synthetic construct
  source 1..120: mol_type = other DNA
aatgtgtactgttaacttcacgtttttcaagccagtaacccaaaatggggcttccattatcttttggttcattccatttcactagcatactgttgctggtaacatcttccacaatgggct

SEQ ID NO: 6613 - DNA, 120 bp, synthetic construct
  source 1..120: mol_type = other DNA
ttccttctcctaaccaagggtgctgcacgcttcttaatttcctctggtacaataacattttcatcctttatccatgtaatagttgggtaaggtgatccagaaatacttgcatcaagtgct

SEQ ID NO: 6614 - DNA, 120 bp, synthetic construct
  source 1..120: mol_type = other DNA
gaagaattggggttccaccatcaaattctggaggttcccaagttaacttacaagaactcttggtaatgtcacttgctttaatatctttgcatggtccaggtaggcctattacaaaaatgg

SEQ ID NO: 6615 - DNA, 120 bp, synthetic construct
  source 1..120: mol_type = other DNA
catgaataaagggtattttattaactataaaagaccttgtgctcttacagtctgggtctttggcaaccacattttcagagatttcagatggctcgctgacaccaatagcattgactgctc

SEQ ID NO: 6616 - DNA, 120 bp, synthetic construct
  source 1..120: mol_type = other DNA
aaaaattaagtgcgagagcacttattgtcacaaagattaagtgcaagagcatactaaaggtgtctttggccagcacagagtcctcaatttcggtgtagtcgctttgtcctatagcatttt

SEQ ID NO: 6617 - DNA, 120 bp, synthetic construct
  source 1..120: mol_type = other DNA
gtccagcaagattttcagccaacacacggaatctgtattttttcttattagtgagacctttcactctgaattaggaacaaagtgcatgtgtatcatcatggtaagaagcagaagaagcct

SEQ ID NO: 6618 - DNA, 120 bp, synthetic construct
  source 1..120: mol_type = other DNA
atagtcactgtggatttcttagggacattttcaatggtaattcttttgtcctgcttcagaatcatatcagcctttgtccaagttattttaggttcaggttttccggttacggtggcagga

SEQ ID NO: 6619 - DNA, 120 bp, synthetic construct
  source 1..120: mol_type = other DNA
aaccacgtggacatctttcaactatatatcctttgatgcgtgaaccaccatcatttttaggtggatcccatgttaagaagatgctattggctgttcgatctctccatttaacattctctg

SEQ ID NO: 6620 - DNA, 120 bp, synthetic construct
  source 1..120: mol_type = other DNA
gctacctcaggaagcattagcaccgatgcattcttaaaaagtttttgtacattttcagtgaggtaaaggtaagaagttgtagcacataagacttttgtatggcatcccaaccttctggga

SEQ ID NO: 6621 - DNA, 120 bp, synthetic construct
  source 1..120: mol_type = other DNA
gtttcatattgcaacgaatccaattatcttttccttcttcgcatcgctcaattatatagcctaatattgggcttcctccatctttcagaggaggttcccatttgagctgaactgatgact

SEQ ID NO: 6622 - DNA, 120 bp, synthetic construct
  source 1..120: mol_type = other DNA
caggtctttctcttaatgtcacgtctttcaacaacgtaacctatgattttgcttccaccatcagttaaaggttcttcccaagcaaggctcacttcaccatcaaatgtttctgtcacttct

SEQ ID NO: 6623 - DNA, 120 bp, synthetic construct
  source 1..120: mol_type = other DNA
gagtataagaccgtctttagatttgccaagactctcagggtgatagcttagttgtagcctaagttcataaatagtcatcatgtactagcaactgtccaaggctctggcatgtaaagatta

SEQ ID NO: 6624 - DNA, 120 bp, synthetic construct
  source 1..120: mol_type = other DNA
agcaacagatttatcttgtccagcagtgacaatgtattcaccttcatctgggaagccacagtctttaatggttaacatgtgcttgtacttatcaactctgtatgagacacggttgtcaaa

SEQ ID NO: 6625 - DNA, 120 bp, synthetic construct
  source 1..120: mol_type = other DNA
agcaagtgtgaattgttagaaataaaagattattcactgtagttttcataccatgtactttgactttgccatcggttcgagagcttgggagtcgacagttgtagttgccagcatcctcaa

SEQ ID NO: 6626 - DNA, 120 bp, synthetic construct
  source 1..120: mol_type = other DNA
ttagagctatagtgagccttagacattatgcagactaacttcttggatgtgtaaactaaggctcagacttgaagaaacttgccaatggtagttaatagcaacaggaggtacttagttgaa

SEQ ID NO: 6627 - DNA, 120 bp, synthetic construct
  source 1..120: mol_type = other DNA
aatgtgttttgtatgggagggtgattaggattttacatctgttatttcattcatctgtagaattaattcagctggtgtataggattagggagctgcccccttgcccttccttctttcaga

SEQ ID NO: 6628 - DNA, 120 bp, synthetic construct
  source 1..120: mol_type = other DNA
ttacgcacgacattcaggttacaggaagtcttaaaatccttagcatcacaagtgtatgttttaatatcctctggggtacagtcatgtataacaagttttctgaccctgccatcagcaaca

SEQ ID NO: 6629 - DNA, 120 bp, synthetic construct
  source 1..120: mol_type = other DNA
gccttgtaattacctttcacaaagaggttggcgtgagttttgaaatcttttgctgttagttggacttccccagcatcttctaactttacatccctcagagtaagtgtatgaacttttcct

SEQ ID NO: 6630 - DNA, 120 bp, synthetic construct
  source 1..120: mol_type = other DNA
ttttcatgtgtctaagcatcaggaatgggaaaatcagatgtcaatggtgcgacagataggggtcattctgacagcaaagataagagacttgggggttcttccagttctatgatataaaat

SEQ ID NO: 6631 - DNA, 120 bp, synthetic construct
  source 1..120: mol_type = other DNA
tctttttgaaaagagacatttaagtaatgcaagagcaagttcacaaaaggctaaggtatttcgggtgcctagagtaaaggattaaaattcctatgccaaaagagatgtaaaggggcccta

SEQ ID NO: 6632 - DNA, 120 bp, synthetic construct
  source 1..120: mol_type = other DNA
tggtcactggaaaaggagaccaagaagatcttattatctgtataacaggcaggcgttacctatcagatgactgctggtgaattaccctgtaatcactttagtggaatactagttttgttg

SEQ ID NO: 6633 - DNA, 120 bp, synthetic construct
  source 1..120: mol_type = other DNA
cagtcacggtgacatcctttaaaggcctcagaagaccaattactcgtgcttttcgagagggaagaaacagctttgcgttactcattttgtaatcccaaaagaataaatagagacttagat

SEQ ID NO: 6634 - DNA, 120 bp, synthetic construct
  source 1..120: mol_type = other DNA
aaatccaccccacccgtctggtccaggcgacagttgtgcaaaacaagggagtgtattttgccttcttccttaatttcacaatcctgtaccaacaaaacagaaaaactttcatagaaaata

SEQ ID NO: 6635 - DNA, 120 bp, synthetic construct
  source 1..120: mol_type = other DNA
caaggctttctttaggattagcatgcgtttcttgccatctgccttaataacagcatttttggatggctttatttccttcccatccttaaaccatttcactggtgcatctgctttgctaat

SEQ ID NO: 6636 - DNA, 120 bp, synthetic construct
  source 1..120: mol_type = other DNA
aactcggatgttatcatgagataactccacagtaaatacagcactttccttctctttggcagttacatctttgagaggggtgaggaatttgagccggattcctatcaagaaaaaaaagaa

SEQ ID NO: 6637 - DNA, 120 bp, synthetic construct
  source 1..120: mol_type = other DNA
tttgttagcatgactgaactaataaactgcagattcagatagggtaaattttacattgttgagcaactcaccctcaacagtaacatttgccttggtcttgtctgtgccacagtcacacac

SEQ ID NO: 6638 - DNA, 120 bp, synthetic construct
  source 1..120: mol_type = other DNA
acaaacaaccgagctgaggtcttcttgccctccacctcagcagtatagaccccttcatcatcaaattgagaatcattaataacaagaatatgtttctttccatcagcgatgatatcaaat

SEQ ID NO: 6639 - DNA, 120 bp, synthetic construct
  source 1..120: mol_type = other DNA
gtcctctattggtttaagcagttcaacttcacgctctgtattggtcagggatgaagtaacataatgctttagacaacccaacgatgctttgcttttatgtgttttggtgtgttatttggc

SEQ ID NO: 6640 - DNA, 120 bp, synthetic construct
  source 1..120: mol_type = other DNA
tcagaagactagaaattaccttctacaacaagtttagccgtggaggtcttttctttgtttcccaaacgtaaaacacaggtgtattcaccagcatcggaaagttgaacatcaatgatgtgc

SEQ ID NO: 6641 - DNA, 120 bp, synthetic construct
  source 1..120: mol_type = other DNA
atgaactttggaaattcagagtggaaggttacaatgcaagtactagaaaaatgaatttcacctttgataggaccttttggcttggcagcctcttccttaggtgctttggcttctgaaata

SEQ ID NO: 6642 - DNA, 120 bp, synthetic construct
  source 1..120: mol_type = other DNA
tggagatgatcatttttccataggaacaaattgtcaaggcattatattgaatatcttagattcttcacatcttagaaaattatcaatacatgccttctccccaccccaccaccaccgccc

SEQ ID NO: 6643 - DNA, 120 bp, synthetic construct
  source 1..120: mol_type = other DNA
tatacccttacagggtctctgcctgtctccttagtttttatcagccccaaacatattcattacttaatctccaaagcatatgaaagaaatggtgcaacccaggaacgtacattccagtta

SEQ ID NO: 6644 - DNA, 120 bp, synthetic construct
  source 1..120: mol_type = other DNA
aactaagaatgacagtagatttgtaccttttgttggttcaggaatcttcctttccctttttgtaacagtaggtacttcaacctcttcaacaggttttggaggtggtggttctggtacttt

SEQ ID NO: 6645 - DNA, 120 bp, synthetic construct
  source 1..120: mol_type = other DNA
accaagacaaactaatgaagatgttgaataagcttgacaaatgcaaataatgtacaaagcaaggaaaatgaaaaaaagcatgctacctagcactctggaaagtaagcatttacaccgaaa

SEQ ID NO: 6646 - DNA, 120 bp, synthetic construct
  source 1..120: mol_type = other DNA
ttaacgctgacagaatggttgaaaaatactataccgcttttcagaacaacttcttcctttggttcaggtttacgttccggaagtaatttgcgaactttcttttcacctccaggcacttaa

SEQ ID NO: 6647 - DNA, 120 bp, synthetic construct
  source 1..120: mol_type = other DNA
tcaaaatttcctgttgcgtctacagtgaatactgagcatggtggatgatgctattttatagagcagcctcttttgctattatggccctcatagatttgaatggtgaaagaaaggaacacg

SEQ ID NO: 6648 - DNA, 120 bp, synthetic construct
  source 1..120: mol_type = other DNA
agatgagacaaagatagaccatgtctatacatgtatgaaatggatgggagacaaaggaagcaacactcatgagccaggaccataaaagccacagaaatataagaaatgaatgggactact

SEQ ID NO: 6649 - DNA, 120 bp, synthetic construct
  source 1..120: mol_type = other DNA
aatgtcttcataaccactctttccagctcccctgagaaccacacagaacacttctttaagttgcaagaaaaaaaaagagatgggggaactgtaacaagtcattcatatgctttcctttca

SEQ ID NO: 6650 - DNA, 120 bp, synthetic construct
  source 1..120: mol_type = other DNA
gatgatgagaaatacagcaaaggcaccaataacaacaacaaacaaagcatccagacaagccacagttgacatgagagaaacagtacaagttacatggaaacctaagaatgaggctcacat

SEQ ID NO: 6651 - DNA, 120 bp, synthetic construct
  source 1..120: mol_type = other DNA
aggtggaacttctggctctgcagggataggcacagacacttccttttctgggatgattttctcaggcactttgggcactttaaagatatgattttgtttactattaagaatttagaagac

SEQ ID NO: 6652 - DNA, 120 bp, synthetic construct
  source 1..120: mol_type = other DNA
acagccaatccatactcaaattgagtttacttgacataagtttacttgacaatccttgaacattctagacccttctatctctgtgcctttcaatatgctcttccctttccatgggatatc

SEQ ID NO: 6653 - DNA, 120 bp, synthetic construct
  source 1..120: mol_type = other DNA
catggtaggtacctttttctggaagaacttctggttttttggtaacaggcacaggttctttctttactggaacaagtttcttgggcacctcaggcactttgaagatattagttttgtttt

SEQ ID NO: 6654 - DNA, 120 bp, synthetic construct
  source 1..120: mol_type = other DNA
ggaacctctggttcctcctcttctgcaacaggaactggcttttcctcttcaggagcaatttcctcttcaggagcaatttcctcaggttcttcatatactttaaagatattagttaatttt

SEQ ID NO: 6655 - DNA, 120 bp, synthetic construct
  source 1..120: mol_type = other DNA
caaatatattagtattttaacattagaaacaatcaccagtaaacattcatcacatttacacagaacaaaacccttttagaagctgggggctccatccgcccccatcaaacagtggacagc

SEQ ID NO: 6656 - DNA, 120 bp, synthetic construct
  source 1..120: mol_type = other DNA
aatacctttaacaggtgtgacttcaggctttttaggaggagccgctggcactttcttttcaggaacaacttctttcggagcctctggcacttaaaagatattagtgaaattacatttaga

SEQ ID NO: 6657 - DNA, 120 bp, synthetic construct
  source 1..120: mol_type = other DNA
ttaggggttatgaagaccactggaacaaaatgtcttcaactgcaaaagaattagatcatctgaagcctaaggtcagtgacaaatacctttaacaggtgggacttcaggctttttaggagg

SEQ ID NO: 6658 - DNA, 120 bp, synthetic construct
  source 1..120: mol_type = other DNA
actttgaagatattagtatcttttagttagaagctataaagggggaatatcgactccacatttacccaagcaaatacaacttgtgagatcggcggacacttctatacagtctttccccag

SEQ ID NO: 6659 - DNA, 120 bp, synthetic construct
  source 1..120: mol_type = other DNA
atttatgacaaacccacagccagtatcatactgaatgggcaaaaactggaagcattccctttgaaaactggcacaagacagggatgccctctctcaccactcctattcaacatagtgttg

SEQ ID NO: 6660 - DNA, 120 bp, synthetic construct
  source 1..120: mol_type = other DNA
taaaaccataaaaaccctagaagaaaacctaggcaataccattcaggacataggcatgggcaaggacttcatgtctaaaataccaaaagcaatggtaacaaaagccaaaattgacagata

SEQ ID NO: 6661 - DNA, 120 bp, synthetic construct
  source 1..120: mol_type = other DNA
gggcactttcttttcaaggacaacttctttgggagcctctggcacttaaaagatattagtaaagttacatgtggagctatggagactactagcaaaatatacagcagaggaattggatct

SEQ ID NO: 6662 - DNA, 120 bp, synthetic construct
  source 1..120: mol_type = other DNA
tttatacttaggttaatgaagaggaatggactaaaattgttttcaggaatggaagagagatttcttctgcaggataaggttgagctgacatgtacctgtaactgcgggggcttctggttt

SEQ ID NO: 6663 - DNA, 120 bp, synthetic construct
  source 1..120: mol_type = other DNA
ttttcattattagacaaagtaaagacaaacaaacaatatcaaacacagcaacaagagggtgtctaccttttgtgggtggcacttcaggctttttaggaggaggcactggcactttctttt

SEQ ID NO: 6664 - DNA, 120 bp, synthetic construct
  source 1..120: mol_type = other DNA
taaccaaaacagcatggtactggtaccaaaacagagatatagaccaatggaacagaacagagccctcagaataataccacacatctgcaaccatctgatctttgacaaacctgacaaaaa

SEQ ID NO: 6665 - DNA, 120 bp, synthetic construct
  source 1..120: mol_type = other DNA
gactggattaagaaaatgttccacatatactccatggaatactatgcagccataaaaaatgatgagttcatgtcctttgtagggacatggatgaaactggaaaccatcattcttggcaaa

SEQ ID NO: 6666 - DNA, 120 bp, synthetic construct
  source 1..120: mol_type = other DNA
ttagacttaagttaatgaagagaaatgggctaaaattgtttacagtaggagaggagatatctcttctgcagaatgaagtcagggctaaagtgtacctgggacaattggagcttctggttt

SEQ ID NO: 6667 - DNA, 120 bp, synthetic construct
  source 1..120: mol_type = other DNA
ttccggtttgggaggaatagcttcaggcaacttcttttctgggacagctgcctttggcacctctgggactttaaagatattagtattttcattattagacaaagtaaagacaaacaaaca

SEQ ID NO: 6668 - DNA, 120 bp, synthetic construct
  source 1..120: mol_type = other DNA
cttgagttgcaagagtcaacacagacatgattcacatgtacacatcaaaataattttcaaaactagaaaggtggtcctttctatcgccccacccactatcccaccataaaaagacagtta

SEQ ID NO: 6669 - DNA, 120 bp, synthetic construct
  source 1..120: mol_type = other DNA
ttccacatttgttcagaggtaacgtacttttcatacgtggagtttctggctcttcaggtacatcctcaaatattttcatttcagggacaacttctttcatagcttctggtgctttgaaga

SEQ ID NO: 6670 - DNA, 120 bp, synthetic construct
  source 1..120: mol_type = other DNA
aaaatgatgcttgaaaaataaaagataggctatgagaggagcaaatgaacatggaggggagatttccagctttaactggaattatttttccctaggttggaggatattctgggagggtct

SEQ ID NO: 6671 - DNA, 120 bp, synthetic construct
  source 1..120: mol_type = other DNA
tcagttggaggatgttctggaatttcaggaatagcctcaggtggctccacctctggaaaaatgcctctggttgtatcaggttctttaaagatattagtaggtttacatttaaaagttgta

SEQ ID NO: 6672 - DNA, 120 bp, synthetic construct
  source 1..120: mol_type = other DNA
atggatttgtctataaagaacagggaagatgctgaattgcacattgagaattctccgatatttgacctactagaaattcatgtaagtcttttccctttctagaagcctcattatctatat

SEQ ID NO: 6673 - DNA, 120 bp, synthetic construct
  source 1..120: mol_type = other DNA
gaattatttcatgttctgattagcatcactgtatacctttagctggtggaacttcaggctttttcagaacagcttcacgaactttttcttctgggacaattttcttgggtacttcgggtg

SEQ ID NO: 6674 - DNA, 120 bp, synthetic construct
  source 1..120: mol_type = other DNA
gatgaatgagaaaagccagttacctttagttggtggaactctgggctcttcaggaacacgtactttttcttctaccacaattttcttaggcacctccggtactttaaagataatagtaat

SEQ ID NO: 6675 - DNA, 120 bp, synthetic construct
  source 1..120: mol_type = other DNA
agctggtggctcttttcgaggaacaactttagtgggcggtttttttggagggatgattttctcagatatctcaggcccttcaaagatattagtattttggtttagaatgaactcttgaag

SEQ ID NO: 6676 - DNA, 120 bp, synthetic construct
  source 1..120: mol_type = other DNA
aataaaggattgcatgcaacaatacacgaaaatccaggatctttccaaaaatacctttagctgggggaacagcttcctttttaggcacaaggactttcttttctgggactttctttggta

SEQ ID NO: 6677 - DNA, 120 bp, synthetic construct
  source 1..120: mol_type = other DNA
gagtctactatgacagggacagcataatctaactgcttaagagcactgtctgaagcattaagtgaattaggaagcagggaaaagtagacattttgtaataaccttgaatgcttgggctaa

SEQ ID NO: 6678 - DNA, 120 bp, synthetic construct
  source 1..120: mol_type = other DNA
cttagatttagctactgagaaagatttggaacaccaggaattttaaatgttcaatccttaaaagcggttatacctctaggtggtgccacctcttcaacttcctctatgctaggtggttct

SEQ ID NO: 6679 - DNA, 120 bp, synthetic construct
  source 1..120: mol_type = other DNA
acaccaagtgaaaaaatggacacaacacaaacttgggtgcaaaagagtcagaaatgacgaatgtgaatgacagaccatacaatgcacacatttatgttgagtgtcctgtgtggatagaac

SEQ ID NO: 6680 - DNA, 120 bp, synthetic construct
  source 1..120: mol_type = other DNA
aaaaaaagagaaaccaagaagaccccacacccagaaagaccaatgtgttaacagtcgctcaagacaggtctgtcatgttagttgggagcccagatattataatgtaattgggatttgtaa

SEQ ID NO: 6681 - DNA, 120 bp, synthetic construct
  source 1..120: mol_type = other DNA
ggttccacttttttaggggcgggaacagggactttcttctctggtacaggtttctttggcacttcaggcacttaaaaacatttcatttgaaggcattaaaaaccacatatacatggtcat

SEQ ID NO: 6682 - DNA, 120 bp, synthetic construct
  source 1..120: mol_type = other DNA
aatggggaaatttgtatgtgagtatacatagatgtgagttttttcccccaagtactctaagtgatgaaattatgtaccttttgcaggtggagcctccactttcttaggagcaggaactgg

SEQ ID NO: 6683 - DNA, 120 bp, synthetic construct
  source 1..120: mol_type = other DNA
tataaggatgtaccttttgctggcggaggcttctcctttttaggaataagcacaggaactttctcctctggcttcttaggaacctcaggcactttaaagatattgtttattgttaagttc

SEQ ID NO: 6684 - DNA, 120 bp, synthetic construct
  source 1..120: mol_type = other DNA
tctaacaggtggtgctacttcttttctagggacaggtactttttcttctgcgacaaccctcttgggcttcatgggcacttgaaatatgaagtataaggaaattttattgtcagtaaaagg

SEQ ID NO: 6685 - DNA, 120 bp, synthetic construct
  source 1..120: mol_type = other DNA
gaccatcagacgggctaggaagacatgattttagaacatacataacaaagttgtttttggtgattattactcagtaatgtacctttgggtggtggaggtttgagtttcttaggaatgggc

SEQ ID NO: 6686 - DNA, 120 bp, synthetic construct
  source 1..120: mol_type = other DNA
gcttgtgttagcttacatctctatcttaacttttgaagcagtcattgtcaagttttgataatgggaaccctgtgggtaaatacattttctcaatagcctatcatactccgtaatagcaag

SEQ ID NO: 6687 - DNA, 120 bp, synthetic construct
  source 1..120: mol_type = other DNA
taggagtcagattgggaactagaaggcaaagagccagatagtttcatgcctcacattacttaatcaaagttcaatatacctttgatgggttgaggttctctttttggagcttcaattgat

SEQ ID NO: 6688 - DNA, 120 bp, synthetic construct
  source 1..120: mol_type = other DNA
ataaccagtgtatttggtaaagagagtagggcaagtacaatattgtgcataatggaagggcggatgtacctcttgcttttggaggcgcctcttttttagttacagcaacaagaacttttt

SEQ ID NO: 6689 - DNA, 120 bp, synthetic construct
  source 1..120: mol_type = other DNA
attaaagagtcagcataccttcagctggctcagcttccactctcttagaaataatgtgcagcttttcttccacaacatattcctcaggctcttccatcactttaaagacagcagttttaa

SEQ ID NO: 6690 - DNA, 120 bp, synthetic construct
  source 1..120: mol_type = other DNA
aaacatacttgaggatttaagtgaattgtaagataatattccatattgttttccccgccagttttgtggggcaggtatggtagaagaggcaggaggcttcacatgatttttgagcctaag

SEQ ID NO: 6691 - DNA, 120 bp, synthetic construct
  source 1..120: mol_type = other DNA
gaccttaggaactttcttaggaaagttcttttggccacatggctctagccagaatgctggattttagttggaaacctggtgctgccttaattcattgaaaaaatatcccaatggaatagt

SEQ ID NO: 6692 - DNA, 120 bp, synthetic construct
  source 1..120: mol_type = other DNA
acagatgtatatacagccatgtggtcactacagatggataactgttcttctatctgcttaggacatagcttcatggtacttcctcactataagaaggaggaagctaatttaagatgaggg

SEQ ID NO: 6693 - DNA, 120 bp, synthetic construct
  source 1..120: mol_type = other DNA
tggagaaacaataccttttggtggtggtggaacttcttcctccttccgaggaacaggtttcctttcttcaggaactttcttctttggtatttctggcacttaaaggatagtattgaattt

SEQ ID NO: 6694 - DNA, 120 bp, synthetic construct
  source 1..120: mol_type = other DNA
tcttagaatagttgaatatgtgtaacttacttctcttccccacatttctcctctcatttttggggggtgtgcctgtagtgaattcaaaactcaggaaacactctagagtaggtctctcaa

SEQ ID NO: 6695 - DNA, 120 bp, synthetic construct
  source 1..120: mol_type = other DNA
tgaatggatgcgtgcaattgtagcttcagtgcttcaataagatagtgccttttatcgccaaaaaaatcccaaacaaaccaaagcaagggatttgtgatataccacagcagcacattttca

SEQ ID NO: 6696 - DNA, 120 bp, synthetic construct
  source 1..120: mol_type = other DNA
aaaaagatacaagatggatgctaagaattatttttttcacaaatattattctaccttttggtgctgggggctccacttttttagggataggaacaggggccacttcttctggagctggtt

SEQ ID NO: 6697 - DNA, 120 bp, synthetic construct
  source 1..120: mol_type = other DNA
atctaatttttaataatggtggtgttaaactactgactggcaaaattcctgaaaatgtaaccataggctctggtgagctagcatgaactggctccaggacactgtatttccaagtaacag

SEQ ID NO: 6698 - DNA, 120 bp, synthetic construct
  source 1..120: mol_type = other DNA
cctgtgactgacacctcctcctctgtgtgagaagcaaagaacatcttttcttctgaaataaccatcttctttgtatgcacagctggtactttaaagagagtatttcacattagtattcct

SEQ ID NO: 6699 - DNA, 120 bp, synthetic construct
  source 1..120: mol_type = other DNA
ttaggaggtggtggtgctttcttttcaggtactttggctggaacttttctctcatgtgattctgaaataaaaacacaggaataagaagggatgcttaaataggtaagttctcttaggttg

SEQ ID NO: 6700 - DNA, 120 bp, synthetic construct
  source 1..120: mol_type = other DNA
ggttctacctccagttcgtcataaggttcttcgaaagattcaatgaagactctcttctccttgtggactgcttgctttttctcatacacagcttctttttctttctgaacctctttcttt

SEQ ID NO: 6701 - DNA, 120 bp, synthetic construct
  source 1..120: mol_type = other DNA
acatctgcctgggtttgttttcctgggaaaggggcaatatgaaatagccatcatttctaatgctaaatttaacacagcagaggagactccacaactttcaataagttggaagcctaatat

SEQ ID NO: 6702 - DNA, 120 bp, synthetic construct
  source 1..120: mol_type = other DNA
aaaaaaaaagaatagctgttggatttctgggcaagaccttctttaaattttcatccagaaataaccagaatacactggtgttgtcattggttcccaggggctcaggaggacaggaaagag

SEQ ID NO: 6703 - DNA, 120 bp, synthetic construct
  source 1..120: mol_type = other DNA
aagtacacattttcatctttgcttcatccttagggacgaacacaaatatgttaggaggaagagtaacaagtgggtttaaagtcctttgttgtgcagctgttataccttaaccacggttcc

SEQ ID NO: 6704 - DNA, 120 bp, synthetic construct
  source 1..120: mol_type = other DNA
tgaggttgcattagtcacaaaattggaagtttctaattgaatttcctctaaggctggctgaaaaataggtcaagcgtttaatgccaattatagcgggtgttaagggcctaccatttccac

SEQ ID NO: 6705 - DNA, 120 bp, synthetic construct
  source 1..120: mol_type = other DNA
ttctaattgctcactgaagaatatgacatggaaggttttgttctgactctgctgcagtttggtcgctggtataaaatttcgtacagattcctagtgctagaatattgctgctccaagctc

SEQ ID NO: 6706 - DNA, 120 bp, synthetic construct
  source 1..120: mol_type = other DNA
attctagatagaatgagagcatgagcgcatacagggtagaaatacagaaaacagacgaggcttaaattatacattcactggaaaactgtcaatgaaatcaccttcatcgtctggggtcac

SEQ ID NO: 6707 - DNA, 120 bp, synthetic construct
  source 1..120: mol_type = other DNA
gtgtggatggcaggagtgctttctagaagaggctggaggggagggtcttatatgtataacagtaccataaagtcttagaaatcacagtactctggtgagctctatttactaaagaattat

SEQ ID NO: 6708 - DNA, 120 bp, synthetic construct
  source 1..120: mol_type = other DNA
tgttccacttctgttttatgtctaccttggggtttaaggattctgccatttctgaaccattcagattttacatttggtacagaaaattggcatgtcatggtgcaagtctggccttctttc

SEQ ID NO: 6709 - DNA, 120 bp, synthetic construct
  source 1..120: mol_type = other DNA
gcttgaagaagacctcggaagtcagtgattccatacatgcgggcatatttttcatattctttaggatcaacatttttgagaagttccatgatatcaatttcctcttcttctccagctcct

SEQ ID NO: 6710 - DNA, 120 bp, synthetic construct
  source 1..120: mol_type = other DNA
attttttgttctttaatactttccactggggctggttgactgtggatgcggaacccacttatatggagggctgattgtacgatttgtggtttttattgaactcactttttcagcattgct

SEQ ID NO: 6711 - DNA, 120 bp, synthetic construct
  source 1..120: mol_type = other DNA
caaataaacatgagtggttgctggcttgagctgcataatacttttgaggtgtctgtacctttaatggtcacttttgatttggtagtgtcacttccagccacatttgaagctttacacaca

SEQ ID NO: 6712 - DNA, 120 bp, synthetic construct
  source 1..120: mol_type = other DNA
aatgcagccacagtagcatttaaaatccaatcttagcccaagggaattaggagttgaggctcagtgtttaactgaagaccaatgatgaagacattgatgagtaacatgataggaaggcaa

SEQ ID NO: 6713 - DNA, 120 bp, synthetic construct
  source 1..120: mol_type = other DNA
gttataacttacttggtcaagatatcataagaaatgctcatggatatataacaggcagtgaagaaaaacacaacaggttggggctgtgaggataactcacctttgatgacgattgaagac

SEQ ID NO: 6714 - DNA, 120 bp, synthetic construct
  source 1..120: mol_type = other DNA
tcagcctccttctacgagcttattctaaactgttctttgacttacaaggtggatgataagaagtaactcatggccatttagagaatcacaaatttgtaaaaagaaggggtagtctcagta

SEQ ID NO: 6715 - DNA, 120 bp, synthetic construct
  source 1..120: mol_type = other DNA
gagataggttctgatccacttatggcacaatcaaaaacaactggcagtccaactgtttcttgaacatctctcaattgtcgagaaaatgatggtggaagtttttgctctgtaggaacagaa

SEQ ID NO: 6716 - DNA, 120 bp, synthetic construct
  source 1..120: mol_type = other DNA
gctccaactgcttgacaaaatacggtggttctgcagccaagagagataatcaatcagtcatgaaggagacatgccagatcatcgattgtatacaaagataaaaatgtgcaatcatgacaa

SEQ ID NO: 6717 - DNA, 120 bp, synthetic construct
  source 1..120: mol_type = other DNA
attttactgttttgtaaactgacctctcacagtcaaaggagcactacattcatcagaaccagccatattagtagctatacatgtgtagtcaccactgtctgattcttccagcatgttcac

SEQ ID NO: 6718 - DNA, 120 bp, synthetic construct
  source 1..120: mol_type = other DNA
gaagcactcttgcatcccagcatcgtttttgatctgacaagtgtattttccagcattggctggttccactcttgaaaactgtaaggttgcaatgttttctgaataagaaatccatatgtt

SEQ ID NO: 6719 - DNA, 120 bp, synthetic construct
  source 1..120: mol_type = other DNA
tttcaattctttgttgtgtcctttccctattttaaaacatcgttgaagagtcaaacaggaagttaagaggacaattaaagaggaggctaatgtgaaaaacacacaggtggggagagcgct

SEQ ID NO: 6720 - DNA, 120 bp, synthetic construct
  source 1..120: mol_type = other DNA
gaatgagaatttgattactgtcttgtatatgaaccagtggagaactatttcctaaggctgcaatgctatcagttacatagcatgaagagccggaatggcaaagtgggtcagatatcttaa

SEQ ID NO: 6721 - DNA, 120 bp, synthetic construct
  source 1..120: mol_type = other DNA
tctctcggttatctttggcccaagtgattttgattggtgcagtcccagttacatgacatttaaaagtaccactttctccaagagcaagatctactgatacaggctttagatcaaagaaag

SEQ ID NO: 6722 - DNA, 120 bp, synthetic construct
  source 1..120: mol_type = other DNA
atgccatgtaaaagaggatgtttgaaaagaaagagagcaataaaaagaggtagctgtcaacacacctaagacagacaccagagcttcacagatatcttgaccagcctcattttctatcag

SEQ ID NO: 6723 - DNA, 120 bp, synthetic construct
  source 1..120: mol_type = other DNA
tccgatctatgtggggaagggtagttttgcgtttaaagagaagttttattctgtgcccctccaccccctggaaatattgtatattcataaaaatctcattctactcaccagaaacatgga

SEQ ID NO: 6724 - DNA, 120 bp, synthetic construct
  source 1..120: mol_type = other DNA
cacttagctttttcacgaatcgtggaggttctgatgaaagaaatttgtggttagaggaaaaaatgtgagaatcatggccacacaagttattagttaggcaagaacagataggaggaaggg

SEQ ID NO: 6725 - DNA, 120 bp, synthetic construct
  source 1..120: mol_type = other DNA
gtatttccaactttcatgaagttcgctgtcatttcggaaccatgaaactttgatttctggggagccacttattttacattccagttgaatggattctccctgctttgcaacttttgaagc

SEQ ID NO: 6726 - DNA, 120 bp, synthetic construct
  source 1..120: mol_type = other DNA
aagatgctgttccaagtgggttggaagctgagcaagagtactggccagagtgactcaagtcagtttgcaaaatttttaaagttgccacattatctacaaatgaagtctgtagattttcat

SEQ ID NO: 6727 - DNA, 120 bp, synthetic construct
  source 1..120: mol_type = other DNA
ctttttccaagtgacagaaattggaagtgttccagtgtaggtgctctccagaattatggacttccctggttctacagaatgatcacttaatctcttcaaaaatgcagctggttctagtaa

SEQ ID NO: 6728 - DNA, 120 bp, synthetic construct
  source 1..120: mol_type = other DNA
ttgtaaaaggaatttgcataagcaaccagaagaaaacagcagaactaacctgaaacatcaaccacagctgtgcagctgcttttcccaacattattttgaacctggaaagtgtatgtgcct

SEQ ID NO: 6729 - DNA, 120 bp, synthetic construct
  source 1..120: mol_type = other DNA
tagttctagaagaaactcagaaaaagaatctgccagtaactcttagtaattcattccagcatttggcaccagtttctatcgtgggctattgtaccaacctaagaccatcagtgtggccat

SEQ ID NO: 6730 - DNA, 120 bp, synthetic construct
  source 1..120: mol_type = other DNA
cttcacaagataaccagctagatgggcagagaacccagatagatcctagatgtcgttactgaacagttcaacattctatctactacaccttactgatgtatcttaggctacaaagattga

SEQ ID NO: 6731 - DNA, 120 bp, synthetic construct
  source 1..120: mol_type = other DNA
aactctgatttctggggatccagctatcttgcattcaagtcgtgaagagtcacctgctttcacaattttggaggcttctaatttctttacaaactttggtggttctaaagagtcaggaaa

SEQ ID NO: 6732 - DNA, 120 bp, synthetic construct
  source 1..120: mol_type = other DNA
acagatctctcatggcacacaagtctgtattttgcacttgtagatatttcttttccatccttaaaccactgagcactaatgggaagtgaaccagacaccttgcactccatatgaatagaa

SEQ ID NO: 6733 - DNA, 120 bp, synthetic construct
  source 1..120: mol_type = other DNA
atgataagatttaaaagcgttacagaatttttatttgataggctgcttcttgtataactgacctttcagggcaactctagtactgcatgagcagctgccgccttcattggatacaatgca

SEQ ID NO: 6734 - DNA, 120 bp, synthetic construct
  source 1..120: mol_type = other DNA
cacaagagcctttaactgtacccttgtgttgggattgacatcttgtgactgtggcttttccacaaagtaagggggttctgaggtgaaagaaaaaacaagcaaaagaaaataggaagtttt

SEQ ID NO: 6735 - DNA, 120 bp, synthetic construct
  source 1..120: mol_type = other DNA
gtgcattaccctgctgaaaggcttacatctgcatttcttcctcaaacccaaggcaaacgttctgaaccaaccttttactgagagtaatgcagaacatctttgtattcctgcatcattttt

SEQ ID NO: 6736 - DNA, 120 bp, synthetic construct
  source 1..120: mol_type = other DNA
ccttaatttctctatcatttgcaaaccatgttattttaattggaggggtaccagttactttgcaggctagctgggtggcatctcccttctttaacagctgtgatggctctaacttttcaa

SEQ ID NO: 6737 - DNA, 120 bp, synthetic construct
  source 1..120: mol_type = other DNA
tttctaaaaatactaacctaatacagtgaatgtagtctcacaggagctgctgcccacttcattggaaatctcaaatgtgtattggccactgtcgtgcagctcagctgaataaaatttgag

SEQ ID NO: 6738 - DNA, 120 bp, synthetic construct
  source 1..120: mol_type = other DNA
taccagtttttcttccatggggtaagaaagctagtttgacaatttattaaagagacattagtttttcaagcactaacctttgagtaagtgggttgccatgcagccacacttgccgacttc

SEQ ID NO: 6739 - DNA, 120 bp, synthetic construct
  source 1..120: mol_type = other DNA
tttaataacaaagtgtactgactgaattgtttgccaacagtttttctactgaggattccttgcagagaagggactagaaaatacattcacacgtttcttacctctgacagtgactgtggc

SEQ ID NO: 6740 - DNA, 120 bp, synthetic construct
  source 1..120: mol_type = other DNA
gttgtaagggacttaggtctggagagaaaggttggtggatatgcctctgcaaaagaaatttttccagcattacatttagtccccaccaaagcacttgctgtaattatatattccaagaca

SEQ ID NO: 6741 - DNA, 120 bp, synthetic construct
  source 1..120: mol_type = other DNA
attgtagagaagaggaagctatagggaacctcatcgttttcacattcaagagatgtgctgcatttgcccttccccttgatattctcattgacaaagaagaccaagggacagccttcccca

SEQ ID NO: 6742 - DNA, 120 bp, synthetic construct
  source 1..120: mol_type = other DNA
aggggttcgattttcctcttgatcactggggcagctgcaaagggaagtagagtccattaacatgcctccttatcaggcatatgacatttttgtttttcttctaacttttgttgctgttaa

SEQ ID NO: 6743 - DNA, 120 bp, synthetic construct
  source 1..120: mol_type = other DNA
ggcctcacagacatactctccttgatggtcttcggtatttactttgtcgatgactagcgtatatgtattttgatcttgtaaacacttgaacttttcatctgaaggcaccagtttattctc

SEQ ID NO: 6744 - DNA, 120 bp, synthetic construct
  source 1..120: mol_type = other DNA
gtacctgcttttcttcaagtgctagtggaaatcttaaggacttgccttcctcaattctgaccgcagaatcttgccctgcattttccagtggatttgcactttctatcaaaattttacctc

SEQ ID NO: 6745 - DNA, 120 bp, synthetic construct
  source 1..120: mol_type = other DNA
cactgtcttccctctgagggtcattgacaatgaaagttccagagccattagggttatgaatgatagtgtaataaacactggtgcaaagctgcttgttttctttgaaccatgtaacagtag

SEQ ID NO: 6746 - DNA, 120 bp, synthetic construct
  source 1..120: mol_type = other DNA
ataagaggctacaggaaatgtttaatttggatttgtaagagaaccactgttttcagtttctagaaatgcaggccttctttcatctatgtaaatcaccatattacttgaacaaagcctttg

SEQ ID NO: 6747 - DNA, 120 bp, synthetic construct
  source 1..120: mol_type = other DNA
aagtaagccaaggcttacttttctttattcagtcactgttattctgcgtatactcaagctcaccatacttgaaactaacagaattacagaattctaatgagcaaaaccaaacaaagccct

SEQ ID NO: 6748 - DNA, 120 bp, synthetic construct
  source 1..120: mol_type = other DNA
attcaaaattttttttgtgagggaggcaggggaggcctggctgctctgcctattttctgtacattgtctctattgcttctttaatttggatagctgttagagaattcccatgttgagaat

SEQ ID NO: 6749 - DNA, 120 bp, synthetic construct
  source 1..120: mol_type = other DNA
gtggtcatctgatatggtctccacttttacattgtacttttgcatatatggtttatctgctaaaagagagtccattccactgaaacactttgtggaggaggcatgagggtaaatagaagt

SEQ ID NO: 6750 - DNA, 120 bp, synthetic construct
  source 1..120: mol_type = other DNA
ctcctacacaattcacagctctgcacctgtatgttgcactatcagaaagacagacatttcgaattttaagagtgtgacttcccttctcctcgctaatcacgtatttaatattatctggct

SEQ ID NO: 6751 - DNA, 120 bp, synthetic construct
  source 1..120: mol_type = other DNA
ctacctcaccttcggaaggtgttgaatatctttcagcaacttcccctaaaggtgtggaatatctttcaactgtctcacctcctgaatgtattgaggattgtttagttatatctgaaggat

SEQ ID NO: 6752 - DNA, 120 bp, synthetic construct
  source 1..120: mol_type = other DNA
gtgagatggaacttctgcctccattttctagaggacaacttttctcagaaagatcagtttcttctatatctgcagatgaggttggaagtagggcacatgattcactatagatttcttcag

SEQ ID NO: 6753 - DNA, 120 bp, synthetic construct
  source 1..120: mol_type = other DNA
gctttgatttttcacttacatgtctctctttcccttcagcctgacattgtatgaattcagccctgatgggcttgctgatttttatggttcttgaagcaccatgcacaaatctgggaattt

SEQ ID NO: 6754 - DNA, 120 bp, synthetic construct
  source 1..120: mol_type = other DNA
cgccttttgcttggtcaaacaccaatgctaactcttcttcctcatccaagtagtcatggaacactgggactttatgtgctttgacatcatgtttttgttttgctttcactttaagcatac

SEQ ID NO: 6755 - DNA, 120 bp, synthetic construct
  source 1..120: mol_type = other DNA
ttctcatcattcccttttgttccacatcttgttttttgttaaagggagagccagtaaacctcaggtcaacctttatcctatcttctcccctttcaactaaagcctccacattttcatgtg

SEQ ID NO: 6756 - DNA, 120 bp, synthetic construct
  source 1..120: mol_type = other DNA
atattctacttgcatatcttttagcagccatggatttgtggtctatgtcttcagaatctgaaaaggcgtcacgtgtatccctttctgaatgttcagattccccctcagagaataattctg

SEQ ID NO: 6757 - DNA, 120 bp, synthetic construct
  source 1..120: mol_type = other DNA
aaatgtcctattgactaaacacttgctaagagatgaaatcacatttagaaagaacatgcattttctaaattgctactttagcagagggctattctcagtttttcctgctagtaaacactc

SEQ ID NO: 6758 - DNA, 120 bp, synthetic construct
  source 1..120: mol_type = other DNA
aatgaactggagatcctagggcaaaagagccgagttcaaatcaattctgggaatatgacagtcaaacaccgcactatagcactagattctttaggaagtgagttaagagatctacatttc

SEQ ID NO: 6759 - DNA, 120 bp, synthetic construct
  source 1..120: mol_type = other DNA
aaggaaagtccatggataagaggaagaagttattacttgcccagacaagtttattcctgctcttccagacataatggagaatcaagcccaataacgacaaaaattgtgatcttgccatga

SEQ ID NO: 6760 - DNA, 120 bp, synthetic construct
  source 1..120: mol_type = other DNA
tacacttagtactgctgacgttgtcctctctccacagtcattgtgtacaatgcagctgtatagtccttggtctaccagctgaacattacatatggtaagaaactgaatatttccattttg

SEQ ID NO: 6761 - DNA, 120 bp, synthetic construct
  source 1..120: mol_type = other DNA
gaggacctagcgggagttattgcatgttattttattagtaagttatggactgaccacagtatgcaataaaacaaacagcagagactctcattagtaacagtgggactgagaggtatacag

SEQ ID NO: 6762 - DNA, 120 bp, synthetic construct
  source 1..120: mol_type = other DNA
gagaagcaagctgagacatgaatgggctaaggaacttcactacattgttcatgaaggcaatagtggagtacccaacagggttttggatattcttttctttcttcctcttgttgtaaagtc

SEQ ID NO: 6763 - DNA, 120 bp, synthetic construct
  source 1..120: mol_type = other DNA
gcttgatacttggcctacagcattactagcaacaaacgtgtaagttccttcatcttctggataagcttcggcaatttccagttgataagtgtcttcaaattgagtcattctaaagaaccg

SEQ ID NO: 6764 - DNA, 120 bp, synthetic construct
  source 1..120: mol_type = other DNA
aaaagttactctcctgcccatgatggtagatgtgtataaatggcaggttctcctcttagagtaacaaatctgttcagttccttagatagtaaggtaaagtagaagatgaaatcctggcca

SEQ ID NO: 6765 - DNA, 120 bp, synthetic construct
  source 1..120: mol_type = other DNA
catctgtccatcccttctttccctatcacagtatcacttctaaaaagtaaacctgatcatggtacccaggggcttaaaaatcctgcagtgtctcctaaatgtaaacaagatcaattccaa

SEQ ID NO: 6766 - DNA, 120 bp, synthetic construct
  source 1..120: mol_type = other DNA
atttgtggaaagcagggctacacttacttaaggcaatacctggccagaggaagttctgtaaatatttttagtcccagtggtatgaaactatgtgagttggcaagtttttgaagggtcatt

SEQ ID NO: 6767 - DNA, 120 bp, synthetic construct
  source 1..120: mol_type = other DNA
catatattgtctcattctaccaagatcagattcctgggatgaggaaattggctggtggtacttgagaagcatgccccaattaaaaatggtagcagctaactctgattgattactgtatga

SEQ ID NO: 6768 - DNA, 120 bp, synthetic construct
  source 1..120: mol_type = other DNA
gataaacaggcatttcctgatcaggagacacaacttctggaactaaagaaagaaaccacaagatttgtcatgattaagtcaccatagagacctcacagaagggagcatgtaggtttatct

SEQ ID NO: 6769 - DNA, 120 bp, synthetic construct
  source 1..120: mol_type = other DNA
tggtgggggcttagcgatggacacctgaatgaattatacaataacttccgtgtgctacctatttttaaaattcatttggacaaatcatgtggtgaagaggctcatatcattccagtttgt

SEQ ID NO: 6770 - DNA, 120 bp, synthetic construct
  source 1..120: mol_type = other DNA
accagatgaggatctggccatcaggtgctttctgaaaataacttctcaataggtcttttaacagctgccctcccttttccatagatataatgtgaaaaaaaatgtagctggaaccacatg

SEQ ID NO: 6771 - DNA, 120 bp, synthetic construct
  source 1..120: mol_type = other DNA
ctttggatgagcaatatgataaagctgaactcaactggtatttctctagacatgtttcctccattatatcatttgggatggtggacacttatgaggacaagctctgtaaatgcagccgac

SEQ ID NO: 6772 - DNA, 120 bp, synthetic construct
  source 1..120: mol_type = other DNA
gtcatctttcatccactgtacagtgatgtcaggttcagaaacttcacattcaaacatggctcgcttcttctccagtaccttaatgtccttaatgtgtttcctaaattctatatgacgagc

SEQ ID NO: 6773 - DNA, 120 bp, synthetic construct
  source 1..120: mol_type = other DNA
aagtgatagacactgaggcatctttccaggtagcctttcaatgctactctaactggaacattttatccaggtggagatactagtgctttactcagtgtaaccacatactagatgtttcaa

SEQ ID NO: 6774 - DNA, 120 bp, synthetic construct
  source 1..120: mol_type = other DNA
gcttaatttccacactcttatggaaccattttactggaacagtgtcatgggaaacactaacttcaaaggcaacagtggcattttccaaggctgtcacatcctttggctttttaatgatct

SEQ ID NO: 6775 - DNA, 120 bp, synthetic construct
  source 1..120: mol_type = other DNA
gaaaaggacaaatcctatgttacttgccttcaactttgagtttggcagatgttttggaggtggccaccttgtaggtatattctccaatgtcatctaatttggtggcagcaatgataagtc

SEQ ID NO: 6776 - DNA, 120 bp, synthetic construct
  source 1..120: mol_type = other DNA
tcactgtgttggcaaatgtcgcccattctatgaagtttcaccccattgcctccactcttatcatccattagcagaaataattactgctttaacaagctagttgcttatgtatctgtcctc

SEQ ID NO: 6777 - DNA, 120 bp, synthetic construct
  source 1..120: mol_type = other DNA
tccatgtgcttcaattttatatttagaactgggcttgatttccttgtccttaaaattccacaggacatcaattccagagtgggacagctcaacctcaaacaccacattttgagtttctgt

SEQ ID NO: 6778 - DNA, 120 bp, synthetic construct
  source 1..120: mol_type = other DNA
ctccttggttacatccttgaccgtgaggttctgacgtccacgacgagatgtaattgtatatttgccattggatttaagctccacatcattatgataccattttccttctatattttctgg

SEQ ID NO: 6779 - DNA, 120 bp, synthetic construct
  source 1..120: mol_type = other DNA
ttcacattcaaaggttgccatagtgtctttttccttagcaacaacatcttgtaattcctgtgtgaaagtgatcaattgcttggctacaagaaaaaggtgggggaaaaaggggagagcaca

SEQ ID NO: 6780 - DNA, 120 bp, synthetic construct
  source 1..120: mol_type = other DNA
actctaactggctctgggtacaagacaatgtctggcttttgcttttctttctgatctgttgttacacctgtaagtgcaccttcatgagccattctctctaattcttcaattctctgtaag

SEQ ID NO: 6781 - DNA, 120 bp, synthetic construct
  source 1..120: mol_type = other DNA
gatgtcactgtttttcaaccatacaatgtcagggttggggttacccgtagctctgactttcatttcaagtcgggaaccttcctttatattgacatttttcagtttttctacaaacatcgg

SEQ ID NO: 6782 - DNA, 120 bp, synthetic construct
  source 1..120: mol_type = other DNA
cgtataggagacctgctcactgaacgtggagagagagatctgcaaaacaaagacacacaatactttcgtgaggcataaagaaaactcagcaaaacaaacttcattttgtcttattcatta

SEQ ID NO: 6783 - DNA, 120 bp, synthetic construct
  source 1..120: mol_type = other DNA
atttcctttaatattgctggcaaatgcagtgtagattccttcatcttctggaagaacaacaggtatacgcagactagctctgccatcttgtagaaagtccatttggtatctttctccatg

SEQ ID NO: 6784 - DNA, 120 bp, synthetic construct
  source 1..120: mol_type = other DNA
tccaggtgctgtttctccaactttaggttcttgaacaaatgcagtcacttgtgtctgataaagcatttcttgctgggacttcatcagtaactcataatcagctaagagttaagaacatca

SEQ ID NO: 6785 - DNA, 120 bp, synthetic construct
  source 1..120: mol_type = other DNA
gcagaagtttctccatgcttattgcgaacaacaatagtgtattctccagcatcatcagcaaaagtcatagaaatcaccagcttgcattcaccggtttgtttgttgtaactcactttgtat

SEQ ID NO: 6786 - DNA, 120 bp, synthetic construct
  source 1..120: mol_type = other DNA
attctactctaggcttcatgcacgtattatacaagtcacagagaactctatattcagccatcaaaatacctgtatccagtggttagaggaacaccagattttttccagtatacatggggc

SEQ ID NO: 6787 - DNA, 120 bp, synthetic construct
  source 1..120: mol_type = other DNA
ctaatatattagtaaagagctgtaaggctcaatagcaaatgctacctattcaacaaagctttgccatggtatcaccaactggaatgaatctatgcctcccatggattctccttctgttgt

SEQ ID NO: 6788 - DNA, 120 bp, synthetic construct
  source 1..120: mol_type = other DNA
cgatttggtgatcttctgagcagaagatgtggctgacaactctttttgtaatgtggcaatagcactaccggctattgatgcctacatggaaacagagtcagaaaataaagtcatttaacc

SEQ ID NO: 6789 - DNA, 120 bp, synthetic construct
  source 1..120: mol_type = other DNA
taagggagaagatagggcactaatccagagctatttgattccacaatccaacccgaccaccatacagtaccacctctccatcttgctatattgagtatataaatatatgatttctcaatg

SEQ ID NO: 6790 - DNA, 120 bp, synthetic construct
  source 1..120: mol_type = other DNA
gctggaatatctcctgggcatcaggacaggcagatggcgtccacattatacagcagtgttaacgtgtctagaaatgtatctcagaaacacttttagggactatttcattgattattatat

SEQ ID NO: 6791 - DNA, 120 bp, synthetic construct
  source 1..120: mol_type = other DNA
tgaaccattcaagatataaatgagatttttctgagatggaattgggtctttagtgatcatgggctttatccagggcttccttttaggaagacacaaacaatttcatctgcctcgaaggac

SEQ ID NO: 6792 - DNA, 120 bp, synthetic construct
  source 1..120: mol_type = other DNA
cttttcacctccatagcatcagttttcatctcttctcgaaaaagatgtatttgtttttgtttaatagtgaatccttctctagtcattggcggtgtggctggttcagcagattttgcagtg

SEQ ID NO: 6793 - DNA, 120 bp, synthetic construct
  source 1..120: mol_type = other DNA
tcacctttccatgggtaacttggatttgttcttgtctagtagccatagtttctctagttctcagtattgtttcttgttctttggctttagcagtagcaactgctattgtagacaaggcag

SEQ ID NO: 6794 - DNA, 120 bp, synthetic construct
  source 1..120: mol_type = other DNA
caccttctcctgagttatttgcacttgttctcttttggtagtaatgccttctctacctcttgatactaaatcttgttctttgactttgggtgtggcaactatgactttaggtacaactgt

SEQ ID NO: 6795 - DNA, 120 bp, synthetic construct
  source 1..120: mol_type = other DNA
ttcaaaatgtctcactcacagtaaggagagggaaattcagtcagcagcctctggtcagccttttaagtgtacaaggttctcaactggacctttaaagaaagtagctctaagatcagcaaa

SEQ ID NO: 6796 - DNA, 120 bp, synthetic construct
  source 1..120: mol_type = other DNA
tagatgtgccctaaactgttctgtagacaatctcctgaaaactgatcaagtgagtggaaaatagtgcaatgtgaacataatttccatcctgagtttcaatactagacatagaggaacaat

SEQ ID NO: 6797 - DNA, 120 bp, synthetic construct
  source 1..120: mol_type = other DNA
actcctggtgtatgttcacagagttctttttcatactcacaaggggagcattcagggacactaccaaactttggtatccagtacccagaaatttacacatacaacaaggggatcttatta

SEQ ID NO: 6798 - DNA, 120 bp, synthetic construct
  source 1..120: mol_type = other DNA
tgagaaaagtaaaaacaaaagtcctttggggaaacttagagaaatgtaatgccttccctgaaatagtagtttccacatccagtgtgtgcagtgactgagctctggaattgactggtctct

SEQ ID NO: 6799 - DNA, 120 bp, synthetic construct
  source 1..120: mol_type = other DNA
atgtcaaagcaaggaggggtaactggatgtgaatcatgagatgaaaagctggaagtgctttaaggcagagttttaaaatgtgtgcctccataacccattcagagggtaaataatgtactt

SEQ ID NO: 6800 - DNA, 120 bp, synthetic construct
  source 1..120: mol_type = other DNA
gtgtatccaaagtgcaagtagcatcagttgaagaatttgggtgctaaatcccagcactgatggccaaaaaagactatttctgatctatagcaataattctggggattggccaactattgt

SEQ ID NO: 6801 - DNA, 120 bp, synthetic construct
  source 1..120: mol_type = other DNA
gggatcagggacactccatgattctaaatgacccttaggcttgggttttaaaatatagttaggttgttatctcctcaagaaattgcatttggcttgtgttgtgatttcatggtgtgcaaa

SEQ ID NO: 6802 - DNA, 120 bp, synthetic construct
  source 1..120: mol_type = other DNA
ttctgtaaatagtgagaggcagaggtttatgtttgtttgcttccagatggatagctaattggaccagcattctttattaaaatacctctccctcccctgaattgaaaggccactttgctt

SEQ ID NO: 6803 - DNA, 120 bp, synthetic construct
  source 1..120: mol_type = other DNA
cttattgccctaaatcaaactgttaagtgatcaggctgatttgtccttagggctttgaactctaacttctgtgctcttctcctttcactgtgccatattttggcccctaaagtagatatt

SEQ ID NO: 6804 - DNA, 120 bp, synthetic construct
  source 1..120: mol_type = other DNA
tagatcacttaattgaaaccctttccagtttataatgagattcataagcacagattgcttctattctgcgctcctgactagaatctcagggacttttcatgggtgtcgaaaagccagctt

SEQ ID NO: 6805 - DNA, 120 bp, synthetic construct
  source 1..120: mol_type = other DNA
tgaggagtgagtggaattaactttgacatgattttgagtaataaacaacagcaggtgctgccaaccctgtgcattttccatttgtgaattttctgggtgcatgctaaagttctacctgat

SEQ ID NO: 6806 - DNA, 120 bp, synthetic construct
  source 1..120: mol_type = other DNA
aattaaattccaaaaggcaaacaacttggttataaataattcagcctccagtagacccttctgtagtttaagagctgcatctacctctgcccatagctttttctggactcctttcccaat

SEQ ID NO: 6807 - DNA, 120 bp, synthetic construct
  source 1..120: mol_type = other DNA
tagtttgaaggaacaagaagatatgaagtagccagattccactacttctcaaggaggcaaattcccactgaagtcatatgtgttctgctcagttcagaagttactgagtgttaccagata

SEQ ID NO: 6808 - DNA, 120 bp, synthetic construct
  source 1..120: mol_type = other DNA
ttgggcttgagttcttggcttccagtctggctctgcagctgagcccaaatatagaatgactaaatttggtcctatttagttgctggattctaacggcaattttaatccaacactaattat

SEQ ID NO: 6809 - DNA, 120 bp, synthetic construct
  source 1..120: mol_type = other DNA
tggaaaaaagtattagccaaacagaacaaggaatgaaccctagtggtcaaagagggaatatacagtcttaccaatggtggaaaaccaggttcagagttgaagaagaaaaccacagcaatg

SEQ ID NO: 6810 - DNA, 120 bp, synthetic construct
  source 1..120: mol_type = other DNA
tgcagttaagtcattttgttaagtgcaagaaagtactttgcctatcagtttcagagacattatgtgaagaattttctgatgcataaatacctaattattcaacatgactattctgttctg

SEQ ID NO: 6811 - DNA, 120 bp, synthetic construct
  source 1..120: mol_type = other DNA
cacacaaataatccagagccagagatcaataagaaagtgactctactattaaaataagaaaagttgctgctcacctgatttctcaagagtgcctaaaaagggtgggactaagcccaaggt

SEQ ID NO: 6812 - DNA, 120 bp, synthetic construct
  source 1..120: mol_type = other DNA
agtagccaggtcttatgcttaaatcatccataaggttccttttccagacacatgaatgctgttctgctaatctctggagtttgctgttactaatgggaagtggataggaggtgatatagt

SEQ ID NO: 6813 - DNA, 120 bp, synthetic construct
  source 1..120: mol_type = other DNA
tgcaattcaggtaactcaagagccaagaagatggaccatatgttataaacataaagtcaagtgtctgtcctcttaagctgattgtctagtcactgttcttagacttttctagaccctgcc

SEQ ID NO: 6814 - DNA, 120 bp, synthetic construct
  source 1..120: mol_type = other DNA
aactcaggcagtaactccaactacatagtcagactttgtttaccttatataggaccatttacaaaggaaggacttactgggagttattcgagaaatgggtacagttttgaaggccaatgc

SEQ ID NO: 6815 - DNA, 120 bp, synthetic construct
  source 1..120: mol_type = other DNA
gactacctgataaaatatacaagatagtattttctaagaaatctttgagaagtccaaaagtgagctcatggaataaagcacatgtcacgtccttccctgaaggccctcagaaggtgacat

SEQ ID NO: 6816 - DNA, 120 bp, synthetic construct
  source 1..120: mol_type = other DNA
atccatgtgtaaccacactagaggaaaatgatggatagcacagtttctaaatcagaccgactttggatcaaatcccagatgcaccagttattagcaaaatgaccctggattaatcattga

SEQ ID NO: 6817 - DNA, 120 bp, synthetic construct
  source 1..120: mol_type = other DNA
cagcagcctgaatagactgagacacctattctttctgaaccctctttcagcttcttttctcattgttcttgcactattcatattgtgttttccactgcctttcttatttccaaatccaat

SEQ ID NO: 6818 - DNA, 120 bp, synthetic construct
  source 1..120: mol_type = other DNA
taaacttgtttattgctactaccgtttccaggtccttatttctcacttattctattggatttagcctcttaaccgttcatttctgcctccaatccaagtccacctcaaagcccaataagc

SEQ ID NO: 6819 - DNA, 120 bp, synthetic construct
  source 1..120: mol_type = other DNA
ttatcagataaatatgatgacaatttgagcttttggtgaccaactttctcagaatccctgaatcatattttaaggaaatgagagtggagcaggctggagaggacaggacttcctaattgc

SEQ ID NO: 6820 - DNA, 120 bp, synthetic construct
  source 1..120: mol_type = other DNA
aaacatcctctgtgctccacttgttcttcatcttcttccttctctccctaaagcctggcaatcactggtttcttattgtctctgtactgttttctttttcagaataccatatagttggag

SEQ ID NO: 6821 - DNA, 120 bp, synthetic construct
  source 1..120: mol_type = other DNA
aggataacctccacaaaagagttttagttcctgcccctttacctaagtggacaactggttcttgctagtactttttcatacttctagtacttttgtttcctgtgttgtatttttgggcaa

SEQ ID NO: 6822 - DNA, 120 bp, synthetic construct
  source 1..120: mol_type = other DNA
gccaccgcacctggcccacatatgcaatattttcaatgtgttcgttttcagaagtctttctaaacaatgtcaaatttctttttactgcattcttaccacctcctaatgtctagcaatgat

SEQ ID NO: 6823 - DNA, 120 bp, synthetic construct
  source 1..120: mol_type = other DNA
cgacatttggaactacgcatgtagccattgattgcaagtgtacttaggggcctttttgccaaaaaatgataacctacacaactttttttgctgtcaaattccagaatatagacttcagtc

SEQ ID NO: 6824 - DNA, 120 bp, synthetic construct
  source 1..120: mol_type = other DNA
cataacacggcagttgattagaaagatgtagttacttctgtttgaaaatgtagctgctgctctgccctctggctcactttgaaaatctgtggttctgaaagctcaaggtactatttttac

SEQ ID NO: 6825 - DNA, 120 bp, synthetic construct
  source 1..120: mol_type = other DNA
ctatattcccagttatttcatcactcaacaaagccacaactgcatgaaagggctttaagcctgggacttttgggggtgaataagagcctgattatttgtttgggtataccaagtttttag

SEQ ID NO: 6826 - DNA, 120 bp, synthetic construct
  source 1..120: mol_type = other DNA
tttagctcctccaaatagtaacattttaagaggagtaatacagaatactccaattctttaaaacaagtgctcccttctctatgaatacaagattgagaatgggctcaaaagcatgacatt

SEQ ID NO: 6827 - DNA, 120 bp, synthetic construct
  source 1..120: mol_type = other DNA
ctgtttgagccaacctgcaaagtttcagattggtggaaaaagaaatatttctccatgtgtccacatatgaaaaggaatatagcacaatgagaagccagtacatttgactgcagaaaactg

SEQ ID NO: 6828 - DNA, 120 bp, synthetic construct
  source 1..120: mol_type = other DNA
aattctgagattctctacgagatggtatcattccgctaactgatttaatttttgcctacaatggattagagtcagagcacagaggaatgaaactcatgtgccaagaaaaagtcagctgtg

SEQ ID NO: 6829 - DNA, 120 bp, synthetic construct
  source 1..120: mol_type = other DNA
tggttggcatattttagcttaggtttctaagaagaaatcttagaaataatactagcagccagggcccatccttgctgatagaaaagtacatacccacagtagctacattcattcctgcag

SEQ ID NO: 6830 - DNA, 120 bp, synthetic construct
  source 1..120: mol_type = other DNA
tcttcttttgcctgtggatgtggtggattcactgattgatttgtgaattttgaaagagccgtatatacctagaacaaatcccacgtcttgtgtgggattctttttatccattgttagatt

SEQ ID NO: 6831 - DNA, 120 bp, synthetic construct
  source 1..120: mol_type = other DNA
cttatattgtatatattcttactttggttatatgtctaaagacaactttccttccccctccctcgacccctgttgtgaataatttcagcttcctctagaactctttgcaccatagtgcac

SEQ ID NO: 6832 - DNA, 120 bp, synthetic construct
  source 1..120: mol_type = other DNA
cctcttactgggtaacaaaaattgtcatgtagaaacattttattgtggtctctaacttctcggggagttccctaaaaacgtttccagaatccacaggaaattcacacagacagagaagct

SEQ ID NO: 6833 - DNA, 120 bp, synthetic construct
  source 1..120: mol_type = other DNA
tctgcactcttgctctttaaggaagataggaagttaattttgtggtacaaaaaggaggatccaatgaatccgatttgccatgtcctgggttacacaaatgaaactgctgttgaacagaag

SEQ ID NO: 6834 - DNA, 120 bp, synthetic construct
  source 1..120: mol_type = other DNA
ttgatccaggaacaacaatcctggacctttcctctttcctccttactattattttagtccgtggagccagcatctatttttaaattcaaattttcaatcagggtctagcccagagggtct

SEQ ID NO: 6835 - DNA, 120 bp, synthetic construct
  source 1..120: mol_type = other DNA
agaaagaatcctcagctggaaggaggagattctgcaggaagagggtgggggaaagttgaagttaactccaaccaaagtcaaccttaaatattaacctttttttcttctgactttcattga

SEQ ID NO: 6836 - DNA, 120 bp, synthetic construct
  source 1..120: mol_type = other DNA
gaggcaggagaatcgcttgaacctgggaggcggaggttgcggtgagccgagatctcaccattgcactccagcctgggcaacaagagtgaaactctgtctcaaaaaaaaaaaaaaaaaaaa

SEQ ID NO: 6837 - DNA, 120 bp, synthetic construct
  source 1..120: mol_type = other DNA
ccgtgtaaccaaacccctttcaagatgtgaaaatgaccatgaccccagaaaataccaatacctcttcctgctcaggcctcatctctatctctgagaggcaatgacttttttatttaaatt

SEQ ID NO: 6838 - DNA, 120 bp, synthetic construct
  source 1..120: mol_type = other DNA
aagccttggtggccatatgttttcattgctctggggcaaatacctaaattgctgggtcatggggtaaatgtatgtgtagacattttttagaagcttttttttttttttaacaaaaatgcc

SEQ ID NO: 6839 - DNA, 120 bp, synthetic construct
  source 1..120: mol_type = other DNA
tagaaaaagaaataggataaaccaagacaaactatcaaggaagtaaaaggaacatagaggcaaacaaaatcctcatgtctctttccccctcctcctgacatagccctgataactagggag

SEQ ID NO: 6840 - DNA, 120 bp, synthetic construct
  source 1..120: mol_type = other DNA
tcctcacaacagtcctagtgatcagtactatctattattttgcccccatttgatgggtgagttggagaagctatacaatatataaagctggtggtttgtctcttggcttttgcatcatca

SEQ ID NO: 6841 - DNA, 120 bp, synthetic construct
  source 1..120: mol_type = other DNA
cttggttatccactcccagggttcacagcatctgtatcaggaagttctttcttaagtttcactggagtccctcttgctactatttccagctaatctcttcttgtaactcttcataaaaga

SEQ ID NO: 6842 - DNA, 120 bp, synthetic construct
  source 1..120: mol_type = other DNA
gtatgctgaatatttcacaattgtccacaaaagggatatcattttagccatttaacacctggagaatgggaggttcaagaaaggatccactcttgaccttagagccagcatttaaactca

SEQ ID NO: 6843 - DNA, 120 bp, synthetic construct
  source 1..120: mol_type = other DNA
atttgaataacagcatgtatctatcagcatgtattcaagaaagtagagtcactgtggatatcatggaagaagagacaggatagggattagacctgacacaattgtgggagaagctgggaa

SEQ ID NO: 6844 - DNA, 120 bp, synthetic construct
  source 1..120: mol_type = other DNA
tgcaatttccttgtattttctaaacaagaccttaaaggctccagaacattgaaacgctgtgggtgtcattcactcttacaatagccatttccttggaccgtcttcctttctggatgataa

SEQ ID NO: 6845 - DNA, 120 bp, synthetic construct
  source 1..120: mol_type = other DNA
aaaatagatgaatggagaccacgtggaactagtccataggactgtgtataacaaagcttcatgggaatttttctagggtcacaatatattttcagttgaacgcacggtgattcacgcctg

SEQ ID NO: 6846 - DNA, 120 bp, synthetic construct
  source 1..120: mol_type = other DNA
acttgcacacaaattattctaactgccttatttagccagagaagaacagggcctgtccgtgaagcatttccccattacctgcacctgagctagtccctgatctagcactgtcagctccgc

SEQ ID NO: 6847 - DNA, 120 bp, synthetic construct
  source 1..120: mol_type = other DNA
gagccaccatgcctggcctgcaagatccttttttattgaggcaattaaaagttagaagagaagaaatggctgtgtaaaaataggagcagatagaaaatgagaatggccgggtgcagtggt

SEQ ID NO: 6848 - DNA, 120 bp, synthetic construct
  source 1..120: mol_type = other DNA
ctaagtctaatcaagcctggaagctgaaggacattgtgtggacttgggccttgagaggttcccgaactccagaattctgcaagttatatgactttcatttaaattttctttttaattgag

SEQ ID NO: 6849 - DNA, 120 bp, synthetic construct
  source 1..120: mol_type = other DNA
gatgcaagaagtttatcattggggaagctgtcaggtggaagatttgaggagatacaaggataaaggggataaatagtatataggagacaaagaacaagacttggctgaaagaaggcaaca

SEQ ID NO: 6850 - DNA, 120 bp, synthetic construct
  source 1..120: mol_type = other DNA
tttgtaccattttttgtactgctttcccagaaagttcaagccctagactgaaggaacacatgaagtaaaattgatggctttgaatggaaaatcccagccaagaatccaaccgaacatggt

SEQ ID NO: 6851 - DNA, 120 bp, synthetic construct
  source 1..120: mol_type = other DNA
agcagagggcctgccaatccttggcctaggcatttcaggtggtctggagctgatattcatccagaaatgggttactatttttcaaacatacatacacacatttgatttataaaatacaag

SEQ ID NO: 6852 - DNA, 120 bp, synthetic construct
  source 1..120: mol_type = other DNA
cccaggattttttgacatttgaaagaacttcaatgtcatattagaacattttggaactactgatccatacatgaatgctgttcctctcctcattcacagtcaggtggcatgctgctagct

SEQ ID NO: 6853 - DNA, 120 bp, synthetic construct
  source 1..120: mol_type = other DNA
ttatattgttgacactgtatttgcattcagagcaaaaatgaaatgggtcttaaaatgagtcgtgataaagtgattgctatcaaaaggctggaagatggatccagacagccgtgggcttgc

SEQ ID NO: 6854 - DNA, 120 bp, synthetic construct
  source 1..120: mol_type = other DNA
aatcagcagcaatcacacttgatcttcaggatgactttggagcagttctcagaactaagcagtggagagaaggccaaatgaggttatacatgactcagataaagctatggataaattaat

SEQ ID NO: 6855 - DNA, 120 bp, synthetic construct
  source 1..120: mol_type = other DNA
atgtggagatccactgaggtagcatgtgtgattagataggaggaaaagttgctcatctgaccccagggacacaaaagatttatctaaaaactcagaataaagaagtttgttccagtttcc

SEQ ID NO: 6856 - DNA, 120 bp, synthetic construct
  source 1..120: mol_type = other DNA
gggatgcaaaaagtaagaaggcattgcccaagaaagagaaattgtgaacacaaacaactctgatggaatggctaaatgttcaacagaggtacaaagcactgcatagcagagttaacttct

SEQ ID NO: 6857 - DNA, 120 bp, synthetic construct
  source 1..120: mol_type = other DNA
atgaccatctctgaatgtcagactaaggacatttgactttatttggctggccatgaggagcgcggaaaagcttttgtagagagatgtgatgtaatcagaggtatgcattaagaagattaa

SEQ ID NO: 6858 - DNA, 120 bp, synthetic construct
  source 1..120: mol_type = other DNA
aatgtcaaaataggaacaatagtctggaagaatgaaagatgggggtaacccagaagaaacaatgaactttcttctgaatgggagacgaaagcaaaagaagggtcaaggaatggttcacaa

SEQ ID NO: 6859 - DNA, 120 bp, synthetic construct
  source 1..120: mol_type = other DNA
acaccaaaggccttgtttgaggaaagcatgtgtttgttgcgaggacatcgaattaaagttaaacttgcttgtctcctaagcctctgcctttaaatagtgaatgacttcctttgtcataaa

SEQ ID NO: 6860 - DNA, 120 bp, synthetic construct
  source 1..120: mol_type = other DNA
agttgatgtggcatgtctctgctttcctcgcgacatgctgatttcttagtgtatctctcacatcacagtttctaagttcttgggcaagtcattccatttcataaatactacctatcatta

SEQ ID NO: 6861 - DNA, 120 bp, synthetic construct
  source 1..120: mol_type = other DNA
atatattcagaccttcacataatagaggtctttttaataacatttcactgagaaaatacaagtgtgcatgtagactcgagaatctgcaataactccagaagggcaggggtgcaggtaacc

SEQ ID NO: 6862 - DNA, 120 bp, synthetic construct
  source 1..120: mol_type = other DNA
gagacactccctcatccttccttctctaaagagactccaagagtccaataacatctatgatagcaataacaaatatcatagccaaacactcttaactaggcctcagtgtgttatgctgaa

SEQ ID NO: 6863 - DNA, 120 bp, synthetic construct
  source 1..120: mol_type = other DNA
cattttttcatacgtacatattcttaataattaaattataagcaatttgaaggcacatgcctctcttgatagctcccatagtgatggctagctagcacagtggctcacattaggaagatg

SEQ ID NO: 6864 - DNA, 120 bp, synthetic construct
  source 1..120: mol_type = other DNA
aactattaactgtgtctaataactgtttatggataaaatcttctaacacgtgtgtgatcactaagacagatacgaacctggaccaagacatgggtgtcttgcctgaatcatcagagctac

SEQ ID NO: 6865 - DNA, 120 bp, synthetic construct
  source 1..120: mol_type = other DNA
ttcatagataaacctgcccattataaggaagagggcagaagaaccctaaactaagagccaggcaacttgttcattaatcacagcatattccatagaaggaggagaaatgttgtcatcaaa

SEQ ID NO: 6866 - DNA, 120 bp, synthetic construct
  source 1..120: mol_type = other DNA
ttgccttactttctccccacttccttgtcttattcaaatgcagatttcattaatgatttccagatcaatgatagttcagaaagcaagcaagtcaaagtgaccaagggcatggcctgaaaa

SEQ ID NO: 6867 - DNA, 120 bp, synthetic construct
  source 1..120: mol_type = other DNA
aaggaagttcgggatgctgaggatcttaggaactatgtctaaacaagattcattcacagaagtgggaatgtctatttggcaaaaagaaaatactacttacatggctgttggaagaccagc

SEQ ID NO: 6868 - DNA, 120 bp, synthetic construct
  source 1..120: mol_type = other DNA
ctgaaaggcttttctgtcccttccactactccctgtaagctcctgtgcttcacaatttcttgttgaattttttctaatctgactctatcagttatgggaatgttccctcaattcttagtg

SEQ ID NO: 6869 - DNA, 120 bp, synthetic construct
  source 1..120: mol_type = other DNA
cattgtggagaaattgctgactaagcaaagcttccaaatgacttagtttggctaaaatgtaggcttttaaaaatgtgagcactgccaagggtttttccttgttgacccatggatccatca

SEQ ID NO: 6870 - DNA, 120 bp, synthetic construct
  source 1..120: mol_type = other DNA
cactgagcttactgagctgggacttgaactctgagcattctacctcattgctttggtgcattaggtttgtaatatctggtacctctgtttcctcagatagatgatagaaataaagatatg

SEQ ID NO: 6871 - DNA, 120 bp, synthetic construct
  source 1..120: mol_type = other DNA
agtagagaaaagaaggaatcagaactcctctcctctagctgtggtttgcaacccttttgggtcacagaacactttatgtaggtgatgaaaagtaaacattctatgcccagaaaaaatgca

SEQ ID NO: 6872 - DNA, 120 bp, synthetic construct
  source 1..120: mol_type = other DNA
gtagctgttgcagtcaaatgggaagcaatttccaacattcaactatggagctggtacttacatggaaatagaagttgcctagtgtttgttgctggcaaagagttatcagagaggttaaat

SEQ ID NO: 6873 - DNA, 120 bp, synthetic construct
  source 1..120: mol_type = other DNA
gcttttggcattccaggaaatgcacagttttactcagtgtaccacagaaatgtcctaaggaaggtgatgaatgaccaaaggttccctttcctattatacaagaaaaaattcacaacactc

SEQ ID NO: 6874 - DNA, 120 bp, synthetic construct
  source 1..120: mol_type = other DNA
gctcggcatgaaagggaactattctctggcttagtcatggatgagactttcaattgctataaagtggttcctttattagacaatgttaccagggaaacaacaggggtttgtttgacttct

SEQ ID NO: 6875 - DNA, 120 bp, synthetic construct
  source 1..120: mol_type = other DNA
ttttattagttgattctagggaattggccttaaggggagccctttcttcctaagagattcttaggtgattctcacttcctcttgccccagtattatttttgtttttggtatggctcactc

SEQ ID NO: 6876 - DNA, 120 bp, synthetic construct
  source 1..120: mol_type = other DNA
ccttttttttctaaaaccaataaaatagatacagcctttaggctttctgggatttcccttagtcaagctagggtcatcctgactttcggcgtgaatttgcaaaacaagacctgactctgt

SEQ ID NO: 6877 - DNA, 120 bp, synthetic construct
  source 1..120: mol_type = other DNA
gaagcccctctaccgccccggggtccattttgcagacggggaactgaggccccttgaggcaggacacatccagggtgacgctgctcgtaagcgtcagagcattctttttttttttttttt

SEQ ID NO: 6878 - DNA, 120 bp, synthetic construct
  source 1..120: mol_type = other DNA
ctagccaaccctaggtaagaggttctagacatgcgtgcgttgagacctggagtcttgggagaggatgcttaaaaggtgattttacccctaggaatatgggggcactgaaatttttttttt

SEQ ID NO: 6879 - DNA, 120 bp, synthetic construct
  source 1..120: mol_type = other DNA
caaggatcccgatctttcttccttgagggtggtgtacttaatacacttttacaccagacttctaatgttagatgaagaacacagtatttccagggatcaacatttctgtaggctcctatt

SEQ ID NO: 6880 - DNA, 120 bp, synthetic construct
  source 1..120: mol_type = other DNA
tcaaatctgtaagtaaatttatgccccgaggaacaagtgctatatttattctaagacaacctcctccttccttaaacagaatcttagggctggaggattgcttcctgccctcttttgttt

SEQ ID NO: 6881 - DNA, 120 bp, synthetic construct
  source 1..120: mol_type = other DNA
actagaagggctttgtataatatttaagcagagtgagaggtaagctttttgtgtaggtcaggggaaatggagaaaataggtgccctgactcagaccagtctggctctttttttttttttt

SEQ ID NO: 6882 - DNA, 120 bp, synthetic construct
  source 1..120: mol_type = other DNA
gttagttttgtagaattgtagaattacgaatgccttttgtttccctggccaaattgtgccctggagttccaggagaacaatgtgtagagcatgagatattttggcttatttgttgctgac

SEQ ID NO: 6883 - DNA, 120 bp, synthetic construct
  source 1..120: mol_type = other DNA
gtagatatataaaaatgagcattgctaagttaaatttggtaaatttgccttatagaataccctcgagtacgtttccagtgagtgtaaaataggaattgggatacccaattcagttgtact

SEQ ID NO: 6884 - DNA, 120 bp, synthetic construct
  source 1..120: mol_type = other DNA
agtataaaagcagaagtcagcaggcctttttaaggcttcggcctagaattgccagtgtcgcttcatccacattcagttagttaaagcaatcacaagcccagcccatttcaaggtgaaatt

SEQ ID NO: 6885 - DNA, 120 bp, synthetic construct
  source 1..120: mol_type = other DNA
ttaggggcaaacatcacaaaatgtaatttaatgcctgcccattagagaagtatttatcaggagaaggtggtggcatttttgcttcctagtaagtcaggacagcttgtatgtaaggaggtt

SEQ ID NO: 6886 - DNA, 120 bp, synthetic construct
  source 1..120: mol_type = other DNA
cttccacctccagcctctggtcctaccaatggattcatggagtagcctggactgtttcatagttttctaaatgtacaaattcttataggctagacttagattcattaactcaaattcaat

SEQ ID NO: 6887 - DNA, 120 bp, synthetic construct
  source 1..120: mol_type = other DNA
tcaaaaaaaaaaaaaaattcaaatcagagtgaagtgaatgagacactccagttttccttctactccgaatttcaactgattttagctcctcctttcaacattcaacaaatagtctttttt

SEQ ID NO: 6888 - DNA, 120 bp, synthetic construct
  source 1..120: mol_type = other DNA
tctattaaaaaatagaaaaaattaggcgggcgtggtggtgagcgcctgtagtcccagctactcgagagcctgaggcaggagaatggcatgaacctggaaggcggagcttgcagtgagctg

SEQ ID NO: 6889 - DNA, 120 bp, synthetic construct
  source 1..120: mol_type = other DNA
acttgaagccatataccagcatggtttttatacactaaggacactcccagtgatgaaaatgaattcccctccatttgtgcaaggaggtatgtacatctataaagacacatatgattacca

SEQ ID NO: 6890 - DNA, 120 bp, synthetic construct
  source 1..120: mol_type = other DNA
catttcccaggcagccttgaaacagcagcacctcttggggctttaaggatcgaaatattgtaaaaagttatattcttaggtcagaaaacttggaaagtgggagataaagaatgagtcaag

SEQ ID NO: 6891 - DNA, 120 bp, synthetic construct
  source 1..120: mol_type = other DNA
ttccaagcctcattctcattagggagaataactaccatttatttgatgcttaacatatgccaagccttgtgctgggcttcacacacgcacacacacaacctcatgtactccttacaactg

SEQ ID NO: 6892 - DNA, 120 bp, synthetic construct
  source 1..120: mol_type = other DNA
gcatgagccaccacagccggtcctaccttactctacttacaagcatgttgtgaagatagacttagataagctaaatattaacgctctttccaaaggtagaaaatatgcaacaaaggtggt

SEQ ID NO: 6893 - DNA, 120 bp, synthetic construct
  source 1..120: mol_type = other DNA
aataatgaaaaataaatgtgaagaaaagtttacgcacttgttttacctgtatgagtcctggtgtgggtcttcaggtggtcggaccgggagaactttcgctgacaagttttacactggaat

SEQ ID NO: 6894 - DNA, 120 bp, synthetic construct
  source 1..120: mol_type = other DNA
tgaaataagagttttatgttttagggcccaaagatctggtgttctttgctactgactccttgttcttgcatcaagcaaatatgactccatggttgtgagaccctcaaaacacaccaaaag

SEQ ID NO: 6895 - DNA, 120 bp, synthetic construct
  source 1..120: mol_type = other DNA
tgaccttagttcaaactgataccctccaaacccctcggtacctcctgtctctgatttagtacatgatcatgtactctctcagtcacttttcatttctttatatcctagctcccaaacaaa

SEQ ID NO: 6896 - DNA, 120 bp, synthetic construct
  source 1..120: mol_type = other DNA
acttttttctccagcttcccaagagcaaaatcagcagtaataacacagttgcaacagtgatcctataataatgctgttcttcgattgtggaaaaggcagcagtagctcctctgtaggaaa

SEQ ID NO: 6897 - DNA, 120 bp, synthetic construct
  source 1..120: mol_type = other DNA
cagtttactgacctctgtaataaaggatagataatcagaatgcaaaatggccccacagcctctttacaacacctggatcagacctttcaaagcagtgcttactttccatcctggaaataa

SEQ ID NO: 6898 - DNA, 120 bp, synthetic construct
  source 1..120: mol_type = other DNA
tggccactaaattctcctcattcctttatagatgagtaaatcaaccccaaaggcggtgagatgctgacacaagagtgcatccatgttttggttttgtttgttcttaagacaggatcttat

SEQ ID NO: 6899 - DNA, 120 bp, synthetic construct
  source 1..120: mol_type = other DNA
tggcccagatacaacttatatctagagtactgaccattctggtgaaagtatcactgctgttactcaggttgcagccatggattgatgtttataagccataaatgaaacccttagtaactg

SEQ ID NO: 6900 - DNA, 120 bp, synthetic construct
  source 1..120: mol_type = other DNA
tttctaaagtccatgtataaagcttagcacaatgcctagtatatagaaaatgtccagccataggcggtacagttagtatgatgatcatcaacacttggcaagatgtgagtctacctgtgg

SEQ ID NO: 6901 - DNA, 120 bp, synthetic construct
  source 1..120: mol_type = other DNA
ctgcaaacacaaagaagggaaaaaggctcagtgtggctcacagtcgccatttggaaatgcttatctgcaatcaggagggaatgatggtttttaaagctcacagaacaaaaatagttggtt

SEQ ID NO: 6902 - DNA, 120 bp, synthetic construct
  source 1..120: mol_type = other DNA
acagaaactagattagtggttgggtgccttgaactgggggagttgggaaggcaaagaaaatgactgctgaaaacgtcctaaaattgtggtaatggtcatacaactgtgaatatactaaaa

SEQ ID NO: 6903 - DNA, 120 bp, synthetic construct
  source 1..120: mol_type = other DNA
acagaagctgtagggtttcacatttacttctggctctaagcattttagaaagaactgcctgcccctctaacctaccatatcttgtctccacatccttcaagtaatttttgacttatctag

SEQ ID NO: 6904 - DNA, 120 bp, synthetic construct
  source 1..120: mol_type = other DNA
gcaattccacactgtggaaacctgcaattcaacacttcccaatgtagtgtgcccagaacaccaagtacaacgtactggcatctgatgtggtagcaattctctctaaataagtttttaaaa

SEQ ID NO: 6905 - DNA, 120 bp, synthetic construct
  source 1..120: mol_type = other DNA
tcatgtttttctgttttgtttcctagtagacttccttttgagacataagataattgaccctgctgaatgacagggagaagggatttatgagtccttggccaagatagtcaggaagatcac

SEQ ID NO: 6906 - DNA, 120 bp, synthetic construct
  source 1..120: mol_type = other DNA
cacgactcagctctcccagccaataactgtaaacaatgtgaacccagcattgctatacttttccattctcaaagaaaagtaggaaatctggacttttttgagagcacctgagttataagt

SEQ ID NO: 6907 - DNA, 120 bp, synthetic construct
  source 1..120: mol_type = other DNA
ataatcctggtggtattaaccccaccctacaggttcacttttatcatcatgagacttgaacgactcccagctcttttctccagcgggatgaatgaaattaggcatgctgaaggttttaaa

SEQ ID NO: 6908 - DNA, 120 bp, synthetic construct
  source 1..120: mol_type = other DNA
aggaaaaccagagccgccctggaatcccttatcaacagaagaagtaaaagagagaaaagaaaaagagcctttggaaggcaattagcattcatatgaatattcaaaaagggggaatttcgg

SEQ ID NO: 6909 - DNA, 120 bp, synthetic construct
  source 1..120: mol_type = other DNA
cgggaggctaaggcaggggaatcgcttgaaccagggagtcggaagttgcagtgagccgagatcgcatcagcctggctacagagtgaaactccatctcagaaaaaaaaaaaaaaaaatgct

SEQ ID NO: 6910 - DNA, 120 bp, synthetic construct
  source 1..120: mol_type = other DNA
tggggaatgaatagatactggattatccacattcagagctgctggcaacctggcacagatgcccctagatcaacataaatattattttattatttgcttgagtgtgacatgctccatctc

SEQ ID NO: 6911 - DNA, 120 bp, synthetic construct
  source 1..120: mol_type = other DNA
taaataactaaataaaagcagaacaatttaaaacaaaaccactccttctcccgaccttctttccccagccagctagaaccccatttttttgctcccttttgcagcagaactccatgaaag

SEQ ID NO: 6912 - DNA, 120 bp, synthetic construct
  source 1..120: mol_type = other DNA
tgtgctacaatcactgtttctcatttccaacttggccccttctccatcccaacctttctttcctatctttcctattcagctcctttcttctccagatctaaacaaacctagcatttttcc

SEQ ID NO: 6913 - DNA, 120 bp, synthetic construct
  source 1..120: mol_type = other DNA
aaaaaaactctttaaatggcattaaatgaaactttaaacggtggaaaattaataacttgttgctgggggtggagatggagtaggctcggcaatgctgatattcacagaactgaggctccc

SEQ ID NO: 6914 - DNA, 120 bp, synthetic construct
  source 1..120: mol_type = other DNA
ttgcttgggatacaaggaaacaaacctattctttgtgaagccacttttttgaaacgaaacattttcaaggaaagaagacccgaaccagcatttagtggggtttagtctgaggtgcatgat

SEQ ID NO: 6915 - DNA, 120 bp, synthetic construct
  source 1..120: mol_type = other DNA
cggcacccaatactgtttatatacatccttagataaatgtccagttcacaaaatggaagcggaaattcgtggatttacagtatgttctacagtgtgagagaagatggtaggcaattagct

SEQ ID NO: 6916 - DNA, 120 bp, synthetic construct
  source 1..120: mol_type = other DNA
caagcccctgtattacagcatgaagaagtttttgaaactgaaatgtactgctcacttcacaatcatgttctgtctatccttgctatttagcttggggaaggttatcaagttctgaggaga

SEQ ID NO: 6917 - DNA, 120 bp, synthetic construct
  source 1..120: mol_type = other DNA
cctggcctcagacttagggtaagttctccctgagagatttaaaggtaaataaagaagaagcaagttaagactgaaagctttgactgatctaacaggaacatgtggcattatggttgtaat

SEQ ID NO: 6918 - DNA, 120 bp, synthetic construct
  source 1..120: mol_type = other DNA
ctgtattctccctattatggttgtattatcaagtatggaaagaaaaaccctgttggtgcaatcaggtatgggcgtatctgactgtgaattgcccagatcagcatcacacaaatacaaatt

SEQ ID NO: 6919 - DNA, 120 bp, synthetic construct
  source 1..120: mol_type = other DNA
gtatcatgtggattatgagggtctgaaaagtcagagtgatgggtgataaatggtctaaaaagcaaggatgtgacaagcagaagaaagacgatgataaactctatgcacagcggaaggaat

SEQ ID NO: 6920 - DNA, 120 bp, synthetic construct
  source 1..120: mol_type = other DNA
aatatcctacatatcaatgaaaaaaaatgatgagtttctcctgcagcttccctgtttgtagcagcagcccgtactggtctgtgccacaacattttgcaattccacaaattcttgctgtaa

SEQ ID NO: 6921 - DNA, 120 bp, synthetic construct
  source 1..120: mol_type = other DNA
tggcattttcttggccctcagaaggcaaatcttctcaaatacaaggtctatgtcttacgtatatgactttttctagtgtgtactgtactgtctaatatggtatacactggccacatgtga

SEQ ID NO: 6922 - DNA, 120 bp, synthetic construct
  source 1..120: mol_type = other DNA
ggtcacgtaggcatttcagctccaaccgtctaactctgcctgttcggaagtgaactttcaaattgcaggctgccaaaatgtattccaaaagtcatggtgtcctttatattttttaagtag

SEQ ID NO: 6923 - DNA, 120 bp, synthetic construct
  source 1..120: mol_type = other DNA
aaaaaataaaaaggctcaaagtagacataactggcatctgtgattagaattcatgtttccagctttttcggtaatagctgtgtcccacaccaacagaaaggcctctgtgggtgtacctct

SEQ ID NO: 6924 - DNA, 120 bp, synthetic construct
  source 1..120: mol_type = other DNA
agggctagaatgcctaaaagaaacaatcagtgtgcatgggaatatttttcaaacgcagtgcacagaacttttcaaagtagccatgaggatcatatgtgaagtcggtatagtcaaggactg

SEQ ID NO: 6925 - DNA, 120 bp, synthetic construct
  source 1..120: mol_type = other DNA
tagattaaataagtcaacacttgtaaagtgcttacagtggtacctggtgcatgttaagtctacataagcatgtgctcttatgatttatgagcaaaagtgatacattggcctggtgcggtg

SEQ ID NO: 6926 - DNA, 120 bp, synthetic construct
  source 1..120: mol_type = other DNA
agggtcaaatgcaacaaggcaaacaaaatacaagcaagctttccccagaaagtcccaaactttagagagaaaaaatgaatgaaaccagggaccagtagaagcaccactgaatacctaaaa

SEQ ID NO: 6927 - DNA, 120 bp, synthetic construct
  source 1..120: mol_type = other DNA
aaatttatgtgatgtttcctacttccctagcaaccacaaaatcagacctaagtcaaaatccaccataggcaccctggagaattgctattaaaccagtggtaatgatcgctttttcctgga

SEQ ID NO: 6928 - DNA, 120 bp, synthetic construct
  source 1..120: mol_type = other DNA
gggggaaaaaaaggaaaaaaaaaggtttctccagtccgcgcgcctcaggcgttagaaatagaaggggcgcatccctgcacctctctagaaactcccgggaaggagaaccttagatgcgag

SEQ ID NO: 6929 - DNA, 120 bp, synthetic construct
  source 1..120: mol_type = other DNA
ataacttctcgagcgccgctccttcttcagctcgaaagagtaattgtcctcatttttatacaacataagaacaactcagagaccagggagatcagctttaatttcctctaagtagtagag

SEQ ID NO: 6930 - DNA, 120 bp, synthetic construct
  source 1..120: mol_type = other DNA
ccaactttcattaattactcggagccagttaaatggcctggtcttaaaaatgggaagagtaattaccgagtaatgttatctgtctggggctacccgacctgacaccatgacacccaaggg

SEQ ID NO: 6931 - DNA, 120 bp, synthetic construct
  source 1..120: mol_type = other DNA
tccaaacttcacaaaattctcaggagtaaattgggtcaaacagcacccattctcccactcttgcactatttgaccaaagtgcctccaaagacttaagcaggactcagccgatgagcagga

SEQ ID NO: 6932 - DNA, 120 bp, synthetic construct
  source 1..120: mol_type = other DNA
tgaggggtgaaatggacagcaggctcagccaggaaggtgctcagaaggctgaaaacgatgactgcagctgcactgtgattggggaaaacctgtcccccaacaaaataccctctcctgtgt

SEQ ID NO: 6933 - DNA, 120 bp, synthetic construct
  source 1..120: mol_type = other DNA
ttagctggtgagcttcttgcaaaggttctcgaggccattgtcttaattaatattcagaacccagtgcctgaccaagtaggcgattgatgtttgctaaattaatgtttacaagattaggat

SEQ ID NO: 6934 - DNA, 120 bp, synthetic construct
  source 1..120: mol_type = other DNA
aaaagtaacaccagcctgctaaacaaaggtggcgcgatctgatcaaagaacacaagcctcagcgaccagtaagttgtcccaacgccccttgagtacaaaacactaatttcactaactaaa

SEQ ID NO: 6935 - DNA, 120 bp, synthetic construct
  source 1..120: mol_type = other DNA
agaaagccatttagttactggaggtgcatgtgctcattctagttctctacgatacttaatgtgcacctaagtgtgtgccaacaccgtattataagggctggaggtgctcctggacatttt

SEQ ID NO: 6936 - DNA, 120 bp, synthetic construct
  source 1..120: mol_type = other DNA
aacgacccgtaagccgaagcgcccgggggcgcaaagtccagcaccggcgcccactgcgccgcgccgctcacaggcagggcacagccgccgccgccacccagggaggggacggcgggcagc

SEQ ID NO: 6937 - DNA, 120 bp, synthetic construct; identical to SEQ ID NO: 2
  source 1..120: mol_type = other DNA

SEQ ID NO: 6938 - DNA, 120 bp, synthetic construct
  source 1..120: mol_type = other DNA
tgatgctagagctatgcttcctgtacagcctgctgaactgtgagccagttaaacctcttttctttacaaattacccaagtcttaggtatttctttatagcaacgcaagaacagcctatga

SEQ ID NO: 6939 - DNA, 120 bp, synthetic construct
  source 1..120: mol_type = other DNA
actgagcttggtcatcctagagtcattctgtgcttttgagcacctgtaccaaaagatgtgctagacagaggaatgaggataaaatttgaattcttggccacaggattgaggttagtagtg

SEQ ID NO: 6940 - DNA, 120 bp, synthetic construct
  source 1..120: mol_type = other DNA
attgttagcatagaggtccttcctgatgtcaatatcacacttcatgatgctgttgtaggtggtttcatggatgccagcagactccatccctggaaaagagacacaggccatggtccttaa

SEQ ID NO: 6941 - DNA, 120 bp, synthetic construct
  source 1..120: mol_type = other DNA
tcttaggaagaaaacctttttcctggcctcattatgtcttctcgccttgaaaatgtggcactttccctttttctggtttagaaatgcttttggtcttggggcaaccgtcacttgtctcca

SEQ ID NO: 6942 - DNA, 120 bp, synthetic construct
  source 1..120: mol_type = other DNA
acgagatacggaagaagtgggcagggagagacctttcagacttctgctctctgaagttctaggctattaattatatctgaggctctaggaaccttttagaggcatcttgggattctttgt

SEQ ID NO: 6943 - DNA, 120 bp, synthetic construct
  source 1..120: mol_type = other DNA
caccacaccatgccatcttcagtctctgcacaatcttcttctatttgctaatggaggggattaaaaaaagatcaattatacaacactgactaatgcataacactgggtgtctataactgt

SEQ ID NO: 6944 - DNA, 120 bp, synthetic construct
  source 1..120: mol_type = other DNA
tggccaggggaaaggaaagtccagcttctggctctggtcctggctttgactaatagtcaccaaactaatagttgattaatagtggctttattccaggtctcttaacagaggaggagtttg

SEQ ID NO: 6945 - DNA, 120 bp, synthetic construct
  source 1..120: mol_type = other DNA
agatgttcccctgtagagaacaagtgctagtgggttggtgcaagcaccaggagctcttctgaggaaaaggccttgcagttatttacatttatgattcttcaatgctggaagatcgtggat

SEQ ID NO: 6946 - DNA, 120 bp, synthetic construct
  source 1..120: mol_type = other DNA
aaaccaagaccaaaggaaatgctacaagtactcatgcatgtgtccatggttttatagatgcagagactgaagctcaaagtgtgtaagtaccttcccaaaggattcacatctactaagtga

SEQ ID NO: 6947 - DNA, 120 bp, synthetic construct
  source 1..120: mol_type = other DNA
atttggccttcaggtgtttccaaaaggcccacgcctgtgtatagtgtgtctatgtgaaggtactttggacataactacatttatttatggttgagcactttctttaattcctagatgccg

SEQ ID NO: 6948 - DNA, 120 bp, synthetic construct
  source 1..120: mol_type = other DNA
aatttagatgtttagagtgagttaatgaaaacctttcaagaatgggctgtttaagactactcccagcatttcaagcccctttagctatattgcactgagagggataaccatgcagcccct

SEQ ID NO: 6949 - DNA, 120 bp, synthetic construct
  source 1..120: mol_type = other DNA
cctccatatcccaggctcaagtgatcctcccacctcaatctttcaagtagctgggactgaggtgtgtgccaccatgcctggctaatttcatttattttttgtagagacaggatcttacta

SEQ ID NO: 6950 - DNA, 120 bp, synthetic construct
  source 1..120: mol_type = other DNA
gctgtctttttgtcccattcccaccatcaccccctaaaaaggttcaacacattatgagtcagcatctcccaaaacttgtgaatcaattacagccaagccacaaaaggttaagtcattgag

SEQ ID NO: 6951 - DNA, 120 bp, synthetic construct
  source 1..120: mol_type = other DNA
aatgactatatttagacaaaaaggacatgaaaaaggggcagactttgtatctgatagatgcccatcagataatctgtctacattatatgtgaaattggcatttactcctggaccttaatc

SEQ ID NO: 6952 - DNA, 120 bp, synthetic construct
  source 1..120: mol_type = other DNA
atgggaaatccagagtctgagaccagatctttgcagagacaagttgcctaccttatgttaaagaagcatctagattttcctgtctgtatcaacccaaatgcacatttttctagatatgct

SEQ ID NO: 6953 - DNA, 120 bp, synthetic construct
  source 1..120: mol_type = other DNA
ccgttaagagaaggacacccagagttatctgcctggcattgagatctcaattaggatttcaaattgagaaaatttcttcttctaaatgggttaactgattgcacctccaaatccatataa

SEQ ID NO: 6954 - DNA, 120 bp, synthetic construct
  source 1..120: mol_type = other DNA
tttcccacccttcttttccctttccagatgctgaattattttggcattcctgtgatttggcttccctcagagcagattaagaagctttagaaaagaggcgagaactataaaggagaaaaa

SEQ ID NO: 6955 - DNA, 120 bp, synthetic construct
  source 1..120: mol_type = other DNA
ttcagcaggtcacctgctgcgctctgctgcaaatgaccaatgatgtagatccaaacttgtaaggtcacacatacacatttccaacaaaaaagagatatacatttccaacaaaagacacta

SEQ ID NO: 6956 - DNA, 120 bp, synthetic construct
  source 1..120: mol_type = other DNA
gatgattttatggtaggcacactgtttataaatcaagttcttgagggaggtgagtggaaataggaattgaagtatggagacaaggttgacaggcctatgtcttacaaagaggaatttgga

SEQ ID NO: 6957 - DNA, 120 bp, synthetic construct
  source 1..120: mol_type = other DNA
ctgtgagtatttctggactgtggacatgtgagaaaaatcccaaaatgagtggctttattttacagccatgaccagctgttcactcatgttactatgtcagatctgtttgattaatggtgc

SEQ ID NO: 6958 - DNA, 120 bp, synthetic construct
  source 1..120: mol_type = other DNA
tgaaaataaatttctaaacaagtgattaaatgatcttattgcctgggtttgagatttatagtttcacatcccatccaagtctcttcagtgagagaaaccagcactgcatgggtatgagtg

SEQ ID NO: 6959 - DNA, 120 bp, synthetic construct
  source 1..120: mol_type = other DNA
agaacactgcctggcccatggtgagcacgatgtaattattagctattattattgtcggatgctccataatgaggaagttagttctagaggtgagacagacactttttcagacaaaagtgc

SEQ ID NO: 6960 - DNA, 120 bp, synthetic construct
  source 1..120: mol_type = other DNA
tgcagggaggattcattatcccgcctattacatacccccatctcaccacccaatgtgtttgccattacatgtcaaggcttttataccagtttctcagtttccaaaaagtatttctaccaa

SEQ ID NO: 6961 - DNA, 120 bp, synthetic construct
  source 1..120: mol_type = other DNA
ttgccccggtgatatggaacaatggactttcccattaacaagtcagacaagctcttaactgaggacctttgctcatgctgctcctctgcctgaaacagtatttcccccttgtactcctct

SEQ ID NO: 6962 - DNA, 120 bp, synthetic construct
  source 1..120: mol_type = other DNA
gacccatctgacaccagaaattgagttcaagcacatgcacagaggtgtgggtagtggcctgtatgtcaggctccacccaggtagtagggagcgtgaggttaaatcatcaagcaaaagcag

SEQ ID NO: 6963 - DNA, 120 bp, synthetic construct
  source 1..120: mol_type = other DNA
tcaacagaggagtgtattaataatatgcaaagctgactctctttccccttaaaaacacctcctaaattacaatccctggagaagaccttagagtcaattttccaaaataaacttttcata

SEQ ID NO: 6964 - DNA, 120 bp, synthetic construct
  source 1..120: mol_type = other DNA
ggttcctggaatatatggccatgtgaagaggaccaccatgacccattggcatgtacaggacactttagagctacaataccattattgacaacaatgacaaacattcactaagtcgttagc

SEQ ID NO: 6965 - DNA, 120 bp, synthetic construct
  source 1..120: mol_type = other DNA
cagagtaagagagagaccctcagtgtagagatccacagtcctgactttgccatcaagatgctattatgaaagaggacaagatctttacatctctgaatctcaataatctttcctaaaatg

SEQ ID NO: 6966 - DNA, 120 bp, synthetic construct
  source 1..120: mol_type = other DNA
tcagacaggcatctgcctgccttactttgttatcagcttcttagatgtggttctgtaagttttgcttaggaaggaagtagtaacaaaagctcttggctaattgtctttggtgacaaatac

SEQ ID NO: 6967 - DNA, 120 bp, synthetic construct
  source 1..120: mol_type = other DNA
tcagtaagaaaatcagaaaatttccaggatgccaattttctgggaagcttttgagcagcataggtttggagcaaatgcctactaatgtcttagtgtaaatttatttccagagattctcag

SEQ ID NO: 6968 - DNA, 120 bp, synthetic construct
  source 1..120: mol_type = other DNA
gcatcatcaacaaagaacaacacattggtggggaagtaacaagacaaggggaaaggatcttgagtttctaggggtggcaaattgtgggaaaacaaatacatgggaaactaatgatagaca

SEQ ID NO: 6969 - DNA, 120 bp, synthetic construct
  source 1..120: mol_type = other DNA
ttttggaggcagccagtgtgttcatttttcccttagggcaccctgcccttctacatatagtagaaactcaggaatttggttaagcaactttctattttccccaaaccttaaaagagctgt

SEQ ID NO: 6970 - DNA, 120 bp, synthetic construct
  source 1..120: mol_type = other DNA
tggcatggggcctagagatctgcatttaaacaagagccacacagaagcacttggacagagggtaagaagggaatgtgatactgaagtctcaaaaatacagaagaatagtaaggaatgatc

SEQ ID NO: 6971 - DNA, 120 bp, synthetic construct
  source 1..120: mol_type = other DNA
tattaagtgccaatcagattatcagttgtcactcaaatttggattaattaggtcagatattaggtgtcaggtggtgtttaaatccttgttgtccagagtgacatgggaagcactggaagc

SEQ ID NO: 6972 - DNA, 120 bp, synthetic construct
  source 1..120: mol_type = other DNA
aattacatcagcaggttcagaataaatgatggctcacacaccagaactcatttcaatcatccctaaatttaaaacaggaaaatggttggcaaagttgttccctttcttcctctggagaaa

SEQ ID NO: 6973 - DNA, 120 bp, synthetic construct
  source 1..120: mol_type = other DNA
tagatgtggaggatctagaattggaaaagtttctgtctttcagaactttgtgtaggtttggtattcataaaacattacattatttgatgtctccccccaacccccaccccgcaatactac

SEQ ID NO: 6974 - DNA, 120 bp, synthetic construct
  source 1..120: mol_type = other DNA
tatgtttgcagcatcaagatcacttttttttttggctggtttactcctactcaaattgtttctggctctctgggatgaccagtttctcaaggaaagaaacctcctctgaccaccatatca

SEQ ID NO: 6975 - DNA, 120 bp, synthetic construct
  source 1..120: mol_type = other DNA
tacctgaataggtctggttctagctactcacaactcagagaggtagtgaatgctaggaggtaggaagaaggacattcaaccagaatactaaaattgcatttagatagtccagaaattaga

SEQ ID NO: 6976 - DNA, 120 bp, synthetic construct
  source 1..120: mol_type = other DNA
gagccatctgattctgttgcagtctttggcaacacggcccatttaaattcaagttaggatctgagtgtttgggtaaacagaataagctaagaatgagtggcagacatatttcctcaaatc

SEQ ID NO: 6977 - DNA, 120 bp, synthetic construct
  source 1..120: mol_type = other DNA
gggagaggagtgtaaattcagctattgtcttgtcttcaggcagcaggaaattaagggattggtaactgttatttgtaatagtaattgatgtcacaaaaggagttttgagaacagggagtt

SEQ ID NO: 6978 - DNA, 120 bp, synthetic construct
  source 1..120: mol_type = other DNA
ccttccctttcttctgtgtgacctatagattcagaaattcctttctgggataatttctggcactgctttggagatggagcccctgaaaattggctatggaccaaatggattcccactctt

SEQ ID NO: 6979 - DNA, 120 bp, synthetic construct
  source 1..120: mol_type = other DNA
taaattttaaaactagaactaaaccagacattgagaggacccagaaatataccctgactaacgtgggtggaatttcatttggcttgactctttggtgaaaaaaaaaaaaatcaggctctc

SEQ ID NO: 6980 - DNA, 120 bp, synthetic construct
  source 1..120: mol_type = other DNA
ccactgaagtgaaagtgaaaccagaatgctgtcaacgattaaaaaaaaaaaaaactctcaagcaagagcaaacaatgatactgcctctacattttccaaatctttgaatgcttggctatt

SEQ ID NO: 6981 - DNA, 120 bp, synthetic construct
  source 1..120: mol_type = other DNA
gttttaagaaagtttacgaattcgtgttgggctgcattcaaagccatcctgggctgcatgtggcccacgggccgtgggttggacaaggttggtataatagataacatataattaatatat

SEQ ID NO: 6982 - DNA, 120 bp, synthetic construct
  source 1..120: mol_type = other DNA
gcccacattccccagattcctttagattagcagcaaaatgtatgcctacatatcccaaaggagaagcttattttctgctattttgacatctaatgaattaatgcttgtgtggactgaatt

SEQ ID NO: 6983 - DNA, 120 bp, synthetic construct
  source 1..120: mol_type = other DNA
agatatgcggcgttcaacctactcatctgacaaagggctaatatccagaatctacaatgaactcaaacaaatttacaagaaaaaaacaaacagccccatcaaaaagtgggcaaaggacat

SEQ ID NO: 6984 - DNA, 120 bp, synthetic construct
  source 1..120: mol_type = other DNA
taagctcttgactgtccttttcacataagtgggtgaagttgagaaaacataactgtgaatacatttgttgtactctgctcagcctttcatcacccctgctctgacctgttggaaagtggt

SEQ ID NO: 6985 - DNA, 120 bp, synthetic construct
  source 1..120: mol_type = other DNA
cataacctgagagatggggcgagaacagcataaatgccatggttttgatcctcctatcaaaaatcaggacaaaatctaaactcaattcgatcagaaaaggttacatgtgcttgactgtat

SEQ ID NO: 6986 - DNA, 120 bp, synthetic construct
  source 1..120: mol_type = other DNA
taaatttaaaaagagagagataattttcccagactccaaatgccaaatcagtttcactccctcctcaaaagtgctgagaaagttctaaatttggaaaggtcacaaagggataaagtgagt

SEQ ID NO: 6987 - DNA, 120 bp, synthetic construct
  source 1..120: mol_type = other DNA
gataaaagattgggcaaagtaatttagtcccagtcccagatactacgtgtttcagtctgtgctcgtgggtatgtaaaggtttcagatgggctttccatgaaaaacagcaatgaggcaaac

SEQ ID NO: 6988 - DNA, 120 bp, synthetic construct
  source 1..120: mol_type = other DNA
aggtaaacaaccgaactgatgagtggtttccctgagcaaagactcttgctacttcatgtgtcctttccagaacgtggcatcaacatcacatgggagctggtgagaaattcataacctcat

SEQ ID NO: 6989 - DNA, 120 bp, synthetic construct
  source 1..120: mol_type = other DNA
ttagtgtctttcctcagtgcaaaggctgataaaggcctcaatttctccctcagtttactgtgatcagagacttaggctgcctagttatccttgttgcctggacaaaaaactctttagatg

SEQ ID NO: 6990 - DNA, 120 bp, synthetic construct
  source 1..120: mol_type = other DNA
gatgtggtccatgctctctgagccaggcctctcttgacttcttatgtttagttattcatgaaaccactgggcctgtctaaatggccaagtcatataggaagagacagagtgaaagggaga

SEQ ID NO: 6991 - DNA, 120 bp, synthetic construct
  source 1..120: mol_type = other DNA
tagagagaaagcgctgccatgccttaagccaacctttccagaagtataatgcccttgccactagtagtttgggaaacaatttttattggcatgcaggcaaatattttgtttcaatagtgg

SEQ ID NO: 6992 - DNA, 120 bp, synthetic construct
  source 1..120: mol_type = other DNA
aaaaattaggagacttaataatttgctgcatatcttggtggccaagttttccagccctggtcagttaggctttaggacacttttcttaggcttcaggaatgtgagcatggaagtagtaca

SEQ ID NO: 6993 - DNA, 120 bp, synthetic construct
  source 1..120: mol_type = other DNA
aagcagaaactaagaatttgtagagttgggtaactttgggtggtccagggttcaatttcagaaccaaatgcatccagaacttggatagctctaccaaccttgatctttcagcatggtttc

SEQ ID NO: 6994 - DNA, 120 bp, synthetic construct
  source 1..120: mol_type = other DNA
caagattcttgtttaagtgttattcagaatgttcagaaaccaggatatcttttgagtagaagctttaacttatatggtatggtttgaataaggatggttgtccaaaatatctccaacatc

SEQ ID NO: 6995 - DNA, 120 bp, synthetic construct
  source 1..120: mol_type = other DNA
tatgtgagttgctggcttataattcacactcaagagatactgattttgtcaattgtcctttcccctttttttctctcttccctccttccattccttcttcccttacctctcctttccttc

SEQ ID NO: 6996 - DNA, 120 bp, synthetic construct
  source 1..120: mol_type = other DNA
aacgaaggacaggaagtaattgtgaatgtttaatatagctggggctatgcgatttggcttaagttgttagctttgttttcctcttgagaaataaaaactaaggggccctcccttttcaga

SEQ ID NO: 6997 - DNA, 120 bp, synthetic construct
  source 1..120: mol_type = other DNA
cactgcgctccacgttgaggtgggcgtggggtgcggacaggaattgaagcggaagtctgggaagctttagggtcgctggagggggaccccggttggagagaggagcggaactcctggaca

SEQ ID NO: 6998 - DNA, 120 bp, synthetic construct
  source 1..120: mol_type = other DNA
gtaggagacaagaaactgagtatgagggaaaaggaatttggaacgtagttctgcttagaataccaagacttgcctcggatctcccactcacaaaagttctttaccttaatcttcatggtg

SEQ ID NO: 6999 - DNA, 120 bp, synthetic construct
  source 1..120: mol_type = other DNA
tattatatcactagagcagaacatagacttcccctttaatgagccatcaggacttgaggttgagctgtgtgggaatccaaactatgacttcttttaactcaagggcttcttgagccttct

SEQ ID NO: 7000 - DNA, 120 bp, synthetic construct
  source 1..120: mol_type = other DNA
gtgtttttctttgctcctattgaacttacacgtttctctctcttttgactcagaccctgtatggaatgtattctccttggggatgcttgcccaggtgatgtgatggtttaaacacataac

SEQ ID NO: 7001 - DNA, 120 bp, synthetic construct
  source 1..120: mol_type = other DNA
aactcaggagagaatgaagctattccactgaagaagcagagcctcacctcaccttaaaaatatcatatgccttcattaagttattaagctcatcacccatgtcaactggaatatagatga

SEQ ID NO: 7002 - DNA, 120 bp, synthetic construct
  source 1..120: mol_type = other DNA
ttcaccagcccagagccgttgtcgcacaccagggcggtggtctcctcgtcgtcacacatcttggcacagcttcagggggttctgcaggttgaggaggggagggcggaccacgcttagctg

SEQ ID NO: 7003 - DNA, 120 bp, synthetic construct
  source 1..120: mol_type = other DNA
tagccccaaactctgccctcattgctgcaagcctcctagaccgaggacccccgggctgagggtggggtaaggataggtagtgtccctccccgtcccacccccgcctgtcccttcctcggt

SEQ ID NO: 7004 - DNA, 120 bp, synthetic construct
  source 1..120: mol_type = other DNA
aatggacgagactggactggaaatcagaaacttggttctagtcgggtgacctggggtcagtgacttcacttctctgttctcctaccctcttcataaaatgggcagtgggattcctgtctt

SEQ ID NO: 7005 - DNA, 120 bp, synthetic construct
  source 1..120: mol_type = other DNA
atgaatatgggacttgtccaaaactccttggatggtggggtgaatggcatggttggggtcttgataacatttcagtgcttactgtgtactacttatactctgctaaataattgtactaca

SEQ ID NO: 7006 - DNA, 120 bp, synthetic construct
  source 1..120: mol_type = other DNA
taataacaacagtagtgggcaatttgtacacgtccaccgagacccatgtctttttcttcctttgagggactcatctaaccccaaacaactggaggaataacaatgaccaaggaatgattt

SEQ ID NO: 7007 - DNA, 120 bp, synthetic construct
  source 1..120: mol_type = other DNA
aaaatgaaagcagaggaaccagacttagcgttgtgcccacacaaactgatcagaactccctggggaacttttaaaaaatgcatgtttcttgctgattccaggactgaatcagagtctgga

SEQ ID NO: 7008 - DNA, 120 bp, synthetic construct
  source 1..120: mol_type = other DNA
tggattggggactatcatagaccagaattactccccctaacactctccaacaaacttctggaaaagttcaaccctagtcagccatggaaggtcaaacattcagtgtctaagtgtgtttca

SEQ ID NO: 7009 - DNA, 120 bp, synthetic construct
  source 1..120: mol_type = other DNA
agctcagcagcaggagtgcagagctagggtttccccaagctctcagtcacttaaacattgctctccacccttcacctctaacaggatggtttccatggggaagtgaaccaggacttcccc

SEQ ID NO: 7010 - DNA, 120 bp, synthetic construct
  source 1..120: mol_type = other DNA
gagcccacattgcaaggggcctacctgccggggggcctggtgcacagtagtgctggtgcgggaggaggggaggcacccccaggaacatcggggctgcgggaacttgcacagggagctctg

SEQ ID NO: 7011 - DNA, 120 bp, synthetic construct
  source 1..120: mol_type = other DNA
ggggtgagggagtttttggctactggaatcacaggcggtgccaggcctgggtcagaattggaattctgctgggcagggagtgggctggagacgggccagggctaggttcttctttctgca

SEQ ID NO: 7012 - DNA, 120 bp, synthetic construct
  source 1..120: mol_type = other DNA
acccccagacctagcttagcagtgacccagtccattccctctcccccaaccccaccctgaccctgacgactccagcctcccttagccccagccccttggctgagtcacccaacctttctg

SEQ ID NO: 7013 - DNA, 120 bp, synthetic construct
  source 1..120: mol_type = other DNA
ccatggccagtgcccatggcctgggaggtttgcagtcagacctcctggcaccccttccatgctgcccaccagctggttcagctgagtgaccttttaaggtataaaccttaaaaacagata

SEQ ID NO: 7014 - DNA, 120 bp, synthetic construct
  source 1..120: mol_type = other DNA
tgcacttaaacctctctggcccttgatttcctcatgcacgcaatgcatgtgagtgcctgcactgcctgcttattgctgcctggttgttactgtgggttgccacaggggactctgatttag

SEQ ID NO: 7015 - DNA, 120 bp, synthetic construct
  source 1..120: mol_type = other DNA
gaagctccatcagccccacacggactcgcggcgcattataaacactgtaatctggtgtcagccccggcactgattaaaggcccattagacacattcaggcctctgtgcagcactgattag

SEQ ID NO: 7016 - DNA, 120 bp, synthetic construct
  source 1..120: mol_type = other DNA
aaacaaatggcagtcattaacattagttagaaacacatttattgcattatactgtccctctcaggggtagcgtgtccaggccactggtttctggcccttggatagagggtagaaaaggct

SEQ ID NO: 7017 - DNA, 120 bp, synthetic construct
  source 1..120: mol_type = other DNA
acatgtatacatctatgtgtacatagacatacatttctgtacaacatatccgcaaaaagccacatgtatgcattcctgtacacacacacatacactcactttcaggagccagaagtgggg

SEQ ID NO: 7018 - DNA, 120 bp, synthetic construct
  source 1..120: mol_type = other DNA
tgcatctctctctctgcctcctctcctctgcacctctctcccaacccccaggtcctctcaggcctagctcagatgatgcgggagtgctggtacccaaacccctctgcccgactcaccgcg

SEQ ID NO: 7019 - DNA, 120 bp, synthetic construct
  source 1..120: mol_type = other DNA
aggccaagcatggcagggggaaggtcagtgggtgtcaagagacccaggtctgaccccggatgtttgctccatgtgacaaaagcaggcctgtctcaggaccttttcttttcttttttcctt

SEQ ID NO: 7020 - DNA, 120 bp, synthetic construct
  source 1..120: mol_type = other DNA
catttggaaatttcaaggatgtatgtatgctcacgtatggagcaggttgtcctggtccctgggtgcagggaagtgggctgcagggaagtggattggaggggagcttgaggaatataagga

SEQ ID NO: 7021 - DNA, 120 bp, synthetic construct
  source 1..120: mol_type = other DNA
gcattgtagtcttcccacctcccacaagatggcggagggcaagtagcaagggggcggggtgtggccgccggaagcctagccgctgctcgggggggacctgcgggctcaggcccgggagct

SEQ ID NO: 7022 - DNA, 120 bp, synthetic construct
  source 1..120: mol_type = other DNA
gaatggtgcctctgttggcaaatgattgttcatctaaatcattcatttttttcggctgtaggaaatctttggtctctgaactgttgaggtgggggcgtgagctttctagatctagtgaaa

SEQ ID NO: 7023 - DNA, 120 bp, synthetic construct
  source 1..120: mol_type = other DNA
tttttatgtttgcttcttgtatgggctagttcattcgttgctagccttcacttttctggaaccagagcctgtgtgtttttagagctggttgtctctgaattctctgcatacagtttgaag

SEQ ID NO: 7024 - DNA, 120 bp, synthetic construct
  source 1..120: mol_type = other DNA
ctttgtgaaccttctttgtctccctgttcttccaacccattaccctaatgctgatttcatttgcctccctgtgtaaccaggatcccatgatcatcagcttttactaagctcctattgatg

SEQ ID NO: 7025 - DNA, 120 bp, synthetic construct
  source 1..120: mol_type = other DNA
ttgcactcgtactgcctttaccatttcaccactgaaactactgttttaaaagttatctgtgacctccgaatcaccaaatccaatgacgtttcctctgtcatccttggtttccttagaccc

SEQ ID NO: 7026 - DNA, 120 bp, synthetic construct
  source 1..120: mol_type = other DNA
tggatcctggggaagtaaccagtgtcctcaaggttccatatgcttttcactgtgttctcttggtgatcatatcctttatgatataaaccatcatttctgtggggctgtttcttggttctg

SEQ ID NO: 7027 - DNA, 120 bp, synthetic construct
  source 1..120: mol_type = other DNA
acctctctctcaacaacccagtcttgaaatctttcagaaatcttggttcttctcccactgtcaatcacgtgtcagatcttgaatatatcttgtttagttaggcccccaagttgtataata

SEQ ID NO: 7028 - DNA, 120 bp, synthetic construct
  source 1..120: mol_type = other DNA
gttagccaccgtgccgagcctatacgtaagattttgactgaacatttaaatagtcataggtgactggttaaaaatgaattattatgtaaaattagaatatttcagtggtatatcccagtt

SEQ ID NO: 7029 - DNA, 120 bp, synthetic construct
  source 1..120: mol_type = other DNA
ttctgctccattattccccatgatttggttttattcttgggctagcttatcttaatggtggtaaattactgtagtactttcagacttcatatcctcatttcacgtatagtaaaatgaaaa

SEQ ID NO: 7030 - DNA, 120 bp, synthetic construct
  source 1..120: mol_type = other DNA
aagagacctgagtgttcatgagtgaggtggcctgtaccattcttgtcgagatgtgaaatagaataaaatgaggtgcccatcatttttggttttggaagagtttgtgtatagttggaatga

SEQ ID NO: 7031 - DNA, 120 bp, synthetic construct
  source 1..120: mol_type = other DNA
tacaatgtaatccaagaacatactctgtttcaaaggcctgttatttcagacttaaaatttgagatctgtatatggcccagtatattgtcttttttttcctctccatttattgagtgcagg

SEQ ID NO: 7032 - DNA, 120 bp, synthetic construct
  source 1..120: mol_type = other DNA
tttacttttcgtatgatcttgcacttaagattgctttctttgattttgaaggatctgaaacacaccctttagaatgtcctttagtctgcttgaaaatgtctttattttatctcagtctta

SEQ ID NO: 7033 - DNA, 120 bp, synthetic construct
  source 1..120: mol_type = other DNA
cctcttaaatgcttctttgttggcaaactcacaaaaggcaaaagctggggtcacctttctgggttcctgacttctagtggatttgagcttcttattcattcctcgttattttgctggtta

SEQ ID NO: 7034 - DNA, 120 bp, synthetic construct
  source 1..120: mol_type = other DNA
attctttttttttttttttggagacagagtcttactgtgtcgcccaggctggagtggcgtgatctccactcactgcaacctccgcctcccaggttcaggcaattctcctgtctcagccta

SEQ ID NO: 7035 - DNA, 120 bp, synthetic construct
  source 1..120: mol_type = other DNA
accctcccgtcctacccatctcctattttaaacatgtgaaaacagaggcccaaggaagatgggtgacttgacttgcctaaaaatatgagggaatttctctccaatagcttttatattctc

SEQ ID NO: 7036 - DNA, 120 bp, synthetic construct
  source 1..120: mol_type = other DNA
ttgagatttttggttaagaatttggagatgacgcagttattgatgatgacaaggtcctgcgtggatcatggaagttggtatttggaggtgaagaagttaaggagctaagaagccagagtg

SEQ ID NO: 7037 - DNA, 120 bp, synthetic construct
  source 1..120: mol_type = other DNA
acaatcgttaacatagtaaaagacatctgtgtctcatcttgggaaatttaccaattaaatgaattaaaaaacagacacctgtgaccaaagacgtggggctttttccccacacaccaatag

SEQ ID NO: 7038 - DNA, 120 bp, synthetic construct
  source 1..120: mol_type = other DNA
gtcatgccttgggtaggtaaaaggaggacaggagaaggctagagagagagattctgttcctgaggcctgaagtgcctcaacattattaaaaaaaaagaggactataataagcattatagt

SEQ ID NO: 7039 - DNA, 120 bp, synthetic construct
  source 1..120: mol_type = other DNA
cagagtttcaggaagtcagaggatgaggagctatctggggaatagtctgatcttttaacggctccctttccctaatcctaaagcaagcacaaaatatttttagagctttatgatctctta

SEQ ID NO: 7040 - DNA, 120 bp, synthetic construct
  source 1..120: mol_type = other DNA
aaaggaccttacatatagtgctaatgagcttagacttttactttgtcactgtttgggtgctttgaaaggtagaaaatactaatcttgaagggtctttctaacagctggcaattaacagat

SEQ ID NO: 7041 - DNA, 120 bp, synthetic construct
  source 1..120: mol_type = other DNA
tttgttgagaaaatctaagtatttgaattaaatagcagaccttcttcagaaaaagattaggaaaaagcccttaccgtagtatatgaggtacagactggttcaggatcaagatccttatta

SEQ ID NO: 7042 - DNA, 120 bp, synthetic construct
  source 1..120: mol_type = other DNA
ccgtatcatgttgagagggtatttgaatgtggaatgaaatttattccaattcttaaacctttctgcttgtataaaaggtgtatgacacttaagataattcacctgaccttggagtacttg

SEQ ID NO: 7043 - DNA, 120 bp, synthetic construct
  source 1..120: mol_type = other DNA
aaaattgtacttttgggggcggtcttatagctgttttaggttttaagtagaggtcaaagtattaaaaaaaattgaagaagacatacttaaatatacaggcaagcataaaaccttgtttta

SEQ ID NO: 7044 - DNA, 120 bp, synthetic construct
  source 1..120: mol_type = other DNA
aaaagcttttggccattacattcagctataaattagtaacagtgtgcatatgatttctgattatttttcctcttgagccagaactagaaactggtcctgtaatatctgtggatcttgttc

SEQ ID NO: 7045 - DNA, 120 bp, synthetic construct
  source 1..120: mol_type = other DNA
gtgcgttgataaggtgatcatggaaggtgtgatctttgaaaatttgacatttttgccaaaacctgaatgacatgaaggactagtcatttgaagatttggaagcagaatttttgaggctga

SEQ ID NO: 7046 - DNA, 120 bp, synthetic construct
  source 1..120: mol_type = other DNA
caagtaactttttatgagggatgaggcttgaaaaagtacaagctgctctgaaaggtaccttagtgaaggaaattgctgctgagacatggaggatgaggcaatatagtcagcattggcttt

SEQ ID NO: 7047 - DNA, 120 bp, synthetic construct
  source 1..120: mol_type = other DNA
caaggtggaaggaggaaggacaggagacggccagagcaagcaagggatcaaatttgtagcctcaggctttttaataaaacacattaatccattactgagggtggaacgtgaatacctccc

SEQ ID NO: 7048 - DNA, 120 bp, synthetic construct
  source 1..120: mol_type = other DNA
agggattctgcagtgtaacaactaagctcagaaacttagtcccgtggctgcatcacaacatttgtttttccatatacaggggccagagttttaacttagaatattccgtttcctcagtag

SEQ ID NO: 7049 - DNA, 120 bp, synthetic construct
  source 1..120: mol_type = other DNA
cttttccagcgttatcaagctacaaagtgaaagattcagaacttgaacctaagtcttcaatctccatatgctggagccttctaaagtatctcagtagagtagcgaagagctatatgagta

SEQ ID NO: 7050 - DNA, 120 bp, synthetic construct
  source 1..120: mol_type = other DNA
ttaagattctattagatgctaggaacacttcttttgagactcactccttgaggtaacatagaacatactggtaagtcttgcccgtagaagactatgaatatatctcccagtcctgtgtgg

SEQ ID NO: 7051 - DNA, 120 bp, synthetic construct
  source 1..120: mol_type = other DNA
catttactaaaagcaatgaagctggttataacaaacactgatactgaaaataagagatatgtttgtcagtgcggtctttaaacagtgttacacaatttatttctgtttcattttgatcag

SEQ ID NO: 7052 - DNA, 120 bp, synthetic construct
  source 1..120: mol_type = other DNA
gaggaccttttaaaaggtattctttgttttgaaagactgttttccttctggaagttctaggccttatgagaaattacctattctgaatttgtcacaaaaaatgacttgtaaataagtcct

SEQ ID NO: 7053 - DNA, 120 bp, synthetic construct
  source 1..120: mol_type = other DNA
tttccccccatttaaaccagaatttaagtttaactttatatattcttgacagtttggattttgtccttcaacctcataaaattgggaatttaagcatcacctggttcgatttaaatgcaa

SEQ ID NO: 7054 - DNA, 120 bp, synthetic construct
  source 1..120: mol_type = other DNA
gccaccatggccaggcttgctgcggggggaggggggaaggtggttttccctcgcactgtcttaaaccgatggcctttccttggcacagggtccactgcagcatgccaaacgaggaggcag

SEQ ID NO: 7055 - DNA, 120 bp, synthetic construct
  source 1..120: mol_type = other DNA
ccgaaaagacaactgcagaggaataagaaaccttgcagcaaatgctggggtagaagcccatttacaagaagccatagtttataaatgcagcctgaacagcagaaaaaaaattactgtttt

SEQ ID NO: 7056 - DNA, 120 bp, synthetic construct
  source 1..120: mol_type = other DNA
attacttgatcatggatatcagggttaatagtacttaggagccgggcgtggtggcccatgcctgtaatacaagctaaacaggaggctgagggaagctgaggcaggaggatcacttgagcc

SEQ ID NO: 7057 - DNA, 120 bp, synthetic construct
  source 1..120: mol_type = other DNA
agtttttgttttttgtgtttttttttctttttttttttttttttttgagacagggtctcactttgtcaacccaggctggcgtgcagtagcaaacatggctcacttgcagcttcaacctcg

SEQ ID NO: 7058 - DNA, 120 bp, synthetic construct
  source 1..120: mol_type = other DNA
aaccatcaccaccacccatctctagaaatttttaatcttccctaattaaaactctgtgcacattaaacactaacatgccattttcccctccccccaacccttggcaaccaccactccact

SEQ ID NO: 7059 - DNA, 120 bp, synthetic construct
  source 1..120: mol_type = other DNA
acatagcagctggcttccctcaatgattctaacagaaaggccatttatgacctagactcagaagccacacaccattgcttctgctgtattctctttattagatatgagtcactaagtcca

SEQ ID NO: 7060 - DNA, 120 bp, synthetic construct
  source 1..120: mol_type = other DNA
atctttgtggggccatacacaggcatactcatctggttctccattttttttaagctgaaggatttttttagttatttttacttttgcgaatgtgtgttactttcttttggtaatttcaga

SEQ ID NO: 7061 - DNA, 120 bp, synthetic construct
  source 1..120: mol_type = other DNA
gtcttttatatggctgtcgctgagtaaagcattttgggaattacaaaagctaagtattagatatagaccttgtcttcaagatatttatgctccagctgggaagacaaaacaccccaaggt

SEQ ID NO: 7062 - DNA, 120 bp, synthetic construct
  source 1..120: mol_type = other DNA
taatattcactttattattattattattattattattattttttgagacggagtctcactctgtcgccgaggctggagtgcagtgttgcaatctcggctcacagcaacctccacctcaag

SEQ ID NO: 7063 - DNA, 120 bp, synthetic construct
  source 1..120: mol_type = other DNA
tggcacctcttttgagtatccgtcactttgataagaaaaaagaaaaaaggcaccttctgatttgaattctagctgactttcaaagaatagacactattcaaactattccagaccatataa

SEQ ID NO: 7064 - DNA, 120 bp, synthetic construct
  source 1..120: mol_type = other DNA
agaggcataggacctttttcttgaggggggaaaaccctggaaaatttgattgcagaggctaaattattcatgagatatagtaagacttagtatggaaatgtgagcctctctcaaattaat

SEQ ID NO: 7065 - DNA, 120 bp, synthetic construct
  source 1..120: mol_type = other DNA
tgtggggaaagaatatggcaaacagaaaactgaatatcaccacctaatggggccttagtagggaagagaaagagaaatagaaaagggttgttaaagagaaaattaaaatggatgaggtga

SEQ ID NO: 7066 - DNA, 120 bp, synthetic construct
  source 1..120: mol_type = other DNA
tccatccttagaagcatttgtataagattggaatgatttgttccttaaaagtttggtagaaggtgtttgtaaaaccattcagatacggtattttgaaggatttggaggaggaggggaaag

SEQ ID NO: 7067 - DNA, 120 bp, synthetic construct
  source 1..120: mol_type = other DNA
ctggccaatgctttgcttttcaaactcttcaaagggtatgtaataaaaaggaaggcttaccaccagacaccataccttgattctataagcagtgactgtatttttgtatgttctttaagt

SEQ ID NO: 7068 - DNA, 120 bp, synthetic construct
  source 1..120: mol_type = other DNA
aatctctgttcctttttgcaagttatcctagtgtgttgtatgaggaatagatgcagttttttctttttcctcatggctgtcctatttcccagcaccactttaaattccatctttttacaa

SEQ ID NO: 7069 - DNA, 120 bp, synthetic construct
  source 1..120: mol_type = other DNA
accctgactgtaggactatatccagtgtttccacattaagtatgctgttggccttggggttgatagatcatgttaaagaaatgttcttttttattcagtattttcaacaagaatgggtat

SEQ ID NO: 7070 - DNA, 120 bp, synthetic construct
  source 1..120: mol_type = other DNA
ttttagcagtctctgctcatcttgcccatccggctctttttgtggttgtgtaaggttataacttctgtgtctcagtaaacttgtgcatgcccatttttttctctgttactaccttttctc

SEQ ID NO: 7071 - DNA, 120 bp, synthetic construct
  source 1..120: mol_type = other DNA
ccctgatttcctttggtagagtcttccaattgctgaactccaatattgtcgtgactagccagtgttacaacctgtctgccttattttgtgtaatggatttcatattacagaggcattttt

SEQ ID NO: 7072 - DNA, 120 bp, synthetic construct
  source 1..120: mol_type = other DNA
tttttaaccttataggtccaagggtagccaaggatggctgcagcttcatatgatcagttgttaaagcaagttgaggcactgaagatggagaactcaaatcttcgacaagagctagaagat

SEQ ID NO: 7073 - DNA, 120 bp, synthetic construct
  source 1..120: mol_type = other DNA
aggcatcacactagtctagatgatttccatggcaccttcaagccctaaaattggcttgccaaatagtactgaaaagttctgatcacctccaagacaggttagaaaatcgtctatagtggg

SEQ ID NO: 7074 - DNA, 120 bp, synthetic construct
  source 1..120: mol_type = other DNA
ttcatctactttagtatggtatatttcgcagagaactcctcctggcaggcctgtttagatagtacatgtctgttttgtagtgtagaactctgagatctcttttttaaagtttgtttaatt

SEQ ID NO: 7075 - DNA, 120 bp, synthetic construct
  source 1..120: mol_type = other DNA
ccaagcagaaagattgtttgagctcaggaatttgagaccagcctgggcaacatggcaagactctgtttctgcaaaaaaatacaaaaattagccaggtgtggcgtatatctgtggtcccag

SEQ ID NO: 7076 - DNA, 120 bp, synthetic construct
  source 1..120: mol_type = other DNA
ccgggttcaagcggttctcctgcctcagcttcccaagtagctgggactacgggtgtgcaccaccacgcccggctaatttttatatttttagtacagacggggtttcactatgttggctag

SEQ ID NO: 7077 - DNA, 120 bp, synthetic construct
  source 1..120: mol_type = other DNA
gtgctgggattacaggcgtgagccaccgtgcccagcctaatgaataattttctaatgtttctaaaatgttaaaatacttctaagacaatgtgtgattatatagtgtaattaatcttttaa

SEQ ID NO: 7078 - DNA, 120 bp, synthetic construct
  source 1..120: mol_type = other DNA
gcaggagattaaagacctgagtttacaacctccaagagaaacaacatttaaggctagagagttaagtgctaccagagaataaggctgaactggaaaggcaaagtgaaatatcccatattc

SEQ ID NO: 7079 - DNA, 120 bp, synthetic construct
  source 1..120: mol_type = other DNA
gattgaggagatcagaccccaacaatggaaaaggcagactctctagaggaaaatactatcaatcatcttaagtctcttttgttcttgtatacacagttggcatacagtcaaacgttatat

SEQ ID NO: 7080 - DNA, 120 bp, synthetic construct
  source 1..120: mol_type = other DNA
actgatcacaccaaatgtggagcattggaatgctcaggcattgctgagagaagtattaaaaaccattttggcagtttcctttaaaattaaaccctatgactcagtgtttgcactcctaga

SEQ ID NO: 7081 - DNA, 120 bp, synthetic construct
  source 1..120: mol_type = other DNA
ttttattgtggaatagccataaactgttcacagcaaactagtaaataatgtaggtcatattggatggtatcatcttaaggcaaagtaactggatgtgactgtaaatttacacagattttg

SEQ ID NO: 7082 - DNA, 120 bp, synthetic construct
  source 1..120: mol_type = other DNA
attttcagcctctaccccaggcttactgaatcgacagtctatgttttaacaaggtcttcaggtgattctgatccatgctgacgcttgagaacactactgtaggctttggagaagaatctt

SEQ ID NO: 7083 - DNA, 120 bp, synthetic construct
  source 1..120: mol_type = other DNA
gcaatggatggaaagagaattggaatcctggaaaaatcacaggtagtctccaatgagagttcttaaatggaagagatggtgccctgaagtttatagtagacattttgatgggcatattca

SEQ ID NO: 7084 - DNA, 120 bp, synthetic construct
  source 1..120: mol_type = other DNA
atgttggtgcacgcttaagagacatggattctaaacacataagtagcttttgtaacttgagcaagtctctgggtctcacttgttttatctgaaaaatgagaataatttgcattgttggtt

SEQ ID NO: 7085 - DNA, 120 bp, synthetic construct
  source 1..120: mol_type = other DNA
tcggctctttgtaaagcttgttgctattctgccagtcactaaatagggctttagtattctatatgccatagacttgagcctactgtttcattggaagaagtattgtcttcttcattcagg

SEQ ID NO: 7086 - DNA, 120 bp, synthetic construct
  source 1..120: mol_type = other DNA
ctaccaccacgcctggctaatttttgtatttttggtagagacggggtttcttcatgttggccaagctggttatcacttaaatactttgactactctgtacattgagtaatacacataatt

SEQ ID NO: 7087 - DNA, 120 bp, synthetic construct
  source 1..120: mol_type = other DNA
gtacagtagcgtagaacacagtcctgtacagtagcgtagaacacagtcctgtacagtagcgtagaacacagtcctgtacagtagcgtagaacacagtcctgtacagtagcgtagaacaca

SEQ ID NO: 7088 - DNA, 120 bp, synthetic construct
  source 1..120: mol_type = other DNA
atcttgaaaaataaggagtgaacttgggtccataatcttccatctctttttcccctttgagctctattaagaggcagagggcatgcatactaacctttccttacttgctttcttttcctt

SEQ ID NO: 7089 - DNA, 120 bp, synthetic construct
  source 1..120: mol_type = other DNA
tttcctgtgagtgactgtgtctactgaagccccgctgtataagatttggcaactgtgtgtttacctttattttgttaagactgttaacagttacatcatactatatatatttaagtcttc

SEQ ID NO: 7090 - DNA, 120 bp, synthetic construct
  source 1..120: mol_type = other DNA
taaatgctagaagttggttaagccaggacttaaacccagcttgtagctttataagctgggttttgaacctcagttttctagttagtaaagtgatcatgagaataacgacctcaaaggata

SEQ ID NO: 7091 - DNA, 120 bp, synthetic construct; identical to SEQ ID NO: 128
  source 1..120: mol_type = other DNA

SEQ ID NO: 7092 - DNA, 120 bp, synthetic construct
  source 1..120: mol_type = other DNA
cccgaaaactttactgattgcctgtctattgacctgaagccttactgataacataaacagtcaagtaacaaatattttgtatgttatatgtattatatactatgttaagttagagaaaac

SEQ ID NO: 7093 - DNA, 120 bp, synthetic construct
  source 1..120: mol_type = other DNA
acctggctagtttttgtatttttttgtagagatgggattttggggtttgggttttcatcatgttgcccaggctggtattgaactcctgagctcaagtgatccacctgcctcggcttccct

SEQ ID NO: 7094 - DNA, 120 bp, synthetic construct
  source 1..120: mol_type = other DNA
agtttgcaataacaactgatgtaagtattgctcttctgcagtctttattagcattgtttaaacgtacctttttttaaaaaaaaaaaaataggtcattgcttcttgctgatcttgacaaag

SEQ ID NO: 7095 - DNA, 120 bp, synthetic construct
  source 1..120: mol_type = other DNA
ctgattaggtttccatgagccaagtcttagatattccatgaatcataaccttttagtcagtgtaacacagggatttcaactttttgttaagaaatgactcaacatggtggaggcttatgc

SEQ ID NO: 7096 - DNA, 120 bp, synthetic construct
  source 1..120: mol_type = other DNA
gttctgattgagtaatggctatggaaatttcccctaatatatttagaaaagctgttctctcatgcagtggatataatataccatggtatctaatttttctttctgatgaaggaagcaact

SEQ ID NO: 7097 - DNA, 120 bp, synthetic construct
  source 1..120: mol_type = other DNA
ttcaccacctccaagctgctctgggttataggtctgcagtgttctgtaaaaaaaaaattctaatcctgtcagcctctccctctccatgtcaatgattttattcatgggatggcacatata

SEQ ID NO: 7098 - DNA, 120 bp, synthetic construct
  source 1..120: mol_type = other DNA
aatagacaaaaaggtaaaaactgaaagagagaaaaccgttttgaaaacatgtagctagccaggtttcctgagtggacgttggctgacaggaggtggaactggaagcttaagtgctcattc

SEQ ID NO: 7099 - DNA, 120 bp, synthetic construct
  source 1..120: mol_type = other DNA
tgaatgtcatctgtatgttgcaaagggaaaagggtgagaactaatctaactacaactgacaacacaatttggagttcttggaccagaatgccattctgagtcagatatatgtcatataca

SEQ ID NO: 7100 - DNA, 120 bp, synthetic construct
  source 1..120: mol_type = other DNA
ttgtggttttagttttccttacaaacagatatgaccagaaggcaattggaatatgaagcaaggcaaatcagagttgcgatggaagaacaactaggtacctgccaggatatggaaaaacga

SEQ ID NO: 7101 - DNA, 120 bp, synthetic construct
  source 1..120: mol_type = other DNA
ttgccaggctggtcttgaactgctgacctcaagtgatccaccggcctcagcctcccaaagtgctaggatttagagtcatcatgcccagtgtattagtttgttttcaggcttctgataaat

SEQ ID NO: 7102 - DNA, 120 bp, synthetic construct
  source 1..120: mol_type = other DNA
agtaaaactttaaacctttcagtagaaaatatacataagtatgtttctgatattagagtaggaaagtatttcttaagaaagacttaaaacgctaatgataaaagaccaataagtttactg

SEQ ID NO: 7103 - DNA, 120 bp, synthetic construct
  source 1..120: mol_type = other DNA
ggctgaggaggatcccttgagcccaggagttcaaggctgcagtgagctacaatctcaccactgcactcaaaaaaaaaaaaaaaaaaagagaaagaaaggaaagaaaagaaaagaaagaaa

SEQ ID NO: 7104 - DNA, 120 bp, synthetic construct
  source 1..120: mol_type = other DNA
aagtgaaacaagaacggccctggaagaggagatctcaggagggtctgaggctatgagaaaaaatatgggatctcatttgcaaggggaaggagtaaataagaattccaaataaaataagaa

SEQ ID NO: 7105 - DNA, 120 bp, synthetic construct
  source 1..120: mol_type = other DNA
taccatttgttaaaatctattgtgaagatgttgtaataatcacagtatgataatagcacaggaataaatttaggcaaatgatagagactagaaagaggtacaggaatatttacaaccttt

SEQ ID NO: 7106 - DNA, 120 bp, synthetic construct
  source 1..120: mol_type = other DNA
tcacctagtatggtggtacttacccttccataggcatgtaagcaaaggttggaaaagtgcacatcagtttgttaatagagcttactactgggatgtgggaattggtggggtgaaggtgta

SEQ ID NO: 7107 - DNA, 120 bp, synthetic construct
  source 1..120: mol_type = other DNA
cttgctcattccctactgttaaatgtcttgttttcatttgtttgagagatgttttaatatcctcttgataccaatcctttgtagataatatacatctcaattcctccccaccaaatctgt

SEQ ID NO: 7108 - DNA, 120 bp, synthetic construct
  source 1..120: mol_type = other DNA
aattcagataaaagcttcatgggcttttgattagaattacattaaatttatagattaaggagaagtcagaccttcataatatttagtcttggttgaaaggatggactctggaaccagacc

SEQ ID NO: 7109 - DNA, 120 bp, synthetic construct
  source 1..120: mol_type = other DNA
atccacctcactggacatcaagacatagacatgacctcagtatttagtgagatactggcaatatggaaatgtagtgtaaaacggagaggagtgggagatataatttcctattttcatcct

SEQ ID NO: 7110 - DNA, 120 bp, synthetic construct
  source 1..120: mol_type = other DNA
cgtgcccggcagcgaacacaacttgagttttctgttctttgtttatcataagactggatgatagcagtaaacatttttactatggtagtaagaaaagcatgaaggcattgtatttaagta

SEQ ID NO: 7111 - DNA, 120 bp, synthetic construct
  source 1..120: mol_type = other DNA
ggagaaaaaataatgtttagccacagttaggtacttggaaaggctgaaaaatactactaacttatgacagaagtaactttggggaagagttgggcctactgtttaaaccaggggtcccca

SEQ ID NO: 7112 - DNA, 120 bp, synthetic construct
  source 1..120: mol_type = other DNA
aaaaaagaaaagaaaaattgaactgaccccaatttgttattaaagggtgaatatatttatatgtctagctttttaaatgagaatgatttgacataaccctgagcttttaagtggtagcca

SEQ ID NO: 7113 - DNA, 120 bp, synthetic construct
  source 1..120: mol_type = other DNA
tacacatttacctgtgtttactccagaaaccccattaaagtgatagtaaaaggatacaatgaaagaggcattaagaccagggaaggtgaccacagtaaaatccgtggagctggaaagcag

SEQ ID NO: 7114 - DNA, 120 bp, synthetic construct
  source 1..120: mol_type = other DNA
taagagacgtggaactaagtctcttaaaaaaaaaaaaaaggtaggatgatctagctgggttgttttgttggtgaatcctgccatgtaagtaagtctctttaaaaagtttctgtcacccag

SEQ ID NO: 7115 - DNA, 120 bp, synthetic construct
  source 1..120: mol_type = other DNA
cttaggattaacagttttattataaggatacagatcaagaatggccaaatgaagagacatatggggcaaggcctaaggaaggggtgtaggaatggggatgggggtgcagagatttcatgc

SEQ ID NO: 7116 - DNA, 120 bp, synthetic construct
  source 1..120: mol_type = other DNA
aaaatgaattttttcaactcaagacccaggggatataatacaagagaaagagatgagtgaaactacagagtaaagatgaagggacatcctgagataaatggtaaagaaagcaaccagtcc

SEQ ID NO: 7117 - DNA, 120 bp, synthetic construct
  source 1..120: mol_type = other DNA
ataagtcaaatatttgcaatttaaagaatgtgttcatttttgcaatggactctttttttacctggcccttggaaagggccaggaaaaaaagcagtatttttttgctccttttcagttctg

SEQ ID NO: 7118 - DNA, 120 bp, synthetic construct
  source 1..120: mol_type = other DNA
ctttggctacctgtattataactctggtttaaggtctagatgctggacgtgatttaagtctactaattattacacatgattcaaaactcagaagttacataaaggtatgtgaggcaacca

SEQ ID NO: 7119 - DNA, 120 bp, synthetic construct
  source 1..120: mol_type = other DNA
tatcacctagagtagaaaaccttggagaagttgtaaagcaactatggaaatgaggaaactagttagaattaatctttcataatagtgaacaaccacttcttttgtcttcagtgtatcgaa

SEQ ID NO: 7120 - DNA, 120 bp, synthetic construct
  source 1..120: mol_type = other DNA
tactcaacatattcaaaacataattaatgatctgttcctcctaagccctctttactaccccaccttgcagcaaaaaaccttcatcctccctcagtattacctatctctgtgaggagtagc

SEQ ID NO: 7121 - DNA, 120 bp, synthetic construct
  source 1..120: mol_type = other DNA
ggtcagtaattttctttaaatatgttgacatcttcacttacgttagtgtcaaatctttgtggtcttagattcattttgtctctaggttgactttatgtatgtatatctattcttgtggat

SEQ ID NO: 7122 - DNA, 120 bp, synthetic construct
  source 1..120: mol_type = other DNA
taccgagatagtcgaccgccaatcgtactggaggttatgaagtgtaatacacagttccatgcctttatcagtctgtataattgatgcattcagagctttaaagcaaaaaaagaaaaaaag

SEQ ID NO: 7123 - DNA, 120 bp, synthetic construct
  source 1..120: mol_type = other DNA
atttaaatttattttactgagttaaaacaaacatacttcattcagtattactagttagcattatattggaaaacaagtggtaaattaggacaaaggcaatcatgtttaaacagcacattt

SEQ ID NO: 7124 - DNA, 120 bp, synthetic construct
  source 1..120: mol_type = other DNA
tgacatgaaacaggctttctggagagcaattttgtcaaatgcatctagcattatttataatgtgcctgttgtgaagctcatcactacaacatctaagattttttgctaatgagataatca

SEQ ID NO: 7125 - DNA, 120 bp, synthetic construct
  source 1..120: mol_type = other DNA
taggtaattataactttttttttggagacagagtctcgctctgtcagcaggctggagtgcaatggtgggatctcagctcactataacctccacctcctaggttcaagcaattctgcctca

SEQ ID NO: 7126 - DNA, 120 bp, synthetic construct
  source 1..120: mol_type = other DNA
gtatagggatggcagaggaaaagatctattgaaaatagtaaatcagggcccggtattcattcctcctttaagtgatgaactctgatagtgctgtgaattcagaggtaaacataagtatgt

SEQ ID NO: 7127 - DNA, 120 bp, synthetic construct
  source 1..120: mol_type = other DNA
cagcctgtgcacatctatacctgttccatgtagtgtttgtttcatcccattttgctcagttaacaccagttcatgtgtgtctgagcttaagcaccagtttctcagagaggctcgaacaga

SEQ ID NO: 7128 - DNA, 120 bp, synthetic construct
  source 1..120: mol_type = other DNA
cagtttgacagtttactgtggtaattgtattttagggagttctgggtttttgtaatttgttatttggggaatttaagaaattagtttttccagtaccctttattctttttatacgttaca

SEQ ID NO: 7129 - DNA, 120 bp, synthetic construct
  source 1..120: mol_type = other DNA
aacagtaattgtttaatagcatcatttatccagtcagtattcaaacttgcagttgtttcataaatgtctttttcacagtttatttgcctcagggtccagataaggtccatgaataggaat

SEQ ID NO: 7130 - DNA, 120 bp, synthetic construct
  source 1..120: mol_type = other DNA
acccaagagtttgagaccagtctcagcaacataaggagaccctgtctctacaaaaaatacaaaaaaaaaaaaaaattaggcgtggtggcatgtgcctgaggtcccagctacttgggaggt

SEQ ID NO: 7131 - DNA, 120 bp, synthetic construct
  source 1..120: mol_type = other DNA
tgagagaaaatttatttctgtttttaagatagaaaagatgaggatgtttgaatgctgatgggaaggagccagtagagaagagagttgaagatccctaagatcaaagagaaatggagagag

SEQ ID NO: 7132 - DNA, 120 bp, synthetic construct
  source 1..120: mol_type = other DNA
ttgcaatgtttccagacaaatggggtggaataagtgcagggcaaagctgttaaaagctagcaagagaattatgaaagtgataaccacaagaaatccaacctgaaatacatgctggatttg

SEQ ID NO: 7133 - DNA, 120 bp, synthetic construct
  source 1..120: mol_type = other DNA
cccccaaaacttaacagcattagtagacatttatatttgcttctatggatcagaaatcctggtgcagctgagctgcctgtctctggttcagggtctcccacaagacttaagggtattggc

SEQ ID NO: 7134 - DNA, 120 bp, synthetic construct
  source 1..120: mol_type = other DNA
tattagttagaaccagagtaagctccttatgttcagatttatttgtagttctgcctccccttcctctccacacacacacaaacacaactataccatattcttctgacccttgcttatgcc

SEQ ID NO: 7135 - DNA, 120 bp, synthetic construct
  source 1..120: mol_type = other DNA
ttaacagttttctatgttgtctaccaaagtggaagttatctggcaaacagtttacgttgctagctaacagggaagaaaagtttctaatacgtcaccatagctgggctcattggctcgtgc

SEQ ID NO: 7136 - DNA, 120 bp, synthetic construct
  source 1..120: mol_type = other DNA
attaatgaatggatttagctgtggcctatattttgataggtcccagttatttatctgcaaccccacctcctgtccagagttgcatcctttgttttcaggtgcccattggggattcttact

SEQ ID NO: 7137 - DNA, 120 bp, synthetic construct
  source 1..120: mol_type = other DNA
taaacagccctttctaaactgtgagatcttagagaacttggactgtagcaaattcatacttagttttctggcaatttggagcatttcagaatttgaacattccttcaatgcttttcatca

SEQ ID NO: 7138 - DNA, 120 bp, synthetic construct
  source 1..120: mol_type = other DNA
tctgattcccaaggtcctcttacctccccatgtgatccatctgcctcatttgaatcactaacaatttgcatgaacctgtcttttggaaatcaagaaatgtttttttacttatcttttgct

SEQ ID NO: 7139 - DNA, 120 bp, synthetic construct
  source 1..120: mol_type = other DNA
attttaatattcactaagatgaaatgaaattctaatattactaaacgatgtattttcgattaactcgaattccattaattgttttcacagcatactctgtatactctttctttactgtaa

SEQ ID NO: 7140 - DNA, 120 bp, synthetic construct; identical to SEQ ID NO: 173
  source 1..120: mol_type = other DNA

SEQ ID NO: 7141 - DNA, 120 bp, synthetic construct
  source 1..120: mol_type = other DNA
ccgttgtttttcactgattatagtcagtggattagcaccaacttatctaggcaaacagcactaacagtttgttagtgagtatgcaaaaacctacttttgcttttaatactgtatattacc

SEQ ID NO: 7142 - DNA, 120 bp, synthetic construct
  source 1..120: mol_type = other DNA
agggaaggtattatcatctccattttacagatgaaaaaactgaggctcagaagagctaaaggacttaaccatggcctcacacctagtaagtggtagacccaggaacagagcccagatctc

SEQ ID NO: 7143 - DNA, 120 bp, synthetic construct
  source 1..120: mol_type = other DNA
aaaaagcataagaaaaaagggattgcctttcatatctatttgtcctggggtgaggggaactagtaagattttactgggagaacattgccttcctggattgtttctttggctatccacagt

SEQ ID NO: 7144 - DNA, 120 bp, synthetic construct
  source 1..120: mol_type = other DNA
ggtcaattgagcccaggaatacaaggctgcggtgaaagctatgatcattccactcgagcctgggcaacagagcaagaccctgttttgttttttttttgttgtttttttaaagaaagaaag

SEQ ID NO: 7145 - DNA, 120 bp, synthetic construct
  source 1..120: mol_type = other DNA
tgaaatgtggagctgctgtattgtgattgaactcagtcacttttgatgagcatcagagggaattattattaagattgtcatttatcttcatggttattggtactttacaggattttcatc

SEQ ID NO: 7146 - DNA, 120 bp, synthetic construct
  source 1..120: mol_type = other DNA
caatggattgtagactaggactgagacattaatcatctggatttcaaaataaaacctagactcagtatttgttcctcttccttcttcaggtaggaaggctacccggggcatttcatcaca

SEQ ID NO: 7147 - DNA, 120 bp, synthetic construct
  source 1..120: mol_type = other DNA
aaattaaggattctgttgaatgtcacctgagtctgttggtgctctactatcggtagttttaccctattgggcaatagtccggtctatttagaccactgttttctaacaggcaccaagaaa

SEQ ID NO: 7148 - DNA, 120 bp, synthetic construct
  source 1..120: mol_type = other DNA
atgtcatcactcttctcttcatccccagtccaagccaccatcgtctctcctgttctacaatactttgtcttacttctcttcccatttccactcatagtcgattttgttcactgaaaccat

SEQ ID NO: 7149 - DNA, 120 bp, synthetic construct
  source 1..120: mol_type = other DNA
cagatcacttattaaaaatattaacgtactggctgtcttgcagatgaatgacctaattagacttgtagtatccaagaattgcctgtttatattcatctttttctttctgagtcccgtgat

SEQ ID NO: 7150 - DNA, 120 bp, synthetic construct
  source 1..120: mol_type = other DNA
tttaaattagggggactacaggccattgcagaattattgcaagtggactgtgaaatgtatgggcttactaatgaccactacagtattacactaagacgatatgctggaatggctttgaca

SEQ ID NO: 7151 - DNA, 120 bp, synthetic construct; identical to SEQ ID NO: 183
  source 1..120: mol_type = other DNA

SEQ ID NO: 7152 - DNA, 120 bp, synthetic construct
  source 1..120: mol_type = other DNA
tttatgtataaattaatctaaaattgattaatttgcaggttattgcgagtgttttgaggaatttgtcttggcgagcagatgtaaatagtaaaaagacgttgcgagaagttggaagtgtga

SEQ ID NO: 7153 - DNA, 120 bp, synthetic construct
  source 1..120: mol_type = other DNA
aaattgtctccagatactgtcagatgtctgtgggagggaggaaggacaacgtcaccaccaattaagaatcactggtataagtgtacctttgtgctctccaaacctcaatcccctcaaatt

SEQ ID NO: 7154 - DNA, 120 bp, synthetic construct
  source 1..120: mol_type = other DNA
tccacttctaagtatttacccaagaggagcaaaagtgctgacacgaagacttacacacaaacatccacaataatttatgatagtcaaaaactagaaataactatgtctgtcagcaggtga

SEQ ID NO: 7155 - DNA, 120 bp, synthetic construct
  source 1..120: mol_type = other DNA
cttactctagagctttcctttaccagcactctgtactccgttcacttaaagctgttggtcccttactcttgtcttctacatattctctactggatccttcttttttatgtttcagttctc

SEQ ID NO: 7156 - DNA, 120 bp, synthetic construct
  source 1..120: mol_type = other DNA
gaaggacaaaggcacttcttgcataaaagcactctatctgcctcctaccacttatgtgacaaattatgtctaaacctgctcctagattgttttgttcacttaatttcttgatgaagagag

SEQ ID NO: 7157 - DNA, 120 bp, synthetic construct
  source 1..120: mol_type = other DNA
tcaccatgttgatcaggatggtctcgatctcctgacctcgtgatccgtgcaccttggcccctcaaagtgctgggattacaggcatgagccattgcgcctggccgcctggctactttttat

SEQ ID NO: 7158 - DNA, 120 bp, synthetic construct
  source 1..120: mol_type = other DNA
cggccacatgccgggccttaatccacttcctgttcacttttttttttcttttttcaagcaaccccagcctgagaataacccacattctattctgaaaatgttttcttttcataatgcaca

SEQ ID NO: 7159 - DNA, 120 bp, synthetic construct
  source 1..120: mol_type = other DNA
gcttgatagctacaaatgaggaccacaggtatatatagagttttatattacttttaaagtacagaattcatactctcaaaaagacctaattgtaagcaatgttttatataatcatgaaag

SEQ ID NO: 7160 - DNA, 120 bp, synthetic construct
  source 1..120: mol_type = other DNA
tggttgttttttatagcttattcattttttaagtctgtgatgcagaaactacaagcctagtctccctttctgctatacagagaagatttcttaagtccagtaactactggactgctaaga

SEQ ID NO: 7161 - DNA, 120 bp, synthetic construct
  source 1..120: mol_type = other DNA
ggatggcagtatcacaaaatcaagccagagatacagagattactctaaaaagtaagtgttctaatctaagagcttataatgtgcactgactgcagaaaaatcttcaatcaattctatcta

SEQ ID NO: 7162 - DNA, 120 bp, synthetic construct
  source 1..120: mol_type = other DNA
cttcatcaagaggaagcttagatagttctcgttctgaaaaagatagaagtttggagagagaacgcggaattggtctaggcaactaccatccagcaacagaaaatccaggaacttcttcaa

SEQ ID NO: 7163 - DNA, 120 bp, synthetic construct
  source 1..120: mol_type = other DNA
agttgaactctggaaggcaaagtccttcacagaatgaaagatgggcaagacccaaacacataatagaagatgaaataaaacaaagtgagcaaagacaatcaaggaatcaaagtacaactt

SEQ ID NO: 7164 - DNA, 120 bp, synthetic construct
  source 1..120: mol_type = other DNA
gaagtaaaacacctccaccacctcctcaaacagctcaaaccaagcgagaagtacctaaaaataaagcacctactgctgaaaagagagagagtggacctaagcaagctgcagtaaatgctg

SEQ ID NO: 7165 - DNA, 120 bp, synthetic construct
  source 1..120: mol_type = other DNA
tataaacttttccacagctacatctctaagtgatctaacaatcgaatcccctccaaatgagttagctgctggagaaggagttagaggaggggcacagtcaggtgaatttgaaaaacgaga

SEQ ID NO: 7166 - DNA, 120 bp, synthetic construct
  source 1..120: mol_type = other DNA
aagatgacctgttgcaggaatgtataagctccgcaatgccaaaaaagaaaaagccttcaagactcaagggtgataatgaaaaacatagtcccagaaatatgggtggcatattaggtgaag

SEQ ID NO: 7167 - DNA, 120 bp, synthetic construct
  source 1..120: mol_type = other DNA
caactaagtcctcaggttctggaaaaatgtcatatacatctccaggtagacagatgagccaacagaaccttaccaaacaaacaggtttatccaagaatgccagtagtattccaagaagtg

SEQ ID NO: 7168 - DNA, 120 bp, synthetic construct
  source 1..120: mol_type = other DNA
gaggactgtcccattaacaatcctagatctggaagatctcccacaggtaatactcccccggtgattgacagtgtttcagaaaaggcaaatccaaacattaaagattcaaaagataatcag

SEQ ID NO: 7169 - DNA, 120 bp, synthetic construct
  source 1..120: mol_type = other DNA
aaatgtttttgtccttgtgagtccatctaacatcataattaatcatgtggctgtgaaattcacagtaatatggttcccgatgaacaagtttacccagcctgctttgctttactgcatgaa

SEQ ID NO: 7170 - DNA, 120 bp, synthetic construct
  source 1..120: mol_type = other DNA
acagtgtaaactgtcttgccccttcatcttcttgttgcaactgggtctgacatgaacactttttatcaccctgtatgttagggcaagatctcagcagtgaagtataatcagcactttgcc

SEQ ID NO: 7171 - DNA, 120 bp, synthetic construct
  source 1..120: mol_type = other DNA
caccactttgtaaacacttcaatttactatctttgaaatgattgacctttaaatttttgccaaatgttatctgaaattgtctatgaataccatctacttctgttgttttcccaggcttcc

SEQ ID NO: 7172 - DNA, 120 bp, synthetic construct
  source 1..120: mol_type = other DNA
ttaattatttcctgagcagtggcagaaagctctgcaatcttctctttcccttttccatctggatcggtaaggatgctaagatattcctgaatatttctgtgcagaaattgctcaacttga

SEQ ID NO: 7173 - DNA, 120 bp, synthetic construct
  source 1..120: mol_type = other DNA
ttcagaaaatcaatgagtgagtcaatcagatgcttgactttcatatggaattcttgagtaactcgtaccaagccatcaaacacgttatccttgagtccctggaaactggcttggccttcc

SEQ ID NO: 7174 - DNA, 120 bp, synthetic construct
  source 1..120: mol_type = other DNA
cctctctgaaaaatataccctgcctatggctgagcttgcctatgatttagatgatgaggtataaccctcatcttcctggatttgcccagaattaataaataatagtgctgatgggatgtc

SEQ ID NO: 7175 - DNA, 120 bp, synthetic construct
  source 1..120: mol_type = other DNA
cccaaaactgtataggagagattttgtattttattagattcataacagtaggacgttgatgttttcattgtgaaaactgggagaattctatcctaaccagatatttcacttgtgtttaaa

SEQ ID NO: 7176 - DNA, 120 bp, synthetic construct
  source 1..120: mol_type = other DNA
cttctaaggatcctgcaatgtcaaggtgtgccttttcttggtcattggaaagctcgacctggctctggaaagacccagaatgaatccggacttcatttttccatctgatcttctggttct

SEQ ID NO: 7177 - DNA, 120 bp, synthetic construct
  source 1..120: mol_type = other DNA
ttgccactgacacttccatatttttcgtggttaagctcacagtactgttatgactaccctccacaaatttgttgctcagagacagagctgtggctaacttcaatcccctttttcttgtca

SEQ ID NO: 7178 - DNA, 120 bp, synthetic construct
  source 1..120: mol_type = other DNA
gtggaggagttgtgattattgtgtaaggtagacgcatttcaggaattgttaaaggaatgtttaagaaatccagatttgcttctccatttattcctacatgggcctccataatgttctcgt

SEQ ID NO: 7179 - DNA, 120 bp, synthetic construct
  source 1..120: mol_type = other DNA
actccttcagagccagcggattaatcttagggtttgagagttgtgcatttgcttgaaaatcaaaattgagaacttctaatttggactctcctttggcagtgatggaagctgcgatacctg

SEQ ID NO: 7180 - DNA, 120 bp, synthetic construct
  source 1..120: mol_type = other DNA
cgtgtatcttctagggtctctcggaatttggccttcatgtgagccaaagatgctgaacttaaagcctcctgtaaccaattgatgattaaggttattttggtgtcctgtaggctttccaga

SEQ ID NO: 7181 - DNA, 120 bp, synthetic construct
  source 1..120: mol_type = other DNA
tctctcccaattgaatgaattcagataatcattagcttgctgtgggagttttcccagggctgctctgtattttcttacaaattgatcaatattgatgtgcttcaggtttctctgtacgtt

SEQ ID NO: 7182 - DNA, 120 bp, synthetic construct
  source 1..120: mol_type = other DNA
ttgactgaccttgaagttgaaaatgtttttgctgtcgacacccagaatcatggcctgataagcacttcccagtgatagctctgtgagggcggctttcccatccagactgaattttgcatt

SEQ ID NO: 7183 - DNA, 120 bp, synthetic construct
  source 1..120: mol_type = other DNA
tctgacaagacaggccatatgtgcctttagcatagaacgaagagactctgaactgcccatcaatcttgacttctttgacaaacaaatgctgtttctttttggagtccaaatgaactgaag

SEQ ID NO: 7184 - DNA, 120 bp, synthetic construct
  source 1..120: mol_type = other DNA
caaaaggcaaaggaatctcaattttcaaactgttcttgttcaaggtatatttgacccggccatcgctgaaatgaacaacaaagataacatccccacagtcagacatcagtcattcaaagt

SEQ ID NO: 7185 - DNA, 120 bp, synthetic construct
  source 1..120: mol_type = other DNA
tgtaaaatctttcatttactttgcatggttcaagaagccttgctgctttcttcttttacctttttaagaagaggttttctgggatgtggaagtctggcaatcccatgttctggaggttga

SEQ ID NO: 7186 - DNA, 120 bp, synthetic construct
  source 1..120: mol_type = other DNA
aaaccttcctgcacctagctcagagttgaggatgtaattagcacttatatccatgtatttattgactggcagactcatacttacaactattaatttggaacccacgtgccggaaagtcat

SEQ ID NO: 7187 - DNA, 120 bp, synthetic construct
  source 1..120: mol_type = other DNA
acctcgcagtttattgtgaggaccgagataatttctttaaagcacccagcactgtgcttgatacatgaatagtaagtgcctgataaatggtaggaaaatccaactggacatgcgcagagg

SEQ ID NO: 7188 - DNA, 120 bp, synthetic construct
  source 1..120: mol_type = other DNA
agaggaaaaggtagagaaactccaaggaatcaatgtgcttaaacaaaaacacagttcaggattttactgaattttttttttctcattaaaattttttaatgggtctcatttactgataat

SEQ ID NO: 7189 - DNA, 120 bp, synthetic construct
  source 1..120: mol_type = other DNA
aatccataggctggtccattttatatccttcgtaaaacaatgtttaccaaacactatttccccagcgtgccctgctcctccagtgctttctatcatgggattttcttcctagtttaattc

SEQ ID NO: 7190 - DNA, 120 bp, synthetic construct
  source 1..120: mol_type = other DNA
cttattgggtactcagttaacccaggtcttagaataggcctgccgcttagtgggtactcagttaacctatttgttaaataggttaaattacatgtcttctcctcatgaattctgaacctg

SEQ ID NO: 7191 - DNA, 120 bp, synthetic construct
  source 1..120: mol_type = other DNA
ggtgacacccaatgtgttggccagaggaccctgctttaaatacccaaagatggtgcaaacccagaaggctagtgacagggtcttacaacacagagtattttttcctgtgccatgctaggt

SEQ ID NO: 7192 - DNA, 120 bp, synthetic construct
  source 1..120: mol_type = other DNA
gaaagttcaacattggcctggttttttctaaggatgctttctttgaaatagcacattttcctccaagtattgtttctccaagttgggggtgccacaagaccaagctttgctgatgtgctg

SEQ ID NO: 7193 - DNA, 120 bp, synthetic construct
  source 1..120: mol_type = other DNA
cttgaaccatattcctttaccttcaggccattacatgcttttccttttgcctggaacactcactcctttctcctttgcctaaatgactctgacacagtcctcagttatcaggtcaagtac

SEQ ID NO: 7194 - DNA, 120 bp, synthetic construct
  source 1..120: mol_type = other DNA
aatatgaaaactaaggcaaatcaatggttgagggtgccacttaaaatggaactctccaaaagaggctgtattccattatcacgaggttaggagtttcatgctttacctacctagctacct

SEQ ID NO: 7195 - DNA, 120 bp, synthetic construct
  source 1..120: mol_type = other DNA
atgcaccctggaagaaagtaataacctaagaaatcaaaaggcaaacagaatcttacgttggctacttccagttttactccagccttggctccgggagcaatgactccagatgaagatatt

SEQ ID NO: 7196 - DNA, 120 bp, synthetic construct
  source 1..120: mol_type = other DNA
tggaggatcacttgaggtcaggagttcgaaaccagcctgacatggttgtcaacaggcttgtctctactaaagatacacaaattagccgggcatgctggtgcacgtccacagtcccagcta

SEQ ID NO: 7197 - DNA, 120 bp, synthetic construct
  source 1..120: mol_type = other DNA
taattcctctaagcagagattaaagaactaaggtcttgtcagggatagtggcactcctaaagctattcttaattaaaaaatctgtagacatagtaagatgtggtgggatgagaggagggg

SEQ ID NO: 7198 - DNA, 120 bp, synthetic construct
  source 1..120: mol_type = other DNA
ggatacagacagaaacagatacacataatatcaaccaacttccccaagtgcgcacagcttcaagacagggaagttagaattaaatctatgcccagagttcatactttttttttttttaag

SEQ ID NO: 7199 - DNA, 120 bp, synthetic construct
  source 1..120: mol_type = other DNA
tgcttttttctagaagaggcagctaaggttcagataggacaaataattcaacaaaggattcagagttgggagtgatttgagatttgaagcagatctgactaggcagcacatatgcttcct

SEQ ID NO: 7200 - DNA, 120 bp, synthetic construct
  source 1..120: mol_type = other DNA
agttcaagatattggcaatatgggaagccacaaagttcttcacttgctcattctgttcccatggtagaatttggacaattttgttaatatctgcctgtgaaggactcctcatcaacataa

SEQ ID NO: 7201 - DNA, 120 bp, synthetic construct
  source 1..120: mol_type = other DNA
aggtggacggtaggaagcaaaaacatctcacgttctgcatgttgacatagcagcaaagtcaagtatttctctcacgtcacatactgctaggcagtcaagtcaataggcttgttgaaattt

SEQ ID NO: 7202 - DNA, 120 bp, synthetic construct
  source 1..120: mol_type = other DNA
gtccctgtagggtttgtcttatgatagctacagaataagagaagagagtcaggacttggtaaccccagttaggtttgtcttaaaacccaaacttgtgaattagaaaaaataattataaaa

SEQ ID NO: 7203 - DNA, 120 bp, synthetic construct
  source 1..120: mol_type = other DNA
ataacagttgttggtgaggatacagagaaaaggaaacagttaatcactgttgatgggattgtaaataagtacaaccactatggaaaacaatacagagatttctcaaagaactaaaaatag

SEQ ID NO: 7204 - DNA, 120 bp, synthetic construct
  source 1..120: mol_type = other DNA
ctgctaactaatattgaactgaagttaataatatgcaagctgtaatacttaggggaaagtgtgttgatgtttgcaatttactttgaaatgcttcagaaaataagatgaattaatggatgg

SEQ ID NO: 7205 - DNA, 120 bp, synthetic construct
  source 1..120: mol_type = other DNA
ttcatagcacttaaagccagtgccttgaagggtagagaaatcatattatatttttcgtctgagttctctctccaccagcctataagcttctggagagcacctgcaatagacctaggaatt

SEQ ID NO: 7206 - DNA, 120 bp, synthetic construct
  source 1..120: mol_type = other DNA
ccacctactgtgacctatgccaggaagagaggtaaaagtcatcatggaaatgtggtgtaatgagaatagtcctggcttagattacaacctggcacttattttcccccctctaatattctg

SEQ ID NO: 7207 - DNA, 120 bp, synthetic construct
  source 1..120: mol_type = other DNA
gtcacgctagttatcctcccatcaaaaagacatgcgtgccttatactctccactagtctggagtggccagaggtaggaactagtgcaatgtctcaaaattctttcgtatcttccacaaca

SEQ ID NO: 7208 - DNA, 120 bp, synthetic construct
  source 1..120: mol_type = other DNA
gtatcttctgttaaaagcatttaccttcaaggtagaagggagcaggagtcctgtaccactagataaactcagagaaagaagataactgggtacttgacatttagaccagggggtgcaaca

SEQ ID NO: 7209 - DNA, 120 bp, synthetic construct
  source 1..120: mol_type = other DNA
tggagctggcacaaggagtccttgtgcagaaaagaacagaaggtggttttgctgccctacatccatccccggaaccttctcagaggtgagtagtcattactctcaagtgatgagattaga

SEQ ID NO: 7210 - DNA, 120 bp, synthetic construct
  source 1..120: mol_type = other DNA
agtgatctgctttgtatatggtaggactggtctctaacacatgaagatgagtttcaagggccactgctatcagctttctaaatcctcaccagaaacaacacttgcttggcttcttctgtc

SEQ ID NO: 7211 - DNA, 120 bp, synthetic construct
  source 1..120: mol_type = other DNA
tccagctgtgttttaactttttttgcttggctcatccagccctgctctgttctccacccatatcagtctctttgcccatcctccccatacggacacccgagtggttgttccatttgtttc

SEQ ID NO: 7212 - DNA, 120 bp, synthetic construct
  source 1..120: mol_type = other DNA
ttaagtcttggagaaaataaagcataggaaagaaagaagcctcacagcctattttggcaagaaaggactggcatctgaatctaatgtttagcaaaactgaaaaatgggcaaggatggtga

SEQ ID NO: 7213 - DNA, 120 bp, synthetic construct
  source 1..120: mol_type = other DNA
gccagtgcctctgggaccccacaccaaagaccaccaagcactagtcttgactagttctttaaataagaattcacttgtttaaacaaagcatctcagttttataatctcaagaagtttaaa

SEQ ID NO: 7214 - DNA, 120 bp, synthetic construct
  source 1..120: mol_type = other DNA
gctggagtttcaacggattcctacttattatccagcactattcaaataactttatagaaatgttgtacatgtgtgctgttcaatatgggagccagtagccagggtggctgttgagcagtt

SEQ ID NO: 7215 - DNA, 120 bp, synthetic construct
  source 1..120: mol_type = other DNA
cacagggaagggagtgacaagtgtcaagtaatggggctcagaaaatctgcatgagagaccctctggcaaattaagagatgacaacattacgcaaatagtactatctctaatgctttttta

SEQ ID NO: 7216 - DNA, 120 bp, synthetic construct
  source 1..120: mol_type = other DNA
ggtcagagcaaggcacaccacgatgccatctcagccctgtagagtgggaggccctcagggacccgggtgtaggagagtgcacggggctgggcgcccttccacgccccatgcgcagatgcc

SEQ ID NO: 7217 - DNA, 120 bp, synthetic construct
  source 1..120: mol_type = other DNA
gcctggacaatggtgtttacgtgcctgcccaaggtgagtttgaaaatgaagaaaatagagcagtttgattcctcctagctccacaatactttccaataccaaatcagcttcctcacacat

SEQ ID NO: 7218 - DNA, 120 bp, synthetic construct
  source 1..120: mol_type = other DNA
acaaaaaaaagaaaaagaaagaatctatcttctaaagaaatgggatcccttcctaaggtggtatcaccctcacttttcacaatgggacatgcacacaacatgaaatttctgtacccaggc

SEQ ID NO: 7219 - DNA, 120 bp, synthetic construct
  source 1..120: mol_type = other DNA
cagtgcctcacagaagccctcgtgaagacaagacggcactggcctctgaccacgcatctcactcacaggcagatttttagaggaatgacaggaactttattctaatattgcatgaaatgt

SEQ ID NO: 7220 - DNA, 120 bp, synthetic construct
  source 1..120: mol_type = other DNA
ttaatccaactctactagtttgctcccaaagggttctgtcaatcacaaccaacttcagagtctaaaactgaacccgttctgctgctctgagagccactgccaggtaaacagatgctccct

SEQ ID NO: 7221 - DNA, 120 bp, synthetic construct
  source 1..120: mol_type = other DNA
cctaaatactccaagcagaggtctgtgaggagggtgactcgcctctcaccttctacagtccagccaaggactagagtccaagacaaagcccatgctgacggtcccgtgaggccaagaggc

SEQ ID NO: 7222 - DNA, 120 bp, synthetic construct
  source 1..120: mol_type = other DNA
atgggcagcagtgaattgcctgctcatggtgctgataagttacatgcatgcacaccaggctccatgtgggctgccactgcagcatttgtcccaggtgaatgaatgggaaatgagaggcaa

SEQ ID NO: 7223 - DNA, 120 bp, synthetic construct
  source 1..120: mol_type = other DNA
gtcactgccacctccaactcctgggctcaataaatccttctgccccagcctctgtactcccagatgggactaaggtgtacgctaccacgcccagctaactttaaaattttttgtagagat

SEQ ID NO: 7224 - DNA, 120 bp, synthetic construct
  source 1..120: mol_type = other DNA
ctgctgcaatgggtatcccaaccaggttataaatcagtgccaggaccaggttgatgcgtatccttcggacagtcctcttggaaaggtgaatgctagccaccacatccagcaaatcattct

SEQ ID NO: 7225 - DNA, 120 bp, synthetic construct
  source 1..120: mol_type = other DNA
caggggtactgctgcttccctcaaggaacacaattaagctttcagaagcctagagctctgcacacatttggaggtgcataatttctaggaatccaaactggagccgctgctgtgtgagaa

SEQ ID NO: 7226 - DNA, 120 bp, synthetic construct
  source 1..120: mol_type = other DNA
ggagcgaaccagccagcatcagcagctacacaagttggggcaccccgcaccaagataccacacttgcaatgttctcatcatataatattatgtgcaaaaaacaaaacatcaaattatata

SEQ ID NO: 7227 - DNA, 120 bp, synthetic construct
  source 1..120: mol_type = other DNA
cagtctttttttttttttttttttttttttttttgagacagagttacgctcttgttgcccaggctggagggcagtggtgtgatcttggctcaccacaacctccaactcccgggttcaagc

SEQ ID NO: 7228 - DNA, 120 bp, synthetic construct
  source 1..120: mol_type = other DNA
cagcacagagaaggtctgggggactgcatctattcaaaagaggctgtggttatttctaaatggtccaatttcactgtgaactaaaaaccatgcaatccttttaacagcaaaatatccttt

SEQ ID NO: 7229 - DNA, 120 bp, synthetic construct
  source 1..120: mol_type = other DNA
accagaattctaccatacagaatggaaacaggaagaacgaaagtggaattcccgtctgtctactctgtagcttatgagaagcaagaccgatatgggataagaaagaggagaatcaaaatc

SEQ ID NO: 7230 - DNA, 120 bp, synthetic construct
  source 1..120: mol_type = other DNA
cattaaaaacaatggaataagtagtgttaacaaagctctttgagactatcaagagataactgcctgtatatcagaccctggaggaggaggggacaaggtggcagggtaaaggaatggctg

SEQ ID NO: 7231 - DNA, 120 bp, synthetic construct
  source 1..120: mol_type = other DNA
aaagttgtcagggcaatattctgtgtgacgcgttctgctgcccctatattcagactgaaattaagagaaaacaaaatagaacctttcctgtggagagaccaaaagaaggcaatgcttctc

SEQ ID NO: 7232 - DNA, 120 bp, synthetic construct
  source 1..120: mol_type = other DNA
actgggaatagagtcctcacactctgagttcaagaaaggaaaggactattctatggccataatgacaaacaaacccccagagccagttttaagttggtcacacttagtcaatggcagtct

SEQ ID NO: 7233 - DNA, 120 bp, synthetic construct
  source 1..120: mol_type = other DNA
ttgtccagctctcactcaacagtaaggtctcagatgaacgttcgtattcgcttccctgaccacctgcagcacccttgtccctgagtcgagcaccccaagtctaggattggcccctgttca

SEQ ID NO: 7234 - DNA, 120 bp, synthetic construct
  source 1..120: mol_type = other DNA
gaacacgttactgctctccacatcccagctatccaacttcatcctacaggtttccctcaaagaggcattacaggagcagagtcaaataaaagcccttgataggggaaagcagactctgga

SEQ ID NO: 7235 - DNA, 120 bp, synthetic construct
  source 1..120: mol_type = other DNA
gcacagttgtctaaggtaaggctatggaccacagcctctttagcttccatctacattttattatttcactctgaaaggcaggattctaaaataatgtattattaaaggggtcttttaatt

SEQ ID NO: 7236 - DNA, 120 bp, synthetic construct
  source 1..120: mol_type = other DNA
agaaaaaaattatccattctgtatttgtactttttgctacgttgcccaggttggagtgcagtggctattcacaggcacgatcatagcacactacagcctcaaactcctggactcaaatga

SEQ ID NO: 7237 - DNA, 120 bp, synthetic construct
  source 1..120: mol_type = other DNA
tgcttcaagcattacaactgagcaccaattggtgtctgtgaaaattatctaagtagaatgtaaaggagatctttaatagaaacctgcagaaggagagtgactgtttatcctactctggct

SEQ ID NO: 7238 - DNA, 120 bp, synthetic construct
  source 1..120: mol_type = other DNA
taatttctaaaacgagaaagatgaagttagttttaaaaatttcttcattacctttgacatctgagcctcttccaccagtttcacaatctgagccaaagtggtgtcattgcccacgtgggt

SEQ ID NO: 7239 - DNA, 120 bp, synthetic construct
  source 1..120: mol_type = other DNA
gatggaagtaacctggactacagagagagggagaagaaatacacagcatattcttagatcatgtgttaacaagatgtgaaaatgcactgaatatgagggtaaagaaaggaatcaaagatg

SEQ ID NO: 7240 - DNA, 120 bp, synthetic construct
  source 1..120: mol_type = other DNA
agcgaaagtcacgtttttaaagaaggcttttgtgaaggaacagaaaaacagagcagtagaagggagggtggattaaagtggggattgtgtcttgtacatacatgtgaactgtgtgctagt

SEQ ID NO: 7241 - DNA, 120 bp, synthetic construct
  source 1..120: mol_type = other DNA
attcaaggcttgtgtggctacttcctgtgattacgtgagatgcttagtatggcacctgtacacagtaagtgcccaatgaatgctggtgatttttattatcacctaattgacattttcata

SEQ ID NO: 7242 - DNA, 120 bp, synthetic construct
  source 1..120: mol_type = other DNA
tttaatatcaagcacacacatgcatgtgtgcagtatgtttctttaacatctgacagcagtttcattccaccagtgagtatctcagcacccgccatgtttacatcccagggtggctgaggc

SEQ ID NO: 7243 - DNA, 120 bp, synthetic construct
  source 1..120: mol_type = other DNA
ttggggaaaaagtgggggaaggtgaagaagaatacagacaggccgagtctgagcctttaccagtcaaccaagaaaaacactccaaccagcaggtagtctctgggatctagacgtaggttt

SEQ ID NO: 7244 - DNA, 120 bp, synthetic construct
  source 1..120: mol_type = other DNA
ggcgagttggaggaaacatgagtcaaaaccaacacagctgccagcggcttggctccctgtctgaacgttttcacttctcagaaactttcatgcaattaatttataagagaagaaaaaaaa

SEQ ID NO: 7245 - DNA, 120 bp, synthetic construct
  source 1..120: mol_type = other DNA
cacttctccttccagtagtccaaagcgagaccacaggctaatagaaaatgtggtgggaccagggagagattttaggaatatgaaggagggctgaaataaccattgcctagaatataaaaa

SEQ ID NO: 7246 - DNA, 120 bp, synthetic construct
  source 1..120: mol_type = other DNA
gatgcacagtgcctgtgccactaaagtccgggaattacatttcagactggaaacaaacatcagtcttcccactgaccattttcttttaggttcaatctaatttcttttagggcctgagtt

SEQ ID NO: 7247 - DNA, 120 bp, synthetic construct
  source 1..120: mol_type = other DNA
tgatgggcgtttatgaaatatactttcccattcagaggactactgtccacaggaatggatgaccaagagcatgtgagacctttaaaacccagtgcttacaacacaaatgtcctctaataa

SEQ ID NO: 7248 - DNA, 120 bp, synthetic construct
  source 1..120: mol_type = other DNA
atagcccctaaacattccaatattaggacagggatttagttttatattccaaaatatacacatagagggcacacttcccaccagacacacagctagttccttaatatcaccaccaaagca

SEQ ID NO: 7249 - DNA, 120 bp, synthetic construct
  source 1..120: mol_type = other DNA
acagaccaccaggggttaaaatgaaagtaagaactctctctctctgacactggccatctgagggagcatctagaggtctaaacatcactataaggaggttccaaagatgttgaggcccag

SEQ ID NO: 7250 - DNA, 120 bp, synthetic construct
  source 1..120: mol_type = other DNA
atctcaggtctcccgcgcctgggccattttctttccactcagccattatgcctgccttcaaattctagttctagaacccatgcaaataaagtctgaaaacattgtcaaaggaaaaaaaat

SEQ ID NO: 7251 - DNA, 120 bp, synthetic construct
  source 1..120: mol_type = other DNA
aatttaaactcagcatttttgagtgaaggaatcccagatacctaatggtcagaaatcttcattccatgtatgaggaaacagaaggtcggagaggataaataccttgcccaaagccccacc

SEQ ID NO: 7252 - DNA, 120 bp, synthetic construct
  source 1..120: mol_type = other DNA
tcagaaatggtgactaagttgtgttcaaaagcaccacatgggactctccttgctgttgactgcatcagtctgatgtctgagcctcatcaatgccatatcactactgttctttaagatttg

SEQ ID NO: 7253 - DNA, 120 bp, synthetic construct
  source 1..120: mol_type = other DNA
ccaggccacataacagacagcatctctctttaaacacacacacacacacacacacacacacacaatgaagaggaaattcaggatactacattaagcctgctataagaggcttcatttcat

SEQ ID NO: 7254 - DNA, 120 bp, synthetic construct
  source 1..120: mol_type = other DNA
aaaaaggtgactacaattttttaatgaattacttacctcaataattttgataatatcccgtggaccgataatttccgggtcaaacttaacaagggctttgctggtggcaagggcaacgga

SEQ ID NO: 7255 - DNA, 120 bp, synthetic construct
  source 1..120: mol_type = other DNA
aaaaaatgggactgcaaggaccaccaggaaaacttaggagcttatctgttggcaggtgactgccaacagaattttaaaaatcaagtatccaaatatttcaatggtacttctctgctctcc

SEQ ID NO: 7256 - DNA, 120 bp, synthetic construct
  source 1..120: mol_type = other DNA
acagacacagcatgctgccatgccgacgtagaccctgctctgcacgccagcccgcccgcacccaccatggccacagttcagcagctggaaggaagatggcgcctgctggacagcaaaggc

SEQ ID NO: 7257 - DNA, 120 bp, synthetic construct
  source 1..120: mol_type = other DNA
ctgtacaaaaagtacagaagtgctttcaaacatagcatgttctaggcatcagacacatccattgttttcaataatgtgttggcacgtagacagatgggaaataatacctccccacccaaa

SEQ ID NO: 7258 - DNA, 120 bp, synthetic construct
  source 1..120: mol_type = other DNA
aaccgaacaaagaaacacatcttcccagaatcctctagaacagcagttttcaaacactgtttgaaaatgaggctgcacatgaggcttgcttggaaagccttcgacaatcacgatgtctgg

SEQ ID NO: 7259 - DNA, 120 bp, synthetic construct
  source 1..120: mol_type = other DNA
tcactcaggctttagaagacaccaatgaaataaggaatgtggtctgcagttattgactgctgttaccggaaggatatccttttttttttttctccttttctccagatactttcatacaag

SEQ ID NO: 7260 - DNA, 120 bp, synthetic construct
  source 1..120: mol_type = other DNA
gaatacgaggtctatacgcagcattcctaagttcaacatgggcgttcatctcttaccagcttctttctgcagattcctttctatgttagacacacaggatgcacaggtcatgcctttgat

SEQ ID NO: 7261 - DNA, 120 bp, synthetic construct
  source 1..120: mol_type = other DNA
ctggccgcaaggctgtcctcaaggagctcctaatcaatcaagaagggctcttcaaatacaaactggcacactaatggtttattccaaattaaagttgccaggtaaaatacaggacatcca

SEQ ID NO: 7262 - DNA, 120 bp, synthetic construct
  source 1..120: mol_type = other DNA
cttcagcatttctctcaaccatctccactcacctatcatcctctttatccctaatctaagctactagtggtctccacccttaccagcagccaagctgggctcccaccttcccagggtcct

SEQ ID NO: 7263 - DNA, 120 bp, synthetic construct
  source 1..120: mol_type = other DNA
tggatggtcccacagtgctctatttcaggatacagaatcagaattctctccagaaaagaagcccaaatccaaggaggttcgcattcaagtcagccatggtttgactgtgtcccccaaatt

SEQ ID NO: 7264 - DNA, 120 bp, synthetic construct
  source 1..120: mol_type = other DNA
cctcaaacacactacgtaccagaaacgactgaagcctcaaatcccatgtcttctatagcagctctgagttcttctgggctaattacagagggattataaagaactgttgcagtcccttcg

SEQ ID NO: 7265 - DNA, 120 bp, synthetic construct
  source 1..120: mol_type = other DNA
tgatggcaaacctgttgcaggcacacaaccgatggcacatatttcacagtggcactgccttgttccagggaaaccttcatgctgatgatgcctttcaaattggaaatcctgtcctcaatg

SEQ ID NO: 7266 - DNA, 120 bp, synthetic construct
  source 1..120: mol_type = other DNA
ctgtgactcagtgtcaccgccctcctgggtgttcaggagagctgtagtcattacctgaaatttcaggtacatcacttaattaaagaacctgttttcttaacacaacacagtacaagtgtt

SEQ ID NO: 7267 - DNA, 120 bp, synthetic construct
  source 1..120: mol_type = other DNA
ttgctctgggtgagtcggtgaatgagtgttgagtagatgtgaagacttaggacactgcactactgtcgattttataaacactgtaaacttaggctacactaaatttataaaaaatagttt

SEQ ID NO: 7268 - DNA, 120 bp, synthetic construct
  source 1..120: mol_type = other DNA
gtaatatcatgggaccagtgtcatatgtgcagtccatcattgactaaagcatcatgactgtatagtaaggatgacatggtataacaatattaacagacaaatgactagccacctcggaca

SEQ ID NO: 7269 - DNA, 120 bp, synthetic construct
  source 1..120: mol_type = other DNA
catgtgtttgttatctgttgctacatgacaaaccaactttagtacattactagcaacagctcacaatttttcaattcggacagggcttggcagggaaagcttgtctcttctccacatagc

SEQ ID NO: 7270 - DNA, 120 bp, synthetic construct
  source 1..120: mol_type = other DNA
gcagtagtactgaaagcaatttcttattatcaaacactactcagaggcccccctttctagacaggcaggtttttaaggccaagcagttacagaagacaaagccttgcaaataacatatct

SEQ ID NO: 7271 - DNA, 120 bp, synthetic construct
  source 1..120: mol_type = other DNA
aaccttaaataggataccagtcagtcccctgctgcctatcctcaagaattctttcactttgaaggatgtataacacccataacaacttatgaggcaaacatgttatacatgaaggcaact

SEQ ID NO: 7272 - DNA, 120 bp, synthetic construct
  source 1..120: mol_type = other DNA
gccagtgggggttggtctctaaaacccccactgaggaagaatcaatgtcccatattaacctctatgaacattaagtatacagggggataaacgtaaatatcagtagagaaaattcaggtt

SEQ ID NO: 7273 - DNA, 120 bp, synthetic construct
  source 1..120: mol_type = other DNA
ctaatgggccctaaaagactaacatcagcttgtggcaagatggccgaataggaacagctccagtctgcagctcccagcgagatcaacgcagaaggagggtgatttctgcatttccagctg

SEQ ID NO: 7274 - DNA, 120 bp, synthetic construct
  source 1..120: mol_type = other DNA
gctctgctaagggtcagactgcctcctcaagtgggtccgtgacccctgtgtctcctgaccaggagacaccccccagcaggggccaaaagataccccatacaagagagtctggctggcatc

SEQ ID NO: 7275 - DNA, 120 bp, synthetic construct
  source 1..120: mol_type = other DNA
agggaacaaaactggatggagaatgcgtttaacaaattgacagaagtaggttttagaaggtgggtaataaaaaaactccaccgagctaaagtagcatgttctaacccaaggcaaggaagc

SEQ ID NO: 7276 - DNA, 120 bp, synthetic construct
  source 1..120: mol_type = other DNA
atggaaagcaaaaaaaagtcggggttggaatcctagtctctgataaaacagactttaaaccaaaaagatcaaaagagacaaagaagggccttacataatggtaaagggatcaatgcaaca

SEQ ID NO: 7277 - DNA, 120 bp, synthetic construct
  source 1..120: mol_type = other DNA
aagctggaaagctctaaaatcaacaccctaacaccacaattaaaagaactagagcagcaagcgcaaagaaattcaaacgctagcagaagacaagaaataactaagatcaaaacagaactg

SEQ ID NO: 7278 - DNA, 120 bp, synthetic construct
  source 1..120: mol_type = other DNA
ggcaaaccgaatccagcagcacatcaaaaagcttatccaccatgatcaagtcggcttcatccctaggatgcagcaaggctggttcaacacatgcatatcaataaacgaaatccatcacat

SEQ ID NO: 7279 - DNA, 120 bp, synthetic construct
  source 1..120: mol_type = other DNA
accccttccttacaccttacacaaaaattaactcaagatggattaaaacttaaacgtaagacctaaaaccataaaaaccctagaagaaaacataggcagtaccattcaggacacagaaat

SEQ ID NO: 7280 - DNA, 120 bp, synthetic construct
  source 1..120: mol_type = other DNA
tcatacatgtttgaaaacaaatgactatgaagacaaacatcacctcatttgatcttcaaacatgacccaggaaggttcgagtactctacatagttttctccattttactgataaggcaaa

SEQ ID NO: 7281 - DNA, 120 bp, synthetic construct
  source 1..120: mol_type = other DNA
gatgatacagtaaacaagagtataaggaaaaacagttcttaaccactgtttgtagaaagctaaattttgcctaattgctcttcaaaaagtattactgcttttgtcctagaaattccactt

SEQ ID NO: 7282 - DNA, 120 bp, synthetic construct
  source 1..120: mol_type = other DNA
accaccacttacctaagaacaaaattccatattctggtctctaaaaatgctaagtccaccacgtaacaaccttatagtcaccatcagttcaatgtgtctaacatcaatcctccctgctgc

SEQ ID NO: 7283 - DNA, 120 bp, synthetic construct
  source 1..120: mol_type = other DNA
agcgggcggaaatgtgccctccagactctgagcttttaccagttatgccttttaaaacagatctttttcccctctctgcctgtctgaaacatagaagaatcaaagaaacaggttttccaa

SEQ ID NO: 7284 - DNA, 120 bp, synthetic construct
  source 1..120: mol_type = other DNA
accagctactgcaaatttcttctatttaaggataactaaattctttctaaaaattaatcctaaatttaaaagtggaactgcaataaaaaatgattatataggccaggcagggtggttcac

SEQ ID NO: 7285 - DNA, 120 bp, synthetic construct
  source 1..120: mol_type = other DNA
tggcagaagtaacactattttgcatttgcatgataatctacaaagtgctttcacaatcatatgaggcaggatttatcatccactttgcaatgaagaatctaaaggagagtgtccaagact

SEQ ID NO: 7286 - DNA, 120 bp, synthetic construct
  source 1..120: mol_type = other DNA
ctgtgtagaagctacccaaacgggcagccactgaataattctacatttcatatttttaaatttgcctaggaaaaaactttaaaggagtctcttggaaatttccacaaattcagaacacca

SEQ ID NO: 7287 - DNA, 120 bp, synthetic construct
  source 1..120: mol_type = other DNA
agttcacggccacggcttccctcctcactaaagcagttcaccttcagcagactatttggttgtgttagagagaaatgctttagaagtgtcctcctaattagcaaggggaagacacccttc

SEQ ID NO: 7288 - DNA, 120 bp, synthetic construct
  source 1..120: mol_type = other DNA
acctcctgctgcaagtgagtgtggaattgaattcagggtaaaatgatcactctgtctctccgtgttattcttcacagcagaatgtaccagcagggggtcactaaggtgtgcacccagtga

SEQ ID NO: 7289 - DNA, 120 bp, synthetic construct
  source 1..120: mol_type = other DNA
catatgtcccacatgcttttaaataatctattctgttagctccatgaaattgaaatacttcaccattcaaaccatttctagatggtggctcagacccagaagacagccagaaaagggggc

SEQ ID NO: 7290 - DNA, 120 bp, synthetic construct
  source 1..120: mol_type = other DNA
ctatgggcatgtgctcactttgggaaacgtggtcagatcctggaacacaaggatctcatatcttagctgcccacagacctaacatggtgatgaacaatatcagacattaaataagtatat

SEQ ID NO: 7291 - DNA, 120 bp, synthetic construct
  source 1..120: mol_type = other DNA
aacagaagaccaggagaggagcacaagacacatactgcccttggaagtttactggcaagttaggagagaagaacagtagcaaagagcagtattcaaagtctgaattcctcaaacactagg

SEQ ID NO: 7292 - DNA, 120 bp, synthetic construct
  source 1..120: mol_type = other DNA
cttcccaccaacagctcctactcagagtctttcaccagagcctccaagtccccaaacctccaagtgctgcagtggcccccagctcagcccttggacctcttccatctctactcattcctt

SEQ ID NO: 7293 - DNA, 120 bp, synthetic construct
  source 1..120: mol_type = other DNA
gttgcagcgatctgtgattggaccactgcactctaccctgggtgacagtgtgagattctgtctcaaaaataataattaaaatgaatttaaaattaaaaagtaaaaaagaatcatcttctt

SEQ ID NO: 7294 - DNA, 120 bp, synthetic construct
  source 1..120: mol_type = other DNA
acgtcaacttctcaatgatttcccccaaatgatcccatctaaatttcatacactcccaattccctatcatccttccctgtcttatttttcttgagaattctcaatcaccaccaaatgcaa

SEQ ID NO: 7295 - DNA, 120 bp, synthetic construct
  source 1..120: mol_type = other DNA
ggaggggaagggagcaagcctcatgcaaaagctggctccctcctccctcacttactcattcatttatcccttcaagccagggatctaagctcaaatacaggcatctctcagagatatcca

SEQ ID NO: 7296 - DNA, 120 bp, synthetic construct
  source 1..120: mol_type = other DNA
ctgttgtcaaaaggcctggtgtcaccagagcttccgagagaaggtggatagctggagttttacatagtaaaatcttcccattttaagatgttgaaaactggccaaagttctagccaatgg

SEQ ID NO: 7297 - DNA, 120 bp, synthetic construct
  source 1..120: mol_type = other DNA
ttataactaggcctttctactttaaccaatcaattattctctttgttttgcttccctgaacacttacaaagtctttccctcattccccctagatggagccctgaactatgtagtctggca

SEQ ID NO: 7298 - DNA, 120 bp, synthetic construct
  source 1..120: mol_type = other DNA
gaagattcaggttctgtctacagctctgttcttctaagccctcaccaaaataatccttaatgcttagtttatcactatctaggctttttccagcatgtacctccaaactcttccagcctc

SEQ ID NO: 7299 - DNA, 120 bp, synthetic construct
  source 1..120: mol_type = other DNA
gagtttggatagcctagtttctctactgagaagacaattccataaagaataagggtagaagacccaacttacagttctttttcaggcttttcagccacctttggtctggatggggacgat

SEQ ID NO: 7300 - DNA, 120 bp, synthetic construct
  source 1..120: mol_type = other DNA
ccatctgtaaagcaatgatgaactctgatctcctgttctatcactcccactccttccctctgccacagccactctggctttcctattgttccccaaactctaacatcatgtcttctgtac

SEQ ID NO: 7301 - DNA, 120 bp, synthetic construct
  source 1..120: mol_type = other DNA
aaaatttaaagaaagctctattctgccggcatcactgattagatcattgtccactggtgattggcacaatctccagaggttggagcacggggctgaacattcgaatcccctaatcacatg

SEQ ID NO: 7302 - DNA, 120 bp, synthetic construct
  source 1..120: mol_type = other DNA
tcccgagtagctggttcgacaggcacacaccattatgcccagctaatttttcttttttttttgtataaacgatgtcttgatatgctgccaggctggtcttgaactcctggacccaaactg

SEQ ID NO: 7303 - DNA, 120 bp, synthetic construct
  source 1..120: mol_type = other DNA
tttcttcatactcctatcaaatgcatagtcatcataccctacaaaccacctactaaccagcctctctctgtctgtccactaatccgttagttttcatttctgtatcaccggagcctagat

SEQ ID NO: 7304 - DNA, 120 bp, synthetic construct
  source 1..120: mol_type = other DNA
acaattaaaatgaatttaaaacagttataaaagttccaggacctcgatataccatatctggtccaagcaccaggctctgagtaacttctccaggtaactaacttcatcgttttgagccat

SEQ ID NO: 7305 - DNA, 120 bp, synthetic construct
  source 1..120: mol_type = other DNA
ccgcggcaagagtgaactccgcacctggaaaatcgatccgctgtgcgcaaaggccagccaatggcctccaacgggcggcgggctttgggccgggaacgggggcgcaggcgcccaggcggg

SEQ ID NO: 7306 - DNA, 120 bp, synthetic construct
  source 1..120: mol_type = other DNA
gcatccaaccccgggccgcggccaacttctctggactggaccagaagtttctagccggccagttgctacctccctttatctcctccttcccctctggcagcgaggaggctatttccagac

SEQ ID NO: 7307 - DNA, 120 bp, synthetic construct
  source 1..120: mol_type = other DNA
tcgagggggacactcgcaagcttggatggtggttttggggggaattttaccgctcaagttctccaacttggttgaggggtatcttggctactgtcccatgttaggcacccaatgactctg

SEQ ID NO: 7308 - DNA, 120 bp, synthetic construct
  source 1..120: mol_type = other DNA
ttcaatatgaacgtatcctagtatgatttgtaaaataaaaaacagggtgtgcttctccccagcagtttctagagatctagactagagatctgagactgtcttacagttggccattgcctt

SEQ ID NO: 7309 - DNA, 120 bp, synthetic construct
  source 1..120: mol_type = other DNA
gaagatctcttatgttaggcttctttattttctgaaacccagagagttcaggtgtgactttgaaggtcatccagctagtaccaacaacagggagagaactagtgtcaggaaagtcctaat

SEQ ID NO: 7310 - DNA, 120 bp, synthetic construct
  source 1..120: mol_type = other DNA
gtaagaaaatggaaagaaaagactagacctttgtattttatttcgtcttctactgccgtcttgcagttgatcttccgccttctcctgaagtagttaggacaactccctgttttcacagag

SEQ ID NO: 7311 - DNA, 120 bp, synthetic construct
  source 1..120: mol_type = other DNA
ccagagccttttctttttgtcttgcccatctggcagaatctcaccataatcatttaacagattatactcaggcactgtgacagggagatagaaacatcctttcagataacactggaaatg

SEQ ID NO: 7312 - DNA, 120 bp, synthetic construct
  source 1..120: mol_type = other DNA
ttaagttttgctgttttaatattgctcttaaatgtttaagagagcttacagaagaaactgaagacaaaggccttgcttattaggatctttgagaccctctggcactggcgaacacgagtg

SEQ ID NO: 7313 - DNA, 120 bp, synthetic construct
  source 1..120: mol_type = other DNA
agttaatcagaaatgttggcctgtttcttgaacctgggtctggatttaggagatgggcccgactctttactcactcctttaccccatctgaaattcactgagtgcccacagtgtgcgagt

SEQ ID NO: 7314 - DNA, 120 bp, synthetic construct
  source 1..120: mol_type = other DNA
aatgaatgaataaatgaatggatggtttaaaaattcatacagtgggaggatgggaaggccccttcatgtgcagaagaaaagccagccccttcgctggcccaccctttcagggtcagttca

SEQ ID NO: 7315 - DNA, 120 bp, synthetic construct
  source 1..120: mol_type = other DNA
tgctctgtggagtagaagtgtgtttgtggataggtgtgtggcctctccacacagcagactgtcctggctgtccgtgggcctttcagctctcagagaggcctggggtcttgtttcttagaa

SEQ ID NO: 7316 - DNA, 120 bp, synthetic construct
  source 1..120: mol_type = other DNA
tcagatagtttccatctgtgatttgtgactttggcttgattaaagcaggtggctccgctcttttttttttcccctgaagaagaggtaggtaggttctaacatgccctgaagctaacttca

SEQ ID NO: 7317 - DNA, 120 bp, synthetic construct
  source 1..120: mol_type = other DNA
tccagtctgggcaataagagtgaatcttcgtctcaaaaacaaaaacaaaaattagctgggcgtggtggcaggtgcctgtaatcccagctactcgggaggctgaggcatgagaattgcttg

SEQ ID NO: 7318 - DNA, 120 bp, synthetic construct
  source 1..120: mol_type = other DNA
atagagtatgtggttggcacacacctcttgtcttaccaggagtctttggacaaagcctaactcctcaggtgtcctgtaagtggaatgtggacttagtttattattcagaattttccccaa

SEQ ID NO: 7319 - DNA, 120 bp, synthetic construct
  source 1..120: mol_type = other DNA
tgtggagcccactttttaaagagcactgtacctggccaggcgtggtggctcacgcctgtaatctcagcactttgggaggccgagatgggcagatcacgaggtcaggagatcgagaccatc

SEQ ID NO: 7320 - DNA, 120 bp, synthetic construct
  source 1..120: mol_type = other DNA
ggcagttctgatatgatttgagtgtagttaggagtagtcgtttttagatttctgtgacattaacttttccttgtttgggggcttgtatagctgttgagagcttgaagggactttggaaat

SEQ ID NO: 7321 - DNA, 120 bp, synthetic construct
  source 1..120: mol_type = other DNA
tgaatcaggaaggggcacatagtaagccttatctgagagatgctggtgtaaccaagaggcattatctggatgtgcttgaacttgaaaacacttagtagactgaagagacatgttttagtc

SEQ ID NO: 7322 - DNA, 120 bp, synthetic construct
  source 1..120: mol_type = other DNA
gttgtgaccctaatgatagtggatgggaacattagaatgtggcatcagcattcctggcatagacctcattacgggtgggagtttcatttttcattggaattattcattcatgtagaagtg

SEQ ID NO: 7323 - DNA, 120 bp, synthetic construct
  source 1..120: mol_type = other DNA
acagccatacacccatttaccactgcccagaaaaagagaatattcccatcacctcagaaagctctttcgagacccttcccagccactaccatctcctccagaagtgaccaccattctggt

SEQ ID NO: 7324 - DNA, 120 bp, synthetic construct
  source 1..120: mol_type = other DNA
agtgtgcagatggttgaggcttttgtgcgtggctgggaagaaacaatgagcccctgggcagccagcaaaaatgacactgcaggactaatgcaggctccgatttcggctggaaggaggagg

SEQ ID NO: 7325 - DNA, 120 bp, synthetic construct
  source 1..120: mol_type = other DNA
tgtcccctgcaagctcatagattgttagcctttggcgtttgttcgccgtgcagacagctgccttcgtcaggaaagatcactccccttcttaagagttgccttacacagatatatgcaaat

SEQ ID NO: 7326 - DNA, 120 bp, synthetic construct
  source 1..120: mol_type = other DNA
tgtcttaccagtttggagaattgggacctttcctttgcttaacagatacttttggctttctcctgatgcccctaattcctaaactgttggccaaatagcaacctctatggggtggggggt

SEQ ID NO: 7327 - DNA, 120 bp, synthetic construct
  source 1..120: mol_type = other DNA
ccttattcacactgggctttctattcagaagcacagagatagctgtgcattattttgttcagttcaatgcttatggataaatcttaaccgcttgtggagctatgttgacaggaaaatgag

SEQ ID NO: 7328 - DNA, 120 bp, synthetic construct
  source 1..120: mol_type = other DNA
agacatcttcacaaatttaggctaacaaagcacttagaagaggaaatgctctcaatttcgaggtgaatagaaggtggcccagcagggaaaggtgcttgacctgccttgggccacacggga

SEQ ID NO: 7329 - DNA, 120 bp, synthetic construct
  source 1..120: mol_type = other DNA
agtcttaaccgcacattttgaaaattgaaaattacagataggaggtcttacaatatggattgccctgaggaggtgcacagcagaaggcgtggtcaggatgccaagccaggggagtcattt

SEQ ID NO: 7330 - DNA, 120 bp, synthetic construct
  source 1..120: mol_type = other DNA
ttcaacatgtcattattcggggcatttcagaagtgttcattttatctcttcagcttagggctgagcctgaccacagggcccatgtcttaacccccctcctccctttgtaatcaggtacca

SEQ ID NO: 7331 - DNA, 120 bp, synthetic construct
  source 1..120: mol_type = other DNA
acattattatccagtacatttttgaatcttttttatagcagtttgcccccacttccaggatgtcttccaggactgaaacaaggatcatgagcaccgcatttagatgcaacttctcttcag

SEQ ID NO: 7332 - DNA, 120 bp, synthetic construct
  source 1..120: mol_type = other DNA
acactccagcctgggtgacagagcgaggctccgtctcaaaaacaaaaacaaaaacaaaaagcgtcaagatatttttgctttgagcatagctcattaaaaaatatatggcttactaggcgt

SEQ ID NO: 7333 - DNA, 120 bp, synthetic construct
  source 1..120: mol_type = other DNA
ttagctattttcatttttgaaaattttattgggtttcttttcattgccattaagaataccatctacagagaaattcagtgagaggtaatagacaaatagcctggggtgatcaatggaagc

SEQ ID NO: 7334 - DNA, 120 bp, synthetic construct
  source 1..120: mol_type = other DNA
gctgaaagtggaagccatcctggagaaggtacaggggctggagcaggctgtagacaactttgaaggcaagaagactgacaaaaagtacctgatgatcgaagagtatttgaccaaagagct

SEQ ID NO: 7335 - DNA, 120 bp, synthetic construct
  source 1..120: mol_type = other DNA
atgttgccattttaatgagatgattttcttcatctcataattaaaatacctgactttagagagagtaaaatgtgccaggagccataggaatatctgtatgttggatgactttaatgctac

SEQ ID NO: 7336 - DNA, 120 bp, synthetic construct
  source 1..120: mol_type = other DNA
gccccctcccctcctggcaagagtcggcggcggtggcggcggccgctgcagagattggaatccgcctgccgggcttggcgaaggagaagggaggaggcaggagcgaggagggaggagggc

SEQ ID NO: 7337 - DNA, 120 bp, synthetic construct
  source 1..120: mol_type = other DNA
ttctgctggattgcctggacccttttttctctttccagactcctagtggaaagatttggcaaggaaaaaaaaatgagcttgcgtcagggaagaaaaataatatgctgtgtgttagggtct

SEQ ID NO: 7338 - DNA, 120 bp, synthetic construct
  source 1..120: mol_type = other DNA
gttcttgtttaatttttcctccattttccgtggagcccactttaaactttttctactttcttcacttctccccaccctttacagaagaggttgaggcacttagcaggagctccttcatta

SEQ ID NO: 7339 - DNA, 120 bp, synthetic construct; identical to SEQ ID NO: 375
  source 1..120: mol_type = other DNA

SEQ ID NO: 7340 - DNA, 120 bp, synthetic construct
  source 1..120: mol_type = other DNA
tatgaattttaatgtttcacatttttttcaggaatttattttcaaatctagtgttatttggctttcacgtagttctccccccaccaccccgcgactccacccccaccccctaactctaaa

SEQ ID NO: 7341 - DNA, 120 bp, synthetic construct
  source 1..120: mol_type = other DNA
ttgacttgcattgagttatgtccattgtaagatacacagtagtgttacagaccacttaaaatatgcttctagttgtaagaagccattgattgtaaggtgcaccccaattccggagatgct

SEQ ID NO: 7342 - DNA, 120 bp, synthetic construct
  source 1..120: mol_type = other DNA
gcttggaaagcagggtagatgtgggtgacagatatgaaaaatgaggtgggagagctggtttgtagaagaaaatagtattggatcacatggagtttgagatatctgaaacagccaagtagg

SEQ ID NO: 7343 - DNA, 120 bp, synthetic construct
  source 1..120: mol_type = other DNA
ttgtagttatgttaagatctacaaaaaggaagtccagggaatgttacaagactgataagggaagctgggctgttcaggatgcgggtactttggaaggctttcctgagaaaggtagcccgc

SEQ ID NO: 7344 - DNA, 120 bp, synthetic construct
  source 1..120: mol_type = other DNA
ttggcagtccttgcaagtaccaaagggagtatggcttatgcctgcggtgcccttcccgtatcctgctttcttacctccttttttgagcattaatttttttttctttagcctttgggtaaa

SEQ ID NO: 7345 - DNA, 120 bp, synthetic construct
  source 1..120: mol_type = other DNA
aatatttttccctgttttcttatttgcttacaatagaaaatccagaatatcttggactggtctcctgctctggccaagtcagccttttctgctttgcttcctttcctactattttatcag

SEQ ID NO: 7346 - DNA, 120 bp, synthetic construct
  source 1..120: mol_type = other DNA
tcctatgaagccctcctcagtggtccaagcctcatagttggctctttgctgcatcattatttgaagataatcttttggtatattagatttctttactacaaaccttctcagaacttttaa

SEQ ID NO: 7347 - DNA, 120 bp, synthetic construct
  source 1..120: mol_type = other DNA
aaatgcatttactataagagaagccgtgcagattggatggaaagtgccaagccaccctgcaaaatcttcgtaaccattcatattccagccaacagtatttgaatatgttctctcctccca

SEQ ID NO: 7348 - DNA, 120 bp, synthetic construct
  source 1..120: mol_type = other DNA
ggcggaggcaggaggatcacttgagcctaggagctctagaccagcctgggcaatatgttgagactctgtctctacaaaaatttaaaaatcaatgagatgtggtggtatgcacttgtagtc

SEQ ID NO: 7349 - DNA, 120 bp, synthetic construct
  source 1..120: mol_type = other DNA
attaaagatgtgccccccacccccatgtgtttgttcctatcgtagtaatgctgattgttaatggatggcatagtaactttaattgtgttcacaggcctttgttcttaaaattatgcactc

SEQ ID NO: 7350 - DNA, 120 bp, synthetic construct
  source 1..120: mol_type = other DNA
aacactgtgcttgccactgtagtagcttaatgaatgttagtgaagatgagtatttctgagagaaataagcaggacagttctatcttaaaatgcaggtttgaatggcttcacatacagggt

SEQ ID NO: 7351 - DNA, 120 bp, synthetic construct
  source 1..120: mol_type = other DNA
gtaatgcagatgtaaccaggcaccagccttcttgccaggcaggctgtgctggacaggggagcaaaagtagttggaagagggtgagctgaggctgggcaaggtgatgcagacctataatcg

SEQ ID NO: 7352 - DNA, 120 bp, synthetic construct
  source 1..120: mol_type = other DNA
tgtttcttgtgtttgtaccgatttcagaccctttgttaagagccttaagttcccattaccttaagttcccattaaggcctttggacacattaagttcccattaagttcccaccaaggcct

SEQ ID NO: 7353 - DNA, 120 bp, synthetic construct
  source 1..120: mol_type = other DNA
ccacataccttctttaaaaattagtgcttttttttttctcatctctgagatgtatacatgtttaattggcgatggtcagagataggttttttttttttttttttttttgagacagagtct

SEQ ID NO: 7354 - DNA, 120 bp, synthetic construct
  source 1..120: mol_type = other DNA
gttgagtaaagctaagttcatcctgagcgtctgaacctggaatataaggaacttgaaatttgtaggggtgggggtatctgaatagaaatagaaagttctgaaaatttggctgtcttattc

SEQ ID NO: 7355 - DNA, 120 bp, synthetic construct
  source 1..120: mol_type = other DNA
aatctaaaacctctagcagaatgaagctagaaagaatggaatctaaacactgaaattatacatctgctaggcagctgtgcgttctttatttataggttctgttgtggaaatagcaaaaga

SEQ ID NO: 7356 - DNA, 120 bp, synthetic construct
  source 1..120: mol_type = other DNA
aagtatgcaaaagagaagatgctctttgaagctggccataaccctgctgcaagcaaaatcagacaaggatggaccagaaaaagagaacaatttctattctcacttatcgtgtatttgtaa

SEQ ID NO: 7357 - DNA, 120 bp, synthetic construct
  source 1..120: mol_type = other DNA
aaaattcattccccctgatgcccatctcaccctgctatagaaagtttcattttttggacagcatttcctgagagaatgtatcactgagttttctggagacctgaggtctaatccttagta

SEQ ID NO: 7358 - DNA, 120 bp, synthetic construct
  source 1..120: mol_type = other DNA
taaggttatgaacctcttgaattttgtgaggccatgggcttctgaataagaacttctgcagttgaaacttggttcacactggaggacactgattgttttttgtagtccactcaagcagtg

SEQ ID NO: 7359 - DNA, 120 bp, synthetic construct
  source 1..120: mol_type = other DNA
gaaacactgtgtctgcaaaaaaattaaaaagttatttgggcatggtggcatatgcccgtagttccagctacttgggaggctaaagtgggaggatcacttgagcctgatgaggtttaggtt

SEQ ID NO: 7360 - DNA, 120 bp, synthetic construct
  source 1..120: mol_type = other DNA
cccaaagtgctggattacagatgtgagccaccgtgcctgccctgccgctagtgtattttatgtgtggtccaagacaatttttcttcttccatcgtggcccagggaagccaaaagattgga

SEQ ID NO: 7361 - DNA, 120 bp, synthetic construct
  source 1..120: mol_type = other DNA
gtggttttgatttgcatttccctgatgattagtgctgttgagctttatttatttatttagacagaatcttgctctgttgcccaggctggaatgctgtggcctgatcactgtccactctaa

SEQ ID NO: 7362 - DNA, 120 bp, synthetic construct
  source 1..120: mol_type = other DNA
cactttctgtagctcgtctcttcatgatgttaatgggttcttttgctgtgcagtagctttttagtttaatataatcccatttgtttatttttgcttttgatgcctgtgtttttgaggttt

SEQ ID NO: 7363 - DNA, 120 bp, synthetic construct
  source 1..120: mol_type = other DNA
gtatattttcaggtgttgtattgtgatacctccaactttttgctcagggttgctttggttattcgggggcttttgtggttctgtacaaattttaggatttgtttttccgtgaagaatgtc

SEQ ID NO: 7364 - DNA, 120 bp, synthetic construct
  source 1..120: mol_type = other DNA
ccaaagtgctgggattacaggtgtgagccatcatgccaggtccaggatttctttagggctgaataatatccagttgtgtatatgtaccacatttgttgatccatttatctgttgagagac

SEQ ID NO: 7365 - DNA, 120 bp, synthetic construct
  source 1..120: mol_type = other DNA
ttatttatggtttaagataaggatccatcttcattctgttgcatgtggacatccagtttttccagcactatttgttgaagagattattctttccccattgcgtagtcttggctcatcatt

SEQ ID NO: 7366 - DNA, 120 bp, synthetic construct
  source 1..120: mol_type = other DNA
tatggtctttattatgttcaggtaatttccttctattccttcctagtttgttgagtgtttttatcatgaaaggtgttgaattttgtcagatgctttttctgcaccagttcagattgttac

SEQ ID NO: 7367 - DNA, 120 bp, synthetic construct
  source 1..120: mol_type = other DNA
ggtcagaaaagatacttgctatgatttcagtcttcttaaatttgctaagacttgttctgtggcctaacatgtgatctgtcttggagaatgttgcatgtgtacttgagaaaatgtgtattc

SEQ ID NO: 7368 - DNA, 120 bp, synthetic construct
  source 1..120: mol_type = other DNA
ctttagcacacaactttgcttttcattttgttgagaaaacagataccacaagaaaaatatctgcaaagctcctgccactactgcctgtgtctgtgcttcatgtattctcacatccctcaa

SEQ ID NO: 7369 - DNA, 120 bp, synthetic construct
  source 1..120: mol_type = other DNA
agccgcttctttgaaatgcagacttatgttccacctggatgtctaataggcaaatgaaatgcagctttctctaaagggaacttattcttcctccagtaacttaatgggccatgcttagaa

SEQ ID NO: 7370 - DNA, 120 bp, synthetic construct
  source 1..120: mol_type = other DNA
catgggaaataagataaccctaaggctataatgctcacctattaaactgacagaagtatgtaatatgaggaaatagcatgtcttgtttggtcagtgtattagtcgattctcacattgata

SEQ ID NO: 7371 - DNA, 120 bp, synthetic construct
  source 1..120: mol_type = other DNA
tggaaacagactcctagaggtgcacaagcacatggataattttacctgaatcaatttccaaatcctaaactttaaatgtctcttttttgaagcatttcttcctttgaaccagtgttcaag

SEQ ID NO: 7372 - DNA, 120 bp, synthetic construct
  source 1..120: mol_type = other DNA
ccatcctgggtgacagagtgaaaactctgtcttagaaaaaaaaaacaaacaaacacgtaactaacttagaaaaccaaaaatctaatttaaaaacaggcaaaggattcagatagacattac

SEQ ID NO: 7373 - DNA, 120 bp, synthetic construct
  source 1..120: mol_type = other DNA
caaaaagctaaatgttgagtttccatatgatccagcagttccactcctagatatatatccaaaagcattaaaaacatgttcacacaaaaatttgtgcatgaaagtttacagcagcattat

SEQ ID NO: 7374 - DNA, 120 bp, synthetic construct
  source 1..120: mol_type = other DNA
ttcttgaaacacacgcacagaaaagtagaaattcactaagtgatgtctgattttagcaataattattcaaagagatacatgaactaatgaagaaaaaaaaaaagccctgtccatctcatt

SEQ ID NO: 7375 - DNA, 120 bp, synthetic construct
  source 1..120: mol_type = other DNA
aatttaaaatgtttttcatttaaacatcagacaggctgggtgcagtggctcaaacctgtaatcccatcactttgggaggccaaggcaggaggattgcttgagtccaggagtttgaaacca

SEQ ID NO: 7376 - DNA, 120 bp, synthetic construct
  source 1..120: mol_type = other DNA
gttgacttgttaggagaagaggaagaagaattaaaaagtatagcattgggccagaatatcattaagcagtaagatcacattgagttgtatagggaagggtacctgtatttttatttcatc

SEQ ID NO: 7377 - DNA, 120 bp, synthetic construct
  source 1..120: mol_type = other DNA
gtgaatgtctgcaggggccattatcctgctaccacagttggtttttagtcagctacataattttgaactgttaattttatctattttttttttatgacagttgtggttagaggtgaggct

SEQ ID NO: 7378 - DNA, 120 bp, synthetic construct
  source 1..120: mol_type = other DNA
agtctaccttgcattagtaagactgatttttcttaaatcctgagctacatttaaaatcttggttagtagacattttactcagatagtgattcatttataattggcttgtctaagtactca

SEQ ID NO: 7379 - DNA, 120 bp, synthetic construct
  source 1..120: mol_type = other DNA
tatctcaaattgatattgagttaaatttaaagagtattttaaattatattttgaggggaaaaaaataactttcttggcacaaaatggccatgaattagattgtgtgtttcagaaaggtag

SEQ ID NO: 7380 - DNA, 120 bp, synthetic construct
  source 1..120: mol_type = other DNA
cagggttttgccatgtcaccgagactgagttactgtattttcttagcagaatattgtcccagtgagctttttccaaaagagaaaaggtacagccaataaaagtttgtggttgggtattgg

SEQ ID NO: 7381 - DNA, 120 bp, synthetic construct
  source 1..120: mol_type = other DNA
gcttttcttctgtacttctgtgtgttcaaatatggaccttgttccaaaaaggtccaaaaaggttgagttgtggttccctgtaatgtcaagaaatctgttaatgcatgagacccggaagat

SEQ ID NO: 7382 - DNA, 120 bp, synthetic construct
  source 1..120: mol_type = other DNA
tatcttaaaggaaccacttcactgtaagggagcagtttgtctttctacctttccaattgtattgagattttgcccagtatgtctttttacttaaacaccttggtgaaagctatccagcat

SEQ ID NO: 7383 - DNA, 120 bp, synthetic construct
  source 1..120: mol_type = other DNA
ttttgttttgagacaagatcttgctctgttgcccaagctggagtgaagtggtgtgatcttggatcactgcaacctctgcctcttgggctcaagtgatcctccctccttatcctcctgagt

SEQ ID NO: 7384 - DNA, 120 bp, synthetic construct
  source 1..120: mol_type = other DNA
ttatatctgtcaaaagtcctgtttcttaggagttaagacataattcatagcaattaatatatgtggagaagatacgtaatgaaaaactaactagaagaggaattcagacattgaaaggga

SEQ ID NO: 7385 - DNA, 120 bp, synthetic construct
  source 1..120: mol_type = other DNA
ctctcttctttagtcattacccctgtttttggttcattcctatcagtaaacaatctctggtagagacttggtaagaaaactcaaccattcccttaaaaaaagtcagcctctaccccttcc

SEQ ID NO: 7386 - DNA, 120 bp, synthetic construct
  source 1..120: mol_type = other DNA
tcagggctgaggatggtgtcttgttggcttctgcccttaccctgaatcccttaagccctgtgtacagtgagtatcataattctggccttatatactgtaccctacattttgggctaattt

SEQ ID NO: 7387 - DNA, 120 bp, synthetic construct
  source 1..120: mol_type = other DNA
ccctgcctggccattattatctttaataacaatttacatcagccacatttttctttatggtttttacttttgatgtcaaacttagacatttttttccccattacagtagtgttttccagt

SEQ ID NO: 7388 - DNA, 120 bp, synthetic construct
  source 1..120: mol_type = other DNA
tacaaatttatggtctgaggtactggggattaggactttaatatatgaatttaattcatttattaagtgcaagattggtgcaaggttggtgtttgatgatttcctcagtctttattttgt

SEQ ID NO: 7389 - DNA, 120 bp, synthetic construct
  source 1..120: mol_type = other DNA
aatcatttcatacttagaaaagatgtaggaataccattgtgaatgcccataatcttcatacccacattcaccagtttttaacattttcccatatttgcattataattctctgtttctgtc

SEQ ID NO: 7390 - DNA, 120 bp, synthetic construct
  source 1..120: mol_type = other DNA
acctgtcattggtcatgttaattttgattacctggtcaaggtgttttccagtttctcttctctataattactgttttccctcttgtaactagtaagcagtctgtggggagaaacttcaag

SEQ ID NO: 7391 - DNA, 120 bp, synthetic construct
  source 1..120: mol_type = other DNA
tgaaatgcatagttcttttttgacttacttgtttatctgacacagaatctctctctctcatccaggctggagtgcagtgacatgatcatagctcattgtagccttgaacttctaggctca

SEQ ID NO: 7392 - DNA, 120 bp, synthetic construct
  source 1..120: mol_type = other DNA
tgttttctgttttggaaggttactgcttactgatgcaatatctttaatagatataggcctatttggattatctatatcttcttgtgtgagttttggcatattgtgtcttttaaggaattg

SEQ ID NO: 7393 - DNA, 120 bp, synthetic construct
  source 1..120: mol_type = other DNA
gaactcatattgagtcctgtgctcacctatctgttttgatcttcttttattatgagtcgttcattcattgtgaaaaatctcatttcagtgatagggaaggcaaaaaaaatcagtctcctg

SEQ ID NO: 7394 - DNA, 120 bp, synthetic construct
  source 1..120: mol_type = other DNA
gctgaatattattattattattatttttgagacagagtctcactctgtctcttaggctagagtgcagtagcatgatctcggctcactgcaacctccgcctcccgggttcaagcgattctt

SEQ ID NO: 7395 - DNA, 120 bp, synthetic construct
  source 1..120: mol_type = other DNA
cccgagtagctgggattacaggtacacaccaccacaccctgctaatttttatatttttggtagagacagagttttgccatgttcctcaggctggtctcaaactcctgaattcaagtgatc

SEQ ID NO: 7396 - DNA, 120 bp, synthetic construct
  source 1..120: mol_type = other DNA
cacatctatagatataacaaactacaagtcattatacagagcagttcagtcaccggaaaacctcctgctatccctttgcagtcacacccctacttcaccccaactctggaaaccagcaac

SEQ ID NO: 7397 - DNA, 120 bp, synthetic construct
  source 1..120: mol_type = other DNA
tggttccctatcttctctgaaggtgattttctttcctttttgttttttgaattgttatgaactcatttgttggggttcagtccattgtaattcttacacctgttaaagctcaaattgttc

SEQ ID NO: 7398 - DNA, 120 bp, synthetic construct
  source 1..120: mol_type = other DNA
gacaggtaactatttagcgctcacctctattcctatgtcagtatccctctatctacatgggttctctcaaactcattttctagtagatatctctagaagggcttatgggaacaatattcc

SEQ ID NO: 7399 - DNA, 120 bp, synthetic construct
  source 1..120: mol_type = other DNA
ttaatgtttttagctcattttgaaatactaatagtaggttctaattttaatctcctttgtgtttctggccttctagcatgatgtatttgtctgtaaggaggatgttgttttgttgttttg

SEQ ID NO: 7400 - DNA, 120 bp, synthetic construct
  source 1..120: mol_type = other DNA
gaagcaaatcagtctttacctctctcaaggctggagatttgcaggcactggttttatctgtaactggagatgagagttcaggccaaacactggtttaaaaatctgtatatgaaatagcga

SEQ ID NO: 7401 - DNA, 120 bp, synthetic construct
  source 1..120: mol_type = other DNA
ctactggatcaggagatacacttccttgtctttaatttctgtccatgtcctttttccacttgtttgcagagcactgacaattggagttatacacttcacctaggagactgaaggactctt

SEQ ID NO: 7402 - DNA, 120 bp, synthetic construct
  source 1..120: mol_type = other DNA
ccattcattcatccatggatacttgggttactttcacattttagctgttgtgaataatgctgccattaacgtggatatgcaactaaaagagtactgtaaacaaatgccaacaaattggat

SEQ ID NO: 7403 - DNA, 120 bp, synthetic construct
  source 1..120: mol_type = other DNA
tagaagttattttttctctctattgagcagcagttacatatgctagaatcatagtttgaatgattcagactgtgtacctgtgatctgacatacctggattggagttccatctctgccacc

SEQ ID NO: 7404 - DNA, 120 bp, synthetic construct
  source 1..120: mol_type = other DNA
gcatctcatctaaaagtaatggcacttatcacgtcagcctcatggattgtggtagtggttgttatccttggaattaccggtagggtaacagtctccaggcataccatgggttcttcagtt

SEQ ID NO: 7405 - DNA, 120 bp, synthetic construct
  source 1..120: mol_type = other DNA
atccttgactgtttctagttcgattgtaacactgatcaaatctccttcaagttcaaaacaaaccagcaaaaccttcccttgatactgccattacctcagagctatgtaccgtgctccttg

SEQ ID NO: 7406 - DNA, 120 bp, synthetic construct
  source 1..120: mol_type = other DNA
agttactgctgcagtgtgacctgaaggaagttactcctctgggttttagtttcctcatcttgaaaatagttataacattcttactaacttctagggttgctgtaagtattaagtgagcta

SEQ ID NO: 7407 - DNA, 120 bp, synthetic construct
  source 1..120: mol_type = other DNA
caggttctaaatctttccatttgaaaaatactcatttttctatccaaaatgaattcaattttcctttttattctagtcccagtctgtgtatgagtaaaaccccaaggaccctgtatcctg

SEQ ID NO: 7408 - DNA, 120 bp, synthetic construct
  source 1..120: mol_type = other DNA
aacaacttggtcaaaggattacaacagttaagtggtggagccaggattctaaccttggtattcagtctggctacagagcccatgctctttcttatctttatgttcttctctttacttcct

SEQ ID NO: 7409 - DNA, 120 bp, synthetic construct
  source 1..120: mol_type = other DNA
gtctcacttgtctgtcgataatagaatatctctgaaattcaaacatacctagcctcacaaacttagtcccaaaggtacatgctgtgtttttgcaagaaggtgggcagtccctagttggct

SEQ ID NO: 7410 - DNA, 120 bp, synthetic construct
  source 1..120: mol_type = other DNA
aaatatattagaaataataggacatttagaaatgacattctttttttttttttccttgctttttgtttgtttgtttgttttaagacagggactcactctgtttcctaggctggagtgcaa

SEQ ID NO: 7411 - DNA, 120 bp, synthetic construct
  source 1..120: mol_type = other DNA
ttgaatgaatagtgaacacccttgtgtctttcactaactcagtggctcacttgctaacgtttgcctcatttgctttctctgtttataaagacatatatactttttttattcccctgagcc

SEQ ID NO: 7412 - DNA, 120 bp, synthetic construct
  source 1..120: mol_type = other DNA
aatacatgaataaatctggtccaaacttctatcttgagaaatgtaacagcaattttgaactccttcatccctcaagacaattattcctcccttcccagaggtaaccatcctcctaaattt

SEQ ID NO: 7413 - DNA, 120 bp, synthetic construct
  source 1..120: mol_type = other DNA
aagatgtgttcagtttttatatcttcagtctcaggccatccgtcatatgcagcctttttgtttttatagaccttgaaccacagaactacattaagctagtttgctgttttccagggatga

SEQ ID NO: 7414 - DNA, 120 bp, synthetic construct
  source 1..120: mol_type = other DNA
gccctttcccaacttcagactgagcacccagaagttgacctgggactgctgttttgtttctaggaaactagaaaccttggcagaattgaaatttcgtagtgattttttcttctttgctct

SEQ ID NO: 7415 - DNA, 120 bp, synthetic construct
  source 1..120: mol_type = other DNA
ccttttgaaagataatctctttccctagtttttggcttttaacagtaaagcagctgtgaacattcatgttcagttttttgtgtggacataaatttttatttctttgggagaggtgctgtt

SEQ ID NO: 7416 - DNA, 120 bp, synthetic construct
  source 1..120: mol_type = other DNA
ccacgaatctactctcggtctctgtgaaattgcctattctgaatatttcctataagtggaatcatatgtctggcttctttcacttagcatatattcaggcctcatccctgttgtatcatg

SEQ ID NO: 7417 - DNA, 120 bp, synthetic construct
  source 1..120: mol_type = other DNA
atttttctcttcaatgccatttgtcattaacttatttagaagtgtattgattacctcctataggccaggcactgtactgtgtatcagacactagggacacaagcactagtaaaatgctat

SEQ ID NO: 7418 - DNA, 120 bp, synthetic construct
  source 1..120: mol_type = other DNA
tttatcacctcccacaatcactgccttctacctcctcatctaggcaaccactgcttattttctgtctctaaatttgcttttcctaaacatttatgcgttggaaacatacagtatgcagta

SEQ ID NO: 7419 - DNA, 120 bp, synthetic construct
  source 1..120: mol_type = other DNA
gcctacgtcagacaatatgtgtagagatggggagacattttaaagatacgtgtatcagagctagaatgagcagcatttagtaactcctgagtataatagatgaagcagagggaggtgggg

SEQ ID NO: 7420 - DNA, 120 bp, synthetic construct
  source 1..120: mol_type = other DNA
tgaagttttggaaatttagaacgcaacccattcatgagttgaccctccctttctagttaggtggttacatgtttattataggggtgcatggtatactatcctaaagtaactgttcatttg

SEQ ID NO: 7421 - DNA, 120 bp, synthetic construct
  source 1..120: mol_type = other DNA
ctccagcctgagtgacagagtgagaccctgtctttaaaaagaaaaaaagaaaaaaaaaaaaaacagaaaaaaaacaaacaagtgtccaggagtggtggctcacgcctgtaatcctagcac

SEQ ID NO: 7422 - DNA, 120 bp, synthetic construct
  source 1..120: mol_type = other DNA
tagcactatattgcaaaggtcctaacctttattcacacaacttccagtgtgtacaatgtgacttgcagagctgtactgtggagcatatcctttcctgtgtcttttgtttacctctgagta

SEQ ID NO: 7423 - DNA, 120 bp, synthetic construct
  source 1..120: mol_type = other DNA
gaagtttatgttaagtgtttgtacatgtgggaaaacagggaagaacagatcatctggggttttggacttttgaagatgggatgtttgaaagctcttttggttatgttattcgctattttt

SEQ ID NO: 7424 - DNA, 120 bp, synthetic construct
  source 1..120: mol_type = other DNA
tgtctgctgagcggagactcttgtctttaagaaagactgctacctgatatgctagaccgtttcaggttgccctagtttacatgaatttagtcattatcgccaagactgctaaacctcagt

SEQ ID NO: 7425 - DNA, 120 bp, synthetic construct
  source 1..120: mol_type = other DNA
agcttgggcagaggttgaggaaaatggtaaagtgatagatttcgtaaaaactgtagaaattttcattgactttactttgaaaatgtatagttgtacatgcgaaacgcttctagtattgct

SEQ ID NO: 7426 - DNA, 120 bp, synthetic construct
  source 1..120: mol_type = other DNA
gcacacatcaccatgcccagctaatttattttttgtagaaacagggtctcattatccctctgtgttgctcaggctggtcttgaacccctggactcaagtgatcctcccacctcaacctcc

SEQ ID NO: 7427 - DNA, 120 bp, synthetic construct
  source 1..120: mol_type = other DNA
gctcagagtctcagtgctgtttcggattcctcatcatttgcttcctacccttaggcacaagtgaagtcctgtcagttttacctctctaatgtatcacaaatgtttgaatcctctctttcc

SEQ ID NO: 7428 - DNA, 120 bp, synthetic construct
  source 1..120: mol_type = other DNA
ggcatcacctggaaagactacaccaatgttatgagaggagagaattgtcaggcaggcttcacagaagagataatatttgagcagagtcttgatggatgaatagaagattgctgaatagaa

SEQ ID NO: 7429 - DNA, 120 bp, synthetic construct
  source 1..120: mol_type = other DNA
tgtgttagtcagttttcatgctgctgacaaagacatacccaagactgggcaatttgtaaaggaaagaggtttaatggactcatagttccatgtggctagagaggccttacaatcatggca

SEQ ID NO: 7430 - DNA, 120 bp, synthetic construct
  source 1..120: mol_type = other DNA
gtgaggaatgccacaggagtaaattgttgcttctagtcagagtcctgtaactgagaagcacaggtagaacataggaggttatgtgagctgagctttgaaagatgagtaaaatttagatgg

SEQ ID NO: 7431 - DNA, 120 bp, synthetic construct
  source 1..120: mol_type = other DNA
atagaattaccgcttaaggaatggggacctgtgaaaaattcattcagtagaattcgatggttccatattaacagataggcattattatggtactgtccattagagaaatattgtacagta

SEQ ID NO: 7432 - DNA, 120 bp, synthetic construct
  source 1..120: mol_type = other DNA
ttaccacttagtttgtgttcccttgaaagaagagcctgagaaaaagacttactggctgataggttatttgggagatgaaccaaaaagcagaagtgagagaatgggaaaagtgagacagag

SEQ ID NO: 7433 - DNA, 120 bp, synthetic construct
  source 1..120: mol_type = other DNA
tgaaacaagagggttaaaatccctaccactgcagctggtcctgagctcttatttccatccttgacattcatatgagaatgctctaagagccctcagttgtgctggcagtagggtgttctc

SEQ ID NO: 7434 - DNA, 120 bp, synthetic construct
  source 1..120: mol_type = other DNA
ctccatatggtatagtggggagagcatgccacaaggttttcaggtaatatgaggttttctcctcatattctcttactacacttcaattcctaactttatcttccagcctaataatttctc

SEQ ID NO: 7435 - DNA, 120 bp, synthetic construct
  source 1..120: mol_type = other DNA
cctcctcaccaccctccttgccctccatcccactgccatcttggggacctctgtttcttaggttattggtctgtttgtgtattccattccctgttgagttaatttttgtattaatatctt

SEQ ID NO: 7436 - DNA, 120 bp, synthetic construct
  source 1..120: mol_type = other DNA
aagcttcttgcacctctgtctcctgatggtctgtaatttttccagcaacccaggatttaaatctgggaaccacctatgacaactgcatctctgctttctatcagatctagaagttgctaa

SEQ ID NO: 7437 - DNA, 120 bp, synthetic construct
  source 1..120: mol_type = other DNA
gaacaataaatatattttgggtgagtaagtaaatactacgaagcatccagaaagcatcttgctctcttttggggtggggagagtaggggagtggaagttaaaaaaaattcactactcagg

SEQ ID NO: 7438 - DNA, 120 bp, synthetic construct
  source 1..120: mol_type = other DNA
tgttgttttgagacagggtcttgctctgttgcccaggctggagtgcagtggcatgatcatgactcaccacagccttgaactcctgggctcaagtgatcctcctgcctcagcctcctaaag

SEQ ID NO: 7439 - DNA, 120 bp, synthetic construct
  source 1..120: mol_type = other DNA
cctaatgagttgggattgaggattgcatacacaagggaactcgcagatcaagtcctgaagagaacattgtagttactctggcaaagaacaacgaagacacaaaagctgtgcagagtaatg

SEQ ID NO: 7440 - DNA, 120 bp, synthetic construct; identical to SEQ ID NO: 469
  source 1..120: mol_type = other DNA

SEQ ID NO: 7441 - DNA, 120 bp, synthetic construct
  source 1..120: mol_type = other DNA
atctgtaaaatagtaatgccaactgtggagatggcactgtaaaccaaaaggcacaatgactaaagaaactactgaaaatttaacaattatctcttcattatccttccttattggggaacc

SEQ ID NO: 7442 - DNA, 120 bp, synthetic construct
  source 1..120: mol_type = other DNA
gacttcccgcaacacttcctgctccaagatttgctatgatgagttttccaaatgttaacgacctggaaaagctcattgtctttaagacgtatcccttctgagtcttgtgatttggtggtt

SEQ ID NO: 7443 - DNA, 120 bp, synthetic construct
  source 1..120: mol_type = other DNA
gacacacagaagcataattctggccatacaaaaacctcagtttcttctgtcttccacccaatcaaagtctccttcaaaactttaagtaagtttctatttgccacttcaggacacacctgc

SEQ ID NO: 7444 - DNA, 120 bp, synthetic construct
  source 1..120: mol_type = other DNA
ctccctacctggcccacgttatcttaagggtgaattcttttaaactgtccatgtcgtaggtatgtccagatttacacatgccattccagagaatagcaaattaaggaaagttcctcagtt

SEQ ID NO: 7445 - DNA, 120 bp, synthetic construct
  source 1..120: mol_type = other DNA
gtagattttatatgtaggtgtaatggaataattggccatgtgattgaactcaaactttcagtgttctctcctttcttccttagaggcttggctagctcaaaccccatccttctacacatg

SEQ ID NO: 7446 - DNA, 120 bp, synthetic construct
  source 1..120: mol_type = other DNA
tcctgtttgttagaagaagtcactcagtttaacctatactcaaaggaattagtttccacctcttaaaaagaagagtatgaaagagtttgtggacatatttaaaaaccaccacagatggtt

SEQ ID NO: 7447 - DNA, 120 bp, synthetic construct
  source 1..120: mol_type = other DNA
ccaaagcggttctgagccaaaaggacaaagctagaggcatcacactaccagacttcaagatatactgcaaagctgtagtaactgaaacagcatggtactagcataaaaccagacagtaga

SEQ ID NO: 7448 - DNA, 120 bp, synthetic construct
  source 1..120: mol_type = other DNA
ctcccttagacctagaatcccacttctgcaaatccagcctacagttttatcagcccaaacaacaacaaaagcatctcttcaagtttatttattgccgcattgcttatactaaattattgg

SEQ ID NO: 7449 - DNA, 120 bp, synthetic construct
  source 1..120: mol_type = other DNA
ctccatatcaaaaaaaaaaaaaaagatgctaaaaggaaagcagggacaagtaaatgtcaaatccatttcatgccatagaacttttttttttttttttttgaggcggagtctcgctctgcc

SEQ ID NO: 7450 - DNA, 120 bp, synthetic construct
  source 1..120: mol_type = other DNA
aagcctttcttaagcccttttaatttatatctcaaacttgaggatatccatgaaaacagcggaaactttttcctcaccggatcttgacacaagtcagggatggaagtgagcaaaaggaag

SEQ ID NO: 7451 - DNA, 120 bp, synthetic construct
  source 1..120: mol_type = other DNA
gtaggaagtgtgtgggttctggacagattctgcaggtacaaccagtggatttgatgacaggaaatggaatgcaagaaggaaagagggagttgtcaagaatgacttgagattttaggcctg

SEQ ID NO: 7452 - DNA, 120 bp, synthetic construct
  source 1..120: mol_type = other DNA
attgactctctctgacctaaaaaatggaatttattggctcttaagagttccaaagtaattgaggcttcagacaaggttgcttgagtggctcatcgatgtctcccgggatctggcttcttt

SEQ ID NO: 7453 - DNA, 120 bp, synthetic construct
  source 1..120: mol_type = other DNA
tccccttgggcactctctaattggatgtcctgggtctcccaattctgtcctttaatacccatttttctacttcttttattgggaccttgtagtttctcaattcatccaaaaccgtatcca

SEQ ID NO: 7454 - DNA, 120 bp, synthetic construct
  source 1..120: mol_type = other DNA
caaaaagaaattatcttcccctgcccccacaaaaaaagaaccagtatttctcaacaaggagagtactgttagcatttggttctttattttgaaggattgtccctgcacattgcattttct

SEQ ID NO: 7455 - DNA, 120 bp, synthetic construct
  source 1..120: mol_type = other DNA
ttttttaatctcattactttcctgccagcgccttaacatgcagtaacaagtggaatttgggctttgtcagcagcaaacctgccacttactggttgtgttaagttgggcaagtttctttct

SEQ ID NO: 7456 - DNA, 120 bp, synthetic construct
  source 1..120: mol_type = other DNA
agaagagtgacacctaggtctcttaaatagacagctgacagacattacgaatctcttcgaagtacagatatgccaaagattgctgtgtagtacaatctagttgtaattgtgagacttttg

SEQ ID NO: 7457 - DNA, 120 bp, synthetic construct
  source 1..120: mol_type = other DNA
accctgttatgaatgtcttacccatagcaagatctgacagcgtggacaccaaggcaggcatttcggtaagatttctgtgtattacctcagatacactcagacaactctttaagcaagtta

SEQ ID NO: 7458 - DNA, 120 bp, synthetic construct
  source 1..120: mol_type = other DNA
aaaaatatattttatcgttagatattacaattacataattttaagaatgattgtggccaggcacggtggctcacacctgtaatcccagcactttgagaggccgaggtggacagatcgcct

SEQ ID NO: 7459 - DNA, 120 bp, synthetic construct
  source 1..120: mol_type = other DNA
attaatgcagtttttagacgaatggtgttctggggccctcccctcttttcactctcttggaaggccatctccagagtcatagctgaatattaccgttcttttagcataaccgatttgtat

SEQ ID NO: 7460 - DNA, 120 bp, synthetic construct
  source 1..120: mol_type = other DNA
tctagattagaggggggtcactgcccctattccttcaggacctggcacttttcttcctttgcacttatcatgagttatgattgtgtatcatttgtgttttcttgtttggtgtcttgagta

SEQ ID NO: 7461 - DNA, 120 bp, synthetic construct
  source 1..120: mol_type = other DNA
tattccttatgtactctgtgagcaaagtccctgggttcttttggttgtatctcaagtggagtggttgctatgtcctttgcattcctgtcattcttctctcaagtgcttaggaggcctggc

SEQ ID NO: 7462 - DNA, 120 bp, synthetic construct
  source 1..120: mol_type = other DNA
ttccagttttaaagatgaggaaactaattcagagaggttaagttaaaggcagatccagaatttgaacttatgccagggtagcagggtcgtggatgtttttgcggaaggaactcacacaca

SEQ ID NO: 7463 - DNA, 120 bp, synthetic construct
  source 1..120: mol_type = other DNA
aagagattgcagggatttttagaactaagctacatataacatacacgtgtaaatgatacctcactgtaaaccttctttgcctcagtactgtgaataactttggaaagctaattaaagtga

SEQ ID NO: 7464 - DNA, 120 bp, synthetic construct
  source 1..120: mol_type = other DNA
tttttttttttttttgagatggagtctcgctctgtcgtgtaggctggagtgcagtggcacaatctgcaatcttggctcactgcaacctctgcctcctgggttcaagtgattctcctgcct

SEQ ID NO: 7465 - DNA, 120 bp, synthetic construct
  source 1..120: mol_type = other DNA
tgtgtaattttctaggtcggcttcctcttctatctatagaataaattatttattagaaagacttagggtgttttcattatatctactagaatttgcaagaatgttgatggttacccttat

SEQ ID NO: 7466 - DNA, 120 bp, synthetic construct
  source 1..120: mol_type = other DNA
tgagataaagtatgtaaagccacctcagttagtagctgaaagacagggtaataggtagtccaggctgagcttcaaaattcctctctcctttaaaatacaataaggagcaagtgtaaataa

SEQ ID NO: 7467 - DNA, 120 bp, synthetic construct
  source 1..120: mol_type = other DNA
tgctgaatactaaaatttcttcatagagcactgacagtttgtttatgaccaataaagtaattttgctactatgtgttcacagcttagaactcccaaacaggaagttattgtgatgactct

SEQ ID NO: 7468 - DNA, 120 bp, synthetic construct
  source 1..120: mol_type = other DNA
atatccttagtattaccatgctaagaatacagagccttcagcaaaagccacttttacttgtgaaacaccaaattatttagtacaatacctttacttcaatatctgttacatgccttgttg

SEQ ID NO: 7469 - DNA, 120 bp, synthetic construct
  source 1..120: mol_type = other DNA
tacattcagttattgagtagtgtcaaggctgacatgtctgtaattttcttgacatttcccttgtggttcccaagtggttactattatctgcatttgaggcaggtaaaacggggaaagggt

SEQ ID NO: 7470 - DNA, 120 bp, synthetic construct
  source 1..120: mol_type = other DNA
ccagcaagggaaggaggagaagaataagagtatctgttgctgggtaccacatttgttgacctgacatcatacatatgctaaaatgctcatgttgctatgaaattttcagttccttttcaa

SEQ ID NO: 7471 - DNA, 120 bp, synthetic construct
  source 1..120: mol_type = other DNA
atctttattgtctttctccgtcgaagactgtaagctttaatagatatgggactgtgttttgtttactcttctagtcacccagggcttaaaacagtggctaccaccgtgtactcactcagt

SEQ ID NO: 7472 - DNA, 120 bp, synthetic construct
  source 1..120: mol_type = other DNA
ggagaaatcaaacattaatcttgcctttctaacatgaactgtgccacctgtatccaattagtaggtgagggaaagcatctcatagatgtattccaagtcataaaaaagagaaatgatagg

SEQ ID NO: 7473 - DNA, 120 bp, synthetic construct
  source 1..120: mol_type = other DNA
gataaatggacatatctggtattagcttcataattatatgaaagggggagggagtgaaacaagaagggccatgaattcatcattataaaagctgggctgtatgggtatgtgtgggttcat

SEQ ID NO: 7474 - DNA, 120 bp, synthetic construct
  source 1..120: mol_type = other DNA
aataatataatgaaactccatgaacttgtcactcagttttgacagtatcaactgatgaccaaggctgtttcctctctacccccatgcacttctccctcacccacgtcacccttggattat

SEQ ID NO: 7475 - DNA, 120 bp, synthetic construct
  source 1..120: mol_type = other DNA
cacgcagctaattttttaaattttttgtagagaccaggtctcagcatgtttcccaggctggtcttgaactcctgagctcaagcatcctaccttcctggacctccgtaagtgctaggatta

SEQ ID NO: 7476 - DNA, 120 bp, synthetic construct
  source 1..120: mol_type = other DNA
gtgtcataaaataagcctaatcattcacatatcctatcagatgtgaaaagcccatttctatgctttctggccctgccgcaaaatcttttcttttcttctccctttgattttcctcctaga

SEQ ID NO: 7477 - DNA, 120 bp, synthetic construct
  source 1..120: mol_type = other DNA
atgtaagctattaaatattttgtgtgtgtttgttttgaaatataacctatacccccagtccaccccagggctcgtagtttattctttgtaaatacacgggacttgtgggtggcgagagat

SEQ ID NO: 7478 - DNA, 120 bp, synthetic construct
  source 1..120: mol_type = other DNA
agggagagcacagagaggctctttcctgttacttttctttgtattcaatatctgcttggtgaaatcttgcaagtttttaagatgtagcttagatttcattacttttgacacctaagatca

SEQ ID NO: 7479 - DNA, 120 bp, synthetic construct
  source 1..120: mol_type = other DNA
tataacctcttgatttgaattaggcaggaattattatccccattttctatagatagctgaggttcagagagtaacttatctgtgcccgtaactgcgacttgaacccttcacttcttgctg

SEQ ID NO: 7480 - DNA, 120 bp, synthetic construct
  source 1..120: mol_type = other DNA
cggtataagaaagtgaaggttattggccaggcatagtggctcacggctatattcccagcacttcgggaggctgaggcgggaggatcgcttgagcccaggagttcaagaccaacctgagca

SEQ ID NO: 7481 - DNA, 120 bp, synthetic construct
  source 1..120: mol_type = other DNA
aacttgtctctatttaatgattggaaactctcacagacttctgtgaagtctctcccccttttgtacctttcttacaagtgatgactatatacttttacctggcaggggagagaccacggt

SEQ ID NO: 7482 - DNA, 120 bp, synthetic construct
  source 1..120: mol_type = other DNA
gtttttaatgatcttttaatcttaaatttattgatgctcattttagaaaacttagaggttaccaaaaaagaaatcagaaaactcactgacaacctcctacttctttttaatttaaaaaaa

SEQ ID NO: 7483 - DNA, 120 bp, synthetic construct
  source 1..120: mol_type = other DNA
cacaattcctgatattaacaataaataggagtacagaaaaagcttttagaaatttctcccatacctgttaaagtctatatgaatatattaaggggaaactccaggatgctaacactaaaa

SEQ ID NO: 7484 - DNA, 120 bp, synthetic construct
  source 1..120: mol_type = other DNA
cctactgtctagattctgtcctgtattcatatgtagaatttataactaaatcatttctgaaaagctaattgtttgattacaatttccttttttatttccatagacagcacctggctctgt

SEQ ID NO: 7485 - DNA, 120 bp, synthetic construct
  source 1..120: mol_type = other DNA
gtttatgagcatcctgatggctctgggttataaacctgatctcttcaaaattctgcatagtgattttgtcccaggagatccttccagtgtttctgaaaaccagctccagatagaattgtt

SEQ ID NO: 7486 - DNA, 120 bp, synthetic construct
  source 1..120: mol_type = other DNA
actcactcatgctgctgctaagccacatctcctccactcttcattggtgctgttggtttcttcacacaaataagtagatgggaatggaatgaggttttcctatacagttgttacatactt

SEQ ID NO: 7487 - DNA, 120 bp, synthetic construct
  source 1..120: mol_type = other DNA
gttgctggatcattgaaaataattttcgatgataggatctttatggcacttttagcatatgctttggaaggactttaaacaattatgggctgatcgtggtggcacggtggccccagcctg

SEQ ID NO: 7488 - DNA, 120 bp, synthetic construct
  source 1..120: mol_type = other DNA
tctagcctgggtaacagagcgagactccgtctcaaaaaagaaaagaaaaaaaaaaaaaaaagctgaggtgggaggatgacttgagcctgggaggcagaggttgtagtgagctgagatcat

SEQ ID NO: 7489 - DNA, 120 bp, synthetic construct
  source 1..120: mol_type = other DNA
ccccaggctgcattggtaaattgtgcttattctgtttcctcctataggacaaattatttttcagaaacctcactgccattccttgtaacttggcgtcagttccttcctcatatactgtct

SEQ ID NO: 7490 - DNA, 120 bp, synthetic construct
  source 1..120: mol_type = other DNA
gctcaagttcacaaagtgaacaactggcaaagctaggattcaaactgtttgattccaaaacccttgtattttctgtaatactatgctccttaatctgttggcagagtctatttttggctt

SEQ ID NO: 7491 - DNA, 120 bp, synthetic construct
  source 1..120: mol_type = other DNA
tgtgttgttaatccaataaaacatcacatgcaagtgctgctgcgcttccagtgactgtgtccttctctgtgctagctttctgctctcttagggacagtctccttgctggctggtggtctg

SEQ ID NO: 7492 - DNA, 120 bp, synthetic construct
  source 1..120: mol_type = other DNA
tttacattgtttacttttattgtcaggtccgttttttgatggcagcattcgatggctggttttgctcatttctatggctgtctgcataattgctatgatcatcttctccagctgcttttg

SEQ ID NO: 7493 - DNA, 120 bp, synthetic construct
  source 1..120: mol_type = other DNA
tcctcaccctcaacaatggggtaccacagttgagaaatcgtgttttgggtctttctagataatagacttggaatcttctgttagggaggtgatgcgaaagtcatatgattattcagagta

SEQ ID NO: 7494 - DNA, 120 bp, synthetic construct
  source 1..120: mol_type = other DNA
gtttaaaactctttattgctgttttagtggactagtaaaagcaagcaagtatgctcaatcggttattttaagctcaaagtccctttgtcaaataactgaatctttgccagtaagacaggt

SEQ ID NO: 7495 - DNA, 120 bp, synthetic construct
  source 1..120: mol_type = other DNA
acagtgaagcttgtaatcagtaaaccctacccatatactaacagcttgccaatcaaggtgtcaggctgtgaaggatactgatctctgagaaaccagaaacaagtgaggtgagccttgtga

SEQ ID NO: 7496 - DNA, 120 bp, synthetic construct
  source 1..120: mol_type = other DNA
gagtgaacatgaagacataggaatgaatagagaatagtgagctgtgggacaacttcagatggcctaatatagatataattggagttcccagaagagaggagggacgaaaaacatacagaa

SEQ ID NO: 7497 - DNA, 120 bp, synthetic construct
  source 1..120: mol_type = other DNA
cagagtatctacagaggcacaaagttaaggatgacagcagaccttctgttggaaacagtgcagtcaagaagatagcgaaccaacatctttaaagtgcccaaagaaaaacatcacagactt

SEQ ID NO: 7498 - DNA, 120 bp, synthetic construct
  source 1..120: mol_type = other DNA
attacttaaccattaatattgatgatcaactggctggctgtttaaattgccactttcctattgaattttgaagggtgcccatggtgaatcttgtgtgtccctcatgcttggcacacagtg

SEQ ID NO: 7499 - DNA, 120 bp, synthetic construct
  source 1..120: mol_type = other DNA
attttcactggctatagaattctggatgggctcaagtttgtttcccttaaagctgtcactcattatcttccacttgcatgccttctgacatacattttatctttgatgtattatatgtaa

SEQ ID NO: 7500 - DNA, 120 bp, synthetic construct
  source 1..120: mol_type = other DNA
acacttggcctcttgattgcctgccctcttggcagtgagtgattattccttgctttttaatgggtctcataagtttatttggatgttgtacatcatgttaagaatagcagagattgtcac

SEQ ID NO: 7501 - DNA, 120 bp, synthetic construct
  source 1..120: mol_type = other DNA
ttgagcccaggaggcggaggttgcagtgagccaagatcatgccactgcactctagcccaagcgacagaacaaggccctgcctcttcttccccacccaaagaaaaacaaaagataaatatt

SEQ ID NO: 7502 - DNA, 120 bp, synthetic construct
  source 1..120: mol_type = other DNA
gtgtagatagagtttatgtagtcataataatgcaagcactgaatgttgagctaaacaaataatataactgtaaggaggatgtgaggatggaagtatttctgttttgggaagccgcagggt

SEQ ID NO: 7503 - DNA, 120 bp, synthetic construct
  source 1..120: mol_type = other DNA
caaaaagtcacaattctttattctaagaagtggaaactggataggaggaggagaggagacaaagtatggctttttcattaccaagccatggagaactgtatgacattcaaaggtaggcga

SEQ ID NO: 7504 - DNA, 120 bp, synthetic construct
  source 1..120: mol_type = other DNA
ccagaagtagttttgtttctaaggaaacagggaaataattctcttctaaggaagtgaacttgatagcttagggatagagctgggaggaggatttttttttgccatatacccttttgtgtc

SEQ ID NO: 7505 - DNA, 120 bp, synthetic construct
  source 1..120: mol_type = other DNA
caacatttggtatacagattatataatgaacgcctacaaatcaatgaggagaagagttcagggaacacttcaattgaataatgtgcaataaacacaaatagattgatcaggcatagtgtc

SEQ ID NO: 7506 - DNA, 120 bp, synthetic construct
  source 1..120: mol_type = other DNA
aaccaagaaaaatagaatagtcaagtaagatagagctataaaccaggttataggaaccaagtcctacagagaaaggcaggggaagttagatcacgaagtcctatatgaaaggcaagagtt

SEQ ID NO: 7507 - DNA, 120 bp, synthetic construct
  source 1..120: mol_type = other DNA
ccaggctaatttttttttttttttttttttgagggatgaggtttctccatgttggccaggctggtctcaaactcctggcctcaactgatccttccaccttggctcctaaagtgctgggat

SEQ ID NO: 7508 - DNA, 120 bp, synthetic construct
  source 1..120: mol_type = other DNA
aaaggcagtccatttaacagatggtgcaggaaatatcaggaatccatttaccaagaagttaatctcagtccttacctcctcactctataccaaattaacttgaaatgtagcatagaccta

SEQ ID NO: 7509 - DNA, 120 bp, synthetic construct
  source 1..120: mol_type = other DNA
tactttatgctacatgaaagaagccagacacaaaaggctacacaaaagtgattctcctgcctcagcctcccaagtagctgggattaaggcatgcaccaccatgcccagctaatttttgta

SEQ ID NO: 7510 - DNA, 120 bp, synthetic construct
  source 1..120: mol_type = other DNA
taataaaccaccccaaaacttagtgatgtgaagcaacaaacattatttctcattctgtgagtctgtggggcagttcatttgttggacttgcttagctagagctaggtggtgtagttcaca

SEQ ID NO: 7511 - DNA, 120 bp, synthetic construct
  source 1..120: mol_type = other DNA
caccatgctttttgatgagatggactacccctttgccagtcttaatgggtttctttcatcaagagctcaaaccttttacttttttctataaaggttcagcgaactattgccaaacagatt

SEQ ID NO: 7512 - DNA, 120 bp, synthetic construct
  source 1..120: mol_type = other DNA
ccctctttccaaataaggtcacgtttatagatgacatggattttagacatgaattttgtcggggagcactgttcagctcagtacatagcactcactgacctttttctggagggaagaggg

SEQ ID NO: 7513 - DNA, 120 bp, synthetic construct
  source 1..120: mol_type = other DNA
tcgagctcctgacctcaagtgatcctcctgccttggcctcccaaagtgatacaggtgtgagccaccacacccagcatatatgatctttttcttaatcctattcactttcatgattattaa

SEQ ID NO: 7514 - DNA, 120 bp, synthetic construct
  source 1..120: mol_type = other DNA
ctgggattacaggtgtgtgccatatagtcttagccatccttccatttcagctgatgtaaatctacttcattctttttaacagatgcagagttttccatatgtggaggtactgtagtttat

SEQ ID NO: 7515 - DNA, 120 bp, synthetic construct
  source 1..120: mol_type = other DNA
tctcggctcactgcagtctccgcctcccaggttcaagtaattttcgtgcttcagcctcccaagtagctggaattatagtcatgtgccaccaaccctggttaacttttgtattttatagag

SEQ ID NO: 7516 - DNA, 120 bp, synthetic construct
  source 1..120: mol_type = other DNA
atctacagcttcggcctaatcatttgggagatggctcgtcgttgtatcacaggaggtgggagtttgagtagtttctgattatgttgatttactcatcattttaaaaataacagctccagt

SEQ ID NO: 7517 - DNA, 120 bp, synthetic construct
  source 1..120: mol_type = other DNA
gtgtgcttcattcctcttactagttgtgacaacacatacaaagtgttctcattcgggaaagctccttagagacttggcacccagagattttactggaggctggtcacataggcatcctct

SEQ ID NO: 7518 - DNA, 120 bp, synthetic construct
  source 1..120: mol_type = other DNA
gtcccctgaagaagtgattcgtaaatgccaccaaatatattctctgctcactgaacatctctttacttttcagtgtctacgagcagttttgaagctaatgtcagaatgctgggcccacaa

SEQ ID NO: 7519 - DNA, 120 bp, synthetic construct
  source 1..120: mol_type = other DNA
gtgtctccatgcacatgcacgccgggattcctctgctgccatttgaattagaagaaaataatttatatgcatgcacaggaagatattggtggccggtggttttgtgctttaaaaatgcaa

SEQ ID NO: 7520 - DNA, 120 bp, synthetic construct
  source 1..120: mol_type = other DNA
aatgggaggaaatcagcatatgtccacccattaccaaaatttgactatcatttaaggttaaaacttacaaatttgtctgcacatcaaatttcacaaatttgaaaattgccttaaccattt

SEQ ID NO: 7521 - DNA, 120 bp, synthetic construct
  source 1..120: mol_type = other DNA
atatgagaccactattatggttttttaaaattaacttggtctagtaaaagtgatatcaagagttaatcttagaaacttgctcagtaaaaacattttctagtataacatgttctttaaaaa

SEQ ID NO: 7522 - DNA, 120 bp, synthetic construct
  source 1..120: mol_type = other DNA
ccagtgtccagaagtgtttctaaacttagaaagtgacctatagttttttaaaattatgttttcctagaacgtgccaaattttgatttactctaacaatcagtacttttcttcagatgctt

SEQ ID NO: 7523 - DNA, 120 bp, synthetic construct
  source 1..120: mol_type = other DNA
gtaatgattaagttagtgtatatacatatgttcctgagatgtacacttcaactaccagaaacccagtatggagcacaggtaggtacacgcttgccctgtggagatagagaacttctaaac

SEQ ID NO: 7524 - DNA, 120 bp, synthetic construct
  source 1..120: mol_type = other DNA
ttggaaaacattgccatattgctactcacaaagcttttcattttcattcctgctagcagttcatgagcttagagcgatgggatgcatttacctggccttaagatgctcctgctgcaatgg

SEQ ID NO: 7525 - DNA, 120 bp, synthetic construct
  source 1..120: mol_type = other DNA
tttcacttggagaaacatttgctgatagtagtagcatattgaccatttctgacatgtcatccttatatcaagttaggtgcacgctcctacacagccttggctcagcgcttggagcataca

SEQ ID NO: 7526 - DNA, 120 bp, synthetic construct
  source 1..120: mol_type = other DNA
agccatcctcccacctcagcctcctgagtagctgggaccatgccaccatgcctggctcacattctaaacattatgcaggaagctcaaagtgaaaatcaatatggaatgtttatattgaaa

SEQ ID NO: 7527 - DNA, 120 bp, synthetic construct
  source 1..120: mol_type = other DNA
cccatctgagtttatttcaacagccaaatgttttattttgaaatgattccaggcttccattaaagtttcatcaatagtataaggactgccatttacccttcacccagattcataaactgc

SEQ ID NO: 7528 - DNA, 120 bp, synthetic construct
  source 1..120: mol_type = other DNA
gggtggtgctcaggctacagcagggagagcttttctgtttttgagctaaagacataacagggtgcagaggctgagaaaaggagagttctaagcaacatgtcacgagctatgtagcctctt

SEQ ID NO: 7529 - DNA, 120 bp, synthetic construct
  source 1..120: mol_type = other DNA
tggaagtgtttgctaccaagtttatttgcagtgttaacagcacaacatttacaaaacgtattttgtacaatcaagtcttcactgcccttgcacactgggggggctagggaagacctagtc

SEQ ID NO: 7530 - DNA, 120 bp, synthetic construct
  source 1..120: mol_type = other DNA
tgcccaggtttcaagtttccttttcatttctaatacctgcctcagaatttcctccccaatgttccactccaacatttgagaactgcccaaggactattctgactttaagtcacataatcg

SEQ ID NO: 7531 - DNA, 120 bp, synthetic construct
  source 1..120: mol_type = other DNA
cagccctaagccaacaacagcctgaatagaaagaatagggctgataaataatgaatcagcatcttgctcaattggtggcgtttaaatggttttaaaatcttctcaggtgaaaaattacca

SEQ ID NO: 7532 - DNA, 120 bp, synthetic construct
  source 1..120: mol_type = other DNA
ctacaagtgcgtgccaccatgcctggctaattttttttagtatttttagtagagatggggtttcgccatattggccaggctggtctcaaactcctgatgtcaggtgatccgccctgaggc

SEQ ID NO: 7533 - DNA, 120 bp, synthetic construct
  source 1..120: mol_type = other DNA
ctgaagcatcaacctcctgagctcaagtgatcctcccacctcagcttcccaagtagctgcgactacaggcatctgccaccacacccagctactttttaaatttgttgtacagatgaagtc

SEQ ID NO: 7534 - DNA, 120 bp, synthetic construct
  source 1..120: mol_type = other DNA
attctcccaccttggcctcccagtgttgtgattacaggggtggggcactggcccagcccatcatttctctctctctctttttttttgagacggagtctcgctctgtcgcccgggctggag

SEQ ID NO: 7535 - DNA, 120 bp, synthetic construct
  source 1..120: mol_type = other DNA
tctctgacagggcacccaatacttactgtgccaagggtgaatgatgaaagctccttcaccacagaagcaccacacagctgtaccatccattccagttgatctaaaatggacatttagatg

SEQ ID NO: 7536 - DNA, 120 bp, synthetic construct
  source 1..120: mol_type = other DNA
atacacacaccaaggcctttgtgctgcgcaactccagaggtaagctttatagcagtcctaagcataacattgtattaagtgtcaagtttaattagaaaatgttcatggagagggctgggc

SEQ ID NO: 7537 - DNA, 120 bp, synthetic construct
  source 1..120: mol_type = other DNA
aggataacatttaggtgctgttttgtttggagagtggtagagaaatagaatagcctctagaacatttcagcaatctgaggaacccccatcgtgggatcttgcttataatactccactatg

SEQ ID NO: 7538 - DNA, 120 bp, synthetic construct
  source 1..120: mol_type = other DNA
ccttctcactactctgagaatggccattgtatctttaggccacctaagcagtttttaatctagaagtgaagccaggttctgcctctcctcattgaactagtctgactacctggtttcctg

SEQ ID NO: 7539 - DNA, 120 bp, synthetic construct
  source 1..120: mol_type = other DNA
gccaaggcctaaaattcacctggcttcaaagagactgcgatagagaaaaaaatcaggaagctaaaaatacacggatggccttttagaaagtggtcaccctcccccttgacagacagacgg

SEQ ID NO: 7540 - DNA, 120 bp, synthetic construct
  source 1..120: mol_type = other DNA
cgagacggcgccactgcactccagcctgggtgacatagcgagactctgtctcaaaaaaaaaaagaaatttgaagtttcaggccgggcgcggtggcctgtaatcctagcactttgggaggc

SEQ ID NO: 7541 - DNA, 120 bp, synthetic construct
  source 1..120: mol_type = other DNA
tcactgcaacctccgcctcctgggttcaaccgattctctagcctcagcctcccgagtaatcctgagctaggattacaggtgcctaccaccacgcccagttaacttttgtatttttagtag

SEQ ID NO: 7542 - DNA, 120 bp, synthetic construct
  source 1..120: mol_type = other DNA
tggaatttgagaccagcctggccaacatgttgaaaccttgtttctattaaaaatacaaaaaactatctcggtgtggtggcacgtgcctgtaatcccagctatttgggaggctaaggcacg

SEQ ID NO: 7543 - DNA, 120 bp, synthetic construct
  source 1..120: mol_type = other DNA
ccagctcttccacttatcagctaagatctgaacccgagacgggaatccaaattacacagcctctctaaatctcttagttttatcattcataaagtagagacaatacttatttatgtggtt

SEQ ID NO: 7544 - DNA, 120 bp, synthetic construct
  source 1..120: mol_type = other DNA
agcgagactccatctcgcatctcaaaaaattaaaaataaaattaaaaaaaaaaaaattaggccgggtgtggtggctcacgcctgtaatcccaggactttgggaggccgagacaggcggat

SEQ ID NO: 7545 - DNA, 120 bp, synthetic construct
  source 1..120: mol_type = other DNA
gcaagtaaaatcattctttttggtagaccaggtgaaatgactaggatctcagctgttgaaatcaattcactgaagcaaatcttttgtgtgcagaacttaacaatcggcttttcacctcac

SEQ ID NO: 7546 - DNA, 120 bp, synthetic construct
  source 1..120: mol_type = other DNA
agttcctggttccattcctgcttcctgcctttcccactcccccatattccctaccatgccttcttcatctaatttaatattactaacaagatctattgttcaagccaaaacccaagtgtc

SEQ ID NO: 7547 - DNA, 120 bp, synthetic construct
  source 1..120: mol_type = other DNA
cattattatttcttgagacaggagtcttgctctgtcgttcaggctggagtgcagtgatgcgatcttggctcactgtaactcctacctttcggttcaagtgattctcctgcctcagcctct

SEQ ID NO: 7548 - DNA, 120 bp, synthetic construct
  source 1..120: mol_type = other DNA
acctgaatcctaccagggacttagttagtcttatttactgttgcattcctagtgcccagaacacagtaggctcccaataaatagccactgaataaaagttaaaaccaacaaaaataatca

SEQ ID NO: 7549 - DNA, 120 bp, synthetic construct
  source 1..120: mol_type = other DNA
gtgagccactgcatctggactgcatattaatatgaagagcttttcttcaacaacagtgaacagttttctacaaaggtatatgcaagtgggcccacttcttgttcttatgaatcttttctt

SEQ ID NO: 7550 - DNA, 120 bp, synthetic construct
  source 1..120: mol_type = other DNA
cattcagcatttttctttctttaatagactgggtcacccctaaagagatcatagaaaagacaggttacatacagcagaagaacgtgctcttttcacggagatagagaggtcagcgattca

SEQ ID NO: 7551 - DNA, 120 bp, synthetic construct
  source 1..120: mol_type = other DNA
agaggaaatatctgtccactccctcttctcaacacccatcttctagacgccaaggctagctatagatctccattatagtgttcaaggaattaggaattatccatgtcaatagttttgatt

SEQ ID NO: 7552 - DNA, 120 bp, synthetic construct
  source 1..120: mol_type = other DNA
ttacctttcattaactttgatgcaaacctatagcttaaggtatcttaaactttaatgacatttttctctaaaatagtagtttgtaataacttgttctggcacctggctccaatgaacact

SEQ ID NO: 7553 - DNA, 120 bp, synthetic construct
  source 1..120: mol_type = other DNA
cacttgctccagagcctctgcttgtgttaatacggcccagtttcaaataagcatttttagcagccctgaaatgtgtactcagatttagtttatagtcaactaaaaacacccagaggtctc

SEQ ID NO: 7554 - DNA, 120 bp, synthetic construct
  source 1..120: mol_type = other DNA
cagcctccagagttcaagcaattcttctgtgtcagcctcccaagtagctgggattacaggtgcacaccaccacgcccagccaatttatgtatttttagtagagactgggttttaccatat

SEQ ID NO: 7555 - DNA, 120 bp, synthetic construct
  source 1..120: mol_type = other DNA
cccaaaacaaaaggaggtaaggaagcagcaaaactattatttgtctttcataaagtaattgattgactattagaagactatcatccatgctatgctcaacaaatattcttattttttcac

SEQ ID NO: 7556 - DNA, 120 bp, synthetic construct
  source 1..120: mol_type = other DNA
acatcagcagacataaaattacaactaaggattcaaaataatattataaacctactacgtaccacaaaacttaaaacttaaaaaatatatactgggccagacacggcagctcatgcctat

SEQ ID NO: 7557 - DNA, 120 bp, synthetic construct
  source 1..120: mol_type = other DNA
accaccctccgccaggatcattagcaattctgaactgattaattgctgaaatcccagccttgaaactgttcagttagaagagcaatgctgaactgctgaaaagatcatcttaatatgggc

SEQ ID NO: 7558 - DNA, 120 bp, synthetic construct
  source 1..120: mol_type = other DNA
tcaggatgtctgaaatccacaaatagcccaagcagaaacgaggttttactggtcttaatattttaatgggtatttttccacagtatgaagcaattcccatttctggcattaaggacccaa

SEQ ID NO: 7559 - DNA, 120 bp, synthetic construct
  source 1..120: mol_type = other DNA
gctcacactttcttccattgcattatacccagcagtatcagtagtatgagcagcagctggactctgggcagattctgcaactttcaattggggaactttcaatgcagaggttgaagatgg

SEQ ID NO: 7560 - DNA, 120 bp, synthetic construct
  source 1..120: mol_type = other DNA
gaggcagagcttgcagtgagctgagattgagccattgcattccagcctgggcaacagagcgagactccgtctcaaaaaaataaataaataaaaataaataaataaataaaagtttatgta

SEQ ID NO: 7561 - DNA, 120 bp, synthetic construct
  source 1..120: mol_type = other DNA
cagcctcggcaacataacaagacccgtgtctaaccccaccccaaattatcttttttattccctatattgtccaatttgggggcaatgagcttatagcaattttgtaagaaaggaaaaaaa

SEQ ID NO: 7562 - DNA, 120 bp, synthetic construct
  source 1..120: mol_type = other DNA
cctgaaataatacatttagagtacaccaagactccctcatcctcaaaatcattagttaaaccattaattaaaatatagatggattaacagtttcaataattttcaagtaaaccttgatta

SEQ ID NO: 7563 - DNA, 120 bp, synthetic construct
  source 1..120: mol_type = other DNA
tgagtgacagagcaagactctgtcaagaaagaaaggaaaggaaagaaaggaaagaaaaggaaaggaaagaaagaaaagaaaaggaagggaggaaggaaagaaaggaagaaaggaaagaaa

SEQ ID NO: 7564 - DNA, 120 bp, synthetic construct
  source 1..120: mol_type = other DNA
aaggaaaagaatagtactggactacatagtccagtactggactgctatacagccctgtgttaatagtggtgtaaatacacatctctgaaagatattctaaatgttttctggctttgggag

SEQ ID NO: 7565 - DNA, 120 bp, synthetic construct
  source 1..120: mol_type = other DNA
ataccacagcatctttacattgatgtttcttacctttccactcctggttctttatttttactggtagaactatctgcagacacctcaaacttgtcagcagaaaggccttctggattctgg

SEQ ID NO: 7566 - DNA, 120 bp, synthetic construct
  source 1..120: mol_type = other DNA
ctagtagctgacattacaggtgcctgccaccacgcccagctagtttttttggtatttttagtagagatgggattttaccctgttgatcaggctagtctcgaactcctgacctcaagtgat

SEQ ID NO: 7567 - DNA, 120 bp, synthetic construct
  source 1..120: mol_type = other DNA
tcctgccttggcatctcacagtgctgggattataggcgtgagccaccatgcctggccaaggcggaaatatttaataagtaaaaacaaatagttaaaaattgcaaaagtcttctattcatt

SEQ ID NO: 7568 - DNA, 120 bp, synthetic construct
  source 1..120: mol_type = other DNA
acaacgtgacccagcatgctgttggcatcgctgtaaacaagttaagggcaagattcttgccaagagaattaatgtgcgtattgagcacattaaacactctaagagccaagacagcttcct

SEQ ID NO: 7569 - DNA, 120 bp, synthetic construct
  source 1..120: mol_type = other DNA
ccactgtgtgctaagcattgtacagggtattgtgaagaattaaggaagacactggaagacaacagatattaagaaataataaactaggccaggcaccgtagctcccaagtaggtgggatt

SEQ ID NO: 7570 - DNA, 120 bp, synthetic construct
  source 1..120: mol_type = other DNA
ttctgtataagtagcagacttgagttcctagaaagactccaagaaaggtcttaaagttcccagttggactgtggaacggggtgctgaagaaggaactttaacactcagataagaatcact

SEQ ID NO: 7571 - DNA, 120 bp, synthetic construct
  source 1..120: mol_type = other DNA
tcaccaatttctcccattccacttagcttccaatagagcaagagctatgttgtataccatgtatcttccatgggctccccatagcatctacttgttgtaggtactcagatgacaacatga

SEQ ID NO: 7572 - DNA, 120 bp, synthetic construct
  source 1..120: mol_type = other DNA
aagcgattctcccacctcagcctctcaagtagctggcattacaggtgcttgccaagacgcccggctaattttggtaatttttgtagaaacagggttttactatgttggccaggctggtct

SEQ ID NO: 7573 - DNA, 120 bp, synthetic construct
  source 1..120: mol_type = other DNA
tgtgcctggcttcaaaatatacatgtttaaaaatcacttttagaaggaacagcaatggttgccaaaaagtccagtgggggagtagggcaggaacacattgtttcactctccgtttcttct

SEQ ID NO: 7574 - DNA, 120 bp, synthetic construct; identical to SEQ ID NO: 590
  source 1..120: mol_type = other DNA

SEQ ID NO: 7575 - DNA, 120 bp, synthetic construct
  source 1..120: mol_type = other DNA
ggctaattctaataagactcctgaaatgtgcagcagagcagccggaactggtctggagggaagcagagtgtatatctgacccttgtttgttcacattcattacatataaatatatatata

SEQ ID NO: 7576 - DNA, 120 bp, synthetic construct
  source 1..120: mol_type = other DNA
caggtctagagggatttgctctgtacagagaatgggcagtagaagataagccttctctaattgtagttctcatagcaatgcaagatttagattttaaaactggatatcacccagtgttgg

SEQ ID NO: 7577 - DNA, 120 bp, synthetic construct
  source 1..120: mol_type = other DNA
tcaagtagctgagactacaggtgtgcaccactaagcctcactaatttttttttttttcccagacaggggttgcccagaacagagtgcagtagcgtgatcacaactcactgcagccttgac

SEQ ID NO: 7578 - DNA, 120 bp, synthetic construct
  source 1..120: mol_type = other DNA
ttctcaacttcatctaatctgacttcagaaagttcataaaaaaacatcattcacttactagcagctaaaagggtatttaagatttaggtgggaaaaagaagccacagcaggatgaatcga

SEQ ID NO: 7579 - DNA, 120 bp, synthetic construct
  source 1..120: mol_type = other DNA
tgggcaacatagtgagatgttgtctctagtaaaaacttaaaaattagctggaggtgttggtgggcgcctgtggtcccagctactcgggaagctgaggtaggaggatcgcttgagcccagg

SEQ ID NO: 7580 - DNA, 120 bp, synthetic construct
  source 1..120: mol_type = other DNA
tgtgtgcgcgtgtgcgtgtgtgtgaaataaaaggtagtatgagttccatcaaggtgcttacagtctaatttaaggagacaatgaaccacaaacaattgtgccattaattcaaagagatga

SEQ ID NO: 7581 - DNA, 120 bp, synthetic construct
  source 1..120: mol_type = other DNA
tgctcttcttgattattttcttccaagcccgttcctctttcttcatcatctgaaaccaattccttgtcactcagaccaactccctggctttcagactgatgcctcatttgtttggaagaa

SEQ ID NO: 7582 - DNA, 120 bp, synthetic construct
  source 1..120: mol_type = other DNA
ctgaactgagatgatagacaaaacctagagcctcctttgatactacatttggcattatcaactggcttatctttctgaccaaccacaggaaagcctgcagtgatattaactgtctgtaca

SEQ ID NO: 7583 - DNA, 120 bp, synthetic construct
  source 1..120: mol_type = other DNA
aattcagtacaattaggtgggcttagatttctactgactactagttcaagcgcatgaatatgcctggtagaagacttcctcctcagcctattctttttaggtgcttttgaattgtggata

SEQ ID NO: 7584 - DNA, 120 bp, synthetic construct
  source 1..120: mol_type = other DNA
ccgcctatcattacatgtttccttacttccagcccatctgttatgttggctccttgctaagccaggctgtttgcttttattacagaattcagccttttctacattcattctgtctttagt

SEQ ID NO: 7585 - DNA, 120 bp, synthetic construct
  source 1..120: mol_type = other DNA
aaaagcagattggccatcagaaaactggttctgatgtactctaaagattactggccattaagtctacttaatactctgttctatctacagacttaccactccctatatttaaaaaccagt

SEQ ID NO: 7586 - DNA, 120 bp, synthetic construct
  source 1..120: mol_type = other DNA
cctctgtactccagcctgggcaacagagcaagactctgtctcaaaaaaaaaaaaaaaaaagagagaaagaaagaaatggaatggtcaattaaccgggcgtggtggtgtatacctgtagtc

SEQ ID NO: 7587 - DNA, 120 bp, synthetic construct
  source 1..120: mol_type = other DNA
cagaaagaaagcaaacaaaaaactgtggggtatgcttagtacccggatgatgaaaaaaatctatacaccaaatcccaagtcgtgtgtttacctatataacaaactgcacatacatccctg

SEQ ID NO: 7588 - DNA, 120 bp, synthetic construct
  source 1..120: mol_type = other DNA
gggagctcaaaagatggctatcctttttaattataaatatattctaaaagaaaatccaatttgagagcccagtttgaattctgagctcagcagctcttttttttttttttttggaggtct

SEQ ID NO: 7589 - DNA, 120 bp, synthetic construct
  source 1..120: mol_type = other DNA
ttaaaaggcttcctcatctagtacaatttatcttggaactaaatactgtagcaatccatcatgttttttcttattgctactctccatctttccaaaacatatttacacatatttaaaacc

SEQ ID NO: 7590 - DNA, 120 bp, synthetic construct
  source 1..120: mol_type = other DNA
agttggacactgagactggtttcctgctaaacagtatggtaaagaacagtcaagcaattgttggccagttctgtgcttttcctcctgaagagaaacttgacaccatggacaaaataaatt

SEQ ID NO: 7591 - DNA, 120 bp, synthetic construct
  source 1..120: mol_type = other DNA
tgatgacaataaaaccccagcactcctaagaacatttagtataggaacgagtatttaaaagcccaacattactttttttttccttcctttttagctctatatcttttgaaaaatgaatgc

SEQ ID NO: 7592 - DNA, 120 bp, synthetic construct
  source 1..120: mol_type = other DNA
tacaggtgcaagctactacgcccagccccagaatgattactttttaagatctccatcattcatgcacatataagtaacaacagagcaaatcactacattttctttaacaattacaccttt

SEQ ID NO: 7593 - DNA, 120 bp, synthetic construct
  source 1..120: mol_type = other DNA
ctacatctcctggactcaagtgatccttctgtctcagcttcccaagtagctgggactacaggcacacaccaccatgcccagataatttaaaaaaacttttaatatagacaaggacttgct

SEQ ID NO: 7594 - DNA, 120 bp, synthetic construct
  source 1..120: mol_type = other DNA
ctggctgtaaggtctctctcttgattatatcaggtaccctgaccttctctgaactctaactgattagaacacttgtctaaccacttaatataccatctttccttcttcactaacttttta

SEQ ID NO: 7595 - DNA, 120 bp, synthetic construct
  source 1..120: mol_type = other DNA
tcttatcaccacgtcatagaaagtaattgtgcaaacttcctgagttttcatggacagcacttgagtgtcattcttgggatattcaacacttacactccaaacctgtgtcaagctgaaaag

SEQ ID NO: 7596 - DNA, 120 bp, synthetic construct
  source 1..120: mol_type = other DNA
caattcattcattcctttaagcatctgagtgcctactatgtaccaaacttaggaaaaacagtgttgagacagacaaaattactactctcatagaatttacattgtagcagaagagataca

SEQ ID NO: 7597 - DNA, 120 bp, synthetic construct
  source 1..120: mol_type = other DNA
taatggcaggtgaattacaagcaatagtttcctaattgtttttggatgctgcataagcaaaaacctaaactacataagcaatgatctatgaaaactgaacttacatgcatatggcttact

SEQ ID NO: 7598 - DNA, 120 bp, synthetic construct
  source 1..120: mol_type = other DNA
ccttggccttccagagtgctgggattacaggcatgagccaccgtgcccaggccaaagatgattaaatgggaaaataatactttttgtgtttttaacaaacagtgttgagacaaaagtata

SEQ ID NO: 7599 - DNA, 120 bp, synthetic construct
  source 1..120: mol_type = other DNA
acacgcctgagtcccagctacttgggaggctgaggcatgagaatcactggaacccaggatggcagaggttgcaatgagctgagaagagtgccactgcactccaccctgggcaacagagga

SEQ ID NO: 7600 - DNA, 120 bp, synthetic construct
  source 1..120: mol_type = other DNA
taccatattgcactcaacaaaacaatgactctatagtttggaagatgaggctgtcaaaaagctacctccactgtacataagtacctttaaaactcagaatagaggctcccactccttcag

SEQ ID NO: 7601 - DNA, 120 bp, synthetic construct
  source 1..120: mol_type = other DNA
ctgggtgcggtggctcatgcctataatcccaccattttgggaggtggaggtgggcggatcacttgaggtcagctcaagaccagcttggtcaacatggtgaaacatggtctctactaaaat

SEQ ID NO: 7602 - DNA, 120 bp, synthetic construct
  source 1..120: mol_type = other DNA
gaaatattttctagattggtattattatctttttttataggcttcataaaagatttcagaactggctgggcaaggtggctcatgcctgtaatcctggcactgtgggaggccaaggcgagc

SEQ ID NO: 7603 - DNA, 120 bp, synthetic construct
  source 1..120: mol_type = other DNA
tgggtcaataaagttgttttatttttagcaattagagtttatccgtagaaaatacaattaatacaacaaaagcatgggggtatcgctcccaggctcccagctttctcatcatatagatca

SEQ ID NO: 7604 - DNA, 120 bp, synthetic construct
  source 1..120: mol_type = other DNA
acttaaaaattagctgggcaaatgccatgtacctgtagtcctagctacttgaggggctgagatgagagattgcttgaacccagattgcaaggtaaaagtgaactatgatcacaccactga

SEQ ID NO: 7605 - DNA, 120 bp, synthetic construct
  source 1..120: mol_type = other DNA
ttttccttcattactgtttatgagtaataatcaactctttcttacatcctttttctatttccaatcccttctgcctcctcttggaccttctctttcttgcaaatggcttcccatctttga

SEQ ID NO: 7606 - DNA, 120 bp, synthetic construct
  source 1..120: mol_type = other DNA
atagagtgaaacaccatctcaaaaaaaaaaaaagacagggtctcactctgtcatctaggctggagtgcagtggtgtgatcatagctcactacagcttcgaactcctggccttaagtgatc

SEQ ID NO: 7607 - DNA, 120 bp, synthetic construct
  source 1..120: mol_type = other DNA
ttggcctaaatagaaactggtatcaggtcctttcctgtcttcacaatgattacaaagcgggcaaacactgacccttagaagggggaatgcataaggatatgcagaaatgaacagaaagga

SEQ ID NO: 7608 - DNA, 120 bp, synthetic construct
  source 1..120: mol_type = other DNA
gaataagttcaactttgagctgttatgactgagtcaacataaggcctcaagttcgttcaatatttattaaatgtctgctgtgtcaggaactgagaatacagcagagaatacgatccttac

SEQ ID NO: 7609 - DNA, 120 bp, synthetic construct
  source 1..120: mol_type = other DNA
agccccaagtgtcttctgatctataggtgtctcttactttttctcccttgtcatttatttttaaaattaggtcatttgacctgtggagtttcccccattctggattttgctgattgtata

SEQ ID NO: 7610 - DNA, 120 bp, synthetic construct
  source 1..120: mol_type = other DNA
aatacatcacccaagttcccatccctacctgtctatccacaaaaccaaggcattcctgagattagttcatttattatactaatataacaagtgtttattaagtatctactactatattca

SEQ ID NO: 7611 - DNA, 120 bp, synthetic construct
  source 1..120: mol_type = other DNA
cctttagctttcttctgaatgtgaacctttttttttttttttggagatggagtctcactcactctgctgctcaggctggagtgcagtggtgtggtcttggctcactgcaacctctgcctc

SEQ ID NO: 7612 - DNA, 120 bp, synthetic construct
  source 1..120: mol_type = other DNA
tggttactaaatccctatttctgagataagctacatttcaaagaaattctccgtaaaagaaaaattggattcagttatcataccagatggctttcattctcaccactgactcaattctga

SEQ ID NO: 7613 - DNA, 120 bp, synthetic construct
  source 1..120: mol_type = other DNA
aactgcaaattgtgctatactgtactatattaaaaggaagtgaaatatgatccctatcctagaactttccatacaaatgaatgtaaaacaccataaaaattaatcttaaggccgggcgcg

SEQ ID NO: 7614 - DNA, 120 bp, synthetic construct
  source 1..120: mol_type = other DNA
actgcactccagcctaggcagcagagcgagaccgtgtctcaaaaaaacaaaacaaaacaaaacaaaaagtctgggagcggtggctcacgcctgtaatcccagcactttcggaggccaagg

SEQ ID NO: 7615 - DNA, 120 bp, synthetic construct
  source 1..120: mol_type = other DNA
gtcagctagtaatcagtgttatggagaagcagcaggaatagaagataaagtgtgtgctgggggtgtggtaattttaaataggggtgtctggaaatgaaaaggtggtatttcaatcaagat

SEQ ID NO: 7616 - DNA, 120 bp, synthetic construct
  source 1..120: mol_type = other DNA
tgattttattttgccatttcaagtgatggagcttgttttagagctggaagaaaagccaaaatgccagttaatctaaactagattcctgccccagtgcagaaccaatcaagacagagtccc

SEQ ID NO: 7617 - DNA, 120 bp, synthetic construct
  source 1..120: mol_type = other DNA
tctcaatggcgcaaatggatccagttcttaagttctccctcccacaaaatcctgtctcctccccttcccagacatattcctggcacctcttcttccacaaggtcccatcctctcatacat

SEQ ID NO: 7618 - DNA, 120 bp, synthetic construct
  source 1..120: mol_type = other DNA
gagacggaagaggaagaattctacctgagtttgccataaagtgcctgccctctagcctctactcttccagttgcggcttattgcatcacagtaattgctgtacgaaggtcagaatcgcta

SEQ ID NO: 7619 - DNA, 120 bp, synthetic construct
  source 1..120: mol_type = other DNA
cgctcgctctcggcgcctcctcggccttggcgtccattctggccgtgctggaggagcccttcagcccgccactgcgctgtgggggcccctctctgggctggccgaagccagagccggctc

SEQ ID NO: 7620 - DNA, 120 bp, synthetic construct
  source 1..120: mol_type = other DNA
tcaaaacggaccaattagctctctgtaaaatggaccaatcaacaggatgtgggtggggtcagataagggaataaaagcaggctgccccgctgggtgccagtggctcacacctgtaatccc

SEQ ID NO: 7621 - DNA, 120 bp, synthetic construct
  source 1..120: mol_type = other DNA
tcttgggaacatggagtgctaggaaacgataactggaagactaggatgaaatctgcaagttaaaaaatgacactacccatatatccttctcatcccattctccttttttcgagaccccgt

SEQ ID NO: 7622 - DNA, 120 bp, synthetic construct
  source 1..120: mol_type = other DNA
tccttatggagacctggatatggtccagctaagctagaatctcccacttcctgttttctcttagttggcccaccagctggaggagctccagaatatctaaattaatttccaattgtgtaa

SEQ ID NO: 7623 - DNA, 120 bp, synthetic construct
  source 1..120: mol_type = other DNA
ccttccacctcagcctcccaaattgctaggattacaggcatgagccaccacaccgggccaattttttattttatttttgagacagagtctcgctctatcacccaggcgggagtgcagtgg

SEQ ID NO: 7624 - DNA, 120 bp, synthetic construct
  source 1..120: mol_type = other DNA
gcaagagatgtcgggagaagcaccagaagattccattgaaatcttgctccccagaagggtgggaacagtagggacagaaaactgctgtggttcattatgtttcatccccatttcgcttca

SEQ ID NO: 7625 - DNA, 120 bp, synthetic construct
  source 1..120: mol_type = other DNA
gttttaaggaagtcccagcaaataatatgggatagaggtgagatccaaacctaagcagccctggctctaaaacccactgaacaaagctgcctctccaactagcatcagaaagaactaggt

SEQ ID NO: 7626 - DNA, 120 bp, synthetic construct
  source 1..120: mol_type = other DNA
tctcctaggttagtcccagaggacagatttgaagtttgaaaacagaaagtaactgccaaaagggattatttagggcagagattgtccccttttattatgctttaggtcctcagtggtgag

SEQ ID NO: 7627 - DNA, 120 bp, synthetic construct
  source 1..120: mol_type = other DNA
tcctttttcacttcctaccttcctccccacctctgggtgtaccctcccctgagctcagcctgtatttctatctgctggccacttaccagccagtcctttcatctacaatgccctttactc

SEQ ID NO: 7628 - DNA, 120 bp, synthetic construct
  source 1..120: mol_type = other DNA
tggccatggaatgaagcacaaaggagagcctgctagttcctaacccacgcctgaagacgccttaggcggttctgcggaccccgtgcacttccaccttcagccagaaggccttctctggtg

SEQ ID NO: 7629 - DNA, 120 bp, synthetic construct
  source 1..120: mol_type = other DNA
gaccaaggcgggagggtcacttgagaacaggagttcaaaaccagcctgggcaacaaagtgaggcccgtctctaacaaagacaatgagaaataaatctaaaaattggatagactgaaacag

SEQ ID NO: 7630 - DNA, 120 bp, synthetic construct
  source 1..120: mol_type = other DNA
tctgacaaagggctaatatccagaatctacaaagaacttaaacaaatttacaataaaaaatcaaacaaccccatcaaaaagtgggcaaaggatatgagcagacacttctcaaaagaagac

SEQ ID NO: 7631 - DNA, 120 bp, synthetic construct
  source 1..120: mol_type = other DNA
gtgtgagttggaagggaggcattgaggatcagccatttaaagcagcatacaaggatgttcaaggctcgagatccacaggtgtattttcagaacctgaatttcctggcggggcacagtggc

SEQ ID NO: 7632 - DNA, 120 bp, synthetic construct
  source 1..120: mol_type = other DNA
ccaaacaaacaaaacccctgaacttccctgcgggcacattttctctggcagcctttttcaatgagagctatgttttctccgatactatatggcctgcggaccgctcagctttcattccag

SEQ ID NO: 7633 - DNA, 120 bp, synthetic construct
  source 1..120: mol_type = other DNA
gaaagccagtggtacaaccccctccccacaaccttcaccacctctagcccctccaatgaaaagcactaattgcctatatacaacccctttttgtttgaaatatctagagtaatttctgtt

SEQ ID NO: 7634 - DNA, 120 bp, synthetic construct
  source 1..120: mol_type = other DNA
gtacccagtagtttttttggctcctctccctcctcccacccttcaccctcaggtagggcccagtgtctgttgttcccttctttgtgtttatgagttctcatcatttagctcccacttata

SEQ ID NO: 7635 - DNA, 120 bp, synthetic construct
  source 1..120: mol_type = other DNA
cctctgaactgctgcatttcctgtctgcatcatgtttgccctaatcagacatcgccttatttcatcatcctttaaaaaatgctttatttctctggcagatttcattggaatcagaatttt

SEQ ID NO: 7636 - DNA, 120 bp, synthetic construct
  source 1..120: mol_type = other DNA
cataaaaatgtgaaattatgtaaatatgccaaaataggaacctggaggtgcttggaatccagactttgggagcccagcagtgcaaggatctctactcttggcttctttttttcttgagat

SEQ ID NO: 7637 - DNA, 120 bp, synthetic construct
  source 1..120: mol_type = other DNA
gccttggacacttgggcaggtcacctacgtccttctagccctgtatccttatctgtcagatgatgattttaaaaactatgcttccatggattgctgggctaaatcatataagactgtaaa

SEQ ID NO: 7638 - DNA, 120 bp, synthetic construct
  source 1..120: mol_type = other DNA
agcgggggatggggagaggctagggcagtacacgtgaatggagaggtagccccaccagtatgttttctgaaatacagtcccgcagagggcagtcttgggaaattactgctctcacacact

SEQ ID NO: 7639 - DNA, 120 bp, synthetic construct; identical to SEQ ID NO: 650
  source 1..120: mol_type = other DNA

SEQ ID NO: 7640 - DNA, 120 bp, synthetic construct
  source 1..120: mol_type = other DNA
cagcctctgatgaagcaggagataaagaagccaagtctgatgaataccatagaccatgtcttatcagtggtccctgtctcccttctttacaattcagaggaattttttttctttcttttt

SEQ ID NO: 7641 - DNA, 120 bp, synthetic construct
  source 1..120: mol_type = other DNA
tcaacatgtgaagatatgggtacttagtctcttaaggaaaatttgcttccaaattttaagctggaaagtcactgggataacttttaaaaagaattacagtacgtggctttttagattttt

SEQ ID NO: 7642 - DNA, 120 bp, synthetic construct
  source 1..120: mol_type = other DNA
cctgggttcaagcaattctgccttagcctcccaagtagctgagattacaggctgcgccaccgcgcccggctaattttgtatttttagtagcgacggggtttcttttttattttgagacag

SEQ ID NO: 7643 - DNA, 120 bp, synthetic construct
  source 1..120: mol_type = other DNA
actccagcctggcaacaagagggaactccatctcaaaaaaaaaaaaaatcaccagactaatatttaccttgagtgttatgcgcatccatgtgaagagaccaccaaacaggctttgtgtga

SEQ ID NO: 7644 - DNA, 120 bp, synthetic construct
  source 1..120: mol_type = other DNA
tgtttcttccatagttcagtcatccttgatattttgcgggggactggttctaggatactgcccccacacaccagaatctgtgaacgctcaatcccttacatataatggtgcagtatttga

SEQ ID NO: 7645 - DNA, 120 bp, synthetic construct
  source 1..120: mol_type = other DNA
aatcagtatcaatactagctttagggtgaaggcatagccaaattggaaactgtggacaaatttcagaaactgcaccaaaacttacaaacctcaaatcctagttttcttcctttctctttg

SEQ ID NO: 7646 - DNA, 120 bp, synthetic construct
  source 1..120: mol_type = other DNA
cagttttagtactaaaagtcctaaatcccaggaaacctctcggttccaggcaaaccaagtggtttggtcaacctgacagggaggtgtcctttatgaggtatggcaagagtgaaggcttgg

SEQ ID NO: 7647 - DNA, 120 bp, synthetic construct
  source 1..120: mol_type = other DNA
acatgcattatttcctttaaatatcatcataaataacaccctggaataggtaatattctccccaggtagaaactggtgcttagaggttatgtaactttcccaaggccacatagtgtgtga

SEQ ID NO: 7648 - DNA, 120 bp, synthetic construct
  source 1..120: mol_type = other DNA
actgtactccagcactccagcctgggtgacagagcaagactccgtctcaaaaataaaaaaataaaaaaaaataagctgggcatagcagtgggtgcctgtaatcccagctactcgagaggc

SEQ ID NO: 7649 - DNA, 120 bp, synthetic construct
  source 1..120: mol_type = other DNA
atcctgctaaccctctaaccttatttcctgtaaattagacttataggcctaatcaaattcaggtttaaccttttggcaagaacactttacagatggtactgtgtactcttattagatcac

SEQ ID NO: 7650 - DNA, 120 bp, synthetic construct
  source 1..120: mol_type = other DNA
ccaagatcacaccactgcactccagcctaggtgacagaggaagactctgtctcaataaaaagaaaataaggccaggcacgggggctcacgcttgtaatcccagcacttcgggaggccaag

SEQ ID NO: 7651 - DNA, 120 bp, synthetic construct
  source 1..120: mol_type = other DNA
ttaaagagaaaaaataagcagggtaaggggaaacaggtagtgtaatatgtatagggggtaggtgtacatggggggagtcaggaaaggtttcactgaggtgagactagaggacagcttaat

SEQ ID NO: 7652 - DNA, 120 bp, synthetic construct
  source 1..120: mol_type = other DNA
acttagccctaaatgtgaacttttgaaatggattttttgggtaaagtccaggcaggacatcaaagaacaagtatcctggtagtgcgacaagaatgtggttcttttcattaaatatttaac

SEQ ID NO: 7653 - DNA, 120 bp, synthetic construct
  source 1..120: mol_type = other DNA
ataatctacactatataaacacactgtaaacataaactgtgaacagatgaaaactccaatatgtaaaaaggtaatgaatgttgaaggaagactgtgaaaagggaaaaggaaaaaaattaa

SEQ ID NO: 7654 - DNA, 120 bp, synthetic construct
  source 1..120: mol_type = other DNA
acaagagcgaaactctgtctcaaaaaaaaaaaaaaaaaatattaatctaacagaaaataggaaaaaagcaatgaaaagctagaaaacatacaatagttgactgaaaataaaaatttagca

SEQ ID NO: 7655 - DNA, 120 bp, synthetic construct
  source 1..120: mol_type = other DNA
aactaggtcccaagtactgttttaactactgaatatacagatgtacataaacgaaacaaaaatctctgctgccctggagtttacattctgtgggactagagataaaggatagatacatta

SEQ ID NO: 7656 - DNA, 120 bp, synthetic construct
  source 1..120: mol_type = other DNA
aaatgaagaaaaacaaaggctcactccaagagtcagacttgctaaaggctttgatgatttgcagtattcttatttaaatgtacagagccagcttcagaggaaggttcttccaaagaccta

SEQ ID NO: 7657 - DNA, 120 bp, synthetic construct
  source 1..120: mol_type = other DNA
ggctgtctgcttgtggatttcatttctgccttttagtttttactttttctttctttggaggcagaaattgggcataagacaatatgaggggtggtctcctcccttattcccccactttga

SEQ ID NO: 7658 - DNA, 120 bp, synthetic construct
  source 1..120: mol_type = other DNA
ggtgggcctaaacggtctgcaactttggaaatttactgaatggatttttctctgtgtggtttgaactccaccatgtagtcttcctacaggaagggtgaagtccttctccactcttgctat

SEQ ID NO: 7659 - DNA, 120 bp, synthetic construct
  source 1..120: mol_type = other DNA
ctgggtgtgactggagcagagcttgtcgtcttcttcagagtcactttgcaggggttggcgaagctactcccgtccacgtacccctcacagtctactgatgtttaaggatagtctcggagg

SEQ ID NO: 7660 - DNA, 120 bp, synthetic construct
  source 1..120: mol_type = other DNA
caggcagcccacatctggtcgactggaggaccaccttagtggaaaggggacaatctgggcctctggcctgccatgtgcacaagcataacaattgcttttgtttaacgtgcagatggaata

SEQ ID NO: 7661 - DNA, 120 bp, synthetic construct
  source 1..120: mol_type = other DNA
agcagtcttggtggttagcaacacaaggtagggtccttccaggctggctcgagtttttcttctttccacctttcgatgagaatgtgatcttcaggctggtgctggtttactagaaattct

SEQ ID NO: 7662 - DNA, 120 bp, synthetic construct
  source 1..120: mol_type = other DNA
ccagttaatttgtttcaggacaagaatttaccatataatactctttttatataaattccgccccccctttttttccttttttttttcgaagatgataaccattcttttccaaagcgaacc

SEQ ID NO: 7663 - DNA, 120 bp, synthetic construct
  source 1..120: mol_type = other DNA
gacaaaacaccacgctcacaccacaaacacaccacaaaacaaagaaccggtaaaaagggcgcacacacagttttgcagtttgcaccaaaccaaaatcagagtatccagaaatccaagcca

SEQ ID NO: 7664 - DNA, 120 bp, synthetic construct
  source 1..120: mol_type = other DNA
ttttgccatttcaagtgatggagctggttttagagctagaagaaaaccaaaatgccagttaatctaaactagattcctgccccagtgcagaaccaatcaagacagggtccctgtctttca

SEQ ID NO: 7665 - DNA, 120 bp, synthetic construct
  source 1..120: mol_type = other DNA
cttttaaaaaggtttagaaaaatgacaacttcattttatcattttaaaataaggtaaattgggctgggcgtggtggctcacgcctgtaatcacagcacttagggaggccgaggcgggcgg

SEQ ID NO: 7666 - DNA, 120 bp, synthetic construct
  source 1..120: mol_type = other DNA
ccatccccggcgaccagctgatgttcttatacacatggtgtccccttcaaggcacattccagttcctatcaggaggattcctcctcggacacactgtgcccccaacctgatccttagtgc

SEQ ID NO: 7667 - DNA, 120 bp, synthetic construct
  source 1..120: mol_type = other DNA
ggctggggctgccggacgcggtgctactcaccggatgaagtgagggtctcaccccaacgcggccttagcttcctcggaaggaccgaacaccttggcggcagccgaggaaaggggttccac

SEQ ID NO: 7668 - DNA, 120 bp, synthetic construct
  source 1..120: mol_type = other DNA
aagcttttgtaagatcggctcgctttggggaacaggtcttgagagaacatcccttttaaggtcagaacaaaggtatttcataggtcccaggtcgtgtcccgagggcgcccacccaaacat

SEQ ID NO: 7669 - DNA, 120 bp, synthetic construct
  source 1..120: mol_type = other DNA
tttcttggaaacacgatcactttaacggaatattgctgttttggggaagtgttttacagctgctgggcacgctgtatttgccttacttaagcccctggtaattgctgtattccgaagaca

SEQ ID NO: 7670 - DNA, 120 bp, synthetic construct
  source 1..120: mol_type = other DNA
tggccaacatggtgaaaccctatctctactaaaaatacaaaaaatgtgctgcgtgtggtggtgcgtgcctgtaatcccagctacacgggaggtggaggcaggagaatcgcttgaaccctg

SEQ ID NO: 7671 - DNA, 120 bp, synthetic construct
  source 1..120: mol_type = other DNA
tttttaacaaggacactcagtggtaaggaatataatggctactagtattagtttggtgccactgccataactcatgcaaatgtgccagcagttttacccagcatcatctttgcactgttg

SEQ ID NO: 7672 - DNA, 120 bp, synthetic construct
  source 1..120: mol_type = other DNA
ctttaactgttctgggtcacaaatttgtctgtcactggttaaaactaaggtgggattttttttttaaatagatttaggaccaataagtcttaattggtttgaagaactttcttcagaagc

SEQ ID NO: 7673 - DNA, 120 bp, synthetic construct
  source 1..120: mol_type = other DNA
ttggttgttttgtgtctgaaagggaccaatagacaaggcaaaaaggcagactaaaggcaggcattgaatgccaagctaaagaaattgaatttgtttggttggttggtgagcagagaaatc

SEQ ID NO: 7674 - DNA, 120 bp, synthetic construct
  source 1..120: mol_type = other DNA
agcctaatgatcaaacagcagtctttggagataacgtttttcaaaatgtcatgtctgtgccattagaatcttctagactgctcattgaaaggacagattccaggccccactctgaatctc

SEQ ID NO: 7675 - DNA, 120 bp, synthetic construct
  source 1..120: mol_type = other DNA
ttcctaaagttctatgaggaattgtgctgtttctgcctctcagcagtccttccttttgcattaaatcataggcatttctgttaccattcttcagcttattaatgagatcctcaggttatt

SEQ ID NO: 7676 - DNA, 120 bp, synthetic construct
  source 1..120: mol_type = other DNA
catacaggtttgtgtgtgaatatattttcaactcattttggttcacaccaaagagcacgattgtgggatcatatagtaagagtatgtttagttttatgagaaactacaagctttcttcca

SEQ ID NO: 7677 - DNA, 120 bp, synthetic construct
  source 1..120: mol_type = other DNA
ctaagagtaataataagtgactcaggtgccaaatttgtagttaccatcaactattggaaccatatgagtacttaatgccctggagagtcaaatataatctactctaatacagaaaataga

SEQ ID NO: 7678 - DNA, 120 bp, synthetic construct
  source 1..120: mol_type = other DNA
ttaagtaaattgtgaaaggccttcatactatggagtttgacttgatcttgaaaagtaagatcttgaaaggtttttagcacaagtgatattgtcagatctggtacattggtaggttttcag

SEQ ID NO: 7679 - DNA, 120 bp, synthetic construct
  source 1..120: mol_type = other DNA
atgtaagttgttgttcttgtgatgttgaattggctggttttctgtatattctgtgattttttaagtaacaaaaataacagtggtgaaaagcagtaagtcagtccttgaattatcaattta

SEQ ID NO: 7680 - DNA, 120 bp, synthetic construct
  source 1..120: mol_type = other DNA
caagttctttagctacaccacccacccttagttctactgtgctcataggtaataatagcaaatgtgtatttacaagaaagagcagatgaggttgataattgtcatctctaatacttctgt

SEQ ID NO: 7681 - DNA, 120 bp, synthetic construct
  source 1..120: mol_type = other DNA
aaaaataaaaaaattggccaggtgtggtaacacacacctgtaatcccagctacctgggggctgaggcatgggaattgcttgaacctgggaggcagagggtgcagtgagccgagattgtgc

SEQ ID NO: 7682 - DNA, 120 bp, synthetic construct
  source 1..120: mol_type = other DNA
tttgtctcagccacattttttttgtctaagaagatactgggccagatcattgtttctcaaattgcagattatgacctgttcatagttgtgaaacttattttgtgagtcgtatatgctctt

SEQ ID NO: 7683 - DNA, 120 bp, synthetic construct
  source 1..120: mol_type = other DNA
atctgactttccaactcattgtggacagtattaccataaagtaatgatcaccaagccatatcttaccaccttgtgagtagtactaaggaagtaagtatagtttattcactgtgttgattg

SEQ ID NO: 7684 - DNA, 120 bp, synthetic construct
  source 1..120: mol_type = other DNA
caggggatcccttactgaagttttcgtttaggctctatgctttctggcgtaatatgtagctgtcaatcaaaacaacctgttcatgttttctacccacaaatgtaataccttttctacttc

SEQ ID NO: 7685 - DNA, 120 bp, synthetic construct
  source 1..120: mol_type = other DNA
ttgaaggattgctcctcttttcttaaagagaaaatatattacctttcctttcttgactactgaagtagtattttatctcaaagtattgagagtagaaactaacttggtgtgcctgtgatc

SEQ ID NO: 7686 - DNA, 120 bp, synthetic construct
  source 1..120: mol_type = other DNA
gctttaggttcattggaatcaggggaatcaggctttactagaagaacaggagaaggggtgactgaccgaaaaataaaatgccaagtactcagaataaccctttaaatactgatatgtaat

SEQ ID NO: 7687 - DNA, 120 bp, synthetic construct
  source 1..120: mol_type = other DNA
tttatttatgctatacatgatgaaacatcttataaaggaaaaaaaataccgaaagaccaaaaatcagaactaattaactgttcagcccagtttgaagcaaatgcttttgaagcaccactt

SEQ ID NO: 7688 - DNA, 120 bp, synthetic construct
  source 1..120: mol_type = other DNA
gacagtttttgactcataaacattcagagcttggctagctaattcctgctttaatttaaaaagtgtttattatatgcaaattggacaactcatataaatatgtggtgctacttactatgt

SEQ ID NO: 7689 - DNA, 120 bp, synthetic construct
  source 1..120: mol_type = other DNA
aaaccccatctctatgaaaaaaaacaaaaattatccagatgtggtggcatgtgcctgtaatcccagctactcgggacgctaaggcaggagaatcacttgaacctgggagatggaggttgc

SEQ ID NO: 7690 - DNA, 120 bp, synthetic construct
  source 1..120: mol_type = other DNA
ttatttttattttttagagactgtctcattctgttacctagtctggagtgcactagtgtgatctcagctcaccgtagcctcaccctcctgggctcaagcagtccttgcacctcaccctcc

SEQ ID NO: 7691 - DNA, 120 bp, synthetic construct
  source 1..120: mol_type = other DNA
gaaacagacttgacttgtgtaaacgaacccattttcaagaactctaccatggttttatatggagacacaggtgataaacaagcaacccaagtgtcaattaaaaaagatttggtttatgtt

SEQ ID NO: 7692 - DNA, 120 bp, synthetic construct
  source 1..120: mol_type = other DNA
atcttaaagaccacttctgaggaatgcagagatgctgatcttcatgtcataatgaatgccccatcgattggtcaggtagacagcagcaagcaatttgaaggtacagttgaaattaaacgg

SEQ ID NO: 7693 - DNA, 120 bp, synthetic construct
  source 1..120: mol_type = other DNA
acatagttaaacacaaaatactgaaagaaagtgtcccagttggtactggaaatcaactagtgaccttccagggacaacccgaacgtgatgaaaagatcaaagaacctactctattgggtt

SEQ ID NO: 7694 - DNA, 120 bp, synthetic construct
  source 1..120: mol_type = other DNA
tttgccaaacgaaaattatggcaggttgttacgaggcattggatgattcagaggatattcttcataactctctagataatgatgaatgtagcacgcattcacataaggtttttgctgaca

SEQ ID NO: 7695 - DNA, 120 bp, synthetic construct
  source 1..120: mol_type = other DNA
gtttctccatatctctctcaatttcaacaagacaaacaacagttggtattaggaaccaaagtgtcacttgttgagaacattcatgttttgggaaaagaacaggcttcacctaaaaacgta

SEQ ID NO: 7696 - DNA, 120 bp, synthetic construct
  source 1..120: mol_type = other DNA
tgaaactcttaacaaaacctgcataatactaacttaactgttttcatatacatagcaagttcagactctgacttatatgaactttaaaagttggtttccgggaggccgaggcgggcggat

SEQ ID NO: 7697 - DNA, 120 bp, synthetic construct
  source 1..120: mol_type = other DNA
gaaatagattgttagatttcatcattgtgggaacatcatagagtatacttacacaaacctaggtggtatagcctactatatacctaggctgtatggtatagcttattgctcctaggctgc

SEQ ID NO: 7698 - DNA, 120 bp, synthetic construct
  source 1..120: mol_type = other DNA
gtattacagagagacaccgaagttagtctcctcattcaaaaagtgccttttgcccctaagtcattctggtggatacagatttacttaatcaagtgttgtccaggtcacattcaatatagg

SEQ ID NO: 7699 - DNA, 120 bp, synthetic construct
  source 1..120: mol_type = other DNA
tctggtagcatctgtttatcctatttaggatttatcctgtttagaccctgttaaatagtggtgttttaaagtggtcaaaacagaacaaaaatgtaattgacattgaagactgactttact

SEQ ID NO: 7700 - DNA, 120 bp, synthetic construct
  source 1..120: mol_type = other DNA
tttcatgaaaaaatagctagtatagctcacaactcaatcatttaagtgtgttttcttgagaaacgcactgaagtatgcaagcataatataccaacagtacaaatatcaacagtgaaaagg

SEQ ID NO: 7701 - DNA, 120 bp, synthetic construct; identical to SEQ ID NO: 707
  source 1..120: mol_type = other DNA

SEQ ID NO: 7702 - DNA, 120 bp, synthetic construct
  source 1..120: mol_type = other DNA
atttagtaagcatgagaaagctaaaacctgacactagagcaaacagagatgctttcccctaaaaaacctgaaaaagattcaaattggcagcaacaggtacttctgaaggtgaagtagaaa

SEQ ID NO: 7703 - DNA, 120 bp, synthetic construct
  source 1..120: mol_type = other DNA
attggaagaaagctactatgaaacatagtcaccaaagtacaaaatccatagcagaaaggaacctagaggaaatcgactatgaaaacttcataaaaacctactaatattctcaggtaagaa

SEQ ID NO: 7704 - DNA, 120 bp, synthetic construct
  source 1..120: mol_type = other DNA
atattgaagggagatcccagagtagctgtgttgctaagtctagaaaggcagctagactactttggaactgaagaagataagagactttggaagagtttgccttcaagataaaaataaagc

SEQ ID NO: 7705 - DNA, 120 bp, synthetic construct
  source 1..120: mol_type = other DNA
aaaagaaccagaggcttattctccagagaggatacagtagaaggtgaacacactaggcacagttgaaggcagaagcaactacttgaaagcaagaagaagttaatatatgcatattgaatg

SEQ ID NO: 7706 - DNA, 120 bp, synthetic construct
  source 1..120: mol_type = other DNA
tgaacattgatagtgagaggtgaagctggctgggcttctgggtcgtgtggggacttggagaacttttctgtccggctaaaggattgtaaacacaccaatcagcgctctgtgtctagctaa

SEQ ID NO: 7707 - DNA, 120 bp, synthetic construct
  source 1..120: mol_type = other DNA
ggcaagagtgtgtgtgtagtaaggtagaagctgtgttgacagagctgaattttcattttctgtaggggtacttcaagagaaaaagtcaagaagaaacatgtcacttagacatataaatat

SEQ ID NO: 7708 - DNA, 120 bp, synthetic construct
  source 1..120: mol_type = other DNA
atgtaaagaatgcttggttaaagatggcattccaaatcttggaatttggttgggggacagagggaaacaaaaagaaatggggaggttaggaccaaataggaagcttcctgtatgtcattt

SEQ ID NO: 7709 - DNA, 120 bp, synthetic construct
  source 1..120: mol_type = other DNA
gtaggaattcattaaatagttgatggatgggcgaacggataactaaaggaacaacttcaagttccaggtatccagggtttggtaaaaggaaatctggggttttcaacaagatatcaagta

SEQ ID NO: 7710 - DNA, 120 bp, synthetic construct
  source 1..120: mol_type = other DNA
ctaaataaaaagggcactttaaaaaaggtataaataggtagaagagagaaaagggagcgaggtgggataattgaaagaggggatctcctgtggagactgaggtattaggcggagtagaga

SEQ ID NO: 7711 - DNA, 120 bp, synthetic construct
  source 1..120: mol_type = other DNA
gcagtagctgtaactttcacaaagtgtgaagaagaacctttaggtattgtatgacaatttgtgtgatgaatttttgcctttcagttagatatttccgttgttaaataatgtcctgatggt

SEQ ID NO: 7712 - DNA, 120 bp, synthetic construct
  source 1..120: mol_type = other DNA
ctgaatagctgggattacaggcatgtgccaccacacctggctacttttgtgttttttttacttttatatattttttttttgtttagtagagacagggtttctccattttggtcaggctgg

SEQ ID NO: 7713 - DNA, 120 bp, synthetic construct
  source 1..120: mol_type = other DNA
gattccaaagcaaagagtctgactccagagtcaaactctgaacaaacaaaaagacactttgggttagatatcctggggtgaaagcaagcactttgaaagtaagccaagcctgtgtacaga

SEQ ID NO: 7714 - DNA, 120 bp, synthetic construct
  source 1..120: mol_type = other DNA
ataccctccaatgatggaaaggctggaaaagaagaattttataggtactctatgcaaaaagattgtgtgttaacttttatgtattccctcatccctctttcttctcttaactgtctctcg

SEQ ID NO: 7715 - DNA, 120 bp, synthetic construct; identical to SEQ ID NO: 720
  source 1..120: mol_type = other DNA

SEQ ID NO: 7716 - DNA, 120 bp, synthetic construct
  source 1..120: mol_type = other DNA
gttgtattattttctcgtactaaatagactgcataaggtagaagttaagaatgattgccctgtagtctaagtggaaatgtggaggctttcgttagttttttctgataattcagcaaatct

SEQ ID NO: 7717 - DNA, 120 bp, synthetic construct
  source 1..120: mol_type = other DNA
ctgtgtccagcctgatctgacttatttttgaaaaaataattctggctgtttgttgaggagaggggcaaagatggacacacagagaccacttaagctattgcagaaatacatgtgagaggt

SEQ ID NO: 7718 - DNA, 120 bp, synthetic construct
  source 1..120: mol_type = other DNA
gatgctgtgagtggatagatatgagggtgggagcttatggaagttctcttttgattacttctgttgtcttagtgctaagagtatgaatgagaaaggaggagttagagatttgagaacaga

SEQ ID NO: 7719 - DNA, 120 bp, synthetic construct
  source 1..120: mol_type = other DNA
taatagatgcctaagcccagaaagggtgcttcttcaactaaaatacaggcaagtttaaagcattacattacgtaatcatatacggcagtatggttaaggtttctgtgtagtctgtgactt

SEQ ID NO: 7720 - DNA, 120 bp, synthetic construct; identical to SEQ ID NO: 724
  source 1..120: mol_type = other DNA

SEQ ID NO: 7721 - DNA, 120 bp, synthetic construct
  source 1..120: mol_type = other DNA
cctgctatggaaaatgaggatttcattgtcttactccaacactgctacatatttctctaccctcttccccatcttccctctactaatacagcatgatttttagtgaaatctgtattcagt

SEQ ID NO: 7722 - DNA, 120 bp, synthetic construct
  source 1..120: mol_type = other DNA
gctcctgctaattgcagtgcattcttttttttttttttttttttttttttttgagacaacgtctcactgtgttacataggctggagtgtttcattttgtacagatgaggtctccctgtgt

SEQ ID NO: 7723 - DNA, 120 bp, synthetic construct
  source 1..120: mol_type = other DNA
gtccctagtggtatataccccaagaacaacaatagcaacaacaactataaaatgaaacaaaatcttaagctattgttagtaatcatattgctggtggtagtgttggtattcctattctga

SEQ ID NO: 7724 - DNA, 120 bp, synthetic construct
  source 1..120: mol_type = other DNA
atttgagcatcagaaaggataataacaggctgggcacactggcccacacctgtaatcccaagattttgggaggccgaggcaggcagatcacttggggtcaggagtttgagaccagcctgg

SEQ ID NO: 7725 - DNA, 120 bp, synthetic construct
  source 1..120: mol_type = other DNA
tacagcccttttcttctagttcttaaagtgaatttgtgtctaccaacataattttcaagagacctttattattccctaaatgtttttcttttttttgtgacattcagttcttgtttcata

SEQ ID NO: 7726 - DNA, 120 bp, synthetic construct
  source 1..120: mol_type = other DNA
tagggtcctgggttcttttttagtatgagggagagacagccacctggctacttgggataggaaagaaaatctggtgtttcaactacgtttgtacaaaatgtcaaccatttcttcctattt

SEQ ID NO: 7727 - DNA, 120 bp, synthetic construct
  source 1..120: mol_type = other DNA
aatcattctcaggctgctttgtcatttacttgttccacaaattcttagcttccaaaattttggtgatacctcatttcctattctctctagttgcctttgtccatgtagattttttgagga

SEQ ID NO: 7728 - DNA, 120 bp, synthetic construct
  source 1..120: mol_type = other DNA
ttttttggtgtgtgtaacacattattacagtggatggagaagacatcatctggattatacatatttcgcaatgaaagagaggaagaaaaggaagcagcaaaatatgtggaggcccaacaa

SEQ ID NO: 7729 - DNA, 120 bp, synthetic construct
  source 1..120: mol_type = other DNA
ctggtggaggatctttcctcaatgttgatgcctgctgagtgatcagagtggtagttggtgaaggttggggcagttgtggcaatttcttaaaataagacaatggcatttgcaacattgatt

SEQ ID NO: 7730 - DNA, 120 bp, synthetic construct
  source 1..120: mol_type = other DNA
agaaattggccaaaacaaaggggccacagtccccatgcaagtccgaaacctagccaggcaatcaatgaatcttttttttttttttgagacagggtcttgctctgttgtccaggctagagt

SEQ ID NO: 7731 - DNA, 120 bp, synthetic construct
  source 1..120: mol_type = other DNA
tctatgagggctctgcccccacagcagacttgtgtgtggacatcctggcacttccatacatcctctgaaatctaggcagaggctcccacagctgaactcttgtcttctacatacccacag

SEQ ID NO: 7732 - DNA, 120 bp, synthetic construct
  source 1..120: mol_type = other DNA
tatagcagtcccccactcctggtaacaattatctgtattagttcatcctcatactgctataaaaaatacctgagactgggtaatttgtaaaggaaaaaggtttaattgattcacagttcc

SEQ ID NO: 7733 - DNA, 120 bp, synthetic construct
  source 1..120: mol_type = other DNA
cgcctcggcctcccaaagtgctgggattacaggtgtaagccaccgtacccggcaagacatgtttcttaaataataagacttgaaagttgaaatgactccatgatccatgggccacaaaat

SEQ ID NO: 7734 - DNA, 120 bp, synthetic construct
  source 1..120: mol_type = other DNA
gctttgcaagatggtgcagagctttatgaagcagtgaagaatgcagcagacccagcttaccttgaggtgagagagtaagaggacatataatgaggcttgatgattattcaaggtgagaag

SEQ ID NO: 7735 - DNA, 120 bp, synthetic construct
  source 1..120: mol_type = other DNA
acgtggtgaaaccccgtccctattaaaaatacaaaattagccaggcgtggtgcacatgcctgtaatcccagctgttcgggaggctcaggcaggagaatcgcttgaatccaggaggcagag

SEQ ID NO: 7736 - DNA, 120 bp, synthetic construct
  source 1..120: mol_type = other DNA
ggttctaagtgcctatgagtctatgagatttgactttattaaagttatctttgtaattctttgaggagaacgtaggcatccatttttaaaacagtcctgttagaatttgttttcagtaac

SEQ ID NO: 7737 - DNA, 120 bp, synthetic construct
  source 1..120: mol_type = other DNA
ctttttattccaatatcttaaatggtcacagggttatttcagtgaagagcagttaagagccttgaataatcacaggcaaatgttgaatgataagaaacaagctcagatccagttggaaat

SEQ ID NO: 7738 - DNA, 120 bp, synthetic construct
  source 1..120: mol_type = other DNA
acactctacttttcattgtacagggctatttattatctcagagtcaagcttttttttttttttttttttccccgagatggagtctcactctgttgcccaggctggagtgcagtggcgcta

SEQ ID NO: 7739 - DNA, 120 bp, synthetic construct
  source 1..120: mol_type = other DNA
tagacagtgttttaagtgctgggtacatagcgattaacaaaacagataagaatccctaccctcatagagcttacattatgaggttgggggagggagattacaaacaaagaaataagtaat

SEQ ID NO: 7740 - DNA, 120 bp, synthetic construct
  source 1..120: mol_type = other DNA
acagaggaatggccagagaggttggaggaatactggagtgaggtatgctgaaagccaagagaaaaaaagaattgtcgagtagtgagagtgattaagtctgccaaatgctatttcatagaa

SEQ ID NO: 7741 - DNA, 120 bp, synthetic construct
  source 1..120: mol_type = other DNA
aagaaaagggtgttgaaggtttgagagaagaggaaaggcatgaaatcattatctaagaaagtggtagagtaaatggactaagtaaacacatcatgactgccagggcccactggaggttta

SEQ ID NO: 7742 - DNA, 120 bp, synthetic construct
  source 1..120: mol_type = other DNA
caatggatgcctgtagcaaggaacagtaatgaatgacagtctgataacacgaggttcaaaactgagtgtttttagagtgggaggagcagcaatgaagcatgaggaagacatctgcctcat

SEQ ID NO: 7743 - DNA, 120 bp, synthetic construct
  source 1..120: mol_type = other DNA
aatcaccgcctgtcgcctggatggctttaaattagcaacgggggatcacaagtcattttctttgcctaccctaaggcaggctgtcaggctaaatgtagatgatagatatagtaaggttct

SEQ ID NO: 7744 - DNA, 120 bp, synthetic construct
  source 1..120: mol_type = other DNA
ccactttcatatttcatttgattttctgttaacgtgctaatcaaggctgaggtgagtggatcacctgaggtcaggagttcaaaaccagtctggccaaagttgcgaaaccgcttctctact

SEQ ID NO: 7745 - DNA, 120 bp, synthetic construct
  source 1..120: mol_type = other DNA
acctttgcttcattgtaaggtggtggtctcccaatgtacatgtctgtgtctaaatttccccatatattaggacaccagtcattatattagagcctgcccatatgtgtgggtggaggatta

SEQ ID NO: 7746 - DNA, 120 bp, synthetic construct
  source 1..120: mol_type = other DNA
gctgttttctctttatctctttgtcttgtgtctttatttcttacaatctcttgtctccgcacacgagaacacccgctaagccgcatagggctggaccctacacatatgacctcatctttt

SEQ ID NO: 7747 - DNA, 120 bp, synthetic construct
  source 1..120: mol_type = other DNA
cacttacaatgaaggtaattattgatatgccagcattcaactttgtcattttattatttgttttctatttgtttctcctgcttttcattcctccatttctcttttcttgccttcctgaag

SEQ ID NO: 7748 - DNA, 120 bp, synthetic construct
  source 1..120: mol_type = other DNA
ccttatgtcagtcagtcctggtcacctgtttggtccctggcagttttttctcatttctgttcagaagaagaaaaaggtaaagattcttcagatttaggaataacagaattctcaaaaatg

SEQ ID NO: 7749 - DNA, 120 bp, synthetic construct
  source 1..120: mol_type = other DNA
cctgtacacttctgaataagccacctactagcctcagtaatacaatgatctcttcaaggacagggactctgtttggatttctacttccacttctgacataatgggttgaagcaggggtca

SEQ ID NO: 7750 - DNA, 120 bp, synthetic construct
  source 1..120: mol_type = other DNA
ccgcaccatggcatccactccaggtggaatcggtgacagtggttttataaattgctaagtcctttattgtttcagtgacattttctaaaaggaattaaaagctttgaagaattctatgca

SEQ ID NO: 7751 - DNA, 120 bp, synthetic construct
  source 1..120: mol_type = other DNA
ttaaatgcttagtgcctcttccaactccagctttcctagcctcagttctatcctggtttatcccaggatagaatggatagcacctacccatctttcactttagaattttataactcttgg

SEQ ID NO: 7752 - DNA, 120 bp, synthetic construct
  source 1..120: mol_type = other DNA
gaccattaggagctttctcatatggactcgtgtgttctttcaaccagctttcttcactttttgaacacttccttattttttgacatcacaagatgttccaagttcatcttatatgttccc

SEQ ID NO: 7753 - DNA, 120 bp, synthetic construct
  source 1..120: mol_type = other DNA
gtatacctgcttccacatgacctcagtaaaagaatgtgttgtcatattggtattgaaattttagcactgtaagcaacaggtcattttggaaaacctgagctttcgccaaattcagctatt

SEQ ID NO: 7754 - DNA, 120 bp, synthetic construct
  source 1..120: mol_type = other DNA
atgggggaatggggaaatgacagcaactagaaagagaagaatgacttgaagggaaatgagttaggagaaattgtgagaaggatgttcagaaatgcagactttgtaagcaaactggaaatt

SEQ ID NO: 7755 - DNA, 120 bp, synthetic construct
  source 1..120: mol_type = other DNA
gctgtgttgacattttacctagagactctatgcataatgaataacactctgctatatctagtttctaaattaggggtgggagttgtattcattatttagttcccatacagcatatctact

SEQ ID NO: 7756 - DNA, 120 bp, synthetic construct
  source 1..120: mol_type = other DNA
gtggtccaccccaactaaagactgtacttcagggccgtacactgctcaaatcattcctggtacaggaaacaagcttctggtaagttaatgtaaactcaaggaatattataagaagtatat

SEQ ID NO: 7757 - DNA, 120 bp, synthetic construct
  source 1..120: mol_type = other DNA
atgttaagtgaggacttgactctattatcctgattttgtagatgaggagactgtggcatagagagaggttaagcaattgcctaataaggtcacaaagctagaaaagtaggtattagaacc

SEQ ID NO: 7758 - DNA, 120 bp, synthetic construct
  source 1..120: mol_type = other DNA
attatctcagactgaaacgacgttgtactacatctctgatcaaagaacaggagagttcccaggccagtacggaagaatgtgagaaaaataagcaggacacaattacaactaaaaaatata

SEQ ID NO: 7759 - DNA, 120 bp, synthetic construct
  source 1..120: mol_type = other DNA
ttttcaacaaaatggtcatccaaactcaaacttgagaaaatatcttgctttcaaattggcactgattctgcctgctttatttttagcgctatcacaggacccagagcctatgccctttta

SEQ ID NO: 7760 - DNA, 120 bp, synthetic construct
  source 1..120: mol_type = other DNA
agcttccgtaggagcctttcattccaggaaggtccatcgtacttgcgttttcagggcctgagcgatgactttagcaccagacacctgctcctcgctgcgctctgcgaagttactgtccgg

SEQ ID NO: 7761 - DNA, 120 bp, synthetic construct
  source 1..120: mol_type = other DNA
tgctactaatccatattactctccgctaatatctttccaaaattaggaactatggcgtttcataattcttaggttgggtccctacctacaaccagccctgcacccgatagccttttaaaa

SEQ ID NO: 7762 - DNA, 120 bp, synthetic construct
  source 1..120: mol_type = other DNA
cacagtccagagtttcatctgagacaaggcaagtcccttccgcctatgagcctgtaaaatcaaaagcaagctagtggctgggcgcagtggctcacacctgtaatcccagcactttgggag

SEQ ID NO: 7763 - DNA, 120 bp, synthetic construct
  source 1..120: mol_type = other DNA
aggtctctgacatgccctggagacattttccccattgtcttggtgattaatagttagcttcttattacctatgcaaatttctgctgccagcttgaatttctccctagaaaatgggttttt

SEQ ID NO: 7764 - DNA, 120 bp, synthetic construct
  source 1..120: mol_type = other DNA
agacgtcacaatcatggtggaagatgaaggaggagcaaaggcacgtcttacatggcgacaggcaagagagtgtgtgcagggaaactcccatttataaaaccatcacagcttgagacttat

SEQ ID NO: 7765 - DNA, 120 bp, synthetic construct
  source 1..120: mol_type = other DNA
tccccttccatcatgtattatttatatcagtaccttttgtgacagtctctgcccctgttgcattagagtcacttggaaagctttttccaaatagttacttgggccctaccccagatctcc

SEQ ID NO: 7766 - DNA, 120 bp, synthetic construct
  source 1..120: mol_type = other DNA
ctctccaaagagcagagctagtcatcaaagaatctgcataccaattactctatttgtaggttctggatttgagattatgaaaaagagcaaattggtggttttcttctctctgggccaggg

SEQ ID NO: 7767 - DNA, 120 bp, synthetic construct
  source 1..120: mol_type = other DNA
ccctgtgcctttactctacattttaatgccagggagacctggaactggagaagggagtgctgtgggaagaaaacagaaggaatgttgttcccttgttttagctttgtgttcatccattat

SEQ ID NO: 7768 - DNA, 120 bp, synthetic construct
  source 1..120: mol_type = other DNA
agaaatcatagtatttctccgtatgatggaattccatactcgggggagtgtcccacagggtaggcaagcagctatcacccatgtaatatggtactagtgttgaaatattttctgttttca

SEQ ID NO: 7769 - DNA, 120 bp, synthetic construct
  source 1..120: mol_type = other DNA
gcttctcagttccatttctctgactacaaatgaggttaagttatatttgtatatatatattggccatgcgtgtttctttttctgtgaattacgtgtttacatctgttgcacatttcctta

SEQ ID NO: 7770 - DNA, 120 bp, synthetic construct
  source 1..120: mol_type = other DNA
atggacaagactaaactacagtgtctagggatgcacattgggtgataaagctattttaaaaaacaaagaagtgatgagtataaaagtcagggtcatggttacttgatccctcatgggtaa

SEQ ID NO: 7771 - DNA, 120 bp, synthetic construct
  source 1..120: mol_type = other DNA
ccaggaggcagaggttgcaatgagctgagattgcaccactgcactccaacctgggtgatggcgtgagacagtctcaaaaaaaaaaaagaaaaaacaaataatgtattttttttctaggaa

SEQ ID NO: 7772 - DNA, 120 bp, synthetic construct
  source 1..120: mol_type = other DNA
gattctataggcttttactggcattgatgttattgtagtaaagtctgaggacagcctgattattttgcccctaataaatacccttgatctttttatttagcttcccaaatgattcttact

SEQ ID NO: 7773 - DNA, 120 bp, synthetic construct
  source 1..120: mol_type = other DNA
ttctctcttcttccctcttccccctccttaccttctcctcttctcctcctttcctccccttctcccctttttccctttcatcttttaattctcttggtctattttgtgcttttatttaat

SEQ ID NO: 7774 - DNA, 120 bp, synthetic construct
  source 1..120: mol_type = other DNA
tcaagcaatcctaccacctcagcctcttgagatgctgggaccgcaggtgtacaccaccatgcccagctaatacttttttactttttgtagagattatattgcccaggctggtcttgaatt

SEQ ID NO: 7775 - DNA, 120 bp, synthetic construct
  source 1..120: mol_type = other DNA
tatgtggataggcttttccaggcatcttaggactgataacatctcaaaatcactttgtgctcatttcttggcatagagttacctgggtcatgtatgttgtgagtttttgaatcatgaacc

SEQ ID NO: 7776 - DNA, 120 bp, synthetic construct
  source 1..120: mol_type = other DNA
gctataaacactcctgtgcagtttttttggagacataagttttctactcctttgggtaaatacaaagaatacgattgctgaatcatatgataagagtatgcttcattttgtaagaaaatg

SEQ ID NO: 7777 - DNA, 120 bp, synthetic construct
  source 1..120: mol_type = other DNA
ttttacatttagtgaagtgcagtgtatcaattctttcttttttgtccaacacaagatcatctagctattctcctatgttatcttttaagagttttatagttttgtactttatatttagat

SEQ ID NO: 7778 - DNA, 120 bp, synthetic construct
  source 1..120: mol_type = other DNA
tcatagctcactataaccttgaactcctgggatcaagtgatcttcccacttccatctgctgaatagccaggactataggcacacaccgccttgcccagctaacttaattttatttttaat

SEQ ID NO: 7779 - DNA, 120 bp, synthetic construct
  source 1..120: mol_type = other DNA
gatgacaatttcatctgtgaacaaaggcggttttatttcttctttcccagtttgtgtatcttttctttgctttttgcattagctaggacttacggtatgatgttgaaaagcagtggtgag

SEQ ID NO: 7780 - DNA, 120 bp, synthetic construct
  source 1..120: mol_type = other DNA
aaccagtctgaccacggatttaccagggctgagttttcccaaccctagcaagcctgagggttctgcaggagactaggacttatctcaatccttacctcaactgcacaagacagacattcc

SEQ ID NO: 7781 - DNA, 120 bp, synthetic construct
  source 1..120: mol_type = other DNA
attgtgagggtggctcatctttacctagtgcacttagactcacacactcatctcctcatgctgatcacaagcacatccaaaagtaacattttaccaggtttctacagtgttccttaatcc

SEQ ID NO: 7782 - DNA, 120 bp, synthetic construct
  source 1..120: mol_type = other DNA
aagtgctgggattacaggcgtgagtcactgtgcccggacatcagtttcttaaattgacatctaggttatcaaattttggggcataaagttgtttataatattcctttattattctttcgg

SEQ ID NO: 7783 - DNA, 120 bp, synthetic construct
  source 1..120: mol_type = other DNA
cccctttatcattttgtgacccactttttaatcctgataactttccttggtctaaagtcagctctgtctgaaatttatgtagctattcttgctttctcttaatgactatgttagtctgtt

SEQ ID NO: 7784 - DNA, 120 bp, synthetic construct
  source 1..120: mol_type = other DNA
agcaccatccctctagtgttgtgtcatgatagagttctcatgagatctggttgtttaaaagcgtgtagcacttcccacttagctctctccatcttctgccaccatgtgaagatgtgcttg

SEQ ID NO: 7785 - DNA, 120 bp, synthetic construct
  source 1..120: mol_type = other DNA
tcatatttattttaaattgctagtctgataattacaacatccctgccatatctgactctggttcttctgggaggttttttgagacaaagtctccctctgtcacctccctctgtcactgct

SEQ ID NO: 7786 - DNA, 120 bp, synthetic construct
  source 1..120: mol_type = other DNA
ctgggattacaggcgtgagccaccacgcctggcccagttttaattttttattttgcatataagttcaaagccttccaaagtgtttgtttatgatttattttcttgttaaaatctgttctt

SEQ ID NO: 7787 - DNA, 120 bp, synthetic construct
  source 1..120: mol_type = other DNA
ctttaggtgagaggattgcttcaggcctggagtcgagactagcctgagtcacatagcaagaccccatctctacaaaaaattaaaaaattagtcacacatggtagcatgcacctgtagtcc

SEQ ID NO: 7788 - DNA, 120 bp, synthetic construct
  source 1..120: mol_type = other DNA
ttgactatgccactcctaaatatatgcctcttggcctctgcatgagagaaggtggcctttgatgtgttatttccagcactgtggtttactttagctttttaaattgtttctttcataatt

SEQ ID NO: 7789 - DNA, 120 bp, synthetic construct
  source 1..120: mol_type = other DNA
tctggatgtcaagccctcaggtccacattatctagaaggtgttctttaaggtagtccaagaaggaaatgggtaagaaatttcccaaaggcttttaaaagcaataccttgctgacactcat

SEQ ID NO: 7790 - DNA, 120 bp, synthetic construct
  source 1..120: mol_type = other DNA
gtgttcaagccttcaggtgactctgatggcgtgcttacatttgagaccctctgctctggtctgatcacccagaatctcccttgggagagctaccttgaaatttctgcttatttcccctgc

SEQ ID NO: 7791 - DNA, 120 bp, synthetic construct
  source 1..120: mol_type = other DNA
ccacttgggttaatgatactcagtttgtccacggagtggcagtagcaactgtctgagaatcagtctcagccggggttccttctgtctatagaaagtgaaagacagactgttattcaaatt

SEQ ID NO: 7792 - DNA, 120 bp, synthetic construct
  source 1..120: mol_type = other DNA
ttttcttggcattcagtcactacacatagaaatgtatactatgccggttcctaatgacttagcagttccctcaggctttgttccacaggatgtgacatctcctctgccaacttttcctgc

SEQ ID NO: 7793 - DNA, 120 bp, synthetic construct
  source 1..120: mol_type = other DNA
gtccactgttggacccctgacacctaacccctggggctggcccacagttgggaattgcatggctgtctgaagccagcaccttcctggttctgctgttccctggaagtggggttcagtaca

SEQ ID NO: 7794 - DNA, 120 bp, synthetic construct
  source 1..120: mol_type = other DNA
aaacaatggatactgagggccggctgactagacctatttttattgtaattactcattctcttctacctcattaagcttggttctttcaagcatgaatacctggttgaatctgcataacct

SEQ ID NO: 7795 - DNA, 120 bp, synthetic construct
  source 1..120: mol_type = other DNA
tccttgttcttatcttaaaacattgtttacagtgtcccagatgaatggcaacaaatcctggggtttggtgtttggatggtacatttccctggggaaagaaataacagtttgagatggaac

SEQ ID NO: 7796 - DNA, 120 bp, synthetic construct
  source 1..120: mol_type = other DNA
actaaccaaagaaatgcagggagaattgtaattcattaggttttgatggccaggaaagccaagctgtgttattagggtcatgacaatcacagacattacggatggctgacctgtagtatg

SEQ ID NO: 7797 - DNA, 120 bp, synthetic construct
  source 1..120: mol_type = other DNA
ttaccccttgatcagtggttgggtaatcccaggcttcctaccaccctctgaaaaagcatccaggtagttaacctgagttgagttagtcagttgaattaggagccttacccctcagagagt

SEQ ID NO: 7798 - DNA, 120 bp, synthetic construct
  source 1..120: mol_type = other DNA
tcttttttttcaaccaagacaacttttgcaagggtgacacttttctttagtcccaacctgacatacggtttctccttgaacaccttcagtggctcagactcacaggtccgtttgttccaa

SEQ ID NO: 7799 - DNA, 120 bp, synthetic construct
  source 1..120: mol_type = other DNA
ctgacatcccaagtatcagttacctttacgtcattcacacatatgatacacacctcatttatgtctatgctgaagtcagtgtaaaaaaaccccaggctgtgccctcagacctcctgatga

SEQ ID NO: 7800 - DNA, 120 bp, synthetic construct
  source 1..120: mol_type = other DNA
cacaaacctacatggtacggcctactatgcgcctaggctatatggtatggcccattgttcctaggctataaacctttacagcatattactgtactgaacactgtaggcagttgtaacaag

SEQ ID NO: 7801 - DNA, 120 bp, synthetic construct
  source 1..120: mol_type = other DNA
tggtaaagctggttcaaaggaaaattcaaggaatggaaatgtgtatatcagtcagtccagtgattgttgaaatgaatttcctaatagatgcaaaactgggtaatgtcctatagggcaaaa

SEQ ID NO: 7802 - DNA, 120 bp, synthetic construct
  source 1..120: mol_type = other DNA
gctcaggtgatctgcccacctgggcctcctgaagtgctgggattacaggcgtgaactgccatgcttggccgtattttttaaagttcttaatgagggaagtcaagatgtaaaaccatatat

SEQ ID NO: 7803 - DNA, 120 bp, synthetic construct
  source 1..120: mol_type = other DNA
tatcccacccacagtcaatcaaatcagactttgtaggggtggtcccggcatcagtggtttttcagaagttcctcaactgatttaaatgcacaatggaagttgacaaccaccagactgaag

SEQ ID NO: 7804 - DNA, 120 bp, synthetic construct
  source 1..120: mol_type = other DNA
ttcaccacagcctgcacctcatcccatgcccttgcttagagaaactgccatcaacaatttgatgtgcattcagttgtattcttttctatgcatttcatagttattgacatcctctttttt

SEQ ID NO: 7805 - DNA, 120 bp, synthetic construct
  source 1..120: mol_type = other DNA
aaatacaaaaattagctgggtgtggtggtgcatgcctgtagtcccagccactcagaaggctgagataggaggatggcttgagcctgggaggcggaagttgcagtgagccaagattgtgcc

SEQ ID NO: 7806 - DNA, 120 bp, synthetic construct
  source 1..120: mol_type = other DNA
ctcatcacctttgataccccctttgctggcaggtttggcatcttcacatgctttgatatattgttctttgaccctgccatcagagtcctcagagactacaaggtgaagcatgttgtgtac

SEQ ID NO: 7807 - DNA, 120 bp, synthetic construct
  source 1..120: mol_type = other DNA
gacacctgtggacaggaaatcacagaggccacggggatatttgagtttcacctgtggggcaacttcagtacttcctatatctttcctttgtttctgacctcagggatgaccctagaagtc

SEQ ID NO: 7808 - DNA, 120 bp, synthetic construct
  source 1..120: mol_type = other DNA
ggcttttaaaaatagaaaagaagcgttcctcacatctgccagtaatggaattttctgtcagtaaatggaatgtgtaggcaggacctggaataactggagagagtgcaacgcttcggggtg

SEQ ID NO: 7809 - DNA, 120 bp, synthetic construct
  source 1..120: mol_type = other DNA
tgaataaaccatgtgggaaaaagcagagccagcaccagcccctgctgactcactgatccctcggaaaggtctgggatgagtcaagtcttcagggaataagcagcaaggacttggaattcc

SEQ ID NO: 7810 - DNA, 120 bp, synthetic construct
  source 1..120: mol_type = other DNA
cacagaagatctcctcagagaggaccgatggtgagtcggccgctcttgattctcaatgaaactcagaaccgctcaagtgaaatgaccactcaaagaacaatttctcaacaaagtggattt

SEQ ID NO: 7811 - DNA, 120 bp, synthetic construct
  source 1..120: mol_type = other DNA
cttgattttggatttccagcttccacaactatgagacaataagtttctgttgtttgaagccacccagttcagggtactttgatatggcagacctaggaaacaaatacagaggatcacttg

SEQ ID NO: 7812 - DNA, 120 bp, synthetic construct
  source 1..120: mol_type = other DNA
ctacagctattttacagatggggaaaactgacagagagatattaatgaattgcccacatgcaaatatgtgctgagtcttggatttgcatctttatcgtgactccacggagacccaccctc

SEQ ID NO: 7813 - DNA, 120 bp, synthetic construct
  source 1..120: mol_type = other DNA
aagctcctctttttacacagtccctaattaaagtctcagagatgaacaacctgggctcttgcttagggcacgtgcccatcctgaatcaatgatcggccagagagctgtgatattcttttg

SEQ ID NO: 7814 - DNA, 120 bp, synthetic construct
  source 1..120: mol_type = other DNA
cagaatggagaggggtagagtatgcagggaagataaatgcagccctggcatggttcttccagaacattctgcaagctcatggaccagttcatttgagaagaaatagaggagttaggggag

SEQ ID NO: 7815 - DNA, 120 bp, synthetic construct
  source 1..120: mol_type = other DNA
gctaccagcaccttaatctcccacatccaagttaaaattcatccaacactcaatctcccagctatcctgactgctcctatacaggtatctctcccactatatatatatcaagtgctatta

SEQ ID NO: 7816 - DNA, 120 bp, synthetic construct
  source 1..120: mol_type = other DNA
gcacagccagtgtttcaacgtcgccaacccagaaatgttttctctccctgtcatgctaattttcagccctttctgggtgacttgttcatcatccaaatatattatttttgttttgtttga

SEQ ID NO: 7817 - DNA, 120 bp, synthetic construct
  source 1..120: mol_type = other DNA
gctgatgacaggttttcagatgcttcacctcctcctaagtcagtcacacctcatatccaagccatgaggactcactgaggggaatgtaataaatagctatttaagggaaaaataacaatt

SEQ ID NO: 7818 - DNA, 120 bp, synthetic construct
  source 1..120: mol_type = other DNA
caattaataccacaaaatgtggcccttgtgttctactggcccctgaaaattgtttcagatctttccttggtgcagtgtatattgaatagtaaaagggacatatgtcacaaaacagattta

SEQ ID NO: 7819 - DNA, 120 bp, synthetic construct
  source 1..120: mol_type = other DNA
gcctgggtgctggttttactttgcggcactgagcacttattcctagagcatttttatatccaacatagaatattttataaaacaaaaacaaagactcaatttgtaatatgaatcctctcc

SEQ ID NO: 7820 - DNA, 120 bp, synthetic construct
  source 1..120: mol_type = other DNA
atacagagcccactcatcagtgggaggagtgtaaaagaatttgtggctatttaaagtctacctcaaagtaggctgctgtactgatgtcagtttttatttattgagtgcttagcaggcata

SEQ ID NO: 7821 - DNA, 120 bp, synthetic construct
  source 1..120: mol_type = other DNA
aagaaagaaagaaaaaggaaatggagggaatttcagagttcagagagagaatacaagttacactggtgctcctgtccacagtgtcctatggacaagttacagatggcacagctaacaaag

SEQ ID NO: 7822 - DNA, 120 bp, synthetic construct
  source 1..120: mol_type = other DNA
aatgcttgaatcaagtttataaaggttgagggcatctccagggctctatgggcccaagaatcctaactcaaaattagtatatctcacacacctactctaggaagcataatgacctagggt

SEQ ID NO: 7823 - DNA, 120 bp, synthetic construct
  source 1..120: mol_type = other DNA
tgtcaggcacttcccatgtattttttcatttaattcctaccacaaccccatgagggaggtactatggtcctcatttcacagacaagaaaactgtggtggggagaagttaggagatttgcc

SEQ ID NO: 7824 - DNA, 120 bp, synthetic construct
  source 1..120: mol_type = other DNA
tgctcttctaaaaatcctctgttctctgcctattcctttcctccctcatatcccctggcaaccgctgatctttttactgcccccatagttttgccttttccagcatgccatattaaattc

SEQ ID NO: 7825 - DNA, 120 bp, synthetic construct
  source 1..120: mol_type = other DNA
atgtgggtctatttctgggttctctatctgttccactgatctgtccattctttgaccaataccacactgtcttgattactgtagttttatagtatgggtagtgtaagttgggtagtgtaa

SEQ ID NO: 7826 - DNA, 120 bp, synthetic construct
  source 1..120: mol_type = other DNA
ttcccattttcctagtttactgagaatttttatcatgattgtgttgtatctagctagtatcttgatttgctgagaattactgcatctatgttcatgagaaatatttttttttttgagacg

SEQ ID NO: 7827 - DNA, 120 bp, synthetic construct
  source 1..120: mol_type = other DNA
catgttggccaggctggtctcgatgttcactagatccagctggttgatggtgttaagcacaactatgtccttactgattttctgcctgctggttctgtccattagtgatagaggggtgtt

SEQ ID NO: 7828 - DNA, 120 bp, synthetic construct
  source 1..120: mol_type = other DNA
acacaaagaggggaacagacactagggcccacttgagggtgaaaggtggcaagaggaagactgttcaaaaaactacctattaagtacgacgcctattacctgggtgatgaaataatctgt

SEQ ID NO: 7829 - DNA, 120 bp, synthetic construct
  source 1..120: mol_type = other DNA
aagagtgattaaacaacttagatttggggtggttaggtggcaacagcaactgaaatgtaagaagacatcattcttttaggatccactcctgagggcaaactatgttacctccccctttac

SEQ ID NO: 7830 - DNA, 120 bp, synthetic construct
  source 1..120: mol_type = other DNA
ccatctgttcaaatctgattctcaatgtccgcacctagtcttccatgacgcctgttctgatcttccctcccaatgtgatcttattctgtaccttttatcaattaatctctacctcaatta

SEQ ID NO: 7831 - DNA, 120 bp, synthetic construct
  source 1..120: mol_type = other DNA
gttaagctggggggcagactctcacagatggattacaaaagtaatgaaatagttttcttagtggggtggcattcgcaagaactaccttaatgtttttggtaacagcatcatttacatata

SEQ ID NO: 7832 - DNA, 120 bp, synthetic construct
  source 1..120: mol_type = other DNA
tgtgttttattatactctaaaatatacaggaatcttgatgtactgaaagagtgcaagtaaatacagtattcaagcagtcactatttctatgtacatgctcattaattcttcaaaaaaccc

SEQ ID NO: 7833 - DNA, 120 bp, synthetic construct
  source 1..120: mol_type = other DNA
accattcaaaacagggcaacagcctgaccccaatccatctcaatgtctatgtcacaagtattttcacccgtattgcacccagtcagctggtttttaattctaatagtataaaaattggaa

SEQ ID NO: 7834 - DNA, 120 bp, synthetic construct
  source 1..120: mol_type = other DNA
tctcttaacattggctcactgtgggatctttcctcttaggttgaatttctacgtgaatatcaaagtgcctttttcctgaaaaagcacagtttgaagctttactgtgagaactccctcctc

SEQ ID NO: 7835 - DNA, 120 bp, synthetic construct
  source 1..120: mol_type = other DNA
tacagcttcatgaatcagccacagggcaggtgctcaaaagatatgtgttgaatgaatgacacttagttgtcaatttaacttttctcttggggtcacagtctcttgaagaaaaacagtaga

SEQ ID NO: 7836 - DNA, 120 bp, synthetic construct
  source 1..120: mol_type = other DNA
tgcaccctcaacctctgggctcaagtgatcctcccacctcagccccctgactagctctgactataggcacatgccatgcctggctaatttttaaacttttttgtagatacagggtctcgc

SEQ ID NO: 7837 - DNA, 120 bp, synthetic construct
  source 1..120: mol_type = other DNA
ctttggattttggcttagcagttgcattttttgggatgccttctctgatcctgcaagaaaggatttgaagaccctcttaagtactctcatagcattctatgcttattccaattaaactat

SEQ ID NO: 7838 - DNA, 120 bp, synthetic construct
  source 1..120: mol_type = other DNA
accctgctatggaggggctggcatggcagaatgaagtagagaaaggagaagagtaggaaataatatcagaaaggtaacaaggtggaggacacatcatgtagggcctagtaaggtcatttt

SEQ ID NO: 7839 - DNA, 120 bp, synthetic construct
  source 1..120: mol_type = other DNA
aaacgatcagttgtgccaaaagctgatctatcaagtaaaatgagagctaagtagtagttaacacagtagaagtcattggtggttttgatgggaacagttttgctatgtgtaggggtgagg

SEQ ID NO: 7840 - DNA, 120 bp, synthetic construct
  source 1..120: mol_type = other DNA
gaagagagcgaaaaatgttactccaggacacaaaagagaactgtcaaactgacattatgaagtaggcaaaaggggacaggatctagtgcatgagtagaaacactggctttaaataagaat

SEQ ID NO: 7841 - DNA, 120 bp, synthetic construct
  source 1..120: mol_type = other DNA
ggaatagcaagggacaatgagagacactgatgtaagatctctgtcagtctatctggaggttggctgctcacattattaaaaattttgattctttaagaaaccttattggcttacagacac

SEQ ID NO: 7842 - DNA, 120 bp, synthetic construct
  source 1..120: mol_type = other DNA
tcttaagatgtatacataccttgctacaagccaaatggagggcagtatttttactgttatcttgtaaagtcagttctgcactagcactgctaaccagcatctctgggaggaaaaagtgca

SEQ ID NO: 7843 - DNA, 120 bp, synthetic construct
  source 1..120: mol_type = other DNA
aaatacaattttaaagaagtttctttaccaactgtatttgtttgtccattttctgcagccatcataagaggtgttttccctgtagagtccacagaattgacttgagcattatggctgagc

SEQ ID NO: 7844 - DNA, 120 bp, synthetic construct
  source 1..120: mol_type = other DNA
tatcctgtgtaaggtaacaaggtgatcattctcacagcaatggtgtatttcttaaaacactcaaaccaaatctgattcattctggctttacttacacggcacaatgcaatggactaaaag

SEQ ID NO: 7845 - DNA, 120 bp, synthetic construct
  source 1..120: mol_type = other DNA
ggacttgagcgcctgttggttttggtattcacaaggggtcctggaaaccaatcctcaacagcaaacgagaaatgactgtgctatttttttatttttttcttaatggcaatgggatgttta

SEQ ID NO: 7846 - DNA, 120 bp, synthetic construct
  source 1..120: mol_type = other DNA
taggaagtatttttgtaggacaatttcctaccaaagtgatattgctgtggtaaaggagaagtatccagccttggtattcttgggggattgggtccaggactccccactgacagcaaaact

SEQ ID NO: 7847 - DNA, 120 bp, synthetic construct
  source 1..120: mol_type = other DNA
tcctttaatgccatcgttctgaatgttaactcattactaagatacagcaatggaaagttgtccattgttgacttaagagcccctcattctccaggtatatgggttcttaaggtgtggcct

SEQ ID NO: 7848 - DNA, 120 bp, synthetic construct
  source 1..120: mol_type = other DNA
aaattccttccagctcaaattcagcatcaccacaattttgctacaggctgaaaatcagacacatttgttatgatctttaaatggcaaccaggcatgcagttcttgcaaaattctgtctct

SEQ ID NO: 7849 - DNA, 120 bp, synthetic construct
  source 1..120: mol_type = other DNA
ttcagctttttcctcttttgctttaacttgataactttgtcagaacagctcccagtgaaagaactatgaaacagcatattatagaaagataggaaatctcaacttcctggtaaggcagtc

SEQ ID NO: 7850 - DNA, 120 bp, synthetic construct
  source 1..120: mol_type = other DNA
aagaaaaacctcaaaaatacttcatggcttatctcagaacacctttgacaactagtgtcttggctttagcatgacaaaggacaggagtgagcctacgtactaagtattattagtacgtga

SEQ ID NO: 7851 - DNA, 120 bp, synthetic construct
  source 1..120: mol_type = other DNA
agttctaggtaatatgaggtcataaaagctttttgaaaggaaagagcatatttctgcttacccctctatgcaacgctgtccttccccacttatctttggcatctacatttgctcctttgt

SEQ ID NO: 7852 - DNA, 120 bp, synthetic construct
  source 1..120: mol_type = other DNA
cacaagaaccccattctcctctgacagtgatcagttttaaggtgagcagcacaggaaccaggtctgactactgagatgccgataagtctagaggctgctgggaaatacttttatctttaa

SEQ ID NO: 7853 - DNA, 120 bp, synthetic construct
  source 1..120: mol_type = other DNA
aatgtttgtgtcatctaagttcaatacccaaacagcaagcacagcatctctgtgggaaatgactggtaaacctccaggaaaaaaaaccctcagtgttcttttcatggcttatagatgctc

SEQ ID NO: 7854 - DNA, 120 bp, synthetic construct
  source 1..120: mol_type = other DNA
atagctttgaagggcggctctgggagtaacagtgggtgttatcaatagtcttctaaaatgtaagcttcccaaaggactagaaaaaaaatccaagacatatattcaaatgtattcttaagg

SEQ ID NO: 7855 - DNA, 120 bp, synthetic construct
  source 1..120: mol_type = other DNA
tttgtgcagaggagcttcttttcatgagagcaggacagttttaatgacttcttaaacacttgtgtgggacaggctggagcatgagggaggttttaagccaggcacaaagttagtttcaaa

SEQ ID NO: 7856 - DNA, 120 bp, synthetic construct
  source 1..120: mol_type = other DNA
accagaggtacacgtcaccatgcccagctaatttttcttttaatttttgtagtgatgagggtctcgctatgctatccgggctggtctcaaaattcctggcctcaagtcatcctcctacct

SEQ ID NO: 7857 - DNA, 120 bp, synthetic construct
  source 1..120: mol_type = other DNA
ccccgagttgccttcttcatacagtctaataaaagggctttccagaaaagtcttttcaaaatccaacatggcaactgaacatatattatttacactggactaaatgctgagcaggacata

SEQ ID NO: 7858 - DNA, 120 bp, synthetic construct
  source 1..120: mol_type = other DNA
gatatccttgtatgggactgagagaagaagtccaaatgtccagtatgactaaaattaggaatcaaggccagtctccttaagcctcagatcagtatgttttcactgtaccaagttgtcccg

SEQ ID NO: 7859 - DNA, 120 bp, synthetic construct
  source 1..120: mol_type = other DNA
catcattaaactgataactaagtcctaaagactgcagggcttttgggagtctttaatatgctactagttgaatctccacaaggcggaaatagtctggcacctagaaagtgctcaagaaat

SEQ ID NO: 7860 - DNA, 120 bp, synthetic construct
  source 1..120: mol_type = other DNA
cacattttaaaattcaccatcacaggcatattctccatattttctccctttctctccccagaaggccctgggggaagcctaaggatcactgtctgtcttttttttttttttctaaagcaa

SEQ ID NO: 7861 - DNA, 120 bp, synthetic construct
  source 1..120: mol_type = other DNA
gctctaatgagagcaaacagataaacataactggtaggagggaactgaccaatactaattggtgggagggaattgactaatacttacaacatctagaggagtttcacttgcaatctgaaa

SEQ ID NO: 7862 - DNA, 120 bp, synthetic construct
  source 1..120: mol_type = other DNA
cgttgtatccttgcttatcacggatccctggatttgcatcgtttcttaataagtattccaggcacctatatacaacaacaacaacatactgaaaatcctaaatcctgcatattaaccaat

SEQ ID NO: 7863 - DNA, 120 bp, synthetic construct
  source 1..120: mol_type = other DNA
agcaacctggagttggagatcattattctaagtgaagcaattcagggatggaaaacgaatatcgtatgttctcgctcataagtgggagctatgaggagacgcgaaggcacaaaaatgata

SEQ ID NO: 7864 - DNA, 120 bp, synthetic construct
  source 1..120: mol_type = other DNA
atcttctcttttcttcttcattagtcttgctagcggtctgtctgattatctcaatagatgcagaaaaggccttcgacaaaattcaacagcacttcatgctaaaaactctcaataaactag

SEQ ID NO: 7865 - DNA, 120 bp, synthetic construct
  source 1..120: mol_type = other DNA
tactttatagattgaatgccatccccatcaagctaccaatgactttcttcacagaattggaaaaaactactttaaagttcatatggaaccaaaaaagagcccgcattgccaagacaatcc

SEQ ID NO: 7866 - DNA, 120 bp, synthetic construct
  source 1..120: mol_type = other DNA
tcagtgggagtgtaaattagttcaaccattgtggaagacagtgtggtgattcctcaaggatctagaactagaaataccatttgacccagccatcccattactgggtatatacccaaagga

SEQ ID NO: 7867 - DNA, 120 bp, synthetic construct
  source 1..120: mol_type = other DNA
cagtatataggccataatttacaattttaatacattttattacagcagaaaaaaaaagcactgaaatagcactggtaccagtgatcttgggccataaaagtgaaatagcctctgtttatt

SEQ ID NO: 7868 - DNA, 120 bp, synthetic construct
  source 1..120: mol_type = other DNA
taagactggtgttttgttttgtttcacaaactaattctgaggacatgtcaggaaaaggaagtgtttcagtcagtgtgtaaactctgtacacagccttccttggtgccgaattcagaggac

SEQ ID NO: 7869 - DNA, 120 bp, synthetic construct
  source 1..120: mol_type = other DNA
tactcttcccatcatggcatacaacagttcttaccaccccccaccaccccacccctggcccaaaaaatcagttttaaaaaatacaactaacctttataggaagattaggatacgtcagaa

SEQ ID NO: 7870 - DNA, 120 bp, synthetic construct
  source 1..120: mol_type = other DNA
gttattgcgaagttacgatgttgctgaaacaaatatctaaaatgtggaagaggttttggaactgggtaatggatagaggacggaagagttatgaagtgcgggctagagataacaacccat

SEQ ID NO: 7871 - DNA, 120 bp, synthetic construct
  source 1..120: mol_type = other DNA
ctgtatgttggtcctaaacaaaagaaaaccaatgtcagattgttaaaaattccaaagtataaacaacaacttttcctggggagctttaaaggtagaaactgtgatgctgacaggggattt

SEQ ID NO: 7872 - DNA, 120 bp, synthetic construct
  source 1..120: mol_type = other DNA
ttggcttacaatgaaaccacacatctccaacactatgggttgaattatatgttattcctttgtggttttgtgtgtgtgtgaattcaggtttagtgcatttgtctaagggcagaaggatca

SEQ ID NO: 7873 - DNA, 120 bp, synthetic construct
  source 1..120: mol_type = other DNA
aggcaggagaattgcttgtgaacctgggaggtggaagctgcagtaaactgagactgcagcactgcactccaccctgggcgacaaagcaagattccatctcaaaacgaaacaaaacaacaa

SEQ ID NO: 7874 - DNA, 120 bp, synthetic construct
  source 1..120: mol_type = other DNA
tgtgtctgttggctgcataaatgtcttctttagagaagtgtctgttcatatccttcacccaatttttgatggggttgtttgaaaaacccctagaattttagccacaatccaacataaaaa

SEQ ID NO: 7875 - DNA, 120 bp, synthetic construct
  source 1..120: mol_type = other DNA
ggcactggtaattgcagttggcagcagcgtagtgcagtggagatcttttgggtccaagttaatacaagaaagataaaagccagagacataactagtaaacaaaagcatagttgactctta

SEQ ID NO: 7876 - DNA, 120 bp, synthetic construct
  source 1..120: mol_type = other DNA
ccaactgccttcaattctttcctgtatggttctaatgcactctgtgtcaattcctactctaagtaacttaacagtagttttaaatactgctaccacaaatactcaacaatgaggcctgct

SEQ ID NO: 7877 - DNA, 120 bp, synthetic construct
  source 1..120: mol_type = other DNA
gtgagccactgcatgagtcctgtcagctttcccttatcttctcctatactatgactgtttacatatatgtatctttagttaatactggaggaaaggatataacttaagtatttctgtaat

SEQ ID NO: 7878 - DNA, 120 bp, synthetic construct
  source 1..120: mol_type = other DNA
acaaagataagagaaaacctgccatgaccagctatcttttcttaaagaaataaaaatactattaacataccctccagctgcagctgcatgtagacaagtcctgccaaaatcatctggggt

SEQ ID NO: 7879 - DNA, 120 bp, synthetic construct; identical to SEQ ID NO: 872
  source 1..120: mol_type = other DNA

SEQ ID NO: 7880 - DNA, 120 bp, synthetic construct
  source 1..120: mol_type = other DNA
tatctggacatttgcttagggagcaaaattcactaccctgtcaccccaccattgaaacatttccataatgcaacatgttcaagaatatttattgtagtaattctgtaatagtgaaaaact

SEQ ID NO: 7881 - DNA, 120 bp, synthetic construct
  source 1..120: mol_type = other DNA
cattgaggataaaatccacatttccacgtgaaatgtctagaaaactgcagttcacttccctttgtgcttgcctgtatcagttatcaacacctcggtaagtacttactttgcagtgtcagc

SEQ ID NO: 7882 - DNA, 120 bp, synthetic construct
  source 1..120: mol_type = other DNA
agcagtcatgtgtagtggggttttcccatctttactctggggggggaagaaaaaaattactcactctactatatccataatgtgtaaaccttagttttactttgaataccctcttgcatc

SEQ ID NO: 7883 - DNA, 120 bp, synthetic construct
  source 1..120: mol_type = other DNA
tttttcaagtaaacaagccatccaattgacaagtaattttacagaagttctaatcttttggaggcagtacgagaaaggaaggggaggaggagagaggatgcatgcatgcacaggctctgg

SEQ ID NO: 7884 - DNA, 120 bp, synthetic construct
  source 1..120: mol_type = other DNA
tattttttgtagagatggtctctaagttgcccaggctggttttgaactcttgggctcatgtgattctccagccttggcttcccaaagtgctgggtttacaggtgtgagccaccatgcctg

SEQ ID NO: 7885 - DNA, 120 bp, synthetic construct
  source 1..120: mol_type = other DNA
ttgctcagactagacttgaacacctggctcaagtgattccctcacctcagccttccgaaggtagctgggactaaaggcacacacaactgggcctggttagaatcctttattataagccta

SEQ ID NO: 7886 - DNA, 120 bp, synthetic construct
  source 1..120: mol_type = other DNA
cacttgtcatatatgaaattcaccactgagttttctaaattattaaggaggtaacttcaaataggaccactggtttgagcattttactctaagtgggcctcttagaggactgattctcaa

SEQ ID NO: 7887 - DNA, 120 bp, synthetic construct
  source 1..120: mol_type = other DNA
gctctaatcatattagggcactttgtgacatctcatgttttttcttccttgggtgtagtatgtatacattttgtcctgtagttgagagggcaatttaaagcaatggcctaattacagatg

SEQ ID NO: 7888 - DNA, 120 bp, synthetic construct
  source 1..120: mol_type = other DNA
ggtaggagccactatgccagcccagaattttcacataattctaaaatccaaatgcttactcttgaaagtgattctaacaaaaaaaaaccaaaaagcaactattccttatgtgcaacacac

SEQ ID NO: 7889 - DNA, 120 bp, synthetic construct
  source 1..120: mol_type = other DNA
gttgttttaacagtgacatatgaaatacttatagattctgattttgttccttaccttcatattgacatcggccccattgccaactagaagctctaaacacaatgctccatgtgttgatgc

SEQ ID NO: 7890 - DNA, 120 bp, synthetic construct
  source 1..120: mol_type = other DNA
aataaataagggaatagtttatatgattagtgtgtagtaaagaatctgacctctcccaaagagaggtctgtcctttgcccctggcttcagggaggtaggtaatctaagatattcctgata

SEQ ID NO: 7891 - DNA, 120 bp, synthetic construct
  source 1..120: mol_type = other DNA
ttttgaatgacattagaagctccatccaatcatgcctcttgctggtgaggggcagggcctgtccagctacttcctccgcactttttgaggtggttcctgaccaccctgcctcaggccatg

SEQ ID NO: 7892 - DNA, 120 bp, synthetic construct
  source 1..120: mol_type = other DNA
ctggctagccacactctgtgagagctctgagattctcagggctgcagaaggtgtcttagagggtggacacatgatgaggcccaatcaactccaggccaggcagggctgccccaactttac

SEQ ID NO: 7893 - DNA, 120 bp, synthetic construct
  source 1..120: mol_type = other DNA
ccagccctgactctctaggaggaaggagtccagagcattcctgactccactcctttgctcagttgctccctctaccctttctacattctgttcatcttccaaggcccagctgcagcctcc

SEQ ID NO: 7894 - DNA, 120 bp, synthetic construct
  source 1..120: mol_type = other DNA
ccgaagaggcctccaatcagctgacctcctgtctagaacagaagctttgcctgagcctagcccctaagttatgattgctgagaagttctccccctcatcctgctgttttttatgacactt

SEQ ID NO: 7895 - DNA, 120 bp, synthetic construct
  source 1..120: mol_type = other DNA
cactctgggacagtggtattgggaacaagcaatagtattgggagacaaatcttataaggccaaaggaggatggactgagtggtgagatcaaaagaagaaaattcccacccttagaaagtt

SEQ ID NO: 7896 - DNA, 120 bp, synthetic construct
  source 1..120: mol_type = other DNA
cctggctctccctcacccggaatattccctcctccatcgcagcctccaccatggctctctccagctcctcctcagcagccaggtctcctgagaccgtgcgacagatctcgggggctgcct

SEQ ID NO: 7897 - DNA, 120 bp, synthetic construct
  source 1..120: mol_type = other DNA
aagtgtcaagatcgtgtcaaggaaagactgatgaactcttccagatggaagagatgaaagagataaggcaactcaatgcactgtctgattctggattggatccttttgctataaaggaca

SEQ ID NO: 7898 - DNA, 120 bp, synthetic construct
  source 1..120: mol_type = other DNA
cacctggacccatacccagtggaacattttaagagcccttcatggatcacctttctttagagagaactgttcttttttttttttcttttgagacacagtctcactctgtcgcccaggctg

SEQ ID NO: 7899 - DNA, 120 bp, synthetic construct
  source 1..120: mol_type = other DNA
taatactcctcttggcgtttcatgaacttccggaagtgctcctggatgaggaatgtggcgtagaacttccccactgtcacctcatcatctgcagaggagccaacaagagatgccctgaag

SEQ ID NO: 7900 - DNA, 120 bp, synthetic construct
  source 1..120: mol_type = other DNA
gtgagccctgagcaagggctcagagacaatactgagaccccaccctgactccttcccctgctcccaccatgcttgtcttcccagtaggtgaggacctgcagatttagtggagtcgaatgt

SEQ ID NO: 7901 - DNA, 120 bp, synthetic construct
  source 1..120: mol_type = other DNA
gttaggattaactgttgtctacaaaatgggtaccccaaaataggctctctcctttggcgcattccctcagatatgggataaccaggtctggaatccagacctcattttccctatcagtat

SEQ ID NO: 7902 - DNA, 120 bp, synthetic construct
  source 1..120: mol_type = other DNA
ctggagatactctgattctctgatctgagacctcagataaatgaagggggaaggagaagcccactcatactgaataaactggagagtgactccctgtgagacggtaggaagggtctagga

SEQ ID NO: 7903 - DNA, 120 bp, synthetic construct
  source 1..120: mol_type = other DNA
tctccctgccccgcaggccctcagcatctcaccaggaaggcacagagcatgtagaagctgatgaagtagtagtatgcaaagttggtgccacatgtgtactcctcccctggggcatagtcc

SEQ ID NO: 7904 - DNA, 120 bp, synthetic construct
  source 1..120: mol_type = other DNA
ggtttggagttgaggtgcagagctggggcgaggtgggaatctctgcctgcacacggtgaggtgccggtctccttttcacaggccataagggctgcaggctgctgtgacctcatggagcct

SEQ ID NO: 7905 - DNA, 120 bp, synthetic construct
  source 1..120: mol_type = other DNA
agccaaaaaaaacgggattattttctagatcaggtaaagttcttcttagcaagccaaagaaaagagggagggtagacccgttttcccagcagcaagcagacccggtaagtcaatgtgtgg

SEQ ID NO: 7906 - DNA, 120 bp, synthetic construct
  source 1..120: mol_type = other DNA
tgcaaagatttcccaaagcttggctgctctattgccacaaactcaatgtggctactccccatcactcccaccctgcacacggctgttctaagccaggcaagcctctaatcttgtgccagc

SEQ ID NO: 7907 - DNA, 120 bp, synthetic construct
  source 1..120: mol_type = other DNA
ccaatcaggggcggggtgggtgggagtgaggactgaagctctgtgggaactgtgaggcaagaggtgggggacaaggaaataagaaggggagggaaggctggacacagacagatcccttct

SEQ ID NO: 7908 - DNA, 120 bp, synthetic construct
  source 1..120: mol_type = other DNA
tacacagacctcagattttaagaagtaactatttttagtttgggctgtttattttggctgtttagatttctctgttctggctgtgctggtgagaagtgctgctgtcaaaccatggaggct

SEQ ID NO: 7909 - DNA, 120 bp, synthetic construct
  source 1..120: mol_type = other DNA
gctcatctttctctcttttccactgtgtccctcccaggatgccacttgggcaactgttttttgattttggcctctgactctcggatcttctccaccctccttcgttgcagcaaccttcag

SEQ ID NO: 7910 - DNA, 120 bp, synthetic construct
  source 1..120: mol_type = other DNA
catgggaggtactcagtacatatttgagaaataaatgagtgagtcttctaactgggtctcttaattttagtcatcctcacttcctgttgctcatctccaggttagctttttagaagcagg

SEQ ID NO: 7911 - DNA, 120 bp, synthetic construct
  source 1..120: mol_type = other DNA
aatgatgctgccaatgacaatcaggaagtcaaacacattccaggggtctccaaagtagccctgggaaggaaaaggatgggaaagcgagggggtgagctttgggaggaaggagctctggct

SEQ ID NO: 7912 - DNA, 120 bp, synthetic construct
  source 1..120: mol_type = other DNA
atggcaggtcgtccaggcagggctctgtaacaggttctgtttagtcatttgggtacaggactgggaaagaagacccctggattccatagtccatgttatcactggctactagtgggaaac

SEQ ID NO: 7913 - DNA, 120 bp, synthetic construct
  source 1..120: mol_type = other DNA
tctgttttgcaaatactaaacccatttttcttgggaccagagccaagattccagccaactcaaccatccagatttgcaacagcagaagaaaaacagagaaagcactttctacttcccaca

SEQ ID NO: 7914 - DNA, 120 bp, synthetic construct
  source 1..120: mol_type = other DNA
agatggccatctccacacggttgttgtagatgggacccacgtcctccgcattggagtctatggccttgtacagcagcctgggggtgggcagagaagagaggacagactgggtggggtgac

SEQ ID NO: 7915 - DNA, 120 bp, synthetic construct
  source 1..120: mol_type = other DNA
actccacagggcatggctgggctgccttgccccacccacatcctctgggccctgggtggggagtgtgaaggagaaatgaagttccagatctgggacccaaggggacaccgctgggcgagt

SEQ ID NO: 7916 - DNA, 120 bp, synthetic construct
  source 1..120: mol_type = other DNA
ccttttatctgtgtctcagattgggtccctgagcaacatgtttgaaggaaagtagtggatggctaggtcttttttttttttgtttgctcactctgtcgcttaggcaagagtacagtggtg

SEQ ID NO: 7917 - DNA, 120 bp, synthetic construct
  source 1..120: mol_type = other DNA
caaaagcgacatcaaatgccaactggaactgttatgcttctagaacctcctggaaggcaggagctgggggtcttttaatgagagacaaaagcatggcgagagttgggtgttgacaagcaa

SEQ ID NO: 7918 - DNA, 120 bp, synthetic construct
  source 1..120: mol_type = other DNA
ggatgtcactgaggaaactggatctggacttgccacatattagccttaaaactctgtgcattcagttgaagcaaattcactttgagtctcaataatgtgttgtgttgcttgtgtatttaa

SEQ ID NO: 7919 - DNA, 120 bp, synthetic construct
  source 1..120: mol_type = other DNA
tgctgatggccacgaacatgcactgcaccacgtgctggggacagaggggccaatggggactgggggtgcacccacagtaaccctgctagcccagttgaggaaaccccaggagtgcaagac

SEQ ID NO: 7920 - DNA, 120 bp, synthetic construct
  source 1..120: mol_type = other DNA
tctgctcaggagagcacttactgaggcaatagccttccagaaatctctatatttcactcaactccttgcagtggcctaaatgcatttcctatctctgctcgcagttgttgaaatgtgagg

SEQ ID NO: 7921 - DNA, 120 bp, synthetic construct
  source 1..120: mol_type = other DNA
tgtccaacttcaagttctggctctcgtgccccaaactccacaaacttcttgacctcgaggaagccaccatctccctctactcaattccttcaatagttgaggccccgaaataaggtactg

SEQ ID NO: 7922 - DNA, 120 bp, synthetic construct
  source 1..120: mol_type = other DNA
gggctttactttccagccctccatccagatacttgtgggcctgccggtgtgctgggtcccatgagtctttcctgccagtctccacctcttttctgcttctctccagcccctgagttcagt

SEQ ID NO: 7923 - DNA, 120 bp, synthetic construct
  source 1..120: mol_type = other DNA
cccatcaaatgaaaatgggacaggctggtctctatccatgaggcagacagatgaaactccacagagactatggcctgtgtatagtttaaaggtgtaaaattatgaagccgataaaaacta

SEQ ID NO: 7924 - DNA, 120 bp, synthetic construct
  source 1..120: mol_type = other DNA
cagtttccaatttgtgaaaccgacaaggggcaggagggttgttgaaataaaaggaccctgtgatcctctcctgggctaggattttaaaaatagtaacttcacagagaagcttcttccagc

SEQ ID NO: 7925 - DNA, 120 bp, synthetic construct
  source 1..120: mol_type = other DNA
cctcagatttcctgtcagccaccatctcacctgcacacaagtcactgccatctaagaggtgataactgttagatgaaacaactcaaaatgagttattctaaaacacaaatattcattgct

SEQ ID NO: 7926 - DNA, 120 bp, synthetic construct
  source 1..120: mol_type = other DNA
aataaatacttgctgagttacatgaaagtaaaatgtatgggtttttctgttgtgtgcattgttgagagagacaagctggcagatggcttatttgcacagaagggatgtctccggtgttct

SEQ ID NO: 7927 - DNA, 120 bp, synthetic construct
  source 1..120: mol_type = other DNA
tggctgataactctcctacctccccaccctaccccacctgtaccctgtggtatgaagggaaccatggattggaagagcccctagactgcctctaacatccccacctgaggtgctcacctt

SEQ ID NO: 7928 - DNA, 120 bp, synthetic construct
  source 1..120: mol_type = other DNA
tgtcaccatgtcagggaccctgatcattgggttacagggaggccctgtccagagctggaaggccatggccacgactgagcactccaggtcccttcctgctaaggaagcactcacttggac

SEQ ID NO: 7929 - DNA, 120 bp, synthetic construct
  source 1..120: mol_type = other DNA
tgatcatcccggccacagggtcctggtggctccctgcctgcctctgaacctttggagaaggctgtcccaccatcttcatgttcctcagcaaagctctgtccttcctccccactgctctag

SEQ ID NO: 7930 - DNA, 120 bp, synthetic construct
  source 1..120: mol_type = other DNA
aacaaaacaaaacccctatcccagtgatctagaagcttattgctgctctctatggacaagaaattggactgtgggctcaccatttccctgttctcttcctaacccccgggcttcactgtg

SEQ ID NO: 7931 - DNA, 120 bp, synthetic construct
  source 1..120: mol_type = other DNA
tggctgcatgcccactctctccttcctgcagagcacttgtctgtttgtaatttcacgctggttaatatgactattgattaactttaggtcccatcactggacgagaaaccccgtgagaat

SEQ ID NO: 7932 - DNA, 120 bp, synthetic construct
  source 1..120: mol_type = other DNA
cagcggagcacggagatgcccaggggtgtcatggcacccgactccaccagcaggatctccaggataccgctacacaccacgaagcagtcgaagcggttgaagatagacatgaagtactgg

SEQ ID NO: 7933 - DNA, 120 bp, synthetic construct
  source 1..120: mol_type = other DNA
atcctcccacgctttgccccctcccccttttcgggaagctccctgtccgtgattctttttctttcctatatatttaacttctttctttcaaatggaccctcactttgccattcttaaagc

SEQ ID NO: 7934 - DNA, 120 bp, synthetic construct
  source 1..120: mol_type = other DNA
tctttctttggaatcgcaaccaaccctatctcaagactgtttggggtagtcctttgtgagaattcccctaccacagcttttggggcaattccagctgaaggttcagcaggatgaaacagc

SEQ ID NO: 7935 - DNA, 120 bp, synthetic construct
  source 1..120: mol_type = other DNA
tgtactgttctatcatctcaggtttttggggctgccagcttccattgattgtacctgatgactctttctcagggtggctctgttccttatttggtttgcagtttttttttgttgttgttt

SEQ ID NO: 7936 - DNA, 120 bp, synthetic construct
  source 1..120: mol_type = other DNA
attatattcttgcttttaacttctcactggctttccattgcctaaagtgtaaagtccaacactttattcacatataaggcctgatatcgtttggatagacagccctgcccaaatctcatg

SEQ ID NO: 7937 - DNA, 120 bp, synthetic construct
  source 1..120: mol_type = other DNA
ctgcctagggcttgtttacctatcctttaagatccacagagtttcagcatctcttctgtgattctcctcttgctgctaccttgtatttacctctatcattgccctccttctattgacttg

SEQ ID NO: 7938 - DNA, 120 bp, synthetic construct
  source 1..120: mol_type = other DNA
agccagactgagtaaaatcctccatctttcacagaagagcgataatgacacaaacctccgaggcaatggaatgagaggatgcacgcaaaatgcttagcacaagtgcctggcaaggagcag

SEQ ID NO: 7939 - DNA, 120 bp, synthetic construct
  source 1..120: mol_type = other DNA
gtgtgcaagacggatgaaagcacagaaaagatcttagaggctgcacatctgttaccatggttacctctttgaagggcactggagaccttcatcttttctttgatgtatagctctattgtt

SEQ ID NO: 7940 - DNA, 120 bp, synthetic construct
  source 1..120: mol_type = other DNA
gtcacacctggatcttaccattttgagccattttgctttaggcaagtcactcaccctcaaaggactaatgttggacttgctcagtgggcctgattgcaaggtatgactcagaggtgggag

SEQ ID NO: 7941 - DNA, 120 bp, synthetic construct
  source 1..120: mol_type = other DNA
tttgaaagtccagttaagcctatggatctctcttcagaataatgtgaaatgcacaaaataaaaccatagcatgacaaagaagccagttacagctaggcttcacttaatgactgggatgcg

SEQ ID NO: 7942 - DNA, 120 bp, synthetic construct
  source 1..120: mol_type = other DNA
ctagcctctctgctgtgctggggtgggtggagggatgacagcaggactggtctcaaagagaacagctctcattaataatgaccattagtatttagtgcttattttgtgctggactctgtt

SEQ ID NO: 7943 - DNA, 120 bp, synthetic construct
  source 1..120: mol_type = other DNA
ctcatagactctatctccagttgatttatttaaagccaagatttttcaaatgaacaacgtctgtgaccccggacaagtcacctaacatctctgagcattattcccaaccatctaatggcg

SEQ ID NO: 7944 - DNA, 120 bp, synthetic construct
  source 1..120: mol_type = other DNA
atagttatatgggaaagcagtcttgcagaggcaaggaaaaagactcaaagggcccttcgttcctcaaaaagtgtgaaattctaagccatcagaattgagtcactcacagccaggtttttc

SEQ ID NO: 7945 - DNA, 120 bp, synthetic construct
  source 1..120: mol_type = other DNA
acatcctgcatctccttttatcttaggatgttttacagtctccttttgtgttcagagattagattggctcatcagaactggaacaccctgccttacccatatttatctatttaccatgta

SEQ ID NO: 7946 - DNA, 120 bp, synthetic construct
  source 1..120: mol_type = other DNA
ttaatattgtgacatgttcctcggttttcatttctcataccatgaatatcaacagatcaaaacctatataaacaaaagctctctgaggtcctcagtaatttatatgagagaaaaggggtc

SEQ ID NO: 7947 - DNA, 120 bp, synthetic construct
  source 1..120: mol_type = other DNA
tgtccatgcttgagcacctgtggaaaggcctaggggagagacggcaaatacgggtgcatcaactaacaaatgatctgatcatgcttatctggggaatttcacttaaaaggattctgacat

SEQ ID NO: 7948 - DNA, 120 bp, synthetic construct
  source 1..120: mol_type = other DNA
agggcagtttgtaaaaggcagaggcagattcacagaattcttctattttctctactgagccaaaagtagcactggatggttagcaggtaaccaacaccatccttacggaactgaaggaca

SEQ ID NO: 7949 - DNA, 120 bp, synthetic construct
  source 1..120: mol_type = other DNA
agccgtaggcaatgatcttcatggcggcttcaatcgagaagacaatgaggaagaaatactccagcttctcctgtgggagcaaacgtggtcacagcatgcctctgtgctctctgagtgcac

SEQ ID NO: 7950 - DNA, 120 bp, synthetic construct
  source 1..120: mol_type = other DNA
ccaggtgagagctatttctaactgaggaagcaagtctctcttgtcaggactccaggctgaaactgctctccttgcagccatctgaaccctggcttggcagcttctaagagctctggcctc

SEQ ID NO: 7951 - DNA, 120 bp, synthetic construct
  source 1..120: mol_type = other DNA
tgcccttcattccttctattaatttgtgatcccaaagctttccccttcttccagaaaatggtaatgtgatgattaaaatgcaaagccatgccattctgtgaaagggcctgttgatggaga

SEQ ID NO: 7952 - DNA, 120 bp, synthetic construct
  source 1..120: mol_type = other DNA
ctcatttgtaaatctgaaataatgagagctaccttgaagagtcatggtgaggattaaatggcaccttgtaagtgtctacccctgcctggcatgcaccaaatgctgaatacatcacagcta

SEQ ID NO: 7953 - DNA, 120 bp, synthetic construct
  source 1..120: mol_type = other DNA
ctgtgtcctcactgtcccctataaccctgtgcttctctttgctgcctcctgacagaccgcagcttccttgaggccacgtcatcctcacatgtgtttctaactgtggggattctccatggc

SEQ ID NO: 7954 - DNA, 120 bp, synthetic construct
  source 1..120: mol_type = other DNA
aaaacgacgaactgtggtctttccctacagatcatctgagaagctctgctatagaatgcgtcatcctgcccagcacacaggaggctctcaggctatgtttgttgaataaatgaacaatgg

SEQ ID NO: 7955 - DNA, 120 bp, synthetic construct
  source 1..120: mol_type = other DNA
ctccttctttaggttcaaggcatggtgacctgctcaggcataaatctcactgggacagggaggcaatggactcatattcgttgttaactctttaaggcacgtgtgctgcatggaggcaag

SEQ ID NO: 7956 - DNA, 120 bp, synthetic construct
  source 1..120: mol_type = other DNA
aagatgacctgctgaggagtgagggaagtggctatgtttagcccaacgaacgctcacccaaatagacgtaactggaatgggtatcccttgccatcctacctctgtctcaggggtctcatt

SEQ ID NO: 7957 - DNA, 120 bp, synthetic construct
  source 1..120: mol_type = other DNA
caccctccataactagtcatcttccttgcccctccttctcacttccagggccttctgagatgtatctttcataaaatcaataatcagggaagaggaaaaaagagctaggatggaacaaaa

SEQ ID NO: 7958 - DNA, 120 bp, synthetic construct
  source 1..120: mol_type = other DNA
ttcaaggatgtgtgtgaagaagacggtagtcccctggcctgggagtaaactctagataagaacagtctttcaccacaccccaaggcttccttgtgcctccgagcccagtggaggacgaac

SEQ ID NO: 7959 - DNA, 120 bp, synthetic construct
  source 1..120: mol_type = other DNA
aggagaattgcttgaacctgggaagtggaggttgtagtgaggtgaagtcgtgccactgcactccagtctgggtgacagaggagacttggtctcaaaaaaaaaaaaaaaagaaagaaagat

SEQ ID NO: 7960 - DNA, 120 bp, synthetic construct
  source 1..120: mol_type = other DNA
atctacttaagaaaaatctaaattatccagaacttggaaataaagcaaagaaaggatgccatatctttgtaatatcatgttggagcattttataacaggcctggccaaggattatctaat

SEQ ID NO: 7961 - DNA, 120 bp, synthetic construct
  source 1..120: mol_type = other DNA
agggtgaaatgagataatgtagcaaaagcaatcagtttatcatgtctgcccaacaattaggaagtctgataattgtttttgcttttccacattggtcccctcagcctggcctaggctgga

SEQ ID NO: 7962 - DNA, 120 bp, synthetic construct
  source 1..120: mol_type = other DNA
gaacccatttttataaccaccatgccataatgggctgatttcagaggcccgtgccactgtgacatcccacagttggccaggatgtcagcatcctggatcctcctcttgccaccctctgat

SEQ ID NO: 7963 - DNA, 120 bp, synthetic construct
  source 1..120: mol_type = other DNA
aaatgagtgctgatgaaggtactaaatataaagcttttccctttctttcagcccctttctcagcctactgtggtgtcttttgattgctgttcagtgttgtgcagggcaagtgcagattgc

SEQ ID NO: 7964 - DNA, 120 bp, synthetic construct
  source 1..120: mol_type = other DNA
agatgcattcgttaaatgaatgagaaaggtcatgaataattaaaccttaggcctcctttcttgaaagctacgggttattctggatgactggaaagaccccaacccttctctgctacctac

SEQ ID NO: 7965 - DNA, 120 bp, synthetic construct
  source 1..120: mol_type = other DNA
tgcatccagcagaggtaaaatttaatatcctccaaggtggggcagagtttttttacaaaagtagtcaatgtcacagggaactgaggcccaaaaatatgaaatcctgaagggtggggtaga

SEQ ID NO: 7966 - DNA, 120 bp, synthetic construct
  source 1..120: mol_type = other DNA
atgtgggtgaccctgggtaatgtgcctaaactctctgaatatcagtctcctttgtcttttaaatgggtctaataatgttacttaccccacaggagtagttatagggattaaataatacaa

SEQ ID NO: 7967 - DNA, 120 bp, synthetic construct
  source 1..120: mol_type = other DNA
ggctgacagtatcagaatctggaataagcaggttgaccctggaaacccattgagccactcagccagccctgcaggtggctggggatgcagggcctgcatcgtcagggagttgaaccaccg

SEQ ID NO: 7968 - DNA, 120 bp, synthetic construct
  source 1..120: mol_type = other DNA
ctggaaagagctagagaaagcaagggaggaagcgagggagttgtttgggggtggatggggaggcatattacgtagttgggcttgacagaaaaatcccattctcttcccagtaacctccag

SEQ ID NO: 7969 - DNA, 120 bp, synthetic construct
  source 1..120: mol_type = other DNA
tttgtgctctgtgatcaccccgaatccctccctcatgacgcacacccccccccacggcccgggccctgaaggatacttccattctacaatgctgatgcaggccttcctcagggggttctc

SEQ ID NO: 7970 - DNA, 120 bp, synthetic construct
  source 1..120: mol_type = other DNA
caatcagagacatgaacccatcagaaaaatgtaaaagttttcatctttctagttttcccccaccctccactcctgctgatgaatatgtgagacttgccaactagagggaagtttagagag

SEQ ID NO: 7971 - DNA, 120 bp, synthetic construct
  source 1..120: mol_type = other DNA
acggtatgtgtagtatactgtttgtgttgcataaaaggaaatgtgtattccattgcccagtggaatatatatgacatttctggtaatatacccatgcaacaaccaccagtggttccctcc

SEQ ID NO: 7972 - DNA, 120 bp, synthetic construct
  source 1..120: mol_type = other DNA
gtttgcctgattgtatctgtccccacttgagttttatgatggtggagttgtatgagatgtatggactgagatctaagatttcctcgcattctgccagtgtacctcactagcctgtcccac

SEQ ID NO: 7973 - DNA, 120 bp, synthetic construct
  source 1..120: mol_type = other DNA
ccctccacctctttttaatgtcccagttttaaaaataccttatcttgtgctacatgagatagctgggaaagccatgatgggtcataagttgccaagtaagaagaaggcttcttcattcaa

SEQ ID NO: 7974 - DNA, 120 bp, synthetic construct; identical to SEQ ID NO: 984
  source 1..120: mol_type = other DNA

SEQ ID NO: 7975 - DNA, 120 bp, synthetic construct
  source 1..120: mol_type = other DNA
tctatagaatgagtcagatgagagctccaggcacagagcagattatacaaaggaaacaataaaaaatttgaacaaaggattaaaagttcacagagaactggctggtttttcactggaagc

SEQ ID NO: 7976 - DNA, 120 bp, synthetic construct
  source 1..120: mol_type = other DNA
aatctccattgtttcagggaatcccagagtatagaagacccatgatttgtttcagaattaaactcaggcaaatgaaaagatcccagaatcccttagagaaccccctagtataggagcact

SEQ ID NO: 7977 - DNA, 120 bp, synthetic construct
  source 1..120: mol_type = other DNA
caagtagctaaaactacaggtgtgtgccactatgcccagctagtcttttaaattttattgttttattttgtgcagacaggggtctcacattgttgcccaggttggttttgaactcctggg

SEQ ID NO: 7978 - DNA, 120 bp, synthetic construct
  source 1..120: mol_type = other DNA
actgaaattcacagagaggatgaaatgcaaaaacacagactcaaatgaaagtagaaagtaaacttgtggtgcaagagactgattcacataaaggaaaggagagtctaggcaggcacaagt

SEQ ID NO: 7979 - DNA, 120 bp, synthetic construct
  source 1..120: mol_type = other DNA
gtgtggatattcctgatcaaaggcttaaaagcctccaaggctctcccctcttcagacaccagccttgagtgcagacctgttaaaatggattgtcaatctgtgaaagtgagttaaggcagc

SEQ ID NO: 7980 - DNA, 120 bp, synthetic construct
  source 1..120: mol_type = other DNA
cagaggcacacaccaccatgcagttaatttttttattactatttgtaaagatgaagtctctctgtgttgtccaggctcatcttgaactcctgggctcaagcgatcctcccacctcagcct

SEQ ID NO: 7981 - DNA, 120 bp, synthetic construct
  source 1..120: mol_type = other DNA
atggctctgagtgggactggcgtctcagagatggatgtaaataaagagacctggagctgtgagaactgcaactcctctcctgccactcaggcttggagtcctgagagaccatgacccaca

SEQ ID NO: 7982 - DNA, 120 bp, synthetic construct
  source 1..120: mol_type = other DNA
tagggagacacatgcagaaggtcctcataaagactttgtctgtcttcttcctttctctcctccacccccatcaaactcttactcattttaagatttttttttttttcactactttgatcc

SEQ ID NO: 7983 - DNA, 120 bp, synthetic construct; identical to SEQ ID NO: 992
  source 1..120: mol_type = other DNA

SEQ ID NO: 7984 - DNA, 120 bp, synthetic construct
  source 1..120: mol_type = other DNA
tagatcccaaacctggacagacagtgggaggaagcctgacttttcttccctaactaggctctcaagcttccaggtggttttgtgctcttctcacctccgcctgctctgcctgctcgtgtc

SEQ ID NO: 7985 - DNA, 120 bp, synthetic construct
  source 1..120: mol_type = other DNA
catctgacactagaataataatcatcatgcacgtattacagagtggctttaggtgctaaataaggtcatctacataaagctcctagcacagttcctcaatactgttagttctttaagaag

SEQ ID NO: 7986 - DNA, 120 bp, synthetic construct
  source 1..120: mol_type = other DNA
aataggcaaattttagagatagtaggtaattcctgcttgcagaggtgggtgagagagaaatgggagtgactgctaatggctatttatcaaaatgttctagaattagatactgattatgtt

SEQ ID NO: 7987 - DNA, 120 bp, synthetic construct
  source 1..120: mol_type = other DNA
attgctacctgcaaaatcaattttcctgcacttcactctccactggtgttgaaaagagtgaaaccagagaaaagttgtccaagttccaaaaacaaagttacccatccatttacagggtca

SEQ ID NO: 7988 - DNA, 120 bp, synthetic construct
  source 1..120: mol_type = other DNA
cgctttgccttctgccatgagtaaaagctccctgaagcctccccagaagcagatactgccctgtttcctgtacaacctgaagaactttgagccaatagaagctcttttctttataaatta

SEQ ID NO: 7989 - DNA, 120 bp, synthetic construct
  source 1..120: mol_type = other DNA
aagcagctgtcagtctctgtttcaagaatttaccactggcagatagagtcagtgatacaccagattatggaggcttctgaatgctgtggacagatcctgaaactatatccaaatggatgg

SEQ ID NO: 7990 - DNA, 120 bp, synthetic construct
  source 1..120: mol_type = other DNA
ccctgaacatcatatcagaatcatcctatggaaaaacctccaggcgtctcaaccttcccatgatctctgtttccatttcaattgattttaatgctggcgcaatcctatctaaatgctaat

SEQ ID NO: 7991 - DNA, 120 bp, synthetic construct
  source 1..120: mol_type = other DNA
ctcataagaaagtcttattcttattgaatgcttgaagaatcaaagtgtcttacctaaggccacagaactagtagtgacagaagggggattcaagccagttctgtctggccccaaagccca

SEQ ID NO: 7992 - DNA, 120 bp, synthetic construct
  source 1..120: mol_type = other DNA
tgttgaatgtttgttctcatgttgaatgaagagatgcaaagaaaaatgcggttaaaataagcaggcttcctatttaaggtgcaatggagtgacctagatgcttgtctgggggtctctgac

SEQ ID NO: 7993 - DNA, 120 bp, synthetic construct
  source 1..120: mol_type = other DNA
gctgggactattggcacacaccaccacacccagctaatttttgtattttttgcagagatggagtttcgctatgttgcccaggctgctctcgaattccttgactcaaacgatctgcccacc

SEQ ID NO: 7994 - DNA, 120 bp, synthetic construct
  source 1..120: mol_type = other DNA
agagaacatcaataatgactctcaatttaaagtgatattttgtgccatgaaagacgaagaccaagaccctgttccaaattaaaggtgactaaggaagcataagcaggccgggcgtggtag

SEQ ID NO: 7995 - DNA, 120 bp, synthetic construct
  source 1..120: mol_type = other DNA
gagtcactatgcctagcgataagacccttttaatatctttgaaaggtttaaatgttaggaaagtttgtttctattgtgctgagttgttattaaatagtccgctcctctggactggattat

SEQ ID NO: 7996 - DNA, 120 bp, synthetic construct
  source 1..120: mol_type = other DNA
tgaactcttcatattcatccttataaaaagtcccaattttagatgaggaaatttagacagctcagaaaggccacaggacttgacatagtacacaaagctactaggtggcagattctggac

SEQ ID NO: 7997 - DNA, 120 bp, synthetic construct
  source 1..120: mol_type = other DNA
atactcatctagacatccacctcagccaaataaacttggtttgagtttggggacttaatctaagaagcactcctctttgggactatactcatctctacaaggcaaagagagtttgcctct

SEQ ID NO: 7998 - DNA, 120 bp, synthetic construct
  source 1..120: mol_type = other DNA
atccagccagggcctcctgttttcctaaataaacttttactggtacacagccacacccatttgtttatacatgatccatggctgctttcatgccacagccgcagttaagtagttgctaca

SEQ ID NO: 7999 - DNA, 120 bp, synthetic construct
  source 1..120: mol_type = other DNA
ccaatggagcatatttactatcctgtgttgtatggatttaatggaaccaatgttgataaaacaggcaattgatggagatccttaaggcatataggtactcagaatcagaacccaacccat

SEQ ID NO: 8000 - DNA, 120 bp, synthetic construct
  source 1..120: mol_type = other DNA
agtcaagggagattttattgtcaggttaattttaagagagggagatgtggagttttttctaactgtttttccctcttctcaggggtaggggggtgatgtagatgatgaggtgatgaggca

SEQ ID NO: 8001 - DNA, 120 bp, synthetic construct
  source 1..120: mol_type = other DNA
ctgcgcccgaccccctctttcattcttattattcctatcttggatggtaaggactgaagggatttgattggttgaagcttttattcattcatttattcagtaagtatttagtggggccta

SEQ ID NO: 8002 - DNA, 120 bp, synthetic construct
  source 1..120: mol_type = other DNA
gtggcttgatttaggattagtattaatagatcagtactggtcctaaacctccacaccctttaaaattccttgggtggcttttgaaaatgcagattcccagacactgccacaaccctaaaa

SEQ ID NO: 8003 - DNA, 120 bp, synthetic construct
  source 1..120: mol_type = other DNA
gagtcctctcagtgctctcccctctgtgtacctttgtctctttaaatattctgaaatccaacaaggctacatgaacactggcacttatgactcagtgtcctacagaatttgaataaagca

SEQ ID NO: 8004 - DNA, 120 bp, synthetic construct
  source 1..120: mol_type = other DNA
caagatccctcccaactgtaatacaactaattaggataaacattcttcaagtttagattatgttacttggattatagagcactcttctggatcataggcttgaagactgggccatgtcta

SEQ ID NO: 8005 - DNA, 120 bp, synthetic construct
  source 1..120: mol_type = other DNA
cctacaaaactgttcaaattggggtttcataggtacttacccctttgtcaaaggtggcaaagaatttgatgtaaggctggaagtgttcagctgcttcttcaaaagccttgtagtctaagg

SEQ ID NO: 8006 - DNA, 120 bp, synthetic construct
  source 1..120: mol_type = other DNA
agacaaagatactgatcttcaaaagctctcagcctagagagagctattgatccttaaagaatcaaaatgcagcatgatagttgttacaacagaggtgagtgccgcaagcacaggtgagag

SEQ ID NO: 8007 - DNA, 120 bp, synthetic construct
  source 1..120: mol_type = other DNA
tggtcccttccagtcagacccctttcccactttctttgatgactcttttggcttctggaataggctcctgaacattgagttcccagcctccagcttactaaaaacttatcttagcatttt

SEQ ID NO: 8008 - DNA, 120 bp, synthetic construct
  source 1..120: mol_type = other DNA
aacattacatttgtcaatgaaaagaaaagtgatagctgtcagattgaactaagtgcccttgaaggacactttagagatggaattatctgaattatgtccaatggcaaaaaaagaaagctc

SEQ ID NO: 8009 - DNA, 120 bp, synthetic construct
  source 1..120: mol_type = other DNA
ttttgtacaccatactagccatgtgataatgggcaagttaattgcacctttctgttccatcctttcatcatcattaacatgcaggtaataatgataatcacctcacaggcttgttgtgag

SEQ ID NO: 8010 - DNA, 120 bp, synthetic construct
  source 1..120: mol_type = other DNA
taggcaggaaaagtggagaagagcttttctcttttttgtagaacactcagcctgctttaaagctggagaacctggcccctccttaatattcttgcagctttcctgactgttttgtacaat

SEQ ID NO: 8011 - DNA, 120 bp, synthetic construct
  source 1..120: mol_type = other DNA
atcattatctctccattcccaccacccccaccccatcctgcttttggcaactactctctgcttctctgagttctcgtgttctagattccacatataataagtgagaacatgttgtattag

SEQ ID NO: 8012 - DNA, 120 bp, synthetic construct
  source 1..120: mol_type = other DNA
ggcagtgtctggattcgatcaagtctaaagtctcctctaactagagccttctacttaggtaagtcaatcacattgtttattgtttgaagcagttagtcttatttccaaaagcctccccct

SEQ ID NO: 8013 - DNA, 120 bp, synthetic construct
  source 1..120: mol_type = other DNA
cagctcctcttcagtagcagtggagcaaaaccaaggagatttcaatagacgtctatgtataactggtaacagaattagcatattactactacatggcccccaacagtttctagggtggct

SEQ ID NO: 8014 - DNA, 120 bp, synthetic construct
  source 1..120: mol_type = other DNA
actcatgccattattgatctttgttcagctcaatttacaggtcttcactatcaaagtgagttctctgagggtaggatcattgtcttcttggtatcccagagccttgtacagaggctgtgt

SEQ ID NO: 8015 - DNA, 120 bp, synthetic construct
  source 1..120: mol_type = other DNA
aagaagactactgcaattgttgaggcacaacttgatagaggccaaaataaggcaaatggaaaagaaatgaagatgaaggagcaggttcacaaaatacctccactctcctataaaccccca

SEQ ID NO: 8016 - DNA, 120 bp, synthetic construct
  source 1..120: mol_type = other DNA
tcatgcaggcagaagtcacggcaatcttgatctccctggctcaagccattctctcatcccagcctcccaagtagctggcactacaggcacatgccaccatgcccagctaatttttaaatt

SEQ ID NO: 8017 - DNA, 120 bp, synthetic construct
  source 1..120: mol_type = other DNA
accagaggaactacctccattctctctctttgggattacagggttgtgaatcctaaagtgcactgcacttaagcatgacatatcgacactagagagtacaacttccatgtgcggtcactt

SEQ ID NO: 8018 - DNA, 120 bp, synthetic construct
  source 1..120: mol_type = other DNA
tattcttgtcccctcaggggaaggatgattcaggagaatgctgagaatcaaggagggaaaatctgaggagcagacctaagacagaaaatttggaagaatatatccactgtcacataccag

SEQ ID NO: 8019 - DNA, 120 bp, synthetic construct
  source 1..120: mol_type = other DNA
gtccctatcccctcttttaccctgggcaaccactaatttgttgtccattcctataattttgtcatttcaagaatgttatgtaaatggaattatatagtatgtaaccttttcagactgact

SEQ ID NO: 8020 - DNA, 120 bp, synthetic construct
  source 1..120: mol_type = other DNA
ctttgataaaatttaagataggttgaggttcctttttctttttttgccaatagatgtccgactgttccgatattttttggtgaaaaggctgtctttcatccattcaattgcttttgtaac

SEQ ID NO: 8021 - DNA, 120 bp, synthetic construct
  source 1..120: mol_type = other DNA
ctattgtttggtccagacacatttaggatttattgtcttcttgatggtttgaccctggatctgtttggctctacaactcatactataaatccctctactttcttttctatgtttgtttct

SEQ ID NO: 8022 - DNA, 120 bp, synthetic construct
  source 1..120: mol_type = other DNA
gaatctacgtttttataaaccacactaccacaccccattattctaatacagcagatctcaagacagactctgaaaaacactgctataaatggttgtcagcacatccaaagtgatatgaca

SEQ ID NO: 8023 - DNA, 120 bp, synthetic construct
  source 1..120: mol_type = other DNA
tctttcaccccattctcctctctggaactcaaaaagcccctcacaagggcacagtactctggcacttattgtgtaatcattagagttgtgtatagtctctacattgtgactctttcctcc

SEQ ID NO: 8024 - DNA, 120 bp, synthetic construct
  source 1..120: mol_type = other DNA
aaataatatgcataattcaataggaaagaagtggatatttataatatagctttactcttgttaaaagattgtatcctgtaggtatgtatcgcacctaatgacagggtggatccaagtaga

SEQ ID NO: 8025 - DNA, 120 bp, synthetic construct
  source 1..120: mol_type = other DNA
caggagtaggacaaaaaaataagggctgtggagacttagagagtttgtgggctgggaggtcaaatcctgcagagcccagtgggctgtgatgaatactgtggattaaatttccatgcactc

SEQ ID NO: 8026 - DNA, 120 bp, synthetic construct
  source 1..120: mol_type = other DNA
aataaaaacaaataaaagcggtagtttcttcagtaaatgaatgaatgaagagggaggctgtttagaaaaggggaggccagctagaacttggaggaggagtgtgtggataggcggaggggg

SEQ ID NO: 8027 - DNA, 120 bp, synthetic construct
  source 1..120: mol_type = other DNA
gaggggtaggacccccatgaggcctctcatctcaggactggtaagtcacgggtgaccttttagagaagagctgagacagaagccaagcactgggagttaaactgctgggtgggtggcaaa

SEQ ID NO: 8028 - DNA, 120 bp, synthetic construct
  source 1..120: mol_type = other DNA
ttggactatcacgttggtcaatgccaaggaaaagacccaagggaagatgctatgtattttttccaccccacaattctgagaggctatataacaacaacaatttttaaaaaagcacttact

SEQ ID NO: 8029 - DNA, 120 bp, synthetic construct
  source 1..120: mol_type = other DNA
ccacagtgcaataagcagaaaaggaacctgttcctgcttggctgaactttctgaaatgtctgactagtgtttattttgatagcatctgctaatgacagcaaatgccatggataactaact

SEQ ID NO: 8030 - DNA, 120 bp, synthetic construct
  source 1..120: mol_type = other DNA
gcaagatgccttactggcccctttcctgcatggctgtccaaacagaaacagcttatctggataattctggcctaccacatccagtttataaaaagggaagccttagaggcttctttgaac

SEQ ID NO: 8031 - DNA, 120 bp, synthetic construct
  source 1..120: mol_type = other DNA
taatcaactcaatccatgcttttacaactagcatttctgttcttttaccgtctcactccaaggatcccctgtattaccgatatgtgcccagcaaccctccacacagaattcaacagcact

SEQ ID NO: 8032 - DNA, 120 bp, synthetic construct
  source 1..120: mol_type = other DNA
agccccatattggcatggtttatggtaagttcataatatgtgcttctcccttctcctccttcctcttctcttcattcaacattcatttgacaaatgctgttgaatacctactgagtcagg

SEQ ID NO: 8033 - DNA, 120 bp, synthetic construct
  source 1..120: mol_type = other DNA
tagtcagaggtgtttgggttatgtgggtgggccccttataaacagatgaatagatgaatgccctcattcaagggtaagtgagttttaatgagaacaaattagtttctgagggaacaggtt

SEQ ID NO: 8034 - DNA, 120 bp, synthetic construct
  source 1..120: mol_type = other DNA
gcgactctccaaattagagctatactgacagttccaacaccattctgaagaatgaatgatccaaaggtcaaacaggtaacaacatgattctggtcatctggaaaactttcccaacccaat

SEQ ID NO: 8035 - DNA, 120 bp, synthetic construct
  source 1..120: mol_type = other DNA
aatggttgattttatagatgattttacacatagattttgtaggtcagtgtaaagaggtgaatctgtgtgacttactcaggatagtgggtaaatagaagagaagttcaggtgctcggctct

SEQ ID NO: 8036 - DNA, 120 bp, synthetic construct
  source 1..120: mol_type = other DNA
atcctgtcatagatgatgaaaccagcatccctctccgctacagggcttaatagataatctgcatgagtcatcctctaaatattattggaaagtaacctatgtttcagcacaggaaaattg

SEQ ID NO: 8037 - DNA, 120 bp, synthetic construct
  source 1..120: mol_type = other DNA
atttaagtggccataaaattgtttctatgtaagtgtgaagctcacccggaaaaagcttttgtccttttcttgccttctttttcaggctggaatgctggactcctagcagtgaagtggtgt

SEQ ID NO: 8038 - DNA, 120 bp, synthetic construct
  source 1..120: mol_type = other DNA
cccagctcccaaggcctgatttcctcagtttatcaactgatggggttagctgtattgtgtttagaatcctgatgaaatagtgagtgtgggctaaaagaagctagcatttgttaagtatct

SEQ ID NO: 8039 - DNA, 120 bp, synthetic construct
  source 1..120: mol_type = other DNA
atgacccttgggccctccagagctggactctggccagattggaaagcaaagtttgagtttgctgcctcctggtgtcatattacttgcctttttcttgctaagctgtatagaccttatctt

SEQ ID NO: 8040 - DNA, 120 bp, synthetic construct
  source 1..120: mol_type = other DNA
ttcttagaatgaatggggtggccctagtgtgaggagctatgagtttctaattcctagaaattcctcaggtgtttcagcctggggatggcaactcctcactggagagggaaatcaacttaa

SEQ ID NO: 8041 - DNA, 120 bp, synthetic construct
  source 1..120: mol_type = other DNA
aatgaagctctgagaaattacgtaatttgccctgtgtcctgtgcctagtagagacaaagccagaacttaaatccagatatcctgacttcaaggtctgtgttctttttctcctaatgatgc

SEQ ID NO: 8042 - DNA, 120 bp, synthetic construct
  source 1..120: mol_type = other DNA
cttttccagcctgtgatttgctcatttctataaaataaagtcttaataactatccctgctttctcttttcttgcaacccacagagagaactgaaattccacattcagcacccaaggttgg

SEQ ID NO: 8043 - DNA, 120 bp, synthetic construct; identical to SEQ ID NO: 979
  source 1..120: mol_type = other DNA

SEQ ID NO: 8044 - DNA, 120 bp, synthetic construct; identical to SEQ ID NO: 1025
  source 1..120: mol_type = other DNA

SEQ ID NO: 8045 - DNA, 120 bp, synthetic construct
  source 1..120: mol_type = other DNA
tattttccacatattctacgttttaaccacattcgcattaatgaagaaaatattttttaaaatgtttcaacaggaggtttgactttgctgcaaacaaggtaaagatactagtactgtttg

SEQ ID NO: 8046 - DNA, 120 bp, synthetic construct
  source 1..120: mol_type = other DNA
cctgcctgttactccctccctactccccatgtggcctccttatgcctccatttcttttttttagttctctctctccttgcctcctcaccctttctttcccctgaactctcaatccttctt

SEQ ID NO: 8047 - DNA, 120 bp, synthetic construct
  source 1..120: mol_type = other DNA
ggtggggtttcttatatatgccctcataacttcagagacggcacagctctaatgaacactcacttctagttcactcacaggcattttctggatacaaacaagtcctcaaaaagaattttg

SEQ ID NO: 8048 - DNA, 120 bp, synthetic construct
  source 1..120: mol_type = other DNA
tgtccctacaattaaacacactgaactaacaggaaaaggttacatacatttaggaacaattgcacttttaaagggagagaatgcatagttgctcacatatctcagtgtcagtcacctaac

SEQ ID NO: 8049 - DNA, 120 bp, synthetic construct
  source 1..120: mol_type = other DNA
tgccatctaccgaaactccacagtttccattgtgaatggcttctttggtgcagagttccaaaaattatgtagcccagctctttaattttgtaacatctaatgatatcaccgccttgaagt

SEQ ID NO: 8050 - DNA, 120 bp, synthetic construct
  source 1..120: mol_type = other DNA
atagtattttgtgtggaggatgacagagactgcatttctcaagtaaattaaaatcacagaaatactctttggagttgcatagcatgttcacaacgttccagtttcattcagtgaaaactt

SEQ ID NO: 8051 - DNA, 120 bp, synthetic construct
  source 1..120: mol_type = other DNA
taagacaagtagaatatattctcttcaatgtttttataatttgacactaagaagattttattatatatgcaattgctggtggttagatatatgatacttaaaattttctaattatctaat

SEQ ID NO: 8052 - DNA, 120 bp, synthetic construct
  source 1..120: mol_type = other DNA
tcagaattgtacttcgtagtaaggaacagaaacaccaaatgacatgggagatggaatttaaaattaattataaattggaacagagagatttagtttaaacaactaaaataatggaaataa

SEQ ID NO: 8053 - DNA, 120 bp, synthetic construct
  source 1..120: mol_type = other DNA
ggaaagtactgtatttctaatgatgtgaggacacccttaatgagacataaacataggaggatgaatacacaggagggaaaagtatttatgttaatttctaggcagatcaagaacatatag

SEQ ID NO: 8054 - DNA, 120 bp, synthetic construct
  source 1..120: mol_type = other DNA
cccagatggaaaaatcttaggaccactaaaaggcctcttgaccactaggcggcaaaaactaattttgaactacttgcctactcggtagcaggcctctttcaatagacattttaaatatct

SEQ ID NO: 8055 - DNA, 120 bp, synthetic construct
  source 1..120: mol_type = other DNA
ttttcccctgaatttctcaactaggttgataaaatccagaaagtcttcagagttagtgacaaaatcatctctttagtttaatgctcccatctgctgttaaggcaaagaatagcaattggg

SEQ ID NO: 8056 - DNA, 120 bp, synthetic construct
  source 1..120: mol_type = other DNA
attagactgccccaacccagaaattccatttggagaatgttgtgcagtttgcccacagcctccaactgctgtgagtttaaagataaactgtacatcttcaatattcatatttagacacat

SEQ ID NO: 8057 - DNA, 120 bp, synthetic construct
  source 1..120: mol_type = other DNA
tgtgaatcaccaggatttttcactatttaatttatttttatctcttttttagggccctcctggtattcctgggagaaatggtgaccctggtattccaggacaaccagggtcccctggttc

SEQ ID NO: 8058 - DNA, 120 bp, synthetic construct
  source 1..120: mol_type = other DNA
atttctgcctatgaaactgctcttgctaatacttcagagcacaccttgcttctcctgaagcatggcagccaaataaatctgcaggtaaaacaaccaaacaaataaatatgacaaaatttc

SEQ ID NO: 8059 - DNA, 120 bp, synthetic construct
  source 1..120: mol_type = other DNA
ttattatctttctggtttgtaaaatcttgaatggttgctcttctaggaattcagtatttttatggaattgtacaaaatagcttacccctactaaggttggaaaagaaaatggtagcatta

SEQ ID NO: 8060 - DNA, 120 bp, synthetic construct
  source 1..120: mol_type = other DNA
cctcccggtccccctggtacatctggtcatcctggttcccctgtaagtatagccattggtggtgttttcttcctcatttttagaaaaatcaaattaatatatattctgctataattcagc

SEQ ID NO: 8061 - DNA, 120 bp, synthetic construct
  source 1..120: mol_type = other DNA
ttttctaaaaggaggttccttccaggaatacatacactgtgtaataataaattgtaacagaaaaatttacaaatctattcattttttatttccttattttcagggccctccaggacctcc

SEQ ID NO: 8062 - DNA, 120 bp, synthetic construct
  source 1..120: mol_type = other DNA
agattgtgattctatttgaaggttcattaatattttttcattcattatttttagggtatcaaaggtccagctgggatacctggattccctggtatgaaaggacacagagtaagtagagtt

SEQ ID NO: 8063 - DNA, 120 bp, synthetic construct
  source 1..120: mol_type = other DNA
ttgtaaaatagtaacatattttatatgtatctagggtgaaaatggtcttccaggcgaaaatggagctcctggacccatggtaattatgtttcttatgtataattttcagttttattatta

SEQ ID NO: 8064 - DNA, 120 bp, synthetic construct
  source 1..120: mol_type = other DNA
tctctttttagggtgctcggggtaatgacggtgctcgaggcagtgatggtcaaccagtaagtaactttctatctcttatgtgttgtagggtaatgagaagttatggattgtggattattt

SEQ ID NO: 8065 - DNA, 120 bp, synthetic construct
  source 1..120: mol_type = other DNA
gtgttgtccctagtattcaactatcttgatatttcttctgctaccttctttttttccccagactctttctaggaaactgataatgcaatcacacacacatagttacatttttctctgcct

SEQ ID NO: 8066 - DNA, 120 bp, synthetic construct
  source 1..120: mol_type = other DNA
aatggtagtcctggtggtaaaggcgaaatggtaagctgtccccactcctcagccttatctcatccacacattactggcttcttttgcattttgcatgacaatagatttgtgatatttaag

SEQ ID NO: 8067 - DNA, 120 bp, synthetic construct
  source 1..120: mol_type = other DNA
tggactgaaatacttgtctttcattattttcagggtgcccctgggttccgaggacctgctggaccaaatggcatcccaggagaaaaggtagataactttagtttctatgttcctaaatgc

SEQ ID NO: 8068 - DNA, 120 bp, synthetic construct
  source 1..120: mol_type = other DNA
cggaagtccaggaggaccaggaagtgatgggaaaccagggcctcccgtatgtacatttttaaaatctcattttaaaaggccagttaaaatggaatgtatatgttggcctatccttgagtg

SEQ ID NO: 8069 - DNA, 120 bp, synthetic construct
  source 1..120: mol_type = other DNA
tatatatgagacaataatatgattagttattgccctttgaggattagtaaataccgaccacttcttctttagggtgctcctggtaagaatggagaacgaggtggccctggaggacctggc

SEQ ID NO: 8070 - DNA, 120 bp, synthetic construct
  source 1..120: mol_type = other DNA
caagtctatcctgccatgctggtcaatacatttttacgtgtagcaattgaaagaacagagagagatgaaaatgggtttgtaaaatatgattatcacgtatgtgtcactggattttgagtg

SEQ ID NO: 8071 - DNA, 120 bp, synthetic construct
  source 1..120: mol_type = other DNA
gtgcacctggagctccaggaggcaaggtagtatttcaatttattctctaccttcttcagcaggttatagagcaattgattagtagtatatttttagtatatcaagccaaaatactctttc

SEQ ID NO: 8072 - DNA, 120 bp, synthetic construct
  source 1..120: mol_type = other DNA
ggagaaagaggaggtcttggaagtcctggtccaaagggtgacaaggtgttgacttgttttctcttaattgttcaataaatcagtcattgtaggttttaaaaaaagcaacactcctggaaa

SEQ ID NO: 8073 - DNA, 120 bp, synthetic construct
  source 1..120: mol_type = other DNA
atttgagtatcttgattgaggtggtagtcaggcacatctacacatgggataaaattctatagagctacatatacacacacataaatgagtgtgtgtatcactggtgaaatctgaacatgc

SEQ ID NO: 8074 - DNA, 120 bp, synthetic construct
  source 1..120: mol_type = other DNA
aaaaaatatttttatttcctctagggtcctactggtcctattggtcctcctggcccagctggccagcctggagataaggtaacccttaatactacctggatataaaaagaaaatgtctct

SEQ ID NO: 8075 - DNA, 120 bp, synthetic construct
  source 1..120: mol_type = other DNA
agctgctcattccctataggattattgtacccctattttgttttactttacccctattgtcgctctttgaaagatggaaataaaaacacctgtcctgcttttatgactgggtaatgaact

SEQ ID NO: 8076 - DNA, 120 bp, synthetic construct
  source 1..120: mol_type = other DNA
tcctcctggtccccaaggtgtcaaaggtgaacgtggcagtcctggtggacctgtaagtattgatcctcttaactattattgaaaagcattaattgatatcaacctgtataaaagctgcat

SEQ ID NO: 8077 - DNA, 120 bp, synthetic construct
  source 1..120: mol_type = other DNA
ctactattttgatttttatcacaaatcgattagagaaaaacactgtcacataaagatgagctaagtcttcattatctgtattagggagctccaggcccacttgggattgctgggatcact

SEQ ID NO: 8078 - DNA, 120 bp, synthetic construct
  source 1..120: mol_type = other DNA
ccattttaattgatttcttaagttgaaacaaaatgtttttcattcctttgtatacagggtgaaagtgggaaaccaggagctaacggtctcagtggagaacgtggtccccctggaccccag

SEQ ID NO: 8079 - DNA, 120 bp, synthetic construct
  source 1..120: mol_type = other DNA
aatacactaactatctgtctggacattgtgaccctttgaagggccacactgctttgtaatatctaagatttcttacccccaagaaccaattttaacccccttgagaattatattgccctg

SEQ ID NO: 8080 - DNA, 120 bp, synthetic construct
  source 1..120: mol_type = other DNA
ttagggccctgctggccctgctggtgctcccggtcctgctggttcccgaggtgctcctgtaagttttgtcattttttggttttattttgttttgttctttttttaactcattctacagtg

SEQ ID NO: 8081 - DNA, 120 bp, synthetic construct
  source 1..120: mol_type = other DNA
cccagagtaagtagcacagaaagatattacaggtccacatgtttcagatgtctgcatttcagaaagatattctggcattgtgatgtcatgatactttcttagggacctgttggacccagt

SEQ ID NO: 8082 - DNA, 120 bp, synthetic construct
  source 1..120: mol_type = other DNA
tgctgggattggaggtgaaaaagctggcggttttgccccgtattatggagatgaaccaatggatttcaaaatcaacaccgatgagattatgacttcactcaagtctgttaatggacaaat

SEQ ID NO: 8083 - DNA, 120 bp, synthetic construct
  source 1..120: mol_type = other DNA
ggtcttagcttagtgtatcatccttattagaaaccaagatgttgcattttatttcagtgctttctgtagtcatagctaactcttttacctcagcaatttcaatcaaaaagcttctctatc

SEQ ID NO: 8084 - DNA, 120 bp, synthetic construct
  source 1..120: mol_type = other DNA
atggggtcaaatgaaggtgaattcaaggctgaaggaaatagcaaattcacctacacagttctggaggatggttgcacggtaggaaacatttttctcaatataggtcataaagcagtcagc

SEQ ID NO: 8085 - DNA, 120 bp, synthetic construct
  source 1..120: mol_type = other DNA
tgtccttttttacagaaacacactggggaatggagcaaaacagtctttgaatatcgaacacgcaaggctgtgagactacctattgtagatattgcaccctatgacattggtggtcctgat

SEQ ID NO: 8086 - DNA, 120 bp, synthetic construct
  source 1..120: mol_type = other DNA
aggggattctcctccttcatcctgtaaaggtcaacaataaaaaccaaattatggggctgcttttgtcacactagcatagagaatgtgttgaaatttaactttgtaagcttgtatgtggtt

SEQ ID NO: 8087 - DNA, 120 bp, synthetic construct
  source 1..120: mol_type = other DNA
gtctcccctcgccgcatccactctccggccggccgcctgcccgccgcctcctccgtgcgcccgccagcctcgcccgcgccgtcaccatgagccaggcctactcgtccagccagcgcgtgt

SEQ ID NO: 8088 - DNA, 120 bp, synthetic construct
  source 1..120: mol_type = other DNA
aagcattttaagatgctggggcgatatttatggggtcaggtagttgatgggcagaggaagggctgcaggaggcccagagggcagtgtagccagagggagaagggaggctgataggagaca

SEQ ID NO: 8089 - DNA, 120 bp, synthetic construct
  source 1..120: mol_type = other DNA
cattgacctggagcgcagaattgaatctctcaacgaggagatcgcgttccttaagaaagtgcatgaagaggtataccttggcccctcttcctggggtcactgggccatggggaaagcagc

SEQ ID NO: 8090 - DNA, 120 bp, synthetic construct
  source 1..120: mol_type = other DNA
gcagttcacaccctcactttgtgaccttgggcccatcatagatcctctctgggccttcatctacttaaatctacaataggggtaaaaccagacaagtggattccagttggatgctaagga

SEQ ID NO: 8091 - DNA, 120 bp, synthetic construct
  source 1..120: mol_type = other DNA
aaaaaaaaccatattcagcaaccaataataaaatattactgccagtcaagggagagatgaaagcagaatggggagtgatgaggagggaaacggagggagcagatagaggcaaatagagag

SEQ ID NO: 8092 - DNA, 120 bp, synthetic construct
  source 1..120: mol_type = other DNA
agaaacttcagattttgtaaaatcacgtctacatatgatggcctttgaaggtagctaaaggcatgttgcattttcccagcattaggcctaaatagtaagctctcagaactggcctggctg

SEQ ID NO: 8093 - DNA, 120 bp, synthetic construct
  source 1..120: mol_type = other DNA
ggttcttaactcttaggaggttttgtctcttcccttttaggatcaatctccccatccagacctactctgccctcaacttccgaggtgagtgtctgctggcaggcggaggctggagttgca

SEQ ID NO: 8094 - DNA, 120 bp, synthetic construct
  source 1..120: mol_type = other DNA
catagtacaaaaaactccacccacattgcacagtgcttttccaaatcaatagctttgtggccatgataaggttggtaccacttcactccgtgtcctcagtgaggaaactgaggcacagaa

SEQ ID NO: 8095 - DNA, 120 bp, synthetic construct
  source 1..120: mol_type = other DNA
ttacagaaaccagccctgagcaaaggggttctgaggtccataccaagaagacggtgatgatcaagaccatcgagacacgggatggggaggtaagtggtctgtctgggctccttacccttg

SEQ ID NO: 8096 - DNA, 120 bp, synthetic construct
  source 1..120: mol_type = other DNA
gagaagagaggagaggagagaggcagagagcggtctcaggctggtgggaggggcgcccacctccccacgccctcccctcccctgctgcaggggctctggagagaaacaataaagagattc

SEQ ID NO: 8097 - DNA, 120 bp, synthetic construct
  source 1..120: mol_type = other DNA
tgttgggccccaagggacccaaagttcaggctctatcccagaccgctctgttaggttgcatggagaatgcgatgcattgtgcaaagattaactgtgattgtgtctactacaggagaaata

SEQ ID NO: 8098 - DNA, 120 bp, synthetic construct
  source 1..120: mol_type = other DNA
gtaacacagcaagaacaaagctgagatttggatccacgtctttctgactgcgaagtctgtgtgtgatcattgtttccattgtcctcaattatggtacattgtatcacagtaatggatcat

SEQ ID NO: 8099 - DNA, 120 bp, synthetic construct
  source 1..120: mol_type = other DNA
agaaaatgtattgaaaagtgaaggcttctatacttttcccctactagcctgttactcctgtgactgattcatgagggatctctattttcagcaacaccagggtgattctgatgctgatgg

SEQ ID NO: 8100 - DNA, 120 bp, synthetic construct
  source 1..120: mol_type = other DNA
agagcagggctgggaactacctcttacgtgttatcttccaagtgacattatcagttcacagcacaatataggcattgcctctgaggctcattgctatgcatttctttccctattctctac

SEQ ID NO: 8101 - DNA, 120 bp, synthetic construct
  source 1..120: mol_type = other DNA
tggggcaattattggtggctacaagtaggttcgtgcaattattggtggtaggatttgagctggcctgaaccacaatattcagacactaccccttctgtctgcccctctcactatcccaag

SEQ ID NO: 8102 - DNA, 120 bp, synthetic construct
  source 1..120: mol_type = other DNA
tttagaatttatcctctaaaaccctatagaaagctcttaggcagaatggcatgatcatatctgctctttgatggcccttgaaaaaagagaagagggaagaaattggaagcataaacacca

SEQ ID NO: 8103 - DNA, 120 bp, synthetic construct
  source 1..120: mol_type = other DNA
agaagggaaagcattttattttggagatgatactaaaggggctgatcagagcaaagtcagttgtcaagacttcaatctggagtccaggaatggagatggagacaaaagggaagcccgtag

SEQ ID NO: 8104 - DNA, 120 bp, synthetic construct
  source 1..120: mol_type = other DNA
gcccattttaagaagcagatgttctgcttttcatccaatttgaaccttacagtttcacagtgtttcaaaccaggcaatcccatacgaatgcctcagcaatctttgcactacgtattctga

SEQ ID NO: 8105 - DNA, 120 bp, synthetic construct
  source 1..120: mol_type = other DNA
tggaaaactatttttgcctgatcagcaataaaactactgataagataagctggttatcaaataattccctagtgttaatctggcaaataattgttataacccaatcttgtgaattgaaga

SEQ ID NO: 8106 - DNA, 120 bp, synthetic construct
  source 1..120: mol_type = other DNA
taacagaggagacacagattcagtgcaggattttatatacaataaaacctaaaactaaactccaccaaaatgaaattgtaatagtcaatgcctggctagaaatctccctttgcacagtga

SEQ ID NO: 8107 - DNA, 120 bp, synthetic construct
  source 1..120: mol_type = other DNA
gcacatgattggtctgtttcatacatcacactataaattcagtatagcatgtttctaaaagtcacgcatgtggcagcaagtatacaggtgttcattttacatagtcactactttcccttt

SEQ ID NO: 8108 - DNA, 120 bp, synthetic construct
  source 1..120: mol_type = other DNA
actaaatctattttgtgaatcctgcatacccaactatggaaaccccataatttaacgtagtagccacacaagcaaactgtcaagtggttggtacctggagataaattaggaagcttgatg

SEQ ID NO: 8109 - DNA, 120 bp, synthetic construct
  source 1..120: mol_type = other DNA
acatattgagctagaaagcaaagttggagaaatgaccacttgctagcattgctatttcatatatttggcctcaggctgtttcctaacccatattagagccagaaagaatctattaaagtt

SEQ ID NO: 8110 - DNA, 120 bp, synthetic construct
  source 1..120: mol_type = other DNA
ggggatcacttgaggccaggagatagagactggcctggccaacacagtgaaatccatctctactaaaagtagaaaaaattagctgggcattgtggcgcacacctgtaatcccagctactc

SEQ ID NO: 8111 - DNA, 120 bp, synthetic construct
  source 1..120: mol_type = other DNA
atgtagttttcttagataaaggctagaaaatatctagaaccgaaagcccatacagattcttttatggcttttatggtgcataagcatgatgatagggtttttatgctcatgtgtgagaca

SEQ ID NO: 8112 - DNA, 120 bp, synthetic construct
  source 1..120: mol_type = other DNA
cacacgcacacacaacagaatattgtttagaaagctgaaaatcttgttagttcacagagcaggatccaagacatagtagtttagcttatttctataagtcttcatctttcttttccccat

SEQ ID NO: 8113 - DNA, 120 bp, synthetic construct
  source 1..120: mol_type = other DNA
tggagagccaaccagtaacaaatgaggactcccttatgacccaggaaactataaagaaatctatgccagtgagaggtacacaagttaggaaatgactgcattagaccaagtctaagagag

SEQ ID NO: 8114 - DNA, 120 bp, synthetic construct
  source 1..120: mol_type = other DNA
cacttctggtatatttaaaagcacaaggaaattcaaggagatggaaacgcacgttatacacacccgtgatctggagacaatgacagggaaggtagacaggtagaaactgacatggaagca

SEQ ID NO: 8115 - DNA, 120 bp, synthetic construct
  source 1..120: mol_type = other DNA
atcattcattctttctgtttaaaaagaaggcttttgacattacaggtggaaaacagaatttaaaaaccctgtgccatccactgcctggggctgtgtcttatatgaagctgccaagctcgg

SEQ ID NO: 8116 - DNA, 120 bp, synthetic construct
  source 1..120: mol_type = other DNA
catggcttttcagattgaaagtattttctgactgcagaactagacaaatataaaaaaatccacggcatacacattgtactaacactgtagaactcaatttagggtactataaaagctacc

SEQ ID NO: 8117 - DNA, 120 bp, synthetic construct
  source 1..120: mol_type = other DNA
agttaagaagaaaagataaattgaatttaaagcttaagaaatatatatgtttaggagaggggaaggcagttaagaccagaaagcatgcaggaatgtgtgggcaagtttagacatagaagc

SEQ ID NO: 8118 - DNA, 120 bp, synthetic construct
  source 1..120: mol_type = other DNA
ttggcaaaaagacatgagaatctgaggccttaaaggacagtctttaattagttaaagacaaatcaataatgattacaacttcagcaatttaacaaactgagtcatttctcattaatttac

SEQ ID NO: 8119 - DNA, 120 bp, synthetic construct
  source 1..120: mol_type = other DNA
gtatgtagccaaggaagtatgtagctggcttaaagacaaattcttaccttggtctgatgcaaggactgtaatattatatatgccatttttgatggtctctgcctctctatccaggcttct

SEQ ID NO: 8120 - DNA, 120 bp, synthetic construct
  source 1..120: mol_type = other DNA
cagtggtggtggagacagaggagttctcccactgattcagtacttgggtaaagctggaaaaaaaaaaggacagaaaattgttcttcaactgcaaatttaagataagtagtataacaggta

SEQ ID NO: 8121 - DNA, 120 bp, synthetic construct
  source 1..120: mol_type = other DNA
aaagaaaacggcatagacccactgtaaaaccatgttctggttaaagatgcagcagaaataagtctataaatttgtccaaggctaaaggagctcagattgctttatgcactaactctggct

SEQ ID NO: 8122 - DNA, 120 bp, synthetic construct
  source 1..120: mol_type = other DNA
ctatgtttacatgatttgaaaccctagcactatacaacttttaatgtcactggggcacttcatttgaaatcatgaggggtggatggggatgtgcatttttttcttttccttcactgcaac

SEQ ID NO: 8123 - DNA, 120 bp, synthetic construct
  source 1..120: mol_type = other DNA
gcctcccgggttcaagcgaggcaggagaatcacactaggaatttttaatcaatttatgaaaattgaatagtttctcaaatttatagtgctattaacttacagaatatagattcaattggt

SEQ ID NO: 8124 - DNA, 120 bp, synthetic construct
  source 1..120: mol_type = other DNA
ctaaaaggttgtaggcaactgaagaaaaccggaatcctgaggtcaaaaagttactagagagcaccactggataaacaccttcactggacaagtgttttcaactgattatttcagaagaat

SEQ ID NO: 8125 - DNA, 120 bp, synthetic construct
  source 1..120: mol_type = other DNA
aattatcatcaaaatactactctcttttctaattttatatcatgtcagattgcctttatatatgcttcagctaaaactacatattgtaacagactaaatgcagaaggagatatgagaatc

SEQ ID NO: 8126 - DNA, 120 bp, synthetic construct
  source 1..120: mol_type = other DNA
aaattttagatttattacatcataagtacctgtcagacatccaaatcaagatttctagcagttgattaaaaatgggaaaccagagattagagagacataaactgtcttttcatctatgta

SEQ ID NO: 8127 - DNA, 120 bp, synthetic construct
  source 1..120: mol_type = other DNA
tataacttttctctgtttgtaagcttgtgcttagattgatcataggagtcagttttctctaaaactgcatggttcacttagacatttctagacaaggtctccaaaactgcattctgactt

SEQ ID NO: 8128 - DNA, 120 bp, synthetic construct
  source 1..120: mol_type = other DNA
ttgaagacttctttattttgctttgtttgaaaggttcaggtgcatggattttaaatacaactttctggatctttctgaacttgggatcctgtaggattacccaggtacagttaactggga

SEQ ID NO: 8129 - DNA, 120 bp, synthetic construct
  source 1..120: mol_type = other DNA
tgctctcccattgccagggtactgaggtttacttaatgactgaacttcatttacctcctatgatatctccatactataaagaggttcacagatctttttgtgccaactaagtaactgttc

SEQ ID NO: 8130 - DNA, 120 bp, synthetic construct
  source 1..120: mol_type = other DNA
gtaacataacatttaagaaccgagtttaaagtgtactgtctgcagggcaaaaatgtggacaataatttccttaatgagttttttgttctttgccaacatcttccttataggaactgagta

SEQ ID NO: 8131 - DNA, 120 bp, synthetic construct
  source 1..120: mol_type = other DNA
cctccttcgtggcatttggtctttcatccaattttctcctttattatgcaagagagttttgggttttctagctattcttaggcttggcgatacccttgctgatgtgacaattcattaagg

SEQ ID NO: 8132 - DNA, 120 bp, synthetic construct
  source 1..120: mol_type = other DNA
tgctttgtgtctaatctcactttcccatgctgtaccttatcccaatttctccttttacgtcccaaatgaaaaggaatgacaacccgaatgaaccatgtgacacagcccttttccttctaa

SEQ ID NO: 8133 - DNA, 120 bp, synthetic construct
  source 1..120: mol_type = other DNA
ctttaaaccaaaaccaaaacaatttttttctttatcaacagaaataagctatagagtaacacctaaatacacctgaagttatacagaatctagcagatgaaaattggcatttgctaaatg

SEQ ID NO: 8134 - DNA, 120 bp, synthetic construct
  source 1..120: mol_type = other DNA
gcaaaacaggatttattacaaattttagggcttccttacctctaccaacaagtttctcggcatctagtttggagggaacatgtaatgtcacatttttgcaggcatcactggcaaatatta

SEQ ID NO: 8135 - DNA, 120 bp, synthetic construct
  source 1..120: mol_type = other DNA
ttaattacatttgaaggatcaaataaggcagaggttgtgtttcatttggaatgttgggatagacacaatgaagacattagttttgaactggaaattaaatgatatgaagaattttcactg

SEQ ID NO: 8136 - DNA, 120 bp, synthetic construct
  source 1..120: mol_type = other DNA
gcgagggaagagtgacaggagaagaaaacaaaaggacagtcaatggcaaatgatgtagggtctaaaaggtcatggtaaggagtgcagattttgttctgagtgcaaagagaagcaacagcc

SEQ ID NO: 8137 - DNA, 120 bp, synthetic construct
  source 1..120: mol_type = other DNA
tgctaaatcttcattacaaatttgagccacaagtaaactggccctggcgtggatctgtgatccacactcacatcttttgcttggtccagaaacttcaagccatgaatttaacgaaggctt

SEQ ID NO: 8138 - DNA, 120 bp, synthetic construct
  source 1..120: mol_type = other DNA
aacatgtaaagcctatttgaaggaaacctgaaaacatttctgcagggcagaaaagtacacttgcaaaaaaagaaagacaaaaatcaacaacgtatctatatcgattcttactaagttaaa

SEQ ID NO: 8139 - DNA, 120 bp, synthetic construct
  source 1..120: mol_type = other DNA
gttctgaatgaagcatagattcaatttatctttacaccaatatatatatcctcgatcatgtgatatctatcataaaatagctttctgtctagccatatacaatgtttatggagggaagaa

SEQ ID NO: 8140 - DNA, 120 bp, synthetic construct
  source 1..120: mol_type = other DNA
aagtggataaaatgccctagggaaagagtgtagattccaaaggacaagacctagaacagaaaaccaagagacaccagcatttaagagtgcaggaaaaagtagtcaaactcatagaagcag

SEQ ID NO: 8141 - DNA, 120 bp, synthetic construct
  source 1..120: mol_type = other DNA
gacttggaccacaggcgcgcaccccatgcccagctacaatcattcttacttaataatttcttacacttagtatttacgcatttctcacacttgagactcacaaccacaacagccacgtga

SEQ ID NO: 8142 - DNA, 120 bp, synthetic construct
  source 1..120: mol_type = other DNA
taggctcccagctctgggaaggggtagggtcattgctgtagtgctctttaaagaaagaaagaacctggggcaaggggcggtggcgcggggggcgggtggtgagcagaaaaatcgagtcgc

SEQ ID NO: 8143 - DNA, 120 bp, synthetic construct
  source 1..120: mol_type = other DNA
agacaccgatcggcccctccttgttgtctatttaagacttaagacttcatttctctaagaaagccacgggtgggaactccctctcgccgccacccttttacctgcgcaaggtgtttctca

SEQ ID NO: 8144 - DNA, 120 bp, synthetic construct
  source 1..120: mol_type = other DNA
gttccttaaatttccctaggattccccagctcctctagccgccgacacaagccagtgaactggggaaaccaggaacatacttgtattcttagagtgcaaaaagttggctaaaaatttttt

SEQ ID NO: 8145 - DNA, 120 bp, synthetic construct
  source 1..120: mol_type = other DNA
ctaagacgtgatctgggacgtcgtttttagcctctgggctggcaaaacaactaatcctgtcaccttgatgtttccttgtttaaggagaatcccaagctaatgtaacacctagcttacttt

SEQ ID NO: 8146 - DNA, 120 bp, synthetic construct
  source 1..120: mol_type = other DNA
acatggtctttcgctttcctcagcagtgcagggagacacaccagaaggtagctgtgtcacccacatagctatcaaacatttaggccagctgtatcaaaatgggaaaaagaaataattttc

SEQ ID NO: 8147 - DNA, 120 bp, synthetic construct
  source 1..120: mol_type = other DNA
ccctcctttcctcttccaagtgcatactggtttgttggcaatctttgtcattccttctcttgtaggtgcattcattactccaatcctccatctgcgcatggcattctctcttttgtctct

SEQ ID NO: 8148 - DNA, 120 bp, synthetic construct
  source 1..120: mol_type = other DNA
aggctaatattctgtggtgtgtgagtgtagtgagccctggggcgggctcactacaatataaatatgtatttatagaaacttcccaattgatctaattgtcagacaagtgtaagcgtgaga

SEQ ID NO: 8149 - DNA, 120 bp, synthetic construct
  source 1..120: mol_type = other DNA
gaaaatgatagttcatggttctgcagaggaacctaaacattcattgttgcttgaacttagaaagtgaggcagaagaatgtataggaagataggccttcaagccaacagaagcccagaaaa

SEQ ID NO: 8150 - DNA, 120 bp, synthetic construct
  source 1..120: mol_type = other DNA
ggagatgagaggagatgagaccgttcagatttccctcggtctaaaacacctccatcccaccactctttcaagccccctacaatgcaaacaaaaacattaaacaatgtttgatacccactg

SEQ ID NO: 8151 - DNA, 120 bp, synthetic construct
  source 1..120: mol_type = other DNA
tctaggtgccaaactgcactacttctcattttttgtccaaatatctccatgttctggcacatggagtccctcatctgtgcgttttccttcctcctgtatgcacagaaacagattatcttc

SEQ ID NO: 8152 - DNA, 120 bp, synthetic construct
  source 1..120: mol_type = other DNA
gccaccgcacctggccgagtagtaaatttttgtttaaattttatgcatttagcagtcacaaattgggcgtctactatatgaccaacagtcttctaaggacatgtgaactgccccctgcaa

SEQ ID NO: 8153 - DNA, 120 bp, synthetic construct
  source 1..120: mol_type = other DNA
tgctgcacccatcaactcgtcatctgtattaggtatttctcctagtactatccctcccctacccccacagcctcaacaggccgcagtgtgtgacgttcccctccctgtgtccatgtgttc

SEQ ID NO: 8154 - DNA, 120 bp, synthetic construct
  source 1..120: mol_type = other DNA
aactagaagaagaggtataaaccaggggaaaacactacctaaagtgttttcctacagttcaattgtagttgatgaatacttgtaaaatgaaaaatctttttgtgatggggagaattcaca

SEQ ID NO: 8155 - DNA, 120 bp, synthetic construct
  source 1..120: mol_type = other DNA
tgagcccggcctgaattgcctgatttagaacacatcttttcacacatctgtctgtaactaggggctcattatccagtttatgaattatccaggctctcctcttcttccctttcctatgct

SEQ ID NO: 8156 - DNA, 120 bp, synthetic construct
  source 1..120: mol_type = other DNA
taggtgaattccaacataaatctgacccacgtcagatttatcagagcagatcaccaaactcactggtccaccctgactgcactgggtcacttgaactcttctgaacatgtacatttctat

SEQ ID NO: 8157 - DNA, 120 bp, synthetic construct
  source 1..120: mol_type = other DNA
ctttggatacaggaactagcagcttacttttcctcgtcagtcttaaagtcatgttgcaggtgacatttttctgtcaccaagttcctggtgagaaaaaaagtcacagatttagtgtttgga

SEQ ID NO: 8158 - DNA, 120 bp, synthetic construct
  source 1..120: mol_type = other DNA
aaaatgcagatagcagaaccctcttacctagattccaagacaaccttgactttaagatgcacatcaattcttctgatgttttagtgtaacatacatccagaaaagtgcacatatcacgag

SEQ ID NO: 8159 - DNA, 120 bp, synthetic construct
  source 1..120: mol_type = other DNA
ggtcatctatatttgccctcattcattccattcacaggtctctgttgcctctgccttcaaaataaacactggagatatctactttctttcatctttactgcaactcccagggtttaagct

SEQ ID NO: 8160 - DNA, 120 bp, synthetic construct
  source 1..120: mol_type = other DNA
aaaaagtttagagagagagttggtccaaatttgaacgattctgtaacttaaagcctttatggtttcagtttggcttctctagcatttcattagctttcccctcatggtcacagcatggct

SEQ ID NO: 8161 - DNA, 120 bp, synthetic construct
  source 1..120: mol_type = other DNA
gcaatgtggaatcgtagattggatcctggaacagcaaaagaacattagtgggggaaatggtaaaatcagaataaagtatggaatttagttaacagtgcattaactaaatgcaccaatgtt

SEQ ID NO: 8162 - DNA, 120 bp, synthetic construct
  source 1..120: mol_type = other DNA
tagggccggtaagattgtagggaagaataaaagtagcaaatattcagtgcagccaactacttaatatggcctgtatcaaagagaagagtctgatggttagaaggatgggcaagaaatata

SEQ ID NO: 8163 - DNA, 120 bp, synthetic construct
  source 1..120: mol_type = other DNA
tttgtggatccatgtgaccatgcagatgggaaaaggcaaacaactgagaaaagctacaccaaagacagagtccagtgaattaatgcataaatggaaggtggagtagtgggagcaatacat

SEQ ID NO: 8164 - DNA, 120 bp, synthetic construct
  source 1..120: mol_type = other DNA
ggtggaaatgttttctgtctgccctgtccaaatgggtagcccttagcacatgtggctgtggagcaactggattattcatttcaaataattgcggttaaaatccaaatagccacaagtagc

SEQ ID NO: 8165 - DNA, 120 bp, synthetic construct
  source 1..120: mol_type = other DNA
ggaggagtcagtatggatccaggagaatatagatttctcctcgggcacttcccattagggaaggcaatgggaaaaattagtttcctcttgacaaagaatagtagtagtggttaaactttt

SEQ ID NO: 8166 - DNA, 120 bp, synthetic construct
  source 1..120: mol_type = other DNA
cccaggtcagctgtattgaaatttcccttggataaaatatatattcacctgtaaaacccaactggaaatttatagaatggttttctgcctaaggttctgaaaatgaaatgggaaatttaa

SEQ ID NO: 8167 - DNA, 120 bp, synthetic construct
  source 1..120: mol_type = other DNA
gggagggagaggatctgtccaagaagaatccaattgccaaggtacctcctaaagaggaacatgaaatacatgcatatgactaaaatgtggtgtgagaggacttttatgtctactttaaga

SEQ ID NO: 8168 - DNA, 120 bp, synthetic construct
  source 1..120: mol_type = other DNA
tgccattcccctagtccaagtcatgtcatctctggcctgtattaccaaagaacttcagaaggaaattgtccataaaaatatttacctgtaaattatagagaatcacttcttaggcttttg

SEQ ID NO: 8169 - DNA, 120 bp, synthetic construct
  source 1..120: mol_type = other DNA
ggctggttagctttggccctacagctttggctatagtttgctgacctgtaagttgtattatttttactgtaatatttattcacaacattgttcaacacagtgctcttcatgaggacccga

SEQ ID NO: 8170 - DNA, 120 bp, synthetic construct
  source 1..120: mol_type = other DNA
tagtacgtaggaggcagtgaggaaagggatgaaaataggaatcctagttagagaataaaagtatctgtaaaggagagaattactctaaatcccaaattgaaggaaagtttgagtaggttt

SEQ ID NO: 8171 - DNA, 120 bp, synthetic construct
  source 1..120: mol_type = other DNA
atccacatagaaaccctgtgaggcagattcacttattatcctcatcttacacataaagaacccgaaggtcaaagcgaataagtgcatgtccaacacagtcagtaagtgacgatgccagaa

SEQ ID NO: 8172 - DNA, 120 bp, synthetic construct
  source 1..120: mol_type = other DNA
taagtattcaaaactggcgtgggccaagttggtgctggaaaggaatctaatatattttgagccctgaacacttaaaagtgctttacatattcaattaactagcactacagttgtttgaga

SEQ ID NO: 8173 - DNA, 120 bp, synthetic construct
  source 1..120: mol_type = other DNA
agaatcacctcataaaactgcatgccaaaaatgtaggttcctggtctcatcaacaaaaagtttcattgggcaggtttcaggaacttgtctttttagcaaaaatccacttgtgattctaat

SEQ ID NO: 8174 - DNA, 120 bp, synthetic construct
  source 1..120: mol_type = other DNA
atcaatttttaagccatcaatttataggtatgaccacgccagatacctgagatagaaaagccaattatacacgcaaggagaaacagtcagatattgatgaatgacagaggtgctagcata

SEQ ID NO: 8175 - DNA, 120 bp, synthetic construct
  source 1..120: mol_type = other DNA
tgtaatgaattgcttccaaattataagggcagcaatcggattccatcgaaaggaatttagacaaaaaagatatacaagtagcaaatacccacgtgaaaaggtgccaacatcattactcat

SEQ ID NO: 8176 - DNA, 120 bp, synthetic construct
  source 1..120: mol_type = other DNA
ccctgactctactaaaacaaaaaattagccaggtttggtagtgcatgcctataattccagctgcttgggaggctgaagcaggagaattgcctgaacccgggaggcagaggttgctgtgag

SEQ ID NO: 8177 - DNA, 120 bp, synthetic construct
  source 1..120: mol_type = other DNA
tccatccagagcccaatagagaggaaaactgactgacttattttggtgaaaataagtagtggtagctccaaaggaaggaaattcacaatgaattctccaaaacacaagtgaaaagctttg

SEQ ID NO: 8178 - DNA, 120 bp, synthetic construct
  source 1..120: mol_type = other DNA
agcctcaaccctctgggctcaagcaatcctcccacctcagcctcctgagtagctaggaccacaggcacgagctatcatgcacagctaatttttgtatttttttgtacagatgggaactcc

SEQ ID NO: 8179 - DNA, 120 bp, synthetic construct
  source 1..120: mol_type = other DNA
tgagggggaattttcaccagaatccaccttcttcaaccacctgtgtgtgaggaggaagttagtttactcaccactgaaacagttctggctagagatggctaaaaagcaacaaaggaaaag

SEQ ID NO: 8180 - DNA, 120 bp, synthetic construct
  source 1..120: mol_type = other DNA
gtaatttataaacagcagatttgttactcacagttctgaaggctgggaagtccatcaaggcaccagccaacagatttggtatctggtgagtcttgctgtctgcttccaagatggcaccat

SEQ ID NO: 8181 - DNA, 120 bp, synthetic construct
  source 1..120: mol_type = other DNA
atggtggcacatgtttgtagtccccactactggggaggcttagacagggggattgcttaagcctaggagttcaaggttccagcgagttgccatcacaccactgcattccagactgtttgt

SEQ ID NO: 8182 - DNA, 120 bp, synthetic construct
  source 1..120: mol_type = other DNA
cagcattggctccttccacactaattctccttgctttgagggaagaaacccagaaacgattttatcggcattgtttccacttttaaccagttctgcctgaaagaaaattattaccccaat

SEQ ID NO: 8183 - DNA, 120 bp, synthetic construct
  source 1..120: mol_type = other DNA
ttggatctctgtggattctgtcacatctgaaattaaacttgcaaaacttcctgattttgaatctagatatgttcaaaatggcacatacactgtaaagattgtggccatatcagaaggtaa

SEQ ID NO: 8184 - DNA, 120 bp, synthetic construct
  source 1..120: mol_type = other DNA
atactttttctctcttatttttaagattatcctagaaaaaccatcactggcacagtccttatcaatgttgaagacatcaacgacaactgtcccacactgatagagcctgtgcagacaatc

SEQ ID NO: 8185 - DNA, 120 bp, synthetic construct
  source 1..120: mol_type = other DNA
cctgattaaagctgaggataccttggtttaactgggggtaagtaaagctcaaacctagaacatgatagaaacaacataacaggggagttatctgattccccccttccccatgtcagtgga

SEQ ID NO: 8186 - DNA, 120 bp, synthetic construct
  source 1..120: mol_type = other DNA
agtgtaagagtgctaatgttccttgatcttagaaggtgcatgctgaagaatgtcgtgctatctgtaacttaccttgaaatagttaagaaactttaaaaaaaagaaaaagtgggtatatag

SEQ ID NO: 8187 - DNA, 120 bp, synthetic construct
  source 1..120: mol_type = other DNA
tcccaaccttgtaggtaccagtgtgctgctgcaacaaagtgagaaaaagcttgggagaagtgaaattcagttcctgatttcagacaatcagggttttagttgtcctgaaaagcaggtcct

SEQ ID NO: 8188 - DNA, 120 bp, synthetic construct
  source 1..120: mol_type = other DNA
tctcaaccagtcctgcctgccctacccacgctccaaagacctcgggtttccttttataaaagaacaagggactgcatcctgaggtcacatgaaatatcactctacttgaccactgaatat

SEQ ID NO: 8189 - DNA, 120 bp, synthetic construct
  source 1..120: mol_type = other DNA
agtggcagatgggcatgcaggtgtgtttaattctttactacattgatcaaggggtcagccttggtctttgcttcctcctaggggtaaaataaaatctaagaagagggctctgaaattgtt

SEQ ID NO: 8190 - DNA, 120 bp, synthetic construct
  source 1..120: mol_type = other DNA
cataaccaggaactgcttcatttccatttccctcaatacatagggtttgcagaggtaagcccacaacccccatgacacttgtaaaatgttgcaaaaccccatttcccaactacatcatag

SEQ ID NO: 8191 - DNA, 120 bp, synthetic construct
  source 1..120: mol_type = other DNA
agagaagaaaggagatcttcataagacttacataagttattcaactcaaaatactttttctaactggcctcagtggaaatagcttataccttcctatgcccacttgactcagatccttct

SEQ ID NO: 8192 - DNA, 120 bp, synthetic construct
  source 1..120: mol_type = other DNA
atgaccaagacagatgtcagtgggtcggaaagttgcatccctctgcaggagcaggcttggtagggatgagctccgtaggagaggcagaggatatataacctaaaaaacacaatctattaa

SEQ ID NO: 8193 - DNA, 120 bp, synthetic construct
  source 1..120: mol_type = other DNA
gtactactaaagtgatgcttgaagggaaattgtagcaaaaatggctatattagaagatggttctcaaatcagtgacctaagcttccaccctcagaagttagaagagcaaattaaacccaa

SEQ ID NO: 8194 - DNA, 120 bp, synthetic construct
  source 1..120: mol_type = other DNA
cgtcctgtttgttttcttttggtaagttttccctctctccactctaatcctgctccagtcattcttggttatgtatgtgtgtactaacttttgatttggaagtaatttcaaagttatcag

SEQ ID NO: 8195 - DNA, 120 bp, synthetic construct
  source 1..120: mol_type = other DNA
ttcagagaatacctactcctctggcagtagcttcccagttccaaaatctttgcaagaagccaatgcagagaaagtaactcaggaaatagtcactgaaagatctgtgtcttctaggcaggc

SEQ ID NO: 8196 - DNA, 120 bp, synthetic construct
  source 1..120: mol_type = other DNA
gccttttagcaagctatgcaaacaatcctgataaaacaagatacatagagagtcaatctggcttctgagaatttaccaagtgaacagagtacctagttcatcagccgtccagtaaagcaa

SEQ ID NO: 8197 - DNA, 120 bp, synthetic construct
  source 1..120: mol_type = other DNA
gtagcctcagtgcctaacatgggtgccaaataaatattcgtagaattacactgaattgtaaaaaccattcgtttttgtttacaattgccaaaaatctcaaaaggccctgtatttatgtaa

SEQ ID NO: 8198 - DNA, 120 bp, synthetic construct
  source 1..120: mol_type = other DNA
tccccatagatttttatttctctattatattttacaaggaatataactcagtttgttagggagagtgccttaaaggcaggtgtttcttggactttgttatttaattagatctgcttgcaa

SEQ ID NO: 8199 - DNA, 120 bp, synthetic construct
  source 1..120: mol_type = other DNA
cccggagagcgcgggctgcggggctcgcgggacagggagggaccgtcctcctctggacgactgggagactcgggtcccgaaggtggaaaggtttttttgccccaggtcccgaaagaactt

SEQ ID NO: 8200 - DNA, 120 bp, synthetic construct
  source 1..120: mol_type = other DNA
ggaggagcaacctgaatgcgctccagggagttttgttttgcaagcagttttgaaggcagggactactcgagttgcaacctgttttctgcttagattcatttatttatttatggggcatcc

SEQ ID NO: 8201 - DNA, 120 bp, synthetic construct
  source 1..120: mol_type = other DNA
tccaacttaaagcctacttacaaacttgtcaagtctcacatctctctgggaaggggaaagagacccaagtgaaaaattacctgactttgaggaaggatgttttttcttctcattaatgtt

SEQ ID NO: 8202 - DNA, 120 bp, synthetic construct
  source 1..120: mol_type = other DNA
acagcagaattactctagtcttattcctgtcattaaaacaaattataaatagtgaaatttgttaccaaagtaacaaagtctcacagttagatctttctttcacccatcaaagggtgaatt

SEQ ID NO: 8203 - DNA, 120 bp, synthetic construct
  source 1..120: mol_type = other DNA
tggaaaagtaggtattgccaaggtggagtgacagcttcagctaagaattggatgcgagagacaagggagagtctgagaaaacaggcccagagctcgagtgactcatagcgtagatagtct

SEQ ID NO: 8204 - DNA, 120 bp, synthetic construct; identical to SEQ ID NO: 1173
  source 1..120: mol_type = other DNA

SEQ ID NO: 8205 - DNA, 120 bp, synthetic construct; identical to SEQ ID NO: 1174
  source 1..120: mol_type = other DNA

SEQ ID NO: 8206 - DNA, 120 bp, synthetic construct
  source 1..120: mol_type = other DNA
ttaagtgtttgtaggagtccaagatgactaagacatgggactttgctctccaggagcaggtagccaggtgtgtttaaactaatgcaagagaggagaggatgcagaggtgtgatatggaaa

SEQ ID NO: 8207 - DNA, 120 bp, synthetic construct
  source 1..120: mol_type = other DNA
ttcctaggtaattattctgtgaacctgaaaacagagagacatatgagtctttctggcatatgtacaagagcctgtgttgactgaatgaacaaaagaagaggagagagaggaagggagaga

SEQ ID NO: 8208 - DNA, 120 bp, synthetic construct; identical to SEQ ID NO: 1177
  source 1..120: mol_type = other DNA

SEQ ID NO: 8209 - DNA, 120 bp, synthetic construct
  source 1..120: mol_type = other DNA
tacacatacagctggtgtatgtctgacatcagactgacccgatgggtcgaaatcatttccgctgaacttcctccctgattaagtacagcgagttctgtgtggattcttcattgggctaag

SEQ ID NO: 8210 - DNA, 120 bp, synthetic construct
  source 1..120: mol_type = other DNA
ttaagccaatgtttggttgccttacctcctttatcctggatgtaattcgtttctaactgtggtataactaatcagtctagttcttgggtaaaaagaagttggcaagttttatattttgtg

SEQ ID NO: 8211 - DNA, 120 bp, synthetic construct
  source 1..120: mol_type = other DNA
ccttcctaattttttaattcatcctagggttctaagtgaggttgctgggcttcttaatgttttcctttgtctcttgaatttctttcctctgtttgataacaggtacgttttggaaggtgt

SEQ ID NO: 8212 - DNA, 120 bp, synthetic construct
  source 1..120: mol_type = other DNA
accaccgttgttttaaggtttctgctaggtgtcttccagaaaagtgcctcatttgaaatgtacattgaatgagcttcattgtagagaaaaataggtattctaggaacatcttgaaaggag

SEQ ID NO: 8213 - DNA, 120 bp, synthetic construct
  source 1..120: mol_type = other DNA
gagtggttttgtcccgtttttgcaacttttgcaagtttgaaattatttcagaattgaaataggttatttgatgtctggtttctctgtgtttgcctccttagtcaaaccggcacgatgtcc

SEQ ID NO: 8214 - DNA, 120 bp, synthetic construct
  source 1..120: mol_type = other DNA
ccctaatgccgacactggtatcaaggttacatctggcatctgcctcttcacaaagtaccccttctaaatagcctacatttgaaacagattttaaccagatgaatttacgggctctgttta

SEQ ID NO: 8215 - DNA, 120 bp, synthetic construct
  source 1..120: mol_type = other DNA
tacaaaggggtctctacccagcacccagcttcgcccagtagtgacatcttatatgattatagcgcatcatcaaaaccaggacattgattggcccaatacagttaaccaggcagaagcctt

SEQ ID NO: 8216 - DNA, 120 bp, synthetic construct
  source 1..120: mol_type = other DNA
tgtgagtgttttctttcaggaattgaagtatggagatggaatacaactgactcggagtcgagaattggatgagtgttttgcccaggccaatgaccaaatggaaatcctcgacagcttgat

SEQ ID NO: 8217 - DNA, 120 bp, synthetic construct
  source 1..120: mol_type = other DNA
atgtgattaagacttaagtcctggggtaaagaaaaaaaaatcttcaaataccataaaacatttgtagcttctctattgacacaaaagactcagaaaaggggaaatttgcccagaacgggt

SEQ ID NO: 8218 - DNA, 120 bp, synthetic construct
  source 1..120: mol_type = other DNA
ggaaggatatgctgatcctttccctagaactggagtttctgcaaagtatttttcaagactaatgattgttgtgttgtttcatgtagtcattatgtcctataatgaacaggtggtggtaga

SEQ ID NO: 8219 - DNA, 120 bp, synthetic construct
  source 1..120: mol_type = other DNA
tcagttttatgtcattttcttttttttttttttgagagggagtctcactctgttgcccaggcaggagtgcagtggcatgatctcgtctcactgcaacctctatctcccgggttcaagcaa

SEQ ID NO: 8220 - DNA, 120 bp, synthetic construct
  source 1..120: mol_type = other DNA
tggaaatttacatgtactcatgcaaaagaagggtgagataatggacttgccccagtgtggaactggcggaacagtgtgtgtgattcttattgtgaaacattcttaaatttgaggctcaaa

SEQ ID NO: 8221 - DNA, 120 bp, synthetic construct
  source 1..120: mol_type = other DNA
aatcagtagccctattagagattatgttaacacttgaagaggagttaaaccagaggctgaggttgtgcaaacactcatttgcagtttgtgaataagtctctttaggggtggcagtttgtt

SEQ ID NO: 8222 - DNA, 120 bp, synthetic construct
  source 1..120: mol_type = other DNA
ctttctgttgtttccaattcaattcagttcaagaaatatcaagcacatcctggcggggaggcacctgttcatcgatgctaatgttgttgctgctgctgagtttcctttagaagtgaattt

SEQ ID NO: 8223 - DNA, 120 bp, synthetic construct
  source 1..120: mol_type = other DNA
ctggggtgtgacttatggcactttgaatttttggggagaaggtaggaaaagcttgatttctctaacagtccattttcccccttatagtccaaaactaattattgatgggtacaaaaatac

SEQ ID NO: 8224 - DNA, 120 bp, synthetic construct
  source 1..120: mol_type = other DNA
attttttttttaaagggaccacaggtttaatctttaaacctgcagagaacaccagtcactgcatattgttattttaatgctgcctttgaacctcctgtgcagaaagcgtcctttgagagg

SEQ ID NO: 8225 - DNA, 120 bp, synthetic construct
  source 1..120: mol_type = other DNA
atacgcatgagtcaactggaagttaaagaaaaagagctcaataagctgaaacaagaaagtgaccaacttgtcctcaatcagcatccagcttcagacaaaattgaggtaggcttcatgagg

SEQ ID NO: 8226 - DNA, 120 bp, synthetic construct
  source 1..120: mol_type = other DNA
gttcatgcatctgtacaactgagctaggctaagacagctgacattttcttgtttcaggcctatatggacactctgcagacgcagtggagttggattcttcagatcaccaagtgcattgat

SEQ ID NO: 8227 - DNA, 120 bp, synthetic construct
  source 1..120: mol_type = other DNA
catacttcaaattttatcagcatagccctttcacacaaggatgttcttccctgcccacttaattcctgcctgcatagcttctggagagtgttgtcatgaaaggttctcatgtttcctgcc

SEQ ID NO: 8228 - DNA, 120 bp, synthetic construct
  source 1..120: mol_type = other DNA
aacacatacttatgaataaagccaaaccctggggttgcttgccttacagaaaatcgtgcataagggggatgagtgtatcctgaaggacaacaacgagcgcagcaagtggtacgtgacggg

SEQ ID NO: 8229 - DNA, 120 bp, synthetic construct
  source 1..120: mol_type = other DNA
taagctgctgtgtgctcatgaccaagctttgggtcattggcatctaatgcacctgccatcctgccttagacctctgtcaattacaaagttgccgaaaaacaagacaacaacaaaaagttg

SEQ ID NO: 8230 - DNA, 120 bp, synthetic construct
  source 1..120: mol_type = other DNA
agtaccttttggggtcccccgagccctttttctctttgtagttggagcagctttgctgggctctgctttacatttagggcttctgaataatatttcgttgaagaaaaatattctgtaggc

SEQ ID NO: 8231 - DNA, 120 bp, synthetic construct
  source 1..120: mol_type = other DNA
ttgaggcctagcaccttgatacctaggtattctctgatttttgtggccctaacttctttttacagtgaccacaactgaaatcactcatcatggaacctgccaagatgtcaaccataataa

SEQ ID NO: 8232 - DNA, 120 bp, synthetic construct
  source 1..120: mol_type = other DNA
aatgatcataagattcacacagctacaatgcagagtactaacctctgtgtgatcagtatgccaaaattggaatgtagttgtgttgcttaatgaccggggcacattctaagaaatgcatgg

SEQ ID NO: 8233 - DNA, 120 bp, synthetic construct
  source 1..120: mol_type = other DNA
aaaagcatggatgaatgtgggggacattatgctaagtgaaatacaccagacacaaatactgcttgatttcacttatgtgtaaattctaagaaaaaagttgaatgcagggaaacagagagt

SEQ ID NO: 8234 - DNA, 120 bp, synthetic construct
  source 1..120: mol_type = other DNA
cattactagctgtgagaggcaaatcttcacagactaattatgtcactggcaattttatgtgcttcttttgctctttccagcttatgcacagtaagggcactgctccaggctattctccaa

SEQ ID NO: 8235 - DNA, 120 bp, synthetic construct
  source 1..120: mol_type = other DNA
gttcacaagataatgtcacttgaagggaaccactgaagaaaacagaggttttgttttttgtgtaagttaggcgtaacagatgctcttttcatggactgcctgtatgcagctttgttagaa

SEQ ID NO: 8236 - DNA, 120 bp, synthetic construct
  source 1..120: mol_type = other DNA
attgggtgtaattcatgttttcctctggtttttgtatcagtgcctaggtttgaaatgatgaatatttaatattactaacccattttgtgaaggcttaaagaatgcccagaggaaaagcaa

SEQ ID NO: 8237 - DNA, 120 bp, synthetic construct
  source 1..120: mol_type = other DNA
tttaaaactgtggaactgtagctgttagtgatgctttttaagtctatgaaggacacttttcttaaacttcattatgctgcaggattatgagctccagctggcctcatacacctcaggact

SEQ ID NO: 8238 - DNA, 120 bp, synthetic construct
  source 1..120: mol_type = other DNA
ctccaaggctgcagatgttcatgctcggtacattgaactacttacaagatctggagactattacaggttcttaagtgagatgctgaagagtttggaagatctgaaggtaatttatactgt

SEQ ID NO: 8239 - DNA, 120 bp, synthetic construct
  source 1..120: mol_type = other DNA
tgggaagtcggctaagcaaaatctagacaagtgctacggccaaataaaagaactcaatgagaagatcacccgactgacttatgagattgaagatgaaaagagaagaagaaaatctgtgga

SEQ ID NO: 8240 - DNA, 120 bp, synthetic construct
  source 1..120: mol_type = other DNA
tgagctgagacaagtcactcagatgcgaacagaggagagcgtaagatataagcaatctcttgatgatgctgccaaaaccatccaggataaaaacaaggagatagaaaggttaaaacaact

SEQ ID NO: 8241 - DNA, 120 bp, synthetic construct
  source 1..120: mol_type = other DNA
aacaagctcacttgaggaatgagcatttccagaaggcgatagaagataaaagcagaagcttaaatgaaagcaaaatagaaattgagaggctgcagtctctcacagagaacctgaccaagg

SEQ ID NO: 8242 - DNA, 120 bp, synthetic construct
  source 1..120: mol_type = other DNA
tagtgttcgcttttgatcatggccctagtgtgtttccttttgtttgactttccttctcctaacccttaatttaaaaataacttatttaacttctacagacaatatttgtgtgtggctggg

SEQ ID NO: 8243 - DNA, 120 bp, synthetic construct
  source 1..120: mol_type = other DNA
gcctggagtgtgagaaacagcaaattcagaatgacctgaatcagtggaagactcaatattcccgcaaggaggaggctattaggaagatagaatcggaaagagaaaagagtgagagagaga

SEQ ID NO: 8244 - DNA, 120 bp, synthetic construct
  source 1..120: mol_type = other DNA
ggtcagatttcttatgacgaggttggtgagagaattaaggacttcctccagggttcaagctgcatagcaggcatatacaatgagaccacaaaacagaagcttggcatttatgaggccatg

SEQ ID NO: 8245 - DNA, 120 bp, synthetic construct
  source 1..120: mol_type = other DNA
aggtgcagacatcacaaaagaataccctcaggaagcgtagagtggtcatagttgacccagaaaccaataaagaaatgtctgttcaggaggcctacaagaagggcctaattgattatgaaa

SEQ ID NO: 8246 - DNA, 120 bp, synthetic construct
  source 1..120: mol_type = other DNA
ccacagggaattcttcctactcttattcctactcatttagcagtagttctattgggcactagtagtcagttgggagtggttgctataccttgacttcatttatatgaatttccactttat

SEQ ID NO: 8247 - DNA, 120 bp, synthetic construct
  source 1..120: mol_type = other DNA
cccccaacccaaaaccaagcattttggaatgagtctcctttagtttcagagtgtggattgtataacccatatactcttcgatgtacttgtttggtttggtattaatttgactgtgcatga

SEQ ID NO: 8248 - DNA, 120 bp, synthetic construct
  source 1..120: mol_type = other DNA
gcggggaggtgctgttggcctggctgggctggcctgaatctgtttcaagttctcccttcctgcccagctcagttcaccagtgctggatccaggttcaaatgacagggacttgggttttta

SEQ ID NO: 8249 - DNA, 120 bp, synthetic construct
  source 1..120: mol_type = other DNA
agcctcattccctccacattcctgactcctgtgtggctatgggccaagcagtctttccttgagcctctgacatccgattctgtgtcatggggttatcagccctgccttcttggtcctggg

SEQ ID NO: 8250 - DNA, 120 bp, synthetic construct
  source 1..120: mol_type = other DNA
tggaagcactatgcatccctcacccttgtgaacactttggagctatgagccaggtcagcccagagtcccaggctcactctggctggagggagaggcccacttaggggagttgaaggcttc

SEQ ID NO: 8251 - DNA, 120 bp, synthetic construct
  source 1..120: mol_type = other DNA
ctgctcttcaccccaccccacctgctgccttcaaatatcggctagaattaagagttcccacccctgagtcctcacagtggaaagaaagacatggacctgtctggggcagaggaggaggac

SEQ ID NO: 8252 - DNA, 120 bp, synthetic construct
  source 1..120: mol_type = other DNA
cccagaaaactaaagtgacttgcccaaggccacacagccagtatgtgctaagccctctgacttgagagaccaagagcgtcaccctcagcagtcctgctccggtcatacagaaggggagac

SEQ ID NO: 8253 - DNA, 120 bp, synthetic construct
  source 1..120: mol_type = other DNA
acaccccagcaccaaggactgaccacaacccaggggtcccaagtcacagccattcccctgccctgctccctcttcatttttgttagatgtcatcatcctacaccacttaaaagttctttt

SEQ ID NO: 8254 - DNA, 120 bp, synthetic construct
  source 1..120: mol_type = other DNA
ggtgatgctggtgtaagcaaacttattgcactgccggtcatataaaagtctagcacaggctgggcgtggtggctcacgcctgtaatcccagcactttggtaggcagaggcaggcagatca

SEQ ID NO: 8255 - DNA, 120 bp, synthetic construct
  source 1..120: mol_type = other DNA
tgaaagaattacagcaaatcaagggaagtggtggccaaaggggcaacctttttttctttattaaaacttataaaaatcatcaagaaaaataccaagcctcaatgataaggagactgaggt

SEQ ID NO: 8256 - DNA, 120 bp, synthetic construct
  source 1..120: mol_type = other DNA
acaaatgaacacatctcttatgattacatcaatataagaaatacacagagaaaacgctctagaaagaagcacaccaaaatgttggcagccattgtctttgtgtcagaaggttaagatttt

SEQ ID NO: 8257 - DNA, 120 bp, synthetic construct
  source 1..120: mol_type = other DNA
gctgggattacaggcaccggcttttttttttttttttttttttttctgagacagagtctcactctgttgcccaggctgaagtttagtggtgtgatctcggctcactgcagcctctgcctc

SEQ ID NO: 8258 - DNA, 120 bp, synthetic construct
  source 1..120: mol_type = other DNA
gatgccacaatgctggcattgagcatccgggcctcccccaggaggccttgaggtgtgtctgggagcttgaagccacgaatgtttttctctggaaagatcttgaaggagtattctccagtg

SEQ ID NO: 8259 - DNA, 120 bp, synthetic construct
  source 1..120: mol_type = other DNA
ggcctccgtgtgttaacataagggatgagcccatgacacatgttaggctgcagccccgaaaccacccagcaagacccgaaattatagatttatctgtgtacatgtacatgtttattgtca

SEQ ID NO: 8260 - DNA, 120 bp, synthetic construct
  source 1..120: mol_type = other DNA
gacagatatcagtggtccctgccctaggggatattaccattcagaaactagacatgcatcaagtcatttgaaacaatagaagacagaattttatttaataagaaacaaaggagccagaca

SEQ ID NO: 8261 - DNA, 120 bp, synthetic construct
  source 1..120: mol_type = other DNA
ccatctcaaaaaaaaaaaaaaaaaaaaaaaaaggagaccctcctgcctcggcttaccaaagtgttgggattacagacataagccaggtcgcctggcccaagctagatattgaggactgcc

SEQ ID NO: 8262 - DNA, 120 bp, synthetic construct
  source 1..120: mol_type = other DNA
tctggcagtgggtcccagctccctgacctcctctctctggtggatatagctaacacttttaaaagttgaggcttttggttgtttgtttttaattgtttttcccaaatccacagctgacct

SEQ ID NO: 8263 - DNA, 120 bp, synthetic construct
  source 1..120: mol_type = other DNA
ctgtactaaaaatacaaaaattagccaggcgtggtggtgggtgcctataatctcagccactggggaggctgagacacaagaattgcttgaaccctgggggcagaggtggcattgagctga

SEQ ID NO: 8264 - DNA, 120 bp, synthetic construct
  source 1..120: mol_type = other DNA
tgacagctctgcttccagcccacatgagacagtcacaattgctctcccagtttgcaatattcctgcttgtcttaccgttttaaagtactaaaatcctggggggttgttttggtataatgc

SEQ ID NO: 8265 - DNA, 120 bp, synthetic construct
  source 1..120: mol_type = other DNA
caatcatggctcactgcagcctcaacctcctaggctcaagcaatcctcccacctcggcttcccaaagtgctggaattacagacatgagctaccattcttttttttttttttttttttttt

SEQ ID NO: 8266 - DNA, 120 bp, synthetic construct
  source 1..120: mol_type = other DNA
tcctagctcactgtttcttttttttaggctcgtcaagtgaagcaatgagagtggagaaggaacaaagcaatctgtaactagttgtgatcaattacttgtaaacacaattgtttttttcat

SEQ ID NO: 8267 - DNA, 120 bp, synthetic construct
  source 1..120: mol_type = other DNA
aacacagactcccagtgctctcatacaaaagctgccagtctaaaagatgatccaaaagctcttttcaaagttatgaaaaaggggaaggctatttcaagatgaagacaccagtggaaagtt

SEQ ID NO: 8268 - DNA, 120 bp, synthetic construct
  source 1..120: mol_type = other DNA
agatggagtcttgccctgttgccaggctggagtgcaatggcatgatctcggctcactgccacctccgcctcctgggttcaagcaattgtcctgcctcagcctcccaagtagctgggacta

SEQ ID NO: 8269 - DNA, 120 bp, synthetic construct
  source 1..120: mol_type = other DNA
ggtgtgagccactgcgcccagttaggttggttatttttaaataattattttatgctaatttatgggataagatatgtttcaaatttatgtttgtataagttcatgttttgattaatgttt

SEQ ID NO: 8270 - DNA, 120 bp, synthetic construct
  source 1..120: mol_type = other DNA
gttgggaaccagtaccaggttgggctatggataaaggaagtgaaaaaaaagggaagtgcaggtcacagcctggtcatgctgtctgtgaggggtgacgaggaggctggaacttcggaatgt

SEQ ID NO: 8271 - DNA, 120 bp, synthetic construct
  source 1..120: mol_type = other DNA
tggaaaatggtattcccacttcattgacttatgaggtttcagtgcaattctgcctgcaaagtaggttgtccagtgcccagctaaacatgtgggagtagtttggctttttttttgagacac

SEQ ID NO: 8272 - DNA, 120 bp, synthetic construct
  source 1..120: mol_type = other DNA
acacctccgaacgaccagacataaacagcaaggaacatcatcagcccacttgggaatagccaatcaccaaatgcttataagaatgtacagtttttccttcctttcttttattctctctcc

SEQ ID NO: 8273 - DNA, 120 bp, synthetic construct
  source 1..120: mol_type = other DNA
ggctcagagccatttgggattttggggtcctgggtacccagagcatcatctagaagggaggggtgcaggtttcaggggggtacatccctttggccccacagagtccccaccctgggagag

SEQ ID NO: 8274 - DNA, 120 bp, synthetic construct
  source 1..120: mol_type = other DNA
aggggctggcagcatcatgggctcaaccctcagagcagggagacaagaagcagcaggaggaggaaggcccagctccatgaggctggacctcagcttgccctgctgaaaatgaattcacag

SEQ ID NO: 8275 - DNA, 120 bp, synthetic construct
  source 1..120: mol_type = other DNA
gaaaatcaaagctcggaggtggcccaaggcgatgtggctctcagaggcggagccacagttcagctggagggctgcctggctccagaacctgtgttctcaacccctgcatcaaggtcatac

SEQ ID NO: 8276 - DNA, 120 bp, synthetic construct
  source 1..120: mol_type = other DNA
tcttccacaccacctccttccttggtgagctcctggacatccatgatgtttcttcctccaggcccaagtctccttagcttccaagatcagatgaggtcggatgtgttcaggatggtgtgg

SEQ ID NO: 8277 - DNA, 120 bp, synthetic construct
  source 1..120: mol_type = other DNA
ggggtctcctggggagaatcgtctccaggccggcagcagcctttggatctctgagggtcacagatattcagcaggggacattccagggagaaagatctgggctcaactgaaaagcacttc

SEQ ID NO: 8278 - DNA, 120 bp, synthetic construct
  source 1..120: mol_type = other DNA
acaatgactcctactttccaaacgtctcctagggacttgacatgagctaacggctttcctgcatcatcacagccaccttatgaggtggatatcattatattcgttccatggattaaaaaa

SEQ ID NO: 8279 - DNA, 120 bp, synthetic construct
  source 1..120: mol_type = other DNA
tgcccacttcggcctcccaaagtgctgggattacaggcgtgagccaccgtgcccggccagcctcctatatttttattttttatttatttttaaaaattattttttattatttattttatt

SEQ ID NO: 8280 - DNA, 120 bp, synthetic construct
  source 1..120: mol_type = other DNA
ttggaggctgccagagcagaccgcagagcccggaaacacaggtcctgagggaaaggaatggaatttcaccctgacccagcagggtcggaaaaggaaatgaggctcctacacctcgtcctg

SEQ ID NO: 8281 - DNA, 120 bp, synthetic construct
  source 1..120: mol_type = other DNA
tgcgccaccacgcctggctaattttttaaattttcagtagagactgggtctcactatgttgctcaggctggtctcaaactcctgagctcaagcagtcctcccgcctcagcctcccaaagt

SEQ ID NO: 8282 - DNA, 120 bp, synthetic construct
  source 1..120: mol_type = other DNA
cctcagtttccccatttgcagaccaccaataatcactgcagatgctcccatcatgcttactgggagcctaggcagctttacacgagtgaactcatttgatcctcacagcagccttgtgag

SEQ ID NO: 8283 - DNA, 120 bp, synthetic construct
  source 1..120: mol_type = other DNA
gcctttccatcctcagtgttctcatctgtaacatggggatgagggtcatcataacagcttcccatggagtcggcaagcaggccagtaaattacacctgcacagcgctaggccggctcctg

SEQ ID NO: 8284 - DNA, 120 bp, synthetic construct
  source 1..120: mol_type = other DNA
acatctgttcccctggtcacctgctccatcctgactcatcctggtcatgtgctttgacctcacaaacccctggtcacctgctttgacctaagtcacctttagttacctgttcctaaccat

SEQ ID NO: 8285 - DNA, 120 bp, synthetic construct
  source 1..120: mol_type = other DNA
gaaagagtatctcctttgtagggcttttgcaagcgttaagtctgacagtacacataccacgcttagagcagcgtctagcatactgtaagtgctgaataaatgtcagttgttatattatct

SEQ ID NO: 8286 - DNA, 120 bp, synthetic construct
  source 1..120: mol_type = other DNA
gtatttataactagaacaaaggggaaaccacctaaatatttaacaataagcaaacggtgacaagttgatgggacagaatattccagaagtgcaagaggatggtcatggagtccacaggac

SEQ ID NO: 8287 - DNA, 120 bp, synthetic construct
  source 1..120: mol_type = other DNA
ctaaaacaaaagaaaacaaaaaaacccaacatgacaggaaagtgtgtctgagaaagtcaaagtcccagccaggcatggtggctcacacctgtaatcccagcactttgggaggctgaggca

SEQ ID NO: 8288 - DNA, 120 bp, synthetic construct
  source 1..120: mol_type = other DNA
atagctattactatatatttttaaaaggtcatgaatgtccaaactcatttctttctaatcgttttacacccctgactgtcatctctgctctcggtgtgatctgcgcctgcagagactctg

SEQ ID NO: 8289 - DNA, 120 bp, synthetic construct
  source 1..120: mol_type = other DNA
gcccctcttcccccaaatctgtcaggaagcccctggatgcacaggtgggtcaaaggatgtccacaggaccggccagcggcttgaggtggccgagggatagggagtgggacatggggctgg

SEQ ID NO: 8290 - DNA, 120 bp, synthetic construct
  source 1..120: mol_type = other DNA
cacagggacgcggggctgggctggagttgctgtccgaaggatgggcggggagggggtgctgggctccaatggatggcagtgacagcagcagtcctggccccagggcgcagatgaaggctg

SEQ ID NO: 8291 - DNA, 120 bp, synthetic construct
  source 1..120: mol_type = other DNA
tcaacccaattgtcctttattttggctcatctaatttacagacatgatttctgaagtttaacagtatttgtaatggcaatatccaaagtgattttggctgagtaaactgctatttgttga

SEQ ID NO: 8292 - DNA, 120 bp, synthetic construct
  source 1..120: mol_type = other DNA
atctttgtccaatggttgccattaagcctagactgaaactcttctatcttgtgacagggagctcaccacaatgcaaggaaacccattctttcagtgagtagctctataattgggaccgtg

SEQ ID NO: 8293 - DNA, 120 bp, synthetic construct
  source 1..120: mol_type = other DNA
ctccaaccccaaatccatgcaagaacacaaagccaaggggtaaactaaaaaaaagaagagattgttttattgtgacatttatgacattgaccccttgttgacaggaatgaccgagggtaa

SEQ ID NO: 8294 - DNA, 120 bp, synthetic construct
  source 1..120: mol_type = other DNA
gccaacccccaatggaaatacacgtcccagttttcaagaatcaacacatatgacaaggtagcttagctacacacatgagaagcctgagaaagtggttgttttgaactagggtagtcacct

SEQ ID NO: 8295 - DNA, 120 bp, synthetic construct
  source 1..120: mol_type = other DNA
catttcttaaatgacagcagatgggttgcagcaccaatacgaagaaccagactatttcaatttgattcattgacgtaaaaccatcttctcctaaggacacacctatgagcctacttcctg

SEQ ID NO: 8296 - DNA, 120 bp, synthetic construct
  source 1..120: mol_type = other DNA
ctaacttctgacccacctcgatattggaggcatcagtttcgtttgtgcttctccgtttcctgccccgtttggggtagccattgatcttacactcgtaacaagcctctggggagagtgaat

SEQ ID NO: 8297 - DNA, 120 bp, synthetic construct
  source 1..120: mol_type = other DNA
tctgcttactatttcagaggccacttggaatgtgtatttatcaagctcctctttccaaatgtgttgaaacatttgaatggtccttaaaagaatctttatttgggggcagagtccattcta

SEQ ID NO: 8298 - DNA, 120 bp, synthetic construct
  source 1..120: mol_type = other DNA
taaaatgtgcacttcctctcaggatagctaaaactaggtggacacccgagtccagattaattcagcaggaaaaaagatccaaactttgaaaacttaacactaaacttttaaatcactggg

SEQ ID NO: 8299 - DNA, 120 bp, synthetic construct
  source 1..120: mol_type = other DNA
gcatggttctcctctgctaggacaggtaattttgagttcagtatacttaattatattacgaatgaaagaatctccaaccatgaccaggaagagcactgcttacccttggcctatgcggaa

SEQ ID NO: 8300 - DNA, 120 bp, synthetic construct
  source 1..120: mol_type = other DNA
acagggacctgccaagtctgatgctaagaagcaggaaaaagaaatcttactttaaaaaaatcagctagaagggggaaaaccatgagtttctcattatttctgatttataatttttggaag

SEQ ID NO: 8301 - DNA, 120 bp, synthetic construct
  source 1..120: mol_type = other DNA
tttccctccttcccttcagctacaggtctttgatcttaactgcctgtctgaaaatcttttgtatccaaagaccttcaagtcttcacccaaggtcacttaggctccagggctcttaaaata

SEQ ID NO: 8302 - DNA, 120 bp, synthetic construct
  source 1..120: mol_type = other DNA
ggcacccttcaaggtggtatttaagccaaactgggataagcaaggaagttagagaaggatttatatattaggaaagagagaaggctagatctctaaggttctttttaactttgagcatct

SEQ ID NO: 8303 - DNA, 120 bp, synthetic construct
  source 1..120: mol_type = other DNA
ctaggggaaaatgggtcaactctatctatctgcaagctgaattttttgaaatttacttctagaaagcaatgaaattagtggccctcttaccccaaagagtgaacttccagccacctggga

SEQ ID NO: 8304 - DNA, 120 bp, synthetic construct
  source 1..120: mol_type = other DNA
cacaggggtcacttcagtcaaccctacatgccactgcaaaactgtcttgtgtagaatcaaactagatgacagagatgattttgataaatgaaaacacaccaaatatgtcttcatctgcat

SEQ ID NO: 8305 - DNA, 120 bp, synthetic construct
  source 1..120: mol_type = other DNA
gtagagctgaacagaactactttggcatcttcaggccaaaagccactcaaaatagcctttggctggctgatatttttcagtcataagtaagattttttgacccctgatatgaacataact

SEQ ID NO: 8306 - DNA, 120 bp, synthetic construct
  source 1..120: mol_type = other DNA
attcctcatatgtttagtccacatgggggaaatccctttatggctctggacccagtgaccagaaaattaatgaatcaaaatcaagtatatttttcttgactgagttattccctattaggt

SEQ ID NO: 8307 - DNA, 120 bp, synthetic construct
  source 1..120: mol_type = other DNA
aagaaaatgcaagagaggcatttgagtcaagccaacaaaacaggatcagggaagctgaccctatgaagcagctccacgtttgatttggaggtctcaaatgaccctgactagaaagaagcc

SEQ ID NO: 8308 - DNA, 120 bp, synthetic construct
  source 1..120: mol_type = other DNA
taaaaccctctgctttgaccaggcctcttttctcaacgcctcaacttctaagttgcattctcaactccaatgttatttcaaaataccaagagatgaaatgttgtgttctagcttctagct

SEQ ID NO: 8309 - DNA, 120 bp, synthetic construct
  source 1..120: mol_type = other DNA
gtttagaatgtgtaagtaggtctctcaacttcctctccccaaactacaggattatacaggctttgtgctgcacaggaaggcctcaggcacttgcccatgatgtcatccactattacatgt

SEQ ID NO: 8310 - DNA, 120 bp, synthetic construct
  source 1..120: mol_type = other DNA
tgcaaaggataacttctggttgagaagggatttctgcccagagcttttctggttcttaattctgtgtgatatttatgtctcagggaagctcctacagggcagaaatagactttttctgca

SEQ ID NO: 8311 - DNA, 120 bp, synthetic construct
  source 1..120: mol_type = other DNA
ataagccatcagaaatagacacttacctacacaggaagtcccagttatatctggagtgtacccagttttacaaatgcaatgatatgatcctctgtcattgacacattccccatttcggca

SEQ ID NO: 8312 - DNA, 120 bp, synthetic construct
  source 1..120: mol_type = other DNA
cttggcgaagtgccgatacaagcactttctacatgggttctcagcccttgactgccaaataaccattttataccaacagctgggtgtatctgacctttacaagtctactctgaagtgcaa

SEQ ID NO: 8313 - DNA, 120 bp, synthetic construct
  source 1..120: mol_type = other DNA
aaaaaacaaataaatagattccctgcaagtatttttggactataaatgaagtacctgctccattggtcatgaatcctcggccatggggacagagtttcttgaaagccacagtcccctgga

SEQ ID NO: 8314 - DNA, 120 bp, synthetic construct
  source 1..120: mol_type = other DNA
tctcacagatccctggcttcgtctgacattcattctcatctgtttgattttattgaaggaccaaaaacaagaagagtcatctgaccattttatagaggatggagctccttccttcgttcc

SEQ ID NO: 8315 - DNA, 120 bp, synthetic construct
  source 1..120: mol_type = other DNA
ctgatgattatttagaaagatcaaaaataatttgctgaggtgcttcccttcctttgagaatagttcagggtccctcagatggagctctcactaggaaagagagaaagttggaaggtgaat

SEQ ID NO: 8316 - DNA, 120 bp, synthetic construct
  source 1..120: mol_type = other DNA
tggcagcaaatgggtcaagaaagcagacaaaggccagatcagagggacaatgacagtgctcttggaattcacaaatgatcacgaggcaagggaaccaccatggagagtcctgacatgcgg

SEQ ID NO: 8317 - DNA, 120 bp, synthetic construct
  source 1..120: mol_type = other DNA
aataacacaatatattataatatgatattattatttttttgagatggagtctcactccgtcatccagtctggagtgcagtggcatgatctcagctcactgcaacctccacctccggggtt

SEQ ID NO: 8318 - DNA, 120 bp, synthetic construct
  source 1..120: mol_type = other DNA
catattgggttttttgaacgtggggaaatgtctttttctttctattcccatatcttgtagaaatactggcgtgttgtgagcatgcgatgcacagtgagacctaataaaggatgtgcagtg

SEQ ID NO: 8319 - DNA, 120 bp, synthetic construct
  source 1..120: mol_type = other DNA
tcccggttctcccagcacagtcccagtttatgtttgttgtcctggtataattattaatgattatttaggtggatgggaaattacaggccacccaacatttgaggggctcttctgaaattt

SEQ ID NO: 8320 - DNA, 120 bp, synthetic construct
  source 1..120: mol_type = other DNA
cacacaactgtatcattcttggatatctctctttccctacagagaagaggccacaaaagaagaatgatcaaatggcccatcaggcctagatgatctttattatatacaccctgagttgta

SEQ ID NO: 8321 - DNA, 120 bp, synthetic construct
  source 1..120: mol_type = other DNA
attctcattctgttcttgcaaaaagggagtgtgcatgtcttattatctcaggtttatagccgtgaaattcgacttgctcagtggcagtggcaatgacagtgagaatgacagtgcctggac

SEQ ID NO: 8322 - DNA, 120 bp, synthetic construct
  source 1..120: mol_type = other DNA
taagtcaaaagtaaaggcaagaggctatggtggggagctcctaggcgaagaggctcatttcatatgcacatattagcactaactgaagattctgaggagaaaacattgaaatatttgctt

SEQ ID NO: 8323 - DNA, 120 bp, synthetic construct
  source 1..120: mol_type = other DNA
aagggacactcgcagcgataggaaccatctgtattgatgcactgtccatgtttacagacatcgggttctttgcattcgtccatatcttaagcaagagaaaaaaaatagtgaataacaagg

SEQ ID NO: 8324 - DNA, 120 bp, synthetic construct
  source 1..120: mol_type = other DNA
caaatctgcagcataaatttatgacacccttcagttgctttcctactgagtccgtattgcaccatagcaaataaagaacaacccactatgttatatatgttctcctctcaggaccacagc

SEQ ID NO: 8325 - DNA, 120 bp, synthetic construct
  source 1..120: mol_type = other DNA
gcttttccatttctcatacaacacattgactccaaaaagtgagctcaaccagaggtatggactgtgttttccctcgaacttgacttcttaaagccttccaaaactcctctcattacacag

SEQ ID NO: 8326 - DNA, 120 bp, synthetic construct
  source 1..120: mol_type = other DNA
gtagtgtttctttaaatatgtatgttgtaatattggtgtattaaaattctcattctcttttcctttaatagctgacttcgtcccagaccccagctctatctcccccacaccactccaccc

SEQ ID NO: 8327 - DNA, 120 bp, synthetic construct
  source 1..120: mol_type = other DNA
gcaaattgaattaatagcctaggagtttcctctggcctgccacatcggcagattcacacctggtttctcactgctttctttccaaattcaggccaagccaaaggcacacaaaaacaaggg

SEQ ID NO: 8328 - DNA, 120 bp, synthetic construct
  source 1..120: mol_type = other DNA
gctcaaggtgtttccccactgatgggcctatcagcatttgtgttcttagtgggagagaggtttatgtgtcagtacaattgtataagcaaccataacttgatggatgagtttttaacctta

SEQ ID NO: 8329 - DNA, 120 bp, synthetic construct
  source 1..120: mol_type = other DNA
ttgacagttattgatataaaaatggaatgtgcaactgccttctaaggggtgcagtgacaaacgtctcttacccagactgagttgcttggctaactagaaaagtcagagtaatttcatagt

SEQ ID NO: 8330 - DNA, 120 bp, synthetic construct
  source 1..120: mol_type = other DNA
aaatcagcttctccatcatgccatgttattgggttgcatttatacctgtgttatgttccctgtggtttattaatgaatctgatcttctattgccgattgaattactccattctgacactc

SEQ ID NO: 8331 - DNA, 120 bp, synthetic construct
  source 1..120: mol_type = other DNA
ggccagcctggcaacatagggaggccccatctctacaaagaattaaaaaatcagccaggcatggtggcacatgcctgtagtcccagctactccagaggctgagacaggatgatcacttga

SEQ ID NO: 8332 - DNA, 120 bp, synthetic construct
  source 1..120: mol_type = other DNA
taagaagggaaatcacaattgcttacagagcaatttagcaatttcactgtttaatagtttgagtattcttggtgagtacaatagcttaatttttaaaataagggaaaaagtgattatata

SEQ ID NO: 8333 - DNA, 120 bp, synthetic construct
  source 1..120: mol_type = other DNA
gaatttggcttattactcttgcctagtatgttttagaaggagattctgtagattcaatgatttatttaagagaggctacatgaaacatctagaccagaaggttcatagtcctgaatcata

SEQ ID NO: 8334 - DNA, 120 bp, synthetic construct
  source 1..120: mol_type = other DNA
cacccttgccacttttctcaaatattttcacttgaaaatggaaaaaactctgtgtgcatctgggtcttgaggtgttgccacctttggcaaacttcaaccttcaagattctcactccagtt

SEQ ID NO: 8335 - DNA, 120 bp, synthetic construct
  source 1..120: mol_type = other DNA
aagactacacccagatgagtcattgctagtaatcaagaatttttgccttgattcatttttagccaaactggtgaagttctttggttgggaaggttctatgttagggggctccagaaaatt

SEQ ID NO: 8336 - DNA, 120 bp, synthetic construct
  source 1..120: mol_type = other DNA
taattgcatacttacccaagcacatggtttggtcatcatttgttttaaaaccagtgtggcaaaggcaataaaagcttccaactgtgtcaatgcactgcccatgactgcatatattgggga

SEQ ID NO: 8337 - DNA, 120 bp, synthetic construct
  source 1..120: mol_type = other DNA
aaagctctatgtttagagtaaatgtactttgaagagcactgtgccattctgattttcctactgtcacagaagaaagcaaatggagtgtcatctttgctgcagatgctgtagggcagatgg

SEQ ID NO: 8338 - DNA, 120 bp, synthetic construct
  source 1..120: mol_type = other DNA
gaactcttagatgatcatatttgaggttgggataggaggtctgaacaggctactgtggaaagaaacccaaatagtcaacagagaaagagaggaaaccacaaggaagtagctgggaagaaa

SEQ ID NO: 8339 - DNA, 120 bp, synthetic construct
  source 1..120: mol_type = other DNA
acttcctaccacttaatcactggtaggcaaggaaatccaaggaaaatctgaccacgttcccctgtgttgtttcattcacaaatgcataaaatatccaggaaaccccccgtgaaatgaacc

SEQ ID NO: 8340 - DNA, 120 bp, synthetic construct
  source 1..120: mol_type = other DNA
gtgtgtatgcataattgtgtgtgtgtgtaatgtgtgggggtgagtgtttgcaggcagggcagcagacaggcaaatacgaaatctatgtatgcgaatgatttacttcttgttttgaaaata

SEQ ID NO: 8341 - DNA, 120 bp, synthetic construct
  source 1..120: mol_type = other DNA
atctggaaaggcgacataatgtatgattccaaccatataacattctggaaaaggcaaaactctggagacagtaaaaaatcagtggttgccaggggttaggggagattaggggatacacag

SEQ ID NO: 8342 - DNA, 120 bp, synthetic construct
  source 1..120: mol_type = other DNA
tatttactcaaagatctggattttatgattcaataaggttgctattgtctgaaaggctgcaagagcagaatgtctcaaatcttaaagtccacatgaatcacttgggatcttgctaaaatg

SEQ ID NO: 8343 - DNA, 120 bp, synthetic construct
  source 1..120: mol_type = other DNA
gtggcatctgataatgtggctacttggcaagagcagaggcgtggaagctccctaaatcacctctacaatccattccaatttcagcattgctgaggcatgtatgcactcaaccttcatttt

SEQ ID NO: 8344 - DNA, 120 bp, synthetic construct
  source 1..120: mol_type = other DNA
gaattctctcatgcatttggaatatctgcattaaccttgttttcacttgggagtagcaaagtctctgtctggaagagaaatgattttgagagtcaactaggatgactgtccactcatact

SEQ ID NO: 8345 - DNA, 120 bp, synthetic construct
  source 1..120: mol_type = other DNA
cgtgcatgtgttggggtggtggtgatggcaatagggacatcaacgaatagcaaattgagataactaaaccactttccagacatgagtctaactggatttaaatatatgttctgggttttg

SEQ ID NO: 8346 - DNA, 120 bp, synthetic construct
  source 1..120: mol_type = other DNA
catcctgcctcccttatcatataagggaagatcgtattatggtgatttcctgcatcaccctaatacaatcttcacagaactgtcatcaacacttttgttatcctggagggcccttccatc

SEQ ID NO: 8347 - DNA, 120 bp, synthetic construct
  source 1..120: mol_type = other DNA
aaatattttgtcatgctggaatttggtaacaataagcatatagctaaataacagatgtccagttttcaagagctagaagcaaactaagccatgagtcaggactgtgttctggtcccagct

SEQ ID NO: 8348 - DNA, 120 bp, synthetic construct
  source 1..120: mol_type = other DNA
gggcatctaaggatgcatataaatcacaccagggaaaaactcagagaatgcaatagctttccatctacttttatgttatttggttttaaaccacaagggcattgcctgcactggctgagt

SEQ ID NO: 8349 - DNA, 120 bp, synthetic construct
  source 1..120: mol_type = other DNA
cctaatgttgacgtgataatgaaggagaagtagagatccccagatcacatgccactcattcacatgagtttacctgtaggagtttggatttcaatatggatgttattcagctctgaactc

SEQ ID NO: 8350 - DNA, 120 bp, synthetic construct
  source 1..120: mol_type = other DNA
aaatgcacaccaggtgtgcataagcttcagattttttaccaacaggtaagtaccacctaaagttgtaaagaccattattcaagatcaagggtcagcaaactttttaataaagggacagag

SEQ ID NO: 8351 - DNA, 120 bp, synthetic construct
  source 1..120: mol_type = other DNA
aagaaaagttgcactttcctttcattttgagttttctttatgctcattgagaattttgtacttgatcacatctcccttttcataggagctgctagaaagtttggggctaaaattattgct

SEQ ID NO: 8352 - DNA, 120 bp, synthetic construct
  source 1..120: mol_type = other DNA
atcttcttggtcatgttgaataacaattctccatcacaggtctggttgtcagcatagtagtttctgtagcacaaacttcttctcatatctagaagggaggtaaaaaaaaggattggaggg

SEQ ID NO: 8353 - DNA, 120 bp, synthetic construct
  source 1..120: mol_type = other DNA
aatggcctgatacttaatgaatgttgacattagaggagaaaatctatagggtattttcaaataagataacgaaaataggtatttcattcatccgtgtcctctctctgtgtaaatgtgtgc

SEQ ID NO: 8354 - DNA, 120 bp, synthetic construct
  source 1..120: mol_type = other DNA
aaacaattgtgtgattcctccatgtagatgaaaaccatggctcatggctgaagtgctctgaaacctgtaagtggttaatattctccacctttccagtaacacaggatgaacaagggccac

SEQ ID NO: 8355 - DNA, 120 bp, synthetic construct
  source 1..120: mol_type = other DNA
gttcattttcaggaatctttagttgttactctgcccgtctgaagtaagttaacacctttgtgtacacttcccattttccagtggtttttattatgtgtccccagtgcaaggccactgtcc

SEQ ID NO: 8356 - DNA, 120 bp, synthetic construct
  source 1..120: mol_type = other DNA
aatcatccatactttttgaatttcttctttcatgtcacaaccttcttgaaggctcaattaaaaaacacactaagtccccaccctctcccaagcagaactgacctccctttctgaagagaa

SEQ ID NO: 8357 - DNA, 120 bp, synthetic construct
  source 1..120: mol_type = other DNA
ttctgatctagaaaggagaactggctggagttgaaataataataaataggaggatgtccacttacatgtgttcacagcaggacacatctcacaaggagtaccccaggctttacccagaga

SEQ ID NO: 8358 - DNA, 120 bp, synthetic construct; identical to SEQ ID NO: 1314
  source 1..120: mol_type = other DNA

SEQ ID NO: 8359 - DNA, 120 bp, synthetic construct
  source 1..120: mol_type = other DNA
ctgcgggttgcgctgcagatgatttttttgttcaaattgcatgtgaatttggacggacagggccagagtaacagaaacgagattagacagaatgatgttgatagtgatctggggcacgca

SEQ ID NO: 8360 - DNA, 120 bp, synthetic construct
  source 1..120: mol_type = other DNA
aaactctccaaaaatgtacccaagtagaaaaggaaatggctgggaagctacaccactagagcacccctagaacattcctttgtagccacaaactcaatttcaaggctacaaactgtgctc

SEQ ID NO: 8361 - DNA, 120 bp, synthetic construct
  source 1..120: mol_type = other DNA
tcactgtgactatttgtgtcaccagaggtggcacagtacctgttttccttggatatttggagtaacaaaagtaaacaaggtattaggcacatgatcaagagcataatctggtttcttgac

SEQ ID NO: 8362 - DNA, 120 bp, synthetic construct
  source 1..120: mol_type = other DNA
aaatacagtggagattaaaacctgtgtttccatatttagtgataatcccacaacaggacattatcagggaacttgcactttcagctcttttctccctcagtagggattaacaggttgcat

SEQ ID NO: 8363 - DNA, 120 bp, synthetic construct
  source 1..120: mol_type = other DNA
ggtaaatcacttaatgagccttagcctctattgtgcttaaatgactttttatgaacaaagtgctcaggataaatcaatgttttaagttataggagcagctatgcgacctaatggctaatg

SEQ ID NO: 8364 - DNA, 120 bp, synthetic construct
  source 1..120: mol_type = other DNA
ttcccacagagctctagtgccaaatgatgaatcttttctattaactgacccagtcttcaaaaaagaattgctagcctgagaaatgtggaatgcctggcttctctgactagtgttgacaca

SEQ ID NO: 8365 - DNA, 120 bp, synthetic construct
  source 1..120: mol_type = other DNA
acatatatcaaacagctttaaatttcaaattataaagatataacaatatgattgtactagctattgttaactctaattattttccgtattttaatgtaagtttccagtcactgcaaagtg

SEQ ID NO: 8366 - DNA, 120 bp, synthetic construct
  source 1..120: mol_type = other DNA
acacattgtataggtggattttagtgtaaccttggcagccacatggacctatcaagttattactgcaggtcaagagagacacatagctttagactgtgactgggagctttaaccagctaa

SEQ ID NO: 8367 - DNA, 120 bp, synthetic construct
  source 1..120: mol_type = other DNA
ccactgcgcccagctgagcgcatttctttagtcatatcaggattttattctaagccttgctttatggagttaccaaaatattggtgaatattaactgacttatagaaatactcactaata

SEQ ID NO: 8368 - DNA, 120 bp, synthetic construct
  source 1..120: mol_type = other DNA
aagaaaagcaaagaaattcaaacttaaagtgacaccgcaaccttcttaaccccaccaaacctttgtcacaaagactcaaaggtcctcttgcatggctctcttgaagggcaagggtgtggt

SEQ ID NO: 8369 - DNA, 120 bp, synthetic construct
  source 1..120: mol_type = other DNA
acccatcaaagatgacacctagcagggccttaattatgtagaacaagcagcagaagccttacattgggtcatagaaaaattgtaatccagcccacttaagccaaggatagaagagctgtg

SEQ ID NO: 8370 - DNA, 120 bp, synthetic construct
  source 1..120: mol_type = other DNA
aaaggctgctgttcttaacgtaaagctggtgtcacttcatgcaactgtagtgcacagctctgttaccatggtcttagtatctgtgcaaattcaactacgaaaaacaagcctttcaatata

SEQ ID NO: 8371 - DNA, 120 bp, synthetic construct
  source 1..120: mol_type = other DNA
actactgccagaccatcatcccttaccaagtcctatatttatactggaagctaaaaataaagcttgaaccatagacatacaaagctaggcaccatttgtaccgagaggccgtataggagt

SEQ ID NO: 8372 - DNA, 120 bp, synthetic construct
  source 1..120: mol_type = other DNA
attgtaggatgttttcctttaaagagcaattccagttataaaccttaaatgaagtgttggcaaaggaggttattggaaaaggcttgcttcggtgaagggccatgaatatttggtaattag

SEQ ID NO: 8373 - DNA, 120 bp, synthetic construct
  source 1..120: mol_type = other DNA
tttttatgacattcattttaattctaggacttcaaacattttcagtaaaggctttcagaagataaatgtgataaaaatgtaaatataatcaataccagactcttgcttctggccaagata

SEQ ID NO: 8374 - DNA, 120 bp, synthetic construct
  source 1..120: mol_type = other DNA
tgtatgtgaggaaaggcagattagagatcgtagaagaaaagtttatcaaatttgaaggcataacaatagaaactatacaaaacaaatagatcagttctaaagtttactgcattcttgtca

SEQ ID NO: 8375 - DNA, 120 bp, synthetic construct
  source 1..120: mol_type = other DNA
gttcagtgagaaaacattaactgaccgcagtcaaataaacttagcctactagcataagactattaactctcaaatccaaatgaagctttgcataaactagcccattgggttatccttggt

SEQ ID NO: 8376 - DNA, 120 bp, synthetic construct
  source 1..120: mol_type = other DNA
aaatcatttggagagattgtgaaaacaaattcctgggatctacctcagtagtttctgatacggtagatctggaatggggcctgagattttacatttttttaacaagttctcaggtgatgc

SEQ ID NO: 8377 - DNA, 120 bp, synthetic construct
  source 1..120: mol_type = other DNA
gggacagacacaatctttgacttcaaaatgattacactgtggccaggagacagatgaacaattaattgcaccatgcatgatgtgccatttgcaatgcaggagaagtattgggtgctagga

SEQ ID NO: 8378 - DNA, 120 bp, synthetic construct
  source 1..120: mol_type = other DNA
ttccacagcactcaccgtgtttagtttatttcaggtggttagttaccatttgttaatgtgcattggtatgcatgtgtgtagacaaagcacatgctgctactgttccctatccaaacggca

SEQ ID NO: 8379 - DNA, 120 bp, synthetic construct
  source 1..120: mol_type = other DNA
aggatcagactaaaaccaaaatgcagccaaactcttggtttattttcttctcctgcactaccctgctctccttacttcctgacaagtaccttctgagagaatttgctcacagtaagaaat

SEQ ID NO: 8380 - DNA, 120 bp, synthetic construct
  source 1..120: mol_type = other DNA
tcatcttgcactcattgatatcttcaagaataagaaaatgtggggcaaaataagtttatgagcaagcagtcaggaggtctcaatgcccaccattttaaatcatgaaggttggaagttctt

SEQ ID NO: 8381 - DNA, 120 bp, synthetic construct
  source 1..120: mol_type = other DNA
aaactgcatacatgtaacatgtgacctgagtttcccactacagggcctttttccaaaacaagaccaaacactcaagaaatacgcaagtaatttctacatgtaagacagaactgggagatt

SEQ ID NO: 8382 - DNA, 120 bp, synthetic construct
  source 1..120: mol_type = other DNA
cagcccatgtttgcacctcctacttctgaaaagttccctttcaacatctgataattctacataaggaatggtattctgagagatcccacagtgttctttcgggagatgtttttctcctgt

SEQ ID NO: 8383 - DNA, 120 bp, synthetic construct
  source 1..120: mol_type = other DNA
aacaaataaactaagactcagaatagcattaactgacatccttaattacaaaaatacttttggctttgaattcccggttccattccatattatttatttacactataaactataaagttc

SEQ ID NO: 8384 - DNA, 120 bp, synthetic construct
  source 1..120: mol_type = other DNA
gtttttgcaaggacctgtccttctggccaatgtcagggtatgcttagaagacatgggctacagtttccaaatatgtgcaaatattgttcttttctccaccactcagcttgtattttatag

SEQ ID NO: 8385 - DNA, 120 bp, synthetic construct
  source 1..120: mol_type = other DNA
ttctgtccatgctttggtctcagcttgggttgaggggaattaaaagatactcatgttcattcattcatcattcatccaatctctctcaaatgtaccagtccttcccagtttgcctaatgg

SEQ ID NO: 8386 - DNA, 120 bp, synthetic construct
  source 1..120: mol_type = other DNA
ccatgactgtgaaacaaacaaataaaaaatgccaggacaaaccaaagaaaggcaaattttacagactcatcaaaaacttcctgtttttctcttcctgatagcattttgaaagtgcagtct

SEQ ID NO: 8387 - DNA, 120 bp, synthetic construct
  source 1..120: mol_type = other DNA
tgttcggggccatcaggattaaatctttgaaaattctcatgtgagcctagataaatgaaatactaggcttcccctttttatgcaaagaccattggagtggtataggaaccacagcatggg

SEQ ID NO: 8388 - DNA, 120 bp, synthetic construct
  source 1..120: mol_type = other DNA
gccaattacaagtaaataccataagtggcttacaaagtacatactagtgccatgtagaaccacagaatttcaactaaactggcataactgtctaaaatacaggagactctaattcagtct

SEQ ID NO: 8389 - DNA, 120 bp, synthetic construct
  source 1..120: mol_type = other DNA
ttttctgattaagtctaataaatggttgggagaagagctgcttctctctcagtaaaatcaaggttgactttgtagtcacatgagaatggctcagaatctctgcatcttatatctaaggag

SEQ ID NO: 8390 - DNA, 120 bp, synthetic construct
  source 1..120: mol_type = other DNA
tttcactggaaagagaacactctgtctctttttctcactgtaagatattctgagtccaatctttctcccacaagttcctgagaggaactttgcatctcagctggaactacaagataacca

SEQ ID NO: 8391 - DNA, 120 bp, synthetic construct
  source 1..120: mol_type = other DNA
gccattttataatactgagcacttaacagttcagaatccttcagaatgcagatggagaatggttcaactagcccatcatcccgagtggtacttgatagtggaagatccacaagagagtca

SEQ ID NO: 8392 - DNA, 120 bp, synthetic construct
  source 1..120: mol_type = other DNA
acaacttttaaggatacaggcaagttatagcaattccttgtgcaaagccctttcggaaaaggtgtttttcctataacttgattttgttcaccagggaacactttacacttacggtgaaat

SEQ ID NO: 8393 - DNA, 120 bp, synthetic construct
  source 1..120: mol_type = other DNA
ggtactagaccattttttgtagtgagttcaaataagcatgggttttaataccgatgacaacgctaattgctgggagttttggaagcagcccttttcctctgttagtttcttctcccataa

SEQ ID NO: 8394 - DNA, 120 bp, synthetic construct
  source 1..120: mol_type = other DNA
ttaatgtcattattatgggagtgagttagttatcatgagagtgactttgttataaaagcacattcagtcctctctagctttctctcactcctgcatgctctgttgcccttccactttcag

SEQ ID NO: 8395 - DNA, 120 bp, synthetic construct
  source 1..120: mol_type = other DNA
cgagtagctggggttataggcgcgcaccaccacgcatgactttttgtttgtttgtttgttcgtttgtatttttagtagagatgagatttcaccatgtcagccaagctggtcttgaactcc

SEQ ID NO: 8396 - DNA, 120 bp, synthetic construct
  source 1..120: mol_type = other DNA
attaagtaatttggctgcctgttgatggaggaagagaattctgactcgctatccagttctcttttcattaggccatgtcacttcaactggagaaaaatagttttttctctcaggttaaat

SEQ ID NO: 8397 - DNA, 120 bp, synthetic construct
  source 1..120: mol_type = other DNA
agcatctgtcatcacactgtcacttcaaacagatgagaaccccccaagtcaaagttgaagagggctttatttatccatcatccctggtgtaactcacagggaatgcctctgatatcgggg

SEQ ID NO: 8398 - DNA, 120 bp, synthetic construct
  source 1..120: mol_type = other DNA
aaatattctttatatcttatctgctacagtagagagcgtttgttaccattgggctttattgagtgacagaggctgaacctctctcataaggttagccatgatgttttcttaccaacacac

SEQ ID NO: 8399 - DNA, 120 bp, synthetic construct
  source 1..120: mol_type = other DNA
catattaataatagcagagggttttttccccccttaatatggggaagtacaaaaggcaccaaaattgtggtttggaaaacatacaacacttagaagtaaatgattttaggccaggtgcag

SEQ ID NO: 8400 - DNA, 120 bp, synthetic construct
  source 1..120: mol_type = other DNA
aaacgtggagactacaacctgaaaggtaacacaaagggtttttaataagaacggagatgtaaggtagatccaaagggaggtaaccttggtcaaagttagtggcttcaactttcagagagt

SEQ ID NO: 8401 - DNA, 120 bp, synthetic construct
  source 1..120: mol_type = other DNA
cagaaaccaccttcctccttcaaatttgaaacacccaactgttttctcttgctgggaagacaggtttgcacaatattaagagccattgatgtgaaggtcatagagaatgtaggtaaacaa

SEQ ID NO: 8402 - DNA, 120 bp, synthetic construct
  source 1..120: mol_type = other DNA
cctttgagaagacctcaaataccctttctgaaataacaatagtcttctgggcataaactgtagctctttggatggctggatttaagaaggagtttcagtcaggtttcccaaaccaaaatt

SEQ ID NO: 8403 - DNA, 120 bp, synthetic construct
  source 1..120: mol_type = other DNA
tcccttaaacattggggatggttctttaaattcatcactatgttattttatttgatattaaagctgtcttgggaggcacttgctcttttagacacagtgttttcacttacaggctttaga

SEQ ID NO: 8404 - DNA, 120 bp, synthetic construct
  source 1..120: mol_type = other DNA
tgaaagcccgcattacacacgcaatgaaaactgccatctgtgttgatgcagcgtccattattgcagatccggccattctgtaaacactcatcaatgtctaaaatcaaagtttaaaaagaa

SEQ ID NO: 8405 - DNA, 120 bp, synthetic construct
  source 1..120: mol_type = other DNA
agctgaggcagtctgggcttttcttctgtctgatctttgtgccaacaacctacgatctttttctctctcgtttatttcttaatccttgctaaaaatcagacttgctccacactcaaaaaa

SEQ ID NO: 8406 - DNA, 120 bp, synthetic construct
  source 1..120: mol_type = other DNA
aatattaagaaggttctcaactcagttacgtgttcaacctatccatatttataactaattaatagaaatgttagtgagttcaaagtccttgctccagtttttttctgcttaaaatggtca

SEQ ID NO: 8407 - DNA, 120 bp, synthetic construct
  source 1..120: mol_type = other DNA
ggagatgctgttgctgaccacactaaaaagcagcaagggcttagagtgacatccctatcttttagaactttccattaagaaattaattgcacataatttcaactgaaattttcctcagtt

SEQ ID NO: 8408 - DNA, 120 bp, synthetic construct
  source 1..120: mol_type = other DNA
tccaataaaaagaaggtctaaccatatccaagcattccctgctgagttccactaaaatgttagaacaaaacatgaagcaactgttgtttaaagggcagttctcaatcaccacagagtctc

SEQ ID NO: 8409 - DNA, 120 bp, synthetic construct
  source 1..120: mol_type = other DNA
gcagtcacaaatatccttaaatgtggaagagggaattgcaagagagagccagagagagacaaagagatttgaagatgcaacactgctggctttgaaaatggaggaaggggtcatgagcta

SEQ ID NO: 8410 - DNA, 120 bp, synthetic construct
  source 1..120: mol_type = other DNA
ctatcgcccataactctcccatagttgcctgaaaacaccaataacaaaaggacattaatctctggagaataggaagcctcccgtttttctctatgcaataggaaaattgagacatacata

SEQ ID NO: 8411 - DNA, 120 bp, synthetic construct
  source 1..120: mol_type = other DNA
gatgatgtccggatgggggagtcagtgattgaatcggacagaagtggacaaatctgaagcacattttagagataaatgtgtagtgttcagtgaagtagatttttgagataaatgtatagt

SEQ ID NO: 8412 - DNA, 120 bp, synthetic construct
  source 1..120: mol_type = other DNA
tctgggcttccaaaaaggtgtttttaagcagtatccaggtttccaaggatgtatttattttatttattttcatgttgcctacaaatagccatgttttttcatagttcccttctataagta

SEQ ID NO: 8413 - DNA, 120 bp, synthetic construct
  source 1..120: mol_type = other DNA
tatcagactgaatctgatatttcttcctattttttacagatttagtaatcttctcattgcccctttacattcaggatcagcaacgtggggctaattttgttaagctgatgtccatctttc

SEQ ID NO: 8414 - DNA, 120 bp, synthetic construct
  source 1..120: mol_type = other DNA
tgaactgggattagatttgggactctaaatactgtgctaagtagcaaatgttctttgcaagaaatggagtgaattggccactaaatattgcctgagttcatcctggggaaatatttttgg

SEQ ID NO: 8415 - DNA, 120 bp, synthetic construct
  source 1..120: mol_type = other DNA
tctttgtacagacccctttttttttcctgtgcattttctagggaaatttccctggacgtcatctcttatatttcctggagactactcatttacccaagtttccattacatctgcatcatg

SEQ ID NO: 8416 - DNA, 120 bp, synthetic construct
  source 1..120: mol_type = other DNA
gacgcatttctatatcacttttattgggttacatcatgtctaattgtcatgacatccgacacactgcagcgcagctctgggttacggaaagagtttgtggcataggaaaacctaacttct

SEQ ID NO: 8417 - DNA, 120 bp, synthetic construct
  source 1..120: mol_type = other DNA
tgtaaagcaaagatctttcatagccaaaaatccatccctgggtttcctgtaagtctgaatattaaatttcaagttttctcaaagagggtcatacctgtaattgttatcatctacatcatt

SEQ ID NO: 8418 - DNA, 120 bp, synthetic construct
  source 1..120: mol_type = other DNA
aataagtaaaggaagaaaaaactgaaaattggaaaccatttggagtaaatgacctccaggacacagcagcctgaagtttttcacttcgttaggcagcagtgccacaccaagggtggctgg

SEQ ID NO: 8419 - DNA, 120 bp, synthetic construct
  source 1..120: mol_type = other DNA
aaatgtgcacggaagatactgcataccactatctacataggaggttttctattggtgagacctactcattccaaacaactgtcttacgaacaagccttggatttgtttatactgtcaggg

SEQ ID NO: 8420 - DNA, 120 bp, synthetic construct
  source 1..120: mol_type = other DNA
atctattttttaaacaatagaacccctgatttaattgatacctgacatggaagtctaacactcacagcagataaagtgaaattgctatgcctagaatgtgtgtgggagtgtggggggaca

SEQ ID NO: 8421 - DNA, 120 bp, synthetic construct
  source 1..120: mol_type = other DNA
tttgtcattaaacctacctatgcatctggtaccatctggagaggtgtaaaaaccagggggacatttgcaaaagtaactgctgactgtgtttgtacattcacccccttcacagattccagg

SEQ ID NO: 8422 - DNA, 120 bp, synthetic construct
  source 1..120: mol_type = other DNA
aggacaaatatggccatttccttcaaggagaggttttcaatagcctgacccacacactgacaaatgtcaacagatacggcaccagcagaagaagagaaaaaaatgacagcttccttctta

SEQ ID NO: 8423 - DNA, 120 bp, synthetic construct
  source 1..120: mol_type = other DNA
tgacagcccatgtcagaaaaatttgtttaaacaatagaattaacattggcagaatgggggaaacatcttttccatgctggctgagtgagatttgggccctttattgaagataacaataac

SEQ ID NO: 8424 - DNA, 120 bp, synthetic construct
  source 1..120: mol_type = other DNA
tccttttaattgaatttgaggcatcccaagttaagagggaatttgagaacggtcactttctcagtttctataaatcaggctgtgtcaaatgccagccatgaaagcaaaccaggtggggac

SEQ ID NO: 8425 - DNA, 120 bp, synthetic construct
  source 1..120: mol_type = other DNA
atcactaaaaactaaacaagctgactcttcatgttgacaaaaacgtcagccatactattttatagtcacatcacgtacgccagcttttatccatgctgcatccgccgcccgatcacaact

SEQ ID NO: 8426 - DNA, 120 bp, synthetic construct
  source 1..120: mol_type = other DNA
cgcagagatttttttttttttcaactaattgtatagagagagccagttaccttgaacagtgaaagtctagggcctgcaaacagctgaaagaggatggagccccatctatggtagtgggtt

SEQ ID NO: 8427 - DNA, 120 bp, synthetic construct
  source 1..120: mol_type = other DNA
cctgattactttcttaccagagtaagacaggtcaaccctgttcacaccagtctccaggccagagaatgtatagcactaacaggacattctcctctagtatcaattttgcattgatactag

SEQ ID NO: 8428 - DNA, 120 bp, synthetic construct
  source 1..120: mol_type = other DNA
gtcttgtctgaatggcctcagacagggtacttaatacacccaagacaccattccttaatatataatgtagagtgtggaaatagctgagttctttgcccctttcagtgccaacattctctg

SEQ ID NO: 8429 - DNA, 120 bp, synthetic construct
  source 1..120: mol_type = other DNA
cattactatatataagttacatgcactcatcaaagaaaagagagtccaatgctgcctacatattttctagatgctcccctctcacgaagaaattatgactgtaattggaagtcaggcctc

SEQ ID NO: 8430 - DNA, 120 bp, synthetic construct
  source 1..120: mol_type = other DNA
aatgcaatttcctccctgacagagcccggggatggcctggcattcatccacatctgtcagattacagaagacagagagaaaaaaaaaaaactcatatgaaattcattgcagaataaaatg

SEQ ID NO: 8431 - DNA, 120 bp, synthetic construct
  source 1..120: mol_type = other DNA
gtcttcaatataagcttccagaaagcagggactttgtccattttcttcactgttgtataaccagcacctaaggactaacttgggttcttatgtgtaagcccaaatattaaccttccagga

SEQ ID NO: 8432 - DNA, 120 bp, synthetic construct
  source 1..120: mol_type = other DNA
ttttttcttggatgttgaatagcagagttagaaagaaacaggaagcaaatgctggaaagatccagatttatgaaacgaatagcaaagctaaagagaaggcagttcattatccccaccccc

SEQ ID NO: 8433 - DNA, 120 bp, synthetic construct
  source 1..120: mol_type = other DNA
cctcagaaaagcatatcctgaagtttctgaaaatattgcaacttgctataaaaagtcctgaggctgtctaaaggaaacagatacaggctgagagttttcaatcccatcagtttagtgtgg

SEQ ID NO: 8434 - DNA, 120 bp, synthetic construct
  source 1..120: mol_type = other DNA
ttgtccctggcacatctggttgctgatcacagtaaaacatgggcctgtcctgtaatctgaaaataaagaataaaaatctgatgaaaatccagaaaagcaggaaccatcatgcagaggaac

SEQ ID NO: 8435 - DNA, 120 bp, synthetic construct
  source 1..120: mol_type = other DNA
ggtaagactcatgggcttctatccacaaaccaacatttgcatgcttccaggtcattttcagaagtgtttaggtgcagtgatccctgtgagtctaaaaatggactcaatgaccccagtaag

SEQ ID NO: 8436 - DNA, 120 bp, synthetic construct
  source 1..120: mol_type = other DNA
tctgtgtccctcttctctgcatgatatagccccacccacctttccagccctgtctcctgacactttctctgtttatcatttgtctttttttttttactttgtttatgcatttcttactct

SEQ ID NO: 8437 - DNA, 120 bp, synthetic construct
  source 1..120: mol_type = other DNA
aaactctccatgttaggtaacaagaaagagaatttaggcttgtttctttctgttaatttactgagacaagtgcaaatgctttaatcaaacagattcaggttagcttgccatattcaatcc

SEQ ID NO: 8438 - DNA, 120 bp, synthetic construct
  source 1..120: mol_type = other DNA
atgaactagggcaacaggccaagtctttccaaaattaaagtgcgactctaattgtttttaactggcttactccagtgtggctggttcatgggaaattctgcatctccatgttcccattct

SEQ ID NO: 8439 - DNA, 120 bp, synthetic construct
  source 1..120: mol_type = other DNA
cgtgtgccatgattaattggagatctctgcaagataacaactacttatctgaaagtctaactttaggaacataagccagcccataaactggcatcactgccactcgacataacccagtat

SEQ ID NO: 8440 - DNA, 120 bp, synthetic construct
  source 1..120: mol_type = other DNA
acatgacactgcagaattgttgtttttctaggtgtgataacggtattgtggttacatacaagaatgtccttagtgcttagaggtgacgtctcatgatgtatgcaacttaactttcaaata

SEQ ID NO: 8441 - DNA, 120 bp, synthetic construct
  source 1..120: mol_type = other DNA
tattaccactatgacttaaatgtaaatgtcattcaaaactgcagaaacaaggtgatttgttgtacaccttttaatctaacatgcagactaagcaattcaccaaaatccaggccatagttc

SEQ ID NO: 8442 - DNA, 120 bp, synthetic construct
  source 1..120: mol_type = other DNA
caattttaacactgaatattgtgtacgtggagggtgaaggcatatgttggtaaagaggcaataaaaataaattgatataaaatatcaatcgattgcagtgcactaatatgaggtacccag

SEQ ID NO: 8443 - DNA, 120 bp, synthetic construct
  source 1..120: mol_type = other DNA
tgaggcctaaaggatgagcacaagccagctgtgcaacatctaagcgctttctaagtatgggagacagcaagaacagtggctctgggctggcagatagcctggcttctctaggattaaaag

SEQ ID NO: 8444 - DNA, 120 bp, synthetic construct
  source 1..120: mol_type = other DNA
ggaatccaagaccactagctttagctgccagccctgagttcattctacaggaaatggagacacaccacattcacattccatgatagcatcaattctgagagatctggtggaaaacttaaa

SEQ ID NO: 8445 - DNA, 120 bp, synthetic construct
  source 1..120: mol_type = other DNA
atattctgggccactggtgagtgacaactgttttatggcacagactagcaattatgcaaatattcatcctgctctttggaattaatagttatttcccagacaccccaggtacacatgatg

SEQ ID NO: 8446 - DNA, 120 bp, synthetic construct
  source 1..120: mol_type = other DNA
cttggtaggtctaaaggtgccctgaaactatacataaatcacatctgcaagttcgatgaatctgaacacaattaagtgagcaatcacatattctcttccagaaatctggaattgggattg

SEQ ID NO: 8447 - DNA, 120 bp, synthetic construct
  source 1..120: mol_type = other DNA
gctaggttaggaagagaaggttgtttccatagtgcaggaagggcagagcgtgtagaaagatgtctgatagaagcttgttttgccattagacttgctcctcccacacttcttattttggga

SEQ ID NO: 8448 - DNA, 120 bp, synthetic construct
  source 1..120: mol_type = other DNA
gtatgagtagtaaataagtatacaaaatacctaccatagtccctggtccttctatttttcctctcctcccacacataccatgggtacacataaccaatacatcccgctattcttagaaac

SEQ ID NO: 8449 - DNA, 120 bp, synthetic construct
  source 1..120: mol_type = other DNA
tatatgtaccacattttctttttccggtctcattgatggacagttaggtggatttcatttctttgctattgtgaatagtgctgcaatgagcatacacatgcatgtgtctttataatataa

SEQ ID NO: 8450 - DNA, 120 bp, synthetic construct
  source 1..120: mol_type = other DNA
gagattgagcaaagtaggtcaagtgcataaccaaattttacccaaatgcaaatgagaattccagatattccttcctaagctcatattccccaaatcaacttaatttttcttcctcgaaac

SEQ ID NO: 8451 - DNA, 120 bp, synthetic construct
  source 1..120: mol_type = other DNA
agcactggaatctcctattttagaattggaaggaaacttatagaagaagaaaaagaaaatgagcatttatggagcatggtgctggctacaagggagacatgctgtctcacttaattctca

SEQ ID NO: 8452 - DNA, 120 bp, synthetic construct
  source 1..120: mol_type = other DNA
cctccctgtggagaagcaggaaagagatggtacggggaatcctaaatgggtatcagtcatattttactgcttaggttgggcagtattcatttttaaaataggtttgtaactaacacatac

SEQ ID NO: 8453 - DNA, 120 bp, synthetic construct
  source 1..120: mol_type = other DNA
gcagaaatctgtggagactatttggcattgtctgtattacccaagaacatgtctggttgtctcgcccttgaccctgcctttaaaagccttcttatccttcaagaccaaacttaaacactg

SEQ ID NO: 8454 - DNA, 120 bp, synthetic construct
  source 1..120: mol_type = other DNA
agtgcttggcacagcataaattccaggcatctgaaatgcagttagaaatcattttctttgaaacctaacaaaaagggttccctgagatctcctgcacaaaacgccaggtattcttacagc

SEQ ID NO: 8455 - DNA, 120 bp, synthetic construct
  source 1..120: mol_type = other DNA
ccaaatctctattcattcaagaatttggtaacctatgtgaattcctgactttgaggatcagaaaggtttttagagaacagctcgtcacttcatagatgaaaaaaactgagattggggtgg

SEQ ID NO: 8456 - DNA, 120 bp, synthetic construct
  source 1..120: mol_type = other DNA
cagccaggccaagttaccatccaactccatttcccctctccctatttgaggtctccttgttccatataaactgttaaatctttgatcctacaacacatttcatgtatttctctgcacaca

SEQ ID NO: 8457 - DNA, 120 bp, synthetic construct
  source 1..120: mol_type = other DNA
ctagtacagcctgtttcctttcttaacaaattgtagccacaaatatattatgtctaaagaattttgagaccccttcgaaagggagcttgatccaatcctcaaggctccaggcactttcag

SEQ ID NO: 8458 - DNA, 120 bp, synthetic construct
  source 1..120: mol_type = other DNA
aaccacgctacgtgtactcttagacaagaagacgagccaggcatgagacaaagcgcacacaccttaaatcaataaaggatcctaactttcctgtaggagatagcaataaaaataacaata

SEQ ID NO: 8459 - DNA, 120 bp, synthetic construct
  source 1..120: mol_type = other DNA
tgtgaccctctctaaaccatataacctctctgggtcataatttcctcatctgaacaatagggatcatgccatactacccaacccccagagttgttgtgaaaactaagtaatgtattcaga

SEQ ID NO: 8460 - DNA, 120 bp, synthetic construct
  source 1..120: mol_type = other DNA
aaaagcccaaattttagtgtccataagaaccactgaggaacttattgaaacgcaaatccctggactgaaccctcaataattttgattctgctgggggccaggaatcatttttgctgagta

SEQ ID NO: 8461 - DNA, 120 bp, synthetic construct
  source 1..120: mol_type = other DNA
aaagtattttcattttcaaggacaaagattgctattttttagagattgcactaggtggtgatgccaactaatggactgccactcaaacaccagcatgccaacttgctcgctggcaggaaa

SEQ ID NO: 8462 - DNA, 120 bp, synthetic construct
  source 1..120: mol_type = other DNA
aaacaaaatattttaaaaatttccaagcaattaagccttcaagtgtaagttatgtgtatttagccaactctcctgtgccattctgcaaacgggcgctccccatgtatttggtactctttc

SEQ ID NO: 8463 - DNA, 120 bp, synthetic construct
  source 1..120: mol_type = other DNA
tatccttcatgataaaactagaactgcattctcagagaaaggtcccaacagaaacttggcttggaaggaattaagttaataaaccaaacttttagtggttggtatttaaaaggatgccac

SEQ ID NO: 8464 - DNA, 120 bp, synthetic construct
  source 1..120: mol_type = other DNA
atcccaccacccagagtgaaccactgtaaacattttcatctgtgtttttcctaacattaatgaacatatcttaacacataacacaatcatgtgttagttaattaaaaacaaaaggcctgc

SEQ ID NO: 8465 - DNA, 120 bp, synthetic construct
  source 1..120: mol_type = other DNA
tccacactttaagcaagccagttatttttttaattggatttccaactataaagttaaacaagacccccaccctttctcttcaagacttcaacatggaaaaacctttgaatgttgacacta

SEQ ID NO: 8466 - DNA, 120 bp, synthetic construct
  source 1..120: mol_type = other DNA
tttttaaatgaaatttcatcatagatagagaaacactgttgtgtaccatccttccttccccctaactgagaccagtttaaaaaaaataaattggctcacttctcaacttttctgtgagcc

SEQ ID NO: 8467 - DNA, 120 bp, synthetic construct
  source 1..120: mol_type = other DNA
aaaaaaaaaagggaggtgtgaaatgagatactcacgtaacttcagaaccttagggtgagaagattatggagacagtcatcctcatgaaattcatgactcccctatctaacatttcttaaa

SEQ ID NO: 8468 - DNA, 120 bp, synthetic construct
  source 1..120: mol_type = other DNA
caaagagtcaggtacaaaatgtgaaatgaatcttggaattcatccatccaccactgatagcatttatcactggtttaaactaggtatagcagaacaatggcaccctggtagatctgtctt

SEQ ID NO: 8469 - DNA, 120 bp, synthetic construct
  source 1..120: mol_type = other DNA
ttctcaatgctgaaactaccaagctaataaataagtaatgtgctttctgtaaaaagaaatcatgtattattaaatctctacctttgtaggggcaagaggaggtcagaaaaagaaaaggcc

SEQ ID NO: 8470 - DNA, 120 bp, synthetic construct
  source 1..120: mol_type = other DNA
atgggaggctttgtctggtccactaaggagtttgagcattatccgaaaacaggaggctaagaaagcgtttcaactaagaaagaaatctttctttgagatctatcttttgggattgtctca

SEQ ID NO: 8471 - DNA, 120 bp, synthetic construct
  source 1..120: mol_type = other DNA
agagaccatgaagctgtgtgatactcaggctgtggcactggcctaattaccttgttaattaattcagagcacattcctgagtccttgcaatggtcagtggtacaatattagaccctaaag

SEQ ID NO: 8472 - DNA, 120 bp, synthetic construct
  source 1..120: mol_type = other DNA
ataaaatgattagaaacatagaaaagatcaagagtatgcagtggcttccatgtgacatcagatcaggacaatcaggaggcttccatttggaaactcaagcctgacacaaaatagcatcca

SEQ ID NO: 8473 - DNA, 120 bp, synthetic construct
  source 1..120: mol_type = other DNA
aaagcattatcctaagtaaaagaatagaaacagaaagtccacttacttcttagcctgacatatcaagctgggaaggggcacatagtaaactgggaaacagaagagcaagaggaccaaaac

SEQ ID NO: 8474 - DNA, 120 bp, synthetic construct
  source 1..120: mol_type = other DNA
caatttttatcaagagcctactaagtgtcacacaccactcttgtagctaaggatacaacaaagtgtgggggatggtgggagcagtggcaaacaaaatgtctgccctcatggagtttaata

SEQ ID NO: 8475 - DNA, 120 bp, synthetic construct
  source 1..120: mol_type = other DNA
tgattactcagcagtgccatttctactttttgtttcatgtgttggtgacgttccataatgcacgaattaatgtaagttaggaagtgagccagctaatagggcatgatcgtcctttttgca

SEQ ID NO: 8476 - DNA, 120 bp, synthetic construct
  source 1..120: mol_type = other DNA
tgtctgtggtttgacgtatcctttgttaatgttccactcctaggcgtgtgctctccaaagcgcatcctataatttatttttaagtgaaaaatgtcagctgtagaaatgcatctccaagtc

SEQ ID NO: 8477 - DNA, 120 bp, synthetic construct
  source 1..120: mol_type = other DNA
atttctggaaatcttttgactgagacgtggacttctttcactaatctataaatcttatctcagtccacatcactctggaaaagaacactttatgtcccatcccttcacaaagtgaaaaag

SEQ ID NO: 8478 - DNA, 120 bp, synthetic construct
  source 1..120: mol_type = other DNA
atgaaacacgtggtagagcccctgccctttggagatcaagcaatcgatcaatcagtctctttctccacctctccttagaaactctacgttatatccctctgacataagctttttaggctt

SEQ ID NO: 8479 - DNA, 120 bp, synthetic construct
  source 1..120: mol_type = other DNA
tctcagactccttcaggaccagattgtcttctgattctatgcacagctcaatttcagctaagccaagtgttttcaccacataatatccacttacaattaaagacaagctctccttgacaa

SEQ ID NO: 8480 - DNA, 120 bp, synthetic construct
  source 1..120: mol_type = other DNA
atgcctgaaaactactcatttgttcatttttccagtcaacaaatacttgctgggctactgcgtgtcaggcattagacctaaaatgttgaacagaacagaaatagtctctcccgtgtggag

SEQ ID NO: 8481 - DNA, 120 bp, synthetic construct
  source 1..120: mol_type = other DNA
tgtgactccagaaggcgggatgcgtgtgtttcattcattattatacatctccagtcattagcatagtgcctgagaaatactcatgcatgatagataaactcacacctcctctcttcgtct

SEQ ID NO: 8482 - DNA, 120 bp, synthetic construct
  source 1..120: mol_type = other DNA
agtaacttgctcaaggccaccaatccagcaagtagcaagatttatcctcagagcgtgagttcgtgatcagttttctaggaatggctaggcaattagaaaaacacaactcctcctaattag

SEQ ID NO: 8483 - DNA, 120 bp, synthetic construct
  source 1..120: mol_type = other DNA
aatggttcatgaagagctaatgtatgtttataaaaacattttcaatttggataaaagttgcctccatcctgtaaggcttctctttcagcgtggttcagtgcctacaatggtaaaggtcaa

SEQ ID NO: 8484 - DNA, 120 bp, synthetic construct
  source 1..120: mol_type = other DNA
agtctgactgaaagactatacataaacctctattttagtagtcccaaaagcagattagccaattgtgtaattcccagatgatgggactcataaaccaaattgactttttaaagaaaatac

SEQ ID NO: 8485 - DNA, 120 bp, synthetic construct
  source 1..120: mol_type = other DNA
cccaaaggatgagtgtctcatgctgtgtttaaatttatggtcaaatgaatcctcttaggaacccaaaaggtgaatgattaaataatgaagatcttcctccaaaaacctctagacatttag

SEQ ID NO: 8486 - DNA, 120 bp, synthetic construct
  source 1..120: mol_type = other DNA
gtactaactcttccctttacctgtagtactttcctttatctcctctgcctagctaaatcctggccctgcttggttacttaactgtttccaatatagtatgcatgtctgtctttccaaaaa

SEQ ID NO: 8487 - DNA, 120 bp, synthetic construct
  source 1..120: mol_type = other DNA
taatttgcaaagtgggtgatgatgacctcttaaacctttatgcatatcaagagtattcaaatgtccaaagtagcaagtgatgggaagcgggttactctggagagagctgggctgttacta

SEQ ID NO: 8488 - DNA, 120 bp, synthetic construct
  source 1..120: mol_type = other DNA
tgcaattcctggaactattctaggaaaatctagtttattcagtgatccaccagctgccacaaatgttgcaataccactgtagacgcacagtaacatttagggcattgtgcccctgctatc

SEQ ID NO: 8489 - DNA, 120 bp, synthetic construct
  source 1..120: mol_type = other DNA
ccaggagaaaaaaagcacaggaaaatcagctcctgattccatgaagctctctaaacaggtcttgagataaggtaaagtttttactttctttttcgaagcaggtgtttccaaaatggacta

SEQ ID NO: 8490 - DNA, 120 bp, synthetic construct
  source 1..120: mol_type = other DNA
actaaatgacaatattcattccatatgtctacttccaggcatgttagttcagtcctttggagcacatttatatgtcctgtaaacacacaggaatctctctctttccaagagcagattcgt

SEQ ID NO: 8491 - DNA, 120 bp, synthetic construct
  source 1..120: mol_type = other DNA
tcagtacatgtcagctgttcttacgtccaatggccgctttatgattctcattctcagaccttcgatgagtctaacaattgccaagttatttcttgaactcctttttgtttgtttggttca

SEQ ID NO: 8492 - DNA, 120 bp, synthetic construct
  source 1..120: mol_type = other DNA
atgtgatacaaatcctgccagtatgacccccaaaggcgtatttcacactcatagtgggtctctgaggtagttattaatgtataaaagttccaaggtctcccagggacatagatctttatc

SEQ ID NO: 8493 - DNA, 120 bp, synthetic construct
  source 1..120: mol_type = other DNA
ttcttcaaagaggtaagcaggtgactttcataagagcagcaaacagtgaagactctacaaatggaaatagaattctggaatcaaaaagactcctctctcccatgtggtgtgggaaatgac

SEQ ID NO: 8494 - DNA, 120 bp, synthetic construct
  source 1..120: mol_type = other DNA
tgtaaagagaagcagtttaaggagggactcctaaaggatatcaacatgcaatgtaaaggtctattatgcattacacatcaataccatgcagtggtcccattaatagagatacaatgtaat

SEQ ID NO: 8495 - DNA, 120 bp, synthetic construct
  source 1..120: mol_type = other DNA
aaaattaaggataattctacacactctagcaggctgcgatgagtactgaataaaccatctacacaaagtagcttctcagcagacactcaatatatctatggtgagtgttgaatgctgagc

SEQ ID NO: 8496 - DNA, 120 bp, synthetic construct
  source 1..120: mol_type = other DNA
gaatgggaactgtgtgttagcaaagactcttttgcttatgatttacgtttaattgcaacagggctcccatgaggggaaatatcagcccctctgatgtcaccattacagaaatgtagcaag

SEQ ID NO: 8497 - DNA, 120 bp, synthetic construct
  source 1..120: mol_type = other DNA
cttctaaacagaaaagaaattttgagcttgcctaagccaaccctcccagattacagatgaggaagctgaagtttaggaaaagttttctaattctgccagtgttaattaagcacttgtgtg

SEQ ID NO: 8498 - DNA, 120 bp, synthetic construct
  source 1..120: mol_type = other DNA
atagtatgtataaaggcatcaaaacctggcccatgacatcctatctgaccttacttcctttcccctcactctcctctgcatttaagctctagcaacaccaaagcacttgctatgtcccac

SEQ ID NO: 8499 - DNA, 120 bp, synthetic construct
  source 1..120: mol_type = other DNA
gaaccttcaaactgaacaccatgtgataagtacttcggtagcagaatctagattaggaaatgagagggatgcagataccaccaatcaagataaaggacatgtttagagagaatgatgagg

SEQ ID NO: 8500 - DNA, 120 bp, synthetic construct
  source 1..120: mol_type = other DNA
ttatttgaagagaaaatcaaatagcttatcaggattcatctatttttacctgataatgacctaattgagaatgctaaacatattatttgtgtgtgtaaaatcatttaccggctaggcgca

SEQ ID NO: 8501 - DNA, 120 bp, synthetic construct
  source 1..120: mol_type = other DNA
agcaatgacaacagcgcaggcaagtgctctcatttctccagtgttcaggctatctctaggtcagtaatttaggaatgctaatagcactttcaaaatcctaggctatttcctagtccaaag

SEQ ID NO: 8502 - DNA, 120 bp, synthetic construct
  source 1..120: mol_type = other DNA
tgtaagtgctgtataaaactgtgctaaattaatttttatttacttaactcatgctgcctgatgatgacatcaaaagccatgcccaaagaccaaactgagacttagaagttgtccattgtg

SEQ ID NO: 8503 - DNA, 120 bp, synthetic construct
  source 1..120: mol_type = other DNA
tctttagtggggaataaagcattccgataaaggtgggagcagtcgctcaggatttctgtggggaagtgaaagaactagatacgtagtttcactgtacacgcaggaaatagtttacagaga

SEQ ID NO: 8504 - DNA, 120 bp, synthetic construct
  source 1..120: mol_type = other DNA
ttaaacagctagactaacttctggactctacacctgagacaagagtccacagggacaatcagagtcactgcaggataaaaacaattttcatttagagggataacagcaatggcatttccc

SEQ ID NO: 8505 - DNA, 120 bp, synthetic construct
  source 1..120: mol_type = other DNA
cgactggtcctgctgacactctcattgaattgaagtaaattaaatgagaaaatgtgatcaaactataaggggtttgaaaagtgtaaagggccccaaattgatatacaggtttgatgcaat

SEQ ID NO: 8506 - DNA, 120 bp, synthetic construct
  source 1..120: mol_type = other DNA
gcaataagcacataaaaagatgtttgacatcactatccaatagggaaatgcaaattgaaaccacagtaagagatgactacacagcaatcagaatagctaaaataaaaaataaagacaaca

SEQ ID NO: 8507 - DNA, 120 bp, synthetic construct
  source 1..120: mol_type = other DNA
ggagtgggttggtcatctcgggagttcagccccattttctgtctgtctctcatacttgctccccatgtgatgccttccaccatgggatggccctctatagacattggtgccatgctctgg

SEQ ID NO: 8508 - DNA, 120 bp, synthetic construct
  source 1..120: mol_type = other DNA
attaggattgctcaaaatccatctgtaccctcagagactgacatagcaaagaacagtcctaaagagggctggaattaaagtctagaaaaactactgttttgacgctgtctagccaatcat

SEQ ID NO: 8509 - DNA, 120 bp, synthetic construct
  source 1..120: mol_type = other DNA
cgtcacaccccacagttaacttggattctaccaggaccatggcttttccctctggtcttgttaacatcctgtctccacatctcatgatttctactcgatagagaagtcattatcagttca

SEQ ID NO: 8510 - DNA, 120 bp, synthetic construct
  source 1..120: mol_type = other DNA
aacaggtaatgagccttgacacagtgaagtctctacttgcagtaaacaaaagagaatgcacttattccacaatgtttttctttaaaactttgtcaaaataggacacacaataaggggggt

SEQ ID NO: 8511 - DNA, 120 bp, synthetic construct
  source 1..120: mol_type = other DNA
ataaaccagaggtctgttagcacatggatttggaacacgatttgttataggggaccaatcctcaaatgaggaaacctgggttctcaggtccctcacaaactttgctatcatgacttatat

SEQ ID NO: 8512 - DNA, 120 bp, synthetic construct
  source 1..120: mol_type = other DNA
ggcagactagcacttggtcactacttttcgtcatgacaggcatgatcttttcctcaagctcctgcacaatcttgcaagtgcaaacatgatatgcaaggctaaaagagtacacttgataga

SEQ ID NO: 8513 - DNA, 120 bp, synthetic construct
  source 1..120: mol_type = other DNA
agatagtctgtgtagccaggcacaacatatgtaaatgacacaacctcaagcaaagtatccccgtgactaaactttgacagggtttgaccaagttgatgtatttcccaaactggaaaggta

SEQ ID NO: 8514 - DNA, 120 bp, synthetic construct
  source 1..120: mol_type = other DNA
ttctacactttgaagccatatatatatatatattttcctacggcccatctcacctctataattttacatattctccctttcactaaaattacaggaacgcaaactctgacatgagtcaga

SEQ ID NO: 8515 - DNA, 120 bp, synthetic construct
  source 1..120: mol_type = other DNA
atgtagaccacgtgaaacagtacagagtcctcccacatttcctctgaactcactacttcaacatcatgcaggtttgggaaccaacataaggtctttgctatgtcctttaccccttttgtt

SEQ ID NO: 8516 - DNA, 120 bp, synthetic construct
  source 1..120: mol_type = other DNA
aaaagaaaatgtaaatgttgtaaaccttcacaagagtaaaagtaatgggacagatgacataactcgggaaacaatttgggaggaaaggtgtggcagtcaataaagcagctgatcctagaa

SEQ ID NO: 8517 - DNA, 120 bp, synthetic construct
  source 1..120: mol_type = other DNA
tgcttttggtcttgagaaactgcaaactattagaactcgttcaaacaagctgcatgacatttgttttacttatacacagaaaaaaaacagctctaattctggaaataaatgaatgtctta

SEQ ID NO: 8518 - DNA, 120 bp, synthetic construct
  source 1..120: mol_type = other DNA
cagaatgtccatcaatagaccaaggataaagcacagcataaactgttttgggggtttttttttgcttttttgttttttttgagatggagtctcgctctgtcgcccaggctggagtgcaac

SEQ ID NO: 8519 - DNA, 120 bp, synthetic construct
  source 1..120: mol_type = other DNA
tttaacctttaaggaaaaaaactatgatttagccccttaagtataaatctggaggggatcaaaaggtacatgccctcacacaacaaaggacacccaacttcccatgtaatgtgtcccatg

SEQ ID NO: 8520 - DNA, 120 bp, synthetic construct
  source 1..120: mol_type = other DNA
gagttgacactgcttgggacacgggcaattctggcttcctcctttgaggatgcaagccagccaaccactctaacttactttgtgcagtttgggatttttttttattttttagatgaaagt

SEQ ID NO: 8521 - DNA, 120 bp, synthetic construct
  source 1..120: mol_type = other DNA
cataaaaacattgctgagcaatcatttcaaataggaagcactatgggaattcttaggaagggagagtgagactatcatggctggaatgatccagctccagatattccttacagaagactg

SEQ ID NO: 8522 - DNA, 120 bp, synthetic construct
  source 1..120: mol_type = other DNA
ccacactgaggggagcatggcaagggacacagaagccaaatgaaggaagtgtaaatggccaaagctagaacccttttggagcaacaaaataacaaaagcagcattggattacaataccaa

SEQ ID NO: 8523 - DNA, 120 bp, synthetic construct
  source 1..120: mol_type = other DNA
gtgccactgcacttcagcctgggtgacagagcgagactctgtctcaaaaaaaaaaaaaagaaaaaaattggttcattaattacaaaaaatataccacgctagtatgagatgctaacaaca

SEQ ID NO: 8524 - DNA, 120 bp, synthetic construct
  source 1..120: mol_type = other DNA
tcccctacagcccaaagatggaccttcactctctataatgttaaacatctcattattaggttcagatatctaccaggtaggcctaatctacctgtcaactcttatctttacctatacctt

SEQ ID NO: 8525 - DNA, 120 bp, synthetic construct
  source 1..120: mol_type = other DNA
gagtaactcacagcacaagcagcacaaaggtgttgcatcaacagtttcattcactgtgtaccctcaacttttcatggagattttgtgttgatcaaaagcaatagcccaagaacttatggt

SEQ ID NO: 8526 - DNA, 120 bp, synthetic construct
  source 1..120: mol_type = other DNA
acttcaccagtgagctcagggtctatcaagagcttttctttgactgggatattcattccatttattcaagttgaagccacactgtacttttccaaagggtgaacgaaatcatagaaatga

SEQ ID NO: 8527 - DNA, 120 bp, synthetic construct
  source 1..120: mol_type = other DNA
tccacaggtccatgaatcagagacttaaaacctggagagttctcatcctcgatgcacctgatttattttaaaggccagaagatcccgccccattagcaactataacataaaatcagtatc

SEQ ID NO: 8528 - DNA, 120 bp, synthetic construct
  source 1..120: mol_type = other DNA
tagaaacatttatagctacaaaagcttcagagatcttgtagctcaaaccatatttcatagcagtcaacaggccatggatctttaaaacatttctctatctagccctcccatcaaaacagg

SEQ ID NO: 8529 - DNA, 120 bp, synthetic construct
  source 1..120: mol_type = other DNA
aacatgctcaacgtttgagggagtggatgtgtagagagcacaagaaagattcaacatgtggataattcaaaacctactcagagctggcattggaatgtgttagtacacacacttcaacat

SEQ ID NO: 8530 - DNA, 120 bp, synthetic construct
  source 1..120: mol_type = other DNA
gtagcagcacccactgacgaaaaagcagttccaaaagcctgtcatttcacccaggagttttctatcaagtaagaatacatgaggccttagagaatgacggacatgtttcactgacatgaa

SEQ ID NO: 8531 - DNA, 120 bp, synthetic construct
  source 1..120: mol_type = other DNA
aaaagttaattgagttgaatcaagcatctagctctaactagcaattcacaacaaatacaggggactgagaaacatggtaggaccataccactggaatgcagtcatcactggactgcaaga

SEQ ID NO: 8532 - DNA, 120 bp, synthetic construct
  source 1..120: mol_type = other DNA
ccacatctgtgttaaataaaattctttttaaaaaacacaaatttgcagcagcacctggcctagtccatcctgatatccacagtctcctacatgccatcatgccacacttttgttttctgt

SEQ ID NO: 8533 - DNA, 120 bp, synthetic construct
  source 1..120: mol_type = other DNA
tttataggctgtgaatgaatatgaagcaaccgcaacttcttagagtttactgccaatcagttaaccagagctggcatgtagggtgcagcgtataggaactctacgaaagctatgcctaaa

SEQ ID NO: 8534 - DNA, 120 bp, synthetic construct
  source 1..120: mol_type = other DNA
gcaatctggaaaagagggcttatctctttacctctgagattatgtgttgaaaggcagtgtggctaagaattgtaggtggtcatctgggctacccaattataaccaaatccttactccaac

SEQ ID NO: 8535 - DNA, 120 bp, synthetic construct
  source 1..120: mol_type = other DNA
tggagccagggtttgacccaaagcatgtctatttccacacttccaaacctccctgaaagtgtggccaaaggttattagtgatcattgaaaatgactccttggtcctttaaaatatggtcc

SEQ ID NO: 8536 - DNA, 120 bp, synthetic construct
  source 1..120: mol_type = other DNA
taaaactctgctacagtatcaccccttcagggctgaccgctgagagagtaatcacactgcctaagatcaaataaatgagagaaagaaaacacccatgcccacaggattgataaggtttgg

SEQ ID NO: 8537 - DNA, 120 bp, synthetic construct
  source 1..120: mol_type = other DNA
taacctgcttttccactgcattcctctaaatgttttcatacgaatcttttctggcatccaagtgtctttcttttatgtcctgactctcctccataagctctctgtcccctaaaagaggct

SEQ ID NO: 8538 - DNA, 120 bp, synthetic construct
  source 1..120: mol_type = other DNA
gctgtctggaatacatctccggctgggaatggtggagatagggatttttgctttctctcttccgctctgagggagctgaataaatagagtcagtgataacttcaaccaaaaaaaagtcac

SEQ ID NO: 8539 - DNA, 120 bp, synthetic construct
  source 1..120: mol_type = other DNA
ggaattccaggtcatgcgattccaggctaagtttgaagaaagtctggtagttcccacttttgtgctcttgagagatcctgaactgccatggaaaaagtctggctatgctgctctaaagac

SEQ ID NO: 8540 - DNA, 120 bp, synthetic construct
  source 1..120: mol_type = other DNA
tctacccagtggcaaagatctgatcatgttcctatcttagaatcctttactagctccccgtccttgcctttcacaacatcagtgacatttatatttccactagtccctctcctttcccta

SEQ ID NO: 8541 - DNA, 120 bp, synthetic construct
  source 1..120: mol_type = other DNA
cccagccctaatagactttcactgtaaagtcacttctgatcaatcccattcccacaatgatgcttcccttggcttgtaacagcatctgccatcaataaatgttgagtctttccacatagc

SEQ ID NO: 8542 - DNA, 120 bp, synthetic construct
  source 1..120: mol_type = other DNA
acgctgtccaaagtcccactggctctaacatcctatgattctttctgttttattaatgtctttgcagaaagtttcttgttggactaaataatactgtgtgattaaccatacttaggattt

SEQ ID NO: 8543 - DNA, 120 bp, synthetic construct
  source 1..120: mol_type = other DNA
actccatttccatcagctctcatctcatttcaccataggctgatgtatgttttaattaatttgtattaccaacttacacatttttataaacaacctctatgtcttcaatgttacaaaatg

SEQ ID NO: 8544 - DNA, 120 bp, synthetic construct
  source 1..120: mol_type = other DNA
attgctattcaagtacagttgagttttttttttttggactgtctcccacactttttgcctaatcaccatttagagtttagctgagaaaaattcccatgaattgaaagtcaaacaaatagc

SEQ ID NO: 8545 - DNA, 120 bp, synthetic construct
  source 1..120: mol_type = other DNA
caggtatgcagaagaaagttggtaatagcaaaagactcaatgtaatctaaagagccatcactagggaactgttccagtgacataatgaggttctatacaacaagaaaatggggtagggcg

SEQ ID NO: 8546 - DNA, 120 bp, synthetic construct
  source 1..120: mol_type = other DNA
tgagtaaaagtgtggcatcctgttaagcaacaaagtaaagcttagtttcttttttcacattcccaagggaacacactagttggtgacagcccagagaaatgagacaaatgtctgaccagg

SEQ ID NO: 8547 - DNA, 120 bp, synthetic construct
  source 1..120: mol_type = other DNA
actcaggaaaagagcatcagcgagaatggtaagaatttaatacaaaatctccctatatatactgtctgaatttatttaacaggctcctccaagaagataaaaggggtcactgacagtcca

SEQ ID NO: 8548 - DNA, 120 bp, synthetic construct
  source 1..120: mol_type = other DNA
ccggttcctttaccctttaagcgcgtcgtgtcctccaccgcctcttctcttggcccgactggctctggtttccttcacgttcccagcctccaaattggcgtccgccccatggctcgtgta

SEQ ID NO: 8549 - DNA, 120 bp, synthetic construct
  source 1..120: mol_type = other DNA
tcgggaccccggctgcacccactggagaagcggcggctccgactcccgaggaggcggcggcggctgctcccagtcgtggccgctacagccactgctcggctccgctcgcagctgtcccag

SEQ ID NO: 8550 - DNA, 120 bp, synthetic construct
  source 1..120: mol_type = other DNA
ccgcaagttccatccgcgccccaacttccgccaaatgaagctggagaacgtgtccgtggccctcgagttcctcgagcgcgagcacatcaagctcgtgtccataggtcagtgccgggggcg

SEQ ID NO: 8551 - DNA, 120 bp, synthetic construct
  source 1..120: mol_type = other DNA
cgccaagggtgggcttggagtggcaggaggctgtcctgccctcagagtcctgcagtcatccctgaggctgggggcctggggaagatccccccgcccacccctgtggagagctcttaagaa

SEQ ID NO: 8552 - DNA, 120 bp, synthetic construct
  source 1..120: mol_type = other DNA
gaggggaggggacaccggcagcgaccagctggggcgccccaccatgaggaggttcaaaggggctgcccacgaggcaggggcatcctgcttctgctagctcccctactccatttagtggtg

SEQ ID NO: 8553 - DNA, 120 bp, synthetic construct
  source 1..120: mol_type = other DNA
ttggagcctgtgtgtttgagagaaagcaccgggaggcagggagtgagtgtgtcatggaatctgaaagctgccaaaccattgtgctgcagtggagccaggggaagggggtgggctggggag

SEQ ID NO: 8554 - DNA, 120 bp, synthetic construct
  source 1..120: mol_type = other DNA
cccactatcagaaccccttggtttctaaagccctttctggcattcggggtagagtgtgagtggaaacttgtcctaccccactccaatttcagttcttaaaatattcattcaaccaatatt

SEQ ID NO: 8555 - DNA, 120 bp, synthetic construct
  source 1..120: mol_type = other DNA
atgcccatgtgggaggatgaagatgatgaggatgcccgcaaacagacgcccaagcagcggctgcttggctggatccagaacaaggtgccccagctgcccatcaccaacttcaaccgtgac

SEQ ID NO: 8556 - DNA, 120 bp, synthetic construct
  source 1..120: mol_type = other DNA
gtcattctctcctcacaggccctttaatgcctcagtttccccaagtgagcagttagaaggaatagggagtctcataccctaagactggtgtggaaagcgtttggagttctagagcttcgg

SEQ ID NO: 8557 - DNA, 120 bp, synthetic construct
  source 1..120: mol_type = other DNA
agggggcaggggcagaggttgggtctgtaagtttacctggccagggtgcagggggagactggggctgctgggaaaagagggcgccatgtgacatcactcctttccatcgcaggtcattgc

SEQ ID NO: 8558 - DNA, 120 bp, synthetic construct
  source 1..120: mol_type = other DNA
cctctgccccctctcaggactgctctcccctagaagctaacctttgacctctgacccctaggtgaccgtgctctttgctggccagaacattgaacgcagtccctttgaggtgaacgtggg

SEQ ID NO: 8559 - DNA, 120 bp, synthetic construct
  source 1..120: mol_type = other DNA
ctatggtcatggtagtcctggaatatgtgtcgtgtcctgtttcgtagcacctgtgggtcccatgccatttttctggattctgtggcaggctgagattcccattcctttgcctgtgttcca

SEQ ID NO: 8560 - DNA, 120 bp, synthetic construct
  source 1..120: mol_type = other DNA
cccagaatctcaggctcattgtctcctctctgcctcagtttcttggtctacaagccaggaatgattctctccaccctaagtgctatacggggtgttatgcacagggatgacaagtgttcc

SEQ ID NO: 8561 - DNA, 120 bp, synthetic construct
  source 1..120: mol_type = other DNA
aatgtgacgacaagggggatggctcctgcgatgtgcggtactggcccacggagcctggggagtacgctgtgcacgtcatctgtgacgatgaggacatccgagactcacccttcattgccc

SEQ ID NO: 8562 - DNA, 120 bp, synthetic construct
  source 1..120: mol_type = other DNA
cagtttctcagactggtgtccattgacccctagaggttaatgaacatattcttgaggatctaagagggtgattcttctttgaaaggctcatgattcagttttaggaacataaatttagcc

SEQ ID NO: 8563 - DNA, 120 bp, synthetic construct; identical to SEQ ID NO: 1504
  source 1..120: mol_type = other DNA

SEQ ID NO: 8564 - DNA, 120 bp, synthetic construct
  source 1..120: mol_type = other DNA
cagtgacagtgacttatggcggggaccctgtccccaagagcccctttgtggtgaatgtggcacccccgctggacctcagcaaaatcaaagttcagggccttaatagcagtaagtggggca

SEQ ID NO: 8565 - DNA, 120 bp, synthetic construct
  source 1..120: mol_type = other DNA
cggcaaggtcggtgaggcagccaccttcactgtggactgctcagaggcaggcgaggcggagctgaccattgagatcctgtcggatgccggggtcaaggccgaggtgctgatccacaacaa

SEQ ID NO: 8566 - DNA, 120 bp, synthetic construct
  source 1..120: mol_type = other DNA
aagacccaggcccacagcctggtgggtgactcaagtgaacagagaatgtcactacatggagaagggagtgaaggcagaggctggagctcacagaggtgcaggggagggtgtggggcccag

SEQ ID NO: 8567 - DNA, 120 bp, synthetic construct
  source 1..120: mol_type = other DNA
agattggcccctgtagctcgtttctcctcagctgggtccccagcggcctgccctctttcctccctgtccccccattcagctactccctcatcctcactcactggtcttatgaagctgatg

SEQ ID NO: 8568 - DNA, 120 bp, synthetic construct
  source 1..120: mol_type = other DNA
aatacatttcatttttgaaaacattttattttcacattttattaatttaggaaggccttctcttccaggcctgggacccacatgagtgaggtttgcccagcctcagtctgcagtcaagtt

SEQ ID NO: 8569 - DNA, 120 bp, synthetic construct
  source 1..120: mol_type = other DNA
gtcgagggagtcccagagtgcccccacccccagacatggaatgtcatcggcttctgggaactggtccctcctccctgccccacagtcctccctcctgcccatgtctatggggaggactct

SEQ ID NO: 8570 - DNA, 120 bp, synthetic construct
  source 1..120: mol_type = other DNA
cttccacgtgctggtaagttctgtagccacagcaagactagatggctggggaggggggcctggcccttttagcagcagcagggatcccagataactgtccccaaggaatcccacttctct

SEQ ID NO: 8571 - DNA, 120 bp, synthetic construct
  source 1..120: mol_type = other DNA
accctcttccaggcccagtcctgtgtcttaatgatgaaaacaaaggcccagagagaggaagtgagctctacccagggtcacacagcaagttgggcagagccagaactcaggtgcaagcca

SEQ ID NO: 8572 - DNA, 120 bp, synthetic construct
  source 1..120: mol_type = other DNA
ttctatgtggatgccatcaacagccgccatgtcagtgcctatgggccaggcctgagccatggcatggtcaacaagccagccaccttcactattgtcaccaaagatgctggagaaggtgag

SEQ ID NO: 8573 - DNA, 120 bp, synthetic construct
  source 1..120: mol_type = other DNA
gattacagccacacagcgaggaaggggtctgggcggtccagtctagtgttttgttatcacaacatcatgtgactcagggttaaaatgcaggaggtttcctttagggatttagcccacaag

SEQ ID NO: 8574 - DNA, 120 bp, synthetic construct
  source 1..120: mol_type = other DNA
gttctctcccttttaagagaaagctcagctgtcctgagtttctgtccctcccttgctcactggaatccaagaggcttaccttagggaattttccagaccgcctgtcccgtggtgcccccg

SEQ ID NO: 8575 - DNA, 120 bp, synthetic construct
  source 1..120: mol_type = other DNA
gctaggaggaatcccagtgttgccctgacatcccccaaaccctgcaggtgaggccagctctcaggacatgactgcacaggtgaccagcccatcgggcaaggtggaagccgcagagatcgt

SEQ ID NO: 8576 - DNA, 120 bp, synthetic construct
  source 1..120: mol_type = other DNA
gggtgggggtggagggtttctgctatctgagagatgggcaggagttgaggacagcaggtccatggggccagggatttagcagtgaccttggaagggccagttaggagtcccttctcataa

SEQ ID NO: 8577 - DNA, 120 bp, synthetic construct
  source 1..120: mol_type = other DNA
ggggcccttccttcctcagccaggacagggcacatcgtctgtcatctcccacacaccaagcacagctaggatagcaggtgcacacatagggttgcataccggaccctggctcctcctgct

SEQ ID NO: 8578 - DNA, 120 bp, synthetic construct
  source 1..120: mol_type = other DNA
tggccactagtctggtgctgctttgctccagaggtaggggccctgcttcctaagccaggagtccccacagaggctgtccagggagctggggcccagtccctcttgggccacaagcccttc

SEQ ID NO: 8579 - DNA, 120 bp, synthetic construct
  source 1..120: mol_type = other DNA
caggccttcgtgggccagaagaactccttcaccgtggactgcagcaaagcaggcaggtggcggggggagggcgtctcccggggtgtgagcaagaagccgtcagggagcagggtgtgggtc

SEQ ID NO: 8580 - DNA, 120 bp, synthetic construct
  source 1..120: mol_type = other DNA
ttttaaaatggttgcacggctctgccccatggggggccttttttacacactgcgaggcccagctttctaggggacttttgcacatgtcatgcagctcagctgggagctgcttaggtggaa

SEQ ID NO: 8581 - DNA, 120 bp, synthetic construct
  source 1..120: mol_type = other DNA
acccgcctctgcgcgcccccgggcacgaccccggagtctccgcgggcggccagggcgcgcgtgcgcggaggtgagccgggccggggctgcggggcttccctgagcgcgggccgggtcggt

SEQ ID NO: 8582 - DNA, 120 bp, synthetic construct
  source 1..120: mol_type = other DNA
gggccagctctgaaatctgaatgtctcaatcacaaagacccccttaggccaggccaggggtgactgtctctggtctttgtccctggttgctggcacatagcacccgaaacccttggaaac

SEQ ID NO: 8583 - DNA, 120 bp, synthetic construct
  source 1..120: mol_type = other DNA
taccagagaaggttgcacagtcctctgctccaaggagcttcactggccaggggctgctttctgaaatccttgcctgcctctgctccaaggcccgttcctcagagacgcagacccctctga

SEQ ID NO: 8584 - DNA, 120 bp, synthetic construct
  source 1..120: mol_type = other DNA
atctcaccacagcactctggcccaggcgacagctgtttggcctgtttcaagtgtctacctgccttgctggtcttcctggggacattctaagcgtgtttgatttgtaacattttagcagac

SEQ ID NO: 8585 - DNA, 120 bp, synthetic construct
  source 1..120: mol_type = other DNA
gctgttgctacatccctgcaaagcaggggctgcagggagcccagatggggcagccctggtgcttcttcccacccagctaccccagctacaagctggagaacctgagctcctctgaaatgg

SEQ ID NO: 8586 - DNA, 120 bp, synthetic construct
  source 1..120: mol_type = other DNA
ttactcacataggtctaaatcccatgtaaacacgtgttcaggactcaccaagcccctgcttgtcatttaactcaggaaaactctcaggaacgacagcacttggatttgccttaatcttaa

SEQ ID NO: 8587 - DNA, 120 bp, synthetic construct
  source 1..120: mol_type = other DNA
cgaaattagctgtgctgtgttaacagaggacgcgtcttcctgtggaccgggtttatctgcggctttcatttctcggaggtgctgtttgccttgcacttgacccccagcaaacctcagggg

SEQ ID NO: 8588 - DNA, 120 bp, synthetic construct
  source 1..120: mol_type = other DNA
ccgcatgaggggccctgggcacggtgctgggccttgtgttttctgggaaatgagtcctatgggctgatgcctctcccaactctggccttctgtgctcctaaggagggttctggggccctg

SEQ ID NO: 8589 - DNA, 120 bp, synthetic construct
  source 1..120: mol_type = other DNA
cgaggatgttttctgagggtctttgtgatatcgagggaatatcaagaagtttgcaggcttggccccagctgtccagggaggtcgggtttgagggtccccagaaatggccgggtgctactc

SEQ ID NO: 8590 - DNA, 120 bp, synthetic construct
  source 1..120: mol_type = other DNA
tcacatttttttaattataaaagaaaagtgattactgtagaacacttgggaaactctagaggtttaaagaaaaggtaaaggtaaagcttccattccggcgcgcccctcatcagccagctg

SEQ ID NO: 8591 - DNA, 120 bp, synthetic construct
  source 1..120: mol_type = other DNA
tgtggagaaagagctgctcattgacctccagggtgcaggtctctcagatttgcaaatgtgggcgtccactaagagtgaggctgcccctctgctcaggctgaggctcagtggggcttccat

SEQ ID NO: 8592 - DNA, 120 bp, synthetic construct
  source 1..120: mol_type = other DNA
gggtgaccagacatcgcctgaggggtggtggaggttggggcttctcgccaaactgtcttagcaggaatggcagaaactgggttttacaaggaagtacaaggatgggcctgggagaaggtt

SEQ ID NO: 8593 - DNA, 120 bp, synthetic construct
  source 1..120: mol_type = other DNA
gaaaagcggaggcccagaccacccggggcccgctggcggcccgagtgctctccccacccgctgcctgcaccccagcctgaagctggagcgctccttcccacttcatgcctggggcttgga

SEQ ID NO: 8594 - DNA, 120 bp, synthetic construct
  source 1..120: mol_type = other DNA
aaatcctgcagtttaacctgctgggggtgcctctggtcggggccgacgtctgcggcttcctgggcaacacctcagaggagctgtgtgtgcgctggacccagctgggggccttctacccct

SEQ ID NO: 8595 - DNA, 120 bp, synthetic construct
  source 1..120: mol_type = other DNA
acacgaggagttcctaacaacagccctgcacatcagtgtgttgagggaggattcccagagagtgaggtgattagttaactatttgcagaagtcaatttatttttcttgcataccatagaa

SEQ ID NO: 8596 - DNA, 120 bp, synthetic construct
  source 1..120: mol_type = other DNA
ttacaattaacatcttaattttagcctcgttggaactgatgccaacttgctttcaatagcataaaaaagctttgcttctatgtggtttccattgcctctcgttcctctgtgctgttacac

SEQ ID NO: 8597 - DNA, 120 bp, synthetic construct
  source 1..120: mol_type = other DNA
tttcttgtttctttgcgtgtctcatacatttttgtttcagactggacattttaaacgcagctgctgtggtcatcagattccccatccccctcaggtctcgttgctattgctgattgtttt

SEQ ID NO: 8598 - DNA, 120 bp, synthetic construct
  source 1..120: mol_type = other DNA
ctttttgtcagatgttaattcaagttgcctttggttgtgggactgggaggatcttttctctttgttgatactttttcgtactttccaaatacttgactgatgagcacatgctgccttggt

SEQ ID NO: 8599 - DNA, 120 bp, synthetic construct
  source 1..120: mol_type = other DNA
cccggccatgtgccaggcccccacccggctgctccgcacccatcagcctctccgctcctcacaccatccccatttcccagatgagcagactgaggcctgcttgcagaacctggccaagtc

SEQ ID NO: 8600 - DNA, 120 bp, synthetic construct
  source 1..120: mol_type = other DNA
ctccaccagggtggggatgatgacatcacgtgtccttccctttccagggccctggcctcacaaccacagagtcccgccagcagcccatggccctggctgtggccctgaccaagggtgggg

SEQ ID NO: 8601 - DNA, 120 bp, synthetic construct
  source 1..120: mol_type = other DNA
ttgatgggagagcagtttctcgtcagctggtgttagccgggcggagtgtgttagtctctccagagggaggctggttccccagggaagcagagcctgtgtgcgggcagcagctgtgtgcgg

SEQ ID NO: 8602 - DNA, 120 bp, synthetic construct
  source 1..120: mol_type = other DNA
aaatccataaccctatctaatgagaaaaataacaaatcccaagaggggcattttacaaaatacttgaccagtagtgcggaaattgtcaaggtcatcaaaaaagtctgagaaattgccaca

SEQ ID NO: 8603 - DNA, 120 bp, synthetic construct
  source 1..120: mol_type = other DNA
atgagttgcccatttgataggaagctctaggatgtttgatctgaatggggtttggattcaaacttgatgacaactgggtgacatgccatctttgctattaccacattttctctttatata

SEQ ID NO: 8604 - DNA, 120 bp, synthetic construct
  source 1..120: mol_type = other DNA
ggcatagagctcaggggtaatcctctaaaaatattagatctatagctaaagatatgtgaggtcttttgctacaaggaggaaaggaagaatgaggcagcttaacagcatggtgagtatttt

SEQ ID NO: 8605 - DNA, 120 bp, synthetic construct
  source 1..120: mol_type = other DNA
aaattatacatctttttttttttctttttttgagatggagtgttgctcgttacctaggctggagtgcaattggtacaacctcagctcactgcagcctctgcctcccaggttcaagtgatt

SEQ ID NO: 8606 - DNA, 120 bp, synthetic construct
  source 1..120: mol_type = other DNA
aggctggtcttgaaatcctaacctcaagtgatctgcctgcctcagcttccaaaagtgctgggattccaggcatgagccactgtgcctggcttttttttttttttttgagatggaatcttt

SEQ ID NO: 8607 - DNA, 120 bp, synthetic construct
  source 1..120: mol_type = other DNA
atttaggcccaagacaaagttggtattgggtatataaagccatcttaaaatatatactcttatttacctgtctaagctggtacccttgcttgcccaaggggtcctgattgatggcaatta

SEQ ID NO: 8608 - DNA, 120 bp, synthetic construct
  source 1..120: mol_type = other DNA
tagtaaaattaaaagctgcaaaattacataggactccatcaagtattaagaaaacttaaatcccaggcatatagtttgttaatggaataaaaagtttgtagaggctgggcacggtggctc

SEQ ID NO: 8609 - DNA, 120 bp, synthetic construct
  source 1..120: mol_type = other DNA
gcaagggctggatcagtgcagtttggtttcattccaagtgcaattggaagcgagttaagggttttaagcagggaactgatgatgacatttatattttttataactctgttaagtctcagg

SEQ ID NO: 8610 - DNA, 120 bp, synthetic construct
  source 1..120: mol_type = other DNA
ttctgaggaagtagtgcagagatggtgtgtatattgaggaaaggcaggaatgaagatgcttctttctctgtgaccgattgacaacctggactcccctaaatgatgttatagagagttaca

SEQ ID NO: 8611 - DNA, 120 bp, synthetic construct
  source 1..120: mol_type = other DNA
accaggtattgggggcttttccccacaaacccccaaaatcatccagatgagtttgttggaagacaaagaataaatcccccagttctgctgagctagttcaaactaggcatgtgagctata

SEQ ID NO: 8612 - DNA, 120 bp, synthetic construct
  source 1..120: mol_type = other DNA
aattctagtttatagtaccattgcaatagcttcctaaaggttatatggaaatacatgcacacatatgtcaagaaccaagttcctttttcctcctagagagttcagtggttttagcaaaag

SEQ ID NO: 8613 - DNA, 120 bp, synthetic construct; identical to SEQ ID NO: 1550
  source 1..120: mol_type = other DNA

SEQ ID NO: 8614 - DNA, 120 bp, synthetic construct
  source 1..120: mol_type = other DNA
acaggcgtgggccacctgcccagcttccaaaagggctttttaaggaacttggcacaacattacaaaaagttcacctaaaagattacatacatgtacattcattaaaagatgaaggctggg

SEQ ID NO: 8615 - DNA, 120 bp, synthetic construct
  source 1..120: mol_type = other DNA
ggactttctcagcatgaccccaaagtcagaaatcagaaaggaaaaactgatgtgtttgattacataaatatcaaaaccaacacataggaagaaccactgtatttgcaaggtatgatagac

SEQ ID NO: 8616 - DNA, 120 bp, synthetic construct
  source 1..120: mol_type = other DNA
tatggacacagaaatgtactgtgactgccaccttttaccaacatctatcagtgattcctaaccttttttaaatcacagagccctttgagaatttgaagaaaggtaaatatcctctctcca

SEQ ID NO: 8617 - DNA, 120 bp, synthetic construct
  source 1..120: mol_type = other DNA
tccagttccccaaacacacccaaacacatggaaaagcaaagggaagggagtacccaatatctgatacctgatgcaggaatctggctcttcctggcagtcaaggttgcacatgaagcgctc

SEQ ID NO: 8618 - DNA, 120 bp, synthetic construct; identical to SEQ ID NO: 1555
  source 1..120: mol_type = other DNA

SEQ ID NO: 8619 - DNA, 120 bp, synthetic construct
  source 1..120: mol_type = other DNA
taaaatttcatgttgagcagaaatattcattgtttacaagtgtaaatgagtcccagccatgtgttgcactgttcaagccccaagggagagagcagggaaacaagtctttaccctttgata

SEQ ID NO: 8620 - DNA, 120 bp, synthetic construct
  source 1..120: mol_type = other DNA
accccttctctacaaaaaatacaaaaattagctgggtgtggtggcatgcacctgtgatcctagctactcgggaggctgaggtggagggtattgcttgagcccaggaagttgaggctgcag

SEQ ID NO: 8621 - DNA, 120 bp, synthetic construct
  source 1..120: mol_type = other DNA
gaaagacaggactgcaactcacccttcacaaaatgaggaccagacacagctgatggtatgagttgatgcaggtgtgtggagcctcaacatcctgctcccctcctactacacatggttaag

SEQ ID NO: 8622 - DNA, 120 bp, synthetic construct
  source 1..120: mol_type = other DNA
ggaagggactttctcaatcctagagtctctaccttataattgagatgtatgagacagccacaagtcatgggtttaatttcttttctccatgcatatggctcaaagggaagtgtctatggc

SEQ ID NO: 8623 - DNA, 120 bp, synthetic construct
  source 1..120: mol_type = other DNA
ggtaaacagatcccctctcctcatccttcctctttcctgtcaagtgcctcctttggtgaaggtgacacatcatgtgacctcttcagtgaccactctacggtgtcgggccttgaactacta

SEQ ID NO: 8624 - DNA, 120 bp, synthetic construct
  source 1..120: mol_type = other DNA
ttgatagcaagtaaatgtagttaaagaagaccccatgaggtcctaaagcaggcaggaagcaaatgcttagggtgtcaaaggaaagaatgatcacattcagctggggatcaagatagcctt

SEQ ID NO: 8625 - DNA, 120 bp, synthetic construct
  source 1..120: mol_type = other DNA
cattttaacatctgagaaaagctttgaaccctgggacgtggctagtcataaccttaccagatttttacacatgtatctatgcattttctggacccgttcaacttttcctttgaatcctct

SEQ ID NO: 8626 - DNA, 120 bp, synthetic construct
  source 1..120: mol_type = other DNA
agtgaagtatagagtatctcatagtttgtcagtgatagaaacaggtttcaaactcagtcaatctgaccgtttgatacatctcagacaccactacattcagtagtttagatgcctagaata

SEQ ID NO: 8627 - DNA, 120 bp, synthetic construct
  source 1..120: mol_type = other DNA
atatatatccagatggcatgtgtttactttatgttactacatgcacttggctgcataaatgtggtacaagcattctgtcttgaagggcaggtgcttcaggataccatatacagctcagaa

SEQ ID NO: 8628 - DNA, 120 bp, synthetic construct
  source 1..120: mol_type = other DNA
ttgaaaaatcaaagacctgcattttaaattcttattcacctctggcaaaaccattcacaaaccatggtagtaaagagaagggtgacacctggtggccataggtaaatgtaccacggtggt

SEQ ID NO: 8629 - DNA, 120 bp, synthetic construct
  source 1..120: mol_type = other DNA
tatttctgagtaattgtttaaggtgtagaagagatagatatggtggatttggagttgatacttatatattttctatttcttggatggatgaatttgtacattaaaagttttccatggcag

SEQ ID NO: 8630 - DNA, 120 bp, synthetic construct
  source 1..120: mol_type = other DNA
tgagcctccagcccctgaactgctcctctgcagagtcccaaatcccatgagcccaggcctttagcccagtccttgggcaagggggacatttcccaggggggtccaagatgggagaaaaag

SEQ ID NO: 8631 - DNA, 120 bp, synthetic construct
  source 1..120: mol_type = other DNA
aacctactctgttcggtgctctcaattgctatgaccggggaccagaggcctgcagggggtggccagggagtcagagagagaccgagccccaaagatgctccaaaggggcccatctctttt

SEQ ID NO: 8632 - DNA, 120 bp, synthetic construct
  source 1..120: mol_type = other DNA
agtttccctccctggccaaggaataaagtccaaactccctgccttggtttcgttcccctccctccaccccaccaaattcctggatctcttcccaggtctttctcttcctctcggcctttg

SEQ ID NO: 8633 - DNA, 120 bp, synthetic construct
  source 1..120: mol_type = other DNA
tacaggcactcagagccactgccctcagccttcaaaccccaatcttgaagtattctgatcctgcccatcaggcagcatcagggcactgagactcaggaaaacagtagccacggcaggagg

SEQ ID NO: 8634 - DNA, 120 bp, synthetic construct
  source 1..120: mol_type = other DNA
atgatgatgacaatattattccacaaattcagcacttactgtgcaccaggcattgccctaagttcatcctccctatttgaagctcatttaattttcccagtagcagtgtgaggtaggggt

SEQ ID NO: 8635 - DNA, 120 bp, synthetic construct
  source 1..120: mol_type = other DNA
aacgttcgtatcagctcactttaacagtttgctttccattttcacattcaaaagcctgtcttcggtttctaagggttgcacatgtatttgtgcagggtggctggcctttgttttattttc

SEQ ID NO: 8636 - DNA, 120 bp, synthetic construct
  source 1..120: mol_type = other DNA
tcagttttctcctctgcaaaatgggcacaccgtctacttcctagggttataagatgtaagtggccagtcctcagcacggtgcctggctcacagtaaatcctcaagaaacatgagttctca

SEQ ID NO: 8637 - DNA, 120 bp, synthetic construct
  source 1..120: mol_type = other DNA
tatatagtatatattatgtaatttacaaagtacacaaggacaacagagaaaactgtccttctcactcccatccccagcaccccgttctcctctggaaggaaccagagtccccagttcctt

SEQ ID NO: 8638 - DNA, 120 bp, synthetic construct
  source 1..120: mol_type = other DNA
ccgagtagccgggattacaggcacctgccacaatatctgacttattttttatttttattatttttttcgtagagatggttttctccatgttggccaggctggtcttgaactcctaacctc

SEQ ID NO: 8639 - DNA, 120 bp, synthetic construct
  source 1..120: mol_type = other DNA
tcattttattccttgtccaaggtcacaggacaagcagagtcccacccacctgaaaggattcagttctaagacagcctttagggcaaaaagtcacaaagttgatctatctatctatctatc

SEQ ID NO: 8640 - DNA, 120 bp, synthetic construct
  source 1..120: mol_type = other DNA
catgaccatgtgtctgtgtccctgtgtcctggcataaatgaccatacctcaccgtccctgagtctatgtgtaggcccctgggctccataactgctttcatgcacagtccccaccctcagg

SEQ ID NO: 8641 - DNA, 120 bp, synthetic construct
  source 1..120: mol_type = other DNA
catggttaagtgggaaagtgggagaaaagctcattatgatccagcgagtcatgtattagaatgggacaacagcagccacaacaacaacaataatggccactatttatcatgcatttttgg

SEQ ID NO: 8642 - DNA, 120 bp, synthetic construct
  source 1..120: mol_type = other DNA
caacctggacaacatggcaaggttcctcctctaaaaaagaaagaaaggaaagatgataggaaagggaggaaagataggaaagggaggaaagataggaaagggaggaaaggtaggaaaggg

SEQ ID NO: 8643 - DNA, 120 bp, synthetic construct
  source 1..120: mol_type = other DNA
tagacaactctagtccttactctatagctacccctcatcccaattattggggtgttcacactctactgtgctgtaatacacacttggaaaaacagtacattttaatactattttaatttg

SEQ ID NO: 8644 - DNA, 120 bp, synthetic construct
  source 1..120: mol_type = other DNA
tataggcaaagatgggttctggaagccctgggctgccatcctaccagcttagcaaccttggaaggaaaagagctcttcttttcagctactttcagttgaatgactctttttatacttgat

SEQ ID NO: 8645 - DNA, 120 bp, synthetic construct
  source 1..120: mol_type = other DNA
gtgagatcatatcttgggttggtaggaaagcattcagggattgattagtgatgtttgccttgaacacaggttaagaaagtgatggcatgtgtgctgtgtgtttgtcatcagtagattaga

SEQ ID NO: 8646 - DNA, 120 bp, synthetic construct
  source 1..120: mol_type = other DNA
gtcccagtgacagcagtcacctaaacctctttgcacttcagtttggttccattccattcatgccactccttatcactctacttcactctgttcattcatccattccactctatctcattc

SEQ ID NO: 8647 - DNA, 120 bp, synthetic construct
  source 1..120: mol_type = other DNA
cctctccactacataccattttattctatctgtcccatccactcaactccattcactccacatgactccacatttcatccattccactctacttcatccactcactccactctataccat

SEQ ID NO: 8648 - DNA, 120 bp, synthetic construct
  source 1..120: mol_type = other DNA
tttgaagtgctgagggctgtggaggcaggggagggcagggaagtggggtgctgaggcaggacactgcttccctctccaggtgtgcgctatggacagcctgcgaccagtgagactgcagaa

SEQ ID NO: 8649 - DNA, 120 bp, synthetic construct
  source 1..120: mol_type = other DNA
aggagaggggagcagagaactgaccccatggcctttgcactgctgtggaaccccagggctccagggaaccgcagtttgacaacttttgaacaagtcaccgcctgcctctcccactagcct

SEQ ID NO: 8650 - DNA, 120 bp, synthetic construct
  source 1..120: mol_type = other DNA
aaagtaatttggtggatatgccagctatcacataacactcccagcagggtttgagacagccccctgtgatcaaagcactgctatttctgcagccaaagataggatttccacaaggcagtt

SEQ ID NO: 8651 - DNA, 120 bp, synthetic construct
  source 1..120: mol_type = other DNA
gagttggtttctggcctcctccaggctcccctgcatcaagcgcagctgagcagttccctgtaatggggagagggtctgtccctttatctggagcctccagttttgaaaatcagccctgga

SEQ ID NO: 8652 - DNA, 120 bp, synthetic construct
  source 1..120: mol_type = other DNA
tgaatttgttgccaacatttcaaaatcaggaattttcacatagaaatccagatttctggcatcttttggaaaattggaaaaattcatattcccatataacagtgcaccaggcctcactgc

SEQ ID NO: 8653 - DNA, 120 bp, synthetic construct
  source 1..120: mol_type = other DNA
gttatctgctgtgatccaggaggtgtggccctgcctccccatcctgagtacccctagggacaggcaggtggggtgggtgtgggtgcctggtgggtggctagcagccttgtttgcctctgc

SEQ ID NO: 8654 - DNA, 120 bp, synthetic construct
  source 1..120: mol_type = other DNA
tatttgttcccaagagcatcatgcctctgaggccagcctggcctcctgcctctactgggaaggctacttcggggctgggaagtcgtccttactcctgtgggagcctcgcaacccgtgcca

SEQ ID NO: 8655 - DNA, 120 bp, synthetic construct
  source 1..120: mol_type = other DNA
tcttcattaattattcatatgatccttaattattatccttaacaataagagcagtaaatagcagaaaagtccttgaggtgcctaaggcccagggccgggtgcctccgggcagttagacca

SEQ ID NO: 8656 - DNA, 120 bp, synthetic construct
  source 1..120: mol_type = other DNA
gttgacacagacaccgccatcctgcagaggccaggaacatgcaggtccacccaggagaggacaaggggcaactaaggcccatctctagcagagggggcaaagcaggcccaggaagtcctc

SEQ ID NO: 8657 - DNA, 120 bp, synthetic construct
  source 1..120: mol_type = other DNA
aggccctccgcgctagaggtgtggcagcccccagctgggctaggaatggaagaaggggatccagctgctgcacacacagacaggccctctccctctaccagacaacaccgccaggacctg

SEQ ID NO: 8658 - DNA, 120 bp, synthetic construct
  source 1..120: mol_type = other DNA
gcctcagccccatcgttggctccctggccctcctttgttctatgttctttcctcctcagtgctcacagagaccccagccctgtgaagtccaaaaagcctaggcttgccctggagggtgga

SEQ ID NO: 8659 - DNA, 120 bp, synthetic construct
  source 1..120: mol_type = other DNA
gggcagccaactcacatctcgcaggttgaaggtgatctccaggctggaccagaagtggtcggagaactcagggtacatgtccagcacctccagcaggtcgtcccgatggatcttgtgtag

SEQ ID NO: 8660 - DNA, 120 bp, synthetic construct
  source 1..120: mol_type = other DNA
ctccctttgctttggatgtgtcaaggggccaggcatgaggctgcagggaaccacatggcccttagtgaaaccaaatgccgagcttccaggctagcatttcttcctctactgcccaggcta

SEQ ID NO: 8661 - DNA, 120 bp, synthetic construct
  source 1..120: mol_type = other DNA
cccaccccaaaaggggagctctccagggaaggggttccaagggcttccatttcctcatgggcaaaaaggggcaacgtgcctccagggtccttactactgactgtgaccgcctgagacttg

SEQ ID NO: 8662 - DNA, 120 bp, synthetic construct
  source 1..120: mol_type = other DNA
atcagaggtcagatccccaaagacttcctagaccctcctcctaagaggtgaagcccacactgggcccagcacaggtgtctcattaatcttagtgctagctttgggacagaggcagccccc

SEQ ID NO: 8663 - DNA, 120 bp, synthetic construct
  source 1..120: mol_type = other DNA
gtggtgcggaagttgatgaggatgtccacaatgaacatgatgtccacgatgaggtccaccacagccagcggctggcaggcgtagccacactcggtagcaggcgggccttcttccgtctcc

SEQ ID NO: 8664 - DNA, 120 bp, synthetic construct
  source 1..120: mol_type = other DNA
ccaacttatacagagggacgtgcacacagggactgctcagcagtgacacacacagcccctgtaccagctcacactcacactctgcctcctccacagtcatcagacagaggcaggctggcc

SEQ ID NO: 8665 - DNA, 120 bp, synthetic construct
  source 1..120: mol_type = other DNA
cacacctgacaggggccagtcccagctctgcagccaccagctcacctatggccttgggccaggtctgtccccccagcctgttgtcctatagaatactgaagctggcttgcttaagccaaa

SEQ ID NO: 8666 - DNA, 120 bp, synthetic construct
  source 1..120: mol_type = other DNA
gcctttctgggccctgggccgcagagcccctgtcctgctcgccttcccggctggggccgccatggaggacttggctccctgcagcctgcctgccctggggcctgagggcccggccactgc

SEQ ID NO: 8667 - DNA, 120 bp, synthetic construct
  source 1..120: mol_type = other DNA
ggggtcttctctggcccaggattcagggacctgacccttccatatctttgtacccaccacctccctatgagaagaaaacttgcttctcccatgctttagggacatagttgggcccctcga

SEQ ID NO: 8668 - DNA, 120 bp, synthetic construct
  source 1..120: mol_type = other DNA
ggagtccatggggtcagctcaagagaccaggggagtcacaagaaacaagagaggtcagacccctgtcccactctaaggaagcagccaggagacagccctgagaccaggaagaggaagagg

SEQ ID NO: 8669 - DNA, 120 bp, synthetic construct
  source 1..120: mol_type = other DNA
ggtgccgcgggcgtcaggtccacgtccaccaccacggcccccggggcgcccgcgccgcccgcgccgcccgaccgcaccgacgactcccgggccgtcagcgccagcagcgcgggcagcttc

SEQ ID NO: 8670 - DNA, 120 bp, synthetic construct
  source 1..120: mol_type = other DNA
aaccaagccacatcctcagggtacagggttcacttcccacctccaaaggggggaccccccacccaaccattacatcctcccttcctgcagagcgttgaccttggacagctcacagcccca

SEQ ID NO: 8671 - DNA, 120 bp, synthetic construct
  source 1..120: mol_type = other DNA
aatgtatataattcttttctcatgagttataaagattaaccaagtcagcacatgctgagcgcttaggcaatgcctggcgtatgccgcacactacagacggttagctgttactatctgtct

SEQ ID NO: 8672 - DNA, 120 bp, synthetic construct
  source 1..120: mol_type = other DNA
ccagtgtctcccgtccccacgttagtgcctagcacctagagtcatacgccctggggccagcactggctggtggtgtcagtgacaggccatgctgacagggaggctgcaggcatgggggag

SEQ ID NO: 8673 - DNA, 120 bp, synthetic construct
  source 1..120: mol_type = other DNA
aagtcctccaccagggagcttgcctcagagaagtctagagtctggagccaagatggactcaaacttcagaatgggctggagactgtccccaacacagggccccagaaattccaaccttga

SEQ ID NO: 8674 - DNA, 120 bp, synthetic construct
  source 1..120: mol_type = other DNA
cgtcggctggggcttcggtgaactgccacatcacctgctcccagctcttcagccaggcctcccagccagactccatcccaccactggctgggttatggggggatgggagtcccttcactt

SEQ ID NO: 8675 - DNA, 120 bp, synthetic construct
  source 1..120: mol_type = other DNA
agcagagcgggagagccaggcctggacacattcccagagtggcaggtacagcgccatcctgctaccacagaaggtgtccatcacttctcagaacacaacgccggcttgctttcatttggt

SEQ ID NO: 8676 - DNA, 120 bp, synthetic construct
  source 1..120: mol_type = other DNA
agacagggagagagtgtgtgtgtgcgcgcgtgtgtgtgtgtgtgctgaatgagagagagaccagtcctaagctcctgcctccaggatctgggaaatgcagcaggttgaggggccccaagc

SEQ ID NO: 8677 - DNA, 120 bp, synthetic construct
  source 1..120: mol_type = other DNA
agcaaaattcaacctggtcatcagttttcatggaacacagaggctgagcacccaggaacccaagggaaggcggcaaaagcaggaactgcaccaggtgtgagacttctgagcctcagtccc

SEQ ID NO: 8678 - DNA, 120 bp, synthetic construct
  source 1..120: mol_type = other DNA
tccaatcaagaatctagtgggtgttttctttccaagaattcaataaactttctctaaagtttatgaagaaaaagggaggccaggcgcggtggctcatgtctgtaatccagcactttggga

SEQ ID NO: 8679 - DNA, 120 bp, synthetic construct
  source 1..120: mol_type = other DNA
aaactcgatccctacttgacaccacatacggggtagtctcaggatagattatagacctaactgagaacagcaaaacaattaagagaacagaagaaaatggagaccctctgcagcctgaga

SEQ ID NO: 8680 - DNA, 120 bp, synthetic construct
  source 1..120: mol_type = other DNA
cactgaatacgcacctacagactagatgtcgaacagcaacccagctggacttaaagcacattcccaagtaagaaaagcgaacaccaaaatacaacatatagcacaatatcatttacataa

SEQ ID NO: 8681 - DNA, 120 bp, synthetic construct
  source 1..120: mol_type = other DNA
tttgcaaactacaaagtgcagtcacaacaatagaagtgccttgtgctgctggtcaggtggcatcacccccacctcagctgtgctctctgtggcagctctaagactctgtccccccacccc

SEQ ID NO: 8682 - DNA, 120 bp, synthetic construct
  source 1..120: mol_type = other DNA
aaggccaccatcaaactctgctcccatctcagacagctcttcgcaaatatttacatagctcctctccgggggctgcagaagacgcaacacggagaagccgctctcccgacgctctccaga

SEQ ID NO: 8683 - DNA, 120 bp, synthetic construct
  source 1..120: mol_type = other DNA
agccaggccaggccagtcagaggtatgagcagccagacagagccttccagatagaggctccgaggggtgggggacaatgggagagagggagagaggcaaggagcaaggttccggggtgct

SEQ ID NO: 8684 - DNA, 120 bp, synthetic construct
  source 1..120: mol_type = other DNA
tgcatcaccccaggcctagaatgccaggatacatggggtcctaggtggctgagtgccaggccagcctgttggccaacaggagacacctgagccccgtggaaactaggtgagagtgaagaa

SEQ ID NO: 8685 - DNA, 120 bp, synthetic construct
  source 1..120: mol_type = other DNA
aaacttttacaataaaatttcacatgagataatgtacagcatacagatagacctgcaactacctggtgtcattttcaatatatgacagacagaacagagcgcacagggctccggtcagac

SEQ ID NO: 8686 - DNA, 120 bp, synthetic construct
  source 1..120: mol_type = other DNA
cgcacgtacctgccatcccagctcggtctaactctagtccaacttgctctacgtgcccacacctgcccagggaaaaaaaggaccagaggagccagacccacagcctagcaactcctttgc

SEQ ID NO: 8687 - DNA, 120 bp, synthetic construct
  source 1..120: mol_type = other DNA
aggccagagatggcggccaggattccctttgcatcggctctctggattctgcttttaatttccctgctctccagactggggggcgctccctgagccactccttatcctgaggctccctag

SEQ ID NO: 8688 - DNA, 120 bp, synthetic construct
  source 1..120: mol_type = other DNA
tgtcctctctcccaggctggggaaagaagagcaagtttcttcgaaggcatgccccaccccaccacacacccttcactgagatcctggaatacagggatgggacagaaagcctgcccctcc

SEQ ID NO: 8689 - DNA, 120 bp, synthetic construct
  source 1..120: mol_type = other DNA
ccacagagcccacaagctcgcagccttgtcaaagacacctccccaccgcccatacagggtctaactcacgggtgacacatgggctcagggttatatacacacggcacacacaagaagaga

SEQ ID NO: 8690 - DNA, 120 bp, synthetic construct
  source 1..120: mol_type = other DNA
ggtgggggtgggggcgggggcgcaggcgggggcgggggcgcggacaggccaagccagggggtgaggcggaggcagggccaggccggtccgtggggagagggcgggccaagccggtgggcg

SEQ ID NO: 8691 - DNA, 120 bp, synthetic construct
  source 1..120: mol_type = other DNA
cgtcccaccggctggaaatgcttcgtttaccacttcgccgtgtgagtatcgccaccggcgacggccggcacgaaggtgcttcctgagagctggtgtgggggagctctgtcccagcgccac

SEQ ID NO: 8692 - DNA, 120 bp, synthetic construct
  source 1..120: mol_type = other DNA
ccttccttgctaagaggtggccttccacatcaggaaggggaagtcttacccacctccctcctcaaagatgtggttggggggtgatcttggagacttttccccaccccagctcccaagccc

SEQ ID NO: 8693 - DNA, 120 bp, synthetic construct
  source 1..120: mol_type = other DNA
tagctggaggccacctgcagcctcacgaaatcaggtccagccttgcgccagtccagccttgtgttgctgtaagaagtcttggcaatggtggcggagacagggccctgtccttaggtggat

SEQ ID NO: 8694 - DNA, 120 bp, synthetic construct
  source 1..120: mol_type = other DNA
tcccctcacctacatcgcagacccggcccagtgtttctagatccgctcttgccaacatgtcgagtgcctaactgtggcttcgtactagttggggggaacacaggcatcccttacccctgg

SEQ ID NO: 8695 - DNA, 120 bp, synthetic construct
  source 1..120: mol_type = other DNA
agctgctgctatgagttctgccacgtgccatcctggcatgtggcacgtcttgcagaggacaggaagggtgaacagctccaaacccaccctatgtgtgctccagagctggaaacaggctgt

SEQ ID NO: 8696 - DNA, 120 bp, synthetic construct
  source 1..120: mol_type = other DNA
aaattatcgtggttgacaaagggaggcggctggtgtctctggtactggctgggtgaccacagggatgccgcgtgaccctagtccagggggccgcttttacacgaggcatctgaccatgtg

SEQ ID NO: 8697 - DNA, 120 bp, synthetic construct
  source 1..120: mol_type = other DNA
ggagaaccctgtcttagaggattgaggctcggggccatgggatcggcactgtcattgcccttggagggttctgagcactggaaggacctggctgtggtcccaggcactgggtggatggac

SEQ ID NO: 8698 - DNA, 120 bp, synthetic construct
  source 1..120: mol_type = other DNA
agctgttctcttgtgaagagtcacgtctgtgctcttggctaggatggctcaaatattataaaacatacagctttgctaattaaaacagcatgacattgccttataggcaggcagatcacc

SEQ ID NO: 8699 - DNA, 120 bp, synthetic construct
  source 1..120: mol_type = other DNA
attccatctcagggaaaaaaaaaaatcttaatgggaaacagccaattgccaggctgggggaagatgtgatgtttcacgaagggttaatctgtttactacagaaagagtttctgaaaacag

SEQ ID NO: 8700 - DNA, 120 bp, synthetic construct
  source 1..120: mol_type = other DNA
tttacctcaaaagggtggcggggggggaggtggcatatggaatcaagatgcctctgaatgtacctggttttatagatttcactttgaagccatgtaaatcaatagcttgcgtaattttta

SEQ ID NO: 8701 - DNA, 120 bp, synthetic construct
  source 1..120: mol_type = other DNA
gggttactgctgaagacaaatagagctgcatgcagtggccacataattgttgtgatactatttgttatattattctaagagtgctgcatgggaattgcaggttaaggtaagtaattgtgt

SEQ ID NO: 8702 - DNA, 120 bp, synthetic construct
  source 1..120: mol_type = other DNA
atcaagaatgcaattccatttataatagacacaaaaagaataaaatacccaggaatacatctaaccaaggaggtgaaagatctctacacaagagttacaaaacactgctgaaagaaatca

SEQ ID NO: 8703 - DNA, 120 bp, synthetic construct
  source 1..120: mol_type = other DNA
tatatagctaataagtcctcaaaagcaattgcaacaaaactaaaaattcacaagtgggacctaattaaagagctgctgcacagcaagagagactgccaagggaataaacagataacctac

SEQ ID NO: 8704 - DNA, 120 bp, synthetic construct
  source 1..120: mol_type = other DNA
aaagacatgagtcaactcaggtgcctgtcaatggtagatcgaataaagcaaatgtgatatatatacaccatggaatactatgcagacgtgaaaatcatgtcctttgcagcaacatggatg

SEQ ID NO: 8705 - DNA, 120 bp, synthetic construct
  source 1..120: mol_type = other DNA
ggaggtcaatagggagaccgctcatgatgttgaatcctggcaagcaaacggagagaatctgacatgtgtcccagtcgtgattaacctgtgaactgtaactcggggaaacccagtagctga

SEQ ID NO: 8706 - DNA, 120 bp, synthetic construct
  source 1..120: mol_type = other DNA
ctatccaccaattgtgacatatggccttagttaggtcctcaataaatgatgacaaatattggattaaattacttctggtttgctgcatgttccatttttgcccatgccgcacctgccatg

SEQ ID NO: 8707 - DNA, 120 bp, synthetic construct; identical to SEQ ID NO: 1640
  source 1..120: mol_type = other DNA

SEQ ID NO: 8708 - DNA, 120 bp, synthetic construct
  source 1..120: mol_type = other DNA
ctttgccccaggctggggcgtgactgcttctggttgagggttgctgcctgtgcaggtggccctcttgtcggtcttgtctgctgcatgggggtgtggcctcctgtggatggcccctgtcct

SEQ ID NO: 8709 - DNA, 120 bp, synthetic construct
  source 1..120: mol_type = other DNA
ccagcagctgtccagagatgagacccagccccactgtgtctttctgggattcacaagaatccttccctgggctgagggggcgttgctgtgggtgtatctcatggagagccccaaggagcc

SEQ ID NO: 8710 - DNA, 120 bp, synthetic construct
  source 1..120: mol_type = other DNA
ggtgccgggggcagggaaggcctggaggtttgaggagcagaaagtagacccttgaccctccctgggctggtgagtcggggcccagcccagagtgacagggaccaaacctgggtccatgtg

SEQ ID NO: 8711 - DNA, 120 bp, synthetic construct
  source 1..120: mol_type = other DNA
gttgggtctggtttgataaccgtggaccggggtgacaggccctgactctgcagagcaggactgtggaaaatggacactgatgctgcccggtggatccaggcagggccgggatgtttgcag

SEQ ID NO: 8712 - DNA, 120 bp, synthetic construct
  source 1..120: mol_type = other DNA
ctgtggggagctgcccagagatggaaggagctggagtccacagggcgcttctcttctcttttcctgtgtgttaaggtagttcaaagtcctcctgcccgaggaagtaagacagcaatctct

SEQ ID NO: 8713 - DNA, 120 bp, synthetic construct
  source 1..120: mol_type = other DNA
gcctgtgttccgggcaggctgggaacaatgaatggtacagatccacggctccccttgggccttggtgggctccagccatgcctcctggaaggccatttggagcctggctggcaggcagga

SEQ ID NO: 8714 - DNA, 120 bp, synthetic construct
  source 1..120: mol_type = other DNA
gagggagagggccttcctgtcctcatgagaacagggctgagctccatgttccttagcctcccttggcctcagtcatcctatctggaaacagggatcataatagttttagtttatagagag

SEQ ID NO: 8715 - DNA, 120 bp, synthetic construct
  source 1..120: mol_type = other DNA
gcagaggatatggtgtggccgggggctcagctgagaagccaccaggagacagatacagcctcaggaagtggttttgtatctctgctgagaaccacaatccgagtcacatgggaccattga

SEQ ID NO: 8716 - DNA, 120 bp, synthetic construct
  source 1..120: mol_type = other DNA
cccaaagtgctgggattacaggcatgcactttttttttctaagtagctttacggaggcgtgcttggcatacggtaaactgccccagtttaaagcagacagttccatgagtcctgacattt

SEQ ID NO: 8717 - DNA, 120 bp, synthetic construct
  source 1..120: mol_type = other DNA
cccggccgagatgttacatgtttctatattctggaccaagtcctctatcagatacctgctctgtgaagccttcccttatcccttgctagtccttcagttcttttaaacaatttttttttt

SEQ ID NO: 8718 - DNA, 120 bp, synthetic construct
  source 1..120: mol_type = other DNA
ccaaagaggtgcgtaggaggtttcattcatatttatatgttttcttgaaaaggggaggggcatcaagtgagacaaatgattatatacttgcgagactttagttagagcccagtaaatcta

SEQ ID NO: 8719 - DNA, 120 bp, synthetic construct
  source 1..120: mol_type = other DNA
ctgactcggctgcaatcatcctgcagccagactcggggacctaggactctgaacctccaactggtgtggcttcagggtccccaacttttcagaccccacctctgtgttgctctgcaagtg

SEQ ID NO: 8720 - DNA, 120 bp, synthetic construct
  source 1..120: mol_type = other DNA
gcacatgcgtataggtgtgtgtgttttatgtatgggtgtgtgtgcacctttgtgtgtatatgtgcatgtctatgtgtgcacatgtgtgtaggtgtgtgtgttcatgtatatatgggtgtg

SEQ ID NO: 8721 - DNA, 120 bp, synthetic construct
  source 1..120: mol_type = other DNA
agtggcacacagggtcccacccatctcaagtccatgggattaactcccctgtgctggaagctgcaggagctgctgcctgtggctgaggagaggccaggacgggccaaggagagcaggcaa

SEQ ID NO: 8722 - DNA, 120 bp, synthetic construct
  source 1..120: mol_type = other DNA
ctcctaccgctggcccagtggtctctccacacatcacccagtgtggagtggttttttgtctttctttcgaaacaggctttcctcactgagggctcaccatggggctgtgctggggacact

SEQ ID NO: 8723 - DNA, 120 bp, synthetic construct
  source 1..120: mol_type = other DNA
aaatacacgtaacgtaaaattgacctttttaacccatgtttcatggtcttcggtttactcgcagtgctaggcgtccgacacgtctttctaattcctgaacatttccatcatccgcaagag

SEQ ID NO: 8724 - DNA, 120 bp, synthetic construct
  source 1..120: mol_type = other DNA
ttttacagtgttcctggaacactcacaaacattgatcatatactagactgcaaaaacttcaagacattctaaaattaagaacctatgctggatatctctgatttcaacgtatgtttaaaa

SEQ ID NO: 8725 - DNA, 120 bp, synthetic construct
  source 1..120: mol_type = other DNA
gttgtgagatggcttattctttgggaaaaaatgttaagtcaaaattaggaagaagtggagacaatctcagtatgtgtgagatgaatctgaaccctcatcagaacgtccacagctgacggt

SEQ ID NO: 8726 - DNA, 120 bp, synthetic construct
  source 1..120: mol_type = other DNA
tgtctcccaccaccacttactagttacaaaggaaaaagaatcactttctagaggcaaagctggcgacaccacccgagccaagtgatccaagttaacatcaccaggaatgggacaggccag

SEQ ID NO: 8727 - DNA, 120 bp, synthetic construct
  source 1..120: mol_type = other DNA
cccatttgaaatgggagtaattggccaaaacgaaggggctaaaggccccatgcaagttcgaaatccagtggggcagttaaatcttaatgctccaaaatgatctccattgactccatgtct

SEQ ID NO: 8728 - DNA, 120 bp, synthetic construct
  source 1..120: mol_type = other DNA
tgggatgggaggggctgctcctaaggtctctgacatgccctggagacattttccccattgtcttagtgattaacatttggcttcttgttacttatgcaaatttctgcaggctgcttgact

SEQ ID NO: 8729 - DNA, 120 bp, synthetic construct
  source 1..120: mol_type = other DNA
gttgtttcccgattttgacaacagtaccacatggttacagaagagaacacccttattcctaagaaatccatgaggaggcgtttagcagaaaacaggcatggtgtctccaagggctcagaa

SEQ ID NO: 8730 - DNA, 120 bp, synthetic construct
  source 1..120: mol_type = other DNA
ccatcagccaggcgtccccaacccccaggccatgaagcactaccagtccatggcctgttaggaaccaggctgcacagcaggaggtgagtggcaggtgagcaagtgaagcttcatctgtat

SEQ ID NO: 8731 - DNA, 120 bp, synthetic construct
  source 1..120: mol_type = other DNA
cattgtgatgcaaatccttgtacactcatttttgcctggaactcaagattatttccttgggtcacatttgcaggagaagactgacaggatcaaagggttcctgcatttttatggctctga

SEQ ID NO: 8732 - DNA, 120 bp, synthetic construct
  source 1..120: mol_type = other DNA
tcagtctctctttgtctttcgtgaccttgatgttttagataagtactgggcggctgttttgtagaacgtccctcggtttggattctctgatatgctctcatgattagatcaagattgtgc

SEQ ID NO: 8733 - DNA, 120 bp, synthetic construct
  source 1..120: mol_type = other DNA
ttcagcttccatgcccctttggtgggccctgtcttttcttggacactgccttcctggcaccccaagatgctctgggctcagcttgtatttccttgcctcagtcttgaaatcacccacttc

SEQ ID NO: 8734 - DNA, 120 bp, synthetic construct
  source 1..120: mol_type = other DNA
tgacatgtttagatttatctgttaggttggtattccattttgggtgtcccccgattctgattgtttttagttacttatctgggggtctgtgtgaagggaatgtaaagctgctgtgactcc

SEQ ID NO: 8735 - DNA, 120 bp, synthetic construct
  source 1..120: mol_type = other DNA
tttccacagtagctaccacatcctcaccaacacttgtaatttctggggttttttaatagtagccattctagtgggtgtgcagtggtatctcattatagttttgatttacattttcttatg

SEQ ID NO: 8736 - DNA, 120 bp, synthetic construct
  source 1..120: mol_type = other DNA
ttgcatgtggatttccagttttcccagcaccatttgttgaaaagacagtccttttctcattgaatagtcttggaaccctagtcaaaaatcatttaaccatttatgccacggtttatttct

SEQ ID NO: 8737 - DNA, 120 bp, synthetic construct
  source 1..120: mol_type = other DNA
tgcatcagttttcataagggatattggtctgtagttttcttgtagtctttgtctggctttagtatcagagtaatgctctcctcatagaatgagttagaaacctttcccctcctctttaat

SEQ ID NO: 8738 - DNA, 120 bp, synthetic construct
  source 1..120: mol_type = other DNA
aatagaagcctccaattgtcctccccaacaggaacaccaaatttgagaactatctacacaaaaaagcaccttcataagaaccaaaattcagataagcaatcacagtatctgcttttaact

SEQ ID NO: 8739 - DNA, 120 bp, synthetic construct
  source 1..120: mol_type = other DNA
attctgggtatgactttgtcttgtgctactactgagtgccagcttagcctctgtagtataccacaccaggtaggtttctaaggtctttgactacagacccttgctcctggatggcatctc

SEQ ID NO: 8740 - DNA, 120 bp, synthetic construct
  source 1..120: mol_type = other DNA
agatcacaacacccaagtccctttgaatacctggaaagctttaccaagaaagatgggtacaaacaagcccagactgcaaaggctacaataaatacctaactctttaatgcctagacacca

SEQ ID NO: 8741 - DNA, 120 bp, synthetic construct
  source 1..120: mol_type = other DNA
actgataaataatgactacaacaacttttgcggtacaataggcagtacaataagatatagagacaaaaaaacttaaaaagcggagagacaaaagttgaagtgtagagattttttgtttta

SEQ ID NO: 8742 - DNA, 120 bp, synthetic construct
  source 1..120: mol_type = other DNA
gtattgcctgggtattcttctagggtttccgtggttttaggttttacatttaagtctttaatcatcttgagttaatttttatataagttgtaaggaaggggtccagtttctgttttctgc

SEQ ID NO: 8743 - DNA, 120 bp, synthetic construct
  source 1..120: mol_type = other DNA
agtgatttacatatgttgaatcagccttgcatcccagggatgaagcccacttgatcaccatggataagctttttgatgtgctgctggattcagtttgccagtattttattgaagattttt

SEQ ID NO: 8744 - DNA, 120 bp, synthetic construct
  source 1..120: mol_type = other DNA
ctattaggtccgcttggtccagagctgagttcaagtcctgaatatccttgttaattttctgtctcattgatctgtctaatattgacagtggagtgttaaagtctcgcactgttattgagt

SEQ ID NO: 8745 - DNA, 120 bp, synthetic construct
  source 1..120: mol_type = other DNA
ttttgcagtggctgatactgctttttcctttccatgtttagtgcttccttcaggagctcttgtaaggcaagcctcagcatttgcttgtttggaaaggattttatttatcctttactcatg

SEQ ID NO: 8746 - DNA, 120 bp, synthetic construct
  source 1..120: mol_type = other DNA
ttcagcatttttgtgctggtttttcctcatctttgtggatttatctgcctttgctctttgaggctgatgacctttggatggggtttttgtgtggggggtcccttttgttgatgttgattt

SEQ ID NO: 8747 - DNA, 120 bp, synthetic construct
  source 1..120: mol_type = other DNA
ctggggtacagaaaaaactcctgcagctagttcaatgtctgtccaaacagcaactcagttttgtgcttgaaacccagggccctggtggtataggcacatgaaggagtctcctgatctgca

SEQ ID NO: 8748 - DNA, 120 bp, synthetic construct
  source 1..120: mol_type = other DNA
agtccttacgtatcaataataatattaaatgtaaatgggctaaccttgccaatcaaaagacagagtggttgaatggacccctgcccccacaaaaaaagacccaattatctgttgcttaca

SEQ ID NO: 8749 - DNA, 120 bp, synthetic construct
  source 1..120: mol_type = other DNA
gtttgtgtcttttttacttccttgagcagtggtttgtagttctccttgaagatatgaacagacacttctcaaaaaaaagacatttatgcagccaaaaaacatatgaaaatgtgctcatca

SEQ ID NO: 8750 - DNA, 120 bp, synthetic construct
  source 1..120: mol_type = other DNA
agaacaagaaaagcaagagtaagtcaacctaaaattagtagaagaaataataaagcttagagcagaaatacatgaaattgaagtgaagaaaacaagacaaaagatcaacaaaataaaaag

SEQ ID NO: 8751 - DNA, 120 bp, synthetic construct
  source 1..120: mol_type = other DNA
gtaacatactgaatggggaaaaactgaaggcctttcctctaagacctggaacatgacaaagatgcccactttcatcactgttatttaacacagtagtggaaatcctagctagagcaatca

SEQ ID NO: 8752 - DNA, 120 bp, synthetic construct
  source 1..120: mol_type = other DNA
ttcaagaattaaatctaagacttcaaactatgaaactactaaaaagacattggagaaactctccaggacattggagtgggcaaagactgcttgagtaatccctacaagcacaggcaaccg

SEQ ID NO: 8753 - DNA, 120 bp, synthetic construct
  source 1..120: mol_type = other DNA
agtcccactctagttatatatccagaagaaagaaaatcagtccagcagagaaggatccgcactcctgtgtttattgcagcactattcacaatagccaagatttgggagcaaactgagtgt

SEQ ID NO: 8754 - DNA, 120 bp, synthetic construct
  source 1..120: mol_type = other DNA
ctaggtgttaagccctacatgcattaactatttattctgatgctctctctccctctgcccccctttttctttgattcattggttaagagtatgttgtttcatttccatacatttgttaat

SEQ ID NO: 8755 - DNA, 120 bp, synthetic construct
  source 1..120: mol_type = other DNA
ctacgtttactgcggcactgttcaccggagcctgtgccttcaatgtcgtattcaagaaatcatcctcaaatccaaagtctttctattttctcctatgtgttcctattgctttaggtctta

SEQ ID NO: 8756 - DNA, 120 bp, synthetic construct
  source 1..120: mol_type = other DNA
agcataccggttttttctacagttgcgccagcagcgtgctgtcacaccactttttgccaggtccatagctttgttttaatctgtatttctgtaattacattgaatttgaatgttttccct

SEQ ID NO: 8757 - DNA, 120 bp, synthetic construct
  source 1..120: mol_type = other DNA
gcaatggaggaagaacaaaggactctgtgttgagccctcctgagaggttttggaactggccttgacttggtgatgtggggttatgagttttattccacacacgtatgtgggagtctgggt

SEQ ID NO: 8758 - DNA, 120 bp, synthetic construct
  source 1..120: mol_type = other DNA
actaagctttttaggaagaaagccatcaattcccctgctctcatacaggcttgaggagggctaaggaaagtcacagttgaatgcatgctccctccacacccatgtgcctgatgcacacag

SEQ ID NO: 8759 - DNA, 120 bp, synthetic construct
  source 1..120: mol_type = other DNA
ctgtgctgtgtggggggtgtttggtgtcctaggaggagtctctgtcctgagcagagacagaggaaggcagggcagcctgctcagaggatgagcccagctattctgggaagcaggcaggaa

SEQ ID NO: 8760 - DNA, 120 bp, synthetic construct
  source 1..120: mol_type = other DNA
cttctgggcaatgtccgtgaaattgaagccgcactggtgttgttccacccttccttccagctggtctctgaggcccaggccagatgcttctctggttagcagcagattctaggccagagc

SEQ ID NO: 8761 - DNA, 120 bp, synthetic construct
  source 1..120: mol_type = other DNA
ggcgggactgaggataccgagacagaaataaaactgctaaatgcatctgttgttgaataattcaatgccccatgccaggcctgttgcaaaattagccacttcctccctccaggcccatga

SEQ ID NO: 8762 - DNA, 120 bp, synthetic construct
  source 1..120: mol_type = other DNA
gggccactgggattggcagaaaagggatgcccccgagatgggcagccaggagaactgtctgtctcctatcccaatatgcctacctccctctctgaatccccatttccccctcatccttgc

SEQ ID NO: 8763 - DNA, 120 bp, synthetic construct
  source 1..120: mol_type = other DNA
ctgagccctctttgctcttcttggctgttccctgatatggccacgcagagactatctctaagtgtcagttctggactcagctggaaaggtttcatgacctcaagggacccatgggacttg

SEQ ID NO: 8764 - DNA, 120 bp, synthetic construct
  source 1..120: mol_type = other DNA
agcagctccatttccagggacacccagtgttctctgtagtgggtaggaggtttccctatacaggagaccaagctacagcaagaaagacttggccgggcgaggtggctcatgggcgcggtg

SEQ ID NO: 8765 - DNA, 120 bp, synthetic construct
  source 1..120: mol_type = other DNA
tccccctctcaccctctccacctcccctttggagtcccagagtgacctttctccgtctttctgtccaagcatcccatctgtctagcttccactcatgagtgagaacgtgccgtgtttggt

SEQ ID NO: 8766 - DNA, 120 bp, synthetic construct
  source 1..120: mol_type = other DNA
ccgctgacccaccgggattcttgggggccaccatagagcctgtttttaaaggggatgtggcggccagctctgggggcacacgttcctgtttgaattctcaatctccgggctcaaaattgg

SEQ ID NO: 8767 - DNA, 120 bp, synthetic construct
  source 1..120: mol_type = other DNA
gacctccaggtgggaagctcctgggacaccctggagggctctggtgggagacatggcattctgtctgcaccgaagggggctcagggctgagaagccctgggacgggttggatttggggcg

SEQ ID NO: 8768 - DNA, 120 bp, synthetic construct
  source 1..120: mol_type = other DNA
accgagcttgagggtttaccctaacattcattcacaccatcagtcattcagcaaacacttcacaaacgtgcatcccacgcctggcactgggccttcggagggagggaatgcagctggtgg

SEQ ID NO: 8769 - DNA, 120 bp, synthetic construct
  source 1..120: mol_type = other DNA
tggacggggaggaccaggctgtgggtctgtgaagcgggtgtgggatcacatccacgctccttctgtggtttgtgccctgttgtggctgccaggggaggggcttccaaggccctgccaacc

SEQ ID NO: 8770 - DNA, 120 bp, synthetic construct
  source 1..120: mol_type = other DNA
agtgatcataagtaatgtattaaatacttacatagtacagcaggtgttggcccccccccacaacattggtttccatccctggaagctgcaaatgtgacctgacatagaaaacaccccttt

SEQ ID NO: 8771 - DNA, 120 bp, synthetic construct
  source 1..120: mol_type = other DNA
agcctggcgaggtcccgtccccagtaggggtctttgaacattgctcgatctcattcaccagccacggggaacattttgaaccctctgatgcttgctctatgaatgttgtttgctttaaaa

SEQ ID NO: 8772 - DNA, 120 bp, synthetic construct
  source 1..120: mol_type = other DNA
gttctaagggcaccccttgagctgcccacgtgtctttgcacgtgaagtaggtggctctctttaaggttcctcaactttattgggaaacatctcagggttacaaaacgccccccatgggct

SEQ ID NO: 8773 - DNA, 120 bp, synthetic construct
  source 1..120: mol_type = other DNA
gtgaggttcccagctccgcccgagacaagaatagataaagcggtaaataagataaaactctttttatctggagtagataaaagtaagctttgtcatataattccttctgaggctagcacg

SEQ ID NO: 8774 - DNA, 120 bp, synthetic construct
  source 1..120: mol_type = other DNA
caaacagcacgagaatcgaaaagccgtgatggcagatgcagaaggcagcgtcgcctgtggtcttttagaagggcagctgtgaagtggggttatctcagcttccacattgcatcacggtgc

SEQ ID NO: 8775 - DNA, 120 bp, synthetic construct
  source 1..120: mol_type = other DNA
ctgtgttactgtctgcaaagcactggctgggccagtggtcagtgagcaggggcgtgggtagcgggcagtggcctgcagtccccaggagcacttcctgttgctgaacagacagcaacttag

SEQ ID NO: 8776 - DNA, 120 bp, synthetic construct
  source 1..120: mol_type = other DNA
tgctgtgtgcaaggtgagccagtctgagcccattcccagtgcccggaatggtgcccagtgcagatgggcactcacccttccaaccaacctttgcttgtgtccccgtgagatccacagatt

SEQ ID NO: 8777 - DNA, 120 bp, synthetic construct
  source 1..120: mol_type = other DNA
ctggggccatcgtggtgtaaatactggggcacgacatggagggttcactgactggctgggtgtgtgggctgggggcgccgagggtggaggtgggcactgtggtcagggggagatgaggat

SEQ ID NO: 8778 - DNA, 120 bp, synthetic construct
  source 1..120: mol_type = other DNA
actcctggacagggggcgttgactgctctctggaagtgatttgtaaaatcagctttgtagagacgtaattacacactgcagttcatttgtggctctagggccctaagtggctctagaatg

SEQ ID NO: 8779 - DNA, 120 bp, synthetic construct
  source 1..120: mol_type = other DNA
actctcttctggatggtacgtagcatctgagggcatggctggatgtcatggctgccttggaagctggcatctccctggcgctgggccccataaggtggggggcagagccactcccagccc

SEQ ID NO: 8780 - DNA, 120 bp, synthetic construct
  source 1..120: mol_type = other DNA
ttctattctgtcccactggtctcctggacttttcctttaccagggccctactgacttggtggtcccggtactaaaatcaatttcatgatgtcactttgtgcctcggcagggctttctttt

SEQ ID NO: 8781 - DNA, 120 bp, synthetic construct
  source 1..120: mol_type = other DNA
actctcatgctttgttcagacttttgcactgccctgtgaagtggggtgtgtgtgtcatcttgtggtgccatcttggttggggtgaggccgtccttcccccacagggcgatgtccaatacc

SEQ ID NO: 8782 - DNA, 120 bp, synthetic construct
  source 1..120: mol_type = other DNA
agcgtgtacatgtgtgaatgtggccacatataggcacattgtagtgtgcgcctgtgagcatgtattgtatgtttatgcatggctgtgttgtgtgtatttatgtatagctatgtgtcgctg

SEQ ID NO: 8783 - DNA, 120 bp, synthetic construct
  source 1..120: mol_type = other DNA
tccagaagctccctgtgacgtttaggctacattccccaaggtggtgccacgttcaggcccatcacctgtaacactacccaccccacctcacccagcctgggctcactcactccaggccaa

SEQ ID NO: 8784 - DNA, 120 bp, synthetic construct
  source 1..120: mol_type = other DNA
gagggaggctgtgcagggttgcaggaaggacggttgggggcgcttcggggaggtacgagaagcaaaggtgtttgcagcccttggggccaggcggcgggaaggcctgtagacgccagaggg

SEQ ID NO: 8785 - DNA, 120 bp, synthetic construct
  source 1..120: mol_type = other DNA
atcacagcttttgtcaaactccacacaaagagagaggcactcaaaagcacaacacaaacacggctagtccgcgcctttggtggtgaacataccagggaattgtcctgcaatgcctgtggt

SEQ ID NO: 8786 - DNA, 120 bp, synthetic construct; identical to SEQ ID NO: 1715
  source 1..120: mol_type = other DNA

SEQ ID NO: 8787 - DNA, 120 bp, synthetic construct
  source 1..120: mol_type = other DNA
tgccctgtggggacaggagaagtgacttggccggctctccggagcccagtgttgatcactgaggaccaccggatacaagtccctcctgccttcccctttagtgacactgaagctgttgaa

SEQ ID NO: 8788 - DNA, 120 bp, synthetic construct
  source 1..120: mol_type = other DNA
cccaggctgggcttcaaaaccggacacagggcgtggctctccctcccagcctgccagagggaccgctgggcctatctccagccacgtgggtcgcgagagtcgacctgggctgcgtgatgg

SEQ ID NO: 8789 - DNA, 120 bp, synthetic construct
  source 1..120: mol_type = other DNA
ctgaccttccaggaaaggtttgccacgctatttatttagcaggataattttggaaagagcagttgctaggggcatttaaacttgcagtcgaattagtaacaattttattttttgggaaaa

SEQ ID NO: 8790 - DNA, 120 bp, synthetic construct
  source 1..120: mol_type = other DNA
ttgacagggtttggattggctgcgttcctgtctgaaggcagctgcttgggaggaggacagctgacattctttcatgcgaaatctgcttgcgggagagtcgtgaaagtgggaatcctgggc

SEQ ID NO: 8791 - DNA, 120 bp, synthetic construct
  source 1..120: mol_type = other DNA
tggggccctgtcggctggttccatcgtcttccctgttttcaagctacaggagcgcaatctttccagagcattgagtggctagaggaacgggcttacgctaggcaggcgctggcatcttag

SEQ ID NO: 8792 - DNA, 120 bp, synthetic construct
  source 1..120: mol_type = other DNA
tacattcagatgagttctaattatgttcttggcttcccaggtcacacagagtgaaaaccagaggccctggccgtgcaccattgaagtgtgtcatcatgtgactttgcaggttggggggac

SEQ ID NO: 8793 - DNA, 120 bp, synthetic construct
  source 1..120: mol_type = other DNA
tccatttgcacatttaatccagaaactgtcagcatgggaagcctggatgagaacaaaatgtcaagtgtgtgccgagaggcgcaggccagccccttttcctggcggggtgatgatctggtc

SEQ ID NO: 8794 - DNA, 120 bp, synthetic construct
  source 1..120: mol_type = other DNA
ctctgcacccctcctgtgaaaggccggcgcagagctgcaccgtggggtcccctggcttggggtgggcctcagaggctgtcgccgtgcctgctgtggctctccatggccctggagcctggg

SEQ ID NO: 8795 - DNA, 120 bp, synthetic construct
  source 1..120: mol_type = other DNA
tcctttctgcatgggtaaatacctaggtatagaatggctggataatgtggtgagtgtatatttttaactatttaagaaactggctaactcatcaacccttgacgtggtccgtcattttca

SEQ ID NO: 8796 - DNA, 120 bp, synthetic construct
  source 1..120: mol_type = other DNA
tgttgaaaagagtatcctttacccagtgaatcatcttgactccttttaagaggttcagtttatcataaaattgtctctttctggacactctactgtgatccgttgatctgtccttttgcc

SEQ ID NO: 8797 - DNA, 120 bp, synthetic construct
  source 1..120: mol_type = other DNA
gaagacacacatcattgttcaccgtcaagggtgatgttggctctgggtttccatagatgtctttaccaggttaaggaaacgtcccctctaatactatagctgagagcttttaatatgaat

SEQ ID NO: 8798 - DNA, 120 bp, synthetic construct
  source 1..120: mol_type = other DNA
tatagaatttgtagcaatgtctcttctctcattcctgatactagtaatttgtgcctctttctttgttagtgtaatcagtcagctaaagttttagcaaatttatggatctcaaagaatcag

SEQ ID NO: 8799 - DNA, 120 bp, synthetic construct
  source 1..120: mol_type = other DNA
tgttttgaagcttcgttcttgggtgcattagcatttaggattgttatgtcctcttgagaagtcaacacatttgtcattatgaaactgcctctttatccctggccactttctttgctctga

SEQ ID NO: 8800 - DNA, 120 bp, synthetic construct
  source 1..120: mol_type = other DNA
ccttaacttctacttagtgcctataccacaaacaataagctgactccatttccatcttttataagttcagacccccacaaccttgggtggactactgactacttcgcgggtaagaaatgg

SEQ ID NO: 8801 - DNA, 120 bp, synthetic construct
  source 1..120: mol_type = other DNA
ccaagcccttagtgaaaagtttcttaaggcggtttcataggtgcgtgtggggctgttggatacagtgacccacttcaaggtgacatcttcttcttgcatctcagatagcaccaggtttgt

SEQ ID NO: 8802 - DNA, 120 bp, synthetic construct
  source 1..120: mol_type = other DNA
ggggaaggaagacatgtgggccagggtgcggggtgcgggacaaacctgggtccaggcacctggggcgaccctccttggccgtccttgccatcctcgccatcctctctccacacatctgac

SEQ ID NO: 8803 - DNA, 120 bp, synthetic construct
  source 1..120: mol_type = other DNA
tttctgatcacggggtgagagggtctttgcagttgcagagccgtggcgcggcgcctggatttccgacacactgcagcatctgcatccttgccgtcacccctcacaccccctgctagggtc

SEQ ID NO: 8804 - DNA, 120 bp, synthetic construct
  source 1..120: mol_type = other DNA
ttgaggcccatccgtgtcatggtctctgcattcagcagtttgtctccttttatttggaaaggataaaatgtaccacagtttgtttatccattcacaggctgatggacatttgagctgtct

SEQ ID NO: 8805 - DNA, 120 bp, synthetic construct
  source 1..120: mol_type = other DNA
gcacctttgatgaaaatcagttggccgtgtgtgtgggttcgatttctggactttgtcatctgttctgccaggaaagcactgtcttgattactgtgacttttacgctaagccttgaaatca

SEQ ID NO: 8806 - DNA, 120 bp, synthetic construct
  source 1..120: mol_type = other DNA
gggctgctatccttatcttactcctaaggtgaagtgaggtaatctttcaccattaggtgtggtgggagctgtagggttttagtagaagccacttatcaggccaagaagttcctcctcttc

SEQ ID NO: 8807 - DNA, 120 bp, synthetic construct
  source 1..120: mol_type = other DNA
ctttgtggagaagtttgccattggaaagtcagcagatacagggctatgcaggttgtctatttcttcttgatgaggttttgattgttcatgtctttgaaagtatttgtccccaaggagcag

SEQ ID NO: 8808 - DNA, 120 bp, synthetic construct
  source 1..120: mol_type = other DNA
ccaagtcaaaagaagggtgctcagcccctggtctctttggtttgccaaacttctagtgctggtgaaattcttaaatatgacatttttagaagcttcggctcctggcagataaaaataatg

SEQ ID NO: 8809 - DNA, 120 bp, synthetic construct
  source 1..120: mol_type = other DNA
agggaccccgcctggggagagagaagcttcaggccctgaggcctatggcctggacctctctagagaccctagaacagacctctggcctggccttgctgatgacctggagcccctgggtgc

SEQ ID NO: 8810 - DNA, 120 bp, synthetic construct
  source 1..120: mol_type = other DNA
caaagcaataatgggtggttgaaaaataaaggaatggccaaagagaggccaagaaactgcaagctaaaagaagaaaaggagagaaaaaacagggagatcaggatgaatatcaacactgaa

SEQ ID NO: 8811 - DNA, 120 bp, synthetic construct
  source 1..120: mol_type = other DNA
ggaggactggcaaagaacttcataggactgtgctttaaaaccagcactatcacttcgaaccctagtaatggagttgttttgttcccttatgtctgcggaacacttacaaaaccaatcatt

SEQ ID NO: 8812 - DNA, 120 bp, synthetic construct
  source 1..120: mol_type = other DNA
gggccagctgccttgagcacctcctgctcagacccaggtgaggtacctgagtgacaaatgtcaagagtttgcagttactcccagagctacggacaaggggcaaggtggggctggaggcac

SEQ ID NO: 8813 - DNA, 120 bp, synthetic construct
  source 1..120: mol_type = other DNA
aagcggcctcgtgcctcccagagtcaccccgaaatcattaacggggagacaagcacacagagcagctggccgattgcagctctgaaggtcagagatggccgccagctgtgggaaggcctg

SEQ ID NO: 8814 - DNA, 120 bp, synthetic construct
  source 1..120: mol_type = other DNA
ccttccacaccccaagtacagcacccacaaggcaggtgcctgggagggagacacacctgtcccctgcctgaagtttctcagcaggattttgggcacaaggtgggtagtgagctggtctca

SEQ ID NO: 8815 - DNA, 120 bp, synthetic construct
  source 1..120: mol_type = other DNA
gtcccccgcctgggatgccaccagtgtcctcacaccagcctgctcctgccctgtgcccatcctcctcctgcttagcgatcctttctcttgctaatgtgtgggacaaggggctctcagggg

SEQ ID NO: 8816 - DNA, 120 bp, synthetic construct
  source 1..120: mol_type = other DNA
gaccctggccccttccacaaagctcagctctgatccttcgtatttaatcttcatcttccgccgtctttaaaattaattttcctttaaagatactgtagagcagtaacatcagagacacca

SEQ ID NO: 8817 - DNA, 120 bp, synthetic construct
  source 1..120: mol_type = other DNA
gagggtcccagggtctgtctgcctaatgacaagatttcagtaccaatagcgaagccgtcagtggcagtgactgtgccttagggtgtcccgttggcatccagggccccccgtgaaggatgg

SEQ ID NO: 8818 - DNA, 120 bp, synthetic construct
  source 1..120: mol_type = other DNA
ggcagaggttgcagtgagctgagatggtgccactgcactcctgcctgggcaacagagcaagactctatctcaaaataaaataaaatggaaatatgttttaccatcttaaccctttttaag

SEQ ID NO: 8819 - DNA, 120 bp, synthetic construct
  source 1..120: mol_type = other DNA
gttttttaaataattttaaagcacacaaataagacacctgagagccaacttataacacgccccaggatggacatggattcacactcatggtagaacagagctgagggtgcagtgtgggat

SEQ ID NO: 8820 - DNA, 120 bp, synthetic construct
  source 1..120: mol_type = other DNA
tgacctagttgagcctggctttcctcctctgtaaaatgtgaacagaggccaccacccccattatgtgggtctgtgtttgctctgtgcacgtctcggtgcccagatctgaggcccttttgt

SEQ ID NO: 8821 - DNA, 120 bp, synthetic construct
  source 1..120: mol_type = other DNA
cagcaccagcctaattaacctgacaagcggggcctccccagccatgcagccttgcactgccttcccacatccagctggatttggggatcagtgttgtttttaatcattcctaccaccttg

SEQ ID NO: 8822 - DNA, 120 bp, synthetic construct
  source 1..120: mol_type = other DNA
agaagcaaagaccgacgagacagagctcctgctaccagagagccctaggccggctcattggaatagtcatttatttgttccttcattcgttcattcagcatgtccatgttgagcactgac

SEQ ID NO: 8823 - DNA, 120 bp, synthetic construct
  source 1..120: mol_type = other DNA
tttttgcaaaaggaaagcaactaagctcccagcgtgtctccccttatccattgggcttgtcccaaacacatgccggatggtgtaagtatcattccatcctaattaataacatttgggagc

SEQ ID NO: 8824 - DNA, 120 bp, synthetic construct
  source 1..120: mol_type = other DNA
gcagcaggccaggacccgggcctgctgttctcagggtgtccttcagcggaggctccagcatggctgggttcaaacaggttgcagggtctgaagccactcaaggccgagcctgcctgcagt

SEQ ID NO: 8825 - DNA, 120 bp, synthetic construct
  source 1..120: mol_type = other DNA
atcagggcgtgacccgtctgaccagcaagccccttccccagacgagagcagggtgtatgctcttccctggggccctggctgtggcgatcacgaaaagctccccctctcctgcactccaca

SEQ ID NO: 8826 - DNA, 120 bp, synthetic construct
  source 1..120: mol_type = other DNA
ggcaaatcaaggacccggtcaaggcagggccaccagactccctcccgagggctgcactcagatgggttcaggctgcactggcccctggctctgtggggtgaggggacccttcctctccct

SEQ ID NO: 8827 - DNA, 120 bp, synthetic construct
  source 1..120: mol_type = other DNA
aaacctgtgcttggagccgctggcacaggtccccacgctcagtgttgagtcctttggcatcaccatcttgaagttctgaatggtctcatccttgaacttgagatttgagagggaaatcgg

SEQ ID NO: 8828 - DNA, 120 bp, synthetic construct
  source 1..120: mol_type = other DNA
cgtttatatatgcatggagctcaagggctgcttctagggggaacacgtgggtaccccgaggggagtagctggctggaggccagagtgcagggagggaatgactccatcccatctcccccc

SEQ ID NO: 8829 - DNA, 120 bp, synthetic construct
  source 1..120: mol_type = other DNA
ggaggctggtggcaaggtgggcagtgaggagctggcggtgcagcaaaagccagtgggtactggccccggcacggctgataagcagtgcccagccttcgctgctgccctgcctgccttccc

SEQ ID NO: 8830 - DNA, 120 bp, synthetic construct
  source 1..120: mol_type = other DNA
cattctgtgggtccaggtgaatatgaattaggggggatgcagtccagcctaggacagtgggtggcccaggtggacttcctgggaaggtccctccccttgccggccaccagtttccacagc

SEQ ID NO: 8831 - DNA, 120 bp, synthetic construct
  source 1..120: mol_type = other DNA
ccgatccctctgctgcggagactttccctggaccgaaagggcctcctggtgaggctgggtctccgtttgtggactcactgttgaggcgtgtggtttgcggtcctgctgtgtgccaggcac

SEQ ID NO: 8832 - DNA, 120 bp, synthetic construct
  source 1..120: mol_type = other DNA
gctagcagaggcccagaaggctctagacaggctctagactgggtctctaagtctgcaaggggcaccaaagcactttacaaattccaggagtgagtgacaggctggccacgtgccaagccc

SEQ ID NO: 8833 - DNA, 120 bp, synthetic construct
  source 1..120: mol_type = other DNA
cctcctcccgctcttgaccaccccttcctctggacagacgaccaccacatctccagccaggaccaccccttccttctgggcaaatgactaccacgtttccagccggggccagtgagctct

SEQ ID NO: 8834 - DNA, 120 bp, synthetic construct
  source 1..120: mol_type = other DNA
accccaactccactctgacttccaggccagccccactccattccaccttcatcatgcagtttctgtattagatttttaaataatcaaaatatggtattttcatttaaaaagtaatgcttt

SEQ ID NO: 8835 - DNA, 120 bp, synthetic construct
  source 1..120: mol_type = other DNA
atccccacgcctgtcccggaactgtctgtgaagagcaacgtcccactgcttacgcttgggtgggagcaggagtgcctgttagtgccccccagccacagagagtgctgccgtccctgagcc

SEQ ID NO: 8836 - DNA, 120 bp, synthetic construct
  source 1..120: mol_type = other DNA
tgtgtgcacaagcacagacacgtgcacgtgtggagcatcccatctctgcatggggcacgcttgtgagtgtgcacccacatacacagagccgggtggtccactgaaagggcctggcagtaa

SEQ ID NO: 8837 - DNA, 120 bp, synthetic construct
  source 1..120: mol_type = other DNA
aatccagtgggggtctccatgtggttcccagctggggcattcctgggcctgcaagcggtggccgtcacttgaccttgaccagaagccccaagccggtaaatgctgtgctgtcctgagtgt

SEQ ID NO: 8838 - DNA, 120 bp, synthetic construct
  source 1..120: mol_type = other DNA
ccgtggctgaccactgtccctctccctgcaggtcacagtcaccaccatcggctatggggacaaggtgccccagacgtgggtcgggaagaccatcgcctcctgcttctctgtctttgccat

SEQ ID NO: 8839 - DNA, 120 bp, synthetic construct
  source 1..120: mol_type = other DNA
gtgcacatgacatgtagacatgtgttagtatgtgcttgtgttagtgtttgtgtgttagtgtgggttagtgtatgttttagtgtatgttagtgtgtttgtgtgttagtgtgtgggtttgtg

SEQ ID NO: 8840 - DNA, 120 bp, synthetic construct
  source 1..120: mol_type = other DNA
tgcatcagcttggctggcctgtggggcatactctgcttgtggaagccttggctgctgtggtgatggggtgagcacggggcattggagcctgtcttcctccaaagctgctcccatcaaggg

SEQ ID NO: 8841 - DNA, 120 bp, synthetic construct
  source 1..120: mol_type = other DNA
ttttatggcttcacagtttctccttcctgggagaccataaatcaggcccgtaaacccgccttggtcccagcatgagcatgctggccgcccacgcctggcaggggaccacattggattcct

SEQ ID NO: 8842 - DNA, 120 bp, synthetic construct
  source 1..120: mol_type = other DNA
gtgcgacctgcccacctttgcaagtctctcctttggctcaaggctggctcagggctggtaaagacctctgtggtgtcccagctgtgggtaacaattagcccatgaggcagtgagctgcct

SEQ ID NO: 8843 - DNA, 120 bp, synthetic construct
  source 1..120: mol_type = other DNA
tggttccccttcctggcccgtgcccaccccctgtggagagacctggccttcccagtttccagctgccggtggagcctccgtgcctactgttccctgtgctggaatgttcccccagatttc

SEQ ID NO: 8844 - DNA, 120 bp, synthetic construct
  source 1..120: mol_type = other DNA
aagccagtgagtttctcccttgggctgtggtctctgacaacgaggtatgaacagacagagggtggagcttctagaaacttctgtaaaccttccaggtgccttcccctcagagtcttccca

SEQ ID NO: 8845 - DNA, 120 bp, synthetic construct
  source 1..120: mol_type = other DNA
tcagtgcccacttctggggactgtgatcccaaactgccaaattctctagcagctctcttaaaaccaaatgtgaaggattctggctttttctgtcctctgagcccagcgtggggtatttga

SEQ ID NO: 8846 - DNA, 120 bp, synthetic construct
  source 1..120: mol_type = other DNA
tcagccatccaagtaatatgatccattcccttctcagcagccgtccctttaccctttggtcatttctgcatccatctctccctctcggacctcttcccagtgcctgggactaacccgaat

SEQ ID NO: 8847 - DNA, 120 bp, synthetic construct
  source 1..120: mol_type = other DNA
attagtgctgtctgcggaatgttaatgaggggcaagtgcggagaaagtcaggcgccttttgtggaatgctcctccacggagaagatttctctttcctgctggagtttgttctttcctaac

SEQ ID NO: 8848 - DNA, 120 bp, synthetic construct
  source 1..120: mol_type = other DNA
tccacatctgcaggtcagaagaggcctgggctggagccgcatactggccatgctgcctcgctgtccctgcctcagagccactgtattcactctgcctggaactgtctttcctggatccca

SEQ ID NO: 8849 - DNA, 120 bp, synthetic construct
  source 1..120: mol_type = other DNA
catgcactcctccattcaaagccgtgtgttctgattgtgcacttttggtggctgccacaggattaaatcctgaatgctttgccagttgagatcaaaagtcaccccaactcctctgaaacc

SEQ ID NO: 8850 - DNA, 120 bp, synthetic construct
  source 1..120: mol_type = other DNA
ctcagctgtctcatagattttctatctctgtctccctctgcttcattcacagaattttctatgcagtttctaactcttgagatgtttctgttccactgctttatctacccactgagactt

SEQ ID NO: 8851 - DNA, 120 bp, synthetic construct
  source 1..120: mol_type = other DNA
tgctctataatgaagcaacaaagcccgatgacagtacatctgttgacaacatggtttactgaatatgttgagcccattttcgagacctattgctcagacaaaaagatccctctcaaaatg

SEQ ID NO: 8852 - DNA, 120 bp, synthetic construct
  source 1..120: mol_type = other DNA
aggtggaactctcatatgctcccggtgagaatgcaaagtccaaagcgatgcaaccatttgggaaacagttcagcagtttcttgatgtgttaaatacatacctaccatattctacagcgat

SEQ ID NO: 8853 - DNA, 120 bp, synthetic construct
  source 1..120: mol_type = other DNA
aatccatcatcaggatattgatttctgcaattgttaaatagcaaaaaattgcaaaccaccgacatacccatcagtggaggtctgcttcaagtatcatatctccgttaaacagccatcaaa

SEQ ID NO: 8854 - DNA, 120 bp, synthetic construct
  source 1..120: mol_type = other DNA
ccttttcttggctaactctatttttgttttcttttacttaagagtcatagttcatttatttgaagttcttctactaaaggcatttttaaaggctataaattttcctctgattgcagcttt

SEQ ID NO: 8855 - DNA, 120 bp, synthetic construct
  source 1..120: mol_type = other DNA
aacagtcttgtgtctctgtctgctgccaaattggcctcaggctctatcaataccagatctgaataggggctattctttcttttagtgtccttaatgttgtattactttccaatattcaca

SEQ ID NO: 8856 - DNA, 120 bp, synthetic construct
  source 1..120: mol_type = other DNA
gccgaggtattaaagaccagggcttcaactgcaaaccttgtgggacacaattcagcccgtgacacaggaataggcttgttaatttcagtgatgtagccaggttgtttttctcgttttgtc

SEQ ID NO: 8857 - DNA, 120 bp, synthetic construct
  source 1..120: mol_type = other DNA
gtcctttgtggcattttttcctccactgcaagatccagttcagggtcagtactgcctttagatgtgtctcttcagtcttgtttaatctggaacatttctagtctctttctctgttatgac

SEQ ID NO: 8858 - DNA, 120 bp, synthetic construct
  source 1..120: mol_type = other DNA
tcatctgttctctgattctctagttttgtcttttcaaaaatgccacgtaaatggaatcacacaatacacgatatcttagaaacggggtcttttggctcggcatcattctctggattcatt

SEQ ID NO: 8859 - DNA, 120 bp, synthetic construct
  source 1..120: mol_type = other DNA
aaactaccaaactgattttccagagtgactgcaccatttcacattccccattcctgccagcaaggtctaagtgatctagtttctctgcattcttgctggcatttgatgttcacactgttt

SEQ ID NO: 8860 - DNA, 120 bp, synthetic construct
  source 1..120: mol_type = other DNA
gcaggcttaccacacacatttaattttttaaaaacacaatatccacaaagtgcaaaaaagtgaagtgtgcctgtgtatccccagagctgtgcaactgccactccagtttgagaacatttt

SEQ ID NO: 8861 - DNA, 120 bp, synthetic construct
  source 1..120: mol_type = other DNA
ttttagattgtttccacattttgactactatgaataatgcttctagaacatgtgggtttttgtgtggacatgtgttttcatatctcctgggcatgaaagagatatgaaaggctgggtgtg

SEQ ID NO: 8862 - DNA, 120 bp, synthetic construct; identical to SEQ ID NO: 1785
  source 1..120: mol_type = other DNA

SEQ ID NO: 8863 - DNA, 120 bp, synthetic construct
  source 1..120: mol_type = other DNA
actatttgttcaaaagactattctttccgcattgaacattcttggcatccttgtcaaaaatcaattgaccatagatatatggctccgtttttacactctgattctattcccttgatctac

SEQ ID NO: 8864 - DNA, 120 bp, synthetic construct
  source 1..120: mol_type = other DNA
tttttatatactgattttgtctcctgcagccttactgaactcattcgttgtaattgtttcacaatggattccttggggttttctgtatacaacattgatacggtttggatgtttggtccc

SEQ ID NO: 8865 - DNA, 120 bp, synthetic construct
  source 1..120: mol_type = other DNA
aagtgctgggattacaggtgtgaaccactgcacccggccaactgtgatttttaatagatgccctttatcaggttgaggatgttcctttctattcctagtatattgagtagggctttttct

SEQ ID NO: 8866 - DNA, 120 bp, synthetic construct
  source 1..120: mol_type = other DNA
ggactgaaagaatgtattggaaaaattttccttctcttctatttttttgttgttggaagaggtcataaagaattgatattctttagatatttgttagattcactcatctggccctcttgg

SEQ ID NO: 8867 - DNA, 120 bp, synthetic construct
  source 1..120: mol_type = other DNA
agtacgttccatttcccttgtgaattctttcacccattgattatttaagaatgtagtgttgtttaatttccacatgtgtatgtttccctaatttctttgctactgagttctacttttatt

SEQ ID NO: 8868 - DNA, 120 bp, synthetic construct
  source 1..120: mol_type = other DNA
tactttcagttggcatttatcatctaaagtgtgcctcatatagatggaatacagatggatcctgtttttcaaatctggtctgataattcctgcctttgattagattgtttaatccattca

SEQ ID NO: 8869 - DNA, 120 bp, synthetic construct
  source 1..120: mol_type = other DNA
ctgttaccccactactttctgggtaccactgtttctgacgaaaagtcagctccacatttgtctccctgacaccagaacaggggagggtattaagcagagtgccacatagcctcacctccc

SEQ ID NO: 8870 - DNA, 120 bp, synthetic construct
  source 1..120: mol_type = other DNA
ggaaggatttatatctaccatgttgttatttattttctatatgtctcatatcacttttgttcctctcttcctcctttactgccttctgcaggttgaatagatatgttctagagtaccatt

SEQ ID NO: 8871 - DNA, 120 bp, synthetic construct
  source 1..120: mol_type = other DNA
tagaaactctggattctagttcttctccctaaccagggatgatttctgttactcatttatttgtttgctcgcttgtgtatgccttctctgcatggattctgcagagtctgtgttctcctg

SEQ ID NO: 8872 - DNA, 120 bp, synthetic construct
  source 1..120: mol_type = other DNA
aagcctaccgtgcccctgagcttgggtggggagatggcagccccacgttaaatcataaccctgctattcttaggaaggcttaatattttttctttaattagcacttttcaattttatatt

SEQ ID NO: 8873 - DNA, 120 bp, synthetic construct
  source 1..120: mol_type = other DNA
cagttgccccagcaccatttgttaaaagactactcttcccactgaattcttgatacatttgttgaaaatgaattgatcatatatgtgagtgtttatttctacattctctattatattcca

SEQ ID NO: 8874 - DNA, 120 bp, synthetic construct
  source 1..120: mol_type = other DNA
gttgaacatgtaccctgcaattttgctggacttgtttattagctctactagtttgtggattctttgattttctagatagaagatgtcattattgaataaagagttttactgcttcctttc

SEQ ID NO: 8875 - DNA, 120 bp, synthetic construct
  source 1..120: mol_type = other DNA
acttcgttcttctttctctggttacgtaaggtataatattaggttatggatccttcttctttttcagtgtgggcattcacagctataatttttcctctgagcacttctttcactacatcc

SEQ ID NO: 8876 - DNA, 120 bp, synthetic construct
  source 1..120: mol_type = other DNA
cacaccacagtttagtcatccatcaatggacacgtaagttttcatatcgtgactcatgcatataatgccacaatgaatataggagcgcagatatctttatgaggtggagatttcattttc

SEQ ID NO: 8877 - DNA, 120 bp, synthetic construct
  source 1..120: mol_type = other DNA
catgggttggacaagccacagaactgggtttcctaacgtcatttatgagagagactatctttctgcattgttttcttcgtgttcttgtggaaaattggttgatcatatatctttgaattt

SEQ ID NO: 8878 - DNA, 120 bp, synthetic construct
  source 1..120: mol_type = other DNA
tcattgattataacgttagctgtgggcttttcataaatggcattcgttatattgaggagtgttccttctatacctgaactgttagaatttatcaacaaaggatgttcaacttcatcaaat

SEQ ID NO: 8879 - DNA, 120 bp, synthetic construct
  source 1..120: mol_type = other DNA
gggattacaggtgagagctaccgcacctggccgaattcattcatttttatggctgcatagtattccatggtgtacatgtaccacattttctttatccaatccaccactgatgggcatcta

SEQ ID NO: 8880 - DNA, 120 bp, synthetic construct
  source 1..120: mol_type = other DNA
ctgaccccagatgatccacgcacctcagcctcccaaagtgctaggactacaggcatgagccaccgtgcctggcctcattatttgcatttctgattattagtgatcatgagaatgtttttt

SEQ ID NO: 8881 - DNA, 120 bp, synthetic construct
  source 1..120: mol_type = other DNA
gactctacccattactgaaagtacgttattgaagtccctaagtattattgtagaactgtctttctcactccaattctgtcagtatattttcttatattctggggctctatattttggtgt

SEQ ID NO: 8882 - DNA, 120 bp, synthetic construct
  source 1..120: mol_type = other DNA
tcatgagatctggttgtttaaacgtgtgtggcacttcccatctcactttctttccctctcctgttctgccatggtaaagatgtgcctgcttctcctttgccttccgccatgattttaagt

SEQ ID NO: 8883 - DNA, 120 bp, synthetic construct
  source 1..120: mol_type = other DNA
atgtttttaaggttctttatatattttggatgagtcctttatcaggtatatcttttacaagtattgtctcccttctgtggcctgtcctttcatcctcttgacagtatgttttacagagca

SEQ ID NO: 8884 - DNA, 120 bp, synthetic construct
  source 1..120: mol_type = other DNA
ttttctgtttatgtgggatttttttgagacaagatctggctctgtcacttaggctggaatgcagtggcatgatcatggcacactgcagcctcaacctagacctctgggcttaggctatcc

SEQ ID NO: 8885 - DNA, 120 bp, synthetic construct
  source 1..120: mol_type = other DNA
cattttgagtaagtttttgtacacagtgttaggtaagggtctcaacttcattctcttttatacatggttaggtaaggatctcaacttcattctcttgagttaatttttgtgtatggtatt

SEQ ID NO: 8886 - DNA, 120 bp, synthetic construct
  source 1..120: mol_type = other DNA
tgaattttaggatggggtttcttctttctgcaaataacatcattaggatttttattgggattaccttggatttgtagattgttttgtgtggtactgacaccttaacaatattggccttcc

SEQ ID NO: 8887 - DNA, 120 bp, synthetic construct
  source 1..120: mol_type = other DNA
cactacaatgaacatgggagtgcagatacctcttcaagatactgactttgttttccttagatatacccggaactgagactgctggatcatatagcagttccaattttaattttttaaaga

SEQ ID NO: 8888 - DNA, 120 bp, synthetic construct
  source 1..120: mol_type = other DNA
taaggttccaatttaatttttttgcatgtggatatcctggtttcacagtgccatttattcaagagagtaccctttccccattgtgtactcttggtgtctttgtcaaagattagttgacca

SEQ ID NO: 8889 - DNA, 120 bp, synthetic construct
  source 1..120: mol_type = other DNA
gaggagaggcattcagcttttcagcattgagtatgatgttagctgtgggctattcatatatggcctttattgtgttgcagtacattccttctatacctaatttgttcatagtttttatca

SEQ ID NO: 8890 - DNA, 120 bp, synthetic construct
  source 1..120: mol_type = other DNA
taagcctgaataactccctctggcatatcttgtaaggcaagagtagttgctgataaactccttcaacttttgtttacctgaggaagtcttgtatctgtttcatatctgaaggacagcttt

SEQ ID NO: 8891 - DNA, 120 bp, synthetic construct
  source 1..120: mol_type = other DNA
tgaggtcagcagtggcaaacattacaaaggtccttggtggccaaggctgagtgtcctgatgctgtcgtgtaaatagagttgtgttaataatatccctttcagattgtttgtgattaatgt

SEQ ID NO: 8892 - DNA, 120 bp, synthetic construct
  source 1..120: mol_type = other DNA
tcatccatgttgctgtgaatgacaggacttaatgctttattatgactgaataatattccattgtgtatacataccacattctttctctgcatctgctgatggagatttaagttgattcca

SEQ ID NO: 8893 - DNA, 120 bp, synthetic construct
  source 1..120: mol_type = other DNA
caattttgagttgatttttttatatgctgagagatagtatagtttcattcttctgcatatgatatcctgttttcccaacatgatgtgttcaacatggtgtcctttccccagagtgtgttc

SEQ ID NO: 8894 - DNA, 120 bp, synthetic construct
  source 1..120: mol_type = other DNA
ttgctatagtttgctgagaatgatggtttccagcttcatccatgtccctacaaaggacgtgaactcatcctttttttatggctgcatagtattccatggtgtgtatgtgccacattttct

SEQ ID NO: 8895 - DNA, 120 bp, synthetic construct
  source 1..120: mol_type = other DNA
agccagttttcccagcaccatttattaaatagggaatcctttccccatttcttgtttctgtcagctttgtcaaagatcagatgattgtagatgtgtggtattatttctgagggctctgtt

SEQ ID NO: 8896 - DNA, 120 bp, synthetic construct
  source 1..120: mol_type = other DNA
tacctaatttattgagagtttttagcatgaagggctgttgaattttgtcaaaggccttttctgcatctattgagataatcatgtggtttttgtctttggttctgtttatatgctggataa

SEQ ID NO: 8897 - DNA, 120 bp, synthetic construct
  source 1..120: mol_type = other DNA
tataaatttccctctacacactgctttaaatgtgtcccagagattctggtatgttgtgtctttgttctcattggtttcaaagaacatctttatttctctgccttcatttcgttatgtacc

SEQ ID NO: 8898 - DNA, 120 bp, synthetic construct
  source 1..120: mol_type = other DNA
atttgtcatgtttttgcagtggctggtaccaattgttcctttccatgtttagtgcttccttcaggagctcttgtagggcaggcctggtggttataacatctctcagcatttgcttgtcta

SEQ ID NO: 8899 - DNA, 120 bp, synthetic construct
  source 1..120: mol_type = other DNA
ccctgtttgcctgggtatcagcagcagaggctgcagaacagcgaatactgctgaacaccaaatgttgctgcctgattgttcctctggaagcttcgtctcagaggagtacccagccgtgtg

SEQ ID NO: 8900 - DNA, 120 bp, synthetic construct
  source 1..120: mol_type = other DNA
ttaggaacatttcaagtcctcttttttattttgaaatatacattatattgttaaatatagtcaaccaactcttatcaaacattataaattatttattctaactagctgtgtatttttacc

SEQ ID NO: 8901 - DNA, 120 bp, synthetic construct
  source 1..120: mol_type = other DNA
agggtgctcttttcccagtgtatgttcttggcatctttgtcaaaaatcagttggctgtaaatacatggatttacttccaggttctactctgttccattggtctatcagtttttattccaa

SEQ ID NO: 8902 - DNA, 120 bp, synthetic construct
  source 1..120: mol_type = other DNA
aatgtatcctggagagtgttccatgtactgatgagaagagtgtatattctgcagctgttttatgaactggtctgtaaatgtctgttaggtccatttggtataaagtgcagtttaaatcca

SEQ ID NO: 8903 - DNA, 120 bp, synthetic construct
  source 1..120: mol_type = other DNA
ggatgggcaatttgctataatgtgctgtggaaaagacctttctgaattgtatctatttagggttctgagattcctatatttggatctaaatctcttgggagattgggaagtgttcaggta

SEQ ID NO: 8904 - DNA, 120 bp, synthetic construct; identical to SEQ ID NO: 1825
  source 1..120: mol_type = other DNA

SEQ ID NO: 8905 - DNA, 120 bp, synthetic construct
  source 1..120: mol_type = other DNA
tctctgggagctgttcattgccatttcacagtctgtaggtagcctcttgttagtctcaaggcatctatgggtcagggggttctctgactaggatttcaggagtctgctgtgggaatgtgg

SEQ ID NO: 8906 - DNA, 120 bp, synthetic construct
  source 1..120: mol_type = other DNA
cctcatcctttcaaagtgctgaaattacaagcatgagccatcatgtccacacctactaatttttgtttgttgatttttttatcctgcaactttattgaattcctttaccagttctaaaag

SEQ ID NO: 8907 - DNA, 120 bp, synthetic construct
  source 1..120: mol_type = other DNA
ggttttggtatcaagatactgcttgcctcacagaatgagttagggagaattcctttctcttcagtcttttggaattgtctgagaagaattcatgttagttctttaaaggtttggtagaat

SEQ ID NO: 8908 - DNA, 120 bp, synthetic construct
  source 1..120: mol_type = other DNA
gtcctaacatatggtatatcctggagaatgtgctgtgtgctaacgaagcagcagttcaaatctaatatttccttgttgatatttttccatccaaatgaattgtccaatgctgagtatgaa

SEQ ID NO: 8909 - DNA, 120 bp, synthetic construct
  source 1..120: mol_type = other DNA
atctgctctactagtgttttatgcttttgtagtttcatgatggtagatatcatcctcctacttccagatgtagtactcccttaagcatttcttgtggggctgatttagtagtaatgaatt

SEQ ID NO: 8910 - DNA, 120 bp, synthetic construct
  source 1..120: mol_type = other DNA
ttccccccaagttttttgtgtccccaagttgatatctgcatatctggaataacagagacttccaattttatggagtagccttagtaaggacttttcctgtacacgcgtctgtagtatcat

SEQ ID NO: 8911 - DNA, 120 bp, synthetic construct
  source 1..120: mol_type = other DNA
aagtcagaggtagtgcttatgaaagtatctggtgggcttgcattaagaagctgtcagtgtgaagaacgtgaatgctaagggcatatgagtgtgtccctgagaacatggatattgtgttct

SEQ ID NO: 8912 - DNA, 120 bp, synthetic construct
  source 1..120: mol_type = other DNA
tcctgtgtaattttgtcttgaaaatcaaggccacttttttgttttctccatccaaagacctccagaaactttcctccccacctctccagaggtttctggggaatgtcctgtgagctcaac

SEQ ID NO: 8913 - DNA, 120 bp, synthetic construct
  source 1..120: mol_type = other DNA
aacatgttccataatttgcatcaaacatcctcatacagcagggtgtggagagaggctcactgaaggtttggggagatgaggacttgcatcacagcagtagaaagccaatgtcccacctta

SEQ ID NO: 8914 - DNA, 120 bp, synthetic construct
  source 1..120: mol_type = other DNA
caagcaaggtattttcctaagcggaactgggtgccagctgtgaatatacattttcactccattcctcgccttgttcctggcagctgttgtgggaatggcttttacactttccatccatgt

SEQ ID NO: 8915 - DNA, 120 bp, synthetic construct; identical to SEQ ID NO: 1835
  source 1..120: mol_type = other DNA

SEQ ID NO: 8916 - DNA, 120 bp, synthetic construct
  source 1..120: mol_type = other DNA
cagtctccaacacacaagccagcagacaataacctctcctcttgaattggaaaaacaaatctgtggaggccttctctgccccttgttataggggccccatatgccgttcccaggattaaa

SEQ ID NO: 8917 - DNA, 120 bp, synthetic construct
  source 1..120: mol_type = other DNA
tgaatttttggtatatgatgtgaggtaattaagggtccaacttaatgtttttccagtgtgggtatccaactgctcctgaacatttgattgaaaagtccatgctcttcccaggatgtgcag

SEQ ID NO: 8918 - DNA, 120 bp, synthetic construct
  source 1..120: mol_type = other DNA
tgttccaagatcccatctaggatcgatcattacatttattgtcatctctgatcggtgacgggcttctcagtcttgttcttcattaacttgacacttttgaagaataccagtcaggtgtca

SEQ ID NO: 8919 - DNA, 120 bp, synthetic construct
  source 1..120: mol_type = other DNA
tttttaagcatttcttttctagcacttgacaatacttcaggctcatcttttattttccctaccctagccctagaatcatccattcatccagagagccctggctccctggagaatgaatag

SEQ ID NO: 8920 - DNA, 120 bp, synthetic construct
  source 1..120: mol_type = other DNA
aagtcactgtgccattttgcattcccaccagtaacatatgagagttctacatgttccacatcctcaagagtggttggtattgtcaggttttgaattttttttttaatttatggaatttca

SEQ ID NO: 8921 - DNA, 120 bp, synthetic construct
  source 1..120: mol_type = other DNA
aaggacatgaacaggcaattctgcaagaggaaacccaaacagatgccaagcccataaaaggtattcaacacagatggaaataacagcaatgcctcagttttcatccatgcttgatagtcc

SEQ ID NO: 8922 - DNA, 120 bp, synthetic construct
  source 1..120: mol_type = other DNA
caataaaatatttaaatgaagacaaatataagccaagagcaaatactgatagtgtcaacagagagtggggagtgataaggatcagtatcctgagctcctgtgtcaaagttgcagaggtgg

SEQ ID NO: 8923 - DNA, 120 bp, synthetic construct
  source 1..120: mol_type = other DNA
agagaggagagcaagggcacttcccactgagcctgggaacatgatcctcttgttttgacttatggaaaaccagactgatcattttccacttgttttcatgctttgagagtctgagattgt

SEQ ID NO: 8924 - DNA, 120 bp, synthetic construct
  source 1..120: mol_type = other DNA
ctccaaagtgatcagtgttagtttagtggctcatgttgtgtgcaatacaggtggcagtgcctgtattgcctcttggctgtcccctcagagaggggactgtcccttctcatccttctggct

SEQ ID NO: 8925 - DNA, 120 bp, synthetic construct
  source 1..120: mol_type = other DNA
gtaacttaccaaggcctctctcagagcaggctgttccaaaagtggctgctagatatgagccagcctgggaaggcaggaaggagcccaggcatggggcttggggtgagggatctgaagagg

SEQ ID NO: 8926 - DNA, 120 bp, synthetic construct
  source 1..120: mol_type = other DNA
cagaaccatatgacagggcttctgagagaaaggtgggaagtagagactgtaggcctgcatgggcagttggggagcacccccatgacaagaggagccctgtaccccaagagccaggatgag

SEQ ID NO: 8927 - DNA, 120 bp, synthetic construct
  source 1..120: mol_type = other DNA
aggctgaaatcatttttgtgaaatcctccctcacactgcatccccaactgccaagccagccaggactggcctggaattcacacgtctgccccattggttgcacatggatacctgagatag

SEQ ID NO: 8928 - DNA, 120 bp, synthetic construct
  source 1..120: mol_type = other DNA
ggctcaaacccgtctctgaaatgcacggggggattaaatgttcttctaattaaattaaaaccgaggcgtaatggctcagtgggaaagagatgggattgggaatcagatgccctcaatctg

SEQ ID NO: 8929 - DNA, 120 bp, synthetic construct
  source 1..120: mol_type = other DNA
tgaaggccagggctatccacctaattaggctcacctgggctaccctggtatagggtggtggtgttaaacttttagttaaagggtaatgtgcatgcacacagattagtacacaggtctcaa

SEQ ID NO: 8930 - DNA, 120 bp, synthetic construct
  source 1..120: mol_type = other DNA
tcataaagatattctggtttattctaaagctttattagctcacctttcccatgtagatctgcactccatctgggattgatttttgtgtccaatgtgaggccgaggtcaaggtccactctt

SEQ ID NO: 8931 - DNA, 120 bp, synthetic construct
  source 1..120: mol_type = other DNA
agtcacctaatctctatcagcctcagtttcctcttgtatacattgggagtatatctcacagtattagtgtaaggccttgaggagatggtgttaggcatccagccacatacctgactcggg

SEQ ID NO: 8932 - DNA, 120 bp, synthetic construct
  source 1..120: mol_type = other DNA
acagtctgcagatattatctgggcactggccagtggctcttgtggctgccctctgcaataagaattcttcaagttcagcctctatgtgcatcataaacctggtgccaccagccaaggagg

SEQ ID NO: 8933 - DNA, 120 bp, synthetic construct
  source 1..120: mol_type = other DNA
cagaagagcaacccagcaggggatatacacaaagatctgagaaagggattatttttagggccaattcaagggatttttcaaaggttaattttgactctgcctgacttatctcctaagtct

SEQ ID NO: 8934 - DNA, 120 bp, synthetic construct
  source 1..120: mol_type = other DNA
aaaccacatggcctgaattttgattgggaaagcatccctgtaggtgtcaggtgatggaaggactctgggtaaatggaagcactgagaccagatatgataggaccttgcccagtggacaca

SEQ ID NO: 8935 - DNA, 120 bp, synthetic construct
  source 1..120: mol_type = other DNA
gaagaaatcttgagagaaacaatcccacaggctaccaggccagcttttggaaacagtctcattagcaaacaaagggaagtgacagagcagagctccccttggcctttgtttagcccacct

SEQ ID NO: 8936 - DNA, 120 bp, synthetic construct
  source 1..120: mol_type = other DNA
atggccccagtgttactaggcactagatggcacttgcaaagcccattcggaggatttagacaaatacctcgagtgagtgaatctgaagcatgctagttgtgttgccttttaaataggctc

SEQ ID NO: 8937 - DNA, 120 bp, synthetic construct
  source 1..120: mol_type = other DNA
cagtactgtttcagaagtgaagataactcacctctcccaaaagcagagttttggcaatataaaacatgaaagtgggatgggatctaagtcatatttttttaatgagtttaaaacacgtgt

SEQ ID NO: 8938 - DNA, 120 bp, synthetic construct
  source 1..120: mol_type = other DNA
gggtgaaaaataacactctccccacccaaccctaattcccaagtttccttccctaaaggttaccactcaacactttcctattgcatctttccagacgtattttatataaacaaatatacg

SEQ ID NO: 8939 - DNA, 120 bp, synthetic construct
  source 1..120: mol_type = other DNA
agtgttcagccccagtgtgcaccacttaaaaggaagacactggtatgttctggagatggatctgtattaagacatctagcaaatctccttttcattaacagctgcagagtttcattgtgc

SEQ ID NO: 8940 - DNA, 120 bp, synthetic construct
  source 1..120: mol_type = other DNA
tgtaaaattttggtctccgttttcagtggatttactttaagagatcctccctttccccccatttccagcaggattaaaatgttcatttatgttgtgatagatactgccaaataagggctg

SEQ ID NO: 8941 - DNA, 120 bp, synthetic construct
  source 1..120: mol_type = other DNA
ccctcatctccattacttaagagccaataatgggaagctcattttcacaaatgcagtcaaccaggggaattcatggcatggcctaagatctaaacactcttaagatttaaacacaggatt

SEQ ID NO: 8942 - DNA, 120 bp, synthetic construct
  source 1..120: mol_type = other DNA
cctatagtagtgacacagtgttacttaaatgtattgctatacctcatgatggccattccatccattgtaatcatgtgtaccatgcaattcacagtgcctgacaaagctgatggggaggcg

SEQ ID NO: 8943 - DNA, 120 bp, synthetic construct
  source 1..120: mol_type = other DNA
tcttgcaaaactgtagtacaatattctgaccaggatattgcattgatagtctcactacaggacatttctaactcttcaagaatccctcatgtcccccttttatagctacccccaattccc

SEQ ID NO: 8944 - DNA, 120 bp, synthetic construct
  source 1..120: mol_type = other DNA
atgctaagagggtttggaaaaagtcatttttgcagtgtttgtgttctatgaagagtgggtagaaggaagcaggagagtattcctgcctccccaggagagagcttcactttctccctatac

SEQ ID NO: 8945 - DNA, 120 bp, synthetic construct
  source 1..120: mol_type = other DNA
tctatcacattcaaggagcatgagggtataggctggctgtttctattcagtgttttatcttcagtgcttaatccatatggagcctgtcacggaccctcagtgaatgtttgacgagtgagt

SEQ ID NO: 8946 - DNA, 120 bp, synthetic construct
  source 1..120: mol_type = other DNA
caggagggtgtggggatgggctagcattaggaatgggtattagcatctgcattaaaaggctcccactgacagctcatgcattgtgatggaactagaggtgagatacagagcaggagtcca

SEQ ID NO: 8947 - DNA, 120 bp, synthetic construct
  source 1..120: mol_type = other DNA
ttatcaagacattgtttagagtaaataattcattaactggtacagcaatttcagaaccctttcacatagattcttaaggggaccgtttcccttgaagaatggggtacaccagaggactta

SEQ ID NO: 8948 - DNA, 120 bp, synthetic construct
  source 1..120: mol_type = other DNA
aatggcttccaattttacggactggttgcttttcattcatatcttcttgccatccctgtctcatgggtgagcacatttcctggatttaaaatgtatgggacagcctgtgagaattacaga

SEQ ID NO: 8949 - DNA, 120 bp, synthetic construct
  source 1..120: mol_type = other DNA
gagagcacagcaatgcctactcatcctgcccaaaaccctgctccaacctagctgtgtgacctttaggccttgggatagcacacagcaaatgtctgccaccccagtactgccactggcttg

SEQ ID NO: 8950 - DNA, 120 bp, synthetic construct
  source 1..120: mol_type = other DNA
cagggaggggaggaatctgagccagcttcctccacaaagcacagaagtctgccaaaagcccaggctggatagggagcatcacactgttgggaaatgtgcaattttcactcagccagcatc

SEQ ID NO: 8951 - DNA, 120 bp, synthetic construct
  source 1..120: mol_type = other DNA
cccccctcctctgccccaactggctccaggccaaactctggttcctgaggagcctcaaaggctggacttggggtgtcccgcggaaatcctggtgggatggaaaatccccagcagttgtga

SEQ ID NO: 8952 - DNA, 120 bp, synthetic construct
  source 1..120: mol_type = other DNA
acctataccacacctatatacttgccctcccccacacacagcccacctggcccatcccacaaagagagatggcactccaggtggagagggctgggccagaggtcatgcagcaaggtcagg

SEQ ID NO: 8953 - DNA, 120 bp, synthetic construct
  source 1..120: mol_type = other DNA
gccagagacttagtctcatttgtttacaggagactgatgggttcctgagcagcctaggaggggaggggaagcactgcgttctcagtgtggtgcttggccctcccaggtgcctggttgtgg

SEQ ID NO: 8954 - DNA, 120 bp, synthetic construct
  source 1..120: mol_type = other DNA
cacatatgtgcatgttcatatatgtgtcagaatgcgtatttgtcagtgtatgtgtgtcagtgcacataggtataggggctgtctctcagaattcctgagggctttccatttgatcccagt

SEQ ID NO: 8955 - DNA, 120 bp, synthetic construct
  source 1..120: mol_type = other DNA
tgagtctctgatgttgacagcctctttgttttttcatctcagcctattcaaggccatttttcagcttgcttggctttgcattaaagttggggggatttctctatcctgaggttatgaaat

SEQ ID NO: 8956 - DNA, 120 bp, synthetic construct
  source 1..120: mol_type = other DNA
gataggccaccatttctctgtactgcaggcatctcctaactggcattctcacatcccctgccccattccaatcaattatctactcagtggacagacatcctttcaaagtttagagacctg

SEQ ID NO: 8957 - DNA, 120 bp, synthetic construct
  source 1..120: mol_type = other DNA
aagctgggaataagcttgttttgccaggcgctggccccccatcgagtccccattctctaatgctaattgctacaattagcaggagaaaggccttttagatccatttcttctcctggctga

SEQ ID NO: 8958 - DNA, 120 bp, synthetic construct; identical to SEQ ID NO: 1875
  source 1..120: mol_type = other DNA

SEQ ID NO: 8959 - DNA, 120 bp, synthetic construct
  source 1..120: mol_type = other DNA
ttaacaaagaagaagaaggctggcagagccaaagctcagtgagggaggacagtggtcagagaggtaagcagggcagatcttgtaaaaacctgatggaatttgaattttatttcctagaaa

SEQ ID NO: 8960 - DNA, 120 bp, synthetic construct
  source 1..120: mol_type = other DNA
ttatttaacagaaatccttaatccataatcattaatgcattcaagttcatacattttagtcttgaggtttgtgctttctggatcctgtttaagaaccccacggccaccctggccctggag

SEQ ID NO: 8961 - DNA, 120 bp, synthetic construct
  source 1..120: mol_type = other DNA
gtgtagtctggggattccagagagccccccagaccctttcaggaaaggtcaaaaacattttcataataatactcgacattatttgccttttctttcattctcacaaagataaagagtttt

SEQ ID NO: 8962 - DNA, 120 bp, synthetic construct
  source 1..120: mol_type = other DNA
ctagctggagcataaatcctgaaacagacccacttttctcctcagcatgttaggaaacacattaaaatacacccataatcaagcaactcaatccttaaatttttctcctactgagtatct

SEQ ID NO: 8963 - DNA, 120 bp, synthetic construct
  source 1..120: mol_type = other DNA
ctgactcagaatccccacctagaggcagaacttcgacttcaattcctgactcccataccccactgagacctctaaccccaatcccaatctcttaactcagagccccccattcagaacctc

SEQ ID NO: 8964 - DNA, 120 bp, synthetic construct
  source 1..120: mol_type = other DNA
ctgaggagccccgaggagaaccgcgccgaggggcgcgccggggagaaccacgatgactgacgcaccgaggaggaccgcgctgaggggcgcaccgggagaatcgtgctgaggagccccggg

SEQ ID NO: 8965 - DNA, 120 bp, synthetic construct
  source 1..120: mol_type = other DNA
cggcgccgctgcagcgaccctcgaacccgggcaaggtctccaccgccgtggcaccgggtgcgggaggcgttttcccccctcccagcgggtccatgcaggggatcgggatgttctgaagcc

SEQ ID NO: 8966 - DNA, 120 bp, synthetic construct
  source 1..120: mol_type = other DNA
cctcaggacagattatcagctgcctgtctgcctgcttcctctgtgcccagcctctctcttgacatccaaaggatcacaactcccactcagtgaccactattattctctgcccctgaccaa

SEQ ID NO: 8967 - DNA, 120 bp, synthetic construct
  source 1..120: mol_type = other DNA
ttgttgttgtgttctccaaggatgtcgaacacaggctgaaaagctccctaaatcaatttcacttaaaatggtgtccaccctcctactaaagagtgacaaagggtgttggttaggattttt

SEQ ID NO: 8968 - DNA, 120 bp, synthetic construct
  source 1..120: mol_type = other DNA
aaggtatttagagtgggggtgggggattaggggaggaagttgctgagctaattcttttgcatttgccagcacagaagtgcagatggggcccagagccccggcggtgtcccaggggaaaca

SEQ ID NO: 8969 - DNA, 120 bp, synthetic construct
  source 1..120: mol_type = other DNA
cactggggcttcccttccaacttgatggtttcaggtacatgggcctgttgtcaactctgttcccactgagcccatgagacggctattcctttgagacatgtttacttgacttcctgcccc

SEQ ID NO: 8970 - DNA, 120 bp, synthetic construct
  source 1..120: mol_type = other DNA
gtgggaaaatgaagtgaactgggcctgccagacccattgcctgcagggccttttctaccaccaccttccagaggcagcttcctcccacaaagcatcccaagctcggggtgtgtgcccccc

SEQ ID NO: 8971 - DNA, 120 bp, synthetic construct
  source 1..120: mol_type = other DNA
ctaattaagttttggctggactgtgatttgcttctttcaaataaaatatggaagaagtgacagagcatgacttccaagactaggccttgcagcctccctgccctctcactgggatcactg

SEQ ID NO: 8972 - DNA, 120 bp, synthetic construct
  source 1..120: mol_type = other DNA
tcaaagggccctcttggggtcagccacagagaagggggagcaggtgtgatggggtggtgatgggatgctgtaggtggatgagaagtagcaccaaagctcactactgtttttctcttatcc

SEQ ID NO: 8973 - DNA, 120 bp, synthetic construct
  source 1..120: mol_type = other DNA
caagatcgggggcacccaggagaccacgctcatgaattgttccacttgaacacaacattgttttttatggaactgggctggggagtcctctgtgactctttcctcagtagggagagagct

SEQ ID NO: 8974 - DNA, 120 bp, synthetic construct
  source 1..120: mol_type = other DNA
aaaagagctgaggggccttataaactccgtgtgcaaattacctttggggctgcctgctccaccgcccctccctgaggctgccatcactggcgagcggctgagtgtgctgcacagaattcg

SEQ ID NO: 8975 - DNA, 120 bp, synthetic construct
  source 1..120: mol_type = other DNA
attgtggacatagattttcatttttcttgagtattcacagaggagtagaaacgctgggtcatatggtgactccatatttaaccttttgaggatctgccagactgttttccaatgtggcag

SEQ ID NO: 8976 - DNA, 120 bp, synthetic construct
  source 1..120: mol_type = other DNA
gttttcagtatagtttttgcactactttgtaaatcctacagggttttgtgtgacagtgactggcagccatacttcctccccatgtactgggttctgcccatcctccagcccatctccctt

SEQ ID NO: 8977 - DNA, 120 bp, synthetic construct
  source 1..120: mol_type = other DNA
ccagggaaatagaactttggcagcttacaaaggagttttatttttcaaatttcctttcaactcgagggtctcaaatccactcagcagacttaggagggagggtcctggcactgcttctga

SEQ ID NO: 8978 - DNA, 120 bp, synthetic construct
  source 1..120: mol_type = other DNA
gcccaaatgttagacactcttctctcttaggtggtttgaggagacttaggggcttccatattccccttggaacatgaagaaggggctggctaaggcccccatccctgctcaggcctacag

SEQ ID NO: 8979 - DNA, 120 bp, synthetic construct
  source 1..120: mol_type = other DNA
atccattaaatccatattcctcactgtagagttcatggattcagaggatataccgtattctggccgtcttacattactgcaatattgcttccagatgggcaaacgcgcgctcggagcctg

SEQ ID NO: 8980 - DNA, 120 bp, synthetic construct
  source 1..120: mol_type = other DNA
aagcccttggggccggggtggtaggggtaggagagcatcttgagggtggctgcagcatcgtcgtcatctttccaatggtggcatcccttccccaagcaagggaatgatgcagacagaggt

SEQ ID NO: 8981 - DNA, 120 bp, synthetic construct
  source 1..120: mol_type = other DNA
gaaccagcaaagggggtatggggagccctctggggcaccctcatatcacaccctgtccctctggccacattccagctggccctgcctgtgagggttgaccagctggagcagccccgcatc

SEQ ID NO: 8982 - DNA, 120 bp, synthetic construct
  source 1..120: mol_type = other DNA
attggccagaacacagtccccaagcctcctcagctaggctctcgaggaatggctgggtgtcctttctcagcagaaaagccttgtccccagcctccagggccaggctccagcttcccaggc

SEQ ID NO: 8983 - DNA, 120 bp, synthetic construct
  source 1..120: mol_type = other DNA
gttcctgtcccaatcctcccatccccatattcaggaaagttccccaggcccgtatgaactggcttcttaattttgttttaaacacaagctttcagaagagcagaaacggaaagacagatg

SEQ ID NO: 8984 - DNA, 120 bp, synthetic construct
  source 1..120: mol_type = other DNA
gcacagctctgaggatgtggatgagcagaggggaggacagggatgatgaaccccaggaattggcttccagtggatgcaaggctgactcgtacatgtcatggaggatagttcgggcatctg

SEQ ID NO: 8985 - DNA, 120 bp, synthetic construct
  source 1..120: mol_type = other DNA
ctctcgggtgcagagctgacctcccaagtctcaggcttcttgtctctcattgggggtaacaatggctatgtacataagattaggagaacacacagaaggtggtgctggctaaagccatta

SEQ ID NO: 8986 - DNA, 120 bp, synthetic construct
  source 1..120: mol_type = other DNA
tcaccatacatgcaaatgtagcaaactgcaaaatgtcccaaaacaagtcccttactgtccgtgtccctccatgccagctcactggaggggctcctgctgaaagaggtggggttcagttcc

SEQ ID NO: 8987 - DNA, 120 bp, synthetic construct
  source 1..120: mol_type = other DNA
cagggactcgggcaggcacagctttccaggccagagccatggacggtccctggacacctgcagcagccaggccccagatgcaagaaagggtatttgtttcttaaagcttgtaaagagttt

SEQ ID NO: 8988 - DNA, 120 bp, synthetic construct
  source 1..120: mol_type = other DNA
ggtgagtcagggctggggagccacaaagccagcatgctcctgccttttgggggtcccaggtgatgtgtcatcttaccaggtgttgacaggtggagagaggtaggctgggtgaagatagga

SEQ ID NO: 8989 - DNA, 120 bp, synthetic construct
  source 1..120: mol_type = other DNA
gcaagtgctgccttagcggagtgggggtgggggcatgtgtcactcccaggaccaactggcagatgaaggtctttgggcactgcagctgccacctggggtgcctcggggcaggctcacctc

SEQ ID NO: 8990 - DNA, 120 bp, synthetic construct
  source 1..120: mol_type = other DNA
gggcccaggcttttgatagagaatcacatctggaccaggacgttctggtaagatcgccagggggccgcgacaaggagaccaggaaggaaagacagaaagaaaaacacgcacagatccagg

SEQ ID NO: 8991 - DNA, 120 bp, synthetic construct
  source 1..120: mol_type = other DNA
gtccctgtccgtttaagaaaagcctgtgggcccaatagagaagcacagggtctgagaagcatcagacaatgactcctaaacaagctcacgtcttgaagcagtgctggacccgtttcagct

SEQ ID NO: 8992 - DNA, 120 bp, synthetic construct
  source 1..120: mol_type = other DNA
taactgaaaccctaaccttcgggcttccccactaatttgtgataaggcctcgccaagaaaaacagcaggctaaagacccctgatttcttcatgaattccagagcacttggttcactccgg

SEQ ID NO: 8993 - DNA, 120 bp, synthetic construct
  source 1..120: mol_type = other DNA
ctagcagggaggaatagtagtttatattttcccccaaaattttatttttctgcattggcctgaataggagctgactttaatacgggggaaatagtgattttaaagccggctttcccatgg

SEQ ID NO: 8994 - DNA, 120 bp, synthetic construct
  source 1..120: mol_type = other DNA
tagacccaatctgaagccctgggccaggagcttgtggacataacctgcagagatcagcctcctagggcagagtgagctgaatggagaagggctgtatgcagaagggcgagcagacagagc

SEQ ID NO: 8995 - DNA, 120 bp, synthetic construct
  source 1..120: mol_type = other DNA
gaaccaccagaaacttaatctattattacacagaaacttctgtgcagtcaggggtttgaagtccccagaagtgtttgcctgatttggggcagatagcggggtgattaatgctcgtgataa

SEQ ID NO: 8996 - DNA, 120 bp, synthetic construct
  source 1..120: mol_type = other DNA
gaaagttgcatctgtgctgaacatctgaacttgtacaggctttttgtcttgtcgttattccctaaacaatagagtgggtcacgcagcatttgtgttgttaggtatcgtaagtggtctgga

SEQ ID NO: 8997 - DNA, 120 bp, synthetic construct
  source 1..120: mol_type = other DNA
acgcagggttcttcagtaatggtggtttcgaagggcagaggagggaagaatggagggatgggggacagacgctggagccgttttggtggcaggcctctgtggctgtggccagaagcaggg

SEQ ID NO: 8998 - DNA, 120 bp, synthetic construct
  source 1..120: mol_type = other DNA
gggctggtccagagtccctgtcccctctgccagccacccaggaggctcctatggccccatctcccagctcttccgggtggaagacagtggtgggtaactcactcagctagagcgtctgat

SEQ ID NO: 8999 - DNA, 120 bp, synthetic construct
  source 1..120: mol_type = other DNA
gtttcttccctcgcctttgctgggccatctttcagaccttgcctggtaccttctctccccgtgccaaggcctggaggtgatgtggatgcagccgggcagtgaggagcgcaggcgaatgtt

SEQ ID NO: 9000 - DNA, 120 bp, synthetic construct
  source 1..120: mol_type = other DNA
cttccttccagacaggctggcccaggccctccccacggcttggcttccctgggcggtgtcaggcagggacagcagccataggtggtacccctagtgagggggactcattctagttgcaaa

SEQ ID NO: 9001 - DNA, 120 bp, synthetic construct
  source 1..120: mol_type = other DNA
gggttttccgaggccctgaaggactggagagtaggagcaggtctcgggggtagcttcctgaagagatgagtcaggtcccaggcacattcagtgccagccagggaggtgagaggtaatcct

SEQ ID NO: 9002 - DNA, 120 bp, synthetic construct
  source 1..120: mol_type = other DNA
accattttctgttgagcacacttgaggagcacttggaggagctgggggatgacatgagtccactccgctgtcaccaccaagaccacagtggggcagtttaaacagcaggcattcatcccc

SEQ ID NO: 9003 - DNA, 120 bp, synthetic construct
  source 1..120: mol_type = other DNA
gaccagttgaaactccattctaagtcttggggacctaatgggattaaaggcgaccgagcttgggccgtatctgggatctggggcccaccgggggctgtgaatagttggagccctggagtg

SEQ ID NO: 9004 - DNA, 120 bp, synthetic construct
  source 1..120: mol_type = other DNA
ggagttaattcctggccttgtgggctggcaaactctgactcacagagcaataaaattcttgtgttttaaaaatcagtatattagcttaattttatagatttcagaagtgctacttgaaaa

SEQ ID NO: 9005 - DNA, 120 bp, synthetic construct
  source 1..120: mol_type = other DNA
ttccttggccatgggggtgggcagacgtgttatcatgaagccgggagatcaaggaaggctctctgagggaggtgacatttgtaccaagcaaggaaagaggcagaagatccttcttccagg

SEQ ID NO: 9006 - DNA, 120 bp, synthetic construct
  source 1..120: mol_type = other DNA
gtgacaccaacccagcccctgtgtgaggtactgagagcccatcacacagatggaccaaccaaagccacagatgacaggtggcaggcccgagattgcctgaggtcacatggtaacacatgt

SEQ ID NO: 9007 - DNA, 120 bp, synthetic construct
  source 1..120: mol_type = other DNA
gagctgtgcggagctggccggcctggtccccgtggcttcaccctgagcgtgctgctgcctaggccctgaacagacagaggcaagccctgcatggcgcccagggtgccagtgactctggtt

SEQ ID NO: 9008 - DNA, 120 bp, synthetic construct
  source 1..120: mol_type = other DNA
tcccctgcctctttcccgtatcaggacccttgtcatcacattgggccacccagagaacccaggattttctccccattgcacgatcagctgcttggctgcctgaattccatgcagccttga

SEQ ID NO: 9009 - DNA, 120 bp, synthetic construct
  source 1..120: mol_type = other DNA
ctcatgtatatgagtcagcgttgactgtttaacctgttgcaagacactctgctgggtgctgcgacatggttaggttttctccacattagaaggtagaaggaagaaaaataagttctgaaa

SEQ ID NO: 9010 - DNA, 120 bp, synthetic construct
  source 1..120: mol_type = other DNA
cagggagtgcaggtggtttgttcttgcctcagatccaggagagcagcttttttgcctgaacccactcgtgaatttttcatatttttggagagctccttgtgaggacagccggcctgagca

SEQ ID NO: 9011 - DNA, 120 bp, synthetic construct
  source 1..120: mol_type = other DNA
ttactgattcctggagtctgcacagctacatagggtcagattcacgacctcccagctttaaccagccttcttgattagccgccatctaaggcccaactgtgcttcgtgacaggcctttga

SEQ ID NO: 9012 - DNA, 120 bp, synthetic construct
  source 1..120: mol_type = other DNA
taaaaaagaggacaaaagagatgagaccttcatcctagagcttaggatgtgaactgcgtccttctttaaatggaaatttctaaattacggtgtaccgaatgcatccacccttggcctcgt

SEQ ID NO: 9013 - DNA, 120 bp, synthetic construct
  source 1..120: mol_type = other DNA
ttttttctcccaggagtttattgctggtataaagaaatgccattgatttgggggggttgatctcacacctgacaaccatgtcatactttctatcagctctattgattgatcttttgatcc

SEQ ID NO: 9014 - DNA, 120 bp, synthetic construct
  source 1..120: mol_type = other DNA
tttttattttaaataaactttgattttagaatagttttggaattacaaaattcttacacaggtggcaccaagagtccccaggtgcccttcccccagcagccctattatcagcatctcaca

SEQ ID NO: 9015 - DNA, 120 bp, synthetic construct
  source 1..120: mol_type = other DNA
tgcaaatctaattagtctggcattgagcccgtcttaaaagtattaacagagccttaaactgtgctgttggacggggatgaagaaacgccttagaaagaaattaccggatggtgacaaagc

SEQ ID NO: 9016 - DNA, 120 bp, synthetic construct
  source 1..120: mol_type = other DNA
acagaccagaaccggctgcttccaccaccagcagaatacttcaagaagaccactcgggcctagggctctgcaagcaatatctgattttcagaaaaccatggctcacccacactctaccct

SEQ ID NO: 9017 - DNA, 120 bp, synthetic construct
  source 1..120: mol_type = other DNA
gtccttgagtctaactggggctgtgctgcctttgacgtgagctattcaaaatggcgggaggggcgaggcctctggagcaaggaaagagagtggtggctgtgtccagcaagtccctgttgc

SEQ ID NO: 9018 - DNA, 120 bp, synthetic construct
  source 1..120: mol_type = other DNA
gcgcaaccccacctgagtgaggcactgtgggcccagagtccaggtcagcgccaggggcagcaggggctggatctctggggaagttgaggaatgacatgtattccagggaagaattgggcc

SEQ ID NO: 9019 - DNA, 120 bp, synthetic construct
  source 1..120: mol_type = other DNA
cctggctctttcactgaaaacacttttcttgttttctttctccggcatgctggaagccggccaactcgccagttccattaacttaatgagggctgacagcctgcgacaaacgtcctcata

SEQ ID NO: 9020 - DNA, 120 bp, synthetic construct
  source 1..120: mol_type = other DNA
cgttaccatggtttttaaattaaagcatctgcagatgcgctgtgtccctgcaagggcaggcagatcgggaccccagggactggtccccatagccaaggtgttcagccgccctgtccccta

SEQ ID NO: 9021 - DNA, 120 bp, synthetic construct
  source 1..120: mol_type = other DNA
tttgggaagacacacacattcagactacagcaccttgctcctggggaaacagaggaaactggttcctttctttcggttctgggttatgtcaaaatgagttccctttgctgaatctgtttc

SEQ ID NO: 9022 - DNA, 120 bp, synthetic construct
  source 1..120: mol_type = other DNA
actgctgcacatcctgcccctggaccttactctagttcttctttcatccactggtgtattcctttggccggggacacacacatttgagaaacttcccagcttccctctatctgaggctca

SEQ ID NO: 9023 - DNA, 120 bp, synthetic construct
  source 1..120: mol_type = other DNA
tggctgaataaagaactgaataaaaataaccaagaagatcaaggaagggccctgccttccagatatcaggatgtggaagaggctatactaactaagatgttgcagtgtaggcacaagggt

SEQ ID NO: 9024 - DNA, 120 bp, synthetic construct
  source 1..120: mol_type = other DNA
cttcacttttaaagacttgtggttaattgggcccacctggacaattcaatatgatttccccatctcagtgttcatgaccttaattacagatacaaagtcccttttccatataacgtaaca

SEQ ID NO: 9025 - DNA, 120 bp, synthetic construct
  source 1..120: mol_type = other DNA
tcaataatattatattaaaaaagaaagcaagggagagaggaacacaggattcaggttgatggttacccaggataggggagacaaggatacagttggggtggagctgtcagggtccagcat

SEQ ID NO: 9026 - DNA, 120 bp, synthetic construct
  source 1..120: mol_type = other DNA
atcccaaggaatctacaataaaaatatctggaacttaggagttcagcacacaaaaatcacttgcatttctatacactaacaatgaacctgtgaaaaccaaaattagaaacaataccattt

SEQ ID NO: 9027 - DNA, 120 bp, synthetic construct
  source 1..120: mol_type = other DNA
aaagacacgaagagacatttcaccaaagaaaataaatagggaagaagtacaccaaaagatgatcaacttcgttagcaaagatggaaatgcagattaaaaccacagtgagcggtcactacg

SEQ ID NO: 9028 - DNA, 120 bp, synthetic construct
  source 1..120: mol_type = other DNA
agagggcatacaggacctcttggtactttttttttttttcccaacttcctaggagtctataattgtttcaaaataaaaagaagcaaaacaacacactgggaggtgcaggaaaccacacac

SEQ ID NO: 9029 - DNA, 120 bp, synthetic construct
  source 1..120: mol_type = other DNA
tgctttcccacagtgtccttcgatggcccccagtgacgtgtgttgaatgtggcgctggccccttgggcagcccagcagcccccaccccagccagcccagcctgggcagcactgggggctc

SEQ ID NO: 9030 - DNA, 120 bp, synthetic construct
  source 1..120: mol_type = other DNA
ggaaaggtttccttgtcccccttgcaggacatgtgacaggggtgtggctcgcttcttcagtgccccactactcaaagttctaggggagcatacagtcggacaggttgtggggctccgacc

SEQ ID NO: 9031 - DNA, 120 bp, synthetic construct
  source 1..120: mol_type = other DNA
gagccccgagtgttctcactggatgtggggccgcatccagaccttggcggtcatggccacaggctcccaaggccctaagtgacagccagtggtagacccttcacggtcaggcacctatga

SEQ ID NO: 9032 - DNA, 120 bp, synthetic construct
  source 1..120: mol_type = other DNA
gctcttaatcaagccctgtggcctcatgaaaccctaggagtgtcagacctctgactttgttgttcttcaagatcgtcttggctattcttggcccttcacgttgttaggaatattttagaa

SEQ ID NO: 9033 - DNA, 120 bp, synthetic construct
  source 1..120: mol_type = other DNA
agctcctgggctcaagcagtccgcccatctcagcctcctgagtagcaagaagcacaggtacacaccaccaagcctggctattttttaaatttattttttctacagatggggtctcactat

SEQ ID NO: 9034 - DNA, 120 bp, synthetic construct
  source 1..120: mol_type = other DNA
tccatctttaactcctgatggcggtcatttgtgtcccctcccccatctgatcagtcttcccaaaagtgtgtctgttttattagtctcttctgagaaccaaattttggctttgttgatttt

SEQ ID NO: 9035 - DNA, 120 bp, synthetic construct
  source 1..120: mol_type = other DNA
gtgttctgtatatgtcaagttgctaatcaggctgttcaaatttgtctctgacttgacaaagctttgactgcttttctatcagttactgacgaggtgtgttcaaatctcccaccattttct

SEQ ID NO: 9036 - DNA, 120 bp, synthetic construct
  source 1..120: mol_type = other DNA
tcacccaattacatgtggcatcatgctcaaagtccgacatcttgtgatctgccccttccagcctctgtccaattccttgtcccaaaattaatgctgtaagttttaggatattgatatgac

SEQ ID NO: 9037 - DNA, 120 bp, synthetic construct
  source 1..120: mol_type = other DNA
tcgtgtataaaattgtagatgctcgagggtattatctccctacagataattttattttcttctgccacgcgcaaagcaccttactccagtaggggattgagagaggtggggttaatgtga

SEQ ID NO: 9038 - DNA, 120 bp, synthetic construct
  source 1..120: mol_type = other DNA
ctttgtttccttttgtgatgctgtttctaaaaggatctttatttctagaagaaactttaggaggcaaaaacagcgcagcccccttaacagagtggctctggtggcaactttcccttgtta

SEQ ID NO: 9039 - DNA, 120 bp, synthetic construct
  source 1..120: mol_type = other DNA
cttcaccaagtagaaggcagcagccgtgtagctcactcagtcctcccgtggggtgggtcgtgcaaggcagcattagtgagagatgtgagggtgacatcagaatgactcagagatggtgcg

SEQ ID NO: 9040 - DNA, 120 bp, synthetic construct
  source 1..120: mol_type = other DNA
gccatgtctttcacaccaggccacaccttccactccaggccccaggattgacacaggcccgcccacagtctccttggtggagcccccacccatctgggccctggagccacctcagcctcc

SEQ ID NO: 9041 - DNA, 120 bp, synthetic construct
  source 1..120: mol_type = other DNA
atcaaggatatcccatcgtgataataactaccatggcttccagtcttgtggtgaaacctcagatgcgtagcctcctggccaagcgtctgcaatttcatgttgttggagcattcgttgaat

SEQ ID NO: 9042 - DNA, 120 bp, synthetic construct
  source 1..120: mol_type = other DNA
ttgctgggagcagcatggaggggtggggccagggtgaggggagcagtagcccgtggcagtgaggagctgtgtgtggctccaggggctcccctagcccacctctcaggatgcttcccttcc

SEQ ID NO: 9043 - DNA, 120 bp, synthetic construct
  source 1..120: mol_type = other DNA
ctccattatacagaaaggagaaacagagctcagcaactcatcttacagaaaggaggatcaaggcttagcatcccatcttatagaagagagagacagggctcagcgtccaatcttacagaa

SEQ ID NO: 9044 - DNA, 120 bp, synthetic construct
  source 1..120: mol_type = other DNA
ggggaatcaaggctcagcatcccatcttatagaagacagagacagggttcagcatcccatcttacagaaaagagaattaagactcaacatcccatttcatagaagagaactcagtatctc

SEQ ID NO: 9045 - DNA, 120 bp, synthetic construct
  source 1..120: mol_type = other DNA
cttgggccttgcaaattccccagcaaaaggcaggaaagccactagctcagtgctaaggtggctatttgagcactaatgatgactaccctgggcctcacccggtcacccagtggcctctcg

SEQ ID NO: 9046 - DNA, 120 bp, synthetic construct
  source 1..120: mol_type = other DNA
gggaggagaagtgatgcgtgtctttttgtcccgcagcaagcgcggaagccttacgatgtgcgggacgtcattgagcagtactcgcagggccacctcaacctcatggtgcgcatcaaggag

SEQ ID NO: 9047 - DNA, 120 bp, synthetic construct
  source 1..120: mol_type = other DNA
tgggccattgcacctccaaagtgcatgacatgaaatgaaagccagggagtaaggggaggtagaccccacccttagcaaagtggctccaaagtacattttacaaaggaatattcaggtttc

SEQ ID NO: 9048 - DNA, 120 bp, synthetic construct
  source 1..120: mol_type = other DNA
accacccctggtatttttgtcatagcatgctttttaaaaatgtcctagtaggtttaggcattttgactctcagctacctcccccagccctaccaccccacttcccaagcccagctggggt

SEQ ID NO: 9049 - DNA, 120 bp, synthetic construct
  source 1..120: mol_type = other DNA
ttgaagtctctgtggtttgaagcgggctgttatcttgccgaacagcaagtccgtctacatggactttatctgaaagtagctgagaggctaaaaatagaggagtttcagttgggcagggag

SEQ ID NO: 9050 - DNA, 120 bp, synthetic construct
  source 1..120: mol_type = other DNA
tcacatctgagcaacaaagggaagcattttccggagtccctgatccctagggcaaggtttaagaacaaggctggggccacatcctggtgccctgtcaggctctgagccggggccacgagg

SEQ ID NO: 9051 - DNA, 120 bp, synthetic construct
  source 1..120: mol_type = other DNA
cgtcacagtcctgcgggctcgtcaaaactcttgcttgacagtgcagtgtctgctccaacacagacctcccaactaccttgcaggacgtccccattccagggatcccttccacccctgtgc

SEQ ID NO: 9052 - DNA, 120 bp, synthetic construct
  source 1..120: mol_type = other DNA
gcttttgctgatatgaggagcacagtgggctgggagagtttctttcttctctgtttttgccggaaatgttcatggctgagagccggacacaggggagtcctgggtttccatgccgcagtt

SEQ ID NO: 9053 - DNA, 120 bp, synthetic construct
  source 1..120: mol_type = other DNA
ttgtgccagtatttatgtgtgagatacatacatgacataattttcctgtcttgtatggtcttcatcaggctttggtgtcaaatgtatgtgagcctcacagactaacttaagaagtgttcc

SEQ ID NO: 9054 - DNA, 120 bp, synthetic construct
  source 1..120: mol_type = other DNA
cattatgatctcttgtttatcctaggagttctgtagcaatgtggtttttgtcattgttataattgtagcacagctttctcataatgttgccctcttgtcagagaaagcaatccatatgat

SEQ ID NO: 9055 - DNA, 120 bp, synthetic construct
  source 1..120: mol_type = other DNA
gaggtaattttggggtatgatatgaagtaaagtctagatttgttttgttttattcttacttatggatatccaattgccccagaacatttgttgaaaataccccatttcctcctttgaatt

SEQ ID NO: 9056 - DNA, 120 bp, synthetic construct
  source 1..120: mol_type = other DNA
acttcaaaaaaaatattgactagaagtgctagagcagatcttctggggaaaatcattcaatcaatttccattagctctgagttttccatagatgccttttatcatgttgagaatatttcc

SEQ ID NO: 9057 - DNA, 120 bp, synthetic construct
  source 1..120: mol_type = other DNA
taaaattataggccttaggttatcaaaattcttttttcttagcacattaaaaatgttattgaactatcctttggcttccactgttaccgttgagaatgaagatgatgaattgttgctcct

SEQ ID NO: 9058 - DNA, 120 bp, synthetic construct
  source 1..120: mol_type = other DNA
catggactaacttgtgaacatgactttccaggacagaacttgttctccttctcttagcagtaatgcagttttctttacaatcttctcagggagtaggagatttttcattggccctcacaa

SEQ ID NO: 9059 - DNA, 120 bp, synthetic construct
  source 1..120: mol_type = other DNA
tattaaaatgaaaattccattcctggatctcagtcaccacttttttaagtgctgtgccacacagattcagctatgggacagcgctgctttggacgggcatggccgtgcgcgcgtgtgggg

SEQ ID NO: 9060 - DNA, 120 bp, synthetic construct
  source 1..120: mol_type = other DNA
tctggggttccaaagataaacctataatgaaagcagcgtttgacgctgagcaccgccaccctgttcctgcacaggggtgggtgtgtctgccagggagtccctgtgcccagcaagctccgg

SEQ ID NO: 9061 - DNA, 120 bp, synthetic construct
  source 1..120: mol_type = other DNA
caccatgagttctcgctttgtccaagattgagatgcgccaggtagttggtgtgctcatttcgaggtgtttctttttccccccagtaaagtgatgtcacgtggaggtgagtgtgatgggaa

SEQ ID NO: 9062 - DNA, 120 bp, synthetic construct
  source 1..120: mol_type = other DNA
ctcctgaatccaggtcttgctttccccagctatccagcggcttcctgcttctcttaccctcagcaatcccccaagaactgttcttttccccacactagcgtctctctttcttggggtgtt

SEQ ID NO: 9063 - DNA, 120 bp, synthetic construct
  source 1..120: mol_type = other DNA
ggcaggtggatgcccaggtcctcgccgcgccgctccgggcggtgggaccggcttcctgccctggctccgagcccgcaggtgggggcttccgcctcactttggacggtggcgtccacaaaa

SEQ ID NO: 9064 - DNA, 120 bp, synthetic construct
  source 1..120: mol_type = other DNA
ggcgcagaccaccctgtgaggcctcaattagaggagatgggggcttggggccccggagggctgagatccagctcatggctttggcagcattgttcttgcacgttcaggattagccgagta

SEQ ID NO: 9065 - DNA, 120 bp, synthetic construct
  source 1..120: mol_type = other DNA
attttttttttaactgaggcccttctggagggatggagggaccagaagtcacaaggagcagaaaggaaaaaagcaaaggaatccttctgaagcactgtgggcatttattcattcaccttg

SEQ ID NO: 9066 - DNA, 120 bp, synthetic construct
  source 1..120: mol_type = other DNA
gcggagggaaagacgggaggtccacagattaccttgtctcttgaaagcaagatgccaccagtggggaccaatgtacagagaccaggcccagcctagagtgggtatagctcatcacacccc

SEQ ID NO: 9067 - DNA, 120 bp, synthetic construct
  source 1..120: mol_type = other DNA
gtttggccagcatccctagaaatcagaagcccgcccctaattctgccagcttctggctttccgttgccatggtgacacccagcccccagctacagatcccgccaactcttccctgccatt

SEQ ID NO: 9068 - DNA, 120 bp, synthetic construct
  source 1..120: mol_type = other DNA
actgctgcgccgtccctcctgcgccacctgacagatgtggcggtgagaaaacgatggggcagggaaacgttcgccattcggtgccaataaaggccgcctttatcccgaccgtaaatggtt

SEQ ID NO: 9069 - DNA, 120 bp, synthetic construct
  source 1..120: mol_type = other DNA
acctcctggccacctgcccctgcgtacccaccacccttgctccggagctcgagggccctttccccactagcatctgaccgccttcttgtatgtcttgaaggttctttgccttctctgtgc

SEQ ID NO: 9070 - DNA, 120 bp, synthetic construct
  source 1..120: mol_type = other DNA
aaactgtgtatttttgacaagaaaatgaagcagctattggggaaaatgtaacttaatcgtagcagagaaaattgtttataaattggtcgcgttgtttgaactctcgcctctgtggctcag

SEQ ID NO: 9071 - DNA, 120 bp, synthetic construct
  source 1..120: mol_type = other DNA
cgttctccatcctgttacagcaaataccctcctctgcatttttcccttgtgtttgatttgccaggagcagaatttctgggttggaatcgggaacatttagaggagcttctcagtagagtt

SEQ ID NO: 9072 - DNA, 120 bp, synthetic construct
  source 1..120: mol_type = other DNA
cagctgtggccgtgaaggttccaagcttgaagtggaaagggttttgatgccaaggtccaacgcccagcttatcattgtgtaaatctgggcaccacacatagcctctctgtgactcagttt

SEQ ID NO: 9073 - DNA, 120 bp, synthetic construct
  source 1..120: mol_type = other DNA
acacatccctggtgctgccgccttctcttgcaaagacgtgagtcctatgggaccaaggccctgccttcacagtctcctttaatatttatcacctcctaaaggcctcgtctccaaacacag

SEQ ID NO: 9074 - DNA, 120 bp, synthetic construct
  source 1..120: mol_type = other DNA
ttcatgggcctgcccaatgtctattaattaagccccctggagactccaggagctgggggccttggctcagtgccctctcataaagttctgctctctggggaccgtggctctggcagccac

SEQ ID NO: 9075 - DNA, 120 bp, synthetic construct
  source 1..120: mol_type = other DNA
tggaggatgtggcagagttcccatggtgtgtgtagaatgatattccctccagaccacggtgccttctgggctctggagaatgcacctgtgttcccaggagctttaggggtacccaggtgg

SEQ ID NO: 9076 - DNA, 120 bp, synthetic construct
  source 1..120: mol_type = other DNA
tgcaacgtcattttgcagaagggaaactgaggcacaaaatactccactgccaccaagtcacccaactcagtggtagagctgagatctgaatgcaggccgcctggtcaagcccatctgtga

SEQ ID NO: 9077 - DNA, 120 bp, synthetic construct
  source 1..120: mol_type = other DNA
tgacaacacatgtggtcagggagaggcagcaccacagtcagatacaatgctgacagggacggcagagttccacaggcaatgaggcccccggggtaaaaatgaagcagtttgaaaacaaaa

SEQ ID NO: 9078 - DNA, 120 bp, synthetic construct
  source 1..120: mol_type = other DNA
aggattctctccctaaagaacaaatcagagttatgcacaaacaagctaatcacagccttatttataatagtgagaaattggaaacagaccgcatgtgcagcatttgcgggatgttggttc

SEQ ID NO: 9079 - DNA, 120 bp, synthetic construct
  source 1..120: mol_type = other DNA
tgaagtaaatgggacgatgaaggggcagtgtttaaatggctgctttagcccgtttggaagtctgctaattattctcttgaggaaagaaatgcaggttcattattataatgagctttgggc

SEQ ID NO: 9080 - DNA, 120 bp, synthetic construct
  source 1..120: mol_type = other DNA
gcctcttccgacctctctctgcctctttcccccatcacgatactccagtggccaccttccctgcccaccatgcctcctggcccccaatccggtcaccaacttgaggctgcccctgacaag

SEQ ID NO: 9081 - DNA, 120 bp, synthetic construct
  source 1..120: mol_type = other DNA
atcctagaaatacccatccttagtgtgaggagagcagcattccagacgcttctctgtatgttgcatagaaaaaggatggttagatacatgggcagattaatggatggacagattgttgta

SEQ ID NO: 9082 - DNA, 120 bp, synthetic construct
  source 1..120: mol_type = other DNA
cttcagttttctggggaagcctcaggggccttactgataagaactgtgtggaaggtaagcattcaaagttcttacatggtgaaaatatcttcattcaaccatggtgccctattgatagtt

SEQ ID NO: 9083 - DNA, 120 bp, synthetic construct
  source 1..120: mol_type = other DNA
cattccgccctcatttgatgggcacgacagctcctaggatctttctggagactccagatacatcttatatcttaagttctgcttaattccttgatcttctgtttatgtttggccagccag

SEQ ID NO: 9084 - DNA, 120 bp, synthetic construct
  source 1..120: mol_type = other DNA
cacgcatgaggctgtgcctgtgtctgtgccgctggagaccttcttgaggttcactgccctaaaggccgcatgaggggacagaaggtgaacacagggccctgcttggtctgacaagcccag

SEQ ID NO: 9085 - DNA, 120 bp, synthetic construct
  source 1..120: mol_type = other DNA
gactttaaaacataaaccagaccacagcactgcctgctcaagccccccatggcctccctcttccctaggaagcaatccaggcacccttccatggccgtgggccccacgcccccgaggccc

SEQ ID NO: 9086 - DNA, 120 bp, synthetic construct
  source 1..120: mol_type = other DNA
aggatgagagaaggaacagaggggaggaccaacatctcggctgatcctggtctatttttagtcggtggtgggctgtcactccggaggccagtgactgcgtcatcagtgccttttgatctt

SEQ ID NO: 9087 - DNA, 120 bp, synthetic construct
  source 1..120: mol_type = other DNA
tgggtgtgtgggtgggtggagagatggatgaatggataaagaggtggatagataaatggagggaaggagagctgaataaaaggatggtgggtgggtggatggatggatggggaaatgaag

SEQ ID NO: 9088 - DNA, 120 bp, synthetic construct
  source 1..120: mol_type = other DNA
gtagatccaaacacctgatctcagctcaggatcgccactccagtgccccatcccagagcctttgagagtggggacagggtgtcctgttgtagttgccaagcccaagaaagatgaggcacc

SEQ ID NO: 9089 - DNA, 120 bp, synthetic construct
  source 1..120: mol_type = other DNA
tgtggaaaagacaaacaggcgagtgaagtggataaagattcaggttgtgggagggagacttgaagggcaagttggccaagactaaaaagtggagtcaagctcagtgctggtgacgatgtt

SEQ ID NO: 9090 - DNA, 120 bp, synthetic construct
  source 1..120: mol_type = other DNA
tcctttcaagggttaacggtgcaagctcctcacggcaccagtgcgcttgcctttgacatgaaaatgtttttgcagcaggctcggatgccagcatttttgtggttgcagtcagatgttttt

SEQ ID NO: 9091 - DNA, 120 bp, synthetic construct
  source 1..120: mol_type = other DNA
ctcttttatcattaaagaatatgcattaacacctaaaacccactatcctggcaaaaaagtggcaggattgtctgaaaaacacatggccagccaccctgcaccctgagttccacaacatct

SEQ ID NO: 9092 - DNA, 120 bp, synthetic construct
  source 1..120: mol_type = other DNA
agggctgtggcccactaggaggacagacaatgacagagcattgtgtgctctatgcctgcccatgtgctgaggaaggagcaggagaggaagacaaaccagagtttaagtgaggagtgggca

SEQ ID NO: 9093 - DNA, 120 bp, synthetic construct
  source 1..120: mol_type = other DNA
agcacatttattttcaatcttttttattttctaaaattgccatcgatacttctccaaataccctataggaagcatcccacactcttggcatgtaatcagctccttgtaaatccatcctaa

SEQ ID NO: 9094 - DNA, 120 bp, synthetic construct
  source 1..120: mol_type = other DNA
tcctccacatcccctggctcttccttcatcccatactttcttctccctgacagagctgtcaaggggagtgcctacaccccacctccattgctgctcaccctcccctggcccgtgctgggc

SEQ ID NO: 9095 - DNA, 120 bp, synthetic construct
  source 1..120: mol_type = other DNA
ccctcctctgcagccacatccctgctctgcacacccccaccccagcaagtgtgtgtgagctctgtagtcgtgtcatggccccagtgatgtcctcattctatccctgtcccttcatggcag

SEQ ID NO: 9096 - DNA, 120 bp, synthetic construct
  source 1..120: mol_type = other DNA
ccctgaaagtggaatgaagactgaaagacagaaaatcagaacacccaagaaacatgcagactcaatccaaggacatccaatatcctgctattggaagttccagaaagggagatgagagga

SEQ ID NO: 9097 - DNA, 120 bp, synthetic construct
  source 1..120: mol_type = other DNA
agcttaagcctcaccttcatacaaggaagattctagtagctaagattgacaagtcgagaaaccatgtggccagcatgtcaccaaaagctgataagaggaccagtgatgggcttcccggga

SEQ ID NO: 9098 - DNA, 120 bp, synthetic construct
  source 1..120: mol_type = other DNA
gaggctgcaacatggaggtggtacctgaagaaggggtgtggatgaggttgcctggcaagagattgcagggagaggagagagtgagaatggggccactcaaggggtgaacagggccttgca

SEQ ID NO: 9099 - DNA, 120 bp, synthetic construct
  source 1..120: mol_type = other DNA
tggaatcacaccctggacgcttccttctttgggttagatgtcgtcgtcttcaacaaatattttctgaatgtctgctatgtactagactctgggaacacaggggaaagtatgtggacctgc

SEQ ID NO: 9100 - DNA, 120 bp, synthetic construct
  source 1..120: mol_type = other DNA
ccaccactgtgctcccagagggagaacagagaggggtgcagagggccagagaggcacggggctcccctgggcacccctcgtcttggggcccctgccctgcctccactcagaatcccacta

SEQ ID NO: 9101 - DNA, 120 bp, synthetic construct
  source 1..120: mol_type = other DNA
ggacggagtctctattccaggcaggcaaacactcagcttaattcagggttctgttgattaaaaaaaaaaagtggggtcgggggggcgggggagagcggctatggagacaagtggctgttt

SEQ ID NO: 9102 - DNA, 120 bp, synthetic construct
  source 1..120: mol_type = other DNA
agtaaaggcatgaaaaacatggaaacatgtaaatcaactagggtaaagtggtcaggagaaaagaggagaccaaaaatatgttgacaaaggtttggaagctgggaagcaggaggacagatg

SEQ ID NO: 9103 - DNA, 120 bp, synthetic construct
  source 1..120: mol_type = other DNA
aaaggccaagagaattttcaacatgagtgaaagaagttctagcattacagctgctcagcatgcctacagtgcaaacagtcctgctaagactccaggaagaaatcccagaagaaaaaaaaa

SEQ ID NO: 9104 - DNA, 120 bp, synthetic construct
  source 1..120: mol_type = other DNA
ctggtgggtgcctcctccccacctttagcaagggttgacagagggatctgggctcttccctgggcaggcatcccagagctatgacctgaatgatatcttagatgatctccaaggccccgg

SEQ ID NO: 9105 - DNA, 120 bp, synthetic construct
  source 1..120: mol_type = other DNA
acctcagcagacgtgatgggtgcctgtgcccacagttgggccatgagaagaagtatgtggcccggcctgccctacaccatcagggggtgcttggaccagtggcggctggaaataacccat

SEQ ID NO: 9106 - DNA, 120 bp, synthetic construct
  source 1..120: mol_type = other DNA
cagtgggggttgcccggcatcttggcagatgggcagcgttagagaagccttggacctggccctgcaaatggaggtaccagagggctgaactagatgagggacttgaaggctcagatgcct

SEQ ID NO: 9107 - DNA, 120 bp, synthetic construct
  source 1..120: mol_type = other DNA
ggggcagaagccatgcccagctcagggggcttcactccactctcccactttgacctggtccctcccctctcccccagagtgacctggacactagcctcctcccagtgggagacagatgtg

SEQ ID NO: 9108 - DNA, 120 bp, synthetic construct
  source 1..120: mol_type = other DNA
gcattcgtgcaggatgggctcagcgcctgctgtgcctggcgtggctgtgtgcatggcatggtggtggcatggtgggagtggtgtggcacatggtgtggcacatggcatggctggggctgg

SEQ ID NO: 9109 - DNA, 120 bp, synthetic construct
  source 1..120: mol_type = other DNA
ctgccccaggaatgcaggttccggggcaagaatccagccctggctggttgaagtccatcccaagtctccctccccacgaggctcctgcagatgccaggaatggggctggattccagattc

SEQ ID NO: 9110 - DNA, 120 bp, synthetic construct
  source 1..120: mol_type = other DNA
gcatgctggggcaggggtgtctttagaaagggtactgggagggccctggcaagggacttaagtaattacttaaaggagggaaagggtggcctggggctcacagaggaaaagccttcctca

SEQ ID NO: 9111 - DNA, 120 bp, synthetic construct
  source 1..120: mol_type = other DNA
gtgtctttgaaatgtctttatttggcgggagaacgtcttcatagggtacttataccatgaaaaaccctgtacacagactaattttgaagcaaacatgtgaggcgttcacagaaagggttc

SEQ ID NO: 9112 - DNA, 120 bp, synthetic construct
  source 1..120: mol_type = other DNA
gggccggcggcgagggaccctcagccgaggctggtatctcgagaacagcagggatgcctcaaaggttctcgcccagcaagtggacattgtggtgtgggagatcagcaggtgccggtgctt

SEQ ID NO: 9113 - DNA, 120 bp, synthetic construct
  source 1..120: mol_type = other DNA
ggaagtatctaaggtctgcttgtggacttccggggacagcgaggggtattgctggggtcctaggggctggtgcgctcagaggttccagatggcccagcaagtggctgagggcccagggta

SEQ ID NO: 9114 - DNA, 120 bp, synthetic construct
  source 1..120: mol_type = other DNA
cagccgtggtgcggactttgttgtttgctcagagtacaaagaagaggccttctccgggttcttagcagacgagcgcgacctctccgaccagggagacagacaagaggggaggttatgagg

SEQ ID NO: 9115 - DNA, 120 bp, synthetic construct
  source 1..120: mol_type = other DNA
tccatcattccataagtggtggggtatcagcaggataacctgcaaaagtaagtctgtaggtcagaaatcaatcccaggcgattcaaagatttagggggtaaaacacaaatcaaaaaagta

SEQ ID NO: 9116 - DNA, 120 bp, synthetic construct
  source 1..120: mol_type = other DNA
ttctgcagaaggatttggcccaggctgggagggaaggctcagcctggctgttgcctggaacaagcggggaacaggttgggggcatagccaggcagtgaggtggttgtgacagtccaggca

SEQ ID NO: 9117 - DNA, 120 bp, synthetic construct
  source 1..120: mol_type = other DNA
ctccaacccttgggcagcccagagaacaacctaatggaaagtgaagggaattgtacaagtgtgtacaagggtgcagggtggttcctgccttcttgcacgcacagtctcccacactcatac

SEQ ID NO: 9118 - DNA, 120 bp, synthetic construct
  source 1..120: mol_type = other DNA
cacggtcgacttttgtccaagaactgaagcactaaagcaaagtcaaacacaatcgctccatgccctgccacgaaccgcgaccttaccacgtgctgtgacctattgccacttgtgcccagc

SEQ ID NO: 9119 - DNA, 120 bp, synthetic construct
  source 1..120: mol_type = other DNA
gtgcttctcaggctcctccatcgccaaaaaaaaccaaacgtgccagcgagatgaaggcgccctgcccgcagagtggtggggtgggactcttcagggacacgtgctgtgacaagtgcttga

SEQ ID NO: 9120 - DNA, 120 bp, synthetic construct
  source 1..120: mol_type = other DNA
cctttgatctgctacgctctcgtaggtctctgggcctcagtttcctcatgtgcaccctgaaggctgagagacctcccatgacccctaccaggcatgagcaggtcgtgggactgagagggc

SEQ ID NO: 9121 - DNA, 120 bp, synthetic construct
  source 1..120: mol_type = other DNA
accgggccagctcccgcctgctgcctgtgcttagggccagtggttgacgttgctgtggctgagtcatcttcgtgcctctctctggagccatacgtttccctgaagcagctctgctgttca

SEQ ID NO: 9122 - DNA, 120 bp, synthetic construct
  source 1..120: mol_type = other DNA
tagctcactgcagaaccagcccctgagaaggtggaggccacatggctagccagagggcacgctctagggcactgctctgaccacagaatgtgggtgcagatggtgtctgggaaaatagtg

SEQ ID NO: 9123 - DNA, 120 bp, synthetic construct
  source 1..120: mol_type = other DNA
aggccccaataccccatggaccatgctgtctggcacagcctgcacttgggggctcagcaaggccacctcttcctggccggtgtgggggccccgtctcaggtctgagttgttaccccaagc

SEQ ID NO: 9124 - DNA, 120 bp, synthetic construct
  source 1..120: mol_type = other DNA
cctacacaggacaggggttccttctgggcattacatcgcatagaaatcaataatttgtggtgatttggatctgtgttttaatgagtttcacagtgtgattttgattattaattgtgcaag

SEQ ID NO: 9125 - DNA, 120 bp, synthetic construct
  source 1..120: mol_type = other DNA
gggggcccttgggaatttatttttttgggtacaaataatcactccatccctgggagacttgtggggtaatggcacggggtccttcccaaacggctggagggggcgctggaggggggcgct

SEQ ID NO: 9126 - DNA, 120 bp, synthetic construct
  source 1..120: mol_type = other DNA
cggttcctgtcacaaaggcgacgacaagtcccgggtccccggagccgcctccgcgacatacacgagtcgccctccgttatcctgggccctcctggcgaagtccccggtttccgctgtgct

SEQ ID NO: 9127 - DNA, 120 bp, synthetic construct
  source 1..120: mol_type = other DNA
ccttaagagaaaatgttaaggaagtcttaggcaaggccttgtttgttcatcactttagtttctctctcccgggatggctgagaatgtgatgtttcctctgttgtcaaggagactacaccc

SEQ ID NO: 9128 - DNA, 120 bp, synthetic construct
  source 1..120: mol_type = other DNA
agtgagtcaggctctctcttccggaagcaaaatcaattgctgagatcactctggggaaaatacccaccttatttggaaagaagcactgatcaattgatgtctattttttttttttttgag

SEQ ID NO: 9129 - DNA, 120 bp, synthetic construct
  source 1..120: mol_type = other DNA
tctcagctcattgcaacttctgcctccggggttcaagggattctcgtgtctcagcctcctgggtagctaggatacgggcacccgctaccatgcctggctaattttgtacttttagtagag

SEQ ID NO: 9130 - DNA, 120 bp, synthetic construct
  source 1..120: mol_type = other DNA
ggcgtgagcccccgaacccggccactcccagctaagtttaaattttttgtttgtttgttcgtttgtttttattttttgagacagagtctcccgcccaggctggagcgcagatcactgcat

SEQ ID NO: 9131 - DNA, 120 bp, synthetic construct
  source 1..120: mol_type = other DNA
gtgaccacagcagattccaaagctcgactcattttcttctctcttccttcccttttttcttttctttttttttttttttttgacagagtctcgctctgttgcccaggctggagtgcagtg

SEQ ID NO: 9132 - DNA, 120 bp, synthetic construct
  source 1..120: mol_type = other DNA
ggattgcttgagcccaagagtttgagaccagcctgggcaacatagtgagacacctgtctctgcaaaaaataaataaaaagttagctgagtgtgatggtgcacccctctagtcacagctgt

SEQ ID NO: 9133 - DNA, 120 bp, synthetic construct
  source 1..120: mol_type = other DNA
caggcatgagccactgcacctggtcatgtggtcatattttctttttcttttttttttttttttgagacagagtctctgtcgcccaggctggagtatggtggcgtgatctcagttcactgc

SEQ ID NO: 9134 - DNA, 120 bp, synthetic construct
  source 1..120: mol_type = other DNA
tgttattgcggccgggcatggtggctccagcctataatcccagcactttggtcaggagttcaaggccagcctggccaatatagtgaaactccatctctactaaaatacaagaaattacct

SEQ ID NO: 9135 - DNA, 120 bp, synthetic construct
  source 1..120: mol_type = other DNA
tgcagtgggccgtgatcgctccactgatcgctctaaagtgagaccctgtctcaaaaaaaaagaaaatagaagaaaactaaatacattcaataagactttgatctcttttccaaggtgtaa

SEQ ID NO: 9136 - DNA, 120 bp, synthetic construct
  source 1..120: mol_type = other DNA
atttcatttgttgtgcttgcttaattccctgggaatcagactgttcctgatcggatgacatttctggttaattctttagttggcaggaaatagacacaggaaacgtggtcagtttctgat

SEQ ID NO: 9137 - DNA, 120 bp, synthetic construct
  source 1..120: mol_type = other DNA
attaaatggctctattgttttttcaattgatgtgaatttcacataacatgaaattaaccagctcagtggcattaatacatctgcaatgctgtgtggccaccacctctatcttgttccaaa

SEQ ID NO: 9138 - DNA, 120 bp, synthetic construct
  source 1..120: mol_type = other DNA
atgcctagaatcccagcactttgggaagctgaggtaggcggatcacttgaggccatgagtttgagaccagcctgctcaacatgatgaaacttctatctctactaaaaaaaaaagtgggat

SEQ ID NO: 9139 - DNA, 120 bp, synthetic construct
  source 1..120: mol_type = other DNA
atggccaagtggactgcgacaacggctcagacgagcaaggctgtcgtaagtgtggccctgcctttgctattgagcctatctgagtcctggggagtggtctgactttgtctctacggggtc

SEQ ID NO: 9140 - DNA, 120 bp, synthetic construct
  source 1..120: mol_type = other DNA
ccaatatcacgccattgcactccagcctgggggacaagagcgaaattctgtctcaaaaaaaaagaagaagaaggccgacaaactatgtaactctgcctttctccatggtccagaacacac

SEQ ID NO: 9141 - DNA, 120 bp, synthetic construct
  source 1..120: mol_type = other DNA
aagcattttagagaagggatactcaacccaaaataaggacagcaattctataaattgtgctaccatcttgcaggtctcagtttaacagctttacacctattagcgcaccagtgctcatag

SEQ ID NO: 9142 - DNA, 120 bp, synthetic construct
  source 1..120: mol_type = other DNA
agtctcactctgtgatttttttcatctctaaatttcctacatccatatggccaccatgaggccccaggctggccgatggttgctgttagcttattgggaaatcactgtttggaaggtgct

SEQ ID NO: 9143 - DNA, 120 bp, synthetic construct
  source 1..120: mol_type = other DNA
ctgcttctttttctctggttgtctcttcttgagaaaatcaacacactctgtcctgttttccagctgtggccacctgtcgccctgacgaattccagtgctctgatggaaactgcatccatg

SEQ ID NO: 9144 - DNA, 120 bp, synthetic construct
  source 1..120: mol_type = other DNA
atcaaagagtgcggtgagtctcggtgcaggcggcttgcagagtttgtggggagccaggaaagggactgagacatgagtgctgtagggttttgggaactccactctgcccaccctgtgcaa

SEQ ID NO: 9145 - DNA, 120 bp, synthetic construct
  source 1..120: mol_type = other DNA
tgggcttgggcatggtggcatactcctgtagtctcagctaatcaggaggctgaggaaggaggatcgcttgggcccaggagttggagactgtagtgagctgtgatcacaccaccacacttc

SEQ ID NO: 9146 - DNA, 120 bp, synthetic construct
  source 1..120: mol_type = other DNA
ggctcaagctatctgcctgccttggtctcccaaagttctgggattacaggcatgagctacagcgcccggacttttgttgttttatatctatatatctatatataacttgttttatgtata

SEQ ID NO: 9147 - DNA, 120 bp, synthetic construct
  source 1..120: mol_type = other DNA
gaccagtctgcatcccctggccctgcgcagggaccaacgaatgcttggacaacaacggcggctgttcccacgtctgcaatgaccttaagatcggctacgagtgcctgtgccccgacggct

SEQ ID NO: 9148 - DNA, 120 bp, synthetic construct
  source 1..120: mol_type = other DNA
gtcaggtgatgactggggatgacacctggctgtttccttgattacatctcccgagaggctgggctgtctcctggctgccttcgaaggtgtgggttttggcctgggccccatcgctccgtc

SEQ ID NO: 9149 - DNA, 120 bp, synthetic construct
  source 1..120: mol_type = other DNA
tattattttttagagacagggtgctgctctatcttccagcctgtagtgcagtgcagcctccatcatagctcgctgcagccttgacctcctgggttcacgtgatcgtcccgcctaagcctc

SEQ ID NO: 9150 - DNA, 120 bp, synthetic construct
  source 1..120: mol_type = other DNA
ctccccggacccccaggctccatcgcctacctcttcttcaccaaccggcacgaggtcaggaagatgacgctggaccggagcgagtacaccagcctcatccccaacctgaggaacgtggtc

SEQ ID NO: 9151 - DNA, 120 bp, synthetic construct
  source 1..120: mol_type = other DNA
gatgcctgcgggtgaaggtgggcccgctatggccagcgtccctttttatttttatttatttatttatttgagatggaatctcgctctgtcgcccagactgtagtgcagtggtgcgatcac

SEQ ID NO: 9152 - DNA, 120 bp, synthetic construct
  source 1..120: mol_type = other DNA
tgtggcccagtgtgtttggccacataactgccaggccagagggaaagagactctcagactgtctccactcagatacaaatgtgtgtgttgtgtgcgtgtgttctggtctcatatttgttt

SEQ ID NO: 9153 - DNA, 120 bp, synthetic construct
  source 1..120: mol_type = other DNA
actggactgactggggaactcccgccaagatcaagaaagggggcctgaatggtgtggacatctactcgctggtgactgaaaacattcagtggcccaatggcatcaccctaggtatgttcg

SEQ ID NO: 9154 - DNA, 120 bp, synthetic construct
  source 1..120: mol_type = other DNA
agcacttaggtggcggatagacacagactatagatcactcaagccaagatgaacgcagaaaactggttgtgactaggaggaggtcttagacctgagttatttctattttcttctttcttt

SEQ ID NO: 9155 - DNA, 120 bp, synthetic construct
  source 1..120: mol_type = other DNA
ttcttttttttttcgttttttggagacggaatttcacctttgttgcccaggatggagtgcaatggcacgatatcgcctcaccacaacctctgcctcctgggttcaaaccattttcctgcc

SEQ ID NO: 9156 - DNA, 120 bp, synthetic construct
  source 1..120: mol_type = other DNA
cccaggaggtggaggctgcagtgagccaagatcatgccactgcactccagcctgggcgacagagtgggactctgtctcaaaaaacaacaaaaaaaaagttctggaaatggatggtggtga

SEQ ID NO: 9157 - DNA, 120 bp, synthetic construct
  source 1..120: mol_type = other DNA
tttggacagatatcatcaacgaagccattttcagtgccaaccgcctcacaggttccgatgtcaacttgttggctgaaaacctactgtccccagaggatatggttctcttccacaacctca

SEQ ID NO: 9158 - DNA, 120 bp, synthetic construct
  source 1..120: mol_type = other DNA
tgacttttctcatcctctgagaaagtctcagttgaggccagcacctccctcaagtgaattgaatctcccttttgaacaacaacaaataacaatatgacccagacgtggtggctcacacct

SEQ ID NO: 9159 - DNA, 120 bp, synthetic construct
  source 1..120: mol_type = other DNA
cctggccgtgtctggccttttttagttatttcttttttttttttttttttttttgagacagagtcttactccgtcgcccaggctggagtgcagcggtgcgatgtctgcgcactgcaagct

SEQ ID NO: 9160 - DNA, 120 bp, synthetic construct
  source 1..120: mol_type = other DNA
ttattaataattatttttgggtttcttttttttgagacagggtcttactctgtcatccaggccatcctgtctgtctgtcatcccagtgatgggatcataccttgctgcagcctctacctc

SEQ ID NO: 9161 - DNA, 120 bp, synthetic construct
  source 1..120: mol_type = other DNA
cttcaggcatctgcccaaaaaggccaggactaaggcaaggagagggagggattcctcagtactcagcttttcacagaggctccaaaaggctaaggaatccagtaacgttttaacacaatt

SEQ ID NO: 9162 - DNA, 120 bp, synthetic construct
  source 1..120: mol_type = other DNA
tgagccaccgtgcccagccaaaacttttttatttttatttttttgggacacggtctcactgtgtaccccagactggagtgatagagtgctgtcatggctcactgcagcctcaacctccct

SEQ ID NO: 9163 - DNA, 120 bp, synthetic construct; identical to SEQ ID NO: 2066
  source 1..120: mol_type = other DNA

SEQ ID NO: 9164 - DNA, 120 bp, synthetic construct
  source 1..120: mol_type = other DNA
ttttttttttttttttggttccagagtagctgaaatctttgttcagttacaagcaggataaaatggaaactgcctgggagaggctgagaaaccttcttgcttgggggaggtggggcactg

SEQ ID NO: 9165 - DNA, 120 bp, synthetic construct
  source 1..120: mol_type = other DNA
tgctcattttaataaaatgcacaagtaggttgacaagaatttcacctgcaaccttgtcaaccacctagaataaaagcctctgcagccctcccctaaagactcatcaatgtgaggctcaag

SEQ ID NO: 9166 - DNA, 120 bp, synthetic construct
  source 1..120: mol_type = other DNA
gaactggttcccttgcagggggctgtgtggagaggcgcgctctccctgcctcacccatgctcatcctaactcggttaccatcacatctcttttttctttttttcttaaattttaagaaaa

SEQ ID NO: 9167 - DNA, 120 bp, synthetic construct
  source 1..120: mol_type = other DNA
agatttgcctcttttctgtttgtttgttttgagatggagtctcgctctgtcgcccaggctggagtacagtggctcaacctcggctcactgcaacctctgcctcccgggttcaagcaattc

SEQ ID NO: 9168 - DNA, 120 bp, synthetic construct
  source 1..120: mol_type = other DNA
cagaacttggggaggttgaggcaggagaatcacctgagctcagagttcaagaccagcctgggcagcacagcaagaccccatctctgcaaaaaataaaaatttagcccagtgtggtgatga

SEQ ID NO: 9169 - DNA, 120 bp, synthetic construct
  source 1..120: mol_type = other DNA
ccagccgtgtttcctgaatgctggactgatagtttccgctgtttaccatttgttggcagagacagatggtcagtctggaggatgacgtggcgtgaacatctgcctggagtcccgtccctg

SEQ ID NO: 9170 - DNA, 120 bp, synthetic construct
  source 1..120: mol_type = other DNA
ctacccacttccattcccgtggtctccttgcactttctcagttcagagttgtacactgtgtacatttggcatttgtgttattattttgcactgttttctgtcgtgtgtgttgggatggga

SEQ ID NO: 9171 - DNA, 120 bp, synthetic construct
  source 1..120: mol_type = other DNA
ccagcactttgggaggctgagctggatcacttgagttcaggagttggagaccaggcctgagcaacaaagcgagatcccatctctacaaaaaccaaaaagttaaaaatcagctgggtacgg

SEQ ID NO: 9172 - DNA, 120 bp, synthetic construct
  source 1..120: mol_type = other DNA
ctctgaaatgcctcttctttatgtacaaagattatttgcacgaactggactgtgtgcaacgctttttgggagaatgatgtccccgttgtatgtatgagtggcttctgggagatgggtgtc

SEQ ID NO: 9173 - DNA, 120 bp, synthetic construct
  source 1..120: mol_type = other DNA
cggtctttcctcgcagctccggggcaagctaggagtgggatggaagtcgaggtccctaattttttaaggggagggtgcggggagaaggggtagtatgcggaaacagagcgggtatgaagc

SEQ ID NO: 9174 - DNA, 120 bp, synthetic construct
  source 1..120: mol_type = other DNA
ttaaccgtttggggtgagggccttgagctttggatatgacaggagggaggagagaccaggatggactgggaacccaggcttccttcaggcctgggctgtgaatacagcttggggtgatct

SEQ ID NO: 9175 - DNA, 120 bp, synthetic construct
  source 1..120: mol_type = other DNA
aaaaacccattcagtcccgtttgactccggaaattcggtgagaatgaaaataagtttttaaggcttggagagttaggcacttttagagtttcaggaaggtggagtgtaatgcaatttttt

SEQ ID NO: 9176 - DNA, 120 bp, synthetic construct
  source 1..120: mol_type = other DNA
attgcagagactgtggtactggggaccatggggtctctttgggagaaagtttttgctttgtggaccaggtgactatctttcacataaatagaaatagcaaacagttgcataggtcttatt

SEQ ID NO: 9177 - DNA, 120 bp, synthetic construct
  source 1..120: mol_type = other DNA
tcaggagaccccctccctcaactgagaaggtagatttctgtatacaggctctccttttccctgcttgcctgatccagaattatggcaatgagagcagaaggtcttacttaaacaatactc

SEQ ID NO: 9178 - DNA, 120 bp, synthetic construct
  source 1..120: mol_type = other DNA
gaggagatttattctgacccatcataggtcacttgaagtcacttctaggtctagactcgctgaaataaggtcattctaaacaaacagcaaataattctaaaaataattcctgttaagccc

SEQ ID NO: 9179 - DNA, 120 bp, synthetic construct
  source 1..120: mol_type = other DNA
ggctgatcttgagctcctgaccttgtgatccacccacctcagcctcccaaagtgctggaattacagtcgtgagccatcgcgcccggctcccattttcttttcttttcttttctttttttg

SEQ ID NO: 9180 - DNA, 120 bp, synthetic construct
  source 1..120: mol_type = other DNA
cctttttttccttaataaccctttcttgtgggaagtctgtgttgctatctaaccaccgtcctttctgctaagagtccagacagttttctctcctttgatagaatgcactcaacacattaa

SEQ ID NO: 9181 - DNA, 120 bp, synthetic construct
  source 1..120: mol_type = other DNA
ccacctgcctcagtctcccaaagtgctgatattataggcgtgagccaccgcacccagcctattttattttattgattaatttatttgtttgtttgtttattttgagccagggtcttgctc

SEQ ID NO: 9182 - DNA, 120 bp, synthetic construct
  source 1..120: mol_type = other DNA
gaaagaaagaaaggtctttgggactcggagggctacagaggttgggggagagaggtcactgtgagtccttctgttgttgtggatctgatctccaagggctttgcaggctcagcctaggtt

SEQ ID NO: 9183 - DNA, 120 bp, synthetic construct
  source 1..120: mol_type = other DNA
caaggtactaacgagattctgcaatgcaagatgcagtctggcacagatgaattgacagcatacagtatagaattagaatgtcagagctggactagaagttgaatgaatgaatgagtaggg

SEQ ID NO: 9184 - DNA, 120 bp, synthetic construct
  source 1..120: mol_type = other DNA
agctcccccggtcacccggagacccctccagtcgcctaaacctggcttcatgtccagcgcccttctgagtttctgggagacactgttcagaggacaggctgaggaaacaggcatttgagt

SEQ ID NO: 9185 - DNA, 120 bp, synthetic construct
  source 1..120: mol_type = other DNA
cagccaaaaaaaattttttttaattagccaggtgtggtgagttgctcttgtagtcttagctacttaggaggctgagataggaggagcacttgagttcaaggttacagtgagctgtgatcg

SEQ ID NO: 9186 - DNA, 120 bp, synthetic construct
  source 1..120: mol_type = other DNA
agccaccactcccagcccacatggactttctttcagggctttggcctgtgctatcatcatctgctattccctgacccttcacctggctaatgtttgttcatcttgcaggactcaatttat

SEQ ID NO: 9187 - DNA, 120 bp, synthetic construct
  source 1..120: mol_type = other DNA
aagggatccctaagcatgcatacacctcctctcagtcaccgctagtaaaatgagtctatcacgagaagtatacatgggtcacatgctcctggccaggccctgtctatcctctagggcttt

SEQ ID NO: 9188 - DNA, 120 bp, synthetic construct
  source 1..120: mol_type = other DNA
gggttcaagtgattctcctgcctcagcctcccaagtagctgagattacaggcgtttgtcaccacaaccagctaatttttttttttttttttgagaacggagtcttgctctgtcgcccagg

SEQ ID NO: 9189 - DNA, 120 bp, synthetic construct
  source 1..120: mol_type = other DNA
gcttttatgttgctttgcttttgacctctgacccaacacatgcctcctttccctctgaagtcttgattttctccctggcttttctccaccttctgggtgttcctttttggccttctttgc

SEQ ID NO: 9190 - DNA, 120 bp, synthetic construct
  source 1..120: mol_type = other DNA
ctccccttggccacctcccttgcgcttgctcatctcatgcccaggcgctgagggttctcagctggggcaggagagatggggtcctgaggcctgggtgaagttccaagccctggggctcgg

SEQ ID NO: 9191 - DNA, 120 bp, synthetic construct
  source 1..120: mol_type = other DNA
agcttctgctatagcctgggagttcccagccttttagtccctgtcaggatagtttcattcttgttcagctttggggcccacacaatttcagtacaaaaggggtatgcccatctcaccctg

SEQ ID NO: 9192 - DNA, 120 bp, synthetic construct
  source 1..120: mol_type = other DNA
tgggagagtacttgtgaactgtggggtgacatgaatgttgtcagttgtcagggaaggcaagtcatgtctagtgggactgagatagagctaccctgcagtgcaaaggtaaggggtaagcca

SEQ ID NO: 9193 - DNA, 120 bp, synthetic construct
  source 1..120: mol_type = other DNA
atgcccatgtgtcaccccagatcaattactaatcaaaatatccaagactttgggcatttgcagttttgaaagcccccttcctccaagcaatgttgatgcccagtgagggttgagatcact

SEQ ID NO: 9194 - DNA, 120 bp, synthetic construct
  source 1..120: mol_type = other DNA
tgctgaggagtaaggtgtgtgggaagagtagaggaaggagtagagcacatcgaggttgctggttggtgagggggctatgatgaggatactctactcaaacatgtattgagaaccttttgt

SEQ ID NO: 9195 - DNA, 120 bp, synthetic construct
  source 1..120: mol_type = other DNA
agagactggttgtgaggccgctgcagttatccaggtgggggttggtggtgagcagaccagagagctggaggtagaacatagaacagataacaattctggaggtaggaaccacaaggactt

SEQ ID NO: 9196 - DNA, 120 bp, synthetic construct
  source 1..120: mol_type = other DNA
tggtttctgtgggaatgtgacttgaattaactcttgggagaaaaatcacagaaatcaggaaaggggggccatggggagggggcagtgagtcacgtttccatgtgtatttttcaaactttc

SEQ ID NO: 9197 - DNA, 120 bp, synthetic construct
  source 1..120: mol_type = other DNA
cctctgtctgggactcctctaacagctgtggggagggtgccaggatccccattttgcatacagtagctgaggctcagccaggaaaatgggtgggaaccttaaggatggtgggcagatggt

SEQ ID NO: 9198 - DNA, 120 bp, synthetic construct
  source 1..120: mol_type = other DNA
gcaactgttgtcgtctggtaaatatttgccccaacaggatctggggctggagcactggcgtcagccgaggtagttgccccctcctcaatttatgagtctcccctctgttcagttccctat

SEQ ID NO: 9199 - DNA, 120 bp, synthetic construct
  source 1..120: mol_type = other DNA
taatgtggatctagaagggaggtggttgggctgcacgatgccttaagactcctcccagctctgaagttctacttctaggcaatgaatgatgaaacgctggcccaagtgcagtcccttccc

SEQ ID NO: 9200 - DNA, 120 bp, synthetic construct
  source 1..120: mol_type = other DNA
caggctccacaaacatttggcccacactgggttgagggtgagggagaaagggaatccttttctgcctcacttcctggaaatgtgtaggggcgtgagctatggggcgagggggccctctcc

SEQ ID NO: 9201 - DNA, 120 bp, synthetic construct
  source 1..120: mol_type = other DNA
tggcactgagctgcagtgctgtcttggaggttttgaccctgcctggctgtgtgactttgggcaaatctttcctcctctggcctcagaattccacttataaagaaaggggcttattcctca

SEQ ID NO: 9202 - DNA, 120 bp, synthetic construct
  source 1..120: mol_type = other DNA
actgtcaaggttataactatcacctgcacatgagtgactcagcacttcaatcattgtttaataccctgtagtcaaaggatgaataagaccctccctcaagaactcactataaagagattc

SEQ ID NO: 9203 - DNA, 120 bp, synthetic construct
  source 1..120: mol_type = other DNA
ttaggcaatgcctgaagatatttttgattgtcataactgggaatggaagtgctactggcctaaagtcgggagaggctagggatgttacaaaccatctcagagtacaaagaaccttctctg

SEQ ID NO: 9204 - DNA, 120 bp, synthetic construct
  source 1..120: mol_type = other DNA
aaagcagggaaataatttccaacccatgaggttgttgtatggacccagttgagaatgtatgaaaacatgcaacaactataaagattgttaaaatgtaagttattcactgtgtgagcatta

SEQ ID NO: 9205 - DNA, 120 bp, synthetic construct
  source 1..120: mol_type = other DNA
ggtggctggcacccgtgatcccagcactttgggaggctgaggtgggaggatcacttgactccaggagttcaagaccaacttggcaacatagtgagacccccatctcttaaaaaaataaag

SEQ ID NO: 9206 - DNA, 120 bp, synthetic construct
  source 1..120: mol_type = other DNA
aaaaaaaaaaaaaaattctcaaaccgtccgttggacccaaccactgcatgctgatttcactcatgcatgctccagctcccagacttctgggatccctttggaattcatccaattcagagt

SEQ ID NO: 9207 - DNA, 120 bp, synthetic construct
  source 1..120: mol_type = other DNA
aagattctcaaaaaaagagcggggaggtctaggacaggaagggttaagtgtggtttagctttcccagcctggaaaggaagccaggccaagcagctgggtaggggaaaagggggcactgag

SEQ ID NO: 9208 - DNA, 120 bp, synthetic construct
  source 1..120: mol_type = other DNA
gacttaatctcaaaaaaacaaacaaacaaacaaaaaaaacaaacaaacagaggatgaggtggatggtgggaccaggataggggccaggatgaggggaggggagtggaaggcttatcaaaa

SEQ ID NO: 9209 - DNA, 120 bp, synthetic construct
  source 1..120: mol_type = other DNA
ggaggacagggggagccagtggtggaagaagggtgagtcacactgatgggcaccagcctcagccctccccccactttcctggctcccagccctgcctacctgaccctctcccttgctttg

SEQ ID NO: 9210 - DNA, 120 bp, synthetic construct
  source 1..120: mol_type = other DNA
agacaggacagagagggaagtggtggtctctgggagagggtcggggaggatataaggaatggtgggggtatcagggacaagttggggctggggccggcctgaattcggtcagattgggat

SEQ ID NO: 9211 - DNA, 120 bp, synthetic construct
  source 1..120: mol_type = other DNA
ttttctaaaaaagcctttgggagcttggaagtataggccctctcttccagccccatcaaaatttgtttcccttcttcctgccttccctttctctatgcagacccaggccaagagcactaa

SEQ ID NO: 9212 - DNA, 120 bp, synthetic construct
  source 1..120: mol_type = other DNA
acctgcctcggcctcccaaagtgctgggattacaggtgtgagctaccatgcccggccatcaacctttattttgtttttttgagacggagtcttgctttgttgcccaggctggagtacagt

SEQ ID NO: 9213 - DNA, 120 bp, synthetic construct
  source 1..120: mol_type = other DNA
tcttttttctactagtgatatgaacaatttagttagcaagacagataggaagcaaggaaggggagacccagagaattcgttgcattctaaactagtccactcatctaccaaagccctgtg

SEQ ID NO: 9214 - DNA, 120 bp, synthetic construct
  source 1..120: mol_type = other DNA
tcttgttctgttgcccaggctggggtgcagtggcatgatcacagctcactgcaacgtcagcctcacaggctctggtgattctcccacctcagcctcctgagtagctgggattacaagtgt

SEQ ID NO: 9215 - DNA, 120 bp, synthetic construct
  source 1..120: mol_type = other DNA
tgcacaagtaattagaatccagagttgagttcagagttatggattgggctgcaggatagtgccagggtctgtgccttcccatgtgaaactgatggaggaaggctgagtcagaagtgggga

SEQ ID NO: 9216 - DNA, 120 bp, synthetic construct
  source 1..120: mol_type = other DNA
tggtgattcttgtcttgagactatcttgagacttgtcatgggaattgtccacccggattgaaaggaagctgtgccttttggcagacccattaggttaatggggttggagacctttgagga

SEQ ID NO: 9217 - DNA, 120 bp, synthetic construct
  source 1..120: mol_type = other DNA
cctccttggggtcccagtgtactgataggccgaactctaatattataggagatctctggaagattgcagggtctcttatccctcaataaggggcaaggcaagccgggcgcagtggctcac

SEQ ID NO: 9218 - DNA, 120 bp, synthetic construct
  source 1..120: mol_type = other DNA
aaggggaaagagtttgggaaggggagtcctcccttcacccctgcctcccccaagttgtgagagaggaagccggaatcctgcctgctgaagccaggaataattctggctgagatcccaggc

SEQ ID NO: 9219 - DNA, 120 bp, synthetic construct
  source 1..120: mol_type = other DNA
ttcaggacattctactatcttcttaggccatccctccctcctccaggcactacttcttttgctctatccccaagccccacccctgcatttttgtgacaacaccggaatgatttctagaga

SEQ ID NO: 9220 - DNA, 120 bp, synthetic construct
  source 1..120: mol_type = other DNA
cacacaaaggtgtgagtatgtgtatatttgagggtgggtgggagtggcactttcactaggcctccgtatcactctctgactggggtatctcccagcaagcgagacagaggcagacacgct

SEQ ID NO: 9221 - DNA, 120 bp, synthetic construct
  source 1..120: mol_type = other DNA
tgagatcacctgggcgacagaatgagactccacctcaaaataataataatagtaataataataaatgaaaaattttaaaattaaacaattaaaaattttaaattaaaattaaacaaatta

SEQ ID NO: 9222 - DNA, 120 bp, synthetic construct
  source 1..120: mol_type = other DNA
caagtgccaactctcatttctaccttattcttttcctctctgttcccctccccaccccctctcttccctctttctgagatcagatttgccagtgatgggaagagttagaaacaggatgcc

SEQ ID NO: 9223 - DNA, 120 bp, synthetic construct
  source 1..120: mol_type = other DNA
agttcaagtgatcctcctacctcagcctcctcagtagctgggactacaggtgcacaccaccgtacccagctaaattttttttttttttttttgagatagagtctcactctgtcacccagg

SEQ ID NO: 9224 - DNA, 120 bp, synthetic construct
  source 1..120: mol_type = other DNA
ttttgcaagcagcagaaggtgaagaggttagactgaagaaaaaacttctgtgctcatcagcccataagctcgcagagcacagggatcatgcatctatgttttcctcagtcagtgtctgcc

SEQ ID NO: 9225 - DNA, 120 bp, synthetic construct
  source 1..120: mol_type = other DNA
caaatctagccttccctatccctcttcacagtgaattgctgggcctcttggagtttaggacttttgtggtagaagaaaaatgttggcagggctgcttttctcctttccaggatagatttt

SEQ ID NO: 9226 - DNA, 120 bp, synthetic construct
  source 1..120: mol_type = other DNA
cacatgtgtaaaagggactaggagaggtgaccagtacctttggggctcagatcgagaagtgctagggacatgtgggccatgagcttagttgtcaggctcctcagagggagggaagcttgg

SEQ ID NO: 9227 - DNA, 120 bp, synthetic construct
  source 1..120: mol_type = other DNA
taaaaataatccaggccatgtgtggtggctcatgcctgtaatcccagcattttgggaggccaaggaggcaggattgcttgagtccaggagtttgagaccagcctgggcaacacagacccc

SEQ ID NO: 9228 - DNA, 120 bp, synthetic construct
  source 1..120: mol_type = other DNA
tacaaaattagccaggcgtggtggcacacacctgtagtcccaacaactacttgtgaggctgaggcaggaaaatcatttgaacccaggatcagaggttgtggtgaactgagattgcaccat

SEQ ID NO: 9229 - DNA, 120 bp, synthetic construct
  source 1..120: mol_type = other DNA
ccaatgtgctgggattataggcatgagccaccacacttagcccagcctgtgctttcttaaatgaaaatctaagcatacggctgggtgtggtggctcacgcctgtaatcccagcattttgg

SEQ ID NO: 9230 - DNA, 120 bp, synthetic construct
  source 1..120: mol_type = other DNA
tcatgcctggctacttttttgtattagatatatattttctctcttagcacagtacctaccaagagtgagtgagtagatgtcctgacccctgcaggcatccaaggccctccttccctggac

SEQ ID NO: 9231 - DNA, 120 bp, synthetic construct
  source 1..120: mol_type = other DNA
atgcgctgcaggaactgcgggcccagcatgaggaccaggtggagcagtataagaaggagctggagaagacttattctgccaaggtgcttgctctcgattggttccctcactgcctctgcc

SEQ ID NO: 9232 - DNA, 120 bp, synthetic construct
  source 1..120: mol_type = other DNA
atgtttagagcttgtgatgttcagagctggctctgatgagggctctggggaagctctgattgcagatcctggagagagtagccaggtgtctcctacaccgacccacgtccctccttcccc

SEQ ID NO: 9233 - DNA, 120 bp, synthetic construct
  source 1..120: mol_type = other DNA
ctttgagttgtcaggaagatgaaagataaggtatccgtgtgcctggtgctgcgtatgtgtccacagatcatggctattatccccgggggaagggcagtgacaggggtgtgtgtagatgga

SEQ ID NO: 9234 - DNA, 120 bp, synthetic construct
  source 1..120: mol_type = other DNA
gttttggaactttactcgctggcctggcctttcttctctctcctccctataccttgaacagggaacccaggtgtctgggtgccctactctggtaaggaagggagtgggaactttctgatg

SEQ ID NO: 9235 - DNA, 120 bp, synthetic construct
  source 1..120: mol_type = other DNA
ccgacaaggcatctgccagcggctcaggagcccaggtgggcggacccatctcctctggctcttctgcctccagtgtcacggtcactcgcagctaccgcagtgtggggggcagtgggggtg

SEQ ID NO: 9236 - DNA, 120 bp, synthetic construct
  source 1..120: mol_type = other DNA
ggaccctgtgacatggtgcctgagaggcaggcatagaggcttctccgccagcctcctctggacggcaggctcactgccaggccagcctccgagagggagagagagagagagaggacagct

SEQ ID NO: 9237 - DNA, 120 bp, synthetic construct
  source 1..120: mol_type = other DNA
cagctagagattagcaaatgacgccatttatttaaatagcttgggagaacgagctctcttaaatgtaatggtatccttggcagttcgctgcccctaggcacaagctggttcaagcttagc

SEQ ID NO: 9238 - DNA, 120 bp, synthetic construct
  source 1..120: mol_type = other DNA
aagtaaccttcactgttagctgaagtgcatggttagctgttagcagtaaatctagatggcagggcttgtttgtgtgtctgaggtcatgatgctgatcaaatgggacagactcacacacat

SEQ ID NO: 9239 - DNA, 120 bp, synthetic construct
  source 1..120: mol_type = other DNA
aaatatacagttaccgatgggataatttgagagagagaatcactgggagaatctaatttggattgggaagttagggaaggcttcttacagaaagtgacatttaagctgaatctgtaggtg

SEQ ID NO: 9240 - DNA, 120 bp, synthetic construct
  source 1..120: mol_type = other DNA
ctgaggctgctgactggcttcaccaacatgttatatttcttaatttcactggcgcttcactaactgccttataatccttttattcgtctcatgtagattccctaacacacccaccaccgt

SEQ ID NO: 9241 - DNA, 120 bp, synthetic construct
  source 1..120: mol_type = other DNA
ccactgttaaacaccttcctgaaattctctcctccctgatggcctgtgacatgacacttcctttgctcttccctagcatatgtaaactctcctgtttctctccttcactggctcctccaa

SEQ ID NO: 9242 - DNA, 120 bp, synthetic construct
  source 1..120: mol_type = other DNA
gtattgaggtcagattctcccacctgtcactcctcttgtacacttgatacctgtgcagcatagtagagtagccattagccacctgcagctatttaaacttgaattaaaattgaattaaaa

SEQ ID NO: 9243 - DNA, 120 bp, synthetic construct
  source 1..120: mol_type = other DNA
ttcttagatgctggaggaagtttctgggtggactgtcattgcctggctgcgtgtgctcattgcggcttttccgttagcccaaagtcactgcctttaggagacaatcgcactctaaatgtc

SEQ ID NO: 9244 - DNA, 120 bp, synthetic construct
  source 1..120: mol_type = other DNA
tgctttatctagacctccttgacagctggctaaatgccagttacctgttcacccttaaccctttgccctataagctgatctaatttctcgctcatttattgaggactattgtccaaacct

SEQ ID NO: 9245 - DNA, 120 bp, synthetic construct
  source 1..120: mol_type = other DNA
gagcagcatctctatttttaatctgctttttatttgggttccacatttgattatttgtggcaatgatttgccaactcaaatgcctgtagggcccaggcaggcagcataaatcagtgaagt

SEQ ID NO: 9246 - DNA, 120 bp, synthetic construct
  source 1..120: mol_type = other DNA
cttgttttttgcagataatgaaatgggcatagtaaaattaagtcatttgctcaaaggcacatagcgagtaagatgaggagctgggattcaaacttaagctgcatccctggcagtgtcttc

SEQ ID NO: 9247 - DNA, 120 bp, synthetic construct
  source 1..120: mol_type = other DNA
cccagtgtctaatacagtgcttggcacaagtagatactatcaaatatttgttgaatcagtgattgagttaagctaggaaatctcttcagagaatgtatatctccttggttctataccgag

SEQ ID NO: 9248 - DNA, 120 bp, synthetic construct
  source 1..120: mol_type = other DNA
aaacagtgccacaaagaaatctttgctcttctcatgacctccggcaacttcctgaaactcctccactttagaaaactaatgtaagctggtgggtagaacaagactttgaacttccaagag

SEQ ID NO: 9249 - DNA, 120 bp, synthetic construct
  source 1..120: mol_type = other DNA
ttgtctcattcattctgtcttaacaataacctctcattcttgccttcctgggcagggtgtcttgtgatgaatgtggatggggaagataataaagaattaggccattaacccttgtggtac

SEQ ID NO: 9250 - DNA, 120 bp, synthetic construct
  source 1..120: mol_type = other DNA
ttctgaggaagtgtcagcgccgcttctggggcaatgtcacataggaagagaggagcctttaaagggcctttcattggaagcaatctaaattaaatatcaacagtagagaatgtttaaaaa

SEQ ID NO: 9251 - DNA, 120 bp, synthetic construct
  source 1..120: mol_type = other DNA
caggggtttgaggctgcagtgagccatgatggcaccactgcattccagcctgggcaacagagcaagaccctgtctcaataaatatatgaatgtgtatatttgtatgttaaaatatatgta

SEQ ID NO: 9252 - DNA, 120 bp, synthetic construct
  source 1..120: mol_type = other DNA
tccagcctgggtaacagaaggagactgttgtctcaaaaaacaaacaaacaaaacattttttttaagcttacttgcattttctgaagtttctacaatgatcttttattattttgtaattaa

SEQ ID NO: 9253 - DNA, 120 bp, synthetic construct
  source 1..120: mol_type = other DNA
aaatacttttgtcagctgctatgaccgctgaccaaagccagcaaggcgaggttgttactgctggtatcagaggtttcaagaataatgtattcatagcctggaatgttttctttatttttg

SEQ ID NO: 9254 - DNA, 120 bp, synthetic construct
  source 1..120: mol_type = other DNA
ttttggcactgaaggaagcatcctctaatgagaatcccattctttgttactgaaagcagcttcagtgaaacagagcaaaataaaattcacagggagaccatcgcactgttaaagttatgt

SEQ ID NO: 9255 - DNA, 120 bp, synthetic construct
  source 1..120: mol_type = other DNA
cctgtccattgtcatattctacctagggaaggagatttcctcttcactatatcaagctgaagctgttttagttagtacgagaacaagcttgatgtgatgccagctcatgcatcttgcatt

SEQ ID NO: 9256 - DNA, 120 bp, synthetic construct
  source 1..120: mol_type = other DNA
ccacccctgccatctctaagcgtaattcttgctatttgtacctgttgcatttgttttattcttattggtttctgatttgttttgctgctcattttgtattatatgcttatttactgtaca

SEQ ID NO: 9257 - DNA, 120 bp, synthetic construct
  source 1..120: mol_type = other DNA
atcgctcaactgcactccagcctgggcgacagagggacactccatctcctaaaaaaaaaaaaaaagaggactctcagacccatctagttctactgaattagagctgcagtttagcaagat

SEQ ID NO: 9258 - DNA, 120 bp, synthetic construct
  source 1..120: mol_type = other DNA
ggtcttcagaattgctaagaagtctgtgaatgacagctggtagttcatagtcaacttgccaattccttaaggtgcaagttggaaagccttgggatcagaatgttctgtaatacggaagtg

SEQ ID NO: 9259 - DNA, 120 bp, synthetic construct
  source 1..120: mol_type = other DNA
ttcaacttcagtttcaatccttgtgttttctacagtaaaattgtaggtgcaaaaagaagtatgtgttgttttaacctgtgacgtttcagaactcacagagcaaggcagcagcgtttgctt

SEQ ID NO: 9260 - DNA, 120 bp, synthetic construct; identical to SEQ ID NO: 2153
  source 1..120: mol_type = other DNA

SEQ ID NO: 9261 - DNA, 120 bp, synthetic construct
  source 1..120: mol_type = other DNA
gcctggaatctagtgggaatttggtgttttgacatgaatgctctctgactttgtttttgccctttggctgtgtacctagtgtgtgtcagttcctggagctgtgtcagagcccagaaggtg

SEQ ID NO: 9262 - DNA, 120 bp, synthetic construct; identical to SEQ ID NO: 2155
  source 1..120: mol_type = other DNA

SEQ ID NO: 9263 - DNA, 120 bp, synthetic construct
  source 1..120: mol_type = other DNA
gggatagacagcagtctctggatgatctttctgctctgttacactgctgatagtttcagagatgagcctactcaagggtctgtagttccagtgtattgtaaaaaatcaaatcacagtgaa

SEQ ID NO: 9264 - DNA, 120 bp, synthetic construct; identical to SEQ ID NO: 2157
  source 1..120: mol_type = other DNA

SEQ ID NO: 9265 - DNA, 120 bp, synthetic construct
  source 1..120: mol_type = other DNA
taccatgcctggccaggagaaggatttttgagcagaattcaaaccaatgatttttgtcttccctgtgccgggtatttgaaaaaaccatagaggggaaggaaaggcagtctgtgtgtgtat

SEQ ID NO: 9266 - DNA, 120 bp, synthetic construct
  source 1..120: mol_type = other DNA
ccctctagaggtttaaggactgtattggagtggactcacctgttcctatccttgtttgatctattacaatttggtggcctgttttgcagtttatctgttgcagaaaaagtatagttaatc

SEQ ID NO: 9267 - DNA, 120 bp, synthetic construct
  source 1..120: mol_type = other DNA
agtgagagcctgaattgatttaaccagtttttagagcaatttgacagtatgtcaaaggtgcccttgcgtaggacccagtaattccactcccacagaaacccttgcacacacgaatgggag

SEQ ID NO: 9268 - DNA, 120 bp, synthetic construct
  source 1..120: mol_type = other DNA
aaattgtctgtcagagctataaaaaattactctaaacatagtcaaacccttcaggtaacctgtctctgtgcacacgtgcgttttgagttgccccttctggagccctctgccctcctgctt

SEQ ID NO: 9269 - DNA, 120 bp, synthetic construct
  source 1..120: mol_type = other DNA
tgaactgagtttaaatgcagaatttgggatttttcttctttgactttcctgtttctggattcgtcctcagtttctggcagcctgcatcttcctgccagaaggatggttggcttcccatta

SEQ ID NO: 9270 - DNA, 120 bp, synthetic construct
  source 1..120: mol_type = other DNA
ccacctcctgggctcaagcaatcctcccatctcaacctcctaagtagctgggacaacaagcgcgtgccaccataaccagctaatgtttaaaaaaaaaatttgtagagatgggatctgtct

SEQ ID NO: 9271 - DNA, 120 bp, synthetic construct
  source 1..120: mol_type = other DNA
aatggattccactgtgctgtactacctggcagtgccattgtgattcttaattctctgtatgtttttttcttctgtctctctttttctatccccatcctgtccttctttagcggcttggaa

SEQ ID NO: 9272 - DNA, 120 bp, synthetic construct
  source 1..120: mol_type = other DNA
aagtgatcatcctcagcctcctgagtagctgtgactacaggcatccaccatccgctaattttttaaatttttgtagagacaaagcctcaccacattgcccaggttggtctcaaactcctg

SEQ ID NO: 9273 - DNA, 120 bp, synthetic construct
  source 1..120: mol_type = other DNA
aaataaaaatatttcattgcatggttcgtttccatctcttaatccttcttcttatactttgagagattctcttagtatttatcttctaatcctcttgtttttatttttgtaatcctattt

SEQ ID NO: 9274 - DNA, 120 bp, synthetic construct
  source 1..120: mol_type = other DNA
ctctgaaacttcccatcttctgctggatttgagtaggggacttaaaggtctgattcttatataagtttgcaaccaacaaacttggttcagacgcattccactttgtggaggttccctgta

SEQ ID NO: 9275 - DNA, 120 bp, synthetic construct
  source 1..120: mol_type = other DNA
ttattatgtttcttacacaagtaggctgtttctaagtgtctgggtttttaacattttacagtttttattatacttacattttttggagacctagtctcactctttcacccgggctggagc

SEQ ID NO: 9276 - DNA, 120 bp, synthetic construct
  source 1..120: mol_type = other DNA
aagaagagctttgcagcatttcgaaaccaaacttttattacctgctgcactgtgtaaacatttagtacctacatttaaatgagttgtttaggcagagctggctaattgcattgagaaggc

SEQ ID NO: 9277 - DNA, 120 bp, synthetic construct
  source 1..120: mol_type = other DNA
cgtggacctggggttgggggtgggacggggggtgatggcttcaggatgattcaagtacattacatttattgtgtactttatttctattattacactgtaatatataatgaaataattata

SEQ ID NO: 9278 - DNA, 120 bp, synthetic construct
  source 1..120: mol_type = other DNA
tagggagggaaatggaaatgtcatatctgctcagccagttggttctgctcattctgagggaccaaacccatgactatcttgatctttgtagtagagtgtgtttagaaaacttgtagataa

SEQ ID NO: 9279 - DNA, 120 bp, synthetic construct
  source 1..120: mol_type = other DNA
gtgctggatgcctctacagcgttggcttaaatgcttcactctgtgtctatggcagtgtggggagggaaggaaagaaaaccagagcaccaaaactagagtgccaagaagccacaagatggg

SEQ ID NO: 9280 - DNA, 120 bp, synthetic construct
  source 1..120: mol_type = other DNA
gttgctgatctgtttttggaatgagatccctgggtccaaagagaagctgttcttcggacttagttggataatgtaactgctcaaatgtaaaagatgagattcttttctgcccctccccat

SEQ ID NO: 9281 - DNA, 120 bp, synthetic construct
  source 1..120: mol_type = other DNA
aacattttttattttagtattatttttttttgagacggagtttcactcttgttgcccaggccggagtgcaatggatcactgcaacctctgccccctgggttcaagtaattctcctgcctt

SEQ ID NO: 9282 - DNA, 120 bp, synthetic construct
  source 1..120: mol_type = other DNA
atttgaaaaaaaatcatacaaaccagtaagaaatggatggacaacccaactgaaaaacaggcaaaggatctgaagaaagaggtcccagtgaaagaactgtccttcttactttttctacta

SEQ ID NO: 9283 - DNA, 120 bp, synthetic construct
  source 1..120: mol_type = other DNA
atcaaaaggttaagggttaaataataaaaatctctccaaacagtagctgcataccatgggctgatatagaaagctctgcaagatacaacatgaagtgtaagggggcggggcctggagcag

SEQ ID NO: 9284 - DNA, 120 bp, synthetic construct
  source 1..120: mol_type = other DNA
aattaaaaacagttaaccagacatggtggcacatgcctgtagtcctagctactcaggaggctgaggtagaaggatcacttgagtctgggaggcagaggttgcaggcagagagtgccactg

SEQ ID NO: 9285 - DNA, 120 bp, synthetic construct
  source 1..120: mol_type = other DNA
cccataccacacaacttacctattcagttgcgaaccatcatgacaattttagaacattttcatcactcatccccccaaaaatccccatacacattaaatattttcttaaaaaggaaatcg

SEQ ID NO: 9286 - DNA, 120 bp, synthetic construct
  source 1..120: mol_type = other DNA
tgagctgagatcacaccactgcactccagcctgggcgacagagcaagatagcatctcaacaacaacaacaaaaaggtgctaatgctggaggtggtatagcaaaattttaaattttgctgg

SEQ ID NO: 9287 - DNA, 120 bp, synthetic construct
  source 1..120: mol_type = other DNA
tgcttcaatctctttatagactgtatcataaacttttcatttttatttttagaaatcttttcccccgtttttcttttttgctattttctccaaaatgggaaaggttattgataccataaa

SEQ ID NO: 9288 - DNA, 120 bp, synthetic construct
  source 1..120: mol_type = other DNA
tagtgattggacttcagagtgaagaagtccagttgcttgtcagtaccttagtagtattaccagaatacccagtttttgctagggtatcatatgatgcaggagggcagttactagtaatgt

SEQ ID NO: 9289 - DNA, 120 bp, synthetic construct
  source 1..120: mol_type = other DNA
catgagccactggatgttccatcagcaggccctgcaggagtacatcctgatgtgctgccagtgccctgcgggggggcttctggataaacctggcaagtgagtgttttctctctggggagg

SEQ ID NO: 9290 - DNA, 120 bp, synthetic construct
  source 1..120: mol_type = other DNA
acaatcatgactcactgcagccttcacctcttgggctcgagtgatcctcctgcttcagcctcccaagtaactggaattacaggcatcggccaccacacctagctaatttttaattttttg

SEQ ID NO: 9291 - DNA, 120 bp, synthetic construct
  source 1..120: mol_type = other DNA
gcctcagtgccttgttcatattctttgtagtactttactcagttggtggtgtgttgtttaatgtgtgtttgtctgctttcctgaaaaaacaatagccctatgagggcaggatgctcactg

SEQ ID NO: 9292 - DNA, 120 bp, synthetic construct
  source 1..120: mol_type = other DNA
gccctcttccagttttttttcctccctccttctccagaggtaaccctgtcccaaatttgacatgtatcatgcctgtggatgtttttgtgctattgctacatacatatgtatctataagca

SEQ ID NO: 9293 - DNA, 120 bp, synthetic construct
  source 1..120: mol_type = other DNA
ttataacatgtggaaatcaaaggggaagccaacccatgcaaacagaggagagcctgagagcatcctggctttataacagcctacccttgcaggaactaatccattccctcaaggactaat

SEQ ID NO: 9294 - DNA, 120 bp, synthetic construct
  source 1..120: mol_type = other DNA
gataaccaattgaccagcaccatttactgaagtctacaacctttcctgctgatgtgtatctcatgtgtaccacaccctcaagtttccatacatgaaggggccctgtttctggactctctt

SEQ ID NO: 9295 - DNA, 120 bp, synthetic construct
  source 1..120: mol_type = other DNA
attgaatgctttctccgcatctgatttttcttctttaatatgatatgtttcattaatattctgatgttaagccttatattcccaggataagcccttcttggtcatagtagaggcagtgtg

SEQ ID NO: 9296 - DNA, 120 bp, synthetic construct
  source 1..120: mol_type = other DNA
taaaatctctcctgcagttgtgtccccttcttcattatcccacagtgggagaatcctgaatattggcctaggattatgccgtgtcaaatctaaagtttcttttgggtttctgtgatgtac

SEQ ID NO: 9297 - DNA, 120 bp, synthetic construct
  source 1..120: mol_type = other DNA
agtgagctaagatcgtgtcaatgcactccagcctgggcaacagagcaagactctctcaaaaaaaaaaaaaaaaaaaaaaaaacagtttgagatagtattgtacatactgttttctcacat

SEQ ID NO: 9298 - DNA, 120 bp, synthetic construct
  source 1..120: mol_type = other DNA
tcatgccaaggctgggctttgggtcccaccaagatgagttctctgtaagactgtggtggagttgcaccaggaggtgcctctgcctctcgacttgcaccctggtcatttgtaagggaaaag

SEQ ID NO: 9299 - DNA, 120 bp, synthetic construct
  source 1..120: mol_type = other DNA
gatgtctcttatttgtgatctgtaccaagaaaatgcccaatggtaggagctactaaaggttgctcagggatcgtcagtctcctgtgtgcaggattccagactgttcacatcggtggtgac

SEQ ID NO: 9300 - DNA, 120 bp, synthetic construct
  source 1..120: mol_type = other DNA
cgcacctttggagagatttattatgtgactccttgagtagaagacatttatgtagcattcaaggtggatgaccccaaatactttctcccatcaataaacacaaaactaatacagatctct

SEQ ID NO: 9301 - DNA, 120 bp, synthetic construct
  source 1..120: mol_type = other DNA
tagtttttgggaacggggaaggaacaaagctccaaatgcaaattaggattgttgccaaaggggtaaatggatgctagagaggcaaatggccattgctctcaaacagtgattactgggata

SEQ ID NO: 9302 - DNA, 120 bp, synthetic construct
  source 1..120: mol_type = other DNA
tgagttggacttactattacctgcaactgaaagcaacctaatacagtcatgtcacttaatgacgaggatacaccctgagaaaagcagtcaggtgatctcgtcgttgtgtgaacatcatgg

SEQ ID NO: 9303 - DNA, 120 bp, synthetic construct
  source 1..120: mol_type = other DNA
aaatacagcgcttacaaaataacaataagaaaaatgcatggccgggtgtggtggctcacgcctgtaatcccaacactttgggaggccaagacaggcagatcacctaaggttgggagttca

SEQ ID NO: 9304 - DNA, 120 bp, synthetic construct
  source 1..120: mol_type = other DNA
aagatagtacacagagttcccacagacccattagtcagttttccctattaacatcttccactaataggtggcatttgccataatgaatgaaccaattttgatacattactaaagaaagtc

SEQ ID NO: 9305 - DNA, 120 bp, synthetic construct
  source 1..120: mol_type = other DNA
gggagttatgctccatatgtttgaaggcagagcacctgcataaactacccggaattctacatgggagatgtttattctcaatttattcaaccatttctttcactatggactcgtttattt

SEQ ID NO: 9306 - DNA, 120 bp, synthetic construct
  source 1..120: mol_type = other DNA
ctctggcattcagagcccagacgtgcatttgtgctaaatgcctaacctcatctctaagcttcttcaaggcaaggcccagcctttataagctgcctagattgccccagtagccagcacaat

SEQ ID NO: 9307 - DNA, 120 bp, synthetic construct
  source 1..120: mol_type = other DNA
gatttttcttcttcttcttctctagcctttaatttactggaaaaaattaatagcagagaccgtgctacataattttgcccagagcaggctgtgggtatacaagagccccaccctgcaaag

SEQ ID NO: 9308 - DNA, 120 bp, synthetic construct
  source 1..120: mol_type = other DNA
tcaagttctttcagaaaacatgcaaatttttactgccttttagcattcaacatacatttacctcccctttcaaggattttaatatactaaactcttattacatcagcgaaaaggagagtt

SEQ ID NO: 9309 - DNA, 120 bp, synthetic construct
  source 1..120: mol_type = other DNA
tgagttagccgctgccctagtaaaccctagacactgaaggaaattctctattcgctatctagcagtgtagacattgacaaactcttttttcctacctgggtttcctcttcaggctagaga

SEQ ID NO: 9310 - DNA, 120 bp, synthetic construct
  source 1..120: mol_type = other DNA
gaagcatttgtgatataccaagaagtcaacccttactcactttaggaaaggtgtctgggagctggctttttccaccttgctgagtcagccctggttacatgctttgtgtagataatgaca

SEQ ID NO: 9311 - DNA, 120 bp, synthetic construct
  source 1..120: mol_type = other DNA
atggcttcacccacagctcacttctaacaccaatactaagcaaaccaactgtatacttaagcccagatatacaaagagatatagttaagggcaatgaaaaagaggaaagcatgttaacct

SEQ ID NO: 9312 - DNA, 120 bp, synthetic construct
  source 1..120: mol_type = other DNA
cctaacagcttccagaggggtctctcatcaaccaccttggccttaacaagggtaagaagacaccaccaccaagaaggataaaataagtttttatttatagtcttatagtaaagggggaag

SEQ ID NO: 9313 - DNA, 120 bp, synthetic construct
  source 1..120: mol_type = other DNA
actcagattcaaatttaagtagcaggaaataaatatcaaaacatcatcactggccctcaatacaaaacctctatgccacccaaaacaccctccctgtcccaaccccaaatggccactccc

SEQ ID NO: 9314 - DNA, 120 bp, synthetic construct
  source 1..120: mol_type = other DNA
gtagttggtctgcagttgggcacttgacctcgccttctccagtgcacggactaaaaggcaaccaagggagtgtgttactgccttctggagacttggggagtaaccgagtctcagactcag

SEQ ID NO: 9315 - DNA, 120 bp, synthetic construct
  source 1..120: mol_type = other DNA
ctgattggactaccattgacaatggggagggctcactgtccctgaacacctggagtctctggtacttacacagcacattccactccaaggacctcaaagctcttttcagacacctgatgc

SEQ ID NO: 9316 - DNA, 120 bp, synthetic construct
  source 1..120: mol_type = other DNA
ttggcctcccaaaatgctgggattataggtcacaggtgtgagccactgcgcccagcctgttgttgttgttgttgttgttgtttttttttttttggagacgtagtctcgctctgttgccca

SEQ ID NO: 9317 - DNA, 120 bp, synthetic construct
  source 1..120: mol_type = other DNA
aatgggtcctaaacaaccagaacacaacagcgggagaaagacaaagaaaacatgtacaccgtggctagcaaaaccagatctactcatattaaatcctaacaatctcaatttataggcctc

SEQ ID NO: 9318 - DNA, 120 bp, synthetic construct
  source 1..120: mol_type = other DNA
ggaaaaagtgagatgcgtttctttagttgagtcagtcagcttatgcagaaggaatgagagttcctagcctagcaatggatacttcagacactgtttcccatttctacaaagggaccttat

SEQ ID NO: 9319 - DNA, 120 bp, synthetic construct
  source 1..120: mol_type = other DNA
ggcagggccttccttgtctttatgagtttataatatgtgaccagcaaacacgaaaccagcaagaaaccctgggatttatggcatggactatggaataaccctggactttcagtttctgtt

SEQ ID NO: 9320 - DNA, 120 bp, synthetic construct
  source 1..120: mol_type = other DNA
agcccaatggtaaattgtctctgcaccggtaacaggcataagaattgagttgcaagtgaggcaatgatgaagactagtcttcagaatttggttgaaaagtaagaagtaggccaggtgcag

SEQ ID NO: 9321 - DNA, 120 bp, synthetic construct
  source 1..120: mol_type = other DNA
aactgactacatatgtcacaaaaggcctcagacccaaaagacttggattctaaatagaaccgtttaaggccccaaatgactcctgaagttgttagcactgatgcttcagacgaagtccaa

SEQ ID NO: 9322 - DNA, 120 bp, synthetic construct
  source 1..120: mol_type = other DNA
tcttttgaaaaccaaaacgaaagaatatgcacaataaatttggatccacattaaactagttcattcaaaaatggaaccccatcaatgccagcaaaggaggctggaaggttgtaaggccag

SEQ ID NO: 9323 - DNA, 120 bp, synthetic construct
  source 1..120: mol_type = other DNA
actccatcaataaatccatggattgaacaatagcagcttttggggagaaaaaaaggaggcaggtttcttttcacatccactttaagatgatgtctaattttagtcacattaaatggggca

SEQ ID NO: 9324 - DNA, 120 bp, synthetic construct
  source 1..120: mol_type = other DNA
tgttgttcttgtgatagggaataaatttcgtgagagctgatggttttaaaaacagcagtttccctgcacaagttctcttcgcctgctgccatccatgtaaaacgtgacttgcttctcctt

SEQ ID NO: 9325 - DNA, 120 bp, synthetic construct
  source 1..120: mol_type = other DNA
ccctgcatcccggccactccagtcgtggctgaaagggcccaatgcagagctcaggttgcggcttcagagggtgccagccccaagccttggcagcttcctcatggtattgagcctgggagt

SEQ ID NO: 9326 - DNA, 120 bp, synthetic construct
  source 1..120: mol_type = other DNA
agaaaggacttgtcttgtcccagatgagactttgcactgtggacttctgagttaatgctgaaatgagttaagacaaggcacgattggttttgaaatgtgaggacatgagatttgggaggg

SEQ ID NO: 9327 - DNA, 120 bp, synthetic construct
  source 1..120: mol_type = other DNA
attcctcccctcagttaataaatattcactatgctccctactatgtgcaggcactgagggaagaaatataaccaaaaggagacattctccctgccttcacggtacttattgtagtgtagt

SEQ ID NO: 9328 - DNA, 120 bp, synthetic construct
  source 1..120: mol_type = other DNA
gctggctgatgattctaattccatcctattgttcccagtggaacaacagtggaactccacatacagttgagaaactgcaaggaacacaaaagactcaaacaacagagttcgagggtctac

SEQ ID NO: 9329 - DNA, 120 bp, synthetic construct
  source 1..120: mol_type = other DNA
ggttcaagcgatccacctgcctgtctcccaaagtgctggtattacaggcatcagccaccatgcccagccaaccattttttaaaatgtttaatttatagtagaaatacagaaaacaaaggg

SEQ ID NO: 9330 - DNA, 120 bp, synthetic construct
  source 1..120: mol_type = other DNA
ccagacagatgcactactctttgcttcactttgttcaaagctttgctaaaatgtcaccttgccagcaacactcttcttctctgccataattaaaattgcaactcttcttctctgtttttc

SEQ ID NO: 9331 - DNA, 120 bp, synthetic construct
  source 1..120: mol_type = other DNA
ttgcaataccaggtatgtacatggcctgttttgttctttataaaggtcagaacttctccatgtttacgccacatggaaagccacaccttagataaagtatagaggccataacttaccaga

SEQ ID NO: 9332 - DNA, 120 bp, synthetic construct
  source 1..120: mol_type = other DNA
tcaaaaataaggcaaccatgctacctgaatatctctgactacatttccttcccaataggtgagtgctctgctaagctctgcaacaagttccaagctagtagtggccagctactcagcttt

SEQ ID NO: 9333 - DNA, 120 bp, synthetic construct
  source 1..120: mol_type = other DNA
accatgagtcccaagcccactaaaaggcactagtttaagaccttctcaccaaatcatacaacagaagctaaaacctctataaaacctagatgcatgaatctgagatcattatgacagagc

SEQ ID NO: 9334 - DNA, 120 bp, synthetic construct
  source 1..120: mol_type = other DNA
ggttctccatagcatatctctctttttggggcagatgcctggagcacttctaaagttgtcctaatcttgttaagtctggattcactgtaaaatgaatgtttactgaactatagtgacatg

SEQ ID NO: 9335 - DNA, 120 bp, synthetic construct
  source 1..120: mol_type = other DNA
tcactaatgttttgaaagagcacatgaaaaacagaaaaacctttacacaaggctgagaattctctgtgggaaacatttccaaaccacagatccacccagaccaataacactgcccgcgcc

SEQ ID NO: 9336 - DNA, 120 bp, synthetic construct
  source 1..120: mol_type = other DNA
taaggggctatgcagtggtccacagatgctcaacagaaactcccgcaccaaatcacttccagctttgacatctctgccaaagtttttattcagcctctcagttatatttctacccaactt

SEQ ID NO: 9337 - DNA, 120 bp, synthetic construct
  source 1..120: mol_type = other DNA
tcaacactctaagcagagaaaaagtacatgcattgtgcagcacttttgccatgcaactgactgcaggtaaaacagacagtagtttcctgagtgaattccaatctcggaggctaccaagct

SEQ ID NO: 9338 - DNA, 120 bp, synthetic construct
  source 1..120: mol_type = other DNA
tttttatattaggatccacagaacccttttcaaataactttttcaacatcttctgtagtcctgaatacctaagtatttggttgttcacagtccacatctttttttaaaccttttttctaa

SEQ ID NO: 9339 - DNA, 120 bp, synthetic construct
  source 1..120: mol_type = other DNA
attttatggaaatatcagctctcaataaataagttttcttaatgcctatctgcttagacaacctgcacaatctttgcttgctctaatgaagagcaggtataactgagatggcttgccttt

SEQ ID NO: 9340 - DNA, 120 bp, synthetic construct
  source 1..120: mol_type = other DNA
tagcagtcacatgacttggttaaaggcgattaccgcatgtggcttcagcttcacacaattatacagatatggtttaaaacctacttgttcctaaataaatcttctgaccactttgccctg

SEQ ID NO: 9341 - DNA, 120 bp, synthetic construct
  source 1..120: mol_type = other DNA
cccgagcactgtctcctccctgcagacccagctcgggcatctaggcacccccaacccctctccgcccttccccggcccccaggatccgcgggtcacgggaggagaggatcgcagtccgaa

SEQ ID NO: 9342 - DNA, 120 bp, synthetic construct
  source 1..120: mol_type = other DNA
ttttaacaaaatgtattcatctttcttggaactgaaaaataaatctatgtacaaaacaggaagagatcaggctcttgtcacccactcctaaccctctgcagatttcctccgggatgctcc

SEQ ID NO: 9343 - DNA, 120 bp, synthetic construct
  source 1..120: mol_type = other DNA
tcactctggaaagtgagcactggaccctccggcggtggtgatgctgtgggtgctggcacctgagccgtgctgccaccttcagggcctcgggctgtgccagcgacagtcccaggaggcttc

SEQ ID NO: 9344 - DNA, 120 bp, synthetic construct
  source 1..120: mol_type = other DNA
aaacctctaaaataccttcagtcccgtccaacgtgggcccaggacctcagttatagcaaaagggaacatagctgtctgctcagggccaccttcctcctgccatccctaatcccgtacatg

SEQ ID NO: 9345 - DNA, 120 bp, synthetic construct
  source 1..120: mol_type = other DNA
ctcttctacacatcaccaaagactttcaagcccagcccaatggccctcctccccacctacacccaccaagtgaacaccccctcttcatcagtgctcctgccacatttgacctctgttata

SEQ ID NO: 9346 - DNA, 120 bp, synthetic construct
  source 1..120: mol_type = other DNA
attctgggaccagccctttaatggagtcaaagcaatttcacatctcaattctactctcccaagagccctgggaaaggccaggccaggaattactaacccatttttccaggaggggaagct

SEQ ID NO: 9347 - DNA, 120 bp, synthetic construct
  source 1..120: mol_type = other DNA
tttctggatatcctgtagctgacccagcctttggccctacctcgtctttctctgcaactctattatatattctatggatttagggattccattttactgcacttactaggttaaaacagg

SEQ ID NO: 9348 - DNA, 120 bp, synthetic construct
  source 1..120: mol_type = other DNA
aaaaaaaaaaaaaatcttcatagccattattttgtttaactgcctcaaatgcagcccaatttcatcttcttgccccctaaatctgctgccgccctctgtgtctcatgcttagaactcctg

SEQ ID NO: 9349 - DNA, 120 bp, synthetic construct
  source 1..120: mol_type = other DNA
cccgccccgacacacgcacagctcccctgcttccccaccctcttcagcctctgctcaccggcttcccctcttttgtcggtgagacccctcagccgagactgcagagcctttttgtccccc

SEQ ID NO: 9350 - DNA, 120 bp, synthetic construct
  source 1..120: mol_type = other DNA
cactgcagcctcgacttcacgggctcaagcgattctcgtgcctcagcctcccgagtagctgtgatcacaggcgtgcgccaccactcccgcctaattttgtgtgtatgtgcatatacataa

SEQ ID NO: 9351 - DNA, 120 bp, synthetic construct
  source 1..120: mol_type = other DNA
tccgcagaccgtgtgtttctttaccgctctcccccgagaccttttaagggttgtttggagtgtaagtggaggaatatacgtagtgttgtcttaatggtaccgttaactaagtaaggaagc

SEQ ID NO: 9352 - DNA, 120 bp, synthetic construct
  source 1..120: mol_type = other DNA
ttaagtggagatttttattttttttttattttttttttagacggagtctcactttgtcacccaggctggagtgcagtggcgcgatctcagctgactgcaacctcctcctcacaggttcaa

SEQ ID NO: 9353 - DNA, 120 bp, synthetic construct
  source 1..120: mol_type = other DNA
ttatcttatttctgaataaagaattgtctgtgtggggaatagataactctttctcatgcagcccctgctagaaaatttgttttctctagcagttggtctgtgcttataggctactctttg

SEQ ID NO: 9354 - DNA, 120 bp, synthetic construct
  source 1..120: mol_type = other DNA
gtaagtaaaacctcaaagtagcaggatgtttgtgcgcttcatggaagagtcaggacctttctctgttctggaaactaggcttttgcagatgggattttttcactgaaaaattcaacacca

SEQ ID NO: 9355 - DNA, 120 bp, synthetic construct
  source 1..120: mol_type = other DNA
gcagaagcagtctgtcctgcagactgcttggtcgcagtagagatgtaagaagcagtgagattctgggttaattatggaggcaaagttctcagaatttgctgatatagggtatgagagaaa

SEQ ID NO: 9356 - DNA, 120 bp, synthetic construct
  source 1..120: mol_type = other DNA
attcatagagacagtagagtggtggttgcccagggccggggggagcgaggagaatggaaattattgtttattgggtacagagtttctgtttggggaagatgaaaaaattctggagatgga

SEQ ID NO: 9357 - DNA, 120 bp, synthetic construct
  source 1..120: mol_type = other DNA
actgtaaccttgaactcctgggctcaagcaattctgtcatctcagccagctgaagtagtaactgtaggttcacaccaccatgcctatttttgtttttgtagaaatagggccttgctttgt

SEQ ID NO: 9358 - DNA, 120 bp, synthetic construct
  source 1..120: mol_type = other DNA
tgaagccccatctctactaaaaatacaagaaaaaattaaccaagcatggtggcgcatacctgtaatcccagccactctggaggctgagacatgaaaattgcttgaacccgggaggcggag

SEQ ID NO: 9359 - DNA, 120 bp, synthetic construct
  source 1..120: mol_type = other DNA
taagggacatatgaaccaggtccagtgtatagatcttacctaaatcctgatggagcaaactataaaaaaatttttttgagacaaatgtttgaatacaggttgactatttgatggcattaa

SEQ ID NO: 9360 - DNA, 120 bp, synthetic construct
  source 1..120: mol_type = other DNA
tcctgatgagtattcttataggtacactgtgtttcgtttaattatttccttaggataaatttatagaaataacattccttggtaaaagaatacatattttaaaaactgtattagtttcct

SEQ ID NO: 9361 - DNA, 120 bp, synthetic construct
  source 1..120: mol_type = other DNA
gcctctgaagcagcaggaccatctgctgtgccgtgtgtagtggtactctatcttcctggtgtgatgttgtgttctactttgcattttcatgtctttccttatacaggtctcaaaatcatt

SEQ ID NO: 9362 - DNA, 120 bp, synthetic construct
  source 1..120: mol_type = other DNA
gatcatttctttttcaacatgtcatcaaagcaagtgagcaaagtgctcatcgttgccacatattaatacaaaatggaagcagcagttcagataacctttccctttggtgaggtgacagtg

SEQ ID NO: 9363 - DNA, 120 bp, synthetic construct
  source 1..120: mol_type = other DNA
tttctcagtcttcctcaacagataaatgtgtgaagtaatggaaggtggagatttcagattacacaacattaatgctaagggcgtttgactctgtgtgaattctaattgccctagatctag

SEQ ID NO: 9364 - DNA, 120 bp, synthetic construct
  source 1..120: mol_type = other DNA
cttaggcagtggtaaaaccattgtttggtagctcagaactcagcaagtaaatagcaacatttgctggaagaacagatagtttttcaaatccaattcaaggactgggtatggtggctcatg

SEQ ID NO: 9365 - DNA, 120 bp, synthetic construct
  source 1..120: mol_type = other DNA
cccaagatatcctctaagcaagataaatgactattggcttttgtggcatggcagcctgccacgtccttgtcttttttaagggctaggagattctttattgggatggcaaaagtcaatggc

SEQ ID NO: 9366 - DNA, 120 bp, synthetic construct
  source 1..120: mol_type = other DNA
taagaaattttgtgattattactagtttgaaaaatactttttttttttttgagacaaagtctcactctgttgcccaggctgaagtgcagtggtgtgatctcagctcactgcaatcactac

SEQ ID NO: 9367 - DNA, 120 bp, synthetic construct
  source 1..120: mol_type = other DNA
ctccccaggaaagagcagttggtctttagatcaatgagagctcttttatggcagacaaaacaaagtgactctagccaacttgagctaaaaagaaatttagtggaaggctaggagttacca

SEQ ID NO: 9368 - DNA, 120 bp, synthetic construct
  source 1..120: mol_type = other DNA
aatggtgtgatctcggctcaccgcaacctctacttcccaggttcaagcaattcgcctgcctcagccttctcaagtagctgggattacaggcatatgccaccatgcccggctaattttgtg

SEQ ID NO: 9369 - DNA, 120 bp, synthetic construct
  source 1..120: mol_type = other DNA
agctctgagagagaataaaagcaggggttgttggagctagcttctcaagatgtccttgaggcaaaccagacctttgggacactctgaaaataaaactgaaagtgaagagattgtgggccg

SEQ ID NO: 9370 - DNA, 120 bp, synthetic construct
  source 1..120: mol_type = other DNA
cttctgctgtttgtttatcagcaaggagagacagtagctgatgttaggacactacccaatgcctcaaccgtggacaatattcgctccatctttggaaatgctgttagtcggtatgtcgat

SEQ ID NO: 9371 - DNA, 120 bp, synthetic construct
  source 1..120: mol_type = other DNA
ttgctaagtcttcattatcaagaaaagcataagtggggaaaagtgcttgcattatggattcctcatagttgctcccctctgcatgtaaaaatcaccatttccatcatagattcctagcgg

SEQ ID NO: 9372 - DNA, 120 bp, synthetic construct
  source 1..120: mol_type = other DNA
cttattgagtgtctgctatttcctgggtattgtgctatatggtagggttatagtagtgaacaaagaagaaatgatgcctgctctcagctgactttgcagttggaaagacacatgaaataa

SEQ ID NO: 9373 - DNA, 120 bp, synthetic construct
  source 1..120: mol_type = other DNA
cataggtttgattaaacatggagaaacctcatggcaaagtttggttttattgggaagcatgtataatttttgtcctaagtctgtgctcagccctcccacatgtgctcattgctggttgac

SEQ ID NO: 9374 - DNA, 120 bp, synthetic construct
  source 1..120: mol_type = other DNA
tcaaggctcagaaaatgtttttcattagtttttttcctaaccatgaagaataactgctttgtaacacacatgctggctataaagcagacaaaaaattcactgtaggtgctgcctgactgg

SEQ ID NO: 9375 - DNA, 120 bp, synthetic construct
  source 1..120: mol_type = other DNA
attaccttgaatatgcattgacacttgtactgcctgaaattctggaaaactcagtatggctactccaccgtcagaacttcctgagcaaagttagttgctctctcggctcactgttttgtt

SEQ ID NO: 9376 - DNA, 120 bp, synthetic construct
  source 1..120: mol_type = other DNA
cagttttgaactggttgctttctttttattgtttagatcgtctggtagaatcaacttccttgagaaaagccatagaaacagtgtatgcagcctatttgcccaaaaacacacacccattcc

SEQ ID NO: 9377 - DNA, 120 bp, synthetic construct
  source 1..120: mol_type = other DNA
cagaataaatgtgaggtacccctgctctaaaggagtttatagtccagagctgacttatggaggatttctttctattatttctgggtctgctactaatttgtctatttcatatcctaatta

SEQ ID NO: 9378 - DNA, 120 bp, synthetic construct
  source 1..120: mol_type = other DNA
gtccctctagcaccttatactggcaaagctttacattgcaaacctccattatcacagagcaagcaatgaaagatggactcagagctgaggcgataaattgatagctagcatagcctctaa

SEQ ID NO: 9379 - DNA, 120 bp, synthetic construct
  source 1..120: mol_type = other DNA
cactatctaaggtaattgttctctcttattttcctgacagtttagaaatcagtccccagaatgtggatgttaatgtgcaccccacaaagcatgaagttcacttcctgcacgaggagagca

SEQ ID NO: 9380 - DNA, 120 bp, synthetic construct
  source 1..120: mol_type = other DNA
aagcaaaaactggaactgtgaaaccctacttcacagaaaacttaaaattcccaagcagatgaatgcttctcggaaggacactgacagttacctacctggaaagaatctagatggaggtgg

SEQ ID NO: 9381 - DNA, 120 bp, synthetic construct
  source 1..120: mol_type = other DNA
gatctgaaagttgagtgcagtgggtccagtgttctctaccctggctgccattagaattacctgggaaacttttagaaaattccagtgtctgggccctccctaaaacaataaatcattctt

SEQ ID NO: 9382 - DNA, 120 bp, synthetic construct
  source 1..120: mol_type = other DNA
tatcctgggttagtcagattcattttgttagattacattttttttccagtggaactctgcttaagtcctgaccagtatgttttcagaaggatcagagggcctgcccttgtccattggtgc

SEQ ID NO: 9383 - DNA, 120 bp, synthetic construct
  source 1..120: mol_type = other DNA
tgattgaaacatggacaactgtgtcgaaatatgattggacataaaggggtctaaactcagtgaggcctgtttgttcagattcttcttggcctctctgtggccattctttcctccaggata

SEQ ID NO: 9384 - DNA, 120 bp, synthetic construct
  source 1..120: mol_type = other DNA
tagtcccatggaagcaagcccttggagctagggccctctaccttttgatggatttccatttgtcttgataatttccttgtttctgacaagacaagatgttgcaggcacattttatacttt

SEQ ID NO: 9385 - DNA, 120 bp, synthetic construct
  source 1..120: mol_type = other DNA
ttcgggcagaattgcttctataacaatgataattatacctcatactagcttctttcttagtactgctccatttggggacctgtatatctatacttcttattctgagtctctccactatat

SEQ ID NO: 9386 - DNA, 120 bp, synthetic construct
  source 1..120: mol_type = other DNA
tttcaggaaaaaacacacgttctgaatctaatttataaaactccctggccgggtgctgtggctcacacctataatcccagcactttgggaggctgaggcaggtggatcacctgaaatcaa

SEQ ID NO: 9387 - DNA, 120 bp, synthetic construct
  source 1..120: mol_type = other DNA
aagctaatatttatggagcatctacggtgtgccaaatactttgcatacgttatctcatttaatgctcttatccctgcagggaaagtattaacatttgtttatcacttgcagaactaagtg

SEQ ID NO: 9388 - DNA, 120 bp, synthetic construct
  source 1..120: mol_type = other DNA
tgagggcaggtaccttctctgttttgttcattgctggatgtagttagtatacagcagtatctgatggatggatagatggaggaatgaatgaatgagacttcacaaattcagctcacttgc

SEQ ID NO: 9389 - DNA, 120 bp, synthetic construct
  source 1..120: mol_type = other DNA
cagtgtaatggtcagcaaaattcttatcttgtgtactgaatggcatgtcctgttgctgaaagtgcacaggcttgggaggtagccatgagctcaaatcctggcactaccacctctcttgtg

SEQ ID NO: 9390 - DNA, 120 bp, synthetic construct
  source 1..120: mol_type = other DNA
aaaactgttacaaagtgtatcttaaaatacgacgatctggtttaatttttaaaagatatgagtagccaaggagcaattctgtgcctttcccactagtccctaaccttttaaagcagctgc

SEQ ID NO: 9391 - DNA, 120 bp, synthetic construct
  source 1..120: mol_type = other DNA
tttctctattttaaagatgaggaaaatggaatggaaaatggaaaggacagactaattgcaacatcctcgcaatcaaaaacaggcccaggttcatgccttgttggcagtgggttgctactg

SEQ ID NO: 9392 - DNA, 120 bp, synthetic construct
  source 1..120: mol_type = other DNA
aacattcagttagacagttctcttgagtccagggatttacccatccatggtggacacactttcagttaaaaagtaaggttaattttgacaggttgcagtatccaggcaagcattctatgg

SEQ ID NO: 9393 - DNA, 120 bp, synthetic construct
  source 1..120: mol_type = other DNA
aaatgcctacagacagcactatgggcatatttaggttagggacgaaatgcaagttgattaagtcctgataagaggctgtgaagaggtccaagaagcctcacaatgcccaatgaagaaaag

SEQ ID NO: 9394 - DNA, 120 bp, synthetic construct
  source 1..120: mol_type = other DNA
atgaaatatatgtagcatctacagaaaaacatgaacacttgtgagaatagcatctgcctaaaaaataggacatcaccatcacctttgaggctcttatgtgctgctcccctgtgccattcc

SEQ ID NO: 9395 - DNA, 120 bp, synthetic construct
  source 1..120: mol_type = other DNA
cttacttgaacccgggagatagatgttgcagtgagccgagattgtaccactgcactccagcctgggcaacagagcaataactaaataaataagtaatcaattaataaataagtatatttc

SEQ ID NO: 9396 - DNA, 120 bp, synthetic construct
  source 1..120: mol_type = other DNA
acctgaggtcaagagttcgagaccagcctggccaacatggtgaaacacgtctttattaaaaatacaaaaattagccaggcctggtggtagatgcctgtagtcctggctattcaggaggct

SEQ ID NO: 9397 - DNA, 120 bp, synthetic construct
  source 1..120: mol_type = other DNA
ttactgctcattaacaatgtacctggccaccctagatctgtaatggagatatataaggacatgaacactaacacagcatccattctgcaacccatggatcaaggagtgatactgactttc

SEQ ID NO: 9398 - DNA, 120 bp, synthetic construct
  source 1..120: mol_type = other DNA
ttcactgttgtcttatttcaagaaattgcaacagcttcctcagccttcagcaatcaccaccctgatcagtcaacagccatcatcagggctagatcctccaccagcaaaaagataacaatt

SEQ ID NO: 9399 - DNA, 120 bp, synthetic construct
  source 1..120: mol_type = other DNA
agctagctctctggagtttctttcataagggctaatcccactaatcccaattatgagggaagacctaatcacctcccaaaggccccacctcctaatagtatcaccttgggggttaggatt

SEQ ID NO: 9400 - DNA, 120 bp, synthetic construct
  source 1..120: mol_type = other DNA
gaacagtcagccccgatatcagtttaaattaaaatctctgcttaaggttttcaggcaacctgcttagcatgaatcctggctggaaaagcatgtgaggaccagtttatgattacacattca

SEQ ID NO: 9401 - DNA, 120 bp, synthetic construct
  source 1..120: mol_type = other DNA
ggagggcacaggctttggagtcagacacatgtggtttcaaatccaagttcgaccatttcccatttatttgactgtagacaagttacattcctaaactatgtctcagatttctcatctgta

SEQ ID NO: 9402 - DNA, 120 bp, synthetic construct
  source 1..120: mol_type = other DNA
tttttcttttccagcatgtttaagggaatgacctccaaggccccaaatcacagttgtattcatgttctttcatttcacagatacaatccaggccagtcccagatttgcagctgttaataa

SEQ ID NO: 9403 - DNA, 120 bp, synthetic construct
  source 1..120: mol_type = other DNA
gtgggggaagttaagcagacaaaaagtttttaaatcttactgcagagtgtcaggaaccttttatagcaccagacaggtagggacagaacatgagtggcagcaagccagacttggtcttag

SEQ ID NO: 9404 - DNA, 120 bp, synthetic construct
  source 1..120: mol_type = other DNA
atctactgacacttaatacttggaaagggataaaaataaacattgtctaaagccgtggtccaaacacaacccctgccaacaattttagtccatttcttccaagacttttttttttctatg

SEQ ID NO: 9405 - DNA, 120 bp, synthetic construct
  source 1..120: mol_type = other DNA
aaactcatggcctcaagtgatactcttgcctcagcctcccagagtgctaggattgtaggcatgagttacttcacccagccaaaaaacttcaatttcctattgtttatttgctagtatata

SEQ ID NO: 9406 - DNA, 120 bp, synthetic construct
  source 1..120: mol_type = other DNA
aaggatggaaatccttctcttcttcctgatctaagggggaaaggggaaagttacaaaacattcagtatgctgttagccatataggtttttttgtagatgcccattatgaggttgaggaag

SEQ ID NO: 9407 - DNA, 120 bp, synthetic construct
  source 1..120: mol_type = other DNA
ttttggtttaatttgtcttctgtttcacatttctttttttttttttttttttttttttgagacagagtcttgctctgtcgcccaggctggagtgcagtacagtggtgcgatcttggctca

SEQ ID NO: 9408 - DNA, 120 bp, synthetic construct
  source 1..120: mol_type = other DNA
tgggattacaggcatgagccactgcacccagcccatatattttaaagctctgttattgggtacataaacatttaggattgttatatccttttgataatggactcttctattatgaaaaga

SEQ ID NO: 9409 - DNA, 120 bp, synthetic construct
  source 1..120: mol_type = other DNA
tggtcccaaagaaggacttgctgaatacattgttgagtttctgaagaagaaggctgagatgcttgcagactatttctctttggaaattgatgaggtgtgacagccattcttatacttctg

SEQ ID NO: 9410 - DNA, 120 bp, synthetic construct
  source 1..120: mol_type = other DNA
caaatgaccaccctttgatctggaatgataaagatgataagggtgggatagctgaaggcctgctctcatccccactaatattcattcccagcaatattcagcagtcccatttacagtttt

SEQ ID NO: 9411 - DNA, 120 bp, synthetic construct
  source 1..120: mol_type = other DNA
tcaaatcaacatatattttgggggaggttggaagggagagttgaaatattctaagaatcaaagagtagcccactttaatcagagtatgacccctgattgctcacagtcatctcctgagca

SEQ ID NO: 9412 - DNA, 120 bp, synthetic construct
  source 1..120: mol_type = other DNA
ccagtgtatgttgggatgcaaacagggaggcttatgacatctaatgtgttttccagagtgaagtgcctggctccattccaaactcctggaagtggactgtggaacacattgtctataaag

SEQ ID NO: 9413 - DNA, 120 bp, synthetic construct
  source 1..120: mol_type = other DNA
cttgtgatcacggagtgtttacgtcgtgccaggcattttaatgcattgttctagttcattttccagcagtcgcattcctcgccttggccctacatgtagcgctcattacaaacacggcca

SEQ ID NO: 9414 - DNA, 120 bp, synthetic construct
  source 1..120: mol_type = other DNA
tgctggtgtagaaaaggaaggagactggcccaggtgggtggggttagatgaccaaaggcttttagtgtggtgttgagctgttgaaattttatgctgtagccaatgaaaagtctgaaatgt

SEQ ID NO: 9415 - DNA, 120 bp, synthetic construct
  source 1..120: mol_type = other DNA
atggtctggctgtgttcccacccttatctcatcttgaattcccatgttttgtgggaggtacctggtgggacataattgaatcatgtgggcaggtttttcctgtgctgttctcctggtagt

SEQ ID NO: 9416 - DNA, 120 bp, synthetic construct
  source 1..120: mol_type = other DNA
gcccagctaatttttgtatttttaatagagacggagtttcactgtgttggccaggatggtcttgatctcttgacctcgtgatcttcccgcctccgccttccaaagagctgggattaccta

SEQ ID NO: 9417 - DNA, 120 bp, synthetic construct
  source 1..120: mol_type = other DNA
atgttaatccccaagacaatgggaaaaatgtttccagggcatgtcagaggccttcatggcagcccctctcatcacaagcctagaggcctaggagaaaaaagtgatttcatgggccagccc

SEQ ID NO: 9418 - DNA, 120 bp, synthetic construct
  source 1..120: mol_type = other DNA
agagggctaccattctccagacctcagaatggtagatccacagacagcttgcaccatgtgcctggaaaagctgtagacacttaacgccatctcatgaaagcaaccaggcagtgtgctgta

SEQ ID NO: 9419 - DNA, 120 bp, synthetic construct
  source 1..120: mol_type = other DNA
tgttttagtattttaagtagattgtgatagtagaatggtttgagacactttaatagcaattagcatgtggtttttaaaaagttgcagtttggctggtcgcagtggctcatgcttgtaatc

SEQ ID NO: 9420 - DNA, 120 bp, synthetic construct
  source 1..120: mol_type = other DNA
tatttatttatttatttatttatttatttatttatttagagacagtcttgctctgtcgccaggctggagtgcagtggcgccatctgggctcactgcaaactctgactccctggttcaagc

SEQ ID NO: 9421 - DNA, 120 bp, synthetic construct
  source 1..120: mol_type = other DNA
taatgatcagttctccaatcttgaggctctcctcatccagattggaccaaaggaatgtgttttacccggaggagagactgctggagacatggggaaactgagacaggtaagcaaattgag

SEQ ID NO: 9422 - DNA, 120 bp, synthetic construct
  source 1..120: mol_type = other DNA
ggcacgatccacgatcttggctcactgcagcctccaccttatgggttcaagcgattcttctgcctcagcctcccaagtagctgggactgcaggcacatgccaacacgcccggcttatttt

SEQ ID NO: 9423 - DNA, 120 bp, synthetic construct
  source 1..120: mol_type = other DNA
gaggaattctgatcacagaaagaaaaaaagctgacttttccacaaaagacatttatcaggacctcaaccggttgttgaaaggcaaaaagggagagcagatgaatagtgctgtattgccag

SEQ ID NO: 9424 - DNA, 120 bp, synthetic construct
  source 1..120: mol_type = other DNA
tcaatatttgtaagatttatccatattattgagtgtagttgtggatttttgcatttatatttcatagcacgagcatgtcagaatttatccattttacttcccttctgcccgccactgcta

SEQ ID NO: 9425 - DNA, 120 bp, synthetic construct
  source 1..120: mol_type = other DNA
aggttgcagtttcatcactgtctgcggtaatcaagtttttagaactcttatcagatgattccaactttggacagtttgaactgactacttttgacttcagccagtatatgaaattggata

SEQ ID NO: 9426 - DNA, 120 bp, synthetic construct
  source 1..120: mol_type = other DNA
accaccatgctctgctattttttttcaaggtttttttttttttttttttttttgagagactggtatgactatgtatgctccctaggctggagtgcagtggctattcacaggaagtgccat

SEQ ID NO: 9427 - DNA, 120 bp, synthetic construct
  source 1..120: mol_type = other DNA
caaataaaataaaactgtagtaattataaagtggttttggctgggggagaaatgtacagttgaacatacggattaagaggttgaaagttggtcttaggaagaggaactttttgtggaaat

SEQ ID NO: 9428 - DNA, 120 bp, synthetic construct
  source 1..120: mol_type = other DNA
tttaagtgaagtgtaatatacgtaagtactgcttgatgaatttaaggtgatttctaaagccaggtttgttggggaagaggagtgggatttagtgatttagaaccagaaattggggctggg

SEQ ID NO: 9429 - DNA, 120 bp, synthetic construct
  source 1..120: mol_type = other DNA
attgtgccactgcactctaccctgggtgagaaacgagattttgtatcaaacaaacaaacaaacaaaaaaagacgcccaaaatcaacaacaacaaaaacgatattggaatgattggatccc

SEQ ID NO: 9430 - DNA, 120 bp, synthetic construct
  source 1..120: mol_type = other DNA
atggctttatgagtcaaaatattatctgcttaataccccacctgtagggtaagaagaaatgtttttttcttggtgacaatttttagcagcaagcggggagggcctgtggcttccaaggcc

SEQ ID NO: 9431 - DNA, 120 bp, synthetic construct
  source 1..120: mol_type = other DNA
ctcaactctgtctgctgtggtacctcatgcttcctagtttaagccttcttgggagttctcaggagaaatctgttatctcccttactaagcatttgggattgatgttccttccaggttact

SEQ ID NO: 9432 - DNA, 120 bp, synthetic construct
  source 1..120: mol_type = other DNA
tccaccctgggaaaatagtgagaaccttccctatccccagtcttcaaaaaagaaaaaaatttgctggagaaggtcacacaatgctgataggtcccattgtgctttcatgctttctagttt

SEQ ID NO: 9433 - DNA, 120 bp, synthetic construct
  source 1..120: mol_type = other DNA
aaaaaaaaaaaaaaaaaaaaaagattgctatgttaatcttatttatttatttatttattttgagacagagtctcacactattgccagggctggagtgcaatggcataatcttagctcact

SEQ ID NO: 9434 - DNA, 120 bp, synthetic construct
  source 1..120: mol_type = other DNA
gcgtgagtcaccatgcccaaccaattccagtcagctcttaaaatgaaagcctagaaatggtagggttaaagaggggacagaatgttgattttaaaatacctagaatttggccaggtgcag

SEQ ID NO: 9435 - DNA, 120 bp, synthetic construct
  source 1..120: mol_type = other DNA
ttacattctctttccctctttttttttttttgttttttgagatggagtttcgctcttgttgcccaggctggagtgcaacggtgccattttggcccactgcaacctctgcctcccaggttc

SEQ ID NO: 9436 - DNA, 120 bp, synthetic construct
  source 1..120: mol_type = other DNA
ggtgcaatcttggctcactgcatcctccacctcccgggttcaatcaagcaattctcctgcttcagcctcccgagtagctgggattacaggtatgggctaccatccccagctaattttttt

SEQ ID NO: 9437 - DNA, 120 bp, synthetic construct
  source 1..120: mol_type = other DNA
gaaggtaaacacccgtacttctactttacctctagtcctagtctatggtggtaatcagtgttaacagtttagtttgtgttcttacccttccaggggttttttttctctatgtatacagat

SEQ ID NO: 9438 - DNA, 120 bp, synthetic construct
  source 1..120: mol_type = other DNA
cgagaggaaaggatatgtgtgcctgtgggctcttcaactctgttgattagttatgatttattttctggtcagtttgagaggaaacagtgataaaatactgggaacagggaagaagcataa

SEQ ID NO: 9439 - DNA, 120 bp, synthetic construct
  source 1..120: mol_type = other DNA
aggattcaaatttctgtgagcataagaatcaagctgtgtgcataataattgcatgggatttcacagctgggccccattcccagggattttgtattatctacctccaagtgattttgatgc

SEQ ID NO: 9440 - DNA, 120 bp, synthetic construct
  source 1..120: mol_type = other DNA
gttagctggacatggtttaggttacttttctcttaaaaagtaaattttaattcaagttcctttaagccagcagtctcaacctggggcagtttttccctccaggggacattcagcagtgtc

SEQ ID NO: 9441 - DNA, 120 bp, synthetic construct
  source 1..120: mol_type = other DNA
tcacatcgtttataaacataaggaagatcgttgctcatctgatagcattccgaaccttgagtcatctgtaatgcctatggcctccagaaaagcttctctaatactgtacttagagatgtg

SEQ ID NO: 9442 - DNA, 120 bp, synthetic construct
  source 1..120: mol_type = other DNA
cttatgatactgcttaattaaacattaatttgactcttagctaatcaggaaatgtttgcctcacagtcttacagagctttccaccttctaaaaaagctaacgtttcagaatagattcagg

SEQ ID NO: 9443 - DNA, 120 bp, synthetic construct
  source 1..120: mol_type = other DNA
aaccgacttgccaagaagtttcaaagacaagcagcaaacttacaagattgttaccgactctatcagggtataaatcaactacctaatgttatacaggctctggaaaaacatgaaggtaac

SEQ ID NO: 9444 - DNA, 120 bp, synthetic construct
  source 1..120: mol_type = other DNA
ttaatatttttcttgtcaagcggacatgttcctgttctctaactagcctcttcagtggaggtcagaggaagagcctcattgagaccaagtgcaactcatcaatcacatgaaacaatgctg

SEQ ID NO: 9445 - DNA, 120 bp, synthetic construct
  source 1..120: mol_type = other DNA
gaaaccttttcccttatctagtgcaagaggtagctaagtgcttattttctcaaagtactgtgttataaaaagtattcctagtgtagtcaaagcttctctttagactgataaaacttagag

SEQ ID NO: 9446 - DNA, 120 bp, synthetic construct
  source 1..120: mol_type = other DNA
gcagataaacaagtgaacaaaggtctctggttttcctaggcagaggaccctgcggccttccgcagtgtttgtgtccctgggtacttgagattagggagtggtgatgactcttaatgagcg

SEQ ID NO: 9447 - DNA, 120 bp, synthetic construct
  source 1..120: mol_type = other DNA
acccccccacctcccttccggacggggtggctgccgggcgcagacgctcctcacttcccagacggagtggctgccgggcggaggggctcctcacttctcagacggtgtggctgccgggcg

SEQ ID NO: 9448 - DNA, 120 bp, synthetic construct
  source 1..120: mol_type = other DNA
ccagtaggaccagctagaaacagaaggtgattgaccagtattagggatggaatcagggtacaattatggagacaggctatctaaacaattcactctcaccatttaaatcagctgtttgat

SEQ ID NO: 9449 - DNA, 120 bp, synthetic construct
  source 1..120: mol_type = other DNA
gctaggattacaggcgtgagccaccatgcccagccttgaaactctcctaaggttatgttaaacatttttgtattcttggttttctttttgttccatgggttatttctctttatccttctt

SEQ ID NO: 9450 - DNA, 120 bp, synthetic construct
  source 1..120: mol_type = other DNA
tttgagccattgtgctcgtctaagctgggattctttgaatgagttcttagaggcttcctgaaactttgtgcaacattttgtgtatgtgtatattttctggggaaaggatttgtaactttc

SEQ ID NO: 9451 - DNA, 120 bp, synthetic construct
  source 1..120: mol_type = other DNA
agacagtagagggcagcagccgtttagaaagtagattcacattgagtgattacggctcttttaaatctttctccactaagagatagctaatttccgaaaaggtatacttggcctcccata

SEQ ID NO: 9452 - DNA, 120 bp, synthetic construct
  source 1..120: mol_type = other DNA
ccagacatgccatgcctttttatgcttctatgcgtgttttcctgtctttaatgtccttgtccatgtgatgaacccctactcatttttccaagattgaactcaaatgtcaccttttctgtg

SEQ ID NO: 9453 - DNA, 120 bp, synthetic construct
  source 1..120: mol_type = other DNA
aagaaggccactccacaagcaaaccgcagatgttttgcaaggtgacttatttattgtaatagttgtgtatttcttaaccatttcacatgtataaaactgtgctactacttttatgaggtt

SEQ ID NO: 9454 - DNA, 120 bp, synthetic construct
  source 1..120: mol_type = other DNA
ggctggtcttgaactcctgagctcaaggaatcctcttgcctcaacctcctgaggatgtttgacattttttgacttttttttttttttttttgagacggagtcttgctctgtctcccaggc

SEQ ID NO: 9455 - DNA, 120 bp, synthetic construct
  source 1..120: mol_type = other DNA
gttgtgcccatgaacattgtacccaataggtggtaatttttcaattctcatccctctctctgcctctgcccttttggagttcccagtatctgttaattctctctgtatgtccatgtgtac

SEQ ID NO: 9456 - DNA, 120 bp, synthetic construct
  source 1..120: mol_type = other DNA
tgacctcgtgatccacccgcctcgatgctgggattacaggcgtgagccactgagcctggccaatccattcctttttatggctgagtagtattccattgtgtgtgtgtgtatatatacata

SEQ ID NO: 9457 - DNA, 120 bp, synthetic construct
  source 1..120: mol_type = other DNA
atacacacacacatatatatacacatatgcaggcacacatatatatacatatatatatatacataccacagtttctttatccacttgttgattcatgggcatttgggttggttccacgtt

SEQ ID NO: 9458 - DNA, 120 bp, synthetic construct
  source 1..120: mol_type = other DNA
agaatgtagctttacaaagtctagttggaaattggcaactgggggttagtacaagttacaaggaagggatggaatttaagatgctagtgaaagcttggaggataagggagcaggtgaact

SEQ ID NO: 9459 - DNA, 120 bp, synthetic construct
  source 1..120: mol_type = other DNA
cagtgccacctctgaattttgctaccacaattcccttatttaccaatagtgcatgagctaatttggaataaagaactaggcattgtagcacaacagacattatgtgggcaaagtgttgtt

SEQ ID NO: 9460 - DNA, 120 bp, synthetic construct
  source 1..120: mol_type = other DNA
atcatgtccggcctccccatcatgtacccttaaataccatcaagcacagttccattgtgtaaaaacttggcttgatttaacctgttaattggaacactgtcattaatggaaattaggaat

SEQ ID NO: 9461 - DNA, 120 bp, synthetic construct
  source 1..120: mol_type = other DNA
ttcattttgtttattttcttgtttttcttttgagacagggtttccctctgttacccaggcttaagtgcagtgacactatcatagttcactaacccctcaaattcctgggttcaagtaatc

SEQ ID NO: 9462 - DNA, 120 bp, synthetic construct
  source 1..120: mol_type = other DNA
ttgcaggactttaaaaataatattttgaaatttttctaagttaaattccctgttaaaatggtcatgcaggaatatacgcttgcattattcatattagggtaactgtttggtttgctagtt

SEQ ID NO: 9463 - DNA, 120 bp, synthetic construct
  source 1..120: mol_type = other DNA
taaatgccatttgctctatgccctctggattttaaaagtgcatgggtgtgcacgtgtgtaggtataaatgtttccatattctagtatattctgtgtcagtgatagagcagtcttagagct

SEQ ID NO: 9464 - DNA, 120 bp, synthetic construct
  source 1..120: mol_type = other DNA
ctacagttaattttgccatttgtggtcagcattcttcttctaaattgctataatcttgccttcatattatgtgtctcaaatttaagcaggtatcagaatgtccacgggaacaaattgcca

SEQ ID NO: 9465 - DNA, 120 bp, synthetic construct
  source 1..120: mol_type = other DNA
accatgcctggcccttcctaccaatttctatcctccctgaaatgctgcacacttaggcagtcactggacaatatctgccccaaaattggtttgtataattgagaatatttaagaggttgt

SEQ ID NO: 9466 - DNA, 120 bp, synthetic construct
  source 1..120: mol_type = other DNA
cccactgaactccagcctgggcaacagagcaagactctgtctccaaaaaaaaaaaatgtatttttctttgaagcttttctacttttaaatgtaatgtatagtattataacaagtgaacaa

SEQ ID NO: 9467 - DNA, 120 bp, synthetic construct
  source 1..120: mol_type = other DNA
ggagaggcagtaagattgaagaaaagaggtttgagcttcgaggggtggtaaattgtgggaaggtaattatttggggcaaactaatggcacataaggattgttttagtaaggcttgttatg

SEQ ID NO: 9468 - DNA, 120 bp, synthetic construct
  source 1..120: mol_type = other DNA
acccagcctacgtgcccatttcttaaagtagaaaatttagtagttgatgatgtcagggaagaaaagctttttctctgccttacgttaagtagttgggggcaaattaaattaataaaagac

SEQ ID NO: 9469 - DNA, 120 bp, synthetic construct
  source 1..120: mol_type = other DNA
gcactcctgggaagggggaggaagggaataactgttgtgtaaatcatcagcagtgtctactaagataccatctgtaaccataggcttctatgttttataatataaggctgtcttttaaat

SEQ ID NO: 9470 - DNA, 120 bp, synthetic construct
  source 1..120: mol_type = other DNA
aaaatgaaatagttttaaagaagccacagttgtgtgatcctgatacaactatatcattattgtatgagtatatatgagttataaaaatagtatatgtaaatgcttcataatttttattat

SEQ ID NO: 9471 - DNA, 120 bp, synthetic construct
  source 1..120: mol_type = other DNA
tggtatctcattgtggttttgatttgcatttctctgatggccagtgatgatgagctatagaaatcctttttagaaacaacagagccttgttgtaaaacaggtaaatgtacgtgaggactt

SEQ ID NO: 9472 - DNA, 120 bp, synthetic construct
  source 1..120: mol_type = other DNA
gtaaagccatgttttggctcctgttacagttctttgaagaaatgcttcaggatcttgatcccttgtttaaatttctatggaaagctctgctcctgtctgcagttaatctgggtgcaacag

SEQ ID NO: 9473 - DNA, 120 bp, synthetic construct
  source 1..120: mol_type = other DNA
aaaagaaaacctcatatctattagcggtctctcctgtttccccagacaccggcaaccactaatgtactttttgtctctgtggacttgtcagttctggacattttatataaatggaatcat

SEQ ID NO: 9474 - DNA, 120 bp, synthetic construct; identical to SEQ ID NO: 2351
  source 1..120: mol_type = other DNA

SEQ ID NO: 9475 - DNA, 120 bp, synthetic construct
  source 1..120: mol_type = other DNA
ctatctcatcacacacactggtttggaagatagccacttttttttttccaatgtgtttacttatcttatcagagtcaaaagcctatcagtatcttctcagatatcccaaaaaatactagg

SEQ ID NO: 9476 - DNA, 120 bp, synthetic construct
  source 1..120: mol_type = other DNA
acgcccagtttcctgtgtggcccttgagtatttattttagtaagttagaggctagttgttcacttttcccttgtttaactggggactcctcagcagccctttcaaaacagtataacctca

SEQ ID NO: 9477 - DNA, 120 bp, synthetic construct
  source 1..120: mol_type = other DNA
tcttttggttggtttaaattgagaaagttattttatgtatattctctttttttgctagctttctgtaatttgattttaattccttattccttgcatagtttgcttctggtatgttaaagt

SEQ ID NO: 9478 - DNA, 120 bp, synthetic construct
  source 1..120: mol_type = other DNA
acagttgcacaatgttggctcattgcaacctctgcctcccttgttcaagtgattgtcctgcctcagcctgccaaatagctgggactacaggtgcgcactgctacgcccggctaattttgt

SEQ ID NO: 9479 - DNA, 120 bp, synthetic construct; identical to SEQ ID NO: 2356
  source 1..120: mol_type = other DNA

SEQ ID NO: 9480 - DNA, 120 bp, synthetic construct
  source 1..120: mol_type = other DNA
agatttctgtgtttcactatatgttaacttgcttggctggaagtttttctgctgataattggttttatgaaggaagaatcctgttaagaatgcatcattggactgggtgtggtggctcac

SEQ ID NO: 9481 - DNA, 120 bp, synthetic construct
  source 1..120: mol_type = other DNA
tcatgtttagtgatgttgctgttgttaacactgcagtgaaatgcatatataagcaaactacattacatactcatgaacatggtcctttgttttgaaactttgatcactgattgttcgcag

SEQ ID NO: 9482 - DNA, 120 bp, synthetic construct
  source 1..120: mol_type = other DNA
aaacaagcttagtcttgttagtgaatctgcgtttttacataaacagtaggtcagaggaagcaatcagaaatgcatttgtgtcaggtgagccgagggatgactttctgtccctcacctgtg

SEQ ID NO: 9483 - DNA, 120 bp, synthetic construct
  source 1..120: mol_type = other DNA
gatgtgaatgttctatgataagttttactaatgtagtcatcaggtaagagtcaagctttcttccatagagcagtcagctgtcgcaacaccatttgttaaatagtccgtctgttctccatt

SEQ ID NO: 9484 - DNA, 120 bp, synthetic construct
  source 1..120: mol_type = other DNA
aattagttgagggaaatatgaggccattcactagatgataggttttttttgttttaatcatgtttcatgttgaaacaaaaaagttttttcctgccagttttctggctaatctcaggaagt

SEQ ID NO: 9485 - DNA, 120 bp, synthetic construct
  source 1..120: mol_type = other DNA
tagattatgacctgcagaatctggtccttgcctgcctctgcttttatattttgcagcttgtcccttcacacagtggtctcacttttataatgtctttccctcatgcatttctttaattct

SEQ ID NO: 9486 - DNA, 120 bp, synthetic construct
  source 1..120: mol_type = other DNA
gagcccgggaagcagaggttgcagtgagttgagatgacaccactgaaatccagcccgggcaacagagtcagactacgtctcaaaaaaaacaaaacaagctgggcgccgtggctcacgcct

SEQ ID NO: 9487 - DNA, 120 bp, synthetic construct
  source 1..120: mol_type = other DNA
cagttttactcaggggaatataattgttatagcaggaattgtgccattgcgctattccaaacagtgtaaaagaacattaataaattgaattctaactacatttgtccctaaggagttgtt

SEQ ID NO: 9488 - DNA, 120 bp, synthetic construct
  source 1..120: mol_type = other DNA
gaactaccttaaccaagtaattaaagtcaagattaccagttgtgggacaaatgacatgtacttcctggtgtgatatagaaggaaggacacagtatcacctatatagtattcttgaccaga

SEQ ID NO: 9489 - DNA, 120 bp, synthetic construct
  source 1..120: mol_type = other DNA
aggattgcttaagcccagaagtttgagaccagcctagccaacatagggggaccccaactctacaaaaaaatccaaaaaatattagccggctgtggtggtacatgcctgtagtcccagcta

SEQ ID NO: 9490 - DNA, 120 bp, synthetic construct
  source 1..120: mol_type = other DNA
aaaaaaaagtatactgaaacagaggaagataattaggtctgcttggccattgttaagttgatttttattttcaaaacatttgatcactgttgtggggaacaagggaataaaaaataagtt

SEQ ID NO: 9491 - DNA, 120 bp, synthetic construct
  source 1..120: mol_type = other DNA
cttctgggttcatgcaattctggtgcctcagcctcccaagtatctgggtttacagacatgcaccaccatacctggctaatttttgtatttttggtagagatggggtttcgccgtgttacc

SEQ ID NO: 9492 - DNA, 120 bp, synthetic construct
  source 1..120: mol_type = other DNA
attcacatttggtttagagggaagatttagaaggtgagataaaagcttgtgagagaatagtgtattcatgtgaaacttcttccatgggttcagagcatttagaaacaaacatcccttcac

SEQ ID NO: 9493 - DNA, 120 bp, synthetic construct
  source 1..120: mol_type = other DNA
tatcggtttgtctgaagatatataatagcattgcttttgggggtaatatgggcagtaactctgtccacatctttgggcaggctgtggttctgcctttatatgctatgtcagtgtaaacct

SEQ ID NO: 9494 - DNA, 120 bp, synthetic construct
  source 1..120: mol_type = other DNA
gtttttattctagacattactgaaatgttttgtctttatttcactttttaggagcttccttgaaggtagggactataccttctatttcttggtatctttttctttctttttttaaaagtt

SEQ ID NO: 9495 - DNA, 120 bp, synthetic construct
  source 1..120: mol_type = other DNA
ccacattttatgtgatgggaaatttcatgtaattatgtgcttcaggtctgcaaccaaagattcattaataatcatagatgaattgggaagaggaacttctacctacgatggatttgggtt

SEQ ID NO: 9496 - DNA, 120 bp, synthetic construct
  source 1..120: mol_type = other DNA
gccagaattatctgtactcttgaacatcaccatggaggcattttctgctacctcccatggcagtatgttttcttgttgaattaggataacaaacaatatgctttcaagttccaaagttct

SEQ ID NO: 9497 - DNA, 120 bp, synthetic construct
  source 1..120: mol_type = other DNA
ttgattaaatgcttaaaaagtcttgactcagttttaactatttcctgcaaataatcaatatttaattaaagctactccaaattagtgacactttacgtgtctgtctttctccctcccctt

SEQ ID NO: 9498 - DNA, 120 bp, synthetic construct
  source 1..120: mol_type = other DNA
aaattccatttacataaattgctgtctcttctcatgctgtcccctcacgcttccccaaatttcttataggtgtctgtgatcaaagttttgggattcatgttgcagagcttgctaatttcc

SEQ ID NO: 9499 - DNA, 120 bp, synthetic construct
  source 1..120: mol_type = other DNA
agaggattactagttctcttcaattataaaaataaaagaatcttatttcactgcctggtcctggaaacatgtactgcaatatacattgtgacaactttttacctgtcatgtttttagctt

SEQ ID NO: 9500 - DNA, 120 bp, synthetic construct
  source 1..120: mol_type = other DNA
tcaattgtaaaggtggaggaatttgggaactagacagtgcacacataaataataaatatgttcttcaaatattgggtgggctaatgtgggaggagtttgagaccagcctgggcaacatag

SEQ ID NO: 9501 - DNA, 120 bp, synthetic construct
  source 1..120: mol_type = other DNA
taccgtgagcctccatcccgtctgccattctcccatccctggtctatgataagacttagaaatctggattttaacaaaacgtttcagattgagaaccttgatttagtctacttctcctat

SEQ ID NO: 9502 - DNA, 120 bp, synthetic construct
  source 1..120: mol_type = other DNA
ttacgatagttaaaatcaaaaagtcagatggtaagtactggcaaggaagtggagaaattgaaactgtcatgcgctcttggtgcgaatgtaaaatggtgcagctgctttggaaaacagtct

SEQ ID NO: 9503 - DNA, 120 bp, synthetic construct
  source 1..120: mol_type = other DNA
gaggaaatctaagtggtccataaacatgaaaaggtctttaatcaccagtcagaaaaatgaaaatgaaaaccatgccaggccacctcccaccaccatagtgacaagcatttcaagtgtggc

SEQ ID NO: 9504 - DNA, 120 bp, synthetic construct
  source 1..120: mol_type = other DNA
attccaatgaaatagttcatcccgtggttgtgaaagagtgtttttagattgctgcacagaagcatgtttaacgtggaaatcagctcatggttttagttgttagggctacaagaaattggg

SEQ ID NO: 9505 - DNA, 120 bp, synthetic construct
  source 1..120: mol_type = other DNA
cctgtcttcacacccacaccacttatcttgattgatagagctactacttcctcttatactgcttcagaagttaacctctgtggtgcagtgctaggatatcacagaggaaataatcccttg

SEQ ID NO: 9506 - DNA, 120 bp, synthetic construct
  source 1..120: mol_type = other DNA
atatttattgtcaattccagtgtgtttcattgctaaacatcaggctcagccaaagcaatcacgaaaatgactccacgttgaatctttaacatcacaatgtggattaacaatttggcaaca

SEQ ID NO: 9507 - DNA, 120 bp, synthetic construct
  source 1..120: mol_type = other DNA
ctaccaaggctgctctcccgaggcttgttcacacaaaggaaagtgagcagctaggaagctgcatatttgaaagttgactagtcaccaaatgctggcatccaaccaagtgattgcattgta

SEQ ID NO: 9508 - DNA, 120 bp, synthetic construct
  source 1..120: mol_type = other DNA
aatctgaatttggttaaaggtcacaagtttatgccctttggagtactctctgacattttcatgatgatatgaaaggatttttccatacatactcaaaaggcgctcacgcctctgttgcag

SEQ ID NO: 9509 - DNA, 120 bp, synthetic construct
  source 1..120: mol_type = other DNA
tgatagtatactgcccacctcaattgtaaaattttattttatttcgtttttagatggagtcttgcactgtcgcccgggctggagtgcaatggtgcgatctcggctcactgcaacctccgc

SEQ ID NO: 9510 - DNA, 120 bp, synthetic construct
  source 1..120: mol_type = other DNA
tgttatttaaaaatttagaggtaagtgatagaggattgtgaaagtggctacctctgggacagtgaacagggcagcattgagaagggagctgccatttttcatcataagcctcatgatgat

SEQ ID NO: 9511 - DNA, 120 bp, synthetic construct
  source 1..120: mol_type = other DNA
gaccatcagacatgaatagattagaaattatttttctttcatgtaaaagaagtctggaggtaggctgtctagggctagtaaggtggctccacgattatgcagcagagaccctggaacctt

SEQ ID NO: 9512 - DNA, 120 bp, synthetic construct; identical to SEQ ID NO: 2386
  source 1..120: mol_type = other DNA

SEQ ID NO: 9513 - DNA, 120 bp, synthetic construct
  source 1..120: mol_type = other DNA
actgctttcttctgactttcctcagtagacatctatggctcttttaatgacattctctctccaacctgcttggactccatccacatctttctttgggttcctccttctatgaaggagact

SEQ ID NO: 9514 - DNA, 120 bp, synthetic construct
  source 1..120: mol_type = other DNA
gggccccttccccaagcagtcttcatctcatgtagctgtgacagtccttggatgatccgagctgggaggggcttcaaacaactgtatcaagttcaaacccttgatttaaatgtgaggaaa

SEQ ID NO: 9515 - DNA, 120 bp, synthetic construct
  source 1..120: mol_type = other DNA
caactcaccaaactcaggaaagcactttacttactattattggtttattataaaggctaaaactcaggaacagccaaatggaagagttgcatagggcaaggtatggggatgggagtaggg

SEQ ID NO: 9516 - DNA, 120 bp, synthetic construct
  source 1..120: mol_type = other DNA
ttgcacgcgtgggtttgatcgaagtgaggttctatcagtaacatgtgactatgcctctttcataggttgttgcttcaaagagaaaaataaccacttctgtgctgttctatgtgtacggca

SEQ ID NO: 9517 - DNA, 120 bp, synthetic construct
  source 1..120: mol_type = other DNA
ctgcgcctggcccttacagtattttctcagagggaaagaaggcctctgtcttcaggggccaccttagatcccagaaggattctgacacctggaccagaggcagagaccgccagggcaact

SEQ ID NO: 9518 - DNA, 120 bp, synthetic construct
  source 1..120: mol_type = other DNA
gcccaggctggagggcaatggcatgatcttggctcactgcaacctttgcctcctggttcaagtgattctcctgcctcagcttcccaagtagctggaactacggggtacatgccaccacac

SEQ ID NO: 9519 - DNA, 120 bp, synthetic construct
  source 1..120: mol_type = other DNA
ctgaccctcaggcctggcagatgttattaggaactgaaacttaccagatcaccacatcagggcaatgagacaccagacccctcacgcatcatgattgcctaagcaaccatctgttgtttg

SEQ ID NO: 9520 - DNA, 120 bp, synthetic construct
  source 1..120: mol_type = other DNA
gcaatcctcccgcgtcagccggccaagtagctcggactacaggcacacgccaccacatccagctaattttttatttttcatttttaacttttttttcagagatggagtcttgctctgtca

SEQ ID NO: 9521 - DNA, 120 bp, synthetic construct
  source 1..120: mol_type = other DNA
caaggaggcttcctgtaatgtatctatcatctcttcatttagctcattttttgggtttcagaatccctcgtggaaggtccatttaaaatcttggaagaaacctgggctctgcagattgtc

SEQ ID NO: 9522 - DNA, 120 bp, synthetic construct
  source 1..120: mol_type = other DNA
tggtcatgttcacataagaaaggttgaacttgtgggagaggaggcaaaaagaggaagtgatagtcactgaatgtgtgtgctagacagtatgtctggcactttataatcattttagttaat

SEQ ID NO: 9523 - DNA, 120 bp, synthetic construct
  source 1..120: mol_type = other DNA
tctcacaaagccttgtctaggtgacttgggaggtgaggcccctgttggtcagccccgttcctgatggaacaagccaccctaaccgctctgtcctctcaggtcaggcttctgacaagccac

SEQ ID NO: 9524 - DNA, 120 bp, synthetic construct
  source 1..120: mol_type = other DNA
tctgtagcattggtggggagagaattcccccaacccccaaaagagctgaaaatgagacacgcgtggaggggtgaaagtggagtgtggtcaacagtgtggttacagagatgtgtgtcgggg

SEQ ID NO: 9525 - DNA, 120 bp, synthetic construct
  source 1..120: mol_type = other DNA
tgtgaccaaccaccaataaaaaccctgaacatcaaggctcaagtgagcaatacagctggtcccaacttacagtggttcaacttgtgagttttgcactctacaatgggtttattgggacat

SEQ ID NO: 9526 - DNA, 120 bp, synthetic construct
  source 1..120: mol_type = other DNA
tgtagaacagcaagtgaacaggtgtgtatcagtcaggataggcaaggctaagctgcagtaataaataatccccggatctcagtggcggaacattgaggaggtttatttcttctttataca

SEQ ID NO: 9527 - DNA, 120 bp, synthetic construct
  source 1..120: mol_type = other DNA
ggcaggagaatcgcttgaacctggcaggtggaagttgcagtgagccgagattgcactactgcactctagcctgggtaacagaacaagactctatctcaaaaaaaaaataaataaataaaa

SEQ ID NO: 9528 - DNA, 120 bp, synthetic construct
  source 1..120: mol_type = other DNA
tgctgtgaaatgttggggtgtttggtgaataatattagaagttgggctggcagagaccctgtcacataaacattaaatcaacactggagactgagcatttgttagaaatgtaagcgggaa

SEQ ID NO: 9529 - DNA, 120 bp, synthetic construct
  source 1..120: mol_type = other DNA
tggatgagagttagattctacacattagatgcactttagcaagattttcaaaagcagattggagaaggagcccatgcttctgctggttttttttgctggcaagtgaggggttctgttttt

SEQ ID NO: 9530 - DNA, 120 bp, synthetic construct
  source 1..120: mol_type = other DNA
aagtcctgttgggagagagcattttttaccttctccctgctacttcttgctactagtaacatggatgtgagccttggaggggtagctaccatctggcacctggggtggcaagccaacatg

SEQ ID NO: 9531 - DNA, 120 bp, synthetic construct
  source 1..120: mol_type = other DNA
catgtctcattgactgtgtaatctctgtgtggcccagtacagagcatgcacaccgtaggttctcacatatgtttgttgagtgaatgaatacaataccaaacgaatggacaggacagagct

SEQ ID NO: 9532 - DNA, 120 bp, synthetic construct
  source 1..120: mol_type = other DNA
aaggccttttacttctgccccttaaggatgccctggaattcaggctttcggatcccagagctctcattagagcagccctgcgttgtagacttttctgcagtgacagaaatgttctatatc

SEQ ID NO: 9533 - DNA, 120 bp, synthetic construct
  source 1..120: mol_type = other DNA
aaagtgtgctaatgggatgatgtgcccttgtacacccactgcctctgaactctgctctgcattgctgagcaaactacatttcccagaactccttgttggattccttccaaacaggtttac

SEQ ID NO: 9534 - DNA, 120 bp, synthetic construct
  source 1..120: mol_type = other DNA
attctacacactcacagcctgagtaattcacaccatcttgatgctgagaacttccaaaatgttggtctagcctgggtcattgttatgagctctagactcacaaggccaattgcttggtgg

SEQ ID NO: 9535 - DNA, 120 bp, synthetic construct
  source 1..120: mol_type = other DNA
ctctgacccaagacaaaatgggaggaaagtgccaaatttccaagattggccaggggattaaataagataaatatgcaagtctcttatctgggggtctggcttggtaaatataaagttctt

SEQ ID NO: 9536 - DNA, 120 bp, synthetic construct
  source 1..120: mol_type = other DNA
acaagacaaaacaaaacaataccagaatggaaaatagtgcatgatctgtacagtatagttgtagaaaacttcttgttttatcatttgatgtcatgaaagtccctgctgtagataaaagat

SEQ ID NO: 9537 - DNA, 120 bp, synthetic construct
  source 1..120: mol_type = other DNA
ctctcttggaatgctgctcagaaaaatagatgtattgtttgagaaaccctgcaggcttgtcccgcatgctctagccccctcctgagagaacagatagcataaaaaatgatttgtaaagca

SEQ ID NO: 9538 - DNA, 120 bp, synthetic construct
  source 1..120: mol_type = other DNA
caatttagcagctattttccagggtttggcttgggtttggatgctggcttctgtgtgaaacctgaatacatgcaaattgtacataaaactcccccaaggcagagagggattttccaggcc

SEQ ID NO: 9539 - DNA, 120 bp, synthetic construct
  source 1..120: mol_type = other DNA
gggaagaggaagggtctcattttcctgccccttgaaaccatgcttaccattcctttagaagattgctcaagctgcctccaattgcctctttccaaaaccaaagcataggaaaacaagtaa

SEQ ID NO: 9540 - DNA, 120 bp, synthetic construct
  source 1..120: mol_type = other DNA
aaaaaccaatcccaactcaaatcagaaattacccaaaatagctggagagtcactgagatctcaggtaagctttcccttcctgccatgaactagaaggggaaagaagagtttgacattcaa

SEQ ID NO: 9541 - DNA, 120 bp, synthetic construct
  source 1..120: mol_type = other DNA
gaaaaaaaaaatccacaccaacaaataaatatcttgtctgagaagactcagatattcctggttaatattgaaaagcactgctgtggatgagcttgtgaaagaaaggacggttgggggatt

SEQ ID NO: 9542 - DNA, 120 bp, synthetic construct
  source 1..120: mol_type = other DNA
ctacctggaggcgctggtctcggccagccggttgttcatgatgcccagcgcgcccacgccgcccgagaagccgttctggcgcgtgttgacgcacacgctgcgcgggtagccgttggccgt

SEQ ID NO: 9543 - DNA, 120 bp, synthetic construct
  source 1..120: mol_type = other DNA
aaaaatagaaaccactgctgcacaggtgcaaaccactgagctacccacaaagccaacaagggacacctgctctcccactcctccaaatttttttttaaaaactgtcatctttattttagt

SEQ ID NO: 9544 - DNA, 120 bp, synthetic construct
  source 1..120: mol_type = other DNA
ctcttctttcctcaagttatttggaattgtgagtgaatccgagccgaacaactgttgactacgagtttttctccaaaagcctggtttttaaatgtaacctgtagtacacctgggcagaca

SEQ ID NO: 9545 - DNA, 120 bp, synthetic construct
  source 1..120: mol_type = other DNA
tatttcttgtaatactttcagagtacattccttaagcctatgtgctaacaatcattttctagactgtctgaaggaaatgcccagttgcccgagtgtggtgttgatcttacgcttaatgac

SEQ ID NO: 9546 - DNA, 120 bp, synthetic construct
  source 1..120: mol_type = other DNA
gagaggggacataggggacctctggggtgctagaaatgtttttgttgacctgggtggtagttacatgtgtgttagctgtgtaataatctgttaaattgtatgttttgtgagtttttttgt

SEQ ID NO: 9547 - DNA, 120 bp, synthetic construct
  source 1..120: mol_type = other DNA
agggcagtcccaggggccatctgtacttcaagggcttgcttcatcaggagatgtgagggtgacatgggtcaccagagggtgacaagtggatactgaaaggaagagatctgaagagactgc

SEQ ID NO: 9548 - DNA, 120 bp, synthetic construct
  source 1..120: mol_type = other DNA
cagagtgagactccctcagaaaaaaaaaaaaaaagagaaagaaagaaaagaaacaaagaaactggctgagcctggtggctcacgcctgtaatccccagcactttgggaggccaaggtggg

SEQ ID NO: 9549 - DNA, 120 bp, synthetic construct
  source 1..120: mol_type = other DNA
ccccttcacaggggagaggggccatggcctatcccctaaagagtctgccaaggtagactcataacctccccgtggcacagctcagacaagctgggctatttacataagacttgacccagg

SEQ ID NO: 9550 - DNA, 120 bp, synthetic construct
  source 1..120: mol_type = other DNA
tgtgcctgctttactgcccttcgctttcctacagagcacactcagctcatcctgggagacaaggtgggggtggaggatggtccatccttcttccgcatcaaggtcagtaggttcagagct

SEQ ID NO: 9551 - DNA, 120 bp, synthetic construct
  source 1..120: mol_type = other DNA
ttttgatttaaatttccattgacctaaaatttttgtggtgggcactgcagctctctccttaccaatcattctcccagcctgtactatattgagtagcagccaggctacttggagaacaga

SEQ ID NO: 9552 - DNA, 120 bp, synthetic construct
  source 1..120: mol_type = other DNA
caaccgaccaccgtggacaagccctgaaccttttgggaaagctggtgctaaaagaatagctggagaagtcactactgaggactgaaaatgcggagggtataataactgctgttgtgtatc

SEQ ID NO: 9553 - DNA, 120 bp, synthetic construct
  source 1..120: mol_type = other DNA
ggcttgagccctggaggtcaaggctgcagtgagccatgactgcacccttgcactccagcctgggtgacagagcaagaccctgtttaaaaaaaaaaaaaagattaggtgggatttcaagag

SEQ ID NO: 9554 - DNA, 120 bp, synthetic construct
  source 1..120: mol_type = other DNA
taaaaaaaaaaaaccctggggagcactgcagtagagaggctcttgggccacctgcttgagtctgctcccactttgtggaatgtacttttgcctcaataaatctgtgcttttattactgct

SEQ ID NO: 9555 - DNA, 120 bp, synthetic construct; identical to SEQ ID NO: 2426
  source 1..120: mol_type = other DNA

SEQ ID NO: 9556 - DNA, 120 bp, synthetic construct
  source 1..120: mol_type = other DNA
ctcaggccagtgacttctaacattagagaggttttggttaactgggagcaaatgcaagtgacttctttgaatcgactttgtacctcggcacagccttccttgctagcagggctgacttca

SEQ ID NO: 9557 - DNA, 120 bp, synthetic construct
  source 1..120: mol_type = other DNA
acaatgtcaattcaatcactttacctcaattcctctatcacacaggaggagattttaaaaggaagtctctggtggtttgtaaagcaacaaatcctgctctcaagtggatagttccaagcc

SEQ ID NO: 9558 - DNA, 120 bp, synthetic construct
  source 1..120: mol_type = other DNA
gccttaggttcagagaatgcaactgtgatttttccctgagatgagcattcaatcatactgcgccagggtacttgctgtggccaaaacgcctgccctggatctgtggcatgactttgtgtc

SEQ ID NO: 9559 - DNA, 120 bp, synthetic construct
  source 1..120: mol_type = other DNA
tactaaccagatgagggatgtttggtctttttagtggtttggacgatgttcttgttttggtctgtgtttggacatgattatggggtgaatggtcttgtttttctctcactccatcttggt

SEQ ID NO: 9560 - DNA, 120 bp, synthetic construct
  source 1..120: mol_type = other DNA
agtttataaataaaaatgaataagatatgatccctgtcctcatacataatgaccacaatgccctatgaaaatgacagtaagggagatgtcaggggattccgggaagcaagagaagcggtt

SEQ ID NO: 9561 - DNA, 120 bp, synthetic construct
  source 1..120: mol_type = other DNA
ggtgacagagaaaacaatggacaaagagattagccagcaaatccctcctgcacactttcagggcaaagtttaggtgatataaatgtccctgaaatgagaaaaaccatgactttcatttga

SEQ ID NO: 9562 - DNA, 120 bp, synthetic construct
  source 1..120: mol_type = other DNA
agtttgtgttttgttcatagtgtttatatgctctcaatcaaggactgtttattaaaaaattttaggaggtggtagtcaaaaagtgtctctggctgcagtactggggacagactgcagggg

SEQ ID NO: 9563 - DNA, 120 bp, synthetic construct
  source 1..120: mol_type = other DNA
cttcagtcagatttagcgctccatcttctgcctttctgaagggacagtggaagcatccatttgaagactcttcctgtgtcttctgcaaaaccaaagaaaagccatcactgccgatgtctc

SEQ ID NO: 9564 - DNA, 120 bp, synthetic construct
  source 1..120: mol_type = other DNA
aatcaccaagccacaccaaatatatgaaatatctttctctaaggtggtctttaaaatttgggctgactctcctccctctaggaatgttctgatgagtttcagtctgaaggcagggagatg

SEQ ID NO: 9565 - DNA, 120 bp, synthetic construct
  source 1..120: mol_type = other DNA
gcaaacaagtcacagtcctagtctgagattcagtgcaacactaggcgcttagtagatgctcagtaaacagaacaacaaggattttcttttttagttttaaaacattagtctacccatgcc

SEQ ID NO: 9566 - DNA, 120 bp, synthetic construct
  source 1..120: mol_type = other DNA
cactgaggcttatgtggggttttctggttttaggaatcattttcacacacggtttatttacatttcttcacaaccacctagtgaggtaagcattatcctcggtttttagatgcacaatct

SEQ ID NO: 9567 - DNA, 120 bp, synthetic construct
  source 1..120: mol_type = other DNA
cttggtggcttccaaaggccaacattctagaaagccaaccacccatgtctcctctctttctattggagtgactctgctgcttcaacagagtattaaaaacaaagacagccttccaccctg

SEQ ID NO: 9568 - DNA, 120 bp, synthetic construct
  source 1..120: mol_type = other DNA
ttctctctttttcaaatgttctataagaagtatctgttattcgagtgaattaaagaccactcgttttgtcattatttttaaaggcagagtctcaccgtctgggtggggagggaagtcata

SEQ ID NO: 9569 - DNA, 120 bp, synthetic construct
  source 1..120: mol_type = other DNA
ttaacttcttttttttttttttctcaaataatttgctcagggctggggcagccagtatcatctacatgctctctccctcagggaggaacccatccaacactaaacttccagagaaagagg

SEQ ID NO: 9570 - DNA, 120 bp, synthetic construct
  source 1..120: mol_type = other DNA
tccagtccaattttctatttttaattcttaaatgtgagtggacagccacagttcagacatttgaggaaagcctgtaagccctctcttgcagctcctcctagcttagcctccttcatcttc

SEQ ID NO: 9571 - DNA, 120 bp, synthetic construct
  source 1..120: mol_type = other DNA
gccaccatacttggcgaatttttatatttttagtagagagggggtttcaccgtgttggccaggctggtctcgaactcctaccacatataagtggttctcactcctggctacatattagag

SEQ ID NO: 9572 - DNA, 120 bp, synthetic construct
  source 1..120: mol_type = other DNA
agggcgtagctgaatccagacttccctcccaccataatcaaccaggaaaccggaaaaagtctatgagataattattttcagacattggaaaaaaggtagttcaggattatggtccctgag

SEQ ID NO: 9573 - DNA, 120 bp, synthetic construct
  source 1..120: mol_type = other DNA
aaatatgtaaaatatgctcaagatttaaaggagaaacataatgatgagaaaaatgggaaaaatttttttaaaaccaagtagaatatctcgagatgaaaaatatagggggctgggtgcggt

SEQ ID NO: 9574 - DNA, 120 bp, synthetic construct
  source 1..120: mol_type = other DNA
caagccagaaaacaatctttaaggtgctaaaagaaacaggaaaacaaaacaatgaaaaaaaccccacacttcagtaaatatgcatttcttttctgaaagatataatcacttctcactgcc

SEQ ID NO: 9575 - DNA, 120 bp, synthetic construct
  source 1..120: mol_type = other DNA
ctaccccacacggcaccatatttttctggagctctccagttctagactcgttgacacataaaaatattttggtgctagtcctggggaaggcagattattggtttaagattcagttctagc

SEQ ID NO: 9576 - DNA, 120 bp, synthetic construct
  source 1..120: mol_type = other DNA
ccccacttcctttgtggctgcagcatcttcaactgccttccccccattatgagacatgcccacaaatctccagatgcattgttagaaaccctggggccctgtagagcctggcggctcatg

SEQ ID NO: 9577 - DNA, 120 bp, synthetic construct
  source 1..120: mol_type = other DNA
taagtttggaatcatatagcagttcagagctgaatatacaaactaagcacatattcctcagtgatttatcactgatagagatatataagctgttttttttggtggggtgggggggcaccc

SEQ ID NO: 9578 - DNA, 120 bp, synthetic construct
  source 1..120: mol_type = other DNA
cagggagtgagcagaggtcagggaacaaacaaacacataaacacgttatttgctcatgaacaggatgatttccaaaaacggtacatgttctaaggacaataaggcagaatagtgtgaggg

SEQ ID NO: 9579 - DNA, 120 bp, synthetic construct
  source 1..120: mol_type = other DNA
gcttgtgaggggaacagtcaagagtgggatatagcaggaatcaggagttctattttgggcttttaaaagttttgatacatattgaatatccatgtggagatgtcaagtgggcagttggac

SEQ ID NO: 9580 - DNA, 120 bp, synthetic construct
  source 1..120: mol_type = other DNA
aaggagggcagagaaatgggaaagtagcaggagggtgatgcagggtctattaagaaggaagaatatacatgtttgcataccgatggagtataaattaacaatgcatggggagtgggtaat

SEQ ID NO: 9581 - DNA, 120 bp, synthetic construct
  source 1..120: mol_type = other DNA
aggatgggagctggaagcatgggaggtggtggtcagaggtgagatgtttagagtcaaaaactttgaaggtaatgcagttactagtaatagcaaggacatacatagatagaaccaaatgac

SEQ ID NO: 9582 - DNA, 120 bp, synthetic construct
  source 1..120: mol_type = other DNA
gtgtatgacccacttcagctcttgttatatactctgctgaactgccttctgggtcatgtatattgctcactaatttgatgttaggaactgagatgccttagggattcggggactgtgaag

SEQ ID NO: 9583 - DNA, 120 bp, synthetic construct
  source 1..120: mol_type = other DNA
aggatcatggccatttggaaaggattagagaggagtcacgcggagtgcgattcggagtttgcgtttatctcaactgaaactttccagaaagctaggacaactgattccaataaaagcttc

SEQ ID NO: 9584 - DNA, 120 bp, synthetic construct
  source 1..120: mol_type = other DNA
tcatgttattaattgtaacagtgacaagcactactaagatgtagcttctgaggtggagaaagaagaaactacgttttctgcatacctactatgtgctgggccctgggccagctttagaca

SEQ ID NO: 9585 - DNA, 120 bp, synthetic construct
  source 1..120: mol_type = other DNA
aacctctctgagcctgtcatctgtgaaatgggatataattttctttgctgtcctaggatttttgggagcttactgagtaaacacagataaaaacacagtgaactggcaaacatgacatgt

SEQ ID NO: 9586 - DNA, 120 bp, synthetic construct
  source 1..120: mol_type = other DNA
caattacatccttgacaatgattaaagagcactgcgcctatgagggatgattaagatattctagttgaggacccaaagaaaatgcattttcaaaagtacccttccaggctggttatgtaa

SEQ ID NO: 9587 - DNA, 120 bp, synthetic construct
  source 1..120: mol_type = other DNA
atctgttgctgttgagtataaagacactgtgaacattgtaaaatctgcaattacaagattctggatgcttcatcctgaggtcaccttggaatgagatcctctgggatctggaggaagcag

SEQ ID NO: 9588 - DNA, 120 bp, synthetic construct
  source 1..120: mol_type = other DNA
agagcgcaagctctcagggaatccccctttgacttgctgggtaacttgggcaacctctcctcctctctgagccttgtgtaaaatgaggaacaagggtaaattcacccgctttgggctggt

SEQ ID NO: 9589 - DNA, 120 bp, synthetic construct
  source 1..120: mol_type = other DNA
gcgtaaagatgatcactgtgtcattactcaaaatagccccaaactgggaaacacccagctatccagcaataggggtagtgaattacagaacatcaactagatggaatattatgcacccac

SEQ ID NO: 9590 - DNA, 120 bp, synthetic construct
  source 1..120: mol_type = other DNA
agagaaatacgcaaggaaggatgcgcctctccttctggataatgtgtttcattccagatatcaaaactatctccagctggattacatacatgttagaagaaagttgaatgtaaatgtggt

SEQ ID NO: 9591 - DNA, 120 bp, synthetic construct
  source 1..120: mol_type = other DNA
ataatttagaccacaaagtggatttttatttcgcttgagctattcagattgactttctacacagcctgaacggctgctgaataatcacaggcaaaattttccactggtaccgcactgtgt

SEQ ID NO: 9592 - DNA, 120 bp, synthetic construct
  source 1..120: mol_type = other DNA
aatattgcaatctcaaacaagaacgttcccaccaattatatgcatgaaattggtggatattgcacaacttggtttctggacctagctgaacccctcattaactgtgtgaccactgacaag

SEQ ID NO: 9593 - DNA, 120 bp, synthetic construct
  source 1..120: mol_type = other DNA
cccgcagattttggaagcaacgtgctgggtcactcgtaatataaccacatgcttcagtgtagccctcctacattgcttgcctacatctgaaaacacgaatcaagaaagagaatatagctc

SEQ ID NO: 9594 - DNA, 120 bp, synthetic construct
  source 1..120: mol_type = other DNA
cagccatctgctgtggcttatcctgggcagttacagtccatgcctctgtatctgaactggcataccaaaccactccagaaggtgtgtctatgaaatccctcacttctcaagcccagcaaa

SEQ ID NO: 9595 - DNA, 120 bp, synthetic construct
  source 1..120: mol_type = other DNA
aagcgggggagactatgaaaagaaataaaagcgccgagggtggagggagaaggggcttttgagatcatcctggagaggaaactgaggcctgggggttgtgggtggaaaacaggaaggaac

SEQ ID NO: 9596 - DNA, 120 bp, synthetic construct
  source 1..120: mol_type = other DNA
cccctcgtcgccttcccagagcccggacagaggggcgcctccgcctcctccccggcgctcaggccacacgcgagtcccgtggcccagcgggtgcccgggcaggggcgctcctctgcgcgc

SEQ ID NO: 9597 - DNA, 120 bp, synthetic construct
  source 1..120: mol_type = other DNA
gggcggggacgctgcggaatagagacgggggaggagtcaagcgcgggtagggggccaaggtgccacagggagaaagagcccaggcccggcggactgccgggctcctcgcgccaccccagc

SEQ ID NO: 9598 - DNA, 120 bp, synthetic construct
  source 1..120: mol_type = other DNA
gcctagggtatcgttgtgtgagggggagaatatcttatccaccaagaaagtcgaacctccctcttttctggagcacagcagaaggtgtatacaaacacaaatttttgttattgcagacta

SEQ ID NO: 9599 - DNA, 120 bp, synthetic construct
  source 1..120: mol_type = other DNA
aaatgtagtctttaaacccttgaggctgccattcaaagaccttgatgaggtgattcctaacaaatcattccagcctctccttctactaacttttacttattccccaagtactctatatcc

SEQ ID NO: 9600 - DNA, 120 bp, synthetic construct
  source 1..120: mol_type = other DNA
tctgtaaatatactaaaaagcattgaattgtacactttaaatgaatgaagtgtatggtatgtgagttacatctcagtaaagctgttaaaaaacaaatacaatggaccaggcatggtggct

SEQ ID NO: 9601 - DNA, 120 bp, synthetic construct
  source 1..120: mol_type = other DNA
cagcagctcttctccccccattctcctggaattaggtttttataaaaccttttatgttttaagtcatttggcaaatgtttcctcacaccatgtttcacagagctggtaactgggaagaag

SEQ ID NO: 9602 - DNA, 120 bp, synthetic construct
  source 1..120: mol_type = other DNA
aaggtgaaatattgaggtctgcaactacaagagtaaaactatctagttctcccttcaattatgtcaatgctggtgtcacatattttgaggctctgttgtttgctgcatatatgttacagt

SEQ ID NO: 9603 - DNA, 120 bp, synthetic construct
  source 1..120: mol_type = other DNA
ctgcaagagcttagagtctggctggggtgataagatgcacatgtatgaagcagtaaggactatgatatagcagatacagttaggagctgactgtatggtgctggtcacgggaggtcagag

SEQ ID NO: 9604 - DNA, 120 bp, synthetic construct
  source 1..120: mol_type = other DNA
aagctgattgctgcctgttgatagggagttttgaaatgaagacaagaatcccagagtgaagaggagccttaaagctttgagggcaactccttatttcctaatcctcttgtgtagaaagtt

SEQ ID NO: 9605 - DNA, 120 bp, synthetic construct
  source 1..120: mol_type = other DNA
acatgtttgagtttggcttctcaatgagacttctagttcccacccaaatctctgttcaacctcttttttagcaatagaactcccattttatttgagatgtcactgtgaccagttaaaaga

SEQ ID NO: 9606 - DNA, 120 bp, synthetic construct
  source 1..120: mol_type = other DNA
ctgaaaatggatcacagcatagaacatgatgtttgatgtaaataaatgcgtaggaaactgggggtaactgttttacttgctaatagcccagaaatgagcattggtgagtggggaaattgg

SEQ ID NO: 9607 - DNA, 120 bp, synthetic construct
  source 1..120: mol_type = other DNA
tacaatctgggtggggttgtctcactgtatgagccctcattatgttatacttaaaaagcataatatactgtaacctgagggtaataagccagccaaagcacttgcaggattcaccctggg

SEQ ID NO: 9608 - DNA, 120 bp, synthetic construct
  source 1..120: mol_type = other DNA
gggtaagtgaatgacagagggcagctgtgcagcttggaatggcatgccaaggctgttggcaggaggagagaactatggaagaccactgtgaggtcatttggggctgggcagaggcctgat

SEQ ID NO: 9609 - DNA, 120 bp, synthetic construct
  source 1..120: mol_type = other DNA
gaaaagagagtcagcaaaaggtggtgggattgtcattagttcttacaggtttgggataggtggtggagttgggagcaatgttttgtgggcagggggtggatcttacaaagtgcattctta

SEQ ID NO: 9610 - DNA, 120 bp, synthetic construct
  source 1..120: mol_type = other DNA
atcaaggccttggcagttccggaggacaactgcagctaaagagtcaacctgggcttggaggacagataaagtttgtgatatatctgtaacgctagcagaaaagtcattagagaggctgcg

SEQ ID NO: 9611 - DNA, 120 bp, synthetic construct
  source 1..120: mol_type = other DNA
attgacataaggagaaaggtgccgtaaatagacgtggagaagtgtggcagcttgttggtgcaaaatatctggggagttctcaccaaatctgcctagaaagtaaagaagttcctcagatgg

SEQ ID NO: 9612 - DNA, 120 bp, synthetic construct
  source 1..120: mol_type = other DNA
tcttcatatggctgggaatctggagtaggcaagagaagattagcagcctggtgaatttcctgtctagcctgatggaggactggaagatagtcgcacagaaggctggtgtctgggatgaag

SEQ ID NO: 9613 - DNA, 120 bp, synthetic construct
  source 1..120: mol_type = other DNA
atttagagtcagtataaatattgatgcgtagtccctttgcaagagtgagggcccgagttaaggcaatgagtttggcttgctgagaggtagtggaggggggcagagtggcagcttcaatga

SEQ ID NO: 9614 - DNA, 120 bp, synthetic construct
  source 1..120: mol_type = other DNA
aacggaaagaggagtgggaaaaggatttaggatctatggggtccctttgtgagtttatataatggtttccctttgtgagtttatataatggttttgttaggatggcaaaaccaggtatcc

SEQ ID NO: 9615 - DNA, 120 bp, synthetic construct
  source 1..120: mol_type = other DNA
caatagccacaacagttaagggggcaagggaaacaggcccttgaaaagaaggtaatgtggagtgggtagcccccgtatcagttaaaaaggggatggacttaccctccactgtgagttacc

SEQ ID NO: 9616 - DNA, 120 bp, synthetic construct
  source 1..120: mol_type = other DNA
gctaaacaaaccatgagctgggctgggttttcatcctttccttgggtagtttctttaagtttgtcataattaacagatttgtatgctgcctttttaagcccttcaactaggcaagcagtc

SEQ ID NO: 9617 - DNA, 120 bp, synthetic construct
  source 1..120: mol_type = other DNA
aggcgtccccgtggtgatcagacacctctgaaatgtgggtgaataatcaggcaggcatccgcacagtgattaaacaccgaggtaagactgttttcctgagtccgtgaccagcaccagagt

SEQ ID NO: 9618 - DNA, 120 bp, synthetic construct
  source 1..120: mol_type = other DNA
atatcacaaagtacattatcgcaagggtcggggaggatattacaaagtaccttctcaagggtggggagagtgtgttgtcaaaaagtcaattgatcagttaggatggggcaagaacaaatc

SEQ ID NO: 9619 - DNA, 120 bp, synthetic construct
  source 1..120: mol_type = other DNA
acagggaactgaagaaactgtattcttatgctaattccatttctttgtgggagtcttcaaactggctggcatcagctattttgctggaatttgggatctgaaaaacatcttaagcgatcc

SEQ ID NO: 9620 - DNA, 120 bp, synthetic construct
  source 1..120: mol_type = other DNA
tgtgttcccagtttctgattttctcagccttttctgcctgtaaaaccaacctcctcggctcagctcatcataggaattttctaaattattggaggagatgtcaccccgattcatgaattg

SEQ ID NO: 9621 - DNA, 120 bp, synthetic construct
  source 1..120: mol_type = other DNA
tgattaatgaagtcacctatgacaactccacttcagacaattaactcaagttcccatcttcagctcccggagaactgagacacatcattaactgtaaattatagtgactcctccaccctg

SEQ ID NO: 9622 - DNA, 120 bp, synthetic construct
  source 1..120: mol_type = other DNA
agagagagtgctcctgaccaaaatcagccagaagcccctctcaggtttattctccgaaataaacctatctctgactgttgagctgctttttttgtatttcttgtcttctttctttaattc

SEQ ID NO: 9623 - DNA, 120 bp, synthetic construct
  source 1..120: mol_type = other DNA
agagggcttcggtagttccctaatgtaggggcaagcccaaattattttaaaattgcattggagagactcagcaaattctgagtataagttggatgcctgctgacttgggcccagacaaaa

SEQ ID NO: 9624 - DNA, 120 bp, synthetic construct
  source 1..120: mol_type = other DNA
tgcagccttcaaaagtatctcagcacaagaagagggagggagaaagaaaagctacactttccagagtcctggagtggacattggctatttcttcccacccagactccattgcccttgagg

SEQ ID NO: 9625 - DNA, 120 bp, synthetic construct
  source 1..120: mol_type = other DNA
caagcagatggtactaaatcattcatgagaaatccaccctcatgactcaatcacctcccaccaggctccacctccaatattggggattacagtttgacatgagatttggcaaggacacag

SEQ ID NO: 9626 - DNA, 120 bp, synthetic construct
  source 1..120: mol_type = other DNA
tgtctctccatagatccaggcctttggatggccttttccacccgtcagcaggtatgggaatgccaagtataggtgctatgctctgaatgtttgtgtccctcaaaattcatgtgttgatat

SEQ ID NO: 9627 - DNA, 120 bp, synthetic construct
  source 1..120: mol_type = other DNA
acagcagcattgtaagtgccctcaatgcctgttgcagcagctgtggagtgctgagcaacatttggggtgcattttctgtgtctttcttgtacacacacacacacacacacacacacagag

SEQ ID NO: 9628 - DNA, 120 bp, synthetic construct
  source 1..120: mol_type = other DNA
agggtatgtggtcttctctgtagaaggtggcacaaagcaggcacacagtgccacaaaaaggcctcgctcttgattgactcatcaatgctgtgtgacatgtgaggagtgaggatgtgtgca

SEQ ID NO: 9629 - DNA, 120 bp, synthetic construct
  source 1..120: mol_type = other DNA
aatagaaggtattatcattaagaggcaattaggggacgtcatgtcgctcaatacagcgcaaggcagcagccagagccccagccgtgggctgcagagctacaaggaactgctttcatttac

SEQ ID NO: 9630 - DNA, 120 bp, synthetic construct
  source 1..120: mol_type = other DNA
tgattcaatggtttctagtatattcacagatatatgcaaccatcaccacaattttagaacattatcacccccaaaaagaattttatatcctttagctgtcacctgtccatctccccaaca

SEQ ID NO: 9631 - DNA, 120 bp, synthetic construct
  source 1..120: mol_type = other DNA
tgtgcttggcgattcctccctcctgcctgtctgtccctacccacctatcttgagtcaaccattgagcaaactacagattagttgcattttctagaatggaatagtatgtggtctttttta

SEQ ID NO: 9632 - DNA, 120 bp, synthetic construct
  source 1..120: mol_type = other DNA
ttgactgatacagcaagaattttctcctggggccacttgctgggatcatggagatccttattaatacatggtatcagcagctgcctattctccctgccagggagtaccctgtggccacca

SEQ ID NO: 9633 - DNA, 120 bp, synthetic construct
  source 1..120: mol_type = other DNA
ctgcctgtgtcccctgaatcattttcttggctactactataactttttccaggaacacacccacagatgagaaatagctagaccaatgttgttgatgccaaaagccaagaattagtggtg

SEQ ID NO: 9634 - DNA, 120 bp, synthetic construct
  source 1..120: mol_type = other DNA
cacctctccttaaaggtcagtgcgaatcctagttttctatgaagtgttaccaacaattatggccgacttcaccatcttctgttccttagggttaatcagaggttttattttagaacttgc

SEQ ID NO: 9635 - DNA, 120 bp, synthetic construct
  source 1..120: mol_type = other DNA
atggaatgaaccttttctcttgctgatctctcttttgttatagagacctcagctgtgatgttgctcagcctggaatctaggttttctgatgcctattggtgaagaaaatgcatcccactg

SEQ ID NO: 9636 - DNA, 120 bp, synthetic construct
  source 1..120: mol_type = other DNA
cattctagaaagttctgcctgcccagtggtaattttccctttcaggtttcttacctggaaagaaattcccagccactcttgccagcctgtctatttcactaagccagagaacatattttg

SEQ ID NO: 9637 - DNA, 120 bp, synthetic construct
  source 1..120: mol_type = other DNA
tgggcatgaatatgggtaaatttttcatctgtgtcctacatgcctctgtgcacatgcaacgtgcagactgttcaccccttccaggcagctttcagactttgcttcactgtgatcagcagt

SEQ ID NO: 9638 - DNA, 120 bp, synthetic construct
  source 1..120: mol_type = other DNA
aacccagcctaacaagagggtcatccaatttgcttggaatgttaatcccaatttcttgcaatggtaaaaatatttttttttcttagtgaattagagtctttaacccagaggaagtttaca

SEQ ID NO: 9639 - DNA, 120 bp, synthetic construct
  source 1..120: mol_type = other DNA
ctttgggtttcattatggtagtatcccacttccaggtatctaagtctatgtcaagtattaattgctgagcaataaaccatccccaaacatagtagctcaaaacaactaatttttctcatg

SEQ ID NO: 9640 - DNA, 120 bp, synthetic construct
  source 1..120: mol_type = other DNA
cagaagtcaggcccagctgtagtggttcgcatctgtaattccagctctttgggaggcagaggcaagagatcacttgaggccaggagttcaagaccttgctatgcgcaacatagcaagacc

SEQ ID NO: 9641 - DNA, 120 bp, synthetic construct
  source 1..120: mol_type = other DNA
ctataaaatttttcactctataccaaacctagaagtttttctcctactgccaaaacctcacagtaaggtgaggatagacccctccaccatcacagtgtggctttgaggaaggaagtgagg

SEQ ID NO: 9642 - DNA, 120 bp, synthetic construct
  source 1..120: mol_type = other DNA
aaattgctcatgtaattcctggcctctgtctccttggaaaaataatgaatggtcccaaaccataagagaaagccattgtacaacctcaacacacatgtctgggcagccctaaggagaagg

SEQ ID NO: 9643 - DNA, 120 bp, synthetic construct
  source 1..120: mol_type = other DNA
tccatatgggtgggtatgatggatccctcctgcaactggccactaacacagaatatagagagctggcttatggaattaacgaagacctcatagaaaagtgaaaattgggatgaaatgcca

SEQ ID NO: 9644 - DNA, 120 bp, synthetic construct
  source 1..120: mol_type = other DNA
agttagctacgataatagagtgctgctgggggccgggcaggattagacactaaagtatattttctcatgttggtctcacaataactatgtagagttgggcttatccttattgtataaacg

SEQ ID NO: 9645 - DNA, 120 bp, synthetic construct
  source 1..120: mol_type = other DNA
gggagtctgttcctagtcaactgatctaagatacagtcaaagtgagcattactggttggcaggtagctttgctgcccttgatcattgagggacccaagttttttccatcttgttctttat

SEQ ID NO: 9646 - DNA, 120 bp, synthetic construct
  source 1..120: mol_type = other DNA
atgattcccaagcttcaatttttttttttattaatcacaaattacttgtaaaagtcttccatctgatcaagacgagtggttgcctgattttgcttgtgccctccccacttgagagcgggg

SEQ ID NO: 9647 - DNA, 120 bp, synthetic construct
  source 1..120: mol_type = other DNA
gctgtgggaggccacctccaccaggagtgagtgacccactgcctcccaaatacctctgatgggagggttatgcaaagcccccctcaattctactcccaacaggccacactctttggcctt

SEQ ID NO: 9648 - DNA, 120 bp, synthetic construct
  source 1..120: mol_type = other DNA
gcccaggtctctcttaggagttctccctgtggctgtggagagaatgcctgatgtttctctcatcttagcccaggcactgaagagagaatgcttgtctcaaaatgagttcagaggctttta

SEQ ID NO: 9649 - DNA, 120 bp, synthetic construct
  source 1..120: mol_type = other DNA
tcatgcaggctaaagccagccatttgacagtggaggcagagatggcagcaacacatctctctgtaagccaaggaatgccaaaggcaccagaagccagagaggcaaagaaggattctcccc

SEQ ID NO: 9650 - DNA, 120 bp, synthetic construct
  source 1..120: mol_type = other DNA
tagagaatatctgactctatgaatgttacatctgtgaatgctgaggctatggcaatgaatgaggtatcctgatacattccagcacatctgcatcctaccctaaatgccctggttggtcct

SEQ ID NO: 9651 - DNA, 120 bp, synthetic construct
  source 1..120: mol_type = other DNA
acctgtcagttttgatttttttcctttgaagcccaaataacaacgtgtcacctttctcgacaaaaagccagcattggcgttgacttttctctttgggctagactcatggaaggtgccaga

SEQ ID NO: 9652 - DNA, 120 bp, synthetic construct
  source 1..120: mol_type = other DNA
tgtacatatttatggggtacaatgtgatgttctaatacatgtatacattgtgtaaaattcaaatcagggtaattagcgtatccttcacttcatacatttatcatttctttgtggtacgaa

SEQ ID NO: 9653 - DNA, 120 bp, synthetic construct
  source 1..120: mol_type = other DNA
tgggagaacgtccaaactgttctccatagtggtcatactaatttacatttccaccaacagtgcatgagggttcccttttctccacttcctctccagcatgtattactgcctgtcttttgg

SEQ ID NO: 9654 - DNA, 120 bp, synthetic construct
  source 1..120: mol_type = other DNA
gtttttgtttttgttttttgcttaagatagctttggctattccgggtcttttgtgtggttttttttttctatttctgtgaagaatgtcagtattttgatagggattgcattgaatctgta

SEQ ID NO: 9655 - DNA, 120 bp, synthetic construct
  source 1..120: mol_type = other DNA
attttcttcatccatttatccattgatggacacttaggttggttccatatcttggctattgcgagtagagctgcaatgaacttgggagcacagataactctttgacacactgacttcctt

SEQ ID NO: 9656 - DNA, 120 bp, synthetic construct
  source 1..120: mol_type = other DNA
tttcacctagttggattgactaggatcattttgccacatgtgctgtctccatgtggttctatatatgtcacccctcatcacctaacactgtgctgaataaatgaatggctggagtggcag

SEQ ID NO: 9657 - DNA, 120 bp, synthetic construct
  source 1..120: mol_type = other DNA
tgtgcgcattttaaagatctctctgctaccatgatgaagagggactttcaaggtgcagttggagggatggaagagaagacaagttatggtccaggacaaagacaaggaggcctgaacagg

SEQ ID NO: 9658 - DNA, 120 bp, synthetic construct
  source 1..120: mol_type = other DNA
taatcactagaggtctgtggcctctgttcttgcgtatctcccaccgttcttcccttgctatctttcaggtagatggtgcctaagaaatatttacctgtcccgtggttgagagattcatag

SEQ ID NO: 9659 - DNA, 120 bp, synthetic construct
  source 1..120: mol_type = other DNA
aattatggtgtgtacagacaacatgtggaatgaactgccacatattttgtctccaggtaagagggcagcattaagggttatggagcaggaggtagcagggtgaaggaatttgcattcatt

SEQ ID NO: 9660 - DNA, 120 bp, synthetic construct
  source 1..120: mol_type = other DNA
cacagaggccagccacctcctcaccgactctcctggacaagcacttctgaggacagagtccttgtcagggctggtttcttggctgaaccctcctttgccaccaacagagagatgcctgca

SEQ ID NO: 9661 - DNA, 120 bp, synthetic construct
  source 1..120: mol_type = other DNA
cagagcttcctaaagaaaaagacaaagttacaacttgtaaaatcccagagtcagtgtcacagtgctgtggctaactgaactgtcaagcagatgcaacttgccccaggcatggacaaaaaa

SEQ ID NO: 9662 - DNA, 120 bp, synthetic construct
  source 1..120: mol_type = other DNA
aaaatgaccatgtttctgaggcacgagtagttggtgacatggccggtgtgaagaaatcactggccagcccagcactgtcctttaaaaccagaggctgtggattcacctcatgtgtagaca

SEQ ID NO: 9663 - DNA, 120 bp, synthetic construct
  source 1..120: mol_type = other DNA
caacccctggacaacatagacagctcttcaggacgcctgaaaagccagctattgacaaatctgcctaacactctcgcaaactccattttctacagggtgagatgcagacatctttccatg

SEQ ID NO: 9664 - DNA, 120 bp, synthetic construct
  source 1..120: mol_type = other DNA
ctgcctccattccagcactgggatgtggttggtaatgtgagattctcactatccaatgccgcaatcagagccatatgcggctatttaaacctcaatttaaatgaattaaaattaaataaa

SEQ ID NO: 9665 - DNA, 120 bp, synthetic construct
  source 1..120: mol_type = other DNA
accatcaccaaaaataaaactgccttggtatccttgctgtagtccatgaagcttctgtattagaattacttggaaggaagaggcttgtttaaaatgcagattttggctgggcgcggtggc

SEQ ID NO: 9666 - DNA, 120 bp, synthetic construct
  source 1..120: mol_type = other DNA
tttcttgtgggtatagggtgggcacctcatgtaagggtcttatcacctacttcagagcaagatcaaggaattcttttatggcctgctttaggagaagcacggaagagggtcagagaggct

SEQ ID NO: 9667 - DNA, 120 bp, synthetic construct
  source 1..120: mol_type = other DNA
tatgtagaccaagtctctatcttggcaaatacttcacccacttcagggagaaaggaaagaaagaggtgagaaatgaagaaccctttcttgccagagtgatattgagcacgttttcaaact

SEQ ID NO: 9668 - DNA, 120 bp, synthetic construct
  source 1..120: mol_type = other DNA
gtgtaatctagaggtggacactaccccttgtcatcaaatatccaaagagctgttaggtagaagcaccttgaacttgcttcctgtggctcttaagggaagtcctatgatgttcagggtttg

SEQ ID NO: 9669 - DNA, 120 bp, synthetic construct
  source 1..120: mol_type = other DNA
catgtcattcccctgcttaaaacccttcaatgggctgggcacggtggctcatatctgtaatccagcacttaggaaggctgagatgggaggatcatttgagtctaggagctcaagaccagc

SEQ ID NO: 9670 - DNA, 120 bp, synthetic construct
  source 1..120: mol_type = other DNA
tttggagtccaaagttcaaatcccatctctaccatgtatgattcttgcttattcattaaggctactttggttactaacaatagaaatggattctggcgaacttaagccaaaaagggtgaa

SEQ ID NO: 9671 - DNA, 120 bp, synthetic construct
  source 1..120: mol_type = other DNA
ttcatctgtctcaagactgtttgacccagcttggttcaagtatcaaattccttggtcgggccaggcacagtggctcacacctgtaatcccagcactttgggaggccaaagcgggtggatc

SEQ ID NO: 9672 - DNA, 120 bp, synthetic construct
  source 1..120: mol_type = other DNA
agctctcattccttttatgaaaaatggtattcaaaaaccaagacctggtccctagatgtgctcactgctattagggtgtcactgtttccaggtgttcttaggggacagagctggggaaca

SEQ ID NO: 9673 - DNA, 120 bp, synthetic construct
  source 1..120: mol_type = other DNA
ccatatattgaataatttctctttccttcctggtttgaaatgctgcctttcgtgcacgttacattcctataacttctgcatttgggcctatttctgggatttctgttctggtccatggat

SEQ ID NO: 9674 - DNA, 120 bp, synthetic construct
  source 1..120: mol_type = other DNA
actccggtcttccttctgttccttgaacacacagcaggactcctgtctctaccaatgcatcttctttgaataactgtatataaacctatcgacttaaacttctataagacttacataagc

SEQ ID NO: 9675 - DNA, 120 bp, synthetic construct
  source 1..120: mol_type = other DNA
ttacttggttaattatttcacgtaccaattctaagtgccttttgcctcagagtggaattaacagataccaggtagtccccctaccctcatcccatgctcttggccaatattgctaattca

SEQ ID NO: 9676 - DNA, 120 bp, synthetic construct
  source 1..120: mol_type = other DNA
gtagtatttattatgatgaggcctctcctcttcgcttgtaggcagccaccatcatgttgtgctctcatatagcctctttcttgtgcaagtgaggagacagagtgaactctggtctcataa

SEQ ID NO: 9677 - DNA, 120 bp, synthetic construct
  source 1..120: mol_type = other DNA
ctctaccctggatggctttggaaaacctgcctcaggtgtcactgtgcctttttatgggcaccatgcactggacctactggctttgtaaaggcctgcagaaatgctctggtttgaatgtgt

SEQ ID NO: 9678 - DNA, 120 bp, synthetic construct
  source 1..120: mol_type = other DNA
ctcttgaacttcctagccttcagaagcccagagaagatatatagccacttaatcactgtgcattcattcatccaatagtaattgagcacctactctgccctaggcattgggcttagcctt

SEQ ID NO: 9679 - DNA, 120 bp, synthetic construct; identical to SEQ ID NO: 2541
  source 1..120: mol_type = other DNA

SEQ ID NO: 9680 - DNA, 120 bp, synthetic construct
  source 1..120: mol_type = other DNA
ggaggcagagttttaagtgttactacaaatgaagaattgacactacccccaatagactgggacccggaggctgggataagatggattgaaactcactttctccatggtcaaaatggagaa

SEQ ID NO: 9681 - DNA, 120 bp, synthetic construct
  source 1..120: mol_type = other DNA
ttcacatctgtctaatgtcttctggcccactcagttccttgccagaagttaatctgcagtgaaaacaaagctgtctcctcttcactgtgctcacccttcactgtcctgtgttatgctata

SEQ ID NO: 9682 - DNA, 120 bp, synthetic construct
  source 1..120: mol_type = other DNA
gagccacacggcagcaggggcagcccttaattgatttatgaagtccttgaagtgaccctcagtgccccaagtcccctcttcttcctcagcaaaggttttggggctgccataacaaaatac

SEQ ID NO: 9683 - DNA, 120 bp, synthetic construct
  source 1..120: mol_type = other DNA
accctttttctaaatgcaatcacatcctgaggttctggatggatataatttttggaaggaccacgattcaacccactgcaggggctatcattttacctggactcctcctgtctgggagaa

SEQ ID NO: 9684 - DNA, 120 bp, synthetic construct
  source 1..120: mol_type = other DNA
ttcttttccccttcttctctgcataaatgacggctactatacctagttttgtaacttgctgttttcacctcacaatattttcgagggtctttccatatcagccaaacacagcctgaccgt

SEQ ID NO: 9685 - DNA, 120 bp, synthetic construct
  source 1..120: mol_type = other DNA
acaacgaacattttccgggtactttacaaagtgctttctcgtacactttctcagttaatgtgagcttccgtcagagtcttcgtttcagcagatttaagcagaaaaagtaatctagaaagt

SEQ ID NO: 9686 - DNA, 120 bp, synthetic construct
  source 1..120: mol_type = other DNA
tttgtttgtcctttgcaaaatatttgctgggaaacaaagaccttcagtagaagcacaagattttaaagagaggaatgaaagatgtagcgaggggaaaagagccaggctgggaggtgcaca

SEQ ID NO: 9687 - DNA, 120 bp, synthetic construct
  source 1..120: mol_type = other DNA
cttggggagatttcacaaattactgatgcttgagacccgagattctaatttaatttgaggtggttacagggtcagaggtcgtttttaaaggttctcaagtgtgtcttatgtacagtcaag

SEQ ID NO: 9688 - DNA, 120 bp, synthetic construct
  source 1..120: mol_type = other DNA
ggggttgacataccactcaaatcaaaggcagaaccaaaagaagtaagtactccaaaggaaaggacatggactgaagggctctggtggtcggaggaggtagggaaatacactattctatgt

SEQ ID NO: 9689 - DNA, 120 bp, synthetic construct
  source 1..120: mol_type = other DNA
aacctgttgtggtcatttgactcattctctgtgtatgcagccctgcatactttggtgttattcctgttgcaaaagtcccgatacttttctccgtcactgatgttttgttttgagacaggg

SEQ ID NO: 9690 - DNA, 120 bp, synthetic construct
  source 1..120: mol_type = other DNA
tctttctggacaatttctcagagctctagaccccttctctggaggaagaccttcattaccaccccagcccacccataccccatcccagggtgaatggaggctggagctggtttcttcttc

SEQ ID NO: 9691 - DNA, 120 bp, synthetic construct
  source 1..120: mol_type = other DNA
gtatgtaccttcttcccaggggagaggggaggggtgatgtaggcaacttagaggaaagtaaatgacttggggaaagatggatgagcctaagaagagtaggtgacagccagtgacaaagtc

SEQ ID NO: 9692 - DNA, 120 bp, synthetic construct
  source 1..120: mol_type = other DNA
tcaggtaatccacccgccacagcgctggccaggaagaatatcatttgattgtacagggttctgtccagcaaggcatgcctctagatttggggtgggggtaaatgttcagtggatccaaga

SEQ ID NO: 9693 - DNA, 120 bp, synthetic construct
  source 1..120: mol_type = other DNA
tagttttcttgtttacattccttaatgtagtgtatacacatagccctagacacactctgcttgtgtctaattaaattcaagtacctttttcatcaggtttgacttcccagttagctaaac

SEQ ID NO: 9694 - DNA, 120 bp, synthetic construct
  source 1..120: mol_type = other DNA
tgagacagagtctcactgttacctaggctggagtacagtggcacaatctcggctcactgaagcctctgccttctagattcaagagattcttgtgcctcagcctcccgcgtagctaggatt

SEQ ID NO: 9695 - DNA, 120 bp, synthetic construct
  source 1..120: mol_type = other DNA
tgaaaaggaaaagggttaattagaaataactggatattttatccactcagatggtctttggagacattcagacagctgctagagtctcctcagtaattgcctaaaatttagtccacagcc

SEQ ID NO: 9696 - DNA, 120 bp, synthetic construct
  source 1..120: mol_type = other DNA
cggcagtgggcatgtcttagggaagcccctctgtatgagttcccttatctgtgcctgcagcatgcagcatgatttttttttttttttttttttttgagacagagtctcactctgtcgccc

SEQ ID NO: 9697 - DNA, 120 bp, synthetic construct
  source 1..120: mol_type = other DNA
accttcaaactgcccttaatcattcctggacttagaccaacctaactttgggagacatttagtttatagtttaaatgataataacccttacccaaaactaaatcacctttgtaaagctaa

SEQ ID NO: 9698 - DNA, 120 bp, synthetic construct
  source 1..120: mol_type = other DNA
ggtcatgtggccccacccagaaataggctccctggcctgccaaactatccttaaaaaccctaacctctgaatttttcagggagattgatttgagtaataattcagtcttccacgtggcgt

SEQ ID NO: 9699 - DNA, 120 bp, synthetic construct
  source 1..120: mol_type = other DNA
tggctctcttagctaagggagagtcaattcaggtggaaacaaggctaggtgattaaaggaaagggagagtctaaaaacagggttagtaaaaacaaggttaggcattacaaaactgccttt

SEQ ID NO: 9700 - DNA, 120 bp, synthetic construct
  source 1..120: mol_type = other DNA
ccaggaacagaagtcagcaagaactcacttcaaccccctgtaattttatcttcaatccgaccaatcaacactccctacttcctgagcccatacctgccaaataatccttaaaaacgctga

SEQ ID NO: 9701 - DNA, 120 bp, synthetic construct
  source 1..120: mol_type = other DNA
ttagttacccttctcttcctggtgcagagagggagacacccttacaaatggagattttctttatagatgtaaatttcccttacaaaagggtaacttctactctgtttttagagcttctcc

SEQ ID NO: 9702 - DNA, 120 bp, synthetic construct
  source 1..120: mol_type = other DNA
cgatcagataatccttgggtatgtttactagacaaagcccagtagcaccctgagaagaaaggtagtaatcccttttccctatttccaagttttggaaatctttccttaatgtgcttttgg

SEQ ID NO: 9703 - DNA, 120 bp, synthetic construct
  source 1..120: mol_type = other DNA
caccatgcctggccttcaagaggcattttctactcattcaatatgaaaaatagctttattgtatctcttggaaacagtatatgttctcacaacttttataacctcccttgtagagtagag

SEQ ID NO: 9704 - DNA, 120 bp, synthetic construct
  source 1..120: mol_type = other DNA
ccctcgtgaatggcatatatgccttctgaaaataatgcttctatccataagagtggctaatggtggggattttagatactacatcaaaccagtggtactgatgttactggatggtatagt

SEQ ID NO: 9705 - DNA, 120 bp, synthetic construct
  source 1..120: mol_type = other DNA
tttctttttccatttgctcttctccctgccctacccagtttcaagatgtagttctgagataaactttacagcctcggaatgttccacactcacttatctggtcatatatttgcttcaacg

SEQ ID NO: 9706 - DNA, 120 bp, synthetic construct
  source 1..120: mol_type = other DNA
tcgagaccagcctggccaatgtggtaaaacctatctctactaaaaatacaaaaaattggccaggtgtggtggtgggggcctgtaatcccagctactcaagaggctgaggcaggagaatag

SEQ ID NO: 9707 - DNA, 120 bp, synthetic construct
  source 1..120: mol_type = other DNA
gagtgctaggattccaggcatgagccaccagccaatatattattaaaaataatttcttgctgggcatgttggcttatgcctgtaagtaatcccagcattttgggagactgaggtgggcaa

SEQ ID NO: 9708 - DNA, 120 bp, synthetic construct
  source 1..120: mol_type = other DNA
gaacgtcattggtggcagtgattcattacaaagtgctggcaaagaaatggcttaaagaagaagaactggttgactacaaatctcgtgcctatgactagatctatgaataaaaggaggtca

SEQ ID NO: 9709 - DNA, 120 bp, synthetic construct
  source 1..120: mol_type = other DNA
gtagctgggaccacaggcatgtgccaccacacctagctaatttttgtatttgttgtaaagatggggtttcaccatgttgcccaggctagtcttgaactcctgagctcaagcaatgtgcct

SEQ ID NO: 9710 - DNA, 120 bp, synthetic construct
  source 1..120: mol_type = other DNA
ccatcagtccctctctatcaacattcattcagccaacttatattgagtgcctaatatgtgtgaggcactgggatacactgatgaatacaccacgatctgcttgagcactcagacctgagg

SEQ ID NO: 9711 - DNA, 120 bp, synthetic construct
  source 1..120: mol_type = other DNA
taaaagtacaaggaaattatgattccataatcataagtctactttcagcaatacacgtatcttcagagaatctcagcctccctgcagcatcctcctggtgcacagaaaaactgctgaatt

SEQ ID NO: 9712 - DNA, 120 bp, synthetic construct
  source 1..120: mol_type = other DNA
ttggactgcttggtctccagaacgagggaaaataaattaaaataaatgtctgtagaattaagccacccagtctatgatgtttcacgacagcagcccaagcagatgaatacagggctattc

SEQ ID NO: 9713 - DNA, 120 bp, synthetic construct
  source 1..120: mol_type = other DNA
acctgaaccagaaggaggcaaagatgaagcagtggggaggcccttcttggctggtaaatcctcctgggtcaggcacttgtaggagcagccctgtgggatggaattgaactcattactttt

SEQ ID NO: 9714 - DNA, 120 bp, synthetic construct
  source 1..120: mol_type = other DNA
gtggtggctcacgcatgtaatcccagcactttgggaggctgagcccaaaggctgagcactttgggagaatagcttgagcccaggagttcaagaccagcctgggcaacatagtgagaccct

SEQ ID NO: 9715 - DNA, 120 bp, synthetic construct
  source 1..120: mol_type = other DNA
aaacaaaacaaaactaatctacaattggtgggcaaataggaagcacttgcctccagggtgcaggtgggccaaggttagtgggtgggagtacagagggaatcaaggcattaggaaccaact

SEQ ID NO: 9716 - DNA, 120 bp, synthetic construct
  source 1..120: mol_type = other DNA
gcttaaggttgcagtaagctatgactggacgactgcactctaacctgggtgacagagcaagaccctatctctaagtgaaaaaaaaaaaaaaaaaaaaaaaagaagcactggaaccaggag

SEQ ID NO: 9717 - DNA, 120 bp, synthetic construct
  source 1..120: mol_type = other DNA
ctagaataaaatataggagaatatcataatcttgggctagacaaatatttcttacactcagaaaggagtaaccaggccaggtgtggtggctcacacctgtggtccctgtactttgggagg

SEQ ID NO: 9718 - DNA, 120 bp, synthetic construct
  source 1..120: mol_type = other DNA
gttcaagaccagcctgggcaacgtggtgaaaccttgtctctacaaaaaaatacaaaaattaggcaaagtggcacacacctgtaatcccagctactcagggctgaggcacgagaatcgctt

SEQ ID NO: 9719 - DNA, 120 bp, synthetic construct
  source 1..120: mol_type = other DNA
atgtctaactcaacattaaaatggaaaaaaaatttggccaggcccaatggcttgtgctacttggccaagaaagttctatatcttgattgaagttgtgggcagcacgccatccaggtgccg

SEQ ID NO: 9720 - DNA, 120 bp, synthetic construct
  source 1..120: mol_type = other DNA
actttgggagtctgaggtgggatcacttgaggccaggagttccagatcagcctgggaaacaaagtgagaccccttgtccctaaaaaaaaatttaaaaattagctaggcaaggtggtacac

SEQ ID NO: 9721 - DNA, 120 bp, synthetic construct
  source 1..120: mol_type = other DNA
tttgtaagctgagaagaaagaatgaacaaagaggaaatagttgaagatataggagaaaagggatagcagacaaggtccctgagaaagcgagaaggaaggaaactcagagcccagacggag

SEQ ID NO: 9722 - DNA, 120 bp, synthetic construct
  source 1..120: mol_type = other DNA
agtctgggggtaggagatggtggttaggctggatttggaactgaaattctctttagcttctgtctgctcctctttagctcacagacaaagcatttaagatttctttgacaacctgcgttt

SEQ ID NO: 9723 - DNA, 120 bp, synthetic construct
  source 1..120: mol_type = other DNA
acttaagaggccaggcctctggaaagggggatgcataaagcatctatgtacaaacacctcaccaatccatcactgagctactcagcaacctcaccagaacatagctgagaatcaaaactt

SEQ ID NO: 9724 - DNA, 120 bp, synthetic construct
  source 1..120: mol_type = other DNA
ctctaaaagtccatttgtctttcctcaaatgtccatgtgtctttcccatagaagcctttctctcgctctcttttccttattaggttgagatcaatgagcttctttatctgaacgttcctg

SEQ ID NO: 9725 - DNA, 120 bp, synthetic construct
  source 1..120: mol_type = other DNA
tttgcctgtttatctgtctattgtcagttaatttgcgggcccctgatcattggacctaagtcctcagtagagaaaaagatttttatcccataaaccttccatacggagtttttaactaag

SEQ ID NO: 9726 - DNA, 120 bp, synthetic construct
  source 1..120: mol_type = other DNA
aggagttcaagaccagcctgggcaacatagtgggacccccatctctacaaaaaaatgaaaaataaaaaaaaattagccaggtgtggtggtgcgtgcctatagtcctcccagtttcttagg

SEQ ID NO: 9727 - DNA, 120 bp, synthetic construct
  source 1..120: mol_type = other DNA
ctcggcctcctgagtagctaggactacaggcatgcaccatcacgcccggctaattttttattttttgtagagatggggtctcactatgttgcccaggctggtcttgaattcctgtgctca

SEQ ID NO: 9728 - DNA, 120 bp, synthetic construct
  source 1..120: mol_type = other DNA
aggcaagatgaccacgagtactgttggtccttagtatctccaatttagcaacctcagtgaagagagaaattctctctcaattatctacttagtggtctccaggatgatcctgtttggcct

SEQ ID NO: 9729 - DNA, 120 bp, synthetic construct; identical to SEQ ID NO: 2587
  source 1..120: mol_type = other DNA

SEQ ID NO: 9730 - DNA, 120 bp, synthetic construct
  source 1..120: mol_type = other DNA
gctcaagcaattctcctgctttggcctactgagtagctgggactacaggcttgtgccaccatgcccagctaatttaaaaaaacaaaaaacaaaacaaaaaaaaaacttttttgtagattg

SEQ ID NO: 9731 - DNA, 120 bp, synthetic construct
  source 1..120: mol_type = other DNA
tgtctcaagaaaagaaaaaaatattttttgcatgtatttatttgccatccatatatcatctttgtggaagtgtccattcaaatacattttttttttcagacaggttttcactctgttgcc

SEQ ID NO: 9732 - DNA, 120 bp, synthetic construct
  source 1..120: mol_type = other DNA
ctactgacagcagaatagatttgaaaagtcaagttttattagatagaaagtacactgcagaaaagtgcagccaggcgcatcattaagagaactgagcacgccatggtggattttccttag

SEQ ID NO: 9733 - DNA, 120 bp, synthetic construct
  source 1..120: mol_type = other DNA
aattaatttttatggggtgtgaagtatagattgagattcatttttttgcacctggatgtctaattgttccatctccattccttaaatacactgtacttttcccattgaattatttttgtc

SEQ ID NO: 9734 - DNA, 120 bp, synthetic construct
  source 1..120: mol_type = other DNA
gcgagctggcttaatgatcactgctaactgtgctgcaagcctagttgaattttttcctctcttaatcgattttataaagttttcctggggacagttgcatgcatggatctatttctgggc

SEQ ID NO: 9735 - DNA, 120 bp, synthetic construct
  source 1..120: mol_type = other DNA
gcttgagctcaaactcatgagctcaagaaatccacccatcttggcctcgcaaaatgctgggattacaggtgtgagccaccatgcctgacccaatatatattttattgatttatgtatgta

SEQ ID NO: 9736 - DNA, 120 bp, synthetic construct
  source 1..120: mol_type = other DNA
ggcgctatcttggctcactacaacctctgcctcccaggttcatgcaattctcctgtctcagcctcccaagtagctgggattaccgccacacgccaccacgcctggctatttttttgtatt

SEQ ID NO: 9737 - DNA, 120 bp, synthetic construct
  source 1..120: mol_type = other DNA
atgcaaccacaaaaaaaacaagatcatgtcctttgcagggacatagatggagctggaagccattatcctcagcaaattcttgcaggaactgaaaaccaaacaccatatgttctcacttat

SEQ ID NO: 9738 - DNA, 120 bp, synthetic construct
  source 1..120: mol_type = other DNA
ggctgatttttcttttgaagacacttcttaggcttttaagtcatttaatagtcagcttaccacattgccatggccctcctggaagatccatatacagatggcctccaacttatgagggtt

SEQ ID NO: 9739 - DNA, 120 bp, synthetic construct
  source 1..120: mol_type = other DNA
cttcgccttctgatgatccaggctaaggcaagaagacttttcaatactttaaaagaacgtgctgatgatccgttggatatgtaaaagtttatagcaagtcatgggtagttccaacacttc

SEQ ID NO: 9740 - DNA, 120 bp, synthetic construct
  source 1..120: mol_type = other DNA
gtaagtaacaagatattagtgcttgggaaacagctagaattagacatcaataaagaggatattcatgagcttgttggcactgaggctgaagagctttctaatgaggaactgatcaaactg

SEQ ID NO: 9741 - DNA, 120 bp, synthetic construct
  source 1..120: mol_type = other DNA
aataattacatattacagaaaatctgctttgtgagttatacaatttggctggtagtgaaaggtgaccagctgagttctgattaccgtgtcccacaccaccacactaaaggccagggtaca

SEQ ID NO: 9742 - DNA, 120 bp, synthetic construct
  source 1..120: mol_type = other DNA
attctattagccaagggggacttttccttttgggaaaggtattgttaacatcccacagtgaagatgtaaatcatggggtattttgcaccatctggtctcagtgatgtacaggacaatgaa

SEQ ID NO: 9743 - DNA, 120 bp, synthetic construct
  source 1..120: mol_type = other DNA
tgataattgaaagctatagtcatacataccaatggctgtagggtgatgtcgtgattggggccatgtaaagcatgcaggttgtttatgctgaaggcaaccaaaaatatgccaccccaaaat

SEQ ID NO: 9744 - DNA, 120 bp, synthetic construct
  source 1..120: mol_type = other DNA
aagagtctggcacatcttaaggcctcataaaagacatttactatctattctacaaataagaactttggtctccacaacccgttaggccaggttgcactgtgttagcgcattcttgcattg

SEQ ID NO: 9745 - DNA, 120 bp, synthetic construct
  source 1..120: mol_type = other DNA
ctctaccacctttctgaatcaaaccaatgcataacttacatgcattgattgatatcttatgtctccctgaaacatataaaaccaagttataatccaatcatcatgggcacatgttctcag

SEQ ID NO: 9746 - DNA, 120 bp, synthetic construct
  source 1..120: mol_type = other DNA
ccccatgaaagggtgggagtaatcactctgtggttctccttgtgcacattaataaatctgtacgtcatttcttctgagaaaagaaaaacagctgacagaagtctgagctgtgtgagatat

SEQ ID NO: 9747 - DNA, 120 bp, synthetic construct
  source 1..120: mol_type = other DNA
caccaaggagaacgattgttttttgcttcccctccctgttttctcattatctattgcagaaaataagaccaaggcgtaaacacacctgaacagacccgttttaatgacagtttccaagga

SEQ ID NO: 9748 - DNA, 120 bp, synthetic construct
  source 1..120: mol_type = other DNA
tcaaaatctaagcactctttttagaaataccagctggatttacgtataacccttacaggtgtcttcttgtaaatatctaggaaaagtgggctcgcttaacctgggacactcaaaagcagc

SEQ ID NO: 9749 - DNA, 120 bp, synthetic construct
  source 1..120: mol_type = other DNA
aaagaatgaggcaggaggattacttgaggccaggagttcaagaccagcctaggcaacatagcaaaccccgtctctacaaaaaatgttaaaaaaaaaaaaaatatatatatatatatatat

SEQ ID NO: 9750 - DNA, 120 bp, synthetic construct
  source 1..120: mol_type = other DNA
accactcacctgctttttggagtttctgttttccttatggagtctgaagtgttgtgggcaatttctttcaggtctaaagctctattcctttttgcattgtatcgcctaatctctttggtt

SEQ ID NO: 9751 - DNA, 120 bp, synthetic construct
  source 1..120: mol_type = other DNA
tgggaccaacctggccaacatggtgaaacctcatctccactaaaaattagccaggtgtggtagcctgtaattgcagctcctctgcaggctgacgcaggaaaatcatgtgaacccaggaga

SEQ ID NO: 9752 - DNA, 120 bp, synthetic construct
  source 1..120: mol_type = other DNA
tggaaatgaggaactttttggtaactggagcaaaggtcacttttgttatgccttagcaaagaacttggaggcattgtgcccctgccctagggatctatggaactttgaacttgagaatga

SEQ ID NO: 9753 - DNA, 120 bp, synthetic construct
  source 1..120: mol_type = other DNA
tgcataaattttgcgtaactaaaaagaaggtaaatgctaatagtgaagacaatggggaaagggccttgaagacatttcacagacattcaccacagcccttttcatcagaggtctggagac

SEQ ID NO: 9754 - DNA, 120 bp, synthetic construct
  source 1..120: mol_type = other DNA
aataagttaagactttgggggactgttgggattacaggtgcacaccaccactcccagctaatttttttttttttttgtatttttagtagagatgaagtttcaccatgttggccaggctgg

SEQ ID NO: 9755 - DNA, 120 bp, synthetic construct
  source 1..120: mol_type = other DNA
ctcccatcttaacctcccaagtacctgggactacaggcatgcaccaccatgcccaactaattaaaaaaaaaatttttttttgtagagaagaggtctcactatgttgctcaggctggtctt

SEQ ID NO: 9756 - DNA, 120 bp, synthetic construct
  source 1..120: mol_type = other DNA
tggtaaagaatttaggacctgcctcttcttttcctttagaaacatacttgtaactgttgctaatcagagtgtatattcaaggcaacttgaatatatgttcccaggtttcaatccttaagc

SEQ ID NO: 9757 - DNA, 120 bp, synthetic construct
  source 1..120: mol_type = other DNA
gagtgaaagtttgtttaaaaagctttagaggaggaatgaaaggaagtcaagtccacttagaagaggcccaagcgggtgacttgagagatcagtgtgcagtttgaccttatggctaggggt

SEQ ID NO: 9758 - DNA, 120 bp, synthetic construct
  source 1..120: mol_type = other DNA
tgctaccagtttcagggcccatctctttggttctctaaggtaaaaaatgaacctggaaattagcaatgtttcactattaacagcgctaacaatgagaaagaaaagagacaggagccagcc

SEQ ID NO: 9759 - DNA, 120 bp, synthetic construct
  source 1..120: mol_type = other DNA
aggccgtggtgggaggatcacttgagcctggcaggtagaggctgcagtgagctgtgacagcctgagtgacagagtaagactctgtctcttaaaaataaaaaaaaattattaaaaaataaa

SEQ ID NO: 9760 - DNA, 120 bp, synthetic construct
  source 1..120: mol_type = other DNA
aaccacagcagggctattgggaagctttctgtgtctctcagatctcaaacctttgtagaaacctgtttgtgcttaaaatgtgggtgaggagtactcatgaactagacttatatattttgg

SEQ ID NO: 9761 - DNA, 120 bp, synthetic construct
  source 1..120: mol_type = other DNA
aaaaatacatctgagctttgtgtacatgtgaagctatttggtccattgtagctaaaagtttgaattttgggctaatgttttgtttatttatagggtcgtgcactatcgcccagactagag

SEQ ID NO: 9762 - DNA, 120 bp, synthetic construct
  source 1..120: mol_type = other DNA
gaaggtgattcaagtacatccaggtaatatttcactactaaattagaggatgaatgagctgttagaaaaactcatttgctgtgtaacttgactgtctctatctctagaggtggcccccag

SEQ ID NO: 9763 - DNA, 120 bp, synthetic construct
  source 1..120: mol_type = other DNA
ccacctcggcctcctaaagtgctgggattacaggcgtgagccatcatgcccagcctgcctggctacttattttattctttttttttttttttttttttttttgagacagagtctcactct

SEQ ID NO: 9764 - DNA, 120 bp, synthetic construct
  source 1..120: mol_type = other DNA
ctgtgaaatggaaataatcaaagggtaagctgacttgcagtcctggtcgggccactaattggaaagggtgaagggagccaagatatttccaaaaggtggaaaaagccttttttttggtaa

SEQ ID NO: 9765 - DNA, 120 bp, synthetic construct
  source 1..120: mol_type = other DNA
gacttccgtgtccacccagggccaagcgccatggttctggtccaacaatctctaaacaaggataaaataacctgggaaggttacatgagtcaaaccaaagtctcatagcaagccaggtac

SEQ ID NO: 9766 - DNA, 120 bp, synthetic construct
  source 1..120: mol_type = other DNA
gagttgcagtgagctgagactgtgccactgcactccaggctgggcaacaagagcaagactccatctcaaaaaaaaaaaaaaaaacaaattagccgtgcttggttgtgggtgcctgtaatc

SEQ ID NO: 9767 - DNA, 120 bp, synthetic construct
  source 1..120: mol_type = other DNA
tttggatacctgccatgtgccaagccctgactgcagtaaaaaggataccaaaataaattacttactgctctcaaaaagcaaaccgtttgctggcagacttgatcatataccaatgactgg

SEQ ID NO: 9768 - DNA, 120 bp, synthetic construct
  source 1..120: mol_type = other DNA
gagcgagactctatctcaaaaaaaataaataaaaataaaagaaagaaagaaagaattcggggcgagtccacagagtaaaatgaaagcaagtttattagagaagtaaagaaacaaaagaat

SEQ ID NO: 9769 - DNA, 120 bp, synthetic construct
  source 1..120: mol_type = other DNA
gattgcgccagcttctttaccgcatcctattttatcagcagggtcttggtgacctgtatcttatgacctcctgtcttatcctatgactaagaatgcctgacctccttccaatgcagcctg

SEQ ID NO: 9770 - DNA, 120 bp, synthetic construct
  source 1..120: mol_type = other DNA
tccagccagtttaattttttttagagatggggacacgggttttgtgaagggtctgctaatgggctatctggaaagtcagaacacaggtctcttgtttttgagtcttgatctgggtaggtc

SEQ ID NO: 9771 - DNA, 120 bp, synthetic construct
  source 1..120: mol_type = other DNA
ctgaacaaaattttaggaggttctggcagagagagggcagtctggtttaaggtgggcatttcaacgcacagacttcattaaaattgggtgagaagcatcttacaatagtttagattaatg

SEQ ID NO: 9772 - DNA, 120 bp, synthetic construct
  source 1..120: mol_type = other DNA
aaaaccctgcctctgttaaaatacaaaaattagccagacacagtggtgtgtgcctgtgtgtgccccagctacttgggaggatgaggcaggagagtcgcccgaacttctgaactgcaaagg

SEQ ID NO: 9773 - DNA, 120 bp, synthetic construct
  source 1..120: mol_type = other DNA
agccaagatcacaccactgcactctagcctggtgacagagcaagacaccgtctcaaaaaaacaaaacaaaacaaaacaaaaaaacccacaaagttgtttgtcaggaattcttctcattgg

SEQ ID NO: 9774 - DNA, 120 bp, synthetic construct
  source 1..120: mol_type = other DNA
gaggcaggaggatcacctaaggttgggaattccagaccagcatggccaacatggtgaaattccatctctactaaaaaaaaaaaaaaaaaaaatacaaaaattagcctggaatggtggcgc

SEQ ID NO: 9775 - DNA, 120 bp, synthetic construct
  source 1..120: mol_type = other DNA
gatccgctccctgccaagggtcagccactgtcttgccggggcggctgatctgcaagatcctcatacccctgaattttcaaggcccgaaggagcaaacggctgatatctgctcttcctcaa

SEQ ID NO: 9776 - DNA, 120 bp, synthetic construct
  source 1..120: mol_type = other DNA
aaatgtgattggacaaaagggggtgtgacctaagagtaatagattaggaggagctcagctaggcctgtttgttcaaattcttttgtgtctctgtatgatattccttctctctaggtatgg

SEQ ID NO: 9777 - DNA, 120 bp, synthetic construct
  source 1..120: mol_type = other DNA
ccagcttggttagaactcaccctgcagtctctgtgtatggcccagggccctgtagaactctgaaggccccacacgtggtccctaggatgctcacctcccttctgccctcccatatccact

SEQ ID NO: 9778 - DNA, 120 bp, synthetic construct
  source 1..120: mol_type = other DNA
gtgattcttgttcctcaggctccctagtagctgggactacaggtgcctgccaccacacctgactaattttttgtttttgtttttttgatacagagtctcattctgtcacccaggctggag

SEQ ID NO: 9779 - DNA, 120 bp, synthetic construct
  source 1..120: mol_type = other DNA
caagggagacttactttagattgccgaagacgtgaaggatgagaaggagccagcaatgtaaagtcggggacagagagcactggacagagggcaaagccagtgcagaggctctgagatggg

SEQ ID NO: 9780 - DNA, 120 bp, synthetic construct
  source 1..120: mol_type = other DNA
tctcaagaggaaaaaaaaaaaaaggaaatggaggaatgttaggaagatgatagcaaaagcagagatccatattaggaggattctgtgagtaatggggagaagaagaggagacagttttgt

SEQ ID NO: 9781 - DNA, 120 bp, synthetic construct
  source 1..120: mol_type = other DNA
aagagttcagcttagaatatgttaagtttgagatgccagagagataaccaggcattggatctaggggggtctggaactaccttccccgtccatgtcatttgacgttgggtcttgcaaaga

SEQ ID NO: 9782 - DNA, 120 bp, synthetic construct
  source 1..120: mol_type = other DNA
ttgcaaatttgtttatgcatgcaatgcccatatgcacaggagtgctctgtgatgcacagctcaaagggctggttaaaatttgtggcttatacactgtagtaggagaagttgaaggggcaa

SEQ ID NO: 9783 - DNA, 120 bp, synthetic construct
  source 1..120: mol_type = other DNA
aatctcaaatgtcttcagcctaaaataatctttatacaccaaatcagggattctgagtggttccccacagggcttatccagttccatcatactttggctcattgtgaaatggcaaagggg

SEQ ID NO: 9784 - DNA, 120 bp, synthetic construct
  source 1..120: mol_type = other DNA
aggactgcttgagctcaggagtttgagaccagcttgggcaacatagggagaccccatctctacaaaaaaaattttaaaaattagccaggcatggtagtagcatgcctgtagtcccagcta

SEQ ID NO: 9785 - DNA, 120 bp, synthetic construct
  source 1..120: mol_type = other DNA
gtaagccacctccccttgccttgctgtttgaaattatatcagcaaaaatgaaacatcccactcttgcctggagcgtcttactttgacacagaaacagctttgatttacaacccaggtgtg

SEQ ID NO: 9786 - DNA, 120 bp, synthetic construct
  source 1..120: mol_type = other DNA
gttggtgatttatttgtataactgtccaatttattgaatacgtatggcgtgccaagcactgggctgagggcttcataatgccctttcactcaatgcttagcacaacccatgaagaaggta

SEQ ID NO: 9787 - DNA, 120 bp, synthetic construct
  source 1..120: mol_type = other DNA
aaaagggagataagaatgtttgtttttgcaggtgcaagtggtctttgtctttttttctggccactaaaactcccctagagaggagatttacggcagcttcactcccagaaatttctgctg

SEQ ID NO: 9788 - DNA, 120 bp, synthetic construct
  source 1..120: mol_type = other DNA
agaataacgttatattcagttgaaccaaaatgaattaaatattaatatttgtacttcaaaaacggtccagcttggctgggcgcagtggctcccgcctgtaatcccaacattttgggaggc

SEQ ID NO: 9789 - DNA, 120 bp, synthetic construct
  source 1..120: mol_type = other DNA
aactaaatgagataaaatggtgttaaattggaagtattatagtatttctgttaacaacatagggctccagaaccagcttccttgagtttaaatccaggctccaccacttcctagctatgc

SEQ ID NO: 9790 - DNA, 120 bp, synthetic construct
  source 1..120: mol_type = other DNA
aattttacataggtttttaccaatgtacagctgttgattgtgactggtttccggcaatctggatttcacaatctggataaggggacaaacaattgtctgtcttccactatctttcttgaa

SEQ ID NO: 9791 - DNA, 120 bp, synthetic construct
  source 1..120: mol_type = other DNA
ccgcttccgctccagagaggcagggctttccgagcctgctagccccgcggccgcaactaaccccgggtcggagtgttccggcccggccagccccgcggcgtgagggaaggggagctcagc

SEQ ID NO: 9792 - DNA, 120 bp, synthetic construct
  source 1..120: mol_type = other DNA
agttggggctccagtagtcgatcgaggtagacacttagaggtagttaagagccgcggtcgccgagacgccttggggacggtgggccttcggcctaggtgaggggccgccgagggggtggg

SEQ ID NO: 9793 - DNA, 120 bp, synthetic construct
  source 1..120: mol_type = other DNA
aagagccagttcgtgttttttgtttggttttgttttgaaatggagtctcgctctgtcgcccaggctggagtgctgtggcgctttctcggctcactgcaacctctgcccgccgggttcaag

SEQ ID NO: 9794 - DNA, 120 bp, synthetic construct
  source 1..120: mol_type = other DNA
agaaagatgggcatttgatactaggtttctaaagaaactgcagtgtctagatcactctgccgagcacagcattaggcattatggatcctggatacaaccatgaacaggacaaagcaaaga

SEQ ID NO: 9795 - DNA, 120 bp, synthetic construct
  source 1..120: mol_type = other DNA
ccagccttatggcatctttcgatgaacaaattattgattataatgtggaatttgtccttttattttctctgtggttagtgtttctataggttttatttaagaaatccacagggaggctgg

SEQ ID NO: 9796 - DNA, 120 bp, synthetic construct
  source 1..120: mol_type = other DNA
ctcttaagagatcctcccaaagtgctgggatcataggtgtgagccaccacacctggcctattttggcattcttgaaaaccgcaggattaccacggataaaattttaaaattacctttaaa

SEQ ID NO: 9797 - DNA, 120 bp, synthetic construct
  source 1..120: mol_type = other DNA
gatctgcctgcctcgtcctcccaaaatgctgggattataggagtgagccactgcgcccggcccagcatactgctatttctttctttctttcttcttccttttttttttttttgttttttt

SEQ ID NO: 9798 - DNA, 120 bp, synthetic construct
  source 1..120: mol_type = other DNA
tagaatgtaaatgctttgaaattagttgttcagctgtattttaaattttgtattttttttcctttttttttgagacagagtcttgctctgttgcccaggctggagtacagtacagtgatc

SEQ ID NO: 9799 - DNA, 120 bp, synthetic construct
  source 1..120: mol_type = other DNA
tgtttatttgtaggtaactgcctttaaggaaacttgaccaaatattaactaagttatgtatttccttttggcaacagttgtgacttctcaccaggagatttggtttgggccaagatggag

SEQ ID NO: 9800 - DNA, 120 bp, synthetic construct
  source 1..120: mol_type = other DNA
ctacctggccttcaaactactcactaatgaacacatctgagttgagtttcacaccaaactcctggaaccataactttcttttcccagatctagtcttgtttatcacagacatcaacagcc

SEQ ID NO: 9801 - DNA, 120 bp, synthetic construct
  source 1..120: mol_type = other DNA
tggtgatctgacatacaggtggaaagagaattgggaagttttgttctctcttctaccaacttgccacataatcttggccaagcaaagtaacttgttttttcttttaatctttttaaaaga

SEQ ID NO: 9802 - DNA, 120 bp, synthetic construct
  source 1..120: mol_type = other DNA
acgaggtcaggcgttcgagaccagcctgaccaagatggtgaaacactgtctctactaaaaatacaaaaataagctgaaatcccagctactcgtgaagctgaggcagagaattgcttaaac

SEQ ID NO: 9803 - DNA, 120 bp, synthetic construct
  source 1..120: mol_type = other DNA
caagtgatcctcctgcctcagtctccttagtagctgagactacaggtgtgcaccaccacacctggctaatttttgtatttttaggagagatggatgtcaccatgttggccaggctgatct

SEQ ID NO: 9804 - DNA, 120 bp, synthetic construct
  source 1..120: mol_type = other DNA
attccttttgtgctttattgatctatctatatcaataaaaagtaatggggcataacaaattatacttgtcattcttgttcattagggcaaatgttgtaggttgagtcaagtgtccagcca

SEQ ID NO: 9805 - DNA, 120 bp, synthetic construct
  source 1..120: mol_type = other DNA
agggtaagcaagaggtagtaccattttggtaagaagtagagagctagggacagtaaagatggagtaatatatatatgagggtatagtcaggccctagaaattaattatccagttttatgc

SEQ ID NO: 9806 - DNA, 120 bp, synthetic construct
  source 1..120: mol_type = other DNA
agatccgtgatatgtgaatgtgctaggcctgagatgagacagccaattgtggaagagcaaacactagaaccagtataagttgcttactgctttcttatgctattaatgagcatatcgcct

SEQ ID NO: 9807 - DNA, 120 bp, synthetic construct
  source 1..120: mol_type = other DNA
tgatggggttacataaactaaaaacgtgtttaatacacctaccccaccgaatattgtagcttgggcgtagcctaacctatctcagacgtgctcagaacacttaaatgttagcctaaagtt

SEQ ID NO: 9808 - DNA, 120 bp, synthetic construct
  source 1..120: mol_type = other DNA
tctatgtgcctgaggatttcctcaattcttgtactcctgggatgaggaagtggtggcagattaagtctcagaactttgatcttgtcatctgttacaaggtggggaaattttatgagctgt

SEQ ID NO: 9809 - DNA, 120 bp, synthetic construct
  source 1..120: mol_type = other DNA
atggctaattttgaagaatatattcccttggattctgacacagtcagcactacaagatctggtgctatcttcaccaaagcctatcaacgaatggtgctagatgcagtgacattaaacaac

SEQ ID NO: 9810 - DNA, 120 bp, synthetic construct
  source 1..120: mol_type = other DNA
caaagcaggctttgactctgattatgaccaagctcttgctgacataagagaaaatgaacagagcctcctggaatacctagagaaacagcgcaacagaattggctgtaggaccatagtcta

SEQ ID NO: 9811 - DNA, 120 bp, synthetic construct
  source 1..120: mol_type = other DNA
ttacccaggacagacctctcgtgtcagcctcttaggtagctaggatttacaggtaagcaccggcgtgccctgctttatttttttggtgggggaagggggaagggagttgaagcttcccta

SEQ ID NO: 9812 - DNA, 120 bp, synthetic construct
  source 1..120: mol_type = other DNA
tggaacagaataatatacttccttttagtgtgctgcatttggttactgggtaatttaaaattcttcctcagcacaggtgttcaaaaaccagtcttcagagattgttttcatatcagtgtg

SEQ ID NO: 9813 - DNA, 120 bp, synthetic construct
  source 1..120: mol_type = other DNA
gcaggaaaatggcaaagcctattgtgtgcttgttactggaccaaatatggggggcaagtctacgcttatgagacaggtaactgattcttaaagttttgttatcagaaagtcatttgtgac

SEQ ID NO: 9814 - DNA, 120 bp, synthetic construct
  source 1..120: mol_type = other DNA
ctctcttagcctcaactttctccatgttagcaaatggatttcagaacagaaccaacgtacatgtgattgtgaaagttgttttagagtgcctagctcttacgtaagggttcataagaaaga

SEQ ID NO: 9815 - DNA, 120 bp, synthetic construct
  source 1..120: mol_type = other DNA
tttttaaggtgaaagtacattttttgttgaattaagtgaaactgccagcatactcatgcatgcaacagcacattctctggtgcttgtggatgaattaggtaagacattaaacttctcatt

SEQ ID NO: 9816 - DNA, 120 bp, synthetic construct
  source 1..120: mol_type = other DNA
tgtcctaaaagctatggctttaatgcagcaaggcttgctaatctcccagaggaagttattcaaaagggacatagaaaagcaagagaatttgagaagatgaatcagtcactacgattattt

SEQ ID NO: 9817 - DNA, 120 bp, synthetic construct
  source 1..120: mol_type = other DNA
agtgttttctctttcatagaaagaacgtacatactgggacatgagtacagttacagcaagtctaggtgtgctaacaaaacagggcacattcaagtacagtaagattttgcttgaaattaa

SEQ ID NO: 9818 - DNA, 120 bp, synthetic construct
  source 1..120: mol_type = other DNA
ggcaggactttttctttagggaaggaattcagttgtgctgcaatgtattagattctataggtggagcagagtcatatagtgtatctgtatcatgtgtaggctcaccagctaatgtacaag

SEQ ID NO: 9819 - DNA, 120 bp, synthetic construct
  source 1..120: mol_type = other DNA
ccagtgatcctcccacttcagcctcccaaagtgctaggattacaggcataagccaccacgcctacccacagttacagtcttaaacacgatcttcaagtagattgatgataaaattttcag

SEQ ID NO: 9820 - DNA, 120 bp, synthetic construct
  source 1..120: mol_type = other DNA
ttaaccctcttaatgtctactgaataaaatgtagatacctatttcaaccaccaacagtaacattcacttatcaatgactatggtcaaaactgcaattaactttcgcaccaacctaactgt

SEQ ID NO: 9821 - DNA, 120 bp, synthetic construct
  source 1..120: mol_type = other DNA
aaaaaaatacaacataaaataactacaaaaataagcactttactaacaacaggattctcagggaatgggggctttcagaggtgtcactgggctgcactgttgaggctgtgtgcatcagtg

SEQ ID NO: 9822 - DNA, 120 bp, synthetic construct
  source 1..120: mol_type = other DNA
aaaactcagtacaggcatttcacacacctgtgacactggagagtcctcatcatttttttcctttccctctaccctgcaccccacaatggaaggtctccaggtcaagaactattcctccct

SEQ ID NO: 9823 - DNA, 120 bp, synthetic construct
  source 1..120: mol_type = other DNA
tacttgatatgtcagcttgatgtgagagaaggtgtggacaacctggaggaagggtcaaggggttcaaataggcctgtggatatagcctcaaaagccaacatccttggctattccgctgct

SEQ ID NO: 9824 - DNA, 120 bp, synthetic construct
  source 1..120: mol_type = other DNA
ggctgcttggttgaaatctcctggccgggctgggtccaccagctgctgggctagacccctaaaagaagggaacactgctgtgaagcagagctcctttgcagacacccctgaagcaccctt

SEQ ID NO: 9825 - DNA, 120 bp, synthetic construct
  source 1..120: mol_type = other DNA
ccgtcttctccatggtaggtcccgtttctcttggtcgtaccagcttagcaggctccctcggaaggctgtgacttcagctacgtctctgaatagatggtatgaggagacagaggcctgcaa

SEQ ID NO: 9826 - DNA, 120 bp, synthetic construct
  source 1..120: mol_type = other DNA
ctggcccttagtaagtctcttaatgtcttgatacgtatcacaatcccttcccagcctgaatctgcctttcatggccaatgagccttgggccacaacctagttccttaccatcacaggcag

SEQ ID NO: 9827 - DNA, 120 bp, synthetic construct
  source 1..120: mol_type = other DNA
actctatgtcagaccccatgaagagctttaccggatctctcaatctcctggtgactctatgaggtatgtactagtatcacctccaccttagttataaggaaattgaggtttatggagatt

SEQ ID NO: 9828 - DNA, 120 bp, synthetic construct
  source 1..120: mol_type = other DNA
cgcaaggtctctctgatccttccaccccagactctcccaaagccaggataaagttgttctctggaactctttatctgcctaaagtccaaactcactaaaaagaatacttgttttttcttc

SEQ ID NO: 9829 - DNA, 120 bp, synthetic construct
  source 1..120: mol_type = other DNA
catggacacacgtgagacacccctcccataatctgttttgccagatggtatataaactcacgaactctgtagggagatgggtaatcactttatggttctcccaatgtgcatgttaataaa

SEQ ID NO: 9830 - DNA, 120 bp, synthetic construct
  source 1..120: mol_type = other DNA
attagcataaaaagcaaaaattagaccaagaggggaaaaaaaagagtgccaaggtggggtttaatgttgcaattttaaagactgtggtcaaggtagacccaaagcattctaagtgagtgc

SEQ ID NO: 9831 - DNA, 120 bp, synthetic construct
  source 1..120: mol_type = other DNA
gtgtgtccaaagtcagtgccaggtaaactgtacacaatagatacctgttaaatgaattaatgggatgggggatagtcaaaagagtttcccttttttaggataggagaaatccaaagagtt

SEQ ID NO: 9832 - DNA, 120 bp, synthetic construct
  source 1..120: mol_type = other DNA
agctgcttcacaatttgtcccttcctcgccatccatactgccagccttaattcaagttcacattatcacttgattggattattacaaaagcttccctaccaatcggtcgctcttacaccc

SEQ ID NO: 9833 - DNA, 120 bp, synthetic construct
  source 1..120: mol_type = other DNA
agccctacaaaatgtttcctgcaggacatgggaaaaaagaatcaaaggtcgtctagtccaactttctcctctacagattgtgaaagcgaggtgggaagtaatttacccaggctcatacaa

SEQ ID NO: 9834 - DNA, 120 bp, synthetic construct
  source 1..120: mol_type = other DNA
tgagttctctgtgactgcacttatcttttattgcccaataaacattgggaagacatagcaggccagaaaggcctgtccccagacattgtttcttgaggccaccctccttttaccccaaag

SEQ ID NO: 9835 - DNA, 120 bp, synthetic construct
  source 1..120: mol_type = other DNA
tggaaacaaacatggaaccaagagtgagtaccatggccctgcccagggggaggaacccggtccatacaccccaaggtggagagaaagcaggggagacaggctggggagaggactgctcaa

SEQ ID NO: 9836 - DNA, 120 bp, synthetic construct
  source 1..120: mol_type = other DNA
tggccacgcaccaacaacctgcagcaccagcgtggccttgtcctccatgttctcaatgcgcaccgtcacctggtaagtgcctgaatgcacgcggcgagcggcccggatgaacaggatggt

SEQ ID NO: 9837 - DNA, 120 bp, synthetic construct
  source 1..120: mol_type = other DNA
agctgagacactcctggaagagagcttgggtactgtggcttttactttccctgttccagaactaagggactgacatacaccaagagagccctttctgcactttttttttttttgagacgt

SEQ ID NO: 9838 - DNA, 120 bp, synthetic construct
  source 1..120: mol_type = other DNA
ccagtatcgatgtgtgctctgtcagcccctgcagggcagccacccactctgagcctgggggtggggagggggaggcaaggccacaggctgtgtcaccactgacaccccactcccactgcc

SEQ ID NO: 9839 - DNA, 120 bp, synthetic construct
  source 1..120: mol_type = other DNA
agactctgaactgcccactggtcacatagggggcacttcctgttcagctggcttttggccactttaaggaatattttgtccctgttacaagacatgtctgtagattggcttaaaaacaaa

SEQ ID NO: 9840 - DNA, 120 bp, synthetic construct
  source 1..120: mol_type = other DNA
gtggagaacaggggacaatgaacatttattgagcacctgttagatgccagatggcctgcctggtcatcccatatcatcctaacagctctctgagataggcagtgtcattattcccatttt

SEQ ID NO: 9841 - DNA, 120 bp, synthetic construct
  source 1..120: mol_type = other DNA
cccaccacccccagatccaaagagatctttctagaatgcatttctttcttcttttcctttttttttttttttttttagtgatatggagtctcactgtgttgtccaggctgggtctcaaca

SEQ ID NO: 9842 - DNA, 120 bp, synthetic construct
  source 1..120: mol_type = other DNA
acaaggtcaaggtcaaggtcagcttaggatgaagggagccagggagcagcccagtcatgagggcttcctggcaatgagagggtgtccacatccttgtgatggccatcagcacacttcaca

SEQ ID NO: 9843 - DNA, 120 bp, synthetic construct
  source 1..120: mol_type = other DNA
atgcaattattaatccaaccaagatctggaacattcccatcaccccaggacgttggctgggaggcttgtaatattcaggtcaggtcacctagcatagcattttgaaaactgggggaacat

SEQ ID NO: 9844 - DNA, 120 bp, synthetic construct
  source 1..120: mol_type = other DNA
aaaaaggaagaagaagaaaagatgtaataataacagtcacacatgtgacagcacttgacaggtctgatacatcatgtcacctcatctttataactatcctatgaggtggcactatcaggg

SEQ ID NO: 9845 - DNA, 120 bp, synthetic construct
  source 1..120: mol_type = other DNA
ctctctgtgggtctctgtctcagtctctgtcctgtctctgtgcatctgcctctctgtccacctgtctttatctctctctctctgtttctccctgtgtctctctctgtctccatctcagtc

SEQ ID NO: 9846 - DNA, 120 bp, synthetic construct
  source 1..120: mol_type = other DNA
gcctcttctgggcagatgcccccaacacccatgccccgtgcttctggaactcaccatttgacttgcgccccctcctccgatacttcacactcaaactccacccgctgccccaccatcacc

SEQ ID NO: 9847 - DNA, 120 bp, synthetic construct
  source 1..120: mol_type = other DNA
gcccaggtccccccctccaatcccctctgtgccgccccgcttccacttctctgtgtctctatttctttttgttttgtttgtttgtctgtttgtttgttttttggacagagtcttgctctg

SEQ ID NO: 9848 - DNA, 120 bp, synthetic construct
  source 1..120: mol_type = other DNA
gagatctactgctgggtgctctgtgaccttgcgctagttccttaaaccctctgtgcctcggtttcctcagtaacatggaaatggtaatagtccttccatcatagtgttgtttcgagaatt

SEQ ID NO: 9849 - DNA, 120 bp, synthetic construct
  source 1..120: mol_type = other DNA
catgtgagacccctgctttcccggctcacacccgcccttgtcaacccctcagtggagaagggctattcctgggctctcctctttccatctgcctgggggtgagggtagttaacccaagcc

SEQ ID NO: 9850 - DNA, 120 bp, synthetic construct
  source 1..120: mol_type = other DNA
ccaggccaggcaggactgggggccaagggagctgaagaggggctggggatctggaggggctcctggcagaattaggggtgatgagggtgctgtgctatgttgggcactcacctcggggtc

SEQ ID NO: 9851 - DNA, 120 bp, synthetic construct
  source 1..120: mol_type = other DNA
tgaggatgactgttgacgggacataatgtctgcagagccctttaactccttccacactgggatcatcccctcgacagacaaggaaaccaactcagagaggtgcagtgttgtgctcagggt

SEQ ID NO: 9852 - DNA, 120 bp, synthetic construct
  source 1..120: mol_type = other DNA
tggacagtgagattgaagttggagcagtcaaatttgtccttggtggacacctcacagcggtagctgccagtgaaggcaggctgggcatcggtgatgtgcagctcgaacagatagacctgt

SEQ ID NO: 9853 - DNA, 120 bp, synthetic construct
  source 1..120: mol_type = other DNA
cccaggactggggaaggttgggaaaagcagaggcttggagtgaacaaacaaggggacttaagccttaaggttctggtgggcagggcggaaaaaaacaaaacacaaaaaacgaaggcttaa

SEQ ID NO: 9854 - DNA, 120 bp, synthetic construct
  source 1..120: mol_type = other DNA
atcgggggctccaggggtaggaccattgagagctgctgagcttgaccctgtgagcaaaggctttttctgtttgtttgagatggagtcttgctctgtcacccaggctggagtgcagaggca

SEQ ID NO: 9855 - DNA, 120 bp, synthetic construct
  source 1..120: mol_type = other DNA
gggaaggctgatcaggatcttacctgcctctatgaccttgaggtcgaacttgaccttggaggagccagcaatgactgcgtaagatccctggtcggcagggcccacttcccgcactgtcag

SEQ ID NO: 9856 - DNA, 120 bp, synthetic construct
  source 1..120: mol_type = other DNA
gtacaggctcatgaagcagataatgtcacagccaggaggaaccaacccaatgccaccaccacccccggcaccccaggttgggagactgagacccatagtgggtagagactggtctgaagg

SEQ ID NO: 9857 - DNA, 120 bp, synthetic construct
  source 1..120: mol_type = other DNA
ttgtgatttataaccatttattagtgaaagtgtttttaagcacagtcagggtgtaaacagtgcagcattcctgctcccctccgtgggagcagcgtctccttttcaattcatgtgactaca

SEQ ID NO: 9858 - DNA, 120 bp, synthetic construct
  source 1..120: mol_type = other DNA
tctgcattttcaataactctacgtcctccagaccttctagaaggaacgaaagaggtctcgtttcctcgcctgtgggttgtaagaaaacacattatttagcaaagaaatcttcatggttgg

SEQ ID NO: 9859 - DNA, 120 bp, synthetic construct
  source 1..120: mol_type = other DNA
tgcagggactgctgcatctgttttgctgatcgtggaacataccgcacatggcgtaaaacaggtgcccagtgaatattagaaaaggaaattatacgtgttaatccaaggtggattatttta

SEQ ID NO: 9860 - DNA, 120 bp, synthetic construct
  source 1..120: mol_type = other DNA
actttgggtaggaggaagagagtgggcagaagaaggaaaaatcagatctgcctgctgccagccttcaccgttcagaagaaacacttaactcttttcagcaaccgcaacaaataattatgt

SEQ ID NO: 9861 - DNA, 120 bp, synthetic construct
  source 1..120: mol_type = other DNA
agatgtgacccttaagtctttttcttttttagcactgttttccaagcgcttgactcagaaggatgctcaaattcagcgcagaggagcagcagtttgactgttccctgtacgctccccaca

SEQ ID NO: 9862 - DNA, 120 bp, synthetic construct
  source 1..120: mol_type = other DNA
ttggaactggtttcaaatcctagaccaaggttgacaccaactatacctgttacaggaactaagggacccccctaaaggttttcttaaagggtctgatcctggagaatctggaattttttt

SEQ ID NO: 9863 - DNA, 120 bp, synthetic construct
  source 1..120: mol_type = other DNA
ggtggtcagcttccaccccgtgtgctgaaaatgcagtttgtagctagacatcactcaagccacgtgcagcccccggcatttgtcagacatcgcagtgagctcatttccttcgcagacaag

SEQ ID NO: 9864 - DNA, 120 bp, synthetic construct
  source 1..120: mol_type = other DNA
acgtgcttggctaatttttgtatttttagtacagatggggttgcactatgttggtcaggcttgtctccaactcctgatgtcaatgatcttcctgccttggcctcccaaggtgctgggatt

SEQ ID NO: 9865 - DNA, 120 bp, synthetic construct
  source 1..120: mol_type = other DNA
tggaggccttgtacagctcttgccggaggtaactggcagtgtagccagtggtaggtaagtgggtctggctttagagagggcttgtgtcgagatgcgtctggctgatagaacttggtgaaa

SEQ ID NO: 9866 - DNA, 120 bp, synthetic construct
  source 1..120: mol_type = other DNA
actttgggagcctaggcctggtttctctcctatccatgggggaccaacaagcgctcaccatgcagcgagtggggcttttccctgaaggcttggtgccctgcgccagctgctctcttcccc

SEQ ID NO: 9867 - DNA, 120 bp, synthetic construct
  source 1..120: mol_type = other DNA
ttgaccagattctcccatagatgggatgtggggtataaaggagaccaaaacgttaagaaggaccacgaggtttgtgatgtgaattgttggcaacttcatcattttagctgctgagctgga

SEQ ID NO: 9868 - DNA, 120 bp, synthetic construct
  source 1..120: mol_type = other DNA
cacccatgggaggcttctgggagagtgatgggtgggggcgaggggaaccagcaactcttcacatacagtttttttttttttgagaccgagtctcactctgtcacccaggctggactgcaa

SEQ ID NO: 9869 - DNA, 120 bp, synthetic construct
  source 1..120: mol_type = other DNA
tgcccagccaagcttgagtttcatttgggttgtgctttcaccaaatgattgcagcaatgcaagagggggaaccggatgttgaggatgcgcgacgggggttactagacagctggtttggag

SEQ ID NO: 9870 - DNA, 120 bp, synthetic construct
  source 1..120: mol_type = other DNA
gaaggttagctgctaccaggcaaggcagggcccgggtctgatctcagtgcctggcccacactaagcttagtgattaaggagaagcaggaataaaccacagaagggagtggcggctgtggg

SEQ ID NO: 9871 - DNA, 120 bp, synthetic construct
  source 1..120: mol_type = other DNA
gtattcagccatgaaaaggaataaagtatcaatgcatgccacagcatggatgagcctggaattcttgccaagtgaaagaagacacatagcagacaacatagtgtgtgattccgttgatat

SEQ ID NO: 9872 - DNA, 120 bp, synthetic construct
  source 1..120: mol_type = other DNA
aatgggtgcattgcagggcgtgcgaattactgaaaaagctactagaagagaatgggtgagaatccttagaatccaatggtaagaaatgtgctgtgatcatatgcctcattcgacccataa

SEQ ID NO: 9873 - DNA, 120 bp, synthetic construct
  source 1..120: mol_type = other DNA
tcccgggcaccctgtcctctccttcatcctgtaaaactccactcaagagcttcttccaggccgggcgtggtggcgcacgcctgtaatcccagcacttttggaagcagaggcaggtaaatc

SEQ ID NO: 9874 - DNA, 120 bp, synthetic construct
  source 1..120: mol_type = other DNA
actctcaggccccaccaccctcttgtccctcaatccagggcctgcacacaggaagccgccacgcgtgtgttgactggtgcaggatcctgctgcaggagagacagtaggcagcgtgactgt

SEQ ID NO: 9875 - DNA, 120 bp, synthetic construct
  source 1..120: mol_type = other DNA
gacaactcagccacccttgaaagtacatgttcttcctctgagctcaggggaggccccgtgaatacatagaggagggaagcgtgtgtctttctagacaggtggaccccagaggaggacgaa

SEQ ID NO: 9876 - DNA, 120 bp, synthetic construct
  source 1..120: mol_type = other DNA
cagctgccagggcacgttgctttcgctcgtcttccagttccgtctcatactcgtgaagctgggcgaggaatagagatgtgtgctgccccacttgcccctgggaggtcctttggctcacct

SEQ ID NO: 9877 - DNA, 120 bp, synthetic construct
  source 1..120: mol_type = other DNA
cttatcctcggaccccccaactcagacccatcctcgactgccattctcagcccctcccagcccctgcaccagtccaaaaacctccttccatttccgatgatagttcgctatgaaaaaggc

SEQ ID NO: 9878 - DNA, 120 bp, synthetic construct
  source 1..120: mol_type = other DNA
aaaccactagacctgcccacgttgcttagagcacactgaggtcaaagtgagatttaaagctgccagaagctagttattagtttgtttcatggccacaagtagctattaatatcttacaaa

SEQ ID NO: 9879 - DNA, 120 bp, synthetic construct
  source 1..120: mol_type = other DNA
tttttagaataaccctgagtcacttgtaaactaaatcatatttactaaataataatgtatcttaaaagttggtatttaggggtttgggtcatacaggggtctccatttatcgtacaatta

SEQ ID NO: 9880 - DNA, 120 bp, synthetic construct
  source 1..120: mol_type = other DNA
tggaatactactcaataggtattcagtaaatacatttagtgaataaataagcacctcattccttcttcaggctagaaactaaggcatcaccatgtgtgcaggtgaccctcatggtgctgg

SEQ ID NO: 9881 - DNA, 120 bp, synthetic construct
  source 1..120: mol_type = other DNA
tggggggtcaagcaccatcgcaccaacactccaccgcgatctgcctgcgggggatctcagcgcagagaagttgagaggacccatgaaggaagcaaggacacggggcaggcacctggatgt

SEQ ID NO: 9882 - DNA, 120 bp, synthetic construct
  source 1..120: mol_type = other DNA
tacccctccatctcttccattgacaaggaggatatgaatgatcttgacactgcttatatgagggcggcaaaagccctgctctcaactgcatgtgagaaaaaaacatctcacttaattctt

SEQ ID NO: 9883 - DNA, 120 bp, synthetic construct
  source 1..120: mol_type = other DNA
tacttatcaaattggaaaaggaagggttttttttctttttttttttttttcctgagacagagttttgcccttttagcccaggctggagtacaatggtgcggtctccgcacactgcaacct

SEQ ID NO: 9884 - DNA, 120 bp, synthetic construct
  source 1..120: mol_type = other DNA
gttgcaatctggaatcccacaagcggtatccaacctgctgacatgtcccctttgaccctttcactacttttaaaaaaatgagttgccgacattttaataaatgtcacataaaaatctgga

SEQ ID NO: 9885 - DNA, 120 bp, synthetic construct
  source 1..120: mol_type = other DNA
cgtccttcacaggtgtcgtgtgattgacactgctacttctgtcctagttaagggaaacttattttatggaaccagctcctgtaggcatgtgagttgccctacaggaaaaaaaaagtgtgt

SEQ ID NO: 9886 - DNA, 120 bp, synthetic construct
  source 1..120: mol_type = other DNA
tgctttgtgcgggtcagtaatggacatgccgtctgctggtggtcttaataactgcgtcttcccaaagaggcctggctgggaatgggcttggcttctagctcctgttcacgtctaatgaac

SEQ ID NO: 9887 - DNA, 120 bp, synthetic construct
  source 1..120: mol_type = other DNA
ctggtcatgtaaaacatgcctgcctccccgttgccttccaccatgatggtaagtttcctgaggcctccccagaagcagaagctgctatgctttctgtacagcctgcagaaccgtgagcca

SEQ ID NO: 9888 - DNA, 120 bp, synthetic construct
  source 1..120: mol_type = other DNA
ttatgccggagagagctgttctgccattgaaatcaaataatgacaagtttcctccagtcttttttttttttacaaaagaaaaatcgctatgttgcccaggcgatctgaaagtcctgggct

SEQ ID NO: 9889 - DNA, 120 bp, synthetic construct
  source 1..120: mol_type = other DNA
tgcactaccaggcctggccaatattttattttattttatttttttgagatggaatcctgctctgttgctcaggctggagtgcaatggcatgatctctgctcactgcaacctctgcctcct

SEQ ID NO: 9890 - DNA, 120 bp, synthetic construct
  source 1..120: mol_type = other DNA
ctaaggctaagagagggtaagcagttttacccatggtgtcacagccattgtgtgatggagccagaattagaagctaaaccttgaccttgagtccatggttttgtttgtttgtttttgaga

SEQ ID NO: 9891 - DNA, 120 bp, synthetic construct
  source 1..120: mol_type = other DNA
gggggaagtaaaccccagggtatatggtgttggcacagctagcatagctatatgctatgatacatgctatgccaacaccacagattgcatcaaaatacatttatgtgtttactgaatgaa

SEQ ID NO: 9892 - DNA, 120 bp, synthetic construct
  source 1..120: mol_type = other DNA
ataggcgtgagcccgaccctaaaggtgatttttttttatgtctgcttttctatagttttcaaattgttctctgagtatatccaagcttaccaatgaggatggttttgaatgcagcctgac

SEQ ID NO: 9893 - DNA, 120 bp, synthetic construct
  source 1..120: mol_type = other DNA
tctatccatgtccccaggtctgcttcttgacatgccagactatatgagattaacataggatgtgagtgccaaggtctgacatcaaaacaggttgtacatgtgcatgggtgtgtgtacgtg

SEQ ID NO: 9894 - DNA, 120 bp, synthetic construct
  source 1..120: mol_type = other DNA
atgctttcccttcatcaccgtagcactgtcaacatagcacaaattggccgacaaaagagccaggccaggggatcaatcagaaagctttgaggcttaaatcccagctctgcctcttagaag

SEQ ID NO: 9895 - DNA, 120 bp, synthetic construct
  source 1..120: mol_type = other DNA
gagatcaactgcaaagacatgatgtgtttgcagggaagagaagaaagtcgaaggtgaggatctgggggagtgaacagggtcgagaaggcttgtgggaggcctggcctgggaaacgaagtt

SEQ ID NO: 9896 - DNA, 120 bp, synthetic construct
  source 1..120: mol_type = other DNA
tattattagtgcatgtgatgactaagggtgatttcgagaggtggcatagagttagttgtcactcatgggatgatctgccatcctcaaatttcctttctgattttcctgcttttaaaaata

SEQ ID NO: 9897 - DNA, 120 bp, synthetic construct
  source 1..120: mol_type = other DNA
gctccttcatctttaagtttctgcttaaatgtcacctcctccaggaagtcttctatgaatacccttcctctatcccccactgctgtattctttttttttttttgagacagagtctcactc

SEQ ID NO: 9898 - DNA, 120 bp, synthetic construct
  source 1..120: mol_type = other DNA
aagttgcagcttctgcctggcagcttcctcctcctccagctgttcttcaaggtcctttgttgtggagggaaaagagtaacagctttggttataacagatttactctcgtggtgatctggg

SEQ ID NO: 9899 - DNA, 120 bp, synthetic construct
  source 1..120: mol_type = other DNA
ggaagaagtgatggaatgtaacttcagagattaggctataaaaggcattgcggcttcctttctcctctctcagatcactccttctgggggaactctgctgccatattggaaggacactca

SEQ ID NO: 9900 - DNA, 120 bp, synthetic construct
  source 1..120: mol_type = other DNA
cacacacacggttagcccatcatttgtttttgtggcaaagggatatgttgtcataataaattcgatcagtggttccgagccagggacaatgttgcccccaccgatccccactaggggata

SEQ ID NO: 9901 - DNA, 120 bp, synthetic construct
  source 1..120: mol_type = other DNA
atgctgttacatcattcttacaactttacatagccatcttttaagttaatttatttatttagcgatggtcttgttttgtcacccaggctggagtgcagtgacacaatcatagctcactgc

SEQ ID NO: 9902 - DNA, 120 bp, synthetic construct
  source 1..120: mol_type = other DNA
tactccagcagcttgcttcatgcacttatcacagtttgccattatgtatctgtctctgtgattatctgtttattgtttactccccaccaattcggctagaatattcatggaggtcaggga

SEQ ID NO: 9903 - DNA, 120 bp, synthetic construct
  source 1..120: mol_type = other DNA
actccatttcaaaaaatgcaaaaagtaaaaaaaaaaaaacctgcagtattgatacatgcaacagtctggatgctctctaattccatgtatagaatatttgttttatttttttttgagacg

SEQ ID NO: 9904 - DNA, 120 bp, synthetic construct
  source 1..120: mol_type = other DNA
catcaaaattacagaactggagaacagagtggtttccatggctacggaggaagtgggtgtggctataaatgggccacacgagggattccagtgcggatggaaatattaatactttgtgtt

SEQ ID NO: 9905 - DNA, 120 bp, synthetic construct
  source 1..120: mol_type = other DNA
gagccctgccctgcagcatcctgaacctgcacagggacatgccccaatctccccaactcaggttcttccagaaaccctgtgtgacacatgtgttgtctggctgcaaacaacttaaatcat

SEQ ID NO: 9906 - DNA, 120 bp, synthetic construct
  source 1..120: mol_type = other DNA
tttaggaatttcacactgtgaccctgaaccagcactcttcccgtttaagggctatcgatagattgagaaacgatagaacagtgaacgtaattctgtcttccctgcttggctgccatcttg

SEQ ID NO: 9907 - DNA, 120 bp, synthetic construct
  source 1..120: mol_type = other DNA
atttctgacctgagaaccacgcactgttctaagctctcgtcatgcgttatcttagtgacacctcatgaacagctctctgaggtcaaaatgattatgctcagtttccagctaaaaaactgg

SEQ ID NO: 9908 - DNA, 120 bp, synthetic construct
  source 1..120: mol_type = other DNA
gatctctctggttcttggtgacactagcatcgcctggctggaacctggggcttcctcctcatcacctcgtctccctcacttcctgtccatcagcagtttgattgcttctagctcccaaat

SEQ ID NO: 9909 - DNA, 120 bp, synthetic construct
  source 1..120: mol_type = other DNA
tttttgtttctcagcctcctgagtagctgggattacaggcgtgagcaacacgcctggacactatctagcattttcttacctagttccttcacttctcacctccacactcttgcttagcct

SEQ ID NO: 9910 - DNA, 120 bp, synthetic construct
  source 1..120: mol_type = other DNA
acaactgaaaagtctctggatgcatcctcccttcctccttttcctccagggatggggaatgggtctgagattcagatagccttccccacatggaaaatggggtcctcggggtaggtgggg

SEQ ID NO: 9911 - DNA, 120 bp, synthetic construct
  source 1..120: mol_type = other DNA
cctcaccccgcttatatcacagggaaggagacagacagagatcacagatgttaagtatggaatatcttgagtagtgaggtgtgcgtagaaaaataaaaatagggtaaagcggagagagag

SEQ ID NO: 9912 - DNA, 120 bp, synthetic construct
  source 1..120: mol_type = other DNA
cctgagtagctgggattacaggcacccaccagcacacccggctaattttgtttttattttttatttttagttttattttttcaagacagagtcttgctcttttgcccaggctggagtcca

SEQ ID NO: 9913 - DNA, 120 bp, synthetic construct
  source 1..120: mol_type = other DNA
cactggtctaatttaaccctcataatacctctagtagagacggcaactattattgcatctcctgttttactaatgaggacaatgaagcttaatgacatcaagtgactcatccaagaccac

SEQ ID NO: 9914 - DNA, 120 bp, synthetic construct
  source 1..120: mol_type = other DNA
agttatacactattaagagatttcatgacggcagatgccctcctgccgacatgcaaaactcccccctcatcatcttcccaatcatcctggtttagaaattaagcatggcagccaagcgtg

SEQ ID NO: 9915 - DNA, 120 bp, synthetic construct
  source 1..120: mol_type = other DNA
ctcactgcaacctccaacttcctgggtcaagcagttctcttgcctcagcctcctgagtagctgaggttacagttgtgtgcctgtaatctcacagctggctaatttttaaattttttttat

SEQ ID NO: 9916 - DNA, 120 bp, synthetic construct
  source 1..120: mol_type = other DNA
agaccgtgacatgggagatttttgttgaagccaggtgtggatgtattagtcaccccattccagttggccccgcctgttgggtataacttgtagcaggaaggatttagagtctatacaaga

SEQ ID NO: 9917 - DNA, 120 bp, synthetic construct
  source 1..120: mol_type = other DNA
gagctggccaactatacacaacgcatgggcatccgccgagatctgatactgtatttgcccacatataaagatgagtttatgacccccatgcttccaaatctaccttcaaattaccctgtg

SEQ ID NO: 9918 - DNA, 120 bp, synthetic construct
  source 1..120: mol_type = other DNA
caatggcagagaaggaaagggaagggaaagagggtagggaagaaaaaaaggaagaaaaaagaggatggaaggaaggcagaaattaaagaaaatacctttgatatgaaaatgtgggttaat

SEQ ID NO: 9919 - DNA, 120 bp, synthetic construct
  source 1..120: mol_type = other DNA
ggacaaacctcgtaaggcacgctactgcatgtacagatgtggaaacattttacagatgtgaaaacagaggcgcagagagaaagtgactcggtagtacacttctttcgggacatctatcaa

SEQ ID NO: 9920 - DNA, 120 bp, synthetic construct
  source 1..120: mol_type = other DNA
gatttctgtctcttataccctcaatgatccacccttaactagacagcctcctaccctacagtagccatctacatgcctttctccaaaatcatgactcctccaagaaaaagcccatctcag

SEQ ID NO: 9921 - DNA, 120 bp, synthetic construct
  source 1..120: mol_type = other DNA
ggactgtgaatattctagtattgaataaatgagggataaagagatggatgggtggatgcatggacagatgaatgaatgaatgaatgaatggaatgacagctggatgggtgatggatggac

SEQ ID NO: 9922 - DNA, 120 bp, synthetic construct
  source 1..120: mol_type = other DNA
accctcccagcatcttgcttttctcagctttaaaaagggtcagctcttcggtaccttgttggtacccaggactaaataaggtaaagtatgtaaagtccctgagatagatagatttattta

SEQ ID NO: 9923 - DNA, 120 bp, synthetic construct
  source 1..120: mol_type = other DNA
ggtgtaagccgaattaacttggcaggaacttagtttatagtttattttttatgttttggacacagagtctcactctgttacccaggctggagtgcagtggcacaatctcggcgcactgca

SEQ ID NO: 9924 - DNA, 120 bp, synthetic construct
  source 1..120: mol_type = other DNA
agcaacacaatatacagcctgggctgggaaataagaaacctaagttttgctctcagctcagccaccaacaagcatagtggtagccaggccagcttctcaaaacacaaaatactgtttatt

SEQ ID NO: 9925 - DNA, 120 bp, synthetic construct
  source 1..120: mol_type = other DNA
acccagagccagcttacatctttcctctgaagaaactagattctgagctcaatattttcatatggttgcttaaaaccttgcattacaatggaatgccacgcagcagggactggcaaatta

SEQ ID NO: 9926 - DNA, 120 bp, synthetic construct
  source 1..120: mol_type = other DNA
tcaggccatgttactgttaaaatagtttctatgtctgaaatccccataagaccatgagtttctggagagtggagggcctgccctaatcatctttgaatttccaaagcctattccaaggtc

SEQ ID NO: 9927 - DNA, 120 bp, synthetic construct
  source 1..120: mol_type = other DNA
ctcccacttactatggtagaaagccttctccccaaaatgaatgaagctgctgttgacagggcttggaaacacacttccttttaaccataacatctatgaaagagtctttgtaaactatga

SEQ ID NO: 9928 - DNA, 120 bp, synthetic construct
  source 1..120: mol_type = other DNA
tctaaaaattttgaaggttgtagtggccgatctctcctgtgggctcaggaaccattggtttgcactttctggtatagttaaatgtaattccagaaatgacaaaagaatgccaccactccc

SEQ ID NO: 9929 - DNA, 120 bp, synthetic construct
  source 1..120: mol_type = other DNA
tctttatgatggacagaagagaagacccacagagtagaatgccacatgaaggatgaggcagagactggagtgagacaagccaaggaaaagccaggaacagccagagccaccagaagccag

SEQ ID NO: 9930 - DNA, 120 bp, synthetic construct
  source 1..120: mol_type = other DNA
aatcatcttcacttgccataaatagatggcaattataaatataaatacaaggaaaacagtattaccaaattctagctagatgcttggggctgccgaaggtgctgggcctggagtctggtc

SEQ ID NO: 9931 - DNA, 120 bp, synthetic construct
  source 1..120: mol_type = other DNA
aagctcaagtgatctgcctgccttggcttctcaaagtgctggaattacaggcgtgagccaccatgcccagcaaaacaatttaaatggtctcattgttttctttcacaaggacagacaatg

SEQ ID NO: 9932 - DNA, 120 bp, synthetic construct
  source 1..120: mol_type = other DNA
tgtcctggtgttcctgaaagagattaaccttcaacactgaggcacatctaacgcagaaggaaaatcgtttctggaaacacagtgtcccgaccaagaatttctttctgagctgtcctgttc

SEQ ID NO: 9933 - DNA, 120 bp, synthetic construct
  source 1..120: mol_type = other DNA
taacctccctgaacttctcaacattctgagttagtcactttccctttggtttaagccagctcgggttacttgcaaccctagttatacagccacttttctacaacacaaacaaaccaccta

SEQ ID NO: 9934 - DNA, 120 bp, synthetic construct
  source 1..120: mol_type = other DNA
tactaccaaaggtttataatgaaaaatagcattctcctgtcacatcccttctccaactctaccttactccataatacctgcttttatctcttttagctgctttttatctggcagttacca

SEQ ID NO: 9935 - DNA, 120 bp, synthetic construct
  source 1..120: mol_type = other DNA
aacttttcttccaggaaaccagtcctcagtgccaaaagtaacaggtgcttttggcctattggaagaccagaggcaaagcacaatcgctgtaataggcgatttctggatatgtcaagttta

SEQ ID NO: 9936 - DNA, 120 bp, synthetic construct
  source 1..120: mol_type = other DNA
attatcccgagtttggatgcatttagcaatatttggttctttctaaaagcctaacatctttccagttctatcatctagaatacaaacggcccctgggaatttagttctgagccctatact

SEQ ID NO: 9937 - DNA, 120 bp, synthetic construct
  source 1..120: mol_type = other DNA
tacaatacactccgacacagcgaagttctgagctcacacagatccttttggtaactgtcttaaccaaaataactaaccttgggccacaaaagagatgggaagcaaagtctgtattgttcc

SEQ ID NO: 9938 - DNA, 120 bp, synthetic construct
  source 1..120: mol_type = other DNA
atgactgaacacaagccacactcactcattgggaggagatgaagaactgttcatatgtcactcacagacatggtcctttctggcaggatctgagactgttttaatagccaatcccttaac

SEQ ID NO: 9939 - DNA, 120 bp, synthetic construct
  source 1..120: mol_type = other DNA
agcagaccttgtcttcttcaagtcctaaagccagctagcagtgcccgggctaccacagcccatgtccaatctggaaagcagtgattctcagactttctcatggtgtacatgggtatacac

SEQ ID NO: 9940 - DNA, 120 bp, synthetic construct
  source 1..120: mol_type = other DNA
aaaacattgagttaacgcaatagccaccacctatgagatgctcactttgggcccagtaccgtaccaagggctgtgcatattattatgcatattatttcatttaacccctgcaccagctcc

SEQ ID NO: 9941 - DNA, 120 bp, synthetic construct
  source 1..120: mol_type = other DNA
tgcttgtttagggttcaaaccaggggtccggtccacacatgtataaccactgcaccacaatgcctgctgttaaggggagatttgttctggaagaaacctaagaggctggaaagatagagg

SEQ ID NO: 9942 - DNA, 120 bp, synthetic construct
  source 1..120: mol_type = other DNA
ttaaagctgggaaaactaaggctaaaagagatcaagtgacttgtccaacgtgacgttgctcctgagaggtagggccctaagcagaaagaaggtttttccatattcaggggctagagggct

SEQ ID NO: 9943 - DNA, 120 bp, synthetic construct
  source 1..120: mol_type = other DNA
cctggagagtctctgatgccaatccttgtctatatcccttatgactcttccaatgtctcacctgccactcatggaggtaaaaatctgtttgtaattagccaggcttagaacctaaccttt

SEQ ID NO: 9944 - DNA, 120 bp, synthetic construct
  source 1..120: mol_type = other DNA
ctcctggaatgcagaggcaatttttccttcatcttttctcactaaaatatctttctgaccctcctacggagacaaccgcttcttttgcacaataaaaccattgttgtctacctatcatca

SEQ ID NO: 9945 - DNA, 120 bp, synthetic construct
  source 1..120: mol_type = other DNA
caggccaatcaatatttgttgagtgaatagtgaataaattaatgaatgaatgagagagtgagaggcaggagcccttgcaagattgtgagatacagcccatctctccagggtcagatgccc

SEQ ID NO: 9946 - DNA, 120 bp, synthetic construct
  source 1..120: mol_type = other DNA
tttctgaagtcttctacagcagacaagtaaggaatgcacaaaacccaccaggaatcctcttagcggactgcggaataaagcttcaaagcaggttgcctgagctccattcattgggttaaa

SEQ ID NO: 9947 - DNA, 120 bp, synthetic construct
  source 1..120: mol_type = other DNA
acaaaagcagatcccaaataagaactgtaattctccttctgatctgcaacacagtcacccagggtctaactaagatggattgaatgatcttttcgggagccaaggaagacacctgtgggt

SEQ ID NO: 9948 - DNA, 120 bp, synthetic construct
  source 1..120: mol_type = other DNA
cacgtaggcaaaagatgggccttgctgtggttgaacaacacagtataaaacaaatgtcagcgttatttccatcacatggacatcaggggctggagaatatatgactttgatccccccaaa

SEQ ID NO: 9949 - DNA, 120 bp, synthetic construct
  source 1..120: mol_type = other DNA
ttcttttcctcccaagctcttagtcataccgtgtcatcatctgtttatttgagggattctttgacaactacatgctcttccacaggtctggaagctcagagaagagaataacagcatctc

SEQ ID NO: 9950 - DNA, 120 bp, synthetic construct
  source 1..120: mol_type = other DNA
gttcttgcaatgatgttctgtttgtatctcggttgggctgcaagctggagaccggttggctaaatcatggcctctgattgggaactgccactcaccgtgatacttgtgtctttcttgccc

SEQ ID NO: 9951 - DNA, 120 bp, synthetic construct
  source 1..120: mol_type = other DNA
attgctagaaatggaaagaccaggcacaaggcagccttcaagaaaggatgtaagtgcctctggagtaccaggacctaaagtttaagaagctcccttatggaaagaaaaatttaccaaaaa

SEQ ID NO: 9952 - DNA, 120 bp, synthetic construct
  source 1..120: mol_type = other DNA
agtgccaccaaagctagtacagtctctgctcttcttcctaattaggaaataaagaaattaattttctctgccaaaggcccattaataacttggctcatggcttaaaaaagaaatagaaga

SEQ ID NO: 9953 - DNA, 120 bp, synthetic construct
  source 1..120: mol_type = other DNA
atctaatgagagagttattaattatccccatcacccatccggggaaactgaggcaaagagaggtttgaagtaaattgctccagcccacaattgctcctgctttcacacagataggaaatg

SEQ ID NO: 9954 - DNA, 120 bp, synthetic construct
  source 1..120: mol_type = other DNA
tctagaaacattcatagcttggcttttctgacccctgacctctaggggtgaagatgccttcctggtctgagcaccctaaactcctttcttatttcttggggaatttggtactgagctccc

SEQ ID NO: 9955 - DNA, 120 bp, synthetic construct
  source 1..120: mol_type = other DNA
cagcattttcattttgcaaaattctacaaattctgcagctggtcctggctcccagggtcgaatattgccaagtccattgcagcctgtggtttgccactggtaggaaagccaaattgtctc

SEQ ID NO: 9956 - DNA, 120 bp, synthetic construct
  source 1..120: mol_type = other DNA
tgcaatctcgaactcctgggttcaagtgaccctcccacctcagcctcctgagtagctgggatgacaggcatgtgccactacacctagctaattttttgattttgtggggtctcgctaagt

SEQ ID NO: 9957 - DNA, 120 bp, synthetic construct
  source 1..120: mol_type = other DNA
ctctctctaattttatgtgaaaccaccctcctcctcttactttagccccctgatcacacagctctatctccagccaggcccatggcctctaattaaactgattatactggatggattaca

SEQ ID NO: 9958 - DNA, 120 bp, synthetic construct
  source 1..120: mol_type = other DNA
ttctcttaagcaccaactacgcgtaaaagctcagccctgctgtcaacttgtaggtccttcaagtcactttggctgaatttcacaacaagcaaaataaaattgaatacagagactgaagat

SEQ ID NO: 9959 - DNA, 120 bp, synthetic construct
  source 1..120: mol_type = other DNA
gaacgggactttagaaccagtgtggggagaatcagaactgcaggatgggctgggcgaagtggctcatgcctgtaatcccagcactttgggaggctgactgaggtgggtggatcacctgag

SEQ ID NO: 9960 - DNA, 120 bp, synthetic construct
  source 1..120: mol_type = other DNA
aactgacttatttcctggagcatacaactaactagacgatgatggggccagaattcaaacccaaggggttaggttctggaatccacactttatgacagcatgctaatgaatatttattca

SEQ ID NO: 9961 - DNA, 120 bp, synthetic construct
  source 1..120: mol_type = other DNA
aatatgtttgcttgagatgaggagactgtcttggatcatctaggtggggctaatataaccacaaaggtactgggccttataagagagaggtagggggaccagagaaagagatttgaagat

SEQ ID NO: 9962 - DNA, 120 bp, synthetic construct
  source 1..120: mol_type = other DNA
atggcacttttgtagtcatttgtgaacatgtgcagagtaaggaaaattcgattcccccaatgcacacgttcccagctcaggttgaacaggggaatgctctaccttctagtttcaactctc

SEQ ID NO: 9963 - DNA, 120 bp, synthetic construct
  source 1..120: mol_type = other DNA
cttacgtgcatagaatggactggtcctcccgatctgcaaacagaaagaagaaaaaagagccatgaattaaaatgagctctgagctaagggtctggacttggctcctcccagggccctccc

SEQ ID NO: 9964 - DNA, 120 bp, synthetic construct
  source 1..120: mol_type = other DNA
tgacagagtcagtctctcttgtttaccaccagagaaacccaaaagatacagaggtcatcaaagaactagatgtgattaagcagacattatccatcaccttctactcttaaagaggcctct

SEQ ID NO: 9965 - DNA, 120 bp, synthetic construct
  source 1..120: mol_type = other DNA
tgactctttcttccatctgtaatcttaagagagaactgattggatgtgggcacgttcctcagattctatgcccaactccaatcagttctctctctcttccctcggattatagatggatgt

SEQ ID NO: 9966 - DNA, 120 bp, synthetic construct
  source 1..120: mol_type = other DNA
aaaaaaatttttttttaattagctatgtgtgatagacataccccttgtcccagctacttgggaggctgagacagtaggatcccttgagccaaggagttcaaggttgcagtgagctgtgat

SEQ ID NO: 9967 - DNA, 120 bp, synthetic construct
  source 1..120: mol_type = other DNA
cctcatcccaccaaaaatggtcaatagaaaaagagtcggtattgttctttatgaaaccatcatgaccacaaagctaaaaaaagacagaaaagaaagagccaccgcattaggatcccacta

SEQ ID NO: 9968 - DNA, 120 bp, synthetic construct
  source 1..120: mol_type = other DNA
tgaacccaggaggtggaggttgcagtgagttgagattttgccactgcactccagcctgggcaacagagcaagaccccatctcaaagaaaaaaaaagcaggaaaaaagcaatcaaacttta

SEQ ID NO: 9969 - DNA, 120 bp, synthetic construct
  source 1..120: mol_type = other DNA
gtgcggtggcttatgcctgtaatcccagcactttgggaggccgacacagctggatctcctaaagtcgggagtttgagaccaacacggcaaaaccccgtctctaccaaaaatacaaaaatt

SEQ ID NO: 9970 - DNA, 120 bp, synthetic construct
  source 1..120: mol_type = other DNA
cattgtgtatttattgtaataatctttcagcagatggaggaaaagtgctttgagaaaacggtgcctttctctaatataaacatgagtgtcacatggcctagtggttcccatggtccacag

SEQ ID NO: 9971 - DNA, 120 bp, synthetic construct
  source 1..120: mol_type = other DNA
gccaggagctgcgggtaggaatatggagtgacaaaaaaatgtgcacaagatttctttgggggatgatagaaatataaaattatattgcagcaatggctgcataaccatgtaaattatgag

SEQ ID NO: 9972 - DNA, 120 bp, synthetic construct
  source 1..120: mol_type = other DNA
gggactacaggtgcatgccactacgcctggctaatggtttttttgttttttgttttcattttttttgtagagacagggcctagtaaggtaacttagtaatattacccaggctggtcccaa

SEQ ID NO: 9973 - DNA, 120 bp, synthetic construct
  source 1..120: mol_type = other DNA
aatgcctgttgaacttgtcctgtccatgcaccgtgtccctacacactgaccgaatcacccttgtaacaactggagtaagcacagtcatcatcctcacgggacaagtgaggaaactgaggc

SEQ ID NO: 9974 - DNA, 120 bp, synthetic construct
  source 1..120: mol_type = other DNA
actctctggacctcctctacttagcagctacttgtgggatgattcaattcgtatttacacatacgcacagtaggctgtgtctagggcaacatctaataatcaatattgttagaatgaccg

SEQ ID NO: 9975 - DNA, 120 bp, synthetic construct
  source 1..120: mol_type = other DNA
gaggctcaggtgagccgagatcacaccactacactccagcctgggcaacagagtgagactctgtctcaaaaaagcccaaaacaaacaaggaaggtgttgccaagtgtcagctggggcttt

SEQ ID NO: 9976 - DNA, 120 bp, synthetic construct
  source 1..120: mol_type = other DNA
cagcacatttaagagcttggtaattgccgttaatatcatctttatcatcatcatctaaaacagtgatctagggaagaggttatagacagcagtgattctgaatcggcaggacaggatatt

SEQ ID NO: 9977 - DNA, 120 bp, synthetic construct
  source 1..120: mol_type = other DNA
ccaaagtggttcttgtctggagggctttaatggcgcttttctcctattcatcacgttcatttattgaacttagctccagcctcctaagctttgagctgtcaacactctgagatgaagaca

SEQ ID NO: 9978 - DNA, 120 bp, synthetic construct
  source 1..120: mol_type = other DNA
aaatcccgtctccacaaaaaatacaaaaattagccgggtgtggtggtgcatggctgcagtcccagctacttggggagctgaggtgagaagatcactggagcctaggaggtcaagcctgca

SEQ ID NO: 9979 - DNA, 120 bp, synthetic construct
  source 1..120: mol_type = other DNA
cacttctttgtaaaagaaggcatgagagaattcccatgagaagatggtaggctgagtgcatgcatttagctctcttccttcctaaaccttactaaaataactgtaaaagactttccaaaa

SEQ ID NO: 9980 - DNA, 120 bp, synthetic construct
  source 1..120: mol_type = other DNA
gaggaaaggtgggaaacgacctaatttcaacaccgaattccccatttctgccccaaacctcagaaactggcaatgccaggggcctctggaagaaaagatcaaggaggagacaaaaacata

SEQ ID NO: 9981 - DNA, 120 bp, synthetic construct
  source 1..120: mol_type = other DNA
agtgatgaaaatgacaaaagaaagagatttaaattataggattggtctaggaattccattatggaaataaaaagacttctaagaaaaagaaacagagaacacagggagaaagacagcatc

SEQ ID NO: 9982 - DNA, 120 bp, synthetic construct
  source 1..120: mol_type = other DNA
gaatccactatgaaagcactaaggggaatttcaaggatggtgaaaaagatcctatatgacagttactagctatagagaaagccagggcagatcagaaggctatagtagagatcacattca

SEQ ID NO: 9983 - DNA, 120 bp, synthetic construct
  source 1..120: mol_type = other DNA
gcttatacttgcaaaaatatctctaggagaaaacctcatacactagaaaccataattgtctcttgggagggaagctaagggtctaatgcacaagggttgaagggagaagttcaccttttg

SEQ ID NO: 9984 - DNA, 120 bp, synthetic construct
  source 1..120: mol_type = other DNA
tgtgctggagatacaatgatgcacatgcaagaaggatggagtttataggtcctcaggaacttactgtctatgtgacacaactgcaatgcttcatcttatattcagtgcatgtgtgttacc

SEQ ID NO: 9985 - DNA, 120 bp, synthetic construct
  source 1..120: mol_type = other DNA
gcatttctaagtagtttcaagagagctgactatgcaattttgtgttaaaacctagagaccatgaggaatcaaatatatgaacacagggtgtccttgtcaattacaacattgcctcacagt

SEQ ID NO: 9986 - DNA, 120 bp, synthetic construct
  source 1..120: mol_type = other DNA
gccaattattgggtatcaatagccaccatcatgatatgaacacaaaacaaagtggcagttctggaaaacaaggtgcagtgactggcaaagtcagtggccttggaaaggccaaaaaaaaga

SEQ ID NO: 9987 - DNA, 120 bp, synthetic construct
  source 1..120: mol_type = other DNA
tgatctcggctcactgcaacctccacttcctggtctcaagcgatcctcccacctcagcctcccaagaagtgggactacaggtatgtgctaccacaccaaagtaatttttgtattttttgt

SEQ ID NO: 9988 - DNA, 120 bp, synthetic construct
  source 1..120: mol_type = other DNA
cctgctggtctttggaggtaatggcaggccctgcctagaagggccaagattctggtcctacctgtggagtctggctcactgtcagaaagttggggcacttatacctgagtccctctatct

SEQ ID NO: 9989 - DNA, 120 bp, synthetic construct
  source 1..120: mol_type = other DNA
aaaaataataacgtataaacatgaaagtaataggcacaagtcttaagtttggaaaaaccagcattaacaatcttcacaagaagctacaagatagagactatcaccccttttgacaaatga

SEQ ID NO: 9990 - DNA, 120 bp, synthetic construct
  source 1..120: mol_type = other DNA
gagttttgaagagctctgggttcaaatctcagctccactcctccgacctgccactttacctccccggacctcactggcttaaataacagccaccgttcattgagcacttactatgtgttg

SEQ ID NO: 9991 - DNA, 120 bp, synthetic construct
  source 1..120: mol_type = other DNA
cccaatgtccatatctaagaagaaaccccagtgactcagtctctagaagatggcagaggcatctcctcgtggcatcttcacaactactcagtaacagtgatttccccaccgcctgtttga

SEQ ID NO: 9992 - DNA, 120 bp, synthetic construct
  source 1..120: mol_type = other DNA
aatagtgagctatgattgtaccattgcactctagcccctgggtgacagagcaagaccctgtcttgaaattgatagctgtacaacattgtgaatgcacttaatggcactgttttctttaaa

SEQ ID NO: 9993 - DNA, 120 bp, synthetic construct
  source 1..120: mol_type = other DNA
cccatctctataagaaatttaaaaattagctgggcatggtggcattcacctgtagtcccagccacttgggaggctgaggtgggaggtttgcttaagcctgggaggttgaggttgcagtaa

SEQ ID NO: 9994 - DNA, 120 bp, synthetic construct
  source 1..120: mol_type = other DNA
gtgccttgagtccggggaaccccctttctcctcttcagtcccagcacaggccttggtatagaataggtgctaactaaatgcttgctaaatgcatgccaggggaataaattaatgatacag

SEQ ID NO: 9995 - DNA, 120 bp, synthetic construct
  source 1..120: mol_type = other DNA
gttatttagtgactcttactatgctcccttcatttcacgagagggaagtcttgccaccttagagccttcaatatgctgttctctccacttggaacacttttcccctcatcttcccacagc

SEQ ID NO: 9996 - DNA, 120 bp, synthetic construct
  source 1..120: mol_type = other DNA
ctagcttctgaaagaggaatatgacttccatcctctttgtttgggacatctctcccagtgccgtgcacacaacaagcacttaatccatacttccaggtagatctgaatctctgctgagtt

SEQ ID NO: 9997 - DNA, 120 bp, synthetic construct
  source 1..120: mol_type = other DNA
acctaaatacctgtcaatagcagacaggcttaatcattatggttcatccctatagcagaagactgtgcagtggccctctctctactaccatggatgaatggccaaaatacacagttagat

SEQ ID NO: 9998 - DNA, 120 bp, synthetic construct
  source 1..120: mol_type = other DNA
tggaagggcgagaaataggaacgaagggggaagttctatattcccttatacactattttatttcatatttgcatgtcttacctattcaaaaacatatttgaagtctgactagatagttat

SEQ ID NO: 9999 - DNA, 120 bp, synthetic construct
  source 1..120: mol_type = other DNA
aaggcggaaaaattgtcacctgctaaagtttggaaggagggcttctcctgaccccctgggcattccagaagcagaaccagaactggaaaaatgtcctttggggttcatggttcagggact

SEQ ID NO: 10000 - DNA, 120 bp, synthetic construct
  source 1..120: mol_type = other DNA
ggaggccgaagtggtgaagattgcttgagctcaggagttcgagatctgtttgggcaatacggtgtgaccccacctctaccaaaaacacaaaaaaattagctgggcatcgtgctacatgcc

SEQ ID NO: 10001 - DNA, 120 bp, synthetic construct
  source 1..120: mol_type = other DNA
tattaagcaattaaactgaccagaaaggaacaagagaagagcgggaccatcatcacaaggctgaaaggattttaatctaatctgtccagagaagcatagcaggaatttgaagctttgatt

SEQ ID NO: 10002 - DNA, 120 bp, synthetic construct
  source 1..120: mol_type = other DNA
cacagacaagagacttcccctacttaagaaagtaaagatacattttgcaacactgcacctcagcttccttccctaaaaggggcaaacatttttaactcaggggatgctgtgttaaataaa

SEQ ID NO: 10003 - DNA, 120 bp, synthetic construct
  source 1..120: mol_type = other DNA
atgccaagtgatggaagaagaacatcttactagtaaaatcaaaagtgatcatgaccacagcaaaaaccaatctagtaacacttaacattttcagtgcctgcacttaacatgtagcaggaa

SEQ ID NO: 10004 - DNA, 120 bp, synthetic construct
  source 1..120: mol_type = other DNA
aataacgcgattttggctcactgcaacctccatctcccaggttcaagcgattctcctgcctcggcctcccaagtagctgggattacaggcgcacaccatcatgcccagctaatttttgta

SEQ ID NO: 10005 - DNA, 120 bp, synthetic construct
  source 1..120: mol_type = other DNA
ataggaaaaccaaggcttcgagagaggaaataacctcttcaagggctgagatgtgaacccaccttggaatgattccacctcatcttgcaatctccctcgatcaaaccttcagcctcccat

SEQ ID NO: 10006 - DNA, 120 bp, synthetic construct
  source 1..120: mol_type = other DNA
caccaagtacaaagacctgcagtattgtgtatgtggtcaaagaacagagaccacccaaaggcccttcagaaagggatgtgtgtcatcgcctaaaataccaaaagtcagacaacccaaatg

SEQ ID NO: 10007 - DNA, 120 bp, synthetic construct
  source 1..120: mol_type = other DNA
ctattactccttcaatacgaaaaactattaggctggtgcaaacgtaagtgtggttattgagatagaaggtaatggcggccgggcgcggtggctcacgcctgtaatctcagcaccttggga

SEQ ID NO: 10008 - DNA, 120 bp, synthetic construct
  source 1..120: mol_type = other DNA
caacctgggcaacataagaagcccctgtctctgtaaaaaaattaaaaattagcctggcacggtggtgcatgcctacggttccagctactcaggaggctaagacgggaagatggctagagc

SEQ ID NO: 10009 - DNA, 120 bp, synthetic construct
  source 1..120: mol_type = other DNA
gattctgcgttttctatacaaattgttccttagggtaactaaattaagaaggggaagtctctcttgatggaagattaggtcattaaatgtcctgtctacatgggaagcccatggatggta

SEQ ID NO: 10010 - DNA, 120 bp, synthetic construct
  source 1..120: mol_type = other DNA
tcgtagctgatgaaaaaaaagtggcggctaggtgcggtggctcacacctgtaatcctagcactttgttggggctgaggtaggaggattgcttgaggtccggagttcaagaccagctggcc

SEQ ID NO: 10011 - DNA, 120 bp, synthetic construct
  source 1..120: mol_type = other DNA
gcttagctcatagtaagaccaacagtgtcctgcccctgactccagttaccctatcttaaaaaagactcccttctacatggaagaattccagcgaatacatgcagaacaataaaactagga

SEQ ID NO: 10012 - DNA, 120 bp, synthetic construct
  source 1..120: mol_type = other DNA
gcgccgctgcactccagcctggacgacagagtgagactccgtctcaaaaaaaaaaaaagaaagaaaggaagaaagaaagggtcttggcaagttggcaagttctaccagtaattgctaaaa

SEQ ID NO: 10013 - DNA, 120 bp, synthetic construct
  source 1..120: mol_type = other DNA
atgaagcctccagatctgacgcctgtctatggaaaatgcaaggcacaggagagcatgctaaacaatgcagtaaactcccaaaggtgagagactatgctctgtcgcccagctagagtgcaa

SEQ ID NO: 10014 - DNA, 120 bp, synthetic construct
  source 1..120: mol_type = other DNA
agatctgagactcagatttactgtatattaatactggggacctaacgggtgccctgcagagctgccatgaagtttagatgaaactctctacaccaagcttgtctaacctgcagcccacag

SEQ ID NO: 10015 - DNA, 120 bp, synthetic construct
  source 1..120: mol_type = other DNA
acccaaaataggactcgaatcaggtgaagtaaactacagctccacaccacaaaaaaggacatctcacaacacatccttgagcaaaagaaggtggtcacaaaaagcacaggttctgtgact

SEQ ID NO: 10016 - DNA, 120 bp, synthetic construct
  source 1..120: mol_type = other DNA
atattcttgtgcaataatgaagagtttgtgcagatggtagccaattacatcccaagagggctaggagagtgtttcatttgttctaagcactatgacaagtaaagtggacttctttttttt

SEQ ID NO: 10017 - DNA, 120 bp, synthetic construct
  source 1..120: mol_type = other DNA
tctctgacagttacgacgtgcaaaatctgctttggtcaaaagacagcaagatgggggatgagaagcttcgactcatgctagaatggtgttttccatagcatgccccttggaaccctaatt

SEQ ID NO: 10018 - DNA, 120 bp, synthetic construct
  source 1..120: mol_type = other DNA
gaaccacagctttagaataaaaacaagggctgtcttgggaaaggcagttaaagctgagagcagctctcacttagtcaaactcaactcggaataccaactgcagaagatcagacgggggca

SEQ ID NO: 10019 - DNA, 120 bp, synthetic construct
  source 1..120: mol_type = other DNA
aggctcaagccattctcccacctcagcctcccaagtagctgggatcacaggcacgcaccagaacacccagctaattttttaattcttgcatttttttgtagagacaggggtctcactttg

SEQ ID NO: 10020 - DNA, 120 bp, synthetic construct
  source 1..120: mol_type = other DNA
cacctggtcaacagcttccctcaggattttactgccaagccattggctaaagattttggaccagagacaaaaacccaaatgtttttggagatcaggtaagtaatacagagtgacccagac

SEQ ID NO: 10021 - DNA, 120 bp, synthetic construct
  source 1..120: mol_type = other DNA
attgctattttcctgctaagatgaccgaggtcctggaaggtaaatgcaagacccccacttgtaaaatttggagtcaggagtacaatccagaatctaatcctagttttctgctaagagtaa

SEQ ID NO: 10022 - DNA, 120 bp, synthetic construct
  source 1..120: mol_type = other DNA
ctctgcctctgaggctcaagcgattctcgtgcctcagcctcccgagtagctgggattacaggtgcccacgaccatgcccagataatttttgtatttttagtagagatagggtttagcaga

SEQ ID NO: 10023 - DNA, 120 bp, synthetic construct
  source 1..120: mol_type = other DNA
ttctctaaattcagtctttcctccattgtgtggccagggttaaaagttgaaaggtcaggagtggaaggagaagacctagagagcaaaaaggccatcccttaaagtatgccatcaagaccc

SEQ ID NO: 10024 - DNA, 120 bp, synthetic construct
  source 1..120: mol_type = other DNA
caggcaaaagtgcccaaaaaacatgagttattctcattagccccatttcccggatgagaaagtgaggtttggggaggtgcgggagatgatttttaaatttgcttatggccttctatgatt

SEQ ID NO: 10025 - DNA, 120 bp, synthetic construct
  source 1..120: mol_type = other DNA
ggtcactggtttcagctaggtcaccccctcaatcaggggacaaacagtgccttttattttaaatgtgcaaaaagtcagtttatgttttcttcaaaggacacggtgataaacatttacttt

SEQ ID NO: 10026 - DNA, 120 bp, synthetic construct
  source 1..120: mol_type = other DNA
cccatgtgtttttaactgatttaatgcattatcaacacaactgtgcaatacggtcaaatccacaaggagcctcactttgcccttctgtgtgatagcaagtgacttttcagtgaagttcag

SEQ ID NO: 10027 - DNA, 120 bp, synthetic construct
  source 1..120: mol_type = other DNA
tgagcagatcaagatgtggcaaagctactcctcattcaagcccttttgaaaggaaacaaagtccaatcagtccttggagagatggtattgggcagggacagggcatgggaacaaaggtga

SEQ ID NO: 10028 - DNA, 120 bp, synthetic construct
  source 1..120: mol_type = other DNA
aaaaaaaaaaaaaaaagttagagctggaagaatccttgaaatcacagagaactgcattaccttggcctctggggccatgtggctcaagtgtgtggaataaatgaaaaggaagcatcccgg

SEQ ID NO: 10029 - DNA, 120 bp, synthetic construct
  source 1..120: mol_type = other DNA
tgtaaatattttaaatgatctgtaccaggaaagagtccaaagaactagtgggactcctgaaattatgcacaaaattgtgtgtgtgcagtgctccagggagcaggtttttcagggtccggg

SEQ ID NO: 10030 - DNA, 120 bp, synthetic construct
  source 1..120: mol_type = other DNA
ttcttcttcatgcgctccaggtgggcgctggtgtcctgctccttcttcagctcctctgccatcatggcggcctgtgtgcaggagagaggtggcacatggtctggtcaagtcctcacacac

SEQ ID NO: 10031 - DNA, 120 bp, synthetic construct
  source 1..120: mol_type = other DNA
gcagtaacctaggggcaggaggaatctggtgcctgtatcaagacactactgcttcgccaggccacgtggaggccagtcccctctgggtgagtaccttcaacaagctctggaggctcttga

SEQ ID NO: 10032 - DNA, 120 bp, synthetic construct
  source 1..120: mol_type = other DNA
ccctgcacacacacacacctcggcctcctccagggctgactgcagctccatcttctcggcctccagctgctttcggaccttctccagctcatggatagtctttccgctggaacccaactg

SEQ ID NO: 10033 - DNA, 120 bp, synthetic construct
  source 1..120: mol_type = other DNA
aaccttttgttcgtcttatattcggatcagaaacataattcgagcaaaaagcttccctgagaggagaaggaggtggggccggggcagagtcctcctgtgttgtcaaacactagctaagca

SEQ ID NO: 10034 - DNA, 120 bp, synthetic construct
  source 1..120: mol_type = other DNA
ccctaacctaagatcactgagctataagaggcaggttagtatgaaccctggagttttttaaaaatcatgttctttctcctttttcatgagtccagcaaagtgctaggaataggctccagt

SEQ ID NO: 10035 - DNA, 120 bp, synthetic construct
  source 1..120: mol_type = other DNA
aaggggtgtaagaggtgcaactgaaggagaaaagaagagggaaggtgtgaaaagaaggaggggatctgagaaccaggcagaggaagggaagtgggaaaatgaaccatgaaggaagagaca

SEQ ID NO: 10036 - DNA, 120 bp, synthetic construct
  source 1..120: mol_type = other DNA
ctaaagacctaacacagcttctgctctagagtaaggaggaaagtcatgccatcagagtcgaaggactcttaaaaacctccatgtaacaggggagggcatggagacccagagatctggagt

SEQ ID NO: 10037 - DNA, 120 bp, synthetic construct
  source 1..120: mol_type = other DNA
tggaaagtctatacattttggaagaacttacactaagaattggaaccacaagttaagcaaaacaaagaaatggccctgatcccctgacttctttaatgtgagggcatttcttggtgccct

SEQ ID NO: 10038 - DNA, 120 bp, synthetic construct
  source 1..120: mol_type = other DNA
acttggtgattttgttgttcagttacctcaggacttggtaaatctttgtgttcaggacttgggaaaccttccccagagtgggccaaatgttattaggggactgtgagattgcctagatat

SEQ ID NO: 10039 - DNA, 120 bp, synthetic construct; identical to SEQ ID NO: 2870
  source 1..120: mol_type = other DNA

SEQ ID NO: 10040 - DNA, 120 bp, synthetic construct
  source 1..120: mol_type = other DNA
tgatggcttaatgaaatggacagctttattccctgtctagaggaaattgaggctcaaagatgatgcatggtctgcccaaggtcacaaaataattaagctgtgtatctaggttgaacccaa

SEQ ID NO: 10041 - DNA, 120 bp, synthetic construct
  source 1..120: mol_type = other DNA
tgcagtgtgttcatatgagcccctcctgcaggtctctgtgtttgaagatctgctgagctttttttcctgacactgcccctgaaccagcctgggcctcagagaagcgggaaacctcctctt

SEQ ID NO: 10042 - DNA, 120 bp, synthetic construct
  source 1..120: mol_type = other DNA
aggaggagtctgtgagaacactggactgaagttctgggttctgatcctggctttgtcactgattagcttgtaatcttagcaagtcagttagtaataatcatttgtttcattttcttctag

SEQ ID NO: 10043 - DNA, 120 bp, synthetic construct
  source 1..120: mol_type = other DNA
gctgacacagtctgaaaggacgagcctttcttggccttgcctttgcccttctcaatagctgcaggaaggagagtcaacaaaagaagcatcagtgtggggaggtagggtgtgagtaaagaa

SEQ ID NO: 10044 - DNA, 120 bp, synthetic construct
  source 1..120: mol_type = other DNA
tgagtgtccttcacacaggtggacatggattctgctctatggtcaatatacttgctcgtggaggtgccatgttgggtgttaaggtagtaggctcagctctgagtacagttatctactgac

SEQ ID NO: 10045 - DNA, 120 bp, synthetic construct
  source 1..120: mol_type = other DNA
gagacccatattgagcagggttgttgggaagagtgaacttgaaaactctcatcccaccatgccagtctccctaccctgcccacccattatcatctgaagatggacccacctgctggacat

SEQ ID NO: 10046 - DNA, 120 bp, synthetic construct
  source 1..120: mol_type = other DNA
tgaacttcatgtttccaaagtgcatgatggcgcctgtcagcttatacatggagtttttctcctctgaagtgaagcccagcacatcaaaagcgttctgtagggaggccccatattggcgga

SEQ ID NO: 10047 - DNA, 120 bp, synthetic construct
  source 1..120: mol_type = other DNA
ggaaaataactctggatttttccagaagatctgtgaacaggtggggagaagaaggagagaaagaaaagttagggtttgggcacaaggaaaattaatgataaatgtagcaagcaaaaggca

SEQ ID NO: 10048 - DNA, 120 bp, synthetic construct
  source 1..120: mol_type = other DNA
acaatactactggagaccagcaagcctcaaatcaggagagaatgcctgggcctacccgagagtaggagccctgggcaagaagctgccaggttatctacacccaaaatccacaactgtctt

SEQ ID NO: 10049 - DNA, 120 bp, synthetic construct; identical to SEQ ID NO: 2880
  source 1..120: mol_type = other DNA

SEQ ID NO: 10050 - DNA, 120 bp, synthetic construct
  source 1..120: mol_type = other DNA
ctcgagacacgatcttggccttgacaaactcctgtttgtcatcaggcacgaagacatccttcttgaggtcaaaaggcctggtctgcgcttctagccgctccttctctgacttgcgcaggt

SEQ ID NO: 10051 - DNA, 120 bp, synthetic construct
  source 1..120: mol_type = other DNA
gtacctttctttgagccatctgagagacaactaatggtcacatttgttcggcactttccagtctaaaagcacttcaatgcactttctcctactcagtcttcaccccatttgacagatgag

SEQ ID NO: 10052 - DNA, 120 bp, synthetic construct
  source 1..120: mol_type = other DNA
tggcacatacgcccatgtttagacctgcacatgtgtgcccagtgactggacctggtactctgcatgaagtcctgcatgaagcttgctattccaagaggaatcccttcctaagcctggagc

SEQ ID NO: 10053 - DNA, 120 bp, synthetic construct
  source 1..120: mol_type = other DNA
tttgtcagagaaatgtcgtgaccaaatacacgacctcctgtttattggaacatggcctctggatggatttccaactgtaggatgtgcggccacgaagtacccatagccacccaggctgca

SEQ ID NO: 10054 - DNA, 120 bp, synthetic construct
  source 1..120: mol_type = other DNA
agacacgtggccatctaaaaaggtgacatgaagtgaccacagggtccagggtgtcagaaatctagatttttgtttttacacaaaatttccccatttaaaaagcattggctagttattatt

SEQ ID NO: 10055 - DNA, 120 bp, synthetic construct
  source 1..120: mol_type = other DNA
gatgaggaaattgaggtgcagtgaggttaaggagcttgttcaaagcacacagcaggtggaaagtgaaggcagcccttttagctgcttgaattttgggggagggaaaatctacatacaatt

SEQ ID NO: 10056 - DNA, 120 bp, synthetic construct
  source 1..120: mol_type = other DNA
tgtgtgtgtgtaggggggacagggggcaagcagggaacccccttcctcccccacagaccccactcactaatcagccttcagcacccctttgccttcagggtcaaacactttgaatgcgtt

SEQ ID NO: 10057 - DNA, 120 bp, synthetic construct
  source 1..120: mol_type = other DNA
gacacacacacacacacacgaccttacccttaagtttctccccaaacattgtgaggaacacagtaaagttaattggacccggagcctccttgatcatttcatcaatttcttcatttttca

SEQ ID NO: 10058 - DNA, 120 bp, synthetic construct
  source 1..120: mol_type = other DNA
atttgatgcagatattttcatttttcactcaaatgggaaaggctcatgttgtaaattagcccttcacagttggaggcgggagagacagatcaggatcacctgagggaacttttacaagtt

SEQ ID NO: 10059 - DNA, 120 bp, synthetic construct
  source 1..120: mol_type = other DNA
gcctgggagaaactggcagagttgcccaagagattgggccaaggacttggcaggagtggattctgggatcttcaaagatcattgtaggacctcagattaaaagtcaacaattgaagataa

SEQ ID NO: 10060 - DNA, 120 bp, synthetic construct
  source 1..120: mol_type = other DNA
ggaaatattctgaaattagatagtggtgatggttgcacaactttgtgagtatactgcaaaccacaaaactgcacacttcaagggtgaattttatggtatgcaaattataactctataaag

SEQ ID NO: 10061 - DNA, 120 bp, synthetic construct
  source 1..120: mol_type = other DNA
tgactatctcaagttcagatatgacacttgcctcaggaatttctctttccctatgggacacggcattcctgcaatctgaatgttagtgaggacaaaaggtacgactgttcatttcctgtt

SEQ ID NO: 10062 - DNA, 120 bp, synthetic construct
  source 1..120: mol_type = other DNA
tgacccagcagttctgcttttaggaatttacccccaagaaataaccagagatacaagcaaagaggtgttatttatagtagtaaaacattataaacaaatgtcatatttaaccataggaaa

SEQ ID NO: 10063 - DNA, 120 bp, synthetic construct
  source 1..120: mol_type = other DNA
caggatccagccacttttgttctgatgcatttcacaaaaagctcagtaatgcacagaaggagaattgattggagggaaagaaaaagtcaggctcactaagccatgatgaatgccaagatg

SEQ ID NO: 10064 - DNA, 120 bp, synthetic construct
  source 1..120: mol_type = other DNA
atgtttaaaaataaccccatgaccgcttttggcagtcataggtgaggcgggcaccacctaaggcccccccaccccatgccgttcttctgaagtaagggtggctcactcgccactgggtga

SEQ ID NO: 10065 - DNA, 120 bp, synthetic construct
  source 1..120: mol_type = other DNA
ccactgcactccagcctgggtgacagagcaagaccctgtctcaaaacaaacaaataacacagccacgcacctcctgcgctccgatctcccttctttgtttctctgcacagcgtgaggcag

SEQ ID NO: 10066 - DNA, 120 bp, synthetic construct
  source 1..120: mol_type = other DNA
aagacgcggagaccggtagtggccctgaatgcctggacacgctgctatttattgtattctaggcaagggggcagggtaaggagtatgagtcatctcaaatgattgataaggtcacgcaag

SEQ ID NO: 10067 - DNA, 120 bp, synthetic construct
  source 1..120: mol_type = other DNA
cccagcactttgagaggccaaggcaggaggattgcttgagcccatgagtcacgagttcatatccagcctgggcaacatggagaaatcctgtacctacaaaatataaaaagattagttgga

SEQ ID NO: 10068 - DNA, 120 bp, synthetic construct
  source 1..120: mol_type = other DNA
gtagagaagaccacccttgtcaaaacagaagatgcactgcttctgttagcaagggaggttcagtgtggctgggggtcagatgtcctaaatctatccaaatatgcctcattgaaattttca

SEQ ID NO: 10069 - DNA, 120 bp, synthetic construct
  source 1..120: mol_type = other DNA
gtccaggaacaagtaacagcagtctactgctggaagagtgagggtaaaagcacagaaagatatcctctcttagacgtaggcacaaagaaaagaccaataactgtgatttgaacagacact

SEQ ID NO: 10070 - DNA, 120 bp, synthetic construct
  source 1..120: mol_type = other DNA
ggggaaatagtaaattctctaaactgtgaagcagtctcccagccacacacacatccagtggtaaatagtggaagtaaaactgactaaaggagcttacctacaaccaccaacaaataagtg

SEQ ID NO: 10071 - DNA, 120 bp, synthetic construct
  source 1..120: mol_type = other DNA
atgagatggcctcaacagtggatttgatttggatcagtaaacttgaagataagtcatcagagattttacaatatgaagaaacaaaaacaaaacctcaatgtagaaagatgaacagaggct

SEQ ID NO: 10072 - DNA, 120 bp, synthetic construct
  source 1..120: mol_type = other DNA
tttatgaaaaacattaagctacacatcgaacaagcttaatgaactccaagtagaataaactcaaagagacctatacccacacatcagagtcaaaatgttggaagccaaagataaagagaa

SEQ ID NO: 10073 - DNA, 120 bp, synthetic construct
  source 1..120: mol_type = other DNA
ttgcaggcatgggccaccatgcccagctaatcaagtggaatttattccccaaaagcaaggatgattcaatatacaaaaatcaatcaatgtaatatgccacattaatataatgaaggggaa

SEQ ID NO: 10074 - DNA, 120 bp, synthetic construct
  source 1..120: mol_type = other DNA
ctgatttgaaaatttactataaagctatattaattaaaacagcatggtattggcataatgacagacatacagaccaatggaatagagaacccagaaataaaccctctcatatatggtcaa

SEQ ID NO: 10075 - DNA, 120 bp, synthetic construct
  source 1..120: mol_type = other DNA
tacgtgttcgtgtacccaaaatctgtgaatatgttactttacgttgtaaaaggaaatttatagatgtgattcaggttcaggaccttgaaatggggatattatcctggattatctggaaaa

SEQ ID NO: 10076 - DNA, 120 bp, synthetic construct
  source 1..120: mol_type = other DNA
tgctcaataaatattagtcacccttattccttattgtagttatagttgttaccttcacgaggagcctcaagcatctgaaaggtgcaggcaccagagcaagcaaaatctcccagccactat

SEQ ID NO: 10077 - DNA, 120 bp, synthetic construct
  source 1..120: mol_type = other DNA
tcctggaatccaccgaccctccccacagtgttccctctctaatccccacaacagtctcaaccctacagtggaggaaatgagtggcgagaggttaagcaatttgccaagatcacacgaggc

SEQ ID NO: 10078 - DNA, 120 bp, synthetic construct
  source 1..120: mol_type = other DNA
ctgagccctgggagccggccaccagcatgcgtcgctggtgtcaccgtgtgtggtggcttgcgagggtgtgtgtgtcccgaagggaaaacactgtgcgtgtgataagttgcacacctccca

SEQ ID NO: 10079 - DNA, 120 bp, synthetic construct
  source 1..120: mol_type = other DNA
cacagggctgtcatgctcccatcctcctcccttcaccctacagctgggccatggctctgagacagtgaccttgcctgcaggatggcacacatgagtctttcacccctccttaccagctat

SEQ ID NO: 10080 - DNA, 120 bp, synthetic construct
  source 1..120: mol_type = other DNA
ttcgctgatggctcagttacttacctactattccctgggccactctgggaaggggaggtcttttttttttttttggagatggagtctcactcaccctgtcacctaggctggagtgcagtg

SEQ ID NO: 10081 - DNA, 120 bp, synthetic construct
  source 1..120: mol_type = other DNA
caaccgcccccagcccgaagctcagagtccagaaggggcctctctagggctcagaacaccagagtctccaacacctccagcccggcacaggaggagaattaaggccagagatggataggg

SEQ ID NO: 10082 - DNA, 120 bp, synthetic construct
  source 1..120: mol_type = other DNA
tgtccctgtccctgtcagcactcaggctgtcttgcccacactcaccctatcactgggcatgcccactcaggcctggggcttgatggtagcattctcgagtgcccaggagggtaaaggtga

SEQ ID NO: 10083 - DNA, 120 bp, synthetic construct
  source 1..120: mol_type = other DNA
atacaagataggacattttttcaaaactttcttgggtattgtgataagttgggccttagggcttggaaatgcccaagtgcttccaatctccaccagggtaagagccccttctgcagcctt

SEQ ID NO: 10084 - DNA, 120 bp, synthetic construct
  source 1..120: mol_type = other DNA
cacacatgccacattccagttgtgctctgtcagcgtttgggcaaaccaggattgtgtggctttgggagggcagggaacaaataacccccaaaagtgggtgagggagggactggggctggt

SEQ ID NO: 10085 - DNA, 120 bp, synthetic construct
  source 1..120: mol_type = other DNA
cctggactaccccactgaccctctgattcagcatggactgagaatgtagtggtggctcctcctgccaccttgaggagacctcagagatcaggccccaggccagaggaggaaagtgaggca

SEQ ID NO: 10086 - DNA, 120 bp, synthetic construct
  source 1..120: mol_type = other DNA
acgactgagagcaggtgcaatctgtgctcaggacaccagcccagggtaggcatacccagaaagaaaatgctgaaactactcagtcccatgcagaattctgaaggggagctcagcacttct

SEQ ID NO: 10087 - DNA, 120 bp, synthetic construct
  source 1..120: mol_type = other DNA
tgaagcagatgctgaggtgccgcataggaatgttccagccaacctaggggccctgcccagccagtgacagatgggagtctgtagatagtctgccttcctcatccctcagtgagacaatac

SEQ ID NO: 10088 - DNA, 120 bp, synthetic construct
  source 1..120: mol_type = other DNA
gcaaatacctgttcaaaccctgctttcaagtattttaggtacatgcccagaagtacaattgctggtcatctggtcattctattttgtgggaaaatgctatagcgttttccacagtggctg

SEQ ID NO: 10089 - DNA, 120 bp, synthetic construct
  source 1..120: mol_type = other DNA
cacaaagggcagaggtttccactgccttctccactgcagtgttcccagcacctagaacagagcctgacacacagtcggtgctcagtaaatgctgagagaatgaaaggaggatgcaacaga

SEQ ID NO: 10090 - DNA, 120 bp, synthetic construct
  source 1..120: mol_type = other DNA
aaaaggagggaggaaggaaaaaaagggggaaggaagaaggaaaagaggaaaggaagaaaggaaaggagggaagaaggggaagaaggggaggaaaatgggagggaaggcaggaaagaagaa

SEQ ID NO: 10091 - DNA, 120 bp, synthetic construct
  source 1..120: mol_type = other DNA
ctcccagaagacccctgcccctgctgagcccaccttcatagttgatgcagccattggagtcctcttgcccagccatcaacttctccacttcgtcttctgtcagcctctcacctggcagga

SEQ ID NO: 10092 - DNA, 120 bp, synthetic construct
  source 1..120: mol_type = other DNA
ctccacgaagtcctcataggtgcctgtgtccttgttcttggaaatgtgctggagcataggcaggaaagtttcaaagtccatcatcttggtattgagctctgcagagaaatggtcccaggt

SEQ ID NO: 10093 - DNA, 120 bp, synthetic construct
  source 1..120: mol_type = other DNA
ggatcctcctggctcagcttcctgagtagctgggaccataggtgcatgtcaccatgccaagctaaatttttaatttttgtagagatagaatctcactatgttacccaggctggtctcact

SEQ ID NO: 10094 - DNA, 120 bp, synthetic construct
  source 1..120: mol_type = other DNA
gcaatggtacaggccgagggctggtggctggaagcatcgagggtgagcacaagtgtgcatgtttgtgtgtgagcatgtgtctacatacgtctgccctcacagagccccctaagccctaaa

SEQ ID NO: 10095 - DNA, 120 bp, synthetic construct
  source 1..120: mol_type = other DNA
acttggcaactaaaatggagcagagttgggatttgaacccttgcctcaaaggacatggtaggtgtctctgggaagggctcatgaacaggaggcaagacttcaccgatggaatgtaggtcc

SEQ ID NO: 10096 - DNA, 120 bp, synthetic construct
  source 1..120: mol_type = other DNA
ccttagttctcagcagcaccagaggagtcctgcagaacgtctgaccaccatccctcctgctgcagcccttctgatgcctgaagcagtcagggcttgtctgacctctgcacagaagcttcc

SEQ ID NO: 10097 - DNA, 120 bp, synthetic construct
  source 1..120: mol_type = other DNA
gggtctttatgtgtgcgtggtgtgtctatgtgtctatgtgagtgtgtctgcgggtgttgcttctgtgtgtttatgtctgggtgtttacatgtgtctgtatgtgagtgtctggtcatggca

SEQ ID NO: 10098 - DNA, 120 bp, synthetic construct
  source 1..120: mol_type = other DNA
cacaaggctcttcccgcatggggacgccaacagtggggacatcttgtaaacacattgggctctgttccttgcccagcatctgtgcctggggggtgggaaggaggtgctcctggttacttt

SEQ ID NO: 10099 - DNA, 120 bp, synthetic construct
  source 1..120: mol_type = other DNA
gggacagggtgcacagagccatcctcactccctcatcaggacccagatgaaggctagggccaggatggtgactgcctgagctctgattctgggcatgtccctgctggcttgggaacaaca

SEQ ID NO: 10100 - DNA, 120 bp, synthetic construct
  source 1..120: mol_type = other DNA
agaccccagactcaggtctcacaatttgagtgccaaactcagaacccagaacccagattccaggactagaccccactgtggagacctagacccagatcctggcacccaaaccctgaccaa

SEQ ID NO: 10101 - DNA, 120 bp, synthetic construct
  source 1..120: mol_type = other DNA
cagcaattctgactagagatggcacgaggcaggtacaaggaccagcagaaggagataaatttctacaccatcccatggccctggagcctcagatgaaagtctgactcctaggaggacttc

SEQ ID NO: 10102 - DNA, 120 bp, synthetic construct
  source 1..120: mol_type = other DNA
gggataccggggtctgggatgggaggagggggtgccaatgtgctaatcaaaggaactgagaaaacaaaggcctggggcttgggtcaggaggaatggagcaagatgcagccctgagcccca

SEQ ID NO: 10103 - DNA, 120 bp, synthetic construct
  source 1..120: mol_type = other DNA
ggccaattcagtcaaaaatgcaagtaaatttagcaggagaaaaaaaaacccgtcagtcagacgaggagtctgaattgagtggttgtttgagtggatggaccgactgtctcaggcaaacag

SEQ ID NO: 10104 - DNA, 120 bp, synthetic construct
  source 1..120: mol_type = other DNA
tacctatgggcccctagacactccctactccacctactccacctttgcctagtccctttccaccagtactgggacagcaggaatcacactgaaatgtgtgtgtgcacacgtagcttcctg

SEQ ID NO: 10105 - DNA, 120 bp, synthetic construct
  source 1..120: mol_type = other DNA
ctcgtgggaaaggactctctggaaggctcccgacccattcctttcccagatcttggaccccagtgcaagcagagggaagacaaaagggaaggagagatggttgggagacaggcaagctcc

SEQ ID NO: 10106 - DNA, 120 bp, synthetic construct
  source 1..120: mol_type = other DNA
agggccccaagaccccccccctcagcccacccccaaccagcatgctcgtggcccctgccccacctagaatcattggagatacacctcccaggggcaggaaaacaaggagaaaccatcatt

SEQ ID NO: 10107 - DNA, 120 bp, synthetic construct
  source 1..120: mol_type = other DNA
gagccagctgtgctgagagagggtgctgctgtgaggacaggatgtactggatggccctgagttcagtgctccagtcccttgcctccacagcccccacaccagctcaggaaaggagtgcag

SEQ ID NO: 10108 - DNA, 120 bp, synthetic construct; identical to SEQ ID NO: 2934
  source 1..120: mol_type = other DNA

SEQ ID NO: 10109 - DNA, 120 bp, synthetic construct
  source 1..120: mol_type = other DNA
agaaatcagttttgatggcctcgtggccatggaaggaacccttcaacctccaccacctccctggatttcccaactgctccacaatgtgcatggggcaagaactgttacgacgctgcaaat

SEQ ID NO: 10110 - DNA, 120 bp, synthetic construct
  source 1..120: mol_type = other DNA
tatgtcccctggccagtccattctgctctttggtcccgtttcctccacctggaggccaggtatcaccgagcctgcctccctgactaacttgtgaaacaaaaagtactttggaaactctaa

SEQ ID NO: 10111 - DNA, 120 bp, synthetic construct
  source 1..120: mol_type = other DNA
ttcctgagatgtggaaaggaccagagggttagacagggacacagagactaagagagaggcatggcagggcaaggagaggactattgaggcacacacacgtgtctggcagcctgagtgggc

SEQ ID NO: 10112 - DNA, 120 bp, synthetic construct
  source 1..120: mol_type = other DNA
tagaagccgagagaggtctggggttgagggctgggtggaggcacaacctggggtcagagttcagccaggggctagaaatcagactgggataagaactcagcctgaggctggggctcatga

SEQ ID NO: 10113 - DNA, 120 bp, synthetic construct
  source 1..120: mol_type = other DNA
gtttccaaatctcaagttttccctggtgtcagatctgaaaagaactcctcccctcagcctctagttttatctctcagtccttccaatccctccattaatgttcttttctcatcaccaagg

SEQ ID NO: 10114 - DNA, 120 bp, synthetic construct
  source 1..120: mol_type = other DNA
gaagcagcaaggacaaaggcaggagagtggatgtgtgaagaagaccaggagtctagcagacagttcctgttagggagagtcatttttggaggaaactgtctcaaatagcacagcccttga

SEQ ID NO: 10115 - DNA, 120 bp, synthetic construct
  source 1..120: mol_type = other DNA
cagactcatttcccagggcctcatgcattcgcttcctccgcgatccttaaagccctgcgctccaggcatccccagcccctccctctgcctcagtttccccacttggtaccgggaggtggt

SEQ ID NO: 10116 - DNA, 120 bp, synthetic construct
  source 1..120: mol_type = other DNA
ctcgatgttacagctgcccccgccccgtctccccagcactcacatcccgccgccgtaagactccgggcctcggcctctagcgcaatgtcccggggcggggggcggaaggctcctctcggc

SEQ ID NO: 10117 - DNA, 120 bp, synthetic construct
  source 1..120: mol_type = other DNA
tgcgcttcccgcgggcgcgcggagtgaggacggtgacagccacgcgcgcgcgtacgcgcccgatgcagcgcggccccgtgaccctagtcggccgctgagaggcgcgcggagtctgggccg

SEQ ID NO: 10118 - DNA, 120 bp, synthetic construct
  source 1..120: mol_type = other DNA
agctagagacgggcagaaccggaagggccaactaggcccaaaacctcatgttaaagatgattgctgctttttttcataggacttttgggttttggcatttcctgaaggttattttcattc

SEQ ID NO: 10119 - DNA, 120 bp, synthetic construct
  source 1..120: mol_type = other DNA
ggtttcaccatattgggcaggctgatctcgaactcctgacctcgtgaccagccgacctgggcctcccaaagtggtgggaaagtggtgcgattacagatgtgagccaccccgcccagcctc

SEQ ID NO: 10120 - DNA, 120 bp, synthetic construct
  source 1..120: mol_type = other DNA
atgacatactgaaattactggtgccccaattgctcatcccccagttcttgcaggctgagcctcaggttattgcggtcccctgcctccttccaccaagtgctcagttcctagagtgagggt

SEQ ID NO: 10121 - DNA, 120 bp, synthetic construct
  source 1..120: mol_type = other DNA
tgtcctgtcacaaaacaaaacattgaccacagacctctgaggtggtggatgtccctcctgtcctggttgtatcattatacattgtatattaatgtatcgaaatactacaggtacccccaa

SEQ ID NO: 10122 - DNA, 120 bp, synthetic construct
  source 1..120: mol_type = other DNA
tgagccaagatcgagccactgcacaccagcctgggcaacagagcaagactctgtctcaaaaaaaaaaaaaaaaaaaaaaaaagtacaataacaaatttaaaaattaactagagggactca

SEQ ID NO: 10123 - DNA, 120 bp, synthetic construct
  source 1..120: mol_type = other DNA
gtaaagatattaaattagtaattgaggggactcgtggggtaacttgcccttgggaaccagtagtatggcatcgggctgcaagattggcctgtccatcctcaatgctacctggccaattta

SEQ ID NO: 10124 - DNA, 120 bp, synthetic construct
  source 1..120: mol_type = other DNA
agagagagagagagagagagacctgggcacagtggctgttgcctgtaatctcagcactttgggaggtcaaggcaggaggatcctttgaggccaggagcttgagaccaacctgggcaacat

SEQ ID NO: 10125 - DNA, 120 bp, synthetic construct
  source 1..120: mol_type = other DNA
acagttcttcacaaagtcttcaaaaatgaaaaagaggagaaaatacttacaaacgaattttatgagactggtattaccctgttgccaaaaaccaggaaaagacattacaagaaaagaaaa

SEQ ID NO: 10126 - DNA, 120 bp, synthetic construct
  source 1..120: mol_type = other DNA
gaaagtataaaacttatactctaaaagctgtaaaacatttttggttttgttttttaaattaattttttttgaaacggagtctcactctgtcgtccaggctggaatgcggtggcgcgatct

SEQ ID NO: 10127 - DNA, 120 bp, synthetic construct
  source 1..120: mol_type = other DNA
aataaatagaaaatagctcttgttcatggatcataagacataacgttgtcaaattggcagtattttggaaattgatctacacgtttgacataatccctgtcagaatcccagtttatttca

SEQ ID NO: 10128 - DNA, 120 bp, synthetic construct
  source 1..120: mol_type = other DNA
agaattgagagtccagaaataaacccagtggaatagagttgagagttcatggtcacctgattcttgacaagggtgcaaagaccattcagtgggggagaactgtcttgtcttgtcttttct

SEQ ID NO: 10129 - DNA, 120 bp, synthetic construct
  source 1..120: mol_type = other DNA
tgagcactttaggatgttgaggtggatggatcacttgaggccaggagtttgagaccagtctggccaacatggtgaaaccctgtctatattaaaaatacagaaattaggctgggtgtggtg

SEQ ID NO: 10130 - DNA, 120 bp, synthetic construct
  source 1..120: mol_type = other DNA
agttagctgtgattgtggtgctatactccaggctgggcgacagagtgagacccagtctcaaaaaagataaaaagaaaaacatggtggcagttcctcaaacagttaaacacagagttacca

SEQ ID NO: 10131 - DNA, 120 bp, synthetic construct
  source 1..120: mol_type = other DNA
caaaatgtaaacaatgggcatgactgtgttccaagaaaactttatggacacagaaatttgaatttcacataattttcacaagaaaataaacattaaaaaatgtaacatgctgggcactgt

SEQ ID NO: 10132 - DNA, 120 bp, synthetic construct
  source 1..120: mol_type = other DNA
gatgttggacagtattatcagctagagcaaggtttttcaaccctggcactattgacattttggctggatgattctttgttgtggggagctgtcttgtatgttctaggatgtttagcagga

SEQ ID NO: 10133 - DNA, 120 bp, synthetic construct
  source 1..120: mol_type = other DNA
aatctcctgcactacttgctgcattgctcaattggctggatgctttggaagatttttccacttgaaagatttgttgtttgtcattttgagaaagtgggtgctgagtgtaatttgccagga

SEQ ID NO: 10134 - DNA, 120 bp, synthetic construct
  source 1..120: mol_type = other DNA
ccctaggaccaggcaaaccatccccttcaaggatgtaaactctggagggcagtgtagttgtacagggtaatagttctatactctatattagtgcaacaagaaacttctattcctgtttca

SEQ ID NO: 10135 - DNA, 120 bp, synthetic construct
  source 1..120: mol_type = other DNA
ctgcctggctcggcctcccaaagtgctgggattacaggcatgagccaccgtgcccgacctctcccatgggttttaagtagtgcctatggatggcatgggtgccactactcaggtctagga

SEQ ID NO: 10136 - DNA, 120 bp, synthetic construct
  source 1..120: mol_type = other DNA
ggctgcagtgagctatgttcgtaccactgcatgaagcctgggtgacagagtgagactctgtctcttttatttatttgttttttaaataatagagacagggttggccgggcatggtggctc

SEQ ID NO: 10137 - DNA, 120 bp, synthetic construct
  source 1..120: mol_type = other DNA
gagaatagatgggcacaccctttaacttaatatcgaccagtaaagcctgcagttgcttatttgaacctcacattgaggctgacatgtaagttgagcaaatcttaactcaagcttcagttt

SEQ ID NO: 10138 - DNA, 120 bp, synthetic construct
  source 1..120: mol_type = other DNA
aggaagcgtaaaagagaagtaggagagaaaaagttagaaacctggagagaacttaggtatttggtaaacaggaaaaagaaagtggaaagaagagatcatttgaaggacttcctcaactta

SEQ ID NO: 10139 - DNA, 120 bp, synthetic construct
  source 1..120: mol_type = other DNA
tgcccagctagagatgtgtgtgaattggtagcttcaagctagatattggaggctcatgaagcccaggttaaagaggcttgtattcatcagatgcgatgaagagctttgaagtttttacta

SEQ ID NO: 10140 - DNA, 120 bp, synthetic construct
  source 1..120: mol_type = other DNA
aatattgcttaaagaataagagctacagccctgatggaaggggtaaattggcctgggaaaagccctgcctctgctacctgcttcccaagtgaccttgaacttaactctttaaacctcagt

SEQ ID NO: 10141 - DNA, 120 bp, synthetic construct
  source 1..120: mol_type = other DNA
gatctcggctcactgcaacctccgcctctgcctcccaggtttaagcgattctcctttctcagccttccgagaagctgggactacaggcgtgcgccactaatttttgtatttttaggagag

SEQ ID NO: 10142 - DNA, 120 bp, synthetic construct
  source 1..120: mol_type = other DNA
gttgacacaaggtgcttgtcctagtgcaggaatctgtgtggcaccactaggtggtgccagactgcatcatttttaaagacagccttttctcttccaactcttttgccactgttctctttt

SEQ ID NO: 10143 - DNA, 120 bp, synthetic construct
  source 1..120: mol_type = other DNA
ggaatgcattgttacatactaaccacaatttttacattgtccagggcaggagtaaccagttggttgatacttagtcaggggttgtgtttcgtaatctgctagttgtacttgatgtttagg

SEQ ID NO: 10144 - DNA, 120 bp, synthetic construct
  source 1..120: mol_type = other DNA
gggttcctcccgctcccataactgctctgcacttcagcgggaaagatgccagaaactgcaagcataaggcctttttttcccctaaaaaactgtaattcatttggttttgaaagacttacc

SEQ ID NO: 10145 - DNA, 120 bp, synthetic construct
  source 1..120: mol_type = other DNA
cagtaattaaatagatttggcataataacagagatgattggagaactgggagaagaaaattacttgctgtagttgattatggcagaaactgacagggcaagagattacagttgggatttt

SEQ ID NO: 10146 - DNA, 120 bp, synthetic construct
  source 1..120: mol_type = other DNA
tggcaaatgctagggcagcttgtgagctaattagaagaaactgataagtgaatgctgagtttgtcgattctctttcattttctgcagaggagacagccgttgaaacggcattcttcgtgt

SEQ ID NO: 10147 - DNA, 120 bp, synthetic construct
  source 1..120: mol_type = other DNA
ctgatagcacttagtcctgtttataaagttcatacacatctatccatgatataggcacaagtatatatctatgaaatagcactgcagcctgttaaagtaatgggtgagcacagccacaaa

SEQ ID NO: 10148 - DNA, 120 bp, synthetic construct
  source 1..120: mol_type = other DNA
tgagcacaatgaccaggacgtagtggatgctcaataaaggtttgtcaaatgactgatagtatggttagctcagtgagaattgatggtgccctttgtgatctgtcatccatcatccttggt

SEQ ID NO: 10149 - DNA, 120 bp, synthetic construct
  source 1..120: mol_type = other DNA
ttttgttcttgattttagatggtagtttcggtccttttggaaacatagcattatcctccagccagactgaactatcctactcccatttcctgtaaggacgactgacctcttttttgcctc

SEQ ID NO: 10150 - DNA, 120 bp, synthetic construct
  source 1..120: mol_type = other DNA
aagaagtagaaacccaaattaggaagactgagcaaacctcatgcatttggggaagggcttgttggaaagtggaacctgatgtaggtagcaacatgttgaggttagatttaaccaaacaga

SEQ ID NO: 10151 - DNA, 120 bp, synthetic construct
  source 1..120: mol_type = other DNA
gaataagtgggaggtaacagaggcttaattcacattgagctgtaaacgagcaatatctgactcttctgagaatggattttgtttcaaacactggttacttactggaaaaggtgtctgggg

SEQ ID NO: 10152 - DNA, 120 bp, synthetic construct
  source 1..120: mol_type = other DNA
aatctttatagtgttccagtggccccactatagtcagagaggagacagggcagaagttgaaggacagataggagaaacggccctgctaaaagataaaagccagtatgcatctcagctact

SEQ ID NO: 10153 - DNA, 120 bp, synthetic construct
  source 1..120: mol_type = other DNA
ggtggtttaacttgaaagccactaggtggcaacatttactaagttgccagccattctcttcccttaagacattgaacttgcttttccacatagcagatggaatagctgagaaaagagatt

SEQ ID NO: 10154 - DNA, 120 bp, synthetic construct
  source 1..120: mol_type = other DNA
taaaggaagctttaaaattatttaggaattcagtcctcatcagctgtcttagtgtcatccccacgttttggaacctgagagtggagagtgcagagaaaaggttttattaatgatttttgc

SEQ ID NO: 10155 - DNA, 120 bp, synthetic construct
  source 1..120: mol_type = other DNA
cttactgacctgcctacctagccatgaaaggcaggcggggagcaggaccatatgcttttgtcagtaactcctaaaagacacctgaacttcaaagtaagtcaatgtctaattcttacccca

SEQ ID NO: 10156 - DNA, 120 bp, synthetic construct
  source 1..120: mol_type = other DNA
gccaccacgcccagcgctctaagccgtattctatcacggacctaaatattggcagtaggcaccaagaaaaaagaaataaaggaagattccactacttcagataattaaaaaaccttccac

SEQ ID NO: 10157 - DNA, 120 bp, synthetic construct
  source 1..120: mol_type = other DNA
gcctcagagttgaccacaaacacctttgtattgcaaaaatattctacctctggaaggtcagcccctttggttctgtaatggaaaaaaggcttcagaacagaactatacttgagtgatgaa

SEQ ID NO: 10158 - DNA, 120 bp, synthetic construct
  source 1..120: mol_type = other DNA
ttgtcccaccgaattgaagaaattaagaaattcacaattacaggttgaccatccagaggcacagggaggggaactggtctgaggatgaaaaccttatcagtttcacttatgttcttactg

SEQ ID NO: 10159 - DNA, 120 bp, synthetic construct
  source 1..120: mol_type = other DNA
ctcttgtgtgactgacttgattttccccatactgaaatgttaaggcatttttatgactgagcaaggcaaaatttactgcttttatgaatccggtgactgttgacatctgtgagaggagag

SEQ ID NO: 10160 - DNA, 120 bp, synthetic construct
  source 1..120: mol_type = other DNA
ctttctttgggttttctgtacttcagagagacttgccccagaaagtgagatgttatgggacttgtggacttgaagaaccactgtcactgttccagtgtttgtataatcttgtgtgtgtat

SEQ ID NO: 10161 - DNA, 120 bp, synthetic construct
  source 1..120: mol_type = other DNA
ctggttagctgaaaatcgttcacttccgttaaatcactatagaccttttttttttttttacaagaccgatgagagggttagccacggagtttcatgtccctcagatttttcacttcagtc

SEQ ID NO: 10162 - DNA, 120 bp, synthetic construct
  source 1..120: mol_type = other DNA
ttctcatatggggcggctgcctggcggaggagctcctcacttcacagacggggcggttgccaggcagagggtctcctcacttctcagacggggcggccgggcagagatgctcctcacctc

SEQ ID NO: 10163 - DNA, 120 bp, synthetic construct
  source 1..120: mol_type = other DNA
ctcttaactcactttttggggtagattaatgcaatttcagatcaaagccaggaagtaactgtcatttgtggggaaaaaaggctatacatgctagtcagaccaatagaagcaccaaagtca

SEQ ID NO: 10164 - DNA, 120 bp, synthetic construct
  source 1..120: mol_type = other DNA
agaaagggatttgtgacttgtgcaaactcacaatacttttatgttaagcctatttttatgaaatttttagcccacttctcgatggagaggatttcaggccaaatagaatgagtggagctg

SEQ ID NO: 10165 - DNA, 120 bp, synthetic construct
  source 1..120: mol_type = other DNA
acctgttggattgtatattgaccatttggtgttggaaatgtgttcttattgaaaatgactttgggagagaatggcatataatttatgaatctcatgttgctgtgtgcagactcctagtga

SEQ ID NO: 10166 - DNA, 120 bp, synthetic construct
  source 1..120: mol_type = other DNA
tagtttgtttccactttttccttattatctaaacagtgctcaaatgaagatccttttatgtgattccttatgtacatgtgcaaatgctttttccccttaaggtaggtgcctacgaaaata

SEQ ID NO: 10167 - DNA, 120 bp, synthetic construct
  source 1..120: mol_type = other DNA
atttttgtgttttttgtagagacagggtttccccttgttgcccaggcaggtcccaaactccagggcacaaactctatacccgcctcagcctcccaaagtgcagggattacaggcatgaat

SEQ ID NO: 10168 - DNA, 120 bp, synthetic construct
  source 1..120: mol_type = other DNA
aggttgcagtgagctgagattgcacccctgcactctagcctggggtgacagagtgagactctgtctgaaaaataaaataaaaataaaaaaggagccactggtacaaaaaaaaaaaagaaa

SEQ ID NO: 10169 - DNA, 120 bp, synthetic construct
  source 1..120: mol_type = other DNA
tacaggcatgagccactgcacccaacctgttcatctttttccgattgatttgtagatgctccatgtattatgagttatcaaccttttgtctattttacgtataggactggtcaatctttt

SEQ ID NO: 10170 - DNA, 120 bp, synthetic construct
  source 1..120: mol_type = other DNA
gcatatctgcttgcttttgcattagagcttggtcagcactgttgagagatttgcaaatgcaactaacagggctttcttttagcatcctaccctttcaaaaatccaggaggcaaacaatga

SEQ ID NO: 10171 - DNA, 120 bp, synthetic construct
  source 1..120: mol_type = other DNA
cctcccaaaagtgctgggattacaggtgtgagccaccacgcccagccaagcatagttttaaaaactttgctggtcttatttaattaaatccctgtaagagtcctgcaagataaatactat

SEQ ID NO: 10172 - DNA, 120 bp, synthetic construct
  source 1..120: mol_type = other DNA
ttcatggggcttttacagttaaggtgatatgggaatgagacatgatttaaagttaatgatgaatatcttctttcactcctgtgtctgtagttttaggccgcttcatttggagaacacacc

SEQ ID NO: 10173 - DNA, 120 bp, synthetic construct; identical to SEQ ID NO: 2993
  source 1..120: mol_type = other DNA

SEQ ID NO: 10174 - DNA, 120 bp, synthetic construct
  source 1..120: mol_type = other DNA
agaattactgcttggtacgcagagcaccgaggccgagccaggtgaggcccattcattgttggtttacattcctttatgggcttttttttttttttttgccttaaagaactgcaaaactag

SEQ ID NO: 10175 - DNA, 120 bp, synthetic construct
  source 1..120: mol_type = other DNA
tgcctagcctgaattttaagaattctattgtatggctatcccattgcttttgcatccatccctttattgatggcatttgagtatctgtaggtttttcacttttacaaaaatttctgcagt

SEQ ID NO: 10176 - DNA, 120 bp, synthetic construct
  source 1..120: mol_type = other DNA
aagtgcaacatgcatatggaaaagtagacaaattataagtatacaacttgatcaattattgtaaggtgaaaacaccagaggaagaaataacctgtgtctccctacccccaattccccttt

SEQ ID NO: 10177 - DNA, 120 bp, synthetic construct
  source 1..120: mol_type = other DNA
gctgaaatggaatatctgaagatagctcaggacctggagatgtacggtgtgaactactttgcaatccgggtgtgttgaaacctctctgagctccttgtgtagtagacagagactgagtga

SEQ ID NO: 10178 - DNA, 120 bp, synthetic construct
  source 1..120: mol_type = other DNA
ctgcagatgagtagatgttaaaacaatgaggcgggtccacctttattttcatagtcatgctttgctttcccttattgggttcctacagttgttgtattaaattcaggtaaattgaaacat

SEQ ID NO: 10179 - DNA, 120 bp, synthetic construct
  source 1..120: mol_type = other DNA
cattttccaaaatgtactgcagatgtaaaagtacaaagcctcacttctattaatgcagtagctttcatggctttgctgacgagcagaagagtctctcatggtttggtgatagcacctgac

SEQ ID NO: 10180 - DNA, 120 bp, synthetic construct
  source 1..120: mol_type = other DNA
gggctttaattctatacctatgatagcctgcttatttaaccagagggaacaacacttatgttactcttcctttagccatcgagccagtgacagaagccctcagtgattgttctgggggac

SEQ ID NO: 10181 - DNA, 120 bp, synthetic construct
  source 1..120: mol_type = other DNA
gtgtgcgccacagcacctggcttaaattctcttcgtattttaagtgtggtctttattgagctttctttctgtgtccggtgcttgatacatgtggcagagaaatacatatacacacatata

SEQ ID NO: 10182 - DNA, 120 bp, synthetic construct
  source 1..120: mol_type = other DNA
atttcatgggggaaacaaagatgtagaaaatccagtcttagcattcaaggaagtcaagtaactactcacctgctataataaataagtgccgtggaagagacatgatgacaacaaatgtag

SEQ ID NO: 10183 - DNA, 120 bp, synthetic construct
  source 1..120: mol_type = other DNA
gcaaagccaaaaataagctcacaaaattcatgaatagcagcctacacaagagcaacactgcttctaagttaacttggctgaaagctaaacaaaggatcattttctgtcctcagtgtacta

SEQ ID NO: 10184 - DNA, 120 bp, synthetic construct
  source 1..120: mol_type = other DNA
agctaccctgttggattgttcttctaagatcagcttcactctctcttgcttatggtggatctactctgaacctccacatatttgtgatttgtaccacccagtgaagcactaatatttgat

SEQ ID NO: 10185 - DNA, 120 bp, synthetic construct
  source 1..120: mol_type = other DNA
tcctggttttcattactgataatggtagcttttctgagaattgaatacttctttttaaaggatatcagagtgacatcttgtgaagtatagaatggtatctcacttggcgcatactttctg

SEQ ID NO: 10186 - DNA, 120 bp, synthetic construct
  source 1..120: mol_type = other DNA
atttttttgagatatatctttgttgatgcttaaagatagtctgttcattctcacctctgtagcactctgttatatatttttctgattcttctgttaatggataattaagtgctttttact

SEQ ID NO: 10187 - DNA, 120 bp, synthetic construct
  source 1..120: mol_type = other DNA
attatgacacattgttttctaaagaaggtgaatcgatttttacagacccaacagtagtgggtgaagtttgttttttgctatccttaatacttgtattatcagccttttaaaatttttgcc

SEQ ID NO: 10188 - DNA, 120 bp, synthetic construct
  source 1..120: mol_type = other DNA
accacatcttgatgtaggagagtaaggtgcacccagaagacatggtgaagtgtcctccagtcctctcttgatttatgatttttacctcctggcatatctgaggcgccttcattttgcatg

SEQ ID NO: 10189 - DNA, 120 bp, synthetic construct
  source 1..120: mol_type = other DNA
ctctgctcatggaaatccacacaactaatttgggccttactgctgagaatatcaattgtgtttttggataaactactagatagagtagcagcagctgcagttggctgcccgcaggacttg

SEQ ID NO: 10190 - DNA, 120 bp, synthetic construct
  source 1..120: mol_type = other DNA
taaacttcttttgtgaataggaggtcttttatattggggtagaggtctcagggaaagtacagggccaggaactgaaggagattacctggcttttttttttaataaaagggtcttgttctg

SEQ ID NO: 10191 - DNA, 120 bp, synthetic construct
  source 1..120: mol_type = other DNA
attatttaaggcagaaaatagtgcagtggtcacttctgggttctgctttttgaactcagttagtaccctgggatcacagaggaatggcactgtcttgtgcttgttccccttattaagctc

SEQ ID NO: 10192 - DNA, 120 bp, synthetic construct
  source 1..120: mol_type = other DNA
aaaactctgtcccctccaccaaaaaaaaagaatgcctttttctatccgggtcaagactcaacaggtttttattgtttgttcatttgttcattcaccactagactgtttttcaagtggcac

SEQ ID NO: 10193 - DNA, 120 bp, synthetic construct
  source 1..120: mol_type = other DNA
actactgacatttggggctgaccatcctttgctgtaggaactagatcccagtagcagcacctcaccctccatttgtaacaatccaaaacatcttcagacattgccacatgtctctttttt

SEQ ID NO: 10194 - DNA, 120 bp, synthetic construct
  source 1..120: mol_type = other DNA
cacctgccacatgtctcttgcaggggacaaaaaactcctctggttctaaccactgatttaaagggaaagaacagagtttaagttgtttttctccacgtgaagcataagcctgagctgagg

SEQ ID NO: 10195 - DNA, 120 bp, synthetic construct
  source 1..120: mol_type = other DNA
tggtgctttatccattttggggctggcgctactggttgggcacaggaactcagttccccctccaggggggcctctctggtcatacttgtgtctctttgataagcccctgtccctctgatg

SEQ ID NO: 10196 - DNA, 120 bp, synthetic construct; identical to SEQ ID NO: 3013
  source 1..120: mol_type = other DNA

SEQ ID NO: 10197 - DNA, 120 bp, synthetic construct
  source 1..120: mol_type = other DNA
gaagcctctttccttcctttcttctgtgcattcagtttggcatttttttttttttcatatttgttcagtgtccacatagtgccatgcagttggaagtctctatcctgacaggtgttctca

SEQ ID NO: 10198 - DNA, 120 bp, synthetic construct
  source 1..120: mol_type = other DNA
tttttattttatttattatttttttttttagagagagagagttttatttactctgtcacccaggctggaatgcggtggcagaatctcggctcactgcaaccttagcctcataggctcaag

SEQ ID NO: 10199 - DNA, 120 bp, synthetic construct
  source 1..120: mol_type = other DNA
gaatgtctcaaatgaatgttccaagcctctgctctttcccagacactgtcctagactcaatacgggatccaaggatgaaaaagaggcagattgtttgcaggaaacttgcaaatagtagaa

SEQ ID NO: 10200 - DNA, 120 bp, synthetic construct
  source 1..120: mol_type = other DNA
aagcgagtgggagtttgtgtttgattcagctgagcatgaagaacggttagagatttgagggatgattttcctggatttgtagtctttgatattgtttacctggcagtggcaaatgtggag

SEQ ID NO: 10201 - DNA, 120 bp, synthetic construct
  source 1..120: mol_type = other DNA
ctgctaacttacaaacatcaaaatgacatcaaaggtaggttttcatgttcccattttataagtgagaactcagatttagagagtttagtgaactccaccagcatcccacagctgatgcag

SEQ ID NO: 10202 - DNA, 120 bp, synthetic construct
  source 1..120: mol_type = other DNA
tggagtctcttttataagggcactaatcccattcatgaggctctaccctcatgactgcccaaaggccccacctcctgacactttttttttttttgagatggagtctcactccatcgccca

SEQ ID NO: 10203 - DNA, 120 bp, synthetic construct
  source 1..120: mol_type = other DNA
ctgggttcccaggaagcttgtttcacgtatgttttttttttgtacagaacgaaaagctgtccatgagagctggtatttgtagagccccctatgagaatttaccaagggcttttctactct

SEQ ID NO: 10204 - DNA, 120 bp, synthetic construct
  source 1..120: mol_type = other DNA
ggagctgccttactttatgagaaagcagaatgaaatggaggctattgagaatggactttccctctagtcttgtggtgtctttaagtggcaaggactataaaaccaaactgaatttttaac

SEQ ID NO: 10205 - DNA, 120 bp, synthetic construct
  source 1..120: mol_type = other DNA
ctttcctctggcttctgtaatttactgggcttcccttccaaaacaaaattattaaacagtaaaggggagttcaagggaggcctcggtcattaaggaaagaggtaaaacgatggctgagcc

SEQ ID NO: 10206 - DNA, 120 bp, synthetic construct
  source 1..120: mol_type = other DNA
ctgagtgaattaaccgaatgtttgctgcttttctcctgcaacagttcattattcctccagcatgcctaggcagtggagagaatgtattttgcccaataataaaatgacatcctgcctcta

SEQ ID NO: 10207 - DNA, 120 bp, synthetic construct
  source 1..120: mol_type = other DNA
aggcattctctcagcatcactagattcaataatgctgcactattaaattttgctgcacatgaagttcagtgcatgttccattttctagactttggcagtgcctgtggtcagtgaccggga

SEQ ID NO: 10208 - DNA, 120 bp, synthetic construct
  source 1..120: mol_type = other DNA
atttgtcctcgttttcagtactcttctgcctcactgagaggtctcagagtctgctgtgtggtttcagcagtacccatgggggctgtgtaacattgaagctgattcaaggagtttgccctt

SEQ ID NO: 10209 - DNA, 120 bp, synthetic construct
  source 1..120: mol_type = other DNA
tttttctcctcttgctaatcttaacttcctgtatttccatttttcccaattgatgatcagtacaactagtttgccatttgcatctgagtcagagcagtgctagcgatcaaaagccgccct

SEQ ID NO: 10210 - DNA, 120 bp, synthetic construct
  source 1..120: mol_type = other DNA
ttaagtttaataggtagttaatatagccaaccctccttatgaccccagtgggctgaatggctctgcttgctttaggaactgggcgttgtatggtagagcatcttggccttgacataaaag

SEQ ID NO: 10211 - DNA, 120 bp, synthetic construct
  source 1..120: mol_type = other DNA
cccgaggttctgttctcatgatccttgctgtgatttctcttttgatgttggcaattttaaaatgacatcagtctatctggacctttttcctaaggctcttgctcagaccactcagtagat

SEQ ID NO: 10212 - DNA, 120 bp, synthetic construct
  source 1..120: mol_type = other DNA
aaaaagagaaagtaaagaaaagcttgatctggccacttagtacagccatccccctttactggcccttcctctttgcttatttggaagggggaaggtttcccacaccccaaaccaaagatt

SEQ ID NO: 10213 - DNA, 120 bp, synthetic construct
  source 1..120: mol_type = other DNA
gaacaagatgatcacaatgcagccttgtgaatcaattttctgtctgtgctgatgaaagtgtaattcattcttaatcaagcagccttgctgctgcaggctccgtgccggaatacatttagt

SEQ ID NO: 10214 - DNA, 120 bp, synthetic construct
  source 1..120: mol_type = other DNA
cttgtcttcagaaggattcaaaggcagttgaccagacttggcaagtcccagactggtgcagccactgtcctcgagaccctggttgtacaccctgaggtgcttctgcttcattacctgctg

SEQ ID NO: 10215 - DNA, 120 bp, synthetic construct
  source 1..120: mol_type = other DNA
attttatgaagggctagctttttgccatttcttctgagcttttgccttttcctttatgaatacttcctgcctatgggtgtactgtaaatgtaacagccagtgagctttctagaagcagca

SEQ ID NO: 10216 - DNA, 120 bp, synthetic construct
  source 1..120: mol_type = other DNA
cagggaggggagaaacgtgatgttgctattagcaataacagctgccgagttcccaccatgcgccaggtgcagtgttgagtgcatcacacgcggttcccaattcctctgcctgtcacccca

SEQ ID NO: 10217 - DNA, 120 bp, synthetic construct
  source 1..120: mol_type = other DNA
ttagttatcttcatagcccacgtcctggtcgcttaacaaacattgagctcctgatcggcacataacactaagccagatatttgggggatatgaagatgaatggtacagactccctcccct

SEQ ID NO: 10218 - DNA, 120 bp, synthetic construct
  source 1..120: mol_type = other DNA
atgtgagaatctattaaaataggcagggatctccggtcctctgtcaagaggcaatgctgacggctttttcctgctggcgtgcctctgcccaccagccttccccttgcacatcctcatttg

SEQ ID NO: 10219 - DNA, 120 bp, synthetic construct
  source 1..120: mol_type = other DNA
gactttaggcagaagctgtgatgcaggctgactgccagccgaggggctgggtagtgccgtgcgggagctgatggtacagggcactcgctgtccccctccggccaccctagaccagggtcc

SEQ ID NO: 10220 - DNA, 120 bp, synthetic construct
  source 1..120: mol_type = other DNA
gagatccttccagtttggctgttatgcaaagcaggtgatttgtcttaatcagataaaagatagaggctatgggggcctcaagatttttggagagcagaggtggtctctggcaattccatc

SEQ ID NO: 10221 - DNA, 120 bp, synthetic construct
  source 1..120: mol_type = other DNA
gagatgcctggttttcacagactggttcctgtggctgggatgactgcatccttttttttttttttttgagacggagtttttgcctttgtcgcccaggctggagtgcaatggcgtgatctc

SEQ ID NO: 10222 - DNA, 120 bp, synthetic construct
  source 1..120: mol_type = other DNA
acttcttcctgtagggcccgagtcctgcctcctatcagggccagatcatagaaggctattttctattctggggaacgattataacttaaatgattgttttaataaaaattctaagctgga

SEQ ID NO: 10223 - DNA, 120 bp, synthetic construct
  source 1..120: mol_type = other DNA
cagagacttgggtttgatttaggaatcatggtgatgcataaaactatattctgcagtaaggcctctttctgcagaatgtagtgccacgctctgctttactcttatttgagacagctgcct

SEQ ID NO: 10224 - DNA, 120 bp, synthetic construct
  source 1..120: mol_type = other DNA
aaaagcccagaatgactgtggggtttaccaattagtgccagagttagatcagataacaacctggagaaaagtttaaagaactaggttcaaggcctagcaccacccttgctggctatatga

SEQ ID NO: 10225 - DNA, 120 bp, synthetic construct
  source 1..120: mol_type = other DNA
tttgtatttactaatacactactgtctatatccagtagccagactacatttctgaaaatcctggtgagctatttctcacagtgaatgggggctggcacaaaagtatggctaaatcggccc

SEQ ID NO: 10226 - DNA, 120 bp, synthetic construct
  source 1..120: mol_type = other DNA
acacacgtggacatccagacaacgtgattataagacgttcatgttcttgcatagaggagagaaaccagtgcactttgattattcacaatgtcgaaacttaaaatgaatgccttttaaaaa

SEQ ID NO: 10227 - DNA, 120 bp, synthetic construct
  source 1..120: mol_type = other DNA
gctagccttcatctgaattcttcaattttcagatgagaagtttcacaattttagaatattaatgatctaaggtatcttagaaactactagtcactcagtgctcaataataatgttgtaga

SEQ ID NO: 10228 - DNA, 120 bp, synthetic construct
  source 1..120: mol_type = other DNA
acaattcaaatatttaaaggcactgctcttctcatttcattgcttgtattactttgatcccttccaattgatcaagctggccaatctacctttgcctaatatccttttttaggtacagcc

SEQ ID NO: 10229 - DNA, 120 bp, synthetic construct
  source 1..120: mol_type = other DNA
ccattgatgccagcagtcttacctggctaattcaagcgtggctttatcacccaaaagcaagaaaatgcttgctacagaccagaaaaaaaaaaaggaggcctgtgtcagaactgttttaat

SEQ ID NO: 10230 - DNA, 120 bp, synthetic construct
  source 1..120: mol_type = other DNA
caagaaagaaccaaagtatcagtgtagtccactattactgtacttccatttcagccttcatggtggtatgagcaaacattggccctataaggtatacttgccagttttccaggttttggc

SEQ ID NO: 10231 - DNA, 120 bp, synthetic construct
  source 1..120: mol_type = other DNA
ttttctctcctccgtgcctggcctatgtcttttcttatcatcagaacttggtcaggatgttgaaaatccatcatgacaaatctttcaatattcatcccagaaatctgctgggaattaatt

SEQ ID NO: 10232 - DNA, 120 bp, synthetic construct
  source 1..120: mol_type = other DNA
actgtgcatctgtcattcagtttgcatacagacagcaaagagtatatagctgtgctgcctccttttctcccagtgataaacccatgggcattttacaaaaatggataatgacagtgcagt

SEQ ID NO: 10233 - DNA, 120 bp, synthetic construct
  source 1..120: mol_type = other DNA
tcaaaaatagccaaactcatagattctaatttaaaacatcagacaatactggttgtcagaagttgggagtgggggaaaaggggagtttttctatggatctaaactttcgattattctaga

SEQ ID NO: 10234 - DNA, 120 bp, synthetic construct
  source 1..120: mol_type = other DNA
aaacttgttactttctccagtctgtcttctattggggataataagaactggaagctggagcttttggagtagtaaaaggtaaggtattgttggtcctcctctttcctgtttccttttatg

SEQ ID NO: 10235 - DNA, 120 bp, synthetic construct
  source 1..120: mol_type = other DNA
gccttgcttccaaagttatcaaattgctgactatgatggagatattgggcacagttgtgtaagcattttactaggatttcagtagaaggaagaaaatgaagggctgtctagaaactgctt

SEQ ID NO: 10236 - DNA, 120 bp, synthetic construct
  source 1..120: mol_type = other DNA
tccctactaactagacctctgaagggctcagtctcacaaaatgtctaccaaaaaatatctattcacccactgaacattaaatgaaccaatcaactctgcaagaaacatatgtagtgcaat

SEQ ID NO: 10237 - DNA, 120 bp, synthetic construct
  source 1..120: mol_type = other DNA
ctgttctgatagcagaacaagatggagtctataccaggatggacctgacacttgttagagcaaagaacatggagaacttcccatgaagcaatagggaatgagataaaaaagacctagcat

SEQ ID NO: 10238 - DNA, 120 bp, synthetic construct
  source 1..120: mol_type = other DNA
taagattattatagtaattttctaggtgtgaaatttagaagcagagagtgggtaaataaactgccctaggttgtgtgactagtaagtgacaaagccactcatgtggctatttcaagcaaa

SEQ ID NO: 10239 - DNA, 120 bp, synthetic construct
  source 1..120: mol_type = other DNA
acaaaataaagtgcagctgaagggccgtgaccttctcactctaaaaaactttaccggagaagaaattaaatatatgctatggctatcagcagatctgaaatttaggataaaacagaaagg

SEQ ID NO: 10240 - DNA, 120 bp, synthetic construct
  source 1..120: mol_type = other DNA
aggagaattgcttgaacccaggaggcggaggttgcagtgagccaagatcgtgccattgctgtccagcctgggcaataagagtgaaactccatctgcaaaaaaagaagatgatcctttttt

SEQ ID NO: 10241 - DNA, 120 bp, synthetic construct
  source 1..120: mol_type = other DNA
gcctctctagtagctgggattataggcacccaccaccactccaggctaatttttttttttttttttggtattttgagtagagatggggttttgccatgttggccaggctggtctcgaact

SEQ ID NO: 10242 - DNA, 120 bp, synthetic construct
  source 1..120: mol_type = other DNA
tatggggatctggtccttggtcattagaacatcatcatcaaatatccatgctaggttctgttgggacttctatattcccattggatcttggctgtctcccacttactgcaaggtttgctt

SEQ ID NO: 10243 - DNA, 120 bp, synthetic construct
  source 1..120: mol_type = other DNA
ttgcctcttttctttctctctgcatttctgctctaccagacctcacttgaatcaataatatgactgcccaaatgagcaatcagacagggtcaaggaggaagtaccgcaaacaaaaacata

SEQ ID NO: 10244 - DNA, 120 bp, synthetic construct
  source 1..120: mol_type = other DNA
cattcaggaaaacaggctgaaatggggccagcaaatggctcaaaggcacgtacctaataaatggcagacccaggattggaagctattactatatatatttttaaatacctaatttaataa

SEQ ID NO: 10245 - DNA, 120 bp, synthetic construct
  source 1..120: mol_type = other DNA
aaaagtgcacaaatcattaagcgtatagatcgatgaattcttacagtgagcaaaccattgtaactaacacccagatagagaaacagaatggtagtagcacccagaagcttcccactaccc

SEQ ID NO: 10246 - DNA, 120 bp, synthetic construct
  source 1..120: mol_type = other DNA
agaagaagaaattaacagaagaaacgctatgttcaaaaatagctgatgtgaaagcataaacaaatgaaacaggtaaaagcaggcttctctggataaagggtggagaaagagtggaagccc

SEQ ID NO: 10247 - DNA, 120 bp, synthetic construct
  source 1..120: mol_type = other DNA
ccttcatggggcttacattctagtgggtacacagacaataaacaacagacataataaataagtggatgatacagtatgttggaagatgataagtactctcagcaaggagaagaatgtgtc

SEQ ID NO: 10248 - DNA, 120 bp, synthetic construct
  source 1..120: mol_type = other DNA
tagaaaatgaagatcaactttgttgaatactgctaagtgaaggaagagggctcagaaatggccactagatggagtaacgtgaaggtcactgataactttggtgagaggagttttggtgca

SEQ ID NO: 10249 - DNA, 120 bp, synthetic construct
  source 1..120: mol_type = other DNA
caaagaaacattagacttaatctgcactgtagaccaagtggacataatagatatttacagaacatttcacccaacaggtgcagagtacacattcttttccttagcacatggaacattatc

SEQ ID NO: 10250 - DNA, 120 bp, synthetic construct
  source 1..120: mol_type = other DNA
cctgctacagatgtccaattaaaatgtaagtcaaatcatgtccctcctctgctccaagccttaaaaggcttcccattttatccagacaaaagtcaaagttgttgccttctccccagcttc

SEQ ID NO: 10251 - DNA, 120 bp, synthetic construct
  source 1..120: mol_type = other DNA
gatatgaaaaagtttattactcacatcatgtggctttctggggatagtaggtctggtttccaagcaggtctgaaagtagccccagagagcagagaaacgatatggagttctagtgtgatt

SEQ ID NO: 10252 - DNA, 120 bp, synthetic construct
  source 1..120: mol_type = other DNA
gaagagtcattgctagggtcagaacatggtggtctctagttaaagaccatttggtctaggcatatttaagagaacacttttgagtataaaataggtagactataattatttaattttata

SEQ ID NO: 10253 - DNA, 120 bp, synthetic construct
  source 1..120: mol_type = other DNA
tgtgtatttgcctttatgtattggagaaattctgagcattaaaccagtctcaaatgagacagtaaagttctgattggatgtcaccatctcccataattttccccagaatgtgtgatgaaa

SEQ ID NO: 10254 - DNA, 120 bp, synthetic construct
  source 1..120: mol_type = other DNA
tgcacttctgggaggacatccttgttttcttaccacacaagatattcatttgggtgtgaatgaaagtctcacggacacggcccggtttgtaaatattttcttctctccaaagctgatttc

SEQ ID NO: 10255 - DNA, 120 bp, synthetic construct
  source 1..120: mol_type = other DNA
tgaagcataggcctcctgactcctcatgcaatgctcataccactacatcatgtctggctaaaaaatccagagcaaatgtctttgttaaaagttttgccctcaaaagagaagactaatgat

SEQ ID NO: 10256 - DNA, 120 bp, synthetic construct
  source 1..120: mol_type = other DNA
gaagctgactaagtcagggtttaaatcaagctgtctttattttctaaggccgtgttgttttgattaccccataatgctgcttctattcagcccacgagaggggcagcgaaacaagttata

SEQ ID NO: 10257 - DNA, 120 bp, synthetic construct
  source 1..120: mol_type = other DNA
cattggagataaagaccttgagtgaagttgagagctgaagaaatataaatataagctcggtggtaaaaattacctccatggtctcaatgtgggagaattgcagaaggctgtgccatgaga

SEQ ID NO: 10258 - DNA, 120 bp, synthetic construct
  source 1..120: mol_type = other DNA
acaagtttcttgttagagtggaaattgcattctggagcgaggaggcttttgctaaacaaatgaacaaagcatgaatagaagagcaggttgaaataagtgctatgatgaagctaaagccgg

SEQ ID NO: 10259 - DNA, 120 bp, synthetic construct
  source 1..120: mol_type = other DNA
ctgaggcaggagaattgcttgagcccaggaggcagaggttgcagtgagcccagatcctgccactgcactccagcctgggcaacagagcaaggctctgttaaaaaaaaaggccgatgcagt

SEQ ID NO: 10260 - DNA, 120 bp, synthetic construct
  source 1..120: mol_type = other DNA
ttttggacattaaccccttgtgagacacaggtgtgcaaatattttctcccattccataggttgccttttcactctgttgattgtttcttttgctatgcagaagctttttagatctcattt

SEQ ID NO: 10261 - DNA, 120 bp, synthetic construct
  source 1..120: mol_type = other DNA
tcttctgaattttgctcaatttcttttacctagatgtactgtaactggtaagggagtgtatgttatatccatgggaagacagccttaagatttgagttgttttcttgcttcagcatggat

SEQ ID NO: 10262 - DNA, 120 bp, synthetic construct
  source 1..120: mol_type = other DNA
ttggcattccttggcatcaccccaaactctgcctccatctttgcctgggcttctctgtgtatcttctcctcttcttataagaatatctgtcattgaatttaggacctaccctactccata

SEQ ID NO: 10263 - DNA, 120 bp, synthetic construct
  source 1..120: mol_type = other DNA
tatatttttgggaaaaatgattacaaaagacagtctctcacaccatgaacaatgatatattctcttagaggcagtgtaccagagcgtcaaggacaggggcttcaaagcagagtcacagtt

SEQ ID NO: 10264 - DNA, 120 bp, synthetic construct
  source 1..120: mol_type = other DNA
agttgtcagtgaaagaaactggagtttagagggcatgcagtctgattcaaacaaggcaggatggagacaaaagagaaaatggataacaggaccctatgagaatacaacctctgtttgcct

SEQ ID NO: 10265 - DNA, 120 bp, synthetic construct
  source 1..120: mol_type = other DNA
gttccaggctcatcttgtacatttctttattaagaccaagaattagccattgctctaagaagacttggggcattttcaattactttcaaagtcacacttgggagaaatttcctttcttga

SEQ ID NO: 10266 - DNA, 120 bp, synthetic construct
  source 1..120: mol_type = other DNA
aataatatgaactaattgtctagttaagtgtctttaatatctttgttcccctaagtgagtccaacatgaaagcaacctaggagctgctccctctccacccccatatcattggattccacc

SEQ ID NO: 10267 - DNA, 120 bp, synthetic construct
  source 1..120: mol_type = other DNA
ttgctggattgttgggaattctacaagagactctttatactttctcagggtttatgtaatttttccagactggaaagaacaaacatatcacctcgggaagtcagggatacaggttaagtg

SEQ ID NO: 10268 - DNA, 120 bp, synthetic construct
  source 1..120: mol_type = other DNA
aggagatttcattcttttacaatgctgttagaaaaaaggagagtctgtcttatataactttctatagatgatggaaacttgcccttcaatttagccttttaacttgcttctctacatcca

SEQ ID NO: 10269 - DNA, 120 bp, synthetic construct
  source 1..120: mol_type = other DNA
tggaaataggtaaatgtcagttcatagtaactttgtatggaaaggcatgtgccagctagcataaaagtggtacatgcagatggtagttttccagagtcctgggagccatgaggtgctcaa

SEQ ID NO: 10270 - DNA, 120 bp, synthetic construct
  source 1..120: mol_type = other DNA
ttgtttttaatctctggcagcacatgactcattgcaatatttaataatatattaacctggcctggtttcaatatttaaaaacattcatctttcttattggcattgtgttgtaattaatta

SEQ ID NO: 10271 - DNA, 120 bp, synthetic construct
  source 1..120: mol_type = other DNA
tttattactacaaatgatcacaacttgaaaaatgggagctcctttaagctgactgtttttctttcagcagtgcctctgccatttaaaaaacaaatcactcttgtttcctggcaagaacaa

SEQ ID NO: 10272 - DNA, 120 bp, synthetic construct
  source 1..120: mol_type = other DNA
ggctatgagattccagaaggtcaactgcagtgttaatccagactttttttatttgtctgtacacactttagggagtgctacatgtttaaagaagtctgaagtatgacctctaggattaaa

SEQ ID NO: 10273 - DNA, 120 bp, synthetic construct
  source 1..120: mol_type = other DNA
gctctcagatgatgctgatgttgctactctgaggggcaaggtgctagctttggttctcaactttggcagcacgttacaatatagtaagaatatttttaaaaataatgatccctaggtccc

SEQ ID NO: 10274 - DNA, 120 bp, synthetic construct
  source 1..120: mol_type = other DNA
gttcaaagcagtggtttacaaatctctatccccactgaccctggtgtggagaagcttccatcagaagtggtagaataagaaaaataaggataagaattatatagtaaatttcataaagct

SEQ ID NO: 10275 - DNA, 120 bp, synthetic construct
  source 1..120: mol_type = other DNA
gcgatctgtgtgtgcacttccatggctgccacactgggacttgcaattccacagtgaaaatgtatcttttttctgttggatgatgtgaaagaaaattagccatatggcaggtcattaatg

SEQ ID NO: 10276 - DNA, 120 bp, synthetic construct
  source 1..120: mol_type = other DNA
acacaatgaatgaatagagaacactggagcatacaaaatggacaagccatatgtgattctatagacatcaggtctgtggcttgggagtgaagactggtggagtgtgctttgaatattcaa

SEQ ID NO: 10277 - DNA, 120 bp, synthetic construct
  source 1..120: mol_type = other DNA
aacatgatgttgatactttataattctttgctgtttttcaataaaacattaaagatagagttgaagcccaccatgtaactctgcctaatcttattttcttcctttccacaaatatgttat

SEQ ID NO: 10278 - DNA, 120 bp, synthetic construct
  source 1..120: mol_type = other DNA
gaaactttttgccttgaaactaacccctctcttaaatcatcctcagatgcaattacccagtgacaaaaaaagctctcttccatttaagtatagcacaggtgaggccacagaatttaggtt

SEQ ID NO: 10279 - DNA, 120 bp, synthetic construct
  source 1..120: mol_type = other DNA
ggacactttattttgaccatacagtcatgtgtggcttcataacagggatatgttctgagaaatgggtccttcgatgactttgttgttgtgggaacatcataccgtgtacttacacaaacg

SEQ ID NO: 10280 - DNA, 120 bp, synthetic construct
  source 1..120: mol_type = other DNA
agtttctgggtgggagtgaattttgaagaacactattcaaccaagtacacctgccatagaaaaaatgtactgcatgcagtggaagtcatcctattatagtaaatttgagggactcagaga

SEQ ID NO: 10281 - DNA, 120 bp, synthetic construct
  source 1..120: mol_type = other DNA
ctagtgagtgatttagtattgaaagctgagatgtgagtaaagaattcctctctgtattctaagtcatgcctcagtgcatgcaaggttgggtgattttctaatttccagacctctctgttg

SEQ ID NO: 10282 - DNA, 120 bp, synthetic construct
  source 1..120: mol_type = other DNA
ttattcctggagggggatctcgggagcataccacagcgttcaccacaatgcttcagtgaaaagtgataaaaatcaactcataatcaatgctaagaacttgggaaaatgagaaggatagag

SEQ ID NO: 10283 - DNA, 120 bp, synthetic construct
  source 1..120: mol_type = other DNA
tttgccctaggcacctcgcttgcctctccagagtctgactctgccctcaccaaaccatcccggacaaatatataatcttagcaaaaacaatgtatttgttctgtcaatgcctttcaaaac

SEQ ID NO: 10284 - DNA, 120 bp, synthetic construct
  source 1..120: mol_type = other DNA
gcggctccaggctttccaaggttaccaggttacaatgaaggtacaaattgatgcctctctgaaggttcattaattccattcatgaaggccagaaccatctaatcacttattcactttagg

SEQ ID NO: 10285 - DNA, 120 bp, synthetic construct
  source 1..120: mol_type = other DNA
gactattcctagaggtagcctctgtttaataatttgatgtgtctctttgcagaccttttctgtgcatttacatatgtatgcctcaatacacacataactattgatttttttgtaaatgat

SEQ ID NO: 10286 - DNA, 120 bp, synthetic construct
  source 1..120: mol_type = other DNA
tgctggtgctggaactgtaggattgaagaacagtcattttgttgatgtatggcatttataaatgttacttttttccatgtaattttgctggtattttagaaactcaaaatgtcctgaacc

SEQ ID NO: 10287 - DNA, 120 bp, synthetic construct
  source 1..120: mol_type = other DNA
tctcctcgatcactagtgttcccagaggcagaaaacagaaagtggacaatcatggtaagcaagaaacaaggaatggaggataagttctttgtgtggttccaacttggtcattcatgcctt

SEQ ID NO: 10288 - DNA, 120 bp, synthetic construct
  source 1..120: mol_type = other DNA
cacctgctctggaaaatagtactgacatgtctaacttagctccaccatttttttagcttttagtgacttaactggtctcaattactgtatcagccaggatcttacttgcaaacgggagtc

SEQ ID NO: 10289 - DNA, 120 bp, synthetic construct
  source 1..120: mol_type = other DNA
tgttatctaggccagtacttctgaagccttaatgtgcatttaaattacctagggggtcttgttaaggtgcagatttgaattctgtaggtctaagatggagcttgagatttggcacatcta

SEQ ID NO: 10290 - DNA, 120 bp, synthetic construct
  source 1..120: mol_type = other DNA
aaagtagaaagaatgctcacctgggagtgatgagacttgacttctgtaactggccttaatactagtcagctgtgccatcttagcgtctaagtattaactctctaggtcccagtgtcctct

SEQ ID NO: 10291 - DNA, 120 bp, synthetic construct
  source 1..120: mol_type = other DNA
cagcactgccgtgatacatttttctaagatgttctaatacttgtcttcctccagactaccctatccaatacagtagccagtaggcacatatggctttttaaatttaaatctaagctaatt

SEQ ID NO: 10292 - DNA, 120 bp, synthetic construct
  source 1..120: mol_type = other DNA
tagatgttttccctctgcctataaattttacactggagctaaaataacctaaagggaccctgaaaaaaagaaaaaatgctgacacttcaaagcactgttatccacatatgactcttaagt

SEQ ID NO: 10293 - DNA, 120 bp, synthetic construct
  source 1..120: mol_type = other DNA
aaaatgaggataaaaaatagaaccaacctcttaaggttatgaggattcaatgagatcagagtcatgtgagcattgtagtcaggacccagggacaggtaggtgcagatccacctctcacca

SEQ ID NO: 10294 - DNA, 120 bp, synthetic construct
  source 1..120: mol_type = other DNA
tagttgtttgagttccttatatattttggatattaatcccttaacagatgtatggtttacaaatattttgtcccattctgtggattgtctcttcactttattaattgtttcttttgctgt

SEQ ID NO: 10295 - DNA, 120 bp, synthetic construct
  source 1..120: mol_type = other DNA
tttatctatgtgggttctttgtggttccctacaaacttaaggattgtatttttgatttatgtgaaaaatgacattggaattttgataggggttgcattgaatctgtagatcactttgggt

SEQ ID NO: 10296 - DNA, 120 bp, synthetic construct
  source 1..120: mol_type = other DNA
tcaaggggaagcggtatactcttggctatagagataatactctttcaggaatacccagcttcagagagcagacattgctcagattactctacatctgattcatcctaaacttctctaggc

SEQ ID NO: 10297 - DNA, 120 bp, synthetic construct
  source 1..120: mol_type = other DNA
acgtggtatgggtgaaccgtatgatatgctttgccattgtgaaactttccttaagcctttaatttaagtgctgatgcactgtaatacgtgcttaactttgcttaaactctctaattccca

SEQ ID NO: 10298 - DNA, 120 bp, synthetic construct
  source 1..120: mol_type = other DNA
ttatgtacacctttaaaagcacatgtacaaatgtgggaaattacaaaaatcaacctaaaaccctttttctcaaagtatacataaatgtacatccaagatcagtggtgctaccatcattag

SEQ ID NO: 10299 - DNA, 120 bp, synthetic construct
  source 1..120: mol_type = other DNA
cctctatctcaggcagtgtgcacacacatacgggatctgttccatctttatgacatatatgtttttatcttcattgcacttttcactatttgagattaccctgtttccatattcagtggg

SEQ ID NO: 10300 - DNA, 120 bp, synthetic construct
  source 1..120: mol_type = other DNA
aaaattagctattattattattcactgctgtatcactggtgcctgaggcatggccagctctccaaagagtattatatgaatgaactgcatgatactttttatccctggttcccacccaac

SEQ ID NO: 10301 - DNA, 120 bp, synthetic construct
  source 1..120: mol_type = other DNA
aatctgttgaaacctaatcaccaatgtgatggtattaggaggtggggcttttgagaagtgattggtggttttgtaaaacaggccccagaaagctgccttctaccatgtgaggacacatct

SEQ ID NO: 10302 - DNA, 120 bp, synthetic construct
  source 1..120: mol_type = other DNA
gcagaagtgtcacagctagctaagtgcatagggatagagaatgtcttttagaacatgcacttatcaaataaactttgcataaggtccaaaaaaacatgtattgtaactgtgtgcattatc

SEQ ID NO: 10303 - DNA, 120 bp, synthetic construct
  source 1..120: mol_type = other DNA
tatttaccttaggggaaaaaacagggcttgaataaacactattaaaaacctatataaccccatactagtagagatcaggatgcagggaatctggggtttgactcaagtccactaatcttc

SEQ ID NO: 10304 - DNA, 120 bp, synthetic construct
  source 1..120: mol_type = other DNA
tccttccccttagatagtactacatttcatgccattcatttggggaaatattggcaaagagagaatgaggacacacatgtgcagggagtgctcaaattagaaatattcatttgtaaattg

SEQ ID NO: 10305 - DNA, 120 bp, synthetic construct
  source 1..120: mol_type = other DNA
tttatatttagaaaacaactgaggtaactcaggaggccgaggcagtaggatagcttgagacaagcctgggaaacacagctgaagacctcatcatctaaaaaaattaaattaaaatttagc

SEQ ID NO: 10306 - DNA, 120 bp, synthetic construct
  source 1..120: mol_type = other DNA
tagaacacagctacatctatccatttgcatacagtctatggctgatttggggccacaatggcagagttgagtatgtaaaacagagattgtaaggccagcacagctgaaagtatttgccgt

SEQ ID NO: 10307 - DNA, 120 bp, synthetic construct
  source 1..120: mol_type = other DNA
ctatctatctatctatctatctatctatctatctatctatctatcaatctatctattcgttgttgttgttgttcttttgttttgagacagagtcttcctctgtcgcccaggctagagtgc

SEQ ID NO: 10308 - DNA, 120 bp, synthetic construct
  source 1..120: mol_type = other DNA
tggattatataacatcacacaacttttaaattcaattccacagatcctactaggctagggaaagatgcggtctttgtgttcagagcctctggatgctgatcctctcactgtaatcaccag

SEQ ID NO: 10309 - DNA, 120 bp, synthetic construct
  source 1..120: mol_type = other DNA
aacatttcaagtcctttcttctagctactttgaaatatatagcacattgttgctaactacagtcattctactctgctactgaatattggagcttatttctaactgtatgtttgtacccac

SEQ ID NO: 10310 - DNA, 120 bp, synthetic construct
  source 1..120: mol_type = other DNA
tgatagttcagccttagattaaatctacaatgcccctagggataaatctctccaaattccatgaggaaggttccatcatctcattcaacctggtattgaaatcaggcacatggtatagca

SEQ ID NO: 10311 - DNA, 120 bp, synthetic construct
  source 1..120: mol_type = other DNA
cacctgacctgctccccagctttattgaggatttgtgacattgataactgctttgtcatgatactctatttttttgtttttggagcttagggtctcgctccattgcccaagctggagtgt

SEQ ID NO: 10312 - DNA, 120 bp, synthetic construct
  source 1..120: mol_type = other DNA
cccctccaagctgcatgaactcacttgagactacagcagtccacagtcatctcctctcctttaattttgtccatatacctcatttggtatgcaatatactactggcaatactgtatcatg

SEQ ID NO: 10313 - DNA, 120 bp, synthetic construct
  source 1..120: mol_type = other DNA
taagaaatatttagaccttcagcatagtttccaaaaaaagccacttgacacttgagtataacatgaatcacttgagacatctaacaaatcaggagttaaataagaacaaatactacatgt

SEQ ID NO: 10314 - DNA, 120 bp, synthetic construct
  source 1..120: mol_type = other DNA
aaaaacaaccaaggcagtatgaattcggagaaggaaacatcaatgaaggctggaatagtacaacagaactcaaggtaactgtgggggtgaaaatatcccctaaggggaacttagaagcca

SEQ ID NO: 10315 - DNA, 120 bp, synthetic construct
  source 1..120: mol_type = other DNA
ggtcttctggcagatcagaacatagtcaaatttcagaggctttctggtgggaagggcacaacgtttctctcaagggccatacttttctagtttattcctagaaggttagggttgtaagtc

SEQ ID NO: 10316 - DNA, 120 bp, synthetic construct
  source 1..120: mol_type = other DNA
ttaggttcctctgacaaacactgatgttttttctttttaaaaatattttttaaaaaggaattttaacatttactgaatacctcctatgtgccagacaatatggtaagtacttttaaaata

SEQ ID NO: 10317 - DNA, 120 bp, synthetic construct
  source 1..120: mol_type = other DNA
aggcgggcagttcacttgaggccaggagttcaagaccaacctagccaacatggcaaaatcccttctctactaaaaaatacaaaaattagccaggcacggtggctcactcctgtaatccct

SEQ ID NO: 10318 - DNA, 120 bp, synthetic construct
  source 1..120: mol_type = other DNA
tctataaaccttttgtttctttctgcattcctatctcaatgaattgcatcaccatctaatgtccaagtttcagggttggtcaccactcaagtgaccacctagactggggggaaggagaca

SEQ ID NO: 10319 - DNA, 120 bp, synthetic construct
  source 1..120: mol_type = other DNA
tgtgcccagcagaggtatttctaacatttaagggacacacagatttcaagaagactgaagaacaaactacatttgctgagcctctcaccttctttgacttcatccctgacatgtctggct

SEQ ID NO: 10320 - DNA, 120 bp, synthetic construct
  source 1..120: mol_type = other DNA
agtagctgggattataggcacccgcaggtgctatacaccaggctaatttttgtattttcagtagagacacagtttcaccatgttggccaggctggtctcaaactcctgacctcagttgat

SEQ ID NO: 10321 - DNA, 120 bp, synthetic construct
  source 1..120: mol_type = other DNA
taacaataggggaataattgggtatattttggcatgtgaatgtaaagaatatttatgcagccatttaaaagtatatctatgttcactgaacaaatatttattgggcacctctgtgtaaag

SEQ ID NO: 10322 - DNA, 120 bp, synthetic construct
  source 1..120: mol_type = other DNA
cggatggcttaagcccaggagttcaagaccagcccaggcgacatggcaaaaccctgtctgcataaaaaatataggccaggtgtggtagctcacacctgtaatcccagcactttgcgaggc

SEQ ID NO: 10323 - DNA, 120 bp, synthetic construct
  source 1..120: mol_type = other DNA
atggcactcacatctacggaacaggaacctgaaggattctgacacaatggcaacagttctgttaaagtggcactcgagtgctgttttatgcaaagcataagtatgcaaagtgatgaatta

SEQ ID NO: 10324 - DNA, 120 bp, synthetic construct
  source 1..120: mol_type = other DNA
aaaccacaggtttcaatgttattcctcggagggagtaacattgaaacaacatacattatactatctactattatgaccatgggagcactatgtatcaaaccacagagcgtggccaaagca

SEQ ID NO: 10325 - DNA, 120 bp, synthetic construct
  source 1..120: mol_type = other DNA
aataagttattaaaattgactcaagaataaattccgaaacagagcataggtattactatgcatcctttatagaaaaggaatctggggctcagaggttacacaatttgtccaaggtgacat

SEQ ID NO: 10326 - DNA, 120 bp, synthetic construct
  source 1..120: mol_type = other DNA
tcatatgtaagacacgagacactggaagagaatattcttctgacctttaactctgaaaccaattgtaggttgcctgggtttatgctatcagaagcaggaagctctgctgtttcagtctgt

SEQ ID NO: 10327 - DNA, 120 bp, synthetic construct
  source 1..120: mol_type = other DNA
taaagtaatatggatgaagaaaggcccgtctttgtatgctggctttgcgagtttggccttttgggatgtgattttcctggtagaacaataaggtcctcttctaagtcctccatttctgta

SEQ ID NO: 10328 - DNA, 120 bp, synthetic construct
  source 1..120: mol_type = other DNA
tttcccatccatgactcagaaacttgggcgaagggttcaaacaacggtcatgagttagttgattaattagcagctatttttctgcactacccaaaacagtgtattgctagccaggtatgg

SEQ ID NO: 10329 - DNA, 120 bp, synthetic construct
  source 1..120: mol_type = other DNA
tacattctttcctacctctaaaactgtgatttcaacaggctgccagagtatgttctacaaaatgctggctcttctcactatggaaaacttagtccccttttgaagcaaagagtaatttac

SEQ ID NO: 10330 - DNA, 120 bp, synthetic construct
  source 1..120: mol_type = other DNA
cactgtaaatgtattgacttgttcacttaatttaaaatggttaattttgttacgtgaatgtcaccttgagaaaaaaagtttttaaatgtagctgcagtttactacaattatagcagacta

SEQ ID NO: 10331 - DNA, 120 bp, synthetic construct
  source 1..120: mol_type = other DNA
accacaggcatataccaccacacctggctaatttttctatatttttttttgtagagatggggtttcatcattttacccaagctggtctcaaactcctgggctcaagcaatcctcccacct

SEQ ID NO: 10332 - DNA, 120 bp, synthetic construct
  source 1..120: mol_type = other DNA
gaggaacatttgagcccaggagatagaggctgcaccacggcactccagcctggacaacagtgagcccctgtctctttatttttatttatttatttatttatttatttatttatttattta

SEQ ID NO: 10333 - DNA, 120 bp, synthetic construct
  source 1..120: mol_type = other DNA
agagaacatgaaatatttgcctctaaattagaacttgtgggcagttggccacttttacttatagctttatttacaaggaggttatctgtagagacagtcatttttttgccttgtgcctcc

SEQ ID NO: 10334 - DNA, 120 bp, synthetic construct
  source 1..120: mol_type = other DNA
agaaagaatcagtgacatttcattcaggcagatgaatttacaggtgaaataaacctattttttaggctgtgagtagtaaggtcactgttacctttaggaggaatgtgttcaaggtgttga

SEQ ID NO: 10335 - DNA, 120 bp, synthetic construct
  source 1..120: mol_type = other DNA
gggaaaaagagcaagagagggaaaaagaataaacagtctaactgaaaatagagactatagattttacggcatatgaattttatgttaattagaatatattgcagccgggcacagtggctc

SEQ ID NO: 10336 - DNA, 120 bp, synthetic construct
  source 1..120: mol_type = other DNA
tctgaccatttcaggatctttgcataacctgttcctatcatctggaacatgtccttcctttgccaattcctactgattcctcaaaccttagcttagatttttatttccctgggatagact

SEQ ID NO: 10337 - DNA, 120 bp, synthetic construct
  source 1..120: mol_type = other DNA
cccaacacttggggaagctgaggtgggtggatcatttgaggtcaagagttcgagacccgcctggccaacatggtgaaatcctgcttctactaaagatacaaaaatgagccgggtgtggtg

SEQ ID NO: 10338 - DNA, 120 bp, synthetic construct
  source 1..120: mol_type = other DNA
gatctttctcacctccaccagaaggtaagccaggataagaataacatcagcacaagctggaaacatcctaaaagtctatcagtaaagtacagtctaaagaagcaagggcacttccaaggc

SEQ ID NO: 10339 - DNA, 120 bp, synthetic construct
  source 1..120: mol_type = other DNA
tcctcacagctgaggggcttcccgggaggctcgtccatcgggcaggcgacagaacgaaaagagcagccgtcgccgaccccaggcctgccgacaccgggacccagttggccctgggccggg

SEQ ID NO: 10340 - DNA, 120 bp, synthetic construct
  source 1..120: mol_type = other DNA
gttccgttaatgtttaatcagataggatcgtccgatggggctctggtggcgtgatctgcgcgccccaggcgtcaagcacccacaccctagaaggtttccgcagcgacgtcgaggcgctca

SEQ ID NO: 10341 - DNA, 120 bp, synthetic construct
  source 1..120: mol_type = other DNA
ggtgaaggagtgaatgcctggaacgtactgggaactgcaccaggcacagagaaagcgggcttgccattatagtgggttccgatttggtttggaaaacatgggcagcggagggtggagggc

SEQ ID NO: 10342 - DNA, 120 bp, synthetic construct
  source 1..120: mol_type = other DNA
tgttgaccatgagtgaacttacaatgcaagccccggggggatcacttgcagttttgtccctgtctgcagtgtgacctgttggtgacattgtctttgctccaaaccacagctcctggggca

SEQ ID NO: 10343 - DNA, 120 bp, synthetic construct
  source 1..120: mol_type = other DNA
gatgggtctttgaagcattagtaggagttcagcgatgatggtgtcatgagaattttattctaggattaggaggtaccatgaacaaagatacagagctgggaaaaccagaggtggaagata

SEQ ID NO: 10344 - DNA, 120 bp, synthetic construct
  source 1..120: mol_type = other DNA
ttttgctgcatagattacagtatgcagctccagattcttccaagcagactctgattgcccattactgcctttctaaaatccaaacaagttctgaggttcaaaaccgttttggccctaagg

SEQ ID NO: 10345 - DNA, 120 bp, synthetic construct
  source 1..120: mol_type = other DNA
ggtacagaggaaaacctgttgtcgagtgtggcccgtagttcccatttttgcctgaatggcacatttgaaagtgttatataaccatgtgaataataatagttggcctatatgagttcttta

SEQ ID NO: 10346 - DNA, 120 bp, synthetic construct
  source 1..120: mol_type = other DNA
gtaccaagcacagtaactactggctttctgtatagaattccctttaagcctggccatgccccagtggtacgtctatcttcatttgaaagacgaggagactgaagttcagaggggaccaca

SEQ ID NO: 10347 - DNA, 120 bp, synthetic construct
  source 1..120: mol_type = other DNA
tcctctatctgtaaaccagttataataattggaacattcatttaaggactaaatgaggtcgtgaagcattcagcagatgctaggtacggaaactcgctgaagtgggggcaggttaagaag

SEQ ID NO: 10348 - DNA, 120 bp, synthetic construct
  source 1..120: mol_type = other DNA
tggtgctgcagtttgcactgagcaggctggagaaggctggagaatagactaggggacaaaccgaattgccagtgctgttatgtcatgatttaggcatggagtccagggcctgagcttcac

SEQ ID NO: 10349 - DNA, 120 bp, synthetic construct
  source 1..120: mol_type = other DNA
cacctggcctgaggagagaatgaagggttctagttggactgtgttaagtttgaggtgcccatggtgtgaggtctggagctcagcgcagagatgatgcaatgtggtgggtccatgcaacat

SEQ ID NO: 10350 - DNA, 120 bp, synthetic construct
  source 1..120: mol_type = other DNA
ttcattgtctcataaggacacttgtcattggatttagggcccactggatcctccaggatgatctcatgtggggaaccttaaccacatctgcaaggaccctttttccaaataaggtcacag

SEQ ID NO: 10351 - DNA, 120 bp, synthetic construct
  source 1..120: mol_type = other DNA
ggggatacaaatgtgaatgaaatgaatgtggtctcttcccccaacagtgtatccagaagattaatccattccttaaacaaatgctacttgacacagattagttctggataggctgagagc

SEQ ID NO: 10352 - DNA, 120 bp, synthetic construct
  source 1..120: mol_type = other DNA
gcacgggtgggaccagaaaggactctcacctgggctaactcagctgcagcctcagttccctcctcacacacgacgaggaacatggactggaagcctgcccagcaggccttctgctcgatg

SEQ ID NO: 10353 - DNA, 120 bp, synthetic construct
  source 1..120: mol_type = other DNA
ggcatcatctggattatgcggtgggctgtaagtcctgtgatgtgtctttatgagagaaaggcagagggagatttgacacacacaggaggggccacgtggagacagaggtggagattggag

SEQ ID NO: 10354 - DNA, 120 bp, synthetic construct
  source 1..120: mol_type = other DNA
ccctttccttgtctatgaaatacattatagaataggatgtagtgtgtgaggattttttggaggttaaacgagtgaatatatttaaggcgctttcaccagtgcctgggatgtgctctgtag

SEQ ID NO: 10355 - DNA, 120 bp, synthetic construct
  source 1..120: mol_type = other DNA
ccacagttccacactgctccccttttaaaatccggtgatgtctttatgtcttttgttatgttatcttcaatgtggagggactcgaggtgatctaagcaaactttttctatcttctgcttg

SEQ ID NO: 10356 - DNA, 120 bp, synthetic construct
  source 1..120: mol_type = other DNA
gcacggggcaggggctcaacagtcactattgccttccttgccactgccatttcctcctctgtaagcaggtgattgtgtgtccagtctgagcacagagataagcacacagcaggtgcttaa

SEQ ID NO: 10357 - DNA, 120 bp, synthetic construct
  source 1..120: mol_type = other DNA
gctcacaggctggcagagggttagaactgttactggtggctgggtgcagtggctcacgcctgtaatcttagcactttgggagggcaaggcgggaggatcatgaggtcaggacatcgagac

SEQ ID NO: 10358 - DNA, 120 bp, synthetic construct
  source 1..120: mol_type = other DNA
tggcaattcctgcagaatttgatgttgcaatactgagtcctaaggcagtcctggggcagaattccttcttccctgggaggcctcagtctgttctcttaaggccttcaactgattaaatga

SEQ ID NO: 10359 - DNA, 120 bp, synthetic construct
  source 1..120: mol_type = other DNA
acaacttgagcaaggctaatgtgaatgggagcggttgagggctcagacctctcacccgaggaacatccacagagtgtgccgcatgcccggtgcagtgtggctgcggggacacagacacgg

SEQ ID NO: 10360 - DNA, 120 bp, synthetic construct
  source 1..120: mol_type = other DNA
gttcacctggccgataagacagcaactaccaaggcttagaggtgtgagaggaggctgtcttacctcactgagtaaggactgcaggcggcttaccttcgagaagagagcttagtgtctgtg

SEQ ID NO: 10361 - DNA, 120 bp, synthetic construct
  source 1..120: mol_type = other DNA
ctccagctcttctgtaagcttacagggctggccagaccaggagtggggcactcctcacttcacgcggctgggggctgctggagagagccacagcgggaagggtttcctagaggctgcagg

SEQ ID NO: 10362 - DNA, 120 bp, synthetic construct
  source 1..120: mol_type = other DNA
agttgatcctgtctagtccctttctgtgttttcaaagcccattctaaagcagattcccatttccgtctttgactctaaggcccaagggggcaagctggtctgccgggcccacaacgcttt

SEQ ID NO: 10363 - DNA, 120 bp, synthetic construct
  source 1..120: mol_type = other DNA
ccctttggaagtgctcagccgatgagctcacaggcacatgtcagtttgaagtcatggaatctgactccatgaagcgcacctcaaagagcaccattttgcagctaagggaactgcaggctg

SEQ ID NO: 10364 - DNA, 120 bp, synthetic construct
  source 1..120: mol_type = other DNA
tctttgagttgtttctaggtttcctagctcttgcctcagaccttaaagagagagggtctgatggggatgggcactggagacggagcatcccagcatttcacatctgagctggctttcctc

SEQ ID NO: 10365 - DNA, 120 bp, synthetic construct
  source 1..120: mol_type = other DNA
agacatgctgttctccctcctggagcatctattttagtggaggaagacagaaaacaaaccattaatatagagtactgaaaagatgcgatggagaaaactatagcaaggaagggaatgggg

SEQ ID NO: 10366 - DNA, 120 bp, synthetic construct
  source 1..120: mol_type = other DNA
tgcggggtgggagatacacggttgtgtcccaaatgggctctgagccagcgagggccgtctgcactttggcctcacagaaggatgtcggagggagaaatgaagtgtgggtgggggtcccgg

SEQ ID NO: 10367 - DNA, 120 bp, synthetic construct
  source 1..120: mol_type = other DNA
gcaggaactgagccagaaacgcagattgggctggctctgaagccaagcctcttcttacttcacccggctgggctcctcatttttacgggtaacagtgaggctgggaaggggaacacagac

SEQ ID NO: 10368 - DNA, 120 bp, synthetic construct
  source 1..120: mol_type = other DNA
taatgccttaaaaaacacaaaaagttctgaacacacatttattatctggaggaataaatgcactccaaatgcttatcatcagaactctggaaaaagacatataaattctctccagtattt

SEQ ID NO: 10369 - DNA, 120 bp, synthetic construct
  source 1..120: mol_type = other DNA
ataaagatagagtccattctttcactagtccagggcagtggccaaaaaagtccaggaaaggcattacatagaatgccatcgtttagaagagatttggatttaacggcgttgttataggta

SEQ ID NO: 10370 - DNA, 120 bp, synthetic construct
  source 1..120: mol_type = other DNA
atctactggtggcaaacttgcaaaggtcttctggaagactcataaaattatgttctatttgttttctggattcaggggaccacggaaatagagaaggatagaaacaaggcatgcttttga

SEQ ID NO: 10371 - DNA, 120 bp, synthetic construct
  source 1..120: mol_type = other DNA
gagccgagatcacgccactgcactccagcctggtgacaaagctagactccatctcaaaataataataataataataaacaaacaagtaatttatacagaaaaatccctgatatttataag

SEQ ID NO: 10372 - DNA, 120 bp, synthetic construct; identical to SEQ ID NO: 3175
  source 1..120: mol_type = other DNA

SEQ ID NO: 10373 - DNA, 120 bp, synthetic construct
  source 1..120: mol_type = other DNA
ggtggggctgtagtagaggtaacatgtacatccctgtacagccaagcacacatttcttcagtacaggtgaagtcatctgctttgtaactcattaaaactaggctatcatagccatttctt

SEQ ID NO: 10374 - DNA, 120 bp, synthetic construct
  source 1..120: mol_type = other DNA
gcacttgcctattcagaggactcctgctttgcctacattctgctgttattaaatcacagctgtggctttgggaaactaattcattaggccaatacaatgctggaatgcacaaccaagaga

SEQ ID NO: 10375 - DNA, 120 bp, synthetic construct
  source 1..120: mol_type = other DNA
acagagatctttatgacagtactacatgtaactgaaaaactaaaaagcctgaatatccttataataggactatgattaactaaaacacacctgcaaagactattattcatcacaaaacct

SEQ ID NO: 10376 - DNA, 120 bp, synthetic construct
  source 1..120: mol_type = other DNA
ccagcactttagaaggccgagacaggaggatcacttgagcccaggagtttgagaccagtctggaaaatataatgagaccccgtctctattttaaaaagtaaaattaaatagtaaataaat

SEQ ID NO: 10377 - DNA, 120 bp, synthetic construct
  source 1..120: mol_type = other DNA
tttgacaaagcaaacaaaaacattaagtggggaaaggccaccctattcaacatattcaacaaatgatgctgggataattggcaagccacatgtaaaagaataaagctggatcctcatctc

SEQ ID NO: 10378 - DNA, 120 bp, synthetic construct
  source 1..120: mol_type = other DNA
atggaatactactcagccattaaaaagaaagacataatggcctttgcggcaaattggatggaattagagaccactattctaagtgaaataactcaggaatggaaaaccaaatattggatg

SEQ ID NO: 10379 - DNA, 120 bp, synthetic construct
  source 1..120: mol_type = other DNA
atctaaagccagagtgctgtagtttcagtcctggttctgctactttacagctctatggcctgagcaagctacttaatgtctctatttgtttttccctaagttgcaatgtgggataataat

SEQ ID NO: 10380 - DNA, 120 bp, synthetic construct
  source 1..120: mol_type = other DNA
ttttcatttgggaaaagaacaaaaaagggaaaggataatacactgccattgaagttcagcacaaaagaccatggggagagcattttaataattctgagagtgcctatggcgaggtctctt

SEQ ID NO: 10381 - DNA, 120 bp, synthetic construct
  source 1..120: mol_type = other DNA
aaggcaggccggtttatcacctactccttactcccatttccagtgcatctttgtgaacgggaggtgatacagacaacatttcattgcattgtatcttcagcatgtacatattacacatag

SEQ ID NO: 10382 - DNA, 120 bp, synthetic construct
  source 1..120: mol_type = other DNA
ttcccttttccttttcttgtactacccttttcacttttagaatcaaggttatactaacatcattaagttagttgggtagtatttaatctttttctatctcctttagctatttgtgtaata

SEQ ID NO: 10383 - DNA, 120 bp, synthetic construct
  source 1..120: mol_type = other DNA
gaatacctgtctcagctgttagacagcaacagacaacggcaggctttccgtctctaccatgctgtgttttgatggaaaggtaactgtccactgtattttttgttttcaggtgagaagaaa

SEQ ID NO: 10384 - DNA, 120 bp, synthetic construct
  source 1..120: mol_type = other DNA
gttttgatttgcatttttctaatgatcagtgatgttgagctttttttcacgtttgttaaccacatgtacgtcttcttttgagaagagtctgttcatgtcctttgtccactttttaatggg

SEQ ID NO: 10385 - DNA, 120 bp, synthetic construct
  source 1..120: mol_type = other DNA
acacaatcagttagggaggagtccctctttttcaattttttggaacagtttcagtagaaatggtacctacccgctctttgtacctctggcagaattcagctgtaaatctgtctggtcctg

SEQ ID NO: 10386 - DNA, 120 bp, synthetic construct
  source 1..120: mol_type = other DNA
ttttttggtggagagttctgtagatatctatcaggtccgcttgatccagagctgagttaactcttcttgttgaattgaaccctttaccattatataatgcccttctttgtctttttttga

SEQ ID NO: 10387 - DNA, 120 bp, synthetic construct
  source 1..120: mol_type = other DNA
tctcatgggcttacctttgtaggtgacctggcctttctctctggctgcccttaacacttattctttcattttgacctggaatctgataagtatgtgtcttggataatcttctcatggagt

SEQ ID NO: 10388 - DNA, 120 bp, synthetic construct
  source 1..120: mol_type = other DNA
gtgaagcagcaaagatggcagcctgctccttcctctggacactccatcccagggtgggtactgacctgctgctggcccaaatgctcgtttcagaggtttctggagacccttattgaaagg

SEQ ID NO: 10389 - DNA, 120 bp, synthetic construct
  source 1..120: mol_type = other DNA
tataaatagacatgagttgttctgttatgaatgcctgctgctctagttcttcaataagcccatcacacaattttaccctgtcatctacaggcactttttctgcagtgttaacaatatcac

SEQ ID NO: 10390 - DNA, 120 bp, synthetic construct; identical to SEQ ID NO: 3192
  source 1..120: mol_type = other DNA

SEQ ID NO: 10391 - DNA, 120 bp, synthetic construct
  source 1..120: mol_type = other DNA
atctgcaggccattttgtcattttcaacaatatctttacaccacacagcaaagagagtaagcaaccaaacacagttgagtcatgcatgcaggtcttggctccatgtggggcattgtggga

SEQ ID NO: 10392 - DNA, 120 bp, synthetic construct
  source 1..120: mol_type = other DNA
aaactcatcactatttccatacaaatgacttgccaattgactttctgtaacccacttataagtttggatgtatattcagtcaaatccatgttaacttgatcgcagtccttgcatttgtta

SEQ ID NO: 10393 - DNA, 120 bp, synthetic construct
  source 1..120: mol_type = other DNA
cctggtggtcaaggctgcagtgagccatgattataccactgcactccagcctgggtgacaaagcaagacctcatcttgggaaaaaaaaaaaataaggaggaagaaaacatgtaattgtta

SEQ ID NO: 10394 - DNA, 120 bp, synthetic construct
  source 1..120: mol_type = other DNA
ttcattccttacacctcaagttatcaattctctcctgtcttaaatttcttatttagactatggtgcatgaaccatcacattaaatattatctttccaggctgggcactatggctcaagcc

SEQ ID NO: 10395 - DNA, 120 bp, synthetic construct
  source 1..120: mol_type = other DNA
atggtaccttccacatgataggtcctatacaaatgtttactgacctgaattgtacaaataatatgctatcaagtttccctgaagatttatcatctcagaaggtacttgaaaacaagatgg

SEQ ID NO: 10396 - DNA, 120 bp, synthetic construct
  source 1..120: mol_type = other DNA
ttttcatggctgcatatcattgcagggtgcatatgtaccacattttctttatccaatccaccacggatgggcaccctggtggattccatgactttgctattgtgaatagcatggtgatga

SEQ ID NO: 10397 - DNA, 120 bp, synthetic construct
  source 1..120: mol_type = other DNA
actgttagctatttcaatgttatctttcgtctattaagtctcttgtccatttatttttctactgggctgtccatgtcttgtttatgtattgttacctcaactcttctatattttctggat

SEQ ID NO: 10398 - DNA, 120 bp, synthetic construct
  source 1..120: mol_type = other DNA
cagcctggctgacatggtgaaacccgtctctactataaatacagaaattagttgggagtggtggcacatgcctgtaatcccaactactcaagaggctgaggcacgagaattacttgaacc

SEQ ID NO: 10399 - DNA, 120 bp, synthetic construct
  source 1..120: mol_type = other DNA
tgggtatgaatcagtatcagtttagtgtaagcttccatttagggatggcctattaggccccttaggtatgacttgggctctttatggacctggtaccttaaatttttcctagtactttaa

SEQ ID NO: 10400 - DNA, 120 bp, synthetic construct
  source 1..120: mol_type = other DNA
tgtgtcattaagggctccctggtagttcccagtttctttctcaatgtacattttgcagaaagccaaacagatgaaagtttggttgcattcttaaccacaatgctaaggtaagagaaatat

SEQ ID NO: 10401 - DNA, 120 bp, synthetic construct
  source 1..120: mol_type = other DNA
ccgtgagacatattctccaacttcttaacaacactattgggaaaatggtagtttgtttcttgtgggggacacattgggctgataaaacgtgagcctgaaataattcatggctgtctttgt

SEQ ID NO: 10402 - DNA, 120 bp, synthetic construct
  source 1..120: mol_type = other DNA
gcccataatgattatttcttcctaataacactccacacccctaacttgatatttctcccagtgagagaaaattcagagaattaagcataggtcattctagaatggttttcaggctgctgt

SEQ ID NO: 10403 - DNA, 120 bp, synthetic construct
  source 1..120: mol_type = other DNA
ccgtggcctgagaaaacaggacaagaatattgatcgtatacatatagatatccttgcaggtgtgatatcacaggacacaggctttagctcttacaaggtttaccagatgcaactgggtgt

SEQ ID NO: 10404 - DNA, 120 bp, synthetic construct
  source 1..120: mol_type = other DNA
tttgggaatgaaaaaagagatacattaaaattcattgctgaccatgtagcatttgggctcctttcaaatatccacatagtgtggttagacagacagacattggagcctggaaaatagaaa

SEQ ID NO: 10405 - DNA, 120 bp, synthetic construct
  source 1..120: mol_type = other DNA
cttaatcttcactccattttgagtgtggatatgaggcaaatgtttttgcaactagaacaagagcaaatggcacattagacattataatatactggatgccaagtcccaatttgccccatg

SEQ ID NO: 10406 - DNA, 120 bp, synthetic construct
  source 1..120: mol_type = other DNA
ctggcccagatcagtttcttttactggtaggtagaatatccagaatatgttcaggactttttctttataatgtgttagtgtcattctgaacatcaaaaagaactgcaactttgagacatt

SEQ ID NO: 10407 - DNA, 120 bp, synthetic construct
  source 1..120: mol_type = other DNA
atctataggttgaactctggaaactgacaaaacccgactgttttaaccctcaaaaatggcaatttcatgattcaacgtgacagttgaggagataacatacctaaaactaagaatatacta

SEQ ID NO: 10408 - DNA, 120 bp, synthetic construct
  source 1..120: mol_type = other DNA
tgctttgacaaatcaaaaagtctttcttcctggctaagcccactacataccttgcagatggatgacttagctttgtttaactccggggtgtttatttcgggttagaatggtaagtcaagt

SEQ ID NO: 10409 - DNA, 120 bp, synthetic construct
  source 1..120: mol_type = other DNA
ttgtaatgggggaagaaatagaatctggacctctgtgtgtctctgaaatggtcacggagcttcacatatttagggggattcaggtgttttatcagaaagcaaatctgtgacttttcactc

SEQ ID NO: 10410 - DNA, 120 bp, synthetic construct
  source 1..120: mol_type = other DNA
gttagtttccaggacatgagaatggccgggaacaataacgtctgagtgcatcttttcaagacacttcaccaccatacaaaataaataactttaggaggcagaaatttttttttgttttgt

SEQ ID NO: 10411 - DNA, 120 bp, synthetic construct
  source 1..120: mol_type = other DNA
accactgtacctggcctgggaccagtcttgaagttctaatcagcactctgagatagtgatcacctcaatggttttaaaaaattatgcacgcatcaccaacaagtatagacttcctaatac

SEQ ID NO: 10412 - DNA, 120 bp, synthetic construct
  source 1..120: mol_type = other DNA
aaaaaaaaaaaaaaaatcctttagctctgctttcctgcattttcaggttttccaaaagcattctgaatagttaattcagccagtaatcatctggctggtaggctacattaatttcctctc

SEQ ID NO: 10413 - DNA, 120 bp, synthetic construct
  source 1..120: mol_type = other DNA
catgtactcttaaaaacactgggttcaggaagaacatgggtgaccaggcaagcatagccatatttgttttgattttatttgtttgctttaacaacttaagaactgttgagagatttcaaa

SEQ ID NO: 10414 - DNA, 120 bp, synthetic construct; identical to SEQ ID NO: 3214
  source 1..120: mol_type = other DNA

SEQ ID NO: 10415 - DNA, 120 bp, synthetic construct
  source 1..120: mol_type = other DNA
gaaacaagactgatagttatagcctttctttccaaaggtatggtttgcttcctctgacaactccccactccagctagatttccagtgtaagagacaatgaaaatttcttttaagaattta

SEQ ID NO: 10416 - DNA, 120 bp, synthetic construct
  source 1..120: mol_type = other DNA
agctgtcattctcaaatttctgatagctggttctacaattgcggaagagtcttggggacttaatttcttcacctgaagaatgaggccactaacagaagctccctagatgtgtttgttttt

SEQ ID NO: 10417 - DNA, 120 bp, synthetic construct
  source 1..120: mol_type = other DNA
gaagaagaaaacatgctgaagtttccttatactgtccaagaaaacaaaggaattgtttcttctttgaaaaggaatgttttagagaaatatgcctgtaccttagttatctagattgtgatg

SEQ ID NO: 10418 - DNA, 120 bp, synthetic construct
  source 1..120: mol_type = other DNA
aagacaaatgatccgatacatcctcaaggtggtggacctgacagtgctagtcttttttgaaggataagttatgcatgttctcttagatgagtgatctcaccatagaagcttcagatgggc

SEQ ID NO: 10419 - DNA, 120 bp, synthetic construct
  source 1..120: mol_type = other DNA
gacatgtgacaaatactaatgtatctagcatactgactaagaccttcgaatttgaagacaagcttccggcatttgagtttcaactctgtctactactagccatatgactttaggaaaatc

SEQ ID NO: 10420 - DNA, 120 bp, synthetic construct
  source 1..120: mol_type = other DNA
agctaaacactgggtacaaatagacacaaagatgggaacaataaacactggggatttcaaaagcagggagggacagagcaggaaaaagggttgaaaatccatctattgggtactaagttc

SEQ ID NO: 10421 - DNA, 120 bp, synthetic construct
  source 1..120: mol_type = other DNA
tattgatatgaaagtactatgacatctaaggaaaagcaagcactttggtgggtgtgaagtatatctgtgggaaaaaaggtggtaatgaaggttgtggatagactgaaaaaggctgtgtat

SEQ ID NO: 10422 - DNA, 120 bp, synthetic construct
  source 1..120: mol_type = other DNA
ctggacctgtggccagctttgagaactgctgctctaacacatttcattgtagctgtcttctagttcacttgcttatctgtgtcccctgctccactaaacatttcttacggatattcttgt

SEQ ID NO: 10423 - DNA, 120 bp, synthetic construct; identical to SEQ ID NO: 3222
  source 1..120: mol_type = other DNA

SEQ ID NO: 10424 - DNA, 120 bp, synthetic construct
  source 1..120: mol_type = other DNA
aatttattctggctacctcatgtatccttattttatagtttggcagtgaaggagagacaacagcatcttccctattggccaacttgcatggcctaagtactgctcaaagattagtaccct

SEQ ID NO: 10425 - DNA, 120 bp, synthetic construct
  source 1..120: mol_type = other DNA
attatctttcataccgtaatgggttacactaactcactaatgcccaggaaaaggagaagaggggcagaaagagaagggatgactcttccctttctaccctatccttctcactgcccaggc

SEQ ID NO: 10426 - DNA, 120 bp, synthetic construct
  source 1..120: mol_type = other DNA
tcctcctgcttctccttaagaggccctggaagagggacagataaaactcagaaggtggttgaaaacaatttaaagacaagtctgaggctgagttttggttactaagctacaaaagcaagt

SEQ ID NO: 10427 - DNA, 120 bp, synthetic construct
  source 1..120: mol_type = other DNA
agtagatgagggcttttaccctgaaattaaagtgttagactagatgagcagtttccaaatgagcccagtgacaaaacagactcacagtcttgggccatgccccaaatttgctgagccaga

SEQ ID NO: 10428 - DNA, 120 bp, synthetic construct; identical to SEQ ID NO: 3227
  source 1..120: mol_type = other DNA

SEQ ID NO: 10429 - DNA, 120 bp, synthetic construct
  source 1..120: mol_type = other DNA
gaggagtgaggaagagctctctgatcagaggagtctcaaagacaagccccttctcaaagactatacaaatgagtcatcacgtgcctcaaaagtaggtggggtgacagcaaaacactcaga

SEQ ID NO: 10430 - DNA, 120 bp, synthetic construct
  source 1..120: mol_type = other DNA
cttccatttatcaactctatagatgatctaatgatgcctgaatggtttcacatggcatcaacatcacagaatgttctctgacgttagtctcctattgcctatgcaggagaagaggaagcg

SEQ ID NO: 10431 - DNA, 120 bp, synthetic construct
  source 1..120: mol_type = other DNA
actgcactccagcctgggcaacagagcaagactctgtctcaaaaagaaaaagagaatagagagagtagcatggtacctcacatagttttataacattaaaatatatcagaatttaaaatg

SEQ ID NO: 10432 - DNA, 120 bp, synthetic construct
  source 1..120: mol_type = other DNA
tagctgagactacaggcacacaccactaacacacctggctaattctttatttttcatagagacagggtcccactatgttggccaggctggtctcgaactcctgggctcaagcaatcctcc

SEQ ID NO: 10433 - DNA, 120 bp, synthetic construct
  source 1..120: mol_type = other DNA
gggacacctaggataacagtgaaatcctacacgttcttaaactacaaagtgggctgttagtgaatttaagcagaattttcattgcagtgagtcttgtcaaattgttttaaagacatttag

SEQ ID NO: 10434 - DNA, 120 bp, synthetic construct
  source 1..120: mol_type = other DNA
agcttgaggatgccacgaagctggttaacctggggaagaagcagatgcatatttctaatattaattttgatgtggcatcaaggcattcaatgtaatacaaacagatgaagtttactgatg

SEQ ID NO: 10435 - DNA, 120 bp, synthetic construct
  source 1..120: mol_type = other DNA
cgtaagaaagcgcatgctattagagaaagggcacaaccaggaatgggaaacaaattgatctaagaaggggccaaataatcctaatctaagcagggagattttctgttttagtcggaaaat

SEQ ID NO: 10436 - DNA, 120 bp, synthetic construct
  source 1..120: mol_type = other DNA
tcaagtaaatctggtccaacagattatttcatcacttcatctattcctattacaggctaagtatcccttatctgaaaatctgaaatctgaaatacttcaaaatctgaaactttttgaatg

SEQ ID NO: 10437 - DNA, 120 bp, synthetic construct
  source 1..120: mol_type = other DNA
aataagttaaactacagaaagaaaggccttgactggcaaaatagcactgtgggatatatacccgtgtcttctgggtacgatctgttattctgctactgtggcacagtgcctgtttttagg

SEQ ID NO: 10438 - DNA, 120 bp, synthetic construct
  source 1..120: mol_type = other DNA
aatgtcacctcctctatgaaatgtcactcctttctctgctttccctcccattagaattaatcactccctgtaaactggcataatctttcaggaaggcaagtggcaatatgtgtcaaaact

SEQ ID NO: 10439 - DNA, 120 bp, synthetic construct
  source 1..120: mol_type = other DNA
tttctatgttttcaaataatgagcctgtatttatttcgatttaaaaatcgaaataaaaatttttttttgtggggacaaagaaagctacatatgcaatttgattgaagatatgtaagtata

SEQ ID NO: 10440 - DNA, 120 bp, synthetic construct
  source 1..120: mol_type = other DNA
ccttgtggcaggcagtgcaccattatctgactgcattctcaggacaactcttggtaggagaactatttctactttataggtaagaaagctgaagctcagagaagtaaaatatcttgccca

SEQ ID NO: 10441 - DNA, 120 bp, synthetic construct
  source 1..120: mol_type = other DNA
agtaatttaagagatagtagaaatctagcccaacttgggaaacagaataaaaattccagtaatttgtactacaaaatcgaagcatacgtaatgatgcccagtttttaaaaactgggaata

SEQ ID NO: 10442 - DNA, 120 bp, synthetic construct
  source 1..120: mol_type = other DNA
actgtaagtcattaagaaagagatatatcttagtagaaaaaatacacaatggattaaaaatgacaattcactgaagaaatacaaagtcaaaaaccacaccaaaaggtgctcaacttcatg

SEQ ID NO: 10443 - DNA, 120 bp, synthetic construct
  source 1..120: mol_type = other DNA
gaagtacactggcatgatcttggctcactgcaacctctgccccctgggttcaagctatcctcctgcttctgccttctgagtagctgggactacaggtgcatgccaccatgccagttaatt

SEQ ID NO: 10444 - DNA, 120 bp, synthetic construct
  source 1..120: mol_type = other DNA
tagatagagttctcagaagtgtcttgccttaagaagcagggattaattatctctagaataaatgctgctctggttccacttaacaaatcttaaaagtagaatttgagggcaaggagaggg

SEQ ID NO: 10445 - DNA, 120 bp, synthetic construct
  source 1..120: mol_type = other DNA
aattcacaaatctatgaagctcagtgaactcccaagcacaaaaaactaagagaaactacactaaagcacatgtgaccaaactgatcaacaccagtaagaaagagaaaatcttaaaagcag

SEQ ID NO: 10446 - DNA, 120 bp, synthetic construct
  source 1..120: mol_type = other DNA
agaaaattcttcagatcatctgggcacggtggctcacacctctaatccctgcactttgggaggtagatcacttcaggaggacccaagtggatcactttgagaggcgggtggatcccttga

SEQ ID NO: 10447 - DNA, 120 bp, synthetic construct
  source 1..120: mol_type = other DNA
actcccttgaaagacacaaattaccaaagctcactaaaaaagccactgatagtctaaacagccccacagcagttcaagaaactgaatttgcagctaagaaccttctcacacataaaaatc

SEQ ID NO: 10448 - DNA, 120 bp, synthetic construct
  source 1..120: mol_type = other DNA
gttaagatgtcaattctctccatattgatctacagattcagtgcaatctctaacaaaatcccagcaattattttttaagaaattgacaagctgattctaaacttcaaatggaactgctga

SEQ ID NO: 10449 - DNA, 120 bp, synthetic construct
  source 1..120: mol_type = other DNA
acctcgactccactaaaaaaaaaatacaaaaattagccatgtatggtgacacatgcctataatcccagctacttgggaggctgaggcaggagaatagcttgaacccgggaggcagaggct

SEQ ID NO: 10450 - DNA, 120 bp, synthetic construct
  source 1..120: mol_type = other DNA
cacttgagcccgagaggtggaggttgcaatgagccaaaattgtgccactgcactccagcctgggcaacagaggcagatcctttctcaaaaaaaaaaaaaaaaaaaaaaaaaaaaaagttc

SEQ ID NO: 10451 - DNA, 120 bp, synthetic construct
  source 1..120: mol_type = other DNA
cagatcactggttgttttgggaggctgttcgtaggttgagggctggagggattatatggattacacaggggcacaagaaaacgctggaggtaatggatatatttgttatcttgattgtga

SEQ ID NO: 10452 - DNA, 120 bp, synthetic construct
  source 1..120: mol_type = other DNA
atcactgaatgaaaaaaagttgcaaaacccttgcctctggggatggttctaaatggagaggttggggagacaggaaaagaagagggaaatttgtgtagtgacttactttctacatttccg

SEQ ID NO: 10453 - DNA, 120 bp, synthetic construct
  source 1..120: mol_type = other DNA
tcttcagccaaaagaaaaatcagcacccaagatcacaaggcagagggactactggatagaaattcttcagctttgatcagatagaagacattggacgatgtcattcgattgaattatacc

SEQ ID NO: 10454 - DNA, 120 bp, synthetic construct
  source 1..120: mol_type = other DNA
gttatacctgattcattccaggtaacattccagacacattcattccagacactggagacatcctgagaaggagttttccaatatctactagcaagcatagtgagtaaatactcttttcta

SEQ ID NO: 10455 - DNA, 120 bp, synthetic construct
  source 1..120: mol_type = other DNA
gcgatttcactttatcactaaaaaaattcctaaactaagtgaagacttcctcagcaaggtttactacagctgtcagggggtcaactttctgtttgactatctatcaagtccaactccata

SEQ ID NO: 10456 - DNA, 120 bp, synthetic construct
  source 1..120: mol_type = other DNA
tcatttctgtgaaatcttttctgtaccccatcccctagaacagctagagctattctttcctctattctcctatagcattcccccgttccaactccttttctctgtcttcctccctccttc

SEQ ID NO: 10457 - DNA, 120 bp, synthetic construct
  source 1..120: mol_type = other DNA
tctgaaggcaaagcaaacataaaatgatgaatggatagctcctacaagtattgtcagacgctcagtaaatgcaaatccccacaaatattttaaagtaggatgaaagcaatgctttggaaa

SEQ ID NO: 10458 - DNA, 120 bp, synthetic construct; identical to SEQ ID NO: 3255
  source 1..120: mol_type = other DNA

SEQ ID NO: 10459 - DNA, 120 bp, synthetic construct
  source 1..120: mol_type = other DNA
ctatcttcctcattacacaaaatacgtctggctccctctccttttcacagagagccaaattttcctttcataatcagagaaaaaaagttgatttctatgatttctactctctagaatttg

SEQ ID NO: 10460 - DNA, 120 bp, synthetic construct
  source 1..120: mol_type = other DNA
cagagaagagtagaaggagaagaggctgaagtgataagcagagctgaaaacacaatggggcttgtaggtcatgcctaaaagcatgaacacttagtggaattatggaagggttataaacaa

SEQ ID NO: 10461 - DNA, 120 bp, synthetic construct
  source 1..120: mol_type = other DNA
cctgaaaaccaagggatgagagaatttcatggtgtctcaaacaccacccacaggttgagtaatataagcagtgcttatattactcaatatagtgtctgcttaggatgtagcagataaggc

SEQ ID NO: 10462 - DNA, 120 bp, synthetic construct
  source 1..120: mol_type = other DNA
taatttaatactgccaaaagaataccccttcaaatcactgacactagaaatctaaaaggtaccaagtaccaaaggaagaaaaaagacatctagaagtcagccatctttccttagctcttt

SEQ ID NO: 10463 - DNA, 120 bp, synthetic construct
  source 1..120: mol_type = other DNA
tcaaaaacggtgtcgctaacagagccatgctggtactgtctgtggtatgtgtcaaagtggcgctgcctgcttgtggtgccagcacggctgacccccacgatctcggaacgagcatatctc

SEQ ID NO: 10464 - DNA, 120 bp, synthetic construct
  source 1..120: mol_type = other DNA
aacaagtattaaacgtacgttaatgtttttaaatgctagtttcacaccaccctgggatatggcaagtgatcaaaggttatcaaaacattctctacaaaagtttttcagctgggtgtggtg

SEQ ID NO: 10465 - DNA, 120 bp, synthetic construct
  source 1..120: mol_type = other DNA
attcagtttcccgagtcacagaactctgttcccaaggcaggaattcggaagcttcttgtaataagcaggtgtaggcaataaatataatggtgactcagcactactagataagacagcttg

SEQ ID NO: 10466 - DNA, 120 bp, synthetic construct
  source 1..120: mol_type = other DNA
catactcctgtctgaggaggggggagtggtggaaagcagtatgttgtgtccctcttctgcctcctttatccttctctcagctttttttgagttttctcttactgccttaaaaaaaggcta

SEQ ID NO: 10467 - DNA, 120 bp, synthetic construct
  source 1..120: mol_type = other DNA
ttctgcctcagcctcccttacttgaaagcaatcttttccatgacccgacagccaatttaagagagaaatcaaggacacattaacagttggatccttaaggacgctgacatttattattat

SEQ ID NO: 10468 - DNA, 120 bp, synthetic construct
  source 1..120: mol_type = other DNA
ggagtaggtagatattcaggaacagttaatggcgtgcttcttccatctttaagctgagatccctgcaaaggttttctaaatgtgtaagaatctttggacaggacccagtgaaacagtatc

SEQ ID NO: 10469 - DNA, 120 bp, synthetic construct
  source 1..120: mol_type = other DNA
ctcagccatgtccttttctgaaaatagaagaaagcaaacaaaaacatacacaaaggtgcatccagctttaaacaaatccaacatgaaaatccagattttcttacactgaaaattgaggtg

SEQ ID NO: 10470 - DNA, 120 bp, synthetic construct
  source 1..120: mol_type = other DNA
atgactgtctataaaaatacagtcttctgccaggcaaggtggcttacgcctgtaatcctagcactttgggaggtccaagtgggcagatcgcctgaggtcagcagttcaagaccagcctgg

SEQ ID NO: 10471 - DNA, 120 bp, synthetic construct
  source 1..120: mol_type = other DNA
gcacattttatggagcccattttaaggaaaataaagtaggtagttgcagagcaactttaaactccactcttctcaaataacaagcaattcaggtcaaaccaattgcgggggcgggtaatg

SEQ ID NO: 10472 - DNA, 120 bp, synthetic construct
  source 1..120: mol_type = other DNA
tgtcctcacagtgtggattcacgatggtcttttagaaggaaagagcctgaaagtctaaaagcttatcatcttactgttatttggtctttctacagtaatctctggcttgcaacagctctc

SEQ ID NO: 10473 - DNA, 120 bp, synthetic construct
  source 1..120: mol_type = other DNA
ctacaaaattttaaaaatttaaaaattagctgggcatggtggcatgggcctgtagtcccagctacttgggaagctgaggtgggtggattgcttgagccctggagacagaagttgcagtta

SEQ ID NO: 10474 - DNA, 120 bp, synthetic construct
  source 1..120: mol_type = other DNA
caaggtgggcagatcacttgagtccaggaatttgagaccagcctgggcaaaaaggcaaaaccccatctgtacaaaaaaaatacaaaaattagctgggtgtggtggcgtacacctgtagtc

SEQ ID NO: 10475 - DNA, 120 bp, synthetic construct
  source 1..120: mol_type = other DNA
gcccggcctcttttttttttttttttgagacagggtcactctgttgcccaggctggcgtgcagtggtgcattcagagctcactgcagccttgaactcctggcctcaggcgattctcctgt

SEQ ID NO: 10476 - DNA, 120 bp, synthetic construct
  source 1..120: mol_type = other DNA
caccagaatggaactaaaatgtgagtatgatagtcacatacatgcttttgtcttggggtagatggaaggtgctcaaatagtttcgactgttctctgtcattctgggtatacggagaggaa

SEQ ID NO: 10477 - DNA, 120 bp, synthetic construct
  source 1..120: mol_type = other DNA
cccacacccaccccataaatagcttactgagagattcagaaaaaataatccattaagcttctaatgaaggttttcatccacaaattctggaaatcaaggaattgcagaactttgattatg

SEQ ID NO: 10478 - DNA, 120 bp, synthetic construct
  source 1..120: mol_type = other DNA
ttttaataaatgagaaaaaactgtaaagttgctatctaaaactttgaggaaatgtgaactacaaatacctagaatatttaatacaaaagctaccctctgttcccatgactgtggaactct

SEQ ID NO: 10479 - DNA, 120 bp, synthetic construct
  source 1..120: mol_type = other DNA
gattagtcaccttgctccccagaattgcttcattcctgggattcctttttgtcaaaggaagaatttatgcagaatttgaacaatgtctaacttttttttaacagtagcgcctagtaacta

SEQ ID NO: 10480 - DNA, 120 bp, synthetic construct
  source 1..120: mol_type = other DNA
ccaaaagtcactgagtgatttacaatgaaaaccacccagctatactaaggcattggaaagaagacaaagggttaaagactcttgcaagatacttatcaacaaatcagccacatttatctc

SEQ ID NO: 10481 - DNA, 120 bp, synthetic construct
  source 1..120: mol_type = other DNA
ttttgggtcacttactactttttatttggtaatgtatttttctagcggttggcttccttcttcaaactttttgctttaaagcaagcagagtctttgtgtttaattcagcacctgcacagc

SEQ ID NO: 10482 - DNA, 120 bp, synthetic construct
  source 1..120: mol_type = other DNA
ccacatcgcccaattcttggcacatagtatgcactcagttatattaactacgatcattgaacatcttctctttacctttcaagtatgttaatattgactacgtcatcctttaggattctt

SEQ ID NO: 10483 - DNA, 120 bp, synthetic construct
  source 1..120: mol_type = other DNA
aaattctgcatagcatctcaaggtgtttatagactccctgaaccttcaaattaagtccgcaccagtgaggggcgcggaccggcggagtagaaaaagaaaggggtgaaatcttgaagtgag

SEQ ID NO: 10484 - DNA, 120 bp, synthetic construct
  source 1..120: mol_type = other DNA
tttagtggttcgaagcaacacaaatttattaccctacagtatgtaaattagtcccacagtgctggttccttccagaggctgagggagagaatgcgttttcttgccttttccagcttttcc

SEQ ID NO: 10485 - DNA, 120 bp, synthetic construct
  source 1..120: mol_type = other DNA
acacagctgtcttgggggctgttatcctgccacagctcccaatctggagagttcataagtgggatcctgcagaccacgccagcacagtgccagacacgatggcacagtgactactgtact

SEQ ID NO: 10486 - DNA, 120 bp, synthetic construct
  source 1..120: mol_type = other DNA
aggttagtgaagactctgtctttcaaaacataaaaatctgcgataaaaccaattattccatacagtgactacggtcagttctgagaaatgacacccaggttggcgatgtgtctcatggtt

SEQ ID NO: 10487 - DNA, 120 bp, synthetic construct
  source 1..120: mol_type = other DNA
aggacacaagcctgaagcccaatgtcaccttctttcttcctgcagcaccctgagggctcgccatgtgccaagcacagtcagaaggctggggtgacagcaggttggagaaggacagacaat

SEQ ID NO: 10488 - DNA, 120 bp, synthetic construct
  source 1..120: mol_type = other DNA
ctattaggtctttatccaagaaacactgtggctagaagtcagactctgggccctcttctaattaaactctgcccttgagtcatttcatctaatctcatggctgtaaattacacctgaagc

SEQ ID NO: 10489 - DNA, 120 bp, synthetic construct
  source 1..120: mol_type = other DNA
tggcctcaagcaatcctcctgccttggcctcccaaaatgctgggattacacgtgtgagccaccatgcctggcttccatcccaccttttagatggcagctgagatgccacctgcccagatg

SEQ ID NO: 10490 - DNA, 120 bp, synthetic construct
  source 1..120: mol_type = other DNA
aaggtacctcaaacgctaactgcgttggagtcaaccaaagctcggagatagaatactggccgggccaggcacagtggctcatgcctgtaattccagcactttgggaggctgagacaaggg

SEQ ID NO: 10491 - DNA, 120 bp, synthetic construct
  source 1..120: mol_type = other DNA
acgtcctggggtccgaaggtccagtttttactagttggcaaggaaatcagtttagccctttcagtgactggagctaaaagaatacaattttgagaaaaatccatgacttgacaaacacgt

SEQ ID NO: 10492 - DNA, 120 bp, synthetic construct
  source 1..120: mol_type = other DNA
cgataacaaaatcaaagccattctttctaaatatttccagattttctatcagaacagcttcattaacagcagttaagttgagagtctgaggtctgaaaaacacaaaaatgattcaaacca

SEQ ID NO: 10493 - DNA, 120 bp, synthetic construct
  source 1..120: mol_type = other DNA
ctgccacgccaatgactcccactttttctgaatcctttccttaaggataacagtatcacaaaaatgctatttttcctccttctaatacagaatttgaaacactgggttaggtcattgcca

SEQ ID NO: 10494 - DNA, 120 bp, synthetic construct
  source 1..120: mol_type = other DNA
tcttgaagtgtggtccatctgggaccctaagtggtctgtgattacctgggccaacttgaaatgtcacagatgagaggttatctttgccgaatggctaaaaaatacaagacctcagccggg

SEQ ID NO: 10495 - DNA, 120 bp, synthetic construct
  source 1..120: mol_type = other DNA
ctgattactctactgtcaatcaacactggcgcacaggctgtctgtctttctgaacacacacattccatacactatgcatactaatactccatactatcaattgccctcatcagaaggatc

SEQ ID NO: 10496 - DNA, 120 bp, synthetic construct
  source 1..120: mol_type = other DNA
cggggtttcaccacgttggccaggctggtctccaactcctgacctcaggtgatctgcctgcctcggcctcccaaagtgctgggattacaggtgtgaggcaccgcgcctggccaactagat

SEQ ID NO: 10497 - DNA, 120 bp, synthetic construct
  source 1..120: mol_type = other DNA
ggcttaaccatcccactttctaaagataacattaattattcattcatccaactctccggagaagacatcagttgctactattaacgatttaaatggaatatatccttctagacccttgtc

SEQ ID NO: 10498 - DNA, 120 bp, synthetic construct
  source 1..120: mol_type = other DNA
cttcaacatctaatgtcattaaatactaacttagtcaatctggacaaaagacagacaccaccgctaaccttcacacgagaaattgacactgtcattctcagtcccacacaattaaatccg

SEQ ID NO: 10499 - DNA, 120 bp, synthetic construct
  source 1..120: mol_type = other DNA
ctcctgcctcagccccctgagtacctgggactacaggcgtacagcaatgtacttagctaattttttttttttttttttttttttagagatggggcctcattatattgcccaggctggtct

SEQ ID NO: 10500 - DNA, 120 bp, synthetic construct
  source 1..120: mol_type = other DNA
atatgccctggttcccagtacatagataatctgctcaaaagctggtgctggcctaaaagacccaagtcttccatgtgtttggagtctgtgtcctgccacagagaacaggatctggccagg

SEQ ID NO: 10501 - DNA, 120 bp, synthetic construct
  source 1..120: mol_type = other DNA
gacaaatctttgccctaaacttcctgtaattctgttccccttcactttgctgtgcttcatgatgtaactgctttattcgtttagctaaagaactcatagaaaagtccaggggcacaactt

SEQ ID NO: 10502 - DNA, 120 bp, synthetic construct
  source 1..120: mol_type = other DNA
ataatatgggccaggtgtggtggcttacgcctgttatcccagcactttaggaggccaaggcagggggatcacatgaggctaggagttcaggactggtctggacaacatggtaaaaccctg

SEQ ID NO: 10503 - DNA, 120 bp, synthetic construct
  source 1..120: mol_type = other DNA
attttgccacatgacttgggtgaatctcacaaacaaaataatgagagaaagaaacaaatcacagaaaaggacagactgaataacttcaaattaaaaacagattaaactataccgttttgg

SEQ ID NO: 10504 - DNA, 120 bp, synthetic construct
  source 1..120: mol_type = other DNA
agtttacttggaaaaaataaggaaacacattagctaaaagctttagaagctgtttgtacactgtatttttcttaccttcaacatccagcagtggctgctgactgacatttagcttgttga

SEQ ID NO: 10505 - DNA, 120 bp, synthetic construct
  source 1..120: mol_type = other DNA
tcccctactgaatttagcttaacaattataatacctagtacattataggtaggtgtgtaaattggtacatctagaacacaatacagaaaaagccttaaaatgatcatattcactgaccca

SEQ ID NO: 10506 - DNA, 120 bp, synthetic construct
  source 1..120: mol_type = other DNA
atatgaaatgaattatttatgaaattaggaagaacatttcatctactttctcccttggttgacattaaaaaaaattacattttcctaacaatataattaacatagtctcaagtagaaagc

SEQ ID NO: 10507 - DNA, 120 bp, synthetic construct
  source 1..120: mol_type = other DNA
ggccaggctggtctcgaactcctgacctcagttgatccgcccgcctcaacctcccaaagtgctgggattataggcgtaagccactacacctggcctaaggatacatttttttaacagctt

SEQ ID NO: 10508 - DNA, 120 bp, synthetic construct
  source 1..120: mol_type = other DNA
tactcaaatacaaaaaattagccaggcatggcagcatgtgcctataatcccagctacttgagaggctgaggcaggagaattgcttgaacctgggagggagagcttgcagtgagccaagat

SEQ ID NO: 10509 - DNA, 120 bp, synthetic construct
  source 1..120: mol_type = other DNA
caaaaaaaactgtacacagatagatgcgctccttaacttatgatagggttatgtcctgataaacccataagttaaaaatattgtatctgctgggcgcggtggctcacacctgtaattcca

SEQ ID NO: 10510 - DNA, 120 bp, synthetic construct
  source 1..120: mol_type = other DNA
gctgggggccatctgcggtagacttctgtaaatgcacaaaataagataatgttaaagccatgtttctcaaagtcccgagctccacgtaaactgcctattatcagaaaaaagttatcaatt

SEQ ID NO: 10511 - DNA, 120 bp, synthetic construct
  source 1..120: mol_type = other DNA
aaaacctcccgggtaggacgcttatatctcatgtcttggtaaagcgcttgcttcacatgagacccaccccagggataccggcatttccagaagaacaccaccttcacataaagacataaa

SEQ ID NO: 10512 - DNA, 120 bp, synthetic construct
  source 1..120: mol_type = other DNA
gccttagaatcactatctttaaaaaaaaagctctcaggataaaatgttcaattgtagttctcttgccagcaatctacttactaaaaaagattatgcagagcatcggaacagctcaaaccg

SEQ ID NO: 10513 - DNA, 120 bp, synthetic construct
  source 1..120: mol_type = other DNA
acttatatttttttcagagagagagtgaaaagacgcagtatacgagtgtctctggaagaataaaatgaaacacattcagctctcaaacatcaatttttgtgataggtactttgttttttt

SEQ ID NO: 10514 - DNA, 120 bp, synthetic construct
  source 1..120: mol_type = other DNA
ggttgcagtgagccaagacaacaccactgcactccagcctgggcagcagtgcgagactccctctcaaaaaaaaaaaaaaaatcaattctaagattttattctccattctactggaaggga

SEQ ID NO: 10515 - DNA, 120 bp, synthetic construct
  source 1..120: mol_type = other DNA
tggcacaagcattttggtatgcaaagagatacacaaaaatgttcactgaaacaatctctatgaacaaacagaaacaacctaagcaagcatcattgaggagttgattaattatggtatagc

SEQ ID NO: 10516 - DNA, 120 bp, synthetic construct
  source 1..120: mol_type = other DNA
aaacacacatacaaaatgggaaggcacaaagaagacagcaaaaactgcatgagatctcacatccaaggataactgctgagaacatgaaagtgccgagtcttccagcctttatactataca

SEQ ID NO: 10517 - DNA, 120 bp, synthetic construct
  source 1..120: mol_type = other DNA
ttccagacaggatcttattctgtctcccagtcttaagtgcagtggcgcaatcatagctcactgcagcctcaagttcctgggctcaagtgatcctcccacttcagcctcccaagtagctgg

SEQ ID NO: 10518 - DNA, 120 bp, synthetic construct
  source 1..120: mol_type = other DNA
tttttttaaagaatctaacaaatattataattaaaatgtatatgtagggcagagcgtggtggctcatgcctgttatcccagcactttgggaggccaaggcaggcagatcacttgaggcca

SEQ ID NO: 10519 - DNA, 120 bp, synthetic construct
  source 1..120: mol_type = other DNA
catgtgacccaattattttataataggattagaaaaagtcaacttacttaagccttcgaagttttcttcttctaccccacatccattgtctgaaacttcaataagatccactccatagtc

SEQ ID NO: 10520 - DNA, 120 bp, synthetic construct
  source 1..120: mol_type = other DNA
gtggaggttgcagtgagccgagatcgtgccattgcactatagcctgggcaacaagagcaaaactctatctcaaaaaaaaaaaaaaaaagagaatgggttctggaatcagacttcctggat

SEQ ID NO: 10521 - DNA, 120 bp, synthetic construct
  source 1..120: mol_type = other DNA
aggattataggcgtgagacaccacgcccagctgttctgcaaattaaatatttctgtgcaattcttagcataacacctgcctggcacaccgtaagaacacaataaaagctgttattattat

SEQ ID NO: 10522 - DNA, 120 bp, synthetic construct
  source 1..120: mol_type = other DNA
atcgcttaaatccaggaggcggaggttgcagtgagctgagattgcggcattgcactccagcctgggcaacgagcaaaaaaaaaaatgaaagtaacataatttcccaacataattagaaaa

SEQ ID NO: 10523 - DNA, 120 bp, synthetic construct
  source 1..120: mol_type = other DNA
ggtctctgtctaaaccgctctcctcttcctcctctgcccaaacaatgtctgctcaaagaatgtatcccgtgtgttcattaacttagcaatttccagcaaacagtttaattgataacttgt

SEQ ID NO: 10524 - DNA, 120 bp, synthetic construct
  source 1..120: mol_type = other DNA
aacaggtagaaacgtattgcatttttaaaaactgcgcagctatgcaaataaggatgtgtctggacgctctaccgtccccaaaataaccttaattttttaaaaaggccaggcacggtgcat

SEQ ID NO: 10525 - DNA, 120 bp, synthetic construct
  source 1..120: mol_type = other DNA
gtcataacaaacatcatgattttacatttcaatacacaagaaaaaaaatagacatcttcccggcacttggctcccgcctgacggcaacgtctcctccacactttgagagacctcagcttt

SEQ ID NO: 10526 - DNA, 120 bp, synthetic construct
  source 1..120: mol_type = other DNA
ctccgtttctgtctccttttgtttggcacctgtcagtggatggaagatgaaagtttcaaagctcatggtaacagcagggttctctaccccaggggtttctacctgtgtctggcagtgcct

SEQ ID NO: 10527 - DNA, 120 bp, synthetic construct
  source 1..120: mol_type = other DNA
acaatgaactgttgctaaaaacttttttgagaaagagaaagtgttattgtgttgaaccagtacccctctggggaacggtggccattgcccgatgaaaagaatcaccactagtaccttcta

SEQ ID NO: 10528 - DNA, 120 bp, synthetic construct
  source 1..120: mol_type = other DNA
gaggccttttctagttagcacaaatgtgctgtgcagttatgcctgcctggaaatttatatgaatttaatgatggtctggatgagcctggctccctctgttcaatgttgcctgtgagattc

SEQ ID NO: 10529 - DNA, 120 bp, synthetic construct
  source 1..120: mol_type = other DNA
agttttttttctctttaaggaaagatgaaggtatcaaatagaagccagtgacgttccctctatgtttctggtcactagttctctcacaaagcacaattgaagaggtcttttcagtggaaa

SEQ ID NO: 10530 - DNA, 120 bp, synthetic construct
  source 1..120: mol_type = other DNA
agggacacaggcatgagaaggaaagaggggaaagctatctatctcctgtctctaatgatactgatttgtctctaattcaagctgatttgcttgcttacttttaagaaaaatgagctagct

SEQ ID NO: 10531 - DNA, 120 bp, synthetic construct
  source 1..120: mol_type = other DNA
tgggaggctgaggtgggcggatcacaagatcaagtgctcgagaccagcctgaccaacatggtgaaaccccgtctctaccaaaaccacaaaaattagctgggcgtggtggtgcattcctgt

SEQ ID NO: 10532 - DNA, 120 bp, synthetic construct
  source 1..120: mol_type = other DNA
aaaaaaaaatagtggatattaaacagatatcttttgaactctgaaggctaagggaaaccatctcatccagagaattaagcagttctctcagactgaaatgactccccacgtattttcttg

SEQ ID NO: 10533 - DNA, 120 bp, synthetic construct
  source 1..120: mol_type = other DNA
gattcacctatgataccaggacttttccattcaattcaattcaacaaacttttagagatcgcctatatgccaagtagtgtgccaggttctgggacaggagggaatcccatcgactgaacc

SEQ ID NO: 10534 - DNA, 120 bp, synthetic construct
  source 1..120: mol_type = other DNA
gtgactgttatgtttaacataatagtgtgaagcaaagggtttgaggcagctgcagaagaatgtttaatgtggggtcagtattgtggcaaaaaatggcgtgcacatttggggctataaagt

SEQ ID NO: 10535 - DNA, 120 bp, synthetic construct
  source 1..120: mol_type = other DNA
aatatgttcaaggctttgatgatgggagtgtctggatgtatgaaggcaatgttgtggtacgttcctattccaagctcatccaggttctgcttcatgaaggcaggctttggcatatcagac

SEQ ID NO: 10536 - DNA, 120 bp, synthetic construct
  source 1..120: mol_type = other DNA
agaaagccctattaggtcatctagtccatctcaacatagcgaattccctgttgcacactataggcttaggctaattttcaaacgtcttgaagggtaatgctccttttttctcagaaaatg

SEQ ID NO: 10537 - DNA, 120 bp, synthetic construct
  source 1..120: mol_type = other DNA
aatattatttaaaaatgatgactctaaggattaagtgagctgcaggcctggcacgtgggggccctgaatacatccttcccaccccatgctccctctgttcctattaaacttcaactacta

SEQ ID NO: 10538 - DNA, 120 bp, synthetic construct
  source 1..120: mol_type = other DNA
tgctctagatattagttcagtttatcttgtacaacagtcctcaattagacttgcagattgccttatttcccctcatatgctggtgacaaatgttttaatttaaagagagaatgccgagtt

SEQ ID NO: 10539 - DNA, 120 bp, synthetic construct
  source 1..120: mol_type = other DNA
gggccaacatttctgttctacttggtccctctcctgggactgccagtaagaaggttgttatacctttttgttaggacttggaaataaaatgaaaataaatattttaatctttctctgtac

SEQ ID NO: 10540 - DNA, 120 bp, synthetic construct
  source 1..120: mol_type = other DNA
ttaaatattaaaaaacaatgtgacagtaagtgtttataaaatcaggaaaaacaaagaaatctgataaaagagcaataccagcagaggtcactagaatgctaccaggttcaccttactctc

SEQ ID NO: 10541 - DNA, 120 bp, synthetic construct
  source 1..120: mol_type = other DNA
tacagcagcatcatcttggctcactgcaacctctgcctcccaggcccaggcgagtctcctgcctcagcctcccgagtagctgggagtacaggtgcgcaccaccacgcctggctacttttt

SEQ ID NO: 10542 - DNA, 120 bp, synthetic construct
  source 1..120: mol_type = other DNA
acaattactaggtttaaataagaacagatgcttgctttggttcaagttaggcatgcctctgatgcatttcttaataccaaggcaaatctctgagggcttagacttagtagtgagcggtgg

SEQ ID NO: 10543 - DNA, 120 bp, synthetic construct
  source 1..120: mol_type = other DNA
gcctgggcaacagagtgagactctgtctcaaaaaaaagaaagtgaggtgagatatagagaaaaaaatgtatctcaagtttttttttttttttgagacaaggtctcattctgtcatccggg

SEQ ID NO: 10544 - DNA, 120 bp, synthetic construct
  source 1..120: mol_type = other DNA
ttcaaaagcagagatatgaccactataaggaaagcccgtgttcacttgcattggtaatattgaagaaataatacacttcatgggaaataaatacaggatatttacaaaatctttggtaaa

SEQ ID NO: 10545 - DNA, 120 bp, synthetic construct
  source 1..120: mol_type = other DNA
agatacgtacagctccaactactgacataggaactggtgccacttaccataggtgatttatagtatctatgtagtatatttatgaaatctgtaattgttagcattcctggaacaaagaat

SEQ ID NO: 10546 - DNA, 120 bp, synthetic construct
  source 1..120: mol_type = other DNA
gctgtaagttacacaacagttttaacagtataacaatggtctggcagagacatcagtcatgtttacagcatctaatttgccctgtcaaaaaggtgtgcactagcgagatgagtgcggggc

SEQ ID NO: 10547 - DNA, 120 bp, synthetic construct
  source 1..120: mol_type = other DNA
gtgttgggattacaggcgtgagccaccgcacctggccagaaaaatacccttaacatatttgaccaagtcttatcagttatcttccataataagtttcgtaagtttgataagctaaaaata

SEQ ID NO: 10548 - DNA, 120 bp, synthetic construct
  source 1..120: mol_type = other DNA
aataagccgatattttaaagttgcagctcctaatacaagggctattataaaaccactggtggcaccaaacactgagaaaatattttttctaacacagctagtgtcaagaatcacaaagta

SEQ ID NO: 10549 - DNA, 120 bp, synthetic construct
  source 1..120: mol_type = other DNA
caacccagtgatgtgggagagcaacagtaactgagcagcatccagaaactcatgaactgtttctgaaacacacctttatcaaaaaggcaccaaaatacactgcttttgtaactaaatggc

SEQ ID NO: 10550 - DNA, 120 bp, synthetic construct
  source 1..120: mol_type = other DNA
tatgcattgagcatcacattcattctggaatttttctgagggcatttcccacatcatctgcacataggtcaatttcaacaagaagctgaaatttatcaagaagaatcaaacaaatcccag

SEQ ID NO: 10551 - DNA, 120 bp, synthetic construct
  source 1..120: mol_type = other DNA
cttaaggagtcctctgcactgaaggaaagattctagacctgcacagaaccgtaggagggaacaaagagcacaggagagggcagagatgtaggtgaacataaatcaatactgcataaagcc

SEQ ID NO: 10552 - DNA, 120 bp, synthetic construct
  source 1..120: mol_type = other DNA
tgctattctaggcatttattgcatggtttaattgcaattgtcaatacagaaagtaaacgaaccttgtctatgacctaagtcctaggatcctatcaaggactgcctttctctaataagggc

SEQ ID NO: 10553 - DNA, 120 bp, synthetic construct
  source 1..120: mol_type = other DNA
ccccagcccaatggcaaggtttatagagagaaaagccccagtgaagcagcagttcaatggcaaagagaacgttaagaatttaacgtgcaaagtggtatctcttctgcaacagaagataaa

SEQ ID NO: 10554 - DNA, 120 bp, synthetic construct
  source 1..120: mol_type = other DNA
atacactgttgacctgtccgcaggtcactgaggaagtctcaattccatccttcagagatctcatataatattccaaacggacatgatactcgtacaatgcattaaagagcagtgtcctgg

SEQ ID NO: 10555 - DNA, 120 bp, synthetic construct
  source 1..120: mol_type = other DNA
tttctacacagcttcactctgattttcagtaattaagttgactgtgaagcttttaaaattaacgctgatatctactgcgtcaagaagggtccagcttctgaaatacggtcgtcgagactc

SEQ ID NO: 10556 - DNA, 120 bp, synthetic construct
  source 1..120: mol_type = other DNA
tgaactgaccacaagacacatgatgatggaattttagggtaccaggtagaaagcgagagccacaaaagcttcagaggggaaaaataaaatcatatataaaggctggggattttaaaaaag

SEQ ID NO: 10557 - DNA, 120 bp, synthetic construct
  source 1..120: mol_type = other DNA
atcaagtgatcctatgtataaattttgcctactgaggaatctttctgcgtttcgattattatcagctatcccacctggtttcaagtcatctgtaaattagatgatgccatcaatgaaatc

SEQ ID NO: 10558 - DNA, 120 bp, synthetic construct; identical to SEQ ID NO: 3348
  source 1..120: mol_type = other DNA

SEQ ID NO: 10559 - DNA, 120 bp, synthetic construct
  source 1..120: mol_type = other DNA
atggagagtggtaagtcacacaggcagtaagcaccctggagacggtatgatgaaaagggcactttacctctctctggtctttctcctccaaagccacatgcccagtctaatcatgataaa

SEQ ID NO: 10560 - DNA, 120 bp, synthetic construct
  source 1..120: mol_type = other DNA
catgctgttctcatgatagtgaataagtctcacaagatctgattttttttttttttaagacagattcttgctctgtcgcccaggctggtgtgcaagtggtgcaatcttggctcactgtaa

SEQ ID NO: 10561 - DNA, 120 bp, synthetic construct
  source 1..120: mol_type = other DNA
ttatttgtcctttcagttaccagttaatttagatccagttaacatttgcttatgttctttttctgttcaaataactggtgtggcttctgtctcctgactgaaccttgactgatcaagaaa

SEQ ID NO: 10562 - DNA, 120 bp, synthetic construct
  source 1..120: mol_type = other DNA
aagcccaggtctgggacctgcacccacagacagagaacccaacaagcctctatggcagtccccagagagtctatttcttgtagctacagggctgtttccaaaatcaaacacaaagcataa

SEQ ID NO: 10563 - DNA, 120 bp, synthetic construct
  source 1..120: mol_type = other DNA
tgttcccaatgtagtatcttgggggacccacagcccctgcctggacacatactccttttctctataccaatctacaaggacccctagacggagtctgctttacctggcaacaggatactt

SEQ ID NO: 10564 - DNA, 120 bp, synthetic construct
  source 1..120: mol_type = other DNA
agggtgattccagtattaaaccgaggggaatctcatggaacccaactgcagggagtccagtcggcctctcaagagaccgaagatggaagcagaaaagccaagcccgagactgctcttccc

SEQ ID NO: 10565 - DNA, 120 bp, synthetic construct
  source 1..120: mol_type = other DNA
tttactggatcagtcaccttggacatccataaggcattgcatttttcatgtattactcacttgactttctctagggtttagccaaaatgagtaatacatggaaagctgggtaaaagtcaa

SEQ ID NO: 10566 - DNA, 120 bp, synthetic construct
  source 1..120: mol_type = other DNA
ctgggagtgcatccttcataaacccatgaattcttggtttagcatttacttctgaggaactcgactgaggacaatcctacttggaaaatatttatgtagaaacaatacactaaatgtata

SEQ ID NO: 10567 - DNA, 120 bp, synthetic construct
  source 1..120: mol_type = other DNA
ctctataatttgagcttccctgtctttaggaagaagacagtaatagcacatttcttataaggttgccaagatgttgagaattcagataaaacctcagcacagtgcccgatagtgcaaagg

SEQ ID NO: 10568 - DNA, 120 bp, synthetic construct
  source 1..120: mol_type = other DNA
agttcctagatctaaaaagaatgagtttagcagggtcatagaattaaatcagggttaataaaacaaagacaaagctaatcgaatggggaaaagttggaagctttcccttcaagatctgga

SEQ ID NO: 10569 - DNA, 120 bp, synthetic construct
  source 1..120: mol_type = other DNA
atagccaaaagaattttgagcaaaaagaacaaagctgaagatatcacactacctgacttcaaaatgtactacaaagctataataaccaaaacagcatgaagctggcataaaaacagacac

SEQ ID NO: 10570 - DNA, 120 bp, synthetic construct
  source 1..120: mol_type = other DNA
gaattaccctatgatccagcaatcccactaccgggtatatacccaaaggaaatgaaatcagagtgttcatgacacatgtgcactgccatgttgagtgcagcactattcacaacagccaag

SEQ ID NO: 10571 - DNA, 120 bp, synthetic construct
  source 1..120: mol_type = other DNA
gctactatatttgtatctactaactcattgttagcagacagaaatttaaaaaaattttaaaggtactatttacataaatgctgtatggaaatacggacttacacagggaacagagagcac

SEQ ID NO: 10572 - DNA, 120 bp, synthetic construct
  source 1..120: mol_type = other DNA
atccctcgtgggcacagttcaccatcgggtttggactcctatgagacactaaagctgtccctaatctgagaggatgcacagctcaggccataatgctggctcacccgccccttgcctcct

SEQ ID NO: 10573 - DNA, 120 bp, synthetic construct
  source 1..120: mol_type = other DNA
tcccttcttgcccttgttcactcacttgccttaaacgtcctcctccttgacttttccttgttcaatttcaatccaacctcaacggacatcttttcccacaaaagaagtgaacgtctgagt

SEQ ID NO: 10574 - DNA, 120 bp, synthetic construct
  source 1..120: mol_type = other DNA
agtaatccatacattaattcagtctataaatatttattgcatattgtctagtgtgcattcctcccaaagctgatcctgagaccatggaaagttaggggaggaaaaattcaaaagaaaggg

SEQ ID NO: 10575 - DNA, 120 bp, synthetic construct
  source 1..120: mol_type = other DNA
tgtattttgaataaatatatgttccagatttacaaaaaagttgcaaagctggaacagttcctatatactccatatcaggttcccccaagtttatcatcttacgttattgatatggtttgg

SEQ ID NO: 10576 - DNA, 120 bp, synthetic construct
  source 1..120: mol_type = other DNA
tagaggtactctttccctcctcctttatgtactgtaatctttttaagaaggtcactaggacccctcacttaatggcaaggagttatgccctacctccttgtttaaaataattatgtacag

SEQ ID NO: 10577 - DNA, 120 bp, synthetic construct
  source 1..120: mol_type = other DNA
caaaagtctccacattattcagatttccttattttttccttaatgccctgtgtctgtctcacgatcccgtccaggattccacatgatggtcgggagcatctcctcgggctcctcctggct

SEQ ID NO: 10578 - DNA, 120 bp, synthetic construct
  source 1..120: mol_type = other DNA
aaatttataataaaatttctttaaaaaatttttttaaattaaattttatggctgggtgcagtggctcacgcctgtaatcccagcactttgggaggccaaggcgggtggattgcttgagag

SEQ ID NO: 10579 - DNA, 120 bp, synthetic construct
  source 1..120: mol_type = other DNA
gtggcaccatctgtgttagttacattatggtgaagtctcacattgtacttggaggaagaaataaattgaaacagagtgaaaatgagtgtaatttggagttatacaacaacaacaacaaaa

SEQ ID NO: 10580 - DNA, 120 bp, synthetic construct
  source 1..120: mol_type = other DNA
ctgctcgtgtcctccctacctacacaatataccctgtatcattcaaggttctagaactcgaactctaacctacctttccagcctcatctcctatcacatcccctaggaatctcatctcta

SEQ ID NO: 10581 - DNA, 120 bp, synthetic construct
  source 1..120: mol_type = other DNA
ggcccctggaaggttcattgtagatatcaggcatgagttaatgcctggtatcttgcaagtcactgaagaagcacagatcaaatttgagaggggcaagtacggatctgagatgactatatt

SEQ ID NO: 10582 - DNA, 120 bp, synthetic construct
  source 1..120: mol_type = other DNA
ctaagagcaggatagtgactcaaaatggatttcaacgtgtcctatttataaaaataacaactgctaaaataatccactactaaccagacagttaccatcaatctgcccgtcccaggttct

SEQ ID NO: 10583 - DNA, 120 bp, synthetic construct
  source 1..120: mol_type = other DNA
atttcaaaacaaacaaacaaacattttagtgtgggctgggcgcggtggcttacggctgtaatcccagcactttgggagaccgaggcaggcggatcacgaggtcaaaagattgagaccatc

SEQ ID NO: 10584 - DNA, 120 bp, synthetic construct
  source 1..120: mol_type = other DNA
gtgctgatcgatggttacacccctcggcatcttcctctctgtattctatacccattatgcgaagattttgtccacagaaccaccttcgtttactaagcaatgcttgctgcggtttcaaag

SEQ ID NO: 10585 - DNA, 120 bp, synthetic construct
  source 1..120: mol_type = other DNA
ttttgtgggaggacagcgacaccagcatcactaaaggagctgaattaaatgcagtgcttttgactttggacttacatgcagagagaaagaggagagttgagtaacatgctcagcctgtct

SEQ ID NO: 10586 - DNA, 120 bp, synthetic construct
  source 1..120: mol_type = other DNA
gcgagtgaccgtctatgggaccattcccaaaggcacaggtgcatggggaaccccaagaaatagtgcaataacctgaagctgttaccagccctagacctggggtgaggaacagttacaaaa

SEQ ID NO: 10587 - DNA, 120 bp, synthetic construct
  source 1..120: mol_type = other DNA
tcccaagtagctgggattacaggcgcacaccaccacccctggctaagtttcatatttttggtagagacaggctttcgctatgttggtcaggctggtctcgaacttctgacctcaggtgat

SEQ ID NO: 10588 - DNA, 120 bp, synthetic construct
  source 1..120: mol_type = other DNA
tttctttcagagcaaacagctcgcagtgatgatctgtggccctaagcccactttgccaggaccgctccagttcagcaccatggaatgggactccacctgggccttctgagtccccatcac

SEQ ID NO: 10589 - DNA, 120 bp, synthetic construct
  source 1..120: mol_type = other DNA
gcaaatcaaaacccttgattctctaatgatgttgctgcaccttcaacaccactgggaactctgcctgctgcaagccaaatgccctggtctaccatttgcacaccggcagtataaacacaa

SEQ ID NO: 10590 - DNA, 120 bp, synthetic construct
  source 1..120: mol_type = other DNA
tttgagagagaagagaagaagaaacattctaggaagacgtaatagcatatacaaagacagaggtcccaaagaacatggcatgtttgaaaaatgatgtagccgtatcttagcctgaaacag

SEQ ID NO: 10591 - DNA, 120 bp, synthetic construct
  source 1..120: mol_type = other DNA
aggtggatggtggctatttggaatgcattgaaccattctctctaccatttcatatgtttggaaattttcataatacaattttgaaacaaaaaatatcatcatcttatgcaaggacattct

SEQ ID NO: 10592 - DNA, 120 bp, synthetic construct
  source 1..120: mol_type = other DNA
gatcatgccactgcactctagcctgggcaataagagcaagactccgtctcaaaataaaataaaataaaataaaataggccgggtgtggtggtggctcatgcctgtaatcccagcactttg

SEQ ID NO: 10593 - DNA, 120 bp, synthetic construct
  source 1..120: mol_type = other DNA
aaacgtaaaatcccaaatgctccaaaatgcaaaactttccgagtgccaacacaatgccataagttaccctgaacacatcggtttttcactgtatttatcagtagcatagaaatacagagt

SEQ ID NO: 10594 - DNA, 120 bp, synthetic construct
  source 1..120: mol_type = other DNA
tttctttctctctctcattctttctttctttctttagagataggatcacattatgttgcccagactggcctcaaactcctgggctcaagagatcctcctaccatggcctcccaagaagct

SEQ ID NO: 10595 - DNA, 120 bp, synthetic construct
  source 1..120: mol_type = other DNA
aggctgatgtggaaggatggcttgagcctaggagttgcagaccaacctgggtgacagagtgagaccctgtcacaaaacaaaacaaaacaaaacaaaaaaccaacaaaaatagtttgagat

SEQ ID NO: 10596 - DNA, 120 bp, synthetic construct
  source 1..120: mol_type = other DNA
acagcactgacaagaattactactgcaaatcaaaacacaaaaaaaccattggcagagccattacaataagtcaccaatagaagatgtcaggtagcaagccagtgttcaccaatggggact

SEQ ID NO: 10597 - DNA, 120 bp, synthetic construct
  source 1..120: mol_type = other DNA
cacctcagatcatttggcatgagttagagtctcataaggaaggctgggcacggtggctcacgcctgtaatcccagcactttgggaggctgaggcaggcagatcacgaggtcaggagtttg

SEQ ID NO: 10598 - DNA, 120 bp, synthetic construct
  source 1..120: mol_type = other DNA
ttcagcacagcctcaacctcctggactcaggaggcatgggactcacctcccatgtctggctaattttctgtattatttatttatttttatagagagagggtttcgccatgttgcccaggc

SEQ ID NO: 10599 - DNA, 120 bp, synthetic construct
  source 1..120: mol_type = other DNA
tacgttcatttgtgtgacaaatgtttactgaaaaccaagtttcactcatcccagtggcctcaagacctggcaaatattaagatttcagtctccatcctcacagagcttacaatgtaatgg

SEQ ID NO: 10600 - DNA, 120 bp, synthetic construct
  source 1..120: mol_type = other DNA
tgcgaagactggtgacgagtcccacttaccaatacccccgaatcctcccagcattgtcctctgcttaaactagtcagggatcttccggtgacaaaacctctatctactccaagacaacaa

SEQ ID NO: 10601 - DNA, 120 bp, synthetic construct
  source 1..120: mol_type = other DNA
ctttgggtggccaaaatccactgtaacagctgcaatttttttgtctcccaacaagaaccgatcttcacttactcagggtgttactcactccagttgagaatgaatgagttttgagtgaac

SEQ ID NO: 10602 - DNA, 120 bp, synthetic construct
  source 1..120: mol_type = other DNA
tggattctactttggaaaatctttgcaagtgaagaagaataggacagaatggctgaactgggatgaaataagcggcaaatgaggaggaagaggagagacagtcagtctggcaagacactc

SEQ ID NO: 10603 - DNA, 120 bp, synthetic construct
  source 1..120: mol_type = other DNA
taagagtgagaccctgagggagggagggagggaaaaattgctatgggcaaggcttctcatacacaaaatcatttcctcccccaatatgcccacaaagtaactacaaacacttaatgaaat

SEQ ID NO: 10604 - DNA, 120 bp, synthetic construct
  source 1..120: mol_type = other DNA
tggatgctgaaagatgaaatgaggatctcgtcaagggctccctattatgtaggatatttagaggtgtaatgtcttactgctgggacttttgtccctgctaaataagtgtgagattctgct

SEQ ID NO: 10605 - DNA, 120 bp, synthetic construct
  source 1..120: mol_type = other DNA
tgtccaaggtcacacagctaaataagtagtagcgattcctctcgaacagaagctgctctctagttcttcttgcctccctgctaatttgcaaaaattgtaactgtaaaagactctcattct

SEQ ID NO: 10606 - DNA, 120 bp, synthetic construct
  source 1..120: mol_type = other DNA
ctcaacaccgattcaataacctcttcaggttttcctatttaactttccccattaaaaaagaagacacaccctaccggtcatatcttcacaggcgcagataagggcaccagtctatgatta

SEQ ID NO: 10607 - DNA, 120 bp, synthetic construct
  source 1..120: mol_type = other DNA
cgggaggaggggcctggcaggggacgcgggcagcgggggccgggggcggagcgggagcgctgcccccacccgcccgaggccgccgccgccgccgcaggtggcgcggccgcggcccgcgtg

SEQ ID NO: 10608 - DNA, 120 bp, synthetic construct
  source 1..120: mol_type = other DNA
ccaatccctaagtcttaaacctcttaaaaaaagaaaaggggtggggagagaaaaagaaaacaaaactaagatgtttcatggtaaaaagctacagcagataccatacttcatagtgaaaga

SEQ ID NO: 10609 - DNA, 120 bp, synthetic construct
  source 1..120: mol_type = other DNA
gacaaaaacaaaccccaacctaagccttgcgttttacacaaaaattagctcacattggatcgtgaacttaaaactatgaaactttttggagaaaatatttgggaactggggcaaggcaaa

SEQ ID NO: 10610 - DNA, 120 bp, synthetic construct
  source 1..120: mol_type = other DNA
cctggtcaggaaccaccactcttaaaaacaatttggcagttttttataaaactaaacatgcaactaccatgtaacacatcagttacactcttgggcatttatcccagggaaatgaaaact

SEQ ID NO: 10611 - DNA, 120 bp, synthetic construct
  source 1..120: mol_type = other DNA
taaagtgtgcagcccagtgatttttggaatattcagaattgtgcaactatctaagtttacattttcatcatcccaaagagacagcttgtacccattagcagtcacgtcccattacctgct

SEQ ID NO: 10612 - DNA, 120 bp, synthetic construct
  source 1..120: mol_type = other DNA
atgaggattcaagtttctcctgtactgtttagttttgcaagatgttaccactgcggggaactaggtaaagggtgcacaggatctctctgcattatttcttacaactatatgtgaatatac

SEQ ID NO: 10613 - DNA, 120 bp, synthetic construct
  source 1..120: mol_type = other DNA
cagtttaggtatgtacattaatgtgcacagggtcaaaagacagacgaatttgtcagcacacagaacttgaagctggtggtcgtcgttgcccttttatggcaatgttttcttaaagtctca

SEQ ID NO: 10614 - DNA, 120 bp, synthetic construct
  source 1..120: mol_type = other DNA
gcagcaaaacactgtattttgaatgactatcagaagggaaaacttcagcctgaaaacttaatcataaaacaattgccaaaaaagcactcctttacgcacagaggtcggatatgagtttgc

SEQ ID NO: 10615 - DNA, 120 bp, synthetic construct
  source 1..120: mol_type = other DNA
atgaggcaattcccccaataaatcccctctcatccatctatcagtcagtcaatcaatcaatcaatcaatcatctattatctatctacctacctccatccgtttctatcatctatctatca

SEQ ID NO: 10616 - DNA, 120 bp, synthetic construct
  source 1..120: mol_type = other DNA
ttctgagcattctggcctccttgtttcttcctcctttccttggccagttcttactatttttaaagattcagatcaatctttctctgaaagcctttcccgattcttttctttcagtctgct

SEQ ID NO: 10617 - DNA, 120 bp, synthetic construct
  source 1..120: mol_type = other DNA
agagactgggtcttgctctgtcacctaggctggtgcagtggcacaatcatagctcactgtaaccttgaactcctgggctcaagtgattttcccatctcagcctcccaagtacctgggagt

SEQ ID NO: 10618 - DNA, 120 bp, synthetic construct
  source 1..120: mol_type = other DNA
cccactccccaaaaagaagtgtattaattctgctgattgcttttaatcaatatatttggagagaaggttttgttcattttgacagctttctgaataacaatttcagatgctataaatatt

SEQ ID NO: 10619 - DNA, 120 bp, synthetic construct
  source 1..120: mol_type = other DNA
atgcagccaagtcacaaactttgaaatatgttgtatttatattagaatgcaatgtacagaatgatatagtgtcacaaggcagtctctgttttctattctctgctccctcccctgcaactg

SEQ ID NO: 10620 - DNA, 120 bp, synthetic construct
  source 1..120: mol_type = other DNA
tttgccattcattcatgtcgctcagtataccagtagtttgttcatttctattgctaagtagcatcccattctatggatagaccccattttgtctattcattcaccagttgatggacatgt

SEQ ID NO: 10621 - DNA, 120 bp, synthetic construct
  source 1..120: mol_type = other DNA
tgagaccctggtcctggccaacatcttgattgcaagcttcacaaaagagcctgaggcagaggactcaactaagctgtacctgaacttctgacctacagaagctatgagataatcaatgca

SEQ ID NO: 10622 - DNA, 120 bp, synthetic construct
  source 1..120: mol_type = other DNA
tggtaattttgtagatttcttaggatttttctgcataagtaatcacatcatctactgcctcttaaattattttgcaattccccgatactgtataattttagctatgtgttcagtgtatta

SEQ ID NO: 10623 - DNA, 120 bp, synthetic construct
  source 1..120: mol_type = other DNA
cttctgtacctgtatggatgatacaatagatgtccttatccttcaagccagtttgagttggaattctctgctgctttgcagccagaaacagcctaggtaacatttgggtattcaatgaga

SEQ ID NO: 10624 - DNA, 120 bp, synthetic construct
  source 1..120: mol_type = other DNA
ggtgggtggtgtggatcatgctgaggaagaatgacagagatttttgattcatcagctatgcctcccaaactttggacaggtgtcattctatcatatccccatacaacctacacagttatt

SEQ ID NO: 10625 - DNA, 120 bp, synthetic construct
  source 1..120: mol_type = other DNA
ggatatgagttaaaggaatgttcttgtcactaaatgtgctcaaatttcccttcacccgaagagcaagtagccagtgtctgtactaagttagacctgagggaaggaatgattattttattt

SEQ ID NO: 10626 - DNA, 120 bp, synthetic construct
  source 1..120: mol_type = other DNA
gaaatgtccccctcacctccccgacacacacccctgtatgtgttgcaaagcgtaatgactacttggtatttctattttctttttaaacagcaaaaattaaaaagaaaattagccggacac

SEQ ID NO: 10627 - DNA, 120 bp, synthetic construct
  source 1..120: mol_type = other DNA
cttgacaatttccccatacttagagatttctctggggagattagtggtgttattaagaaatgctttttagttattgtgtaacaaaatgtgttcctatttggaagatctgcattagtcagt

SEQ ID NO: 10628 - DNA, 120 bp, synthetic construct
  source 1..120: mol_type = other DNA
ttccagagactggggctggggttggatggggaaaggcaggaggctggccaaagtgtacaaagtttcagtttcatgggagaaataagttctgatgtatcgcacagcactgtgactacagtt

SEQ ID NO: 10629 - DNA, 120 bp, synthetic construct
  source 1..120: mol_type = other DNA
gggtctcaataattatgagtacacaggggtcctgagaccaactgatttgataactactgaactgccgtacagcaagacctcaagctcagaaataactcaggcgctaatgaaagttaaagg

SEQ ID NO: 10630 - DNA, 120 bp, synthetic construct
  source 1..120: mol_type = other DNA
aacgaacaaaaatcttacagacttggtacacgtctcgctgcagataagcccaatcctttcatatactcataatgacagaaatctgtcaaatttctattcctcaaaagagactgaacccta

SEQ ID NO: 10631 - DNA, 120 bp, synthetic construct
  source 1..120: mol_type = other DNA
tcaccttcctttttgtcatttttctcctgtgcttttactatgctcagtctgatattggagaaagtgccagagacagtaaagggagacaaagtagaggaggaggagaaatgtcaaagtagc

SEQ ID NO: 10632 - DNA, 120 bp, synthetic construct
  source 1..120: mol_type = other DNA
acctgggcttaaccctggcttgagcaatttattaaattgctccaggactggctacataatttgccagatccagagcaaaaagaaaatgagaggtcccttgttcaaaaattgggaatttcc

SEQ ID NO: 10633 - DNA, 120 bp, synthetic construct
  source 1..120: mol_type = other DNA
aggtggaggttacagtgagccaagactgcgccattgccctcaagcctgggcaacagagcaagactgcatctcaaaacaataacaacaacaaaccccaggatttattccatatgcaaatat

SEQ ID NO: 10634 - DNA, 120 bp, synthetic construct
  source 1..120: mol_type = other DNA
aatgctgttgttggtttgggagtggggagtgccatttggtaaaatgaaaagaacatggattccaaaggtaggtctcaatttgaatcctatctcaatcatttactagtcatacaatctcca

SEQ ID NO: 10635 - DNA, 120 bp, synthetic construct
  source 1..120: mol_type = other DNA
gaacctgggaggcaaaggttgcagtaagccaagatcacgccattgcactccagcctgggtgacagagcaagattgtcgcaaaaaaaaaaaaaaaaaaagtatttcacagatcccagagca

SEQ ID NO: 10636 - DNA, 120 bp, synthetic construct
  source 1..120: mol_type = other DNA
atttgtgtttgttttatccaggccatagattcctgctctactgctctttttgcctcctgcttctgtttctcagaaaaatagaaaattgactttgctttgttcaggggagtccatggcatg

SEQ ID NO: 10637 - DNA, 120 bp, synthetic construct
  source 1..120: mol_type = other DNA
gttagacataataaaagtgaaagggcagattcaagtccaggaacgtggacagatcttaagaaggaaaatctcctttctttcaatctcccagcttctcaaacccgtagctgagtcttgagc

SEQ ID NO: 10638 - DNA, 120 bp, synthetic construct
  source 1..120: mol_type = other DNA
ccaaatacttctccagatgtatgtgttttgaaaaatcaaatgcaaagtaagtaatggcttaatcagaccgaaccaccataattgaatagcctgaccaattcgtgaaagaactagccatgg

SEQ ID NO: 10639 - DNA, 120 bp, synthetic construct
  source 1..120: mol_type = other DNA
ttcagccccccaaatgcattttcacacaactctattggtaaagaagtatcccttattagaattaaacgacatttgctttcttccccgcaccggctgttacataggtagaaagtgttcaga

SEQ ID NO: 10640 - DNA, 120 bp, synthetic construct
  source 1..120: mol_type = other DNA
gatcacctgaggtcaggagttcaagaccagcctggccaacatggcaaaacgctggtctcttccaaaatttaaaaaacaaaacaaaacaaaaaaacgacacaaatctgaacaagtccctcc

SEQ ID NO: 10641 - DNA, 120 bp, synthetic construct
  source 1..120: mol_type = other DNA
ctcaatctgcccctttgcattggatgttccaacaagcaactggctagcagtataaagggaagctctggcacagattagtcacagattggcaaactttctgaaaaaagcccagatagaaat

SEQ ID NO: 10642 - DNA, 120 bp, synthetic construct
  source 1..120: mol_type = other DNA
ctatcaaccaagagagcaaaataatacactactggacatttccatttttcaccctacacttgcatccctgtgaccaaaatgatgctaatccaaggccatgcaatctgtgcatctgtagga

SEQ ID NO: 10643 - DNA, 120 bp, synthetic construct
  source 1..120: mol_type = other DNA
gaaagaaaaggtaattatttcacataacaaccttgaaagactggtcagtgatcttctcccagattttcataataggagaactaggggtcttggagactgactgaatggcaaaagacagtc

SEQ ID NO: 10644 - DNA, 120 bp, synthetic construct
  source 1..120: mol_type = other DNA
ggtattctgttatgatagtcccagcaaactaatatagtatctcttatggtttccgtgggtcaggaattcatgaccagttcagttggacaatcctggttcatggtcttttatgaggtctct

SEQ ID NO: 10645 - DNA, 120 bp, synthetic construct
  source 1..120: mol_type = other DNA
attctatctagtacatcatgtgttcaactgcagacctagctgttgaaaccaagtgataaggtagattgtcttggtagagatagaggtgtgcctaatcctccacttcttcctgtatccact

SEQ ID NO: 10646 - DNA, 120 bp, synthetic construct
  source 1..120: mol_type = other DNA
tcaggtatattgttacagcaacattaaacagacaagactcaaatctgctggatacatgaatcagctggcaaaagaagagcatagagaattcagactatagaatatgtcctcgattcattt

SEQ ID NO: 10647 - DNA, 120 bp, synthetic construct
  source 1..120: mol_type = other DNA
cgaccctgccactaaaagtatccttgccgaagtcacaacgaccttatgttacacaactagttggctgcatttgatgtcactcaacactcttagtatgtgaaacacgattacacacattcc

SEQ ID NO: 10648 - DNA, 120 bp, synthetic construct
  source 1..120: mol_type = other DNA
ttttccctgttgaaaagaatttcgacttcctctgggatcagctcttccactcatcaagataggatggggtttcctcccacaataacggaacgggttctatcacactccattgtaatgaat

SEQ ID NO: 10649 - DNA, 120 bp, synthetic construct
  source 1..120: mol_type = other DNA
aggaacttagcacataaagatactcaataaaatccaattataaaggagcaaatttctacgaacttgaaactaccacccaccctgctgccagaatgtaatgatatgttctctgcatgccaa

SEQ ID NO: 10650 - DNA, 120 bp, synthetic construct
  source 1..120: mol_type = other DNA
ggattacaggcgtgagccactgcgcccagccaccattcgaacgattttcaagtgtacagttcagttgcagcaagtacattcatactgttgttcagccatcaccaccattcattgccccaa

SEQ ID NO: 10651 - DNA, 120 bp, synthetic construct
  source 1..120: mol_type = other DNA
actgtctcttcttaaatggggttattctaatccatgatccctagtcaaagcctaattttcttttctagaaggttctcccttccctctcccttaatgtaaacactgacagtactccaggct

SEQ ID NO: 10652 - DNA, 120 bp, synthetic construct
  source 1..120: mol_type = other DNA
cctctgcctctgggttcccacggttctcatgcctcagtctcctgactagttgggattacaggtgcccaccaccacgccaagataattttttgtatttttagtaaagacagggtttcacca

SEQ ID NO: 10653 - DNA, 120 bp, synthetic construct
  source 1..120: mol_type = other DNA
gtcatgtcccagatgttaccatttttcattttgtttctttttttcttttttttttcagacagagtctgctctgttacataggggctggagtgcggtgtcatgatctcagctcactgcagt

SEQ ID NO: 10654 - DNA, 120 bp, synthetic construct
  source 1..120: mol_type = other DNA
ctcaccattcctggtgcccaaaacctcaaatggcaagaagccaaattattctgaatgttgaggaaaagctttaaaaaccaatttctagtctcttagaatcagctgtttccagaaacgcct

SEQ ID NO: 10655 - DNA, 120 bp, synthetic construct
  source 1..120: mol_type = other DNA
gaaaagagacacagaaacggatacccagagggaaggcctcgtgctggcagaggcagcgatcggagcaatgcagctgcagccaaggcgcgatggggattgctggcaaacccagaagccagg

SEQ ID NO: 10656 - DNA, 120 bp, synthetic construct
  source 1..120: mol_type = other DNA
ctgttccaaccgtgttcaagtaagacaaatgctgagctgtaaccaatccaggtgtttctgtgccttacttccgctttctgtggtcactttcctttttctgtccatcaatcttcttccacc

SEQ ID NO: 10657 - DNA, 120 bp, synthetic construct
  source 1..120: mol_type = other DNA
cgggctggcacttgggaggcagctctgggtggaagcaggaggagagggttaggacccgaaacttaaaatgtaaaaggccctcacaacaaagtcccaaactcttgaaaaatagaggccagg

SEQ ID NO: 10658 - DNA, 120 bp, synthetic construct
  source 1..120: mol_type = other DNA
gacaatgctgaaaagtagctatgtccatccctgagcagggcatgatcaaaactagccctggccaggtgcggtggctcatgcctgtagccccggcactttgggaggctgagggagaaggat

SEQ ID NO: 10659 - DNA, 120 bp, synthetic construct
  source 1..120: mol_type = other DNA
ctccaagatggagcggtaagtgaagaaagccaactgcagagccatctgtatcgaatgataccatttgtagttttgaaaaaaggaaagaaagtatctatattctgcctgtctgattttgcc

SEQ ID NO: 10660 - DNA, 120 bp, synthetic construct
  source 1..120: mol_type = other DNA
gagtcttgcagcatcaacactttttttttgttttttgcacgatgccaccctgtttacagagggcttacacactctggccccctctgcccctcacagatgaagaaactggtagctggagaa

SEQ ID NO: 10661 - DNA, 120 bp, synthetic construct
  source 1..120: mol_type = other DNA
cgccatgcctggccccccattacttttaaatagaccaatgtatttcttaatcataaggtcaactgctgaactcaaccttgggtctgatcagtaaatgaatagttcctggacagcttccac

SEQ ID NO: 10662 - DNA, 120 bp, synthetic construct
  source 1..120: mol_type = other DNA
gctagagcctcattcctgcctgaggaacggaacgacaagaaggaagtaatgtattctgctgactgttgttacaagagccatgaagtgagaagagcaacatttccattgacactggaggga

SEQ ID NO: 10663 - DNA, 120 bp, synthetic construct
  source 1..120: mol_type = other DNA
gctcagaggcttgcttcattctttgaacatctgagctgcccgtgggctttgtgtgatgagtaagaggtaagaagcaaagcaccctaggacactgaatgataaggcccgtattcagtatgg

SEQ ID NO: 10664 - DNA, 120 bp, synthetic construct
  source 1..120: mol_type = other DNA
atcttcaagaccattctaccattctccaccctccgtgttggtggatgcattccagaatgatccattcaacctgaactattctacctcccacagccccagctgcccaatacttctctgaaa

SEQ ID NO: 10665 - DNA, 120 bp, synthetic construct
  source 1..120: mol_type = other DNA
ttaatccaatctccctatttcacagataggaaacttctaaagtaattgttagttcccattctttatggtcatgtggtccgagtgcctccatcctgtctcacagctcccttctatggaaga

SEQ ID NO: 10666 - DNA, 120 bp, synthetic construct
  source 1..120: mol_type = other DNA
ttccttcttcacgcttgcttggaggtcagagttctacatcatggacccaaaacgtaaccctagatacttcgcttgggcaaaagacaacagcagatatgcatcttgatgttgccacttaga

SEQ ID NO: 10667 - DNA, 120 bp, synthetic construct
  source 1..120: mol_type = other DNA
ccccccccgggctccttgctgagtcagcatggtgactactgtcatttcctagaaggaaataagggaaggacaccaattcaataggagacctgggggactttcatactctcagctgatgcc

SEQ ID NO: 10668 - DNA, 120 bp, synthetic construct
  source 1..120: mol_type = other DNA
agaagtagttcttcaactttcttgaatctcaggacacttggatcatctgacgaaactgatgaatgaagcatgggtacacagatttctctgtctctcaaatcacttcggggcccttctaac

SEQ ID NO: 10669 - DNA, 120 bp, synthetic construct
  source 1..120: mol_type = other DNA
cccagagctcgtttccatggtgccgttcccagctccaggagctctcctcattcacatcatgaagggagaggcagggatcgtgagctctagtggttgtctgcctccagtgattaattggta

SEQ ID NO: 10670 - DNA, 120 bp, synthetic construct
  source 1..120: mol_type = other DNA
accagggttcccggattcaattgtaccacatcatacatgttgcctccatgcaattttctctttagtgccaggtttctagaatcagtgcatgaaaaatgatatctgaatacggtgcttagg

SEQ ID NO: 10671 - DNA, 120 bp, synthetic construct
  source 1..120: mol_type = other DNA
atattcaccatcattaatctttagggctatatacattaaaactacaatgaaacatcactacacctactagaccagctaacgtctacaaaaacctgacaatactaagtgctgacaatgatt

SEQ ID NO: 10672 - DNA, 120 bp, synthetic construct
  source 1..120: mol_type = other DNA
tgggtgttggaattgttctatgtcttgacggtggtgctgattacacaactgcagatgtttctcaaaactctcagaatagcacatttttttttaaaagggtgagttttactctacgtaact

SEQ ID NO: 10673 - DNA, 120 bp, synthetic construct
  source 1..120: mol_type = other DNA
ggccatcagcagccacgctaggcccacgagagggttctatgcaatggctgcaccttgagagcttgctttatttttagctttaaaagttgtgttttaaagacatctatatactgagtataa

SEQ ID NO: 10674 - DNA, 120 bp, synthetic construct
  source 1..120: mol_type = other DNA
aaacatttatttttgattttgttaaaatgcacacaacctaaaattgaccatcttcaagcgcacagttcagcagcattaaccacactgctgtgcagcccccaccaccaccatctccagaac

SEQ ID NO: 10675 - DNA, 120 bp, synthetic construct
  source 1..120: mol_type = other DNA
gggcacagagcctgcagcccggcagagtctgatgacactgtgttgtgtaaattgaagcgacagtcacctgtttctctaagtcatggctcaaacctgtttcctcttatgtgaccataaaat

SEQ ID NO: 10676 - DNA, 120 bp, synthetic construct
  source 1..120: mol_type = other DNA
ctagaatcgccaacacatccccggaagcccagtggcttagcctcctatcagtgcctcctctgcagcccctgccagggctgccaggagctcagccggcctttgttctatttcaccccaacc

SEQ ID NO: 10677 - DNA, 120 bp, synthetic construct
  source 1..120: mol_type = other DNA
accagctgcagcccaccaggcctgctcttggggtcccaacaggcagggagaagtggtggacctgtgtccgagcatcagggggcgctgcaagtgggcatgctgggtgcccagcaggggtac

SEQ ID NO: 10678 - DNA, 120 bp, synthetic construct
  source 1..120: mol_type = other DNA
gggacacggcagagggaggtgcatttttgtgctgttttcctctgtgccagccccctgggaagcaggcactgttgatgccctgtccctaggtctcacttctgagttcgcctgcagctggga

SEQ ID NO: 10679 - DNA, 120 bp, synthetic construct
  source 1..120: mol_type = other DNA
aagttgtgtctctttgacacctgggatgtaagctgtgaaagctaaactgcactgtagttggagactcttgagaaaccgaatgaacaatatttctgaagatctcccacgaaggttgcctcc

SEQ ID NO: 10680 - DNA, 120 bp, synthetic construct
  source 1..120: mol_type = other DNA
catacaagattaatgaaatagttccactgaaatctggtgatggagttctcggcaatgtggtttttgtcctgtcatctcataggaaacaggtctttgaataagtcattgcatcattgcaaa

SEQ ID NO: 10681 - DNA, 120 bp, synthetic construct
  source 1..120: mol_type = other DNA
gaccacagagcattatgcagccttgatgtgccaactgagtcatgcaatgtgctgcacacacgagcacccagcagacgcctgtcctctcctcccctcagctgtcaggcacaagagtccacc

SEQ ID NO: 10682 - DNA, 120 bp, synthetic construct
  source 1..120: mol_type = other DNA
cctgcagtagaaaccaaccttcccacaccttgacttcagccttctggccggcagaactgtgagagagtcagtttctgctgtttgaagccacccggtgtgtggtgctctgttgtgtatggt

SEQ ID NO: 10683 - DNA, 120 bp, synthetic construct
  source 1..120: mol_type = other DNA
gaggcattcatagtcccaagaatcccaagttaaaatactctcaggagaaacaccaagtcctgttattggataataagactctagcatgaattaatgatcagagtgaaggcctggggggca

SEQ ID NO: 10684 - DNA, 120 bp, synthetic construct
  source 1..120: mol_type = other DNA
ccagagaaggaaaggaatgttactacccacatggcagcccccttcaatctccctgccaggcaccacctgcctcctcagataatcatcatcattctttttctatttaaaaaaatttttttg

SEQ ID NO: 10685 - DNA, 120 bp, synthetic construct
  source 1..120: mol_type = other DNA
ataaatgatgctgtatgaacattctatacatatgttccccagaattgctgcttgcttttagttaatgtatttattcagcacagaagacattatagagagatgaggaaaggggaggggccc

SEQ ID NO: 10686 - DNA, 120 bp, synthetic construct
  source 1..120: mol_type = other DNA
cacttcctctcgagcaacaccaaggaaacaagggattatggtgttttttctcttttctcaatcgggttgtaaaacacacacacagatgtacatggattggaaattaatccagccgggaaa

SEQ ID NO: 10687 - DNA, 120 bp, synthetic construct
  source 1..120: mol_type = other DNA
ccttgaagtctggctctggagaccaagctcctgactgctgtctcctcctgcctctttgccctgtagcaccaaaggagaaattaatctttcctcctaggtggtaatgactagttgcaatca

SEQ ID NO: 10688 - DNA, 120 bp, synthetic construct
  source 1..120: mol_type = other DNA
tgcaaattcctagcaggtccctcctactaaacggtggtcggagaagctgctatataatgaccgtttagtgacattcctagaaatgtttcttcccgcccttgagcctgcatttcagcttcc

SEQ ID NO: 10689 - DNA, 120 bp, synthetic construct
  source 1..120: mol_type = other DNA
gctccaaacctccaattgcttcttaccctaaactctccatgcagccagctactgtgaggtattgtgaaaggaaagtcggatgaatcttattatttcttttttggcttactagactctgaa

SEQ ID NO: 10690 - DNA, 120 bp, synthetic construct
  source 1..120: mol_type = other DNA
ttgatgtatactatatgacagtgacattgagtgatgtgatattgagtgctgtttgtgactgtgtgaccctgcatgacacttggtgatgttgagtgatgacattgagtgatgtgacattct

SEQ ID NO: 10691 - DNA, 120 bp, synthetic construct
  source 1..120: mol_type = other DNA
tacagtagagccccacggagcactctcgagtctagaagggtggccggagcccagtgaatagaaactgcactggtgtcttcagctcagttccaagtcggagcagccacctcagcagaaggg

SEQ ID NO: 10692 - DNA, 120 bp, synthetic construct
  source 1..120: mol_type = other DNA
cagtactagccctagagtattgcgagtgctaggaatacagtactaacatgctagggttagagtactaagagtgctaggcttagagtactgagagtgctagacttagagtactaacagtgc

SEQ ID NO: 10693 - DNA, 120 bp, synthetic construct
  source 1..120: mol_type = other DNA
tggcctgccaccgactgggtttggcaccatcacccagaagccgccctcctctgggtttcccaggcgccccaggtggctgggctgtgtctcgggtgatggaggaggtgtacagatcccatg

SEQ ID NO: 10694 - DNA, 120 bp, synthetic construct
  source 1..120: mol_type = other DNA
ggaaatggtgaacagagaaggaagactcaagggcaaaactcccggaaggacagggggtcatggaagaaggaattctgagcctgacatcttagaaaatggatatgcagtttgcagatctac

SEQ ID NO: 10695 - DNA, 120 bp, synthetic construct
  source 1..120: mol_type = other DNA
ttaaatgtagctaccatgacgtatgcatcaaaatcacctacaagtcttatgaaaaatgcaaatttcctggatctcaccccagatcaaatatatcacaatttgggggttcaagtccaagaa

SEQ ID NO: 10696 - DNA, 120 bp, synthetic construct
  source 1..120: mol_type = other DNA
ccaattaaaagcaatttttttttttttttgagatggagtttcgctcttgttgcccaggctggagtgcactggtgtgatcccgactcactgcaacctccgcctcctaggttcaagtgattc

SEQ ID NO: 10697 - DNA, 120 bp, synthetic construct
  source 1..120: mol_type = other DNA
ccgtgcctggccaaaagcaaattttttaaaaattccaatttgagttgtgatctagaaagggaggatggagtggaagaagagaaagatagggggaaggctgaagaattaaagatcatgcca

SEQ ID NO: 10698 - DNA, 120 bp, synthetic construct
  source 1..120: mol_type = other DNA
cagccttgcacttaacaggtgcataataatcccttaggaaggagggtatgggacactgttgccccattctgtagaggtggaaactgaggcttagacataatcaacctaagaatgggactt

SEQ ID NO: 10699 - DNA, 120 bp, synthetic construct
  source 1..120: mol_type = other DNA
acgtatttgcctactatgcctgccaactgggatgaaaaagctttggatctggctaagtttctgtgaaccaggtaataaatctgttcttggtgtgctgaaaatagtggggtttttcagcct

SEQ ID NO: 10700 - DNA, 120 bp, synthetic construct
  source 1..120: mol_type = other DNA
aaacaaaaaaacccaggttttttttgcatcctggggactctgtgagctattcactgcttttaatacatttttgggatccactacaaccagccagaatgaatctctgggcccgtagctgac

SEQ ID NO: 10701 - DNA, 120 bp, synthetic construct
  source 1..120: mol_type = other DNA
ccccagtgagtctggtgtgtgttgagtcctgtcctggcacctgcctctcaagggacctgcattcctgcctgggtcccgcccacagcaccactgtcttgcgatgggcactgtcactcccac

SEQ ID NO: 10702 - DNA, 120 bp, synthetic construct
  source 1..120: mol_type = other DNA
aacaattttcttaaaatagatagaacagaccttgacaccctgaagtcaagcactgacagcctctgttttgaaaacaaagcaccgtcaagctctagaaaatgcatgcagggctccagagcc

SEQ ID NO: 10703 - DNA, 120 bp, synthetic construct
  source 1..120: mol_type = other DNA
ctggggtcccatccctgcagccacccatcctgcatcctgaagcgggggtcctgtcccctctctgcatctcgaaaatgccccttcctgcttcctctgccatctcctcggtcactctggagc

SEQ ID NO: 10704 - DNA, 120 bp, synthetic construct
  source 1..120: mol_type = other DNA
gcctgtaacccgtatttctcattagttggctctctcatttacccccagagacattctttacaatgcaggtgtagactcagatgtgaccaagactttgctatcttataaaaggggttcagc

SEQ ID NO: 10705 - DNA, 120 bp, synthetic construct
  source 1..120: mol_type = other DNA
tctggaaactggctcaagcctaagaattgattgaaggaccatgacgcattcgagctagacttttgttcacttggcctacacttctacttatacagatcgagttagaatgtagtaggcttc

SEQ ID NO: 10706 - DNA, 120 bp, synthetic construct
  source 1..120: mol_type = other DNA
ataaatcctgcccttacggcaaatcaaccttgataaactccacggtaaatcctgcccttaggcatattcctacaccttccctctggagcaccatacctttgccctatgtatagaagccct

SEQ ID NO: 10707 - DNA, 120 bp, synthetic construct
  source 1..120: mol_type = other DNA
aaaaagagggggatcctgccacccgccacccacacacacgaaggacatctgtgtggacatgatgcttgagggaaacaggccagtcacaaacaaatactgtctgattccgctgacgagagg

SEQ ID NO: 10708 - DNA, 120 bp, synthetic construct
  source 1..120: mol_type = other DNA
ccctcccccactttgattttctttgatttttctatcctagggatgaaggtgatctatttttagtgtagaggctggtataaggagttgctatagcgacagctggtggttacaaaccaggtc

SEQ ID NO: 10709 - DNA, 120 bp, synthetic construct
  source 1..120: mol_type = other DNA
ttcagtttgtgcaaattcgtcatctatgatctgtgctcttctccatatgcttacactttagcaaactttgccttaaacatttttagaagttagcacagcattgttagtcaagtatcaaaa

SEQ ID NO: 10710 - DNA, 120 bp, synthetic construct
  source 1..120: mol_type = other DNA
tgggaggcgcagggcagccgggtcagcgttcaggtgctgttcattgatgaactcactagcattagctgatgtgtcatctcttccagccaaaagtggggcccagccaagcatcttagtgat

SEQ ID NO: 10711 - DNA, 120 bp, synthetic construct
  source 1..120: mol_type = other DNA
gctgctttgctaccctgccaccctgtgaggtgacagccgcctggcctgctgagtgactccgggagtcctcggggagcagcacctctgggagagctgggccacttgtccagggttccacca

SEQ ID NO: 10712 - DNA, 120 bp, synthetic construct
  source 1..120: mol_type = other DNA
acctggtgatgaaaatacgtttgccatcgaaacaaggcagacgcaaaaggacaaacactacgtgattctatttctaggaggtccctggagttatcacattcgtagaaagtagaatggtgt

SEQ ID NO: 10713 - DNA, 120 bp, synthetic construct
  source 1..120: mol_type = other DNA
aaaataaaaagaaaatttctattggaaaaaggcaaacatatatattgggaaatttcagggcaaaaccaatagtgataccagcagccaggccagcagatgggcgccagaggcagtgtgagg

SEQ ID NO: 10714 - DNA, 120 bp, synthetic construct
  source 1..120: mol_type = other DNA
gacctgtgccaacagcctaggtgggcttcctgtggagaggagggaggagaagtcaatgacagggatttcatgaccctcacagaagctttctcagggagaagaggcctcatctaagatttt

SEQ ID NO: 10715 - DNA, 120 bp, synthetic construct
  source 1..120: mol_type = other DNA
attctatctccgggaataactgtatgaaggagagggcgttgctgagagggaatttaaaacacaaaaccctgaagcaatccttcttggagaacagggagcaaccctgggctggaacgtttt

SEQ ID NO: 10716 - DNA, 120 bp, synthetic construct
  source 1..120: mol_type = other DNA
tctacagtagataagtgtttattactttattacttaaataaaagtcatctttttagaccgtgttagtgagtctcccgtctaggattccatccctcctctccctgctcagggctgggtgtc

SEQ ID NO: 10717 - DNA, 120 bp, synthetic construct
  source 1..120: mol_type = other DNA
ttacctttttctttttctgctcttccagttttcatttacagttcagacattttgccaaagtcacctccctgttacacataatgacaatatttttccacttaacacatcacattccggtca

SEQ ID NO: 10718 - DNA, 120 bp, synthetic construct
  source 1..120: mol_type = other DNA
ttaataaatgaaatctgacatctaattttgagtgggcaggtcttaaccaggtgtggagctaagaaagctttggaatcgacctgtgtggctgcagacagacaagggcaaaacccactccaa

SEQ ID NO: 10719 - DNA, 120 bp, synthetic construct
  source 1..120: mol_type = other DNA
gctgcacctccggccacagcagctggagcgtcagcccggctgtccttaagtagcaagaagctgccggaagcgcaaacagaacttcgcaggggatttgttgatgtagttaaggtcagctgc

SEQ ID NO: 10720 - DNA, 120 bp, synthetic construct
  source 1..120: mol_type = other DNA
tgtctgatagcctcactaaagttacctgctttgctactaaccagctttgtgaccatcagaaagttacttcccatttctgaacctcagtttcccccttagtgaactaagacaagaccaggt

SEQ ID NO: 10721 - DNA, 120 bp, synthetic construct
  source 1..120: mol_type = other DNA
cccacggggcctccatccacagaagccagagatgcccagatctgccactcccacggggcctccatccacagaagccagagatgcccagatctgccactcccacggggcctccatccacag

SEQ ID NO: 10722 - DNA, 120 bp, synthetic construct
  source 1..120: mol_type = other DNA
cctgatttcccacttcacacctctatatttctgtgtgtgtgtctttaattcctctagtaccactggagttgttggcccagtcactgcagatgcctgatgagataaagatggctccaggct

SEQ ID NO: 10723 - DNA, 120 bp, synthetic construct
  source 1..120: mol_type = other DNA
cccggctggaattttctaacctacctgctttcgcttacaccatttgccctgcctcctaagcccgtggttttcagctctgcctgctgaaaccccatgaaacccttacggcccaatccagag

SEQ ID NO: 10724 - DNA, 120 bp, synthetic construct
  source 1..120: mol_type = other DNA
cacaaaataggtcttgctctcagtgactttgcaaatgagctggagacaaagataaacaatgctaactgcatgaaaaagccgtgagtatgtgagccgtggctgcaagtgtcgtcagcacaa

SEQ ID NO: 10725 - DNA, 120 bp, synthetic construct
  source 1..120: mol_type = other DNA
gtattgaaatttgtgtggaaaataaccagcaacttaggcaggcctgacgtttccgtgcttgagtttaaatggtcattcattcaacaggtagttattaaacctctagtaagcgtgcagggc

SEQ ID NO: 10726 - DNA, 120 bp, synthetic construct
  source 1..120: mol_type = other DNA
ataaaataaaaagtccttatttgcattaaagccacctcgcaacacagaccagacgagtcaggaggctacaacaagctgacctgccttgtgggtacaccgtactctggaagcacaaagccg

SEQ ID NO: 10727 - DNA, 120 bp, synthetic construct
  source 1..120: mol_type = other DNA
actgttagcatgcttcattgttttctggcttttggtttaattttctccccagctagactgaaagctccccgatgacaggtatctcacccgcagaagaaagaaaaggagcgattactgagt

SEQ ID NO: 10728 - DNA, 120 bp, synthetic construct
  source 1..120: mol_type = other DNA
aagcccaccctatctctggacttccaattatatcaaaaccaaatttttgaaaagaccccaagctttccgtctcatcaaagccactttgcatgttatgtgaagctgcaaatagtctccttg

SEQ ID NO: 10729 - DNA, 120 bp, synthetic construct
  source 1..120: mol_type = other DNA
aggtgaggatgcactactcaaaaacttcccgctcatcctgaacctttgcggatcacgaggccatacctgcaaagcacccagtcccctgcacggctgcgttccaaaccacatctcattatg

SEQ ID NO: 10730 - DNA, 120 bp, synthetic construct
  source 1..120: mol_type = other DNA
caatggcttctgaaaaccagattctgaaactctgcaggccagccatttgggttttctgtttaattctctttaagtgatttaattctcttacaagtgctgaagtgagctgggaatgcaccg

SEQ ID NO: 10731 - DNA, 120 bp, synthetic construct
  source 1..120: mol_type = other DNA
catttcacgtcctgaatgaggaatgaagggattttctcagtaacaatttactctttttaaccacacatactaagaaaactttattcgcagcaaattgtgatggggcgggggagagggtag

SEQ ID NO: 10732 - DNA, 120 bp, synthetic construct
  source 1..120: mol_type = other DNA
gatgttactacattcacggacatcactcacctcaaattcttttctgtttatagcatcactctcagtggggctaagggggtgaaaatcacctcttggagggggcaaaaaaacttacttttt

SEQ ID NO: 10733 - DNA, 120 bp, synthetic construct
  source 1..120: mol_type = other DNA
atcagcaaggtacattctcaaaaactccctttggcaaaagctaaaataaaaataaaaaaggttgcaaaactccgtcatcagcagcggcaaggaggaaagaacatccgtgccgtgccacct

SEQ ID NO: 10734 - DNA, 120 bp, synthetic construct
  source 1..120: mol_type = other DNA
aggtggccaaaaggtacaagaaaagatgctaaactttactagggaactgcaaatcaaaacagcaatggtagaccacttcacatcctctaggacaaccacactgaaaaaaaaaaaaaaaag

SEQ ID NO: 10735 - DNA, 120 bp, synthetic construct
  source 1..120: mol_type = other DNA
gtcgcacaacactgtgactactgagttatatactttaacactgttaaggtggccaggcacagtggtatgttcctgtcgtcccagctactaaggaggctaaggtgggaggatcacttgggc

SEQ ID NO: 10736 - DNA, 120 bp, synthetic construct
  source 1..120: mol_type = other DNA
gacaggcacatgtctccatgcccagctatttttgtttgtttgtttgtttgtttgtttgtttggtagagacagggtctcgctacggtcttgaactcctgagctcaagcaatcctcctgcct

SEQ ID NO: 10737 - DNA, 120 bp, synthetic construct
  source 1..120: mol_type = other DNA
ggcaagaaatacatatcaatcctaaaactagcaagtgaaagtttgatgagaaagaagacatttacacaatcccaaagtaggtccccctgaagccctgactggtgacaagggggaaagtaa

SEQ ID NO: 10738 - DNA, 120 bp, synthetic construct
  source 1..120: mol_type = other DNA
gagatcgtgagaaatgagatatgggcagatctggtgaaatgctaacatcgggcaatctgggtgaaaaggatatgagaactctttgtattatttttgtgactttatgtttgaaattgtcaa

SEQ ID NO: 10739 - DNA, 120 bp, synthetic construct
  source 1..120: mol_type = other DNA
tggctgaacttttcaggaaacttggatgccgcacatacttttcctttctttgtgggcaggcaagatgagtcacgtttttctggagtctgctcagccccagtattcagacctcatcagctg

SEQ ID NO: 10740 - DNA, 120 bp, synthetic construct
  source 1..120: mol_type = other DNA
gttgaacaggggatgacatgatgggatttatgttttaaaaacaggagttggcaaattactacccaatggcccaatcctgctggccacctgcttttataaatacttattggaacacagctg

SEQ ID NO: 10741 - DNA, 120 bp, synthetic construct
  source 1..120: mol_type = other DNA
aggaacacacaccacacacgtgactgcaacgaaggaagtgtgggttccttttaacgtaggagccaccagagcttccccaggaacctctctgcctctgaggcaccaaaggtttcctgtcct

SEQ ID NO: 10742 - DNA, 120 bp, synthetic construct
  source 1..120: mol_type = other DNA
gctgggatataaaggaagagctgtctgtgatccaacgctgaaatggtgtgaaaggacctgaagttttacaagttaaataaacttctctgaaagactcattcgaatttcaaacagctccca

SEQ ID NO: 10743 - DNA, 120 bp, synthetic construct
  source 1..120: mol_type = other DNA
agagtagccttcggtgtaatcaaagtaggtggctgtctaggccagtgattttcaactcttttttttttttctagtaggacaaagataatgtcccaatgtccagcagggctgatcctgtca

SEQ ID NO: 10744 - DNA, 120 bp, synthetic construct
  source 1..120: mol_type = other DNA
aatgtatctccagatccactgcagggacccctcactgctcaccccagccctgtctctaccatctctttactgcacagtagccagacatctctctgcattgcatccgatcgacatccgatg

SEQ ID NO: 10745 - DNA, 120 bp, synthetic construct
  source 1..120: mol_type = other DNA
accccgacctactctctcacccagactttttctacgagtgaactcagatgtaaacagacattcagaaaataaaggtgaaaaggcatctaatattgaggccacattgtcttgaatgaggga

SEQ ID NO: 10746 - DNA, 120 bp, synthetic construct
  source 1..120: mol_type = other DNA
gcttcgtggcatgaacagaaaaaaataactgaaaggaggctaagccacaaggatgcttatcacctacaataacgaacagttagtaggtaggcagttgcaaagcaggtcagcttagcgaaa

SEQ ID NO: 10747 - DNA, 120 bp, synthetic construct
  source 1..120: mol_type = other DNA
aaactgctaacctctgagccttcaggtagactgacttgatttgatagataactgtcctgcatggcatgaccggactcatgtcagttaactctttctttactgtgacgccgtggtctcagt

SEQ ID NO: 10748 - DNA, 120 bp, synthetic construct
  source 1..120: mol_type = other DNA
attggactcaaaccccactgaagctcactgctaaacactgaggggtgggggacacaagagaggtccatctgcaaccctaagaagcatcctttacagagcagacggcacattcagacacat

SEQ ID NO: 10749 - DNA, 120 bp, synthetic construct
  source 1..120: mol_type = other DNA
agaggagctcctggctcttgcacaagcaccaagctcctggcacagatgcatccacctgcgcttctgaccccagggccttgaaggaagttcgctggctcctcagccactgccccacacgct

SEQ ID NO: 10750 - DNA, 120 bp, synthetic construct
  source 1..120: mol_type = other DNA
acccagaggttggcgcccttccttggatgctttttcattttgctatttgtcctttaagctaacaaacactcaactccagctctgatttgctgacacctgagctgagggcctagggacctg

SEQ ID NO: 10751 - DNA, 120 bp, synthetic construct
  source 1..120: mol_type = other DNA
gctccctgggtctccgtcatcactgggccttcttttaaggacaccagtcattctggactgagggcccacatgaatgacctcatcttaaataattacacctgccatgaccctatttccaag

SEQ ID NO: 10752 - DNA, 120 bp, synthetic construct
  source 1..120: mol_type = other DNA
ccaacttcacttacagcagtaaagcccatttatcaaaatctatttcctttaaatgatggtaggaacggggaagaagtgaggtgggggagaaacttacaggaagagtcttgtcaaaaggag

SEQ ID NO: 10753 - DNA, 120 bp, synthetic construct
  source 1..120: mol_type = other DNA
cggagactgggggctgtgcttccaagccaaggaatggcagtgatgaccagcacagaccaggagaaagaacagacgcatggaacagaccccctcacagcctcagaaggagccggccctgcc

SEQ ID NO: 10754 - DNA, 120 bp, synthetic construct
  source 1..120: mol_type = other DNA
gtcatcattcatgaggccaaacttcctgcccaaattttaggatattcttgaggtaaggggaatacgcctgcaatgaccccaccaaaaccccattagcaacggcaaagcttaaataaatca

SEQ ID NO: 10755 - DNA, 120 bp, synthetic construct
  source 1..120: mol_type = other DNA
agtcacaagaagaaactaacccaggcagaaaggctgtgaacaaacctcagtcaagcaaagaagagaagacaagtgaaagtaaacatcaaagaaaatggcccaggaactttgaatgcagtt

SEQ ID NO: 10756 - DNA, 120 bp, synthetic construct
  source 1..120: mol_type = other DNA
ccaagggttaaatggaaacctgcccttttgaaagacttgctccattcctgagatcaaccagctgtctgatgctgccccttccttttgcaggttcgacacaaccgaccagcattccttcct

SEQ ID NO: 10757 - DNA, 120 bp, synthetic construct
  source 1..120: mol_type = other DNA
cacatttaccattgcagaaattatgccaaagcatgatcaaattatctgcccacaatgtataggttgcttacaaaaataaccagccctcctctgttccttacttcaggctctaagatctgc

SEQ ID NO: 10758 - DNA, 120 bp, synthetic construct
  source 1..120: mol_type = other DNA
ttatattgttgttttgtttcattttctatttggagtgggaagctgtatggaagtggtcatcttgatgtcatcaatgataattgcctctgtcccttcacagtttctggacccggtcgggct

SEQ ID NO: 10759 - DNA, 120 bp, synthetic construct
  source 1..120: mol_type = other DNA
gcctgacatcccaagatttagatattcaaatgttttggaggtacattacttaaaacacttaaagtttagttccacacggaaattattttggtgtgaccaagagccaggtgtggtggttca

SEQ ID NO: 10760 - DNA, 120 bp, synthetic construct
  source 1..120: mol_type = other DNA
ctttaccacttggtagctgtgtggcctttgttccacaacttaagccctcgtgcctcagtttctagtttggtaaacattgtacaaatagaagagttgctatgaagattgaaagaattacat

SEQ ID NO: 10761 - DNA, 120 bp, synthetic construct
  source 1..120: mol_type = other DNA
agaaccatggtccccatctgtgttccccctcctgtcttagagtgtcttagaagattgaattacctctttttcctttttcatttctccctctgaaatgacagtgatcataattttcatctt

SEQ ID NO: 10762 - DNA, 120 bp, synthetic construct; identical to SEQ ID NO: 3538
  source 1..120: mol_type = other DNA

SEQ ID NO: 10763 - DNA, 120 bp, synthetic construct
  source 1..120: mol_type = other DNA
gccttctccatagtacctgacaagccagaagagtgaacctggggattttctaccaaggacattgaagggccttggaaatactcaacagaaaaaggcagccgaaaggagccaggagtcagg

SEQ ID NO: 10764 - DNA, 120 bp, synthetic construct
  source 1..120: mol_type = other DNA
tcttggatccacctctgatagaggttgagtgtttcttccccgctctcaggttgaaattggatccccggtgttggaggtggggccccgtgggaggtgtttgggtcctgggggcagatgcct

SEQ ID NO: 10765 - DNA, 120 bp, synthetic construct
  source 1..120: mol_type = other DNA
cattaaacattttactacaataccaagatctcggtgaattggttttatctgtgcagtgggcatgaggctcccactggatggctgtgccctccccagaagcagatgctggcaccatgcctc

SEQ ID NO: 10766 - DNA, 120 bp, synthetic construct
  source 1..120: mol_type = other DNA
gaatactttaagaaattgatatggtttcaaaaagagatttttccagacccagtttctaaaagaacagctcatttcccaggctgaacagtggacagcaccaaacctcccaccaaatgctgt

SEQ ID NO: 10767 - DNA, 120 bp, synthetic construct
  source 1..120: mol_type = other DNA
ctcatctctagacgatgtttatacaaggagatggggaaagaaaggggcaccttaaggctaaagtgcacaaacttaaaggaaattgtgacaaccccacagccttgagtgaggggtgtgtgt

SEQ ID NO: 10768 - DNA, 120 bp, synthetic construct
  source 1..120: mol_type = other DNA
gtcatctgattgtccatacaagctgtactgtgagtatcaggatgtttacagttaacccaaggaccttgctggaccagaaggattacgctttgatagattagcatgggaagaaagtgacag

SEQ ID NO: 10769 - DNA, 120 bp, synthetic construct
  source 1..120: mol_type = other DNA
ctgaccacacaggactgcagtcctcttgcctgcctataagatccctatgttccagaacagagcgggcctggagctccatcctgagacctcagtcctaggtgatgatgaatttttcacctc

SEQ ID NO: 10770 - DNA, 120 bp, synthetic construct
  source 1..120: mol_type = other DNA
ttgaacgtcagatgaagccgcgtgaggccaggaagcacacggtgcgtggtaaacagctcttgtcctaccacttgggaaacttgcaagcaacactgagtggaaaggacctcagagatgacc

SEQ ID NO: 10771 - DNA, 120 bp, synthetic construct
  source 1..120: mol_type = other DNA
aaaaaaaaaaaaaaaagaggttcttcttcaagtggtgggtgctgtgtgtgcaggtctagggtgggatgggggctgagagaagccagtaggaacaacacacacaggcaccagggtggtcct

SEQ ID NO: 10772 - DNA, 120 bp, synthetic construct
  source 1..120: mol_type = other DNA
gggggaagttgagccatgagcccctggagaaccagtcatgaaaggccagtttaaccatatttgatgagcaagggggaccccaggattatcctgaatggggttccattctgtattctgaat

SEQ ID NO: 10773 - DNA, 120 bp, synthetic construct
  source 1..120: mol_type = other DNA
tctccagagccccccaccccaccccacactctttctggccacctgaccctacacagtcaacaacctcctcgagacactagtttcctaatgggagggaaattcaccagtgcaggagggacg

SEQ ID NO: 10774 - DNA, 120 bp, synthetic construct
  source 1..120: mol_type = other DNA
ctgggactaaaggagtcaggaaggcaggcagaaagggtggagggaggagagcccgtctcaggctattctgctgatggacatgattttaccccacagcacggaacatgggtccagggacat

SEQ ID NO: 10775 - DNA, 120 bp, synthetic construct
  source 1..120: mol_type = other DNA
cccaggacctcagaatgtgactgtatttggagatagggtctttaagcaggcaattaatttaaaatgaggtcattaaggtgggccctagtccaatatgactggtgtccttcaaggaagaga

SEQ ID NO: 10776 - DNA, 120 bp, synthetic construct
  source 1..120: mol_type = other DNA
tggagaaatgtccattcaggccatttgtctatcttgtttggagaaatgtctattcaactcctttgcccattttttaattgggttgattgtggttgaattgtttatatattctggttatta

SEQ ID NO: 10777 - DNA, 120 bp, synthetic construct
  source 1..120: mol_type = other DNA
ccctgggggtccaggcctacacccactctcacccagttccctcttgggccacctaattattgtccaaattgttcagccttccctgtttggatctgtgctccaagtctctgcttaaagagc

SEQ ID NO: 10778 - DNA, 120 bp, synthetic construct
  source 1..120: mol_type = other DNA
tatgtgtcctgcaaagcccaagtcaaacacactctctggctgagagtcaccctcagacagaattaattatctcttattaattatcctagactgtgtcccacagtactttagatacacctt

SEQ ID NO: 10779 - DNA, 120 bp, synthetic construct
  source 1..120: mol_type = other DNA
cccagcaagtcccagtattctaatcttggctctcatctccagagctcaccaggaaacatcacgcatcttggggccggtgtgggaaaatctctaactgcaactatggcaactagagtcttg

SEQ ID NO: 10780 - DNA, 120 bp, synthetic construct
  source 1..120: mol_type = other DNA
agcatgtcctgtaaccaggtccacctgctcctagctcagaactctttctatgaaactttaccacctccttggagtggttcagttccagtaatagaaaaacaatttggtatcagaggctat

SEQ ID NO: 10781 - DNA, 120 bp, synthetic construct
  source 1..120: mol_type = other DNA
gaacattgtaaaggactcccattagactcagaataagatgcatgttctcatctcctatcttcatcatcaaaataatttcctcctactctcaaacgaccaaagactctccactgctctcag

SEQ ID NO: 10782 - DNA, 120 bp, synthetic construct
  source 1..120: mol_type = other DNA
attcttggtactgatgggcggcaggaggtgaccagagccaggtcaattggagcctttgaaaaacattcatgttatataaccactctcagaaaaataaggaacaaatattgaatcactgga

SEQ ID NO: 10783 - DNA, 120 bp, synthetic construct
  source 1..120: mol_type = other DNA
ctcaaccaaggcctgagatcgggtttcagaggcttctgcaaagacactggctgtcccccttataattagagagctgtctttatcccgttcccaaggtgaaagccaagatgattcatgact

SEQ ID NO: 10784 - DNA, 120 bp, synthetic construct
  source 1..120: mol_type = other DNA
tttgcagacgtggatgacatctacagtcagtgacttgaagtgaagcagatcatgctgaatgatgtgggtgggcctcccccaatccgcagcaggcctgaagagggaaaacagagggttctg

SEQ ID NO: 10785 - DNA, 120 bp, synthetic construct
  source 1..120: mol_type = other DNA
tcgggataagggaatgacatcctgatgcgccacctccagcccctgtacggagggaacagcccttcatttctaggactgtcttcagctctgacattatgattctaccaagacagggtgtga

SEQ ID NO: 10786 - DNA, 120 bp, synthetic construct
  source 1..120: mol_type = other DNA
tgcaaaggctgccacctcagtgcttccagaatctcaactgtccatatttacagagccatacatcaaaagattcttccccaacactttctacgggtacccaaggactccttctactccatc

SEQ ID NO: 10787 - DNA, 120 bp, synthetic construct
  source 1..120: mol_type = other DNA
tgtacccagcctgaataaaatgtacttcctattgtgttgtgggtgaaaaagtctgaaaaattctgcattagataagctttgaaatcatgcaggtagatttcagggaacagagaagagctg

SEQ ID NO: 10788 - DNA, 120 bp, synthetic construct
  source 1..120: mol_type = other DNA
ttctaaccaaggtcccttttgatcatgtcatgctcttatagctgcttctgactttctagcttgtgtttccactacataagctggtaacagtaactcttacaggattgcaacgggctggcc

SEQ ID NO: 10789 - DNA, 120 bp, synthetic construct
  source 1..120: mol_type = other DNA
ccagctcctccaaggccttcccaaaacaaattctgttccaggccatcccacctcccagcaccgcaatgacactcctccttcgaacacatccaggtgggccccagggccacgctggtcact

SEQ ID NO: 10790 - DNA, 120 bp, synthetic construct
  source 1..120: mol_type = other DNA
tcagagatgctggaggtcataggttccccaggaaatgggaactggagaggtcaattcttcctgtatccacggctccaggtccttctagaacacagagaaaggtgcatgccatgctcccag

SEQ ID NO: 10791 - DNA, 120 bp, synthetic construct
  source 1..120: mol_type = other DNA
tcacctacacctgtcagaagggtttgggatctttctttctcatggagaaagtgcagaagattctgggtcaggccctgtgggacatccctagagccagaggaccgtcccctttgtgtagtt

SEQ ID NO: 10792 - DNA, 120 bp, synthetic construct
  source 1..120: mol_type = other DNA
ctggggagccggaattccttgattctgatgatttgcgattaaaacactttgtataggaatttaaggcgatctttatcatattggggttcaaggacagccatcagtaagaaattttctccc

SEQ ID NO: 10793 - DNA, 120 bp, synthetic construct
  source 1..120: mol_type = other DNA
aataggattcaaaagtcaaaacataacaacctgtaattgaagagtcatacccttggcccagccatgccatgtccccagaggaaccacttttagttgcgtagacagctagggttgctttat

SEQ ID NO: 10794 - DNA, 120 bp, synthetic construct
  source 1..120: mol_type = other DNA
aacagaaatgcagcagaaaccacaccacctgacttctgggttaggtgagaaggaacctcgcagttcctcctggatctcttgtaatgtctgccgcgggtgaaaccagctgccacgttagga

SEQ ID NO: 10795 - DNA, 120 bp, synthetic construct
  source 1..120: mol_type = other DNA
ttccaccttaccttcaggtttgccaagatccttccccaacgtacaagtgaaagggagctcaggaaggcagaatgaagggacacatcaaatccttggtgacaaagtttaggacaggctggg

SEQ ID NO: 10796 - DNA, 120 bp, synthetic construct
  source 1..120: mol_type = other DNA
aagaccagcctgggcaacatggcaaaaccctgtctctactaacactataaaaagttagctgggcgtgttggtgcatgctgtagtcccagctactcaggaggctgagccacgagaatcgct

SEQ ID NO: 10797 - DNA, 120 bp, synthetic construct
  source 1..120: mol_type = other DNA
ttcagaggaagccaggagcgagaactcgtgcatccgaacccttctctgacttggcgggttattggattagctactctcagaagacccaaaaggcataggggagagaagagataaatctgg

SEQ ID NO: 10798 - DNA, 120 bp, synthetic construct
  source 1..120: mol_type = other DNA
aggctatccgctgacatcttttctccccagtcaggagacagtaggggagatggttctcatagatcaagtcgggctttgagaaggaaggtgaacaggagaaaaaaaaaaatagaggcctca

SEQ ID NO: 10799 - DNA, 120 bp, synthetic construct
  source 1..120: mol_type = other DNA
attggtgagaatatttctaaaagtgtcctgcacatttccctgctttgatgaatggaacggcagggcaggatttaactgtctgatggctacggttttgggaaagtgccagaacctccacgt

SEQ ID NO: 10800 - DNA, 120 bp, synthetic construct
  source 1..120: mol_type = other DNA
acaataaaatgccaccacataccttgcccacaaaataaaatcaaaacaaacacctaagtctggctttgcttttcttctgctctctccctacctcccctgggtcagagcacagggggagag

SEQ ID NO: 10801 - DNA, 120 bp, synthetic construct
  source 1..120: mol_type = other DNA
ttttctcttaactcataattcagtaattgaggctagagctttgccatctcacattaaacccttttaggactccagggccttaactcacacttgtgggaaggatgtttggttcaggccaat

SEQ ID NO: 10802 - DNA, 120 bp, synthetic construct
  source 1..120: mol_type = other DNA
gactggtctgtggggcatctctggggaggagagacctgaatacttttaaaggaagaaaaagatctatagtttgaaagagcgctgtgaaggagttggataaatccaagatggattccatta

SEQ ID NO: 10803 - DNA, 120 bp, synthetic construct
  source 1..120: mol_type = other DNA
attgtaaggaaaaaaaaaaaaaaggacatggcttactcaaagtgccatgcatcaatgtcacagaagggcgacaagagggatgctgggtgagctccgaatctagtactttccagcctgcag

SEQ ID NO: 10804 - DNA, 120 bp, synthetic construct
  source 1..120: mol_type = other DNA
aaggagaaaacatacagcttccgtggagagaaggaacattttgctcagccttggggtatctgatttaataagaggctcttggagaacaaagccacaattcagcatcagtcttacacacca

SEQ ID NO: 10805 - DNA, 120 bp, synthetic construct
  source 1..120: mol_type = other DNA
gaaatccccatttacactccattcccccaactccaaccagacagcctgcaaacatcatccaggagacaacatggtctctgcctatatcagccatgtctctgattttctgtattctgatgc

SEQ ID NO: 10806 - DNA, 120 bp, synthetic construct
  source 1..120: mol_type = other DNA
ctgttttttgttttttttttgtccgtagaatgagccatgtgttatgggatgttcctcaaggtccctttcagaccagagcattaatattctgtgtcaacaacccaggtccaagtcctggat

SEQ ID NO: 10807 - DNA, 120 bp, synthetic construct
  source 1..120: mol_type = other DNA
acaacagagcctagtagatcacagatacttagcaaagcctgaagaccattttggtgcatggggctggtgtcagaatcagaagtgaaaaggcaatgccttcctgaagcacatcccctcgga

SEQ ID NO: 10808 - DNA, 120 bp, synthetic construct
  source 1..120: mol_type = other DNA
ctccccagcctggctccgtacagcacatcctaacagggccactgtccctttattcatttttgtttatttttatcatctagtttttctgtggctcatgcttgtttattacttgcataatta

SEQ ID NO: 10809 - DNA, 120 bp, synthetic construct
  source 1..120: mol_type = other DNA
ccagcatttgagattgactgggcctggtgggatgtagacggtgtggcattttactttggaacctcattcctatgacagcttgaggccagtgccctgtactcatgaactctgtgcaatatg

SEQ ID NO: 10810 - DNA, 120 bp, synthetic construct
  source 1..120: mol_type = other DNA
gctaagaccaggtgttcctgattttatgccagcacctgataaggaagagatatgcctatccactggaaaaccggctgagactttgtcccgtgaccccacagtgacttgtctaactccagt

SEQ ID NO: 10811 - DNA, 120 bp, synthetic construct
  source 1..120: mol_type = other DNA
acagggtcaatgtccagtcaaggcaagagctcctcagacctgataagcaggagccactgtctggagatgagcgccaccttcaacagaaggaacttggcacttgggaagccccattttctt

SEQ ID NO: 10812 - DNA, 120 bp, synthetic construct
  source 1..120: mol_type = other DNA
ttaataataattatgcccaccccacagggttactgtgaggattaaatccgtatgtatgtatgtacatgcacacacatacacacacgcgcacatatgcacatctgtaggctgagttttacg

SEQ ID NO: 10813 - DNA, 120 bp, synthetic construct
  source 1..120: mol_type = other DNA
cctgcctccacacctccacgtcacactccctccctccccacaaaaggttgcccaatgaatccacaacacagaatgttcagccctgattcaaaaatgaaacaaacaagaaaacaacctcca

SEQ ID NO: 10814 - DNA, 120 bp, synthetic construct
  source 1..120: mol_type = other DNA
ggatgggggctggaaaggaggtaaagtccacccctggctaaatcattcgtctacctggagagaaaattagaacctctggggagttttcaaaaactagatcccaattaagaactactgaat

SEQ ID NO: 10815 - DNA, 120 bp, synthetic construct
  source 1..120: mol_type = other DNA
ctggttcctgacttccacattctaagaagatacagaagtgattggattatgctgcttgtgttaacatcaaggtttgtggaaggtagtgcagatagttgccggaactcctaagccgcggtg

SEQ ID NO: 10816 - DNA, 120 bp, synthetic construct
  source 1..120: mol_type = other DNA
actctgtctccaaaaaaaacagaaggtcatttgttggcttctttgccctggcattgctatttgaatcaaattcgaattaaagggcctttgagaatgtagtcctaaacccaaataggacac

SEQ ID NO: 10817 - DNA, 120 bp, synthetic construct
  source 1..120: mol_type = other DNA
ctgtcaccctaacaggtagagtaccttttccccagttggtatgcaaagctgtgcacccaccaccgccctgccctaaacacccccacccatccattctctctttctccatctctcctgact

SEQ ID NO: 10818 - DNA, 120 bp, synthetic construct
  source 1..120: mol_type = other DNA
gtgtttctgtattgcacacatacatcacggcagagactgtggtcaggaaaggctgtattgagaaaaaaaaggccacctttctacaagccagtgaaaatcaggtttggagaaaatttaaca

SEQ ID NO: 10819 - DNA, 120 bp, synthetic construct
  source 1..120: mol_type = other DNA
cttccaatgccagagcctacgtgcctccaagggcagccccaggaggaccacgtggcctccgtcttggtgctgttgttcctgatattgtaatagtggatgtgggcgcttccctgggttcca

SEQ ID NO: 10820 - DNA, 120 bp, synthetic construct
  source 1..120: mol_type = other DNA
ccgaaagcataggtaacaaaagaaaaaacaaaagcaactggacctcatcaaaatgaaaacttctgtgcttcaaagcacaccatcaagaagatggaaagacaacccaaagaatgaatcata

SEQ ID NO: 10821 - DNA, 120 bp, synthetic construct
  source 1..120: mol_type = other DNA
gcctccattggtcattagtgatgtcagctggggaggggcctggacagaaccacactttctgcgttatagaatccaaggttattgaggatttcattctagatggagaaatgggatggaatg

SEQ ID NO: 10822 - DNA, 120 bp, synthetic construct
  source 1..120: mol_type = other DNA
acacatgttgtgctctctcacctggagtgacttcgagtcatccaatgtcactaaaaatcctttcttttaggtgaaggagtttccctcacttaattctcccaagaaagattcacgaatgac

SEQ ID NO: 10823 - DNA, 120 bp, synthetic construct
  source 1..120: mol_type = other DNA
gttaatggctatggtcagcggagttctgggccaatccttacagcaggtttaggcaaacacgtgcccttgtttcactgatgtggcaggaaaacgtgttctgatattcatttgtatgttccc

SEQ ID NO: 10824 - DNA, 120 bp, synthetic construct
  source 1..120: mol_type = other DNA
cccatcctcagaccttccctccctcttctctaggtaataaatgggcagcctcccagagacccctatcccaggcgagcagttaggacggtggccatttccagggaggccccgtgccctgac

SEQ ID NO: 10825 - DNA, 120 bp, synthetic construct
  source 1..120: mol_type = other DNA
gtttggagaaataacacttcccctgtgattaacacattcagaaaggggcaaaggggaggttggcacgaggcaagcccagaatccaactggcataaaaaataagtccttaatgaggaaagg

SEQ ID NO: 10826 - DNA, 120 bp, synthetic construct
  source 1..120: mol_type = other DNA
gccattgttttcaggggaggtgcagggttagcttcctgggagcctctggccacgtttttgtcaaccaatcagtacatcacgttgtttgatgtgggtttctgtttaaataaaggcacgggt

SEQ ID NO: 10827 - DNA, 120 bp, synthetic construct
  source 1..120: mol_type = other DNA
gcctttaggaaccactctcgttgtggttttaaattgtcatcacttgccagataaggagaggttgctgtatggacagacacacaaggagactgacccaggtcctgttgcaggacagtcacc

SEQ ID NO: 10828 - DNA, 120 bp, synthetic construct
  source 1..120: mol_type = other DNA
ttcccagtgtgaattcccctccgatggggtgtggaggctggggtagtctctaggctgtcccagctgtgcctctggcctcctgtctgggtgcagccttagcggggcacaggagggcgtgta

SEQ ID NO: 10829 - DNA, 120 bp, synthetic construct
  source 1..120: mol_type = other DNA
gcgttgagagtgcttcacacaaacggagagaaatggttgatattagtatagtcatggttaatataaaccttaaatacctttttaaagattagaagctgagctgggaacggggcaatcagg

SEQ ID NO: 10830 - DNA, 120 bp, synthetic construct
  source 1..120: mol_type = other DNA
acatctataatcccagcactttgggaggctgaagcaggaagattgcttgagcccaggggttggagatcaccctgggcaacatggtaaaacccgtctctacaaaaaatacaaaaattagcc

SEQ ID NO: 10831 - DNA, 120 bp, synthetic construct
  source 1..120: mol_type = other DNA
acctctttaggcctcagtttccccacctagacaaggatgatggtccatgagtctgctatttttcattgagcaaccttgtactcagtgcctgttcggaatgagaatagcaatgtctacagt

SEQ ID NO: 10832 - DNA, 120 bp, synthetic construct
  source 1..120: mol_type = other DNA
cttgagggcattacattttacattacgtttgtaatcagaaaagtagactttcaaaagaagacatcatctaagttacttgttaggagtggcagattcatctccccggagctggtgacagta

SEQ ID NO: 10833 - DNA, 120 bp, synthetic construct
  source 1..120: mol_type = other DNA
agggtagcagtggtggtagtaacagtaggtagtgatggtagtgatgttagtgatggtaggtagtaatgatagtgatggtaggtagtgatggtaggtaatgatggtagtgatagtaggtag

SEQ ID NO: 10834 - DNA, 120 bp, synthetic construct
  source 1..120: mol_type = other DNA
aggtagggatggtagtgatggtaggtagtgatgatggtagcaatggtaggtagggatggtagtgatggtggggatggtagtgatggtaggtagtgatgatggtagcaatggtaggtaggg

SEQ ID NO: 10835 - DNA, 120 bp, synthetic construct
  source 1..120: mol_type = other DNA
cacacagtgtctatatatctatgtgcacagatttctgggcatgaatatatgtgttccaagccccagtgtacctacaagttttgatataaacctacacacagacgtgcagcatatgtacac

SEQ ID NO: 10836 - DNA, 120 bp, synthetic construct
  source 1..120: mol_type = other DNA
agacttggacccaattcaaacatctagaccaaaacctacactctgtttggttaagatcggatagaaattcttcctcttcacatctcacatccatggacatgtcatggcagaaggctccat

SEQ ID NO: 10837 - DNA, 120 bp, synthetic construct
  source 1..120: mol_type = other DNA
gtgacctccatgagtgagggatttttgacagttctgttcactcttaaagccccgtgtctaaaacagtgcccggcacaaagtaaaggctcagtaagtatttactggatgaataaatcggta

SEQ ID NO: 10838 - DNA, 120 bp, synthetic construct
  source 1..120: mol_type = other DNA
aacggcaaccccagctcatcggagccaccaggaataattcttgccattagccccagagtctgccgctccctcagggtccctctcccggcatctgggggctggattttcacacacacagtg

SEQ ID NO: 10839 - DNA, 120 bp, synthetic construct
  source 1..120: mol_type = other DNA
aataaaaataagcttaaaaattgcacttggatataaaaattgtgcaggtgtgaatggctgcaatttggaactaccctatcccacaacgccacctctgtttctgagggacaccgtaactta

SEQ ID NO: 10840 - DNA, 120 bp, synthetic construct
  source 1..120: mol_type = other DNA
atgatcagctctgttccttttctcaagccacatcctcacggacgctggccttgagctcttgtccccgagcctctctctctaggaacttgtccttcccacaggacatcgacacctgagacc

SEQ ID NO: 10841 - DNA, 120 bp, synthetic construct
  source 1..120: mol_type = other DNA
cctcacccaacaccgaacctcctggcaccaccctcgtctcggactttccagcctccagaactggaaataaatttctattcttcagaaatcacccagtctcgggtattttgttatagcagt

SEQ ID NO: 10842 - DNA, 120 bp, synthetic construct
  source 1..120: mol_type = other DNA
aacttggcccttcccttccgcaggagtccaagcgatgtcaggatgatggtggggaagttcttagtcaagaatctccgtgcctcagtttctccatgtccctattagtctctgtgtctagat

SEQ ID NO: 10843 - DNA, 120 bp, synthetic construct
  source 1..120: mol_type = other DNA
cttgagtgtttaatggaaagacgcctgtccagaaggtttctcctggaaggagggatcaaatctgtctaagctccgaagtaaccctgctcagctaataggttatttcctcatcttagaaag

SEQ ID NO: 10844 - DNA, 120 bp, synthetic construct
  source 1..120: mol_type = other DNA
gcattttgctaagaacgggttttcccagtttgagactggcgagtttggggcctctggcaaaaaaaaaaaagaaaaaaaaaaatcacttctgcttttgccaagcagcttccctttttctgg

SEQ ID NO: 10845 - DNA, 120 bp, synthetic construct
  source 1..120: mol_type = other DNA
gactccatctcaaaaaaagaaagtaaaccctacgagggcagcagcctcatgtgccctccactgctacatcctcagtgtagaccacagacctgtaggggggcatgtggtaagcaccccatt

SEQ ID NO: 10846 - DNA, 120 bp, synthetic construct
  source 1..120: mol_type = other DNA
agctgggtcgacacagcaagattccagaaaagagaggagaaagtcggtttcagaaaaggggaaaaaagtcaaaatgacaggtttgtcagaaaaataacttacattctgaaaactcagctg

SEQ ID NO: 10847 - DNA, 120 bp, synthetic construct
  source 1..120: mol_type = other DNA
tgtttatttctctaaaaaatcacattagaaatgagcctccaaggagcttgacttgaacctggaactttctaaaatgcagagtatctatgcatctctatctacatgcatgcctcccttccc

SEQ ID NO: 10848 - DNA, 120 bp, synthetic construct
  source 1..120: mol_type = other DNA
catcctccacacacaccaccctacacacacaccatcctccacacacaccaccctccacacacaccaccctccacacacaccaccctccacacacaccacgctccacacacaccgccctcc

SEQ ID NO: 10849 - DNA, 120 bp, synthetic construct
  source 1..120: mol_type = other DNA
atttcttaaaaattatagcatactcaagtttgctacatggcatatcatggcaaacctacatagggtatcatttaattctcatggccacctgcaggcaggtattcttattgctgtttcact

SEQ ID NO: 10850 - DNA, 120 bp, synthetic construct
  source 1..120: mol_type = other DNA
taaaaggtggtatcttttagggctccagagacactaaccagtgtaatttttgcaggcaacattaaaacaaaaaaacaatcctaagacccatctatttgcaattaggcaagggctgatcat

SEQ ID NO: 10851 - DNA, 120 bp, synthetic construct
  source 1..120: mol_type = other DNA
ctaacaccttctatacaatcccaaacggtgatttcctgtcactaggaaggaatggggcataggagacaaagaattgcgggttttactcctttggctgctccctaaggggtacagggtgct

SEQ ID NO: 10852 - DNA, 120 bp, synthetic construct
  source 1..120: mol_type = other DNA
tcaaggggagttttcagaaacttctcagatcaaggaaagctcagaaaatccagtgtctcctgaggagaagccagaccctggccaggtgtctctggagtctgtcacagaacagattcagga

SEQ ID NO: 10853 - DNA, 120 bp, synthetic construct
  source 1..120: mol_type = other DNA
ctcatcagccacttgccagccatcctcttgtcccagtgagagctgcaggttaaggcaccgaggatgtatctccatctctgtccagtgccaagcagttgaatgatctggtaaacagctgtc

SEQ ID NO: 10854 - DNA, 120 bp, synthetic construct
  source 1..120: mol_type = other DNA
tttattttctggagtcaaggtgcaaagtccccatgagttccccattagacagcaaatgccccaaggagaagaggacaaaaagcatattaacctgatgaactgattcccaaggatgcctgc

SEQ ID NO: 10855 - DNA, 120 bp, synthetic construct
  source 1..120: mol_type = other DNA
aaaagaataaaattatctgaagctggggacatccccagaaaacctgggatgggatggtggccacagctacattcttagggtcggtcctcccatgggcggcttgttagggagagggaggca

SEQ ID NO: 10856 - DNA, 120 bp, synthetic construct
  source 1..120: mol_type = other DNA
tgacaaagtgtagacgcatgccatctttaaaggagcttatggtttaattaaggagacaggctggatacttcgaaagaaaaatcgtgagattttatgagaaagggacgcggtgccgtggat

SEQ ID NO: 10857 - DNA, 120 bp, synthetic construct
  source 1..120: mol_type = other DNA
tggccaaagctagaggcacagactcaccagctgagcataaccttcaggtgaaggtgacaaaggccactggagggcagaccatcatttaacaaggaatagaaccaaatatgaggccagcac

SEQ ID NO: 10858 - DNA, 120 bp, synthetic construct
  source 1..120: mol_type = other DNA
cctcttggggctgtttcctcattatacggcggtccagggtgcagcttcctgtttcccttctcccaggggctaccatgcatcctctgcgccacttccacacctggcaggtaccctgcaacc

SEQ ID NO: 10859 - DNA, 120 bp, synthetic construct
  source 1..120: mol_type = other DNA
ctgctggctgaccccagagatcggccaagccagccccaaccacgagaacttcccagctgacagagagaacagtgagaaagaataaattctgtggctttcagtccctatgtttttggtgtt

SEQ ID NO: 10860 - DNA, 120 bp, synthetic construct
  source 1..120: mol_type = other DNA
aaagaaagtggagaagacaggttatttatttttgagataagaagggtaaagaataaccttcaatgaccttcatctagaaaggggccaagtgaagcgtatggagacctgacacacacaggg

SEQ ID NO: 10861 - DNA, 120 bp, synthetic construct
  source 1..120: mol_type = other DNA
ctgttggattaggttcctgggctgtgataatgcggcaccacatactgggggctttaaaacagaatggattctctcattgctctagaggccagaggtctgaaatcaaggtgctgtgagagc

SEQ ID NO: 10862 - DNA, 120 bp, synthetic construct
  source 1..120: mol_type = other DNA
ttaaattattttcaaagtaggtagtggaagaaagagatgagtgagattccaattaaccattccaaggcagggctaaaatacagttccaccaaatcaccttcttctactggggaagctcag

SEQ ID NO: 10863 - DNA, 120 bp, synthetic construct
  source 1..120: mol_type = other DNA
tgaaaagatgcaatatcgattgaacccaccaactctgctggctgctgcttctgtttatgttaattcagtactcgagctgggaaatcatgatccaggatttaactctttgcattcatcagt

SEQ ID NO: 10864 - DNA, 120 bp, synthetic construct
  source 1..120: mol_type = other DNA
ctggtttgggcattcatctttatttggaagccaaatgttgaattgcctttgttgaatagtcaaaagtcaaggatatctcttctcaatgacagctgaaaaggtgcagatgatagatagata

SEQ ID NO: 10865 - DNA, 120 bp, synthetic construct
  source 1..120: mol_type = other DNA
ctctacttttagtttgtctccagcgactgtgcaggctttctggagcacctctccccagagggccagcgacatgtacattctgacagaaatgccccactcagcagcaaccatctgaactcc

SEQ ID NO: 10866 - DNA, 120 bp, synthetic construct
  source 1..120: mol_type = other DNA
aaaatgcccaagaaaggctgaagccaagcaaggcgacaccttcgttaggtccaagggccacgttcccttccccagtacacagccatcaaccgaattcaattgataaattacttagtagtt

SEQ ID NO: 10867 - DNA, 120 bp, synthetic construct
  source 1..120: mol_type = other DNA
cagacaggaacttaggttcaggagtttatcccagggagtgcagacaagggaatggggaaactgaggcaggaactggccagaagggccagtaaggtgcattaacgagtgggttacactgtg

SEQ ID NO: 10868 - DNA, 120 bp, synthetic construct
  source 1..120: mol_type = other DNA
ggtgtggtctgcactggccatcgtatgaccctggatcatttgctagcctttgtctgaaagcctcattttcccagcgaggttataactgccacctagcctggcacaatgatccataggtaa

SEQ ID NO: 10869 - DNA, 120 bp, synthetic construct
  source 1..120: mol_type = other DNA
tgatgtatatgtatatgtatatgtatatgtataagccatacatttataggacactttacacttgtcaagagttttcccgggatgggtgtgatggctcacgcctgtaatcccagcactttg

SEQ ID NO: 10870 - DNA, 120 bp, synthetic construct
  source 1..120: mol_type = other DNA
tgtgtgtgtgtgtgtgtgtgtgtgtgtgtgtgtgtgtgtgtgtgtgtgtgtacacaaacatttacttggttggctgaggcggagggtgtgacccagtgggccacacctcccaccgcccta

SEQ ID NO: 10871 - DNA, 120 bp, synthetic construct
  source 1..120: mol_type = other DNA
gcgaacgcctcttctggctggcatttttcttgccgccgctcccgccggggctggaaacatcttttttcttcttggtgtccataaccgcgcttcccataactctaaccagaagttgattct

SEQ ID NO: 10872 - DNA, 120 bp, synthetic construct; identical to SEQ ID NO: 3640
  source 1..120: mol_type = other DNA

SEQ ID NO: 10873 - DNA, 120 bp, synthetic construct
  source 1..120: mol_type = other DNA
gatgtggcgggactctttatgcgctgcggcaggatacgcgctcggcgctgggacgcgactgcgctcagttctctcctctcggaagctgcagccatgatggaagtttgagagttgagccgc

SEQ ID NO: 10874 - DNA, 120 bp, synthetic construct
  source 1..120: mol_type = other DNA
atattttgtgtttcctttctgtgtattcaacctagggtgtgtttggctagacggaactcttgcctggttgcaagtgtcaagccaccgattgctttcttaggctatctatatggtctcttc

SEQ ID NO: 10875 - DNA, 120 bp, synthetic construct
  source 1..120: mol_type = other DNA
tattggtaggccagtgtataaggtatgtgaaaacagaattaagttattggtctgaagtgactgaagcatttaggctctatcaaggcctaaaatttggtaatatgagtttggtaatgcgaa

SEQ ID NO: 10876 - DNA, 120 bp, synthetic construct
  source 1..120: mol_type = other DNA
tcagggttattaagaccttaaaattattttaccaggtttttacatgtgagctgtgacatgactggcattttctttgatttcagcgtatgttggtctctacacatgaaatttgtgtgactt

SEQ ID NO: 10877 - DNA, 120 bp, synthetic construct
  source 1..120: mol_type = other DNA
ttttcatagtgcttattcaagtgtaaagcacaactgaaaggagtaatgtacagtttatatgaggaaaaaggaattttattgctgccagtgtaaaagtttgcacagcagtatagtcatcaa

SEQ ID NO: 10878 - DNA, 120 bp, synthetic construct
  source 1..120: mol_type = other DNA
ttcatcttgtggcctgaattcattaagaaaagatgttaggatttgttctgaagatagtgacttaggaaatttgtgagactggggtcagtcagttctgttttacaattgctttctatttgg

SEQ ID NO: 10879 - DNA, 120 bp, synthetic construct
  source 1..120: mol_type = other DNA
gcctggccagtgttgagaatattgagagatggatattgtagctgtacctgccatcaaaagaattttcttgacctccacatagtgtgaaaaagaagactgtttacacattatattttaagt

SEQ ID NO: 10880 - DNA, 120 bp, synthetic construct
  source 1..120: mol_type = other DNA
ggaagtctgggtatgacatgtctgtgattttgctggttcatcacaaatgggaaataaatctctgctaactcaaactgttgaccaaagtaaaattaattatgccaatcaaaaactatttgc

SEQ ID NO: 10881 - DNA, 120 bp, synthetic construct
  source 1..120: mol_type = other DNA
tgtatttttggtccatgtctaggttgtagaattgaattgtgcattttggcatctgagcacagctgagttttctaaatcaatctctctccttgcacctagtttttgctttagatcactacc

SEQ ID NO: 10882 - DNA, 120 bp, synthetic construct
  source 1..120: mol_type = other DNA
aattagctaatatatactctgtcttatgtagtttttgattaacaatacactttttaaatcattagctcatttgattttgcaaagaagaacaggtaacctaagaggcagacagaacaggca

SEQ ID NO: 10883 - DNA, 120 bp, synthetic construct; identical to SEQ ID NO: 3650
  source 1..120: mol_type = other DNA

SEQ ID NO: 10884 - DNA, 120 bp, synthetic construct
  source 1..120: mol_type = other DNA
aacatctgggtgttctgactgctgctaggccagtattctttatatgataataagaactttgtccacagaagatatccctaataacaaaaaaggtttatttgaagaggactcatgtgttct

SEQ ID NO: 10885 - DNA, 120 bp, synthetic construct
  source 1..120: mol_type = other DNA
atgcatatactttaaaacctagttcatggtgaacttaagagggtgttctttttaaaaaacaatttccattgcactttgtcgttgccttaattaaatggtgaaatcatcagaaatatttat

SEQ ID NO: 10886 - DNA, 120 bp, synthetic construct
  source 1..120: mol_type = other DNA
cttgtggggtgctaatgaaaacagggatggcaaaaatattttgtttgtgagtgtatgcatttatgctttttgacaacctaagaaacactcttacatctgagtatctttcatggactagct

SEQ ID NO: 10887 - DNA, 120 bp, synthetic construct
  source 1..120: mol_type = other DNA
attttcagattaatctgtgaggaaagtagattggtttactagactcagtttgtagactttggtgagaactgaattggaggctatgaaaaaaataccttttgggcctttctgaatagacat

SEQ ID NO: 10888 - DNA, 120 bp, synthetic construct
  source 1..120: mol_type = other DNA
taagtcatttccaaccaattttcctggcttgtagtatagaataaagagacttgattttattacattaaagccaaatataaaatgatgcaatctagcacacacttgtttggaacttttctc

SEQ ID NO: 10889 - DNA, 120 bp, synthetic construct
  source 1..120: mol_type = other DNA
tgctgtagaaaattaacagttggcatttggcttagttcaagtataatgctgttgacaagtatatctgacacgtcattgaactaataatatttttgaaagctgataggtaagttatatcta

SEQ ID NO: 10890 - DNA, 120 bp, synthetic construct
  source 1..120: mol_type = other DNA
ttttttcacaaatacactttttatttgtcgccaggtacttatttttaaagctatagaggtaatatttcatcaggtgagggtaactaccatggtttgtttgctatactgtgttagggttat

SEQ ID NO: 10891 - DNA, 120 bp, synthetic construct
  source 1..120: mol_type = other DNA
gaagaacaaaacaaaaatatatgtggcccagagattgagtgatttacctgaggttataggctttagattgcatagctggaagtagaaccttgttcttctatattaaatgacaatattcat

SEQ ID NO: 10892 - DNA, 120 bp, synthetic construct
  source 1..120: mol_type = other DNA
ctgacttgaactagtttacagtcccaccaacagtgtaaaagtgttcctgtttctccacatcctctccagcacctgttgtttcctgactttttaatgatcactattctaactggtgtgaga

SEQ ID NO: 10893 - DNA, 120 bp, synthetic construct; identical to SEQ ID NO: 3660
  source 1..120: mol_type = other DNA

SEQ ID NO: 10894 - DNA, 120 bp, synthetic construct
  source 1..120: mol_type = other DNA
aaaggtggggggaaactgtctaatatatctgagatctgttggagctggggtgaccatccaacttaggcaagatagctagtaccatgtatgcatttcttttacctttcttattgtatatac

SEQ ID NO: 10895 - DNA, 120 bp, synthetic construct
  source 1..120: mol_type = other DNA
acattcatcataagggatacatacctgtgctagcatatggcatttttaaaatcacatgagtaatttgtaatcatcatagaaatattagaaaatacaaataagcaaacacatactgaaaat

SEQ ID NO: 10896 - DNA, 120 bp, synthetic construct
  source 1..120: mol_type = other DNA
gaaatagaaaaaccttaatttcctctcgttgggcagtatggtgtcaaaagcttgggctttggagcttcgtatataatctgggttcaaattataacttactagttactaacttgggcaaat

SEQ ID NO: 10897 - DNA, 120 bp, synthetic construct
  source 1..120: mol_type = other DNA
agaattaatccttccctctttaactcttaagctatcttattttttatctaatcgggtctttggcacaattataggtctgtgtgtctgtcttccctaatagaataggaaagccttgaggac

SEQ ID NO: 10898 - DNA, 120 bp, synthetic construct
  source 1..120: mol_type = other DNA
aactaggatatgctgcagaagaaataactcagcagcagagcatttaggttactggatggctacttttaaccacttaaactaagctgggggaagggaatgacttgaagacagaatttataa

SEQ ID NO: 10899 - DNA, 120 bp, synthetic construct
  source 1..120: mol_type = other DNA
gaggcccaggggcagaatgctatggtttggttgtttccttcaaaactcatgttgaaacttcattgccatgtggcattattatgaggtggaacctttcagaagtggttacattataagggc

SEQ ID NO: 10900 - DNA, 120 bp, synthetic construct
  source 1..120: mol_type = other DNA
tttataattttgagtaggaattccagagtattggtagctataaccactttgggttccctgccattgcttctggtgcctcattttttctgacgtcttccattttcttacatttgtcttcta

SEQ ID NO: 10901 - DNA, 120 bp, synthetic construct
  source 1..120: mol_type = other DNA
cagtaacttttcatcttgtgtaatgcccggatcacattaaaatgtttccaattagctcaaaaatgtcctttatggctggtttggctaaaacagtatccaggccagcattgcacctatgaa

SEQ ID NO: 10902 - DNA, 120 bp, synthetic construct
  source 1..120: mol_type = other DNA
tcagtctccctgggctcagatgattctcccacctcagcctgggactaaaggtgtacaccaccatggccagccaatttttttgtattttttgtagagatggggttttgccatattgcccag

SEQ ID NO: 10903 - DNA, 120 bp, synthetic construct
  source 1..120: mol_type = other DNA
atcatgccaccacactccagcctgggtgacaaagtgagaccctgtttcagggggaaaaaaaagataaaatagtttgaggaggctggatgtagtggctcatgcatgtcatcctggcacttt

SEQ ID NO: 10904 - DNA, 120 bp, synthetic construct
  source 1..120: mol_type = other DNA
gaaagctgcagaaagaaaaagacctagaaaaagggcattggattaggtcaactttgaattttatttggaagataaatgagtccagaagtgagtgggcagagattattggagttggtcttg

SEQ ID NO: 10905 - DNA, 120 bp, synthetic construct
  source 1..120: mol_type = other DNA
tagagacatagccagctcttaaatctgacttccagattttcactgtgtcttcttttttctgtaacgtgttgccttttttagccatgaaaaattagaagttgaactcttgtcttttcaggc

SEQ ID NO: 10906 - DNA, 120 bp, synthetic construct
  source 1..120: mol_type = other DNA
cctgaagaagtatttggttggtacaagagatatagaaaggaatcgctgggtgtaccaaggctaatcagttttataattttgcataattttctaactgcgattatcatttagtttagaaca

SEQ ID NO: 10907 - DNA, 120 bp, synthetic construct
  source 1..120: mol_type = other DNA
gcagtacagtcaccagacgtgtatcctctcctatggtacagaagtgtttattgggtctctttatggcctgcatgatatatcccacaagatgacctacttcacattattttaattctgtat

SEQ ID NO: 10908 - DNA, 120 bp, synthetic construct
  source 1..120: mol_type = other DNA
gaatataatagctatgctgtccttgtttccttttgtctcattcttttttgattgggggataattggccaataaagctttgatagcctctattgcccaggcccctcctcttcttttatgag

SEQ ID NO: 10909 - DNA, 120 bp, synthetic construct
  source 1..120: mol_type = other DNA
ccacatctcatagaagctaactattcccaaattgtttttttcttcttttcctcttactactgctgttttcctcctttcttgctgctaagctcttgtcctgacatgctggtaatatgaaac

SEQ ID NO: 10910 - DNA, 120 bp, synthetic construct
  source 1..120: mol_type = other DNA
agcattttttcatgtgtctgttggctgcataaatgtctataaatgtcttcttttggaaagtgtctgttcatatcctttgcccactttttgatggggttgtttgatttttttcctgtaaat

SEQ ID NO: 10911 - DNA, 120 bp, synthetic construct
  source 1..120: mol_type = other DNA
tttctgcttaggattgtcttggcagtgcgggctcttttttggctccatatgaactttaaagtagttttttccaattctgtgaagaaatttattggtagcttgatggggatggcattgttt

SEQ ID NO: 10912 - DNA, 120 bp, synthetic construct
  source 1..120: mol_type = other DNA
tcaatacctaatttattgagagtttttagcatgaagggctgttgaattttgtcaaaggccttttctgcatctattgagataatcatgtggttttttgtctttggttctctttatgtgatg

SEQ ID NO: 10913 - DNA, 120 bp, synthetic construct
  source 1..120: mol_type = other DNA
cttccttattagtcttgctagcagtctatcaattttgttttttaaaaaaaccagctcctggattcattgattttttttttgaagggttttttgtgtcctatctccttcaattctgctctg

SEQ ID NO: 10914 - DNA, 120 bp, synthetic construct
  source 1..120: mol_type = other DNA
gtgatttttattcttttacatttgctgaggagtgagtgctttacttccaactatgtggtcaattttggaataagtgtgatgtggtgctgataagaatgtatattctgttgatttgggatg

SEQ ID NO: 10915 - DNA, 120 bp, synthetic construct
  source 1..120: mol_type = other DNA
cttggtagatcttcctccatccctttattttgagcctgtgtgtgtgtctgcatgtgagatacatctcctgaatacagcacactgatgggtcttgactctttatccaatttgccagtcttt

SEQ ID NO: 10916 - DNA, 120 bp, synthetic construct
  source 1..120: mol_type = other DNA
tgcatgcgtcatgtagttctcgagccatgattttcagctccatcaggtcatttatggtcttctgtacactgtttattctagttagccatttgtctaatcttttttcaagatttttagctt

SEQ ID NO: 10917 - DNA, 120 bp, synthetic construct
  source 1..120: mol_type = other DNA
cgcccctcccccagccaggctgctgccttgaagttcaatttggaactgctacgctagcagtgagcaaggctctgtgggcgtaggacctgctgagccaggcacgggatataatctcctgtt

SEQ ID NO: 10918 - DNA, 120 bp, synthetic construct
  source 1..120: mol_type = other DNA
gccactgcacccggccaatatgtatgttaatctcatccctcaagctgatactgaagtttttcaatttatgttatttggtgtaaatctaggcagtctttaacaaaattggtgcttcatgtg

SEQ ID NO: 10919 - DNA, 120 bp, synthetic construct
  source 1..120: mol_type = other DNA
agtagctgggaccacaggcgtgtgtcaccgtacatggctaatttttctatttttagtagaggcagagtttcgccatgttttccaggctggtctcgaactcctgaactcaagcagtccacc

SEQ ID NO: 10920 - DNA, 120 bp, synthetic construct
  source 1..120: mol_type = other DNA
gaaggttgagttctggtctgtcagattccgaagttgtttccttaggaaccatattatcttgtgtacaactcttgggctaatcttgttaatattctttatttgacctcacactgttgattc

SEQ ID NO: 10921 - DNA, 120 bp, synthetic construct
  source 1..120: mol_type = other DNA
acaaagaagaaagtcccaggatgacagctgtgacacaagctgaaaagttaccagttttgcttggagcaggagattagaacttccgggaaaataatcaaattgatagatggatgttgaaat

SEQ ID NO: 10922 - DNA, 120 bp, synthetic construct
  source 1..120: mol_type = other DNA
ttcagtagcattaacatctagcattcagtacatttacattgttgtgcaattgtcaccactgtccatctctagaactttttcattatcccacactgacataccacacccattaaataataa

SEQ ID NO: 10923 - DNA, 120 bp, synthetic construct
  source 1..120: mol_type = other DNA
gaatgggttactttttcactctgttgattgtttcctttgctgtgcaggagctatttagcttgaaaaaatccaacttgtctgttttcttttgttgcctgtacctttggtgtcacattcaag

SEQ ID NO: 10924 - DNA, 120 bp, synthetic construct
  source 1..120: mol_type = other DNA
gtcccaaagtgttgcgattacaggtatgagccaccgtgcatggccccaacttcttatatttcaagatggttttggcccttcagggccctttgtgagttttaggatggattttttttttaa

SEQ ID NO: 10925 - DNA, 120 bp, synthetic construct
  source 1..120: mol_type = other DNA
tgtggtaatttctttttattcttagtttattgagtgtttttatcataaaatcttgttgaattttttcaaatattttttctgtgctagttgagatgaccatgtgatttgttttcttctttc

SEQ ID NO: 10926 - DNA, 120 bp, synthetic construct
  source 1..120: mol_type = other DNA
aaagctgggtcaattgttaaaattttttcaaagaaccagtttttggtttcattgatttttctctgttatttttctattatttatatcctctctaagctttgttatttccttcatcctgct

SEQ ID NO: 10927 - DNA, 120 bp, synthetic construct
  source 1..120: mol_type = other DNA
tattgataaggatttaactgctgccattttgctgtttattttctatatgccttacagcttttttgtccctcatttcctgccttactggcacttgtgtttagttgatattttgtggtgaag

SEQ ID NO: 10928 - DNA, 120 bp, synthetic construct
  source 1..120: mol_type = other DNA
taatatttcttcacataatcttttttgccccttttctctctttttattctgggattcccagagtgtgtatgtgttggtccacttgatgatggtgttccacaggtgtcttaggctcttgtc

SEQ ID NO: 10929 - DNA, 120 bp, synthetic construct
  source 1..120: mol_type = other DNA
tttctatgctgggtgtaatcttaagatcttctcggcctgtgtttttccctgggcatgtgtagtgactttctaaattgccctatgtatgcagttcttttgcagtagtatcctccttaaatg

SEQ ID NO: 10930 - DNA, 120 bp, synthetic construct
  source 1..120: mol_type = other DNA
acgtattcttgaagcttatttagatctgtttcataggaactgtgaagaaagtaaagaatttaaaaaatgaagacagattttctcaccctgcttatgggtgcttctcgtgctagccttttg

SEQ ID NO: 10931 - DNA, 120 bp, synthetic construct
  source 1..120: mol_type = other DNA
ttccaagtatctataggcaaattttcccatttccctttggaaagtgctgttttcttgctttttttccgcctttccattgtgtcagacttataaggcaatcagccaactgtgggcatgaaa

SEQ ID NO: 10932 - DNA, 120 bp, synthetic construct
  source 1..120: mol_type = other DNA
tttgtcattgagaacagttcacatatgtatcttgttgtcttttccaagtatatctttaaggcaaattcttagcagtggagttgctaggtccattgcgtctatggtttaaactagtgcctt

SEQ ID NO: 10933 - DNA, 120 bp, synthetic construct
  source 1..120: mol_type = other DNA
caataaagagaactgtcatgtacccactactccttacttactgaatcatcttcttttggatagagaagataaaagtgaaaagggaatttaagagttcctgcctttttccttgtctttagc

SEQ ID NO: 10934 - DNA, 120 bp, synthetic construct
  source 1..120: mol_type = other DNA
ctattctaaggatgtacccatttctactacctgactagggagcatgtgtattgtatcccagcagattttttttttcatagatagatatcctttagatatctgttatccagtgtaggtagc

SEQ ID NO: 10935 - DNA, 120 bp, synthetic construct
  source 1..120: mol_type = other DNA
ttcttgtaaacacacaccttcttgtaaacacaacaaccaagatttagaacactcgctttatgaaaagtttccctcatgcccatttgtagtcagtccccaaacctggtttcaggcaatctc

SEQ ID NO: 10936 - DNA, 120 bp, synthetic construct
  source 1..120: mol_type = other DNA
ctcttacaacttcataatgagaaaataaccccataaagagaagggcaggccgggtgcagtggctcatgcctataatgccagcacttttggaggctgaggtgggtgaattgcttgagccca

SEQ ID NO: 10937 - DNA, 120 bp, synthetic construct
  source 1..120: mol_type = other DNA
tgcgcctggcctggcactgtttatttcttttccctccagttttatacctatttagagagattagattttcttgagtactaggaatcactatttttgagcagaattattcaaaactgttat

SEQ ID NO: 10938 - DNA, 120 bp, synthetic construct
  source 1..120: mol_type = other DNA
ttggccttctgccatgattgtaagtttcctgaggcctctgattaaacctttcttcttctaaaagattacccagtctcaggtagttctttatagcagtgtgagaatggactaatacaaggg

SEQ ID NO: 10939 - DNA, 120 bp, synthetic construct
  source 1..120: mol_type = other DNA
aatctcttcctgtttacctcagtgaaatctgtgttccacttgagttccatttccttctgtatcagagaagagccaccatgctgaaagcaaggggcactatgtttctttgttcttaaggat

SEQ ID NO: 10940 - DNA, 120 bp, synthetic construct
  source 1..120: mol_type = other DNA
tcttgttttggcggagcacatctttagtaacttcctgacaaagtgtatggtttgagatttcgctgattttaaaatgcccttattatatagtcacacttgatttatagtctgtcttggtat

SEQ ID NO: 10941 - DNA, 120 bp, synthetic construct
  source 1..120: mol_type = other DNA
gtttgatgggaaaatgatgtctgaattttcagggttatttttaagagtacttgattatgactgtcttgtaaatctctatgagctaggtatacttgcactaaatgctaatgctttttaaag

SEQ ID NO: 10942 - DNA, 120 bp, synthetic construct
  source 1..120: mol_type = other DNA
tagggcattctctaactgtacatcacctaagttatttaaaattgctgaattaggtggcttgtcttgtctaggacagagttttaaggactgcccacctgattgatagagctagttgacctt

SEQ ID NO: 10943 - DNA, 120 bp, synthetic construct
  source 1..120: mol_type = other DNA
ttcaaaagctagaagccattaaactgagtcacttcagggttagactatcagaactggggatttagaaagtctcagaatggaaatcgaaggacaccaaagacaaattcggcctttttcaaa

SEQ ID NO: 10944 - DNA, 120 bp, synthetic construct
  source 1..120: mol_type = other DNA
gttatagcatgttttgagttctaatgtcactttccgatcttctttaccttttttctacctctgtttgtatttctggttctggttaagtgagtctggtaagcagcaggtgttctattttat

SEQ ID NO: 10945 - DNA, 120 bp, synthetic construct
  source 1..120: mol_type = other DNA
catatttgctcccatatttcctatgcttacctgtgaagattttcataactttttccttgctttttactgtcactgttggttctgtgatttatgacagatactgctcttgtaggaatgctg

SEQ ID NO: 10946 - DNA, 120 bp, synthetic construct
  source 1..120: mol_type = other DNA
atttctccccttttatcttaaaagtaccaaagaaagtgtaaaatgtgactgtcttgtcagtcctctttttcctgtttttcatgtcagtgggtatgaaattactagcaaggatgcatatat

SEQ ID NO: 10947 - DNA, 120 bp, synthetic construct
  source 1..120: mol_type = other DNA
ttaaaacttgcaatctgagagactgttgaaaaaggtgatcgttggcttttcaacagggagtaaggtctggtttaaaaaaaaattagtaagcatttggccaagtagattaacaacattcag

SEQ ID NO: 10948 - DNA, 120 bp, synthetic construct
  source 1..120: mol_type = other DNA
agaggagtctgatggatgagaggagggaactgctttaaatgagtttctacttcagacataagttaattctcagagcccacaaaaactttcacttttatttgtgaaatacaactcagttct

SEQ ID NO: 10949 - DNA, 120 bp, synthetic construct
  source 1..120: mol_type = other DNA
gcagtccattgagcatagattcccagaatgtattctcctgcagaaaatggaggaaaataatacttggcttccctaatgattacatgtgtatacaacactaacatttgcaagaccaccttt

SEQ ID NO: 10950 - DNA, 120 bp, synthetic construct
  source 1..120: mol_type = other DNA
cagcaattcactgtaaagctggaaagggacgaactggtgtaatgatatgtgcatatttattacatcggggcaaatttttaaaggcacaagaggccctagatttctatggggaagtaagga

SEQ ID NO: 10951 - DNA, 120 bp, synthetic construct
  source 1..120: mol_type = other DNA
atcgtattaatcatttaaagctgtgtaattgcatagattccttgttcctttaccccctcttatatcttgtttcctatcctttgtgactttttttgcattatatataaggatgccgaaata

SEQ ID NO: 10952 - DNA, 120 bp, synthetic construct
  source 1..120: mol_type = other DNA
aaattttttgtaataaaatagaaaaattttgtaatgtggaggcgcagaacactagatttaagccagggggtcttaaattgtgttacattccttttaaagtctgatggaaggtataaatgt

SEQ ID NO: 10953 - DNA, 120 bp, synthetic construct
  source 1..120: mol_type = other DNA
tcaagggttggcacttgaaacagtagaatactttcacaacaagagataagatttctttcaggattgatgacagtcttgcaccctagcgcatactgatgaagagagcagtgggtgaccatg

SEQ ID NO: 10954 - DNA, 120 bp, synthetic construct
  source 1..120: mol_type = other DNA
tttaaatttgccaatgggaagatattctagtcattacagtctggtaatactatcaattctgtttctcttcagaggtgaggggagactatttgatgaaatcgtaagtcctgtagggtgttg

SEQ ID NO: 10955 - DNA, 120 bp, synthetic construct
  source 1..120: mol_type = other DNA
ggtcttattttgaaaggctcctcagcttatacctttccttacaaatgcttccttacaaatgctaaagcatttaatgactcctgacttaaagggaatttggacagattgaggttgttggtc

SEQ ID NO: 10956 - DNA, 120 bp, synthetic construct
  source 1..120: mol_type = other DNA
agcatgccacagggcaacttctagggttggttctcatctagtcctgtgctccacactatctgcatctgcacttaagtttcaatattagataactcacatgtttaaactatgaagaaagag

SEQ ID NO: 10957 - DNA, 120 bp, synthetic construct
  source 1..120: mol_type = other DNA
gttaggaactcttgtgtacatgagttcattgagcttattcttaataaagacaaatcttctagaaataatagttgtatctttaaatgatctcaaggaaaatgtttggtttctctggggaat

SEQ ID NO: 10958 - DNA, 120 bp, synthetic construct
  source 1..120: mol_type = other DNA
tagttcctaatagcttcaggtttgcattctacctactttagcaactatgatgagaagagagctacaatttgagcaaaaatttgtagggtgagttctgatttccctggattgaggcacatg

SEQ ID NO: 10959 - DNA, 120 bp, synthetic construct
  source 1..120: mol_type = other DNA
gaattgctttcctgtagtaatcttattgtgatcatcctgaaacatagatttccgagcttcaagcaaacactattatgttgaaaaatctacattatttctaagtttagcagtgccagtgga

SEQ ID NO: 10960 - DNA, 120 bp, synthetic construct
  source 1..120: mol_type = other DNA
acgaatatgttactagtttacgtgtttacagtactattattttagcatgtgcttctgcttattaaaaaatgttaactataaaataatctttaggcagatcctacaggaggtattccagat

SEQ ID NO: 10961 - DNA, 120 bp, synthetic construct
  source 1..120: mol_type = other DNA
aaacagtaaaccatttgaactaatctaaatactgattgcatgaaaatgccaataaaatcaatacatatttttaaaagccagtcaaggataaaagaaaagagggaaactaaaagtgagaca

SEQ ID NO: 10962 - DNA, 120 bp, synthetic construct
  source 1..120: mol_type = other DNA
atctatgatttgtctgtcattttattgtgtaccattagtgtgtatgcatgtatgtatgtgccaggtagttaataggctgactgtgtctcttagctccactctgctgcctgggcctttgcc

SEQ ID NO: 10963 - DNA, 120 bp, synthetic construct
  source 1..120: mol_type = other DNA
tggaatagattggtttgacagaggggaaactctttttgagataggcctatatttagggacaagagaagagacaaccaataagggttgaaagaaaccttgagagagtaagtcctatgacag

SEQ ID NO: 10964 - DNA, 120 bp, synthetic construct
  source 1..120: mol_type = other DNA
tttctctggattaaggagtaagagcgtctcaagatttgctgtttatagagagggaggctaatagtttgagagagatacagaatctagggagagtgtgggtttttggtctttcagttgttt

SEQ ID NO: 10965 - DNA, 120 bp, synthetic construct
  source 1..120: mol_type = other DNA
agctacagctgtacctatctactgtacatatcaagcaagtcactttattcttataatgtctatgacttctttctttgaaagcgcttccatcatcactgttggcacttcatatgggtctca

SEQ ID NO: 10966 - DNA, 120 bp, synthetic construct
  source 1..120: mol_type = other DNA
taaggtttgtgtgcatatgttttgatgaattttaactttttataataggtttgtgtatattttatggcagtaaatgataaaacagactaatctacatatattttatgtagtcatgacata

SEQ ID NO: 10967 - DNA, 120 bp, synthetic construct
  source 1..120: mol_type = other DNA
agactctgaaacagatacatgtgagcctcccaactttttaatatttgttaatctagaagtgttgaattttgggtgctgacaaggcagcaggtagataagaattgcaaagttaagaaaata

SEQ ID NO: 10968 - DNA, 120 bp, synthetic construct
  source 1..120: mol_type = other DNA
accgtgtaccattttgtagttttagcatgcttttgtgtaactgcatctggtgtttgatcctcatgagagccctgttaaggaagggtacatattattgtcctcattttccttcgaaaacac

SEQ ID NO: 10969 - DNA, 120 bp, synthetic construct
  source 1..120: mol_type = other DNA
ggttgtgtctacaatttttaagacattggggagatttagatgccagtagtaacttaaaagagaaataattgcaaattctttttcctcttgagtatactttcatttaaggtacagtgttct

SEQ ID NO: 10970 - DNA, 120 bp, synthetic construct
  source 1..120: mol_type = other DNA
gttaccatagcaatttagtgaaataactataatggaacattttttttcaatttggcttctcttttttttctgtccaccagggagtaactattcccagtcagaggcgctatgtgtattatt

SEQ ID NO: 10971 - DNA, 120 bp, synthetic construct
  source 1..120: mol_type = other DNA
cttttcatctcagtacaatttttaaaactgctgaatgcaaggtactgagctgttggaagtgactgacagatgaatgtaacagattcatagagaaggaaaaaggaagaaaaactcatgctc

SEQ ID NO: 10972 - DNA, 120 bp, synthetic construct
  source 1..120: mol_type = other DNA
ttgtcagacagtttcttaaaggaagttcaccagttctttattgaacattgaagaaaacatacagtttagactggcattaaaactgaaagaagtggccagacgcagtggtagacgcagtgg

SEQ ID NO: 10973 - DNA, 120 bp, synthetic construct
  source 1..120: mol_type = other DNA
tttgggcatcatcaggaaagggagagtagttaagcctttcatataaataatggtgtggcgtttgggcatgggaagtcttggaggaaaggaagaaaaggagagggtgaggactgagataag

SEQ ID NO: 10974 - DNA, 120 bp, synthetic construct
  source 1..120: mol_type = other DNA
ttgggagggaaagatatccaaactatatcactaggtctggatcttgttatttattttttggaacatagtcatatatatccaaggatatatattgtagaagtccacagaaccatactaata

SEQ ID NO: 10975 - DNA, 120 bp, synthetic construct
  source 1..120: mol_type = other DNA
cctgtttctctattatcttggcatgttttcttcaaatggcacttcttaacctcctaaggttaataaatttctttgtaatggacttttgttttctaattcctcagcgtatgacaaatgaat

SEQ ID NO: 10976 - DNA, 120 bp, synthetic construct
  source 1..120: mol_type = other DNA
tttgaagttactctgccactagaagtctaattttgggacttactattcatgaaataggaattgacttttatataagtaataggaccttattttgaaggttcaaactggagaaaatcttac

SEQ ID NO: 10977 - DNA, 120 bp, synthetic construct
  source 1..120: mol_type = other DNA
attttttttatttttatttttgtagggacagggtctcactatgttgcccaggctggtctcaaactcctgggcacaagcagtcctcacgctttggcatcccaaagagttggaattacaggt

SEQ ID NO: 10978 - DNA, 120 bp, synthetic construct
  source 1..120: mol_type = other DNA
tcatctctgcatacctttaggaatttcctaattcttatttcccttcatctgtactttaacacatgcaaaattgaaggttagattaaatatttatgatttatttgtttatccttgactaca

SEQ ID NO: 10979 - DNA, 120 bp, synthetic construct
  source 1..120: mol_type = other DNA
aagaaactggagcttctcatgtttgtattgctgtagaagtaaacatgtatttgccatgcgtcatcagggaagttgcactcaccgtccaagaacttttgttaaagtaaatcttggaatagg

SEQ ID NO: 10980 - DNA, 120 bp, synthetic construct
  source 1..120: mol_type = other DNA
ataaaatacccaatgtacacagcgtcaaaaaagctgcatttttccttttcctaattcttcgttgtttgctgaaatctggggcaaaggtgcgggagggggctaaatgactgggatatgaag

SEQ ID NO: 10981 - DNA, 120 bp, synthetic construct
  source 1..120: mol_type = other DNA
gctaaggcaggcggatcacttgaggcccaggagtttaagaccagccggccaatatggcgaaaccctatctgcactacaaatacaaaaattagctgggcatggtgtcgcacacctgtaatc

SEQ ID NO: 10982 - DNA, 120 bp, synthetic construct
  source 1..120: mol_type = other DNA
agtgagttatacaaatatctgggaaaagagttaagagtacagatgcaaaagcccttagacaagagaatgagcttggtatatctgaagagtggataagtcattttgactgaaacagagtgg

SEQ ID NO: 10983 - DNA, 120 bp, synthetic construct
  source 1..120: mol_type = other DNA
acacaaagaaatacattgatttttcacataggtagtaagagaaacattctttttgaactcagctgtttgtgaattgaattttgtaattcaaatgctatattatgtaaactattgatgact

SEQ ID NO: 10984 - DNA, 120 bp, synthetic construct
  source 1..120: mol_type = other DNA
tttctctaggtgaagctgtacttcacaaaaacagtagaggagccgtcaaatccagaggctagcagttcaacttctgtaacaccagatgttagtgacaatgaacctgatcattatagatat

SEQ ID NO: 10985 - DNA, 120 bp, synthetic construct
  source 1..120: mol_type = other DNA
aatcaaggccagtgctaaaattcagatgctgttagtacctacatcagtcaacaacttacacttattttactagttttcaatcataatacctgctgtggatgcttcatgtgctgcctgcaa

SEQ ID NO: 10986 - DNA, 120 bp, synthetic construct
  source 1..120: mol_type = other DNA
catagtgctcccccgagttgggactagggcttcaatttcacttcttaaaaaaaatcatcatatatttgatatgcccagactgcatacgattttaagcggagtacaactactattgtaaag

SEQ ID NO: 10987 - DNA, 120 bp, synthetic construct
  source 1..120: mol_type = other DNA
cttacagttgggccctgtaccatcccaagtcctttgtagctcctcttgaacatgtttgccatacttttaaaagggtagttgaataaatagcatcaccattctttgctgtggcacaggtta

SEQ ID NO: 10988 - DNA, 120 bp, synthetic construct
  source 1..120: mol_type = other DNA
tgtctactcatgtttaattaaggaaaaacacttatttttagggctttagtcatcacttcataaattgtataagcacattaaatagcgttctagtcctgaaaaagtccaagattcttagaa

SEQ ID NO: 10989 - DNA, 120 bp, synthetic construct
  source 1..120: mol_type = other DNA
tatatcatgtcctttgtacgttgtaatatgagctggcttggttcagtaaatgccatcaccatttccattgagaatttaaaactcaccagtgtttaatatgcaggcttccaaaggcttatg

SEQ ID NO: 10990 - DNA, 120 bp, synthetic construct
  source 1..120: mol_type = other DNA
ctgtcatgaatttgtaggatgttccattgcatcagaaaacggacagtgatttgattactttctaatgccacagatgcagattacatgtagttattgagaatcctttcgaattcagtggct

SEQ ID NO: 10991 - DNA, 120 bp, synthetic construct
  source 1..120: mol_type = other DNA
aggattttctgcctactctatccagttgtccaaatgatatcctacattttacaaatgccctttcagtttctattttctttttccattaaattgccctcatgtcctaatgtgcagtttgta

SEQ ID NO: 10992 - DNA, 120 bp, synthetic construct
  source 1..120: mol_type = other DNA
ggcgctcagttgccgggcgggggagggcgcgtccggtttttctcaggggacgttgaaattatttttgtaacgggagtcgggagaggacggggcgtgccccgacgtgcgcgcgcgtcgtcc

SEQ ID NO: 10993 - DNA, 120 bp, synthetic construct
  source 1..120: mol_type = other DNA
ccttagaacaataatgcatcgaggccttggggactcaaagccatctgtagtgattgatggagcgtaactctttagaggaactgaaacatgggcaaaactttcatgagacatttaccagaa

SEQ ID NO: 10994 - DNA, 120 bp, synthetic construct
  source 1..120: mol_type = other DNA
tatcaccaaatcctttcaccctcacccatttctttccactcggtatacactaacaattcacggcagaaaagattgaagtgggatttaggaaatggcccctggaaggctattaaaaattta

SEQ ID NO: 10995 - DNA, 120 bp, synthetic construct
  source 1..120: mol_type = other DNA
gcagtgagccatgatttcaccactgcaccccagcctggatgacagagtgaaaccctatttcaaaacaagaaaaaaaaacaaaaactaattatgttttgaaggaggaattggcagtctaga

SEQ ID NO: 10996 - DNA, 120 bp, synthetic construct
  source 1..120: mol_type = other DNA
tattttcatttggtaggcttgagtttgaagaaacagaagaacctgattttactgcattatgtcagaaattaaagataccagatcatgtcagagagagagcttggttaacttgggagaaag

SEQ ID NO: 10997 - DNA, 120 bp, synthetic construct
  source 1..120: mol_type = other DNA
tagtataagaattttacatagccgggcatggtggtgtgtgcctatagtcccagctacttgggaggctgaggtgggacgatcacttgaacctgggaggtggaggttacagtaagccaagat

SEQ ID NO: 10998 - DNA, 120 bp, synthetic construct
  source 1..120: mol_type = other DNA
ttcctgtttttttctcatatgagcattttcttattaaagtttttttgtaatatagtttctagtgatagtataatattttagctagtggatgtattttaatttgttaactcttactggata

SEQ ID NO: 10999 - DNA, 120 bp, synthetic construct
  source 1..120: mol_type = other DNA
acagtagaggctcttttgagcttcagaattgaatacatatataagcaaatgttactgctttattaccctttttcatcctggctttgtctctaccttccctgggaactggcccagtttgaa

SEQ ID NO: 11000 - DNA, 120 bp, synthetic construct
  source 1..120: mol_type = other DNA
tgacttaaggtgaatcagctgttagaattttggtttactttctgcatcttgattggtagtatggtagaatggaaaatgccttggacctcaaggcaggaaactttggttgtaattatattg

SEQ ID NO: 11001 - DNA, 120 bp, synthetic construct
  source 1..120: mol_type = other DNA
ccgtgttagtcaggctggtctcgaactcctgacctcatgatctgccctcggcctcccaaagtgctggcattacaggcgtgagccactgtgcctggcctttattagtgtattttaaagctt

SEQ ID NO: 11002 - DNA, 120 bp, synthetic construct
  source 1..120: mol_type = other DNA
gtctcttcttttctccatccaatccatcctgtgcctgatttttagaaaagactggtgtacagtttgccccttttgctttaaaatttatttttcattgttacaacccactctcagtagcct

SEQ ID NO: 11003 - DNA, 120 bp, synthetic construct
  source 1..120: mol_type = other DNA
aggcgtgagccaccgcgcctggccgtatgtttattcttatgatagtaccatactgttttgtagtatgttttatagctttgtagtatgttttgaaatagggaagtgtgagttcgacaactt

SEQ ID NO: 11004 - DNA, 120 bp, synthetic construct
  source 1..120: mol_type = other DNA
tgaaattgggtaatgtgatgcctctagctttggtctttttgtgtagggttgccttgactattcgggctctttttcagttccatatgaattttaaaatagattttttttttctttttccta

SEQ ID NO: 11005 - DNA, 120 bp, synthetic construct
  source 1..120: mol_type = other DNA
tagatggctcttattattttgaagtatgttccttcaatgcctagtttgttgagctatataccacactttctttatccactaatcggctgatgggcacttcagttgattccatacttttgc

SEQ ID NO: 11006 - DNA, 120 bp, synthetic construct
  source 1..120: mol_type = other DNA
atttacagaaagctacagaaatcatatttaccaggacacatctgttaaataaaagcattgtttcatgttggtgtacgtctatacagggctatgtataaccgactcctgtttctcctccct

SEQ ID NO: 11007 - DNA, 120 bp, synthetic construct
  source 1..120: mol_type = other DNA
actgctgggcagctgaataaaagcacttctggcagcatgctcggcccctcgtgagcgctggtctttctgaatgtaaacatttctcctgctcgctgagagccccttggcggagacactgcc

SEQ ID NO: 11008 - DNA, 120 bp, synthetic construct
  source 1..120: mol_type = other DNA
aggggggccttggggccactggtctggctgttggggccaggcggtgaaagtgggccctgggcagcctgcgagcagctctcacctctggccagcaaactccccgactatgccttgagggtc

SEQ ID NO: 11009 - DNA, 120 bp, synthetic construct
  source 1..120: mol_type = other DNA
gacttggtcgaattttcgtttgggtctggttttttatctattgaccccatcacatttttgggtcgcatgctatctcttctcattcagaagctgttctatttccgccttaatgctctgctc

SEQ ID NO: 11010 - DNA, 120 bp, synthetic construct
  source 1..120: mol_type = other DNA
ctcccatttggactggggagcaacccctggagtagcgttcctgagaaacattctagcagaaggggagggacgcgcagagggacgacgctttatttctctgccagcttcatatactcaaaa

SEQ ID NO: 11011 - DNA, 120 bp, synthetic construct
  source 1..120: mol_type = other DNA
gctcccgcgcggggaggaggggcaagggccctccgcccgggccccgcctccccgcgcgccgctgccaccgccccgcacctttttttgactttttaataatgctcattctgactgtgataa

SEQ ID NO: 11012 - DNA, 120 bp, synthetic construct
  source 1..120: mol_type = other DNA
gtctaaaatctccaatagaatgttgaatagaatgatgagaaggacattgttgtctcttcctggatcttagtgggagaccatccagtttttcaccattaagtagatgttagctgtggggtt

SEQ ID NO: 11013 - DNA, 120 bp, synthetic construct
  source 1..120: mol_type = other DNA
aggaatttgtctacctcatctaagttacctagttcattggcaaataattgttcatggcattgccattataatcctttttatttctgtaaggttagtagtaatttttttttatttcattcc

SEQ ID NO: 11014 - DNA, 120 bp, synthetic construct
  source 1..120: mol_type = other DNA
taaccaactcctcttttatcctcccatccccactacccttcacagcttctggtaatcatcattctactctgtctccatgagttcaatatttttttttttttttaagctcttgcttgtaag

SEQ ID NO: 11015 - DNA, 120 bp, synthetic construct
  source 1..120: mol_type = other DNA
ttatttcattgcccaggaatgaagtccaatacctactagttgtttgtcctaatccgcttcctctcccaccctccaccctctgataggtcccagtgtgtcttgttcccctgtgtgtgtcca

SEQ ID NO: 11016 - DNA, 120 bp, synthetic construct
  source 1..120: mol_type = other DNA
actctgcttaatactgtaacctgcccctacttctccctgaacttctctatccattgcactctattccttttctagcatagtatatggtttacctatttatactgctttttggttactgtc

SEQ ID NO: 11017 - DNA, 120 bp, synthetic construct
  source 1..120: mol_type = other DNA
cacaagttagtaatttaaatccttggacaaagttacagaaagtgcatcttcttgttttccatcttcatacaatgttaaattttttttttttggtgtttataccttttaaaaaataaaagc

SEQ ID NO: 11018 - DNA, 120 bp, synthetic construct
  source 1..120: mol_type = other DNA
ggaaactgttctttttaactttatacccacccacaccccaatttcaaaacatcatttaattgtcttggtcatagacatttcgaagatgagattttatattccactcccatagcttctggt

SEQ ID NO: 11019 - DNA, 120 bp, synthetic construct
  source 1..120: mol_type = other DNA
ccctaagtcttgtcctttctgtcagaaatagatacaagaaggatacagcaaacactgctataacacctctctcataggattcaaatcagtgtggagattattataggctccagatgagtt

SEQ ID NO: 11020 - DNA, 120 bp, synthetic construct
  source 1..120: mol_type = other DNA
ccaactcattgctcttttggaaagacccattctttcctctattgtcttggtacctcctcaggacatattccccaaagtggaaatgtcagtttaagataattttcagcattgtgtagaata

SEQ ID NO: 11021 - DNA, 120 bp, synthetic construct
  source 1..120: mol_type = other DNA
ttccaaactcatttaacaaggctagcattaccttgataccaaagtcaggcaagggtatcacaagaaaagaagattataggtcaatatccctgatgaacatatgtgcaaaaattgtcaaca

SEQ ID NO: 11022 - DNA, 120 bp, synthetic construct
  source 1..120: mol_type = other DNA
tagcatgctcagttctctcaccatgcgataccctgcaccacctcaggactctgaggactcacagctattattcaaaaagtcagaagataacagatgttagagaggatgtggagaaaaggg

SEQ ID NO: 11023 - DNA, 120 bp, synthetic construct
  source 1..120: mol_type = other DNA
acatacacacagacaaaatggtgactatgtgaagtgatagatatgttaattagcttaattgtagtgcagtagtgcccccttatcctcagaggatatgttccaagaccctcagtagatgct

SEQ ID NO: 11024 - DNA, 120 bp, synthetic construct
  source 1..120: mol_type = other DNA
gtatgtgtgtgtgttacccttattgatacttaccagtttgctattaatgtgtgaatgggagctgaagaaactatagtggaaccaacagtcttaacttacactttggtggttcagttgctg

SEQ ID NO: 11025 - DNA, 120 bp, synthetic construct
  source 1..120: mol_type = other DNA
ccactcttgccttttacttctgtgcacatccaagaatgtccttaacactagactgctgtaagctcatattatacaggtgaaattttctagcgtcttagcctgttattccttctgttccta

SEQ ID NO: 11026 - DNA, 120 bp, synthetic construct
  source 1..120: mol_type = other DNA
tacatatcaagtgtacacatttatgggacatatgaaatgccctgatgcaagcatgcagttctgttactctaaatcttgactcaactctatttttacttgttaaattcttagctataaaac

SEQ ID NO: 11027 - DNA, 120 bp, synthetic construct
  source 1..120: mol_type = other DNA
aaaagagaagagaatgaggatgtgagggcatttaaaaaagctactgaaaaaagttgcatggaggtatactgaaggagaaaaattgcaacagtgtcagatgctgcatagaggtctttctgg

SEQ ID NO: 11028 - DNA, 120 bp, synthetic construct
  source 1..120: mol_type = other DNA
gtctattaggtccgcttggtgcagagctgagttcaattcctggatatccttgttaacgttctgactcattgaactgtctaatgttgacagtggggtgttaaagtctcccattattattgt

SEQ ID NO: 11029 - DNA, 120 bp, synthetic construct
  source 1..120: mol_type = other DNA
gcctgtgaaggattttatttctccttcacttatgaagcctagtttggctggatatgaaattctgggttgaaaattcttttctttaagaatgttgaatattggcccccactctcttctggc

SEQ ID NO: 11030 - DNA, 120 bp, synthetic construct
  source 1..120: mol_type = other DNA
actcttttttctctaaacttctcttcttgcttcatttcattcatttgatcttccatcactgataccctttcttccagttgatcgaatcagctgctgaagcttgtgcattcatcacgtagt

SEQ ID NO: 11031 - DNA, 120 bp, synthetic construct
  source 1..120: mol_type = other DNA
ttgtttacctactcaagcttcagcaatggcgggcgcccctctcctagcctcgctactgccttgcagtttgatctcagactgctgtgctagcaatgagcgaggctccgtgggtgtgggacc

SEQ ID NO: 11032 - DNA, 120 bp, synthetic construct
  source 1..120: mol_type = other DNA
tctcaacaaataatgctggagcaattgggtatccaaatgcagaaaatgaacttcaatccttacctcacaccatttataaaaactaaccagaaatgaagcatagacctaaacttctagaag

SEQ ID NO: 11033 - DNA, 120 bp, synthetic construct
  source 1..120: mol_type = other DNA
atagaactttttgatcactccagaaagttctttcattcccctttgcagtcatttcccaacacctcccctctgttccgcaggcaactacagatctactttttgactttaaagattggtttt

SEQ ID NO: 11034 - DNA, 120 bp, synthetic construct
  source 1..120: mol_type = other DNA
atgaatagagcaaggaaagaataagcgaataagaacgtgggcttgtttttttcaaacaaattatatgttatggactctagatctcttaacttagcttcagtgacattggattattgaaaa

SEQ ID NO: 11035 - DNA, 120 bp, synthetic construct
  source 1..120: mol_type = other DNA
catggagccgttatgaaagtgtatttatgctgtatttctttaagaggtagcagtttgtgtcctggaaaaattttcattgtgtctctcactattcatgtgtaagctttcttaattgtggct

SEQ ID NO: 11036 - DNA, 120 bp, synthetic construct
  source 1..120: mol_type = other DNA
gagggctataactcattggttgctggacagcctatggatgggtcaggtgactatcttttgtttcagttagctgctttggtataattccttatacaaaattcatgattagaaattagcatg

SEQ ID NO: 11037 - DNA, 120 bp, synthetic construct
  source 1..120: mol_type = other DNA
gtaaactgaggatgaatgggttccaggtttcccactgtcaatgaagagttacaaatatagaaagggaaacactaaaatgaagcatatggttttatattggaattggatgaatggatgtga

SEQ ID NO: 11038 - DNA, 120 bp, synthetic construct
  source 1..120: mol_type = other DNA
catttgcggttaagagaatatgaaagttacagtgttagctaaataagcaattgtgtaatagcatggtaaagggagaagggtaaaagaggcatggccctattctggagagaatgaggatgg

SEQ ID NO: 11039 - DNA, 120 bp, synthetic construct
  source 1..120: mol_type = other DNA
tgttaaacaaatgaagcaggatatactctgattatgactgtgtgtaaggaagaaacctagaccactaacgcatagaatgaaatgactggagagaagtttaccacaatgttaacccaagtt

SEQ ID NO: 11040 - DNA, 120 bp, synthetic construct
  source 1..120: mol_type = other DNA
gattggtagtaatcttgggctttgccctgcaggcagtggaaactccttgaatgattttaaactagggagtaacagttggatttggcctcaaaagaccactcaggactttgtaaaagggat

SEQ ID NO: 11041 - DNA, 120 bp, synthetic construct
  source 1..120: mol_type = other DNA
aatgcatgctctaacagtatgcccatgtagagctccagagttttttcttggaaacagaatgagtagtacatgagattttctgcctcattggagtagtattgaagataattaatataaagg

SEQ ID NO: 11042 - DNA, 120 bp, synthetic construct
  source 1..120: mol_type = other DNA
taataattaaattggcattcctttggactaaattccccaatttttattgagtaatgtactcctccctcattctctgcttggcttattaactgttagcaagttcctataattctggtacta

SEQ ID NO: 11043 - DNA, 120 bp, synthetic construct
  source 1..120: mol_type = other DNA
tcaaggatagaccatgtgttaggcttaaaacattaaaaaagcatgaaataatatcaagcatattctctgatcacaatagaataaaactagaaattaataacaaggtattttggaaactgt

SEQ ID NO: 11044 - DNA, 120 bp, synthetic construct
  source 1..120: mol_type = other DNA
atgagcatttaggttgatgccatgtctttgcttttgtggatagtgctgcagtgaacattcacgtgcttttgtctttatggtagaatgatttctattcctttgagtatgtactcagtaatg

SEQ ID NO: 11045 - DNA, 120 bp, synthetic construct
  source 1..120: mol_type = other DNA
attggtttacattattctgaaaaaaatgtgcctgtttttgtaccagtaacatgctgttttggttactgtagccctgtagtatagtctgaagttggataatgtgatgcctccagctttgtt

SEQ ID NO: 11046 - DNA, 120 bp, synthetic construct
  source 1..120: mol_type = other DNA
gtgaaaaagggcatccttgtcttgtgccagttttcaaagggaatgcttcaagcttctgcacattcagtatgatgttggctgtgggttagttataggtgaaaaaaagaggaaaaactcaaa

SEQ ID NO: 11047 - DNA, 120 bp, synthetic construct
  source 1..120: mol_type = other DNA
aaaaagcatttgataaaattcagcatccttcatgcccaaaaccctaaaaaacctgaggatagaaggaacataccttaacgtaataaaagccatatataacagacccacagctagtataat

SEQ ID NO: 11048 - DNA, 120 bp, synthetic construct
  source 1..120: mol_type = other DNA
aacgagatcatatcaagttaaaaagcttctacacagcaaaggatacaatgaatgaagtgaagagacaacccacagaatggaaaaaatatttgcaaactacccctctgacaagcaattaat

SEQ ID NO: 11049 - DNA, 120 bp, synthetic construct
  source 1..120: mol_type = other DNA
tggagatcattatgttaaatgaaataagccaggtacagaaagacaaacatcacatactctcatttatttgtgagatctaaaaatcaaatctgaactcatggacctagagagtagaaggat

SEQ ID NO: 11050 - DNA, 120 bp, synthetic construct
  source 1..120: mol_type = other DNA
catttctcagttctttatttttattcatctcttagctggctgtattttacaatcaacaagtttttaaaaatatgctttttggttccatgttctttatgtttgacatgtttaggaatcatg

SEQ ID NO: 11051 - DNA, 120 bp, synthetic construct
  source 1..120: mol_type = other DNA
taaaagctatgaggtggtgatggtgatgctaccctcttatctcagaggcacgtttacatttcatatagtacattacaggtgactaaaggtcatggttgtgcatcagagagggtaagatga

SEQ ID NO: 11052 - DNA, 120 bp, synthetic construct
  source 1..120: mol_type = other DNA
tgaggataccgtttgagttagtctcgctcagtcagtctctcatttgatattggtaccagcactttaatacctaataaaatgaaagcaaaagaatgtacttgagagagattctttcatctg

SEQ ID NO: 11053 - DNA, 120 bp, synthetic construct
  source 1..120: mol_type = other DNA
gataatgagaattaattgaatcattggaattagaataaattctaataaacttagtaattttatataataaatatacttataaaagtggaattaaaaatttgaattctaattattataata

SEQ ID NO: 11054 - DNA, 120 bp, synthetic construct
  source 1..120: mol_type = other DNA
aaattaacatggaagagtggttaggattggggaaaggcattctcagtaaagtgttgggggagggcattcccagtgaagaaaagcaagaaacaagaaaaagatatgaatgaaattgcatgg

SEQ ID NO: 11055 - DNA, 120 bp, synthetic construct
  source 1..120: mol_type = other DNA
ataagcctccatgtacttatcatgtaacttcaacagataatttacagttaatctgtagccccattgcctgctcagttcccccagctgtattattttgaagcacatctttgcataccattt

SEQ ID NO: 11056 - DNA, 120 bp, synthetic construct
  source 1..120: mol_type = other DNA
cttgcagactaaaatacgcttagatttagtttgaaagttggctatttccatgccttctctttgtatttgtttatgagactgtagtttacagttctttttgggagcagagtagaagaggga

SEQ ID NO: 11057 - DNA, 120 bp, synthetic construct
  source 1..120: mol_type = other DNA
ctacaaaatacatatttaaaaaaatgaactgggcatggtggcatgtgcctgtagtcccagctacttggaagactgaggcaaaaggattgcttgagcccagaagtttgaggttacagtgag

SEQ ID NO: 11058 - DNA, 120 bp, synthetic construct
  source 1..120: mol_type = other DNA
gttggcttccagtcaacagtaggctgttagttaaattttgggtactcaaaagtaatcgataggtctgtagtctcagctacttgggaggctgaggtggaaggatggcttgagcccaagcat

SEQ ID NO: 11059 - DNA, 120 bp, synthetic construct
  source 1..120: mol_type = other DNA
tttgctacaaatgtctttccaatgagaacagaataactgagagctttgcatggtaagacgaaatatgtggagaaaaggatgctgtgatagatgatgaagaacaaaaccagtgttttagaa

SEQ ID NO: 11060 - DNA, 120 bp, synthetic construct
  source 1..120: mol_type = other DNA
ttaatgaaaagtttgcatttaattggatttcttcctatcactccttttaaaatgcaattttacttctctgaggttggaatcactttggcgttaaaagtcacagtagaaggcatgccaata

SEQ ID NO: 11061 - DNA, 120 bp, synthetic construct
  source 1..120: mol_type = other DNA
agaccttatttatattgcatgcgaactcagtgtatattacaaaattaaatgtatattatacaaaaattctttaatgaaatctgtgcctctgtgtgctgagagatgtaatgacatgtaaag

SEQ ID NO: 11062 - DNA, 120 bp, synthetic construct
  source 1..120: mol_type = other DNA
ctttgtcataaacataatggaaagagacccacaattaaaaagagtagtgaaaaatattttatttaagcagcagctgggtcatctattttctatcctatctattattgagttatcatttta

SEQ ID NO: 11063 - DNA, 120 bp, synthetic construct
  source 1..120: mol_type = other DNA
accatcaaagatattctccatagagcccccagaatttctcctagaaatgtaaatcagttacattcaccttgctgttaaacccactgactgcttcccattgcaattggtatacagtgcaaa

SEQ ID NO: 11064 - DNA, 120 bp, synthetic construct
  source 1..120: mol_type = other DNA
tactttggacaagataatgagatgacacagaagggactataaagcaatgtctgaactgaattttgaaacatgcaaaggcctgtgtcacaggataaagattttagggagtgggaacagcat

SEQ ID NO: 11065 - DNA, 120 bp, synthetic construct
  source 1..120: mol_type = other DNA
cacacaacacaatgtgtctggggaactattagcagctctgtattgattgactataaaatgagagtaggaagtcacaggagaggagagtgggtactagatatgaagggccttatatgccat

SEQ ID NO: 11066 - DNA, 120 bp, synthetic construct
  source 1..120: mol_type = other DNA
ttggggagtgcagagattgaagcgaagaaagctgagggagggagggagtttcattaagagcaagtatttctctaacagtgtcaaatgcttcaaggaaggtcaagtattagaacaaatgag

SEQ ID NO: 11067 - DNA, 120 bp, synthetic construct
  source 1..120: mol_type = other DNA
aatagttgaggatcttttcagccctaaacattctacagttctttgcataattaaagtgtcccaaatgttcagctactccaaaattgtaacattgatatttaccatatactgcccccttca

SEQ ID NO: 11068 - DNA, 120 bp, synthetic construct
  source 1..120: mol_type = other DNA
acctatttgccttgctcaccattcttccttgcaacttatgcctcacttctgagataatttttttcttcttcagatatatcctttgataattactttagtggtattaatttgggatgaact

SEQ ID NO: 11069 - DNA, 120 bp, synthetic construct
  source 1..120: mol_type = other DNA
ttccctcctccctctagtagtctccagtgtctattgctgccatctttatgtccatgagtacctgatatttagctcccactcattagtgagaacatgcagtatttggttttctttttctgt

SEQ ID NO: 11070 - DNA, 120 bp, synthetic construct
  source 1..120: mol_type = other DNA
atatatatttttgagacagagtttcactctgttgcctaggctggagtgaaatggcatgataattggctcactacaacctccatctcctgggttcaagcgattcttgtgactcagcctccc

SEQ ID NO: 11071 - DNA, 120 bp, synthetic construct
  source 1..120: mol_type = other DNA
gccttggttttatttcatttgctttttcggaagcaacatacatcccaatataactcttaattgaaggtattttatgagaatgtatgaggctctttctgatggatggaaagcttaacaaat

SEQ ID NO: 11072 - DNA, 120 bp, synthetic construct
  source 1..120: mol_type = other DNA
tacatgccatttgtcagtgatattattgagtgatattatttcaggaaatctaaagctaatataataggtaagagtatgggccatggagtgacagccctgggtttatatttggttctacca

SEQ ID NO: 11073 - DNA, 120 bp, synthetic construct
  source 1..120: mol_type = other DNA
tctatttaaaaattttttcaatttcataaagatttttgccaaaaacaaaggcaaacacacacattagcctaggcctacacaggatcaggattaacaataccactgtcttctgcctccaaa

SEQ ID NO: 11074 - DNA, 120 bp, synthetic construct
  source 1..120: mol_type = other DNA
agacaagctagcttttgtgttgtcttggcggccatatttgtaagaagggtgagaagtatgttttaagaaaaggctttttaaaaaattttagtaattgtcagctgggtatagtggtacatg

SEQ ID NO: 11075 - DNA, 120 bp, synthetic construct
  source 1..120: mol_type = other DNA
ctttggtcgggggagagggatagtgtgaggttaaggagaaggaatgcttattttagatcactatatactgaagaatgtaattggtcattataagccatttaagaggcttatttgagttat

SEQ ID NO: 11076 - DNA, 120 bp, synthetic construct
  source 1..120: mol_type = other DNA
agtgagaggtgtttcttaacatctacctcaagaacatatagggaatttaatgaataatgttatttcagtctatagcccaaggatcaagtggaatattagaatggagctttaatcgagcac

SEQ ID NO: 11077 - DNA, 120 bp, synthetic construct
  source 1..120: mol_type = other DNA
ccagtaatgagatggctgggtcaaatgctatttttggttttagatccttgaggaatcgccacactgttgaactagtttacagtcccaccaacagtgtaaaagtgttcctatttcttcaca

SEQ ID NO: 11078 - DNA, 120 bp, synthetic construct
  source 1..120: mol_type = other DNA
ttgaaactgtgttgcatgctaagtatatatcttttaatttgtatcagtatatagaagtggtaattaaaaaattaagactttaggtatgccataatcctaatttgcacatgtaaccttagt

SEQ ID NO: 11079 - DNA, 120 bp, synthetic construct
  source 1..120: mol_type = other DNA
taaaaaccttgagtggtagtggataactttgtgaagataagttatgccacacaaacaggatactgtgtatttttcctgtgagaataattgacattatagagaagggatatggcatagata

SEQ ID NO: 11080 - DNA, 120 bp, synthetic construct
  source 1..120: mol_type = other DNA
ctttcctggactattctggactcttcctattgatctctcatttgctaccttgagaccatttctctcacagcagccagagaaatctgctcataatgtaaatctcatcatgctaattcctca

SEQ ID NO: 11081 - DNA, 120 bp, synthetic construct
  source 1..120: mol_type = other DNA
gtgtgatggcatggtggcatgttcctgtggtcctaggtacttgggaggctgaggcaacacagcgagactctgtctcaaaaaaataaaaaataaaaacaaaaaaactagaatgggagcttt

SEQ ID NO: 11082 - DNA, 120 bp, synthetic construct
  source 1..120: mol_type = other DNA
atccaccactgaaagcttgacagagtcctaatatataaaatacttttctgatgaaatcggtggtgatatcaatgaatgtgagagatttgtaaacatttacaagaagtacataattcagtg

SEQ ID NO: 11083 - DNA, 120 bp, synthetic construct
  source 1..120: mol_type = other DNA
atattaatagatttaacccacacaaacaaaagcttttggggtccttagtaattttaagaatataaaagggttttgagtccaaaaagtttgagaacccttgcctgtattctcttccccact

SEQ ID NO: 11084 - DNA, 120 bp, synthetic construct
  source 1..120: mol_type = other DNA
gaacccaggtctttctggctccaaagctattaatccttatgctttgctgagtaactgaagtttggagaagggataagatcacttaaggggagaatatagtatgagaagagaaggaggcta

SEQ ID NO: 11085 - DNA, 120 bp, synthetic construct
  source 1..120: mol_type = other DNA
tcagataggagctgaaaagttttagcaacaatgaagtcactggtgacagtgacaaggactgttaaatgaaggggtggggataggatgagatctgaatgagagataaagtggacacagtca

SEQ ID NO: 11086 - DNA, 120 bp, synthetic construct
  source 1..120: mol_type = other DNA
ttaataggtgtagtgggagtaacaatgagaatgaaagtgtaggaggttgtagtcaaagagttgtttcaccttagaatttctggagacagaacatttctgggtagtttactgtattttaag

SEQ ID NO: 11087 - DNA, 120 bp, synthetic construct
  source 1..120: mol_type = other DNA
tgtagatccagattccttttgttttccttctgactgtaaaactttttttggccaggggcagtggctcatacccgtaatcccaacacttagtggggctgaggcgggaggatctcttgaagc

SEQ ID NO: 11088 - DNA, 120 bp, synthetic construct
  source 1..120: mol_type = other DNA
tacaagcatgagccaccacgcctggccttgttctttttttgctgtatctttttcctgcaggtttttctttctgtatttcatgttgaataccttctaaagctatgtcttcaagtttattaa

SEQ ID NO: 11089 - DNA, 120 bp, synthetic construct
  source 1..120: mol_type = other DNA
cagagcagtctttaatcaatagccgattttccttcactatccaggcattgctcttctgagtactctactgaatatcccatatatgacaaggtttttccactctggctagttgaaagcaga

SEQ ID NO: 11090 - DNA, 120 bp, synthetic construct
  source 1..120: mol_type = other DNA
ggtacgtcacataaacattgagtctcctttaaatgtgtcaaatgtagctgacttactaattggattctgtcatactctttttctgtggtcaccaaatattagcaaatttcttcattcagt

SEQ ID NO: 11091 - DNA, 120 bp, synthetic construct
  source 1..120: mol_type = other DNA
ttgaaattctcgctgccatcacagcagtctgaggtcgacctgggatggtagagctaggtagggggaggggcattccccattactgaggcttgagttttcccctcacagtgtaaacaaagc

SEQ ID NO: 11092 - DNA, 120 bp, synthetic construct
  source 1..120: mol_type = other DNA
acagaaaccccatttgaaggtcatcaacatcaaagaccaaaggtagataaatccatgaagatgaggaaaaaccagcacaaaaaggctgaaaattccaaaaaccagagcgccttttctctt

SEQ ID NO: 11093 - DNA, 120 bp, synthetic construct
  source 1..120: mol_type = other DNA
gttgaaatgaaggaaaaaatattaagagcagccactgctcaaggaaataagagagggcacaaacaaatggcaaaacattccatgctcatggatgggaaaaattatagcgtgaaaatggcc

SEQ ID NO: 11094 - DNA, 120 bp, synthetic construct
  source 1..120: mol_type = other DNA
agcatatacccaaaggattataaatcattctactaaaaagaacatgcacacatatgtttattgcagcactattcacaatagcaaagacttgaaaccaacccaaatgcccatcagtggtag

SEQ ID NO: 11095 - DNA, 120 bp, synthetic construct
  source 1..120: mol_type = other DNA
tgatgggaagcaaacacaaaagggagaacagtctgtggctctgaaaaaaccaaaaaggatatctgttgtatgtttgtatggtgggtcattaacctttggtgtactttgcagaagtatttt

SEQ ID NO: 11096 - DNA, 120 bp, synthetic construct
  source 1..120: mol_type = other DNA
gaaaagtaacatttgttgactagctcctttgtgcagtgcactgtgactattggtctggcttattcctcaggaagaaggattaaaagaagactttacaaaaatgagcaaactatattataa

SEQ ID NO: 11097 - DNA, 120 bp, synthetic construct
  source 1..120: mol_type = other DNA
ttaaaacactctgacatatgaaaaaatgccagagtttactgtagagaaatattcataacttgtctattcatgtcactcctccccaccacaccatccatattatacacattacccattctc

SEQ ID NO: 11098 - DNA, 120 bp, synthetic construct
  source 1..120: mol_type = other DNA
atattcacagaagcctggaagtgtaaacactgctatccctattttatagataaagagacctgaggtccagagatgtcatgtaacttgctttggtgtggttctgaacaaattatgtctctg

SEQ ID NO: 11099 - DNA, 120 bp, synthetic construct
  source 1..120: mol_type = other DNA
tttccaactatttatagcatgttttaaaaactctgaactgtcacgacccagtctgtttcaacatacacatttgtggtccttggtgttgttactaatttacttaattgggtcttcatattt

SEQ ID NO: 11100 - DNA, 120 bp, synthetic construct
  source 1..120: mol_type = other DNA
aactcttgggctcaagtgatcctcccacctcagcctccttagtagatgtgactacaggtgtgagccaacacacccagctaattttttttattctttgtagagacggggtcttgctgttgc

SEQ ID NO: 11101 - DNA, 120 bp, synthetic construct
  source 1..120: mol_type = other DNA
ttgttaaaacacatattacagattgctgggcccagtcacaaagtttccagtgtagggtccaagaatttgtatttctgatatgtttccaggtgatactgatgctgctggtctgggtactac

SEQ ID NO: 11102 - DNA, 120 bp, synthetic construct
  source 1..120: mol_type = other DNA
tcaaacgattctcctgccttagcctcctgagtagctgggattacaggcacgagacaacgcgcccagataatttttgtatttttagtagagacgggttttcaccatgttggttagcctgat

SEQ ID NO: 11103 - DNA, 120 bp, synthetic construct
  source 1..120: mol_type = other DNA
ttgcactgcagtacagagctgagaagttgcagccagaaagtagagcctgcaaaccgaaaatatttactatctactccttgagaagaaagtttgtcaatacccaatataaagcattaacat

SEQ ID NO: 11104 - DNA, 120 bp, synthetic construct
  source 1..120: mol_type = other DNA
ttcttgttgtgattatttttcttttcttgctgaagacaaatgcatctctaccctgtatcagacgaatctttatttgatcatgtctcccctaccttgaaattcttgaggactttccacagc

SEQ ID NO: 11105 - DNA, 120 bp, synthetic construct
  source 1..120: mol_type = other DNA
cttttgaattctgtttttaacactgcttttccaatgaaagaggtaattttctacccttttaagaggttattgtagtaaatcttttgggagcaggaagacaggaaggtaggagaggcttaa

SEQ ID NO: 11106 - DNA, 120 bp, synthetic construct
  source 1..120: mol_type = other DNA
cagaaattattaggatgctggaaagccatttttccacacctgaaaaattttctcagcttactgtgttcctttgaagggagttaatgtgggaaggaagattagtcaaatcatctaccgttt

SEQ ID NO: 11107 - DNA, 120 bp, synthetic construct
  source 1..120: mol_type = other DNA
ctctaacttggaactcctgggctgaaggcattaaagatgtattttgctttaggtttatctaaaggaaaccatggatccctaaagaaaaccccccactgttattttattgaaaatgggttt

SEQ ID NO: 11108 - DNA, 120 bp, synthetic construct
  source 1..120: mol_type = other DNA
gtacacactgtgatgtttgcacgacataattacctaagcaagcatcataagcaacacgtgacagtatattactttctaaatgccaagtactatatttcactatctctgatgtttctccga

SEQ ID NO: 11109 - DNA, 120 bp, synthetic construct
  source 1..120: mol_type = other DNA
aaggaacttgaaagttctgtcccagtgagtcctaatggttttatttcaggcagcagattcattgtcaaatatcttactttttaaggtctgtaggttatgctgaataaaattctctgcacc

SEQ ID NO: 11110 - DNA, 120 bp, synthetic construct
  source 1..120: mol_type = other DNA
cctccgatcacagttaaccacacgccagtgcaaacaatctttgcatttcttttggttcttagagtctttgacttaaatgggtagacaattgccagaaatcgatctacactaatacaggtt

SEQ ID NO: 11111 - DNA, 120 bp, synthetic construct
  source 1..120: mol_type = other DNA
taatatgacatcacaggaagaagaggctgggtttggacaaagaaactttcagcccagtttgtttgcacttcctttaatctgataatgtgtctgctgggaatatacctaggaggcttgcaa

SEQ ID NO: 11112 - DNA, 120 bp, synthetic construct
  source 1..120: mol_type = other DNA
aaataaggtttagagaataaaaatcctactacttggcaaaattttaggttcatagtcttatcttccttcttcctcccagctcttcccttaaccccttaatatgacattaactatatattg

SEQ ID NO: 11113 - DNA, 120 bp, synthetic construct
  source 1..120: mol_type = other DNA
tgaagggttgaatatcttttatatcacatttggtatagaaaagatgtatgtgtgtgttcttattagaaggctggtagaagctgagtgagcattaatgaaaaaaggagtggttaataagct

SEQ ID NO: 11114 - DNA, 120 bp, synthetic construct
  source 1..120: mol_type = other DNA
tactgaggaagagccatagcagagggactgtttgaacaggaagaagataattgaatactgcattttttccagatattaaatttggcctctaattaaggaaccaaaggggaatttagaaac

SEQ ID NO: 11115 - DNA, 120 bp, synthetic construct
  source 1..120: mol_type = other DNA
gtgggaggaggggcttctgccattactgaggcttgagtaggtggttttcacctcacagtgtaagcaaagccaccgggaagtttgaactgggtggagcccactgtagcccaactgcttctc

SEQ ID NO: 11116 - DNA, 120 bp, synthetic construct
  source 1..120: mol_type = other DNA
atgaggaaaaaccagcgcaaaaaggctgacaattccaaaaaccagaatgccttttctcttccaaagaatcacaactcctcgccagcaagggaacaaaactggacagagaataataaactc

SEQ ID NO: 11117 - DNA, 120 bp, synthetic construct
  source 1..120: mol_type = other DNA
aacataccaaattgtaaagaccattgacactatgaagaaactaatgggcatcaactaatgggcaaactaactggctagcatcataatgacaggatcagattcacatataacaatattaac

SEQ ID NO: 11118 - DNA, 120 bp, synthetic construct
  source 1..120: mol_type = other DNA
cactcctcaacaaatgcaaaacaatggaaatcataacacagtctctgagacctcagtgcaatcaaattagaactcaggattaagaaactcactcaaacctgcacaactgcatggaaactg

SEQ ID NO: 11119 - DNA, 120 bp, synthetic construct
  source 1..120: mol_type = other DNA
atatccttgatgaatatcgacgtgaaaaccctcaataaaatactggcaaactgaatccatagcacatcaaaaagcttatccaccacaaacaagtcggcttcatccctgggatgcaaggct

SEQ ID NO: 11120 - DNA, 120 bp, synthetic construct
  source 1..120: mol_type = other DNA
acacaagggatgtgaaggacatcttcaagaactacaaacttcactgctcaaggaaataaagaggacacaaacaaatggaagaacattccatgttcatggataggaagaatcaatcttgtg

SEQ ID NO: 11121 - DNA, 120 bp, synthetic construct
  source 1..120: mol_type = other DNA
tcattaatgaaatgcaaatcaaaaccacaatgagataccatctcatggccgttagaatggcgattattaaaacgtcaggaaacaacagatgctggagaggatgtggagaataggaatgct

SEQ ID NO: 11122 - DNA, 120 bp, synthetic construct
  source 1..120: mol_type = other DNA
aggattgtttgagcctaggaggttgagactgcagtgagctttgattgtaccactgcacttcagcctggtgacagatcaagaccttgtctaaaaaaaaaacaaaaaggaaagaatatagcc

SEQ ID NO: 11123 - DNA, 120 bp, synthetic construct
  source 1..120: mol_type = other DNA
ggctcactgcaacctccgcaggttgggttttttcactctcaggtataatagatcaaggagtcaccttacactctttatgtttaaggatttctgatttttgaaacaggttgcacaagaaac

SEQ ID NO: 11124 - DNA, 120 bp, synthetic construct
  source 1..120: mol_type = other DNA
taaagggtgatgaatgatgattagagcaaagtaaaagttgatgggaatgatggttgaagcaggttcaaacaagtagggaaaggaaatcaagaggagtgaaaatgttattgtggtaagatt

SEQ ID NO: 11125 - DNA, 120 bp, synthetic construct
  source 1..120: mol_type = other DNA
tctacgaatttagtaaagagcttcttgaggagatgatgtgtaatgaaggctagcctttacagttgaatacaaattttaaatttcaggtcttgaaggctagagccattcctggtaataatg

SEQ ID NO: 11126 - DNA, 120 bp, synthetic construct
  source 1..120: mol_type = other DNA
tgtgacctagagatccagaatccttgatttctaaattttgaccttaccttgggcaaactctgccctgaactttaagatggatatgacatgcccttttgaccttatgaagagttttcagaa

SEQ ID NO: 11127 - DNA, 120 bp, synthetic construct
  source 1..120: mol_type = other DNA
cttctggtgagtcctgaggaagtttatattaatggcagaagtcggaggggaaacaggcatgtcacgtggtgacaataggagcaagaggaaggaggaggtcccatgccctttttaaacaag

SEQ ID NO: 11128 - DNA, 120 bp, synthetic construct
  source 1..120: mol_type = other DNA
accaaacctcacctccagcactggggagcacacttcaacacgagtcatcttctaccaaacctcacctccagcactggggagcacacttcaacacgagtcatcttctaccaaacctcacct

SEQ ID NO: 11129 - DNA, 120 bp, synthetic construct
  source 1..120: mol_type = other DNA
aagttaaaaaggattggtctctcaggatgctcctggaagctgcatgcttgtggctataaagctattctctgatatacctgaattcttttgctcccagtagtgaaattgtgtgtgtattaa

SEQ ID NO: 11130 - DNA, 120 bp, synthetic construct
  source 1..120: mol_type = other DNA
tttttctgggacaaatctatacatttaatgccaatccagtaaaaatctcagtatgttttcagtgcatgtttttacaagtttgttcacctgtagatactgtgggttatatcacctagcagt

SEQ ID NO: 11131 - DNA, 120 bp, synthetic construct
  source 1..120: mol_type = other DNA
ggctgcagtaggccatgccactgtacttcagcctgggtgacagcccaactctaacaattaaaataaaataatatatttaaaaatagcagtagaggctttctaagtattatataaaatcta

SEQ ID NO: 11132 - DNA, 120 bp, synthetic construct
  source 1..120: mol_type = other DNA
tgtgcttgctttaatcaactgttttcacatgtttggaaaatttgagggtttcctgtctatactagaagatacgagcactactccagaaaggttagaaacaaaagaccaaaggacggcttc

SEQ ID NO: 11133 - DNA, 120 bp, synthetic construct
  source 1..120: mol_type = other DNA
tttgtttttttttttgggctacttgccagtgttctgaaactaaatacttctcggagagtagctgtctctcattaaagagccccagatcaacagttccatttcagtcacattccaccctga

SEQ ID NO: 11134 - DNA, 120 bp, synthetic construct
  source 1..120: mol_type = other DNA
ctgttgccttgctttgtaacttaaaagagctttttcagggactccctcagagtacctgctggagatgaatctgtaaaaaatttttgttcagagaatttctgccactaaataagtcttaaa

SEQ ID NO: 11135 - DNA, 120 bp, synthetic construct
  source 1..120: mol_type = other DNA
tcaatattgctctgtcagcaatatctggaaatagcattagtcatttttcttcaggtgcttttatccaacaagcctaagactcctaagattcccttccccattaggaagctccaggcaagc

SEQ ID NO: 11136 - DNA, 120 bp, synthetic construct
  source 1..120: mol_type = other DNA
atcaggatgatagctaatgatattgattaacctttccctgtttatttgtgacctgtatttcctctctggtgaaatttctcttcatgtctttgctcattttctgattggattgtttgtttt

SEQ ID NO: 11137 - DNA, 120 bp, synthetic construct
  source 1..120: mol_type = other DNA
ttggtgtccagttggaaatatggatctagaacttgaaagcatagttttagtcagaaatgtagacttaggaataatatagatatagttaaaatcatgaggccaattgctgtggctcatgct

SEQ ID NO: 11138 - DNA, 120 bp, synthetic construct
  source 1..120: mol_type = other DNA
acatttattatctcacacaaattctgaaagtcgggaaactgggagtggctttactgtgtgattttgactcatgtttcctcatgagagattcttaaattgtcaaccaaggctgcagctagt

SEQ ID NO: 11139 - DNA, 120 bp, synthetic construct
  source 1..120: mol_type = other DNA
agtcacctgtctaaaatccttcagcgagtttatattttgctatttccttgctatgaaatctgtattttagcattatggaaagaaaaatttctgtctcaaaggcttgtgtgccaggtgccc

SEQ ID NO: 11140 - DNA, 120 bp, synthetic construct
  source 1..120: mol_type = other DNA
actagtatagcagctaacggcacaagttttagaaacaggtagacttgggtttgaatcactgctccatcacttatcagccatataatatggggcaaaatttataatttctataaaatacac

SEQ ID NO: 11141 - DNA, 120 bp, synthetic construct
  source 1..120: mol_type = other DNA
agtggttgaaatttgggagataacttttgctatgttctgtgaggcaaagaggagggaggctagagttgatgaagacatctttcttttatgtatgatattgtctatgttgggccctgttaa

SEQ ID NO: 11142 - DNA, 120 bp, synthetic construct
  source 1..120: mol_type = other DNA
aagggtactaatcatccttttcatgagggatgtgttgaaactaaattgtgcctgaagacccttatgttacctttacatatcaaatttctattgtatctggccaacctttgattttaaggc

SEQ ID NO: 11143 - DNA, 120 bp, synthetic construct
  source 1..120: mol_type = other DNA
aatagataatttgatgccttgtcacttagcagtacaagcatgtttatttctgacttttaaactcgaattcacccttcttgtgtttttctattcagtcgtaacccactccttctacatcta

SEQ ID NO: 11144 - DNA, 120 bp, synthetic construct
  source 1..120: mol_type = other DNA
ttcttaaaaatatctcctcttagtctataatttagcgaaaggattactgttttgaaagacttaaaaaaaatgcttagctattttttagctaagaaaaaagattcctttttcagtaaatgg

SEQ ID NO: 11145 - DNA, 120 bp, synthetic construct
  source 1..120: mol_type = other DNA
ttggagatagtgtcagatcccactggttggggtctcagtgcccatacctcatacccccagacaccatcctaggcctccagaacttctgacctactggcttcaaattggggttctcacacc

SEQ ID NO: 11146 - DNA, 120 bp, synthetic construct
  source 1..120: mol_type = other DNA
accctatcacttggaatactttcctgaaagcaacacaggtcatcattgccaaatatttttaggaccccaattctgtactaagtgctagtgatgtgataggaagccagacacaattgaact

SEQ ID NO: 11147 - DNA, 120 bp, synthetic construct
  source 1..120: mol_type = other DNA
gcagataacacatatttttagaggatttagagtatatataactaagaaggttccctttatttgttattttttgggagggaatcctgctctgtcacccagactagagtacagtggcacgat

SEQ ID NO: 11148 - DNA, 120 bp, synthetic construct
  source 1..120: mol_type = other DNA
gaatttattctacgtgtgacaggaagctcttgcagggttttgagtgtggaggtgggttagggagtaacatattagctctatgaggacatctaggaggcagcaagagtagaagtatggaaa

SEQ ID NO: 11149 - DNA, 120 bp, synthetic construct
  source 1..120: mol_type = other DNA
gtgtacttaagtcctattaatcacacatctttgcaaggtctcaagagtctcctaaaatttcattgtttgaaagaaaaattggtagtaggccactcttgaatatatgtgggtttatactca

SEQ ID NO: 11150 - DNA, 120 bp, synthetic construct
  source 1..120: mol_type = other DNA
cctgaaagtttagagttgaaagcgcatctttaacacattcatacatacatccaagaaattcaaataaaataatcaagccaaatcactgaaagctgagaaaagagttgaatgttcaagtgg

SEQ ID NO: 11151 - DNA, 120 bp, synthetic construct
  source 1..120: mol_type = other DNA
tcaaaattttgtatctccagcctggacaacatagggagaccctgtctctacaaaaaaaatttcagaaaattagctgggcaccatggcgcattcctatagtcccagctactcaggaggctg

SEQ ID NO: 11152 - DNA, 120 bp, synthetic construct
  source 1..120: mol_type = other DNA
ttacatttaagtctttaattcatcttgagttaatttttgtataaggtttacagaaggggtctagtttcaattttctgcatatgactagccaattctccgaggaccatttatttatttaat

SEQ ID NO: 11153 - DNA, 120 bp, synthetic construct
  source 1..120: mol_type = other DNA
attgttggtgtataggaatgctagcgattattgcacattgattttgtatctgagagtttgctgaagttgcttatcagcttaagaatgttttgggttaagatgataatttgacctcctctc

SEQ ID NO: 11154 - DNA, 120 bp, synthetic construct
  source 1..120: mol_type = other DNA
gtagaattcagttgtgaatgcatctgatcctgggattttttttttttttttggttggtaggctatttattactgcctcaatttcagaacatgttattggtctacttagggatttgatttc

SEQ ID NO: 11155 - DNA, 120 bp, synthetic construct
  source 1..120: mol_type = other DNA
tttttggctttgttgaccaaactgtgttttatctttgttttcagtttcattaagttctgctcatgtcttcatttctttctctccactttcttcgttttttttctgtctttcctcctaact

SEQ ID NO: 11156 - DNA, 120 bp, synthetic construct
  source 1..120: mol_type = other DNA
agcataggataagtgtagggagaagtatgggatgtggactaacacacagttgattagtgtgtgctggtgatgacgatgggaaaagaaaatgtaaacccaaatgtatctgaaacaggtctc

SEQ ID NO: 11157 - DNA, 120 bp, synthetic construct
  source 1..120: mol_type = other DNA
aggcactgggaatacagaagtaagatggcctgggtccttcccctcatagagcttacattctggaggaggaacacaggcaatgaacaagtaaaccaagatgtaagatgattttagagtata

SEQ ID NO: 11158 - DNA, 120 bp, synthetic construct
  source 1..120: mol_type = other DNA
cgatactgtcagtgaactgaatgaaaatccaaagtggatactagaccagacactggtccttctaaaatcattgtgataatgggtcgcttttcttagtgtactggttaatatactacgtgt

SEQ ID NO: 11159 - DNA, 120 bp, synthetic construct
  source 1..120: mol_type = other DNA
tgcaaatgcagagacacaagcaacctcagccttccagacccagaagccattgaaatctacctctctttcactgttttataaaaaaggttagtagatgattattttcaagagcatggactc

SEQ ID NO: 11160 - DNA, 120 bp, synthetic construct
  source 1..120: mol_type = other DNA
ctcctagcagagaaggtagctcctctctgcaggcaggtcgtcccaacaagtgttcagttctcagcagaaagggtagctcctctctgcagctgctcgtcctgacaagtgttcagctatcag

SEQ ID NO: 11161 - DNA, 120 bp, synthetic construct
  source 1..120: mol_type = other DNA
atgtacatacaaaagtagtgtgttgttgcctactgcagacacatttcctggatattttcaggacatttaagaaggccagtaaccaggtcatgtagcattctctgagtgtgtatatatggt

SEQ ID NO: 11162 - DNA, 120 bp, synthetic construct; identical to SEQ ID NO: 3905
  source 1..120: mol_type = other DNA

SEQ ID NO: 11163 - DNA, 120 bp, synthetic construct
  source 1..120: mol_type = other DNA
tctttctttttctttctttctttctctctttctttcttttttttgagatagagtctcactctgttacccaggctagagtgcagtggcgcaatctcggctcactgcaacctccgcctccca

SEQ ID NO: 11164 - DNA, 120 bp, synthetic construct
  source 1..120: mol_type = other DNA
taatcaattttagaatttgtatcacaccagaaagaaactccataccctcaagcagtcaccccctattcccctaccccctcagcccaaggcaatactaatctattttctctctatggattt

SEQ ID NO: 11165 - DNA, 120 bp, synthetic construct
  source 1..120: mol_type = other DNA
tattttttatttattttttttatttttgacacggagtcttgctctgtcgcccaggctagagtgcagtggcacgatctcggctcacggcaatcttcgccttctgggttcaagcaattcttc

SEQ ID NO: 11166 - DNA, 120 bp, synthetic construct
  source 1..120: mol_type = other DNA
gtccagcttcattcttttgtttgtggataactagttgttccagcaccattttttgaagagtttttttctctcttcattgacagttgtcaaaaaatcagttgactgtaaatatataagtat

SEQ ID NO: 11167 - DNA, 120 bp, synthetic construct
  source 1..120: mol_type = other DNA
ccatgtatggcatatgcaaagtgaagaatatagaccttaaattcaaaatcattgtaacagcatacaaggatcttcctcatgctgttcaggaggtaggtaattttccatagtaagtttttt

SEQ ID NO: 11168 - DNA, 120 bp, synthetic construct
  source 1..120: mol_type = other DNA
cccagtctatatactcttctcttcttggatggccagctcttccatctgctgctgcctggctatttctctcaatcattctgtgacatttcacttctagaagagcagctataatccaagcct

SEQ ID NO: 11169 - DNA, 120 bp, synthetic construct
  source 1..120: mol_type = other DNA
ccaagaataaaaaatataaagcattcttcatttcaaataagctagactcttgaaactctatttgcttatttaagtaacataataagaatatgggggcggggtgaagaaaatctatttacg

SEQ ID NO: 11170 - DNA, 120 bp, synthetic construct
  source 1..120: mol_type = other DNA
acttaagtgtccctgtctgacagctttgaagagagcagtggttctcccagcacgcagctggagatctgagaacgggcagactgcctcctcaagtgggtccctgacccctgacccccgagc

SEQ ID NO: 11171 - DNA, 120 bp, synthetic construct
  source 1..120: mol_type = other DNA
tgtcagattcaccaaagttgaaatgaaggaaaaaatgttaagggcagccagagagaaaggtcgggttaccctcaaaggaaagcccatcagactaacagcggatctctcggcagaaacctt

SEQ ID NO: 11172 - DNA, 120 bp, synthetic construct
  source 1..120: mol_type = other DNA
agacatctacagaactctccaccccaaatcaacagaatatacctttttttcagcaccacaccacacctattccaaaattgaccacatagttggaagtaaagctctcctcagcaaatgtaa

SEQ ID NO: 11173 - DNA, 120 bp, synthetic construct
  source 1..120: mol_type = other DNA
aatcaataaatgtaatccagcatataaacagagccaaagacaaaaaccacatgattatctcaatagatgcagaaaaagcctttgacaaaattcaacaacccttcatgctaaaaactctca

SEQ ID NO: 11174 - DNA, 120 bp, synthetic construct
  source 1..120: mol_type = other DNA
aagaaaacctaggcattaccattcaggacataggcgtgggcaaggacttcatgtccaaaacaccaaaagcaatggcaacaaaagccaaaattgacaaatgggatctaattaaactcaaga

SEQ ID NO: 11175 - DNA, 120 bp, synthetic construct
  source 1..120: mol_type = other DNA
caatttgagaaccagtttggttatatgtttcaaaacacttttatattttttaaatagccaatctgctaaacaaagcaggttactttaggttgagtacttttagtttgcagtttattggat

SEQ ID NO: 11176 - DNA, 120 bp, synthetic construct
  source 1..120: mol_type = other DNA
aataaattctgtgttggtattcttcagcaaaaacgtcacattctgaacatcctaactaataaatcattgaccaggcattaggagagcatcttaacactctacccagtacatttaggtact

SEQ ID NO: 11177 - DNA, 120 bp, synthetic construct
  source 1..120: mol_type = other DNA
ttagacgggcactgttagaataattcccaaatgaatatagtttgtcagtggttctagggtagaggtaacctttaatttggtattcctaatagttcagaatgatgtatttatgctcatctc

SEQ ID NO: 11178 - DNA, 120 bp, synthetic construct
  source 1..120: mol_type = other DNA
atcacctcattagaacaaaagatggtcccatcacccttatcacacatgaaattcgaagggttttaggagctctgtcccaggaaccagggacaaagaccaaatatctttcaatgataccat

SEQ ID NO: 11179 - DNA, 120 bp, synthetic construct
  source 1..120: mol_type = other DNA
ccaccatgtccagctaatttttaaattttttgtagagacagggttttctatgttggccagattggtattgaactcctggcttccacgataccccgtctcagcctcccaaagaactgggat

SEQ ID NO: 11180 - DNA, 120 bp, synthetic construct
  source 1..120: mol_type = other DNA
agctatgggaccttataaggacagttggaactggctaggtatcacatagtggtcttcaaacatttttgcttgccataacctctaaaataattgggaaaaagttgaatgtacttccatatc

SEQ ID NO: 11181 - DNA, 120 bp, synthetic construct
  source 1..120: mol_type = other DNA
ttttccagtagccgagatggtcatctggggaatccagagtctcagcactgctcctggcttataccaatttctttcatgccaagtttatttggaagttgtgagaatggctcaaaataatag

SEQ ID NO: 11182 - DNA, 120 bp, synthetic construct
  source 1..120: mol_type = other DNA
aaatgaaggtcatttttaccctttctatgatctttcatgcaggaagactaagaagtgaaacattgcttgaccacattcaacacaaatggctacagttagaaaatactttagcagaactac

SEQ ID NO: 11183 - DNA, 120 bp, synthetic construct
  source 1..120: mol_type = other DNA
aacatgtatattttcttagagaagtgttcagttgctatagttagtacatttcccagtgacacacttagctatgatggcgagcttcctctgccaggccaaagttcaggacctttgtgcatc

SEQ ID NO: 11184 - DNA, 120 bp, synthetic construct
  source 1..120: mol_type = other DNA
ctgctgaagtatatgccaagcatcaaccacctcatctctagaatagtggcctacaaaatggggcatacctgaagtatgcaaagtcatcttttggggtacataaagtagaagttctattta

SEQ ID NO: 11185 - DNA, 120 bp, synthetic construct
  source 1..120: mol_type = other DNA
ctgtgctttatggatagtaagaatggccctagagtgggagtcctgataacccaggcctgtctgactactttgccttcttttgtagcatataggtgatgtttgctcttgtttttattaatt

SEQ ID NO: 11186 - DNA, 120 bp, synthetic construct
  source 1..120: mol_type = other DNA
tatgggttaggcattaatgtttctatctgattttgtgcaaaagcttcaaattaaaacagctgcattagaaaaagaggcgcttctcccctcccctacacctaaaggtgtatttaaactatc

SEQ ID NO: 11187 - DNA, 120 bp, synthetic construct
  source 1..120: mol_type = other DNA
ccctactgacttcccatcctcatcttgtagaattttctccttgtcactgtgctttagccacactgaacctttttctttaaaatgccaagcctattcttaccttaggcttttatatttctt

SEQ ID NO: 11188 - DNA, 120 bp, synthetic construct
  source 1..120: mol_type = other DNA
aaggagttttaaaatttaaaagagagtgatcagggaaagacttgagtgatatttgggcaaagatctgaaggagacaagagagtgagccagacacaaacaggagtcaaacattccacagag

SEQ ID NO: 11189 - DNA, 120 bp, synthetic construct
  source 1..120: mol_type = other DNA
cactgcacctggcctatttactttttcattacagctttctaaaggtacaaatggccaggaacaaactagttatactagttctattatcatctggatggtttcatagaaacttgcttttag

SEQ ID NO: 11190 - DNA, 120 bp, synthetic construct
  source 1..120: mol_type = other DNA
gtttgtagttgcatcttttcattattcttggttaagaatccagcctctaaataaaactctccatgttaaggtccagaatgactggcaatttacatgaactataacctgaagaacatactt

SEQ ID NO: 11191 - DNA, 120 bp, synthetic construct
  source 1..120: mol_type = other DNA
aaaaaaaaaaaaaaaaaaaggccaggcgcagtagctcacgcctgtaatcccagcactttgggaggccaaggcaggcaaattggcaaatcatgaggtcaggagatcgagaccatactggct

SEQ ID NO: 11192 - DNA, 120 bp, synthetic construct
  source 1..120: mol_type = other DNA
tggttaagcaatttgttaaagagaaactctgtccatttagtgttgctgtaacagaataactgaggctgagttaattcataaattagaggggtgtatttggctcatggttctggtggctgg

SEQ ID NO: 11193 - DNA, 120 bp, synthetic construct
  source 1..120: mol_type = other DNA
ataagcacatgaaaaaatactccacatcctatgttatcagggaaatgcaaattaaaacaaaaatgagatggcactatacacctattagaatggcccaaatctggaacactgacaacacct

SEQ ID NO: 11194 - DNA, 120 bp, synthetic construct
  source 1..120: mol_type = other DNA
accaataaagagcagaccaagacaataatatgaatgataattaggttgtttataagctatttgtggtctagggtgggctttcctatgagactttatccgagtaactgcttgataagagca

SEQ ID NO: 11195 - DNA, 120 bp, synthetic construct
  source 1..120: mol_type = other DNA
gtcacatctgatcagaacattcaatgctttctacataaactctgggtttaggcagacaaagaccactcaccaccatccttcttctgacagttacaagtactcagccaaacatagctcatc

SEQ ID NO: 11196 - DNA, 120 bp, synthetic construct
  source 1..120: mol_type = other DNA
gggaaaatgctttaaagaaatcatgacttccaagtctctggtaagagagacccaacagattggtgttttctggcttactgtaatgcactctgggccaaagaataatgctgtaataattct

SEQ ID NO: 11197 - DNA, 120 bp, synthetic construct
  source 1..120: mol_type = other DNA
aatgggagaatgaaaggaccctaaaaagttatcacttggatccatgctcctttactttattctagagtgggatcttcccctaaatactaaattaaggacaggacttggaaagagttcctg

SEQ ID NO: 11198 - DNA, 120 bp, synthetic construct
  source 1..120: mol_type = other DNA
agtaaagatgttttacctcaaatgccccaaagctcttcctttttatctttataataaaattaccatgaaaagctgcctctattccccatcttcagttcctctacttccacgctccgatca

SEQ ID NO: 11199 - DNA, 120 bp, synthetic construct
  source 1..120: mol_type = other DNA
ttttcccagaacacaccacccacacctccttcaggtctctgcttgagtcacctgctcactgatgtcttgcctccctgaccattctatttaaaatttcaactttcatctcaggatggcatt

SEQ ID NO: 11200 - DNA, 120 bp, synthetic construct
  source 1..120: mol_type = other DNA
ctaatttagggtacagcaattagctggacaggctgtagtacaacagtgcatctctataggcaaaactgaacatccatgaaaggggtatttagtaggtacctactctgtgtcagacaccgt

SEQ ID NO: 11201 - DNA, 120 bp, synthetic construct
  source 1..120: mol_type = other DNA
gaccaaaggagaggatatccttataccaaaaggaaactgactcgaagatgttacagcctgtttcctaaagatttggttctaagattggttttctttcctttctttattatcataacaata

SEQ ID NO: 11202 - DNA, 120 bp, synthetic construct
  source 1..120: mol_type = other DNA
tagccaagtctagcagtcctggcggaaagaggtgtttattagggggagtgatttcaagcatcctgatttacagttgctcactcagccactcagagatgattttgacactattttagatat

SEQ ID NO: 11203 - DNA, 120 bp, synthetic construct
  source 1..120: mol_type = other DNA
cagacactttcctcacttacttcccaaaaccccagccccagggttttaaatatcatctatatatgcaggtgagtcctgttatattacctgtcacctattttcaagtaattcaacgtagac

SEQ ID NO: 11204 - DNA, 120 bp, synthetic construct
  source 1..120: mol_type = other DNA
aggggtctgtcctgcctgtgccattgggttctggcacaagaagtcctgcaactctaaatgtcaactaaaattgaaacctgtcctttcagttcttaatgaaattacatttttcaaggtggg

SEQ ID NO: 11205 - DNA, 120 bp, synthetic construct
  source 1..120: mol_type = other DNA
atatatctagaatctgatctcttttcaatacttccactgctatacaaccccaacccaggagaccatcatctcacacctgaaccaatataataactgatgttttaaacacagatcacatct

SEQ ID NO: 11206 - DNA, 120 bp, synthetic construct
  source 1..120: mol_type = other DNA
cctaatggccaatacctcaaaatgtgaccttactaggaaagagagcctttaaagaggtaatcaagttataagaaggtcactagggtgggccctaatccaatatgactggcatctttataa

SEQ ID NO: 11207 - DNA, 120 bp, synthetic construct
  source 1..120: mol_type = other DNA
agagagagtgagcaaacgctgcacagcttgatcttactaaagaggaacttgagactaaaatgctgtgttgagtgtgtgactcactgcagtaggatttaaatatctgttacacaacaacat

SEQ ID NO: 11208 - DNA, 120 bp, synthetic construct
  source 1..120: mol_type = other DNA
acagacataatgaacacacaggacaggatatggcactactctactggtactcatgaaagtaccaattcctcaaaataactgagcaactgagcaatggattttttcccctgaagacagatt

SEQ ID NO: 11209 - DNA, 120 bp, synthetic construct
  source 1..120: mol_type = other DNA
ttagttcccttttgtagaagcccatcagagagaaataaattatgatagtgcacctaacaaaatcctcattatcaaagtaaagccctgagctctttcccagattttcaggccatcccccaa

SEQ ID NO: 11210 - DNA, 120 bp, synthetic construct
  source 1..120: mol_type = other DNA
ctatgggtcattccaactcctattgcacagagtaaattcagtagttctaccacactgggctgtatgacctggagcccaggagagcagtttcctaggatcactatgtgatatgccctactg

SEQ ID NO: 11211 - DNA, 120 bp, synthetic construct
  source 1..120: mol_type = other DNA
acacaccctgtttcaacaaacaggctttctcattgaccttcaatgacttcatacatggttgttcaggaatgttctttctctctgccttacaaaccctacccatcttgtaaggcccagttc

SEQ ID NO: 11212 - DNA, 120 bp, synthetic construct
  source 1..120: mol_type = other DNA
atgactactcagccttttaagtgacaaagcatcttttaggtggagaccatgtatttctagtgatcaattcaaattagtacgactttccctagaagagtcctttcctgatatttgcagggt

SEQ ID NO: 11213 - DNA, 120 bp, synthetic construct
  source 1..120: mol_type = other DNA
taattcccaaatgacatcagtgtggccctgactacaagtctccagtgagtaaggaaaaatacctgggggctcctcagggaatatttcaagtaaaagggaactaactgggccatgtatgct

SEQ ID NO: 11214 - DNA, 120 bp, synthetic construct
  source 1..120: mol_type = other DNA
caacagcatccttcactgatctgcccaacatcagaaaagccaaataatgcggttcttatgttcccttctgagatgtttgttctttgttattagcatccatgaaagagggtagcctctgcc

SEQ ID NO: 11215 - DNA, 120 bp, synthetic construct
  source 1..120: mol_type = other DNA
tggatggttgctccagcaaagaaaacaatgtagacagatttctccttcccacttctgtgaacaggtaactaagaactgaaacccaccccaccccacattcaatccagttcctaattagtc

SEQ ID NO: 11216 - DNA, 120 bp, synthetic construct
  source 1..120: mol_type = other DNA
tttaagaagacagaaatgcaatagataactcccaatgtccagttaagcaacttggcactcacacagcttccattcccattacctgcttctctgctactttttctttctcccaccttgacg

SEQ ID NO: 11217 - DNA, 120 bp, synthetic construct
  source 1..120: mol_type = other DNA
tctacaatgactgcaaccctggtttaaaagaaaagatagtgaaacgtttttgctctacactactatcaggaaatgaaaagtggaaaggcagtgatctgaccatgcttgagaaattccaaa

SEQ ID NO: 11218 - DNA, 120 bp, synthetic construct
  source 1..120: mol_type = other DNA
aatactcttgttaaataatattctaacactagcagtacattccccaccattctctatatatctaagtcctgtttaatcacaatcaccaaagaccagtgtggggactgtgaaaatgcccgt

SEQ ID NO: 11219 - DNA, 120 bp, synthetic construct
  source 1..120: mol_type = other DNA
gcagctaaacttttcatcctgccaacaaatctatgtttttaatacattgatatctttgccagcgaagacttaaaaatacacgcacacaaactgacagtggacgtaccctctggacacgga

SEQ ID NO: 11220 - DNA, 120 bp, synthetic construct
  source 1..120: mol_type = other DNA
gtatctactttgccccagccatcttttccagcatttggggatttttcttattgcaaataacctctttactacagcaacagagaaggaacaatacctccttttaaattttgcaattatgga

SEQ ID NO: 11221 - DNA, 120 bp, synthetic construct
  source 1..120: mol_type = other DNA
caaattagaaagcacacacccatgtactactacttaagtcaagaaatataaccttataatcaccccccaaaaggccctcacatatgcatcttgcatacaaatgtttagtttttcctgttt

SEQ ID NO: 11222 - DNA, 120 bp, synthetic construct
  source 1..120: mol_type = other DNA
aaggataacgggagactactgtatatctggttatctctgactatgtgctgcctattgccactgaacaattattttggttaattctctcaggcctaggataaaggtgccttcccctagaaa

SEQ ID NO: 11223 - DNA, 120 bp, synthetic construct
  source 1..120: mol_type = other DNA
tcaatttcacaggaagagctagcaactctcaaccaattaaacaatgttctcaagggcagctgcgaataaagctgaaattctacatggggttcctaggttacctgttgttgcaaggacaat

SEQ ID NO: 11224 - DNA, 120 bp, synthetic construct
  source 1..120: mol_type = other DNA
gagtcatccaaagctgggcttctgggaactgaatgttcagcagatactttaaatattggctatgtcttaaaagtagctgtggaaactaggctggttgtaaaagcaagagagacagagaga

SEQ ID NO: 11225 - DNA, 120 bp, synthetic construct
  source 1..120: mol_type = other DNA
acattatttaaagcaacaaagattttctaaggcctctctttcccatcagttattaaatcaaccttaccgggaatgtggtctggtgtataactgagtggactatccacttaccttctacag

SEQ ID NO: 11226 - DNA, 120 bp, synthetic construct
  source 1..120: mol_type = other DNA
tgatgatgccttgatttcagacttctagcctccagaactgtgagaaaagaaatttctgttgtttgaattgtagtcatttgttacagcagcacaaagaaactaacagagaagacaagcagc

SEQ ID NO: 11227 - DNA, 120 bp, synthetic construct
  source 1..120: mol_type = other DNA
actgaaaaaagagcaacttgcccaaggccacaatagagctaaggatggaattttgttacgttagcttttagttaagcttctactttaaattaccccaccacccaatatcatgaagaaatc

SEQ ID NO: 11228 - DNA, 120 bp, synthetic construct
  source 1..120: mol_type = other DNA
catccctaattcaaaaatctgaatccaaaacccaaaactttttgagcaccaattatgatgttcaaaggtcctgctcaaaggaaatgttcattagagcatttcagatttcaggttttcaga

SEQ ID NO: 11229 - DNA, 120 bp, synthetic construct
  source 1..120: mol_type = other DNA
aaggaaatacatctgccacaaaattagagaccaaattgcactttattattcctttgagtgtgtgatacctgtataactatgcttctccagcaatatgaagaatcgagtgtataaccaaac

SEQ ID NO: 11230 - DNA, 120 bp, synthetic construct
  source 1..120: mol_type = other DNA
cgattatctgttggcatctcagtgattacactgtgagcccctcaaagatagatagtatctcattgattttcctatcggtgaccaataggtgcttcatgaagtatgtttcatgcaacagaa

SEQ ID NO: 11231 - DNA, 120 bp, synthetic construct
  source 1..120: mol_type = other DNA
ataaccatgcccacatcacctactttctaccaggtaaaagtaacagcaggagcagctctagcagaagctatgcaatatgtctggactgtggtttaatcattatgtagttaacgatttcat

SEQ ID NO: 11232 - DNA, 120 bp, synthetic construct
  source 1..120: mol_type = other DNA
ctgcactaccctaggccccctttcgttcctagcagaagggaaatcttcctaatgtgctaaaatcatgaaaaaccgatcctgggcttttgagtaggaaataacctcttttcagtgtctttt

SEQ ID NO: 11233 - DNA, 120 bp, synthetic construct
  source 1..120: mol_type = other DNA
ctggctgggagcattccctccaaaaacttttgtacctgattgttttaaatttctggaacccagtattcagtcatctttaatcctgttccttttagatccttgtaaagttgtcttctagag

SEQ ID NO: 11234 - DNA, 120 bp, synthetic construct
  source 1..120: mol_type = other DNA
ctcagcccactaatttccagatcactaacaagtcctgcaattttagcaacactgccctagataaactctagagcatacacacaaatattcccaatagcaaaaagcaagaaagaacaaatt

SEQ ID NO: 11235 - DNA, 120 bp, synthetic construct
  source 1..120: mol_type = other DNA
taaataatttttttaatgagctatgatcgcaccactgcacattagcctaagcaacagagcaagactctgtctctaagaaaataaaaatagcctgggcgcggtggctcatgcctgtaatct

SEQ ID NO: 11236 - DNA, 120 bp, synthetic construct
  source 1..120: mol_type = other DNA
cttgcaatataaatagaaaatggaatgataagtaacctctccacgcagaagttcctgccactgatctctgtctttaaaggttccaaatgggacactcggtggccagtagttcaagtctgt

SEQ ID NO: 11237 - DNA, 120 bp, synthetic construct
  source 1..120: mol_type = other DNA
agcatcggtgtgttaatgagctgcagaccacataaatttcaataggataatgatggttcccaaatatatccttaggtgagtcattagatagtatctttaatagctttttaagggtcatct

SEQ ID NO: 11238 - DNA, 120 bp, synthetic construct
  source 1..120: mol_type = other DNA
tatctcctactggtacttgttagctcaaaacatcttccatagggagatatacataagagatattagctcaggccaattagcaaggctgaagacgtaaaagaaacccactctaatgtcaaa

SEQ ID NO: 11239 - DNA, 120 bp, synthetic construct
  source 1..120: mol_type = other DNA
gccaccgcgcccggcctgatttgtagtaatttaaatccaagtaaacctcaacagtagcagtatcttggggcatttaaattttactttaaccaactgataaaaccaaacttgaatatgaca

SEQ ID NO: 11240 - DNA, 120 bp, synthetic construct
  source 1..120: mol_type = other DNA
tatggtggagatagattgatcatacccttacaaatatataatatcagatggtgattaagtgctacaaagccgaaccagcagtacaagagtttggagagccagacattttaggtgaggtag

SEQ ID NO: 11241 - DNA, 120 bp, synthetic construct
  source 1..120: mol_type = other DNA
aaagaacaaaagcaaaaagttcattctaaattagccttccaactcagttctttctccgccaagacggagcacttggaaagttttcaatgtctgaaaacctctatttccagggctgagcag

SEQ ID NO: 11242 - DNA, 120 bp, synthetic construct
  source 1..120: mol_type = other DNA
atgagttggcgcctccccctgaaacggcccggcctcggcgggatgcgctcgggtgcccggccgagacggaaacgaagggagcgcagacaagaggagggggctggcgacggcgtctcgccc

SEQ ID NO: 11243 - DNA, 120 bp, synthetic construct
  source 1..120: mol_type = other DNA
ggcagacatttatctctattctctgagcatagcccactgagcctcagaaggaggcacgcaaaatggtacacaggtatttcttgtagagctctaaatggaagaaaaagtaagtatacatta

SEQ ID NO: 11244 - DNA, 120 bp, synthetic construct
  source 1..120: mol_type = other DNA
catctgtacctgtgcactctattccttcccattactgggaatgagctgtgcatgctcttatttaagttcaactcttccacctttgtattagatcctgtcttccttacagtctcaaggttt

SEQ ID NO: 11245 - DNA, 120 bp, synthetic construct
  source 1..120: mol_type = other DNA
gcaaagtcaccaatgacctcagaattgctaaatcagtggttacttttccattatctcacctgaactatcagcagcattagaagcatttgcttacagctgccatcttgaagcattcatctt

SEQ ID NO: 11246 - DNA, 120 bp, synthetic construct
  source 1..120: mol_type = other DNA
ataataggcacatatacacttactgtggcaatagtgaaagaatgacaaaataccaagaggtgatcagagaaggctttccaaaacagattactttagcattaagttttcagtgtgggctgg

SEQ ID NO: 11247 - DNA, 120 bp, synthetic construct
  source 1..120: mol_type = other DNA
aggtcctctgcccatttttaaattgggttgttttattgctactgaattgtttgaattccttatatattttggatattaacgccctaacagatgcatggtttgcatatattttctccaact

SEQ ID NO: 11248 - DNA, 120 bp, synthetic construct
  source 1..120: mol_type = other DNA
ataattttttttttttttttttttgagatagagtctccctctgtcacccagtctggagtgcagtttcacgatctcagctcactgcaacctctgcctttcaggttcaagtgcttctcctga

SEQ ID NO: 11249 - DNA, 120 bp, synthetic construct
  source 1..120: mol_type = other DNA
tttgactctttttgtcaacattacagttactggcaacttaagtcatttttgccccatcctacaggtgagatagtggagacctaggtaacttgcctaaggtcacataagtagtaagaggtg

SEQ ID NO: 11250 - DNA, 120 bp, synthetic construct
  source 1..120: mol_type = other DNA
tgtacaattaccaagattgggttcctttcagtgatgtaaatatgattcagtgttaagaaattgattaatatattcttccataataataggtcaaaggaatagaaatgttttaattcatga

SEQ ID NO: 11251 - DNA, 120 bp, synthetic construct
  source 1..120: mol_type = other DNA
tgccaatcactgagttttccaaaatctgatttccttgaatgtacccttcatatttccctcaaattggtgtgattggatctagagtctcggttagattgaggttctatatttttggcaaga

SEQ ID NO: 11252 - DNA, 120 bp, synthetic construct
  source 1..120: mol_type = other DNA
acttcaggggaagattaccttcccatcttgtccccttttcagctgcctctcttggtgattatcactttcattggcaataaaatccatgcatttaccatccttcaattcattcatgagacc

SEQ ID NO: 11253 - DNA, 120 bp, synthetic construct
  source 1..120: mol_type = other DNA
atactgcagatccagactttttgacagggaaagctgtccaggatgtgttgctgatataaatacaagtcataaaaactatatatgtaaaattgaacacaagtgtgtctatttacactgaga

SEQ ID NO: 11254 - DNA, 120 bp, synthetic construct
  source 1..120: mol_type = other DNA
aagtaaagtcagaaatgccagaaagaaacgtgtggagccgacgctgaagatgaatctagaaaggcagttcctcaagggcattgataaatattaaacaaagagcagatatggtctggagga

SEQ ID NO: 11255 - DNA, 120 bp, synthetic construct
  source 1..120: mol_type = other DNA
atgcatgggtcagtgagaaagtttaagagcctcacctagaagaaacggtattgagtctgtattatttagaaccagtgtccgtttaatcctctctcctgagattcctatctggtgtgctag

SEQ ID NO: 11256 - DNA, 120 bp, synthetic construct
  source 1..120: mol_type = other DNA
tctaggctcatcagaggatacaggcctatggatcactatgaaagcatccactgtgaaacggaaaattgtgttttgaagataatgctagaaagctgacaccgctaagtcatacaattctcg

SEQ ID NO: 11257 - DNA, 120 bp, synthetic construct
  source 1..120: mol_type = other DNA
tgagattatccatattatctcaatttactacatttaggctatgaacacagatttcaatggaactcaagtgaccatttcatgagaatgtatacattgcgtcctttcatttcatctgtgttt

SEQ ID NO: 11258 - DNA, 120 bp, synthetic construct
  source 1..120: mol_type = other DNA
gacattttggaaaaagaataaacgaaaacctacccatatttgcttttgtgtttcagaccttttttagccaggcatttaagactggctgagtgtaacctttgcccttggcatttgggggca

SEQ ID NO: 11259 - DNA, 120 bp, synthetic construct
  source 1..120: mol_type = other DNA
catccctgcaaaagctgccaagccaaacccagttttttccgtaattttcctctgactcaaaaatggtattctcagtccttgttaggcccatttttatttctccacaccatccattcaaca

SEQ ID NO: 11260 - DNA, 120 bp, synthetic construct
  source 1..120: mol_type = other DNA
tataagccaacttactttccttttctcttccttaagttagtttgtcttgagtttctgaacttgcaagtggtagaatccagattgtcacctgtctcctcctcctctttgaattccatcaag

SEQ ID NO: 11261 - DNA, 120 bp, synthetic construct
  source 1..120: mol_type = other DNA
gaccagaaacaaagatgcttagattatccctcagacaaagccttgatcagtttaccagttcagcttcatggagggaagaaatggagcagagcatccaagaagggttacatcaatgcatct

SEQ ID NO: 11262 - DNA, 120 bp, synthetic construct
  source 1..120: mol_type = other DNA
tcaccatgttgtgggtgacaaggagagaagagctatggccctttgggcatcccagacttaggggctccctgaaccaaggctgtgacaacctctttggggttctgcagtttctggcatctc

SEQ ID NO: 11263 - DNA, 120 bp, synthetic construct
  source 1..120: mol_type = other DNA
aaactacatttccagctgtgcttgtaggtaggtatggcatatagctaagttccagacaatgggatataagcataaggtgatgtgtacaacatcctgaaaaagtccttagagataggggat

SEQ ID NO: 11264 - DNA, 120 bp, synthetic construct
  source 1..120: mol_type = other DNA
tacatcactaagaattaagagcacaattttttaaagttcatttcaccaccaagtgtgacatttgtagtaagtttttaataagtgttcttgatggtttaagaaagtttccttctgttcctc

SEQ ID NO: 11265 - DNA, 120 bp, synthetic construct
  source 1..120: mol_type = other DNA
actcttctgggcatagtgtttcttggtatgtttattttgtaaacctttgaattaattttttcaaaagttatgagtgggttgaaagtaatctagtacccatgataagtcaataccagtttt

SEQ ID NO: 11266 - DNA, 120 bp, synthetic construct
  source 1..120: mol_type = other DNA
gacttcttttgtggcctagaagagtgctcagtttttataaattctctataggtgctccaaactttaattgttggtaagagttcctcatgtattcttatattaagcttgttaatatcattt

SEQ ID NO: 11267 - DNA, 120 bp, synthetic construct
  source 1..120: mol_type = other DNA
tcaggcccttgtgtagtctgctcctcttgaatctgggcttgtctttaaccaatagtatgtggcagacgtgacatcagatctgaatataacattttaaaaggcctaatggcttctgctttt

SEQ ID NO: 11268 - DNA, 120 bp, synthetic construct
  source 1..120: mol_type = other DNA
ctttttattatacagcagtcacacttcatggaaggcatgtagttgtggagattttgcattactcaaaattcatgtaagtcaagacaaatccttaccacacacagagaaatcttagaaata

SEQ ID NO: 11269 - DNA, 120 bp, synthetic construct
  source 1..120: mol_type = other DNA
agttcacaccttgagaaacttttaaaaaaagatcaaaataaatccaaggtaagcagaagaagggaaacaaagtaaaaacagaagtcaatgcaatagaaacaggaaaacaacagagagaaa

SEQ ID NO: 11270 - DNA, 120 bp, synthetic construct
  source 1..120: mol_type = other DNA
aaaaacaaaagaactcaacctaaatatcatacgttatacaaaccaaccgaaagatgaacttaactgtaaaacacaaaactacaaaatattaaaaacaaggccgggcgcggtgactcacgc

SEQ ID NO: 11271 - DNA, 120 bp, synthetic construct
  source 1..120: mol_type = other DNA
atgaaaaaatgttcaacatctcttgccattaggaaaatccagcttaggaccatgatgagctatcactgcacacacatcagaatgactaacataaaaaaacagtgaccacaccaggtgctg

SEQ ID NO: 11272 - DNA, 120 bp, synthetic construct
  source 1..120: mol_type = other DNA
ggataaatgtgctactaactaacaagtagtaaaacgacccttctcggttctggtgttttttcagctgagtcagttatattaagaatcatcttctctgccggactcactcctataatcaca

SEQ ID NO: 11273 - DNA, 120 bp, synthetic construct
  source 1..120: mol_type = other DNA
gttcatttgtcccttacaatctcctacctattatttccctgtaattagaagctcatgggggtgaggctttttcattttggtttcctcttcactgcctggagcactgtgggcacggtttca

SEQ ID NO: 11274 - DNA, 120 bp, synthetic construct
  source 1..120: mol_type = other DNA
aaaatgtgatacaccctgatttgagatgtttagtcgcttatctgcaggaagcaacactcacctcagagaaggaaacctcaaaccactcgcatgagagttagctcccatagaggtagtgag

SEQ ID NO: 11275 - DNA, 120 bp, synthetic construct
  source 1..120: mol_type = other DNA
ctactggtgtaaaaatcttcctttatttgccatggtcccttattatcatcatggccccttactgttatcatgtctagctataaaaagtctcaatttaattagcaaatagatttctttatt

SEQ ID NO: 11276 - DNA, 120 bp, synthetic construct
  source 1..120: mol_type = other DNA
ttgttggtaaaagtgcccaagggaagataggatatacagttgcccatcagcatcttggagagagattgaaaatgaaattgctacttcaaaggcagaaaaacacaatgtcctcaagtttct

SEQ ID NO: 11277 - DNA, 120 bp, synthetic construct
  source 1..120: mol_type = other DNA
cattataaggataaaatcaataaacatttggtgtggacagatgatttctgtggtatgcctttttaggggaggaacagctctgttcctagagagttggaaggttgaccagataaataaggc

SEQ ID NO: 11278 - DNA, 120 bp, synthetic construct
  source 1..120: mol_type = other DNA
gacacacaggcccttagttattatgaggcctgtaagtcttctgtggggagtgcgttaggggatgatggagagaaactttatatgtttaattcaattgtactcgttattaaagcttattca

SEQ ID NO: 11279 - DNA, 120 bp, synthetic construct
  source 1..120: mol_type = other DNA
acatgactggtgggtagagttgtttctgtccattagattccttcctcagggagccacttatccctgtttgggcctgcaagatcttatgtcttttttttacgtaaacctataggtctttga

SEQ ID NO: 11280 - DNA, 120 bp, synthetic construct
  source 1..120: mol_type = other DNA
gaatgtaaacggaagcttttttgtcttccttctatcaagctttgtttgaggttccaaattcaatacacagctagcactgaggagggtgtagcaaattttccagcagttgcagccaggatt

SEQ ID NO: 11281 - DNA, 120 bp, synthetic construct
  source 1..120: mol_type = other DNA
ttgtagaatgcaattatgatgatgagatgggatttagctaacaggagagagaaggatggtaggaacggccaaatgtgcttcagaaatagcagaagtagggcaaaagatgtggctcagaaa

SEQ ID NO: 11282 - DNA, 120 bp, synthetic construct
  source 1..120: mol_type = other DNA
acacattcgtgtgtgtccagccacagcagccaaagttagagagcgtaagacaagacagaacaagagaaagcttctactgacaatgtcttggtcacttcattgcaaaaacaaagctagtcc

SEQ ID NO: 11283 - DNA, 120 bp, synthetic construct
  source 1..120: mol_type = other DNA
gcccgagagatgtgttctgacctgtcccaggtcacatgcaagtttgaggagacaaagctcaaactatgccccaggagaatgatatagaccagtgcttcacatacttaaagtctcatcaga

SEQ ID NO: 11284 - DNA, 120 bp, synthetic construct
  source 1..120: mol_type = other DNA
catggtgaatagcacagacagatggaggacattctgtctgccacagagcctaaaatatctacacgagattgtgggagaaaacccaacagccttcatttcctgccatgtgttttatgtaat

SEQ ID NO: 11285 - DNA, 120 bp, synthetic construct
  source 1..120: mol_type = other DNA
atacttctctctctctctctctctttttttttttttttttttttgtgagacagtcttgctctgtcacccaggctgggagtacagtggcgtgatctcggctcactgcaatgtctgcctcct

SEQ ID NO: 11286 - DNA, 120 bp, synthetic construct
  source 1..120: mol_type = other DNA
taattcttcaggaaaataatgaaatatgttgatcagttgcctggctcagtcagcaaacactgaggtgcctataaagtccaaggaaggtgttttgctgggttctgaagaatagcttctctt

SEQ ID NO: 11287 - DNA, 120 bp, synthetic construct
  source 1..120: mol_type = other DNA
gagtaccaactagaggaaatgaaacttacatggcagggccctcacttgcgccagcccttctaaggccctagaactaggttcttatggttgtatgatttctgtaaaatttgtaagaaatat

SEQ ID NO: 11288 - DNA, 120 bp, synthetic construct
  source 1..120: mol_type = other DNA
ctctgagtttataggcaagtctgaagcagtactacaaaagcaaggtgtctctagcagtttatgaatgaaaaaagcaaaagcttgatagaccttattgtcgtatgatttctgtaaaatctg

SEQ ID NO: 11289 - DNA, 120 bp, synthetic construct
  source 1..120: mol_type = other DNA
atgccaggttgagattttttttggaaagttttcttaaaagcgtctccttacctctgcttctaatacagctcttttatattctggatttgaagtatggttgaaaggtctaggcttgattgc

SEQ ID NO: 11290 - DNA, 120 bp, synthetic construct
  source 1..120: mol_type = other DNA
atatcaaaatggaaggtaaagggaaaaagaattctggacaaaagagagagagagctgtggagcttgaagggggattcagaatttgaatttctggagaactattatgagaggccctgagca

SEQ ID NO: 11291 - DNA, 120 bp, synthetic construct
  source 1..120: mol_type = other DNA
agtgaatacatggatatagtctgtttaggagtacagaataaaccagttccccaggaggaaagagttttaaaaggtaggcagagtaactgctttcatgtgtcctcgaacattccactctct

SEQ ID NO: 11292 - DNA, 120 bp, synthetic construct
  source 1..120: mol_type = other DNA
caattttaaggagttaacttgagtcacagtgaggacagcggcccgggaaacacttccaagttgtcttgggaagtgctcccttatgtatttgcacaggcagggtctttttttttttttttt

SEQ ID NO: 11293 - DNA, 120 bp, synthetic construct; identical to SEQ ID NO: 4025
  source 1..120: mol_type = other DNA

SEQ ID NO: 11294 - DNA, 120 bp, synthetic construct
  source 1..120: mol_type = other DNA
ttgttggtgctgggcactgtgttagactccagaaagacagataattgtttagtaaaggaaaaaaaaatgctgtttctgccctggaaaaatgtgcctgacacagaggccttttgtatttct

SEQ ID NO: 11295 - DNA, 120 bp, synthetic construct
  source 1..120: mol_type = other DNA
gttgcaaaggatgttctttcccacacattttctgagctttaaatagttgcagattgagcgtatccagtttagtttatgaaaaacaccatctgtatcacctggtgggcaaagccagccctc

SEQ ID NO: 11296 - DNA, 120 bp, synthetic construct
  source 1..120: mol_type = other DNA
gcagcccactgagctaccccaggaatttccctgacaatcagttttaaggaggacatgcagaagttgaagatgtggaacacacatcccatctaaggggtgacatccttcagtttgtggaca

SEQ ID NO: 11297 - DNA, 120 bp, synthetic construct
  source 1..120: mol_type = other DNA
cactgcccgttgatagaacctgcttccccctttgaaccatatctgacttgccttgactttcacctttgtaaaaatgggaatctttttaaagctataatactatttcctgattactgcttt

SEQ ID NO: 11298 - DNA, 120 bp, synthetic construct
  source 1..120: mol_type = other DNA
ctccaggttattttgccagtgtttctgacctactggctacaaattggggttctcacaacgctttccttggcttcaatcagtttgctagagcagttcagagaaatacaattactggtttat

SEQ ID NO: 11299 - DNA, 120 bp, synthetic construct
  source 1..120: mol_type = other DNA
tctaaattgatagggactaagttcatttggataatcataaatctgcaaataaataggagggtagttggagggattctgcagtgtgagggttttccaaagcaaaccagctgagctggacca

SEQ ID NO: 11300 - DNA, 120 bp, synthetic construct
  source 1..120: mol_type = other DNA
aatagttgctcattctttagatgctaaaatttagagaattcctccactgcctctcactcaacctgccattttccattgagcactttctctgggctctgcacacctggcacttgaaaaagc

SEQ ID NO: 11301 - DNA, 120 bp, synthetic construct
  source 1..120: mol_type = other DNA
aatccctttatttcaaccatggaacatgcaggaagaccagcagttctcaaatcctttggttatatgggttagggaatcccatgagttctgaatctagtgatagaacaatcacattgtacc

SEQ ID NO: 11302 - DNA, 120 bp, synthetic construct
  source 1..120: mol_type = other DNA
acttggccacaaggtttagaaacaatcacaggaaaccaactaggaagtgaaaattggtaggtattttgagcactaacataaaggatggaagaagcagagatacccagaagtcctggaagc

SEQ ID NO: 11303 - DNA, 120 bp, synthetic construct
  source 1..120: mol_type = other DNA
agaacctaaaattggcctttcgagatgtcttttcagattttcatttctgacaaccagatgactccacctggacccatgtcccttacccagatgctgactcagcgcatgaggactattttc

SEQ ID NO: 11304 - DNA, 120 bp, synthetic construct
  source 1..120: mol_type = other DNA
gcctctattcttgtcagctccagtgggcagatgggtaagtatggaggggcacttccccaatgagctttgtagtcatttaactttaataggctcattgaccgatgcacacagcaagtcatt

SEQ ID NO: 11305 - DNA, 120 bp, synthetic construct
  source 1..120: mol_type = other DNA
tgtgcagatatttttttctgcactttttcccactagcatatcatttaatcttcctggggtgaccattgtgggtaagttatactttagactagggatggtgcatattatttctctgcagtt

SEQ ID NO: 11306 - DNA, 120 bp, synthetic construct
  source 1..120: mol_type = other DNA
tgacacctgttttggcctctctgttgcctcatgttggtaaatgttgtttctatgtttgcctttacctatgagtgtgtgtgcacacctgtttaggtgacatgtctgtgagtctgatggctt

SEQ ID NO: 11307 - DNA, 120 bp, synthetic construct
  source 1..120: mol_type = other DNA
caggtcataggtggattcaaagattttctgactggcagttggttgaaagagttaagttattatctaaagacctgaaatcaatagaaaggagtgtccgggttaagataagaggttgtggag

SEQ ID NO: 11308 - DNA, 120 bp, synthetic construct
  source 1..120: mol_type = other DNA
agctgcacttttttccacctattatctcatttaatcgtcctggggtgaccacagtgggcaagtattacaatttcctcagttttttgcataaagaatctgaggctcagaaagctgaataag

SEQ ID NO: 11309 - DNA, 120 bp, synthetic construct
  source 1..120: mol_type = other DNA
cttatttacttcaggaaacatctctgttcctcttgagcatattttctctctttaattatggagtgtttttgcctggggagtgggtacagaggtgagataggaaaagtggaaaggaagatc

SEQ ID NO: 11310 - DNA, 120 bp, synthetic construct
  source 1..120: mol_type = other DNA
tgaactaaacagaatgcacagcctgaaagaactaaaacagaagggggaaaatgtcacaaaaagtctgatctttgtagaggcaaaggaaagcacatttatggaattgttaaagtgtcaggc

SEQ ID NO: 11311 - DNA, 120 bp, synthetic construct
  source 1..120: mol_type = other DNA
agtgaaaaaaagcacattagattttgacttcaaatttattagtcactgatgtttaatttccatgcaaggcagagtgtgggtgtggaagggaggactcggagggtgacagggagcaggtgt

SEQ ID NO: 11312 - DNA, 120 bp, synthetic construct
  source 1..120: mol_type = other DNA
agtgtgggagtgaagaggaccacgtcagagcatttttcagagagctgaaggttgcatcttaaatctaaagtggttgcttgtcgacactagctatttttgatgaaaatttccttatcatgc

SEQ ID NO: 11313 - DNA, 120 bp, synthetic construct
  source 1..120: mol_type = other DNA
ctcgtaactggccttctccatacccttccctctctgttttagcaaaggatggtttttaagcttgaagtcaaagctacctatttgagatctgctctcaagaattattcattccctggctat

SEQ ID NO: 11314 - DNA, 120 bp, synthetic construct
  source 1..120: mol_type = other DNA
ttattatgacaggggaattgcaataggaaaagtgtgtagagtgttaataaactctaaggcattatgcacatgttaattggaatttgcagtgaatgggtagacctgagagctagtggctca

SEQ ID NO: 11315 - DNA, 120 bp, synthetic construct
  source 1..120: mol_type = other DNA
ctgacctttcttctccccttaaaactctcatttgacaggtgatcctgccttatcctggagaaagaaatgttatgcaagaggccaagaagaagctaaacaaacaagccatgatggattccc

SEQ ID NO: 11316 - DNA, 120 bp, synthetic construct
  source 1..120: mol_type = other DNA
gcgccaccgggaaggacaaggggactgggcacggggaccccggccagtgagcgcccgtggcccgggaccgcccctcccttgagctctctcgccgcgatcccgggcgggtctcgccccgca

SEQ ID NO: 11317 - DNA, 120 bp, synthetic construct
  source 1..120: mol_type = other DNA
ccccgagaggctctttcagcccgtttgaggaacatacaagtaaaaacagtgatgctttgtattgtttgttcttttgagatttcgtgtgaccgtttaaggcctagaatgttggtttatttg

SEQ ID NO: 11318 - DNA, 120 bp, synthetic construct
  source 1..120: mol_type = other DNA
caacagagaaaaactatttaaaatttaaagtttacttagtgaaaaatccaatttggccaattattaatttggaaacatctgatgtgcttcgtacggagccagtgtcttgcggcttgaaat

SEQ ID NO: 11319 - DNA, 120 bp, synthetic construct
  source 1..120: mol_type = other DNA
gaacctctattttttctagttattttagtgaggtcgttatgtaactggtaagaggagaagttttgattgctttcaaaatgatggcgacatcaatcttcttcatgttgcatagtgcgtttg

SEQ ID NO: 11320 - DNA, 120 bp, synthetic construct
  source 1..120: mol_type = other DNA
ttgaagttagctgtcagatggaaccacgaagtataccactagccatggaggaaagaaaccaaacacgtgcacccctcttatgaagtgaatgtagaggtgattttcctaacttatttgatt

SEQ ID NO: 11321 - DNA, 120 bp, synthetic construct
  source 1..120: mol_type = other DNA
ccattggaatgtgaactctgatctgttaagatctctttgccagtcctaatagtcaccagggggcagaaaaaaaccaaccaggattgactcacagtgaaatgattccacattatccagttt

SEQ ID NO: 11322 - DNA, 120 bp, synthetic construct
  source 1..120: mol_type = other DNA
caacaccaccacgggggtattgttggtgagctgatagtttgactggctccatgggtggtcactgtttaaattccacccaactaaagagctgtacaagattttagtcttcaaagtttacac

SEQ ID NO: 11323 - DNA, 120 bp, synthetic construct
  source 1..120: mol_type = other DNA
aaacctggaaacctccaattgctgctgtctggacatcttaaatactttttggttttgcaacttgtctgtggactccttcccgaatatgtttttaagttttgttaggcctgcccttcaacc

SEQ ID NO: 11324 - DNA, 120 bp, synthetic construct
  source 1..120: mol_type = other DNA
tgtggggccagtgctgcatcctcctgcgctggcaatagcagagttgtggagaaactttatttggtatttgaaatgatcaatattttaaccttctgcataaaaagagagagaagtctgtga

SEQ ID NO: 11325 - DNA, 120 bp, synthetic construct
  source 1..120: mol_type = other DNA
tatttctgtcttatattttctgctaagccaccattttgtcatcctgggaatggaggagagagaaatggaggcattcataaattaaccgtgtatgtaccagccttagtctactcacttccc

SEQ ID NO: 11326 - DNA, 120 bp, synthetic construct
  source 1..120: mol_type = other DNA
gtgcaatcacagctcactgcagccttgacctccctggctcaagcaatctcccacctcaaccttccaagtagctggtactgtagacgtgcaccaccacgctctcctaatttttgtattttt

SEQ ID NO: 11327 - DNA, 120 bp, synthetic construct
  source 1..120: mol_type = other DNA
ctctgttttcaaaatcactgtatgaagcaggctttaaaaatgactgatgacttgccctggtgcctaaactgggtgagtcttggggctggtcagtgactagcagtttgttcatgtttttta

SEQ ID NO: 11328 - DNA, 120 bp, synthetic construct
  source 1..120: mol_type = other DNA
gtttgatttgcaaagtgtgtctgccaacttccaccagaccatttttgaaccaattcagaaaaccaggattctgcaatgattaaagtgtccaaggctcctattcatagcaaaaggaattcc

SEQ ID NO: 11329 - DNA, 120 bp, synthetic construct
  source 1..120: mol_type = other DNA
ccaatctgctttccatccctatggatttgcctattcgggagatttcatataaatgggatcacataatatgtggctttttgtgtctggcttctttcacatggcatcatgctttcaaggttc

SEQ ID NO: 11330 - DNA, 120 bp, synthetic construct
  source 1..120: mol_type = other DNA
tgattttgaggttcatctatgttgtttcttgtatcaaaactttgggccttttactttgctaagtagtattctgttttgtggatatagtgcaaactctttatccatctgttgatggacatt

SEQ ID NO: 11331 - DNA, 120 bp, synthetic construct
  source 1..120: mol_type = other DNA
tggcgctgtgttttacagtctgtagcattcacagggcactttgtttccttctaggttatcccagttaatcctccaacaaccctgtgaagtaggtagggactaagtaactaggagtagctc

SEQ ID NO: 11332 - DNA, 120 bp, synthetic construct
  source 1..120: mol_type = other DNA
ctgtcatctccagccagaggccagattgtgtgcaggcaatttccaggctgaatttctgagagatttgatccaaataggataaatggtggaaatgaccactaggaacactccttaaaacct

SEQ ID NO: 11333 - DNA, 120 bp, synthetic construct
  source 1..120: mol_type = other DNA
agcagtaataatgacagtcgacttgtggcagcttaaaaaaaaaagaagctgcctggaaaataagtgattgctcacgattcctcagggagacttactccaaccaccctatttaaattgcat

SEQ ID NO: 11334 - DNA, 120 bp, synthetic construct
  source 1..120: mol_type = other DNA
ctttagtgattgttatgtggtggcatttgttccctctctgagcccacctaggatatgaactatatgggcttcagggtctgagttttgtgattcaggaaactgaaagtggaaggtgttaga

SEQ ID NO: 11335 - DNA, 120 bp, synthetic construct
  source 1..120: mol_type = other DNA
gacatcactaggggagacagagattatgtgtaaagtgccaaactgggtcaggcagttccttgagaacatcactgccctttctcaaagaaatttcctcggtctaaaatgtagagaattgaa

SEQ ID NO: 11336 - DNA, 120 bp, synthetic construct
  source 1..120: mol_type = other DNA
tacacattccacaccctgatacgtagaacacagtattctatgtatcaatgacagggaagggggacgatctccgtgtactgctatggaatgatctccagggcgtactattaaatgaaaaag

SEQ ID NO: 11337 - DNA, 120 bp, synthetic construct
  source 1..120: mol_type = other DNA
gagctggaatatcttgttgtatcagaaagcaaagaagctatcaaagaccacggtgtcctgtgagaagtactcagaagctaattgaaggggctccccctgtccaaatattgaacaatttgg

SEQ ID NO: 11338 - DNA, 120 bp, synthetic construct
  source 1..120: mol_type = other DNA
aggaatgaatattagcattttgcaacccctggtgaataatgagtttagacaatgtggttgttaatggctactaagctgttaggtgcagctgatggcgttctttataatggagggatcagg

SEQ ID NO: 11339 - DNA, 120 bp, synthetic construct
  source 1..120: mol_type = other DNA
tgaaactgtctctacaaataatacaaaaaattagcccagtgtgatggcacaaagaaagaaagagagagagagagagagagaggggaaggaaggaaggaaggaaagaaagaaagcagttat

SEQ ID NO: 11340 - DNA, 120 bp, synthetic construct
  source 1..120: mol_type = other DNA
aaggcaaatcaagaacaaaaactgccaccaaaacatcagagtcggtcttcctttgagggcgggaaatttatccaaggataagggaagaaaatggaaatagaccgcattcctcccactgtg

SEQ ID NO: 11341 - DNA, 120 bp, synthetic construct
  source 1..120: mol_type = other DNA
gtgagtgagtggtgcagggaagctaagccagagggagccctgatttacgaactgtccggatttaactgaggctacagcacttttattaatagaacatgctgcatttcctttttataaaaa

SEQ ID NO: 11342 - DNA, 120 bp, synthetic construct
  source 1..120: mol_type = other DNA
gacttgggacaacaggtggagggagggagaggaaaaaaaaaactgaacaagtgtcgttcctgcccagagagtttgcgatgagtgatgagagtgccagagaaaccttttagaaaccctctt

SEQ ID NO: 11343 - DNA, 120 bp, synthetic construct
  source 1..120: mol_type = other DNA
ttcaagggactggctttcccagccaaactgacatttttgggtctgtccagttagtaaaaggtagggattggggtggcaagagttgtacattgacacagttcttaagcacacagtgactaa

SEQ ID NO: 11344 - DNA, 120 bp, synthetic construct
  source 1..120: mol_type = other DNA
tgggtgtgaaaagccccagacattggcttctgcttctttcaccatcattatgatttgtgggcattgatgctaggcctggaatccctgcagcattcatctctgctggggttctctaataca

SEQ ID NO: 11345 - DNA, 120 bp, synthetic construct
  source 1..120: mol_type = other DNA
ttacaataaagttgtacctgtttaaaaagttagcagtaacataggaggatattggtctcacaataactaagcggaaccactctgcccagctttgaattccagcttgacacttggcattta

SEQ ID NO: 11346 - DNA, 120 bp, synthetic construct
  source 1..120: mol_type = other DNA
ctcggctttccccttcttaatccgctttctgctgagctctccgaataattcaaccctcgtgtttgaaaactagaagcctgagaggtctcagcgagacagtcaaaggggaggctcccctcg

SEQ ID NO: 11347 - DNA, 120 bp, synthetic construct
  source 1..120: mol_type = other DNA
caccatgcccagcatccaaatggcttttcaaaaaatttgtataaatgtttactcctgctagctgtgcttaagtgtttatttccggccagcctcaccagcaccaggaattatgagaatact

SEQ ID NO: 11348 - DNA, 120 bp, synthetic construct
  source 1..120: mol_type = other DNA
aagtttaaacacattctgagcatcctctgagaatcattcccaattccaagcccatttccagacgatgagcagacttgaattacataacctgtagctgcacatttttgtcgtgaccacgca

SEQ ID NO: 11349 - DNA, 120 bp, synthetic construct
  source 1..120: mol_type = other DNA
aagcgaggcttatccttgagatcatggcctttaccacaaccagcaccatcatcattatgagcagctgtgtcttgcattcttataatgtggttctgaggactttacatgtagtatcttatt

SEQ ID NO: 11350 - DNA, 120 bp, synthetic construct; identical to SEQ ID NO: 4078
  source 1..120: mol_type = other DNA

SEQ ID NO: 11351 - DNA, 120 bp, synthetic construct
  source 1..120: mol_type = other DNA
aggcctctctcctcttataaagccaccagtcccactctcataataacccattaatccattaactatgaatatgttaacctataaatggattaatccagagcccttatgacccagtcacct

SEQ ID NO: 11352 - DNA, 120 bp, synthetic construct
  source 1..120: mol_type = other DNA
tctgaattgttttactcgagtcagaggggatttgcaccctctagatgttgctccttcacagcttaaccctcggggaacttcatttttaattcattcaactgaaagaagtatttactgaac

SEQ ID NO: 11353 - DNA, 120 bp, synthetic construct
  source 1..120: mol_type = other DNA
gcctcaggcttgaatatatgaaatggagcctctgcttcttatttataagtactcctgtcttcctcccaaggttggcactaggatgaaggctgtataaagtgattagcacagtatctggca

SEQ ID NO: 11354 - DNA, 120 bp, synthetic construct
  source 1..120: mol_type = other DNA
agtaggacagcactgtttctaaatgactttaagaacaattatttaggctaattaaaaacaatgaaacccagaaactgtgagtggtggcattagagccgggagccgggcacctgttgtcat

SEQ ID NO: 11355 - DNA, 120 bp, synthetic construct
  source 1..120: mol_type = other DNA
acagacatgacttgttacattcgtgaaaaatcttaagtctgcctggatggtttctgtctagggggcacttgcttgatagaagagaaacaggggcaccttcttctcgcacattcctcactg

SEQ ID NO: 11356 - DNA, 120 bp, synthetic construct
  source 1..120: mol_type = other DNA
gtgcagagagttcctgtatgctttttacccagctgcacctagcgttaacatcttggataagccatgatacatttatcacaaccaagaaaagaatattggcacactattaataaccacact

SEQ ID NO: 11357 - DNA, 120 bp, synthetic construct
  source 1..120: mol_type = other DNA
gtcctgatgattagattgaggttatgtgtgttggaagaagattcccaaagaggggatgtgcccttctcagagcatcacttaattgcttgcttaaggtggtgttaactgtaaagttaaaag

SEQ ID NO: 11358 - DNA, 120 bp, synthetic construct
  source 1..120: mol_type = other DNA
ctctccctatcctcttattccttaagagcttcctttttgttctgttatttgttggggaaggttatttaagagtttaaaaccttgcttcagtgaagagttaaagcgaattgagttttgtaa

SEQ ID NO: 11359 - DNA, 120 bp, synthetic construct
  source 1..120: mol_type = other DNA
cttaacttgttcatcttgctccattgcagcactggatgaaaagtgaggattttaatactttaaaaaaatttacaagagaaaatcgtagactttgtcaccatgtgtttatttcactatctg

SEQ ID NO: 11360 - DNA, 120 bp, synthetic construct
  source 1..120: mol_type = other DNA
tcctctgttgacagctgtgcctgtgttcagaatggtcatggggtagctggaagatagctctggcatttaaacacctagataggaaggagacgatggaatgtatttttctttgctattttg

SEQ ID NO: 11361 - DNA, 120 bp, synthetic construct
  source 1..120: mol_type = other DNA
ttcccccgatcccacccccacacaatttagcacagaatgccagtaattcagtctgaagcccagttaaaactctctgattttaatgtgctttttaaaaatggaaattacacatggtagcgc

SEQ ID NO: 11362 - DNA, 120 bp, synthetic construct
  source 1..120: mol_type = other DNA
attagtaacacatattatagaacaaatgtttgaaacagaaatctcgtgattttgcgtaacaaaccaggagttgagctggaagtctctgttctcccactgcgttgctgtgtgaccttgggc

SEQ ID NO: 11363 - DNA, 120 bp, synthetic construct
  source 1..120: mol_type = other DNA
atgttcatgtgtttaatgctatggttctggcctggactctactgggttcaaagtctagcacatgcatcatacttgtttgtttttcaaaataaaaaagattctaaatttcaccaaatttgg

SEQ ID NO: 11364 - DNA, 120 bp, synthetic construct
  source 1..120: mol_type = other DNA
acaggggtgagtgagagacaaaacctgccctcatggagcttagcttctaggaaacagacatagcaagtaaacacatgcacaaacagtataatgtcagctaatgagtgctatgaggaaaaa

SEQ ID NO: 11365 - DNA, 120 bp, synthetic construct
  source 1..120: mol_type = other DNA
aggttgtgcaatagagcaagaccctgtctcaaaaaaaaacaaaaaaacaaaacctgtacaattcactgacattaaataggttcacaaagttgtttaaccacccacactatttccttaact

SEQ ID NO: 11366 - DNA, 120 bp, synthetic construct
  source 1..120: mol_type = other DNA
gcttttgaggaactgccaaactgtttcccacagtggctgaaccattttatgttcccaccagcaatgcaagaggattccaatatctctacattctcaaacacacttgttattttgtttgtt

SEQ ID NO: 11367 - DNA, 120 bp, synthetic construct
  source 1..120: mol_type = other DNA
acctgttgaaaattgatcatatatgtaaagatttttttttctgggttctctattgtattctactgctctatgtctgtccttatgccagtaccacactcttttgattactgtagctttgta

SEQ ID NO: 11368 - DNA, 120 bp, synthetic construct
  source 1..120: mol_type = other DNA
caggattatattagcctcatagaatatgtaggaaatgttttcttctcatcaaatttttggaagagtttgagaaagattggtgttaattcttctttaaatgtttggtagaatttaccagtg

SEQ ID NO: 11369 - DNA, 120 bp, synthetic construct
  source 1..120: mol_type = other DNA
tccctgtgctttgggagaaccaatgaacccaatgaaccgaatgaaaccaaagccaaaaggcagccttgatcccccaaaagaaattgattctgtaacccaaattgtaaagtttagagcttt

SEQ ID NO: 11370 - DNA, 120 bp, synthetic construct
  source 1..120: mol_type = other DNA
aattggagtaagtcaggctagtggcctcctatagcaagtcaggaaagatatactagcagagtatagtgtcatgtctgtggttcaaaggttgtgtccttacctcttgagttacattttgat

SEQ ID NO: 11371 - DNA, 120 bp, synthetic construct
  source 1..120: mol_type = other DNA
tgacaggcactgagaggtagcaatccattttctggtgaccaagggtaaggatgcaactactagttctaattatgtctgcatcacttacatggctttgcacacagtacaaatgtaataaaa

SEQ ID NO: 11372 - DNA, 120 bp, synthetic construct
  source 1..120: mol_type = other DNA
atttgaggctgaaggagcagcacagcttaaagcacactctggagagggtttcgtccaactctgggggaccttttttgctttttatgttactagatatagtaaagtctgcaactcttactt

SEQ ID NO: 11373 - DNA, 120 bp, synthetic construct
  source 1..120: mol_type = other DNA
cactgaccagccctttctcttgtgatgcctccctcccctgattttatcagcgtattccccacaccacaatcccatcaattctcaattatttattccctcacattgaagaaacaggggcct

SEQ ID NO: 11374 - DNA, 120 bp, synthetic construct
  source 1..120: mol_type = other DNA
gcctagggtacccctctctgtcccacttttagttcctcagtgatacagattgctaaaggcaactcaattgcaaatagccccgcaccatgtgacactgcctccttgaaaagtacttcagat

SEQ ID NO: 11375 - DNA, 120 bp, synthetic construct
  source 1..120: mol_type = other DNA
ctgcattcttaaagggtacttgtttcctgtcgctcttttttcctttatacggtggtccccccttatccatggaggatatgttccaagaccctcagtggatacctgaaactgcaaatagta

SEQ ID NO: 11376 - DNA, 120 bp, synthetic construct
  source 1..120: mol_type = other DNA
ctagaggtttcatccaagtttcagccttgggccagttagggagtgtggaattggcaaccttttatgactgttaagcaaaatctttgcagaggagctgtaccaattaagaaatccttggct

SEQ ID NO: 11377 - DNA, 120 bp, synthetic construct
  source 1..120: mol_type = other DNA
ttaagttacagtgccttgctggttgggagcttgccttttgaaaagttcaggtccagccctcctttgccttatcttgggaaatgactttctgctaaaataatttcggtttgtacatatgca

SEQ ID NO: 11378 - DNA, 120 bp, synthetic construct
  source 1..120: mol_type = other DNA
ctctgctgggcaaaagtgggaagttgctctcaagtgttaaacgtgttcactctcaccaagtggaagattttacattagaattcaatcattctgtttacttcctttaaagtcgagagcgta

SEQ ID NO: 11379 - DNA, 120 bp, synthetic construct
  source 1..120: mol_type = other DNA
ccattgcactctagcctggacaacaacggtgaaactctgtctcaaaaaaaaaaaagaaagaaagaaagaaagaatttagaatgtatcagttaaaaataaaactaaaaaaggaaataatga

SEQ ID NO: 11380 - DNA, 120 bp, synthetic construct
  source 1..120: mol_type = other DNA
aagctgagatcacactaccacactccagcctgggcaacaaagcaagactctgtctcaaaaaataaaataaaataaaagcaataatacagtgtgtaaccttttgggacaagcctttccact

SEQ ID NO: 11381 - DNA, 120 bp, synthetic construct
  source 1..120: mol_type = other DNA
tgcagtgataaatccctttgaaagggtatacttttcttacaagaagaaaacagaagcatggccttgctggaaaatggctggttttagtgactcaccattgtgaacaaaaagttcgattgt

SEQ ID NO: 11382 - DNA, 120 bp, synthetic construct
  source 1..120: mol_type = other DNA
aaataaaagaactgctgatgcagatgacttttagtagttttattcctgttgtaaaaatctctagagacaacatcctaccttattgcctgcactggggtagcagtttggttgtgtagctgt

SEQ ID NO: 11383 - DNA, 120 bp, synthetic construct
  source 1..120: mol_type = other DNA
ctgtttctcctaatcaaagagggttggttgtagtcaggccatttacaaatcactttccttttctttctctgtcttggtcttgcctcctcctcatactgataattgccaaagaatgtggtc

SEQ ID NO: 11384 - DNA, 120 bp, synthetic construct
  source 1..120: mol_type = other DNA
gagctaaaaattaaaacaactgaactcatagagagtaaaatgatggttaccagaggctgggaagagagggtagaaagtggggatggttaatgggtacaaaatatagtaagatagaatgaa

SEQ ID NO: 11385 - DNA, 120 bp, synthetic construct
  source 1..120: mol_type = other DNA
aataaagaattttttgaaagtctgttcattgtttcccattctggaaggtggtgttggggcattgaggatcctggggttcctattcctgagggcaaccacagaaaatttagtgaagttcaa

SEQ ID NO: 11386 - DNA, 120 bp, synthetic construct
  source 1..120: mol_type = other DNA
gtggtgcccagcctcaattatgatttcaaaaatcataaagttcaactaaaaaagtcagaacccattagagatgaacagaatgtttgtttttttaaaacctttgtcccttggagccccagg

SEQ ID NO: 11387 - DNA, 120 bp, synthetic construct
  source 1..120: mol_type = other DNA
ctgcctcccagttaaactcccagccccagtaggaaggactgaggcgggagaaggagctcacagtttggagaatgcagttttcttggagagaagctggtccttccctcccccttccccttt

SEQ ID NO: 11388 - DNA, 120 bp, synthetic construct
  source 1..120: mol_type = other DNA
aaatgaactgagctgagtcttagaaatctaaatgagactggataattgcaagtgactgaaaagtcaacggatgactttaaggaagtccccactaatggggaaagtcagagaaggggttga

SEQ ID NO: 11389 - DNA, 120 bp, synthetic construct; identical to SEQ ID NO: 4114
  source 1..120: mol_type = other DNA

SEQ ID NO: 11390 - DNA, 120 bp, synthetic construct
  source 1..120: mol_type = other DNA
taacgtgcactaggcttagctagtattataactgttgctggttattagataatctttcctggcctcagtttccttgctgttaagtaaggaacatggcttgagtgatatcctgagtcctct

SEQ ID NO: 11391 - DNA, 120 bp, synthetic construct
  source 1..120: mol_type = other DNA
atggtaggagaccctcttaagaaagaaaagagtgttccctgactcaagagcctcatgaacctgggtcttgcccatgctgggtagctagaaatgtaaccatatctgcagttcttggaggtc

SEQ ID NO: 11392 - DNA, 120 bp, synthetic construct
  source 1..120: mol_type = other DNA
gtgaatattcgtacttctatactccatcactctttactgactaactcccaagtggaagtgaatgtttccatcttgtgtcatcacactgtctgcagcactttcatatcagccatgcatgta

SEQ ID NO: 11393 - DNA, 120 bp, synthetic construct
  source 1..120: mol_type = other DNA
gcccagaagaaaagaactagatgagcatgagcactagaagtctctccacaagcttttgattatgttcttggttccctcactcacttgcagcaaagttgtctcaggaagtatcacattctt

SEQ ID NO: 11394 - DNA, 120 bp, synthetic construct
  source 1..120: mol_type = other DNA
ttatccttcctgtaattgtgttttaaacatcggttgattgagtttttttcattgtttgtttggtttttgcataaagaaatgtttgatatcacatttgtcttgtccgtgtttcttgtgaca

SEQ ID NO: 11395 - DNA, 120 bp, synthetic construct
  source 1..120: mol_type = other DNA
gagagaaacaatcccttttgcacatgggctgcctagaaagaatgtgagtctggggcttcgggcatctgttctgtttgacatgtggcaatatcctttgagaatgaagaaaaacagacaagc

SEQ ID NO: 11396 - DNA, 120 bp, synthetic construct
  source 1..120: mol_type = other DNA
tccacccatctcggcctcccaaagtgttgggattacaggcataagccaccatacccagcctaattctacttcttttttattaaagacttcacagatttgatagcatagttaatctgctta

SEQ ID NO: 11397 - DNA, 120 bp, synthetic construct
  source 1..120: mol_type = other DNA
tgagataatgtgtgtaaagcattcctcctccttctcccacctctgtcttattctgtttgggctgtcttattgggtagcttaaataaacatttatttttaacggctctggaggctggggca

SEQ ID NO: 11398 - DNA, 120 bp, synthetic construct
  source 1..120: mol_type = other DNA
tttgctctcctggaaagtgacattcttctatctactttctagtccacattttgcagtgcaaccgcgggactggaacatagccatgggccagaagtcttggcatcatcctggactctcatc

SEQ ID NO: 11399 - DNA, 120 bp, synthetic construct
  source 1..120: mol_type = other DNA
tatggcagcccctcacctgtttgttaaatgaatatgaaaatgtcgaacctggactctttctaatgagggcccagcctgcttttagaaccttggctaccttccctccagtgggcctcggag

SEQ ID NO: 11400 - DNA, 120 bp, synthetic construct
  source 1..120: mol_type = other DNA
agagtggtacagttattacagttgatgaacctgcatgaagcattgtgatcactcagagtccgtagtttacagtggggagcatccttggtgttgtgtattctgtgggttcgaacaaatgtg

SEQ ID NO: 11401 - DNA, 120 bp, synthetic construct
  source 1..120: mol_type = other DNA
cccatcccttccctttccccttccctcatcctctggcaaccactaaactatttcctgtctgtgtggatttgcctcatctggacatttcatataaatgggataatgtaggagtggaattgc

SEQ ID NO: 11402 - DNA, 120 bp, synthetic construct
  source 1..120: mol_type = other DNA
aaatgaccaaacaaaacaaaactgatgctgtgatgctggaccttcaagctagtgatgcttcagaatacaccacaccagactacctgtaaaacatctgctccaacaggttgcaggctgctc

SEQ ID NO: 11403 - DNA, 120 bp, synthetic construct
  source 1..120: mol_type = other DNA
aatgactcgggagtaaatgagaccaagaatgtgccagagttgagtgtactagtggtgctaacattttggaatcagagatccctttcaaaggctgatgaaagctttggactttcacctcag

SEQ ID NO: 11404 - DNA, 120 bp, synthetic construct
  source 1..120: mol_type = other DNA
tgtataggaagctgagagcattggtcacgccagttctctgagacgggaggcaggattgacagccacagcttggcctctgtgctgggggtggaatctgctgcgtgtgcagcctccttcctg

SEQ ID NO: 11405 - DNA, 120 bp, synthetic construct
  source 1..120: mol_type = other DNA
cttactgaaagtggttataatcaaagttatggtttattgcaggaaaaagatacaaattaaaataagctgagggcaggggcccacagggaatctcacctgagcctgtatttttgttttgtt

SEQ ID NO: 11406 - DNA, 120 bp, synthetic construct
  source 1..120: mol_type = other DNA
agcccatcatctaggttttaagccctgcatgccttaggtatttgtcctaatgctttccctccccttgtcccccatccctcaacaggccccagtgtgtggtgttcccctccctgtgttcat

SEQ ID NO: 11407 - DNA, 120 bp, synthetic construct
  source 1..120: mol_type = other DNA
gtgcttgtattaagcctcacaacaacccaaggaggtgggtgggcaggtgtcattattccaattttacaggtgaggcaggtgatgtcataggaagcttgctgagtcgccaggtctcaggac

SEQ ID NO: 11408 - DNA, 120 bp, synthetic construct
  source 1..120: mol_type = other DNA
gctgtagcgcagacaggcctgaggggaaccgcatccacctccgccctagatgcgatgttggaatgcttgagaggccctctcctgaccccctctgtcaggaacattaatgtcatttcttcc

SEQ ID NO: 11409 - DNA, 120 bp, synthetic construct
  source 1..120: mol_type = other DNA
aggaggcagcattgtgcagactttggagtcagacagggtggggttctcgtcctggctgtgctattgacattgtggccttgaacaagctttaagttgctaggaacttcatctgtaaaatgg

SEQ ID NO: 11410 - DNA, 120 bp, synthetic construct
  source 1..120: mol_type = other DNA
cacctgtaccctgggtcacaaattccctttgccatatcccatttctttctgaaaaactcaggaatccaccccttttagctgaactcataaatctgccttagttacaattctgtcattttc

SEQ ID NO: 11411 - DNA, 120 bp, synthetic construct
  source 1..120: mol_type = other DNA
caaattcaattcactgctctgtctccagcagttagggttcattcttaggttctgaaatcattccctaaatttcttttatttctcaaactccggttttgcctttctggggtccaggggcct

SEQ ID NO: 11412 - DNA, 120 bp, synthetic construct
  source 1..120: mol_type = other DNA
ttctttactacttacttgaagttgttcttgggatctctttctgcccttcttgctccagagctggttcatggtgtctcaattcagttcatccccgtccccaaccctgatatttcttctagt

SEQ ID NO: 11413 - DNA, 120 bp, synthetic construct
  source 1..120: mol_type = other DNA
atgttgagcaaaaggatggtgagattgtaggagcagaaagagggatggagaagagactagaacatggaaaatcaggtccacaaatactgctatgtcagtagagaaatggcccctcaagat

SEQ ID NO: 11414 - DNA, 120 bp, synthetic construct
  source 1..120: mol_type = other DNA
aaatctcctactgtcccactctgttcttcccatgacgttaatcatccttcttccagtgtatccacagtgtatacaccacccatcctagcatcacttaggagccatctcagtgagcaggtc

SEQ ID NO: 11415 - DNA, 120 bp, synthetic construct
  source 1..120: mol_type = other DNA
catttgcccagaacattcacactttcagacctggagatgaaacacaattttttggcagcaaatctcaaataacatgtatttaggattacaaagtcacagttttgcaaccagagggcttgg

SEQ ID NO: 11416 - DNA, 120 bp, synthetic construct
  source 1..120: mol_type = other DNA
caaaatgcatattttgaaacctgatccccaagatggtggtattaagaggtggagcctttgggaagcaattaagtcatgaaggcatgagtgggattagtgctcttataaaaaagacccggc

SEQ ID NO: 11417 - DNA, 120 bp, synthetic construct
  source 1..120: mol_type = other DNA
gctgtgaacattttttacgtgtcttttggagaacatatgtacacatttctgccaggtatacacctggggtggaattgctgggttgttaaatttccttactggggcctataagaccaggtc

SEQ ID NO: 11418 - DNA, 120 bp, synthetic construct
  source 1..120: mol_type = other DNA
gcaacttggactaacacttatgacataggaagtggatctgggctgggggagagggtggcatggaaggggggctttcctgaaacagtgacacagctgagattggagggatgaggagagtat

SEQ ID NO: 11419 - DNA, 120 bp, synthetic construct
  source 1..120: mol_type = other DNA
tgttttgatgagctgccggatctcttgacccctcagagaattttacattagggaaaagtgcttgtgtgtaggcataagaaagaaagaaaatctaggattggaaagttggaaaccagtttt

SEQ ID NO: 11420 - DNA, 120 bp, synthetic construct
  source 1..120: mol_type = other DNA
actggagtggcccgaggactcctttttgagttaaagtgacttgttttcttcttacctttattcatccccttactcagtaggatggcagcagatataacatcattatgtgtgtgaaaacat

SEQ ID NO: 11421 - DNA, 120 bp, synthetic construct
  source 1..120: mol_type = other DNA
taggggactgcagctgtttccacattatatcttctggcaccaacaacttcatgtgtccgaagttgaactcatgcaaactcagcctttgttttccacatgactcctccatcaactcagaaa

SEQ ID NO: 11422 - DNA, 120 bp, synthetic construct
  source 1..120: mol_type = other DNA
ttttcagtagcttcctgagccatttctttcttagctcccaggctggaggccttttcccaggtctctaatggacaaactttccacacatgacttaagagaagaagacacaggacttggact

SEQ ID NO: 11423 - DNA, 120 bp, synthetic construct
  source 1..120: mol_type = other DNA
tttatgttgcatgtgataaatagttacactttttatttgttaattactaggttttaatggtcaactttagtccaaagcttctccctcttctcaccttctcccagccttctgattcagttt

SEQ ID NO: 11424 - DNA, 120 bp, synthetic construct
  source 1..120: mol_type = other DNA
ggctgatgcttgtggctgggaaacgccactaccaaggtgatgaaaggtgaaggtgggttgatatataaaataaaagaacttggaggaaagttaatacctttgaacattggttcccaaagt

SEQ ID NO: 11425 - DNA, 120 bp, synthetic construct
  source 1..120: mol_type = other DNA
tgctactcctgtccccactagcttttgtgtaccttcttgtctgtttgataaattctctggattaaattctccaagggatttggagtggtttctcttttctttattgggtcctgactaact

SEQ ID NO: 11426 - DNA, 120 bp, synthetic construct
  source 1..120: mol_type = other DNA
tattacaacatttagtatggctgtaccttaagtagagcctcctggaatagatttaaaaggttgctcaactggtaagacccacaaatggagagctgccactgctttccttagttctttgtc

SEQ ID NO: 11427 - DNA, 120 bp, synthetic construct
  source 1..120: mol_type = other DNA
ctccacctgcttgtgtattactggtatttgcatcatcatttgggagaaaagttgagcattgattttaaaaactctttttttgggggggggggtcattctggcagggtagcactggcttct

SEQ ID NO: 11428 - DNA, 120 bp, synthetic construct
  source 1..120: mol_type = other DNA
ggagaaagtagtgttaactttttttttcattaatgagaaaacaataggcagcaatgggtttaggagttctatggcgaaaaggcatttcctgagattgaatcagtggcaaaaggagagcct

SEQ ID NO: 11429 - DNA, 120 bp, synthetic construct
  source 1..120: mol_type = other DNA
tgagaacatgaaaaagacagttacatcctatgaccaacatcatgcttgctgggaaaaccttagaagcattcccaattacagtcagaaataagataagagatgctaaatgtcaccgctgtg

SEQ ID NO: 11430 - DNA, 120 bp, synthetic construct; identical to SEQ ID NO: 4152
  source 1..120: mol_type = other DNA

SEQ ID NO: 11431 - DNA, 120 bp, synthetic construct
  source 1..120: mol_type = other DNA
acatacttatagctatcactgctgtcaatctaagcagggagtataaccaatgtctccatcatcttaagtaatttgtgtgtgcacagattcttcagaccttacaggatgtctctgtaaaac

SEQ ID NO: 11432 - DNA, 120 bp, synthetic construct
  source 1..120: mol_type = other DNA
ttacaattgatgaccctacattgactcatcataagacccaaagtctgtcctttacactggggttcactcttagtggtgtacgttctgtgggtctggacaaacgcatgatgacgtgtatcc

SEQ ID NO: 11433 - DNA, 120 bp, synthetic construct
  source 1..120: mol_type = other DNA
atgggatgcccctggcacccagaagccctcgagggtccctcagccatcccagcctccttcctcacttacacctttgtgtaatttccttgcttttctctataattttaccacttgtgtttc

SEQ ID NO: 11434 - DNA, 120 bp, synthetic construct
  source 1..120: mol_type = other DNA
ctcctgtcacatcaccttctctgtgtcaaatccctctttggcctgtataacacttctgactgcacttagggcccacccaaatctacccatctaggttatgagatctaaattctgagatcc

SEQ ID NO: 11435 - DNA, 120 bp, synthetic construct
  source 1..120: mol_type = other DNA
gactccagtcaaatatatgttgggccttctgacttatcccctatagtctaaatccactcttctgtgctttccatatttttgcttttgatgctgtattttgaacaatttcctgtgatctaa

SEQ ID NO: 11436 - DNA, 120 bp, synthetic construct
  source 1..120: mol_type = other DNA
aatcaagggaatgtagggccacaagtttttatttgctttaagatattagtagccacatgggatattgacctggtgtcccatcttgggggaaaaggtgagagacttttactggttgcacat

SEQ ID NO: 11437 - DNA, 120 bp, synthetic construct
  source 1..120: mol_type = other DNA
gttcagtcctcatatcccagatttggatggaaacctctgatgctataatcaacatgaggaaaagcctgtaaatcatttacagattcagaaaacacttaatggacttctcctctgtggaaa

SEQ ID NO: 11438 - DNA, 120 bp, synthetic construct
  source 1..120: mol_type = other DNA
catgttttgctgagtataatacccttgccattcaaattttaattgaagtaaatagtaaaacaaagttggagtagagtgggtctttctccttctcctgatccagaggaggcacccaaaagt

SEQ ID NO: 11439 - DNA, 120 bp, synthetic construct
  source 1..120: mol_type = other DNA
gagcttatattccaggggagggacaagcaataaagtgcaagataaacaaggtaattttatagtgataaagataggataagggaggaggtcagagagtaaaccatatgtcctgctttagag

SEQ ID NO: 11440 - DNA, 120 bp, synthetic construct
  source 1..120: mol_type = other DNA
ggagaacctacaaaggaataacagttaaccagacaggagttaaaatccctgctcaacaaagaacctatttcctttcctaggaaggactcattccacattggctgactcacaactcttgac

SEQ ID NO: 11441 - DNA, 120 bp, synthetic construct
  source 1..120: mol_type = other DNA
tttgtacttacatagcccaagaaaaaacaatgacctagtaccaccctgaaaggtgtaagaaacaaagcaaaggcaatccaaatgttaaattggaggccacagagccaagcccacctccat

SEQ ID NO: 11442 - DNA, 120 bp, synthetic construct
  source 1..120: mol_type = other DNA
aacccaggaaggtggaggttgcagtaagccaagatgatgccactgcactccagcctgggcaacaagagcaagactccatctcaaaaaaaaaaaaaaaaaagaaaagagaaaagaaaagaa

SEQ ID NO: 11443 - DNA, 120 bp, synthetic construct
  source 1..120: mol_type = other DNA
cataataaataacagtattcatgggggccaggtgtgccatgtgcttctcccaacccagcttccacctcttaccttaatactagttttggagtaaaaggaaggattaactgacatggcata

SEQ ID NO: 11444 - DNA, 120 bp, synthetic construct
  source 1..120: mol_type = other DNA
cttttcaataaactcttagtctaagaaagttctgggcataatgaaagaagacagagagaggaagggccaaacctgctgattggagtagagcctggcagcttggggaaacctagtagacca

SEQ ID NO: 11445 - DNA, 120 bp, synthetic construct
  source 1..120: mol_type = other DNA
tgacaacagattttgattttagaaaatcacgtgaaggttgagtttggtttgagtgtttaaggattacagtgtgagatttggaaggagaaaagtaaaaaaaagttggcaggagaacggtgg

SEQ ID NO: 11446 - DNA, 120 bp, synthetic construct
  source 1..120: mol_type = other DNA
ctcaggagacctgtctccatagagctggcttgggtgttgatatgtgaagaggctgagaacatgtggcataaacatcgactgatattgtttgccatttacactcagcatgtgtaatgcagc

SEQ ID NO: 11447 - DNA, 120 bp, synthetic construct
  source 1..120: mol_type = other DNA
ttcatgagcaggggatatttcgccaagaaacaaggcttgagaatagcttctgagcacccctgaagtagctggaatatgaatttcagcacctcttaggtatctttaagtaaagttaagtgt

SEQ ID NO: 11448 - DNA, 120 bp, synthetic construct
  source 1..120: mol_type = other DNA
gcttggatcgtaaccacaggtttagtttgtggtattctaagaaaatatctagaatggcacatgcaaatgtgatgaagatgggcctgtgtatctaaccgttgtgaggttgtcttttagctc

SEQ ID NO: 11449 - DNA, 120 bp, synthetic construct
  source 1..120: mol_type = other DNA
gggcggccgggcagaggcgcccctcacctcccggacggggcggctggccgggcggggggtgacccccccacctccctcccggacggggcggctggccgggcagaggggctcctcacttcc

SEQ ID NO: 11450 - DNA, 120 bp, synthetic construct
  source 1..120: mol_type = other DNA
ggcagaggggctcctcacgtcccagacgatgggtggaggttgtagccagccgagatcacgccactgcgctccagcctgggcaccattgagcactgagtgaaccagactccgtctgcaatc

SEQ ID NO: 11451 - DNA, 120 bp, synthetic construct
  source 1..120: mol_type = other DNA
acagggtattctggtaagatctacattcccacatgcttaagacagtcataatttcaagtcagttgaaccagtatttgttcagtgcctctaatttgcccagtgttgagccacataggcact

SEQ ID NO: 11452 - DNA, 120 bp, synthetic construct
  source 1..120: mol_type = other DNA
tctagggtgagttttggaatgggctttttataatgatgggggtgggtgttgactaaagaactttcagctttctggaagctcaccctctgttctctgtactagtgaactcagtgtagatgg

SEQ ID NO: 11453 - DNA, 120 bp, synthetic construct
  source 1..120: mol_type = other DNA
tggtgacagagcttttggtctacttaaaaccgacacagtcttcctcccccactggcccacattgcctctccagttttatgtggacttctagtatttggctgaaatcacgtcagttaaaat

SEQ ID NO: 11454 - DNA, 120 bp, synthetic construct
  source 1..120: mol_type = other DNA
cacacacctaccatgtgctaggtattgtgatgtggtgtgggacacatatagttcctatcttcgaatgatcatgggacagtgggaaagtcagacaagtgcttcagtagacaattatgagag

SEQ ID NO: 11455 - DNA, 120 bp, synthetic construct
  source 1..120: mol_type = other DNA
tggtatttcatttactaaatcttcagggatataggtaagagagcctccgtgctgaactgactgcctaacagaacaaggttagagagaatgaaattatttcatgctgtctggcctgcaaca

SEQ ID NO: 11456 - DNA, 120 bp, synthetic construct
  source 1..120: mol_type = other DNA
gtggaaaaatcccttattttcctgctttttttctatatatagatacaggcagatacacagacagatagacacaccacatgtggatgtcactggggagatgaaggtgggattgaacttagc

SEQ ID NO: 11457 - DNA, 120 bp, synthetic construct
  source 1..120: mol_type = other DNA
tgacctcacacggttcatctgatctttcttggtctcagtcttcttactatagactggaaatggtcatatttgacttagctgtccatatggctgttctggagatgagacagctaatgaagt

SEQ ID NO: 11458 - DNA, 120 bp, synthetic construct
  source 1..120: mol_type = other DNA
tagctagagtttgaactttagccccaatatgactgttgtgttgtcattgtcacctttgtaacctgacattcaggaatgtccctctctagttcatattctgacctagcttctgaaagcatt

SEQ ID NO: 11459 - DNA, 120 bp, synthetic construct; identical to SEQ ID NO: 4178
  source 1..120: mol_type = other DNA

SEQ ID NO: 11460 - DNA, 120 bp, synthetic construct
  source 1..120: mol_type = other DNA
ctcaatttaaaaacctgaacttagacagagaaagagtgtactgaagctcctgcattggagtgggaaattgtagatagtgacctaggaaggtgactttgtacctgcttgtaggtttagttt

SEQ ID NO: 11461 - DNA, 120 bp, synthetic construct
  source 1..120: mol_type = other DNA
caattttagaaaatagagctgacttctctgggaaaaacaaaaccaaccttgtcttactctggtcatggaaaccaacttggcacctcattatcgccttgttagcaagaacaggctgtatga

SEQ ID NO: 11462 - DNA, 120 bp, synthetic construct
  source 1..120: mol_type = other DNA
cattcaaatgtcccagaattccagttcatcaacatcctgaacatatttcctgatgacacccacttttcagaggggaatttaaaacctggaaaatgtggtcttaaccaaagattccctccc

SEQ ID NO: 11463 - DNA, 120 bp, synthetic construct
  source 1..120: mol_type = other DNA
ctaattctgatttacagccagttggtcagaagcatgagtaaaacaacctggggcttgtgattgacatccaaagtggggggacagtcttgtggggctgagccatcaacctgtgggatctga

SEQ ID NO: 11464 - DNA, 120 bp, synthetic construct
  source 1..120: mol_type = other DNA
atgcattttgttagactatcttttaacaaagctgtatgcgttgattatcattgacattgtgcctattctactctctctccaacacggagtgccattttaaaaaattgctattttgctagg

SEQ ID NO: 11465 - DNA, 120 bp, synthetic construct
  source 1..120: mol_type = other DNA
gaaacagatggtcagcctggcttcctgccatcctcggcctcaacctcgggcagtgtgacctatgaagggcactacagccacacagggcaggatggtcaagctgccttttccaaagatttt

SEQ ID NO: 11466 - DNA, 120 bp, synthetic construct
  source 1..120: mol_type = other DNA
tgactaaaatcacaggtattaggacccataggaatttcagaaatgtatcaggaccagtcccttgcttgaaggtgagtcagaaattcttacacactttttctagatgagaaagctgaggct

SEQ ID NO: 11467 - DNA, 120 bp, synthetic construct
  source 1..120: mol_type = other DNA
gtctctcatgaaccttttctaaggctttgtaagtcactgtgagtctacctgccagattctcccaactggatatgaaataggtggggtcttcctgggggaaaggagaaggggtgggaggtg

SEQ ID NO: 11468 - DNA, 120 bp, synthetic construct
  source 1..120: mol_type = other DNA
attcatcttttgatggacatttggattgtttccaccttttgactattgtgaatagggctgctaggaaggtttggggacagtttttgtttgaacacctgttttcaactatttgggggtctg

SEQ ID NO: 11469 - DNA, 120 bp, synthetic construct
  source 1..120: mol_type = other DNA
catacgtgcccattccagcaaggtcattcactcagtcaagccccacatttcctttggcttctgtggggacaactgtgagtacggaaacattttctctagaaattaatgaaaatgattatt

SEQ ID NO: 11470 - DNA, 120 bp, synthetic construct
  source 1..120: mol_type = other DNA
cagtagcatttgttggccccttgaggaactggtttgtgctgtatgatgtttttgtttgtttttagttttgctgtctctgcaacatacattttcgtcctccaaagctcctaagcttcatct

SEQ ID NO: 11471 - DNA, 120 bp, synthetic construct
  source 1..120: mol_type = other DNA
atggctagattcagtgaggcctgtcctctgaggtcagattcctggtaacatgaccttgtgtcctgatgggggtgtgggccatggaggcacctctgtgctcacaaccctgccctgagaccc

SEQ ID NO: 11472 - DNA, 120 bp, synthetic construct
  source 1..120: mol_type = other DNA
agctaggaggggacagagagctaacattttgggagctaggaggggacagagagccccagtcattgtaggatgataataaaaacaacagccaacatttatatagtactcaatatgttctta

SEQ ID NO: 11473 - DNA, 120 bp, synthetic construct
  source 1..120: mol_type = other DNA
ttctgcctacaaacactgacctccaaagatatcaccccaaagataaggggtgattactctgttgccaaaggatatttttccagtttccaatgaatgcccagtgagttgtttttgcatata

SEQ ID NO: 11474 - DNA, 120 bp, synthetic construct
  source 1..120: mol_type = other DNA
ttttttttttctcattttcttttcttttcctttttattgttatttatttatttatttatcgagacagggtctcgctgtgtcacccaggctggagtgcagtggcatgatcatggcttactg

SEQ ID NO: 11475 - DNA, 120 bp, synthetic construct
  source 1..120: mol_type = other DNA
tcctgtccctccagcaagggccaccttgtgctttttcaaagagagcaaagaggaggagacaggagacctgggtaggttttgttttggaatttgttctttttacaaatcttactttttctt

SEQ ID NO: 11476 - DNA, 120 bp, synthetic construct
  source 1..120: mol_type = other DNA
caccaaggggcaatgaaaggtcttagaatcttcatatacaagtctgtttgcttcttttgcatttctccccagctacaaaagagttgagggtcagttgagaggtctgggacccagccatat

SEQ ID NO: 11477 - DNA, 120 bp, synthetic construct
  source 1..120: mol_type = other DNA
attacccctgttttacagacaagccaacttgggcttggagaaattcagtaactggcccacagttagtcacagagggagcagacacagactcaggtctgtctgattctcccactgccctga

SEQ ID NO: 11478 - DNA, 120 bp, synthetic construct
  source 1..120: mol_type = other DNA
taaaagacaaattgtaaatgaattaaatttaacagagtttaatttaattgggcagccctcagaaccggaagaggttcagagagctccgctgcaccacgtgggcaggcagcatttatgggc

SEQ ID NO: 11479 - DNA, 120 bp, synthetic construct
  source 1..120: mol_type = other DNA
ttcctccttcgctccctccctttttccctcatgattcagatctcccacagggcatagggcaaataatagccatgtttatgtaaagtgtaatgagaatagaatagagtgaaaacagctact

SEQ ID NO: 11480 - DNA, 120 bp, synthetic construct
  source 1..120: mol_type = other DNA
cacactaatgggaggcaaagattctgcttcttaatagcactcctcctttcgtttctgcagaagggttcagtcctcactagccaggctcagactcaaagtctcctagctgatggagagtcc

SEQ ID NO: 11481 - DNA, 120 bp, synthetic construct
  source 1..120: mol_type = other DNA
agtcaaacaacatgaggtatatatgaagaaggttcagcatgtctcatcttactgccttcccattctgcttctctgaagataaccagcattgacaggttgatatatatgctgcacatcttt

SEQ ID NO: 11482 - DNA, 120 bp, synthetic construct
  source 1..120: mol_type = other DNA
agatactcaacctcccactagcaacatatggatatgtgcatttcctcatatcctccacagccctcgttgttactgcttataaaaaacattattatgaaatggtggtgcatgcctgtggtc

SEQ ID NO: 11483 - DNA, 120 bp, synthetic construct; identical to SEQ ID NO: 4200
  source 1..120: mol_type = other DNA

SEQ ID NO: 11484 - DNA, 120 bp, synthetic construct
  source 1..120: mol_type = other DNA
accctaaagaatcttgacttcttagtcgcccacgctaatgccatagactatgacagcatggagaaaagctgtgcatctgaaattcagaaataaatatgagagaaggaagagaatgagctt

SEQ ID NO: 11485 - DNA, 120 bp, synthetic construct
  source 1..120: mol_type = other DNA
tgcacaggccatggtccagtattatcaagaaaaatctgctgtgatcaatggtgagaagttgctcattcggatgtccaagagatacaaggaattgcagctcaaggtaaagcattatcttgc

SEQ ID NO: 11486 - DNA, 120 bp, synthetic construct
  source 1..120: mol_type = other DNA
atggtttaaaaagtaataatgggtgagatctcacaaatcccgtaaaaccaccaccaaagtcaagaaatagaatatggacagcatccagaagctcccgtgagtccctcctcctgttcaacc

SEQ ID NO: 11487 - DNA, 120 bp, synthetic construct
  source 1..120: mol_type = other DNA
gctactttttttttttttttttttgtattttaatagagacagggtttcgccatattggccaggatggtctcaatatcctgaccttatgatctgcccgcctcagcctcccaaagtgctggg

SEQ ID NO: 11488 - DNA, 120 bp, synthetic construct
  source 1..120: mol_type = other DNA
ggattaacggcagtaattggcttcttaaattaaagtaccaaagcatagcaataccttcctgagggagatagtttggggtggtgcaaaaaacatgggttaaagaggtcagatggtcgagtt

SEQ ID NO: 11489 - DNA, 120 bp, synthetic construct
  source 1..120: mol_type = other DNA
tgatgttgtgaaaactcactttgattcagcatatctagggtagtgctgttattgcgtatttctaacgaggtcccaggagatgctgctgctggtggtcctcggagaacactttgaatagaa

SEQ ID NO: 11490 - DNA, 120 bp, synthetic construct
  source 1..120: mol_type = other DNA
cagaggtggggagaaattctgattgctctttctcctctaactttatcttttgctcaccaggtaaagtatagggagagaagggagagattttaaggtatttttcatttcctctcttgaata

SEQ ID NO: 11491 - DNA, 120 bp, synthetic construct
  source 1..120: mol_type = other DNA
caagacatggttctcagttgggaagagttcactctccaactgggagacaaattattcttgtgcaaaattacacaagatttaaacatgagtgcataagtacaggagctaccagaagttcca

SEQ ID NO: 11492 - DNA, 120 bp, synthetic construct
  source 1..120: mol_type = other DNA
tgggtaatttataaagaaaagagctttaattggctcatggttccacaggctgcataggaaacatggctgtggaggcctcagaaaacttacagtcgtggcagaaggcaaaggggaagcaga

SEQ ID NO: 11493 - DNA, 120 bp, synthetic construct
  source 1..120: mol_type = other DNA
attaccacctaaaatagcagaactgatgctctgatcctcaggagggatcacaatacctgtgaccactagccccagcgtgcagtatttgcagattcatattcattctctgcagccacatcc

SEQ ID NO: 11494 - DNA, 120 bp, synthetic construct
  source 1..120: mol_type = other DNA
agaagacctgcttggtgggatccacatcaagtgcagtcagctccaagtgagcctcttcttctaccccaagtgacaaccgaccctggctgaaggaccagtggtctctagccacacggtggg

SEQ ID NO: 11495 - DNA, 120 bp, synthetic construct
  source 1..120: mol_type = other DNA
cagagcactcataccatgctaggccagctagatcacatctctggacctgagattcccatctgtcaaatgagatacgtgatgctttttaacatttgtatggctcttattgcatgatttagc

SEQ ID NO: 11496 - DNA, 120 bp, synthetic construct
  source 1..120: mol_type = other DNA
tttactttgagcatcagctgatgtctgtgcttgaggtgttgaagggggcacagagcatggaaagcatggaaaggaacttggagttaaaatacctggtgtcaggtcctgattcttttcact

SEQ ID NO: 11497 - DNA, 120 bp, synthetic construct
  source 1..120: mol_type = other DNA
catgaaaaacaccagtccagttcagacatgctgctccggttaacctcaggaaaatacaaaatgctgagcttcccttcagctcctcaccctttgttggaaaataatataggaaaaggtctg

SEQ ID NO: 11498 - DNA, 120 bp, synthetic construct
  source 1..120: mol_type = other DNA
tctgtctgtttttttaaaaaaattctgattatttgggttttttaaagacgtgtaaagccacatcttgccacctgcaattctgcggcagagtggaggggggttaggaagtcttgttctgaa

SEQ ID NO: 11499 - DNA, 120 bp, synthetic construct
  source 1..120: mol_type = other DNA
ctgggtctcccaacctgccccactctgtgtccagctacaaaagccgtgaagacggctactaccggaaagagcccaaagccaagtcggacaagtatctgaagcagcagcaggatgcccccg

SEQ ID NO: 11500 - DNA, 120 bp, synthetic construct
  source 1..120: mol_type = other DNA
gaggcacagagaacttacgttatttgtccaagaacacacggtcaggaaatggcagacccagaattataccaaggagatctggccccaaatcccatggcacctgttgcctttactagaagt

SEQ ID NO: 11501 - DNA, 120 bp, synthetic construct
  source 1..120: mol_type = other DNA
aaataatttgtatacaatgggactcatgccagcatttacagcggatgagctgctctgtgggcaattattaactctgcacaggaacgggaaaatagctgctcagagagggtgatatttgag

SEQ ID NO: 11502 - DNA, 120 bp, synthetic construct
  source 1..120: mol_type = other DNA
gtattaggatctgatttctgcaacttatacagttgtaaaatacctcagttcaagataatgaaaggtgcagacttctatagaatcagatgccctgaaaggatgtgctagacaaatgcccag

SEQ ID NO: 11503 - DNA, 120 bp, synthetic construct
  source 1..120: mol_type = other DNA
cagattgtgtctttaggtttggagccaggcagtccaacagtgtgtgttggaatgactgcagaacagagagtattttgcactgtcctcaaactctgtatgatgaactcaagaaaagcccag

SEQ ID NO: 11504 - DNA, 120 bp, synthetic construct
  source 1..120: mol_type = other DNA
gaccctgctttcttctgcctcacttttcttgtttgtaaaatggatgtgatcacaaggctgttgtagtactgtaaagaggtcatgctcattaaaatatcctgagctctctggagaaagttt

SEQ ID NO: 11505 - DNA, 120 bp, synthetic construct
  source 1..120: mol_type = other DNA
gatttcttaaatgaacagaagagcttgagtattaagtgctaagaaggagatgaaggtacgcaatgctgtgagtgcctgtgataaatctgagccttctcagggttaggctgtgcctattga

SEQ ID NO: 11506 - DNA, 120 bp, synthetic construct
  source 1..120: mol_type = other DNA
gagtgtggctgcaggaactgcttgggaagggtaaggattattcattttgacaagagagggccatggataggtgattcagggagataaaaataaagtcacctgttggtagaagctataata

SEQ ID NO: 11507 - DNA, 120 bp, synthetic construct
  source 1..120: mol_type = other DNA
aaaaacaggctgtaggtcagattcggcctgcagactatagtttgttgacccttgtcttaaaggttgggtagaggccctaattctcaaaccaaacacctgctttcaattgttcagtttcac

SEQ ID NO: 11508 - DNA, 120 bp, synthetic construct
  source 1..120: mol_type = other DNA
aagccatctactgtgcttgtatagattgttttacttaattaaaatgaaaaaatccagttacagttctcctgggctggagctgccacaacaaaaagaaatatccttggaacagggccatct

SEQ ID NO: 11509 - DNA, 120 bp, synthetic construct
  source 1..120: mol_type = other DNA
attctgcatttttgtacaggaacaagattgggagagtgaaagtgaggcagagggggagagctggtatcccactaacatggaggagctggtgacagtggacgaggttggggaagaagaaga

SEQ ID NO: 11510 - DNA, 120 bp, synthetic construct
  source 1..120: mol_type = other DNA
aaggaagttagataggaggctgcatgttttctgagaagcaaactcagggcagacttctctgcatttacaggagcccagatggacttggataactaaaattagactgggttatcagcaaaa

SEQ ID NO: 11511 - DNA, 120 bp, synthetic construct
  source 1..120: mol_type = other DNA
ctcctaatgacagtgctttggttctaattagcaaccattgccccagccttatgtgattaagcagtccaaggaacaattcccaatcatactatgcaggcatagaatttcagggactctttg

SEQ ID NO: 11512 - DNA, 120 bp, synthetic construct
  source 1..120: mol_type = other DNA
ttcacctggccggcctatcgttattttaagtgtatgatgcaataacctagatttgcaaggggcggctgtaaactttcttgcaatttcagtctcccgtaatagaccagatactccgtgaaa

SEQ ID NO: 11513 - DNA, 120 bp, synthetic construct
  source 1..120: mol_type = other DNA
cattcagtcagtcagcaaatacttactggataacatggtactgtgctagacactctggggtaaccaagaaatataacgcaagtctcttgtcatccaagaacttggaacctaattgatact

SEQ ID NO: 11514 - DNA, 120 bp, synthetic construct
  source 1..120: mol_type = other DNA
tactaaattgcactccaaaaagatggtatcagttttccctgcgaccttgagtgagagttcccaatatccacctcccattggattttatcagtttttaatctttcctaaccagttaggaag

SEQ ID NO: 11515 - DNA, 120 bp, synthetic construct
  source 1..120: mol_type = other DNA
aatatttgggttgttttcagttcggggcctttacagattgtatttgttaatagtcttcagttagctttgagattcattatctcattggtccccgaaggaagagtatggtatgaggttctg

SEQ ID NO: 11516 - DNA, 120 bp, synthetic construct
  source 1..120: mol_type = other DNA
cttcatctgtgaatcagccatagtaataggaggctactacgcagagttatttcgaggattaagtgaacaaatactggtaaggtcttagtggcttccagtgggaggtacttaataagggtt

SEQ ID NO: 11517 - DNA, 120 bp, synthetic construct
  source 1..120: mol_type = other DNA
actaatctcagagagggtaaacagtgtgcctgaggtcacacagcataagtaaaagagttgggtttgcctctacattctattttctctccatgacactgtggcttccaaggtttttttttg

SEQ ID NO: 11518 - DNA, 120 bp, synthetic construct
  source 1..120: mol_type = other DNA
tcagagctgcccttcacactgataagtggctattttgaaatgaaaaaaaagttctaatgacaagtctaggctgcttccttctgacagggtctcctaggcacttagctcagtgtcctggga

SEQ ID NO: 11519 - DNA, 120 bp, synthetic construct
  source 1..120: mol_type = other DNA
tctctggcggtggtgccagttgtttcctttgcttggaatcaaaaggcctcccagaattctgggacttatatttaataaatcacaaatgaaatgctaattgatggttcggatgtaaagact

SEQ ID NO: 11520 - DNA, 120 bp, synthetic construct
  source 1..120: mol_type = other DNA
ctcctagcacatgtctctactttaatacctaaaacatcctgtttgggttggctttggcaatatccacctctccctctatactgtgagtaactcaagttaggccagtgttcctctggcctg

SEQ ID NO: 11521 - DNA, 120 bp, synthetic construct
  source 1..120: mol_type = other DNA
gaatgtggttttcatgattaacttctggcatgggctaggttttgatagcttaacagaagacatggtatatcagagggccaggggtaagtatctgaagacacctcctgtttttactacaag

SEQ ID NO: 11522 - DNA, 120 bp, synthetic construct
  source 1..120: mol_type = other DNA
aaagccagctgagggaagtcatctagcttgaagacataatcaatcccttttcccaacaagatgaaacctacagaatggtaaggatggaaggggtcttggaaatcatctggtcctggtttt

SEQ ID NO: 11523 - DNA, 120 bp, synthetic construct
  source 1..120: mol_type = other DNA
tctgtccacacagcctcccccaccccaagcagcaggtaatggctgacacttaaatcaggcaacttttaaacttaacaccactgagaggccttgagttggggaccagaggttgctcctaaa

SEQ ID NO: 11524 - DNA, 120 bp, synthetic construct
  source 1..120: mol_type = other DNA
cctcatggtgttgggccgaggccagtcatagcagtgagtgttctggggtcatgcagaggcagccctcaacgatagaatagacaggcccatttttaaatccatcaaaagacctccaaggct

SEQ ID NO: 11525 - DNA, 120 bp, synthetic construct
  source 1..120: mol_type = other DNA
tggggacaggactaaagcctgagaggaaggaaaaccaagcagggcacattgcttgggcttgttcccagagactcagtgaaatgcccctgatatgtctccaggagcaagtcacccaggtgt

SEQ ID NO: 11526 - DNA, 120 bp, synthetic construct
  source 1..120: mol_type = other DNA
tccaaacttattcccctcctcttgatttcaggagatgtcagggtttttctattctggacaatgaatttggtacagagtcactgtaattaaatataaaaacagaagcatcttcctccagct

SEQ ID NO: 11527 - DNA, 120 bp, synthetic construct
  source 1..120: mol_type = other DNA
aagaagcaagaaacctgaactcatcatcaggctattaaataaaatttataggaggctgttggtttggactgagctcctgcaataggcccaacagaccaaaacaaaagggagtcactcatg

SEQ ID NO: 11528 - DNA, 120 bp, synthetic construct
  source 1..120: mol_type = other DNA
gttctttggccttcttgctgaactttgctggaaatagcccacaatttttatcagaggttagaactgtacattatcagagagactggacactttatcccctagcaaagtgggagaagattt

SEQ ID NO: 11529 - DNA, 120 bp, synthetic construct
  source 1..120: mol_type = other DNA
gcttcagtcccgcgaccgaagcagggcgcgcagcagcgctgagtgccccggaacgtgcgtcgcgcccccagtgtccgtcgcgtccgccgcgccccgggcggggatggggcggccagactg

SEQ ID NO: 11530 - DNA, 120 bp, synthetic construct
  source 1..120: mol_type = other DNA
ctcagcgtccgtgcgttcctcccccagctctgccgtcctggccagccgagggattcggaggctcttttgaaaagattgcttttccctcgtgcgtttttgccgccctgtctttaaacacct

SEQ ID NO: 11531 - DNA, 120 bp, synthetic construct
  source 1..120: mol_type = other DNA
actgggagtgaagaggcagccccactccctggagtagacagctggggcctttgaagaggctgcagagctctttcccaggagccacagctccggaggttcgagccgcactcttggagctgc

SEQ ID NO: 11532 - DNA, 120 bp, synthetic construct
  source 1..120: mol_type = other DNA
tcttcctggcctgacttcttgggtcctgttttgcagcaaggaaggacattccctctctgcccctgggccccggggccttctgttcccagcatggaagagctgggcactgtgacttggcag

SEQ ID NO: 11533 - DNA, 120 bp, synthetic construct
  source 1..120: mol_type = other DNA
tgtggatggcaggaaggcatcttgctgccagtggcggtgcagatgttcggctgggacaccaggctgtggcccttgcagccaacatatgcctgaggccctggcatcggatggaagctactg

SEQ ID NO: 11534 - DNA, 120 bp, synthetic construct
  source 1..120: mol_type = other DNA
gtgaccaccaggcagggagcacacctcagtcatggtcacagagaaggtgatgatggcaccagggctgtctctccgtgcccgtctgcacctgggcctgccagagccgtcttctgtgcccca

SEQ ID NO: 11535 - DNA, 120 bp, synthetic construct; identical to SEQ ID NO: 4247
  source 1..120: mol_type = other DNA

SEQ ID NO: 11536 - DNA, 120 bp, synthetic construct
  source 1..120: mol_type = other DNA
cccttgtgcctggctatgtgcacaggagggcacagagcttcaagaagcctgaggcttaaggagctttgaggcctgggagggggccaccgtcactttccctgtgttccgtgggatcctgtc

SEQ ID NO: 11537 - DNA, 120 bp, synthetic construct
  source 1..120: mol_type = other DNA
gttgaattgtgttacattcccaagggttacaatctatccacattctcaccaccacgcattattctctgttattctctggttcatgtctcactctggccgtgcagccagtgcacagtgcta

SEQ ID NO: 11538 - DNA, 120 bp, synthetic construct
  source 1..120: mol_type = other DNA
tccataggcaggcactctgtgctcccaaggaggagttcctgtccccattcgcagctagggacagagccagggaagccaagtgcccagccctggcaaacagcggggaagcacaggggcatg

SEQ ID NO: 11539 - DNA, 120 bp, synthetic construct
  source 1..120: mol_type = other DNA
cttgaggaacatgagctgacagattgacttaaatttgcacatggacatgatctgagtcactgccttgctgagtgcatggggacagttgcccaggccagaggcaccagggtcaaagccagt

SEQ ID NO: 11540 - DNA, 120 bp, synthetic construct
  source 1..120: mol_type = other DNA
ggaattctgggcttctgttttctggcatgggatggggtgaatgatatctctgttctacagcaggggctcagactggatgtgtgagaagagcctcagttaaggagggccatgttcgtgcgt

SEQ ID NO: 11541 - DNA, 120 bp, synthetic construct
  source 1..120: mol_type = other DNA
tgatagtgagtggtggttgtggtggtggtggtggtgatggtgaagacggtggtggtggacgtgatagggatattgatggtggagctcataatggtgaaggtggtgatggtggtggaggca

SEQ ID NO: 11542 - DNA, 120 bp, synthetic construct
  source 1..120: mol_type = other DNA
ttaaacaggtcaggcagcgtccgctcagcagaagcgtgtgatgacttccccagccggctgacctcagggagggtgcacatgggtgcccccagtcagctctcctgacgtccctgccggggt

SEQ ID NO: 11543 - DNA, 120 bp, synthetic construct
  source 1..120: mol_type = other DNA
ctgtctgtcagcctcatactcttgttatcatcagacaagaaccctgagagttaagggaggcaaaggccagcaaggtcaggacttggggcagagatcggggctgggacaggagcttgttca

SEQ ID NO: 11544 - DNA, 120 bp, synthetic construct
  source 1..120: mol_type = other DNA
ccagatggggccaaaaatttcatgcttctgtttgaccttggttctagctgaagatttagctgtgtacacatctttaaaactgggatccccctataaaaaccagatgcacaggcagccgaa

SEQ ID NO: 11545 - DNA, 120 bp, synthetic construct
  source 1..120: mol_type = other DNA
gatttacagatggccccaagaagcacatgaaaagattctcagcattgccactcattagagaaatacaaatcaaaatcaccatgtgataccatctcacacccatttggatgtctactatca

SEQ ID NO: 11546 - DNA, 120 bp, synthetic construct; identical to SEQ ID NO: 4257
  source 1..120: mol_type = other DNA

SEQ ID NO: 11547 - DNA, 120 bp, synthetic construct
  source 1..120: mol_type = other DNA
gatcagcatgctgcacaccagcatagagacaggattaacagcccagggcctggatatggctggtgagtgagccactgccaccatctggaggacagggtgcagaggaggaaaccagccgag

SEQ ID NO: 11548 - DNA, 120 bp, synthetic construct
  source 1..120: mol_type = other DNA
attcatgcagtttttggatcatatcgttgttattgttttcttttttggaagtcccaaatttcggcccttgtgctgccatcctagggaagtttttcatggtctggagctccatttgtgttt

SEQ ID NO: 11549 - DNA, 120 bp, synthetic construct
  source 1..120: mol_type = other DNA
ggtcccctctgcatccaaagatgaataatttaaacagcccagccacgtgtggaacattggaaacagtctagcacttcactctgtcaaacactagggcagactctttcctgctgagctggg

SEQ ID NO: 11550 - DNA, 120 bp, synthetic construct
  source 1..120: mol_type = other DNA
atatgtgaaatgggcagtgaagggatctgcacccagtggctgagtctgcagtgagagcctcatgatgatacacccctgtgcagaggtgcacgcctggctgcacctgcactggccgttcct

SEQ ID NO: 11551 - DNA, 120 bp, synthetic construct
  source 1..120: mol_type = other DNA
ctgcattgcctctccccacctgagctcagccaacccctagcatcctctctggggtaagaacatggaccccactgcctgcatggatagcccagacataggatgccacatgggattgggagg

SEQ ID NO: 11552 - DNA, 120 bp, synthetic construct
  source 1..120: mol_type = other DNA
ggttatcagtgttatagcctgtgtcaggattttcctcctttttttttttttttttttgagacaggtcttgttctgttgtccaggctggagtgcaatggcacaatctcggctcactacaac

SEQ ID NO: 11553 - DNA, 120 bp, synthetic construct
  source 1..120: mol_type = other DNA
ctgcttgggctcactcagccacagccgaggctagcatcctgccttcttcaaggaagctacgcctctgtccacagcgccttcagtgattcatttttcagttatttaggtaaaaattacata

SEQ ID NO: 11554 - DNA, 120 bp, synthetic construct
  source 1..120: mol_type = other DNA
gtggaattgcagggtcatatggtaggcgtatgtttagataaagatttatgactttcctgtaaagtgctttcttcattttttggcaactgttgcctgccccacatgggtggcagtgtctcc

SEQ ID NO: 11555 - DNA, 120 bp, synthetic construct
  source 1..120: mol_type = other DNA
gagagggagtaagtggggctggaaaaatcccaaggttttgatttagcaaatgacctgcaactctctggagaagcggcagttcccaaggaaagcctgacttcttatcagcagctggctgcc

SEQ ID NO: 11556 - DNA, 120 bp, synthetic construct
  source 1..120: mol_type = other DNA
tccaaacctcctgaggagggtgtggcagggggggtgctggtcaccccttactggagaagttgccaccatcagagttggggagccttagacccagtgctcaacacacctccctgaggaagg

SEQ ID NO: 11557 - DNA, 120 bp, synthetic construct
  source 1..120: mol_type = other DNA
ttgcagggctttctccggaggaacatggggagctatggaagactttggagggagggagtgctggcaggacctgacttagttttaaaaggattagtcagactactgtgttaggaatggttt

SEQ ID NO: 11558 - DNA, 120 bp, synthetic construct
  source 1..120: mol_type = other DNA
gggatgcacactaggcggtcggaaatcattatgcgttaatgtcacatcataccccagatgtccactgtgtttgttttcaagtggtagaatcgtggctttctcacgttctctaaaatgaac

SEQ ID NO: 11559 - DNA, 120 bp, synthetic construct
  source 1..120: mol_type = other DNA
gtgaccgtgtacgacgaggacgactcggcgcccaccttccccgcgggcgtcgacaccgccagcgccgtggtggagttcaagcggaaggaggtgcttgtccgcgcgtgctgtggtctaccc

SEQ ID NO: 11560 - DNA, 120 bp, synthetic construct
  source 1..120: mol_type = other DNA
ctctctggggacctggatgggacctgccagcagggtgcctgggcatcggctgtaattctccttataagaggtctgcattgtacctgttacacaggcgaggctcagtggctcagggaaggt

SEQ ID NO: 11561 - DNA, 120 bp, synthetic construct
  source 1..120: mol_type = other DNA
ccattatcctgcctgactgctgacatgccaccatgctcacctgcttgcagggcacctttcagcagcggccttgcttcctgcctccctccgccacctcctgcagatttctcctgggatcgc

SEQ ID NO: 11562 - DNA, 120 bp, synthetic construct
  source 1..120: mol_type = other DNA
agtttgcttttatacattttagggagacaggagttacaagcaaggacataaatcaacacacagaaggtatacattggtttggccccaaaatgcagggtatcttaaaacaggggcttacag

SEQ ID NO: 11563 - DNA, 120 bp, synthetic construct
  source 1..120: mol_type = other DNA
cacaggcaccaataccctatgcacagacaccacacaaatgcatactacacacttacacataccacacacacgcataccatgcaagcatatcatacacacagacaccccatacaatgcgta

SEQ ID NO: 11564 - DNA, 120 bp, synthetic construct
  source 1..120: mol_type = other DNA
taataaatattcattaaagaagatgaggcatgaggcatgaggcgtgatcccttctacccataggcgccagtgttgcacatcgtggtgttctttctgggatgtttctcgtaagcacttatt

SEQ ID NO: 11565 - DNA, 120 bp, synthetic construct
  source 1..120: mol_type = other DNA
ctgtggaacttttggtttcaagcagctgcaagagttgccaagaggttgaaagaattcagctgcctgactccaggtcctggcatccccaggagaggcccctctttcccaggggctctggtc

SEQ ID NO: 11566 - DNA, 120 bp, synthetic construct
  source 1..120: mol_type = other DNA
attttgggtaaacaacaagcagttttttggtataggtgtgttccatgcaacttttgcagcttctcgaaagacacacctctaggtccatccatgccctcttaggaacatgctgacacagct

SEQ ID NO: 11567 - DNA, 120 bp, synthetic construct
  source 1..120: mol_type = other DNA
agtgcagggcttgggagagggcttgtgagtacagtgaatggtccccaggccggattcactctggacttgggaaggtctgaaccaaagttgggatgtgctggggacagaatggcgtttttc

SEQ ID NO: 11568 - DNA, 120 bp, synthetic construct
  source 1..120: mol_type = other DNA
ttaggagggggcctggcttcacccatggcttcagaaaggcactgtgaccaagccctgcccggctaagccaagctgctgggcccctggcctcactgggcctatgcttgcgacaccagttgg

SEQ ID NO: 11569 - DNA, 120 bp, synthetic construct
  source 1..120: mol_type = other DNA
ctcggtgctgctgtctgccttctgcatccactgctaccacaagtttgcccacaagccacccatctcctcagctgagatgaccttccggaggcccgcccaggccttcccggtcagctactc

SEQ ID NO: 11570 - DNA, 120 bp, synthetic construct
  source 1..120: mol_type = other DNA
cccaccagctttcctaattggtggtccccatcctggcctggctgcagcttagcctcatggcagggctctaggatgagccaccagagtccttcataaacccagtgggtttgtgtgaggctg

SEQ ID NO: 11571 - DNA, 120 bp, synthetic construct
  source 1..120: mol_type = other DNA
cggttctctgcacattggaacttgtccatggggcctcctttaagggtcttgccttcttcctcccctgtcatcctcacacttttcccccctcttctcccccttccctcatttccaacatag

SEQ ID NO: 11572 - DNA, 120 bp, synthetic construct
  source 1..120: mol_type = other DNA
cacaggcatgcgactgcactgagtagccccctcttctgtggccaggccccagccctgtgaacagccaggctgaatggcggtgagggagagtggttggtgtacataacaattatctgcagt

SEQ ID NO: 11573 - DNA, 120 bp, synthetic construct
  source 1..120: mol_type = other DNA
ccgagtgagctgcgagacctgctgtcagagttcaacgtcctgaagcaggtcaaccacccacatgtcatcaaattgtatggggcctgcagccaggatggtaaggccagctgcagggtgagg

SEQ ID NO: 11574 - DNA, 120 bp, synthetic construct
  source 1..120: mol_type = other DNA
gaaagctgaggcttcaaggtctgcgctctccacagagctgcagcagtgctgcctgaggcagggctgtgtccacccccttactcattgggtggccgggcctggggaccctgcggcctccca

SEQ ID NO: 11575 - DNA, 120 bp, synthetic construct
  source 1..120: mol_type = other DNA
gctatttttcctcacagctcgttcatcgggacttggcagccagaaacatcctggtagctgaggggcggaagatgaagatttcggatttcggcttgtcccgagatgtttatgaagaggatt

SEQ ID NO: 11576 - DNA, 120 bp, synthetic construct
  source 1..120: mol_type = other DNA
ctgccaagacagccacactgcactaaggacataaatccctcatgtgtttaagtaaaagaagtgacagtaagattgtgttccaacccaaggcacacattttaaaaatggacttgcaccttc

SEQ ID NO: 11577 - DNA, 120 bp, synthetic construct
  source 1..120: mol_type = other DNA
atgatgtgttcgtgaggcaaatggctgggccaggccgggctgcagttctgaaagctccggtagagcatgagagccgagcaggtggccagtaacccagcctcccccacccttgctagtccc

SEQ ID NO: 11578 - DNA, 120 bp, synthetic construct
  source 1..120: mol_type = other DNA
atgatattaattaatgtatcattaattcattaatcatgaattcatcttaagcctcatgtgtcccttgtgcgtgtggctgctctgatgggagtggcttgggcaaggacttcagcttcatgg

SEQ ID NO: 11579 - DNA, 120 bp, synthetic construct
  source 1..120: mol_type = other DNA
aaaaatgagtgagagcagagactggtgcaatgcaagctcaagggctgagagctgtcccagcaggacacttagggaggagaaggtaattccagatggcccagggggcacgtgttaaggggt

SEQ ID NO: 11580 - DNA, 120 bp, synthetic construct
  source 1..120: mol_type = other DNA
tctctacagacaggcatgggaggaaaatattccaaagccaaaaagaaatagttttccataatggaaaatgagaaagttgagttaaagcaagtgcccaaaattcagatgcccagagggggg

SEQ ID NO: 11581 - DNA, 120 bp, synthetic construct
  source 1..120: mol_type = other DNA
aggagcagacgccagtggcccctcgtgctggggagcccgtgcctgtagcagggtcctgtgcaccctgacagcgctgtcagatttcagaactcagccctgacgtgacgttctagatggcag

SEQ ID NO: 11582 - DNA, 120 bp, synthetic construct
  source 1..120: mol_type = other DNA
tgtttttctaaaaggatgtgaaaataagtgtaattaccacattgcccagcaacttaggatggtagaggaaaaaacagatcagggcggaactctcaggggagaccaagaacaggttgaata

SEQ ID NO: 11583 - DNA, 120 bp, synthetic construct
  source 1..120: mol_type = other DNA
ttagagaatgttttatagaacgtttccgctgcagtaagccattgagtgcagcagtgtgctgttgccctacactgccttagaaaaagagttaagcagttcgacaaatatacatcagattag

SEQ ID NO: 11584 - DNA, 120 bp, synthetic construct
  source 1..120: mol_type = other DNA
ttggacctgaactgttggatttttctagttgccgccaaacaaggcaaaaaaatttaaacatgaagcacacacacaaaaaaggcagtaggaaaaatgctggccctgatgacctgtccttat

SEQ ID NO: 11585 - DNA, 120 bp, synthetic construct
  source 1..120: mol_type = other DNA
gcgcacacacccagagggagagtttgaaaaatgcttattggacacgtaacctggctctaatttgggctgtttttcagatacactgtgataagttcttttacaaatatctatagacatggt

SEQ ID NO: 11586 - DNA, 120 bp, synthetic construct
  source 1..120: mol_type = other DNA
ttatttttgtcaatatttatttttaaacaatctctggaagaaaagaaatttaaaaacaaaaggcttaaaatgtattaatacctcaatgttaataatttaatatttttcccaagtgattgc

SEQ ID NO: 11587 - DNA, 120 bp, synthetic construct
  source 1..120: mol_type = other DNA
attgtgcgcatctgcaagttaaaaccatgacatatagcaggctaaaattgaacagaatttgattgcagacctgaagctgattttctcagttttgctaccaaaaacatatcttgctggagt

SEQ ID NO: 11588 - DNA, 120 bp, synthetic construct
  source 1..120: mol_type = other DNA
tttgtaatttgagttgctgtatctgagttgctggtgtggctctgggtcttttttcaagccctagcttaccgaaagaacaaatgaaaactattcacagacctgccttctcattctcttgta

SEQ ID NO: 11589 - DNA, 120 bp, synthetic construct
  source 1..120: mol_type = other DNA
cctatctggaacaaagtgattcaagccaagtccatacgcatatgtgtaaggtttcccacaatacttctggtaattgatttgaggaaactcaaatgctacgaaatagagcacatgcttagg

SEQ ID NO: 11590 - DNA, 120 bp, synthetic construct
  source 1..120: mol_type = other DNA
gaattagcaatgcagatatctggggaagagtgttcacgctaagagaacaaattgtgcaaaggcctgagggaggaggatgctgagtgtgtttgaggagcatcaaagagtccagtgtggatt

SEQ ID NO: 11591 - DNA, 120 bp, synthetic construct
  source 1..120: mol_type = other DNA
tgagtgtataaatggaagataggggaaccaaggccctccaacaagacgaggaatgagaaggtagctggttggggcaaaaatgtcaagagaaggattttgtaagagcctgacaaaaatgat

SEQ ID NO: 11592 - DNA, 120 bp, synthetic construct
  source 1..120: mol_type = other DNA
attagataaaatgagatgaaaacttagggaattttaagggtgaatagagggaacaatgatctgaaagcagcaaagaagaaggacctctaccccaactccaggccaagtggtaaaagggct

SEQ ID NO: 11593 - DNA, 120 bp, synthetic construct; identical to SEQ ID NO: 4302
  source 1..120: mol_type = other DNA

SEQ ID NO: 11594 - DNA, 120 bp, synthetic construct
  source 1..120: mol_type = other DNA
ttgatctctctccatgatctttctttggagctccagatccatgtacagcagctgcctatggaatgctttgctaagattgctagtgggtactttcaaattacatctataaagtaaaattta

SEQ ID NO: 11595 - DNA, 120 bp, synthetic construct
  source 1..120: mol_type = other DNA
tgcattaatcctgtaatagggcttctagcctctgctctagactctccactttccagtctgtcttccatgatgctgccagagtaactttctgaatcacagatctaatcatgtcctaaaata

SEQ ID NO: 11596 - DNA, 120 bp, synthetic construct
  source 1..120: mol_type = other DNA
agagaagcaggttaccttgtcaatattcaaaggaagtacatatctcctaacttcaggttggggagcctttctggcattttttttcacctcttcccagttctcacgtaaattggctaaata

SEQ ID NO: 11597 - DNA, 120 bp, synthetic construct
  source 1..120: mol_type = other DNA
atttccaggaacaatgggaggtgtcccatttgtccagtgtcctttcttaccctttccagcagcagagatccacaatcagaaacccattgtcttcataggtgttgatgtgatggaagaggt

SEQ ID NO: 11598 - DNA, 120 bp, synthetic construct
  source 1..120: mol_type = other DNA
gaggggttattttcattttctccatcatttgcacttcttagtgaaatttcatgtgaagctgcaaaatcacccaggaaaatccaaatagcagcagatttggaaacgtgcactcaaataggg

SEQ ID NO: 11599 - DNA, 120 bp, synthetic construct
  source 1..120: mol_type = other DNA
ttttccaaagcaattaccaatattgtaaacggttccatcattttcaatgtgggggtgagcagtggccccattgacagagacatagttgcaaagatcaacctacggaagtaaagtgaatgt

SEQ ID NO: 11600 - DNA, 120 bp, synthetic construct; identical to SEQ ID NO: 4309
  source 1..120: mol_type = other DNA

SEQ ID NO: 11601 - DNA, 120 bp, synthetic construct
  source 1..120: mol_type = other DNA
ctaaaggagctacacacacacttgtatatggttacacacacacaacataaacaagaaagagctatggggagtgtatgttaagacatagtaaatagtctgttgagaattatagatcagctt

SEQ ID NO: 11602 - DNA, 120 bp, synthetic construct
  source 1..120: mol_type = other DNA
tttgatcgctttaccccctccatctagcatatcctttctctaaattcactgaaatcatccctctcttttaacttccagcccaaagcctttccctttaagccttctttcacctgtcccacc

SEQ ID NO: 11603 - DNA, 120 bp, synthetic construct
  source 1..120: mol_type = other DNA
taagttccaaattctaaattcctgaacatcacctagcactgtgtcccacctgcttaattgtctccaaggtctctggattaatctttgtaataaagttggtctctgtgcaagcgtagtaat

SEQ ID NO: 11604 - DNA, 120 bp, synthetic construct
  source 1..120: mol_type = other DNA
ttgaattccatctcttgcctagacaggtctgctaaaccatatcttagagtagacagcatactttgcccaggatttctgatatggagagccagttaaaatctgattttgtacttttaatta

SEQ ID NO: 11605 - DNA, 120 bp, synthetic construct; identical to SEQ ID NO: 4314
  source 1..120: mol_type = other DNA

SEQ ID NO: 11606 - DNA, 120 bp, synthetic construct
  source 1..120: mol_type = other DNA
ctttaaaatctagagctatatccctctgtgagtgtgagctactgcttggatgaaagtcaatctgctgtagcagaaagtccacagggttggatgtcagggacatgacttctggtttaggat

SEQ ID NO: 11607 - DNA, 120 bp, synthetic construct
  source 1..120: mol_type = other DNA
agaaccaacattcctctaataaaatgggcatgaaacccaccaccctttaatactcccaggtgcttgtcactgggccttcatttattcagacaccaatggaacagacatttataggacatt

SEQ ID NO: 11608 - DNA, 120 bp, synthetic construct
  source 1..120: mol_type = other DNA
acagcatcattgattttcttgcctcaaggagagacccatttatctccttcctaggggttgagagatgacagctttttgggtcaggtacctcatctttcattattcactcatattatacca

SEQ ID NO: 11609 - DNA, 120 bp, synthetic construct
  source 1..120: mol_type = other DNA
atcttggaagcaggcacttggggaaggtggttctaattcctgggcttgatttagccatccccccacccccaccttagccctaattctctttttgctccagactctgacctatttaaattc

SEQ ID NO: 11610 - DNA, 120 bp, synthetic construct
  source 1..120: mol_type = other DNA
ctcctgagacatctaattatatccttgctgccctgtcttctgaggtagggtcctatctttatctccctgacagatttgagggaaaccaaggcccgaatggtagaatcactcacccaaggt

SEQ ID NO: 11611 - DNA, 120 bp, synthetic construct
  source 1..120: mol_type = other DNA
ccatctcagaacaaaaaaccttctggaccacatcccgcccataagaaacattctgtcttacaactcagtacatgcacacatgcatagacatgactaaaaaccaactttattgaggtataa

SEQ ID NO: 11612 - DNA, 120 bp, synthetic construct
  source 1..120: mol_type = other DNA
tgtgaccattcacttgtacctatttttaactgaaacaagtctcataaaatgtagatggcccctgaagcatgatgggcacgctgtgattttctattcttgctccattttgcttcgtttggt

SEQ ID NO: 11613 - DNA, 120 bp, synthetic construct
  source 1..120: mol_type = other DNA
tcaaaaacagcctgggcaacatagggagaccttgtctttacaaaaaatgttaaactttagctgggcgtggcagtgtgcacctgtagtaccagctacttgggaggctgaggtgggaagatc

SEQ ID NO: 11614 - DNA, 120 bp, synthetic construct
  source 1..120: mol_type = other DNA
ggaacataccaccatgctcggctaatttttaatttttaacttttgtagagatgggggtctcattatgtatattgcccaggctagtcttttttttttttttttttttgagatggagtctcg

SEQ ID NO: 11615 - DNA, 120 bp, synthetic construct
  source 1..120: mol_type = other DNA
acccggctatttttggttttgtttgtttgtttttgagatggagtctcactctgtcacccaggctggagtgcaatggctcgatctcagctccctgcaacctctgcctcctgggttcaggcg

SEQ ID NO: 11616 - DNA, 120 bp, synthetic construct
  source 1..120: mol_type = other DNA
ataaggaccagggtgggaggaggggcctgtggtctgcagtatttgtggtatccgggccaggcccccctggagacgctgcccctcggttccgcaggacgatgaggtggtcctgcagtgcag

SEQ ID NO: 11617 - DNA, 120 bp, synthetic construct
  source 1..120: mol_type = other DNA
tatttttaaaagtttttcaggtaacaagactgaattattatggggtgttttagggggaaggaggccctcggcgggggcgggggaggatgggacagggcctgagatgcggagggcatctga

SEQ ID NO: 11618 - DNA, 120 bp, synthetic construct
  source 1..120: mol_type = other DNA
aaggatgggtgagaggacccgggggtcgcttaccatctgctcttcttcctctctctgccctgccccccacaggccctcaatttggataagtgggtaggtccggccttggatgtcacctgt

SEQ ID NO: 11619 - DNA, 120 bp, synthetic construct
  source 1..120: mol_type = other DNA
tagaagacgggttcattctcctgagtgatttccagccaaggtgaaggcagcagagaggacagagtgggctttggggaatataaaatgctccatccataggcatctcagagatatagtccc

SEQ ID NO: 11620 - DNA, 120 bp, synthetic construct
  source 1..120: mol_type = other DNA
cccaatttcccatttcctgacccctgacatccaattttctgatttctgacctcccattgcccgacttgatcatttcctgatctgtgatctctgatgactctgtctcccatctgccggttt

SEQ ID NO: 11621 - DNA, 120 bp, synthetic construct
  source 1..120: mol_type = other DNA
aaccaagactccaatcttcagccctccaacctcagacttccaaacttcaatttcaaatcccaaaaaccaaaatccaccaaagcaaactcccaattcagattcccatgctaagactccagg

SEQ ID NO: 11622 - DNA, 120 bp, synthetic construct
  source 1..120: mol_type = other DNA
acaaaaaaaccctcaaaattcaggccctaactccagaacccagcctcagacccaaccatcacccttctaaacccagaggccaaacctcaaccctagaactcagactccaacaccagtgaa

SEQ ID NO: 11623 - DNA, 120 bp, synthetic construct
  source 1..120: mol_type = other DNA
ggcaagaggatcactggaggccagaagttcaaaaccagcctaggcaacatcatgagacccccgtctctgcaaaaaaaataaaataaaataaataaaataaagaattagccgggtgtggtg

SEQ ID NO: 11624 - DNA, 120 bp, synthetic construct
  source 1..120: mol_type = other DNA
cctgtaatcccagcactttgggaggccgaggtgggaggattgcttgagccctggagttcaagatcagcttgggcaacatagcaagacctggtttctgtaaaaaaaagaaaaagaagaaaa

SEQ ID NO: 11625 - DNA, 120 bp, synthetic construct
  source 1..120: mol_type = other DNA
tggaaacagagaaatagagaaagatagagacagagaaacagagacacggccgggcgtggtggctcatgcctgtaatcctagcactttgggaggcccaggcggttggatcacctgaggtca

SEQ ID NO: 11626 - DNA, 120 bp, synthetic construct
  source 1..120: mol_type = other DNA
gtgtgaggccttgtgggccatgggagaggtctagttttgtttgtttgtttgttttttgtagagacgaggtctcattatattacacaggctggtctcaaactcctggggctcaagtgatcc

SEQ ID NO: 11627 - DNA, 120 bp, synthetic construct
  source 1..120: mol_type = other DNA
ctatcggcacattcccccatgcaagcttgtagctcgattttccaggctgctctttgttagaaaagaaattattttgggggctgctttccgttagaaaggaaactctgccgaggactctgt

SEQ ID NO: 11628 - DNA, 120 bp, synthetic construct
  source 1..120: mol_type = other DNA
gggcaaggcatgaggatcgcttgggcccaggagcttgagaccagcctgggcagcatagggagaccccgcctctaccaaaaaaaaaaaaaaaaaaaaaaaaattaggctgggcacagtggc

SEQ ID NO: 11629 - DNA, 120 bp, synthetic construct
  source 1..120: mol_type = other DNA
ggcagttagcgctcccagccgtggctgacagctgcgaggtccctgtaggagcctggacagcttcagcgggaagccacggggctcggggccacccgctggcacggcgctgcccatcgaggg

SEQ ID NO: 11630 - DNA, 120 bp, synthetic construct; identical to SEQ ID NO: 4338
  source 1..120: mol_type = other DNA

SEQ ID NO: 11631 - DNA, 120 bp, synthetic construct
  source 1..120: mol_type = other DNA
tggatggttggtgggagtggggttcctggaagtgagtaggatggagagaaaagtgcaggaaggggaagtataaactcagtcctggtgttaataaggactgaattatcatagactgaatct

SEQ ID NO: 11632 - DNA, 120 bp, synthetic construct
  source 1..120: mol_type = other DNA
tctcatctctcacctgtacgccactcccactggctttcatctccacacaggggtctcaaacaatgactcttaagttgattctgggccacagatgtgcttggttagatctctgaaatgttt

SEQ ID NO: 11633 - DNA, 120 bp, synthetic construct
  source 1..120: mol_type = other DNA
aaatattacagcctctaggtggactgtatatatatacacacactctgtagtttgccatagccctacaagttcctgttgcattatttctaaccacttcacacatttattcagtcggagcaa

SEQ ID NO: 11634 - DNA, 120 bp, synthetic construct
  source 1..120: mol_type = other DNA
ggccccactctcccttggcatccactcctcttgttctgtcttcctggctccatttctgcctctatctgtttctctttctttctccctctccctctctctctgttttctctttttatcttt

SEQ ID NO: 11635 - DNA, 120 bp, synthetic construct
  source 1..120: mol_type = other DNA
aaccctgacctctgcccttcatttcagagctacgggagcatccaagggagcactttccattagggtttccaggatgcaatctccacaggagcctccaatatctgtcccttttctcttgtt

SEQ ID NO: 11636 - DNA, 120 bp, synthetic construct
  source 1..120: mol_type = other DNA
tcctttcccaatcaccccaagctctccgaatgtccattcagtggtgtttatgtttatttcataattgtaacagatgctcagtgacttctcaaatgaccttcttattggtctccccaacct

SEQ ID NO: 11637 - DNA, 120 bp, synthetic construct
  source 1..120: mol_type = other DNA
ggttttctggcgaggcagggtctcttaggagtcagagagggggcagggtgccatcgttcatgcctgtaatcccagcactttggatggccaggcgtggtggctcacgcctgtaagcccagc

SEQ ID NO: 11638 - DNA, 120 bp, synthetic construct
  source 1..120: mol_type = other DNA
cagcctaggcaacatagcaagaccccatctctactaaaaattaaaagttagctgaggtgatggtccacgactgtagtcccagctacttgggaggctgagatgggagggtcacttgagccc

SEQ ID NO: 11639 - DNA, 120 bp, synthetic construct
  source 1..120: mol_type = other DNA
gtccaaaccatcattgcctcttgcctgcggaacgccaacaccgctactgtctactaggctcttaccctctgccaggcatcgatattaactatgtaacatttagtaatttacattaatgat

SEQ ID NO: 11640 - DNA, 120 bp, synthetic construct
  source 1..120: mol_type = other DNA
gcagaactagggttggaggtcaggggtcatagtctgggcatgtggggagtgggaaggaaaggggagcacatggagttgaccctgggttttctccaggttcgggatgacaacaagaggctg

SEQ ID NO: 11641 - DNA, 120 bp, synthetic construct
  source 1..120: mol_type = other DNA
tggaaagagagagagatgcagaaagagacagggagacaggagaaagtggcagacaggaaaagacagacatagttagttatacagacaaggcgcagggaaagacagaagtcatgaagcctg

SEQ ID NO: 11642 - DNA, 120 bp, synthetic construct
  source 1..120: mol_type = other DNA
gacccctctacaaaaaatttaaaaattagcaggacatggtggtgggacatgcctgtagttccagcaacttgggaggttgagatgggagaattgcttgaacccaggagtttgaggctgcag

SEQ ID NO: 11643 - DNA, 120 bp, synthetic construct
  source 1..120: mol_type = other DNA
gacatcccagcgcgccgaaaccctcggctggtgccctaccgcctgctggatgaagccaccaagcgcagcaaccgggacagcctctgccaggccgtgcgcaccctcctgggctacggctac

SEQ ID NO: 11644 - DNA, 120 bp, synthetic construct
  source 1..120: mol_type = other DNA
aggttccccaattctcctctaactccaagaaattgaccctcttccaacagttccccaaagcccttactgtcccccaaagcctgtcttctaccaacttctcgatgtcttgggatccacatc

SEQ ID NO: 11645 - DNA, 120 bp, synthetic construct
  source 1..120: mol_type = other DNA
gccaacatagggagaccccatctctacaaaaaataaaaaaattagctaggcaaggtagcatgcacatatagtcccatcatccatccatccatccatccatccatccatcatctatccatc

SEQ ID NO: 11646 - DNA, 120 bp, synthetic construct
  source 1..120: mol_type = other DNA
cagccgggcgatgtcgttggctgtatgatcgacctcacagagaacaccattatcttcaccctcaatggcgaggtcctcatgtctgactcaggctccgaaacagccttccgggagattgag

SEQ ID NO: 11647 - DNA, 120 bp, synthetic construct
  source 1..120: mol_type = other DNA
cactgcactctagcctaagagacagagcaagaccctatctcaaaaaaaaatttttttttaataaataatttttaaaacttagctgggtgctgtggcacatgcctggtgtcccagccactc

SEQ ID NO: 11648 - DNA, 120 bp, synthetic construct
  source 1..120: mol_type = other DNA
gctcagttgggaaattggttactatgaaagaataactcagagacattgttagttactttgaatgcaaatcacaggagggagctcagtcagtagactattgccaaagaacaaaggctggtt

SEQ ID NO: 11649 - DNA, 120 bp, synthetic construct
  source 1..120: mol_type = other DNA
cttggagaggtcaacgtgaggaggggcatgaaagagaacaactttcattgtttaccgagtctctaggagacttttgagagtccattgtttttggtttttgttttttgagactgggtctca

SEQ ID NO: 11650 - DNA, 120 bp, synthetic construct
  source 1..120: mol_type = other DNA
ctgctattgcactccagcctgggccacagagcaagactgtgtctcaaaaaaaaaaaaaaaagcattgaagttgagctgcctggttactggttacagaatgacagagtagattgttagatg

SEQ ID NO: 11651 - DNA, 120 bp, synthetic construct
  source 1..120: mol_type = other DNA
gagtaagaataccgagagattctatcatgtctccaatgaaccccattattttcctgggatgccctaatgtccccaagaatatataattgggtaccctagtatctatatggagaactctat

SEQ ID NO: 11652 - DNA, 120 bp, synthetic construct
  source 1..120: mol_type = other DNA
gtgatccgtacgatggcagaggttttcaatgggattgaaaacccattgtgtctcttggtggatgtttggaaatgatggagtctttgtggtcattacagtttgggaggggctgctgctgct

SEQ ID NO: 11653 - DNA, 120 bp, synthetic construct
  source 1..120: mol_type = other DNA
ccccagtagctgcccaccttacactggggactccccaatatacactagaaactcataaaatatggcacacacagatttaatcctttgaacccctaaatccatatagctatggcccacaaa

SEQ ID NO: 11654 - DNA, 120 bp, synthetic construct
  source 1..120: mol_type = other DNA
ctggcctaatttttgtatttttggtagaaacggggtttcaccatgttggccaggttggtctcaaatccccgacctcaaatgatcctactgcctcagactcccaaagtactgggattacag

SEQ ID NO: 11655 - DNA, 120 bp, synthetic construct
  source 1..120: mol_type = other DNA
tttatttgtcagtctactgtaacctgggaggaacccaaatatggcactgtcacacaatattcccaagggactcctaaatctagaattgcacaaattgacacagaaacagacataaccagg

SEQ ID NO: 11656 - DNA, 120 bp, synthetic construct
  source 1..120: mol_type = other DNA
aatggcaaagagagcaacacctttttccaggtgagtccaggccacagcaatttagcgagagcatcatgtcccagcatcccaggacagctcttatagatgtcccctgaggccagacctcag

SEQ ID NO: 11657 - DNA, 120 bp, synthetic construct
  source 1..120: mol_type = other DNA
ctaagtagctgggactataggcatgcaccaccttgactagctgattttttgtgtgtattgtttgtagagatgggttttcctcatattgtccaggctggtctctcgcttctgggctcaagc

SEQ ID NO: 11658 - DNA, 120 bp, synthetic construct
  source 1..120: mol_type = other DNA
tttgaaggaaattgcagacatcagatagtttcctctgttttcagtgtgtagctttaaaagataaggatgatcttaaagagcataaccacaataccactatcacctaaaagaaaaaaaaac

SEQ ID NO: 11659 - DNA, 120 bp, synthetic construct
  source 1..120: mol_type = other DNA
catatattttaggtggttgctctgtaccttgagtttcatttcatatgtagatttccccctccattccttcttctttcccaaccccccagaaatgtatttgttgaaggaaccaggctattt

SEQ ID NO: 11660 - DNA, 120 bp, synthetic construct
  source 1..120: mol_type = other DNA
tgggaagacgggagaggggcaagacagtctgaggacacttcctggaattttttgttttgagatagggtcttgttctgtcacccaggctgaagtgcggtggtgcaatcatggctcactgca

SEQ ID NO: 11661 - DNA, 120 bp, synthetic construct
  source 1..120: mol_type = other DNA
ggggcactaatggggccaggctgaggcaggagatgtggggaggccaggcgggcagagccactgaaggggagggggcaatccaagaggtctccctggaagtggtgtggtgggacagagggg

SEQ ID NO: 11662 - DNA, 120 bp, synthetic construct
  source 1..120: mol_type = other DNA
caaaaaatagaattctgaacgtgggaggaatcccagactcacccaggaggcttctgacatgcctctttctttctttccttccttccttcctccctccttccctctctccttcccttcctt

SEQ ID NO: 11663 - DNA, 120 bp, synthetic construct
  source 1..120: mol_type = other DNA
taaacaacaacaacaacaaatgctaagcactttactatgtgctaggtgtggttttaggtgctgggaatataacaaacaaaagcagaaacaaaacaggcagaaatgtcctgcccttggaat

SEQ ID NO: 11664 - DNA, 120 bp, synthetic construct
  source 1..120: mol_type = other DNA
tgcctgtgctcaagctcgtgtccaccctgctggtaatggcttcctcctgctttcctctgtcccattcttctcccacattcccaaaactccagagatacatgcatcaatcctcctctattt

SEQ ID NO: 11665 - DNA, 120 bp, synthetic construct
  source 1..120: mol_type = other DNA
atctaccattccatctgttcatctatccacctacccatttatgtattaatctatctttccttccgtaggtccaataatcatctcctcccacctatgcgtccatccatacctacatccaca

SEQ ID NO: 11666 - DNA, 120 bp, synthetic construct
  source 1..120: mol_type = other DNA
cccagtgttaggattacaggcatgagacgctctgctcaacctaattttgtttttatttattatttttaatttaattttattttgtaagagacagggtaatgcccaggctagaatgcagtg

SEQ ID NO: 11667 - DNA, 120 bp, synthetic construct
  source 1..120: mol_type = other DNA
cttcattatgttgactgagagctggtgtatgctgggagctatgcaggcgtagggtgtgtcctgggccagaggacacagcacatgcttaggcttgggagaaaggacactcgcctgtgatgg

SEQ ID NO: 11668 - DNA, 120 bp, synthetic construct
  source 1..120: mol_type = other DNA
caggcagtggggagctgtggaaatgcatatggcagtgagcaatgccaacttggaaagatctctgttttccatggagatgagaccatggagaaggcagtcttttttgtttgttttttgcga

SEQ ID NO: 11669 - DNA, 120 bp, synthetic construct
  source 1..120: mol_type = other DNA
tagtcttcattaactcacacttcgactcatgaccttagacatggactaacaattgcatcttctatctctgatctcagagttcctgctttgggatctcagaccctcattctaatctttgac

SEQ ID NO: 11670 - DNA, 120 bp, synthetic construct
  source 1..120: mol_type = other DNA
ctctgaggatttctttcattttgctttttttttttttttgagacggtctcactctgtcacccagcaggagtgcaggggcacaatcttagctcactgcatcctctgcctcctgggctcaag

SEQ ID NO: 11671 - DNA, 120 bp, synthetic construct
  source 1..120: mol_type = other DNA
aaaaaaaggaaatgaaaaactccatgcatgcatgcacatatgcacaaataaatgagtgtgtaagcaggtgaataagcaaactaatgaatgacatttcccgccttcttgaccacttccagg

SEQ ID NO: 11672 - DNA, 120 bp, synthetic construct
  source 1..120: mol_type = other DNA
tatattagccacatctaacaaggacagatttcctgacgttggtacaggttttatcccacaacattcaggaaacttttatggggccaactatgggccaggcactgttaccagggctgggaa

SEQ ID NO: 11673 - DNA, 120 bp, synthetic construct
  source 1..120: mol_type = other DNA
cttctggaacagggggccccttccacattgttctggtccaaggccccatgtgccgacctgccctgcatggtgctccaagccttgcattgtctccttcccagggtccctgcaggagctggt

SEQ ID NO: 11674 - DNA, 120 bp, synthetic construct
  source 1..120: mol_type = other DNA
tactctgaagggttgtgctgtggcttcagtgagctcatgcgaataataataattatggtagcagtattgagcactcattgtcaaataaatctcattcacacagtaaacatttattaagca

SEQ ID NO: 11675 - DNA, 120 bp, synthetic construct
  source 1..120: mol_type = other DNA
gaatgccaacgctgtcacagtggtggctatggccctctccggacctgggcccctggtgaccccgcacactctgcccgtgcacaggaacatcatgaacaacaaagtcttctaccaacaccc

SEQ ID NO: 11676 - DNA, 120 bp, synthetic construct
  source 1..120: mol_type = other DNA
gctgcttgggacacctgctgattccaaactcattctggggggcaattctggatggtccagtgcccaaccagaaggagactaatttgcagggagagaacggcacccagttgttcattcatg

SEQ ID NO: 11677 - DNA, 120 bp, synthetic construct
  source 1..120: mol_type = other DNA
caccactgcacttcacctcagggacagagcgagaccccttaaaaaaaaaagtggccagagaaagcctcattgagaaagtgacatttgtgtaaagctctgaaggaaggtgacaggtcaggt

SEQ ID NO: 11678 - DNA, 120 bp, synthetic construct
  source 1..120: mol_type = other DNA
accatctgggaatgcagcccagtaggtctcaagctcctgttcaagatggagttgctgtagtttacaggcctctgacaggaccagggctaatgggccgagggatcagagctgaaccggact

SEQ ID NO: 11679 - DNA, 120 bp, synthetic construct
  source 1..120: mol_type = other DNA
ggtgacacggagtgagctcccatatgtgggtggtcctggactagcaatgttggggacacaacagtgaccaagacagccccagggcctggtctcacagagctcccagtccaatgggggaga

SEQ ID NO: 11680 - DNA, 120 bp, synthetic construct
  source 1..120: mol_type = other DNA
tcacggtagagcagcagcagctgcttttgtttttcttgggattgtggacatatcataatccccaataccatcatcaagatagaaaatgaaaacgaagaaacactgaattccgatgaaggg

SEQ ID NO: 11681 - DNA, 120 bp, synthetic construct
  source 1..120: mol_type = other DNA
aaccatgattacatctctgcattccagcctgggcgacagagcgagaccttatctcagaaaaaaaaaagaaaaataaattagccaggcatggaggtgcgtccctgtagtcctagctactag

SEQ ID NO: 11682 - DNA, 120 bp, synthetic construct
  source 1..120: mol_type = other DNA
gattctacatcttgtgcattgtcccgcaggtacatccgcccgtcgatgctgcagcacctgttgcgccgcctggtgttcgacgtgcccatcctcaacgagttcgccaagatgccactcaag

SEQ ID NO: 11683 - DNA, 120 bp, synthetic construct
  source 1..120: mol_type = other DNA
ccctcttcccaattaccatatatttgcatggggtgcagcctttgtttctacttggtatgttaatttacataagcacagattgctgcatccatatgcccatttactcactacatacccatg

SEQ ID NO: 11684 - DNA, 120 bp, synthetic construct
  source 1..120: mol_type = other DNA
agggggtggacctctagtttgggagcttggagagggcaatatggggatgatttgagcatacaattgggactgacatttgggtttcaaggagagggaccataattcaggtttggggttcag

SEQ ID NO: 11685 - DNA, 120 bp, synthetic construct
  source 1..120: mol_type = other DNA
atctaggtggatctgtgggttaggtctccccattcatggactttgccttctctcaaacttggtagagtgggtagagactccgagagagtgggtttgattccttggctgtagtaagacttc

SEQ ID NO: 11686 - DNA, 120 bp, synthetic construct
  source 1..120: mol_type = other DNA
cttcatgcccctgaaactcggtttctccatctgtagatgggaataataacagcgtttaccaccatggggtaatgagatgagcaccagcaagcaatgtttccgttattcgtatcttcttta

SEQ ID NO: 11687 - DNA, 120 bp, synthetic construct
  source 1..120: mol_type = other DNA
ggactcagagtggagccccaacctggggtgaagccaaagctgatagagacggggccagcaggagcagaggcggacctgagaagggtgggaaactgtagggccggcgtctgggctgatcct

SEQ ID NO: 11688 - DNA, 120 bp, synthetic construct
  source 1..120: mol_type = other DNA
gtgagccaccgcacccggcttgccagttgtaattttaaatagggtgttccagaaagactttgatgagaatgtgatatctgaggcaagccatgaaggaggtcagagaggagctgtgtggac

SEQ ID NO: 11689 - DNA, 120 bp, synthetic construct
  source 1..120: mol_type = other DNA
tgtttaataattggagccagtattattattattattattattttttttttttttttttttgagacggagtcttgctctgtcacccaggttggactgcagtggcgcgatctcagctcactg

SEQ ID NO: 11690 - DNA, 120 bp, synthetic construct
  source 1..120: mol_type = other DNA
tgtctgggtgacaagaaaaaaaaaaggagttgggggaatcagatgaaagataggagaaaggtttatctcaaagccaacacaaatgacttcataccaatactttatcccccatcatttccc

SEQ ID NO: 11691 - DNA, 120 bp, synthetic construct
  source 1..120: mol_type = other DNA
acaaaaaatacaaaaattagccgggcttggtggtgcatgcctgtagtcccagctactcaggaggctgaggcgggaggatcacttgaacccaggagttggaggctgcagggagctgggatc

SEQ ID NO: 11692 - DNA, 120 bp, synthetic construct
  source 1..120: mol_type = other DNA
ggtcaactgtcttcacatcctggcccgctccctggatgccaggtagggccataggcagtggcgcccactcccaccatcatcgggcccccaccccaacccctggtctcctagactctccga

SEQ ID NO: 11693 - DNA, 120 bp, synthetic construct
  source 1..120: mol_type = other DNA
aagaaaaatttaaagattagccaggcatggaggcacatgcctgtaatcccagctactggggaggctgacaagggaggatcacttgagtccaagagttggaggctgcaatgagctatgatc

SEQ ID NO: 11694 - DNA, 120 bp, synthetic construct
  source 1..120: mol_type = other DNA
tgtgtgcctacccttcactgtatggttgaaagtatttagttttttttgttgaacttttgggtgtaagttgcacacaccagggtaacctcatcccttaatgttcatcagctggctttccta

SEQ ID NO: 11695 - DNA, 120 bp, synthetic construct
  source 1..120: mol_type = other DNA
aagatagcctaaaattgcagcaatattgcagttctgtttgcatttttctggaggaagtacccctcactttcattatagagggccatgagtcctctccacggaagaaacaacatctagcct

SEQ ID NO: 11696 - DNA, 120 bp, synthetic construct
  source 1..120: mol_type = other DNA
aatccacctactcctaaggctgagatggggggatcgcttgagctccagcctgagcagcatagggagactgcatctctacaaaaacgactttttttaaaactagctaggcatggtatggtg

SEQ ID NO: 11697 - DNA, 120 bp, synthetic construct
  source 1..120: mol_type = other DNA
ctatggaatttattttagtgatggtgacatttgagggcatcatcaagcttggagacatagggtgaggggtatttgagcataagaggattgagggaaggcagggttcattcattcattcag

SEQ ID NO: 11698 - DNA, 120 bp, synthetic construct
  source 1..120: mol_type = other DNA
tggagggtgagatgggaagaatagggtttgggagactgtttaaggggggtggcaattcaatggtgtctgatgtattgcgggggaggccagggcactgaggtctgggggtgatggcttgac

SEQ ID NO: 11699 - DNA, 120 bp, synthetic construct
  source 1..120: mol_type = other DNA
aaaaaaaaaaaaagaaatatttgtgtaaggaaacaggttgtagatcagggtcaacctagaaatcaggagctgggatcagaggccagggtaaggggccagaggctggggtaagaagcccat

SEQ ID NO: 11700 - DNA, 120 bp, synthetic construct
  source 1..120: mol_type = other DNA
tgtttgggagtcgggctgggaacggagtttggggcctgtgtcagaggccggaggtggcatcagagcccatcgcacccctgcagtgttcgcacagcccattgtgagccgtgcacggccgga

SEQ ID NO: 11701 - DNA, 120 bp, synthetic construct
  source 1..120: mol_type = other DNA
gttgggattacagaagtgagccaccacacttagctgctttttttttttttttaacacaacaatacaccatgaaagacatataggccgggtgtggtggctcatgcctgtaatcccagcact

SEQ ID NO: 11702 - DNA, 120 bp, synthetic construct
  source 1..120: mol_type = other DNA
gatcacttgagctcaggaatttgagaccagcctaggcaacatggctagaccctgtctctacaaaaaaagaaaagaaatacaaaaattagtcaggcatggtgacacacacctgtagtcctt

SEQ ID NO: 11703 - DNA, 120 bp, synthetic construct
  source 1..120: mol_type = other DNA
agaaaaaattttaaaaagtttttagcctagaagttagaatatggatgatttttcaggaggaggaagggggagtggctgggaggggccatgatagtacttccagggaccagaaatgtccta

SEQ ID NO: 11704 - DNA, 120 bp, synthetic construct
  source 1..120: mol_type = other DNA
caccagaacttcaagcgcgaggagcagaactttgtggtccagaatgagatcaacaacatgtccttcctgactgctgacaacaaaagcaaaatggctaaggtcggggcttggttctgggag

SEQ ID NO: 11705 - DNA, 120 bp, synthetic construct
  source 1..120: mol_type = other DNA
ctggacttttgttcccaaaaaaaaaaaaaaaaagaaaaaaagagcaactctcagcttttaccaaagcatcgtgggctgaggtcaagggtaatgggggtgggagaggcacacggagcatgg

SEQ ID NO: 11706 - DNA, 120 bp, synthetic construct
  source 1..120: mol_type = other DNA
tttaaaaaacaagaaactgggaatttgggttgtggacttgggtctggagggtctccggtcatggctgtgggcctgaagtgtagagtcagcaagtctggggtggaaattgaggtgtcgtcg

SEQ ID NO: 11707 - DNA, 120 bp, synthetic construct
  source 1..120: mol_type = other DNA
gactctcaggggctcagggagccctgcgaccctgcataactccccaggatccatgaaccccaagcccgggactgtacccaaacctctgaggtctcaactgtcctggagaccaaaataccc

SEQ ID NO: 11708 - DNA, 120 bp, synthetic construct
  source 1..120: mol_type = other DNA
gtccgggaatttctgcacaacaaccttcaccttcagggaaaggtatgcctccttcctctgcaagcaaaagaagcaagtcagaaagtaaccacaatattagtgaaggtttgagcatttacc

SEQ ID NO: 11709 - DNA, 120 bp, synthetic construct
  source 1..120: mol_type = other DNA
ttagaatggatcgggggaggggtctgctgcttaatcttgcatctgggggcgggacagggaaggggcagatctttaggtctaggggtggggcctagaggagatgcgttgagtttgtgggca

SEQ ID NO: 11710 - DNA, 120 bp, synthetic construct
  source 1..120: mol_type = other DNA
agctcctggcttgagtagaaccaaagtagggcgcaggatgtgggaaaagagaaaaaaaaatccagaccaacagggacatgggggcagtgacaggaggggactctagaaaccctctcccca

SEQ ID NO: 11711 - DNA, 120 bp, synthetic construct
  source 1..120: mol_type = other DNA
caacatacaccgttgcatggctgaacacttcacaagggcatgtctgaggggttcgtatcacagacaatgtagattaactaggcttttctagaagaaagtgtcttgctcaaataaaatcag

SEQ ID NO: 11712 - DNA, 120 bp, synthetic construct
  source 1..120: mol_type = other DNA
ttttgtctgtagtcctgggtggatgctgcacttctaggcatcacagccacatgccaggcagaaagaaggacaaagggtccccactcttcaccctcagcaagatctttggtctctctctct

SEQ ID NO: 11713 - DNA, 120 bp, synthetic construct
  source 1..120: mol_type = other DNA
tattaacatacccacccaattggatgactgtgagggtcagtttgttaatatatacaaggcacctagaacaggcactgacatggtgttagtgtaaacactcagcaggtgttggccattgta

SEQ ID NO: 11714 - DNA, 120 bp, synthetic construct
  source 1..120: mol_type = other DNA
ccgcaccctgcccagaagctcttataagatgggggtcctctccaccgggtcctgaccactcccctgcttacttccccagcaaactggatgaggattacctgtacatggcctatgctgata

SEQ ID NO: 11715 - DNA, 120 bp, synthetic construct
  source 1..120: mol_type = other DNA
ggcttctcggaggaggggacttctgagcagaaggataaaaggagcctgccagttgaagaaaaagagaaaaatgttctacgtagggagaatagtatatgccaaggccaggcagcaagaaag

SEQ ID NO: 11716 - DNA, 120 bp, synthetic construct
  source 1..120: mol_type = other DNA
tgacaaagccacaggttctgctaatatcgctgtgatttatggcttcatccatataggaaggaaatgcttcatttctgttagagggcggaaaacataaaaatgtaacttttcatcatccaa

SEQ ID NO: 11717 - DNA, 120 bp, synthetic construct
  source 1..120: mol_type = other DNA
gcaaggagggatgagaggttcctgtgtgactcccagtttctcctcccctgcctcgccctctgcagaaaatgctggattatcttaaggacaagaaggaagttggcttcttccagagtatcc

SEQ ID NO: 11718 - DNA, 120 bp, synthetic construct
  source 1..120: mol_type = other DNA
atgcctttgagagacagaacaaggccgaggggctgggcatggtgaatgaggatggcactggtgaggccctcccttgggcttcccaccccctgagacatcttcctttgggattcctcccac

SEQ ID NO: 11719 - DNA, 120 bp, synthetic construct
  source 1..120: mol_type = other DNA
tgggcctgtgaacaagtctcttaccttccctaagcttcactttccccatgtgtgaagcagaagctagagaacatggtaaagatctctttccagctggatattgtcggacttccagaccca

SEQ ID NO: 11720 - DNA, 120 bp, synthetic construct
  source 1..120: mol_type = other DNA
tacaattgctctgtgaggggcacaataatggtgaggaggaggggtgtggggtggaggggaagccgaggtttggggctggtacggaagggttgactgaattagtttccgcccctcctcctc

SEQ ID NO: 11721 - DNA, 120 bp, synthetic construct
  source 1..120: mol_type = other DNA
gcacaaaaaacattctacccaatgccatttcctataacaaacatgtacagtctcaagattgtggttataacctttagcaggtgattaggaaaccacagactacccggaaatcaactttcg

SEQ ID NO: 11722 - DNA, 120 bp, synthetic construct
  source 1..120: mol_type = other DNA
tgttgagccaacctgatagagcaattgtgaactgactgtaaaaaagttaaggggaaagaaaaacggggggcaaaaatactttcaggggctgttaaaaccttcctgtgcaacatgatgttg

SEQ ID NO: 11723 - DNA, 120 bp, synthetic construct
  source 1..120: mol_type = other DNA
ttaacagtttgctttcacagaacaatgttttttaaatagtgggaaccaacccatcagacagacgttcatgaatcagtttcacgcagaggttctcattgtaattgtacactggcatgcctg

SEQ ID NO: 11724 - DNA, 120 bp, synthetic construct
  source 1..120: mol_type = other DNA
ggtaggagggttgcttgaggccaggagttcgagaccagcctgggctggtctcaacaaaaaaattaaaaattggccggatgtggtggctcacacctatagttccagctacctgggaggctg

SEQ ID NO: 11725 - DNA, 120 bp, synthetic construct
  source 1..120: mol_type = other DNA
gctcccagcctattttaaaattatttatttatttatttatttatttttgagacggggtttccatcttgttgcccaggctggactgcaatggtgagatctccactcactgcaacctctgcc

SEQ ID NO: 11726 - DNA, 120 bp, synthetic construct
  source 1..120: mol_type = other DNA
aaatccatcctctttctggattggctgtctgcatgaccccgcctcctcctctgcccctccctccccaccaatcagctggttttccatccacgcttccattggtctgacgtgttggccccg

SEQ ID NO: 11727 - DNA, 120 bp, synthetic construct
  source 1..120: mol_type = other DNA
gggctggcagaaaccctaattcgttgtcatctgactttttaaaaggagttaaacttagaatgcaattcctccgtgtcacagcagctgaagttgtgctgttggtatcctaaaattctagag

SEQ ID NO: 11728 - DNA, 120 bp, synthetic construct
  source 1..120: mol_type = other DNA
caaaaagaaagaaattaccactttgtgagccaaaagtgatcacatgttggcaattttatgtgactcaacctaacataaataggggccatgaggcaaaactttgtattggaggtttctatg

SEQ ID NO: 11729 - DNA, 120 bp, synthetic construct
  source 1..120: mol_type = other DNA
agccagatcgagctgctgaaggagctgctggatctgcagaaggacatggtggtgatgttgctgtcgctactagaaggtaaacacccaggagtgagggtgagggaacagtaaagaggttca

SEQ ID NO: 11730 - DNA, 120 bp, synthetic construct
  source 1..120: mol_type = other DNA
tctatgtctcagtttctcttcctaaaagtagagtcacacacttccctttttgtgtgattgtgccagggtagcatttggcacctacctttagcgtacatcatcattatctttttttttttt

SEQ ID NO: 11731 - DNA, 120 bp, synthetic construct
  source 1..120: mol_type = other DNA
tccttgtttgtaaaatgaggataaaacagtccttgggttatatgtattctgttttatttcattttagagacaaggtctttctctgttgcccaggctggagtgcagtggcgtgatcatagc

SEQ ID NO: 11732 - DNA, 120 bp, synthetic construct
  source 1..120: mol_type = other DNA
aaccacctctcccatcctaactctccatcttttcttctgagcctcagtttcctactctgtaaaatggggataggataatcacattaaccactaactattggcagtgtgcggtggttcatg

SEQ ID NO: 11733 - DNA, 120 bp, synthetic construct
  source 1..120: mol_type = other DNA
agtctggaactgtgcctgggtctgtctttatctttcctgacatgtttgaagaacgcaggcaaactgttttgtaaaatgtcgttcagtgtgggtttgtctgagttttcatcattatcagac

SEQ ID NO: 11734 - DNA, 120 bp, synthetic construct
  source 1..120: mol_type = other DNA
ggtggttttctcatttcgccgtatgctttaccatcactaggcaccattttactgtaagaaagagtgtttccttcttgtccatttcatttcattttctcattcatccattcatttatatca

SEQ ID NO: 11735 - DNA, 120 bp, synthetic construct
  source 1..120: mol_type = other DNA
cctcttacccttcactgtgcctgagccctccaccttcatgaagagctcatagttaccatattctcactctgtgccctgcgtataaatgaatttgctcatttagtccttacagcaacccta

SEQ ID NO: 11736 - DNA, 120 bp, synthetic construct
  source 1..120: mol_type = other DNA
aagtacacatgattcacaattgaaaatgagtaatgatctctcctgactggggctgcacagatcacagggtttaatgtcacctacctgacattttacagctcaacatctgttacacaaagt

SEQ ID NO: 11737 - DNA, 120 bp, synthetic construct; identical to SEQ ID NO: 4438
  source 1..120: mol_type = other DNA

SEQ ID NO: 11738 - DNA, 120 bp, synthetic construct
  source 1..120: mol_type = other DNA
caagttcttcatggttgccagagttcttgacagtttacaaatcacatcttcattgatgaagtactttgtagatttcaaaacatctactatagcttggaaggccctttctggtgtttgaaa

SEQ ID NO: 11739 - DNA, 120 bp, synthetic construct
  source 1..120: mol_type = other DNA
gtgtatgtgtgtgtggccttaaaagacgttccttttatttaacaaaccacaatgtcatcactcctaacccaaaataaaacagtacaaataaaaaagtcacagtcctttaaatcatcaaat

SEQ ID NO: 11740 - DNA, 120 bp, synthetic construct
  source 1..120: mol_type = other DNA
taatcaatctaaaaaatgattagctcgacatttttcattcttttttcacactaagtctatcagtggatagtgctgtcctagttgtagagcttcccatagtctggacctgaccaatgcgtc

SEQ ID NO: 11741 - DNA, 120 bp, synthetic construct
  source 1..120: mol_type = other DNA
ggtcctgaaggtacagcagtgaacaaaacagagagcccactgtgggggctgatagtccagtgggaaggggcagatgcaaataacgaaatacacgaagtaattgcaggttataatctgtgg

SEQ ID NO: 11742 - DNA, 120 bp, synthetic construct
  source 1..120: mol_type = other DNA
ctaccccataaataaatacaactactatgtacccacaaaaatgaaaaataaaaaggcctggctcatgcctgtaatcctaacactttgggaggccaaggcgggcagatcacttgagatcag

SEQ ID NO: 11743 - DNA, 120 bp, synthetic construct
  source 1..120: mol_type = other DNA
atgaatgatgacacagagagatcagcaaatcacaagagcaaagtctaggagtgaatggaggtgatagtgtcccaggcgcctgtggagaggtgggcttctttttttttttttttttttttt

SEQ ID NO: 11744 - DNA, 120 bp, synthetic construct
  source 1..120: mol_type = other DNA
gagtgagtgcggtcaagaacattttatgctgctctagagaacctcttgcaaaaatgcatgggcaatcagcacaagaatgttcaagaaaagtgttgtctgaaagaaatctgtgggtgaact

SEQ ID NO: 11745 - DNA, 120 bp, synthetic construct
  source 1..120: mol_type = other DNA
acttgagcccgggggtggggatggggacgagaggggatgtcttgaggctgggttgagctgtgattgcgccactgcactccagcctgggcgacacagcgagaccttgtcttaaaaaaaaaa

SEQ ID NO: 11746 - DNA, 120 bp, synthetic construct
  source 1..120: mol_type = other DNA
tgccctcactgtagccctggcacaaccatgctcacccatgcacacttgggccacggtctcaggctcacccagaagagccctcagacctactctctaatctgacatgccctatctcagctc

SEQ ID NO: 11747 - DNA, 120 bp, synthetic construct
  source 1..120: mol_type = other DNA
ctctgaccctgcgtgctccccatacaaacactctttgccttagtgctattcctccaaacacccgcttccttctgctcaccccttcccattccactttcccctgcttctcaggcatccacg

SEQ ID NO: 11748 - DNA, 120 bp, synthetic construct; identical to SEQ ID NO: 4448
  source 1..120: mol_type = other DNA

SEQ ID NO: 11749 - DNA, 120 bp, synthetic construct
  source 1..120: mol_type = other DNA
ctatcctgtctgccgcccctcgcttcaggtgaaggagtccaagcgccagttcatcttcgacgtggtgaacgagggcggcgaggctgagaagatggagctcttcgtgagtttctgcgagga

SEQ ID NO: 11750 - DNA, 120 bp, synthetic construct
  source 1..120: mol_type = other DNA
ggggattggagggaggaagagagcccggctgggtggagacacacacagaggagagaactggctagggggatgggcacacgcacccacggaggacgcacccatggaggacgcacacgggga

SEQ ID NO: 11751 - DNA, 120 bp, synthetic construct
  source 1..120: mol_type = other DNA
atgagcctcagtttcccctctgtaaaacgggaatcataatctgcctctttctggtggagggaagtgtaaaacttagattacccaggggaaataagagagaaaggagatgagaggagcagg

SEQ ID NO: 11752 - DNA, 120 bp, synthetic construct
  source 1..120: mol_type = other DNA
ccccataagggcaagtcctgattatctcatcatcccatgtacccagtaccatccaaacctgggccaggcacagggcgggcccttggtgaatggttttgaatgaatgaactcatgcattgc

SEQ ID NO: 11753 - DNA, 120 bp, synthetic construct
  source 1..120: mol_type = other DNA
actaaaaatacaaaaaaaaaaaaaaaaaaaaattagccagccatagtggtgcatgcctgcaattccagctactcaggatgctgaggcatgagaatcgcttgaacccaagaggcagaagtt

SEQ ID NO: 11754 - DNA, 120 bp, synthetic construct
  source 1..120: mol_type = other DNA
aacagtagtgcccacttcacaggggtgtactgagaattaaacaagctcatgcaaataaagttcttagcccagatgttggtataagcaagcactcaacaaataggaggttgaggccagccg

SEQ ID NO: 11755 - DNA, 120 bp, synthetic construct
  source 1..120: mol_type = other DNA
ttgtaggaaagatattgagagcccaggtactttgattgcaggtaaatgatgggatgaattctccagggaagaggctgatctgtgagcgctttctctctttttctcttctctctcagaact

SEQ ID NO: 11756 - DNA, 120 bp, synthetic construct
  source 1..120: mol_type = other DNA
cacccactgattctgttaagcatctttggtttcacataagctaaacagaagtttgcagggaggaagaaatgggccactcacagaatggaaggaatgggttaagaaccaggcctcctgaag

SEQ ID NO: 11757 - DNA, 120 bp, synthetic construct
  source 1..120: mol_type = other DNA
taattttcatgttagtgttaatattagtgggcagtctctttagggctccactatcaagatgaaccaactctgtcttcagttctgtgccactcagttcaataggctaattcccaggtcaga

SEQ ID NO: 11758 - DNA, 120 bp, synthetic construct
  source 1..120: mol_type = other DNA
tactttgctattgaactagagttctttgggcttaaaactttcatacatgctattccctctgcctgcaatactttgccctgcttccacctccttgcacctgcctgttttattcatccttca

SEQ ID NO: 11759 - DNA, 120 bp, synthetic construct; identical to SEQ ID NO: 4458
  source 1..120: mol_type = other DNA

SEQ ID NO: 11760 - DNA, 120 bp, synthetic construct
  source 1..120: mol_type = other DNA
agttcaagaccagcctggacaacatagagagacctatatctttagaaaaaaaaaactaaaaagttagccagacatgctagcctggctagcgcatgcctgtagtcttagctgtttgggagg

SEQ ID NO: 11761 - DNA, 120 bp, synthetic construct
  source 1..120: mol_type = other DNA
gcagtggggtccccactgttcaaggttcctacaagaaaagcagtggagccaggcgcaggtggctcacgcctgtaatcccagcactttgggaggccaaggcgggaggggggatcacctgag

SEQ ID NO: 11762 - DNA, 120 bp, synthetic construct
  source 1..120: mol_type = other DNA
caaaaatacaaaaaattagcacggtaccgcatgcctgtagtcccagctactcaggaggctgaggtgggaggatcgcttaacctgggaggcagaagttgcagtgagccaagattgcaccac

SEQ ID NO: 11763 - DNA, 120 bp, synthetic construct
  source 1..120: mol_type = other DNA
ctattatgtgccaggaacagttttagaaacctgggatcccgtgttaaacaaaacagtgattctgaccttcaagttggaaagatagatgatgaacccaagtacagtatgtcagtggtgata

SEQ ID NO: 11764 - DNA, 120 bp, synthetic construct
  source 1..120: mol_type = other DNA
tcttcttatccacacaaggctccttatccccctagacatcttattagtattattattactatttttttttaaatagctgggattgggtgtggtggctcacgcctgtactcccaacacttt

SEQ ID NO: 11765 - DNA, 120 bp, synthetic construct
  source 1..120: mol_type = other DNA
gcagaggtttcagtgagctgcatgtgcaccactgcactccagcgtggataacagagcgagaccctgtctctaacaaaaaacagagagtggccaggtgcggtggctcaggcctgtaatccc

SEQ ID NO: 11766 - DNA, 120 bp, synthetic construct
  source 1..120: mol_type = other DNA
gatgtccctcttgggacactacaacaacttcttctttgctgcccatctcctggacatcgccatgggggtcaagacgctgcgcaccatcctgtcctctgtcacccacaatgggaaacaggt

SEQ ID NO: 11767 - DNA, 120 bp, synthetic construct
  source 1..120: mol_type = other DNA
tcactgcaacctccgcttcctgggttcaagtgattctcctgcctcagcctcccaagtagctgggactacaggcgcatgccaccacacccagatactttttgtattcttaattttctttct

SEQ ID NO: 11768 - DNA, 120 bp, synthetic construct
  source 1..120: mol_type = other DNA
attattggaaaggtactcagggagcgtgcccctgccacttatgagccgtgtgattttggggcaggctactcaacctcctccctatgccctgggggcctcacctgtaaaatgagtgtgtaa

SEQ ID NO: 11769 - DNA, 120 bp, synthetic construct
  source 1..120: mol_type = other DNA
gaggctcttccagacacggcctcgctgcccacagcctcgttctcattatagtcacttatcttagtttttactctaggatgactgtgttctctcacatcctggggacacggaaagaacaag

SEQ ID NO: 11770 - DNA, 120 bp, synthetic construct
  source 1..120: mol_type = other DNA
acctaaggcctcctttaggtttcagctcacacctgcctcctcttccaggaagcctcacctgatcacctaggctggatcagatgcctccagcgggctgttaaagcttccagtgcttcccct

SEQ ID NO: 11771 - DNA, 120 bp, synthetic construct
  source 1..120: mol_type = other DNA
cgcgggtgacgaatacgagctctacagggtggtcttcgacatcaccttcttcttcttcgtcatcgtcatcctgttggccatcatccagggtcagtgctgggagtgggcgctcagggcccg

SEQ ID NO: 11772 - DNA, 120 bp, synthetic construct
  source 1..120: mol_type = other DNA
cctcagcctcccaaagtactgggattacaggcgtgagccaccgcacccggccaataaaggcctaatactatcttcttaggaagcgagattaggggtgagattagggaaatgggggatgga

SEQ ID NO: 11773 - DNA, 120 bp, synthetic construct
  source 1..120: mol_type = other DNA
ggtcaggtaagggggtgttaatgggaggacagtgggcaggacgtggagccctttaacataaggccagtcagtaggtggcagtaaaaagctcctatcaatatcaagggttagggctggggg

SEQ ID NO: 11774 - DNA, 120 bp, synthetic construct
  source 1..120: mol_type = other DNA
tgggagcagtaggatcatccactgggcgtgtctccaccactacaggcctgtggaaggaagagataagtcagttcatttattcattcatatgttcattgattcattaattcacaaagtagt

SEQ ID NO: 11775 - DNA, 120 bp, synthetic construct
  source 1..120: mol_type = other DNA
gacagagcgagcctctgtctcaaaaaaaaaaaaaaaaatttatccaggcatggtggtgcacgcctgtaatcccagctattcgggaggctgaggcaggaggatcgattgaacctgggaggc

SEQ ID NO: 11776 - DNA, 120 bp, synthetic construct
  source 1..120: mol_type = other DNA
aggcgtgagccaccgcgcccgaccggtgggatacttcttattacaaagaaaaacagaggctgggtgcggtgacccctgcctataagcccagcactttgggaagcctacacaggtgaatct

SEQ ID NO: 11777 - DNA, 120 bp, synthetic construct
  source 1..120: mol_type = other DNA
attacaggcacgtgccaccacacccagctaatttttgtatttttactagaggtggggtttctccatgttggccaggcccatctccaactcctgacctcaggtaatctgcccacttcagcc

SEQ ID NO: 11778 - DNA, 120 bp, synthetic construct
  source 1..120: mol_type = other DNA
aaatacaaaaattagccgggcacagtggcacatgcctgtaatcccagttactcgggaggctgaggcaggagaatcgcgtgaacccagtgggtggaggttgtggtgagctgaaatcacgcc

SEQ ID NO: 11779 - DNA, 120 bp, synthetic construct
  source 1..120: mol_type = other DNA
tgtcaaaaataaattttaaaaaaattttataaataaaagaattaaaattaaaaaataaaaggattggccaggtgcagtggctcatgcctataatcccagcactttgggaggccgaggcag

SEQ ID NO: 11780 - DNA, 120 bp, synthetic construct
  source 1..120: mol_type = other DNA
ggtcgtgccattgcactccagcctttgagtacagtgagaaacaaaacaaaaagagagaacgcccccgtggctgcagtgcagagaacagactctagggagcagggatggaagcagggtgac

SEQ ID NO: 11781 - DNA, 120 bp, synthetic construct
  source 1..120: mol_type = other DNA
gttaagtcatttgcccaaggccactcagctgaattccaacccagacagtcttgtcttaactatccatatatctctatagtggtccccattttacagttggggaacagaagcttaaagaga

SEQ ID NO: 11782 - DNA, 120 bp, synthetic construct
  source 1..120: mol_type = other DNA
agatcgcgccactacactccagcctgggtgacagagcaagaatccatctccaaaaataaataaattttatctatctatctatctatctatctatctatctatctataaaataggccgggt

SEQ ID NO: 11783 - DNA, 120 bp, synthetic construct
  source 1..120: mol_type = other DNA
acttgctcggaggagccggggccgagcggaccgccggctgcaggcagcgagcgcggctgggctgcggggctgcttccccgcgtcctccgggcccgggccgccctcctcccgcacagtgcg

SEQ ID NO: 11784 - DNA, 120 bp, synthetic construct
  source 1..120: mol_type = other DNA
tgcgcggaggtttcccccaagtcaaggtgctgcgaaagcggaggaggagtcgcctccgtggtccccgcggttcccggggctggtgccatccgtggtggtgctgtgaccgcttgcaaagcg

SEQ ID NO: 11785 - DNA, 120 bp, synthetic construct
  source 1..120: mol_type = other DNA
ccctaacttcctgctaataataacctagttagcatcctttcagtcgttccttctccacttctgtcctccttcccgaaggatgttcccttgcaggattccccagacttccccaacctagaa

SEQ ID NO: 11786 - DNA, 120 bp, synthetic construct
  source 1..120: mol_type = other DNA
ccttttttttctcttaacctgagaatgttggtggttcagaaatgctgatggggtgaataatggggagactgtagtatagttcccacattgaagtcgcttcttttttttctgagggcattt

SEQ ID NO: 11787 - DNA, 120 bp, synthetic construct
  source 1..120: mol_type = other DNA
gtagatgaatgatcattgattcagtggctcccccatctgttggaaacctgcccacttgggtctgtttatctttgagagagattgaaaatatgtttttgtaaactctggatatgctgggac

SEQ ID NO: 11788 - DNA, 120 bp, synthetic construct
  source 1..120: mol_type = other DNA
agtacaaaggaaaagatggaatgagcagtggaaattcgcactttttgctcccttcataatgaagctacgaggagctttagatagatatgcactatggtattttcccaaggaactgatgga

SEQ ID NO: 11789 - DNA, 120 bp, synthetic construct
  source 1..120: mol_type = other DNA
acgtctaaatgtccctctctgtccctattcccttagattccttctcaagctctactaccctgactttcctttttgaagctactcttttgactttggggacatggtaccttctgggtaatt

SEQ ID NO: 11790 - DNA, 120 bp, synthetic construct
  source 1..120: mol_type = other DNA
ctgcatctaatttgtcatcatagcccatcgtgtttctctttgcaatccaactcagatttcgatgtgtttcatactccgttagcttcttgttctgatcccagtactcatttcaaccttcgt

SEQ ID NO: 11791 - DNA, 120 bp, synthetic construct
  source 1..120: mol_type = other DNA
ggtccagtgggaggggacacccggagaaggcaattagagagagggaagttacagtcactagagcaaatgaacaaaggagagtaagagaataaattaaggattaattgagtctgagtgatt

SEQ ID NO: 11792 - DNA, 120 bp, synthetic construct
  source 1..120: mol_type = other DNA
tggaaggtatatttcctggtttctattgcaaaagttctgtagtggtgttgctgcaatgaaatggaagtccaaggcattccctgttagtgacggagtgttcagaggacctacacgtaattg

SEQ ID NO: 11793 - DNA, 120 bp, synthetic construct
  source 1..120: mol_type = other DNA
tacatgaggaaagttcggtctcacacacacgcacacatgtgtgcacaaatgaatgaaagatattccaccatattttttttcaccaattttgactgtggtgtagaattcagttaaattagt

SEQ ID NO: 11794 - DNA, 120 bp, synthetic construct
  source 1..120: mol_type = other DNA
ctgctggagatggacatattttaaaatgagagggaaacttggtgccctgcttctacctgcaggaagttactttataatatcaaatgtgaatttcttacattaccagagccttgcaggctg

SEQ ID NO: 11795 - DNA, 120 bp, synthetic construct
  source 1..120: mol_type = other DNA
tttttttttcctctccttttagggaagaacaacatattgaaggatgattaagacacttgaaaaatgtaacagaaacatacacacacacgcattgcatacacaggatccaatccctgatgc

SEQ ID NO: 11796 - DNA, 120 bp, synthetic construct
  source 1..120: mol_type = other DNA
tcagggtctaacccctttatagtgaaggaacatgaaaggacaagtatattggcccacattattccgctcagacaggatagctgcaattcatttgattcctggaacaatccatttagtcta

SEQ ID NO: 11797 - DNA, 120 bp, synthetic construct
  source 1..120: mol_type = other DNA
tgtcacgctcccagcccgcaccttggtaaatgatccctcattcacctctcttcagttaaacccttgagagtgccattcccttccttgatgagaccctgatgcgaaggcgggaagcacggt

SEQ ID NO: 11798 - DNA, 120 bp, synthetic construct
  source 1..120: mol_type = other DNA
tttacagaaggaatcaagtgaaagtgaggccattaagctggcccctggtcctatatgactagtgccctcctaacaagaagggattaggacgcaggtccacacagagggaagatggtgtga

SEQ ID NO: 11799 - DNA, 120 bp, synthetic construct
  source 1..120: mol_type = other DNA
tgatacgttattatggcagcagtaggagtcgaattcaaggcacaaagctagaagtgtggatttagtgttttggagagaggagtgacccagtgaggcagattggaggccactggtgtgatt

SEQ ID NO: 11800 - DNA, 120 bp, synthetic construct
  source 1..120: mol_type = other DNA
aatagaggcagatgatatagacaatcttttcaccccatgtgctgaagaggaagagaggaggtgggagcttgaaaggggaggaagggtaaaagttagggatgcttttcttttctcatgaaa

SEQ ID NO: 11801 - DNA, 120 bp, synthetic construct
  source 1..120: mol_type = other DNA
cttcacactgttgatttaaaggtaaaagctttcaacaaatgtctgcacttaacaacagagcatatatcttcatctcttttgtgttctgaatgagcacctataacactttctcaaaaggaa

SEQ ID NO: 11802 - DNA, 120 bp, synthetic construct
  source 1..120: mol_type = other DNA
caggagtcgagaactctgcataacttagcagtacagcttccaagaagggccctgatattgtggataaatggagtctatttttaaggttagataaatccagcctatttttgtgggcaggga

SEQ ID NO: 11803 - DNA, 120 bp, synthetic construct
  source 1..120: mol_type = other DNA
cagcttgatgaatatttgcagtgtgaacgcagttgtgtaactaccactcacattaatgcattgaatgttaccattacctgcaagcctctctagcaccccctcccaagagttacctgcctt

SEQ ID NO: 11804 - DNA, 120 bp, synthetic construct
  source 1..120: mol_type = other DNA
ctcatgatggggaacacctgctttgtatctttaatgtccatttggatatactgtattcttttgtgaaatacctattcaggctttagcctgttttaaaaatacggttgttctatctatcta

SEQ ID NO: 11805 - DNA, 120 bp, synthetic construct
  source 1..120: mol_type = other DNA
ttaaaaggctaccttttcatcactgcattgcagtggtacctgggtagtaagtcaggtggctgtaagcagggatatctattacttgactctcttttatttcattggtctatttgtcttttc

SEQ ID NO: 11806 - DNA, 120 bp, synthetic construct
  source 1..120: mol_type = other DNA
gtgaggacacaatgagaaaacagcaggcagtctgcaacccagaagagggccttcaccagaacctggccatgctggctctctaatctcacacttcccagcctccagaatggtgagaagtaa

SEQ ID NO: 11807 - DNA, 120 bp, synthetic construct
  source 1..120: mol_type = other DNA
ttgttggtgatccacccccgaccccacccccagcaattctggcttccattatttctctttggaaggtcagctgtaagtctcactgttttcctttaaaggtgatattttcattctatttat

SEQ ID NO: 11808 - DNA, 120 bp, synthetic construct
  source 1..120: mol_type = other DNA
agttattctcagcgaaagtttagttcagtaccagcgtctctatcataacctggaactgaagtcccccatgagaaactaacttttggtggcacgtaacatcgtattgtgtgttctgtttta

SEQ ID NO: 11809 - DNA, 120 bp, synthetic construct
  source 1..120: mol_type = other DNA
accatccctagcccatgggagccactgttttgttctccatctctgtaattttgtcattttgacaatgtaattgtattagtccgttcttgcactgctgtaaagaaatatctgagactgggt

SEQ ID NO: 11810 - DNA, 120 bp, synthetic construct
  source 1..120: mol_type = other DNA
gtgtgtagtgatatctaatcatggtattaatttgcttttccctaatggttagtaatgttaaacatctttcatgtgcttatttgccacccgtgtctttcttttttttttttttcttcgaga

SEQ ID NO: 11811 - DNA, 120 bp, synthetic construct
  source 1..120: mol_type = other DNA
gtacaaaattatttgttcatacttgtgcagggctatttctgtgttctgtattccgcttcattcgtctatgtgtctagctgtccaccaataccatacagtgttgattactgtagctatata

SEQ ID NO: 11812 - DNA, 120 bp, synthetic construct
  source 1..120: mol_type = other DNA
tcttggcatggctcaagaacagttgacattgttatgttgcccatgtgctgttgaagcctttattctgataacattggtaaattgtcccttaccaacgtggccatttgtgtaaatacattc

SEQ ID NO: 11813 - DNA, 120 bp, synthetic construct
  source 1..120: mol_type = other DNA
ttatcccatttatatgttgtttactgataaactggctgtattttgtgataagagaaagtgggaaagattaatgggaaccactcagaggtttagcaatagaacttaaagagagcaattttc

SEQ ID NO: 11814 - DNA, 120 bp, synthetic construct
  source 1..120: mol_type = other DNA
cctaggcctctcaaagtgctgggactacaggtgtgagccaccatgcctggactgtgtttaactttttacctttctattttttatgattttttcttgcaggctgacttgaagcaaaattgg

SEQ ID NO: 11815 - DNA, 120 bp, synthetic construct
  source 1..120: mol_type = other DNA
tgggaagaatgaggtatgcagataactggtgggtgagttagtcggagaggagcttcattgagtaaaagaacaactctcatgagacctgaagtgggcagctcccttccgcaggcaggtctt

SEQ ID NO: 11816 - DNA, 120 bp, synthetic construct
  source 1..120: mol_type = other DNA
ccaccgccgccatcactgggattacaggcatgaaccactgaacccggcctgtgcagcttttgagatcagttgcagtttagcaaactccactttccactgatcagggtcggcttccaggca

SEQ ID NO: 11817 - DNA, 120 bp, synthetic construct
  source 1..120: mol_type = other DNA
aatttggattttatcctggagtctttagttgattgactatttgacaaacatctacggaatgcctggtttgtggtgggtgttgagaatacagataggggccctgctttggatgggcctctc

SEQ ID NO: 11818 - DNA, 120 bp, synthetic construct
  source 1..120: mol_type = other DNA
cccagctactcagggggcagaggcagaagtattgcttgagcctaggagtttgaaaccagcctgagcaacatagtgagaccccatctctaaaaaaatgaaaataaattagctgggtgtggt

SEQ ID NO: 11819 - DNA, 120 bp, synthetic construct
  source 1..120: mol_type = other DNA
caccccatgtttaggagggcagagacccaagcgctgaacccactctcattctcatgtaggttttatgcttggatatcactgcgtgaatttaaaatctgagcctctaagcaacattttgga

SEQ ID NO: 11820 - DNA, 120 bp, synthetic construct
  source 1..120: mol_type = other DNA
ctcctccaaaggaacgcagttcctcaccagcaacagaacaaagctggatggagaatgattttgacgagctgagagaagaaggcttcagacgatcaaattactctgagctacgggaggaca

SEQ ID NO: 11821 - DNA, 120 bp, synthetic construct
  source 1..120: mol_type = other DNA
acaaccggtaccagcctctgcaaaatcatgccaaaatgtaaagaccatcgagactaggaagaaactgcatcaactaatgagcaaaatcaccagctaacatcataatgacaggatcaaatt

SEQ ID NO: 11822 - DNA, 120 bp, synthetic construct
  source 1..120: mol_type = other DNA
acatagttggaagtaaagctctcctcagcaaatgtaaaagaacagaaattataacaaactatctctcagaccacagtgcaatcaaactagaactcaggattaagaatctcactcaaagcc

SEQ ID NO: 11823 - DNA, 120 bp, synthetic construct
  source 1..120: mol_type = other DNA
ttgaatctctgaatagaccaataacaggctctgaaattgtggcaataatcaatagtttaccaaccaaaaagagtccaggaccagatggattcacagccgaattctaccagaggtacaagg

SEQ ID NO: 11824 - DNA, 120 bp, synthetic construct
  source 1..120: mol_type = other DNA
agggtattcaattaggaaaagaggaagtcaaattgtccctgtttgcagacgacatgattgtttatctagaaaaccccatcgtctcagcccaaaatctccttaagctgataagcagcttca

SEQ ID NO: 11825 - DNA, 120 bp, synthetic construct
  source 1..120: mol_type = other DNA
acaaaattgacaaatgggatctaattaaactaaagagcttctgcacagcaaaagaaactaccatcagagtgaacaggcaacctacaacatgggagaaaattttcgcaacctactcatctg

SEQ ID NO: 11826 - DNA, 120 bp, synthetic construct
  source 1..120: mol_type = other DNA
ccctgtctttctttatatatgtatatacatatataaatacaccccccacatatatatatatatatacatgcatgtatacatatatatcataatttagacatttctcatgcatttatgttc

SEQ ID NO: 11827 - DNA, 120 bp, synthetic construct
  source 1..120: mol_type = other DNA
gtactgtgggacaggtcctattgtaagcagcgttcatgttatattaacttattgactcttcacaggatcatgtgaggtatgggaggttaagccacacagctcatcgttttgtgccagaac

SEQ ID NO: 11828 - DNA, 120 bp, synthetic construct
  source 1..120: mol_type = other DNA
atttatttgaagactagggagtaggaggagaaaaccctctaagtgttctctggcagtttggtgcatgctttgaagtgagagagaaaattcctcacgaccatgtagaagtttcccgataaa

SEQ ID NO: 11829 - DNA, 120 bp, synthetic construct
  source 1..120: mol_type = other DNA
cgctgaaagatgaccagggagctctcaaatgctttccctcagtattcatccccttaaacttccctggaggatgtgggacttttgtccacttaggcatgaaaatccagtgtgtatgttatg

SEQ ID NO: 11830 - DNA, 120 bp, synthetic construct
  source 1..120: mol_type = other DNA
ccttggtgccttcactgttcccagtgtcactggttagggaatagtcctttgcttttggccaggcatttcttgaatgtgctagtccctttttaattctctaaaaggagaattaaattaaaa

SEQ ID NO: 11831 - DNA, 120 bp, synthetic construct
  source 1..120: mol_type = other DNA
gtgtttaatctatttgattagattgctttcctaatatcaagaaccaagagcatttgaggtgaactgccccattacttgatctcagttggaggggcctggaatcctgggaacttgaggggg

SEQ ID NO: 11832 - DNA, 120 bp, synthetic construct
  source 1..120: mol_type = other DNA
atggtttgagtatgtagagatattgggccttcactctccagctgcagtagaacgaggttggcaaacagcagtcaaacttatgcttttaaatgagatagagctgatactaatggacaagtt

SEQ ID NO: 11833 - DNA, 120 bp, synthetic construct
  source 1..120: mol_type = other DNA
tctcctcctacattcccccctccacagtggggcttggatgtgtttgtaaaatgagccttaataaaaatgtgagaaagtctccatttaattttgtgtgattttcatctcagaagttctcgc

SEQ ID NO: 11834 - DNA, 120 bp, synthetic construct
  source 1..120: mol_type = other DNA
aggatgcaagggcttggctacctgtgcttttctttcctttttctactttccttgcaagactaaaccatatttacaagttccttcaacaaatgtgtaaatgtgtattggatgcctcctgga

SEQ ID NO: 11835 - DNA, 120 bp, synthetic construct
  source 1..120: mol_type = other DNA
tgtgggggtaactgtattacataacggagttcagattaatttttcttacacataaatgaagaaagctaatatctaggtaggcctgtttgagaataagcagagccttttcttcccattcct

SEQ ID NO: 11836 - DNA, 120 bp, synthetic construct
  source 1..120: mol_type = other DNA
aggattacatgagggaggcagggggatcagagtcagaggagatgtgatgatggaagcagagatcagagacagttgaaggtgccacattgctggaaggccaggaaccaacagattttcccc

SEQ ID NO: 11837 - DNA, 120 bp, synthetic construct
  source 1..120: mol_type = other DNA
aacctgtccagtgagcttagcatcccttaggaaatgacttaccctaaggagggtgccattcccaaatctctgttggtctggaattcaaactgtagaaacaccagggacttttctttcttt

SEQ ID NO: 11838 - DNA, 120 bp, synthetic construct
  source 1..120: mol_type = other DNA
ctttataatactgatttcagagggaaagcatgttgagagaaaagatctaccataaggatgcgttgtataatgggctgtagtctgcccacccttgggttaacaatgggttgatgttacctg

SEQ ID NO: 11839 - DNA, 120 bp, synthetic construct
  source 1..120: mol_type = other DNA
tctggccaaagatagtcttattattatttcaaaatctaattcaacttgcttccttcacagcatttcttggataaatcccacatagcagaattgccttctccctccacatgcagaacctca

SEQ ID NO: 11840 - DNA, 120 bp, synthetic construct
  source 1..120: mol_type = other DNA
ggccagagagattaatcgattcttttgcttagtgaagttaacagtgatgcttttcctgtaattgagataatctgtgtgcggcctgtgtttcctggggttcttctcacgctgctgtgaatt

SEQ ID NO: 11841 - DNA, 120 bp, synthetic construct
  source 1..120: mol_type = other DNA
tattattaacaaacaacccaagccttcatatatcaattgcttcctggatgccttgccctgtgctaaacatagtgtgtgatttatgtcatgtaaacctccagcaactttatagatgggact

SEQ ID NO: 11842 - DNA, 120 bp, synthetic construct
  source 1..120: mol_type = other DNA
atttatcataattttagctgacagcagcactgccgacatctctttctcactcaagggaagtacccacaaggcaagctacagagcatccccctagcctggtgactggagatcaaggagcta

SEQ ID NO: 11843 - DNA, 120 bp, synthetic construct
  source 1..120: mol_type = other DNA
ataaaggctgctcagattttaccacttggacaagagatgaaagttccagaagagtacaaactgagctgctctggcatgttcggaacctgttttctatgacatagttggtagagagcaaca

SEQ ID NO: 11844 - DNA, 120 bp, synthetic construct
  source 1..120: mol_type = other DNA
ttttaataaggaagtgaaccccagatgacagaactgattttcttttattgggtgacggttgagatctcctattgcttaaatcaggttaaataagagagaatgctgctctgtaagtctggc

SEQ ID NO: 11845 - DNA, 120 bp, synthetic construct
  source 1..120: mol_type = other DNA
ccagctaatatatccatcacctcacatagttgccattgtgtgtatgtgtgtgtgtgtgtgtgtgtgtgtgtgtgtgtgtggtgagacactcaagatgtactgtcttagcaaatttcaggg

SEQ ID NO: 11846 - DNA, 120 bp, synthetic construct
  source 1..120: mol_type = other DNA
tagcctctttgacagctctttgccattggttgcaagatgaatccaaggggagggcataatgtacaaggaaaaatgataaattaaaaatcctacactgtactaggagattgttccatacca

SEQ ID NO: 11847 - DNA, 120 bp, synthetic construct
  source 1..120: mol_type = other DNA
agagcatgcatttccttccgtcacctacacattatttactaagtccctcctgcacatggctgggccttcaaggagttcctgatctgggatgggtggactcaatctcgcttctcgattctc

SEQ ID NO: 11848 - DNA, 120 bp, synthetic construct
  source 1..120: mol_type = other DNA
tcagtgagtaagcaagttcagagacttggctttggccattttgttctcttaggctcatccttggatgccaacagggaaattacctgccagatttcagtcactactttttagaagttaaaa

SEQ ID NO: 11849 - DNA, 120 bp, synthetic construct
  source 1..120: mol_type = other DNA
gtgggcctcttgatggtgagtgttataggaatgtagaggtcaaaggaattgctgtggactgtggtgtgtgtgaaagcttcatggtagacttttgacttcaaggtcaaagacattgctgtg

SEQ ID NO: 11850 - DNA, 120 bp, synthetic construct
  source 1..120: mol_type = other DNA
aggagctctgaggccatccaagatagatgtgtccattggaaattgggcttagagttagaaactgctaagtggacattattttaaaatttattttggatattcagcttccgaacactgtcc

SEQ ID NO: 11851 - DNA, 120 bp, synthetic construct
  source 1..120: mol_type = other DNA
cagcccctgtcaattctttgaacacctgttagctagcattccaacttggttggtttctgtcatttgcaaccgagaattctgtctcttttgtctggttgtctctctgtggtcaccatgcct

SEQ ID NO: 11852 - DNA, 120 bp, synthetic construct
  source 1..120: mol_type = other DNA
gtcttctcaacggtctgatggtaatgctgggaatttcaggctttctggcagactgtcagggagaaatttcagtgcagaaaggccttctagaacctcacgaataaggggtgctgctcacat

SEQ ID NO: 11853 - DNA, 120 bp, synthetic construct
  source 1..120: mol_type = other DNA
gagatcgagaccagcctggtcaacatggtaaaacactgtccctactaaaaatacagaaattagccagcaatacaaaaattggcagctgtagtcccaactacttgggaggctgaagcacaa

SEQ ID NO: 11854 - DNA, 120 bp, synthetic construct
  source 1..120: mol_type = other DNA
ggtggttagtgtggacttctggagagagggctgaaactgtccttgaaaaaatggatttctcagtgtgatgtgtatacagtgtccctttttcagacatggcaccttcgtccatttgggctg

SEQ ID NO: 11855 - DNA, 120 bp, synthetic construct
  source 1..120: mol_type = other DNA
ttgtaggttctcacttctctgcagctttagttttaccaagttgcttttacatttaccttgctctattataggtaatagatgtgaagcttccgattcctggctcagagttggtgacttcca

SEQ ID NO: 11856 - DNA, 120 bp, synthetic construct
  source 1..120: mol_type = other DNA
tttgcatgatcaggaaagtctgggaagtgggtcttaggaagcctgcaatgttgtctcttgtctgtgctttccaccagcgttccagttttgcacttttggtatttctgagcaagctcagct

SEQ ID NO: 11857 - DNA, 120 bp, synthetic construct
  source 1..120: mol_type = other DNA
gcattgacttttgtgtgtgacattagctgtctgttttggaaaatctaagagcaatatctgattatctatgctttccatccctaaaaccaccaacacatagaggctactgaatctcccgaa

SEQ ID NO: 11858 - DNA, 120 bp, synthetic construct
  source 1..120: mol_type = other DNA
ctgagaatgatggtttccagtttcatccacgtccctaagttcccaagggatgctgatgcctctggtttggagtctgcactttgagaactctcgctctaggcaaagctggcaaatttgtct

SEQ ID NO: 11859 - DNA, 120 bp, synthetic construct
  source 1..120: mol_type = other DNA
tgcctcttccaacagttacattttgctcttctttccctcaagagtagaagagggtggagaagaggaaatgattataattcattcctttcccctccctgccaatttctcacaataccctta

SEQ ID NO: 11860 - DNA, 120 bp, synthetic construct
  source 1..120: mol_type = other DNA
tttttatctctctgctctttagttagctggcctcatgattcccatttttattttgtttaccttttctgttaaagaaatttttgcccaggctaccctttaggcagggaggagaacttcccc

SEQ ID NO: 11861 - DNA, 120 bp, synthetic construct
  source 1..120: mol_type = other DNA
aacaaaacccagctctttagccaaaaatggtttctgaggttcggttttcataaattcagaaagggggcttttttcccctccatctggccataggatattgttggcctctcttttatttat

SEQ ID NO: 11862 - DNA, 120 bp, synthetic construct
  source 1..120: mol_type = other DNA
aaaagtcaaagaaccagggattcccaaggacacacttggcctggtcaatattactaggattggcccagatgccaccaaatccttttttcttcctacttattgaaaaccctgttaaatttg

SEQ ID NO: 11863 - DNA, 120 bp, synthetic construct
  source 1..120: mol_type = other DNA
caagttactcaacctctctgatcctgctgcttaatctgtacaatgggatgtgtggtagtattggccttgtagggttatttggagcattacttgagtcaataccagtgaaggcacatcttt

SEQ ID NO: 11864 - DNA, 120 bp, synthetic construct
  source 1..120: mol_type = other DNA
cagctctgatttcaaaatagacgcgtgaaggtatccgtgcctctgggtgagaacaaacttgtaggccttagttcttttgtaggtgtgaaatgttctcctcaaaaactgcaacgttcactt

SEQ ID NO: 11865 - DNA, 120 bp, synthetic construct
  source 1..120: mol_type = other DNA
ctatatttatttattatgagaaatgggctcacatgattatggaggatctgccatctgcaagctggagacccaggaaggctggtgatatatataataattcagttggagtctgaagagaag

SEQ ID NO: 11866 - DNA, 120 bp, synthetic construct
  source 1..120: mol_type = other DNA
ctctttgattgtctgcctcaattgggtatttctggattcctgaaatgaggcttcatgccctggactgagatactggccatcattaggaggagttagagtccatgattgattgacttttct

SEQ ID NO: 11867 - DNA, 120 bp, synthetic construct
  source 1..120: mol_type = other DNA
tctgtgcttggtactggggaaacacaagtacaatttttcatggttactaccttcaagggtaggctcagtagctattcagaaatagtctatagtcaagtgcacagagacaacggtagaatg

SEQ ID NO: 11868 - DNA, 120 bp, synthetic construct
  source 1..120: mol_type = other DNA
tacgatggccagtttgtttggaggatcacatcggatgaatggaaggaagtggtagctggtctcatggccatggcactcttcagcctatcaaatataaatgcagaagtcaggaccacagga

SEQ ID NO: 11869 - DNA, 120 bp, synthetic construct
  source 1..120: mol_type = other DNA
cgtggcctgacacacggtaagtgcctgataaatgtgagcaactcttcctacattattaagcatcccatcaaattgtactttaggaattatagtggctaggaaatgcactttgaattccaa

SEQ ID NO: 11870 - DNA, 120 bp, synthetic construct
  source 1..120: mol_type = other DNA
tggcaacagaaatgataactatccaaggaggtgaggcttatgcagtttgcaaaatgcagacaaatcggcatacaccatgtttttaaagttacatttaggtcaaggagaaaaatgaaaaag

SEQ ID NO: 11871 - DNA, 120 bp, synthetic construct
  source 1..120: mol_type = other DNA
tcagtggtgaagtccctccacatcgaccgcttgctgatttgaagtgaaaagagggttcctcagtaaggacagacttaacagaagtacaatgtttcctttgcaaaagatgagtgttaaaag

SEQ ID NO: 11872 - DNA, 120 bp, synthetic construct
  source 1..120: mol_type = other DNA
gagaaccacatttttcatagtgttccagggtatgcacatatcatatactccacacagaactgcaacaaaaaactcaggaaacaatacttaccctaagatgctttctcatttattctgctt

SEQ ID NO: 11873 - DNA, 120 bp, synthetic construct
  source 1..120: mol_type = other DNA
agggttacggtgagtgtcataattatgaaaaaagctggcatcttgccattggcttatggatcattttgcaatgatttgcccaaagcctgtcagccatcacatgtccaggaattagggaaa

SEQ ID NO: 11874 - DNA, 120 bp, synthetic construct
  source 1..120: mol_type = other DNA
gacaatgactgctattcatgcagcaggtgagtttttaaaagagaaataaaggaatctgcaacctggagattttcaactttgagaccaccagccgttttgaaggctgagactgagcgaaaa

SEQ ID NO: 11875 - DNA, 120 bp, synthetic construct
  source 1..120: mol_type = other DNA
aatgtcactttctgtaatgtacaaaactgagtaagtgttggcaaagacatgtggcaagaagagacctttgttacttaataaatgaaaatatccgtttttaaagtgccactatctctaatg

SEQ ID NO: 11876 - DNA, 120 bp, synthetic construct
  source 1..120: mol_type = other DNA
ctccttctccataatcctccttccttccctctttcttccacaggtgtcagacctccatctgggtctgaaggttgtctatgcctactcctcctttttcccttcatccttcctaggtatttc

SEQ ID NO: 11877 - DNA, 120 bp, synthetic construct
  source 1..120: mol_type = other DNA
acggggtcgcggccgggcagaggtgctcctcacatcccagacggggcggcggggcagaggcgctcctcacatcccagacaatgggcggccgggcagagacgctcctcacttcctagatag

SEQ ID NO: 11878 - DNA, 120 bp, synthetic construct
  source 1..120: mol_type = other DNA
aggtggagaaaagaggttggattccggatatattttgaatatagagataacaggaacagaggttggatatgagtagaaaaggtgttaaagaagactttaaggttcttagcctaagcgatt

SEQ ID NO: 11879 - DNA, 120 bp, synthetic construct
  source 1..120: mol_type = other DNA
tttttctggagatgtacacttagtctagagaatgttgctgagagttctagaagcaattttgacagattgaagagtctgcaggaatgcagatctctcttcagcatgacacttgccaagata

SEQ ID NO: 11880 - DNA, 120 bp, synthetic construct
  source 1..120: mol_type = other DNA
agtactttgggaggctgaggtaggtggatcatgaggtcaggagttcgagaccagcctgaccatcatggcataaccccatctttactaaaaatacaaaaattagccaggcgtggtggtgtg

SEQ ID NO: 11881 - DNA, 120 bp, synthetic construct
  source 1..120: mol_type = other DNA
tctcttaaatggaatgtttagtattcaataaaacatcatgagataaacaaaagagtcaagtgatggggtggggagggggaacaaggcccattgtcaagaaataaaatagtcaacagaaac

SEQ ID NO: 11882 - DNA, 120 bp, synthetic construct
  source 1..120: mol_type = other DNA
aatgctgatggacatttcagcagactggacacttcagaggcagaattggtgaacttgaagagaggtcaataaaaggcatccaaaccaaacacaaagaatggcaaaaaatgacaaaactga

SEQ ID NO: 11883 - DNA, 120 bp, synthetic construct
  source 1..120: mol_type = other DNA
ccagggaatgaccttaggtatgagagatggagatcaggtggagagcgaggtcactgggaaagaacaaatcaagaaagtgacagactactttcttgaatgtgataatctgtgtgatttaga

SEQ ID NO: 11884 - DNA, 120 bp, synthetic construct
  source 1..120: mol_type = other DNA
acactggtaagcctcactggtcccctggcttggcacacattactgagagagtccctcccttagaaagaacaaccactgatttctgggtgttcagttattttttttaatcagtgtatttgt

SEQ ID NO: 11885 - DNA, 120 bp, synthetic construct
  source 1..120: mol_type = other DNA
tcttagtaacagcaaccaaggaaggtgcagcatcactttccagttatcttgtaatagaatatcatgaggcaagtaaaaaaagtccctgtaatagactatcttggggaacagaagtttctc

SEQ ID NO: 11886 - DNA, 120 bp, synthetic construct
  source 1..120: mol_type = other DNA
ctgtgaaaaattcccctacttttttcccgtagttacctgggctatataagaggtatgcatgctatgcaggggcctctgagagctataaatgacatagggtcaaattgaaccattttccca

SEQ ID NO: 11887 - DNA, 120 bp, synthetic construct
  source 1..120: mol_type = other DNA
atgcctttgtgctggtggggctgacctctagttctctagctggaaaataatttataagagagcaagcatgggggcataacagtgcagatgttaaggcttctaatatctactgtgagatat

SEQ ID NO: 11888 - DNA, 120 bp, synthetic construct
  source 1..120: mol_type = other DNA
atcacagactctcaacatgcttaccccttccctaatagatagccactatcccaacttttgtgataatcatttatttgtgttactttttaattttaccacttttgcactggatatatttta

SEQ ID NO: 11889 - DNA, 120 bp, synthetic construct
  source 1..120: mol_type = other DNA
gaaatgcaaactcaatctgcaatgagataccacttcacatccaccagaatgactgtaataaaggcagacaagtgttgtcaaggctacagagaaattgaaactctcatacactgctgggga

SEQ ID NO: 11890 - DNA, 120 bp, synthetic construct
  source 1..120: mol_type = other DNA
tttacacagcgcaaaacactaacagattcaaataatttgacagactctatggtactgaaactatggtggctttgacgaaatggaatcattgtctggcaggcagtgctgtgtgacgtgcta

SEQ ID NO: 11891 - DNA, 120 bp, synthetic construct
  source 1..120: mol_type = other DNA
cagatatgcagagctaggccgagctcagtgtcttctttattagcagctgcagattagggagtgcatctgctgtgttatagtcacttttggaagcataatgcaatggatttatgtattgtc

SEQ ID NO: 11892 - DNA, 120 bp, synthetic construct
  source 1..120: mol_type = other DNA
ggagtataatgcctcccctggttccccaactgggaagatgtccagagaccaaggaatgactcaaacaagtccagcttggcaagcggatgagtttattaagacttacatatggggaccttc

SEQ ID NO: 11893 - DNA, 120 bp, synthetic construct
  source 1..120: mol_type = other DNA
gcaacacttcactgcccattaacagtttattttatttttgcctgcccttgtttcactggaagctaggtatggagagagaatgccagaggtatcattacctctcacttttctctaatacag

SEQ ID NO: 11894 - DNA, 120 bp, synthetic construct
  source 1..120: mol_type = other DNA
aaaactctctgagaattcccattgcatttaggctgaaacccaaactttctgacatgagctgatggtagccacagtgtcagggtcccgcctgtatctctgatctcattccatcctgctttg

SEQ ID NO: 11895 - DNA, 120 bp, synthetic construct
  source 1..120: mol_type = other DNA
ctaaaagagtgccaagacagaaatctgacccttttatatagccaagtagacagaacccattatatacatgttctcaagacagactactccttaagaaagaggactcgacagcactatttg

SEQ ID NO: 11896 - DNA, 120 bp, synthetic construct
  source 1..120: mol_type = other DNA
tatatccattctcctgtctgtggacaactgggttgttcctggtttgtgatatgaggaacatgcttctttgaacattcctattgtatctcctggcgccatatgcaagagtttttctgatgg

SEQ ID NO: 11897 - DNA, 120 bp, synthetic construct
  source 1..120: mol_type = other DNA
gttttaaccccacatttttaatttagtgtttggcttctattggctctaagtcaactatctaatgaacacggcactgctgggaaggggcactgccgaatttagcgtatggtttgtgtcttg

SEQ ID NO: 11898 - DNA, 120 bp, synthetic construct
  source 1..120: mol_type = other DNA
cctgcttataattagtttagtgttgaacatactacttgttaaaatctaaaattgcccttaattttataccagctttaaagtttgggagctgcaaatgccctttgttctggggatggggat

SEQ ID NO: 11899 - DNA, 120 bp, synthetic construct
  source 1..120: mol_type = other DNA
ataacagttagtgatgggatgttggccaatttcaatggtgttttattaaacagacctccactagttaccttgatttggccttggccttttcatggcaccctatctggttttattcaggcc

SEQ ID NO: 11900 - DNA, 120 bp, synthetic construct
  source 1..120: mol_type = other DNA
tgccctgccctttcagatctggataagattgcctttgacctctatttttcagattttgggaaatccagccccctaccccaaattttgtgaattcttcaggttcatacatttttgttttca

SEQ ID NO: 11901 - DNA, 120 bp, synthetic construct
  source 1..120: mol_type = other DNA
agcaacatttactgagaacttatatatgccaggcacagtgccaagtattctctgtgcattgtcacttgcaataaccttatgaagttctctcattattttcctttgttcctttcctttcct

SEQ ID NO: 11902 - DNA, 120 bp, synthetic construct
  source 1..120: mol_type = other DNA
aatattgaaactatggtgccttttccaggtttttaatcatagatttggagaatttgacaatgccgagatgaagctcttgaatgttttagctggaggattctggaaatccttctggagttc

SEQ ID NO: 11903 - DNA, 120 bp, synthetic construct
  source 1..120: mol_type = other DNA
tacttgaaaaggtatacggtatttagccagtgctaacttagccattgtttttgttgttgtgtgtaatgatgcagacgtcatgatgactgctgaaggagcagaggaggacctttacaatca

SEQ ID NO: 11904 - DNA, 120 bp, synthetic construct
  source 1..120: mol_type = other DNA
aagagcctgtggacagcaaaagaaactatcatcagagcaaacaggcaacccgcagaatgggaaaaaatttttgcagttacccatctgacaaaggtgtaaatatccagaatttacaaggga

SEQ ID NO: 11905 - DNA, 120 bp, synthetic construct
  source 1..120: mol_type = other DNA
tgcactgatgcaatacatttggaataatgaatttaatgttgagttgagctggcatggaacagttatagatagtctgggggatgtgtatgtgtagcattttttttttgcagggatagttgt

SEQ ID NO: 11906 - DNA, 120 bp, synthetic construct
  source 1..120: mol_type = other DNA
aggactattggctgaggaaagtcggttgcagcttattttcagtttttggttggtcagtgaaacactccaaacctgcttacctagctttctaaaaacaatgtagattttcaggcaggtgca

SEQ ID NO: 11907 - DNA, 120 bp, synthetic construct
  source 1..120: mol_type = other DNA
cattttggaattttattgagcggaaaggatagatgatttgattggaaactaaagggagatacttccagttttgtattggaagacaagttattaaactttcacgaaataatgttgatgttc

SEQ ID NO: 11908 - DNA, 120 bp, synthetic construct
  source 1..120: mol_type = other DNA
ccatcatgtcaagtgtttctcaaaatgtgttccgtgggaccccacccaggtgctattctccacaaaatctattctcagaaagttctagaatggatagtaagatagctgcactacattgtg

SEQ ID NO: 11909 - DNA, 120 bp, synthetic construct
  source 1..120: mol_type = other DNA
tcaaaaaaccaaaaatagaaccaccatacgggccgggcacagtggctcacgcctgtaatcccagcactttgggaggccgaggcgggtggatcacctgaggtcaggagtttgagaccagcc

SEQ ID NO: 11910 - DNA, 120 bp, synthetic construct
  source 1..120: mol_type = other DNA
ttctcttcccatagaaagttaattaccataaaatagttatagatggagtgagttgggtgtttagagtgagaagactttcagctgtggggatcagggaaggtttgtggtcttatgagctaa

SEQ ID NO: 11911 - DNA, 120 bp, synthetic construct
  source 1..120: mol_type = other DNA
aaaatgctgcatggtagctgctaatagaaagcaagttctttcctccagttctgatgtgatgtgatctggcagagggcagcatgcccataaatcaacacacggtagtgtaagtcatccact

SEQ ID NO: 11912 - DNA, 120 bp, synthetic construct
  source 1..120: mol_type = other DNA
cttttaaggcctatattaatcaccatctccacaaaatcagcttcatttagtggaaacactcccttgaaattattaacgtgcacttgaaaacttaattttgtgccaccttatagtatgtat

SEQ ID NO: 11913 - DNA, 120 bp, synthetic construct
  source 1..120: mol_type = other DNA
attttattactaatgatttatacatgcagaaagataaacagtttccacaaaggcttattcacattcctggattttaaacctatgatgagactgtgtttaattagaggtacggcccacggc

SEQ ID NO: 11914 - DNA, 120 bp, synthetic construct
  source 1..120: mol_type = other DNA
aaagaaggtcacatctgggtagaaatgaacaaaacaataaagcaaaatattgaagccagtaaaacagctaaccaggtttcaaataaaagtctattggttccaaaacccacctgttttcta

SEQ ID NO: 11915 - DNA, 120 bp, synthetic construct
  source 1..120: mol_type = other DNA
gtggaagtgtacttagcctgttaagtagagaaacaatttccataggatagggttttgtgggctggaaagataaactgcaaggctcatcgtctaaatgcctgctgttcatagagttagaac

SEQ ID NO: 11916 - DNA, 120 bp, synthetic construct
  source 1..120: mol_type = other DNA
ttctgaaaaacagagacggaagagggagtggaaatacaccccatgtttgtgttagctcctcagcttctggagtgtgttagttttaccagaaagatttgatcaacaattgagaggtctaga

SEQ ID NO: 11917 - DNA, 120 bp, synthetic construct
  source 1..120: mol_type = other DNA
ctctgtttcaaaaaagcaaaaacaaattcagaaagctcatatgaacctgagggataacatcagaatgctgatttgttaactgatgctcagaaatgctactgtcggccaggctgggctttc

SEQ ID NO: 11918 - DNA, 120 bp, synthetic construct
  source 1..120: mol_type = other DNA
cctcctgcttcagcctcctaagtagctgggactataggcgcatgcaccatacctggctaattaatttttttttttgtagagatggggtctcactatgttgcccaggcttgcatttattca

SEQ ID NO: 11919 - DNA, 120 bp, synthetic construct
  source 1..120: mol_type = other DNA
aaaaaacccacaaaaactttaaagtgaaaaactgtttgaagatgatcttaatgacccactatcagcatggtgagattcctctgtcaggccaccactgggtgtttatctacgtgtgtgttt

SEQ ID NO: 11920 - DNA, 120 bp, synthetic construct
  source 1..120: mol_type = other DNA
ataaaagctgtaaccaaagcttttttatttgattttgaaagccgtgctttgttgaatatttgatgaaaccgactgcagagatctgcagtgatgttcttggtgaatccctgttggcagctt

SEQ ID NO: 11921 - DNA, 120 bp, synthetic construct
  source 1..120: mol_type = other DNA
cctcctttttttttttttttttttttttttaaatttagagatgaggtcttgctgtgtcacccaggctggactgcagtggctgtttacagatatgcttatagcagccttgaactcccaggc

SEQ ID NO: 11922 - DNA, 120 bp, synthetic construct
  source 1..120: mol_type = other DNA
aatttagaatgtttagatttcacttttctctgttcttgctaaatgtgtgtgccggcataaagaacagagctgatggctgtcagttatacgccgctttcagatgtcgaatgctctacattg

SEQ ID NO: 11923 - DNA, 120 bp, synthetic construct
  source 1..120: mol_type = other DNA
cctgccatgattgcctttttgctgggtaaaatacacttttaatttcttgctgggcttttaaaataaatacggctgaaattttacattcacatttctaaatacataacatacatgaaatac

SEQ ID NO: 11924 - DNA, 120 bp, synthetic construct
  source 1..120: mol_type = other DNA
taaagtgcctcatgaggatacaagaaagaaatttggaaacagaagaggttattatcctgcagatatagaagatctttcatgaagacattgaggaggaagatatgacctatactcagctat

SEQ ID NO: 11925 - DNA, 120 bp, synthetic construct
  source 1..120: mol_type = other DNA
accctctcagcccagtgtcttaggtaaccgttctgttgaaattttggctgatcgccacttgtactatcaaaatattaatcacatcttatctagaaacaaacaaaaatctctgagactcct

SEQ ID NO: 11926 - DNA, 120 bp, synthetic construct
  source 1..120: mol_type = other DNA
gctcattatgcttcctaggcttggatccagacagacaaggttttatcattaacctagttttcatcaagggaacagtgtgcaaactgggtaccacctgtgagaagcatcatttaagaggcc

SEQ ID NO: 11927 - DNA, 120 bp, synthetic construct
  source 1..120: mol_type = other DNA
gggcaaattacttaatctctccaaacctttatttcctcctttgtaaactgaggacagtaatagaatagaatccatctcactgggttgtggagagaattacaggactcctacacttgaaaa

SEQ ID NO: 11928 - DNA, 120 bp, synthetic construct
  source 1..120: mol_type = other DNA
gcaacattaaagaaatagtaaataaccagtctgttcttactaatgtcaccctggcttatatcctcttacatgacctggtttcctgctgtgctagagcatcatccttagtcctttcctcct

SEQ ID NO: 11929 - DNA, 120 bp, synthetic construct
  source 1..120: mol_type = other DNA
ggttgctttggaacctactgttatagatgccagtcttctggaagtgtttccagatttttttttcttttttggcctttagaacattaagtattctgtagagttatgcccattatccataaa

SEQ ID NO: 11930 - DNA, 120 bp, synthetic construct
  source 1..120: mol_type = other DNA
tctgcaaaaaaatcattagccaggcacggtggtgtgtacctgtagtcccagttgtttgggaggccaaggcaggaggatcacttgagtccaggagttagaggctacggggagctcggggag

SEQ ID NO: 11931 - DNA, 120 bp, synthetic construct
  source 1..120: mol_type = other DNA
ctcttgctggcaaaaatctttgcatgggtcctccttctggactggctactacacgatcaagtcaactgtctgctttggaatggcaatatgtcatgacatatcaaattttatcttaaaact

SEQ ID NO: 11932 - DNA, 120 bp, synthetic construct
  source 1..120: mol_type = other DNA
atttattctagatgctgtcagtgacatgtgccaaggacatcttacttcctctaatttttggcttgtcttttccattctctttccggagttctttgaaaaggcattcttatagtaggagaa

SEQ ID NO: 11933 - DNA, 120 bp, synthetic construct
  source 1..120: mol_type = other DNA
tcctagctctcttcttctttaggaatgccttgagtagcaaattttatctctgctgtatggctggtaccagagaaacagaaatagaattggagcttctatgttgtttcagtcatcttcaga

SEQ ID NO: 11934 - DNA, 120 bp, synthetic construct
  source 1..120: mol_type = other DNA
ccgggctgagtctgaagaaccttggccatagccggcaacatctattgtctttgcagagctctgtgctgggactaaattctgcctgattgaccaagaaaaagcaaaagagggtcagcatgt

SEQ ID NO: 11935 - DNA, 120 bp, synthetic construct
  source 1..120: mol_type = other DNA
aattataccaattatataataattactaatttcaatcatgtaaatatatatcaatattaataaagtatatatttatactaattaaatatatttgattatataattataacaataaatata

SEQ ID NO: 11936 - DNA, 120 bp, synthetic construct
  source 1..120: mol_type = other DNA
cgagtacgtgttaaattgaattgcagtctggttggaggcagctgtggtgtggctcagcaaatgtggtcttacatttccttttaaactataagacatttgctacatacaaaagaatgtatg

SEQ ID NO: 11937 - DNA, 120 bp, synthetic construct
  source 1..120: mol_type = other DNA
cttcattttatctttcagagtatcccatttatctggtgaaacagccatgaaaacaggtaactctggtttagtatgataagcgcattagttggtttggtgatgagtctctgctctttgcca

SEQ ID NO: 11938 - DNA, 120 bp, synthetic construct
  source 1..120: mol_type = other DNA
gcaaagaaattgcttcatattgcatattaatttcccgagaagtcaatagtgagaactctgaaactccagctgcataagagaaagagattccaaacaccataagatcttgcagttaaactg

SEQ ID NO: 11939 - DNA, 120 bp, synthetic construct
  source 1..120: mol_type = other DNA
gtcagttttgtctttagttgagttgaaggttatcttagttctttgtgaagagggttttttttttttggacagggtcttgctctgttgccaaggctgagtgcagtggcatgatcacagctc

SEQ ID NO: 11940 - DNA, 120 bp, synthetic construct
  source 1..120: mol_type = other DNA
aagcataaaccttttggctcttcctttgctgtttttgtacaccaaggttaaacagcaacatagctcctggacacttctgccacacagtcttcactgagtatagcacctgtttccttaggt

SEQ ID NO: 11941 - DNA, 120 bp, synthetic construct
  source 1..120: mol_type = other DNA
tggtttacatttgtgttttttcaactttgattcccaagattgaaagatttattctggctgaggattctgggcgttccttctaatggatcagcagaagcagaacaagacccacttgcataa

SEQ ID NO: 11942 - DNA, 120 bp, synthetic construct
  source 1..120: mol_type = other DNA
ccacatagagttgtaaatcatgaaactgttctggacagaaagcagatggcagaatcacaatcttctgtgtccagagattatttgagattattttaagaacctaagtacaccttttagagc

SEQ ID NO: 11943 - DNA, 120 bp, synthetic construct
  source 1..120: mol_type = other DNA
tttgcagcacaggcttggggcgtgacctcaggatgtgactgcaccaaaccttactattttatagaaaatggggataataattctgatctaacaatttggatgattaaatgagataataca

SEQ ID NO: 11944 - DNA, 120 bp, synthetic construct
  source 1..120: mol_type = other DNA
ttgagattctgcatcttgtatatgtcttttggatatagatacccatgtcgtggatggaatatgtccccacaaaattcacatggcgaattccaagccctgatgtaatggtatttggaagca

SEQ ID NO: 11945 - DNA, 120 bp, synthetic construct
  source 1..120: mol_type = other DNA
cttggccatttgtatatattctttggagtattgtctatcaagtcctttgcccatttcaaaatcagggttttttggttgttgctgagttgcagaagtttcttattctgggtattaattcct

SEQ ID NO: 11946 - DNA, 120 bp, synthetic construct
  source 1..120: mol_type = other DNA
gggtccaatttcattattttgtttgtggatatccagttttcccagcaccattttgttgaagagactgtcctttccccattttgtagtcttggtacccttgtcaaaagtcattggccatat

SEQ ID NO: 11947 - DNA, 120 bp, synthetic construct
  source 1..120: mol_type = other DNA
agtaggcagaacaggagtttttggaaaatattcagtatgaagatactgagcttagagaagtcaggtgatttgtttgaggcctgatagcccacagggacagagccaagacttcaacccatg

SEQ ID NO: 11948 - DNA, 120 bp, synthetic construct
  source 1..120: mol_type = other DNA
tccaaacctaatgacacagataaagcagatgtgtttttcagtatccttccgaatcccaaatccgtgggcaaggtaacacctgtttggagtttctctaaaaattacctttctctgccttta

SEQ ID NO: 11949 - DNA, 120 bp, synthetic construct
  source 1..120: mol_type = other DNA
gcttggaaataaatgtcttttccctgcattctaaatatttcctttgcataaatgcatttcatttcttcttttcttgaccttgacatagttgctggcagagtacagcaaggaactctatga

SEQ ID NO: 11950 - DNA, 120 bp, synthetic construct
  source 1..120: mol_type = other DNA
tgaggctgccaagaaaagccaggagtttgaagaggttttagctgtaagtttccaaacatcatgctgtcttcaattgaatctttccttggcatctagaaaggtggctgaagaatagtggga

SEQ ID NO: 11951 - DNA, 120 bp, synthetic construct
  source 1..120: mol_type = other DNA
tatgtatgcatatattgaaggagtgtggattagtggttaacaagtatcatatttggcatcaaattggcataggctctagtctggtcattgtatacccttgggttagctatttgtcccctt

SEQ ID NO: 11952 - DNA, 120 bp, synthetic construct
  source 1..120: mol_type = other DNA
attccgggcactttgcattttgacacaaacttaagaatcagcttgtcaaagtctgtaagatacacagtcagtattttaattggaatggcattgaatttatgtatcaatttgggagcagtt

SEQ ID NO: 11953 - DNA, 120 bp, synthetic construct
  source 1..120: mol_type = other DNA
actgcagtggagggaataggaagcaaaatgaatagaggtagtgaacagctacagtgtacttaaaattacatttttaatagcagctgttggtagagtcttagcagtcctgctccatagctg

SEQ ID NO: 11954 - DNA, 120 bp, synthetic construct
  source 1..120: mol_type = other DNA
tggaagtattttcctttgaattccttatcgtatgctagtttgtacctctttagcatttaggagaaatgctaaaggagaaaatctttgtttcctcaaatagtttttcactctgagaaatgt

SEQ ID NO: 11955 - DNA, 120 bp, synthetic construct
  source 1..120: mol_type = other DNA
agaaagatgggggccaggagactcagcaagtcttgtctttcagcctttttctgcctgcttttattctggctgtgctggcagcttattagctggtgcccacccggattgaggatgggtcgg

SEQ ID NO: 11956 - DNA, 120 bp, synthetic construct
  source 1..120: mol_type = other DNA
aactgcagattctggggggattacttttgccattctcgggcatatttttaataatggtgagcaaattgatactttgggttgatacccctctttcttctctggccaaataagagacagaaa

SEQ ID NO: 11957 - DNA, 120 bp, synthetic construct
  source 1..120: mol_type = other DNA
ggtcttgttttactggaagaacttgatctcgacggctatctgcttttgtttttccctaatagttctggacagatatgttgatttgtaacatcagatgagatgcacacgtgtgagtccaga

SEQ ID NO: 11958 - DNA, 120 bp, synthetic construct
  source 1..120: mol_type = other DNA
atatatttttgtgtctgatgatagtctcccatttctttgtcattcatttcttattgcagtctctttttctacctctttttgagtctgagcacttgaacattgggaatagatttgatggtc

SEQ ID NO: 11959 - DNA, 120 bp, synthetic construct
  source 1..120: mol_type = other DNA
tcaccaccaccacacacaccccacccacccaccaacactaaagatcattcttgagtctgatttgaaaactagggtcacatgttatcaggttgttttgtgtattaaatgggtgttaataca

SEQ ID NO: 11960 - DNA, 120 bp, synthetic construct
  source 1..120: mol_type = other DNA
tggcccatgtctttgttatatcagtagttatccctctacttttgattcccatatcctctgtccctttattgttgagtagtgttctatttttgaatatactagaatttattttcctattgc

SEQ ID NO: 11961 - DNA, 120 bp, synthetic construct
  source 1..120: mol_type = other DNA
caaggcactgcataagtaacgttagcctctatttgcacagcaaaatcaaggacatggttttctagaacacaggctgcaccctctcccccaagcctagcaaatgggctacgctggttggtg

SEQ ID NO: 11962 - DNA, 120 bp, synthetic construct
  source 1..120: mol_type = other DNA
ccgggaagaatatgacttcaagaggcagaagccggctcactgggaggccaagttccagcctttctggacagtgctttggctcctagggctccagccacagtctgcagggcctggaagtac

SEQ ID NO: 11963 - DNA, 120 bp, synthetic construct
  source 1..120: mol_type = other DNA
gtttgtttattcagaaaatcctcattcgggcattcaccaatctactattggacactatcccggccattgcatttttatggaagaagcctaacattgaaaagactactgataatgagttcc

SEQ ID NO: 11964 - DNA, 120 bp, synthetic construct
  source 1..120: mol_type = other DNA
ttaatcttttcttgtttttcaccttaggtggggtctttgaaactagctggagagtattaggtgctgaaaagagtataaggattcagatttgttccaggtgaggcccacacagctttcacc

SEQ ID NO: 11965 - DNA, 120 bp, synthetic construct
  source 1..120: mol_type = other DNA
tgatatacacgtacattgtgaaatgacgaccaaaaccaagctaatgaacgtatttatgacctcacagagttaccttttttctgtgtgtgtgatggaaacacgtcagttctactctcttag

SEQ ID NO: 11966 - DNA, 120 bp, synthetic construct
  source 1..120: mol_type = other DNA
aggcggatcacttgagttcaggagttggagaccaggctgggcaatatagccagaccctgtctctacaaaaaattttttaaaaattagccaggtgtggtgatgcatgcctatagtttcagc

SEQ ID NO: 11967 - DNA, 120 bp, synthetic construct
  source 1..120: mol_type = other DNA
ccattatatgctggtcctataacccaaggcccatagactccctggtctttgttttttctcatagtttgcatcactgggtgccgtgtgttggtcttgtgacaatctctgcaaagaagctct

SEQ ID NO: 11968 - DNA, 120 bp, synthetic construct
  source 1..120: mol_type = other DNA
aaagtgctttcaatgtgtattgaataattgtggtgtgtaaggatcgttcctagtgagccactccccttaatgtcactccagacagcatgatttatttactcctgaggatggttgataagt

SEQ ID NO: 11969 - DNA, 120 bp, synthetic construct
  source 1..120: mol_type = other DNA
tttcactattgtaaataataatacatagaatatccttatacatgtgtctttgagaacttgttgaattctttttttaacaaaaattcctactgggcttggtggctccagctactttggagg

SEQ ID NO: 11970 - DNA, 120 bp, synthetic construct
  source 1..120: mol_type = other DNA
agtagctgggattaccagcatgcaccaccacacccagctaatttttgaattttttgtataaatgcgatctccctctgttgcttagatttgtctcaaactcctgagctcaagtgatcgtcc

SEQ ID NO: 11971 - DNA, 120 bp, synthetic construct
  source 1..120: mol_type = other DNA
gtgctgggattacaggcatgagccattgtgtctggccctaatcaacttattatcttattgaatgtagctgcatttttcattagtatattgtcttagtccatttgtgtttctataaaggac

SEQ ID NO: 11972 - DNA, 120 bp, synthetic construct
  source 1..120: mol_type = other DNA
gggtaaagcaaccttgaaatttgtttttttcccagaatcatttgaaaaacattccaggaggaaaatatgtagcattggcaggatctgagtgagatacagtagtcccgtcctttattctca

SEQ ID NO: 11973 - DNA, 120 bp, synthetic construct
  source 1..120: mol_type = other DNA
acccttgaatattgagtttgaaaacaaaattatctatgattttttaaaaaatcactaggctatcatgaattttattaaatcttagaaaagtgaggattccaagccttaagttgaatgttc

SEQ ID NO: 11974 - DNA, 120 bp, synthetic construct
  source 1..120: mol_type = other DNA
aatttctgtggctggacattacagtatttagtcccgaataagaagcagggttcttacaaattggaagggctcctacaaaattggttaattgggattagactatttgtatccttgcccaag

SEQ ID NO: 11975 - DNA, 120 bp, synthetic construct
  source 1..120: mol_type = other DNA
tgtacttaggatttgtgatttgcagacgcaagctttgctgtatttgttttgctcgaagggcttactgctgtggtattcagaatgtgaaataatagttaatggagacaaggggattaatag

SEQ ID NO: 11976 - DNA, 120 bp, synthetic construct
  source 1..120: mol_type = other DNA
agaccttagcctggatattgggtggtacatcagttgggatgcttttggctgtaagtaagagatgcttatttccatttccaaatgcctcatcccaaaagcaatttatcatcataagtccag

SEQ ID NO: 11977 - DNA, 120 bp, synthetic construct
  source 1..120: mol_type = other DNA
atgagatagctactgaaatccagcatcagaacaagagattaccataaatttgaagaagtgtgaaaccaggtaccacagcctggcccctgcttaggcttagttacttaaagctgtgcaatt

SEQ ID NO: 11978 - DNA, 120 bp, synthetic construct
  source 1..120: mol_type = other DNA
agtactggttgggagaaaacccctcagaattagaaaatattcttgctgtttcgaaggagtccagtatgtcaaagtctacctgcctctttcattaataaatactgggaagctgaggtgggc

SEQ ID NO: 11979 - DNA, 120 bp, synthetic construct
  source 1..120: mol_type = other DNA
gagtgcttgtattctatttagtaagaagggacatggttttacctctttatcaagggctcactgaggtagtatattctgggtggtggtcaacacagatttcttttccatgtcagagggtca

SEQ ID NO: 11980 - DNA, 120 bp, synthetic construct
  source 1..120: mol_type = other DNA
aaggaagcttggggccagtggacttgttggtgcatattaaatgggttagagagacacgttcttaatgttatggctcttcaaacatactccaaacctctcctatttgaccagccagaatct

SEQ ID NO: 11981 - DNA, 120 bp, synthetic construct
  source 1..120: mol_type = other DNA
atgacaaaattttctttcttcttctttttttaaggttatgtaatagagggagagaactcactagtcctgggccataaaaactctgggcaaaggatgtgtgacttctcttctgtcaactag

SEQ ID NO: 11982 - DNA, 120 bp, synthetic construct
  source 1..120: mol_type = other DNA
tcaactctattagtaatggtaatagctattagtaatagctaacatttatttagcttataatgtccaggtactgttctagagtctttacatatgttaataattatgacttacaggctgggc

SEQ ID NO: 11983 - DNA, 120 bp, synthetic construct
  source 1..120: mol_type = other DNA
aaataaaagaggaaggcagatataagattaaaatatcaaatttattaccgacagagagcttgttcttgggaactgtccccaagaggaagaaagttgaggatgcccacctgtattcgtccg

SEQ ID NO: 11984 - DNA, 120 bp, synthetic construct
  source 1..120: mol_type = other DNA
agtgcttttctcccccttaacttgtcagtggcgtggcgtacatgtttttgttactgacagtgtggccaattattgtgttctagaaggcattgttgtctctgagaatgttacatgatatga

SEQ ID NO: 11985 - DNA, 120 bp, synthetic construct
  source 1..120: mol_type = other DNA
tttcacaatgtgtacatagatggaagtatcatgttgcacagtttttatttgtgaagtatgtctttgtcgtgaaagcagccgtagtctatgctacagggatgggcgtggctgtgttttgat

SEQ ID NO: 11986 - DNA, 120 bp, synthetic construct
  source 1..120: mol_type = other DNA
tagaagcttggtggtgtttttggatcagaaatgtgctgtaagaacttaactcttgtttttgcctttttttttttatttttgatttccataggtttttggggaacatgtggtatttggtta

SEQ ID NO: 11987 - DNA, 120 bp, synthetic construct
  source 1..120: mol_type = other DNA
tgcttgtttgtgtgtagcttgacctagaagctttgggtgatgtgaaaaaaaataggaagaaaaatagtgacagctaacattgtgcacctatgatgcaccaagaactgtgggaagtatccc

SEQ ID NO: 11988 - DNA, 120 bp, synthetic construct
  source 1..120: mol_type = other DNA
atcaaaacacaacagaataaaaaccagagggctttaaactgaagtatatcgtgcccttactgtaagctcaaggacactgcatctccatgggttctaaacataagatctcccaccaaccct

SEQ ID NO: 11989 - DNA, 120 bp, synthetic construct
  source 1..120: mol_type = other DNA
aggtcaggagttcaagaccagcctggccaacatggcaaaaacccgtctaaaaacccctctactaaaagtacaaaaactagacaggcgtggtggcacatgcctgtaatcccagctactcag

SEQ ID NO: 11990 - DNA, 120 bp, synthetic construct
  source 1..120: mol_type = other DNA
tccacattgcttcttcaaaggaggcagcatggatatctcttctttgccatgaatgaaggtggtgatagacaaaccaccacttagcatctctgagacttctgtggacaattgctgtaatgt

SEQ ID NO: 11991 - DNA, 120 bp, synthetic construct
  source 1..120: mol_type = other DNA
gttaatgatttgtgtggtatcagagcagagggaaaatcaagtttgagtttttcctcactcaagaggacagaaagattttgaatgctggaatgataggaaattatgcttgaatgtgtttca

SEQ ID NO: 11992 - DNA, 120 bp, synthetic construct
  source 1..120: mol_type = other DNA
gtgaattctgatgaatgtttactccatttttgtgcatgttacatggctagaacttagcatatgcatgtcagtcaagagtaatggctattagttttgctattcccagcttggtagtcttat

SEQ ID NO: 11993 - DNA, 120 bp, synthetic construct
  source 1..120: mol_type = other DNA
caagagtttatatctaaagtatctgttcggtgggagttggcgtgtcattgaatctcaggtgttaaaatacgtttttatatactccatgttggaatgatacaaagtttgttaactgaggga

SEQ ID NO: 11994 - DNA, 120 bp, synthetic construct
  source 1..120: mol_type = other DNA
caattgcaattgcaatactgattgacacccccagcagatgtgaggaaaacaaagttaagctgacttatataacccaagtaacaagtggtcaaaggcagtgatagatgccttctcttcatc

SEQ ID NO: 11995 - DNA, 120 bp, synthetic construct
  source 1..120: mol_type = other DNA
ttggtagagaaagtctaaagctcttttcaatattaaaaataaataacaaaaaacatggaagtgagcaggcagcaaactgctgcagtttgctttgggcagtcagcaagagaaaaagaactt

SEQ ID NO: 11996 - DNA, 120 bp, synthetic construct
  source 1..120: mol_type = other DNA
cacaattggccagcatacacattaaaacagaaatctgaagactgacaaaacacactgtagcaataagataccaaattcagacctgactctagtatagcatcacatgacagataacaggcc

SEQ ID NO: 11997 - DNA, 120 bp, synthetic construct
  source 1..120: mol_type = other DNA
catgttctcaggacctcctggggctgtgtcatgggccttggttactcatatttggctcagagtaaacctctttaaatattttacagagcttgactctgctaacataataaagcactgata

SEQ ID NO: 11998 - DNA, 120 bp, synthetic construct
  source 1..120: mol_type = other DNA
ctattattattccttttgaaaatgcttctgaacttatgcaggtggagtgcccaggcttttgaagcagggttgtttgtctggggtaatacccgaggcttgttgcctcacaccaaggcaatc

SEQ ID NO: 11999 - DNA, 120 bp, synthetic construct
  source 1..120: mol_type = other DNA
gtttaccatatatagtctgttgttttcctggtgttttaattccctagagcaaaaaagtatttgaattccaggtattttcagaagttttggcattctgcagatgtgaggttgccgtcgtct

SEQ ID NO: 12000 - DNA, 120 bp, synthetic construct
  source 1..120: mol_type = other DNA
ggtcatactgtaccaggctacggggttatactgattgtacatcagcatatctatggtgtcatccatgtatgaagcatccttaggttaaacatgttgaaacatgataaaacgtgtcttaga

SEQ ID NO: 12001 - DNA, 120 bp, synthetic construct
  source 1..120: mol_type = other DNA
accatcttgattctggctggtttcatctggctttggctggcttccttaccacatcctattgtattagcagggtcttgtgacctgtgtcttgggaaactagtcctacctcaataaatagtt

SEQ ID NO: 12002 - DNA, 120 bp, synthetic construct
  source 1..120: mol_type = other DNA
ttttaggcttacagctctgtgaattggaatttgaaagttgtcaatgctgtgttgatttactcgagttactgatgataggagccttttggtgtattggagctcttttggatgtacgtgcag

SEQ ID NO: 12003 - DNA, 120 bp, synthetic construct
  source 1..120: mol_type = other DNA
agtcacacattatgccagctgtgagataggcagagagagctcctccttcctcagtttcattactggtatttattctccttgcaccatcctgggtcatgtccctaggaagatgggaggtat

SEQ ID NO: 12004 - DNA, 120 bp, synthetic construct
  source 1..120: mol_type = other DNA
atcagacaccacctcctcaagctgaaatataaaatccagctcatccatcccagccggccttttcctctcggaatcccgtctctatcactagagagggagctcttttcctttctctttctt

SEQ ID NO: 12005 - DNA, 120 bp, synthetic construct
  source 1..120: mol_type = other DNA
taagtttatgtttgtcagggcccaggaagagtaagaatacagggtgagaacgcgtagggaaatgctcatttccattaaagcatataaatagagggaggttagagctgtcaaaaacaaatc

SEQ ID NO: 12006 - DNA, 120 bp, synthetic construct
  source 1..120: mol_type = other DNA
ccgtgcctggactgttttctttcttttctcggttgttttgtcctgtctctgccaacagcattattgaattagctgggggttgccagtgcttcctttccctttcccatttcttttcatggg

SEQ ID NO: 12007 - DNA, 120 bp, synthetic construct
  source 1..120: mol_type = other DNA
acctattcattgtggaaagattcctgtcagggctaatctttaataagagaggcagttacagtaactatagggcgaagaagggaacagtaaaagttgagcccactcagatgtcatggacct

SEQ ID NO: 12008 - DNA, 120 bp, synthetic construct
  source 1..120: mol_type = other DNA
tgactaagtcatgttttgctaaaagtatcttcaacatgaactctggggttattttcttgttttttatttcccctcatcagtcatcacccagagattcccaggctggaaattccttctttc

SEQ ID NO: 12009 - DNA, 120 bp, synthetic construct
  source 1..120: mol_type = other DNA
atctcaccaaaattggtttctgatgctgctgaaactgcatatgaccttgttcatgacctctggtgctactccaagtagcttggatatggatattagtattagtaactatattatggtact

SEQ ID NO: 12010 - DNA, 120 bp, synthetic construct
  source 1..120: mol_type = other DNA
gatagtctctcatttaaagggatatcgtccaatgtttaagtcttgtcctcgtgtctaatctcaagtgtgtcctggcagtcctccctttactaaggcagttccctgtctcgtattcctcaa

SEQ ID NO: 12011 - DNA, 120 bp, synthetic construct
  source 1..120: mol_type = other DNA
gttgccaaatgtaatggcaattctaaactgccttctcactcaacttccaggtagcattctacctggttgactattttttctctttgtaatctgtttagatcggttggcccctgactttct

SEQ ID NO: 12012 - DNA, 120 bp, synthetic construct
  source 1..120: mol_type = other DNA
ccatttgttcttcctggagccgactgagacatttcctactgcagagcttttgtgttggctgctctttcctgcctggaatattccacaggctcactcccagctttatgcagttcttggatt

SEQ ID NO: 12013 - DNA, 120 bp, synthetic construct
  source 1..120: mol_type = other DNA
aaattattattatattattatttctgtctaatagatgagatcactgaggatgaagtgacaggtgagttacctggggtcatgccactagaccccaccactcatgctggaaaaaggacttca

SEQ ID NO: 12014 - DNA, 120 bp, synthetic construct
  source 1..120: mol_type = other DNA
cagagctatgaaacccttctataaacatgaaattggggagatacatgtcaaaacatatcccagaaacaagattaaaattacttctgtgaataatgctataccatgccccatgtttttgct

SEQ ID NO: 12015 - DNA, 120 bp, synthetic construct
  source 1..120: mol_type = other DNA
acatttaatgtttcatagacacataatatctcacagtttgtagaacagacaatgctctctggtgtaattaccaggctgatcctaaggggccagcctgtctggcacttgctttcatctctg

SEQ ID NO: 12016 - DNA, 120 bp, synthetic construct
  source 1..120: mol_type = other DNA
tagacaatagatgggatctatcacgatactgaaatggattttccatgtgatcatatgggcacattgatcctgactatatcagttcttctgtgattggcactcgattgattgcaggattgt

SEQ ID NO: 12017 - DNA, 120 bp, synthetic construct
  source 1..120: mol_type = other DNA
tctctgctgctcctcttaattattccgtttcctggattttagggtaacatggaaacttgtgaaagcggtaattgaagaggaagacactctgctggcttctgagccaataactttgtttta

SEQ ID NO: 12018 - DNA, 120 bp, synthetic construct
  source 1..120: mol_type = other DNA
ataatggtgggaaggaaggtagggtgagaaggagaggagagggctaataaggtaagaccttaaaaatgggacagagcaggttttgcaaagatctggaggaagaacaagcaaagaccttga

SEQ ID NO: 12019 - DNA, 120 bp, synthetic construct
  source 1..120: mol_type = other DNA
aagactttctttgaagatggctcaagtttttatttttgctgcttcttagttggcaggaactaaaagtccaggtcactaaagattgctgatggcttgtgaggacagccctgagtgagactg

SEQ ID NO: 12020 - DNA, 120 bp, synthetic construct
  source 1..120: mol_type = other DNA
aaaagagagactaccgtcaccttgtataaaaccacacacacagcataaatagttaagcctactaatgaaatatcctgtcatttcctctacttaatagaaggctacagataggcttataca

SEQ ID NO: 12021 - DNA, 120 bp, synthetic construct
  source 1..120: mol_type = other DNA
gtgattcaaatgtaggagcatgacaatttgtccagggatagcaaagatgcttattccactgggacagttatattgtgggatgagtgaaggcaggtcacaagtgttttacaaaggaataaa

SEQ ID NO: 12022 - DNA, 120 bp, synthetic construct
  source 1..120: mol_type = other DNA
gagatcaacttgtaagcacttatcaccatgcctgcaacataactggaacttgataaatgcaacgcatatctagaatttgatcatttctctctacttccactgctaccattctgttttgag

SEQ ID NO: 12023 - DNA, 120 bp, synthetic construct
  source 1..120: mol_type = other DNA
tgactatttgaaaggaactgttgatgttgtttgagaattgttctccattctgtactgttccagcagacttggcaacagtgattgtagaaatcatgtcttatttactcatcacaaaattgt

SEQ ID NO: 12024 - DNA, 120 bp, synthetic construct
  source 1..120: mol_type = other DNA
tctgtcagcatggcagcatgtatttatgaataatcttaaggtggattgtgataagcaatcacttattgagttcataacatttgcaggcacagtgttagacaatagagatgtactggtgag

SEQ ID NO: 12025 - DNA, 120 bp, synthetic construct
  source 1..120: mol_type = other DNA
actgtcgccacccctgctatccctaagctttgggctttctctgtctcctgctttctacatctcctgattctttgaaggttttctattttctttctcttgttctgggattagccggtgtac

SEQ ID NO: 12026 - DNA, 120 bp, synthetic construct
  source 1..120: mol_type = other DNA
aggatgcctgggttgagatttgaaagatgggtaagtattaactagagaagagagaaaggggtttaatagtgcatgcgaaagtcctgtaggagaaaaggcatgaaggaaggttggttggag

SEQ ID NO: 12027 - DNA, 120 bp, synthetic construct
  source 1..120: mol_type = other DNA
taaagggtgagtatttaagggtgctttcagtgcttctgggccaaggtgaaaaaaatgatggtcatcatgtgcatttcagcactcagaaacactattggcacaggcaaccaaaatgcaaaa

SEQ ID NO: 12028 - DNA, 120 bp, synthetic construct
  source 1..120: mol_type = other DNA
taaaatagaagcagctcctgggcaaactggcaaaagctttgatgagtatgtcagattaggttgtatcattcaaagttgaaccacgattgaaagctgtagctatagcctctctccttggtg

SEQ ID NO: 12029 - DNA, 120 bp, synthetic construct
  source 1..120: mol_type = other DNA
gagaagaaaagaaactcgtatatttcttaggatccatatattttctgggtccctttctgggccctagatcctcatctaacaagctctcaagtgtggctcatattgagagcttcttagaaa

SEQ ID NO: 12030 - DNA, 120 bp, synthetic construct
  source 1..120: mol_type = other DNA
agcaaacaaatgaatgttcactggaaatcagtgagcacctggagggtcagttaggaggtggttgttaaaaatattgggctttgcctgtggctggtgctataagctacgctattaaatatt

SEQ ID NO: 12031 - DNA, 120 bp, synthetic construct
  source 1..120: mol_type = other DNA
acaacttgccgtctgcttttgagtctttattcccatcacctctgccctgccatactaccttggtgaagggcttctagaatatacttgtgtgtcctttttctctctaattagaatggttga

SEQ ID NO: 12032 - DNA, 120 bp, synthetic construct
  source 1..120: mol_type = other DNA
ttgaatggccgtagctcccctcttttcccctactcagttgcctttttgcaaataaaaagtacgtgagggattgattccgtaggggtttcttttggttgtttttttgacagtagtttttac

SEQ ID NO: 12033 - DNA, 120 bp, synthetic construct
  source 1..120: mol_type = other DNA
tactctttgaaatgagcccagcaatatcttaagctacagaattttaaaatcaaaggcagaactaactttttgagacaatcgctccgaggatatttattcttttaggctgatctttgccta

SEQ ID NO: 12034 - DNA, 120 bp, synthetic construct
  source 1..120: mol_type = other DNA
gaaagagaactaagaggaagcaaaggaaccatggcatagtgaggtgagacgtttctggagtaaccttggccctatggacttttatagctaactatgtaaaactcccttacaggtcaaagt

SEQ ID NO: 12035 - DNA, 120 bp, synthetic construct
  source 1..120: mol_type = other DNA
ctttatttctattattattacattgtaatatataataaattctagaactcaccataatgtacaatcagtgggagccctgagcttgttttcctgctactagatggctatatctgggggtga

SEQ ID NO: 12036 - DNA, 120 bp, synthetic construct
  source 1..120: mol_type = other DNA
ataccacatatatgacagtggtcccataagatcataatggagctgaaaaattcctattgcctagtgatgtctggatgatttcaatcttgtgtaggcctacaatgatgtgaatttgagtct

SEQ ID NO: 12037 - DNA, 120 bp, synthetic construct
  source 1..120: mol_type = other DNA
gactaaaaaactttgagacaaagaaggattttttttttatcatgccaaagggtacatttctcaatgaagacaaagtagtttcatggccccaataacagatacaacttttacaaagtagaa

SEQ ID NO: 12038 - DNA, 120 bp, synthetic construct
  source 1..120: mol_type = other DNA
gccaccacgcctggcctcagtgcatatattattaaaaatgaaaatttaaatcaatgaattaaacaaccagatgaaaactgggagaagaacaacaaagcaaaataaagcaacaaaatggta

SEQ ID NO: 12039 - DNA, 120 bp, synthetic construct
  source 1..120: mol_type = other DNA
gcatgtgcacacacacgcttcagttcaaaatcagcactttctttaaggtagtacactagcagttaaagtcaggtgtaagttaaggatgtccagcatgccctctgcaatacatgcctgtgt

SEQ ID NO: 12040 - DNA, 120 bp, synthetic construct
  source 1..120: mol_type = other DNA
cctcagccttccaggtatctacgactacaggcacacactactatgcccagctaatttttgtattttttttttttttttttttttttttgtagagatagggtttcactgtgttgcccaggc

SEQ ID NO: 12041 - DNA, 120 bp, synthetic construct
  source 1..120: mol_type = other DNA
tcagactagtttgagtttcctcttcaaggactgaggatgtttaaacaatgatcataagaaaagcgggctaaataaaactgcctttacacttttctgaaggattgctatagtatttggctt

SEQ ID NO: 12042 - DNA, 120 bp, synthetic construct
  source 1..120: mol_type = other DNA
gtattcatcatcgtggactctggatagaggcagtaagaggatctttgagatctgttgcatccaatatttcaattattctgtatttctgagactgatacacattcacagtatgtatgaaac

SEQ ID NO: 12043 - DNA, 120 bp, synthetic construct
  source 1..120: mol_type = other DNA
atccgcctgcctcagcctcccaaagtgctgggatttcaggcatgagccaccacgcctggcctctttttagtatttttaacatgcatttatgctggtatccagttaaggtagagtggtgac

SEQ ID NO: 12044 - DNA, 120 bp, synthetic construct
  source 1..120: mol_type = other DNA
gacccattctgttctggaagccttagttctcacaaatacaatgctgagggcttattgcaaacaggaacagcactggtggaagtacagaatagggattgtggttttgatgatggtgtatcc

SEQ ID NO: 12045 - DNA, 120 bp, synthetic construct
  source 1..120: mol_type = other DNA
aactcccaagtgttctgctgaggggtaaagtcaggtttcaaatgccatgtaaccagcacaactttatttgaaagatgaagggagcttctgaaagctttctaacagtggattgcattattt

SEQ ID NO: 12046 - DNA, 120 bp, synthetic construct
  source 1..120: mol_type = other DNA
tccattttggcagtttatcagttcatttgactttttatatcctactgtactctccaaagaatacacagccactgtcttcctgtttcaaggaatttaatgttttcaaggttgctggagtaa

SEQ ID NO: 12047 - DNA, 120 bp, synthetic construct
  source 1..120: mol_type = other DNA
gtgtgtatatatatattccaccatatatatacacacacacccacacacagacccacacacacatacacaccacagtatgtagtatatatgtatagtgtgtgtatatatatatatattcca

SEQ ID NO: 12048 - DNA, 120 bp, synthetic construct
  source 1..120: mol_type = other DNA
tcctggttttggtattagggtgatactggcttcatagaatgaattagggagggttccttctttctctatcttgtagaatagtatcaaaaatatgggtaccaattcttctttgaatgtctg

SEQ ID NO: 12049 - DNA, 120 bp, synthetic construct
  source 1..120: mol_type = other DNA
ccatgcgcttttaatagaatgcagttgttggatgaaatgctccgtatatatctgttaagtccatttcttccaatgtgtagtttaaatccattctttactttttgtctcctttaactgttg

SEQ ID NO: 12050 - DNA, 120 bp, synthetic construct
  source 1..120: mol_type = other DNA
ctcttcctcaggaacactgattattcttaggtttggttgtttaacataatcccagacttcttggaggctttgttcatattttcttactcttttttctttgtctttgttggactggcttaa

SEQ ID NO: 12051 - DNA, 120 bp, synthetic construct
  source 1..120: mol_type = other DNA
aggtttggttttctggttccgtctcatttgggtaggctctgtcagagggagggtctagggctgaaggctgttgttcagattcttttgtcccacgaggtgttcccttgatgtagtactttc

SEQ ID NO: 12052 - DNA, 120 bp, synthetic construct
  source 1..120: mol_type = other DNA
cccacgcaaacagaagggccagtcgtactcccactgtgccccccaacaacagccctgagtctgtttccaggcggagggtgtgatgggtttgaacacttaccccagggtacctgccttcca

SEQ ID NO: 12053 - DNA, 120 bp, synthetic construct
  source 1..120: mol_type = other DNA
ggagggccgccctttcctacttccatggttggggcactcacagttttaggggggtctcccgggtcctgcaggagcagtccgcttccttcagaggctctgtggatcctctcgggattgctg

SEQ ID NO: 12054 - DNA, 120 bp, synthetic construct
  source 1..120: mol_type = other DNA
agggaaagctagagtgactaaaagcagatgagtggttggcaagggctggaggaagtaggtgggaatttactgcagagacttgcaaatgtttttattccataaaatagatggaagtgtcct

SEQ ID NO: 12055 - DNA, 120 bp, synthetic construct
  source 1..120: mol_type = other DNA
ggcctaggccaactcttgcacttgggctcatgaaaacatgcacatacgtattcatgtcaatgttattttttgtaatggcaaaaacaagcagaagatcactatacatctatcagaagagtg

SEQ ID NO: 12056 - DNA, 120 bp, synthetic construct
  source 1..120: mol_type = other DNA
acaaaacagcctaccaaccaacaagagatccctaaatgttcggcagtagagaaattgataaagtatagtggattcaagcaatgttatactgtatatacagtgaaactgtaaacacacata

SEQ ID NO: 12057 - DNA, 120 bp, synthetic construct
  source 1..120: mol_type = other DNA
tcaacacaataattctgataccagatatgtgggggcttatctccacacaccaagcaattctccagcaatactaagtgttctgtaatttaactcaattttgacatcatcatctacctggag

SEQ ID NO: 12058 - DNA, 120 bp, synthetic construct
  source 1..120: mol_type = other DNA
ttcccctggcaaccagccaacatcctgaggctatccaagagcctaccaagagtcacctctttcgaacaaaaaaggatatttttacctaggaaattttaagggattttaggagctctgtgt

SEQ ID NO: 12059 - DNA, 120 bp, synthetic construct
  source 1..120: mol_type = other DNA
aaattagccgggcgtggcagtgtgtgcctgtagtcctagtgattcaggaggcttatatgagaggatcacttaagcctaggaatttgagaatttgaacctgtaatgagttatgatggctcc

SEQ ID NO: 12060 - DNA, 120 bp, synthetic construct
  source 1..120: mol_type = other DNA
ttaaaataagtaaggtgatgggtctgttggattggattggtttattgtagaaggcctctttgctggatagccagaaggaaccagtcattggatgcttagagagagaagcattgaatctat

SEQ ID NO: 12061 - DNA, 120 bp, synthetic construct
  source 1..120: mol_type = other DNA
acatagatgtgagagtcattgggttatattatggtatttaaaaccacaggttggtgtgagaatcacctgcaggaatatgtagtcacagaagacaaaggggctcaggtcaagcacttctgg

SEQ ID NO: 12062 - DNA, 120 bp, synthetic construct
  source 1..120: mol_type = other DNA
cctgagcctcccaagtagctgggactacaagcacgtgctaccatatctggctaattttttgtattttttttttttttgtagaggtgtggttttgccatgttgcctaggctggtcctgaac

SEQ ID NO: 12063 - DNA, 120 bp, synthetic construct
  source 1..120: mol_type = other DNA
gaagctgggagtttgagaccaatctgggcaagatggcaagaccccgtttctacaaaaaattagaaaattagccgagtatggtggtgcacacctgtagttccacatacttgggagtctgaa

SEQ ID NO: 12064 - DNA, 120 bp, synthetic construct
  source 1..120: mol_type = other DNA
gtaaagataattttgatgtgctggacttctgggccagaagaggtttcctgagacacccaagatgcttttcccacatccattagttcaaagttacaaaatagtaggggctggatctaagta

SEQ ID NO: 12065 - DNA, 120 bp, synthetic construct
  source 1..120: mol_type = other DNA
tgcagatagtgatgatgatagtagggcattaactggtgcttcaaagcataccggtgacctttccacattttttataaaataaatacgtccgagtttgctaggggattccaatcttcactc

SEQ ID NO: 12066 - DNA, 120 bp, synthetic construct
  source 1..120: mol_type = other DNA
cataaagagtattaccagtcactgtaggaaagtgtttgtccttacaattgcaaaccttccaagcactgtagttgataagagttcaaacagtcacgtaaccccttttctaaatacagagct

SEQ ID NO: 12067 - DNA, 120 bp, synthetic construct
  source 1..120: mol_type = other DNA
aggcttaggaaataacaggaacattgttaggctaagagaatagaatctaaatttatcagacagacatggaagccagaataccttcagctaaaatcccagctctatcatttatgtatttgt

SEQ ID NO: 12068 - DNA, 120 bp, synthetic construct
  source 1..120: mol_type = other DNA
gccactgcgcccagctggttatcctttaaaatttaatattttaaaatagttatgtttatactacctgaaaaccttgtgaattcattatattaaatatacatatgtacctttttctcactt

SEQ ID NO: 12069 - DNA, 120 bp, synthetic construct
  source 1..120: mol_type = other DNA
tatatgagctgtcacttgggccgtctgtttcaaaggctacttattgatgttgttatgcgtcctcaagctattatgccatcttccatttctgggtgtggggagcatggaatcaagttttca

SEQ ID NO: 12070 - DNA, 120 bp, synthetic construct
  source 1..120: mol_type = other DNA
aattggaaatagcagcagactgcagaagaaattgagctatagtcatgcagcggatgactctgagcaataaaaatgaatgggccacaggagtccacatccacatggattaatctcaaaaat

SEQ ID NO: 12071 - DNA, 120 bp, synthetic construct
  source 1..120: mol_type = other DNA
ggattaataccatttaataattttctatctgtttaccatcctaaaaattaatccaaagaagtcttgtgttcagccacaaaatgtaaattttactgtggcctaaaggtaatctatgtgcct

SEQ ID NO: 12072 - DNA, 120 bp, synthetic construct
  source 1..120: mol_type = other DNA
cttgtattttcttttctacgtaaaagctctaggatgataatgtcattaccactttttacatgcacctggtgtatcagagactctgctaaggcattgcacatacgttttttcacttgctct

SEQ ID NO: 12073 - DNA, 120 bp, synthetic construct
  source 1..120: mol_type = other DNA
agggctaggaaaatgaggccggaacttgctgcgctgcattctcataaagtcaggcattcctaccctctagatgtttattatggttaagggaaaaaattaataatgtttaaacagacccag

SEQ ID NO: 12074 - DNA, 120 bp, synthetic construct
  source 1..120: mol_type = other DNA
aaggcgtgaaagaacaaagcttctacaccgtggaaagggacctgagcaggttgcctctgctggcttgggcagcctgcttttattcccttatctggccccacccacatcctgctgattggt

SEQ ID NO: 12075 - DNA, 120 bp, synthetic construct
  source 1..120: mol_type = other DNA
accttgagctagacacagggtgctgattggtgtgtatgcaatcctccagctagacataaaagttctccaattccccactagactcaggagcccagctggcttcacctactggatcccaca

SEQ ID NO: 12076 - DNA, 120 bp, synthetic construct
  source 1..120: mol_type = other DNA
ctgtaacaatatcattattgtgctatttaggagaatggatgactactgtaggtattatactaatggtatctactgcttttgtagattcaaagcaattcagtgggttgtgggaatataatg

SEQ ID NO: 12077 - DNA, 120 bp, synthetic construct
  source 1..120: mol_type = other DNA
acaagatattttgttagtagaagtttcacagttagggtttccttgatttgagcatatcgtgacaaaatatcaatttagtaggtatctatcctatataaacttcccgatgaagttactaga

SEQ ID NO: 12078 - DNA, 120 bp, synthetic construct
  source 1..120: mol_type = other DNA
agctactttttatgaggctctgaaggaaacatagagacaatagattgtcaggagtgagcaaattctttggtaaaagcaaggatttgggggaggtggttatgaagggtgttcataaagaga

SEQ ID NO: 12079 - DNA, 120 bp, synthetic construct
  source 1..120: mol_type = other DNA
accaagatagactgaacttgaagccagtcctttatattattgactcacaaagttttaatacaagatatttaatataagatatgaagcatattcagttgcatagcattcataactcaagca

SEQ ID NO: 12080 - DNA, 120 bp, synthetic construct
  source 1..120: mol_type = other DNA
gttttaagccactgttcatggtaacttgttacagcaatgttgggaaaataatactaggtatgtaggaaaagaaatttgaagaccattatctctactttagtttctaacttaatgaaaatg

SEQ ID NO: 12081 - DNA, 120 bp, synthetic construct
  source 1..120: mol_type = other DNA
ttgaacatgagctatttaaggtggttagtattacaggtgcatcgtaaattgaagaaggttgagcagttaaatgcttgaagatgagaatgttcttttgaggagagatgaaggctttcctga

SEQ ID NO: 12082 - DNA, 120 bp, synthetic construct
  source 1..120: mol_type = other DNA
tatctgagcttggagctgagggatggtagaaattggacaaaggacaaatgggagaaatgaaaatgtgtttgtgaaaagcagagttatctagtgtagtttaatagtaaccattatgtccaa

SEQ ID NO: 12083 - DNA, 120 bp, synthetic construct
  source 1..120: mol_type = other DNA
acgtcagctgatggcagcaccatctgtgcgttgtttcaggtttaaaactatggatcaatctccagttcctcctttaccctcagtgtccagttagttttcaaatccatttttcccttccct

SEQ ID NO: 12084 - DNA, 120 bp, synthetic construct
  source 1..120: mol_type = other DNA
aggatagctgatttttatgtattgatctatatgttgcatccctgctacactcatttattagggccagtagttttttggtgggttacttggtgtttccaatgtatgcaatcatgacatttg

SEQ ID NO: 12085 - DNA, 120 bp, synthetic construct
  source 1..120: mol_type = other DNA
aattgaaggaagctccttcagaactttcttttgtatttaactgtgctaggaacaaattctcagtctttgtttatctgcaaatgtctattttgccttcatcttttgaaagatgggatatga

SEQ ID NO: 12086 - DNA, 120 bp, synthetic construct
  source 1..120: mol_type = other DNA
cttgaagcctttacctgctaaatgcctttgtcaaggcactcagagagtttctcaagactatgttttccccacagaatgggttacactttcctgggcttttactgtctgtgtcataatttt

SEQ ID NO: 12087 - DNA, 120 bp, synthetic construct
  source 1..120: mol_type = other DNA
tccattagcttcaactataggtttatcatctgtaaagattaataggactctgaagtacctccagatcacctgctgttaagtcagagtcacatctcacaaatacagctctagtttcagttc

SEQ ID NO: 12088 - DNA, 120 bp, synthetic construct
  source 1..120: mol_type = other DNA
gcccaacttcccagaacatgattccgatatacttctgtgactagaatttatgtgttttaaacacaacttaggaaagtgggccaaggatgttggtagaggatcactaggttcgatgtcatt

SEQ ID NO: 12089 - DNA, 120 bp, synthetic construct
  source 1..120: mol_type = other DNA
atctatgtgtttgtgtgaattatttttccttcttcaaggagggcatgagacaaggaactatggctgttgtggcaaaggtcatattccagacaattaagttgacctggttactgtaaaaga

SEQ ID NO: 12090 - DNA, 120 bp, synthetic construct
  source 1..120: mol_type = other DNA
tgtctttgagtggtttgcttgcaaagttccaggtaattgtatgcacatcaacaatggctccctctcaagatatatgtgagctgatgtgatgtaagccaacattagaattagagaggtatg

SEQ ID NO: 12091 - DNA, 120 bp, synthetic construct
  source 1..120: mol_type = other DNA
aagtgacattttgcctggttcatgtctctagttggtaaattaaaacaacaaccaccactttatctttcggaggacatagaatttgatatctccatcatttggggagaagtcgacactcaa

SEQ ID NO: 12092 - DNA, 120 bp, synthetic construct
  source 1..120: mol_type = other DNA
ttgcgtggcagaacacgttgattaatcttcagcaggaatatggtgtatctagattctgtggcagtcatgccaatgaagtagaaatatctttgctggcagacagtgatctccaggatatat

SEQ ID NO: 12093 - DNA, 120 bp, synthetic construct
  source 1..120: mol_type = other DNA
cagtaggtttttaagtgagttaggcagatacaactctggaagccaagtagttgatggatactttggttggaaacctaattgatttttacatagcctctccagagccagcaaagccagatg

SEQ ID NO: 12094 - DNA, 120 bp, synthetic construct
  source 1..120: mol_type = other DNA
tccccatgtttgtaaaatgttttaccttatcttccattcctggcattaggagtcattttggttcggggccatttattgaagctgatctttaatgaatgaatgagaccctttattttccag

SEQ ID NO: 12095 - DNA, 120 bp, synthetic construct
  source 1..120: mol_type = other DNA
gcttaggtggtctgtgtatagaatccatgctcttaactattaggatatgctgattctaaagcaattaataaatgttggtctgaaatcagtctaatggcacgctggaaacagctcttagac

SEQ ID NO: 12096 - DNA, 120 bp, synthetic construct
  source 1..120: mol_type = other DNA
acaaaacatgggaaccagtggggtttgtgtggtctgagtaagctttgtggccttattgtgggcatcatttatccataaaataattttagctttaatttgagaactctagtacttgatttt

SEQ ID NO: 12097 - DNA, 120 bp, synthetic construct
  source 1..120: mol_type = other DNA
tagtgcacccatcacctgaatcgtgaacagccagtcaattcttatcctggttccttcacctcctgagttgtgattttgagaatctgtggtgtattgattgagatagcggtttaagagaaa

SEQ ID NO: 12098 - DNA, 120 bp, synthetic construct
  source 1..120: mol_type = other DNA
taaaatgtattaaacatgaggagtaatgacagtgtttcttgatgactggggaacttgcagtagaaagttgacaaatactgtttctatgaaagaaactggagcctcctaaggtaagctggg

SEQ ID NO: 12099 - DNA, 120 bp, synthetic construct
  source 1..120: mol_type = other DNA
tcctgagtagctgggactacaggctcctgccaccaccacacctggctattttttttttttttttctatttttagtagagacggggtttcaccatgttggccaggatggtcttgacctcct

SEQ ID NO: 12100 - DNA, 120 bp, synthetic construct
  source 1..120: mol_type = other DNA
ctttgatatgcaaatcagcttttataaagaaagatcatttttatttggcattagcatttaaaaaatgcatcttgccatttcatctgtctttatagataacaacttagaactaaattgcca

SEQ ID NO: 12101 - DNA, 120 bp, synthetic construct
  source 1..120: mol_type = other DNA
cggcagcaactgtttaccaagaaggatagatattttccacttaaccattttattcataaggatgtgcaccagctagatatcatgtctgatgatatgtgactcatggatgctgctggcact

SEQ ID NO: 12102 - DNA, 120 bp, synthetic construct
  source 1..120: mol_type = other DNA
ctgtggttctggataacttgtcgcttgcagatctacctctgtattgctcttcttgctcttcagatctattttgcgtatggatgatatagcatagggttaaaaacaggggtttattgtctt

SEQ ID NO: 12103 - DNA, 120 bp, synthetic construct
  source 1..120: mol_type = other DNA
ctgtctttcgggtgaattatttctggggggattgtaggaccctgtccttttcaactttagcttatggccacttgactgggtccctttattattagaatattgtagattgaactagagaaa

SEQ ID NO: 12104 - DNA, 120 bp, synthetic construct
  source 1..120: mol_type = other DNA
aaaatattacaatgacttaattattaacagaggtatagatcagactcagacatgtccagcttttatgaaaaatggagctgtagaatgtggagtagtaaaaaacttgtgttggctgggcac

SEQ ID NO: 12105 - DNA, 120 bp, synthetic construct
  source 1..120: mol_type = other DNA
ggattttgcagtgagcccagatcgtgccactgcactccagcctgggcaacagagcgagtatccatctcaaaaaaaaaaaaaaaaaaatgcagtgggaagcaactggctaaatttactggt

SEQ ID NO: 12106 - DNA, 120 bp, synthetic construct
  source 1..120: mol_type = other DNA
ggatgtggatggttccggtgtgccattatgtgggctaccctatcatggatgtgctgagctcgagtaagatgttattgacaagatcaaatggaagtcagaacaatctagttgaaaaatgac

SEQ ID NO: 12107 - DNA, 120 bp, synthetic construct
  source 1..120: mol_type = other DNA
aaatttctcaaatggcagggctaatgactcactggaaaaaaatgaggtttaacacttgatgttcatccattttcaaatatgctctgtatgagtctccattaagtctctgtataagtcttc

SEQ ID NO: 12108 - DNA, 120 bp, synthetic construct
  source 1..120: mol_type = other DNA
gagctgactttctttatttctaaaagcaaggcactttccccaggaattccctggcagaatttccctcatacccattgtcacacacccatagctaatttatttactcgcaagagaaaatgg

SEQ ID NO: 12109 - DNA, 120 bp, synthetic construct
  source 1..120: mol_type = other DNA
actcagaagccaaggatattccatatttctaagtatttgaatgacgtggtttccagactctgtcatcaaactcaataaagacgtcaatttaagcaggatgtaatttaatcacagtggcgt

SEQ ID NO: 12110 - DNA, 120 bp, synthetic construct
  source 1..120: mol_type = other DNA
gaaaaggaatgtttttgaaaggaaaagtcagaaaataaccttttgggttcggtaatcctccatcctcatttgcctgacacagtccaggttaatacctgtggtcacagcataatcactatt

SEQ ID NO: 12111 - DNA, 120 bp, synthetic construct
  source 1..120: mol_type = other DNA
agaccagcaggatctacataacttgaggattacagagaccagatggaacattctgagagtgagcatgaggtcagtactcgtagtacaaactgattactttcatgtggcttctgagatcag

SEQ ID NO: 12112 - DNA, 120 bp, synthetic construct
  source 1..120: mol_type = other DNA
aggcctcttccagaataggacataaatggagcgtgtgcattgtagtgtataaacactcaataagtgattttttttttcagatgaagaaatagaaacaatgtaccaaggtcagcgattaaa

SEQ ID NO: 12113 - DNA, 120 bp, synthetic construct
  source 1..120: mol_type = other DNA
tcgcttctctgcaaatgtccaaggagttgtcttccttaaacactttcatgaagctcccagccagaagtaatatttctactcgtagagttccttatcactgggtgttcacattttcttatt

SEQ ID NO: 12114 - DNA, 120 bp, synthetic construct
  source 1..120: mol_type = other DNA
tatgtacatatcctgaggatttgaacaaattcagaaaacactgaaacagtattacatgagctggaatttatttaagagtagtaatcaacttgatttttttctattaattttagctaagca

SEQ ID NO: 12115 - DNA, 120 bp, synthetic construct
  source 1..120: mol_type = other DNA
tcacttgagcccaggagttcgagaccagcctgggcaacatggcgagactctgtctctacaaaaaaataaaataattagccaggtgtggtgcaacgtgcctgtagtcccagctacctggaa

SEQ ID NO: 12116 - DNA, 120 bp, synthetic construct
  source 1..120: mol_type = other DNA
tgaagctgagagtttgagagcagcctgggcaacaaagagagacccctgtctctacaaaaaatttaaaaaactagctggacgtggtggtgcgcacctgtagtcccagctactcaggaggct

SEQ ID NO: 12117 - DNA, 120 bp, synthetic construct
  source 1..120: mol_type = other DNA
agctcagaagcttagcagaaagcagatcaaaagctcagcagtatagtaagatgtgactatcgattctatgaaacaatactaataatgtctcatgaggcctaatcttgtgctggggggcca

SEQ ID NO: 12118 - DNA, 120 bp, synthetic construct
  source 1..120: mol_type = other DNA
aacattaagaataaagggaaaaaatcataaaagatgcattaactgtagtaataaaatctaacatgcgagtaactggattcccaaactgtgatggatttggagctacaatagtgagattca

SEQ ID NO: 12119 - DNA, 120 bp, synthetic construct
  source 1..120: mol_type = other DNA
tttaagactgtcttacagaaagagtaaaagctataggatggtaaagttgtatgtgtggtaaagttgaatctaaagaaagctggtataactatgttaatatctgagaaaagggctgggcgc

SEQ ID NO: 12120 - DNA, 120 bp, synthetic construct
  source 1..120: mol_type = other DNA
acatggatacagttaaaactgtggatacagttaaaactgattagaggaagttattcggccctaaatacataagaagaactgaataatcagttatctaaatatctcaagaagacaaaaaga

SEQ ID NO: 12121 - DNA, 120 bp, synthetic construct
  source 1..120: mol_type = other DNA
aaattatctatcaaatgcaaaactggtgaaatattgaattctttcaaggcagtgttgaataaagttggggaaagtggatacttttggaattaaaaatgagcttggcaaagtcacagctca

SEQ ID NO: 12122 - DNA, 120 bp, synthetic construct
  source 1..120: mol_type = other DNA
atggctcaaagcctgccacatggtaactgctttaacttaacagaattatccatcttaaacagtaaaataaagttaatcaatttgaaagaagcaagcaaactttttttaaaaaagtttatg

SEQ ID NO: 12123 - DNA, 120 bp, synthetic construct
  source 1..120: mol_type = other DNA
atgttagtcagtcttttaaccctgtggaccatttgtcttgtcttgtgtgtctagctgataattcactcccagcaatgctgttgctaagcttttctttgggtatttggatattctgtttgt

SEQ ID NO: 12124 - DNA, 120 bp, synthetic construct
  source 1..120: mol_type = other DNA
tgtatgttgctttttatgcatattgcttcccaaaagcttgcttgccagagcattggagattcctagctaatagcccaagatttctgcctaagtagcattagcttcttacctaattaatga

SEQ ID NO: 12125 - DNA, 120 bp, synthetic construct
  source 1..120: mol_type = other DNA
gcttcgttgtaatgaacacatgttttacaggtctctaatgagaaccttatgtttctggttttgcttcatctgaaatggggcatattaaagtactttccatccctagaaccacatagtttt

SEQ ID NO: 12126 - DNA, 120 bp, synthetic construct
  source 1..120: mol_type = other DNA
taccttccaatacttaacacaccaggattctgaatggaaattaaagtctcctcaagactgatattcctactccactttctcccaagagtgcaaaacagtgaggcttttcattattgaaat

SEQ ID NO: 12127 - DNA, 120 bp, synthetic construct
  source 1..120: mol_type = other DNA
agctaaaaaccttgaggcttagtttgccaagtgactggctttataatcttatgtagcctctttattggccgtaatctctttgtctgtaggactagaatctgctttactccttttttctta

SEQ ID NO: 12128 - DNA, 120 bp, synthetic construct
  source 1..120: mol_type = other DNA
tttctttgctgcctggcctctaataatacactgggggtgggcagtcagctaagggcagccagtggatttgcagccaccctctttgacatccctgcttaggtggcataacaatatgttttg

SEQ ID NO: 12129 - DNA, 120 bp, synthetic construct
  source 1..120: mol_type = other DNA
tctaacctataccattggtttccaatgtggaggcctaggaatcaggtcatgagtggggtgaagaaagcaaaaggatgaaatagactgtgagattgttgtctatgaagcattgtctataga

SEQ ID NO: 12130 - DNA, 120 bp, synthetic construct
  source 1..120: mol_type = other DNA
atgatttctgtacctgtaatcaatatgtctgtcttttcagagcatcttggacatttttagcaggggaatcctggaaagtgaagcatttccataggatttatatagatattttttaagaca

SEQ ID NO: 12131 - DNA, 120 bp, synthetic construct
  source 1..120: mol_type = other DNA
gtacagagtagggtattttgcctccttaatggaaacttcacgctagaatgacttctgaggctattctgaaattgttgcatttgataatcctttttaatggcaagcctccaaatgtatggt

SEQ ID NO: 12132 - DNA, 120 bp, synthetic construct
  source 1..120: mol_type = other DNA
cttttcccttaaacgatccctttgaatgtctcctgatgctataattttggtaatatctagcacttaaaccaatttgaacaagaaatggtttgtacagaaagttattgtcaataatgccac

SEQ ID NO: 12133 - DNA, 120 bp, synthetic construct
  source 1..120: mol_type = other DNA
acttagacatcaacctgacaacaaattcagccctaagtttggaaatatatcattgttttctttttcatactctttcatctgtgtaactctcctaggaataagtagtcaaagaaactttag

SEQ ID NO: 12134 - DNA, 120 bp, synthetic construct
  source 1..120: mol_type = other DNA
ataacggagtctttataaataagagatatttttaaggaagtctttgagatcgtgtctatttaatgtttcctctcttttccttatgcccctacagaaattcatgatgaaggtaagacatct

SEQ ID NO: 12135 - DNA, 120 bp, synthetic construct
  source 1..120: mol_type = other DNA
accaggacgtggaacatcttccagaatttcaaataactctagctcttatttttcagtagaaaatattatgatcacattttgaagagaggacgttaatccctaaattagacgtatcatgaa

SEQ ID NO: 12136 - DNA, 120 bp, synthetic construct
  source 1..120: mol_type = other DNA
tgctttgggtttcatacggaaaaggcattaacttcttagaaccagatggatgctttcttgttgtgggagcctatttctgctggttggtgctaaacagtgatgcattaggactgtcctaag

SEQ ID NO: 12137 - DNA, 120 bp, synthetic construct
  source 1..120: mol_type = other DNA
cccgggttcaagccattcttctgtctcagcctcctgaaagtagctgggattacaggcgcccgccaccatgcccagctaatttttgtatttttgtattttagtttcacagtgttggccagg

SEQ ID NO: 12138 - DNA, 120 bp, synthetic construct
  source 1..120: mol_type = other DNA
caccttgtgattatataccatgacccctttatacatactccttactcagcctgaagtgagcttccccatatccagtttttcatttgacagttgtttactgagtacttaccatggcctgac

SEQ ID NO: 12139 - DNA, 120 bp, synthetic construct
  source 1..120: mol_type = other DNA
aagcactcttctatttcatggaaagggattgattggactcttccctataagcaattgggaggaatgagaagtttttaagcctggaggcattatgatcaattttgtgttctaggaatactc

SEQ ID NO: 12140 - DNA, 120 bp, synthetic construct
  source 1..120: mol_type = other DNA
atttcatctccctgtggtcatgctgatccatttgggggtacatggtctgcaaatgctggtagcatcatttctgcaatggtattaatgagcttggatgtttgtgttctttcatatctttgt

SEQ ID NO: 12141 - DNA, 120 bp, synthetic construct
  source 1..120: mol_type = other DNA
atcataaagattttcattctcattgtcttcgtgtcaaataggctaaggaggaggaagaggaggaactggttttgctgtctcaggaatggtagagggggaagaacatcttagtaagtgggc

SEQ ID NO: 12142 - DNA, 120 bp, synthetic construct
  source 1..120: mol_type = other DNA
tgggattacaggcatgagccaccatgcccggcatgattttcttttccttttcttgtaacataagcattttccatgttgtttatattgtcaacataattttagtggcaacatgatagttca

SEQ ID NO: 12143 - DNA, 120 bp, synthetic construct
  source 1..120: mol_type = other DNA
ccacattctacagcaatcaaaacacatgaactgcatgagctaataaatgtgagggtttcttttaagacaactactctctatacataatagttgggttaagagcctcaacttggttgttag

SEQ ID NO: 12144 - DNA, 120 bp, synthetic construct
  source 1..120: mol_type = other DNA
tttgcattatttttccagtgattctaaagggggcttgctggcagtgcacttgcttcgtgatggtagtgtacttcgagttcctaccacattcgtctttgtatctctgttcttacaacacat

SEQ ID NO: 12145 - DNA, 120 bp, synthetic construct
  source 1..120: mol_type = other DNA
gaggtaggaggatcacttgagtctaggagttcaaggccagcctgggcaacatggtgaaaccatatctctacaaaaaagaaaataattagccaggcatggtggcatgtgcctgtagtccca

SEQ ID NO: 12146 - DNA, 120 bp, synthetic construct
  source 1..120: mol_type = other DNA
ctgaaaatataacatacttgatgccaacattcaaataaaaagataaaaaatgaaagtctccttaatttctctgcccacagggcattattctacatacctgtccaagcagacatgcatttt

SEQ ID NO: 12147 - DNA, 120 bp, synthetic construct
  source 1..120: mol_type = other DNA
atgaatttgtggtgagggcctataataggctagcaggagctggagaaacctcagtaaacaaaacataccaagtcccactgttagggacttacattctggcattgaggaattaggaaaaaa

SEQ ID NO: 12148 - DNA, 120 bp, synthetic construct
  source 1..120: mol_type = other DNA
ccggatttctgaaagttgtgtgttgggaatcattggcaaagaaaatagattttaattaagaggaactttttcatgtttcacatatccgtatatctgcaggggaggcttgttggtggacca

SEQ ID NO: 12149 - DNA, 120 bp, synthetic construct
  source 1..120: mol_type = other DNA
agcagacaagagacaagagcttgtgcaggggaactcctctttttaaaaccattagatctcatgagacttattcactatcatgagaacatgggaaagacttgacccccattatttaattac

SEQ ID NO: 12150 - DNA, 120 bp, synthetic construct
  source 1..120: mol_type = other DNA
gtagaagaggtaatgatgaagacaaggaaatggtataacagtgtctcgtgtaactgacagaaactattaaattaaatggagtgtctgatgttgcgtagctatagggagacctggagcatt

SEQ ID NO: 12151 - DNA, 120 bp, synthetic construct
  source 1..120: mol_type = other DNA
gctgtatgaggatattgtaagacagtaaatacgcattacagtatagcttagagatgctgaaggacattcctatgggtatagagatggtgaattattattttacattcccaccatggtgga

SEQ ID NO: 12152 - DNA, 120 bp, synthetic construct
  source 1..120: mol_type = other DNA
atacaaaaattaggccaggcgcggtggctcatgcctgtaatcccaacactctggaaggccgaggcgggtggattacctgaggtcaggaattcaggaccagcctggccaacatggtgaagc

SEQ ID NO: 12153 - DNA, 120 bp, synthetic construct
  source 1..120: mol_type = other DNA
ttatatgttgaacattggggctcaattctgaggtataaagggtcttaagctctaaaaatggttgtaaacgcctcacccagataatgtcttttctcatttttgctgttttatgttctgagg

SEQ ID NO: 12154 - DNA, 120 bp, synthetic construct
  source 1..120: mol_type = other DNA
gcctgaggagtaatgtgacttgtttacttgtgtttcctgtccttaaatgacaatttgttcagaatgttgcatcaccagggccgaagtacctgaaagtttaataaaaaatgaataaatgaa

SEQ ID NO: 12155 - DNA, 120 bp, synthetic construct
  source 1..120: mol_type = other DNA
ttaaatacaatatcctctgaagattcatgtgcctattagagcttgaaaatcactagtcctgggatcaaagtgagacccgggtgcccagagattggtgcccaaagcccttgtactgctgct

SEQ ID NO: 12156 - DNA, 120 bp, synthetic construct
  source 1..120: mol_type = other DNA
ccttctcagaacttcttagagggccagggggcccagcccacttctgatagcaaggtttctggtatgttaaaaataaaaatccccaaatggtttacaaaaatttttggtatgttttaaata

SEQ ID NO: 12157 - DNA, 120 bp, synthetic construct
  source 1..120: mol_type = other DNA
tgagctttcacttggacacagatatgagcacgggtattttgaattattttcagagtttggttaaaatcggtgtcattcacatggatttgtatgtgtgtgtgcctgtgcacgtgctttttt

SEQ ID NO: 12158 - DNA, 120 bp, synthetic construct
  source 1..120: mol_type = other DNA
gcattggcaaagcattgcagaaacattgcagggatattggcgatgtttactgagaagactccacgaaaacaggtggttgctctatgtatgtttgaaattctagaggcagccaagttatga

SEQ ID NO: 12159 - DNA, 120 bp, synthetic construct
  source 1..120: mol_type = other DNA
cttgaatgacaggttgaaacagatgttctctatgaacataaccaaatcagcaacgttaagtttgcattcctagaagcacttacatgttacagcttaccagagcctgaagtgatgcctcct

SEQ ID NO: 12160 - DNA, 120 bp, synthetic construct
  source 1..120: mol_type = other DNA
tcaggccagtagcatcatacaagatgggctactgacattcattgattcactgaagtgatccatttgttgccccctcttagctttttctcatgttatatttctattacctaccaacagaag

SEQ ID NO: 12161 - DNA, 120 bp, synthetic construct
  source 1..120: mol_type = other DNA
aaattaagagtcatttaaccagctgcataatctcaggaaaagtccctctgagacctgggtactgggtcttaacctctgttcccaggcagacctagataatggtcaagagtgacataagtc

SEQ ID NO: 12162 - DNA, 120 bp, synthetic construct
  source 1..120: mol_type = other DNA
agtcaaaggattgggttgtggatatgttaaatgctatggtgtgtttatttggagttagagcttataagagaccatgccagagtctttggatcctcagtccctgatttgttaaatggaaga

SEQ ID NO: 12163 - DNA, 120 bp, synthetic construct
  source 1..120: mol_type = other DNA
atggatgtcagattatgactcgagggagaaaatgagtcagcagtaggcagcatggagctgaagggatgttgcttaagaaaaaactatttgtgttggttatactgggattgagcaattatt

SEQ ID NO: 12164 - DNA, 120 bp, synthetic construct
  source 1..120: mol_type = other DNA
gaaaatccacctcaataatgggttttatgattctggatatcagtagagttacctttaccttcctcttcacatttagatatgtatgtgtatgtggttacctattcattctcctaaagaatg

SEQ ID NO: 12165 - DNA, 120 bp, synthetic construct
  source 1..120: mol_type = other DNA
atgcattggggaagattatttggggcctttagtttggaaatctattaaggaaacattgtttgaaaagcattatttatgttaaaaacaggtttgcaatgtcgaaactttttattgattcaa

SEQ ID NO: 12166 - DNA, 120 bp, synthetic construct
  source 1..120: mol_type = other DNA
aatgaattaaatgcctctccatctggcttagaaagagatgcatagtttatatctgtgtacacaactggatgactgatatccttgtgaggatatttgtatgcctttggccaccacctagga

SEQ ID NO: 12167 - DNA, 120 bp, synthetic construct
  source 1..120: mol_type = other DNA
atgctcccaaaggtaccagcagcagaaattctcctatgaaaatgtgtcaactgaaacgcttataatttcactctgaaataaccttttaagactggatctgcttttcaatcacctcaactc

SEQ ID NO: 12168 - DNA, 120 bp, synthetic construct
  source 1..120: mol_type = other DNA
atcaactctaaatgggaattgcaggtgagtaattgtgggtgactgtaactatttttcagacgattcctacatgcattttaaatacgagggtctagtcatacacgaacacaaccaaacttg

SEQ ID NO: 12169 - DNA, 120 bp, synthetic construct
  source 1..120: mol_type = other DNA
ctcttgcactttaatgtaagtttggttaaggatggctgtatagagaatcacccttggttgtgaggtcccccatttatataattttgacagttcctgaaggattgttatctgccagcaatt

SEQ ID NO: 12170 - DNA, 120 bp, synthetic construct
  source 1..120: mol_type = other DNA
aacttgacaccaaaagtatgtctataaaagaaaaaattaggctggacgcagtggctcacacctgtaatcccatcactttgagagactgagacaggtggatcacttgaggtcaggagttca

SEQ ID NO: 12171 - DNA, 120 bp, synthetic construct
  source 1..120: mol_type = other DNA
tcttctgagatctattttaacatgaatgccggccagtcattgtgtctagactccaaaaggaagggagataatgaaatgtgtctaacctcttgtctcatcatggccagaactcagtttttc

SEQ ID NO: 12172 - DNA, 120 bp, synthetic construct
  source 1..120: mol_type = other DNA
cacaaatacttggtgtagagcaactttatttgtaataatcgaaacatggaatcagctgtggtatgtccatagcgtgggatactactcagcagtgaaatggaatggtctattgaaacgcac

SEQ ID NO: 12173 - DNA, 120 bp, synthetic construct
  source 1..120: mol_type = other DNA
agttaacaggctaaaccctttgaagagaaactcagaaagatttcttgtgtcttacaccaggatcttacacaaatgataaaatggtttagaacttacacacacacacacacacacacacaa

SEQ ID NO: 12174 - DNA, 120 bp, synthetic construct
  source 1..120: mol_type = other DNA
gttgcaatgtctgaagggcttagaagtgaagcacaactgttagaagaatcataggatggaaatggatcaaaaattgtacaaatctccctaaagaagaggcgtgtttggtgggacctcaaa

SEQ ID NO: 12175 - DNA, 120 bp, synthetic construct
  source 1..120: mol_type = other DNA
tacacatcagaccagctaaatgaagagatccataggatgaggtctgggagggtcctgaatgcagagcttctcgttccctgtggaattaggatattttaccctcttagcacataaatgtgt

SEQ ID NO: 12176 - DNA, 120 bp, synthetic construct
  source 1..120: mol_type = other DNA
acacctgtcatcccagcactttgggaggataccttgaactcaggagtttgataccagcctggacaacatagtgagatttcatccctacaaaaaaattgaaaagccagatgtggtggtgca

SEQ ID NO: 12177 - DNA, 120 bp, synthetic construct
  source 1..120: mol_type = other DNA
gtctcctgagtagctaggactatatgcgtgtgccaccatgcctggctaatgtttaaattttttgtaaagacagtatcccactatgttgcccagggtggtcttgaatttctgatcttaacc

SEQ ID NO: 12178 - DNA, 120 bp, synthetic construct
  source 1..120: mol_type = other DNA
ggaaatgagaataagaaacctggagtaggacaaatattaagaagaccaaattctgatgtggcctcgagattctcaccccagctatacacatcctgtatataattcctccctttttgtgtg

SEQ ID NO: 12179 - DNA, 120 bp, synthetic construct
  source 1..120: mol_type = other DNA
ataagattgccaagggcagtggggtgatcaactatgtcaaatgcagttctcccctcaaatatatccacaaatggaatgcccttgaaacaaaatgttttcattcttttctttcttatagcc

SEQ ID NO: 12180 - DNA, 120 bp, synthetic construct
  source 1..120: mol_type = other DNA
cctcccctctcccatctctttatacgtagtttccccatactactacctaggctagtttttggtgttcgtgtctttcttaccatgtcaaactgtacattcgtggatacaggaactttggtg

SEQ ID NO: 12181 - DNA, 120 bp, synthetic construct
  source 1..120: mol_type = other DNA
gggaatcctctccagcatttaatgttgcagtattccaggttttggccattgtaacatatgaatagtgatacctcaagttgcaaatgttgacatatgacattgagcatctttttatatgct

SEQ ID NO: 12182 - DNA, 120 bp, synthetic construct
  source 1..120: mol_type = other DNA
gttctctgtgttacatttaggcctatggttcattttgacctaaatttagtggaaggtgtcaggtgtgttctagattagtttttctacacatgtgtataaagttgttccagcactgtttgt

SEQ ID NO: 12183 - DNA, 120 bp, synthetic construct
  source 1..120: mol_type = other DNA
gaacttctgttacagtcttgagtagtagtggtgaagagaacattcttgatttggtcctgatatagaagcaacaagtttcttatgattgagtatggtgttggctgtaggcattttttgtag

SEQ ID NO: 12184 - DNA, 120 bp, synthetic construct
  source 1..120: mol_type = other DNA
gactatgtaagctattcagcattactgcactaaccttgtcagggctttgttatgttgaagaaacaaaagtagattgaaaaatgccccagctgttctttcatgtggcttttttggataagc

SEQ ID NO: 12185 - DNA, 120 bp, synthetic construct
  source 1..120: mol_type = other DNA
agacattatgctaagtgaaataagccaggcacagaaagacaaatactgcatgattttactcatgtgtggaattcaaattcatggaaggagagagtagaatggtggtagctagaggtcacc

SEQ ID NO: 12186 - DNA, 120 bp, synthetic construct
  source 1..120: mol_type = other DNA
ggacaatattataatacttatgagcagcggaattgatggtttactgggaagaatttgtacttagaataaccttaaagggcctcttcaggcagttttatgcgatcagcctgaaatatgagt

SEQ ID NO: 12187 - DNA, 120 bp, synthetic construct
  source 1..120: mol_type = other DNA
gaaacagcccatgaagacttgattagacaaccattgacgctctgcacatgccgtgtaatttacgtagggaactatgtaatagcaaagattccccgcctggcaataaataatcaaaagaag

SEQ ID NO: 12188 - DNA, 120 bp, synthetic construct
  source 1..120: mol_type = other DNA
atgagtaaaagtctttaaaaatctgataacattttctttgtggtcaagtaaaagacccttattaaaggtcaaatgtatttaaaaagctgtgtctttgtgtgagtgtgtctatttatatat

SEQ ID NO: 12189 - DNA, 120 bp, synthetic construct
  source 1..120: mol_type = other DNA
cttgtaatttttaaatgacattctgtcattcttagcaacatggttgagcctagaggacgtatgttaagtgagataagcaatctgggtcttaacaaaccctcaaagggagaggattctacc

SEQ ID NO: 12190 - DNA, 120 bp, synthetic construct
  source 1..120: mol_type = other DNA
gagttgcatgtggaggggtaagtagaggttacaggtaaaacgcggttgtccctatgttgatcattgttgatgtcttctgctaggtgtatgcggatttattttaatattctctttacgtat

SEQ ID NO: 12191 - DNA, 120 bp, synthetic construct
  source 1..120: mol_type = other DNA
aatgaatgagattagagggagaaaatggcaagagagaatatgtttaaatcattgtttattcagggaaaacttaggttgatcactgttactgttattttggttatttttatttccagctat

SEQ ID NO: 12192 - DNA, 120 bp, synthetic construct
  source 1..120: mol_type = other DNA
ttgggttttaaagactttattgatttaggatgataattgatttgtattgggctttaaagacattattgatttaggataacagactctatgggtgggaatgagggctatcttactctagta

SEQ ID NO: 12193 - DNA, 120 bp, synthetic construct
  source 1..120: mol_type = other DNA
atattaaaacttttggtaactaccaaacttaaaagaaaatttttattggaaatgcatatcataatgagatggaaaaagaagagacagacttctaaggcaaacaaaggaaaactcatagct

SEQ ID NO: 12194 - DNA, 120 bp, synthetic construct
  source 1..120: mol_type = other DNA
atcctgcttttgtttgtgatagaactatattgcctaatgccaatgtttatattcaatatttgggatactcggtcttctcttttctccagtgagatcctatactatatatttgttgtagtt

SEQ ID NO: 12195 - DNA, 120 bp, synthetic construct
  source 1..120: mol_type = other DNA
ccaaatatttcattgtttttcaaataatggaaacaaatattaaacataattgtgaccgggcacagggtggctcacgcctgtaatcccatcactttgggaggctgaggcgggcagatcaca

SEQ ID NO: 12196 - DNA, 120 bp, synthetic construct
  source 1..120: mol_type = other DNA
ttttcttcataacatatctggctgtataccttttgtgctttttggccttgaattggaattatctaatatcaaatttgtcatttccttttgaggtttatttgcttgttgaatcttttctac

SEQ ID NO: 12197 - DNA, 120 bp, synthetic construct
  source 1..120: mol_type = other DNA
ggagcacaagttctttgttatctttgcatagaatagggcgctgtgtggatggtacggcatttaagtcagaacaccttgagttacatttaacttcttcttactataagctttgcgactttg

SEQ ID NO: 12198 - DNA, 120 bp, synthetic construct
  source 1..120: mol_type = other DNA
tccatccagctccttcctgttttcttaagcattgacagtatacagtgaccacagatattgggatgtttttgggttacagtgtgaggataaagcacactggaatctgtgtctcaaagatac

SEQ ID NO: 12199 - DNA, 120 bp, synthetic construct
  source 1..120: mol_type = other DNA
ggtgtcctgtcacagcataggattggcagcataaacataaatatttattgaactttgaaggtgtcccacagaacttctatttgcagttgtcactggaggccactgaccactttatttcta

SEQ ID NO: 12200 - DNA, 120 bp, synthetic construct
  source 1..120: mol_type = other DNA
attggtccttgttttcatgttgtgtaggctgaggaggaggaggaggaagaagaggggctggtcttgttgtcttaggggtggcagagatgaaggaaaatgcatgtataagtggacctgcac

SEQ ID NO: 12201 - DNA, 120 bp, synthetic construct
  source 1..120: mol_type = other DNA
cattatggggacatgggcttctttcttaaatctagctagcagaggggtgggaatttgctagtttatctactgatagcacctccgtccagaaagaaaaaagttcaacccactaaagaagaa

SEQ ID NO: 12202 - DNA, 120 bp, synthetic construct
  source 1..120: mol_type = other DNA
aataatttcatatttgggcatgcagcataaattatgctgacattaagaggcacatctaaaacaactttatttggaaagattggaaataaaaagatggctagtggaataccaagaaaatac

SEQ ID NO: 12203 - DNA, 120 bp, synthetic construct
  source 1..120: mol_type = other DNA
ttaatatcagatgaggtggaattcaggcaaactaaagcattgcaggagacaaaaaaggatattgcatggtattgaagagtgcaagatagtattcgtaaaacaataaaaagtgggcaagga

SEQ ID NO: 12204 - DNA, 120 bp, synthetic construct
  source 1..120: mol_type = other DNA
gtagtactagtatttataaaacaaaatctccaggagctacgaggagaaacaaacagaaaatcttagtattaggagatatcaagtcaccttttctcagttcatgatacgcacacacaccac

SEQ ID NO: 12205 - DNA, 120 bp, synthetic construct
  source 1..120: mol_type = other DNA
tgtgtctaactgtgatctctcaaaatcctccctttcctgcagaaagctgaatagagtccatctttctcatttgattctttctctagtaatcctaatcctcctggaggttgatgaatgcct

SEQ ID NO: 12206 - DNA, 120 bp, synthetic construct
  source 1..120: mol_type = other DNA
ttgtatatgattttatggtagttgtggaaggatatacactaatcatttaactcacagtattttagaaagatcaaaatggaagctgtatgagaatatgaagacagagagaaattttttctt

SEQ ID NO: 12207 - DNA, 120 bp, synthetic construct
  source 1..120: mol_type = other DNA
tatatatttaatgcatagtcattacagaaaaatgtaaaggtagtacaaagatggagaaaggagaaaagtaaatccatcactcagaaacaacctcttgtgtgtatttgagttgtaagcaaa

SEQ ID NO: 12208 - DNA, 120 bp, synthetic construct
  source 1..120: mol_type = other DNA
tattcagttgggaatggaaagaaaattcttattatctggtgagtcgaagtggtatagggggatttgattctcctgactcagtcttctctgggaagggaagggatggacattttttatgcc

SEQ ID NO: 12209 - DNA, 120 bp, synthetic construct
  source 1..120: mol_type = other DNA
tactagaaaagtagttaaaatccagctacaaggtacagaaaaaagggctgtggaactaacataatttgatagtttagtttcatttaaaataagttacaaagcacaaataggtatctcagg

SEQ ID NO: 12210 - DNA, 120 bp, synthetic construct
  source 1..120: mol_type = other DNA
ctttcatctgggtttaggagttttggttttgaaattctgaaaagaaaatcaattcttgtgaacccttgcatttacctgagcagtcccttacccctaactgtgtgagacggtattgaaagt

SEQ ID NO: 12211 - DNA, 120 bp, synthetic construct
  source 1..120: mol_type = other DNA
ctcccaggttcaagcaattctcccacctcagcctcccaagtagctgggactataggcatgcaccatcacacccagcaaatttttgtagttttagtagagacggggtttcgccatgttgcc

SEQ ID NO: 12212 - DNA, 120 bp, synthetic construct
  source 1..120: mol_type = other DNA
gcagggtagagtcccatggaaactagctgtagtttatgtgctcagggaaagcctgaaccctttgaaagagctcacctggttaagtatcatccaccttggataatctctcgtttgatttac

SEQ ID NO: 12213 - DNA, 120 bp, synthetic construct
  source 1..120: mol_type = other DNA
atgtgtataaggccacagttcttcagaaataggtatggcttcattatgagtcaggttggtatacccaatgccaaatattacttaatacttttcagaccaatcgtttttacatctgggtct

SEQ ID NO: 12214 - DNA, 120 bp, synthetic construct
  source 1..120: mol_type = other DNA
gctggaggaatcagacatatgattcctgctgtcaaaaaggtgaatgatagtcaagtggaaagaagacaattgaggaacagttttaacaaagtgccaacatttccctgatagtgaaagtac

SEQ ID NO: 12215 - DNA, 120 bp, synthetic construct
  source 1..120: mol_type = other DNA
catagtcagcagaatttggataatttttttacaaagattttgtagataactttgtgtccaggatttagcccatctaattattttgttgcttgtggtccctgaagcatatcctctgatacc

SEQ ID NO: 12216 - DNA, 120 bp, synthetic construct
  source 1..120: mol_type = other DNA
ggtctttcattcagcaagtgttctcacttattttttctaatgtaacttcagcattttttacctcactcaagggtcatagtaattattaaaacagtcatcggccgggagcggtggctcaca

SEQ ID NO: 12217 - DNA, 120 bp, synthetic construct
  source 1..120: mol_type = other DNA
gtgagttcctgaagatcacagctatgcatgggaggaaaaatggaaagagtatgttggaggaggaagtgctgacataaacagagatttgaaaaaaacatttggctggtgtcagaggatgga

SEQ ID NO: 12218 - DNA, 120 bp, synthetic construct
  source 1..120: mol_type = other DNA
tgactcagtatgctatatacaacatgtagacacaggcctatggcttacttaccagtctgtggacgtgaaatccgtgagaatgggatctatacaacgtaaggtaaggtgatagaaaaaaac

SEQ ID NO: 12219 - DNA, 120 bp, synthetic construct
  source 1..120: mol_type = other DNA
agaattatgagccagggtgagctgggttagcattctcaaggtgaacacctaatgttgtcgaaattgtggcagaagaggttgatttggctttaaagcaaatttttcttttgataatgacgt

SEQ ID NO: 12220 - DNA, 120 bp, synthetic construct
  source 1..120: mol_type = other DNA
ccattttagtctgctggtttctttctcaggaacatggctgtctttcctcacagtgttctccctgaccttttctctacacttcgcttctcaagtgtgtcttccaaagtactcatttttttc

SEQ ID NO: 12221 - DNA, 120 bp, synthetic construct
  source 1..120: mol_type = other DNA
ctggaatacccagttttgtttggttggttgatttttggttttgccatggagttgcacacagtattgtattattgtaatttcccattctttgtgtttttactttctgttttatctttagcc

SEQ ID NO: 12222 - DNA, 120 bp, synthetic construct
  source 1..120: mol_type = other DNA
atttgtatagggagctgtgcatatgattttatctgaacgtaacagcttcacagtcccctgtacctgccttttgattctatctgttgttatggctcagctgtttgagtacacatctcccta

SEQ ID NO: 12223 - DNA, 120 bp, synthetic construct
  source 1..120: mol_type = other DNA
gtagctaggattacaggtgctcaccaccatgcctagctaatttttgtatttttagtagagatagggtttcaccatcttggccaggatgaactcgatctcttgacctcatgatccgctctc

SEQ ID NO: 12224 - DNA, 120 bp, synthetic construct
  source 1..120: mol_type = other DNA
tgtgcctgtatgtaaccaaaaaatgtgcacagcatttggccacacatcctaagtgtttagtccatttttctgcctcgtctcaactccaagcctcatcagatgcagtaaagcttaaatcga

SEQ ID NO: 12225 - DNA, 120 bp, synthetic construct
  source 1..120: mol_type = other DNA
cctccctccctccctctttcccctccctccctccctcttttcttttttctttccttttcttttctttctttctgtcttttcttctttcccctcccctttcctccctcccctctccccatt

SEQ ID NO: 12226 - DNA, 120 bp, synthetic construct
  source 1..120: mol_type = other DNA
gtctctttgttctactaattactgagagaaaggtactgaaaagtgtctgactgtaattgtggatatctctgtttctccttgctgcttgtcaccttttcttggtgcattttgaagctccgt

SEQ ID NO: 12227 - DNA, 120 bp, synthetic construct
  source 1..120: mol_type = other DNA
gatagactcttttggcttttgtacaactgaaaatgtgttttttgccttcattttaagtgatatttttgctgtgtacagcattctagattgacaagttttttttttctttgggttgactaa

SEQ ID NO: 12228 - DNA, 120 bp, synthetic construct
  source 1..120: mol_type = other DNA
gtcactttgtcttggccaaatgtaactcacatctagttgacatgtgcaatgcttatttccagatgagattccttgttccccttgggaaatgtagcctagaacgtctttgctaattctgca

SEQ ID NO: 12229 - DNA, 120 bp, synthetic construct
  source 1..120: mol_type = other DNA
gccaggagtttatcaacagagagtaaactatattgtattctacgttctatacaacagaatgctacgcaaccagtaaaataataagacttacaaagtagcaaattgggctgagtgtggtgg

SEQ ID NO: 12230 - DNA, 120 bp, synthetic construct
  source 1..120: mol_type = other DNA
tgtatgtgtgtgtatacttctaatagtaatactcatgagcatttaagtaatatataatgtgtgtgtatacgtggaagtgtttaaacatacatattatatataattatatgttataatgga

SEQ ID NO: 12231 - DNA, 120 bp, synthetic construct
  source 1..120: mol_type = other DNA
aacttgggggtaggtaggtgaattctgttcatatataattggtatagaatttcaggcaaaaactttaaaatagttgtacagttttactgtttctactgtttgataaagctgaaatcaaat

SEQ ID NO: 12232 - DNA, 120 bp, synthetic construct
  source 1..120: mol_type = other DNA
gtttctgaacattcctactattggttttgtagacactgttcctgtagcctatgaggttattctctgggtgagtggccgtggatactgctttttataacataacattgcacagtttctgac

SEQ ID NO: 12233 - DNA, 120 bp, synthetic construct
  source 1..120: mol_type = other DNA
tgaatcttttcattctcctggcaagagacatttactgtctgctcagccctcaccctggtcttttgcaagcactatagttctcttcatgtgggttatatcaattaagaatctcaaagtgtc

SEQ ID NO: 12234 - DNA, 120 bp, synthetic construct
  source 1..120: mol_type = other DNA
actttttgaggacgttcccactgggtattcaaaagagatgacctatctagagacctcaacggcacgaaagcaaaaaagtatcaacataaaccaataataacgtggactagtttcctggga

SEQ ID NO: 12235 - DNA, 120 bp, synthetic construct
  source 1..120: mol_type = other DNA
ttgctgatgttgctgggcgagaagcaggagagtcttggaaatccattctgaattctctgtatgagttgctgggtaagaagcatgattgggttcatagcaacagagttatctatttaaaat

SEQ ID NO: 12236 - DNA, 120 bp, synthetic construct
  source 1..120: mol_type = other DNA
ccctcgcctccaaaatctcagattcatcctgtatgtcacaactgttacatcacttccctgtttagacattgttcacatttctatatcattctagaagataaagttcaccttgttgtcccg

SEQ ID NO: 12237 - DNA, 120 bp, synthetic construct
  source 1..120: mol_type = other DNA
tctcccaactcttaagtataattgaaccttccttctctggtttcttgccactaagtttcacctgtattttatagcacttgtcacatttcttatttagttataagtgtgattgatttctaa

SEQ ID NO: 12238 - DNA, 120 bp, synthetic construct
  source 1..120: mol_type = other DNA
tagaaaaggcccattgcagcaaagttagcacttcagctttatccttctgagctacttatttctcaagccaatcctccctttacctccacagagttatttggggattaaatttgattattt

SEQ ID NO: 12239 - DNA, 120 bp, synthetic construct
  source 1..120: mol_type = other DNA
ttttaccaacattggtcttgactgatcagggatccactgttgaaactgggtcaactccttggactgcctatctgtcatatagggaatgaatgttatagaggatggtggccaagaagctga

SEQ ID NO: 12240 - DNA, 120 bp, synthetic construct
  source 1..120: mol_type = other DNA
taattcttggtccggtctgtcccttcttttcacctctgatgtcgctgattctgtctagttagcgggctacaacttgggagagagatcttgatattatatttttcattattctgaatctat

SEQ ID NO: 12241 - DNA, 120 bp, synthetic construct
  source 1..120: mol_type = other DNA
tactgtttggaatacctcaggatcttagaaacagcgatactcatagttggaaaagcatcactgtggcatgctttcatacatcttttctgacatccacacgattaatctgtgggatgctta

SEQ ID NO: 12242 - DNA, 120 bp, synthetic construct
  source 1..120: mol_type = other DNA
tatttttttcaggcttaggagcatctacttgttaatctcaatattttgaaaaatgtttctagattttagtccaattagcccctcatttttctgtgctgcgtagggcctgttcacttagtg

SEQ ID NO: 12243 - DNA, 120 bp, synthetic construct
  source 1..120: mol_type = other DNA
atgttcctttaaatatttatcacgtaatacatgcagaaaacattttgcacacctgcatgcgtgcttgcagaataacacgtgtgtacatatctgcacatctttgcagcaagacatcaccta

SEQ ID NO: 12244 - DNA, 120 bp, synthetic construct
  source 1..120: mol_type = other DNA
ttttcgtagtatattgagattgtttgatcttttactcattaacagatttcctgatatatttttgtctctttggaggaatgaatctccacttggatgaaatgttgctaatgtattgctaaa

SEQ ID NO: 12245 - DNA, 120 bp, synthetic construct
  source 1..120: mol_type = other DNA
taaagatgtataaaattgttgtgtttataattccttttttgagatagggtctcactccatcacccagggtggagtgtagtggtgatatcatggctcatggtagccttgaccttccaggct

SEQ ID NO: 12246 - DNA, 120 bp, synthetic construct
  source 1..120: mol_type = other DNA
attaaggagagagtttaaatttttatatgctttggttttattttcattcctgcttttcttactaaattctgacacggttctgtcagagaacatggtttataccatgtctgtttgcagtaa

SEQ ID NO: 12247 - DNA, 120 bp, synthetic construct
  source 1..120: mol_type = other DNA
tgtacactgtaactgtagggtctcttccctcctgctcttaacagggaggttaacaggcggtagcctcaaacttcactacttcaaacgcttgcatcagctaccagattttctctgcttttt

SEQ ID NO: 12248 - DNA, 120 bp, synthetic construct
  source 1..120: mol_type = other DNA
ctataggtaagaaaattgggcttgagagagaagaataatttaatctcatggctaattaaaagcaaaggggattagaacccaagtgagggaactcccaggagactgtttttccattaccct

SEQ ID NO: 12249 - DNA, 120 bp, synthetic construct
  source 1..120: mol_type = other DNA
aaaatatttataggcagtcaacccgatacacacatctctaataagatgttagttttatttcagtattgtggagacttatcaatgactgtgaagacttatcagtgattttggacttaccag

SEQ ID NO: 12250 - DNA, 120 bp, synthetic construct
  source 1..120: mol_type = other DNA
agtggaggacaaaaatttgagtcatagtgagttcttgggcactgctagatcgttgggcagcagaagtaagatagaaatggagattgttgtaataaaaacaaaaataattatgagatgagg

SEQ ID NO: 12251 - DNA, 120 bp, synthetic construct
  source 1..120: mol_type = other DNA
acaagatggtggcatagattacaaaaatggataaatgtttagggccaagtgtccagaatcactggaaagctacagaagacatttaaaaaatgctcatgtcttctgctggacccagtggta

SEQ ID NO: 12252 - DNA, 120 bp, synthetic construct
  source 1..120: mol_type = other DNA
agctgcagattcaaactgaagaattcttgagtagaaaagggatcaaaagtagggttaattgtcttcctgggatctagaccattctagtctttactgccttggcaggtccccagtgccttg

SEQ ID NO: 12253 - DNA, 120 bp, synthetic construct
  source 1..120: mol_type = other DNA
aaatacaaaaattagcaaggcatggtggcaggtacctgtaatcccagctactggggaggccgaggcatgagaatcgcttgaacttgggaggcggaggttgcggtgagccgagattgcacg

SEQ ID NO: 12254 - DNA, 120 bp, synthetic construct
  source 1..120: mol_type = other DNA
tatatgcctgggaccacagtgattaagaagtcagagtgaatacctttacagacaaccagaaacatatttaaggcttgtgaagaagattgtgtagattgcctaacctagtgctcttgaacc

SEQ ID NO: 12255 - DNA, 120 bp, synthetic construct
  source 1..120: mol_type = other DNA
aagggactaaggctcagagaaattcaataagtgagctaacacagaaccagctcccggagccaggcagtttggcatcagtatccttgatcttaatcaccccactgtgttctctaaagattc

SEQ ID NO: 12256 - DNA, 120 bp, synthetic construct
  source 1..120: mol_type = other DNA
acagagtatttctgagtttgactttttgtgtagtctgttccctgcacagttttgcagtgatgaaagtggtctctctttggcattcctgccatttcttcccctctcttagtaagtgccagt

SEQ ID NO: 12257 - DNA, 120 bp, synthetic construct
  source 1..120: mol_type = other DNA
ctttagggtggcattccacaaaaatcttagttagccagaggaataaaagaggaagtcttgtctcgtaaaacccaccaaatccattaagggcttacttgagaaaaactgcttattagaaaa

SEQ ID NO: 12258 - DNA, 120 bp, synthetic construct
  source 1..120: mol_type = other DNA
tctatttctatcttctttgctgctatgtttaggagaagcagagctcataggttacaggtatggattttagagttggactggcctaagtccaatcccagctccaccgtttatataatagct

SEQ ID NO: 12259 - DNA, 120 bp, synthetic construct
  source 1..120: mol_type = other DNA
gggggccagcgggatggatagtgatggaatgagtgtgcactgtatgttatttgaatgtgatgaagaaatagaataactctctcatgtaaataggcaagttcaattgttgcagatctgtag

SEQ ID NO: 12260 - DNA, 120 bp, synthetic construct
  source 1..120: mol_type = other DNA
acctaacacagtgaatggtccatttgatgtactcagcgatgcatgaatgaataaatgaaagagacccccagaaaaccagaaccatgattgttaacagcaagataggcatatctggcgggg

SEQ ID NO: 12261 - DNA, 120 bp, synthetic construct
  source 1..120: mol_type = other DNA
gctaatttactccagcaaactcctgactcatattcatcttttcttctaataaaagactcttggtccatcatttttgtttgtctgttttgcaaatgcatccacgatattccctcattctgt

SEQ ID NO: 12262 - DNA, 120 bp, synthetic construct
  source 1..120: mol_type = other DNA
ccaacatggaactagctagaccatgtcttctctacagcaaactgctgcttacttcatttgcatgtttttcttttttcatgatgttggtttcgtaagaagacactcctgttaaccaggggt

SEQ ID NO: 12263 - DNA, 120 bp, synthetic construct
  source 1..120: mol_type = other DNA
caggagggttcccttttctccatacccttgccagcatttgttattgcctgtcttttggatgtaagccattgtaactggagtgcaatgatatctcattatagttttgatttgcatttctct

SEQ ID NO: 12264 - DNA, 120 bp, synthetic construct
  source 1..120: mol_type = other DNA
tcataacaatttctcctctcccaggcaccattattacatccatttcatagaggtggacactggagcacagagatgttaaatagtttgctaaaaacctgcaaggacacaaaactaggcaca

SEQ ID NO: 12265 - DNA, 120 bp, synthetic construct
  source 1..120: mol_type = other DNA
tgattttgactgtgttttatttttgcaaaacagttgtaaccatagatgagaaacagtaccatggggggtggggcatggtggtttctaagtctgtggttttcctgggctttctgcagtgat

SEQ ID NO: 12266 - DNA, 120 bp, synthetic construct
  source 1..120: mol_type = other DNA
ggcagatttattttgtttaaacagaatgtgagaaccaacagtccatttatattcattcacttattcatttggcaaacacgagatgaccttccctgggtcagagtgagctgggtgacaagg

SEQ ID NO: 12267 - DNA, 120 bp, synthetic construct
  source 1..120: mol_type = other DNA
ttaaatggccagtaccctgagaccaaccctagtttattgctgtacaatacttaattctagtataaactctcagtactgtaatttgtgtgttctctgtgtagcaactggtagcttttgttt

SEQ ID NO: 12268 - DNA, 120 bp, synthetic construct
  source 1..120: mol_type = other DNA
tataattctttcattccataatactgttatgatctgccaagcttttaaatttgagaatctaaccataagcttcacgactatagctatttcttggtcttattgaatgtatttagaatttag

SEQ ID NO: 12269 - DNA, 120 bp, synthetic construct
  source 1..120: mol_type = other DNA
tttattggtcttcgtcttaacttcttggtcttttttcttaatggttatattgtattccacgattggcaatctttttctgaaaaaggctagtgtcttagtcaagtaggactgttgtagcaa

SEQ ID NO: 12270 - DNA, 120 bp, synthetic construct
  source 1..120: mol_type = other DNA
cattgccttgggggttaggatttcaacatatcaattttggagagacgaaaacattcagaccatagcagccagatagttactattacaggccgcgtggaccatgaggtctgttagaatcac

SEQ ID NO: 12271 - DNA, 120 bp, synthetic construct
  source 1..120: mol_type = other DNA
atcacttatagtgggagctaaacaaggggtactcatggacataaagatagcaacaatagactagccactactaagtgggaggaagggggatcgaacaagggttgaaaaattacctattgg

SEQ ID NO: 12272 - DNA, 120 bp, synthetic construct
  source 1..120: mol_type = other DNA
agtcctcgttttgtaatggattggggcttggatcaaatatagattgtgacagccatagagaattgcctctgtattctatgatacctttgtaaatgtaaaactttgtatttcttttctaag

SEQ ID NO: 12273 - DNA, 120 bp, synthetic construct
  source 1..120: mol_type = other DNA
acatgttgtactgaatgcacctatgtagaaaaaggaagacactggtcattgtacaccaattaatcatgtgttttttttcctctttctttgttttatctttaggcattctggaagttttac

SEQ ID NO: 12274 - DNA, 120 bp, synthetic construct
  source 1..120: mol_type = other DNA
taccctgtctttacaaaaaaagaaaattagccagatgtggtggcatgcacctacagaggctgaggtaggaggattctttgtgcccaggagttcaagtctgcagtgagctatgatcgcatc

SEQ ID NO: 12275 - DNA, 120 bp, synthetic construct
  source 1..120: mol_type = other DNA
gcccagccccttcaatatcattttgaggtacctgctatgtgcaatcaaaaatagaatgtccaaaatgtaataaattatgcaaataaccaataaaactacatcttcagttagatctgcctt

SEQ ID NO: 12276 - DNA, 120 bp, synthetic construct
  source 1..120: mol_type = other DNA
ttacaatcaacaaaacgctgtgtgtgatagtagtaacattgacatactgtatctagcagctagcctggagaaactgataacttcctcctgttttaaacagaaatgtggggtttgttgtgt

SEQ ID NO: 12277 - DNA, 120 bp, synthetic construct
  source 1..120: mol_type = other DNA
ggatacagctggtttttttctttcgctccttttgaggagctcctttttaaaataaatcaattacatattaaattatgttacctctgctgagctaggaagcaaagtccaagcaccttctat

SEQ ID NO: 12278 - DNA, 120 bp, synthetic construct
  source 1..120: mol_type = other DNA
acttgagctcagaagtttgataccatcctgggcaacatagcaagatctcatctctactaaaaataaaaaagaaaattagttgggcgtggtggcactcgcctttagtgccagttattcagg

SEQ ID NO: 12279 - DNA, 120 bp, synthetic construct
  source 1..120: mol_type = other DNA
atgctgtgtatttaaagagtagatttaaataagagtgtattgcttaggaacaatactgtgtatttaaagagtgcattccgaagcatgaatgaactgcaagaaacttgtgagttttctgct

SEQ ID NO: 12280 - DNA, 120 bp, synthetic construct
  source 1..120: mol_type = other DNA
gagtacataaaaggtatatatatatttatggggttgaagctgtgttttgcatatttcatctaacctctgaggaatgtggttggagtcctcacagtactgtagactgctttgtacaaaggc

SEQ ID NO: 12281 - DNA, 120 bp, synthetic construct
  source 1..120: mol_type = other DNA
atcaaatatcagtgatttccaggatagagcaccttctctgccacttaacattttgtaattggagagtggcagtatttctcggaacaaggattgggctcataagcaaaagtttttagctat

SEQ ID NO: 12282 - DNA, 120 bp, synthetic construct
  source 1..120: mol_type = other DNA
acaaagtctatttttgtctttgctcaagttgaaggttttgtttatgtttatgagcatgtgtgtttgggagaaccttaccttcttttctttcattgtgcagtgagaagcagatgctctcgg

SEQ ID NO: 12283 - DNA, 120 bp, synthetic construct
  source 1..120: mol_type = other DNA
ttattcaaatcttttgactttggctctgaagctgattctctgagataaaaaaatacatgaccttccttaatgttttccccccaataggttgtattgctcgtactgtaagctcaccaaacc

SEQ ID NO: 12284 - DNA, 120 bp, synthetic construct
  source 1..120: mol_type = other DNA
atttttcctcacttttctttgcttttctttatttttttggactggacctgatacacaaattagaaaaagaattatggacaggtgcagtagtttgcacctgtaatcccagcactttgggag

SEQ ID NO: 12285 - DNA, 120 bp, synthetic construct
  source 1..120: mol_type = other DNA
tcgtggcctgggggttggggcccctgcttcagagaatttcattaggaaattggacattgaaaagtgaccaagaaagtgaaaaaagaatctaaaaaaaaaaaaagaaaagaaaagtgactg

SEQ ID NO: 12286 - DNA, 120 bp, synthetic construct
  source 1..120: mol_type = other DNA
tggagggcgacatggagaattcaaatttcttcctccacctgggtatgctccttgttatgaagctgttctgccaaaagaaaagttgaaagtggaacacagccgagagtacaagcaagaaag

SEQ ID NO: 12287 - DNA, 120 bp, synthetic construct
  source 1..120: mol_type = other DNA
ttttaatcacctgggtgcaggcgggctgagtccgaaaagagagtcagcaaagggtggtggattatcattagctcttataggttttgggataggcagtgaagttaagagcaatattttgcg

SEQ ID NO: 12288 - DNA, 120 bp, synthetic construct
  source 1..120: mol_type = other DNA
tgcttccaaagtctgaacttgaattaataccatgcctccaaagcttcagttgcttagcaatcagatttttagctcctcaaatcgtatttcttgttccccctttttatatcatgttgttaa

SEQ ID NO: 12289 - DNA, 120 bp, synthetic construct
  source 1..120: mol_type = other DNA
tatacgctcaaagatccgatggactataatgtgggcactgaattgcctttactctggctaatgaatgctggcccagttggtgtaagagcttggggatgatttctcattttaaattataca

SEQ ID NO: 12290 - DNA, 120 bp, synthetic construct
  source 1..120: mol_type = other DNA
ttagtttttgtgcagttttgccttactacgttattgtagttaatggggctgacaggcattattggcaggttcactgaaggatggtctagctgcctagacaatggaaagttatcagtgtct

SEQ ID NO: 12291 - DNA, 120 bp, synthetic construct
  source 1..120: mol_type = other DNA
atttagaaagtgactgcaagtcactgtaaggcttgctgaagcatgaccagaaaatgggatgcttttattaactaaatgatagttagacatttgttacaccaacaaacacttgggtaccta

SEQ ID NO: 12292 - DNA, 120 bp, synthetic construct
  source 1..120: mol_type = other DNA
cgcccgcctcggcctcccaaagtgctgggattacaggcgtgagccaccgcgcccggccagggttttcaaatattaaaggataatacagtaccgtggggccttcttgcccgcaactgactc

SEQ ID NO: 12293 - DNA, 120 bp, synthetic construct
  source 1..120: mol_type = other DNA
aagatgattttattctgtagggggctaaagagcattgaaaaatgcttagcaggaaggtgacagacttatgtctgctttcaaaagaagctctgctgtgaatgtggaaaagcagagagcctg

SEQ ID NO: 12294 - DNA, 120 bp, synthetic construct
  source 1..120: mol_type = other DNA
tttgtgagatcaggaggtaacatgcagggggtaaaagaaacagctagaaccacctcaaagtgtttatgtcagtcagtcctgtcgttaattgatgtctgtaatcagtttggttctatacag

SEQ ID NO: 12295 - DNA, 120 bp, synthetic construct
  source 1..120: mol_type = other DNA
tgaattccattgctagtgcctggcattggagactattttatgtcaatttcctgtcctgtttcaggttagagatgacaacaagagacaacacccatgcctggtggagttctccaagctgcc

SEQ ID NO: 12296 - DNA, 120 bp, synthetic construct
  source 1..120: mol_type = other DNA
agcctgttttcagagcatacctatgaggactatttatctgagcaccatatctttggttttgttttagttttttaaggagccaaagtcagctgggcatagtgactcgtgcttataatccca

SEQ ID NO: 12297 - DNA, 120 bp, synthetic construct
  source 1..120: mol_type = other DNA
cttaccattgtgttacagttgtctacagtatttggtgaagtaacatgtacaagtttgtagcctagcagcaataggctatatcgtatagcttaggtgtgtagtaggctctacgatctaggt

SEQ ID NO: 12298 - DNA, 120 bp, synthetic construct
  source 1..120: mol_type = other DNA
ttagcatgttgtgcctttgactattacatgtaatccagtgtcatacctaccagctgctggtggctgatttggttaatcttcagactgcacgtactgtggttttattctctctgatgaatg

SEQ ID NO: 12299 - DNA, 120 bp, synthetic construct
  source 1..120: mol_type = other DNA
acaatgatatttttcctcctagccaagtatttttcctgaaaattatttttagatgatgtagtgtgcttgtgcacgtatgtggtgaaggatgggaggaatagtagggacccaggacacagg

SEQ ID NO: 12300 - DNA, 120 bp, synthetic construct
  source 1..120: mol_type = other DNA
tccttgctcttctccttctcgctcttctccttcttctcctccctcttcttttttctcttcttcttcttctctttatctttctcctcctttttctgtctcttcctcctcctcctcctcttc

SEQ ID NO: 12301 - DNA, 120 bp, synthetic construct
  source 1..120: mol_type = other DNA
ttcctgataatgagttaaactttttcctgcctcactattctgttccctttgcctggaaaattcttcatttcacccttaaaggatctcctccctactcatccctcaggccttcatttaaat

SEQ ID NO: 12302 - DNA, 120 bp, synthetic construct
  source 1..120: mol_type = other DNA
atccagcgcataacattctcagatgccaacttgcttagatattgcaaatgtacctcaaactttgtgacttttttataccttcaaatctcaggctcctttcagtgtccttctcttgttgtg

SEQ ID NO: 12303 - DNA, 120 bp, synthetic construct
  source 1..120: mol_type = other DNA
tggacacttaggttccttccatttctttgctgatgtgaatagtgccgcaataaacatgcaagtgcagatgtctttttgatatatggatttcttttccttcgggtagatatccaatagtag

SEQ ID NO: 12304 - DNA, 120 bp, synthetic construct
  source 1..120: mol_type = other DNA
tctgttccattgatctattcatctgtttttctaccagtaccatgctgtgttggttactatagccttataatagaatttgaagtcaggtaatatgatgcctccttttatttacccctcagg

SEQ ID NO: 12305 - DNA, 120 bp, synthetic construct
  source 1..120: mol_type = other DNA
cagtttttgcgacgtatcacatttattgatttgcagatgttgaaccatccttgtgtccctgataaaaacccacttaactcctgaaaacatgcagcctccctcccaagactgaaccaggaa

SEQ ID NO: 12306 - DNA, 120 bp, synthetic construct
  source 1..120: mol_type = other DNA
ttaagttaaatatggtgctttaatttgccaaagtatcccaaaatctggggcctcccctctcaccagcctcattataagtgaggctgcccttgtactcttgcttgcagtcacactgacctt

SEQ ID NO: 12307 - DNA, 120 bp, synthetic construct
  source 1..120: mol_type = other DNA
tctgagttccttgactcaacaattttacttctataggtactcatcctttctgtactcccagtatagaagctttccctgtgtgtgggaattacatggttgcctctgtactccaccgaccat

SEQ ID NO: 12308 - DNA, 120 bp, synthetic construct
  source 1..120: mol_type = other DNA
gaatatatatagaaatcttataactcaataataagaatacacaaaacctgatttaaaaattggcaaaacagctgggcatggtggctcacgcctataattccagcactttgggaggctgag

SEQ ID NO: 12309 - DNA, 120 bp, synthetic construct
  source 1..120: mol_type = other DNA
tgatgacttctaactttgctattctgcagaataacctttagcagctcctagtccattcacataagtgtaattccctcagcatagcatatgaggccctcacttaatgtcttaatcagggtt

SEQ ID NO: 12310 - DNA, 120 bp, synthetic construct
  source 1..120: mol_type = other DNA
tttcgtggctgtatagttttccatggtgtatatgtaccatattttctttttgcagtcaacagttgacagacacttaagttgattccgtgactttgctattgtaaatagtgccgcaatgaa

SEQ ID NO: 12311 - DNA, 120 bp, synthetic construct
  source 1..120: mol_type = other DNA
gcctgattaaactttgaattatgtgtagagacagagtctccctatgttacccagactggtcttgaactcctgggctcaagcagtcctcctgcctcggcctcccaaagtactggaattata

SEQ ID NO: 12312 - DNA, 120 bp, synthetic construct
  source 1..120: mol_type = other DNA
aatgtgatgcctctggatttgttcattttgcttaggattgccttggctattcggactcttttttgattccatgtgaactcaaagtgtagcaatttaaatgttaatctcacccaaaaacag

SEQ ID NO: 12313 - DNA, 120 bp, synthetic construct
  source 1..120: mol_type = other DNA
ctggaacatatcagccatggataagggaggactactgtactacagagtaccttagatatggtggtaactcaataaatatttatggacttatatatttatgcacatgtggtctattatgtt

SEQ ID NO: 12314 - DNA, 120 bp, synthetic construct
  source 1..120: mol_type = other DNA
aatcttcctgtcctctggatagtgtctgaataagtgtaatctatatttgttcctgtgagttcgttttttattttattgctgatcaatccctttcaacgtgcacattctttattcagctta

SEQ ID NO: 12315 - DNA, 120 bp, synthetic construct
  source 1..120: mol_type = other DNA
atctcattgctactgctgctgtcttgggttattctggacatagagaagaaatgatcacacttatctctggttttgttttccaggactttgttggcattaggatgtcatgtgggtatatca

SEQ ID NO: 12316 - DNA, 120 bp, synthetic construct
  source 1..120: mol_type = other DNA
tttaagatgagaaaattgaggtagatagatgctgtagtactggtttggcctgctgttctatgacctatgtttgtgatcctggttcacttaagacctcacctttctcatctgcctgtgggc

SEQ ID NO: 12317 - DNA, 120 bp, synthetic construct
  source 1..120: mol_type = other DNA
tcatagaaaataggatgttattggaaatagctcatagtaagatggatttaggtattctttatccaattacattatgtattcacgtacaaataatatttattgatagagtcaagttggcag

SEQ ID NO: 12318 - DNA, 120 bp, synthetic construct
  source 1..120: mol_type = other DNA
ctctgccttgagtatttattaatgcatattccttgtgttgctctcacaacgcaacacagcaattatttgagagtgggtgaagatatggaaaagctgagacccttaaatgaaaactatact

SEQ ID NO: 12319 - DNA, 120 bp, synthetic construct
  source 1..120: mol_type = other DNA
ttggtataaatataggcagggatgtaagatggggagcaacacacagatagatgtaatgttagtaatgttctaattgttaacttcgtggtggattaatgaagttaattttattataatgct

SEQ ID NO: 12320 - DNA, 120 bp, synthetic construct
  source 1..120: mol_type = other DNA
tattacctcacataatccctttttattttgtgagaacacttaaaatcaaatctcttggcaagttcaatatataatacctcattattaactatattaaccatgctgtacaatagatctctt

SEQ ID NO: 12321 - DNA, 120 bp, synthetic construct
  source 1..120: mol_type = other DNA
tgctattatgagcatagatgcaaaaatgctaaggaacatactggcaaacaactcagtagtgtattaacaaagtataatatgaccaagctgagtttatcctagtagtgaaaagataggtta

SEQ ID NO: 12322 - DNA, 120 bp, synthetic construct
  source 1..120: mol_type = other DNA
gcgatagtgccactgcactccagcccggacgacagagcgagattccgtctcaaaaaaaaaaaaaaaaaaaaaattagccgggcatggtggcaggcgcctgtagtcccagctactagggag

SEQ ID NO: 12323 - DNA, 120 bp, synthetic construct
  source 1..120: mol_type = other DNA
tagtcaacttcaaattcagagtaataattctctctggggataaggaggggattggaattgaggtgtaacagaaggagagcttcaagtgtattcactatttttgatacttttgcataggcc

SEQ ID NO: 12324 - DNA, 120 bp, synthetic construct
  source 1..120: mol_type = other DNA
aaaaaaaaataaaaatttgataaagcataggagacacatgagcatgtttatgtaaatagtgggaagaaaccagggggacgagttttaaaggagagaggtggtgattgagagcaaggtttc

SEQ ID NO: 12325 - DNA, 120 bp, synthetic construct
  source 1..120: mol_type = other DNA
ggagggagagcattaggaaaaagagttaatgcatgctgggcttcacacgtagttgatgggttgataggtgcagcaaaccaccatggcacacgtttacctatgtaacctgcacatcctgca

SEQ ID NO: 12326 - DNA, 120 bp, synthetic construct
  source 1..120: mol_type = other DNA
catctgagaggtttctaaaactactgctaggttttctgctcttcccaacacagccttagccctaatgctgtgaagctactacatgtgacaggaaacaaggtgatatctctgaggcatagt

SEQ ID NO: 12327 - DNA, 120 bp, synthetic construct
  source 1..120: mol_type = other DNA
tttaagtcttgattccaatgtcatcttctcaagtggtctccctcaacgtctttaaaattgtgctctatttaaaaacgtgcttcctcctatccccctttcctactttatttttcttcatag

SEQ ID NO: 12328 - DNA, 120 bp, synthetic construct; identical to SEQ ID NO: 4980
  source 1..120: mol_type = other DNA

SEQ ID NO: 12329 - DNA, 120 bp, synthetic construct
  source 1..120: mol_type = other DNA
cgtttctagtagatgtgctttcagcaaaacttgctcttaatgtctctggtgtgcagtcatctgagatttctcatttgttccaaggtacttgaagggctgatttggctttgaaatttacag

SEQ ID NO: 12330 - DNA, 120 bp, synthetic construct
  source 1..120: mol_type = other DNA
ttcagtaaataaattggaggagagaaaagtctgtcggctgattctggcagaagtttctcatgatgtttgagaaagtagaatgtaatacagagacatcttaatatgagctatatgtttttt

SEQ ID NO: 12331 - DNA, 120 bp, synthetic construct
  source 1..120: mol_type = other DNA
ggtttccagaaagtatcactcctctttgggaatgcatgtatccctcattagggtagcaatggctccgatcagtgattcacaggtggatatcgaaacttcatcatctgtgtggcctctgtg

SEQ ID NO: 12332 - DNA, 120 bp, synthetic construct
  source 1..120: mol_type = other DNA
cttttttgtgtctatagataaattacttttttgttgttgttgttgtttttttgagacagagtctcgccgtgtcacccaggccagagtgcagtggcacaatctcggctcactgcaacctct

SEQ ID NO: 12333 - DNA, 120 bp, synthetic construct
  source 1..120: mol_type = other DNA
ccaaagtgctgggattacaggtgtgagccactgtgcccggccttttctcacatttatttttaaaagcattttctcatgttttaataattaattttgtaacttagcataattacctagtga

SEQ ID NO: 12334 - DNA, 120 bp, synthetic construct
  source 1..120: mol_type = other DNA
aggaacacaaacaatgacaggtccttttcatctctgagagacaggtaagttgtctcatttctgtcttattggtgtaaaaacaaaaacacaaagattatgtggcttttcattctgatcagt

SEQ ID NO: 12335 - DNA, 120 bp, synthetic construct
  source 1..120: mol_type = other DNA
tttggttttcagaatggtgatttgaggatatattacatgtatatacataacaaccttggtagggcaagtgacttcaaattgcaattcattccgcacaagggaggcatggtcataccaaag

SEQ ID NO: 12336 - DNA, 120 bp, synthetic construct
  source 1..120: mol_type = other DNA
gggagatgtggtgggaacatccacagcctcccaattcctgcttatcttaaagtattgagaattgattatgcttcttgaaatgtggagacttgagcaaatactgcagcaggtctcaggaag

SEQ ID NO: 12337 - DNA, 120 bp, synthetic construct
  source 1..120: mol_type = other DNA
agtttgatgtatttggtagctacttatttctaaaagcccttggtattgctttgacggctgcaccctgtgttttcctgcaggacgtaaagaacagaagaaatcctcgccttgttccctaca

SEQ ID NO: 12338 - DNA, 120 bp, synthetic construct
  source 1..120: mol_type = other DNA
aaaattggcaaaaaacaaattacggttgtgtgcttcgtcacagggcctataatttttgatggaaagttttaaaaatgtattccaaatgtattctagtggctcatattttcagtgcattac

SEQ ID NO: 12339 - DNA, 120 bp, synthetic construct
  source 1..120: mol_type = other DNA
atgtacacatctgaagtgttcagtctggtaaattttgacagttgtagaaacaaaaggaaccactaccgaaaacacctccaatattttcttcattccagaaagtttgtgttcccaacaaag

SEQ ID NO: 12340 - DNA, 120 bp, synthetic construct
  source 1..120: mol_type = other DNA
cagagttttattattctagcttttacttgtaggtgtgtgatctaaagtgagttagcttttgtgtatgatgtaagcttaagatcaaggttcatttgttgcacagatgaatatccaactgtc

SEQ ID NO: 12341 - DNA, 120 bp, synthetic construct
  source 1..120: mol_type = other DNA
accattaagtatgatgttaagtatagctttttatagctgtcctttatcacattgaagagattcccttctgttcttagtttgtgggtgattttatcataaatagggtcatgaattttgtcc

SEQ ID NO: 12342 - DNA, 120 bp, synthetic construct
  source 1..120: mol_type = other DNA
ggcattattgagtaggactatggcatcctatggagaacgttaatgttcaatcacagtatcaagagatcctggtttcacagctttgaaatgacctattaaatgtactttctaatcaacaaa

SEQ ID NO: 12343 - DNA, 120 bp, synthetic construct
  source 1..120: mol_type = other DNA
tttccattttttaaaatattattattattattattattattattattattagttgagatagaatctcgctctgtcccccaggctggagtgcagtggtgcaatctcagttcactgcaacct

SEQ ID NO: 12344 - DNA, 120 bp, synthetic construct
  source 1..120: mol_type = other DNA
tctcaaagtttctgtgggttatgaatgtgagtgataggtggttctggatcatagtctctctgagattgctattaagttggccagggcttaagtcatctgaagacttcactggagctggag

SEQ ID NO: 12345 - DNA, 120 bp, synthetic construct
  source 1..120: mol_type = other DNA
acacaggaattggagcagatggacatggggtagtgggaagattctgagttttattgtaaacatcttcagtttgaggtgcatgtgagacaactcaacacatataccaggattcaattacat

SEQ ID NO: 12346 - DNA, 120 bp, synthetic construct
  source 1..120: mol_type = other DNA
tgtctctccttacagtctgtgatttccattatgtgtatgttggtatggttgagtgtatcccccaggcctctgaagctctgcttgtctttcttcatttcttcttcagtttttcatacttga

SEQ ID NO: 12347 - DNA, 120 bp, synthetic construct
  source 1..120: mol_type = other DNA
gttgtttgctttcttggtaatttttctaaactagtttagtagagactgtgttgcctgtcatgtgtggccactgaagtctcagtttcattagcttcatggtcagctgatggtaggacagag

SEQ ID NO: 12348 - DNA, 120 bp, synthetic construct
  source 1..120: mol_type = other DNA
gatttttggagattctttctctaccatttctactgatgtcactcagcaataaagattaaaaattgctgttttgtgggatggaacagagagcagactgcaaacagataaaaacattgtgga

SEQ ID NO: 12349 - DNA, 120 bp, synthetic construct
  source 1..120: mol_type = other DNA
gtagatggtccacttaggataaaatatagggtacagatgggcagagagaacagacatagatgaaggtagaaagattagggcaaaatatggaatatcttgcaaactcagctaagaaatgtg

SEQ ID NO: 12350 - DNA, 120 bp, synthetic construct
  source 1..120: mol_type = other DNA
gtggtgtgtcatgcctgggaggtacggggagcacagtctttgctcagtccttggccttaatcttgaggtagttcattaataatataattcctgaattgtttctgctttgaataccaacag

SEQ ID NO: 12351 - DNA, 120 bp, synthetic construct
  source 1..120: mol_type = other DNA
aaagaagagtccttttttttttgtgaagtcccttgcatgatagtatctgtgaaccacatgtttgtttcaaattcaggttaagtatcatcaatgagcataagaatagcatagcattagggc

SEQ ID NO: 12352 - DNA, 120 bp, synthetic construct
  source 1..120: mol_type = other DNA
gaatttttttctctcaaaacaacgtttacgatcctatttttcaaaatatatttacttaccaagtaataggcatgagaatttacccttaaccatagaaatgtttctctgattcagagactt

SEQ ID NO: 12353 - DNA, 120 bp, synthetic construct
  source 1..120: mol_type = other DNA
cacccaggctggaatgcagtagaacgaccatagctcactgcaacctcgaccttctaggctcaagtgatccttctgtatcagcctcttgagaagcttggacttacaggcatgcactaccat

SEQ ID NO: 12354 - DNA, 120 bp, synthetic construct
  source 1..120: mol_type = other DNA
ctttcccttatttctgtttctcttctcttccttgcttcgtcttccctcttctctctcacccgtacatgtctactcatttcttatgcagagcagttcggatcttttttcttattgacttct

SEQ ID NO: 12355 - DNA, 120 bp, synthetic construct
  source 1..120: mol_type = other DNA
atctcctctgctgttcctcttggtagcttcacagtaccagtgtttcccacagcacaaacgtggaaaaatatttcacaggaaagcttttgtcctcgtagtctcaaaacccttccctacaac

SEQ ID NO: 12356 - DNA, 120 bp, synthetic construct
  source 1..120: mol_type = other DNA
ataaaaggcagctttaggtttatacctcctgaagatcagatgtaatgaaccagagtgggaagtaacctgaggaagttaaaataacctttactcccagtcaaatgataggcaagaaaggat

SEQ ID NO: 12357 - DNA, 120 bp, synthetic construct
  source 1..120: mol_type = other DNA
atgttaatattaggtagggatttagaattcccagacagctccattttgcttaggacattgcagtagaccgatatgccagctggagtttctcctactgttgtgttgatagaagggactgct

SEQ ID NO: 12358 - DNA, 120 bp, synthetic construct
  source 1..120: mol_type = other DNA
actgtcctatctttgtatagattacagattacctgccaggggaggttgacacttgtacagtttctgtttagtggctaagttctaagacagaaaaatgcagaaagctctgtggaagcacca

SEQ ID NO: 12359 - DNA, 120 bp, synthetic construct
  source 1..120: mol_type = other DNA
gtttcttagtcacattggccaccatttaaagggctcaattccctcaggtggttagggatgcccctgctggacagtgcaggtagcgaatatttctctcatcacagaaagttctattggata

SEQ ID NO: 12360 - DNA, 120 bp, synthetic construct
  source 1..120: mol_type = other DNA
ttttgatacaggcatgcaatgggtagtaattgcatcatggaaaatggggtatccatcccctcaagcattaatcctttgtgttacaaacaatccaattatacttctagttattttaaaatg

SEQ ID NO: 12361 - DNA, 120 bp, synthetic construct
  source 1..120: mol_type = other DNA
atgctttttggtactggaatatctcttccccatccctcctctcccaaattgactttatatagcttcccaaaaaagctccttaatttacctgtcactactgggagctagcattgaggtagc

SEQ ID NO: 12362 - DNA, 120 bp, synthetic construct
  source 1..120: mol_type = other DNA
tatataccgtcaaaaagaaaatcacaaacatctttgaaagactgatatggccatccagttaaatccaggggggagctatggctatcccagttctggaagaggatagggttgttctataaa

SEQ ID NO: 12363 - DNA, 120 bp, synthetic construct
  source 1..120: mol_type = other DNA
ttactttgagttagtcaaatagagattatacaggtgggcctgacccaaccagatgagcccttagggattgggtccttcctgaagtcagagagatacaaaatatgagataaattttcctgc

SEQ ID NO: 12364 - DNA, 120 bp, synthetic construct
  source 1..120: mol_type = other DNA
cggttacctcatcagaagccatttttattataagccatgctgcctaataacttagttgacacttcagcttttacccacagaggtatagtagctaatcaagctgtgatactcctccatacc

SEQ ID NO: 12365 - DNA, 120 bp, synthetic construct
  source 1..120: mol_type = other DNA
ctgtctaaaagcagtgaggggatgcatgtcctaccagatagcaggatttattgtgaagctatagtcattaaaatagagtggtattgttgtagggatagacaaattgacaaatggcataaa

SEQ ID NO: 12366 - DNA, 120 bp, synthetic construct
  source 1..120: mol_type = other DNA
catagaacctcttttacgttgctcttaggagctcaaattggtctctccactttggaaaactgtgtgacaggatctctgaaaatggaatattcacatacccatgacccagaaattctactc

SEQ ID NO: 12367 - DNA, 120 bp, synthetic construct
  source 1..120: mol_type = other DNA
tagagcttttgggactgatctagtaagaagaggagaaattgatgataaaggtataagtatgagaggagataattactcatgttcctgataaggtgaaggggggtgtgatctcaagcacaa

SEQ ID NO: 12368 - DNA, 120 bp, synthetic construct
  source 1..120: mol_type = other DNA
aagagtcctgcagtgaatggcttaagatggtcctggccacatggagaaatggtctcttccttgatgacctcttgggttgggtttatctctccctgttcttttgtaccattagaatagtaa

SEQ ID NO: 12369 - DNA, 120 bp, synthetic construct
  source 1..120: mol_type = other DNA
atgtgaagcgtgtgcttgtctgctgaaagaacttaggcgctatgggctaattcttacgactgtgaggaagactgcacatctcactctgcttctgcttggctcctccagagccacgtgaaa

SEQ ID NO: 12370 - DNA, 120 bp, synthetic construct
  source 1..120: mol_type = other DNA
catttcttatggcagtctgagctgaccaatacaccaccccttctactcttgcatcccctactaagctagtactattctcaatttattcttacgggaacagccttatattatcagtagttt

SEQ ID NO: 12371 - DNA, 120 bp, synthetic construct
  source 1..120: mol_type = other DNA
tacagacctgggagagtaacttattattgggaatctccttaattaaaaatcaacacttgtcagaggaaggaagaaatcaggactgtgaggccaacttctatagcagaggaatccaagtac

SEQ ID NO: 12372 - DNA, 120 bp, synthetic construct
  source 1..120: mol_type = other DNA
gaggtttgtagtacaattgatactttcacccaaatactgaatatggcacccaataattttgcaacccttgtccccccaccacagttgtccccagtttctgtttttgccatccatctttat

SEQ ID NO: 12373 - DNA, 120 bp, synthetic construct
  source 1..120: mol_type = other DNA
taatttattcttaggaaaagctggtacgcttgtgatctgctttatcttccttttattgtagccccaaacagagatttcaagcctgtattttgcccctacatctttgggactgctagctcc

SEQ ID NO: 12374 - DNA, 120 bp, synthetic construct
  source 1..120: mol_type = other DNA
aaggcccaaatccagctcaccacctgttttttttttttttttttttttttgagacagggtctcgccttgctctgtcacctagtctagagtagtgtggagtgatcatagttcattgcagtc

SEQ ID NO: 12375 - DNA, 120 bp, synthetic construct
  source 1..120: mol_type = other DNA
ctctgtgtggcagctgaacagtacctgtagtttttctccactctgtcttctttgatcccattgccacatagttgtccttgctgtgtataggctaatttttaaaagtaaatgtagtttcta

SEQ ID NO: 12376 - DNA, 120 bp, synthetic construct
  source 1..120: mol_type = other DNA
ctctttttacctttttgtaccatttaaaattcagttcactgagcattcgtgctaagcattatacatacaagatctaactttaaaactataaccctaaggggcaggagttacagaagatag

SEQ ID NO: 12377 - DNA, 120 bp, synthetic construct
  source 1..120: mol_type = other DNA
gctgggattacaaatgtcactgggcccagccagtataacttctttacttttctttgtatgttattagaccacgagcacgttttgccctggatctgtgttagtcatcttttactcctactt

SEQ ID NO: 12378 - DNA, 120 bp, synthetic construct
  source 1..120: mol_type = other DNA
agttttaactagaaactcatcatttactcttccttgaacacagctggatatgttcttttttcctggttggtggcactgttatacagctattcatatgactatatgttgctgcatacaaac

SEQ ID NO: 12379 - DNA, 120 bp, synthetic construct
  source 1..120: mol_type = other DNA
cctgaagaatatcatctcatccccttgtgaaaaaaaaaatctcatctcctttccaaaaaataccatctcattgtcttgccaatcaattccaaagagctcaaaaaaacaattaacaaagtt

SEQ ID NO: 12380 - DNA, 120 bp, synthetic construct
  source 1..120: mol_type = other DNA
tcaagtgggtaggatgaactttggaaaggatgtcagcaccttgaaatatttcaccatctgtggcttacaagagggctatgaaccatttgccgttaatacaaacagggatattaccatgtg

SEQ ID NO: 12381 - DNA, 120 bp, synthetic construct
  source 1..120: mol_type = other DNA
cttcttcgtttgctaggtgaccagaatagacggcaccatagacagttccccatgtttaaaggtcactcagaagtcttttggttctcagaacagcaacactgatatcatgttttatcgcct

SEQ ID NO: 12382 - DNA, 120 bp, synthetic construct
  source 1..120: mol_type = other DNA
tgagaaccaaaaacatgtattttcagatattcccagatgtcccccagggagcaaaatcgcccaggtttaaggcaactcaattgattatatgctcatatttgaagtagacagaacatttta

SEQ ID NO: 12383 - DNA, 120 bp, synthetic construct
  source 1..120: mol_type = other DNA
gctgaggcaggtggatcacctgaggtcaggagttcgagaacagcctggctaacatggtgaaaccccgtctttactaaaaatataaaaattaactgggtgtcgttgtgcacacctgtagtc

SEQ ID NO: 12384 - DNA, 120 bp, synthetic construct
  source 1..120: mol_type = other DNA
tttgttttgtttagttttactttgccaatatttggttctgctatcttcacagtactattactcagtgagaatctttcctggacaagaacctgctaatgtctgggtgggctggattacatc

SEQ ID NO: 12385 - DNA, 120 bp, synthetic construct
  source 1..120: mol_type = other DNA
caggtctccgaaagagtcctttataacgttgcttttcttctatacttgcaccatcattttttgggaaactcactttcctgccctcgggttgtaacatatgaagcataatggacttagcat

SEQ ID NO: 12386 - DNA, 120 bp, synthetic construct
  source 1..120: mol_type = other DNA
tttgaacccagaaaaaggtctagtttggtttgagtttttggagagaaggtgcaggtcagttcttacttggttccaacttgttgacctgtcttcattaggtgtgaaatgtagagacttata

SEQ ID NO: 12387 - DNA, 120 bp, synthetic construct
  source 1..120: mol_type = other DNA
gtaccctagaacccatctacaggaaaagctatttcctacaaaagctacttcataaagttggaagaagctactgttttaccagatgaacagatatcaaaggaacacaagaaacacgcgaat

SEQ ID NO: 12388 - DNA, 120 bp, synthetic construct
  source 1..120: mol_type = other DNA
gataagcaaaagcagaatgaattcaccacctctggacctgccttagaagaaatgcgtaaggcagtgctaaagctggaagcaaaaggatggtaattactatcatgaaaacatgtaaaagta

SEQ ID NO: 12389 - DNA, 120 bp, synthetic construct
  source 1..120: mol_type = other DNA
caagactcaactatatgctgcccactagagattcacttcacctttaaggacagacatagcctgaaagtgaagggatggaaaaagattttcaatgcaaatggaaactgagagtgagcagaa

SEQ ID NO: 12390 - DNA, 120 bp, synthetic construct
  source 1..120: mol_type = other DNA
gattaatagtgagtgaggaaattgtatcaataatgaaaagtctctatcaaagaaaagcccaggactaaatgggggaaaagttgaaagcttttttttctaaggtctggaacaagacaaaga

SEQ ID NO: 12391 - DNA, 120 bp, synthetic construct
  source 1..120: mol_type = other DNA
gaaatagaaaaaataattctaaatttcttatgaaatcacaaaagaccccaagcagccaaagcaatcttgagcaaaaagaataaagctggaaacatcacactaactgagtttaaaatacac

SEQ ID NO: 12392 - DNA, 120 bp, synthetic construct
  source 1..120: mol_type = other DNA
gtatggaggttcctcaacaaattaagaatagtactaccatatgatccagaattcctgggtatatatcccaaggaaaggaaatcagtgtgtggaaggaatatctgcacttctataattatc

SEQ ID NO: 12393 - DNA, 120 bp, synthetic construct
  source 1..120: mol_type = other DNA
ttacttctgttaaataatgacaatgccttaagcccttcagagtaaacagagtatgttccccaagcagtgttcacatagtaatgaaatactctaattcttgaaggagcacatcaatcgata

SEQ ID NO: 12394 - DNA, 120 bp, synthetic construct
  source 1..120: mol_type = other DNA
ttagagccatggaagtcagaatgaaaaatgataaatgtgaaaacattctagagaagaaatgaatacgcgaaggcccgtggtgggtgatgacatgatgtgatttctgcccagtgctctgaa

SEQ ID NO: 12395 - DNA, 120 bp, synthetic construct
  source 1..120: mol_type = other DNA
ggccccaaggggctcttgcttctggcgccaagtgcccggccacatgcacatgccaaattgtaaagaccatcgatgctaggaagaaactgcgtcaactaatgagcaaaataaccagctgac

SEQ ID NO: 12396 - DNA, 120 bp, synthetic construct
  source 1..120: mol_type = other DNA
aatccaggagctggttttttgaaaagatcaacaaaattggtagaccactaccaagactaataaagaagaaaagagagaagaatcaaatagatgcaataaaaaatgacaaaggggatatca

SEQ ID NO: 12397 - DNA, 120 bp, synthetic construct
  source 1..120: mol_type = other DNA
ccaagagaataaaatacctaggaatccaacttacaagggatgtgaaggacctcttcaaggagaactacaaaccactgctcaatgaaataaaagaggacacaaacaaatggaagaacattc

SEQ ID NO: 12398 - DNA, 120 bp, synthetic construct
  source 1..120: mol_type = other DNA
caacaaaaactaaaattgacaaatgggatctaattaaactaaagagcttctgcacagcaaaagaaactaccatcagagtcaacaggaaacctacagaatgggagaaaatttttgcatttt

SEQ ID NO: 12399 - DNA, 120 bp, synthetic construct
  source 1..120: mol_type = other DNA
ggttgaacttaattttgcaattgtaaagttgaggttccaggcacacattggagtgaatagagtagatagttttattaggctggcttggtgaccttggacatctttcttaaattatttgag

SEQ ID NO: 12400 - DNA, 120 bp, synthetic construct
  source 1..120: mol_type = other DNA
acagcggatgccgtagatggactcatacaactcggagtaaaggaattcctggcttttgttaatgaggagggctttggtggccttgccagaagaatttaagcaaaacaatgggagaggggc

SEQ ID NO: 12401 - DNA, 120 bp, synthetic construct
  source 1..120: mol_type = other DNA
ggttcaagcaattctcccacctcagcctcctgagtatttgggactacaggaacatgccaccatttttgtttttttttacaggcgaatttttgtatttttagcagtgggccaggctggtct

SEQ ID NO: 12402 - DNA, 120 bp, synthetic construct
  source 1..120: mol_type = other DNA
gacctctctttctttgacaccagacagaaagaattaaggatggctgaagatgatactggaggtggaggagaaataagtaggtttgttaatgcctaacatattctgttttcttattcggta

SEQ ID NO: 12403 - DNA, 120 bp, synthetic construct
  source 1..120: mol_type = other DNA
gtgcggggcaggggtggttctaaagaaacaagatgaaatttacaaagatctaaattctttaggcaatggagtcattattctgcgtattctaagtttaagtttatttctcaaccattctgt

SEQ ID NO: 12404 - DNA, 120 bp, synthetic construct
  source 1..120: mol_type = other DNA
gttacctagggctaggagcggaacaggactgctaatgggtactaaattccttttgggatgataaaagtgttctaaactcaacttatagttatagttacacaactccattaatatacataa

SEQ ID NO: 12405 - DNA, 120 bp, synthetic construct
  source 1..120: mol_type = other DNA
tggcatcaggccatagaaaatatatggataggaaaataaaactgaggctaagagtgacacacagtcatttataccacaccgattggtagagttggggcccacattaatttcattcttcct

SEQ ID NO: 12406 - DNA, 120 bp, synthetic construct
  source 1..120: mol_type = other DNA
gattttaaaaaatcattcatttctaatcttactaccactctcctcccttctacagatctgttgacatcttagagttgacagagcaggaggaattgctgaaatttcactatcacactctcc

SEQ ID NO: 12407 - DNA, 120 bp, synthetic construct
  source 1..120: mol_type = other DNA
ggcaagcggcccaaggaaggcctgctccaaatgaaactgccagagccagttaaattgcaggtaatcagaacaagagacttgagtgaatttcagaattgctaagcattaaggtattagaac

SEQ ID NO: 12408 - DNA, 120 bp, synthetic construct
  source 1..120: mol_type = other DNA
ttttaaggaatcagacacactggctgtctttatgctcctcaagatgtctaaagggtcctttattaatgtctcctctgtttattaaagtcaattggatgtttgcatcgctgacctgctttt

SEQ ID NO: 12409 - DNA, 120 bp, synthetic construct
  source 1..120: mol_type = other DNA
ctttctgcagtaatcatgtcatcacccagttacactcattttgaaagaagggaactctagtctcttatcactgatggaataactttcccagaagacccttagcaaactttcccttatata

SEQ ID NO: 12410 - DNA, 120 bp, synthetic construct
  source 1..120: mol_type = other DNA
tttcatacacattattaaaggatttagaaattaaatttggtgtctttttaatggtctcttagatgtgcctactgcttcagtacctctgtgactgccaggtccggcaccggatagaagcca

SEQ ID NO: 12411 - DNA, 120 bp, synthetic construct
  source 1..120: mol_type = other DNA
tggagtacatgtgcttttcccgattcttccttttaagtacaactaaaaccctggacattacaaagaagacaacataagaaggctctgaaagatagagagaagaagagaggttggctacag

SEQ ID NO: 12412 - DNA, 120 bp, synthetic construct
  source 1..120: mol_type = other DNA
tggggtcagaggaaaccaggtgaaacagagttaaaaataagacccagagctcctagcataatcctcaaaatgttgagatttcaattaaaaatcatgtgtgtgaagaaccaaggaaaactt

SEQ ID NO: 12413 - DNA, 120 bp, synthetic construct
  source 1..120: mol_type = other DNA
aacagaaagggagataaggtttctatccttcactcaaactgaagtctactggtgttgacattgtaccatctggtgcaccgtcaataccagtagactgtatgttaggtatgtatataaaat

SEQ ID NO: 12414 - DNA, 120 bp, synthetic construct
  source 1..120: mol_type = other DNA
ctatcatcaaataatagatctaccaaggtttgtagactactccacccaacgacaaggtacacactcttttcaagtgttcatgaaacatttgctaagatggaacatatcctgggccataaa

SEQ ID NO: 12415 - DNA, 120 bp, synthetic construct
  source 1..120: mol_type = other DNA
caatgacaaaaccatagagatggaaaacaaatttgtggttgccacgacttaaggatgaggggcagacagagggatgtgggtgtgctcatgaaaaggtaacaggagggatctttgagataa

SEQ ID NO: 12416 - DNA, 120 bp, synthetic construct
  source 1..120: mol_type = other DNA
tgtctgtggcttttcatctctatggagggtcctggaaccaatactccatggatactaaaggatgattgtattccaaactctgaaaaagaaatcctagatctgaaacacttccggccccaa

SEQ ID NO: 12417 - DNA, 120 bp, synthetic construct
  source 1..120: mol_type = other DNA
tcttgaattcacctttcttttcttcctccttcttcctctttcttgtttttcaaactttcagatcaatatgcttctcaattttaaggatgacaaaagtgaatgtccatgtccagaagaaat

SEQ ID NO: 12418 - DNA, 120 bp, synthetic construct
  source 1..120: mol_type = other DNA
ctaagaaacttagaggtgatggatttatgtctgttcctggtggtggtgatggtttcacagatggatgcatgtgtccaagctcatattgcatagataaaatatgtacagttttgtttatag

SEQ ID NO: 12419 - DNA, 120 bp, synthetic construct
  source 1..120: mol_type = other DNA
gctggactgtaagtctaggcagacagtatctgaagtccgagatgcccaagggttagcccaaatagcagaattgatctttgcccctaagagagtctttttggtctctactcagtgttatat

SEQ ID NO: 12420 - DNA, 120 bp, synthetic construct
  source 1..120: mol_type = other DNA
ttgtctttatattttggttctgaaatatttcctcaactgttgtatacttctggttgatccatatcctatttcagaataataagcacccttgggctgtgagtgccttgggcacagcactct

SEQ ID NO: 12421 - DNA, 120 bp, synthetic construct
  source 1..120: mol_type = other DNA
agtgcaaatgactcaactgaggagacagttggataagcatacctttttgaatgtccgtgaccgaactttataaggataaatgatgtcaggccttctgggaagaaaataatagaacaaaac

SEQ ID NO: 12422 - DNA, 120 bp, synthetic construct
  source 1..120: mol_type = other DNA
acaccatcaacctgctggcatcccttggtcagattcggtccctgctgagtgtgagaatgggcaaagaagaagagaagctcatgattcgtggattagggtaaattatttaactactacaac

SEQ ID NO: 12423 - DNA, 120 bp, synthetic construct
  source 1..120: mol_type = other DNA
gggtagttggaaatatgaacaggaaatgataaggaagcttgtctttatctattgggccttggaaaaagaaggggtagggggaacaaattttctgagaattcagcatcatgagcttgcatt

SEQ ID NO: 12424 - DNA, 120 bp, synthetic construct
  source 1..120: mol_type = other DNA
ctaatgggacagagagggaaagcaaaaaagccaattgagaaaagcaaatattagagtctttataattgtatgagcataggtcttatttgagtactaatatttaaatctaacccgaggaag

SEQ ID NO: 12425 - DNA, 120 bp, synthetic construct
  source 1..120: mol_type = other DNA
tcttgaaactggatgtccgttttaatgagttagattacttgtacctggacttcatgtatactcagtttctcttggagaatatgaatccttttaagtatttgtcagaatgataatatgaat

SEQ ID NO: 12426 - DNA, 120 bp, synthetic construct
  source 1..120: mol_type = other DNA
aggtcatggtgaacgtccttggaggtggagagtccaaggtaacgtctttgattcctgagatgctatttagtatcatctcctggagtatatagattgatatagaatgcagatttttttttt

SEQ ID NO: 12427 - DNA, 120 bp, synthetic construct
  source 1..120: mol_type = other DNA
acttttaagtgaccacaacttaatggtatcaaaaaccaaattagtagaatagtataataaaaaaaaactttatataatcagtataattttataacctctgatatgaaaatatgttttgat

SEQ ID NO: 12428 - DNA, 120 bp, synthetic construct
  source 1..120: mol_type = other DNA
atcgtagtctgcacatttgaagatctttggtatctgaagtttggcacacacatggacacacggggattgacgatgtgattgagacctcaacgtatgaactcaattttataaaggtcgttt

SEQ ID NO: 12429 - DNA, 120 bp, synthetic construct
  source 1..120: mol_type = other DNA
atgaaataagctacgtgtagaaagacaaaaaccacatgatctcactttcatgtggactctaaaatcaaagtcgaactcatagaaacagagagtagaatgaggttaccaggtgtagggggg

SEQ ID NO: 12430 - DNA, 120 bp, synthetic construct
  source 1..120: mol_type = other DNA
gcactctaaggatactaagccacacatgtgtattaccagcatttagagaaactttccctgtattgtagttgcaatagcattccaagtagtcacctgattttttttccttgctcacctggc

SEQ ID NO: 12431 - DNA, 120 bp, synthetic construct
  source 1..120: mol_type = other DNA
atcctcctgacataccagtccaggatcatgaagtcttgcatctctgagacacctcaggacatgtttcccccgtatagtacttaaaatcttttaatctacacactcattaaaatggccaat

SEQ ID NO: 12432 - DNA, 120 bp, synthetic construct
  source 1..120: mol_type = other DNA
ctctgaggagtgacggccatgttctgcgtcttgattatggtgtgttctcacagatgtctacatctctcaaagctcattgaatttatacttcaaagagatgagtttattgcacattggttc

SEQ ID NO: 12433 - DNA, 120 bp, synthetic construct
  source 1..120: mol_type = other DNA
catcctttaaggatgtcatttattgtatccaatgtaagcatctaatgagttttcagccaagggataactctttgttaatcatgttgtttgcaggtagttcgttatttggctggttgtgga

SEQ ID NO: 12434 - DNA, 120 bp, synthetic construct
  source 1..120: mol_type = other DNA
tcgccgaggatccttcccgagatggtccctcaccaaatagcggatccagtaaaacactgtaggtctaatatacacaccctcacgagtgatccatactacttgatgtgaaattttataaaa

SEQ ID NO: 12435 - DNA, 120 bp, synthetic construct
  source 1..120: mol_type = other DNA
gctagtgcctctggtaaagatgtaacatagggctttattgaggcacatttctaaagaaaaaaaagagttagagggcacgcaatcctgcaaaccctttgtcttttacatataaactgggca

SEQ ID NO: 12436 - DNA, 120 bp, synthetic construct
  source 1..120: mol_type = other DNA
tgctttctctttcttttgaaacattcatgaaagtgacacagaggaggaggaagatgacactatccacatggggaacgcgatcatgaccttctattcagctttgattgacctcttgggacg

SEQ ID NO: 12437 - DNA, 120 bp, synthetic construct
  source 1..120: mol_type = other DNA
gagccagcgtacccagcctagattagtattttctgaaactttttgacccaaatgaaattaaagtttcgtggaataatacttttactctgtaatacattctgatattttgttctttatttt

SEQ ID NO: 12438 - DNA, 120 bp, synthetic construct
  source 1..120: mol_type = other DNA
tgggggaaaactaagtgaaggaataggggaccaaccttggcatttctgaaatttatgcatcttcacaactattatttgaggcctcctgtgtgccagaaattgtgcttgagtttcacgccc

SEQ ID NO: 12439 - DNA, 120 bp, synthetic construct
  source 1..120: mol_type = other DNA
ttcagatgccaacaatagccaaaggtaaggccaacttcaatttgtcctaattcagtaggatgttggatgacatcatgttctaaagaatgttttccgtactcaacatcccaacctctccac

SEQ ID NO: 12440 - DNA, 120 bp, synthetic construct
  source 1..120: mol_type = other DNA
gaagttattgaagacaactaaaataagtgttaaatcccaaattatactttgtttttactttatcaaatgtaaggtgttttttttcagttttcaatactttattggatatttatacataaa

SEQ ID NO: 12441 - DNA, 120 bp, synthetic construct
  source 1..120: mol_type = other DNA
taccataataattgaacgcccattatagctttaggcaaagctagaaattaaaaatcttccccgcctttggcttccccatttgagacagtttcttctccttgtgcatctgtagctcatctt

SEQ ID NO: 12442 - DNA, 120 bp, synthetic construct
  source 1..120: mol_type = other DNA
gtagacagaaacctgtaggtttttatgtcaccatagctgtgcatttaactttatgtggctgtgcattcactgcagagcttcaaccaccaatatttctttctccttttcaatgacaactca

SEQ ID NO: 12443 - DNA, 120 bp, synthetic construct
  source 1..120: mol_type = other DNA
aactctgtcagttactaggtatgtgaccttggactagttacttctctaaaggctagttttcgtcattcattgaataagagtcatgatagcagcctcacagttgggttgtgggaattgtgt

SEQ ID NO: 12444 - DNA, 120 bp, synthetic construct
  source 1..120: mol_type = other DNA
cccacttcacattttcacttttcatggatttcacttggagttttagaaagtagattttggatgcctgtttgtttctcctaagtatctaacaatgccatgtcttgtatcctgtatgcagtt

SEQ ID NO: 12445 - DNA, 120 bp, synthetic construct
  source 1..120: mol_type = other DNA
gagtcagtatcatcttggtatcttcgtttgttaaggtacaaatggattgaaggctgttctgtatattgggtggcccacatggagaatctgccattatcagcttaaatgttcttttctttg

SEQ ID NO: 12446 - DNA, 120 bp, synthetic construct
  source 1..120: mol_type = other DNA
ccacgcttctctcattgactcattacttcatactgtgtatagactttctaagggctgttcacttaccaaagctcagcgggattccatagaagtttgtttactctctatttgtgggtgagt

SEQ ID NO: 12447 - DNA, 120 bp, synthetic construct
  source 1..120: mol_type = other DNA
gaaggctgaatatttcctccaacctggaaaaccatttcctataagtagaagtgctagaatgtcttacaatgaaaaccagaaacgtatctccccctgatgaagttttgcctgtgaaagtga

SEQ ID NO: 12448 - DNA, 120 bp, synthetic construct
  source 1..120: mol_type = other DNA
ttatgaacattagctttgttccaacagacaactgagaccttctatgatgcagcacttactcagaagattagtatttgatgttccattattaaatgaacacgcaaagatgcctcttaaagt

SEQ ID NO: 12449 - DNA, 120 bp, synthetic construct
  source 1..120: mol_type = other DNA
cattattttttccccaatggctacccagtactagtgctgaagaagtatgagatataaagagtctatatggagctgttacagtaagcatccctggatatttagcaaaagtaatctttctct

SEQ ID NO: 12450 - DNA, 120 bp, synthetic construct
  source 1..120: mol_type = other DNA
aagtaataaattgcatccataaccaccaaagaaatgtagacaaataagtgatcagagtagagcaattttggaacttcacttggagaagtaagttttgtggcaagccatagagaggcagag

SEQ ID NO: 12451 - DNA, 120 bp, synthetic construct
  source 1..120: mol_type = other DNA
ctgcctcagaagaagaacttcatttatcaagaaagttgttctggggcatttttgatgccctgtctcaaaaggtaatttaatggtttgtgggtttgtttgtatcaataaaatggtatagag

SEQ ID NO: 12452 - DNA, 120 bp, synthetic construct
  source 1..120: mol_type = other DNA
ttgctacataatagaagaaaatttgtctgcaattacatttggtagcaacactttaatgctttttcttaccgaatttcctttggtaaactgagtccttttaaaataatgtgtaagtatttt

SEQ ID NO: 12453 - DNA, 120 bp, synthetic construct
  source 1..120: mol_type = other DNA
ttttagttgaaaaattaccctaaatgtttattaataacgacaatcaacctctatataacatcttttacttaggatgtacccagcatgcactgcaaagctgtttctgcgagtagcaaggga

SEQ ID NO: 12454 - DNA, 120 bp, synthetic construct
  source 1..120: mol_type = other DNA
agaaaagaccctttcccccatcccccagtatttggcttatatgattgatcttttgtatctcttccgaagtaagtaaaccaaactatcacatattcacattcctacatgggtaagtttgtg

SEQ ID NO: 12455 - DNA, 120 bp, synthetic construct
  source 1..120: mol_type = other DNA
cgtgtttaacagttaaaattgaatgagatataagcattcataagctgtgagtaaattattaatatgatttcctgtaaattctgtgaaaatcaagctcttttgtctttacttttctcatag

SEQ ID NO: 12456 - DNA, 120 bp, synthetic construct
  source 1..120: mol_type = other DNA
gttgagttgagatagttcaagaactaaaatacttctatattggtttggcgaaatgaaaatcagacaccaaaggttgcttccagaggatgtgtatgctacgtaacaaataaagatcatcat

SEQ ID NO: 12457 - DNA, 120 bp, synthetic construct
  source 1..120: mol_type = other DNA
gttggcaaatggatggatttatggagaaatatattcagactcttctaaggttcagccattaatgaagccatataagctattgtctgaaaaggtaaggattttttgtttgttttagtttgt

SEQ ID NO: 12458 - DNA, 120 bp, synthetic construct
  source 1..120: mol_type = other DNA
ggtcctaggaaccgggttgctaaaggaaattgaccttggtgctatataatgaacaaagcgaggatccctcttactaacattagtaaaactagatctctgctcacactctgcttttcagaa

SEQ ID NO: 12459 - DNA, 120 bp, synthetic construct
  source 1..120: mol_type = other DNA
taaaagaagaagaagaagtaaccagttgtaaggtcctgaagttttcctaatgaaaacagtacatcatgttcgtttgctacagctagtttgtctatagggctttcttctcatttccagtgg

SEQ ID NO: 12460 - DNA, 120 bp, synthetic construct
  source 1..120: mol_type = other DNA
aaatcatgtatattttatatcactcctctttctctttctcctttttgttctaatagtaagcccttaatagaccctattaacccgtgaaaccatctctcatgtcttagtgattttcacggt

SEQ ID NO: 12461 - DNA, 120 bp, synthetic construct
  source 1..120: mol_type = other DNA
gtacctagctggtatcgtgagcttgggtaaactggttaacctctgtatgctgcagttttctcatttttaaaatgaagctggtatgagcatcggctttgaaagaatgttgtgagtgttctg

SEQ ID NO: 12462 - DNA, 120 bp, synthetic construct
  source 1..120: mol_type = other DNA
cacatggtggtagacgagaagaatgaggaaccaagtgagaggggtttccccttatgaaaccaccagatcttgtgagacttattcactaccacaagaacagtatggaggaaaatgccccta

SEQ ID NO: 12463 - DNA, 120 bp, synthetic construct
  source 1..120: mol_type = other DNA
aagaaccagtggcagtccctgaaaccaggacaggttcagtgagagtttggggctgccctgcggctggataatgtttatagataaaacgggatgctcaaaaaacagcagtgaggtacagag

SEQ ID NO: 12464 - DNA, 120 bp, synthetic construct
  source 1..120: mol_type = other DNA
aaatttgtgccatatttttaaagtataagttaagtctctcttcacaaggtttttaatgaggcactgttttttcacacaaatgatctaggtttctgtggacgctgcccatggttacagtcc

SEQ ID NO: 12465 - DNA, 120 bp, synthetic construct
  source 1..120: mol_type = other DNA
agggtgtttcagccgtataacatattttcctttaatagccatttaaaaatctctatgttaaatagttgtgtgtgagaagaaagtaaatagttaataatgctctgtgcaagggccaccttc

SEQ ID NO: 12466 - DNA, 120 bp, synthetic construct
  source 1..120: mol_type = other DNA
tcagaacggtttaattgtgcctgtaacagattgaagttggaaatgctgtaatttcctagtggctagtatatattttcttgtgtctcagaattttgacagctttcttttacccattttagc

SEQ ID NO: 12467 - DNA, 120 bp, synthetic construct
  source 1..120: mol_type = other DNA
gtggggatatttcatggtgaaaggtaaagctgtgatatggaaggatggtacctggcaccaagcactaggaaacagagtaacacaaattaggattggtcacagagaggaaaagagaagatt

SEQ ID NO: 12468 - DNA, 120 bp, synthetic construct
  source 1..120: mol_type = other DNA
cgcccctcacctcccggacggggcggctggccgggcggggggctgaccccccccacctccctcccgcacggggcggctgccgggcggaggggctcctcacttctcagacggggcagttgc

SEQ ID NO: 12469 - DNA, 120 bp, synthetic construct
  source 1..120: mol_type = other DNA
tggcaaatgagtcatagagttttgttttgtgaaattcttgacagggtattgcccacataactggtaaacaaaatcactgcttattacatgagcagattacatgaaaaaatgtctgttcct

SEQ ID NO: 12470 - DNA, 120 bp, synthetic construct
  source 1..120: mol_type = other DNA
aaagaatcagggccaaagctgcacagttttgttttcacccattctcttctcttttatcatccctgcatctgtgcagagaagatgaatctgctttagggaaatcaggagaaaaatgcctcc

SEQ ID NO: 12471 - DNA, 120 bp, synthetic construct
  source 1..120: mol_type = other DNA
gtgggtactttgcattcttaggatttttaaattatagacctctttaaagcatctttctctttctctccccacttcccccacagtaacttattggtatgcggccccaaaatcactgattac

SEQ ID NO: 12472 - DNA, 120 bp, synthetic construct
  source 1..120: mol_type = other DNA
gcctctcacacaatatatattaccacacatgttttacgaatgttagatgtgaggcataccatgctattcggtttgctgctgttttaatagcattctttgtatcagatctttacatctgaa

SEQ ID NO: 12473 - DNA, 120 bp, synthetic construct
  source 1..120: mol_type = other DNA
aagagaaagccaaggatagagaaaaagcacaggacatcctcaagttcttgcagatcaatggatatgctgtatccaggtaaaagtacacataccctaagtacacactcttttcacaagagt

SEQ ID NO: 12474 - DNA, 120 bp, synthetic construct
  source 1..120: mol_type = other DNA
agttaaatctcgcctatgaaatcagttgctctactcataagaaaaacttccaaaactatggattttcaaaatttctaaacactatagaggtcttgagtttagcctttgcagggaaacacg

SEQ ID NO: 12475 - DNA, 120 bp, synthetic construct
  source 1..120: mol_type = other DNA
ttattcacagtttattcaaatttctgaataaactacctactacagttttcttgtatgggggtggggagaatcttgctccagggtacatctacccacttgacacatttcattctatccaca

SEQ ID NO: 12476 - DNA, 120 bp, synthetic construct
  source 1..120: mol_type = other DNA
ttcaagcaaaagtcagcttggctcttgaatatctggaagctctgcttacaaattttactaaaacctgatagctctccaatatgttctgcatgccatcgttgttattatagttgattatta

SEQ ID NO: 12477 - DNA, 120 bp, synthetic construct
  source 1..120: mol_type = other DNA
tatggatgaatatcttgcaatgtttccagtgcagcatttacctaaaaactcttcaaatctacagatggtggcagcagaggcaaaggagaacatttcccttatgaacaagaaatcaagttc

SEQ ID NO: 12478 - DNA, 120 bp, synthetic construct
  source 1..120: mol_type = other DNA
cacttttttcagccaaaaagggatggacatgaagagttgtaaagtctccgaatgatttaatgcatttacttagtatttactgtgtgtctagtgtgggtcaggcattagggtatggcccag

SEQ ID NO: 12479 - DNA, 120 bp, synthetic construct
  source 1..120: mol_type = other DNA
tgtttagatagacatgagtttgaatactggtagtgccgatcttgttcttgctatgggcccgtcacagtccttagcactagggattcagtgacaaacagaagagaccagttaatagttctg

SEQ ID NO: 12480 - DNA, 120 bp, synthetic construct
  source 1..120: mol_type = other DNA
atgcttccaacaaagagaaagaaatggtgactaggtaaacagctataaaaataagcactgttgtatgacttaggtgtatatgcagttgcaaagaaaacctgaggaccttgaagtggggct

SEQ ID NO: 12481 - DNA, 120 bp, synthetic construct
  source 1..120: mol_type = other DNA
tataaaattgattatagttaaaataacagcaggaatccatcccagcggcgtgctttgtttccacaaattgctgccacatggagagaggcaatgcagttactttccaagatgtgaatttcc

SEQ ID NO: 12482 - DNA, 120 bp, synthetic construct
  source 1..120: mol_type = other DNA
actatacaccaaaaaagaaaattggcccatttaccttggccaattctgtatccctcatagaataaatcagaggtacatcgctattttgtgctagcctcagttgatgtccctttggggctc

SEQ ID NO: 12483 - DNA, 120 bp, synthetic construct
  source 1..120: mol_type = other DNA
agctaaatacgtgaatatgagtatagccctagtgaaagccaggcagtaagatgggattcaaagtaaagtaagaccaccttgggtggatatagaggggcgagagatttatggaaatcaagc

SEQ ID NO: 12484 - DNA, 120 bp, synthetic construct
  source 1..120: mol_type = other DNA
ccgtgcccggcctcgttcagatatttctgaatgccacctatgtacggcaagctgtctgaggcctgaagataaacacacacacacacaataacacagttcctaactttaataaatttagaa

SEQ ID NO: 12485 - DNA, 120 bp, synthetic construct
  source 1..120: mol_type = other DNA
ccaaaaaagaaaaggttattatctttgctcattaggggcattggtgagctgcaaaggagtgttttagtacaagacaatgagtaaatgctgaagaagtagatgccttataaattctggaga

SEQ ID NO: 12486 - DNA, 120 bp, synthetic construct
  source 1..120: mol_type = other DNA
cctgtctgagttagcacacacagctgtcagccataaagctcagtagataagggcacgtggacaaagtttctcctgttttattgtcttaaaattatagcacaaagataaataaggcaggtc

SEQ ID NO: 12487 - DNA, 120 bp, synthetic construct
  source 1..120: mol_type = other DNA
taagttatcacatctgtaatgctttcctctgagtgattatcagttgctcaaattctgttcctactttactgtattcaaattcactggatgcttacgttacgtaaggagtgtgatcaaggt

SEQ ID NO: 12488 - DNA, 120 bp, synthetic construct
  source 1..120: mol_type = other DNA
caaacttggagttcttgtcaggcataggatttcactatttggtaaggagacccttgaaaaaatacaagcatggccatcacttggttttctttgccatttttgcactgtgttgtgtgctgc

SEQ ID NO: 12489 - DNA, 120 bp, synthetic construct
  source 1..120: mol_type = other DNA
tcaatggggcagttatctttagaataatttctagttcactgacttttgtttaacttctcttcaacagagaaatattttcatgggcttattcaggcaggattttcatacactctttaacct

SEQ ID NO: 12490 - DNA, 120 bp, synthetic construct
  source 1..120: mol_type = other DNA
tctctaatacaagcaaataaaaagaacaacttgatgaaaatgtatatgcatatacaaccatttaatcatagctcaagccaagacatagaacgtttccaacatgccaggagcctcccctgt

SEQ ID NO: 12491 - DNA, 120 bp, synthetic construct
  source 1..120: mol_type = other DNA
ctaatatgacatcctagagagaatagtgggtttggaatcagaaaacctagttgtaagtcctatttttctaacttaacagctgaatgatttggacaagggacttaaattctctgaacctgc

SEQ ID NO: 12492 - DNA, 120 bp, synthetic construct
  source 1..120: mol_type = other DNA
aaaaaaatgaagagacaaaatacatgttctggtggtagtaattgtggtgagcagagtttgatgggtaatggaatatttattctaggttggctgccacattgtaattatatctccaaacct

SEQ ID NO: 12493 - DNA, 120 bp, synthetic construct
  source 1..120: mol_type = other DNA
caatatgcaaacatctttcgcttgtactattgcaggagcatactgaccattctctctgaatcccctcctgcttctctcaactgtgttccacgatgatcttatcaaatcttctcaaaacac

SEQ ID NO: 12494 - DNA, 120 bp, synthetic construct
  source 1..120: mol_type = other DNA
tgatgaatgaatgaatgaatgagccacccaggtccggccttcaagaagcctatagtctaatagagaaggtagataagtacgcagacacttactatgagacaagtgctaagaacgtggaaa

SEQ ID NO: 12495 - DNA, 120 bp, synthetic construct
  source 1..120: mol_type = other DNA
gtcttatctcagaagttattatattagaaaattaatatgtttgtgttatctctaacaaggctcagattgtgcttgtgtttggtaggacacatataataaaagaaaaattggccgggtgcg

SEQ ID NO: 12496 - DNA, 120 bp, synthetic construct
  source 1..120: mol_type = other DNA
taacaaagtcattgacactctgcaatttctctctattccctcataattgtgagagaaatttgtaagttctggcacagtggtatttcacattgttaatagaattctgccaagattaatcat

SEQ ID NO: 12497 - DNA, 120 bp, synthetic construct
  source 1..120: mol_type = other DNA
tccacaaatattttaagggcctgctgtatgtcagacactattctaggtgcagggaacaaagcaaacaaaaatcccagcctgccaggcttatattaatagaagtttaaagtatccctggcc

SEQ ID NO: 12498 - DNA, 120 bp, synthetic construct
  source 1..120: mol_type = other DNA
cattcagtggtgccgcctttcacctaattactcaggcagaaaaccttagagttatccttgactgctttcccgctcacctcacattcaatccataagtaaatccttcaaatatatattctc

SEQ ID NO: 12499 - DNA, 120 bp, synthetic construct
  source 1..120: mol_type = other DNA
acttctaagagttccaggagaagccccagagctggcatctgccaatggacaggaaaataaaaaatcctaccattctgctcattttgtcttcattattaccaggaattctgagacttgaag

SEQ ID NO: 12500 - DNA, 120 bp, synthetic construct
  source 1..120: mol_type = other DNA
gggagggagaggggattattgaaaacctcggttaaaactcttttagtctggtgcagtgcttttgaatgcttcttgggcatgtcagctatttgatgagacatgctttattgcttttctact

SEQ ID NO: 12501 - DNA, 120 bp, synthetic construct
  source 1..120: mol_type = other DNA
gatttcatttaaggtcttttgtatgataaatgcagaaaggagacaccattacagaccttcacttcctactacaaatagtggcattaaggtatgaagttcagccttcggcggcttcattag

SEQ ID NO: 12502 - DNA, 120 bp, synthetic construct
  source 1..120: mol_type = other DNA
atagacaccattcttacagaaatagatctctgaattacatggacccacagagaggaccagtaaggtactggttatagaaaatgacttccacattgttgaagtttccaaatgatcactatt

SEQ ID NO: 12503 - DNA, 120 bp, synthetic construct
  source 1..120: mol_type = other DNA
tttagtacccacttataagtgaggacatgtgatatttgactttatgtgcctggcttgtttcactgaagataacaacccccagttccatccatgttgctgcaaaagacatgatttcattct

SEQ ID NO: 12504 - DNA, 120 bp, synthetic construct
  source 1..120: mol_type = other DNA
tcaagtttcaggatggagtggtttgcagtgttaaatgatgtgaataggtaacataagaaaaggtatccccagtaaatttaaaataaagagatcactggcaactttagtaagaaatttctg

SEQ ID NO: 12505 - DNA, 120 bp, synthetic construct
  source 1..120: mol_type = other DNA
tttcaaatgcactttcctgattaccatctacttgctatttttttcatgtttaccttgtcatttgtgtttctttactttatgaattgccttttctcatcttgcatctatttttctattcat

SEQ ID NO: 12506 - DNA, 120 bp, synthetic construct
  source 1..120: mol_type = other DNA
ttttcaaaccctctaattccttcttattgctgtagcttttgtttttgtcattgttgtttttgcctatatatttatctggacaaaattcgaggtcacttttttaggttctaaataatgttt

SEQ ID NO: 12507 - DNA, 120 bp, synthetic construct
  source 1..120: mol_type = other DNA
actggataatgtccccaccaagttagggcatgctcaagataggctggagagaaaaagagaagtttaaatttagatccatcgtgttttagttgtgcttgagacatccaggatgagtcagaa

SEQ ID NO: 12508 - DNA, 120 bp, synthetic construct
  source 1..120: mol_type = other DNA
taagaaagaagggagttttaggaaaagggaatttggtcctgggtatgaaatgccactgaacggttggaaagatgagttgtaaaagtgcaattttgctgcacagtgaaaagcagctttgtt

SEQ ID NO: 12509 - DNA, 120 bp, synthetic construct
  source 1..120: mol_type = other DNA
aataacttggggattgatgagggagcctggatgaagaggctagcaggtaagaactggaagaagacattgtacccctgaaatctgttttatttccaaaagaattttaaatacataaactag

SEQ ID NO: 12510 - DNA, 120 bp, synthetic construct
  source 1..120: mol_type = other DNA
tataatctaactcttccattgtgccaaggatggggatagttaaaatgagataactgtatatagtctcatatagtaattatgtagcagagcttgtccctattctaagggttaggggaacct

SEQ ID NO: 12511 - DNA, 120 bp, synthetic construct
  source 1..120: mol_type = other DNA
atcaaaagtaatttagtaatttctccaattcggtcataacgtttcttggctcacatgtccttgttcaatcgcttcattcactattttgccatgagcttgttggtaattataattaactgt

SEQ ID NO: 12512 - DNA, 120 bp, synthetic construct
  source 1..120: mol_type = other DNA
tgttgatagaatttctaaagtacgtatttggtgaattttcactattttgtgtattgcaagtggaactatgtatttttaaacctggaaaagattttaatcataacaatcgtatagtagtct

SEQ ID NO: 12513 - DNA, 120 bp, synthetic construct
  source 1..120: mol_type = other DNA
gttgggttacttcacttagaatgcctcatgggaaaatagggggagcccaggaaaaaattactaaaaactgcatatttttatttgaagaactgaaactcttcagtttcctcgatcattaaa

SEQ ID NO: 12514 - DNA, 120 bp, synthetic construct
  source 1..120: mol_type = other DNA
gtagagagagcaaggagaagacgtgggcgagagcttgcctcgtggtctccactggaaggaatggacaaggcagggcaaacaggtttctgattggctaatttgaatacttttcaggggctc

SEQ ID NO: 12515 - DNA, 120 bp, synthetic construct
  source 1..120: mol_type = other DNA
taggcctagtcttgtttaagagttttgaatgccctgtgtttgacccgacagcacatgaactagaagctaatgccagaagtctgtgtattcctgtacagatacccttttccctcttttcca

SEQ ID NO: 12516 - DNA, 120 bp, synthetic construct
  source 1..120: mol_type = other DNA
aaattttttgtaagttcccacagaaaggtcatgtgataaatacaaccaattaaaactgtgctttctgttcataatgtggcaaaggaaagagcttggctttcagaggcagatcagcctgga

SEQ ID NO: 12517 - DNA, 120 bp, synthetic construct
  source 1..120: mol_type = other DNA
taaagctattttctgtgaaattgttacaatcatatttgtatgtttgtgggtgtgtgagagacagagatagagaggaggcagaagcagaggttgattgattgattgattaaagaaagggct

SEQ ID NO: 12518 - DNA, 120 bp, synthetic construct
  source 1..120: mol_type = other DNA
tttccagttatagatttcttctggggtggaaagcaaaattattgtttgtgtataagtaggaattcatttgcctagtgttactcaaaattgagcaatttgtagatgtgtttagtgttgatt

SEQ ID NO: 12519 - DNA, 120 bp, synthetic construct
  source 1..120: mol_type = other DNA
tgaatatttatgaaactccaatgagtatattacttctatttctactagacggggactgaggctctaggaagacaagtttgcagactgtataaaagaaaaatgcattttataattgttctg

SEQ ID NO: 12520 - DNA, 120 bp, synthetic construct
  source 1..120: mol_type = other DNA
tctggccaaaaatcgatttagcctggtaagtctccttttcatcccagcggtaatgatcatctgacctccagactctcagtgtttgattcctttgtctcactgccctatgtcaatatttca

SEQ ID NO: 12521 - DNA, 120 bp, synthetic construct
  source 1..120: mol_type = other DNA
gattccattgaatttcaatgtccttactgtggaggtaaagcaggtcattaccttgcttcaggctacagcagtaccaagaaattatttgaatgagaatgccccaaatttgtagcatgtaat

SEQ ID NO: 12522 - DNA, 120 bp, synthetic construct
  source 1..120: mol_type = other DNA
gaggtggaggttgcagtgaaccaagaccgtgccactgcactccagcctagacaacaaagggaaaccctgtctcaaaaaacacaaaatttacatggagcgatcagtaattaaatatatatt

SEQ ID NO: 12523 - DNA, 120 bp, synthetic construct
  source 1..120: mol_type = other DNA
acctgtgatgcagttttaaaagtcaagctagtattttgactcagcctgttgtcttctattctgggtgtcccttctgaggaattttttttaattatgaaaatacgcaaatgtcaaaaagta

SEQ ID NO: 12524 - DNA, 120 bp, synthetic construct
  source 1..120: mol_type = other DNA
ctgtctgtgtttgcctgtagatgaaaattatttctgacattttaactaggcactctcagtctgggagttgtgaagttttagatgtcatctatttatttctgcttcataacattcagtctc

SEQ ID NO: 12525 - DNA, 120 bp, synthetic construct
  source 1..120: mol_type = other DNA
ttgcctcagtgaaattaagcgctgttgtagagtccaaatatttataggtaaatgctatcctatatccttgcccataaaagtaaacatagaaatctttctacaattagactgtgaatgggg

SEQ ID NO: 12526 - DNA, 120 bp, synthetic construct
  source 1..120: mol_type = other DNA
gactgatgatacctcagatccagagaagacggtagaaagagtattggatatagcaaatgtgctttttcatcttgaacaggtcaggctttgtgtcaattcaatcatatttgccttagccac

SEQ ID NO: 12527 - DNA, 120 bp, synthetic construct
  source 1..120: mol_type = other DNA
cagggctcttatgacagatcatactgttgatgacttggttattttatactaaatataaaataataataagatgccctatgccatctcaggaactttgccacctaaatgtatgtgtgtgtg

SEQ ID NO: 12528 - DNA, 120 bp, synthetic construct
  source 1..120: mol_type = other DNA
cataaatatatccaatcatgatgaatgatggcatttctcaaatgaggttcacttttctaagtatccatttatgccttggatgtttatggagttccctgtcctagggcagccttatcccca

SEQ ID NO: 12529 - DNA, 120 bp, synthetic construct
  source 1..120: mol_type = other DNA
tttattgatcatagagggggaagagcatcacagaaataagtgcttttccgttaaacaagttgcctcgtgaaaatttctaaaccaccgcagtccaaacattttaaatgtttacttcagaca

SEQ ID NO: 12530 - DNA, 120 bp, synthetic construct
  source 1..120: mol_type = other DNA
atatttatttgtttttgaaggtagtttggggtgtaaatatttatttgtgtcattctacctcaggtggaacatcctcagagatctaaaaaggctgtatggcataaactactgtccaagcag

SEQ ID NO: 12531 - DNA, 120 bp, synthetic construct
  source 1..120: mol_type = other DNA
ctcttttgtggaacatctctgaccaagccatgcccctctactccttgcacatcataccactttcctacagtattaaggctatttgtctctttgattcagactttgagatcctgtactagt

SEQ ID NO: 12532 - DNA, 120 bp, synthetic construct
  source 1..120: mol_type = other DNA
cattatcatttctttttggttactcctatactgtcattgcccagatttcatcagtttccctttgaactacttcacattcccatccttccctccatcaccacctcttcaagtcgcttgttc

SEQ ID NO: 12533 - DNA, 120 bp, synthetic construct
  source 1..120: mol_type = other DNA
gaattccactgattcttctcatctgcactggtcttttttcacaggcggccatttatgataagtagtgcagggtttaatctttgagtatgtactcccataaagttcacttaataccttttg

SEQ ID NO: 12534 - DNA, 120 bp, synthetic construct
  source 1..120: mol_type = other DNA
tatccacctaaattaagtagaaggtgaacaaaaaattgctggtttttagaaatcaacagggcagagaatgatagactgaacacaggagactgaacacatggtaaatgtggagcatgagaa

SEQ ID NO: 12535 - DNA, 120 bp, synthetic construct
  source 1..120: mol_type = other DNA
gcattaactcatttagtattatttacgtatcatgctgtgtgtaagcgaagaaaatatttcactttataagcaatttgcactgctatgggaactaaattttcacacttggggtgactcagg

SEQ ID NO: 12536 - DNA, 120 bp, synthetic construct
  source 1..120: mol_type = other DNA
ttgcccatttttcttgtcttctgcagccttagtcatatgaattcaccaaagccacaaagggcaaacctctctgaagttacataagaaatgcactggtaggcctgatcgtcaaaatgtgct

SEQ ID NO: 12537 - DNA, 120 bp, synthetic construct
  source 1..120: mol_type = other DNA
tattacatttgtgtgtaaaccaaaagacagtttattttgtgaaaattgaaggcccttctgtaaggtaagatgggacagctatttaggatccccgggatctttgctttctgatttcaggat

SEQ ID NO: 12538 - DNA, 120 bp, synthetic construct
  source 1..120: mol_type = other DNA
gggaagtaaggtacatcttacatggcggcaagagagagagagaatggagtggggggctgtcaaacactgttaaaccatcatatcttgtgagaactcactcactatcgtgagaacagcatg

SEQ ID NO: 12539 - DNA, 120 bp, synthetic construct
  source 1..120: mol_type = other DNA
taagaacagcttctgcggtttgtggagaggggccatggagtggggacatgctgtagtgtgagaaagtaagtagtgattcagatgtgaacagaaatagtatagttgtttcttcattgcaaa

SEQ ID NO: 12540 - DNA, 120 bp, synthetic construct
  source 1..120: mol_type = other DNA
ctatttaaacagagttgtttttattttatcatgaatcaccaaattgtttttatgtctgattgatgagctgaaacacatagtttaataaacactgggttaaaagataaaaggatagggctg

SEQ ID NO: 12541 - DNA, 120 bp, synthetic construct
  source 1..120: mol_type = other DNA
gtgttctctgcagctgaagaatcgaagtgggctgaacaggtagaagctcctggtttgagaataggtagaagctcttgatttaagaataggttgtttctgattgttagagttcttccttgt

SEQ ID NO: 12542 - DNA, 120 bp, synthetic construct
  source 1..120: mol_type = other DNA
ttacttttgctttgagtcttgatacttgagacttgaactcactttaagagactgttgtatgtgtcttcctccaccactgcaggtcccttggaaggcatcatttatatcttacttaggttt

SEQ ID NO: 12543 - DNA, 120 bp, synthetic construct
  source 1..120: mol_type = other DNA
ttgctggagtcatgattttcatttctcttggctaggtacttttctgtattacaaacatcacttctttctgaaacaaaagagctgatgagtggttctgcacgtcctctctattatgatgag

SEQ ID NO: 12544 - DNA, 120 bp, synthetic construct
  source 1..120: mol_type = other DNA
ttctgtggcagaatgaaattttcagcagatactggcaagctgaagagccctcattactgtgttatgtattcgtgctgccagttttgaattctgttgtggatacctgaatgatctgacata

SEQ ID NO: 12545 - DNA, 120 bp, synthetic construct
  source 1..120: mol_type = other DNA
ctaatgcacactgctaattattgggaataatgggagatattagaataggtagtcttaaggagcagctaagcaaaattcctctgttttcgacattagatgtacagtatgtattgatggagg

SEQ ID NO: 12546 - DNA, 120 bp, synthetic construct
  source 1..120: mol_type = other DNA
actttgatgagctgtagggttcttcctactatagctattggttaatgaccaatttcttttggtcactattatactacagaccataataataatagcagctgagatgtattaaaagcatgt

SEQ ID NO: 12547 - DNA, 120 bp, synthetic construct
  source 1..120: mol_type = other DNA
tatcttgaaacattgtttcatagcttataactgacatttatgtttcttgcttcatggcttattgcagcttattgtgtcaaggaactgcatgtcagagctggatggacaaacctgagtcct

SEQ ID NO: 12548 - DNA, 120 bp, synthetic construct
  source 1..120: mol_type = other DNA
ttgtttttctgaagtgcacagcatttatagtctatccgttgtcttcagagcaattgtttattgctattttgcttcttgtcctcatccttccttaaggtcacaggatcccaacgcagcaag

SEQ ID NO: 12549 - DNA, 120 bp, synthetic construct
  source 1..120: mol_type = other DNA
tttgctaaaagaaaacattttgatatagaattacaaaattacttacattaatatgaaccttgttaagcttatgttttattttcataaggctatatggtaggaaaatcaatcataaacatt

SEQ ID NO: 12550 - DNA, 120 bp, synthetic construct
  source 1..120: mol_type = other DNA
tgaagggctctcctaacattaagtaaagaactgatttcctaagtagcataaaagttaatgcctcaagaatgtgttgatagttgtatgatggggctggatggcagagaaggtgttgctagc

SEQ ID NO: 12551 - DNA, 120 bp, synthetic construct
  source 1..120: mol_type = other DNA
tgcagtaaagctcaaaaaacatggaaaacaaggaaagaggaatgatttgccagctcttttcttcttccatcatatatatatatgtattgttcatatgatcctgttaaattaaaacgtgcc

SEQ ID NO: 12552 - DNA, 120 bp, synthetic construct
  source 1..120: mol_type = other DNA
gacagtgaagcttagataagcaagaggaatggaatgttaacttgtcttccagccatctttctcaaatactgggcaagctgcatcttccttttggcgaatgcccagtttctaattgacaga

SEQ ID NO: 12553 - DNA, 120 bp, synthetic construct
  source 1..120: mol_type = other DNA
cggggaaggaggataggcactttatatgcaggttccttacatctcctgtcacttactggtcacagagtgttaatttcatcatacttcctgttgatattaaccagttcttccaggcaaccc

SEQ ID NO: 12554 - DNA, 120 bp, synthetic construct
  source 1..120: mol_type = other DNA
ctcattaagagcagacactcagatggacttcctgtgtttgaatcccagcttgaacttctagctgtgtgagcggaagcctcaatttttctatctataaagtgtggctaattatagtatcta

SEQ ID NO: 12555 - DNA, 120 bp, synthetic construct
  source 1..120: mol_type = other DNA
ggaggattgaaaaagaaaataaactccctgtgttttagaacaggaatgtgacacaaaaatgttttatagaaaataatgtcagccaggtgcagtgtatcgtggctgtaatcccagcacttt

SEQ ID NO: 12556 - DNA, 120 bp, synthetic construct
  source 1..120: mol_type = other DNA
atacaatagagtccagttgtgcagatgctacctgaagatggattagcataaaatggctaccaagtatctggaagaattgaagaaatacatatgtaccacctttccagatggtctccagaa

SEQ ID NO: 12557 - DNA, 120 bp, synthetic construct
  source 1..120: mol_type = other DNA
tacacagtatatctaacgtcaaagcctctagtgcattaactgaattacttgaccctggtttagtgtttcttttgtctctgtagattagtcaaactttgataccatttttacagagtgtta

SEQ ID NO: 12558 - DNA, 120 bp, synthetic construct
  source 1..120: mol_type = other DNA
aacatcaccttgtaggtcgtaactctcagatgccaattaaaaatatttcatgttgacttatgacgttactaaattatgggaaatttaaggagttttgttcctggatatttctattctctt

SEQ ID NO: 12559 - DNA, 120 bp, synthetic construct
  source 1..120: mol_type = other DNA
gtggtgtttatttaagagccttaggcagtttaagcagaagctgctgtgtcagagaactctattcttgaaaaggtgccttcaaggtgttattttcctgagtaagatgcttataaaagatct

SEQ ID NO: 12560 - DNA, 120 bp, synthetic construct
  source 1..120: mol_type = other DNA
tttaactgatcttcccccttttggagcacaaatggcaaattgttgttttgttctgttttttctcaagagtgtgtggcatgttgccatcttccatcttctgtgagtttcctgatgactgtc

SEQ ID NO: 12561 - DNA, 120 bp, synthetic construct
  source 1..120: mol_type = other DNA
ttgactaagcttctctaccacgccatttgatggactcactgtcatagggctctatgcaactttcattctgcaacttatactgcttagttccttctcaattctccagtgaactggattgct

SEQ ID NO: 12562 - DNA, 120 bp, synthetic construct
  source 1..120: mol_type = other DNA
ctgttgaagaacatcgttggtgttgaaatggtccataatgttgtcatagagcccatacatgaagagatgactaaaaatatggtctgtagaaatctgttgtgcttactgataccctcaaca

SEQ ID NO: 12563 - DNA, 120 bp, synthetic construct
  source 1..120: mol_type = other DNA
tggaaaagtaatggtggtacattctgttattaggtacccttgtccttgaatagaagattatttatatttctaggataaatagaagtgaacaatgaaaaatgaaatatgttacactaaata

SEQ ID NO: 12564 - DNA, 120 bp, synthetic construct
  source 1..120: mol_type = other DNA
gtgttacaaatccaaacataaaatgatgtcaaaatatctgaaaacatcaagtgtgaccttttatcatgtcaaatgaattctggtgctgaggtatgaaccactctctcaccatgcgtttac

SEQ ID NO: 12565 - DNA, 120 bp, synthetic construct
  source 1..120: mol_type = other DNA
tcctattgttttttcaatttacagactatggtaatggaaactgaatttccgtctatagcattagcatatggcagtcacaactctcagattgtaatgctgttcggggttttttgttttgtt

SEQ ID NO: 12566 - DNA, 120 bp, synthetic construct
  source 1..120: mol_type = other DNA
ttggttgtttatttatttaacaaacaataagatttttgttcagtggccacgtggtttctataattcccatagaaaatgcttgactacctcaaggagaaaaaggatgtgggcttctttcag

SEQ ID NO: 12567 - DNA, 120 bp, synthetic construct
  source 1..120: mol_type = other DNA
agaattttatttctgcacatctgctggctttgtaatgtactccccatgttgaaacctaagaatgctttcatgtttgactttcacatggatcatttcagtgtaggcccaggggagacacta

SEQ ID NO: 12568 - DNA, 120 bp, synthetic construct
  source 1..120: mol_type = other DNA
cagagatacacgtgatcttagaatttttctctctctaaatagatgctggtataaactagaaagtttagcatacaatgcatttaaagcagaaataacctttgctgccctttcattttagca

SEQ ID NO: 12569 - DNA, 120 bp, synthetic construct
  source 1..120: mol_type = other DNA
gttcatatcagctcccaaaaggaatagcagccacttaggttattttcctcagcctcctttccttcgtcaggcggatatgggttggaataacattttcgagtcccaagtcagaaagaactt

SEQ ID NO: 12570 - DNA, 120 bp, synthetic construct
  source 1..120: mol_type = other DNA
ctcctcctcgccagtgtgctctgccagttgccttccaagtattgggaggcctactgagtttttcctctattcctttgaaaatctgacagattacaaatcatttaacatcaaaactaattt

SEQ ID NO: 12571 - DNA, 120 bp, synthetic construct
  source 1..120: mol_type = other DNA
gcggcaaggctgagactgaaatgcaggcattctgcctcccactgtttaatttacagatcccacgagtgaagtcacttccctcccatctgttcatattcttcaggggcttacttcatgtct

SEQ ID NO: 12572 - DNA, 120 bp, synthetic construct
  source 1..120: mol_type = other DNA
ctacaacattaactaccaattaaccttccccacctttctatctgtatctgataatttgtttcactgaggttcttactgatatatttataatcatctaatcaaatttatgtgaagttgaag

SEQ ID NO: 12573 - DNA, 120 bp, synthetic construct
  source 1..120: mol_type = other DNA
aaacatagtacctgggaggccacgaaggaccttctctgccctgccaaggaatctacactttatctgaggccacagagagccattaaataccacttaagtgatactatgtgtattgttaaa

SEQ ID NO: 12574 - DNA, 120 bp, synthetic construct
  source 1..120: mol_type = other DNA
tcgattctcccaacagtcctatgaaatgaggagttgaggagtttgttcatctctatatcaacatgatgaaacgaaggctcagaacagtgaactgactaaagtcatatatctagcaatggt

SEQ ID NO: 12575 - DNA, 120 bp, synthetic construct
  source 1..120: mol_type = other DNA
cttcatgaatcaccttttacctgtgcattattgtagatattgacatgacaggacctgataaagagaatgttagtcttttggagtctatttatcctaattcaccaattgtaggtagaatag

SEQ ID NO: 12576 - DNA, 120 bp, synthetic construct
  source 1..120: mol_type = other DNA
ccctcccctcttcccattgttctgcgatgtacggtgtgtccttatataagtgaaattacttgtacgtgtttcggtatacagtcaagaaaatactgtgtgtgtcgacaataaataaaacct

SEQ ID NO: 12577 - DNA, 120 bp, synthetic construct
  source 1..120: mol_type = other DNA
agcagctgctcgtaatgtggaagtgttttttttccccccacggacactttctgtcttgaaaatcagcttcatttgtgtggtgctgttctgtgtttgtttctttccttgtgtttttgcttt

SEQ ID NO: 12578 - DNA, 120 bp, synthetic construct
  source 1..120: mol_type = other DNA
gggaactgggacgttttatatattgcttccctgctttcacagtcctcggatatccatttcacttgagtcttatcaatagttttgatgttagggaagacacatgaggctgggtgcggtggc

SEQ ID NO: 12579 - DNA, 120 bp, synthetic construct
  source 1..120: mol_type = other DNA
tcaaggatagcaaccttttttagtcattcgtttgcccagagctctagaactaggaatgaagaaactgatattagcaatatctgagacaaaaattgaatattgatcatcaatggagcaccc

SEQ ID NO: 12580 - DNA, 120 bp, synthetic construct
  source 1..120: mol_type = other DNA
gcttaatgtggtgggggaaggtgcattttgaagtcagtacaccaagaagtgttgctgaaaacacatttgtcattttaaaaattgtctgaaaacccaaatgtagttcacagctcaactaaa

SEQ ID NO: 12581 - DNA, 120 bp, synthetic construct
  source 1..120: mol_type = other DNA
catctctatttcccaggaatcaattagtgacttttattggtattactctgggaaagatgttattgatgaacaaggacaacggaatttctccaaagctatccaagtggcaaaacaagtctt

SEQ ID NO: 12582 - DNA, 120 bp, synthetic construct
  source 1..120: mol_type = other DNA
tgcattcagtcccttggaagcatggcactttttctattttttgccttggtggggaagaggaaccttatttcagcatttccagatggaaacgtcacacttgataattctaataacatttcc

SEQ ID NO: 12583 - DNA, 120 bp, synthetic construct
  source 1..120: mol_type = other DNA
gtgaaatatattttagagaagcttgccttagtggtatatctgctgataaatattgatactatgaagataagcttatcattagcttcgtgctgcttctggactgccttttagattacagca

SEQ ID NO: 12584 - DNA, 120 bp, synthetic construct
  source 1..120: mol_type = other DNA
caagtttattttcctaaaaatggctatctagtgttcacctcttgcacttttcctcctccctaatttatatgccattggaataccaagctgacactgaacatcgaccacaggaaaatccta

SEQ ID NO: 12585 - DNA, 120 bp, synthetic construct
  source 1..120: mol_type = other DNA
atttcagactgatttcagatggggcagaatggccccttcctgagtagtccatataagaaacacatctttcttgtcatatgctgtctgtcacactttctaataccagaccttatgctaccc

SEQ ID NO: 12586 - DNA, 120 bp, synthetic construct
  source 1..120: mol_type = other DNA
caactatttatgaatggagcaataccagaacactaatggttcagcacttcaccaaaggtgggggcacttttataaggcgttcctggaagcaagacaagaaatttgattggtaaaagtgca

SEQ ID NO: 12587 - DNA, 120 bp, synthetic construct
  source 1..120: mol_type = other DNA
gcccatatgcagatgaagctgtcgcaggtaaactaactaactgccttcctctctcttaaatgacaaactggagactgtaatcatcagcaaattaaacatgctttttgatgttagaatatt

SEQ ID NO: 12588 - DNA, 120 bp, synthetic construct
  source 1..120: mol_type = other DNA
agaaggggcgagcaggagctcagtagagtcagaggagtgaaaagttacaaaaggttcattggtgtaaatgtgattagaccagctatgtctgctaactggcaattgtcaaagttagttagt

SEQ ID NO: 12589 - DNA, 120 bp, synthetic construct
  source 1..120: mol_type = other DNA
gatgtaaagttgtgcagatgtaagtatgatccgtatttccagggactatagctaagcgtagtgatgtttagacacaatatgtctttgaaaaagaatgtttctttatggtaaaaaatcaaa

SEQ ID NO: 12590 - DNA, 120 bp, synthetic construct
  source 1..120: mol_type = other DNA
atttggccctcctttagttccataatgcttcaagtggttactatttattgccagagcagcatcctttttgtgagaataagtatgatgttcctgctgcatagttttcttgtattatctcaa

SEQ ID NO: 12591 - DNA, 120 bp, synthetic construct
  source 1..120: mol_type = other DNA
actttataccctttaaacacaggatccatttttccatgcatggccccgattcgaattttgggttaaatactaacaaacagcaacaataataactgcagtagcagcaaccacagcagtgac

SEQ ID NO: 12592 - DNA, 120 bp, synthetic construct
  source 1..120: mol_type = other DNA
ttttatagagtgagagataaacagggacatatccttgattcagatgttattaaagatctacattgttatcttctgtatgatcactgattttgttagtttattttaaacaaatgcaactgc

SEQ ID NO: 12593 - DNA, 120 bp, synthetic construct
  source 1..120: mol_type = other DNA
atatcttgacccttatgcgaatgctcagtctgaagagcctgaagaagcagatgaaaaaagtaaaaaagatgaccgtgaaggacatggtcacggccttcttttcatcctactggagtattt

SEQ ID NO: 12594 - DNA, 120 bp, synthetic construct
  source 1..120: mol_type = other DNA
aagtgtctgacagacaccactgggtatcatagggaattcaaaggtaagatggggtcactgccttcaaattaccttaaaaagtttattccagagataaaactaacacacatgaagaaacta

SEQ ID NO: 12595 - DNA, 120 bp, synthetic construct
  source 1..120: mol_type = other DNA
aagactccagtgattgcatggaatgctgtttgtaagaggactcagggccacaattctgtctttaaaaatcactcatgtctttctgtcctttccaagaagggaggaaacaaacattccaaa

SEQ ID NO: 12596 - DNA, 120 bp, synthetic construct
  source 1..120: mol_type = other DNA
tttatacatgtgaacaattaagtgtgtaggcctctgattttaaatcttaatggaaaatgttaaaaattgtgcattaaaattataggctgggcgtggtggctcacacctgtaatcccagca

SEQ ID NO: 12597 - DNA, 120 bp, synthetic construct
  source 1..120: mol_type = other DNA
aataatttaggctcagtaaatgtttgctgacctctccctgagtggcagttagggaaccaggttagtccagcacatgtttgatttgctcattgtagtgtgtttatcttttatagtgaatgt

SEQ ID NO: 12598 - DNA, 120 bp, synthetic construct
  source 1..120: mol_type = other DNA
catgtagaatccacctacaagaggtactgaccagtgatgttagacctagaatttaagaacaacaaccctcataagaaagccatttgaacagcagagtcatatttagtgttttttagccct

SEQ ID NO: 12599 - DNA, 120 bp, synthetic construct
  source 1..120: mol_type = other DNA
agttgctgaggctcccaaattcagaaggtatcatctttgaaccctctctttcccaccttaaatacaacccaacgataattattctcagttgttccaaatacatcgagtctgcccagttct

SEQ ID NO: 12600 - DNA, 120 bp, synthetic construct
  source 1..120: mol_type = other DNA
cccctattccctaagctcctaacccgatgtagttttcttcttagcatttaacattctctgaaattatgtttttcacttgcgggtatgcttttttattctttgtctcctccatggtggcag

SEQ ID NO: 12601 - DNA, 120 bp, synthetic construct
  source 1..120: mol_type = other DNA
aggctgtatttcttttgtcttttgcttgcaatggtatcttagatgcagcaaactgactctactttaaatgctttgaatcaggtctccacttcttctgtggttgaaggaaaggagctcccc

SEQ ID NO: 12602 - DNA, 120 bp, synthetic construct
  source 1..120: mol_type = other DNA
aagtagctttctttcatatactgataattattcacatagagaatttcgcctataacttggccctacagaagtgagctcacccacccactatgtctcatggtaatgcagtgatacttggtg

SEQ ID NO: 12603 - DNA, 120 bp, synthetic construct
  source 1..120: mol_type = other DNA
taggtcccattggttatttttaagcgagaaaaggaagtggcacggaaattggaatttgatgggctttatattacagaacagccttcagaagatgatattaaaggccagtgggatagactc

SEQ ID NO: 12604 - DNA, 120 bp, synthetic construct
  source 1..120: mol_type = other DNA
gcaaactctctatgtattagtgaagacgctagagttgtgctttgctgctatgctcgaagtttctgtgaggataagtggtgggaaagagatttttttcttcatgggaaaaacaatgacagg

SEQ ID NO: 12605 - DNA, 120 bp, synthetic construct
  source 1..120: mol_type = other DNA
gggcgcggtggctcacgcctgtatgtatatacaggtatgtatgtgtgtgtgtgtatatatatatatgtatatgtatatatatatatatatacacatatatatatacacacatatatggat

SEQ ID NO: 12606 - DNA, 120 bp, synthetic construct
  source 1..120: mol_type = other DNA
ccggctcaaatcagcccagcccatttttagcactgtgagaataatgcaaaacaaatggttttaattaacctaagtagttcatgttcataggctctttcttttggtttcttttaatttact

SEQ ID NO: 12607 - DNA, 120 bp, synthetic construct
  source 1..120: mol_type = other DNA
tgatagacatggaatctatactagatgctaattaaaatgaggatggtgacaaggttgcaggtcctggtgttttactgaagaattgctggggtcaggatactcaggggagtgggttagaaa

SEQ ID NO: 12608 - DNA, 120 bp, synthetic construct
  source 1..120: mol_type = other DNA
atgatgttacttaatggttgaagccaacaaaatgctttttctcataccccaaggttatggataaatatggagagttctacggccgagacagaatcagtgaattacttggcatggacaagg

SEQ ID NO: 12609 - DNA, 120 bp, synthetic construct
  source 1..120: mol_type = other DNA
tcagcaaatatgaattaagttccaaaatattacttgagtactctaggaaaacaaatgtatatttaaacgttgtgccgctgcctgtaaaatgaaacaccgatgggcaatccttaggatctg

SEQ ID NO: 12610 - DNA, 120 bp, synthetic construct
  source 1..120: mol_type = other DNA
tatgaacgctatcttaatgggaacattcaaatacaaaatgatttatatatttatttatcaaacacataaggcttggtatgtgcacctttaaataagtggccagctccattcctgggggtg

SEQ ID NO: 12611 - DNA, 120 bp, synthetic construct
  source 1..120: mol_type = other DNA
gcacccacaactgtaagacaatgtggaaaataataataaaaggaattgtctacaaaatgctatgagaactgaggggaagggctaaattcctgcctggatgtaaaaggaaacagagaaggt

SEQ ID NO: 12612 - DNA, 120 bp, synthetic construct; identical to SEQ ID NO: 5240
  source 1..120: mol_type = other DNA

SEQ ID NO: 12613 - DNA, 120 bp, synthetic construct
  source 1..120: mol_type = other DNA
cacagtatttgcatagcccacttttgcccagatgcagcttctgcccagatgcagcttatccataatattcatcttgctttgtagtttttttgtcctcttgataacttgggcatggataga

SEQ ID NO: 12614 - DNA, 120 bp, synthetic construct
  source 1..120: mol_type = other DNA
attagctccatctgaatgtcccatggcaaattttcatcttccttctcctctgctcctccccaccaaatccagtcttcggtctacaattttctcttttagtatttttgttcttcttactac

SEQ ID NO: 12615 - DNA, 120 bp, synthetic construct
  source 1..120: mol_type = other DNA
tagtcttacctcagtgtgctttttaaaaatgctgttttcttttctgccacttgacctctagcttcagttccacatggtccttgaaatccctttactagctcagccccctctttttattct

SEQ ID NO: 12616 - DNA, 120 bp, synthetic construct
  source 1..120: mol_type = other DNA
gagaaagcctgctgcggagtaggaagtcaataaatgtttctctgtcggaggataaataacaacgacaattcctgaaacactttaaaactgttttaaaggaggatgacactgaccttttca

SEQ ID NO: 12617 - DNA, 120 bp, synthetic construct
  source 1..120: mol_type = other DNA
tttgcttaacccataacaatagtcatgcgttctgttttctgacatgttctttccccccgttttgtcttaatagtccttcctctacctagcctggtatatgactatgtctgttcttggaca

SEQ ID NO: 12618 - DNA, 120 bp, synthetic construct
  source 1..120: mol_type = other DNA
cgacaaaaaagtctatttatctgtcagttaataagatgtgtttgagctcccaggatatgcagtaaagaactggagatgccaaatgtatgtgtgtttctacataaaaggtccggcactact

SEQ ID NO: 12619 - DNA, 120 bp, synthetic construct
  source 1..120: mol_type = other DNA
aagcagttgcagtcaagaccataaagatgtgctgtaatcagaaaaagtacacataaagataaagcactgttagtatggtcgaatttctgtgatgaaaccagaaatacattttcaccaact

SEQ ID NO: 12620 - DNA, 120 bp, synthetic construct
  source 1..120: mol_type = other DNA
gggggctaagaaaggtgagaaataagttatggatcccattagcttctagtaaacacggctgtgttctcactagagcactcgccgcccatgtagatgtcacgtgtcaattgtatgtcctac

SEQ ID NO: 12621 - DNA, 120 bp, synthetic construct
  source 1..120: mol_type = other DNA
gtaccatggacaagctatttggggggaaatgataaaaatggatgccaaccttgctttttaaataaaaataaattctgaaatgagcatattttaatgcaataagaaggaataatcacaaga

SEQ ID NO: 12622 - DNA, 120 bp, synthetic construct
  source 1..120: mol_type = other DNA
ttcatatttttgatatgctggaatatgcataacatttttctggagggatttattcataggacactgtgaacaaggattcctacaggggtaggaccatagatcacaggggaaagaaacttg

SEQ ID NO: 12623 - DNA, 120 bp, synthetic construct
  source 1..120: mol_type = other DNA
gggaaaaagctttcaactcatccttccacacatagttgacagcagagcaaatcatattgttcatgtgaaaatcatctgtaattttcaacatttcctgtcacgattgccgttctgaggtgt

SEQ ID NO: 12624 - DNA, 120 bp, synthetic construct
  source 1..120: mol_type = other DNA
tttgcatggtaagcacctttctagaaattctgctaagctcgttcttttttctgggatcctccaagaaaagagtgccccagaaattccagaagttttggaaaaccttgtggatcagtattc

SEQ ID NO: 12625 - DNA, 120 bp, synthetic construct
  source 1..120: mol_type = other DNA
aatgatttcagataatggcattcagtgacctgtatcaggtagtgagaacaatatgtgactttagatcttccttttgtaccacagggagaccccagcaacatcctggtctctccttttatt

SEQ ID NO: 12626 - DNA, 120 bp, synthetic construct
  source 1..120: mol_type = other DNA
cctttctttatgacagtctcttgaacgtgtcctttcacagggcgatgtctatattctctcttgagataaattttcctcactcatgtcacattttattcacttcatcctgagtttctttgt

SEQ ID NO: 12627 - DNA, 120 bp, synthetic construct
  source 1..120: mol_type = other DNA
gaccctcagtgttccctaaagccaatagaaactatgatcaacctcagaatgaatctgtttaggagacggatgagggagggaagccacagactataacatcttggaaatcaacaacttcct

SEQ ID NO: 12628 - DNA, 120 bp, synthetic construct
  source 1..120: mol_type = other DNA
agagaaatccccggaggagagttgcaaacacaaagctacttgtgaagtcagagaaacgtgggcaatgggaaagatggtctaactaaagaggaaagaagctgtgttaaccactctttgttg

SEQ ID NO: 12629 - DNA, 120 bp, synthetic construct
  source 1..120: mol_type = other DNA
gctctttattatatgccaggctgagtctacaaccatacgaccctgaatgtgcccaatctcatccttgtatgccaggctgataaaacgtttccaaatgacacatttaattctgttccctaa

SEQ ID NO: 12630 - DNA, 120 bp, synthetic construct
  source 1..120: mol_type = other DNA
agagcagagagggaagtttttgggaaagctgagtgtggctaaattcaaggcctgaaaaaggagttggaacttagcttaaatgaggataaaatattggatgctccaagccagtgactcaat

SEQ ID NO: 12631 - DNA, 120 bp, synthetic construct
  source 1..120: mol_type = other DNA
gaggattaggaactacagagataactcgggtttgtcgagaaaaaaaaatgggtaatgtccctccaagaagtgataccatgtcttttttccagtgctatatgttccacatgtatgttggag

SEQ ID NO: 12632 - DNA, 120 bp, synthetic construct
  source 1..120: mol_type = other DNA
ctactatctgcccagcacatgtattaactaattttaccatttcaccaaccttatgagaatggtgctcttattttatgcatgaagtaactgagccacaataagtctaaggaacttggccaa

SEQ ID NO: 12633 - DNA, 120 bp, synthetic construct
  source 1..120: mol_type = other DNA
tccagcctgggtgacagaatgagactccgtctcaaaaaaaaaaaaaaaaaaaaaaaaaaaaaagacttgaggcagatttcttcgtttaagtggtgatgtttcatttctacattagtactt

SEQ ID NO: 12634 - DNA, 120 bp, synthetic construct
  source 1..120: mol_type = other DNA
aattgtggtggacgccacatgcatgcaaacagcgataggacaccatcctttccctccagaagtggagagactattcattcgaaaccaaagattcaatgacaagtaaatagatgattacag

SEQ ID NO: 12635 - DNA, 120 bp, synthetic construct
  source 1..120: mol_type = other DNA
tcttgattgtagttcctaaaatacagggtctcataaacatgcttcagatggcataaaacagcttacaactggcagggaaggatgagcaccagagtcacatgggacaattattgaatacat

SEQ ID NO: 12636 - DNA, 120 bp, synthetic construct
  source 1..120: mol_type = other DNA
ccagtagacgccactggtccctgcccatctcagaatagagaggaagtttttgtttattgtttaaaaaataattgctgcagatactttaaaagaaagtccaacagctaatggctctctttt

SEQ ID NO: 12637 - DNA, 120 bp, synthetic construct
  source 1..120: mol_type = other DNA
aaaatttgcatgtggcgttttctctgtgctggccataattgattgcaaccatacaatttatctaaatatgccctgtttatcctaatatttccataccgttcatttctgatcagtttctct

SEQ ID NO: 12638 - DNA, 120 bp, synthetic construct
  source 1..120: mol_type = other DNA
ttttgcaggaatcttatgtctggaagatgtatcaagaaaggtgttgggaatttttcccagcaggggattgcttccggaaacagtatgaagaccagctaaattaaactcagacccaatcac

SEQ ID NO: 12639 - DNA, 120 bp, synthetic construct
  source 1..120: mol_type = other DNA
ttcctttagtcttttctttagtgggggagggtaagaaaagcagtttgcacttaaaaagaaaaaaaaaaaacgggtggtgtgtctcaggacaaaaggaggctcttctcattcagctaaatt

SEQ ID NO: 12640 - DNA, 120 bp, synthetic construct; identical to SEQ ID NO: 5272
  source 1..120: mol_type = other DNA

SEQ ID NO: 12641 - DNA, 120 bp, synthetic construct
  source 1..120: mol_type = other DNA
cctgccaggttccaggagcaaggacaagctgcatgccaggccgtgaatggggcttgcacccttgtgtcctttggttttgttaatactcttacaggaggggaagaaaaggcaactatcagt

SEQ ID NO: 12642 - DNA, 120 bp, synthetic construct
  source 1..120: mol_type = other DNA
cggtccctgtccggagaaggggggaagtcggcgagatcttcactgtggctgtagtcagacccccgcacctggaggttatcgctggtggctctagtgacactgtcataggagggtgggaag

SEQ ID NO: 12643 - DNA, 120 bp, synthetic construct
  source 1..120: mol_type = other DNA
gatgactcggaagagcgtcggggagaagaagtacttctggatgatgtccgagagcacagtgcctgtgggaaacaacagagactgtggctactggtggcacctctgtcttccagccagcat

SEQ ID NO: 12644 - DNA, 120 bp, synthetic construct
  source 1..120: mol_type = other DNA
ggccgagcactttatagccatcatttcatttagtccttcccattgtcctaggaagtgagcagatgccatcatccttatcttccagaagaggaaacagaggtgaggtaacttacccaagtt

SEQ ID NO: 12645 - DNA, 120 bp, synthetic construct
  source 1..120: mol_type = other DNA
gctcctataaaaagaatgcaggcaataacaagtgttggtgagggcaaaataattggaatcctcatacattgacagcgagaatgtaaaaaggtgcagccatattgaaaaacagtttggtgg

SEQ ID NO: 12646 - DNA, 120 bp, synthetic construct
  source 1..120: mol_type = other DNA
gtgaagatggccacaaagagcaggttgatcttggccaagatgttgattttctcaggactttggtcatctgtctccaccatcatggtcaccatattcaagcagatcagaaacatgatggtg

SEQ ID NO: 12647 - DNA, 120 bp, synthetic construct
  source 1..120: mol_type = other DNA
atatatatattttttttttttttttttttcttctgttctcccacttggaaaagattataaataacacacacacacacacacacacacacacacacacaattttttggataatggcttgat

SEQ ID NO: 12648 - DNA, 120 bp, synthetic construct
  source 1..120: mol_type = other DNA
tggtttgcctacaacccagtcatagcctctctgatgaagctctgggagcccaggccctctgcacaggccttacccatgacctctgatcatggaccaggtgaagagttgcagctctcaccc

SEQ ID NO: 12649 - DNA, 120 bp, synthetic construct
  source 1..120: mol_type = other DNA
taatgtccatccagcctttaaatgttgcctgggaggaaaagacaagattaagacaatcatttaattctgtacctcgcttgagcttcttagggctctggtctggacagatgaagccagaag

SEQ ID NO: 12650 - DNA, 120 bp, synthetic construct
  source 1..120: mol_type = other DNA
atgagctcttgtgagctggcacaagctggctccagcataccacaccaagggagtaaagagggaggctgaaccagagggggccctagtgctggtggcattgtctgccctagtctgggctgc

SEQ ID NO: 12651 - DNA, 120 bp, synthetic construct
  source 1..120: mol_type = other DNA
acagcaagacaagcaagttgcagctctatgcattgtggttctattgcattggtcaaggctaatggtaggttaattttatggaatgtgtgataatcactgaagccaccatactcacaaaat

SEQ ID NO: 12652 - DNA, 120 bp, synthetic construct
  source 1..120: mol_type = other DNA
cacgttgtcaaagttgactttcaccttggtccagtacaattctccggtcaagttcaaggactcacactggctcttgttgttcacgatggtgtagttcaaaggcaagtctccctctgtctg

SEQ ID NO: 12653 - DNA, 120 bp, synthetic construct
  source 1..120: mol_type = other DNA
agttctccagtgctcccataagagcagagccagaaagcaggtggcatgggtactccctgtgatacccgctccccagtgaggggctctcagatcccatggagccacagcctcatgctctgc

SEQ ID NO: 12654 - DNA, 120 bp, synthetic construct
  source 1..120: mol_type = other DNA
gtgtagctgagacccctgtgcccagcaagtcttgcttcctctcctttgtccggtgctctcccagccctcatgggagctcacagggcttgagggtgagccctggaggtgggttctcacagc

SEQ ID NO: 12655 - DNA, 120 bp, synthetic construct
  source 1..120: mol_type = other DNA
ctgagaggctgctatgtgtacttcacatacatgctctgtaataaccctactaaccctgcgatgttgcgatgcgccacctctattctacagatgggaaaactgaattccaaagccactctg

SEQ ID NO: 12656 - DNA, 120 bp, synthetic construct
  source 1..120: mol_type = other DNA
aaagaaaatcagtcagttcacggcactcttctgttcagagccttccaattccgcccccctacccccatttcattctaaatcaaaggccatattttttcaaaggcagcaatctggctgcat

SEQ ID NO: 12657 - DNA, 120 bp, synthetic construct
  source 1..120: mol_type = other DNA
tattgaaaaataatgcagaattcatcttggaaacatccttccctagactctgaggcctgagacaaactttcccatgaagcatgcggatggggtaggggcacagcagcgtggccagtgcca

SEQ ID NO: 12658 - DNA, 120 bp, synthetic construct
  source 1..120: mol_type = other DNA
cacctgcaccctttgccttcgcttcctttgtcctcagtgagtgcaaacccaggcctgccctgcaccgacccgtttctctctgcttggctactctccctcttgactgacgtcaggccccct

SEQ ID NO: 12659 - DNA, 120 bp, synthetic construct
  source 1..120: mol_type = other DNA
tgaggaagtcgagccagcaccaggcattggtgaagtacttcttgaagccgtaggccacccacttgagcagcatctccagcacgaagacatatgtgaacatcttgtcggcatactcaagca

SEQ ID NO: 12660 - DNA, 120 bp, synthetic construct
  source 1..120: mol_type = other DNA
aaaaccagtgagagttgatgtaaagctgaatgttaaagaaactatattaaaagtcatttgtagatgtggtgtttaggaacaacaggtgtagataaagtcaaatgtcctgcaattctcagg

SEQ ID NO: 12661 - DNA, 120 bp, synthetic construct
  source 1..120: mol_type = other DNA
gggctcttctctaccaccccaccgacattgctgtcatttctcctttttcacttttcccagcctaatgaaagaaacttgtattttgttacattttcatttattttattaggagtgatgctg

SEQ ID NO: 12662 - DNA, 120 bp, synthetic construct
  source 1..120: mol_type = other DNA
cagtgcttggcatgtaagaaatatttgagagatgttacttgtgactaaacggtttctcttaggataatacaataatagcaacaattctttgcatatttatttcataactggccatataat

SEQ ID NO: 12663 - DNA, 120 bp, synthetic construct
  source 1..120: mol_type = other DNA
cagaagtatggagtatgaagcataaaaactggcctaggttttccttttggtatacttgaggttttaaaaatcagcactatttagtttttaaaaaaataatttctaggccaggcgcggtgg

SEQ ID NO: 12664 - DNA, 120 bp, synthetic construct
  source 1..120: mol_type = other DNA
tttatagcacactatcatcaccattggtgcatgagtggccttcttttgttaattagttaattaatcaattgaacccccctaaactaccaccaaactattttctgtttgatccaaggttta

SEQ ID NO: 12665 - DNA, 120 bp, synthetic construct
  source 1..120: mol_type = other DNA
tatatattatatttatgtgtatgaatatatatgtattttatacacacacacatacacacacatttttttttctttttttgagacagggttttgctctgtcacccaggctggaatgcagtg

SEQ ID NO: 12666 - DNA, 120 bp, synthetic construct
  source 1..120: mol_type = other DNA
caactttaaataacacactcagatttctctttttctcaatatatcattgacgtggttttttaacaacagagcttggctgtctaccctgattagattcaccagatgcttgccaaaactcct

SEQ ID NO: 12667 - DNA, 120 bp, synthetic construct
  source 1..120: mol_type = other DNA
cccctccagggctgttccatctcttcctagaagtgcttggagagattagagcagcatgcctgggagccagatggggcaaccctggaggtcctcactgctcctcctggcttcaacacctcc

SEQ ID NO: 12668 - DNA, 120 bp, synthetic construct
  source 1..120: mol_type = other DNA
cttcctgctctggcctccatacgtgccgtggggttgagagtttgtgagctgttccctgctctgggggtctggagagcacattttcagcagaggctctgccccagtttctgacctgacttt

SEQ ID NO: 12669 - DNA, 120 bp, synthetic construct
  source 1..120: mol_type = other DNA
ccacatgtcatccctgcctcaaggatttacagagggcctactatgtgtcaggcaccgtgccagggcctggtggtacaggagcgaattagacccagaccctactgctgttgggcatacagt

SEQ ID NO: 12670 - DNA, 120 bp, synthetic construct
  source 1..120: mol_type = other DNA
acattttgcgcagttcccgtgggttctggtgtgctggacagagcccggagactgagaaggtgatggagccctccacttcctgtccttgcaagtctgctgccctgacctcaataacttgat

SEQ ID NO: 12671 - DNA, 120 bp, synthetic construct
  source 1..120: mol_type = other DNA
ttgtctgaattcttgggcatggctatgctcctacagctgccttctctcttctcttttcctttgatgaatcaatctgctgatgtctcaggggcttcttttccatttttgagatctgtgatg

SEQ ID NO: 12672 - DNA, 120 bp, synthetic construct
  source 1..120: mol_type = other DNA
gatctcgaactcctgacctcaagtgatccacctgcctcggcctcccaaagtattaaaattacaggcgtgagccaccgtgcccagcctcctgaagtcttctttggatggggagattcacag

SEQ ID NO: 12673 - DNA, 120 bp, synthetic construct
  source 1..120: mol_type = other DNA
cggcttgcgtgcgcgcacgcgcgcgcacacacacacacacacccccacacacaccacacacacccaggagccagagtcaatgggctcaagagaaggaacagagaagggaaatgagagaca

SEQ ID NO: 12674 - DNA, 120 bp, synthetic construct
  source 1..120: mol_type = other DNA
tgccaaggcagtctgggaggggaagctgctttgagagaggctgggtggcccggacagcagagctctgggccctgtatatgtaggtgccttatacatgcaggggtgagggcccacctgctt

SEQ ID NO: 12675 - DNA, 120 bp, synthetic construct
  source 1..120: mol_type = other DNA
aggtctccttcctgggaagtgtgagtccagggacaagacagaatcccaccgagaagccacacagagcttttgggactttgttggaaagaggaggagcagtgacctgcctctgagttccct

SEQ ID NO: 12676 - DNA, 120 bp, synthetic construct
  source 1..120: mol_type = other DNA
ttggcttaaaagtaatacatattcatgtggaatatgtacagaaggtgaagaggtagcctctcccgtactatctctacggagagatgatcacttttgacacttggcactaggggtaaggca

SEQ ID NO: 12677 - DNA, 120 bp, synthetic construct
  source 1..120: mol_type = other DNA
ctcttcctaaggtgccttctctggtatttaaattttggcttttctcagttccagaattccccacattggaaagacacaagacgagatgcacctgcccaaggacagacaggtacccacagg

SEQ ID NO: 12678 - DNA, 120 bp, synthetic construct
  source 1..120: mol_type = other DNA
taatgggtagatgaacagataagtaaatgaatgaaaacagaatgagtaaataatgaataaataggtaagtaagtgggtaaatgaatgaatgagcaaaatgcagtgaagaggccaggcaca

SEQ ID NO: 12679 - DNA, 120 bp, synthetic construct
  source 1..120: mol_type = other DNA
gatagatggctgtatgagcatataggtgcaagaataaatgggtacattgaatagatggtttgttgataagtacatagatggatgggtaagtgagtgcatggggggggtaggtgaaataaa

SEQ ID NO: 12680 - DNA, 120 bp, synthetic construct
  source 1..120: mol_type = other DNA
ctcaatcagaactcccaataaccacatgaggttggcaccgctattacctcatttgacagaagaagctgccaaccctcacaggtggagtaacttgtctaagtcccttggttcatagcagct

SEQ ID NO: 12681 - DNA, 120 bp, synthetic construct
  source 1..120: mol_type = other DNA
ccctgttggaagtagtagtaggggtcgagggcaatgatcttgaaggtcatctctgctgtgaaaatccctgtgaagacctgaggagggagcaggaattgtttgggatggaaagactccctg

SEQ ID NO: 12682 - DNA, 120 bp, synthetic construct; identical to SEQ ID NO: 5312
  source 1..120: mol_type = other DNA

SEQ ID NO: 12683 - DNA, 120 bp, synthetic construct
  source 1..120: mol_type = other DNA
tgtttattgagcctcttctgtttagaagataagctgtgtgatggcagggacctttccctactgtacctggaatggtaaccagcccataggtcgtcctctagtatctgttgaatagatgta

SEQ ID NO: 12684 - DNA, 120 bp, synthetic construct
  source 1..120: mol_type = other DNA
ggagctttaaaaatatggatgcctgggtcgcatccaagagattctagttacattggactggagtggagcccaggtgtggggatttaaaaaaaaaaaaaaaacccaacaacttcccaggtg

SEQ ID NO: 12685 - DNA, 120 bp, synthetic construct
  source 1..120: mol_type = other DNA
aatgaacgtttttagagattctgacacatagtgctaaatgatcctaggagaaaggttttaaccaagtccacaagctgcatgtgagtaactgcttccctttaactatgctaacactgggta

SEQ ID NO: 12686 - DNA, 120 bp, synthetic construct
  source 1..120: mol_type = other DNA
cagtaattcaaatgatggcttccactatgaattcttacccatcatgtgccatcacagataaaccaggagccacccatagtactatattcattccaaggtaatcactatcccaaatttgat

SEQ ID NO: 12687 - DNA, 120 bp, synthetic construct
  source 1..120: mol_type = other DNA
ttttgctttatcacatttaggtgttaagtccaattcccctgcatctaatttatgaatgtgatgtgaggtagggatctaaattgattttcttccatgcagataaccattctcccagcatca

SEQ ID NO: 12688 - DNA, 120 bp, synthetic construct
  source 1..120: mol_type = other DNA
ttattttctccagctgattgttgatggtgactaggaacactacttggaatactgaggctgtaccccctaatattgttgaactctcgtattagttctaacagcctctctgtagattttcta

SEQ ID NO: 12689 - DNA, 120 bp, synthetic construct
  source 1..120: mol_type = other DNA
ggccaattatgaacatttttatcatctctatcaagcagttctactatgtgacatttttaaggggatagcctgattgtgtctgcgtgtgtgtatgtctgctgactcttcctcatggtggaa

SEQ ID NO: 12690 - DNA, 120 bp, synthetic construct
  source 1..120: mol_type = other DNA
tatagagcgtggatacgctgaacaaagggacaattcatgtcccggagcagaatagagcaggacagtgtgagatttcatcataatactcaaaacggtgtgccatttaaaactaatgaattg

SEQ ID NO: 12691 - DNA, 120 bp, synthetic construct
  source 1..120: mol_type = other DNA
ctttgccttctgtttgcacatagaaggaaagaaaagtaaaattacagcaagttgactcaaattggtgaaaaaatctgaataggccctgcagagaactacctagagtcctgggtttggaaa

SEQ ID NO: 12692 - DNA, 120 bp, synthetic construct
  source 1..120: mol_type = other DNA
gagaactacttccttctgcacgcattctcctccacctacaaattacaaaatctcaagtctccacacatttcaggtttacccccagctcacttttgttttctagattctgggcatctgcat

SEQ ID NO: 12693 - DNA, 120 bp, synthetic construct
  source 1..120: mol_type = other DNA
agattatcaggacaaacgtacaactgcttaagacaacagtcccacatagacctggggacactcaggggaggacaggctgaaaatgatgagacagtaatggggacatgcaagttcagacac

SEQ ID NO: 12694 - DNA, 120 bp, synthetic construct
  source 1..120: mol_type = other DNA
agtttcctagcgtcaagagcataaagaagctgaaaaaaaaatctaacatgctctaagataatgctaatagcaggataaagtacaatgcttacatatggctggtggggggctgtgtctttt

SEQ ID NO: 12695 - DNA, 120 bp, synthetic construct
  source 1..120: mol_type = other DNA
tgcaatggtactaccctaggtccaacgcaaccatgaatttggccagcttaactcacaagcaagttttaaattctcccaacttctcccctccttctttgccatctatgatagtttggttat

SEQ ID NO: 12696 - DNA, 120 bp, synthetic construct
  source 1..120: mol_type = other DNA
tgcctgtcaattttaatgttaccttcttgggaaggcctttcctgagtattctaatagccctcatcctcatccctccccttagcagctttctatcacatgacttattgctacctgaaaata

SEQ ID NO: 12697 - DNA, 120 bp, synthetic construct
  source 1..120: mol_type = other DNA
tcaaatgtctccatcttggtttgctaattcctttaactttgcaaatgaccctgtcttggcctgctaatccctttaaggttacaaatgggccccacagaagtgagaatgggtgaagtcaga

SEQ ID NO: 12698 - DNA, 120 bp, synthetic construct
  source 1..120: mol_type = other DNA
agttctgcctcagggccttcacatttgctgttccttgtgtctggaacaggcttccccagatgatggtaatgaaggctttactagttgtgacatagttaactatcatccctctttatcacc

SEQ ID NO: 12699 - DNA, 120 bp, synthetic construct
  source 1..120: mol_type = other DNA
tctgcttcagaacccaggtctcgcctgcgaaaggtgaaaatgctcccgcggctggaacgtggcttcatagaagtcctgctgaggccacgggtgaggctgagatgattctaagggcatgag

SEQ ID NO: 12700 - DNA, 120 bp, synthetic construct
  source 1..120: mol_type = other DNA
ccatcattgagactttgtgcagcctcaggctcaggcaggccaggcaactctcagtgacttggttttccctatcagtaagtggacttgcacacctaccccaaaatgaggacatcatggaga

SEQ ID NO: 12701 - DNA, 120 bp, synthetic construct
  source 1..120: mol_type = other DNA
agcagatgtcacttttacctagtaggctcctcactaacaggcacgtcttaacccagcaggttccaaatttttactcagcgataccacattcacagaaaatatctttacccagcaggcact

SEQ ID NO: 12702 - DNA, 120 bp, synthetic construct
  source 1..120: mol_type = other DNA
ccacacacagagactttgttccatgccgtcaggggtctgctgcccttgagacccttgctgggctggacttgtctccctgggcaacccagtttatgccccacagctcagtgaagctgagct

SEQ ID NO: 12703 - DNA, 120 bp, synthetic construct
  source 1..120: mol_type = other DNA
cgagggacttagcaagtggatggatgcatccaagggacctctgtgtcttgctaatgccccaagaccctccagacaatctctttggtgacaggaaggaggcaacaaacttggtacttctcc

SEQ ID NO: 12704 - DNA, 120 bp, synthetic construct
  source 1..120: mol_type = other DNA
ctacaccagacaggactgcccgtcttgtcctctcctttctgtggcaagtcatcagtccccaacactcaccattacctggctttgtcttaggcgacagttgtcaaagcatggtcctcgaac

SEQ ID NO: 12705 - DNA, 120 bp, synthetic construct
  source 1..120: mol_type = other DNA
ctgacactctgtgggcaggctggtcaccttgccattgcaacactctagggtcagtcccatctccaaatgccgcagccaactggccctctatctaactccatactttccactcctcaagca

SEQ ID NO: 12706 - DNA, 120 bp, synthetic construct
  source 1..120: mol_type = other DNA
cctttggctagtctgaaggtgtgctaggcctaccccttttaatgtagtccatggaaaaggagatggaggcaattgaggggcctcagccttgatcttgagatggggagaaatagagccatt

SEQ ID NO: 12707 - DNA, 120 bp, synthetic construct
  source 1..120: mol_type = other DNA
gacatagtggccaagggtaactcacccctttgaacatttctcatactgatgatagatttcacttctggcaagaatggttgcaacgaaactgcaggattctttctgaaaagacccaggaag

SEQ ID NO: 12708 - DNA, 120 bp, synthetic construct
  source 1..120: mol_type = other DNA
tagctcaatgcaggcctgggagccaccaggttccacatcaggtgcggatgtagccatctggttcaaccgatgcttccgtcagctctcacacctccctagaatgatggcatgcaacctatc

SEQ ID NO: 12709 - DNA, 120 bp, synthetic construct
  source 1..120: mol_type = other DNA
tgctggagttttcctctttcactccgggtgtgtgtgggggttcccacaaacacacttcttttggtttcctcatcagaatctgacatttcaggctgaagcaattcatgtaaaacttttagc

SEQ ID NO: 12710 - DNA, 120 bp, synthetic construct
  source 1..120: mol_type = other DNA
gggataactgaaatagtttttagagctctcaggactctgaaagttcgaagagccgacaaattgcctagttttatattttctgatacatacctgcagaatcaaaccacagttattgggaat

SEQ ID NO: 12711 - DNA, 120 bp, synthetic construct
  source 1..120: mol_type = other DNA
tgtgtgaccaaggccatcaggacagtggcaagtgacttgtgacatttaatcaaaggctttgcatccagggtgtgtgacatttaaccgaaggtgtctggtatttaacaaaggacattggac

SEQ ID NO: 12712 - DNA, 120 bp, synthetic construct
  source 1..120: mol_type = other DNA
ggctcatatacacctgttaatttgatccaagttccctctcaacttctgagagctattccattctccacgacggctcagactctcagggctctgtccaacattcttctctcggtctctctc

SEQ ID NO: 12713 - DNA, 120 bp, synthetic construct
  source 1..120: mol_type = other DNA
ctctctgcccttcctcccttcccctccaggtttggtttccataacaaccccagaaggtgggaggctatgctaactagcaggtaatgcccttctgtgagtggggccacaggaagagctctg

SEQ ID NO: 12714 - DNA, 120 bp, synthetic construct
  source 1..120: mol_type = other DNA
tggatgtgccatttctgtgagatgcttggaaacgtggagagtgtctgagcttctgaggccgagttctgccttgtcagcctcggccctggcacacagcaaaggcaagcaggtttcggtgag

SEQ ID NO: 12715 - DNA, 120 bp, synthetic construct
  source 1..120: mol_type = other DNA
ccagatgagatgttggggcatcccacagtacattcaggctacaggctacactcatgcctaggtgatctcatctggtctcctggctttaaataccatctgtatccccatagcttctaaatt

SEQ ID NO: 12716 - DNA, 120 bp, synthetic construct
  source 1..120: mol_type = other DNA
catactgggtttggggcaagtaagtggtattgtctctcagagccagttttcccacttgtaaaatggagggctagagttggcttacaaatagtgtacctagagacagagattctgatgcat

SEQ ID NO: 12717 - DNA, 120 bp, synthetic construct
  source 1..120: mol_type = other DNA
tctcttggctgcaatttcattcttaatcatcttggaatccaggtcaccattcgcagtgggccaggggttgaaatattggtttctcttggtggaaagggcagaggatactaaaccagaatc

SEQ ID NO: 12718 - DNA, 120 bp, synthetic construct
  source 1..120: mol_type = other DNA
gctctaaacatctggctaacgaatccatcgtccaatttgtttattccatattatcgtgtaactgccatgtgtccatctgaactctctgtattctctctcggttgtcttggtggaagaaga

SEQ ID NO: 12719 - DNA, 120 bp, synthetic construct
  source 1..120: mol_type = other DNA
attattatttcagaactttctccaatgtcatcattcctctttaggcaggacagggagaaactttctactttgccactctggagagcttcctccctagaaggcacaactcaaattaatgcc

SEQ ID NO: 12720 - DNA, 120 bp, synthetic construct; identical to SEQ ID NO: 5347
  source 1..120: mol_type = other DNA

SEQ ID NO: 12721 - DNA, 120 bp, synthetic construct
  source 1..120: mol_type = other DNA
ggcatcacttcaggccctggggtccctccgtcagtttggtatctgcccagccctctgcccgtgtgagggtgtccagggccaggcttatatccctctccagctttcaaggcaggatcagat

SEQ ID NO: 12722 - DNA, 120 bp, synthetic construct
  source 1..120: mol_type = other DNA
tatccaggtagactcagtataatcacaggggtccttttaagcaaaagagaggcagagtgttgtgacatgaaattcaaccggtcattcctggcttgatgatgacagggaaccacagactaa

SEQ ID NO: 12723 - DNA, 120 bp, synthetic construct
  source 1..120: mol_type = other DNA
gcaagctcttgtctctctgccacttcactgctcaaaatccttgcctggttcccatggccttgaggacagcacttgcacaattgtcaatccttcttctgcacgtatgagatctcttccttc

SEQ ID NO: 12724 - DNA, 120 bp, synthetic construct
  source 1..120: mol_type = other DNA
gtttgtctttgccccacttaccattcccaaagggcgttgcacagaactttgcacatgtggaacttagatgtttgaatgagcataaaaatttaagcacagcaaaagttcaccattcaaaac

SEQ ID NO: 12725 - DNA, 120 bp, synthetic construct
  source 1..120: mol_type = other DNA
tatatgaagtagtatacctcaagttaaaaaaaaatcatggagcacttacagatttctaggcctcacactggtgattctggtctggaaagagctaagaattttgcatttttacaaacttcc

SEQ ID NO: 12726 - DNA, 120 bp, synthetic construct
  source 1..120: mol_type = other DNA
ctataaaattcccaaggggcccagacggggtcttattcggctcgataccccagcgtgcctagcaaagagcctgacacctacagggaactcaggatggctcaagatgaaatctagacccac

SEQ ID NO: 12727 - DNA, 120 bp, synthetic construct
  source 1..120: mol_type = other DNA
gagcttttttcagctgtggtttatataatttaatgctaaccagagttctttgagatactctgaaactgcaaacattttgtcaacgcctaatcaaaaagcaagtgctgcctccctcaaaag

SEQ ID NO: 12728 - DNA, 120 bp, synthetic construct
  source 1..120: mol_type = other DNA
gtggaggtgagggagatctcaggggaatgtccggttggttgagatttagtttcaaaattatagtcacaaaaagaagggagcttttacagtccttgcccagctgttgtcacagcagaggct

SEQ ID NO: 12729 - DNA, 120 bp, synthetic construct
  source 1..120: mol_type = other DNA
tgaaccaagggaaagttcagctgggggcttgggagcaggaccaagttcaaggcctcctcccccacctgtttatgtggactgggtgggcttttacttcacatgcacaaccactcacgtatc

SEQ ID NO: 12730 - DNA, 120 bp, synthetic construct
  source 1..120: mol_type = other DNA
ggcgtgttttccctgaggctaccctctcttcttcattacaccaaaccagcatctcaggctgcataattcctgtttttattccagaattccaaaattaaggtgattggaatatagatcacc

SEQ ID NO: 12731 - DNA, 120 bp, synthetic construct
  source 1..120: mol_type = other DNA
cttctttttgccccattccacacaacaggaaacacttacatcttttggtttcttaactgtcatcacttgagacatttctcagcttggagttgtcatccagatgttggcaccctagtgtac

SEQ ID NO: 12732 - DNA, 120 bp, synthetic construct
  source 1..120: mol_type = other DNA
tgaattgctgtgaagcaggcacctggccaaaagacaggtaaatagtgagcaaacacaacacactcaggcctcaaaagggcgccgctcgtccctggggaagtgtggattgagatttgtgaa

SEQ ID NO: 12733 - DNA, 120 bp, synthetic construct
  source 1..120: mol_type = other DNA
acagagtgtgcgtgtgcgggtgcaagcttacacctgcacatacgtctgttctagtaaaggtgtgtttttaatttgtattaaataaaggattcatgcagttacatgcacataagtgtacag

SEQ ID NO: 12734 - DNA, 120 bp, synthetic construct
  source 1..120: mol_type = other DNA
tggcctctggctctgacttacctgaactttgtgtcatttctgggtgtggattgggaccccagtctgccccacccttggacctgagaaattccattctgagtcttgcagtggccctgtggg

SEQ ID NO: 12735 - DNA, 120 bp, synthetic construct
  source 1..120: mol_type = other DNA
cctccctctttccttctatcccacacatgcagccccctgctcctagatttagacattctccaaaattctgtgtgccctgagtgatgccagagtcacctcctgctctcctccccactctac

SEQ ID NO: 12736 - DNA, 120 bp, synthetic construct
  source 1..120: mol_type = other DNA
ccttggaatcggagcctctggaacacagcatgcaaataatattctttgccatgtaaatttatgcaaagcattgtgtggaagtggttcccaggcttcctagaaaatccctgtgggcttcct

SEQ ID NO: 12737 - DNA, 120 bp, synthetic construct
  source 1..120: mol_type = other DNA
tttcctgttcctagggataaggaagtggttagggctgtgcttggaagccagctcacctgagtgaatctgggccctggccatgcatttgtcttgtgtctttgggcagattgattgatgttt

SEQ ID NO: 12738 - DNA, 120 bp, synthetic construct
  source 1..120: mol_type = other DNA
aatgtggctactgtggactgagttgtgctattgtaaagtcacatccattttgcaggcttagtacaataaggaatgttgactatttcgttaataacttttaatattgattacaagttaaac

SEQ ID NO: 12739 - DNA, 120 bp, synthetic construct
  source 1..120: mol_type = other DNA
tgcccatcctggtttctggcagtggctgtgggtggttgtggaggctcaagccacaggttgggatggtgggggatgtaagtgggagagatcgacagtaagtttcagaccatccctcccgcc

SEQ ID NO: 12740 - DNA, 120 bp, synthetic construct
  source 1..120: mol_type = other DNA
tcaggccagaaaggtgcccacatgtggcccaggaaacaccgtcatggcacacaggtgcccgagacagcaatcagcgttctaagtctctttctagctcaattccttccaactcatttttct

SEQ ID NO: 12741 - DNA, 120 bp, synthetic construct
  source 1..120: mol_type = other DNA
gctgtttttactcaacacgatgtttgagatttttaccttttatttgttggcgagtgtgatctaagctccctgtgtaatgcactgtgaatacaagtcacccatctggggacgtgtccttaa

SEQ ID NO: 12742 - DNA, 120 bp, synthetic construct
  source 1..120: mol_type = other DNA
cgagagcagctccatccctccactctgctaatacctctgtggggacatgactttccattgcctccctaggagatttaaacagaagaagaaactgaagaggagagaaagaactgaagcctc

SEQ ID NO: 12743 - DNA, 120 bp, synthetic construct
  source 1..120: mol_type = other DNA
ccaggctctgagaattgatgtggggtctctataaatagcgtcattccatattgatcatcttaaaaagacacggtatgttctaggcccacggataggagagttgtgtctaaaaatagtctc

SEQ ID NO: 12744 - DNA, 120 bp, synthetic construct
  source 1..120: mol_type = other DNA
tccctcccagagattcacagaaagagttattccctctacccaggccttcctgactgccccctgaacaaacagtaaccactacacacttcactggtacgatcttaactcacagacctgcag

SEQ ID NO: 12745 - DNA, 120 bp, synthetic construct
  source 1..120: mol_type = other DNA
gtcacttttcctttgctcttcatcaagcttgccaacccaaatttaacttgcccattcttcttctcatggtgcgccagggggcagcacacctcacttagtgagacattggaggtggggaat

SEQ ID NO: 12746 - DNA, 120 bp, synthetic construct
  source 1..120: mol_type = other DNA
ccagtgtggaaggttatttttgttagaataagattcttgactattccggccaaaggtaaccacctctcctgtgaatgggctctggggacacacttctaccactgcacacccttccaataa

SEQ ID NO: 12747 - DNA, 120 bp, synthetic construct
  source 1..120: mol_type = other DNA
gatctggctgtgctctgctctccaacaggtgtttgcaaggcaggcctacagccagggacttgtccccaacatcatttccccccatcctcatcaccaccactaacagtccccacacctctg

SEQ ID NO: 12748 - DNA, 120 bp, synthetic construct
  source 1..120: mol_type = other DNA
ggtgtttagagacgtctcccccggggataccctccagccgggcggatctgcgccccttctccccctccggctctctggggcactgatcggggagggagcggctgggcggacccggggcag

SEQ ID NO: 12749 - DNA, 120 bp, synthetic construct
  source 1..120: mol_type = other DNA
ctggccgggcggctaggagttcccggaagtgcccgcgcagccggtttccggtgcaggtggggaaaatggcggtgtctacagtgttctcgacttcgtcgctggtgaggagagagaacgttc

SEQ ID NO: 12750 - DNA, 120 bp, synthetic construct
  source 1..120: mol_type = other DNA
gctgttataaagtaactaactttgcctctatcttcccctcctacccccatccctatctttattcttttttttttttcctgcagacccagggactcgatctttattcttttttgatgtagg

SEQ ID NO: 12751 - DNA, 120 bp, synthetic construct
  source 1..120: mol_type = other DNA
cgcgcccggcctgttgtttcccttcttttttctttttttcgtagagacaggttctcactatgttgcccaggctggtctcaaactcctggcctcaagtgatcctcctgcctcagctttcca

SEQ ID NO: 12752 - DNA, 120 bp, synthetic construct
  source 1..120: mol_type = other DNA
aaaaaataaataaaatagggaagtacaatcatccctttgtatccatgggatgactgttgtaggatccgctgtggatatcaaactctgcagaagctcagtctcttatataaaatggcatag

SEQ ID NO: 12753 - DNA, 120 bp, synthetic construct
  source 1..120: mol_type = other DNA
gccaccgcacccggcctccagtgataatttaacacaactcataccagtatcacacaattccctggaactatgtgacaaccattattgtttcttttatggaatgctgccttgatactaaca

SEQ ID NO: 12754 - DNA, 120 bp, synthetic construct
  source 1..120: mol_type = other DNA
gtcatgccactgcacccagctttttctgacttttgacagtttgattaaaatacgtcgcagtatggacttctttgggttcatgttaattgagatctgttaggcttgaatctggatgtccac

SEQ ID NO: 12755 - DNA, 120 bp, synthetic construct
  source 1..120: mol_type = other DNA
agggtggtcttgatctcctgacctcttgatccactcgccttggcctcccaaagtgctgggattacaggcatgagccaccacgccgggcctaattttttaatttttatgtatttttatttt

SEQ ID NO: 12756 - DNA, 120 bp, synthetic construct
  source 1..120: mol_type = other DNA
caaaaaaaaaaaaagtcagaatattagatgcacactccactcccctcaaccctgggagaggccactgggctgtattggcctttctctgcagtttcagggatcctctggatcagcagcagg

SEQ ID NO: 12757 - DNA, 120 bp, synthetic construct
  source 1..120: mol_type = other DNA
gcactggttagggacacatttgcagttaggactgtgttttaattctaattgcagttactatttggatgattttgggtgagttattgaaccttcctgagcctctgtttccttggctataaa

SEQ ID NO: 12758 - DNA, 120 bp, synthetic construct
  source 1..120: mol_type = other DNA
aactgatgaatccatagaaaccaaaagagcccgcctgctctatgagagcagaaagaggggaatgttggaaaactgcattcttcttaggtatgggactaggagtctttttttttaaatcgg

SEQ ID NO: 12759 - DNA, 120 bp, synthetic construct
  source 1..120: mol_type = other DNA
aatttagtggaagggtatatgaagctcacagtatcaaaggttgaagaagaaccactctgggaatggagtggaatcagacaactaagtctgcatagccaaagctcctcaatagtttcattc

SEQ ID NO: 12760 - DNA, 120 bp, synthetic construct
  source 1..120: mol_type = other DNA
ttgtatcagaaagtagcagccattgtctatgggttccaggtatgaagagtgataagacagagtctggagccttatacaatcactggaaagccaacaaagtccaaatatttactctccaac

SEQ ID NO: 12761 - DNA, 120 bp, synthetic construct
  source 1..120: mol_type = other DNA
cagcctctcataactactcacctcgacctttgtagcatgaaagcagccacagatagcaggtaaacgaatatgattgtgtttcaataaaaccttatttgtggacactgaaaatagaatttc

SEQ ID NO: 12762 - DNA, 120 bp, synthetic construct
  source 1..120: mol_type = other DNA
ggtgttggatgtgaagggaggggttggtgttccacatctttacccacactttgtattatcagggttttgtttttgtttttagccattccaagaagtatatattggtacatcactatagtt

SEQ ID NO: 12763 - DNA, 120 bp, synthetic construct
  source 1..120: mol_type = other DNA
taccttcagtgcatcaccagcttcatattccctccggtgttaccatgtgctgttttctcatttccatagtttgtgacgaggtctgctgtatctttgttcctttttatgtgtcttctcttt

SEQ ID NO: 12764 - DNA, 120 bp, synthetic construct
  source 1..120: mol_type = other DNA
gtgtatatgtctcgtaattttctcataattgtatttatgcttacaattggggatgcttcttctactttactgttagtgtggggatcaagtcagtgagttgggaggtaagctcagcttggg

SEQ ID NO: 12765 - DNA, 120 bp, synthetic construct
  source 1..120: mol_type = other DNA
gggacaggtcgaaattcctgtgctgatcagtggtggaattgcacctctgactagccactgcagtctcccctgggcaacataaggctggccctgtctgtattaatttaaaacaaatttttt

SEQ ID NO: 12766 - DNA, 120 bp, synthetic construct
  source 1..120: mol_type = other DNA
ttacagtgagtgcaatattctttccaactttctactttcttgggggaagccaaaacctctttgatcttatgttgattgtcacatgaaaacagagccctcactagatgccaggccctgtgc

SEQ ID NO: 12767 - DNA, 120 bp, synthetic construct
  source 1..120: mol_type = other DNA
aattttttctgcccactcttctcttgcagaagctaaaccagccccagaaatatttgaaaatgaagtcatggccctgctgagagactttgctaaaaacaaaaacaaagagcagagactgcg

SEQ ID NO: 12768 - DNA, 120 bp, synthetic construct
  source 1..120: mol_type = other DNA
ctctgagctggttataaatcatgtttagcatggaaacagttaaactgaagctttcttctccttataggttgccatcattttcttgatctctgcaatagctttccctggattcagaccctt

SEQ ID NO: 12769 - DNA, 120 bp, synthetic construct
  source 1..120: mol_type = other DNA
cccactgaatgccagcttcattgaagtagaaagtaggaagtactttaccaagtacttgcttttaccaagcaagtacttggtaaaatgagacaagtactcatctgacgttagtgaaggttc

SEQ ID NO: 12770 - DNA, 120 bp, synthetic construct
  source 1..120: mol_type = other DNA
gtgggtgaaaaaatacagataaatgtgatataagaaagacagaagaggacacatatgcatttgtgtgcagcataaaacacctctgaagttcacacaagaatctgacttctagggaggtgg

SEQ ID NO: 12771 - DNA, 120 bp, synthetic construct
  source 1..120: mol_type = other DNA
tgcaccttagagtcactcgcagagcttctgaagaaacacacagccaggccccaccactgaagatgctatctctgtctcaaacaagcccagtactcatgtttttttaaaaaataacataag

SEQ ID NO: 12772 - DNA, 120 bp, synthetic construct
  source 1..120: mol_type = other DNA
cttccctgcccactgggcaaggctgactggaccagggctgacacctgctatggtttgaatgtgtccccaaaagctcatgtgttgaaaacctaatccccaatgcaacagtattgagaggtg

SEQ ID NO: 12773 - DNA, 120 bp, synthetic construct
  source 1..120: mol_type = other DNA
ttgccatggggtaatacagcacgaaggttcttgttagatgctggcgccagcctctagagctgtgcgtcaaataaacttctttataaaattacccagtctgaaattctgtgatagtaccac

SEQ ID NO: 12774 - DNA, 120 bp, synthetic construct
  source 1..120: mol_type = other DNA
caatcaacaggccagagcggcaccctggctcaactcaaagctctgggagtgcagaggaaagggaattcactcagcttagatgcctcatctccatactctttaattcttgtccatctttca

SEQ ID NO: 12775 - DNA, 120 bp, synthetic construct
  source 1..120: mol_type = other DNA
gtgggaaaatgagaaagagaagttggtttttgagttgcctagagtctgtgaaaagcacgtatctaaaaaagcacaagctttctgggaacaaagacagtgactttctttgcagtgaacatc

SEQ ID NO: 12776 - DNA, 120 bp, synthetic construct
  source 1..120: mol_type = other DNA
aagaacctctcacttgtctaaaaaagaaatagaaaacaagaacacaaaaacaactcccataaattccagcttcctggaatgaggtcaagacgggagagattcaaaagcctaggggctgaa

SEQ ID NO: 12777 - DNA, 120 bp, synthetic construct
  source 1..120: mol_type = other DNA
cagtagaaagcaaagtgtaagttaatgcttatgaacaattttaagaatatgaagaaaatgctcacaataacataagtgaaaaaagcaggatataaaagcatatttacattttgatcccag

SEQ ID NO: 12778 - DNA, 120 bp, synthetic construct
  source 1..120: mol_type = other DNA
ttgcccaggctgaagtacagtggcacaaccttggctcactgaaacctccacctcccgggttcaagagattctcctgccttggcctcctgagtagctgggattataggtgtgagccaccac

SEQ ID NO: 12779 - DNA, 120 bp, synthetic construct
  source 1..120: mol_type = other DNA
aagtagtgtagaagaagaaagactgaaaacttgataatgatgcctccgctttaagattttacagcttgtacacaggaatggcaactcccagagagtgagcaggccaggaataatcccacc

SEQ ID NO: 12780 - DNA, 120 bp, synthetic construct
  source 1..120: mol_type = other DNA
ctcgtccactctatgccaggcagaagccagactcttttcctttgtcatgaatatatgcaaagattacaaaaggaaaaatggtcacaatgttaagcatggttaggaaacctctccctcacc

SEQ ID NO: 12781 - DNA, 120 bp, synthetic construct
  source 1..120: mol_type = other DNA
tctcccttccttccttcttcctgcctcgaatgtggttctaatggcttgagttccaaaaactactctatgaccatgtggcaaccttgaggttagaagccacatgccaagtatggcactgga

SEQ ID NO: 12782 - DNA, 120 bp, synthetic construct
  source 1..120: mol_type = other DNA
tcccaccacagcctcctgagtagttgggactacaggcacatgccgccatgtgcggcgaattcaaaaaaattctttgtaggttgggtgaagtggctcacacctggaatcccagcactttgg

SEQ ID NO: 12783 - DNA, 120 bp, synthetic construct
  source 1..120: mol_type = other DNA
ggtgttttggaatttaaaaatgattatgtactctaaacctctagtgccagtcctctgaagctgttttttgaagatcattaggtcagagaaacctgattgcttgagaaagttgcactggtt

SEQ ID NO: 12784 - DNA, 120 bp, synthetic construct; identical to SEQ ID NO: 5403
  source 1..120: mol_type = other DNA

SEQ ID NO: 12785 - DNA, 120 bp, synthetic construct
  source 1..120: mol_type = other DNA
tccatcagcatttgcaacgctaaataagattagctgaatcaaaacagatgtcttaaaagacttgaaatgcttgaaatgtacagctgaacagataaaaagccatgggccggtatcaatact

SEQ ID NO: 12786 - DNA, 120 bp, synthetic construct
  source 1..120: mol_type = other DNA
ccggcagtaattatatttttctaatacagaaaatgaatacattgctattcatgtagaaaatgttagtctgcacactgcctcaaatgggctcatgtggcaccagcagcacaagtaaccaca

SEQ ID NO: 12787 - DNA, 120 bp, synthetic construct
  source 1..120: mol_type = other DNA
aattaataatacataaccataagagaagacatagtacagagaataaaagacacccaatcactcacagtcccccagtcaaatcactgtgagcctcctagaacatacaagggcagtgacatg

SEQ ID NO: 12788 - DNA, 120 bp, synthetic construct
  source 1..120: mol_type = other DNA
gcctcaagagatcctcctgcctcagccccccagtagctgggactacaggtatgtgccaccacatccagcttaatttttgtatttttttgtagaggtgggatttcgccatgttgcccaggc

SEQ ID NO: 12789 - DNA, 120 bp, synthetic construct
  source 1..120: mol_type = other DNA
gctattctttcttttataacattatctatcacttttaagcctaaacagaccactgcccttcctgaggtctgataaatactttacatttttttctacttaaaaaaaattttaagttactcc

SEQ ID NO: 12790 - DNA, 120 bp, synthetic construct
  source 1..120: mol_type = other DNA
ccaggctcaagtgattctcccacctcagcctccaagtagctgggactataggcacaggaaggtcatcaagcccagctaactttttttgtagagatggggttttgtcttattgcccatata

SEQ ID NO: 12791 - DNA, 120 bp, synthetic construct
  source 1..120: mol_type = other DNA
aaacatggtacaatataaaatgaagactgacagacataggttgaaataaacatggacaaattatgcataataaaaaactaaactacatttgatttctgtataccagttttgtgtcctcca

SEQ ID NO: 12792 - DNA, 120 bp, synthetic construct
  source 1..120: mol_type = other DNA
agagcgaaaactctgtctcaaaaaaaaaaaattctcctgcttcagccttccaaaatgctgggattataagcacaagccactgagcctgcccaaggttttgtgtaaaagattatgttatct

SEQ ID NO: 12793 - DNA, 120 bp, synthetic construct
  source 1..120: mol_type = other DNA
tttaaaaaaataattactcttggctgggcatggtggctcacacctgtaatcctagcactttggaaggctgatgcaggaggactgcttgagcccaggagaccagtgtgggcaacatagtga

SEQ ID NO: 12794 - DNA, 120 bp, synthetic construct
  source 1..120: mol_type = other DNA
ctgaacgtggaattccaggctgacaatttttcttttagtactttaaagatggtatttcactgtctcttggcctctagtttctgatgagaagtcagcaatttttcacctggtttccttgta

SEQ ID NO: 12795 - DNA, 120 bp, synthetic construct
  source 1..120: mol_type = other DNA
tttcccttttcaaaaatctttctttttcttaagaacagataatttcggccgggcatggtggctcacgtctggaatcccagcactttgggaggccgaggcgggtgaatcacttgaggtcag

SEQ ID NO: 12796 - DNA, 120 bp, synthetic construct; identical to SEQ ID NO: 5414
  source 1..120: mol_type = other DNA

SEQ ID NO: 12797 - DNA, 120 bp, synthetic construct
  source 1..120: mol_type = other DNA
gagcccaggagtttgagaccaggctgggcaacatagtgaaactcaatttctacaaaaaatacaaaacttagctgggtgtggtggcatgtgcctatagtcccagttactcaggaggatgag

SEQ ID NO: 12798 - DNA, 120 bp, synthetic construct
  source 1..120: mol_type = other DNA
acaaataaaacacttattcacttacacataaaacagatcagagaacagttctggttatatgggggcgtggagtggagcagcaggaggctagagactaacttgctagattctttcttttct

SEQ ID NO: 12799 - DNA, 120 bp, synthetic construct
  source 1..120: mol_type = other DNA
aactctccttcaatagctggctttcacagagatactcacttattaaggtcaacttcataagtctgcatatgaggtttgtctccagccttgtctgggtcccatcgatagatggcaaatttc

SEQ ID NO: 12800 - DNA, 120 bp, synthetic construct
  source 1..120: mol_type = other DNA
agtaaaaactcggaaggttaattgactaattacaaaaagatgcagtggtgtttattactgaggcaggagaacagggtttagagacagggagtcttcactacagcctctgattcgtctcgg

SEQ ID NO: 12801 - DNA, 120 bp, synthetic construct; identical to SEQ ID NO: 5419
  source 1..120: mol_type = other DNA

SEQ ID NO: 12802 - DNA, 120 bp, synthetic construct
  source 1..120: mol_type = other DNA
acaaaacaaaacaaaaagaagaaaataatactgagactccacatactcttctcacctgtaatcccagcactttgggaggctgaggttgggaaatcacctgagatcagggattcaagacca

SEQ ID NO: 12803 - DNA, 120 bp, synthetic construct
  source 1..120: mol_type = other DNA
tttttcttgttatagctgagtagcactccaaggtatcatgtaccacaatttgcttaaccatgtaactactgagggacattgggggtgttctaatttttggtgacatgaataaagctgaga

SEQ ID NO: 12804 - DNA, 120 bp, synthetic construct
  source 1..120: mol_type = other DNA
tgtctggccctaacttggacttttttttttcttttttggagagtctcattctgttgctcaggctggagtgcagtggcgcgatcttggatcgctgcaacctccacccctcaggctcatgca

SEQ ID NO: 12805 - DNA, 120 bp, synthetic construct
  source 1..120: mol_type = other DNA
ggctctatcaagctgggtatcagaaccacaaggcctgtgggatgactgtggttacctgcaatgaggttttcccttcaacatttctttataacatttaaatatctgtttcatatccactct

SEQ ID NO: 12806 - DNA, 120 bp, synthetic construct
  source 1..120: mol_type = other DNA
tgttgttcccagttaaaagacgaggataggatcatatagcaacacaggtcacttgattcaaaaatccaaccttttagccattataaccagtggtgaaaacgcaaacataaaacgcaacag

SEQ ID NO: 12807 - DNA, 120 bp, synthetic construct
  source 1..120: mol_type = other DNA
agtaggtagttcttgtcctaaaggagttcatagtccagatgaagaaataaggcaacacaaacaatagttaatatactacagtcaaatacttacaggcagaattgtggttcagtggtcaga

SEQ ID NO: 12808 - DNA, 120 bp, synthetic construct
  source 1..120: mol_type = other DNA
gggcaatatgtactgtgttatgcagccatagcaggcacttaagatgaaagatgtcctcatttaagtgcaagagaggaagaggaactaaaatttcttggacaccaaccatgtcccaagatc

SEQ ID NO: 12809 - DNA, 120 bp, synthetic construct
  source 1..120: mol_type = other DNA
tccagcagtcattcgcttgccatgtgaccttgagcaattcaagtcccctttctgaacgtcccccccccccgcacccttagctgtaaaaaattgcccgtgccctaactcacaagctgctgc

SEQ ID NO: 12810 - DNA, 120 bp, synthetic construct
  source 1..120: mol_type = other DNA
aaaataacttcaaggtcagccacccatgggtcctacgatttcgagagcgtatttagacatttagcttcggagagagagatcttcgtgtattttgcctttgcttcgaatgccttcagacac

SEQ ID NO: 12811 - DNA, 120 bp, synthetic construct
  source 1..120: mol_type = other DNA
gagagaaggacaaaggtctctgcatcataaggtaaagaattaagtggtgtgctttagatacgtatacacataaacatctcaatgccttgaagagcagtattgctgcccacatgtcccatc

SEQ ID NO: 12812 - DNA, 120 bp, synthetic construct
  source 1..120: mol_type = other DNA
agctctcgtggaaaggacacctccatttctcataagggatttttttaggaggataaatgaggaattaaaaattttttttttcttgatagaagttcccagtctaattccatttcactagag

SEQ ID NO: 12813 - DNA, 120 bp, synthetic construct
  source 1..120: mol_type = other DNA
tctgagtagatgggattacagcaggggtctgccaccacgccaccacgcctggctaatttttgtatttttagtagagacggggtttcaccatcttggccaggctggtcttaaattcctgac

SEQ ID NO: 12814 - DNA, 120 bp, synthetic construct
  source 1..120: mol_type = other DNA
aacaacataataacataataataacaattgtggctgggcatggtggctcatgcctgtaatcccagcactttgggaggctgaggctgtcagatcacaaggtcaggagatcaagaccatcct

SEQ ID NO: 12815 - DNA, 120 bp, synthetic construct
  source 1..120: mol_type = other DNA
aagtcaccaagagtcattaactatctggccagtactcattgtattaaatgccgtatgtgaaatgcccctaaatattaaggtttaactctcaatttatgaaactgctttttaaaataagca

SEQ ID NO: 12816 - DNA, 120 bp, synthetic construct
  source 1..120: mol_type = other DNA
cggcccttaggaattgagttttgaaggatgagtttaacaggctctgagggaggctctattcagagaacagcatgagcaaaggcatgtggtcaaaagatggtttgctgtagctggacataa

SEQ ID NO: 12817 - DNA, 120 bp, synthetic construct
  source 1..120: mol_type = other DNA
atatatgtggtgtattgtagtttagacaatgctttcctgtatgttttcttgtgcagtcccctcagcaaccaataaggtaggtattatcaatcccattttataactgaaaacgctgaagct

SEQ ID NO: 12818 - DNA, 120 bp, synthetic construct
  source 1..120: mol_type = other DNA
gcaacttcagagtcacaattcaattgattaaaagagatttgttcccacttctttctgggagccttgggtatacaatgtctgtattcacctcttgccttcaaagctggaaagagggaagag

SEQ ID NO: 12819 - DNA, 120 bp, synthetic construct
  source 1..120: mol_type = other DNA
attttgggttatggagggtttcagattctggattttccacagtaggggtgctcaacctgtaccgtgtaaactttggatcagttaaattctccttagaatgcctaggcacatcttagtttt

SEQ ID NO: 12820 - DNA, 120 bp, synthetic construct
  source 1..120: mol_type = other DNA
gacctagcttttaaaaaatcactttctctatttctctgttgaacattaccaactctgattattcttattcttttgtcttgcattatttgtgtttgattaactctattttgcatttttagg

SEQ ID NO: 12821 - DNA, 120 bp, synthetic construct
  source 1..120: mol_type = other DNA
ggaagagcaatagattgttgacttagatttgatggatatgtacgacagtgggcagttgtagacagttgactgaaacttaagtaattgtggtgactatttatggtttgtgtgtatgtgtgt

SEQ ID NO: 12822 - DNA, 120 bp, synthetic construct
  source 1..120: mol_type = other DNA
ctgtaatcccaacactttaggaggcctacacagaaggatagcttgaggccaggagttcaagaccagcctgggcaacagagagagacccagtctctacaaaaaattaaaaaataaaaaatt

SEQ ID NO: 12823 - DNA, 120 bp, synthetic construct
  source 1..120: mol_type = other DNA
agataaaactgtggccctggaaaagcataatctatttatgtgaatattttttaaatatacttgccctgccacccaacaagaagttgtgctttcattgccagacctgtgtattgggtgggt

SEQ ID NO: 12824 - DNA, 120 bp, synthetic construct
  source 1..120: mol_type = other DNA
tcagcctcctaagtagccggaattacaggtgtgcaccaccacgcctagctaatttttgtatttttaatagagatggagttttacaatgttggtcaggctagtctcaaactcctgaccttg

SEQ ID NO: 12825 - DNA, 120 bp, synthetic construct
  source 1..120: mol_type = other DNA
gttttctgttgctataacaagatggagtcgattttaaaatagtgtcactctggctctcctaggctcctgcttccctaacaaaaccttttctaaaaagatactgcaaattttttttttttt

SEQ ID NO: 12826 - DNA, 120 bp, synthetic construct
  source 1..120: mol_type = other DNA
gaaagttctgaaggttgatctttagcctacttgatacttccctcacttttactcaaccaaaatactgctatgtagatgaggtgaacccttcagggtagagggagatgacataaggattat

SEQ ID NO: 12827 - DNA, 120 bp, synthetic construct
  source 1..120: mol_type = other DNA
attgtcttaccattctttaggttagaagtacaacacaggtctcattaggctaaaattaagttgtttgcaggggctgcattcttttccagaggctccttgccttttccaacttttataggc

SEQ ID NO: 12828 - DNA, 120 bp, synthetic construct
  source 1..120: mol_type = other DNA
tcggggtatgacagtcttcttttcatcttctctctgtcacttttagtctatgctggcagtatttctgttggtataacattcttaagaacattgttgggaccaggcgcgatggctcacatc

SEQ ID NO: 12829 - DNA, 120 bp, synthetic construct
  source 1..120: mol_type = other DNA
cattgcaacctccgcctcccaggcttaagcaatccttccacctcagcctcctgagtagctgggactacagtgcatgtcaccacgcccagctaatttttgtatttttttatagacatggtg

SEQ ID NO: 12830 - DNA, 120 bp, synthetic construct
  source 1..120: mol_type = other DNA
caccgtgctcagcttgctttttatttaacagctcttccctcagtctgtttctttcctttcacattttactataaagagcaaaaagaaatcaggttgccacttcagtagattctgctttcc

SEQ ID NO: 12831 - DNA, 120 bp, synthetic construct
  source 1..120: mol_type = other DNA
ttatggccgaataatatttcattgtatgtacatacagtgttttatttacccatttataaattgatggacgtttgagctgtttccactttttggctattagaaataatgctgctatgacca

SEQ ID NO: 12832 - DNA, 120 bp, synthetic construct
  source 1..120: mol_type = other DNA
gcccgtcctaataatctaggatagtctatgttgttttgtttttgagacagggtctcgctgtgttgcccaggctgaaatggcacaagttttctacaagtttttaataaaacttgtggggca

SEQ ID NO: 12833 - DNA, 120 bp, synthetic construct
  source 1..120: mol_type = other DNA
ttgacgtttttagaatgttccttaatttgggtttgtttggtgttttatgatttatgcatttttggcaggaatacccctgcggtaatgctatacttctgtcagtacattgtatcaggaggc

SEQ ID NO: 12834 - DNA, 120 bp, synthetic construct
  source 1..120: mol_type = other DNA
ccataacccttcagtttttttccaagccagattccaggaataatcctgtttgtagaaactggacatgccactaaaacagaaggaggctaataagtgatcttatttcttgcttctcaatcg

SEQ ID NO: 12835 - DNA, 120 bp, synthetic construct
  source 1..120: mol_type = other DNA
aaactcctgagctcaggcagtctgcccacctcagccccctaaagtgctaggattacaggcctgagccactgtgcctgcccacatcttgattttctatactagactcttacctaatgttca

SEQ ID NO: 12836 - DNA, 120 bp, synthetic construct
  source 1..120: mol_type = other DNA
tctgaaagatttctggaacagtgcatatgtttcttctattagctctttcagtcatgggatttgattcatctggtcccagagccccaagtgtgtttggaatcttccaatttcctcacctct

SEQ ID NO: 12837 - DNA, 120 bp, synthetic construct
  source 1..120: mol_type = other DNA
gaccatgtattatatgaaactgtggataaatgaaactcaggttttcttccatcagtgttatacctggagaaatagagggacccaggttgtattacagtgattgctttctttctttttctt

SEQ ID NO: 12838 - DNA, 120 bp, synthetic construct
  source 1..120: mol_type = other DNA
gtgtgagccaccatgccagctccaactttaatgagtgtctttgacccatgtttctccttgcgaaaggagttttgagttataatcatttttttttttctcagccctatcagtgatgcagtc

SEQ ID NO: 12839 - DNA, 120 bp, synthetic construct
  source 1..120: mol_type = other DNA
cctgggtgacagagcaagaccctgttccgggggggtaaaaaaaaaagtgaaaagacaggaatgcaaaagctggtgattttttgttttgttttgttttgttttaagaaaatattacctatt

SEQ ID NO: 12840 - DNA, 120 bp, synthetic construct
  source 1..120: mol_type = other DNA
cttcctgatatcatgtttattgaaattatagagagcagagaaatgtaatagagatgggctggctgactgatcattgatgaaacacagtccaaccttatttttccagaagctcagttttag

SEQ ID NO: 12841 - DNA, 120 bp, synthetic construct
  source 1..120: mol_type = other DNA
gaacaggtgcaaactaggagtagtggagtgctttctaaaagaaatgctccaatgcactattagcacatactcaacaagacttctgttccaagttgatagtcctgggacctttgctggcaa

SEQ ID NO: 12842 - DNA, 120 bp, synthetic construct
  source 1..120: mol_type = other DNA
ttgtacagagtagagcagatggcaaccttcaggtcctatcgtgtaagtgtgctcttgctccagaaatttgatgccaaatagagctttcgaggtaggaaagggagtttctattgacttttg

SEQ ID NO: 12843 - DNA, 120 bp, synthetic construct
  source 1..120: mol_type = other DNA
aatatttttcacaactgaagaattatttgggcagggtgcagtgattcacacctgtaatcccagcactttgggaggccgaggcaggaggattgcttgagcccaggaattcgagaccatcct

SEQ ID NO: 12844 - DNA, 120 bp, synthetic construct
  source 1..120: mol_type = other DNA
gaaaaacatgatacctttaataacaactgtctcttagaagataatgtgccctggaccgaatggcaagagaaattggatcatttgttctgaaatgaagtcagttccagcaactgtggtctt

SEQ ID NO: 12845 - DNA, 120 bp, synthetic construct
  source 1..120: mol_type = other DNA
ccactgcgcctggcagttgtaattattttatttgctaactttttataaatctgggtttttttgttttgttttttgttttttttgagacggagtcttgctctgttgcccaggctggagtgc

SEQ ID NO: 12846 - DNA, 120 bp, synthetic construct
  source 1..120: mol_type = other DNA
atagctttttaataagagatatgagaccccagaggagaaaccaacaaatacagttgtcccttattatctgttggagattggttccaggattcctcctcagataccaaaatctacagatac

SEQ ID NO: 12847 - DNA, 120 bp, synthetic construct
  source 1..120: mol_type = other DNA
tctcaaaaaataaaaaaagaatgatgtttatgggagaagtgacagaagataaggctagaaagtgggccaaatggtgaaggactttgactgccatgctgtagaccatgaaaagccattaaa

SEQ ID NO: 12848 - DNA, 120 bp, synthetic construct
  source 1..120: mol_type = other DNA
gagcgagactctgtctcaaaaataaataaataaaaatactcaggatttttcatagtgacagaaaaagtctatttgactttttcctataaaagtctagttgaatttaggtacatgccttga

SEQ ID NO: 12849 - DNA, 120 bp, synthetic construct
  source 1..120: mol_type = other DNA
gcctgaatttgtaggcaaacctgctgctcaggcaggtagcctattctctagaaaagccaaaagatttacagattcataaagtaactgatgggctttgaaaatgactgtgtttttcttctg

SEQ ID NO: 12850 - DNA, 120 bp, synthetic construct
  source 1..120: mol_type = other DNA
ctttgtttctttgtgctgtgatgaaaagaaatggaatttgagtgcatttaggtggaacatacatacttcccctttccaacagttttctatgagcaccactagtctatatggccttaattg

SEQ ID NO: 12851 - DNA, 120 bp, synthetic construct
  source 1..120: mol_type = other DNA
gacaataggacttgctgacagtccgcacagttacatatataggacttaactggggtggatccagcaggaactggtcttggcagtcaagaaaaagcactatttaatttttctcagtgatta

SEQ ID NO: 12852 - DNA, 120 bp, synthetic construct
  source 1..120: mol_type = other DNA
ctatagccattatttactaaacatttacataattatttaaccctcataataatctgagaaacaggagtatcttcatttaagagcttaagaaactgaagtggccgaggtgggtgggaggcc

SEQ ID NO: 12853 - DNA, 120 bp, synthetic construct
  source 1..120: mol_type = other DNA
gcttatcatctatccagagtgtcaaagactctgaaccctcttgagtcatatcttcctcccaaatgttcatcaaactgtttgagttcaggtttacctcagtgtcttcagtaattattttca

SEQ ID NO: 12854 - DNA, 120 bp, synthetic construct
  source 1..120: mol_type = other DNA
gaccaacagatgttaagtatcactgtgtttcatttgaatatgtaaaatatcctgtaggacctgtgagtttgctttggtaccccagggcagcttggtgtagtttggaaaccacagttctag

SEQ ID NO: 12855 - DNA, 120 bp, synthetic construct
  source 1..120: mol_type = other DNA
tccatttgtcattttattgattgagttgtaagagttttttatgtattctggataaaagtcctccatgatttgcaaatattttctcccattcctttgagttgtcttttcactttcttgatg

SEQ ID NO: 12856 - DNA, 120 bp, synthetic construct
  source 1..120: mol_type = other DNA
gatgtctaaactggcaagtgaagtttttatagagacggatgttgaaaggaggaataacatactaaaacatatggcacatttagtttatgatgagatcccaagtagtctgtctcccatcat

SEQ ID NO: 12857 - DNA, 120 bp, synthetic construct
  source 1..120: mol_type = other DNA
gtgttacctggcagtcctgctggtggtgtagctgagcaatggtataggcctcacagatacttgcagggtctcattgggaactcttccttttttaatttaatttaattttattttttgaga

SEQ ID NO: 12858 - DNA, 120 bp, synthetic construct
  source 1..120: mol_type = other DNA
ttacaggtgcctgccaccacacccagcaaatttttttttttttgtattttttagtagagatggggtttcaccatgttggccagcctggtcttgaactcttggcttcccaaagtgctggga

SEQ ID NO: 12859 - DNA, 120 bp, synthetic construct
  source 1..120: mol_type = other DNA
gatgcttttgccttaatttgactttttattacttccaaatcatagccttagagacaagcactttctggatttcagtctggtccaatagacagtttaatggaataaaaaaaatgagagact

SEQ ID NO: 12860 - DNA, 120 bp, synthetic construct
  source 1..120: mol_type = other DNA
aaacaactctttgtggaatctgcttgactcctaatctcctagttagaagcaatttgagggttgaggtggaggcatcttctcatcttgatttttttttttttttctgggcttccatctttt

SEQ ID NO: 12861 - DNA, 120 bp, synthetic construct
  source 1..120: mol_type = other DNA
tagcttgagtccaggagttcaagacctgcctgaacaatataatgagaccccgttctccacaaaaaggagaaaatatatgttttttaatgaagtttatttatatataaaatatataaatat

SEQ ID NO: 12862 - DNA, 120 bp, synthetic construct
  source 1..120: mol_type = other DNA
atggggcctgtggcattctagagaacattcctcctaccatcaccacacaatagaacctgattttctgtcattggaataagtggataataggttccatactgtgggttttgagaagggtaa

SEQ ID NO: 12863 - DNA, 120 bp, synthetic construct
  source 1..120: mol_type = other DNA
ataaagagggctagttagttcttggagcagctgcttttgaggagaaaatatatagctttggacacgaggaagatctagaaaattatcattgaacatattaatggttatttctttttcttg

SEQ ID NO: 12864 - DNA, 120 bp, synthetic construct
  source 1..120: mol_type = other DNA
cctgttttctttcgtcgtcgtgggtgggaattgtcgcctaagtggttccgggttggtggatgaccttgagccctcaggaacgagatggcggttctctggaggctgagtgccgtttgcggt

SEQ ID NO: 12865 - DNA, 120 bp, synthetic construct
  source 1..120: mol_type = other DNA
tggtcatttagaaagtttgtcagtcctgttaaaggagaggttcttatgatcatcctaatgactctttcctcagctctgttgcttcgaactccagtggtcagacctgctcatatctcagca

SEQ ID NO: 12866 - DNA, 120 bp, synthetic construct
  source 1..120: mol_type = other DNA
tcactaatggtcatgcctttagcaggacttcctacctgtaggggggactcttgtgtccaactttgtcaaatgaagacctagtttacacctttgggcagacagtgccattatggttgaatg

SEQ ID NO: 12867 - DNA, 120 bp, synthetic construct
  source 1..120: mol_type = other DNA
atgtagcctgtcaaactgaatttctgatctcccctaatctgttcctcctgcactcttgccccatctgaattaatggcatttccagttttctctttgttcaagtctaaacctggtaagctc

SEQ ID NO: 12868 - DNA, 120 bp, synthetic construct
  source 1..120: mol_type = other DNA
aaaaaaaaaaaagagatgtatgtgggtggattattttgttatttttactgtatttgtttgctgttgtgcctctagagcctagaactactctctggtacgtgacatatagcactcagtaaa

SEQ ID NO: 12869 - DNA, 120 bp, synthetic construct
  source 1..120: mol_type = other DNA
ttctctaacatgtcatccctcttgaaggagctgtctataatgtgctccacttcctcaacactgagtctcttttagcctgtattaattggggtcttatcccaactatataacttaggttat

SEQ ID NO: 12870 - DNA, 120 bp, synthetic construct
  source 1..120: mol_type = other DNA
tgagaccagcctggccaatatggtgaaaccttgtctctactaataatacaaaaattaagctgggcgtggtggcacacgcctttagtcccagctacttgggagactgaggcagaagaaccg

SEQ ID NO: 12871 - DNA, 120 bp, synthetic construct
  source 1..120: mol_type = other DNA
atagcagcattatttataatagccaaagagtggaaacaatccaaatggctgtcagtggatgaatagctaaacaaaatatggtgtattcatacaatagaatattattcagccatacaaagg

SEQ ID NO: 12872 - DNA, 120 bp, synthetic construct
  source 1..120: mol_type = other DNA
taatctcaggcactccctgcttaaaatgtatcagtggtttcctattatatttcatataaaattcagattccttatcatgaccttcaagaccctatgcaaccgacccctgccttcctctga

SEQ ID NO: 12873 - DNA, 120 bp, synthetic construct
  source 1..120: mol_type = other DNA
ctttgtctctaaagaaaagtcactagaaatagacttactgacatacacacgcaaaaggctatacagaatcccctaaagaagcaaacagtgacagtggagtggcaaatggagacattgcat

SEQ ID NO: 12874 - DNA, 120 bp, synthetic construct
  source 1..120: mol_type = other DNA
tagggaaattttaaaattaggaaatgctgatagctcatattataaatttctaaatcctaggaagaaacgcttggagtgcttctgaatatacagaagttccatttaagggcaagtttccct

SEQ ID NO: 12875 - DNA, 120 bp, synthetic construct
  source 1..120: mol_type = other DNA
tgctgtcttctatcaatatagagtaactgggactaagcacattttactcaccaaggaccttactgggaagctgaggcaaaggaagagtatgtgtttatgaatgtgtactaggggttaaag

SEQ ID NO: 12876 - DNA, 120 bp, synthetic construct
  source 1..120: mol_type = other DNA
ctaacagcaatagtagtttctgacggtaagcaggacatgatcagaactgtgctttagaaataatttgggtaccattaggtgggttaataagctagaggtagaaggacatgtgaggggata

SEQ ID NO: 12877 - DNA, 120 bp, synthetic construct
  source 1..120: mol_type = other DNA
ctgcgactttatcttgacagcaatatggagttactgaagacttaattatgcaaacggcatgatccaatttttattttaaataggttttgctgacagctatgtaaagaatggatttgtggg

SEQ ID NO: 12878 - DNA, 120 bp, synthetic construct
  source 1..120: mol_type = other DNA
tgcaaaaagaaatcttctggagccagaccaaagtaagtctgcagctagggaggtaagcaagtgcttagggtatcagttgcccctaagagtatctactaagcccaggtggcccagagttct

SEQ ID NO: 12879 - DNA, 120 bp, synthetic construct
  source 1..120: mol_type = other DNA
atatgcttgcgccaccatgtctggccggattctagttttaagaaggtggcacataggccaggagaaaagcttagggctcaaaccagggagttagaatgaagattcccctaaaccaagaac

SEQ ID NO: 12880 - DNA, 120 bp, synthetic construct
  source 1..120: mol_type = other DNA
agcttcagaacggtgtctatgagattaaaatacccaaatggtcatttccaatgtggttctaactctaactttcatcagtgactgtttctaaactagtcttccaggccaggtgcagtggct

SEQ ID NO: 12881 - DNA, 120 bp, synthetic construct
  source 1..120: mol_type = other DNA
tgtttctataatagtttaatatgaaagcttatgaagattttaagaagtaaattgcaatatcatcaggcctatgtataaaacttaaaaacgtaaaactaagggaggctgggcgcggtggct

SEQ ID NO: 12882 - DNA, 120 bp, synthetic construct
  source 1..120: mol_type = other DNA
ggaggtagtttgggagaaaccaagcagtatgaaacagtcttgacaaaaccaatgtccttcctcttatccacccttctacccccaatgagggcagagtgttgtattttaatccctcttata

SEQ ID NO: 12883 - DNA, 120 bp, synthetic construct
  source 1..120: mol_type = other DNA
tgggcatgcttagattttaaatattggacaatattgagattcctcttcatcaggaaggggaaatagggcagctagatttagattggagcagtatttaacagctaaaaaggaagcagacaa

SEQ ID NO: 12884 - DNA, 120 bp, synthetic construct
  source 1..120: mol_type = other DNA
tgagataataaaacattatggccatccgggtcactccaaagaaagtttagatgtaaaaggcctcttaataattcaatcattcttcatttaggtcttaagttaggaaattaagaaaattgt

SEQ ID NO: 12885 - DNA, 120 bp, synthetic construct
  source 1..120: mol_type = other DNA
tttaaaatacggttaaccttgttagcatagtatgtaagcaagcacatgtatcttattgaattttttgccttagtaaactaaaaattctcttgataaatagacaaaacatatccattttca

SEQ ID NO: 12886 - DNA, 120 bp, synthetic construct
  source 1..120: mol_type = other DNA
tagcttacctagaaattgtccaggtgtctaaggatgatttactaattaacttaaataataggaggggaaagagaagaaatacagggtaaatggccccaaataagatggtaaaaaagaaaa

SEQ ID NO: 12887 - DNA, 120 bp, synthetic construct
  source 1..120: mol_type = other DNA
atgtatatagactacaataaaaaaaaaaaaagcctcaacaaatactgatgagtatcacacagaacgacttgaggaggggctcaggatgcaagatgtatctagtactttcttcttctacca

SEQ ID NO: 12888 - DNA, 120 bp, synthetic construct
  source 1..120: mol_type = other DNA
ataattttagtttggctttgaatgcaaccgctttatctgccaacttgaacacagttgttgttctccaatgaagtgatagattgagttcgttgagcaggttgaatatgtcacacaagtaag

SEQ ID NO: 12889 - DNA, 120 bp, synthetic construct
  source 1..120: mol_type = other DNA
tgttggttggcaagaaaagcacacaaaacatcctcgtgcacatcctcttgaaaaatatattgcacgaaaacaagcattgttgccttgttgtcagcaatggtagacttgtcaatctggatt

SEQ ID NO: 12890 - DNA, 120 bp, synthetic construct
  source 1..120: mol_type = other DNA
gaattacaggtgtgagctaccgcgcccggccttgatttgcattttttctgatgctcagtattgttgagcaccttttcttatgcctgttttctatttatatgtcttcttttgagaaatgtg

SEQ ID NO: 12891 - DNA, 120 bp, synthetic construct
  source 1..120: mol_type = other DNA
ccatttgtttgtatcctttttattcatcaatgttttgtagttttccttgtagaagtttttcacctctttggttaaatttattcctaggtattttattttattttttttttggtagctatt

SEQ ID NO: 12892 - DNA, 120 bp, synthetic construct
  source 1..120: mol_type = other DNA
ggctggagtttgaggttatagtgagctataatcacaccactgcacttcagcctgggcaacagagtaagaacttgtcaaacaaaacaaaacttttgttatatacaaatggccaataagcac

SEQ ID NO: 12893 - DNA, 120 bp, synthetic construct
  source 1..120: mol_type = other DNA
ttatatattagtggtgtgatcatagctcgctataacctcaaactccatactctctctctctctatatatatatatgtatatatgtaatattttgcaattttgcagaatttacttatttgc

SEQ ID NO: 12894 - DNA, 120 bp, synthetic construct
  source 1..120: mol_type = other DNA
tagggctccatttttaaaaaatcacaattcctcatgtagtagattagctgagactaacagaaaaccaggaaatagaagcaaaagggagatgcagcttcagcagagccgaagtacaccaag

SEQ ID NO: 12895 - DNA, 120 bp, synthetic construct
  source 1..120: mol_type = other DNA
caccctgggcaacagagtgaaactccgtctcaaaataaataaataaataaaaataataaataaataaatttctcagatgcagaggataaagacaaagaccaaaaaaaatgctcacgaaaa

SEQ ID NO: 12896 - DNA, 120 bp, synthetic construct
  source 1..120: mol_type = other DNA
cagtctctgcattaacaagggagaaaggggctggggatggcctctgggtggtcaaaaatataacatgagtactccattgctattcaaaatgatatacatcaatctttgactgcatctctg

SEQ ID NO: 12897 - DNA, 120 bp, synthetic construct
  source 1..120: mol_type = other DNA
cttctggtctctggcaaccaccattctactttatgtttttatccatttgactattccaagccttatataagtgggatcatacagtatttgtcttttttagactggcttctttcacttagc

SEQ ID NO: 12898 - DNA, 120 bp, synthetic construct
  source 1..120: mol_type = other DNA
ctgttgtccaccagttttcctgtttctaatctgaatattctttcctaaaaagatggatgtgggccaggtgtggtggctcatgcctgtaatcctagcactttgggatgccaagatgggcag

SEQ ID NO: 12899 - DNA, 120 bp, synthetic construct
  source 1..120: mol_type = other DNA
ggtggacacagtggcacaagtaggaagttttagttttgagggttcctttcttctccctcttcacgtcaatgtactttggttgtctaaaatgcgttgaaagccttattttctgtactttat

SEQ ID NO: 12900 - DNA, 120 bp, synthetic construct
  source 1..120: mol_type = other DNA
gaacctgggggagtggaggttgcagtgagccaagatcgtgcttgggcgacagagcaagactctgtctcaaaaaaaaaaaaaaaaaaaaagacaccagaagctcacagacttgatggacag

SEQ ID NO: 12901 - DNA, 120 bp, synthetic construct
  source 1..120: mol_type = other DNA
aaataatccttgcagtgttacaacagtgtgcccgtgtagagaactgttttgcaaagagctcgatcaatgatgtcatctttgccttccgtgacccaggcagctgggtgcagtctcaagatc

SEQ ID NO: 12902 - DNA, 120 bp, synthetic construct
  source 1..120: mol_type = other DNA
ccgcggagctccccaatgtgccaattggtttgttgttgttttgctttttttgaatacacaaactctccgaaaactcctgtcttgccccacttttttgtgagttcattgctttggaaacaa

SEQ ID NO: 12903 - DNA, 120 bp, synthetic construct
  source 1..120: mol_type = other DNA
gcgggggaggaggcggggagccccggcggcgagggggcggtgacagcacttggaaaggaggctgcacgcggatttgcatgaaacacagactgggagcgggcgggagcgggagcgcggcgc

SEQ ID NO: 12904 - DNA, 120 bp, synthetic construct
  source 1..120: mol_type = other DNA
gtgcgtgtgtgtgagagtgggagagcgcgggcaggaagggggtggggggaccccaaacaaaaccatctctgatttgcaaagatcagagcccgaggcttccacgcggcactctggcttcca

SEQ ID NO: 12905 - DNA, 120 bp, synthetic construct
  source 1..120: mol_type = other DNA
atatggtgggagtgcggacttaaattttttttaactgggtggatccagtcaataaagggggagggaaggcggtgtgctgtctggggaagtctctgggcgtgtgatcgggagccagaattg

SEQ ID NO: 12906 - DNA, 120 bp, synthetic construct
  source 1..120: mol_type = other DNA
tgcctgcctggataggactgaatacaaaagtagattttttttttcatcttttttttcagttagggaaacccagttgcttgggtggatccagacaaaatggattttcatccttggattttg

SEQ ID NO: 12907 - DNA, 120 bp, synthetic construct
  source 1..120: mol_type = other DNA
agaatttacacaagttttataacagcctctcatgcctcacctgcttgagtacctgagtaaagctgcaggtatcttccttgccagtttataagaatggaatcaaagcatttgccgctgaat

SEQ ID NO: 12908 - DNA, 120 bp, synthetic construct
  source 1..120: mol_type = other DNA
taccagaggaggatgcagagacacgtttgagaagctcccagcctgtgagaagcttacacatcagtaagggaaacatgaatagggcattatttgagtatctaactgctatctctttctcat

SEQ ID NO: 12909 - DNA, 120 bp, synthetic construct
  source 1..120: mol_type = other DNA
caagggttatccaaaggaagctttttggactgcagtatgatgttgggaactttttggtacatggggatagttccctataagaatgaggacgtctttatcctcttttactaaactgagtgc

SEQ ID NO: 12910 - DNA, 120 bp, synthetic construct
  source 1..120: mol_type = other DNA
cagtacagccattattctgcgtgagctccttaatgaaataaataagaccaagcagggcttgcttcaaattggaatcagctttcattcctgttaaccttattctcccacctttattcacct

SEQ ID NO: 12911 - DNA, 120 bp, synthetic construct
  source 1..120: mol_type = other DNA
gatactgtccctggtgccttctgtagcttctagtccactggctgtgaaacacaggttctttggagttgtaagaatgctgtatgtgttcactctttagctaatttgtaaatactgtttttt

SEQ ID NO: 12912 - DNA, 120 bp, synthetic construct
  source 1..120: mol_type = other DNA
gcgcccggccacatacaaacattttaaaagctcccagttgcacgcatctagttgatcagtgaatgacagatctttcttaattattgatgttccaagactctatcagcctggtgtcaatta

SEQ ID NO: 12913 - DNA, 120 bp, synthetic construct
  source 1..120: mol_type = other DNA
taggactccagtattaagaaacactgtgtatggctttgcctttgaaacctacagagttatgaatctggtcccttttgctgctaagtgttgcatcacaaactgccaagccaagttgtaact

SEQ ID NO: 12914 - DNA, 120 bp, synthetic construct
  source 1..120: mol_type = other DNA
ggtggatggatcacctgaggtcaagagtttgagaccagcctgaccaatatggtgaaacctcggctctactaaaaatataaaaattagccgggcatggtagcgggcgcctgtaatttcagc

SEQ ID NO: 12915 - DNA, 120 bp, synthetic construct
  source 1..120: mol_type = other DNA
ggccctccacctggctgtgctcctcttactggggcaaggagactgtagggccaagggacaggcccatctagagcaagcacttcctttttccagatcatgctcagaggcctgacccttcca

SEQ ID NO: 12916 - DNA, 120 bp, synthetic construct
  source 1..120: mol_type = other DNA
agaacaggtctatttctggaggtatcagaaggcttcacagaggaggcaatactcaattggggccttgaaggatggataggagtgtaggagtggagtgggaggcagcacagagcacagacc

SEQ ID NO: 12917 - DNA, 120 bp, synthetic construct
  source 1..120: mol_type = other DNA
cagcttggtggtggtggtggtggtttaagttgctgggtttttaaaagattgagtttcatgtccaaggactgattctacttcatgggctgtttttgaaaacattgctagaaacctcttaac

SEQ ID NO: 12918 - DNA, 120 bp, synthetic construct
  source 1..120: mol_type = other DNA
taaatattgcacaaaattatattggaatatgagctcggggcacataggctctggtgccttgtactagaagcttaggtgagctgttactcttggccatgtccaagcatttgactcagaaga

SEQ ID NO: 12919 - DNA, 120 bp, synthetic construct
  source 1..120: mol_type = other DNA
gcttcaaagggactattggctgggagtggtgaaagtttagtggataatcctgctgaagaattttggaaggccttgaggaaggaattaaaaataacagtaagcatgccttttctttctctt

SEQ ID NO: 12920 - DNA, 120 bp, synthetic construct
  source 1..120: mol_type = other DNA
cccaacaaatagcttcaatcataagagggcttattacttccactaagaaggctagaagcaggaaagtcaggcatcagaaggtctcaggagccttacatctttcctcctggccatattctc

SEQ ID NO: 12921 - DNA, 120 bp, synthetic construct
  source 1..120: mol_type = other DNA
gcctcctccctcaggggaaattttctaaagtttctcactgtgttctagcttcaaaaccatatgcagtttaattgcatgtttagtatctttgtgcatctctcttgttttgaatctgctgga

SEQ ID NO: 12922 - DNA, 120 bp, synthetic construct
  source 1..120: mol_type = other DNA
atcgcctgtttataagagggaagtgtggtcatatttctatctctcttgtgggctgcacggttgccttactggggttcatgtgggaagtggttaccgttaggaggaggatgaaataacagt

SEQ ID NO: 12923 - DNA, 120 bp, synthetic construct
  source 1..120: mol_type = other DNA
cctctcttgctggtggagatgggctttatgactttggggaagtcaacttgacttcctgggtgttggtcttctcttctacaaaatgacaagcttgaagggagaatctgaaagaatctgtgt

SEQ ID NO: 12924 - DNA, 120 bp, synthetic construct
  source 1..120: mol_type = other DNA
aaacctgggttagactctgtgctaatggcttttttcatgaacctcagacagccggaaagtatattctttgaggattatgatcgactaggatgctcgggaatctttaaagagaagcactat

SEQ ID NO: 12925 - DNA, 120 bp, synthetic construct
  source 1..120: mol_type = other DNA
ccagtgaatttcaaatttctacaggccggcctggggaaatccatgttttttaactttcctaggtgattccggtatgtggccgggattgagaatcacagccatagatgcttatgtaaagct

SEQ ID NO: 12926 - DNA, 120 bp, synthetic construct
  source 1..120: mol_type = other DNA
ggctttcacagatgaagggggatggtatgagaagctttacaaataacaaggtttgagatgcagttgtagacacatgccagatgtaggttgctattttctcagctcaatgaggaatctgtc

SEQ ID NO: 12927 - DNA, 120 bp, synthetic construct
  source 1..120: mol_type = other DNA
tatgcatttcttaaggtggtgggggaggtggcagaggcattatatagacgtgtgtgtttgtgcatgtgtttaaaaaaagacttatattttctgggcagcagaacttaagtttccagtaaa

SEQ ID NO: 12928 - DNA, 120 bp, synthetic construct
  source 1..120: mol_type = other DNA
ggcaggcgagaaaagctgtgggagaaaacctcacaaatgcagcaaagctgcccagggcccaagcggtggggcggtagcgagggaaacacagtggtgtttggctgctgcttcacaccactt

SEQ ID NO: 12929 - DNA, 120 bp, synthetic construct
  source 1..120: mol_type = other DNA
ttctttgtctacactgtgttgcctcagaaaaaaatgcccatggggagtgtgtgtgcgtgggcatgtgtgctctcctcgtgtccctcagaaaagaatgaattcttttccaactgatgtcac

SEQ ID NO: 12930 - DNA, 120 bp, synthetic construct
  source 1..120: mol_type = other DNA
aaaaatcccaactttcctgctgagtagctcatgagacaggcatttcacctctctgaacttcaacttgggggtactcagatttccttcagaggctgtgaaagagtcccctgccacaagtta

SEQ ID NO: 12931 - DNA, 120 bp, synthetic construct
  source 1..120: mol_type = other DNA
cgttgtatcattgtggctgtggccatggtttctccaaaataaggtgtttttagaaatgaaagtacagggattggtttccttagattcattgtcatggattcatagttccccaaccttttt

SEQ ID NO: 12932 - DNA, 120 bp, synthetic construct
  source 1..120: mol_type = other DNA
cataattacacatattttatcaagtagatgaaccgcatttaaccattccccagctgttaggtgaacactttaaattactataaatcagcagttctcaaagtgtggccctgggccagcagc

SEQ ID NO: 12933 - DNA, 120 bp, synthetic construct
  source 1..120: mol_type = other DNA
gggcatatccttaacctctctgagatgtacttttcttatctgtaaaacctctatgttgatgcaaatcaggtgcgatgatggacgcaaaaactgccttgaacaccttagcgggcctgtgaa

SEQ ID NO: 12934 - DNA, 120 bp, synthetic construct
  source 1..120: mol_type = other DNA
ttacctggctgccttctaaagcagacttggcacgagacaatcttattcaaactctgctcaaaattgctaccctgaggagagggctgtgaccaggcaggacggggtgtgataacatggaac

SEQ ID NO: 12935 - DNA, 120 bp, synthetic construct
  source 1..120: mol_type = other DNA
atgttacctgtctgttagggttgtaagattgagtcaacatatgtacaaggcattgcttagtgtttaccaccttgctgtgagctggtaaatggttggttggtcccttcctctccccttggt

SEQ ID NO: 12936 - DNA, 120 bp, synthetic construct
  source 1..120: mol_type = other DNA
gtcttggttgtagaaagaaggcgatgacattctaagaaacatcaacgaccaaagaaccccatcatatcctttattactcacgtcacttccctgacaccaaccacttatattgaaaatgat

SEQ ID NO: 12937 - DNA, 120 bp, synthetic construct
  source 1..120: mol_type = other DNA
ttgactcttaactcaggcatggtctccttgggtgagtcatttcttcatcaggcagtcctcagtcttttggttgcagtgtagttgttaaaaatgtgggtacttggaggctgaattcttggg

SEQ ID NO: 12938 - DNA, 120 bp, synthetic construct
  source 1..120: mol_type = other DNA
atgaaagaaaaattgtagtgtttgaaggtcttcaaggatcctggtcctctcacactgtcactcttagtcacatgacctttgactgtccattccctactaagccttggtttacgcatctgt

SEQ ID NO: 12939 - DNA, 120 bp, synthetic construct
  source 1..120: mol_type = other DNA
gtacatttgaggcccagatctgcttatttcgagggtggggccgcgtttttctcctgccacagtgagctaattaaagaaaacaagcttcgggagttgggagagaactgtccacaggacact

SEQ ID NO: 12940 - DNA, 120 bp, synthetic construct
  source 1..120: mol_type = other DNA
caaggattttctgttttggtaaatttcatgtggcaagattacttgaagaagggttccagtgttttgctagcttataatggttactgcataaggaaggtttactcgccagaggtccgcata

SEQ ID NO: 12941 - DNA, 120 bp, synthetic construct
  source 1..120: mol_type = other DNA
ggtttccttgagggatgttctggaacaaaatagttgcggtggttgtacaatattgtgaatgaactcaatgccaccaaattatacacattaaaatggctaacatggtagatttttgctgca

SEQ ID NO: 12942 - DNA, 120 bp, synthetic construct
  source 1..120: mol_type = other DNA
cactggaacaggctgagctgtaattgaattaaatatctgtgtaatccctaggagaagctgaataaggtttgaggatcttggaagttcagttatactctcagtaactgaggtgagatccgt

SEQ ID NO: 12943 - DNA, 120 bp, synthetic construct
  source 1..120: mol_type = other DNA
atgctcgcgtgcatgagtttgtgttgagagaaagaaaaaagccaggagagtaggatgagtcagatttaaccactgttttttcccttttgaaacttgttatgttcatacacatacagcagt

SEQ ID NO: 12944 - DNA, 120 bp, synthetic construct
  source 1..120: mol_type = other DNA
gactgtattgaagactgcatgatgatcaggagagagtgagggatgagaaagagtttggaaaacagcagaacacgatgcaaacatgagttattcatggttttgtgtccaggctaactgtgc

SEQ ID NO: 12945 - DNA, 120 bp, synthetic construct
  source 1..120: mol_type = other DNA
cccagttctcatcacagctatagggtgtcactgtatacatcaagtcatggttagccgcaggtttgatcggggaagagacactaatcaatgtatctgattctagaagaagatggagcttct

SEQ ID NO: 12946 - DNA, 120 bp, synthetic construct
  source 1..120: mol_type = other DNA
tgcttcctgggggtctctcagtatcaaagccacctgtggctccatctcacctccctgaacaggaggcactgtttgtcaggaggccttgccacctttggccctttctttccaaagaaagat

SEQ ID NO: 12947 - DNA, 120 bp, synthetic construct
  source 1..120: mol_type = other DNA
ctaagaaatgtacatctgtcatctgtcatatctgctgaaaattgttcagggcttcctgctgccttgagaatgagggtctgaatcccaaacaagggttcaaatctcaacctctcaggccta

SEQ ID NO: 12948 - DNA, 120 bp, synthetic construct
  source 1..120: mol_type = other DNA
ctgattacctaattcacacgaaggtgttaatggtggtaatggcatagtatttattaccccaggggacccagaacggtggtatcaaaacatatcattccccagtggtttaaaactctggta

SEQ ID NO: 12949 - DNA, 120 bp, synthetic construct
  source 1..120: mol_type = other DNA
agaggaggagccatttgattttgactattgttgaaattgagtggggaattttgggtttgttttaggttttggaagggaggattatctgaggcttgaggcttctgtgatactgacatctgg

SEQ ID NO: 12950 - DNA, 120 bp, synthetic construct
  source 1..120: mol_type = other DNA
aaggcatgtttgaaataggcttaattttcctcaagttggcttttgtctcacaattgagttcttgttgacgaagaccagttattattcgtcttcgtgtctctggagtctagcacctagcac

SEQ ID NO: 12951 - DNA, 120 bp, synthetic construct
  source 1..120: mol_type = other DNA
acaaagaaggaaaagcgagagggggaaacacacttaatggacaagggatgagtaaaacccaatggactgagaaaaccccagagctgaacttcacatgaccccgcgtgctgcctgcagttg

SEQ ID NO: 12952 - DNA, 120 bp, synthetic construct
  source 1..120: mol_type = other DNA
gttccagtgtacccctgacccagatgtccgtaatgttaacatcttgtattaccatggtacacatgtcaaaactcagaaacaacattggtacattactagtaacacaagtccagactttat

SEQ ID NO: 12953 - DNA, 120 bp, synthetic construct
  source 1..120: mol_type = other DNA
ccaaattgttttccaaagtggttgtgtggttgtaccattttacagtctcaccaccaatgtatgagggttccagttctccccatccttgtcaacacttgttattgtctgttttattttagc

SEQ ID NO: 12954 - DNA, 120 bp, synthetic construct
  source 1..120: mol_type = other DNA
tataattttagctcttatatttaggtctttgatccatcttgacctgatttttgtataagatgtgaggtaggggttcaacttcattcttttgcatgtgaatatccagatgtccatgcactg

SEQ ID NO: 12955 - DNA, 120 bp, synthetic construct
  source 1..120: mol_type = other DNA
gactgaaatataagcatatttctcccatagatcctaggaacctgagcttctcacgcacaggatcatttcatttgtgttagttctttccctttagacgaatagctctttgaggacagtaac

SEQ ID NO: 12956 - DNA, 120 bp, synthetic construct
  source 1..120: mol_type = other DNA
actttgacttcatcctcccctccttccacctgccagtacccagtctttatctaaatttagggggcttgagaggccattctttctattttgggtaccttcaaacaggtaagcacagttttc

SEQ ID NO: 12957 - DNA, 120 bp, synthetic construct
  source 1..120: mol_type = other DNA
aatgtgatgccaagcaaacagaaaagttgttttggctccatctctgaggtcatttagttgctatttccatctactttgaatccacatctgctgtgtgctcagagccgtgctggttgccaa

SEQ ID NO: 12958 - DNA, 120 bp, synthetic construct
  source 1..120: mol_type = other DNA
atcttcacatttgcagtgcctagcacacagtggacaaaagggatatactggacacgttgtcctaggatgcagattcctaccaggccttcaaggcttgtagaaatcttccctaaaactgat

SEQ ID NO: 12959 - DNA, 120 bp, synthetic construct
  source 1..120: mol_type = other DNA
agaaagagtaataatcctttttgaatgcacagcatttacagaggcctcacaggctgaaaatggtaattaggatacacaattgggtcttttgacctcaaatccaggcattttcccaccttg

SEQ ID NO: 12960 - DNA, 120 bp, synthetic construct
  source 1..120: mol_type = other DNA
gatctcatgtattttctgctactaagtagaagttcttgttttgtttgatttctggtgggctttgatattttccaaaaagataataactcattgtagagtaagatcaggactggggccagc

SEQ ID NO: 12961 - DNA, 120 bp, synthetic construct
  source 1..120: mol_type = other DNA
aggatatgagcgtagaatgagaaggtccagacctgcacctgaagaacagccccatttagggaatgcagggagagacagaggaaaagcaagatggtgcacagtgacattgaaggtgagtga

SEQ ID NO: 12962 - DNA, 120 bp, synthetic construct
  source 1..120: mol_type = other DNA
cttgcttgttgtttcttttgctagccgtaagtccctggagtacactgggtactttatgggaaaaagaggaacagtgtgggacagactttgccctgggctgcttaacgtgatgtggggaac

SEQ ID NO: 12963 - DNA, 120 bp, synthetic construct
  source 1..120: mol_type = other DNA
aacattgtaagattttttttttgcgattattttttagctcatcagctatcgttagttagcgtattttatgtgtggcccaagatgacgactcttccatcgtggcccagggaagccaaaaca

SEQ ID NO: 12964 - DNA, 120 bp, synthetic construct
  source 1..120: mol_type = other DNA
tcattaaaattaaatacaattacaaatgctgtccctcagtcacaccagccgcatttcaagtgcacgggtaggctagtggccatcagatcagctcatatagagcagcacgttttcatcacc

SEQ ID NO: 12965 - DNA, 120 bp, synthetic construct
  source 1..120: mol_type = other DNA
tgcctgtaatcccagtactttgggaggctgaggtgggaggatcgcttgaggccagaagtttgagaccagactggccagcataacaagaacataacaagatctcatctctacaaaaaatta

SEQ ID NO: 12966 - DNA, 120 bp, synthetic construct
  source 1..120: mol_type = other DNA
agtacataggaggcactcagatagacgggatgccccaaaattgggagacggacaaacttattttgaaatagtctttttttgacatttccaaagaatatactcaatgtttttctgcaaccc

SEQ ID NO: 12967 - DNA, 120 bp, synthetic construct
  source 1..120: mol_type = other DNA
tcattaccacgtcacacagctgaccaaggcctcatctgagactgtgtttgaatagaaattaaacagggctgacagtgaagtttctgcttttaattagctttcaaaggtacacctctacct

SEQ ID NO: 12968 - DNA, 120 bp, synthetic construct
  source 1..120: mol_type = other DNA
ggtgggaacagaatgataggagttaaccactttttaggcgttattgggccttttcactttaatagcttaacagagacatctgtgatggcttgcatccagagtgcgtggtgtttatttttg

SEQ ID NO: 12969 - DNA, 120 bp, synthetic construct
  source 1..120: mol_type = other DNA
agtgattgttacagatcttcatgttcaggtggcccaggggctgaccctgctccaacttccccctcagacattaaacctgtaccacccactgagatggttttgattttctattctgcgttt

SEQ ID NO: 12970 - DNA, 120 bp, synthetic construct
  source 1..120: mol_type = other DNA
tattgaccttacatgttccgtgtcttctgtgcccgtctctggagttcctgaagatgaagggctgtgtctgctgcaccttcagactttttgaaattgattggttggtttgtacatccattt

SEQ ID NO: 12971 - DNA, 120 bp, synthetic construct
  source 1..120: mol_type = other DNA
taagatttagaggctgtcatactgcaaacagggagagcgggctgtctgcttggcttcatggtcagtggagaacagcctggacttggagtaagaacagctaggttcagatccctgctttta

SEQ ID NO: 12972 - DNA, 120 bp, synthetic construct
  source 1..120: mol_type = other DNA
agcacctcactatgggaaacataaagcaggaactaacaggactcctctctcaagaaggaatttcagtctacttggggaaagaataatagccaagcagtaactcaggtttgtttagccttc

SEQ ID NO: 12973 - DNA, 120 bp, synthetic construct
  source 1..120: mol_type = other DNA
ttacacagctagtgaggagccgggtgggaccagagcttggtcttcttcccattaaggaagaagggaaacttgcatttgctgaatgtctactatgtcccaagtgctgtgctagatactcta

SEQ ID NO: 12974 - DNA, 120 bp, synthetic construct
  source 1..120: mol_type = other DNA
ggccagaatgatttcggcaggaatatcttgtcctacatgctattgccatgttctctgaggacccgcggcttcgcatgtgtaaatctccctccagagtactcggcagattcccgaagctga

SEQ ID NO: 12975 - DNA, 120 bp, synthetic construct
  source 1..120: mol_type = other DNA
gatggtcatctgagacatggaacttcatgataggaaggtgtcttggaggataactagcaagtctttcactttatagagggggaaactgagtcctcagcgatcagccacatagattctgtg

SEQ ID NO: 12976 - DNA, 120 bp, synthetic construct
  source 1..120: mol_type = other DNA
tgcttaaatggatgacaggctttttatcattagcaagctgccgcactccccactcatcactccaaggcagaccattgcattttctttcattctgataaactccttgagttgaacagaaat

SEQ ID NO: 12977 - DNA, 120 bp, synthetic construct
  source 1..120: mol_type = other DNA
gagtagtgccgactcaaatattccccagaagagagcactttttcaacagtctgaaaagtggcagggacctttggaatgatctgttttaaccttttcattttctgaatgaggcaactgaga

SEQ ID NO: 12978 - DNA, 120 bp, synthetic construct
  source 1..120: mol_type = other DNA
ctaaaggcgcgactctggctctcaaagactctgaagtccaggatcgagaagaactgtgtttacacggagttgtcaaggatcattctgccaatgataacctattatcgtgcaactctgtgc

SEQ ID NO: 12979 - DNA, 120 bp, synthetic construct
  source 1..120: mol_type = other DNA
gttaatacattgctgtgtatactctcaggccaagaatttcctcagtgtttacataccagagcagtactttgaactttgattttctcctctgcctctgtgctggttcagacaccctctcta

SEQ ID NO: 12980 - DNA, 120 bp, synthetic construct
  source 1..120: mol_type = other DNA
cctccccactttaacataactgtaatatataattattgtggaaaatttagaacacatggagaagtaaagagtgaaattgctgactgccctattaccccaacctccaccctatagagatat

SEQ ID NO: 12981 - DNA, 120 bp, synthetic construct
  source 1..120: mol_type = other DNA
gtgcattttaccacaaaatttggttctgattctgttggcttgcttgctgttagtactcatgttagcttctgccattctttccaccattgtcctgggtaaaattttgcatatctgagttgt

SEQ ID NO: 12982 - DNA, 120 bp, synthetic construct
  source 1..120: mol_type = other DNA
tgggcatttgttccttctttctttcttcctttgatttcttgctgtctccttcaattaggcctgtgactgttttcacatggctatttgtatatacaagccatgccaggcatcataatttgt

SEQ ID NO: 12983 - DNA, 120 bp, synthetic construct
  source 1..120: mol_type = other DNA
gcctttaaccctttaaagtttgggaagggaatactttgattttagggttaaatagaaaacttccttaatgactgtggctggaattaaggtgtacttaaagctgtagcagccctggtgggt

SEQ ID NO: 12984 - DNA, 120 bp, synthetic construct
  source 1..120: mol_type = other DNA
agctgtgcttgattaagtgaatgtgtttgatccaagagggcaggggattctggaagagacattaagtacagattgatgagtgtcttgtctcaccgcaaaaacctcctttctctcttcctt

SEQ ID NO: 12985 - DNA, 120 bp, synthetic construct
  source 1..120: mol_type = other DNA
tcccaattccggcaacgggaagtttcttaaggaagttgcctgggctgaccgcaagtgaggtggggaagtggaaagggagcttgacttggcttcgattgatcatttgcacaataaatattt

SEQ ID NO: 12986 - DNA, 120 bp, synthetic construct
  source 1..120: mol_type = other DNA
ttttaccccctttcctaaactgttagattttaatttccttttggtatattcattcttttgtgtgtctcctccccacaccccccccaccattgtttctagaactgtcagtgttcaaatgtt

SEQ ID NO: 12987 - DNA, 120 bp, synthetic construct
  source 1..120: mol_type = other DNA
taatgccagcttgaaattcggtgacccaccttgggatgctttgcctgtcaaggtttttcaatgatgaatagttgttatgagcatgtcagccagaatggtacttttcaagtcattcagtaa

SEQ ID NO: 12988 - DNA, 120 bp, synthetic construct
  source 1..120: mol_type = other DNA
taatatgcaataaaaggcacatatttaatgtgtacaatttgatgagtttgatatttgtatatgcccatgaaaccatcaccagtcaagataatgaacatgtccatcactcctctaaaactt

SEQ ID NO: 12989 - DNA, 120 bp, synthetic construct
  source 1..120: mol_type = other DNA
catatccattgttcagtcacgttctcctgaaagaagtcttcttactgtgtgtaagaaaaatcagtaagcctctgataaatagtcaaagactgtcagaaaagggaccttggaaatatctgg

SEQ ID NO: 12990 - DNA, 120 bp, synthetic construct; identical to SEQ ID NO: 5592
  source 1..120: mol_type = other DNA

SEQ ID NO: 12991 - DNA, 120 bp, synthetic construct
  source 1..120: mol_type = other DNA
atctcaggtcatacagagacattgtctctgtgttttatattttcctttgaggacatctccatttaagtagctgatgcctgagcggggagagaagaatgagccttttccttctgttagagc

SEQ ID NO: 12992 - DNA, 120 bp, synthetic construct
  source 1..120: mol_type = other DNA
attcattccatgacctctgatttttgaggtcagtaattctgcagcctccctcacctttctggtttaaagcaacctcctctctcaggaagttgtttgaaatcaatttaattcctttatatc

SEQ ID NO: 12993 - DNA, 120 bp, synthetic construct
  source 1..120: mol_type = other DNA
ataaaaatctccagttaacaaatatttgttgagcaagtttattgcaaatcgctgtatttaatgtctgcctacaaccttagccacagatgactctctctccctggtatggcaagtgggcag

SEQ ID NO: 12994 - DNA, 120 bp, synthetic construct
  source 1..120: mol_type = other DNA
gcaggagcctcacattcagatactgtggctgcaacattttacctccactacttgggcctgttcagcattttgagtttctatgcctgtaaattaggcctgtctaggaagtgggggtgaggt

SEQ ID NO: 12995 - DNA, 120 bp, synthetic construct
  source 1..120: mol_type = other DNA
tttctctaagtctttggaaactttaagatttgttttgatagaacaaggccgccagttatcatcgcctggttccacttgttttaccccaaaagtctgtgagaatcttttccaggaaaaaaa

SEQ ID NO: 12996 - DNA, 120 bp, synthetic construct
  source 1..120: mol_type = other DNA
atctcagtcttaagacattcatatattagtggaaggcccagatttgtgtttcagttctaccttgccacctctaagcctgttttcttttctttggagaagagggtctaagatgagaccatt

SEQ ID NO: 12997 - DNA, 120 bp, synthetic construct
  source 1..120: mol_type = other DNA
ctttctgtcctatgggttattttcttctccctcaaactgacaatgcaaattaatttgattccccaaagtagtttggaaacagagaagactctaagtgttggctacatgaacaggcctgct

SEQ ID NO: 12998 - DNA, 120 bp, synthetic construct
  source 1..120: mol_type = other DNA
ctcctcctcctccttcaatatttaaccgtcttctttgcatgggggaagggaggggctctcaccacagccaaaagagaatctctgctgatttaaacccagtgtgctttgtagtcatagaga

SEQ ID NO: 12999 - DNA, 120 bp, synthetic construct; identical to SEQ ID NO: 5600
  source 1..120: mol_type = other DNA

SEQ ID NO: 13000 - DNA, 120 bp, synthetic construct
  source 1..120: mol_type = other DNA
gaaaaaattgtcttgctgttcttaacctaccaaagcaggcaagtagacgcacatgtgttttacacacgtcattggaagaaggctggcaataccagcttggttgcaaggaaagaggcaatt

SEQ ID NO: 13001 - DNA, 120 bp, synthetic construct
  source 1..120: mol_type = other DNA
acttcacccaaacttgaagtcactcaagtcttgcttttattttgaaccagaaaaaaagaaaaggaaaacccacgtagaatgcaaaatttaagtaaagatttttgggccagtcgcggtggc

SEQ ID NO: 13002 - DNA, 120 bp, synthetic construct
  source 1..120: mol_type = other DNA
ccatgtatggagataatgatacctgcaagttaattgggaaaactggtggtggagtcagtgcatcagtcagctagtgttgcgtaacaaagcactctaaaaacccagcagcttaaatccatt

SEQ ID NO: 13003 - DNA, 120 bp, synthetic construct
  source 1..120: mol_type = other DNA
ctcacatagcagtcgtgtgcctggcacgtagttcatgctgaatggatcttggcatgtttctggaacttatgtgctgtgctcctcaccttctccccagcctctgtgttgtcccacagatgg

SEQ ID NO: 13004 - DNA, 120 bp, synthetic construct
  source 1..120: mol_type = other DNA
cctctccaaggtatgggtgtatggtgaggtgggaccattgtaagatgtgccttattatccacacggcattgtggtgagaatgatctgagataaggaacacagaagccttgtgaacattca

SEQ ID NO: 13005 - DNA, 120 bp, synthetic construct
  source 1..120: mol_type = other DNA
tgtatatacctatgaaaccaccatagcagtaagagaatatacataacctttacccccaaaaaagtttccaagtgcaccttggtaattgctccctccaatccctactccctccctgtaact

SEQ ID NO: 13006 - DNA, 120 bp, synthetic construct
  source 1..120: mol_type = other DNA
ttttacatttgcaccagcagtggaagggagttccagttgttccacatccttgccaatacatggcatgatcaggctttttaattgtagccattctaataagtatgtagtcctatctcattg

SEQ ID NO: 13007 - DNA, 120 bp, synthetic construct
  source 1..120: mol_type = other DNA
atcaccatttgttgaagactgtccttgctccactaaattgtctttggacctttgttgaagccagtcgtccatatatatgtaactatttctggactctgttaggttccattgatccgtttg

SEQ ID NO: 13008 - DNA, 120 bp, synthetic construct
  source 1..120: mol_type = other DNA
gggcctccttgaagaaaaagcagtcctgcctcttaatagggtacctgtgactcatgagcatccatctcatctgctccccacttctatccctgctacccgcaatctgttggtcacacgtag

SEQ ID NO: 13009 - DNA, 120 bp, synthetic construct
  source 1..120: mol_type = other DNA
tctcatagtgaagtctctttccttaccactgtatccttagtgtcacacataataggtgctcattaaatatgtgttaaataagggactccattttagtggcacctcctcacctgtctaata

SEQ ID NO: 13010 - DNA, 120 bp, synthetic construct
  source 1..120: mol_type = other DNA
gagccgagatcatgccactgcactccagcctgagtgacagagcaacaccctgtatcaaaagtaaaaaaaaaaaaaaaaaaaaaaaaatccctttaatttccgtctttcactccctgctca

SEQ ID NO: 13011 - DNA, 120 bp, synthetic construct
  source 1..120: mol_type = other DNA
agcaagcacaatccacatttccctctctttctgcccctccccgtcctggcaggtccctggatggccggttgcaggtgtcccatcggaaggggctccctcatgtcatctactgccgcctgt

SEQ ID NO: 13012 - DNA, 120 bp, synthetic construct
  source 1..120: mol_type = other DNA
ttttgcttgctggggcagtaatcctgctgcgttcctcttagagcattctaatttggacgtgacgttcatcctgggttagtttactgggctgagattggctacaggcctgtgtgcttgggt

SEQ ID NO: 13013 - DNA, 120 bp, synthetic construct
  source 1..120: mol_type = other DNA
tctcagagccaagctgtgaaggccttttaacagaccaccttccttctgattcccagagaccccaccccctggctacctgagtgaagatggagaaaccagtgaccaccagatgaaccacag

SEQ ID NO: 13014 - DNA, 120 bp, synthetic construct; identical to SEQ ID NO: 5614
  source 1..120: mol_type = other DNA

SEQ ID NO: 13015 - DNA, 120 bp, synthetic construct
  source 1..120: mol_type = other DNA
gtttcttctccctcctcttcctccttgtgcctccctttactctgtcccctctcccttcttcctttcttctcattaagtgtgcctgcagggtcctgttgtgaacatgagtgatttatctac

SEQ ID NO: 13016 - DNA, 120 bp, synthetic construct; identical to SEQ ID NO: 5616
  source 1..120: mol_type = other DNA

SEQ ID NO: 13017 - DNA, 120 bp, synthetic construct
  source 1..120: mol_type = other DNA
ttttctttctgctgtgttgggctacccctccttgatatgtaagtgtttagtaacttggctctccaggccaagaatcttttgtgaagtctcacaacttgtctcacctcgcaggttctccaa

SEQ ID NO: 13018 - DNA, 120 bp, synthetic construct
  source 1..120: mol_type = other DNA
tttctaacccagtagggtccttcagttctccagcttgggataggctttggcatggaacctgccaaagggcttcaaacaaatgaaatatccatttagtttttattgaggggagatttttat

SEQ ID NO: 13019 - DNA, 120 bp, synthetic construct
  source 1..120: mol_type = other DNA
ttgagagtttgctgtttactgttattcggagtgcttcctgcatgttaacctgatctttataactttataaggcagaagcgttgtgatttttcattttacagattaggaaaccggggaaca

SEQ ID NO: 13020 - DNA, 120 bp, synthetic construct
  source 1..120: mol_type = other DNA
gacagctcttcctctggaggaggctgagataaatgctttcgagaaatggtagcagagctgggagaatgcatttgagagggaatcatgggcctgaatgagcagggtttgttgaccagcgtt

SEQ ID NO: 13021 - DNA, 120 bp, synthetic construct
  source 1..120: mol_type = other DNA
cccaaaccctaggatggaggcaagcacacagggagctcttcctaggaaaaaatggggacatctcaggacatctgattatttcctttaaagagattattatgaaattactgtacaaaaaga

SEQ ID NO: 13022 - DNA, 120 bp, synthetic construct
  source 1..120: mol_type = other DNA
gtggtcgtttgctgtgaattgccctctagattgtgtagactaggatgatgggatgtttcttgagcttggacccaaggcagcatctcctgttgacatagttctccctccctactgacgctt

SEQ ID NO: 13023 - DNA, 120 bp, synthetic construct
  source 1..120: mol_type = other DNA
tgaatctcttgcacatgtttttaataggcatcccttaatccaagtgttgccttctgggttttattctgttttctttttcttaaacataatggaacgtctgtgccagcttggaacaggact

SEQ ID NO: 13024 - DNA, 120 bp, synthetic construct
  source 1..120: mol_type = other DNA
tgcttttgcagtaactataacctcatggttatcccatttatagccgccttctttccagagtcctttttgtttctctggtactaaccagggtaaggataagtactttgggaaagaaatgag

SEQ ID NO: 13025 - DNA, 120 bp, synthetic construct
  source 1..120: mol_type = other DNA
tatgttcaagctgacccgtgccagagaatgatctaggtggtcagctttattgtagctttattgtcttctagtgtaccacagtgattgtacggactacaaaactgaggttacagaaggagg

SEQ ID NO: 13026 - DNA, 120 bp, synthetic construct
  source 1..120: mol_type = other DNA
tggctttatagcttgtgccccatgatccagttaaatatctagggcaatggttttcaactggaggccgttttgccccctagaagacatctggcaatatccgcagcctttttttattgccac

SEQ ID NO: 13027 - DNA, 120 bp, synthetic construct
  source 1..120: mol_type = other DNA
tcttctgagaaagagaaccagccccttgtagaatggcagttttgctttgaggagcccctaatggagactgtacagacaactgggacaaatacagattttctttcagaagggtttgtgtcc

SEQ ID NO: 13028 - DNA, 120 bp, synthetic construct
  source 1..120: mol_type = other DNA
agattataatccctctgaaatgcggggaaatggttttccagagtgtccatgggaccccatcgagggagcatggggcttgggacacccaatgacccagtagcccaccctgtgtccacagac

SEQ ID NO: 13029 - DNA, 120 bp, synthetic construct
  source 1..120: mol_type = other DNA
tacgcatcacttggtttgcttatgaagttatcaagcttagaggattttacgatccagaatcacaactgtcagaacttagaagggctgtagagagatggcagagtgaggttttctcagacc

SEQ ID NO: 13030 - DNA, 120 bp, synthetic construct
  source 1..120: mol_type = other DNA
atatatatatatatatatatatatatatattttttttttttttttttttggagcggggagaccaagtctcgctcttgtctcccaggctggagtgcgatggcacaatcttggctcactgca

SEQ ID NO: 13031 - DNA, 120 bp, synthetic construct
  source 1..120: mol_type = other DNA
gcaatccactcacctcagcctcccaagcagctaggactacaaggatatgccactatgcccagttaattaaaaaaaaaatgtttttgtagagatgaagtctcattacattgcccaggctgg

SEQ ID NO: 13032 - DNA, 120 bp, synthetic construct
  source 1..120: mol_type = other DNA
tcatgattgcgttgtcaatctggaggtgattggattaggttttctctatgcccacagatctaactgtgctttccctgaacttccagggagcagatgtagcatctgataggtctgccttta

SEQ ID NO: 13033 - DNA, 120 bp, synthetic construct
  source 1..120: mol_type = other DNA
cagatggtagtggagaagtggtagaccacaggcaggggaaactttagaatgcagaaagtctgaaatgataatagcacaccaggtttccagagcattttgtggttgcatttatagagtaca

SEQ ID NO: 13034 - DNA, 120 bp, synthetic construct
  source 1..120: mol_type = other DNA
ccttgcaggtatgtcagtggcacctcccagtgaggagatgggttcaaggggagggactgggttggccttccctttgcatggtactgagtgtggagtgtgtggcaaatgcatcacacacca

SEQ ID NO: 13035 - DNA, 120 bp, synthetic construct
  source 1..120: mol_type = other DNA
accctggtgatgctgaggagcccaggatattaaaactgagagtccgggaagggaggaggagatttgggtagttataaaggaacaaaattttctcgctgagaaatgacttttttagagtcc

SEQ ID NO: 13036 - DNA, 120 bp, synthetic construct
  source 1..120: mol_type = other DNA
caagctactctccctttctcttcatttttccagatgtttggaatccattttgttttgcagtcatgctgcactcaggccaaacccatttcaatattggccttgggccaccgtttgtaatga

SEQ ID NO: 13037 - DNA, 120 bp, synthetic construct
  source 1..120: mol_type = other DNA
cgttctgcttgtaagattttccaaaataaggccgtagatgagaattatatcagcacattgggaaccgaaggcatgcggacactgttggcgctttgtaaaaaacacccctcaatcagacag

SEQ ID NO: 13038 - DNA, 120 bp, synthetic construct
  source 1..120: mol_type = other DNA
ccagtgtgtcttagagacatcaagtatggtaggggagggcaggcttggggaaaatggccatgcaggaggtggagaaaattggaactctactcaacccattgttgtcaaggaagaagaaat

SEQ ID NO: 13039 - DNA, 120 bp, synthetic construct
  source 1..120: mol_type = other DNA
ccaacataggcaaatgaaaagggctattaaaatatttttacacctttgaaaattgcaggcttggtacaaagaggtctgtcatcttccccctgggatataagatgatctagctcccggtag

SEQ ID NO: 13040 - DNA, 120 bp, synthetic construct
  source 1..120: mol_type = other DNA
cttgggaactagcttcaggcacagcctgattctggtgatccagtgatctatggaagtcgtgtcttactccaggtgaagggggaaaaaaaaagcctatactttggcaggttatgaactttg

SEQ ID NO: 13041 - DNA, 120 bp, synthetic construct
  source 1..120: mol_type = other DNA
caggagcagggactttgactcttaggaagagcacacatgagggcaaggctgctggcagacgtctccattgtccttatgttgtctgtgttgtatttttttttttttattgaccatggtgat

SEQ ID NO: 13042 - DNA, 120 bp, synthetic construct
  source 1..120: mol_type = other DNA
ttcttaaaaccattcagacagataactatttaattttttttaagaaagttggaaaggtctctcctcccaaggacagtggctggaagagttggggcacagccagttctgaatgttggtgga

SEQ ID NO: 13043 - DNA, 120 bp, synthetic construct
  source 1..120: mol_type = other DNA
aaaccagtgtcttgctgagactcttcccgttgctggcttcgaagaggcaagctgccatattgttagcttccctatggagagcaccacatggcaaggaacagagggggtctccagccaaca

SEQ ID NO: 13044 - DNA, 120 bp, synthetic construct
  source 1..120: mol_type = other DNA
gcgtacggtgggtgtagagattttctgggcgacgtgacctaagaaatgactttagaactggctaatcattggttttggagggactaaaagtagttcctggttggtgaaaataaatcatta

SEQ ID NO: 13045 - DNA, 120 bp, synthetic construct
  source 1..120: mol_type = other DNA
agttggcagcaacaacacggccctggtcgtcgtcgccgctgcggtaacggagcggtttgggtggcggagcctgcgttcgcgccttcccgctctcctcgggaggcccttcctgctctcccc

SEQ ID NO: 13046 - DNA, 120 bp, synthetic construct
  source 1..120: mol_type = other DNA
actttttgagtactgagagtgacagcggtatgcaggacacattcttagcacctaactgaacccctccttgcccccaataaaacatgcttcctaataaaagacacagctgatcttactgtt

SEQ ID NO: 13047 - DNA, 120 bp, synthetic construct
  source 1..120: mol_type = other DNA
tgtttacttaaatgggtttgttacagaacaaatgtaatagagatggaccaagcatttgtaattcggagtagctttaggtctaaagacgatggtgaattatgtaggtttaagttgttggaa

SEQ ID NO: 13048 - DNA, 120 bp, synthetic construct
  source 1..120: mol_type = other DNA
ggcctctgctagggaggttaaccctacagaatctgtagggttcattatatttaaactgcatatttcggcttgtctaaatttttgcctattttggtgaaaacatgttgttttgtcgatgtt

SEQ ID NO: 13049 - DNA, 120 bp, synthetic construct
  source 1..120: mol_type = other DNA
aaaatgtgtaattttggtaatgggaaatttgactgaattccagtttctcaggaacaaggtattttaggttgtgtcaccttaacactattacctggtgtaattggcatccgggaacatttg

SEQ ID NO: 13050 - DNA, 120 bp, synthetic construct
  source 1..120: mol_type = other DNA
ccacgcctggcaagtagttttcaatcttggctgtacttttagatcccttgaggagctttacaaaatactgatacctgaattctagccccagaaattatgatttggttggtctagggtgca

SEQ ID NO: 13051 - DNA, 120 bp, synthetic construct
  source 1..120: mol_type = other DNA
ttgtcttcttagggcgttaatctacttggtaaaccttacattttcaagcccccaattaactagtcacttaactggtttctgagaggcaggttgcattgggctttttctgtcagggcttaa

SEQ ID NO: 13052 - DNA, 120 bp, synthetic construct
  source 1..120: mol_type = other DNA
gctaagccaggaatcattgtacataaacacattaggtgtgtcttacatcataaatatgcctactaaaactagttgaaggaagaatgtgtatagatgctgaaataatgaaggggctggcta

SEQ ID NO: 13053 - DNA, 120 bp, synthetic construct
  source 1..120: mol_type = other DNA
atttgtatgggtggtgaaggagcagtggtgggtaaactgctggcactttaaaatgactctaggcagttataccaaacatatgagtcctcattgtgttctttatagtcaaacacacataag

SEQ ID NO: 13054 - DNA, 120 bp, synthetic construct
  source 1..120: mol_type = other DNA
agtgtgtcaacactgggaagatctgtgtaactcattgaaccaatattttcccaaatgaccaattcatgttacaaaatcgtgcatgggtaggcgatccgttcaaagtacaacatagacaaa

SEQ ID NO: 13055 - DNA, 120 bp, synthetic construct
  source 1..120: mol_type = other DNA
cctcagattgctatatccagggtttcaagcagcatcaccaggactcttgactttgctttctttctgtttctcaggtagtttgcaggctaactatccccagcttcaaggaagcatgaagag

SEQ ID NO: 13056 - DNA, 120 bp, synthetic construct
  source 1..120: mol_type = other DNA
aatacatgtttgacacatataatacagttaattcaaaagtaaactaacatctgagaaaaaatgtcaacactccttacctaaaatacatgaatttacatgagaacctctctctggccagta

SEQ ID NO: 13057 - DNA, 120 bp, synthetic construct
  source 1..120: mol_type = other DNA
agctgttctccaggctctcactgaagttttctaatacaaatctaatgctgttttttctcctctttctaccatgaacctactctagacaaagctcttatccgtctctgcttttcctcatca

SEQ ID NO: 13058 - DNA, 120 bp, synthetic construct
  source 1..120: mol_type = other DNA
catcctgcaatgtgagagacagcgaataattatcttgcatcccacaagactttcagatgccccagaaattcatgtaggaggaaaatataattagcccagaacctaactctataatatata

SEQ ID NO: 13059 - DNA, 120 bp, synthetic construct
  source 1..120: mol_type = other DNA
agtaaagctaaggtggtgatataaattatttgttggaaaaaaaatgggatgttggtctgagagagtccagacccactttcttactatgggcttcctgtttttgtatctgtagtgctttgt

SEQ ID NO: 13060 - DNA, 120 bp, synthetic construct
  source 1..120: mol_type = other DNA
tttgttgtaagacaattccacagaataaaaagctatggtcagtccagaaacacttgcctggtatatgtcaggaactgtgcatggtgctgggaatttctaaaatgagagtgttgttgctgt

SEQ ID NO: 13061 - DNA, 120 bp, synthetic construct
  source 1..120: mol_type = other DNA
ccttcagcatgtgtattaatgtgggcaagtgctctaagacatatgaaaaactgcttctctgcatggggtttatgagttgagacagacatttatgtgaaagagataacaacagagggagga

SEQ ID NO: 13062 - DNA, 120 bp, synthetic construct
  source 1..120: mol_type = other DNA
tgggattatataatgtgtgaccttttgtcactgacttctttcacttagcatgtgttttcgaggcttatccatgttataatttgttagtactttattcttttttatggttgaataatattt

SEQ ID NO: 13063 - DNA, 120 bp, synthetic construct
  source 1..120: mol_type = other DNA
taactagtgctgatcctcataagtaatcctttaaaaaagtgctggtaagattttcctttagggtgactagtaaagtcagtaagacttgattgagcatgccactatcataatgagaagacc

SEQ ID NO: 13064 - DNA, 120 bp, synthetic construct
  source 1..120: mol_type = other DNA
agaaaatttggaaaataaaaataaaaagcagaaaacccacacttcgcaagaactacctttagcactttggtattcatttttgtagcctgttgttttcttttttttttttttcctagacgg

SEQ ID NO: 13065 - DNA, 120 bp, synthetic construct; identical to SEQ ID NO: 5662
  source 1..120: mol_type = other DNA

SEQ ID NO: 13066 - DNA, 120 bp, synthetic construct
  source 1..120: mol_type = other DNA
gcagagtaatggtaggtaatctgtttcttactactttctctttgttttgtcctatcctctctgtttttttgttgacctagaattagtttgtgtgagcggcaggcagtaacattaacaaga

SEQ ID NO: 13067 - DNA, 120 bp, synthetic construct
  source 1..120: mol_type = other DNA
gcttgaacccgggaggtggaggttgcagtgagctgagatcacgccattgcactccagcctgggcaacgagcgaaactgtctcaaaaaaaaaaaaagtggggggaggctgggcacggtggc

SEQ ID NO: 13068 - DNA, 120 bp, synthetic construct
  source 1..120: mol_type = other DNA
atcacacacctcccctattctaaaattattgatgcactgttattgatgggattgtacgggttgatagcctttctatagtgactgtagggctgtattcagccttgtagatccccctagtgg

SEQ ID NO: 13069 - DNA, 120 bp, synthetic construct
  source 1..120: mol_type = other DNA
tctaaaaatatggttaaataataatagctaacactgggtactcgtgtgtcaggtcagactgagctaaatgatttctgagtattgtgtcatcattctcatgatacttctacatgggaggtg

SEQ ID NO: 13070 - DNA, 120 bp, synthetic construct
  source 1..120: mol_type = other DNA
agttggtacataaagatgttatgattgctgattaaactgaagagtcatctgaaaagcaaaagcagtgagtaccaagttgaccagttgtatcctcaaatcagctagcaaaaccagtaagtt

SEQ ID NO: 13071 - DNA, 120 bp, synthetic construct
  source 1..120: mol_type = other DNA
ttggttaatggaaagatgttatgctgtatcagctggaatctagctttgcttatgaaggtgtaatcacataggtgaaagatgttgattactgagttttctcacaccatatattaatcaaat

SEQ ID NO: 13072 - DNA, 120 bp, synthetic construct
  source 1..120: mol_type = other DNA
gtgagttctagaatcagatgtagtcagcaagttgagttttcctaatcattgcttatttatgtgtagtcacttggggggaaactccaagtaagtaaacattaaaagtaactgtagtatctt

SEQ ID NO: 13073 - DNA, 120 bp, synthetic construct
  source 1..120: mol_type = other DNA
ccacttcaaagcaacatgtttttggtttgctatctaagagatgacagtctcactataggcagcatattctaaatgggtcatataggttaagcacttgagaacccagttccttaatcactt

SEQ ID NO: 13074 - DNA, 120 bp, synthetic construct
  source 1..120: mol_type = other DNA
tttgtaagttagctaagagtattgcctgtagaattgttaaaaatatgaacaaaaccataattaacctttaaagataacttgcagaatctgggggatgagtaggaagggaggttgctaaaa

SEQ ID NO: 13075 - DNA, 120 bp, synthetic construct
  source 1..120: mol_type = other DNA
ttatcagataaaattggtccttcatttagtatatgaaatcataagatgacatctatgaatgtaccatgttaatgtcttcttgttcctctaggtcagcctgccagtatactggggggcagc

SEQ ID NO: 13076 - DNA, 120 bp, synthetic construct
  source 1..120: mol_type = other DNA
tgtgtcttgtatatccacgcataatggattgaaaccctttgagtgctaagttctcaaggtttccctcagcgtagtattcagtgtactttggataatgttgaatctatagataactctgtg

SEQ ID NO: 13077 - DNA, 120 bp, synthetic construct
  source 1..120: mol_type = other DNA
cacaatgagcttgcattccagcctcccatttccaatcatcctggtaagtgtatttcaaaattgatttcctgtatttagattgatttagtggtgattgaaacgcacaaacacaggctttaa

SEQ ID NO: 13078 - DNA, 120 bp, synthetic construct
  source 1..120: mol_type = other DNA
atgttgcccaggctggtctcgaactcctgggctaaagcagtcctcctgctaataattttatttatttatttatttatttatttttttccgagatgggatctcgctatgttgtccaggctg

SEQ ID NO: 13079 - DNA, 120 bp, synthetic construct
  source 1..120: mol_type = other DNA
gtactccactgtgtataagtcaagcataaagaattttaagcataccggaataatacaggaagttcccccattgtactcattcctcagtttcagccattatcaagtaatgaccaatcttgt

SEQ ID NO: 13080 - DNA, 120 bp, synthetic construct
  source 1..120: mol_type = other DNA
ctcccaaaatgctgggattacaggcatgagccaccatgcctggcccttttaaagtgatgaatacatccctaaacagtctagtaatctggctttacttgtttttttttttttttttttttt

SEQ ID NO: 13081 - DNA, 120 bp, synthetic construct
  source 1..120: mol_type = other DNA
actctcatggcccactgcagccctgacctcccagacttaggtgattctcccatctcagcctcccgtgtagctgggactacaggtggacacaaccacgcccagccaatttttctatttttc

SEQ ID NO: 13082 - DNA, 120 bp, synthetic construct
  source 1..120: mol_type = other DNA
tgttatctgagttatttcatttgtttgcttatttgtctgcccctgcacctctgtgagaacagggactgtagctgttttgttttctactgtgtatgcagtgcctagaaagatccctagata

SEQ ID NO: 13083 - DNA, 120 bp, synthetic construct
  source 1..120: mol_type = other DNA
tgtggagtgcaagtgaaagccttatatctttctcatgggaggatgttctttcccatttatttcctatagctcctgagtattggtgttccattgcttactttgaaatggatgttcaggtag

SEQ ID NO: 13084 - DNA, 120 bp, synthetic construct
  source 1..120: mol_type = other DNA
ggctctatcacttgctgtcatgtgactttggcaaattacctaacctctaagccattctgcctaatagaattttctgtgatgaagaaaatgatttatatttgcactgtccagttcggtagc

SEQ ID NO: 13085 - DNA, 120 bp, synthetic construct
  source 1..120: mol_type = other DNA
gttgtcaaaagaattgaaatctgggtggaaggaatggaaaaatgttttatatattaaataataagaaattgtgtttaagtataaaaaacacattttctgagggcatttattgacattatc

SEQ ID NO: 13086 - DNA, 120 bp, synthetic construct
  source 1..120: mol_type = other DNA
ataacttattaccaggaagttgcttaggataaaaataatgtagccccatagcatccataaaaatggaattgcctgattacctcacaacagcaaacccagtttctcatttccagttatagt

SEQ ID NO: 13087 - DNA, 120 bp, synthetic construct
  source 1..120: mol_type = other DNA
aatggaattgtctctatgaggtggaaattatttgtattttgcagtttttttccacaagtaatttctgtattggttatttatgctgtattattattatttttgagacagagtcttgctctg

SEQ ID NO: 13088 - DNA, 120 bp, synthetic construct
  source 1..120: mol_type = other DNA
aatgtggaatcgtgcaagtgtaatttcttggatgtcaaatagatacattgtgacttatttatattttggtacagatggcctttgaaaagcccccaaggtgtgagacaagtcatcacttga

SEQ ID NO: 13089 - DNA, 120 bp, synthetic construct
  source 1..120: mol_type = other DNA
tcattcgtttttttgggtagcagtaactaagggatttgtaagttatcagattttcacaggagatgatattattggggtaaattgtatgtagatagcatgcacccctggaaggagtgccca

SEQ ID NO: 13090 - DNA, 120 bp, synthetic construct
  source 1..120: mol_type = other DNA
agtatttgtgtgttttcatttctcttgggtacatacctaaaagtggaattgctggattgtaagataactctatgtaaactttttgagaaactgatagactgttttacaaaatggctgcac

SEQ ID NO: 13091 - DNA, 120 bp, synthetic construct
  source 1..120: mol_type = other DNA
agttattagtgaacctaactgaataattttaggtcttctggtttgagtgctataattacgtaaataatctgtggaagggaggtttgctgaggtgcccaatgaatcatttttactgcatct

SEQ ID NO: 13092 - DNA, 120 bp, synthetic construct
  source 1..120: mol_type = other DNA
tgagaagacaagccacagactgggtgaaaatatttgcaaaagacacatctagtaaaggactgttatccaaaattacaaagaactcttaaaactcaacaataaaataatgcaacaataaaa

SEQ ID NO: 13093 - DNA, 120 bp, synthetic construct
  source 1..120: mol_type = other DNA
aatgccttccaaatgtcatagcctagaagttctgaaacgaatggactgtgagaaatttgaggaagtagtggtttcacttctgggtgttgtgggctttctgatttctagaacctgactttg

SEQ ID NO: 13094 - DNA, 120 bp, synthetic construct
  source 1..120: mol_type = other DNA
cattccagtactttcataaatataagggtagatatggcaaccccttccttactatgccagttcttcacttggttgataaaagtaaaattatttattaacgccttaactcatcctgaaaga

SEQ ID NO: 13095 - DNA, 120 bp, synthetic construct
  source 1..120: mol_type = other DNA
tttttctttatgaactcatagtatgaaatgttttttcttaaaaggtctttgatttgcgtcagtgtcatcgacagatgcagcagcaggcggctactgcacaagctgcagcagctgcccagg

SEQ ID NO: 13096 - DNA, 120 bp, synthetic construct
  source 1..120: mol_type = other DNA
gatgaatgcagatggactatatgactgtatgttctgactggaaaattagatgcagtctccattgtgacttatgttcaggagtttacaatttagaggtagattaggcatattcattgagag

SEQ ID NO: 13097 - DNA, 120 bp, synthetic construct
  source 1..120: mol_type = other DNA
catgccgattgcagacccacaacctttagactgaggtcttttaccgttggggcccttaaccttatcaggatggtggactacaaaatacaatcctgtttataatctgaagatatatttcac

SEQ ID NO: 13098 - DNA, 120 bp, synthetic construct
  source 1..120: mol_type = other DNA
tgccatcaatgatcatatcaattggcagtgactttgtatagagaatttaagtagaaaagttgcagatgtattgactgtaccacagacacaatatgtatgctttttacctagctggtagca

SEQ ID NO: 13099 - DNA, 120 bp, synthetic construct
  source 1..120: mol_type = other DNA
attttcttctgtaaaagtttggtgatttaagttttattggcagttttataaaaagacatcttctctagaaattgctaactttaggtccattttactgtgaatgaggaataggagtgagtt

SEQ ID NO: 13100 - DNA, 120 bp, synthetic construct
  source 1..120: mol_type = other DNA
accttgctttttccagaaacatggctgttttgtattgctgtaaccactaaataggttgcctataccattcctcctgtgaacagtgcagatttacaggttgcatggtctggcttaaggaga

SEQ ID NO: 13101 - DNA, 120 bp, synthetic construct
  source 1..120: mol_type = other DNA
ccagccttatccctagcagttgtcccagtgctgctaggttgcttatcttgtttatctggaatcactgtggagtgaaattttccacatcatccagaattgccttatttaagaagtaaaacg

SEQ ID NO: 13102 - DNA, 120 bp, synthetic construct
  source 1..120: mol_type = other DNA
agatatttttgacctataggtgcctttatgagaattgagggtctgacatcctgccccaaggagtagctaaagtaattgctagtgttttcagggattttaacatcagactggaatgaatga

SEQ ID NO: 13103 - DNA, 120 bp, synthetic construct
  source 1..120: mol_type = other DNA
acacactctggtcagagtttattaaggctttcgagtcatgacattatagcttttgagttggtgtgtgtgacaccaccctcctaagtggtgtgtgcttgtaattttttttttcagtgaaaa

SEQ ID NO: 13104 - DNA, 120 bp, synthetic construct
  source 1..120: mol_type = other DNA
gttctgttcaatgcattggacatgtgatttaagggaaaagtgtgaatgcttatagatgatgaaaacctggtgggctgcagagcccagtttagaagaagtgagttgggggttggggacaga

SEQ ID NO: 13105 - DNA, 120 bp, synthetic construct
  source 1..120: mol_type = other DNA
cacctataaaatggggagggtgataataatagcaactagtggccgggcacggtggcttatacctgtaatcccagcactttgggaggctgagacgggaagatcacgaggtcaagagattga

SEQ ID NO: 13106 - DNA, 120 bp, synthetic construct
  source 1..120: mol_type = other DNA
ttgagccaccctagggaaattcttgattttcctcggcccagtccatggcgtcactgaagtggatgttcaatgagaaaataataaggatgaatgctgcagttggagttcaagagaggaggc

SEQ ID NO: 13107 - DNA, 120 bp, synthetic construct
  source 1..120: mol_type = other DNA
gcagtggtatagtcacagcccactgcagcctctgcctgctgcgctcaagcaatcctccccagtcagcctcctaagtagctgggactacaggtatgcaccaccatgcctggccaatttttt

SEQ ID NO: 13108 - DNA, 120 bp, synthetic construct
  source 1..120: mol_type = other DNA
cacccacttccccagcggacgggcctgggacccgccccttcccctcctgcctctctcctcttttctttcccaatcaggcccttcctggtgtgcagaagggaaagctgattccacagcagc

SEQ ID NO: 13109 - DNA, 120 bp, synthetic construct
  source 1..120: mol_type = other DNA
caggtcggggcagcctctgtgccaagacaactttagggaacaacaaacctgtctgacgggtttgagattccacatgggacaggctttctcacctccgcactgacgctaggacagctgggt

SEQ ID NO: 13110 - DNA, 120 bp, synthetic construct
  source 1..120: mol_type = other DNA
gaacttcttttttctttctttcttttttttttctattttgagacagggttttgctctgtcgcccaggctggagtgcagtggtgtgatctcggctcacagaacccttgaactccttgcctg

SEQ ID NO: 13111 - DNA, 120 bp, synthetic construct
  source 1..120: mol_type = other DNA
ggcaggttggggccatgtattcatccgagatgaatttctcagtgccacccagggccaggccccacttgcaggtgccagggccactacagagaacagacacaccctgagggggtccccagg

SEQ ID NO: 13112 - DNA, 120 bp, synthetic construct
  source 1..120: mol_type = other DNA
acagggttgcaagcgggactggcagagttgaaacaaaagtcagggagcagggctgggcgcagtggctcaagcctataatcccagcactttgggaagccgagggaggctgatcacctgagg

SEQ ID NO: 13113 - DNA, 120 bp, synthetic construct
  source 1..120: mol_type = other DNA
gctgacagaaattgaaactacaactggctcctttttaaaaaacaggaattttttgctcatggaactgaaagatttagggatagagctaactcaaggccacccctctcagcaccgttgatg

SEQ ID NO: 13114 - DNA, 120 bp, synthetic construct
  source 1..120: mol_type = other DNA
caccgtgcccggtctctcttattttttttttcttcaacagactttgcctttatggggaaaagatgatgccataagccccaaatctcatctgcccatcatcttaacagccctggcaggagt

SEQ ID NO: 13115 - DNA, 120 bp, synthetic construct
  source 1..120: mol_type = other DNA
tcccgggaggcagaggttgcagtgagctgagattgcgccactgcactccagcctgggcaacacagtgagactctccttctcaaaaaaaaaaaaaaataggccaggcatggttgctcacgc

SEQ ID NO: 13116 - DNA, 120 bp, synthetic construct
  source 1..120: mol_type = other DNA
cacccagctagttttttttttgttttgttttttgttttttttgagacggagtctcactctgtcgcccaggctggagtacagcggctccatcttggctcactgcaacctctgcctcttgtc

SEQ ID NO: 13117 - DNA, 120 bp, synthetic construct
  source 1..120: mol_type = other DNA
aggtaatagttttaaggttttttttagtagagatggggatctcactatgttgctcagcctggtctcgaactcctggcctcaagtgatcttcccgcctcagcctcccaaagccttgggatt

SEQ ID NO: 13118 - DNA, 120 bp, synthetic construct
  source 1..120: mol_type = other DNA
agggagttggaggctgcagtgagcggtaatcatgccactgcacttcagcctgggggacagagtgagaccctgtctgaaaaaaaaaaaaattgggccaggtgcggtggctcatgcctgtaa

SEQ ID NO: 13119 - DNA, 120 bp, synthetic construct
  source 1..120: mol_type = other DNA
cacacacaactgatgcaggatataaccgagtcattccatcccaggtaatacccaagtacccacgggaggatcaacatccacggaaaagcctgtgtacaaatttcatagtagcaaatgctt

SEQ ID NO: 13120 - DNA, 120 bp, synthetic construct
  source 1..120: mol_type = other DNA
cgaactgctggcctcaagtgatcctccctcctggccctgcacagtgctgggatgacaggctgagccacctcaccggcctcttatgtgccttttaatctgcaggttcgccctccctctctc

SEQ ID NO: 13121 - DNA, 120 bp, synthetic construct
  source 1..120: mol_type = other DNA
ctggtggcatgcacctgtactcccagctacttgtgaggctgaggtgggaggactgtttgagccatggagtctgaggctgcagtgagctacgattgcacctggaacccaggcctctcccgt

SEQ ID NO: 13122 - DNA, 120 bp, synthetic construct
  source 1..120: mol_type = other DNA
gcccggcctattattttttactttttttttttttttttgaggcggagtcttgctctgttgcccaggctggagtgcagtagcatgatctcggctcactgcaaccaccgccttccaggttca

SEQ ID NO: 13123 - DNA, 120 bp, synthetic construct
  source 1..120: mol_type = other DNA
agcggggcggttgcgatcaaggccccgactttttttttttttttttttttttttttttttttttgagacggagtctcgctctgtcgcccaggccggactgcggactgcagtggcgccatc

SEQ ID NO: 13124 - DNA, 120 bp, synthetic construct
  source 1..120: mol_type = other DNA
gcctgggcaacaaagcaagataccgtctcaaagaaaaaaaaaaggaaaacccagttccccacctagaacccaggccccgacctgaaacctgggcccctccacttgtaaccagggaccccc

SEQ ID NO: 13125 - DNA, 120 bp, synthetic construct
  source 1..120: mol_type = other DNA
ccacccataagccagttcccttaacagaacctgcagtttggtgaggatgagagaatgcaaagaaagcattttccccaggactaccataaatagtcataagcatcactttttcctattacc

SEQ ID NO: 13126 - DNA, 120 bp, synthetic construct
  source 1..120: mol_type = other DNA
atgggtgggtaggagagatgacaggtgacagcctggaggaagagatggagggaggcttgagccctgggcggggctggcagaagcccccacctataacttgggacctctgaacctggaacc

SEQ ID NO: 13127 - DNA, 120 bp, synthetic construct
  source 1..120: mol_type = other DNA
cattttccccaggactaccataaatagtcataagcatcactttttcctattaccatagcattaccatttgtcacggtttacccacccgaggtcactctgcctctttttcactttattttt

SEQ ID NO: 13128 - DNA, 120 bp, synthetic construct
  source 1..120: mol_type = other DNA
atatctacgagttcggtggggattcatacaacagtgcatctcattcccgaccgtgtcttatctttgatgacagggtcatcgttaatcctccatccagagaaatgggaagttagaggccag

SEQ ID NO: 13129 - DNA, 120 bp, synthetic construct
  source 1..120: mol_type = other DNA
gctgcgagctaccgcgcctggcccctagtttttgtactttttgtagagattggttttcaccatgttgcccaggctggtcttggactcctgaactcaagcaatcctcccgcctcggcctcc

SEQ ID NO: 13130 - DNA, 120 bp, synthetic construct
  source 1..120: mol_type = other DNA
ttgaaaattcatgcgtgtttgtgtgaacaggtttctagttctctcgggcatatatcttggggtggaattgccagtacatatagcaactctatgtttaaacttttgactcttttccaaagg

SEQ ID NO: 13131 - DNA, 120 bp, synthetic construct
  source 1..120: mol_type = other DNA
gtctcgaactcctgacctcgtgatcagcccaccttggcctcctaaagtgctgggattacaggcgtgagccactgtgtctggccagtgagatattttatttgtgccctttttttttttttt

SEQ ID NO: 13132 - DNA, 120 bp, synthetic construct
  source 1..120: mol_type = other DNA
caggaagagcacaagaagaaacacccggactcttctgtcaatttcgtggaattctccaagaagtgtttggagagatggaagaccacgtctgcaaaggagaagtgaagtttgaagagaagg

SEQ ID NO: 13133 - DNA, 120 bp, synthetic construct
  source 1..120: mol_type = other DNA
atgatgcctgtgcagtgggcttgttttgctaagaatgtgaattctagtacagctcagtattagcttcagtataaaactgtacaaattttcgtatagctcataagattctctgtacagaaa

SEQ ID NO: 13134 - DNA, 120 bp, synthetic construct
  source 1..120: mol_type = other DNA
agcattatctccagattccaagaagttggggtgtgagccagcaatcagtacagaaaagagataccaaaataagtttgagttggggagtgttccttcaacttcagttttctggaagagatc

SEQ ID NO: 13135 - DNA, 120 bp, synthetic construct
  source 1..120: mol_type = other DNA
ccccaccgaggtcacagccgtggcctcgtctccccatgcctgcttcccgccccctgcccgtgacgggcgtctccgaggaccaatgagcgcgctgtatccacccctcgggcggggccaagc

SEQ ID NO: 13136 - DNA, 120 bp, synthetic construct
  source 1..120: mol_type = other DNA
cggtgcccgccggtccgcagaccctgcaccgggcttggactcgcagccgggactgacgtgtagaacaatcgtttctgttggaagaagggtttttcccttccttttggggtttttgttgcc

SEQ ID NO: 13137 - DNA, 120 bp, synthetic construct
  source 1..120: mol_type = other DNA
ggccaggcgaaatgtgatttgtttatcctgtcagaggggaaccctgggctgccaaaaataactgtttgcaccggcttatcagtcagcaggagggaaacgtagcctttcctcatttgccag

SEQ ID NO: 13138 - DNA, 120 bp, synthetic construct
  source 1..120: mol_type = other DNA
gcgtgcggcctttttttttttttttttttttttttttgagacggagtttcactcttgttgctcaggctggagtgcagtggagtggtcttggctcactgcaatctccgccccctgggttca

SEQ ID NO: 13139 - DNA, 120 bp, synthetic construct
  source 1..120: mol_type = other DNA
ggcgacacagcgagactctgtctcaaaaataaataaataaataaataaataaataaataaataaataaatctggcttgagttttgacaaatgtatatgcagggtcaatgggaagacagac

SEQ ID NO: 13140 - DNA, 120 bp, synthetic construct
  source 1..120: mol_type = other DNA
tcccagaaaggcagccctggagtccatgccttgtcccgctctcaccggcaaaaagtataatcttattagaaataggaaagttccaaaaagcatcaatgagttaaaaagagggctgggcat

SEQ ID NO: 13141 - DNA, 120 bp, synthetic construct
  source 1..120: mol_type = other DNA
ctgggaggcggaggttgcggtgagccgagatcgcatcattgcattccaggctgggcaagcctaggagagaagagcgaaattgtgtctcaaaaaaacaattaattaaaataaaatcagtgc

SEQ ID NO: 13142 - DNA, 120 bp, synthetic construct
  source 1..120: mol_type = other DNA
tttttttttttttttttttttttggagacagggtctcactgtatcgccgaggctggagtgcagtggcgcaatcatagctctgggctcaggtgaccctcctgcccccaaggtagctgggac

SEQ ID NO: 13143 - DNA, 120 bp, synthetic construct
  source 1..120: mol_type = other DNA
ctgcctgcctcggcctcccaaagtgctggggttacaggtgtgagccaccgcacccggcaaagttcacctttttaaagtgtgtaattcagtggcatatagtacattgacagagttgcacaa

SEQ ID NO: 13144 - DNA, 120 bp, synthetic construct
  source 1..120: mol_type = other DNA
tgagcttgagtggcgtttatgactctccttcctatttcctgtcctgctaatcaacaagtcagctaaacagtccatgctgcctgggcaagcccagtaggcccctaacgtggcacctcggag

SEQ ID NO: 13145 - DNA, 120 bp, synthetic construct
  source 1..120: mol_type = other DNA
tgcgtccgagcatctggcctctgctgtctgaaaacagcaccttccccgccccccggccaccgcatctcctctgaatagaaggcaagtcttgcctcccaggaatggcctgtgaccttcatc

SEQ ID NO: 13146 - DNA, 120 bp, synthetic construct
  source 1..120: mol_type = other DNA
actgtacaactcattcgttcacagtgtacaattcagtggcattaagtacattcacacggctgtgcaaccactacttctaattccagaacgttcggtcaccccaaaagcaagccccattcc

SEQ ID NO: 13147 - DNA, 120 bp, synthetic construct
  source 1..120: mol_type = other DNA
aaaaaaaaaaaaagtgcatcacacactgtgtgtcctttagtgtctcactgtgacatcctcaaggtgcagctaggctgtggctcgagtcagagcctcactggtttttgtggctgagtcttg

SEQ ID NO: 13148 - DNA, 120 bp, synthetic construct
  source 1..120: mol_type = other DNA
gctcctgccacagtctgggctccatctgtgctaccattgcagtagtctggtttctaggaagcaaaactgttactgagttacaaagctcaattaagagtgtcctttgggaggccgaggcgg

SEQ ID NO: 13149 - DNA, 120 bp, synthetic construct
  source 1..120: mol_type = other DNA
cccggaagtcagccattgtggcaatggctgcgcagcttgctgaaaggggccctgagccctggcccctgtgtcttgggcccgtggggtgtcaagtcccttttttctcagagtctcctccca

SEQ ID NO: 13150 - DNA, 120 bp, synthetic construct
  source 1..120: mol_type = other DNA
cccggccttgtaaaggcccaagtttttaaaaacagttttggggtcccccatgtgtggcatccacaggcagggctgctgccaacctcccgcctccatctttgctgggcctgctgcctgagg

SEQ ID NO: 13151 - DNA, 120 bp, synthetic construct
  source 1..120: mol_type = other DNA
ggcgcagggcgtggccaccggcccagaccctctctggccacagccgctagggggtgcttactttatggaaatgtaactcatacggcagatggtggttcacccgtgtgaagtgcagcctgg

SEQ ID NO: 13152 - DNA, 120 bp, synthetic construct
  source 1..120: mol_type = other DNA
gcacaggctgtccccggcatgtcccaggagtggagtggcctctgtcagggagaccgcctgtgcgcggggtcccccttaggagcgtccaggtatcacccagggcctgacaacagaggctgg

SEQ ID NO: 13153 - DNA, 120 bp, synthetic construct
  source 1..120: mol_type = other DNA
gcatccatctggtgggtgctggcttctgagtgccacctgggacacaggcctcagggtggaggggacatctgtcaggcttggagtcaggtcagcctgcctgctcctagaggacatggctga

SEQ ID NO: 13154 - DNA, 120 bp, synthetic construct
  source 1..120: mol_type = other DNA
cggcttgcagaagagcgagggctcagacctttcaggagaggaagcctctcggccggcgccgcagtagtgcctgaggaggagctcagggccttagcgtaggggcggcccacattggcagcc

SEQ ID NO: 13155 - DNA, 120 bp, synthetic construct
  source 1..120: mol_type = other DNA
ggcccctcatggtgcccatccttggggcctggctgcaatttgaccccaggcccagggtcttctgcctttcagagccctggtgccctgagacgggcagccaggcaaatcccaggcaggagg

SEQ ID NO: 13156 - DNA, 120 bp, synthetic construct
  source 1..120: mol_type = other DNA
ctgtgcacatggggtgggtgtgtggcaagttctggaagctgctgagtcagccactggtccattctcggagctggggctctgcactgggcacatgagctctggggcagcccggggcggcct

SEQ ID NO: 13157 - DNA, 120 bp, synthetic construct
  source 1..120: mol_type = other DNA
acctgggcctgacccgggggcgggcatggcctgggcagcagctgtaagtgcgtccccgtggtgggggccagccaggtccctgtggctctggggttgcgcccctcagctcaggccacactt

SEQ ID NO: 13158 - DNA, 120 bp, synthetic construct
  source 1..120: mol_type = other DNA
gaggctgaagcccctgccttgccacagcccctctcccaggttttgggggccaccgcctgagttacatgtctgtcccccaaatgggtgcccacagcccatccaccagcgtcagagcccgcc

SEQ ID NO: 13159 - DNA, 120 bp, synthetic construct
  source 1..120: mol_type = other DNA
aggccactgcgctcttgggaccccagagaaaacccggagcaagcaggagtgtgcggtcaatatttatatcatccagaaaagaaaaacacgagaaacgccatcgcgggatggtgcagacgc

SEQ ID NO: 13160 - DNA, 120 bp, synthetic construct
  source 1..120: mol_type = other DNA
ggagctcattttggcgtcgcagagggaaggtgggtggagcgtctcgcagtaaattaggaattcagaatgaaaacgtagagtttatttgggtttttagtgacacctcaggattattataca

SEQ ID NO: 13161 - DNA, 120 bp, synthetic construct
  source 1..120: mol_type = other DNA
gggccggcgggagcccggcagccaatggacgcgcgtcctccgagcagttacaaagggccggagcgaggccgccgcggcggctagggaggtggggcgaggcgaggtttgctggggtgaggc

SEQ ID NO: 13162 - DNA, 120 bp, synthetic construct
  source 1..120: mol_type = other DNA
gaagactgttggctggatttttcaaaatagtaaatcaggttggggtaggtggttggtatccacaaagggatgagtgaaaaacttcgttagcagctgaactgagacactagaagctaaaat

SEQ ID NO: 13163 - DNA, 120 bp, synthetic construct
  source 1..120: mol_type = other DNA
agcttgtctgcctcccctgttggttatgatgatgcctcagtccacccttaaaaaacattctgaaaaaggtcaaatgctttttatttcctctgtaacttggcttcccttttaaagacttgc

SEQ ID NO: 13164 - DNA, 120 bp, synthetic construct
  source 1..120: mol_type = other DNA
agttcttgaattctttgtcttccagaactctgcaacacttaacagtttgtgttgtccatttctactgcctgtgctgctacttaactctacttgaatgcgttataggtacccagaggacaa

SEQ ID NO: 13165 - DNA, 120 bp, synthetic construct
  source 1..120: mol_type = other DNA
cagtaggactaggcattcaaatggtggaagtcctaagtatattatcacttcaatttacagatgaaaaaacgactcaggtgaatttcttagggtggcacaggggcagaacagagacaggaa

SEQ ID NO: 13166 - DNA, 120 bp, synthetic construct
  source 1..120: mol_type = other DNA
gcagatgctggcatatttctcagggattttttaatgctttgtcccatagaactagcttgaggaaaagttttggagtcttctcagaatttatggtcagttttgacccagcctaactccaat

SEQ ID NO: 13167 - DNA, 120 bp, synthetic construct
  source 1..120: mol_type = other DNA
actgagactcaaatgattttgtattaccataaaccccatctgcctgggcaggcagaattgacacaattttgctcagattggaacctagttcatatctatgaaagaagaccctctttgttt

SEQ ID NO: 13168 - DNA, 120 bp, synthetic construct
  source 1..120: mol_type = other DNA
agtagtgatcaacatgatgagaaatataggaaaagtaagaggcagtcttgcttttgaaaaaattgatgctgaggaaatatgactacagactcagtactagcaaccacagggactgcttta

SEQ ID NO: 13169 - DNA, 120 bp, synthetic construct
  source 1..120: mol_type = other DNA
ggtgaaggtagccaaataaaattgctcagtagtcagcaaagattaaaaaaaaatggaacctagttggaaatgggagagcaccttaagcaaagaaatggctactagcatctagcattcacc

SEQ ID NO: 13170 - DNA, 120 bp, synthetic construct
  source 1..120: mol_type = other DNA
gaagaactagaattaattggtagactgaaaggcagaattcagctcaatgtaaggaatgactctctaccatagctgtcaaaatggaacattgtaaggtagtatgttccctgtcaccctgga

SEQ ID NO: 13171 - DNA, 120 bp, synthetic construct
  source 1..120: mol_type = other DNA
aggggttattgctggatctggcaataatctgattcttgttctgaggcttcccctttaacacgtattgagggttcaatttagtgctgctgcctccatctttcttctccagtttaagtctct

SEQ ID NO: 13172 - DNA, 120 bp, synthetic construct
  source 1..120: mol_type = other DNA
tccccagggaaaaggcaaaaacgaatggctttttctgcgagaaactaggactaatatagatatttgggagcactgaacatggaggatagagttaaacttgaaaagacatacagagataga

SEQ ID NO: 13173 - DNA, 120 bp, synthetic construct
  source 1..120: mol_type = other DNA
aattagctgtgcattgcaaacagatggtgtgtccctgaggaaatagcgtagttgccctaagcaattgggtgcttccatctgatttagcttagtctctgtaactgggaaaaaggaaaatct

SEQ ID NO: 13174 - DNA, 120 bp, synthetic construct
  source 1..120: mol_type = other DNA
ttcaattttttgctttaagttagaatcctgtttgcttactttttctgacccaaatgttttaaaaatgttttcctgtgttttcatttaaaagattggttttacctctcacattgagatgta

SEQ ID NO: 13175 - DNA, 120 bp, synthetic construct
  source 1..120: mol_type = other DNA
atttctgacttactacactcagacttctaatacaatgttgagaagtagtgatggatatctctttcttatttgtgatttcaagggaaaatgacagtcatgcaacattaaatgtaatgccta

SEQ ID NO: 13176 - DNA, 120 bp, synthetic construct
  source 1..120: mol_type = other DNA
cagctgggagtggttaccacttccttctcttaccacagttccttctctaccacagttctgttttgtatgtcattcccctagcccaggatgatcagccactttcatttacgttcattatta

SEQ ID NO: 13177 - DNA, 120 bp, synthetic construct
  source 1..120: mol_type = other DNA
catacttagattgagaggaaataagaaatttggttattgttttagcactcacctttagacatagaagtttctccatttcttttcagggcctggggtaaggcaaagtgtgcacatctgctc

SEQ ID NO: 13178 - DNA, 120 bp, synthetic construct
  source 1..120: mol_type = other DNA
tcagttaacattatattggctaattccatagaaactaggagactggaaaatgaagataatgtggaaaaacaagagcttgtgaatttgggagtgccctgttcttttaagatgtgatgtggg

SEQ ID NO: 13179 - DNA, 120 bp, synthetic construct
  source 1..120: mol_type = other DNA
acaacactctgcttgactttgcatagataagtaagccaagcagagtgtttcctggatgtagttaaaatacaagcttggagcacaggtaaaaggccaagaggcttggagatgtacatctga

SEQ ID NO: 13180 - DNA, 120 bp, synthetic construct
  source 1..120: mol_type = other DNA
atagttgcaagggagctatcaagacaaataattacagtgatggtgaagtgaatacaagtcaaacatcccaatctgaaattcaaaaccttttgagcacaccaacatgatgccacaagtgga

SEQ ID NO: 13181 - DNA, 120 bp, synthetic construct
  source 1..120: mol_type = other DNA
tagttagcatcttgaacaatttaaatttgatcatcttacttggtatgccagccactaaggatgaaatcctgccactgagaaagaaaacccagtcaggaaagctttctcacccttatctat

SEQ ID NO: 13182 - DNA, 120 bp, synthetic construct
  source 1..120: mol_type = other DNA
gtttttccctaaacgatcttgccgtatcacataacagcagtcttgtagtcaatcaagactgacttcaagtggtgaaatggaattttttaattccctgaagagagaaatctttacctagtt

SEQ ID NO: 13183 - DNA, 120 bp, synthetic construct
  source 1..120: mol_type = other DNA
tgcctgtattgccatatggtcgattcaaattccctttattttttactctttcttttacaatgaccatgaaacttatgctgtgtgtagtgtgccacaaggacatttggcctgaaggggatc

SEQ ID NO: 13184 - DNA, 120 bp, synthetic construct
  source 1..120: mol_type = other DNA
acctctgaagccagtccatgaattcctggttcagaattcctccttaggaaatcatacccagacagccatcaccatcacaccttgtcatgaataattactgtctcttttagcagtctttat

SEQ ID NO: 13185 - DNA, 120 bp, synthetic construct
  source 1..120: mol_type = other DNA
ataggtgttcactgtaaatcacattgttagaataagctgtctgacaaaattggtaccatgtgacccaaggcctcaggcatacagaaatattcttatcagggagaatattccaaaggttca

SEQ ID NO: 13186 - DNA, 120 bp, synthetic construct
  source 1..120: mol_type = other DNA
gttactccattatccagaaagccactgaaatggcattagcctacacttaatgggtggtagtgttttcacacattgcttctcaaaggaggagtatgtgaatgtttagtttgggcctggtaa

SEQ ID NO: 13187 - DNA, 120 bp, synthetic construct
  source 1..120: mol_type = other DNA
ttacagacttataagagtaaccaagatcctgcctcctgggtatgtgttgtttaagaaggtggttccagggtggacttcctctgaggtctgttatacctaaaaggatagataaaagcaaac

SEQ ID NO: 13188 - DNA, 120 bp, synthetic construct
  source 1..120: mol_type = other DNA
gctcccctgtggtaagggttggtcggactacaatatctttgtgactttgatgaaagcatctgcagttataatgtggcaaagaaaaggataattccagaatttcccatttccatcatttga

SEQ ID NO: 13189 - DNA, 120 bp, synthetic construct
  source 1..120: mol_type = other DNA
ggattctgtatgataagagattaatctactgaagatcttaagaatgggaaagatgtgatatgaaagaaatggtggtaagcagtaaaccagtaagactcaggatgaatgtcaaaataattg

SEQ ID NO: 13190 - DNA, 120 bp, synthetic construct
  source 1..120: mol_type = other DNA
ttttaaggagatgttaataggtattgttacaggttattggtattagtgacctgatgtgataagtggggaaggtcctatgatattggcggcagttggccttgtaatgatggctgaagaata

SEQ ID NO: 13191 - DNA, 120 bp, synthetic construct
  source 1..120: mol_type = other DNA
tagttttggcccctaatgacgttttcttttctcagttctatttgttgatatttgtggcatcagaagtagatgagctaattgtcagagtcatcccaaggtggattttggcatagcagtgct

SEQ ID NO: 13192 - DNA, 120 bp, synthetic construct
  source 1..120: mol_type = other DNA
atttaagaatgaagaaactgattttattacctgaattattcttctatagaatttggccatatgtattcaataagagagctctctccttgactactaggacacacacaggctcgcactgga

SEQ ID NO: 13193 - DNA, 120 bp, synthetic construct
  source 1..120: mol_type = other DNA
aacatacagtatcagttgaccacattgtacaaaacttagtttaaggcctcctttgcctgtcatagttcattgtgtactgaattccctccaaacctatccaggcagaagccatcttctggt

SEQ ID NO: 13194 - DNA, 120 bp, synthetic construct
  source 1..120: mol_type = other DNA
tgtaaagctgtggagtccctgtttcccttttgaagttttctctcaaacagttctaaaggtacagaagagtagagcagagaatatagagatctaaattaggcctattcagttttgtcttta

SEQ ID NO: 13195 - DNA, 120 bp, synthetic construct
  source 1..120: mol_type = other DNA
taactactttacaggaggtggggagggtagagcaagaggaagaaaggacccgtttgagaaacttaagaagaagagcttctgatcgctttaaagatttaacgtttggatttataagcattt

SEQ ID NO: 13196 - DNA, 120 bp, synthetic construct
  source 1..120: mol_type = other DNA
tgcttccctaaaaatgtgtcattcatttccctctacctttgcctgcacattcttcctgcctaaccaccgtacttaagggatagtcaaaattcaacttacttttacaaagcctaccttgac

SEQ ID NO: 13197 - DNA, 120 bp, synthetic construct
  source 1..120: mol_type = other DNA
ctcagatagctgtttccttttaatctcttcctgaccagtaggatgtttcaatatggactattgaccttattaatggggagagtaaaaataacttgtcagtgttctgagttgccaagggct

SEQ ID NO: 13198 - DNA, 120 bp, synthetic construct
  source 1..120: mol_type = other DNA
tgtactgcttttttttgttattgacttttatttgtagaaaatttccaatatgtagaaaagcagagtagttacagtgatccctcatcgtccagcttcaacagttgtcaggtcactgccaat

SEQ ID NO: 13199 - DNA, 120 bp, synthetic construct
  source 1..120: mol_type = other DNA
tagttctcattttcgtttctgcctttatcaccatttatttcctcccccaactcttaaaacaaccttttctttatttactgtgtttgatgaccctagactttccttgttccttcttacttc

SEQ ID NO: 13200 - DNA, 120 bp, synthetic construct
  source 1..120: mol_type = other DNA
gcaagggtgcgagtttggtcagaatcagtttataaagttcatgaagaacaaattaatactaagtccttttaaatgtacccagaaatctcctccagaatcttctgaaaagtttctattcct

SEQ ID NO: 13201 - DNA, 120 bp, synthetic construct
  source 1..120: mol_type = other DNA
acccaacccgacccagagatttttctaggcacttaagagtgccagctctgataccaattatctgtgaagactcaaaaaagtcaccatctttgtctcttaaatgggattaattatacttgc

SEQ ID NO: 13202 - DNA, 120 bp, synthetic construct
  source 1..120: mol_type = other DNA
ccttgagataaggagactgcatgagatagttttacagttgaaaaattaaatactaagttttagttatgacatttgtatgctgtagtttttgtgcatgtgggatttcagatgccagtatat

SEQ ID NO: 13203 - DNA, 120 bp, synthetic construct
  source 1..120: mol_type = other DNA
agtggttagcatcaaagataatatacttaatactgagtacattgcagttgatagggaagtgatgttctacatgcttggttcctgggctgctggaatatcagtctatggctaagtttctta

SEQ ID NO: 13204 - DNA, 120 bp, synthetic construct
  source 1..120: mol_type = other DNA
ttgctttcttagaacttttgcacatgctgtctcctggagcatactttaccctactgtttctcagcctcatacccacctttcccgtaggaagttttttctagtcctcaaaaatcttaggag

SEQ ID NO: 13205 - DNA, 120 bp, synthetic construct
  source 1..120: mol_type = other DNA
ttgtcagtggttgctgtaggtctctgtgggtcctgacccataattttggtaggtttttgaagcttcagtatgaggactggcattcttttgtatctattatttttttccctggagtatatt

SEQ ID NO: 13206 - DNA, 120 bp, synthetic construct
  source 1..120: mol_type = other DNA
tctagcctagtgtattctcttcctgtttccatttgaatctggagactcatcagaacccaaccccttgttatattggaatatagttctttagaatggacagctgcttgagaggctcaccta

SEQ ID NO: 13207 - DNA, 120 bp, synthetic construct
  source 1..120: mol_type = other DNA
aaacagaataatttggttttcatattcaattgtaagcacattgaaagggccatggaacatttgcagtggcctttagtgtatcagaacatagtttagatctgccgggcgaactaaggcaca

SEQ ID NO: 13208 - DNA, 120 bp, synthetic construct
  source 1..120: mol_type = other DNA
acaaacttaaaatttcagtgtgaggtcagatttcttctttgctttgcccagctctggtttaggattcggccttttcaggtttgctaaatgagtcactctttgtccacctgctttccagca

SEQ ID NO: 13209 - DNA, 120 bp, synthetic construct
  source 1..120: mol_type = other DNA
actttaggtaactctgctgtgctggagatcatctttaagggcaaaggagttggattgctgaattacaatgaaacatgtcttattactaaagaaagtgatttactcctggttagtacattc

SEQ ID NO: 13210 - DNA, 120 bp, synthetic construct
  source 1..120: mol_type = other DNA
ctaggaaggcgaaggtagttaataatttgaatagataacagatgtgcaagaaagtcacatttgttatgtatgtaggagtaaacgttcggtggatcctctgtctttgtaactgaggttaga

SEQ ID NO: 13211 - DNA, 120 bp, synthetic construct
  source 1..120: mol_type = other DNA
ttttttaaagttggagtttagttctaaattgactttacgtattactgcagttaattccttttttggctagggatggtttgataaaccacaattggctgatattgaaaatgaaagaaactt

SEQ ID NO: 13212 - DNA, 120 bp, synthetic construct
  source 1..120: mol_type = other DNA
taattctgctgtaataatgatagtgctcaagaagtgccttgagttggtgtacagtgccatggccatcaagaatcccagatttcaggttttattacaaaatgtaagtggtcacttggcgat

SEQ ID NO: 13213 - DNA, 120 bp, synthetic construct
  source 1..120: mol_type = other DNA
gtaccccaaataacatcgtctgtactttctgttttctgtattgtatttgtgcaggattctttaggctttatcagtgtaatctctgccttttaagatatgtacagaaaatgtccatataaa

SEQ ID NO: 13214 - DNA, 120 bp, synthetic construct
  source 1..120: mol_type = other DNA
actcgcgcgcacggagcgacgacacccccgcgcgtgcacccgctcgggacaggagccggactcctgtgcagcttccctcggccgccgggggcctccccgcgcctcgccggcctccaggcc

SEQ ID NO: 13215 - DNA, 120 bp, synthetic construct
  source 1..120: mol_type = other DNA
cttcttggcccggagtttttggaaacaagtttcaagaaaataatcgatttccaaaagaaagttagctggctccactgacgccttggcatggatggatagggagtggagatgctcaggtga

SEQ ID NO: 13216 - DNA, 120 bp, synthetic construct
  source 1..120: mol_type = other DNA
tgctgggattacaggcgtgagccaccgcgcccggccaaaagttagactttttgcagctatgatccaaataacagtatctgcagctgtggtctgggtaaccgagtatttgggcaagtcata

SEQ ID NO: 13217 - DNA, 120 bp, synthetic construct
  source 1..120: mol_type = other DNA
gttccagattataaaagaaggaaattagcaggccctgatgttgttagttaggttctgtttacaaggataaggtttatgatttgcaaattccagacccaatagttcacgagtcactttcat

SEQ ID NO: 13218 - DNA, 120 bp, synthetic construct
  source 1..120: mol_type = other DNA
caaaaactgggcattttttcttctaccttttcaaccatatttattgagtatctcttgccaggcaggatgctcagacctgggataccatctcagatgaataagacagacctggtctttgcc

SEQ ID NO: 13219 - DNA, 120 bp, synthetic construct
  source 1..120: mol_type = other DNA
tcatcttcttgaggaaacctgctttgaatgtcccagtttgaggtaaatgtctcctatgagatacagacctctcacttagctggtaacaataccaagccaaagtcatatctttacgtaact

SEQ ID NO: 13220 - DNA, 120 bp, synthetic construct
  source 1..120: mol_type = other DNA
agaacagatatgcattcgcagcaagaatgctcaccgcttcttttgcactctctactttcctggtaatattttgctccacaggtacttgttgcttgtgactgaggcaagataatgactcat

SEQ ID NO: 13221 - DNA, 120 bp, synthetic construct
  source 1..120: mol_type = other DNA
ctaggtcttagcacccaacaagtagcaactatcctcttgggtgtagtcagtttagtctacttatggcctcctgcttagactcttaagggttccctagcatctgtgttttgtttgtaggtt

SEQ ID NO: 13222 - DNA, 120 bp, synthetic construct
  source 1..120: mol_type = other DNA
gggccttcccatgttgggggtggatctgcagcagcaacattcctttgcagagatgttgggtagaaataagttttggttaattgtaccattttttccctggaatagacaacattgaacatt

SEQ ID NO: 13223 - DNA, 120 bp, synthetic construct
  source 1..120: mol_type = other DNA
ggcttatttcccctgtagcttttctcaagagacttcatggactaatttcccaataatcatagtagctaccacttattgaggtcttgctactgcacggatcatgctgagtacttcaggtgt

SEQ ID NO: 13224 - DNA, 120 bp, synthetic construct
  source 1..120: mol_type = other DNA
atgagatctcattctgtcactcagtctggaaagcagttgcataatcataactcactgcagccttggagtcctaggttcaagcagtcctctagagtagctcggactaaaggcatgcaccac

SEQ ID NO: 13225 - DNA, 120 bp, synthetic construct
  source 1..120: mol_type = other DNA
taaggtatgttgtaccaggaatctaggtgtctgggtgaccaggctgtctttcttcccactggggctcattttccttctatacagtgacaagaattggactaaataagatttccagtattt

SEQ ID NO: 13226 - DNA, 120 bp, synthetic construct
  source 1..120: mol_type = other DNA
aatattctcagaaaagacagaatttgcaacagattggcagttttcagactgctgttttaggcaggggagtagctgccgcaacctctaattgcatttctgtagagtttgcagacacttgtt

SEQ ID NO: 13227 - DNA, 120 bp, synthetic construct
  source 1..120: mol_type = other DNA
tgtacactttcacaaggtccccaggtgattcctgtacacatagcagtttgaaaaacactgctgtaatagcattaaagcatgttccaaagagtagccaaatgatctgcagtggttttagtg

SEQ ID NO: 13228 - DNA, 120 bp, synthetic construct
  source 1..120: mol_type = other DNA
tcactgcattaatcatgtttacctcattaggcatttactcacagattgccttgacatatgtaggccctaattcattctggagctattataccacagcatttcttaaaataggtagcactc

SEQ ID NO: 13229 - DNA, 120 bp, synthetic construct
  source 1..120: mol_type = other DNA
ctccaccctttgaaataacgcctggtctaaatgttactttttctagtgggccttccttgattatccatcccactgtgattccttttcctgcccatagcctctccgacaagccttgcattc

SEQ ID NO: 13230 - DNA, 120 bp, synthetic construct
  source 1..120: mol_type = other DNA
agagaccaggcaaagtcataaagtaaatcacaccatctcacgcaggacaattttttgtcactcctgccttttctctttatgagtcatagatgatttcagtcattgggattgctggaatag

SEQ ID NO: 13231 - DNA, 120 bp, synthetic construct
  source 1..120: mol_type = other DNA
taatgcttttaatttagcatgtcattggttcactctcaaaactactgaaaagcacttatctttcaagattttaatgatgatgttggtgaggacgtttgtggtaagtagataatcacttac

SEQ ID NO: 13232 - DNA, 120 bp, synthetic construct
  source 1..120: mol_type = other DNA
tctaaattgaactgtcctgaagttttaagaaaatgaaatgatcagactcagcagttcaagattgtgttggttgatagcagccacttagacctcagttcactatgggtttctgtgtacttt

SEQ ID NO: 13233 - DNA, 120 bp, synthetic construct
  source 1..120: mol_type = other DNA
gtggaaatggaggcccagaaagatgaaatcatctgccccagctgtaataggactgcccatccactgagacatagtaaagtatcattaattaatcttttcatcatttttctatttttagtc

SEQ ID NO: 13234 - DNA, 120 bp, synthetic construct
  source 1..120: mol_type = other DNA
caaaatatagagaagaacagaacaagaagtgttttgagtagcagaacacgactcacacagacatctaatatttagtcaaattgcttttatataaaagaaggtatacattgaagagcaaca

SEQ ID NO: 13235 - DNA, 120 bp, synthetic construct
  source 1..120: mol_type = other DNA
taaggcagatgttattgtatcaagaaaagactcaaattttgaacatattaaaaatagtgtttcttcagatctggtggataggtgatgctcaatatatatttgtttaatggaataaaaaaa

SEQ ID NO: 13236 - DNA, 120 bp, synthetic construct
  source 1..120: mol_type = other DNA
accatgttgagaaacactaatctagcctaacccagtgaggttacaaatgaagaatttcaccagagaggtcaaagtacttgatttcccacagcaaagaaattccatttactgggttgaaaa

SEQ ID NO: 13237 - DNA, 120 bp, synthetic construct
  source 1..120: mol_type = other DNA
aattttggaaaatgccttctttttcctaggcctccctcatagacattttcctgacaagtccccacttcaggtttcagaaagagatgcaccatcgtttggaattctgaagaaactcaagtt

SEQ ID NO: 13238 - DNA, 120 bp, synthetic construct
  source 1..120: mol_type = other DNA
ggattataaaaatagtactgccttgtgggagaaaaatatgcttaaagtctatgagcatggagtggtagggattataaaccgttacaaacttctcctggaaattctggggaaagggaagtt

SEQ ID NO: 13239 - DNA, 120 bp, synthetic construct
  source 1..120: mol_type = other DNA
aacgtgttttccatggaacactactccttgtccctaattgtcttctctccctacctcagcagtgacactacagacagccagtcatttaatacgagactcattccttaagaagttgggata

SEQ ID NO: 13240 - DNA, 120 bp, synthetic construct
  source 1..120: mol_type = other DNA
agtgtcctaaaaacagactgtgcttgtcatttcctcccctcctcccccatggtttctcatttttgcttctctttctaagagttacatttataggcatacatttttacactggacatcaca

SEQ ID NO: 13241 - DNA, 120 bp, synthetic construct
  source 1..120: mol_type = other DNA
actgtgaaaaatttctgtcctttataaatcacccagtctcacatattttgtatggcagccaaacagactaagttaccaaccttagtgggattgctaggacttggaaaggagtagcctttt

SEQ ID NO: 13242 - DNA, 120 bp, synthetic construct
  source 1..120: mol_type = other DNA
tctccactgcaacctgctgccattcccagcatggtgaattctcctccagtagaagtcatatagcaatgttttataattaacttttacgtgagcaaatgagctccaggagagaagattaag

SEQ ID NO: 13243 - DNA, 120 bp, synthetic construct
  source 1..120: mol_type = other DNA
aggaaatggaggtttcaagaagttaagtggcccacagctaatacatgtaagagcctgaattcacactcaagtttttaccttaaaactcttgggcttcaccaagctgaccttattatatat

SEQ ID NO: 13244 - DNA, 120 bp, synthetic construct
  source 1..120: mol_type = other DNA
ctgaattttaaaacttggtttatattttaaaaagaaaagagttcaggccaaacagaacacatctgtgctctgtgtccagctcttgtacccactgtagcaatttctgctttagcttctcag

SEQ ID NO: 13245 - DNA, 120 bp, synthetic construct
  source 1..120: mol_type = other DNA
tatttccttgttgctacagcactccaagtcctgtcaactgagggagaattgttttctcagttgctgtcactttaggtaaagtaccaactttaaagcacttctcagcagaggcataaagtt

SEQ ID NO: 13246 - DNA, 120 bp, synthetic construct
  source 1..120: mol_type = other DNA
caagtatgcatttttaggatttatttggggtcattggggctggtaagtgttaaataggaaaggatgcaattgaaattccagctcagttattttatgtttgtcactggagaaagccaatta

SEQ ID NO: 13247 - DNA, 120 bp, synthetic construct
  source 1..120: mol_type = other DNA
aaaattgatgcttttgagcttatctctttattttctgcccacatggtggtctccctattaggtattgtttctccacttctgatcctggtgcccagaggctatgtggggctgtcacttgaa

SEQ ID NO: 13248 - DNA, 120 bp, synthetic construct
  source 1..120: mol_type = other DNA
caagggtggagaactgatctctaagggcaatagaagacacccagcccaagtaactctatacattggtctctaccttgcttattttcttgaatgctatagcctgggcttcaacacttataa

SEQ ID NO: 13249 - DNA, 120 bp, synthetic construct
  source 1..120: mol_type = other DNA
gagaccatgtggactgtcagttgaaggaaagcccgatacctctcttctctcaaggtataattagataaagcattagggttcaaacacatttttaaaaactaaaaagaaggtattgtatta

SEQ ID NO: 13250 - DNA, 120 bp, synthetic construct
  source 1..120: mol_type = other DNA
atgcctgtaaaaaggtgaagaataggtatttaatttcactaactccaaaatgactggagaaagggaaacaattattaaaaactgggttctccacagccttcccactcaacatatagtggg

SEQ ID NO: 13251 - DNA, 120 bp, synthetic construct
  source 1..120: mol_type = other DNA
ctcaaagacaatagtacagttccagaaatagacacagctaagcagtcaattcatattctcaagacctggaacctctgtctgtaggcagtgagtgtggggaaaatgtgagataaaatgggg

SEQ ID NO: 13252 - DNA, 120 bp, synthetic construct
  source 1..120: mol_type = other DNA
cttacgggcctcagagaatctgcaaaccttctcagatgatctacaaattttgtatttgtttcttttccccaactccaaagtgtgttcataaggcttttatcaaacttaggtgactccagc

SEQ ID NO: 13253 - DNA, 120 bp, synthetic construct
  source 1..120: mol_type = other DNA
ctctccctacatccttcttccctttctctccctttctttcttctaatggtccttttttcttttccctgttgattgtgttctgcaagcatcggacttaaaccacttgcatttgtcaataca

SEQ ID NO: 13254 - DNA, 120 bp, synthetic construct
  source 1..120: mol_type = other DNA
aagctacaaagacagttgcagggcaaagtatctatgacagaatcctaaaattcacaggacagagagtgactgtggaaaggcattgaaagtgttcctctctaggcaagagcggagggaaca

SEQ ID NO: 13255 - DNA, 120 bp, synthetic construct
  source 1..120: mol_type = other DNA
aatgcctcaccaatgcttgggattgtgtctaggaggcactcagtaagtgttagttaatcaattgatttgcctcaaacacagagagagatcagtagaactagtcccttgaaaagaagaccc

SEQ ID NO: 13256 - DNA, 120 bp, synthetic construct
  source 1..120: mol_type = other DNA
tttaatatatctttctctctcctcagttaataacgacatgatagtcactgacaacaacggtgcagtcaagtttccacaactgtgtaaattttgtgatgtgagattttccacctgtgacaa

SEQ ID NO: 13257 - DNA, 120 bp, synthetic construct
  source 1..120: mol_type = other DNA
tcattccctccaactcatacatacatctcaaataataattatacatacacagtggatactcatgaatcatttgattaattcatggttatagattgtgagcatgaacaagaaataaccttg

SEQ ID NO: 13258 - DNA, 120 bp, synthetic construct
  source 1..120: mol_type = other DNA
gactagatggcctcaaagcttccttccgtggtttcttaaatatctacggtggtgtgagcacttgcttttgcaacccaaaaaggctcttttaattaagatttttgttttcctgaccagtaa

SEQ ID NO: 13259 - DNA, 120 bp, synthetic construct
  source 1..120: mol_type = other DNA
tccaggaaacctaaactaagacaggaggctattgtaaaaatagccagtgtggaaactgaaaggctctactatgattgtagatttcagtgttgttgtttttttaatcagttttagtgtttt

SEQ ID NO: 13260 - DNA, 120 bp, synthetic construct
  source 1..120: mol_type = other DNA
aattatacatcatttgttgtatgatcatgccaactttcatttagtttcatttggtgtcctgatagccaccctcaaccaattattctgcttgtcactcttcctgtcacagcagggaccaac

SEQ ID NO: 13261 - DNA, 120 bp, synthetic construct
  source 1..120: mol_type = other DNA
agtatgttcatgagggagcagagggaggtagatagagaggtgatacccttttccaagagagccaaaatgttcttttgttcaattataatagtgggcattaatcatgttgtttaaaaatct

SEQ ID NO: 13262 - DNA, 120 bp, synthetic construct
  source 1..120: mol_type = other DNA
ctttcttcatgtgttcctgtagctctgatgagtgcaatgacaacatcatcttctcagaaggtgagttttcttctcttaagggtgtgggacctgagatctgtgccaattttttgtatcctt

SEQ ID NO: 13263 - DNA, 120 bp, synthetic construct
  source 1..120: mol_type = other DNA
aacagatcatctgtattgacaatgtattagatgcacacacgtctctatcattcattcatattatctcccactccatcctctctcccaatctctccctgtcttcctttctctttccctcct

SEQ ID NO: 13264 - DNA, 120 bp, synthetic construct
  source 1..120: mol_type = other DNA
aaggcaggcatgcacatcttgtcagggcaacgctttccagattactcttccttcctatgttctcatcctcatcctgtaaatggtccatttctctcgttttcttttctggttgtttttttt

SEQ ID NO: 13265 - DNA, 120 bp, synthetic construct
  source 1..120: mol_type = other DNA
gagtcttctaaaatgctccagaaggtagggggtgtttgctttttaagcatctcttttctgtgtggtgggatatttcttccacctaaaacagcagacattaggagcaacattttatattcc

SEQ ID NO: 13266 - DNA, 120 bp, synthetic construct
  source 1..120: mol_type = other DNA
atattcagagaaaacatactgtcgctgtgcagggagctcagccctttccaagcatgacctcatttaatcttatagccaccccatgcgagtaggcactgttaggatccctgtttatgcatg

SEQ ID NO: 13267 - DNA, 120 bp, synthetic construct
  source 1..120: mol_type = other DNA
gaggtgatttctgctggtttaggtaagagagaaacggtctagtgtaatactcaagaatgagctagatctcctggatttaaggcttattctacagcttattagctctgctatgttgggcca

SEQ ID NO: 13268 - DNA, 120 bp, synthetic construct
  source 1..120: mol_type = other DNA
aaacaacccacaagtgcctttcacataagtgattagggtaatcgcagttctgtacttgccaaagggattcattccctcttcattttttccatggaaagcttgctttgggccacaaggcct

SEQ ID NO: 13269 - DNA, 120 bp, synthetic construct
  source 1..120: mol_type = other DNA
tcaagatgcattgtacaagatactgttttgaactggatcaatgaaggagatgtttggtggccttggaaagccctggagagtaatagtgtggttctaagaagagttggcctgaatcagttc

SEQ ID NO: 13270 - DNA, 120 bp, synthetic construct
  source 1..120: mol_type = other DNA
atggcttccctgctgattgcctgtgttcagatcccagctcagccgtgtgtaagctcttggttcttggggtaactacttgtttacctctctgaaaaatgggagtagaaataatgaatactt

SEQ ID NO: 13271 - DNA, 120 bp, synthetic construct
  source 1..120: mol_type = other DNA
agaggggcagagaagaagacttcttgtagccacaaagtttcattccttcctctctcattgttgtagcatttcttttaagtgaaaacagcctttttggtttgctagcctatctctggcagg

SEQ ID NO: 13272 - DNA, 120 bp, synthetic construct
  source 1..120: mol_type = other DNA
gtgaatatttgtactctagaacctcattctggtatgaatcagcagagtggaatctagtatggacacaggctgtctcaaattccatccactggatatgagtggccaagaaagcagtcggac

SEQ ID NO: 13273 - DNA, 120 bp, synthetic construct
  source 1..120: mol_type = other DNA
ctcattaactgggtcttactcctgcagtttctgacttaattggtctggggcctggtatcaggaattattttttaattcttcaagatattttaatatgcagcccacattgggaaccactgg

SEQ ID NO: 13274 - DNA, 120 bp, synthetic construct
  source 1..120: mol_type = other DNA
aggtattgtgaataatgaatatgcttttccaaagcgatctggtctccctgttggagagcatcctgaaataacttaagaaatgtaccttgctttcaggtttcctgagaacatgagggcccc

SEQ ID NO: 13275 - DNA, 120 bp, synthetic construct
  source 1..120: mol_type = other DNA
catcaatgtatctcttgaaaagtaaccgaggaaaacatggctgttcaacctgaaaatgaaatgatctaggggttgtgagtttcatatccagcaggagtttaatagttctcatcccataga

SEQ ID NO: 13276 - DNA, 120 bp, synthetic construct
  source 1..120: mol_type = other DNA
ggcaagatctttgaactctgcaatatgaagcatatatgtgagtgcttagctttcactctctttctgtgtgtgtgtgtgtgtatacagatactaagacacagatacattcacatatataca

SEQ ID NO: 13277 - DNA, 120 bp, synthetic construct
  source 1..120: mol_type = other DNA
ctcgtgatcctcctgcctcagccttttaagtagctcagattacatgcccacaccaccacatccagctaatttttttttttttttatacagacagggtctcaatatattgcccaggctggt

SEQ ID NO: 13278 - DNA, 120 bp, synthetic construct
  source 1..120: mol_type = other DNA
cgcgcacacacacgttgctctcagcctcttttatgtcctttgttatgccgacaccagttcctaaaaggaacttaaaactgaacctccctaatccactattttaaataaaagtcacttggt

SEQ ID NO: 13279 - DNA, 120 bp, synthetic construct
  source 1..120: mol_type = other DNA
ctttttgtgtgtctgtgccatggacttcttgaagtagggaagcctgtggaccccttctcactgtgatgttttttaaatgcataaaatagaacatggagtatttcaaagaaaaccaattac

SEQ ID NO: 13280 - DNA, 120 bp, synthetic construct
  source 1..120: mol_type = other DNA
gttcttagttcagaacaaaggaatataatccccatacccaaaatatactcctttagacacattatacaagaattgccaatgtcagtcggtggatggctgtaaaatcacttagtccaggct

SEQ ID NO: 13281 - DNA, 120 bp, synthetic construct
  source 1..120: mol_type = other DNA
acatcccaaagcttccttccagccctggttgctattgttagagtttttcaccacctctttgaagtttcaagattgacagatgttattcaagaattcctccccctcaaattttttaagtgt

SEQ ID NO: 13282 - DNA, 120 bp, synthetic construct
  source 1..120: mol_type = other DNA
tgcccccttaattttgtttgctgtacaacagggacagtccatacatctccacaagagcatcttttttttcttttgcattcaatcattctgtaattgctttgtcccaccccatttctgccc

SEQ ID NO: 13283 - DNA, 120 bp, synthetic construct
  source 1..120: mol_type = other DNA
tgggtaacagagcaagactccatctcgagaaaaaaaaaagaaagtatcagatgctgaagtagctatgtagactggggtatataacctggggttcatcatcatgagccaggaaaatttagg

SEQ ID NO: 13284 - DNA, 120 bp, synthetic construct
  source 1..120: mol_type = other DNA
gacactcagtagtgatatatttaatgaatgattctaggatctgagcatgaggcctgctcattaatgggtactttggagggcagatggatgacacataaagcaatagaattctgcatgttt

SEQ ID NO: 13285 - DNA, 120 bp, synthetic construct
  source 1..120: mol_type = other DNA
aaagattttggtgcaaactgtggcacgctctgtgtttttaccagatgtcatacatgcagattttttgaaggcagaagctgtgtcattttttttcatgttcccaatgtcctgagcttagat

SEQ ID NO: 13286 - DNA, 120 bp, synthetic construct
  source 1..120: mol_type = other DNA
aaggccaagctgaagcagaacacttcagagcagtttgagacagtggcagtcaagatctttccctatgaggagtatgcctcttggaagacagagaaggacatcttctcagacatcaatctg

SEQ ID NO: 13287 - DNA, 120 bp, synthetic construct
  source 1..120: mol_type = other DNA
tgtgtccatggcagcgcacgcagtgttgaggtaaacatcgaaatatggacagactaatgtgccagagtaatgagccatgcaatgacctcttgagaagaaaaaaactctctaatacatgcc

SEQ ID NO: 13288 - DNA, 120 bp, synthetic construct
  source 1..120: mol_type = other DNA
ggatgttattgaaaaatgtgatgacataagtcatggggttagataaggcagctctggggtttggcacttccttattttggcatgctttgtttatggtctttagagggttttcagggagag

SEQ ID NO: 13289 - DNA, 120 bp, synthetic construct
  source 1..120: mol_type = other DNA
gagatatttgtttaggttttgaaaattctagtgaagaggttattgaggaaggccgtcttcttactgcttaagcctgcaagactgattaggagacctacttttctcctgaaaagctggctt

SEQ ID NO: 13290 - DNA, 120 bp, synthetic construct
  source 1..120: mol_type = other DNA
agtctaggatcccgcattgatctaatgtgcatgcctccttagtctccttgaccttgtgagagttcctcagtcgatttttgtcttttatgaccttgacacttgtaaaaagtttaagacagt

SEQ ID NO: 13291 - DNA, 120 bp, synthetic construct; identical to SEQ ID NO: 5871
  source 1..120: mol_type = other DNA

SEQ ID NO: 13292 - DNA, 120 bp, synthetic construct
  source 1..120: mol_type = other DNA
gtcttagtttcagaggcttttcttttacattcaaaaggtcctttggaaagtacacgaagcctgaagacagatggattccctccaactgcattcatcttgatgttgtccctgctgtagctt

SEQ ID NO: 13293 - DNA, 120 bp, synthetic construct
  source 1..120: mol_type = other DNA
aaaaaaaagaggtatggtccacctcaactgtgtgcagaaggatgatgggatgcaagtctccagtgaaaacagctaatctacatgacaagtatagtggatctacccactgaaggagagtaa

SEQ ID NO: 13294 - DNA, 120 bp, synthetic construct
  source 1..120: mol_type = other DNA
agttaggtgaagagagtggtcagagagaaaggcttcttattgaaagtacatttggtccagataaagaaagccataaaggaataattaccacttcttaagcacttgctccacacatcaact

SEQ ID NO: 13295 - DNA, 120 bp, synthetic construct
  source 1..120: mol_type = other DNA
ttgtgtcgcaggcattgtttaaaatgccagggatacagcagtttaaaaagcagtgtctttctttgagagacaggaagtctagtgaagagccagtattttagggacaggtaatgaacaaag

SEQ ID NO: 13296 - DNA, 120 bp, synthetic construct
  source 1..120: mol_type = other DNA
taggcctttgaatagaagctgacacgtagcagccagctgaacaagtatttaatgaggagcaacacaactccaagaagggctccttagtgtattgtcaagttgctgcagccttgtgagatg

SEQ ID NO: 13297 - DNA, 120 bp, synthetic construct
  source 1..120: mol_type = other DNA
ggatataggaagtgaggcacaaactcttggcatctcttttctaagtcctcatatctactttttaaaggagtcagggcaaaaacaacaaataatacttacaatgcatattgttagctcttc

SEQ ID NO: 13298 - DNA, 120 bp, synthetic construct
  source 1..120: mol_type = other DNA
ttttttcctgtgtcaaaatgcatctcacattccttaagaagcatttagggcaatgttgctccaagtgtggtctttggcaggtgctggtcctcaaactctctgttacagatttgcaatata

SEQ ID NO: 13299 - DNA, 120 bp, synthetic construct
  source 1..120: mol_type = other DNA
gttgcctgatcgctgcaattgaatatcaaagatgttaactgagaggcacatgtatacacactgccaaacattaaaccatcttcctacacattgcagggcatgagaaaaaaaaaaatggag

SEQ ID NO: 13300 - DNA, 120 bp, synthetic construct
  source 1..120: mol_type = other DNA
tctgaccatgagtatagggattgttgttgatagtcagaggagaaagaactctctgaaatgcttggtagaaaggaaaaagcatgaaagctttctagaaaggtaaaggagtttcatcagagt

SEQ ID NO: 13301 - DNA, 120 bp, synthetic construct
  source 1..120: mol_type = other DNA
ggcaccaactgcagctgctacataagccaaaacaattgaagatggaaggtctgtggactgtaccttatctaaggaacaatttatatcatatacaaatcctatcctttactattatatggt

SEQ ID NO: 13302 - DNA, 120 bp, synthetic construct
  source 1..120: mol_type = other DNA
tggcatgggagacccttgcaattggcaccaagaatacaagaatgagaaagggactcaacttgcacccaaatgctcacagtccagttaggtgagaaaaataagcaggtgaatatattaaat

SEQ ID NO: 13303 - DNA, 120 bp, synthetic construct
  source 1..120: mol_type = other DNA
ttctgtactgaaatttgctcaactgaaattctttaccccttaaaggataacttttcgtaccctttcctcccaggttgccccctggacaaccaccattatactgtctctgaatatacctgt

SEQ ID NO: 13304 - DNA, 120 bp, synthetic construct
  source 1..120: mol_type = other DNA
tgctacttactcctgggccttcacgtcaggagtttatatttgattccctctggattccaaatgttttcttctgggaatcttcagctccataaggaaatacttagcagatgcaaaacaagc

SEQ ID NO: 13305 - DNA, 120 bp, synthetic construct
  source 1..120: mol_type = other DNA
aaaccttttattgcctcttttggatgaattccctcaaccatgaaggccgaggctaagttgttggtttccctaagggcaaggcaaattcagataagaaacagaaacaacaaatcaggcaca

SEQ ID NO: 13306 - DNA, 120 bp, synthetic construct
  source 1..120: mol_type = other DNA
cagctcgtagaagctgctactgaatcactctacaaaatgtgtggcctatagaaaatgaaaccatgctaatgcctgcatacaattctgacgggggtaatcagccctgttaaaatagaacag

SEQ ID NO: 13307 - DNA, 120 bp, synthetic construct
  source 1..120: mol_type = other DNA
actcagtcagcacatgttaaatgcacaggcacttttggaccctgcttgcactcactatagcaacaaggtcagcaggccaccttgccttccgcggagcccaccaactcatggtgccctttg

SEQ ID NO: 13308 - DNA, 120 bp, synthetic construct
  source 1..120: mol_type = other DNA
ctggggggctagtttagaaactctccctcaacctagtttagaaactctaccccatctttaataccttgaatgttttgaaccccactttttaccttcatgggttgcagaaaaatcagaaca

SEQ ID NO: 13309 - DNA, 120 bp, synthetic construct
  source 1..120: mol_type = other DNA
ttctctgggtatataatatgattttgactaccttatctggtgttaagatttgaagttggccttttattggactaaaggggaactcctttaagggtctcagttagcccaagtttcttttgc

SEQ ID NO: 13310 - DNA, 120 bp, synthetic construct
  source 1..120: mol_type = other DNA
ctttttatatcaaaagtctcaagcacttatttttattctatgcattgtttgtcttttacataaataaaatgtttattagattgaataaagcaaaatactcaggtgagcatcctgcctcct

SEQ ID NO: 13311 - DNA, 120 bp, synthetic construct
  source 1..120: mol_type = other DNA
tgaatgagacattcttcttttattaaaataaaacccatccaccaccccaaggttattccagaaggaaactctccaccaatagtggtggcactagacatatactgagagacccccaagagg

SEQ ID NO: 13312 - DNA, 120 bp, synthetic construct
  source 1..120: mol_type = other DNA
attaaaatgtcactccccccaaaaaatgcagaggaagaggtaagattgcaggctatttgaaaacaggggcatgaagtttgtcagttcccttctgtctccccatagcatctgtgttccatt

SEQ ID NO: 13313 - DNA, 120 bp, synthetic construct
  source 1..120: mol_type = other DNA
cagaactgtctctatccccatgcctctcctagtaagattcattacctatggtttcaaagaaagtgcagtttctagggagtgaaggaacacgtgaaatacagaaaataaagacagaaaaac

SEQ ID NO: 13314 - DNA, 120 bp, synthetic construct
  source 1..120: mol_type = other DNA
aaagaaaaaaaaatacagcctcatcaacatctcctgcttctctgagacaaagggaacaaaccaaatcaggaaaatcgtgacagaaaaatgacaggcagccattgtcatttccattcttat

SEQ ID NO: 13315 - DNA, 120 bp, synthetic construct
  source 1..120: mol_type = other DNA
tcagggcagaaaattcagccagacccagagcaaacaaggtgaccagagtgatggctgagcaagaaagtcccagcagcacactgcaagaccagagtacattcaagaggggagagggcacgt

SEQ ID NO: 13316 - DNA, 120 bp, synthetic construct
  source 1..120: mol_type = other DNA
cattatagaaaaccagtggacctccggttctgagagcagggatacttggatgaccctaaaggcagagtctctcctggggaaggtttggagaagatggtcaggatcctaccagtgaggcct

SEQ ID NO: 13317 - DNA, 120 bp, synthetic construct
  source 1..120: mol_type = other DNA
gttccttcttcactcatgtcaggtctgagcttcaaatgccattttagagagctgtgagcttccttgtggaatttctagcaacatttcccctctacagctgggctgagtgggtttgtgatc

SEQ ID NO: 13318 - DNA, 120 bp, synthetic construct
  source 1..120: mol_type = other DNA
tctttccaacaggactagcctaagtgcaggattctacttcactgtgtatgccatgcccttctaaccatttttaaagacactgacagttaacctgacatgttaatgcattctgctaaagga

SEQ ID NO: 13319 - DNA, 120 bp, synthetic construct
  source 1..120: mol_type = other DNA
tagggagaggggagaacaggaagttatcatttaatgtgcacaaaggttcagtttgaaatgatgatagttttggaaacagatagtcatgatgcatgtgcttaatatcaatgaactcaacac

SEQ ID NO: 13320 - DNA, 120 bp, synthetic construct
  source 1..120: mol_type = other DNA
atgggcaacaagagagaaactctgtctcaaaaaaaaaaaaaaaaaaagttaaaatgctaagttttatgttatgtatattttaccacaattttaaaaaaaagtaaaataaagaaaagagga

SEQ ID NO: 13321 - DNA, 120 bp, synthetic construct
  source 1..120: mol_type = other DNA
ggggttcctgggggtcatggtgcagggagagcccatgacaacaaccacgcagcagacacacagcaacttgtatttccctccagtactttagccattctttaaaaaaacatttcaactaga

SEQ ID NO: 13322 - DNA, 120 bp, synthetic construct
  source 1..120: mol_type = other DNA
agttcttcttttatttaggccatgggtcaccaagtgatttaggaaaatttggaaagggctggcaagactcaggctatatagcgtcctttcctgaacttgatctcaggctgagagggtgtg

SEQ ID NO: 13323 - DNA, 120 bp, synthetic construct; identical to SEQ ID NO: 5899
  source 1..120: mol_type = other DNA

SEQ ID NO: 13324 - DNA, 120 bp, synthetic construct
  source 1..120: mol_type = other DNA
gactaagggcctaccctacaagtatgacaatatgatagagagaagagacttttgacctaaaactccaataggttttgtttcaatataactgcctttccccactccaaagctgtgagtaaa

SEQ ID NO: 13325 - DNA, 120 bp, synthetic construct
  source 1..120: mol_type = other DNA
tgtaataggatcccatggaactgactttgctcaaggtcactggtgagtcaccaggctagatttgttttgaaggtcctgcctcttcctgtctatctgcccattgctctaaccactcctgac

SEQ ID NO: 13326 - DNA, 120 bp, synthetic construct
  source 1..120: mol_type = other DNA
tttgccctgggatcaccaactaaagcctcaacactgaggcgatgaagttatgacaaaaagcacagctttggctgggcttatgataaaactcaactagaataggaaagtgataagcctcag

SEQ ID NO: 13327 - DNA, 120 bp, synthetic construct
  source 1..120: mol_type = other DNA
tgctcttaggagatggccacaggcaagcaagtagaaactatacacaggttaaggtctctaaatatgtgagcaaatgtaatgtaaaggttaagaaaacatgctttgcaaaagacaaaacgg

SEQ ID NO: 13328 - DNA, 120 bp, synthetic construct
  source 1..120: mol_type = other DNA
tttttctgagccacagctaagcacaccccatgcagtgctagatttcggagatctagctttctagatctgatgggtctagtggtgggaaggtggtatgtgtgcttcaaagaaagcaagtac

SEQ ID NO: 13329 - DNA, 120 bp, synthetic construct
  source 1..120: mol_type = other DNA
gttactaaggactgtttggggtacattgatcattgttagggtaaaaagcaggtgatacagtccagtcctgtcctcacacttcacaatttttactggagacaagaatgggcaggataaact

SEQ ID NO: 13330 - DNA, 120 bp, synthetic construct
  source 1..120: mol_type = other DNA
gctgcgggaattcggggggcggagacaggagactccggaatgggactgcgggacgacaaccgaagagggccaggggccagatggggtctgggcagactcgagtggggggcggagggatcg

SEQ ID NO: 13331 - DNA, 120 bp, synthetic construct
  source 1..120: mol_type = other DNA
tccttgcattcccagttccctcctgtaccttggggccctgaaacttgcgcattatgagagctggacgcgacctcagagagggcgccagtcccttgggagggaggaaggcgatccagccca

SEQ ID NO: 13332 - DNA, 120 bp, synthetic construct
  source 1..120: mol_type = other DNA
agagatcatcttgggtacattgagacctgacccctcaccaaggaatatacatgcatttgagtattctctgctgccaagcattttttgattcatccagtagctgagtacacatttacagca

SEQ ID NO: 13333 - DNA, 120 bp, synthetic construct
  source 1..120: mol_type = other DNA
cccaacattcagctcacattgtagcccaagagatggggagcacagactggaatgagtaatgggagagtagcctccagtctgcccggatttgaatcctaactcttcctcttagaagctgtg

SEQ ID NO: 13334 - DNA, 120 bp, synthetic construct
  source 1..120: mol_type = other DNA
gccctaagactgtctacttctgaccccacaagggctagcactgccctcagaaagctcagccactgtttgctgaatttaattaaaaatacatctctaataacctctttgtaaaatagcttg

SEQ ID NO: 13335 - DNA, 120 bp, synthetic construct
  source 1..120: mol_type = other DNA
atttttaaaaactagttttcattctgttactgtttctttttcttcagtattccagtaccagtacccggagagaacatgtcaaagttaaaaccagctcccagccaggcttcctggaacggc

SEQ ID NO: 13336 - DNA, 120 bp, synthetic construct; identical to SEQ ID NO: 5912
  source 1..120: mol_type = other DNA

SEQ ID NO: 13337 - DNA, 120 bp, synthetic construct
  source 1..120: mol_type = other DNA
gagatggtcacacatgggagtgattcccgactttaccactcagcagctgtgtggacttgtctatcctgagtctcagtgtcttcgtgtataaaatggggacggtaatggttacaagcttgt

SEQ ID NO: 13338 - DNA, 120 bp, synthetic construct
  source 1..120: mol_type = other DNA
aaacactgtcattaggatcagcatgtcaaccccgagaccccactgcatctctctgtgttcagccttcccatcagctgtgttggtcccatctttgctctacttacagcttatcgtttctga

SEQ ID NO: 13339 - DNA, 120 bp, synthetic construct
  source 1..120: mol_type = other DNA
gcaaacaagtcacaaatataaggcctgcactaagcgtctaaggggatttgcacacacggggccggggaagcattttgttaatggtttgccatgggtgggaggacaatcaggacaggcttt

SEQ ID NO: 13340 - DNA, 120 bp, synthetic construct
  source 1..120: mol_type = other DNA
ggcatgcatcctcaccctgctgcgtgccggtgtctgctgagtagactctgctgagacagtccttcctcaagcagactccggctagtagtagacatgtggtggctcagtgctctcagccta

SEQ ID NO: 13341 - DNA, 120 bp, synthetic construct
  source 1..120: mol_type = other DNA
ctcaggcctcatcgacaaagtcgacaacttcaagtccctgagcctatccaagctggaggaccctcatgtggacatcattcgccgtggagactttttctaccacagcgaaaatcccaagta

SEQ ID NO: 13342 - DNA, 120 bp, synthetic construct
  source 1..120: mol_type = other DNA
tggaggaacaagcatgtccttccttccttccagtggttatttaataagatcacactaccaggggtcatagccagtgaatgaggcaagaagaagaaatagcggaatgttgagtatgcctca

SEQ ID NO: 13343 - DNA, 120 bp, synthetic construct
  source 1..120: mol_type = other DNA
gtgctgattagttcagttctgtgccttaaaagttagcctgtcttctctaggcaggcaatccttctctgcagcagaagaattgagtctttagtttttctgttgttgatgaacacaggtatc

SEQ ID NO: 13344 - DNA, 120 bp, synthetic construct
  source 1..120: mol_type = other DNA
agtcacatcatccctaactggtttggtcattgaggattattcattcattcagcaagttttcattgaacaccaggtacttcacagacatgctccctgctcttggaaatgtagcgtttagtt

SEQ ID NO: 13345 - DNA, 120 bp, synthetic construct
  source 1..120: mol_type = other DNA
actgaagcagctaaagaattgcagcatctaatggacaggaagaggggcagcgacagcgatggagcctgagaaggagggtgcagtgtccccaagccatgtggagaggttctgagattaaac

SEQ ID NO: 13346 - DNA, 120 bp, synthetic construct
  source 1..120: mol_type = other DNA
atttgaaatctgtcacgtccaagctctggatgcttggccgttcccttcccatctcagcttcagtcacctcaccccttacatgcagagttttatgaaatgtggcaaataggaaacacccaa

SEQ ID NO: 13347 - DNA, 120 bp, synthetic construct
  source 1..120: mol_type = other DNA
acaagacttagagcaacagctcagagcccaggctctgggcccatacggtcttgagttcaaatcctggttctggcactttctaacaggaggactggtggtgagtttcttaattccctgagt

SEQ ID NO: 13348 - DNA, 120 bp, synthetic construct
  source 1..120: mol_type = other DNA
cccacagcctcttgtatgagtgtgcaggacccaggttatttctagcattacaggcaaatgtctttatactggcctcagactactctccacataaagtattaaagtttacaaagcactgct

SEQ ID NO: 13349 - DNA, 120 bp, synthetic construct
  source 1..120: mol_type = other DNA
cactgaagatgtcctgaggagaaaagctggacatatactgggcttcacacttatcttatggcttggcagaatctttgtagtgtgtgggatctctgaaggccctatttaagtttttcttcg

SEQ ID NO: 13350 - DNA, 120 bp, synthetic construct
  source 1..120: mol_type = other DNA
ttggcctggggtgcctgtgctataaatgagtttcttcacatgaaaaacacagccagcccaagatgacttatctgggtttaggattcaatagtattcactaactgcttattacatgagcaa

SEQ ID NO: 13351 - DNA, 120 bp, synthetic construct
  source 1..120: mol_type = other DNA
aggctttatttgcatcccccaggacagatctggggagggagtcgggggatttggggttgaggacatggccaggctcaggtcctgggaccccgaccccctccccaaccccaggactcagct

SEQ ID NO: 13352 - DNA, 120 bp, synthetic construct
  source 1..120: mol_type = other DNA
acacgaacccccatgttctcaccgcatcctcacaccaaacgccaggcttgtgtagcccttatgcccattttatagatgaggcaaccaaggctcggataggctaaattgctcccagctaaa

SEQ ID NO: 13353 - DNA, 120 bp, synthetic construct; identical to SEQ ID NO: 5927
  source 1..120: mol_type = other DNA

SEQ ID NO: 13354 - DNA, 120 bp, synthetic construct
  source 1..120: mol_type = other DNA
ggggccccagttctctgttccttcttccttggttctccctcatgtccagaacttccctgcctcaaacttcaaagccccatctccagcccaggactcaggctctacagacccctcctctca

SEQ ID NO: 13355 - DNA, 120 bp, synthetic construct
  source 1..120: mol_type = other DNA
accccgcactctcagctgagtgagcccccagtgggcctgcccaccccagccctacccagccctgtccctcaccgcagccttgtagatgtcatccatgctggcggctcacaggacagcttg

SEQ ID NO: 13356 - DNA, 120 bp, synthetic construct
  source 1..120: mol_type = other DNA
tttcagctcagagagaagctttattcctcagggccctcctcagggcaggggcagtaggcaggaaggctcagctctcaaactttttcttgcggccctccattccactcagtgcatcgatgt

SEQ ID NO: 13357 - DNA, 120 bp, synthetic construct
  source 1..120: mol_type = other DNA
cctaacgccaggtcataatgcctatgtcatccacctcacctcatctcagcacataggcactgtcattttacatcacaaggaaaagaagggtgattacagtgctataagatattttgagaa

SEQ ID NO: 13358 - DNA, 120 bp, synthetic construct
  source 1..120: mol_type = other DNA
ctgccttagcatcccaaagtgttgagattacaggcatgagccaccacgcccaaccttcttttgttgttatttattgttaatctcttactgtgtctaatttagaaatgaaactttatcata

SEQ ID NO: 13359 - DNA, 120 bp, synthetic construct
  source 1..120: mol_type = other DNA
tgcctcgaaggtcaaagatcttctgagtcagatctgcaatctgggggcacacgagggggtgggtacttctccttccatttcccgcacacccaactcctccatcctacactccttttttat

SEQ ID NO: 13360 - DNA, 120 bp, synthetic construct
  source 1..120: mol_type = other DNA
tgcagccaaaagcagctgcaaggggtcaggcagagaccaagtcccagccatctcaccctaccccgaaggtacccgagctgcccatgcgtcccacctccgtgatgttcttggtgacttttg

SEQ ID NO: 13361 - DNA, 120 bp, synthetic construct
  source 1..120: mol_type = other DNA
ggcctggacttcagggtctgagggaggaggggctgagggcctcgattccagggtctgagggaggaggggctggggactggactcctgggtctgagggaggaggggctggggcctggactc

SEQ ID NO: 13362 - DNA, 120 bp, synthetic construct
  source 1..120: mol_type = other DNA
acctgcctgctctttcccagtcccgcccgtcctcaccttcagctgcaattttctcgaggcggagatcttagattttttctgccagggtgagatggagcaaggaaggatcatggaggggga

SEQ ID NO: 13363 - DNA, 120 bp, synthetic construct
  source 1..120: mol_type = other DNA
gcgcttccccttccttgggttccaggagtctgactcgcaaacccacttcctctcttcacccaagagtccctacgcctacctcgcaggccaagggtccagcctctcagctgcgacccctct

SEQ ID NO: 13364 - DNA, 120 bp, synthetic construct; identical to SEQ ID NO: 5936
  source 1..120: mol_type = other DNA

SEQ ID NO: 13365 - DNA, 120 bp, synthetic construct
  source 1..120: mol_type = other DNA
tcctctaagccatttccttgcctggtgtctgttcacctaagaccctcattagtgcacataggactccgaaagactgtgagcttgaggctcagcctaattgtgcccacaccaggaccttgg

SEQ ID NO: 13366 - DNA, 120 bp, synthetic construct
  source 1..120: mol_type = other DNA
ggggcacctgctcagttctctttccccatcagcaaagcccagaaaggagttggcccgacctgctggggcccagctctggtcccaccaaacttgccatgggaaaatatgtgaggcagtcct

SEQ ID NO: 13367 - DNA, 120 bp, synthetic construct
  source 1..120: mol_type = other DNA
cagaggcagggggtggcctagtcctgagctagggactaagctggaaatctaagaaaatgttttgattccttcactacctagagaaaatcaatttcacatatccctcctccctcgagaatg

SEQ ID NO: 13368 - DNA, 120 bp, synthetic construct
  source 1..120: mol_type = other DNA
tctggatgtaacccccaaaatgcatcatgttggacaaagccttcttcttccgggcctcatcctcagccttcctcctgttctcctcctcctctcgtcgagccctctcttcctgatttacag

SEQ ID NO: 13369 - DNA, 120 bp, synthetic construct
  source 1..120: mol_type = other DNA
tgggggagggttccttccagagtcttgaagcaatggtgcccggcctccaagggcctccactttcaaccagctccacggacgtgcacaccagggtacctgcagtgacccacctccaacatt

SEQ ID NO: 13370 - DNA, 120 bp, synthetic construct
  source 1..120: mol_type = other DNA
agagaatgttaggtgggcagactggacacctacgatcctgtctttgagagaaacgagctcctcctcctctttcttcctgttctcaaagtgagcctcgatcagcgcctgcaactcattcag

SEQ ID NO: 13371 - DNA, 120 bp, synthetic construct
  source 1..120: mol_type = other DNA
gggttctctgattcttcatgtccccatctgccctcaggtgtgtggagctgaaatgagataccgcagtgcacaagaggccaggaagggggaaggcactgggcaaataaatggatctgggat

SEQ ID NO: 13372 - DNA, 120 bp, synthetic construct
  source 1..120: mol_type = other DNA
ctgcagatgccacactccccctcccatagagttctgcagggcacacactcacgcagtgtggaacttcacacaaagccttctctcactcaccagttctgggcaaagcaattttgcttctct

SEQ ID NO: 13373 - DNA, 120 bp, synthetic construct
  source 1..120: mol_type = other DNA
ccaagactgcctgacacaagagaagcgctgggtcaacgtttgttgattgggcaatcaatggttgaatcttagtcaataggagagtcaggtgcacatgggaaagcctgttctggggggttt

SEQ ID NO: 13374 - DNA, 120 bp, synthetic construct
  source 1..120: mol_type = other DNA
atttctctatataatataccccagcccacccagtggccatgcaacatcccaaggatggggagcttactgcctccccaacccacctactgcatcttgagatatagctgtcagaacgcactt

SEQ ID NO: 13375 - DNA, 120 bp, synthetic construct
  source 1..120: mol_type = other DNA
attctcttccatcaaatttcctgccctcaacgagcctgcccatgttcctgctctgaatgaggctcttgggtatcctgcaaactatgtccagtttccaggagtcacactttagaaagcctc

SEQ ID NO: 13376 - DNA, 120 bp, synthetic construct
  source 1..120: mol_type = other DNA
aaaatatatttctgatagcttctgaagtatctggtgttccttaaaaaccaaaaaagacgcctgtggcctctttcagtttctcctgtgaatttctcttctgtctcctctttggccagacag

SEQ ID NO: 13377 - DNA, 120 bp, synthetic construct
  source 1..120: mol_type = other DNA
gtctttgatccaaatgagtacacacgtttacgcttaccttcctgctccctgagagcaacaggaaacactgtcagtagctcgcacacaagcacatgcaaacacacacgcctgcacacacat

SEQ ID NO: 13378 - DNA, 120 bp, synthetic construct
  source 1..120: mol_type = other DNA
acagggtgataacactgggttctgagctggggtttggggggcataatcagctctgtgcctctggagagtcactgaaccttcctcagtcagtttcaggagacccaacatctcagcttctct

SEQ ID NO: 13379 - DNA, 120 bp, synthetic construct
  source 1..120: mol_type = other DNA
tctctaaataaataaatcaaagcacacagcggggatccttgtggtttgggatcttttcagtatgtagactgtggtgatggatacgtgaacctccacaggttaaagttgtttagagtttca

SEQ ID NO: 13380 - DNA, 120 bp, synthetic construct
  source 1..120: mol_type = other DNA
aggtcacttaacctccccacatctcagctctctttgctgtgaaattactgctcttcttgggtaggtgtgaggaacagaggtagtgtgaagtgtaggcattcagctaataactactatgac

SEQ ID NO: 13381 - DNA, 120 bp, synthetic construct
  source 1..120: mol_type = other DNA
cctcattctgctgaaaaaaagactcaaaccccagaggttctccaaataggtcttaggatgagagtggccaaagagaatagccttcctaaccctaggatgggtggggctgacaattgttac

SEQ ID NO: 13382 - DNA, 120 bp, synthetic construct
  source 1..120: mol_type = other DNA
attccttacacaccaggcaaccccctccctgaatagtcctcagcctgcccaggagaaactagaaaccaagggaatctttctctaccactcctgggcacagagcaaggcttgtcccaagat

SEQ ID NO: 13383 - DNA, 120 bp, synthetic construct
  source 1..120: mol_type = other DNA
ctccaatggctaccatgggattctctctttctctctgctctattgtaccaatcttggagcccagacctggcaacctgtcctctgaagtgtggcctccaccaggaggggccatggacttct

SEQ ID NO: 13384 - DNA, 120 bp, synthetic construct
  source 1..120: mol_type = other DNA
ggcacaatctctgctcactgcaacctcctcctccctggttaagagatcctcctgcctcagcccccttagtagctgggattacaggcgtgggccaccactgccaggctaatttttgtattt

SEQ ID NO: 13385 - DNA, 120 bp, synthetic construct
  source 1..120: mol_type = other DNA
ttctttggatcttggcttacgtcgttaaataagggtttgtggtcttctgcatacaggctctgtgccattccttctttgtgtgtgccattcctattacacatttcttaatgtttattgcta

SEQ ID NO: 13386 - DNA, 120 bp, synthetic construct
  source 1..120: mol_type = other DNA
gaatccgggaggtggaggttgcagagaacagaaaccacgccactgtactccagcctgggcaacagagcgagactccgtctcagaaaaaagaaaagaaaagaaaagaaaaaataaaaccag

SEQ ID NO: 13387 - DNA, 120 bp, synthetic construct
  source 1..120: mol_type = other DNA
catctatctatctctctatctatcatctatctatctctctatctatcatctatctatctatctagagagaggtctggctatgttgacgaggtgttcaactcttggcctgaagcaattctc

SEQ ID NO: 13388 - DNA, 120 bp, synthetic construct
  source 1..120: mol_type = other DNA
taaatataagtttaattttaaaattaaaatttaaaaattgtaaatgtttttcacagtattttattttattaaaatagaaatggggtgttgtggccaggcgcagtggctcacgcctgtaat

SEQ ID NO: 13389 - DNA, 120 bp, synthetic construct
  source 1..120: mol_type = other DNA
atgggacgggaacttgaacacgaccagagggaaagaagtcaccaagtaggaccagagaggttagagtatatagtgtagcagagctggcctgaagtctcagactttgtacttctttttttt

SEQ ID NO: 13390 - DNA, 120 bp, synthetic construct
  source 1..120: mol_type = other DNA
ttaaaaaaaaaaaaaggaagctcatcaaggtgacctgtctacagaggcaaggacagggactgagcttcaggagctctagtttgcctgctgggtagggacagatgtttaagttaaaagtct

SEQ ID NO: 13391 - DNA, 120 bp, synthetic construct
  source 1..120: mol_type = other DNA
catccagtagcacccacccctgttccccttgggaacccaggtatcctgccactttctgatggagcagatggccaccctggaggctcagccttgctaaatcagacatttaaatcccgtaat

SEQ ID NO: 13392 - DNA, 120 bp, synthetic construct
  source 1..120: mol_type = other DNA
aaagaaattgaccctgagcataaaacaagtcttggtggatccagatcatcatatacaagagatgaaatcctccagggtgtgggatggggtgagatttccttttaggtactaaggttcacc

SEQ ID NO: 13393 - DNA, 120 bp, synthetic construct
  source 1..120: mol_type = other DNA
ctaaggctgggacaacgggaattcaaatcaagatggtggccacaccccatgcaaatatgtttactgagcacctcagagtattagtgtgtattagtctcgtaatcttcccttaccccattt

SEQ ID NO: 13394 - DNA, 120 bp, synthetic construct
  source 1..120: mol_type = other DNA
cgctcacgcccacggatctgcagcaacagaggagggggagaagtaagtatatacacagtacctgagttaaaagatggttcaagttacaattgtttgactttatgacggtacaaaagcaac

SEQ ID NO: 13395 - DNA, 120 bp, synthetic construct
  source 1..120: mol_type = other DNA
ttcatgcaaccatgctgtttctcactttcagtaacaatattcaataaatcacatgagatatacaacattttattactataaaaagggctttgtgttagatgactttgcccaactgtaggg

SEQ ID NO: 13396 - DNA, 120 bp, synthetic construct
  source 1..120: mol_type = other DNA
ccagcactttgggaggccaaggcaggcagatcacaaggtcaggagttcgagactagcctggccaacatggtgaaacctcatctctactaaaaaaaaaaataaataaataacaaaaaatta

SEQ ID NO: 13397 - DNA, 120 bp, synthetic construct
  source 1..120: mol_type = other DNA
ctctcccaggacaggcacaaacacgcacctcaaagctgttccgtcccagtagattaccactactcaggataggaaaagagaagcaagaggcagtaaggaaatcaggtcctacctgtccca

SEQ ID NO: 13398 - DNA, 120 bp, synthetic construct
  source 1..120: mol_type = other DNA
tcatggggttatagggaggtcaaataagcagcaggagaaagcccccctactgctcacctggagggccactgacaaccacccttaacccctcctcccagagaccccagttgcaaaccagac

SEQ ID NO: 13399 - DNA, 120 bp, synthetic construct
  source 1..120: mol_type = other DNA
ggagcttattttcaaaagccaaggaatacacgtggatgaagaaaaagaaaagttctgcatccccaggagagatgctgagggtgtgatgggatggataaaagcccaaattcaaggggggaa

SEQ ID NO: 13400 - DNA, 120 bp, synthetic construct
  source 1..120: mol_type = other DNA
ccctcaccagccatgcacttctttgaggaaaagacaatcagagagggacttccaaccttcccaccactaaatccccaagacttcctaaatgtgcaccctattcccaactcccttcctgta

SEQ ID NO: 13401 - DNA, 120 bp, synthetic construct
  source 1..120: mol_type = other DNA
cttgttgtcttgctgaccaaagtattagatcacaatgccttgcacctgcttgggctcaataaatgtgaataacacacaagcctgttatatgagaggttaagagagcgagaaagagcaagg

SEQ ID NO: 13402 - DNA, 120 bp, synthetic construct
  source 1..120: mol_type = other DNA
tttttttttttggagacggagtctcgccctgtcacccaggctagagtgcagtggtgtgatctcgactcactgtaacctccacctcccagattcaagcgatcctcttgcctcaacttcctg

SEQ ID NO: 13403 - DNA, 120 bp, synthetic construct
  source 1..120: mol_type = other DNA
gctgggcacacagtaagagctcaacaaaggttagctctttctgcaattgttctatttcacttgttctatattattattctagagagaactgtgtgattgttagtgcggatctgtggtact

SEQ ID NO: 13404 - DNA, 120 bp, synthetic construct
  source 1..120: mol_type = other DNA
aggagtcccagaaccaagcccctacagatagagggataactatattgccctgtaacctgcaaccctgctatatttatttattagttttggtagctttttatggattttccattaggactt

SEQ ID NO: 13405 - DNA, 120 bp, synthetic construct
  source 1..120: mol_type = other DNA
acccacctcggcctcccaaagtgctgggattacaggcatgagccactgtacccggccaacgcctggctatttttttaatattttaatagagacgaggtttcaccatctttgtcaggctgg

SEQ ID NO: 13406 - DNA, 120 bp, synthetic construct
  source 1..120: mol_type = other DNA
atgctgctagtggaactccgactgtggacgccctgttatcaaactaggttaagtttcctttccctagtttgctaggaggttggttggtttgtaatcatgcatatgtgttgaatatcatta

SEQ ID NO: 13407 - DNA, 120 bp, synthetic construct
  source 1..120: mol_type = other DNA
tgggattacaggcgtgagccaccgcgactggcctatttatccttttttctatattaccaggtttggtttgctaaaattggttagctgttgcatgtctatgctaacaggaatattggtcta

SEQ ID NO: 13408 - DNA, 120 bp, synthetic construct
  source 1..120: mol_type = other DNA
aaattaaaagcattcagtagagaaaggaagcctatttcaacaagtggagacagaataactggatttccatacaggaaagataccagagactgactcctacacctcacaccataaacaatt

SEQ ID NO: 13409 - DNA, 120 bp, synthetic construct
  source 1..120: mol_type = other DNA
ggactatactaaatgaaaaggagcaaaatactgatatatacaacatgaacgaatgtcagacagtacattgaaggacagaagcccgacaaaaatgagcacataatgtatgattcccccctt

SEQ ID NO: 13410 - DNA, 120 bp, synthetic construct
  source 1..120: mol_type = other DNA
gcctgcgtctggaactggaatggcctagcccaaagctagataacaggtagattgtttttccgacaaattatcaaacgacccatcattgcactctttcaaaatttgattctcagacgtacc

SEQ ID NO: 13411 - DNA, 120 bp, synthetic construct
  source 1..120: mol_type = other DNA
ctaggcgttcaactttgagttcggatggtcctaacatccccatcatctacacccaggtctcccaacaatgcaactcctatgatgatccctctagccaagcttccatcccactcaccccca

SEQ ID NO: 13412 - DNA, 120 bp, synthetic construct
  source 1..120: mol_type = other DNA
gagaggaggaaggggggcaggagaaaaaagcttttccaaaaaagtattggctgtcttgaggaatgcggtcgcccccttgggaaagtacatatctgggagaagcaggcggctccgcgctcg

SEQ ID NO: 13413 - DNA, 120 bp, synthetic construct
  source 1..120: mol_type = other DNA
agaagttcgttgacttttgactggggagaaaggaaccttaaacttggggaggagaagggagtcctggagttgttacctaagaacaaagatggggcggaatggaggctacagcccgaaagc

SEQ ID NO: 13414 - DNA, 120 bp, synthetic construct
  source 1..120: mol_type = other DNA
gaaggaagtttaccttttcctgctggacacctgcacacagccctgccatggcccagagcattggatgccgcctctgactgctactgcacacattcatttatatttcatccactcctctct

SEQ ID NO: 13415 - DNA, 120 bp, synthetic construct
  source 1..120: mol_type = other DNA
ttggaagctttttaattgatagcttgcctcttctgcctcggaaagtcaagccaaaggaccaacttcttttcacaccgttggattccattctaaaagctaattaagcctagaggcccaatt

SEQ ID NO: 13416 - DNA, 120 bp, synthetic construct
  source 1..120: mol_type = other DNA
tcacattcccttttaggacactttaggttgtctggagtttggagcccgtaggaatattgaagaagttagtgaagaaatgctatacagtcatttgttgattaatgaagggggataaggtct

SEQ ID NO: 13417 - DNA, 120 bp, synthetic construct
  source 1..120: mol_type = other DNA
agttaaatcagaatccctggggatgcaacccaggcggcagcatttaaaaaatacccaagtgattccaacctacagacaaggatgagaaaactctcctaaactcttgtataatgacatcgg

SEQ ID NO: 13418 - DNA, 120 bp, synthetic construct
  source 1..120: mol_type = other DNA
cagctgattatgggcctcagcctgactcttaaaacaatgcttgtgtatttcttaatcgtagctatcatttgagtttttaactatgtacaaggtattgtgctaagcgctttacagtccttc

SEQ ID NO: 13419 - DNA, 120 bp, synthetic construct
  source 1..120: mol_type = other DNA
ggcccggcctgttctcctgagcctttgttttccatctcgctgatccaaagtaaacgctcccaggggaaacgggtggtgttgagaaggttctggaaggagcattttcccaggaagggtctg

SEQ ID NO: 13420 - DNA, 120 bp, synthetic construct
  source 1..120: mol_type = other DNA
attaataggcaaaagataattctcagtatttgctttataggacgagtcagcaaaagtcctgtggatatccctgaacttggctgggtggtaaactaattccgactcccttactcgctagta

SEQ ID NO: 13421 - DNA, 120 bp, synthetic construct
  source 1..120: mol_type = other DNA
gactggatcagaccattgaagagagactttcaggctgcaagttgttcctaacttctgaaattggaacttaaatgtagctgacttaggtatttagatgtagcttgggctgtgagttaagct

SEQ ID NO: 13422 - DNA, 120 bp, synthetic construct
  source 1..120: mol_type = other DNA
ttctccctcattatacaaatatgcttcataaattatgggctttggcacacacaggaggttgtgtttatctgttatccatgggagtgccccttaatgtcatcagtgtttttttttttcccc

SEQ ID NO: 13423 - DNA, 120 bp, synthetic construct
  source 1..120: mol_type = other DNA
tttatatctctgcttttagataacagatggtcatgtgtctatgggcttgtaccggcagaggcaacagcaggtccttaagactccccaggtgccatgatgaaaagaaccttagaaaatatt

SEQ ID NO: 13424 - DNA, 120 bp, synthetic construct
  source 1..120: mol_type = other DNA
agaagaatagccagcttctttgggtggtggcaaaggggattgtttatttatagtacagattcctgccctccccctttgacctcctgaatcagaatctctagggacacggcctggaagttt

SEQ ID NO: 13425 - DNA, 120 bp, synthetic construct
  source 1..120: mol_type = other DNA
tggcatttctctaataggccatagcctctgtaacaaggatatttgccatcatattgaaaatgataagaaagggggaaagaaaagaaagtgtacagtgcttttgagtacataacctagaca

SEQ ID NO: 13426 - DNA, 120 bp, synthetic construct
  source 1..120: mol_type = other DNA
gagcagcttacagttcaatgacaaagacagggctgtgtgtagagaaatttgttatcctattaccatgggtccctaagtgtgtattgtaatttctagaaaactcctaagtgttctgaaaac

SEQ ID NO: 13427 - DNA, 120 bp, synthetic construct
  source 1..120: mol_type = other DNA
ctgggtaagtcttgtctcagttcacacttcaggcccccagtgagtgaggtggccgtgatgacgctcttgtttaacaggcaagtaaagccagggtgttgaactctacggaagtgggccggg

SEQ ID NO: 13428 - DNA, 120 bp, synthetic construct
  source 1..120: mol_type = other DNA
atttcctctattgatcccaggtataactcggttggttttgttcatttagcattagtgaaacacctactatgtccaaagcactgtcctaagccctaaggttacaaagaagaagatgatctt

SEQ ID NO: 13429 - DNA, 120 bp, synthetic construct
  source 1..120: mol_type = other DNA
tgacttctttctgaaatatacttgttagtgtaccttaaaggcagtctggtaatgttagacttcggagtaaaggggacttggggatcatttagtcccttagttttacaaatgagaaaagta

SEQ ID NO: 13430 - DNA, 120 bp, synthetic construct
  source 1..120: mol_type = other DNA
tgattttgttctagctttggttcatgtgcaagctgaggcttcccacaggaaaggcaagaaatctcattatctttttaatagtaaagcatattggcttttccggtttcatactgccaagat

SEQ ID NO: 13431 - DNA, 120 bp, synthetic construct
  source 1..120: mol_type = other DNA
ttccttattggatcacatcgtggctatcctgaaacagcattgcccctcctttttattaccattattaccttcagattacactatgctcacaagttttgatctgcttcagaggctcccttc

SEQ ID NO: 13432 - DNA, 120 bp, synthetic construct
  source 1..120: mol_type = other DNA
taacagccaagtccgacagctggaagaacaattaagaataatggatcagaccttgaaagcattaatggctgcagaggataaggtactgatggctcgtgtggtttttaggtttaactgcaa

SEQ ID NO: 13433 - DNA, 120 bp, synthetic construct
  source 1..120: mol_type = other DNA
ggccaggaggatggtgtgggggaaaggcatcttttaagagctgctcaaaagaggccctgccagaaagcaacacttacagtagacattttagtaaaatggcaatattgtgaggtgattttt

SEQ ID NO: 13434 - DNA, 120 bp, synthetic construct
  source 1..120: mol_type = other DNA
ttaatccttatggttgaataccaacctggcaaaacaattttccaattcaagggcatccacattgatacgctcctttgcacttgcacattcttcctgtgtgtcctctggggtttttctctg

SEQ ID NO: 13435 - DNA, 120 bp, synthetic construct
  source 1..120: mol_type = other DNA
ggactacaggctgtagtcacaaattgttcttccaaaacactgcccttgcatttttttcccattgtttatagctgcagatgcctgactactccagtgtaattaaaatatagctctgcaaaa

SEQ ID NO: 13436 - DNA, 120 bp, synthetic construct
  source 1..120: mol_type = other DNA
tataatttgaaggaacccttaaagtgtcaggttattgagaatctgaggataaggaaattggcatgatccaatacagctttaacagtggtactacaaaagatcatctcttttacttttaag

SEQ ID NO: 13437 - DNA, 120 bp, synthetic construct
  source 1..120: mol_type = other DNA
gggtgtggctggcagtggggtttgcatgactgcttcttgtctgtgtttcaagtgctctcatctattggtttggtttcctttcttttttttttttttctcattgtgccactttttttttcc

SEQ ID NO: 13438 - DNA, 120 bp, synthetic construct
  source 1..120: mol_type = other DNA
tcgggatgtagtgacccctctgtgttgattatttcggtggccttacttgggaggacctggctaactaatgaaaggctcatgatgaatggttctgtagctgtcccatattactaggaagtt

SEQ ID NO: 13439 - DNA, 120 bp, synthetic construct
  source 1..120: mol_type = other DNA
agggcaggtcaggagtagcccaaggtatgcatgtgcaagaggaaaacttgataaactcaagtttatcaagaaattgttgatttcttgttcaactgttgatttgaaccaggcttctggttc

SEQ ID NO: 13440 - DNA, 120 bp, synthetic construct
  source 1..120: mol_type = other DNA
taccatttataagagaatgttaatgtgagaactgctcagtctcctgacagacccgggggctgcaggcacattttccctaggggtaggtctgttagcttttcaagatcatgaagtattttt

SEQ ID NO: 13441 - DNA, 120 bp, synthetic construct
  source 1..120: mol_type = other DNA
gttgagtggtgacaagtgcttgttcttttgctgtttgaatggataacactatcaaagctagacaggagtcagaatgtgtaccctgtattgtggtgactgggggaaggacagagacttaat

SEQ ID NO: 13442 - DNA, 120 bp, synthetic construct
  source 1..120: mol_type = other DNA
attaaatgtacctatgcttgggcaaaatagcttttgaaaacaggaactcatgccagaagcccctggttgtctgaaaggtatgctttactcagtctaatggtgctgttggagtctggggag

SEQ ID NO: 13443 - DNA, 120 bp, synthetic construct
  source 1..120: mol_type = other DNA
gggaaaacacatacaaaaaggcaagcccatgtcagggcgatcctggttcaaatgtgccatttcccgggttgatgctgccacactttgtagagagtttagcaacacagtgtgcttagtcag

SEQ ID NO: 13444 - DNA, 120 bp, synthetic construct
  source 1..120: mol_type = other DNA
tcattgtaactttaatcagataaaacgtaattattattaacatttttacattatagctgatttgtctaaattctaattacaataaaatatatcgttttatcttatcaaatagtttttata

SEQ ID NO: 13445 - DNA, 120 bp, synthetic construct
  source 1..120: mol_type = other DNA
gtcattaatctggttcatgtgacactggctttcgtggtgtgaatgtggtccaccagcttttggcagagaccaacttctttcacaaaagtctccaaaaatgcattattagtaatgaatgta

SEQ ID NO: 13446 - DNA, 120 bp, synthetic construct
  source 1..120: mol_type = other DNA
ctggagaaatttcagaattccacatctcatttgctaatattttaaacaaacgattcaccagacctgactaattgaatggtgtatttccactggactgaatgtcctaattatcattcaaga

SEQ ID NO: 13447 - DNA, 120 bp, synthetic construct
  source 1..120: mol_type = other DNA
aacatgagcaaaaaagcacagtgaggcagtgcagtgcagcagataaggtcacagattctgccagcagcctccgtagctgttggcaagttactaaacttcactgtgtcttggagtctttat

SEQ ID NO: 13448 - DNA, 120 bp, synthetic construct
  source 1..120: mol_type = other DNA
cacaaggagaaatggaaatccattgctaaaagtagaagggcccatcaatgacaggctgccttccagctgcttatcagaagtggacactgttttgacacatttatttaattgatgttgaat

SEQ ID NO: 13449 - DNA, 120 bp, synthetic construct
  source 1..120: mol_type = other DNA
ggcactttagtaatttcctgcacaaaaacatccaaaaagcactggagaatcaagagacgtcatttcttcagacaaatatctagctctttactttaaaagcattatgtgacacaaacttca

SEQ ID NO: 13450 - DNA, 120 bp, synthetic construct
  source 1..120: mol_type = other DNA
tgaaagaaacaggagttaccctttttatagtatactccagatttgtacacagattctattcatattttcactgtaaaatttaataggcaagagccagagagagaaagggaacccatgaaa

SEQ ID NO: 13451 - DNA, 120 bp, synthetic construct
  source 1..120: mol_type = other DNA
agtgtaaatctcaacttttatttgataaggtcctgacctgtgtgtgttttctcaaagcactattttccacattgttggttaattttgggcactggcaaagaatttatacttcgttggcta

SEQ ID NO: 13452 - DNA, 120 bp, synthetic construct
  source 1..120: mol_type = other DNA
gggaggaacagacactgaggcctacccaacggttgagagtggaaggagaaagaggatcagaaaaaataactaatggatggcaggattaatacctgggtgatgaaataatctgtacaacaa

SEQ ID NO: 13453 - DNA, 120 bp, synthetic construct
  source 1..120: mol_type = other DNA
ccataaataagagctgtctgaccaaaacaggcacttctctgacttggagagaggatgtggagaaaatgatgagtgctgcactatggtaatcaggctggtaaaggttacttagggaaaagg

SEQ ID NO: 13454 - DNA, 120 bp, synthetic construct
  source 1..120: mol_type = other DNA
attgtatgcttgaaactttctaagagagtagatcttaaatgttctcaccacacagacacacacacacacacacacatacacacacatacacacacacagaatggtggtaactacgtgagg

SEQ ID NO: 13455 - DNA, 120 bp, synthetic construct
  source 1..120: mol_type = other DNA
aaaatgaccatggtcttgaactgcttaatcaactgctataaataatgaaacagtacaaactgttatatgatgttgtgaaataacttaatatctatattttaaaaatgatgtcagttccta

SEQ ID NO: 13456 - DNA, 120 bp, synthetic construct
  source 1..120: mol_type = other DNA
aatgaatgcagagaatgcaatttggcaagtgttctaatagcacagaaatagtacattctccaagtaggagtcactgaaggagttaaatacaaaaaaaggctttgccaaaagaatgaaata

SEQ ID NO: 13457 - DNA, 120 bp, synthetic construct
  source 1..120: mol_type = other DNA
gagagattcaatgtctcagagctataagaagtgaaagaactggtttttaagactatggcattctggttccagagatggtgctgttaatcactaagccattctgcctgcattagtttgttt

SEQ ID NO: 13458 - DNA, 120 bp, synthetic construct
  source 1..120: mol_type = other DNA
gtgaatccatcctcctatccaagcagttgtctgcactataatagagtcatgaaaaaatgggccatcttgtctgtatggctgtcattttaatcaaggactaggttttgtataactcttcaa

SEQ ID NO: 13459 - DNA, 120 bp, synthetic construct
  source 1..120: mol_type = other DNA
gtcttcatctctttggagtcaagggtggacttggttctatgaggttgaagacacagatgatttaaagacttgatctgttggtatttaggagactgcgtgtgtatggactctaataaatat

SEQ ID NO: 13460 - DNA, 120 bp, synthetic construct
  source 1..120: mol_type = other DNA
acttctaaatttggataattggaatatattcaacacccttatcatatatttgcaaaacaatttactagaaacatattcatagcatttttcatagatggttggaatctcagtttcttcttc

SEQ ID NO: 13461 - DNA, 120 bp, synthetic construct
  source 1..120: mol_type = other DNA
ttttaaaaagtgttgaaagaaggcatgaagctaactttcctcaacatcaagaccctcactctttcctctaaactattctatctttacttgcaaagcactttgctctgtgccctggaggaa

SEQ ID NO: 13462 - DNA, 120 bp, synthetic construct
  source 1..120: mol_type = other DNA
gcagaagcccagtactgagcaaatagactgaaaaaaaaaaatcctatattatgaaagccaagagaggaaaacatttcaaaaagggcaggcgacccacaatgtggaaggcattagagaggt

SEQ ID NO: 13463 - DNA, 120 bp, synthetic construct
  source 1..120: mol_type = other DNA
cacgtatatgtaccagctcagttactctatgttcatctctaccagcagtctattttgatttgtgcagtttcaagaaatcctcgtaagtaaacatgtggaatccttagtcatagatgcaaa

SEQ ID NO: 13464 - DNA, 120 bp, synthetic construct
  source 1..120: mol_type = other DNA
aagtcatgatgggaaccagtacttctgacgctagtttccctggtatcgactactaccctatgataccatctgtatacatatgtctattatgaatttagtgctaatttgtttagcaaaaac

SEQ ID NO: 13465 - DNA, 120 bp, synthetic construct
  source 1..120: mol_type = other DNA
cagggagggtgggacaatgataaaattgtcctaggggactgtgagaacataatagcagtagagatcttaaatttccttcatatttctccccccaaaatggatagaataggtagacagcaa

SEQ ID NO: 13466 - DNA, 120 bp, synthetic construct
  source 1..120: mol_type = other DNA
aaccttgagcaactactgagctgtaacccaatggaagaatctcatatgcatgaaaacttcccgtatggaacctttggagcttagcttcagaagaaataacgtatttgaattcatataact

SEQ ID NO: 13467 - DNA, 120 bp, synthetic construct
  source 1..120: mol_type = other DNA
gatgtccaattgtttgagtgccattggttaaaaagtctacttattctccactaaattgcttcggaacttttattacaaatcaaatggttatgttatgtgggtctatttcttggattttta

SEQ ID NO: 13468 - DNA, 120 bp, synthetic construct
  source 1..120: mol_type = other DNA
tagacaatcatgtgaataggggtggttttgttttttcctttccaaatgtgttaatttttttcttgcttttttgcagtggcataaaggagaaaaaatggaaaagacaatattttgaataaa

SEQ ID NO: 13469 - DNA, 120 bp, synthetic construct
  source 1..120: mol_type = other DNA
cattgagagagcatgagaaagagaaagcaacaagacagtgagaaccagacctaagatattaataatcatgataaatgtaaatagtctacgtccatcagattaaaactaaagatcatttta

SEQ ID NO: 13470 - DNA, 120 bp, synthetic construct
  source 1..120: mol_type = other DNA
gttcacaagataaacactgaacacatttcaaagaaaacacttttcctgtgattactacacaattaaattggagttcggttaaataagaataacgtcagtaattctcataggtttagaaat

SEQ ID NO: 13471 - DNA, 120 bp, synthetic construct
  source 1..120: mol_type = other DNA
tgtatcagaaactacataataaagtatttttaaagaacaaaatagactggaataatttatattagtaagagggataggaaattcacatttttgatattaatttgtatataaatgaaagct

SEQ ID NO: 13472 - DNA, 120 bp, synthetic construct
  source 1..120: mol_type = other DNA
taatagtaacattattatttgacaaattgaaatattacttcaaatgggaatgacatacttattgggaaattctagttttctgaaattactgaaaattttcaatttgggaaaatataatca

SEQ ID NO: 13473 - DNA, 120 bp, synthetic construct
  source 1..120: mol_type = other DNA
ataccaacatccattgggataaatatcttgccagggccatccccctgtctagagccttatgactcttccggttgaaaaaccttcccgcagcattgtttgccttttaagaatgtattttat

SEQ ID NO: 13474 - DNA, 120 bp, synthetic construct
  source 1..120: mol_type = other DNA
ctgcctgaagattatgcaaaggcattgctccaaagaaggaactcatattgagccccacaggcttctgagccctgagcagctatagcatgacatcattctgagagctcagctccaaaagga

SEQ ID NO: 13475 - DNA, 120 bp, synthetic construct
  source 1..120: mol_type = other DNA
gtgacagaatattgaaattatcaatgtccccaggagcaaagagggttggaaagggttagaaaatctatttaacgaaataatggatgaaaacacctcaagtctagcaagacacttggacat

SEQ ID NO: 13476 - DNA, 120 bp, synthetic construct
  source 1..120: mol_type = other DNA
tagagaaaaaaagaataaagaagaacgaacaaagcctccaagaaacataggactatgtgaaaagaccaaacctatgtttaattgcggtatttaaagtgacggggagaatggaaccaagtt

SEQ ID NO: 13477 - DNA, 120 bp, synthetic construct
  source 1..120: mol_type = other DNA
tgtaaatgggctaaatgccccaattaaaaaacacagactggtaaattggatagagtcaagactcatcagtgtgctgtattcaggagacacgtcacacatgcaaatacacacataggctca

SEQ ID NO: 13478 - DNA, 120 bp, synthetic construct
  source 1..120: mol_type = other DNA
gaatgactactgggtacataaagaaatgaaggcagaaataaatgagttctttggcagcagtgagaatgaagacacaatgtaccagaatctctggaacacagataaagcagtgtttagagg

SEQ ID NO: 13479 - DNA, 120 bp, synthetic construct
  source 1..120: mol_type = other DNA
acaatagaataagaaggactcttccctagctcattttataaggtataaggccagcatcatcctgataccaaaatctggcagagacataacagaaaaaaaaaaaaagaaaatttcaggcca

SEQ ID NO: 13480 - DNA, 120 bp, synthetic construct
  source 1..120: mol_type = other DNA
aaatgaccctactacctaaagtaatttatggattcaaagctattctggtcaagctaccacagactttcttcacagaattagaaaaactactttagatttcatatggaaccagaaaagagc

SEQ ID NO: 13481 - DNA, 120 bp, synthetic construct
  source 1..120: mol_type = other DNA
ctcaatctacaaggtcagcattaccctgataccaaaaccagacaaggacacacaaagaaataaaactcccaaccaatatctctgttgaatatagatgcaaaaatcctcaacaaaatacta

SEQ ID NO: 13482 - DNA, 120 bp, synthetic construct
  source 1..120: mol_type = other DNA
ccacagaatactatgaagccataaaaaacagtaaaatcatgtattttgcagcaacatggatggagttgaagcccatcatcatacgtgaaataactgaaacagaaaatcaaatttatcatg

SEQ ID NO: 13483 - DNA, 120 bp, synthetic construct
  source 1..120: mol_type = other DNA
cttgactttttacttccttctaggaggaagtaaaccatagctttctgtggcacattctaaaatattttggccttgaatattctctacctgacagtttcacccgaaatgtgcttacttccc

SEQ ID NO: 13484 - DNA, 120 bp, synthetic construct
  source 1..120: mol_type = other DNA
aggaacttgtaagaatatttacagttatatcctatatacatagaatttctatctgtacctggatcctgatattctagagaatctattctgggagctgtggtttatactataggagataca

SEQ ID NO: 13485 - DNA, 120 bp, synthetic construct
  source 1..120: mol_type = other DNA
cagcctcaaattcctgtgctcaagcaatcctccctcctctgcctcccgagtagctggtattacaggtgtgagttactatgcctggctgattctttgaatatcttggttaatctattttat

SEQ ID NO: 13486 - DNA, 120 bp, synthetic construct
  source 1..120: mol_type = other DNA
ctctgagttggacttgtgctttcgtacataatcatttttctccactgttttcccaagatgaagactttaaaacgatagattcacagaacagagtgagaagtctgaatcagaagtctgaat

SEQ ID NO: 13487 - DNA, 120 bp, synthetic construct
  source 1..120: mol_type = other DNA
catgttaatgttgctaatagttctgatttcttcatgttttcttattttctattgaaatataagctttctgctagattttctacctgtccacttcctctgctattaagagaagtttgcatc

SEQ ID NO: 13488 - DNA, 120 bp, synthetic construct
  source 1..120: mol_type = other DNA
aaaaacggcagcattttgattcagtttatactttgctcatcaatggcagaacaaactgatgcttatttgcatgggttggcttaccatccattgcttctttgacactgccgttactacaca

SEQ ID NO: 13489 - DNA, 120 bp, synthetic construct
  source 1..120: mol_type = other DNA
tggtgtatatgtgccacattttctttatgcagtctatcattgatgggcatgtgggttggttccaagtctcagtcacatgctatttctggttctagatccttgaggaatcgccacactgtc

SEQ ID NO: 13490 - DNA, 120 bp, synthetic construct
  source 1..120: mol_type = other DNA
tgagcaaccacgcccggcatgtttaaatctttaatccatcttgagttaatttttgtataaggcataaggaaggtgtccagtttctgttttctgcatatggcaagccaattttcccaacac

SEQ ID NO: 13491 - DNA, 120 bp, synthetic construct
  source 1..120: mol_type = other DNA
caaagggaatgcttccagcttttgcactttcagtatgctattgactgtgggtttatcataaaaagctcttcttattttgagaaaatttccatcaatacctagtttattgagtgtttttag

SEQ ID NO: 13492 - DNA, 120 bp, synthetic construct
  source 1..120: mol_type = other DNA
ttagaaggaatggtaccagctcctctttgtacctctggtagaattcgtctgtgaatccgtctggtcctgggcttttgttttggttggcaggctattaattactgcctcaattccagaact

SEQ ID NO: 13493 - DNA, 120 bp, synthetic construct
  source 1..120: mol_type = other DNA
tttcctaggggaaagaaaaacaacaagaaaccatcattttaaaaaacatgactttcttactcattcttggagtaaacagttggagatgagacttaatcttatgagtggagggagtcaggg

SEQ ID NO: 13494 - DNA, 120 bp, synthetic construct
  source 1..120: mol_type = other DNA
atctggaatttgagcagctaagggattttctaaatgttatacatctagaaacttaaatttacatactgtttccacaactgtatcttatctcctctgaaaaagtaaatatttacctgattc

SEQ ID NO: 13495 - DNA, 120 bp, synthetic construct
  source 1..120: mol_type = other DNA
tatgacaatgaaggtatacaataaataatgtttcataaaaatatagtactttaaaatggctttataatgatgtttcatattagcattctagttttgacttccaacccttaattttggcaa

SEQ ID NO: 13496 - DNA, 120 bp, synthetic construct
  source 1..120: mol_type = other DNA
gtgttccacacaccacacccatataaggtggtaaaacttaatgaatgtgtgtattgagactctcattcaccaagccctctccctttcctctagtcctatttcctgagactcgatggtttt

SEQ ID NO: 13497 - DNA, 120 bp, synthetic construct
  source 1..120: mol_type = other DNA
aggatcacttgagcccaggagtttgaggctgtagtgagctatgatccccaagctgtactccagcctggtgacagagtgagaccctgtctttaaaagaacaacaacaacttaacaaatagc

SEQ ID NO: 13498 - DNA, 120 bp, synthetic construct
  source 1..120: mol_type = other DNA
ttcagaaaccaccaccttcatcagttagcacccatcaacatcgagacaatacttttaccagcaaaagtattacaacttgctggtttcagatgatcactaacatttttagcagcaaaatac

SEQ ID NO: 13499 - DNA, 120 bp, synthetic construct
  source 1..120: mol_type = other DNA
gtaaacctcatatttgatttgatacaatattaatcaatgctcacaaaaatctgaacttcttactgtttctgaaatagcataaaatatatattctgccacagtccttttggaatacatatt

SEQ ID NO: 13500 - DNA, 120 bp, synthetic construct
  source 1..120: mol_type = other DNA
ttatatatgttatatattataatatatatatatttgtactggtagatagataatgctagaaggatactttaagaaataacagtgatttgggaggccgaggtgggtggatcacgaggtcag

SEQ ID NO: 13501 - DNA, 120 bp, synthetic construct
  source 1..120: mol_type = other DNA
acacccaggaaaaggcttttttctacatttggctgaaagacagtattagggttttatccctttgggggctgtgttgtataagaggatagaatatggcaaaaaggagaataagaatattgt

SEQ ID NO: 13502 - DNA, 120 bp, synthetic construct
  source 1..120: mol_type = other DNA
caacactgaagtaggtgggaagatgtgggactccaggtgtcatcagactaaacagatattcgtacattaggaactgatagcattcaagaataaacttccatgaactgaatttgcataaat

SEQ ID NO: 13503 - DNA, 120 bp, synthetic construct
  source 1..120: mol_type = other DNA
gggcttggctgtggagaatggaggcaagcacatggcatattgatgagtacaaaccatggaaaaaataactgtttagtatttgtatttacttattcttagttttaggtcacctccttagct

SEQ ID NO: 13504 - DNA, 120 bp, synthetic construct
  source 1..120: mol_type = other DNA
gtgtgtctgcatgcacacatatgagtgcaccacataacatataatgagacatagaaaaaaatataaaataccttatttacctgttttttctattgtgacagcttttacctgcttgagaac

SEQ ID NO: 13505 - DNA, 120 bp, synthetic construct
  source 1..120: mol_type = other DNA
taatgaggagcttctgaaagttgtttctaaggttctgcttttgtcaatacagacagctcttctcacctctccacactccagccctgctttccttattcctatattttctgttgttggtgt

SEQ ID NO: 13506 - DNA, 120 bp, synthetic construct
  source 1..120: mol_type = other DNA
ctaagtgctgggtgactatggtttttgtgcaaagctaactctctggtgggaagggaagactagttgtctagttacatctcactggttaagttctcagcacaaaaaaaaattctgaagatg

SEQ ID NO: 13507 - DNA, 120 bp, synthetic construct
  source 1..120: mol_type = other DNA
atcacaagagcaactatattcaagcttatgatcagttgccaggtaagttctggtgagaattcaggggctgaggtactactgaatatgtgtctagatttgtattcttgatttgttgatatt

SEQ ID NO: 13508 - DNA, 120 bp, synthetic construct
  source 1..120: mol_type = other DNA
gctgagatcatgccactgcactccagcttaggtgacagagcgagactccgtttcaaaaaaaaaccagttttacactggtttgccaatgatggactattaaacatgaaacagaaacatgct

SEQ ID NO: 13509 - DNA, 120 bp, synthetic construct
  source 1..120: mol_type = other DNA
atatagaaagcctagattgctttgaagagattattggcagaaatattgacattaaaggttattctgatgagggctcagaaagaactcaagagagctatagagaaagctcttgtcatttta

SEQ ID NO: 13510 - DNA, 120 bp, synthetic construct
  source 1..120: mol_type = other DNA
ttactgatttgaaaattctcagcctatctagacagtgtgccatggagatagagccaaggttgtggttggacaaacttttgctaaagaggttagatgtatgactcatggagccacttcagc

SEQ ID NO: 13511 - DNA, 120 bp, synthetic construct
  source 1..120: mol_type = other DNA
tagatgaaattttggacttagaaccatgctagaatggttaggacttttagaaatgttgggatggggtgaacatattttgcacctatggaggacataaattttgggccagccagagaatgg

SEQ ID NO: 13512 - DNA, 120 bp, synthetic construct
  source 1..120: mol_type = other DNA
caatctcctattaacttcgaaaagttcatgtcatattaaccatattcttatgattgtggcaaactagtacgtaacaacagattcctcactattattccagtaagaaatattttgagagcc

SEQ ID NO: 13513 - DNA, 120 bp, synthetic construct
  source 1..120: mol_type = other DNA
tagtggccagtctgtgggccattttgtcagcctctgctctattcatagtcagttttaattttctctcttttttgcatcaacaaatatttgaatagtcaacacttttctctgattctgttt

SEQ ID NO: 13514 - DNA, 120 bp, synthetic construct
  source 1..120: mol_type = other DNA
tattgaacatcagacaacaaagaacagtgatactttagtgatgggaaacaaatgagatgtaccctgtgattgcttccgcttagtgcttggagaaagttacaaggccttagtgcagcaatg

SEQ ID NO: 13515 - DNA, 120 bp, synthetic construct
  source 1..120: mol_type = other DNA
gacagtggtcatgtgtatctatcattgaatgcagggaattggtgcgattcctaatacatggtgataagataggctctcattctttttttgctcattagataaataagtaaaacaaataag

SEQ ID NO: 13516 - DNA, 120 bp, synthetic construct
  source 1..120: mol_type = other DNA
atcaacctcatcagcattcacataacatctctctagttattcagctttctctttatactatctatccattagaagctgacttctgtctcccaaaatacatgtggaagtccagacgcccag

SEQ ID NO: 13517 - DNA, 120 bp, synthetic construct
  source 1..120: mol_type = other DNA
ttgcttaattatgtcacagaaactgctctattagatcaaatgaggaaattagtcctgttcctcaacagagatttattatattttaactttgtcaagacaatataagtcattatcataaaa

SEQ ID NO: 13518 - DNA, 120 bp, synthetic construct
  source 1..120: mol_type = other DNA
tttaaatgtctgatagaattctgctgtgaatatttctggtcctggaattttttttcattggtaattttttattaccatttcagtctctaaatgatgagttaataggtgcagcacaccaac

SEQ ID NO: 13519 - DNA, 120 bp, synthetic construct
  source 1..120: mol_type = other DNA
aaaagcccctagaactgataaatgaattcagcaaagtttgaggatacaaaattaatgtacacacatcagtagctctgctatataccagcagtgaccaagctgagactcgaatcaagaact

SEQ ID NO: 13520 - DNA, 120 bp, synthetic construct
  source 1..120: mol_type = other DNA
actggatcctcatttcttaccttatacagaaatcaactcaagatgcatcaagggcttaaaactaagacctgaaactataacaattctagaagataaaatcagaaaaacccttctagacat

SEQ ID NO: 13521 - DNA, 120 bp, synthetic construct
  source 1..120: mol_type = other DNA
gagtgagagataagctatgaggatgcaatggcataagaatgaaacaatgcattttggggaccagtttgaaagggagggagtggggtgagggataaaagactacaaattgggttcagtgta

SEQ ID NO: 13522 - DNA, 120 bp, synthetic construct
  source 1..120: mol_type = other DNA
agcccaagagtagattactgggggagaattctgtaaggcagtggttctcaaacaacaatatcacataagaacttattagaaatgtaaatttaatcttccaggtgtacctgatgcatgttg

SEQ ID NO: 13523 - DNA, 120 bp, synthetic construct
  source 1..120: mol_type = other DNA
caccggaagaactccactggtcagagtagttatttctcaggtaggactccaaaagtacaggcaacaaaatcaaaaataaactaatgggattgagtgaaactaaaaagcctctgcacagca

SEQ ID NO: 13524 - DNA, 120 bp, synthetic construct
  source 1..120: mol_type = other DNA
gtggaatctaaataagtcaatctcatagaaacagagaataggaaggtggttaccagagggtagagaatagagggagagatgggaaaagcgatgatgctgataaaagggtgcaaagtttca

SEQ ID NO: 13525 - DNA, 120 bp, synthetic construct
  source 1..120: mol_type = other DNA
ctatggaatccccttccctgtctctttctattttccacacctattgaggcaaacaaaatttagtcaggcagctgggtcccaattttgtaaataacttgaatccagttgtcttgtataggt

SEQ ID NO: 13526 - DNA, 120 bp, synthetic construct
  source 1..120: mol_type = other DNA
gtgagccgagactgcacaactgcactcttgtctgggtggtggagtgagactctgtcaaaaaaaatgtattttcttttccaagaaagcatataataaaagagtaattttatatgaagaggg

SEQ ID NO: 13527 - DNA, 120 bp, synthetic construct
  source 1..120: mol_type = other DNA
tcggcccatggatcttgatttttgttttgtattacctctttttgtcatggtgtgctagaggcagcatcaatggccatgttttattttgtcctatgctgatgacaaggtcatgtgctgcct

SEQ ID NO: 13528 - DNA, 120 bp, synthetic construct
  source 1..120: mol_type = other DNA
cctcctgccactattacttggacctgaaaaattgtgtatctatatctccagtgcacaaatgagtttatcatttgcacccactgttgtgttaatgacacaacagcagaagtttccctgtga

SEQ ID NO: 13529 - DNA, 120 bp, synthetic construct
  source 1..120: mol_type = other DNA
gaccccagctatatctggccaactatcaaaagtgccttcccaagtcttacctggtttttacctctcctaggaacttggttgctatcttgttactaatattggcccttgcttatttaacct

SEQ ID NO: 13530 - DNA, 120 bp, synthetic construct
  source 1..120: mol_type = other DNA
ggagttactgcccccttccatgtgactcagtgatgactactcctcccctagaaatgtctgcatagactgctccttaatatgcatgcaattaaaagtgggtataaatatgactacaaaact

SEQ ID NO: 13531 - DNA, 120 bp, synthetic construct
  source 1..120: mol_type = other DNA
aggttacagtgaaatgagatggcgccactgcattccagcctgggtgatggagtaagactgtgtctcaaacagaaaaaaaaaaaagatgaatgaatggcaaattaaaacttttaaaatttt

SEQ ID NO: 13532 - DNA, 120 bp, synthetic construct
  source 1..120: mol_type = other DNA
gattatctgtaacagggtctgtggttgatatgcctttttcatcctagttggtatgcattggctatatattatgctaagttttcgaggcacccattatttttaaagttttttttgaggctg

SEQ ID NO: 13533 - DNA, 120 bp, synthetic construct
  source 1..120: mol_type = other DNA
tccttcaaaggccatgcaaagggcgcatccattccagacatcacaaatttctcttgaaaatatggagaagaatagaatatcaagggataaatggaccttttccactactgagtcacatat

SEQ ID NO: 13534 - DNA, 120 bp, synthetic construct
  source 1..120: mol_type = other DNA
gtctccccagatagagtaagaaattcactaggcaagggactgcagctatcatctttgtattcttagcacttgtgcattgtcacacatgataaaccataattgtctttaataaacaagtga

SEQ ID NO: 13535 - DNA, 120 bp, synthetic construct
  source 1..120: mol_type = other DNA
ttcttaagatgttttgggttattgagtgtcaaatttgagcagcaagtaaaagaaaagggaagacgtcatacaggtgcccacaagaggcttctgaaacaccttcctctggaatataattta

SEQ ID NO: 13536 - DNA, 120 bp, synthetic construct
  source 1..120: mol_type = other DNA
ctcttggaagaaaggatgtgtatatttcctgaggatccacagagaatgaatttctctgagattttaaatcagctgagaaaaattgtacctgtcatagactggttcggaagctattaatga

SEQ ID NO: 13537 - DNA, 120 bp, synthetic construct
  source 1..120: mol_type = other DNA
gtaaggtcattgataagttgaaagaagccaggtcatctatcaactttgtaacctgaacatccaattgatctttgtgagtccacttccctgcctgtagcttgggcaaaataatgaaactta

SEQ ID NO: 13538 - DNA, 120 bp, synthetic construct
  source 1..120: mol_type = other DNA
aaataaacacacaggtaagccattgatcctttgcatattcagtgtcagaataaagggacagttgtcttctttagtcatttttaggatgaccaaagtccagaaatcacccatcaagtgagt

SEQ ID NO: 13539 - DNA, 120 bp, synthetic construct
  source 1..120: mol_type = other DNA
agaccaaggataaagacatgtttaccgctagaaagtcatgggcaggtgggatagtttgttgatgaaattcgaggttagatgaataaataggatgttttcagtgagggactgagtgaaagg

SEQ ID NO: 13540 - DNA, 120 bp, synthetic construct
  source 1..120: mol_type = other DNA
ttttgtatatgaatattaattttcttttattttctttttttttttttttttttgagacggagtcttgctctgttgccagactggagtgcagtggcgccatctcagctcactgcaacctcc

SEQ ID NO: 13541 - DNA, 120 bp, synthetic construct
  source 1..120: mol_type = other DNA
tacaatatgtccaaaatttctgacttcaagagttcccattcttacaataagtaaataaaaactgtcatttcctggaaggcccaggaaccttaagacagtaagcaaattctaaagtctgcc

SEQ ID NO: 13542 - DNA, 120 bp, synthetic construct
  source 1..120: mol_type = other DNA
ctaatctttgtaaagccaactcttccaacaggataatattagttcaatacctcaagatgattgctgatgtctgcccagggacagataaaatggaatttgatgctgggatccagccaaatc

SEQ ID NO: 13543 - DNA, 120 bp, synthetic construct
  source 1..120: mol_type = other DNA
tccatctagagtatgtattccaacacttcttatatctgggacagttctttcttaattaatatctctctgtgctggttccttgctcctcctcttcatggaatacttcaccctatcataaac

SEQ ID NO: 13544 - DNA, 120 bp, synthetic construct
  source 1..120: mol_type = other DNA
gtacaaatgatcccatcagcaaggtagtgagcatatcacccaatagttagtttctcaaccctttgtcccctctctttctcccatctctagtagtcctaagtgtctatttttgccatcttt

SEQ ID NO: 13545 - DNA, 120 bp, synthetic construct
  source 1..120: mol_type = other DNA
tctaatttatttctatagaatttcactctacatgccattatgactaacaattccaccttcttctcgattatggcctcaagaatccaaatttcactttagtcttctaagcccccattcctg

SEQ ID NO: 13546 - DNA, 120 bp, synthetic construct
  source 1..120: mol_type = other DNA
atatgaagtgccactagtgatgctgagaatgctccaaagaagcataaaaaagtcataacattaatggaaaaatttgaattgcttgataggtactatagattgaggtctgcagctgtggtt

SEQ ID NO: 13547 - DNA, 120 bp, synthetic construct
  source 1..120: mol_type = other DNA
gaagcaggaacattttacgtggcagcagacaagagggagcaagtgtgaaaaaagaactgccagacacttataaaaccatcagatcccatgagaacttactatcatgagaatagcatgggg

SEQ ID NO: 13548 - DNA, 120 bp, synthetic construct
  source 1..120: mol_type = other DNA
cagaaacacattggcattagagaatctgacagaggggttccagttactcaagactgctttaacttattttacaacagggacccttacatgaagcattgcttcagtaaagtaaatgctgga

SEQ ID NO: 13549 - DNA, 120 bp, synthetic construct
  source 1..120: mol_type = other DNA
gctataggaatggctcctctctctaacttcctagggaacccttcactaatatcatttccttgtagccatctttcgatagctcatgtctatgtccctgattacactctttgagaatggaaa

SEQ ID NO: 13550 - DNA, 120 bp, synthetic construct
  source 1..120: mol_type = other DNA
cagaaataagactccacacctacaactatctgatctttgacaaaactgacaggattccctattcaataaatggtgctgggataactggctagccatatgcagaaaattgaaactggaccc

SEQ ID NO: 13551 - DNA, 120 bp, synthetic construct
  source 1..120: mol_type = other DNA
agtcatgaaaaagaacaagatcatgtcctttgcagtgacacagatggaacaagggccattatccttaggaaactaatgcagggacagaaaaccaaataccgcatgttctcacttgtaagc

SEQ ID NO: 13552 - DNA, 120 bp, synthetic construct
  source 1..120: mol_type = other DNA
catcactagccttgagtgcccagctaatctcttgacttcttcccttgcaaaacctgtttttagaaagtctattttaaaagtatttcagctttcaaattaatggccaataggtcaatggat

SEQ ID NO: 13553 - DNA, 120 bp, synthetic construct
  source 1..120: mol_type = other DNA
ttgtaaaactgtaaaactagctttcttccaaccaaacagaacatctccttgtatgtaaatcttacaaaatatccttacctgctttggacatcttttcatcttttttagtttcaggttctg

SEQ ID NO: 13554 - DNA, 120 bp, synthetic construct
  source 1..120: mol_type = other DNA
acagttttcctccctccaaacagcagaaaaaactgacttcatagttggaatacctactgagcataaactatgtataagggataatgctaccagctttatttgggttttagtctagcagtg

SEQ ID NO: 13555 - DNA, 120 bp, synthetic construct
  source 1..120: mol_type = other DNA
attccattttcccaacctatttcccttcacccgggtcatatcccaaggtctggatagaatgatcttggtctccttcttagttctgtttccgaagtatggctaatttgaatatttggattt

SEQ ID NO: 13556 - DNA, 120 bp, synthetic construct
  source 1..120: mol_type = other DNA
atactcaaggcaggaattgatatgtgagaaagtggcaacggattttctaagttgagcagctcttttattaggctacttgatttttaagaactcagtgcactcattttgtagatgatattt

SEQ ID NO: 13557 - DNA, 120 bp, synthetic construct
  source 1..120: mol_type = other DNA
atgtcatcaatagtgttttcaagtagaataagcagaccaaaacttcagcatgcaagtgcttaagtcagaagggcagcagtggagacaaactctgtttaggagtctctgctttgtcttcat

SEQ ID NO: 13558 - DNA, 120 bp, synthetic construct
  source 1..120: mol_type = other DNA
taaaatatataaaggaacattagcagtgttatctctggtcaaccataggtgaatttcagtatgagggggtctggaaaacgtggtggctgaggacataggtctaaaatcagactgccagac

SEQ ID NO: 13559 - DNA, 120 bp, synthetic construct
  source 1..120: mol_type = other DNA
attgttctaactttgggtgaggtcacacagtgaaccaacacccagcatctgctactacatagcttttcatcttatctggctgtacatttctttacttcaatattttactgactgtttaac

SEQ ID NO: 13560 - DNA, 120 bp, synthetic construct
  source 1..120: mol_type = other DNA
tgtcccaccttttttcactgtcttgtgagatctttgaggacagggaatatgtcttttcatctttggagcctcactgcctagaatagccacagaacattatgtgaacactcaaaaattgtt

SEQ ID NO: 13561 - DNA, 120 bp, synthetic construct
  source 1..120: mol_type = other DNA
ctcctcattattctttccttccctgaagcttcccagtgtgaagagtgtgcatttaaaataggtgagatataattggaggtggctgcatgcatttgtaggtcctgcagaaattgtcagaat

SEQ ID NO: 13562 - DNA, 120 bp, synthetic construct
  source 1..120: mol_type = other DNA
cttggagtgataagacaggttgcagtgagattgtgacccattctttcattcaattctgccttttgaatgagggctgatatttaaaaaataccaaggaatgaatattggagctctacactt

SEQ ID NO: 13563 - DNA, 120 bp, synthetic construct
  source 1..120: mol_type = other DNA
cactggacactggaatatttatggtctctagatgtagcaagacaaaaacactggttaagtttactatggcatatgttgaattaacttattctgaaaggtgccttttgggataagtctctg

SEQ ID NO: 13564 - DNA, 120 bp, synthetic construct
  source 1..120: mol_type = other DNA
tgaattgaactgtgtcatagaaataaattgttagtccacattataaattaaccaagaagtactgattacaaatatcacccacatttttcagtgatcataaatttattatttggtcatttg

SEQ ID NO: 13565 - DNA, 120 bp, synthetic construct
  source 1..120: mol_type = other DNA
acttttttctactctaaaaataccgttgatattttttatatgaatctatacattactttaaagggaaatgatcacttccagataggaaaaggaaatattgcttcacttattcaagccttt

SEQ ID NO: 13566 - DNA, 120 bp, synthetic construct
  source 1..120: mol_type = other DNA
atctttcactgggcctctagtcccaagtacactttgatggctccaaaacttgcctcatagtgttagtagggatattcctgaacaagtctctatttcaatacatgacttgcttcaggtcct

SEQ ID NO: 13567 - DNA, 120 bp, synthetic construct
  source 1..120: mol_type = other DNA
gagatgtgactgttccaatatgtgtgagatggtggtgatcccctttaatgaaagagaaagcctaatgagacaacacctcctacaggtgaaagttaaagtcactttgcatgatatgattac

SEQ ID NO: 13568 - DNA, 120 bp, synthetic construct
  source 1..120: mol_type = other DNA
gcacgatttatctgcctgttggacatttaacataacatatatgaatcctcttgcaaggcaaaatatactaatttacatatcgtgtcaaaataacaaaatagtgtgcagcaataaactaac

SEQ ID NO: 13569 - DNA, 120 bp, synthetic construct
  source 1..120: mol_type = other DNA
gaagttctaatgctgtctccactacaaactgtaactttgaaaaaggtcttgactatttgggcttcatttgtctgtaagacaagaggattggactacagtttctaagttcctcctagctat

SEQ ID NO: 13570 - DNA, 120 bp, synthetic construct
  source 1..120: mol_type = other DNA
ccaaaactgtttaatcagcacaaagccagtttatttcttttagcccacattttgtcaaaaaataaacaaccaaatagaaaatcctgcacatatcatgtatgtagcggtgttttagtcttc

SEQ ID NO: 13571 - DNA, 120 bp, synthetic construct
  source 1..120: mol_type = other DNA
tcccagtggggcaggagagtgcaatgcttcgagtctcagaattcaagattcagcatgttgatctaaatgggtgagtgtgtatgtttgtgtgagggtttagtatttataaaatacaggacc

SEQ ID NO: 13572 - DNA, 120 bp, synthetic construct
  source 1..120: mol_type = other DNA
tctagctttgaattgttgagtggaaatggccaagaaaaacatgttgaggacaaatggaagttgggggatcataagttgcacagtcctgagcatcagtaaaagaagatcagttctgtcaag

SEQ ID NO: 13573 - DNA, 120 bp, synthetic construct
  source 1..120: mol_type = other DNA
caacgctaataaaataagtgaatttttagcaagtgaaattgctgcattctgattctgccacagcttagcagcaggcttcaaagagactctccaaaaacaataacactgcagaggcttttg

SEQ ID NO: 13574 - DNA, 120 bp, synthetic construct
  source 1..120: mol_type = other DNA
ttttattgactttcatattacatgagagtggaggctgggaatggaactgtcgcaaaatacaggtaatcactaaagaaaaatagattaagcccatctgtgagaattaagtgtagttacccc

SEQ ID NO: 13575 - DNA, 120 bp, synthetic construct
  source 1..120: mol_type = other DNA
tataacacatatatacgtactacagaataaattataaatattacaagtgtgttaattcagaagagaggggactcattgaaggctgaaataggtagagaaggcttgatgctgtatgtggac

SEQ ID NO: 13576 - DNA, 120 bp, synthetic construct
  source 1..120: mol_type = other DNA
tacaaggaataagagaggaaaaaaatgcaagtctcttcatgtgttttgtatactgaggcttaagatcacagggcatctgagttgatattcacaatacaaatgtctccaggcatatgttgt

SEQ ID NO: 13577 - DNA, 120 bp, synthetic construct
  source 1..120: mol_type = other DNA
actgcagcccagccagacatctgactgcaatcacatgagataatcaagtgaaaacagcctactgtatcctcctgaagtcctgacctactaaatgatgaacaacatgaaatcagctgttgt

SEQ ID NO: 13578 - DNA, 120 bp, synthetic construct
  source 1..120: mol_type = other DNA
aagtattgtgtttcatatgtcaacaggacgcccaaaaaggaaacatccagcaagcagttggaaaaaacaggtgaagtgcagatcatttacaggtgctgcaaagcaacctacagtattcct

SEQ ID NO: 13579 - DNA, 120 bp, synthetic construct
  source 1..120: mol_type = other DNA
tttccttccacaagaattctttgaaaaaagaggctcatgaaaaagacaagacaaaagactgaaatagtggaaagtcttataacagaggatatcagccctagagttctttcctgacacaag

SEQ ID NO: 13580 - DNA, 120 bp, synthetic construct
  source 1..120: mol_type = other DNA
tttcaatctactacaaactccaacatataaaatttataagtaaatacagagacagaattttcaagttgcctaaatgatttaaaatattgtgtttacaattatcatgaaggaaataataat

SEQ ID NO: 13581 - DNA, 120 bp, synthetic construct
  source 1..120: mol_type = other DNA
ttctggttcaatttcataattactaggttttgaggctgtgtgcctcggctgcaagcattggagtattcatatatacacactttgatattcttatccttatgcgccttaataatctgacta

SEQ ID NO: 13582 - DNA, 120 bp, synthetic construct
  source 1..120: mol_type = other DNA
aataacatcaatgttcttcataactgccagcctgccacagccttgcaaatcatatgtctgaagcagggactaggtagcctaacacatactcgaaattccacaactatctgttgaatgagt

SEQ ID NO: 13583 - DNA, 120 bp, synthetic construct
  source 1..120: mol_type = other DNA
ctcattaatcaaattagtggtcttagaaaaataaaaggaaccccagagagctctcttgccctctttctgcatgtcaggatacaaaaagacagcagtttgcaatccagaagagggctgtca

SEQ ID NO: 13584 - DNA, 120 bp, synthetic construct
  source 1..120: mol_type = other DNA
tctttttgcatttccacaagcaaagaatgagagtttctgttgctctacaccctccccagcattttgtattgttagtgttttggattttagctattttaataggtgtgtagtggtatctca

SEQ ID NO: 13585 - DNA, 120 bp, synthetic construct
  source 1..120: mol_type = other DNA
gtcaatagccacaagataacttgctagaattgtttttggaattgtgttaaatctgtagctcaatttaggaagaattggcagcttgacaatactaagtcattgtatcaatgaatatggagt

SEQ ID NO: 13586 - DNA, 120 bp, synthetic construct
  source 1..120: mol_type = other DNA
tgtctcttttctactgagagctggaaaaataaggaagattgtgtggagttcgaactgtgttgtgatgcaaccacatagacagattaaatacgatgataaagggctcagaactctgggtgc

SEQ ID NO: 13587 - DNA, 120 bp, synthetic construct
  source 1..120: mol_type = other DNA
taaattggactttcctgttgattgattgtacttgcaatcagaagacagcttgttcttcagcattgggggcaatgtggaaatgtcttgagcatggaaaacatgtcttacaagtgagaattg

SEQ ID NO: 13588 - DNA, 120 bp, synthetic construct
  source 1..120: mol_type = other DNA
aaaaggaaacaaaatttctcaggaaacaatctttgctctgaccactcagctttgtaatgtagcagcttgtaatatactttctattaaagattcttaagggaaaaagagatacaacctact

SEQ ID NO: 13589 - DNA, 120 bp, synthetic construct
  source 1..120: mol_type = other DNA
gttgctaatggttctcttgaaaatatataaactacataaacaaggagagtatcctcgttttcatgcattgccttcaatatagaccatcttctctccgaagcccatgctatgcccctcaca

SEQ ID NO: 13590 - DNA, 120 bp, synthetic construct
  source 1..120: mol_type = other DNA
tacttaataaaatgtttactaactgtgttaaaatttattcttgatggttagtagacaaatcttatttaattacctaaaaatatttttgtcgtgtttcttcttaactgactgtcgaagtga

SEQ ID NO: 13591 - DNA, 120 bp, synthetic construct
  source 1..120: mol_type = other DNA
gcctaagtatctgttacatgcttatctagaagtttacacattttcatatcctttcacatatgttttcatgtttgccctatacaacatcttctcagatgggcagatcagggataattacct

SEQ ID NO: 13592 - DNA, 120 bp, synthetic construct
  source 1..120: mol_type = other DNA
agagcaatgacatgagggaacgacaattaaaattattagcacacttgagctctaagagaagccacatcactttaaatgttttaagtttagtgtactgtagcatttttctcaagcagagtc

SEQ ID NO: 13593 - DNA, 120 bp, synthetic construct
  source 1..120: mol_type = other DNA
ttaaatattaaatgaaaccatcccaaatcatcagtaaccaaaaggggattatttgggtgctgtacccctttctctaagatgttttgctctcagtgaagtattcactgtttacctatttac

SEQ ID NO: 13594 - DNA, 120 bp, synthetic construct
  source 1..120: mol_type = other DNA
accaatgaatgctatgctctttattttgctgtttttgttagattatagtcaatattagggttaggacagtgggaaggggtaggcaagttggccttcaatgctgaaataaaggcacaagtc

SEQ ID NO: 13595 - DNA, 120 bp, synthetic construct
  source 1..120: mol_type = other DNA
agattagacagtgtgaggaagaagtgatatttgaagagataatagctagaacttctccagaatttcaggcaccagcaataggactctggaagcacaagaaatctaagtagggaaaggatg

SEQ ID NO: 13596 - DNA, 120 bp, synthetic construct
  source 1..120: mol_type = other DNA
tgagataaaatttcacttttttcctaatggataccactcagtcttgattactcctgtaggtttaagataattcttgatatctactactacaaaccttccagtttgatcttgttcaggatt

SEQ ID NO: 13597 - DNA, 120 bp, synthetic construct
  source 1..120: mol_type = other DNA
taattttttgagcttgcatttctgaaattaaaccaacctgactgcattttatctttcatacgtactagcagacttaatctgctaatattttgtttagacctatgcctctaggtttacaag

SEQ ID NO: 13598 - DNA, 120 bp, synthetic construct
  source 1..120: mol_type = other DNA
gtggttttccaggaaaaggagattttaggtatagccaatgatatatgaggaaagacaaaggagtgggaaagacttagatgttcctagaggaagtgtagtttgagcagaggatttccagag

SEQ ID NO: 13599 - DNA, 120 bp, synthetic construct
  source 1..120: mol_type = other DNA
agaaatcaaaactaatgtaaaggagacaaagcagctaacacacttggtatgtaatgcccagattagggctattctttagctaaactgggagctgggacgttgattttatgttttaggctt

SEQ ID NO: 13600 - DNA, 120 bp, synthetic construct
  source 1..120: mol_type = other DNA
caaggcatgtctaaagatgaagttggaaaaggatataggagccagttcttggggcactctatatgccattttaacaagcttggatttttatcttatggaaaacaggggaacagaatatta

SEQ ID NO: 13601 - DNA, 120 bp, synthetic construct
  source 1..120: mol_type = other DNA
atatagggcagagtttcaactttgagagcagatatatctcaaaaggaaatggtacagaatgagaagttcagaggattaataatgaattatgaggaacaccaacaatcacgaggcaacaga

SEQ ID NO: 13602 - DNA, 120 bp, synthetic construct
  source 1..120: mol_type = other DNA
acaatgccagtaacaagaaagaggaggacgccacaaaatggtatggatgactgatttgaaggaaaaactggagaaactggtcctgaagagaaggagaaacactacctctgagattaaaag

SEQ ID NO: 13603 - DNA, 120 bp, synthetic construct
  source 1..120: mol_type = other DNA
ctgaagttattttagtctgcttttatctttgattttccttgttctttccccaaacaaatgcaaatgtaaatgttaccttatctcatcatgaccagacaagctcaattacctccatgcaaa

SEQ ID NO: 13604 - DNA, 120 bp, synthetic construct
  source 1..120: mol_type = other DNA
cctgatggctttcaaccttgaaatatggtaatacaaaaaactttcattgacagtaaaacttcaggccagcttagtgacttaataaagtttcacctatttttagtattttaaattgctcaa

SEQ ID NO: 13605 - DNA, 120 bp, synthetic construct
  source 1..120: mol_type = other DNA
aacccaaatggaggtagaaacaggctgtaatctactcttgtgctaattaccaaattttggccaaccaaagggaaccagctgttcaaactgtgtccaaaagaggcaaaggtcaagctgtaa

SEQ ID NO: 13606 - DNA, 120 bp, synthetic construct
  source 1..120: mol_type = other DNA
aatcagtgccttggccttaagtccacttactgggcccatgaactctgtatctatgtctatgttagtgattttctctgacactatattaagactcagttttttcttgttaatacaattact

SEQ ID NO: 13607 - DNA, 120 bp, synthetic construct
  source 1..120: mol_type = other DNA
aataaattagtcttttaggagaagtggttttagtggagtatgtgtgtaagggtatgtgtgcaggtttgcgtgtgtgtatgcatcagtgtatgttgaggataggcttattaaattgtctct

SEQ ID NO: 13608 - DNA, 120 bp, synthetic construct
  source 1..120: mol_type = other DNA
ttctcttccaaggtgcaactctattatcttaaaaatgtaggtagtgaccataaaagaaggtggcctattccatagactttagatcaatagttcttaaaattaaggccacattcaatacaa

SEQ ID NO: 13609 - DNA, 120 bp, synthetic construct
  source 1..120: mol_type = other DNA
atcctctctgtgccacaaaacccggcttttgaaagacatcagacatcagaaggagatcttcatgtcactttcaggttttaattccacaatgatagatgccccaagagtcacaatttaaac

SEQ ID NO: 13610 - DNA, 120 bp, synthetic construct
  source 1..120: mol_type = other DNA
tcccctcctgatggtagtcttctaaaatggagaatgcttgtttttccatcctccacataccaaggtgtatagaagtaatgcatatttatatcctctttgtttctcattactcttcataga

SEQ ID NO: 13611 - DNA, 120 bp, synthetic construct
  source 1..120: mol_type = other DNA
cttaacttgagtatatctatgaagaccctatttcaaaatcggtcacattcataggtaccagggtagagcttcaacatatcttttggtgggaggcacgaatcaacccactatgtctgccaa

SEQ ID NO: 13612 - DNA, 120 bp, synthetic construct
  source 1..120: mol_type = other DNA
gtctcatgtcactctttagagacacagacaaccacatccttcaattctatatgacattttcagctacctcatctctctgcatagagctgctacactcaatgtcaccacttctatcctctc

SEQ ID NO: 13613 - DNA, 120 bp, synthetic construct
  source 1..120: mol_type = other DNA
gaattttgaacatctagtttttcaaatcctcccatatttcaagaaactgtatattttcctaggttaaaagaaactatgccatgttttgcctttagtatttaagttcttgaaccatttgga

SEQ ID NO: 13614 - DNA, 120 bp, synthetic construct
  source 1..120: mol_type = other DNA
catgcagtgtgtggtctagagacaactcattttatatcaagcatgctggttcaggcctatagatcttcccggagacttctgccatttccatgccagagtatttaaactgagtcaaaaaaa

SEQ ID NO: 13615 - DNA, 120 bp, synthetic construct
  source 1..120: mol_type = other DNA
tgttaaagccatgaagcactctacagtctacacatctacttgttgtgtcctctccatgcttggaaatgactaattttattgtcaacctctgtgttgctatccaatgtgtggagaggcaca

SEQ ID NO: 13616 - DNA, 120 bp, synthetic construct
  source 1..120: mol_type = other DNA
ttcattttaggcattaactttataagtagcctgctgtatgtagcagctgagtaaaaattctcctgctgtatgacttcaatgccaaaatacatttttagttgggaaaatggctggtcacct

SEQ ID NO: 13617 - DNA, 120 bp, synthetic construct
  source 1..120: mol_type = other DNA
gcactaaataacaggcatttgttttatgtattagtagcatcaccagtacttgtttacctctaacctctcaaaaaatatataagcacattgatgtcacgcatagaactgaggactgactta

SEQ ID NO: 13618 - DNA, 120 bp, synthetic construct
  source 1..120: mol_type = other DNA
aatattgcatattcagcacaacaaataatcataccaaaaagctggtaagccattctcaaaattagcattagcatagtctatagcagaaaattcaaatgagtaagctgcccaaatatgctc

SEQ ID NO: 13619 - DNA, 120 bp, synthetic construct
  source 1..120: mol_type = other DNA
acttaaaacagatttgggctgtctcaggatattttataatctttaaaaatgaataataaatgtggattcaaacctgtagttttccgtggtttgtggtagggtgagactacagttgggccc

SEQ ID NO: 13620 - DNA, 120 bp, synthetic construct
  source 1..120: mol_type = other DNA
tttcattttctaaaactgcattgatgttatgtccatgtcaagaacttggaaaaaacactgtgagatggaagcattccccaccctttactggcgctgccttaccacctgtttgaggctaca

SEQ ID NO: 13621 - DNA, 120 bp, synthetic construct
  source 1..120: mol_type = other DNA
acaggcacacaccaccatgtgtagccagatttgtagtgtgtgtgtgtgtgtgtgtgtgtgtgtgtgtgtgtgtgtgtgtgtggagacaaagtctcaccatgttgcccaggctggtctcaa

SEQ ID NO: 13622 - DNA, 120 bp, synthetic construct
  source 1..120: mol_type = other DNA
aaacaaatggcttggccaagtgttgcaggtcaaaaagaagaagctatgacgatttagctaaaattaaacaaaatgagaacattatcaaatgttgtctggcaaatgaagagcaattaaata

SEQ ID NO: 13623 - DNA, 120 bp, synthetic construct
  source 1..120: mol_type = other DNA
tgtaataaagggccttaaggctatctctatatgtactttaatactatttttcgaatctccagttgttctccattttcctgctggtgcagcgtttatagagtgctttctgtatctctgtgc

SEQ ID NO: 13624 - DNA, 120 bp, synthetic construct
  source 1..120: mol_type = other DNA
atgattactatgcttctcagtccactctaacccccagactgtgtattttttcacttggacaaaaaacaacagagttcacatgcataaaacataggaaaagcggattcaaaattgcaggtc

SEQ ID NO: 13625 - DNA, 120 bp, synthetic construct
  source 1..120: mol_type = other DNA
cccacacataattctttcttctacatcaatcctttaagaaggtatgctgtttcatggttcatcaaacataaggcagaaaaaaagaaatatgtccagtaccttctgcaggtttttttgttt

SEQ ID NO: 13626 - DNA, 120 bp, synthetic construct
  source 1..120: mol_type = other DNA
tctcttcacaaaaggcagttagatggtcaacaaaattgttttatgtaacaataataatcagtgccagtaacattgtggtgaaggtaatgtcccacttccgtagatgtataagctagaaac

SEQ ID NO: 13627 - DNA, 120 bp, synthetic construct
  source 1..120: mol_type = other DNA
gacataatacagttttatattaacaatatgcagtggccacttctacttgaaacataagaatcttataacacaacagcttaaggtatgaacttgatagttcaatgtccgttttaagttgtc

SEQ ID NO: 13628 - DNA, 120 bp, synthetic construct
  source 1..120: mol_type = other DNA
cagcacctgtgatttaaaagcagtgatgtgtttgccatctgttcaatccgtcattcactcatctgtagcagtgtctcaagtaaggcctattatgttcataagtgatgccagatgaaaatg

SEQ ID NO: 13629 - DNA, 120 bp, synthetic construct
  source 1..120: mol_type = other DNA
tcagaagataacctggaattcctagaattccggttgctaggaattcatcactcaatctgagtttagatgaataaaatctacctggatctgctcgtagaattcaaggagcagctagtgatt

SEQ ID NO: 13630 - DNA, 120 bp, synthetic construct
  source 1..120: mol_type = other DNA
gagctgcagaccacaaaatcattttgctgtagtctggattagctcctcagcaatgacgtgtccccaacttgtgttgcattatctggccccttttgtttgggcttcatcctttttggtgtg

SEQ ID NO: 13631 - DNA, 120 bp, synthetic construct
  source 1..120: mol_type = other DNA
atagaaccactgaaaagatctcagagacccacaggagtccttgaccactgattttggagattattgatctagtttacatgagaagttagtaagaccaacatgaggtcacaaatggcaatg

SEQ ID NO: 13632 - DNA, 120 bp, synthetic construct
  source 1..120: mol_type = other DNA
ttcttagctgctgctgaagtaatgaaaatagcgttaaggcatatgaaatgaccattcctcagaatactccccagaatatgagaatgtattccacatattcataaattcagtggtcaccta

SEQ ID NO: 13633 - DNA, 120 bp, synthetic construct
  source 1..120: mol_type = other DNA
tgccaaagctctttcaggtacatcctcttattgggtcttcatcctgaccttgttataaaaggcagcccagagcagaaaatgaagcctctgaaacattaaaataatttgcagagtataagc

SEQ ID NO: 13634 - DNA, 120 bp, synthetic construct
  source 1..120: mol_type = other DNA
tctagaacggttttgtagcttgtgttccacgtgtcctacttctggtcctcaaattcagcttgcctggttctaatctacttaactctgttatgggattggatgactcctgaatttactgag

SEQ ID NO: 13635 - DNA, 120 bp, synthetic construct
  source 1..120: mol_type = other DNA
ttgctcaacattcatccactgaagaatgaatcatcttttcccttcagctagttttttcccttcagctagtttcttcccctgaaacttaatatttttaacaattaccatctcctaattacc

SEQ ID NO: 13636 - DNA, 120 bp, synthetic construct
  source 1..120: mol_type = other DNA
acagaatgagcctaaggtgattgtggttttctatgaaaacatatatacactaatagcaatgatttcttaaactggtagtcattggcttgaggaactcaccctgacctgcattttcatgta

SEQ ID NO: 13637 - DNA, 120 bp, synthetic construct
  source 1..120: mol_type = other DNA
ggattatttttaaaaatatacataaagctcaaatactgaaacttggagccaagactagttcttgggtccttcagcagttcctctgcaaatttggcattactctcagtcatgcttgctcca

SEQ ID NO: 13638 - DNA, 120 bp, synthetic construct
  source 1..120: mol_type = other DNA
aatcgatggcacatgtagaaccaaataagatgacttactgaaggtcccttagtgactaatgtgagaataaagcctgaaacaaccaatcccaagttcaagcctttgactctaaaatgccct

SEQ ID NO: 13639 - DNA, 120 bp, synthetic construct
  source 1..120: mol_type = other DNA
tctttatatcctcttaaatcactgatcctaaacaacctcatcacacctaagattctattagagcacggaggtcacacacacctgcaaattatgtagtgcttttcctagggccttatcact

SEQ ID NO: 13640 - DNA, 120 bp, synthetic construct
  source 1..120: mol_type = other DNA
tgcacagcatttccattttcaaaattgcatgacattaggggaggaatcgaccctgagtccatacatgtacaacacaagaaggctgcaccaaatattgtactactgaaaacacattaatcc

SEQ ID NO: 13641 - DNA, 120 bp, synthetic construct
  source 1..120: mol_type = other DNA
aggtttcacataactttagtggcaaatggactgctacactgtcagcagccagaattggtctttggctaatggacagcaggtaaagaataatagtattgctgagaaacctacccacatctt

SEQ ID NO: 13642 - DNA, 120 bp, synthetic construct
  source 1..120: mol_type = other DNA
agttcaggcaattctcctgcctcagcctcctgagtagccgggattacaggcgtccgccactgcgcccagctaatttttttctattttcagtaaagtcagggtttcaccatgttggtcagg

SEQ ID NO: 13643 - DNA, 120 bp, synthetic construct
  source 1..120: mol_type = other DNA
ctgaagcctgaaagaagggcctatttgcagccagatatgcaaattgcaaaaggtgcacaatgcagaaatatgaataatgtatcaaaataatctgttattgctagaggttaaaaatctaaa

SEQ ID NO: 13644 - DNA, 120 bp, synthetic construct
  source 1..120: mol_type = other DNA
tagaagaatttgcctacatcatttttgatggcaaatttcttgattatttattcatttgtattattaagacttatcctggtagtcctccactactataaaataagcattccttttgcattg

SEQ ID NO: 13645 - DNA, 120 bp, synthetic construct
  source 1..120: mol_type = other DNA
agtcctctgaaaatataacgtaataagaatagtggaaagaaaaactaagggcaaagactggcttttgtgtaccttgtatctctaacacagttcttggtactgagcagccatcccgaaatg

SEQ ID NO: 13646 - DNA, 120 bp, synthetic construct
  source 1..120: mol_type = other DNA
ttagttccacccacagtttgcttaggaatgctgtgtgaaaaaatgctaaataaagtgtatggtactctgagttttagagattggcaatttttaaggaggcaggatatagacaagatttaa

SEQ ID NO: 13647 - DNA, 120 bp, synthetic construct
  source 1..120: mol_type = other DNA
caatcaagctatttctgtacttcccttcagtttgggctataacagcacactgtccacctgagcagagctctctgaaacactttagttttgaatcgtgccaggtttatgcatcattttttg

SEQ ID NO: 13648 - DNA, 120 bp, synthetic construct
  source 1..120: mol_type = other DNA
ctaagagatccctggaaaccattgtggatatggttttggaatggaaaagagcatagaaggaagcctacctttagagctgtaaggtggacagtaacaaaatagaagtgagtggaatccatt

SEQ ID NO: 13649 - DNA, 120 bp, synthetic construct
  source 1..120: mol_type = other DNA
acctaatatataaaaatattcatttctgtaaacatggaaatatgttgtttgttatctctaagatgtgtgggaaaatatgcagttagtatttgagatgtaatatcactgaattactgagcc

SEQ ID NO: 13650 - DNA, 120 bp, synthetic construct
  source 1..120: mol_type = other DNA
aaatctacttttacagctactaggctttccagttagcccatctccatcatctcaagatggtctgaattccaactaacccatctgaaggcagtagaaatttttataaatatgaactatacg

SEQ ID NO: 13651 - DNA, 120 bp, synthetic construct
  source 1..120: mol_type = other DNA
taaaaagtctttgcattaattactgcacttgatctgtatcattactttgtaagataggccactaggcctggactaaactgcaagcattctgaccctagcccagcatgttgtcaatataac

SEQ ID NO: 13652 - DNA, 120 bp, synthetic construct
  source 1..120: mol_type = other DNA
accaaccaaaccgaacgaaacatgttttattaactctgtgcatacagaaacagagtcagggctcttccccatgcccttacttgtcttgttctacttttctctttttcttcacagtcaacc

SEQ ID NO: 13653 - DNA, 120 bp, synthetic construct
  source 1..120: mol_type = other DNA
agacctcaccacaataaaccacctaggaagtagcaatattgtaaacacattaagagcataagtcctagaggtgcctggtctgggtttaaatcttgctccaccaatttctaattgtgtggc

SEQ ID NO: 13654 - DNA, 120 bp, synthetic construct
  source 1..120: mol_type = other DNA
gaaaaatcattttacgagtgatatatagcactttaaagtggaacccatagaatactagtccagatagatgctcttctccacaaaagcagctcagggtcaaataacactggagagcactgc

SEQ ID NO: 13655 - DNA, 120 bp, synthetic construct
  source 1..120: mol_type = other DNA
ggatagagattttatgaaattcattgaaacaagacacctgtccatccagaagaccagtaaggggtgatattttatgaaagtaacaactggtattcaaacaaaggggaggtggagagagga

SEQ ID NO: 13656 - DNA, 120 bp, synthetic construct
  source 1..120: mol_type = other DNA
catacatcagcagtgtgctaggcattttgaaaattattatacccaatactaatataatgaacggccaaatttgatatttacaagcagaagagtgcctggtgtgtagctgttattcaataa

SEQ ID NO: 13657 - DNA, 120 bp, synthetic construct
  source 1..120: mol_type = other DNA
agtgggagggaacctgggaaagggcagtgaagagtagcctgaggatattaaatagcaaagatacccaatacttaatctgtatttattaatattgccacatagtaagaactttccccatcc

SEQ ID NO: 13658 - DNA, 120 bp, synthetic construct
  source 1..120: mol_type = other DNA
cagacataagatatttctaccaatataggaagtttaattggatagtgctggaagaccatcatcacattttaagaaatgtcctatttttcttcctagatttagaatttcattgtggtatag

SEQ ID NO: 13659 - DNA, 120 bp, synthetic construct
  source 1..120: mol_type = other DNA
ataaaagtgaattctccaggaataaatagggcattgtaagaaaaagcacttgacaagagaaagagtggtgtttaatacagccagttggcaagtgaatatagtttcccaaaaggcattctt

SEQ ID NO: 13660 - DNA, 120 bp, synthetic construct
  source 1..120: mol_type = other DNA
aaacacagaataagtgttacctcatgtttaacgagaacgtactccataggatatatagaaatatgtgagttataggaattttcacattgccatgatattctgagattcattgcttgaggg

SEQ ID NO: 13661 - DNA, 120 bp, synthetic construct
  source 1..120: mol_type = other DNA
tttccagagaaggaaactaaggctcatccatagaacttgcaggtgactgaggcaaggctcaaagccagacagtctaagcaggtagcccttaagataaacacccatgtaatgttaaaacat

SEQ ID NO: 13662 - DNA, 120 bp, synthetic construct
  source 1..120: mol_type = other DNA
gctattctattccactgcttcttttcctgttccctgatcattggggtttttgcatttcttctgtgtgaaggttgcatttttactgtatgaaactattttcacaaatgtgtgtgcagctca

SEQ ID NO: 13663 - DNA, 120 bp, synthetic construct
  source 1..120: mol_type = other DNA
gaacaaatgaattaatgaaggaatacctaaggagaataagagaatcattaagtctatacaaatcatttctcaagaatgaggatttgcataccaccaaggtcactctcagtcctgcatctc

SEQ ID NO: 13664 - DNA, 120 bp, synthetic construct
  source 1..120: mol_type = other DNA
aatacacaccagctggcaaggaagggtggatgttcgcactgttgccctccagcaactcagtaggaaaaagactaaaaaaatccatttgtgctcacatcatcaaatacgtcttcagctgtt

SEQ ID NO: 13665 - DNA, 120 bp, synthetic construct
  source 1..120: mol_type = other DNA
agcaggtctatctatgtgaacctactcccaaaggccatgggagctgagaggctaaaaaaagaaactgatagatccagtttctctgaaagaagcatttcctagggatttacaagcagaagc

SEQ ID NO: 13666 - DNA, 120 bp, synthetic construct
  source 1..120: mol_type = other DNA
gtcaatgctacaggagaaaactggtgtgtatgtcaccttaaccttgggtgatactactgagtacctcctgcctcccaagtgctaatggtcattgaaactttgacaatcgttttagaatca

SEQ ID NO: 13667 - DNA, 120 bp, synthetic construct
  source 1..120: mol_type = other DNA
caatgggtggattcagcatctgcttcatactggcattatactaggtgctagatactcagtgtcgaaaaaaacagaatggactcacttttttttctctagcctaaagattacttaagtaac

SEQ ID NO: 13668 - DNA, 120 bp, synthetic construct
  source 1..120: mol_type = other DNA
cccactgtctctgctgttctctcttcatactcgacctgaacttttcctcatcctcttcccacctaacctcttttgactttttcaggaggactcagccatagaagtaattatatacagatg

SEQ ID NO: 13669 - DNA, 120 bp, synthetic construct
  source 1..120: mol_type = other DNA
ggagatgggaaaagagagattcagagagagagccatgataatacccttcataactctgaatccaacattcctcccattggaattccaagaaaagcaatctaatacatattttaaaaacta

SEQ ID NO: 13670 - DNA, 120 bp, synthetic construct
  source 1..120: mol_type = other DNA
atgtaatgtcaggaggtcaggggaatagtactttccagggatacatgaatcatagtcttgaaatacctttaaacttctaccttaatatgtttttttgtcttattttatggggcagcatta

SEQ ID NO: 13671 - DNA, 120 bp, synthetic construct
  source 1..120: mol_type = other DNA
aaaccgtgagttctattggaaatggaagaaatttcgtcaaataacaaatgattacaaatggcaagcatgtgtgattaggacctcagttaatggctttgctgcatgagaaaagctgcccag

SEQ ID NO: 13672 - DNA, 120 bp, synthetic construct
  source 1..120: mol_type = other DNA
gggattccagaaagaaagggaggaagccagcaaaagaaaacaagagagtgaccagagaacttaaaaggaaagaatgttgtctaagagggtgagtgaagaaagagataggctgtgaaatgc

SEQ ID NO: 13673 - DNA, 120 bp, synthetic construct
  source 1..120: mol_type = other DNA
caatagtaagtagtacaaattcctgggaatgttagtgtctatacatatttttagagggaagacagcccaagtggtttaccacattccgctgataggcttatatcacatgttcaagccatg

SEQ ID NO: 13674 - DNA, 120 bp, synthetic construct
  source 1..120: mol_type = other DNA
ctggaataggcagtcagaagagatggtgtcagctcaggttatatatagtgaacatttactatggcctcacttcctggaataaactcttgaccacgccttttgttttttttttttaataac

SEQ ID NO: 13675 - DNA, 120 bp, synthetic construct
  source 1..120: mol_type = other DNA
ctagtccatctcatcattttttaaacctaatctagggaatcatcacccaatccaatttcagctcgaatgttttggacaaagtttatgtaatttctctgctggaaggataggacccgtggc

SEQ ID NO: 13676 - DNA, 120 bp, synthetic construct
  source 1..120: mol_type = other DNA
tttggtgactttcatactgacttcactctacttactggtgatgatgggcaagtaatttacctattccaatgctgggtttctctttctataaaaagtggattataatggttaccttacaga

SEQ ID NO: 13677 - DNA, 120 bp, synthetic construct
  source 1..120: mol_type = other DNA
tatgtggtctatttactgatatttactgattcttctttatatgcatttcaattctccctgttgaaagaacttaataaaagataatacaaggctgggtgcagtgactcatgcctgtaatcc

SEQ ID NO: 13678 - DNA, 120 bp, synthetic construct
  source 1..120: mol_type = other DNA
taagttccatgattataaaacacttgaaaatatactctctttccttcaaagcccttcgagcatagccagtgtttttaacacagtcaagacgctgtcatctgaacgcagatttacaaccta

SEQ ID NO: 13679 - DNA, 120 bp, synthetic construct
  source 1..120: mol_type = other DNA
aagcttctgtaaaggactctttgcaatttctcaatgagaaaagcagattttgtagagagaaagcaaatagccaaaggttttagtttgtgcagaatattatttgccacatacagtaattga

SEQ ID NO: 13680 - DNA, 120 bp, synthetic construct
  source 1..120: mol_type = other DNA
aataccaagctcttaacttttcctttaatatctctggcaatttctttcagcctctcttgctttattttccaccattgaatttgtaggtgttggacttccccaggtcttgatcctggactg

SEQ ID NO: 13681 - DNA, 120 bp, synthetic construct
  source 1..120: mol_type = other DNA
agagagaaagaatatccatgcttcttttatctacagtgaaggtgaagagcaacataaacttcaggtaagtgtgccttgtgaacacttggaattgccaaatttgatcatattgcttagttg

SEQ ID NO: 13682 - DNA, 120 bp, synthetic construct
  source 1..120: mol_type = other DNA
gcccatccacctacaacttccccagagatcactggcaaagtgtgatttaccagtgtcatacggtagaagcccatttatcactgaatagagtttaagccttaggtttgtcatgtcggcata

SEQ ID NO: 13683 - DNA, 120 bp, synthetic construct
  source 1..120: mol_type = other DNA
actttgacatgactgctgggctaataacacaggtctcccagtggcaggggagtatcagattttcccatgaaccattgcacataaacaagtttcatcatttccctcaaaaagctaaaacca

SEQ ID NO: 13684 - DNA, 120 bp, synthetic construct
  source 1..120: mol_type = other DNA
taagcatcactgacatcagtggaggaaatctttcaggtgagaatgcttatcaccaaaccataatacttgagatgattgtcttttccatgtaaacttaagcctaacctgaatcgaagccaa

SEQ ID NO: 13685 - DNA, 120 bp, synthetic construct
  source 1..120: mol_type = other DNA
tgaccttcacgtcttgggtagatataagtaactgtgtgcaatttgtgtatgttgcatgaggagtctttcatgaagcaaacatcctgaacgtaatccatctaaggaaacaaagaaagtgca

SEQ ID NO: 13686 - DNA, 120 bp, synthetic construct
  source 1..120: mol_type = other DNA
ggacactaattgatttatgtggtacatggcttttaaatttcctacctttcttttttgtttcagaagtaactttcttctcagccttcttcttttccccttctttttctagagaatacattt

SEQ ID NO: 13687 - DNA, 120 bp, synthetic construct
  source 1..120: mol_type = other DNA
ttgatgtagctgtttttcatatctggctcttgccaacaggcatttaagcctgatgacaagtgtctggcagtgtgttggaaacataacttccacggtcctttctgagtggttgtatcaaca

SEQ ID NO: 13688 - DNA, 120 bp, synthetic construct
  source 1..120: mol_type = other DNA
ctcaagctaaacactaatgccatactaaccataagatcagaactcagtatccaagtctccaagtttcataaggttgatgaataaatatttcattaaaaagcttgtgccaattagtcaatc

SEQ ID NO: 13689 - DNA, 120 bp, synthetic construct
  source 1..120: mol_type = other DNA
ctgaaatgatggctgtattctggcagggatcacagaagagtgtggttgggaaagaaatcttccctacaatgagcagctctgagccacaaatatgttattagcttctgcataaattaacat

SEQ ID NO: 13690 - DNA, 120 bp, synthetic construct
  source 1..120: mol_type = other DNA
tgaccacatataatctttttaggtaattttttaggtgtgacatttactgatctctttgagtaaatgcaactttattcttatttttctatatccagggagggtatgtctagaatattttgt

SEQ ID NO: 13691 - DNA, 120 bp, synthetic construct
  source 1..120: mol_type = other DNA
tctcagcactttgggaggctgaggcaggtggatcacgaggtcaggagatcgagaccatcctggctaacaaggggaaatcccgtcacgactaaaaatacaaaaaattagccaggggtcaaa

SEQ ID NO: 13692 - DNA, 120 bp, synthetic construct
  source 1..120: mol_type = other DNA
gaatttgtcaaaggccttttctgcatctattgagataattatgtggtttttgtctttggctctgtttatatgctggattacatttattgatttgcgtatgttgaaccagccttgcattcc

SEQ ID NO: 13693 - DNA, 120 bp, synthetic construct
  source 1..120: mol_type = other DNA
agattcaacttcttcctggtttagtcttgggagagtgtatgttagacctaaaaccataaaaaccctagaagaaaacctaggcattaccattcaggacataggcatgggcaaggacttcat

SEQ ID NO: 13694 - DNA, 120 bp, synthetic construct
  source 1..120: mol_type = other DNA
ctaaaaagaaaaaattagccaggtggcgtggtggtgggcacctgtagccccagctgctccggaggctgaagcagaagaacggcgtgaacccaggaggtggagcttgcagtgagctgagat

SEQ ID NO: 13695 - DNA, 120 bp, synthetic construct
  source 1..120: mol_type = other DNA
ctgaattattctcagaagtctgctcttctcattatcaactgttaacaacaaacaactaacaagcagcaattctacagcactttccagtgactacccgagacctttagtcatacaatttat

SEQ ID NO: 13696 - DNA, 120 bp, synthetic construct
  source 1..120: mol_type = other DNA
aggagctgagtcaatttggagagttgagcaaaatgcaggggcagaggaagcagcagaaagacactgagagctcgctgggtcccctagcaggccattcctgcctggcaccacagggattca

SEQ ID NO: 13697 - DNA, 120 bp, synthetic construct
  source 1..120: mol_type = other DNA
tgcactttggtgcaggaggccaaccagcacaataatagagcattaaaccacaaaagctaagaaccctcacagagtccattgcactcccctgccacctccaccagaataggcactggtatt

SEQ ID NO: 13698 - DNA, 120 bp, synthetic construct
  source 1..120: mol_type = other DNA
aatacaagaagcacaaagaacacctgggaaattcattgcaaaaagatcatcacctaggcacattgtcatcaggttatccaaagttaagatgaaggaaacaatcttaagagctgtgagaga

SEQ ID NO: 13699 - DNA, 120 bp, synthetic construct
  source 1..120: mol_type = other DNA
ttaatactccactgacagcactaaactgatcatcaagacagaaaatcaacaaagaaacaatggatttaaactatatcttggaacaactggacttaacagatatatacagaacatttcatc

SEQ ID NO: 13700 - DNA, 120 bp, synthetic construct
  source 1..120: mol_type = other DNA
acaaaaaaaagtccaggaccagttggattcacagaattctaccagacattccaagaagaattggtgccaatacttttgacactattccacaagatagagaaataaggaattctccccaat

SEQ ID NO: 13701 - DNA, 120 bp, synthetic construct
  source 1..120: mol_type = other DNA
tctggacgcatcacactacctgatttccaactatactataaggccatagtcaccaaaatatcatggtactgttataaaaataggcacatagatcaatggaacaaaatagagaacccataa

SEQ ID NO: 13702 - DNA, 120 bp, synthetic construct
  source 1..120: mol_type = other DNA
cattatttgaaaaagattgaacacgcatgtttatagcagcacaattcacaattacaaaattgtgaaaccaaaccaaatgcccatcagtcaatgagtggataaagaaactgtggtgtgtgt

SEQ ID NO: 13703 - DNA, 120 bp, synthetic construct
  source 1..120: mol_type = other DNA
acatgagcttgtatgcactagaatatacttcattctcaggtaaaagtctacacatcttataacctgtgaggaaatgggctcaggaaagatgacgaatgtggccaacttcacaggtcatat

SEQ ID NO: 13704 - DNA, 120 bp, synthetic construct
  source 1..120: mol_type = other DNA
acatgagtgattgcatttatttaaaatgggttgtgtttatatagctgaggggtgccatgtctgttctttctcactttctatatagagtgaaacaaaaaaggcaaccactgtgtgtgtgtg

SEQ ID NO: 13705 - DNA, 120 bp, synthetic construct
  source 1..120: mol_type = other DNA
atataaagaccacaactttttaagttgtaatcatttcaatatgctgagttcaggcttatttgaactgatgcactacatgagagattttaccgtctcttatggattaaaacaaactagtaa

SEQ ID NO: 13706 - DNA, 120 bp, synthetic construct
  source 1..120: mol_type = other DNA
tgcaagtaaaaaaccatttcttttatactagcattaacagttaggaaagggctgtgaagcaggaaactggccctgatctcaacagaaggcccttttcctgtttcccgcatcatgggggaa

SEQ ID NO: 13707 - DNA, 120 bp, synthetic construct
  source 1..120: mol_type = other DNA
gtagatgagcataattttctaattgacaaatgtaaattttcctggccagtctttgtgttatccatctctctggagcactggggcctgttatacccttttctctttcatattctctcatct

SEQ ID NO: 13708 - DNA, 120 bp, synthetic construct
  source 1..120: mol_type = other DNA
caatatctatatctccctcatttgtaaactcctgactcatatattcagttgtccactgcagattaccacttatgtggatcaagctcagcatcctgcctgacatgtggtctccatgttctc

SEQ ID NO: 13709 - DNA, 120 bp, synthetic construct
  source 1..120: mol_type = other DNA
ctaaatttgtcttatactcccaactcttaagctcaccactcaccaattcatcctttctatagttgacacataatcttgaaaacaaagttaatcatactactctctgctcaattgcttaag

SEQ ID NO: 13710 - DNA, 120 bp, synthetic construct
  source 1..120: mol_type = other DNA
gtattatccattgtcccaacaactttaacatctctatcatatctacagttgctatttaaccactgggcaaagctatgtagggttcactctgttcttctggcagtttattaccaatctacc

SEQ ID NO: 13711 - DNA, 120 bp, synthetic construct
  source 1..120: mol_type = other DNA
tcacataagtcagcccaatttttgaaagaaatggataactacagtgtccctttgaacttgtaggcgtttcagccctagtaagagctcccaatagacacgggaattcaaaattgcttaaaa

SEQ ID NO: 13712 - DNA, 120 bp, synthetic construct
  source 1..120: mol_type = other DNA
tgataatatagactccccgagctgctcagggttagcagccttcaagctttcagagaagacactgacaaaggcttgtgatcctcaaaccttgttattttattcaccacagcctattactag

SEQ ID NO: 13713 - DNA, 120 bp, synthetic construct
  source 1..120: mol_type = other DNA
agtctccctcaagttgggaaatctgaattcgttgctttatgtccatctggaaacaacaacagaattagaatcccatgaaaaattaaggcaacgctattatttataggggttgtcttgtcc

SEQ ID NO: 13714 - DNA, 120 bp, synthetic construct
  source 1..120: mol_type = other DNA
cccaaagtgctagagtgggcatccttctggaagctgagggtcaccaatatagaatcttaaggggacatttttggttttctaaaagaagcaaattgcaattttaggaaaagtatagtttag

SEQ ID NO: 13715 - DNA, 120 bp, synthetic construct
  source 1..120: mol_type = other DNA
aagaaagaaaacccacaatcatttccaagtacttctttatcccaagtgatttctttaattaaccaataccatccaggccatgaactctcaacattagctatcatatgatcccatataaat

SEQ ID NO: 13716 - DNA, 120 bp, synthetic construct; identical to SEQ ID NO: 6261
  source 1..120: mol_type = other DNA

SEQ ID NO: 13717 - DNA, 120 bp, synthetic construct
  source 1..120: mol_type = other DNA
aattctgcacaactataatgctctttttattctgctctctaacatggctgatggcatggttgtaaggcagtggacacaatgggtaacaatgggaaagtaggaccacaagcaaaaaaaaat

SEQ ID NO: 13718 - DNA, 120 bp, synthetic construct
  source 1..120: mol_type = other DNA
aaggaaagatttaggctgttgaaatttacattcgaactctaaaggtgcccttcattttacaagctattacctgaaaatccctctgacattcaaacacagtaagttggcttcatttctgtt

SEQ ID NO: 13719 - DNA, 120 bp, synthetic construct
  source 1..120: mol_type = other DNA
aaaataattgaattgccactcatataataatcagagatgttcaaatttgcctattaaacaaagacctctccaactgggaataatctgaagaagttcaggagtttgtgtgaggtgggcagg

SEQ ID NO: 13720 - DNA, 120 bp, synthetic construct
  source 1..120: mol_type = other DNA
ctgagggacaatggtgaagatagggccatatcatggagcttacactagtgatggaaggagatgggagatacaaaagcaagtcaatatttcagatttcgtaaatgaatggcaagcatagag

SEQ ID NO: 13721 - DNA, 120 bp, synthetic construct
  source 1..120: mol_type = other DNA
ttcactcagcaacttatgaactcatttgcttagtctttattgcctcttgcattatgtagttttcactttgctggagtacttgtatagaagatcaccagtgaagaagccagagatggttta

SEQ ID NO: 13722 - DNA, 120 bp, synthetic construct
  source 1..120: mol_type = other DNA
tctccggaaggataaatagtctaacaaaggtcatgcattgagaacaaacctaatatgagccaagatggccgaataggaacagctccagtctacagctcccagcgtgagcgacgcagaaga

SEQ ID NO: 13723 - DNA, 120 bp, synthetic construct
  source 1..120: mol_type = other DNA
acgggcagagaacgggcagactgccttctcaagtgggtccctgacccctgacccccgagcagcctaactgggaggcaaccccccagcaggggcacactgacacctcacacggcagggtat

SEQ ID NO: 13724 - DNA, 120 bp, synthetic construct
  source 1..120: mol_type = other DNA
gtcgggttaccctcaaagggaagcccatcagactaacagcggatctctcggcagaaaccctacaagccagaagagagtaggggccaatattcaacattcttaaagaaaagaattttcaac

SEQ ID NO: 13725 - DNA, 120 bp, synthetic construct
  source 1..120: mol_type = other DNA
cagaatctctgggacgcattcaaagcagtgtgtagagggaaatttaagagaaagcaggaaagatccaaaattgacaccctaacatcacaattaaaagaactagaaaagcaagagcaaaca

SEQ ID NO: 13726 - DNA, 120 bp, synthetic construct
  source 1..120: mol_type = other DNA
cccgtcatgctaaaaactctcaataaattaggtattgatgggccgtatttcaaaataataagagctatctatgacaaacccacagccaatatcatactgaatgggcaaaaactggaagca

SEQ ID NO: 13727 - DNA, 120 bp, synthetic construct
  source 1..120: mol_type = other DNA
ctatttaataaatggtgctgggaaaactggctagccatatgtagaaagctgaaactggatgccttccttacaacttatacaaaaatcaattcaagatggattaaagacttaaacgttaga

SEQ ID NO: 13728 - DNA, 120 bp, synthetic construct
  source 1..120: mol_type = other DNA
tgcacaatgtgcacatgtaccctaaaacttaaagtataataataaaaaaaaagaaaaatgttcaccaaaaaaaaaaaaacctaatataagattaaattttttacctccattttattttcc

SEQ ID NO: 13729 - DNA, 120 bp, synthetic construct
  source 1..120: mol_type = other DNA
ggatttcaaattttcagtgataaaactgcctagaacttggctaatttcagtcaatcctcaaagcttagctcttttagcccttcttggactcccctctacccattcccctgaaaacacttt

SEQ ID NO: 13730 - DNA, 120 bp, synthetic construct
  source 1..120: mol_type = other DNA
aggacccaagtatgcggagtcccagtgcagtgctcttatacaacagtatcctgtctttgagcttgcatttgcaggcattttcaaaagagcataggggacagggaatgaacaaaacataag

SEQ ID NO: 13731 - DNA, 120 bp, synthetic construct
  source 1..120: mol_type = other DNA
ttccagagatccaacatgtattaatgactcactaaaagactgaaaatcgagtcacatttaattattgatttttgggaatgtgaggggcaaccagaaaggagaagaaataagaggaaaaat

SEQ ID NO: 13732 - DNA, 120 bp, synthetic construct
  source 1..120: mol_type = other DNA
ttcaatttcctaatttctgagttgaagaggttataacccacttcacagggctttgtgagaaatacataagatgatccatacctagaacttagcacagtacctgacataccattagcactc

SEQ ID NO: 13733 - DNA, 120 bp, synthetic construct
  source 1..120: mol_type = other DNA
ttgaatgacacatttggaagtcatccaatctctcttcctgctttatattgtgtataattgatactatgttgtcatttaaaacagtacacactgcttatccagtgtctgccaagaggctat

SEQ ID NO: 13734 - DNA, 120 bp, synthetic construct
  source 1..120: mol_type = other DNA
tgatccacccgccttgtcttcccaaggcgctgagattacaggcgtgagccactgcgcccggccagtattattaatttttaaaaactacatctaattttattaccacttcctcccctattt

SEQ ID NO: 13735 - DNA, 120 bp, synthetic construct
  source 1..120: mol_type = other DNA
aaaatatgtccgcttaagaaaaggggtaagaactatgcatttatggaaatggttagaaagagtcctattctctattttgtatccactaggccacacaaataaaccttagaacagcactgg

SEQ ID NO: 13736 - DNA, 120 bp, synthetic construct
  source 1..120: mol_type = other DNA
tgtgtgcttccataattaagcctaggctcgctctcatttcttctctcattgtagcctaattctgtatgctgcctgcagtctactcatgcatgcagcaaacctgtctttgttaattctgag

SEQ ID NO: 13737 - DNA, 120 bp, synthetic construct
  source 1..120: mol_type = other DNA
ctgaggaacccaaggacctgggctttcattcatagcaaattaagaagaagctccatttttccagactgtagtgagtctaataaatagtcaaaatcttccattattaaatttaaagggcat

SEQ ID NO: 13738 - DNA, 120 bp, synthetic construct
  source 1..120: mol_type = other DNA
gatgtttgtgtatgcttgatggctagcaataagttctacataaattctaccttggcttcatgagggcaggtaccatacatattttgtttattgctatatctacatctactaggaacttac

SEQ ID NO: 13739 - DNA, 120 bp, synthetic construct
  source 1..120: mol_type = other DNA
tttctcagcacttagtcaaatattatccatctttcaagttctagatccactccatcttttttgacagcaggaatcacagatgtttctcctctgaatcttaaaacatttagagttcgtatt

SEQ ID NO: 13740 - DNA, 120 bp, synthetic construct
  source 1..120: mol_type = other DNA
ttgatatctataaatcccatgactctatctctgtgatagctctaaaagtatcttaattttctccatcacatattctatgatcaggctttatttcctttcgttggacttttccttgttgat

SEQ ID NO: 13741 - DNA, 120 bp, synthetic construct
  source 1..120: mol_type = other DNA
cttaaacagaacaaaacccattatatcttgtaattaccatgtgacagcattggacaattttaaacatgtaaggcactttatggaaacttcatgatcttttttttcttatattaagcattt

SEQ ID NO: 13742 - DNA, 120 bp, synthetic construct
  source 1..120: mol_type = other DNA
gttgactgtgggttactgaaactgcaaatagcaaaatcatggataagaggacacgactgtattctcatctagttagccctttaacaggaaggaatttatcctgttatattttgtgacaag

SEQ ID NO: 13743 - DNA, 120 bp, synthetic construct
  source 1..120: mol_type = other DNA
tttaatacaattatttatgtcttagcttacctcttttctggaccaccagcttgctgagaggattcaacaactacttactgaataaacattaaaattcccgaaacttttgttgtgtgaaaa

SEQ ID NO: 13744 - DNA, 120 bp, synthetic construct
  source 1..120: mol_type = other DNA
aggaaaaaaagtggaggttaatcagtttcaagacagctaccataagacgaatcaatctctttctttctgtctcaatctctccccgactctcctctctctgtcttccctaaggcaggttat

SEQ ID NO: 13745 - DNA, 120 bp, synthetic construct
  source 1..120: mol_type = other DNA
tttgatgggataaaaggcaaaacttgggacttatgtcatagtgtcagcacatttcatcagcaagcgttttcaaattagaactgcaatttgggttacttttgagggtgtgacagtacaaag

SEQ ID NO: 13746 - DNA, 120 bp, synthetic construct
  source 1..120: mol_type = other DNA
tctcatctcatatgtaagtaaacacctagttgactttacaaaaattatgtgtagagtatgaatttcttgaaccaacacaggtgaacaaatggttagcactcctttgacctaaaattgaac

SEQ ID NO: 13747 - DNA, 120 bp, synthetic construct
  source 1..120: mol_type = other DNA
aagtagctgggacaatgggtgcataccgccatgcccagataatttttataattttttttgccagttgcagtggctcatgcctgtaatcccagcaccttgggaggccgagtcgggcagata

SEQ ID NO: 13748 - DNA, 120 bp, synthetic construct
  source 1..120: mol_type = other DNA
ctgaaaatgtagaagaaggaaaaggggaggaggaggaaattatttaactagaataaattactgggatcaacaacattttccggagtgcaaaggttctcattgtctagttttctagagcct

SEQ ID NO: 13749 - DNA, 120 bp, synthetic construct
  source 1..120: mol_type = other DNA
atcttagaaacaaagactattaaaacagacaagtacaagaattgcttggaatacctggttttaaatccccatggacaaatatgtcaatcatatatcgacagaatgcatactgatctgaca

SEQ ID NO: 13750 - DNA, 120 bp, synthetic construct
  source 1..120: mol_type = other DNA
tatgtaaacatcattttgggcagacctggtcttcaggagttggttttttttctattccctctagattaaagacattgcacttaactttaaatcctcacagaactttagattctcctgagg

SEQ ID NO: 13751 - DNA, 120 bp, synthetic construct
  source 1..120: mol_type = other DNA
gtgactgtactctttttagatttgttctgcctatactctaggagtagttctcaaagggcaacttaaacacgagaaagagagaggagttgtcaaaatacagatttttgggctccatcatcc

SEQ ID NO: 13752 - DNA, 120 bp, synthetic construct
  source 1..120: mol_type = other DNA
acagtataaccagtatttacaaagcatttattaaatacattaggtagtattggtaatctagagatgatttaatgtatacaagaggatgtgtataggttatatgcaaatattagtcccttt

SEQ ID NO: 13753 - DNA, 120 bp, synthetic construct
  source 1..120: mol_type = other DNA
tccttccccacagacctcctagaggtcatcagaaaactagggagcaatgtctgactatgccaactcttcctactctacaaacagatttagatgggttcataaaaactagattatttgatg

SEQ ID NO: 13754 - DNA, 120 bp, synthetic construct
  source 1..120: mol_type = other DNA
tgattactgatagaaatgaaatacaatatttgtggcctggaaaataaacattattttaaagtgttccggtgatgagtttttatcaataaaatgtggctcccaaatccccaaagatatgaa

SEQ ID NO: 13755 - DNA, 120 bp, synthetic construct
  source 1..120: mol_type = other DNA
caattacaggaatagtctctacatgttagatccccgtattctgtaaaggagtctcaggattatacagcaaactggagtcaggaatggacttaggaaaagaaacattcaataagggccaga

SEQ ID NO: 13756 - DNA, 120 bp, synthetic construct
  source 1..120: mol_type = other DNA
acagctgctttctctttgtcctccttttctttgggttttgatggtgttttctgtacttcttttacttttgcagctgtttgcttcactttctcctgttttccacctttcacttccttttta

SEQ ID NO: 13757 - DNA, 120 bp, synthetic construct
  source 1..120: mol_type = other DNA
tccgtattttggaagagggaactgtgatgcaaataactagtctgtggatcattcaagcatcttttaaaaagcagtaataatgtagcacataatttgtggaaaattgttcataatagatgc

SEQ ID NO: 13758 - DNA, 120 bp, synthetic construct
  source 1..120: mol_type = other DNA
caagataatatcagaaggtcccattgagagaatgaaaatgataatgccagatgctggttagcttgcaaaccaaaaatcatctgtggtatcgcacttaattgactacgccagcacttccca

SEQ ID NO: 13759 - DNA, 120 bp, synthetic construct
  source 1..120: mol_type = other DNA
cctgaataaattttagcacagcaaaattaaaaccgtgcaatatctggcttcctcctatctcccatgttacagcacttttccaaaaatttattcctctactggactgctttctttcttttg

SEQ ID NO: 13760 - DNA, 120 bp, synthetic construct
  source 1..120: mol_type = other DNA
aaatgacagctatctactccttgtaagttacagttgatttaaccttaactttatagtatggaactatagatgtgtgaaattcagatttctttttaatgccattataatttataagtgggc

SEQ ID NO: 13761 - DNA, 120 bp, synthetic construct
  source 1..120: mol_type = other DNA
atataagggcagatataaatatacatgaaccatgtgaaagcgataaaatgtcttcctgaaagtgaccaaggcagcaataacctctgccacatcatcaaacacacagacatctgaaggtca

SEQ ID NO: 13762 - DNA, 120 bp, synthetic construct
  source 1..120: mol_type = other DNA
tatgtgtatgtgtgtgtgtgcacctcccccagaagaatgacgtaaatatttaaatggaaagtatttatggcaagcagactcaagatggctcccagtgactcccaacttgtggcattcata

SEQ ID NO: 13763 - DNA, 120 bp, synthetic construct
  source 1..120: mol_type = other DNA
ttacctaaatgggtagtttcttaaaaatactgaattgaggcttctagctaattgcctaaaatgtatattttaaaagataaggaagaaatttaaatgtagggaataagattaaattaccaa

SEQ ID NO: 13764 - DNA, 120 bp, synthetic construct
  source 1..120: mol_type = other DNA
tattgtatattttaaaataactagagagtgaatttggaatgttcccaatgcaaagaaataataaatgtttgaggtgatggacatcccaattaccctgatttgatcattatatattatatg

SEQ ID NO: 13765 - DNA, 120 bp, synthetic construct
  source 1..120: mol_type = other DNA
agaaataaagagttaccagtgtaataacagttgtattgaattcaatgttaaagtctaggcattaagacttagcaagcttgttgaaaatcagatctactctttctcaagtcattatttcaa

SEQ ID NO: 13766 - DNA, 120 bp, synthetic construct
  source 1..120: mol_type = other DNA
caatgttaacaaaaggagcattatgctaggctaagcaaggcactattcaaacaaggtcacaggactacattataataacatatctcctaaaaagcaaacatcctttaattggcataaggt

SEQ ID NO: 13767 - DNA, 120 bp, synthetic construct
  source 1..120: mol_type = other DNA
acatggcaaaaacccatctctactaaaaacacaaaaattagctgggtgtggtggcacatgtctgtagttctcatgctgaggcatgagaatctcttgaaccccagaggcagaggttgcagt

SEQ ID NO: 13768 - DNA, 120 bp, synthetic construct
  source 1..120: mol_type = other DNA
taacacgccagtaacaggcctccaaaaaagggaaatctatgaaatgcctttcaaaataataatcttaaggaaactcagagagaaaaaaagagaacacaaataaaaaatacaaaggaagga

SEQ ID NO: 13769 - DNA, 120 bp, synthetic construct
  source 1..120: mol_type = other DNA
tgagaaaataatcctaatctaatttgtaaaactgcgtggtcatctaaaatctgaatgtaaagagtaggaagtcaatgggaaaggactcagtgtgttaaacagtaataaaagtaacttcat

SEQ ID NO: 13770 - DNA, 120 bp, synthetic construct
  source 1..120: mol_type = other DNA
aaatgacatttaagagtatgagaaatgagaagaaattagcctagtaagagattaggagggaaaaggggaagagaccaatttccagttcagaagttgaagcaggatgtctcttttgggcat

SEQ ID NO: 13771 - DNA, 120 bp, synthetic construct
  source 1..120: mol_type = other DNA
tctactcagtaaatgaaatccttaggggctacatcatatttattttatttttttacatttccaagtcatcacaaggtctcagtcacatagtggactctgtaatatttttgaataagtgaa

SEQ ID NO: 13772 - DNA, 120 bp, synthetic construct
  source 1..120: mol_type = other DNA
agctcaggacagaataagcttcttgcacctgctagagtttaatttgtttgtcatccttatttacaagaaacaaaagtcccttcggtatgctgataattaaaaacaaatggaatccaccag

SEQ ID NO: 13773 - DNA, 120 bp, synthetic construct
  source 1..120: mol_type = other DNA
gatctcttggttagtgtgtatgtctttgtgtgtatgtttcttttttatttttggtagctaatttgtagaagttcagttctgtggtaaggcaagatgatctctatgctttttaagagaaaa

SEQ ID NO: 13774 - DNA, 120 bp, synthetic construct
  source 1..120: mol_type = other DNA
tacatagccatagtaagaactgtaatcgctttctcataagtgaacattcactatggacactgtgatgcatagctttgtgcacactcttctggtttccttgtccaggtttatttttcatga

SEQ ID NO: 13775 - DNA, 120 bp, synthetic construct
  source 1..120: mol_type = other DNA
ccttgactttggacttccagcctcaataaggtaatattaaggctaatgttaagaataatagtaataattagacttctgttgcagcccttgaaccaagttcccacctggttccctgaggac

SEQ ID NO: 13776 - DNA, 120 bp, synthetic construct
  source 1..120: mol_type = other DNA
actaaccacagacatttgacttaaattacagtggcttaattaaagctaaatggaaagttgtctgtaggaatgtcaaatgcaaagttgtctgtaggaatccagtagagattaacaaaacag

SEQ ID NO: 13777 - DNA, 120 bp, synthetic construct
  source 1..120: mol_type = other DNA
ttgtggagaagatagcagttggagaagagagaaagtagactaaattatagtacggaggagctaagtagggttgagctctactgctgaaagagacaaaaaggtctatggcagggacaagct

SEQ ID NO: 13778 - DNA, 120 bp, synthetic construct
  source 1..120: mol_type = other DNA
cacattaaagatgcatttttaatgaggaatttatatcttaagggaatgatggcactacattggccatacacaaactgtgtcctattgtcaaggtgactaagctcttcacatatagtaaga

SEQ ID NO: 13779 - DNA, 120 bp, synthetic construct
  source 1..120: mol_type = other DNA
aaaaaatcattatataaaaaagacacctgcactcacatgttcatcacagcactattcgcagtggcaaagtcatggaaccaaacataagtgtccatcagtggctgattgggtaaagaaaat

SEQ ID NO: 13780 - DNA, 120 bp, synthetic construct
  source 1..120: mol_type = other DNA
tagatatgtacaaatgcaagcagatcagtgaggtcaaccagcaggaagcaaggttctaaccacagggtttcagagacaaattctagatcctatggctatgagcaaattctggtgctacag

SEQ ID NO: 13781 - DNA, 120 bp, synthetic construct
  source 1..120: mol_type = other DNA
acagatgatgaaataaaggcaaagaaagattaattatcttgcccaaggacacatagccagaagttaccaaatttggattctaacccagataatttaattaaagacctttctaaaagtaga

SEQ ID NO: 13782 - DNA, 120 bp, synthetic construct
  source 1..120: mol_type = other DNA
tcattgcctggttatcatttaaaaggcatattctttagctccataaactgctgcattcttccctgaggaaaatatcgaacaaaataaacagagggacaaagtagaaataaaagttagctt

SEQ ID NO: 13783 - DNA, 120 bp, synthetic construct
  source 1..120: mol_type = other DNA
taaattaatagcacagtctgcaagaaaaaaacagcagggacccaaatggtgtggaaccagttgagtttctgtttaaccttcagcagatagaaacacagagccagttcagtcatggttcgc

SEQ ID NO: 13784 - DNA, 120 bp, synthetic construct
  source 1..120: mol_type = other DNA
tccatctacctcttgaggctgtgcaggagagccgtggggctttcttacatgacctctgccatgaggtcatataatgactctgcatttctacaccaaagattgtaaagatattgcatgaca

SEQ ID NO: 13785 - DNA, 120 bp, synthetic construct
  source 1..120: mol_type = other DNA
gtaacaactatctaataggaaatatatttcagaagtattgactctaagctatgtttataatcagcatttggcattacatttaaccaataattactgcaagcagatatgacacatttcata

SEQ ID NO: 13786 - DNA, 120 bp, synthetic construct
  source 1..120: mol_type = other DNA
catatccacctcccaatcttgacaatgaaacatgtccagagactttgccaaatgtctcctacagggcaaaatgaatcctagttgagaaccactgctctaaacttacatgataaccagagt

SEQ ID NO: 13787 - DNA, 120 bp, synthetic construct
  source 1..120: mol_type = other DNA
cctattatattactactagacaggtctaaggcacgtctaatcccagggggagcaaaggacctttacaaaactttaggtcatccacagagacaaactgatttcaaatgaactgaaaaaaca

SEQ ID NO: 13788 - DNA, 120 bp, synthetic construct
  source 1..120: mol_type = other DNA
tgtaagtttgcacatcagaaaacagatgaaagaagtactagcaggagctaccttgctcctcttagctcttgtgtactcagacatatcctgacaaaggaaatgagtgctaggtagtagcag

SEQ ID NO: 13789 - DNA, 120 bp, synthetic construct
  source 1..120: mol_type = other DNA
cacatggcgtgccagttctgtctccttacactttagccaggaaatgatgctattcaagctcctgtccaattcagtaacatgttactaatttagactttggaaaggtatttttctcatagg

SEQ ID NO: 13790 - DNA, 120 bp, synthetic construct
  source 1..120: mol_type = other DNA
ttttactactcctgactttcccctaacacttttctggtggctggtagggaggtatgagtgaagataagggaggaaaaagtagtatctcctcttagatccttatcgctattcatctctcac

SEQ ID NO: 13791 - DNA, 120 bp, synthetic construct
  source 1..120: mol_type = other DNA
ttttatttctaaatattttaaatttctgttagaaatacaagggaaagttgcaagattttactacttatggaaataagatatgccaaaggtacttataaactgcaacgattggccaggtgc

SEQ ID NO: 13792 - DNA, 120 bp, synthetic construct
  source 1..120: mol_type = other DNA
ttgagaggacaaggatagattttaatgatcctcttggtagtccaagttagagttttcaagtataatggagaattttcttgttctcatgacgtgtgctgaatgtcccataggaacatacaa

SEQ ID NO: 13793 - DNA, 120 bp, synthetic construct
  source 1..120: mol_type = other DNA
ctctgtcatcaaggcaatcatcctgattcttttaagatgacaattctctttattaaattattataagggttgtgtatttcaaagaatgcctctcattatgttttctctagatacctcaca

SEQ ID NO: 13794 - DNA, 120 bp, synthetic construct
  source 1..120: mol_type = other DNA
ttaaaaggcagattttaattcattatgtctagatggagcctagattctgcatttctaaataggtcccatatgatgctaacattgctggtccatgggccatgctttgaatttcaaagctct

SEQ ID NO: 13795 - DNA, 120 bp, synthetic construct
  source 1..120: mol_type = other DNA
gcccatttcataggccttgataaagtgcatatttcttctctctgtccaactgattggctccaacagggatatgctactaaatccagattaatgggagtgaaccagatgctttcgcagagg

SEQ ID NO: 13796 - DNA, 120 bp, synthetic construct
  source 1..120: mol_type = other DNA
ctgcagagagaagattctgaaatacattagacctagcagcttccccctcacatccttttctctattactcatcttaggtacaggtagaaatataacaccaatgaaattattcttgctcca

SEQ ID NO: 13797 - DNA, 120 bp, synthetic construct
  source 1..120: mol_type = other DNA
aatgttcagcctggtgtaaaccactgaatctgctggcaaagatggatgcaatgaaagctctgacacacacatacgtctatccatcttactcccgatgacatgatacaaccttctgaatgg

SEQ ID NO: 13798 - DNA, 120 bp, synthetic construct
  source 1..120: mol_type = other DNA
ttgctttaagacttttgggttttcgctctctctctttctctccctccctttttctttctctctgagtgtgtgcatgtttgcgtgtgtgtgtgtgtgtgtgtgtgtgtgtctgtctgtctg

SEQ ID NO: 13799 - DNA, 120 bp, synthetic construct
  source 1..120: mol_type = other DNA
tctttgaattcatattttcattccacctctctcacgaaaattttacccaagagctacattatgattctctaaggaaaaaagtgtacatattgaaaattttaaatttcctccatattctgt

SEQ ID NO: 13800 - DNA, 120 bp, synthetic construct
  source 1..120: mol_type = other DNA
ttcaattcctttaaatctctctgcagttttataccccttagaaagtgaggtgctaacagatccatgatgtataccctggtgtgaaaaatattgcttaaaagcacacttccagatgtgcaa

SEQ ID NO: 13801 - DNA, 120 bp, synthetic construct
  source 1..120: mol_type = other DNA
attctcctaattctgagtatgtaatctttaaggacattagtgcacatgtgttgaaggacatatatcccttagactatttttgactaataaacatttctaacattttttaaaagtacccta

SEQ ID NO: 13802 - DNA, 120 bp, synthetic construct
  source 1..120: mol_type = other DNA
atccaaagtttctaatttaacatacactaagtggattttaccccagatagtgtggggtagtcatcattttctcagggaaggctgaaactgtaagtttggatcccattgtttgaatccaca

SEQ ID NO: 13803 - DNA, 120 bp, synthetic construct
  source 1..120: mol_type = other DNA
gtaaaatatatttgaaccatgctgaaaaccaatattaccataagagaaaaataattattatcaaaggtgaaaacaactaacctttttttctcaagggaggctcatctatttctcctagac

SEQ ID NO: 13804 - DNA, 120 bp, synthetic construct
  source 1..120: mol_type = other DNA
tggcagcctgttgatatgcttttagcagtcagaagtgtattcattttggtttagcttgacccaagtgctcatttgaatttaaactgaggcaagccactataatacatatttaatgttgct

SEQ ID NO: 13805 - DNA, 120 bp, synthetic construct
  source 1..120: mol_type = other DNA
acccagagtgcaaataaaccctatgttatggatgttcaggaatggaagaaataatttcagcacatattgtatgggacagcattatagaaaagatgactctgtaagttttcagacaaataa

SEQ ID NO: 13806 - DNA, 120 bp, synthetic construct
  source 1..120: mol_type = other DNA
tgacagaattaatagtagaagcttccagtgtggctgtgatgtgagagaaagacagaattccaggataacttctaagtttttggtgtgagaaactagaatgaaggaaggaaatgctctgag

SEQ ID NO: 13807 - DNA, 120 bp, synthetic construct
  source 1..120: mol_type = other DNA
aaaatgctgctttctgggaagcctgtctccatgattcattgataatgtactttcactctttgcaccccattttactacactccagagagtttcatgtgagcaagaaatggccgtttgaat

SEQ ID NO: 13808 - DNA, 120 bp, synthetic construct
  source 1..120: mol_type = other DNA
aataaaaaagcttgcagctgcttcagtcatcttgtaaccatgagaacagtagctggctctctgagaaaggcaaggattaaaactggaaaaaaaaatgagtccacgatgacattgctaagg

SEQ ID NO: 13809 - DNA, 120 bp, synthetic construct
  source 1..120: mol_type = other DNA
tcccaaagtcactattccaaatcaagacctcaactttccagtgcctgttattcctctattcaaactctctgtactccaatttagaacatattcagttagtgggaaaaaggataaagtact

SEQ ID NO: 13810 - DNA, 120 bp, synthetic construct
  source 1..120: mol_type = other DNA
tataaaaccatcagatctcaggagacttattcactaccacaagaacagtatgcgagaaactgtccccattgattcaattatctcccactggggccctcccacaacatgtgggaatcatgg

SEQ ID NO: 13811 - DNA, 120 bp, synthetic construct
  source 1..120: mol_type = other DNA
atcccaccgcctaagttgggaagaaagaaaaaacagataggaaaaacaaaacaaaaatgtttttaaaatctgaagtggtgggtcagtatatgcataaaacaatgctctttccactaagtc

SEQ ID NO: 13812 - DNA, 120 bp, synthetic construct
  source 1..120: mol_type = other DNA
taaaacatccaaggaagtcaagcattcaaaaaatgtttattgcaacacctttattcctctgtatttaacccctaagatgagtttatatcctgccagtggacgtttctaaatgtatagtac

SEQ ID NO: 13813 - DNA, 120 bp, synthetic construct
  source 1..120: mol_type = other DNA
ggttgaaattttctggagtctcttatctttagctcaatgaacactcctcaaagcatgatgacattaaaagttgggttaataaaattcccatggtgcttctaatattaacttcacttggag

SEQ ID NO: 13814 - DNA, 120 bp, synthetic construct
  source 1..120: mol_type = other DNA
tcttcttcttcttttctctctcactgtctctaaatctcactcactctctctccttatgacttctggataataccaatattagactaaaatgaccagtctgtccctctcctctagagagtt

SEQ ID NO: 13815 - DNA, 120 bp, synthetic construct
  source 1..120: mol_type = other DNA
gtgtttaatcacgcggggacaactgcctgattattcacccacgtttcagaggtgtgtgaccacgtgggaacgcctgtcttggtccttcacccttagcagcaagcaccgcttttctggggg

SEQ ID NO: 13816 - DNA, 120 bp, synthetic construct
  source 1..120: mol_type = other DNA
cttgagatgctttacagccctataccctaaaatgtcaaaaggccatcttattctcaatatacattttattacccaatctgctcccgacattaaataagactccaaaaattaaattccagc

SEQ ID NO: 13817 - DNA, 120 bp, synthetic construct
  source 1..120: mol_type = other DNA
tctctgactgactccttcccagatcttcttggcttagcggctgaagactgacactgcccgatcacctcaaaaggctcctggaccatcacagatgctttgggtaactctcacagtggaggg

SEQ ID NO: 13818 - DNA, 120 bp, synthetic construct
  source 1..120: mol_type = other DNA
gtctagtcagaattcttacacaagagccaggactgcaccctgtagcctttctgtccaaacaacttgaccttactgttttagcctagcccttatgtctgcgtgcggcggctgccgctgctt

SEQ ID NO: 13819 - DNA, 120 bp, synthetic construct
  source 1..120: mol_type = other DNA
cacaaggcaaatggttcttggaccaaagaaaatatccccttccagcctcacaggcccattctattctgtcatcatttcataacctcttccatgtaggttacaagccactagtccgccttt

SEQ ID NO: 13820 - DNA, 120 bp, synthetic construct
  source 1..120: mol_type = other DNA
cactcctttttattaggccccagtctcattccagacaccagcccaacttgaactgcaccccaaaaacttggatagagcctaaaagctcaccaaccaagcaagtaattatgctcaaccccc

SEQ ID NO: 13821 - DNA, 120 bp, synthetic construct
  source 1..120: mol_type = other DNA
aacagaattagtgcccttataaaagaggcctaagagagttcaccccttccatgatgtgagaacacagcaagaagcctatgagctacagagtaggttctcacagataccaaaactgctggc

SEQ ID NO: 13822 - DNA, 120 bp, synthetic construct
  source 1..120: mol_type = other DNA
gctaactggagctagacctatgtcaaataacgggcactttatatttcaaagcaaaataaaaaactacttctggcttcttttatccctgtcaagtatccagatgaaaattagggcatcata

SEQ ID NO: 13823 - DNA, 120 bp, synthetic construct
  source 1..120: mol_type = other DNA
gaccaaataggcctggggtagtgagcagaaaatatggaatttgagataagacttgaatcagagtaagaaacacacaaaatgtgctccttgaaaactcagtacacatgagagttgatagag

SEQ ID NO: 13824 - DNA, 120 bp, synthetic construct
  source 1..120: mol_type = other DNA
aatcattcttctttgaggagagaactaaagtcaatgtggataacagagcgatcatacaccttggtttgtgtctgatgtcctgaggtaaatcttaattgctccccatttcactctcacaag

SEQ ID NO: 13825 - DNA, 120 bp, synthetic construct
  source 1..120: mol_type = other DNA
tcctagtcatgttagcttgtaggttcatagagctgaataacgaacccaaatcatctaaatgaaccacaaataaaagccaattctgcatgtccccaactagtagcaaatatatgcataaat

SEQ ID NO: 13826 - DNA, 120 bp, synthetic construct
  source 1..120: mol_type = other DNA
gtagagcttccattggagagctgcaattaatttctatgggcaatgcctatgttactggcatttcatctgatagggaaatacttcagtcaatgcaagctcaagggaaatgaaattttgtag

SEQ ID NO: 13827 - DNA, 120 bp, synthetic construct
  source 1..120: mol_type = other DNA
taaattccttccacctatgagcctgtaaaatcaaaagaagttatttacttccaagacacaatgagggtataggcattgggtaaacattactgttccaaaagggagaaatcagccaaagga

SEQ ID NO: 13828 - DNA, 120 bp, synthetic construct
  source 1..120: mol_type = other DNA
tgaaaagaatgcagccaagatctttgctaaggcataacatgcatcacctttgatccagtctccaatacattcctcatttccatctgagacctcatcagcttggacttcactgttcatatc

SEQ ID NO: 13829 - DNA, 120 bp, synthetic construct
  source 1..120: mol_type = other DNA
acatatccaaactatatcacacctttatgccaataaacccaaacaacagagttctattttcataattttatattgtatttcttcttgaggtctgtggcatagccatctcctgacacaaag

SEQ ID NO: 13830 - DNA, 120 bp, synthetic construct
  source 1..120: mol_type = other DNA
cagcacttttccgggggatttgggcacagatccatttttgctgtctatcacagttgtggttgtagatgcatttcctaatcaaacattcagaaaggaaaatataatttagagattcatggt

SEQ ID NO: 13831 - DNA, 120 bp, synthetic construct
  source 1..120: mol_type = other DNA
ttgtcttttacttttttttactaggcaatatatcagaagtgtgttttattgccattctgtatttctcaaaataccatttaagtggcttcatgacatgtaattttatggctgtgcgtaatt

SEQ ID NO: 13832 - DNA, 120 bp, synthetic construct
  source 1..120: mol_type = other DNA
taacatttttcacaaagtcagttttacccaactggaaagagtagctgtagtttcttttagaatgtgtccaataataattgaaagattttagcctttgtgctctttgaagacagggtggaa

SEQ ID NO: 13833 - DNA, 120 bp, synthetic construct
  source 1..120: mol_type = other DNA
tattttcagggactcaaaaaaggattctctgacttccttggtatcctttccaatcaattaattgactgcttgtaatacaggcaaagaggaacatacagtataatttatccgtacaagtag

SEQ ID NO: 13834 - DNA, 120 bp, synthetic construct
  source 1..120: mol_type = other DNA
caagtggggctacaagtgaatcaaacctttggaataatgatttgcagcaaagtaaaccaattatgagtgtttaggactggcccacctgaaagttgatatgttgtaatctgcagtttttta

SEQ ID NO: 13835 - DNA, 120 bp, synthetic construct
  source 1..120: mol_type = other DNA
aagtagggatctcacttaatggccatgcgactctttcctatagagtaaaaggagggattgcttatataatggatctaaagactggctctagagtcaggttatatgcagaagaataagcca

SEQ ID NO: 13836 - DNA, 120 bp, synthetic construct
  source 1..120: mol_type = other DNA
gtgtttacaaaatgtaaactagtctctggacacttttaatgaatgccctaaattgccaccttttctcccaggtttttgggatatgattatcataatgcaatttcagagggtgtttttgcc

SEQ ID NO: 13837 - DNA, 120 bp, synthetic construct
  source 1..120: mol_type = other DNA
ttgtacaggttatttcatcaccccagtactaagcttcgttacccaacaattattttttttctgctcctgtccctcctgccaccctccaccctcaagtaggccccagtgtctgttgttccc

SEQ ID NO: 13838 - DNA, 120 bp, synthetic construct
  source 1..120: mol_type = other DNA
ccccattgcttgtttttgtcagctttgtcgaagatcagagggtcgtaggtatggggccttatttttgtgccctatattctgttccattggtctatgtgactgtttttgtatgagtaccat

SEQ ID NO: 13839 - DNA, 120 bp, synthetic construct
  source 1..120: mol_type = other DNA
tgaagaagagtggtaggagagagcatcattttcttgtgctggttttcaagggaaatgcttccagattttgccccatcagtatgacgttggctgtgggtttatcacagatggctcttatta

SEQ ID NO: 13840 - DNA, 120 bp, synthetic construct
  source 1..120: mol_type = other DNA
ccaggctttttttggtcagtagggtacttgttactgaccatttcagtccatttcagagctcgttattggtctttgactttacattttcaatttagcaggtcctcaccattcagaacacta

SEQ ID NO: 13841 - DNA, 120 bp, synthetic construct
  source 1..120: mol_type = other DNA
aacagcctcccaggcatctgagactacaaggaagagctgccacacttggctagaattcattttttgaagccagagatattgaattcctgagacattacaggtgaagcccattgcatttta

SEQ ID NO: 13842 - DNA, 120 bp, synthetic construct
  source 1..120: mol_type = other DNA
agttacaggcaaaaccaataatcaatacatgtaccctatacattggttcagttcagaagagtgagacaactcgaaatggggggcatttccactcgaactgaggggcagatcataggcaga

SEQ ID NO: 13843 - DNA, 120 bp, synthetic construct
  source 1..120: mol_type = other DNA
acaggtgtgtctgggttaagataaggagttatggatttcatgcgcgtccgtgtgaagagaccaccaaacaggctttgtgtgagcaataaagctgtttatttcacctgggtgcaggtgggc

SEQ ID NO: 13844 - DNA, 120 bp, synthetic construct
  source 1..120: mol_type = other DNA
ttaaaagacctttagtctgttctacttttcctgaagatggaggaccgtaagggatataaaggtttcactgaatactaggagcctgaaaaactgcttggctgatttgactaataaaagctt

SEQ ID NO: 13845 - DNA, 120 bp, synthetic construct
  source 1..120: mol_type = other DNA
caaagagtgagtacagctgaaggagccggggagcagaaagtatatgcgtcagatatgaggaagaaaatagattttggaagttatgagaaatgtagagagtaagttgagcatagtttgtga

SEQ ID NO: 13846 - DNA, 120 bp, synthetic construct
  source 1..120: mol_type = other DNA
aagaaggtaatgtggagtgagtagccttggtattgattaagatggggacagacttatccttcactgttagagttacccgaagctcggcatccatgatggtctagggggcttccgaggcga

SEQ ID NO: 13847 - DNA, 120 bp, synthetic construct
  source 1..120: mol_type = other DNA
gagtagaaagactcagtgatgcttggggttgggactgaggggacaggtgggagggaaaggaggaagatttgggatgagttgcattgggaacagagactatagagggactgatgtgtaaaa

SEQ ID NO: 13848 - DNA, 120 bp, synthetic construct
  source 1..120: mol_type = other DNA
acagagatacaaggtcagggcatggaaataagggattggggtgcagagatataagaggttagggcacagaaataatggattggggtacagcgatataagaggttggggcacggaaataag

SEQ ID NO: 13849 - DNA, 120 bp, synthetic construct
  source 1..120: mol_type = other DNA
cttctgagagtctgaaggctattctaaactaattacctcttgaaggcccctatctataaataccattacattaagggtaaggatttcaacatgaaagttttatcgggcagggctgaatgc

SEQ ID NO: 13850 - DNA, 120 bp, synthetic construct
  source 1..120: mol_type = other DNA
tcctgctgctttaccccacatggagtcataatcacactattgtgtcacagtagattctattttattacctgtaagagagtatgacagtccccctccttcaaaggcacacaaggtaaccat

SEQ ID NO: 13851 - DNA, 120 bp, synthetic construct
  source 1..120: mol_type = other DNA
gatgatctgtcactgtctccaatcgcccccaggtgggactgtccagttacagggaacacacttcagagtttctaccaattctacattatggtgagttgtataattattttattatatatt

SEQ ID NO: 13852 - DNA, 120 bp, synthetic construct
  source 1..120: mol_type = other DNA
tccagtcccaaatctttattaagttatttaaaaggtttagaacagatcatgatagttttgcccaaacctctatctttctggactgagtatacacatctcacgaaggaaatacacgtattt

SEQ ID NO: 13853 - DNA, 120 bp, synthetic construct
  source 1..120: mol_type = other DNA
attacatcctcagcatctaaaggaggttaaaaaataaatgaaaaatgagacccttgtcctctaagaaccaatttgatatttactgtcgggggactcaaccttgtattactgctagagaca

SEQ ID NO: 13854 - DNA, 120 bp, synthetic construct
  source 1..120: mol_type = other DNA
aggtatatatgactttctgagaaatattccatcatttcagaagccacaatggctcaaagagcacttcggtaataaaatgaggccatcttatgagtagggcttaacaaaacttaaccatgg

SEQ ID NO: 13855 - DNA, 120 bp, synthetic construct
  source 1..120: mol_type = other DNA
ttgtagaggaaattgattccttctcaaattccagatgtagctgaaaactgaaatcatccaagggatggcttctggtcataattaggttagctggattaaaaaatatttgcatgtagaaaa

SEQ ID NO: 13856 - DNA, 120 bp, synthetic construct
  source 1..120: mol_type = other DNA
tgtgaaaggatcaaaccccattctctagcaagaaggcctgatatttgaaacgaaaagcaaacaagcaagtgaaaaaaaaaaattctagaacatggctccacccagaatatgcctctgtgg

SEQ ID NO: 13857 - DNA, 120 bp, synthetic construct
  source 1..120: mol_type = other DNA
cctctaaatgttcaaatgggaggaagagttacacatctcttcttttaaatcaaaagctacaatgattaagcttagtgaggaagccatgttcaaagctgagctaggccaaaagctaggcct

SEQ ID NO: 13858 - DNA, 120 bp, synthetic construct; identical to SEQ ID NO: 6391
  source 1..120: mol_type = other DNA

SEQ ID NO: 13859 - DNA, 120 bp, synthetic construct
  source 1..120: mol_type = other DNA
ccacagccaccccaacctttagcaaccaccaccatgattggtcagcagacatcaacatcaaggcaagacactttaccagcaaaaagattatgacttgctgaaggctttgatgtttgttag

SEQ ID NO: 13860 - DNA, 120 bp, synthetic construct
  source 1..120: mol_type = other DNA
ccattactcatcccttctagttgtatactccagcaaacccaaaacctgtgtgaatcctgggactcacagtgatctctcagttcttatgaatttgagtattctgcatcttaaatctgaaat

SEQ ID NO: 13861 - DNA, 120 bp, synthetic construct
  source 1..120: mol_type = other DNA
tcctgaaagatttctgtaaggtggttatttggagcacaaatgtatttccccattttgattaaagaatgtatgagggttggttatggtctcagtatcaaaacctttttaatattatgcaac

SEQ ID NO: 13862 - DNA, 120 bp, synthetic construct
  source 1..120: mol_type = other DNA
tgagggaacagaaatagtggtagctgttctcagtttttctgggccctgaagttttgttctggtagagacacacggggatatgaagtgcattcagttttgtgtccaaaaatattgaccgct

SEQ ID NO: 13863 - DNA, 120 bp, synthetic construct
  source 1..120: mol_type = other DNA
atcataacagggactatattttttaacactaaatcgaatataatggagaatcaatggtgatctttgccatggctccagttactccacatgccccattggtgctaattggtaaaaggagtt

SEQ ID NO: 13864 - DNA, 120 bp, synthetic construct
  source 1..120: mol_type = other DNA
acacagagggaagggttgtaggggggaacgagggataaaagactacatattgggtacagtgtaccctgctcaggtgatgagttcaccaaaatctcaaaaacaactactaaagaacttatc

SEQ ID NO: 13865 - DNA, 120 bp, synthetic construct
  source 1..120: mol_type = other DNA
gtatttatttttacttttttctgtgtacacataatctaaactaagatcacagacacacaattagaactagaaatgaacaggctgatttagtcttagtcttatctcagaggccacaggaaa

SEQ ID NO: 13866 - DNA, 120 bp, synthetic construct
  source 1..120: mol_type = other DNA
tactgaatttgtccccttttatcatttgacaaatgaatattgagtgcttaccgcgacagtgttggacacagaaaaacaagatctgatccttccctcaagggtcttagagactgctgaggc

SEQ ID NO: 13867 - DNA, 120 bp, synthetic construct
  source 1..120: mol_type = other DNA
attgacaaatatgccaaacacgtaaacactcacacatatctcattgtgtgcacaagcagatgtgatttgcatatcattgttgactagatgcatgtagatatatttgtttacaaaataaga

SEQ ID NO: 13868 - DNA, 120 bp, synthetic construct
  source 1..120: mol_type = other DNA
cctattaagcctcctattttgtttttgatggttagcatcactgagtaaaattttcaagtttaagtttcagtggcatgggcagagactggcctcattatctctgtgaaagaggaagccaag

SEQ ID NO: 13869 - DNA, 120 bp, synthetic construct
  source 1..120: mol_type = other DNA
actgaaagaatcttgagggttctcttcttacaaaacaatttgaaaacactgcaaagctttcagacacagtcacaagtggttctcaaaaagaaactgaattcaattacagtactggattat

SEQ ID NO: 13870 - DNA, 120 bp, synthetic construct
  source 1..120: mol_type = other DNA
aagcccagcccagacttatactttcaaaatagcttttactatgaagaagtgccaataaggtgtcaactatactccaaaatttactaactgcaagtgaaaataatgatattgaacttagga

SEQ ID NO: 13871 - DNA, 120 bp, synthetic construct
  source 1..120: mol_type = other DNA
atgaagattaacatattgaatatggttgttaaaactgggatacgttttctggggaaaatttatcattatgtcaaatgcttaaaatcatatgtctttgaatcagcattttaaagttttaca

SEQ ID NO: 13872 - DNA, 120 bp, synthetic construct
  source 1..120: mol_type = other DNA
attggttcttaaagacttcactcacgtatctcctctaaatagaatttattcctgagaatgttcccacttttgtccctagcctatgggctggtatcctacttatgtgctatcatgatattg

SEQ ID NO: 13873 - DNA, 120 bp, synthetic construct
  source 1..120: mol_type = other DNA
ttaagtttatttgagcaccaaagtgggactcctagagtctaaatacatctaggagagcagatcagatcctaaaaatgtgccacagatttgagaggccccaaagtagaagacccaattaag

SEQ ID NO: 13874 - DNA, 120 bp, synthetic construct
  source 1..120: mol_type = other DNA
atattcttgatacacagagctgatatttagtcagtaagcacaagcacagaatcaaggctggcattccatctaattagtttggtggagatttttggatcagtcagaacctttgctttatct

SEQ ID NO: 13875 - DNA, 120 bp, synthetic construct
  source 1..120: mol_type = other DNA
aaattatctgggcatggtggtggcgggcgcctgtaatcccagctactcgggaggctgagtaaggagaatcacttgtgttaaatcttaacaggagagatttaggagaggacatcttttaag

SEQ ID NO: 13876 - DNA, 120 bp, synthetic construct
  source 1..120: mol_type = other DNA
ctcaattattcagagcttagttgaaactttttttttaaattaagcatggagacagcttgcagtgccttgtagagagaaatgtgttcagaagtgtcaaacctaatacaagacaccagatga

SEQ ID NO: 13877 - DNA, 120 bp, synthetic construct
  source 1..120: mol_type = other DNA
catgttaaggtttgggaggcatggctgtaggtatgtataaatcacttcctgctttaaactccccaccatatgattaacataagaatgttaccgtgggaaagtgcttcattaaaaaaaaaa

SEQ ID NO: 13878 - DNA, 120 bp, synthetic construct
  source 1..120: mol_type = other DNA
gacaaaagataataaataatggcaaggacatggagaagggaactctcacacactgttggtgggaatgtaaattagtgcagccattatgaaaaatagtatggggcttcctcaaaaaactga

SEQ ID NO: 13879 - DNA, 120 bp, synthetic construct
  source 1..120: mol_type = other DNA
ctagcactttggtatgccgaggcaggaggatcacttgaggctaggaatttgagaccagccttggcaacacagtaagatcctgtctctacaaaaaaaattagctgggtgtcgtggcatgtg

SEQ ID NO: 13880 - DNA, 120 bp, synthetic construct
  source 1..120: mol_type = other DNA
gctgacatgactatgggtttcatgaaattaatctctgacctgattttttttaaccacagcagtgtcagctttctattaataggctcttatccagctgaaaatgtacatagcttcctgatg

SEQ ID NO: 13881 - DNA, 120 bp, synthetic construct
  source 1..120: mol_type = other DNA
agtccaacatgggtctcaaggagctaaaatcaaagtgtcttcagggctacattcctttctggggcctctagagagaatccatctccttgtactttctaccttctacaggttgccacataa

SEQ ID NO: 13882 - DNA, 120 bp, synthetic construct
  source 1..120: mol_type = other DNA
ataataaaagattccaaagtttagtggcctaaaacaactgtaatcatttattttgcccagaaatttgtaatttggttagagttcagcaggtatggcctgcctctgctccacagttgtcac

SEQ ID NO: 13883 - DNA, 120 bp, synthetic construct
  source 1..120: mol_type = other DNA
gataaaaaaacagaaccctgcaggtccagagaaatagctgattatggggaaaatttcatgagtttcagtgtgcacatgttgggctcttgacctccacacacttttgctctcttccaggca

SEQ ID NO: 13884 - DNA, 120 bp, synthetic construct
  source 1..120: mol_type = other DNA
ctccaagtaaaatgcttggcaatgaggacatgacattcaatcaatattagttgaatgcctcactctacatgtcaatttttacattgctgcccatacagtctcaaaaaggggttgctatac

SEQ ID NO: 13885 - DNA, 120 bp, synthetic construct
  source 1..120: mol_type = other DNA
caaaaaagctggttccctggagaggaaagttcaaagaaagaggagccttaattgggaagcgacaccaaagtgagagtcaaagtatggatagatgaatatgggcttcccatgtgctggaaa

SEQ ID NO: 13886 - DNA, 120 bp, synthetic construct
  source 1..120: mol_type = other DNA
agtaaaagaaatgtaatccaccttgaggtttgctatttagcttgtgtaaaactctatcgggcaattttgcaaagcactctctttcactttacccatcagaactgcttccacctgtgcctc

SEQ ID NO: 13887 - DNA, 120 bp, synthetic construct
  source 1..120: mol_type = other DNA
ggagtcaaaattatggtgagaggtgctactgggtactaattattttgcaatctttagggaagatcgttgcaacaaatttttccaccctgaatgccaataaagtgtgtctccttcagcttg

SEQ ID NO: 13888 - DNA, 120 bp, synthetic construct
  source 1..120: mol_type = other DNA
acagcaactcttgacaagaccactggcctgaccactagttctcatagtatttagaacaactctgccaacagatttggttttactgtagcaactgattcttctttgtaagccagaagaaac

SEQ ID NO: 13889 - DNA, 120 bp, synthetic construct
  source 1..120: mol_type = other DNA
cagcaagtttcaaagtgaaataatcataagatttatgaacaataatatgacattctttacatcaaacaccataaggcacaccttggagataccatgcaataaagcaaataattgcaagaa

SEQ ID NO: 13890 - DNA, 120 bp, synthetic construct
  source 1..120: mol_type = other DNA
tgcagtgagccaagactgtgccagtgcatgccgaactagacactggctcaaaagaaaaaaaaacaacaacaaaaaagtcactcttcatccattcaagtttaatcatgagattacagcatc

SEQ ID NO: 13891 - DNA, 120 bp, synthetic construct
  source 1..120: mol_type = other DNA
tatcaccatcagagctcttgggtgaccaggtgcattgtcaataagcagaaatactttggaagaattttttttttgagtagtaaatctcaacagtgggcttaaaatattcagtaaactatg

SEQ ID NO: 13892 - DNA, 120 bp, synthetic construct
  source 1..120: mol_type = other DNA
gttgtgtctcggggaacagaaaagcctgaggagaaggagagatagtgggaatgtctagttgttggagcagtcagaacacacatatttattgatgaaattcaccatcttatataggggcag

SEQ ID NO: 13893 - DNA, 120 bp, synthetic construct
  source 1..120: mol_type = other DNA
ctttcagattttacagtacgctttttcccctagtcaataatatataggttaaatcagaataaccatgggcaaaaataatagctccagcagtgaatgtcagagaagtgccacttcatatct

SEQ ID NO: 13894 - DNA, 120 bp, synthetic construct
  source 1..120: mol_type = other DNA
ttctctgtaaaaaaccaagcctgtcattcgtattatccagggcaggtgggaactggagacagcaaaaacttaaccttgacaaatcttcctagaactttaagtaaaatggagcctgaactc

SEQ ID NO: 13895 - DNA, 120 bp, synthetic construct
  source 1..120: mol_type = other DNA
tttttaaaaattcctctggccatattatttttaattaaccaagttcatgacccttcttttgaggccccatcctccccagaccaagagtggttgagtagtggagatagtgcctgaacccca

SEQ ID NO: 13896 - DNA, 120 bp, synthetic construct
  source 1..120: mol_type = other DNA
caatcctaccccacccacaccccaactactttcttcttgggcatattatttagaagcaaatttcaaatatcacatcacctccttcataaatatttgaatgtgtatctccaaataataagt

SEQ ID NO: 13897 - DNA, 120 bp, synthetic construct
  source 1..120: mol_type = other DNA
tttgatgaggtaaatgcagaaacataggttggatcgcctcataatttcaccatctgtcatgctagatgatataacttgtttgcctagttgttaagtagtctggctgtgaattcttgattt

SEQ ID NO: 13898 - DNA, 120 bp, synthetic construct
  source 1..120: mol_type = other DNA
ctgggatgagccatgggaggcatgaaatttatcctcagatctctcctaatttcccatgaccatgagacagtcatataatctgtatgagccttgtcttcccaaaacttgagatgagaacag

SEQ ID NO: 13899 - DNA, 120 bp, synthetic construct
  source 1..120: mol_type = other DNA
aagactatttcaggctcagaaaatagcctgtaccaaggcactgtacaaaggtataccttttataaaagactggaggaagacaattgtagctagggcacaaaaggtgagaattgcaaagat

SEQ ID NO: 13900 - DNA, 120 bp, synthetic construct
  source 1..120: mol_type = other DNA
cacacacacacacaaacaagatttaaaggggctgggtttaaatgttggtaatgctggtcttgagcaagtcacataacattttagttacagttcctttttctgccaaactgagataataat

SEQ ID NO: 13901 - DNA, 120 bp, synthetic construct
  source 1..120: mol_type = other DNA
tgaccatagctatttatagaggtgtgagtaacaactgttaactagtggggcctttggtatagcagagaacagtttccacatgcaaaatttaagagaaatctctttttgctcccccaatat

SEQ ID NO: 13902 - DNA, 120 bp, synthetic construct
  source 1..120: mol_type = other DNA
cacaagcaactgccttgacattttagaacattctaagaaggacagcaaactcttttgattccaattcccattcactaagattgtaccattttatcctgcagttcatatttatggcatctg

SEQ ID NO: 13903 - DNA, 120 bp, synthetic construct
  source 1..120: mol_type = other DNA
aacagatacacaaacatcttcagactggatacatttttccaatacttgttgcgggtcggttttaaagcatgtaccctggagagtgaaggtgcagcagataggtatactgatttgagtcac

SEQ ID NO: 13904 - DNA, 120 bp, synthetic construct
  source 1..120: mol_type = other DNA
gtcactgtctgcccacctgccttagtaatgctggtcctaaaactcatctccaaggacatctttcacaacttctccatctaagaaatgaccttgaccttcctacctttgggtttgtttttt

SEQ ID NO: 13905 - DNA, 120 bp, synthetic construct
  source 1..120: mol_type = other DNA
ggagcttctagcacaggcctctctccatgctgcctcctttcttccctttatttttataagctgtccgtttctaaaatgttttttcttttgcacttgggcctcttttcctttccaattcag

SEQ ID NO: 13906 - DNA, 120 bp, synthetic construct
  source 1..120: mol_type = other DNA
ctaatggcctgggaaatgatggtcacatacactttgcagaaactctttggaccttcagagcctttctgctgcagtgtcacatataagctgacatgaacaagaggcgtatgcacacaaagg

SEQ ID NO: 13907 - DNA, 120 bp, synthetic construct
  source 1..120: mol_type = other DNA
tggaaacaggaaagctttgaaacgtgcattcacacctcctgttctgtgccaacaatatgcaagttaacactgattgaccatcattccttagctgtgttcatgatgagtctcattgtagtc

SEQ ID NO: 13908 - DNA, 120 bp, synthetic construct
  source 1..120: mol_type = other DNA
tctctgttttataatactggactcaagagatctcatcaagagaaacctaaatcacaactagggatagtaggtggcaatcttaagtgtgaacacttcctgtggccatatggagggactcaa

SEQ ID NO: 13909 - DNA, 120 bp, synthetic construct
  source 1..120: mol_type = other DNA
ttaaaaagcagactacaagactgtgtgaatagtacaatcaactatgcgaacatatacatatacaaaacaccaagtgaaaatacgccactatccagttatcatttcagtccagtggtaccg

SEQ ID NO: 13910 - DNA, 120 bp, synthetic construct
  source 1..120: mol_type = other DNA
attccccaccactcactcttcctcctcctttggatggaacaagagcaaccctagctccaggttcaggagcaaatcctgactgggttgaggcaatgactaggctagggatgggcacaggac

SEQ ID NO: 13911 - DNA, 120 bp, synthetic construct
  source 1..120: mol_type = other DNA
ttctccccctttctgttcccagtcattacacctccaaaataagtgatagctgctttctagagaaagtcccacacctaacatccttctaaaaaagggagtctgaatctgagagctgagagg

SEQ ID NO: 13912 - DNA, 120 bp, synthetic construct
  source 1..120: mol_type = other DNA
ttccaaatagagctcgttgacctccccaagaaccaacagctgcctgttcaagaactccatctgctgctggaccgactcactgtttgagagctaaccaaaaaacatgagcaaagtgaaaaa

SEQ ID NO: 13913 - DNA, 120 bp, synthetic construct
  source 1..120: mol_type = other DNA
cacttcctgttgggaacccatgacacagacactcaagtaatctatttctttaacctgtctgaaggaagaatgttagcaaatggtgtttcagcagattcaggtctgcctcatttcttctta

SEQ ID NO: 13914 - DNA, 120 bp, synthetic construct
  source 1..120: mol_type = other DNA
ctctgtcctaagtaagattcacctgccatgaagaatttctgccatgatttcagagagaaaagcattcagcttagtaaagctgaacaagtcaaggacacccagggaaactgactgcctccc

SEQ ID NO: 13915 - DNA, 120 bp, synthetic construct
  source 1..120: mol_type = other DNA
ataaaatcatcttctgacccttcatcatcatggccagttacatgcaaacatacacacacaaaatcacttgtccccacggtttctgagaattatgagggaattccgaggtgtcaccattca

SEQ ID NO: 13916 - DNA, 120 bp, synthetic construct
  source 1..120: mol_type = other DNA
gtatctggacttttatttgcagcaaagttagatcacttccttgtggtcaaaatctgcaatggcataagaatgtttcaaactccaggtccacagagagttagaggagaagcctacactgga

SEQ ID NO: 13917 - DNA, 120 bp, synthetic construct
  source 1..120: mol_type = other DNA
cagctgcctcaaggtgggagtgtgaagaatgattcttgttcctctcttacactttctgtacttcacaataaaatggaccatttaacacagaagagagtgccccagtcccttacttgttca

SEQ ID NO: 13918 - DNA, 120 bp, synthetic construct
  source 1..120: mol_type = other DNA
aagagaggaaacaaaagaaatggcagtcggtattccacctgggaaagactaggcagtttgggtggcatgctgccacatgccagtgtcactcagagagaggagaaaaagtggcatccggct

SEQ ID NO: 13919 - DNA, 120 bp, synthetic construct
  source 1..120: mol_type = other DNA
cttgcagaatccattctctcttcctgaaaagataagtatcatttatatcacaagacgaaaaatgttgcacatgttctcgagcatattgtaaagtagtttaaaggtcagccgagtgcagtg

SEQ ID NO: 13920 - DNA, 120 bp, synthetic construct
  source 1..120: mol_type = other DNA
ctctttaatatatggcttcatgaaagacagctggattctcatatctacctctacattcagtctgttgcaatatgttattttgactgaagtgtataaagaaaatctggggccccacagata

SEQ ID NO: 13921 - DNA, 120 bp, synthetic construct
  source 1..120: mol_type = other DNA
cactgcgcccagcctgctttgtactttgaatgtactttttacctatgcatgattctgcaacgtatcatacattggacactctgaaaatattggctcctcaagctattcaaatattccaaa

SEQ ID NO: 13922 - DNA, 120 bp, synthetic construct
  source 1..120: mol_type = other DNA
attgtttttaatggagagaagatgtcagggaagaatgcaaggcctcttgggataggacacttcaatgcctgccttgattcaggctaagttgccaccatttcaccccccgtcgtatttgtg

SEQ ID NO: 13923 - DNA, 120 bp, synthetic construct
  source 1..120: mol_type = other DNA
cagcaagtggtcccttagatctaaaagagagctcctcctgccattaaaggcaggccaaaaccaactaatcaaatccaacctaagacatacataccagttgtaccaaagactttactgtaa

SEQ ID NO: 13924 - DNA, 120 bp, synthetic construct
  source 1..120: mol_type = other DNA
tgccctggcatatttaacaacatcagccgagacgtggagtaaggggtagaagtagcacaccctaaaatggaagagaagaacacagggggttagtgtgtggttttaggttattctggttaa

SEQ ID NO: 13925 - DNA, 120 bp, synthetic construct
  source 1..120: mol_type = other DNA
acaacatcatgagtttctaatctcttccacctgtaaaatgcaatgaaagtcaagaaatgcaaactgtaatcaactgaattaaatacttcagagtgtcaactcagtgccagccacggaact

SEQ ID NO: 13926 - DNA, 120 bp, synthetic construct
  source 1..120: mol_type = other DNA
aagttttgacaaaagtcccgatcataataaagaacatgtccatcaccccaaaagttcctttgtgccctttgtggtgagtctcttcccccacttcttgcaactatcgatctgctaaaagca

SEQ ID NO: 13927 - DNA, 120 bp, synthetic construct
  source 1..120: mol_type = other DNA
ctgtacccggccaagaatatttttaaaactgtctaaagattcctgttatgtgatccatggtttcacttctaagaatttatcctatagaaacagacatacaacaatgttcagcacagcaca

SEQ ID NO: 13928 - DNA, 120 bp, synthetic construct
  source 1..120: mol_type = other DNA
cctgggaggttgaggctgccatgagccatgctgtaccactgcactccagcctgggcaacagagcaagaccctgtctcaggaagaaaaaaaaaaaatcatgctttccacgtgcctgtactc

SEQ ID NO: 13929 - DNA, 120 bp, synthetic construct
  source 1..120: mol_type = other DNA
tcagatgtatataaaatagaagtacagcacacatctaacggcatctgagatccaatgaaatatggtagtttaaaaagtcaatacggtactaaaggttcctcccatccctccccactgcaa

SEQ ID NO: 13930 - DNA, 120 bp, synthetic construct
  source 1..120: mol_type = other DNA
ctctgaaaggttaatccctggtactataaacttttacaatattgagacctggtggcattcttttttattgatttagctgggcaccaggtaagccccttcaatctggaaactcatatcctt

SEQ ID NO: 13931 - DNA, 120 bp, synthetic construct
  source 1..120: mol_type = other DNA
atattttcttctgctctatcattatggttttgttctagctctcttttctcctcttaatgttggtgtctgtctttactgttaaaaccttcttccaaagccaaacaatctgcccagccaagg

SEQ ID NO: 13932 - DNA, 120 bp, synthetic construct
  source 1..120: mol_type = other DNA
ggtactgtactaaagactgcagtaactgtaacaacagtaggtatttgtgtatctagacatatctgaacctaggaaaggtacggtaaagatgtggtggtataatctcgcagaaccactatc

SEQ ID NO: 13933 - DNA, 120 bp, synthetic construct
  source 1..120: mol_type = other DNA
actatctttttaatgagggacagagccaggtgaccctggcctgtataacttgtctgtacttagcttgtcttaactacatactgatgaaattcctactctccctcctctgtctgatcagca

SEQ ID NO: 13934 - DNA, 120 bp, synthetic construct
  source 1..120: mol_type = other DNA
aaaggacctcagggactccaaatacttaatataggactccctgaagtcctttctccattttgcaaagccagatttatatatatgctaaattgtttttctgcagtccccttgtttttagcc

SEQ ID NO: 13935 - DNA, 120 bp, synthetic construct
  source 1..120: mol_type = other DNA
ttcttcaaaagtctccaggttttctttcatactgtaatgagaacgcaaaaaggagacgaagttgcaagggtacattccataaaggcgatgaaagagtgcgtacacactggcatggagatg

SEQ ID NO: 13936 - DNA, 120 bp, synthetic construct
  source 1..120: mol_type = other DNA
cactgggataacccaaagattccaaatttcacatgcttacagcttctgatccctttgatagagctctgctacctgccgataggggaaaaaaaaaaaccactgcatttgaagctggagtgc

SEQ ID NO: 13937 - DNA, 120 bp, synthetic construct
  source 1..120: mol_type = other DNA
tcaaacaggaaacgtctgtcaggcactggcaccaggatcggcattgtacagtacatgaagaggctctaaacactgagagaatcacaaatcacaagttgactcacgtactcatttccctat

SEQ ID NO: 13938 - DNA, 120 bp, synthetic construct
  source 1..120: mol_type = other DNA
cggaagatatccagtaagaataatatattggtaggagaattgagaatatatgagactatataatgattctcagcagaaagaactagccctgatttcattttcctaacagtctaactgaag

SEQ ID NO: 13939 - DNA, 120 bp, synthetic construct
  source 1..120: mol_type = other DNA
ttgagacattttagtaaagaaggcaaaagaggtgcttgagagagcttatgcttccaagatggctgcagtcttatgacatgacccagtaacgagaggatggataaacgagtggcggctttg

SEQ ID NO: 13940 - DNA, 120 bp, synthetic construct
  source 1..120: mol_type = other DNA
acacaatgagacctcacctctttagaaaacaaaacaaaacaagatgtactgtaaaaggcatgcaatacaaggtcttcaaatcctggggaagttgctctcatatatacacttaagacttac

SEQ ID NO: 13941 - DNA, 120 bp, synthetic construct
  source 1..120: mol_type = other DNA
taatccaccaaggtgtttacaagcatagggccacggtctaaatcaagaaaagggcaatggatgatacttattccccttaacatcctaaatttaccttacacagcttcctgtcacaaaatc

SEQ ID NO: 13942 - DNA, 120 bp, synthetic construct
  source 1..120: mol_type = other DNA
gatttacagttaaagcaacatctggaatttgctttaaaatatttggagggtgggagagtcagggaggaaagaatttgaaactggattcatggggttcactgcatgattcttacttcatgt

SEQ ID NO: 13943 - DNA, 120 bp, synthetic construct
  source 1..120: mol_type = other DNA
tagtatagctggttaggtcacaagtctgttaagtccaacatctagcataaactggggatcatttctctgttttagcatatacctctcatctgagacatctaattgcacacccaaatacca

SEQ ID NO: 13944 - DNA, 120 bp, synthetic construct
  source 1..120: mol_type = other DNA
tgcatcgaaaccacctgggatacttgctagaaatgcaatacctgggccccttccaaaactgtattttgggctcaggaatctatattttaataagcactccaggtaattcttaaagtgaga

SEQ ID NO: 13945 - DNA, 120 bp, synthetic construct
  source 1..120: mol_type = other DNA
aatcacaaatgattctcaattagtgacaaagaatgttgttcataaatttaaaagtatcttgtccctaagtttggttttgtttcaataaaattgttacttacctactatttgtctagggag

SEQ ID NO: 13946 - DNA, 120 bp, synthetic construct
  source 1..120: mol_type = other DNA
atacaggagaagttaaaagacagcaactgggtgaatggatttctgtatcgtacatgctaaagcaatattccatttagtttaatattatctttagtggccacatacagtgcacagtacagt

SEQ ID NO: 13947 - DNA, 120 bp, synthetic construct
  source 1..120: mol_type = other DNA
atttgatccaatgatacttatgatctcaaaaaacatggaaagcagggatctgccaaagttcagtttcagtctctatactcagccaaaatctggtggctgtctggctttggctttggtgtt

SEQ ID NO: 13948 - DNA, 120 bp, synthetic construct
  source 1..120: mol_type = other DNA
aaaatccctaccttattttacaattcctacgacagaggtgaggcagacagtgacagaatacactaaacagcaaccactgagcctcggcatgagtcacagagctgtccatgtacaaagaca

SEQ ID NO: 13949 - DNA, 120 bp, synthetic construct
  source 1..120: mol_type = other DNA
tggggaaacaccaaaagcgtggctgtgaagaagaaagtaacgcatataatgcgctttgcacagtgtcaggcactgaatacaagcaactaataatcatcagtaatgtgactaatcccttca

SEQ ID NO: 13950 - DNA, 120 bp, synthetic construct
  source 1..120: mol_type = other DNA
taccacaacccaattaaataagcttgattgattactgaacatgcctccttcactaggagttatatccagggagagaccgcagcttactcagtactgtatttcaagcagctaccatgctgt

SEQ ID NO: 13951 - DNA, 120 bp, synthetic construct
  source 1..120: mol_type = other DNA
cttgaaccaagttcttaaatgtacgaccatggccaaagtcaaactagtggactgaggaactctctaacaattaaaatcgcttgttccagatgacagagtaattatatttccacgtggaac

SEQ ID NO: 13952 - DNA, 120 bp, synthetic construct
  source 1..120: mol_type = other DNA
aggcaagggtaaaattaggatctacgctagatgagatcctgtagactgcccagccacaacccatcctacataaaggccctactctaggaaagcagagtggttttgttgttggtggttggt

SEQ ID NO: 13953 - DNA, 120 bp, synthetic construct
  source 1..120: mol_type = other DNA
tctgttttcactgttcatcttaactaatatcattctttaggtgtttacagacggatggcttatatgcctaggattacacatgaactctagcctaacagccatggacagctgtcattagca

SEQ ID NO: 13954 - DNA, 120 bp, synthetic construct
  source 1..120: mol_type = other DNA
aggggccttgatggatggtttgctaaagcttatagcctatcccaaaggtgaagaatcttctagtaacttaagtgtaaggccagagcttaattttggtaaggcgtatctcttcaataaata

SEQ ID NO: 13955 - DNA, 120 bp, synthetic construct
  source 1..120: mol_type = other DNA
atatccaaaatcccatgtctgtatgaatttttttggtgatgatgggacataaagggtagaagagaaatttggtccatagcttcccacagattttcagagggcaactgagtccacacacct

SEQ ID NO: 13956 - DNA, 120 bp, synthetic construct
  source 1..120: mol_type = other DNA
acaaactcagtgtttgagtgtatactacatatacacatttcaagcaaacagccacagattttaacgctattaagtacacttttctttcacgccttcagctacttaaatgacaaaaccaat

SEQ ID NO: 13957 - DNA, 120 bp, synthetic construct
  source 1..120: mol_type = other DNA
agtaagactgttaagtttcatctcacgaatgaaaccaggcatgcacagaaggcatcatattacaccacaacagtagcagtatcagtttttactcttaacccagtgaggaagaggacaact

SEQ ID NO: 13958 - DNA, 120 bp, synthetic construct
  source 1..120: mol_type = other DNA
ccaagtgcatccccccacttcaacattaaacagacacacgtgcataaaccttggctaaatgataaattttaatcacttacaggccagctttgatcaaataacagataaatttaagagtca

SEQ ID NO: 13959 - DNA, 120 bp, synthetic construct
  source 1..120: mol_type = other DNA
ctctctttaagttctgggaccagccccaccctcgcgacccttcccctcccgccaagcgtctctaccctgccctccgcacctagcgtgaacctgtcaccccaccaagtgagggactgacga

SEQ ID NO: 13960 - DNA, 120 bp, synthetic construct
  source 1..120: mol_type = other DNA
cacacctactcatgacatctaggggaaaccagccctaataggagacagcttgaaaatcagaacgccttattccgtttcctgctgaaacaaggctttaagtcctccaagcctcagtttctt

SEQ ID NO: 13961 - DNA, 120 bp, synthetic construct
  source 1..120: mol_type = other DNA
tattttggcccctatccaccagccccaaaccctcctgggcccttgagcagtgaacaacctttataaccatacgtctagagccacgaaggcttaggagggaggtgaaaattgaactgatga

SEQ ID NO: 13962 - DNA, 120 bp, synthetic construct
  source 1..120: mol_type = other DNA
accggaagtgcgggtcgcgcttccggcggcgtcccggggccaggggggtgcgcctttctccgcgtcggggcggcccggagcgcggtggcgcggcgcggggtaagtggcggtccccacggg

SEQ ID NO: 13963 - DNA, 120 bp, synthetic construct
  source 1..120: mol_type = other DNA
atcttggtgacctggttcaggcacacttgagttactattcagatgttgatgaaagaaagcccatcttatagatgaggcctgagtatcatcatcttcacaggtaaggatatgtccaggtgt

SEQ ID NO: 13964 - DNA, 120 bp, synthetic construct
  source 1..120: mol_type = other DNA
ctgggttcaagggattctcctgcctcactctcccgagtagctgggattatagacgcccaccaccacgcccagcaaattttttgtatttttagtagagacagggtttcatcatgttgggca

SEQ ID NO: 13965 - DNA, 120 bp, synthetic construct
  source 1..120: mol_type = other DNA
agtttgcactgttttaggggaatttagctttcatcgtagtgatggggaagctactggaaatgccccgaatacaaccttgagggaccaatcaagcgtggaaatggggagcaaagggattag

SEQ ID NO: 13966 - DNA, 120 bp, synthetic construct
  source 1..120: mol_type = other DNA
ggtattgggcgacctcacggacatagaaatatttattttgggcaaacattgccagactttcctgatgacttgtggacaggacaggaagtggtcattttgggagtgcaggttgctggtaga

SEQ ID NO: 13967 - DNA, 120 bp, synthetic construct
  source 1..120: mol_type = other DNA
tcacgtgatcctcctactttagcctctcaagtagctgggactacaggcatgcagcaccacgcctggctaagttttgtattttttgtcgtgacagggtctcactgtgttgcccaggctagt

SEQ ID NO: 13968 - DNA, 120 bp, synthetic construct
  source 1..120: mol_type = other DNA
cctggtgtcatgaggtctgtgtgaccgtaggcactgcctcctcgcctgtaaacagatggtcactgcaccttcctcttatgggatgttctggggatcatatgaggcagttctcgcagagtg

SEQ ID NO: 13969 - DNA, 120 bp, synthetic construct
  source 1..120: mol_type = other DNA
tctttaaggtcatcaaggattacccttccaacgaagaccttcacgaaaggctggaggttttcaaggccctcacagacaatgggagacacatcacctacttggaggaagagctgggtgggt

SEQ ID NO: 13970 - DNA, 120 bp, synthetic construct
  source 1..120: mol_type = other DNA
tccttctggtgctggtgaacttggtcaaattcaatagctgttacctcgacgagtacatcgcaaggatggttcagtaagaaaagaattgagatcctgttctgataatggtcctaagttcag

SEQ ID NO: 13971 - DNA, 120 bp, synthetic construct
  source 1..120: mol_type = other DNA
ctctgagcctcaggagtcccccatgtaagtcaggatagccgggcgcctccatgtggagatgtagctcagggtggatgacagcatcaatgacccacagtgacagggacgtcaggtgcttcc

SEQ ID NO: 13972 - DNA, 120 bp, synthetic construct
  source 1..120: mol_type = other DNA
gacttctaggatccagcccctgtcctctccttcctctgtcagttcaacagaatatccacacccagctcagtgcctgccccatgctcggacgtcctccagcggtgctccccaactacttag

SEQ ID NO: 13973 - DNA, 120 bp, synthetic construct
  source 1..120: mol_type = other DNA
ttgccagcaggttcttccacctttgccgagttactctgtttactgaggtcttagcgtggtcactgactcccccacctccctgagtagtttttgctgtggctttccttcttggctgtgatt

SEQ ID NO: 13974 - DNA, 120 bp, synthetic construct
  source 1..120: mol_type = other DNA
acctgaagtgatccacccatctcagactcccaaagtgctaggattacaggcgtgagccaccatgcctggccaaaggcttttttctctctctctttttttttttttttttttttgagacag

SEQ ID NO: 13975 - DNA, 120 bp, synthetic construct
  source 1..120: mol_type = other DNA
agctccctggagggtggggcgatcacgtcgtcctggttttatagtgatgagctgcggtgtgggtcacagggctctcctgatcctctgctcttcctgctacccccctccccgtaggggcgg

SEQ ID NO: 13976 - DNA, 120 bp, synthetic construct
  source 1..120: mol_type = other DNA
gaccgcattagtcgagtctgttaaccacagctttaaggaggactccacggccacacgggctcatcagcataggggccctggggaggcgaggctagtatccagcagcctcagggctgtgcc

SEQ ID NO: 13977 - DNA, 120 bp, synthetic construct
  source 1..120: mol_type = other DNA
caggtttctgcactcggcagggaaggctggcaggcacagcacgtgtttggtaacaagctcggggctagcccacccatcagtttcctcccacctgtgtggagcaagcttccatccggctct

SEQ ID NO: 13978 - DNA, 120 bp, synthetic construct
  source 1..120: mol_type = other DNA
ctgccctcagggagctccggccggttttcacccaacacaggagcctcttaaaaattctgtgtgagttcgtttcagccagtcttgcatggggacattgtcttccgtttcagtcctgacgtt

SEQ ID NO: 13979 - DNA, 120 bp, synthetic construct
  source 1..120: mol_type = other DNA
attggcctcccttgtgcctgtgcaggaggagctgattaactcagtggtcatctcgcagctctcccacatccccgaggataaagaccaccaggtccgaaagctggccacccagttgctggt

SEQ ID NO: 13980 - DNA, 120 bp, synthetic construct
  source 1..120: mol_type = other DNA
gtagaaagtgttctcacggctgctgactcagaaccatgagcctgtgtgtaagtcctggccttctcttcaaaggtgatggcccgctccctctccccacccccggagctggaagaaagggat

SEQ ID NO: 13981 - DNA, 120 bp, synthetic construct
  source 1..120: mol_type = other DNA
caagctgcttcctgtctctgtggatttacctactctcaacatttcatggaagtggaatcacacaaaattcatccataagatgttggatggtagaacagtttcctgtctgctgactggatt

SEQ ID NO: 13982 - DNA, 120 bp, synthetic construct
  source 1..120: mol_type = other DNA
ctacttttcaaagcctcacagcatcacttacgtgtgactgtcagtgtcagtatcgtgtaaaatataatgtatgaatcagtttgctcaaaagctcatccttaagatgttggatggtagaac

SEQ ID NO: 13983 - DNA, 120 bp, synthetic construct
  source 1..120: mol_type = other DNA
ttgaacccatgaggcagagggtacagtaagcccagatcacgccattgcactccagcctaggcaacaagaatgaaacaacgtctcaaaaacaaaacaaagcaaaaacaggcatcacctcct

SEQ ID NO: 13984 - DNA, 120 bp, synthetic construct
  source 1..120: mol_type = other DNA
atcgtgcctggcctgttttcatttcttttgttataattgaaaagtaacacagttgactcttgaacagtatggggctgggagtgccagcccctgtgcaggtgaaaatccccatctaacttt

SEQ ID NO: 13985 - DNA, 120 bp, synthetic construct
  source 1..120: mol_type = other DNA
taagtggaagtggctcatcaccaaggtcttcattgttgtcatcctcatgttgaggggactgaggaggaaggagaggagacacatggtcttgctctctcgggtgggagaggcggaagaaaa

SEQ ID NO: 13986 - DNA, 120 bp, synthetic construct
  source 1..120: mol_type = other DNA
caatgattttttaatcatttaaaggtgttaatcatttctttaaaagaataacagtgtaaccacttacctccagagtgctgcaaagggtccctcaggccagatttcccctggctcctgctg

SEQ ID NO: 13987 - DNA, 120 bp, synthetic construct
  source 1..120: mol_type = other DNA
ggttcctggaagctgcagagacggccccaggatggggcctcagctgaccgtccctcctctgcacccactgtggccgcagcctccccagtcctggtgtccttccctctgcctgcagtccac

SEQ ID NO: 13988 - DNA, 120 bp, synthetic construct
  source 1..120: mol_type = other DNA
gcgactacatgtacgcgggacctcgcccacggcccatgaggctcagggcgtcagaggcgctggggctgtggtggcgctgtttgcatgtctgagggatgtcccagggttgggaagagccaa

SEQ ID NO: 13989 - DNA, 120 bp, synthetic construct
  source 1..120: mol_type = other DNA
agaggtccccagccaagggcatgtcactgaatgtggatgtctcccatctgtgcttttcctaagtggggctcccgtgccgttcacctcacattcctggtgtgttacttggcaggcactccc

SEQ ID NO: 13990 - DNA, 120 bp, synthetic construct
  source 1..120: mol_type = other DNA
atggaagctgttcccgggacactgcctggcaggccatctggccccgggctctgcctgagctccgctcatcttctgctgtcctcatggaagacactgcccagggttggtgtgggatctggt

SEQ ID NO: 13991 - DNA, 120 bp, synthetic construct
  source 1..120: mol_type = other DNA
tgacttcaggagctcaggtgcctgtcccttcccctcaccgcctgtgcgcatctgggcaggccctcaatgttgagatggcagaagggcactgctgggcccgcacttggtgtagaggctgga

SEQ ID NO: 13992 - DNA, 120 bp, synthetic construct
  source 1..120: mol_type = other DNA
ccttctctcctctgcagcaccccatcgctgccgtgggcagagcagccgtgttggccttcagaggcgctgcacgggaccccggctcccctgaccaccctctccattaccgcagctctggcc

SEQ ID NO: 13993 - DNA, 120 bp, synthetic construct
  source 1..120: mol_type = other DNA
cctgcctgacggtgcctccaagtcagtgagtggaaatgggtcctgtgtgccctggagtatgtgaggcagggcaggacctgcaagggccgctaacacccctcagcccctcagcaggttggc

SEQ ID NO: 13994 - DNA, 120 bp, synthetic construct
  source 1..120: mol_type = other DNA
ttgcactgacgttgtttgttttggtgtcatgcgtgaagccttacttgttctcagtcatgtttaccagacgtattatcatgcatttttgttttctgtctcttccccgctaactgccctttg

SEQ ID NO: 13995 - DNA, 120 bp, synthetic construct
  source 1..120: mol_type = other DNA
tggtagaggtgctcggtgaggcttaaagccattttctagcacattctgtatcatgagcaaaatattgcctaggggctatgaaatttgtatcagaatgaactcccataagcctcttccctg

SEQ ID NO: 13996 - DNA, 120 bp, synthetic construct
  source 1..120: mol_type = other DNA
gtggcccaggctgacgatagcctgaaaaacctccacctggagctcacggaaacctgtctggacatgatggctcgatacgtcttctccaacttcacggctgtcccgaagaggtccaggcgg

SEQ ID NO: 13997 - DNA, 120 bp, synthetic construct
  source 1..120: mol_type = other DNA
caccgtctctggctgcctgtggcactagcttgccaggctcggggggagcattcagcttgaggctggtggttttgcatcaggtaagtggtggtcaccagtcctctgccctcttcttcaggg

SEQ ID NO: 13998 - DNA, 120 bp, synthetic construct
  source 1..120: mol_type = other DNA
ggctctttcctggatgtctgcgtgttaatctcctcttgggaggaaaccggtcatggcttagggtccgctctggtcccttgctagccgtaattagctttctgaaacccagtctccagagac

SEQ ID NO: 13999 - DNA, 120 bp, synthetic construct
  source 1..120: mol_type = other DNA
ctgcagatggcacttagcggcctaggacgtctattcacgggaggagggaggcactgccctcctcaggtctgcccaagcagcttgtagctagcactgggccccgtgcgcgcccctgccggc

SEQ ID NO: 14000 - DNA, 120 bp, synthetic construct
  source 1..120: mol_type = other DNA
ctgacgctggcacaggaaatgctgctttgggacctcccaccctctctccttagcgtccccagctgtgggtctggcttggagttggagggtgagcctctgctcttgggagcagtctgtttg

SEQ ID NO: 14001 - DNA, 120 bp, synthetic construct
  source 1..120: mol_type = other DNA
tgggatggaggacagatagggcctcaccacctccaggtcaaccccaggtgggctcgagggtgcctgctgacaggggttctctttgggatggtcctttctagtcgtcctcagtctccagcc

SEQ ID NO: 14002 - DNA, 120 bp, synthetic construct
  source 1..120: mol_type = other DNA
gggcggtggagtgggagatggccaggctctgtgttcctccctgtgggctgtggctgccctggccaggccctcacctgggtgcccaccatcccctccctgtgcagtttcgtgttcctgcag

SEQ ID NO: 14003 - DNA, 120 bp, synthetic construct
  source 1..120: mol_type = other DNA
gcttctgagcagagggcacatggcctgactccgcccagtctcagtgagtccctcctgctgtgtggctcgaggaggtgggtggtgatggttcccgtgggagtggggtaggcccctgggggc

SEQ ID NO: 14004 - DNA, 120 bp, synthetic construct
  source 1..120: mol_type = other DNA
gacgtggacaagcaccgctgcgacaagaagcgccacctgggcaacgactttgtgtccattgtctacaatgactccggtgaggacttcaagcttggcaccatcaaggtgagtgaggggccg

SEQ ID NO: 14005 - DNA, 120 bp, synthetic construct
  source 1..120: mol_type = other DNA
ctgccagaggggaaagttcaggggcagatgctgcccatggagctgacaggtgtctagcagtgcaaccaggcagtagccgagatcagccttcagcacacgctgtgtgcggggatgaccctt

SEQ ID NO: 14006 - DNA, 120 bp, synthetic construct
  source 1..120: mol_type = other DNA
gcacagacatagaggcacagattgcagtcagacagctcttttattgactttgtctgcttggtgcgggggttgggggggtgtcgaggctctagaagcggccatgcccacagaagtggtaca

SEQ ID NO: 14007 - DNA, 120 bp, synthetic construct
  source 1..120: mol_type = other DNA
ttttgaggtgcagatagcttgctttattttgttgttactatctcaaggaggtccaacaattataactaacaattgaatttatacttgcatgaaaagaactacatcaaattgacattttgg

SEQ ID NO: 14008 - DNA, 120 bp, synthetic construct
  source 1..120: mol_type = other DNA
agagtataagggcacaggccctcttaaatggatcgaatatgtatattcacagtggcagagtcagatccaaattcattccctaaactcagggtataaagtccaccatcttgtttctgtacg

SEQ ID NO: 14009 - DNA, 120 bp, synthetic construct
  source 1..120: mol_type = other DNA
ttggctgtccctctttcacatggaatttaataaggcttcttagagttttctgtgcttgaaagagaggcaaaaaaacgatctaaaggccttaaacatgtaaggaagaagggtgaggagata

SEQ ID NO: 14010 - DNA, 120 bp, synthetic construct
  source 1..120: mol_type = other DNA
ttcagtacccatttcacatcagtggcaccagcaatgttggcttttaaaaccagtctttgaccttcgtttatgctcatctgagtagaaaatgctttaatctcagcatgagttctgacttct

SEQ ID NO: 14011 - DNA, 120 bp, synthetic construct
  source 1..120: mol_type = other DNA
tagcaactgtgaaggtttaggcaagtagtgccattttgtatattcactgactttattcttaaatattcctgggagcaggggctgacactatggaatcttatataataccacatataacta

SEQ ID NO: 14012 - DNA, 120 bp, synthetic construct
  source 1..120: mol_type = other DNA
ttagacgttccaccttcaccagaaatctcacaaacatattctccttgatcagattcagtgaggttattgattttgagctcataggtaccatctgctgaataatgaaactggaaatgccca

SEQ ID NO: 14013 - DNA, 120 bp, synthetic construct
  source 1..120: mol_type = other DNA
ctccactcgtgttggtgtaatgaatcttactgctttcttggagttccacaccattgtggtaccatttaacctcggcagttggcttagactgaacatttaaaataaaacgtgtattttggc

SEQ ID NO: 14014 - DNA, 120 bp, synthetic construct
  source 1..120: mol_type = other DNA
acttgtactagcttcagccttcgttgggatgtgataggttgaatacctgaagtcttttcttgtttcctccaccttgacatgagcttgtggtgaagagtaacgtaggctagaaagctcaaa

SEQ ID NO: 14015 - DNA, 120 bp, synthetic construct
  source 1..120: mol_type = other DNA
gaggtgggtgtagggttactgtcagctttgctttacagctgtcttcaccatatttgttccttgccacaacagtatattcagcgtcatcatctgtagtgacactgttgattgttaattggt

SEQ ID NO: 14016 - DNA, 120 bp, synthetic construct
  source 1..120: mol_type = other DNA
catcgaaagtatattcagcattcatgatattctcaatgatctgttggttagtttcagccaggaatgggttgataccactcaatagcacatataccagtgttccaagtgaccacatgtctg

SEQ ID NO: 14017 - DNA, 120 bp, synthetic construct
  source 1..120: mol_type = other DNA
cctcttcatcatagttcatagctctggtcttatcttctttggttatggttggttctgaaggctctgaaggcttgctcagaccaaatttattttcagctattacccggaactggtaacttg

SEQ ID NO: 14018 - DNA, 120 bp, synthetic construct
  source 1..120: mol_type = other DNA
ttgaatcctatattttaatccatctgcaatgatttctttgccttgtctgtaccatttgacgataggttttggatgaccagtcactttgcagaccaaggtagcattgctctgatatctgac

SEQ ID NO: 14019 - DNA, 120 bp, synthetic construct
  source 1..120: mol_type = other DNA
ttaatgatcacaactgaggacacttctagagggtcactgatgccgaaagtgttctgagctgaaacccggaagtaatagccagcattttctgtgaggttcacaattctacaggttgtcact

SEQ ID NO: 14020 - DNA, 120 bp, synthetic construct
  source 1..120: mol_type = other DNA
tccaacaatctggcatgagagttgagcagcttcacccaattttgtggtaacatccttcatttctttgcgtattcctggggcctctccagctgaacaatatgaaagataatattaagtgac

SEQ ID NO: 14021 - DNA, 120 bp, synthetic construct
  source 1..120: mol_type = other DNA
agactgtctatattcaacccagtatccaagaatttctttaccaccatcacattcaggtttctcccactgtagagtgacactatctttggatattgaaagaatctcaagttctcctggttg

SEQ ID NO: 14022 - DNA, 120 bp, synthetic construct
  source 1..120: mol_type = other DNA
ccttgccttacaaagataccttcttggtatctttcatcaagttcataatcaggatattctggaaaaaaaggtagggtttcaatttagcatttggggtagggggactaagaaataagtcta

SEQ ID NO: 14023 - DNA, 120 bp, synthetic construct
  source 1..120: mol_type = other DNA
gaaaattttattcattttatcagctaaaaatacttaacattttttcactttcctttctcttaaatgtgcttcatttgtaatcactattattatcttacatttatcagcagtttttaaagt

SEQ ID NO: 14024 - DNA, 120 bp, synthetic construct
  source 1..120: mol_type = other DNA
ggtgggtaccaagtaagtgtcatgccatcacgggaaacatcaaatatctgtaatgtttctgggggtccaggaatacctgcagcaagacagaggttaacacgatatggcaatatgaatacg

SEQ ID NO: 14025 - DNA, 120 bp, synthetic construct
  source 1..120: mol_type = other DNA
gagcgtcacgttgttctaccacataaccactcagtggagcaccaccgtccaattcaggtggttcccaggaaatggtaattgatgtagcatcaatttcatcaatcttaataggtcctgttg

SEQ ID NO: 14026 - DNA, 120 bp, synthetic construct
  source 1..120: mol_type = other DNA
ctttgcaggcaccaaaggcacttctgagaccagtactgcatcagatgtttcacaaggttctccaatgccataaatattttctggcagcactctgaaatagtacatggttccttctacaag

SEQ ID NO: 14027 - DNA, 120 bp, synthetic construct
  source 1..120: mol_type = other DNA
aattgattcgctgtattcgctcatacccttcacgttcacggcagcaactctgaaggaatatttctggcccattttaaggtctggcacagtgaattcagtatttcttattgtggcattggt

SEQ ID NO: 14028 - DNA, 120 bp, synthetic construct
  source 1..120: mol_type = other DNA
tgaggagcattgtatttatgtatgattcttggagctcacatgatggttctctgcatgagatgaagttggaagcttcgctgggctcactgttaccagctgcattcactgcggtcacccgga

SEQ ID NO: 14029 - DNA, 120 bp, synthetic construct
  source 1..120: mol_type = other DNA
ttcacataaattgagataattttaaaaaggagaatgttgactatttcctaccgtattcatctcggcaagtgacagggcctgtagattcagaccctttgctaattacgcctgctgcattct

SEQ ID NO: 14030 - DNA, 120 bp, synthetic construct
  source 1..120: mol_type = other DNA
tctgaactgacacggaaagaatattccatgtattttgtgagatgagtgactttaatttgagtgcgcttgacactggaattgacaagctgccaagctgttgtacccgattcacgcttttca

SEQ ID NO: 14031 - DNA, 120 bp, synthetic construct
  source 1..120: mol_type = other DNA
acacggaattcatattcagttttctcaacaagacgctctactgtgaaagttagctgtttggtgtgaccagcttcaacccagaagtcagatcccttttgtctcatttcaagcaggtagcca

SEQ ID NO: 14032 - DNA, 120 bp, synthetic construct
  source 1..120: mol_type = other DNA
cctaagtcggccttacacatttcaataatatacccaattatttccatgccaccatcaaacactggtttggaccattctaagctcacagttgtctttgatgtgtctgttactttgaccact

SEQ ID NO: 14033 - DNA, 120 bp, synthetic construct
  source 1..120: mol_type = other DNA
atctttgaaccaagttactcgaggcactggtcttccttgtaccaaagctttaattctaaggctctctccggacttaataatgagaccatcaaagtattcagggccaaactctactattgg

SEQ ID NO: 14034 - DNA, 120 bp, synthetic construct
  source 1..120: mol_type = other DNA
taagttgtaaatgcttaccattttcatctcttgtcataataatgccagaagactgtgagggcgggcttatagttccaacagcatttcttgcaattattctgaactcatagcgatccccag

SEQ ID NO: 14035 - DNA, 120 bp, synthetic construct
  source 1..120: mol_type = other DNA
taggtgagcttaggccagcagaattttcagcatatacacggaattggtaatccagaccttctaccagtccagtggctctatattctcttccagagattggtgatgtattaactttttgcc

SEQ ID NO: 14036 - DNA, 120 bp, synthetic construct
  source 1..120: mol_type = other DNA
ggctctgtagtttcacagggttccccaattccaatttcattttctgcaagaactctgaagaagaatggagtcttctccgacaaatctattagcttgaaggatgtgctagaacatttgtgt

SEQ ID NO: 14037 - DNA, 120 bp, synthetic construct
  source 1..120: mol_type = other DNA
atctttagcttgtacaggttcattcatttctataggttctccttgtccagcacagtttacagcagatacccggaagtagtaattgactccaggtttcaggttggataccacatattctgt

SEQ ID NO: 14038 - DNA, 120 bp, synthetic construct
  source 1..120: mol_type = other DNA
caggttagcgtagtttatttttaaatttttcacgtttcagttttctaatgaaatcatgtctcaccaaatgcgttcttggctacaacggaatcagattccagtggctcgccaattccatat

SEQ ID NO: 14039 - DNA, 120 bp, synthetic construct
  source 1..120: mol_type = other DNA
tataggccactcttctatctcagatggggtagaaagactgtgagttgtgcagggacttaagcaccttttacatgtgttttaaagtccattagttgctttattccagtgaagaaatgggat

SEQ ID NO: 14040 - DNA, 120 bp, synthetic construct
  source 1..120: mol_type = other DNA
ccaaaaaatgaagtctctgtttagtctgtggcttatttaagagcaatattctctaggaactcaaccatggtttaattattgactctgataatttaaaacagaatgaaagcaccaactcat

SEQ ID NO: 14041 - DNA, 120 bp, synthetic construct
  source 1..120: mol_type = other DNA
cagcactgattgttgtgactttgaagtgagttgtgcggatgaccagtttgttggctttttgccataaaatactgtttctgtctttcatttccaggtgatagcctacgactgcactgcctc

SEQ ID NO: 14042 - DNA, 120 bp, synthetic construct
  source 1..120: mol_type = other DNA
aatttcggtattaaatctcatggttgccttaagggggacaccatctcttgataaggtcactttgggaagtggttttccagagattggaatgtcaactttaaggtttgaaccagctctaac

SEQ ID NO: 14043 - DNA, 120 bp, synthetic construct
  source 1..120: mol_type = other DNA
ttcactagagattccattttgtgccatagtatgaatagtttggggtgtgaagggtgtgaacccaaaagcatttaagatgaaataacgactaattagaatgactcacactattctagcaaa

SEQ ID NO: 14044 - DNA, 120 bp, synthetic construct
  source 1..120: mol_type = other DNA
caaataaaggttcttcttctctttcctttgctatctgagggtcagagctatcactggggtcactagcaccaaccttattgacagattttactctgaaaacatattcagctcctgttgtta

SEQ ID NO: 14045 - DNA, 120 bp, synthetic construct
  source 1..120: mol_type = other DNA
agtactttgcaattaacggccacagaccgagtgccggcaacattcttcagtgttagtacatattgcccagtgtctcgtcttatacagtctttaactgttaacaaagtatgattgtctgtt

SEQ ID NO: 14046 - DNA, 120 bp, synthetic construct
  source 1..120: mol_type = other DNA
aggacctggaggtcctggtctgtcaaggacaattatagtaataggaactgttatggatccagcactgtttgaaacacataattcataagttccaacatcttcctttgaagcttccttaat

SEQ ID NO: 14047 - DNA, 120 bp, synthetic construct
  source 1..120: mol_type = other DNA
tggagccactattattttctaatgtcagattataccgaccactgtcaaatctggtaacattatcaatcaccaacattgtaaatgagctggtcacctctatctgagccctgtcagtgagaa

SEQ ID NO: 14048 - DNA, 120 bp, synthetic construct
  source 1..120: mol_type = other DNA
gaagtttagtaactttgtagttaagggcctgtacctcagttgaaacctgggtccaagagagtcggcttgtctccctcttttcaatgatgtaatgtgaaatattagcaccaccatcttgca

SEQ ID NO: 14049 - DNA, 120 bp, synthetic construct
  source 1..120: mol_type = other DNA
gctggctttcatccagcggccatcaggtagatctttcttttctacaatataacctgttattttgctaccaccatcataggcaggtttcttccatttcagtgtgacattgtttcttgtaat

SEQ ID NO: 14050 - DNA, 120 bp, synthetic construct
  source 1..120: mol_type = other DNA
acgtttactcttgttgtctgtttaagaggctcaccatctttgacccaagaaatgttaggtcttggtcggcctataactggaatttctattttaagatcttctccagcttggatactatat

SEQ ID NO: 14051 - DNA, 120 bp, synthetic construct
  source 1..120: mol_type = other DNA
agtctgtggagtaactatttgccattcttcttcatctgctttacagatttctactacatatcccaagatctcactgccgccatcatagatgggtttaccccaggcaagtgtgattgaatt

SEQ ID NO: 14052 - DNA, 120 bp, synthetic construct
  source 1..120: mol_type = other DNA
gggctttccatggacatcagcctcaagtctgaatgtttctccagcatttaccacaattgtgtctctgaattttggatccattgaaattcttgggagttcaacctcatccttggcagttat

SEQ ID NO: 14053 - DNA, 120 bp, synthetic construct
  source 1..120: mol_type = other DNA
ctggagggcctggttctttgtagggatattgagctacaattggatcagactctaaggcaaagctttgtccatatctgttttcggcaaatattctaaattggtattctgtaccagttttca

SEQ ID NO: 14054 - DNA, 120 bp, synthetic construct
  source 1..120: mol_type = other DNA
aggttaacaggtggacttggcgtgtccagaactctcacagtaacaaaggcagactttgttccactgctgttttctaatgtaagcgtatattttccactatcatatcggttgacattgtca

SEQ ID NO: 14055 - DNA, 120 bp, synthetic construct
  source 1..120: mol_type = other DNA
tggattcttggcaactactggctcagattcaagaggttcaccaacaccatatttgtttactgccattatacggaaagtatattcattgccttcaagaagcttagtaaccttgcagctgag

SEQ ID NO: 14056 - DNA, 120 bp, synthetic construct
  source 1..120: mol_type = other DNA
aatatttgtaaaactggctttcatccaacggccctcaggtaattctttcttctcaacaatataaccagtgatcttgcttccaccgtcataggtgggtttcttccactgaagagtcacaga

SEQ ID NO: 14057 - DNA, 120 bp, synthetic construct
  source 1..120: mol_type = other DNA
gtcactgcctttggtctgcatctccacaatgtagcctagaattcggctgcctccatcatgctctggtttctcccaagagagtgacacactatttcttgtgacatccatcaaagttatttt

SEQ ID NO: 14058 - DNA, 120 bp, synthetic construct
  source 1..120: mol_type = other DNA
tttctgaaccaccatcatagataggtttattccaagcgattgaaatggatgatctgcttgtatccagaacacgtgggttacctggtggtccaggtttaaacacagtgtcacaagccttgt

SEQ ID NO: 14059 - DNA, 120 bp, synthetic construct
  source 1..120: mol_type = other DNA
ctgaatgcttcacctgcttttaatataaccgtgtccttaaatttaacatccacctttatctttggtgcctcaacatcatccctgcaagtgatagcatcagatggctcagatggtggactg

SEQ ID NO: 14060 - DNA, 120 bp, synthetic construct
  source 1..120: mol_type = other DNA
gttggcaactatgcatgctgatgtgatgcctggtccaactccatatctattctgagcttttacacggaactgatactctaatccagtagtaaggcgggtggctttataggtagtacgtat

SEQ ID NO: 14061 - DNA, 120 bp, synthetic construct
  source 1..120: mol_type = other DNA
attcattctctgccatcactctgaagaaatattcacacccttcagacaagccggtaactttatatgtgcatttatggcacttagtggtggctgtggaataagatttccgtgttgcttcac

SEQ ID NO: 14062 - DNA, 120 bp, synthetic construct
  source 1..120: mol_type = other DNA
ttgcagtcctgttactttgcacctgagatcggaaactggtgtttttattgctctcacccatcgcaggcttttcttttctctcctttctacatgatatcctgtaatttcgctgccaccatc

SEQ ID NO: 14063 - DNA, 120 bp, synthetic construct
  source 1..120: mol_type = other DNA
tctgagtgatatctgatggtctaatgtcttttcctgccttggaccaacttgattttggaaggggtttgccaagaatgctaatggcattcaaaacaatggtatcccctgctttaattgtta

SEQ ID NO: 14064 - DNA, 120 bp, synthetic construct
  source 1..120: mol_type = other DNA
aagcagataatgttatcgataagcacatgttcaactgttctcagggaaatatttgtgaggaatcttgatgtaaaagctgtaggataagaacaaacaaaatacctgtaattggagaaccac

SEQ ID NO: 14065 - DNA, 120 bp, synthetic construct
  source 1..120: mol_type = other DNA
aaggccaggcgattaactttttcaaatagttctagcttttaacggatttttagataagctagtgagtgggacacaagagtgcactttcgatgacaataaaggaaaaatgaagatgtgtgc

SEQ ID NO: 14066 - DNA, 120 bp, synthetic construct
  source 1..120: mol_type = other DNA
taatgggaggctcccaggtaacataagcagagtctttggatatttccttaacagtcacattgacaggtggcccaggagtatctggataaatagtaggtaaataagaaatgaatgtgtaaa

SEQ ID NO: 14067 - DNA, 120 bp, synthetic construct
  source 1..120: mol_type = other DNA
caggaaattcttatatatatgaaaagcttttcaaaaccacaaatcatgtgcatttgatttgcctgttccacaataccgtaaagtacccacccagctctcctaaaaagtactcttggagtt

SEQ ID NO: 14068 - DNA, 120 bp, synthetic construct
  source 1..120: mol_type = other DNA
tcatattcggtaccttcttgaagacctgttgcttttaatgttctttctataataggttttctgttgaccttagtccagttaacagcctgggtttcccgcttttcaagcaaatagccagtg

SEQ ID NO: 14069 - DNA, 120 bp, synthetic construct
  source 1..120: mol_type = other DNA
gcatccaagcagacattagttccagctttcacagtaagcaaagatttcatagccacactcaggtctatcctgggagggactggaaagaaataagataaaggacttaatgtatgcaaagct

SEQ ID NO: 14070 - DNA, 120 bp, synthetic construct
  source 1..120: mol_type = other DNA
cttggtgacatcaataacctcaggtttcccaggaggatctaaaacaaaaagaggtacactcaccatttatcttaccagcagaagtttaaacttccatatttcacattatcatccctgctg

SEQ ID NO: 14071 - DNA, 120 bp, synthetic construct
  source 1..120: mol_type = other DNA
tacccatgactacaactttgattttctgagtgtctgtcccagaactgttctctgctgtgaggctgtagtaaccactgtctttcctagtcacatcttttatgatcagaattgaagagctgt

SEQ ID NO: 14072 - DNA, 120 bp, synthetic construct
  source 1..120: mol_type = other DNA
tagtatcctgtggtgtaaatgtggtgccacattttctttatccagtctgtcattgatgggcatttgggttggttccaagtctttgctattgtgaacagtgccacaataaacatacatgtg

SEQ ID NO: 14073 - DNA, 120 bp, synthetic construct
  source 1..120: mol_type = other DNA
ggtggcactgttcttggtcatttcagtcacttctaatttccttgggggatccggctcacctagaagaaaaacataatttagaagattacctaggtaacctaatcaaatcccctttgttaa

SEQ ID NO: 14074 - DNA, 120 bp, synthetic construct
  source 1..120: mol_type = other DNA
atttttcagaatgtggggaaatcataagaaattaagtgtgaatgaatcacatgctaagggaaggacttacctagtatttctttaggtttgatagcttcctttagctctgcagggcgccca

SEQ ID NO: 14075 - DNA, 120 bp, synthetic construct
  source 1..120: mol_type = other DNA
atttatcgaatacttctgtgcttgagattaagagttgctgtaatatcagaaaaaacaaggacatcctacctatggggtcttttgccaccaccggtcttgaaggcaagcttggttctccaa

SEQ ID NO: 14076 - DNA, 120 bp, synthetic construct
  source 1..120: mol_type = other DNA
agacaaatgtctttcctttatctgcaatgtgaaggttttcaggctcacctggtctgtcaatagggttaatagccagaatgggagtttttgtttcgatggttggcccaacacctactttat

SEQ ID NO: 14077 - DNA, 120 bp, synthetic construct
  source 1..120: mol_type = other DNA
ttaggattaataggtggtccaggtggtttgatgggccggcaagcttttattggatcagaacttggggatggtttgcttagtcctgcaagattttcagcaaaaactctaaactcatatgta

SEQ ID NO: 14078 - DNA, 120 bp, synthetic construct
  source 1..120: mol_type = other DNA
gatgtacggctactgttttgctaccggctgcattggaaactgtgatttgatattccccagtgtctctccttaagcagttcttaatggtaagtactgatgagaagttgtctgtttcaactg

SEQ ID NO: 14079 - DNA, 120 bp, synthetic construct
  source 1..120: mol_type = other DNA
catctctcctctcaaccacataattggtaataacagaaccaccatcatccagtggttctttccaagtaaggtaacatgaatctttcctaatttcactgacttccagatctctaggtggcc

SEQ ID NO: 14080 - DNA, 120 bp, synthetic construct
  source 1..120: mol_type = other DNA
aataggatctttggtaactctagcccatcgtttagacatagtttctctcttttccaggatgtagtttgtgatgggttttcctccatcatgtggcttattccaggttactaatgcagagtc

SEQ ID NO: 14081 - DNA, 120 bp, synthetic construct
  source 1..120: mol_type = other DNA
aataagacttaccaacaacattaacttgacagaaacctttcctagagcctgtactgttctccacaaccacacagtatttgccggaatctgaacgtttggccttgatcttctctaaagcaa

SEQ ID NO: 14082 - DNA, 120 bp, synthetic construct
  source 1..120: mol_type = other DNA
ttcttcacttgacagatgaggaaatagaggtttgttgaggcaaaataatttaggaaaggtcttcagaattggtagttttagaagtaggaaaataattcagtttctattaatgccattaag

SEQ ID NO: 14083 - DNA, 120 bp, synthetic construct
  source 1..120: mol_type = other DNA
ttccaacgggacctggaacatctggaaataagaagaaaataattcaagctgtttgccttcaatgaaagataatgctcaacacttgtttttttaaaaggagacaaaaatgttgttttgaag

SEQ ID NO: 14084 - DNA, 120 bp, synthetic construct
  source 1..120: mol_type = other DNA
gcaattttcacataaaaactgtggctggagtattgttgtgcctagagacatgcttagaaagagccctgagtggaaaggcttcgtgttctgagcaaatcactggactaaagcctccagtga

SEQ ID NO: 14085 - DNA, 120 bp, synthetic construct
  source 1..120: mol_type = other DNA
ggttctccaatgccagcaatgttgactgctctaactctaaatttgtagaatgctccttcctttaatcctgtcacaacaagctttgttcctctcacttctttatctttaccctggggagaa

SEQ ID NO: 14086 - DNA, 120 bp, synthetic construct
  source 1..120: mol_type = other DNA
tttgggaaatggaggaccaggaggggctgcaaagagccagtatacgttagtattcttgacttttccaaggcacttttggaaaataagatttaaaaaaaaggaatggtttccaggcttacc

SEQ ID NO: 14087 - DNA, 120 bp, synthetic construct
  source 1..120: mol_type = other DNA
tgaacagaaaaacaagtaattttaaccaaaccatgcagtctttacccaggacattcagtctcatctcctttgatgctgttcccagattatttacagctgtgatggtatataagccagtgt

SEQ ID NO: 14088 - DNA, 120 bp, synthetic construct
  source 1..120: mol_type = other DNA
taattaagtaatgtgcccatgtctacattcaagccatagtagcttcctaaggtacagatatagctcttttaattgtgaactattattgaacacctaggaaggcagctgtaaggaggacat

SEQ ID NO: 14089 - DNA, 120 bp, synthetic construct
  source 1..120: mol_type = other DNA
ccatcaatagtcctcttctcaataacatagcctttgatcctgtctcctccatcgtcgtctggcatcttccatgaaagtctgcaactaccccttgtgatatcactgactttcagatctttg

SEQ ID NO: 14090 - DNA, 120 bp, synthetic construct
  source 1..120: mol_type = other DNA
cagttgtatcacttggttcagattcaccagcttcattgacagctttcactctgaatctgtacttcctgagctctttcagattaggcaccacacattcacaggtagttataagtttgtctg

SEQ ID NO: 14091 - DNA, 120 bp, synthetic construct
  source 1..120: mol_type = other DNA
cctgagaatcctaaatctttgttcaataatattatagaaaagctaacaacattctgttttttgttgaattcctactggaaggtctgactgtttagtgggagagatgatttccccagtatc

SEQ ID NO: 14092 - DNA, 120 bp, synthetic construct
  source 1..120: mol_type = other DNA
tccaaggttatattaaaatggcatcaaaccagagtcatgtacttttaatgtgtataagaaaatattcagaagagtttaccccatatcttttctctacagcagtgttggtgacttcctccc

SEQ ID NO: 14093 - DNA, 120 bp, synthetic construct
  source 1..120: mol_type = other DNA
ttcattgacagctttgacacggaactcatacatttggtgttcatcaagattttcaaccagaaaagatgtggttgggcagagtcgcttgttaactctttcaaagtcaggtttgtcatgacg

SEQ ID NO: 14094 - DNA, 120 bp, synthetic construct
  source 1..120: mol_type = other DNA
gttttctttcctgaaggaccaaactaagagttaagctttcagtggtaaaactagacccaatccatacttgttgactgttattgcaaccagaaggagtggaagctcagctctgttctggtg

SEQ ID NO: 14095 - DNA, 120 bp, synthetic construct
  source 1..120: mol_type = other DNA
aacattccttaccaaaaacttctaccctggctgctgcaaatttggaaccacagctatttgtagctgtaatcacatatctgccatggtcttttcgcagtgcatccttgataattagttcag

SEQ ID NO: 14096 - DNA, 120 bp, synthetic construct
  source 1..120: mol_type = other DNA
aactccctgatggttttaaaatgtacaatagcttgttctactccaccttcttcttaaggaactacttacagattggatcatgtgctgttttgggatctgaaggtggactgaactttccag

SEQ ID NO: 14097 - DNA, 120 bp, synthetic construct
  source 1..120: mol_type = other DNA
tgtagttttaatgactcacctaacacactgacagtacaaggagcttttgcaataccgtggtcattttcaactttgatcatatacagaccatggtcaggtcggagagaatctcggacgcgt

SEQ ID NO: 14098 - DNA, 120 bp, synthetic construct
  source 1..120: mol_type = other DNA
gactggatttttcagttcaatatattctcctccaccaaccttgttgactgctttaacacggaagaagtattcaccatttggtatgagatccttcacagtccatgacagtttgttctcacc

SEQ ID NO: 14099 - DNA, 120 bp, synthetic construct
  source 1..120: mol_type = other DNA
tctacatgtgaagaatgtctggtttttcttcaaagaatgattacctatgactttgacattgattgaggctgttgctgagccgagcttattctccagtgtaatggtataaattccggcatc

SEQ ID NO: 14100 - DNA, 120 bp, synthetic construct
  source 1..120: mol_type = other DNA
tttctcccagcatcagtcacatgtaggtcaaggggtggtgagggaggacctgagaaaagagtgaaatattcatatccacagtctcatcaagttctagacaatatcttgtgtataatcagc

SEQ ID NO: 14101 - DNA, 120 bp, synthetic construct
  source 1..120: mol_type = other DNA
agttggtgatgggggaccctccatctttctcaggaactgtccattttaggtctgctgtattttttgtgatattaataacttcaagccagcgtggtggtgatggaggatctgaaaaagaag

SEQ ID NO: 14102 - DNA, 120 bp, synthetic construct
  source 1..120: mol_type = other DNA
atctgtaatcccaaggaatactaaagagtaaacatttgaatatactgctgtcttaacatcttgatggggattctgagcatacctgtatgttgtgtcctttactggcatcttattgcatct

SEQ ID NO: 14103 - DNA, 120 bp, synthetic construct
  source 1..120: mol_type = other DNA
gcgtggtgggttccatgttagaagacatgactcattggttacatctgtgatgtcaaaggcagctggtggtccgggtttatctgtgtatggcattacagatgcagaaaaaaaaattgttca

SEQ ID NO: 14104 - DNA, 120 bp, synthetic construct
  source 1..120: mol_type = other DNA
gaaccacgtggacatctttcaactatatatcctttgatgcgtgaaccaccatcatttttaggtggatcccatgttaagaagatgctattggctgttcgatctctccatttaacattctct

SEQ ID NO: 14105 - DNA, 120 bp, synthetic construct; identical to SEQ ID NO: 6620
  source 1..120: mol_type = other DNA

SEQ ID NO: 14106 - DNA, 120 bp, synthetic construct
  source 1..120: mol_type = other DNA
gttaatgagtttgcagtgccatatttaagtccctgttgccccaaagtagctatgtgctattccccgatctaaaaataaaatatctatttaccaaatgcatcgtcagcggtgagaggacca

SEQ ID NO: 14107 - DNA, 120 bp, synthetic construct
  source 1..120: mol_type = other DNA
gtcttgtctcttaattcaatgacgtagtttgtgatctcagcacctccatcatactctggtggttcccatgtcagtgagacaccaaatcgattcacatcagtgatggttacattcaaagga

SEQ ID NO: 14108 - DNA, 120 bp, synthetic construct
  source 1..120: mol_type = other DNA
cattgtcagaggcttgccaacatcaaccacaaggtcttggtcagctgtcttgatttttggtgcagctagtgagaaagataacatgtgaacgctttcgactattaaacgtagccaagctac

SEQ ID NO: 14109 - DNA, 120 bp, synthetic construct
  source 1..120: mol_type = other DNA
tcaccctggacaacaaccatgttatttcttagccattggacttccaccttatctttattgagttctgctaaaaagacaacatcagcaccaggggcttcaagaatatcttgtggaggcctg

SEQ ID NO: 14110 - DNA, 120 bp, synthetic construct
  source 1..120: mol_type = other DNA
acttaccttctactattagattggctgcacttttaacattttcacctctgtgattggtcaaagacacattatagttggcttggtcatctaagtgtgcatctctaattctgagggtgtaga

SEQ ID NO: 14111 - DNA, 120 bp, synthetic construct
  source 1..120: mol_type = other DNA
gctgtccttacttcacaggaatattcagcttcatcatccagtagacatttgttgatgacaagaatgcgcactgctcccttggatatgatgtcatattttttgccctttttaatttcagca

SEQ ID NO: 14112 - DNA, 120 bp, synthetic construct
  source 1..120: mol_type = other DNA
gttatttgacagtacaagatgacaggtatacagtcacagaccttagcattttctcgggaaagttcacactcaaatcgagccatttctttttctctaacttgaaggtcggtgagtggtctt

SEQ ID NO: 14113 - DNA, 120 bp, synthetic construct
  source 1..120: mol_type = other DNA
gtgaagaaggagacccaagaagctactttgacataagcttgagcagagcaaccacaaagtggtaagaaaaacatggtacaagatgcatgaagcacagagtcactaggttgtagctgttga

SEQ ID NO: 14114 - DNA, 120 bp, synthetic construct
  source 1..120: mol_type = other DNA
attagccaaggtactcctttccttctccaagagttttggtaccttctcaactttcccctgccatctccagggctttgttctgtcctaagttttattttcaagttttgattacactcagac

SEQ ID NO: 14115 - DNA, 120 bp, synthetic construct
  source 1..120: mol_type = other DNA
agcaatctagtatatgggtgcatttaattcatttagataaaaataaatggaaatagagctttccaagttgttttataatcatctatttagcacgtatgcattcaaaaatcatttcaacca

SEQ ID NO: 14116 - DNA, 120 bp, synthetic construct
  source 1..120: mol_type = other DNA
tcaatggtgcgacagataggggtcattctgacagcaaagataagagacttgggggttcttccagttctatgatataaaattcctaagaagctgtgccctgtcatccagactgattttgca

SEQ ID NO: 14117 - DNA, 120 bp, synthetic construct
  source 1..120: mol_type = other DNA
aagtaatgcaagagcaagttcacaaaaggctaaggtatttcgggtgcctagagtaaaggattaaaattcctatgccaaaagagatgtaaaggggccctatagaattatagtaaactgatc

SEQ ID NO: 14118 - DNA, 120 bp, synthetic construct
  source 1..120: mol_type = other DNA
caaaattaatgatggattgtcaagataatttaaagacatatgttgtttctggggacaaaacatatagatcaatttaggcaaattgtattgtgggcctatctgaataatcccttagttttt

SEQ ID NO: 14119 - DNA, 120 bp, synthetic construct
  source 1..120: mol_type = other DNA
tcccctgcagtcacggtgacatcctttaaaggcctcagaagaccaattactcgtgcttttcgagagggaagaaacagctttgcgttactcattttgtaatcccaaaagaataaatagaga

SEQ ID NO: 14120 - DNA, 120 bp, synthetic construct
  source 1..120: mol_type = other DNA
aacattggcagcttggaaatccaccccacccgtctggtccaggcgacagttgtgcaaaacaagggagtgtattttgccttcttccttaatttcacaatcctgtaccaacaaaacagaaaa

SEQ ID NO: 14121 - DNA, 120 bp, synthetic construct
  source 1..120: mol_type = other DNA
ataaccccaatgcttcaagagtgaaactcatggaaatttccttaccctcaatgtcaagttttcctgaggtcttatctgtcccacagtcacaggtgtactgtccaatatctgatttcaagg

SEQ ID NO: 14122 - DNA, 120 bp, synthetic construct
  source 1..120: mol_type = other DNA
agcacagtgagtttagcttctgaactcatccccatagcttctactctaatttgggaggtgtcatcaatagacaggtctttgaatgtgatcgaatgagttttcccttcgtcttgcattgag

SEQ ID NO: 14123 - DNA, 120 bp, synthetic construct
  source 1..120: mol_type = other DNA
aattctgaaagaagtggacagtggatgaagtcagaatacgtttccattgatgacccttgatcaatgcaggggtgtatcaggaagtcttgcagagaaaatacaaaaacgtggctgacaagt

SEQ ID NO: 14124 - DNA, 120 bp, synthetic construct
  source 1..120: mol_type = other DNA
aatattttattactccccactcccatgattcagaaactggctatctggttatacttggttacatttacctaagaccttcagctgtgctgtggagctcagctccttgacttgagcttttat

SEQ ID NO: 14125 - DNA, 120 bp, synthetic construct
  source 1..120: mol_type = other DNA
taaaagccccataccttttactgtcaaaatggcagttgtaattgcattaagggcctggtagaggacttcaccagcttggtccagtttgactttgtgcaaagttaagaagcgttttccacc

SEQ ID NO: 14126 - DNA, 120 bp, synthetic construct
  source 1..120: mol_type = other DNA
ccattttcttagtgtaacaataagcagaacgaaatctcccaggaaagtactaacctactacttttacgcaagatgaacactccaggttgttggcgttttccacagtaactgtgtatgttc

SEQ ID NO: 14127 - DNA, 120 bp, synthetic construct
  source 1..120: mol_type = other DNA
tggcatctccttaggagtcagaaagttcatacttggctgcctgctggataaaaccagccgtaaagcaattagaagacgagaaaactaaagaccaggcaattgaaaggccaattgagttta

SEQ ID NO: 14128 - DNA, 120 bp, synthetic construct
  source 1..120: mol_type = other DNA
atgacttctatggataatcacatttccaggaaggcatattctgagactgaagagctcaagctaaactgccaacatatttaggattaacaacttctttcagcaagtgccttattatcttcc

SEQ ID NO: 14129 - DNA, 120 bp, synthetic construct
  source 1..120: mol_type = other DNA
ggaacaaattgtcaaggcattatattgaatatcttagattcttcacatcttagaaaattatcaatacatgccttctccccaccccaccaccaccgcccccgctttaaatttactttgttt

SEQ ID NO: 14130 - DNA, 120 bp, synthetic construct
  source 1..120: mol_type = other DNA
acccactgggcaagagacaaggtggataaaggatatcacatgaagaaaaggtagaaacttaccataaacctccgaagttgaaatgatacctatgttgcagcataaacagggcttgaattt

SEQ ID NO: 14131 - DNA, 120 bp, synthetic construct
  source 1..120: mol_type = other DNA
tgttgttatttatctcattgcccataaatacaattttttttcaggtaacttatttagcaactgagtaatcattagccaattgcataggagagtgagatggtaaagaaaattaagccatat

SEQ ID NO: 14132 - DNA, 120 bp, synthetic construct
  source 1..120: mol_type = other DNA
aatagcactcaaagttactttgtttctatctagatagagggtctattctgagacaagtctgtgggagaaacagctccaacacaaaatgaataatttgaatagcaacgaattataataata

SEQ ID NO: 14133 - DNA, 120 bp, synthetic construct
  source 1..120: mol_type = other DNA
tactataccgcttttcagaacaacttcttcctttggttcaggtttacgttccggaagtaatttgcgaactttcttttcacctccaggcacttaaaagaatatgatttcaaattttgaagt

SEQ ID NO: 14134 - DNA, 120 bp, synthetic construct
  source 1..120: mol_type = other DNA
aaaattttaaagttaaacattacgtattttatccaggataaattgtgttggccttcaatactattttagaggtaccaatcttcttaataactatttttattgctcaaacccagaaggaag

SEQ ID NO: 14135 - DNA, 120 bp, synthetic construct
  source 1..120: mol_type = other DNA
ggtactacataagtatgtatttttcagcctgtgaaatacctttcagaggtgtaagctccactttttctggaacctgaggtttttcaggaactttcttctttggaatagctttaaagaata

SEQ ID NO: 14136 - DNA, 120 bp, synthetic construct
  source 1..120: mol_type = other DNA
ataaccactctttccagctcccctgagaaccacacagaacacttctttaagttgcaagaaaaaaaaagagatgggggaactgtaacaagtcattcatatgctttcctttcatgatatata

SEQ ID NO: 14137 - DNA, 120 bp, synthetic construct
  source 1..120: mol_type = other DNA
tacatttcaagagaaagaatatgataaagaagatttaagtccactggattgaataccttttactggtatttcttcaggctgtggttcaggttcgggctcttcaggtttaatatacttttc

SEQ ID NO: 14138 - DNA, 120 bp, synthetic construct
  source 1..120: mol_type = other DNA
ggtggaacttctggctctgcagggataggcacagacacttccttttctgggatgattttctcaggcactttgggcactttaaagatatgattttgtttactattaagaatttagaagaca

SEQ ID NO: 14139 - DNA, 120 bp, synthetic construct
  source 1..120: mol_type = other DNA
gacattccacagccaatccatactcaaattgagtttacttgacataagtttacttgacaatccttgaacattctagacccttctatctctgtgcctttcaatatgctcttccctttccat

SEQ ID NO: 14140 - DNA, 120 bp, synthetic construct
  source 1..120: mol_type = other DNA
ttttcttcatggtaggtacctttttctggaagaacttctggttttttggtaacaggcacaggttctttctttactggaacaagtttcttgggcacctcaggcactttgaagatattagtt

SEQ ID NO: 14141 - DNA, 120 bp, synthetic construct
  source 1..120: mol_type = other DNA
ctcctcttctgcaacaggaactggcttttcctcttcaggagcaatttcctcttcaggagcaatttcctcaggttcttcatatactttaaagatattagttaattttatttcaatgtatgg

SEQ ID NO: 14142 - DNA, 120 bp, synthetic construct
  source 1..120: mol_type = other DNA
cagaccctaaaaatccagaatgacagttttgtagttgcaaatttaagaggactcgcaaacaaaaggtttgataataggtgacttattagacaagggtgagtgcttttctgcagaatctca

SEQ ID NO: 14143 - DNA, 120 bp, synthetic construct
  source 1..120: mol_type = other DNA
tgctttcttttctgggacaggtttcttaggtggtacggtcactaaagaattagaaggtatgttttagaaagaacgaagattgagaaacaagacaaaagctcagagcacccagaattatca

SEQ ID NO: 14144 - DNA, 120 bp, synthetic construct
  source 1..120: mol_type = other DNA
aacctctatgggagcctctggcacttaaaagatattagtgaaattacatttagaagtttgaagaccactagaaaagtattttcaagaaatgaagagttcagtcttctgaagcctaaagcc

SEQ ID NO: 14145 - DNA, 120 bp, synthetic construct
  source 1..120: mol_type = other DNA
ggtggggcttctggttttgtgggaggagccttaggaactttcttttctgggacaacttcttgagcttcaggcacttgaaagatattagtagttttagacttaagttaatgaagagaaatg

SEQ ID NO: 14146 - DNA, 120 bp, synthetic construct
  source 1..120: mol_type = other DNA
aacttctttaggagcttcaggaactttgaagatattagtatcttttagttagaagctataaagggggaatatcgactccacatttacccaagcaaatacaacttgtgagatcggcggaca

SEQ ID NO: 14147 - DNA, 120 bp, synthetic construct
  source 1..120: mol_type = other DNA
gggacttcaggctttttaggaggagtcgagggcactttcttttcaaggacaacttctttgggagcctctggcacttaaaagatattagtaaagttacatgtggagctatggagactacta

SEQ ID NO: 14148 - DNA, 120 bp, synthetic construct
  source 1..120: mol_type = other DNA
aggaggtggagcttctggctttttggcaggaggcaccggtactttcttttctgggaccacttccttcggtggcagcacttcaggcacttcaaagatatttgtaatttgtgtttagaaaag

SEQ ID NO: 14149 - DNA, 120 bp, synthetic construct
  source 1..120: mol_type = other DNA
tcaggctttttaggaggaggcactggcactttcttttcaggaacaacttctttgggagcctcaggcacttgaaagatattagtgaaattacatttaggcattatgaagaccactagaaaa

SEQ ID NO: 14150 - DNA, 120 bp, synthetic construct
  source 1..120: mol_type = other DNA
caagctatcaatgactctcttcacagaattggaaaaaactactttaaagttcatatggaaccaaaaaagagcccacattgccaagtcaatcctaagccaaaagaacaaagctggaggcgt

SEQ ID NO: 14151 - DNA, 120 bp, synthetic construct
  source 1..120: mol_type = other DNA
caaacagacacttctcaaaaaaagacatttatgcagccaaaatacacaagaaaaaatgctcatcatcactggccatcagagaaatgcaaatcaaaaccacaatgagataccatctcacac

SEQ ID NO: 14152 - DNA, 120 bp, synthetic construct
  source 1..120: mol_type = other DNA
gggagcctctggcacttaaaagatattagtaaagttacatgtggagctatggagactactagcaaaatatacagcagaggaattggatcttctgaagcttaaggtcaaatgacaagtacc

SEQ ID NO: 14153 - DNA, 120 bp, synthetic construct
  source 1..120: mol_type = other DNA
caaatggagtaaaatatttctaagatcagaagagatatttcttctgcagaaaaaggacaggggtaaaaaatacctgtggcaggtggggcttctggttttgtgggaggagccttaggaact

SEQ ID NO: 14154 - DNA, 120 bp, synthetic construct
  source 1..120: mol_type = other DNA
ggataaggttgagctgacatgtacctgtaactgcgggggcttctggttttttgattggtgccttgggaattttcttttctgggacaacttcttgagcagcttcaggcacttgaaagatat

SEQ ID NO: 14155 - DNA, 120 bp, synthetic construct
  source 1..120: mol_type = other DNA
ctaccttttgtgggtggcacttcaggctttttaggaggaggcactggcactttcttttcaggaacaacttctttgggagcctcaggcacttgaaagatattagtgaaattacatttaggc

SEQ ID NO: 14156 - DNA, 120 bp, synthetic construct
  source 1..120: mol_type = other DNA
agatattagtgaaattacatttaggtgttatgaagaccgctagaaaaaaatattgtcaagagcagaagaattaggtcttctgaagcctaaagtcagtgacaaatacctttaacaggtggg

SEQ ID NO: 14157 - DNA, 120 bp, synthetic construct
  source 1..120: mol_type = other DNA
cctctaagcttccagcaagatataccttcatcaggaaggacttcaggctttctgagaggaaccacaagcgttttcttttcagggacaatttcttggagagcttcaggcactttaagaaat

SEQ ID NO: 14158 - DNA, 120 bp, synthetic construct
  source 1..120: mol_type = other DNA
tttagtgggaggtatttcaatttcaaggggagcagccatgggtgtttcctttacagggacaatttctcgaggtgattcaggcactttaaagatatgaatgcattgtactttggagttatg

SEQ ID NO: 14159 - DNA, 120 bp, synthetic construct
  source 1..120: mol_type = other DNA
tacactgactcaactatctttcatgtgtataagctaaaggtattttttccctctgttgtctcttgagtgactcactgggacatgaatacatttggttgagcttctacttgggggatccat

SEQ ID NO: 14160 - DNA, 120 bp, synthetic construct
  source 1..120: mol_type = other DNA
atttgaaatatacctttagttgctggtgtttctctctttttaggaatagtcacatatattttgtcttctggaacaactttcttgggtggctcaggcacttaaaagatatgagtatagtta

SEQ ID NO: 14161 - DNA, 120 bp, synthetic construct
  source 1..120: mol_type = other DNA
aagtgattatattattttatcccaacttagtataacaggatgaacaacaagaaagttgagtttcaacaggaaattttttagattaaaaaaaatggaagcgggtctggtgtagtggctcat

SEQ ID NO: 14162 - DNA, 120 bp, synthetic construct
  source 1..120: mol_type = other DNA
aaaccaagaattatttcatgttctgattagcatcactgtatacctttagctggtggaacttcaggctttttcagaacagcttcacgaactttttcttctgggacaattttcttgggtact

SEQ ID NO: 14163 - DNA, 120 bp, synthetic construct
  source 1..120: mol_type = other DNA
aacttgagaagaaaaattaacagtacaccttcagctggtgctattactgtttgtttttgtggaagagttgctaccttctcttcagtgataacttacgcacatgcttcagagactttaaag

SEQ ID NO: 14164 - DNA, 120 bp, synthetic construct
  source 1..120: mol_type = other DNA
acacatatattgttaatttgtgcaagatctagagtggtattgcagataacttatttgtgctatggcttgtcttcacagtatgctagaatacaggtgccattaacaatacttcacttcctt

SEQ ID NO: 14165 - DNA, 120 bp, synthetic construct
  source 1..120: mol_type = other DNA
actgaataaaggattgcatgcaacaatacacgaaaatccaggatctttccaaaaatacctttagctgggggaacagcttcctttttaggcacaaggactttcttttctgggactttcttt

SEQ ID NO: 14166 - DNA, 120 bp, synthetic construct
  source 1..120: mol_type = other DNA
tctattagctgaggagtctactatgacagggacagcataatctaactgcttaagagcactgtctgaagcattaagtgaattaggaagcagggaaaagtagacattttgtaataaccttga

SEQ ID NO: 14167 - DNA, 120 bp, synthetic construct
  source 1..120: mol_type = other DNA
atactggtgaatcttagatttagctactgagaaagatttggaacaccaggaattttaaatgttcaatccttaaaagcggttatacctctaggtggtgccacctcttcaacttcctctatg

SEQ ID NO: 14168 - DNA, 120 bp, synthetic construct
  source 1..120: mol_type = other DNA
aataagacaaggatgactttgaaatgttattttcttagaaagttatctaccttcaactggtagaacttcctcttctttagggagaatgattcgtttttcttccaccttcttaggcacctc

SEQ ID NO: 14169 - DNA, 120 bp, synthetic construct
  source 1..120: mol_type = other DNA
ccagaaagaccaatgtgttaacagtcgctcaagacaggtctgtcatgttagttgggagcccagatattataatgtaattgggatttgtaaagcaagggaccagcagcatatgtcattatc

SEQ ID NO: 14170 - DNA, 120 bp, synthetic construct
  source 1..120: mol_type = other DNA
tgggacaatgcttcctttcatctttgttcttgaatactgctttgtatcagtgaaaaaagtagatatcagtgttcctgaacatcgttagaagtaaatatgtaactgtgtgattatccattt

SEQ ID NO: 14171 - DNA, 120 bp, synthetic construct
  source 1..120: mol_type = other DNA
ttacagattaatgtacctttgggtggtggtgcttccacttttttcggaacaggtgttggtttcttttcttctgggatgagcttcttgggcacctctggcactttaaagatattatttata

SEQ ID NO: 14172 - DNA, 120 bp, synthetic construct
  source 1..120: mol_type = other DNA
gtactttctcctctggcacaggtttcttgggcacttcaggaacttcaaagatatcaaatagagttagtgtcacattttttacccatagctaagattttaaggctggcaatgtaaggcctt

SEQ ID NO: 14173 - DNA, 120 bp, synthetic construct
  source 1..120: mol_type = other DNA
ctggcaccacttcttcctcagttatgaactcctcttcttcatgaatgtactcttcttcttcttctacaagatattcttctacatgggttacaacttcctcttcaaaggcaacctcttctg

SEQ ID NO: 14174 - DNA, 120 bp, synthetic construct
  source 1..120: mol_type = other DNA
ggaatatgccaaacggtcactgattttaaacccaaacattctattttatatgtattgtagccatgtggcaggacacagccactggctaacaggctatggatgtatttagaaataattttt

SEQ ID NO: 14175 - DNA, 120 bp, synthetic construct
  source 1..120: mol_type = other DNA
ggtggggcctttggttttgtgggaactggttcttctgggacaggctttacagggataggcttctctggttctttaaaagtacatacaaggtatttcatgttagacttagaatataagttt

SEQ ID NO: 14176 - DNA, 120 bp, synthetic construct
  source 1..120: mol_type = other DNA
atcttgttttatcttgtttgagtgtgcacatatttagtgtggttttgagtttgcagttttgctcatacctgtgatgtattcttcatgctcttcatatcgttcatactcccgctcctcgta

SEQ ID NO: 14177 - DNA, 120 bp, synthetic construct
  source 1..120: mol_type = other DNA
aaataatgactatcaaactaagtagaagcattagacagaaacctatgttacatgaatagtttcttcacctcacttctaagacattttccttagctctattggtacaatgtagaaaattca

SEQ ID NO: 14178 - DNA, 120 bp, synthetic construct
  source 1..120: mol_type = other DNA
tgtatttggtaaagagagtagggcaagtacaatattgtgcataatggaagggcggatgtacctcttgcttttggaggcgcctcttttttagttacagcaacaagaactttttcttcctgg

SEQ ID NO: 14179 - DNA, 120 bp, synthetic construct
  source 1..120: mol_type = other DNA
tgcaatatggatgacaaattagctataaggaaacataaagaaggagacaagctaacatagggataaaactaattaaagagtcagcataccttcagctggctcagcttccactctcttaga

SEQ ID NO: 14180 - DNA, 120 bp, synthetic construct
  source 1..120: mol_type = other DNA
gaggatttaagtgaattgtaagataatattccatattgttttccccgccagttttgtggggcaggtatggtagaagaggcaggaggcttcacatgatttttgagcctaagtgtatacagt

SEQ ID NO: 14181 - DNA, 120 bp, synthetic construct
  source 1..120: mol_type = other DNA
tctactcatcttctcactggggagagagttagtttggttaaggagcttattgatttctctttaaaagcagaccttaggaactttcttaggaaagttcttttggccacatggctctagcca

SEQ ID NO: 14182 - DNA, 120 bp, synthetic construct
  source 1..120: mol_type = other DNA
ctttcttcttctctataaactgaaatggacacaccttcctcctcttctgagtaactccattcctcctctgcagatactttaaaagataaggtttcatttaaattcagcctgctgagatac

SEQ ID NO: 14183 - DNA, 120 bp, synthetic construct
  source 1..120: mol_type = other DNA
tttcttagcgacaggaactggcactgcaactttctcctctgggacgggtttcttaggcagagctggcactttagagacattatgcacttttagaaatttaatgtgatctcattgaagccc

SEQ ID NO: 14184 - DNA, 120 bp, synthetic construct
  source 1..120: mol_type = other DNA
attaaacacaacatattttgtatcaaagataaaagatagggctttacgtcgaaagccactgtacctttagctgggggagcttcctttttctttgcaacaggaacgggaatcttttcttca

SEQ ID NO: 14185 - DNA, 120 bp, synthetic construct
  source 1..120: mol_type = other DNA
tttttatgagtaaatgagagatgcctctgtgtctcctttagaagacatatatgactttgctgaaaacgaattagtgattacacaaacagtcaagaatgttcagatagtatatagaaaagg

SEQ ID NO: 14186 - DNA, 120 bp, synthetic construct
  source 1..120: mol_type = other DNA
gaagcgtggtactatgtacgtctttatgtaattaacattcagttctgccagacactctccagttgtcattgcctgtctccacctcttcataatgcatgaaactgcttttattaagaaaaa

SEQ ID NO: 14187 - DNA, 120 bp, synthetic construct
  source 1..120: mol_type = other DNA
attatttttttcacaaatattattctaccttttggtgctgggggctccacttttttagggataggaacaggggccacttcttctggagctggtttctcaggtagctcagggactttaaaa

SEQ ID NO: 14188 - DNA, 120 bp, synthetic construct
  source 1..120: mol_type = other DNA
ttttccccctgtgccttcctcatggttcttcccgtcccccatcacatcctttgtacatagtggctataggtatgcacactgtgactaaatctattatttaatactaacataaatgtttta

SEQ ID NO: 14189 - DNA, 120 bp, synthetic construct
  source 1..120: mol_type = other DNA
acataaataaaaaaattttgaacttgtagctgaaacacaaagatgtatacctttcacttcaataacttcttcctgtactggagtccgggaaggtttttgtggaacaatcttctttgaaac

SEQ ID NO: 14190 - DNA, 120 bp, synthetic construct
  source 1..120: mol_type = other DNA
gtgtgaagtattatatttgggatcgttattaccaacacaattcttagtgctaggatttgaagcaggatcaagcagagatgcaacaaggcagtaaaagtaaaacttgaacttctgcattag

SEQ ID NO: 14191 - DNA, 120 bp, synthetic construct
  source 1..120: mol_type = other DNA
tgaggatttttccagtatgaaaaaatggattcaataaatattatcaaatggacacaccttctattattccatgagagctccagtttgcagaacccctagtttcttccagtggaatagttt

SEQ ID NO: 14192 - DNA, 120 bp, synthetic construct
  source 1..120: mol_type = other DNA
tggaggcttcttgacaatctctgggagtttaaaaacataaaaatgtgtgtttatttttagattacattattattaatgtttactaatcctccacatcattgttagttgtttgtaggagct

SEQ ID NO: 14193 - DNA, 120 bp, synthetic construct
  source 1..120: mol_type = other DNA
aaaagggaattttgtcatttgtgacaacatggatagaactggagattatgctaagtgaaataagccaggcacagaaagacaaagactgtaagttctcacttagatgtggaactaaaaaag

SEQ ID NO: 14194 - DNA, 120 bp, synthetic construct
  source 1..120: mol_type = other DNA
ggaggaagagtaacaagtgggtttaaagtcctttgttgtgcagctgttataccttaaccacggttcctaatcatacttgattatggccttttgtattcatgaataaataacactcttttt

SEQ ID NO: 14195 - DNA, 120 bp, synthetic construct
  source 1..120: mol_type = other DNA
acaagcgtgagccaccgcgccaggcctcttttttaatttttaaaacattatttaacttctcaagtttcacagtgagtaccaaacttagccatgttgatactaccagtcaaagaacaaatc

SEQ ID NO: 14196 - DNA, 120 bp, synthetic construct
  source 1..120: mol_type = other DNA
tcttcgggtgttggtagcaaaagggggataggaggagcaaccacaggagggatttctgaagaaaataaatgccgttagtaacatgttttagtttcttattttgcgtaaaatataatgaaa

SEQ ID NO: 14197 - DNA, 120 bp, synthetic construct
  source 1..120: mol_type = other DNA
aaacaacttaccaggaggcttcagctcaagtttgatttctgcaaaataaaaaaaaaatgatatttttgtgttcagaatggtataggtaggctacgtgtttcgaagatggcagggtggctt

SEQ ID NO: 14198 - DNA, 120 bp, synthetic construct
  source 1..120: mol_type = other DNA
ccatctttgtacccagttataaaatagcaagaaaagttcaaaaatccaaaatgagaagaaatgcactcttctttgcatcactaacaaaaaagtatcccaattcttaagtgtattcatgct

SEQ ID NO: 14199 - DNA, 120 bp, synthetic construct
  source 1..120: mol_type = other DNA
aaagaactgacactcatttgaatatttcccttgtgcttttgtatgaactttgagatgaatactatgagaacgtgtgttgggaaataagaacacatgaccactttggtgtgtgtctacagg

SEQ ID NO: 14200 - DNA, 120 bp, synthetic construct
  source 1..120: mol_type = other DNA
atacaagttcctcaaattccttttcgtccctctctgacctctctatttcctcaatttcctgagaagaacaaaaatgataggcattacagatgaaacaaaatttgatttagaggacgcatg

SEQ ID NO: 14201 - DNA, 120 bp, synthetic construct
  source 1..120: mol_type = other DNA
agaaaaaaagtttcatacctaggcacagacaatactggggtttctttataggccatttctttttgtttaaaaatcttaatagacattcacctcattcttaaaactttctcttaaattcgg

SEQ ID NO: 14202 - DNA, 120 bp, synthetic construct
  source 1..120: mol_type = other DNA
gttaaatgccacgcatcggtataacccagaatcagtttttgtggtgtccctaatctccagttttgcttcatcgcctttttggtggatgaaaacacgacctccttggttcagctgtctcca

SEQ ID NO: 14203 - DNA, 120 bp, synthetic construct
  source 1..120: mol_type = other DNA
aaataaacatgagtggttgctggcttgagctgcataatacttttgaggtgtctgtacctttaatggtcacttttgatttggtagtgtcacttccagccacatttgaagctttacacacat

SEQ ID NO: 14204 - DNA, 120 bp, synthetic construct
  source 1..120: mol_type = other DNA
agctattaaatgcagccacagtagcatttaaaatccaatcttagcccaagggaattaggagttgaggctcagtgtttaactgaagaccaatgatgaagacattgatgagtaacatgatag

SEQ ID NO: 14205 - DNA, 120 bp, synthetic construct
  source 1..120: mol_type = other DNA
ataacttacttggtcaagatatcataagaaatgctcatggatatataacaggcagtgaagaaaaacacaacaggttggggctgtgaggataactcacctttgatgacgattgaagacgtg

SEQ ID NO: 14206 - DNA, 120 bp, synthetic construct
  source 1..120: mol_type = other DNA
agaatgagatcctgtctcgaggaaagaaagaaatacagatttaaaaaatgacttcttctctagataaacttatttcctcttaaacattttcttttcatttgtttaaaaatgtcctaaatt

SEQ ID NO: 14207 - DNA, 120 bp, synthetic construct
  source 1..120: mol_type = other DNA
ttataccaagacacggagataggttctgatccacttatggcacaatcaaaaacaactggcagtccaactgtttcttgaacatctctcaattgtcgagaaaatgatggtggaagtttttgc

SEQ ID NO: 14208 - DNA, 120 bp, synthetic construct
  source 1..120: mol_type = other DNA
accggctccaactgcttgacaaaatacggtggttctgcagccaagagagataatcaatcagtcatgaaggagacatgccagatcatcgattgtatacaaagataaaaatgtgcaatcatg

SEQ ID NO: 14209 - DNA, 120 bp, synthetic construct
  source 1..120: mol_type = other DNA
tgttttgtaaactgacctctcacagtcaaaggagcactacattcatcagaaccagccatattagtagctatacatgtgtagtcaccactgtctgattcttccagcatgttcacagttaaa

SEQ ID NO: 14210 - DNA, 120 bp, synthetic construct
  source 1..120: mol_type = other DNA
ctcaaaactgtataccccactgtcactcggtgctacattgatgatcttaaggccggatactttgttgaagaagcttattttgtatttgttgtcacttgttagctcttttccatccttaaa

SEQ ID NO: 14211 - DNA, 120 bp, synthetic construct
  source 1..120: mol_type = other DNA
gaaagcctgggttttaaaatttgtgagactgacagcattttgctcaaatcgtgaatgccgggaatcaaactagtgataatgtgttatttccatttaagaggcatttttggtggatgcgag

SEQ ID NO: 14212 - DNA, 120 bp, synthetic construct
  source 1..120: mol_type = other DNA
tttccagcacagccaccgagtcaacgaatgacattctgaatttactgctctcttgaatttcagtctcgtccttataccataaaactttgatttctggagacccaccgattttgcattcat

SEQ ID NO: 14213 - DNA, 120 bp, synthetic construct
  source 1..120: mol_type = other DNA
aactatttaatttctgacagtagcagcgataaacatgtggcagaaacacatgactgccttccataatagcagatactgatctacttactccccagcccctgacctccactattatttaag

SEQ ID NO: 14214 - DNA, 120 bp, synthetic construct
  source 1..120: mol_type = other DNA
aactgtcagagtggcagtattttctaccaaagtcatcttgtagttgcctccagggcgaatctctcggttatctttggcccaagtgattttgattggtgcagtcccagttacatgacattt

SEQ ID NO: 14215 - DNA, 120 bp, synthetic construct
  source 1..120: mol_type = other DNA
tttataccaagaaattctaatttctggagttccatccactttacactgtaaagttgcaggttctccaatgactgcttccacatgttccagaggttcaataaagtacggtggttctatggt

SEQ ID NO: 14216 - DNA, 120 bp, synthetic construct
  source 1..120: mol_type = other DNA
cggaaggggagataaagagaagaaagaaatccaagtgagaagtgcttttgctccttaaaaaaagggagctaagactaaacatgaagacaaaataaagaaactccagggaaggcaggcacc

SEQ ID NO: 14217 - DNA, 120 bp, synthetic construct
  source 1..120: mol_type = other DNA
actatggcccgtaactcaacagcatccccaataagggttgaggtgtcacttagctttttcacgaatcgtggaggttctgatgaaagaaatttgtggttagaggaaaaaatgtgagaatca

SEQ ID NO: 14218 - DNA, 120 bp, synthetic construct
  source 1..120: mol_type = other DNA
ccttaattatccttttattttggaactcataactttgctaagagcccaaatcagaggagaataaagaaacaaagaagcttagtgtgtctaacctttcactgtcaacgctgtgctgcagct

SEQ ID NO: 14219 - DNA, 120 bp, synthetic construct
  source 1..120: mol_type = other DNA
cgcatcggttgagcaccagtaacatgacactcaaaatcagcactttctccagcaataacatctatagatacaggcttgatgtcaaagaagggagatttcttgggttctggaggatgagaa

SEQ ID NO: 14220 - DNA, 120 bp, synthetic construct
  source 1..120: mol_type = other DNA
tattaaaaacaagtgtggccacattgtttgtaaagtaggtcctgtattcaggagttggccgtaatttggtatctcctttgtaccaagacactgtaatttctggtgtcccagcaacttggc

SEQ ID NO: 14221 - DNA, 120 bp, synthetic construct
  source 1..120: mol_type = other DNA
cactgcacgacattcatcagacccagcgacattagcagccacgcatgtgtaattgcccatatctgaggaatccagagaattcaactgcaatgtgcagacattatctgaaaatgtggtttg

SEQ ID NO: 14222 - DNA, 120 bp, synthetic construct
  source 1..120: mol_type = other DNA
acgtgatatccatctgtcaaagtctgggatctttactctgtctctactatcacattcactaagattgtttctcccagtgagatggttatgttagggtgctctctctctcgactttaaagt

SEQ ID NO: 14223 - DNA, 120 bp, synthetic construct
  source 1..120: mol_type = other DNA
agagttgcaacattttccacaaatgtaatcctgatgttttcactttctctaatcacttcttccttctctttaagccactggacaaaaataggctgggcgccttctatggatgcttgtaat

SEQ ID NO: 14224 - DNA, 120 bp, synthetic construct
  source 1..120: mol_type = other DNA
cagacacttggaagtcatcacaacatccgtgatctaagtcttccatttcagcaaatgattactgcaataattgtcttaaaacaagacaaacttggcctttgtgacaaaaaaaaaaagcac

SEQ ID NO: 14225 - DNA, 120 bp, synthetic construct
  source 1..120: mol_type = other DNA
gtcagacagaaacataaaggaatcaaatttgcacacctgtcacaagcaacatcgtagtacaagagtcgctaccaacatcattggtaacatggcaagtatactgtccagtcttagaagcat

SEQ ID NO: 14226 - DNA, 120 bp, synthetic construct
  source 1..120: mol_type = other DNA
ttaagtaggcatcacagctactgcttccgaagtcattttccaccttgaaagtgtactgaccgctgtcctgcttcattactgactgaattctaaaactggccacgttattttcaaaactca

SEQ ID NO: 14227 - DNA, 120 bp, synthetic construct
  source 1..120: mol_type = other DNA
ataagatttaaaagcgttacagaatttttatttgataggctgcttcttgtataactgacctttcagggcaactctagtactgcatgagcagctgccgccttcattggatacaatgcactg

SEQ ID NO: 14228 - DNA, 120 bp, synthetic construct
  source 1..120: mol_type = other DNA
gctctagactggtagaggtgtcatccttccaaactgagcgggctgctcctgagtgtaactctttgttatctttaaaccactttattgtcatgggtgcagtgccacccacaagagccttta

SEQ ID NO: 14229 - DNA, 120 bp, synthetic construct
  source 1..120: mol_type = other DNA
tactgagagtaatgcagaacatctttgtattcctgcatcatttttggcctgacagacatatttcccatcatgcttgacttcaatgccactgaggtacaaactggccacattgttctcaaa

SEQ ID NO: 14230 - DNA, 120 bp, synthetic construct
  source 1..120: mol_type = other DNA
ttccttggtaaaataaggtgactctacagtaaaaaaggaatgatttgcattaagggaggaggggtctgtgccatgggccataactttggcaacacaagaggcaaagtgaacacaaacctt

SEQ ID NO: 14231 - DNA, 120 bp, synthetic construct
  source 1..120: mol_type = other DNA
gcaatgtctcgatctgtgtgttgcacaagaagggagaaaaggtcaatatagaagagtgctcagtgattgactttaggccatttgttgggtttcaaatgcatatgtagcatcattttctaa

SEQ ID NO: 14232 - DNA, 120 bp, synthetic construct
  source 1..120: mol_type = other DNA
agggtaacggtttgtcctcctagtgcaatcaaatcatctactttctttacaaaggttggaggttctagttaaggaaagagagcatataaaacatatcaattcccaaacactttcaacacc

SEQ ID NO: 14233 - DNA, 120 bp, synthetic construct
  source 1..120: mol_type = other DNA
cagcttgcaatggaggcgtgctgattcacctgggagcattaaataagagggatccaccttcttcacgaaggatggtggctctacatgaagtttacaaaaaagaaaaaggagaagatatct

SEQ ID NO: 14234 - DNA, 120 bp, synthetic construct
  source 1..120: mol_type = other DNA
acttgttggaagccttacaagaataaactcctctatcttgaatggtaaggtttgagagttctaaaatgtgtttgttttctgcgtcggaaatcctccagttaggtgaaggtgagagtgcag

SEQ ID NO: 14235 - DNA, 120 bp, synthetic construct
  source 1..120: mol_type = other DNA
aaagaaacttccaaacgcgtcagtatgaataatatcatgtacttggttttatggagacattttgaccagagtgaaaagcactggttgggtcatcatgggcctgggtttttcttaggatca

SEQ ID NO: 14236 - DNA, 120 bp, synthetic construct
  source 1..120: mol_type = other DNA
cgtgcccagccgtcttatttttaaattagtaaaaatgcctagagagaatcctagttttcagtcctatactagctccctgtcttacattaggatttaattttagacttagacactgacttt

SEQ ID NO: 14237 - DNA, 120 bp, synthetic construct
  source 1..120: mol_type = other DNA
gagatatactttgaagatcgaatagaacacttgtcactctcataaatttctcggccagctttaaaccactggaaccggacattgggagcactttggatctcacaggtgaatttggctagg

SEQ ID NO: 14238 - DNA, 120 bp, synthetic construct
  source 1..120: mol_type = other DNA
gcatttgatctattttatccttaaaatccaacctctttttactacagtgagtttggctgaagttgctgtttttccgctgtcattcaaggcctcacagacatactctccttgatggtcttc

SEQ ID NO: 14239 - DNA, 120 bp, synthetic construct
  source 1..120: mol_type = other DNA
tcaagtgctagtggaaatcttaaggacttgccttcctcaattctgaccgcagaatcttgccctgcattttccagtggatttgcactttctatcaaaattttacctccttctgtgcatgag

SEQ ID NO: 14240 - DNA, 120 bp, synthetic construct
  source 1..120: mol_type = other DNA
ttctctgctttacagatatagaggccactgtcttccctctgagggtcattgacaatgaaagttccagagccattagggttatgaatgatagtgtaataaacactggtgcaaagctgcttg

SEQ ID NO: 14241 - DNA, 120 bp, synthetic construct
  source 1..120: mol_type = other DNA
gaactagaaaactctgtatggggaaaaatgattattattttactataaaattttatttaatataaaaatagaaatcaaagaattagacaccagttgatggccttcttctgctttattcct

SEQ ID NO: 14242 - DNA, 120 bp, synthetic construct
  source 1..120: mol_type = other DNA
ttcacttgcatcacatgaaatagacttacaccttaattcctttctgttctagcatataagcattagaagacaggactcaagtgtctgctggctgtaaaaatactggagaaactcatctat

SEQ ID NO: 14243 - DNA, 120 bp, synthetic construct
  source 1..120: mol_type = other DNA
caggaatgattgttctacaatagtgtatctatgctgatgagttatggtggctcaaacagataattcaaaattttttttgtgagggaggcaggggaggcctggctgctctgcctattttct

SEQ ID NO: 14244 - DNA, 120 bp, synthetic construct
  source 1..120: mol_type = other DNA
tggagaaaaataaggtatctccaaaagtggaaagatctatttgcttattttgcaaatgtctaggtgaaccctgcccacaaagagcacaattggtcccttgaagccagtgagaattaaagc

SEQ ID NO: 14245 - DNA, 120 bp, synthetic construct
  source 1..120: mol_type = other DNA
taacagtcagaaatacctttgataaacctgggaggcccttccaccacctgaaattcaaaaaaactgtctgtgtagttgctctttaagaccaattcttccattaaactgcttaaagtcact

SEQ ID NO: 14246 - DNA, 120 bp, synthetic construct
  source 1..120: mol_type = other DNA
gtgtgtagaaatgctcatttggtgtaccgtcttccctttctatttttgatggatatgttttaaaagtaccagtggggtttggtcctccagtaggaatagaatatctctctagtgcctccc

SEQ ID NO: 14247 - DNA, 120 bp, synthetic construct
  source 1..120: mol_type = other DNA
ctggtgtctttagtttcaggaacctcacgctttccagcagcaagtaaatattgtgttagggaggtctcagattctgctgcctcagtggtatgtgcctcatctaatttaggaatattttga

SEQ ID NO: 14248 - DNA, 120 bp, synthetic construct
  source 1..120: mol_type = other DNA
atcaaatacaatgttctcagtgtcagcaggatgttggattttaaaataagcttcttctggttgaccactatctaattcttggaatttcacatctgtgtgttttatttgagtgtgaaactg

SEQ ID NO: 14249 - DNA, 120 bp, synthetic construct
  source 1..120: mol_type = other DNA
ccagggagtaaagggaccagctggataatcataaaaatgtgcccttacagattctccctggtcttgcagttgctgatctctggaatattttccataaatttcaccaatattttcgaattg

SEQ ID NO: 14250 - DNA, 120 bp, synthetic construct
  source 1..120: mol_type = other DNA
ccacgtcactataggttgaggatatccttgaaaatgacacacaaaattacaactgtcaccttcataaacttcttgagattcaatttcttgaagaaatgaaggtgggcaacgttgtgggcg

SEQ ID NO: 14251 - DNA, 120 bp, synthetic construct
  source 1..120: mol_type = other DNA
acttccagaatctctgtcttggacccttttaatctctaagctggaagagtgatggtgtaaatcactctcagcttttataatccgacgaagacctgttgggatgggccgattgttatgaaa

SEQ ID NO: 14252 - DNA, 120 bp, synthetic construct
  source 1..120: mol_type = other DNA
gttcctgtgcatatttgttttgagagcaggaaaactttgttcttttgatggctaagtggaaaatcttacctgacttgcagagagtggaataaacgccctttctgattcttttgattgtag

SEQ ID NO: 14253 - DNA, 120 bp, synthetic construct
  source 1..120: mol_type = other DNA
aacacttgctaagagatgaaatcacatttagaaagaacatgcattttctaaattgctactttagcagagggctattctcagtttttcctgctagtaaacactcctttgatttgaatcacc

SEQ ID NO: 14254 - DNA, 120 bp, synthetic construct
  source 1..120: mol_type = other DNA
ataatattatcaattggaactgaatgaactggagatcctagggcaaaagagccgagttcaaatcaattctgggaatatgacagtcaaacaccgcactatagcactagattctttaggaag

SEQ ID NO: 14255 - DNA, 120 bp, synthetic construct
  source 1..120: mol_type = other DNA
atgcctgaatttattccaccagcttccttccatgagactcagtgaagctgttttgactacgggcacacaacacaggcttatggcacctgaaaaatatttttctcatttcattaatatcca

SEQ ID NO: 14256 - DNA, 120 bp, synthetic construct
  source 1..120: mol_type = other DNA
ttgtgtacaatgcagctgtatagtccttggtctaccagctgaacattacatatggtaagaaactgaatatttccattttgtgattgtttcagtctctcggattcctctatctttgcacct

SEQ ID NO: 14257 - DNA, 120 bp, synthetic construct
  source 1..120: mol_type = other DNA
tgtcaggatcacacaaaagaaaattcattcctggtgattcagtgctgagtggttgatgaagactcatgcagatgccatgcagtatctggttccttctttctgttgtcatttcagctatcc

SEQ ID NO: 14258 - DNA, 120 bp, synthetic construct
  source 1..120: mol_type = other DNA
gagacatgaatgggctaaggaacttcactacattgttcatgaaggcaatagtggagtacccaacagggttttggatattcttttctttcttcctcttgttgtaaagtcaactttttaatt

SEQ ID NO: 14259 - DNA, 120 bp, synthetic construct
  source 1..120: mol_type = other DNA
agactcaggttggctgtgcttgatacttggcctacagcattactagcaacaaacgtgtaagttccttcatcttctggataagcttcggcaatttccagttgataagtgtcttcaaattga

SEQ ID NO: 14260 - DNA, 120 bp, synthetic construct
  source 1..120: mol_type = other DNA
ttgtaataattgtaggtgatatgcactttaattttagttaactgtttgaatagccaaaatcaaagccatcttgtttttggagcacagtcactataccacttcttggtctcaaaaccatcc

SEQ ID NO: 14261 - DNA, 120 bp, synthetic construct
  source 1..120: mol_type = other DNA
gtgtgtgtgtgtgtgtgagatcatcaatggtacatcctcttacaaggttctctgcttatttctactgacagcttcttcctttggtgaactgaatgaggcaccaggatacacatgaactgc

SEQ ID NO: 14262 - DNA, 120 bp, synthetic construct
  source 1..120: mol_type = other DNA
ttgatgacttggagatgttgttttctcatcataggatgccactgtgttcaatgatcctacatatttttcaatgctcagttcacacatctttctctggctctctcccagacagagaatgat

SEQ ID NO: 14263 - DNA, 120 bp, synthetic construct
  source 1..120: mol_type = other DNA
cccaattggtgtcttgtagagtgcttcaggtgtatttctacaacactttaaaggcaatactaccatatgttaatatgttatagacttaaaagcactataccaatatagttaagacaaata

SEQ ID NO: 14264 - DNA, 120 bp, synthetic construct
  source 1..120: mol_type = other DNA
acagaaggagaacgagagacatgatatatattgaaggcaagattcaaattcagcatctttgacaatgaagccccgacttttgaccactataggatattgtcttccaaaggatacctttca

SEQ ID NO: 14265 - DNA, 120 bp, synthetic construct
  source 1..120: mol_type = other DNA
tgttgtggcaacaccatagtcattcttggcttcacaggtatagactgccgcatcctctgggaaggcttcaattagcaaaagcgtgtattcttgcccatcatgaagaaatttgcacttgaa

SEQ ID NO: 14266 - DNA, 120 bp, synthetic construct
  source 1..120: mol_type = other DNA
agcatattctcagtgctgtgatgagtgaggggacctggttagttcatggaacccagaaattagaagaaatgacttctgtgaggctggtttctgacactatcatagaaaagatctttactt

SEQ ID NO: 14267 - DNA, 120 bp, synthetic construct
  source 1..120: mol_type = other DNA
aatagtttaacagcgaatctagaagctcatctggggtatatgaaaatggacacccaatgggtgttcaatagttttgagcaaccagatgaggatctggccatcaggtgctttctgaaaata

SEQ ID NO: 14268 - DNA, 120 bp, synthetic construct
  source 1..120: mol_type = other DNA
atggaagacatctccaggttatctgagtcctcattgaagcctttttcattatagtccacagtctgtaaagcctggttttctttggatgagcaatatgataaagctgaactcaactggtat

SEQ ID NO: 14269 - DNA, 120 bp, synthetic construct
  source 1..120: mol_type = other DNA
cttctgaatctttattctatggatgaaatggaaattcgagtttaccgtatggtgattcagaggaaactgggaattactggaatgtagcaagacaaaacaactgacctgtctgtgatctgc

SEQ ID NO: 14270 - DNA, 120 bp, synthetic construct
  source 1..120: mol_type = other DNA
tgcgtctgttgaggagattacagtttagagatataagctttgataccttccatgtactatacaggacagtgccaactcacagaggaacagaaagatcaagtgatagacactgaggcatct

SEQ ID NO: 14271 - DNA, 120 bp, synthetic construct
  source 1..120: mol_type = other DNA
agatgaaaccaaacaaatagatacatggggttcattaaggaaagggctgtagggggctgcctgatacttactctccacaaacagttttgctttgcattccaattgcccgaccacagctgt

SEQ ID NO: 14272 - DNA, 120 bp, synthetic construct
  source 1..120: mol_type = other DNA
tagatgacatcatcaaggaaaagaagtcctgaacaagatcattgcttactcaccctgcaaaagaatggctaccaaacattttacagttatgcagcacctctgttttaaaaaacacctgag

SEQ ID NO: 14273 - DNA, 120 bp, synthetic construct
  source 1..120: mol_type = other DNA
tcatcaatgtttctactacattgaggatttctatatattaaaaatcactgtgttggcaaatgtcgcccattctatgaagtttcaccccattgcctccactcttatcatccattagcagaa

SEQ ID NO: 14274 - DNA, 120 bp, synthetic construct
  source 1..120: mol_type = other DNA
cagatttcaggagtttatacactgatattgaaagaggaaatggggaataagacaagtgcataataaacactaggaaagaggcacatataaagtgatcctggggttggatgaggaagagat

SEQ ID NO: 14275 - DNA, 120 bp, synthetic construct
  source 1..120: mol_type = other DNA
gtcatcaggcttgatttgttcatcatttaagtaccacttaacagaagtcacatcagggactgacaccttacattcaagcacagccttggtgccttcaatcacattaacatcttttagagg

SEQ ID NO: 14276 - DNA, 120 bp, synthetic construct
  source 1..120: mol_type = other DNA
tcctccttggttacatccttgaccgtgaggttctgacgtccacgacgagatgtaattgtatatttgccattggatttaagctccacatcattatgataccattttccttctatattttct

SEQ ID NO: 14277 - DNA, 120 bp, synthetic construct
  source 1..120: mol_type = other DNA
aaattaccttggacaagtaagaatgcgtgactggaggtttctccagctatgttgatggcttttaccatgatgctggcagagtcctcagcagtcacatctcttatgaccaattcacaaaca

SEQ ID NO: 14278 - DNA, 120 bp, synthetic construct; identical to SEQ ID NO: 6780
  source 1..120: mol_type = other DNA

SEQ ID NO: 14279 - DNA, 120 bp, synthetic construct
  source 1..120: mol_type = other DNA
agaatcttggctgacagtggaatcgattttaagggcagcttctcccttggttccttcaattctataaaaagttgggggagggaataatcaatatagtggtatagcttccctggttattgg

SEQ ID NO: 14280 - DNA, 120 bp, synthetic construct
  source 1..120: mol_type = other DNA
caactatgtttttcctatattctcaattttagctggtagtcattcagtatatccaggtacccaggctcaaaaatcttggaataatcctcaatactctcttttccttaccacttggattta

SEQ ID NO: 14281 - DNA, 120 bp, synthetic construct
  source 1..120: mol_type = other DNA
aaaacaatttacatactaaataacccaaattattacaagtcttacctgattctgctcactggctctagtgtgggaatgtaagtcggagctccaagtggtgcagcaggctccacatacaat

SEQ ID NO: 14282 - DNA, 120 bp, synthetic construct
  source 1..120: mol_type = other DNA
aatgttgtggcatcttgggtagaaaggtattccaaaagcaggagttagatttgggttagaggttacattagcttatcacacagatgaagagatcttggcatgaatgaactcagctgtgct

SEQ ID NO: 14283 - DNA, 120 bp, synthetic construct
  source 1..120: mol_type = other DNA
tgcctgggcctggaaggcaaccggatttagaatctctgcattttcagaggcatgatatgcctagaaacaaatacaacaaaaagaaactattgctagaacctcagaagtttaatgacagta

SEQ ID NO: 14284 - DNA, 120 bp, synthetic construct
  source 1..120: mol_type = other DNA
agcatagatttttgtgcataactagctttcttcttcattacatggctattcttctatcttttagtcacttagttattacatgtttttattgaaaattgtctcaaatcttttctggaagtg

SEQ ID NO: 14285 - DNA, 120 bp, synthetic construct
  source 1..120: mol_type = other DNA
gagatgagatgtttagtgacccctgcttagcactgacagttaaattgaccatataatctccccccaagttccaaaaagggacatcatttcaaggtgcacagaaaccatattgtggaaaag

SEQ ID NO: 14286 - DNA, 120 bp, synthetic construct
  source 1..120: mol_type = other DNA
gggatggattggtctttatgtctgcacagctcctgcaataatgccttctgcatattagaagctcattaaatcttttgaatccatgaatgatgtaccacatagaattcccttcttccttgc

SEQ ID NO: 14287 - DNA, 120 bp, synthetic construct
  source 1..120: mol_type = other DNA
tgcctacatggaaacagagtcagaaaataaagtcatttaaccatcctccgatggctagccctcttggactgagtctgagcctattttctataaggtctgttctttaatgttctcattagc

SEQ ID NO: 14288 - DNA, 120 bp, synthetic construct
  source 1..120: mol_type = other DNA
ttctcctgatgacagagattataagggagaagatagggcactaatccagagctatttgattccacaatccaacccgaccaccatacagtaccacctctccatcttgctatattgagtata

SEQ ID NO: 14289 - DNA, 120 bp, synthetic construct; identical to SEQ ID NO: 6790
  source 1..120: mol_type = other DNA

SEQ ID NO: 14290 - DNA, 120 bp, synthetic construct
  source 1..120: mol_type = other DNA
tcgtttctgagtctgatgaacattaatggaaatacaatttgcagaggaggttctcttttaaagaaggcaaactagctgatgtggcttagatattatgattctatgtgatacttggaaaca

SEQ ID NO: 14291 - DNA, 120 bp, synthetic construct
  source 1..120: mol_type = other DNA
cagatttatatacacacacttattggtggactacaaatgagtatgctggtaaccgcttttatttcttagtggactttgatatctctcacatgtttgtaacctagagaagcaggaagacaa

SEQ ID NO: 14292 - DNA, 120 bp, synthetic construct
  source 1..120: mol_type = other DNA
atttcatagctacaaatagatacggtaatcttttcatggcttatgtgtaattgttctgtttggatacttccttctctagattttaatatgcatcttgtttagctttagtgggagctgcta

SEQ ID NO: 14293 - DNA, 120 bp, synthetic construct
  source 1..120: mol_type = other DNA
catagtatgacccttcccccttcctcatggggatgcaagatggttattcagggttaaatacacaagagaaataaactttcaccggcaatgtctacatatactgactgagaatcacaaaac

SEQ ID NO: 14294 - DNA, 120 bp, synthetic construct
  source 1..120: mol_type = other DNA
tttcttcttgagctcccgggactgtttctagttttgtggactttgcagtggcaactaccaccatggatgcagcagttatctcagtttcctgtcttatctgatgtttagagtaaaataaag

SEQ ID NO: 14295 - DNA, 120 bp, synthetic construct
  source 1..120: mol_type = other DNA
agtttgtgcattacaatctaagtgactgagggcttaggctatgcacgaagaaaccaactgtcccggtgggtaactggactggcatgatatctatcatccatttatgtatgttctagaaag

SEQ ID NO: 14296 - DNA, 120 bp, synthetic construct
  source 1..120: mol_type = other DNA
ctgtgaagaatgctgtttccatctgggcacctaaggtatatgcgtatgtagggggacagttttctctatttgcctctttgccattctcaaatatctcatcactgaaacacaggatctcaa

SEQ ID NO: 14297 - DNA, 120 bp, synthetic construct
  source 1..120: mol_type = other DNA
caaacccattttcacctgctcatgagttacgtgcatctgctcttgctttgtggtaattacttctttggttcttgattttaattcttgttccttggctttatcggcggccactactacctt

SEQ ID NO: 14298 - DNA, 120 bp, synthetic construct
  source 1..120: mol_type = other DNA
tgacatgcccagtagaaaataaaaaagcatactggaaaactgagccacctagagcaaaatacactcatacataagcatttattattgccaagaaatacagagactgtatcattaaaacct

SEQ ID NO: 14299 - DNA, 120 bp, synthetic construct
  source 1..120: mol_type = other DNA
agaggtcaagaatgtcaaagcaaggaggggtaactggatgtgaatcatgagatgaaaagctggaagtgctttaaggcagagttttaaaatgtgtgcctccataacccattcagagggtaa

SEQ ID NO: 14300 - DNA, 120 bp, synthetic construct
  source 1..120: mol_type = other DNA
tgctttttaggtgtatccaaagtgcaagtagcatcagttgaagaatttgggtgctaaatcccagcactgatggccaaaaaagactatttctgatctatagcaataattctggggattggc

SEQ ID NO: 14301 - DNA, 120 bp, synthetic construct
  source 1..120: mol_type = other DNA
tctgcaaattggcattttatttcttaattattggaaagcaaaattttggggcaatttggatggttattaatgaactttcaaaactgctaagatggtcaaaatgctccatgggatcaggga

SEQ ID NO: 14302 - DNA, 120 bp, synthetic construct
  source 1..120: mol_type = other DNA
gaaatttattctgtaaatagtgagaggcagaggtttatgtttgtttgcttccagatggatagctaattggaccagcattctttattaaaatacctctccctcccctgaattgaaaggcca

SEQ ID NO: 14303 - DNA, 120 bp, synthetic construct
  source 1..120: mol_type = other DNA
cttcaatttacctgtggacagtgaggatttgtgaaaatcatattcagtaacttcttggtttacctcctttgtcacctgctacatttttgagtgcatgaaacttacacgggaggagggcag

SEQ ID NO: 14304 - DNA, 120 bp, synthetic construct
  source 1..120: mol_type = other DNA
gcatcaaagtgggcttcaatcttctgtaaaagattaaaacaaagcccacgttgaggaggaatagctggggacgcaacagcctgaaaggcttgaaaaccaacagtatagaaaaataccttt

SEQ ID NO: 14305 - DNA, 120 bp, synthetic construct
  source 1..120: mol_type = other DNA
gcaatgacagcaagaatgggagccaggagattacagaaggctttctcaccaccatattttattttatttgctttgttttgctgagcagtttaggccaccaccttttgtttctttgtttta

SEQ ID NO: 14306 - DNA, 120 bp, synthetic construct
  source 1..120: mol_type = other DNA
gtaaaggcatgcaatattctgtatactaatgtctcactaggtagtaaaggatagagaaaaacaacagaggccactaagattggtgataagttttctggggaaacagtgtcatgcatttga

SEQ ID NO: 14307 - DNA, 120 bp, synthetic construct
  source 1..120: mol_type = other DNA
agtgacacagaggggactagaatttccatctcctgcctgcctgcctagggctctatctgatgcaatttaatagacaacattaaaatcatgaaagggacttataaaaatgaagaaccaagg

SEQ ID NO: 14308 - DNA, 120 bp, synthetic construct
  source 1..120: mol_type = other DNA
aagatatgaagtagccagattccactacttctcaaggaggcaaattcccactgaagtcatatgtgttctgctcagttcagaagttactgagtgttaccagataaataggtaaattatttg

SEQ ID NO: 14309 - DNA, 120 bp, synthetic construct
  source 1..120: mol_type = other DNA
tggcgtcaagtcctgcagcaacgttaacttactggagaggaggcaaaggaaaaaaaaacaaaagtgtgaatgtgtgagcttaccactaatgtgagcctcaaaggttgcggtactaccctc

SEQ ID NO: 14310 - DNA, 120 bp, synthetic construct
  source 1..120: mol_type = other DNA
cccaatatttttcgttcactctatatttataaagttgacattgattcagacattatctgattacttaaaatagttgccagaagtaaaaatctgaactttgtaatctctttcctgactgga

SEQ ID NO: 14311 - DNA, 120 bp, synthetic construct
  source 1..120: mol_type = other DNA
aggcattgacaattagtaatcaaattctaggaagatgagaaatcaaagtgtatttagaagtaagaaacctttcctttaaacattatttcttacccttcttagtgtcaacatttatctcaa

SEQ ID NO: 14312 - DNA, 120 bp, synthetic construct
  source 1..120: mol_type = other DNA
catgaatcggtgagcctctaatcctaaaaacaaaactacacagtcaagactgtgtagttttgcttttctatgcaatccctacacccgaggcgaggctgggaatgcacgactgctcaagag

SEQ ID NO: 14313 - DNA, 120 bp, synthetic construct
  source 1..120: mol_type = other DNA
tagccaggtcttatgcttaaatcatccataaggttccttttccagacacatgaatgctgttctgctaatctctggagtttgctgttactaatgggaagtggataggaggtgatatagttg

SEQ ID NO: 14314 - DNA, 120 bp, synthetic construct
  source 1..120: mol_type = other DNA
actcaagagccaagaagatggaccatatgttataaacataaagtcaagtgtctgtcctcttaagctgattgtctagtcactgttcttagacttttctagaccctgcctgccagcctacat

SEQ ID NO: 14315 - DNA, 120 bp, synthetic construct
  source 1..120: mol_type = other DNA
gtgctagtgatggctaggcagagctgaccaagaaaagacagttagaattattgtgctcttagagatcatggtctacatcaactcttagtgaatgctcattaatctgtgactgagaccaag

SEQ ID NO: 14316 - DNA, 120 bp, synthetic construct
  source 1..120: mol_type = other DNA
gaaagataaaaaaattaaagtcttgaatgtctcagtagcactgctgttaggggcacttggaatttctctcctattctacctgggtttaggcaactcacttgaatctctgtctcagatttg

SEQ ID NO: 14317 - DNA, 120 bp, synthetic construct
  source 1..120: mol_type = other DNA
aaccactgcagacacggcacctggggacagggattaagggctctttcagggccaaaaacatgtttgggagctgaaaaataagttttgctttgaaatacaaaaagaaatctgcaacaatga

SEQ ID NO: 14318 - DNA, 120 bp, synthetic construct
  source 1..120: mol_type = other DNA
tcaatgtggaagctattgctggttattgttgttatttgaatagccctttctacacctttagccacacagttcctgcctggcaggtctgaaatggcattcatttcttctttcccacttcag

SEQ ID NO: 14319 - DNA, 120 bp, synthetic construct
  source 1..120: mol_type = other DNA
aggtaagttgctacagcagcctgaatagactgagacacctattctttctgaaccctctttcagcttcttttctcattgttcttgcactattcatattgtgttttccactgcctttcttat

SEQ ID NO: 14320 - DNA, 120 bp, synthetic construct
  source 1..120: mol_type = other DNA
gctttttggtcctgttttgattttgcccagcccattgcctttttgcagcactgactagaacaacgatcgacacatagtagctccttggtatgggctaaaatgtgaaccctccaaaattca

SEQ ID NO: 14321 - DNA, 120 bp, synthetic construct
  source 1..120: mol_type = other DNA
tatctcagcagcaaaaaactgctcatctctaggccttcactttggatctaagtgttaatgtgtactcttccatttaaaatgaggaagctttagcaacagtttcacctttggcaaattctt

SEQ ID NO: 14322 - DNA, 120 bp, synthetic construct
  source 1..120: mol_type = other DNA
attagggttcactgttgtttggacattctgtgggtttcgattgatgtttaatgacatgtatccaccattgcagtatcatacacagtagtttcaatgccctaaacatcctctgtgctccac

SEQ ID NO: 14323 - DNA, 120 bp, synthetic construct
  source 1..120: mol_type = other DNA
cttagaaacaggataacctccacaaaagagttttagttcctgcccctttacctaagtggacaactggttcttgctagtactttttcatacttctagtacttttgtttcctgtgttgtatt

SEQ ID NO: 14324 - DNA, 120 bp, synthetic construct
  source 1..120: mol_type = other DNA
ctgggattacaggcgtgagccaccgcacctggcccacatatgcaatattttcaatgtgttcgttttcagaagtctttctaaacaatgtcaaatttctttttactgcattcttaccacctc

SEQ ID NO: 14325 - DNA, 120 bp, synthetic construct
  source 1..120: mol_type = other DNA
gaagggcagacagaaggaggaacttgttcttaagctactaaattaccaagctttactggggatctgtctgagtaagagtttccaaagtaaaaaagctacattcttggagactattctaga

SEQ ID NO: 14326 - DNA, 120 bp, synthetic construct
  source 1..120: mol_type = other DNA
atcctacagtgtataggacaaccccccaaacacacagaattatctagtcccaaatgtcaaccttgtatcaaggttgaaaaatcctgctttagagaaatacaccacaaataccacattttc

SEQ ID NO: 14327 - DNA, 120 bp, synthetic construct
  source 1..120: mol_type = other DNA
aaagcaggtaccatgtgcgtggacattttgatagccctttttagagtgctacagtcttataagggtatctatctatgaagttcctcaaggttccacatgttaaagatgtcaaagtgactt

SEQ ID NO: 14328 - DNA, 120 bp, synthetic construct
  source 1..120: mol_type = other DNA
gagagctagacgcacatttagaaatggtctattttgcaccataattcacaggcaaggaacatgagggtcaaagattttagtggcctaaatcctcagagttcttctgtagcaaagctagga

SEQ ID NO: 14329 - DNA, 120 bp, synthetic construct
  source 1..120: mol_type = other DNA
ttacccaattaaaaaggattcagatggccctatgtttctcagggcaacatcaatggagggccgtttatctcatctatgttatctctaaatggaaatgtttatatcagacatataaaggca

SEQ ID NO: 14330 - DNA, 120 bp, synthetic construct
  source 1..120: mol_type = other DNA
acctatcttaacaatgttttccccccttccaacagctatctggaaatcttgtttgacatatacagatttttaattatctattttaaaactggaattgtgctgagtcttttatccagagca

SEQ ID NO: 14331 - DNA, 120 bp, synthetic construct
  source 1..120: mol_type = other DNA
aaaaaaaaaaaaaaaaagtcagctgcaactgaggaccagcccctgtaccttagactgtgctcctgacttgtccaggaacatcctgttaaacctgggccatctttcatggtgttcataatc

SEQ ID NO: 14332 - DNA, 120 bp, synthetic construct
  source 1..120: mol_type = other DNA
caatggtagttaatgatcaaatttgatttatgtttcacatcaagtattccctcattctgttgagcatcatcttctccaagtaatttacctctcccaaatctgccccccaccccccacccc

SEQ ID NO: 14333 - DNA, 120 bp, synthetic construct
  source 1..120: mol_type = other DNA
actgattgatttgtgaattttgaaagagccgtatatacctagaacaaatcccacgtcttgtgtgggattctttttatccattgttagatttaacttattagtgttgtgttgaggattttt

SEQ ID NO: 14334 - DNA, 120 bp, synthetic construct
  source 1..120: mol_type = other DNA
aacttctctattctccttccttatattgtatatattcttactttggttatatgtctaaagacaactttccttccccctccctcgacccctgttgtgaataatttcagcttcctctagaac

SEQ ID NO: 14335 - DNA, 120 bp, synthetic construct
  source 1..120: mol_type = other DNA
tttagggtccaccttgacactactgaacccggtagagtcctcttactgggtaacaaaaattgtcatgtagaaacattttattgtggtctctaacttctcggggagttccctaaaaacgtt

SEQ ID NO: 14336 - DNA, 120 bp, synthetic construct
  source 1..120: mol_type = other DNA
aattatttctgcactcttgctctttaaggaagataggaagttaattttgtggtacaaaaaggaggatccaatgaatccgatttgccatgtcctgggttacacaaatgaaactgctgttga

SEQ ID NO: 14337 - DNA, 120 bp, synthetic construct
  source 1..120: mol_type = other DNA
cttaagttcttggatttggctttctttatatttacaagtttgtatgaaatactggtttcaaataagatctgttcacagcccagactactgagccccagctacaattaaatattgatcatt

SEQ ID NO: 14338 - DNA, 120 bp, synthetic construct
  source 1..120: mol_type = other DNA
ccttccgccaataattggaagcttcctgaggccctcaccagaagcagatgccagcaccacacctctggttcacctgcagaaccgtgagccagttaaacctcttttctttataaactacca

SEQ ID NO: 14339 - DNA, 120 bp, synthetic construct
  source 1..120: mol_type = other DNA
ctcagctggaaggaggagattctgcaggaagagggtgggggaaagttgaagttaactccaaccaaagtcaaccttaaatattaacctttttttcttctgactttcattgacttttccgtg

SEQ ID NO: 14340 - DNA, 120 bp, synthetic construct
  source 1..120: mol_type = other DNA
taaaaaagaatgaaatcatgtcttctgcagcaacatggatggaattggaggccattaacctaagtgaaataactcaaaaacagaaagtcatttgagaccagccttaccaacatggagaag

SEQ ID NO: 14341 - DNA, 120 bp, synthetic construct
  source 1..120: mol_type = other DNA
atgggaagatcactagagcccaggaattcaaggctgcagtgtgccatgactgtgccactgtactccagcccagatgacaaagactatgctttaaaaaaatgaaaatttaaaaatcctgca

SEQ ID NO: 14342 - DNA, 120 bp, synthetic construct
  source 1..120: mol_type = other DNA
tatgttttcattgctctggggcaaatacctaaattgctgggtcatggggtaaatgtatgtgtagacattttttagaagcttttttttttttttaacaaaaatgccaggctatacttacca

SEQ ID NO: 14343 - DNA, 120 bp, synthetic construct
  source 1..120: mol_type = other DNA
gcccaagagatagactgttcaaagatctggccacaatgggatgacaaagaataatcagtccagctaactcccttcttattaattagaaatggagacactggaaagagacatttagttaaa

SEQ ID NO: 14344 - DNA, 120 bp, synthetic construct
  source 1..120: mol_type = other DNA
aaaaaaaaagaaaaaaatcagctctgtgcagtgctacatgtggattaatgaagcattgaaagttacaacccttttggtaattgcaagggaacctggaatagatctacccaccatgctatc

SEQ ID NO: 14345 - DNA, 120 bp, synthetic construct
  source 1..120: mol_type = other DNA
caatatataaagctggtggtttgtctcttggcttttgcatcatcagacagttcaccccagctaaagaaatgatgacgggaacaagaaaaaagccaaggttaagggcacttcagaacttca

SEQ ID NO: 14346 - DNA, 120 bp, synthetic construct
  source 1..120: mol_type = other DNA
cttaagtttcactggagtccctcttgctactatttccagctaatctcttcttgtaactcttcataaaagaggcatcaatctttcttaagagctatcttagtcttgcttgatgtgcgtaat

SEQ ID NO: 14347 - DNA, 120 bp, synthetic construct
  source 1..120: mol_type = other DNA
ttgttctactctcctaagctcccttctgctttctctgcaaaccgtagtgctttcccgctgctttccttgaactctctcctagacacacagacaaggtctgatgactccaattattggact

SEQ ID NO: 14348 - DNA, 120 bp, synthetic construct
  source 1..120: mol_type = other DNA
aagtagagtcactgtggatatcatggaagaagagacaggatagggattagacctgacacaattgtgggagaagctgggaaggcagagatctggaaggggaagtgagagtatcagagaaaa

SEQ ID NO: 14349 - DNA, 120 bp, synthetic construct
  source 1..120: mol_type = other DNA
aatcaataactgttctttcaacaaggatggagagcaattgaaaaggttggctgtgacatgaaattgcagtgtggctgcaatttccttgtattttctaaacaagaccttaaaggctccaga

SEQ ID NO: 14350 - DNA, 120 bp, synthetic construct
  source 1..120: mol_type = other DNA
cccactcctcctataggcataaaatagatgaatggagaccacgtggaactagtccataggactgtgtataacaaagcttcatgggaatttttctagggtcacaatatattttcagttgaa

SEQ ID NO: 14351 - DNA, 120 bp, synthetic construct
  source 1..120: mol_type = other DNA
tctggcctaccctatgcccccacaaccttcacacccacccgctactccaaatctgattgggtccctctacgtaggtgtttccaagtggtaaactgcacctagtgctatcgtttggatatc

SEQ ID NO: 14352 - DNA, 120 bp, synthetic construct
  source 1..120: mol_type = other DNA
ttacaggcgtgagccaccatgcctggcctgcaagatccttttttattgaggcaattaaaagttagaagagaagaaatggctgtgtaaaaataggagcagatagaaaatgagaatggccgg

SEQ ID NO: 14353 - DNA, 120 bp, synthetic construct
  source 1..120: mol_type = other DNA
tgaatggcctgccatgttccagaaacccccatgtgagatctttctctgggttaaagctccatggttgctaattgctgtgagagtgatagagtcccctaagtctaatcaagcctggaagct

SEQ ID NO: 14354 - DNA, 120 bp, synthetic construct
  source 1..120: mol_type = other DNA
gcaccgcaccgatgcaagaagtttatcattggggaagctgtcaggtggaagatttgaggagatacaaggataaaggggataaatagtatataggagacaaagaacaagacttggctgaaa

SEQ ID NO: 14355 - DNA, 120 bp, synthetic construct
  source 1..120: mol_type = other DNA
agccacaatgagaccaattttccacagtcctaagaagagacacatccccttctgtgtatacatttctcttgtattcactgttttcactcaccccctgcagcctgcatgagatttgaaatt

SEQ ID NO: 14356 - DNA, 120 bp, synthetic construct
  source 1..120: mol_type = other DNA
aaaatttcagtgctagaactcccttctcctccctgcttcatttctgtatctttgaatcttatcatttgctctagaccccagtgaaatctccacaaagtcttctttaatgccacaactgaa

SEQ ID NO: 14357 - DNA, 120 bp, synthetic construct
  source 1..120: mol_type = other DNA
ctgcagtgagctgtgttcacatgacaccactccagcctaggtgacgaagtgagaccctgtctcaaataataatttaaaagaataaaatacaaagtcatttcaagccattactgacttttt

SEQ ID NO: 14358 - DNA, 120 bp, synthetic construct
  source 1..120: mol_type = other DNA
ggtattaacagacacaacaaaactctctttccttgacccaattcactgcctttattttcacaaactacttggtgcaatagtcatttagcatagcgtgtcccactaaaataaatggcggca

SEQ ID NO: 14359 - DNA, 120 bp, synthetic construct
  source 1..120: mol_type = other DNA
cttcacttacagccagggtgggtgtggacagatctgtatatggctctagtataagaaagtggggagatgtttagaaggctcaaaaaattgttgacaccaaaaattcaaactatcccctgt

SEQ ID NO: 14360 - DNA, 120 bp, synthetic construct
  source 1..120: mol_type = other DNA
ttaatgtgcctagccatccctgaagttctgccctgttaacgaaataggaatttgccattgctatccttacaggtgttcacaaagccatagaataaaatgactacaatttgagatcaactg

SEQ ID NO: 14361 - DNA, 120 bp, synthetic construct
  source 1..120: mol_type = other DNA
ctaaggaagctttacatttgagtctgaaattaaagatgacgaaataatcctcagacaaatatagaagcccagggaaaaggatgggtggcaatggaaggtgggcacaggcatgtgggcggt

SEQ ID NO: 14362 - DNA, 120 bp, synthetic construct
  source 1..120: mol_type = other DNA
gagaaattgtgaacacaaacaactctgatggaatggctaaatgttcaacagaggtacaaagcactgcatagcagagttaacttctgcctggagaaacctctacttgaagtttctcttgct

SEQ ID NO: 14363 - DNA, 120 bp, synthetic construct
  source 1..120: mol_type = other DNA
ttcaactggtttttgaatggtcaaagcaaaaaaccaactcatgaccatctctgaatgtcagactaaggacatttgactttatttggctggccatgaggagcgcggaaaagcttttgtaga

SEQ ID NO: 14364 - DNA, 120 bp, synthetic construct
  source 1..120: mol_type = other DNA
ataagggttatacatgaattaaatgaatgttttgagggcacgatcaagaccacgttgttgcttttcccttaagcaagcttagcacatttcctcctcccgtggatgttcttcagtcagagg

SEQ ID NO: 14365 - DNA, 120 bp, synthetic construct; identical to SEQ ID NO: 6859
  source 1..120: mol_type = other DNA

SEQ ID NO: 14366 - DNA, 120 bp, synthetic construct
  source 1..120: mol_type = other DNA
tttgtataaagatgtaatttttttctcatccagtaatcacaggtttcctgaattctgctcacagacatcaaggatctgtggatcccgggttaagagccccgactgagttgatgtggcatg

SEQ ID NO: 14367 - DNA, 120 bp, synthetic construct
  source 1..120: mol_type = other DNA
aatagaggtctttttaataacatttcactgagaaaatacaagtgtgcatgtagactcgagaatctgcaataactccagaagggcaggggtgcaggtaaccttgacccacaggctgcaccc

SEQ ID NO: 14368 - DNA, 120 bp, synthetic construct
  source 1..120: mol_type = other DNA
ataattttatctatataaaaattatttttatgcatgtggaaaactgaagaagcacagcattcagatgtctctagggcccagactccatcagatcccaggctctagaactgctcctacccc

SEQ ID NO: 14369 - DNA, 120 bp, synthetic construct
  source 1..120: mol_type = other DNA
agtaagcccagcgtccattagctattcttcctgatgctctccctcccccacttgcccctcctccagcaggccccagtgtgtgttgttccccccatgtgtccacgtgttttcatcattcag

SEQ ID NO: 14370 - DNA, 120 bp, synthetic construct
  source 1..120: mol_type = other DNA
cggggggaaggcggggggtggataaaagaagcccaaaggaaacctgccaaatagattcttttaaaaaataccttaaaaatttaaacttcctcttttgtctgcatatccaccccataggta

SEQ ID NO: 14371 - DNA, 120 bp, synthetic construct
  source 1..120: mol_type = other DNA
tgctccaatttttcgcttacctagcaaccatctaactattaattaaattggtattatggttttaacatgaatcttttatgatttgcttaccattaatcaaacccccgaggcttattcacc

SEQ ID NO: 14372 - DNA, 120 bp, synthetic construct
  source 1..120: mol_type = other DNA
tttttgctttttccttcatgcttcggccttggttttctctcacctaaaacactacaagcttcttctcccagagctctcactttgactccagactacctacatttaatctttaattctcta

SEQ ID NO: 14373 - DNA, 120 bp, synthetic construct
  source 1..120: mol_type = other DNA
tcattttagattattgtggccaacagatcacagtgggtagtgttatgacgaagggagggtcacagttactacagttacagatggattctgggtacaacatttgcactaaagtgcctttgc

SEQ ID NO: 14374 - DNA, 120 bp, synthetic construct
  source 1..120: mol_type = other DNA
tacaagagatgattcttagtttcaacagggtgcagtgctgaaacgcgtgcacagtagattttgcttcggttatgaaagaacttccaaatatttatgattcatagccagagaaaaggctct

SEQ ID NO: 14375 - DNA, 120 bp, synthetic construct
  source 1..120: mol_type = other DNA
gtcaatcatggcttctggttctcacagtcatctctactttcttccagcaagtttggttctgtcaaaaaccagctgtcagccttgttcctgcatgcccaatgcagaagagtcagtaaagaa

SEQ ID NO: 14376 - DNA, 120 bp, synthetic construct
  source 1..120: mol_type = other DNA
caaggttcatatttgtatgggttacttattctctctttgttgactaagtcaataatcagaatcagcaggtttgcagtcagattggcagggataagcagcctagctcaggagaagtgagta

SEQ ID NO: 14377 - DNA, 120 bp, synthetic construct
  source 1..120: mol_type = other DNA
tcgctccagatttctaataccacaaagaataaatcctttcactctgatcaattttgttaacttctcacgtgtcttctctacacccagggcaccggtgaatccaagtgtcctctgatggtc

SEQ ID NO: 14378 - DNA, 120 bp, synthetic construct
  source 1..120: mol_type = other DNA
ctaatcccacgatcacccgacttcatgtccaagagtggcttctcaccttcattagccagttcacaattttcatggagtttttctacctgcactagcaaaaacttcaaggaaaatacatat

SEQ ID NO: 14379 - DNA, 120 bp, synthetic construct
  source 1..120: mol_type = other DNA
aaatgatactccctggtggtgtgcagatgcctcaaagctatcctcacaccacaagggagaggagcgagatcctgctgtcctggagaagtgcagagttagaacagctgtggccacttgcat

SEQ ID NO: 14380 - DNA, 120 bp, synthetic construct
  source 1..120: mol_type = other DNA
tatctgctgttgaaataatagtttatgaggcagccctccagaccccacgtagagtgtatgtaacaagagatgcaccattttatttctcgaaaacccgtaacattcttcattccaaaacac

SEQ ID NO: 14381 - DNA, 120 bp, synthetic construct
  source 1..120: mol_type = other DNA
attccatcaaaaatagctcggcatgaaagggaactattctctggcttagtcatggatgagactttcaattgctataaagtggttcctttattagacaatgttaccagggaaacaacaggg

SEQ ID NO: 14382 - DNA, 120 bp, synthetic construct
  source 1..120: mol_type = other DNA
aggtcaatgtcaccataagacaaaagacatttttattagttgattctagggaattggccttaaggggagccctttcttcctaagagattcttaggtgattctcacttcctcttgccccag

SEQ ID NO: 14383 - DNA, 120 bp, synthetic construct
  source 1..120: mol_type = other DNA
ttatacataaaaatatacttttcttcttcatgttagaaaatgcaaagaataggagggtgggggaatctctgggcttggagacaggagacttgccttcctactatggttccatcagaatgt

SEQ ID NO: 14384 - DNA, 120 bp, synthetic construct
  source 1..120: mol_type = other DNA
cccgcggcgtccggcccgggtggtctggatcgcggagggaatgccccggagggcggagaactgggacgaggccgaggtaggcgcggaggaggcaggcgtcgaagagtacggccctgaaga

SEQ ID NO: 14385 - DNA, 120 bp, synthetic construct
  source 1..120: mol_type = other DNA
atgactccagtgggccagttctgcgtagtccctgccctcgtggagaacacattcctcctggggagactgacagatgcaaagacaggaacaagccagggtcatgttggcgccggaagagcc

SEQ ID NO: 14386 - DNA, 120 bp, synthetic construct; identical to SEQ ID NO: 6878
  source 1..120: mol_type = other DNA

SEQ ID NO: 14387 - DNA, 120 bp, synthetic construct
  source 1..120: mol_type = other DNA
atctttacaaaggatttttgcaaggatcccgatctttcttccttgagggtggtgtacttaatacacttttacaccagacttctaatgttagatgaagaacacagtatttccagggatcaa

SEQ ID NO: 14388 - DNA, 120 bp, synthetic construct
  source 1..120: mol_type = other DNA
tgtgcacaacgtgcaggtttgttacatatgtatacatgtgccatgttggtgtgctgcacccatagagacctcgtcttaaaaaaagaaaataacattacttttgaaggtacttaatgcact

SEQ ID NO: 14389 - DNA, 120 bp, synthetic construct
  source 1..120: mol_type = other DNA
agatcttagggtttgatgagttttctctcgacatgtttttgcacttccttgtttttgagaagcactgatttgagaagtcagtggctttttctctttagtttgcagggtttgctgtgattt

SEQ ID NO: 14390 - DNA, 120 bp, synthetic construct
  source 1..120: mol_type = other DNA
tgtgtagagcatgagatattttggcttatttgttgctgacttctaattttttttatttttttgagacagaatctcgctgtgttagctaggctggagtgcagtggcgcaatctcggctcac

SEQ ID NO: 14391 - DNA, 120 bp, synthetic construct
  source 1..120: mol_type = other DNA
gtataatacttcactatttgtttgaagctcaaatgattttatcagggtaaaccctaataaactgatgttcctgtgggtaaaaaaaacctcactaaagaccagcagtgtgtggtggctcct

SEQ ID NO: 14392 - DNA, 120 bp, synthetic construct
  source 1..120: mol_type = other DNA
aaactaataaccaccttttttttttttttgagacagagtctcactgtgtcacccaggctggagtgcagtggcgtgtgatcttggctcactgcaacctctgcctctcgggttcaagcgatt

SEQ ID NO: 14393 - DNA, 120 bp, synthetic construct
  source 1..120: mol_type = other DNA
actcactttttttctttaacctaaagtgagatccatcagtagtacaggtagttgttggcaaagcctcttgttcgttccttgtactgagaccctagtctgccactgaggatttggtttttg

SEQ ID NO: 14394 - DNA, 120 bp, synthetic construct
  source 1..120: mol_type = other DNA
tgttagaaagtgcttagaggttctgcctctatttttgttggggggtgggagaggggaccttaaaatgtgtacagtgaacaaatgtcttaaagggaatcatttttgtaggaagcatttttt

SEQ ID NO: 14395 - DNA, 120 bp, synthetic construct
  source 1..120: mol_type = other DNA
tagtctcccttttataattaatgtttgtgggtatttcttggcatgcatctttaattccttatcctagcctttgggcacaattcctgtgctcaaaaatgagagtgacggctggcatggtgg

SEQ ID NO: 14396 - DNA, 120 bp, synthetic construct; identical to SEQ ID NO: 6887
  source 1..120: mol_type = other DNA

SEQ ID NO: 14397 - DNA, 120 bp, synthetic construct
  source 1..120: mol_type = other DNA
tttcgaatcttgtgaatgtattaaatatatcgctcttaagagacggtgaagttcctatttcaagtttttttttttttttttttttttaaagctgttttttaatacattaaatggtgctga

SEQ ID NO: 14398 - DNA, 120 bp, synthetic construct
  source 1..120: mol_type = other DNA
atgcaggttacaattttaagtgttatcatcaatatcttgtaagatcaacacccagtgatgcatctagtacttatacagtcctaattttagttgtcaaagagcaaatcattatcagacata

SEQ ID NO: 14399 - DNA, 120 bp, synthetic construct
  source 1..120: mol_type = other DNA
catgccctggcctataaatattccatgatagaaaatggtacaataattccatccccagcgaaaacgagcataaaaaaagaagggaagggtcagggggacatgatcagctatggctcttct

SEQ ID NO: 14400 - DNA, 120 bp, synthetic construct
  source 1..120: mol_type = other DNA
atcactgtccagggatctcagctgtgactgaagcttttaacacttctatctgtgtagataccctggatgggctggatactttaaaataaatcactgataccagtttacatgttatgtgtt

SEQ ID NO: 14401 - DNA, 120 bp, synthetic construct
  source 1..120: mol_type = other DNA
attaaacagtctgctggcaaaacaggtcatgtcacacttacttggggagtgtgacagccgtgtcaaagggactataacactttgccaccgaattatgagctcaggactaagttaaagaag

SEQ ID NO: 14402 - DNA, 120 bp, synthetic construct
  source 1..120: mol_type = other DNA
ctgatactggtccagcagaaaccaagaccgctcctggtgcattaacttttaacagagcaaggactcagttctctgaaaatagtgccattaaacatgtgctctcagaagaataaatatttg

SEQ ID NO: 14403 - DNA, 120 bp, synthetic construct
  source 1..120: mol_type = other DNA
gtgtcagagacaggaaaagtgaatcacacgctacaaattggattccgctctccatcaccctcattctttgctgatgctcagtgtatcatcagcccactgctagtgggatctcactgttct

SEQ ID NO: 14404 - DNA, 120 bp, synthetic construct
  source 1..120: mol_type = other DNA
ctccttgttcttgcatcaagcaaatatgactccatggttgtgagaccctcaaaacacaccaaaagcactgagaaagtttttggtgtgctttatccaagagaagtcagtagtgggattacc

SEQ ID NO: 14405 - DNA, 120 bp, synthetic construct
  source 1..120: mol_type = other DNA
ctcgaaaccgtgggcacaagcaatcctcctacctcagcctcctgagtagctgggactacaggcatacaccagcacacttggctaaatttttaaaaatattttttttagagacagggtctc

SEQ ID NO: 14406 - DNA, 120 bp, synthetic construct
  source 1..120: mol_type = other DNA
ttactttctcgttttccttataaccttgacagtcacttttcaaatgatcccatttggggaaatgtgtaaaaacataacatgccactggtcccctcctttttagcctcaaagtctgtggcc

SEQ ID NO: 14407 - DNA, 120 bp, synthetic construct; identical to SEQ ID NO: 6897
  source 1..120: mol_type = other DNA

SEQ ID NO: 14408 - DNA, 120 bp, synthetic construct
  source 1..120: mol_type = other DNA
gtcccaaagtctaactactccctcccacttggagtcatgaccacatgacctagagccagtctgcaatgggtggggacatccttattagaaaaaagtgggataatgaatgagcccctaact

SEQ ID NO: 14409 - DNA, 120 bp, synthetic construct
  source 1..120: mol_type = other DNA
caaactgggcttgatgggaaagaaagcaaaggaagcattttccatttcccttaattcatcctagaagcagtgcacatgggaacaggagttgttaatctcagtaagggtcccggtgaagga

SEQ ID NO: 14410 - DNA, 120 bp, synthetic construct
  source 1..120: mol_type = other DNA
cagcctgaaaatgctacatctagtatgattccaactatatgacattctgaaaaaagaccgagccgggcacagtggctcacgcctgtaatcccagcactttgggaggccgaggcgagtgga

SEQ ID NO: 14411 - DNA, 120 bp, synthetic construct
  source 1..120: mol_type = other DNA
tggttatcgctctcgtaccctgtgctgtggctgcaaacacaaagaagggaaaaaggctcagtgtggctcacagtcgccatttggaaatgcttatctgcaatcaggagggaatgatggttt

SEQ ID NO: 14412 - DNA, 120 bp, synthetic construct
  source 1..120: mol_type = other DNA
aatatctggcagttcctcaaaaggttagacataaagttaacatatgacccagaaatcccactcttagggatattcccaagggaaatgaaaacagacgtccacacaaaaacttgtatacat

SEQ ID NO: 14413 - DNA, 120 bp, synthetic construct
  source 1..120: mol_type = other DNA
tcagcctccggagtagctgggattacaggcgcacgtcaccatacccggctcatttttgtacttttagtagagatggggtttcaccatgttggccaggccagtctcgaactcctggcctta

SEQ ID NO: 14414 - DNA, 120 bp, synthetic construct
  source 1..120: mol_type = other DNA
ttccacattttctagggctgaaggatttctagggacacaacattaaagttctgccatcgaagggtaaaaattagaaatctgtcttgacagctaagctctgggtgttagctgggttcctgg

SEQ ID NO: 14415 - DNA, 120 bp, synthetic construct
  source 1..120: mol_type = other DNA
caacatgactggtgactagttttcaagatagcccattccattttaggagagctttaaaaacaagctgaaatctgtcttctcatttcggactcctggagaaccactgaatgaatattactt

SEQ ID NO: 14416 - DNA, 120 bp, synthetic construct
  source 1..120: mol_type = other DNA
agccactctccaacttgacaaagatactttagacaacagttcctttggttttattgttcaaccaagcacaaatcatccatttaagcatttagtccatcatcccctaccttgtccacaagg

SEQ ID NO: 14417 - DNA, 120 bp, synthetic construct
  source 1..120: mol_type = other DNA
aaagtaggaaatctggacttttttgagagcacctgagttataagttcttgcgaataattgaaattttaaagaatcactgtcgggtcaaataaaacacacactctagatggcaccactgca

SEQ ID NO: 14418 - DNA, 120 bp, synthetic construct
  source 1..120: mol_type = other DNA
tttggcaccagggaccagttttctggaaggtcatttttccacagaccaggggtggggtggaggtgggggtggttttgggatgaaattgttccacctcagatcgtcaggcattagttagat

SEQ ID NO: 14419 - DNA, 120 bp, synthetic construct
  source 1..120: mol_type = other DNA
aaccagagccgccctggaatcccttatcaacagaagaagtaaaagagagaaaagaaaaagagcctttggaaggcaattagcattcatatgaatattcaaaaagggggaatttcggcctgt

SEQ ID NO: 14420 - DNA, 120 bp, synthetic construct
  source 1..120: mol_type = other DNA
atcgcttgaaccagggagtcggaagttgcagtgagccgagatcgcatcagcctggctacagagtgaaactccatctcagaaaaaaaaaaaaaaaaatgctgggcgcagtggctcacgcct

SEQ ID NO: 14421 - DNA, 120 bp, synthetic construct
  source 1..120: mol_type = other DNA
gaagtcactttcatatgcacttatcagatcttatttggggaatgaatagatactggattatccacattcagagctgctggcaacctggcacagatgcccctagatcaacataaatattat

SEQ ID NO: 14422 - DNA, 120 bp, synthetic construct
  source 1..120: mol_type = other DNA
gccaccatgcctgccccattttttcctcctcttgatcattctcatcagcaaacaaacatacagatacttctatctaaagataaataactaaataaaagcagaacaatttaaaacaaaacc

SEQ ID NO: 14423 - DNA, 120 bp, synthetic construct
  source 1..120: mol_type = other DNA
tacaatcactgtttctcatttccaacttggccccttctccatcccaacctttctttcctatctttcctattcagctcctttcttctccagatctaaacaaacctagcatttttcctcacc

SEQ ID NO: 14424 - DNA, 120 bp, synthetic construct
  source 1..120: mol_type = other DNA
aatgctgatattcacagaactgaggctccccaccttcactttgcatctcaggctccgggagccacttaaaagcaagctatctatttccaagaagtaaatctcttggacggataccttatg

SEQ ID NO: 14425 - DNA, 120 bp, synthetic construct
  source 1..120: mol_type = other DNA
ggttcagtcacacaagtatatcccacctctaacacagcaagttttcatttcatctgcccatgttctttataaaatcctatccccacccattgtaacactgctccctgacatctaatgaaa

SEQ ID NO: 14426 - DNA, 120 bp, synthetic construct
  source 1..120: mol_type = other DNA
tttggaggagacagccaaggtgtcaccatgtttgaatgctaaaagtgaggcaaactgtgggtcatgacacatcagtgggttgtaaaatcaatctagtacatcacaatcagcattttaaaa

SEQ ID NO: 14427 - DNA, 120 bp, synthetic construct
  source 1..120: mol_type = other DNA
tgtagagaaaggttttcaccacattgtccaagctgatctcaaactcctgagctcaagtgatccacccacctcagcctcccaaagtgctgggattataggcgtgagccaccatgccaggcc

SEQ ID NO: 14428 - DNA, 120 bp, synthetic construct
  source 1..120: mol_type = other DNA
aaagagaatgggtagaaagacagaatgctaaaactgtcagcagtcccccagatggaagacaggagagaaataatttaaaacaacagaaagccttttctttgtggtccagagagaggaaga

SEQ ID NO: 14429 - DNA, 120 bp, synthetic construct
  source 1..120: mol_type = other DNA
cataattttttacattgttttccaggggcatgttgatgagaaatgctactccctccattttgtccccagcatgtgtatgatgaataagaagaggtgggggcgggggagagagattcttcc

SEQ ID NO: 14430 - DNA, 120 bp, synthetic construct
  source 1..120: mol_type = other DNA
gtgcaatcaggtatgggcgtatctgactgtgaattgcccagatcagcatcacacaaatacaaatttggatcccggactttgcacacccaaagcacttcttgataagatagtggaatggtt

SEQ ID NO: 14431 - DNA, 120 bp, synthetic construct
  source 1..120: mol_type = other DNA
gattatgagggtctgaaaagtcagagtgatgggtgataaatggtctaaaaagcaaggatgtgacaagcagaagaaagacgatgataaactctatgcacagcggaaggaatcattttctat

SEQ ID NO: 14432 - DNA, 120 bp, synthetic construct
  source 1..120: mol_type = other DNA
aatgaaaaaaaatgatgagtttctcctgcagcttccctgtttgtagcagcagcccgtactggtctgtgccacaacattttgcaattccacaaattcttgctgtaaggctggagtaattaa

SEQ ID NO: 14433 - DNA, 120 bp, synthetic construct
  source 1..120: mol_type = other DNA
ttggccctcagaaggcaaatcttctcaaatacaaggtctatgtcttacgtatatgactttttctagtgtgtactgtactgtctaatatggtatacactggccacatgtgactcatgccac

SEQ ID NO: 14434 - DNA, 120 bp, synthetic construct
  source 1..120: mol_type = other DNA
ctctgatctctttgggcaatcgctcaacacccagctctcatcatggaagcccatggaaagaggcagcttcgttcaaggaatatagagcctctggcaaatgaagcatctaattactcaata

SEQ ID NO: 14435 - DNA, 120 bp, synthetic construct
  source 1..120: mol_type = other DNA
cgtagctgctggctggccaggtaacatcttggaagaagtaaagagctgcccccagaggataaaaaataaaaaggctcaaagtagacataactggcatctgtgattagaattcatgtttcc

SEQ ID NO: 14436 - DNA, 120 bp, synthetic construct
  source 1..120: mol_type = other DNA
aaagaagaatatgcaaacctaataaaagagcaaaaggaaagggaaagggctagaatgcctaaaagaaacaatcagtgtgcatgggaatatttttcaaacgcagtgcacagaacttttcaa

SEQ ID NO: 14437 - DNA, 120 bp, synthetic construct
  source 1..120: mol_type = other DNA
ggcagtgataacctgttgtgtccttcagagagtcactaggtagattaaataagtcaacacttgtaaagtgcttacagtggtacctggtgcatgttaagtctacataagcatgtgctctta

SEQ ID NO: 14438 - DNA, 120 bp, synthetic construct
  source 1..120: mol_type = other DNA
actccacccaccttgtatatgagaggagagggtaaggaggatagagaaaaccacctcctgtcatttcccataagttgctgattgaatgtattttctattcactgttgttcatagccacaa

SEQ ID NO: 14439 - DNA, 120 bp, synthetic construct
  source 1..120: mol_type = other DNA
gcatttaaataccctttcaaacttgtttaggagtaggaaagagggaaaccatataactgtagtaatgttggtgcacagacccaggtttaaaacattcctacacctgcccattcatcttta

SEQ ID NO: 14440 - DNA, 120 bp, synthetic construct
  source 1..120: mol_type = other DNA
cctccacccgcccaaaaaaagtgtgatgaggaatccaagtttcgaatagataaaccggatgttccgggggaaaaaaaggaaaaaaaaaggtttctccagtccgcgcgcctcaggcgttag

SEQ ID NO: 14441 - DNA, 120 bp, synthetic construct
  source 1..120: mol_type = other DNA
ggccagagcagcctccccgcagggccctgttgcgacccgatctccgtcctgcaccccggccgggggcccaccccagagcgtagcaggggcgctgggaacgacgtccacaaagcgctgcca

SEQ ID NO: 14442 - DNA, 120 bp, synthetic construct
  source 1..120: mol_type = other DNA
cccagtcttgtcctttaaatacagtgccattggggtaatgatttctaaggtccttttagatgtcctcctttgcctaatttgctgtgggttaggaattcctgggggagaggaggatagcac

SEQ ID NO: 14443 - DNA, 120 bp, synthetic construct
  source 1..120: mol_type = other DNA
tattaaattgctttaaacttataccccacaagcttctggaaagctgttgctgcctctggggaaaaggatccttcggctaaagatacgtcattggccccggaacccaaggatggggtctca

SEQ ID NO: 14444 - DNA, 120 bp, synthetic construct
  source 1..120: mol_type = other DNA
ggcgagcacgtttgggcttccacagacttccttttgaaacctgaggcctggccttctttgaggcctatagatgagcttacaaacgaaatttggctcagggcacccactattgcccggagt

SEQ ID NO: 14445 - DNA, 120 bp, synthetic construct
  source 1..120: mol_type = other DNA
aggctgaaaacgatgactgcagctgcactgtgattggggaaaacctgtcccccaacaaaataccctctcctgtgtgaccggaagagggagcctttggccctcgggcgtcgcaggcctccg

SEQ ID NO: 14446 - DNA, 120 bp, synthetic construct
  source 1..120: mol_type = other DNA
atttaaaatatgaacatgcttgtgaagttttgggcggttgtgagtgggtaccaacaattgcccctgcctgtgcaccatggctagactgccctagggatccagagacggccttgattcctc

SEQ ID NO: 14447 - DNA, 120 bp, synthetic construct
  source 1..120: mol_type = other DNA
agctgtcctcttatagacggggacactgagacctagaaactccccaaaagtaacaccagcctgctaaacaaaggtggcgcgatctgatcaaagaacacaagcctcagcgaccagtaagtt

SEQ ID NO: 14448 - DNA, 120 bp, synthetic construct
  source 1..120: mol_type = other DNA
acttctgtattaccatacgcgggagctatccacggacacgacgctgttccagaaagccatttagttactggaggtgcatgtgctcattctagttctctacgatacttaatgtgcacctaa

SEQ ID NO: 14449 - DNA, 120 bp, synthetic construct
  source 1..120: mol_type = other DNA
cctccggccctggagacgttcagcgctggcctcggcggcgcctaacttggcccagatgccgcccgggtcccggactccctgctgctctggctgctgtaggcacccaggcccggagcggag

SEQ ID NO: 14450 - DNA, 80 bp, synthetic construct
  source 1..80: mol_type = other DNA
gtaacgagtcagagctttggctaggaatgatttggaaaagaactgaaggcataattccacaggacattcacagttgtgtg

SEQ ID NO: 14451 - DNA, 80 bp, synthetic construct
  source 1..80: mol_type = other DNA
acagaggctgagaaagtttaagtaactggcccaggtaacaccggttatatcagtgtcagatctgatattcaaacctgggt

SEQ ID NO: 14452 - DNA, 80 bp, synthetic construct
  source 1..80: mol_type = other DNA
gtaagagctgatcagaatggcatccaagaaacacaaacgctgttggaaaacagtctctcttctctcatgctgaagtcttt

SEQ ID NO: 14453 - DNA, 80 bp, synthetic construct
  source 1..80: mol_type = other DNA
tgtaaaatatgagatttgtgtccattacctacccctaaaacccacaattgcatgtcaccaaaatacagtctctgaagagt

SEQ ID NO: 14454 - DNA, 80 bp, synthetic construct
  source 1..80: mol_type = other DNA
tcacagccatcctaggacataagtaatattacagtctccgctttatacatgaggagactagttgggaggttaagtgactt

SEQ ID NO: 14455 - DNA, 80 bp, synthetic construct
  source 1..80: mol_type = other DNA
attttcaaagtccagagctacataacacagtttctccttgatgtcccggacaatctcacgctcagctgtcaaccagatac

SEQ ID NO: 14456 - DNA, 80 bp, synthetic construct
  source 1..80: mol_type = other DNA
cctcaaatttggagcataaaataagcctcaggcatgttcagaaacctaaatgtttggacaataccaaattgctaagggga

SEQ ID NO: 14457 - DNA, 80 bp, synthetic construct
  source 1..80: mol_type = other DNA
agaaaaaagttctgctagaaatatgagatcaagggcttattttgaacactagaagaagatcttttagggctgggttcagc

SEQ ID NO: 14458 - DNA, 80 bp, synthetic construct
  source 1..80: mol_type = other DNA
tggctttgactaatagtcaccaaactaatagttgattaatagtggctttattccaggtctcttaacagaggaggagtttg

SEQ ID NO: 14459 - DNA, 80 bp, synthetic construct
  source 1..80: mol_type = other DNA
aacttaaagagacaatgaatgtaaaatgctgagcccagtacttgaccataacaagtatagaattgacactagacgttgtt

SEQ ID NO: 14460 - DNA, 80 bp, synthetic construct
  source 1..80: mol_type = other DNA
ggcaagtttttaacccttctcagcttcagtctcatgattggtaatagggagatgaaaataattagtgtgtacctcatcgg

SEQ ID NO: 14461 - DNA, 80 bp, synthetic construct
  source 1..80: mol_type = other DNA
taaggaaagttttttcttccaatagtctctgtctaggacgatacattctaagatgttgtcagctccatggagaaattcta

SEQ ID NO: 14462 - DNA, 80 bp, synthetic construct
  source 1..80: mol_type = other DNA
cagctgatggtatgatcagctcactgcagcttcgaactcctgggctcgaatgatgctaccacctcagcctcctgagtagc

SEQ ID NO: 14463 - DNA, 80 bp, synthetic construct
  source 1..80: mol_type = other DNA
ataacccagaatgaacattaacaagtaaaagtacagttgagcaatgtgagccagttatttccccagcagtagtgtggtgt

SEQ ID NO: 14464 - DNA, 80 bp, synthetic construct
  source 1..80: mol_type = other DNA
ggagaggtttctattatttattctcatgaatatatcccaagcagagaggcataaacatcaatcagatagcctcaatgcac

SEQ ID NO: 14465 - DNA, 80 bp, synthetic construct
  source 1..80: mol_type = other DNA
gttacactataagctttcagtaagctgaaactctgacttctgaaactctgacttctatgttgatacaaccttagtgtagt

SEQ ID NO: 14466 - DNA, 80 bp, synthetic construct
  source 1..80: mol_type = other DNA
ccgttaagagaaggacacccagagttatctgcctggcattgagatctcaattaggatttcaaattgagaaaatttcttct

SEQ ID NO: 14467 - DNA, 80 bp, synthetic construct
  source 1..80: mol_type = other DNA
ttggcattcctgtgatttggcttccctcagagcagattaagaagctttagaaaagaggcgagaactataaaggagaaaaa

SEQ ID NO: 14468 - DNA, 80 bp, synthetic construct
  source 1..80: mol_type = other DNA
aaacacaaaatgctaggaaaatctcagcatgaaaactccagtctgggctgaagctgccaaaccttgatttgcagtgaaac

SEQ ID NO: 14469 - DNA, 80 bp, synthetic construct
  source 1..80: mol_type = other DNA
cccaaacaaggagcaaagacagacttgagcctgtcgttcagtctaacacaaccatatagggacctcagcacaaaactctc

SEQ ID NO: 14470 - DNA, 80 bp, synthetic construct
  source 1..80: mol_type = other DNA
tgaccctctcatttctcaaagatataagccctcatctcaagcatcaatgaatagcttcagtgattttatatttgtctact

SEQ ID NO: 14471 - DNA, 80 bp, synthetic construct
  source 1..80: mol_type = other DNA
gcctgggtttgagatttatagtttcacatcccatccaagtctcttcagtgagagaaaccagcactgcatgggtatgagtg

SEQ ID NO: 14472 - DNA, 80 bp, synthetic construct
  source 1..80: mol_type = other DNA
gaccttgactttgtgtaaaggcaaacattttggatcaatacacgggggttatgattcagagttgaaattccaaagctatc

SEQ ID NO: 14473 - DNA, 80 bp, synthetic construct
  source 1..80: mol_type = other DNA
tggtgttggcatcagatgtacttactacacttaaataaacactaccttagactgtttgtgctgctgtaactaaatagctg

SEQ ID NO: 14474 - DNA, 80 bp, synthetic construct
  source 1..80: mol_type = other DNA
aactcctttcctaatgccatctcttcttttagcacactttacatatcctcctaaactcagcttaagtatccccttcccct

SEQ ID NO: 14475 - DNA, 80 bp, synthetic construct
  source 1..80: mol_type = other DNA
aatgcttagcaaatggtcaaggatattctgaagtgagggcaaataaaaataagtcaactaatagttatcagacaatgcta

SEQ ID NO: 14476 - DNA, 80 bp, synthetic construct
  source 1..80: mol_type = other DNA
ggagtaataagttttaaatttggctgcaactgaaattgcctaaggggcttaaaaaatcccaatgcacaggctacactcta

SEQ ID NO: 14477 - DNA, 80 bp, synthetic construct
  source 1..80: mol_type = other DNA
tttgctagacttctgtgaagactagctgatagtcacttatttagtctagaaaccagatcactgctcctctaaacgcaaaa

SEQ ID NO: 14478 - DNA, 80 bp, synthetic construct
  source 1..80: mol_type = other DNA
tgggatagtgagtgttttgtccattgaattaagtaagtggatgcaagatgacctcagggctattatagaaaaggtttgtg

SEQ ID NO: 14479 - DNA, 80 bp, synthetic construct
  source 1..80: mol_type = other DNA
taatctatattccaaaatctaagacaagttttgcaaattcagatgcctattggggcaaggatgactgaaaaggccaagtg

SEQ ID NO: 14480 - DNA, 80 bp, synthetic construct
  source 1..80: mol_type = other DNA
aaaaaggcacatggatgaagctggaacgcccctttatgaaaccatcagatctcatgagacttattcactgtcacgagaac

SEQ ID NO: 14481 - DNA, 80 bp, synthetic construct
  source 1..80: mol_type = other DNA
tcctcttttagctagactaaaaggctctttcctactttggcgtctaattttgtattcctagttttcctaacaggccctac

SEQ ID NO: 14482 - DNA, 80 bp, synthetic construct
  source 1..80: mol_type = other DNA
gtacaaattaaggtattatgaaagcatggtcattcaaaggaggcacccgttctgctgctcctttgtaactttcttttgcc

SEQ ID NO: 14483 - DNA, 80 bp, synthetic construct
  source 1..80: mol_type = other DNA
agcacagattttcccagggattgctgagcaaagagccccttactaaagaaacagcagactccatggaagagtgtcaattt

SEQ ID NO: 14484 - DNA, 80 bp, synthetic construct
  source 1..80: mol_type = other DNA
ggattaattaggtcagatattaggtgtcaggtggtgtttaaatccttgttgtccagagtgacatgggaagcactggaagc

SEQ ID NO: 14485 - DNA, 80 bp, synthetic construct
  source 1..80: mol_type = other DNA
gttacctaagcccaaattattacctgcaacgcagcttggcaaccttcaaacactaaccaaatcaggtatcagagcccttg

SEQ ID NO: 14486 - DNA, 80 bp, synthetic construct
  source 1..80: mol_type = other DNA
gcagctgttgatataggcatttctgtcctcttttctagtaccataatgtgtgcatgttaaagagattctgcaggtccctt

SEQ ID NO: 14487 - DNA, 80 bp, synthetic construct
  source 1..80: mol_type = other DNA
tggtcactctgcttttgatgtctctatttgaaaaagcctacaaatccaaagaaagcatgcccccattggcatagtctctg

SEQ ID NO: 14488 - DNA, 80 bp, synthetic construct
  source 1..80: mol_type = other DNA
tacctgaataggtctggttctagctactcacaactcagagaggtagtgaatgctaggaggtaggaagaaggacattcaac

SEQ ID NO: 14489 - DNA, 80 bp, synthetic construct
  source 1..80: mol_type = other DNA
gagccatctgattctgttgcagtctttggcaacacggcccatttaaattcaagttaggatctgagtgtttgggtaaacag

SEQ ID NO: 14490 - DNA, 80 bp, synthetic construct
  source 1..80: mol_type = other DNA
gggagaggagtgtaaattcagctattgtcttgtcttcaggcagcaggaaattaagggattggtaactgttatttgtaata

SEQ ID NO: 14491 - DNA, 80 bp, synthetic construct
  source 1..80: mol_type = other DNA
ctttctgggataatttctggcactgctttggagatggagcccctgaaaattggctatggaccaaatggattcccactctt

SEQ ID NO: 14492 - DNA, 80 bp, synthetic construct
  source 1..80: mol_type = other DNA
taaattttaaaactagaactaaaccagacattgagaggacccagaaatataccctgactaacgtgggtggaatttcattt

SEQ ID NO: 14493 - DNA, 80 bp, synthetic construct
  source 1..80: mol_type = other DNA
ctgcagttagatgagctgagatcactatagtactatatagcgctctaaatcctaaatgctagatcactgtaatactgtac

SEQ ID NO: 14494 - DNA, 80 bp, synthetic construct
  source 1..80: mol_type = other DNA
cttttgaggctcacctccattgaatctgtcctctatgcttagattcggggagtttttagtgcactatcagtatacagtac

SEQ ID NO: 14495 - DNA, 80 bp, synthetic construct
  source 1..80: mol_type = other DNA
tatgcctacatatcccaaaggagaagcttattttctgctattttgacatctaatgaattaatgcttgtgtggactgaatt

SEQ ID NO: 14496 - DNA, 80 bp, synthetic construct
  source 1..80: mol_type = other DNA
agatatgcggcgttcaacctactcatctgacaaagggctaatatccagaatctacaatgaactcaaacaaatttacaaga

SEQ ID NO: 14497 - DNA, 80 bp, synthetic construct
  source 1..80: mol_type = other DNA
taagctcttgactgtccttttcacataagtgggtgaagttgagaaaacataactgtgaatacatttgttgtactctgctc

SEQ ID NO: 14498 - DNA, 80 bp, synthetic construct
  source 1..80: mol_type = other DNA
actcatcttgggatgattttaaacagtaataagtgtaggcagcaataaccctaatgaagtatggggaaagagaatgtgag

SEQ ID NO: 14499 - DNA, 80 bp, synthetic construct
  source 1..80: mol_type = other DNA
tccattcaaagaaagtggccaaaatgtcccccctctggagcaagttgcattctgattaggaatgagactcgagccatata

SEQ ID NO: 14500 - DNA, 80 bp, synthetic construct
  source 1..80: mol_type = other DNA
gaagaaccaaggtcaaaacagggacatttcccaattcaatccaacagctgctttgttaacagtaccacaagcagtggggt

SEQ ID NO: 14501 - DNA, 80 bp, synthetic construct
  source 1..80: mol_type = other DNA
tgtggtacagaactgtaagatacatgtcccacgacagaaataaaaaaggcagagattcactgaggggggaattcatggac

SEQ ID NO: 14502 - DNA, 80 bp, synthetic construct
  source 1..80: mol_type = other DNA
actgaggtaactaaagaggaaatggattcagcataggctttggaagttcacttctgttacctagtaactgtgtgactttg

SEQ ID NO: 14503 - DNA, 80 bp, synthetic construct
  source 1..80: mol_type = other DNA
caactgcaaagtgttctgatatgtaataaattgccttgagaaatagtaggagccagtgctggaaggagtcaagctaaggc

SEQ ID NO: 14504 - DNA, 80 bp, synthetic construct
  source 1..80: mol_type = other DNA
ttactgttggaaagacttatgtttaccaggtgagaaaactgatgctgagaggggttaaatattatgcacagcttctcaca

SEQ ID NO: 14505 - DNA, 80 bp, synthetic construct
  source 1..80: mol_type = other DNA
aattggattaagaagccagggcccacagaacagatgttttcaccctactaacccaattgctgtctgctttttagttgcca

SEQ ID NO: 14506 - DNA, 80 bp, synthetic construct
  source 1..80: mol_type = other DNA
tacatatttctattaattggtagaaataattattaatagactttgtcacttggccactgtgggctctgacgccctctagt

SEQ ID NO: 14507 - DNA, 80 bp, synthetic construct
  source 1..80: mol_type = other DNA
cagcagacggcctttggacttgaactataactttttcatgggtctccagcctgttggccaatgctaaagttttggacttg

SEQ ID NO: 14508 - DNA, 80 bp, synthetic construct
  source 1..80: mol_type = other DNA
tatgtctccccacaaagcacatattcctatctccttgaacttgaggataattagacgtacgtgggcagagggtaggggaa

SEQ ID NO: 14509 - DNA, 80 bp, synthetic construct
  source 1..80: mol_type = other DNA
tgtgtccagtctggaactgcatccaaattcaggttcagtaatgatgtcattatccaaacataccttctgtaaaattcatg

SEQ ID NO: 14510 - DNA, 80 bp, synthetic construct
  source 1..80: mol_type = other DNA
ggaacacaccctgaggccagccctggctgcccaggcggagctgcctcttctcccgcgggttggtggacccgctcagtacg

SEQ ID NO: 14511 - DNA, 80 bp, synthetic construct
  source 1..80: mol_type = other DNA
gcacaaacaaattgcacgtgtgtaaacaaactgtacaatgattgatgaaagatgagggaaggtggtttggaagactccaa

SEQ ID NO: 14512 - DNA, 80 bp, synthetic construct
  source 1..80: mol_type = other DNA
atgccaagaaaggagcaactgtgcttagcacctgtttcaagtaaacacctcctgaaactctcagatgtatgaagatgtat

SEQ ID NO: 14513 - DNA, 80 bp, synthetic construct
  source 1..80: mol_type = other DNA
cccgcttccaatcttggctaagagatgctagcaatgggcattgatccagataaaattagattccttacacacaaagaata

SEQ ID NO: 14514 - DNA, 80 bp, synthetic construct
  source 1..80: mol_type = other DNA
aaaaaatgagaaaatcatgctctcaccatgtcaggaatataatcagtgtcttgtccatttatatctaactgcccaagtca

SEQ ID NO: 14515 - DNA, 80 bp, synthetic construct
  source 1..80: mol_type = other DNA
gttgggagaggtgatattgttagaagttttaaacaggactgaaaagagaggacaaggaagaaaatgaagtgtataaggca

SEQ ID NO: 14516 - DNA, 80 bp, synthetic construct
  source 1..80: mol_type = other DNA
tcctgcgaggaccaacgcccaggacaaaacaagttagaaccaaatcaaaaagtgtgggctttaaaaaaaaaaaaaaaaag

SEQ ID NO: 14517 - DNA, 80 bp, synthetic construct
  source 1..80: mol_type = other DNA
tagccccaaactctgccctcattgctgcaagcctcctagaccgaggacccccgggctgagggtggggtaaggataggtag

SEQ ID NO: 14518 - DNA, 80 bp, synthetic construct
  source 1..80: mol_type = other DNA
ttagatatatatattttttctcatgtaatcctggccgcaacctagtggaagaggggttactatccccttcctacagaaaa

SEQ ID NO: 14519 - DNA, 80 bp, synthetic construct
  source 1..80: mol_type = other DNA
ttgggacttgggaggctgaggtgggaggatcacttgagcccaggagttcaaggctacagtgagctatgattgcaccactg

SEQ ID NO: 14520 - DNA, 80 bp, synthetic construct
  source 1..80: mol_type = other DNA
aaaatgaaagcagaggaaccagacttagcgttgtgcccacacaaactgatcagaactccctggggaacttttaaaaaatg

SEQ ID NO: 14521 - DNA, 80 bp, synthetic construct
  source 1..80: mol_type = other DNA
tggattggggactatcatagaccagaattactccccctaacactctccaacaaacttctggaaaagttcaaccctagtca

SEQ ID NO: 14522 - DNA, 80 bp, synthetic construct
  source 1..80: mol_type = other DNA
agctcagcagcaggagtgcagagctagggtttccccaagctctcagtcacttaaacattgctctccacccttcacctcta

SEQ ID NO: 14523 - DNA, 80 bp, synthetic construct
  source 1..80: mol_type = other DNA
cagctgccctagcactccctccccatcttcttggcccctgccctcccttccctcctttcctctcatgctctggccaataa

SEQ ID NO: 14524 - DNA, 80 bp, synthetic construct
  source 1..80: mol_type = other DNA
gcagctgggggtggcctgccactgggtttgggtctggattaagttaaacctaagggtctggggttctgtgggtggggtgg

SEQ ID NO: 14525 - DNA, 80 bp, synthetic construct
  source 1..80: mol_type = other DNA
ctagcttagcagtgacccagtccattccctctcccccaaccccaccctgaccctgacgactccagcctcccttagcccca

SEQ ID NO: 14526 - DNA, 80 bp, synthetic construct
  source 1..80: mol_type = other DNA
gttcttgggaacctagagagcactacacaagcaaagagtacctggggccatggttctctctgtggccactgccttccagc

SEQ ID NO: 14527 - DNA, 80 bp, synthetic construct
  source 1..80: mol_type = other DNA
aagagcataggcttggaatcagacttcctgggttctattcctgatcttgccatgaccgtgcgtaggttatttgacctctc

SEQ ID NO: 14528 - DNA, 80 bp, synthetic construct
  source 1..80: mol_type = other DNA
ggggacaatcctcaggatatggctggagccctgcttcttggggacaaggatgtcctcatttcctgagcatctaccaggag

SEQ ID NO: 14529 - DNA, 80 bp, synthetic construct
  source 1..80: mol_type = other DNA
gaggtaatactagtacccaccccacagggctgttgtgaggacaaacaggataaagcatgtaaagtgtttacagcagaata

SEQ ID NO: 14530 - DNA, 80 bp, synthetic construct
  source 1..80: mol_type = other DNA
taggtgtgagcctccacacctgaccactgtggtatttttgttgctatttgtctttgtttgttgctgttttgttgttgttt

SEQ ID NO: 14531 - DNA, 80 bp, synthetic construct
  source 1..80: mol_type = other DNA
agaagacactacaaaaaattagcaacagtccagagaagcctaaagtgattcaatagcccaggagcacctgattcctttct

SEQ ID NO: 14532 - DNA, 80 bp, synthetic construct
  source 1..80: mol_type = other DNA
aggactttcagattaactgagaggatatcgaggccaagcatggcagggggaaggtcagtgggtgtcaagagacccaggtc

SEQ ID NO: 14533 - DNA, 80 bp, synthetic construct
  source 1..80: mol_type = other DNA
tggctctagagagacacacagaaagtttggcatttggaaatttcaaggatgtatgtatgctcacgtatggagcaggttgt

SEQ ID NO: 14534 - DNA, 80 bp, synthetic construct
  source 1..80: mol_type = other DNA
gcattgtagtcttcccacctcccacaagatggcggagggcaagtagcaagggggcggggtgtggccgccggaagcctagc

SEQ ID NO: 14535 - DNA, 80 bp, synthetic construct
  source 1..80: mol_type = other DNA
gaatggtgcctctgttggcaaatgattgttcatctaaatcattcatttttttcggctgtaggaaatctttggtctctgaa

SEQ ID NO: 14536 - DNA, 80 bp, synthetic construct
  source 1..80: mol_type = other DNA
tttttatgtttgcttcttgtatgggctagttcattcgttgctagccttcacttttctggaaccagagcctgtgtgttttt

SEQ ID NO: 14537 - DNA, 80 bp, synthetic construct
  source 1..80: mol_type = other DNA
ggtctctagtgttgtgttccttttcttctcatttcctcaggtttttatagcaaataacttaatctcttcctttgctgaga

SEQ ID NO: 14538 - DNA, 80 bp, synthetic construct
  source 1..80: mol_type = other DNA
gtgccaaccttgttttgaactgcacatgcaagggatcagggttgcatgttctttatgagaatctaactaatgcctgatga

SEQ ID NO: 14539 - DNA, 80 bp, synthetic construct
  source 1..80: mol_type = other DNA
ttccaaagaaagagagaaggccacttctcctagccttttcccaagaatcctaagctctagtttgattaaacaaacataga

SEQ ID NO: 14540 - DNA, 80 bp, synthetic construct
  source 1..80: mol_type = other DNA
tcttggttcttctcccactgtcaatcacgtgtcagatcttgaatatatcttgtttagttaggcccccaagttgtataata

SEQ ID NO: 14541 - DNA, 80 bp, synthetic construct
  source 1..80: mol_type = other DNA
gttagccaccgtgccgagcctatacgtaagattttgactgaacatttaaatagtcataggtgactggttaaaaatgaatt

SEQ ID NO: 14542 - DNA, 80 bp, synthetic construct
  source 1..80: mol_type = other DNA
ttctgctccattattccccatgatttggttttattcttgggctagcttatcttaatggtggtaaattactgtagtacttt

SEQ ID NO: 14543 - DNA, 80 bp, synthetic construct
  source 1..80: mol_type = other DNA
aagagacctgagtgttcatgagtgaggtggcctgtaccattcttgtcgagatgtgaaatagaataaaatgaggtgcccat

SEQ ID NO: 14544 - DNA, 80 bp, synthetic construct
  source 1..80: mol_type = other DNA
tacaatgtaatccaagaacatactctgtttcaaaggcctgttatttcagacttaaaatttgagatctgtatatggcccag

SEQ ID NO: 14545 - DNA, 80 bp, synthetic construct
  source 1..80: mol_type = other DNA
tttacttttcgtatgatcttgcacttaagattgctttctttgattttgaaggatctgaaacacaccctttagaatgtcct

SEQ ID NO: 14546 - DNA, 80 bp, synthetic construct
  source 1..80: mol_type = other DNA
cctgggccacccagatgagttgaaactgacttcagtccatggtttccttctggttccttctttatttctaggttgcagcc

SEQ ID NO: 14547 - DNA, 80 bp, synthetic construct
  source 1..80: mol_type = other DNA
tgaagtgggactgtatggaggagggagaatgtactaaactgaggagggactgcagacaaatttgtcttttagtatttttg

SEQ ID NO: 14548 - DNA, 80 bp, synthetic construct
  source 1..80: mol_type = other DNA
cgcccaggctggagtggcgtgatctccactcactgcaacctccgcctcccaggttcaggcaattctcctgtctcagccta

SEQ ID NO: 14549 - DNA, 80 bp, synthetic construct
  source 1..80: mol_type = other DNA
aacagaggcccaaggaagatgggtgacttgacttgcctaaaaatatgagggaatttctctccaatagcttttatattctc

SEQ ID NO: 14550 - DNA, 80 bp, synthetic construct
  source 1..80: mol_type = other DNA
ttgagatttttggttaagaatttggagatgacgcagttattgatgatgacaaggtcctgcgtggatcatggaagttggta

SEQ ID NO: 14551 - DNA, 80 bp, synthetic construct
  source 1..80: mol_type = other DNA
gggaaatttaccaattaaatgaattaaaaaacagacacctgtgaccaaagacgtggggctttttccccacacaccaatag

SEQ ID NO: 14552 - DNA, 80 bp, synthetic construct
  source 1..80: mol_type = other DNA
agagagagagattctgttcctgaggcctgaagtgcctcaacattattaaaaaaaaagaggactataataagcattatagt

SEQ ID NO: 14553 - DNA, 80 bp, synthetic construct
  source 1..80: mol_type = other DNA
gaaaaagcttgttgttcagaagctcatagtctaatggagagaaatagatattagttgagttggtactttgggagcatgga

SEQ ID NO: 14554 - DNA, 80 bp, synthetic construct
  source 1..80: mol_type = other DNA
ctttgtcactgtttgggtgctttgaaaggtagaaaatactaatcttgaagggtctttctaacagctggcaattaacagat

SEQ ID NO: 14555 - DNA, 80 bp, synthetic construct
  source 1..80: mol_type = other DNA
cttcttcagaaaaagattaggaaaaagcccttaccgtagtatatgaggtacagactggttcaggatcaagatccttatta

SEQ ID NO: 14556 - DNA, 80 bp, synthetic construct
  source 1..80: mol_type = other DNA
ccgtatcatgttgagagggtatttgaatgtggaatgaaatttattccaattcttaaacctttctgcttgtataaaaggtg

SEQ ID NO: 14557 - DNA, 80 bp, synthetic construct
  source 1..80: mol_type = other DNA
tcctatgtgctactctttcttgaatccacatgcataagcatttggtgctgttttggtaaccttcagtcactaagcttctc

SEQ ID NO: 14558 - DNA, 80 bp, synthetic construct
  source 1..80: mol_type = other DNA
cattgcctatatggtgaattctgagttttttaacctaacacacaatattgaaatctctgccctgaaaaattcctaaacat

SEQ ID NO: 14559 - DNA, 80 bp, synthetic construct
  source 1..80: mol_type = other DNA
atttagtatcttacaagggcagtgaaacagaactaacttagggtagctgagttgttgagtcatcacagtttttctgattt

SEQ ID NO: 14560 - DNA, 80 bp, synthetic construct
  source 1..80: mol_type = other DNA
accacaaaatctgaatctgcctttggccacaggttaagtgagaaatgttaatttctctctcctctaatgttgtgacttca

SEQ ID NO: 14561 - DNA, 80 bp, synthetic construct
  source 1..80: mol_type = other DNA
aatattattttaaaatatcattgcctatttttatagtactcttgtgtttatttctatttctttgatcatttgatatacta

SEQ ID NO: 14562 - DNA, 80 bp, synthetic construct
  source 1..80: mol_type = other DNA
aacacctatgtagaaaacattgtgatatacaccatgagatatgagacaaaatcaggtgagggctcttcccttgggatttt

SEQ ID NO: 14563 - DNA, 80 bp, synthetic construct
  source 1..80: mol_type = other DNA
gcttcctagtccccagaatctatgaatatgttaggttatgtgacaaaagggaattaaaatggctaatgaggtaactttaa

SEQ ID NO: 14564 - DNA, 80 bp, synthetic construct
  source 1..80: mol_type = other DNA
tcactccttgaggtaacatagaacatactggtaagtcttgcccgtagaagactatgaatatatctcccagtcctgtgtgg

SEQ ID NO: 14565 - DNA, 80 bp, synthetic construct
  source 1..80: mol_type = other DNA
tctaaggtcttcggtaaagagagacgattaagtttatcagtaaagcaccagagtcaattaaggcgactgaaaggagcact

SEQ ID NO: 14566 - DNA, 80 bp, synthetic construct
  source 1..80: mol_type = other DNA
catcttcaatcaaatagagatggcaggagctttattctgagctatgtgcaaacttgataagacaaggtaatgcttcagta

SEQ ID NO: 14567 - DNA, 80 bp, synthetic construct
  source 1..80: mol_type = other DNA
tgcctcaaatatgctatttaatagcttgcttcttttcatactatttgaaaattaagaaacgattataatatgcttcattt

SEQ ID NO: 14568 - DNA, 80 bp, synthetic construct
  source 1..80: mol_type = other DNA
tgctgcaaaaatcatagcaatcgagatgtaatttattactctccctcccacctccggcatcttgtgctaatccttctgcc

SEQ ID NO: 14569 - DNA, 80 bp, synthetic construct
  source 1..80: mol_type = other DNA
aatgctggggtagaagcccatttacaagaagccatagtttataaatgcagcctgaacagcagaaaaaaaattactgtttt

SEQ ID NO: 14570 - DNA, 80 bp, synthetic construct
  source 1..80: mol_type = other DNA
ttggcgttcaagaccagcctgggcaaccaagcaagaccctatctcaaaaaaaagtacttagagtctcttttttaaaatct

SEQ ID NO: 14571 - DNA, 80 bp, synthetic construct
  source 1..80: mol_type = other DNA
tatttcattcctcttgtagtatatctaatctatgactgacctattggctttagtggtctttgaaattattcactgctctg

SEQ ID NO: 14572 - DNA, 80 bp, synthetic construct
  source 1..80: mol_type = other DNA
tctcacaccctgcacccactcttcttgtgtgtttaatatgcataaattcttgagaaatagcatcattttgtgagtctgtt

SEQ ID NO: 14573 - DNA, 80 bp, synthetic construct
  source 1..80: mol_type = other DNA
cctatcactgttcctccagtgaaggccgtaagttttctccaaatcccgttaaccacaaacacctttatgatatacattct

SEQ ID NO: 14574 - DNA, 80 bp, synthetic construct
  source 1..80: mol_type = other DNA
tctgaccctctgctgctcttgtcacatattcttctctgacccttctgcctccttcttaaaagaacctttgtgattacatt

SEQ ID NO: 14575 - DNA, 80 bp, synthetic construct
  source 1..80: mol_type = other DNA
tgataatgcaccctttctgttcattcttacgtgtatatttgtcttttatatggctgtcgctgagtaaagcattttgggaa

SEQ ID NO: 14576 - DNA, 80 bp, synthetic construct
  source 1..80: mol_type = other DNA
ctcaaaaagccttatatacctaacaattgagacagatctttgaagtatcccctagatcaaagaggaaatcaagatggaag

SEQ ID NO: 14577 - DNA, 80 bp, synthetic construct
  source 1..80: mol_type = other DNA
tggcacctcttttgagtatccgtcactttgataagaaaaaagaaaaaaggcaccttctgatttgaattctagctgacttt

SEQ ID NO: 14578 - DNA, 80 bp, synthetic construct
  source 1..80: mol_type = other DNA
attcgatgtggggtggtggtggtcattcacagcaactcaaatagccaaaagcctagggataaatttgatgtgaaagatac

SEQ ID NO: 14579 - DNA, 80 bp, synthetic construct
  source 1..80: mol_type = other DNA
ctcaatggcctttgaaattatttgggttaccttggggtgtttgaaaacccaaattaggaaattatgctttagaccacctg

SEQ ID NO: 14580 - DNA, 80 bp, synthetic construct
  source 1..80: mol_type = other DNA
cagaaaaaaagaatgaagtttgctttagctctgacagtttccctcctatttccaggtttttatggaaagttttttctttg

SEQ ID NO: 14581 - DNA, 80 bp, synthetic construct
  source 1..80: mol_type = other DNA
tttctgttgcttcttgaatcaattccccctccctagaatctttaatatgtttggaggttgttttctttttcctgtctcta

SEQ ID NO: 14582 - DNA, 80 bp, synthetic construct
  source 1..80: mol_type = other DNA
ttattactcctagtctagtaacggacatcattactttagagaactctacttggccctctgtgtgtcttacacccattaaa

SEQ ID NO: 14583 - DNA, 80 bp, synthetic construct
  source 1..80: mol_type = other DNA
aatgggatcttttctttcatttatcttctgtctggtttctctcccctataaatgaatgatttctgtatattttgtactat

SEQ ID NO: 14584 - DNA, 80 bp, synthetic construct
  source 1..80: mol_type = other DNA
taccccacacttacaaggtgcagcagtgtctttagtggtcatcttaactgcagaaaaacaaattgagaggtttgcatgct

SEQ ID NO: 14585 - DNA, 80 bp, synthetic construct
  source 1..80: mol_type = other DNA
gcccattgatcagaggaggggtcttaactatgggtgaaccctatatcttactgaagaggttatgttacatgtatattttc

SEQ ID NO: 14586 - DNA, 80 bp, synthetic construct
  source 1..80: mol_type = other DNA
gtatcttttggcctcagtttgagcacagcagatcccaagaccacatatgccatagcataggctattatagtcaacctttt

SEQ ID NO: 14587 - DNA, 80 bp, synthetic construct
  source 1..80: mol_type = other DNA
aagcagccactaaattttttagtagtgaatttcaaaatcctttttaaccttataggtccaagggtagccaaggatggctg

SEQ ID NO: 14588 - DNA, 80 bp, synthetic construct
  source 1..80: mol_type = other DNA
aaaaaatcttcctgctttgtgttgtttctccctcttggctattttaacatttgagttcctggtccagttcttcctgtctg

SEQ ID NO: 14589 - DNA, 80 bp, synthetic construct
  source 1..80: mol_type = other DNA
cctggcaggcctgtttagatagtacatgtctgttttgtagtgtagaactctgagatctcttttttaaagtttgtttaatt

SEQ ID NO: 14590 - DNA, 80 bp, synthetic construct
  source 1..80: mol_type = other DNA
atctagtggcaaaagaggacactgctttgctatttgattatatgtgtctttgtagcagccagggaaataagtgtttatgg

SEQ ID NO: 14591 - DNA, 80 bp, synthetic construct
  source 1..80: mol_type = other DNA
ctcactgcagcctccacctcctgggctcccagagtagctgggattacaggtccctaccgccacgcccggctaatttttgt

SEQ ID NO: 14592 - DNA, 80 bp, synthetic construct
  source 1..80: mol_type = other DNA
gtgctgggattacaggcgtgagccaccgtgcccagcctaatgaataattttctaatgtttctaaaatgttaaaatacttc

SEQ ID NO: 14593 - DNA, 80 bp, synthetic construct
  source 1..80: mol_type = other DNA
acaacatttaaggctagagagttaagtgctaccagagaataaggctgaactggaaaggcaaagtgaaatatcccatattc

SEQ ID NO: 14594 - DNA, 80 bp, synthetic construct
  source 1..80: mol_type = other DNA
gttcttgtatacacagttggcatacagtcaaacgttatatgaaatgcagagaaactggaagattactgataatcaaggga

SEQ ID NO: 14595 - DNA, 80 bp, synthetic construct
  source 1..80: mol_type = other DNA
actgatcacaccaaatgtggagcattggaatgctcaggcattgctgagagaagtattaaaaaccattttggcagtttcct

SEQ ID NO: 14596 - DNA, 80 bp, synthetic construct
  source 1..80: mol_type = other DNA
caaagtaactggatgtgactgtaaatttacacagattttgttgatgaggttcataactcaaagcacttacaaaagtaatt

SEQ ID NO: 14597 - DNA, 80 bp, synthetic construct
  source 1..80: mol_type = other DNA
acgcttgagaacactactgtaggctttggagaagaatcttacaaagagagacctgatcggccgggcgcggtggctcacgc

SEQ ID NO: 14598 - DNA, 80 bp, synthetic construct
  source 1..80: mol_type = other DNA
aggtagtctccaatgagagttcttaaatggaagagatggtgccctgaagtttatagtagacattttgatgggcatattca

SEQ ID NO: 14599 - DNA, 80 bp, synthetic construct
  source 1..80: mol_type = other DNA
aagtagcttttgtaacttgagcaagtctctgggtctcacttgttttatctgaaaaatgagaataatttgcattgttggtt

SEQ ID NO: 14600 - DNA, 80 bp, synthetic construct
  source 1..80: mol_type = other DNA
tcggctctttgtaaagcttgttgctattctgccagtcactaaatagggctttagtattctatatgccatagacttgagcc

SEQ ID NO: 14601 - DNA, 80 bp, synthetic construct
  source 1..80: mol_type = other DNA
tgattgcacttacattaaatctaaaaatataaacaaggccgtttcctgggattctgaagacctattttgtcacttatttt

SEQ ID NO: 14602 - DNA, 80 bp, synthetic construct
  source 1..80: mol_type = other DNA
tctattgaagtatattcagtaactactagattcagtaaaagatgactcttttcattatggaaggcccactacaagtggcc

SEQ ID NO: 14603 - DNA, 80 bp, synthetic construct
  source 1..80: mol_type = other DNA
aaagttaacattatctcactgcagataccaaaatatagatcattatcaggaacttcgtcaaatgttttatgtcccctaaa

SEQ ID NO: 14604 - DNA, 80 bp, synthetic construct
  source 1..80: mol_type = other DNA
aaaggtgctttagccttttctgttgttactgtagaaaagacgtcttgtttttgttttcgtttttctcccaaaatatggcc

SEQ ID NO: 14605 - DNA, 80 bp, synthetic construct
  source 1..80: mol_type = other DNA
agcctgctacaagactgtcataccactgttgtcattatgcttcccatttaggtctaatatgtttgggtgttcttgactct

SEQ ID NO: 14606 - DNA, 80 bp, synthetic construct
  source 1..80: mol_type = other DNA
attgaatgctaatacaaatgtgccatgctcttctaggtgacccccagtaaggtagaggactaagaagacatgagatttat

SEQ ID NO: 14607 - DNA, 80 bp, synthetic construct
  source 1..80: mol_type = other DNA
cataagcaggggcttcctttcttcccaatcagtccatcactattaaggttgccacataagaacaaaagcttatttcttat

SEQ ID NO: 14608 - DNA, 80 bp, synthetic construct
  source 1..80: mol_type = other DNA
caaaaagttgaattaaacacttaaattggtgatgatggtagcatacattggtataacatctcacaagggcagtaagttaa

SEQ ID NO: 14609 - DNA, 80 bp, synthetic construct
  source 1..80: mol_type = other DNA
gctctggcaaagagccacgtgaaaagagataaattatatactttttgtacctcttgagttttatccctgtaacactctta

SEQ ID NO: 14610 - DNA, 80 bp, synthetic construct
  source 1..80: mol_type = other DNA
atgttttatttaaagctcttatttagaaaatctataaagtttgaattctagaggacctcagggttcaactaggcaactag

SEQ ID NO: 14611 - DNA, 80 bp, synthetic construct
  source 1..80: mol_type = other DNA
taagtgtccatttaactgtcttgtttagctaattaaaatacactaggatttgtctggtttcctcatctggatgttgctag

SEQ ID NO: 14612 - DNA, 80 bp, synthetic construct
  source 1..80: mol_type = other DNA
caacatctgtaaatcccttccgcttaaggaaatatcccactttcctattcactacacgtcagtctagtacattttccatc

SEQ ID NO: 14613 - DNA, 80 bp, synthetic construct
  source 1..80: mol_type = other DNA
catgtccagctaattttttgtacttttagtagagacaaggttttgatgtgttagccaggatgttcttgatatcctgacct

SEQ ID NO: 14614 - DNA, 80 bp, synthetic construct
  source 1..80: mol_type = other DNA
tcatgttcaattttttttttttgcagagagggtttgggaagtggaggactaataagtggagttacaactggctcagtagg

SEQ ID NO: 14615 - DNA, 80 bp, synthetic construct
  source 1..80: mol_type = other DNA
ggcaattggaatatgaagcaaggcaaatcagagttgcgatggaagaacaactaggtacctgccaggatatggaaaaacga

SEQ ID NO: 14616 - DNA, 80 bp, synthetic construct
  source 1..80: mol_type = other DNA
tttgtgacacttcctaaacataatgatttttttttttttttcttgagtctcaccctgttgcccaggctgaagtgcaatgg

SEQ ID NO: 14617 - DNA, 80 bp, synthetic construct
  source 1..80: mol_type = other DNA
accatactacatttcatagtccatacatgttagtttcatagtgaaggttaagatcataatgaggttgggggcttaactag

SEQ ID NO: 14618 - DNA, 80 bp, synthetic construct
  source 1..80: mol_type = other DNA
ggcaaataatggaaatgttggtagaatatataagagatttaatatccctactctacaaggatcacctacaaatcaattga

SEQ ID NO: 14619 - DNA, 80 bp, synthetic construct
  source 1..80: mol_type = other DNA
ctatgaccgtgtgtttctataggacttctaggaatatgttgcgtacagaaatacttactttagggcagaatgtagataca

SEQ ID NO: 14620 - DNA, 80 bp, synthetic construct
  source 1..80: mol_type = other DNA
taaaggtggaaatgggggtaggaggacctgttcacagtaacaggaaactttaaagtaactagaaaaagcctgcataaaga

SEQ ID NO: 14621 - DNA, 80 bp, synthetic construct
  source 1..80: mol_type = other DNA
gtaaataatttaggaaaactcaaaatccacttgtgcctacctatgtgagattgttagtctccaggtacctcttaactgca

SEQ ID NO: 14622 - DNA, 80 bp, synthetic construct
  source 1..80: mol_type = other DNA
actctcggcctcaaccgtgccttttaacaagaaagcaaccatagataatttatgaacacaaatgggcatggctgtgtttc

SEQ ID NO: 14623 - DNA, 80 bp, synthetic construct
  source 1..80: mol_type = other DNA
caagtttatatatgctggatatttctggactttcttctgttagtccactttagcttctccatgcctgcactgataccaca

SEQ ID NO: 14624 - DNA, 80 bp, synthetic construct
  source 1..80: mol_type = other DNA
tatatcatcgccggtttaagattctatacactgtcatattgttcgcaaataatgacagtttgtttatcctttccagtcct

SEQ ID NO: 14625 - DNA, 80 bp, synthetic construct
  source 1..80: mol_type = other DNA
ttggctatttctctaaagctaggaagtacttgccacctggttatggaaatgatcactcatctttgcaatatctttagaaa

SEQ ID NO: 14626 - DNA, 80 bp, synthetic construct
  source 1..80: mol_type = other DNA
cgtgcccggcagcgaacacaacttgagttttctgttctttgtttatcataagactggatgatagcagtaaacatttttac

SEQ ID NO: 14627 - DNA, 80 bp, synthetic construct
  source 1..80: mol_type = other DNA
ggttggggaccctgatatttattaaaacaaatcagatgttctttccctttactggtatactatgtttatataaatttatt

SEQ ID NO: 14628 - DNA, 80 bp, synthetic construct
  source 1..80: mol_type = other DNA
actaattaggtttcttgttttattttagcgaagaatagccagaattcagcaaatcgaaaaggacatacttcgtatacgac

SEQ ID NO: 14629 - DNA, 80 bp, synthetic construct
  source 1..80: mol_type = other DNA
cccccactggcatccaggcttataatctccaggcaagtttctggaaggaacttctataaggaatgtgactaaccctgatt

SEQ ID NO: 14630 - DNA, 80 bp, synthetic construct
  source 1..80: mol_type = other DNA
cccctgttaaaccttttaaaagaaaatatgtgcagctatgttttgaccccagttctttgacaccactgtatatcctccag

SEQ ID NO: 14631 - DNA, 80 bp, synthetic construct
  source 1..80: mol_type = other DNA
aacacacacccctatcactcgagaaattccaagggtatttgaagctctctcaggtacaaatgaacaaagaccagctatat

SEQ ID NO: 14632 - DNA, 80 bp, synthetic construct
  source 1..80: mol_type = other DNA
gagatcggagggggtgagtatccccccttccccaaaaactcagctgaaagagattagaaagaaagagttctttcaaaaaa

SEQ ID NO: 14633 - DNA, 80 bp, synthetic construct
  source 1..80: mol_type = other DNA
ctttggctacctgtattataactctggtttaaggtctagatgctggacgtgatttaagtctactaattattacacatgat

SEQ ID NO: 14634 - DNA, 80 bp, synthetic construct
  source 1..80: mol_type = other DNA
tgtgtacacaaagacttagacttgtatgttcattcactagcagcattttttcataatagcctcaaaggagaagcagtgca

SEQ ID NO: 14635 - DNA, 80 bp, synthetic construct
  source 1..80: mol_type = other DNA
tactcaacatattcaaaacataattaatgatctgttcctcctaagccctctttactaccccaccttgcagcaaaaaacct

SEQ ID NO: 14636 - DNA, 80 bp, synthetic construct
  source 1..80: mol_type = other DNA
tgttttacccagaacactcatcctctactcctcccctttgcctagttaactcctatttactcttcaagtctttactcaaa

SEQ ID NO: 14637 - DNA, 80 bp, synthetic construct
  source 1..80: mol_type = other DNA
gggttatgttcctgatagtaatgtgagcgcagctggtagaggatggcattcctgtgagtctcagaaaatcctttgtctcg

SEQ ID NO: 14638 - DNA, 80 bp, synthetic construct
  source 1..80: mol_type = other DNA
gctgcattttgattatgtatatgatttgacctagttatttttgcttgccttgaataggtttgctctttcactaagacctt

SEQ ID NO: 14639 - DNA, 80 bp, synthetic construct
  source 1..80: mol_type = other DNA
gatctactcgtagtgctttgggtcatcttccaattattatgtactttggaaaccttacctatccagtaagctggctatga

SEQ ID NO: 14640 - DNA, 80 bp, synthetic construct
  source 1..80: mol_type = other DNA
tagttaagtggctctggagtcaacaaacctgggaaatcacactccctcactaactagcttagtaacaaaaagtctctgag

SEQ ID NO: 14641 - DNA, 80 bp, synthetic construct
  source 1..80: mol_type = other DNA
ccaagctaatttttgtatttttagtagatacagggtctcattgtgttggccaggatagtctcaatctcttgacctcgtga

SEQ ID NO: 14642 - DNA, 80 bp, synthetic construct
  source 1..80: mol_type = other DNA
gtcttgatttccgttgtatggtagtttaggttgccatacttcagagtcctaccatgacatacatcatgtcatttatgtca

SEQ ID NO: 14643 - DNA, 80 bp, synthetic construct
  source 1..80: mol_type = other DNA
cagcctgtgcacatctatacctgttccatgtagtgtttgtttcatcccattttgctcagttaacaccagttcatgtgtgt

SEQ ID NO: 14644 - DNA, 80 bp, synthetic construct
  source 1..80: mol_type = other DNA
cagtttgacagtttactgtggtaattgtattttagggagttctgggtttttgtaatttgttatttggggaatttaagaaa

SEQ ID NO: 14645 - DNA, 80 bp, synthetic construct
  source 1..80: mol_type = other DNA
aacagtaattgtttaatagcatcatttatccagtcagtattcaaacttgcagttgtttcataaatgtctttttcacagtt

SEQ ID NO: 14646 - DNA, 80 bp, synthetic construct
  source 1..80: mol_type = other DNA
gggtagtgatgcaatttagtaataatgctagatgagaaggaggtttgtgagagaaaataatgagtctagttttggaaaaa

SEQ ID NO: 14647 - DNA, 80 bp, synthetic construct
  source 1..80: mol_type = other DNA
agtgagctgagatccttccactgcactccagcctggtgacagagcaagactccgtctcaaaaaaaaaagtagaagagagc

SEQ ID NO: 14648 - DNA, 80 bp, synthetic construct
  source 1..80: mol_type = other DNA
tgtggatggtacaggaaagttggataggaaaaaggacagtgggaaatagtgtctcacacatttggacactgagtgtcagg

SEQ ID NO: 14649 - DNA, 80 bp, synthetic construct
  source 1..80: mol_type = other DNA
cccccaaaacttaacagcattagtagacatttatatttgcttctatggatcagaaatcctggtgcagctgagctgcctgt

SEQ ID NO: 14650 - DNA, 80 bp, synthetic construct
  source 1..80: mol_type = other DNA
tgtatcttcctgtgtgttcatatagtttctgtcaaagcacttacccacacgtattttcatgttcagctcctcatctagat

SEQ ID NO: 14651 - DNA, 80 bp, synthetic construct
  source 1..80: mol_type = other DNA
ttaacagttttctatgttgtctaccaaagtggaagttatctggcaaacagtttacgttgctagctaacagggaagaaaag

SEQ ID NO: 14652 - DNA, 80 bp, synthetic construct
  source 1..80: mol_type = other DNA
tgctgaaaataccctctccctcatttcctacctgtgatctctccgtgctgtttttaagacgtaattctgattgtaccatt

SEQ ID NO: 14653 - DNA, 80 bp, synthetic construct
  source 1..80: mol_type = other DNA
tcatctgggaaccaaggtaacagaagattacaaaccctggtcactaatgccatgactactttgctaagacattcttggcc

SEQ ID NO: 14654 - DNA, 80 bp, synthetic construct
  source 1..80: mol_type = other DNA
gctgataagtgagctttcttagagtatctttcttagatgttagcaaatattttaggatttgggaataatgtttgaaaaga

SEQ ID NO: 14655 - DNA, 80 bp, synthetic construct
  source 1..80: mol_type = other DNA
attctcactatgaggcttaatcctgtttatacttcttgggacctcatatgccattcactgtgccaggagttgtatgtacc

SEQ ID NO: 14656 - DNA, 80 bp, synthetic construct
  source 1..80: mol_type = other DNA
gataactgggtgccactttccggtttctaatctgcttctaactaaatacgtagaatttattgtcagagagtaattagtac

SEQ ID NO: 14657 - DNA, 80 bp, synthetic construct
  source 1..80: mol_type = other DNA
cagctgtatatccatgcgacagtctggatgtcttcctctcctcatccagcttttacatggcaatgacaaagactctgtat

SEQ ID NO: 14658 - DNA, 80 bp, synthetic construct
  source 1..80: mol_type = other DNA
tgcactacaagtagatgattctactgtatcagcctattgatgtgaagaggagatgatacaaacatgacttatgaacctat

SEQ ID NO: 14659 - DNA, 80 bp, synthetic construct
  source 1..80: mol_type = other DNA
ggattactggtgtgagccactgcacctagcaccatgtgcttttaacccacactcatgatagtagtttaaatagaaattat

SEQ ID NO: 14660 - DNA, 80 bp, synthetic construct
  source 1..80: mol_type = other DNA
ggatataaggccaccaacttctgttatcagctgcttcctctgtgtagcaaaaaattgtaccctggtttccagcatagaaa

SEQ ID NO: 14661 - DNA, 80 bp, synthetic construct
  source 1..80: mol_type = other DNA
tttcctccccctggtctcctgtggattctcagttaatcttatgaattctcccctcgttaatacaatctcagcatttgtga

SEQ ID NO: 14662 - DNA, 80 bp, synthetic construct
  source 1..80: mol_type = other DNA
tgattccctaatctaccccagaaactgtgctaggcactagatttttataatgattaagacctggtcctggctttcaggga

SEQ ID NO: 14663 - DNA, 80 bp, synthetic construct
  source 1..80: mol_type = other DNA
tccctgtcaatttcatgggtcaaaattctcagttcttttacaggctccttttcttttacccaagtgtaaaatggtggaat

SEQ ID NO: 14664 - DNA, 80 bp, synthetic construct
  source 1..80: mol_type = other DNA
acatgctgtttcctttgcttagaacgcatctttcttcttcctgccccacccttgttagatacgcattcatctggccagac

SEQ ID NO: 14665 - DNA, 80 bp, synthetic construct
  source 1..80: mol_type = other DNA
ctttacctttgttttctccttgacttcctattgttggccattgtgggcattgtttagcattttcagtggaaagaatcagg

SEQ ID NO: 14666 - DNA, 80 bp, synthetic construct
  source 1..80: mol_type = other DNA
ttcacattcgcttatctttactcatttgtttgtcttatgcctaaacaaaggcaaaggtacatctacagatggaacacagt

SEQ ID NO: 14667 - DNA, 80 bp, synthetic construct
  source 1..80: mol_type = other DNA
ctagaaaaagaaaaataattatattgtggttagactgtaggaaatctttttggcactgtagtagcatttaggaggaattt

SEQ ID NO: 14668 - DNA, 80 bp, synthetic construct
  source 1..80: mol_type = other DNA
cctaaagtactaaggtagaaaagattatataaggggatttaatgtatatcagggtttctctgcctcagcactatagacat

SEQ ID NO: 14669 - DNA, 80 bp, synthetic construct
  source 1..80: mol_type = other DNA
attggttaaaatttaaaagattgaccatgcattttcaaggatgttgagcagctggaaatcatgtattctgctagtgggaa

SEQ ID NO: 14670 - DNA, 80 bp, synthetic construct
  source 1..80: mol_type = other DNA
gaaggatttaatgtgtgtgtgtattatgagaatttgcactgctgctaactggttcatgacttaattctctctcaaggacc

SEQ ID NO: 14671 - DNA, 80 bp, synthetic construct
  source 1..80: mol_type = other DNA
agagtgtttctggggcagttacaatttgacagttgactttgacttgcttcatttctaaactggctgtactatcttgagtt

SEQ ID NO: 14672 - DNA, 80 bp, synthetic construct
  source 1..80: mol_type = other DNA
actggattctcttctctgggaatgtacaggtctaatcctcctaaagagctgttctcctccatgaaatatttgattgattt

SEQ ID NO: 14673 - DNA, 80 bp, synthetic construct
  source 1..80: mol_type = other DNA
ccagcacatggcaagttttgaccaaatacctttaattgtgtatcagagtgtttctgtggccattacaatttgacagttga

SEQ ID NO: 14674 - DNA, 80 bp, synthetic construct
  source 1..80: mol_type = other DNA
cggccacatgccgggccttaatccacttcctgttcacttttttttttcttttttcaagcaaccccagcctgagaataacc

SEQ ID NO: 14675 - DNA, 80 bp, synthetic construct
  source 1..80: mol_type = other DNA
aacagtttatagtattatagaggagactaaattaagcaaattatagttgagaggtgtagcccataggtggaggaaaaaat

SEQ ID NO: 14676 - DNA, 80 bp, synthetic construct
  source 1..80: mol_type = other DNA
atcttcagtttgcctgcgttaaacaagctgttgctctttcatgtccagagttcattatgctgattctcactccttgtttt

SEQ ID NO: 14677 - DNA, 80 bp, synthetic construct
  source 1..80: mol_type = other DNA
tatgaatagagtaaatgtatgtgccccaccccctgcaaatgttttaagctattgggtcagaataggaaatgtagaattga

SEQ ID NO: 14678 - DNA, 80 bp, synthetic construct
  source 1..80: mol_type = other DNA
cttcatcaagaggaagcttagatagttctcgttctgaaaaagatagaagtttggagagagaacgcggaattggtctaggc

SEQ ID NO: 14679 - DNA, 80 bp, synthetic construct
  source 1..80: mol_type = other DNA
cgaacatatgtcttcaagcagtgagaatacgtccacaccttcatctaatgccaagaggcagaatcagctccatccaagtt

SEQ ID NO: 14680 - DNA, 80 bp, synthetic construct
  source 1..80: mol_type = other DNA
caagcgagaagtacctaaaaataaagcacctactgctgaaaagagagagagtggacctaagcaagctgcagtaaatgctg

SEQ ID NO: 14681 - DNA, 80 bp, synthetic construct
  source 1..80: mol_type = other DNA
gtcttcaatgataagctcccaaataatgaagatagagtcagaggaagttttgcttttgattcacctcatcattacacgcc

SEQ ID NO: 14682 - DNA, 80 bp, synthetic construct
  source 1..80: mol_type = other DNA
ttcgtctgattcagattccatcctttccctgaaatcaggaatctctctgggatcaccatttcatcttacacctgatcaag

SEQ ID NO: 14683 - DNA, 80 bp, synthetic construct
  source 1..80: mol_type = other DNA
caactaagtcctcaggttctggaaaaatgtcatatacatctccaggtagacagatgagccaacagaaccttaccaaacaa

SEQ ID NO: 14684 - DNA, 80 bp, synthetic construct
  source 1..80: mol_type = other DNA
acctgctgtttctaaaacagaggatgtttgggtgagaattgaggactgtcccattaacaatcctagatctggaagatctc

SEQ ID NO: 14685 - DNA, 80 bp, synthetic construct
  source 1..80: mol_type = other DNA
tgaacaagtttacccagcctgctttgctttactgcatgaatgaaactgatggttcaatttcagaagtaatgattaacagt

SEQ ID NO: 14686 - DNA, 80 bp, synthetic construct
  source 1..80: mol_type = other DNA
gggcaagatctcagcagtgaagtataatcagcactttgccatgctcagaaaattcaaatcacatggaactttagaggtag

SEQ ID NO: 14687 - DNA, 80 bp, synthetic construct
  source 1..80: mol_type = other DNA
attgacctttaaatttttgccaaatgttatctgaaattgtctatgaataccatctacttctgttgttttcccaggcttcc

SEQ ID NO: 14688 - DNA, 80 bp, synthetic construct
  source 1..80: mol_type = other DNA
tatgatacacaataaagactccatttatttgttcctcctcccccaagtttagcaaaataactcagatcctgattttcttt

SEQ ID NO: 14689 - DNA, 80 bp, synthetic construct
  source 1..80: mol_type = other DNA
attgtaaaaggtcctgaagattacgtagcacctctgtggtcttgagagactgaatggctttaaatacctcttgggcttct

SEQ ID NO: 14690 - DNA, 80 bp, synthetic construct
  source 1..80: mol_type = other DNA
actgttgttaatttctctttatcacatgccccagaaaggatttaacaaaaacgcttgctgtttgtcatttacattgtgac

SEQ ID NO: 14691 - DNA, 80 bp, synthetic construct
  source 1..80: mol_type = other DNA
aggtgcgcttttccttcccattccctgaaagcagaaaaacagatgagctatcacgaaaggggtatggagatgaagaaaat

SEQ ID NO: 14692 - DNA, 80 bp, synthetic construct
  source 1..80: mol_type = other DNA
gatggaacctgaagatctgtaaatgggacatggaacgtaggcatgacaagaactgaatttagatcatttagtttcagccc

SEQ ID NO: 14693 - DNA, 80 bp, synthetic construct
  source 1..80: mol_type = other DNA
taagtgttggcctcactagcaatagttcctgaatattcccgagaaagaaccgaacccttgacatctcctttggtagatga

SEQ ID NO: 14694 - DNA, 80 bp, synthetic construct
  source 1..80: mol_type = other DNA
ctctgactgataaactcacaaagcacagccaaaggatttgtgatggaatgcctgtgtttgtttttcttatactgagcttt

SEQ ID NO: 14695 - DNA, 80 bp, synthetic construct
  source 1..80: mol_type = other DNA
ttgtgcatttgcttgaaaatcaaaattgagaacttctaatttggactctcctttggcagtgatggaagctgcgatacctg

SEQ ID NO: 14696 - DNA, 80 bp, synthetic construct
  source 1..80: mol_type = other DNA
cagtgaacccttgctctaccaatgctttcatacgtttagcccaatcttggatagaatattgctctgcaaagtcagtaagg

SEQ ID NO: 14697 - DNA, 80 bp, synthetic construct
  source 1..80: mol_type = other DNA
atcaatagcctcaatgtgttgttttaactttccagctaggtgctggatgtctatattctgtatgtgtctcttaagctgct

SEQ ID NO: 14698 - DNA, 80 bp, synthetic construct
  source 1..80: mol_type = other DNA
agtaagcagggcactgactttgtgttcaagagctgcactgatgcttttcctagacacgagatgatgacttgtggagcctt

SEQ ID NO: 14699 - DNA, 80 bp, synthetic construct
  source 1..80: mol_type = other DNA
agatattccatcttggccaatccttagtgtcgccttgtgagcaccactattaattttgtcagtgcctaagatgtcagcat

SEQ ID NO: 14700 - DNA, 80 bp, synthetic construct
  source 1..80: mol_type = other DNA
ttgcctgaccaccacaggctttgtttaggttcccttgttgagtgcttccactctaccttatacttatatactacacttta

SEQ ID NO: 14701 - DNA, 80 bp, synthetic construct
  source 1..80: mol_type = other DNA
cattaccatcccacctaagtcatagccaatttgtctcattcttacagttacatagtcccttgcacctttctcaaagagca

SEQ ID NO: 14702 - DNA, 80 bp, synthetic construct
  source 1..80: mol_type = other DNA
ttggatgagcctcaaagagcaatgaacattaggcaaaaataccgatttgacaagttaattattaagctggacaatgcact

SEQ ID NO: 14703 - DNA, 80 bp, synthetic construct
  source 1..80: mol_type = other DNA
caatggagatatgcaggattaaacagaagttccatttgtggtgatcaaaaccagatacaaggatggttcagagaaacagc

SEQ ID NO: 14704 - DNA, 80 bp, synthetic construct
  source 1..80: mol_type = other DNA
tccgaggtcaacatcaaaatccggaatttggacttcactggacaaggtcatactctgccgattatatttgaatgtcatgg

SEQ ID NO: 14705 - DNA, 80 bp, synthetic construct
  source 1..80: mol_type = other DNA
gatacaaggataaaagaaagggatagaagaagtgttatttcatacttggtggtcagagaaattctctctgataagggcac

SEQ ID NO: 14706 - DNA, 80 bp, synthetic construct
  source 1..80: mol_type = other DNA
tagaaaaagccaaagttcttaccatggcctatgagattatccttccttcacctctccatatctctctgtcctcatcttct

SEQ ID NO: 14707 - DNA, 80 bp, synthetic construct
  source 1..80: mol_type = other DNA
aggctcagaaacatggacactgaattaggagcaaattgggatctgtgctgtgatcccatcccatgcacaaggaagcaaaa

SEQ ID NO: 14708 - DNA, 80 bp, synthetic construct
  source 1..80: mol_type = other DNA
atcaacatgacaagccatgagagtgactctgaagcttctggctgagttctttccatctgttacctgtaatccccacaaca

SEQ ID NO: 14709 - DNA, 80 bp, synthetic construct
  source 1..80: mol_type = other DNA
ccactgtagttcttattaaaatgaagggcgcctccttcctcttttcttctttcttttgccttgtccccatacccagttaa

SEQ ID NO: 14710 - DNA, 80 bp, synthetic construct
  source 1..80: mol_type = other DNA
ctcccttataaaatgtaagcgttcaaaggtcagggaccttgtgtgtctcactcaacatacgtggtatatattaggcaatt

SEQ ID NO: 14711 - DNA, 80 bp, synthetic construct
  source 1..80: mol_type = other DNA
tgtttagcctggcaaaattctgcaggtacattctctgttctctctttcaaactggctaggcagacttggctgaaagaatt

SEQ ID NO: 14712 - DNA, 80 bp, synthetic construct
  source 1..80: mol_type = other DNA
gcccttcctgatgacctctccaatctgtagacccaacaagggagagcaaataaaagtaagtctttttaaagtcggttttg

SEQ ID NO: 14713 - DNA, 80 bp, synthetic construct
  source 1..80: mol_type = other DNA
aaaataaaaataaaaggaccttcagcaaaggtagaggaaggtataccgaacattgttttccagatgaataaattaatgct

SEQ ID NO: 14714 - DNA, 80 bp, synthetic construct
  source 1..80: mol_type = other DNA
agagatggatgcccaggcattgggaaaaaaaaaatgtgaaactgacagactcaaagcagatcaaagatcctcggcctcaa

SEQ ID NO: 14715 - DNA, 80 bp, synthetic construct
  source 1..80: mol_type = other DNA
ccaaagctttccttaagaagatacttcacaaatacacacctgctcatgtttatcatctttggtatagccaaagtggtcca

SEQ ID NO: 14716 - DNA, 80 bp, synthetic construct
  source 1..80: mol_type = other DNA
atggtaggaagtgcctggtggttcttagttttcctctgggtagctcctggctcccagggactctctgtttatgatgctgt

SEQ ID NO: 14717 - DNA, 80 bp, synthetic construct
  source 1..80: mol_type = other DNA
cttaagcacaggtctaatttctctgtaatcgttcttcaaatgctggtattgaatcttcttgccagtgtttcctagagcac

SEQ ID NO: 14718 - DNA, 80 bp, synthetic construct
  source 1..80: mol_type = other DNA
gtagatgaaatctagagtctcattcccctagtaccttccaaatccttgttaataaactttcactttcagacctcttcttg

SEQ ID NO: 14719 - DNA, 80 bp, synthetic construct
  source 1..80: mol_type = other DNA
ttaaatataagacctgagactataaaaatgcaagaagaaaacctagggaaaacttctctggacattggcctagacaaaga

SEQ ID NO: 14720 - DNA, 80 bp, synthetic construct
  source 1..80: mol_type = other DNA
atagacaattgagactcagaaggtgtggaagtggagggagatggatggtgagaaattacttagtgggtacactatatgtt

SEQ ID NO: 14721 - DNA, 80 bp, synthetic construct
  source 1..80: mol_type = other DNA
aggggttcagttttaatacagagatgcacagaggtgcaagatgttcctctgctcctaggaggagaaatacagtgtggaaa

SEQ ID NO: 14722 - DNA, 80 bp, synthetic construct
  source 1..80: mol_type = other DNA
tataagcttctggagagcacctgcaatagacctaggaattaaaagttacccatcaaaatgtgggaactattctccttctg

SEQ ID NO: 14723 - DNA, 80 bp, synthetic construct
  source 1..80: mol_type = other DNA
ctaagaggtagagctaaagtggaatccagacttgtctgagtctatcatcaggttacccttagcttgaaataattggtgag

SEQ ID NO: 14724 - DNA, 80 bp, synthetic construct
  source 1..80: mol_type = other DNA
ttatactctccactagtctggagtggccagaggtaggaactagtgcaatgtctcaaaattctttcgtatcttccacaaca

SEQ ID NO: 14725 - DNA, 80 bp, synthetic construct
  source 1..80: mol_type = other DNA
tctctttcatttacatattctttgcattttttgggttcctgctccacatcttccatgaaatgttgcccgctgagctacat

SEQ ID NO: 14726 - DNA, 80 bp, synthetic construct
  source 1..80: mol_type = other DNA
cagaggtgagtagtcattactctcaagtgatgagattagaggcagtttggtgccagtgacagaaggacaggaggaaagac

SEQ ID NO: 14727 - DNA, 80 bp, synthetic construct
  source 1..80: mol_type = other DNA
atgaagatgagtttcaagggccactgctatcagctttctaaatcctcaccagaaacaacacttgcttggcttcttctgtc

SEQ ID NO: 14728 - DNA, 80 bp, synthetic construct
  source 1..80: mol_type = other DNA
tccagctgtgttttaactttttttgcttggctcatccagccctgctctgttctccacccatatcagtctctttgcccatc

SEQ ID NO: 14729 - DNA, 80 bp, synthetic construct
  source 1..80: mol_type = other DNA
caaacatggaaagccctccttttcaagaacaggagtctcttctgtatttggagaagaccaaggaccaaaaaataaaccac

SEQ ID NO: 14730 - DNA, 80 bp, synthetic construct
  source 1..80: mol_type = other DNA
gcctgtattcatacacacctaggaccctacaaactgtgattgaggatgaggcaggggtgatgttgaaaatatttacaatg

SEQ ID NO: 14731 - DNA, 80 bp, synthetic construct
  source 1..80: mol_type = other DNA
tggttatatctattagggcctatttagagctttgcatatagctggagtttcaacggattcctacttattatccagcacta

SEQ ID NO: 14732 - DNA, 80 bp, synthetic construct
  source 1..80: mol_type = other DNA
acttacaaacagaggcaaagtcccagtgctttgatcagattacaacagttctgggatgttctgcgtttgctcagtacaca

SEQ ID NO: 14733 - DNA, 80 bp, synthetic construct
  source 1..80: mol_type = other DNA
ttcgatttcttcacaaaggttaaagtcagtatttcctcaccctcacatgcttcgaatcaatgactagtcactgataaaca

SEQ ID NO: 14734 - DNA, 80 bp, synthetic construct
  source 1..80: mol_type = other DNA
gcctggacaatggtgtttacgtgcctgcccaaggtgagtttgaaaatgaagaaaatagagcagtttgattcctcctagct

SEQ ID NO: 14735 - DNA, 80 bp, synthetic construct
  source 1..80: mol_type = other DNA
acaaaaaaaagaaaaagaaagaatctatcttctaaagaaatgggatcccttcctaaggtggtatcaccctcacttttcac

SEQ ID NO: 14736 - DNA, 80 bp, synthetic construct
  source 1..80: mol_type = other DNA
ggcctctgaccacgcatctcactcacaggcagatttttagaggaatgacaggaactttattctaatattgcatgaaatgt

SEQ ID NO: 14737 - DNA, 80 bp, synthetic construct
  source 1..80: mol_type = other DNA
ttaatccaactctactagtttgctcccaaagggttctgtcaatcacaaccaacttcagagtctaaaactgaacccgttct

SEQ ID NO: 14738 - DNA, 80 bp, synthetic construct
  source 1..80: mol_type = other DNA
cctaaatactccaagcagaggtctgtgaggagggtgactcgcctctcaccttctacagtccagccaaggactagagtcca

SEQ ID NO: 14739 - DNA, 80 bp, synthetic construct
  source 1..80: mol_type = other DNA
atgggcagcagtgaattgcctgctcatggtgctgataagttacatgcatgcacaccaggctccatgtgggctgccactgc

SEQ ID NO: 14740 - DNA, 80 bp, synthetic construct
  source 1..80: mol_type = other DNA
aggaatgctgtgattacaaacttgatctctcctcagcccatggaggagcactctggaacttttcattgccatgttcctgg

SEQ ID NO: 14741 - DNA, 80 bp, synthetic construct
  source 1..80: mol_type = other DNA
caggaccaggttgatgcgtatccttcggacagtcctcttggaaaggtgaatgctagccaccacatccagcaaatcattct

SEQ ID NO: 14742 - DNA, 80 bp, synthetic construct
  source 1..80: mol_type = other DNA
ttcagaagcctagagctctgcacacatttggaggtgcataatttctaggaatccaaactggagccgctgctgtgtgagaa

SEQ ID NO: 14743 - DNA, 80 bp, synthetic construct
  source 1..80: mol_type = other DNA
gcaaggagcacgtatgacactttgcgaagtgcctggcttgtaataagaattcaatacacattagctactaaaattcaaga

SEQ ID NO: 14744 - DNA, 80 bp, synthetic construct
  source 1..80: mol_type = other DNA
caattctggtttgatagccgaggggcgggtggatttacaaagacttagaaaaagggaaaaaagagagagaatgtgagaga

SEQ ID NO: 14745 - DNA, 80 bp, synthetic construct
  source 1..80: mol_type = other DNA
tttaaatgcatcctgtagttaaacctgctgggaagtgaattcctgctctgtctgcagggatgaaggagaaggatgactct

SEQ ID NO: 14746 - DNA, 80 bp, synthetic construct
  source 1..80: mol_type = other DNA
aatgtgtaggacatgtgggtatgaattaagatggggcattaatagtacatgctacatgggtggaaatggtataaacgtat

SEQ ID NO: 14747 - DNA, 80 bp, synthetic construct
  source 1..80: mol_type = other DNA
aagtggaattcccgtctgtctactctgtagcttatgagaagcaagaccgatatgggataagaaagaggagaatcaaaatc

SEQ ID NO: 14748 - DNA, 80 bp, synthetic construct
  source 1..80: mol_type = other DNA
cattaaaaacaatggaataagtagtgttaacaaagctctttgagactatcaagagataactgcctgtatatcagaccctg

SEQ ID NO: 14749 - DNA, 80 bp, synthetic construct
  source 1..80: mol_type = other DNA
taggagagaaggacatggtgaggaataaaagagcattggcggggagggcagggccacgcccaagtccacgtacctcttta

SEQ ID NO: 14750 - DNA, 80 bp, synthetic construct
  source 1..80: mol_type = other DNA
aaggactattctatggccataatgacaaacaaacccccagagccagttttaagttggtcacacttagtcaatggcagtct

SEQ ID NO: 14751 - DNA, 80 bp, synthetic construct
  source 1..80: mol_type = other DNA
gcagtgagtgcccagcaaatactgattaaataggtgaaagtgtggaaggccagaggttagtaagttgggcaaaaggaaga

SEQ ID NO: 14752 - DNA, 80 bp, synthetic construct
  source 1..80: mol_type = other DNA
atcctacaggtttccctcaaagaggcattacaggagcagagtcaaataaaagcccttgataggggaaagcagactctgga

SEQ ID NO: 14753 - DNA, 80 bp, synthetic construct
  source 1..80: mol_type = other DNA
gcacagttgtctaaggtaaggctatggaccacagcctctttagcttccatctacattttattatttcactctgaaaggca

SEQ ID NO: 14754 - DNA, 80 bp, synthetic construct
  source 1..80: mol_type = other DNA
cctcaagcagatatgtttttttgaggggtggcctgtattttcctttctttttctgaggtttaataaaaccatatttccta

SEQ ID NO: 14755 - DNA, 80 bp, synthetic construct
  source 1..80: mol_type = other DNA
catatagcccaaggcattcaacttacaggaaagtatctctgaacaacaccaaaatcgataaaaccgattacaatccatac

SEQ ID NO: 14756 - DNA, 80 bp, synthetic construct
  source 1..80: mol_type = other DNA
gaatggcacagcaaaggccctactacctcatgaagacaagttctgtggtagaaatggacaacaagcaagatagaatcagg

SEQ ID NO: 14757 - DNA, 80 bp, synthetic construct
  source 1..80: mol_type = other DNA
acctgagagctgtcacatgtagatagcatttaaagccatgagatcatataagcgcccctaggagtgacggagaaaacaca

SEQ ID NO: 14758 - DNA, 80 bp, synthetic construct
  source 1..80: mol_type = other DNA
aagcatggcatgggcccaacagaattaattgtataggtaatactggctcatgagctaatggtcaacaagccagaagagca

SEQ ID NO: 14759 - DNA, 80 bp, synthetic construct
  source 1..80: mol_type = other DNA
agaatattctctgcttaattttaaagtcctccagcgatggagaagtccaggctgaacattgcccttgaggccccctctga

SEQ ID NO: 14760 - DNA, 80 bp, synthetic construct
  source 1..80: mol_type = other DNA
cagcatgcagccattgaaggattttccaatatgatcaatttgtgctttcagaaagcactgtaatatgatcaatttgtgct

SEQ ID NO: 14761 - DNA, 80 bp, synthetic construct
  source 1..80: mol_type = other DNA
agaaacgctgccagcacccaagacttggagtaaagagaaagcacaagtgtccccagcaaagggatggtcagaggaagaag

SEQ ID NO: 14762 - DNA, 80 bp, synthetic construct
  source 1..80: mol_type = other DNA
atggactctggggatattactccacctcactgcacttggcttttcctgaggaaagctgggatgatgacagtgctgcctca

SEQ ID NO: 14763 - DNA, 80 bp, synthetic construct
  source 1..80: mol_type = other DNA
gttgaagtccttatctctctgcctgtctgaatgtgtatcttactaggaaggcctaattcatactctatgttctctgtgaa

SEQ ID NO: 14764 - DNA, 80 bp, synthetic construct
  source 1..80: mol_type = other DNA
acaatgtaggctctgccctgaaggccaggtttctttagtttacacaatacacctgaatgatggttttaataattaaccag

SEQ ID NO: 14765 - DNA, 80 bp, synthetic construct
  source 1..80: mol_type = other DNA
tctagctttgtgcacagtcgtgacagtacttcttcctctgtgatgggcgtttatgaaatatactttcccattcagaggac

SEQ ID NO: 14766 - DNA, 80 bp, synthetic construct
  source 1..80: mol_type = other DNA
caagagtggcatgggctcaagggtgatccagttgttgcttccagcaacaaacgtaaattaacctaaacaatatgcacatt

SEQ ID NO: 14767 - DNA, 80 bp, synthetic construct
  source 1..80: mol_type = other DNA
aggtgcctaccatcctcggcctatggttgcctatagctttcttttcaaaatgcaatcttatacagacccccaaagaaaaa

SEQ ID NO: 14768 - DNA, 80 bp, synthetic construct
  source 1..80: mol_type = other DNA
tgcaaataaagtctgaaaacattgtcaaaggaaaaaaaatctacactctctccctccctcccaacttaagtgctgtccaa

SEQ ID NO: 14769 - DNA, 80 bp, synthetic construct
  source 1..80: mol_type = other DNA
gagcctacaccgcaatcttgtgctttgctcacagtttaactcaagcgctttgttaccacgttcatctgaccactatatct

SEQ ID NO: 14770 - DNA, 80 bp, synthetic construct
  source 1..80: mol_type = other DNA
tttcctcagctgataaaaaagctatgctgtctgcctccaagggtggggccctggaccatcagcagcatgatcatttccat

SEQ ID NO: 14771 - DNA, 80 bp, synthetic construct
  source 1..80: mol_type = other DNA
cttatagcctagtattgtataaaatgtaaaaaggaaatagcatgtctgtggacaaactgggaagggagtaagaggcaggg

SEQ ID NO: 14772 - DNA, 80 bp, synthetic construct
  source 1..80: mol_type = other DNA
aatgatgttaatacctcttattaacaggagaaaagtggctgatgcaggagatgtaatcaaaggtggtcccaaggtacaaa

SEQ ID NO: 14773 - DNA, 80 bp, synthetic construct
  source 1..80: mol_type = other DNA
gctactcacaccaaacctaagaggtaagtctcaaaaccgcagtactgagaggtttaggaacttgtccaaagtcgcgcaac

SEQ ID NO: 14774 - DNA, 80 bp, synthetic construct
  source 1..80: mol_type = other DNA
caccttttccaataatcctcttgctttagattttccacatagaagtctgagcaggcagagatgtccacatgtagatccag

SEQ ID NO: 14775 - DNA, 80 bp, synthetic construct
  source 1..80: mol_type = other DNA
tccccatgactgtttaacgtaactgacctttcttaaaatgaacaagtcattgttgtcggcttcaaaggaaagtgaaacaa

SEQ ID NO: 14776 - DNA, 80 bp, synthetic construct
  source 1..80: mol_type = other DNA
ggtgatcctaatgtacagggaagtctgacaaccactattctagaagaacaatgcttctcaaactttaatggacatatgaa

SEQ ID NO: 14777 - DNA, 80 bp, synthetic construct
  source 1..80: mol_type = other DNA
tattaacacctccatctgctaacagtcactctagagctgcaggaagctataatgcatagtgaacaagaggctggaaaaac

SEQ ID NO: 14778 - DNA, 80 bp, synthetic construct
  source 1..80: mol_type = other DNA
cagagctccctgctgttgttaatctctggggttcttcccattgcctatttggatttccagctctctaatacctttgtaaa

SEQ ID NO: 14779 - DNA, 80 bp, synthetic construct
  source 1..80: mol_type = other DNA
tctattgtgttttccttattgatttttgttttaaagaaactccttcctgaaacttgatacaaaagacaaagcacaaaatg

SEQ ID NO: 14780 - DNA, 80 bp, synthetic construct
  source 1..80: mol_type = other DNA
tggacactgtactgtgacaccacaccagtcttctaaaatataatctgacttcgtgcttcctctgattaaaacccatgatg

SEQ ID NO: 14781 - DNA, 80 bp, synthetic construct
  source 1..80: mol_type = other DNA
tggagattatatttcctctatcttaacaaatttaacatgcaaggaaagtttgcaggattttgttccactgttgacatggg

SEQ ID NO: 14782 - DNA, 80 bp, synthetic construct
  source 1..80: mol_type = other DNA
tcagttggagggtgaccacatggcttccttggtgccccaaggtctcagaattattaaaattctggttagcagaagataaa

SEQ ID NO: 14783 - DNA, 80 bp, synthetic construct
  source 1..80: mol_type = other DNA
aaatgtcgttctcacacaacagacgtggaggattctgagggaaagaaggaaagcacgacacagctttacatatggaatgc

SEQ ID NO: 14784 - DNA, 80 bp, synthetic construct
  source 1..80: mol_type = other DNA
tgatcttctcctttttcctgtgcataaaatgcagaccttgccaaccggcttttgagcagcttaacaacacaaatgtttaa

SEQ ID NO: 14785 - DNA, 80 bp, synthetic construct
  source 1..80: mol_type = other DNA
atcagtataactgtcttccatctctacatcttctcccactggaaggtcttcaggtgcgataacaggcatggagctgtcat

SEQ ID NO: 14786 - DNA, 80 bp, synthetic construct
  source 1..80: mol_type = other DNA
gggaaaatattaaaaagaaatgtaacattccaaccacactggcacagtcttcctacattgctagtgggagtgtaacctct

SEQ ID NO: 14787 - DNA, 80 bp, synthetic construct
  source 1..80: mol_type = other DNA
gtgctaggactacctgtgtgaaacaagagaatatcatacaaatggatgcttgtataggcatggattatctctgggacagt

SEQ ID NO: 14788 - DNA, 80 bp, synthetic construct
  source 1..80: mol_type = other DNA
aagatgatccttgggggaaaaaactctcctgatgagttttaaaaaacaaacacaggtttagatttaagggcccatcaaag

SEQ ID NO: 14789 - DNA, 80 bp, synthetic construct
  source 1..80: mol_type = other DNA
gaagagactacaatgcagaaaagtgaaatgaaaataaacagccatacctgcaagcagcaagccaggctaacacacaagag

SEQ ID NO: 14790 - DNA, 80 bp, synthetic construct
  source 1..80: mol_type = other DNA
caagtgttactttcacaagcagaaaataaatgtgattttcccgtttgtctaaggcaagcctgtccaacccatggcctgca

SEQ ID NO: 14791 - DNA, 80 bp, synthetic construct
  source 1..80: mol_type = other DNA
aggaagcacaagtggttagtgaacctcctccactagccaagggaagccgcgagggactgtgccatgaggaatggtgcact

SEQ ID NO: 14792 - DNA, 80 bp, synthetic construct
  source 1..80: mol_type = other DNA
actcaggcaaacagggtctggagtggacctccagcaaactctagcagacctgcagcagagggacctgactgttagaagga

SEQ ID NO: 14793 - DNA, 80 bp, synthetic construct
  source 1..80: mol_type = other DNA
tctctgcagaaaccctacaagccagaagagaataggggccaatattcgacattcttaaagaaaataattttcaacccaga

SEQ ID NO: 14794 - DNA, 80 bp, synthetic construct
  source 1..80: mol_type = other DNA
ggttagtgggaaatttctaggactaaatgcccacaaaagaaagctggaaagctctaaaatcaacaccctaacaccacaat

SEQ ID NO: 14795 - DNA, 80 bp, synthetic construct
  source 1..80: mol_type = other DNA
caagttctgaaattgagggagtaattaatagcctaccaatcaaaaaaagtctaggatcaggtggatacacagtcaaattc

SEQ ID NO: 14796 - DNA, 80 bp, synthetic construct
  source 1..80: mol_type = other DNA
gatagccaagacaatcctaagcaaaaagaacaaagccggaggcatcacactacctaacttcaaactatactacaaggcta

SEQ ID NO: 14797 - DNA, 80 bp, synthetic construct
  source 1..80: mol_type = other DNA
gtatatacccagaggattgtaaatcattctacgataaagacacacgcacacatatgtttattgtggcactactcacaata

SEQ ID NO: 14798 - DNA, 80 bp, synthetic construct
  source 1..80: mol_type = other DNA
tcatacatgtttgaaaacaaatgactatgaagacaaacatcacctcatttgatcttcaaacatgacccaggaaggttcga

SEQ ID NO: 14799 - DNA, 80 bp, synthetic construct
  source 1..80: mol_type = other DNA
cttcacaatattatcttagaaaacccattcacaatctcgtgctacacagctttataatcaaccgtttcagagaatgtgct

SEQ ID NO: 14800 - DNA, 80 bp, synthetic construct
  source 1..80: mol_type = other DNA
gtccatcgaacagaaatctatgtcatggttttttaaaaataggtgaatttacatgtattgacgtggaaagacttccatga

SEQ ID NO: 14801 - DNA, 80 bp, synthetic construct
  source 1..80: mol_type = other DNA
tcaatagcttgataccatggactgaactctgtcagatacaggatacgatgacaaattaaaacagcagccagtgtgcacct

SEQ ID NO: 14802 - DNA, 80 bp, synthetic construct
  source 1..80: mol_type = other DNA
ttaaatgttttattcatagcagcggcctttctgaacaacgtgccacctaaaagctaactttccattcactatgaattagc

SEQ ID NO: 14803 - DNA, 80 bp, synthetic construct
  source 1..80: mol_type = other DNA
tatacattatgtaaacataaacatacatacacgtatacacattcatatttgttgggaaaacgactgctttttctttatac

SEQ ID NO: 14804 - DNA, 80 bp, synthetic construct
  source 1..80: mol_type = other DNA
tcacagattggtgctggccttaaaaatcaccagcacacgtcatatctcaaaacttcagatataggctggaaattgtaaag

SEQ ID NO: 14805 - DNA, 80 bp, synthetic construct
  source 1..80: mol_type = other DNA
tgctcagaaatgctgctaaaaggcaccatttttacaaaacgttatactgtcttacttttggacatgacctaacctttgga

SEQ ID NO: 14806 - DNA, 80 bp, synthetic construct
  source 1..80: mol_type = other DNA
tatgccacttccttttattaccaaactgctagcactttcttggaattgcttcagctgcctcttccacagctccaatgttg

SEQ ID NO: 14807 - DNA, 80 bp, synthetic construct
  source 1..80: mol_type = other DNA
gcctcaatttccaagaaatgtcattcaaacccattttcatcaaaggaaaggtatatttgatgctaaaggccttgagcccc

SEQ ID NO: 14808 - DNA, 80 bp, synthetic construct
  source 1..80: mol_type = other DNA
ctcacagaatcatatttgtgatctggaaacagtttgggcagaaacaagaatgaagacccaggagaggagggattacaagg

SEQ ID NO: 14809 - DNA, 80 bp, synthetic construct
  source 1..80: mol_type = other DNA
atgaacctccaggacaaagggctctttggaggagggacatctggttaaaatatttcagcactcacaaacattacctgctc

SEQ ID NO: 14810 - DNA, 80 bp, synthetic construct
  source 1..80: mol_type = other DNA
tattaacaggagacaggcacaaacacacacatacctaagtaagctcactgaaggagtgctcttaaataaactgcacttgg

SEQ ID NO: 14811 - DNA, 80 bp, synthetic construct
  source 1..80: mol_type = other DNA
acttaacttgtctacaacagagctctcaacattctgcccttcccctgctgctcccacagtcttccccaccttagtaaata

SEQ ID NO: 14812 - DNA, 80 bp, synthetic construct
  source 1..80: mol_type = other DNA
agaatacctataagaggaagtcacaagatgtcattcctctaaaatgcctctagggggttcccatgtgcttaataaaacct

SEQ ID NO: 14813 - DNA, 80 bp, synthetic construct
  source 1..80: mol_type = other DNA
taaaaaaaaaaatgtttttaattatctgggcatggtggcacatgcctgcagtcccaactactcgagaagctgaggtgata

SEQ ID NO: 14814 - DNA, 80 bp, synthetic construct
  source 1..80: mol_type = other DNA
ccttcaaggactttacctttgcattaaaaactttgctaactgtttggcaccagaggcctaggtttcagcctatctcagct

SEQ ID NO: 14815 - DNA, 80 bp, synthetic construct
  source 1..80: mol_type = other DNA
gccgggcatggtggcacatgcctgtaaacccagctactcgggaggctgaggcagaagagtttccttagcccggcagaggg

SEQ ID NO: 14816 - DNA, 80 bp, synthetic construct
  source 1..80: mol_type = other DNA
ccaaatccctttaaggtcattcttcccagcagcctttttattctttatgatctagccaggctgaaaattttccaaatctt

SEQ ID NO: 14817 - DNA, 80 bp, synthetic construct
  source 1..80: mol_type = other DNA
taccctttacccagttccaaagccaactctgcattttcagggatctgttataccaacactccacttcttggtaccaattt

SEQ ID NO: 14818 - DNA, 80 bp, synthetic construct
  source 1..80: mol_type = other DNA
tttcctgtagggtaaagtccaaactcctagcctgataaacagggtcttccacagaccttccagccttccactcttccagc

SEQ ID NO: 14819 - DNA, 80 bp, synthetic construct
  source 1..80: mol_type = other DNA
tttttcttcacaccaaccaatgctctctctccagacactaactgggtgccctacaattcaattcaattccgacaccaacc

SEQ ID NO: 14820 - DNA, 80 bp, synthetic construct
  source 1..80: mol_type = other DNA
aaaatttaaagaaagctctattctgccggcatcactgattagatcattgtccactggtgattggcacaatctccagaggt

SEQ ID NO: 14821 - DNA, 80 bp, synthetic construct
  source 1..80: mol_type = other DNA
tttctgtaacctcaggatagtataattgtggcaaccaccttgccttcctttgagatcttatgttgtaagactctcacggc

SEQ ID NO: 14822 - DNA, 80 bp, synthetic construct
  source 1..80: mol_type = other DNA
tttcttcatactcctatcaaatgcatagtcatcataccctacaaaccacctactaaccagcctctctctgtctgtccact

SEQ ID NO: 14823 - DNA, 80 bp, synthetic construct
  source 1..80: mol_type = other DNA
ggtgcggggttttccattgctcccaaacatcagttgacggcacactttttctaaagggtccttttctcccacgccaagac

SEQ ID NO: 14824 - DNA, 80 bp, synthetic construct
  source 1..80: mol_type = other DNA
gcatccaaccccgggccgcggccaacttctctggactggaccagaagtttctagccggccagttgctacctccctttatc

SEQ ID NO: 14825 - DNA, 80 bp, synthetic construct
  source 1..80: mol_type = other DNA
ttcaatatgaacgtatcctagtatgatttgtaaaataaaaaacagggtgtgcttctccccagcagtttctagagatctag

SEQ ID NO: 14826 - DNA, 80 bp, synthetic construct
  source 1..80: mol_type = other DNA
gaagatctcttatgttaggcttctttattttctgaaacccagagagttcaggtgtgactttgaaggtcatccagctagta

SEQ ID NO: 14827 - DNA, 80 bp, synthetic construct
  source 1..80: mol_type = other DNA
gtaagaaaatggaaagaaaagactagacctttgtattttatttcgtcttctactgccgtcttgcagttgatcttccgcct

SEQ ID NO: 14828 - DNA, 80 bp, synthetic construct
  source 1..80: mol_type = other DNA
ccagagccttttctttttgtcttgcccatctggcagaatctcaccataatcatttaacagattatactcaggcactgtga

SEQ ID NO: 14829 - DNA, 80 bp, synthetic construct
  source 1..80: mol_type = other DNA
agagcttacagaagaaactgaagacaaaggccttgcttattaggatctttgagaccctctggcactggcgaacacgagtg

SEQ ID NO: 14830 - DNA, 80 bp, synthetic construct
  source 1..80: mol_type = other DNA
ttaatttgaatctttttgcttaagctctgcacttttctgctttgtcttggggtcacacccctgttaggagttctggggca

SEQ ID NO: 14831 - DNA, 80 bp, synthetic construct
  source 1..80: mol_type = other DNA
agagctgtgccccagtgaactggggagactttttacggaaaattccttagcattcaattggagaacaaacgtttgctgtt

SEQ ID NO: 14832 - DNA, 80 bp, synthetic construct
  source 1..80: mol_type = other DNA
tgctctgtggagtagaagtgtgtttgtggataggtgtgtggcctctccacacagcagactgtcctggctgtccgtgggcc

SEQ ID NO: 14833 - DNA, 80 bp, synthetic construct
  source 1..80: mol_type = other DNA
tcagatagtttccatctgtgatttgtgactttggcttgattaaagcaggtggctccgctcttttttttttcccctgaaga

SEQ ID NO: 14834 - DNA, 80 bp, synthetic construct
  source 1..80: mol_type = other DNA
gcccaaccagctagtgctggagaaaagctgagtccatcaataactatttgtggaataaagaaatgcaattgtggctgggc

SEQ ID NO: 14835 - DNA, 80 bp, synthetic construct
  source 1..80: mol_type = other DNA
agtctttggacaaagcctaactcctcaggtgtcctgtaagtggaatgtggacttagtttattattcagaattttccccaa

SEQ ID NO: 14836 - DNA, 80 bp, synthetic construct
  source 1..80: mol_type = other DNA
tatggggagttccaggatttctgtgttcttgcatcttttttctttgttttagaagttttgaagtgttcacttgacccatg

SEQ ID NO: 14837 - DNA, 80 bp, synthetic construct
  source 1..80: mol_type = other DNA
gccagctaatttttgtatttttagaagagacagggttttgtcattttggacaggctggtctcaaactcctgggaatggat

SEQ ID NO: 14838 - DNA, 80 bp, synthetic construct
  source 1..80: mol_type = other DNA
tgaatcaggaaggggcacatagtaagccttatctgagagatgctggtgtaaccaagaggcattatctggatgtgcttgaa

SEQ ID NO: 14839 - DNA, 80 bp, synthetic construct
  source 1..80: mol_type = other DNA
tgcagtgctcacaaggagacacttggttttttattaaatggcaaaaatgggtcattaattcacccaagcccaggaataca

SEQ ID NO: 14840 - DNA, 80 bp, synthetic construct
  source 1..80: mol_type = other DNA
aaggttgaatattggctccagcaagcagtctctgctgtcacagtcttgtgtgcagacagagttgtttttccttcctccct

SEQ ID NO: 14841 - DNA, 80 bp, synthetic construct
  source 1..80: mol_type = other DNA
cctcttgatatgcccttataaaacctcacaacatttctccagggcaggtgttggctagctccgttttctagaaaaggaag

SEQ ID NO: 14842 - DNA, 80 bp, synthetic construct
  source 1..80: mol_type = other DNA
atctgtccttacttttgattgattccgcagcagtagagattgtcccctgcaagctcatagattgttagcctttggcgttt

SEQ ID NO: 14843 - DNA, 80 bp, synthetic construct
  source 1..80: mol_type = other DNA
ctccccagcccacttctctgtaaagattcccaaactgtgtcctgtgtttgggcccagtacaagctctatattgctgggaa

SEQ ID NO: 14844 - DNA, 80 bp, synthetic construct
  source 1..80: mol_type = other DNA
ccttattcacactgggctttctattcagaagcacagagatagctgtgcattattttgttcagttcaatgcttatggataa

SEQ ID NO: 14845 - DNA, 80 bp, synthetic construct
  source 1..80: mol_type = other DNA
agacatcttcacaaatttaggctaacaaagcacttagaagaggaaatgctctcaatttcgaggtgaatagaaggtggccc

SEQ ID NO: 14846 - DNA, 80 bp, synthetic construct
  source 1..80: mol_type = other DNA
agtcttaaccgcacattttgaaaattgaaaattacagataggaggtcttacaatatggattgccctgaggaggtgcacag

SEQ ID NO: 14847 - DNA, 80 bp, synthetic construct
  source 1..80: mol_type = other DNA
tcatatgagtcccttaatgagaactcccaacttgtatgagttcaacatgtcattattcggggcatttcagaagtgttcat

SEQ ID NO: 14848 - DNA, 80 bp, synthetic construct
  source 1..80: mol_type = other DNA
tttgaagaacacaggctgtggaacaccctctctaaagtgtttctaaagtcacttcttacacagccattgctgttagaacc

SEQ ID NO: 14849 - DNA, 80 bp, synthetic construct
  source 1..80: mol_type = other DNA
aacaaaaacaaaaacaaaaagcgtcaagatatttttgctttgagcatagctcattaaaaaatatatggcttactaggcgt

SEQ ID NO: 14850 - DNA, 80 bp, synthetic construct
  source 1..80: mol_type = other DNA
tgagtcagcctagttcagcagtcagcatgagtttttgctatttttttccttctttccttccttccttccctccttccctc

SEQ ID NO: 14851 - DNA, 80 bp, synthetic construct
  source 1..80: mol_type = other DNA
gagcaggctgtagacaactttgaaggcaagaagactgacaaaaagtacctgatgatcgaagagtatttgaccaaagagct

SEQ ID NO: 14852 - DNA, 80 bp, synthetic construct
  source 1..80: mol_type = other DNA
actgtcttttgtagctctggactggaggggtagatggggagtcaattacccatcacataaatatgaaacatttatcagaa

SEQ ID NO: 14853 - DNA, 80 bp, synthetic construct
  source 1..80: mol_type = other DNA
gccccctcccctcctggcaagagtcggcggcggtggcggcggccgctgcagagattggaatccgcctgccgggcttggcg

SEQ ID NO: 14854 - DNA, 80 bp, synthetic construct
  source 1..80: mol_type = other DNA
ttctgctggattgcctggacccttttttctctttccagactcctagtggaaagatttggcaaggaaaaaaaaatgagctt

SEQ ID NO: 14855 - DNA, 80 bp, synthetic construct
  source 1..80: mol_type = other DNA
aacaccttggggtttttttcctttccttctaattttcctgcttagtggagcgtgagttattttctctgtcgtatttgggt

SEQ ID NO: 14856 - DNA, 80 bp, synthetic construct
  source 1..80: mol_type = other DNA
taattaaggtgcagaatattataagaacttcaaatggagacctgatctggtgcttgtggtggtgggagaatctgggaaag

SEQ ID NO: 14857 - DNA, 80 bp, synthetic construct
  source 1..80: mol_type = other DNA
tgccttcacttttctcctttatctaatcttatgtatttctgcctaaattaatctgtaagcccagttcttaccacttcgcc

SEQ ID NO: 14858 - DNA, 80 bp, synthetic construct
  source 1..80: mol_type = other DNA
agtgttacagaccacttaaaatatgcttctagttgtaagaagccattgattgtaaggtgcaccccaattccggagatgct

SEQ ID NO: 14859 - DNA, 80 bp, synthetic construct
  source 1..80: mol_type = other DNA
ctgtatagattttatattccaacagtgggaattgggtggctctctcaagtgactcttgcttacaagtgacagccctaact

SEQ ID NO: 14860 - DNA, 80 bp, synthetic construct
  source 1..80: mol_type = other DNA
ttgtagttatgttaagatctacaaaaaggaagtccagggaatgttacaagactgataagggaagctgggctgttcaggat

SEQ ID NO: 14861 - DNA, 80 bp, synthetic construct
  source 1..80: mol_type = other DNA
gtatcaaaatgttgagaagatagactctcaattttgaaggtgagaaatctgtaggagacttggatagttgtttttttttt

SEQ ID NO: 14862 - DNA, 80 bp, synthetic construct
  source 1..80: mol_type = other DNA
agccttttctgctttgcttcctttcctactattttatcagcctaagtcacgtaaatatccgattcaggtttgggttcaga

SEQ ID NO: 14863 - DNA, 80 bp, synthetic construct
  source 1..80: mol_type = other DNA
cgtcatattggacagtactgcctttgactttcctttccctggttctttgcccatcagaatgctttaaaatctagtataaa

SEQ ID NO: 14864 - DNA, 80 bp, synthetic construct
  source 1..80: mol_type = other DNA
tcctatgaagccctcctcagtggtccaagcctcatagttggctctttgctgcatcattatttgaagataatcttttggta

SEQ ID NO: 14865 - DNA, 80 bp, synthetic construct
  source 1..80: mol_type = other DNA
aaagtgccaagccaccctgcaaaatcttcgtaaccattcatattccagccaacagtatttgaatatgttctctcctccca

SEQ ID NO: 14866 - DNA, 80 bp, synthetic construct
  source 1..80: mol_type = other DNA
gcttttttttcctcctgaactcccttgtctgcctaaaactagatcctcccccaaagaactcaattgtcataacttccagt

SEQ ID NO: 14867 - DNA, 80 bp, synthetic construct
  source 1..80: mol_type = other DNA
attaaagatgtgccccccacccccatgtgtttgttcctatcgtagtaatgctgattgttaatggatggcatagtaacttt

SEQ ID NO: 14868 - DNA, 80 bp, synthetic construct
  source 1..80: mol_type = other DNA
atcacttgaggccaggattttgcagctgtaatgcattatgagaataatgtgctatgtaaatagcaactgcgcttcagcgt

SEQ ID NO: 14869 - DNA, 80 bp, synthetic construct
  source 1..80: mol_type = other DNA
aaagctatcatttgtctgcttgtgatacagacagtgtagtcagtattagccaggaaagtggcaactgagatagctactcc

SEQ ID NO: 14870 - DNA, 80 bp, synthetic construct
  source 1..80: mol_type = other DNA
ctttacaagtattctatgatatagttactattatcagttcccttttacatgaggaaactaaggctgcagaggttaagtag

SEQ ID NO: 14871 - DNA, 80 bp, synthetic construct
  source 1..80: mol_type = other DNA
gagaacaagaagaaaaagagagtcagttgaaaatgaaagtgattaagtccatctgtggggcagtttttggagtcagattg

SEQ ID NO: 14872 - DNA, 80 bp, synthetic construct
  source 1..80: mol_type = other DNA
agactaaaatataataagatgtagggaagcagaacctaaactgtaggaggttaaaaaccagatgaaggccaggtgtggtg

SEQ ID NO: 14873 - DNA, 80 bp, synthetic construct
  source 1..80: mol_type = other DNA
attcaaggattgtcttggaccatgggccaagcctgaattgtaagaaggaatggtaaagcatggtaacccattaaagggta

SEQ ID NO: 14874 - DNA, 80 bp, synthetic construct
  source 1..80: mol_type = other DNA
gtcactgtctgttacatctgataaaacctgcctattaatctttggcctgcttgtcagtttcttgtcccagacatgctttg

SEQ ID NO: 14875 - DNA, 80 bp, synthetic construct
  source 1..80: mol_type = other DNA
tgccctaatttttagatgctgatgagcataaataatgctttgagttgcctgcagcaagtagtttgatgagaatatctgat

SEQ ID NO: 14876 - DNA, 80 bp, synthetic construct
  source 1..80: mol_type = other DNA
agtgccaacaattcttttatctcactgagacttagaacccattgaccctattatctttgcactgttcctcaccatactct

SEQ ID NO: 14877 - DNA, 80 bp, synthetic construct
  source 1..80: mol_type = other DNA
gcccaggatagcttcgaatacagaccaacacaaattcctaaactttcttaaaacatgagattttttttgcaatttttttt

SEQ ID NO: 14878 - DNA, 80 bp, synthetic construct
  source 1..80: mol_type = other DNA
tttctttatccattcctctgttattagatgtcccgtttgtctaacccatatctaggctgtttgaatagcagtaaacatgg

SEQ ID NO: 14879 - DNA, 80 bp, synthetic construct
  source 1..80: mol_type = other DNA
attacaggcatgagcccctggtaatagcacctggcctatttcatttgttttttggccatttttcttcttttgagaaatgt

SEQ ID NO: 14880 - DNA, 80 bp, synthetic construct
  source 1..80: mol_type = other DNA
ccacagtgctgggattacaggtgtgagccaccgtgcctggccaaaatcagttttaatatatttctttaatctaatatatc

SEQ ID NO: 14881 - DNA, 80 bp, synthetic construct
  source 1..80: mol_type = other DNA
gcatatgacaggatttctttttttttttttttttttttttgagatggagtctcactctgtcacccaggcaggctggagtg

SEQ ID NO: 14882 - DNA, 80 bp, synthetic construct
  source 1..80: mol_type = other DNA
gttgccttttcactcttccttggtttcattctggttttggttgattgcttgccttgctgcacagaagtttgtaagtttga

SEQ ID NO: 14883 - DNA, 80 bp, synthetic construct
  source 1..80: mol_type = other DNA
aaattttttgtacagatggggtcttgccatcttgcccaagctggtctcgaagtgctggaattacaggtgtgagccactgt

SEQ ID NO: 14884 - DNA, 80 bp, synthetic construct
  source 1..80: mol_type = other DNA
cttactagttataggtttgttaagattttctgtttcttcgtgattcagtcctggcaggttgtgtgtttctaataattcat

SEQ ID NO: 14885 - DNA, 80 bp, synthetic construct
  source 1..80: mol_type = other DNA
cgggtatagtgttctttatgtgtccgttagttccagttactctccagtgttcaaattctgtgtctcctcattgatccgct

SEQ ID NO: 14886 - DNA, 80 bp, synthetic construct
  source 1..80: mol_type = other DNA
tttccttctaaccgttgttcatttcccaccccgaccccttttttccctaaaagaagtatctgcactttgtttccaatttt

SEQ ID NO: 14887 - DNA, 80 bp, synthetic construct
  source 1..80: mol_type = other DNA
acatgcacaaatgctgtctgtatttaatcccagttaaagacatgggaaataagataaccctaaggctataatgctcacct

SEQ ID NO: 14888 - DNA, 80 bp, synthetic construct
  source 1..80: mol_type = other DNA
ttggttcaaccatagaggaagagaatttgactaaatacatattttagggaaaagggaagtactgtgggctcagcggtttg

SEQ ID NO: 14889 - DNA, 80 bp, synthetic construct
  source 1..80: mol_type = other DNA
ctttccaccatggctttttccattattaaaaaaaatggcataactcttcctctgacccttctcttaccatgatgcacttg

SEQ ID NO: 14890 - DNA, 80 bp, synthetic construct
  source 1..80: mol_type = other DNA
ataatgtcgttagtcattagaaatataaatcaaaggctgggcacggtggctcacgcctgtaatcctagcactttgggagg

SEQ ID NO: 14891 - DNA, 80 bp, synthetic construct
  source 1..80: mol_type = other DNA
tccaaagaatggaataaagcctcaggggcccccaaagtggtgattccaaatattggttttagtgttaagaaaatgaatgg

SEQ ID NO: 14892 - DNA, 80 bp, synthetic construct
  source 1..80: mol_type = other DNA
gaactaatgaagaaaaaaaaaaagccctgtccatctcattaagagacgtacatttccagtaatttttctttccttcttta

SEQ ID NO: 14893 - DNA, 80 bp, synthetic construct
  source 1..80: mol_type = other DNA
caaacaaacagaacttcagacatgtatgactgagtgactaataagacttccaagcattagcaattactatatgcagggca

SEQ ID NO: 14894 - DNA, 80 bp, synthetic construct
  source 1..80: mol_type = other DNA
aaatttattatcttatggttctgcaggtcagaagtccaacacaggtctcactaggctaagatgcaggtgtctacagggcc

SEQ ID NO: 14895 - DNA, 80 bp, synthetic construct
  source 1..80: mol_type = other DNA
agcaaatatgtgatcacctaactcacaaggttgttgtgaagatcaaattaagtcatcaagttagagtgccttttgaaatg

SEQ ID NO: 14896 - DNA, 80 bp, synthetic construct
  source 1..80: mol_type = other DNA
ccccatagtagggagggagggaattaggcagttttcctaacagggccccgaagagtaccattttaacttaaatactctta

SEQ ID NO: 14897 - DNA, 80 bp, synthetic construct
  source 1..80: mol_type = other DNA
cccttttctgaggggttaggaagtttaagcattatttgtaagctatttgtaaatccctgtcaaacattatttgtccatta

SEQ ID NO: 14898 - DNA, 80 bp, synthetic construct
  source 1..80: mol_type = other DNA
gggctggtcttggaactcctggcctcgtgattcgcccacttcggcctccctgagtgttgggattacaggcatgaactact

SEQ ID NO: 14899 - DNA, 80 bp, synthetic construct
  source 1..80: mol_type = other DNA
ttttttagtcctatttttttttactagggaattatgactcattttggcacttagcttttgtagcttactaccgtatgaca

SEQ ID NO: 14900 - DNA, 80 bp, synthetic construct
  source 1..80: mol_type = other DNA
tgtgaaaatgcttagtaatgtgctgggcacactgcaggtgctctacaaataactactgataactactttttttcatgagt

SEQ ID NO: 14901 - DNA, 80 bp, synthetic construct
  source 1..80: mol_type = other DNA
tagtgagccgaggggggagtgatagtctcatgttcctatcaaaagagggaaacctaaaataaggccatttttgtttttgt

SEQ ID NO: 14902 - DNA, 80 bp, synthetic construct
  source 1..80: mol_type = other DNA
gtgcgccaccatgcccaactgatagtttgtattttttgtaaagatgaggtttcactgtgttgctcaggctggtcttgaac

SEQ ID NO: 14903 - DNA, 80 bp, synthetic construct
  source 1..80: mol_type = other DNA
tcagggctgaggatggtgtcttgttggcttctgcccttaccctgaatcccttaagccctgtgtacagtgagtatcataat

SEQ ID NO: 14904 - DNA, 80 bp, synthetic construct
  source 1..80: mol_type = other DNA
tcacaattctaaagcacaacataattgtaataatgtcacaagcttaccaaggttgctacatgaaacagaagaaaattaaa

SEQ ID NO: 14905 - DNA, 80 bp, synthetic construct
  source 1..80: mol_type = other DNA
catctttcacaagtcttcttttttgactttcagtaaagttttgtagtttttctcatgtgttatatttttgggtgctattg

SEQ ID NO: 14906 - DNA, 80 bp, synthetic construct
  source 1..80: mol_type = other DNA
tctccccacatgtctgtggtttcatatctagatgtctccctttttataaggatggtatagtcatataggattaggcccta

SEQ ID NO: 14907 - DNA, 80 bp, synthetic construct
  source 1..80: mol_type = other DNA
aagcagttccttagccacctgttgtgtttcatgacatcaacatttttgaagaacaccaggccagttattttctagaatat

SEQ ID NO: 14908 - DNA, 80 bp, synthetic construct
  source 1..80: mol_type = other DNA
ttttttttttaaagtataaatgggggtttcaccatgttggccaggcttgatactcctgggctcaagggatctgcctgtgt

SEQ ID NO: 14909 - DNA, 80 bp, synthetic construct
  source 1..80: mol_type = other DNA
tccccatctttcttatgtattccgtttaatctgttttgacagtgcatacgcttctgtaatctctatcaagatactgttct

SEQ ID NO: 14910 - DNA, 80 bp, synthetic construct
  source 1..80: mol_type = other DNA
tttgaatcctagttctccactcattgacaaaccacttgtcctgtctgaaccctatctcccataaaatggaagaaggatat

SEQ ID NO: 14911 - DNA, 80 bp, synthetic construct
  source 1..80: mol_type = other DNA
cccattaaacaataactctgtagtattccttccttcctgcccctggtaaccactatagtactttctgtctaatatgaatt

SEQ ID NO: 14912 - DNA, 80 bp, synthetic construct
  source 1..80: mol_type = other DNA
tgaagaactggttttcttttccaaaatggctgcaccatttacagccctgccagcaggttataaaagttccagcttctctg

SEQ ID NO: 14913 - DNA, 80 bp, synthetic construct
  source 1..80: mol_type = other DNA
ctatcttacaggcagtcagtatgctattatattaggagacacacaatgtgtggttgtgtctctgtgatattattttagta

SEQ ID NO: 14914 - DNA, 80 bp, synthetic construct
  source 1..80: mol_type = other DNA
tgtggttgattatcattccattggatggatgtgccagttttttattcgttcacttttagaaggacttacgtgttgtgtcc

SEQ ID NO: 14915 - DNA, 80 bp, synthetic construct
  source 1..80: mol_type = other DNA
atttctgcctcacacctggaatatctccaagaagccttgggtttttttcagtgggaaatggtatttcaaaaccactgcca

SEQ ID NO: 14916 - DNA, 80 bp, synthetic construct
  source 1..80: mol_type = other DNA
cctctcgcctcagcttccccaatgctgagagtatgggctgcattagctcttttttcttaattttggcaaaaatttcttgg

SEQ ID NO: 14917 - DNA, 80 bp, synthetic construct
  source 1..80: mol_type = other DNA
gatctgaaaactttgccatgggtcagttttattggaagttcattttcctgaatgtttggaagaaagcctagtgactcagg

SEQ ID NO: 14918 - DNA, 80 bp, synthetic construct
  source 1..80: mol_type = other DNA
tctttgaataactggaaatggcccctgcatacccgtgttggacatattacatgaggcagaaataaatttctgttgtgcta

SEQ ID NO: 14919 - DNA, 80 bp, synthetic construct
  source 1..80: mol_type = other DNA
caaccatcaccaccatccatctcccatactcttttcatctggtgaagctgaaaatatactcatcttgtaaagctgaaata

SEQ ID NO: 14920 - DNA, 80 bp, synthetic construct
  source 1..80: mol_type = other DNA
gacaccaaagttagacaaagatactacaaggaaactacagataatacttcttaggaacgttgatgccaaaatcttcaata

SEQ ID NO: 14921 - DNA, 80 bp, synthetic construct
  source 1..80: mol_type = other DNA
gaattgttttggggatgaaatgcggtaatgcatgtaaagcattgggcatgcaagtgaagccagccacgtattaaacagta

SEQ ID NO: 14922 - DNA, 80 bp, synthetic construct
  source 1..80: mol_type = other DNA
gcatctcatctaaaagtaatggcacttatcacgtcagcctcatggattgtggtagtggttgttatccttggaattaccgg

SEQ ID NO: 14923 - DNA, 80 bp, synthetic construct
  source 1..80: mol_type = other DNA
tgcctggttggcatctaccacttctctggaatcagcaaccccaatagcagatttaactgctggttccatggtttttgtta

SEQ ID NO: 14924 - DNA, 80 bp, synthetic construct
  source 1..80: mol_type = other DNA
gcccacattttgtgctgctcccttgctaaaagtgaataacaatatgatcatgttgttacctctctcttgccaaaacgttg

SEQ ID NO: 14925 - DNA, 80 bp, synthetic construct
  source 1..80: mol_type = other DNA
tatccaaaatgaattcaattttcctttttattctagtcccagtctgtgtatgagtaaaaccccaaggaccctgtatcctg

SEQ ID NO: 14926 - DNA, 80 bp, synthetic construct
  source 1..80: mol_type = other DNA
aacaacttggtcaaaggattacaacagttaagtggtggagccaggattctaaccttggtattcagtctggctacagagcc

SEQ ID NO: 14927 - DNA, 80 bp, synthetic construct
  source 1..80: mol_type = other DNA
gtctcacttgtctgtcgataatagaatatctctgaaattcaaacatacctagcctcacaaacttagtcccaaaggtacat

SEQ ID NO: 14928 - DNA, 80 bp, synthetic construct
  source 1..80: mol_type = other DNA
ttacagggttagccaccagcacccagccaagaaatcccattctaatgtattagtatggttttatctattttagcagtgta

SEQ ID NO: 14929 - DNA, 80 bp, synthetic construct
  source 1..80: mol_type = other DNA
aatacaatattatctaacatgtgatccctatttaaatttcatttattttcttccccagaacagttctttatagatgtttt

SEQ ID NO: 14930 - DNA, 80 bp, synthetic construct
  source 1..80: mol_type = other DNA
aatacatgaataaatctggtccaaacttctatcttgagaaatgtaacagcaattttgaactccttcatccctcaagacaa

SEQ ID NO: 14931 - DNA, 80 bp, synthetic construct
  source 1..80: mol_type = other DNA
cgtcatatgcagcctttttgtttttatagaccttgaaccacagaactacattaagctagtttgctgttttccagggatga

SEQ ID NO: 14932 - DNA, 80 bp, synthetic construct
  source 1..80: mol_type = other DNA
gtgtttttatgcttcattgttgggaaggataaattgcaaaagaacatagagctgggtgattttctggggttcagtctgtt

SEQ ID NO: 14933 - DNA, 80 bp, synthetic construct
  source 1..80: mol_type = other DNA
ccttttgaaagataatctctttccctagtttttggcttttaacagtaaagcagctgtgaacattcatgttcagttttttg

SEQ ID NO: 14934 - DNA, 80 bp, synthetic construct
  source 1..80: mol_type = other DNA
cacttagcatatattcaggcctcatccctgttgtatcatgaaccagttctttttatggcttcgtttatttttaaggttga

SEQ ID NO: 14935 - DNA, 80 bp, synthetic construct
  source 1..80: mol_type = other DNA
agtgtattgattacctcctataggccaggcactgtactgtgtatcagacactagggacacaagcactagtaaaatgctat

SEQ ID NO: 14936 - DNA, 80 bp, synthetic construct
  source 1..80: mol_type = other DNA
aactttagtaaatttttgtgctgtgactgttttagaacactttatcacctcccacaatcactgccttctacctcctcatc

SEQ ID NO: 14937 - DNA, 80 bp, synthetic construct
  source 1..80: mol_type = other DNA
gcctacgtcagacaatatgtgtagagatggggagacattttaaagatacgtgtatcagagctagaatgagcagcatttag

SEQ ID NO: 14938 - DNA, 80 bp, synthetic construct
  source 1..80: mol_type = other DNA
ttctgttatctcttctggaagaagccttttccccttgccttttgagtctcttctgtagttcaggtaagttagattttcta

SEQ ID NO: 14939 - DNA, 80 bp, synthetic construct
  source 1..80: mol_type = other DNA
ctccagcctgagtgacagagtgagaccctgtctttaaaaagaaaaaaagaaaaaaaaaaaaaacagaaaaaaaacaaaca

SEQ ID NO: 14940 - DNA, 80 bp, synthetic construct
  source 1..80: mol_type = other DNA
ctaacacccctggtggttgttgaaccacaagttcatagtgttaaaagcctgtggtaaattacccagtaagctaagtgatt

SEQ ID NO: 14941 - DNA, 80 bp, synthetic construct
  source 1..80: mol_type = other DNA
gaagtttatgttaagtgtttgtacatgtgggaaaacagggaagaacagatcatctggggttttggacttttgaagatggg

SEQ ID NO: 14942 - DNA, 80 bp, synthetic construct
  source 1..80: mol_type = other DNA
tacctgatatgctagaccgtttcaggttgccctagtttacatgaatttagtcattatcgccaagactgctaaacctcagt

SEQ ID NO: 14943 - DNA, 80 bp, synthetic construct
  source 1..80: mol_type = other DNA
aatccttctacactgcaactttatttgagccttcttcagtttctttgtaacaccacaactttatagtagcttctttagtt

SEQ ID NO: 14944 - DNA, 80 bp, synthetic construct
  source 1..80: mol_type = other DNA
ccaggataagattttttaacatgttagaataatagatctttggaaatagaatttaaagaggtaggagctgccatcatgcc

SEQ ID NO: 14945 - DNA, 80 bp, synthetic construct
  source 1..80: mol_type = other DNA
cttcctacccttaggcacaagtgaagtcctgtcagttttacctctctaatgtatcacaaatgtttgaatcctctctttcc

SEQ ID NO: 14946 - DNA, 80 bp, synthetic construct
  source 1..80: mol_type = other DNA
agaagggcgaaggttaagttgatcaccagtgacccgtggtttaattagttgtgcctacagaatgaacgttccataaaaat

SEQ ID NO: 14947 - DNA, 80 bp, synthetic construct
  source 1..80: mol_type = other DNA
ttgtctgcttgcttgttgatggggagaaaccctcacacatttggtaagaaaagtcttccctgttgattgttttggtgaga

SEQ ID NO: 14948 - DNA, 80 bp, synthetic construct
  source 1..80: mol_type = other DNA
catatttttggccctttctctcttgtggagtgcctgtgaactttaaaaaccccatctcaaatgccaattcatccctaaag

SEQ ID NO: 14949 - DNA, 80 bp, synthetic construct
  source 1..80: mol_type = other DNA
atagaattaccgcttaaggaatggggacctgtgaaaaattcattcagtagaattcgatggttccatattaacagataggc

SEQ ID NO: 14950 - DNA, 80 bp, synthetic construct
  source 1..80: mol_type = other DNA
aaaaagacttactggctgataggttatttgggagatgaaccaaaaagcagaagtgagagaatgggaaaagtgagacagag

SEQ ID NO: 14951 - DNA, 80 bp, synthetic construct
  source 1..80: mol_type = other DNA
tgaaacaagagggttaaaatccctaccactgcagctggtcctgagctcttatttccatccttgacattcatatgagaatg

SEQ ID NO: 14952 - DNA, 80 bp, synthetic construct
  source 1..80: mol_type = other DNA
ctccatatggtatagtggggagagcatgccacaaggttttcaggtaatatgaggttttctcctcatattctcttactaca

SEQ ID NO: 14953 - DNA, 80 bp, synthetic construct
  source 1..80: mol_type = other DNA
ttggggacctctgtttcttaggttattggtctgtttgtgtattccattccctgttgagttaatttttgtattaatatctt

SEQ ID NO: 14954 - DNA, 80 bp, synthetic construct
  source 1..80: mol_type = other DNA
gtgtgaactactgtaattaccctttggcttatctacctcaccctgtccctttcatcccatgtaatgcttcaagagtgatt

SEQ ID NO: 14955 - DNA, 80 bp, synthetic construct
  source 1..80: mol_type = other DNA
tgcagaaagttattttgagcagtatctagaacaatgcctggcaaataatagacaccagggaatgttgttcctaggtatca

SEQ ID NO: 14956 - DNA, 80 bp, synthetic construct
  source 1..80: mol_type = other DNA
gtaggtgcattgttcagtaccaatatgagaaagaattatgaatacagctttatattattagatttcttatgtcataatat

SEQ ID NO: 14957 - DNA, 80 bp, synthetic construct
  source 1..80: mol_type = other DNA
tcgcagatcaagtcctgaagagaacattgtagttactctggcaaagaacaacgaagacacaaaagctgtgcagagtaatg

SEQ ID NO: 14958 - DNA, 80 bp, synthetic construct
  source 1..80: mol_type = other DNA
tcttcacaaagccatatgaggagggtattgttattatgtgcactttacacaagaggaaacttaggcacagagagaaactt

SEQ ID NO: 14959 - DNA, 80 bp, synthetic construct
  source 1..80: mol_type = other DNA
atctgtaaaatagtaatgccaactgtggagatggcactgtaaaccaaaaggcacaatgactaaagaaactactgaaaatt

SEQ ID NO: 14960 - DNA, 80 bp, synthetic construct
  source 1..80: mol_type = other DNA
gagttttccaaatgttaacgacctggaaaagctcattgtctttaagacgtatcccttctgagtcttgtgatttggtggtt

SEQ ID NO: 14961 - DNA, 80 bp, synthetic construct
  source 1..80: mol_type = other DNA
ctcttgagtatttactttctgtaaaggaagttcacatgtggcagctttctcctgagtatctaatttgcaattgcctaact

SEQ ID NO: 14962 - DNA, 80 bp, synthetic construct
  source 1..80: mol_type = other DNA
taaactgtccatgtcgtaggtatgtccagatttacacatgccattccagagaatagcaaattaaggaaagttcctcagtt

SEQ ID NO: 14963 - DNA, 80 bp, synthetic construct
  source 1..80: mol_type = other DNA
aatctcaggaatgatccatgaggctcgtgagtaacaaaggcattcctactaccaaggaaattccatgaattagaggttct

SEQ ID NO: 14964 - DNA, 80 bp, synthetic construct
  source 1..80: mol_type = other DNA
caaaggaattagtttccacctcttaaaaagaagagtatgaaagagtttgtggacatatttaaaaaccaccacagatggtt

SEQ ID NO: 14965 - DNA, 80 bp, synthetic construct
  source 1..80: mol_type = other DNA
ccaaagcggttctgagccaaaaggacaaagctagaggcatcacactaccagacttcaagatatactgcaaagctgtagta

SEQ ID NO: 14966 - DNA, 80 bp, synthetic construct
  source 1..80: mol_type = other DNA
acagttttatcagcccaaacaacaacaaaagcatctcttcaagtttatttattgccgcattgcttatactaaattattgg

SEQ ID NO: 14967 - DNA, 80 bp, synthetic construct
  source 1..80: mol_type = other DNA
cagggacaagtaaatgtcaaatccatttcatgccatagaacttttttttttttttttttgaggcggagtctcgctctgcc

SEQ ID NO: 14968 - DNA, 80 bp, synthetic construct
  source 1..80: mol_type = other DNA
gttttaatttcttctgctccattcagtcattccctcaataaatatttatttagtatcgactctgtgccaggcactgttcc

SEQ ID NO: 14969 - DNA, 80 bp, synthetic construct
  source 1..80: mol_type = other DNA
accagtggatttgatgacaggaaatggaatgcaagaaggaaagagggagttgtcaagaatgacttgagattttaggcctg

SEQ ID NO: 14970 - DNA, 80 bp, synthetic construct
  source 1..80: mol_type = other DNA
ttgtggcagggaagatagaatatgcttagtgtaagagcctctactcctgagatcttaggggaaatctttgtaccctgaat

SEQ ID NO: 14971 - DNA, 80 bp, synthetic construct
  source 1..80: mol_type = other DNA
aattctgtcctttaatacccatttttctacttcttttattgggaccttgtagtttctcaattcatccaaaaccgtatcca

SEQ ID NO: 14972 - DNA, 80 bp, synthetic construct
  source 1..80: mol_type = other DNA
aactaggcaagaatcagtgtttctctacaaattgagttgacaaaaagaaattatcttcccctgcccccacaaaaaaagaa

SEQ ID NO: 14973 - DNA, 80 bp, synthetic construct
  source 1..80: mol_type = other DNA
ttttttaatctcattactttcctgccagcgccttaacatgcagtaacaagtggaatttgggctttgtcagcagcaaacct

SEQ ID NO: 14974 - DNA, 80 bp, synthetic construct
  source 1..80: mol_type = other DNA
agaagagtgacacctaggtctcttaaatagacagctgacagacattacgaatctcttcgaagtacagatatgccaaagat

SEQ ID NO: 14975 - DNA, 80 bp, synthetic construct
  source 1..80: mol_type = other DNA
cgtggacaccaaggcaggcatttcggtaagatttctgtgtattacctcagatacactcagacaactctttaagcaagtta

SEQ ID NO: 14976 - DNA, 80 bp, synthetic construct
  source 1..80: mol_type = other DNA
gagcagaggttgcaccactgcagtccagcctgggctacagagcaagactctgtctcaaaaaaaaaaaaaaaaaaggctgg

SEQ ID NO: 14977 - DNA, 80 bp, synthetic construct
  source 1..80: mol_type = other DNA
ccctcttttcactctcttggaaggccatctccagagtcatagctgaatattaccgttcttttagcataaccgatttgtat

SEQ ID NO: 14978 - DNA, 80 bp, synthetic construct
  source 1..80: mol_type = other DNA
ttcaccctcatctcccactacactatctcttattctcaacatttcagacattgttctctctttgcttttctctccctcaa

SEQ ID NO: 14979 - DNA, 80 bp, synthetic construct
  source 1..80: mol_type = other DNA
ttggttgtatctcaagtggagtggttgctatgtcctttgcattcctgtcattcttctctcaagtgcttaggaggcctggc

SEQ ID NO: 14980 - DNA, 80 bp, synthetic construct
  source 1..80: mol_type = other DNA
ttccagttttaaagatgaggaaactaattcagagaggttaagttaaaggcagatccagaatttgaacttatgccagggta

SEQ ID NO: 14981 - DNA, 80 bp, synthetic construct
  source 1..80: mol_type = other DNA
atacacgtgtaaatgatacctcactgtaaaccttctttgcctcagtactgtgaataactttggaaagctaattaaagtga

SEQ ID NO: 14982 - DNA, 80 bp, synthetic construct
  source 1..80: mol_type = other DNA
cccctcctctcctctttttttatgagattgtgtctcactctgtcacccaggctggagtgcagtggcgcagtctcagctta

SEQ ID NO: 14983 - DNA, 80 bp, synthetic construct
  source 1..80: mol_type = other DNA
aaactctgtctcaaataaaataaaataaaatgaattaatatgtgtaattttctaggtcggcttcctcttctatctataga

SEQ ID NO: 14984 - DNA, 80 bp, synthetic construct
  source 1..80: mol_type = other DNA
tcagattattgggagcctatttgttcatcatttctcgtgttcaaggtaaatcagtgttcattttagtaatgtatgtgtgt

SEQ ID NO: 14985 - DNA, 80 bp, synthetic construct
  source 1..80: mol_type = other DNA
agcttagaactcccaaacaggaagttattgtgatgactcttaggaccagatggcctgtatttgcacataagctttttcct

SEQ ID NO: 14986 - DNA, 80 bp, synthetic construct
  source 1..80: mol_type = other DNA
agatcacacgtaggcaatatgatacaaaattctcagtcttcgccccagttcacattgttctataataaacttttattagg

SEQ ID NO: 14987 - DNA, 80 bp, synthetic construct
  source 1..80: mol_type = other DNA
attgtcttaatctatatccattgcctagggctgggtgtgttgttcccccaaacaaaatcagagtttggttagctgggaaa

SEQ ID NO: 14988 - DNA, 80 bp, synthetic construct
  source 1..80: mol_type = other DNA
ccagcaagggaaggaggagaagaataagagtatctgttgctgggtaccacatttgttgacctgacatcatacatatgcta

SEQ ID NO: 14989 - DNA, 80 bp, synthetic construct
  source 1..80: mol_type = other DNA
actgaccaacccagtaacaacaagcacctgtaacaacccagttgtagtatctgattgtcttttttcactaaggatctaga

SEQ ID NO: 14990 - DNA, 80 bp, synthetic construct
  source 1..80: mol_type = other DNA
gcacagctctcgagctaattaccatttacaaaatccatagagaacaagaggacatgttaaatgatgccaggaggatgtga

SEQ ID NO: 14991 - DNA, 80 bp, synthetic construct
  source 1..80: mol_type = other DNA
atagaaaaaggacaagaagcatatacatcaaacggataatggtggttatgtttaaggagtgggaaggggattagatgggc

SEQ ID NO: 14992 - DNA, 80 bp, synthetic construct
  source 1..80: mol_type = other DNA
cccatgcacttctccctcacccacgtcacccttggattatcgtgggtaattttgaaataatatttcagttaagtataaga

SEQ ID NO: 14993 - DNA, 80 bp, synthetic construct
  source 1..80: mol_type = other DNA
aaaggccacatactgtgatcataatgcaataaaaggagttcaacagtgtaaactttgtttgagcgtatgacttttttttt

SEQ ID NO: 14994 - DNA, 80 bp, synthetic construct
  source 1..80: mol_type = other DNA
cttttttttgccattcagtgacattatggatgacactgcatgtcagtatgtgtcggacatgtgtcagcatgtgtcggaat

SEQ ID NO: 14995 - DNA, 80 bp, synthetic construct
  source 1..80: mol_type = other DNA
ccacaaaaccaatacctgttttctatatctctgctgtcttgtgtgatagctactagccaaatgtggcttttgagcacttg

SEQ ID NO: 14996 - DNA, 80 bp, synthetic construct
  source 1..80: mol_type = other DNA
atgtaagctattaaatattttgtgtgtgtttgttttgaaatataacctatacccccagtccaccccagggctcgtagttt

SEQ ID NO: 14997 - DNA, 80 bp, synthetic construct
  source 1..80: mol_type = other DNA
gatgtagcttagatttcattacttttgacacctaagatcagtttgagtttgacacctaggatgagccttttcctttgttt

SEQ ID NO: 14998 - DNA, 80 bp, synthetic construct
  source 1..80: mol_type = other DNA
tcttctgttaatgtaataggattttaaagctggtcaggttccctcacctgtcctctagtcctgtagccttatagagtaaa

SEQ ID NO: 14999 - DNA, 80 bp, synthetic construct
  source 1..80: mol_type = other DNA
ctctatactcattcagtagcaaattcttttactaaatattcggtataagaaagtgaaggttattggccaggcatagtggc

SEQ ID NO: 15000 - DNA, 80 bp, synthetic construct
  source 1..80: mol_type = other DNA
aaactcaactgcataattgtggtggtgggggactgcgttcatgcttttccctggttaaattaaaaaatttttaagttatt

SEQ ID NO: 15001 - DNA, 80 bp, synthetic construct
  source 1..80: mol_type = other DNA
gcccttcttaagagttaggagaatagagttgcatttagtgctattttaagaattattaaacttgtctgcggttttttttt

SEQ ID NO: 15002 - DNA, 80 bp, synthetic construct
  source 1..80: mol_type = other DNA
gttcatttttaccttggtgagagtttgccagcagggaactgctctctgctatgtcaccaaataatgttttgctaaacttc

SEQ ID NO: 15003 - DNA, 80 bp, synthetic construct
  source 1..80: mol_type = other DNA
tataactaaatcatttctgaaaagctaattgtttgattacaatttccttttttatttccatagacagcacctggctctgt

SEQ ID NO: 15004 - DNA, 80 bp, synthetic construct
  source 1..80: mol_type = other DNA
ctcttcaaaattctgcatagtgattttgtcccaggagatccttccagtgtttctgaaaaccagctccagatagaattgtt

SEQ ID NO: 15005 - DNA, 80 bp, synthetic construct
  source 1..80: mol_type = other DNA
cttatatgatcagctttagagttattcagtctccacttcctcagtgtaatatgcagaattgagtgtgatatgaccaagga

SEQ ID NO: 15006 - DNA, 80 bp, synthetic construct
  source 1..80: mol_type = other DNA
gtcaacccctcctagtttacaaatagaaggcctgaggtgtaaaacttcaaggttccaaacggtgttgtaattcgaagtaa

SEQ ID NO: 15007 - DNA, 80 bp, synthetic construct
  source 1..80: mol_type = other DNA
aaaagaaaaaaaaaaaaaaaagctgaggtgggaggatgacttgagcctgggaggcagaggttgtagtgagctgagatcat

SEQ ID NO: 15008 - DNA, 80 bp, synthetic construct
  source 1..80: mol_type = other DNA
ttgggttacgccagcaagcattttgaccagcacttatctaactttctgtatttcttggtaaacgtcacccaagcacagca

SEQ ID NO: 15009 - DNA, 80 bp, synthetic construct
  source 1..80: mol_type = other DNA
cacacctggctgatttaaaaatttttttagagatggggtctcactattttgcccagcctgatctcagactcctccgctca

SEQ ID NO: 15010 - DNA, 80 bp, synthetic construct
  source 1..80: mol_type = other DNA
aagaaaaaacaagacaggagttgaagaattgttcgtttttctccttatcatccactgtcatgtcagcagtacatctgttg

SEQ ID NO: 15011 - DNA, 80 bp, synthetic construct
  source 1..80: mol_type = other DNA
accagtttatgattgtaattacctaagttcgggtttggtgttctaatctagtgtctaacacaccatccacatagatatgt

SEQ ID NO: 15012 - DNA, 80 bp, synthetic construct
  source 1..80: mol_type = other DNA
tcctcaccctcaacaatggggtaccacagttgagaaatcgtgttttgggtctttctagataatagacttggaatcttctg

SEQ ID NO: 15013 - DNA, 80 bp, synthetic construct
  source 1..80: mol_type = other DNA
acataaccacaatggccagttccgaagttcttgggggaactccatagtataaactggttgcttcttggttttctcaattt

SEQ ID NO: 15014 - DNA, 80 bp, synthetic construct
  source 1..80: mol_type = other DNA
acagtgaagcttgtaatcagtaaaccctacccatatactaacagcttgccaatcaaggtgtcaggctgtgaaggatactg

SEQ ID NO: 15015 - DNA, 80 bp, synthetic construct
  source 1..80: mol_type = other DNA
gctgtgggacaacttcagatggcctaatatagatataattggagttcccagaagagaggagggacgaaaaacatacagaa

SEQ ID NO: 15016 - DNA, 80 bp, synthetic construct
  source 1..80: mol_type = other DNA
accttctgttggaaacagtgcagtcaagaagatagcgaaccaacatctttaaagtgcccaaagaaaaacatcacagactt

SEQ ID NO: 15017 - DNA, 80 bp, synthetic construct
  source 1..80: mol_type = other DNA
tcttcagtctcatttacattcatgacccatgatcctcaaaacctataccttctctaaaaccttatctggaaccatggcct

SEQ ID NO: 15018 - DNA, 80 bp, synthetic construct
  source 1..80: mol_type = other DNA
attttcactggctatagaattctggatgggctcaagtttgtttcccttaaagctgtcactcattatcttccacttgcatg

SEQ ID NO: 15019 - DNA, 80 bp, synthetic construct
  source 1..80: mol_type = other DNA
taatagcatgttttccctttctcacattcctgtctgacttcatttttctgctgagactctccatctgtgtattctgttac

SEQ ID NO: 15020 - DNA, 80 bp, synthetic construct
  source 1..80: mol_type = other DNA
agatacagcctgggcaacatggtgaaaccacatctctacaaaaaaatacaaaaattagctgggcatggtggtgcacatct

SEQ ID NO: 15021 - DNA, 80 bp, synthetic construct
  source 1..80: mol_type = other DNA
gtgaggatggaagtatttctgttttgggaagccgcagggtgttaaatgatcagttaaattgtcatattccccagtgtaag

SEQ ID NO: 15022 - DNA, 80 bp, synthetic construct
  source 1..80: mol_type = other DNA
attctcatatgttggtggagggattccaactggttcaccctttaaggaggtcagtagggcactccatcaaagttccaaat

SEQ ID NO: 15023 - DNA, 80 bp, synthetic construct
  source 1..80: mol_type = other DNA
ttatatattatacattctgaatggaccatatgactaaatgagagaatcaatatgttaaaaccaggccaggcacagtgggt

SEQ ID NO: 15024 - DNA, 80 bp, synthetic construct
  source 1..80: mol_type = other DNA
tcaagttggcaaaagtctgaaaatatgacttcgaggtttgggttggaatgtaaggaaatgtatattgtgattatttgaag

SEQ ID NO: 15025 - DNA, 80 bp, synthetic construct
  source 1..80: mol_type = other DNA
aaccaagaaaaatagaatagtcaagtaagatagagctataaaccaggttataggaaccaagtcctacagagaaaggcagg

SEQ ID NO: 15026 - DNA, 80 bp, synthetic construct
  source 1..80: mol_type = other DNA
gtttacgtagaaaatcccaagaatggtacaataaaactactgcagccagtaaatgactttatcaggttgcagaatacaga

SEQ ID NO: 15027 - DNA, 80 bp, synthetic construct
  source 1..80: mol_type = other DNA
aaatgagaagacaagtcacagattggcaaaacagatctgatacagggtttttgtgcaaaatatataaagaccttttgcaa

SEQ ID NO: 15028 - DNA, 80 bp, synthetic construct
  source 1..80: mol_type = other DNA
atattctgtatcttaattgtggtattggtgattacatgatatagatttgtccaaggcttgttgaacttttctcaaaaagg

SEQ ID NO: 15029 - DNA, 80 bp, synthetic construct
  source 1..80: mol_type = other DNA
cattatttctcattctgtgagtctgtggggcagttcatttgttggacttgcttagctagagctaggtggtgtagttcaca

SEQ ID NO: 15030 - DNA, 80 bp, synthetic construct
  source 1..80: mol_type = other DNA
gacaaggctagtgaggtacaggtggaagcctccatatgtgctttgaaaatgtgtgagttcaactatatacatttggctaa

SEQ ID NO: 15031 - DNA, 80 bp, synthetic construct
  source 1..80: mol_type = other DNA
ccctctttccaaataaggtcacgtttatagatgacatggattttagacatgaattttgtcggggagcactgttcagctca

SEQ ID NO: 15032 - DNA, 80 bp, synthetic construct
  source 1..80: mol_type = other DNA
cctagcctatctctgatgataactaaccttttaaactcatcaactggacaggtttcatagcggcagacattaaaggtaca

SEQ ID NO: 15033 - DNA, 80 bp, synthetic construct
  source 1..80: mol_type = other DNA
attatttctttcagcagtgtgcctcagtttacacacccgtaagcagtagagataaggatgtcatttttctgtcaccactt

SEQ ID NO: 15034 - DNA, 80 bp, synthetic construct
  source 1..80: mol_type = other DNA
atgtgccaccaaccctggttaacttttgtattttatagagacagtgttttaccatgttggccaggctgatcttgaacacc

SEQ ID NO: 15035 - DNA, 80 bp, synthetic construct
  source 1..80: mol_type = other DNA
aatacttattcattcttctattttgtctctacttattaaacatccccccccatctgctgctacccttcccaacctctggt

SEQ ID NO: 15036 - DNA, 80 bp, synthetic construct
  source 1..80: mol_type = other DNA
ctttagggtaaatggctgatttcgccttgcttattttttttaaggaagattgatatgccctttgtcgatggactctatca

SEQ ID NO: 15037 - DNA, 80 bp, synthetic construct
  source 1..80: mol_type = other DNA
ctgattagtgtctccagtcaagctctgggtactgaattgcctgttcataaaacggtgctttctgtgaaagccttaagaag

SEQ ID NO: 15038 - DNA, 80 bp, synthetic construct
  source 1..80: mol_type = other DNA
tgtgctttatttgcaaatcacccactcctttacaaccatactttatatatgtacatacattcatactgtagaaaccagct

SEQ ID NO: 15039 - DNA, 80 bp, synthetic construct
  source 1..80: mol_type = other DNA
agaaatacaaatattttaatctgcgttgccgtatgatatgattgcacttagaacacccaatttacttaaatcttggttta

SEQ ID NO: 15040 - DNA, 80 bp, synthetic construct
  source 1..80: mol_type = other DNA
cccaaactacctgactataaacaggaaaagttaaccctcaaagagagttcttgtgaattctctttatgctggcaaatagc

SEQ ID NO: 15041 - DNA, 80 bp, synthetic construct
  source 1..80: mol_type = other DNA
tgatagcccttgtagtgtttaaaagtggtcatatttattactgactttgagtcaggtgttaaaatagcagtgccacagct

SEQ ID NO: 15042 - DNA, 80 bp, synthetic construct
  source 1..80: mol_type = other DNA
gccaaaacattgttttctgattatggaaatgtactcatggcagaaaatttgggaaacaacagcaaataataaagcaaata

SEQ ID NO: 15043 - DNA, 80 bp, synthetic construct
  source 1..80: mol_type = other DNA
ttggaaaacattgccatattgctactcacaaagcttttcattttcattcctgctagcagttcatgagcttagagcgatgg

SEQ ID NO: 15044 - DNA, 80 bp, synthetic construct
  source 1..80: mol_type = other DNA
gtgggagagtcacctcgatgctgggatccagatggcggcttatttcaagtgcagtggcacatacaaaaaatatttttgga

SEQ ID NO: 15045 - DNA, 80 bp, synthetic construct
  source 1..80: mol_type = other DNA
ggaagagccatttttaaaagccagtttagaatccagatgatgacatctgttgctctactgtatgactgaaatgcaggtca

SEQ ID NO: 15046 - DNA, 80 bp, synthetic construct
  source 1..80: mol_type = other DNA
taacattgcacaattgctttgtcattctgtgtgtgtgtgtacaggaatcacagagactcatcttgtaatgtttgtaatgt

SEQ ID NO: 15047 - DNA, 80 bp, synthetic construct
  source 1..80: mol_type = other DNA
tggaagtgtttgctaccaagtttatttgcagtgttaacagcacaacatttacaaaacgtattttgtacaatcaagtcttc

SEQ ID NO: 15048 - DNA, 80 bp, synthetic construct
  source 1..80: mol_type = other DNA
ctgataaataatgaatcagcatcttgctcaattggtggcgtttaaatggttttaaaatcttctcaggtgaaaaattacca

SEQ ID NO: 15049 - DNA, 80 bp, synthetic construct
  source 1..80: mol_type = other DNA
tatttttagtagagatggggtttcgccatattggccaggctggtctcaaactcctgatgtcaggtgatccgccctgaggc

SEQ ID NO: 15050 - DNA, 80 bp, synthetic construct
  source 1..80: mol_type = other DNA
tatttaaaatgtgccaagaactgtgctactcaagcaccaggtaatgagtgataaaccaaacccatgcaaaaggaccccat

SEQ ID NO: 15051 - DNA, 80 bp, synthetic construct
  source 1..80: mol_type = other DNA
tggggcactggcccagcccatcatttctctctctctctttttttttgagacggagtctcgctctgtcgcccgggctggag

SEQ ID NO: 15052 - DNA, 80 bp, synthetic construct
  source 1..80: mol_type = other DNA
atgatgaaagctccttcaccacagaagcaccacacagctgtaccatccattccagttgatctaaaatggacatttagatg

SEQ ID NO: 15053 - DNA, 80 bp, synthetic construct
  source 1..80: mol_type = other DNA
taagctttatagcagtcctaagcataacattgtattaagtgtcaagtttaattagaaaatgttcatggagagggctgggc

SEQ ID NO: 15054 - DNA, 80 bp, synthetic construct
  source 1..80: mol_type = other DNA
agaaatagaatagcctctagaacatttcagcaatctgaggaacccccatcgtgggatcttgcttataatactccactatg

SEQ ID NO: 15055 - DNA, 80 bp, synthetic construct
  source 1..80: mol_type = other DNA
ccttctcactactctgagaatggccattgtatctttaggccacctaagcagtttttaatctagaagtgaagccaggttct

SEQ ID NO: 15056 - DNA, 80 bp, synthetic construct
  source 1..80: mol_type = other DNA
gccaaggcctaaaattcacctggcttcaaagagactgcgatagagaaaaaaatcaggaagctaaaaatacacggatggcc

SEQ ID NO: 15057 - DNA, 80 bp, synthetic construct
  source 1..80: mol_type = other DNA
cgagacggcgccactgcactccagcctgggtgacatagcgagactctgtctcaaaaaaaaaaagaaatttgaagtttcag

SEQ ID NO: 15058 - DNA, 80 bp, synthetic construct
  source 1..80: mol_type = other DNA
tcactgcaacctccgcctcctgggttcaaccgattctctagcctcagcctcccgagtaatcctgagctaggattacaggt

SEQ ID NO: 15059 - DNA, 80 bp, synthetic construct
  source 1..80: mol_type = other DNA
agaatcacttgaacctgggagctggagactgcagtgagctgagattgcgccactgcactccagactggccaacagaatca

SEQ ID NO: 15060 - DNA, 80 bp, synthetic construct
  source 1..80: mol_type = other DNA
aattttagctattattggctgggcacggtggctcacgcctatcccagcacttggggaggccaaggcgggaggatcacaag

SEQ ID NO: 15061 - DNA, 80 bp, synthetic construct
  source 1..80: mol_type = other DNA
gctgaaagaaaccaaacacaacccatcaggataagagaaagagaagcttccttcaatggaagtggagcagacacgtcata

SEQ ID NO: 15062 - DNA, 80 bp, synthetic construct
  source 1..80: mol_type = other DNA
gctgggcaacacagtgagaccccttctctagaaaaaagatacataaaacctcagccaggcatagttgcatgtgcctgcag

SEQ ID NO: 15063 - DNA, 80 bp, synthetic construct
  source 1..80: mol_type = other DNA
tacccctgagcttcatacaatgtgtccaactgcctacttaacttctctatccagaagtctagtatacatctcaaaattca

SEQ ID NO: 15064 - DNA, 80 bp, synthetic construct
  source 1..80: mol_type = other DNA
cctgccccagcctcccaagtagctgtgattacaggcacatgccaccattcccagctaatttttttttgtttttgagatgg

SEQ ID NO: 15065 - DNA, 80 bp, synthetic construct
  source 1..80: mol_type = other DNA
tcccttcatttttcaaggacaattatttcttgttatttaggtctcagctcaattttttcagaaaggctttccctggcctc

SEQ ID NO: 15066 - DNA, 80 bp, synthetic construct
  source 1..80: mol_type = other DNA
ctttcacatttcattttgcctgatctgttgtcacagaagttctcagatggctgttctgaaattattcctcctcctacact

SEQ ID NO: 15067 - DNA, 80 bp, synthetic construct
  source 1..80: mol_type = other DNA
tgcaagtgggcccacttcttgttcttatgaatcttttctttccttttataaaactccttttcctttctcttttccccaaa

SEQ ID NO: 15068 - DNA, 80 bp, synthetic construct
  source 1..80: mol_type = other DNA
ataagtttgcctgctgcacatggattcctgccgactattaaataaatccctagctcatatgctaacattgctaggagcag

SEQ ID NO: 15069 - DNA, 80 bp, synthetic construct
  source 1..80: mol_type = other DNA
gaaagcagtagctaaagaatcacttgtttatttcccagtgtttcaaaggcccttctgaagaactaagcaaactaaggaaa

SEQ ID NO: 15070 - DNA, 80 bp, synthetic construct
  source 1..80: mol_type = other DNA
tcatcatcaagtgaactggaacacatccagagaactaattttgttagaaagattttagagttgagccacacaatctgcat

SEQ ID NO: 15071 - DNA, 80 bp, synthetic construct
  source 1..80: mol_type = other DNA
tttcctgaaaaactctcaacaatactcaaactaggtgttacatgaagctggggtctccaggttttgcctcacttgttctt

SEQ ID NO: 15072 - DNA, 80 bp, synthetic construct
  source 1..80: mol_type = other DNA
ttgtctttcataaagtaattgattgactattagaagactatcatccatgctatgctcaacaaatattcttattttttcac

SEQ ID NO: 15073 - DNA, 80 bp, synthetic construct
  source 1..80: mol_type = other DNA
atattataaacctactacgtaccacaaaacttaaaacttaaaaaatatatactgggccagacacggcagctcatgcctat

SEQ ID NO: 15074 - DNA, 80 bp, synthetic construct
  source 1..80: mol_type = other DNA
ttgtctgataaataactttgtttaccaagggccatcatttactagccatagccacagccactcacaccagtatttacgtg

SEQ ID NO: 15075 - DNA, 80 bp, synthetic construct
  source 1..80: mol_type = other DNA
agatatttcagaatgacttggtcatctctcagtgtgcaataaatggcacacccactactgaatccatttgataatctggt

SEQ ID NO: 15076 - DNA, 80 bp, synthetic construct
  source 1..80: mol_type = other DNA
tgaccctttctgttgaagctgtcaattctggcttctccctgctcacactttcttccattgcattatacccagcagtatca

SEQ ID NO: 15077 - DNA, 80 bp, synthetic construct
  source 1..80: mol_type = other DNA
acattattttaaaaataaaagtttatgggccgagcacggtggctcacacctgtaatcccagcactttgggaggccgagac

SEQ ID NO: 15078 - DNA, 80 bp, synthetic construct
  source 1..80: mol_type = other DNA
tttatagagatcaggtctcgctacattgcccaggctggtcttgaactcttggcctcgagcaattctcccaccttggcctc

SEQ ID NO: 15079 - DNA, 80 bp, synthetic construct
  source 1..80: mol_type = other DNA
agtgattctgctgcctcagcctccagagtagctaggattacgggcatgcactagcacacccagttaatttttttgtattt

SEQ ID NO: 15080 - DNA, 80 bp, synthetic construct
  source 1..80: mol_type = other DNA
aatgatgggcatttagaaggggatgacctagaaagataaatggaaggagaaaaccatcgccaccaattgtgaaaggacaa

SEQ ID NO: 15081 - DNA, 80 bp, synthetic construct
  source 1..80: mol_type = other DNA
cagaggttaattaatttaaacaattattgggtgcttactatgggtcaaatactaaggctaggccccctggattgaagatg

SEQ ID NO: 15082 - DNA, 80 bp, synthetic construct
  source 1..80: mol_type = other DNA
caagcttgttcaggttttacctccattatatttttttctgaccttcagaagggacatatctatctaaccgcacatttctc

SEQ ID NO: 15083 - DNA, 80 bp, synthetic construct
  source 1..80: mol_type = other DNA
gaaaaaaacaaataaaccccctaaaccaacacatacacaaaaaaatcccaaggtgctggttgataagaaatcttaaataa

SEQ ID NO: 15084 - DNA, 80 bp, synthetic construct
  source 1..80: mol_type = other DNA
atacccagcctggtctagaactcttaaactcaagtgatcctcctgccttggcatctcacagtgctgggattataggcgtg

SEQ ID NO: 15085 - DNA, 80 bp, synthetic construct
  source 1..80: mol_type = other DNA
cagagggaaggctcagatacaaacacagctattaaaaagtcattcctccttttggccagaaccaccatctttcagtaatt

SEQ ID NO: 15086 - DNA, 80 bp, synthetic construct
  source 1..80: mol_type = other DNA
ttttctccttaatccttaattcattctctgaacagcaagcccaacctaagccttgtgacatgatgatctacttgctggct

SEQ ID NO: 15087 - DNA, 80 bp, synthetic construct
  source 1..80: mol_type = other DNA
ttagactgaagatggtgaaagtaccctaaagaagagtattatactggggatgggactctgatctctcattatctgagaga

SEQ ID NO: 15088 - DNA, 80 bp, synthetic construct
  source 1..80: mol_type = other DNA
agtactttttcatagctttctgaaattatggggttgcctgtcaccaatttctcccattccacttagcttccaatagagca

SEQ ID NO: 15089 - DNA, 80 bp, synthetic construct
  source 1..80: mol_type = other DNA
tgagggaaaaaatcctcaaattcccccaaatagacttgatgttattgtgatgtccttttgaagttggttattttctttta

SEQ ID NO: 15090 - DNA, 80 bp, synthetic construct
  source 1..80: mol_type = other DNA
tttttgcttatgggctcctgttgtttattggtccatttcaaagaagagtgtgctaagtccaagtatttgataaacaaaga

SEQ ID NO: 15091 - DNA, 80 bp, synthetic construct
  source 1..80: mol_type = other DNA
aatgcttcacaggctgtattagtcactactgtcacaaccatcacatctaacctctacgtggccattacataaatcagaaa

SEQ ID NO: 15092 - DNA, 80 bp, synthetic construct
  source 1..80: mol_type = other DNA
ggataaaattcctcaacatagcattcaaaaggccctttataccctggtattatctctcatttctcccaacacccctcaca

SEQ ID NO: 15093 - DNA, 80 bp, synthetic construct
  source 1..80: mol_type = other DNA
ctgcctgtgctactttagacgtaagacagcctgaaatctgacttcaacggttttgggtagatgcttagtaaaaacacgtt

SEQ ID NO: 15094 - DNA, 80 bp, synthetic construct
  source 1..80: mol_type = other DNA
ttagctatcaggatgccactatagtgatgtacataatagcaaactgtgcctcttaccctgaaacctccaacattcagcaa

SEQ ID NO: 15095 - DNA, 80 bp, synthetic construct
  source 1..80: mol_type = other DNA
ttttttttaactgctccttgtggagcaaggcttatctataggcaatgtacccagagtaaccaaatgtaactattctaggt

SEQ ID NO: 15096 - DNA, 80 bp, synthetic construct
  source 1..80: mol_type = other DNA
taggagaaagagcctggttctatgatgaagatgatattcatttttagacgttgtgatacagaatgttttttctagactat

SEQ ID NO: 15097 - DNA, 80 bp, synthetic construct
  source 1..80: mol_type = other DNA
tcctgctgtggctcctttttctcacctctcttgatacagtaagtgccgtcatgtttttgctataggggaaatgatgtgtt

SEQ ID NO: 15098 - DNA, 80 bp, synthetic construct
  source 1..80: mol_type = other DNA
acccagatgctgcttcaccttaaataacaaaaacagaggttcagatgtaaaagcagactataaacgctgcaacttgctgt

SEQ ID NO: 15099 - DNA, 80 bp, synthetic construct
  source 1..80: mol_type = other DNA
gatgcttacaattacttccaggaagactttgtttatagacctcaggttgcaaaacccctaatctaagcatagcattcaat

SEQ ID NO: 15100 - DNA, 80 bp, synthetic construct
  source 1..80: mol_type = other DNA
gtaacgagatactttcctgagtgccataatcagtaccaggtaccaatgaaatactgctactctctacagatctttcagtt

SEQ ID NO: 15101 - DNA, 80 bp, synthetic construct
  source 1..80: mol_type = other DNA
tcacttgaccattctgctccgtttggttagttccctgatttatcatttcaggagtcttttgaactgccaaatctgctttc

SEQ ID NO: 15102 - DNA, 80 bp, synthetic construct
  source 1..80: mol_type = other DNA
ggaggtggaaatcaaccaactggctatattagagaaactaacctcataaactaccaagtatactgaagatgtagctcata

SEQ ID NO: 15103 - DNA, 80 bp, synthetic construct
  source 1..80: mol_type = other DNA
cagaatccaaactgatttcatccctggttccttgaggggtgatttgtaacaattcttgatctcccacactatagggaaaa

SEQ ID NO: 15104 - DNA, 80 bp, synthetic construct
  source 1..80: mol_type = other DNA
tgtatatgaggaacttagagaacaatctgctagaagcaagcatgtgcagagttctactgttatcctaaattcctttggac

SEQ ID NO: 15105 - DNA, 80 bp, synthetic construct
  source 1..80: mol_type = other DNA
aaaagcacaggctctgacatctaacttcctaggtttgaatcatggctcagccacttactaggtttaataccttggaaaaa

SEQ ID NO: 15106 - DNA, 80 bp, synthetic construct
  source 1..80: mol_type = other DNA
gagatgaggtcttgctatgttgcccaggctggtctcaaactcctggcttcaagcaatcctctgccactgctgagattaca

SEQ ID NO: 15107 - DNA, 80 bp, synthetic construct
  source 1..80: mol_type = other DNA
ttaaaaggcttcctcatctagtacaatttatcttggaactaaatactgtagcaatccatcatgttttttcttattgctac

SEQ ID NO: 15108 - DNA, 80 bp, synthetic construct
  source 1..80: mol_type = other DNA
tggagcaggactgcttgaggccaggagttcaagaccagcataagcaacagagtgagacccagtctctacaaaataatagt

SEQ ID NO: 15109 - DNA, 80 bp, synthetic construct
  source 1..80: mol_type = other DNA
gccaccgtgcctggccaataacatttttaaaaaggataaatgatgacaataaaaccccagcactcctaagaacatttagt

SEQ ID NO: 15110 - DNA, 80 bp, synthetic construct
  source 1..80: mol_type = other DNA
agtccgccatcacgctcagctaatttttctgtgtttttagtagagacgggctttcaccatgtgagccaggatagtcttga

SEQ ID NO: 15111 - DNA, 80 bp, synthetic construct
  source 1..80: mol_type = other DNA
atatcagtgaccttatggctattttagataagcatcacagagcagataaagctccaaagcaaggaagggcctataagagc

SEQ ID NO: 15112 - DNA, 80 bp, synthetic construct
  source 1..80: mol_type = other DNA
gaagaagaagaaaacaaatggttttaccaaggaaggattttcgggttcactctgtagaagtcttttggcacggtttctgt

SEQ ID NO: 15113 - DNA, 80 bp, synthetic construct
  source 1..80: mol_type = other DNA
tgagttttcatggacagcacttgagtgtcattcttgggatattcaacacttacactccaaacctgtgtcaagctgaaaag

SEQ ID NO: 15114 - DNA, 80 bp, synthetic construct
  source 1..80: mol_type = other DNA
taccaaacttaggaaaaacagtgttgagacagacaaaattactactctcatagaatttacattgtagcagaagagataca

SEQ ID NO: 15115 - DNA, 80 bp, synthetic construct
  source 1..80: mol_type = other DNA
tttggatgctgcataagcaaaaacctaaactacataagcaatgatctatgaaaactgaacttacatgcatatggcttact

SEQ ID NO: 15116 - DNA, 80 bp, synthetic construct
  source 1..80: mol_type = other DNA
ccgtgcccaggccaaagatgattaaatgggaaaataatactttttgtgtttttaacaaacagtgttgagacaaaagtata

SEQ ID NO: 15117 - DNA, 80 bp, synthetic construct
  source 1..80: mol_type = other DNA
caaaaaaaaaaaaaaggcattgggaattgtgagaaaagacacttagagaatattttttactagccaggtaatttaacatt

SEQ ID NO: 15118 - DNA, 80 bp, synthetic construct
  source 1..80: mol_type = other DNA
ccttatcttcatttttatagagtagaggcttgtcccagatcacacagtaattaagcaatgaaggttatattggatccaga

SEQ ID NO: 15119 - DNA, 80 bp, synthetic construct
  source 1..80: mol_type = other DNA
gtgcacttacagtcccagctacttgggagactgaggtgataggatcgcttgagcctaggaggtcaaggcaacagtaagcc

SEQ ID NO: 15120 - DNA, 80 bp, synthetic construct
  source 1..80: mol_type = other DNA
gaaatattttctagattggtattattatctttttttataggcttcataaaagatttcagaactggctgggcaaggtggct

SEQ ID NO: 15121 - DNA, 80 bp, synthetic construct
  source 1..80: mol_type = other DNA
tgggtcaataaagttgttttatttttagcaattagagtttatccgtagaaaatacaattaatacaacaaaagcatggggg

SEQ ID NO: 15122 - DNA, 80 bp, synthetic construct
  source 1..80: mol_type = other DNA
actccagcctgggtgtcagagggagacactgtctcaaagaaacaaacaaaaatatatatgtgtcacacacacacatatat

SEQ ID NO: 15123 - DNA, 80 bp, synthetic construct
  source 1..80: mol_type = other DNA
cttacatcctttttctatttccaatcccttctgcctcctcttggaccttctctttcttgcaaatggcttcccatctttga

SEQ ID NO: 15124 - DNA, 80 bp, synthetic construct
  source 1..80: mol_type = other DNA
gaaagccccagggctttaaaggttaatctttagctctctgtagtaaatactgggacttttttttttttttttgagtctcc

SEQ ID NO: 15125 - DNA, 80 bp, synthetic construct
  source 1..80: mol_type = other DNA
gggggaatgcataaggatatgcagaaatgaacagaaaggagaaactgggaaggctcaaacacaatgtgcttatttcaaaa

SEQ ID NO: 15126 - DNA, 80 bp, synthetic construct
  source 1..80: mol_type = other DNA
aaggcctcaagttcgttcaatatttattaaatgtctgctgtgtcaggaactgagaatacagcagagaatacgatccttac

SEQ ID NO: 15127 - DNA, 80 bp, synthetic construct
  source 1..80: mol_type = other DNA
agccccaagtgtcttctgatctataggtgtctcttactttttctcccttgtcatttatttttaaaattaggtcatttgac

SEQ ID NO: 15128 - DNA, 80 bp, synthetic construct
  source 1..80: mol_type = other DNA
taaagcctgctctcatagagctcatattctagtgtggtagacagttgatacggaattaaagaatacatgggaataagtgc

SEQ ID NO: 15129 - DNA, 80 bp, synthetic construct
  source 1..80: mol_type = other DNA
gtgcagtggtgtggtcttggctcactgcaacctctgcctctcggattgaagtgattcttgtgcctcagcattccaagtag

SEQ ID NO: 15130 - DNA, 80 bp, synthetic construct
  source 1..80: mol_type = other DNA
aagaaattctccgtaaaagaaaaattggattcagttatcataccagatggctttcattctcaccactgactcaattctga

SEQ ID NO: 15131 - DNA, 80 bp, synthetic construct
  source 1..80: mol_type = other DNA
tgaaatatgatccctatcctagaactttccatacaaatgaatgtaaaacaccataaaaattaatcttaaggccgggcgcg

SEQ ID NO: 15132 - DNA, 80 bp, synthetic construct
  source 1..80: mol_type = other DNA
aaaaaaacaaaacaaaacaaaacaaaaagtctgggagcggtggctcacgcctgtaatcccagcactttcggaggccaagg

SEQ ID NO: 15133 - DNA, 80 bp, synthetic construct
  source 1..80: mol_type = other DNA
gaagataaagtgtgtgctgggggtgtggtaattttaaataggggtgtctggaaatgaaaaggtggtatttcaatcaagat

SEQ ID NO: 15134 - DNA, 80 bp, synthetic construct
  source 1..80: mol_type = other DNA
gattcctgccccagtgcagaaccaatcaagacagagtccctgtctttcccggaccacaggatttgtgttgaaaaggagag

SEQ ID NO: 15135 - DNA, 80 bp, synthetic construct
  source 1..80: mol_type = other DNA
ttagctttctccaatgtttctggttgttttctttttcttgcataaaaccaaaatcaacaacgaccaaaccaacaccaatc

SEQ ID NO: 15136 - DNA, 80 bp, synthetic construct
  source 1..80: mol_type = other DNA
cagcctgtcccccgtccaggaagtctcagcgagctcacgccgcgcagtcgcagttttaatttatctgtaattcccgcgct

SEQ ID NO: 15137 - DNA, 80 bp, synthetic construct
  source 1..80: mol_type = other DNA
gttatttttcgggttcagcttgcttttgccccgtctccgtcgacgcaatcgccaccagtcaatggggtggtcgttttgag

SEQ ID NO: 15138 - DNA, 80 bp, synthetic construct
  source 1..80: mol_type = other DNA
ccatcgactgcccaagggctgagaggagtgcaggcgcccggcacagccctgcgcaggatccactaggtgaagccagctgg

SEQ ID NO: 15139 - DNA, 80 bp, synthetic construct
  source 1..80: mol_type = other DNA
aatcttgctgctgctcactctttgggtccgcatagcatttatctgctggtaacaccgaccgcagaggtctgcagcttcac

SEQ ID NO: 15140 - DNA, 80 bp, synthetic construct
  source 1..80: mol_type = other DNA
ctcccacttcctgttttctcttagttggcccaccagctggaggagctccagaatatctaaattaatttccaattgtgtaa

SEQ ID NO: 15141 - DNA, 80 bp, synthetic construct
  source 1..80: mol_type = other DNA
tgagccaccacaccgggccaattttttattttatttttgagacagagtctcgctctatcacccaggcgggagtgcagtgg

SEQ ID NO: 15142 - DNA, 80 bp, synthetic construct
  source 1..80: mol_type = other DNA
gctaggtgttcagaatagggatcttatttctccagtgatatgggctttaataattcgaagtagcgcttagctcatttgtg

SEQ ID NO: 15143 - DNA, 80 bp, synthetic construct
  source 1..80: mol_type = other DNA
gagaatcctacttctatcacttactagttctgtggctctggccgcccccgcccaagttacttaacctctttttttttttt

SEQ ID NO: 15144 - DNA, 80 bp, synthetic construct
  source 1..80: mol_type = other DNA
ttctcctgtctggctttgaataactctgggtagtgctttaaatctaagctgacataccagtgggatgtgaactgtccttg

SEQ ID NO: 15145 - DNA, 80 bp, synthetic construct
  source 1..80: mol_type = other DNA
gtaccttttttcttgtacaagtcacatgataatgtaaggggtttttttccccatctagagcctgcctggtgggctcatgg

SEQ ID NO: 15146 - DNA, 80 bp, synthetic construct
  source 1..80: mol_type = other DNA
tggccatggaatgaagcacaaaggagagcctgctagttcctaacccacgcctgaagacgccttaggcggttctgcggacc

SEQ ID NO: 15147 - DNA, 80 bp, synthetic construct
  source 1..80: mol_type = other DNA
gaccaaggcgggagggtcacttgagaacaggagttcaaaaccagcctgggcaacaaagtgaggcccgtctctaacaaaga

SEQ ID NO: 15148 - DNA, 80 bp, synthetic construct
  source 1..80: mol_type = other DNA
catcacacaccagagcctattgtggggtggggggaggggggagggatagcattaggagatatccttaatgtaaatgacga

SEQ ID NO: 15149 - DNA, 80 bp, synthetic construct
  source 1..80: mol_type = other DNA
gtgtgagttggaagggaggcattgaggatcagccatttaaagcagcatacaaggatgttcaaggctcgagatccacaggt

SEQ ID NO: 15150 - DNA, 80 bp, synthetic construct
  source 1..80: mol_type = other DNA
ccaaacaaacaaaacccctgaacttccctgcgggcacattttctctggcagcctttttcaatgagagctatgttttctcc

SEQ ID NO: 15151 - DNA, 80 bp, synthetic construct
  source 1..80: mol_type = other DNA
cccttggaaattcctgaaagatgggggtgctaggagcattgtctttttttttttttaaatttatcatttttcttttctcc

SEQ ID NO: 15152 - DNA, 80 bp, synthetic construct
  source 1..80: mol_type = other DNA
cttttgttctaacgtttggtccttcaccttggttcctgacacaaggattcctaaatcccttggaattttctgcatgatag

SEQ ID NO: 15153 - DNA, 80 bp, synthetic construct
  source 1..80: mol_type = other DNA
ctttcatttagtagctgttggccttgtgtccacctttctgtggcactcaggtctcacttaagagctggccctctgagcta

SEQ ID NO: 15154 - DNA, 80 bp, synthetic construct
  source 1..80: mol_type = other DNA
tgcaaggatctctactcttggcttctttttttcttgagatggagtcttgctctgttgcccaggctggtgtgcagtggccc

SEQ ID NO: 15155 - DNA, 80 bp, synthetic construct
  source 1..80: mol_type = other DNA
cttccatggattgctgggctaaatcatataagactgtaaaatgcctaacccaggatttggcatcaagtaagcaaattgta

SEQ ID NO: 15156 - DNA, 80 bp, synthetic construct
  source 1..80: mol_type = other DNA
gttagcactgttctttacttcctattactgaactgccagcgttcatttgtgttcagttaggtagattaccaattcttgtt

SEQ ID NO: 15157 - DNA, 80 bp, synthetic construct
  source 1..80: mol_type = other DNA
gtatgtggtattatacttgatgaaccaggggagagggcaccaagaacaacgatatttaattgtaaaatctccaccctctg

SEQ ID NO: 15158 - DNA, 80 bp, synthetic construct
  source 1..80: mol_type = other DNA
tgaataccatagaccatgtcttatcagtggtccctgtctcccttctttacaattcagaggaattttttttctttcttttt

SEQ ID NO: 15159 - DNA, 80 bp, synthetic construct
  source 1..80: mol_type = other DNA
atttgcttccaaattttaagctggaaagtcactgggataacttttaaaaagaattacagtacgtggctttttagattttt

SEQ ID NO: 15160 - DNA, 80 bp, synthetic construct
  source 1..80: mol_type = other DNA
gagattacaggctgcgccaccgcgcccggctaattttgtatttttagtagcgacggggtttcttttttattttgagacag

SEQ ID NO: 15161 - DNA, 80 bp, synthetic construct
  source 1..80: mol_type = other DNA
cagagttctaagctctcttctaattctaaaattctaatgtaaaaattgccagactagtggtggcgcaagcctgtaatccc

SEQ ID NO: 15162 - DNA, 80 bp, synthetic construct
  source 1..80: mol_type = other DNA
atataaccaacacacatccccccgccaccacccaattaacttttttactttttttcccccccgagacagagtcttgccct

SEQ ID NO: 15163 - DNA, 80 bp, synthetic construct
  source 1..80: mol_type = other DNA
gccactaccctcagtttcttttttttgtttttgagacggagtcttgctctgtcgcacagcctggagtgcagtggcatgat

SEQ ID NO: 15164 - DNA, 80 bp, synthetic construct
  source 1..80: mol_type = other DNA
aagtccctgttttgggaagaatgaagctgagctctagctaaaaaaaaacaactccatttggggatctaaaaattttgcag

SEQ ID NO: 15165 - DNA, 80 bp, synthetic construct
  source 1..80: mol_type = other DNA
cactgtacctcagcctgggtgacagagcaataccctgtctcttaaaaaataaaaatatacatttttttctgtagtaattt

SEQ ID NO: 15166 - DNA, 80 bp, synthetic construct
  source 1..80: mol_type = other DNA
taaataaataaatggagaactccactggttaagagcgaagggaaggattacttctggatttaggagacgaactgctggac

SEQ ID NO: 15167 - DNA, 80 bp, synthetic construct
  source 1..80: mol_type = other DNA
aacactttacagatggtactgtgtactcttattagatcacttcagaagacgcatgtttggtttgtgattactttgtaaaa

SEQ ID NO: 15168 - DNA, 80 bp, synthetic construct
  source 1..80: mol_type = other DNA
ttaaagagaaaaaataagcagggtaaggggaaacaggtagtgtaatatgtatagggggtaggtgtacatggggggagtca

SEQ ID NO: 15169 - DNA, 80 bp, synthetic construct
  source 1..80: mol_type = other DNA
acttagccctaaatgtgaacttttgaaatggattttttgggtaaagtccaggcaggacatcaaagaacaagtatcctggt

SEQ ID NO: 15170 - DNA, 80 bp, synthetic construct
  source 1..80: mol_type = other DNA
taagctacatttcaaagaaattctccgtaaaagaaaaattggattcagttatcataccagatggctttcattctcaccac

SEQ ID NO: 15171 - DNA, 80 bp, synthetic construct
  source 1..80: mol_type = other DNA
tattaagacataactgcaaattgtgctatactgggtactgtattaaaaggaagtgaaatatggtccccatcctagaagtt

SEQ ID NO: 15172 - DNA, 80 bp, synthetic construct
  source 1..80: mol_type = other DNA
attaatctaacagaaaataggaaaaaagcaatgaaaagctagaaaacatacaatagttgactgaaaataaaaatttagca

SEQ ID NO: 15173 - DNA, 80 bp, synthetic construct
  source 1..80: mol_type = other DNA
aactaggtcccaagtactgttttaactactgaatatacagatgtacataaacgaaacaaaaatctctgctgccctggagt

SEQ ID NO: 15174 - DNA, 80 bp, synthetic construct
  source 1..80: mol_type = other DNA
gctcctcacatcacagatacttgaaggcagcatgctcgttaagagtcatcaccactccctaatctcaagtacccagggac

SEQ ID NO: 15175 - DNA, 80 bp, synthetic construct
  source 1..80: mol_type = other DNA
gagagggtcgtgatcgattgagcaagcaggaggtacgtgggtacgtgactgggggctgcacgcaccagtaattagattgg

SEQ ID NO: 15176 - DNA, 80 bp, synthetic construct
  source 1..80: mol_type = other DNA
ttcaatttcttatagctatgcttttcacgggaagcatagacagggaagcccaggagttctcctgtttttatggacagtag

SEQ ID NO: 15177 - DNA, 80 bp, synthetic construct
  source 1..80: mol_type = other DNA
tgacagcacaggcatcaaattttaaggtgacttgtttgggcacccctttttcttctgttttggctaacactttactcata

SEQ ID NO: 15178 - DNA, 80 bp, synthetic construct
  source 1..80: mol_type = other DNA
ctaaatagacatgagagtcgaaagacccataaggggcttctctcgctttacaatgtctttctttttttccttctggttga

SEQ ID NO: 15179 - DNA, 80 bp, synthetic construct
  source 1..80: mol_type = other DNA
tccacagaacgttggaccaactacggcataaaaactctacatcaggggacaagactcctggttggcactggggtctttat

SEQ ID NO: 15180 - DNA, 80 bp, synthetic construct
  source 1..80: mol_type = other DNA
tacttttcttatacaccttgcatataaactgttttttttttcaacagttttacattcaggaggcctagttacttttaaat

SEQ ID NO: 15181 - DNA, 80 bp, synthetic construct
  source 1..80: mol_type = other DNA
taataaaaagaaaaccttctaagtttgggattttaattatcctttgctattaataagaccttgttttgtctaaattagaa

SEQ ID NO: 15182 - DNA, 80 bp, synthetic construct
  source 1..80: mol_type = other DNA
caaagtgccaataaaggcacgccatgggtgatcaggccatgcttccactcaaatggagtgggcaagtttcaaagactact

SEQ ID NO: 15183 - DNA, 80 bp, synthetic construct
  source 1..80: mol_type = other DNA
agaaaaccaaaatgccagttaatctaaactagattcctgccccagtgcagaaccaatcaagacagggtccctgtctttca

SEQ ID NO: 15184 - DNA, 80 bp, synthetic construct
  source 1..80: mol_type = other DNA
ctacaggggagtgactgaccgggtaagtggtgagctttctccaatgcttctggctgttttctttttcttgcataaaacca

SEQ ID NO: 15185 - DNA, 80 bp, synthetic construct
  source 1..80: mol_type = other DNA
gcaaacaagccaggccaaaaagtttcaatatttacactggctgctttaataagggcattgatcttatcctccgtaaaggt

SEQ ID NO: 15186 - DNA, 80 bp, synthetic construct
  source 1..80: mol_type = other DNA
aagcttttgtaagatcggctcgctttggggaacaggtcttgagagaacatcccttttaaggtcagaacaaaggtatttca

SEQ ID NO: 15187 - DNA, 80 bp, synthetic construct
  source 1..80: mol_type = other DNA
tttcttggaaacacgatcactttaacggaatattgctgttttggggaagtgttttacagctgctgggcacgctgtatttg

SEQ ID NO: 15188 - DNA, 80 bp, synthetic construct
  source 1..80: mol_type = other DNA
cgtcacagtgttgcttagaaccataaactgttccttatgtgtgtataaatccagttaacaacataatcatcgtttgcagg

SEQ ID NO: 15189 - DNA, 80 bp, synthetic construct
  source 1..80: mol_type = other DNA
taaaaataatgaaagctaacccattgcatattatcacaacattcttaggaaaaataactttttgaaaacaagtgagtgga

SEQ ID NO: 15190 - DNA, 80 bp, synthetic construct
  source 1..80: mol_type = other DNA
tttttaacaaggacactcagtggtaaggaatataatggctactagtattagtttggtgccactgccataactcatgcaaa

SEQ ID NO: 15191 - DNA, 80 bp, synthetic construct
  source 1..80: mol_type = other DNA
ccgcacctggccgaattttatcgtggaatgtattcttaatgtgaatagtttttgattccgaaccatgaataataagaaaa

SEQ ID NO: 15192 - DNA, 80 bp, synthetic construct
  source 1..80: mol_type = other DNA
tttctgcaagctatcacagaggacagagattattttaccgatatactataagtatcatgatttggaaggagtttccctgg

SEQ ID NO: 15193 - DNA, 80 bp, synthetic construct
  source 1..80: mol_type = other DNA
tttctgcttctgagaaatacttcctgtctgccctcgttgagcttctagtgaaggagacatacataagcaattatagtgtg

SEQ ID NO: 15194 - DNA, 80 bp, synthetic construct
  source 1..80: mol_type = other DNA
ttcctaaagttctatgaggaattgtgctgtttctgcctctcagcagtccttccttttgcattaaatcataggcatttctg

SEQ ID NO: 15195 - DNA, 80 bp, synthetic construct
  source 1..80: mol_type = other DNA
ttttgtttatggccagttttggggccagttcccaacagcaatatgtgtttaaggttcttccatgtcttttaatgatttca

SEQ ID NO: 15196 - DNA, 80 bp, synthetic construct
  source 1..80: mol_type = other DNA
agagaaggaggttggatattttgttgaagtggggtttttaagttacacatccatttgctttattagtgattatgtctagt

SEQ ID NO: 15197 - DNA, 80 bp, synthetic construct
  source 1..80: mol_type = other DNA
ctggaggaggtagtttctaaatggaagcctgaaagagttgttccaggtcaagaaaagcaaagaaggggaaacagcttgta

SEQ ID NO: 15198 - DNA, 80 bp, synthetic construct
  source 1..80: mol_type = other DNA
aaaatggatcaagcagatgatgtttcctgtccacttctaaattcttgtcttagtgaaaggtatgatgaagctattatatt

SEQ ID NO: 15199 - DNA, 80 bp, synthetic construct
  source 1..80: mol_type = other DNA
aatttgacaatagcgttatacctttgccctgagatttacaaatctgtacctagcattctgcctcatacaggcaattcagt

SEQ ID NO: 15200 - DNA, 80 bp, synthetic construct
  source 1..80: mol_type = other DNA
aaaaataaaaaaattggccaggtgtggtaacacacacctgtaatcccagctacctgggggctgaggcatgggaattgctt

SEQ ID NO: 15201 - DNA, 80 bp, synthetic construct
  source 1..80: mol_type = other DNA
aattcctgagctcaagcagccaccacacccacctgtgaccattcttttttatttttatgagataataaacatacaagttt

SEQ ID NO: 15202 - DNA, 80 bp, synthetic construct
  source 1..80: mol_type = other DNA
gtaatgatcaccaagccatatcttaccaccttgtgagtagtactaaggaagtaagtatagtttattcactgtgttgattg

SEQ ID NO: 15203 - DNA, 80 bp, synthetic construct
  source 1..80: mol_type = other DNA
tttctggcgtaatatgtagctgtcaatcaaaacaacctgttcatgttttctacccacaaatgtaataccttttctacttc

SEQ ID NO: 15204 - DNA, 80 bp, synthetic construct
  source 1..80: mol_type = other DNA
tcggtttaccgcaacctctgcctcccgtgctcaagcgatcctgcctcagcttgccaagtagctgagattacaagcatgca

SEQ ID NO: 15205 - DNA, 80 bp, synthetic construct
  source 1..80: mol_type = other DNA
gaagaacaggagaaggggtgactgaccgaaaaataaaatgccaagtactcagaataaccctttaaatactgatatgtaat

SEQ ID NO: 15206 - DNA, 80 bp, synthetic construct
  source 1..80: mol_type = other DNA
agaattctttgccacgtatttctagcctaccaaaatcagagaagccattaaatgaggaaacagtggtaaataagagagat

SEQ ID NO: 15207 - DNA, 80 bp, synthetic construct
  source 1..80: mol_type = other DNA
cccacacacccccacctcctgacagaccctagtgtgtgttgttcccctccctgtgtccgtgtgttctcattgttcagctc

SEQ ID NO: 15208 - DNA, 80 bp, synthetic construct
  source 1..80: mol_type = other DNA
acagtacagaactgtttgaagtttgggttaaatttttagaggaaaatgtttgatactatgcatatcatagttaaagccaa

SEQ ID NO: 15209 - DNA, 80 bp, synthetic construct
  source 1..80: mol_type = other DNA
ccactgtgcccaaacactacctttttaacttagtgaaaaatatttagtgaatgtgattgatggtactttaattttgtcac

SEQ ID NO: 15210 - DNA, 80 bp, synthetic construct
  source 1..80: mol_type = other DNA
gttgagctgttgccacctgaaaaatacatgagagtagcatcaccttcaagaaaggtacaattcaaccaaaacacaaatct

SEQ ID NO: 15211 - DNA, 80 bp, synthetic construct
  source 1..80: mol_type = other DNA
atcttaaagaccacttctgaggaatgcagagatgctgatcttcatgtcataatgaatgccccatcgattggtcaggtaga

SEQ ID NO: 15212 - DNA, 80 bp, synthetic construct
  source 1..80: mol_type = other DNA
acatagttaaacacaaaatactgaaagaaagtgtcccagttggtactggaaatcaactagtgaccttccagggacaaccc

SEQ ID NO: 15213 - DNA, 80 bp, synthetic construct
  source 1..80: mol_type = other DNA
tttgccaaacgaaaattatggcaggttgttacgaggcattggatgattcagaggatattcttcataactctctagataat

SEQ ID NO: 15214 - DNA, 80 bp, synthetic construct
  source 1..80: mol_type = other DNA
agttggtattaggaaccaaagtgtcacttgttgagaacattcatgttttgggaaaagaacaggcttcacctaaaaacgta

SEQ ID NO: 15215 - DNA, 80 bp, synthetic construct
  source 1..80: mol_type = other DNA
ttttcatatacatagcaagttcagactctgacttatatgaactttaaaagttggtttccgggaggccgaggcgggcggat

SEQ ID NO: 15216 - DNA, 80 bp, synthetic construct
  source 1..80: mol_type = other DNA
gagtatacttacacaaacctaggtggtatagcctactatatacctaggctgtatggtatagcttattgctcctaggctgc

SEQ ID NO: 15217 - DNA, 80 bp, synthetic construct
  source 1..80: mol_type = other DNA
ttccctcatttctgtaacatataagtgtataacttagtcagcttctggttactggaacagtacaggtcactgttaaacaa

SEQ ID NO: 15218 - DNA, 80 bp, synthetic construct
  source 1..80: mol_type = other DNA
tccagatggtaaaattagctttttatttatatctgttctccctctataggtatggtatataatattctgacctcaggtga

SEQ ID NO: 15219 - DNA, 80 bp, synthetic construct
  source 1..80: mol_type = other DNA
actggcctcatgttggcactcaaaaagtttcaggtttgtgaccattttggattttcagattagggatactcaacccatat

SEQ ID NO: 15220 - DNA, 80 bp, synthetic construct
  source 1..80: mol_type = other DNA
tgctgatttctgttgtatgcttgtactgtgagttatttggtgcatagtcattatcaatttgtgaatcaatttattttcat

SEQ ID NO: 15221 - DNA, 80 bp, synthetic construct
  source 1..80: mol_type = other DNA
ccaggcacaattgagggaaagatactaaaatgaaagatcagatacaaatctgtatgtcaagcagtgagacctagctcctt

SEQ ID NO: 15222 - DNA, 80 bp, synthetic construct
  source 1..80: mol_type = other DNA
atattgaagggagatcccagagtagctgtgttgctaagtctagaaaggcagctagactactttggaactgaagaagataa

SEQ ID NO: 15223 - DNA, 80 bp, synthetic construct
  source 1..80: mol_type = other DNA
caaaagactaggaattggtggcttcatttcttatctttagaattgggtggtgcagaaggagggagccaaaatggaataag

SEQ ID NO: 15224 - DNA, 80 bp, synthetic construct
  source 1..80: mol_type = other DNA
attaactcaagagaaagcaaaagttgtaaaggaagtacactatttatatactacccattaatggccgggtgtggtggttc

SEQ ID NO: 15225 - DNA, 80 bp, synthetic construct
  source 1..80: mol_type = other DNA
agagctgaattttcattttctgtaggggtacttcaagagaaaaagtcaagaagaaacatgtcacttagacatataaatat

SEQ ID NO: 15226 - DNA, 80 bp, synthetic construct
  source 1..80: mol_type = other DNA
atgtaaagaatgcttggttaaagatggcattccaaatcttggaatttggttgggggacagagggaaacaaaaagaaatgg

SEQ ID NO: 15227 - DNA, 80 bp, synthetic construct
  source 1..80: mol_type = other DNA
tgtgccatctcagagtagagactaaaagcccttgtcatggtgtacagattcttcatgatctggctgctttgctatttttc

(The sequence listing continues in the following parts.)

1.-101. (canceled)

102. A method for preparing a nucleic acid library, comprising:
(a) obtaining a plurality of transposomes comprising transposon adaptors, wherein the plurality of transposomes is immobilized on a plurality of beads;
(b) contacting a plurality of nucleic acid fragments with the plurality of transposomes to obtain a plurality of polynucleotides;
(c) amplifying the plurality of polynucleotides to obtain amplified polynucleotides by:
(i) performing a mutagenesis PCR, such that mutations are introduced into amplified polynucleotides, and
(ii) performing a suppression PCR; and
(d) adding library adapters to each end of the amplified polynucleotides, thereby obtaining the nucleic acid library;
further comprising enriching for target polynucleotides in (i) the plurality of polynucleotides, (ii) the amplified polynucleotides, and/or (iii) nucleic acids of the nucleic acid library by hybridizing a plurality of selection probes to the target polynucleotides; wherein the selection probes of the plurality of selection probes comprise at least 50 different nucleotide sequences;
wherein each selection probe of the plurality of selection probes comprises a nucleotide sequence capable of hybridizing to a gene selected from: (i) TABLE 1A, (ii) a nucleotide sequence within no more than 10 kbp 5′ or no more than 10 kbp 3′ of a gene in a human genome selected from TABLE 1A, and/or (iii) a cytochrome P450 gene, an HLA gene, or a UDP-glucuronosyltransferase gene.

103. The method of claim 102, wherein each selection probe of the plurality of selection probes comprises a nucleotide sequence having at least 90% sequence identity to any one of SEQ ID NOs:02-111831.

104. The method of claim 102, wherein the plurality of selection probes is attached to a substrate.

105. The method of claim 102, further comprising amplifying the target polynucleotides.

106. The method of claim 102, wherein the plurality of the transposomes is immobilized on the plurality of beads:
(i) at a density such that an average length of the plurality of polynucleotides is greater than about 1 kbp, and/or the average length of the plurality of polynucleotides is in a range from about 1 kbp to about 40 kbp;
(ii) such that the number of transposomes immobilized on the plurality of beads is no more than about 100 transposomes per bead;
(iii) comprise a total activity such that an average length of the plurality of polynucleotides is greater than about 1 kbp, and/or wherein the average length of the plurality of polynucleotides is in a range from about 1 kbp to about 40 kbp; and/or
(iv) comprise an activity in a range from about 0.05 AU/μl to about 0.25 AU/μl.

107. The method of claim 102, wherein the transposomes of the plurality of transposomes are the same.

108. The method of claim 102, wherein the mutagenesis PCR comprises: (i) amplifying the plurality of polynucleotides with a low bias DNA polymerase; (ii) amplifying the plurality of polynucleotides with a nucleotide analogue; and/or (iii) no more than 6 cycles.

109. The method of claim 102, wherein a first end of a polynucleotide of the plurality of polynucleotides is capable of annealing to a second end of the polynucleotide of the plurality of polynucleotides; and/or, wherein a first end of an amplified polynucleotide is capable of annealing to a second end of the amplified polynucleotide.

110. The method of claim 102, wherein the suppression PCR comprises (i) use of a single amplification primer; and/or (ii) no more than 6 cycles.

111. The method of claim 102, wherein step (d) comprises contacting the amplified polynucleotides with an additional plurality of transposomes comprising the library adapters.

112. A method for determining a sequence of a target nucleic acid, comprising:
performing the method of claim 102;
sequencing the nucleic acid library to obtain sequence reads; and
assembling sequence reads to obtain the sequence of a target nucleic acid.

113. The method of claim 112, wherein the assembling comprises determining mutations introduced into the amplified polynucleotides during the mutagenesis PCR and comparing the sequence reads to a reference sequence.

114. A kit comprising:
a first bead-linked transposomes (BLT-1) reagent, wherein the BLT-1 transposomes reagent comprises a first adaptor sequence;
a mutagenesis reagent comprising a first primer, dPTPs, dNTPs, and a polymerase;
a second bead-linked transposomes (BLT-2) reagent, wherein the BLT-2 transposomes reagent comprise the first adaptor and a second adaptor;
an amplification reagent comprising a first primer, a second primer, dNTPs, and a polymerase; and
a plurality of selection probes, wherein each selection probe of the plurality of selection probes comprises a nucleotide sequence capable of hybridizing to a gene selected from TABLE 1A; and/or a nucleotide sequence within no more than 10 kbp 5′ or no more than 10 kbp 3′ of a gene in a human genome selected from TABLE 1A;
wherein BLT-1 has a lower transposome density as compared to BLT-2;
wherein the first primer hybridizes to the first adaptor sequence and the second primer hybridizes to the second adaptor sequence.

115. The kit of claim 114, wherein BLT-2 has more than 10 times the transposome density as compared to BLT-1; and/or the first adaptor is B15 and the second adaptor is A14.

116. The kit of claim 114, comprising a plurality of at least 50 selection probes, wherein the selection probes are different from one another, wherein each selection probe of the plurality of selection probes comprises a nucleotide sequence having at least 90% sequence identity to any one of SEQ ID NOs:02-111831.

117. A system for preparing a nucleic acid library, comprising:
(a) a first plurality of transposomes comprising transposon adaptors for tagmenting a plurality of nucleic acid fragments, wherein the first plurality of transposomes is immobilized on a first plurality of beads at a first density;
(b) reagents for amplifying the plurality of polynucleotides to obtain amplified polynucleotides, wherein the amplifying comprising a mutagenesis PCR and/or a suppression PCR, wherein:
(i) the first reagent for performing mutagenesis PCR comprise a low bias DNA polymerase and/or a nucleotide analogue, and
(ii) the first reagents for performing suppression PCR comprise amplification primers having the same nucleotide sequence capable of hybridizing to the transposon adaptors;
(c) a plurality of selection probes for enriching for target polynucleotides in the amplified polynucleotides, wherein each selection probe of the plurality of selection probes comprises a nucleotide sequence capable of hybridizing to a gene selected from TABLE 1A; and/or a nucleotide sequence within no more than 10 kbp 5′ or no more than 10 kbp 3′ of a gene in a human genome selected from TABLE 1A; and
(d) a second plurality of transposomes comprising library adaptors for adding library adaptors to each end of the amplified polynucleotides, wherein the second plurality of transposomes is immobilized on a second plurality of beads at a second density, wherein the first density is less than the second density.

118. The system of claim 117, wherein the first plurality of the transposomes is immobilized on the first plurality of beads:
(i) at a density such that an average length of the plurality of polynucleotides is greater than about 1 kbp, and/or the average length of the plurality of polynucleotides is in a range from about 1 kbp to about 40 kbp;
(ii) such that the number of transposomes immobilized on the first plurality of beads is no more than about 100 transposomes per bead;
(iii) comprise a total activity such that an average length of the plurality of polynucleotides is greater than about 1 kbp, and/or wherein the average length of the plurality of polynucleotides is in a range from about 1 kbp to about 40 kbp; and/or
(iv) comprise an activity in a range from about 0.05 AU/μl to about 0.25 AU/μl.

119. The system of claim 117, wherein:
(i) an average distance between two adjacent nucleotide sequences of the selection probes on a reference sequence of a genome is in a range from about 300 consecutive nucleotides to about 7,000 consecutive nucleotides;
(ii) an average number of sites in a genome that each selection probe of the plurality of selection probes is capable of hybridizing to is no more than 50 different sites in the genome;
(iii) each selection probe of the plurality of selection probes is capable of hybridizing to no more than 50 different sites in a genome;
(iv) the plurality of selection probes lacks sequences capable of hybridizing to a repetitive genomic DNA element;
(v) the plurality of selection probes comprises at least 50 different selection probes; and/or
(vi) each selection probe of the plurality of selection probes comprises a nucleotide sequence having at least 90% sequence identity to any one of SEQ ID NOs:02-111831.
